United States Patent Application Publication US 2026/0345682 A1, published November 5, 2026 (application 19/113,079).

The application's sequence listing, which the Patent Office published only in electronic form, follows.

SEQUENCE LISTING (37430 sequences)

SEQ ID NO: 1 - RNA, 20 nt, synthetic construct
  source 1..20: mol_type = other RNA
aaaaaacggagtggtgccat

SEQ ID NO: 2 - RNA, 20 nt, synthetic construct
  source 1..20: mol_type = other RNA
aaaaacggagtggtgccatt

SEQ ID NO: 3 - RNA, 20 nt, synthetic construct
  source 1..20: mol_type = other RNA
aaaaatgaaaaggaaaagtc

SEQ ID NO: 4 - RNA, 20 nt, synthetic construct
  source 1..20: mol_type = other RNA
aaaacaaactgaaaacgcaa

SEQ ID NO: 5 - RNA, 20 nt, synthetic construct
  source 1..20: mol_type = other RNA
aaaacctgaggatgagcagc

SEQ ID NO: 6 - RNA, 20 nt, synthetic construct
  source 1..20: mol_type = other RNA
aaaacgcaagccaggctaaa

SEQ ID NO: 7 - RNA, 20 nt, synthetic construct
  source 1..20: mol_type = other RNA
aaaacggagtggtgccattc

SEQ ID NO: 8 - RNA, 20 nt, synthetic construct
  source 1..20: mol_type = other RNA
aaaagaactcagtacctgaa

SEQ ID NO: 9 - RNA, 20 nt, synthetic construct
  source 1..20: mol_type = other RNA
aaaagctttcctccctggag

SEQ ID NO: 10 - RNA, 20 nt, synthetic construct
  source 1..20: mol_type = other RNA
aaaaggaaaagtcagcccca

SEQ ID NO: 11 - RNA, 20 nt, synthetic construct
  source 1..20: mol_type = other RNA
aaaagtcagccccatcacgt

SEQ ID NO: 12 - RNA, 20 nt, synthetic construct
  source 1..20: mol_type = other RNA
aaaagtcaggatgttagcag

SEQ ID NO: 13 - RNA, 20 nt, synthetic construct
  source 1..20: mol_type = other RNA
aaaatgaaaaggaaaagtca

SEQ ID NO: 14 - RNA, 20 nt, synthetic construct
  source 1..20: mol_type = other RNA
aaacaaactgaaaacgcaag

SEQ ID NO: 15 - RNA, 20 nt, synthetic construct
  source 1..20: mol_type = other RNA
aaacagttggcaggtaaatt

SEQ ID NO: 16 - RNA, 20 nt, synthetic construct
  source 1..20: mol_type = other RNA
aaacctgaggatgagcagct

SEQ ID NO: 17 - RNA, 20 nt, synthetic construct
  source 1..20: mol_type = other RNA
aaacgcaagccaggctaaac

SEQ ID NO: 18 - RNA, 20 nt, synthetic construct
  source 1..20: mol_type = other RNA
aaacggagtggtgccattca

SEQ ID NO: 19 - RNA, 20 nt, synthetic construct
  source 1..20: mol_type = other RNA
aaactagaagccaagaaagc

SEQ ID NO: 20 - RNA, 20 nt, synthetic construct
  source 1..20: mol_type = other RNA
aaactcatccacgtcagaga

SEQ ID NO: 21 - RNA, 20 nt, synthetic construct
  source 1..20: mol_type = other RNA
aaactgaaaacgcaagccag

SEQ ID NO: 22 - RNA, 20 nt, synthetic construct
  source 1..20: mol_type = other RNA
aaagaactcagtacctgaat

SEQ ID NO: 23 - RNA, 20 nt, synthetic construct
  source 1..20: mol_type = other RNA
aaagctgcagctgaaaagct

SEQ ID NO: 24 - RNA, 20 nt, synthetic construct
  source 1..20: mol_type = other RNA
aaagctttcctccctggaga

SEQ ID NO: 25 - RNA, 20 nt, synthetic construct
  source 1..20: mol_type = other RNA
aaagcttttcagctgcagct

SEQ ID NO: 26 - RNA, 20 nt, synthetic construct
  source 1..20: mol_type = other RNA
aaaggaaaagtcagccccat

SEQ ID NO: 27 - RNA, 20 nt, synthetic construct
  source 1..20: mol_type = other RNA
aaaggaaactagaagccaag

SEQ ID NO: 28 - RNA, 20 nt, synthetic construct
  source 1..20: mol_type = other RNA
aaaggcagaacgtgaagctg

SEQ ID NO: 29 - RNA, 20 nt, synthetic construct
  source 1..20: mol_type = other RNA
aaagtcagccccatcacgta

SEQ ID NO: 30 - RNA, 20 nt, synthetic construct
  source 1..20: mol_type = other RNA
aaagtcaggatgttagcaga

SEQ ID NO: 31 - RNA, 20 nt, synthetic construct
  source 1..20: mol_type = other RNA
aaagtctctgacgtggatga

SEQ ID NO: 32 - RNA, 20 nt, synthetic construct
  source 1..20: mol_type = other RNA
aaatgaaaaggaaaagtcag

SEQ ID NO: 33 - RNA, 20 nt, synthetic construct
  source 1..20: mol_type = other RNA
aaattctcgattgtcttctc

SEQ ID NO: 34 - RNA, 20 nt, synthetic construct
  source 1..20: mol_type = other RNA
aaatttacctgccaactgtt

SEQ ID NO: 35 - RNA, 20 nt, synthetic construct
  source 1..20: mol_type = other RNA
aacaaactgaaaacgcaagc

SEQ ID NO: 36 - RNA, 20 nt, synthetic construct
  source 1..20: mol_type = other RNA
aacacatttatctacaaatg

SEQ ID NO: 37 - RNA, 20 nt, synthetic construct
  source 1..20: mol_type = other RNA
aacagctcaaataaaaatga

SEQ ID NO: 38 - RNA, 20 nt, synthetic construct
  source 1..20: mol_type = other RNA
aacagttggcaggtaaattt

SEQ ID NO: 39 - RNA, 20 nt, synthetic construct
  source 1..20: mol_type = other RNA
aacatcctgacttttcgccg

SEQ ID NO: 40 - RNA, 20 nt, synthetic construct
  source 1..20: mol_type = other RNA
aacctgaggatgagcagctt

SEQ ID NO: 41 - RNA, 20 nt, synthetic construct
  source 1..20: mol_type = other RNA
aacgcaagccaggctaaaca

SEQ ID NO: 42 - RNA, 20 nt, synthetic construct
  source 1..20: mol_type = other RNA
aacggagtggtgccattcag

SEQ ID NO: 43 - RNA, 20 nt, synthetic construct
  source 1..20: mol_type = other RNA
aacgtgaagctgctcatcct

SEQ ID NO: 44 - RNA, 20 nt, synthetic construct
  source 1..20: mol_type = other RNA
aactagaagccaagaaagct

SEQ ID NO: 45 - RNA, 20 nt, synthetic construct
  source 1..20: mol_type = other RNA
aactcagtacctgaatggca

SEQ ID NO: 46 - RNA, 20 nt, synthetic construct
  source 1..20: mol_type = other RNA
aactcatccacgtcagagac

SEQ ID NO: 47 - RNA, 20 nt, synthetic construct
  source 1..20: mol_type = other RNA
aactgaaaacgcaagccagg

SEQ ID NO: 48 - RNA, 20 nt, synthetic construct
  source 1..20: mol_type = other RNA
aactgtttagcctggcttgc

SEQ ID NO: 49 - RNA, 20 nt, synthetic construct
  source 1..20: mol_type = other RNA
aagaaagctgcagctgaaaa

SEQ ID NO: 50 - RNA, 20 nt, synthetic construct
  source 1..20: mol_type = other RNA
aagaactcagtacctgaatg

SEQ ID NO: 51 - RNA, 20 nt, synthetic construct
  source 1..20: mol_type = other RNA
aagacaatcgagaatttgga

SEQ ID NO: 52 - RNA, 20 nt, synthetic construct
  source 1..20: mol_type = other RNA
aagacttgccgacaaaggaa

SEQ ID NO: 53 - RNA, 20 nt, synthetic construct
  source 1..20: mol_type = other RNA
aagccaagaaagctgcagct

SEQ ID NO: 54 - RNA, 20 nt, synthetic construct
  source 1..20: mol_type = other RNA
aagccaggctaaacagttgg

SEQ ID NO: 55 - RNA, 20 nt, synthetic construct
  source 1..20: mol_type = other RNA
aagctcaggaggagaaaaaa

SEQ ID NO: 56 - RNA, 20 nt, synthetic construct
  source 1..20: mol_type = other RNA
aagctgcagctgaaaagctt

SEQ ID NO: 57 - RNA, 20 nt, synthetic construct
  source 1..20: mol_type = other RNA
aagctgctcatcctcaggtt

SEQ ID NO: 58 - RNA, 20 nt, synthetic construct
  source 1..20: mol_type = other RNA
aagctttcctccctggagaa

SEQ ID NO: 59 - RNA, 20 nt, synthetic construct
  source 1..20: mol_type = other RNA
aagcttttcagctgcagctt

SEQ ID NO: 60 - RNA, 20 nt, synthetic construct
  source 1..20: mol_type = other RNA
aaggaaaagtcagccccatc

SEQ ID NO: 61 - RNA, 20 nt, synthetic construct
  source 1..20: mol_type = other RNA
aaggaaactagaagccaaga

SEQ ID NO: 62 - RNA, 20 nt, synthetic construct
  source 1..20: mol_type = other RNA
aaggcagaacgtgaagctgc

SEQ ID NO: 63 - RNA, 20 nt, synthetic construct
  source 1..20: mol_type = other RNA
aagtaagacattacagcctc

SEQ ID NO: 64 - RNA, 20 nt, synthetic construct
  source 1..20: mol_type = other RNA
aagtcagccccatcacgtac

SEQ ID NO: 65 - RNA, 20 nt, synthetic construct
  source 1..20: mol_type = other RNA
aagtcaggatgttagcagag

SEQ ID NO: 66 - RNA, 20 nt, synthetic construct
  source 1..20: mol_type = other RNA
aagtctctgacgtggatgag

SEQ ID NO: 67 - RNA, 20 nt, synthetic construct
  source 1..20: mol_type = other RNA
aagtcttgactggctctgct

SEQ ID NO: 68 - RNA, 20 nt, synthetic construct
  source 1..20: mol_type = other RNA
aatcgagaatttggaggaaa

SEQ ID NO: 69 - RNA, 20 nt, synthetic construct
  source 1..20: mol_type = other RNA
aatgaaaaggaaaagtcagc

SEQ ID NO: 70 - RNA, 20 nt, synthetic construct
  source 1..20: mol_type = other RNA
aatggcaccactccgttttt

SEQ ID NO: 71 - RNA, 20 nt, synthetic construct
  source 1..20: mol_type = other RNA
aatgtaaagcatttgtagat

SEQ ID NO: 72 - RNA, 20 nt, synthetic construct
  source 1..20: mol_type = other RNA
aatgtcttacttccctacca

SEQ ID NO: 73 - RNA, 20 nt, synthetic construct
  source 1..20: mol_type = other RNA
aattctcgattgtcttctct

SEQ ID NO: 74 - RNA, 20 nt, synthetic construct
  source 1..20: mol_type = other RNA
aatttacctgccaactgttt

SEQ ID NO: 75 - RNA, 20 nt, synthetic construct
  source 1..20: mol_type = other RNA
aatttggaggaaaacctgag

SEQ ID NO: 76 - RNA, 20 nt, synthetic construct
  source 1..20: mol_type = other RNA
acaaaacaaactgaaaacgc

SEQ ID NO: 77 - RNA, 20 nt, synthetic construct
  source 1..20: mol_type = other RNA
acaaactgaaaacgcaagcc

SEQ ID NO: 78 - RNA, 20 nt, synthetic construct
  source 1..20: mol_type = other RNA
acaaaggaaactagaagcca

SEQ ID NO: 79 - RNA, 20 nt, synthetic construct
  source 1..20: mol_type = other RNA
acaaagtctctgacgtggat

SEQ ID NO: 80 - RNA, 20 nt, synthetic construct
  source 1..20: mol_type = other RNA
acaatcgagaatttggagga

SEQ ID NO: 81 - RNA, 20 nt, synthetic construct
  source 1..20: mol_type = other RNA
acacatttatctacaaatgc

SEQ ID NO: 82 - RNA, 20 nt, synthetic construct
  source 1..20: mol_type = other RNA
acactcccaaactcatccac

SEQ ID NO: 83 - RNA, 20 nt, synthetic construct
  source 1..20: mol_type = other RNA
acagctcaaataaaaatgaa

SEQ ID NO: 84 - RNA, 20 nt, synthetic construct
  source 1..20: mol_type = other RNA
acagttggcaggtaaattta

SEQ ID NO: 85 - RNA, 20 nt, synthetic construct
  source 1..20: mol_type = other RNA
acatcctgacttttcgccga

SEQ ID NO: 86 - RNA, 20 nt, synthetic construct
  source 1..20: mol_type = other RNA
acattaaatttacctgccaa

SEQ ID NO: 87 - RNA, 20 nt, synthetic construct
  source 1..20: mol_type = other RNA
acatttatctacaaatgctt

SEQ ID NO: 88 - RNA, 20 nt, synthetic construct
  source 1..20: mol_type = other RNA
accactccgttttttctcct

SEQ ID NO: 89 - RNA, 20 nt, synthetic construct
  source 1..20: mol_type = other RNA
accaggtatgcactctcact

SEQ ID NO: 90 - RNA, 20 nt, synthetic construct
  source 1..20: mol_type = other RNA
acctgaatggcaccactccg

SEQ ID NO: 91 - RNA, 20 nt, synthetic construct
  source 1..20: mol_type = other RNA
acctgaggatgagcagcttc

SEQ ID NO: 92 - RNA, 20 nt, synthetic construct
  source 1..20: mol_type = other RNA
acctgccaactgtttagcct

SEQ ID NO: 93 - RNA, 20 nt, synthetic construct
  source 1..20: mol_type = other RNA
acctggtagggaagtaagac

SEQ ID NO: 94 - RNA, 20 nt, synthetic construct
  source 1..20: mol_type = other RNA
acctgtagttgaggctgtaa

SEQ ID NO: 95 - RNA, 20 nt, synthetic construct
  source 1..20: mol_type = other RNA
acgcaagccaggctaaacag

SEQ ID NO: 96 - RNA, 20 nt, synthetic construct
  source 1..20: mol_type = other RNA
acggagtggtgccattcagg

SEQ ID NO: 97 - RNA, 20 nt, synthetic construct
  source 1..20: mol_type = other RNA
acgtacaaaacaaactgaaa

SEQ ID NO: 98 - RNA, 20 nt, synthetic construct
  source 1..20: mol_type = other RNA
acgtcagagactttgtataa

SEQ ID NO: 99 - RNA, 20 nt, synthetic construct
  source 1..20: mol_type = other RNA
acgtgaagctgctcatcctc

SEQ ID NO: 100 - RNA, 20 nt, synthetic construct
  source 1..20: mol_type = other RNA
acgtgatggggctgactttt

SEQ ID NO: 101 - RNA, 20 nt, synthetic construct
  source 1..20: mol_type = other RNA
acgtggatgagtttgggagt

SEQ ID NO: 102 - RNA, 20 nt, synthetic construct
  source 1..20: mol_type = other RNA
acgttctgcctttatacaaa

SEQ ID NO: 103 - RNA, 20 nt, synthetic construct
  source 1..20: mol_type = other RNA
actagaagccaagaaagctg

SEQ ID NO: 104 - RNA, 20 nt, synthetic construct
  source 1..20: mol_type = other RNA
actagagaagacaatcgaga

SEQ ID NO: 105 - RNA, 20 nt, synthetic construct
  source 1..20: mol_type = other RNA
actcagtacctgaatggcac

SEQ ID NO: 106 - RNA, 20 nt, synthetic construct
  source 1..20: mol_type = other RNA
actcatccacgtcagagact

SEQ ID NO: 107 - RNA, 20 nt, synthetic construct
  source 1..20: mol_type = other RNA
actcccaaactcatccacgt

SEQ ID NO: 108 - RNA, 20 nt, synthetic construct
  source 1..20: mol_type = other RNA
actccgttttttctcctcct

SEQ ID NO: 109 - RNA, 20 nt, synthetic construct
  source 1..20: mol_type = other RNA
actctcactagagaagacaa

SEQ ID NO: 110 - RNA, 20 nt, synthetic construct
  source 1..20: mol_type = other RNA
actgaaaacgcaagccaggc

SEQ ID NO: 111 - RNA, 20 nt, synthetic construct
  source 1..20: mol_type = other RNA
actgagttcttttcggcgaa

SEQ ID NO: 112 - RNA, 20 nt, synthetic construct
  source 1..20: mol_type = other RNA
actggctctgctaacatcct

SEQ ID NO: 113 - RNA, 20 nt, synthetic construct
  source 1..20: mol_type = other RNA
actgtttagcctggcttgcg

SEQ ID NO: 114 - RNA, 20 nt, synthetic construct
  source 1..20: mol_type = other RNA
acttccctaccaggtatgca

SEQ ID NO: 115 - RNA, 20 nt, synthetic construct
  source 1..20: mol_type = other RNA
acttgccgacaaaggaaact

SEQ ID NO: 116 - RNA, 20 nt, synthetic construct
  source 1..20: mol_type = other RNA
actttgtataaaggcagaac

SEQ ID NO: 117 - RNA, 20 nt, synthetic construct
  source 1..20: mol_type = other RNA
acttttcgccgaaaagaact

SEQ ID NO: 118 - RNA, 20 nt, synthetic construct
  source 1..20: mol_type = other RNA
agaaaaaacggagtggtgcc

SEQ ID NO: 119 - RNA, 20 nt, synthetic construct
  source 1..20: mol_type = other RNA
agaaagctgcagctgaaaag

SEQ ID NO: 120 - RNA, 20 nt, synthetic construct
  source 1..20: mol_type = other RNA
agaacagctcaaataaaaat

SEQ ID NO: 121 - RNA, 20 nt, synthetic construct
  source 1..20: mol_type = other RNA
agaacgtgaagctgctcatc

SEQ ID NO: 122 - RNA, 20 nt, synthetic construct
  source 1..20: mol_type = other RNA
agaactcagtacctgaatgg

SEQ ID NO: 123 - RNA, 20 nt, synthetic construct
  source 1..20: mol_type = other RNA
agaagacaatcgagaatttg

SEQ ID NO: 124 - RNA, 20 nt, synthetic construct
  source 1..20: mol_type = other RNA
agaagccaagaaagctgcag

SEQ ID NO: 125 - RNA, 20 nt, synthetic construct
  source 1..20: mol_type = other RNA
agaatttggaggaaaacctg

SEQ ID NO: 126 - RNA, 20 nt, synthetic construct
  source 1..20: mol_type = other RNA
agacaatcgagaatttggag

SEQ ID NO: 127 - RNA, 20 nt, synthetic construct
  source 1..20: mol_type = other RNA
agacttgccgacaaaggaaa

SEQ ID NO: 128 - RNA, 20 nt, synthetic construct
  source 1..20: mol_type = other RNA
agactttgtataaaggcaga

SEQ ID NO: 129 - RNA, 20 nt, synthetic construct
  source 1..20: mol_type = other RNA
agagaagacaatcgagaatt

SEQ ID NO: 130 - RNA, 20 nt, synthetic construct
  source 1..20: mol_type = other RNA
agagactttgtataaaggca

SEQ ID NO: 131 - RNA, 20 nt, synthetic construct
  source 1..20: mol_type = other RNA
agagccagtcaagacttgcc

SEQ ID NO: 132 - RNA, 20 nt, synthetic construct
  source 1..20: mol_type = other RNA
agagtgcatacctggtaggg

SEQ ID NO: 133 - RNA, 20 nt, synthetic construct
  source 1..20: mol_type = other RNA
agcagagccagtcaagactt

SEQ ID NO: 134 - RNA, 20 nt, synthetic construct
  source 1..20: mol_type = other RNA
agcagcttcacgttctgcct

SEQ ID NO: 135 - RNA, 20 nt, synthetic construct
  source 1..20: mol_type = other RNA
agccaagaaagctgcagctg

SEQ ID NO: 136 - RNA, 20 nt, synthetic construct
  source 1..20: mol_type = other RNA
agccaggctaaacagttggc

SEQ ID NO: 137 - RNA, 20 nt, synthetic construct
  source 1..20: mol_type = other RNA
agccagtcaagacttgccga

SEQ ID NO: 138 - RNA, 20 nt, synthetic construct
  source 1..20: mol_type = other RNA
agccccatcacgtacaaaac

SEQ ID NO: 139 - RNA, 20 nt, synthetic construct
  source 1..20: mol_type = other RNA
agcctggcttgcgttttcag

SEQ ID NO: 140 - RNA, 20 nt, synthetic construct
  source 1..20: mol_type = other RNA
agctcaggaggagaaaaaac

SEQ ID NO: 141 - RNA, 20 nt, synthetic construct
  source 1..20: mol_type = other RNA
agctgaaaagctttcctccc

SEQ ID NO: 142 - RNA, 20 nt, synthetic construct
  source 1..20: mol_type = other RNA
agctgcagctgaaaagcttt

SEQ ID NO: 143 - RNA, 20 nt, synthetic construct
  source 1..20: mol_type = other RNA
agctgcagctttcttggctt

SEQ ID NO: 144 - RNA, 20 nt, synthetic construct
  source 1..20: mol_type = other RNA
agctgctcatcctcaggttt

SEQ ID NO: 145 - RNA, 20 nt, synthetic construct
  source 1..20: mol_type = other RNA
agctgttctccagggaggaa

SEQ ID NO: 146 - RNA, 20 nt, synthetic construct
  source 1..20: mol_type = other RNA
agcttcacgttctgccttta

SEQ ID NO: 147 - RNA, 20 nt, synthetic construct
  source 1..20: mol_type = other RNA
agcttccacactcccaaact

SEQ ID NO: 148 - RNA, 20 nt, synthetic construct
  source 1..20: mol_type = other RNA
agctttcctccctggagaac

SEQ ID NO: 149 - RNA, 20 nt, synthetic construct
  source 1..20: mol_type = other RNA
agctttcttggcttctagtt

SEQ ID NO: 150 - RNA, 20 nt, synthetic construct
  source 1..20: mol_type = other RNA
agcttttcagctgcagcttt

SEQ ID NO: 151 - RNA, 20 nt, synthetic construct
  source 1..20: mol_type = other RNA
aggaaaacctgaggatgagc

SEQ ID NO: 152 - RNA, 20 nt, synthetic construct
  source 1..20: mol_type = other RNA
aggaaaagtcagccccatca

SEQ ID NO: 153 - RNA, 20 nt, synthetic construct
  source 1..20: mol_type = other RNA
aggaaactagaagccaagaa

SEQ ID NO: 154 - RNA, 20 nt, synthetic construct
  source 1..20: mol_type = other RNA
aggaaagcttttcagctgca

SEQ ID NO: 155 - RNA, 20 nt, synthetic construct
  source 1..20: mol_type = other RNA
aggagaaaaaacggagtggt

SEQ ID NO: 156 - RNA, 20 nt, synthetic construct
  source 1..20: mol_type = other RNA
aggaggagaaaaaacggagt

SEQ ID NO: 157 - RNA, 20 nt, synthetic construct
  source 1..20: mol_type = other RNA
aggatgagcagcttcacgtt

SEQ ID NO: 158 - RNA, 20 nt, synthetic construct
  source 1..20: mol_type = other RNA
aggatgttagcagagccagt

SEQ ID NO: 159 - RNA, 20 nt, synthetic construct
  source 1..20: mol_type = other RNA
aggcagaacgtgaagctgct

SEQ ID NO: 160 - RNA, 20 nt, synthetic construct
  source 1..20: mol_type = other RNA
aggctaaacagttggcaggt

SEQ ID NO: 161 - RNA, 20 nt, synthetic construct
  source 1..20: mol_type = other RNA
aggctgtaatgtcttacttc

SEQ ID NO: 162 - RNA, 20 nt, synthetic construct
  source 1..20: mol_type = other RNA
agggaagtaagacattacag

SEQ ID NO: 163 - RNA, 20 nt, synthetic construct
  source 1..20: mol_type = other RNA
agggaggaaagcttttcagc

SEQ ID NO: 164 - RNA, 20 nt, synthetic construct
  source 1..20: mol_type = other RNA
aggtaaatttaatgtaaagc

SEQ ID NO: 165 - RNA, 20 nt, synthetic construct
  source 1..20: mol_type = other RNA
aggtactgagttcttttcgg

SEQ ID NO: 166 - RNA, 20 nt, synthetic construct
  source 1..20: mol_type = other RNA
aggtatgcactctcactaga

SEQ ID NO: 167 - RNA, 20 nt, synthetic construct
  source 1..20: mol_type = other RNA
aggttttcctccaaattctc

SEQ ID NO: 168 - RNA, 20 nt, synthetic construct
  source 1..20: mol_type = other RNA
agtaagacattacagcctca

SEQ ID NO: 169 - RNA, 20 nt, synthetic construct
  source 1..20: mol_type = other RNA
agtacctgaatggcaccact

SEQ ID NO: 170 - RNA, 20 nt, synthetic construct
  source 1..20: mol_type = other RNA
agtcaagacttgccgacaaa

SEQ ID NO: 171 - RNA, 20 nt, synthetic construct
  source 1..20: mol_type = other RNA
agtcagccccatcacgtaca

SEQ ID NO: 172 - RNA, 20 nt, synthetic construct
  source 1..20: mol_type = other RNA
agtcaggatgttagcagagc

SEQ ID NO: 173 - RNA, 20 nt, synthetic construct
  source 1..20: mol_type = other RNA
agtctctgacgtggatgagt

SEQ ID NO: 174 - RNA, 20 nt, synthetic construct
  source 1..20: mol_type = other RNA
agtcttgactggctctgcta

SEQ ID NO: 175 - RNA, 20 nt, synthetic construct
  source 1..20: mol_type = other RNA
agtgagagtgcatacctggt

SEQ ID NO: 176 - RNA, 20 nt, synthetic construct
  source 1..20: mol_type = other RNA
agtgcatacctggtagggaa

SEQ ID NO: 177 - RNA, 20 nt, synthetic construct
  source 1..20: mol_type = other RNA
agtggtgccattcaggtact

SEQ ID NO: 178 - RNA, 20 nt, synthetic construct
  source 1..20: mol_type = other RNA
agtgtggaagctcaggagga

SEQ ID NO: 179 - RNA, 20 nt, synthetic construct
  source 1..20: mol_type = other RNA
agttcttttcggcgaaaagt

SEQ ID NO: 180 - RNA, 20 nt, synthetic construct
  source 1..20: mol_type = other RNA
agttgaggctgtaatgtctt

SEQ ID NO: 181 - RNA, 20 nt, synthetic construct
  source 1..20: mol_type = other RNA
agttggcaggtaaatttaat

SEQ ID NO: 182 - RNA, 20 nt, synthetic construct
  source 1..20: mol_type = other RNA
agtttcctttgtcggcaagt

SEQ ID NO: 183 - RNA, 20 nt, synthetic construct
  source 1..20: mol_type = other RNA
agtttgggagtgtggaagct

SEQ ID NO: 184 - RNA, 20 nt, synthetic construct
  source 1..20: mol_type = other RNA
agtttgttttgtacgtgatg

SEQ ID NO: 185 - RNA, 20 nt, synthetic construct
  source 1..20: mol_type = other RNA
ataaaggcagaacgtgaagc

SEQ ID NO: 186 - RNA, 20 nt, synthetic construct
  source 1..20: mol_type = other RNA
atacaaagtctctgacgtgg

SEQ ID NO: 187 - RNA, 20 nt, synthetic construct
  source 1..20: mol_type = other RNA
atacctggtagggaagtaag

SEQ ID NO: 188 - RNA, 20 nt, synthetic construct
  source 1..20: mol_type = other RNA
atcacgtacaaaacaaactg

SEQ ID NO: 189 - RNA, 20 nt, synthetic construct
  source 1..20: mol_type = other RNA
atccacgtcagagactttgt

SEQ ID NO: 190 - RNA, 20 nt, synthetic construct
  source 1..20: mol_type = other RNA
atcctcaggttttcctccaa

SEQ ID NO: 191 - RNA, 20 nt, synthetic construct
  source 1..20: mol_type = other RNA
atcctgacttttcgccgaaa

SEQ ID NO: 192 - RNA, 20 nt, synthetic construct
  source 1..20: mol_type = other RNA
atcgagaatttggaggaaaa

SEQ ID NO: 193 - RNA, 20 nt, synthetic construct
  source 1..20: mol_type = other RNA
atctacaaatgctttacatt

SEQ ID NO: 194 - RNA, 20 nt, synthetic construct
  source 1..20: mol_type = other RNA
atgaaaaggaaaagtcagcc

SEQ ID NO: 195 - RNA, 20 nt, synthetic construct
  source 1..20: mol_type = other RNA
atgagcagcttcacgttctg

SEQ ID NO: 196 - RNA, 20 nt, synthetic construct
  source 1..20: mol_type = other RNA
atgagtttgggagtgtggaa

SEQ ID NO: 197 - RNA, 20 nt, synthetic construct
  source 1..20: mol_type = other RNA
atgcactctcactagagaag

SEQ ID NO: 198 - RNA, 20 nt, synthetic construct
  source 1..20: mol_type = other RNA
atggcaccactccgtttttt

SEQ ID NO: 199 - RNA, 20 nt, synthetic construct
  source 1..20: mol_type = other RNA
atggggctgacttttccttt

SEQ ID NO: 200 - RNA, 20 nt, synthetic construct
  source 1..20: mol_type = other RNA
atgtaaagcatttgtagata

SEQ ID NO: 201 - RNA, 20 nt, synthetic construct
  source 1..20: mol_type = other RNA
atgtcttacttccctaccag

SEQ ID NO: 202 - RNA, 20 nt, synthetic construct
  source 1..20: mol_type = other RNA
atgttagcagagccagtcaa

SEQ ID NO: 203 - RNA, 20 nt, synthetic construct
  source 1..20: mol_type = other RNA
attaaatttacctgccaact

SEQ ID NO: 204 - RNA, 20 nt, synthetic construct
  source 1..20: mol_type = other RNA
attcaggtactgagttcttt

SEQ ID NO: 205 - RNA, 20 nt, synthetic construct
  source 1..20: mol_type = other RNA
attctcgattgtcttctcta

SEQ ID NO: 206 - RNA, 20 nt, synthetic construct
  source 1..20: mol_type = other RNA
attgtcttctctagtgagag

SEQ ID NO: 207 - RNA, 20 nt, synthetic construct
  source 1..20: mol_type = other RNA
atttacctgccaactgttta

SEQ ID NO: 208 - RNA, 20 nt, synthetic construct
  source 1..20: mol_type = other RNA
atttgagctgttctccaggg

SEQ ID NO: 209 - RNA, 20 nt, synthetic construct
  source 1..20: mol_type = other RNA
atttggaggaaaacctgagg

SEQ ID NO: 210 - RNA, 20 nt, synthetic construct
  source 1..20: mol_type = other RNA
atttttatttgagctgttct

SEQ ID NO: 211 - RNA, 20 nt, synthetic construct
  source 1..20: mol_type = other RNA
caaaacaaactgaaaacgca

SEQ ID NO: 212 - RNA, 20 nt, synthetic construct
  source 1..20: mol_type = other RNA
caaactcatccacgtcagag

SEQ ID NO: 213 - RNA, 20 nt, synthetic construct
  source 1..20: mol_type = other RNA
caaactgaaaacgcaagcca

SEQ ID NO: 214 - RNA, 20 nt, synthetic construct
  source 1..20: mol_type = other RNA
caaaggaaactagaagccaa

SEQ ID NO: 215 - RNA, 20 nt, synthetic construct
  source 1..20: mol_type = other RNA
caaagtctctgacgtggatg

SEQ ID NO: 216 - RNA, 20 nt, synthetic construct
  source 1..20: mol_type = other RNA
caaattctcgattgtcttct

SEQ ID NO: 217 - RNA, 20 nt, synthetic construct
  source 1..20: mol_type = other RNA
caacacatttatctacaaat

SEQ ID NO: 218 - RNA, 20 nt, synthetic construct
  source 1..20: mol_type = other RNA
caactgtttagcctggcttg

SEQ ID NO: 219 - RNA, 20 nt, synthetic construct
  source 1..20: mol_type = other RNA
caagaaagctgcagctgaaa

SEQ ID NO: 220 - RNA, 20 nt, synthetic construct
  source 1..20: mol_type = other RNA
caagacttgccgacaaagga

SEQ ID NO: 221 - RNA, 20 nt, synthetic construct
  source 1..20: mol_type = other RNA
caagccaggctaaacagttg

SEQ ID NO: 222 - RNA, 20 nt, synthetic construct
  source 1..20: mol_type = other RNA
caagtcttgactggctctgc

SEQ ID NO: 223 - RNA, 20 nt, synthetic construct
  source 1..20: mol_type = other RNA
caatcgagaatttggaggaa

SEQ ID NO: 224 - RNA, 20 nt, synthetic construct
  source 1..20: mol_type = other RNA
cacactcccaaactcatcca

SEQ ID NO: 225 - RNA, 20 nt, synthetic construct
  source 1..20: mol_type = other RNA
cacatttatctacaaatgct

SEQ ID NO: 226 - RNA, 20 nt, synthetic construct
  source 1..20: mol_type = other RNA
caccactccgttttttctcc

SEQ ID NO: 227 - RNA, 20 nt, synthetic construct
  source 1..20: mol_type = other RNA
cacgtacaaaacaaactgaa

SEQ ID NO: 228 - RNA, 20 nt, synthetic construct
  source 1..20: mol_type = other RNA
cacgtcagagactttgtata

SEQ ID NO: 229 - RNA, 20 nt, synthetic construct
  source 1..20: mol_type = other RNA
cacgttctgcctttatacaa

SEQ ID NO: 230 - RNA, 20 nt, synthetic construct
  source 1..20: mol_type = other RNA
cactagagaagacaatcgag

SEQ ID NO: 231 - RNA, 20 nt, synthetic construct
  source 1..20: mol_type = other RNA
cactcccaaactcatccacg

SEQ ID NO: 232 - RNA, 20 nt, synthetic construct
  source 1..20: mol_type = other RNA
cactccgttttttctcctcc

SEQ ID NO: 233 - RNA, 20 nt, synthetic construct
  source 1..20: mol_type = other RNA
cactctcactagagaagaca

SEQ ID NO: 234 - RNA, 20 nt, synthetic construct
  source 1..20: mol_type = other RNA
cagaacgtgaagctgctcat

SEQ ID NO: 235 - RNA, 20 nt, synthetic construct
  source 1..20: mol_type = other RNA
cagagactttgtataaaggc

SEQ ID NO: 236 - RNA, 20 nt, synthetic construct
  source 1..20: mol_type = other RNA
cagagccagtcaagacttgc

SEQ ID NO: 237 - RNA, 20 nt, synthetic construct
  source 1..20: mol_type = other RNA
cagccccatcacgtacaaaa

SEQ ID NO: 238 - RNA, 20 nt, synthetic construct
  source 1..20: mol_type = other RNA
cagctcaaataaaaatgaaa

SEQ ID NO: 239 - RNA, 20 nt, synthetic construct
  source 1..20: mol_type = other RNA
cagctgaaaagctttcctcc

SEQ ID NO: 240 - RNA, 20 nt, synthetic construct
  source 1..20: mol_type = other RNA
cagctgcagctttcttggct

SEQ ID NO: 241 - RNA, 20 nt, synthetic construct
  source 1..20: mol_type = other RNA
cagcttcacgttctgccttt

SEQ ID NO: 242 - RNA, 20 nt, synthetic construct
  source 1..20: mol_type = other RNA
cagctttcttggcttctagt

SEQ ID NO: 243 - RNA, 20 nt, synthetic construct
  source 1..20: mol_type = other RNA
caggaggagaaaaaacggag

SEQ ID NO: 244 - RNA, 20 nt, synthetic construct
  source 1..20: mol_type = other RNA
caggatgttagcagagccag

SEQ ID NO: 245 - RNA, 20 nt, synthetic construct
  source 1..20: mol_type = other RNA
caggctaaacagttggcagg

SEQ ID NO: 246 - RNA, 20 nt, synthetic construct
  source 1..20: mol_type = other RNA
cagggaggaaagcttttcag

SEQ ID NO: 247 - RNA, 20 nt, synthetic construct
  source 1..20: mol_type = other RNA
caggtaaatttaatgtaaag

SEQ ID NO: 248 - RNA, 20 nt, synthetic construct
  source 1..20: mol_type = other RNA
caggtactgagttcttttcg

SEQ ID NO: 249 - RNA, 20 nt, synthetic construct
  source 1..20: mol_type = other RNA
caggtatgcactctcactag

SEQ ID NO: 250 - RNA, 20 nt, synthetic construct
  source 1..20: mol_type = other RNA
caggttttcctccaaattct

SEQ ID NO: 251 - RNA, 20 nt, synthetic construct
  source 1..20: mol_type = other RNA
cagtacctgaatggcaccac

SEQ ID NO: 252 - RNA, 20 nt, synthetic construct
  source 1..20: mol_type = other RNA
cagtcaagacttgccgacaa

SEQ ID NO: 253 - RNA, 20 nt, synthetic construct
  source 1..20: mol_type = other RNA
cagttggcaggtaaatttaa

SEQ ID NO: 254 - RNA, 20 nt, synthetic construct
  source 1..20: mol_type = other RNA
cagtttgttttgtacgtgat

SEQ ID NO: 255 - RNA, 20 nt, synthetic construct
  source 1..20: mol_type = other RNA
catacctggtagggaagtaa

SEQ ID NO: 256 - RNA, 20 nt, synthetic construct
  source 1..20: mol_type = other RNA
catcacgtacaaaacaaact

SEQ ID NO: 257 - RNA, 20 nt, synthetic construct
  source 1..20: mol_type = other RNA
catccacgtcagagactttg

SEQ ID NO: 258 - RNA, 20 nt, synthetic construct
  source 1..20: mol_type = other RNA
catcctcaggttttcctcca

SEQ ID NO: 259 - RNA, 20 nt, synthetic construct
  source 1..20: mol_type = other RNA
catcctgacttttcgccgaa

SEQ ID NO: 260 - RNA, 20 nt, synthetic construct
  source 1..20: mol_type = other RNA
cattaaatttacctgccaac

SEQ ID NO: 261 - RNA, 20 nt, synthetic construct
  source 1..20: mol_type = other RNA
cattcaggtactgagttctt

SEQ ID NO: 262 - RNA, 20 nt, synthetic construct
  source 1..20: mol_type = other RNA
catttatctacaaatgcttt

SEQ ID NO: 263 - RNA, 20 nt, synthetic construct
  source 1..20: mol_type = other RNA
catttttatttgagctgttc

SEQ ID NO: 264 - RNA, 20 nt, synthetic construct
  source 1..20: mol_type = other RNA
ccaaactcatccacgtcaga

SEQ ID NO: 265 - RNA, 20 nt, synthetic construct
  source 1..20: mol_type = other RNA
ccaaattctcgattgtcttc

SEQ ID NO: 266 - RNA, 20 nt, synthetic construct
  source 1..20: mol_type = other RNA
ccaactgtttagcctggctt

SEQ ID NO: 267 - RNA, 20 nt, synthetic construct
  source 1..20: mol_type = other RNA
ccaagaaagctgcagctgaa

SEQ ID NO: 268 - RNA, 20 nt, synthetic construct
  source 1..20: mol_type = other RNA
ccacactcccaaactcatcc

SEQ ID NO: 269 - RNA, 20 nt, synthetic construct
  source 1..20: mol_type = other RNA
ccacgtcagagactttgtat

SEQ ID NO: 270 - RNA, 20 nt, synthetic construct
  source 1..20: mol_type = other RNA
ccactccgttttttctcctc

SEQ ID NO: 271 - RNA, 20 nt, synthetic construct
  source 1..20: mol_type = other RNA
ccaggctaaacagttggcag

SEQ ID NO: 272 - RNA, 20 nt, synthetic construct
  source 1..20: mol_type = other RNA
ccagggaggaaagcttttca

SEQ ID NO: 273 - RNA, 20 nt, synthetic construct
  source 1..20: mol_type = other RNA
ccaggtatgcactctcacta

SEQ ID NO: 274 - RNA, 20 nt, synthetic construct
  source 1..20: mol_type = other RNA
ccagtcaagacttgccgaca

SEQ ID NO: 275 - RNA, 20 nt, synthetic construct
  source 1..20: mol_type = other RNA
ccatcacgtacaaaacaaac

SEQ ID NO: 276 - RNA, 20 nt, synthetic construct
  source 1..20: mol_type = other RNA
ccattcaggtactgagttct

SEQ ID NO: 277 - RNA, 20 nt, synthetic construct
  source 1..20: mol_type = other RNA
cccaaactcatccacgtcag

SEQ ID NO: 278 - RNA, 20 nt, synthetic construct
  source 1..20: mol_type = other RNA
cccatcacgtacaaaacaaa

SEQ ID NO: 279 - RNA, 20 nt, synthetic construct
  source 1..20: mol_type = other RNA
ccccatcacgtacaaaacaa

SEQ ID NO: 280 - RNA, 20 nt, synthetic construct
  source 1..20: mol_type = other RNA
ccctaccaggtatgcactct

SEQ ID NO: 281 - RNA, 20 nt, synthetic construct
  source 1..20: mol_type = other RNA
ccctggagaacagctcaaat

SEQ ID NO: 282 - RNA, 20 nt, synthetic construct
  source 1..20: mol_type = other RNA
ccgaaaagaactcagtacct

SEQ ID NO: 283 - RNA, 20 nt, synthetic construct
  source 1..20: mol_type = other RNA
ccgacaaaggaaactagaag

SEQ ID NO: 284 - RNA, 20 nt, synthetic construct
  source 1..20: mol_type = other RNA
ccgttttttctcctcctgag

SEQ ID NO: 285 - RNA, 20 nt, synthetic construct
  source 1..20: mol_type = other RNA
cctaccaggtatgcactctc

SEQ ID NO: 286 - RNA, 20 nt, synthetic construct
  source 1..20: mol_type = other RNA
cctcaggttttcctccaaat

SEQ ID NO: 287 - RNA, 20 nt, synthetic construct
  source 1..20: mol_type = other RNA
cctccaaattctcgattgtc

SEQ ID NO: 288 - RNA, 20 nt, synthetic construct
  source 1..20: mol_type = other RNA
cctccctggagaacagctca

SEQ ID NO: 289 - RNA, 20 nt, synthetic construct
  source 1..20: mol_type = other RNA
cctcctgagcttccacactc

SEQ ID NO: 290 - RNA, 20 nt, synthetic construct
  source 1..20: mol_type = other RNA
cctgaatggcaccactccgt

SEQ ID NO: 291 - RNA, 20 nt, synthetic construct
  source 1..20: mol_type = other RNA
cctgacttttcgccgaaaag

SEQ ID NO: 292 - RNA, 20 nt, synthetic construct
  source 1..20: mol_type = other RNA
cctgagcttccacactccca

SEQ ID NO: 293 - RNA, 20 nt, synthetic construct
  source 1..20: mol_type = other RNA
cctgaggatgagcagcttca

SEQ ID NO: 294 - RNA, 20 nt, synthetic construct
  source 1..20: mol_type = other RNA
cctgccaactgtttagcctg

SEQ ID NO: 295 - RNA, 20 nt, synthetic construct
  source 1..20: mol_type = other RNA
cctggagaacagctcaaata

SEQ ID NO: 296 - RNA, 20 nt, synthetic construct
  source 1..20: mol_type = other RNA
cctggcttgcgttttcagtt

SEQ ID NO: 297 - RNA, 20 nt, synthetic construct
  source 1..20: mol_type = other RNA
cctggtagggaagtaagaca

SEQ ID NO: 298 - RNA, 20 nt, synthetic construct
  source 1..20: mol_type = other RNA
cctgtagttgaggctgtaat

SEQ ID NO: 299 - RNA, 20 nt, synthetic construct
  source 1..20: mol_type = other RNA
cctttatacaaagtctctga

SEQ ID NO: 300 - RNA, 20 nt, synthetic construct
  source 1..20: mol_type = other RNA
cctttgtcggcaagtcttga

SEQ ID NO: 301 - RNA, 20 nt, synthetic construct
  source 1..20: mol_type = other RNA
ccttttcatttttatttgag

SEQ ID NO: 302 - RNA, 20 nt, synthetic construct
  source 1..20: mol_type = other RNA
cgaaaagaactcagtacctg

SEQ ID NO: 303 - RNA, 20 nt, synthetic construct
  source 1..20: mol_type = other RNA
cgaaaagtcaggatgttagc

SEQ ID NO: 304 - RNA, 20 nt, synthetic construct
  source 1..20: mol_type = other RNA
cgacaaaggaaactagaagc

SEQ ID NO: 305 - RNA, 20 nt, synthetic construct
  source 1..20: mol_type = other RNA
cgagaatttggaggaaaacc

SEQ ID NO: 306 - RNA, 20 nt, synthetic construct
  source 1..20: mol_type = other RNA
cgattgtcttctctagtgag

SEQ ID NO: 307 - RNA, 20 nt, synthetic construct
  source 1..20: mol_type = other RNA
cgcaagccaggctaaacagt

SEQ ID NO: 308 - RNA, 20 nt, synthetic construct
  source 1..20: mol_type = other RNA
cgccgaaaagaactcagtac

SEQ ID NO: 309 - RNA, 20 nt, synthetic construct
  source 1..20: mol_type = other RNA
cggagtggtgccattcaggt

SEQ ID NO: 310 - RNA, 20 nt, synthetic construct
  source 1..20: mol_type = other RNA
cggcaagtcttgactggctc

SEQ ID NO: 311 - RNA, 20 nt, synthetic construct
  source 1..20: mol_type = other RNA
cggcgaaaagtcaggatgtt

SEQ ID NO: 312 - RNA, 20 nt, synthetic construct
  source 1..20: mol_type = other RNA
cgtacaaaacaaactgaaaa

SEQ ID NO: 313 - RNA, 20 nt, synthetic construct
  source 1..20: mol_type = other RNA
cgtcagagactttgtataaa

SEQ ID NO: 314 - RNA, 20 nt, synthetic construct
  source 1..20: mol_type = other RNA
cgtgaagctgctcatcctca

SEQ ID NO: 315 - RNA, 20 nt, synthetic construct
  source 1..20: mol_type = other RNA
cgtgatggggctgacttttc

SEQ ID NO: 316 - RNA, 20 nt, synthetic construct
  source 1..20: mol_type = other RNA
cgtggatgagtttgggagtg

SEQ ID NO: 317 - RNA, 20 nt, synthetic construct
  source 1..20: mol_type = other RNA
cgttctgcctttatacaaag

SEQ ID NO: 318 - RNA, 20 nt, synthetic construct
  source 1..20: mol_type = other RNA
cgttttcagtttgttttgta

SEQ ID NO: 319 - RNA, 20 nt, synthetic construct
  source 1..20: mol_type = other RNA
cgttttttctcctcctgagc

SEQ ID NO: 320 - RNA, 20 nt, synthetic construct
  source 1..20: mol_type = other RNA
ctaaacagttggcaggtaaa

SEQ ID NO: 321 - RNA, 20 nt, synthetic construct
  source 1..20: mol_type = other RNA
ctaacatcctgacttttcgc

SEQ ID NO: 322 - RNA, 20 nt, synthetic construct
  source 1..20: mol_type = other RNA
ctacaaatgctttacattaa

SEQ ID NO: 323 - RNA, 20 nt, synthetic construct
  source 1..20: mol_type = other RNA
ctaccaggtatgcactctca

SEQ ID NO: 324 - RNA, 20 nt, synthetic construct
  source 1..20: mol_type = other RNA
ctagaagccaagaaagctgc

SEQ ID NO: 325 - RNA, 20 nt, synthetic construct
  source 1..20: mol_type = other RNA
ctagagaagacaatcgagaa

SEQ ID NO: 326 - RNA, 20 nt, synthetic construct
  source 1..20: mol_type = other RNA
ctagtgagagtgcatacctg

SEQ ID NO: 327 - RNA, 20 nt, synthetic construct
  source 1..20: mol_type = other RNA
ctagtttcctttgtcggcaa

SEQ ID NO: 328 - RNA, 20 nt, synthetic construct
  source 1..20: mol_type = other RNA
ctcaaataaaaatgaaaagg

SEQ ID NO: 329 - RNA, 20 nt, synthetic construct
  source 1..20: mol_type = other RNA
ctcactagagaagacaatcg

SEQ ID NO: 330 - RNA, 20 nt, synthetic construct
  source 1..20: mol_type = other RNA
ctcaggaggagaaaaaacgg

SEQ ID NO: 331 - RNA, 20 nt, synthetic construct
  source 1..20: mol_type = other RNA
ctcaggttttcctccaaatt

SEQ ID NO: 332 - RNA, 20 nt, synthetic construct
  source 1..20: mol_type = other RNA
ctcagtacctgaatggcacc

SEQ ID NO: 333 - RNA, 20 nt, synthetic construct
  source 1..20: mol_type = other RNA
ctcatccacgtcagagactt

SEQ ID NO: 334 - RNA, 20 nt, synthetic construct
  source 1..20: mol_type = other RNA
ctcatcctcaggttttcctc

SEQ ID NO: 335 - RNA, 20 nt, synthetic construct
  source 1..20: mol_type = other RNA
ctccaaattctcgattgtct

SEQ ID NO: 336 - RNA, 20 nt, synthetic construct
  source 1..20: mol_type = other RNA
ctccagggaggaaagctttt

SEQ ID NO: 337 - RNA, 20 nt, synthetic construct
  source 1..20: mol_type = other RNA
ctcccaaactcatccacgtc

SEQ ID NO: 338 - RNA, 20 nt, synthetic construct
  source 1..20: mol_type = other RNA
ctccctggagaacagctcaa

SEQ ID NO: 339 - RNA, 20 nt, synthetic construct
  source 1..20: mol_type = other RNA
ctccgttttttctcctcctg

SEQ ID NO: 340 - RNA, 20 nt, synthetic construct
  source 1..20: mol_type = other RNA
ctcctcctgagcttccacac

SEQ ID NO: 341 - RNA, 20 nt, synthetic construct
  source 1..20: mol_type = other RNA
ctcctgagcttccacactcc

SEQ ID NO: 342 - RNA, 20 nt, synthetic construct
  source 1..20: mol_type = other RNA
ctcgattgtcttctctagtg

SEQ ID NO: 343 - RNA, 20 nt, synthetic construct
  source 1..20: mol_type = other RNA
ctctagtgagagtgcatacc

SEQ ID NO: 344 - RNA, 20 nt, synthetic construct
  source 1..20: mol_type = other RNA
ctctcactagagaagacaat

SEQ ID NO: 345 - RNA, 20 nt, synthetic construct
  source 1..20: mol_type = other RNA
ctctgacgtggatgagtttg

SEQ ID NO: 346 - RNA, 20 nt, synthetic construct
  source 1..20: mol_type = other RNA
ctctgctaacatcctgactt

SEQ ID NO: 347 - RNA, 20 nt, synthetic construct
  source 1..20: mol_type = other RNA
ctgaaaacgcaagccaggct

SEQ ID NO: 348 - RNA, 20 nt, synthetic construct
  source 1..20: mol_type = other RNA
ctgaaaagctttcctccctg

SEQ ID NO: 349 - RNA, 20 nt, synthetic construct
  source 1..20: mol_type = other RNA
ctgaatggcaccactccgtt

SEQ ID NO: 350 - RNA, 20 nt, synthetic construct
  source 1..20: mol_type = other RNA
ctgacgtggatgagtttggg

SEQ ID NO: 351 - RNA, 20 nt, synthetic construct
  source 1..20: mol_type = other RNA
ctgacttttccttttcattt

SEQ ID NO: 352 - RNA, 20 nt, synthetic construct
  source 1..20: mol_type = other RNA
ctgacttttcgccgaaaaga

SEQ ID NO: 353 - RNA, 20 nt, synthetic construct
  source 1..20: mol_type = other RNA
ctgagcttccacactcccaa

SEQ ID NO: 354 - RNA, 20 nt, synthetic construct
  source 1..20: mol_type = other RNA
ctgaggatgagcagcttcac

SEQ ID NO: 355 - RNA, 20 nt, synthetic construct
  source 1..20: mol_type = other RNA
ctgagttcttttcggcgaaa

SEQ ID NO: 356 - RNA, 20 nt, synthetic construct
  source 1..20: mol_type = other RNA
ctgcagctgaaaagctttcc

SEQ ID NO: 357 - RNA, 20 nt, synthetic construct
  source 1..20: mol_type = other RNA
ctgcagctttcttggcttct

SEQ ID NO: 358 - RNA, 20 nt, synthetic construct
  source 1..20: mol_type = other RNA
ctgccaactgtttagcctgg

SEQ ID NO: 359 - RNA, 20 nt, synthetic construct
  source 1..20: mol_type = other RNA
ctgcctttatacaaagtctc

SEQ ID NO: 360 - RNA, 20 nt, synthetic construct
  source 1..20: mol_type = other RNA
ctgctaacatcctgactttt

SEQ ID NO: 361 - RNA, 20 nt, synthetic construct
  source 1..20: mol_type = other RNA
ctgctcatcctcaggttttc

SEQ ID NO: 362 - RNA, 20 nt, synthetic construct
  source 1..20: mol_type = other RNA
ctggagaacagctcaaataa

SEQ ID NO: 363 - RNA, 20 nt, synthetic construct
  source 1..20: mol_type = other RNA
ctggctctgctaacatcctg

SEQ ID NO: 364 - RNA, 20 nt, synthetic construct
  source 1..20: mol_type = other RNA
ctggcttgcgttttcagttt

SEQ ID NO: 365 - RNA, 20 nt, synthetic construct
  source 1..20: mol_type = other RNA
ctggtagggaagtaagacat

SEQ ID NO: 366 - RNA, 20 nt, synthetic construct
  source 1..20: mol_type = other RNA
ctgtaatgtcttacttccct

SEQ ID NO: 367 - RNA, 20 nt, synthetic construct
  source 1..20: mol_type = other RNA
ctgtagttgaggctgtaatg

SEQ ID NO: 368 - RNA, 20 nt, synthetic construct
  source 1..20: mol_type = other RNA
ctgttctccagggaggaaag

SEQ ID NO: 369 - RNA, 20 nt, synthetic construct
  source 1..20: mol_type = other RNA
ctgtttagcctggcttgcgt

SEQ ID NO: 370 - RNA, 20 nt, synthetic construct
  source 1..20: mol_type = other RNA
cttacttccctaccaggtat

SEQ ID NO: 371 - RNA, 20 nt, synthetic construct
  source 1..20: mol_type = other RNA
cttcacgttctgcctttata

SEQ ID NO: 372 - RNA, 20 nt, synthetic construct
  source 1..20: mol_type = other RNA
cttccacactcccaaactca

SEQ ID NO: 373 - RNA, 20 nt, synthetic construct
  source 1..20: mol_type = other RNA
cttccctaccaggtatgcac

SEQ ID NO: 374 - RNA, 20 nt, synthetic construct
  source 1..20: mol_type = other RNA
cttctagtttcctttgtcgg

SEQ ID NO: 375 - RNA, 20 nt, synthetic construct
  source 1..20: mol_type = other RNA
cttctctagtgagagtgcat

SEQ ID NO: 376 - RNA, 20 nt, synthetic construct
  source 1..20: mol_type = other RNA
cttgactggctctgctaaca

SEQ ID NO: 377 - RNA, 20 nt, synthetic construct
  source 1..20: mol_type = other RNA
cttgccgacaaaggaaacta

SEQ ID NO: 378 - RNA, 20 nt, synthetic construct
  source 1..20: mol_type = other RNA
cttgcgttttcagtttgttt

SEQ ID NO: 379 - RNA, 20 nt, synthetic construct
  source 1..20: mol_type = other RNA
cttggcttctagtttccttt

SEQ ID NO: 380 - RNA, 20 nt, synthetic construct
  source 1..20: mol_type = other RNA
ctttacattaaatttacctg

SEQ ID NO: 381 - RNA, 20 nt, synthetic construct
  source 1..20: mol_type = other RNA
ctttatacaaagtctctgac

SEQ ID NO: 382 - RNA, 20 nt, synthetic construct
  source 1..20: mol_type = other RNA
ctttcctccctggagaacag

SEQ ID NO: 383 - RNA, 20 nt, synthetic construct
  source 1..20: mol_type = other RNA
ctttcttggcttctagtttc

SEQ ID NO: 384 - RNA, 20 nt, synthetic construct
  source 1..20: mol_type = other RNA
ctttgtataaaggcagaacg

SEQ ID NO: 385 - RNA, 20 nt, synthetic construct
  source 1..20: mol_type = other RNA
ctttgtcggcaagtcttgac

SEQ ID NO: 386 - RNA, 20 nt, synthetic construct
  source 1..20: mol_type = other RNA
cttttcagctgcagctttct

SEQ ID NO: 387 - RNA, 20 nt, synthetic construct
  source 1..20: mol_type = other RNA
cttttcatttttatttgagc

SEQ ID NO: 388 - RNA, 20 nt, synthetic construct
  source 1..20: mol_type = other RNA
cttttcgccgaaaagaactc

SEQ ID NO: 389 - RNA, 20 nt, synthetic construct
  source 1..20: mol_type = other RNA
cttttcggcgaaaagtcagg

SEQ ID NO: 390 - RNA, 20 nt, synthetic construct
  source 1..20: mol_type = other RNA
gaaaaaacggagtggtgcca

SEQ ID NO: 391 - RNA, 20 nt, synthetic construct
  source 1..20: mol_type = other RNA
gaaaacctgaggatgagcag

SEQ ID NO: 392 - RNA, 20 nt, synthetic construct
  source 1..20: mol_type = other RNA
gaaaacgcaagccaggctaa

SEQ ID NO: 393 - RNA, 20 nt, synthetic construct
  source 1..20: mol_type = other RNA
gaaaagaactcagtacctga

SEQ ID NO: 394 - RNA, 20 nt, synthetic construct
  source 1..20: mol_type = other RNA
gaaaagctttcctccctgga

SEQ ID NO: 395 - RNA, 20 nt, synthetic construct
  source 1..20: mol_type = other RNA
gaaaaggaaaagtcagcccc

SEQ ID NO: 396 - RNA, 20 nt, synthetic construct
  source 1..20: mol_type = other RNA
gaaaagtcagccccatcacg

SEQ ID NO: 397 - RNA, 20 nt, synthetic construct
  source 1..20: mol_type = other RNA
gaaaagtcaggatgttagca

SEQ ID NO: 398 - RNA, 20 nt, synthetic construct
  source 1..20: mol_type = other RNA
gaaactagaagccaagaaag

SEQ ID NO: 399 - RNA, 20 nt, synthetic construct
  source 1..20: mol_type = other RNA
gaaagctgcagctgaaaagc

SEQ ID NO: 400 - RNA, 20 nt, synthetic construct
  source 1..20: mol_type = other RNA
gaaagcttttcagctgcagc

SEQ ID NO: 401 - RNA, 20 nt, synthetic construct
  source 1..20: mol_type = other RNA
gaacagctcaaataaaaatg

SEQ ID NO: 402 - RNA, 20 nt, synthetic construct
  source 1..20: mol_type = other RNA
gaacgtgaagctgctcatcc

SEQ ID NO: 403 - RNA, 20 nt, synthetic construct
  source 1..20: mol_type = other RNA
gaactcagtacctgaatggc

SEQ ID NO: 404 - RNA, 20 nt, synthetic construct
  source 1..20: mol_type = other RNA
gaagacaatcgagaatttgg

SEQ ID NO: 405 - RNA, 20 nt, synthetic construct
  source 1..20: mol_type = other RNA
gaagccaagaaagctgcagc

SEQ ID NO: 406 - RNA, 20 nt, synthetic construct
  source 1..20: mol_type = other RNA
gaagctcaggaggagaaaaa

SEQ ID NO: 407 - RNA, 20 nt, synthetic construct
  source 1..20: mol_type = other RNA
gaagctgctcatcctcaggt

SEQ ID NO: 408 - RNA, 20 nt, synthetic construct
  source 1..20: mol_type = other RNA
gaagtaagacattacagcct

SEQ ID NO: 409 - RNA, 20 nt, synthetic construct
  source 1..20: mol_type = other RNA
gaatggcaccactccgtttt

SEQ ID NO: 410 - RNA, 20 nt, synthetic construct
  source 1..20: mol_type = other RNA
gaatttggaggaaaacctga

SEQ ID NO: 411 - RNA, 20 nt, synthetic construct
  source 1..20: mol_type = other RNA
gacaaaggaaactagaagcc

SEQ ID NO: 412 - RNA, 20 nt, synthetic construct
  source 1..20: mol_type = other RNA
gacaatcgagaatttggagg

SEQ ID NO: 413 - RNA, 20 nt, synthetic construct
  source 1..20: mol_type = other RNA
gacgtggatgagtttgggag

SEQ ID NO: 414 - RNA, 20 nt, synthetic construct
  source 1..20: mol_type = other RNA
gactggctctgctaacatcc

SEQ ID NO: 415 - RNA, 20 nt, synthetic construct
  source 1..20: mol_type = other RNA
gacttgccgacaaaggaaac

SEQ ID NO: 416 - RNA, 20 nt, synthetic construct
  source 1..20: mol_type = other RNA
gactttgtataaaggcagaa

SEQ ID NO: 417 - RNA, 20 nt, synthetic construct
  source 1..20: mol_type = other RNA
gacttttccttttcattttt

SEQ ID NO: 418 - RNA, 20 nt, synthetic construct
  source 1..20: mol_type = other RNA
gacttttcgccgaaaagaac

SEQ ID NO: 419 - RNA, 20 nt, synthetic construct
  source 1..20: mol_type = other RNA
gagaaaaaacggagtggtgc

SEQ ID NO: 420 - RNA, 20 nt, synthetic construct
  source 1..20: mol_type = other RNA
gagaacagctcaaataaaaa

SEQ ID NO: 421 - RNA, 20 nt, synthetic construct
  source 1..20: mol_type = other RNA
gagaagacaatcgagaattt

SEQ ID NO: 422 - RNA, 20 nt, synthetic construct
  source 1..20: mol_type = other RNA
gagaatttggaggaaaacct

SEQ ID NO: 423 - RNA, 20 nt, synthetic construct
  source 1..20: mol_type = other RNA
gagactttgtataaaggcag

SEQ ID NO: 424 - RNA, 20 nt, synthetic construct
  source 1..20: mol_type = other RNA
gagagtgcatacctggtagg

SEQ ID NO: 425 - RNA, 20 nt, synthetic construct
  source 1..20: mol_type = other RNA
gagcagcttcacgttctgcc

SEQ ID NO: 426 - RNA, 20 nt, synthetic construct
  source 1..20: mol_type = other RNA
gagccagtcaagacttgccg

SEQ ID NO: 427 - RNA, 20 nt, synthetic construct
  source 1..20: mol_type = other RNA
gagctgttctccagggagga

SEQ ID NO: 428 - RNA, 20 nt, synthetic construct
  source 1..20: mol_type = other RNA
gagcttccacactcccaaac

SEQ ID NO: 429 - RNA, 20 nt, synthetic construct
  source 1..20: mol_type = other RNA
gaggaaaacctgaggatgag

SEQ ID NO: 430 - RNA, 20 nt, synthetic construct
  source 1..20: mol_type = other RNA
gaggaaagcttttcagctgc

SEQ ID NO: 431 - RNA, 20 nt, synthetic construct
  source 1..20: mol_type = other RNA
gaggagaaaaaacggagtgg

SEQ ID NO: 432 - RNA, 20 nt, synthetic construct
  source 1..20: mol_type = other RNA
gaggatgagcagcttcacgt

SEQ ID NO: 433 - RNA, 20 nt, synthetic construct
  source 1..20: mol_type = other RNA
gaggctgtaatgtcttactt

SEQ ID NO: 434 - RNA, 20 nt, synthetic construct
  source 1..20: mol_type = other RNA
gagtgcatacctggtaggga

SEQ ID NO: 435 - RNA, 20 nt, synthetic construct
  source 1..20: mol_type = other RNA
gagtggtgccattcaggtac

SEQ ID NO: 436 - RNA, 20 nt, synthetic construct
  source 1..20: mol_type = other RNA
gagtgtggaagctcaggagg

SEQ ID NO: 437 - RNA, 20 nt, synthetic construct
  source 1..20: mol_type = other RNA
gagttcttttcggcgaaaag

SEQ ID NO: 438 - RNA, 20 nt, synthetic construct
  source 1..20: mol_type = other RNA
gagtttgggagtgtggaagc

SEQ ID NO: 439 - RNA, 20 nt, synthetic construct
  source 1..20: mol_type = other RNA
gatgagcagcttcacgttct

SEQ ID NO: 440 - RNA, 20 nt, synthetic construct
  source 1..20: mol_type = other RNA
gatgagtttgggagtgtgga

SEQ ID NO: 441 - RNA, 20 nt, synthetic construct
  source 1..20: mol_type = other RNA
gatggggctgacttttcctt

SEQ ID NO: 442 - RNA, 20 nt, synthetic construct
  source 1..20: mol_type = other RNA
gatgttagcagagccagtca

SEQ ID NO: 443 - RNA, 20 nt, synthetic construct
  source 1..20: mol_type = other RNA
gattgtcttctctagtgaga

SEQ ID NO: 444 - RNA, 20 nt, synthetic construct
  source 1..20: mol_type = other RNA
gcaagccaggctaaacagtt

SEQ ID NO: 445 - RNA, 20 nt, synthetic construct
  source 1..20: mol_type = other RNA
gcaagtcttgactggctctg

SEQ ID NO: 446 - RNA, 20 nt, synthetic construct
  source 1..20: mol_type = other RNA
gcaccactccgttttttctc

SEQ ID NO: 447 - RNA, 20 nt, synthetic construct
  source 1..20: mol_type = other RNA
gcactctcactagagaagac

SEQ ID NO: 448 - RNA, 20 nt, synthetic construct
  source 1..20: mol_type = other RNA
gcagaacgtgaagctgctca

SEQ ID NO: 449 - RNA, 20 nt, synthetic construct
  source 1..20: mol_type = other RNA
gcagagccagtcaagacttg

SEQ ID NO: 450 - RNA, 20 nt, synthetic construct
  source 1..20: mol_type = other RNA
gcagctgaaaagctttcctc

SEQ ID NO: 451 - RNA, 20 nt, synthetic construct
  source 1..20: mol_type = other RNA
gcagcttcacgttctgcctt

SEQ ID NO: 452 - RNA, 20 nt, synthetic construct
  source 1..20: mol_type = other RNA
gcagctttcttggcttctag

SEQ ID NO: 453 - RNA, 20 nt, synthetic construct
  source 1..20: mol_type = other RNA
gcaggtaaatttaatgtaaa

SEQ ID NO: 454 - RNA, 20 nt, synthetic construct
  source 1..20: mol_type = other RNA
gcatacctggtagggaagta

SEQ ID NO: 455 - RNA, 20 nt, synthetic construct
  source 1..20: mol_type = other RNA
gccaactgtttagcctggct

SEQ ID NO: 456 - RNA, 20 nt, synthetic construct
  source 1..20: mol_type = other RNA
gccaagaaagctgcagctga

SEQ ID NO: 457 - RNA, 20 nt, synthetic construct
  source 1..20: mol_type = other RNA
gccaggctaaacagttggca

SEQ ID NO: 458 - RNA, 20 nt, synthetic construct
  source 1..20: mol_type = other RNA
gccagtcaagacttgccgac

SEQ ID NO: 459 - RNA, 20 nt, synthetic construct
  source 1..20: mol_type = other RNA
gccattcaggtactgagttc

SEQ ID NO: 460 - RNA, 20 nt, synthetic construct
  source 1..20: mol_type = other RNA
gccccatcacgtacaaaaca

SEQ ID NO: 461 - RNA, 20 nt, synthetic construct
  source 1..20: mol_type = other RNA
gccgaaaagaactcagtacc

SEQ ID NO: 462 - RNA, 20 nt, synthetic construct
  source 1..20: mol_type = other RNA
gccgacaaaggaaactagaa

SEQ ID NO: 463 - RNA, 20 nt, synthetic construct
  source 1..20: mol_type = other RNA
gcctggcttgcgttttcagt

SEQ ID NO: 464 - RNA, 20 nt, synthetic construct
  source 1..20: mol_type = other RNA
gcctttatacaaagtctctg

SEQ ID NO: 465 - RNA, 20 nt, synthetic construct
  source 1..20: mol_type = other RNA
gcgaaaagtcaggatgttag

SEQ ID NO: 466 - RNA, 20 nt, synthetic construct
  source 1..20: mol_type = other RNA
gcgttttcagtttgttttgt

SEQ ID NO: 467 - RNA, 20 nt, synthetic construct
  source 1..20: mol_type = other RNA
gctaaacagttggcaggtaa

SEQ ID NO: 468 - RNA, 20 nt, synthetic construct
  source 1..20: mol_type = other RNA
gctaacatcctgacttttcg

SEQ ID NO: 469 - RNA, 20 nt, synthetic construct
  source 1..20: mol_type = other RNA
gctcaaataaaaatgaaaag

SEQ ID NO: 470 - RNA, 20 nt, synthetic construct
  source 1..20: mol_type = other RNA
gctcaggaggagaaaaaacg

SEQ ID NO: 471 - RNA, 20 nt, synthetic construct
  source 1..20: mol_type = other RNA
gctcatcctcaggttttcct

SEQ ID NO: 472 - RNA, 20 nt, synthetic construct
  source 1..20: mol_type = other RNA
gctctgctaacatcctgact

SEQ ID NO: 473 - RNA, 20 nt, synthetic construct
  source 1..20: mol_type = other RNA
gctgaaaagctttcctccct

SEQ ID NO: 474 - RNA, 20 nt, synthetic construct
  source 1..20: mol_type = other RNA
gctgacttttccttttcatt

SEQ ID NO: 475 - RNA, 20 nt, synthetic construct
  source 1..20: mol_type = other RNA
gctgcagctgaaaagctttc

SEQ ID NO: 476 - RNA, 20 nt, synthetic construct
  source 1..20: mol_type = other RNA
gctgcagctttcttggcttc

SEQ ID NO: 477 - RNA, 20 nt, synthetic construct
  source 1..20: mol_type = other RNA
gctgctcatcctcaggtttt

SEQ ID NO: 478 - RNA, 20 nt, synthetic construct
  source 1..20: mol_type = other RNA
gctgtaatgtcttacttccc

SEQ ID NO: 479 - RNA, 20 nt, synthetic construct
  source 1..20: mol_type = other RNA
gctgttctccagggaggaaa

SEQ ID NO: 480 - RNA, 20 nt, synthetic construct
  source 1..20: mol_type = other RNA
gcttcacgttctgcctttat

SEQ ID NO: 481 - RNA, 20 nt, synthetic construct
  source 1..20: mol_type = other RNA
gcttccacactcccaaactc

SEQ ID NO: 482 - RNA, 20 nt, synthetic construct
  source 1..20: mol_type = other RNA
gcttctagtttcctttgtcg

SEQ ID NO: 483 - RNA, 20 nt, synthetic construct
  source 1..20: mol_type = other RNA
gcttgcgttttcagtttgtt

SEQ ID NO: 484 - RNA, 20 nt, synthetic construct
  source 1..20: mol_type = other RNA
gctttacattaaatttacct

SEQ ID NO: 485 - RNA, 20 nt, synthetic construct
  source 1..20: mol_type = other RNA
gctttcctccctggagaaca

SEQ ID NO: 486 - RNA, 20 nt, synthetic construct
  source 1..20: mol_type = other RNA
gctttcttggcttctagttt

SEQ ID NO: 487 - RNA, 20 nt, synthetic construct
  source 1..20: mol_type = other RNA
gcttttcagctgcagctttc

SEQ ID NO: 488 - RNA, 20 nt, synthetic construct
  source 1..20: mol_type = other RNA
ggaaaacctgaggatgagca

SEQ ID NO: 489 - RNA, 20 nt, synthetic construct
  source 1..20: mol_type = other RNA
ggaaaagtcagccccatcac

SEQ ID NO: 490 - RNA, 20 nt, synthetic construct
  source 1..20: mol_type = other RNA
ggaaactagaagccaagaaa

SEQ ID NO: 491 - RNA, 20 nt, synthetic construct
  source 1..20: mol_type = other RNA
ggaaagcttttcagctgcag

SEQ ID NO: 492 - RNA, 20 nt, synthetic construct
  source 1..20: mol_type = other RNA
ggaagctcaggaggagaaaa

SEQ ID NO: 493 - RNA, 20 nt, synthetic construct
  source 1..20: mol_type = other RNA
ggaagtaagacattacagcc

SEQ ID NO: 494 - RNA, 20 nt, synthetic construct
  source 1..20: mol_type = other RNA
ggagaaaaaacggagtggtg

SEQ ID NO: 495 - RNA, 20 nt, synthetic construct
  source 1..20: mol_type = other RNA
ggagaacagctcaaataaaa

SEQ ID NO: 496 - RNA, 20 nt, synthetic construct
  source 1..20: mol_type = other RNA
ggaggaaaacctgaggatga

SEQ ID NO: 497 - RNA, 20 nt, synthetic construct
  source 1..20: mol_type = other RNA
ggaggaaagcttttcagctg

SEQ ID NO: 498 - RNA, 20 nt, synthetic construct
  source 1..20: mol_type = other RNA
ggaggagaaaaaacggagtg

SEQ ID NO: 499 - RNA, 20 nt, synthetic construct
  source 1..20: mol_type = other RNA
ggagtggtgccattcaggta

SEQ ID NO: 500 - RNA, 20 nt, synthetic construct
  source 1..20: mol_type = other RNA
ggagtgtggaagctcaggag

SEQ ID NO: 501 - RNA, 20 nt, synthetic construct
  source 1..20: mol_type = other RNA
ggatgagcagcttcacgttc

SEQ ID NO: 502 - RNA, 20 nt, synthetic construct
  source 1..20: mol_type = other RNA
ggatgagtttgggagtgtgg

SEQ ID NO: 503 - RNA, 20 nt, synthetic construct
  source 1..20: mol_type = other RNA
ggatgttagcagagccagtc

SEQ ID NO: 504 - RNA, 20 nt, synthetic construct
  source 1..20: mol_type = other RNA
ggcaagtcttgactggctct

SEQ ID NO: 505 - RNA, 20 nt, synthetic construct
  source 1..20: mol_type = other RNA
ggcaccactccgttttttct

SEQ ID NO: 506 - RNA, 20 nt, synthetic construct
  source 1..20: mol_type = other RNA
ggcagaacgtgaagctgctc

SEQ ID NO: 507 - RNA, 20 nt, synthetic construct
  source 1..20: mol_type = other RNA
ggcaggtaaatttaatgtaa

SEQ ID NO: 508 - RNA, 20 nt, synthetic construct
  source 1..20: mol_type = other RNA
ggcgaaaagtcaggatgtta

SEQ ID NO: 509 - RNA, 20 nt, synthetic construct
  source 1..20: mol_type = other RNA
ggctaaacagttggcaggta

SEQ ID NO: 510 - RNA, 20 nt, synthetic construct
  source 1..20: mol_type = other RNA
ggctctgctaacatcctgac

SEQ ID NO: 511 - RNA, 20 nt, synthetic construct
  source 1..20: mol_type = other RNA
ggctgacttttccttttcat

SEQ ID NO: 512 - RNA, 20 nt, synthetic construct
  source 1..20: mol_type = other RNA
ggctgtaatgtcttacttcc

SEQ ID NO: 513 - RNA, 20 nt, synthetic construct
  source 1..20: mol_type = other RNA
ggcttctagtttcctttgtc

SEQ ID NO: 514 - RNA, 20 nt, synthetic construct
  source 1..20: mol_type = other RNA
ggcttgcgttttcagtttgt

SEQ ID NO: 515 - RNA, 20 nt, synthetic construct
  source 1..20: mol_type = other RNA
gggaagtaagacattacagc

SEQ ID NO: 516 - RNA, 20 nt, synthetic construct
  source 1..20: mol_type = other RNA
gggaggaaagcttttcagct

SEQ ID NO: 517 - RNA, 20 nt, synthetic construct
  source 1..20: mol_type = other RNA
gggagtgtggaagctcagga

SEQ ID NO: 518 - RNA, 20 nt, synthetic construct
  source 1..20: mol_type = other RNA
gggctgacttttccttttca

SEQ ID NO: 519 - RNA, 20 nt, synthetic construct
  source 1..20: mol_type = other RNA
ggggctgacttttccttttc

SEQ ID NO: 520 - RNA, 20 nt, synthetic construct
  source 1..20: mol_type = other RNA
ggtaaatttaatgtaaagca

SEQ ID NO: 521 - RNA, 20 nt, synthetic construct
  source 1..20: mol_type = other RNA
ggtactgagttcttttcggc

SEQ ID NO: 522 - RNA, 20 nt, synthetic construct
  source 1..20: mol_type = other RNA
ggtagggaagtaagacatta

SEQ ID NO: 523 - RNA, 20 nt, synthetic construct
  source 1..20: mol_type = other RNA
ggtatgcactctcactagag

SEQ ID NO: 524 - RNA, 20 nt, synthetic construct
  source 1..20: mol_type = other RNA
ggtgccattcaggtactgag

SEQ ID NO: 525 - RNA, 20 nt, synthetic construct
  source 1..20: mol_type = other RNA
ggttttcctccaaattctcg

SEQ ID NO: 526 - RNA, 20 nt, synthetic construct
  source 1..20: mol_type = other RNA
gtaagacattacagcctcaa

SEQ ID NO: 527 - RNA, 20 nt, synthetic construct
  source 1..20: mol_type = other RNA
gtaatgtcttacttccctac

SEQ ID NO: 528 - RNA, 20 nt, synthetic construct
  source 1..20: mol_type = other RNA
gtacaaaacaaactgaaaac

SEQ ID NO: 529 - RNA, 20 nt, synthetic construct
  source 1..20: mol_type = other RNA
gtacctgaatggcaccactc

SEQ ID NO: 530 - RNA, 20 nt, synthetic construct
  source 1..20: mol_type = other RNA
gtacgtgatggggctgactt

SEQ ID NO: 531 - RNA, 20 nt, synthetic construct
  source 1..20: mol_type = other RNA
gtactgagttcttttcggcg

SEQ ID NO: 532 - RNA, 20 nt, synthetic construct
  source 1..20: mol_type = other RNA
gtagggaagtaagacattac

SEQ ID NO: 533 - RNA, 20 nt, synthetic construct
  source 1..20: mol_type = other RNA
gtagttgaggctgtaatgtc

SEQ ID NO: 534 - RNA, 20 nt, synthetic construct
  source 1..20: mol_type = other RNA
gtataaaggcagaacgtgaa

SEQ ID NO: 535 - RNA, 20 nt, synthetic construct
  source 1..20: mol_type = other RNA
gtatgcactctcactagaga

SEQ ID NO: 536 - RNA, 20 nt, synthetic construct
  source 1..20: mol_type = other RNA
gtcaagacttgccgacaaag

SEQ ID NO: 537 - RNA, 20 nt, synthetic construct
  source 1..20: mol_type = other RNA
gtcagagactttgtataaag

SEQ ID NO: 538 - RNA, 20 nt, synthetic construct
  source 1..20: mol_type = other RNA
gtcagccccatcacgtacaa

SEQ ID NO: 539 - RNA, 20 nt, synthetic construct
  source 1..20: mol_type = other RNA
gtcaggatgttagcagagcc

SEQ ID NO: 540 - RNA, 20 nt, synthetic construct
  source 1..20: mol_type = other RNA
gtcggcaagtcttgactggc

SEQ ID NO: 541 - RNA, 20 nt, synthetic construct
  source 1..20: mol_type = other RNA
gtctctgacgtggatgagtt

SEQ ID NO: 542 - RNA, 20 nt, synthetic construct
  source 1..20: mol_type = other RNA
gtcttacttccctaccaggt

SEQ ID NO: 543 - RNA, 20 nt, synthetic construct
  source 1..20: mol_type = other RNA
gtcttctctagtgagagtgc

SEQ ID NO: 544 - RNA, 20 nt, synthetic construct
  source 1..20: mol_type = other RNA
gtcttgactggctctgctaa

SEQ ID NO: 545 - RNA, 20 nt, synthetic construct
  source 1..20: mol_type = other RNA
gtgaagctgctcatcctcag

SEQ ID NO: 546 - RNA, 20 nt, synthetic construct
  source 1..20: mol_type = other RNA
gtgagagtgcatacctggta

SEQ ID NO: 547 - RNA, 20 nt, synthetic construct
  source 1..20: mol_type = other RNA
gtgatggggctgacttttcc

SEQ ID NO: 548 - RNA, 20 nt, synthetic construct
  source 1..20: mol_type = other RNA
gtgcatacctggtagggaag

SEQ ID NO: 549 - RNA, 20 nt, synthetic construct
  source 1..20: mol_type = other RNA
gtgccattcaggtactgagt

SEQ ID NO: 550 - RNA, 20 nt, synthetic construct
  source 1..20: mol_type = other RNA
gtggaagctcaggaggagaa

SEQ ID NO: 551 - RNA, 20 nt, synthetic construct
  source 1..20: mol_type = other RNA
gtggatgagtttgggagtgt

SEQ ID NO: 552 - RNA, 20 nt, synthetic construct
  source 1..20: mol_type = other RNA
gtggtgccattcaggtactg

SEQ ID NO: 553 - RNA, 20 nt, synthetic construct
  source 1..20: mol_type = other RNA
gtgtggaagctcaggaggag

SEQ ID NO: 554 - RNA, 20 nt, synthetic construct
  source 1..20: mol_type = other RNA
gttagcagagccagtcaaga

SEQ ID NO: 555 - RNA, 20 nt, synthetic construct
  source 1..20: mol_type = other RNA
gttctccagggaggaaagct

SEQ ID NO: 556 - RNA, 20 nt, synthetic construct
  source 1..20: mol_type = other RNA
gttctgcctttatacaaagt

SEQ ID NO: 557 - RNA, 20 nt, synthetic construct
  source 1..20: mol_type = other RNA
gttcttttcggcgaaaagtc

SEQ ID NO: 558 - RNA, 20 nt, synthetic construct
  source 1..20: mol_type = other RNA
gttgaggctgtaatgtctta

SEQ ID NO: 559 - RNA, 20 nt, synthetic construct
  source 1..20: mol_type = other RNA
gttggcaggtaaatttaatg

SEQ ID NO: 560 - RNA, 20 nt, synthetic construct
  source 1..20: mol_type = other RNA
gtttagcctggcttgcgttt

SEQ ID NO: 561 - RNA, 20 nt, synthetic construct
  source 1..20: mol_type = other RNA
gtttcctttgtcggcaagtc

SEQ ID NO: 562 - RNA, 20 nt, synthetic construct
  source 1..20: mol_type = other RNA
gtttgggagtgtggaagctc

SEQ ID NO: 563 - RNA, 20 nt, synthetic construct
  source 1..20: mol_type = other RNA
gtttgttttgtacgtgatgg

SEQ ID NO: 564 - RNA, 20 nt, synthetic construct
  source 1..20: mol_type = other RNA
gttttcagtttgttttgtac

SEQ ID NO: 565 - RNA, 20 nt, synthetic construct
  source 1..20: mol_type = other RNA
gttttcctccaaattctcga

SEQ ID NO: 566 - RNA, 20 nt, synthetic construct
  source 1..20: mol_type = other RNA
gttttgtacgtgatggggct

SEQ ID NO: 567 - RNA, 20 nt, synthetic construct
  source 1..20: mol_type = other RNA
gttttttctcctcctgagct

SEQ ID NO: 568 - RNA, 20 nt, synthetic construct
  source 1..20: mol_type = other RNA
taaacagttggcaggtaaat

SEQ ID NO: 569 - RNA, 20 nt, synthetic construct
  source 1..20: mol_type = other RNA
taaaggcagaacgtgaagct

SEQ ID NO: 570 - RNA, 20 nt, synthetic construct
  source 1..20: mol_type = other RNA
taaatttacctgccaactgt

SEQ ID NO: 571 - RNA, 20 nt, synthetic construct
  source 1..20: mol_type = other RNA
taacatcctgacttttcgcc

SEQ ID NO: 572 - RNA, 20 nt, synthetic construct
  source 1..20: mol_type = other RNA
taatgtaaagcatttgtaga

SEQ ID NO: 573 - RNA, 20 nt, synthetic construct
  source 1..20: mol_type = other RNA
taatgtcttacttccctacc

SEQ ID NO: 574 - RNA, 20 nt, synthetic construct
  source 1..20: mol_type = other RNA
tacaaaacaaactgaaaacg

SEQ ID NO: 575 - RNA, 20 nt, synthetic construct
  source 1..20: mol_type = other RNA
tacaaagtctctgacgtgga

SEQ ID NO: 576 - RNA, 20 nt, synthetic construct
  source 1..20: mol_type = other RNA
tacattaaatttacctgcca

SEQ ID NO: 577 - RNA, 20 nt, synthetic construct
  source 1..20: mol_type = other RNA
taccaggtatgcactctcac

SEQ ID NO: 578 - RNA, 20 nt, synthetic construct
  source 1..20: mol_type = other RNA
tacctgaatggcaccactcc

SEQ ID NO: 579 - RNA, 20 nt, synthetic construct
  source 1..20: mol_type = other RNA
tacctgccaactgtttagcc

SEQ ID NO: 580 - RNA, 20 nt, synthetic construct
  source 1..20: mol_type = other RNA
tacctggtagggaagtaaga

SEQ ID NO: 581 - RNA, 20 nt, synthetic construct
  source 1..20: mol_type = other RNA
tacgtgatggggctgacttt

SEQ ID NO: 582 - RNA, 20 nt, synthetic construct
  source 1..20: mol_type = other RNA
tactgagttcttttcggcga

SEQ ID NO: 583 - RNA, 20 nt, synthetic construct
  source 1..20: mol_type = other RNA
tacttccctaccaggtatgc

SEQ ID NO: 584 - RNA, 20 nt, synthetic construct
  source 1..20: mol_type = other RNA
tagaagccaagaaagctgca

SEQ ID NO: 585 - RNA, 20 nt, synthetic construct
  source 1..20: mol_type = other RNA
tagagaagacaatcgagaat

SEQ ID NO: 586 - RNA, 20 nt, synthetic construct
  source 1..20: mol_type = other RNA
tagcagagccagtcaagact

SEQ ID NO: 587 - RNA, 20 nt, synthetic construct
  source 1..20: mol_type = other RNA
tagcctggcttgcgttttca

SEQ ID NO: 588 - RNA, 20 nt, synthetic construct
  source 1..20: mol_type = other RNA
tagggaagtaagacattaca

SEQ ID NO: 589 - RNA, 20 nt, synthetic construct
  source 1..20: mol_type = other RNA
tagtgagagtgcatacctgg

SEQ ID NO: 590 - RNA, 20 nt, synthetic construct
  source 1..20: mol_type = other RNA
tagttgaggctgtaatgtct

SEQ ID NO: 591 - RNA, 20 nt, synthetic construct
  source 1..20: mol_type = other RNA
tagtttcctttgtcggcaag

SEQ ID NO: 592 - RNA, 20 nt, synthetic construct
  source 1..20: mol_type = other RNA
tataaaggcagaacgtgaag

SEQ ID NO: 593 - RNA, 20 nt, synthetic construct
  source 1..20: mol_type = other RNA
tatacaaagtctctgacgtg

SEQ ID NO: 594 - RNA, 20 nt, synthetic construct
  source 1..20: mol_type = other RNA
tatctacaaatgctttacat

SEQ ID NO: 595 - RNA, 20 nt, synthetic construct
  source 1..20: mol_type = other RNA
tatgcactctcactagagaa

SEQ ID NO: 596 - RNA, 20 nt, synthetic construct
  source 1..20: mol_type = other RNA
tatttgagctgttctccagg

SEQ ID NO: 597 - RNA, 20 nt, synthetic construct
  source 1..20: mol_type = other RNA
tcaagacttgccgacaaagg

SEQ ID NO: 598 - RNA, 20 nt, synthetic construct
  source 1..20: mol_type = other RNA
tcacgtacaaaacaaactga

SEQ ID NO: 599 - RNA, 20 nt, synthetic construct
  source 1..20: mol_type = other RNA
tcacgttctgcctttataca

SEQ ID NO: 600 - RNA, 20 nt, synthetic construct
  source 1..20: mol_type = other RNA
tcactagagaagacaatcga

SEQ ID NO: 601 - RNA, 20 nt, synthetic construct
  source 1..20: mol_type = other RNA
tcagagactttgtataaagg

SEQ ID NO: 602 - RNA, 20 nt, synthetic construct
  source 1..20: mol_type = other RNA
tcagccccatcacgtacaaa

SEQ ID NO: 603 - RNA, 20 nt, synthetic construct
  source 1..20: mol_type = other RNA
tcagctgcagctttcttggc

SEQ ID NO: 604 - RNA, 20 nt, synthetic construct
  source 1..20: mol_type = other RNA
tcaggaggagaaaaaacgga

SEQ ID NO: 605 - RNA, 20 nt, synthetic construct
  source 1..20: mol_type = other RNA
tcaggatgttagcagagcca

SEQ ID NO: 606 - RNA, 20 nt, synthetic construct
  source 1..20: mol_type = other RNA
tcaggtactgagttcttttc

SEQ ID NO: 607 - RNA, 20 nt, synthetic construct
  source 1..20: mol_type = other RNA
tcaggttttcctccaaattc

SEQ ID NO: 608 - RNA, 20 nt, synthetic construct
  source 1..20: mol_type = other RNA
tcagtacctgaatggcacca

SEQ ID NO: 609 - RNA, 20 nt, synthetic construct
  source 1..20: mol_type = other RNA
tcagtttgttttgtacgtga

SEQ ID NO: 610 - RNA, 20 nt, synthetic construct
  source 1..20: mol_type = other RNA
tcatccacgtcagagacttt

SEQ ID NO: 611 - RNA, 20 nt, synthetic construct
  source 1..20: mol_type = other RNA
tcatcctcaggttttcctcc

SEQ ID NO: 612 - RNA, 20 nt, synthetic construct
  source 1..20: mol_type = other RNA
tcatttttatttgagctgtt

SEQ ID NO: 613 - RNA, 20 nt, synthetic construct
  source 1..20: mol_type = other RNA
tccaaattctcgattgtctt

SEQ ID NO: 614 - RNA, 20 nt, synthetic construct
  source 1..20: mol_type = other RNA
tccacactcccaaactcatc

SEQ ID NO: 615 - RNA, 20 nt, synthetic construct
  source 1..20: mol_type = other RNA
tccacgtcagagactttgta

SEQ ID NO: 616 - RNA, 20 nt, synthetic construct
  source 1..20: mol_type = other RNA
tccagggaggaaagcttttc

SEQ ID NO: 617 - RNA, 20 nt, synthetic construct
  source 1..20: mol_type = other RNA
tcccaaactcatccacgtca

SEQ ID NO: 618 - RNA, 20 nt, synthetic construct
  source 1..20: mol_type = other RNA
tccctaccaggtatgcactc

SEQ ID NO: 619 - RNA, 20 nt, synthetic construct
  source 1..20: mol_type = other RNA
tccctggagaacagctcaaa

SEQ ID NO: 620 - RNA, 20 nt, synthetic construct
  source 1..20: mol_type = other RNA
tccgttttttctcctcctga

SEQ ID NO: 621 - RNA, 20 nt, synthetic construct
  source 1..20: mol_type = other RNA
tcctcaggttttcctccaaa

SEQ ID NO: 622 - RNA, 20 nt, synthetic construct
  source 1..20: mol_type = other RNA
tcctccaaattctcgattgt

SEQ ID NO: 623 - RNA, 20 nt, synthetic construct
  source 1..20: mol_type = other RNA
tcctccctggagaacagctc

SEQ ID NO: 624 - RNA, 20 nt, synthetic construct
  source 1..20: mol_type = other RNA
tcctcctgagcttccacact

SEQ ID NO: 625 - RNA, 20 nt, synthetic construct
  source 1..20: mol_type = other RNA
tcctgacttttcgccgaaaa

SEQ ID NO: 626 - RNA, 20 nt, synthetic construct
  source 1..20: mol_type = other RNA
tcctgagcttccacactccc

SEQ ID NO: 627 - RNA, 20 nt, synthetic construct
  source 1..20: mol_type = other RNA
tcctttgtcggcaagtcttg

SEQ ID NO: 628 - RNA, 20 nt, synthetic construct
  source 1..20: mol_type = other RNA
tcgagaatttggaggaaaac

SEQ ID NO: 629 - RNA, 20 nt, synthetic construct
  source 1..20: mol_type = other RNA
tcgattgtcttctctagtga

SEQ ID NO: 630 - RNA, 20 nt, synthetic construct
  source 1..20: mol_type = other RNA
tcgccgaaaagaactcagta

SEQ ID NO: 631 - RNA, 20 nt, synthetic construct
  source 1..20: mol_type = other RNA
tcggcaagtcttgactggct

SEQ ID NO: 632 - RNA, 20 nt, synthetic construct
  source 1..20: mol_type = other RNA
tcggcgaaaagtcaggatgt

SEQ ID NO: 633 - RNA, 20 nt, synthetic construct
  source 1..20: mol_type = other RNA
tctacaaatgctttacatta

SEQ ID NO: 634 - RNA, 20 nt, synthetic construct
  source 1..20: mol_type = other RNA
tctagtgagagtgcatacct

SEQ ID NO: 635 - RNA, 20 nt, synthetic construct
  source 1..20: mol_type = other RNA
tctagtttcctttgtcggca

SEQ ID NO: 636 - RNA, 20 nt, synthetic construct
  source 1..20: mol_type = other RNA
tctcactagagaagacaatc

SEQ ID NO: 637 - RNA, 20 nt, synthetic construct
  source 1..20: mol_type = other RNA
tctccagggaggaaagcttt

SEQ ID NO: 638 - RNA, 20 nt, synthetic construct
  source 1..20: mol_type = other RNA
tctcctcctgagcttccaca

SEQ ID NO: 639 - RNA, 20 nt, synthetic construct
  source 1..20: mol_type = other RNA
tctcgattgtcttctctagt

SEQ ID NO: 640 - RNA, 20 nt, synthetic construct
  source 1..20: mol_type = other RNA
tctctagtgagagtgcatac

SEQ ID NO: 641 - RNA, 20 nt, synthetic construct
  source 1..20: mol_type = other RNA
tctctgacgtggatgagttt

SEQ ID NO: 642 - RNA, 20 nt, synthetic construct
  source 1..20: mol_type = other RNA
tctgacgtggatgagtttgg

SEQ ID NO: 643 - RNA, 20 nt, synthetic construct
  source 1..20: mol_type = other RNA
tctgcctttatacaaagtct

SEQ ID NO: 644 - RNA, 20 nt, synthetic construct
  source 1..20: mol_type = other RNA
tctgctaacatcctgacttt

SEQ ID NO: 645 - RNA, 20 nt, synthetic construct
  source 1..20: mol_type = other RNA
tcttacttccctaccaggta

SEQ ID NO: 646 - RNA, 20 nt, synthetic construct
  source 1..20: mol_type = other RNA
tcttctctagtgagagtgca

SEQ ID NO: 647 - RNA, 20 nt, synthetic construct
  source 1..20: mol_type = other RNA
tcttgactggctctgctaac

SEQ ID NO: 648 - RNA, 20 nt, synthetic construct
  source 1..20: mol_type = other RNA
tcttggcttctagtttcctt

SEQ ID NO: 649 - RNA, 20 nt, synthetic construct
  source 1..20: mol_type = other RNA
tcttttcggcgaaaagtcag

SEQ ID NO: 650 - RNA, 20 nt, synthetic construct
  source 1..20: mol_type = other RNA
tgaaaacgcaagccaggcta

SEQ ID NO: 651 - RNA, 20 nt, synthetic construct
  source 1..20: mol_type = other RNA
tgaaaagctttcctccctgg

SEQ ID NO: 652 - RNA, 20 nt, synthetic construct
  source 1..20: mol_type = other RNA
tgaaaaggaaaagtcagccc

SEQ ID NO: 653 - RNA, 20 nt, synthetic construct
  source 1..20: mol_type = other RNA
tgaagctgctcatcctcagg

SEQ ID NO: 654 - RNA, 20 nt, synthetic construct
  source 1..20: mol_type = other RNA
tgaatggcaccactccgttt

SEQ ID NO: 655 - RNA, 20 nt, synthetic construct
  source 1..20: mol_type = other RNA
tgacgtggatgagtttggga

SEQ ID NO: 656 - RNA, 20 nt, synthetic construct
  source 1..20: mol_type = other RNA
tgactggctctgctaacatc

SEQ ID NO: 657 - RNA, 20 nt, synthetic construct
  source 1..20: mol_type = other RNA
tgacttttccttttcatttt

SEQ ID NO: 658 - RNA, 20 nt, synthetic construct
  source 1..20: mol_type = other RNA
tgacttttcgccgaaaagaa

SEQ ID NO: 659 - RNA, 20 nt, synthetic construct
  source 1..20: mol_type = other RNA
tgagagtgcatacctggtag

SEQ ID NO: 660 - RNA, 20 nt, synthetic construct
  source 1..20: mol_type = other RNA
tgagcagcttcacgttctgc

SEQ ID NO: 661 - RNA, 20 nt, synthetic construct
  source 1..20: mol_type = other RNA
tgagctgttctccagggagg

SEQ ID NO: 662 - RNA, 20 nt, synthetic construct
  source 1..20: mol_type = other RNA
tgagcttccacactcccaaa

SEQ ID NO: 663 - RNA, 20 nt, synthetic construct
  source 1..20: mol_type = other RNA
tgaggatgagcagcttcacg

SEQ ID NO: 664 - RNA, 20 nt, synthetic construct
  source 1..20: mol_type = other RNA
tgaggctgtaatgtcttact

SEQ ID NO: 665 - RNA, 20 nt, synthetic construct
  source 1..20: mol_type = other RNA
tgagttcttttcggcgaaaa

SEQ ID NO: 666 - RNA, 20 nt, synthetic construct
  source 1..20: mol_type = other RNA
tgagtttgggagtgtggaag

SEQ ID NO: 667 - RNA, 20 nt, synthetic construct
  source 1..20: mol_type = other RNA
tgatggggctgacttttcct

SEQ ID NO: 668 - RNA, 20 nt, synthetic construct
  source 1..20: mol_type = other RNA
tgcactctcactagagaaga

SEQ ID NO: 669 - RNA, 20 nt, synthetic construct
  source 1..20: mol_type = other RNA
tgcagctgaaaagctttcct

SEQ ID NO: 670 - RNA, 20 nt, synthetic construct
  source 1..20: mol_type = other RNA
tgcagctttcttggcttcta

SEQ ID NO: 671 - RNA, 20 nt, synthetic construct
  source 1..20: mol_type = other RNA
tgcatacctggtagggaagt

SEQ ID NO: 672 - RNA, 20 nt, synthetic construct
  source 1..20: mol_type = other RNA
tgccaactgtttagcctggc

SEQ ID NO: 673 - RNA, 20 nt, synthetic construct
  source 1..20: mol_type = other RNA
tgccattcaggtactgagtt

SEQ ID NO: 674 - RNA, 20 nt, synthetic construct
  source 1..20: mol_type = other RNA
tgccgacaaaggaaactaga

SEQ ID NO: 675 - RNA, 20 nt, synthetic construct
  source 1..20: mol_type = other RNA
tgcctttatacaaagtctct

SEQ ID NO: 676 - RNA, 20 nt, synthetic construct
  source 1..20: mol_type = other RNA
tgcgttttcagtttgttttg

SEQ ID NO: 677 - RNA, 20 nt, synthetic construct
  source 1..20: mol_type = other RNA
tgctaacatcctgacttttc

SEQ ID NO: 678 - RNA, 20 nt, synthetic construct
  source 1..20: mol_type = other RNA
tgctcatcctcaggttttcc

SEQ ID NO: 679 - RNA, 20 nt, synthetic construct
  source 1..20: mol_type = other RNA
tgctttacattaaatttacc

SEQ ID NO: 680 - RNA, 20 nt, synthetic construct
  source 1..20: mol_type = other RNA
tggaagctcaggaggagaaa

SEQ ID NO: 681 - RNA, 20 nt, synthetic construct
  source 1..20: mol_type = other RNA
tggagaacagctcaaataaa

SEQ ID NO: 682 - RNA, 20 nt, synthetic construct
  source 1..20: mol_type = other RNA
tggaggaaaacctgaggatg

SEQ ID NO: 683 - RNA, 20 nt, synthetic construct
  source 1..20: mol_type = other RNA
tggatgagtttgggagtgtg

SEQ ID NO: 684 - RNA, 20 nt, synthetic construct
  source 1..20: mol_type = other RNA
tggcaccactccgttttttc

SEQ ID NO: 685 - RNA, 20 nt, synthetic construct
  source 1..20: mol_type = other RNA
tggcaggtaaatttaatgta

SEQ ID NO: 686 - RNA, 20 nt, synthetic construct
  source 1..20: mol_type = other RNA
tggctctgctaacatcctga

SEQ ID NO: 687 - RNA, 20 nt, synthetic construct
  source 1..20: mol_type = other RNA
tggcttctagtttcctttgt

SEQ ID NO: 688 - RNA, 20 nt, synthetic construct
  source 1..20: mol_type = other RNA
tggcttgcgttttcagtttg

SEQ ID NO: 689 - RNA, 20 nt, synthetic construct
  source 1..20: mol_type = other RNA
tgggagtgtggaagctcagg

SEQ ID NO: 690 - RNA, 20 nt, synthetic construct
  source 1..20: mol_type = other RNA
tggggctgacttttcctttt

SEQ ID NO: 691 - RNA, 20 nt, synthetic construct
  source 1..20: mol_type = other RNA
tggtagggaagtaagacatt

SEQ ID NO: 692 - RNA, 20 nt, synthetic construct
  source 1..20: mol_type = other RNA
tggtgccattcaggtactga

SEQ ID NO: 693 - RNA, 20 nt, synthetic construct
  source 1..20: mol_type = other RNA
tgtaaagcatttgtagataa

SEQ ID NO: 694 - RNA, 20 nt, synthetic construct
  source 1..20: mol_type = other RNA
tgtaatgtcttacttcccta

SEQ ID NO: 695 - RNA, 20 nt, synthetic construct
  source 1..20: mol_type = other RNA
tgtacgtgatggggctgact

SEQ ID NO: 696 - RNA, 20 nt, synthetic construct
  source 1..20: mol_type = other RNA
tgtagttgaggctgtaatgt

SEQ ID NO: 697 - RNA, 20 nt, synthetic construct
  source 1..20: mol_type = other RNA
tgtataaaggcagaacgtga

SEQ ID NO: 698 - RNA, 20 nt, synthetic construct
  source 1..20: mol_type = other RNA
tgtcggcaagtcttgactgg

SEQ ID NO: 699 - RNA, 20 nt, synthetic construct
  source 1..20: mol_type = other RNA
tgtcttacttccctaccagg

SEQ ID NO: 700 - RNA, 20 nt, synthetic construct
  source 1..20: mol_type = other RNA
tgtcttctctagtgagagtg

SEQ ID NO: 701 - RNA, 20 nt, synthetic construct
  source 1..20: mol_type = other RNA
tgtggaagctcaggaggaga

SEQ ID NO: 702 - RNA, 20 nt, synthetic construct
  source 1..20: mol_type = other RNA
tgttagcagagccagtcaag

SEQ ID NO: 703 - RNA, 20 nt, synthetic construct
  source 1..20: mol_type = other RNA
tgttctccagggaggaaagc

SEQ ID NO: 704 - RNA, 20 nt, synthetic construct
  source 1..20: mol_type = other RNA
tgtttagcctggcttgcgtt

SEQ ID NO: 705 - RNA, 20 nt, synthetic construct
  source 1..20: mol_type = other RNA
tgttttgtacgtgatggggc

SEQ ID NO: 706 - RNA, 20 nt, synthetic construct
  source 1..20: mol_type = other RNA
ttaaatttacctgccaactg

SEQ ID NO: 707 - RNA, 20 nt, synthetic construct
  source 1..20: mol_type = other RNA
ttaatgtaaagcatttgtag

SEQ ID NO: 708 - RNA, 20 nt, synthetic construct
  source 1..20: mol_type = other RNA
ttacattaaatttacctgcc

SEQ ID NO: 709 - RNA, 20 nt, synthetic construct
  source 1..20: mol_type = other RNA
ttacctgccaactgtttagc

SEQ ID NO: 710 - RNA, 20 nt, synthetic construct
  source 1..20: mol_type = other RNA
ttacttccctaccaggtatg

SEQ ID NO: 711 - RNA, 20 nt, synthetic construct
  source 1..20: mol_type = other RNA
ttagcagagccagtcaagac

SEQ ID NO: 712 - RNA, 20 nt, synthetic construct
  source 1..20: mol_type = other RNA
ttagcctggcttgcgttttc

SEQ ID NO: 713 - RNA, 20 nt, synthetic construct
  source 1..20: mol_type = other RNA
ttatacaaagtctctgacgt

SEQ ID NO: 714 - RNA, 20 nt, synthetic construct
  source 1..20: mol_type = other RNA
ttatctacaaatgctttaca

SEQ ID NO: 715 - RNA, 20 nt, synthetic construct
  source 1..20: mol_type = other RNA
ttatttgagctgttctccag

SEQ ID NO: 716 - RNA, 20 nt, synthetic construct
  source 1..20: mol_type = other RNA
ttcacgttctgcctttatac

SEQ ID NO: 717 - RNA, 20 nt, synthetic construct
  source 1..20: mol_type = other RNA
ttcagctgcagctttcttgg

SEQ ID NO: 718 - RNA, 20 nt, synthetic construct
  source 1..20: mol_type = other RNA
ttcaggtactgagttctttt

SEQ ID NO: 719 - RNA, 20 nt, synthetic construct
  source 1..20: mol_type = other RNA
ttcagtttgttttgtacgtg

SEQ ID NO: 720 - RNA, 20 nt, synthetic construct
  source 1..20: mol_type = other RNA
ttcatttttatttgagctgt

SEQ ID NO: 721 - RNA, 20 nt, synthetic construct
  source 1..20: mol_type = other RNA
ttccacactcccaaactcat

SEQ ID NO: 722 - RNA, 20 nt, synthetic construct
  source 1..20: mol_type = other RNA
ttccctaccaggtatgcact

SEQ ID NO: 723 - RNA, 20 nt, synthetic construct
  source 1..20: mol_type = other RNA
ttcctccaaattctcgattg

SEQ ID NO: 724 - RNA, 20 nt, synthetic construct
  source 1..20: mol_type = other RNA
ttcctccctggagaacagct

SEQ ID NO: 725 - RNA, 20 nt, synthetic construct
  source 1..20: mol_type = other RNA
ttcctttgtcggcaagtctt

SEQ ID NO: 726 - RNA, 20 nt, synthetic construct
  source 1..20: mol_type = other RNA
ttcgccgaaaagaactcagt

SEQ ID NO: 727 - RNA, 20 nt, synthetic construct
  source 1..20: mol_type = other RNA
ttcggcgaaaagtcaggatg

SEQ ID NO: 728 - RNA, 20 nt, synthetic construct
  source 1..20: mol_type = other RNA
ttctagtttcctttgtcggc

SEQ ID NO: 729 - RNA, 20 nt, synthetic construct
  source 1..20: mol_type = other RNA
ttctccagggaggaaagctt

SEQ ID NO: 730 - RNA, 20 nt, synthetic construct
  source 1..20: mol_type = other RNA
ttctcctcctgagcttccac

SEQ ID NO: 731 - RNA, 20 nt, synthetic construct
  source 1..20: mol_type = other RNA
ttctcgattgtcttctctag

SEQ ID NO: 732 - RNA, 20 nt, synthetic construct
  source 1..20: mol_type = other RNA
ttctctagtgagagtgcata

SEQ ID NO: 733 - RNA, 20 nt, synthetic construct
  source 1..20: mol_type = other RNA
ttctgcctttatacaaagtc

SEQ ID NO: 734 - RNA, 20 nt, synthetic construct
  source 1..20: mol_type = other RNA
ttcttggcttctagtttcct

SEQ ID NO: 735 - RNA, 20 nt, synthetic construct
  source 1..20: mol_type = other RNA
ttcttttcggcgaaaagtca

SEQ ID NO: 736 - RNA, 20 nt, synthetic construct
  source 1..20: mol_type = other RNA
ttgactggctctgctaacat

SEQ ID NO: 737 - RNA, 20 nt, synthetic construct
  source 1..20: mol_type = other RNA
ttgagctgttctccagggag

SEQ ID NO: 738 - RNA, 20 nt, synthetic construct
  source 1..20: mol_type = other RNA
ttgaggctgtaatgtcttac

SEQ ID NO: 739 - RNA, 20 nt, synthetic construct
  source 1..20: mol_type = other RNA
ttgccgacaaaggaaactag

SEQ ID NO: 740 - RNA, 20 nt, synthetic construct
  source 1..20: mol_type = other RNA
ttgcgttttcagtttgtttt

SEQ ID NO: 741 - RNA, 20 nt, synthetic construct
  source 1..20: mol_type = other RNA
ttggaggaaaacctgaggat

SEQ ID NO: 742 - RNA, 20 nt, synthetic construct
  source 1..20: mol_type = other RNA
ttggcaggtaaatttaatgt

SEQ ID NO: 743 - RNA, 20 nt, synthetic construct
  source 1..20: mol_type = other RNA
ttggcttctagtttcctttg

SEQ ID NO: 744 - RNA, 20 nt, synthetic construct
  source 1..20: mol_type = other RNA
ttgggagtgtggaagctcag

SEQ ID NO: 745 - RNA, 20 nt, synthetic construct
  source 1..20: mol_type = other RNA
ttgtacgtgatggggctgac

SEQ ID NO: 746 - RNA, 20 nt, synthetic construct
  source 1..20: mol_type = other RNA
ttgtataaaggcagaacgtg

SEQ ID NO: 747 - RNA, 20 nt, synthetic construct
  source 1..20: mol_type = other RNA
ttgtcggcaagtcttgactg

SEQ ID NO: 748 - RNA, 20 nt, synthetic construct
  source 1..20: mol_type = other RNA
ttgtcttctctagtgagagt

SEQ ID NO: 749 - RNA, 20 nt, synthetic construct
  source 1..20: mol_type = other RNA
ttgttttgtacgtgatgggg

SEQ ID NO: 750 - RNA, 20 nt, synthetic construct
  source 1..20: mol_type = other RNA
tttacattaaatttacctgc

SEQ ID NO: 751 - RNA, 20 nt, synthetic construct
  source 1..20: mol_type = other RNA
tttacctgccaactgtttag

SEQ ID NO: 752 - RNA, 20 nt, synthetic construct
  source 1..20: mol_type = other RNA
tttagcctggcttgcgtttt

SEQ ID NO: 753 - RNA, 20 nt, synthetic construct
  source 1..20: mol_type = other RNA
tttatacaaagtctctgacg

SEQ ID NO: 754 - RNA, 20 nt, synthetic construct
  source 1..20: mol_type = other RNA
tttatctacaaatgctttac

SEQ ID NO: 755 - RNA, 20 nt, synthetic construct
  source 1..20: mol_type = other RNA
tttatttgagctgttctcca

SEQ ID NO: 756 - RNA, 20 nt, synthetic construct
  source 1..20: mol_type = other RNA
tttcagctgcagctttcttg

SEQ ID NO: 757 - RNA, 20 nt, synthetic construct
  source 1..20: mol_type = other RNA
tttcagtttgttttgtacgt

SEQ ID NO: 758 - RNA, 20 nt, synthetic construct
  source 1..20: mol_type = other RNA
tttcatttttatttgagctg

SEQ ID NO: 759 - RNA, 20 nt, synthetic construct
  source 1..20: mol_type = other RNA
tttcctccaaattctcgatt

SEQ ID NO: 760 - RNA, 20 nt, synthetic construct
  source 1..20: mol_type = other RNA
tttcctccctggagaacagc

SEQ ID NO: 761 - RNA, 20 nt, synthetic construct
  source 1..20: mol_type = other RNA
tttcctttgtcggcaagtct

SEQ ID NO: 762 - RNA, 20 nt, synthetic construct
  source 1..20: mol_type = other RNA
tttcgccgaaaagaactcag

SEQ ID NO: 763 - RNA, 20 nt, synthetic construct
  source 1..20: mol_type = other RNA
tttcggcgaaaagtcaggat

SEQ ID NO: 764 - RNA, 20 nt, synthetic construct
  source 1..20: mol_type = other RNA
tttctcctcctgagcttcca

SEQ ID NO: 765 - RNA, 20 nt, synthetic construct
  source 1..20: mol_type = other RNA
tttcttggcttctagtttcc

SEQ ID NO: 766 - RNA, 20 nt, synthetic construct
  source 1..20: mol_type = other RNA
tttgagctgttctccaggga

SEQ ID NO: 767 - RNA, 20 nt, synthetic construct
  source 1..20: mol_type = other RNA
tttggaggaaaacctgagga

SEQ ID NO: 768 - RNA, 20 nt, synthetic construct
  source 1..20: mol_type = other RNA
tttgggagtgtggaagctca

SEQ ID NO: 769 - RNA, 20 nt, synthetic construct
  source 1..20: mol_type = other RNA
tttgtacgtgatggggctga

SEQ ID NO: 770 - RNA, 20 nt, synthetic construct
  source 1..20: mol_type = other RNA
tttgtataaaggcagaacgt

SEQ ID NO: 771 - RNA, 20 nt, synthetic construct
  source 1..20: mol_type = other RNA
tttgtcggcaagtcttgact

SEQ ID NO: 772 - RNA, 20 nt, synthetic construct
  source 1..20: mol_type = other RNA
tttgttttgtacgtgatggg

SEQ ID NO: 773 - RNA, 20 nt, synthetic construct
  source 1..20: mol_type = other RNA
ttttatttgagctgttctcc

SEQ ID NO: 774 - RNA, 20 nt, synthetic construct
  source 1..20: mol_type = other RNA
ttttcagctgcagctttctt

SEQ ID NO: 775 - RNA, 20 nt, synthetic construct
  source 1..20: mol_type = other RNA
ttttcagtttgttttgtacg

SEQ ID NO: 776 - RNA, 20 nt, synthetic construct
  source 1..20: mol_type = other RNA
ttttcctccaaattctcgat

SEQ ID NO: 777 - RNA, 20 nt, synthetic construct
  source 1..20: mol_type = other RNA
ttttcgccgaaaagaactca

SEQ ID NO: 778 - RNA, 20 nt, synthetic construct
  source 1..20: mol_type = other RNA
ttttcggcgaaaagtcagga

SEQ ID NO: 779 - RNA, 20 nt, synthetic construct
  source 1..20: mol_type = other RNA
ttttctcctcctgagcttcc

SEQ ID NO: 780 - RNA, 20 nt, synthetic construct
  source 1..20: mol_type = other RNA
ttttgtacgtgatggggctg

SEQ ID NO: 781 - RNA, 20 nt, synthetic construct
  source 1..20: mol_type = other RNA
tttttatttgagctgttctc

SEQ ID NO: 782 - RNA, 20 nt, synthetic construct
  source 1..20: mol_type = other RNA
tttttctcctcctgagcttc

SEQ ID NO: 783 - RNA, 20 nt, synthetic construct
  source 1..20: mol_type = other RNA
ttttttctcctcctgagctt

SEQ ID NO: 784 - RNA, 21 nt, synthetic construct
  source 1..21: mol_type = other RNA
aaaaaacggagtggtgccatt

SEQ ID NO: 785 - RNA, 21 nt, synthetic construct
  source 1..21: mol_type = other RNA
aaaaacggagtggtgccattc

SEQ ID NO: 786 - RNA, 21 nt, synthetic construct
  source 1..21: mol_type = other RNA
aaaacaaactgaaaacgcaag

SEQ ID NO: 787 - RNA, 21 nt, synthetic construct
  source 1..21: mol_type = other RNA
aaaacctgaggatgagcagct

SEQ ID NO: 788 - RNA, 21 nt, synthetic construct
  source 1..21: mol_type = other RNA
aaaacgcaagccaggctaaac

SEQ ID NO: 789 - RNA, 21 nt, synthetic construct
  source 1..21: mol_type = other RNA
aaaacggagtggtgccattca

SEQ ID NO: 790 - RNA, 21 nt, synthetic construct
  source 1..21: mol_type = other RNA
aaaagaactcagtacctgaat

SEQ ID NO: 791 - RNA, 21 nt, synthetic construct
  source 1..21: mol_type = other RNA
aaaagctttcctccctggaga

SEQ ID NO: 792 - RNA, 21 nt, synthetic construct
  source 1..21: mol_type = other RNA
aaaaggaaaagtcagccccat

SEQ ID NO: 793 - RNA, 21 nt, synthetic construct
  source 1..21: mol_type = other RNA
aaaagtcagccccatcacgta

SEQ ID NO: 794 - RNA, 21 nt, synthetic construct
  source 1..21: mol_type = other RNA
aaaagtcaggatgttagcaga

SEQ ID NO: 795 - RNA, 21 nt, synthetic construct
  source 1..21: mol_type = other RNA
aaaatgaaaaggaaaagtcag

SEQ ID NO: 796 - RNA, 21 nt, synthetic construct
  source 1..21: mol_type = other RNA
aaacaaactgaaaacgcaagc

SEQ ID NO: 797 - RNA, 21 nt, synthetic construct
  source 1..21: mol_type = other RNA
aaacagttggcaggtaaattt

SEQ ID NO: 798 - RNA, 21 nt, synthetic construct
  source 1..21: mol_type = other RNA
aaacctgaggatgagcagctt

SEQ ID NO: 799 - RNA, 21 nt, synthetic construct
  source 1..21: mol_type = other RNA
aaacgcaagccaggctaaaca

SEQ ID NO: 800 - RNA, 21 nt, synthetic construct
  source 1..21: mol_type = other RNA
aaacggagtggtgccattcag

SEQ ID NO: 801 - RNA, 21 nt, synthetic construct
  source 1..21: mol_type = other RNA
aaactagaagccaagaaagct

SEQ ID NO: 802 - RNA, 21 nt, synthetic construct
  source 1..21: mol_type = other RNA
aaactcatccacgtcagagac

SEQ ID NO: 803 - RNA, 21 nt, synthetic construct
  source 1..21: mol_type = other RNA
aaactgaaaacgcaagccagg

SEQ ID NO: 804 - RNA, 21 nt, synthetic construct
  source 1..21: mol_type = other RNA
aaagaactcagtacctgaatg

SEQ ID NO: 805 - RNA, 21 nt, synthetic construct
  source 1..21: mol_type = other RNA
aaagctgcagctgaaaagctt

SEQ ID NO: 806 - RNA, 21 nt, synthetic construct
  source 1..21: mol_type = other RNA
aaagctttcctccctggagaa

SEQ ID NO: 807 - RNA, 21 nt, synthetic construct
  source 1..21: mol_type = other RNA
aaagcttttcagctgcagctt

SEQ ID NO: 808 - RNA, 21 nt, synthetic construct
  source 1..21: mol_type = other RNA
aaaggaaaagtcagccccatc

SEQ ID NO: 809 - RNA, 21 nt, synthetic construct
  source 1..21: mol_type = other RNA
aaaggaaactagaagccaaga

SEQ ID NO: 810 - RNA, 21 nt, synthetic construct
  source 1..21: mol_type = other RNA
aaaggcagaacgtgaagctgc

SEQ ID NO: 811 - RNA, 21 nt, synthetic construct
  source 1..21: mol_type = other RNA
aaagtcagccccatcacgtac

SEQ ID NO: 812 - RNA, 21 nt, synthetic construct
  source 1..21: mol_type = other RNA
aaagtcaggatgttagcagag

SEQ ID NO: 813 - RNA, 21 nt, synthetic construct
  source 1..21: mol_type = other RNA
aaagtctctgacgtggatgag

SEQ ID NO: 814 - RNA, 21 nt, synthetic construct
  source 1..21: mol_type = other RNA
aaatgaaaaggaaaagtcagc

SEQ ID NO: 815 - RNA, 21 nt, synthetic construct
  source 1..21: mol_type = other RNA
aaattctcgattgtcttctct

SEQ ID NO: 816 - RNA, 21 nt, synthetic construct
  source 1..21: mol_type = other RNA
aaatttacctgccaactgttt

SEQ ID NO: 817 - RNA, 21 nt, synthetic construct
  source 1..21: mol_type = other RNA
aacaaactgaaaacgcaagcc

SEQ ID NO: 818 - RNA, 21 nt, synthetic construct
  source 1..21: mol_type = other RNA
aacacatttatctacaaatgc

SEQ ID NO: 819 - RNA, 21 nt, synthetic construct
  source 1..21: mol_type = other RNA
aacagttggcaggtaaattta

SEQ ID NO: 820 - RNA, 21 nt, synthetic construct
  source 1..21: mol_type = other RNA
aacatcctgacttttcgccga

SEQ ID NO: 821 - RNA, 21 nt, synthetic construct
  source 1..21: mol_type = other RNA
aacctgaggatgagcagcttc

SEQ ID NO: 822 - RNA, 21 nt, synthetic construct
  source 1..21: mol_type = other RNA
aacgcaagccaggctaaacag

SEQ ID NO: 823 - RNA, 21 nt, synthetic construct
  source 1..21: mol_type = other RNA
aacggagtggtgccattcagg

SEQ ID NO: 824 - RNA, 21 nt, synthetic construct
  source 1..21: mol_type = other RNA
aacgtgaagctgctcatcctc

SEQ ID NO: 825 - RNA, 21 nt, synthetic construct
  source 1..21: mol_type = other RNA
aactagaagccaagaaagctg

SEQ ID NO: 826 - RNA, 21 nt, synthetic construct
  source 1..21: mol_type = other RNA
aactcagtacctgaatggcac

SEQ ID NO: 827 - RNA, 21 nt, synthetic construct
  source 1..21: mol_type = other RNA
aactcatccacgtcagagact

SEQ ID NO: 828 - RNA, 21 nt, synthetic construct
  source 1..21: mol_type = other RNA
aactgaaaacgcaagccaggc

SEQ ID NO: 829 - RNA, 21 nt, synthetic construct
  source 1..21: mol_type = other RNA
aactgtttagcctggcttgcg

SEQ ID NO: 830 - RNA, 21 nt, synthetic construct
  source 1..21: mol_type = other RNA
aagaaagctgcagctgaaaag

SEQ ID NO: 831 - RNA, 21 nt, synthetic construct
  source 1..21: mol_type = other RNA
aagaactcagtacctgaatgg

SEQ ID NO: 832 - RNA, 21 nt, synthetic construct
  source 1..21: mol_type = other RNA
aagacaatcgagaatttggag

SEQ ID NO: 833 - RNA, 21 nt, synthetic construct
  source 1..21: mol_type = other RNA
aagacttgccgacaaaggaaa

SEQ ID NO: 834 - RNA, 21 nt, synthetic construct
  source 1..21: mol_type = other RNA
aagccaagaaagctgcagctg

SEQ ID NO: 835 - RNA, 21 nt, synthetic construct
  source 1..21: mol_type = other RNA
aagccaggctaaacagttggc

SEQ ID NO: 836 - RNA, 21 nt, synthetic construct
  source 1..21: mol_type = other RNA
aagctcaggaggagaaaaaac

SEQ ID NO: 837 - RNA, 21 nt, synthetic construct
  source 1..21: mol_type = other RNA
aagctgcagctgaaaagcttt

SEQ ID NO: 838 - RNA, 21 nt, synthetic construct
  source 1..21: mol_type = other RNA
aagctgctcatcctcaggttt

SEQ ID NO: 839 - RNA, 21 nt, synthetic construct
  source 1..21: mol_type = other RNA
aagctttcctccctggagaac

SEQ ID NO: 840 - RNA, 21 nt, synthetic construct
  source 1..21: mol_type = other RNA
aagcttttcagctgcagcttt

SEQ ID NO: 841 - RNA, 21 nt, synthetic construct
  source 1..21: mol_type = other RNA
aaggaaaagtcagccccatca

SEQ ID NO: 842 - RNA, 21 nt, synthetic construct
  source 1..21: mol_type = other RNA
aaggaaactagaagccaagaa

SEQ ID NO: 843 - RNA, 21 nt, synthetic construct
  source 1..21: mol_type = other RNA
aaggcagaacgtgaagctgct

SEQ ID NO: 844 - RNA, 21 nt, synthetic construct
  source 1..21: mol_type = other RNA
aagtaagacattacagcctca

SEQ ID NO: 845 - RNA, 21 nt, synthetic construct
  source 1..21: mol_type = other RNA
aagtcagccccatcacgtaca

SEQ ID NO: 846 - RNA, 21 nt, synthetic construct
  source 1..21: mol_type = other RNA
aagtcaggatgttagcagagc

SEQ ID NO: 847 - RNA, 21 nt, synthetic construct
  source 1..21: mol_type = other RNA
aagtctctgacgtggatgagt

SEQ ID NO: 848 - RNA, 21 nt, synthetic construct
  source 1..21: mol_type = other RNA
aagtcttgactggctctgcta

SEQ ID NO: 849 - RNA, 21 nt, synthetic construct
  source 1..21: mol_type = other RNA
aatcgagaatttggaggaaaa

SEQ ID NO: 850 - RNA, 21 nt, synthetic construct
  source 1..21: mol_type = other RNA
aatgaaaaggaaaagtcagcc

SEQ ID NO: 851 - RNA, 21 nt, synthetic construct
  source 1..21: mol_type = other RNA
aatggcaccactccgtttttt

SEQ ID NO: 852 - RNA, 21 nt, synthetic construct
  source 1..21: mol_type = other RNA
aatgtcttacttccctaccag

SEQ ID NO: 853 - RNA, 21 nt, synthetic construct
  source 1..21: mol_type = other RNA
aattctcgattgtcttctcta

SEQ ID NO: 854 - RNA, 21 nt, synthetic construct
  source 1..21: mol_type = other RNA
aatttacctgccaactgttta

SEQ ID NO: 855 - RNA, 21 nt, synthetic construct
  source 1..21: mol_type = other RNA
aatttggaggaaaacctgagg

SEQ ID NO: 856 - RNA, 21 nt, synthetic construct
  source 1..21: mol_type = other RNA
acaaaacaaactgaaaacgca

SEQ ID NO: 857 - RNA, 21 nt, synthetic construct
  source 1..21: mol_type = other RNA
acaaactgaaaacgcaagcca

SEQ ID NO: 858 - RNA, 21 nt, synthetic construct
  source 1..21: mol_type = other RNA
acaaaggaaactagaagccaa

SEQ ID NO: 859 - RNA, 21 nt, synthetic construct
  source 1..21: mol_type = other RNA
acaaagtctctgacgtggatg

SEQ ID NO: 860 - RNA, 21 nt, synthetic construct
  source 1..21: mol_type = other RNA
acaatcgagaatttggaggaa

SEQ ID NO: 861 - RNA, 21 nt, synthetic construct
  source 1..21: mol_type = other RNA
acacatttatctacaaatgct

SEQ ID NO: 862 - RNA, 21 nt, synthetic construct
  source 1..21: mol_type = other RNA
acactcccaaactcatccacg

SEQ ID NO: 863 - RNA, 21 nt, synthetic construct
  source 1..21: mol_type = other RNA
acagttggcaggtaaatttaa

SEQ ID NO: 864 - RNA, 21 nt, synthetic construct
  source 1..21: mol_type = other RNA
acatcctgacttttcgccgaa

SEQ ID NO: 865 - RNA, 21 nt, synthetic construct
  source 1..21: mol_type = other RNA
acattaaatttacctgccaac

SEQ ID NO: 866 - RNA, 21 nt, synthetic construct
  source 1..21: mol_type = other RNA
accactccgttttttctcctc

SEQ ID NO: 867 - RNA, 21 nt, synthetic construct
  source 1..21: mol_type = other RNA
accaggtatgcactctcacta

SEQ ID NO: 868 - RNA, 21 nt, synthetic construct
  source 1..21: mol_type = other RNA
acctgaatggcaccactccgt

SEQ ID NO: 869 - RNA, 21 nt, synthetic construct
  source 1..21: mol_type = other RNA
acctgaggatgagcagcttca

SEQ ID NO: 870 - RNA, 21 nt, synthetic construct
  source 1..21: mol_type = other RNA
acctgccaactgtttagcctg

SEQ ID NO: 871 - RNA, 21 nt, synthetic construct
  source 1..21: mol_type = other RNA
acctggtagggaagtaagaca

SEQ ID NO: 872 - RNA, 21 nt, synthetic construct
  source 1..21: mol_type = other RNA
acctgtagttgaggctgtaat

SEQ ID NO: 873 - RNA, 21 nt, synthetic construct
  source 1..21: mol_type = other RNA
acgcaagccaggctaaacagt

SEQ ID NO: 874 - RNA, 21 nt, synthetic construct
  source 1..21: mol_type = other RNA
acggagtggtgccattcaggt

SEQ ID NO: 875 - RNA, 21 nt, synthetic construct
  source 1..21: mol_type = other RNA
acgtacaaaacaaactgaaaa

SEQ ID NO: 876 - RNA, 21 nt, synthetic construct
  source 1..21: mol_type = other RNA
acgtcagagactttgtataaa

SEQ ID NO: 877 - RNA, 21 nt, synthetic construct
  source 1..21: mol_type = other RNA
acgtgaagctgctcatcctca

SEQ ID NO: 878 - RNA, 21 nt, synthetic construct
  source 1..21: mol_type = other RNA
acgtgatggggctgacttttc

SEQ ID NO: 879 - RNA, 21 nt, synthetic construct
  source 1..21: mol_type = other RNA
acgtggatgagtttgggagtg

SEQ ID NO: 880 - RNA, 21 nt, synthetic construct
  source 1..21: mol_type = other RNA
acgttctgcctttatacaaag

SEQ ID NO: 881 - RNA, 21 nt, synthetic construct
  source 1..21: mol_type = other RNA
actagaagccaagaaagctgc

SEQ ID NO: 882 - RNA, 21 nt, synthetic construct
  source 1..21: mol_type = other RNA
actagagaagacaatcgagaa

SEQ ID NO: 883 - RNA, 21 nt, synthetic construct
  source 1..21: mol_type = other RNA
actcagtacctgaatggcacc

SEQ ID NO: 884 - RNA, 21 nt, synthetic construct
  source 1..21: mol_type = other RNA
actcatccacgtcagagactt

SEQ ID NO: 885 - RNA, 21 nt, synthetic construct
  source 1..21: mol_type = other RNA
actcccaaactcatccacgtc

SEQ ID NO: 886 - RNA, 21 nt, synthetic construct
  source 1..21: mol_type = other RNA
actccgttttttctcctcctg

SEQ ID NO: 887 - RNA, 21 nt, synthetic construct
  source 1..21: mol_type = other RNA
actctcactagagaagacaat

SEQ ID NO: 888 - RNA, 21 nt, synthetic construct
  source 1..21: mol_type = other RNA
actgaaaacgcaagccaggct

SEQ ID NO: 889 - RNA, 21 nt, synthetic construct
  source 1..21: mol_type = other RNA
actgagttcttttcggcgaaa

SEQ ID NO: 890 - RNA, 21 nt, synthetic construct
  source 1..21: mol_type = other RNA
actggctctgctaacatcctg

SEQ ID NO: 891 - RNA, 21 nt, synthetic construct
  source 1..21: mol_type = other RNA
actgtttagcctggcttgcgt

SEQ ID NO: 892 - RNA, 21 nt, synthetic construct
  source 1..21: mol_type = other RNA
acttccctaccaggtatgcac

SEQ ID NO: 893 - RNA, 21 nt, synthetic construct
  source 1..21: mol_type = other RNA
acttgccgacaaaggaaacta

SEQ ID NO: 894 - RNA, 21 nt, synthetic construct
  source 1..21: mol_type = other RNA
actttgtataaaggcagaacg

SEQ ID NO: 895 - RNA, 21 nt, synthetic construct
  source 1..21: mol_type = other RNA
acttttcgccgaaaagaactc

SEQ ID NO: 896 - RNA, 21 nt, synthetic construct
  source 1..21: mol_type = other RNA
agaaaaaacggagtggtgcca

SEQ ID NO: 897 - RNA, 21 nt, synthetic construct
  source 1..21: mol_type = other RNA
agaaagctgcagctgaaaagc

SEQ ID NO: 898 - RNA, 21 nt, synthetic construct
  source 1..21: mol_type = other RNA
agaacagctcaaataaaaatg

SEQ ID NO: 899 - RNA, 21 nt, synthetic construct
  source 1..21: mol_type = other RNA
agaacgtgaagctgctcatcc

SEQ ID NO: 900 - RNA, 21 nt, synthetic construct
  source 1..21: mol_type = other RNA
agaactcagtacctgaatggc

SEQ ID NO: 901 - RNA, 21 nt, synthetic construct
  source 1..21: mol_type = other RNA
agaagacaatcgagaatttgg

SEQ ID NO: 902 - RNA, 21 nt, synthetic construct
  source 1..21: mol_type = other RNA
agaagccaagaaagctgcagc

SEQ ID NO: 903 - RNA, 21 nt, synthetic construct
  source 1..21: mol_type = other RNA
agaatttggaggaaaacctga

SEQ ID NO: 904 - RNA, 21 nt, synthetic construct
  source 1..21: mol_type = other RNA
agacaatcgagaatttggagg

SEQ ID NO: 905 - RNA, 21 nt, synthetic construct
  source 1..21: mol_type = other RNA
agacttgccgacaaaggaaac

SEQ ID NO: 906 - RNA, 21 nt, synthetic construct
  source 1..21: mol_type = other RNA
agactttgtataaaggcagaa

SEQ ID NO: 907 - RNA, 21 nt, synthetic construct
  source 1..21: mol_type = other RNA
agagaagacaatcgagaattt

SEQ ID NO: 908 - RNA, 21 nt, synthetic construct
  source 1..21: mol_type = other RNA
agagactttgtataaaggcag

SEQ ID NO: 909 - RNA, 21 nt, synthetic construct
  source 1..21: mol_type = other RNA
agagccagtcaagacttgccg

SEQ ID NO: 910 - RNA, 21 nt, synthetic construct
  source 1..21: mol_type = other RNA
agagtgcatacctggtaggga

SEQ ID NO: 911 - RNA, 21 nt, synthetic construct
  source 1..21: mol_type = other RNA
agcagagccagtcaagacttg

SEQ ID NO: 912 - RNA, 21 nt, synthetic construct
  source 1..21: mol_type = other RNA
agcagcttcacgttctgcctt

SEQ ID NO: 913 - RNA, 21 nt, synthetic construct
  source 1..21: mol_type = other RNA
agccaagaaagctgcagctga

SEQ ID NO: 914 - RNA, 21 nt, synthetic construct
  source 1..21: mol_type = other RNA
agccaggctaaacagttggca

SEQ ID NO: 915 - RNA, 21 nt, synthetic construct
  source 1..21: mol_type = other RNA
agccagtcaagacttgccgac

SEQ ID NO: 916 - RNA, 21 nt, synthetic construct
  source 1..21: mol_type = other RNA
agccccatcacgtacaaaaca

SEQ ID NO: 917 - RNA, 21 nt, synthetic construct
  source 1..21: mol_type = other RNA
agcctggcttgcgttttcagt

SEQ ID NO: 918 - RNA, 21 nt, synthetic construct
  source 1..21: mol_type = other RNA
agctcaggaggagaaaaaacg

SEQ ID NO: 919 - RNA, 21 nt, synthetic construct
  source 1..21: mol_type = other RNA
agctgaaaagctttcctccct

SEQ ID NO: 920 - RNA, 21 nt, synthetic construct
  source 1..21: mol_type = other RNA
agctgcagctgaaaagctttc

SEQ ID NO: 921 - RNA, 21 nt, synthetic construct
  source 1..21: mol_type = other RNA
agctgcagctttcttggcttc

SEQ ID NO: 922 - RNA, 21 nt, synthetic construct
  source 1..21: mol_type = other RNA
agctgctcatcctcaggtttt

SEQ ID NO: 923 - RNA, 21 nt, synthetic construct
  source 1..21: mol_type = other RNA
agctgttctccagggaggaaa

SEQ ID NO: 924 - RNA, 21 nt, synthetic construct
  source 1..21: mol_type = other RNA
agcttcacgttctgcctttat

SEQ ID NO: 925 - RNA, 21 nt, synthetic construct
  source 1..21: mol_type = other RNA
agcttccacactcccaaactc

SEQ ID NO: 926 - RNA, 21 nt, synthetic construct
  source 1..21: mol_type = other RNA
agctttcctccctggagaaca

SEQ ID NO: 927 - RNA, 21 nt, synthetic construct
  source 1..21: mol_type = other RNA
agctttcttggcttctagttt

SEQ ID NO: 928 - RNA, 21 nt, synthetic construct
  source 1..21: mol_type = other RNA
agcttttcagctgcagctttc

SEQ ID NO: 929 - RNA, 21 nt, synthetic construct
  source 1..21: mol_type = other RNA
aggaaaacctgaggatgagca

SEQ ID NO: 930 - RNA, 21 nt, synthetic construct
  source 1..21: mol_type = other RNA
aggaaaagtcagccccatcac

SEQ ID NO: 931 - RNA, 21 nt, synthetic construct
  source 1..21: mol_type = other RNA
aggaaactagaagccaagaaa

SEQ ID NO: 932 - RNA, 21 nt, synthetic construct
  source 1..21: mol_type = other RNA
aggaaagcttttcagctgcag

SEQ ID NO: 933 - RNA, 21 nt, synthetic construct
  source 1..21: mol_type = other RNA
aggagaaaaaacggagtggtg

SEQ ID NO: 934 - RNA, 21 nt, synthetic construct
  source 1..21: mol_type = other RNA
aggaggagaaaaaacggagtg

SEQ ID NO: 935 - RNA, 21 nt, synthetic construct
  source 1..21: mol_type = other RNA
aggatgagcagcttcacgttc

SEQ ID NO: 936 - RNA, 21 nt, synthetic construct
  source 1..21: mol_type = other RNA
aggatgttagcagagccagtc

SEQ ID NO: 937 - RNA, 21 nt, synthetic construct
  source 1..21: mol_type = other RNA
aggcagaacgtgaagctgctc

SEQ ID NO: 938 - RNA, 21 nt, synthetic construct
  source 1..21: mol_type = other RNA
aggctaaacagttggcaggta

SEQ ID NO: 939 - RNA, 21 nt, synthetic construct
  source 1..21: mol_type = other RNA
aggctgtaatgtcttacttcc

SEQ ID NO: 940 - RNA, 21 nt, synthetic construct
  source 1..21: mol_type = other RNA
agggaagtaagacattacagc

SEQ ID NO: 941 - RNA, 21 nt, synthetic construct
  source 1..21: mol_type = other RNA
agggaggaaagcttttcagct

SEQ ID NO: 942 - RNA, 21 nt, synthetic construct
  source 1..21: mol_type = other RNA
aggtactgagttcttttcggc

SEQ ID NO: 943 - RNA, 21 nt, synthetic construct
  source 1..21: mol_type = other RNA
aggtatgcactctcactagag

SEQ ID NO: 944 - RNA, 21 nt, synthetic construct
  source 1..21: mol_type = other RNA
aggttttcctccaaattctcg

SEQ ID NO: 945 - RNA, 21 nt, synthetic construct
  source 1..21: mol_type = other RNA
agtaagacattacagcctcaa

SEQ ID NO: 946 - RNA, 21 nt, synthetic construct
  source 1..21: mol_type = other RNA
agtacctgaatggcaccactc

SEQ ID NO: 947 - RNA, 21 nt, synthetic construct
  source 1..21: mol_type = other RNA
agtcaagacttgccgacaaag

SEQ ID NO: 948 - RNA, 21 nt, synthetic construct
  source 1..21: mol_type = other RNA
agtcagccccatcacgtacaa

SEQ ID NO: 949 - RNA, 21 nt, synthetic construct
  source 1..21: mol_type = other RNA
agtcaggatgttagcagagcc

SEQ ID NO: 950 - RNA, 21 nt, synthetic construct
  source 1..21: mol_type = other RNA
agtctctgacgtggatgagtt

SEQ ID NO: 951 - RNA, 21 nt, synthetic construct
  source 1..21: mol_type = other RNA
agtcttgactggctctgctaa

SEQ ID NO: 952 - RNA, 21 nt, synthetic construct
  source 1..21: mol_type = other RNA
agtgagagtgcatacctggta

SEQ ID NO: 953 - RNA, 21 nt, synthetic construct
  source 1..21: mol_type = other RNA
agtgcatacctggtagggaag

SEQ ID NO: 954 - RNA, 21 nt, synthetic construct
  source 1..21: mol_type = other RNA
agtggtgccattcaggtactg

SEQ ID NO: 955 - RNA, 21 nt, synthetic construct
  source 1..21: mol_type = other RNA
agtgtggaagctcaggaggag

SEQ ID NO: 956 - RNA, 21 nt, synthetic construct
  source 1..21: mol_type = other RNA
agttcttttcggcgaaaagtc

SEQ ID NO: 957 - RNA, 21 nt, synthetic construct
  source 1..21: mol_type = other RNA
agttgaggctgtaatgtctta

SEQ ID NO: 958 - RNA, 21 nt, synthetic construct
  source 1..21: mol_type = other RNA
agttggcaggtaaatttaatg

SEQ ID NO: 959 - RNA, 21 nt, synthetic construct
  source 1..21: mol_type = other RNA
agtttcctttgtcggcaagtc

SEQ ID NO: 960 - RNA, 21 nt, synthetic construct
  source 1..21: mol_type = other RNA
agtttgggagtgtggaagctc

SEQ ID NO: 961 - RNA, 21 nt, synthetic construct
  source 1..21: mol_type = other RNA
agtttgttttgtacgtgatgg

SEQ ID NO: 962 - RNA, 21 nt, synthetic construct
  source 1..21: mol_type = other RNA
ataaaggcagaacgtgaagct

SEQ ID NO: 963 - RNA, 21 nt, synthetic construct
  source 1..21: mol_type = other RNA
atacaaagtctctgacgtgga

SEQ ID NO: 964 - RNA, 21 nt, synthetic construct
  source 1..21: mol_type = other RNA
atacctggtagggaagtaaga

SEQ ID NO: 965 - RNA, 21 nt, synthetic construct
  source 1..21: mol_type = other RNA
atcacgtacaaaacaaactga

SEQ ID NO: 966 - RNA, 21 nt, synthetic construct
  source 1..21: mol_type = other RNA
atccacgtcagagactttgta

SEQ ID NO: 967 - RNA, 21 nt, synthetic construct
  source 1..21: mol_type = other RNA
atcctcaggttttcctccaaa

SEQ ID NO: 968 - RNA, 21 nt, synthetic construct
  source 1..21: mol_type = other RNA
atcctgacttttcgccgaaaa

SEQ ID NO: 969 - RNA, 21 nt, synthetic construct
  source 1..21: mol_type = other RNA
atcgagaatttggaggaaaac

SEQ ID NO: 970 - RNA, 21 nt, synthetic construct
  source 1..21: mol_type = other RNA
atgaaaaggaaaagtcagccc

SEQ ID NO: 971 - RNA, 21 nt, synthetic construct
  source 1..21: mol_type = other RNA
atgagcagcttcacgttctgc

SEQ ID NO: 972 - RNA, 21 nt, synthetic construct
  source 1..21: mol_type = other RNA
atgagtttgggagtgtggaag

SEQ ID NO: 973 - RNA, 21 nt, synthetic construct
  source 1..21: mol_type = other RNA
atgcactctcactagagaaga

SEQ ID NO: 974 - RNA, 21 nt, synthetic construct
  source 1..21: mol_type = other RNA
atggcaccactccgttttttc

SEQ ID NO: 975 - RNA, 21 nt, synthetic construct
  source 1..21: mol_type = other RNA
atggggctgacttttcctttt

SEQ ID NO: 976 - RNA, 21 nt, synthetic construct
  source 1..21: mol_type = other RNA
atgtcttacttccctaccagg

SEQ ID NO: 977 - RNA, 21 nt, synthetic construct
  source 1..21: mol_type = other RNA
atgttagcagagccagtcaag

SEQ ID NO: 978 - RNA, 21 nt, synthetic construct
  source 1..21: mol_type = other RNA
attaaatttacctgccaactg

SEQ ID NO: 979 - RNA, 21 nt, synthetic construct
  source 1..21: mol_type = other RNA
attcaggtactgagttctttt

SEQ ID NO: 980 - RNA, 21 nt, synthetic construct
  source 1..21: mol_type = other RNA
attctcgattgtcttctctag

SEQ ID NO: 981 - RNA, 21 nt, synthetic construct
  source 1..21: mol_type = other RNA
attgtcttctctagtgagagt

SEQ ID NO: 982 - RNA, 21 nt, synthetic construct
  source 1..21: mol_type = other RNA
atttacctgccaactgtttag

SEQ ID NO: 983 - RNA, 21 nt, synthetic construct
  source 1..21: mol_type = other RNA
atttgagctgttctccaggga

SEQ ID NO: 984 - RNA, 21 nt, synthetic construct
  source 1..21: mol_type = other RNA
atttggaggaaaacctgagga

SEQ ID NO: 985 - RNA, 21 nt, synthetic construct
  source 1..21: mol_type = other RNA
atttttatttgagctgttctc

SEQ ID NO: 986 - RNA, 21 nt, synthetic construct
  source 1..21: mol_type = other RNA
caaaacaaactgaaaacgcaa

SEQ ID NO: 987 - RNA, 21 nt, synthetic construct
  source 1..21: mol_type = other RNA
caaactcatccacgtcagaga

SEQ ID NO: 988 - RNA, 21 nt, synthetic construct
  source 1..21: mol_type = other RNA
caaactgaaaacgcaagccag

SEQ ID NO: 989 - RNA, 21 nt, synthetic construct
  source 1..21: mol_type = other RNA
caaaggaaactagaagccaag

SEQ ID NO: 990 - RNA, 21 nt, synthetic construct
  source 1..21: mol_type = other RNA
caaagtctctgacgtggatga

SEQ ID NO: 991 - RNA, 21 nt, synthetic construct
  source 1..21: mol_type = other RNA
caaattctcgattgtcttctc

SEQ ID NO: 992 - RNA, 21 nt, synthetic construct
  source 1..21: mol_type = other RNA
caacacatttatctacaaatg

SEQ ID NO: 993 - RNA, 21 nt, synthetic construct
  source 1..21: mol_type = other RNA
caactgtttagcctggcttgc

SEQ ID NO: 994 - RNA, 21 nt, synthetic construct
  source 1..21: mol_type = other RNA
caagaaagctgcagctgaaaa

SEQ ID NO: 995 - RNA, 21 nt, synthetic construct
  source 1..21: mol_type = other RNA
caagacttgccgacaaaggaa

SEQ ID NO: 996 - RNA, 21 nt, synthetic construct
  source 1..21: mol_type = other RNA
caagccaggctaaacagttgg

SEQ ID NO: 997 - RNA, 21 nt, synthetic construct
  source 1..21: mol_type = other RNA
caagtcttgactggctctgct

SEQ ID NO: 998 - RNA, 21 nt, synthetic construct
  source 1..21: mol_type = other RNA
caatcgagaatttggaggaaa

SEQ ID NO: 999 - RNA, 21 nt, synthetic construct
  source 1..21: mol_type = other RNA
cacactcccaaactcatccac

SEQ ID NO: 1000 - RNA, 21 nt, synthetic construct
  source 1..21: mol_type = other RNA
cacatttatctacaaatgctt

SEQ ID NO: 1001 - RNA, 21 nt, synthetic construct
  source 1..21: mol_type = other RNA
caccactccgttttttctcct

SEQ ID NO: 1002 - RNA, 21 nt, synthetic construct
  source 1..21: mol_type = other RNA
cacgtacaaaacaaactgaaa

SEQ ID NO: 1003 - RNA, 21 nt, synthetic construct
  source 1..21: mol_type = other RNA
cacgtcagagactttgtataa

SEQ ID NO: 1004 - RNA, 21 nt, synthetic construct
  source 1..21: mol_type = other RNA
cacgttctgcctttatacaaa

SEQ ID NO: 1005 - RNA, 21 nt, synthetic construct
  source 1..21: mol_type = other RNA
cactagagaagacaatcgaga

SEQ ID NO: 1006 - RNA, 21 nt, synthetic construct
  source 1..21: mol_type = other RNA
cactcccaaactcatccacgt

SEQ ID NO: 1007 - RNA, 21 nt, synthetic construct
  source 1..21: mol_type = other RNA
cactccgttttttctcctcct

SEQ ID NO: 1008 - RNA, 21 nt, synthetic construct
  source 1..21: mol_type = other RNA
cactctcactagagaagacaa

SEQ ID NO: 1009 - RNA, 21 nt, synthetic construct
  source 1..21: mol_type = other RNA
cagaacgtgaagctgctcatc

SEQ ID NO: 1010 - RNA, 21 nt, synthetic construct
  source 1..21: mol_type = other RNA
cagagactttgtataaaggca

SEQ ID NO: 1011 - RNA, 21 nt, synthetic construct
  source 1..21: mol_type = other RNA
cagagccagtcaagacttgcc

SEQ ID NO: 1012 - RNA, 21 nt, synthetic construct
  source 1..21: mol_type = other RNA
cagccccatcacgtacaaaac

SEQ ID NO: 1013 - RNA, 21 nt, synthetic construct
  source 1..21: mol_type = other RNA
cagctgaaaagctttcctccc

SEQ ID NO: 1014 - RNA, 21 nt, synthetic construct
  source 1..21: mol_type = other RNA
cagctgcagctttcttggctt

SEQ ID NO: 1015 - RNA, 21 nt, synthetic construct
  source 1..21: mol_type = other RNA
cagcttcacgttctgccttta

SEQ ID NO: 1016 - RNA, 21 nt, synthetic construct
  source 1..21: mol_type = other RNA
cagctttcttggcttctagtt

SEQ ID NO: 1017 - RNA, 21 nt, synthetic construct
  source 1..21: mol_type = other RNA
caggaggagaaaaaacggagt

SEQ ID NO: 1018 - RNA, 21 nt, synthetic construct
  source 1..21: mol_type = other RNA
caggatgttagcagagccagt

SEQ ID NO: 1019 - RNA, 21 nt, synthetic construct
  source 1..21: mol_type = other RNA
caggctaaacagttggcaggt

SEQ ID NO: 1020 - RNA, 21 nt, synthetic construct
  source 1..21: mol_type = other RNA
cagggaggaaagcttttcagc

SEQ ID NO: 1021 - RNA, 21 nt, synthetic construct
  source 1..21: mol_type = other RNA
caggtaaatttaatgtaaagc

SEQ ID NO: 1022 - RNA, 21 nt, synthetic construct
  source 1..21: mol_type = other RNA
caggtactgagttcttttcgg

SEQ ID NO: 1023 - RNA, 21 nt, synthetic construct
  source 1..21: mol_type = other RNA
caggtatgcactctcactaga

SEQ ID NO: 1024 - RNA, 21 nt, synthetic construct
  source 1..21: mol_type = other RNA
caggttttcctccaaattctc

SEQ ID NO: 1025 - RNA, 21 nt, synthetic construct
  source 1..21: mol_type = other RNA
cagtacctgaatggcaccact

SEQ ID NO: 1026 - RNA, 21 nt, synthetic construct
  source 1..21: mol_type = other RNA
cagtcaagacttgccgacaaa

SEQ ID NO: 1027 - RNA, 21 nt, synthetic construct
  source 1..21: mol_type = other RNA
cagttggcaggtaaatttaat

SEQ ID NO: 1028 - RNA, 21 nt, synthetic construct
  source 1..21: mol_type = other RNA
cagtttgttttgtacgtgatg

SEQ ID NO: 1029 - RNA, 21 nt, synthetic construct
  source 1..21: mol_type = other RNA
catacctggtagggaagtaag

SEQ ID NO: 1030 - RNA, 21 nt, synthetic construct
  source 1..21: mol_type = other RNA
catcacgtacaaaacaaactg

SEQ ID NO: 1031 - RNA, 21 nt, synthetic construct
  source 1..21: mol_type = other RNA
catccacgtcagagactttgt

SEQ ID NO: 1032 - RNA, 21 nt, synthetic construct
  source 1..21: mol_type = other RNA
catcctcaggttttcctccaa

SEQ ID NO: 1033 - RNA, 21 nt, synthetic construct
  source 1..21: mol_type = other RNA
catcctgacttttcgccgaaa

SEQ ID NO: 1034 - RNA, 21 nt, synthetic construct
  source 1..21: mol_type = other RNA
cattaaatttacctgccaact

SEQ ID NO: 1035 - RNA, 21 nt, synthetic construct
  source 1..21: mol_type = other RNA
cattcaggtactgagttcttt

SEQ ID NO: 1036 - RNA, 21 nt, synthetic construct
  source 1..21: mol_type = other RNA
catttttatttgagctgttct

SEQ ID NO: 1037 - RNA, 21 nt, synthetic construct
  source 1..21: mol_type = other RNA
ccaaactcatccacgtcagag

SEQ ID NO: 1038 - RNA, 21 nt, synthetic construct
  source 1..21: mol_type = other RNA
ccaaattctcgattgtcttct

SEQ ID NO: 1039 - RNA, 21 nt, synthetic construct
  source 1..21: mol_type = other RNA
ccaactgtttagcctggcttg

SEQ ID NO: 1040 - RNA, 21 nt, synthetic construct
  source 1..21: mol_type = other RNA
ccaagaaagctgcagctgaaa

SEQ ID NO: 1041 - RNA, 21 nt, synthetic construct
  source 1..21: mol_type = other RNA
ccacactcccaaactcatcca

SEQ ID NO: 1042 - RNA, 21 nt, synthetic construct
  source 1..21: mol_type = other RNA
ccacgtcagagactttgtata

SEQ ID NO: 1043 - RNA, 21 nt, synthetic construct
  source 1..21: mol_type = other RNA
ccactccgttttttctcctcc

SEQ ID NO: 1044 - RNA, 21 nt, synthetic construct
  source 1..21: mol_type = other RNA
ccaggctaaacagttggcagg

SEQ ID NO: 1045 - RNA, 21 nt, synthetic construct
  source 1..21: mol_type = other RNA
ccagggaggaaagcttttcag

SEQ ID NO: 1046 - RNA, 21 nt, synthetic construct
  source 1..21: mol_type = other RNA
ccaggtatgcactctcactag

SEQ ID NO: 1047 - RNA, 21 nt, synthetic construct
  source 1..21: mol_type = other RNA
ccagtcaagacttgccgacaa

SEQ ID NO: 1048 - RNA, 21 nt, synthetic construct
  source 1..21: mol_type = other RNA
ccatcacgtacaaaacaaact

SEQ ID NO: 1049 - RNA, 21 nt, synthetic construct
  source 1..21: mol_type = other RNA
ccattcaggtactgagttctt

SEQ ID NO: 1050 - RNA, 21 nt, synthetic construct
  source 1..21: mol_type = other RNA
cccaaactcatccacgtcaga

SEQ ID NO: 1051 - RNA, 21 nt, synthetic construct
  source 1..21: mol_type = other RNA
cccatcacgtacaaaacaaac

SEQ ID NO: 1052 - RNA, 21 nt, synthetic construct
  source 1..21: mol_type = other RNA
ccccatcacgtacaaaacaaa

SEQ ID NO: 1053 - RNA, 21 nt, synthetic construct
  source 1..21: mol_type = other RNA
ccctaccaggtatgcactctc

SEQ ID NO: 1054 - RNA, 21 nt, synthetic construct
  source 1..21: mol_type = other RNA
ccctggagaacagctcaaata

SEQ ID NO: 1055 - RNA, 21 nt, synthetic construct
  source 1..21: mol_type = other RNA
ccgaaaagaactcagtacctg

SEQ ID NO: 1056 - RNA, 21 nt, synthetic construct
  source 1..21: mol_type = other RNA
ccgacaaaggaaactagaagc

SEQ ID NO: 1057 - RNA, 21 nt, synthetic construct
  source 1..21: mol_type = other RNA
ccgttttttctcctcctgagc

SEQ ID NO: 1058 - RNA, 21 nt, synthetic construct
  source 1..21: mol_type = other RNA
cctaccaggtatgcactctca

SEQ ID NO: 1059 - RNA, 21 nt, synthetic construct
  source 1..21: mol_type = other RNA
cctcaggttttcctccaaatt

SEQ ID NO: 1060 - RNA, 21 nt, synthetic construct
  source 1..21: mol_type = other RNA
cctccaaattctcgattgtct

SEQ ID NO: 1061 - RNA, 21 nt, synthetic construct
  source 1..21: mol_type = other RNA
cctccctggagaacagctcaa

SEQ ID NO: 1062 - RNA, 21 nt, synthetic construct
  source 1..21: mol_type = other RNA
cctcctgagcttccacactcc

SEQ ID NO: 1063 - RNA, 21 nt, synthetic construct
  source 1..21: mol_type = other RNA
cctgaatggcaccactccgtt

SEQ ID NO: 1064 - RNA, 21 nt, synthetic construct
  source 1..21: mol_type = other RNA
cctgacttttcgccgaaaaga

SEQ ID NO: 1065 - RNA, 21 nt, synthetic construct
  source 1..21: mol_type = other RNA
cctgagcttccacactcccaa

SEQ ID NO: 1066 - RNA, 21 nt, synthetic construct
  source 1..21: mol_type = other RNA
cctgaggatgagcagcttcac

SEQ ID NO: 1067 - RNA, 21 nt, synthetic construct
  source 1..21: mol_type = other RNA
cctgccaactgtttagcctgg

SEQ ID NO: 1068 - RNA, 21 nt, synthetic construct
  source 1..21: mol_type = other RNA
cctggagaacagctcaaataa

SEQ ID NO: 1069 - RNA, 21 nt, synthetic construct
  source 1..21: mol_type = other RNA
cctggcttgcgttttcagttt

SEQ ID NO: 1070 - RNA, 21 nt, synthetic construct
  source 1..21: mol_type = other RNA
cctggtagggaagtaagacat

SEQ ID NO: 1071 - RNA, 21 nt, synthetic construct
  source 1..21: mol_type = other RNA
cctgtagttgaggctgtaatg

SEQ ID NO: 1072 - RNA, 21 nt, synthetic construct
  source 1..21: mol_type = other RNA
cctttatacaaagtctctgac

SEQ ID NO: 1073 - RNA, 21 nt, synthetic construct
  source 1..21: mol_type = other RNA
cctttgtcggcaagtcttgac

SEQ ID NO: 1074 - RNA, 21 nt, synthetic construct
  source 1..21: mol_type = other RNA
ccttttcatttttatttgagc

SEQ ID NO: 1075 - RNA, 21 nt, synthetic construct
  source 1..21: mol_type = other RNA
cgaaaagaactcagtacctga

SEQ ID NO: 1076 - RNA, 21 nt, synthetic construct
  source 1..21: mol_type = other RNA
cgaaaagtcaggatgttagca

SEQ ID NO: 1077 - RNA, 21 nt, synthetic construct
  source 1..21: mol_type = other RNA
cgacaaaggaaactagaagcc

SEQ ID NO: 1078 - RNA, 21 nt, synthetic construct
  source 1..21: mol_type = other RNA
cgagaatttggaggaaaacct

SEQ ID NO: 1079 - RNA, 21 nt, synthetic construct
  source 1..21: mol_type = other RNA
cgattgtcttctctagtgaga

SEQ ID NO: 1080 - RNA, 21 nt, synthetic construct
  source 1..21: mol_type = other RNA
cgcaagccaggctaaacagtt

SEQ ID NO: 1081 - RNA, 21 nt, synthetic construct
  source 1..21: mol_type = other RNA
cgccgaaaagaactcagtacc

SEQ ID NO: 1082 - RNA, 21 nt, synthetic construct
  source 1..21: mol_type = other RNA
cggagtggtgccattcaggta

SEQ ID NO: 1083 - RNA, 21 nt, synthetic construct
  source 1..21: mol_type = other RNA
cggcaagtcttgactggctct

SEQ ID NO: 1084 - RNA, 21 nt, synthetic construct
  source 1..21: mol_type = other RNA
cggcgaaaagtcaggatgtta

SEQ ID NO: 1085 - RNA, 21 nt, synthetic construct
  source 1..21: mol_type = other RNA
cgtacaaaacaaactgaaaac

SEQ ID NO: 1086 - RNA, 21 nt, synthetic construct
  source 1..21: mol_type = other RNA
cgtcagagactttgtataaag

SEQ ID NO: 1087 - RNA, 21 nt, synthetic construct
  source 1..21: mol_type = other RNA
cgtgaagctgctcatcctcag

SEQ ID NO: 1088 - RNA, 21 nt, synthetic construct
  source 1..21: mol_type = other RNA
cgtgatggggctgacttttcc

SEQ ID NO: 1089 - RNA, 21 nt, synthetic construct
  source 1..21: mol_type = other RNA
cgtggatgagtttgggagtgt

SEQ ID NO: 1090 - RNA, 21 nt, synthetic construct
  source 1..21: mol_type = other RNA
cgttctgcctttatacaaagt

SEQ ID NO: 1091 - RNA, 21 nt, synthetic construct
  source 1..21: mol_type = other RNA
cgttttcagtttgttttgtac

SEQ ID NO: 1092 - RNA, 21 nt, synthetic construct
  source 1..21: mol_type = other RNA
cgttttttctcctcctgagct

SEQ ID NO: 1093 - RNA, 21 nt, synthetic construct
  source 1..21: mol_type = other RNA
ctaaacagttggcaggtaaat

SEQ ID NO: 1094 - RNA, 21 nt, synthetic construct
  source 1..21: mol_type = other RNA
ctaacatcctgacttttcgcc

SEQ ID NO: 1095 - RNA, 21 nt, synthetic construct
  source 1..21: mol_type = other RNA
ctaccaggtatgcactctcac

SEQ ID NO: 1096 - RNA, 21 nt, synthetic construct
  source 1..21: mol_type = other RNA
ctagaagccaagaaagctgca

SEQ ID NO: 1097 - RNA, 21 nt, synthetic construct
  source 1..21: mol_type = other RNA
ctagagaagacaatcgagaat

SEQ ID NO: 1098 - RNA, 21 nt, synthetic construct
  source 1..21: mol_type = other RNA
ctagtgagagtgcatacctgg

SEQ ID NO: 1099 - RNA, 21 nt, synthetic construct
  source 1..21: mol_type = other RNA
ctagtttcctttgtcggcaag

SEQ ID NO: 1100 - RNA, 21 nt, synthetic construct
  source 1..21: mol_type = other RNA
ctcactagagaagacaatcga

SEQ ID NO: 1101 - RNA, 21 nt, synthetic construct
  source 1..21: mol_type = other RNA
ctcaggaggagaaaaaacgga

SEQ ID NO: 1102 - RNA, 21 nt, synthetic construct
  source 1..21: mol_type = other RNA
ctcaggttttcctccaaattc

SEQ ID NO: 1103 - RNA, 21 nt, synthetic construct
  source 1..21: mol_type = other RNA
ctcagtacctgaatggcacca

SEQ ID NO: 1104 - RNA, 21 nt, synthetic construct
  source 1..21: mol_type = other RNA
ctcatccacgtcagagacttt

SEQ ID NO: 1105 - RNA, 21 nt, synthetic construct
  source 1..21: mol_type = other RNA
ctcatcctcaggttttcctcc

SEQ ID NO: 1106 - RNA, 21 nt, synthetic construct
  source 1..21: mol_type = other RNA
ctccaaattctcgattgtctt

SEQ ID NO: 1107 - RNA, 21 nt, synthetic construct
  source 1..21: mol_type = other RNA
ctccagggaggaaagcttttc

SEQ ID NO: 1108 - RNA, 21 nt, synthetic construct
  source 1..21: mol_type = other RNA
ctcccaaactcatccacgtca

SEQ ID NO: 1109 - RNA, 21 nt, synthetic construct
  source 1..21: mol_type = other RNA
ctccctggagaacagctcaaa

SEQ ID NO: 1110 - RNA, 21 nt, synthetic construct
  source 1..21: mol_type = other RNA
ctccgttttttctcctcctga

SEQ ID NO: 1111 - RNA, 21 nt, synthetic construct
  source 1..21: mol_type = other RNA
ctcctcctgagcttccacact

SEQ ID NO: 1112 - RNA, 21 nt, synthetic construct
  source 1..21: mol_type = other RNA
ctcctgagcttccacactccc

SEQ ID NO: 1113 - RNA, 21 nt, synthetic construct
  source 1..21: mol_type = other RNA
ctcgattgtcttctctagtga

SEQ ID NO: 1114 - RNA, 21 nt, synthetic construct
  source 1..21: mol_type = other RNA
ctctagtgagagtgcatacct

SEQ ID NO: 1115 - RNA, 21 nt, synthetic construct
  source 1..21: mol_type = other RNA
ctctcactagagaagacaatc

SEQ ID NO: 1116 - RNA, 21 nt, synthetic construct
  source 1..21: mol_type = other RNA
ctctgacgtggatgagtttgg

SEQ ID NO: 1117 - RNA, 21 nt, synthetic construct
  source 1..21: mol_type = other RNA
ctctgctaacatcctgacttt

SEQ ID NO: 1118 - RNA, 21 nt, synthetic construct
  source 1..21: mol_type = other RNA
ctgaaaacgcaagccaggcta

SEQ ID NO: 1119 - RNA, 21 nt, synthetic construct
  source 1..21: mol_type = other RNA
ctgaaaagctttcctccctgg

SEQ ID NO: 1120 - RNA, 21 nt, synthetic construct
  source 1..21: mol_type = other RNA
ctgaatggcaccactccgttt

SEQ ID NO: 1121 - RNA, 21 nt, synthetic construct
  source 1..21: mol_type = other RNA
ctgacgtggatgagtttggga

SEQ ID NO: 1122 - RNA, 21 nt, synthetic construct
  source 1..21: mol_type = other RNA
ctgacttttccttttcatttt

SEQ ID NO: 1123 - RNA, 21 nt, synthetic construct
  source 1..21: mol_type = other RNA
ctgacttttcgccgaaaagaa

SEQ ID NO: 1124 - RNA, 21 nt, synthetic construct
  source 1..21: mol_type = other RNA
ctgagcttccacactcccaaa

SEQ ID NO: 1125 - RNA, 21 nt, synthetic construct
  source 1..21: mol_type = other RNA
ctgaggatgagcagcttcacg

SEQ ID NO: 1126 - RNA, 21 nt, synthetic construct
  source 1..21: mol_type = other RNA
ctgagttcttttcggcgaaaa

SEQ ID NO: 1127 - RNA, 21 nt, synthetic construct
  source 1..21: mol_type = other RNA
ctgcagctgaaaagctttcct

SEQ ID NO: 1128 - RNA, 21 nt, synthetic construct
  source 1..21: mol_type = other RNA
ctgcagctttcttggcttcta

SEQ ID NO: 1129 - RNA, 21 nt, synthetic construct
  source 1..21: mol_type = other RNA
ctgccaactgtttagcctggc

SEQ ID NO: 1130 - RNA, 21 nt, synthetic construct
  source 1..21: mol_type = other RNA
ctgcctttatacaaagtctct

SEQ ID NO: 1131 - RNA, 21 nt, synthetic construct
  source 1..21: mol_type = other RNA
ctgctaacatcctgacttttc

SEQ ID NO: 1132 - RNA, 21 nt, synthetic construct
  source 1..21: mol_type = other RNA
ctgctcatcctcaggttttcc

SEQ ID NO: 1133 - RNA, 21 nt, synthetic construct
  source 1..21: mol_type = other RNA
ctggagaacagctcaaataaa

SEQ ID NO: 1134 - RNA, 21 nt, synthetic construct
  source 1..21: mol_type = other RNA
ctggctctgctaacatcctga

SEQ ID NO: 1135 - RNA, 21 nt, synthetic construct
  source 1..21: mol_type = other RNA
ctggcttgcgttttcagtttg

SEQ ID NO: 1136 - RNA, 21 nt, synthetic construct
  source 1..21: mol_type = other RNA
ctggtagggaagtaagacatt

SEQ ID NO: 1137 - RNA, 21 nt, synthetic construct
  source 1..21: mol_type = other RNA
ctgtaatgtcttacttcccta

SEQ ID NO: 1138 - RNA, 21 nt, synthetic construct
  source 1..21: mol_type = other RNA
ctgtagttgaggctgtaatgt

SEQ ID NO: 1139 - RNA, 21 nt, synthetic construct
  source 1..21: mol_type = other RNA
ctgttctccagggaggaaagc

SEQ ID NO: 1140 - RNA, 21 nt, synthetic construct
  source 1..21: mol_type = other RNA
ctgtttagcctggcttgcgtt

SEQ ID NO: 1141 - RNA, 21 nt, synthetic construct
  source 1..21: mol_type = other RNA
cttacttccctaccaggtatg

SEQ ID NO: 1142 - RNA, 21 nt, synthetic construct
  source 1..21: mol_type = other RNA
cttcacgttctgcctttatac

SEQ ID NO: 1143 - RNA, 21 nt, synthetic construct
  source 1..21: mol_type = other RNA
cttccacactcccaaactcat

SEQ ID NO: 1144 - RNA, 21 nt, synthetic construct
  source 1..21: mol_type = other RNA
cttccctaccaggtatgcact

SEQ ID NO: 1145 - RNA, 21 nt, synthetic construct
  source 1..21: mol_type = other RNA
cttctagtttcctttgtcggc

SEQ ID NO: 1146 - RNA, 21 nt, synthetic construct
  source 1..21: mol_type = other RNA
cttctctagtgagagtgcata

SEQ ID NO: 1147 - RNA, 21 nt, synthetic construct
  source 1..21: mol_type = other RNA
cttgactggctctgctaacat

SEQ ID NO: 1148 - RNA, 21 nt, synthetic construct
  source 1..21: mol_type = other RNA
cttgccgacaaaggaaactag

SEQ ID NO: 1149 - RNA, 21 nt, synthetic construct
  source 1..21: mol_type = other RNA
cttgcgttttcagtttgtttt

SEQ ID NO: 1150 - RNA, 21 nt, synthetic construct
  source 1..21: mol_type = other RNA
cttggcttctagtttcctttg

SEQ ID NO: 1151 - RNA, 21 nt, synthetic construct
  source 1..21: mol_type = other RNA
ctttacattaaatttacctgc

SEQ ID NO: 1152 - RNA, 21 nt, synthetic construct
  source 1..21: mol_type = other RNA
ctttatacaaagtctctgacg

SEQ ID NO: 1153 - RNA, 21 nt, synthetic construct
  source 1..21: mol_type = other RNA
ctttcctccctggagaacagc

SEQ ID NO: 1154 - RNA, 21 nt, synthetic construct
  source 1..21: mol_type = other RNA
ctttcttggcttctagtttcc

SEQ ID NO: 1155 - RNA, 21 nt, synthetic construct
  source 1..21: mol_type = other RNA
ctttgtataaaggcagaacgt

SEQ ID NO: 1156 - RNA, 21 nt, synthetic construct
  source 1..21: mol_type = other RNA
ctttgtcggcaagtcttgact

SEQ ID NO: 1157 - RNA, 21 nt, synthetic construct
  source 1..21: mol_type = other RNA
cttttcagctgcagctttctt

SEQ ID NO: 1158 - RNA, 21 nt, synthetic construct
  source 1..21: mol_type = other RNA
cttttcgccgaaaagaactca

SEQ ID NO: 1159 - RNA, 21 nt, synthetic construct
  source 1..21: mol_type = other RNA
cttttcggcgaaaagtcagga

SEQ ID NO: 1160 - RNA, 21 nt, synthetic construct
  source 1..21: mol_type = other RNA
gaaaaaacggagtggtgccat

SEQ ID NO: 1161 - RNA, 21 nt, synthetic construct
  source 1..21: mol_type = other RNA
gaaaacctgaggatgagcagc

SEQ ID NO: 1162 - RNA, 21 nt, synthetic construct
  source 1..21: mol_type = other RNA
gaaaacgcaagccaggctaaa

SEQ ID NO: 1163 - RNA, 21 nt, synthetic construct
  source 1..21: mol_type = other RNA
gaaaagaactcagtacctgaa

SEQ ID NO: 1164 - RNA, 21 nt, synthetic construct
  source 1..21: mol_type = other RNA
gaaaagctttcctccctggag

SEQ ID NO: 1165 - RNA, 21 nt, synthetic construct
  source 1..21: mol_type = other RNA
gaaaaggaaaagtcagcccca

SEQ ID NO: 1166 - RNA, 21 nt, synthetic construct
  source 1..21: mol_type = other RNA
gaaaagtcagccccatcacgt

SEQ ID NO: 1167 - RNA, 21 nt, synthetic construct
  source 1..21: mol_type = other RNA
gaaaagtcaggatgttagcag

SEQ ID NO: 1168 - RNA, 21 nt, synthetic construct
  source 1..21: mol_type = other RNA
gaaactagaagccaagaaagc

SEQ ID NO: 1169 - RNA, 21 nt, synthetic construct
  source 1..21: mol_type = other RNA
gaaagctgcagctgaaaagct

SEQ ID NO: 1170 - RNA, 21 nt, synthetic construct
  source 1..21: mol_type = other RNA
gaaagcttttcagctgcagct

SEQ ID NO: 1171 - RNA, 21 nt, synthetic construct
  source 1..21: mol_type = other RNA
gaacagctcaaataaaaatga

SEQ ID NO: 1172 - RNA, 21 nt, synthetic construct
  source 1..21: mol_type = other RNA
gaacgtgaagctgctcatcct

SEQ ID NO: 1173 - RNA, 21 nt, synthetic construct
  source 1..21: mol_type = other RNA
gaactcagtacctgaatggca

SEQ ID NO: 1174 - RNA, 21 nt, synthetic construct
  source 1..21: mol_type = other RNA
gaagacaatcgagaatttgga

SEQ ID NO: 1175 - RNA, 21 nt, synthetic construct
  source 1..21: mol_type = other RNA
gaagccaagaaagctgcagct

SEQ ID NO: 1176 - RNA, 21 nt, synthetic construct
  source 1..21: mol_type = other RNA
gaagctcaggaggagaaaaaa

SEQ ID NO: 1177 - RNA, 21 nt, synthetic construct
  source 1..21: mol_type = other RNA
gaagctgctcatcctcaggtt

SEQ ID NO: 1178 - RNA, 21 nt, synthetic construct
  source 1..21: mol_type = other RNA
gaagtaagacattacagcctc

SEQ ID NO: 1179 - RNA, 21 nt, synthetic construct
  source 1..21: mol_type = other RNA
gaatggcaccactccgttttt

SEQ ID NO: 1180 - RNA, 21 nt, synthetic construct
  source 1..21: mol_type = other RNA
gaatttggaggaaaacctgag

SEQ ID NO: 1181 - RNA, 21 nt, synthetic construct
  source 1..21: mol_type = other RNA
gacaaaggaaactagaagcca

SEQ ID NO: 1182 - RNA, 21 nt, synthetic construct
  source 1..21: mol_type = other RNA
gacaatcgagaatttggagga

SEQ ID NO: 1183 - RNA, 21 nt, synthetic construct
  source 1..21: mol_type = other RNA
gacgtggatgagtttgggagt

SEQ ID NO: 1184 - RNA, 21 nt, synthetic construct
  source 1..21: mol_type = other RNA
gactggctctgctaacatcct

SEQ ID NO: 1185 - RNA, 21 nt, synthetic construct
  source 1..21: mol_type = other RNA
gacttgccgacaaaggaaact

SEQ ID NO: 1186 - RNA, 21 nt, synthetic construct
  source 1..21: mol_type = other RNA
gactttgtataaaggcagaac

SEQ ID NO: 1187 - RNA, 21 nt, synthetic construct
  source 1..21: mol_type = other RNA
gacttttcgccgaaaagaact

SEQ ID NO: 1188 - RNA, 21 nt, synthetic construct
  source 1..21: mol_type = other RNA
gagaaaaaacggagtggtgcc

SEQ ID NO: 1189 - RNA, 21 nt, synthetic construct
  source 1..21: mol_type = other RNA
gagaacagctcaaataaaaat

SEQ ID NO: 1190 - RNA, 21 nt, synthetic construct
  source 1..21: mol_type = other RNA
gagaagacaatcgagaatttg

SEQ ID NO: 1191 - RNA, 21 nt, synthetic construct
  source 1..21: mol_type = other RNA
gagaatttggaggaaaacctg

SEQ ID NO: 1192 - RNA, 21 nt, synthetic construct
  source 1..21: mol_type = other RNA
gagactttgtataaaggcaga

SEQ ID NO: 1193 - RNA, 21 nt, synthetic construct
  source 1..21: mol_type = other RNA
gagagtgcatacctggtaggg

SEQ ID NO: 1194 - RNA, 21 nt, synthetic construct
  source 1..21: mol_type = other RNA
gagcagcttcacgttctgcct

SEQ ID NO: 1195 - RNA, 21 nt, synthetic construct
  source 1..21: mol_type = other RNA
gagccagtcaagacttgccga

SEQ ID NO: 1196 - RNA, 21 nt, synthetic construct
  source 1..21: mol_type = other RNA
gagctgttctccagggaggaa

SEQ ID NO: 1197 - RNA, 21 nt, synthetic construct
  source 1..21: mol_type = other RNA
gagcttccacactcccaaact

SEQ ID NO: 1198 - RNA, 21 nt, synthetic construct
  source 1..21: mol_type = other RNA
gaggaaaacctgaggatgagc

SEQ ID NO: 1199 - RNA, 21 nt, synthetic construct
  source 1..21: mol_type = other RNA
gaggaaagcttttcagctgca

SEQ ID NO: 1200 - RNA, 21 nt, synthetic construct
  source 1..21: mol_type = other RNA
gaggagaaaaaacggagtggt

SEQ ID NO: 1201 - RNA, 21 nt, synthetic construct
  source 1..21: mol_type = other RNA
gaggatgagcagcttcacgtt

SEQ ID NO: 1202 - RNA, 21 nt, synthetic construct
  source 1..21: mol_type = other RNA
gaggctgtaatgtcttacttc

SEQ ID NO: 1203 - RNA, 21 nt, synthetic construct
  source 1..21: mol_type = other RNA
gagtgcatacctggtagggaa

SEQ ID NO: 1204 - RNA, 21 nt, synthetic construct
  source 1..21: mol_type = other RNA
gagtggtgccattcaggtact

SEQ ID NO: 1205 - RNA, 21 nt, synthetic construct
  source 1..21: mol_type = other RNA
gagtgtggaagctcaggagga

SEQ ID NO: 1206 - RNA, 21 nt, synthetic construct
  source 1..21: mol_type = other RNA
gagttcttttcggcgaaaagt

SEQ ID NO: 1207 - RNA, 21 nt, synthetic construct
  source 1..21: mol_type = other RNA
gagtttgggagtgtggaagct

SEQ ID NO: 1208 - RNA, 21 nt, synthetic construct
  source 1..21: mol_type = other RNA
gatgagcagcttcacgttctg

SEQ ID NO: 1209 - RNA, 21 nt, synthetic construct
  source 1..21: mol_type = other RNA
gatgagtttgggagtgtggaa

SEQ ID NO: 1210 - RNA, 21 nt, synthetic construct
  source 1..21: mol_type = other RNA
gatggggctgacttttccttt

SEQ ID NO: 1211 - RNA, 21 nt, synthetic construct
  source 1..21: mol_type = other RNA
gatgttagcagagccagtcaa

SEQ ID NO: 1212 - RNA, 21 nt, synthetic construct
  source 1..21: mol_type = other RNA
gattgtcttctctagtgagag

SEQ ID NO: 1213 - RNA, 21 nt, synthetic construct
  source 1..21: mol_type = other RNA
gcaagccaggctaaacagttg

SEQ ID NO: 1214 - RNA, 21 nt, synthetic construct
  source 1..21: mol_type = other RNA
gcaagtcttgactggctctgc

SEQ ID NO: 1215 - RNA, 21 nt, synthetic construct
  source 1..21: mol_type = other RNA
gcaccactccgttttttctcc

SEQ ID NO: 1216 - RNA, 21 nt, synthetic construct
  source 1..21: mol_type = other RNA
gcactctcactagagaagaca

SEQ ID NO: 1217 - RNA, 21 nt, synthetic construct
  source 1..21: mol_type = other RNA
gcagaacgtgaagctgctcat

SEQ ID NO: 1218 - RNA, 21 nt, synthetic construct
  source 1..21: mol_type = other RNA
gcagagccagtcaagacttgc

SEQ ID NO: 1219 - RNA, 21 nt, synthetic construct
  source 1..21: mol_type = other RNA
gcagctgaaaagctttcctcc

SEQ ID NO: 1220 - RNA, 21 nt, synthetic construct
  source 1..21: mol_type = other RNA
gcagcttcacgttctgccttt

SEQ ID NO: 1221 - RNA, 21 nt, synthetic construct
  source 1..21: mol_type = other RNA
gcagctttcttggcttctagt

SEQ ID NO: 1222 - RNA, 21 nt, synthetic construct
  source 1..21: mol_type = other RNA
gcaggtaaatttaatgtaaag

SEQ ID NO: 1223 - RNA, 21 nt, synthetic construct
  source 1..21: mol_type = other RNA
gcatacctggtagggaagtaa

SEQ ID NO: 1224 - RNA, 21 nt, synthetic construct
  source 1..21: mol_type = other RNA
gccaactgtttagcctggctt

SEQ ID NO: 1225 - RNA, 21 nt, synthetic construct
  source 1..21: mol_type = other RNA
gccaagaaagctgcagctgaa

SEQ ID NO: 1226 - RNA, 21 nt, synthetic construct
  source 1..21: mol_type = other RNA
gccaggctaaacagttggcag

SEQ ID NO: 1227 - RNA, 21 nt, synthetic construct
  source 1..21: mol_type = other RNA
gccagtcaagacttgccgaca

SEQ ID NO: 1228 - RNA, 21 nt, synthetic construct
  source 1..21: mol_type = other RNA
gccattcaggtactgagttct

SEQ ID NO: 1229 - RNA, 21 nt, synthetic construct
  source 1..21: mol_type = other RNA
gccccatcacgtacaaaacaa

SEQ ID NO: 1230 - RNA, 21 nt, synthetic construct
  source 1..21: mol_type = other RNA
gccgaaaagaactcagtacct

SEQ ID NO: 1231 - RNA, 21 nt, synthetic construct
  source 1..21: mol_type = other RNA
gccgacaaaggaaactagaag

SEQ ID NO: 1232 - RNA, 21 nt, synthetic construct
  source 1..21: mol_type = other RNA
gcctggcttgcgttttcagtt

SEQ ID NO: 1233 - RNA, 21 nt, synthetic construct
  source 1..21: mol_type = other RNA
gcctttatacaaagtctctga

SEQ ID NO: 1234 - RNA, 21 nt, synthetic construct
  source 1..21: mol_type = other RNA
gcgaaaagtcaggatgttagc

SEQ ID NO: 1235 - RNA, 21 nt, synthetic construct
  source 1..21: mol_type = other RNA
gcgttttcagtttgttttgta

SEQ ID NO: 1236 - RNA, 21 nt, synthetic construct
  source 1..21: mol_type = other RNA
gctaaacagttggcaggtaaa

SEQ ID NO: 1237 - RNA, 21 nt, synthetic construct
  source 1..21: mol_type = other RNA
gctaacatcctgacttttcgc

SEQ ID NO: 1238 - RNA, 21 nt, synthetic construct
  source 1..21: mol_type = other RNA
gctcaaataaaaatgaaaagg

SEQ ID NO: 1239 - RNA, 21 nt, synthetic construct
  source 1..21: mol_type = other RNA
gctcaggaggagaaaaaacgg

SEQ ID NO: 1240 - RNA, 21 nt, synthetic construct
  source 1..21: mol_type = other RNA
gctcatcctcaggttttcctc

SEQ ID NO: 1241 - RNA, 21 nt, synthetic construct
  source 1..21: mol_type = other RNA
gctctgctaacatcctgactt

SEQ ID NO: 1242 - RNA, 21 nt, synthetic construct
  source 1..21: mol_type = other RNA
gctgaaaagctttcctccctg

SEQ ID NO: 1243 - RNA, 21 nt, synthetic construct
  source 1..21: mol_type = other RNA
gctgacttttccttttcattt

SEQ ID NO: 1244 - RNA, 21 nt, synthetic construct
  source 1..21: mol_type = other RNA
gctgcagctgaaaagctttcc

SEQ ID NO: 1245 - RNA, 21 nt, synthetic construct
  source 1..21: mol_type = other RNA
gctgcagctttcttggcttct

SEQ ID NO: 1246 - RNA, 21 nt, synthetic construct
  source 1..21: mol_type = other RNA
gctgctcatcctcaggttttc

SEQ ID NO: 1247 - RNA, 21 nt, synthetic construct
  source 1..21: mol_type = other RNA
gctgtaatgtcttacttccct

SEQ ID NO: 1248 - RNA, 21 nt, synthetic construct
  source 1..21: mol_type = other RNA
gctgttctccagggaggaaag

SEQ ID NO: 1249 - RNA, 21 nt, synthetic construct
  source 1..21: mol_type = other RNA
gcttcacgttctgcctttata

SEQ ID NO: 1250 - RNA, 21 nt, synthetic construct
  source 1..21: mol_type = other RNA
gcttccacactcccaaactca

SEQ ID NO: 1251 - RNA, 21 nt, synthetic construct
  source 1..21: mol_type = other RNA
gcttctagtttcctttgtcgg

SEQ ID NO: 1252 - RNA, 21 nt, synthetic construct
  source 1..21: mol_type = other RNA
gcttgcgttttcagtttgttt

SEQ ID NO: 1253 - RNA, 21 nt, synthetic construct
  source 1..21: mol_type = other RNA
gctttacattaaatttacctg

SEQ ID NO: 1254 - RNA, 21 nt, synthetic construct
  source 1..21: mol_type = other RNA
gctttcctccctggagaacag

SEQ ID NO: 1255 - RNA, 21 nt, synthetic construct
  source 1..21: mol_type = other RNA
gctttcttggcttctagtttc

SEQ ID NO: 1256 - RNA, 21 nt, synthetic construct
  source 1..21: mol_type = other RNA
gcttttcagctgcagctttct

SEQ ID NO: 1257 - RNA, 21 nt, synthetic construct
  source 1..21: mol_type = other RNA
ggaaaacctgaggatgagcag

SEQ ID NO: 1258 - RNA, 21 nt, synthetic construct
  source 1..21: mol_type = other RNA
ggaaaagtcagccccatcacg

SEQ ID NO: 1259 - RNA, 21 nt, synthetic construct
  source 1..21: mol_type = other RNA
ggaaactagaagccaagaaag

SEQ ID NO: 1260 - RNA, 21 nt, synthetic construct
  source 1..21: mol_type = other RNA
ggaaagcttttcagctgcagc

SEQ ID NO: 1261 - RNA, 21 nt, synthetic construct
  source 1..21: mol_type = other RNA
ggaagctcaggaggagaaaaa

SEQ ID NO: 1262 - RNA, 21 nt, synthetic construct
  source 1..21: mol_type = other RNA
ggaagtaagacattacagcct

SEQ ID NO: 1263 - RNA, 21 nt, synthetic construct
  source 1..21: mol_type = other RNA
ggagaaaaaacggagtggtgc

SEQ ID NO: 1264 - RNA, 21 nt, synthetic construct
  source 1..21: mol_type = other RNA
ggagaacagctcaaataaaaa

SEQ ID NO: 1265 - RNA, 21 nt, synthetic construct
  source 1..21: mol_type = other RNA
ggaggaaaacctgaggatgag

SEQ ID NO: 1266 - RNA, 21 nt, synthetic construct
  source 1..21: mol_type = other RNA
ggaggaaagcttttcagctgc

SEQ ID NO: 1267 - RNA, 21 nt, synthetic construct
  source 1..21: mol_type = other RNA
ggaggagaaaaaacggagtgg

SEQ ID NO: 1268 - RNA, 21 nt, synthetic construct
  source 1..21: mol_type = other RNA
ggagtggtgccattcaggtac

SEQ ID NO: 1269 - RNA, 21 nt, synthetic construct
  source 1..21: mol_type = other RNA
ggagtgtggaagctcaggagg

SEQ ID NO: 1270 - RNA, 21 nt, synthetic construct
  source 1..21: mol_type = other RNA
ggatgagcagcttcacgttct

SEQ ID NO: 1271 - RNA, 21 nt, synthetic construct
  source 1..21: mol_type = other RNA
ggatgagtttgggagtgtgga

SEQ ID NO: 1272 - RNA, 21 nt, synthetic construct
  source 1..21: mol_type = other RNA
ggatgttagcagagccagtca

SEQ ID NO: 1273 - RNA, 21 nt, synthetic construct
  source 1..21: mol_type = other RNA
ggcaagtcttgactggctctg

SEQ ID NO: 1274 - RNA, 21 nt, synthetic construct
  source 1..21: mol_type = other RNA
ggcaccactccgttttttctc

SEQ ID NO: 1275 - RNA, 21 nt, synthetic construct
  source 1..21: mol_type = other RNA
ggcagaacgtgaagctgctca

SEQ ID NO: 1276 - RNA, 21 nt, synthetic construct
  source 1..21: mol_type = other RNA
ggcaggtaaatttaatgtaaa

SEQ ID NO: 1277 - RNA, 21 nt, synthetic construct
  source 1..21: mol_type = other RNA
ggcgaaaagtcaggatgttag

SEQ ID NO: 1278 - RNA, 21 nt, synthetic construct
  source 1..21: mol_type = other RNA
ggctaaacagttggcaggtaa

SEQ ID NO: 1279 - RNA, 21 nt, synthetic construct
  source 1..21: mol_type = other RNA
ggctctgctaacatcctgact

SEQ ID NO: 1280 - RNA, 21 nt, synthetic construct
  source 1..21: mol_type = other RNA
ggctgacttttccttttcatt

SEQ ID NO: 1281 - RNA, 21 nt, synthetic construct
  source 1..21: mol_type = other RNA
ggctgtaatgtcttacttccc

SEQ ID NO: 1282 - RNA, 21 nt, synthetic construct
  source 1..21: mol_type = other RNA
ggcttctagtttcctttgtcg

SEQ ID NO: 1283 - RNA, 21 nt, synthetic construct
  source 1..21: mol_type = other RNA
ggcttgcgttttcagtttgtt

SEQ ID NO: 1284 - RNA, 21 nt, synthetic construct
  source 1..21: mol_type = other RNA
gggaagtaagacattacagcc

SEQ ID NO: 1285 - RNA, 21 nt, synthetic construct
  source 1..21: mol_type = other RNA
gggaggaaagcttttcagctg

SEQ ID NO: 1286 - RNA, 21 nt, synthetic construct
  source 1..21: mol_type = other RNA
gggagtgtggaagctcaggag

SEQ ID NO: 1287 - RNA, 21 nt, synthetic construct
  source 1..21: mol_type = other RNA
gggctgacttttccttttcat

SEQ ID NO: 1288 - RNA, 21 nt, synthetic construct
  source 1..21: mol_type = other RNA
ggggctgacttttccttttca

SEQ ID NO: 1289 - RNA, 21 nt, synthetic construct
  source 1..21: mol_type = other RNA
ggtactgagttcttttcggcg

SEQ ID NO: 1290 - RNA, 21 nt, synthetic construct
  source 1..21: mol_type = other RNA
ggtagggaagtaagacattac

SEQ ID NO: 1291 - RNA, 21 nt, synthetic construct
  source 1..21: mol_type = other RNA
ggtatgcactctcactagaga

SEQ ID NO: 1292 - RNA, 21 nt, synthetic construct
  source 1..21: mol_type = other RNA
ggtgccattcaggtactgagt

SEQ ID NO: 1293 - RNA, 21 nt, synthetic construct
  source 1..21: mol_type = other RNA
ggttttcctccaaattctcga

SEQ ID NO: 1294 - RNA, 21 nt, synthetic construct
  source 1..21: mol_type = other RNA
gtaatgtcttacttccctacc

SEQ ID NO: 1295 - RNA, 21 nt, synthetic construct
  source 1..21: mol_type = other RNA
gtacaaaacaaactgaaaacg

SEQ ID NO: 1296 - RNA, 21 nt, synthetic construct
  source 1..21: mol_type = other RNA
gtacctgaatggcaccactcc

SEQ ID NO: 1297 - RNA, 21 nt, synthetic construct
  source 1..21: mol_type = other RNA
gtacgtgatggggctgacttt

SEQ ID NO: 1298 - RNA, 21 nt, synthetic construct
  source 1..21: mol_type = other RNA
gtactgagttcttttcggcga

SEQ ID NO: 1299 - RNA, 21 nt, synthetic construct
  source 1..21: mol_type = other RNA
gtagggaagtaagacattaca

SEQ ID NO: 1300 - RNA, 21 nt, synthetic construct
  source 1..21: mol_type = other RNA
gtagttgaggctgtaatgtct

SEQ ID NO: 1301 - RNA, 21 nt, synthetic construct
  source 1..21: mol_type = other RNA
gtataaaggcagaacgtgaag

SEQ ID NO: 1302 - RNA, 21 nt, synthetic construct
  source 1..21: mol_type = other RNA
gtatgcactctcactagagaa

SEQ ID NO: 1303 - RNA, 21 nt, synthetic construct
  source 1..21: mol_type = other RNA
gtcaagacttgccgacaaagg

SEQ ID NO: 1304 - RNA, 21 nt, synthetic construct
  source 1..21: mol_type = other RNA
gtcagagactttgtataaagg

SEQ ID NO: 1305 - RNA, 21 nt, synthetic construct
  source 1..21: mol_type = other RNA
gtcagccccatcacgtacaaa

SEQ ID NO: 1306 - RNA, 21 nt, synthetic construct
  source 1..21: mol_type = other RNA
gtcaggatgttagcagagcca

SEQ ID NO: 1307 - RNA, 21 nt, synthetic construct
  source 1..21: mol_type = other RNA
gtcggcaagtcttgactggct

SEQ ID NO: 1308 - RNA, 21 nt, synthetic construct
  source 1..21: mol_type = other RNA
gtctctgacgtggatgagttt

SEQ ID NO: 1309 - RNA, 21 nt, synthetic construct
  source 1..21: mol_type = other RNA
gtcttacttccctaccaggta

SEQ ID NO: 1310 - RNA, 21 nt, synthetic construct
  source 1..21: mol_type = other RNA
gtcttctctagtgagagtgca

SEQ ID NO: 1311 - RNA, 21 nt, synthetic construct
  source 1..21: mol_type = other RNA
gtcttgactggctctgctaac

SEQ ID NO: 1312 - RNA, 21 nt, synthetic construct
  source 1..21: mol_type = other RNA
gtgaagctgctcatcctcagg

SEQ ID NO: 1313 - RNA, 21 nt, synthetic construct
  source 1..21: mol_type = other RNA
gtgagagtgcatacctggtag

SEQ ID NO: 1314 - RNA, 21 nt, synthetic construct
  source 1..21: mol_type = other RNA
gtgatggggctgacttttcct

SEQ ID NO: 1315 - RNA, 21 nt, synthetic construct
  source 1..21: mol_type = other RNA
gtgcatacctggtagggaagt

SEQ ID NO: 1316 - RNA, 21 nt, synthetic construct
  source 1..21: mol_type = other RNA
gtgccattcaggtactgagtt

SEQ ID NO: 1317 - RNA, 21 nt, synthetic construct
  source 1..21: mol_type = other RNA
gtggaagctcaggaggagaaa

SEQ ID NO: 1318 - RNA, 21 nt, synthetic construct
  source 1..21: mol_type = other RNA
gtggatgagtttgggagtgtg

SEQ ID NO: 1319 - RNA, 21 nt, synthetic construct
  source 1..21: mol_type = other RNA
gtggtgccattcaggtactga

SEQ ID NO: 1320 - RNA, 21 nt, synthetic construct
  source 1..21: mol_type = other RNA
gtgtggaagctcaggaggaga

SEQ ID NO: 1321 - RNA, 21 nt, synthetic construct
  source 1..21: mol_type = other RNA
gttagcagagccagtcaagac

SEQ ID NO: 1322 - RNA, 21 nt, synthetic construct
  source 1..21: mol_type = other RNA
gttctccagggaggaaagctt

SEQ ID NO: 1323 - RNA, 21 nt, synthetic construct
  source 1..21: mol_type = other RNA
gttctgcctttatacaaagtc

SEQ ID NO: 1324 - RNA, 21 nt, synthetic construct
  source 1..21: mol_type = other RNA
gttcttttcggcgaaaagtca

SEQ ID NO: 1325 - RNA, 21 nt, synthetic construct
  source 1..21: mol_type = other RNA
gttgaggctgtaatgtcttac

SEQ ID NO: 1326 - RNA, 21 nt, synthetic construct
  source 1..21: mol_type = other RNA
gttggcaggtaaatttaatgt

SEQ ID NO: 1327 - RNA, 21 nt, synthetic construct
  source 1..21: mol_type = other RNA
gtttagcctggcttgcgtttt

SEQ ID NO: 1328 - RNA, 21 nt, synthetic construct
  source 1..21: mol_type = other RNA
gtttcctttgtcggcaagtct

SEQ ID NO: 1329 - RNA, 21 nt, synthetic construct
  source 1..21: mol_type = other RNA
gtttgggagtgtggaagctca

SEQ ID NO: 1330 - RNA, 21 nt, synthetic construct
  source 1..21: mol_type = other RNA
gtttgttttgtacgtgatggg

SEQ ID NO: 1331 - RNA, 21 nt, synthetic construct
  source 1..21: mol_type = other RNA
gttttcagtttgttttgtacg

SEQ ID NO: 1332 - RNA, 21 nt, synthetic construct
  source 1..21: mol_type = other RNA
gttttcctccaaattctcgat

SEQ ID NO: 1333 - RNA, 21 nt, synthetic construct
  source 1..21: mol_type = other RNA
gttttgtacgtgatggggctg

SEQ ID NO: 1334 - RNA, 21 nt, synthetic construct
  source 1..21: mol_type = other RNA
gttttttctcctcctgagctt

SEQ ID NO: 1335 - RNA, 21 nt, synthetic construct
  source 1..21: mol_type = other RNA
taaacagttggcaggtaaatt

SEQ ID NO: 1336 - RNA, 21 nt, synthetic construct
  source 1..21: mol_type = other RNA
taaaggcagaacgtgaagctg

SEQ ID NO: 1337 - RNA, 21 nt, synthetic construct
  source 1..21: mol_type = other RNA
taaatttacctgccaactgtt

SEQ ID NO: 1338 - RNA, 21 nt, synthetic construct
  source 1..21: mol_type = other RNA
taacatcctgacttttcgccg

SEQ ID NO: 1339 - RNA, 21 nt, synthetic construct
  source 1..21: mol_type = other RNA
taatgtcttacttccctacca

SEQ ID NO: 1340 - RNA, 21 nt, synthetic construct
  source 1..21: mol_type = other RNA
tacaaaacaaactgaaaacgc

SEQ ID NO: 1341 - RNA, 21 nt, synthetic construct
  source 1..21: mol_type = other RNA
tacaaagtctctgacgtggat

SEQ ID NO: 1342 - RNA, 21 nt, synthetic construct
  source 1..21: mol_type = other RNA
tacattaaatttacctgccaa

SEQ ID NO: 1343 - RNA, 21 nt, synthetic construct
  source 1..21: mol_type = other RNA
taccaggtatgcactctcact

SEQ ID NO: 1344 - RNA, 21 nt, synthetic construct
  source 1..21: mol_type = other RNA
tacctgaatggcaccactccg

SEQ ID NO: 1345 - RNA, 21 nt, synthetic construct
  source 1..21: mol_type = other RNA
tacctgccaactgtttagcct

SEQ ID NO: 1346 - RNA, 21 nt, synthetic construct
  source 1..21: mol_type = other RNA
tacctggtagggaagtaagac

SEQ ID NO: 1347 - RNA, 21 nt, synthetic construct
  source 1..21: mol_type = other RNA
tacgtgatggggctgactttt

SEQ ID NO: 1348 - RNA, 21 nt, synthetic construct
  source 1..21: mol_type = other RNA
tactgagttcttttcggcgaa

SEQ ID NO: 1349 - RNA, 21 nt, synthetic construct
  source 1..21: mol_type = other RNA
tacttccctaccaggtatgca

SEQ ID NO: 1350 - RNA, 21 nt, synthetic construct
  source 1..21: mol_type = other RNA
tagaagccaagaaagctgcag

SEQ ID NO: 1351 - RNA, 21 nt, synthetic construct
  source 1..21: mol_type = other RNA
tagagaagacaatcgagaatt

SEQ ID NO: 1352 - RNA, 21 nt, synthetic construct
  source 1..21: mol_type = other RNA
tagcagagccagtcaagactt

SEQ ID NO: 1353 - RNA, 21 nt, synthetic construct
  source 1..21: mol_type = other RNA
tagcctggcttgcgttttcag

SEQ ID NO: 1354 - RNA, 21 nt, synthetic construct
  source 1..21: mol_type = other RNA
tagggaagtaagacattacag

SEQ ID NO: 1355 - RNA, 21 nt, synthetic construct
  source 1..21: mol_type = other RNA
tagtgagagtgcatacctggt

SEQ ID NO: 1356 - RNA, 21 nt, synthetic construct
  source 1..21: mol_type = other RNA
tagttgaggctgtaatgtctt

SEQ ID NO: 1357 - RNA, 21 nt, synthetic construct
  source 1..21: mol_type = other RNA
tagtttcctttgtcggcaagt

SEQ ID NO: 1358 - RNA, 21 nt, synthetic construct
  source 1..21: mol_type = other RNA
tataaaggcagaacgtgaagc

SEQ ID NO: 1359 - RNA, 21 nt, synthetic construct
  source 1..21: mol_type = other RNA
tatacaaagtctctgacgtgg

SEQ ID NO: 1360 - RNA, 21 nt, synthetic construct
  source 1..21: mol_type = other RNA
tatgcactctcactagagaag

SEQ ID NO: 1361 - RNA, 21 nt, synthetic construct
  source 1..21: mol_type = other RNA
tatttgagctgttctccaggg

SEQ ID NO: 1362 - RNA, 21 nt, synthetic construct
  source 1..21: mol_type = other RNA
tcaagacttgccgacaaagga

SEQ ID NO: 1363 - RNA, 21 nt, synthetic construct
  source 1..21: mol_type = other RNA
tcacgtacaaaacaaactgaa

SEQ ID NO: 1364 - RNA, 21 nt, synthetic construct
  source 1..21: mol_type = other RNA
tcacgttctgcctttatacaa

SEQ ID NO: 1365 - RNA, 21 nt, synthetic construct
  source 1..21: mol_type = other RNA
tcactagagaagacaatcgag

SEQ ID NO: 1366 - RNA, 21 nt, synthetic construct
  source 1..21: mol_type = other RNA
tcagagactttgtataaaggc

SEQ ID NO: 1367 - RNA, 21 nt, synthetic construct
  source 1..21: mol_type = other RNA
tcagccccatcacgtacaaaa

SEQ ID NO: 1368 - RNA, 21 nt, synthetic construct
  source 1..21: mol_type = other RNA
tcagctgcagctttcttggct

SEQ ID NO: 1369 - RNA, 21 nt, synthetic construct
  source 1..21: mol_type = other RNA
tcaggaggagaaaaaacggag

SEQ ID NO: 1370 - RNA, 21 nt, synthetic construct
  source 1..21: mol_type = other RNA
tcaggatgttagcagagccag

SEQ ID NO: 1371 - RNA, 21 nt, synthetic construct
  source 1..21: mol_type = other RNA
tcaggtactgagttcttttcg

SEQ ID NO: 1372 - RNA, 21 nt, synthetic construct
  source 1..21: mol_type = other RNA
tcaggttttcctccaaattct

SEQ ID NO: 1373 - RNA, 21 nt, synthetic construct
  source 1..21: mol_type = other RNA
tcagtacctgaatggcaccac

SEQ ID NO: 1374 - RNA, 21 nt, synthetic construct
  source 1..21: mol_type = other RNA
tcagtttgttttgtacgtgat

SEQ ID NO: 1375 - RNA, 21 nt, synthetic construct
  source 1..21: mol_type = other RNA
tcatccacgtcagagactttg

SEQ ID NO: 1376 - RNA, 21 nt, synthetic construct
  source 1..21: mol_type = other RNA
tcatcctcaggttttcctcca

SEQ ID NO: 1377 - RNA, 21 nt, synthetic construct
  source 1..21: mol_type = other RNA
tcatttttatttgagctgttc

SEQ ID NO: 1378 - RNA, 21 nt, synthetic construct
  source 1..21: mol_type = other RNA
tccaaattctcgattgtcttc

SEQ ID NO: 1379 - RNA, 21 nt, synthetic construct
  source 1..21: mol_type = other RNA
tccacactcccaaactcatcc

SEQ ID NO: 1380 - RNA, 21 nt, synthetic construct
  source 1..21: mol_type = other RNA
tccacgtcagagactttgtat

SEQ ID NO: 1381 - RNA, 21 nt, synthetic construct
  source 1..21: mol_type = other RNA
tccagggaggaaagcttttca

SEQ ID NO: 1382 - RNA, 21 nt, synthetic construct
  source 1..21: mol_type = other RNA
tcccaaactcatccacgtcag

SEQ ID NO: 1383 - RNA, 21 nt, synthetic construct
  source 1..21: mol_type = other RNA
tccctaccaggtatgcactct

SEQ ID NO: 1384 - RNA, 21 nt, synthetic construct
  source 1..21: mol_type = other RNA
tccctggagaacagctcaaat

SEQ ID NO: 1385 - RNA, 21 nt, synthetic construct
  source 1..21: mol_type = other RNA
tccgttttttctcctcctgag

SEQ ID NO: 1386 - RNA, 21 nt, synthetic construct
  source 1..21: mol_type = other RNA
tcctcaggttttcctccaaat

SEQ ID NO: 1387 - RNA, 21 nt, synthetic construct
  source 1..21: mol_type = other RNA
tcctccaaattctcgattgtc

SEQ ID NO: 1388 - RNA, 21 nt, synthetic construct
  source 1..21: mol_type = other RNA
tcctccctggagaacagctca

SEQ ID NO: 1389 - RNA, 21 nt, synthetic construct
  source 1..21: mol_type = other RNA
tcctcctgagcttccacactc

SEQ ID NO: 1390 - RNA, 21 nt, synthetic construct
  source 1..21: mol_type = other RNA
tcctgacttttcgccgaaaag

SEQ ID NO: 1391 - RNA, 21 nt, synthetic construct
  source 1..21: mol_type = other RNA
tcctgagcttccacactccca

SEQ ID NO: 1392 - RNA, 21 nt, synthetic construct
  source 1..21: mol_type = other RNA
tcctttgtcggcaagtcttga

SEQ ID NO: 1393 - RNA, 21 nt, synthetic construct
  source 1..21: mol_type = other RNA
tcgagaatttggaggaaaacc

SEQ ID NO: 1394 - RNA, 21 nt, synthetic construct
  source 1..21: mol_type = other RNA
tcgattgtcttctctagtgag

SEQ ID NO: 1395 - RNA, 21 nt, synthetic construct
  source 1..21: mol_type = other RNA
tcgccgaaaagaactcagtac

SEQ ID NO: 1396 - RNA, 21 nt, synthetic construct
  source 1..21: mol_type = other RNA
tcggcaagtcttgactggctc

SEQ ID NO: 1397 - RNA, 21 nt, synthetic construct
  source 1..21: mol_type = other RNA
tcggcgaaaagtcaggatgtt

SEQ ID NO: 1398 - RNA, 21 nt, synthetic construct
  source 1..21: mol_type = other RNA
tctagtgagagtgcatacctg

SEQ ID NO: 1399 - RNA, 21 nt, synthetic construct
  source 1..21: mol_type = other RNA
tctagtttcctttgtcggcaa

SEQ ID NO: 1400 - RNA, 21 nt, synthetic construct
  source 1..21: mol_type = other RNA
tctcactagagaagacaatcg

SEQ ID NO: 1401 - RNA, 21 nt, synthetic construct
  source 1..21: mol_type = other RNA
tctccagggaggaaagctttt

SEQ ID NO: 1402 - RNA, 21 nt, synthetic construct
  source 1..21: mol_type = other RNA
tctcctcctgagcttccacac

SEQ ID NO: 1403 - RNA, 21 nt, synthetic construct
  source 1..21: mol_type = other RNA
tctcgattgtcttctctagtg

SEQ ID NO: 1404 - RNA, 21 nt, synthetic construct
  source 1..21: mol_type = other RNA
tctctagtgagagtgcatacc

SEQ ID NO: 1405 - RNA, 21 nt, synthetic construct
  source 1..21: mol_type = other RNA
tctctgacgtggatgagtttg

SEQ ID NO: 1406 - RNA, 21 nt, synthetic construct
  source 1..21: mol_type = other RNA
tctgacgtggatgagtttggg

SEQ ID NO: 1407 - RNA, 21 nt, synthetic construct
  source 1..21: mol_type = other RNA
tctgcctttatacaaagtctc

SEQ ID NO: 1408 - RNA, 21 nt, synthetic construct
  source 1..21: mol_type = other RNA
tctgctaacatcctgactttt

SEQ ID NO: 1409 - RNA, 21 nt, synthetic construct
  source 1..21: mol_type = other RNA
tcttacttccctaccaggtat

SEQ ID NO: 1410 - RNA, 21 nt, synthetic construct
  source 1..21: mol_type = other RNA
tcttctctagtgagagtgcat

SEQ ID NO: 1411 - RNA, 21 nt, synthetic construct
  source 1..21: mol_type = other RNA
tcttgactggctctgctaaca

SEQ ID NO: 1412 - RNA, 21 nt, synthetic construct
  source 1..21: mol_type = other RNA
tcttggcttctagtttccttt

SEQ ID NO: 1413 - RNA, 21 nt, synthetic construct
  source 1..21: mol_type = other RNA
tcttttcggcgaaaagtcagg

SEQ ID NO: 1414 - RNA, 21 nt, synthetic construct
  source 1..21: mol_type = other RNA
tgaaaacgcaagccaggctaa

SEQ ID NO: 1415 - RNA, 21 nt, synthetic construct
  source 1..21: mol_type = other RNA
tgaaaagctttcctccctgga

SEQ ID NO: 1416 - RNA, 21 nt, synthetic construct
  source 1..21: mol_type = other RNA
tgaaaaggaaaagtcagcccc

SEQ ID NO: 1417 - RNA, 21 nt, synthetic construct
  source 1..21: mol_type = other RNA
tgaagctgctcatcctcaggt

SEQ ID NO: 1418 - RNA, 21 nt, synthetic construct
  source 1..21: mol_type = other RNA
tgaatggcaccactccgtttt

SEQ ID NO: 1419 - RNA, 21 nt, synthetic construct
  source 1..21: mol_type = other RNA
tgacgtggatgagtttgggag

SEQ ID NO: 1420 - RNA, 21 nt, synthetic construct
  source 1..21: mol_type = other RNA
tgactggctctgctaacatcc

SEQ ID NO: 1421 - RNA, 21 nt, synthetic construct
  source 1..21: mol_type = other RNA
tgacttttcgccgaaaagaac

SEQ ID NO: 1422 - RNA, 21 nt, synthetic construct
  source 1..21: mol_type = other RNA
tgagagtgcatacctggtagg

SEQ ID NO: 1423 - RNA, 21 nt, synthetic construct
  source 1..21: mol_type = other RNA
tgagcagcttcacgttctgcc

SEQ ID NO: 1424 - RNA, 21 nt, synthetic construct
  source 1..21: mol_type = other RNA
tgagctgttctccagggagga

SEQ ID NO: 1425 - RNA, 21 nt, synthetic construct
  source 1..21: mol_type = other RNA
tgagcttccacactcccaaac

SEQ ID NO: 1426 - RNA, 21 nt, synthetic construct
  source 1..21: mol_type = other RNA
tgaggatgagcagcttcacgt

SEQ ID NO: 1427 - RNA, 21 nt, synthetic construct
  source 1..21: mol_type = other RNA
tgaggctgtaatgtcttactt

SEQ ID NO: 1428 - RNA, 21 nt, synthetic construct
  source 1..21: mol_type = other RNA
tgagttcttttcggcgaaaag

SEQ ID NO: 1429 - RNA, 21 nt, synthetic construct
  source 1..21: mol_type = other RNA
tgagtttgggagtgtggaagc

SEQ ID NO: 1430 - RNA, 21 nt, synthetic construct
  source 1..21: mol_type = other RNA
tgatggggctgacttttcctt

SEQ ID NO: 1431 - RNA, 21 nt, synthetic construct
  source 1..21: mol_type = other RNA
tgcactctcactagagaagac

SEQ ID NO: 1432 - RNA, 21 nt, synthetic construct
  source 1..21: mol_type = other RNA
tgcagctgaaaagctttcctc

SEQ ID NO: 1433 - RNA, 21 nt, synthetic construct
  source 1..21: mol_type = other RNA
tgcagctttcttggcttctag

SEQ ID NO: 1434 - RNA, 21 nt, synthetic construct
  source 1..21: mol_type = other RNA
tgcatacctggtagggaagta

SEQ ID NO: 1435 - RNA, 21 nt, synthetic construct
  source 1..21: mol_type = other RNA
tgccaactgtttagcctggct

SEQ ID NO: 1436 - RNA, 21 nt, synthetic construct
  source 1..21: mol_type = other RNA
tgccattcaggtactgagttc

SEQ ID NO: 1437 - RNA, 21 nt, synthetic construct
  source 1..21: mol_type = other RNA
tgccgacaaaggaaactagaa

SEQ ID NO: 1438 - RNA, 21 nt, synthetic construct
  source 1..21: mol_type = other RNA
tgcctttatacaaagtctctg

SEQ ID NO: 1439 - RNA, 21 nt, synthetic construct
  source 1..21: mol_type = other RNA
tgcgttttcagtttgttttgt

SEQ ID NO: 1440 - RNA, 21 nt, synthetic construct
  source 1..21: mol_type = other RNA
tgctaacatcctgacttttcg

SEQ ID NO: 1441 - RNA, 21 nt, synthetic construct
  source 1..21: mol_type = other RNA
tgctcatcctcaggttttcct

SEQ ID NO: 1442 - RNA, 21 nt, synthetic construct
  source 1..21: mol_type = other RNA
tggaagctcaggaggagaaaa

SEQ ID NO: 1443 - RNA, 21 nt, synthetic construct
  source 1..21: mol_type = other RNA
tggagaacagctcaaataaaa

SEQ ID NO: 1444 - RNA, 21 nt, synthetic construct
  source 1..21: mol_type = other RNA
tggaggaaaacctgaggatga

SEQ ID NO: 1445 - RNA, 21 nt, synthetic construct
  source 1..21: mol_type = other RNA
tggatgagtttgggagtgtgg

SEQ ID NO: 1446 - RNA, 21 nt, synthetic construct
  source 1..21: mol_type = other RNA
tggcaccactccgttttttct

SEQ ID NO: 1447 - RNA, 21 nt, synthetic construct
  source 1..21: mol_type = other RNA
tggcaggtaaatttaatgtaa

SEQ ID NO: 1448 - RNA, 21 nt, synthetic construct
  source 1..21: mol_type = other RNA
tggctctgctaacatcctgac

SEQ ID NO: 1449 - RNA, 21 nt, synthetic construct
  source 1..21: mol_type = other RNA
tggcttctagtttcctttgtc

SEQ ID NO: 1450 - RNA, 21 nt, synthetic construct
  source 1..21: mol_type = other RNA
tggcttgcgttttcagtttgt

SEQ ID NO: 1451 - RNA, 21 nt, synthetic construct
  source 1..21: mol_type = other RNA
tgggagtgtggaagctcagga

SEQ ID NO: 1452 - RNA, 21 nt, synthetic construct
  source 1..21: mol_type = other RNA
tggggctgacttttccttttc

SEQ ID NO: 1453 - RNA, 21 nt, synthetic construct
  source 1..21: mol_type = other RNA
tggtagggaagtaagacatta

SEQ ID NO: 1454 - RNA, 21 nt, synthetic construct
  source 1..21: mol_type = other RNA
tggtgccattcaggtactgag

SEQ ID NO: 1455 - RNA, 21 nt, synthetic construct
  source 1..21: mol_type = other RNA
tgtaatgtcttacttccctac

SEQ ID NO: 1456 - RNA, 21 nt, synthetic construct
  source 1..21: mol_type = other RNA
tgtacgtgatggggctgactt

SEQ ID NO: 1457 - RNA, 21 nt, synthetic construct
  source 1..21: mol_type = other RNA
tgtagttgaggctgtaatgtc

SEQ ID NO: 1458 - RNA, 21 nt, synthetic construct
  source 1..21: mol_type = other RNA
tgtataaaggcagaacgtgaa

SEQ ID NO: 1459 - RNA, 21 nt, synthetic construct
  source 1..21: mol_type = other RNA
tgtcggcaagtcttgactggc

SEQ ID NO: 1460 - RNA, 21 nt, synthetic construct
  source 1..21: mol_type = other RNA
tgtcttacttccctaccaggt

SEQ ID NO: 1461 - RNA, 21 nt, synthetic construct
  source 1..21: mol_type = other RNA
tgtcttctctagtgagagtgc

SEQ ID NO: 1462 - RNA, 21 nt, synthetic construct
  source 1..21: mol_type = other RNA
tgtggaagctcaggaggagaa

SEQ ID NO: 1463 - RNA, 21 nt, synthetic construct
  source 1..21: mol_type = other RNA
tgttagcagagccagtcaaga

SEQ ID NO: 1464 - RNA, 21 nt, synthetic construct
  source 1..21: mol_type = other RNA
tgttctccagggaggaaagct

SEQ ID NO: 1465 - RNA, 21 nt, synthetic construct
  source 1..21: mol_type = other RNA
tgtttagcctggcttgcgttt

SEQ ID NO: 1466 - RNA, 21 nt, synthetic construct
  source 1..21: mol_type = other RNA
tgttttgtacgtgatggggct

SEQ ID NO: 1467 - RNA, 21 nt, synthetic construct
  source 1..21: mol_type = other RNA
ttaaatttacctgccaactgt

SEQ ID NO: 1468 - RNA, 21 nt, synthetic construct
  source 1..21: mol_type = other RNA
ttacattaaatttacctgcca

SEQ ID NO: 1469 - RNA, 21 nt, synthetic construct
  source 1..21: mol_type = other RNA
ttacctgccaactgtttagcc

SEQ ID NO: 1470 - RNA, 21 nt, synthetic construct
  source 1..21: mol_type = other RNA
ttacttccctaccaggtatgc

SEQ ID NO: 1471 - RNA, 21 nt, synthetic construct
  source 1..21: mol_type = other RNA
ttagcagagccagtcaagact

SEQ ID NO: 1472 - RNA, 21 nt, synthetic construct
  source 1..21: mol_type = other RNA
ttagcctggcttgcgttttca

SEQ ID NO: 1473 - RNA, 21 nt, synthetic construct
  source 1..21: mol_type = other RNA
ttatacaaagtctctgacgtg

SEQ ID NO: 1474 - RNA, 21 nt, synthetic construct
  source 1..21: mol_type = other RNA
ttatttgagctgttctccagg

SEQ ID NO: 1475 - RNA, 21 nt, synthetic construct
  source 1..21: mol_type = other RNA
ttcacgttctgcctttataca

SEQ ID NO: 1476 - RNA, 21 nt, synthetic construct
  source 1..21: mol_type = other RNA
ttcagctgcagctttcttggc

SEQ ID NO: 1477 - RNA, 21 nt, synthetic construct
  source 1..21: mol_type = other RNA
ttcaggtactgagttcttttc

SEQ ID NO: 1478 - RNA, 21 nt, synthetic construct
  source 1..21: mol_type = other RNA
ttcagtttgttttgtacgtga

SEQ ID NO: 1479 - RNA, 21 nt, synthetic construct
  source 1..21: mol_type = other RNA
ttccacactcccaaactcatc

SEQ ID NO: 1480 - RNA, 21 nt, synthetic construct
  source 1..21: mol_type = other RNA
ttccctaccaggtatgcactc

SEQ ID NO: 1481 - RNA, 21 nt, synthetic construct
  source 1..21: mol_type = other RNA
ttcctccaaattctcgattgt

SEQ ID NO: 1482 - RNA, 21 nt, synthetic construct
  source 1..21: mol_type = other RNA
ttcctccctggagaacagctc

SEQ ID NO: 1483 - RNA, 21 nt, synthetic construct
  source 1..21: mol_type = other RNA
ttcctttgtcggcaagtcttg

SEQ ID NO: 1484 - RNA, 21 nt, synthetic construct
  source 1..21: mol_type = other RNA
ttcgccgaaaagaactcagta

SEQ ID NO: 1485 - RNA, 21 nt, synthetic construct
  source 1..21: mol_type = other RNA
ttcggcgaaaagtcaggatgt

SEQ ID NO: 1486 - RNA, 21 nt, synthetic construct
  source 1..21: mol_type = other RNA
ttctagtttcctttgtcggca

SEQ ID NO: 1487 - RNA, 21 nt, synthetic construct
  source 1..21: mol_type = other RNA
ttctccagggaggaaagcttt

SEQ ID NO: 1488 - RNA, 21 nt, synthetic construct
  source 1..21: mol_type = other RNA
ttctcctcctgagcttccaca

SEQ ID NO: 1489 - RNA, 21 nt, synthetic construct
  source 1..21: mol_type = other RNA
ttctcgattgtcttctctagt

SEQ ID NO: 1490 - RNA, 21 nt, synthetic construct
  source 1..21: mol_type = other RNA
ttctctagtgagagtgcatac

SEQ ID NO: 1491 - RNA, 21 nt, synthetic construct
  source 1..21: mol_type = other RNA
ttctgcctttatacaaagtct

SEQ ID NO: 1492 - RNA, 21 nt, synthetic construct
  source 1..21: mol_type = other RNA
ttcttggcttctagtttcctt

SEQ ID NO: 1493 - RNA, 21 nt, synthetic construct
  source 1..21: mol_type = other RNA
ttcttttcggcgaaaagtcag

SEQ ID NO: 1494 - RNA, 21 nt, synthetic construct
  source 1..21: mol_type = other RNA
ttgactggctctgctaacatc

SEQ ID NO: 1495 - RNA, 21 nt, synthetic construct
  source 1..21: mol_type = other RNA
ttgagctgttctccagggagg

SEQ ID NO: 1496 - RNA, 21 nt, synthetic construct
  source 1..21: mol_type = other RNA
ttgaggctgtaatgtcttact

SEQ ID NO: 1497 - RNA, 21 nt, synthetic construct
  source 1..21: mol_type = other RNA
ttgccgacaaaggaaactaga

SEQ ID NO: 1498 - RNA, 21 nt, synthetic construct
  source 1..21: mol_type = other RNA
ttgcgttttcagtttgttttg

SEQ ID NO: 1499 - RNA, 21 nt, synthetic construct
  source 1..21: mol_type = other RNA
ttggaggaaaacctgaggatg

SEQ ID NO: 1500 - RNA, 21 nt, synthetic construct
  source 1..21: mol_type = other RNA
ttggcaggtaaatttaatgta

SEQ ID NO: 1501 - RNA, 21 nt, synthetic construct
  source 1..21: mol_type = other RNA
ttggcttctagtttcctttgt

SEQ ID NO: 1502 - RNA, 21 nt, synthetic construct
  source 1..21: mol_type = other RNA
ttgggagtgtggaagctcagg

SEQ ID NO: 1503 - RNA, 21 nt, synthetic construct
  source 1..21: mol_type = other RNA
ttgtacgtgatggggctgact

SEQ ID NO: 1504 - RNA, 21 nt, synthetic construct
  source 1..21: mol_type = other RNA
ttgtataaaggcagaacgtga

SEQ ID NO: 1505 - RNA, 21 nt, synthetic construct
  source 1..21: mol_type = other RNA
ttgtcggcaagtcttgactgg

SEQ ID NO: 1506 - RNA, 21 nt, synthetic construct
  source 1..21: mol_type = other RNA
ttgtcttctctagtgagagtg

SEQ ID NO: 1507 - RNA, 21 nt, synthetic construct
  source 1..21: mol_type = other RNA
ttgttttgtacgtgatggggc

SEQ ID NO: 1508 - RNA, 21 nt, synthetic construct
  source 1..21: mol_type = other RNA
tttacattaaatttacctgcc

SEQ ID NO: 1509 - RNA, 21 nt, synthetic construct
  source 1..21: mol_type = other RNA
tttacctgccaactgtttagc

SEQ ID NO: 1510 - RNA, 21 nt, synthetic construct
  source 1..21: mol_type = other RNA
tttagcctggcttgcgttttc

SEQ ID NO: 1511 - RNA, 21 nt, synthetic construct
  source 1..21: mol_type = other RNA
tttatacaaagtctctgacgt

SEQ ID NO: 1512 - RNA, 21 nt, synthetic construct
  source 1..21: mol_type = other RNA
tttatttgagctgttctccag

SEQ ID NO: 1513 - RNA, 21 nt, synthetic construct
  source 1..21: mol_type = other RNA
tttcagctgcagctttcttgg

SEQ ID NO: 1514 - RNA, 21 nt, synthetic construct
  source 1..21: mol_type = other RNA
tttcagtttgttttgtacgtg

SEQ ID NO: 1515 - RNA, 21 nt, synthetic construct
  source 1..21: mol_type = other RNA
tttcctccaaattctcgattg

SEQ ID NO: 1516 - RNA, 21 nt, synthetic construct
  source 1..21: mol_type = other RNA
tttcctccctggagaacagct

SEQ ID NO: 1517 - RNA, 21 nt, synthetic construct
  source 1..21: mol_type = other RNA
tttcctttgtcggcaagtctt

SEQ ID NO: 1518 - RNA, 21 nt, synthetic construct
  source 1..21: mol_type = other RNA
tttcgccgaaaagaactcagt

SEQ ID NO: 1519 - RNA, 21 nt, synthetic construct
  source 1..21: mol_type = other RNA
tttcggcgaaaagtcaggatg

SEQ ID NO: 1520 - RNA, 21 nt, synthetic construct
  source 1..21: mol_type = other RNA
tttctcctcctgagcttccac

SEQ ID NO: 1521 - RNA, 21 nt, synthetic construct
  source 1..21: mol_type = other RNA
tttcttggcttctagtttcct

SEQ ID NO: 1522 - RNA, 21 nt, synthetic construct
  source 1..21: mol_type = other RNA
tttgagctgttctccagggag

SEQ ID NO: 1523 - RNA, 21 nt, synthetic construct
  source 1..21: mol_type = other RNA
tttggaggaaaacctgaggat

SEQ ID NO: 1524 - RNA, 21 nt, synthetic construct
  source 1..21: mol_type = other RNA
tttgggagtgtggaagctcag

SEQ ID NO: 1525 - RNA, 21 nt, synthetic construct
  source 1..21: mol_type = other RNA
tttgtacgtgatggggctgac

SEQ ID NO: 1526 - RNA, 21 nt, synthetic construct
  source 1..21: mol_type = other RNA
tttgtataaaggcagaacgtg

SEQ ID NO: 1527 - RNA, 21 nt, synthetic construct
  source 1..21: mol_type = other RNA
tttgtcggcaagtcttgactg

SEQ ID NO: 1528 - RNA, 21 nt, synthetic construct
  source 1..21: mol_type = other RNA
tttgttttgtacgtgatgggg

SEQ ID NO: 1529 - RNA, 21 nt, synthetic construct
  source 1..21: mol_type = other RNA
ttttatttgagctgttctcca

SEQ ID NO: 1530 - RNA, 21 nt, synthetic construct
  source 1..21: mol_type = other RNA
ttttcagctgcagctttcttg

SEQ ID NO: 1531 - RNA, 21 nt, synthetic construct
  source 1..21: mol_type = other RNA
ttttcagtttgttttgtacgt

SEQ ID NO: 1532 - RNA, 21 nt, synthetic construct
  source 1..21: mol_type = other RNA
ttttcctccaaattctcgatt

SEQ ID NO: 1533 - RNA, 21 nt, synthetic construct
  source 1..21: mol_type = other RNA
ttttcgccgaaaagaactcag

SEQ ID NO: 1534 - RNA, 21 nt, synthetic construct
  source 1..21: mol_type = other RNA
ttttcggcgaaaagtcaggat

SEQ ID NO: 1535 - RNA, 21 nt, synthetic construct
  source 1..21: mol_type = other RNA
ttttctcctcctgagcttcca

SEQ ID NO: 1536 - RNA, 21 nt, synthetic construct
  source 1..21: mol_type = other RNA
ttttgtacgtgatggggctga

SEQ ID NO: 1537 - RNA, 21 nt, synthetic construct
  source 1..21: mol_type = other RNA
tttttatttgagctgttctcc

SEQ ID NO: 1538 - RNA, 21 nt, synthetic construct
  source 1..21: mol_type = other RNA
tttttctcctcctgagcttcc

SEQ ID NO: 1539 - RNA, 21 nt, synthetic construct
  source 1..21: mol_type = other RNA
ttttttctcctcctgagcttc

SEQ ID NO: 1540 - RNA, 22 nt, synthetic construct
  source 1..22: mol_type = other RNA
aaaaaacggagtggtgccattc

SEQ ID NO: 1541 - RNA, 22 nt, synthetic construct
  source 1..22: mol_type = other RNA
aaaaacggagtggtgccattca

SEQ ID NO: 1542 - RNA, 22 nt, synthetic construct
  source 1..22: mol_type = other RNA
aaaaatgaaaaggaaaagtcag

SEQ ID NO: 1543 - RNA, 22 nt, synthetic construct
  source 1..22: mol_type = other RNA
aaaacaaactgaaaacgcaagc

SEQ ID NO: 1544 - RNA, 22 nt, synthetic construct
  source 1..22: mol_type = other RNA
aaaacctgaggatgagcagctt

SEQ ID NO: 1545 - RNA, 22 nt, synthetic construct
  source 1..22: mol_type = other RNA
aaaacgcaagccaggctaaaca

SEQ ID NO: 1546 - RNA, 22 nt, synthetic construct
  source 1..22: mol_type = other RNA
aaaacggagtggtgccattcag

SEQ ID NO: 1547 - RNA, 22 nt, synthetic construct
  source 1..22: mol_type = other RNA
aaaagaactcagtacctgaatg

SEQ ID NO: 1548 - RNA, 22 nt, synthetic construct
  source 1..22: mol_type = other RNA
aaaagctttcctccctggagaa

SEQ ID NO: 1549 - RNA, 22 nt, synthetic construct
  source 1..22: mol_type = other RNA
aaaaggaaaagtcagccccatc

SEQ ID NO: 1550 - RNA, 22 nt, synthetic construct
  source 1..22: mol_type = other RNA
aaaagtcagccccatcacgtac

SEQ ID NO: 1551 - RNA, 22 nt, synthetic construct
  source 1..22: mol_type = other RNA
aaaagtcaggatgttagcagag

SEQ ID NO: 1552 - RNA, 22 nt, synthetic construct
  source 1..22: mol_type = other RNA
aaaatgaaaaggaaaagtcagc

SEQ ID NO: 1553 - RNA, 22 nt, synthetic construct
  source 1..22: mol_type = other RNA
aaacaaactgaaaacgcaagcc

SEQ ID NO: 1554 - RNA, 22 nt, synthetic construct
  source 1..22: mol_type = other RNA
aaacagttggcaggtaaattta

SEQ ID NO: 1555 - RNA, 22 nt, synthetic construct
  source 1..22: mol_type = other RNA
aaacctgaggatgagcagcttc

SEQ ID NO: 1556 - RNA, 22 nt, synthetic construct
  source 1..22: mol_type = other RNA
aaacgcaagccaggctaaacag

SEQ ID NO: 1557 - RNA, 22 nt, synthetic construct
  source 1..22: mol_type = other RNA
aaacggagtggtgccattcagg

SEQ ID NO: 1558 - RNA, 22 nt, synthetic construct
  source 1..22: mol_type = other RNA
aaactagaagccaagaaagctg

SEQ ID NO: 1559 - RNA, 22 nt, synthetic construct
  source 1..22: mol_type = other RNA
aaactcatccacgtcagagact

SEQ ID NO: 1560 - RNA, 22 nt, synthetic construct
  source 1..22: mol_type = other RNA
aaactgaaaacgcaagccaggc

SEQ ID NO: 1561 - RNA, 22 nt, synthetic construct
  source 1..22: mol_type = other RNA
aaagaactcagtacctgaatgg

SEQ ID NO: 1562 - RNA, 22 nt, synthetic construct
  source 1..22: mol_type = other RNA
aaagctgcagctgaaaagcttt

SEQ ID NO: 1563 - RNA, 22 nt, synthetic construct
  source 1..22: mol_type = other RNA
aaagctttcctccctggagaac

SEQ ID NO: 1564 - RNA, 22 nt, synthetic construct
  source 1..22: mol_type = other RNA
aaagcttttcagctgcagcttt

SEQ ID NO: 1565 - RNA, 22 nt, synthetic construct
  source 1..22: mol_type = other RNA
aaaggaaaagtcagccccatca

SEQ ID NO: 1566 - RNA, 22 nt, synthetic construct
  source 1..22: mol_type = other RNA
aaaggaaactagaagccaagaa

SEQ ID NO: 1567 - RNA, 22 nt, synthetic construct
  source 1..22: mol_type = other RNA
aaaggcagaacgtgaagctgct

SEQ ID NO: 1568 - RNA, 22 nt, synthetic construct
  source 1..22: mol_type = other RNA
aaagtcagccccatcacgtaca

SEQ ID NO: 1569 - RNA, 22 nt, synthetic construct
  source 1..22: mol_type = other RNA
aaagtcaggatgttagcagagc

SEQ ID NO: 1570 - RNA, 22 nt, synthetic construct
  source 1..22: mol_type = other RNA
aaagtctctgacgtggatgagt

SEQ ID NO: 1571 - RNA, 22 nt, synthetic construct
  source 1..22: mol_type = other RNA
aaatgaaaaggaaaagtcagcc

SEQ ID NO: 1572 - RNA, 22 nt, synthetic construct
  source 1..22: mol_type = other RNA
aaattctcgattgtcttctcta

SEQ ID NO: 1573 - RNA, 22 nt, synthetic construct
  source 1..22: mol_type = other RNA
aaatttacctgccaactgttta

SEQ ID NO: 1574 - RNA, 22 nt, synthetic construct
  source 1..22: mol_type = other RNA
aacaaactgaaaacgcaagcca

SEQ ID NO: 1575 - RNA, 22 nt, synthetic construct
  source 1..22: mol_type = other RNA
aacacatttatctacaaatgct

SEQ ID NO: 1576 - RNA, 22 nt, synthetic construct
  source 1..22: mol_type = other RNA
aacagttggcaggtaaatttaa

SEQ ID NO: 1577 - RNA, 22 nt, synthetic construct
  source 1..22: mol_type = other RNA
aacatcctgacttttcgccgaa

SEQ ID NO: 1578 - RNA, 22 nt, synthetic construct
  source 1..22: mol_type = other RNA
aacctgaggatgagcagcttca

SEQ ID NO: 1579 - RNA, 22 nt, synthetic construct
  source 1..22: mol_type = other RNA
aacgcaagccaggctaaacagt

SEQ ID NO: 1580 - RNA, 22 nt, synthetic construct
  source 1..22: mol_type = other RNA
aacggagtggtgccattcaggt

SEQ ID NO: 1581 - RNA, 22 nt, synthetic construct
  source 1..22: mol_type = other RNA
aacgtgaagctgctcatcctca

SEQ ID NO: 1582 - RNA, 22 nt, synthetic construct
  source 1..22: mol_type = other RNA
aactagaagccaagaaagctgc

SEQ ID NO: 1583 - RNA, 22 nt, synthetic construct
  source 1..22: mol_type = other RNA
aactcagtacctgaatggcacc

SEQ ID NO: 1584 - RNA, 22 nt, synthetic construct
  source 1..22: mol_type = other RNA
aactcatccacgtcagagactt

SEQ ID NO: 1585 - RNA, 22 nt, synthetic construct
  source 1..22: mol_type = other RNA
aactgaaaacgcaagccaggct

SEQ ID NO: 1586 - RNA, 22 nt, synthetic construct
  source 1..22: mol_type = other RNA
aactgtttagcctggcttgcgt

SEQ ID NO: 1587 - RNA, 22 nt, synthetic construct
  source 1..22: mol_type = other RNA
aagaaagctgcagctgaaaagc

SEQ ID NO: 1588 - RNA, 22 nt, synthetic construct
  source 1..22: mol_type = other RNA
aagaactcagtacctgaatggc

SEQ ID NO: 1589 - RNA, 22 nt, synthetic construct
  source 1..22: mol_type = other RNA
aagacaatcgagaatttggagg

SEQ ID NO: 1590 - RNA, 22 nt, synthetic construct
  source 1..22: mol_type = other RNA
aagacttgccgacaaaggaaac

SEQ ID NO: 1591 - RNA, 22 nt, synthetic construct
  source 1..22: mol_type = other RNA
aagccaagaaagctgcagctga

SEQ ID NO: 1592 - RNA, 22 nt, synthetic construct
  source 1..22: mol_type = other RNA
aagccaggctaaacagttggca

SEQ ID NO: 1593 - RNA, 22 nt, synthetic construct
  source 1..22: mol_type = other RNA
aagctcaggaggagaaaaaacg

SEQ ID NO: 1594 - RNA, 22 nt, synthetic construct
  source 1..22: mol_type = other RNA
aagctgcagctgaaaagctttc

SEQ ID NO: 1595 - RNA, 22 nt, synthetic construct
  source 1..22: mol_type = other RNA
aagctgctcatcctcaggtttt

SEQ ID NO: 1596 - RNA, 22 nt, synthetic construct
  source 1..22: mol_type = other RNA
aagctttcctccctggagaaca

SEQ ID NO: 1597 - RNA, 22 nt, synthetic construct
  source 1..22: mol_type = other RNA
aagcttttcagctgcagctttc

SEQ ID NO: 1598 - RNA, 22 nt, synthetic construct
  source 1..22: mol_type = other RNA
aaggaaaagtcagccccatcac

SEQ ID NO: 1599 - RNA, 22 nt, synthetic construct
  source 1..22: mol_type = other RNA
aaggaaactagaagccaagaaa

SEQ ID NO: 1600 - RNA, 22 nt, synthetic construct
  source 1..22: mol_type = other RNA
aaggcagaacgtgaagctgctc

SEQ ID NO: 1601 - RNA, 22 nt, synthetic construct
  source 1..22: mol_type = other RNA
aagtaagacattacagcctcaa

SEQ ID NO: 1602 - RNA, 22 nt, synthetic construct
  source 1..22: mol_type = other RNA
aagtcagccccatcacgtacaa

SEQ ID NO: 1603 - RNA, 22 nt, synthetic construct
  source 1..22: mol_type = other RNA
aagtcaggatgttagcagagcc

SEQ ID NO: 1604 - RNA, 22 nt, synthetic construct
  source 1..22: mol_type = other RNA
aagtctctgacgtggatgagtt

SEQ ID NO: 1605 - RNA, 22 nt, synthetic construct
  source 1..22: mol_type = other RNA
aagtcttgactggctctgctaa

SEQ ID NO: 1606 - RNA, 22 nt, synthetic construct
  source 1..22: mol_type = other RNA
aatcgagaatttggaggaaaac

SEQ ID NO: 1607 - RNA, 22 nt, synthetic construct
  source 1..22: mol_type = other RNA
aatgaaaaggaaaagtcagccc

SEQ ID NO: 1608 - RNA, 22 nt, synthetic construct
  source 1..22: mol_type = other RNA
aatggcaccactccgttttttc

SEQ ID NO: 1609 - RNA, 22 nt, synthetic construct
  source 1..22: mol_type = other RNA
aatgtcttacttccctaccagg

SEQ ID NO: 1610 - RNA, 22 nt, synthetic construct
  source 1..22: mol_type = other RNA
aattctcgattgtcttctctag

SEQ ID NO: 1611 - RNA, 22 nt, synthetic construct
  source 1..22: mol_type = other RNA
aatttacctgccaactgtttag

SEQ ID NO: 1612 - RNA, 22 nt, synthetic construct
  source 1..22: mol_type = other RNA
aatttggaggaaaacctgagga

SEQ ID NO: 1613 - RNA, 22 nt, synthetic construct
  source 1..22: mol_type = other RNA
acaaaacaaactgaaaacgcaa

SEQ ID NO: 1614 - RNA, 22 nt, synthetic construct
  source 1..22: mol_type = other RNA
acaaactgaaaacgcaagccag

SEQ ID NO: 1615 - RNA, 22 nt, synthetic construct
  source 1..22: mol_type = other RNA
acaaaggaaactagaagccaag

SEQ ID NO: 1616 - RNA, 22 nt, synthetic construct
  source 1..22: mol_type = other RNA
acaaagtctctgacgtggatga

SEQ ID NO: 1617 - RNA, 22 nt, synthetic construct
  source 1..22: mol_type = other RNA
acaatcgagaatttggaggaaa

SEQ ID NO: 1618 - RNA, 22 nt, synthetic construct
  source 1..22: mol_type = other RNA
acacatttatctacaaatgctt

SEQ ID NO: 1619 - RNA, 22 nt, synthetic construct
  source 1..22: mol_type = other RNA
acactcccaaactcatccacgt

SEQ ID NO: 1620 - RNA, 22 nt, synthetic construct
  source 1..22: mol_type = other RNA
acagttggcaggtaaatttaat

SEQ ID NO: 1621 - RNA, 22 nt, synthetic construct
  source 1..22: mol_type = other RNA
acatcctgacttttcgccgaaa

SEQ ID NO: 1622 - RNA, 22 nt, synthetic construct
  source 1..22: mol_type = other RNA
acattaaatttacctgccaact

SEQ ID NO: 1623 - RNA, 22 nt, synthetic construct
  source 1..22: mol_type = other RNA
accactccgttttttctcctcc

SEQ ID NO: 1624 - RNA, 22 nt, synthetic construct
  source 1..22: mol_type = other RNA
accaggtatgcactctcactag

SEQ ID NO: 1625 - RNA, 22 nt, synthetic construct
  source 1..22: mol_type = other RNA
acctgaatggcaccactccgtt

SEQ ID NO: 1626 - RNA, 22 nt, synthetic construct
  source 1..22: mol_type = other RNA
acctgaggatgagcagcttcac

SEQ ID NO: 1627 - RNA, 22 nt, synthetic construct
  source 1..22: mol_type = other RNA
acctgccaactgtttagcctgg

SEQ ID NO: 1628 - RNA, 22 nt, synthetic construct
  source 1..22: mol_type = other RNA
acctggtagggaagtaagacat

SEQ ID NO: 1629 - RNA, 22 nt, synthetic construct
  source 1..22: mol_type = other RNA
acctgtagttgaggctgtaatg

SEQ ID NO: 1630 - RNA, 22 nt, synthetic construct
  source 1..22: mol_type = other RNA
acgcaagccaggctaaacagtt

SEQ ID NO: 1631 - RNA, 22 nt, synthetic construct
  source 1..22: mol_type = other RNA
acggagtggtgccattcaggta

SEQ ID NO: 1632 - RNA, 22 nt, synthetic construct
  source 1..22: mol_type = other RNA
acgtacaaaacaaactgaaaac

SEQ ID NO: 1633 - RNA, 22 nt, synthetic construct
  source 1..22: mol_type = other RNA
acgtcagagactttgtataaag

SEQ ID NO: 1634 - RNA, 22 nt, synthetic construct
  source 1..22: mol_type = other RNA
acgtgaagctgctcatcctcag

SEQ ID NO: 1635 - RNA, 22 nt, synthetic construct
  source 1..22: mol_type = other RNA
acgtgatggggctgacttttcc

SEQ ID NO: 1636 - RNA, 22 nt, synthetic construct
  source 1..22: mol_type = other RNA
acgtggatgagtttgggagtgt

SEQ ID NO: 1637 - RNA, 22 nt, synthetic construct
  source 1..22: mol_type = other RNA
acgttctgcctttatacaaagt

SEQ ID NO: 1638 - RNA, 22 nt, synthetic construct
  source 1..22: mol_type = other RNA
actagaagccaagaaagctgca

SEQ ID NO: 1639 - RNA, 22 nt, synthetic construct
  source 1..22: mol_type = other RNA
actagagaagacaatcgagaat

SEQ ID NO: 1640 - RNA, 22 nt, synthetic construct
  source 1..22: mol_type = other RNA
actcagtacctgaatggcacca

SEQ ID NO: 1641 - RNA, 22 nt, synthetic construct
  source 1..22: mol_type = other RNA
actcatccacgtcagagacttt

SEQ ID NO: 1642 - RNA, 22 nt, synthetic construct
  source 1..22: mol_type = other RNA
actcccaaactcatccacgtca

SEQ ID NO: 1643 - RNA, 22 nt, synthetic construct
  source 1..22: mol_type = other RNA
actccgttttttctcctcctga

SEQ ID NO: 1644 - RNA, 22 nt, synthetic construct
  source 1..22: mol_type = other RNA
actctcactagagaagacaatc

SEQ ID NO: 1645 - RNA, 22 nt, synthetic construct
  source 1..22: mol_type = other RNA
actgaaaacgcaagccaggcta

SEQ ID NO: 1646 - RNA, 22 nt, synthetic construct
  source 1..22: mol_type = other RNA
actgagttcttttcggcgaaaa

SEQ ID NO: 1647 - RNA, 22 nt, synthetic construct
  source 1..22: mol_type = other RNA
actggctctgctaacatcctga

SEQ ID NO: 1648 - RNA, 22 nt, synthetic construct
  source 1..22: mol_type = other RNA
actgtttagcctggcttgcgtt

SEQ ID NO: 1649 - RNA, 22 nt, synthetic construct
  source 1..22: mol_type = other RNA
acttccctaccaggtatgcact

SEQ ID NO: 1650 - RNA, 22 nt, synthetic construct
  source 1..22: mol_type = other RNA
acttgccgacaaaggaaactag

SEQ ID NO: 1651 - RNA, 22 nt, synthetic construct
  source 1..22: mol_type = other RNA
actttgtataaaggcagaacgt

SEQ ID NO: 1652 - RNA, 22 nt, synthetic construct
  source 1..22: mol_type = other RNA
acttttcgccgaaaagaactca

SEQ ID NO: 1653 - RNA, 22 nt, synthetic construct
  source 1..22: mol_type = other RNA
agaaaaaacggagtggtgccat

SEQ ID NO: 1654 - RNA, 22 nt, synthetic construct
  source 1..22: mol_type = other RNA
agaaagctgcagctgaaaagct

SEQ ID NO: 1655 - RNA, 22 nt, synthetic construct
  source 1..22: mol_type = other RNA
agaacagctcaaataaaaatga

SEQ ID NO: 1656 - RNA, 22 nt, synthetic construct
  source 1..22: mol_type = other RNA
agaacgtgaagctgctcatcct

SEQ ID NO: 1657 - RNA, 22 nt, synthetic construct
  source 1..22: mol_type = other RNA
agaactcagtacctgaatggca

SEQ ID NO: 1658 - RNA, 22 nt, synthetic construct
  source 1..22: mol_type = other RNA
agaagacaatcgagaatttgga

SEQ ID NO: 1659 - RNA, 22 nt, synthetic construct
  source 1..22: mol_type = other RNA
agaagccaagaaagctgcagct

SEQ ID NO: 1660 - RNA, 22 nt, synthetic construct
  source 1..22: mol_type = other RNA
agaatttggaggaaaacctgag

SEQ ID NO: 1661 - RNA, 22 nt, synthetic construct
  source 1..22: mol_type = other RNA
agacaatcgagaatttggagga

SEQ ID NO: 1662 - RNA, 22 nt, synthetic construct
  source 1..22: mol_type = other RNA
agacttgccgacaaaggaaact

SEQ ID NO: 1663 - RNA, 22 nt, synthetic construct
  source 1..22: mol_type = other RNA
agactttgtataaaggcagaac

SEQ ID NO: 1664 - RNA, 22 nt, synthetic construct
  source 1..22: mol_type = other RNA
agagaagacaatcgagaatttg

SEQ ID NO: 1665 - RNA, 22 nt, synthetic construct
  source 1..22: mol_type = other RNA
agagactttgtataaaggcaga

SEQ ID NO: 1666 - RNA, 22 nt, synthetic construct
  source 1..22: mol_type = other RNA
agagccagtcaagacttgccga

SEQ ID NO: 1667 - RNA, 22 nt, synthetic construct
  source 1..22: mol_type = other RNA
agagtgcatacctggtagggaa

SEQ ID NO: 1668 - RNA, 22 nt, synthetic construct
  source 1..22: mol_type = other RNA
agcagagccagtcaagacttgc

SEQ ID NO: 1669 - RNA, 22 nt, synthetic construct
  source 1..22: mol_type = other RNA
agcagcttcacgttctgccttt

SEQ ID NO: 1670 - RNA, 22 nt, synthetic construct
  source 1..22: mol_type = other RNA
agccaagaaagctgcagctgaa

SEQ ID NO: 1671 - RNA, 22 nt, synthetic construct
  source 1..22: mol_type = other RNA
agccaggctaaacagttggcag

SEQ ID NO: 1672 - RNA, 22 nt, synthetic construct
  source 1..22: mol_type = other RNA
agccagtcaagacttgccgaca

SEQ ID NO: 1673 - RNA, 22 nt, synthetic construct
  source 1..22: mol_type = other RNA
agccccatcacgtacaaaacaa

SEQ ID NO: 1674 - RNA, 22 nt, synthetic construct
  source 1..22: mol_type = other RNA
agcctggcttgcgttttcagtt

SEQ ID NO: 1675 - RNA, 22 nt, synthetic construct
  source 1..22: mol_type = other RNA
agctcaaataaaaatgaaaagg

SEQ ID NO: 1676 - RNA, 22 nt, synthetic construct
  source 1..22: mol_type = other RNA
agctcaggaggagaaaaaacgg

SEQ ID NO: 1677 - RNA, 22 nt, synthetic construct
  source 1..22: mol_type = other RNA
agctgaaaagctttcctccctg

SEQ ID NO: 1678 - RNA, 22 nt, synthetic construct
  source 1..22: mol_type = other RNA
agctgcagctgaaaagctttcc

SEQ ID NO: 1679 - RNA, 22 nt, synthetic construct
  source 1..22: mol_type = other RNA
agctgcagctttcttggcttct

SEQ ID NO: 1680 - RNA, 22 nt, synthetic construct
  source 1..22: mol_type = other RNA
agctgctcatcctcaggttttc

SEQ ID NO: 1681 - RNA, 22 nt, synthetic construct
  source 1..22: mol_type = other RNA
agctgttctccagggaggaaag

SEQ ID NO: 1682 - RNA, 22 nt, synthetic construct
  source 1..22: mol_type = other RNA
agcttcacgttctgcctttata

SEQ ID NO: 1683 - RNA, 22 nt, synthetic construct
  source 1..22: mol_type = other RNA
agcttccacactcccaaactca

SEQ ID NO: 1684 - RNA, 22 nt, synthetic construct
  source 1..22: mol_type = other RNA
agctttcctccctggagaacag

SEQ ID NO: 1685 - RNA, 22 nt, synthetic construct
  source 1..22: mol_type = other RNA
agctttcttggcttctagtttc

SEQ ID NO: 1686 - RNA, 22 nt, synthetic construct
  source 1..22: mol_type = other RNA
agcttttcagctgcagctttct

SEQ ID NO: 1687 - RNA, 22 nt, synthetic construct
  source 1..22: mol_type = other RNA
aggaaaacctgaggatgagcag

SEQ ID NO: 1688 - RNA, 22 nt, synthetic construct
  source 1..22: mol_type = other RNA
aggaaaagtcagccccatcacg

SEQ ID NO: 1689 - RNA, 22 nt, synthetic construct
  source 1..22: mol_type = other RNA
aggaaactagaagccaagaaag

SEQ ID NO: 1690 - RNA, 22 nt, synthetic construct
  source 1..22: mol_type = other RNA
aggaaagcttttcagctgcagc

SEQ ID NO: 1691 - RNA, 22 nt, synthetic construct
  source 1..22: mol_type = other RNA
aggagaaaaaacggagtggtgc

SEQ ID NO: 1692 - RNA, 22 nt, synthetic construct
  source 1..22: mol_type = other RNA
aggaggagaaaaaacggagtgg

SEQ ID NO: 1693 - RNA, 22 nt, synthetic construct
  source 1..22: mol_type = other RNA
aggatgagcagcttcacgttct

SEQ ID NO: 1694 - RNA, 22 nt, synthetic construct
  source 1..22: mol_type = other RNA
aggatgttagcagagccagtca

SEQ ID NO: 1695 - RNA, 22 nt, synthetic construct
  source 1..22: mol_type = other RNA
aggcagaacgtgaagctgctca

SEQ ID NO: 1696 - RNA, 22 nt, synthetic construct
  source 1..22: mol_type = other RNA
aggctaaacagttggcaggtaa

SEQ ID NO: 1697 - RNA, 22 nt, synthetic construct
  source 1..22: mol_type = other RNA
aggctgtaatgtcttacttccc

SEQ ID NO: 1698 - RNA, 22 nt, synthetic construct
  source 1..22: mol_type = other RNA
agggaagtaagacattacagcc

SEQ ID NO: 1699 - RNA, 22 nt, synthetic construct
  source 1..22: mol_type = other RNA
agggaggaaagcttttcagctg

SEQ ID NO: 1700 - RNA, 22 nt, synthetic construct
  source 1..22: mol_type = other RNA
aggtactgagttcttttcggcg

SEQ ID NO: 1701 - RNA, 22 nt, synthetic construct
  source 1..22: mol_type = other RNA
aggtatgcactctcactagaga

SEQ ID NO: 1702 - RNA, 22 nt, synthetic construct
  source 1..22: mol_type = other RNA
aggttttcctccaaattctcga

SEQ ID NO: 1703 - RNA, 22 nt, synthetic construct
  source 1..22: mol_type = other RNA
agtacctgaatggcaccactcc

SEQ ID NO: 1704 - RNA, 22 nt, synthetic construct
  source 1..22: mol_type = other RNA
agtcaagacttgccgacaaagg

SEQ ID NO: 1705 - RNA, 22 nt, synthetic construct
  source 1..22: mol_type = other RNA
agtcagccccatcacgtacaaa

SEQ ID NO: 1706 - RNA, 22 nt, synthetic construct
  source 1..22: mol_type = other RNA
agtcaggatgttagcagagcca

SEQ ID NO: 1707 - RNA, 22 nt, synthetic construct
  source 1..22: mol_type = other RNA
agtctctgacgtggatgagttt

SEQ ID NO: 1708 - RNA, 22 nt, synthetic construct
  source 1..22: mol_type = other RNA
agtcttgactggctctgctaac

SEQ ID NO: 1709 - RNA, 22 nt, synthetic construct
  source 1..22: mol_type = other RNA
agtgagagtgcatacctggtag

SEQ ID NO: 1710 - RNA, 22 nt, synthetic construct
  source 1..22: mol_type = other RNA
agtgcatacctggtagggaagt

SEQ ID NO: 1711 - RNA, 22 nt, synthetic construct
  source 1..22: mol_type = other RNA
agtggtgccattcaggtactga

SEQ ID NO: 1712 - RNA, 22 nt, synthetic construct
  source 1..22: mol_type = other RNA
agtgtggaagctcaggaggaga

SEQ ID NO: 1713 - RNA, 22 nt, synthetic construct
  source 1..22: mol_type = other RNA
agttcttttcggcgaaaagtca

SEQ ID NO: 1714 - RNA, 22 nt, synthetic construct
  source 1..22: mol_type = other RNA
agttgaggctgtaatgtcttac

SEQ ID NO: 1715 - RNA, 22 nt, synthetic construct
  source 1..22: mol_type = other RNA
agttggcaggtaaatttaatgt

SEQ ID NO: 1716 - RNA, 22 nt, synthetic construct
  source 1..22: mol_type = other RNA
agtttcctttgtcggcaagtct

SEQ ID NO: 1717 - RNA, 22 nt, synthetic construct
  source 1..22: mol_type = other RNA
agtttgggagtgtggaagctca

SEQ ID NO: 1718 - RNA, 22 nt, synthetic construct
  source 1..22: mol_type = other RNA
agtttgttttgtacgtgatggg

SEQ ID NO: 1719 - RNA, 22 nt, synthetic construct
  source 1..22: mol_type = other RNA
ataaaggcagaacgtgaagctg

SEQ ID NO: 1720 - RNA, 22 nt, synthetic construct
  source 1..22: mol_type = other RNA
atacaaagtctctgacgtggat

SEQ ID NO: 1721 - RNA, 22 nt, synthetic construct
  source 1..22: mol_type = other RNA
atacctggtagggaagtaagac

SEQ ID NO: 1722 - RNA, 22 nt, synthetic construct
  source 1..22: mol_type = other RNA
atcacgtacaaaacaaactgaa

SEQ ID NO: 1723 - RNA, 22 nt, synthetic construct
  source 1..22: mol_type = other RNA
atccacgtcagagactttgtat

SEQ ID NO: 1724 - RNA, 22 nt, synthetic construct
  source 1..22: mol_type = other RNA
atcctcaggttttcctccaaat

SEQ ID NO: 1725 - RNA, 22 nt, synthetic construct
  source 1..22: mol_type = other RNA
atcctgacttttcgccgaaaag

SEQ ID NO: 1726 - RNA, 22 nt, synthetic construct
  source 1..22: mol_type = other RNA
atcgagaatttggaggaaaacc

SEQ ID NO: 1727 - RNA, 22 nt, synthetic construct
  source 1..22: mol_type = other RNA
atgaaaaggaaaagtcagcccc

SEQ ID NO: 1728 - RNA, 22 nt, synthetic construct
  source 1..22: mol_type = other RNA
atgagcagcttcacgttctgcc

SEQ ID NO: 1729 - RNA, 22 nt, synthetic construct
  source 1..22: mol_type = other RNA
atgagtttgggagtgtggaagc

SEQ ID NO: 1730 - RNA, 22 nt, synthetic construct
  source 1..22: mol_type = other RNA
atgcactctcactagagaagac

SEQ ID NO: 1731 - RNA, 22 nt, synthetic construct
  source 1..22: mol_type = other RNA
atggcaccactccgttttttct

SEQ ID NO: 1732 - RNA, 22 nt, synthetic construct
  source 1..22: mol_type = other RNA
atggggctgacttttccttttc

SEQ ID NO: 1733 - RNA, 22 nt, synthetic construct
  source 1..22: mol_type = other RNA
atgtcttacttccctaccaggt

SEQ ID NO: 1734 - RNA, 22 nt, synthetic construct
  source 1..22: mol_type = other RNA
atgttagcagagccagtcaaga

SEQ ID NO: 1735 - RNA, 22 nt, synthetic construct
  source 1..22: mol_type = other RNA
attaaatttacctgccaactgt

SEQ ID NO: 1736 - RNA, 22 nt, synthetic construct
  source 1..22: mol_type = other RNA
attcaggtactgagttcttttc

SEQ ID NO: 1737 - RNA, 22 nt, synthetic construct
  source 1..22: mol_type = other RNA
attctcgattgtcttctctagt

SEQ ID NO: 1738 - RNA, 22 nt, synthetic construct
  source 1..22: mol_type = other RNA
attgtcttctctagtgagagtg

SEQ ID NO: 1739 - RNA, 22 nt, synthetic construct
  source 1..22: mol_type = other RNA
atttacctgccaactgtttagc

SEQ ID NO: 1740 - RNA, 22 nt, synthetic construct
  source 1..22: mol_type = other RNA
atttgagctgttctccagggag

SEQ ID NO: 1741 - RNA, 22 nt, synthetic construct
  source 1..22: mol_type = other RNA
atttggaggaaaacctgaggat

SEQ ID NO: 1742 - RNA, 22 nt, synthetic construct
  source 1..22: mol_type = other RNA
atttttatttgagctgttctcc

SEQ ID NO: 1743 - RNA, 22 nt, synthetic construct
  source 1..22: mol_type = other RNA
caaaacaaactgaaaacgcaag

SEQ ID NO: 1744 - RNA, 22 nt, synthetic construct
  source 1..22: mol_type = other RNA
caaactcatccacgtcagagac

SEQ ID NO: 1745 - RNA, 22 nt, synthetic construct
  source 1..22: mol_type = other RNA
caaactgaaaacgcaagccagg

SEQ ID NO: 1746 - RNA, 22 nt, synthetic construct
  source 1..22: mol_type = other RNA
caaaggaaactagaagccaaga

SEQ ID NO: 1747 - RNA, 22 nt, synthetic construct
  source 1..22: mol_type = other RNA
caaagtctctgacgtggatgag

SEQ ID NO: 1748 - RNA, 22 nt, synthetic construct
  source 1..22: mol_type = other RNA
caaattctcgattgtcttctct

SEQ ID NO: 1749 - RNA, 22 nt, synthetic construct
  source 1..22: mol_type = other RNA
caacacatttatctacaaatgc

SEQ ID NO: 1750 - RNA, 22 nt, synthetic construct
  source 1..22: mol_type = other RNA
caactgtttagcctggcttgcg

SEQ ID NO: 1751 - RNA, 22 nt, synthetic construct
  source 1..22: mol_type = other RNA
caagaaagctgcagctgaaaag

SEQ ID NO: 1752 - RNA, 22 nt, synthetic construct
  source 1..22: mol_type = other RNA
caagacttgccgacaaaggaaa

SEQ ID NO: 1753 - RNA, 22 nt, synthetic construct
  source 1..22: mol_type = other RNA
caagccaggctaaacagttggc

SEQ ID NO: 1754 - RNA, 22 nt, synthetic construct
  source 1..22: mol_type = other RNA
caagtcttgactggctctgcta

SEQ ID NO: 1755 - RNA, 22 nt, synthetic construct
  source 1..22: mol_type = other RNA
caatcgagaatttggaggaaaa

SEQ ID NO: 1756 - RNA, 22 nt, synthetic construct
  source 1..22: mol_type = other RNA
cacactcccaaactcatccacg

SEQ ID NO: 1757 - RNA, 22 nt, synthetic construct
  source 1..22: mol_type = other RNA
cacatttatctacaaatgcttt

SEQ ID NO: 1758 - RNA, 22 nt, synthetic construct
  source 1..22: mol_type = other RNA
caccactccgttttttctcctc

SEQ ID NO: 1759 - RNA, 22 nt, synthetic construct
  source 1..22: mol_type = other RNA
cacgtacaaaacaaactgaaaa

SEQ ID NO: 1760 - RNA, 22 nt, synthetic construct
  source 1..22: mol_type = other RNA
cacgtcagagactttgtataaa

SEQ ID NO: 1761 - RNA, 22 nt, synthetic construct
  source 1..22: mol_type = other RNA
cacgttctgcctttatacaaag

SEQ ID NO: 1762 - RNA, 22 nt, synthetic construct
  source 1..22: mol_type = other RNA
cactagagaagacaatcgagaa

SEQ ID NO: 1763 - RNA, 22 nt, synthetic construct
  source 1..22: mol_type = other RNA
cactcccaaactcatccacgtc

SEQ ID NO: 1764 - RNA, 22 nt, synthetic construct
  source 1..22: mol_type = other RNA
cactccgttttttctcctcctg

SEQ ID NO: 1765 - RNA, 22 nt, synthetic construct
  source 1..22: mol_type = other RNA
cactctcactagagaagacaat

SEQ ID NO: 1766 - RNA, 22 nt, synthetic construct
  source 1..22: mol_type = other RNA
cagaacgtgaagctgctcatcc

SEQ ID NO: 1767 - RNA, 22 nt, synthetic construct
  source 1..22: mol_type = other RNA
cagagactttgtataaaggcag

SEQ ID NO: 1768 - RNA, 22 nt, synthetic construct
  source 1..22: mol_type = other RNA
cagagccagtcaagacttgccg

SEQ ID NO: 1769 - RNA, 22 nt, synthetic construct
  source 1..22: mol_type = other RNA
cagccccatcacgtacaaaaca

SEQ ID NO: 1770 - RNA, 22 nt, synthetic construct
  source 1..22: mol_type = other RNA
cagctcaaataaaaatgaaaag

SEQ ID NO: 1771 - RNA, 22 nt, synthetic construct
  source 1..22: mol_type = other RNA
cagctgaaaagctttcctccct

SEQ ID NO: 1772 - RNA, 22 nt, synthetic construct
  source 1..22: mol_type = other RNA
cagctgcagctttcttggcttc

SEQ ID NO: 1773 - RNA, 22 nt, synthetic construct
  source 1..22: mol_type = other RNA
cagcttcacgttctgcctttat

SEQ ID NO: 1774 - RNA, 22 nt, synthetic construct
  source 1..22: mol_type = other RNA
cagctttcttggcttctagttt

SEQ ID NO: 1775 - RNA, 22 nt, synthetic construct
  source 1..22: mol_type = other RNA
caggaggagaaaaaacggagtg

SEQ ID NO: 1776 - RNA, 22 nt, synthetic construct
  source 1..22: mol_type = other RNA
caggatgttagcagagccagtc

SEQ ID NO: 1777 - RNA, 22 nt, synthetic construct
  source 1..22: mol_type = other RNA
caggctaaacagttggcaggta

SEQ ID NO: 1778 - RNA, 22 nt, synthetic construct
  source 1..22: mol_type = other RNA
cagggaggaaagcttttcagct

SEQ ID NO: 1779 - RNA, 22 nt, synthetic construct
  source 1..22: mol_type = other RNA
caggtaaatttaatgtaaagca

SEQ ID NO: 1780 - RNA, 22 nt, synthetic construct
  source 1..22: mol_type = other RNA
caggtactgagttcttttcggc

SEQ ID NO: 1781 - RNA, 22 nt, synthetic construct
  source 1..22: mol_type = other RNA
caggtatgcactctcactagag

SEQ ID NO: 1782 - RNA, 22 nt, synthetic construct
  source 1..22: mol_type = other RNA
caggttttcctccaaattctcg

SEQ ID NO: 1783 - RNA, 22 nt, synthetic construct
  source 1..22: mol_type = other RNA
cagtacctgaatggcaccactc

SEQ ID NO: 1784 - RNA, 22 nt, synthetic construct
  source 1..22: mol_type = other RNA
cagtcaagacttgccgacaaag

SEQ ID NO: 1785 - RNA, 22 nt, synthetic construct
  source 1..22: mol_type = other RNA
cagttggcaggtaaatttaatg

SEQ ID NO: 1786 - RNA, 22 nt, synthetic construct
  source 1..22: mol_type = other RNA
cagtttgttttgtacgtgatgg

SEQ ID NO: 1787 - RNA, 22 nt, synthetic construct
  source 1..22: mol_type = other RNA
catacctggtagggaagtaaga

SEQ ID NO: 1788 - RNA, 22 nt, synthetic construct
  source 1..22: mol_type = other RNA
catcacgtacaaaacaaactga

SEQ ID NO: 1789 - RNA, 22 nt, synthetic construct
  source 1..22: mol_type = other RNA
catccacgtcagagactttgta

SEQ ID NO: 1790 - RNA, 22 nt, synthetic construct
  source 1..22: mol_type = other RNA
catcctcaggttttcctccaaa

SEQ ID NO: 1791 - RNA, 22 nt, synthetic construct
  source 1..22: mol_type = other RNA
catcctgacttttcgccgaaaa

SEQ ID NO: 1792 - RNA, 22 nt, synthetic construct
  source 1..22: mol_type = other RNA
cattaaatttacctgccaactg

SEQ ID NO: 1793 - RNA, 22 nt, synthetic construct
  source 1..22: mol_type = other RNA
cattcaggtactgagttctttt

SEQ ID NO: 1794 - RNA, 22 nt, synthetic construct
  source 1..22: mol_type = other RNA
catttatctacaaatgctttac

SEQ ID NO: 1795 - RNA, 22 nt, synthetic construct
  source 1..22: mol_type = other RNA
catttttatttgagctgttctc

SEQ ID NO: 1796 - RNA, 22 nt, synthetic construct
  source 1..22: mol_type = other RNA
ccaaactcatccacgtcagaga

SEQ ID NO: 1797 - RNA, 22 nt, synthetic construct
  source 1..22: mol_type = other RNA
ccaaattctcgattgtcttctc

SEQ ID NO: 1798 - RNA, 22 nt, synthetic construct
  source 1..22: mol_type = other RNA
ccaactgtttagcctggcttgc

SEQ ID NO: 1799 - RNA, 22 nt, synthetic construct
  source 1..22: mol_type = other RNA
ccaagaaagctgcagctgaaaa

SEQ ID NO: 1800 - RNA, 22 nt, synthetic construct
  source 1..22: mol_type = other RNA
ccacactcccaaactcatccac

SEQ ID NO: 1801 - RNA, 22 nt, synthetic construct
  source 1..22: mol_type = other RNA
ccacgtcagagactttgtataa

SEQ ID NO: 1802 - RNA, 22 nt, synthetic construct
  source 1..22: mol_type = other RNA
ccactccgttttttctcctcct

SEQ ID NO: 1803 - RNA, 22 nt, synthetic construct
  source 1..22: mol_type = other RNA
ccaggctaaacagttggcaggt

SEQ ID NO: 1804 - RNA, 22 nt, synthetic construct
  source 1..22: mol_type = other RNA
ccagggaggaaagcttttcagc

SEQ ID NO: 1805 - RNA, 22 nt, synthetic construct
  source 1..22: mol_type = other RNA
ccaggtatgcactctcactaga

SEQ ID NO: 1806 - RNA, 22 nt, synthetic construct
  source 1..22: mol_type = other RNA
ccagtcaagacttgccgacaaa

SEQ ID NO: 1807 - RNA, 22 nt, synthetic construct
  source 1..22: mol_type = other RNA
ccatcacgtacaaaacaaactg

SEQ ID NO: 1808 - RNA, 22 nt, synthetic construct
  source 1..22: mol_type = other RNA
ccattcaggtactgagttcttt

SEQ ID NO: 1809 - RNA, 22 nt, synthetic construct
  source 1..22: mol_type = other RNA
cccaaactcatccacgtcagag

SEQ ID NO: 1810 - RNA, 22 nt, synthetic construct
  source 1..22: mol_type = other RNA
cccatcacgtacaaaacaaact

SEQ ID NO: 1811 - RNA, 22 nt, synthetic construct
  source 1..22: mol_type = other RNA
ccccatcacgtacaaaacaaac

SEQ ID NO: 1812 - RNA, 22 nt, synthetic construct
  source 1..22: mol_type = other RNA
ccctaccaggtatgcactctca

SEQ ID NO: 1813 - RNA, 22 nt, synthetic construct
  source 1..22: mol_type = other RNA
ccctggagaacagctcaaataa

SEQ ID NO: 1814 - RNA, 22 nt, synthetic construct
  source 1..22: mol_type = other RNA
ccgaaaagaactcagtacctga

SEQ ID NO: 1815 - RNA, 22 nt, synthetic construct
  source 1..22: mol_type = other RNA
ccgacaaaggaaactagaagcc

SEQ ID NO: 1816 - RNA, 22 nt, synthetic construct
  source 1..22: mol_type = other RNA
ccgttttttctcctcctgagct

SEQ ID NO: 1817 - RNA, 22 nt, synthetic construct
  source 1..22: mol_type = other RNA
cctaccaggtatgcactctcac

SEQ ID NO: 1818 - RNA, 22 nt, synthetic construct
  source 1..22: mol_type = other RNA
cctcaggttttcctccaaattc

SEQ ID NO: 1819 - RNA, 22 nt, synthetic construct
  source 1..22: mol_type = other RNA
cctccaaattctcgattgtctt

SEQ ID NO: 1820 - RNA, 22 nt, synthetic construct
  source 1..22: mol_type = other RNA
cctccctggagaacagctcaaa

SEQ ID NO: 1821 - RNA, 22 nt, synthetic construct
  source 1..22: mol_type = other RNA
cctcctgagcttccacactccc

SEQ ID NO: 1822 - RNA, 22 nt, synthetic construct
  source 1..22: mol_type = other RNA
cctgaatggcaccactccgttt

SEQ ID NO: 1823 - RNA, 22 nt, synthetic construct
  source 1..22: mol_type = other RNA
cctgacttttcgccgaaaagaa

SEQ ID NO: 1824 - RNA, 22 nt, synthetic construct
  source 1..22: mol_type = other RNA
cctgagcttccacactcccaaa

SEQ ID NO: 1825 - RNA, 22 nt, synthetic construct
  source 1..22: mol_type = other RNA
cctgaggatgagcagcttcacg

SEQ ID NO: 1826 - RNA, 22 nt, synthetic construct
  source 1..22: mol_type = other RNA
cctgccaactgtttagcctggc

SEQ ID NO: 1827 - RNA, 22 nt, synthetic construct
  source 1..22: mol_type = other RNA
cctggagaacagctcaaataaa

SEQ ID NO: 1828 - RNA, 22 nt, synthetic construct
  source 1..22: mol_type = other RNA
cctggcttgcgttttcagtttg

SEQ ID NO: 1829 - RNA, 22 nt, synthetic construct
  source 1..22: mol_type = other RNA
cctggtagggaagtaagacatt

SEQ ID NO: 1830 - RNA, 22 nt, synthetic construct
  source 1..22: mol_type = other RNA
cctgtagttgaggctgtaatgt

SEQ ID NO: 1831 - RNA, 22 nt, synthetic construct
  source 1..22: mol_type = other RNA
cctttatacaaagtctctgacg

SEQ ID NO: 1832 - RNA, 22 nt, synthetic construct
  source 1..22: mol_type = other RNA
cctttgtcggcaagtcttgact

SEQ ID NO: 1833 - RNA, 22 nt, synthetic construct
  source 1..22: mol_type = other RNA
ccttttcatttttatttgagct

SEQ ID NO: 1834 - RNA, 22 nt, synthetic construct
  source 1..22: mol_type = other RNA
cgaaaagaactcagtacctgaa

SEQ ID NO: 1835 - RNA, 22 nt, synthetic construct
  source 1..22: mol_type = other RNA
cgaaaagtcaggatgttagcag

SEQ ID NO: 1836 - RNA, 22 nt, synthetic construct
  source 1..22: mol_type = other RNA
cgacaaaggaaactagaagcca

SEQ ID NO: 1837 - RNA, 22 nt, synthetic construct
  source 1..22: mol_type = other RNA
cgagaatttggaggaaaacctg

SEQ ID NO: 1838 - RNA, 22 nt, synthetic construct
  source 1..22: mol_type = other RNA
cgattgtcttctctagtgagag

SEQ ID NO: 1839 - RNA, 22 nt, synthetic construct
  source 1..22: mol_type = other RNA
cgcaagccaggctaaacagttg

SEQ ID NO: 1840 - RNA, 22 nt, synthetic construct
  source 1..22: mol_type = other RNA
cgccgaaaagaactcagtacct

SEQ ID NO: 1841 - RNA, 22 nt, synthetic construct
  source 1..22: mol_type = other RNA
cggagtggtgccattcaggtac

SEQ ID NO: 1842 - RNA, 22 nt, synthetic construct
  source 1..22: mol_type = other RNA
cggcaagtcttgactggctctg

SEQ ID NO: 1843 - RNA, 22 nt, synthetic construct
  source 1..22: mol_type = other RNA
cggcgaaaagtcaggatgttag

SEQ ID NO: 1844 - RNA, 22 nt, synthetic construct
  source 1..22: mol_type = other RNA
cgtacaaaacaaactgaaaacg

SEQ ID NO: 1845 - RNA, 22 nt, synthetic construct
  source 1..22: mol_type = other RNA
cgtcagagactttgtataaagg

SEQ ID NO: 1846 - RNA, 22 nt, synthetic construct
  source 1..22: mol_type = other RNA
cgtgaagctgctcatcctcagg

SEQ ID NO: 1847 - RNA, 22 nt, synthetic construct
  source 1..22: mol_type = other RNA
cgtgatggggctgacttttcct

SEQ ID NO: 1848 - RNA, 22 nt, synthetic construct
  source 1..22: mol_type = other RNA
cgtggatgagtttgggagtgtg

SEQ ID NO: 1849 - RNA, 22 nt, synthetic construct
  source 1..22: mol_type = other RNA
cgttctgcctttatacaaagtc

SEQ ID NO: 1850 - RNA, 22 nt, synthetic construct
  source 1..22: mol_type = other RNA
cgttttcagtttgttttgtacg

SEQ ID NO: 1851 - RNA, 22 nt, synthetic construct
  source 1..22: mol_type = other RNA
cgttttttctcctcctgagctt

SEQ ID NO: 1852 - RNA, 22 nt, synthetic construct
  source 1..22: mol_type = other RNA
ctaaacagttggcaggtaaatt

SEQ ID NO: 1853 - RNA, 22 nt, synthetic construct
  source 1..22: mol_type = other RNA
ctaacatcctgacttttcgccg

SEQ ID NO: 1854 - RNA, 22 nt, synthetic construct
  source 1..22: mol_type = other RNA
ctaccaggtatgcactctcact

SEQ ID NO: 1855 - RNA, 22 nt, synthetic construct
  source 1..22: mol_type = other RNA
ctagaagccaagaaagctgcag

SEQ ID NO: 1856 - RNA, 22 nt, synthetic construct
  source 1..22: mol_type = other RNA
ctagagaagacaatcgagaatt

SEQ ID NO: 1857 - RNA, 22 nt, synthetic construct
  source 1..22: mol_type = other RNA
ctagtgagagtgcatacctggt

SEQ ID NO: 1858 - RNA, 22 nt, synthetic construct
  source 1..22: mol_type = other RNA
ctagtttcctttgtcggcaagt

SEQ ID NO: 1859 - RNA, 22 nt, synthetic construct
  source 1..22: mol_type = other RNA
ctcactagagaagacaatcgag

SEQ ID NO: 1860 - RNA, 22 nt, synthetic construct
  source 1..22: mol_type = other RNA
ctcaggaggagaaaaaacggag

SEQ ID NO: 1861 - RNA, 22 nt, synthetic construct
  source 1..22: mol_type = other RNA
ctcaggttttcctccaaattct

SEQ ID NO: 1862 - RNA, 22 nt, synthetic construct
  source 1..22: mol_type = other RNA
ctcagtacctgaatggcaccac

SEQ ID NO: 1863 - RNA, 22 nt, synthetic construct
  source 1..22: mol_type = other RNA
ctcatccacgtcagagactttg

SEQ ID NO: 1864 - RNA, 22 nt, synthetic construct
  source 1..22: mol_type = other RNA
ctcatcctcaggttttcctcca

SEQ ID NO: 1865 - RNA, 22 nt, synthetic construct
  source 1..22: mol_type = other RNA
ctccaaattctcgattgtcttc

SEQ ID NO: 1866 - RNA, 22 nt, synthetic construct
  source 1..22: mol_type = other RNA
ctccagggaggaaagcttttca

SEQ ID NO: 1867 - RNA, 22 nt, synthetic construct
  source 1..22: mol_type = other RNA
ctcccaaactcatccacgtcag

SEQ ID NO: 1868 - RNA, 22 nt, synthetic construct
  source 1..22: mol_type = other RNA
ctccctggagaacagctcaaat

SEQ ID NO: 1869 - RNA, 22 nt, synthetic construct
  source 1..22: mol_type = other RNA
ctccgttttttctcctcctgag

SEQ ID NO: 1870 - RNA, 22 nt, synthetic construct
  source 1..22: mol_type = other RNA
ctcctcctgagcttccacactc

SEQ ID NO: 1871 - RNA, 22 nt, synthetic construct
  source 1..22: mol_type = other RNA
ctcctgagcttccacactccca

SEQ ID NO: 1872 - RNA, 22 nt, synthetic construct
  source 1..22: mol_type = other RNA
ctcgattgtcttctctagtgag

SEQ ID NO: 1873 - RNA, 22 nt, synthetic construct
  source 1..22: mol_type = other RNA
ctctagtgagagtgcatacctg

SEQ ID NO: 1874 - RNA, 22 nt, synthetic construct
  source 1..22: mol_type = other RNA
ctctcactagagaagacaatcg

SEQ ID NO: 1875 - RNA, 22 nt, synthetic construct
  source 1..22: mol_type = other RNA
ctctgacgtggatgagtttggg

SEQ ID NO: 1876 - RNA, 22 nt, synthetic construct
  source 1..22: mol_type = other RNA
ctctgctaacatcctgactttt

SEQ ID NO: 1877 - RNA, 22 nt, synthetic construct
  source 1..22: mol_type = other RNA
ctgaaaacgcaagccaggctaa

SEQ ID NO: 1878 - RNA, 22 nt, synthetic construct
  source 1..22: mol_type = other RNA
ctgaaaagctttcctccctgga

SEQ ID NO: 1879 - RNA, 22 nt, synthetic construct
  source 1..22: mol_type = other RNA
ctgaatggcaccactccgtttt

SEQ ID NO: 1880 - RNA, 22 nt, synthetic construct
  source 1..22: mol_type = other RNA
ctgacgtggatgagtttgggag

SEQ ID NO: 1881 - RNA, 22 nt, synthetic construct
  source 1..22: mol_type = other RNA
ctgacttttccttttcattttt

SEQ ID NO: 1882 - RNA, 22 nt, synthetic construct
  source 1..22: mol_type = other RNA
ctgacttttcgccgaaaagaac

SEQ ID NO: 1883 - RNA, 22 nt, synthetic construct
  source 1..22: mol_type = other RNA
ctgagcttccacactcccaaac

SEQ ID NO: 1884 - RNA, 22 nt, synthetic construct
  source 1..22: mol_type = other RNA
ctgaggatgagcagcttcacgt

SEQ ID NO: 1885 - RNA, 22 nt, synthetic construct
  source 1..22: mol_type = other RNA
ctgagttcttttcggcgaaaag

SEQ ID NO: 1886 - RNA, 22 nt, synthetic construct
  source 1..22: mol_type = other RNA
ctgcagctgaaaagctttcctc

SEQ ID NO: 1887 - RNA, 22 nt, synthetic construct
  source 1..22: mol_type = other RNA
ctgcagctttcttggcttctag

SEQ ID NO: 1888 - RNA, 22 nt, synthetic construct
  source 1..22: mol_type = other RNA
ctgccaactgtttagcctggct

SEQ ID NO: 1889 - RNA, 22 nt, synthetic construct
  source 1..22: mol_type = other RNA
ctgcctttatacaaagtctctg

SEQ ID NO: 1890 - RNA, 22 nt, synthetic construct
  source 1..22: mol_type = other RNA
ctgctaacatcctgacttttcg

SEQ ID NO: 1891 - RNA, 22 nt, synthetic construct
  source 1..22: mol_type = other RNA
ctgctcatcctcaggttttcct

SEQ ID NO: 1892 - RNA, 22 nt, synthetic construct
  source 1..22: mol_type = other RNA
ctggagaacagctcaaataaaa

SEQ ID NO: 1893 - RNA, 22 nt, synthetic construct
  source 1..22: mol_type = other RNA
ctggctctgctaacatcctgac

SEQ ID NO: 1894 - RNA, 22 nt, synthetic construct
  source 1..22: mol_type = other RNA
ctggcttgcgttttcagtttgt

SEQ ID NO: 1895 - RNA, 22 nt, synthetic construct
  source 1..22: mol_type = other RNA
ctggtagggaagtaagacatta

SEQ ID NO: 1896 - RNA, 22 nt, synthetic construct
  source 1..22: mol_type = other RNA
ctgtaatgtcttacttccctac

SEQ ID NO: 1897 - RNA, 22 nt, synthetic construct
  source 1..22: mol_type = other RNA
ctgtagttgaggctgtaatgtc

SEQ ID NO: 1898 - RNA, 22 nt, synthetic construct
  source 1..22: mol_type = other RNA
ctgttctccagggaggaaagct

SEQ ID NO: 1899 - RNA, 22 nt, synthetic construct
  source 1..22: mol_type = other RNA
ctgtttagcctggcttgcgttt

SEQ ID NO: 1900 - RNA, 22 nt, synthetic construct
  source 1..22: mol_type = other RNA
cttacttccctaccaggtatgc

SEQ ID NO: 1901 - RNA, 22 nt, synthetic construct
  source 1..22: mol_type = other RNA
cttcacgttctgcctttataca

SEQ ID NO: 1902 - RNA, 22 nt, synthetic construct
  source 1..22: mol_type = other RNA
cttccacactcccaaactcatc

SEQ ID NO: 1903 - RNA, 22 nt, synthetic construct
  source 1..22: mol_type = other RNA
cttccctaccaggtatgcactc

SEQ ID NO: 1904 - RNA, 22 nt, synthetic construct
  source 1..22: mol_type = other RNA
cttctagtttcctttgtcggca

SEQ ID NO: 1905 - RNA, 22 nt, synthetic construct
  source 1..22: mol_type = other RNA
cttctctagtgagagtgcatac

SEQ ID NO: 1906 - RNA, 22 nt, synthetic construct
  source 1..22: mol_type = other RNA
cttgactggctctgctaacatc

SEQ ID NO: 1907 - RNA, 22 nt, synthetic construct
  source 1..22: mol_type = other RNA
cttgccgacaaaggaaactaga

SEQ ID NO: 1908 - RNA, 22 nt, synthetic construct
  source 1..22: mol_type = other RNA
cttgcgttttcagtttgttttg

SEQ ID NO: 1909 - RNA, 22 nt, synthetic construct
  source 1..22: mol_type = other RNA
cttggcttctagtttcctttgt

SEQ ID NO: 1910 - RNA, 22 nt, synthetic construct
  source 1..22: mol_type = other RNA
ctttacattaaatttacctgcc

SEQ ID NO: 1911 - RNA, 22 nt, synthetic construct
  source 1..22: mol_type = other RNA
ctttatacaaagtctctgacgt

SEQ ID NO: 1912 - RNA, 22 nt, synthetic construct
  source 1..22: mol_type = other RNA
ctttcctccctggagaacagct

SEQ ID NO: 1913 - RNA, 22 nt, synthetic construct
  source 1..22: mol_type = other RNA
ctttcttggcttctagtttcct

SEQ ID NO: 1914 - RNA, 22 nt, synthetic construct
  source 1..22: mol_type = other RNA
ctttgtataaaggcagaacgtg

SEQ ID NO: 1915 - RNA, 22 nt, synthetic construct
  source 1..22: mol_type = other RNA
ctttgtcggcaagtcttgactg

SEQ ID NO: 1916 - RNA, 22 nt, synthetic construct
  source 1..22: mol_type = other RNA
cttttcagctgcagctttcttg

SEQ ID NO: 1917 - RNA, 22 nt, synthetic construct
  source 1..22: mol_type = other RNA
cttttcatttttatttgagctg

SEQ ID NO: 1918 - RNA, 22 nt, synthetic construct
  source 1..22: mol_type = other RNA
cttttcgccgaaaagaactcag

SEQ ID NO: 1919 - RNA, 22 nt, synthetic construct
  source 1..22: mol_type = other RNA
cttttcggcgaaaagtcaggat

SEQ ID NO: 1920 - RNA, 22 nt, synthetic construct
  source 1..22: mol_type = other RNA
gaaaaaacggagtggtgccatt

SEQ ID NO: 1921 - RNA, 22 nt, synthetic construct
  source 1..22: mol_type = other RNA
gaaaacctgaggatgagcagct

SEQ ID NO: 1922 - RNA, 22 nt, synthetic construct
  source 1..22: mol_type = other RNA
gaaaacgcaagccaggctaaac

SEQ ID NO: 1923 - RNA, 22 nt, synthetic construct
  source 1..22: mol_type = other RNA
gaaaagaactcagtacctgaat

SEQ ID NO: 1924 - RNA, 22 nt, synthetic construct
  source 1..22: mol_type = other RNA
gaaaagctttcctccctggaga

SEQ ID NO: 1925 - RNA, 22 nt, synthetic construct
  source 1..22: mol_type = other RNA
gaaaaggaaaagtcagccccat

SEQ ID NO: 1926 - RNA, 22 nt, synthetic construct
  source 1..22: mol_type = other RNA
gaaaagtcagccccatcacgta

SEQ ID NO: 1927 - RNA, 22 nt, synthetic construct
  source 1..22: mol_type = other RNA
gaaaagtcaggatgttagcaga

SEQ ID NO: 1928 - RNA, 22 nt, synthetic construct
  source 1..22: mol_type = other RNA
gaaactagaagccaagaaagct

SEQ ID NO: 1929 - RNA, 22 nt, synthetic construct
  source 1..22: mol_type = other RNA
gaaagctgcagctgaaaagctt

SEQ ID NO: 1930 - RNA, 22 nt, synthetic construct
  source 1..22: mol_type = other RNA
gaaagcttttcagctgcagctt

SEQ ID NO: 1931 - RNA, 22 nt, synthetic construct
  source 1..22: mol_type = other RNA
gaacagctcaaataaaaatgaa

SEQ ID NO: 1932 - RNA, 22 nt, synthetic construct
  source 1..22: mol_type = other RNA
gaacgtgaagctgctcatcctc

SEQ ID NO: 1933 - RNA, 22 nt, synthetic construct
  source 1..22: mol_type = other RNA
gaactcagtacctgaatggcac

SEQ ID NO: 1934 - RNA, 22 nt, synthetic construct
  source 1..22: mol_type = other RNA
gaagacaatcgagaatttggag

SEQ ID NO: 1935 - RNA, 22 nt, synthetic construct
  source 1..22: mol_type = other RNA
gaagccaagaaagctgcagctg

SEQ ID NO: 1936 - RNA, 22 nt, synthetic construct
  source 1..22: mol_type = other RNA
gaagctcaggaggagaaaaaac

SEQ ID NO: 1937 - RNA, 22 nt, synthetic construct
  source 1..22: mol_type = other RNA
gaagctgctcatcctcaggttt

SEQ ID NO: 1938 - RNA, 22 nt, synthetic construct
  source 1..22: mol_type = other RNA
gaagtaagacattacagcctca

SEQ ID NO: 1939 - RNA, 22 nt, synthetic construct
  source 1..22: mol_type = other RNA
gaatggcaccactccgtttttt

SEQ ID NO: 1940 - RNA, 22 nt, synthetic construct
  source 1..22: mol_type = other RNA
gaatttggaggaaaacctgagg

SEQ ID NO: 1941 - RNA, 22 nt, synthetic construct
  source 1..22: mol_type = other RNA
gacaaaggaaactagaagccaa

SEQ ID NO: 1942 - RNA, 22 nt, synthetic construct
  source 1..22: mol_type = other RNA
gacaatcgagaatttggaggaa

SEQ ID NO: 1943 - RNA, 22 nt, synthetic construct
  source 1..22: mol_type = other RNA
gacgtggatgagtttgggagtg

SEQ ID NO: 1944 - RNA, 22 nt, synthetic construct
  source 1..22: mol_type = other RNA
gactggctctgctaacatcctg

SEQ ID NO: 1945 - RNA, 22 nt, synthetic construct
  source 1..22: mol_type = other RNA
gacttgccgacaaaggaaacta

SEQ ID NO: 1946 - RNA, 22 nt, synthetic construct
  source 1..22: mol_type = other RNA
gactttgtataaaggcagaacg

SEQ ID NO: 1947 - RNA, 22 nt, synthetic construct
  source 1..22: mol_type = other RNA
gacttttcgccgaaaagaactc

SEQ ID NO: 1948 - RNA, 22 nt, synthetic construct
  source 1..22: mol_type = other RNA
gagaaaaaacggagtggtgcca

SEQ ID NO: 1949 - RNA, 22 nt, synthetic construct
  source 1..22: mol_type = other RNA
gagaacagctcaaataaaaatg

SEQ ID NO: 1950 - RNA, 22 nt, synthetic construct
  source 1..22: mol_type = other RNA
gagaagacaatcgagaatttgg

SEQ ID NO: 1951 - RNA, 22 nt, synthetic construct
  source 1..22: mol_type = other RNA
gagaatttggaggaaaacctga

SEQ ID NO: 1952 - RNA, 22 nt, synthetic construct
  source 1..22: mol_type = other RNA
gagactttgtataaaggcagaa

SEQ ID NO: 1953 - RNA, 22 nt, synthetic construct
  source 1..22: mol_type = other RNA
gagagtgcatacctggtaggga

SEQ ID NO: 1954 - RNA, 22 nt, synthetic construct
  source 1..22: mol_type = other RNA
gagcagcttcacgttctgcctt

SEQ ID NO: 1955 - RNA, 22 nt, synthetic construct
  source 1..22: mol_type = other RNA
gagccagtcaagacttgccgac

SEQ ID NO: 1956 - RNA, 22 nt, synthetic construct
  source 1..22: mol_type = other RNA
gagctgttctccagggaggaaa

SEQ ID NO: 1957 - RNA, 22 nt, synthetic construct
  source 1..22: mol_type = other RNA
gagcttccacactcccaaactc

SEQ ID NO: 1958 - RNA, 22 nt, synthetic construct
  source 1..22: mol_type = other RNA
gaggaaaacctgaggatgagca

SEQ ID NO: 1959 - RNA, 22 nt, synthetic construct
  source 1..22: mol_type = other RNA
gaggaaagcttttcagctgcag

SEQ ID NO: 1960 - RNA, 22 nt, synthetic construct
  source 1..22: mol_type = other RNA
gaggagaaaaaacggagtggtg

SEQ ID NO: 1961 - RNA, 22 nt, synthetic construct
  source 1..22: mol_type = other RNA
gaggatgagcagcttcacgttc

SEQ ID NO: 1962 - RNA, 22 nt, synthetic construct
  source 1..22: mol_type = other RNA
gaggctgtaatgtcttacttcc

SEQ ID NO: 1963 - RNA, 22 nt, synthetic construct
  source 1..22: mol_type = other RNA
gagtgcatacctggtagggaag

SEQ ID NO: 1964 - RNA, 22 nt, synthetic construct
  source 1..22: mol_type = other RNA
gagtggtgccattcaggtactg

SEQ ID NO: 1965 - RNA, 22 nt, synthetic construct
  source 1..22: mol_type = other RNA
gagtgtggaagctcaggaggag

SEQ ID NO: 1966 - RNA, 22 nt, synthetic construct
  source 1..22: mol_type = other RNA
gagttcttttcggcgaaaagtc

SEQ ID NO: 1967 - RNA, 22 nt, synthetic construct
  source 1..22: mol_type = other RNA
gagtttgggagtgtggaagctc

SEQ ID NO: 1968 - RNA, 22 nt, synthetic construct
  source 1..22: mol_type = other RNA
gatgagcagcttcacgttctgc

SEQ ID NO: 1969 - RNA, 22 nt, synthetic construct
  source 1..22: mol_type = other RNA
gatgagtttgggagtgtggaag

SEQ ID NO: 1970 - RNA, 22 nt, synthetic construct
  source 1..22: mol_type = other RNA
gatggggctgacttttcctttt

SEQ ID NO: 1971 - RNA, 22 nt, synthetic construct
  source 1..22: mol_type = other RNA
gatgttagcagagccagtcaag

SEQ ID NO: 1972 - RNA, 22 nt, synthetic construct
  source 1..22: mol_type = other RNA
gattgtcttctctagtgagagt

SEQ ID NO: 1973 - RNA, 22 nt, synthetic construct
  source 1..22: mol_type = other RNA
gcaagccaggctaaacagttgg

SEQ ID NO: 1974 - RNA, 22 nt, synthetic construct
  source 1..22: mol_type = other RNA
gcaagtcttgactggctctgct

SEQ ID NO: 1975 - RNA, 22 nt, synthetic construct
  source 1..22: mol_type = other RNA
gcaccactccgttttttctcct

SEQ ID NO: 1976 - RNA, 22 nt, synthetic construct
  source 1..22: mol_type = other RNA
gcactctcactagagaagacaa

SEQ ID NO: 1977 - RNA, 22 nt, synthetic construct
  source 1..22: mol_type = other RNA
gcagaacgtgaagctgctcatc

SEQ ID NO: 1978 - RNA, 22 nt, synthetic construct
  source 1..22: mol_type = other RNA
gcagagccagtcaagacttgcc

SEQ ID NO: 1979 - RNA, 22 nt, synthetic construct
  source 1..22: mol_type = other RNA
gcagctgaaaagctttcctccc

SEQ ID NO: 1980 - RNA, 22 nt, synthetic construct
  source 1..22: mol_type = other RNA
gcagcttcacgttctgccttta

SEQ ID NO: 1981 - RNA, 22 nt, synthetic construct
  source 1..22: mol_type = other RNA
gcagctttcttggcttctagtt

SEQ ID NO: 1982 - RNA, 22 nt, synthetic construct
  source 1..22: mol_type = other RNA
gcaggtaaatttaatgtaaagc

SEQ ID NO: 1983 - RNA, 22 nt, synthetic construct
  source 1..22: mol_type = other RNA
gcatacctggtagggaagtaag

SEQ ID NO: 1984 - RNA, 22 nt, synthetic construct
  source 1..22: mol_type = other RNA
gccaactgtttagcctggcttg

SEQ ID NO: 1985 - RNA, 22 nt, synthetic construct
  source 1..22: mol_type = other RNA
gccaagaaagctgcagctgaaa

SEQ ID NO: 1986 - RNA, 22 nt, synthetic construct
  source 1..22: mol_type = other RNA
gccaggctaaacagttggcagg

SEQ ID NO: 1987 - RNA, 22 nt, synthetic construct
  source 1..22: mol_type = other RNA
gccagtcaagacttgccgacaa

SEQ ID NO: 1988 - RNA, 22 nt, synthetic construct
  source 1..22: mol_type = other RNA
gccattcaggtactgagttctt

SEQ ID NO: 1989 - RNA, 22 nt, synthetic construct
  source 1..22: mol_type = other RNA
gccccatcacgtacaaaacaaa

SEQ ID NO: 1990 - RNA, 22 nt, synthetic construct
  source 1..22: mol_type = other RNA
gccgaaaagaactcagtacctg

SEQ ID NO: 1991 - RNA, 22 nt, synthetic construct
  source 1..22: mol_type = other RNA
gccgacaaaggaaactagaagc

SEQ ID NO: 1992 - RNA, 22 nt, synthetic construct
  source 1..22: mol_type = other RNA
gcctggcttgcgttttcagttt

SEQ ID NO: 1993 - RNA, 22 nt, synthetic construct
  source 1..22: mol_type = other RNA
gcctttatacaaagtctctgac

SEQ ID NO: 1994 - RNA, 22 nt, synthetic construct
  source 1..22: mol_type = other RNA
gcgaaaagtcaggatgttagca

SEQ ID NO: 1995 - RNA, 22 nt, synthetic construct
  source 1..22: mol_type = other RNA
gcgttttcagtttgttttgtac

SEQ ID NO: 1996 - RNA, 22 nt, synthetic construct
  source 1..22: mol_type = other RNA
gctaaacagttggcaggtaaat

SEQ ID NO: 1997 - RNA, 22 nt, synthetic construct
  source 1..22: mol_type = other RNA
gctaacatcctgacttttcgcc

SEQ ID NO: 1998 - RNA, 22 nt, synthetic construct
  source 1..22: mol_type = other RNA
gctcaaataaaaatgaaaagga

SEQ ID NO: 1999 - RNA, 22 nt, synthetic construct
  source 1..22: mol_type = other RNA
gctcaggaggagaaaaaacgga

SEQ ID NO: 2000 - RNA, 22 nt, synthetic construct
  source 1..22: mol_type = other RNA
gctcatcctcaggttttcctcc

SEQ ID NO: 2001 - RNA, 22 nt, synthetic construct
  source 1..22: mol_type = other RNA
gctctgctaacatcctgacttt

SEQ ID NO: 2002 - RNA, 22 nt, synthetic construct
  source 1..22: mol_type = other RNA
gctgaaaagctttcctccctgg

SEQ ID NO: 2003 - RNA, 22 nt, synthetic construct
  source 1..22: mol_type = other RNA
gctgacttttccttttcatttt

SEQ ID NO: 2004 - RNA, 22 nt, synthetic construct
  source 1..22: mol_type = other RNA
gctgcagctgaaaagctttcct

SEQ ID NO: 2005 - RNA, 22 nt, synthetic construct
  source 1..22: mol_type = other RNA
gctgcagctttcttggcttcta

SEQ ID NO: 2006 - RNA, 22 nt, synthetic construct
  source 1..22: mol_type = other RNA
gctgctcatcctcaggttttcc

SEQ ID NO: 2007 - RNA, 22 nt, synthetic construct
  source 1..22: mol_type = other RNA
gctgtaatgtcttacttcccta

SEQ ID NO: 2008 - RNA, 22 nt, synthetic construct
  source 1..22: mol_type = other RNA
gctgttctccagggaggaaagc

SEQ ID NO: 2009 - RNA, 22 nt, synthetic construct
  source 1..22: mol_type = other RNA
gcttcacgttctgcctttatac

SEQ ID NO: 2010 - RNA, 22 nt, synthetic construct
  source 1..22: mol_type = other RNA
gcttccacactcccaaactcat

SEQ ID NO: 2011 - RNA, 22 nt, synthetic construct
  source 1..22: mol_type = other RNA
gcttctagtttcctttgtcggc

SEQ ID NO: 2012 - RNA, 22 nt, synthetic construct
  source 1..22: mol_type = other RNA
gcttgcgttttcagtttgtttt

SEQ ID NO: 2013 - RNA, 22 nt, synthetic construct
  source 1..22: mol_type = other RNA
gctttacattaaatttacctgc

SEQ ID NO: 2014 - RNA, 22 nt, synthetic construct
  source 1..22: mol_type = other RNA
gctttcctccctggagaacagc

SEQ ID NO: 2015 - RNA, 22 nt, synthetic construct
  source 1..22: mol_type = other RNA
gctttcttggcttctagtttcc

SEQ ID NO: 2016 - RNA, 22 nt, synthetic construct
  source 1..22: mol_type = other RNA
gcttttcagctgcagctttctt

SEQ ID NO: 2017 - RNA, 22 nt, synthetic construct
  source 1..22: mol_type = other RNA
ggaaaacctgaggatgagcagc

SEQ ID NO: 2018 - RNA, 22 nt, synthetic construct
  source 1..22: mol_type = other RNA
ggaaaagtcagccccatcacgt

SEQ ID NO: 2019 - RNA, 22 nt, synthetic construct
  source 1..22: mol_type = other RNA
ggaaactagaagccaagaaagc

SEQ ID NO: 2020 - RNA, 22 nt, synthetic construct
  source 1..22: mol_type = other RNA
ggaaagcttttcagctgcagct

SEQ ID NO: 2021 - RNA, 22 nt, synthetic construct
  source 1..22: mol_type = other RNA
ggaagctcaggaggagaaaaaa

SEQ ID NO: 2022 - RNA, 22 nt, synthetic construct
  source 1..22: mol_type = other RNA
ggaagtaagacattacagcctc

SEQ ID NO: 2023 - RNA, 22 nt, synthetic construct
  source 1..22: mol_type = other RNA
ggagaaaaaacggagtggtgcc

SEQ ID NO: 2024 - RNA, 22 nt, synthetic construct
  source 1..22: mol_type = other RNA
ggagaacagctcaaataaaaat

SEQ ID NO: 2025 - RNA, 22 nt, synthetic construct
  source 1..22: mol_type = other RNA
ggaggaaaacctgaggatgagc

SEQ ID NO: 2026 - RNA, 22 nt, synthetic construct
  source 1..22: mol_type = other RNA
ggaggaaagcttttcagctgca

SEQ ID NO: 2027 - RNA, 22 nt, synthetic construct
  source 1..22: mol_type = other RNA
ggaggagaaaaaacggagtggt

SEQ ID NO: 2028 - RNA, 22 nt, synthetic construct
  source 1..22: mol_type = other RNA
ggagtggtgccattcaggtact

SEQ ID NO: 2029 - RNA, 22 nt, synthetic construct
  source 1..22: mol_type = other RNA
ggagtgtggaagctcaggagga

SEQ ID NO: 2030 - RNA, 22 nt, synthetic construct
  source 1..22: mol_type = other RNA
ggatgagcagcttcacgttctg

SEQ ID NO: 2031 - RNA, 22 nt, synthetic construct
  source 1..22: mol_type = other RNA
ggatgagtttgggagtgtggaa

SEQ ID NO: 2032 - RNA, 22 nt, synthetic construct
  source 1..22: mol_type = other RNA
ggatgttagcagagccagtcaa

SEQ ID NO: 2033 - RNA, 22 nt, synthetic construct
  source 1..22: mol_type = other RNA
ggcaagtcttgactggctctgc

SEQ ID NO: 2034 - RNA, 22 nt, synthetic construct
  source 1..22: mol_type = other RNA
ggcaccactccgttttttctcc

SEQ ID NO: 2035 - RNA, 22 nt, synthetic construct
  source 1..22: mol_type = other RNA
ggcagaacgtgaagctgctcat

SEQ ID NO: 2036 - RNA, 22 nt, synthetic construct
  source 1..22: mol_type = other RNA
ggcaggtaaatttaatgtaaag

SEQ ID NO: 2037 - RNA, 22 nt, synthetic construct
  source 1..22: mol_type = other RNA
ggcgaaaagtcaggatgttagc

SEQ ID NO: 2038 - RNA, 22 nt, synthetic construct
  source 1..22: mol_type = other RNA
ggctaaacagttggcaggtaaa

SEQ ID NO: 2039 - RNA, 22 nt, synthetic construct
  source 1..22: mol_type = other RNA
ggctctgctaacatcctgactt

SEQ ID NO: 2040 - RNA, 22 nt, synthetic construct
  source 1..22: mol_type = other RNA
ggctgacttttccttttcattt

SEQ ID NO: 2041 - RNA, 22 nt, synthetic construct
  source 1..22: mol_type = other RNA
ggctgtaatgtcttacttccct

SEQ ID NO: 2042 - RNA, 22 nt, synthetic construct
  source 1..22: mol_type = other RNA
ggcttctagtttcctttgtcgg

SEQ ID NO: 2043 - RNA, 22 nt, synthetic construct
  source 1..22: mol_type = other RNA
ggcttgcgttttcagtttgttt

SEQ ID NO: 2044 - RNA, 22 nt, synthetic construct
  source 1..22: mol_type = other RNA
gggaagtaagacattacagcct

SEQ ID NO: 2045 - RNA, 22 nt, synthetic construct
  source 1..22: mol_type = other RNA
gggaggaaagcttttcagctgc

SEQ ID NO: 2046 - RNA, 22 nt, synthetic construct
  source 1..22: mol_type = other RNA
gggagtgtggaagctcaggagg

SEQ ID NO: 2047 - RNA, 22 nt, synthetic construct
  source 1..22: mol_type = other RNA
gggctgacttttccttttcatt

SEQ ID NO: 2048 - RNA, 22 nt, synthetic construct
  source 1..22: mol_type = other RNA
ggggctgacttttccttttcat

SEQ ID NO: 2049 - RNA, 22 nt, synthetic construct
  source 1..22: mol_type = other RNA
ggtactgagttcttttcggcga

SEQ ID NO: 2050 - RNA, 22 nt, synthetic construct
  source 1..22: mol_type = other RNA
ggtagggaagtaagacattaca

SEQ ID NO: 2051 - RNA, 22 nt, synthetic construct
  source 1..22: mol_type = other RNA
ggtatgcactctcactagagaa

SEQ ID NO: 2052 - RNA, 22 nt, synthetic construct
  source 1..22: mol_type = other RNA
ggtgccattcaggtactgagtt

SEQ ID NO: 2053 - RNA, 22 nt, synthetic construct
  source 1..22: mol_type = other RNA
ggttttcctccaaattctcgat

SEQ ID NO: 2054 - RNA, 22 nt, synthetic construct
  source 1..22: mol_type = other RNA
gtaatgtcttacttccctacca

SEQ ID NO: 2055 - RNA, 22 nt, synthetic construct
  source 1..22: mol_type = other RNA
gtacaaaacaaactgaaaacgc

SEQ ID NO: 2056 - RNA, 22 nt, synthetic construct
  source 1..22: mol_type = other RNA
gtacctgaatggcaccactccg

SEQ ID NO: 2057 - RNA, 22 nt, synthetic construct
  source 1..22: mol_type = other RNA
gtacgtgatggggctgactttt

SEQ ID NO: 2058 - RNA, 22 nt, synthetic construct
  source 1..22: mol_type = other RNA
gtactgagttcttttcggcgaa

SEQ ID NO: 2059 - RNA, 22 nt, synthetic construct
  source 1..22: mol_type = other RNA
gtagggaagtaagacattacag

SEQ ID NO: 2060 - RNA, 22 nt, synthetic construct
  source 1..22: mol_type = other RNA
gtagttgaggctgtaatgtctt

SEQ ID NO: 2061 - RNA, 22 nt, synthetic construct
  source 1..22: mol_type = other RNA
gtataaaggcagaacgtgaagc

SEQ ID NO: 2062 - RNA, 22 nt, synthetic construct
  source 1..22: mol_type = other RNA
gtatgcactctcactagagaag

SEQ ID NO: 2063 - RNA, 22 nt, synthetic construct
  source 1..22: mol_type = other RNA
gtcaagacttgccgacaaagga

SEQ ID NO: 2064 - RNA, 22 nt, synthetic construct
  source 1..22: mol_type = other RNA
gtcagagactttgtataaaggc

SEQ ID NO: 2065 - RNA, 22 nt, synthetic construct
  source 1..22: mol_type = other RNA
gtcagccccatcacgtacaaaa

SEQ ID NO: 2066 - RNA, 22 nt, synthetic construct
  source 1..22: mol_type = other RNA
gtcaggatgttagcagagccag

SEQ ID NO: 2067 - RNA, 22 nt, synthetic construct
  source 1..22: mol_type = other RNA
gtcggcaagtcttgactggctc

SEQ ID NO: 2068 - RNA, 22 nt, synthetic construct
  source 1..22: mol_type = other RNA
gtctctgacgtggatgagtttg

SEQ ID NO: 2069 - RNA, 22 nt, synthetic construct
  source 1..22: mol_type = other RNA
gtcttacttccctaccaggtat

SEQ ID NO: 2070 - RNA, 22 nt, synthetic construct
  source 1..22: mol_type = other RNA
gtcttctctagtgagagtgcat

SEQ ID NO: 2071 - RNA, 22 nt, synthetic construct
  source 1..22: mol_type = other RNA
gtcttgactggctctgctaaca

SEQ ID NO: 2072 - RNA, 22 nt, synthetic construct
  source 1..22: mol_type = other RNA
gtgaagctgctcatcctcaggt

SEQ ID NO: 2073 - RNA, 22 nt, synthetic construct
  source 1..22: mol_type = other RNA
gtgagagtgcatacctggtagg

SEQ ID NO: 2074 - RNA, 22 nt, synthetic construct
  source 1..22: mol_type = other RNA
gtgatggggctgacttttcctt

SEQ ID NO: 2075 - RNA, 22 nt, synthetic construct
  source 1..22: mol_type = other RNA
gtgcatacctggtagggaagta

SEQ ID NO: 2076 - RNA, 22 nt, synthetic construct
  source 1..22: mol_type = other RNA
gtgccattcaggtactgagttc

SEQ ID NO: 2077 - RNA, 22 nt, synthetic construct
  source 1..22: mol_type = other RNA
gtggaagctcaggaggagaaaa

SEQ ID NO: 2078 - RNA, 22 nt, synthetic construct
  source 1..22: mol_type = other RNA
gtggatgagtttgggagtgtgg

SEQ ID NO: 2079 - RNA, 22 nt, synthetic construct
  source 1..22: mol_type = other RNA
gtggtgccattcaggtactgag

SEQ ID NO: 2080 - RNA, 22 nt, synthetic construct
  source 1..22: mol_type = other RNA
gtgtggaagctcaggaggagaa

SEQ ID NO: 2081 - RNA, 22 nt, synthetic construct
  source 1..22: mol_type = other RNA
gttagcagagccagtcaagact

SEQ ID NO: 2082 - RNA, 22 nt, synthetic construct
  source 1..22: mol_type = other RNA
gttctccagggaggaaagcttt

SEQ ID NO: 2083 - RNA, 22 nt, synthetic construct
  source 1..22: mol_type = other RNA
gttctgcctttatacaaagtct

SEQ ID NO: 2084 - RNA, 22 nt, synthetic construct
  source 1..22: mol_type = other RNA
gttcttttcggcgaaaagtcag

SEQ ID NO: 2085 - RNA, 22 nt, synthetic construct
  source 1..22: mol_type = other RNA
gttgaggctgtaatgtcttact

SEQ ID NO: 2086 - RNA, 22 nt, synthetic construct
  source 1..22: mol_type = other RNA
gttggcaggtaaatttaatgta

SEQ ID NO: 2087 - RNA, 22 nt, synthetic construct
  source 1..22: mol_type = other RNA
gtttagcctggcttgcgttttc

SEQ ID NO: 2088 - RNA, 22 nt, synthetic construct
  source 1..22: mol_type = other RNA
gtttcctttgtcggcaagtctt

SEQ ID NO: 2089 - RNA, 22 nt, synthetic construct
  source 1..22: mol_type = other RNA
gtttgggagtgtggaagctcag

SEQ ID NO: 2090 - RNA, 22 nt, synthetic construct
  source 1..22: mol_type = other RNA
gtttgttttgtacgtgatgggg

SEQ ID NO: 2091 - RNA, 22 nt, synthetic construct
  source 1..22: mol_type = other RNA
gttttcagtttgttttgtacgt

SEQ ID NO: 2092 - RNA, 22 nt, synthetic construct
  source 1..22: mol_type = other RNA
gttttcctccaaattctcgatt

SEQ ID NO: 2093 - RNA, 22 nt, synthetic construct
  source 1..22: mol_type = other RNA
gttttgtacgtgatggggctga

SEQ ID NO: 2094 - RNA, 22 nt, synthetic construct
  source 1..22: mol_type = other RNA
gttttttctcctcctgagcttc

SEQ ID NO: 2095 - RNA, 22 nt, synthetic construct
  source 1..22: mol_type = other RNA
taaacagttggcaggtaaattt

SEQ ID NO: 2096 - RNA, 22 nt, synthetic construct
  source 1..22: mol_type = other RNA
taaaggcagaacgtgaagctgc

SEQ ID NO: 2097 - RNA, 22 nt, synthetic construct
  source 1..22: mol_type = other RNA
taaatttacctgccaactgttt

SEQ ID NO: 2098 - RNA, 22 nt, synthetic construct
  source 1..22: mol_type = other RNA
taacatcctgacttttcgccga

SEQ ID NO: 2099 - RNA, 22 nt, synthetic construct
  source 1..22: mol_type = other RNA
taatgtcttacttccctaccag

SEQ ID NO: 2100 - RNA, 22 nt, synthetic construct
  source 1..22: mol_type = other RNA
tacaaaacaaactgaaaacgca

SEQ ID NO: 2101 - RNA, 22 nt, synthetic construct
  source 1..22: mol_type = other RNA
tacaaagtctctgacgtggatg

SEQ ID NO: 2102 - RNA, 22 nt, synthetic construct
  source 1..22: mol_type = other RNA
tacattaaatttacctgccaac

SEQ ID NO: 2103 - RNA, 22 nt, synthetic construct
  source 1..22: mol_type = other RNA
taccaggtatgcactctcacta

SEQ ID NO: 2104 - RNA, 22 nt, synthetic construct
  source 1..22: mol_type = other RNA
tacctgaatggcaccactccgt

SEQ ID NO: 2105 - RNA, 22 nt, synthetic construct
  source 1..22: mol_type = other RNA
tacctgccaactgtttagcctg

SEQ ID NO: 2106 - RNA, 22 nt, synthetic construct
  source 1..22: mol_type = other RNA
tacctggtagggaagtaagaca

SEQ ID NO: 2107 - RNA, 22 nt, synthetic construct
  source 1..22: mol_type = other RNA
tacgtgatggggctgacttttc

SEQ ID NO: 2108 - RNA, 22 nt, synthetic construct
  source 1..22: mol_type = other RNA
tactgagttcttttcggcgaaa

SEQ ID NO: 2109 - RNA, 22 nt, synthetic construct
  source 1..22: mol_type = other RNA
tacttccctaccaggtatgcac

SEQ ID NO: 2110 - RNA, 22 nt, synthetic construct
  source 1..22: mol_type = other RNA
tagaagccaagaaagctgcagc

SEQ ID NO: 2111 - RNA, 22 nt, synthetic construct
  source 1..22: mol_type = other RNA
tagagaagacaatcgagaattt

SEQ ID NO: 2112 - RNA, 22 nt, synthetic construct
  source 1..22: mol_type = other RNA
tagcagagccagtcaagacttg

SEQ ID NO: 2113 - RNA, 22 nt, synthetic construct
  source 1..22: mol_type = other RNA
tagcctggcttgcgttttcagt

SEQ ID NO: 2114 - RNA, 22 nt, synthetic construct
  source 1..22: mol_type = other RNA
tagggaagtaagacattacagc

SEQ ID NO: 2115 - RNA, 22 nt, synthetic construct
  source 1..22: mol_type = other RNA
tagtgagagtgcatacctggta

SEQ ID NO: 2116 - RNA, 22 nt, synthetic construct
  source 1..22: mol_type = other RNA
tagttgaggctgtaatgtctta

SEQ ID NO: 2117 - RNA, 22 nt, synthetic construct
  source 1..22: mol_type = other RNA
tagtttcctttgtcggcaagtc

SEQ ID NO: 2118 - RNA, 22 nt, synthetic construct
  source 1..22: mol_type = other RNA
tataaaggcagaacgtgaagct

SEQ ID NO: 2119 - RNA, 22 nt, synthetic construct
  source 1..22: mol_type = other RNA
tatacaaagtctctgacgtgga

SEQ ID NO: 2120 - RNA, 22 nt, synthetic construct
  source 1..22: mol_type = other RNA
tatgcactctcactagagaaga

SEQ ID NO: 2121 - RNA, 22 nt, synthetic construct
  source 1..22: mol_type = other RNA
tatttgagctgttctccaggga

SEQ ID NO: 2122 - RNA, 22 nt, synthetic construct
  source 1..22: mol_type = other RNA
tcaagacttgccgacaaaggaa

SEQ ID NO: 2123 - RNA, 22 nt, synthetic construct
  source 1..22: mol_type = other RNA
tcacgtacaaaacaaactgaaa

SEQ ID NO: 2124 - RNA, 22 nt, synthetic construct
  source 1..22: mol_type = other RNA
tcacgttctgcctttatacaaa

SEQ ID NO: 2125 - RNA, 22 nt, synthetic construct
  source 1..22: mol_type = other RNA
tcactagagaagacaatcgaga

SEQ ID NO: 2126 - RNA, 22 nt, synthetic construct
  source 1..22: mol_type = other RNA
tcagagactttgtataaaggca

SEQ ID NO: 2127 - RNA, 22 nt, synthetic construct
  source 1..22: mol_type = other RNA
tcagccccatcacgtacaaaac

SEQ ID NO: 2128 - RNA, 22 nt, synthetic construct
  source 1..22: mol_type = other RNA
tcagctgcagctttcttggctt

SEQ ID NO: 2129 - RNA, 22 nt, synthetic construct
  source 1..22: mol_type = other RNA
tcaggaggagaaaaaacggagt

SEQ ID NO: 2130 - RNA, 22 nt, synthetic construct
  source 1..22: mol_type = other RNA
tcaggatgttagcagagccagt

SEQ ID NO: 2131 - RNA, 22 nt, synthetic construct
  source 1..22: mol_type = other RNA
tcaggtactgagttcttttcgg

SEQ ID NO: 2132 - RNA, 22 nt, synthetic construct
  source 1..22: mol_type = other RNA
tcaggttttcctccaaattctc

SEQ ID NO: 2133 - RNA, 22 nt, synthetic construct
  source 1..22: mol_type = other RNA
tcagtacctgaatggcaccact

SEQ ID NO: 2134 - RNA, 22 nt, synthetic construct
  source 1..22: mol_type = other RNA
tcagtttgttttgtacgtgatg

SEQ ID NO: 2135 - RNA, 22 nt, synthetic construct
  source 1..22: mol_type = other RNA
tcatccacgtcagagactttgt

SEQ ID NO: 2136 - RNA, 22 nt, synthetic construct
  source 1..22: mol_type = other RNA
tcatcctcaggttttcctccaa

SEQ ID NO: 2137 - RNA, 22 nt, synthetic construct
  source 1..22: mol_type = other RNA
tcatttttatttgagctgttct

SEQ ID NO: 2138 - RNA, 22 nt, synthetic construct
  source 1..22: mol_type = other RNA
tccaaattctcgattgtcttct

SEQ ID NO: 2139 - RNA, 22 nt, synthetic construct
  source 1..22: mol_type = other RNA
tccacactcccaaactcatcca

SEQ ID NO: 2140 - RNA, 22 nt, synthetic construct
  source 1..22: mol_type = other RNA
tccacgtcagagactttgtata

SEQ ID NO: 2141 - RNA, 22 nt, synthetic construct
  source 1..22: mol_type = other RNA
tccagggaggaaagcttttcag

SEQ ID NO: 2142 - RNA, 22 nt, synthetic construct
  source 1..22: mol_type = other RNA
tcccaaactcatccacgtcaga

SEQ ID NO: 2143 - RNA, 22 nt, synthetic construct
  source 1..22: mol_type = other RNA
tccctaccaggtatgcactctc

SEQ ID NO: 2144 - RNA, 22 nt, synthetic construct
  source 1..22: mol_type = other RNA
tccctggagaacagctcaaata

SEQ ID NO: 2145 - RNA, 22 nt, synthetic construct
  source 1..22: mol_type = other RNA
tccgttttttctcctcctgagc

SEQ ID NO: 2146 - RNA, 22 nt, synthetic construct
  source 1..22: mol_type = other RNA
tcctcaggttttcctccaaatt

SEQ ID NO: 2147 - RNA, 22 nt, synthetic construct
  source 1..22: mol_type = other RNA
tcctccaaattctcgattgtct

SEQ ID NO: 2148 - RNA, 22 nt, synthetic construct
  source 1..22: mol_type = other RNA
tcctccctggagaacagctcaa

SEQ ID NO: 2149 - RNA, 22 nt, synthetic construct
  source 1..22: mol_type = other RNA
tcctcctgagcttccacactcc

SEQ ID NO: 2150 - RNA, 22 nt, synthetic construct
  source 1..22: mol_type = other RNA
tcctgacttttcgccgaaaaga

SEQ ID NO: 2151 - RNA, 22 nt, synthetic construct
  source 1..22: mol_type = other RNA
tcctgagcttccacactcccaa

SEQ ID NO: 2152 - RNA, 22 nt, synthetic construct
  source 1..22: mol_type = other RNA
tcctttgtcggcaagtcttgac

SEQ ID NO: 2153 - RNA, 22 nt, synthetic construct
  source 1..22: mol_type = other RNA
tccttttcatttttatttgagc

SEQ ID NO: 2154 - RNA, 22 nt, synthetic construct
  source 1..22: mol_type = other RNA
tcgagaatttggaggaaaacct

SEQ ID NO: 2155 - RNA, 22 nt, synthetic construct
  source 1..22: mol_type = other RNA
tcgattgtcttctctagtgaga

SEQ ID NO: 2156 - RNA, 22 nt, synthetic construct
  source 1..22: mol_type = other RNA
tcgccgaaaagaactcagtacc

SEQ ID NO: 2157 - RNA, 22 nt, synthetic construct
  source 1..22: mol_type = other RNA
tcggcaagtcttgactggctct

SEQ ID NO: 2158 - RNA, 22 nt, synthetic construct
  source 1..22: mol_type = other RNA
tcggcgaaaagtcaggatgtta

SEQ ID NO: 2159 - RNA, 22 nt, synthetic construct
  source 1..22: mol_type = other RNA
tctagtgagagtgcatacctgg

SEQ ID NO: 2160 - RNA, 22 nt, synthetic construct
  source 1..22: mol_type = other RNA
tctagtttcctttgtcggcaag

SEQ ID NO: 2161 - RNA, 22 nt, synthetic construct
  source 1..22: mol_type = other RNA
tctcactagagaagacaatcga

SEQ ID NO: 2162 - RNA, 22 nt, synthetic construct
  source 1..22: mol_type = other RNA
tctccagggaggaaagcttttc

SEQ ID NO: 2163 - RNA, 22 nt, synthetic construct
  source 1..22: mol_type = other RNA
tctcctcctgagcttccacact

SEQ ID NO: 2164 - RNA, 22 nt, synthetic construct
  source 1..22: mol_type = other RNA
tctcgattgtcttctctagtga

SEQ ID NO: 2165 - RNA, 22 nt, synthetic construct
  source 1..22: mol_type = other RNA
tctctagtgagagtgcatacct

SEQ ID NO: 2166 - RNA, 22 nt, synthetic construct
  source 1..22: mol_type = other RNA
tctctgacgtggatgagtttgg

SEQ ID NO: 2167 - RNA, 22 nt, synthetic construct
  source 1..22: mol_type = other RNA
tctgacgtggatgagtttggga

SEQ ID NO: 2168 - RNA, 22 nt, synthetic construct
  source 1..22: mol_type = other RNA
tctgcctttatacaaagtctct

SEQ ID NO: 2169 - RNA, 22 nt, synthetic construct
  source 1..22: mol_type = other RNA
tctgctaacatcctgacttttc

SEQ ID NO: 2170 - RNA, 22 nt, synthetic construct
  source 1..22: mol_type = other RNA
tcttacttccctaccaggtatg

SEQ ID NO: 2171 - RNA, 22 nt, synthetic construct
  source 1..22: mol_type = other RNA
tcttctctagtgagagtgcata

SEQ ID NO: 2172 - RNA, 22 nt, synthetic construct
  source 1..22: mol_type = other RNA
tcttgactggctctgctaacat

SEQ ID NO: 2173 - RNA, 22 nt, synthetic construct
  source 1..22: mol_type = other RNA
tcttggcttctagtttcctttg

SEQ ID NO: 2174 - RNA, 22 nt, synthetic construct
  source 1..22: mol_type = other RNA
tcttttcggcgaaaagtcagga

SEQ ID NO: 2175 - RNA, 22 nt, synthetic construct
  source 1..22: mol_type = other RNA
tgaaaacgcaagccaggctaaa

SEQ ID NO: 2176 - RNA, 22 nt, synthetic construct
  source 1..22: mol_type = other RNA
tgaaaagctttcctccctggag

SEQ ID NO: 2177 - RNA, 22 nt, synthetic construct
  source 1..22: mol_type = other RNA
tgaaaaggaaaagtcagcccca

SEQ ID NO: 2178 - RNA, 22 nt, synthetic construct
  source 1..22: mol_type = other RNA
tgaagctgctcatcctcaggtt

SEQ ID NO: 2179 - RNA, 22 nt, synthetic construct
  source 1..22: mol_type = other RNA
tgaatggcaccactccgttttt

SEQ ID NO: 2180 - RNA, 22 nt, synthetic construct
  source 1..22: mol_type = other RNA
tgacgtggatgagtttgggagt

SEQ ID NO: 2181 - RNA, 22 nt, synthetic construct
  source 1..22: mol_type = other RNA
tgactggctctgctaacatcct

SEQ ID NO: 2182 - RNA, 22 nt, synthetic construct
  source 1..22: mol_type = other RNA
tgacttttcgccgaaaagaact

SEQ ID NO: 2183 - RNA, 22 nt, synthetic construct
  source 1..22: mol_type = other RNA
tgagagtgcatacctggtaggg

SEQ ID NO: 2184 - RNA, 22 nt, synthetic construct
  source 1..22: mol_type = other RNA
tgagcagcttcacgttctgcct

SEQ ID NO: 2185 - RNA, 22 nt, synthetic construct
  source 1..22: mol_type = other RNA
tgagctgttctccagggaggaa

SEQ ID NO: 2186 - RNA, 22 nt, synthetic construct
  source 1..22: mol_type = other RNA
tgagcttccacactcccaaact

SEQ ID NO: 2187 - RNA, 22 nt, synthetic construct
  source 1..22: mol_type = other RNA
tgaggatgagcagcttcacgtt

SEQ ID NO: 2188 - RNA, 22 nt, synthetic construct
  source 1..22: mol_type = other RNA
tgaggctgtaatgtcttacttc

SEQ ID NO: 2189 - RNA, 22 nt, synthetic construct
  source 1..22: mol_type = other RNA
tgagttcttttcggcgaaaagt

SEQ ID NO: 2190 - RNA, 22 nt, synthetic construct
  source 1..22: mol_type = other RNA
tgagtttgggagtgtggaagct

SEQ ID NO: 2191 - RNA, 22 nt, synthetic construct
  source 1..22: mol_type = other RNA
tgatggggctgacttttccttt

SEQ ID NO: 2192 - RNA, 22 nt, synthetic construct
  source 1..22: mol_type = other RNA
tgcactctcactagagaagaca

SEQ ID NO: 2193 - RNA, 22 nt, synthetic construct
  source 1..22: mol_type = other RNA
tgcagctgaaaagctttcctcc

SEQ ID NO: 2194 - RNA, 22 nt, synthetic construct
  source 1..22: mol_type = other RNA
tgcagctttcttggcttctagt

SEQ ID NO: 2195 - RNA, 22 nt, synthetic construct
  source 1..22: mol_type = other RNA
tgcatacctggtagggaagtaa

SEQ ID NO: 2196 - RNA, 22 nt, synthetic construct
  source 1..22: mol_type = other RNA
tgccaactgtttagcctggctt

SEQ ID NO: 2197 - RNA, 22 nt, synthetic construct
  source 1..22: mol_type = other RNA
tgccattcaggtactgagttct

SEQ ID NO: 2198 - RNA, 22 nt, synthetic construct
  source 1..22: mol_type = other RNA
tgccgacaaaggaaactagaag

SEQ ID NO: 2199 - RNA, 22 nt, synthetic construct
  source 1..22: mol_type = other RNA
tgcctttatacaaagtctctga

SEQ ID NO: 2200 - RNA, 22 nt, synthetic construct
  source 1..22: mol_type = other RNA
tgcgttttcagtttgttttgta

SEQ ID NO: 2201 - RNA, 22 nt, synthetic construct
  source 1..22: mol_type = other RNA
tgctaacatcctgacttttcgc

SEQ ID NO: 2202 - RNA, 22 nt, synthetic construct
  source 1..22: mol_type = other RNA
tgctcatcctcaggttttcctc

SEQ ID NO: 2203 - RNA, 22 nt, synthetic construct
  source 1..22: mol_type = other RNA
tgctttacattaaatttacctg

SEQ ID NO: 2204 - RNA, 22 nt, synthetic construct
  source 1..22: mol_type = other RNA
tggaagctcaggaggagaaaaa

SEQ ID NO: 2205 - RNA, 22 nt, synthetic construct
  source 1..22: mol_type = other RNA
tggagaacagctcaaataaaaa

SEQ ID NO: 2206 - RNA, 22 nt, synthetic construct
  source 1..22: mol_type = other RNA
tggaggaaaacctgaggatgag

SEQ ID NO: 2207 - RNA, 22 nt, synthetic construct
  source 1..22: mol_type = other RNA
tggatgagtttgggagtgtgga

SEQ ID NO: 2208 - RNA, 22 nt, synthetic construct
  source 1..22: mol_type = other RNA
tggcaccactccgttttttctc

SEQ ID NO: 2209 - RNA, 22 nt, synthetic construct
  source 1..22: mol_type = other RNA
tggcaggtaaatttaatgtaaa

SEQ ID NO: 2210 - RNA, 22 nt, synthetic construct
  source 1..22: mol_type = other RNA
tggctctgctaacatcctgact

SEQ ID NO: 2211 - RNA, 22 nt, synthetic construct
  source 1..22: mol_type = other RNA
tggcttctagtttcctttgtcg

SEQ ID NO: 2212 - RNA, 22 nt, synthetic construct
  source 1..22: mol_type = other RNA
tggcttgcgttttcagtttgtt

SEQ ID NO: 2213 - RNA, 22 nt, synthetic construct
  source 1..22: mol_type = other RNA
tgggagtgtggaagctcaggag

SEQ ID NO: 2214 - RNA, 22 nt, synthetic construct
  source 1..22: mol_type = other RNA
tggggctgacttttccttttca

SEQ ID NO: 2215 - RNA, 22 nt, synthetic construct
  source 1..22: mol_type = other RNA
tggtagggaagtaagacattac

SEQ ID NO: 2216 - RNA, 22 nt, synthetic construct
  source 1..22: mol_type = other RNA
tggtgccattcaggtactgagt

SEQ ID NO: 2217 - RNA, 22 nt, synthetic construct
  source 1..22: mol_type = other RNA
tgtaatgtcttacttccctacc

SEQ ID NO: 2218 - RNA, 22 nt, synthetic construct
  source 1..22: mol_type = other RNA
tgtacgtgatggggctgacttt

SEQ ID NO: 2219 - RNA, 22 nt, synthetic construct
  source 1..22: mol_type = other RNA
tgtagttgaggctgtaatgtct

SEQ ID NO: 2220 - RNA, 22 nt, synthetic construct
  source 1..22: mol_type = other RNA
tgtataaaggcagaacgtgaag

SEQ ID NO: 2221 - RNA, 22 nt, synthetic construct
  source 1..22: mol_type = other RNA
tgtcggcaagtcttgactggct

SEQ ID NO: 2222 - RNA, 22 nt, synthetic construct
  source 1..22: mol_type = other RNA
tgtcttacttccctaccaggta

SEQ ID NO: 2223 - RNA, 22 nt, synthetic construct
  source 1..22: mol_type = other RNA
tgtcttctctagtgagagtgca

SEQ ID NO: 2224 - RNA, 22 nt, synthetic construct
  source 1..22: mol_type = other RNA
tgtggaagctcaggaggagaaa

SEQ ID NO: 2225 - RNA, 22 nt, synthetic construct
  source 1..22: mol_type = other RNA
tgttagcagagccagtcaagac

SEQ ID NO: 2226 - RNA, 22 nt, synthetic construct
  source 1..22: mol_type = other RNA
tgttctccagggaggaaagctt

SEQ ID NO: 2227 - RNA, 22 nt, synthetic construct
  source 1..22: mol_type = other RNA
tgtttagcctggcttgcgtttt

SEQ ID NO: 2228 - RNA, 22 nt, synthetic construct
  source 1..22: mol_type = other RNA
tgttttgtacgtgatggggctg

SEQ ID NO: 2229 - RNA, 22 nt, synthetic construct
  source 1..22: mol_type = other RNA
ttaaatttacctgccaactgtt

SEQ ID NO: 2230 - RNA, 22 nt, synthetic construct
  source 1..22: mol_type = other RNA
ttacattaaatttacctgccaa

SEQ ID NO: 2231 - RNA, 22 nt, synthetic construct
  source 1..22: mol_type = other RNA
ttacctgccaactgtttagcct

SEQ ID NO: 2232 - RNA, 22 nt, synthetic construct
  source 1..22: mol_type = other RNA
ttacttccctaccaggtatgca

SEQ ID NO: 2233 - RNA, 22 nt, synthetic construct
  source 1..22: mol_type = other RNA
ttagcagagccagtcaagactt

SEQ ID NO: 2234 - RNA, 22 nt, synthetic construct
  source 1..22: mol_type = other RNA
ttagcctggcttgcgttttcag

SEQ ID NO: 2235 - RNA, 22 nt, synthetic construct
  source 1..22: mol_type = other RNA
ttatacaaagtctctgacgtgg

SEQ ID NO: 2236 - RNA, 22 nt, synthetic construct
  source 1..22: mol_type = other RNA
ttatttgagctgttctccaggg

SEQ ID NO: 2237 - RNA, 22 nt, synthetic construct
  source 1..22: mol_type = other RNA
ttcacgttctgcctttatacaa

SEQ ID NO: 2238 - RNA, 22 nt, synthetic construct
  source 1..22: mol_type = other RNA
ttcagctgcagctttcttggct

SEQ ID NO: 2239 - RNA, 22 nt, synthetic construct
  source 1..22: mol_type = other RNA
ttcaggtactgagttcttttcg

SEQ ID NO: 2240 - RNA, 22 nt, synthetic construct
  source 1..22: mol_type = other RNA
ttcagtttgttttgtacgtgat

SEQ ID NO: 2241 - RNA, 22 nt, synthetic construct
  source 1..22: mol_type = other RNA
ttcatttttatttgagctgttc

SEQ ID NO: 2242 - RNA, 22 nt, synthetic construct
  source 1..22: mol_type = other RNA
ttccacactcccaaactcatcc

SEQ ID NO: 2243 - RNA, 22 nt, synthetic construct
  source 1..22: mol_type = other RNA
ttccctaccaggtatgcactct

SEQ ID NO: 2244 - RNA, 22 nt, synthetic construct
  source 1..22: mol_type = other RNA
ttcctccaaattctcgattgtc

SEQ ID NO: 2245 - RNA, 22 nt, synthetic construct
  source 1..22: mol_type = other RNA
ttcctccctggagaacagctca

SEQ ID NO: 2246 - RNA, 22 nt, synthetic construct
  source 1..22: mol_type = other RNA
ttcctttgtcggcaagtcttga

SEQ ID NO: 2247 - RNA, 22 nt, synthetic construct
  source 1..22: mol_type = other RNA
ttcgccgaaaagaactcagtac

SEQ ID NO: 2248 - RNA, 22 nt, synthetic construct
  source 1..22: mol_type = other RNA
ttcggcgaaaagtcaggatgtt

SEQ ID NO: 2249 - RNA, 22 nt, synthetic construct
  source 1..22: mol_type = other RNA
ttctagtttcctttgtcggcaa

SEQ ID NO: 2250 - RNA, 22 nt, synthetic construct
  source 1..22: mol_type = other RNA
ttctccagggaggaaagctttt

SEQ ID NO: 2251 - RNA, 22 nt, synthetic construct
  source 1..22: mol_type = other RNA
ttctcctcctgagcttccacac

SEQ ID NO: 2252 - RNA, 22 nt, synthetic construct
  source 1..22: mol_type = other RNA
ttctcgattgtcttctctagtg

SEQ ID NO: 2253 - RNA, 22 nt, synthetic construct
  source 1..22: mol_type = other RNA
ttctctagtgagagtgcatacc

SEQ ID NO: 2254 - RNA, 22 nt, synthetic construct
  source 1..22: mol_type = other RNA
ttctgcctttatacaaagtctc

SEQ ID NO: 2255 - RNA, 22 nt, synthetic construct
  source 1..22: mol_type = other RNA
ttcttggcttctagtttccttt

SEQ ID NO: 2256 - RNA, 22 nt, synthetic construct
  source 1..22: mol_type = other RNA
ttcttttcggcgaaaagtcagg

SEQ ID NO: 2257 - RNA, 22 nt, synthetic construct
  source 1..22: mol_type = other RNA
ttgactggctctgctaacatcc

SEQ ID NO: 2258 - RNA, 22 nt, synthetic construct
  source 1..22: mol_type = other RNA
ttgagctgttctccagggagga

SEQ ID NO: 2259 - RNA, 22 nt, synthetic construct
  source 1..22: mol_type = other RNA
ttgaggctgtaatgtcttactt

SEQ ID NO: 2260 - RNA, 22 nt, synthetic construct
  source 1..22: mol_type = other RNA
ttgccgacaaaggaaactagaa

SEQ ID NO: 2261 - RNA, 22 nt, synthetic construct
  source 1..22: mol_type = other RNA
ttgcgttttcagtttgttttgt

SEQ ID NO: 2262 - RNA, 22 nt, synthetic construct
  source 1..22: mol_type = other RNA
ttggaggaaaacctgaggatga

SEQ ID NO: 2263 - RNA, 22 nt, synthetic construct
  source 1..22: mol_type = other RNA
ttggcaggtaaatttaatgtaa

SEQ ID NO: 2264 - RNA, 22 nt, synthetic construct
  source 1..22: mol_type = other RNA
ttggcttctagtttcctttgtc

SEQ ID NO: 2265 - RNA, 22 nt, synthetic construct
  source 1..22: mol_type = other RNA
ttgggagtgtggaagctcagga

SEQ ID NO: 2266 - RNA, 22 nt, synthetic construct
  source 1..22: mol_type = other RNA
ttgtacgtgatggggctgactt

SEQ ID NO: 2267 - RNA, 22 nt, synthetic construct
  source 1..22: mol_type = other RNA
ttgtataaaggcagaacgtgaa

SEQ ID NO: 2268 - RNA, 22 nt, synthetic construct
  source 1..22: mol_type = other RNA
ttgtcggcaagtcttgactggc

SEQ ID NO: 2269 - RNA, 22 nt, synthetic construct
  source 1..22: mol_type = other RNA
ttgtcttctctagtgagagtgc

SEQ ID NO: 2270 - RNA, 22 nt, synthetic construct
  source 1..22: mol_type = other RNA
ttgttttgtacgtgatggggct

SEQ ID NO: 2271 - RNA, 22 nt, synthetic construct
  source 1..22: mol_type = other RNA
tttacattaaatttacctgcca

SEQ ID NO: 2272 - RNA, 22 nt, synthetic construct
  source 1..22: mol_type = other RNA
tttacctgccaactgtttagcc

SEQ ID NO: 2273 - RNA, 22 nt, synthetic construct
  source 1..22: mol_type = other RNA
tttagcctggcttgcgttttca

SEQ ID NO: 2274 - RNA, 22 nt, synthetic construct
  source 1..22: mol_type = other RNA
tttatacaaagtctctgacgtg

SEQ ID NO: 2275 - RNA, 22 nt, synthetic construct
  source 1..22: mol_type = other RNA
tttatttgagctgttctccagg

SEQ ID NO: 2276 - RNA, 22 nt, synthetic construct
  source 1..22: mol_type = other RNA
tttcagctgcagctttcttggc

SEQ ID NO: 2277 - RNA, 22 nt, synthetic construct
  source 1..22: mol_type = other RNA
tttcagtttgttttgtacgtga

SEQ ID NO: 2278 - RNA, 22 nt, synthetic construct
  source 1..22: mol_type = other RNA
tttcctccaaattctcgattgt

SEQ ID NO: 2279 - RNA, 22 nt, synthetic construct
  source 1..22: mol_type = other RNA
tttcctccctggagaacagctc

SEQ ID NO: 2280 - RNA, 22 nt, synthetic construct
  source 1..22: mol_type = other RNA
tttcctttgtcggcaagtcttg

SEQ ID NO: 2281 - RNA, 22 nt, synthetic construct
  source 1..22: mol_type = other RNA
tttcgccgaaaagaactcagta

SEQ ID NO: 2282 - RNA, 22 nt, synthetic construct
  source 1..22: mol_type = other RNA
tttcggcgaaaagtcaggatgt

SEQ ID NO: 2283 - RNA, 22 nt, synthetic construct
  source 1..22: mol_type = other RNA
tttctcctcctgagcttccaca

SEQ ID NO: 2284 - RNA, 22 nt, synthetic construct
  source 1..22: mol_type = other RNA
tttcttggcttctagtttcctt

SEQ ID NO: 2285 - RNA, 22 nt, synthetic construct
  source 1..22: mol_type = other RNA
tttgagctgttctccagggagg

SEQ ID NO: 2286 - RNA, 22 nt, synthetic construct
  source 1..22: mol_type = other RNA
tttggaggaaaacctgaggatg

SEQ ID NO: 2287 - RNA, 22 nt, synthetic construct
  source 1..22: mol_type = other RNA
tttgggagtgtggaagctcagg

SEQ ID NO: 2288 - RNA, 22 nt, synthetic construct
  source 1..22: mol_type = other RNA
tttgtacgtgatggggctgact

SEQ ID NO: 2289 - RNA, 22 nt, synthetic construct
  source 1..22: mol_type = other RNA
tttgtataaaggcagaacgtga

SEQ ID NO: 2290 - RNA, 22 nt, synthetic construct
  source 1..22: mol_type = other RNA
tttgtcggcaagtcttgactgg

SEQ ID NO: 2291 - RNA, 22 nt, synthetic construct
  source 1..22: mol_type = other RNA
tttgttttgtacgtgatggggc

SEQ ID NO: 2292 - RNA, 22 nt, synthetic construct
  source 1..22: mol_type = other RNA
ttttatttgagctgttctccag

SEQ ID NO: 2293 - RNA, 22 nt, synthetic construct
  source 1..22: mol_type = other RNA
ttttcagctgcagctttcttgg

SEQ ID NO: 2294 - RNA, 22 nt, synthetic construct
  source 1..22: mol_type = other RNA
ttttcagtttgttttgtacgtg

SEQ ID NO: 2295 - RNA, 22 nt, synthetic construct
  source 1..22: mol_type = other RNA
ttttcctccaaattctcgattg

SEQ ID NO: 2296 - RNA, 22 nt, synthetic construct
  source 1..22: mol_type = other RNA
ttttcgccgaaaagaactcagt

SEQ ID NO: 2297 - RNA, 22 nt, synthetic construct
  source 1..22: mol_type = other RNA
ttttcggcgaaaagtcaggatg

SEQ ID NO: 2298 - RNA, 22 nt, synthetic construct
  source 1..22: mol_type = other RNA
ttttctcctcctgagcttccac

SEQ ID NO: 2299 - RNA, 22 nt, synthetic construct
  source 1..22: mol_type = other RNA
ttttgtacgtgatggggctgac

SEQ ID NO: 2300 - RNA, 22 nt, synthetic construct
  source 1..22: mol_type = other RNA
tttttatttgagctgttctcca

SEQ ID NO: 2301 - RNA, 22 nt, synthetic construct
  source 1..22: mol_type = other RNA
tttttctcctcctgagcttcca

SEQ ID NO: 2302 - RNA, 22 nt, synthetic construct
  source 1..22: mol_type = other RNA
ttttttctcctcctgagcttcc

SEQ ID NO: 2303 - RNA, 20 nt, synthetic construct
  source 1..20: mol_type = other RNA
aaaaaagtgaaacgggagcc

SEQ ID NO: 2304 - RNA, 20 nt, synthetic construct
  source 1..20: mol_type = other RNA
aaaaagcccgtgagaaagag

SEQ ID NO: 2305 - RNA, 20 nt, synthetic construct
  source 1..20: mol_type = other RNA
aaaaagtgaaacgggagcct

SEQ ID NO: 2306 - RNA, 20 nt, synthetic construct
  source 1..20: mol_type = other RNA
aaaaatggtgaacatcattc

SEQ ID NO: 2307 - RNA, 20 nt, synthetic construct
  source 1..20: mol_type = other RNA
aaaacaaggagaatgacatg

SEQ ID NO: 2308 - RNA, 20 nt, synthetic construct
  source 1..20: mol_type = other RNA
aaaacatggcttggctcttt

SEQ ID NO: 2309 - RNA, 20 nt, synthetic construct
  source 1..20: mol_type = other RNA
aaaactctggctatttccaa

SEQ ID NO: 2310 - RNA, 20 nt, synthetic construct
  source 1..20: mol_type = other RNA
aaaagacgagggagatcctg

SEQ ID NO: 2311 - RNA, 20 nt, synthetic construct
  source 1..20: mol_type = other RNA
aaaagcagccattggcacta

SEQ ID NO: 2312 - RNA, 20 nt, synthetic construct
  source 1..20: mol_type = other RNA
aaaagcccagggtaagggtt

SEQ ID NO: 2313 - RNA, 20 nt, synthetic construct
  source 1..20: mol_type = other RNA
aaaagcccgtgagaaagagg

SEQ ID NO: 2314 - RNA, 20 nt, synthetic construct
  source 1..20: mol_type = other RNA
aaaagggggtgatatcatat

SEQ ID NO: 2315 - RNA, 20 nt, synthetic construct
  source 1..20: mol_type = other RNA
aaaagtatggcccagactat

SEQ ID NO: 2316 - RNA, 20 nt, synthetic construct
  source 1..20: mol_type = other RNA
aaaagtgaaacgggagcctg

SEQ ID NO: 2317 - RNA, 20 nt, synthetic construct
  source 1..20: mol_type = other RNA
aaaagttctgtggacagggt

SEQ ID NO: 2318 - RNA, 20 nt, synthetic construct
  source 1..20: mol_type = other RNA
aaaatatgcagggagatggt

SEQ ID NO: 2319 - RNA, 20 nt, synthetic construct
  source 1..20: mol_type = other RNA
aaaatggctgaaaaagcccg

SEQ ID NO: 2320 - RNA, 20 nt, synthetic construct
  source 1..20: mol_type = other RNA
aaaatggtgaacatcattca

SEQ ID NO: 2321 - RNA, 20 nt, synthetic construct
  source 1..20: mol_type = other RNA
aaacaaggagaatgacatgc

SEQ ID NO: 2322 - RNA, 20 nt, synthetic construct
  source 1..20: mol_type = other RNA
aaacatggactataaaaatg

SEQ ID NO: 2323 - RNA, 20 nt, synthetic construct
  source 1..20: mol_type = other RNA
aaacatggcttggctctttg

SEQ ID NO: 2324 - RNA, 20 nt, synthetic construct
  source 1..20: mol_type = other RNA
aaaccaaaatatgcagggag

SEQ ID NO: 2325 - RNA, 20 nt, synthetic construct
  source 1..20: mol_type = other RNA
aaaccatctccctgcatatt

SEQ ID NO: 2326 - RNA, 20 nt, synthetic construct
  source 1..20: mol_type = other RNA
aaacctatcagtggacaact

SEQ ID NO: 2327 - RNA, 20 nt, synthetic construct
  source 1..20: mol_type = other RNA
aaaccttggctggtaaagtg

SEQ ID NO: 2328 - RNA, 20 nt, synthetic construct
  source 1..20: mol_type = other RNA
aaacgcaggtaagtgggctc

SEQ ID NO: 2329 - RNA, 20 nt, synthetic construct
  source 1..20: mol_type = other RNA
aaacgggagcctgctgagcc

SEQ ID NO: 2330 - RNA, 20 nt, synthetic construct
  source 1..20: mol_type = other RNA
aaactctggctatttccaaa

SEQ ID NO: 2331 - RNA, 20 nt, synthetic construct
  source 1..20: mol_type = other RNA
aaactcttcacacacttcag

SEQ ID NO: 2332 - RNA, 20 nt, synthetic construct
  source 1..20: mol_type = other RNA
aaacttcagagcccacttac

SEQ ID NO: 2333 - RNA, 20 nt, synthetic construct
  source 1..20: mol_type = other RNA
aaagaatcccaataggaatc

SEQ ID NO: 2334 - RNA, 20 nt, synthetic construct
  source 1..20: mol_type = other RNA
aaagacgagggagatcctgg

SEQ ID NO: 2335 - RNA, 20 nt, synthetic construct
  source 1..20: mol_type = other RNA
aaagagccaagccatgtttt

SEQ ID NO: 2336 - RNA, 20 nt, synthetic construct
  source 1..20: mol_type = other RNA
aaagaggaagagtgtgaaaa

SEQ ID NO: 2337 - RNA, 20 nt, synthetic construct
  source 1..20: mol_type = other RNA
aaagatacctgtttctgttc

SEQ ID NO: 2338 - RNA, 20 nt, synthetic construct
  source 1..20: mol_type = other RNA
aaagatgcttccagctctta

SEQ ID NO: 2339 - RNA, 20 nt, synthetic construct
  source 1..20: mol_type = other RNA
aaagcagccattggcactag

SEQ ID NO: 2340 - RNA, 20 nt, synthetic construct
  source 1..20: mol_type = other RNA
aaagcatgtcattctccttg

SEQ ID NO: 2341 - RNA, 20 nt, synthetic construct
  source 1..20: mol_type = other RNA
aaagcccagggtaagggttc

SEQ ID NO: 2342 - RNA, 20 nt, synthetic construct
  source 1..20: mol_type = other RNA
aaagcccgtgagaaagagga

SEQ ID NO: 2343 - RNA, 20 nt, synthetic construct
  source 1..20: mol_type = other RNA
aaagcgtgagctgcatgcca

SEQ ID NO: 2344 - RNA, 20 nt, synthetic construct
  source 1..20: mol_type = other RNA
aaagctctgctcgctgtctg

SEQ ID NO: 2345 - RNA, 20 nt, synthetic construct
  source 1..20: mol_type = other RNA
aaaggaccatgtccgtgacc

SEQ ID NO: 2346 - RNA, 20 nt, synthetic construct
  source 1..20: mol_type = other RNA
aaagggggtgatatcatata

SEQ ID NO: 2347 - RNA, 20 nt, synthetic construct
  source 1..20: mol_type = other RNA
aaaggggttgtggcatgcag

SEQ ID NO: 2348 - RNA, 20 nt, synthetic construct
  source 1..20: mol_type = other RNA
aaagtatggcccagactatg

SEQ ID NO: 2349 - RNA, 20 nt, synthetic construct
  source 1..20: mol_type = other RNA
aaagtcgcaaaagttctgtg

SEQ ID NO: 2350 - RNA, 20 nt, synthetic construct
  source 1..20: mol_type = other RNA
aaagtgaaacgggagcctgc

SEQ ID NO: 2351 - RNA, 20 nt, synthetic construct
  source 1..20: mol_type = other RNA
aaagtgtatggatgggtggt

SEQ ID NO: 2352 - RNA, 20 nt, synthetic construct
  source 1..20: mol_type = other RNA
aaagttctgtggacagggta

SEQ ID NO: 2353 - RNA, 20 nt, synthetic construct
  source 1..20: mol_type = other RNA
aaatacttaggttatggaaa

SEQ ID NO: 2354 - RNA, 20 nt, synthetic construct
  source 1..20: mol_type = other RNA
aaatagccagagttttacat

SEQ ID NO: 2355 - RNA, 20 nt, synthetic construct
  source 1..20: mol_type = other RNA
aaatatgaacctgcagcttg

SEQ ID NO: 2356 - RNA, 20 nt, synthetic construct
  source 1..20: mol_type = other RNA
aaatatgcagggagatggtt

SEQ ID NO: 2357 - RNA, 20 nt, synthetic construct
  source 1..20: mol_type = other RNA
aaatcccatggcaaaaaagt

SEQ ID NO: 2358 - RNA, 20 nt, synthetic construct
  source 1..20: mol_type = other RNA
aaatggctgaaaaagcccgt

SEQ ID NO: 2359 - RNA, 20 nt, synthetic construct
  source 1..20: mol_type = other RNA
aaatggtgaacatcattcac

SEQ ID NO: 2360 - RNA, 20 nt, synthetic construct
  source 1..20: mol_type = other RNA
aaatgtacatcatgtaggga

SEQ ID NO: 2361 - RNA, 20 nt, synthetic construct
  source 1..20: mol_type = other RNA
aaattaagtgatgctaatgg

SEQ ID NO: 2362 - RNA, 20 nt, synthetic construct
  source 1..20: mol_type = other RNA
aaattgcctccttatcccac

SEQ ID NO: 2363 - RNA, 20 nt, synthetic construct
  source 1..20: mol_type = other RNA
aacaaaagggggtgatatca

SEQ ID NO: 2364 - RNA, 20 nt, synthetic construct
  source 1..20: mol_type = other RNA
aacaaggagaatgacatgct

SEQ ID NO: 2365 - RNA, 20 nt, synthetic construct
  source 1..20: mol_type = other RNA
aacagctctcttcatgccct

SEQ ID NO: 2366 - RNA, 20 nt, synthetic construct
  source 1..20: mol_type = other RNA
aacatcattcaccttctcac

SEQ ID NO: 2367 - RNA, 20 nt, synthetic construct
  source 1..20: mol_type = other RNA
aacatgcccggagctgcact

SEQ ID NO: 2368 - RNA, 20 nt, synthetic construct
  source 1..20: mol_type = other RNA
aacatggactataaaaatgg

SEQ ID NO: 2369 - RNA, 20 nt, synthetic construct
  source 1..20: mol_type = other RNA
aacatggcttggctctttgg

SEQ ID NO: 2370 - RNA, 20 nt, synthetic construct
  source 1..20: mol_type = other RNA
aaccaaaatatgcagggaga

SEQ ID NO: 2371 - RNA, 20 nt, synthetic construct
  source 1..20: mol_type = other RNA
aaccaacaaaagggggtgat

SEQ ID NO: 2372 - RNA, 20 nt, synthetic construct
  source 1..20: mol_type = other RNA
aaccatctccctgcatattt

SEQ ID NO: 2373 - RNA, 20 nt, synthetic construct
  source 1..20: mol_type = other RNA
aaccatgatagaactgcttg

SEQ ID NO: 2374 - RNA, 20 nt, synthetic construct
  source 1..20: mol_type = other RNA
aacccagatatggggagcag

SEQ ID NO: 2375 - RNA, 20 nt, synthetic construct
  source 1..20: mol_type = other RNA
aacccattagctgtgtggga

SEQ ID NO: 2376 - RNA, 20 nt, synthetic construct
  source 1..20: mol_type = other RNA
aacccctttaaagaatccca

SEQ ID NO: 2377 - RNA, 20 nt, synthetic construct
  source 1..20: mol_type = other RNA
aacccttaccctgggctttt

SEQ ID NO: 2378 - RNA, 20 nt, synthetic construct
  source 1..20: mol_type = other RNA
aacctaagtatttagatgta

SEQ ID NO: 2379 - RNA, 20 nt, synthetic construct
  source 1..20: mol_type = other RNA
aacctatcagtggacaactg

SEQ ID NO: 2380 - RNA, 20 nt, synthetic construct
  source 1..20: mol_type = other RNA
aacctgcagcttgagatgag

SEQ ID NO: 2381 - RNA, 20 nt, synthetic construct
  source 1..20: mol_type = other RNA
aaccttggctggtaaagtgt

SEQ ID NO: 2382 - RNA, 20 nt, synthetic construct
  source 1..20: mol_type = other RNA
aacgatgaggtctggtcaga

SEQ ID NO: 2383 - RNA, 20 nt, synthetic construct
  source 1..20: mol_type = other RNA
aacgcaggtaagtgggctct

SEQ ID NO: 2384 - RNA, 20 nt, synthetic construct
  source 1..20: mol_type = other RNA
aacgggagcctgctgagcca

SEQ ID NO: 2385 - RNA, 20 nt, synthetic construct
  source 1..20: mol_type = other RNA
aactacagtgcagctccggg

SEQ ID NO: 2386 - RNA, 20 nt, synthetic construct
  source 1..20: mol_type = other RNA
aactacatctccatatgcct

SEQ ID NO: 2387 - RNA, 20 nt, synthetic construct
  source 1..20: mol_type = other RNA
aactcatgggtcaattctca

SEQ ID NO: 2388 - RNA, 20 nt, synthetic construct
  source 1..20: mol_type = other RNA
aactctggctatttccaaac

SEQ ID NO: 2389 - RNA, 20 nt, synthetic construct
  source 1..20: mol_type = other RNA
aactcttattctgcttctgg

SEQ ID NO: 2390 - RNA, 20 nt, synthetic construct
  source 1..20: mol_type = other RNA
aactcttcacacacttcaga

SEQ ID NO: 2391 - RNA, 20 nt, synthetic construct
  source 1..20: mol_type = other RNA
aactgctccccatatctggg

SEQ ID NO: 2392 - RNA, 20 nt, synthetic construct
  source 1..20: mol_type = other RNA
aactgctgaaaccatctccc

SEQ ID NO: 2393 - RNA, 20 nt, synthetic construct
  source 1..20: mol_type = other RNA
aactgcttgtgtccaaggag

SEQ ID NO: 2394 - RNA, 20 nt, synthetic construct
  source 1..20: mol_type = other RNA
aactggattgggccgtctca

SEQ ID NO: 2395 - RNA, 20 nt, synthetic construct
  source 1..20: mol_type = other RNA
aacttcagagcccacttacc

SEQ ID NO: 2396 - RNA, 20 nt, synthetic construct
  source 1..20: mol_type = other RNA
aacttctattccacctcatc

SEQ ID NO: 2397 - RNA, 20 nt, synthetic construct
  source 1..20: mol_type = other RNA
aacttttgcgactttcagga

SEQ ID NO: 2398 - RNA, 20 nt, synthetic construct
  source 1..20: mol_type = other RNA
aagaatcccaataggaatca

SEQ ID NO: 2399 - RNA, 20 nt, synthetic construct
  source 1..20: mol_type = other RNA
aagaattcaaatatgaacct

SEQ ID NO: 2400 - RNA, 20 nt, synthetic construct
  source 1..20: mol_type = other RNA
aagaccctctgtctaagctc

SEQ ID NO: 2401 - RNA, 20 nt, synthetic construct
  source 1..20: mol_type = other RNA
aagacgagggagatcctggt

SEQ ID NO: 2402 - RNA, 20 nt, synthetic construct
  source 1..20: mol_type = other RNA
aagagacttgatgaaacgca

SEQ ID NO: 2403 - RNA, 20 nt, synthetic construct
  source 1..20: mol_type = other RNA
aagagagctgttgaacatgc

SEQ ID NO: 2404 - RNA, 20 nt, synthetic construct
  source 1..20: mol_type = other RNA
aagagcatgaatgagccaaa

SEQ ID NO: 2405 - RNA, 20 nt, synthetic construct
  source 1..20: mol_type = other RNA
aagagccaagccatgttttg

SEQ ID NO: 2406 - RNA, 20 nt, synthetic construct
  source 1..20: mol_type = other RNA
aagagctggaagcatctttg

SEQ ID NO: 2407 - RNA, 20 nt, synthetic construct
  source 1..20: mol_type = other RNA
aagaggaagagtgtgaaaag

SEQ ID NO: 2408 - RNA, 20 nt, synthetic construct
  source 1..20: mol_type = other RNA
aagagtgtgaaaagtatggc

SEQ ID NO: 2409 - RNA, 20 nt, synthetic construct
  source 1..20: mol_type = other RNA
aagagttgacagactctgtc

SEQ ID NO: 2410 - RNA, 20 nt, synthetic construct
  source 1..20: mol_type = other RNA
aagagtttggataaggacta

SEQ ID NO: 2411 - RNA, 20 nt, synthetic construct
  source 1..20: mol_type = other RNA
aagatacctgtttctgttct

SEQ ID NO: 2412 - RNA, 20 nt, synthetic construct
  source 1..20: mol_type = other RNA
aagatgcttccagctcttaa

SEQ ID NO: 2413 - RNA, 20 nt, synthetic construct
  source 1..20: mol_type = other RNA
aagcaccagccctatgaact

SEQ ID NO: 2414 - RNA, 20 nt, synthetic construct
  source 1..20: mol_type = other RNA
aagcagaataagagttgaca

SEQ ID NO: 2415 - RNA, 20 nt, synthetic construct
  source 1..20: mol_type = other RNA
aagcagccaccacagcccca

SEQ ID NO: 2416 - RNA, 20 nt, synthetic construct
  source 1..20: mol_type = other RNA
aagcagccattggcactagt

SEQ ID NO: 2417 - RNA, 20 nt, synthetic construct
  source 1..20: mol_type = other RNA
aagcagttctatcatggtta

SEQ ID NO: 2418 - RNA, 20 nt, synthetic construct
  source 1..20: mol_type = other RNA
aagcatctttgataacccat

SEQ ID NO: 2419 - RNA, 20 nt, synthetic construct
  source 1..20: mol_type = other RNA
aagcatgtcattctccttgt

SEQ ID NO: 2420 - RNA, 20 nt, synthetic construct
  source 1..20: mol_type = other RNA
aagccaaaatggctgaaaaa

SEQ ID NO: 2421 - RNA, 20 nt, synthetic construct
  source 1..20: mol_type = other RNA
aagccaagaccctctgtcta

SEQ ID NO: 2422 - RNA, 20 nt, synthetic construct
  source 1..20: mol_type = other RNA
aagccacaccctggactagt

SEQ ID NO: 2423 - RNA, 20 nt, synthetic construct
  source 1..20: mol_type = other RNA
aagccatgttttggctcatt

SEQ ID NO: 2424 - RNA, 20 nt, synthetic construct
  source 1..20: mol_type = other RNA
aagcccagggtaagggttca

SEQ ID NO: 2425 - RNA, 20 nt, synthetic construct
  source 1..20: mol_type = other RNA
aagcccgtgagaaagaggaa

SEQ ID NO: 2426 - RNA, 20 nt, synthetic construct
  source 1..20: mol_type = other RNA
aagcctccttggacacaagc

SEQ ID NO: 2427 - RNA, 20 nt, synthetic construct
  source 1..20: mol_type = other RNA
aagcgtgagctgcatgccac

SEQ ID NO: 2428 - RNA, 20 nt, synthetic construct
  source 1..20: mol_type = other RNA
aagctcagtctaccacccat

SEQ ID NO: 2429 - RNA, 20 nt, synthetic construct
  source 1..20: mol_type = other RNA
aagctctgctcgctgtctga

SEQ ID NO: 2430 - RNA, 20 nt, synthetic construct
  source 1..20: mol_type = other RNA
aagctgcaggttcatatttg

SEQ ID NO: 2431 - RNA, 20 nt, synthetic construct
  source 1..20: mol_type = other RNA
aaggaccatgtccgtgacca

SEQ ID NO: 2432 - RNA, 20 nt, synthetic construct
  source 1..20: mol_type = other RNA
aaggactaactggattgggc

SEQ ID NO: 2433 - RNA, 20 nt, synthetic construct
  source 1..20: mol_type = other RNA
aaggagaatgacatgctttc

SEQ ID NO: 2434 - RNA, 20 nt, synthetic construct
  source 1..20: mol_type = other RNA
aaggaggcaatttccctaca

SEQ ID NO: 2435 - RNA, 20 nt, synthetic construct
  source 1..20: mol_type = other RNA
aaggaggcttacacaaatta

SEQ ID NO: 2436 - RNA, 20 nt, synthetic construct
  source 1..20: mol_type = other RNA
aaggcatatggagatgtagt

SEQ ID NO: 2437 - RNA, 20 nt, synthetic construct
  source 1..20: mol_type = other RNA
aaggccctgtgacccgagtg

SEQ ID NO: 2438 - RNA, 20 nt, synthetic construct
  source 1..20: mol_type = other RNA
aagggggtgatatcatatat

SEQ ID NO: 2439 - RNA, 20 nt, synthetic construct
  source 1..20: mol_type = other RNA
aaggggttgtggcatgcagc

SEQ ID NO: 2440 - RNA, 20 nt, synthetic construct
  source 1..20: mol_type = other RNA
aagggttcatgggattagaa

SEQ ID NO: 2441 - RNA, 20 nt, synthetic construct
  source 1..20: mol_type = other RNA
aaggtgaatgatgttcacca

SEQ ID NO: 2442 - RNA, 20 nt, synthetic construct
  source 1..20: mol_type = other RNA
aaggtttggaaatagccaga

SEQ ID NO: 2443 - RNA, 20 nt, synthetic construct
  source 1..20: mol_type = other RNA
aagtatggcccagactatgt

SEQ ID NO: 2444 - RNA, 20 nt, synthetic construct
  source 1..20: mol_type = other RNA
aagtcgcaaaagttctgtgg

SEQ ID NO: 2445 - RNA, 20 nt, synthetic construct
  source 1..20: mol_type = other RNA
aagtctcttgccgaaaggac

SEQ ID NO: 2446 - RNA, 20 nt, synthetic construct
  source 1..20: mol_type = other RNA
aagtgaaacgggagcctgct

SEQ ID NO: 2447 - RNA, 20 nt, synthetic construct
  source 1..20: mol_type = other RNA
aagtgaggtaaccaacaaaa

SEQ ID NO: 2448 - RNA, 20 nt, synthetic construct
  source 1..20: mol_type = other RNA
aagtgatgctaatggtcagg

SEQ ID NO: 2449 - RNA, 20 nt, synthetic construct
  source 1..20: mol_type = other RNA
aagtggccatccatctcatg

SEQ ID NO: 2450 - RNA, 20 nt, synthetic construct
  source 1..20: mol_type = other RNA
aagtgggctctgaagtttca

SEQ ID NO: 2451 - RNA, 20 nt, synthetic construct
  source 1..20: mol_type = other RNA
aagtgtatggatgggtggta

SEQ ID NO: 2452 - RNA, 20 nt, synthetic construct
  source 1..20: mol_type = other RNA
aagtgtgtgaagagtttgga

SEQ ID NO: 2453 - RNA, 20 nt, synthetic construct
  source 1..20: mol_type = other RNA
aagttcatagggctggtgct

SEQ ID NO: 2454 - RNA, 20 nt, synthetic construct
  source 1..20: mol_type = other RNA
aagttctgtggacagggtaa

SEQ ID NO: 2455 - RNA, 20 nt, synthetic construct
  source 1..20: mol_type = other RNA
aagtttcatgtggctcagca

SEQ ID NO: 2456 - RNA, 20 nt, synthetic construct
  source 1..20: mol_type = other RNA
aataagagttgacagactct

SEQ ID NO: 2457 - RNA, 20 nt, synthetic construct
  source 1..20: mol_type = other RNA
aatacccaatatccatcata

SEQ ID NO: 2458 - RNA, 20 nt, synthetic construct
  source 1..20: mol_type = other RNA
aatacttaggttatggaaac

SEQ ID NO: 2459 - RNA, 20 nt, synthetic construct
  source 1..20: mol_type = other RNA
aatagaagttcatagggctg

SEQ ID NO: 2460 - RNA, 20 nt, synthetic construct
  source 1..20: mol_type = other RNA
aatagccagagttttacatc

SEQ ID NO: 2461 - RNA, 20 nt, synthetic construct
  source 1..20: mol_type = other RNA
aataggaacccagatatggg

SEQ ID NO: 2462 - RNA, 20 nt, synthetic construct
  source 1..20: mol_type = other RNA
aataggaatcaccccaccag

SEQ ID NO: 2463 - RNA, 20 nt, synthetic construct
  source 1..20: mol_type = other RNA
aatatccatcatatcaatgc

SEQ ID NO: 2464 - RNA, 20 nt, synthetic construct
  source 1..20: mol_type = other RNA
aatatgaacctgcagcttga

SEQ ID NO: 2465 - RNA, 20 nt, synthetic construct
  source 1..20: mol_type = other RNA
aatatgcagggagatggttt

SEQ ID NO: 2466 - RNA, 20 nt, synthetic construct
  source 1..20: mol_type = other RNA
aatcaccccaccaggatctc

SEQ ID NO: 2467 - RNA, 20 nt, synthetic construct
  source 1..20: mol_type = other RNA
aatcagaatacccaatatcc

SEQ ID NO: 2468 - RNA, 20 nt, synthetic construct
  source 1..20: mol_type = other RNA
aatccaaacatggactataa

SEQ ID NO: 2469 - RNA, 20 nt, synthetic construct
  source 1..20: mol_type = other RNA
aatccagttagtccttatcc

SEQ ID NO: 2470 - RNA, 20 nt, synthetic construct
  source 1..20: mol_type = other RNA
aatccataactacagtgcag

SEQ ID NO: 2471 - RNA, 20 nt, synthetic construct
  source 1..20: mol_type = other RNA
aatccatacatgagacggcc

SEQ ID NO: 2472 - RNA, 20 nt, synthetic construct
  source 1..20: mol_type = other RNA
aatcccaataggaatcaccc

SEQ ID NO: 2473 - RNA, 20 nt, synthetic construct
  source 1..20: mol_type = other RNA
aatcccatgaacccttaccc

SEQ ID NO: 2474 - RNA, 20 nt, synthetic construct
  source 1..20: mol_type = other RNA
aatcccatggcaaaaaagtg

SEQ ID NO: 2475 - RNA, 20 nt, synthetic construct
  source 1..20: mol_type = other RNA
aatctagaggtggctcccat

SEQ ID NO: 2476 - RNA, 20 nt, synthetic construct
  source 1..20: mol_type = other RNA
aatctgagcaatccaaacat

SEQ ID NO: 2477 - RNA, 20 nt, synthetic construct
  source 1..20: mol_type = other RNA
aatgacatgctttcccacac

SEQ ID NO: 2478 - RNA, 20 nt, synthetic construct
  source 1..20: mol_type = other RNA
aatgagaattgacccatgag

SEQ ID NO: 2479 - RNA, 20 nt, synthetic construct
  source 1..20: mol_type = other RNA
aatgagccaaaacatggctt

SEQ ID NO: 2480 - RNA, 20 nt, synthetic construct
  source 1..20: mol_type = other RNA
aatgatgttcaccattttta

SEQ ID NO: 2481 - RNA, 20 nt, synthetic construct
  source 1..20: mol_type = other RNA
aatgcaatggaaacctatca

SEQ ID NO: 2482 - RNA, 20 nt, synthetic construct
  source 1..20: mol_type = other RNA
aatggaaacctatcagtgga

SEQ ID NO: 2483 - RNA, 20 nt, synthetic construct
  source 1..20: mol_type = other RNA
aatggctgaaaaagcccgtg

SEQ ID NO: 2484 - RNA, 20 nt, synthetic construct
  source 1..20: mol_type = other RNA
aatggctgcttttcctgacc

SEQ ID NO: 2485 - RNA, 20 nt, synthetic construct
  source 1..20: mol_type = other RNA
aatgggttatcaaagatgct

SEQ ID NO: 2486 - RNA, 20 nt, synthetic construct
  source 1..20: mol_type = other RNA
aatggtacaactgctgaaac

SEQ ID NO: 2487 - RNA, 20 nt, synthetic construct
  source 1..20: mol_type = other RNA
aatggtcaggaaaagcagcc

SEQ ID NO: 2488 - RNA, 20 nt, synthetic construct
  source 1..20: mol_type = other RNA
aatggtgaacatcattcacc

SEQ ID NO: 2489 - RNA, 20 nt, synthetic construct
  source 1..20: mol_type = other RNA
aatgtacatcatgtagggaa

SEQ ID NO: 2490 - RNA, 20 nt, synthetic construct
  source 1..20: mol_type = other RNA
aatgtcaggatccagaaagc

SEQ ID NO: 2491 - RNA, 20 nt, synthetic construct
  source 1..20: mol_type = other RNA
aattaagtgatgctaatggt

SEQ ID NO: 2492 - RNA, 20 nt, synthetic construct
  source 1..20: mol_type = other RNA
aattcaaatatgaacctgca

SEQ ID NO: 2493 - RNA, 20 nt, synthetic construct
  source 1..20: mol_type = other RNA
aattctcattgagtgtgcaa

SEQ ID NO: 2494 - RNA, 20 nt, synthetic construct
  source 1..20: mol_type = other RNA
aattcttctaatcccatgaa

SEQ ID NO: 2495 - RNA, 20 nt, synthetic construct
  source 1..20: mol_type = other RNA
aattgacccatgagttggag

SEQ ID NO: 2496 - RNA, 20 nt, synthetic construct
  source 1..20: mol_type = other RNA
aattgcctccttatcccact

SEQ ID NO: 2497 - RNA, 20 nt, synthetic construct
  source 1..20: mol_type = other RNA
aatttccctacatgatgtac

SEQ ID NO: 2498 - RNA, 20 nt, synthetic construct
  source 1..20: mol_type = other RNA
aatttgtgtaagcctccttg

SEQ ID NO: 2499 - RNA, 20 nt, synthetic construct
  source 1..20: mol_type = other RNA
acaaaagggggtgatatcat

SEQ ID NO: 2500 - RNA, 20 nt, synthetic construct
  source 1..20: mol_type = other RNA
acaaattaagtgatgctaat

SEQ ID NO: 2501 - RNA, 20 nt, synthetic construct
  source 1..20: mol_type = other RNA
acaacccctttaaagaatcc

SEQ ID NO: 2502 - RNA, 20 nt, synthetic construct
  source 1..20: mol_type = other RNA
acaacgatgaggtctggtca

SEQ ID NO: 2503 - RNA, 20 nt, synthetic construct
  source 1..20: mol_type = other RNA
acaactgctccccatatctg

SEQ ID NO: 2504 - RNA, 20 nt, synthetic construct
  source 1..20: mol_type = other RNA
acaactgctgaaaccatctc

SEQ ID NO: 2505 - RNA, 20 nt, synthetic construct
  source 1..20: mol_type = other RNA
acaagcagttctatcatggt

SEQ ID NO: 2506 - RNA, 20 nt, synthetic construct
  source 1..20: mol_type = other RNA
acaaggagaatgacatgctt

SEQ ID NO: 2507 - RNA, 20 nt, synthetic construct
  source 1..20: mol_type = other RNA
acacaaattaagtgatgcta

SEQ ID NO: 2508 - RNA, 20 nt, synthetic construct
  source 1..20: mol_type = other RNA
acacaagcagttctatcatg

SEQ ID NO: 2509 - RNA, 20 nt, synthetic construct
  source 1..20: mol_type = other RNA
acacacttcagatatctatg

SEQ ID NO: 2510 - RNA, 20 nt, synthetic construct
  source 1..20: mol_type = other RNA
acacagctaatgggttatca

SEQ ID NO: 2511 - RNA, 20 nt, synthetic construct
  source 1..20: mol_type = other RNA
acaccctggactagtgccaa

SEQ ID NO: 2512 - RNA, 20 nt, synthetic construct
  source 1..20: mol_type = other RNA
acactcaatgagaattgacc

SEQ ID NO: 2513 - RNA, 20 nt, synthetic construct
  source 1..20: mol_type = other RNA
acactcttcctctttctcac

SEQ ID NO: 2514 - RNA, 20 nt, synthetic construct
  source 1..20: mol_type = other RNA
acacttcagatatctatgga

SEQ ID NO: 2515 - RNA, 20 nt, synthetic construct
  source 1..20: mol_type = other RNA
acactttaccagccaaggtt

SEQ ID NO: 2516 - RNA, 20 nt, synthetic construct
  source 1..20: mol_type = other RNA
acagaacttttgcgactttc

SEQ ID NO: 2517 - RNA, 20 nt, synthetic construct
  source 1..20: mol_type = other RNA
acagaagcagccaccacagc

SEQ ID NO: 2518 - RNA, 20 nt, synthetic construct
  source 1..20: mol_type = other RNA
acagactccacagtaactac

SEQ ID NO: 2519 - RNA, 20 nt, synthetic construct
  source 1..20: mol_type = other RNA
acagactctgtctgagggtg

SEQ ID NO: 2520 - RNA, 20 nt, synthetic construct
  source 1..20: mol_type = other RNA
acagagggtcttggcttgga

SEQ ID NO: 2521 - RNA, 20 nt, synthetic construct
  source 1..20: mol_type = other RNA
acagagtctgtcaactctta

SEQ ID NO: 2522 - RNA, 20 nt, synthetic construct
  source 1..20: mol_type = other RNA
acagatatatatgatatcac

SEQ ID NO: 2523 - RNA, 20 nt, synthetic construct
  source 1..20: mol_type = other RNA
acagatccatcggctgagac

SEQ ID NO: 2524 - RNA, 20 nt, synthetic construct
  source 1..20: mol_type = other RNA
acagccccagcagcagcaga

SEQ ID NO: 2525 - RNA, 20 nt, synthetic construct
  source 1..20: mol_type = other RNA
acagcgagcagagctttctg

SEQ ID NO: 2526 - RNA, 20 nt, synthetic construct
  source 1..20: mol_type = other RNA
acagctaatgggttatcaaa

SEQ ID NO: 2527 - RNA, 20 nt, synthetic construct
  source 1..20: mol_type = other RNA
acagctctcttcatgccctg

SEQ ID NO: 2528 - RNA, 20 nt, synthetic construct
  source 1..20: mol_type = other RNA
acagggccttacaacagata

SEQ ID NO: 2529 - RNA, 20 nt, synthetic construct
  source 1..20: mol_type = other RNA
acagggtaagagagaacaga

SEQ ID NO: 2530 - RNA, 20 nt, synthetic construct
  source 1..20: mol_type = other RNA
acagtaactacatctccata

SEQ ID NO: 2531 - RNA, 20 nt, synthetic construct
  source 1..20: mol_type = other RNA
acagtgcagctccgggcatg

SEQ ID NO: 2532 - RNA, 20 nt, synthetic construct
  source 1..20: mol_type = other RNA
acataatccataactacagt

SEQ ID NO: 2533 - RNA, 20 nt, synthetic construct
  source 1..20: mol_type = other RNA
acatagtctgggccatactt

SEQ ID NO: 2534 - RNA, 20 nt, synthetic construct
  source 1..20: mol_type = other RNA
acatcaccctcagacagagt

SEQ ID NO: 2535 - RNA, 20 nt, synthetic construct
  source 1..20: mol_type = other RNA
acatcatgtagggaaattgc

SEQ ID NO: 2536 - RNA, 20 nt, synthetic construct
  source 1..20: mol_type = other RNA
acatcattcaccttctcaca

SEQ ID NO: 2537 - RNA, 20 nt, synthetic construct
  source 1..20: mol_type = other RNA
acatctaaatacttaggtta

SEQ ID NO: 2538 - RNA, 20 nt, synthetic construct
  source 1..20: mol_type = other RNA
acatctccatatgccttcac

SEQ ID NO: 2539 - RNA, 20 nt, synthetic construct
  source 1..20: mol_type = other RNA
acatgaaacttcagagccca

SEQ ID NO: 2540 - RNA, 20 nt, synthetic construct
  source 1..20: mol_type = other RNA
acatgagacggcccaatcca

SEQ ID NO: 2541 - RNA, 20 nt, synthetic construct
  source 1..20: mol_type = other RNA
acatgatgtacatttggtct

SEQ ID NO: 2542 - RNA, 20 nt, synthetic construct
  source 1..20: mol_type = other RNA
acatgcccggagctgcactg

SEQ ID NO: 2543 - RNA, 20 nt, synthetic construct
  source 1..20: mol_type = other RNA
acatgctttcccacacagct

SEQ ID NO: 2544 - RNA, 20 nt, synthetic construct
  source 1..20: mol_type = other RNA
acatggactataaaaatggt

SEQ ID NO: 2545 - RNA, 20 nt, synthetic construct
  source 1..20: mol_type = other RNA
acatggcttggctctttggg

SEQ ID NO: 2546 - RNA, 20 nt, synthetic construct
  source 1..20: mol_type = other RNA
acatggtcctttcggcaaga

SEQ ID NO: 2547 - RNA, 20 nt, synthetic construct
  source 1..20: mol_type = other RNA
acattgggggagtggccgtg

SEQ ID NO: 2548 - RNA, 20 nt, synthetic construct
  source 1..20: mol_type = other RNA
acatttggtctaatggtaca

SEQ ID NO: 2549 - RNA, 20 nt, synthetic construct
  source 1..20: mol_type = other RNA
accaaaatatgcagggagat

SEQ ID NO: 2550 - RNA, 20 nt, synthetic construct
  source 1..20: mol_type = other RNA
accaaatgtacatcatgtag

SEQ ID NO: 2551 - RNA, 20 nt, synthetic construct
  source 1..20: mol_type = other RNA
accaacaaaagggggtgata

SEQ ID NO: 2552 - RNA, 20 nt, synthetic construct
  source 1..20: mol_type = other RNA
accaatccatacatgagacg

SEQ ID NO: 2553 - RNA, 20 nt, synthetic construct
  source 1..20: mol_type = other RNA
accacagactccacagtaac

SEQ ID NO: 2554 - RNA, 20 nt, synthetic construct
  source 1..20: mol_type = other RNA
accacagccccagcagcagc

SEQ ID NO: 2555 - RNA, 20 nt, synthetic construct
  source 1..20: mol_type = other RNA
accacccaatctgagcaatc

SEQ ID NO: 2556 - RNA, 20 nt, synthetic construct
  source 1..20: mol_type = other RNA
accacccatccatacacttt

SEQ ID NO: 2557 - RNA, 20 nt, synthetic construct
  source 1..20: mol_type = other RNA
accagaagccacaccctgga

SEQ ID NO: 2558 - RNA, 20 nt, synthetic construct
  source 1..20: mol_type = other RNA
accagacctcatcgttgtcc

SEQ ID NO: 2559 - RNA, 20 nt, synthetic construct
  source 1..20: mol_type = other RNA
accagcataagagcatgaat

SEQ ID NO: 2560 - RNA, 20 nt, synthetic construct
  source 1..20: mol_type = other RNA
accagccaaggtttggaaat

SEQ ID NO: 2561 - RNA, 20 nt, synthetic construct
  source 1..20: mol_type = other RNA
accagccctatgaacttcta

SEQ ID NO: 2562 - RNA, 20 nt, synthetic construct
  source 1..20: mol_type = other RNA
accaggatctccctcgtctt

SEQ ID NO: 2563 - RNA, 20 nt, synthetic construct
  source 1..20: mol_type = other RNA
accagtcatgcagcagtccc

SEQ ID NO: 2564 - RNA, 20 nt, synthetic construct
  source 1..20: mol_type = other RNA
accatctccctgcatatttt

SEQ ID NO: 2565 - RNA, 20 nt, synthetic construct
  source 1..20: mol_type = other RNA
accatgatagaactgcttgt

SEQ ID NO: 2566 - RNA, 20 nt, synthetic construct
  source 1..20: mol_type = other RNA
accatgtccgtgaccacaga

SEQ ID NO: 2567 - RNA, 20 nt, synthetic construct
  source 1..20: mol_type = other RNA
accattagaccaaatgtaca

SEQ ID NO: 2568 - RNA, 20 nt, synthetic construct
  source 1..20: mol_type = other RNA
accattagcatcacttaatt

SEQ ID NO: 2569 - RNA, 20 nt, synthetic construct
  source 1..20: mol_type = other RNA
accatttttatagtccatgt

SEQ ID NO: 2570 - RNA, 20 nt, synthetic construct
  source 1..20: mol_type = other RNA
acccaatatccatcatatca

SEQ ID NO: 2571 - RNA, 20 nt, synthetic construct
  source 1..20: mol_type = other RNA
acccaatctgagcaatccaa

SEQ ID NO: 2572 - RNA, 20 nt, synthetic construct
  source 1..20: mol_type = other RNA
acccagatatggggagcagt

SEQ ID NO: 2573 - RNA, 20 nt, synthetic construct
  source 1..20: mol_type = other RNA
acccatccatacactttacc

SEQ ID NO: 2574 - RNA, 20 nt, synthetic construct
  source 1..20: mol_type = other RNA
acccatgagttggagccacg

SEQ ID NO: 2575 - RNA, 20 nt, synthetic construct
  source 1..20: mol_type = other RNA
acccattagctgtgtgggaa

SEQ ID NO: 2576 - RNA, 20 nt, synthetic construct
  source 1..20: mol_type = other RNA
accccaccaggatctccctc

SEQ ID NO: 2577 - RNA, 20 nt, synthetic construct
  source 1..20: mol_type = other RNA
accccagcagcagcagccac

SEQ ID NO: 2578 - RNA, 20 nt, synthetic construct
  source 1..20: mol_type = other RNA
acccccttttgttggttacc

SEQ ID NO: 2579 - RNA, 20 nt, synthetic construct
  source 1..20: mol_type = other RNA
acccctttaaagaatcccaa

SEQ ID NO: 2580 - RNA, 20 nt, synthetic construct
  source 1..20: mol_type = other RNA
acccgagtgaaggcatatgg

SEQ ID NO: 2581 - RNA, 20 nt, synthetic construct
  source 1..20: mol_type = other RNA
accctcagacagagtctgtc

SEQ ID NO: 2582 - RNA, 20 nt, synthetic construct
  source 1..20: mol_type = other RNA
accctctgtctaagctcagt

SEQ ID NO: 2583 - RNA, 20 nt, synthetic construct
  source 1..20: mol_type = other RNA
accctggactagtgccaatg

SEQ ID NO: 2584 - RNA, 20 nt, synthetic construct
  source 1..20: mol_type = other RNA
accctgggcttttgaatcag

SEQ ID NO: 2585 - RNA, 20 nt, synthetic construct
  source 1..20: mol_type = other RNA
accctgtccacagaactttt

SEQ ID NO: 2586 - RNA, 20 nt, synthetic construct
  source 1..20: mol_type = other RNA
acccttaccctgggcttttg

SEQ ID NO: 2587 - RNA, 20 nt, synthetic construct
  source 1..20: mol_type = other RNA
acctaagtatttagatgtaa

SEQ ID NO: 2588 - RNA, 20 nt, synthetic construct
  source 1..20: mol_type = other RNA
acctatacagatccatcggc

SEQ ID NO: 2589 - RNA, 20 nt, synthetic construct
  source 1..20: mol_type = other RNA
acctatcagtggacaactgc

SEQ ID NO: 2590 - RNA, 20 nt, synthetic construct
  source 1..20: mol_type = other RNA
acctcatcgttgtcctctgc

SEQ ID NO: 2591 - RNA, 20 nt, synthetic construct
  source 1..20: mol_type = other RNA
acctcatctcaagctgcagg

SEQ ID NO: 2592 - RNA, 20 nt, synthetic construct
  source 1..20: mol_type = other RNA
acctctagattaccacccaa

SEQ ID NO: 2593 - RNA, 20 nt, synthetic construct
  source 1..20: mol_type = other RNA
acctgcagcttgagatgagg

SEQ ID NO: 2594 - RNA, 20 nt, synthetic construct
  source 1..20: mol_type = other RNA
acctgcgtttcatcaagtct

SEQ ID NO: 2595 - RNA, 20 nt, synthetic construct
  source 1..20: mol_type = other RNA
acctgtttctgttctctctt

SEQ ID NO: 2596 - RNA, 20 nt, synthetic construct
  source 1..20: mol_type = other RNA
accttctcacataatccata

SEQ ID NO: 2597 - RNA, 20 nt, synthetic construct
  source 1..20: mol_type = other RNA
accttggctggtaaagtgta

SEQ ID NO: 2598 - RNA, 20 nt, synthetic construct
  source 1..20: mol_type = other RNA
acgagggagatcctggtggg

SEQ ID NO: 2599 - RNA, 20 nt, synthetic construct
  source 1..20: mol_type = other RNA
acgatgaggtctggtcagac

SEQ ID NO: 2600 - RNA, 20 nt, synthetic construct
  source 1..20: mol_type = other RNA
acgcaggtaagtgggctctg

SEQ ID NO: 2601 - RNA, 20 nt, synthetic construct
  source 1..20: mol_type = other RNA
acgctttgcacactcaatga

SEQ ID NO: 2602 - RNA, 20 nt, synthetic construct
  source 1..20: mol_type = other RNA
acggacatggtcctttcggc

SEQ ID NO: 2603 - RNA, 20 nt, synthetic construct
  source 1..20: mol_type = other RNA
acggccactcccccaatgtc

SEQ ID NO: 2604 - RNA, 20 nt, synthetic construct
  source 1..20: mol_type = other RNA
acggcccaatccagttagtc

SEQ ID NO: 2605 - RNA, 20 nt, synthetic construct
  source 1..20: mol_type = other RNA
acgggagcctgctgagccac

SEQ ID NO: 2606 - RNA, 20 nt, synthetic construct
  source 1..20: mol_type = other RNA
acgggctttttcagccattt

SEQ ID NO: 2607 - RNA, 20 nt, synthetic construct
  source 1..20: mol_type = other RNA
actaactggattgggccgtc

SEQ ID NO: 2608 - RNA, 20 nt, synthetic construct
  source 1..20: mol_type = other RNA
actacagtgcagctccgggc

SEQ ID NO: 2609 - RNA, 20 nt, synthetic construct
  source 1..20: mol_type = other RNA
actacatctccatatgcctt

SEQ ID NO: 2610 - RNA, 20 nt, synthetic construct
  source 1..20: mol_type = other RNA
actagtccagggtgtggctt

SEQ ID NO: 2611 - RNA, 20 nt, synthetic construct
  source 1..20: mol_type = other RNA
actagtgccaatggctgctt

SEQ ID NO: 2612 - RNA, 20 nt, synthetic construct
  source 1..20: mol_type = other RNA
actataaaaatggtgaacat

SEQ ID NO: 2613 - RNA, 20 nt, synthetic construct
  source 1..20: mol_type = other RNA
actatgtgcctcagaaatcc

SEQ ID NO: 2614 - RNA, 20 nt, synthetic construct
  source 1..20: mol_type = other RNA
actcaatgagaattgaccca

SEQ ID NO: 2615 - RNA, 20 nt, synthetic construct
  source 1..20: mol_type = other RNA
actcatgagatggatggcca

SEQ ID NO: 2616 - RNA, 20 nt, synthetic construct
  source 1..20: mol_type = other RNA
actcatgggtcaattctcat

SEQ ID NO: 2617 - RNA, 20 nt, synthetic construct
  source 1..20: mol_type = other RNA
actccacagtaactacatct

SEQ ID NO: 2618 - RNA, 20 nt, synthetic construct
  source 1..20: mol_type = other RNA
actcccccaatgtcaggatc

SEQ ID NO: 2619 - RNA, 20 nt, synthetic construct
  source 1..20: mol_type = other RNA
actcgggtcacagggcctta

SEQ ID NO: 2620 - RNA, 20 nt, synthetic construct
  source 1..20: mol_type = other RNA
actctggctatttccaaacc

SEQ ID NO: 2621 - RNA, 20 nt, synthetic construct
  source 1..20: mol_type = other RNA
actctgtctgagggtgatgt

SEQ ID NO: 2622 - RNA, 20 nt, synthetic construct
  source 1..20: mol_type = other RNA
actcttattctgcttctgga

SEQ ID NO: 2623 - RNA, 20 nt, synthetic construct
  source 1..20: mol_type = other RNA
actcttcacacacttcagat

SEQ ID NO: 2624 - RNA, 20 nt, synthetic construct
  source 1..20: mol_type = other RNA
actcttcctctttctcacgg

SEQ ID NO: 2625 - RNA, 20 nt, synthetic construct
  source 1..20: mol_type = other RNA
actgagcttagacagagggt

SEQ ID NO: 2626 - RNA, 20 nt, synthetic construct
  source 1..20: mol_type = other RNA
actgataggtttccattgca

SEQ ID NO: 2627 - RNA, 20 nt, synthetic construct
  source 1..20: mol_type = other RNA
actgctccccatatctgggt

SEQ ID NO: 2628 - RNA, 20 nt, synthetic construct
  source 1..20: mol_type = other RNA
actgctgaaaccatctccct

SEQ ID NO: 2629 - RNA, 20 nt, synthetic construct
  source 1..20: mol_type = other RNA
actgctgcatgactggtcct

SEQ ID NO: 2630 - RNA, 20 nt, synthetic construct
  source 1..20: mol_type = other RNA
actgcttgtgtccaaggagg

SEQ ID NO: 2631 - RNA, 20 nt, synthetic construct
  source 1..20: mol_type = other RNA
actggattgggccgtctcat

SEQ ID NO: 2632 - RNA, 20 nt, synthetic construct
  source 1..20: mol_type = other RNA
actggggagaataggaaccc

SEQ ID NO: 2633 - RNA, 20 nt, synthetic construct
  source 1..20: mol_type = other RNA
actggtcctgaaagtcgcaa

SEQ ID NO: 2634 - RNA, 20 nt, synthetic construct
  source 1..20: mol_type = other RNA
actgtagttatggattatgt

SEQ ID NO: 2635 - RNA, 20 nt, synthetic construct
  source 1..20: mol_type = other RNA
actgtggagtctgtggtcac

SEQ ID NO: 2636 - RNA, 20 nt, synthetic construct
  source 1..20: mol_type = other RNA
acttaatttgtgtaagcctc

SEQ ID NO: 2637 - RNA, 20 nt, synthetic construct
  source 1..20: mol_type = other RNA
acttacctgcgtttcatcaa

SEQ ID NO: 2638 - RNA, 20 nt, synthetic construct
  source 1..20: mol_type = other RNA
acttaggttatggaaaccaa

SEQ ID NO: 2639 - RNA, 20 nt, synthetic construct
  source 1..20: mol_type = other RNA
acttcagagcccacttacct

SEQ ID NO: 2640 - RNA, 20 nt, synthetic construct
  source 1..20: mol_type = other RNA
acttcagatatctatggaag

SEQ ID NO: 2641 - RNA, 20 nt, synthetic construct
  source 1..20: mol_type = other RNA
acttcatgggagccacctct

SEQ ID NO: 2642 - RNA, 20 nt, synthetic construct
  source 1..20: mol_type = other RNA
acttctattccacctcatct

SEQ ID NO: 2643 - RNA, 20 nt, synthetic construct
  source 1..20: mol_type = other RNA
acttgatgaaacgcaggtaa

SEQ ID NO: 2644 - RNA, 20 nt, synthetic construct
  source 1..20: mol_type = other RNA
actttaccagccaaggtttg

SEQ ID NO: 2645 - RNA, 20 nt, synthetic construct
  source 1..20: mol_type = other RNA
actttcaggaccagtcatgc

SEQ ID NO: 2646 - RNA, 20 nt, synthetic construct
  source 1..20: mol_type = other RNA
acttttcacactcttcctct

SEQ ID NO: 2647 - RNA, 20 nt, synthetic construct
  source 1..20: mol_type = other RNA
acttttgcgactttcaggac

SEQ ID NO: 2648 - RNA, 20 nt, synthetic construct
  source 1..20: mol_type = other RNA
acttttttgccatgggattt

SEQ ID NO: 2649 - RNA, 20 nt, synthetic construct
  source 1..20: mol_type = other RNA
agaaagaggaagagtgtgaa

SEQ ID NO: 2650 - RNA, 20 nt, synthetic construct
  source 1..20: mol_type = other RNA
agaaagctctgctcgctgtc

SEQ ID NO: 2651 - RNA, 20 nt, synthetic construct
  source 1..20: mol_type = other RNA
agaaatcccatggcaaaaaa

SEQ ID NO: 2652 - RNA, 20 nt, synthetic construct
  source 1..20: mol_type = other RNA
agaactgcttgtgtccaagg

SEQ ID NO: 2653 - RNA, 20 nt, synthetic construct
  source 1..20: mol_type = other RNA
agaacttttgcgactttcag

SEQ ID NO: 2654 - RNA, 20 nt, synthetic construct
  source 1..20: mol_type = other RNA
agaagaattcaaatatgaac

SEQ ID NO: 2655 - RNA, 20 nt, synthetic construct
  source 1..20: mol_type = other RNA
agaagcagaataagagttga

SEQ ID NO: 2656 - RNA, 20 nt, synthetic construct
  source 1..20: mol_type = other RNA
agaagcagccaccacagccc

SEQ ID NO: 2657 - RNA, 20 nt, synthetic construct
  source 1..20: mol_type = other RNA
agaagccacaccctggacta

SEQ ID NO: 2658 - RNA, 20 nt, synthetic construct
  source 1..20: mol_type = other RNA
agaaggtgaatgatgttcac

SEQ ID NO: 2659 - RNA, 20 nt, synthetic construct
  source 1..20: mol_type = other RNA
agaagttcatagggctggtg

SEQ ID NO: 2660 - RNA, 20 nt, synthetic construct
  source 1..20: mol_type = other RNA
agaataagagttgacagact

SEQ ID NO: 2661 - RNA, 20 nt, synthetic construct
  source 1..20: mol_type = other RNA
agaatacccaatatccatca

SEQ ID NO: 2662 - RNA, 20 nt, synthetic construct
  source 1..20: mol_type = other RNA
agaataggaacccagatatg

SEQ ID NO: 2663 - RNA, 20 nt, synthetic construct
  source 1..20: mol_type = other RNA
agaatcccaataggaatcac

SEQ ID NO: 2664 - RNA, 20 nt, synthetic construct
  source 1..20: mol_type = other RNA
agaatgacatgctttcccac

SEQ ID NO: 2665 - RNA, 20 nt, synthetic construct
  source 1..20: mol_type = other RNA
agaattcaaatatgaacctg

SEQ ID NO: 2666 - RNA, 20 nt, synthetic construct
  source 1..20: mol_type = other RNA
agaattgacccatgagttgg

SEQ ID NO: 2667 - RNA, 20 nt, synthetic construct
  source 1..20: mol_type = other RNA
agacagagggtcttggcttg

SEQ ID NO: 2668 - RNA, 20 nt, synthetic construct
  source 1..20: mol_type = other RNA
agacagagtctgtcaactct

SEQ ID NO: 2669 - RNA, 20 nt, synthetic construct
  source 1..20: mol_type = other RNA
agacagcgagcagagctttc

SEQ ID NO: 2670 - RNA, 20 nt, synthetic construct
  source 1..20: mol_type = other RNA
agaccaaatgtacatcatgt

SEQ ID NO: 2671 - RNA, 20 nt, synthetic construct
  source 1..20: mol_type = other RNA
agaccccagcagcagcagcc

SEQ ID NO: 2672 - RNA, 20 nt, synthetic construct
  source 1..20: mol_type = other RNA
agaccctctgtctaagctca

SEQ ID NO: 2673 - RNA, 20 nt, synthetic construct
  source 1..20: mol_type = other RNA
agacctcatcgttgtcctct

SEQ ID NO: 2674 - RNA, 20 nt, synthetic construct
  source 1..20: mol_type = other RNA
agacgagggagatcctggtg

SEQ ID NO: 2675 - RNA, 20 nt, synthetic construct
  source 1..20: mol_type = other RNA
agacggcccaatccagttag

SEQ ID NO: 2676 - RNA, 20 nt, synthetic construct
  source 1..20: mol_type = other RNA
agactatgtgcctcagaaat

SEQ ID NO: 2677 - RNA, 20 nt, synthetic construct
  source 1..20: mol_type = other RNA
agactccacagtaactacat

SEQ ID NO: 2678 - RNA, 20 nt, synthetic construct
  source 1..20: mol_type = other RNA
agactctgtctgagggtgat

SEQ ID NO: 2679 - RNA, 20 nt, synthetic construct
  source 1..20: mol_type = other RNA
agactgagcttagacagagg

SEQ ID NO: 2680 - RNA, 20 nt, synthetic construct
  source 1..20: mol_type = other RNA
agactggggagaataggaac

SEQ ID NO: 2681 - RNA, 20 nt, synthetic construct
  source 1..20: mol_type = other RNA
agacttgatgaaacgcaggt

SEQ ID NO: 2682 - RNA, 20 nt, synthetic construct
  source 1..20: mol_type = other RNA
agagaccccagcagcagcag

SEQ ID NO: 2683 - RNA, 20 nt, synthetic construct
  source 1..20: mol_type = other RNA
agagacttgatgaaacgcag

SEQ ID NO: 2684 - RNA, 20 nt, synthetic construct
  source 1..20: mol_type = other RNA
agagagctgttgaacatgcc

SEQ ID NO: 2685 - RNA, 20 nt, synthetic construct
  source 1..20: mol_type = other RNA
agagcatgaatgagccaaaa

SEQ ID NO: 2686 - RNA, 20 nt, synthetic construct
  source 1..20: mol_type = other RNA
agagccaagccatgttttgg

SEQ ID NO: 2687 - RNA, 20 nt, synthetic construct
  source 1..20: mol_type = other RNA
agagcccacttacctgcgtt

SEQ ID NO: 2688 - RNA, 20 nt, synthetic construct
  source 1..20: mol_type = other RNA
agagctggaagcatctttga

SEQ ID NO: 2689 - RNA, 20 nt, synthetic construct
  source 1..20: mol_type = other RNA
agagctgttgaacatgcccg

SEQ ID NO: 2690 - RNA, 20 nt, synthetic construct
  source 1..20: mol_type = other RNA
agagctttctggatcctgac

SEQ ID NO: 2691 - RNA, 20 nt, synthetic construct
  source 1..20: mol_type = other RNA
agaggaagagtgtgaaaagt

SEQ ID NO: 2692 - RNA, 20 nt, synthetic construct
  source 1..20: mol_type = other RNA
agaggacaacgatgaggtct

SEQ ID NO: 2693 - RNA, 20 nt, synthetic construct
  source 1..20: mol_type = other RNA
agaggctggggctgctggga

SEQ ID NO: 2694 - RNA, 20 nt, synthetic construct
  source 1..20: mol_type = other RNA
agagggtcttggcttggata

SEQ ID NO: 2695 - RNA, 20 nt, synthetic construct
  source 1..20: mol_type = other RNA
agaggtggctcccatgaagt

SEQ ID NO: 2696 - RNA, 20 nt, synthetic construct
  source 1..20: mol_type = other RNA
agagtctgtcaactcttatt

SEQ ID NO: 2697 - RNA, 20 nt, synthetic construct
  source 1..20: mol_type = other RNA
agagtgtgaaaagtatggcc

SEQ ID NO: 2698 - RNA, 20 nt, synthetic construct
  source 1..20: mol_type = other RNA
agagttgacagactctgtct

SEQ ID NO: 2699 - RNA, 20 nt, synthetic construct
  source 1..20: mol_type = other RNA
agagtttggataaggactaa

SEQ ID NO: 2700 - RNA, 20 nt, synthetic construct
  source 1..20: mol_type = other RNA
agagttttacatctaaatac

SEQ ID NO: 2701 - RNA, 20 nt, synthetic construct
  source 1..20: mol_type = other RNA
agatacctgtttctgttctc

SEQ ID NO: 2702 - RNA, 20 nt, synthetic construct
  source 1..20: mol_type = other RNA
agatatatatgatatcaccc

SEQ ID NO: 2703 - RNA, 20 nt, synthetic construct
  source 1..20: mol_type = other RNA
agatatctatggaagcacca

SEQ ID NO: 2704 - RNA, 20 nt, synthetic construct
  source 1..20: mol_type = other RNA
agatatctgaagtgtgtgaa

SEQ ID NO: 2705 - RNA, 20 nt, synthetic construct
  source 1..20: mol_type = other RNA
agatatggggagcagttgtc

SEQ ID NO: 2706 - RNA, 20 nt, synthetic construct
  source 1..20: mol_type = other RNA
agatccatcggctgagactg

SEQ ID NO: 2707 - RNA, 20 nt, synthetic construct
  source 1..20: mol_type = other RNA
agatcctggtggggtgattc

SEQ ID NO: 2708 - RNA, 20 nt, synthetic construct
  source 1..20: mol_type = other RNA
agatgaggtggaatagaagt

SEQ ID NO: 2709 - RNA, 20 nt, synthetic construct
  source 1..20: mol_type = other RNA
agatgcagggcatgaagaga

SEQ ID NO: 2710 - RNA, 20 nt, synthetic construct
  source 1..20: mol_type = other RNA
agatgcttccagctcttaac

SEQ ID NO: 2711 - RNA, 20 nt, synthetic construct
  source 1..20: mol_type = other RNA
agatggatggccacttcatg

SEQ ID NO: 2712 - RNA, 20 nt, synthetic construct
  source 1..20: mol_type = other RNA
agatggtttcagcagttgta

SEQ ID NO: 2713 - RNA, 20 nt, synthetic construct
  source 1..20: mol_type = other RNA
agatgtaaaactctggctat

SEQ ID NO: 2714 - RNA, 20 nt, synthetic construct
  source 1..20: mol_type = other RNA
agatgtagttactgtggagt

SEQ ID NO: 2715 - RNA, 20 nt, synthetic construct
  source 1..20: mol_type = other RNA
agattaccacccaatctgag

SEQ ID NO: 2716 - RNA, 20 nt, synthetic construct
  source 1..20: mol_type = other RNA
agattgggtggtaatctaga

SEQ ID NO: 2717 - RNA, 20 nt, synthetic construct
  source 1..20: mol_type = other RNA
agcaatccaaacatggacta

SEQ ID NO: 2718 - RNA, 20 nt, synthetic construct
  source 1..20: mol_type = other RNA
agcaccagccctatgaactt

SEQ ID NO: 2719 - RNA, 20 nt, synthetic construct
  source 1..20: mol_type = other RNA
agcagaataagagttgacag

SEQ ID NO: 2720 - RNA, 20 nt, synthetic construct
  source 1..20: mol_type = other RNA
agcagagaccccagcagcag

SEQ ID NO: 2721 - RNA, 20 nt, synthetic construct
  source 1..20: mol_type = other RNA
agcagagctttctggatcct

SEQ ID NO: 2722 - RNA, 20 nt, synthetic construct
  source 1..20: mol_type = other RNA
agcagcagagaccccagcag

SEQ ID NO: 2723 - RNA, 20 nt, synthetic construct
  source 1..20: mol_type = other RNA
agcagcagcagagaccccag

SEQ ID NO: 2724 - RNA, 20 nt, synthetic construct
  source 1..20: mol_type = other RNA
agcagcagcagccacatcac

SEQ ID NO: 2725 - RNA, 20 nt, synthetic construct
  source 1..20: mol_type = other RNA
agcagcagccacatcaccct

SEQ ID NO: 2726 - RNA, 20 nt, synthetic construct
  source 1..20: mol_type = other RNA
agcagccacatcaccctcag

SEQ ID NO: 2727 - RNA, 20 nt, synthetic construct
  source 1..20: mol_type = other RNA
agcagccaccacagccccag

SEQ ID NO: 2728 - RNA, 20 nt, synthetic construct
  source 1..20: mol_type = other RNA
agcagccattggcactagtc

SEQ ID NO: 2729 - RNA, 20 nt, synthetic construct
  source 1..20: mol_type = other RNA
agcagccccagcctctacag

SEQ ID NO: 2730 - RNA, 20 nt, synthetic construct
  source 1..20: mol_type = other RNA
agcaggctcccgtttcactt

SEQ ID NO: 2731 - RNA, 20 nt, synthetic construct
  source 1..20: mol_type = other RNA
agcagtcccagcagccccag

SEQ ID NO: 2732 - RNA, 20 nt, synthetic construct
  source 1..20: mol_type = other RNA
agcagttctatcatggttaa

SEQ ID NO: 2733 - RNA, 20 nt, synthetic construct
  source 1..20: mol_type = other RNA
agcagttgtaccattagacc

SEQ ID NO: 2734 - RNA, 20 nt, synthetic construct
  source 1..20: mol_type = other RNA
agcagttgtccactgatagg

SEQ ID NO: 2735 - RNA, 20 nt, synthetic construct
  source 1..20: mol_type = other RNA
agcataagagcatgaatgag

SEQ ID NO: 2736 - RNA, 20 nt, synthetic construct
  source 1..20: mol_type = other RNA
agcatcacttaatttgtgta

SEQ ID NO: 2737 - RNA, 20 nt, synthetic construct
  source 1..20: mol_type = other RNA
agcatctttgataacccatt

SEQ ID NO: 2738 - RNA, 20 nt, synthetic construct
  source 1..20: mol_type = other RNA
agcatgaatgagccaaaaca

SEQ ID NO: 2739 - RNA, 20 nt, synthetic construct
  source 1..20: mol_type = other RNA
agcatgtcattctccttgtt

SEQ ID NO: 2740 - RNA, 20 nt, synthetic construct
  source 1..20: mol_type = other RNA
agccaaaacatggcttggct

SEQ ID NO: 2741 - RNA, 20 nt, synthetic construct
  source 1..20: mol_type = other RNA
agccaaaatggctgaaaaag

SEQ ID NO: 2742 - RNA, 20 nt, synthetic construct
  source 1..20: mol_type = other RNA
agccaagaccctctgtctaa

SEQ ID NO: 2743 - RNA, 20 nt, synthetic construct
  source 1..20: mol_type = other RNA
agccaagccatgttttggct

SEQ ID NO: 2744 - RNA, 20 nt, synthetic construct
  source 1..20: mol_type = other RNA
agccaaggtttggaaatagc

SEQ ID NO: 2745 - RNA, 20 nt, synthetic construct
  source 1..20: mol_type = other RNA
agccacaccctggactagtg

SEQ ID NO: 2746 - RNA, 20 nt, synthetic construct
  source 1..20: mol_type = other RNA
agccacatcaccctcagaca

SEQ ID NO: 2747 - RNA, 20 nt, synthetic construct
  source 1..20: mol_type = other RNA
agccacatgaaacttcagag

SEQ ID NO: 2748 - RNA, 20 nt, synthetic construct
  source 1..20: mol_type = other RNA
agccaccacagccccagcag

SEQ ID NO: 2749 - RNA, 20 nt, synthetic construct
  source 1..20: mol_type = other RNA
agccacctctagattaccac

SEQ ID NO: 2750 - RNA, 20 nt, synthetic construct
  source 1..20: mol_type = other RNA
agccacggccactcccccaa

SEQ ID NO: 2751 - RNA, 20 nt, synthetic construct
  source 1..20: mol_type = other RNA
agccagagttttacatctaa

SEQ ID NO: 2752 - RNA, 20 nt, synthetic construct
  source 1..20: mol_type = other RNA
agccatgttttggctcattc

SEQ ID NO: 2753 - RNA, 20 nt, synthetic construct
  source 1..20: mol_type = other RNA
agccattggcactagtccag

SEQ ID NO: 2754 - RNA, 20 nt, synthetic construct
  source 1..20: mol_type = other RNA
agccattttggcttcccaaa

SEQ ID NO: 2755 - RNA, 20 nt, synthetic construct
  source 1..20: mol_type = other RNA
agcccacttacctgcgtttc

SEQ ID NO: 2756 - RNA, 20 nt, synthetic construct
  source 1..20: mol_type = other RNA
agcccagggtaagggttcat

SEQ ID NO: 2757 - RNA, 20 nt, synthetic construct
  source 1..20: mol_type = other RNA
agccccagcagcagcagaga

SEQ ID NO: 2758 - RNA, 20 nt, synthetic construct
  source 1..20: mol_type = other RNA
agccccagcctctacagaag

SEQ ID NO: 2759 - RNA, 20 nt, synthetic construct
  source 1..20: mol_type = other RNA
agcccgtgagaaagaggaag

SEQ ID NO: 2760 - RNA, 20 nt, synthetic construct
  source 1..20: mol_type = other RNA
agccctatgaacttctattc

SEQ ID NO: 2761 - RNA, 20 nt, synthetic construct
  source 1..20: mol_type = other RNA
agccgatggatctgtatagg

SEQ ID NO: 2762 - RNA, 20 nt, synthetic construct
  source 1..20: mol_type = other RNA
agcctccttggacacaagca

SEQ ID NO: 2763 - RNA, 20 nt, synthetic construct
  source 1..20: mol_type = other RNA
agcctctacagaagcagcca

SEQ ID NO: 2764 - RNA, 20 nt, synthetic construct
  source 1..20: mol_type = other RNA
agcctgctgagccacatgaa

SEQ ID NO: 2765 - RNA, 20 nt, synthetic construct
  source 1..20: mol_type = other RNA
agcgagcagagctttctgga

SEQ ID NO: 2766 - RNA, 20 nt, synthetic construct
  source 1..20: mol_type = other RNA
agcgtgagctgcatgccaca

SEQ ID NO: 2767 - RNA, 20 nt, synthetic construct
  source 1..20: mol_type = other RNA
agctaatgggttatcaaaga

SEQ ID NO: 2768 - RNA, 20 nt, synthetic construct
  source 1..20: mol_type = other RNA
agctcacgctttgcacactc

SEQ ID NO: 2769 - RNA, 20 nt, synthetic construct
  source 1..20: mol_type = other RNA
agctcagtctaccacccatc

SEQ ID NO: 2770 - RNA, 20 nt, synthetic construct
  source 1..20: mol_type = other RNA
agctccgggcatgttcaaca

SEQ ID NO: 2771 - RNA, 20 nt, synthetic construct
  source 1..20: mol_type = other RNA
agctctcttcatgccctgca

SEQ ID NO: 2772 - RNA, 20 nt, synthetic construct
  source 1..20: mol_type = other RNA
agctctgctcgctgtctgac

SEQ ID NO: 2773 - RNA, 20 nt, synthetic construct
  source 1..20: mol_type = other RNA
agctcttaaccatgatagaa

SEQ ID NO: 2774 - RNA, 20 nt, synthetic construct
  source 1..20: mol_type = other RNA
agctgcactgtagttatgga

SEQ ID NO: 2775 - RNA, 20 nt, synthetic construct
  source 1..20: mol_type = other RNA
agctgcaggttcatatttga

SEQ ID NO: 2776 - RNA, 20 nt, synthetic construct
  source 1..20: mol_type = other RNA
agctgcatgccacaacccct

SEQ ID NO: 2777 - RNA, 20 nt, synthetic construct
  source 1..20: mol_type = other RNA
agctggaagcatctttgata

SEQ ID NO: 2778 - RNA, 20 nt, synthetic construct
  source 1..20: mol_type = other RNA
agctgtgtgggaaagcatgt

SEQ ID NO: 2779 - RNA, 20 nt, synthetic construct
  source 1..20: mol_type = other RNA
agctgttgaacatgcccgga

SEQ ID NO: 2780 - RNA, 20 nt, synthetic construct
  source 1..20: mol_type = other RNA
agcttagacagagggtcttg

SEQ ID NO: 2781 - RNA, 20 nt, synthetic construct
  source 1..20: mol_type = other RNA
agcttgagatgaggtggaat

SEQ ID NO: 2782 - RNA, 20 nt, synthetic construct
  source 1..20: mol_type = other RNA
agctttctggatcctgacat

SEQ ID NO: 2783 - RNA, 20 nt, synthetic construct
  source 1..20: mol_type = other RNA
aggaaaagcagccattggca

SEQ ID NO: 2784 - RNA, 20 nt, synthetic construct
  source 1..20: mol_type = other RNA
aggaacccagatatggggag

SEQ ID NO: 2785 - RNA, 20 nt, synthetic construct
  source 1..20: mol_type = other RNA
aggaagagtgtgaaaagtat

SEQ ID NO: 2786 - RNA, 20 nt, synthetic construct
  source 1..20: mol_type = other RNA
aggaatcaccccaccaggat

SEQ ID NO: 2787 - RNA, 20 nt, synthetic construct
  source 1..20: mol_type = other RNA
aggacaacgatgaggtctgg

SEQ ID NO: 2788 - RNA, 20 nt, synthetic construct
  source 1..20: mol_type = other RNA
aggaccagtcatgcagcagt

SEQ ID NO: 2789 - RNA, 20 nt, synthetic construct
  source 1..20: mol_type = other RNA
aggaccatgtccgtgaccac

SEQ ID NO: 2790 - RNA, 20 nt, synthetic construct
  source 1..20: mol_type = other RNA
aggactaactggattgggcc

SEQ ID NO: 2791 - RNA, 20 nt, synthetic construct
  source 1..20: mol_type = other RNA
aggagaatgacatgctttcc

SEQ ID NO: 2792 - RNA, 20 nt, synthetic construct
  source 1..20: mol_type = other RNA
aggaggcaatttccctacat

SEQ ID NO: 2793 - RNA, 20 nt, synthetic construct
  source 1..20: mol_type = other RNA
aggaggcttacacaaattaa

SEQ ID NO: 2794 - RNA, 20 nt, synthetic construct
  source 1..20: mol_type = other RNA
aggatccagaaagctctgct

SEQ ID NO: 2795 - RNA, 20 nt, synthetic construct
  source 1..20: mol_type = other RNA
aggatctccctcgtctttta

SEQ ID NO: 2796 - RNA, 20 nt, synthetic construct
  source 1..20: mol_type = other RNA
aggcaatttccctacatgat

SEQ ID NO: 2797 - RNA, 20 nt, synthetic construct
  source 1..20: mol_type = other RNA
aggcacatagtctgggccat

SEQ ID NO: 2798 - RNA, 20 nt, synthetic construct
  source 1..20: mol_type = other RNA
aggcatatggagatgtagtt

SEQ ID NO: 2799 - RNA, 20 nt, synthetic construct
  source 1..20: mol_type = other RNA
aggccctgtgacccgagtga

SEQ ID NO: 2800 - RNA, 20 nt, synthetic construct
  source 1..20: mol_type = other RNA
aggctcccgtttcacttttt

SEQ ID NO: 2801 - RNA, 20 nt, synthetic construct
  source 1..20: mol_type = other RNA
aggctggggctgctgggact

SEQ ID NO: 2802 - RNA, 20 nt, synthetic construct
  source 1..20: mol_type = other RNA
aggcttacacaaattaagtg

SEQ ID NO: 2803 - RNA, 20 nt, synthetic construct
  source 1..20: mol_type = other RNA
agggaaattgcctccttatc

SEQ ID NO: 2804 - RNA, 20 nt, synthetic construct
  source 1..20: mol_type = other RNA
agggagatcctggtggggtg

SEQ ID NO: 2805 - RNA, 20 nt, synthetic construct
  source 1..20: mol_type = other RNA
agggagatggtttcagcagt

SEQ ID NO: 2806 - RNA, 20 nt, synthetic construct
  source 1..20: mol_type = other RNA
agggcatgaagagagctgtt

SEQ ID NO: 2807 - RNA, 20 nt, synthetic construct
  source 1..20: mol_type = other RNA
agggccttacaacagatata

SEQ ID NO: 2808 - RNA, 20 nt, synthetic construct
  source 1..20: mol_type = other RNA
agggctggtgcttccataga

SEQ ID NO: 2809 - RNA, 20 nt, synthetic construct
  source 1..20: mol_type = other RNA
agggggtgatatcatatata

SEQ ID NO: 2810 - RNA, 20 nt, synthetic construct
  source 1..20: mol_type = other RNA
aggggttgtggcatgcagct

SEQ ID NO: 2811 - RNA, 20 nt, synthetic construct
  source 1..20: mol_type = other RNA
agggtaagagagaacagaaa

SEQ ID NO: 2812 - RNA, 20 nt, synthetic construct
  source 1..20: mol_type = other RNA
agggtaagggttcatgggat

SEQ ID NO: 2813 - RNA, 20 nt, synthetic construct
  source 1..20: mol_type = other RNA
agggtcttggcttggatacc

SEQ ID NO: 2814 - RNA, 20 nt, synthetic construct
  source 1..20: mol_type = other RNA
agggtgatgtggctgctgct

SEQ ID NO: 2815 - RNA, 20 nt, synthetic construct
  source 1..20: mol_type = other RNA
agggtgtggcttctggtgca

SEQ ID NO: 2816 - RNA, 20 nt, synthetic construct
  source 1..20: mol_type = other RNA
agggttcatgggattagaag

SEQ ID NO: 2817 - RNA, 20 nt, synthetic construct
  source 1..20: mol_type = other RNA
aggtaaccaacaaaaggggg

SEQ ID NO: 2818 - RNA, 20 nt, synthetic construct
  source 1..20: mol_type = other RNA
aggtaagtgggctctgaagt

SEQ ID NO: 2819 - RNA, 20 nt, synthetic construct
  source 1..20: mol_type = other RNA
aggtatccaagccaagaccc

SEQ ID NO: 2820 - RNA, 20 nt, synthetic construct
  source 1..20: mol_type = other RNA
aggtctggtcagacagcgag

SEQ ID NO: 2821 - RNA, 20 nt, synthetic construct
  source 1..20: mol_type = other RNA
aggtgaatgatgttcaccat

SEQ ID NO: 2822 - RNA, 20 nt, synthetic construct
  source 1..20: mol_type = other RNA
aggtggaatagaagttcata

SEQ ID NO: 2823 - RNA, 20 nt, synthetic construct
  source 1..20: mol_type = other RNA
aggtggctcccatgaagtgg

SEQ ID NO: 2824 - RNA, 20 nt, synthetic construct
  source 1..20: mol_type = other RNA
aggttatggaaaccaaaata

SEQ ID NO: 2825 - RNA, 20 nt, synthetic construct
  source 1..20: mol_type = other RNA
aggttcatatttgaattctt

SEQ ID NO: 2826 - RNA, 20 nt, synthetic construct
  source 1..20: mol_type = other RNA
aggtttccattgcattgata

SEQ ID NO: 2827 - RNA, 20 nt, synthetic construct
  source 1..20: mol_type = other RNA
aggtttggaaatagccagag

SEQ ID NO: 2828 - RNA, 20 nt, synthetic construct
  source 1..20: mol_type = other RNA
agtaactacatctccatatg

SEQ ID NO: 2829 - RNA, 20 nt, synthetic construct
  source 1..20: mol_type = other RNA
agtatggcccagactatgtg

SEQ ID NO: 2830 - RNA, 20 nt, synthetic construct
  source 1..20: mol_type = other RNA
agtatttagatgtaaaactc

SEQ ID NO: 2831 - RNA, 20 nt, synthetic construct
  source 1..20: mol_type = other RNA
agtcatgcagcagtcccagc

SEQ ID NO: 2832 - RNA, 20 nt, synthetic construct
  source 1..20: mol_type = other RNA
agtccagggtgtggcttctg

SEQ ID NO: 2833 - RNA, 20 nt, synthetic construct
  source 1..20: mol_type = other RNA
agtccatgtttggattgctc

SEQ ID NO: 2834 - RNA, 20 nt, synthetic construct
  source 1..20: mol_type = other RNA
agtcccagcagccccagcct

SEQ ID NO: 2835 - RNA, 20 nt, synthetic construct
  source 1..20: mol_type = other RNA
agtccttatccaaactcttc

SEQ ID NO: 2836 - RNA, 20 nt, synthetic construct
  source 1..20: mol_type = other RNA
agtcgcaaaagttctgtgga

SEQ ID NO: 2837 - RNA, 20 nt, synthetic construct
  source 1..20: mol_type = other RNA
agtctaccacccatccatac

SEQ ID NO: 2838 - RNA, 20 nt, synthetic construct
  source 1..20: mol_type = other RNA
agtctcagccgatggatctg

SEQ ID NO: 2839 - RNA, 20 nt, synthetic construct
  source 1..20: mol_type = other RNA
agtctcttgccgaaaggacc

SEQ ID NO: 2840 - RNA, 20 nt, synthetic construct
  source 1..20: mol_type = other RNA
agtctgggccatacttttca

SEQ ID NO: 2841 - RNA, 20 nt, synthetic construct
  source 1..20: mol_type = other RNA
agtctgtcaactcttattct

SEQ ID NO: 2842 - RNA, 20 nt, synthetic construct
  source 1..20: mol_type = other RNA
agtctgtggtcacggacatg

SEQ ID NO: 2843 - RNA, 20 nt, synthetic construct
  source 1..20: mol_type = other RNA
agtgaaacgggagcctgctg

SEQ ID NO: 2844 - RNA, 20 nt, synthetic construct
  source 1..20: mol_type = other RNA
agtgaaggcatatggagatg

SEQ ID NO: 2845 - RNA, 20 nt, synthetic construct
  source 1..20: mol_type = other RNA
agtgaggtaaccaacaaaag

SEQ ID NO: 2846 - RNA, 20 nt, synthetic construct
  source 1..20: mol_type = other RNA
agtgatgctaatggtcagga

SEQ ID NO: 2847 - RNA, 20 nt, synthetic construct
  source 1..20: mol_type = other RNA
agtgcagctccgggcatgtt

SEQ ID NO: 2848 - RNA, 20 nt, synthetic construct
  source 1..20: mol_type = other RNA
agtgccaatggctgcttttc

SEQ ID NO: 2849 - RNA, 20 nt, synthetic construct
  source 1..20: mol_type = other RNA
agtggacaactgctccccat

SEQ ID NO: 2850 - RNA, 20 nt, synthetic construct
  source 1..20: mol_type = other RNA
agtggccatccatctcatga

SEQ ID NO: 2851 - RNA, 20 nt, synthetic construct
  source 1..20: mol_type = other RNA
agtggccgtggctccaactc

SEQ ID NO: 2852 - RNA, 20 nt, synthetic construct
  source 1..20: mol_type = other RNA
agtgggataaggaggcaatt

SEQ ID NO: 2853 - RNA, 20 nt, synthetic construct
  source 1..20: mol_type = other RNA
agtgggctctgaagtttcat

SEQ ID NO: 2854 - RNA, 20 nt, synthetic construct
  source 1..20: mol_type = other RNA
agtgtatggatgggtggtag

SEQ ID NO: 2855 - RNA, 20 nt, synthetic construct
  source 1..20: mol_type = other RNA
agtgtgaaaagtatggccca

SEQ ID NO: 2856 - RNA, 20 nt, synthetic construct
  source 1..20: mol_type = other RNA
agtgtgcaaagcgtgagctg

SEQ ID NO: 2857 - RNA, 20 nt, synthetic construct
  source 1..20: mol_type = other RNA
agtgtgtgaagagtttggat

SEQ ID NO: 2858 - RNA, 20 nt, synthetic construct
  source 1..20: mol_type = other RNA
agttactgtggagtctgtgg

SEQ ID NO: 2859 - RNA, 20 nt, synthetic construct
  source 1..20: mol_type = other RNA
agttagtccttatccaaact

SEQ ID NO: 2860 - RNA, 20 nt, synthetic construct
  source 1..20: mol_type = other RNA
agttatggattatgtgagaa

SEQ ID NO: 2861 - RNA, 20 nt, synthetic construct
  source 1..20: mol_type = other RNA
agttcatagggctggtgctt

SEQ ID NO: 2862 - RNA, 20 nt, synthetic construct
  source 1..20: mol_type = other RNA
agttctatcatggttaagag

SEQ ID NO: 2863 - RNA, 20 nt, synthetic construct
  source 1..20: mol_type = other RNA
agttctgtggacagggtaag

SEQ ID NO: 2864 - RNA, 20 nt, synthetic construct
  source 1..20: mol_type = other RNA
agttgacagactctgtctga

SEQ ID NO: 2865 - RNA, 20 nt, synthetic construct
  source 1..20: mol_type = other RNA
agttggagccacggccactc

SEQ ID NO: 2866 - RNA, 20 nt, synthetic construct
  source 1..20: mol_type = other RNA
agttgtaccattagaccaaa

SEQ ID NO: 2867 - RNA, 20 nt, synthetic construct
  source 1..20: mol_type = other RNA
agttgtccactgataggttt

SEQ ID NO: 2868 - RNA, 20 nt, synthetic construct
  source 1..20: mol_type = other RNA
agtttcatgtggctcagcag

SEQ ID NO: 2869 - RNA, 20 nt, synthetic construct
  source 1..20: mol_type = other RNA
agtttggataaggactaact

SEQ ID NO: 2870 - RNA, 20 nt, synthetic construct
  source 1..20: mol_type = other RNA
ataaaaatggtgaacatcat

SEQ ID NO: 2871 - RNA, 20 nt, synthetic construct
  source 1..20: mol_type = other RNA
ataacccattagctgtgtgg

SEQ ID NO: 2872 - RNA, 20 nt, synthetic construct
  source 1..20: mol_type = other RNA
ataacctaagtatttagatg

SEQ ID NO: 2873 - RNA, 20 nt, synthetic construct
  source 1..20: mol_type = other RNA
ataactacagtgcagctccg

SEQ ID NO: 2874 - RNA, 20 nt, synthetic construct
  source 1..20: mol_type = other RNA
ataagagcatgaatgagcca

SEQ ID NO: 2875 - RNA, 20 nt, synthetic construct
  source 1..20: mol_type = other RNA
ataagagttgacagactctg

SEQ ID NO: 2876 - RNA, 20 nt, synthetic construct
  source 1..20: mol_type = other RNA
ataaggactaactggattgg

SEQ ID NO: 2877 - RNA, 20 nt, synthetic construct
  source 1..20: mol_type = other RNA
ataaggaggcaatttcccta

SEQ ID NO: 2878 - RNA, 20 nt, synthetic construct
  source 1..20: mol_type = other RNA
ataatccataactacagtgc

SEQ ID NO: 2879 - RNA, 20 nt, synthetic construct
  source 1..20: mol_type = other RNA
atacactttaccagccaagg

SEQ ID NO: 2880 - RNA, 20 nt, synthetic construct
  source 1..20: mol_type = other RNA
atacagatccatcggctgag

SEQ ID NO: 2881 - RNA, 20 nt, synthetic construct
  source 1..20: mol_type = other RNA
atacatgagacggcccaatc

SEQ ID NO: 2882 - RNA, 20 nt, synthetic construct
  source 1..20: mol_type = other RNA
atacccaatatccatcatat

SEQ ID NO: 2883 - RNA, 20 nt, synthetic construct
  source 1..20: mol_type = other RNA
atacctatacagatccatcg

SEQ ID NO: 2884 - RNA, 20 nt, synthetic construct
  source 1..20: mol_type = other RNA
atacctgtttctgttctctc

SEQ ID NO: 2885 - RNA, 20 nt, synthetic construct
  source 1..20: mol_type = other RNA
atacttaggttatggaaacc

SEQ ID NO: 2886 - RNA, 20 nt, synthetic construct
  source 1..20: mol_type = other RNA
atacttttcacactcttcct

SEQ ID NO: 2887 - RNA, 20 nt, synthetic construct
  source 1..20: mol_type = other RNA
atagaactgcttgtgtccaa

SEQ ID NO: 2888 - RNA, 20 nt, synthetic construct
  source 1..20: mol_type = other RNA
atagaagttcatagggctgg

SEQ ID NO: 2889 - RNA, 20 nt, synthetic construct
  source 1..20: mol_type = other RNA
atagatatctgaagtgtgtg

SEQ ID NO: 2890 - RNA, 20 nt, synthetic construct
  source 1..20: mol_type = other RNA
atagccagagttttacatct

SEQ ID NO: 2891 - RNA, 20 nt, synthetic construct
  source 1..20: mol_type = other RNA
ataggaacccagatatgggg

SEQ ID NO: 2892 - RNA, 20 nt, synthetic construct
  source 1..20: mol_type = other RNA
ataggaatcaccccaccagg

SEQ ID NO: 2893 - RNA, 20 nt, synthetic construct
  source 1..20: mol_type = other RNA
atagggctggtgcttccata

SEQ ID NO: 2894 - RNA, 20 nt, synthetic construct
  source 1..20: mol_type = other RNA
ataggtatccaagccaagac

SEQ ID NO: 2895 - RNA, 20 nt, synthetic construct
  source 1..20: mol_type = other RNA
ataggtttccattgcattga

SEQ ID NO: 2896 - RNA, 20 nt, synthetic construct
  source 1..20: mol_type = other RNA
atagtccatgtttggattgc

SEQ ID NO: 2897 - RNA, 20 nt, synthetic construct
  source 1..20: mol_type = other RNA
atagtctgggccatactttt

SEQ ID NO: 2898 - RNA, 20 nt, synthetic construct
  source 1..20: mol_type = other RNA
atatatatctgttgtaaggc

SEQ ID NO: 2899 - RNA, 20 nt, synthetic construct
  source 1..20: mol_type = other RNA
atatatatgatatcaccccc

SEQ ID NO: 2900 - RNA, 20 nt, synthetic construct
  source 1..20: mol_type = other RNA
atatatctgttgtaaggccc

SEQ ID NO: 2901 - RNA, 20 nt, synthetic construct
  source 1..20: mol_type = other RNA
atatatgatatcaccccctt

SEQ ID NO: 2902 - RNA, 20 nt, synthetic construct
  source 1..20: mol_type = other RNA
atatcaatgcaatggaaacc

SEQ ID NO: 2903 - RNA, 20 nt, synthetic construct
  source 1..20: mol_type = other RNA
atatcacccccttttgttgg

SEQ ID NO: 2904 - RNA, 20 nt, synthetic construct
  source 1..20: mol_type = other RNA
atatccatcatatcaatgca

SEQ ID NO: 2905 - RNA, 20 nt, synthetic construct
  source 1..20: mol_type = other RNA
atatctatggaagcaccagc

SEQ ID NO: 2906 - RNA, 20 nt, synthetic construct
  source 1..20: mol_type = other RNA
atatctgaagtgtgtgaaga

SEQ ID NO: 2907 - RNA, 20 nt, synthetic construct
  source 1..20: mol_type = other RNA
atatctgggttcctattctc

SEQ ID NO: 2908 - RNA, 20 nt, synthetic construct
  source 1..20: mol_type = other RNA
atatctgttgtaaggccctg

SEQ ID NO: 2909 - RNA, 20 nt, synthetic construct
  source 1..20: mol_type = other RNA
atatgaacctgcagcttgag

SEQ ID NO: 2910 - RNA, 20 nt, synthetic construct
  source 1..20: mol_type = other RNA
atatgatatcaccccctttt

SEQ ID NO: 2911 - RNA, 20 nt, synthetic construct
  source 1..20: mol_type = other RNA
atatgatggatattgggtat

SEQ ID NO: 2912 - RNA, 20 nt, synthetic construct
  source 1..20: mol_type = other RNA
atatgcagggagatggtttc

SEQ ID NO: 2913 - RNA, 20 nt, synthetic construct
  source 1..20: mol_type = other RNA
atatgccttcactcgggtca

SEQ ID NO: 2914 - RNA, 20 nt, synthetic construct
  source 1..20: mol_type = other RNA
atatggagatgtagttactg

SEQ ID NO: 2915 - RNA, 20 nt, synthetic construct
  source 1..20: mol_type = other RNA
atatggggagcagttgtcca

SEQ ID NO: 2916 - RNA, 20 nt, synthetic construct
  source 1..20: mol_type = other RNA
atattgggtattctgattca

SEQ ID NO: 2917 - RNA, 20 nt, synthetic construct
  source 1..20: mol_type = other RNA
atattttggtttccataacc

SEQ ID NO: 2918 - RNA, 20 nt, synthetic construct
  source 1..20: mol_type = other RNA
atcaaagatgcttccagctc

SEQ ID NO: 2919 - RNA, 20 nt, synthetic construct
  source 1..20: mol_type = other RNA
atcaagtctcttgccgaaag

SEQ ID NO: 2920 - RNA, 20 nt, synthetic construct
  source 1..20: mol_type = other RNA
atcaatgcaatggaaaccta

SEQ ID NO: 2921 - RNA, 20 nt, synthetic construct
  source 1..20: mol_type = other RNA
atcaccccaccaggatctcc

SEQ ID NO: 2922 - RNA, 20 nt, synthetic construct
  source 1..20: mol_type = other RNA
atcacccccttttgttggtt

SEQ ID NO: 2923 - RNA, 20 nt, synthetic construct
  source 1..20: mol_type = other RNA
atcaccctcagacagagtct

SEQ ID NO: 2924 - RNA, 20 nt, synthetic construct
  source 1..20: mol_type = other RNA
atcacttaatttgtgtaagc

SEQ ID NO: 2925 - RNA, 20 nt, synthetic construct
  source 1..20: mol_type = other RNA
atcagaatacccaatatcca

SEQ ID NO: 2926 - RNA, 20 nt, synthetic construct
  source 1..20: mol_type = other RNA
atcagtggacaactgctccc

SEQ ID NO: 2927 - RNA, 20 nt, synthetic construct
  source 1..20: mol_type = other RNA
atcatatcaatgcaatggaa

SEQ ID NO: 2928 - RNA, 20 nt, synthetic construct
  source 1..20: mol_type = other RNA
atcatggttaagagctggaa

SEQ ID NO: 2929 - RNA, 20 nt, synthetic construct
  source 1..20: mol_type = other RNA
atcatgtagggaaattgcct

SEQ ID NO: 2930 - RNA, 20 nt, synthetic construct
  source 1..20: mol_type = other RNA
atcattcaccttctcacata

SEQ ID NO: 2931 - RNA, 20 nt, synthetic construct
  source 1..20: mol_type = other RNA
atccaaacatggactataaa

SEQ ID NO: 2932 - RNA, 20 nt, synthetic construct
  source 1..20: mol_type = other RNA
atccaaactcttcacacact

SEQ ID NO: 2933 - RNA, 20 nt, synthetic construct
  source 1..20: mol_type = other RNA
atccaagccaagaccctctg

SEQ ID NO: 2934 - RNA, 20 nt, synthetic construct
  source 1..20: mol_type = other RNA
atccaccaatccatacatga

SEQ ID NO: 2935 - RNA, 20 nt, synthetic construct
  source 1..20: mol_type = other RNA
atccagaaagctctgctcgc

SEQ ID NO: 2936 - RNA, 20 nt, synthetic construct
  source 1..20: mol_type = other RNA
atccagaagcagaataagag

SEQ ID NO: 2937 - RNA, 20 nt, synthetic construct
  source 1..20: mol_type = other RNA
atccagttagtccttatcca

SEQ ID NO: 2938 - RNA, 20 nt, synthetic construct
  source 1..20: mol_type = other RNA
atccataactacagtgcagc

SEQ ID NO: 2939 - RNA, 20 nt, synthetic construct
  source 1..20: mol_type = other RNA
atccatacactttaccagcc

SEQ ID NO: 2940 - RNA, 20 nt, synthetic construct
  source 1..20: mol_type = other RNA
atccatacatgagacggccc

SEQ ID NO: 2941 - RNA, 20 nt, synthetic construct
  source 1..20: mol_type = other RNA
atccatcatatcaatgcaat

SEQ ID NO: 2942 - RNA, 20 nt, synthetic construct
  source 1..20: mol_type = other RNA
atccatcggctgagactggg

SEQ ID NO: 2943 - RNA, 20 nt, synthetic construct
  source 1..20: mol_type = other RNA
atccatctcatgagtgggat

SEQ ID NO: 2944 - RNA, 20 nt, synthetic construct
  source 1..20: mol_type = other RNA
atcccaataggaatcacccc

SEQ ID NO: 2945 - RNA, 20 nt, synthetic construct
  source 1..20: mol_type = other RNA
atcccactcatgagatggat

SEQ ID NO: 2946 - RNA, 20 nt, synthetic construct
  source 1..20: mol_type = other RNA
atcccatgaacccttaccct

SEQ ID NO: 2947 - RNA, 20 nt, synthetic construct
  source 1..20: mol_type = other RNA
atcccatggcaaaaaagtga

SEQ ID NO: 2948 - RNA, 20 nt, synthetic construct
  source 1..20: mol_type = other RNA
atcctgacattgggggagtg

SEQ ID NO: 2949 - RNA, 20 nt, synthetic construct
  source 1..20: mol_type = other RNA
atcctggtggggtgattcct

SEQ ID NO: 2950 - RNA, 20 nt, synthetic construct
  source 1..20: mol_type = other RNA
atcggctgagactggggaga

SEQ ID NO: 2951 - RNA, 20 nt, synthetic construct
  source 1..20: mol_type = other RNA
atcgttgtcctctgcaccag

SEQ ID NO: 2952 - RNA, 20 nt, synthetic construct
  source 1..20: mol_type = other RNA
atctaaatacttaggttatg

SEQ ID NO: 2953 - RNA, 20 nt, synthetic construct
  source 1..20: mol_type = other RNA
atctagaggtggctcccatg

SEQ ID NO: 2954 - RNA, 20 nt, synthetic construct
  source 1..20: mol_type = other RNA
atctatggaagcaccagccc

SEQ ID NO: 2955 - RNA, 20 nt, synthetic construct
  source 1..20: mol_type = other RNA
atctcaagctgcaggttcat

SEQ ID NO: 2956 - RNA, 20 nt, synthetic construct
  source 1..20: mol_type = other RNA
atctcatgagtgggataagg

SEQ ID NO: 2957 - RNA, 20 nt, synthetic construct
  source 1..20: mol_type = other RNA
atctccaaaacaaggagaat

SEQ ID NO: 2958 - RNA, 20 nt, synthetic construct
  source 1..20: mol_type = other RNA
atctccatatgccttcactc

SEQ ID NO: 2959 - RNA, 20 nt, synthetic construct
  source 1..20: mol_type = other RNA
atctccctcgtcttttacca

SEQ ID NO: 2960 - RNA, 20 nt, synthetic construct
  source 1..20: mol_type = other RNA
atctccctgcatattttggt

SEQ ID NO: 2961 - RNA, 20 nt, synthetic construct
  source 1..20: mol_type = other RNA
atctgaagtgtgtgaagagt

SEQ ID NO: 2962 - RNA, 20 nt, synthetic construct
  source 1..20: mol_type = other RNA
atctgagcaatccaaacatg

SEQ ID NO: 2963 - RNA, 20 nt, synthetic construct
  source 1..20: mol_type = other RNA
atctgggttcctattctccc

SEQ ID NO: 2964 - RNA, 20 nt, synthetic construct
  source 1..20: mol_type = other RNA
atctgtataggtatccaagc

SEQ ID NO: 2965 - RNA, 20 nt, synthetic construct
  source 1..20: mol_type = other RNA
atctgttgtaaggccctgtg

SEQ ID NO: 2966 - RNA, 20 nt, synthetic construct
  source 1..20: mol_type = other RNA
atctttgataacccattagc

SEQ ID NO: 2967 - RNA, 20 nt, synthetic construct
  source 1..20: mol_type = other RNA
atgaaacgcaggtaagtggg

SEQ ID NO: 2968 - RNA, 20 nt, synthetic construct
  source 1..20: mol_type = other RNA
atgaaacttcagagcccact

SEQ ID NO: 2969 - RNA, 20 nt, synthetic construct
  source 1..20: mol_type = other RNA
atgaacccttaccctgggct

SEQ ID NO: 2970 - RNA, 20 nt, synthetic construct
  source 1..20: mol_type = other RNA
atgaacctgcagcttgagat

SEQ ID NO: 2971 - RNA, 20 nt, synthetic construct
  source 1..20: mol_type = other RNA
atgaacttctattccacctc

SEQ ID NO: 2972 - RNA, 20 nt, synthetic construct
  source 1..20: mol_type = other RNA
atgaagagagctgttgaaca

SEQ ID NO: 2973 - RNA, 20 nt, synthetic construct
  source 1..20: mol_type = other RNA
atgaagtggccatccatctc

SEQ ID NO: 2974 - RNA, 20 nt, synthetic construct
  source 1..20: mol_type = other RNA
atgaatgagccaaaacatgg

SEQ ID NO: 2975 - RNA, 20 nt, synthetic construct
  source 1..20: mol_type = other RNA
atgacatgctttcccacaca

SEQ ID NO: 2976 - RNA, 20 nt, synthetic construct
  source 1..20: mol_type = other RNA
atgactggtcctgaaagtcg

SEQ ID NO: 2977 - RNA, 20 nt, synthetic construct
  source 1..20: mol_type = other RNA
atgagaattgacccatgagt

SEQ ID NO: 2978 - RNA, 20 nt, synthetic construct
  source 1..20: mol_type = other RNA
atgagacggcccaatccagt

SEQ ID NO: 2979 - RNA, 20 nt, synthetic construct
  source 1..20: mol_type = other RNA
atgagatggatggccacttc

SEQ ID NO: 2980 - RNA, 20 nt, synthetic construct
  source 1..20: mol_type = other RNA
atgagccaaaacatggcttg

SEQ ID NO: 2981 - RNA, 20 nt, synthetic construct
  source 1..20: mol_type = other RNA
atgaggtctggtcagacagc

SEQ ID NO: 2982 - RNA, 20 nt, synthetic construct
  source 1..20: mol_type = other RNA
atgaggtggaatagaagttc

SEQ ID NO: 2983 - RNA, 20 nt, synthetic construct
  source 1..20: mol_type = other RNA
atgagtgggataaggaggca

SEQ ID NO: 2984 - RNA, 20 nt, synthetic construct
  source 1..20: mol_type = other RNA
atgagttggagccacggcca

SEQ ID NO: 2985 - RNA, 20 nt, synthetic construct
  source 1..20: mol_type = other RNA
atgatagaactgcttgtgtc

SEQ ID NO: 2986 - RNA, 20 nt, synthetic construct
  source 1..20: mol_type = other RNA
atgatatcacccccttttgt

SEQ ID NO: 2987 - RNA, 20 nt, synthetic construct
  source 1..20: mol_type = other RNA
atgatggatattgggtattc

SEQ ID NO: 2988 - RNA, 20 nt, synthetic construct
  source 1..20: mol_type = other RNA
atgatgtacatttggtctaa

SEQ ID NO: 2989 - RNA, 20 nt, synthetic construct
  source 1..20: mol_type = other RNA
atgatgttcaccatttttat

SEQ ID NO: 2990 - RNA, 20 nt, synthetic construct
  source 1..20: mol_type = other RNA
atgcaatggaaacctatcag

SEQ ID NO: 2991 - RNA, 20 nt, synthetic construct
  source 1..20: mol_type = other RNA
atgcagcagtcccagcagcc

SEQ ID NO: 2992 - RNA, 20 nt, synthetic construct
  source 1..20: mol_type = other RNA
atgcagctcacgctttgcac

SEQ ID NO: 2993 - RNA, 20 nt, synthetic construct
  source 1..20: mol_type = other RNA
atgcagggagatggtttcag

SEQ ID NO: 2994 - RNA, 20 nt, synthetic construct
  source 1..20: mol_type = other RNA
atgcagggcatgaagagagc

SEQ ID NO: 2995 - RNA, 20 nt, synthetic construct
  source 1..20: mol_type = other RNA
atgccacaacccctttaaag

SEQ ID NO: 2996 - RNA, 20 nt, synthetic construct
  source 1..20: mol_type = other RNA
atgcccggagctgcactgta

SEQ ID NO: 2997 - RNA, 20 nt, synthetic construct
  source 1..20: mol_type = other RNA
atgccctgcatctccaaaac

SEQ ID NO: 2998 - RNA, 20 nt, synthetic construct
  source 1..20: mol_type = other RNA
atgccttcactcgggtcaca

SEQ ID NO: 2999 - RNA, 20 nt, synthetic construct
  source 1..20: mol_type = other RNA
atgctaatggtcaggaaaag

SEQ ID NO: 3000 - RNA, 20 nt, synthetic construct
  source 1..20: mol_type = other RNA
atgctcttatgctggtaaaa

SEQ ID NO: 3001 - RNA, 20 nt, synthetic construct
  source 1..20: mol_type = other RNA
atgctggtaaaagacgaggg

SEQ ID NO: 3002 - RNA, 20 nt, synthetic construct
  source 1..20: mol_type = other RNA
atgcttccagctcttaacca

SEQ ID NO: 3003 - RNA, 20 nt, synthetic construct
  source 1..20: mol_type = other RNA
atgctttcccacacagctaa

SEQ ID NO: 3004 - RNA, 20 nt, synthetic construct
  source 1..20: mol_type = other RNA
atggaaaccaaaatatgcag

SEQ ID NO: 3005 - RNA, 20 nt, synthetic construct
  source 1..20: mol_type = other RNA
atggaaacctatcagtggac

SEQ ID NO: 3006 - RNA, 20 nt, synthetic construct
  source 1..20: mol_type = other RNA
atggaagcaccagccctatg

SEQ ID NO: 3007 - RNA, 20 nt, synthetic construct
  source 1..20: mol_type = other RNA
atggactataaaaatggtga

SEQ ID NO: 3008 - RNA, 20 nt, synthetic construct
  source 1..20: mol_type = other RNA
atggagatgtagttactgtg

SEQ ID NO: 3009 - RNA, 20 nt, synthetic construct
  source 1..20: mol_type = other RNA
atggatattgggtattctga

SEQ ID NO: 3010 - RNA, 20 nt, synthetic construct
  source 1..20: mol_type = other RNA
atggatctgtataggtatcc

SEQ ID NO: 3011 - RNA, 20 nt, synthetic construct
  source 1..20: mol_type = other RNA
atggatggccacttcatggg

SEQ ID NO: 3012 - RNA, 20 nt, synthetic construct
  source 1..20: mol_type = other RNA
atggatgggtggtagactga

SEQ ID NO: 3013 - RNA, 20 nt, synthetic construct
  source 1..20: mol_type = other RNA
atggattatgtgagaaggtg

SEQ ID NO: 3014 - RNA, 20 nt, synthetic construct
  source 1..20: mol_type = other RNA
atggattggtggatccagaa

SEQ ID NO: 3015 - RNA, 20 nt, synthetic construct
  source 1..20: mol_type = other RNA
atggcaaaaaagtgaaacgg

SEQ ID NO: 3016 - RNA, 20 nt, synthetic construct
  source 1..20: mol_type = other RNA
atggccacttcatgggagcc

SEQ ID NO: 3017 - RNA, 20 nt, synthetic construct
  source 1..20: mol_type = other RNA
atggcccagactatgtgcct

SEQ ID NO: 3018 - RNA, 20 nt, synthetic construct
  source 1..20: mol_type = other RNA
atggctgaaaaagcccgtga

SEQ ID NO: 3019 - RNA, 20 nt, synthetic construct
  source 1..20: mol_type = other RNA
atggctgcttttcctgacca

SEQ ID NO: 3020 - RNA, 20 nt, synthetic construct
  source 1..20: mol_type = other RNA
atggcttggctctttgggaa

SEQ ID NO: 3021 - RNA, 20 nt, synthetic construct
  source 1..20: mol_type = other RNA
atgggagccacctctagatt

SEQ ID NO: 3022 - RNA, 20 nt, synthetic construct
  source 1..20: mol_type = other RNA
atgggattagaagaattcaa

SEQ ID NO: 3023 - RNA, 20 nt, synthetic construct
  source 1..20: mol_type = other RNA
atgggatttctgaggcacat

SEQ ID NO: 3024 - RNA, 20 nt, synthetic construct
  source 1..20: mol_type = other RNA
atggggagcagttgtccact

SEQ ID NO: 3025 - RNA, 20 nt, synthetic construct
  source 1..20: mol_type = other RNA
atgggtcaattctcattgag

SEQ ID NO: 3026 - RNA, 20 nt, synthetic construct
  source 1..20: mol_type = other RNA
atgggtggtagactgagctt

SEQ ID NO: 3027 - RNA, 20 nt, synthetic construct
  source 1..20: mol_type = other RNA
atgggttatcaaagatgctt

SEQ ID NO: 3028 - RNA, 20 nt, synthetic construct
  source 1..20: mol_type = other RNA
atggtacaactgctgaaacc

SEQ ID NO: 3029 - RNA, 20 nt, synthetic construct
  source 1..20: mol_type = other RNA
atggtcaggaaaagcagcca

SEQ ID NO: 3030 - RNA, 20 nt, synthetic construct
  source 1..20: mol_type = other RNA
atggtcctttcggcaagaga

SEQ ID NO: 3031 - RNA, 20 nt, synthetic construct
  source 1..20: mol_type = other RNA
atggtgaacatcattcacct

SEQ ID NO: 3032 - RNA, 20 nt, synthetic construct
  source 1..20: mol_type = other RNA
atggttaagagctggaagca

SEQ ID NO: 3033 - RNA, 20 nt, synthetic construct
  source 1..20: mol_type = other RNA
atggtttcagcagttgtacc

SEQ ID NO: 3034 - RNA, 20 nt, synthetic construct
  source 1..20: mol_type = other RNA
atgtaaaactctggctattt

SEQ ID NO: 3035 - RNA, 20 nt, synthetic construct
  source 1..20: mol_type = other RNA
atgtacatcatgtagggaaa

SEQ ID NO: 3036 - RNA, 20 nt, synthetic construct
  source 1..20: mol_type = other RNA
atgtacatttggtctaatgg

SEQ ID NO: 3037 - RNA, 20 nt, synthetic construct
  source 1..20: mol_type = other RNA
atgtagggaaattgcctcct

SEQ ID NO: 3038 - RNA, 20 nt, synthetic construct
  source 1..20: mol_type = other RNA
atgtagttactgtggagtct

SEQ ID NO: 3039 - RNA, 20 nt, synthetic construct
  source 1..20: mol_type = other RNA
atgtatggattggtggatcc

SEQ ID NO: 3040 - RNA, 20 nt, synthetic construct
  source 1..20: mol_type = other RNA
atgtcaggatccagaaagct

SEQ ID NO: 3041 - RNA, 20 nt, synthetic construct
  source 1..20: mol_type = other RNA
atgtcattctccttgttttg

SEQ ID NO: 3042 - RNA, 20 nt, synthetic construct
  source 1..20: mol_type = other RNA
atgtccgtgaccacagactc

SEQ ID NO: 3043 - RNA, 20 nt, synthetic construct
  source 1..20: mol_type = other RNA
atgtgagaaggtgaatgatg

SEQ ID NO: 3044 - RNA, 20 nt, synthetic construct
  source 1..20: mol_type = other RNA
atgtgcctcagaaatcccat

SEQ ID NO: 3045 - RNA, 20 nt, synthetic construct
  source 1..20: mol_type = other RNA
atgtggctcagcaggctccc

SEQ ID NO: 3046 - RNA, 20 nt, synthetic construct
  source 1..20: mol_type = other RNA
atgtggctgctgctgctggg

SEQ ID NO: 3047 - RNA, 20 nt, synthetic construct
  source 1..20: mol_type = other RNA
atgttcaacagctctcttca

SEQ ID NO: 3048 - RNA, 20 nt, synthetic construct
  source 1..20: mol_type = other RNA
atgttcaccatttttatagt

SEQ ID NO: 3049 - RNA, 20 nt, synthetic construct
  source 1..20: mol_type = other RNA
atgtttggattgctcagatt

SEQ ID NO: 3050 - RNA, 20 nt, synthetic construct
  source 1..20: mol_type = other RNA
atgttttggctcattcatgc

SEQ ID NO: 3051 - RNA, 20 nt, synthetic construct
  source 1..20: mol_type = other RNA
attaagtgatgctaatggtc

SEQ ID NO: 3052 - RNA, 20 nt, synthetic construct
  source 1..20: mol_type = other RNA
attaccacccaatctgagca

SEQ ID NO: 3053 - RNA, 20 nt, synthetic construct
  source 1..20: mol_type = other RNA
attagaccaaatgtacatca

SEQ ID NO: 3054 - RNA, 20 nt, synthetic construct
  source 1..20: mol_type = other RNA
attagcatcacttaatttgt

SEQ ID NO: 3055 - RNA, 20 nt, synthetic construct
  source 1..20: mol_type = other RNA
attagctgtgtgggaaagca

SEQ ID NO: 3056 - RNA, 20 nt, synthetic construct
  source 1..20: mol_type = other RNA
attatgtgagaaggtgaatg

SEQ ID NO: 3057 - RNA, 20 nt, synthetic construct
  source 1..20: mol_type = other RNA
attcaaaagcccagggtaag

SEQ ID NO: 3058 - RNA, 20 nt, synthetic construct
  source 1..20: mol_type = other RNA
attcaaatatgaacctgcag

SEQ ID NO: 3059 - RNA, 20 nt, synthetic construct
  source 1..20: mol_type = other RNA
attcaccttctcacataatc

SEQ ID NO: 3060 - RNA, 20 nt, synthetic construct
  source 1..20: mol_type = other RNA
attcatgctcttatgctggt

SEQ ID NO: 3061 - RNA, 20 nt, synthetic construct
  source 1..20: mol_type = other RNA
attccacctcatctcaagct

SEQ ID NO: 3062 - RNA, 20 nt, synthetic construct
  source 1..20: mol_type = other RNA
attcctattgggattcttta

SEQ ID NO: 3063 - RNA, 20 nt, synthetic construct
  source 1..20: mol_type = other RNA
attctcattgagtgtgcaaa

SEQ ID NO: 3064 - RNA, 20 nt, synthetic construct
  source 1..20: mol_type = other RNA
attctccccagtctcagccg

SEQ ID NO: 3065 - RNA, 20 nt, synthetic construct
  source 1..20: mol_type = other RNA
attctccttgttttggagat

SEQ ID NO: 3066 - RNA, 20 nt, synthetic construct
  source 1..20: mol_type = other RNA
attctgattcaaaagcccag

SEQ ID NO: 3067 - RNA, 20 nt, synthetic construct
  source 1..20: mol_type = other RNA
attctgcttctggatccacc

SEQ ID NO: 3068 - RNA, 20 nt, synthetic construct
  source 1..20: mol_type = other RNA
attcttctaatcccatgaac

SEQ ID NO: 3069 - RNA, 20 nt, synthetic construct
  source 1..20: mol_type = other RNA
attctttaaaggggttgtgg

SEQ ID NO: 3070 - RNA, 20 nt, synthetic construct
  source 1..20: mol_type = other RNA
attgacccatgagttggagc

SEQ ID NO: 3071 - RNA, 20 nt, synthetic construct
  source 1..20: mol_type = other RNA
attgagtgtgcaaagcgtga

SEQ ID NO: 3072 - RNA, 20 nt, synthetic construct
  source 1..20: mol_type = other RNA
attgatatgatggatattgg

SEQ ID NO: 3073 - RNA, 20 nt, synthetic construct
  source 1..20: mol_type = other RNA
attgcattgatatgatggat

SEQ ID NO: 3074 - RNA, 20 nt, synthetic construct
  source 1..20: mol_type = other RNA
attgcctccttatcccactc

SEQ ID NO: 3075 - RNA, 20 nt, synthetic construct
  source 1..20: mol_type = other RNA
attgctcagattgggtggta

SEQ ID NO: 3076 - RNA, 20 nt, synthetic construct
  source 1..20: mol_type = other RNA
attggcactagtccagggtg

SEQ ID NO: 3077 - RNA, 20 nt, synthetic construct
  source 1..20: mol_type = other RNA
attgggattctttaaagggg

SEQ ID NO: 3078 - RNA, 20 nt, synthetic construct
  source 1..20: mol_type = other RNA
attgggccgtctcatgtatg

SEQ ID NO: 3079 - RNA, 20 nt, synthetic construct
  source 1..20: mol_type = other RNA
attgggggagtggccgtggc

SEQ ID NO: 3080 - RNA, 20 nt, synthetic construct
  source 1..20: mol_type = other RNA
attgggtattctgattcaaa

SEQ ID NO: 3081 - RNA, 20 nt, synthetic construct
  source 1..20: mol_type = other RNA
attgggtggtaatctagagg

SEQ ID NO: 3082 - RNA, 20 nt, synthetic construct
  source 1..20: mol_type = other RNA
attggtggatccagaagcag

SEQ ID NO: 3083 - RNA, 20 nt, synthetic construct
  source 1..20: mol_type = other RNA
atttagatgtaaaactctgg

SEQ ID NO: 3084 - RNA, 20 nt, synthetic construct
  source 1..20: mol_type = other RNA
atttccaaaccttggctggt

SEQ ID NO: 3085 - RNA, 20 nt, synthetic construct
  source 1..20: mol_type = other RNA
atttccctacatgatgtaca

SEQ ID NO: 3086 - RNA, 20 nt, synthetic construct
  source 1..20: mol_type = other RNA
atttctgaggcacatagtct

SEQ ID NO: 3087 - RNA, 20 nt, synthetic construct
  source 1..20: mol_type = other RNA
atttgaattcttctaatccc

SEQ ID NO: 3088 - RNA, 20 nt, synthetic construct
  source 1..20: mol_type = other RNA
atttggtctaatggtacaac

SEQ ID NO: 3089 - RNA, 20 nt, synthetic construct
  source 1..20: mol_type = other RNA
atttgtgtaagcctccttgg

SEQ ID NO: 3090 - RNA, 20 nt, synthetic construct
  source 1..20: mol_type = other RNA
attttggcttcccaaagagc

SEQ ID NO: 3091 - RNA, 20 nt, synthetic construct
  source 1..20: mol_type = other RNA
attttggtttccataaccta

SEQ ID NO: 3092 - RNA, 20 nt, synthetic construct
  source 1..20: mol_type = other RNA
atttttatagtccatgtttg

SEQ ID NO: 3093 - RNA, 20 nt, synthetic construct
  source 1..20: mol_type = other RNA
caaaaaagtgaaacgggagc

SEQ ID NO: 3094 - RNA, 20 nt, synthetic construct
  source 1..20: mol_type = other RNA
caaaacaaggagaatgacat

SEQ ID NO: 3095 - RNA, 20 nt, synthetic construct
  source 1..20: mol_type = other RNA
caaaacatggcttggctctt

SEQ ID NO: 3096 - RNA, 20 nt, synthetic construct
  source 1..20: mol_type = other RNA
caaaagcccagggtaagggt

SEQ ID NO: 3097 - RNA, 20 nt, synthetic construct
  source 1..20: mol_type = other RNA
caaaagggggtgatatcata

SEQ ID NO: 3098 - RNA, 20 nt, synthetic construct
  source 1..20: mol_type = other RNA
caaaagttctgtggacaggg

SEQ ID NO: 3099 - RNA, 20 nt, synthetic construct
  source 1..20: mol_type = other RNA
caaaatatgcagggagatgg

SEQ ID NO: 3100 - RNA, 20 nt, synthetic construct
  source 1..20: mol_type = other RNA
caaaatggctgaaaaagccc

SEQ ID NO: 3101 - RNA, 20 nt, synthetic construct
  source 1..20: mol_type = other RNA
caaacatggactataaaaat

SEQ ID NO: 3102 - RNA, 20 nt, synthetic construct
  source 1..20: mol_type = other RNA
caaaccttggctggtaaagt

SEQ ID NO: 3103 - RNA, 20 nt, synthetic construct
  source 1..20: mol_type = other RNA
caaactcttcacacacttca

SEQ ID NO: 3104 - RNA, 20 nt, synthetic construct
  source 1..20: mol_type = other RNA
caaagagccaagccatgttt

SEQ ID NO: 3105 - RNA, 20 nt, synthetic construct
  source 1..20: mol_type = other RNA
caaagatgcttccagctctt

SEQ ID NO: 3106 - RNA, 20 nt, synthetic construct
  source 1..20: mol_type = other RNA
caaagcgtgagctgcatgcc

SEQ ID NO: 3107 - RNA, 20 nt, synthetic construct
  source 1..20: mol_type = other RNA
caaatatgaacctgcagctt

SEQ ID NO: 3108 - RNA, 20 nt, synthetic construct
  source 1..20: mol_type = other RNA
caaatgtacatcatgtaggg

SEQ ID NO: 3109 - RNA, 20 nt, synthetic construct
  source 1..20: mol_type = other RNA
caaattaagtgatgctaatg

SEQ ID NO: 3110 - RNA, 20 nt, synthetic construct
  source 1..20: mol_type = other RNA
caacaaaagggggtgatatc

SEQ ID NO: 3111 - RNA, 20 nt, synthetic construct
  source 1..20: mol_type = other RNA
caacagatatatatgatatc

SEQ ID NO: 3112 - RNA, 20 nt, synthetic construct
  source 1..20: mol_type = other RNA
caacagctctcttcatgccc

SEQ ID NO: 3113 - RNA, 20 nt, synthetic construct
  source 1..20: mol_type = other RNA
caacccctttaaagaatccc

SEQ ID NO: 3114 - RNA, 20 nt, synthetic construct
  source 1..20: mol_type = other RNA
caacgatgaggtctggtcag

SEQ ID NO: 3115 - RNA, 20 nt, synthetic construct
  source 1..20: mol_type = other RNA
caactcatgggtcaattctc

SEQ ID NO: 3116 - RNA, 20 nt, synthetic construct
  source 1..20: mol_type = other RNA
caactcttattctgcttctg

SEQ ID NO: 3117 - RNA, 20 nt, synthetic construct
  source 1..20: mol_type = other RNA
caactgctccccatatctgg

SEQ ID NO: 3118 - RNA, 20 nt, synthetic construct
  source 1..20: mol_type = other RNA
caactgctgaaaccatctcc

SEQ ID NO: 3119 - RNA, 20 nt, synthetic construct
  source 1..20: mol_type = other RNA
caagaccctctgtctaagct

SEQ ID NO: 3120 - RNA, 20 nt, synthetic construct
  source 1..20: mol_type = other RNA
caagagacttgatgaaacgc

SEQ ID NO: 3121 - RNA, 20 nt, synthetic construct
  source 1..20: mol_type = other RNA
caagcagttctatcatggtt

SEQ ID NO: 3122 - RNA, 20 nt, synthetic construct
  source 1..20: mol_type = other RNA
caagccaagaccctctgtct

SEQ ID NO: 3123 - RNA, 20 nt, synthetic construct
  source 1..20: mol_type = other RNA
caagccatgttttggctcat

SEQ ID NO: 3124 - RNA, 20 nt, synthetic construct
  source 1..20: mol_type = other RNA
caagctgcaggttcatattt

SEQ ID NO: 3125 - RNA, 20 nt, synthetic construct
  source 1..20: mol_type = other RNA
caaggagaatgacatgcttt

SEQ ID NO: 3126 - RNA, 20 nt, synthetic construct
  source 1..20: mol_type = other RNA
caaggaggcttacacaaatt

SEQ ID NO: 3127 - RNA, 20 nt, synthetic construct
  source 1..20: mol_type = other RNA
caaggtttggaaatagccag

SEQ ID NO: 3128 - RNA, 20 nt, synthetic construct
  source 1..20: mol_type = other RNA
caagtctcttgccgaaagga

SEQ ID NO: 3129 - RNA, 20 nt, synthetic construct
  source 1..20: mol_type = other RNA
caagtgaggtaaccaacaaa

SEQ ID NO: 3130 - RNA, 20 nt, synthetic construct
  source 1..20: mol_type = other RNA
caataggaatcaccccacca

SEQ ID NO: 3131 - RNA, 20 nt, synthetic construct
  source 1..20: mol_type = other RNA
caatatccatcatatcaatg

SEQ ID NO: 3132 - RNA, 20 nt, synthetic construct
  source 1..20: mol_type = other RNA
caatccaaacatggactata

SEQ ID NO: 3133 - RNA, 20 nt, synthetic construct
  source 1..20: mol_type = other RNA
caatccagttagtccttatc

SEQ ID NO: 3134 - RNA, 20 nt, synthetic construct
  source 1..20: mol_type = other RNA
caatccatacatgagacggc

SEQ ID NO: 3135 - RNA, 20 nt, synthetic construct
  source 1..20: mol_type = other RNA
caatctgagcaatccaaaca

SEQ ID NO: 3136 - RNA, 20 nt, synthetic construct
  source 1..20: mol_type = other RNA
caatgagaattgacccatga

SEQ ID NO: 3137 - RNA, 20 nt, synthetic construct
  source 1..20: mol_type = other RNA
caatgcaatggaaacctatc

SEQ ID NO: 3138 - RNA, 20 nt, synthetic construct
  source 1..20: mol_type = other RNA
caatggaaacctatcagtgg

SEQ ID NO: 3139 - RNA, 20 nt, synthetic construct
  source 1..20: mol_type = other RNA
caatggctgcttttcctgac

SEQ ID NO: 3140 - RNA, 20 nt, synthetic construct
  source 1..20: mol_type = other RNA
caatgtcaggatccagaaag

SEQ ID NO: 3141 - RNA, 20 nt, synthetic construct
  source 1..20: mol_type = other RNA
caattctcattgagtgtgca

SEQ ID NO: 3142 - RNA, 20 nt, synthetic construct
  source 1..20: mol_type = other RNA
caatttccctacatgatgta

SEQ ID NO: 3143 - RNA, 20 nt, synthetic construct
  source 1..20: mol_type = other RNA
cacaaattaagtgatgctaa

SEQ ID NO: 3144 - RNA, 20 nt, synthetic construct
  source 1..20: mol_type = other RNA
cacaacccctttaaagaatc

SEQ ID NO: 3145 - RNA, 20 nt, synthetic construct
  source 1..20: mol_type = other RNA
cacaagcagttctatcatgg

SEQ ID NO: 3146 - RNA, 20 nt, synthetic construct
  source 1..20: mol_type = other RNA
cacacacttcagatatctat

SEQ ID NO: 3147 - RNA, 20 nt, synthetic construct
  source 1..20: mol_type = other RNA
cacacagctaatgggttatc

SEQ ID NO: 3148 - RNA, 20 nt, synthetic construct
  source 1..20: mol_type = other RNA
cacaccctggactagtgcca

SEQ ID NO: 3149 - RNA, 20 nt, synthetic construct
  source 1..20: mol_type = other RNA
cacactcaatgagaattgac

SEQ ID NO: 3150 - RNA, 20 nt, synthetic construct
  source 1..20: mol_type = other RNA
cacactcttcctctttctca

SEQ ID NO: 3151 - RNA, 20 nt, synthetic construct
  source 1..20: mol_type = other RNA
cacacttcagatatctatgg

SEQ ID NO: 3152 - RNA, 20 nt, synthetic construct
  source 1..20: mol_type = other RNA
cacagaacttttgcgacttt

SEQ ID NO: 3153 - RNA, 20 nt, synthetic construct
  source 1..20: mol_type = other RNA
cacagactccacagtaacta

SEQ ID NO: 3154 - RNA, 20 nt, synthetic construct
  source 1..20: mol_type = other RNA
cacagccccagcagcagcag

SEQ ID NO: 3155 - RNA, 20 nt, synthetic construct
  source 1..20: mol_type = other RNA
cacagctaatgggttatcaa

SEQ ID NO: 3156 - RNA, 20 nt, synthetic construct
  source 1..20: mol_type = other RNA
cacagggccttacaacagat

SEQ ID NO: 3157 - RNA, 20 nt, synthetic construct
  source 1..20: mol_type = other RNA
cacagtaactacatctccat

SEQ ID NO: 3158 - RNA, 20 nt, synthetic construct
  source 1..20: mol_type = other RNA
cacataatccataactacag

SEQ ID NO: 3159 - RNA, 20 nt, synthetic construct
  source 1..20: mol_type = other RNA
cacatagtctgggccatact

SEQ ID NO: 3160 - RNA, 20 nt, synthetic construct
  source 1..20: mol_type = other RNA
cacatcaccctcagacagag

SEQ ID NO: 3161 - RNA, 20 nt, synthetic construct
  source 1..20: mol_type = other RNA
cacatgaaacttcagagccc

SEQ ID NO: 3162 - RNA, 20 nt, synthetic construct
  source 1..20: mol_type = other RNA
caccaatccatacatgagac

SEQ ID NO: 3163 - RNA, 20 nt, synthetic construct
  source 1..20: mol_type = other RNA
caccacagccccagcagcag

SEQ ID NO: 3164 - RNA, 20 nt, synthetic construct
  source 1..20: mol_type = other RNA
caccagaagccacaccctgg

SEQ ID NO: 3165 - RNA, 20 nt, synthetic construct
  source 1..20: mol_type = other RNA
caccagccctatgaacttct

SEQ ID NO: 3166 - RNA, 20 nt, synthetic construct
  source 1..20: mol_type = other RNA
caccaggatctccctcgtct

SEQ ID NO: 3167 - RNA, 20 nt, synthetic construct
  source 1..20: mol_type = other RNA
caccatttttatagtccatg

SEQ ID NO: 3168 - RNA, 20 nt, synthetic construct
  source 1..20: mol_type = other RNA
cacccaatctgagcaatcca

SEQ ID NO: 3169 - RNA, 20 nt, synthetic construct
  source 1..20: mol_type = other RNA
cacccatccatacactttac

SEQ ID NO: 3170 - RNA, 20 nt, synthetic construct
  source 1..20: mol_type = other RNA
caccccaccaggatctccct

SEQ ID NO: 3171 - RNA, 20 nt, synthetic construct
  source 1..20: mol_type = other RNA
cacccccttttgttggttac

SEQ ID NO: 3172 - RNA, 20 nt, synthetic construct
  source 1..20: mol_type = other RNA
caccctcagacagagtctgt

SEQ ID NO: 3173 - RNA, 20 nt, synthetic construct
  source 1..20: mol_type = other RNA
caccctggactagtgccaat

SEQ ID NO: 3174 - RNA, 20 nt, synthetic construct
  source 1..20: mol_type = other RNA
cacctcatctcaagctgcag

SEQ ID NO: 3175 - RNA, 20 nt, synthetic construct
  source 1..20: mol_type = other RNA
cacctctagattaccaccca

SEQ ID NO: 3176 - RNA, 20 nt, synthetic construct
  source 1..20: mol_type = other RNA
caccttctcacataatccat

SEQ ID NO: 3177 - RNA, 20 nt, synthetic construct
  source 1..20: mol_type = other RNA
cacgctttgcacactcaatg

SEQ ID NO: 3178 - RNA, 20 nt, synthetic construct
  source 1..20: mol_type = other RNA
cacggacatggtcctttcgg

SEQ ID NO: 3179 - RNA, 20 nt, synthetic construct
  source 1..20: mol_type = other RNA
cacggccactcccccaatgt

SEQ ID NO: 3180 - RNA, 20 nt, synthetic construct
  source 1..20: mol_type = other RNA
cacgggctttttcagccatt

SEQ ID NO: 3181 - RNA, 20 nt, synthetic construct
  source 1..20: mol_type = other RNA
cactagtccagggtgtggct

SEQ ID NO: 3182 - RNA, 20 nt, synthetic construct
  source 1..20: mol_type = other RNA
cactcaatgagaattgaccc

SEQ ID NO: 3183 - RNA, 20 nt, synthetic construct
  source 1..20: mol_type = other RNA
cactcatgagatggatggcc

SEQ ID NO: 3184 - RNA, 20 nt, synthetic construct
  source 1..20: mol_type = other RNA
cactcccccaatgtcaggat

SEQ ID NO: 3185 - RNA, 20 nt, synthetic construct
  source 1..20: mol_type = other RNA
cactcgggtcacagggcctt

SEQ ID NO: 3186 - RNA, 20 nt, synthetic construct
  source 1..20: mol_type = other RNA
cactcttcctctttctcacg

SEQ ID NO: 3187 - RNA, 20 nt, synthetic construct
  source 1..20: mol_type = other RNA
cactgataggtttccattgc

SEQ ID NO: 3188 - RNA, 20 nt, synthetic construct
  source 1..20: mol_type = other RNA
cactgtagttatggattatg

SEQ ID NO: 3189 - RNA, 20 nt, synthetic construct
  source 1..20: mol_type = other RNA
cacttaatttgtgtaagcct

SEQ ID NO: 3190 - RNA, 20 nt, synthetic construct
  source 1..20: mol_type = other RNA
cacttacctgcgtttcatca

SEQ ID NO: 3191 - RNA, 20 nt, synthetic construct
  source 1..20: mol_type = other RNA
cacttcagatatctatggaa

SEQ ID NO: 3192 - RNA, 20 nt, synthetic construct
  source 1..20: mol_type = other RNA
cacttcatgggagccacctc

SEQ ID NO: 3193 - RNA, 20 nt, synthetic construct
  source 1..20: mol_type = other RNA
cactttaccagccaaggttt

SEQ ID NO: 3194 - RNA, 20 nt, synthetic construct
  source 1..20: mol_type = other RNA
cacttttttgccatgggatt

SEQ ID NO: 3195 - RNA, 20 nt, synthetic construct
  source 1..20: mol_type = other RNA
cagaaagctctgctcgctgt

SEQ ID NO: 3196 - RNA, 20 nt, synthetic construct
  source 1..20: mol_type = other RNA
cagaaatcccatggcaaaaa

SEQ ID NO: 3197 - RNA, 20 nt, synthetic construct
  source 1..20: mol_type = other RNA
cagaacttttgcgactttca

SEQ ID NO: 3198 - RNA, 20 nt, synthetic construct
  source 1..20: mol_type = other RNA
cagaagcagaataagagttg

SEQ ID NO: 3199 - RNA, 20 nt, synthetic construct
  source 1..20: mol_type = other RNA
cagaagcagccaccacagcc

SEQ ID NO: 3200 - RNA, 20 nt, synthetic construct
  source 1..20: mol_type = other RNA
cagaagccacaccctggact

SEQ ID NO: 3201 - RNA, 20 nt, synthetic construct
  source 1..20: mol_type = other RNA
cagaataagagttgacagac

SEQ ID NO: 3202 - RNA, 20 nt, synthetic construct
  source 1..20: mol_type = other RNA
cagaatacccaatatccatc

SEQ ID NO: 3203 - RNA, 20 nt, synthetic construct
  source 1..20: mol_type = other RNA
cagacagagtctgtcaactc

SEQ ID NO: 3204 - RNA, 20 nt, synthetic construct
  source 1..20: mol_type = other RNA
cagacagcgagcagagcttt

SEQ ID NO: 3205 - RNA, 20 nt, synthetic construct
  source 1..20: mol_type = other RNA
cagacctcatcgttgtcctc

SEQ ID NO: 3206 - RNA, 20 nt, synthetic construct
  source 1..20: mol_type = other RNA
cagactatgtgcctcagaaa

SEQ ID NO: 3207 - RNA, 20 nt, synthetic construct
  source 1..20: mol_type = other RNA
cagactccacagtaactaca

SEQ ID NO: 3208 - RNA, 20 nt, synthetic construct
  source 1..20: mol_type = other RNA
cagactctgtctgagggtga

SEQ ID NO: 3209 - RNA, 20 nt, synthetic construct
  source 1..20: mol_type = other RNA
cagagaccccagcagcagca

SEQ ID NO: 3210 - RNA, 20 nt, synthetic construct
  source 1..20: mol_type = other RNA
cagagcccacttacctgcgt

SEQ ID NO: 3211 - RNA, 20 nt, synthetic construct
  source 1..20: mol_type = other RNA
cagagctttctggatcctga

SEQ ID NO: 3212 - RNA, 20 nt, synthetic construct
  source 1..20: mol_type = other RNA
cagaggacaacgatgaggtc

SEQ ID NO: 3213 - RNA, 20 nt, synthetic construct
  source 1..20: mol_type = other RNA
cagagggtcttggcttggat

SEQ ID NO: 3214 - RNA, 20 nt, synthetic construct
  source 1..20: mol_type = other RNA
cagagtctgtcaactcttat

SEQ ID NO: 3215 - RNA, 20 nt, synthetic construct
  source 1..20: mol_type = other RNA
cagagttttacatctaaata

SEQ ID NO: 3216 - RNA, 20 nt, synthetic construct
  source 1..20: mol_type = other RNA
cagatatatatgatatcacc

SEQ ID NO: 3217 - RNA, 20 nt, synthetic construct
  source 1..20: mol_type = other RNA
cagatatctatggaagcacc

SEQ ID NO: 3218 - RNA, 20 nt, synthetic construct
  source 1..20: mol_type = other RNA
cagatatggggagcagttgt

SEQ ID NO: 3219 - RNA, 20 nt, synthetic construct
  source 1..20: mol_type = other RNA
cagatccatcggctgagact

SEQ ID NO: 3220 - RNA, 20 nt, synthetic construct
  source 1..20: mol_type = other RNA
cagattgggtggtaatctag

SEQ ID NO: 3221 - RNA, 20 nt, synthetic construct
  source 1..20: mol_type = other RNA
cagcagagaccccagcagca

SEQ ID NO: 3222 - RNA, 20 nt, synthetic construct
  source 1..20: mol_type = other RNA
cagcagcagagaccccagca

SEQ ID NO: 3223 - RNA, 20 nt, synthetic construct
  source 1..20: mol_type = other RNA
cagcagcagcagagacccca

SEQ ID NO: 3224 - RNA, 20 nt, synthetic construct
  source 1..20: mol_type = other RNA
cagcagcagcagccacatca

SEQ ID NO: 3225 - RNA, 20 nt, synthetic construct
  source 1..20: mol_type = other RNA
cagcagcagccacatcaccc

SEQ ID NO: 3226 - RNA, 20 nt, synthetic construct
  source 1..20: mol_type = other RNA
cagcagccacatcaccctca

SEQ ID NO: 3227 - RNA, 20 nt, synthetic construct
  source 1..20: mol_type = other RNA
cagcagccccagcctctaca

SEQ ID NO: 3228 - RNA, 20 nt, synthetic construct
  source 1..20: mol_type = other RNA
cagcaggctcccgtttcact

SEQ ID NO: 3229 - RNA, 20 nt, synthetic construct
  source 1..20: mol_type = other RNA
cagcagtcccagcagcccca

SEQ ID NO: 3230 - RNA, 20 nt, synthetic construct
  source 1..20: mol_type = other RNA
cagcagttgtaccattagac

SEQ ID NO: 3231 - RNA, 20 nt, synthetic construct
  source 1..20: mol_type = other RNA
cagcataagagcatgaatga

SEQ ID NO: 3232 - RNA, 20 nt, synthetic construct
  source 1..20: mol_type = other RNA
cagccaaggtttggaaatag

SEQ ID NO: 3233 - RNA, 20 nt, synthetic construct
  source 1..20: mol_type = other RNA
cagccacatcaccctcagac

SEQ ID NO: 3234 - RNA, 20 nt, synthetic construct
  source 1..20: mol_type = other RNA
cagccaccacagccccagca

SEQ ID NO: 3235 - RNA, 20 nt, synthetic construct
  source 1..20: mol_type = other RNA
cagccattggcactagtcca

SEQ ID NO: 3236 - RNA, 20 nt, synthetic construct
  source 1..20: mol_type = other RNA
cagccattttggcttcccaa

SEQ ID NO: 3237 - RNA, 20 nt, synthetic construct
  source 1..20: mol_type = other RNA
cagccccagcagcagcagag

SEQ ID NO: 3238 - RNA, 20 nt, synthetic construct
  source 1..20: mol_type = other RNA
cagccccagcctctacagaa

SEQ ID NO: 3239 - RNA, 20 nt, synthetic construct
  source 1..20: mol_type = other RNA
cagccctatgaacttctatt

SEQ ID NO: 3240 - RNA, 20 nt, synthetic construct
  source 1..20: mol_type = other RNA
cagccgatggatctgtatag

SEQ ID NO: 3241 - RNA, 20 nt, synthetic construct
  source 1..20: mol_type = other RNA
cagcctctacagaagcagcc

SEQ ID NO: 3242 - RNA, 20 nt, synthetic construct
  source 1..20: mol_type = other RNA
cagcgagcagagctttctgg

SEQ ID NO: 3243 - RNA, 20 nt, synthetic construct
  source 1..20: mol_type = other RNA
cagctaatgggttatcaaag

SEQ ID NO: 3244 - RNA, 20 nt, synthetic construct
  source 1..20: mol_type = other RNA
cagctcacgctttgcacact

SEQ ID NO: 3245 - RNA, 20 nt, synthetic construct
  source 1..20: mol_type = other RNA
cagctccgggcatgttcaac

SEQ ID NO: 3246 - RNA, 20 nt, synthetic construct
  source 1..20: mol_type = other RNA
cagctctcttcatgccctgc

SEQ ID NO: 3247 - RNA, 20 nt, synthetic construct
  source 1..20: mol_type = other RNA
cagctcttaaccatgataga

SEQ ID NO: 3248 - RNA, 20 nt, synthetic construct
  source 1..20: mol_type = other RNA
cagcttgagatgaggtggaa

SEQ ID NO: 3249 - RNA, 20 nt, synthetic construct
  source 1..20: mol_type = other RNA
caggaaaagcagccattggc

SEQ ID NO: 3250 - RNA, 20 nt, synthetic construct
  source 1..20: mol_type = other RNA
caggaccagtcatgcagcag

SEQ ID NO: 3251 - RNA, 20 nt, synthetic construct
  source 1..20: mol_type = other RNA
caggatccagaaagctctgc

SEQ ID NO: 3252 - RNA, 20 nt, synthetic construct
  source 1..20: mol_type = other RNA
caggatctccctcgtctttt

SEQ ID NO: 3253 - RNA, 20 nt, synthetic construct
  source 1..20: mol_type = other RNA
caggctcccgtttcactttt

SEQ ID NO: 3254 - RNA, 20 nt, synthetic construct
  source 1..20: mol_type = other RNA
cagggagatggtttcagcag

SEQ ID NO: 3255 - RNA, 20 nt, synthetic construct
  source 1..20: mol_type = other RNA
cagggcatgaagagagctgt

SEQ ID NO: 3256 - RNA, 20 nt, synthetic construct
  source 1..20: mol_type = other RNA
cagggccttacaacagatat

SEQ ID NO: 3257 - RNA, 20 nt, synthetic construct
  source 1..20: mol_type = other RNA
cagggtaagagagaacagaa

SEQ ID NO: 3258 - RNA, 20 nt, synthetic construct
  source 1..20: mol_type = other RNA
cagggtaagggttcatggga

SEQ ID NO: 3259 - RNA, 20 nt, synthetic construct
  source 1..20: mol_type = other RNA
cagggtgtggcttctggtgc

SEQ ID NO: 3260 - RNA, 20 nt, synthetic construct
  source 1..20: mol_type = other RNA
caggtaagtgggctctgaag

SEQ ID NO: 3261 - RNA, 20 nt, synthetic construct
  source 1..20: mol_type = other RNA
caggttcatatttgaattct

SEQ ID NO: 3262 - RNA, 20 nt, synthetic construct
  source 1..20: mol_type = other RNA
cagtaactacatctccatat

SEQ ID NO: 3263 - RNA, 20 nt, synthetic construct
  source 1..20: mol_type = other RNA
cagtcatgcagcagtcccag

SEQ ID NO: 3264 - RNA, 20 nt, synthetic construct
  source 1..20: mol_type = other RNA
cagtcccagcagccccagcc

SEQ ID NO: 3265 - RNA, 20 nt, synthetic construct
  source 1..20: mol_type = other RNA
cagtctaccacccatccata

SEQ ID NO: 3266 - RNA, 20 nt, synthetic construct
  source 1..20: mol_type = other RNA
cagtctcagccgatggatct

SEQ ID NO: 3267 - RNA, 20 nt, synthetic construct
  source 1..20: mol_type = other RNA
cagtgcagctccgggcatgt

SEQ ID NO: 3268 - RNA, 20 nt, synthetic construct
  source 1..20: mol_type = other RNA
cagtggacaactgctcccca

SEQ ID NO: 3269 - RNA, 20 nt, synthetic construct
  source 1..20: mol_type = other RNA
cagttagtccttatccaaac

SEQ ID NO: 3270 - RNA, 20 nt, synthetic construct
  source 1..20: mol_type = other RNA
cagttctatcatggttaaga

SEQ ID NO: 3271 - RNA, 20 nt, synthetic construct
  source 1..20: mol_type = other RNA
cagttgtaccattagaccaa

SEQ ID NO: 3272 - RNA, 20 nt, synthetic construct
  source 1..20: mol_type = other RNA
cagttgtccactgataggtt

SEQ ID NO: 3273 - RNA, 20 nt, synthetic construct
  source 1..20: mol_type = other RNA
cataacctaagtatttagat

SEQ ID NO: 3274 - RNA, 20 nt, synthetic construct
  source 1..20: mol_type = other RNA
cataactacagtgcagctcc

SEQ ID NO: 3275 - RNA, 20 nt, synthetic construct
  source 1..20: mol_type = other RNA
cataagagcatgaatgagcc

SEQ ID NO: 3276 - RNA, 20 nt, synthetic construct
  source 1..20: mol_type = other RNA
cataatccataactacagtg

SEQ ID NO: 3277 - RNA, 20 nt, synthetic construct
  source 1..20: mol_type = other RNA
catacactttaccagccaag

SEQ ID NO: 3278 - RNA, 20 nt, synthetic construct
  source 1..20: mol_type = other RNA
catacatgagacggcccaat

SEQ ID NO: 3279 - RNA, 20 nt, synthetic construct
  source 1..20: mol_type = other RNA
catacttttcacactcttcc

SEQ ID NO: 3280 - RNA, 20 nt, synthetic construct
  source 1..20: mol_type = other RNA
catagatatctgaagtgtgt

SEQ ID NO: 3281 - RNA, 20 nt, synthetic construct
  source 1..20: mol_type = other RNA
catagggctggtgcttccat

SEQ ID NO: 3282 - RNA, 20 nt, synthetic construct
  source 1..20: mol_type = other RNA
catagtctgggccatacttt

SEQ ID NO: 3283 - RNA, 20 nt, synthetic construct
  source 1..20: mol_type = other RNA
catatatatctgttgtaagg

SEQ ID NO: 3284 - RNA, 20 nt, synthetic construct
  source 1..20: mol_type = other RNA
catatcaatgcaatggaaac

SEQ ID NO: 3285 - RNA, 20 nt, synthetic construct
  source 1..20: mol_type = other RNA
catatctgggttcctattct

SEQ ID NO: 3286 - RNA, 20 nt, synthetic construct
  source 1..20: mol_type = other RNA
catatgccttcactcgggtc

SEQ ID NO: 3287 - RNA, 20 nt, synthetic construct
  source 1..20: mol_type = other RNA
catatggagatgtagttact

SEQ ID NO: 3288 - RNA, 20 nt, synthetic construct
  source 1..20: mol_type = other RNA
catattttggtttccataac

SEQ ID NO: 3289 - RNA, 20 nt, synthetic construct
  source 1..20: mol_type = other RNA
catcaagtctcttgccgaaa

SEQ ID NO: 3290 - RNA, 20 nt, synthetic construct
  source 1..20: mol_type = other RNA
catcaccctcagacagagtc

SEQ ID NO: 3291 - RNA, 20 nt, synthetic construct
  source 1..20: mol_type = other RNA
catcacttaatttgtgtaag

SEQ ID NO: 3292 - RNA, 20 nt, synthetic construct
  source 1..20: mol_type = other RNA
catcatatcaatgcaatgga

SEQ ID NO: 3293 - RNA, 20 nt, synthetic construct
  source 1..20: mol_type = other RNA
catcatgtagggaaattgcc

SEQ ID NO: 3294 - RNA, 20 nt, synthetic construct
  source 1..20: mol_type = other RNA
catcattcaccttctcacat

SEQ ID NO: 3295 - RNA, 20 nt, synthetic construct
  source 1..20: mol_type = other RNA
catccatacactttaccagc

SEQ ID NO: 3296 - RNA, 20 nt, synthetic construct
  source 1..20: mol_type = other RNA
catccatctcatgagtggga

SEQ ID NO: 3297 - RNA, 20 nt, synthetic construct
  source 1..20: mol_type = other RNA
catcggctgagactggggag

SEQ ID NO: 3298 - RNA, 20 nt, synthetic construct
  source 1..20: mol_type = other RNA
catcgttgtcctctgcacca

SEQ ID NO: 3299 - RNA, 20 nt, synthetic construct
  source 1..20: mol_type = other RNA
catctaaatacttaggttat

SEQ ID NO: 3300 - RNA, 20 nt, synthetic construct
  source 1..20: mol_type = other RNA
catctcaagctgcaggttca

SEQ ID NO: 3301 - RNA, 20 nt, synthetic construct
  source 1..20: mol_type = other RNA
catctcatgagtgggataag

SEQ ID NO: 3302 - RNA, 20 nt, synthetic construct
  source 1..20: mol_type = other RNA
catctccaaaacaaggagaa

SEQ ID NO: 3303 - RNA, 20 nt, synthetic construct
  source 1..20: mol_type = other RNA
catctccatatgccttcact

SEQ ID NO: 3304 - RNA, 20 nt, synthetic construct
  source 1..20: mol_type = other RNA
catctccctgcatattttgg

SEQ ID NO: 3305 - RNA, 20 nt, synthetic construct
  source 1..20: mol_type = other RNA
catctttgataacccattag

SEQ ID NO: 3306 - RNA, 20 nt, synthetic construct
  source 1..20: mol_type = other RNA
catgaaacttcagagcccac

SEQ ID NO: 3307 - RNA, 20 nt, synthetic construct
  source 1..20: mol_type = other RNA
catgaacccttaccctgggc

SEQ ID NO: 3308 - RNA, 20 nt, synthetic construct
  source 1..20: mol_type = other RNA
catgaagagagctgttgaac

SEQ ID NO: 3309 - RNA, 20 nt, synthetic construct
  source 1..20: mol_type = other RNA
catgaagtggccatccatct

SEQ ID NO: 3310 - RNA, 20 nt, synthetic construct
  source 1..20: mol_type = other RNA
catgaatgagccaaaacatg

SEQ ID NO: 3311 - RNA, 20 nt, synthetic construct
  source 1..20: mol_type = other RNA
catgactggtcctgaaagtc

SEQ ID NO: 3312 - RNA, 20 nt, synthetic construct
  source 1..20: mol_type = other RNA
catgagacggcccaatccag

SEQ ID NO: 3313 - RNA, 20 nt, synthetic construct
  source 1..20: mol_type = other RNA
catgagatggatggccactt

SEQ ID NO: 3314 - RNA, 20 nt, synthetic construct
  source 1..20: mol_type = other RNA
catgagtgggataaggaggc

SEQ ID NO: 3315 - RNA, 20 nt, synthetic construct
  source 1..20: mol_type = other RNA
catgagttggagccacggcc

SEQ ID NO: 3316 - RNA, 20 nt, synthetic construct
  source 1..20: mol_type = other RNA
catgatagaactgcttgtgt

SEQ ID NO: 3317 - RNA, 20 nt, synthetic construct
  source 1..20: mol_type = other RNA
catgatgtacatttggtcta

SEQ ID NO: 3318 - RNA, 20 nt, synthetic construct
  source 1..20: mol_type = other RNA
catgcagcagtcccagcagc

SEQ ID NO: 3319 - RNA, 20 nt, synthetic construct
  source 1..20: mol_type = other RNA
catgcagctcacgctttgca

SEQ ID NO: 3320 - RNA, 20 nt, synthetic construct
  source 1..20: mol_type = other RNA
catgccacaacccctttaaa

SEQ ID NO: 3321 - RNA, 20 nt, synthetic construct
  source 1..20: mol_type = other RNA
catgcccggagctgcactgt

SEQ ID NO: 3322 - RNA, 20 nt, synthetic construct
  source 1..20: mol_type = other RNA
catgccctgcatctccaaaa

SEQ ID NO: 3323 - RNA, 20 nt, synthetic construct
  source 1..20: mol_type = other RNA
catgctcttatgctggtaaa

SEQ ID NO: 3324 - RNA, 20 nt, synthetic construct
  source 1..20: mol_type = other RNA
catgctttcccacacagcta

SEQ ID NO: 3325 - RNA, 20 nt, synthetic construct
  source 1..20: mol_type = other RNA
catggactataaaaatggtg

SEQ ID NO: 3326 - RNA, 20 nt, synthetic construct
  source 1..20: mol_type = other RNA
catggcaaaaaagtgaaacg

SEQ ID NO: 3327 - RNA, 20 nt, synthetic construct
  source 1..20: mol_type = other RNA
catggcttggctctttggga

SEQ ID NO: 3328 - RNA, 20 nt, synthetic construct
  source 1..20: mol_type = other RNA
catgggagccacctctagat

SEQ ID NO: 3329 - RNA, 20 nt, synthetic construct
  source 1..20: mol_type = other RNA
catgggattagaagaattca

SEQ ID NO: 3330 - RNA, 20 nt, synthetic construct
  source 1..20: mol_type = other RNA
catgggatttctgaggcaca

SEQ ID NO: 3331 - RNA, 20 nt, synthetic construct
  source 1..20: mol_type = other RNA
catgggtcaattctcattga

SEQ ID NO: 3332 - RNA, 20 nt, synthetic construct
  source 1..20: mol_type = other RNA
catggtcctttcggcaagag

SEQ ID NO: 3333 - RNA, 20 nt, synthetic construct
  source 1..20: mol_type = other RNA
catggttaagagctggaagc

SEQ ID NO: 3334 - RNA, 20 nt, synthetic construct
  source 1..20: mol_type = other RNA
catgtagggaaattgcctcc

SEQ ID NO: 3335 - RNA, 20 nt, synthetic construct
  source 1..20: mol_type = other RNA
catgtatggattggtggatc

SEQ ID NO: 3336 - RNA, 20 nt, synthetic construct
  source 1..20: mol_type = other RNA
catgtcattctccttgtttt

SEQ ID NO: 3337 - RNA, 20 nt, synthetic construct
  source 1..20: mol_type = other RNA
catgtccgtgaccacagact

SEQ ID NO: 3338 - RNA, 20 nt, synthetic construct
  source 1..20: mol_type = other RNA
catgtggctcagcaggctcc

SEQ ID NO: 3339 - RNA, 20 nt, synthetic construct
  source 1..20: mol_type = other RNA
catgttcaacagctctcttc

SEQ ID NO: 3340 - RNA, 20 nt, synthetic construct
  source 1..20: mol_type = other RNA
catgtttggattgctcagat

SEQ ID NO: 3341 - RNA, 20 nt, synthetic construct
  source 1..20: mol_type = other RNA
catgttttggctcattcatg

SEQ ID NO: 3342 - RNA, 20 nt, synthetic construct
  source 1..20: mol_type = other RNA
cattagaccaaatgtacatc

SEQ ID NO: 3343 - RNA, 20 nt, synthetic construct
  source 1..20: mol_type = other RNA
cattagcatcacttaatttg

SEQ ID NO: 3344 - RNA, 20 nt, synthetic construct
  source 1..20: mol_type = other RNA
cattagctgtgtgggaaagc

SEQ ID NO: 3345 - RNA, 20 nt, synthetic construct
  source 1..20: mol_type = other RNA
cattcaccttctcacataat

SEQ ID NO: 3346 - RNA, 20 nt, synthetic construct
  source 1..20: mol_type = other RNA
cattcatgctcttatgctgg

SEQ ID NO: 3347 - RNA, 20 nt, synthetic construct
  source 1..20: mol_type = other RNA
cattctccttgttttggaga

SEQ ID NO: 3348 - RNA, 20 nt, synthetic construct
  source 1..20: mol_type = other RNA
cattgagtgtgcaaagcgtg

SEQ ID NO: 3349 - RNA, 20 nt, synthetic construct
  source 1..20: mol_type = other RNA
cattgatatgatggatattg

SEQ ID NO: 3350 - RNA, 20 nt, synthetic construct
  source 1..20: mol_type = other RNA
cattgcattgatatgatgga

SEQ ID NO: 3351 - RNA, 20 nt, synthetic construct
  source 1..20: mol_type = other RNA
cattggcactagtccagggt

SEQ ID NO: 3352 - RNA, 20 nt, synthetic construct
  source 1..20: mol_type = other RNA
cattgggggagtggccgtgg

SEQ ID NO: 3353 - RNA, 20 nt, synthetic construct
  source 1..20: mol_type = other RNA
catttggtctaatggtacaa

SEQ ID NO: 3354 - RNA, 20 nt, synthetic construct
  source 1..20: mol_type = other RNA
cattttggcttcccaaagag

SEQ ID NO: 3355 - RNA, 20 nt, synthetic construct
  source 1..20: mol_type = other RNA
catttttatagtccatgttt

SEQ ID NO: 3356 - RNA, 20 nt, synthetic construct
  source 1..20: mol_type = other RNA
ccaaaacaaggagaatgaca

SEQ ID NO: 3357 - RNA, 20 nt, synthetic construct
  source 1..20: mol_type = other RNA
ccaaaacatggcttggctct

SEQ ID NO: 3358 - RNA, 20 nt, synthetic construct
  source 1..20: mol_type = other RNA
ccaaaatatgcagggagatg

SEQ ID NO: 3359 - RNA, 20 nt, synthetic construct
  source 1..20: mol_type = other RNA
ccaaaatggctgaaaaagcc

SEQ ID NO: 3360 - RNA, 20 nt, synthetic construct
  source 1..20: mol_type = other RNA
ccaaacatggactataaaaa

SEQ ID NO: 3361 - RNA, 20 nt, synthetic construct
  source 1..20: mol_type = other RNA
ccaaaccttggctggtaaag

SEQ ID NO: 3362 - RNA, 20 nt, synthetic construct
  source 1..20: mol_type = other RNA
ccaaactcttcacacacttc

SEQ ID NO: 3363 - RNA, 20 nt, synthetic construct
  source 1..20: mol_type = other RNA
ccaaagagccaagccatgtt

SEQ ID NO: 3364 - RNA, 20 nt, synthetic construct
  source 1..20: mol_type = other RNA
ccaaatgtacatcatgtagg

SEQ ID NO: 3365 - RNA, 20 nt, synthetic construct
  source 1..20: mol_type = other RNA
ccaacaaaagggggtgatat

SEQ ID NO: 3366 - RNA, 20 nt, synthetic construct
  source 1..20: mol_type = other RNA
ccaactcatgggtcaattct

SEQ ID NO: 3367 - RNA, 20 nt, synthetic construct
  source 1..20: mol_type = other RNA
ccaagaccctctgtctaagc

SEQ ID NO: 3368 - RNA, 20 nt, synthetic construct
  source 1..20: mol_type = other RNA
ccaagccaagaccctctgtc

SEQ ID NO: 3369 - RNA, 20 nt, synthetic construct
  source 1..20: mol_type = other RNA
ccaagccatgttttggctca

SEQ ID NO: 3370 - RNA, 20 nt, synthetic construct
  source 1..20: mol_type = other RNA
ccaaggaggcttacacaaat

SEQ ID NO: 3371 - RNA, 20 nt, synthetic construct
  source 1..20: mol_type = other RNA
ccaaggtttggaaatagcca

SEQ ID NO: 3372 - RNA, 20 nt, synthetic construct
  source 1..20: mol_type = other RNA
ccaataggaatcaccccacc

SEQ ID NO: 3373 - RNA, 20 nt, synthetic construct
  source 1..20: mol_type = other RNA
ccaatatccatcatatcaat

SEQ ID NO: 3374 - RNA, 20 nt, synthetic construct
  source 1..20: mol_type = other RNA
ccaatccagttagtccttat

SEQ ID NO: 3375 - RNA, 20 nt, synthetic construct
  source 1..20: mol_type = other RNA
ccaatccatacatgagacgg

SEQ ID NO: 3376 - RNA, 20 nt, synthetic construct
  source 1..20: mol_type = other RNA
ccaatctgagcaatccaaac

SEQ ID NO: 3377 - RNA, 20 nt, synthetic construct
  source 1..20: mol_type = other RNA
ccaatggctgcttttcctga

SEQ ID NO: 3378 - RNA, 20 nt, synthetic construct
  source 1..20: mol_type = other RNA
ccaatgtcaggatccagaaa

SEQ ID NO: 3379 - RNA, 20 nt, synthetic construct
  source 1..20: mol_type = other RNA
ccacaacccctttaaagaat

SEQ ID NO: 3380 - RNA, 20 nt, synthetic construct
  source 1..20: mol_type = other RNA
ccacacagctaatgggttat

SEQ ID NO: 3381 - RNA, 20 nt, synthetic construct
  source 1..20: mol_type = other RNA
ccacaccctggactagtgcc

SEQ ID NO: 3382 - RNA, 20 nt, synthetic construct
  source 1..20: mol_type = other RNA
ccacagaacttttgcgactt

SEQ ID NO: 3383 - RNA, 20 nt, synthetic construct
  source 1..20: mol_type = other RNA
ccacagactccacagtaact

SEQ ID NO: 3384 - RNA, 20 nt, synthetic construct
  source 1..20: mol_type = other RNA
ccacagccccagcagcagca

SEQ ID NO: 3385 - RNA, 20 nt, synthetic construct
  source 1..20: mol_type = other RNA
ccacagtaactacatctcca

SEQ ID NO: 3386 - RNA, 20 nt, synthetic construct
  source 1..20: mol_type = other RNA
ccacatcaccctcagacaga

SEQ ID NO: 3387 - RNA, 20 nt, synthetic construct
  source 1..20: mol_type = other RNA
ccacatgaaacttcagagcc

SEQ ID NO: 3388 - RNA, 20 nt, synthetic construct
  source 1..20: mol_type = other RNA
ccaccaatccatacatgaga

SEQ ID NO: 3389 - RNA, 20 nt, synthetic construct
  source 1..20: mol_type = other RNA
ccaccacagccccagcagca

SEQ ID NO: 3390 - RNA, 20 nt, synthetic construct
  source 1..20: mol_type = other RNA
ccaccaggatctccctcgtc

SEQ ID NO: 3391 - RNA, 20 nt, synthetic construct
  source 1..20: mol_type = other RNA
ccacccaatctgagcaatcc

SEQ ID NO: 3392 - RNA, 20 nt, synthetic construct
  source 1..20: mol_type = other RNA
ccacccatccatacacttta

SEQ ID NO: 3393 - RNA, 20 nt, synthetic construct
  source 1..20: mol_type = other RNA
ccacctcatctcaagctgca

SEQ ID NO: 3394 - RNA, 20 nt, synthetic construct
  source 1..20: mol_type = other RNA
ccacctctagattaccaccc

SEQ ID NO: 3395 - RNA, 20 nt, synthetic construct
  source 1..20: mol_type = other RNA
ccacggccactcccccaatg

SEQ ID NO: 3396 - RNA, 20 nt, synthetic construct
  source 1..20: mol_type = other RNA
ccactcatgagatggatggc

SEQ ID NO: 3397 - RNA, 20 nt, synthetic construct
  source 1..20: mol_type = other RNA
ccactcccccaatgtcagga

SEQ ID NO: 3398 - RNA, 20 nt, synthetic construct
  source 1..20: mol_type = other RNA
ccactgataggtttccattg

SEQ ID NO: 3399 - RNA, 20 nt, synthetic construct
  source 1..20: mol_type = other RNA
ccacttacctgcgtttcatc

SEQ ID NO: 3400 - RNA, 20 nt, synthetic construct
  source 1..20: mol_type = other RNA
ccacttcatgggagccacct

SEQ ID NO: 3401 - RNA, 20 nt, synthetic construct
  source 1..20: mol_type = other RNA
ccagaaagctctgctcgctg

SEQ ID NO: 3402 - RNA, 20 nt, synthetic construct
  source 1..20: mol_type = other RNA
ccagaagcagaataagagtt

SEQ ID NO: 3403 - RNA, 20 nt, synthetic construct
  source 1..20: mol_type = other RNA
ccagaagccacaccctggac

SEQ ID NO: 3404 - RNA, 20 nt, synthetic construct
  source 1..20: mol_type = other RNA
ccagacctcatcgttgtcct

SEQ ID NO: 3405 - RNA, 20 nt, synthetic construct
  source 1..20: mol_type = other RNA
ccagactatgtgcctcagaa

SEQ ID NO: 3406 - RNA, 20 nt, synthetic construct
  source 1..20: mol_type = other RNA
ccagagttttacatctaaat

SEQ ID NO: 3407 - RNA, 20 nt, synthetic construct
  source 1..20: mol_type = other RNA
ccagatatggggagcagttg

SEQ ID NO: 3408 - RNA, 20 nt, synthetic construct
  source 1..20: mol_type = other RNA
ccagcagcagcagagacccc

SEQ ID NO: 3409 - RNA, 20 nt, synthetic construct
  source 1..20: mol_type = other RNA
ccagcagcagcagccacatc

SEQ ID NO: 3410 - RNA, 20 nt, synthetic construct
  source 1..20: mol_type = other RNA
ccagcagccccagcctctac

SEQ ID NO: 3411 - RNA, 20 nt, synthetic construct
  source 1..20: mol_type = other RNA
ccagcataagagcatgaatg

SEQ ID NO: 3412 - RNA, 20 nt, synthetic construct
  source 1..20: mol_type = other RNA
ccagccaaggtttggaaata

SEQ ID NO: 3413 - RNA, 20 nt, synthetic construct
  source 1..20: mol_type = other RNA
ccagccctatgaacttctat

SEQ ID NO: 3414 - RNA, 20 nt, synthetic construct
  source 1..20: mol_type = other RNA
ccagcctctacagaagcagc

SEQ ID NO: 3415 - RNA, 20 nt, synthetic construct
  source 1..20: mol_type = other RNA
ccagctcttaaccatgatag

SEQ ID NO: 3416 - RNA, 20 nt, synthetic construct
  source 1..20: mol_type = other RNA
ccaggatctccctcgtcttt

SEQ ID NO: 3417 - RNA, 20 nt, synthetic construct
  source 1..20: mol_type = other RNA
ccagggtaagggttcatggg

SEQ ID NO: 3418 - RNA, 20 nt, synthetic construct
  source 1..20: mol_type = other RNA
ccagggtgtggcttctggtg

SEQ ID NO: 3419 - RNA, 20 nt, synthetic construct
  source 1..20: mol_type = other RNA
ccagtcatgcagcagtccca

SEQ ID NO: 3420 - RNA, 20 nt, synthetic construct
  source 1..20: mol_type = other RNA
ccagtctcagccgatggatc

SEQ ID NO: 3421 - RNA, 20 nt, synthetic construct
  source 1..20: mol_type = other RNA
ccagttagtccttatccaaa

SEQ ID NO: 3422 - RNA, 20 nt, synthetic construct
  source 1..20: mol_type = other RNA
ccataacctaagtatttaga

SEQ ID NO: 3423 - RNA, 20 nt, synthetic construct
  source 1..20: mol_type = other RNA
ccataactacagtgcagctc

SEQ ID NO: 3424 - RNA, 20 nt, synthetic construct
  source 1..20: mol_type = other RNA
ccatacactttaccagccaa

SEQ ID NO: 3425 - RNA, 20 nt, synthetic construct
  source 1..20: mol_type = other RNA
ccatacatgagacggcccaa

SEQ ID NO: 3426 - RNA, 20 nt, synthetic construct
  source 1..20: mol_type = other RNA
ccatacttttcacactcttc

SEQ ID NO: 3427 - RNA, 20 nt, synthetic construct
  source 1..20: mol_type = other RNA
ccatagatatctgaagtgtg

SEQ ID NO: 3428 - RNA, 20 nt, synthetic construct
  source 1..20: mol_type = other RNA
ccatatctgggttcctattc

SEQ ID NO: 3429 - RNA, 20 nt, synthetic construct
  source 1..20: mol_type = other RNA
ccatatgccttcactcgggt

SEQ ID NO: 3430 - RNA, 20 nt, synthetic construct
  source 1..20: mol_type = other RNA
ccatcatatcaatgcaatgg

SEQ ID NO: 3431 - RNA, 20 nt, synthetic construct
  source 1..20: mol_type = other RNA
ccatccatacactttaccag

SEQ ID NO: 3432 - RNA, 20 nt, synthetic construct
  source 1..20: mol_type = other RNA
ccatccatctcatgagtggg

SEQ ID NO: 3433 - RNA, 20 nt, synthetic construct
  source 1..20: mol_type = other RNA
ccatcggctgagactgggga

SEQ ID NO: 3434 - RNA, 20 nt, synthetic construct
  source 1..20: mol_type = other RNA
ccatctcatgagtgggataa

SEQ ID NO: 3435 - RNA, 20 nt, synthetic construct
  source 1..20: mol_type = other RNA
ccatctccctgcatattttg

SEQ ID NO: 3436 - RNA, 20 nt, synthetic construct
  source 1..20: mol_type = other RNA
ccatgaacccttaccctggg

SEQ ID NO: 3437 - RNA, 20 nt, synthetic construct
  source 1..20: mol_type = other RNA
ccatgaagtggccatccatc

SEQ ID NO: 3438 - RNA, 20 nt, synthetic construct
  source 1..20: mol_type = other RNA
ccatgagttggagccacggc

SEQ ID NO: 3439 - RNA, 20 nt, synthetic construct
  source 1..20: mol_type = other RNA
ccatgatagaactgcttgtg

SEQ ID NO: 3440 - RNA, 20 nt, synthetic construct
  source 1..20: mol_type = other RNA
ccatggcaaaaaagtgaaac

SEQ ID NO: 3441 - RNA, 20 nt, synthetic construct
  source 1..20: mol_type = other RNA
ccatgggatttctgaggcac

SEQ ID NO: 3442 - RNA, 20 nt, synthetic construct
  source 1..20: mol_type = other RNA
ccatgtccgtgaccacagac

SEQ ID NO: 3443 - RNA, 20 nt, synthetic construct
  source 1..20: mol_type = other RNA
ccatgtttggattgctcaga

SEQ ID NO: 3444 - RNA, 20 nt, synthetic construct
  source 1..20: mol_type = other RNA
ccatgttttggctcattcat

SEQ ID NO: 3445 - RNA, 20 nt, synthetic construct
  source 1..20: mol_type = other RNA
ccattagaccaaatgtacat

SEQ ID NO: 3446 - RNA, 20 nt, synthetic construct
  source 1..20: mol_type = other RNA
ccattagcatcacttaattt

SEQ ID NO: 3447 - RNA, 20 nt, synthetic construct
  source 1..20: mol_type = other RNA
ccattagctgtgtgggaaag

SEQ ID NO: 3448 - RNA, 20 nt, synthetic construct
  source 1..20: mol_type = other RNA
ccattgcattgatatgatgg

SEQ ID NO: 3449 - RNA, 20 nt, synthetic construct
  source 1..20: mol_type = other RNA
ccattggcactagtccaggg

SEQ ID NO: 3450 - RNA, 20 nt, synthetic construct
  source 1..20: mol_type = other RNA
ccattttggcttcccaaaga

SEQ ID NO: 3451 - RNA, 20 nt, synthetic construct
  source 1..20: mol_type = other RNA
ccatttttatagtccatgtt

SEQ ID NO: 3452 - RNA, 20 nt, synthetic construct
  source 1..20: mol_type = other RNA
cccaaagagccaagccatgt

SEQ ID NO: 3453 - RNA, 20 nt, synthetic construct
  source 1..20: mol_type = other RNA
cccaataggaatcaccccac

SEQ ID NO: 3454 - RNA, 20 nt, synthetic construct
  source 1..20: mol_type = other RNA
cccaatatccatcatatcaa

SEQ ID NO: 3455 - RNA, 20 nt, synthetic construct
  source 1..20: mol_type = other RNA
cccaatccagttagtcctta

SEQ ID NO: 3456 - RNA, 20 nt, synthetic construct
  source 1..20: mol_type = other RNA
cccaatctgagcaatccaaa

SEQ ID NO: 3457 - RNA, 20 nt, synthetic construct
  source 1..20: mol_type = other RNA
cccaatgtcaggatccagaa

SEQ ID NO: 3458 - RNA, 20 nt, synthetic construct
  source 1..20: mol_type = other RNA
cccacacagctaatgggtta

SEQ ID NO: 3459 - RNA, 20 nt, synthetic construct
  source 1..20: mol_type = other RNA
cccaccaggatctccctcgt

SEQ ID NO: 3460 - RNA, 20 nt, synthetic construct
  source 1..20: mol_type = other RNA
cccactcatgagatggatgg

SEQ ID NO: 3461 - RNA, 20 nt, synthetic construct
  source 1..20: mol_type = other RNA
cccacttacctgcgtttcat

SEQ ID NO: 3462 - RNA, 20 nt, synthetic construct
  source 1..20: mol_type = other RNA
cccagactatgtgcctcaga

SEQ ID NO: 3463 - RNA, 20 nt, synthetic construct
  source 1..20: mol_type = other RNA
cccagatatggggagcagtt

SEQ ID NO: 3464 - RNA, 20 nt, synthetic construct
  source 1..20: mol_type = other RNA
cccagcagcagcagagaccc

SEQ ID NO: 3465 - RNA, 20 nt, synthetic construct
  source 1..20: mol_type = other RNA
cccagcagcagcagccacat

SEQ ID NO: 3466 - RNA, 20 nt, synthetic construct
  source 1..20: mol_type = other RNA
cccagcagccccagcctcta

SEQ ID NO: 3467 - RNA, 20 nt, synthetic construct
  source 1..20: mol_type = other RNA
cccagcctctacagaagcag

SEQ ID NO: 3468 - RNA, 20 nt, synthetic construct
  source 1..20: mol_type = other RNA
cccagggtaagggttcatgg

SEQ ID NO: 3469 - RNA, 20 nt, synthetic construct
  source 1..20: mol_type = other RNA
cccagtctcagccgatggat

SEQ ID NO: 3470 - RNA, 20 nt, synthetic construct
  source 1..20: mol_type = other RNA
cccatatctgggttcctatt

SEQ ID NO: 3471 - RNA, 20 nt, synthetic construct
  source 1..20: mol_type = other RNA
cccatccatacactttacca

SEQ ID NO: 3472 - RNA, 20 nt, synthetic construct
  source 1..20: mol_type = other RNA
cccatgaacccttaccctgg

SEQ ID NO: 3473 - RNA, 20 nt, synthetic construct
  source 1..20: mol_type = other RNA
cccatgaagtggccatccat

SEQ ID NO: 3474 - RNA, 20 nt, synthetic construct
  source 1..20: mol_type = other RNA
cccatgagttggagccacgg

SEQ ID NO: 3475 - RNA, 20 nt, synthetic construct
  source 1..20: mol_type = other RNA
cccatggcaaaaaagtgaaa

SEQ ID NO: 3476 - RNA, 20 nt, synthetic construct
  source 1..20: mol_type = other RNA
cccattagctgtgtgggaaa

SEQ ID NO: 3477 - RNA, 20 nt, synthetic construct
  source 1..20: mol_type = other RNA
ccccaatgtcaggatccaga

SEQ ID NO: 3478 - RNA, 20 nt, synthetic construct
  source 1..20: mol_type = other RNA
ccccaccaggatctccctcg

SEQ ID NO: 3479 - RNA, 20 nt, synthetic construct
  source 1..20: mol_type = other RNA
ccccagcagcagcagagacc

SEQ ID NO: 3480 - RNA, 20 nt, synthetic construct
  source 1..20: mol_type = other RNA
ccccagcagcagcagccaca

SEQ ID NO: 3481 - RNA, 20 nt, synthetic construct
  source 1..20: mol_type = other RNA
ccccagcctctacagaagca

SEQ ID NO: 3482 - RNA, 20 nt, synthetic construct
  source 1..20: mol_type = other RNA
ccccagtctcagccgatgga

SEQ ID NO: 3483 - RNA, 20 nt, synthetic construct
  source 1..20: mol_type = other RNA
ccccatatctgggttcctat

SEQ ID NO: 3484 - RNA, 20 nt, synthetic construct
  source 1..20: mol_type = other RNA
cccccaatgtcaggatccag

SEQ ID NO: 3485 - RNA, 20 nt, synthetic construct
  source 1..20: mol_type = other RNA
cccccttttgttggttacct

SEQ ID NO: 3486 - RNA, 20 nt, synthetic construct
  source 1..20: mol_type = other RNA
cccctttaaagaatcccaat

SEQ ID NO: 3487 - RNA, 20 nt, synthetic construct
  source 1..20: mol_type = other RNA
ccccttttgttggttacctc

SEQ ID NO: 3488 - RNA, 20 nt, synthetic construct
  source 1..20: mol_type = other RNA
cccgagtgaaggcatatgga

SEQ ID NO: 3489 - RNA, 20 nt, synthetic construct
  source 1..20: mol_type = other RNA
cccggagctgcactgtagtt

SEQ ID NO: 3490 - RNA, 20 nt, synthetic construct
  source 1..20: mol_type = other RNA
cccgtgagaaagaggaagag

SEQ ID NO: 3491 - RNA, 20 nt, synthetic construct
  source 1..20: mol_type = other RNA
cccgtttcacttttttgcca

SEQ ID NO: 3492 - RNA, 20 nt, synthetic construct
  source 1..20: mol_type = other RNA
ccctacatgatgtacatttg

SEQ ID NO: 3493 - RNA, 20 nt, synthetic construct
  source 1..20: mol_type = other RNA
ccctatgaacttctattcca

SEQ ID NO: 3494 - RNA, 20 nt, synthetic construct
  source 1..20: mol_type = other RNA
ccctcagacagagtctgtca

SEQ ID NO: 3495 - RNA, 20 nt, synthetic construct
  source 1..20: mol_type = other RNA
ccctcgtcttttaccagcat

SEQ ID NO: 3496 - RNA, 20 nt, synthetic construct
  source 1..20: mol_type = other RNA
ccctctgtctaagctcagtc

SEQ ID NO: 3497 - RNA, 20 nt, synthetic construct
  source 1..20: mol_type = other RNA
ccctgcatattttggtttcc

SEQ ID NO: 3498 - RNA, 20 nt, synthetic construct
  source 1..20: mol_type = other RNA
ccctgcatctccaaaacaag

SEQ ID NO: 3499 - RNA, 20 nt, synthetic construct
  source 1..20: mol_type = other RNA
ccctggactagtgccaatgg

SEQ ID NO: 3500 - RNA, 20 nt, synthetic construct
  source 1..20: mol_type = other RNA
ccctgggcttttgaatcaga

SEQ ID NO: 3501 - RNA, 20 nt, synthetic construct
  source 1..20: mol_type = other RNA
ccctgtccacagaacttttg

SEQ ID NO: 3502 - RNA, 20 nt, synthetic construct
  source 1..20: mol_type = other RNA
ccctgtgacccgagtgaagg

SEQ ID NO: 3503 - RNA, 20 nt, synthetic construct
  source 1..20: mol_type = other RNA
cccttaccctgggcttttga

SEQ ID NO: 3504 - RNA, 20 nt, synthetic construct
  source 1..20: mol_type = other RNA
ccctttaaagaatcccaata

SEQ ID NO: 3505 - RNA, 20 nt, synthetic construct
  source 1..20: mol_type = other RNA
cccttttgttggttacctca

SEQ ID NO: 3506 - RNA, 20 nt, synthetic construct
  source 1..20: mol_type = other RNA
ccgaaaggaccatgtccgtg

SEQ ID NO: 3507 - RNA, 20 nt, synthetic construct
  source 1..20: mol_type = other RNA
ccgagtgaaggcatatggag

SEQ ID NO: 3508 - RNA, 20 nt, synthetic construct
  source 1..20: mol_type = other RNA
ccgatggatctgtataggta

SEQ ID NO: 3509 - RNA, 20 nt, synthetic construct
  source 1..20: mol_type = other RNA
ccggagctgcactgtagtta

SEQ ID NO: 3510 - RNA, 20 nt, synthetic construct
  source 1..20: mol_type = other RNA
ccgggcatgttcaacagctc

SEQ ID NO: 3511 - RNA, 20 nt, synthetic construct
  source 1..20: mol_type = other RNA
ccgtctcatgtatggattgg

SEQ ID NO: 3512 - RNA, 20 nt, synthetic construct
  source 1..20: mol_type = other RNA
ccgtgaccacagactccaca

SEQ ID NO: 3513 - RNA, 20 nt, synthetic construct
  source 1..20: mol_type = other RNA
ccgtgagaaagaggaagagt

SEQ ID NO: 3514 - RNA, 20 nt, synthetic construct
  source 1..20: mol_type = other RNA
ccgtggctccaactcatggg

SEQ ID NO: 3515 - RNA, 20 nt, synthetic construct
  source 1..20: mol_type = other RNA
ccgtttcacttttttgccat

SEQ ID NO: 3516 - RNA, 20 nt, synthetic construct
  source 1..20: mol_type = other RNA
cctaagtatttagatgtaaa

SEQ ID NO: 3517 - RNA, 20 nt, synthetic construct
  source 1..20: mol_type = other RNA
cctacatgatgtacatttgg

SEQ ID NO: 3518 - RNA, 20 nt, synthetic construct
  source 1..20: mol_type = other RNA
cctatacagatccatcggct

SEQ ID NO: 3519 - RNA, 20 nt, synthetic construct
  source 1..20: mol_type = other RNA
cctatcagtggacaactgct

SEQ ID NO: 3520 - RNA, 20 nt, synthetic construct
  source 1..20: mol_type = other RNA
cctatgaacttctattccac

SEQ ID NO: 3521 - RNA, 20 nt, synthetic construct
  source 1..20: mol_type = other RNA
cctattctccccagtctcag

SEQ ID NO: 3522 - RNA, 20 nt, synthetic construct
  source 1..20: mol_type = other RNA
cctattgggattctttaaag

SEQ ID NO: 3523 - RNA, 20 nt, synthetic construct
  source 1..20: mol_type = other RNA
cctcagaaatcccatggcaa

SEQ ID NO: 3524 - RNA, 20 nt, synthetic construct
  source 1..20: mol_type = other RNA
cctcagacagagtctgtcaa

SEQ ID NO: 3525 - RNA, 20 nt, synthetic construct
  source 1..20: mol_type = other RNA
cctcatcgttgtcctctgca

SEQ ID NO: 3526 - RNA, 20 nt, synthetic construct
  source 1..20: mol_type = other RNA
cctcatctcaagctgcaggt

SEQ ID NO: 3527 - RNA, 20 nt, synthetic construct
  source 1..20: mol_type = other RNA
cctccttatcccactcatga

SEQ ID NO: 3528 - RNA, 20 nt, synthetic construct
  source 1..20: mol_type = other RNA
cctccttggacacaagcagt

SEQ ID NO: 3529 - RNA, 20 nt, synthetic construct
  source 1..20: mol_type = other RNA
cctcgtcttttaccagcata

SEQ ID NO: 3530 - RNA, 20 nt, synthetic construct
  source 1..20: mol_type = other RNA
cctctacagaagcagccacc

SEQ ID NO: 3531 - RNA, 20 nt, synthetic construct
  source 1..20: mol_type = other RNA
cctctagattaccacccaat

SEQ ID NO: 3532 - RNA, 20 nt, synthetic construct
  source 1..20: mol_type = other RNA
cctctgcaccagaagccaca

SEQ ID NO: 3533 - RNA, 20 nt, synthetic construct
  source 1..20: mol_type = other RNA
cctctgtctaagctcagtct

SEQ ID NO: 3534 - RNA, 20 nt, synthetic construct
  source 1..20: mol_type = other RNA
cctctttctcacgggctttt

SEQ ID NO: 3535 - RNA, 20 nt, synthetic construct
  source 1..20: mol_type = other RNA
cctgaaagtcgcaaaagttc

SEQ ID NO: 3536 - RNA, 20 nt, synthetic construct
  source 1..20: mol_type = other RNA
cctgacattgggggagtggc

SEQ ID NO: 3537 - RNA, 20 nt, synthetic construct
  source 1..20: mol_type = other RNA
cctgaccattagcatcactt

SEQ ID NO: 3538 - RNA, 20 nt, synthetic construct
  source 1..20: mol_type = other RNA
cctgcagcttgagatgaggt

SEQ ID NO: 3539 - RNA, 20 nt, synthetic construct
  source 1..20: mol_type = other RNA
cctgcatattttggtttcca

SEQ ID NO: 3540 - RNA, 20 nt, synthetic construct
  source 1..20: mol_type = other RNA
cctgcatctccaaaacaagg

SEQ ID NO: 3541 - RNA, 20 nt, synthetic construct
  source 1..20: mol_type = other RNA
cctgcgtttcatcaagtctc

SEQ ID NO: 3542 - RNA, 20 nt, synthetic construct
  source 1..20: mol_type = other RNA
cctgctgagccacatgaaac

SEQ ID NO: 3543 - RNA, 20 nt, synthetic construct
  source 1..20: mol_type = other RNA
cctggactagtgccaatggc

SEQ ID NO: 3544 - RNA, 20 nt, synthetic construct
  source 1..20: mol_type = other RNA
cctgggcttttgaatcagaa

SEQ ID NO: 3545 - RNA, 20 nt, synthetic construct
  source 1..20: mol_type = other RNA
cctggtggggtgattcctat

SEQ ID NO: 3546 - RNA, 20 nt, synthetic construct
  source 1..20: mol_type = other RNA
cctgtccacagaacttttgc

SEQ ID NO: 3547 - RNA, 20 nt, synthetic construct
  source 1..20: mol_type = other RNA
cctgtgacccgagtgaaggc

SEQ ID NO: 3548 - RNA, 20 nt, synthetic construct
  source 1..20: mol_type = other RNA
cctgtttctgttctctctta

SEQ ID NO: 3549 - RNA, 20 nt, synthetic construct
  source 1..20: mol_type = other RNA
ccttacaacagatatatatg

SEQ ID NO: 3550 - RNA, 20 nt, synthetic construct
  source 1..20: mol_type = other RNA
ccttaccctgggcttttgaa

SEQ ID NO: 3551 - RNA, 20 nt, synthetic construct
  source 1..20: mol_type = other RNA
ccttatccaaactcttcaca

SEQ ID NO: 3552 - RNA, 20 nt, synthetic construct
  source 1..20: mol_type = other RNA
ccttatcccactcatgagat

SEQ ID NO: 3553 - RNA, 20 nt, synthetic construct
  source 1..20: mol_type = other RNA
ccttcactcgggtcacaggg

SEQ ID NO: 3554 - RNA, 20 nt, synthetic construct
  source 1..20: mol_type = other RNA
ccttctcacataatccataa

SEQ ID NO: 3555 - RNA, 20 nt, synthetic construct
  source 1..20: mol_type = other RNA
ccttggacacaagcagttct

SEQ ID NO: 3556 - RNA, 20 nt, synthetic construct
  source 1..20: mol_type = other RNA
ccttggctggtaaagtgtat

SEQ ID NO: 3557 - RNA, 20 nt, synthetic construct
  source 1..20: mol_type = other RNA
ccttgttttggagatgcagg

SEQ ID NO: 3558 - RNA, 20 nt, synthetic construct
  source 1..20: mol_type = other RNA
cctttaaagaatcccaatag

SEQ ID NO: 3559 - RNA, 20 nt, synthetic construct
  source 1..20: mol_type = other RNA
cctttcggcaagagacttga

SEQ ID NO: 3560 - RNA, 20 nt, synthetic construct
  source 1..20: mol_type = other RNA
ccttttgttggttacctcac

SEQ ID NO: 3561 - RNA, 20 nt, synthetic construct
  source 1..20: mol_type = other RNA
cgaaaggaccatgtccgtga

SEQ ID NO: 3562 - RNA, 20 nt, synthetic construct
  source 1..20: mol_type = other RNA
cgactttcaggaccagtcat

SEQ ID NO: 3563 - RNA, 20 nt, synthetic construct
  source 1..20: mol_type = other RNA
cgagcagagctttctggatc

SEQ ID NO: 3564 - RNA, 20 nt, synthetic construct
  source 1..20: mol_type = other RNA
cgagggagatcctggtgggg

SEQ ID NO: 3565 - RNA, 20 nt, synthetic construct
  source 1..20: mol_type = other RNA
cgagtgaaggcatatggaga

SEQ ID NO: 3566 - RNA, 20 nt, synthetic construct
  source 1..20: mol_type = other RNA
cgatgaggtctggtcagaca

SEQ ID NO: 3567 - RNA, 20 nt, synthetic construct
  source 1..20: mol_type = other RNA
cgatggatctgtataggtat

SEQ ID NO: 3568 - RNA, 20 nt, synthetic construct
  source 1..20: mol_type = other RNA
cgcaaaagttctgtggacag

SEQ ID NO: 3569 - RNA, 20 nt, synthetic construct
  source 1..20: mol_type = other RNA
cgcaggtaagtgggctctga

SEQ ID NO: 3570 - RNA, 20 nt, synthetic construct
  source 1..20: mol_type = other RNA
cgctgtctgaccagacctca

SEQ ID NO: 3571 - RNA, 20 nt, synthetic construct
  source 1..20: mol_type = other RNA
cgctttgcacactcaatgag

SEQ ID NO: 3572 - RNA, 20 nt, synthetic construct
  source 1..20: mol_type = other RNA
cggacatggtcctttcggca

SEQ ID NO: 3573 - RNA, 20 nt, synthetic construct
  source 1..20: mol_type = other RNA
cggagctgcactgtagttat

SEQ ID NO: 3574 - RNA, 20 nt, synthetic construct
  source 1..20: mol_type = other RNA
cggcaagagacttgatgaaa

SEQ ID NO: 3575 - RNA, 20 nt, synthetic construct
  source 1..20: mol_type = other RNA
cggccactcccccaatgtca

SEQ ID NO: 3576 - RNA, 20 nt, synthetic construct
  source 1..20: mol_type = other RNA
cggcccaatccagttagtcc

SEQ ID NO: 3577 - RNA, 20 nt, synthetic construct
  source 1..20: mol_type = other RNA
cggctgagactggggagaat

SEQ ID NO: 3578 - RNA, 20 nt, synthetic construct
  source 1..20: mol_type = other RNA
cgggagcctgctgagccaca

SEQ ID NO: 3579 - RNA, 20 nt, synthetic construct
  source 1..20: mol_type = other RNA
cgggcatgttcaacagctct

SEQ ID NO: 3580 - RNA, 20 nt, synthetic construct
  source 1..20: mol_type = other RNA
cgggctttttcagccatttt

SEQ ID NO: 3581 - RNA, 20 nt, synthetic construct
  source 1..20: mol_type = other RNA
cgggtcacagggccttacaa

SEQ ID NO: 3582 - RNA, 20 nt, synthetic construct
  source 1..20: mol_type = other RNA
cgtctcatgtatggattggt

SEQ ID NO: 3583 - RNA, 20 nt, synthetic construct
  source 1..20: mol_type = other RNA
cgtcttttaccagcataaga

SEQ ID NO: 3584 - RNA, 20 nt, synthetic construct
  source 1..20: mol_type = other RNA
cgtgaccacagactccacag

SEQ ID NO: 3585 - RNA, 20 nt, synthetic construct
  source 1..20: mol_type = other RNA
cgtgagaaagaggaagagtg

SEQ ID NO: 3586 - RNA, 20 nt, synthetic construct
  source 1..20: mol_type = other RNA
cgtgagctgcatgccacaac

SEQ ID NO: 3587 - RNA, 20 nt, synthetic construct
  source 1..20: mol_type = other RNA
cgtggctccaactcatgggt

SEQ ID NO: 3588 - RNA, 20 nt, synthetic construct
  source 1..20: mol_type = other RNA
cgttgtcctctgcaccagaa

SEQ ID NO: 3589 - RNA, 20 nt, synthetic construct
  source 1..20: mol_type = other RNA
cgtttcacttttttgccatg

SEQ ID NO: 3590 - RNA, 20 nt, synthetic construct
  source 1..20: mol_type = other RNA
cgtttcatcaagtctcttgc

SEQ ID NO: 3591 - RNA, 20 nt, synthetic construct
  source 1..20: mol_type = other RNA
ctaaatacttaggttatgga

SEQ ID NO: 3592 - RNA, 20 nt, synthetic construct
  source 1..20: mol_type = other RNA
ctaactggattgggccgtct

SEQ ID NO: 3593 - RNA, 20 nt, synthetic construct
  source 1..20: mol_type = other RNA
ctaagctcagtctaccaccc

SEQ ID NO: 3594 - RNA, 20 nt, synthetic construct
  source 1..20: mol_type = other RNA
ctaatcccatgaacccttac

SEQ ID NO: 3595 - RNA, 20 nt, synthetic construct
  source 1..20: mol_type = other RNA
ctaatgggttatcaaagatg

SEQ ID NO: 3596 - RNA, 20 nt, synthetic construct
  source 1..20: mol_type = other RNA
ctaatggtacaactgctgaa

SEQ ID NO: 3597 - RNA, 20 nt, synthetic construct
  source 1..20: mol_type = other RNA
ctaatggtcaggaaaagcag

SEQ ID NO: 3598 - RNA, 20 nt, synthetic construct
  source 1..20: mol_type = other RNA
ctacagaagcagccaccaca

SEQ ID NO: 3599 - RNA, 20 nt, synthetic construct
  source 1..20: mol_type = other RNA
ctacagtgcagctccgggca

SEQ ID NO: 3600 - RNA, 20 nt, synthetic construct
  source 1..20: mol_type = other RNA
ctacatctccatatgccttc

SEQ ID NO: 3601 - RNA, 20 nt, synthetic construct
  source 1..20: mol_type = other RNA
ctacatgatgtacatttggt

SEQ ID NO: 3602 - RNA, 20 nt, synthetic construct
  source 1..20: mol_type = other RNA
ctaccacccatccatacact

SEQ ID NO: 3603 - RNA, 20 nt, synthetic construct
  source 1..20: mol_type = other RNA
ctagaggtggctcccatgaa

SEQ ID NO: 3604 - RNA, 20 nt, synthetic construct
  source 1..20: mol_type = other RNA
ctagattaccacccaatctg

SEQ ID NO: 3605 - RNA, 20 nt, synthetic construct
  source 1..20: mol_type = other RNA
ctagtccagggtgtggcttc

SEQ ID NO: 3606 - RNA, 20 nt, synthetic construct
  source 1..20: mol_type = other RNA
ctagtgccaatggctgcttt

SEQ ID NO: 3607 - RNA, 20 nt, synthetic construct
  source 1..20: mol_type = other RNA
ctataaaaatggtgaacatc

SEQ ID NO: 3608 - RNA, 20 nt, synthetic construct
  source 1..20: mol_type = other RNA
ctatacagatccatcggctg

SEQ ID NO: 3609 - RNA, 20 nt, synthetic construct
  source 1..20: mol_type = other RNA
ctatcagtggacaactgctc

SEQ ID NO: 3610 - RNA, 20 nt, synthetic construct
  source 1..20: mol_type = other RNA
ctatcatggttaagagctgg

SEQ ID NO: 3611 - RNA, 20 nt, synthetic construct
  source 1..20: mol_type = other RNA
ctatgaacttctattccacc

SEQ ID NO: 3612 - RNA, 20 nt, synthetic construct
  source 1..20: mol_type = other RNA
ctatggaagcaccagcccta

SEQ ID NO: 3613 - RNA, 20 nt, synthetic construct
  source 1..20: mol_type = other RNA
ctatgtgcctcagaaatccc

SEQ ID NO: 3614 - RNA, 20 nt, synthetic construct
  source 1..20: mol_type = other RNA
ctattccacctcatctcaag

SEQ ID NO: 3615 - RNA, 20 nt, synthetic construct
  source 1..20: mol_type = other RNA
ctattctccccagtctcagc

SEQ ID NO: 3616 - RNA, 20 nt, synthetic construct
  source 1..20: mol_type = other RNA
ctattgggattctttaaagg

SEQ ID NO: 3617 - RNA, 20 nt, synthetic construct
  source 1..20: mol_type = other RNA
ctatttccaaaccttggctg

SEQ ID NO: 3618 - RNA, 20 nt, synthetic construct
  source 1..20: mol_type = other RNA
ctcaagctgcaggttcatat

SEQ ID NO: 3619 - RNA, 20 nt, synthetic construct
  source 1..20: mol_type = other RNA
ctcaatgagaattgacccat

SEQ ID NO: 3620 - RNA, 20 nt, synthetic construct
  source 1..20: mol_type = other RNA
ctcacataatccataactac

SEQ ID NO: 3621 - RNA, 20 nt, synthetic construct
  source 1..20: mol_type = other RNA
ctcacgctttgcacactcaa

SEQ ID NO: 3622 - RNA, 20 nt, synthetic construct
  source 1..20: mol_type = other RNA
ctcacgggctttttcagcca

SEQ ID NO: 3623 - RNA, 20 nt, synthetic construct
  source 1..20: mol_type = other RNA
ctcagaaatcccatggcaaa

SEQ ID NO: 3624 - RNA, 20 nt, synthetic construct
  source 1..20: mol_type = other RNA
ctcagacagagtctgtcaac

SEQ ID NO: 3625 - RNA, 20 nt, synthetic construct
  source 1..20: mol_type = other RNA
ctcagattgggtggtaatct

SEQ ID NO: 3626 - RNA, 20 nt, synthetic construct
  source 1..20: mol_type = other RNA
ctcagcaggctcccgtttca

SEQ ID NO: 3627 - RNA, 20 nt, synthetic construct
  source 1..20: mol_type = other RNA
ctcagccgatggatctgtat

SEQ ID NO: 3628 - RNA, 20 nt, synthetic construct
  source 1..20: mol_type = other RNA
ctcagtctaccacccatcca

SEQ ID NO: 3629 - RNA, 20 nt, synthetic construct
  source 1..20: mol_type = other RNA
ctcatcgttgtcctctgcac

SEQ ID NO: 3630 - RNA, 20 nt, synthetic construct
  source 1..20: mol_type = other RNA
ctcatctcaagctgcaggtt

SEQ ID NO: 3631 - RNA, 20 nt, synthetic construct
  source 1..20: mol_type = other RNA
ctcatgagatggatggccac

SEQ ID NO: 3632 - RNA, 20 nt, synthetic construct
  source 1..20: mol_type = other RNA
ctcatgagtgggataaggag

SEQ ID NO: 3633 - RNA, 20 nt, synthetic construct
  source 1..20: mol_type = other RNA
ctcatgggtcaattctcatt

SEQ ID NO: 3634 - RNA, 20 nt, synthetic construct
  source 1..20: mol_type = other RNA
ctcatgtatggattggtgga

SEQ ID NO: 3635 - RNA, 20 nt, synthetic construct
  source 1..20: mol_type = other RNA
ctcattcatgctcttatgct

SEQ ID NO: 3636 - RNA, 20 nt, synthetic construct
  source 1..20: mol_type = other RNA
ctcattgagtgtgcaaagcg

SEQ ID NO: 3637 - RNA, 20 nt, synthetic construct
  source 1..20: mol_type = other RNA
ctccaaaacaaggagaatga

SEQ ID NO: 3638 - RNA, 20 nt, synthetic construct
  source 1..20: mol_type = other RNA
ctccaactcatgggtcaatt

SEQ ID NO: 3639 - RNA, 20 nt, synthetic construct
  source 1..20: mol_type = other RNA
ctccacagtaactacatctc

SEQ ID NO: 3640 - RNA, 20 nt, synthetic construct
  source 1..20: mol_type = other RNA
ctccatatgccttcactcgg

SEQ ID NO: 3641 - RNA, 20 nt, synthetic construct
  source 1..20: mol_type = other RNA
ctcccatgaagtggccatcc

SEQ ID NO: 3642 - RNA, 20 nt, synthetic construct
  source 1..20: mol_type = other RNA
ctccccagtctcagccgatg

SEQ ID NO: 3643 - RNA, 20 nt, synthetic construct
  source 1..20: mol_type = other RNA
ctccccatatctgggttcct

SEQ ID NO: 3644 - RNA, 20 nt, synthetic construct
  source 1..20: mol_type = other RNA
ctcccccaatgtcaggatcc

SEQ ID NO: 3645 - RNA, 20 nt, synthetic construct
  source 1..20: mol_type = other RNA
ctcccgtttcacttttttgc

SEQ ID NO: 3646 - RNA, 20 nt, synthetic construct
  source 1..20: mol_type = other RNA
ctccctcgtcttttaccagc

SEQ ID NO: 3647 - RNA, 20 nt, synthetic construct
  source 1..20: mol_type = other RNA
ctccctgcatattttggttt

SEQ ID NO: 3648 - RNA, 20 nt, synthetic construct
  source 1..20: mol_type = other RNA
ctccgggcatgttcaacagc

SEQ ID NO: 3649 - RNA, 20 nt, synthetic construct
  source 1..20: mol_type = other RNA
ctccttatcccactcatgag

SEQ ID NO: 3650 - RNA, 20 nt, synthetic construct
  source 1..20: mol_type = other RNA
ctccttggacacaagcagtt

SEQ ID NO: 3651 - RNA, 20 nt, synthetic construct
  source 1..20: mol_type = other RNA
ctccttgttttggagatgca

SEQ ID NO: 3652 - RNA, 20 nt, synthetic construct
  source 1..20: mol_type = other RNA
ctcgctgtctgaccagacct

SEQ ID NO: 3653 - RNA, 20 nt, synthetic construct
  source 1..20: mol_type = other RNA
ctcgggtcacagggccttac

SEQ ID NO: 3654 - RNA, 20 nt, synthetic construct
  source 1..20: mol_type = other RNA
ctcgtcttttaccagcataa

SEQ ID NO: 3655 - RNA, 20 nt, synthetic construct
  source 1..20: mol_type = other RNA
ctctacagaagcagccacca

SEQ ID NO: 3656 - RNA, 20 nt, synthetic construct
  source 1..20: mol_type = other RNA
ctctagattaccacccaatc

SEQ ID NO: 3657 - RNA, 20 nt, synthetic construct
  source 1..20: mol_type = other RNA
ctctcttaccctgtccacag

SEQ ID NO: 3658 - RNA, 20 nt, synthetic construct
  source 1..20: mol_type = other RNA
ctctcttcatgccctgcatc

SEQ ID NO: 3659 - RNA, 20 nt, synthetic construct
  source 1..20: mol_type = other RNA
ctctgaagtttcatgtggct

SEQ ID NO: 3660 - RNA, 20 nt, synthetic construct
  source 1..20: mol_type = other RNA
ctctgcaccagaagccacac

SEQ ID NO: 3661 - RNA, 20 nt, synthetic construct
  source 1..20: mol_type = other RNA
ctctgctcgctgtctgacca

SEQ ID NO: 3662 - RNA, 20 nt, synthetic construct
  source 1..20: mol_type = other RNA
ctctgctgctgctggggctg

SEQ ID NO: 3663 - RNA, 20 nt, synthetic construct
  source 1..20: mol_type = other RNA
ctctggctatttccaaacct

SEQ ID NO: 3664 - RNA, 20 nt, synthetic construct
  source 1..20: mol_type = other RNA
ctctgtctaagctcagtcta

SEQ ID NO: 3665 - RNA, 20 nt, synthetic construct
  source 1..20: mol_type = other RNA
ctctgtctgagggtgatgtg

SEQ ID NO: 3666 - RNA, 20 nt, synthetic construct
  source 1..20: mol_type = other RNA
ctcttaaccatgatagaact

SEQ ID NO: 3667 - RNA, 20 nt, synthetic construct
  source 1..20: mol_type = other RNA
ctcttaccctgtccacagaa

SEQ ID NO: 3668 - RNA, 20 nt, synthetic construct
  source 1..20: mol_type = other RNA
ctcttatgctggtaaaagac

SEQ ID NO: 3669 - RNA, 20 nt, synthetic construct
  source 1..20: mol_type = other RNA
ctcttattctgcttctggat

SEQ ID NO: 3670 - RNA, 20 nt, synthetic construct
  source 1..20: mol_type = other RNA
ctcttcacacacttcagata

SEQ ID NO: 3671 - RNA, 20 nt, synthetic construct
  source 1..20: mol_type = other RNA
ctcttcatgccctgcatctc

SEQ ID NO: 3672 - RNA, 20 nt, synthetic construct
  source 1..20: mol_type = other RNA
ctcttcctctttctcacggg

SEQ ID NO: 3673 - RNA, 20 nt, synthetic construct
  source 1..20: mol_type = other RNA
ctcttgccgaaaggaccatg

SEQ ID NO: 3674 - RNA, 20 nt, synthetic construct
  source 1..20: mol_type = other RNA
ctctttctcacgggcttttt

SEQ ID NO: 3675 - RNA, 20 nt, synthetic construct
  source 1..20: mol_type = other RNA
ctctttgggaagccaaaatg

SEQ ID NO: 3676 - RNA, 20 nt, synthetic construct
  source 1..20: mol_type = other RNA
ctgaaaaagcccgtgagaaa

SEQ ID NO: 3677 - RNA, 20 nt, synthetic construct
  source 1..20: mol_type = other RNA
ctgaaaccatctccctgcat

SEQ ID NO: 3678 - RNA, 20 nt, synthetic construct
  source 1..20: mol_type = other RNA
ctgaaagtcgcaaaagttct

SEQ ID NO: 3679 - RNA, 20 nt, synthetic construct
  source 1..20: mol_type = other RNA
ctgaagtgtgtgaagagttt

SEQ ID NO: 3680 - RNA, 20 nt, synthetic construct
  source 1..20: mol_type = other RNA
ctgaagtttcatgtggctca

SEQ ID NO: 3681 - RNA, 20 nt, synthetic construct
  source 1..20: mol_type = other RNA
ctgacattgggggagtggcc

SEQ ID NO: 3682 - RNA, 20 nt, synthetic construct
  source 1..20: mol_type = other RNA
ctgaccagacctcatcgttg

SEQ ID NO: 3683 - RNA, 20 nt, synthetic construct
  source 1..20: mol_type = other RNA
ctgaccattagcatcactta

SEQ ID NO: 3684 - RNA, 20 nt, synthetic construct
  source 1..20: mol_type = other RNA
ctgagactggggagaatagg

SEQ ID NO: 3685 - RNA, 20 nt, synthetic construct
  source 1..20: mol_type = other RNA
ctgagcaatccaaacatgga

SEQ ID NO: 3686 - RNA, 20 nt, synthetic construct
  source 1..20: mol_type = other RNA
ctgagccacatgaaacttca

SEQ ID NO: 3687 - RNA, 20 nt, synthetic construct
  source 1..20: mol_type = other RNA
ctgagcttagacagagggtc

SEQ ID NO: 3688 - RNA, 20 nt, synthetic construct
  source 1..20: mol_type = other RNA
ctgaggcacatagtctgggc

SEQ ID NO: 3689 - RNA, 20 nt, synthetic construct
  source 1..20: mol_type = other RNA
ctgagggtgatgtggctgct

SEQ ID NO: 3690 - RNA, 20 nt, synthetic construct
  source 1..20: mol_type = other RNA
ctgataggtttccattgcat

SEQ ID NO: 3691 - RNA, 20 nt, synthetic construct
  source 1..20: mol_type = other RNA
ctgattcaaaagcccagggt

SEQ ID NO: 3692 - RNA, 20 nt, synthetic construct
  source 1..20: mol_type = other RNA
ctgcaccagaagccacaccc

SEQ ID NO: 3693 - RNA, 20 nt, synthetic construct
  source 1..20: mol_type = other RNA
ctgcactgtagttatggatt

SEQ ID NO: 3694 - RNA, 20 nt, synthetic construct
  source 1..20: mol_type = other RNA
ctgcagcttgagatgaggtg

SEQ ID NO: 3695 - RNA, 20 nt, synthetic construct
  source 1..20: mol_type = other RNA
ctgcaggttcatatttgaat

SEQ ID NO: 3696 - RNA, 20 nt, synthetic construct
  source 1..20: mol_type = other RNA
ctgcatattttggtttccat

SEQ ID NO: 3697 - RNA, 20 nt, synthetic construct
  source 1..20: mol_type = other RNA
ctgcatctccaaaacaagga

SEQ ID NO: 3698 - RNA, 20 nt, synthetic construct
  source 1..20: mol_type = other RNA
ctgcatgactggtcctgaaa

SEQ ID NO: 3699 - RNA, 20 nt, synthetic construct
  source 1..20: mol_type = other RNA
ctgcatgccacaaccccttt

SEQ ID NO: 3700 - RNA, 20 nt, synthetic construct
  source 1..20: mol_type = other RNA
ctgcgtttcatcaagtctct

SEQ ID NO: 3701 - RNA, 20 nt, synthetic construct
  source 1..20: mol_type = other RNA
ctgctccccatatctgggtt

SEQ ID NO: 3702 - RNA, 20 nt, synthetic construct
  source 1..20: mol_type = other RNA
ctgctcgctgtctgaccaga

SEQ ID NO: 3703 - RNA, 20 nt, synthetic construct
  source 1..20: mol_type = other RNA
ctgctgaaaccatctccctg

SEQ ID NO: 3704 - RNA, 20 nt, synthetic construct
  source 1..20: mol_type = other RNA
ctgctgagccacatgaaact

SEQ ID NO: 3705 - RNA, 20 nt, synthetic construct
  source 1..20: mol_type = other RNA
ctgctgcatgactggtcctg

SEQ ID NO: 3706 - RNA, 20 nt, synthetic construct
  source 1..20: mol_type = other RNA
ctgctgctgctggggctgtg

SEQ ID NO: 3707 - RNA, 20 nt, synthetic construct
  source 1..20: mol_type = other RNA
ctgctgctgctggggtctct

SEQ ID NO: 3708 - RNA, 20 nt, synthetic construct
  source 1..20: mol_type = other RNA
ctgctgctggggctgtggtg

SEQ ID NO: 3709 - RNA, 20 nt, synthetic construct
  source 1..20: mol_type = other RNA
ctgctgctggggtctctgct

SEQ ID NO: 3710 - RNA, 20 nt, synthetic construct
  source 1..20: mol_type = other RNA
ctgctgggactgctgcatga

SEQ ID NO: 3711 - RNA, 20 nt, synthetic construct
  source 1..20: mol_type = other RNA
ctgctggggctgtggtggct

SEQ ID NO: 3712 - RNA, 20 nt, synthetic construct
  source 1..20: mol_type = other RNA
ctgctggggtctctgctgct

SEQ ID NO: 3713 - RNA, 20 nt, synthetic construct
  source 1..20: mol_type = other RNA
ctgcttctggatccaccaat

SEQ ID NO: 3714 - RNA, 20 nt, synthetic construct
  source 1..20: mol_type = other RNA
ctgcttctgtagaggctggg

SEQ ID NO: 3715 - RNA, 20 nt, synthetic construct
  source 1..20: mol_type = other RNA
ctgcttgtgtccaaggaggc

SEQ ID NO: 3716 - RNA, 20 nt, synthetic construct
  source 1..20: mol_type = other RNA
ctgcttttcctgaccattag

SEQ ID NO: 3717 - RNA, 20 nt, synthetic construct
  source 1..20: mol_type = other RNA
ctggaagcatctttgataac

SEQ ID NO: 3718 - RNA, 20 nt, synthetic construct
  source 1..20: mol_type = other RNA
ctggactagtgccaatggct

SEQ ID NO: 3719 - RNA, 20 nt, synthetic construct
  source 1..20: mol_type = other RNA
ctggatccaccaatccatac

SEQ ID NO: 3720 - RNA, 20 nt, synthetic construct
  source 1..20: mol_type = other RNA
ctggatcctgacattggggg

SEQ ID NO: 3721 - RNA, 20 nt, synthetic construct
  source 1..20: mol_type = other RNA
ctggattgggccgtctcatg

SEQ ID NO: 3722 - RNA, 20 nt, synthetic construct
  source 1..20: mol_type = other RNA
ctggctatttccaaaccttg

SEQ ID NO: 3723 - RNA, 20 nt, synthetic construct
  source 1..20: mol_type = other RNA
ctgggactgctgcatgactg

SEQ ID NO: 3724 - RNA, 20 nt, synthetic construct
  source 1..20: mol_type = other RNA
ctgggccatacttttcacac

SEQ ID NO: 3725 - RNA, 20 nt, synthetic construct
  source 1..20: mol_type = other RNA
ctgggcttttgaatcagaat

SEQ ID NO: 3726 - RNA, 20 nt, synthetic construct
  source 1..20: mol_type = other RNA
ctggggagaataggaaccca

SEQ ID NO: 3727 - RNA, 20 nt, synthetic construct
  source 1..20: mol_type = other RNA
ctggggctgctgggactgct

SEQ ID NO: 3728 - RNA, 20 nt, synthetic construct
  source 1..20: mol_type = other RNA
ctggggctgtggtggctgct

SEQ ID NO: 3729 - RNA, 20 nt, synthetic construct
  source 1..20: mol_type = other RNA
ctggggtctctgctgctgct

SEQ ID NO: 3730 - RNA, 20 nt, synthetic construct
  source 1..20: mol_type = other RNA
ctgggttcctattctcccca

SEQ ID NO: 3731 - RNA, 20 nt, synthetic construct
  source 1..20: mol_type = other RNA
ctggtaaaagacgagggaga

SEQ ID NO: 3732 - RNA, 20 nt, synthetic construct
  source 1..20: mol_type = other RNA
ctggtaaagtgtatggatgg

SEQ ID NO: 3733 - RNA, 20 nt, synthetic construct
  source 1..20: mol_type = other RNA
ctggtcagacagcgagcaga

SEQ ID NO: 3734 - RNA, 20 nt, synthetic construct
  source 1..20: mol_type = other RNA
ctggtcctgaaagtcgcaaa

SEQ ID NO: 3735 - RNA, 20 nt, synthetic construct
  source 1..20: mol_type = other RNA
ctggtgcagaggacaacgat

SEQ ID NO: 3736 - RNA, 20 nt, synthetic construct
  source 1..20: mol_type = other RNA
ctggtgcttccatagatatc

SEQ ID NO: 3737 - RNA, 20 nt, synthetic construct
  source 1..20: mol_type = other RNA
ctggtggggtgattcctatt

SEQ ID NO: 3738 - RNA, 20 nt, synthetic construct
  source 1..20: mol_type = other RNA
ctgtagaggctggggctgct

SEQ ID NO: 3739 - RNA, 20 nt, synthetic construct
  source 1..20: mol_type = other RNA
ctgtagttatggattatgtg

SEQ ID NO: 3740 - RNA, 20 nt, synthetic construct
  source 1..20: mol_type = other RNA
ctgtataggtatccaagcca

SEQ ID NO: 3741 - RNA, 20 nt, synthetic construct
  source 1..20: mol_type = other RNA
ctgtcaactcttattctgct

SEQ ID NO: 3742 - RNA, 20 nt, synthetic construct
  source 1..20: mol_type = other RNA
ctgtccacagaacttttgcg

SEQ ID NO: 3743 - RNA, 20 nt, synthetic construct
  source 1..20: mol_type = other RNA
ctgtctaagctcagtctacc

SEQ ID NO: 3744 - RNA, 20 nt, synthetic construct
  source 1..20: mol_type = other RNA
ctgtctgaccagacctcatc

SEQ ID NO: 3745 - RNA, 20 nt, synthetic construct
  source 1..20: mol_type = other RNA
ctgtctgagggtgatgtggc

SEQ ID NO: 3746 - RNA, 20 nt, synthetic construct
  source 1..20: mol_type = other RNA
ctgtgacccgagtgaaggca

SEQ ID NO: 3747 - RNA, 20 nt, synthetic construct
  source 1..20: mol_type = other RNA
ctgtggacagggtaagagag

SEQ ID NO: 3748 - RNA, 20 nt, synthetic construct
  source 1..20: mol_type = other RNA
ctgtggagtctgtggtcacg

SEQ ID NO: 3749 - RNA, 20 nt, synthetic construct
  source 1..20: mol_type = other RNA
ctgtggtcacggacatggtc

SEQ ID NO: 3750 - RNA, 20 nt, synthetic construct
  source 1..20: mol_type = other RNA
ctgtggtggctgcttctgta

SEQ ID NO: 3751 - RNA, 20 nt, synthetic construct
  source 1..20: mol_type = other RNA
ctgtgtgggaaagcatgtca

SEQ ID NO: 3752 - RNA, 20 nt, synthetic construct
  source 1..20: mol_type = other RNA
ctgttctctcttaccctgtc

SEQ ID NO: 3753 - RNA, 20 nt, synthetic construct
  source 1..20: mol_type = other RNA
ctgttgaacatgcccggagc

SEQ ID NO: 3754 - RNA, 20 nt, synthetic construct
  source 1..20: mol_type = other RNA
ctgttgtaaggccctgtgac

SEQ ID NO: 3755 - RNA, 20 nt, synthetic construct
  source 1..20: mol_type = other RNA
ctgtttctgttctctcttac

SEQ ID NO: 3756 - RNA, 20 nt, synthetic construct
  source 1..20: mol_type = other RNA
cttaaccatgatagaactgc

SEQ ID NO: 3757 - RNA, 20 nt, synthetic construct
  source 1..20: mol_type = other RNA
cttaatttgtgtaagcctcc

SEQ ID NO: 3758 - RNA, 20 nt, synthetic construct
  source 1..20: mol_type = other RNA
cttacaacagatatatatga

SEQ ID NO: 3759 - RNA, 20 nt, synthetic construct
  source 1..20: mol_type = other RNA
cttacacaaattaagtgatg

SEQ ID NO: 3760 - RNA, 20 nt, synthetic construct
  source 1..20: mol_type = other RNA
cttaccctgggcttttgaat

SEQ ID NO: 3761 - RNA, 20 nt, synthetic construct
  source 1..20: mol_type = other RNA
cttaccctgtccacagaact

SEQ ID NO: 3762 - RNA, 20 nt, synthetic construct
  source 1..20: mol_type = other RNA
cttacctgcgtttcatcaag

SEQ ID NO: 3763 - RNA, 20 nt, synthetic construct
  source 1..20: mol_type = other RNA
cttagacagagggtcttggc

SEQ ID NO: 3764 - RNA, 20 nt, synthetic construct
  source 1..20: mol_type = other RNA
cttaggttatggaaaccaaa

SEQ ID NO: 3765 - RNA, 20 nt, synthetic construct
  source 1..20: mol_type = other RNA
cttatccaaactcttcacac

SEQ ID NO: 3766 - RNA, 20 nt, synthetic construct
  source 1..20: mol_type = other RNA
cttatcccactcatgagatg

SEQ ID NO: 3767 - RNA, 20 nt, synthetic construct
  source 1..20: mol_type = other RNA
cttatgctggtaaaagacga

SEQ ID NO: 3768 - RNA, 20 nt, synthetic construct
  source 1..20: mol_type = other RNA
cttattctgcttctggatcc

SEQ ID NO: 3769 - RNA, 20 nt, synthetic construct
  source 1..20: mol_type = other RNA
cttcacacacttcagatatc

SEQ ID NO: 3770 - RNA, 20 nt, synthetic construct
  source 1..20: mol_type = other RNA
cttcactcgggtcacagggc

SEQ ID NO: 3771 - RNA, 20 nt, synthetic construct
  source 1..20: mol_type = other RNA
cttcagagcccacttacctg

SEQ ID NO: 3772 - RNA, 20 nt, synthetic construct
  source 1..20: mol_type = other RNA
cttcagatatctatggaagc

SEQ ID NO: 3773 - RNA, 20 nt, synthetic construct
  source 1..20: mol_type = other RNA
cttcatgccctgcatctcca

SEQ ID NO: 3774 - RNA, 20 nt, synthetic construct
  source 1..20: mol_type = other RNA
cttcatgggagccacctcta

SEQ ID NO: 3775 - RNA, 20 nt, synthetic construct
  source 1..20: mol_type = other RNA
cttccagctcttaaccatga

SEQ ID NO: 3776 - RNA, 20 nt, synthetic construct
  source 1..20: mol_type = other RNA
cttccatagatatctgaagt

SEQ ID NO: 3777 - RNA, 20 nt, synthetic construct
  source 1..20: mol_type = other RNA
cttcccaaagagccaagcca

SEQ ID NO: 3778 - RNA, 20 nt, synthetic construct
  source 1..20: mol_type = other RNA
cttcctctttctcacgggct

SEQ ID NO: 3779 - RNA, 20 nt, synthetic construct
  source 1..20: mol_type = other RNA
cttctaatcccatgaaccct

SEQ ID NO: 3780 - RNA, 20 nt, synthetic construct
  source 1..20: mol_type = other RNA
cttctattccacctcatctc

SEQ ID NO: 3781 - RNA, 20 nt, synthetic construct
  source 1..20: mol_type = other RNA
cttctcacataatccataac

SEQ ID NO: 3782 - RNA, 20 nt, synthetic construct
  source 1..20: mol_type = other RNA
cttctggatccaccaatcca

SEQ ID NO: 3783 - RNA, 20 nt, synthetic construct
  source 1..20: mol_type = other RNA
cttctggtgcagaggacaac

SEQ ID NO: 3784 - RNA, 20 nt, synthetic construct
  source 1..20: mol_type = other RNA
cttctgtagaggctggggct

SEQ ID NO: 3785 - RNA, 20 nt, synthetic construct
  source 1..20: mol_type = other RNA
cttgagatgaggtggaatag

SEQ ID NO: 3786 - RNA, 20 nt, synthetic construct
  source 1..20: mol_type = other RNA
cttgatgaaacgcaggtaag

SEQ ID NO: 3787 - RNA, 20 nt, synthetic construct
  source 1..20: mol_type = other RNA
cttgccgaaaggaccatgtc

SEQ ID NO: 3788 - RNA, 20 nt, synthetic construct
  source 1..20: mol_type = other RNA
cttggacacaagcagttcta

SEQ ID NO: 3789 - RNA, 20 nt, synthetic construct
  source 1..20: mol_type = other RNA
cttggatacctatacagatc

SEQ ID NO: 3790 - RNA, 20 nt, synthetic construct
  source 1..20: mol_type = other RNA
cttggctctttgggaagcca

SEQ ID NO: 3791 - RNA, 20 nt, synthetic construct
  source 1..20: mol_type = other RNA
cttggctggtaaagtgtatg

SEQ ID NO: 3792 - RNA, 20 nt, synthetic construct
  source 1..20: mol_type = other RNA
cttggcttggatacctatac

SEQ ID NO: 3793 - RNA, 20 nt, synthetic construct
  source 1..20: mol_type = other RNA
cttgtgtccaaggaggctta

SEQ ID NO: 3794 - RNA, 20 nt, synthetic construct
  source 1..20: mol_type = other RNA
cttgttttggagatgcaggg

SEQ ID NO: 3795 - RNA, 20 nt, synthetic construct
  source 1..20: mol_type = other RNA
ctttaaagaatcccaatagg

SEQ ID NO: 3796 - RNA, 20 nt, synthetic construct
  source 1..20: mol_type = other RNA
ctttaaaggggttgtggcat

SEQ ID NO: 3797 - RNA, 20 nt, synthetic construct
  source 1..20: mol_type = other RNA
ctttaccagccaaggtttgg

SEQ ID NO: 3798 - RNA, 20 nt, synthetic construct
  source 1..20: mol_type = other RNA
ctttcaggaccagtcatgca

SEQ ID NO: 3799 - RNA, 20 nt, synthetic construct
  source 1..20: mol_type = other RNA
ctttcccacacagctaatgg

SEQ ID NO: 3800 - RNA, 20 nt, synthetic construct
  source 1..20: mol_type = other RNA
ctttcggcaagagacttgat

SEQ ID NO: 3801 - RNA, 20 nt, synthetic construct
  source 1..20: mol_type = other RNA
ctttctcacgggctttttca

SEQ ID NO: 3802 - RNA, 20 nt, synthetic construct
  source 1..20: mol_type = other RNA
ctttctggatcctgacattg

SEQ ID NO: 3803 - RNA, 20 nt, synthetic construct
  source 1..20: mol_type = other RNA
ctttgataacccattagctg

SEQ ID NO: 3804 - RNA, 20 nt, synthetic construct
  source 1..20: mol_type = other RNA
ctttgcacactcaatgagaa

SEQ ID NO: 3805 - RNA, 20 nt, synthetic construct
  source 1..20: mol_type = other RNA
ctttgggaagccaaaatggc

SEQ ID NO: 3806 - RNA, 20 nt, synthetic construct
  source 1..20: mol_type = other RNA
cttttaccagcataagagca

SEQ ID NO: 3807 - RNA, 20 nt, synthetic construct
  source 1..20: mol_type = other RNA
cttttcaagtgaggtaacca

SEQ ID NO: 3808 - RNA, 20 nt, synthetic construct
  source 1..20: mol_type = other RNA
cttttcacactcttcctctt

SEQ ID NO: 3809 - RNA, 20 nt, synthetic construct
  source 1..20: mol_type = other RNA
cttttcctgaccattagcat

SEQ ID NO: 3810 - RNA, 20 nt, synthetic construct
  source 1..20: mol_type = other RNA
cttttgaatcagaataccca

SEQ ID NO: 3811 - RNA, 20 nt, synthetic construct
  source 1..20: mol_type = other RNA
cttttgcgactttcaggacc

SEQ ID NO: 3812 - RNA, 20 nt, synthetic construct
  source 1..20: mol_type = other RNA
cttttgttggttacctcact

SEQ ID NO: 3813 - RNA, 20 nt, synthetic construct
  source 1..20: mol_type = other RNA
ctttttcagccattttggct

SEQ ID NO: 3814 - RNA, 20 nt, synthetic construct
  source 1..20: mol_type = other RNA
cttttttgccatgggatttc

SEQ ID NO: 3815 - RNA, 20 nt, synthetic construct
  source 1..20: mol_type = other RNA
gaaaaagcccgtgagaaaga

SEQ ID NO: 3816 - RNA, 20 nt, synthetic construct
  source 1..20: mol_type = other RNA
gaaaagcagccattggcact

SEQ ID NO: 3817 - RNA, 20 nt, synthetic construct
  source 1..20: mol_type = other RNA
gaaaagtatggcccagacta

SEQ ID NO: 3818 - RNA, 20 nt, synthetic construct
  source 1..20: mol_type = other RNA
gaaaccaaaatatgcaggga

SEQ ID NO: 3819 - RNA, 20 nt, synthetic construct
  source 1..20: mol_type = other RNA
gaaaccatctccctgcatat

SEQ ID NO: 3820 - RNA, 20 nt, synthetic construct
  source 1..20: mol_type = other RNA
gaaacctatcagtggacaac

SEQ ID NO: 3821 - RNA, 20 nt, synthetic construct
  source 1..20: mol_type = other RNA
gaaacgcaggtaagtgggct

SEQ ID NO: 3822 - RNA, 20 nt, synthetic construct
  source 1..20: mol_type = other RNA
gaaacgggagcctgctgagc

SEQ ID NO: 3823 - RNA, 20 nt, synthetic construct
  source 1..20: mol_type = other RNA
gaaacttcagagcccactta

SEQ ID NO: 3824 - RNA, 20 nt, synthetic construct
  source 1..20: mol_type = other RNA
gaaagaggaagagtgtgaaa

SEQ ID NO: 3825 - RNA, 20 nt, synthetic construct
  source 1..20: mol_type = other RNA
gaaagcatgtcattctcctt

SEQ ID NO: 3826 - RNA, 20 nt, synthetic construct
  source 1..20: mol_type = other RNA
gaaagctctgctcgctgtct

SEQ ID NO: 3827 - RNA, 20 nt, synthetic construct
  source 1..20: mol_type = other RNA
gaaaggaccatgtccgtgac

SEQ ID NO: 3828 - RNA, 20 nt, synthetic construct
  source 1..20: mol_type = other RNA
gaaagtcgcaaaagttctgt

SEQ ID NO: 3829 - RNA, 20 nt, synthetic construct
  source 1..20: mol_type = other RNA
gaaatagccagagttttaca

SEQ ID NO: 3830 - RNA, 20 nt, synthetic construct
  source 1..20: mol_type = other RNA
gaaatcccatggcaaaaaag

SEQ ID NO: 3831 - RNA, 20 nt, synthetic construct
  source 1..20: mol_type = other RNA
gaaattgcctccttatccca

SEQ ID NO: 3832 - RNA, 20 nt, synthetic construct
  source 1..20: mol_type = other RNA
gaacatcattcaccttctca

SEQ ID NO: 3833 - RNA, 20 nt, synthetic construct
  source 1..20: mol_type = other RNA
gaacatgcccggagctgcac

SEQ ID NO: 3834 - RNA, 20 nt, synthetic construct
  source 1..20: mol_type = other RNA
gaacccagatatggggagca

SEQ ID NO: 3835 - RNA, 20 nt, synthetic construct
  source 1..20: mol_type = other RNA
gaacccttaccctgggcttt

SEQ ID NO: 3836 - RNA, 20 nt, synthetic construct
  source 1..20: mol_type = other RNA
gaacctgcagcttgagatga

SEQ ID NO: 3837 - RNA, 20 nt, synthetic construct
  source 1..20: mol_type = other RNA
gaactgcttgtgtccaagga

SEQ ID NO: 3838 - RNA, 20 nt, synthetic construct
  source 1..20: mol_type = other RNA
gaacttctattccacctcat

SEQ ID NO: 3839 - RNA, 20 nt, synthetic construct
  source 1..20: mol_type = other RNA
gaacttttgcgactttcagg

SEQ ID NO: 3840 - RNA, 20 nt, synthetic construct
  source 1..20: mol_type = other RNA
gaagaattcaaatatgaacc

SEQ ID NO: 3841 - RNA, 20 nt, synthetic construct
  source 1..20: mol_type = other RNA
gaagagagctgttgaacatg

SEQ ID NO: 3842 - RNA, 20 nt, synthetic construct
  source 1..20: mol_type = other RNA
gaagagtgtgaaaagtatgg

SEQ ID NO: 3843 - RNA, 20 nt, synthetic construct
  source 1..20: mol_type = other RNA
gaagagtttggataaggact

SEQ ID NO: 3844 - RNA, 20 nt, synthetic construct
  source 1..20: mol_type = other RNA
gaagcaccagccctatgaac

SEQ ID NO: 3845 - RNA, 20 nt, synthetic construct
  source 1..20: mol_type = other RNA
gaagcagaataagagttgac

SEQ ID NO: 3846 - RNA, 20 nt, synthetic construct
  source 1..20: mol_type = other RNA
gaagcagccaccacagcccc

SEQ ID NO: 3847 - RNA, 20 nt, synthetic construct
  source 1..20: mol_type = other RNA
gaagcatctttgataaccca

SEQ ID NO: 3848 - RNA, 20 nt, synthetic construct
  source 1..20: mol_type = other RNA
gaagccaaaatggctgaaaa

SEQ ID NO: 3849 - RNA, 20 nt, synthetic construct
  source 1..20: mol_type = other RNA
gaagccacaccctggactag

SEQ ID NO: 3850 - RNA, 20 nt, synthetic construct
  source 1..20: mol_type = other RNA
gaaggcatatggagatgtag

SEQ ID NO: 3851 - RNA, 20 nt, synthetic construct
  source 1..20: mol_type = other RNA
gaaggtgaatgatgttcacc

SEQ ID NO: 3852 - RNA, 20 nt, synthetic construct
  source 1..20: mol_type = other RNA
gaagtggccatccatctcat

SEQ ID NO: 3853 - RNA, 20 nt, synthetic construct
  source 1..20: mol_type = other RNA
gaagtgtgtgaagagtttgg

SEQ ID NO: 3854 - RNA, 20 nt, synthetic construct
  source 1..20: mol_type = other RNA
gaagttcatagggctggtgc

SEQ ID NO: 3855 - RNA, 20 nt, synthetic construct
  source 1..20: mol_type = other RNA
gaagtttcatgtggctcagc

SEQ ID NO: 3856 - RNA, 20 nt, synthetic construct
  source 1..20: mol_type = other RNA
gaataagagttgacagactc

SEQ ID NO: 3857 - RNA, 20 nt, synthetic construct
  source 1..20: mol_type = other RNA
gaatacccaatatccatcat

SEQ ID NO: 3858 - RNA, 20 nt, synthetic construct
  source 1..20: mol_type = other RNA
gaatagaagttcatagggct

SEQ ID NO: 3859 - RNA, 20 nt, synthetic construct
  source 1..20: mol_type = other RNA
gaataggaacccagatatgg

SEQ ID NO: 3860 - RNA, 20 nt, synthetic construct
  source 1..20: mol_type = other RNA
gaatcaccccaccaggatct

SEQ ID NO: 3861 - RNA, 20 nt, synthetic construct
  source 1..20: mol_type = other RNA
gaatcagaatacccaatatc

SEQ ID NO: 3862 - RNA, 20 nt, synthetic construct
  source 1..20: mol_type = other RNA
gaatcccaataggaatcacc

SEQ ID NO: 3863 - RNA, 20 nt, synthetic construct
  source 1..20: mol_type = other RNA
gaatgacatgctttcccaca

SEQ ID NO: 3864 - RNA, 20 nt, synthetic construct
  source 1..20: mol_type = other RNA
gaatgagccaaaacatggct

SEQ ID NO: 3865 - RNA, 20 nt, synthetic construct
  source 1..20: mol_type = other RNA
gaatgatgttcaccattttt

SEQ ID NO: 3866 - RNA, 20 nt, synthetic construct
  source 1..20: mol_type = other RNA
gaattcaaatatgaacctgc

SEQ ID NO: 3867 - RNA, 20 nt, synthetic construct
  source 1..20: mol_type = other RNA
gaattcttctaatcccatga

SEQ ID NO: 3868 - RNA, 20 nt, synthetic construct
  source 1..20: mol_type = other RNA
gaattgacccatgagttgga

SEQ ID NO: 3869 - RNA, 20 nt, synthetic construct
  source 1..20: mol_type = other RNA
gacaacgatgaggtctggtc

SEQ ID NO: 3870 - RNA, 20 nt, synthetic construct
  source 1..20: mol_type = other RNA
gacaactgctccccatatct

SEQ ID NO: 3871 - RNA, 20 nt, synthetic construct
  source 1..20: mol_type = other RNA
gacacaagcagttctatcat

SEQ ID NO: 3872 - RNA, 20 nt, synthetic construct
  source 1..20: mol_type = other RNA
gacagactctgtctgagggt

SEQ ID NO: 3873 - RNA, 20 nt, synthetic construct
  source 1..20: mol_type = other RNA
gacagagggtcttggcttgg

SEQ ID NO: 3874 - RNA, 20 nt, synthetic construct
  source 1..20: mol_type = other RNA
gacagagtctgtcaactctt

SEQ ID NO: 3875 - RNA, 20 nt, synthetic construct
  source 1..20: mol_type = other RNA
gacagcgagcagagctttct

SEQ ID NO: 3876 - RNA, 20 nt, synthetic construct
  source 1..20: mol_type = other RNA
gacagggtaagagagaacag

SEQ ID NO: 3877 - RNA, 20 nt, synthetic construct
  source 1..20: mol_type = other RNA
gacatgctttcccacacagc

SEQ ID NO: 3878 - RNA, 20 nt, synthetic construct
  source 1..20: mol_type = other RNA
gacatggtcctttcggcaag

SEQ ID NO: 3879 - RNA, 20 nt, synthetic construct
  source 1..20: mol_type = other RNA
gacattgggggagtggccgt

SEQ ID NO: 3880 - RNA, 20 nt, synthetic construct
  source 1..20: mol_type = other RNA
gaccaaatgtacatcatgta

SEQ ID NO: 3881 - RNA, 20 nt, synthetic construct
  source 1..20: mol_type = other RNA
gaccacagactccacagtaa

SEQ ID NO: 3882 - RNA, 20 nt, synthetic construct
  source 1..20: mol_type = other RNA
gaccagacctcatcgttgtc

SEQ ID NO: 3883 - RNA, 20 nt, synthetic construct
  source 1..20: mol_type = other RNA
gaccagtcatgcagcagtcc

SEQ ID NO: 3884 - RNA, 20 nt, synthetic construct
  source 1..20: mol_type = other RNA
gaccatgtccgtgaccacag

SEQ ID NO: 3885 - RNA, 20 nt, synthetic construct
  source 1..20: mol_type = other RNA
gaccattagcatcacttaat

SEQ ID NO: 3886 - RNA, 20 nt, synthetic construct
  source 1..20: mol_type = other RNA
gacccatgagttggagccac

SEQ ID NO: 3887 - RNA, 20 nt, synthetic construct
  source 1..20: mol_type = other RNA
gaccccagcagcagcagcca

SEQ ID NO: 3888 - RNA, 20 nt, synthetic construct
  source 1..20: mol_type = other RNA
gacccgagtgaaggcatatg

SEQ ID NO: 3889 - RNA, 20 nt, synthetic construct
  source 1..20: mol_type = other RNA
gaccctctgtctaagctcag

SEQ ID NO: 3890 - RNA, 20 nt, synthetic construct
  source 1..20: mol_type = other RNA
gacctcatcgttgtcctctg

SEQ ID NO: 3891 - RNA, 20 nt, synthetic construct
  source 1..20: mol_type = other RNA
gacgagggagatcctggtgg

SEQ ID NO: 3892 - RNA, 20 nt, synthetic construct
  source 1..20: mol_type = other RNA
gacggcccaatccagttagt

SEQ ID NO: 3893 - RNA, 20 nt, synthetic construct
  source 1..20: mol_type = other RNA
gactaactggattgggccgt

SEQ ID NO: 3894 - RNA, 20 nt, synthetic construct
  source 1..20: mol_type = other RNA
gactagtgccaatggctgct

SEQ ID NO: 3895 - RNA, 20 nt, synthetic construct
  source 1..20: mol_type = other RNA
gactataaaaatggtgaaca

SEQ ID NO: 3896 - RNA, 20 nt, synthetic construct
  source 1..20: mol_type = other RNA
gactatgtgcctcagaaatc

SEQ ID NO: 3897 - RNA, 20 nt, synthetic construct
  source 1..20: mol_type = other RNA
gactccacagtaactacatc

SEQ ID NO: 3898 - RNA, 20 nt, synthetic construct
  source 1..20: mol_type = other RNA
gactctgtctgagggtgatg

SEQ ID NO: 3899 - RNA, 20 nt, synthetic construct
  source 1..20: mol_type = other RNA
gactgagcttagacagaggg

SEQ ID NO: 3900 - RNA, 20 nt, synthetic construct
  source 1..20: mol_type = other RNA
gactgctgcatgactggtcc

SEQ ID NO: 3901 - RNA, 20 nt, synthetic construct
  source 1..20: mol_type = other RNA
gactggggagaataggaacc

SEQ ID NO: 3902 - RNA, 20 nt, synthetic construct
  source 1..20: mol_type = other RNA
gactggtcctgaaagtcgca

SEQ ID NO: 3903 - RNA, 20 nt, synthetic construct
  source 1..20: mol_type = other RNA
gacttgatgaaacgcaggta

SEQ ID NO: 3904 - RNA, 20 nt, synthetic construct
  source 1..20: mol_type = other RNA
gactttcaggaccagtcatg

SEQ ID NO: 3905 - RNA, 20 nt, synthetic construct
  source 1..20: mol_type = other RNA
gagaaagaggaagagtgtga

SEQ ID NO: 3906 - RNA, 20 nt, synthetic construct
  source 1..20: mol_type = other RNA
gagaaggtgaatgatgttca

SEQ ID NO: 3907 - RNA, 20 nt, synthetic construct
  source 1..20: mol_type = other RNA
gagaataggaacccagatat

SEQ ID NO: 3908 - RNA, 20 nt, synthetic construct
  source 1..20: mol_type = other RNA
gagaatgacatgctttccca

SEQ ID NO: 3909 - RNA, 20 nt, synthetic construct
  source 1..20: mol_type = other RNA
gagaattgacccatgagttg

SEQ ID NO: 3910 - RNA, 20 nt, synthetic construct
  source 1..20: mol_type = other RNA
gagaccccagcagcagcagc

SEQ ID NO: 3911 - RNA, 20 nt, synthetic construct
  source 1..20: mol_type = other RNA
gagacggcccaatccagtta

SEQ ID NO: 3912 - RNA, 20 nt, synthetic construct
  source 1..20: mol_type = other RNA
gagactggggagaataggaa

SEQ ID NO: 3913 - RNA, 20 nt, synthetic construct
  source 1..20: mol_type = other RNA
gagacttgatgaaacgcagg

SEQ ID NO: 3914 - RNA, 20 nt, synthetic construct
  source 1..20: mol_type = other RNA
gagagctgttgaacatgccc

SEQ ID NO: 3915 - RNA, 20 nt, synthetic construct
  source 1..20: mol_type = other RNA
gagatcctggtggggtgatt

SEQ ID NO: 3916 - RNA, 20 nt, synthetic construct
  source 1..20: mol_type = other RNA
gagatgaggtggaatagaag

SEQ ID NO: 3917 - RNA, 20 nt, synthetic construct
  source 1..20: mol_type = other RNA
gagatgcagggcatgaagag

SEQ ID NO: 3918 - RNA, 20 nt, synthetic construct
  source 1..20: mol_type = other RNA
gagatggatggccacttcat

SEQ ID NO: 3919 - RNA, 20 nt, synthetic construct
  source 1..20: mol_type = other RNA
gagatggtttcagcagttgt

SEQ ID NO: 3920 - RNA, 20 nt, synthetic construct
  source 1..20: mol_type = other RNA
gagatgtagttactgtggag

SEQ ID NO: 3921 - RNA, 20 nt, synthetic construct
  source 1..20: mol_type = other RNA
gagcaatccaaacatggact

SEQ ID NO: 3922 - RNA, 20 nt, synthetic construct
  source 1..20: mol_type = other RNA
gagcagagctttctggatcc

SEQ ID NO: 3923 - RNA, 20 nt, synthetic construct
  source 1..20: mol_type = other RNA
gagcagttgtccactgatag

SEQ ID NO: 3924 - RNA, 20 nt, synthetic construct
  source 1..20: mol_type = other RNA
gagcatgaatgagccaaaac

SEQ ID NO: 3925 - RNA, 20 nt, synthetic construct
  source 1..20: mol_type = other RNA
gagccaaaacatggcttggc

SEQ ID NO: 3926 - RNA, 20 nt, synthetic construct
  source 1..20: mol_type = other RNA
gagccaagccatgttttggc

SEQ ID NO: 3927 - RNA, 20 nt, synthetic construct
  source 1..20: mol_type = other RNA
gagccacatgaaacttcaga

SEQ ID NO: 3928 - RNA, 20 nt, synthetic construct
  source 1..20: mol_type = other RNA
gagccacctctagattacca

SEQ ID NO: 3929 - RNA, 20 nt, synthetic construct
  source 1..20: mol_type = other RNA
gagccacggccactccccca

SEQ ID NO: 3930 - RNA, 20 nt, synthetic construct
  source 1..20: mol_type = other RNA
gagcccacttacctgcgttt

SEQ ID NO: 3931 - RNA, 20 nt, synthetic construct
  source 1..20: mol_type = other RNA
gagcctgctgagccacatga

SEQ ID NO: 3932 - RNA, 20 nt, synthetic construct
  source 1..20: mol_type = other RNA
gagctgcactgtagttatgg

SEQ ID NO: 3933 - RNA, 20 nt, synthetic construct
  source 1..20: mol_type = other RNA
gagctgcatgccacaacccc

SEQ ID NO: 3934 - RNA, 20 nt, synthetic construct
  source 1..20: mol_type = other RNA
gagctggaagcatctttgat

SEQ ID NO: 3935 - RNA, 20 nt, synthetic construct
  source 1..20: mol_type = other RNA
gagctgttgaacatgcccgg

SEQ ID NO: 3936 - RNA, 20 nt, synthetic construct
  source 1..20: mol_type = other RNA
gagcttagacagagggtctt

SEQ ID NO: 3937 - RNA, 20 nt, synthetic construct
  source 1..20: mol_type = other RNA
gagctttctggatcctgaca

SEQ ID NO: 3938 - RNA, 20 nt, synthetic construct
  source 1..20: mol_type = other RNA
gaggaagagtgtgaaaagta

SEQ ID NO: 3939 - RNA, 20 nt, synthetic construct
  source 1..20: mol_type = other RNA
gaggacaacgatgaggtctg

SEQ ID NO: 3940 - RNA, 20 nt, synthetic construct
  source 1..20: mol_type = other RNA
gaggcaatttccctacatga

SEQ ID NO: 3941 - RNA, 20 nt, synthetic construct
  source 1..20: mol_type = other RNA
gaggcacatagtctgggcca

SEQ ID NO: 3942 - RNA, 20 nt, synthetic construct
  source 1..20: mol_type = other RNA
gaggctggggctgctgggac

SEQ ID NO: 3943 - RNA, 20 nt, synthetic construct
  source 1..20: mol_type = other RNA
gaggcttacacaaattaagt

SEQ ID NO: 3944 - RNA, 20 nt, synthetic construct
  source 1..20: mol_type = other RNA
gagggagatcctggtggggt

SEQ ID NO: 3945 - RNA, 20 nt, synthetic construct
  source 1..20: mol_type = other RNA
gagggtcttggcttggatac

SEQ ID NO: 3946 - RNA, 20 nt, synthetic construct
  source 1..20: mol_type = other RNA
gagggtgatgtggctgctgc

SEQ ID NO: 3947 - RNA, 20 nt, synthetic construct
  source 1..20: mol_type = other RNA
gaggtaaccaacaaaagggg

SEQ ID NO: 3948 - RNA, 20 nt, synthetic construct
  source 1..20: mol_type = other RNA
gaggtctggtcagacagcga

SEQ ID NO: 3949 - RNA, 20 nt, synthetic construct
  source 1..20: mol_type = other RNA
gaggtggaatagaagttcat

SEQ ID NO: 3950 - RNA, 20 nt, synthetic construct
  source 1..20: mol_type = other RNA
gaggtggctcccatgaagtg

SEQ ID NO: 3951 - RNA, 20 nt, synthetic construct
  source 1..20: mol_type = other RNA
gagtctgtcaactcttattc

SEQ ID NO: 3952 - RNA, 20 nt, synthetic construct
  source 1..20: mol_type = other RNA
gagtctgtggtcacggacat

SEQ ID NO: 3953 - RNA, 20 nt, synthetic construct
  source 1..20: mol_type = other RNA
gagtgaaggcatatggagat

SEQ ID NO: 3954 - RNA, 20 nt, synthetic construct
  source 1..20: mol_type = other RNA
gagtggccgtggctccaact

SEQ ID NO: 3955 - RNA, 20 nt, synthetic construct
  source 1..20: mol_type = other RNA
gagtgggataaggaggcaat

SEQ ID NO: 3956 - RNA, 20 nt, synthetic construct
  source 1..20: mol_type = other RNA
gagtgtgaaaagtatggccc

SEQ ID NO: 3957 - RNA, 20 nt, synthetic construct
  source 1..20: mol_type = other RNA
gagtgtgcaaagcgtgagct

SEQ ID NO: 3958 - RNA, 20 nt, synthetic construct
  source 1..20: mol_type = other RNA
gagttgacagactctgtctg

SEQ ID NO: 3959 - RNA, 20 nt, synthetic construct
  source 1..20: mol_type = other RNA
gagttggagccacggccact

SEQ ID NO: 3960 - RNA, 20 nt, synthetic construct
  source 1..20: mol_type = other RNA
gagtttggataaggactaac

SEQ ID NO: 3961 - RNA, 20 nt, synthetic construct
  source 1..20: mol_type = other RNA
gagttttacatctaaatact

SEQ ID NO: 3962 - RNA, 20 nt, synthetic construct
  source 1..20: mol_type = other RNA
gataacccattagctgtgtg

SEQ ID NO: 3963 - RNA, 20 nt, synthetic construct
  source 1..20: mol_type = other RNA
gataaggactaactggattg

SEQ ID NO: 3964 - RNA, 20 nt, synthetic construct
  source 1..20: mol_type = other RNA
gataaggaggcaatttccct

SEQ ID NO: 3965 - RNA, 20 nt, synthetic construct
  source 1..20: mol_type = other RNA
gatacctatacagatccatc

SEQ ID NO: 3966 - RNA, 20 nt, synthetic construct
  source 1..20: mol_type = other RNA
gatacctgtttctgttctct

SEQ ID NO: 3967 - RNA, 20 nt, synthetic construct
  source 1..20: mol_type = other RNA
gatagaactgcttgtgtcca

SEQ ID NO: 3968 - RNA, 20 nt, synthetic construct
  source 1..20: mol_type = other RNA
gataggtttccattgcattg

SEQ ID NO: 3969 - RNA, 20 nt, synthetic construct
  source 1..20: mol_type = other RNA
gatatatatgatatcacccc

SEQ ID NO: 3970 - RNA, 20 nt, synthetic construct
  source 1..20: mol_type = other RNA
gatatcacccccttttgttg

SEQ ID NO: 3971 - RNA, 20 nt, synthetic construct
  source 1..20: mol_type = other RNA
gatatcatatatatctgttg

SEQ ID NO: 3972 - RNA, 20 nt, synthetic construct
  source 1..20: mol_type = other RNA
gatatctatggaagcaccag

SEQ ID NO: 3973 - RNA, 20 nt, synthetic construct
  source 1..20: mol_type = other RNA
gatatctgaagtgtgtgaag

SEQ ID NO: 3974 - RNA, 20 nt, synthetic construct
  source 1..20: mol_type = other RNA
gatatgatggatattgggta

SEQ ID NO: 3975 - RNA, 20 nt, synthetic construct
  source 1..20: mol_type = other RNA
gatatggggagcagttgtcc

SEQ ID NO: 3976 - RNA, 20 nt, synthetic construct
  source 1..20: mol_type = other RNA
gatattgggtattctgattc

SEQ ID NO: 3977 - RNA, 20 nt, synthetic construct
  source 1..20: mol_type = other RNA
gatccaccaatccatacatg

SEQ ID NO: 3978 - RNA, 20 nt, synthetic construct
  source 1..20: mol_type = other RNA
gatccagaaagctctgctcg

SEQ ID NO: 3979 - RNA, 20 nt, synthetic construct
  source 1..20: mol_type = other RNA
gatccagaagcagaataaga

SEQ ID NO: 3980 - RNA, 20 nt, synthetic construct
  source 1..20: mol_type = other RNA
gatccatcggctgagactgg

SEQ ID NO: 3981 - RNA, 20 nt, synthetic construct
  source 1..20: mol_type = other RNA
gatcctgacattgggggagt

SEQ ID NO: 3982 - RNA, 20 nt, synthetic construct
  source 1..20: mol_type = other RNA
gatcctggtggggtgattcc

SEQ ID NO: 3983 - RNA, 20 nt, synthetic construct
  source 1..20: mol_type = other RNA
gatctccctcgtcttttacc

SEQ ID NO: 3984 - RNA, 20 nt, synthetic construct
  source 1..20: mol_type = other RNA
gatctgtataggtatccaag

SEQ ID NO: 3985 - RNA, 20 nt, synthetic construct
  source 1..20: mol_type = other RNA
gatgaaacgcaggtaagtgg

SEQ ID NO: 3986 - RNA, 20 nt, synthetic construct
  source 1..20: mol_type = other RNA
gatgaggtctggtcagacag

SEQ ID NO: 3987 - RNA, 20 nt, synthetic construct
  source 1..20: mol_type = other RNA
gatgaggtggaatagaagtt

SEQ ID NO: 3988 - RNA, 20 nt, synthetic construct
  source 1..20: mol_type = other RNA
gatgcagggcatgaagagag

SEQ ID NO: 3989 - RNA, 20 nt, synthetic construct
  source 1..20: mol_type = other RNA
gatgctaatggtcaggaaaa

SEQ ID NO: 3990 - RNA, 20 nt, synthetic construct
  source 1..20: mol_type = other RNA
gatgcttccagctcttaacc

SEQ ID NO: 3991 - RNA, 20 nt, synthetic construct
  source 1..20: mol_type = other RNA
gatggatattgggtattctg

SEQ ID NO: 3992 - RNA, 20 nt, synthetic construct
  source 1..20: mol_type = other RNA
gatggatctgtataggtatc

SEQ ID NO: 3993 - RNA, 20 nt, synthetic construct
  source 1..20: mol_type = other RNA
gatggatggccacttcatgg

SEQ ID NO: 3994 - RNA, 20 nt, synthetic construct
  source 1..20: mol_type = other RNA
gatggccacttcatgggagc

SEQ ID NO: 3995 - RNA, 20 nt, synthetic construct
  source 1..20: mol_type = other RNA
gatgggtggtagactgagct

SEQ ID NO: 3996 - RNA, 20 nt, synthetic construct
  source 1..20: mol_type = other RNA
gatggtttcagcagttgtac

SEQ ID NO: 3997 - RNA, 20 nt, synthetic construct
  source 1..20: mol_type = other RNA
gatgtaaaactctggctatt

SEQ ID NO: 3998 - RNA, 20 nt, synthetic construct
  source 1..20: mol_type = other RNA
gatgtacatttggtctaatg

SEQ ID NO: 3999 - RNA, 20 nt, synthetic construct
  source 1..20: mol_type = other RNA
gatgtagttactgtggagtc

SEQ ID NO: 4000 - RNA, 20 nt, synthetic construct
  source 1..20: mol_type = other RNA
gatgtggctgctgctgctgg

SEQ ID NO: 4001 - RNA, 20 nt, synthetic construct
  source 1..20: mol_type = other RNA
gatgttcaccatttttatag

SEQ ID NO: 4002 - RNA, 20 nt, synthetic construct
  source 1..20: mol_type = other RNA
gattaccacccaatctgagc

SEQ ID NO: 4003 - RNA, 20 nt, synthetic construct
  source 1..20: mol_type = other RNA
gattatgtgagaaggtgaat

SEQ ID NO: 4004 - RNA, 20 nt, synthetic construct
  source 1..20: mol_type = other RNA
gattcaaaagcccagggtaa

SEQ ID NO: 4005 - RNA, 20 nt, synthetic construct
  source 1..20: mol_type = other RNA
gattcctattgggattcttt

SEQ ID NO: 4006 - RNA, 20 nt, synthetic construct
  source 1..20: mol_type = other RNA
gattctttaaaggggttgtg

SEQ ID NO: 4007 - RNA, 20 nt, synthetic construct
  source 1..20: mol_type = other RNA
gattgctcagattgggtggt

SEQ ID NO: 4008 - RNA, 20 nt, synthetic construct
  source 1..20: mol_type = other RNA
gattgggccgtctcatgtat

SEQ ID NO: 4009 - RNA, 20 nt, synthetic construct
  source 1..20: mol_type = other RNA
gattgggtggtaatctagag

SEQ ID NO: 4010 - RNA, 20 nt, synthetic construct
  source 1..20: mol_type = other RNA
gattggtggatccagaagca

SEQ ID NO: 4011 - RNA, 20 nt, synthetic construct
  source 1..20: mol_type = other RNA
gatttctgaggcacatagtc

SEQ ID NO: 4012 - RNA, 20 nt, synthetic construct
  source 1..20: mol_type = other RNA
gcaaaaaagtgaaacgggag

SEQ ID NO: 4013 - RNA, 20 nt, synthetic construct
  source 1..20: mol_type = other RNA
gcaaaagttctgtggacagg

SEQ ID NO: 4014 - RNA, 20 nt, synthetic construct
  source 1..20: mol_type = other RNA
gcaaagcgtgagctgcatgc

SEQ ID NO: 4015 - RNA, 20 nt, synthetic construct
  source 1..20: mol_type = other RNA
gcaagagacttgatgaaacg

SEQ ID NO: 4016 - RNA, 20 nt, synthetic construct
  source 1..20: mol_type = other RNA
gcaatccaaacatggactat

SEQ ID NO: 4017 - RNA, 20 nt, synthetic construct
  source 1..20: mol_type = other RNA
gcaatggaaacctatcagtg

SEQ ID NO: 4018 - RNA, 20 nt, synthetic construct
  source 1..20: mol_type = other RNA
gcaatttccctacatgatgt

SEQ ID NO: 4019 - RNA, 20 nt, synthetic construct
  source 1..20: mol_type = other RNA
gcacactcaatgagaattga

SEQ ID NO: 4020 - RNA, 20 nt, synthetic construct
  source 1..20: mol_type = other RNA
gcacatagtctgggccatac

SEQ ID NO: 4021 - RNA, 20 nt, synthetic construct
  source 1..20: mol_type = other RNA
gcaccagaagccacaccctg

SEQ ID NO: 4022 - RNA, 20 nt, synthetic construct
  source 1..20: mol_type = other RNA
gcaccagccctatgaacttc

SEQ ID NO: 4023 - RNA, 20 nt, synthetic construct
  source 1..20: mol_type = other RNA
gcactagtccagggtgtggc

SEQ ID NO: 4024 - RNA, 20 nt, synthetic construct
  source 1..20: mol_type = other RNA
gcactgtagttatggattat

SEQ ID NO: 4025 - RNA, 20 nt, synthetic construct
  source 1..20: mol_type = other RNA
gcagaataagagttgacaga

SEQ ID NO: 4026 - RNA, 20 nt, synthetic construct
  source 1..20: mol_type = other RNA
gcagagaccccagcagcagc

SEQ ID NO: 4027 - RNA, 20 nt, synthetic construct
  source 1..20: mol_type = other RNA
gcagagctttctggatcctg

SEQ ID NO: 4028 - RNA, 20 nt, synthetic construct
  source 1..20: mol_type = other RNA
gcagaggacaacgatgaggt

SEQ ID NO: 4029 - RNA, 20 nt, synthetic construct
  source 1..20: mol_type = other RNA
gcagcagagaccccagcagc

SEQ ID NO: 4030 - RNA, 20 nt, synthetic construct
  source 1..20: mol_type = other RNA
gcagcagcagagaccccagc

SEQ ID NO: 4031 - RNA, 20 nt, synthetic construct
  source 1..20: mol_type = other RNA
gcagcagcagccacatcacc

SEQ ID NO: 4032 - RNA, 20 nt, synthetic construct
  source 1..20: mol_type = other RNA
gcagcagccacatcaccctc

SEQ ID NO: 4033 - RNA, 20 nt, synthetic construct
  source 1..20: mol_type = other RNA
gcagcagtcccagcagcccc

SEQ ID NO: 4034 - RNA, 20 nt, synthetic construct
  source 1..20: mol_type = other RNA
gcagccacatcaccctcaga

SEQ ID NO: 4035 - RNA, 20 nt, synthetic construct
  source 1..20: mol_type = other RNA
gcagccaccacagccccagc

SEQ ID NO: 4036 - RNA, 20 nt, synthetic construct
  source 1..20: mol_type = other RNA
gcagccattggcactagtcc

SEQ ID NO: 4037 - RNA, 20 nt, synthetic construct
  source 1..20: mol_type = other RNA
gcagccccagcctctacaga

SEQ ID NO: 4038 - RNA, 20 nt, synthetic construct
  source 1..20: mol_type = other RNA
gcagctcacgctttgcacac

SEQ ID NO: 4039 - RNA, 20 nt, synthetic construct
  source 1..20: mol_type = other RNA
gcagctccgggcatgttcaa

SEQ ID NO: 4040 - RNA, 20 nt, synthetic construct
  source 1..20: mol_type = other RNA
gcagcttgagatgaggtgga

SEQ ID NO: 4041 - RNA, 20 nt, synthetic construct
  source 1..20: mol_type = other RNA
gcaggctcccgtttcacttt

SEQ ID NO: 4042 - RNA, 20 nt, synthetic construct
  source 1..20: mol_type = other RNA
gcagggagatggtttcagca

SEQ ID NO: 4043 - RNA, 20 nt, synthetic construct
  source 1..20: mol_type = other RNA
gcagggcatgaagagagctg

SEQ ID NO: 4044 - RNA, 20 nt, synthetic construct
  source 1..20: mol_type = other RNA
gcaggtaagtgggctctgaa

SEQ ID NO: 4045 - RNA, 20 nt, synthetic construct
  source 1..20: mol_type = other RNA
gcaggttcatatttgaattc

SEQ ID NO: 4046 - RNA, 20 nt, synthetic construct
  source 1..20: mol_type = other RNA
gcagtcccagcagccccagc

SEQ ID NO: 4047 - RNA, 20 nt, synthetic construct
  source 1..20: mol_type = other RNA
gcagttctatcatggttaag

SEQ ID NO: 4048 - RNA, 20 nt, synthetic construct
  source 1..20: mol_type = other RNA
gcagttgtaccattagacca

SEQ ID NO: 4049 - RNA, 20 nt, synthetic construct
  source 1..20: mol_type = other RNA
gcagttgtccactgataggt

SEQ ID NO: 4050 - RNA, 20 nt, synthetic construct
  source 1..20: mol_type = other RNA
gcataagagcatgaatgagc

SEQ ID NO: 4051 - RNA, 20 nt, synthetic construct
  source 1..20: mol_type = other RNA
gcatatggagatgtagttac

SEQ ID NO: 4052 - RNA, 20 nt, synthetic construct
  source 1..20: mol_type = other RNA
gcatattttggtttccataa

SEQ ID NO: 4053 - RNA, 20 nt, synthetic construct
  source 1..20: mol_type = other RNA
gcatcacttaatttgtgtaa

SEQ ID NO: 4054 - RNA, 20 nt, synthetic construct
  source 1..20: mol_type = other RNA
gcatctccaaaacaaggaga

SEQ ID NO: 4055 - RNA, 20 nt, synthetic construct
  source 1..20: mol_type = other RNA
gcatctttgataacccatta

SEQ ID NO: 4056 - RNA, 20 nt, synthetic construct
  source 1..20: mol_type = other RNA
gcatgaagagagctgttgaa

SEQ ID NO: 4057 - RNA, 20 nt, synthetic construct
  source 1..20: mol_type = other RNA
gcatgaatgagccaaaacat

SEQ ID NO: 4058 - RNA, 20 nt, synthetic construct
  source 1..20: mol_type = other RNA
gcatgactggtcctgaaagt

SEQ ID NO: 4059 - RNA, 20 nt, synthetic construct
  source 1..20: mol_type = other RNA
gcatgcagctcacgctttgc

SEQ ID NO: 4060 - RNA, 20 nt, synthetic construct
  source 1..20: mol_type = other RNA
gcatgccacaacccctttaa

SEQ ID NO: 4061 - RNA, 20 nt, synthetic construct
  source 1..20: mol_type = other RNA
gcatgtcattctccttgttt

SEQ ID NO: 4062 - RNA, 20 nt, synthetic construct
  source 1..20: mol_type = other RNA
gcatgttcaacagctctctt

SEQ ID NO: 4063 - RNA, 20 nt, synthetic construct
  source 1..20: mol_type = other RNA
gcattgatatgatggatatt

SEQ ID NO: 4064 - RNA, 20 nt, synthetic construct
  source 1..20: mol_type = other RNA
gccaaaacatggcttggctc

SEQ ID NO: 4065 - RNA, 20 nt, synthetic construct
  source 1..20: mol_type = other RNA
gccaaaatggctgaaaaagc

SEQ ID NO: 4066 - RNA, 20 nt, synthetic construct
  source 1..20: mol_type = other RNA
gccaagaccctctgtctaag

SEQ ID NO: 4067 - RNA, 20 nt, synthetic construct
  source 1..20: mol_type = other RNA
gccaagccatgttttggctc

SEQ ID NO: 4068 - RNA, 20 nt, synthetic construct
  source 1..20: mol_type = other RNA
gccaaggtttggaaatagcc

SEQ ID NO: 4069 - RNA, 20 nt, synthetic construct
  source 1..20: mol_type = other RNA
gccaatggctgcttttcctg

SEQ ID NO: 4070 - RNA, 20 nt, synthetic construct
  source 1..20: mol_type = other RNA
gccacaacccctttaaagaa

SEQ ID NO: 4071 - RNA, 20 nt, synthetic construct
  source 1..20: mol_type = other RNA
gccacaccctggactagtgc

SEQ ID NO: 4072 - RNA, 20 nt, synthetic construct
  source 1..20: mol_type = other RNA
gccacatcaccctcagacag

SEQ ID NO: 4073 - RNA, 20 nt, synthetic construct
  source 1..20: mol_type = other RNA
gccacatgaaacttcagagc

SEQ ID NO: 4074 - RNA, 20 nt, synthetic construct
  source 1..20: mol_type = other RNA
gccaccacagccccagcagc

SEQ ID NO: 4075 - RNA, 20 nt, synthetic construct
  source 1..20: mol_type = other RNA
gccacctctagattaccacc

SEQ ID NO: 4076 - RNA, 20 nt, synthetic construct
  source 1..20: mol_type = other RNA
gccacggccactcccccaat

SEQ ID NO: 4077 - RNA, 20 nt, synthetic construct
  source 1..20: mol_type = other RNA
gccactcccccaatgtcagg

SEQ ID NO: 4078 - RNA, 20 nt, synthetic construct
  source 1..20: mol_type = other RNA
gccacttcatgggagccacc

SEQ ID NO: 4079 - RNA, 20 nt, synthetic construct
  source 1..20: mol_type = other RNA
gccagagttttacatctaaa

SEQ ID NO: 4080 - RNA, 20 nt, synthetic construct
  source 1..20: mol_type = other RNA
gccatacttttcacactctt

SEQ ID NO: 4081 - RNA, 20 nt, synthetic construct
  source 1..20: mol_type = other RNA
gccatccatctcatgagtgg

SEQ ID NO: 4082 - RNA, 20 nt, synthetic construct
  source 1..20: mol_type = other RNA
gccatgggatttctgaggca

SEQ ID NO: 4083 - RNA, 20 nt, synthetic construct
  source 1..20: mol_type = other RNA
gccatgttttggctcattca

SEQ ID NO: 4084 - RNA, 20 nt, synthetic construct
  source 1..20: mol_type = other RNA
gccattggcactagtccagg

SEQ ID NO: 4085 - RNA, 20 nt, synthetic construct
  source 1..20: mol_type = other RNA
gccattttggcttcccaaag

SEQ ID NO: 4086 - RNA, 20 nt, synthetic construct
  source 1..20: mol_type = other RNA
gcccaatccagttagtcctt

SEQ ID NO: 4087 - RNA, 20 nt, synthetic construct
  source 1..20: mol_type = other RNA
gcccacttacctgcgtttca

SEQ ID NO: 4088 - RNA, 20 nt, synthetic construct
  source 1..20: mol_type = other RNA
gcccagactatgtgcctcag

SEQ ID NO: 4089 - RNA, 20 nt, synthetic construct
  source 1..20: mol_type = other RNA
gcccagggtaagggttcatg

SEQ ID NO: 4090 - RNA, 20 nt, synthetic construct
  source 1..20: mol_type = other RNA
gccccagcagcagcagagac

SEQ ID NO: 4091 - RNA, 20 nt, synthetic construct
  source 1..20: mol_type = other RNA
gccccagcctctacagaagc

SEQ ID NO: 4092 - RNA, 20 nt, synthetic construct
  source 1..20: mol_type = other RNA
gcccggagctgcactgtagt

SEQ ID NO: 4093 - RNA, 20 nt, synthetic construct
  source 1..20: mol_type = other RNA
gcccgtgagaaagaggaaga

SEQ ID NO: 4094 - RNA, 20 nt, synthetic construct
  source 1..20: mol_type = other RNA
gccctatgaacttctattcc

SEQ ID NO: 4095 - RNA, 20 nt, synthetic construct
  source 1..20: mol_type = other RNA
gccctgcatctccaaaacaa

SEQ ID NO: 4096 - RNA, 20 nt, synthetic construct
  source 1..20: mol_type = other RNA
gccctgtgacccgagtgaag

SEQ ID NO: 4097 - RNA, 20 nt, synthetic construct
  source 1..20: mol_type = other RNA
gccgaaaggaccatgtccgt

SEQ ID NO: 4098 - RNA, 20 nt, synthetic construct
  source 1..20: mol_type = other RNA
gccgatggatctgtataggt

SEQ ID NO: 4099 - RNA, 20 nt, synthetic construct
  source 1..20: mol_type = other RNA
gccgtctcatgtatggattg

SEQ ID NO: 4100 - RNA, 20 nt, synthetic construct
  source 1..20: mol_type = other RNA
gccgtggctccaactcatgg

SEQ ID NO: 4101 - RNA, 20 nt, synthetic construct
  source 1..20: mol_type = other RNA
gcctcagaaatcccatggca

SEQ ID NO: 4102 - RNA, 20 nt, synthetic construct
  source 1..20: mol_type = other RNA
gcctccttatcccactcatg

SEQ ID NO: 4103 - RNA, 20 nt, synthetic construct
  source 1..20: mol_type = other RNA
gcctccttggacacaagcag

SEQ ID NO: 4104 - RNA, 20 nt, synthetic construct
  source 1..20: mol_type = other RNA
gcctctacagaagcagccac

SEQ ID NO: 4105 - RNA, 20 nt, synthetic construct
  source 1..20: mol_type = other RNA
gcctgctgagccacatgaaa

SEQ ID NO: 4106 - RNA, 20 nt, synthetic construct
  source 1..20: mol_type = other RNA
gccttacaacagatatatat

SEQ ID NO: 4107 - RNA, 20 nt, synthetic construct
  source 1..20: mol_type = other RNA
gccttcactcgggtcacagg

SEQ ID NO: 4108 - RNA, 20 nt, synthetic construct
  source 1..20: mol_type = other RNA
gcgactttcaggaccagtca

SEQ ID NO: 4109 - RNA, 20 nt, synthetic construct
  source 1..20: mol_type = other RNA
gcgagcagagctttctggat

SEQ ID NO: 4110 - RNA, 20 nt, synthetic construct
  source 1..20: mol_type = other RNA
gcgtgagctgcatgccacaa

SEQ ID NO: 4111 - RNA, 20 nt, synthetic construct
  source 1..20: mol_type = other RNA
gcgtttcatcaagtctcttg

SEQ ID NO: 4112 - RNA, 20 nt, synthetic construct
  source 1..20: mol_type = other RNA
gctaatgggttatcaaagat

SEQ ID NO: 4113 - RNA, 20 nt, synthetic construct
  source 1..20: mol_type = other RNA
gctaatggtcaggaaaagca

SEQ ID NO: 4114 - RNA, 20 nt, synthetic construct
  source 1..20: mol_type = other RNA
gctatttccaaaccttggct

SEQ ID NO: 4115 - RNA, 20 nt, synthetic construct
  source 1..20: mol_type = other RNA
gctcacgctttgcacactca

SEQ ID NO: 4116 - RNA, 20 nt, synthetic construct
  source 1..20: mol_type = other RNA
gctcagattgggtggtaatc

SEQ ID NO: 4117 - RNA, 20 nt, synthetic construct
  source 1..20: mol_type = other RNA
gctcagcaggctcccgtttc

SEQ ID NO: 4118 - RNA, 20 nt, synthetic construct
  source 1..20: mol_type = other RNA
gctcagtctaccacccatcc

SEQ ID NO: 4119 - RNA, 20 nt, synthetic construct
  source 1..20: mol_type = other RNA
gctcattcatgctcttatgc

SEQ ID NO: 4120 - RNA, 20 nt, synthetic construct
  source 1..20: mol_type = other RNA
gctccaactcatgggtcaat

SEQ ID NO: 4121 - RNA, 20 nt, synthetic construct
  source 1..20: mol_type = other RNA
gctcccatgaagtggccatc

SEQ ID NO: 4122 - RNA, 20 nt, synthetic construct
  source 1..20: mol_type = other RNA
gctccccatatctgggttcc

SEQ ID NO: 4123 - RNA, 20 nt, synthetic construct
  source 1..20: mol_type = other RNA
gctcccgtttcacttttttg

SEQ ID NO: 4124 - RNA, 20 nt, synthetic construct
  source 1..20: mol_type = other RNA
gctccgggcatgttcaacag

SEQ ID NO: 4125 - RNA, 20 nt, synthetic construct
  source 1..20: mol_type = other RNA
gctcgctgtctgaccagacc

SEQ ID NO: 4126 - RNA, 20 nt, synthetic construct
  source 1..20: mol_type = other RNA
gctctcttcatgccctgcat

SEQ ID NO: 4127 - RNA, 20 nt, synthetic construct
  source 1..20: mol_type = other RNA
gctctgaagtttcatgtggc

SEQ ID NO: 4128 - RNA, 20 nt, synthetic construct
  source 1..20: mol_type = other RNA
gctctgctcgctgtctgacc

SEQ ID NO: 4129 - RNA, 20 nt, synthetic construct
  source 1..20: mol_type = other RNA
gctcttaaccatgatagaac

SEQ ID NO: 4130 - RNA, 20 nt, synthetic construct
  source 1..20: mol_type = other RNA
gctcttatgctggtaaaaga

SEQ ID NO: 4131 - RNA, 20 nt, synthetic construct
  source 1..20: mol_type = other RNA
gctctttgggaagccaaaat

SEQ ID NO: 4132 - RNA, 20 nt, synthetic construct
  source 1..20: mol_type = other RNA
gctgaaaaagcccgtgagaa

SEQ ID NO: 4133 - RNA, 20 nt, synthetic construct
  source 1..20: mol_type = other RNA
gctgaaaccatctccctgca

SEQ ID NO: 4134 - RNA, 20 nt, synthetic construct
  source 1..20: mol_type = other RNA
gctgagactggggagaatag

SEQ ID NO: 4135 - RNA, 20 nt, synthetic construct
  source 1..20: mol_type = other RNA
gctgagccacatgaaacttc

SEQ ID NO: 4136 - RNA, 20 nt, synthetic construct
  source 1..20: mol_type = other RNA
gctgcactgtagttatggat

SEQ ID NO: 4137 - RNA, 20 nt, synthetic construct
  source 1..20: mol_type = other RNA
gctgcaggttcatatttgaa

SEQ ID NO: 4138 - RNA, 20 nt, synthetic construct
  source 1..20: mol_type = other RNA
gctgcatgactggtcctgaa

SEQ ID NO: 4139 - RNA, 20 nt, synthetic construct
  source 1..20: mol_type = other RNA
gctgcatgccacaacccctt

SEQ ID NO: 4140 - RNA, 20 nt, synthetic construct
  source 1..20: mol_type = other RNA
gctgctgctgctggggtctc

SEQ ID NO: 4141 - RNA, 20 nt, synthetic construct
  source 1..20: mol_type = other RNA
gctgctgctggggctgtggt

SEQ ID NO: 4142 - RNA, 20 nt, synthetic construct
  source 1..20: mol_type = other RNA
gctgctgctggggtctctgc

SEQ ID NO: 4143 - RNA, 20 nt, synthetic construct
  source 1..20: mol_type = other RNA
gctgctgggactgctgcatg

SEQ ID NO: 4144 - RNA, 20 nt, synthetic construct
  source 1..20: mol_type = other RNA
gctgctggggctgtggtggc

SEQ ID NO: 4145 - RNA, 20 nt, synthetic construct
  source 1..20: mol_type = other RNA
gctgctggggtctctgctgc

SEQ ID NO: 4146 - RNA, 20 nt, synthetic construct
  source 1..20: mol_type = other RNA
gctgcttctgtagaggctgg

SEQ ID NO: 4147 - RNA, 20 nt, synthetic construct
  source 1..20: mol_type = other RNA
gctgcttttcctgaccatta

SEQ ID NO: 4148 - RNA, 20 nt, synthetic construct
  source 1..20: mol_type = other RNA
gctggaagcatctttgataa

SEQ ID NO: 4149 - RNA, 20 nt, synthetic construct
  source 1..20: mol_type = other RNA
gctgggactgctgcatgact

SEQ ID NO: 4150 - RNA, 20 nt, synthetic construct
  source 1..20: mol_type = other RNA
gctggggctgctgggactgc

SEQ ID NO: 4151 - RNA, 20 nt, synthetic construct
  source 1..20: mol_type = other RNA
gctggggctgtggtggctgc

SEQ ID NO: 4152 - RNA, 20 nt, synthetic construct
  source 1..20: mol_type = other RNA
gctggggtctctgctgctgc

SEQ ID NO: 4153 - RNA, 20 nt, synthetic construct
  source 1..20: mol_type = other RNA
gctggtaaaagacgagggag

SEQ ID NO: 4154 - RNA, 20 nt, synthetic construct
  source 1..20: mol_type = other RNA
gctggtaaagtgtatggatg

SEQ ID NO: 4155 - RNA, 20 nt, synthetic construct
  source 1..20: mol_type = other RNA
gctggtgcttccatagatat

SEQ ID NO: 4156 - RNA, 20 nt, synthetic construct
  source 1..20: mol_type = other RNA
gctgtctgaccagacctcat

SEQ ID NO: 4157 - RNA, 20 nt, synthetic construct
  source 1..20: mol_type = other RNA
gctgtggtggctgcttctgt

SEQ ID NO: 4158 - RNA, 20 nt, synthetic construct
  source 1..20: mol_type = other RNA
gctgtgtgggaaagcatgtc

SEQ ID NO: 4159 - RNA, 20 nt, synthetic construct
  source 1..20: mol_type = other RNA
gctgttgaacatgcccggag

SEQ ID NO: 4160 - RNA, 20 nt, synthetic construct
  source 1..20: mol_type = other RNA
gcttacacaaattaagtgat

SEQ ID NO: 4161 - RNA, 20 nt, synthetic construct
  source 1..20: mol_type = other RNA
gcttagacagagggtcttgg

SEQ ID NO: 4162 - RNA, 20 nt, synthetic construct
  source 1..20: mol_type = other RNA
gcttccagctcttaaccatg

SEQ ID NO: 4163 - RNA, 20 nt, synthetic construct
  source 1..20: mol_type = other RNA
gcttccatagatatctgaag

SEQ ID NO: 4164 - RNA, 20 nt, synthetic construct
  source 1..20: mol_type = other RNA
gcttcccaaagagccaagcc

SEQ ID NO: 4165 - RNA, 20 nt, synthetic construct
  source 1..20: mol_type = other RNA
gcttctggatccaccaatcc

SEQ ID NO: 4166 - RNA, 20 nt, synthetic construct
  source 1..20: mol_type = other RNA
gcttctggtgcagaggacaa

SEQ ID NO: 4167 - RNA, 20 nt, synthetic construct
  source 1..20: mol_type = other RNA
gcttctgtagaggctggggc

SEQ ID NO: 4168 - RNA, 20 nt, synthetic construct
  source 1..20: mol_type = other RNA
gcttgagatgaggtggaata

SEQ ID NO: 4169 - RNA, 20 nt, synthetic construct
  source 1..20: mol_type = other RNA
gcttggatacctatacagat

SEQ ID NO: 4170 - RNA, 20 nt, synthetic construct
  source 1..20: mol_type = other RNA
gcttggctctttgggaagcc

SEQ ID NO: 4171 - RNA, 20 nt, synthetic construct
  source 1..20: mol_type = other RNA
gcttgtgtccaaggaggctt

SEQ ID NO: 4172 - RNA, 20 nt, synthetic construct
  source 1..20: mol_type = other RNA
gctttcccacacagctaatg

SEQ ID NO: 4173 - RNA, 20 nt, synthetic construct
  source 1..20: mol_type = other RNA
gctttctggatcctgacatt

SEQ ID NO: 4174 - RNA, 20 nt, synthetic construct
  source 1..20: mol_type = other RNA
gctttgcacactcaatgaga

SEQ ID NO: 4175 - RNA, 20 nt, synthetic construct
  source 1..20: mol_type = other RNA
gcttttcctgaccattagca

SEQ ID NO: 4176 - RNA, 20 nt, synthetic construct
  source 1..20: mol_type = other RNA
gcttttgaatcagaataccc

SEQ ID NO: 4177 - RNA, 20 nt, synthetic construct
  source 1..20: mol_type = other RNA
gctttttcagccattttggc

SEQ ID NO: 4178 - RNA, 20 nt, synthetic construct
  source 1..20: mol_type = other RNA
ggaaaagcagccattggcac

SEQ ID NO: 4179 - RNA, 20 nt, synthetic construct
  source 1..20: mol_type = other RNA
ggaaaccaaaatatgcaggg

SEQ ID NO: 4180 - RNA, 20 nt, synthetic construct
  source 1..20: mol_type = other RNA
ggaaacctatcagtggacaa

SEQ ID NO: 4181 - RNA, 20 nt, synthetic construct
  source 1..20: mol_type = other RNA
ggaaagcatgtcattctcct

SEQ ID NO: 4182 - RNA, 20 nt, synthetic construct
  source 1..20: mol_type = other RNA
ggaaatagccagagttttac

SEQ ID NO: 4183 - RNA, 20 nt, synthetic construct
  source 1..20: mol_type = other RNA
ggaaattgcctccttatccc

SEQ ID NO: 4184 - RNA, 20 nt, synthetic construct
  source 1..20: mol_type = other RNA
ggaacccagatatggggagc

SEQ ID NO: 4185 - RNA, 20 nt, synthetic construct
  source 1..20: mol_type = other RNA
ggaagagtgtgaaaagtatg

SEQ ID NO: 4186 - RNA, 20 nt, synthetic construct
  source 1..20: mol_type = other RNA
ggaagcaccagccctatgaa

SEQ ID NO: 4187 - RNA, 20 nt, synthetic construct
  source 1..20: mol_type = other RNA
ggaagcatctttgataaccc

SEQ ID NO: 4188 - RNA, 20 nt, synthetic construct
  source 1..20: mol_type = other RNA
ggaagccaaaatggctgaaa

SEQ ID NO: 4189 - RNA, 20 nt, synthetic construct
  source 1..20: mol_type = other RNA
ggaatagaagttcatagggc

SEQ ID NO: 4190 - RNA, 20 nt, synthetic construct
  source 1..20: mol_type = other RNA
ggaatcaccccaccaggatc

SEQ ID NO: 4191 - RNA, 20 nt, synthetic construct
  source 1..20: mol_type = other RNA
ggacaacgatgaggtctggt

SEQ ID NO: 4192 - RNA, 20 nt, synthetic construct
  source 1..20: mol_type = other RNA
ggacaactgctccccatatc

SEQ ID NO: 4193 - RNA, 20 nt, synthetic construct
  source 1..20: mol_type = other RNA
ggacacaagcagttctatca

SEQ ID NO: 4194 - RNA, 20 nt, synthetic construct
  source 1..20: mol_type = other RNA
ggacagggtaagagagaaca

SEQ ID NO: 4195 - RNA, 20 nt, synthetic construct
  source 1..20: mol_type = other RNA
ggacatggtcctttcggcaa

SEQ ID NO: 4196 - RNA, 20 nt, synthetic construct
  source 1..20: mol_type = other RNA
ggaccagtcatgcagcagtc

SEQ ID NO: 4197 - RNA, 20 nt, synthetic construct
  source 1..20: mol_type = other RNA
ggaccatgtccgtgaccaca

SEQ ID NO: 4198 - RNA, 20 nt, synthetic construct
  source 1..20: mol_type = other RNA
ggactaactggattgggccg

SEQ ID NO: 4199 - RNA, 20 nt, synthetic construct
  source 1..20: mol_type = other RNA
ggactagtgccaatggctgc

SEQ ID NO: 4200 - RNA, 20 nt, synthetic construct
  source 1..20: mol_type = other RNA
ggactataaaaatggtgaac

SEQ ID NO: 4201 - RNA, 20 nt, synthetic construct
  source 1..20: mol_type = other RNA
ggactgctgcatgactggtc

SEQ ID NO: 4202 - RNA, 20 nt, synthetic construct
  source 1..20: mol_type = other RNA
ggagaataggaacccagata

SEQ ID NO: 4203 - RNA, 20 nt, synthetic construct
  source 1..20: mol_type = other RNA
ggagaatgacatgctttccc

SEQ ID NO: 4204 - RNA, 20 nt, synthetic construct
  source 1..20: mol_type = other RNA
ggagatcctggtggggtgat

SEQ ID NO: 4205 - RNA, 20 nt, synthetic construct
  source 1..20: mol_type = other RNA
ggagatgcagggcatgaaga

SEQ ID NO: 4206 - RNA, 20 nt, synthetic construct
  source 1..20: mol_type = other RNA
ggagatggtttcagcagttg

SEQ ID NO: 4207 - RNA, 20 nt, synthetic construct
  source 1..20: mol_type = other RNA
ggagatgtagttactgtgga

SEQ ID NO: 4208 - RNA, 20 nt, synthetic construct
  source 1..20: mol_type = other RNA
ggagcagttgtccactgata

SEQ ID NO: 4209 - RNA, 20 nt, synthetic construct
  source 1..20: mol_type = other RNA
ggagccacctctagattacc

SEQ ID NO: 4210 - RNA, 20 nt, synthetic construct
  source 1..20: mol_type = other RNA
ggagccacggccactccccc

SEQ ID NO: 4211 - RNA, 20 nt, synthetic construct
  source 1..20: mol_type = other RNA
ggagcctgctgagccacatg

SEQ ID NO: 4212 - RNA, 20 nt, synthetic construct
  source 1..20: mol_type = other RNA
ggagctgcactgtagttatg

SEQ ID NO: 4213 - RNA, 20 nt, synthetic construct
  source 1..20: mol_type = other RNA
ggaggcaatttccctacatg

SEQ ID NO: 4214 - RNA, 20 nt, synthetic construct
  source 1..20: mol_type = other RNA
ggaggcttacacaaattaag

SEQ ID NO: 4215 - RNA, 20 nt, synthetic construct
  source 1..20: mol_type = other RNA
ggagtctgtggtcacggaca

SEQ ID NO: 4216 - RNA, 20 nt, synthetic construct
  source 1..20: mol_type = other RNA
ggagtggccgtggctccaac

SEQ ID NO: 4217 - RNA, 20 nt, synthetic construct
  source 1..20: mol_type = other RNA
ggataaggactaactggatt

SEQ ID NO: 4218 - RNA, 20 nt, synthetic construct
  source 1..20: mol_type = other RNA
ggataaggaggcaatttccc

SEQ ID NO: 4219 - RNA, 20 nt, synthetic construct
  source 1..20: mol_type = other RNA
ggatacctatacagatccat

SEQ ID NO: 4220 - RNA, 20 nt, synthetic construct
  source 1..20: mol_type = other RNA
ggatattgggtattctgatt

SEQ ID NO: 4221 - RNA, 20 nt, synthetic construct
  source 1..20: mol_type = other RNA
ggatccaccaatccatacat

SEQ ID NO: 4222 - RNA, 20 nt, synthetic construct
  source 1..20: mol_type = other RNA
ggatccagaaagctctgctc

SEQ ID NO: 4223 - RNA, 20 nt, synthetic construct
  source 1..20: mol_type = other RNA
ggatccagaagcagaataag

SEQ ID NO: 4224 - RNA, 20 nt, synthetic construct
  source 1..20: mol_type = other RNA
ggatcctgacattgggggag

SEQ ID NO: 4225 - RNA, 20 nt, synthetic construct
  source 1..20: mol_type = other RNA
ggatctccctcgtcttttac

SEQ ID NO: 4226 - RNA, 20 nt, synthetic construct
  source 1..20: mol_type = other RNA
ggatctgtataggtatccaa

SEQ ID NO: 4227 - RNA, 20 nt, synthetic construct
  source 1..20: mol_type = other RNA
ggatggccacttcatgggag

SEQ ID NO: 4228 - RNA, 20 nt, synthetic construct
  source 1..20: mol_type = other RNA
ggatgggtggtagactgagc

SEQ ID NO: 4229 - RNA, 20 nt, synthetic construct
  source 1..20: mol_type = other RNA
ggattagaagaattcaaata

SEQ ID NO: 4230 - RNA, 20 nt, synthetic construct
  source 1..20: mol_type = other RNA
ggattatgtgagaaggtgaa

SEQ ID NO: 4231 - RNA, 20 nt, synthetic construct
  source 1..20: mol_type = other RNA
ggattctttaaaggggttgt

SEQ ID NO: 4232 - RNA, 20 nt, synthetic construct
  source 1..20: mol_type = other RNA
ggattgctcagattgggtgg

SEQ ID NO: 4233 - RNA, 20 nt, synthetic construct
  source 1..20: mol_type = other RNA
ggattgggccgtctcatgta

SEQ ID NO: 4234 - RNA, 20 nt, synthetic construct
  source 1..20: mol_type = other RNA
ggattggtggatccagaagc

SEQ ID NO: 4235 - RNA, 20 nt, synthetic construct
  source 1..20: mol_type = other RNA
ggatttctgaggcacatagt

SEQ ID NO: 4236 - RNA, 20 nt, synthetic construct
  source 1..20: mol_type = other RNA
ggcaaaaaagtgaaacggga

SEQ ID NO: 4237 - RNA, 20 nt, synthetic construct
  source 1..20: mol_type = other RNA
ggcaagagacttgatgaaac

SEQ ID NO: 4238 - RNA, 20 nt, synthetic construct
  source 1..20: mol_type = other RNA
ggcaatttccctacatgatg

SEQ ID NO: 4239 - RNA, 20 nt, synthetic construct
  source 1..20: mol_type = other RNA
ggcacatagtctgggccata

SEQ ID NO: 4240 - RNA, 20 nt, synthetic construct
  source 1..20: mol_type = other RNA
ggcactagtccagggtgtgg

SEQ ID NO: 4241 - RNA, 20 nt, synthetic construct
  source 1..20: mol_type = other RNA
ggcatatggagatgtagtta

SEQ ID NO: 4242 - RNA, 20 nt, synthetic construct
  source 1..20: mol_type = other RNA
ggcatgaagagagctgttga

SEQ ID NO: 4243 - RNA, 20 nt, synthetic construct
  source 1..20: mol_type = other RNA
ggcatgcagctcacgctttg

SEQ ID NO: 4244 - RNA, 20 nt, synthetic construct
  source 1..20: mol_type = other RNA
ggcatgttcaacagctctct

SEQ ID NO: 4245 - RNA, 20 nt, synthetic construct
  source 1..20: mol_type = other RNA
ggccactcccccaatgtcag

SEQ ID NO: 4246 - RNA, 20 nt, synthetic construct
  source 1..20: mol_type = other RNA
ggccacttcatgggagccac

SEQ ID NO: 4247 - RNA, 20 nt, synthetic construct
  source 1..20: mol_type = other RNA
ggccatacttttcacactct

SEQ ID NO: 4248 - RNA, 20 nt, synthetic construct
  source 1..20: mol_type = other RNA
ggccatccatctcatgagtg

SEQ ID NO: 4249 - RNA, 20 nt, synthetic construct
  source 1..20: mol_type = other RNA
ggcccaatccagttagtcct

SEQ ID NO: 4250 - RNA, 20 nt, synthetic construct
  source 1..20: mol_type = other RNA
ggcccagactatgtgcctca

SEQ ID NO: 4251 - RNA, 20 nt, synthetic construct
  source 1..20: mol_type = other RNA
ggccctgtgacccgagtgaa

SEQ ID NO: 4252 - RNA, 20 nt, synthetic construct
  source 1..20: mol_type = other RNA
ggccgtctcatgtatggatt

SEQ ID NO: 4253 - RNA, 20 nt, synthetic construct
  source 1..20: mol_type = other RNA
ggccgtggctccaactcatg

SEQ ID NO: 4254 - RNA, 20 nt, synthetic construct
  source 1..20: mol_type = other RNA
ggccttacaacagatatata

SEQ ID NO: 4255 - RNA, 20 nt, synthetic construct
  source 1..20: mol_type = other RNA
ggctatttccaaaccttggc

SEQ ID NO: 4256 - RNA, 20 nt, synthetic construct
  source 1..20: mol_type = other RNA
ggctcagcaggctcccgttt

SEQ ID NO: 4257 - RNA, 20 nt, synthetic construct
  source 1..20: mol_type = other RNA
ggctcattcatgctcttatg

SEQ ID NO: 4258 - RNA, 20 nt, synthetic construct
  source 1..20: mol_type = other RNA
ggctccaactcatgggtcaa

SEQ ID NO: 4259 - RNA, 20 nt, synthetic construct
  source 1..20: mol_type = other RNA
ggctcccatgaagtggccat

SEQ ID NO: 4260 - RNA, 20 nt, synthetic construct
  source 1..20: mol_type = other RNA
ggctcccgtttcactttttt

SEQ ID NO: 4261 - RNA, 20 nt, synthetic construct
  source 1..20: mol_type = other RNA
ggctctgaagtttcatgtgg

SEQ ID NO: 4262 - RNA, 20 nt, synthetic construct
  source 1..20: mol_type = other RNA
ggctctttgggaagccaaaa

SEQ ID NO: 4263 - RNA, 20 nt, synthetic construct
  source 1..20: mol_type = other RNA
ggctgaaaaagcccgtgaga

SEQ ID NO: 4264 - RNA, 20 nt, synthetic construct
  source 1..20: mol_type = other RNA
ggctgagactggggagaata

SEQ ID NO: 4265 - RNA, 20 nt, synthetic construct
  source 1..20: mol_type = other RNA
ggctgctgctgctggggtct

SEQ ID NO: 4266 - RNA, 20 nt, synthetic construct
  source 1..20: mol_type = other RNA
ggctgctgggactgctgcat

SEQ ID NO: 4267 - RNA, 20 nt, synthetic construct
  source 1..20: mol_type = other RNA
ggctgcttctgtagaggctg

SEQ ID NO: 4268 - RNA, 20 nt, synthetic construct
  source 1..20: mol_type = other RNA
ggctgcttttcctgaccatt

SEQ ID NO: 4269 - RNA, 20 nt, synthetic construct
  source 1..20: mol_type = other RNA
ggctggggctgctgggactg

SEQ ID NO: 4270 - RNA, 20 nt, synthetic construct
  source 1..20: mol_type = other RNA
ggctggtaaagtgtatggat

SEQ ID NO: 4271 - RNA, 20 nt, synthetic construct
  source 1..20: mol_type = other RNA
ggctggtgcttccatagata

SEQ ID NO: 4272 - RNA, 20 nt, synthetic construct
  source 1..20: mol_type = other RNA
ggctgtggtggctgcttctg

SEQ ID NO: 4273 - RNA, 20 nt, synthetic construct
  source 1..20: mol_type = other RNA
ggcttacacaaattaagtga

SEQ ID NO: 4274 - RNA, 20 nt, synthetic construct
  source 1..20: mol_type = other RNA
ggcttcccaaagagccaagc

SEQ ID NO: 4275 - RNA, 20 nt, synthetic construct
  source 1..20: mol_type = other RNA
ggcttctggtgcagaggaca

SEQ ID NO: 4276 - RNA, 20 nt, synthetic construct
  source 1..20: mol_type = other RNA
ggcttggatacctatacaga

SEQ ID NO: 4277 - RNA, 20 nt, synthetic construct
  source 1..20: mol_type = other RNA
ggcttggctctttgggaagc

SEQ ID NO: 4278 - RNA, 20 nt, synthetic construct
  source 1..20: mol_type = other RNA
ggcttttgaatcagaatacc

SEQ ID NO: 4279 - RNA, 20 nt, synthetic construct
  source 1..20: mol_type = other RNA
ggctttttcagccattttgg

SEQ ID NO: 4280 - RNA, 20 nt, synthetic construct
  source 1..20: mol_type = other RNA
gggaaagcatgtcattctcc

SEQ ID NO: 4281 - RNA, 20 nt, synthetic construct
  source 1..20: mol_type = other RNA
gggaaattgcctccttatcc

SEQ ID NO: 4282 - RNA, 20 nt, synthetic construct
  source 1..20: mol_type = other RNA
gggaagccaaaatggctgaa

SEQ ID NO: 4283 - RNA, 20 nt, synthetic construct
  source 1..20: mol_type = other RNA
gggactgctgcatgactggt

SEQ ID NO: 4284 - RNA, 20 nt, synthetic construct
  source 1..20: mol_type = other RNA
gggagaataggaacccagat

SEQ ID NO: 4285 - RNA, 20 nt, synthetic construct
  source 1..20: mol_type = other RNA
gggagatcctggtggggtga

SEQ ID NO: 4286 - RNA, 20 nt, synthetic construct
  source 1..20: mol_type = other RNA
gggagatggtttcagcagtt

SEQ ID NO: 4287 - RNA, 20 nt, synthetic construct
  source 1..20: mol_type = other RNA
gggagcagttgtccactgat

SEQ ID NO: 4288 - RNA, 20 nt, synthetic construct
  source 1..20: mol_type = other RNA
gggagccacctctagattac

SEQ ID NO: 4289 - RNA, 20 nt, synthetic construct
  source 1..20: mol_type = other RNA
gggagcctgctgagccacat

SEQ ID NO: 4290 - RNA, 20 nt, synthetic construct
  source 1..20: mol_type = other RNA
gggagtggccgtggctccaa

SEQ ID NO: 4291 - RNA, 20 nt, synthetic construct
  source 1..20: mol_type = other RNA
gggataaggaggcaatttcc

SEQ ID NO: 4292 - RNA, 20 nt, synthetic construct
  source 1..20: mol_type = other RNA
gggattagaagaattcaaat

SEQ ID NO: 4293 - RNA, 20 nt, synthetic construct
  source 1..20: mol_type = other RNA
gggattctttaaaggggttg

SEQ ID NO: 4294 - RNA, 20 nt, synthetic construct
  source 1..20: mol_type = other RNA
gggatttctgaggcacatag

SEQ ID NO: 4295 - RNA, 20 nt, synthetic construct
  source 1..20: mol_type = other RNA
gggcatgaagagagctgttg

SEQ ID NO: 4296 - RNA, 20 nt, synthetic construct
  source 1..20: mol_type = other RNA
gggcatgttcaacagctctc

SEQ ID NO: 4297 - RNA, 20 nt, synthetic construct
  source 1..20: mol_type = other RNA
gggccatacttttcacactc

SEQ ID NO: 4298 - RNA, 20 nt, synthetic construct
  source 1..20: mol_type = other RNA
gggccgtctcatgtatggat

SEQ ID NO: 4299 - RNA, 20 nt, synthetic construct
  source 1..20: mol_type = other RNA
gggccttacaacagatatat

SEQ ID NO: 4300 - RNA, 20 nt, synthetic construct
  source 1..20: mol_type = other RNA
gggctctgaagtttcatgtg

SEQ ID NO: 4301 - RNA, 20 nt, synthetic construct
  source 1..20: mol_type = other RNA
gggctgctgggactgctgca

SEQ ID NO: 4302 - RNA, 20 nt, synthetic construct
  source 1..20: mol_type = other RNA
gggctggtgcttccatagat

SEQ ID NO: 4303 - RNA, 20 nt, synthetic construct
  source 1..20: mol_type = other RNA
gggctgtggtggctgcttct

SEQ ID NO: 4304 - RNA, 20 nt, synthetic construct
  source 1..20: mol_type = other RNA
gggcttttgaatcagaatac

SEQ ID NO: 4305 - RNA, 20 nt, synthetic construct
  source 1..20: mol_type = other RNA
gggctttttcagccattttg

SEQ ID NO: 4306 - RNA, 20 nt, synthetic construct
  source 1..20: mol_type = other RNA
ggggagaataggaacccaga

SEQ ID NO: 4307 - RNA, 20 nt, synthetic construct
  source 1..20: mol_type = other RNA
ggggagcagttgtccactga

SEQ ID NO: 4308 - RNA, 20 nt, synthetic construct
  source 1..20: mol_type = other RNA
ggggagtggccgtggctcca

SEQ ID NO: 4309 - RNA, 20 nt, synthetic construct
  source 1..20: mol_type = other RNA
ggggctgctgggactgctgc

SEQ ID NO: 4310 - RNA, 20 nt, synthetic construct
  source 1..20: mol_type = other RNA
ggggctgtggtggctgcttc

SEQ ID NO: 4311 - RNA, 20 nt, synthetic construct
  source 1..20: mol_type = other RNA
gggggagtggccgtggctcc

SEQ ID NO: 4312 - RNA, 20 nt, synthetic construct
  source 1..20: mol_type = other RNA
gggggtgatatcatatatat

SEQ ID NO: 4313 - RNA, 20 nt, synthetic construct
  source 1..20: mol_type = other RNA
ggggtctctgctgctgctgg

SEQ ID NO: 4314 - RNA, 20 nt, synthetic construct
  source 1..20: mol_type = other RNA
ggggtgatatcatatatatc

SEQ ID NO: 4315 - RNA, 20 nt, synthetic construct
  source 1..20: mol_type = other RNA
ggggtgattcctattgggat

SEQ ID NO: 4316 - RNA, 20 nt, synthetic construct
  source 1..20: mol_type = other RNA
ggggttgtggcatgcagctc

SEQ ID NO: 4317 - RNA, 20 nt, synthetic construct
  source 1..20: mol_type = other RNA
gggtaagagagaacagaaac

SEQ ID NO: 4318 - RNA, 20 nt, synthetic construct
  source 1..20: mol_type = other RNA
gggtaagggttcatgggatt

SEQ ID NO: 4319 - RNA, 20 nt, synthetic construct
  source 1..20: mol_type = other RNA
gggtattctgattcaaaagc

SEQ ID NO: 4320 - RNA, 20 nt, synthetic construct
  source 1..20: mol_type = other RNA
gggtcaattctcattgagtg

SEQ ID NO: 4321 - RNA, 20 nt, synthetic construct
  source 1..20: mol_type = other RNA
gggtcacagggccttacaac

SEQ ID NO: 4322 - RNA, 20 nt, synthetic construct
  source 1..20: mol_type = other RNA
gggtctctgctgctgctggg

SEQ ID NO: 4323 - RNA, 20 nt, synthetic construct
  source 1..20: mol_type = other RNA
gggtcttggcttggatacct

SEQ ID NO: 4324 - RNA, 20 nt, synthetic construct
  source 1..20: mol_type = other RNA
gggtgatatcatatatatct

SEQ ID NO: 4325 - RNA, 20 nt, synthetic construct
  source 1..20: mol_type = other RNA
gggtgatgtggctgctgctg

SEQ ID NO: 4326 - RNA, 20 nt, synthetic construct
  source 1..20: mol_type = other RNA
gggtgattcctattgggatt

SEQ ID NO: 4327 - RNA, 20 nt, synthetic construct
  source 1..20: mol_type = other RNA
gggtggtaatctagaggtgg

SEQ ID NO: 4328 - RNA, 20 nt, synthetic construct
  source 1..20: mol_type = other RNA
gggtggtagactgagcttag

SEQ ID NO: 4329 - RNA, 20 nt, synthetic construct
  source 1..20: mol_type = other RNA
gggtgtggcttctggtgcag

SEQ ID NO: 4330 - RNA, 20 nt, synthetic construct
  source 1..20: mol_type = other RNA
gggttatcaaagatgcttcc

SEQ ID NO: 4331 - RNA, 20 nt, synthetic construct
  source 1..20: mol_type = other RNA
gggttcatgggattagaaga

SEQ ID NO: 4332 - RNA, 20 nt, synthetic construct
  source 1..20: mol_type = other RNA
gggttcctattctccccagt

SEQ ID NO: 4333 - RNA, 20 nt, synthetic construct
  source 1..20: mol_type = other RNA
gggttgtggcatgcagctca

SEQ ID NO: 4334 - RNA, 20 nt, synthetic construct
  source 1..20: mol_type = other RNA
ggtaaaagacgagggagatc

SEQ ID NO: 4335 - RNA, 20 nt, synthetic construct
  source 1..20: mol_type = other RNA
ggtaaagtgtatggatgggt

SEQ ID NO: 4336 - RNA, 20 nt, synthetic construct
  source 1..20: mol_type = other RNA
ggtaaccaacaaaagggggt

SEQ ID NO: 4337 - RNA, 20 nt, synthetic construct
  source 1..20: mol_type = other RNA
ggtaagagagaacagaaaca

SEQ ID NO: 4338 - RNA, 20 nt, synthetic construct
  source 1..20: mol_type = other RNA
ggtaagggttcatgggatta

SEQ ID NO: 4339 - RNA, 20 nt, synthetic construct
  source 1..20: mol_type = other RNA
ggtaagtgggctctgaagtt

SEQ ID NO: 4340 - RNA, 20 nt, synthetic construct
  source 1..20: mol_type = other RNA
ggtaatctagaggtggctcc

SEQ ID NO: 4341 - RNA, 20 nt, synthetic construct
  source 1..20: mol_type = other RNA
ggtacaactgctgaaaccat

SEQ ID NO: 4342 - RNA, 20 nt, synthetic construct
  source 1..20: mol_type = other RNA
ggtagactgagcttagacag

SEQ ID NO: 4343 - RNA, 20 nt, synthetic construct
  source 1..20: mol_type = other RNA
ggtatccaagccaagaccct

SEQ ID NO: 4344 - RNA, 20 nt, synthetic construct
  source 1..20: mol_type = other RNA
ggtattctgattcaaaagcc

SEQ ID NO: 4345 - RNA, 20 nt, synthetic construct
  source 1..20: mol_type = other RNA
ggtcaattctcattgagtgt

SEQ ID NO: 4346 - RNA, 20 nt, synthetic construct
  source 1..20: mol_type = other RNA
ggtcacagggccttacaaca

SEQ ID NO: 4347 - RNA, 20 nt, synthetic construct
  source 1..20: mol_type = other RNA
ggtcacggacatggtccttt

SEQ ID NO: 4348 - RNA, 20 nt, synthetic construct
  source 1..20: mol_type = other RNA
ggtcagacagcgagcagagc

SEQ ID NO: 4349 - RNA, 20 nt, synthetic construct
  source 1..20: mol_type = other RNA
ggtcaggaaaagcagccatt

SEQ ID NO: 4350 - RNA, 20 nt, synthetic construct
  source 1..20: mol_type = other RNA
ggtcctgaaagtcgcaaaag

SEQ ID NO: 4351 - RNA, 20 nt, synthetic construct
  source 1..20: mol_type = other RNA
ggtcctttcggcaagagact

SEQ ID NO: 4352 - RNA, 20 nt, synthetic construct
  source 1..20: mol_type = other RNA
ggtctaatggtacaactgct

SEQ ID NO: 4353 - RNA, 20 nt, synthetic construct
  source 1..20: mol_type = other RNA
ggtctctgctgctgctgggg

SEQ ID NO: 4354 - RNA, 20 nt, synthetic construct
  source 1..20: mol_type = other RNA
ggtctggtcagacagcgagc

SEQ ID NO: 4355 - RNA, 20 nt, synthetic construct
  source 1..20: mol_type = other RNA
ggtcttggcttggataccta

SEQ ID NO: 4356 - RNA, 20 nt, synthetic construct
  source 1..20: mol_type = other RNA
ggtgaacatcattcaccttc

SEQ ID NO: 4357 - RNA, 20 nt, synthetic construct
  source 1..20: mol_type = other RNA
ggtgaatgatgttcaccatt

SEQ ID NO: 4358 - RNA, 20 nt, synthetic construct
  source 1..20: mol_type = other RNA
ggtgatatcatatatatctg

SEQ ID NO: 4359 - RNA, 20 nt, synthetic construct
  source 1..20: mol_type = other RNA
ggtgatgtggctgctgctgc

SEQ ID NO: 4360 - RNA, 20 nt, synthetic construct
  source 1..20: mol_type = other RNA
ggtgattcctattgggattc

SEQ ID NO: 4361 - RNA, 20 nt, synthetic construct
  source 1..20: mol_type = other RNA
ggtgcagaggacaacgatga

SEQ ID NO: 4362 - RNA, 20 nt, synthetic construct
  source 1..20: mol_type = other RNA
ggtgcttccatagatatctg

SEQ ID NO: 4363 - RNA, 20 nt, synthetic construct
  source 1..20: mol_type = other RNA
ggtggaatagaagttcatag

SEQ ID NO: 4364 - RNA, 20 nt, synthetic construct
  source 1..20: mol_type = other RNA
ggtggatccagaagcagaat

SEQ ID NO: 4365 - RNA, 20 nt, synthetic construct
  source 1..20: mol_type = other RNA
ggtggctcccatgaagtggc

SEQ ID NO: 4366 - RNA, 20 nt, synthetic construct
  source 1..20: mol_type = other RNA
ggtggctgcttctgtagagg

SEQ ID NO: 4367 - RNA, 20 nt, synthetic construct
  source 1..20: mol_type = other RNA
ggtggggtgattcctattgg

SEQ ID NO: 4368 - RNA, 20 nt, synthetic construct
  source 1..20: mol_type = other RNA
ggtggtaatctagaggtggc

SEQ ID NO: 4369 - RNA, 20 nt, synthetic construct
  source 1..20: mol_type = other RNA
ggtggtagactgagcttaga

SEQ ID NO: 4370 - RNA, 20 nt, synthetic construct
  source 1..20: mol_type = other RNA
ggtgtggcttctggtgcaga

SEQ ID NO: 4371 - RNA, 20 nt, synthetic construct
  source 1..20: mol_type = other RNA
ggttaagagctggaagcatc

SEQ ID NO: 4372 - RNA, 20 nt, synthetic construct
  source 1..20: mol_type = other RNA
ggttatcaaagatgcttcca

SEQ ID NO: 4373 - RNA, 20 nt, synthetic construct
  source 1..20: mol_type = other RNA
ggttatggaaaccaaaatat

SEQ ID NO: 4374 - RNA, 20 nt, synthetic construct
  source 1..20: mol_type = other RNA
ggttcatatttgaattcttc

SEQ ID NO: 4375 - RNA, 20 nt, synthetic construct
  source 1..20: mol_type = other RNA
ggttcatgggattagaagaa

SEQ ID NO: 4376 - RNA, 20 nt, synthetic construct
  source 1..20: mol_type = other RNA
ggttcctattctccccagtc

SEQ ID NO: 4377 - RNA, 20 nt, synthetic construct
  source 1..20: mol_type = other RNA
ggttgtggcatgcagctcac

SEQ ID NO: 4378 - RNA, 20 nt, synthetic construct
  source 1..20: mol_type = other RNA
ggtttcagcagttgtaccat

SEQ ID NO: 4379 - RNA, 20 nt, synthetic construct
  source 1..20: mol_type = other RNA
ggtttccataacctaagtat

SEQ ID NO: 4380 - RNA, 20 nt, synthetic construct
  source 1..20: mol_type = other RNA
ggtttccattgcattgatat

SEQ ID NO: 4381 - RNA, 20 nt, synthetic construct
  source 1..20: mol_type = other RNA
ggtttggaaatagccagagt

SEQ ID NO: 4382 - RNA, 20 nt, synthetic construct
  source 1..20: mol_type = other RNA
gtaaaactctggctatttcc

SEQ ID NO: 4383 - RNA, 20 nt, synthetic construct
  source 1..20: mol_type = other RNA
gtaaaagacgagggagatcc

SEQ ID NO: 4384 - RNA, 20 nt, synthetic construct
  source 1..20: mol_type = other RNA
gtaaagtgtatggatgggtg

SEQ ID NO: 4385 - RNA, 20 nt, synthetic construct
  source 1..20: mol_type = other RNA
gtaaccaacaaaagggggtg

SEQ ID NO: 4386 - RNA, 20 nt, synthetic construct
  source 1..20: mol_type = other RNA
gtaactacatctccatatgc

SEQ ID NO: 4387 - RNA, 20 nt, synthetic construct
  source 1..20: mol_type = other RNA
gtaagagagaacagaaacag

SEQ ID NO: 4388 - RNA, 20 nt, synthetic construct
  source 1..20: mol_type = other RNA
gtaagcctccttggacacaa

SEQ ID NO: 4389 - RNA, 20 nt, synthetic construct
  source 1..20: mol_type = other RNA
gtaaggccctgtgacccgag

SEQ ID NO: 4390 - RNA, 20 nt, synthetic construct
  source 1..20: mol_type = other RNA
gtaagggttcatgggattag

SEQ ID NO: 4391 - RNA, 20 nt, synthetic construct
  source 1..20: mol_type = other RNA
gtaagtgggctctgaagttt

SEQ ID NO: 4392 - RNA, 20 nt, synthetic construct
  source 1..20: mol_type = other RNA
gtaatctagaggtggctccc

SEQ ID NO: 4393 - RNA, 20 nt, synthetic construct
  source 1..20: mol_type = other RNA
gtacaactgctgaaaccatc

SEQ ID NO: 4394 - RNA, 20 nt, synthetic construct
  source 1..20: mol_type = other RNA
gtacatcatgtagggaaatt

SEQ ID NO: 4395 - RNA, 20 nt, synthetic construct
  source 1..20: mol_type = other RNA
gtacatttggtctaatggta

SEQ ID NO: 4396 - RNA, 20 nt, synthetic construct
  source 1..20: mol_type = other RNA
gtaccattagaccaaatgta

SEQ ID NO: 4397 - RNA, 20 nt, synthetic construct
  source 1..20: mol_type = other RNA
gtagactgagcttagacaga

SEQ ID NO: 4398 - RNA, 20 nt, synthetic construct
  source 1..20: mol_type = other RNA
gtagaggctggggctgctgg

SEQ ID NO: 4399 - RNA, 20 nt, synthetic construct
  source 1..20: mol_type = other RNA
gtagggaaattgcctcctta

SEQ ID NO: 4400 - RNA, 20 nt, synthetic construct
  source 1..20: mol_type = other RNA
gtagttactgtggagtctgt

SEQ ID NO: 4401 - RNA, 20 nt, synthetic construct
  source 1..20: mol_type = other RNA
gtagttatggattatgtgag

SEQ ID NO: 4402 - RNA, 20 nt, synthetic construct
  source 1..20: mol_type = other RNA
gtataggtatccaagccaag

SEQ ID NO: 4403 - RNA, 20 nt, synthetic construct
  source 1..20: mol_type = other RNA
gtatccaagccaagaccctc

SEQ ID NO: 4404 - RNA, 20 nt, synthetic construct
  source 1..20: mol_type = other RNA
gtatggatgggtggtagact

SEQ ID NO: 4405 - RNA, 20 nt, synthetic construct
  source 1..20: mol_type = other RNA
gtatggattggtggatccag

SEQ ID NO: 4406 - RNA, 20 nt, synthetic construct
  source 1..20: mol_type = other RNA
gtatggcccagactatgtgc

SEQ ID NO: 4407 - RNA, 20 nt, synthetic construct
  source 1..20: mol_type = other RNA
gtattctgattcaaaagccc

SEQ ID NO: 4408 - RNA, 20 nt, synthetic construct
  source 1..20: mol_type = other RNA
gtatttagatgtaaaactct

SEQ ID NO: 4409 - RNA, 20 nt, synthetic construct
  source 1..20: mol_type = other RNA
gtcaactcttattctgcttc

SEQ ID NO: 4410 - RNA, 20 nt, synthetic construct
  source 1..20: mol_type = other RNA
gtcaattctcattgagtgtg

SEQ ID NO: 4411 - RNA, 20 nt, synthetic construct
  source 1..20: mol_type = other RNA
gtcacagggccttacaacag

SEQ ID NO: 4412 - RNA, 20 nt, synthetic construct
  source 1..20: mol_type = other RNA
gtcacggacatggtcctttc

SEQ ID NO: 4413 - RNA, 20 nt, synthetic construct
  source 1..20: mol_type = other RNA
gtcagacagcgagcagagct

SEQ ID NO: 4414 - RNA, 20 nt, synthetic construct
  source 1..20: mol_type = other RNA
gtcaggaaaagcagccattg

SEQ ID NO: 4415 - RNA, 20 nt, synthetic construct
  source 1..20: mol_type = other RNA
gtcaggatccagaaagctct

SEQ ID NO: 4416 - RNA, 20 nt, synthetic construct
  source 1..20: mol_type = other RNA
gtcatgcagcagtcccagca

SEQ ID NO: 4417 - RNA, 20 nt, synthetic construct
  source 1..20: mol_type = other RNA
gtcattctccttgttttgga

SEQ ID NO: 4418 - RNA, 20 nt, synthetic construct
  source 1..20: mol_type = other RNA
gtccaaggaggcttacacaa

SEQ ID NO: 4419 - RNA, 20 nt, synthetic construct
  source 1..20: mol_type = other RNA
gtccacagaacttttgcgac

SEQ ID NO: 4420 - RNA, 20 nt, synthetic construct
  source 1..20: mol_type = other RNA
gtccactgataggtttccat

SEQ ID NO: 4421 - RNA, 20 nt, synthetic construct
  source 1..20: mol_type = other RNA
gtccagggtgtggcttctgg

SEQ ID NO: 4422 - RNA, 20 nt, synthetic construct
  source 1..20: mol_type = other RNA
gtccatgtttggattgctca

SEQ ID NO: 4423 - RNA, 20 nt, synthetic construct
  source 1..20: mol_type = other RNA
gtcccagcagccccagcctc

SEQ ID NO: 4424 - RNA, 20 nt, synthetic construct
  source 1..20: mol_type = other RNA
gtccgtgaccacagactcca

SEQ ID NO: 4425 - RNA, 20 nt, synthetic construct
  source 1..20: mol_type = other RNA
gtcctctgcaccagaagcca

SEQ ID NO: 4426 - RNA, 20 nt, synthetic construct
  source 1..20: mol_type = other RNA
gtcctgaaagtcgcaaaagt

SEQ ID NO: 4427 - RNA, 20 nt, synthetic construct
  source 1..20: mol_type = other RNA
gtccttatccaaactcttca

SEQ ID NO: 4428 - RNA, 20 nt, synthetic construct
  source 1..20: mol_type = other RNA
gtcctttcggcaagagactt

SEQ ID NO: 4429 - RNA, 20 nt, synthetic construct
  source 1..20: mol_type = other RNA
gtcgcaaaagttctgtggac

SEQ ID NO: 4430 - RNA, 20 nt, synthetic construct
  source 1..20: mol_type = other RNA
gtctaagctcagtctaccac

SEQ ID NO: 4431 - RNA, 20 nt, synthetic construct
  source 1..20: mol_type = other RNA
gtctaatggtacaactgctg

SEQ ID NO: 4432 - RNA, 20 nt, synthetic construct
  source 1..20: mol_type = other RNA
gtctaccacccatccataca

SEQ ID NO: 4433 - RNA, 20 nt, synthetic construct
  source 1..20: mol_type = other RNA
gtctcagccgatggatctgt

SEQ ID NO: 4434 - RNA, 20 nt, synthetic construct
  source 1..20: mol_type = other RNA
gtctcatgtatggattggtg

SEQ ID NO: 4435 - RNA, 20 nt, synthetic construct
  source 1..20: mol_type = other RNA
gtctctgctgctgctggggc

SEQ ID NO: 4436 - RNA, 20 nt, synthetic construct
  source 1..20: mol_type = other RNA
gtctcttgccgaaaggacca

SEQ ID NO: 4437 - RNA, 20 nt, synthetic construct
  source 1..20: mol_type = other RNA
gtctgaccagacctcatcgt

SEQ ID NO: 4438 - RNA, 20 nt, synthetic construct
  source 1..20: mol_type = other RNA
gtctgagggtgatgtggctg

SEQ ID NO: 4439 - RNA, 20 nt, synthetic construct
  source 1..20: mol_type = other RNA
gtctgggccatacttttcac

SEQ ID NO: 4440 - RNA, 20 nt, synthetic construct
  source 1..20: mol_type = other RNA
gtctggtcagacagcgagca

SEQ ID NO: 4441 - RNA, 20 nt, synthetic construct
  source 1..20: mol_type = other RNA
gtctgtcaactcttattctg

SEQ ID NO: 4442 - RNA, 20 nt, synthetic construct
  source 1..20: mol_type = other RNA
gtctgtggtcacggacatgg

SEQ ID NO: 4443 - RNA, 20 nt, synthetic construct
  source 1..20: mol_type = other RNA
gtcttggcttggatacctat

SEQ ID NO: 4444 - RNA, 20 nt, synthetic construct
  source 1..20: mol_type = other RNA
gtcttttaccagcataagag

SEQ ID NO: 4445 - RNA, 20 nt, synthetic construct
  source 1..20: mol_type = other RNA
gtcttttcaagtgaggtaac

SEQ ID NO: 4446 - RNA, 20 nt, synthetic construct
  source 1..20: mol_type = other RNA
gtgaaaagtatggcccagac

SEQ ID NO: 4447 - RNA, 20 nt, synthetic construct
  source 1..20: mol_type = other RNA
gtgaaacgggagcctgctga

SEQ ID NO: 4448 - RNA, 20 nt, synthetic construct
  source 1..20: mol_type = other RNA
gtgaacatcattcaccttct

SEQ ID NO: 4449 - RNA, 20 nt, synthetic construct
  source 1..20: mol_type = other RNA
gtgaagagtttggataagga

SEQ ID NO: 4450 - RNA, 20 nt, synthetic construct
  source 1..20: mol_type = other RNA
gtgaaggcatatggagatgt

SEQ ID NO: 4451 - RNA, 20 nt, synthetic construct
  source 1..20: mol_type = other RNA
gtgaatgatgttcaccattt

SEQ ID NO: 4452 - RNA, 20 nt, synthetic construct
  source 1..20: mol_type = other RNA
gtgaccacagactccacagt

SEQ ID NO: 4453 - RNA, 20 nt, synthetic construct
  source 1..20: mol_type = other RNA
gtgacccgagtgaaggcata

SEQ ID NO: 4454 - RNA, 20 nt, synthetic construct
  source 1..20: mol_type = other RNA
gtgagaaagaggaagagtgt

SEQ ID NO: 4455 - RNA, 20 nt, synthetic construct
  source 1..20: mol_type = other RNA
gtgagaaggtgaatgatgtt

SEQ ID NO: 4456 - RNA, 20 nt, synthetic construct
  source 1..20: mol_type = other RNA
gtgagctgcatgccacaacc

SEQ ID NO: 4457 - RNA, 20 nt, synthetic construct
  source 1..20: mol_type = other RNA
gtgaggtaaccaacaaaagg

SEQ ID NO: 4458 - RNA, 20 nt, synthetic construct
  source 1..20: mol_type = other RNA
gtgatatcatatatatctgt

SEQ ID NO: 4459 - RNA, 20 nt, synthetic construct
  source 1..20: mol_type = other RNA
gtgatgctaatggtcaggaa

SEQ ID NO: 4460 - RNA, 20 nt, synthetic construct
  source 1..20: mol_type = other RNA
gtgatgtggctgctgctgct

SEQ ID NO: 4461 - RNA, 20 nt, synthetic construct
  source 1..20: mol_type = other RNA
gtgattcctattgggattct

SEQ ID NO: 4462 - RNA, 20 nt, synthetic construct
  source 1..20: mol_type = other RNA
gtgcaaagcgtgagctgcat

SEQ ID NO: 4463 - RNA, 20 nt, synthetic construct
  source 1..20: mol_type = other RNA
gtgcagaggacaacgatgag

SEQ ID NO: 4464 - RNA, 20 nt, synthetic construct
  source 1..20: mol_type = other RNA
gtgcagctccgggcatgttc

SEQ ID NO: 4465 - RNA, 20 nt, synthetic construct
  source 1..20: mol_type = other RNA
gtgccaatggctgcttttcc

SEQ ID NO: 4466 - RNA, 20 nt, synthetic construct
  source 1..20: mol_type = other RNA
gtgcctcagaaatcccatgg

SEQ ID NO: 4467 - RNA, 20 nt, synthetic construct
  source 1..20: mol_type = other RNA
gtgcttccatagatatctga

SEQ ID NO: 4468 - RNA, 20 nt, synthetic construct
  source 1..20: mol_type = other RNA
gtggaatagaagttcatagg

SEQ ID NO: 4469 - RNA, 20 nt, synthetic construct
  source 1..20: mol_type = other RNA
gtggacaactgctccccata

SEQ ID NO: 4470 - RNA, 20 nt, synthetic construct
  source 1..20: mol_type = other RNA
gtggacagggtaagagagaa

SEQ ID NO: 4471 - RNA, 20 nt, synthetic construct
  source 1..20: mol_type = other RNA
gtggagtctgtggtcacgga

SEQ ID NO: 4472 - RNA, 20 nt, synthetic construct
  source 1..20: mol_type = other RNA
gtggatccagaagcagaata

SEQ ID NO: 4473 - RNA, 20 nt, synthetic construct
  source 1..20: mol_type = other RNA
gtggcatgcagctcacgctt

SEQ ID NO: 4474 - RNA, 20 nt, synthetic construct
  source 1..20: mol_type = other RNA
gtggccatccatctcatgag

SEQ ID NO: 4475 - RNA, 20 nt, synthetic construct
  source 1..20: mol_type = other RNA
gtggccgtggctccaactca

SEQ ID NO: 4476 - RNA, 20 nt, synthetic construct
  source 1..20: mol_type = other RNA
gtggctcagcaggctcccgt

SEQ ID NO: 4477 - RNA, 20 nt, synthetic construct
  source 1..20: mol_type = other RNA
gtggctccaactcatgggtc

SEQ ID NO: 4478 - RNA, 20 nt, synthetic construct
  source 1..20: mol_type = other RNA
gtggctcccatgaagtggcc

SEQ ID NO: 4479 - RNA, 20 nt, synthetic construct
  source 1..20: mol_type = other RNA
gtggctgctgctgctggggt

SEQ ID NO: 4480 - RNA, 20 nt, synthetic construct
  source 1..20: mol_type = other RNA
gtggctgcttctgtagaggc

SEQ ID NO: 4481 - RNA, 20 nt, synthetic construct
  source 1..20: mol_type = other RNA
gtggcttctggtgcagagga

SEQ ID NO: 4482 - RNA, 20 nt, synthetic construct
  source 1..20: mol_type = other RNA
gtgggaaagcatgtcattct

SEQ ID NO: 4483 - RNA, 20 nt, synthetic construct
  source 1..20: mol_type = other RNA
gtgggataaggaggcaattt

SEQ ID NO: 4484 - RNA, 20 nt, synthetic construct
  source 1..20: mol_type = other RNA
gtgggctctgaagtttcatg

SEQ ID NO: 4485 - RNA, 20 nt, synthetic construct
  source 1..20: mol_type = other RNA
gtggggtgattcctattggg

SEQ ID NO: 4486 - RNA, 20 nt, synthetic construct
  source 1..20: mol_type = other RNA
gtggtaatctagaggtggct

SEQ ID NO: 4487 - RNA, 20 nt, synthetic construct
  source 1..20: mol_type = other RNA
gtggtagactgagcttagac

SEQ ID NO: 4488 - RNA, 20 nt, synthetic construct
  source 1..20: mol_type = other RNA
gtggtcacggacatggtcct

SEQ ID NO: 4489 - RNA, 20 nt, synthetic construct
  source 1..20: mol_type = other RNA
gtggtggctgcttctgtaga

SEQ ID NO: 4490 - RNA, 20 nt, synthetic construct
  source 1..20: mol_type = other RNA
gtgtaagcctccttggacac

SEQ ID NO: 4491 - RNA, 20 nt, synthetic construct
  source 1..20: mol_type = other RNA
gtgtatggatgggtggtaga

SEQ ID NO: 4492 - RNA, 20 nt, synthetic construct
  source 1..20: mol_type = other RNA
gtgtccaaggaggcttacac

SEQ ID NO: 4493 - RNA, 20 nt, synthetic construct
  source 1..20: mol_type = other RNA
gtgtgaaaagtatggcccag

SEQ ID NO: 4494 - RNA, 20 nt, synthetic construct
  source 1..20: mol_type = other RNA
gtgtgaagagtttggataag

SEQ ID NO: 4495 - RNA, 20 nt, synthetic construct
  source 1..20: mol_type = other RNA
gtgtgcaaagcgtgagctgc

SEQ ID NO: 4496 - RNA, 20 nt, synthetic construct
  source 1..20: mol_type = other RNA
gtgtggcttctggtgcagag

SEQ ID NO: 4497 - RNA, 20 nt, synthetic construct
  source 1..20: mol_type = other RNA
gtgtgggaaagcatgtcatt

SEQ ID NO: 4498 - RNA, 20 nt, synthetic construct
  source 1..20: mol_type = other RNA
gtgtgtgaagagtttggata

SEQ ID NO: 4499 - RNA, 20 nt, synthetic construct
  source 1..20: mol_type = other RNA
gttaagagctggaagcatct

SEQ ID NO: 4500 - RNA, 20 nt, synthetic construct
  source 1..20: mol_type = other RNA
gttactgtggagtctgtggt

SEQ ID NO: 4501 - RNA, 20 nt, synthetic construct
  source 1..20: mol_type = other RNA
gttagtccttatccaaactc

SEQ ID NO: 4502 - RNA, 20 nt, synthetic construct
  source 1..20: mol_type = other RNA
gttatcaaagatgcttccag

SEQ ID NO: 4503 - RNA, 20 nt, synthetic construct
  source 1..20: mol_type = other RNA
gttatggaaaccaaaatatg

SEQ ID NO: 4504 - RNA, 20 nt, synthetic construct
  source 1..20: mol_type = other RNA
gttatggattatgtgagaag

SEQ ID NO: 4505 - RNA, 20 nt, synthetic construct
  source 1..20: mol_type = other RNA
gttcaacagctctcttcatg

SEQ ID NO: 4506 - RNA, 20 nt, synthetic construct
  source 1..20: mol_type = other RNA
gttcaccatttttatagtcc

SEQ ID NO: 4507 - RNA, 20 nt, synthetic construct
  source 1..20: mol_type = other RNA
gttcatagggctggtgcttc

SEQ ID NO: 4508 - RNA, 20 nt, synthetic construct
  source 1..20: mol_type = other RNA
gttcatatttgaattcttct

SEQ ID NO: 4509 - RNA, 20 nt, synthetic construct
  source 1..20: mol_type = other RNA
gttcatgggattagaagaat

SEQ ID NO: 4510 - RNA, 20 nt, synthetic construct
  source 1..20: mol_type = other RNA
gttcctattctccccagtct

SEQ ID NO: 4511 - RNA, 20 nt, synthetic construct
  source 1..20: mol_type = other RNA
gttctatcatggttaagagc

SEQ ID NO: 4512 - RNA, 20 nt, synthetic construct
  source 1..20: mol_type = other RNA
gttctctcttaccctgtcca

SEQ ID NO: 4513 - RNA, 20 nt, synthetic construct
  source 1..20: mol_type = other RNA
gttctgtggacagggtaaga

SEQ ID NO: 4514 - RNA, 20 nt, synthetic construct
  source 1..20: mol_type = other RNA
gttgaacatgcccggagctg

SEQ ID NO: 4515 - RNA, 20 nt, synthetic construct
  source 1..20: mol_type = other RNA
gttgacagactctgtctgag

SEQ ID NO: 4516 - RNA, 20 nt, synthetic construct
  source 1..20: mol_type = other RNA
gttggagccacggccactcc

SEQ ID NO: 4517 - RNA, 20 nt, synthetic construct
  source 1..20: mol_type = other RNA
gttgtaaggccctgtgaccc

SEQ ID NO: 4518 - RNA, 20 nt, synthetic construct
  source 1..20: mol_type = other RNA
gttgtaccattagaccaaat

SEQ ID NO: 4519 - RNA, 20 nt, synthetic construct
  source 1..20: mol_type = other RNA
gttgtccactgataggtttc

SEQ ID NO: 4520 - RNA, 20 nt, synthetic construct
  source 1..20: mol_type = other RNA
gttgtcctctgcaccagaag

SEQ ID NO: 4521 - RNA, 20 nt, synthetic construct
  source 1..20: mol_type = other RNA
gttgtggcatgcagctcacg

SEQ ID NO: 4522 - RNA, 20 nt, synthetic construct
  source 1..20: mol_type = other RNA
gtttcacttttttgccatgg

SEQ ID NO: 4523 - RNA, 20 nt, synthetic construct
  source 1..20: mol_type = other RNA
gtttcagcagttgtaccatt

SEQ ID NO: 4524 - RNA, 20 nt, synthetic construct
  source 1..20: mol_type = other RNA
gtttcatcaagtctcttgcc

SEQ ID NO: 4525 - RNA, 20 nt, synthetic construct
  source 1..20: mol_type = other RNA
gtttcatgtggctcagcagg

SEQ ID NO: 4526 - RNA, 20 nt, synthetic construct
  source 1..20: mol_type = other RNA
gtttccataacctaagtatt

SEQ ID NO: 4527 - RNA, 20 nt, synthetic construct
  source 1..20: mol_type = other RNA
gtttccattgcattgatatg

SEQ ID NO: 4528 - RNA, 20 nt, synthetic construct
  source 1..20: mol_type = other RNA
gtttctgttctctcttaccc

SEQ ID NO: 4529 - RNA, 20 nt, synthetic construct
  source 1..20: mol_type = other RNA
gtttggaaatagccagagtt

SEQ ID NO: 4530 - RNA, 20 nt, synthetic construct
  source 1..20: mol_type = other RNA
gtttggataaggactaactg

SEQ ID NO: 4531 - RNA, 20 nt, synthetic construct
  source 1..20: mol_type = other RNA
gtttggattgctcagattgg

SEQ ID NO: 4532 - RNA, 20 nt, synthetic construct
  source 1..20: mol_type = other RNA
gttttggagatgcagggcat

SEQ ID NO: 4533 - RNA, 20 nt, synthetic construct
  source 1..20: mol_type = other RNA
gttttggctcattcatgctc

SEQ ID NO: 4534 - RNA, 20 nt, synthetic construct
  source 1..20: mol_type = other RNA
taaaaatggtgaacatcatt

SEQ ID NO: 4535 - RNA, 20 nt, synthetic construct
  source 1..20: mol_type = other RNA
taaaactctggctatttcca

SEQ ID NO: 4536 - RNA, 20 nt, synthetic construct
  source 1..20: mol_type = other RNA
taaaagacgagggagatcct

SEQ ID NO: 4537 - RNA, 20 nt, synthetic construct
  source 1..20: mol_type = other RNA
taaagaatcccaataggaat

SEQ ID NO: 4538 - RNA, 20 nt, synthetic construct
  source 1..20: mol_type = other RNA
taaaggggttgtggcatgca

SEQ ID NO: 4539 - RNA, 20 nt, synthetic construct
  source 1..20: mol_type = other RNA
taaagtgtatggatgggtgg

SEQ ID NO: 4540 - RNA, 20 nt, synthetic construct
  source 1..20: mol_type = other RNA
taaatacttaggttatggaa

SEQ ID NO: 4541 - RNA, 20 nt, synthetic construct
  source 1..20: mol_type = other RNA
taaccaacaaaagggggtga

SEQ ID NO: 4542 - RNA, 20 nt, synthetic construct
  source 1..20: mol_type = other RNA
taaccatgatagaactgctt

SEQ ID NO: 4543 - RNA, 20 nt, synthetic construct
  source 1..20: mol_type = other RNA
taacccattagctgtgtggg

SEQ ID NO: 4544 - RNA, 20 nt, synthetic construct
  source 1..20: mol_type = other RNA
taacctaagtatttagatgt

SEQ ID NO: 4545 - RNA, 20 nt, synthetic construct
  source 1..20: mol_type = other RNA
taactacagtgcagctccgg

SEQ ID NO: 4546 - RNA, 20 nt, synthetic construct
  source 1..20: mol_type = other RNA
taactacatctccatatgcc

SEQ ID NO: 4547 - RNA, 20 nt, synthetic construct
  source 1..20: mol_type = other RNA
taactggattgggccgtctc

SEQ ID NO: 4548 - RNA, 20 nt, synthetic construct
  source 1..20: mol_type = other RNA
taagagcatgaatgagccaa

SEQ ID NO: 4549 - RNA, 20 nt, synthetic construct
  source 1..20: mol_type = other RNA
taagagctggaagcatcttt

SEQ ID NO: 4550 - RNA, 20 nt, synthetic construct
  source 1..20: mol_type = other RNA
taagagttgacagactctgt

SEQ ID NO: 4551 - RNA, 20 nt, synthetic construct
  source 1..20: mol_type = other RNA
taagcctccttggacacaag

SEQ ID NO: 4552 - RNA, 20 nt, synthetic construct
  source 1..20: mol_type = other RNA
taagctcagtctaccaccca

SEQ ID NO: 4553 - RNA, 20 nt, synthetic construct
  source 1..20: mol_type = other RNA
taaggactaactggattggg

SEQ ID NO: 4554 - RNA, 20 nt, synthetic construct
  source 1..20: mol_type = other RNA
taaggaggcaatttccctac

SEQ ID NO: 4555 - RNA, 20 nt, synthetic construct
  source 1..20: mol_type = other RNA
taaggccctgtgacccgagt

SEQ ID NO: 4556 - RNA, 20 nt, synthetic construct
  source 1..20: mol_type = other RNA
taagggttcatgggattaga

SEQ ID NO: 4557 - RNA, 20 nt, synthetic construct
  source 1..20: mol_type = other RNA
taagtgatgctaatggtcag

SEQ ID NO: 4558 - RNA, 20 nt, synthetic construct
  source 1..20: mol_type = other RNA
taagtgggctctgaagtttc

SEQ ID NO: 4559 - RNA, 20 nt, synthetic construct
  source 1..20: mol_type = other RNA
taatccataactacagtgca

SEQ ID NO: 4560 - RNA, 20 nt, synthetic construct
  source 1..20: mol_type = other RNA
taatcccatgaacccttacc

SEQ ID NO: 4561 - RNA, 20 nt, synthetic construct
  source 1..20: mol_type = other RNA
taatctagaggtggctccca

SEQ ID NO: 4562 - RNA, 20 nt, synthetic construct
  source 1..20: mol_type = other RNA
taatgggttatcaaagatgc

SEQ ID NO: 4563 - RNA, 20 nt, synthetic construct
  source 1..20: mol_type = other RNA
taatggtacaactgctgaaa

SEQ ID NO: 4564 - RNA, 20 nt, synthetic construct
  source 1..20: mol_type = other RNA
taatggtcaggaaaagcagc

SEQ ID NO: 4565 - RNA, 20 nt, synthetic construct
  source 1..20: mol_type = other RNA
taatttgtgtaagcctcctt

SEQ ID NO: 4566 - RNA, 20 nt, synthetic construct
  source 1..20: mol_type = other RNA
tacaactgctgaaaccatct

SEQ ID NO: 4567 - RNA, 20 nt, synthetic construct
  source 1..20: mol_type = other RNA
tacacaaattaagtgatgct

SEQ ID NO: 4568 - RNA, 20 nt, synthetic construct
  source 1..20: mol_type = other RNA
tacactttaccagccaaggt

SEQ ID NO: 4569 - RNA, 20 nt, synthetic construct
  source 1..20: mol_type = other RNA
tacagaagcagccaccacag

SEQ ID NO: 4570 - RNA, 20 nt, synthetic construct
  source 1..20: mol_type = other RNA
tacagatccatcggctgaga

SEQ ID NO: 4571 - RNA, 20 nt, synthetic construct
  source 1..20: mol_type = other RNA
tacagtgcagctccgggcat

SEQ ID NO: 4572 - RNA, 20 nt, synthetic construct
  source 1..20: mol_type = other RNA
tacatcatgtagggaaattg

SEQ ID NO: 4573 - RNA, 20 nt, synthetic construct
  source 1..20: mol_type = other RNA
tacatctaaatacttaggtt

SEQ ID NO: 4574 - RNA, 20 nt, synthetic construct
  source 1..20: mol_type = other RNA
tacatctccatatgccttca

SEQ ID NO: 4575 - RNA, 20 nt, synthetic construct
  source 1..20: mol_type = other RNA
tacatgagacggcccaatcc

SEQ ID NO: 4576 - RNA, 20 nt, synthetic construct
  source 1..20: mol_type = other RNA
tacatgatgtacatttggtc

SEQ ID NO: 4577 - RNA, 20 nt, synthetic construct
  source 1..20: mol_type = other RNA
tacatttggtctaatggtac

SEQ ID NO: 4578 - RNA, 20 nt, synthetic construct
  source 1..20: mol_type = other RNA
taccacccaatctgagcaat

SEQ ID NO: 4579 - RNA, 20 nt, synthetic construct
  source 1..20: mol_type = other RNA
taccacccatccatacactt

SEQ ID NO: 4580 - RNA, 20 nt, synthetic construct
  source 1..20: mol_type = other RNA
taccagcataagagcatgaa

SEQ ID NO: 4581 - RNA, 20 nt, synthetic construct
  source 1..20: mol_type = other RNA
taccagccaaggtttggaaa

SEQ ID NO: 4582 - RNA, 20 nt, synthetic construct
  source 1..20: mol_type = other RNA
taccattagaccaaatgtac

SEQ ID NO: 4583 - RNA, 20 nt, synthetic construct
  source 1..20: mol_type = other RNA
tacccaatatccatcatatc

SEQ ID NO: 4584 - RNA, 20 nt, synthetic construct
  source 1..20: mol_type = other RNA
taccctgggcttttgaatca

SEQ ID NO: 4585 - RNA, 20 nt, synthetic construct
  source 1..20: mol_type = other RNA
taccctgtccacagaacttt

SEQ ID NO: 4586 - RNA, 20 nt, synthetic construct
  source 1..20: mol_type = other RNA
tacctatacagatccatcgg

SEQ ID NO: 4587 - RNA, 20 nt, synthetic construct
  source 1..20: mol_type = other RNA
tacctgcgtttcatcaagtc

SEQ ID NO: 4588 - RNA, 20 nt, synthetic construct
  source 1..20: mol_type = other RNA
tacctgtttctgttctctct

SEQ ID NO: 4589 - RNA, 20 nt, synthetic construct
  source 1..20: mol_type = other RNA
tactgtggagtctgtggtca

SEQ ID NO: 4590 - RNA, 20 nt, synthetic construct
  source 1..20: mol_type = other RNA
tacttaggttatggaaacca

SEQ ID NO: 4591 - RNA, 20 nt, synthetic construct
  source 1..20: mol_type = other RNA
tacttttcacactcttcctc

SEQ ID NO: 4592 - RNA, 20 nt, synthetic construct
  source 1..20: mol_type = other RNA
tagaactgcttgtgtccaag

SEQ ID NO: 4593 - RNA, 20 nt, synthetic construct
  source 1..20: mol_type = other RNA
tagaagttcatagggctggt

SEQ ID NO: 4594 - RNA, 20 nt, synthetic construct
  source 1..20: mol_type = other RNA
tagacagagggtcttggctt

SEQ ID NO: 4595 - RNA, 20 nt, synthetic construct
  source 1..20: mol_type = other RNA
tagaccaaatgtacatcatg

SEQ ID NO: 4596 - RNA, 20 nt, synthetic construct
  source 1..20: mol_type = other RNA
tagactgagcttagacagag

SEQ ID NO: 4597 - RNA, 20 nt, synthetic construct
  source 1..20: mol_type = other RNA
tagaggctggggctgctggg

SEQ ID NO: 4598 - RNA, 20 nt, synthetic construct
  source 1..20: mol_type = other RNA
tagaggtggctcccatgaag

SEQ ID NO: 4599 - RNA, 20 nt, synthetic construct
  source 1..20: mol_type = other RNA
tagatatctgaagtgtgtga

SEQ ID NO: 4600 - RNA, 20 nt, synthetic construct
  source 1..20: mol_type = other RNA
tagatgtaaaactctggcta

SEQ ID NO: 4601 - RNA, 20 nt, synthetic construct
  source 1..20: mol_type = other RNA
tagattaccacccaatctga

SEQ ID NO: 4602 - RNA, 20 nt, synthetic construct
  source 1..20: mol_type = other RNA
tagcatcacttaatttgtgt

SEQ ID NO: 4603 - RNA, 20 nt, synthetic construct
  source 1..20: mol_type = other RNA
tagccagagttttacatcta

SEQ ID NO: 4604 - RNA, 20 nt, synthetic construct
  source 1..20: mol_type = other RNA
tagctgtgtgggaaagcatg

SEQ ID NO: 4605 - RNA, 20 nt, synthetic construct
  source 1..20: mol_type = other RNA
taggaacccagatatgggga

SEQ ID NO: 4606 - RNA, 20 nt, synthetic construct
  source 1..20: mol_type = other RNA
taggaatcaccccaccagga

SEQ ID NO: 4607 - RNA, 20 nt, synthetic construct
  source 1..20: mol_type = other RNA
tagggaaattgcctccttat

SEQ ID NO: 4608 - RNA, 20 nt, synthetic construct
  source 1..20: mol_type = other RNA
tagggctggtgcttccatag

SEQ ID NO: 4609 - RNA, 20 nt, synthetic construct
  source 1..20: mol_type = other RNA
taggtatccaagccaagacc

SEQ ID NO: 4610 - RNA, 20 nt, synthetic construct
  source 1..20: mol_type = other RNA
taggttatggaaaccaaaat

SEQ ID NO: 4611 - RNA, 20 nt, synthetic construct
  source 1..20: mol_type = other RNA
taggtttccattgcattgat

SEQ ID NO: 4612 - RNA, 20 nt, synthetic construct
  source 1..20: mol_type = other RNA
tagtccagggtgtggcttct

SEQ ID NO: 4613 - RNA, 20 nt, synthetic construct
  source 1..20: mol_type = other RNA
tagtccatgtttggattgct

SEQ ID NO: 4614 - RNA, 20 nt, synthetic construct
  source 1..20: mol_type = other RNA
tagtccttatccaaactctt

SEQ ID NO: 4615 - RNA, 20 nt, synthetic construct
  source 1..20: mol_type = other RNA
tagtctgggccatacttttc

SEQ ID NO: 4616 - RNA, 20 nt, synthetic construct
  source 1..20: mol_type = other RNA
tagtgccaatggctgctttt

SEQ ID NO: 4617 - RNA, 20 nt, synthetic construct
  source 1..20: mol_type = other RNA
tagttactgtggagtctgtg

SEQ ID NO: 4618 - RNA, 20 nt, synthetic construct
  source 1..20: mol_type = other RNA
tagttatggattatgtgaga

SEQ ID NO: 4619 - RNA, 20 nt, synthetic construct
  source 1..20: mol_type = other RNA
tataaaaatggtgaacatca

SEQ ID NO: 4620 - RNA, 20 nt, synthetic construct
  source 1..20: mol_type = other RNA
tatacagatccatcggctga

SEQ ID NO: 4621 - RNA, 20 nt, synthetic construct
  source 1..20: mol_type = other RNA
tataggtatccaagccaaga

SEQ ID NO: 4622 - RNA, 20 nt, synthetic construct
  source 1..20: mol_type = other RNA
tatagtccatgtttggattg

SEQ ID NO: 4623 - RNA, 20 nt, synthetic construct
  source 1..20: mol_type = other RNA
tatatatctgttgtaaggcc

SEQ ID NO: 4624 - RNA, 20 nt, synthetic construct
  source 1..20: mol_type = other RNA
tatatatgatatcaccccct

SEQ ID NO: 4625 - RNA, 20 nt, synthetic construct
  source 1..20: mol_type = other RNA
tatatctgttgtaaggccct

SEQ ID NO: 4626 - RNA, 20 nt, synthetic construct
  source 1..20: mol_type = other RNA
tatatgatatcacccccttt

SEQ ID NO: 4627 - RNA, 20 nt, synthetic construct
  source 1..20: mol_type = other RNA
tatcaaagatgcttccagct

SEQ ID NO: 4628 - RNA, 20 nt, synthetic construct
  source 1..20: mol_type = other RNA
tatcaatgcaatggaaacct

SEQ ID NO: 4629 - RNA, 20 nt, synthetic construct
  source 1..20: mol_type = other RNA
tatcacccccttttgttggt

SEQ ID NO: 4630 - RNA, 20 nt, synthetic construct
  source 1..20: mol_type = other RNA
tatcagtggacaactgctcc

SEQ ID NO: 4631 - RNA, 20 nt, synthetic construct
  source 1..20: mol_type = other RNA
tatcatggttaagagctgga

SEQ ID NO: 4632 - RNA, 20 nt, synthetic construct
  source 1..20: mol_type = other RNA
tatccaaactcttcacacac

SEQ ID NO: 4633 - RNA, 20 nt, synthetic construct
  source 1..20: mol_type = other RNA
tatccaagccaagaccctct

SEQ ID NO: 4634 - RNA, 20 nt, synthetic construct
  source 1..20: mol_type = other RNA
tatccatcatatcaatgcaa

SEQ ID NO: 4635 - RNA, 20 nt, synthetic construct
  source 1..20: mol_type = other RNA
tatcccactcatgagatgga

SEQ ID NO: 4636 - RNA, 20 nt, synthetic construct
  source 1..20: mol_type = other RNA
tatctatggaagcaccagcc

SEQ ID NO: 4637 - RNA, 20 nt, synthetic construct
  source 1..20: mol_type = other RNA
tatctgaagtgtgtgaagag

SEQ ID NO: 4638 - RNA, 20 nt, synthetic construct
  source 1..20: mol_type = other RNA
tatctgggttcctattctcc

SEQ ID NO: 4639 - RNA, 20 nt, synthetic construct
  source 1..20: mol_type = other RNA
tatctgttgtaaggccctgt

SEQ ID NO: 4640 - RNA, 20 nt, synthetic construct
  source 1..20: mol_type = other RNA
tatgaacctgcagcttgaga

SEQ ID NO: 4641 - RNA, 20 nt, synthetic construct
  source 1..20: mol_type = other RNA
tatgaacttctattccacct

SEQ ID NO: 4642 - RNA, 20 nt, synthetic construct
  source 1..20: mol_type = other RNA
tatgatatcacccccttttg

SEQ ID NO: 4643 - RNA, 20 nt, synthetic construct
  source 1..20: mol_type = other RNA
tatgatggatattgggtatt

SEQ ID NO: 4644 - RNA, 20 nt, synthetic construct
  source 1..20: mol_type = other RNA
tatgcagggagatggtttca

SEQ ID NO: 4645 - RNA, 20 nt, synthetic construct
  source 1..20: mol_type = other RNA
tatgccttcactcgggtcac

SEQ ID NO: 4646 - RNA, 20 nt, synthetic construct
  source 1..20: mol_type = other RNA
tatgctggtaaaagacgagg

SEQ ID NO: 4647 - RNA, 20 nt, synthetic construct
  source 1..20: mol_type = other RNA
tatggaaaccaaaatatgca

SEQ ID NO: 4648 - RNA, 20 nt, synthetic construct
  source 1..20: mol_type = other RNA
tatggaagcaccagccctat

SEQ ID NO: 4649 - RNA, 20 nt, synthetic construct
  source 1..20: mol_type = other RNA
tatggagatgtagttactgt

SEQ ID NO: 4650 - RNA, 20 nt, synthetic construct
  source 1..20: mol_type = other RNA
tatggatgggtggtagactg

SEQ ID NO: 4651 - RNA, 20 nt, synthetic construct
  source 1..20: mol_type = other RNA
tatggattatgtgagaaggt

SEQ ID NO: 4652 - RNA, 20 nt, synthetic construct
  source 1..20: mol_type = other RNA
tatggattggtggatccaga

SEQ ID NO: 4653 - RNA, 20 nt, synthetic construct
  source 1..20: mol_type = other RNA
tatggcccagactatgtgcc

SEQ ID NO: 4654 - RNA, 20 nt, synthetic construct
  source 1..20: mol_type = other RNA
tatggggagcagttgtccac

SEQ ID NO: 4655 - RNA, 20 nt, synthetic construct
  source 1..20: mol_type = other RNA
tatgtgagaaggtgaatgat

SEQ ID NO: 4656 - RNA, 20 nt, synthetic construct
  source 1..20: mol_type = other RNA
tatgtgcctcagaaatccca

SEQ ID NO: 4657 - RNA, 20 nt, synthetic construct
  source 1..20: mol_type = other RNA
tattccacctcatctcaagc

SEQ ID NO: 4658 - RNA, 20 nt, synthetic construct
  source 1..20: mol_type = other RNA
tattctccccagtctcagcc

SEQ ID NO: 4659 - RNA, 20 nt, synthetic construct
  source 1..20: mol_type = other RNA
tattctgattcaaaagccca

SEQ ID NO: 4660 - RNA, 20 nt, synthetic construct
  source 1..20: mol_type = other RNA
tattctgcttctggatccac

SEQ ID NO: 4661 - RNA, 20 nt, synthetic construct
  source 1..20: mol_type = other RNA
tattgggattctttaaaggg

SEQ ID NO: 4662 - RNA, 20 nt, synthetic construct
  source 1..20: mol_type = other RNA
tattgggtattctgattcaa

SEQ ID NO: 4663 - RNA, 20 nt, synthetic construct
  source 1..20: mol_type = other RNA
tatttagatgtaaaactctg

SEQ ID NO: 4664 - RNA, 20 nt, synthetic construct
  source 1..20: mol_type = other RNA
tatttccaaaccttggctgg

SEQ ID NO: 4665 - RNA, 20 nt, synthetic construct
  source 1..20: mol_type = other RNA
tatttgaattcttctaatcc

SEQ ID NO: 4666 - RNA, 20 nt, synthetic construct
  source 1..20: mol_type = other RNA
tattttggtttccataacct

SEQ ID NO: 4667 - RNA, 20 nt, synthetic construct
  source 1..20: mol_type = other RNA
tcaaaagcccagggtaaggg

SEQ ID NO: 4668 - RNA, 20 nt, synthetic construct
  source 1..20: mol_type = other RNA
tcaaagatgcttccagctct

SEQ ID NO: 4669 - RNA, 20 nt, synthetic construct
  source 1..20: mol_type = other RNA
tcaaatatgaacctgcagct

SEQ ID NO: 4670 - RNA, 20 nt, synthetic construct
  source 1..20: mol_type = other RNA
tcaacagctctcttcatgcc

SEQ ID NO: 4671 - RNA, 20 nt, synthetic construct
  source 1..20: mol_type = other RNA
tcaactcttattctgcttct

SEQ ID NO: 4672 - RNA, 20 nt, synthetic construct
  source 1..20: mol_type = other RNA
tcaagctgcaggttcatatt

SEQ ID NO: 4673 - RNA, 20 nt, synthetic construct
  source 1..20: mol_type = other RNA
tcaagtctcttgccgaaagg

SEQ ID NO: 4674 - RNA, 20 nt, synthetic construct
  source 1..20: mol_type = other RNA
tcaagtgaggtaaccaacaa

SEQ ID NO: 4675 - RNA, 20 nt, synthetic construct
  source 1..20: mol_type = other RNA
tcaatgagaattgacccatg

SEQ ID NO: 4676 - RNA, 20 nt, synthetic construct
  source 1..20: mol_type = other RNA
tcaatgcaatggaaacctat

SEQ ID NO: 4677 - RNA, 20 nt, synthetic construct
  source 1..20: mol_type = other RNA
tcaattctcattgagtgtgc

SEQ ID NO: 4678 - RNA, 20 nt, synthetic construct
  source 1..20: mol_type = other RNA
tcacacacttcagatatcta

SEQ ID NO: 4679 - RNA, 20 nt, synthetic construct
  source 1..20: mol_type = other RNA
tcacactcttcctctttctc

SEQ ID NO: 4680 - RNA, 20 nt, synthetic construct
  source 1..20: mol_type = other RNA
tcacagggccttacaacaga

SEQ ID NO: 4681 - RNA, 20 nt, synthetic construct
  source 1..20: mol_type = other RNA
tcacataatccataactaca

SEQ ID NO: 4682 - RNA, 20 nt, synthetic construct
  source 1..20: mol_type = other RNA
tcaccatttttatagtccat

SEQ ID NO: 4683 - RNA, 20 nt, synthetic construct
  source 1..20: mol_type = other RNA
tcaccccaccaggatctccc

SEQ ID NO: 4684 - RNA, 20 nt, synthetic construct
  source 1..20: mol_type = other RNA
tcacccccttttgttggtta

SEQ ID NO: 4685 - RNA, 20 nt, synthetic construct
  source 1..20: mol_type = other RNA
tcaccctcagacagagtctg

SEQ ID NO: 4686 - RNA, 20 nt, synthetic construct
  source 1..20: mol_type = other RNA
tcaccttctcacataatcca

SEQ ID NO: 4687 - RNA, 20 nt, synthetic construct
  source 1..20: mol_type = other RNA
tcacgctttgcacactcaat

SEQ ID NO: 4688 - RNA, 20 nt, synthetic construct
  source 1..20: mol_type = other RNA
tcacggacatggtcctttcg

SEQ ID NO: 4689 - RNA, 20 nt, synthetic construct
  source 1..20: mol_type = other RNA
tcacgggctttttcagccat

SEQ ID NO: 4690 - RNA, 20 nt, synthetic construct
  source 1..20: mol_type = other RNA
tcactcgggtcacagggcct

SEQ ID NO: 4691 - RNA, 20 nt, synthetic construct
  source 1..20: mol_type = other RNA
tcacttaatttgtgtaagcc

SEQ ID NO: 4692 - RNA, 20 nt, synthetic construct
  source 1..20: mol_type = other RNA
tcacttttttgccatgggat

SEQ ID NO: 4693 - RNA, 20 nt, synthetic construct
  source 1..20: mol_type = other RNA
tcagaaatcccatggcaaaa

SEQ ID NO: 4694 - RNA, 20 nt, synthetic construct
  source 1..20: mol_type = other RNA
tcagaatacccaatatccat

SEQ ID NO: 4695 - RNA, 20 nt, synthetic construct
  source 1..20: mol_type = other RNA
tcagacagagtctgtcaact

SEQ ID NO: 4696 - RNA, 20 nt, synthetic construct
  source 1..20: mol_type = other RNA
tcagacagcgagcagagctt

SEQ ID NO: 4697 - RNA, 20 nt, synthetic construct
  source 1..20: mol_type = other RNA
tcagagcccacttacctgcg

SEQ ID NO: 4698 - RNA, 20 nt, synthetic construct
  source 1..20: mol_type = other RNA
tcagatatctatggaagcac

SEQ ID NO: 4699 - RNA, 20 nt, synthetic construct
  source 1..20: mol_type = other RNA
tcagattgggtggtaatcta

SEQ ID NO: 4700 - RNA, 20 nt, synthetic construct
  source 1..20: mol_type = other RNA
tcagcaggctcccgtttcac

SEQ ID NO: 4701 - RNA, 20 nt, synthetic construct
  source 1..20: mol_type = other RNA
tcagcagttgtaccattaga

SEQ ID NO: 4702 - RNA, 20 nt, synthetic construct
  source 1..20: mol_type = other RNA
tcagccattttggcttccca

SEQ ID NO: 4703 - RNA, 20 nt, synthetic construct
  source 1..20: mol_type = other RNA
tcagccgatggatctgtata

SEQ ID NO: 4704 - RNA, 20 nt, synthetic construct
  source 1..20: mol_type = other RNA
tcaggaaaagcagccattgg

SEQ ID NO: 4705 - RNA, 20 nt, synthetic construct
  source 1..20: mol_type = other RNA
tcaggaccagtcatgcagca

SEQ ID NO: 4706 - RNA, 20 nt, synthetic construct
  source 1..20: mol_type = other RNA
tcaggatccagaaagctctg

SEQ ID NO: 4707 - RNA, 20 nt, synthetic construct
  source 1..20: mol_type = other RNA
tcagtctaccacccatccat

SEQ ID NO: 4708 - RNA, 20 nt, synthetic construct
  source 1..20: mol_type = other RNA
tcagtggacaactgctcccc

SEQ ID NO: 4709 - RNA, 20 nt, synthetic construct
  source 1..20: mol_type = other RNA
tcatagggctggtgcttcca

SEQ ID NO: 4710 - RNA, 20 nt, synthetic construct
  source 1..20: mol_type = other RNA
tcatatatatctgttgtaag

SEQ ID NO: 4711 - RNA, 20 nt, synthetic construct
  source 1..20: mol_type = other RNA
tcatatcaatgcaatggaaa

SEQ ID NO: 4712 - RNA, 20 nt, synthetic construct
  source 1..20: mol_type = other RNA
tcatcaagtctcttgccgaa

SEQ ID NO: 4713 - RNA, 20 nt, synthetic construct
  source 1..20: mol_type = other RNA
tcatcgttgtcctctgcacc

SEQ ID NO: 4714 - RNA, 20 nt, synthetic construct
  source 1..20: mol_type = other RNA
tcatctcaagctgcaggttc

SEQ ID NO: 4715 - RNA, 20 nt, synthetic construct
  source 1..20: mol_type = other RNA
tcatgagatggatggccact

SEQ ID NO: 4716 - RNA, 20 nt, synthetic construct
  source 1..20: mol_type = other RNA
tcatgagtgggataaggagg

SEQ ID NO: 4717 - RNA, 20 nt, synthetic construct
  source 1..20: mol_type = other RNA
tcatgcagcagtcccagcag

SEQ ID NO: 4718 - RNA, 20 nt, synthetic construct
  source 1..20: mol_type = other RNA
tcatgccctgcatctccaaa

SEQ ID NO: 4719 - RNA, 20 nt, synthetic construct
  source 1..20: mol_type = other RNA
tcatgctcttatgctggtaa

SEQ ID NO: 4720 - RNA, 20 nt, synthetic construct
  source 1..20: mol_type = other RNA
tcatgggagccacctctaga

SEQ ID NO: 4721 - RNA, 20 nt, synthetic construct
  source 1..20: mol_type = other RNA
tcatgggattagaagaattc

SEQ ID NO: 4722 - RNA, 20 nt, synthetic construct
  source 1..20: mol_type = other RNA
tcatgggtcaattctcattg

SEQ ID NO: 4723 - RNA, 20 nt, synthetic construct
  source 1..20: mol_type = other RNA
tcatggttaagagctggaag

SEQ ID NO: 4724 - RNA, 20 nt, synthetic construct
  source 1..20: mol_type = other RNA
tcatgtagggaaattgcctc

SEQ ID NO: 4725 - RNA, 20 nt, synthetic construct
  source 1..20: mol_type = other RNA
tcatgtatggattggtggat

SEQ ID NO: 4726 - RNA, 20 nt, synthetic construct
  source 1..20: mol_type = other RNA
tcatgtggctcagcaggctc

SEQ ID NO: 4727 - RNA, 20 nt, synthetic construct
  source 1..20: mol_type = other RNA
tcattcaccttctcacataa

SEQ ID NO: 4728 - RNA, 20 nt, synthetic construct
  source 1..20: mol_type = other RNA
tcattcatgctcttatgctg

SEQ ID NO: 4729 - RNA, 20 nt, synthetic construct
  source 1..20: mol_type = other RNA
tcattctccttgttttggag

SEQ ID NO: 4730 - RNA, 20 nt, synthetic construct
  source 1..20: mol_type = other RNA
tcattgagtgtgcaaagcgt

SEQ ID NO: 4731 - RNA, 20 nt, synthetic construct
  source 1..20: mol_type = other RNA
tccaaaacaaggagaatgac

SEQ ID NO: 4732 - RNA, 20 nt, synthetic construct
  source 1..20: mol_type = other RNA
tccaaacatggactataaaa

SEQ ID NO: 4733 - RNA, 20 nt, synthetic construct
  source 1..20: mol_type = other RNA
tccaaaccttggctggtaaa

SEQ ID NO: 4734 - RNA, 20 nt, synthetic construct
  source 1..20: mol_type = other RNA
tccaaactcttcacacactt

SEQ ID NO: 4735 - RNA, 20 nt, synthetic construct
  source 1..20: mol_type = other RNA
tccaactcatgggtcaattc

SEQ ID NO: 4736 - RNA, 20 nt, synthetic construct
  source 1..20: mol_type = other RNA
tccaagccaagaccctctgt

SEQ ID NO: 4737 - RNA, 20 nt, synthetic construct
  source 1..20: mol_type = other RNA
tccaaggaggcttacacaaa

SEQ ID NO: 4738 - RNA, 20 nt, synthetic construct
  source 1..20: mol_type = other RNA
tccacagaacttttgcgact

SEQ ID NO: 4739 - RNA, 20 nt, synthetic construct
  source 1..20: mol_type = other RNA
tccacagtaactacatctcc

SEQ ID NO: 4740 - RNA, 20 nt, synthetic construct
  source 1..20: mol_type = other RNA
tccaccaatccatacatgag

SEQ ID NO: 4741 - RNA, 20 nt, synthetic construct
  source 1..20: mol_type = other RNA
tccacctcatctcaagctgc

SEQ ID NO: 4742 - RNA, 20 nt, synthetic construct
  source 1..20: mol_type = other RNA
tccactgataggtttccatt

SEQ ID NO: 4743 - RNA, 20 nt, synthetic construct
  source 1..20: mol_type = other RNA
tccagaaagctctgctcgct

SEQ ID NO: 4744 - RNA, 20 nt, synthetic construct
  source 1..20: mol_type = other RNA
tccagaagcagaataagagt

SEQ ID NO: 4745 - RNA, 20 nt, synthetic construct
  source 1..20: mol_type = other RNA
tccagctcttaaccatgata

SEQ ID NO: 4746 - RNA, 20 nt, synthetic construct
  source 1..20: mol_type = other RNA
tccagggtgtggcttctggt

SEQ ID NO: 4747 - RNA, 20 nt, synthetic construct
  source 1..20: mol_type = other RNA
tccagttagtccttatccaa

SEQ ID NO: 4748 - RNA, 20 nt, synthetic construct
  source 1..20: mol_type = other RNA
tccataacctaagtatttag

SEQ ID NO: 4749 - RNA, 20 nt, synthetic construct
  source 1..20: mol_type = other RNA
tccataactacagtgcagct

SEQ ID NO: 4750 - RNA, 20 nt, synthetic construct
  source 1..20: mol_type = other RNA
tccatacactttaccagcca

SEQ ID NO: 4751 - RNA, 20 nt, synthetic construct
  source 1..20: mol_type = other RNA
tccatacatgagacggccca

SEQ ID NO: 4752 - RNA, 20 nt, synthetic construct
  source 1..20: mol_type = other RNA
tccatagatatctgaagtgt

SEQ ID NO: 4753 - RNA, 20 nt, synthetic construct
  source 1..20: mol_type = other RNA
tccatatgccttcactcggg

SEQ ID NO: 4754 - RNA, 20 nt, synthetic construct
  source 1..20: mol_type = other RNA
tccatcatatcaatgcaatg

SEQ ID NO: 4755 - RNA, 20 nt, synthetic construct
  source 1..20: mol_type = other RNA
tccatcggctgagactgggg

SEQ ID NO: 4756 - RNA, 20 nt, synthetic construct
  source 1..20: mol_type = other RNA
tccatctcatgagtgggata

SEQ ID NO: 4757 - RNA, 20 nt, synthetic construct
  source 1..20: mol_type = other RNA
tccatgtttggattgctcag

SEQ ID NO: 4758 - RNA, 20 nt, synthetic construct
  source 1..20: mol_type = other RNA
tccattgcattgatatgatg

SEQ ID NO: 4759 - RNA, 20 nt, synthetic construct
  source 1..20: mol_type = other RNA
tcccaaagagccaagccatg

SEQ ID NO: 4760 - RNA, 20 nt, synthetic construct
  source 1..20: mol_type = other RNA
tcccaataggaatcacccca

SEQ ID NO: 4761 - RNA, 20 nt, synthetic construct
  source 1..20: mol_type = other RNA
tcccacacagctaatgggtt

SEQ ID NO: 4762 - RNA, 20 nt, synthetic construct
  source 1..20: mol_type = other RNA
tcccactcatgagatggatg

SEQ ID NO: 4763 - RNA, 20 nt, synthetic construct
  source 1..20: mol_type = other RNA
tcccagcagccccagcctct

SEQ ID NO: 4764 - RNA, 20 nt, synthetic construct
  source 1..20: mol_type = other RNA
tcccatgaacccttaccctg

SEQ ID NO: 4765 - RNA, 20 nt, synthetic construct
  source 1..20: mol_type = other RNA
tcccatgaagtggccatcca

SEQ ID NO: 4766 - RNA, 20 nt, synthetic construct
  source 1..20: mol_type = other RNA
tcccatggcaaaaaagtgaa

SEQ ID NO: 4767 - RNA, 20 nt, synthetic construct
  source 1..20: mol_type = other RNA
tccccagtctcagccgatgg

SEQ ID NO: 4768 - RNA, 20 nt, synthetic construct
  source 1..20: mol_type = other RNA
tccccatatctgggttccta

SEQ ID NO: 4769 - RNA, 20 nt, synthetic construct
  source 1..20: mol_type = other RNA
tcccccaatgtcaggatcca

SEQ ID NO: 4770 - RNA, 20 nt, synthetic construct
  source 1..20: mol_type = other RNA
tcccgtttcacttttttgcc

SEQ ID NO: 4771 - RNA, 20 nt, synthetic construct
  source 1..20: mol_type = other RNA
tccctacatgatgtacattt

SEQ ID NO: 4772 - RNA, 20 nt, synthetic construct
  source 1..20: mol_type = other RNA
tccctcgtcttttaccagca

SEQ ID NO: 4773 - RNA, 20 nt, synthetic construct
  source 1..20: mol_type = other RNA
tccctgcatattttggtttc

SEQ ID NO: 4774 - RNA, 20 nt, synthetic construct
  source 1..20: mol_type = other RNA
tccgggcatgttcaacagct

SEQ ID NO: 4775 - RNA, 20 nt, synthetic construct
  source 1..20: mol_type = other RNA
tccgtgaccacagactccac

SEQ ID NO: 4776 - RNA, 20 nt, synthetic construct
  source 1..20: mol_type = other RNA
tcctattctccccagtctca

SEQ ID NO: 4777 - RNA, 20 nt, synthetic construct
  source 1..20: mol_type = other RNA
tcctattgggattctttaaa

SEQ ID NO: 4778 - RNA, 20 nt, synthetic construct
  source 1..20: mol_type = other RNA
tcctctgcaccagaagccac

SEQ ID NO: 4779 - RNA, 20 nt, synthetic construct
  source 1..20: mol_type = other RNA
tcctctttctcacgggcttt

SEQ ID NO: 4780 - RNA, 20 nt, synthetic construct
  source 1..20: mol_type = other RNA
tcctgaaagtcgcaaaagtt

SEQ ID NO: 4781 - RNA, 20 nt, synthetic construct
  source 1..20: mol_type = other RNA
tcctgacattgggggagtgg

SEQ ID NO: 4782 - RNA, 20 nt, synthetic construct
  source 1..20: mol_type = other RNA
tcctgaccattagcatcact

SEQ ID NO: 4783 - RNA, 20 nt, synthetic construct
  source 1..20: mol_type = other RNA
tcctggtggggtgattccta

SEQ ID NO: 4784 - RNA, 20 nt, synthetic construct
  source 1..20: mol_type = other RNA
tccttatccaaactcttcac

SEQ ID NO: 4785 - RNA, 20 nt, synthetic construct
  source 1..20: mol_type = other RNA
tccttatcccactcatgaga

SEQ ID NO: 4786 - RNA, 20 nt, synthetic construct
  source 1..20: mol_type = other RNA
tccttggacacaagcagttc

SEQ ID NO: 4787 - RNA, 20 nt, synthetic construct
  source 1..20: mol_type = other RNA
tccttgttttggagatgcag

SEQ ID NO: 4788 - RNA, 20 nt, synthetic construct
  source 1..20: mol_type = other RNA
tcctttcggcaagagacttg

SEQ ID NO: 4789 - RNA, 20 nt, synthetic construct
  source 1..20: mol_type = other RNA
tcgcaaaagttctgtggaca

SEQ ID NO: 4790 - RNA, 20 nt, synthetic construct
  source 1..20: mol_type = other RNA
tcgctgtctgaccagacctc

SEQ ID NO: 4791 - RNA, 20 nt, synthetic construct
  source 1..20: mol_type = other RNA
tcggcaagagacttgatgaa

SEQ ID NO: 4792 - RNA, 20 nt, synthetic construct
  source 1..20: mol_type = other RNA
tcggctgagactggggagaa

SEQ ID NO: 4793 - RNA, 20 nt, synthetic construct
  source 1..20: mol_type = other RNA
tcgggtcacagggccttaca

SEQ ID NO: 4794 - RNA, 20 nt, synthetic construct
  source 1..20: mol_type = other RNA
tcgtcttttaccagcataag

SEQ ID NO: 4795 - RNA, 20 nt, synthetic construct
  source 1..20: mol_type = other RNA
tcgttgtcctctgcaccaga

SEQ ID NO: 4796 - RNA, 20 nt, synthetic construct
  source 1..20: mol_type = other RNA
tctaaatacttaggttatgg

SEQ ID NO: 4797 - RNA, 20 nt, synthetic construct
  source 1..20: mol_type = other RNA
tctaagctcagtctaccacc

SEQ ID NO: 4798 - RNA, 20 nt, synthetic construct
  source 1..20: mol_type = other RNA
tctaatcccatgaaccctta

SEQ ID NO: 4799 - RNA, 20 nt, synthetic construct
  source 1..20: mol_type = other RNA
tctaatggtacaactgctga

SEQ ID NO: 4800 - RNA, 20 nt, synthetic construct
  source 1..20: mol_type = other RNA
tctacagaagcagccaccac

SEQ ID NO: 4801 - RNA, 20 nt, synthetic construct
  source 1..20: mol_type = other RNA
tctaccacccatccatacac

SEQ ID NO: 4802 - RNA, 20 nt, synthetic construct
  source 1..20: mol_type = other RNA
tctagaggtggctcccatga

SEQ ID NO: 4803 - RNA, 20 nt, synthetic construct
  source 1..20: mol_type = other RNA
tctagattaccacccaatct

SEQ ID NO: 4804 - RNA, 20 nt, synthetic construct
  source 1..20: mol_type = other RNA
tctatcatggttaagagctg

SEQ ID NO: 4805 - RNA, 20 nt, synthetic construct
  source 1..20: mol_type = other RNA
tctatggaagcaccagccct

SEQ ID NO: 4806 - RNA, 20 nt, synthetic construct
  source 1..20: mol_type = other RNA
tctattccacctcatctcaa

SEQ ID NO: 4807 - RNA, 20 nt, synthetic construct
  source 1..20: mol_type = other RNA
tctcaagctgcaggttcata

SEQ ID NO: 4808 - RNA, 20 nt, synthetic construct
  source 1..20: mol_type = other RNA
tctcacataatccataacta

SEQ ID NO: 4809 - RNA, 20 nt, synthetic construct
  source 1..20: mol_type = other RNA
tctcacgggctttttcagcc

SEQ ID NO: 4810 - RNA, 20 nt, synthetic construct
  source 1..20: mol_type = other RNA
tctcagccgatggatctgta

SEQ ID NO: 4811 - RNA, 20 nt, synthetic construct
  source 1..20: mol_type = other RNA
tctcatgagtgggataagga

SEQ ID NO: 4812 - RNA, 20 nt, synthetic construct
  source 1..20: mol_type = other RNA
tctcatgtatggattggtgg

SEQ ID NO: 4813 - RNA, 20 nt, synthetic construct
  source 1..20: mol_type = other RNA
tctcattgagtgtgcaaagc

SEQ ID NO: 4814 - RNA, 20 nt, synthetic construct
  source 1..20: mol_type = other RNA
tctccaaaacaaggagaatg

SEQ ID NO: 4815 - RNA, 20 nt, synthetic construct
  source 1..20: mol_type = other RNA
tctccatatgccttcactcg

SEQ ID NO: 4816 - RNA, 20 nt, synthetic construct
  source 1..20: mol_type = other RNA
tctccccagtctcagccgat

SEQ ID NO: 4817 - RNA, 20 nt, synthetic construct
  source 1..20: mol_type = other RNA
tctccctcgtcttttaccag

SEQ ID NO: 4818 - RNA, 20 nt, synthetic construct
  source 1..20: mol_type = other RNA
tctccctgcatattttggtt

SEQ ID NO: 4819 - RNA, 20 nt, synthetic construct
  source 1..20: mol_type = other RNA
tctccttgttttggagatgc

SEQ ID NO: 4820 - RNA, 20 nt, synthetic construct
  source 1..20: mol_type = other RNA
tctctcttaccctgtccaca

SEQ ID NO: 4821 - RNA, 20 nt, synthetic construct
  source 1..20: mol_type = other RNA
tctctgctgctgctggggct

SEQ ID NO: 4822 - RNA, 20 nt, synthetic construct
  source 1..20: mol_type = other RNA
tctcttaccctgtccacaga

SEQ ID NO: 4823 - RNA, 20 nt, synthetic construct
  source 1..20: mol_type = other RNA
tctcttcatgccctgcatct

SEQ ID NO: 4824 - RNA, 20 nt, synthetic construct
  source 1..20: mol_type = other RNA
tctcttgccgaaaggaccat

SEQ ID NO: 4825 - RNA, 20 nt, synthetic construct
  source 1..20: mol_type = other RNA
tctgaagtgtgtgaagagtt

SEQ ID NO: 4826 - RNA, 20 nt, synthetic construct
  source 1..20: mol_type = other RNA
tctgaagtttcatgtggctc

SEQ ID NO: 4827 - RNA, 20 nt, synthetic construct
  source 1..20: mol_type = other RNA
tctgaccagacctcatcgtt

SEQ ID NO: 4828 - RNA, 20 nt, synthetic construct
  source 1..20: mol_type = other RNA
tctgagcaatccaaacatgg

SEQ ID NO: 4829 - RNA, 20 nt, synthetic construct
  source 1..20: mol_type = other RNA
tctgaggcacatagtctggg

SEQ ID NO: 4830 - RNA, 20 nt, synthetic construct
  source 1..20: mol_type = other RNA
tctgagggtgatgtggctgc

SEQ ID NO: 4831 - RNA, 20 nt, synthetic construct
  source 1..20: mol_type = other RNA
tctgattcaaaagcccaggg

SEQ ID NO: 4832 - RNA, 20 nt, synthetic construct
  source 1..20: mol_type = other RNA
tctgcaccagaagccacacc

SEQ ID NO: 4833 - RNA, 20 nt, synthetic construct
  source 1..20: mol_type = other RNA
tctgctcgctgtctgaccag

SEQ ID NO: 4834 - RNA, 20 nt, synthetic construct
  source 1..20: mol_type = other RNA
tctgctgctgctggggctgt

SEQ ID NO: 4835 - RNA, 20 nt, synthetic construct
  source 1..20: mol_type = other RNA
tctgcttctggatccaccaa

SEQ ID NO: 4836 - RNA, 20 nt, synthetic construct
  source 1..20: mol_type = other RNA
tctggatccaccaatccata

SEQ ID NO: 4837 - RNA, 20 nt, synthetic construct
  source 1..20: mol_type = other RNA
tctggatcctgacattgggg

SEQ ID NO: 4838 - RNA, 20 nt, synthetic construct
  source 1..20: mol_type = other RNA
tctggctatttccaaacctt

SEQ ID NO: 4839 - RNA, 20 nt, synthetic construct
  source 1..20: mol_type = other RNA
tctgggccatacttttcaca

SEQ ID NO: 4840 - RNA, 20 nt, synthetic construct
  source 1..20: mol_type = other RNA
tctgggttcctattctcccc

SEQ ID NO: 4841 - RNA, 20 nt, synthetic construct
  source 1..20: mol_type = other RNA
tctggtcagacagcgagcag

SEQ ID NO: 4842 - RNA, 20 nt, synthetic construct
  source 1..20: mol_type = other RNA
tctggtgcagaggacaacga

SEQ ID NO: 4843 - RNA, 20 nt, synthetic construct
  source 1..20: mol_type = other RNA
tctgtagaggctggggctgc

SEQ ID NO: 4844 - RNA, 20 nt, synthetic construct
  source 1..20: mol_type = other RNA
tctgtataggtatccaagcc

SEQ ID NO: 4845 - RNA, 20 nt, synthetic construct
  source 1..20: mol_type = other RNA
tctgtcaactcttattctgc

SEQ ID NO: 4846 - RNA, 20 nt, synthetic construct
  source 1..20: mol_type = other RNA
tctgtctaagctcagtctac

SEQ ID NO: 4847 - RNA, 20 nt, synthetic construct
  source 1..20: mol_type = other RNA
tctgtctgagggtgatgtgg

SEQ ID NO: 4848 - RNA, 20 nt, synthetic construct
  source 1..20: mol_type = other RNA
tctgtggacagggtaagaga

SEQ ID NO: 4849 - RNA, 20 nt, synthetic construct
  source 1..20: mol_type = other RNA
tctgtggtcacggacatggt

SEQ ID NO: 4850 - RNA, 20 nt, synthetic construct
  source 1..20: mol_type = other RNA
tctgttctctcttaccctgt

SEQ ID NO: 4851 - RNA, 20 nt, synthetic construct
  source 1..20: mol_type = other RNA
tctgttgtaaggccctgtga

SEQ ID NO: 4852 - RNA, 20 nt, synthetic construct
  source 1..20: mol_type = other RNA
tcttaaccatgatagaactg

SEQ ID NO: 4853 - RNA, 20 nt, synthetic construct
  source 1..20: mol_type = other RNA
tcttaccctgtccacagaac

SEQ ID NO: 4854 - RNA, 20 nt, synthetic construct
  source 1..20: mol_type = other RNA
tcttatgctggtaaaagacg

SEQ ID NO: 4855 - RNA, 20 nt, synthetic construct
  source 1..20: mol_type = other RNA
tcttattctgcttctggatc

SEQ ID NO: 4856 - RNA, 20 nt, synthetic construct
  source 1..20: mol_type = other RNA
tcttcacacacttcagatat

SEQ ID NO: 4857 - RNA, 20 nt, synthetic construct
  source 1..20: mol_type = other RNA
tcttcatgccctgcatctcc

SEQ ID NO: 4858 - RNA, 20 nt, synthetic construct
  source 1..20: mol_type = other RNA
tcttcctctttctcacgggc

SEQ ID NO: 4859 - RNA, 20 nt, synthetic construct
  source 1..20: mol_type = other RNA
tcttctaatcccatgaaccc

SEQ ID NO: 4860 - RNA, 20 nt, synthetic construct
  source 1..20: mol_type = other RNA
tcttgccgaaaggaccatgt

SEQ ID NO: 4861 - RNA, 20 nt, synthetic construct
  source 1..20: mol_type = other RNA
tcttggcttggatacctata

SEQ ID NO: 4862 - RNA, 20 nt, synthetic construct
  source 1..20: mol_type = other RNA
tctttaaaggggttgtggca

SEQ ID NO: 4863 - RNA, 20 nt, synthetic construct
  source 1..20: mol_type = other RNA
tctttctcacgggctttttc

SEQ ID NO: 4864 - RNA, 20 nt, synthetic construct
  source 1..20: mol_type = other RNA
tctttgataacccattagct

SEQ ID NO: 4865 - RNA, 20 nt, synthetic construct
  source 1..20: mol_type = other RNA
tctttgggaagccaaaatgg

SEQ ID NO: 4866 - RNA, 20 nt, synthetic construct
  source 1..20: mol_type = other RNA
tcttttaccagcataagagc

SEQ ID NO: 4867 - RNA, 20 nt, synthetic construct
  source 1..20: mol_type = other RNA
tcttttcaagtgaggtaacc

SEQ ID NO: 4868 - RNA, 20 nt, synthetic construct
  source 1..20: mol_type = other RNA
tgaaaaagcccgtgagaaag

SEQ ID NO: 4869 - RNA, 20 nt, synthetic construct
  source 1..20: mol_type = other RNA
tgaaaagtatggcccagact

SEQ ID NO: 4870 - RNA, 20 nt, synthetic construct
  source 1..20: mol_type = other RNA
tgaaaccatctccctgcata

SEQ ID NO: 4871 - RNA, 20 nt, synthetic construct
  source 1..20: mol_type = other RNA
tgaaacgcaggtaagtgggc

SEQ ID NO: 4872 - RNA, 20 nt, synthetic construct
  source 1..20: mol_type = other RNA
tgaaacgggagcctgctgag

SEQ ID NO: 4873 - RNA, 20 nt, synthetic construct
  source 1..20: mol_type = other RNA
tgaaacttcagagcccactt

SEQ ID NO: 4874 - RNA, 20 nt, synthetic construct
  source 1..20: mol_type = other RNA
tgaaagtcgcaaaagttctg

SEQ ID NO: 4875 - RNA, 20 nt, synthetic construct
  source 1..20: mol_type = other RNA
tgaacatcattcaccttctc

SEQ ID NO: 4876 - RNA, 20 nt, synthetic construct
  source 1..20: mol_type = other RNA
tgaacatgcccggagctgca

SEQ ID NO: 4877 - RNA, 20 nt, synthetic construct
  source 1..20: mol_type = other RNA
tgaacccttaccctgggctt

SEQ ID NO: 4878 - RNA, 20 nt, synthetic construct
  source 1..20: mol_type = other RNA
tgaacctgcagcttgagatg

SEQ ID NO: 4879 - RNA, 20 nt, synthetic construct
  source 1..20: mol_type = other RNA
tgaacttctattccacctca

SEQ ID NO: 4880 - RNA, 20 nt, synthetic construct
  source 1..20: mol_type = other RNA
tgaagagagctgttgaacat

SEQ ID NO: 4881 - RNA, 20 nt, synthetic construct
  source 1..20: mol_type = other RNA
tgaagagtttggataaggac

SEQ ID NO: 4882 - RNA, 20 nt, synthetic construct
  source 1..20: mol_type = other RNA
tgaaggcatatggagatgta

SEQ ID NO: 4883 - RNA, 20 nt, synthetic construct
  source 1..20: mol_type = other RNA
tgaagtggccatccatctca

SEQ ID NO: 4884 - RNA, 20 nt, synthetic construct
  source 1..20: mol_type = other RNA
tgaagtgtgtgaagagtttg

SEQ ID NO: 4885 - RNA, 20 nt, synthetic construct
  source 1..20: mol_type = other RNA
tgaagtttcatgtggctcag

SEQ ID NO: 4886 - RNA, 20 nt, synthetic construct
  source 1..20: mol_type = other RNA
tgaatcagaatacccaatat

SEQ ID NO: 4887 - RNA, 20 nt, synthetic construct
  source 1..20: mol_type = other RNA
tgaatgagccaaaacatggc

SEQ ID NO: 4888 - RNA, 20 nt, synthetic construct
  source 1..20: mol_type = other RNA
tgaatgatgttcaccatttt

SEQ ID NO: 4889 - RNA, 20 nt, synthetic construct
  source 1..20: mol_type = other RNA
tgaattcttctaatcccatg

SEQ ID NO: 4890 - RNA, 20 nt, synthetic construct
  source 1..20: mol_type = other RNA
tgacagactctgtctgaggg

SEQ ID NO: 4891 - RNA, 20 nt, synthetic construct
  source 1..20: mol_type = other RNA
tgacatgctttcccacacag

SEQ ID NO: 4892 - RNA, 20 nt, synthetic construct
  source 1..20: mol_type = other RNA
tgacattgggggagtggccg

SEQ ID NO: 4893 - RNA, 20 nt, synthetic construct
  source 1..20: mol_type = other RNA
tgaccacagactccacagta

SEQ ID NO: 4894 - RNA, 20 nt, synthetic construct
  source 1..20: mol_type = other RNA
tgaccagacctcatcgttgt

SEQ ID NO: 4895 - RNA, 20 nt, synthetic construct
  source 1..20: mol_type = other RNA
tgaccattagcatcacttaa

SEQ ID NO: 4896 - RNA, 20 nt, synthetic construct
  source 1..20: mol_type = other RNA
tgacccatgagttggagcca

SEQ ID NO: 4897 - RNA, 20 nt, synthetic construct
  source 1..20: mol_type = other RNA
tgacccgagtgaaggcatat

SEQ ID NO: 4898 - RNA, 20 nt, synthetic construct
  source 1..20: mol_type = other RNA
tgactggtcctgaaagtcgc

SEQ ID NO: 4899 - RNA, 20 nt, synthetic construct
  source 1..20: mol_type = other RNA
tgagaaagaggaagagtgtg

SEQ ID NO: 4900 - RNA, 20 nt, synthetic construct
  source 1..20: mol_type = other RNA
tgagaaggtgaatgatgttc

SEQ ID NO: 4901 - RNA, 20 nt, synthetic construct
  source 1..20: mol_type = other RNA
tgagaattgacccatgagtt

SEQ ID NO: 4902 - RNA, 20 nt, synthetic construct
  source 1..20: mol_type = other RNA
tgagacggcccaatccagtt

SEQ ID NO: 4903 - RNA, 20 nt, synthetic construct
  source 1..20: mol_type = other RNA
tgagactggggagaatagga

SEQ ID NO: 4904 - RNA, 20 nt, synthetic construct
  source 1..20: mol_type = other RNA
tgagatgaggtggaatagaa

SEQ ID NO: 4905 - RNA, 20 nt, synthetic construct
  source 1..20: mol_type = other RNA
tgagatggatggccacttca

SEQ ID NO: 4906 - RNA, 20 nt, synthetic construct
  source 1..20: mol_type = other RNA
tgagcaatccaaacatggac

SEQ ID NO: 4907 - RNA, 20 nt, synthetic construct
  source 1..20: mol_type = other RNA
tgagccaaaacatggcttgg

SEQ ID NO: 4908 - RNA, 20 nt, synthetic construct
  source 1..20: mol_type = other RNA
tgagccacatgaaacttcag

SEQ ID NO: 4909 - RNA, 20 nt, synthetic construct
  source 1..20: mol_type = other RNA
tgagctgcatgccacaaccc

SEQ ID NO: 4910 - RNA, 20 nt, synthetic construct
  source 1..20: mol_type = other RNA
tgagcttagacagagggtct

SEQ ID NO: 4911 - RNA, 20 nt, synthetic construct
  source 1..20: mol_type = other RNA
tgaggcacatagtctgggcc

SEQ ID NO: 4912 - RNA, 20 nt, synthetic construct
  source 1..20: mol_type = other RNA
tgagggtgatgtggctgctg

SEQ ID NO: 4913 - RNA, 20 nt, synthetic construct
  source 1..20: mol_type = other RNA
tgaggtaaccaacaaaaggg

SEQ ID NO: 4914 - RNA, 20 nt, synthetic construct
  source 1..20: mol_type = other RNA
tgaggtctggtcagacagcg

SEQ ID NO: 4915 - RNA, 20 nt, synthetic construct
  source 1..20: mol_type = other RNA
tgaggtggaatagaagttca

SEQ ID NO: 4916 - RNA, 20 nt, synthetic construct
  source 1..20: mol_type = other RNA
tgagtgggataaggaggcaa

SEQ ID NO: 4917 - RNA, 20 nt, synthetic construct
  source 1..20: mol_type = other RNA
tgagtgtgcaaagcgtgagc

SEQ ID NO: 4918 - RNA, 20 nt, synthetic construct
  source 1..20: mol_type = other RNA
tgagttggagccacggccac

SEQ ID NO: 4919 - RNA, 20 nt, synthetic construct
  source 1..20: mol_type = other RNA
tgataacccattagctgtgt

SEQ ID NO: 4920 - RNA, 20 nt, synthetic construct
  source 1..20: mol_type = other RNA
tgatagaactgcttgtgtcc

SEQ ID NO: 4921 - RNA, 20 nt, synthetic construct
  source 1..20: mol_type = other RNA
tgataggtttccattgcatt

SEQ ID NO: 4922 - RNA, 20 nt, synthetic construct
  source 1..20: mol_type = other RNA
tgatatcacccccttttgtt

SEQ ID NO: 4923 - RNA, 20 nt, synthetic construct
  source 1..20: mol_type = other RNA
tgatatgatggatattgggt

SEQ ID NO: 4924 - RNA, 20 nt, synthetic construct
  source 1..20: mol_type = other RNA
tgatgaaacgcaggtaagtg

SEQ ID NO: 4925 - RNA, 20 nt, synthetic construct
  source 1..20: mol_type = other RNA
tgatgctaatggtcaggaaa

SEQ ID NO: 4926 - RNA, 20 nt, synthetic construct
  source 1..20: mol_type = other RNA
tgatggatattgggtattct

SEQ ID NO: 4927 - RNA, 20 nt, synthetic construct
  source 1..20: mol_type = other RNA
tgatgtacatttggtctaat

SEQ ID NO: 4928 - RNA, 20 nt, synthetic construct
  source 1..20: mol_type = other RNA
tgatgtggctgctgctgctg

SEQ ID NO: 4929 - RNA, 20 nt, synthetic construct
  source 1..20: mol_type = other RNA
tgatgttcaccatttttata

SEQ ID NO: 4930 - RNA, 20 nt, synthetic construct
  source 1..20: mol_type = other RNA
tgattcaaaagcccagggta

SEQ ID NO: 4931 - RNA, 20 nt, synthetic construct
  source 1..20: mol_type = other RNA
tgattcctattgggattctt

SEQ ID NO: 4932 - RNA, 20 nt, synthetic construct
  source 1..20: mol_type = other RNA
tgcaaagcgtgagctgcatg

SEQ ID NO: 4933 - RNA, 20 nt, synthetic construct
  source 1..20: mol_type = other RNA
tgcaatggaaacctatcagt

SEQ ID NO: 4934 - RNA, 20 nt, synthetic construct
  source 1..20: mol_type = other RNA
tgcacactcaatgagaattg

SEQ ID NO: 4935 - RNA, 20 nt, synthetic construct
  source 1..20: mol_type = other RNA
tgcaccagaagccacaccct

SEQ ID NO: 4936 - RNA, 20 nt, synthetic construct
  source 1..20: mol_type = other RNA
tgcactgtagttatggatta

SEQ ID NO: 4937 - RNA, 20 nt, synthetic construct
  source 1..20: mol_type = other RNA
tgcagaggacaacgatgagg

SEQ ID NO: 4938 - RNA, 20 nt, synthetic construct
  source 1..20: mol_type = other RNA
tgcagcagtcccagcagccc

SEQ ID NO: 4939 - RNA, 20 nt, synthetic construct
  source 1..20: mol_type = other RNA
tgcagctcacgctttgcaca

SEQ ID NO: 4940 - RNA, 20 nt, synthetic construct
  source 1..20: mol_type = other RNA
tgcagctccgggcatgttca

SEQ ID NO: 4941 - RNA, 20 nt, synthetic construct
  source 1..20: mol_type = other RNA
tgcagcttgagatgaggtgg

SEQ ID NO: 4942 - RNA, 20 nt, synthetic construct
  source 1..20: mol_type = other RNA
tgcagggagatggtttcagc

SEQ ID NO: 4943 - RNA, 20 nt, synthetic construct
  source 1..20: mol_type = other RNA
tgcagggcatgaagagagct

SEQ ID NO: 4944 - RNA, 20 nt, synthetic construct
  source 1..20: mol_type = other RNA
tgcaggttcatatttgaatt

SEQ ID NO: 4945 - RNA, 20 nt, synthetic construct
  source 1..20: mol_type = other RNA
tgcatattttggtttccata

SEQ ID NO: 4946 - RNA, 20 nt, synthetic construct
  source 1..20: mol_type = other RNA
tgcatctccaaaacaaggag

SEQ ID NO: 4947 - RNA, 20 nt, synthetic construct
  source 1..20: mol_type = other RNA
tgcatgactggtcctgaaag

SEQ ID NO: 4948 - RNA, 20 nt, synthetic construct
  source 1..20: mol_type = other RNA
tgcatgccacaaccccttta

SEQ ID NO: 4949 - RNA, 20 nt, synthetic construct
  source 1..20: mol_type = other RNA
tgcattgatatgatggatat

SEQ ID NO: 4950 - RNA, 20 nt, synthetic construct
  source 1..20: mol_type = other RNA
tgccaatggctgcttttcct

SEQ ID NO: 4951 - RNA, 20 nt, synthetic construct
  source 1..20: mol_type = other RNA
tgccacaacccctttaaaga

SEQ ID NO: 4952 - RNA, 20 nt, synthetic construct
  source 1..20: mol_type = other RNA
tgccatgggatttctgaggc

SEQ ID NO: 4953 - RNA, 20 nt, synthetic construct
  source 1..20: mol_type = other RNA
tgcccggagctgcactgtag

SEQ ID NO: 4954 - RNA, 20 nt, synthetic construct
  source 1..20: mol_type = other RNA
tgccctgcatctccaaaaca

SEQ ID NO: 4955 - RNA, 20 nt, synthetic construct
  source 1..20: mol_type = other RNA
tgccgaaaggaccatgtccg

SEQ ID NO: 4956 - RNA, 20 nt, synthetic construct
  source 1..20: mol_type = other RNA
tgcctcagaaatcccatggc

SEQ ID NO: 4957 - RNA, 20 nt, synthetic construct
  source 1..20: mol_type = other RNA
tgcctccttatcccactcat

SEQ ID NO: 4958 - RNA, 20 nt, synthetic construct
  source 1..20: mol_type = other RNA
tgccttcactcgggtcacag

SEQ ID NO: 4959 - RNA, 20 nt, synthetic construct
  source 1..20: mol_type = other RNA
tgcgactttcaggaccagtc

SEQ ID NO: 4960 - RNA, 20 nt, synthetic construct
  source 1..20: mol_type = other RNA
tgcgtttcatcaagtctctt

SEQ ID NO: 4961 - RNA, 20 nt, synthetic construct
  source 1..20: mol_type = other RNA
tgctaatggtcaggaaaagc

SEQ ID NO: 4962 - RNA, 20 nt, synthetic construct
  source 1..20: mol_type = other RNA
tgctcagattgggtggtaat

SEQ ID NO: 4963 - RNA, 20 nt, synthetic construct
  source 1..20: mol_type = other RNA
tgctccccatatctgggttc

SEQ ID NO: 4964 - RNA, 20 nt, synthetic construct
  source 1..20: mol_type = other RNA
tgctcgctgtctgaccagac

SEQ ID NO: 4965 - RNA, 20 nt, synthetic construct
  source 1..20: mol_type = other RNA
tgctcttatgctggtaaaag

SEQ ID NO: 4966 - RNA, 20 nt, synthetic construct
  source 1..20: mol_type = other RNA
tgctgaaaccatctccctgc

SEQ ID NO: 4967 - RNA, 20 nt, synthetic construct
  source 1..20: mol_type = other RNA
tgctgagccacatgaaactt

SEQ ID NO: 4968 - RNA, 20 nt, synthetic construct
  source 1..20: mol_type = other RNA
tgctgcatgactggtcctga

SEQ ID NO: 4969 - RNA, 20 nt, synthetic construct
  source 1..20: mol_type = other RNA
tgctgctgctggggctgtgg

SEQ ID NO: 4970 - RNA, 20 nt, synthetic construct
  source 1..20: mol_type = other RNA
tgctgctgctggggtctctg

SEQ ID NO: 4971 - RNA, 20 nt, synthetic construct
  source 1..20: mol_type = other RNA
tgctgctggggctgtggtgg

SEQ ID NO: 4972 - RNA, 20 nt, synthetic construct
  source 1..20: mol_type = other RNA
tgctgctggggtctctgctg

SEQ ID NO: 4973 - RNA, 20 nt, synthetic construct
  source 1..20: mol_type = other RNA
tgctgggactgctgcatgac

SEQ ID NO: 4974 - RNA, 20 nt, synthetic construct
  source 1..20: mol_type = other RNA
tgctggggctgtggtggctg

SEQ ID NO: 4975 - RNA, 20 nt, synthetic construct
  source 1..20: mol_type = other RNA
tgctggggtctctgctgctg

SEQ ID NO: 4976 - RNA, 20 nt, synthetic construct
  source 1..20: mol_type = other RNA
tgctggtaaaagacgaggga

SEQ ID NO: 4977 - RNA, 20 nt, synthetic construct
  source 1..20: mol_type = other RNA
tgcttccagctcttaaccat

SEQ ID NO: 4978 - RNA, 20 nt, synthetic construct
  source 1..20: mol_type = other RNA
tgcttccatagatatctgaa

SEQ ID NO: 4979 - RNA, 20 nt, synthetic construct
  source 1..20: mol_type = other RNA
tgcttctggatccaccaatc

SEQ ID NO: 4980 - RNA, 20 nt, synthetic construct
  source 1..20: mol_type = other RNA
tgcttctgtagaggctgggg

SEQ ID NO: 4981 - RNA, 20 nt, synthetic construct
  source 1..20: mol_type = other RNA
tgcttgtgtccaaggaggct

SEQ ID NO: 4982 - RNA, 20 nt, synthetic construct
  source 1..20: mol_type = other RNA
tgctttcccacacagctaat

SEQ ID NO: 4983 - RNA, 20 nt, synthetic construct
  source 1..20: mol_type = other RNA
tgcttttcctgaccattagc

SEQ ID NO: 4984 - RNA, 20 nt, synthetic construct
  source 1..20: mol_type = other RNA
tggaaaccaaaatatgcagg

SEQ ID NO: 4985 - RNA, 20 nt, synthetic construct
  source 1..20: mol_type = other RNA
tggaaacctatcagtggaca

SEQ ID NO: 4986 - RNA, 20 nt, synthetic construct
  source 1..20: mol_type = other RNA
tggaaatagccagagtttta

SEQ ID NO: 4987 - RNA, 20 nt, synthetic construct
  source 1..20: mol_type = other RNA
tggaagcaccagccctatga

SEQ ID NO: 4988 - RNA, 20 nt, synthetic construct
  source 1..20: mol_type = other RNA
tggaagcatctttgataacc

SEQ ID NO: 4989 - RNA, 20 nt, synthetic construct
  source 1..20: mol_type = other RNA
tggaatagaagttcataggg

SEQ ID NO: 4990 - RNA, 20 nt, synthetic construct
  source 1..20: mol_type = other RNA
tggacaactgctccccatat

SEQ ID NO: 4991 - RNA, 20 nt, synthetic construct
  source 1..20: mol_type = other RNA
tggacacaagcagttctatc

SEQ ID NO: 4992 - RNA, 20 nt, synthetic construct
  source 1..20: mol_type = other RNA
tggacagggtaagagagaac

SEQ ID NO: 4993 - RNA, 20 nt, synthetic construct
  source 1..20: mol_type = other RNA
tggactagtgccaatggctg

SEQ ID NO: 4994 - RNA, 20 nt, synthetic construct
  source 1..20: mol_type = other RNA
tggactataaaaatggtgaa

SEQ ID NO: 4995 - RNA, 20 nt, synthetic construct
  source 1..20: mol_type = other RNA
tggagatgcagggcatgaag

SEQ ID NO: 4996 - RNA, 20 nt, synthetic construct
  source 1..20: mol_type = other RNA
tggagatgtagttactgtgg

SEQ ID NO: 4997 - RNA, 20 nt, synthetic construct
  source 1..20: mol_type = other RNA
tggagccacggccactcccc

SEQ ID NO: 4998 - RNA, 20 nt, synthetic construct
  source 1..20: mol_type = other RNA
tggagtctgtggtcacggac

SEQ ID NO: 4999 - RNA, 20 nt, synthetic construct
  source 1..20: mol_type = other RNA
tggataaggactaactggat

SEQ ID NO: 5000 - RNA, 20 nt, synthetic construct
  source 1..20: mol_type = other RNA
tggatacctatacagatcca

SEQ ID NO: 5001 - RNA, 20 nt, synthetic construct
  source 1..20: mol_type = other RNA
tggatattgggtattctgat

SEQ ID NO: 5002 - RNA, 20 nt, synthetic construct
  source 1..20: mol_type = other RNA
tggatccaccaatccataca

SEQ ID NO: 5003 - RNA, 20 nt, synthetic construct
  source 1..20: mol_type = other RNA
tggatccagaagcagaataa

SEQ ID NO: 5004 - RNA, 20 nt, synthetic construct
  source 1..20: mol_type = other RNA
tggatcctgacattggggga

SEQ ID NO: 5005 - RNA, 20 nt, synthetic construct
  source 1..20: mol_type = other RNA
tggatctgtataggtatcca

SEQ ID NO: 5006 - RNA, 20 nt, synthetic construct
  source 1..20: mol_type = other RNA
tggatggccacttcatggga

SEQ ID NO: 5007 - RNA, 20 nt, synthetic construct
  source 1..20: mol_type = other RNA
tggatgggtggtagactgag

SEQ ID NO: 5008 - RNA, 20 nt, synthetic construct
  source 1..20: mol_type = other RNA
tggattatgtgagaaggtga

SEQ ID NO: 5009 - RNA, 20 nt, synthetic construct
  source 1..20: mol_type = other RNA
tggattgctcagattgggtg

SEQ ID NO: 5010 - RNA, 20 nt, synthetic construct
  source 1..20: mol_type = other RNA
tggattgggccgtctcatgt

SEQ ID NO: 5011 - RNA, 20 nt, synthetic construct
  source 1..20: mol_type = other RNA
tggattggtggatccagaag

SEQ ID NO: 5012 - RNA, 20 nt, synthetic construct
  source 1..20: mol_type = other RNA
tggcaaaaaagtgaaacggg

SEQ ID NO: 5013 - RNA, 20 nt, synthetic construct
  source 1..20: mol_type = other RNA
tggcactagtccagggtgtg

SEQ ID NO: 5014 - RNA, 20 nt, synthetic construct
  source 1..20: mol_type = other RNA
tggcatgcagctcacgcttt

SEQ ID NO: 5015 - RNA, 20 nt, synthetic construct
  source 1..20: mol_type = other RNA
tggccacttcatgggagcca

SEQ ID NO: 5016 - RNA, 20 nt, synthetic construct
  source 1..20: mol_type = other RNA
tggccatccatctcatgagt

SEQ ID NO: 5017 - RNA, 20 nt, synthetic construct
  source 1..20: mol_type = other RNA
tggcccagactatgtgcctc

SEQ ID NO: 5018 - RNA, 20 nt, synthetic construct
  source 1..20: mol_type = other RNA
tggccgtggctccaactcat

SEQ ID NO: 5019 - RNA, 20 nt, synthetic construct
  source 1..20: mol_type = other RNA
tggctatttccaaaccttgg

SEQ ID NO: 5020 - RNA, 20 nt, synthetic construct
  source 1..20: mol_type = other RNA
tggctcagcaggctcccgtt

SEQ ID NO: 5021 - RNA, 20 nt, synthetic construct
  source 1..20: mol_type = other RNA
tggctcattcatgctcttat

SEQ ID NO: 5022 - RNA, 20 nt, synthetic construct
  source 1..20: mol_type = other RNA
tggctccaactcatgggtca

SEQ ID NO: 5023 - RNA, 20 nt, synthetic construct
  source 1..20: mol_type = other RNA
tggctcccatgaagtggcca

SEQ ID NO: 5024 - RNA, 20 nt, synthetic construct
  source 1..20: mol_type = other RNA
tggctctttgggaagccaaa

SEQ ID NO: 5025 - RNA, 20 nt, synthetic construct
  source 1..20: mol_type = other RNA
tggctgaaaaagcccgtgag

SEQ ID NO: 5026 - RNA, 20 nt, synthetic construct
  source 1..20: mol_type = other RNA
tggctgctgctgctggggtc

SEQ ID NO: 5027 - RNA, 20 nt, synthetic construct
  source 1..20: mol_type = other RNA
tggctgcttctgtagaggct

SEQ ID NO: 5028 - RNA, 20 nt, synthetic construct
  source 1..20: mol_type = other RNA
tggctgcttttcctgaccat

SEQ ID NO: 5029 - RNA, 20 nt, synthetic construct
  source 1..20: mol_type = other RNA
tggctggtaaagtgtatgga

SEQ ID NO: 5030 - RNA, 20 nt, synthetic construct
  source 1..20: mol_type = other RNA
tggcttcccaaagagccaag

SEQ ID NO: 5031 - RNA, 20 nt, synthetic construct
  source 1..20: mol_type = other RNA
tggcttctggtgcagaggac

SEQ ID NO: 5032 - RNA, 20 nt, synthetic construct
  source 1..20: mol_type = other RNA
tggcttggatacctatacag

SEQ ID NO: 5033 - RNA, 20 nt, synthetic construct
  source 1..20: mol_type = other RNA
tggcttggctctttgggaag

SEQ ID NO: 5034 - RNA, 20 nt, synthetic construct
  source 1..20: mol_type = other RNA
tgggaaagcatgtcattctc

SEQ ID NO: 5035 - RNA, 20 nt, synthetic construct
  source 1..20: mol_type = other RNA
tgggaagccaaaatggctga

SEQ ID NO: 5036 - RNA, 20 nt, synthetic construct
  source 1..20: mol_type = other RNA
tgggactgctgcatgactgg

SEQ ID NO: 5037 - RNA, 20 nt, synthetic construct
  source 1..20: mol_type = other RNA
tgggagccacctctagatta

SEQ ID NO: 5038 - RNA, 20 nt, synthetic construct
  source 1..20: mol_type = other RNA
tgggataaggaggcaatttc

SEQ ID NO: 5039 - RNA, 20 nt, synthetic construct
  source 1..20: mol_type = other RNA
tgggattagaagaattcaaa

SEQ ID NO: 5040 - RNA, 20 nt, synthetic construct
  source 1..20: mol_type = other RNA
tgggattctttaaaggggtt

SEQ ID NO: 5041 - RNA, 20 nt, synthetic construct
  source 1..20: mol_type = other RNA
tgggatttctgaggcacata

SEQ ID NO: 5042 - RNA, 20 nt, synthetic construct
  source 1..20: mol_type = other RNA
tgggccatacttttcacact

SEQ ID NO: 5043 - RNA, 20 nt, synthetic construct
  source 1..20: mol_type = other RNA
tgggccgtctcatgtatgga

SEQ ID NO: 5044 - RNA, 20 nt, synthetic construct
  source 1..20: mol_type = other RNA
tgggctctgaagtttcatgt

SEQ ID NO: 5045 - RNA, 20 nt, synthetic construct
  source 1..20: mol_type = other RNA
tgggcttttgaatcagaata

SEQ ID NO: 5046 - RNA, 20 nt, synthetic construct
  source 1..20: mol_type = other RNA
tggggagaataggaacccag

SEQ ID NO: 5047 - RNA, 20 nt, synthetic construct
  source 1..20: mol_type = other RNA
tggggagcagttgtccactg

SEQ ID NO: 5048 - RNA, 20 nt, synthetic construct
  source 1..20: mol_type = other RNA
tggggctgctgggactgctg

SEQ ID NO: 5049 - RNA, 20 nt, synthetic construct
  source 1..20: mol_type = other RNA
tggggctgtggtggctgctt

SEQ ID NO: 5050 - RNA, 20 nt, synthetic construct
  source 1..20: mol_type = other RNA
tgggggagtggccgtggctc

SEQ ID NO: 5051 - RNA, 20 nt, synthetic construct
  source 1..20: mol_type = other RNA
tggggtctctgctgctgctg

SEQ ID NO: 5052 - RNA, 20 nt, synthetic construct
  source 1..20: mol_type = other RNA
tggggtgattcctattggga

SEQ ID NO: 5053 - RNA, 20 nt, synthetic construct
  source 1..20: mol_type = other RNA
tgggtattctgattcaaaag

SEQ ID NO: 5054 - RNA, 20 nt, synthetic construct
  source 1..20: mol_type = other RNA
tgggtcaattctcattgagt

SEQ ID NO: 5055 - RNA, 20 nt, synthetic construct
  source 1..20: mol_type = other RNA
tgggtggtaatctagaggtg

SEQ ID NO: 5056 - RNA, 20 nt, synthetic construct
  source 1..20: mol_type = other RNA
tgggtggtagactgagctta

SEQ ID NO: 5057 - RNA, 20 nt, synthetic construct
  source 1..20: mol_type = other RNA
tgggttatcaaagatgcttc

SEQ ID NO: 5058 - RNA, 20 nt, synthetic construct
  source 1..20: mol_type = other RNA
tgggttcctattctccccag

SEQ ID NO: 5059 - RNA, 20 nt, synthetic construct
  source 1..20: mol_type = other RNA
tggtaaaagacgagggagat

SEQ ID NO: 5060 - RNA, 20 nt, synthetic construct
  source 1..20: mol_type = other RNA
tggtaaagtgtatggatggg

SEQ ID NO: 5061 - RNA, 20 nt, synthetic construct
  source 1..20: mol_type = other RNA
tggtaatctagaggtggctc

SEQ ID NO: 5062 - RNA, 20 nt, synthetic construct
  source 1..20: mol_type = other RNA
tggtacaactgctgaaacca

SEQ ID NO: 5063 - RNA, 20 nt, synthetic construct
  source 1..20: mol_type = other RNA
tggtagactgagcttagaca

SEQ ID NO: 5064 - RNA, 20 nt, synthetic construct
  source 1..20: mol_type = other RNA
tggtcacggacatggtcctt

SEQ ID NO: 5065 - RNA, 20 nt, synthetic construct
  source 1..20: mol_type = other RNA
tggtcagacagcgagcagag

SEQ ID NO: 5066 - RNA, 20 nt, synthetic construct
  source 1..20: mol_type = other RNA
tggtcaggaaaagcagccat

SEQ ID NO: 5067 - RNA, 20 nt, synthetic construct
  source 1..20: mol_type = other RNA
tggtcctgaaagtcgcaaaa

SEQ ID NO: 5068 - RNA, 20 nt, synthetic construct
  source 1..20: mol_type = other RNA
tggtcctttcggcaagagac

SEQ ID NO: 5069 - RNA, 20 nt, synthetic construct
  source 1..20: mol_type = other RNA
tggtctaatggtacaactgc

SEQ ID NO: 5070 - RNA, 20 nt, synthetic construct
  source 1..20: mol_type = other RNA
tggtgaacatcattcacctt

SEQ ID NO: 5071 - RNA, 20 nt, synthetic construct
  source 1..20: mol_type = other RNA
tggtgcagaggacaacgatg

SEQ ID NO: 5072 - RNA, 20 nt, synthetic construct
  source 1..20: mol_type = other RNA
tggtgcttccatagatatct

SEQ ID NO: 5073 - RNA, 20 nt, synthetic construct
  source 1..20: mol_type = other RNA
tggtggatccagaagcagaa

SEQ ID NO: 5074 - RNA, 20 nt, synthetic construct
  source 1..20: mol_type = other RNA
tggtggctgcttctgtagag

SEQ ID NO: 5075 - RNA, 20 nt, synthetic construct
  source 1..20: mol_type = other RNA
tggtggggtgattcctattg

SEQ ID NO: 5076 - RNA, 20 nt, synthetic construct
  source 1..20: mol_type = other RNA
tggttaagagctggaagcat

SEQ ID NO: 5077 - RNA, 20 nt, synthetic construct
  source 1..20: mol_type = other RNA
tggtttcagcagttgtacca

SEQ ID NO: 5078 - RNA, 20 nt, synthetic construct
  source 1..20: mol_type = other RNA
tggtttccataacctaagta

SEQ ID NO: 5079 - RNA, 20 nt, synthetic construct
  source 1..20: mol_type = other RNA
tgtaaaactctggctatttc

SEQ ID NO: 5080 - RNA, 20 nt, synthetic construct
  source 1..20: mol_type = other RNA
tgtaagcctccttggacaca

SEQ ID NO: 5081 - RNA, 20 nt, synthetic construct
  source 1..20: mol_type = other RNA
tgtaaggccctgtgacccga

SEQ ID NO: 5082 - RNA, 20 nt, synthetic construct
  source 1..20: mol_type = other RNA
tgtacatcatgtagggaaat

SEQ ID NO: 5083 - RNA, 20 nt, synthetic construct
  source 1..20: mol_type = other RNA
tgtacatttggtctaatggt

SEQ ID NO: 5084 - RNA, 20 nt, synthetic construct
  source 1..20: mol_type = other RNA
tgtaccattagaccaaatgt

SEQ ID NO: 5085 - RNA, 20 nt, synthetic construct
  source 1..20: mol_type = other RNA
tgtagaggctggggctgctg

SEQ ID NO: 5086 - RNA, 20 nt, synthetic construct
  source 1..20: mol_type = other RNA
tgtagggaaattgcctcctt

SEQ ID NO: 5087 - RNA, 20 nt, synthetic construct
  source 1..20: mol_type = other RNA
tgtagttactgtggagtctg

SEQ ID NO: 5088 - RNA, 20 nt, synthetic construct
  source 1..20: mol_type = other RNA
tgtagttatggattatgtga

SEQ ID NO: 5089 - RNA, 20 nt, synthetic construct
  source 1..20: mol_type = other RNA
tgtataggtatccaagccaa

SEQ ID NO: 5090 - RNA, 20 nt, synthetic construct
  source 1..20: mol_type = other RNA
tgtatggatgggtggtagac

SEQ ID NO: 5091 - RNA, 20 nt, synthetic construct
  source 1..20: mol_type = other RNA
tgtatggattggtggatcca

SEQ ID NO: 5092 - RNA, 20 nt, synthetic construct
  source 1..20: mol_type = other RNA
tgtcaactcttattctgctt

SEQ ID NO: 5093 - RNA, 20 nt, synthetic construct
  source 1..20: mol_type = other RNA
tgtcaggatccagaaagctc

SEQ ID NO: 5094 - RNA, 20 nt, synthetic construct
  source 1..20: mol_type = other RNA
tgtcattctccttgttttgg

SEQ ID NO: 5095 - RNA, 20 nt, synthetic construct
  source 1..20: mol_type = other RNA
tgtccaaggaggcttacaca

SEQ ID NO: 5096 - RNA, 20 nt, synthetic construct
  source 1..20: mol_type = other RNA
tgtccacagaacttttgcga

SEQ ID NO: 5097 - RNA, 20 nt, synthetic construct
  source 1..20: mol_type = other RNA
tgtccactgataggtttcca

SEQ ID NO: 5098 - RNA, 20 nt, synthetic construct
  source 1..20: mol_type = other RNA
tgtccgtgaccacagactcc

SEQ ID NO: 5099 - RNA, 20 nt, synthetic construct
  source 1..20: mol_type = other RNA
tgtcctctgcaccagaagcc

SEQ ID NO: 5100 - RNA, 20 nt, synthetic construct
  source 1..20: mol_type = other RNA
tgtctaagctcagtctacca

SEQ ID NO: 5101 - RNA, 20 nt, synthetic construct
  source 1..20: mol_type = other RNA
tgtctgaccagacctcatcg

SEQ ID NO: 5102 - RNA, 20 nt, synthetic construct
  source 1..20: mol_type = other RNA
tgtctgagggtgatgtggct

SEQ ID NO: 5103 - RNA, 20 nt, synthetic construct
  source 1..20: mol_type = other RNA
tgtgaaaagtatggcccaga

SEQ ID NO: 5104 - RNA, 20 nt, synthetic construct
  source 1..20: mol_type = other RNA
tgtgaagagtttggataagg

SEQ ID NO: 5105 - RNA, 20 nt, synthetic construct
  source 1..20: mol_type = other RNA
tgtgacccgagtgaaggcat

SEQ ID NO: 5106 - RNA, 20 nt, synthetic construct
  source 1..20: mol_type = other RNA
tgtgagaaggtgaatgatgt

SEQ ID NO: 5107 - RNA, 20 nt, synthetic construct
  source 1..20: mol_type = other RNA
tgtgcaaagcgtgagctgca

SEQ ID NO: 5108 - RNA, 20 nt, synthetic construct
  source 1..20: mol_type = other RNA
tgtgcctcagaaatcccatg

SEQ ID NO: 5109 - RNA, 20 nt, synthetic construct
  source 1..20: mol_type = other RNA
tgtggacagggtaagagaga

SEQ ID NO: 5110 - RNA, 20 nt, synthetic construct
  source 1..20: mol_type = other RNA
tgtggagtctgtggtcacgg

SEQ ID NO: 5111 - RNA, 20 nt, synthetic construct
  source 1..20: mol_type = other RNA
tgtggcatgcagctcacgct

SEQ ID NO: 5112 - RNA, 20 nt, synthetic construct
  source 1..20: mol_type = other RNA
tgtggctcagcaggctcccg

SEQ ID NO: 5113 - RNA, 20 nt, synthetic construct
  source 1..20: mol_type = other RNA
tgtggctgctgctgctgggg

SEQ ID NO: 5114 - RNA, 20 nt, synthetic construct
  source 1..20: mol_type = other RNA
tgtggcttctggtgcagagg

SEQ ID NO: 5115 - RNA, 20 nt, synthetic construct
  source 1..20: mol_type = other RNA
tgtgggaaagcatgtcattc

SEQ ID NO: 5116 - RNA, 20 nt, synthetic construct
  source 1..20: mol_type = other RNA
tgtggtcacggacatggtcc

SEQ ID NO: 5117 - RNA, 20 nt, synthetic construct
  source 1..20: mol_type = other RNA
tgtggtggctgcttctgtag

SEQ ID NO: 5118 - RNA, 20 nt, synthetic construct
  source 1..20: mol_type = other RNA
tgtgtaagcctccttggaca

SEQ ID NO: 5119 - RNA, 20 nt, synthetic construct
  source 1..20: mol_type = other RNA
tgtgtccaaggaggcttaca

SEQ ID NO: 5120 - RNA, 20 nt, synthetic construct
  source 1..20: mol_type = other RNA
tgtgtgaagagtttggataa

SEQ ID NO: 5121 - RNA, 20 nt, synthetic construct
  source 1..20: mol_type = other RNA
tgtgtgggaaagcatgtcat

SEQ ID NO: 5122 - RNA, 20 nt, synthetic construct
  source 1..20: mol_type = other RNA
tgttcaacagctctcttcat

SEQ ID NO: 5123 - RNA, 20 nt, synthetic construct
  source 1..20: mol_type = other RNA
tgttcaccatttttatagtc

SEQ ID NO: 5124 - RNA, 20 nt, synthetic construct
  source 1..20: mol_type = other RNA
tgttctctcttaccctgtcc

SEQ ID NO: 5125 - RNA, 20 nt, synthetic construct
  source 1..20: mol_type = other RNA
tgttgaacatgcccggagct

SEQ ID NO: 5126 - RNA, 20 nt, synthetic construct
  source 1..20: mol_type = other RNA
tgttgtaaggccctgtgacc

SEQ ID NO: 5127 - RNA, 20 nt, synthetic construct
  source 1..20: mol_type = other RNA
tgtttctgttctctcttacc

SEQ ID NO: 5128 - RNA, 20 nt, synthetic construct
  source 1..20: mol_type = other RNA
tgtttggattgctcagattg

SEQ ID NO: 5129 - RNA, 20 nt, synthetic construct
  source 1..20: mol_type = other RNA
tgttttggagatgcagggca

SEQ ID NO: 5130 - RNA, 20 nt, synthetic construct
  source 1..20: mol_type = other RNA
tgttttggctcattcatgct

SEQ ID NO: 5131 - RNA, 20 nt, synthetic construct
  source 1..20: mol_type = other RNA
ttaaagaatcccaataggaa

SEQ ID NO: 5132 - RNA, 20 nt, synthetic construct
  source 1..20: mol_type = other RNA
ttaaaggggttgtggcatgc

SEQ ID NO: 5133 - RNA, 20 nt, synthetic construct
  source 1..20: mol_type = other RNA
ttaaccatgatagaactgct

SEQ ID NO: 5134 - RNA, 20 nt, synthetic construct
  source 1..20: mol_type = other RNA
ttaagagctggaagcatctt

SEQ ID NO: 5135 - RNA, 20 nt, synthetic construct
  source 1..20: mol_type = other RNA
ttaagtgatgctaatggtca

SEQ ID NO: 5136 - RNA, 20 nt, synthetic construct
  source 1..20: mol_type = other RNA
ttaatttgtgtaagcctcct

SEQ ID NO: 5137 - RNA, 20 nt, synthetic construct
  source 1..20: mol_type = other RNA
ttacacaaattaagtgatgc

SEQ ID NO: 5138 - RNA, 20 nt, synthetic construct
  source 1..20: mol_type = other RNA
ttacatctaaatacttaggt

SEQ ID NO: 5139 - RNA, 20 nt, synthetic construct
  source 1..20: mol_type = other RNA
ttaccacccaatctgagcaa

SEQ ID NO: 5140 - RNA, 20 nt, synthetic construct
  source 1..20: mol_type = other RNA
ttaccagcataagagcatga

SEQ ID NO: 5141 - RNA, 20 nt, synthetic construct
  source 1..20: mol_type = other RNA
ttaccagccaaggtttggaa

SEQ ID NO: 5142 - RNA, 20 nt, synthetic construct
  source 1..20: mol_type = other RNA
ttaccctgggcttttgaatc

SEQ ID NO: 5143 - RNA, 20 nt, synthetic construct
  source 1..20: mol_type = other RNA
ttaccctgtccacagaactt

SEQ ID NO: 5144 - RNA, 20 nt, synthetic construct
  source 1..20: mol_type = other RNA
ttacctgcgtttcatcaagt

SEQ ID NO: 5145 - RNA, 20 nt, synthetic construct
  source 1..20: mol_type = other RNA
ttactgtggagtctgtggtc

SEQ ID NO: 5146 - RNA, 20 nt, synthetic construct
  source 1..20: mol_type = other RNA
ttagacagagggtcttggct

SEQ ID NO: 5147 - RNA, 20 nt, synthetic construct
  source 1..20: mol_type = other RNA
ttagaccaaatgtacatcat

SEQ ID NO: 5148 - RNA, 20 nt, synthetic construct
  source 1..20: mol_type = other RNA
ttagatgtaaaactctggct

SEQ ID NO: 5149 - RNA, 20 nt, synthetic construct
  source 1..20: mol_type = other RNA
ttagcatcacttaatttgtg

SEQ ID NO: 5150 - RNA, 20 nt, synthetic construct
  source 1..20: mol_type = other RNA
ttagctgtgtgggaaagcat

SEQ ID NO: 5151 - RNA, 20 nt, synthetic construct
  source 1..20: mol_type = other RNA
ttaggttatggaaaccaaaa

SEQ ID NO: 5152 - RNA, 20 nt, synthetic construct
  source 1..20: mol_type = other RNA
ttagtccttatccaaactct

SEQ ID NO: 5153 - RNA, 20 nt, synthetic construct
  source 1..20: mol_type = other RNA
ttatagtccatgtttggatt

SEQ ID NO: 5154 - RNA, 20 nt, synthetic construct
  source 1..20: mol_type = other RNA
ttatcaaagatgcttccagc

SEQ ID NO: 5155 - RNA, 20 nt, synthetic construct
  source 1..20: mol_type = other RNA
ttatccaaactcttcacaca

SEQ ID NO: 5156 - RNA, 20 nt, synthetic construct
  source 1..20: mol_type = other RNA
ttatcccactcatgagatgg

SEQ ID NO: 5157 - RNA, 20 nt, synthetic construct
  source 1..20: mol_type = other RNA
ttatgctggtaaaagacgag

SEQ ID NO: 5158 - RNA, 20 nt, synthetic construct
  source 1..20: mol_type = other RNA
ttatggaaaccaaaatatgc

SEQ ID NO: 5159 - RNA, 20 nt, synthetic construct
  source 1..20: mol_type = other RNA
ttatggattatgtgagaagg

SEQ ID NO: 5160 - RNA, 20 nt, synthetic construct
  source 1..20: mol_type = other RNA
ttatgtgagaaggtgaatga

SEQ ID NO: 5161 - RNA, 20 nt, synthetic construct
  source 1..20: mol_type = other RNA
ttattctgcttctggatcca

SEQ ID NO: 5162 - RNA, 20 nt, synthetic construct
  source 1..20: mol_type = other RNA
ttcaaaagcccagggtaagg

SEQ ID NO: 5163 - RNA, 20 nt, synthetic construct
  source 1..20: mol_type = other RNA
ttcaaatatgaacctgcagc

SEQ ID NO: 5164 - RNA, 20 nt, synthetic construct
  source 1..20: mol_type = other RNA
ttcaacagctctcttcatgc

SEQ ID NO: 5165 - RNA, 20 nt, synthetic construct
  source 1..20: mol_type = other RNA
ttcaagtgaggtaaccaaca

SEQ ID NO: 5166 - RNA, 20 nt, synthetic construct
  source 1..20: mol_type = other RNA
ttcacacacttcagatatct

SEQ ID NO: 5167 - RNA, 20 nt, synthetic construct
  source 1..20: mol_type = other RNA
ttcacactcttcctctttct

SEQ ID NO: 5168 - RNA, 20 nt, synthetic construct
  source 1..20: mol_type = other RNA
ttcaccatttttatagtcca

SEQ ID NO: 5169 - RNA, 20 nt, synthetic construct
  source 1..20: mol_type = other RNA
ttcaccttctcacataatcc

SEQ ID NO: 5170 - RNA, 20 nt, synthetic construct
  source 1..20: mol_type = other RNA
ttcactcgggtcacagggcc

SEQ ID NO: 5171 - RNA, 20 nt, synthetic construct
  source 1..20: mol_type = other RNA
ttcacttttttgccatggga

SEQ ID NO: 5172 - RNA, 20 nt, synthetic construct
  source 1..20: mol_type = other RNA
ttcagagcccacttacctgc

SEQ ID NO: 5173 - RNA, 20 nt, synthetic construct
  source 1..20: mol_type = other RNA
ttcagatatctatggaagca

SEQ ID NO: 5174 - RNA, 20 nt, synthetic construct
  source 1..20: mol_type = other RNA
ttcagcagttgtaccattag

SEQ ID NO: 5175 - RNA, 20 nt, synthetic construct
  source 1..20: mol_type = other RNA
ttcagccattttggcttccc

SEQ ID NO: 5176 - RNA, 20 nt, synthetic construct
  source 1..20: mol_type = other RNA
ttcaggaccagtcatgcagc

SEQ ID NO: 5177 - RNA, 20 nt, synthetic construct
  source 1..20: mol_type = other RNA
ttcatagggctggtgcttcc

SEQ ID NO: 5178 - RNA, 20 nt, synthetic construct
  source 1..20: mol_type = other RNA
ttcatcaagtctcttgccga

SEQ ID NO: 5179 - RNA, 20 nt, synthetic construct
  source 1..20: mol_type = other RNA
ttcatgccctgcatctccaa

SEQ ID NO: 5180 - RNA, 20 nt, synthetic construct
  source 1..20: mol_type = other RNA
ttcatgctcttatgctggta

SEQ ID NO: 5181 - RNA, 20 nt, synthetic construct
  source 1..20: mol_type = other RNA
ttcatgggagccacctctag

SEQ ID NO: 5182 - RNA, 20 nt, synthetic construct
  source 1..20: mol_type = other RNA
ttcatgggattagaagaatt

SEQ ID NO: 5183 - RNA, 20 nt, synthetic construct
  source 1..20: mol_type = other RNA
ttcatgtggctcagcaggct

SEQ ID NO: 5184 - RNA, 20 nt, synthetic construct
  source 1..20: mol_type = other RNA
ttccaaaccttggctggtaa

SEQ ID NO: 5185 - RNA, 20 nt, synthetic construct
  source 1..20: mol_type = other RNA
ttccacctcatctcaagctg

SEQ ID NO: 5186 - RNA, 20 nt, synthetic construct
  source 1..20: mol_type = other RNA
ttccagctcttaaccatgat

SEQ ID NO: 5187 - RNA, 20 nt, synthetic construct
  source 1..20: mol_type = other RNA
ttccataacctaagtattta

SEQ ID NO: 5188 - RNA, 20 nt, synthetic construct
  source 1..20: mol_type = other RNA
ttccatagatatctgaagtg

SEQ ID NO: 5189 - RNA, 20 nt, synthetic construct
  source 1..20: mol_type = other RNA
ttccattgcattgatatgat

SEQ ID NO: 5190 - RNA, 20 nt, synthetic construct
  source 1..20: mol_type = other RNA
ttcccaaagagccaagccat

SEQ ID NO: 5191 - RNA, 20 nt, synthetic construct
  source 1..20: mol_type = other RNA
ttcccacacagctaatgggt

SEQ ID NO: 5192 - RNA, 20 nt, synthetic construct
  source 1..20: mol_type = other RNA
ttccctacatgatgtacatt

SEQ ID NO: 5193 - RNA, 20 nt, synthetic construct
  source 1..20: mol_type = other RNA
ttcctattctccccagtctc

SEQ ID NO: 5194 - RNA, 20 nt, synthetic construct
  source 1..20: mol_type = other RNA
ttcctattgggattctttaa

SEQ ID NO: 5195 - RNA, 20 nt, synthetic construct
  source 1..20: mol_type = other RNA
ttcctctttctcacgggctt

SEQ ID NO: 5196 - RNA, 20 nt, synthetic construct
  source 1..20: mol_type = other RNA
ttcctgaccattagcatcac

SEQ ID NO: 5197 - RNA, 20 nt, synthetic construct
  source 1..20: mol_type = other RNA
ttcggcaagagacttgatga

SEQ ID NO: 5198 - RNA, 20 nt, synthetic construct
  source 1..20: mol_type = other RNA
ttctaatcccatgaaccctt

SEQ ID NO: 5199 - RNA, 20 nt, synthetic construct
  source 1..20: mol_type = other RNA
ttctatcatggttaagagct

SEQ ID NO: 5200 - RNA, 20 nt, synthetic construct
  source 1..20: mol_type = other RNA
ttctattccacctcatctca

SEQ ID NO: 5201 - RNA, 20 nt, synthetic construct
  source 1..20: mol_type = other RNA
ttctcacataatccataact

SEQ ID NO: 5202 - RNA, 20 nt, synthetic construct
  source 1..20: mol_type = other RNA
ttctcacgggctttttcagc

SEQ ID NO: 5203 - RNA, 20 nt, synthetic construct
  source 1..20: mol_type = other RNA
ttctcattgagtgtgcaaag

SEQ ID NO: 5204 - RNA, 20 nt, synthetic construct
  source 1..20: mol_type = other RNA
ttctccccagtctcagccga

SEQ ID NO: 5205 - RNA, 20 nt, synthetic construct
  source 1..20: mol_type = other RNA
ttctccttgttttggagatg

SEQ ID NO: 5206 - RNA, 20 nt, synthetic construct
  source 1..20: mol_type = other RNA
ttctctcttaccctgtccac

SEQ ID NO: 5207 - RNA, 20 nt, synthetic construct
  source 1..20: mol_type = other RNA
ttctgaggcacatagtctgg

SEQ ID NO: 5208 - RNA, 20 nt, synthetic construct
  source 1..20: mol_type = other RNA
ttctgattcaaaagcccagg

SEQ ID NO: 5209 - RNA, 20 nt, synthetic construct
  source 1..20: mol_type = other RNA
ttctgcttctggatccacca

SEQ ID NO: 5210 - RNA, 20 nt, synthetic construct
  source 1..20: mol_type = other RNA
ttctggatccaccaatccat

SEQ ID NO: 5211 - RNA, 20 nt, synthetic construct
  source 1..20: mol_type = other RNA
ttctggatcctgacattggg

SEQ ID NO: 5212 - RNA, 20 nt, synthetic construct
  source 1..20: mol_type = other RNA
ttctggtgcagaggacaacg

SEQ ID NO: 5213 - RNA, 20 nt, synthetic construct
  source 1..20: mol_type = other RNA
ttctgtagaggctggggctg

SEQ ID NO: 5214 - RNA, 20 nt, synthetic construct
  source 1..20: mol_type = other RNA
ttctgtggacagggtaagag

SEQ ID NO: 5215 - RNA, 20 nt, synthetic construct
  source 1..20: mol_type = other RNA
ttctgttctctcttaccctg

SEQ ID NO: 5216 - RNA, 20 nt, synthetic construct
  source 1..20: mol_type = other RNA
ttcttctaatcccatgaacc

SEQ ID NO: 5217 - RNA, 20 nt, synthetic construct
  source 1..20: mol_type = other RNA
ttctttaaaggggttgtggc

SEQ ID NO: 5218 - RNA, 20 nt, synthetic construct
  source 1..20: mol_type = other RNA
ttgaacatgcccggagctgc

SEQ ID NO: 5219 - RNA, 20 nt, synthetic construct
  source 1..20: mol_type = other RNA
ttgaatcagaatacccaata

SEQ ID NO: 5220 - RNA, 20 nt, synthetic construct
  source 1..20: mol_type = other RNA
ttgaattcttctaatcccat

SEQ ID NO: 5221 - RNA, 20 nt, synthetic construct
  source 1..20: mol_type = other RNA
ttgacagactctgtctgagg

SEQ ID NO: 5222 - RNA, 20 nt, synthetic construct
  source 1..20: mol_type = other RNA
ttgacccatgagttggagcc

SEQ ID NO: 5223 - RNA, 20 nt, synthetic construct
  source 1..20: mol_type = other RNA
ttgagatgaggtggaataga

SEQ ID NO: 5224 - RNA, 20 nt, synthetic construct
  source 1..20: mol_type = other RNA
ttgagtgtgcaaagcgtgag

SEQ ID NO: 5225 - RNA, 20 nt, synthetic construct
  source 1..20: mol_type = other RNA
ttgataacccattagctgtg

SEQ ID NO: 5226 - RNA, 20 nt, synthetic construct
  source 1..20: mol_type = other RNA
ttgatatgatggatattggg

SEQ ID NO: 5227 - RNA, 20 nt, synthetic construct
  source 1..20: mol_type = other RNA
ttgatgaaacgcaggtaagt

SEQ ID NO: 5228 - RNA, 20 nt, synthetic construct
  source 1..20: mol_type = other RNA
ttgcacactcaatgagaatt

SEQ ID NO: 5229 - RNA, 20 nt, synthetic construct
  source 1..20: mol_type = other RNA
ttgcattgatatgatggata

SEQ ID NO: 5230 - RNA, 20 nt, synthetic construct
  source 1..20: mol_type = other RNA
ttgccatgggatttctgagg

SEQ ID NO: 5231 - RNA, 20 nt, synthetic construct
  source 1..20: mol_type = other RNA
ttgccgaaaggaccatgtcc

SEQ ID NO: 5232 - RNA, 20 nt, synthetic construct
  source 1..20: mol_type = other RNA
ttgcctccttatcccactca

SEQ ID NO: 5233 - RNA, 20 nt, synthetic construct
  source 1..20: mol_type = other RNA
ttgcgactttcaggaccagt

SEQ ID NO: 5234 - RNA, 20 nt, synthetic construct
  source 1..20: mol_type = other RNA
ttgctcagattgggtggtaa

SEQ ID NO: 5235 - RNA, 20 nt, synthetic construct
  source 1..20: mol_type = other RNA
ttggaaatagccagagtttt

SEQ ID NO: 5236 - RNA, 20 nt, synthetic construct
  source 1..20: mol_type = other RNA
ttggacacaagcagttctat

SEQ ID NO: 5237 - RNA, 20 nt, synthetic construct
  source 1..20: mol_type = other RNA
ttggagatgcagggcatgaa

SEQ ID NO: 5238 - RNA, 20 nt, synthetic construct
  source 1..20: mol_type = other RNA
ttggagccacggccactccc

SEQ ID NO: 5239 - RNA, 20 nt, synthetic construct
  source 1..20: mol_type = other RNA
ttggataaggactaactgga

SEQ ID NO: 5240 - RNA, 20 nt, synthetic construct
  source 1..20: mol_type = other RNA
ttggatacctatacagatcc

SEQ ID NO: 5241 - RNA, 20 nt, synthetic construct
  source 1..20: mol_type = other RNA
ttggattgctcagattgggt

SEQ ID NO: 5242 - RNA, 20 nt, synthetic construct
  source 1..20: mol_type = other RNA
ttggcactagtccagggtgt

SEQ ID NO: 5243 - RNA, 20 nt, synthetic construct
  source 1..20: mol_type = other RNA
ttggctcattcatgctctta

SEQ ID NO: 5244 - RNA, 20 nt, synthetic construct
  source 1..20: mol_type = other RNA
ttggctctttgggaagccaa

SEQ ID NO: 5245 - RNA, 20 nt, synthetic construct
  source 1..20: mol_type = other RNA
ttggctggtaaagtgtatgg

SEQ ID NO: 5246 - RNA, 20 nt, synthetic construct
  source 1..20: mol_type = other RNA
ttggcttcccaaagagccaa

SEQ ID NO: 5247 - RNA, 20 nt, synthetic construct
  source 1..20: mol_type = other RNA
ttggcttggatacctataca

SEQ ID NO: 5248 - RNA, 20 nt, synthetic construct
  source 1..20: mol_type = other RNA
ttgggaagccaaaatggctg

SEQ ID NO: 5249 - RNA, 20 nt, synthetic construct
  source 1..20: mol_type = other RNA
ttgggattctttaaaggggt

SEQ ID NO: 5250 - RNA, 20 nt, synthetic construct
  source 1..20: mol_type = other RNA
ttgggccgtctcatgtatgg

SEQ ID NO: 5251 - RNA, 20 nt, synthetic construct
  source 1..20: mol_type = other RNA
ttgggggagtggccgtggct

SEQ ID NO: 5252 - RNA, 20 nt, synthetic construct
  source 1..20: mol_type = other RNA
ttgggtattctgattcaaaa

SEQ ID NO: 5253 - RNA, 20 nt, synthetic construct
  source 1..20: mol_type = other RNA
ttgggtggtaatctagaggt

SEQ ID NO: 5254 - RNA, 20 nt, synthetic construct
  source 1..20: mol_type = other RNA
ttggtctaatggtacaactg

SEQ ID NO: 5255 - RNA, 20 nt, synthetic construct
  source 1..20: mol_type = other RNA
ttggtggatccagaagcaga

SEQ ID NO: 5256 - RNA, 20 nt, synthetic construct
  source 1..20: mol_type = other RNA
ttggtttccataacctaagt

SEQ ID NO: 5257 - RNA, 20 nt, synthetic construct
  source 1..20: mol_type = other RNA
ttgtaaggccctgtgacccg

SEQ ID NO: 5258 - RNA, 20 nt, synthetic construct
  source 1..20: mol_type = other RNA
ttgtaccattagaccaaatg

SEQ ID NO: 5259 - RNA, 20 nt, synthetic construct
  source 1..20: mol_type = other RNA
ttgtccactgataggtttcc

SEQ ID NO: 5260 - RNA, 20 nt, synthetic construct
  source 1..20: mol_type = other RNA
ttgtcctctgcaccagaagc

SEQ ID NO: 5261 - RNA, 20 nt, synthetic construct
  source 1..20: mol_type = other RNA
ttgtggcatgcagctcacgc

SEQ ID NO: 5262 - RNA, 20 nt, synthetic construct
  source 1..20: mol_type = other RNA
ttgtgtaagcctccttggac

SEQ ID NO: 5263 - RNA, 20 nt, synthetic construct
  source 1..20: mol_type = other RNA
ttgtgtccaaggaggcttac

SEQ ID NO: 5264 - RNA, 20 nt, synthetic construct
  source 1..20: mol_type = other RNA
ttgttttggagatgcagggc

SEQ ID NO: 5265 - RNA, 20 nt, synthetic construct
  source 1..20: mol_type = other RNA
tttaaagaatcccaatagga

SEQ ID NO: 5266 - RNA, 20 nt, synthetic construct
  source 1..20: mol_type = other RNA
tttaaaggggttgtggcatg

SEQ ID NO: 5267 - RNA, 20 nt, synthetic construct
  source 1..20: mol_type = other RNA
tttacatctaaatacttagg

SEQ ID NO: 5268 - RNA, 20 nt, synthetic construct
  source 1..20: mol_type = other RNA
tttaccagcataagagcatg

SEQ ID NO: 5269 - RNA, 20 nt, synthetic construct
  source 1..20: mol_type = other RNA
tttaccagccaaggtttgga

SEQ ID NO: 5270 - RNA, 20 nt, synthetic construct
  source 1..20: mol_type = other RNA
tttagatgtaaaactctggc

SEQ ID NO: 5271 - RNA, 20 nt, synthetic construct
  source 1..20: mol_type = other RNA
tttatagtccatgtttggat

SEQ ID NO: 5272 - RNA, 20 nt, synthetic construct
  source 1..20: mol_type = other RNA
tttcaagtgaggtaaccaac

SEQ ID NO: 5273 - RNA, 20 nt, synthetic construct
  source 1..20: mol_type = other RNA
tttcacactcttcctctttc

SEQ ID NO: 5274 - RNA, 20 nt, synthetic construct
  source 1..20: mol_type = other RNA
tttcacttttttgccatggg

SEQ ID NO: 5275 - RNA, 20 nt, synthetic construct
  source 1..20: mol_type = other RNA
tttcagcagttgtaccatta

SEQ ID NO: 5276 - RNA, 20 nt, synthetic construct
  source 1..20: mol_type = other RNA
tttcagccattttggcttcc

SEQ ID NO: 5277 - RNA, 20 nt, synthetic construct
  source 1..20: mol_type = other RNA
tttcaggaccagtcatgcag

SEQ ID NO: 5278 - RNA, 20 nt, synthetic construct
  source 1..20: mol_type = other RNA
tttcatcaagtctcttgccg

SEQ ID NO: 5279 - RNA, 20 nt, synthetic construct
  source 1..20: mol_type = other RNA
tttcatgtggctcagcaggc

SEQ ID NO: 5280 - RNA, 20 nt, synthetic construct
  source 1..20: mol_type = other RNA
tttccaaaccttggctggta

SEQ ID NO: 5281 - RNA, 20 nt, synthetic construct
  source 1..20: mol_type = other RNA
tttccataacctaagtattt

SEQ ID NO: 5282 - RNA, 20 nt, synthetic construct
  source 1..20: mol_type = other RNA
tttccattgcattgatatga

SEQ ID NO: 5283 - RNA, 20 nt, synthetic construct
  source 1..20: mol_type = other RNA
tttcccacacagctaatggg

SEQ ID NO: 5284 - RNA, 20 nt, synthetic construct
  source 1..20: mol_type = other RNA
tttccctacatgatgtacat

SEQ ID NO: 5285 - RNA, 20 nt, synthetic construct
  source 1..20: mol_type = other RNA
tttcctgaccattagcatca

SEQ ID NO: 5286 - RNA, 20 nt, synthetic construct
  source 1..20: mol_type = other RNA
tttcggcaagagacttgatg

SEQ ID NO: 5287 - RNA, 20 nt, synthetic construct
  source 1..20: mol_type = other RNA
tttctcacgggctttttcag

SEQ ID NO: 5288 - RNA, 20 nt, synthetic construct
  source 1..20: mol_type = other RNA
tttctgaggcacatagtctg

SEQ ID NO: 5289 - RNA, 20 nt, synthetic construct
  source 1..20: mol_type = other RNA
tttctggatcctgacattgg

SEQ ID NO: 5290 - RNA, 20 nt, synthetic construct
  source 1..20: mol_type = other RNA
tttctgttctctcttaccct

SEQ ID NO: 5291 - RNA, 20 nt, synthetic construct
  source 1..20: mol_type = other RNA
tttgaatcagaatacccaat

SEQ ID NO: 5292 - RNA, 20 nt, synthetic construct
  source 1..20: mol_type = other RNA
tttgaattcttctaatccca

SEQ ID NO: 5293 - RNA, 20 nt, synthetic construct
  source 1..20: mol_type = other RNA
tttgataacccattagctgt

SEQ ID NO: 5294 - RNA, 20 nt, synthetic construct
  source 1..20: mol_type = other RNA
tttgcacactcaatgagaat

SEQ ID NO: 5295 - RNA, 20 nt, synthetic construct
  source 1..20: mol_type = other RNA
tttgccatgggatttctgag

SEQ ID NO: 5296 - RNA, 20 nt, synthetic construct
  source 1..20: mol_type = other RNA
tttgcgactttcaggaccag

SEQ ID NO: 5297 - RNA, 20 nt, synthetic construct
  source 1..20: mol_type = other RNA
tttggaaatagccagagttt

SEQ ID NO: 5298 - RNA, 20 nt, synthetic construct
  source 1..20: mol_type = other RNA
tttggagatgcagggcatga

SEQ ID NO: 5299 - RNA, 20 nt, synthetic construct
  source 1..20: mol_type = other RNA
tttggataaggactaactgg

SEQ ID NO: 5300 - RNA, 20 nt, synthetic construct
  source 1..20: mol_type = other RNA
tttggattgctcagattggg

SEQ ID NO: 5301 - RNA, 20 nt, synthetic construct
  source 1..20: mol_type = other RNA
tttggctcattcatgctctt

SEQ ID NO: 5302 - RNA, 20 nt, synthetic construct
  source 1..20: mol_type = other RNA
tttggcttcccaaagagcca

SEQ ID NO: 5303 - RNA, 20 nt, synthetic construct
  source 1..20: mol_type = other RNA
tttgggaagccaaaatggct

SEQ ID NO: 5304 - RNA, 20 nt, synthetic construct
  source 1..20: mol_type = other RNA
tttggtctaatggtacaact

SEQ ID NO: 5305 - RNA, 20 nt, synthetic construct
  source 1..20: mol_type = other RNA
tttggtttccataacctaag

SEQ ID NO: 5306 - RNA, 20 nt, synthetic construct
  source 1..20: mol_type = other RNA
tttgtgtaagcctccttgga

SEQ ID NO: 5307 - RNA, 20 nt, synthetic construct
  source 1..20: mol_type = other RNA
ttttaccagcataagagcat

SEQ ID NO: 5308 - RNA, 20 nt, synthetic construct
  source 1..20: mol_type = other RNA
ttttatagtccatgtttgga

SEQ ID NO: 5309 - RNA, 20 nt, synthetic construct
  source 1..20: mol_type = other RNA
ttttcaagtgaggtaaccaa

SEQ ID NO: 5310 - RNA, 20 nt, synthetic construct
  source 1..20: mol_type = other RNA
ttttcacactcttcctcttt

SEQ ID NO: 5311 - RNA, 20 nt, synthetic construct
  source 1..20: mol_type = other RNA
ttttcagccattttggcttc

SEQ ID NO: 5312 - RNA, 20 nt, synthetic construct
  source 1..20: mol_type = other RNA
ttttcctgaccattagcatc

SEQ ID NO: 5313 - RNA, 20 nt, synthetic construct
  source 1..20: mol_type = other RNA
ttttgaatcagaatacccaa

SEQ ID NO: 5314 - RNA, 20 nt, synthetic construct
  source 1..20: mol_type = other RNA
ttttgccatgggatttctga

SEQ ID NO: 5315 - RNA, 20 nt, synthetic construct
  source 1..20: mol_type = other RNA
ttttgcgactttcaggacca

SEQ ID NO: 5316 - RNA, 20 nt, synthetic construct
  source 1..20: mol_type = other RNA
ttttggagatgcagggcatg

SEQ ID NO: 5317 - RNA, 20 nt, synthetic construct
  source 1..20: mol_type = other RNA
ttttggctcattcatgctct

SEQ ID NO: 5318 - RNA, 20 nt, synthetic construct
  source 1..20: mol_type = other RNA
ttttggcttcccaaagagcc

SEQ ID NO: 5319 - RNA, 20 nt, synthetic construct
  source 1..20: mol_type = other RNA
ttttggtttccataacctaa

SEQ ID NO: 5320 - RNA, 20 nt, synthetic construct
  source 1..20: mol_type = other RNA
ttttgttggttacctcactt

SEQ ID NO: 5321 - RNA, 20 nt, synthetic construct
  source 1..20: mol_type = other RNA
tttttatagtccatgtttgg

SEQ ID NO: 5322 - RNA, 20 nt, synthetic construct
  source 1..20: mol_type = other RNA
tttttcagccattttggctt

SEQ ID NO: 5323 - RNA, 20 nt, synthetic construct
  source 1..20: mol_type = other RNA
tttttgccatgggatttctg

SEQ ID NO: 5324 - RNA, 20 nt, synthetic construct
  source 1..20: mol_type = other RNA
ttttttgccatgggatttct

SEQ ID NO: 5325 - RNA, 21 nt, synthetic construct
  source 1..21: mol_type = other RNA
aaaaaagtgaaacgggagcct

SEQ ID NO: 5326 - RNA, 21 nt, synthetic construct
  source 1..21: mol_type = other RNA
aaaaagcccgtgagaaagagg

SEQ ID NO: 5327 - RNA, 21 nt, synthetic construct
  source 1..21: mol_type = other RNA
aaaaagtgaaacgggagcctg

SEQ ID NO: 5328 - RNA, 21 nt, synthetic construct
  source 1..21: mol_type = other RNA
aaaaatggtgaacatcattca

SEQ ID NO: 5329 - RNA, 21 nt, synthetic construct
  source 1..21: mol_type = other RNA
aaaacaaggagaatgacatgc

SEQ ID NO: 5330 - RNA, 21 nt, synthetic construct
  source 1..21: mol_type = other RNA
aaaacatggcttggctctttg

SEQ ID NO: 5331 - RNA, 21 nt, synthetic construct
  source 1..21: mol_type = other RNA
aaaactctggctatttccaaa

SEQ ID NO: 5332 - RNA, 21 nt, synthetic construct
  source 1..21: mol_type = other RNA
aaaagacgagggagatcctgg

SEQ ID NO: 5333 - RNA, 21 nt, synthetic construct
  source 1..21: mol_type = other RNA
aaaagcagccattggcactag

SEQ ID NO: 5334 - RNA, 21 nt, synthetic construct
  source 1..21: mol_type = other RNA
aaaagcccagggtaagggttc

SEQ ID NO: 5335 - RNA, 21 nt, synthetic construct
  source 1..21: mol_type = other RNA
aaaagcccgtgagaaagagga

SEQ ID NO: 5336 - RNA, 21 nt, synthetic construct
  source 1..21: mol_type = other RNA
aaaagggggtgatatcatata

SEQ ID NO: 5337 - RNA, 21 nt, synthetic construct
  source 1..21: mol_type = other RNA
aaaagtatggcccagactatg

SEQ ID NO: 5338 - RNA, 21 nt, synthetic construct
  source 1..21: mol_type = other RNA
aaaagtgaaacgggagcctgc

SEQ ID NO: 5339 - RNA, 21 nt, synthetic construct
  source 1..21: mol_type = other RNA
aaaagttctgtggacagggta

SEQ ID NO: 5340 - RNA, 21 nt, synthetic construct
  source 1..21: mol_type = other RNA
aaaatatgcagggagatggtt

SEQ ID NO: 5341 - RNA, 21 nt, synthetic construct
  source 1..21: mol_type = other RNA
aaaatggctgaaaaagcccgt

SEQ ID NO: 5342 - RNA, 21 nt, synthetic construct
  source 1..21: mol_type = other RNA
aaaatggtgaacatcattcac

SEQ ID NO: 5343 - RNA, 21 nt, synthetic construct
  source 1..21: mol_type = other RNA
aaacaaggagaatgacatgct

SEQ ID NO: 5344 - RNA, 21 nt, synthetic construct
  source 1..21: mol_type = other RNA
aaacatggactataaaaatgg

SEQ ID NO: 5345 - RNA, 21 nt, synthetic construct
  source 1..21: mol_type = other RNA
aaacatggcttggctctttgg

SEQ ID NO: 5346 - RNA, 21 nt, synthetic construct
  source 1..21: mol_type = other RNA
aaaccaaaatatgcagggaga

SEQ ID NO: 5347 - RNA, 21 nt, synthetic construct
  source 1..21: mol_type = other RNA
aaaccatctccctgcatattt

SEQ ID NO: 5348 - RNA, 21 nt, synthetic construct
  source 1..21: mol_type = other RNA
aaacctatcagtggacaactg

SEQ ID NO: 5349 - RNA, 21 nt, synthetic construct
  source 1..21: mol_type = other RNA
aaaccttggctggtaaagtgt

SEQ ID NO: 5350 - RNA, 21 nt, synthetic construct
  source 1..21: mol_type = other RNA
aaacgcaggtaagtgggctct

SEQ ID NO: 5351 - RNA, 21 nt, synthetic construct
  source 1..21: mol_type = other RNA
aaacgggagcctgctgagcca

SEQ ID NO: 5352 - RNA, 21 nt, synthetic construct
  source 1..21: mol_type = other RNA
aaactctggctatttccaaac

SEQ ID NO: 5353 - RNA, 21 nt, synthetic construct
  source 1..21: mol_type = other RNA
aaactcttcacacacttcaga

SEQ ID NO: 5354 - RNA, 21 nt, synthetic construct
  source 1..21: mol_type = other RNA
aaacttcagagcccacttacc

SEQ ID NO: 5355 - RNA, 21 nt, synthetic construct
  source 1..21: mol_type = other RNA
aaagaatcccaataggaatca

SEQ ID NO: 5356 - RNA, 21 nt, synthetic construct
  source 1..21: mol_type = other RNA
aaagacgagggagatcctggt

SEQ ID NO: 5357 - RNA, 21 nt, synthetic construct
  source 1..21: mol_type = other RNA
aaagagccaagccatgttttg

SEQ ID NO: 5358 - RNA, 21 nt, synthetic construct
  source 1..21: mol_type = other RNA
aaagaggaagagtgtgaaaag

SEQ ID NO: 5359 - RNA, 21 nt, synthetic construct
  source 1..21: mol_type = other RNA
aaagatacctgtttctgttct

SEQ ID NO: 5360 - RNA, 21 nt, synthetic construct
  source 1..21: mol_type = other RNA
aaagatgcttccagctcttaa

SEQ ID NO: 5361 - RNA, 21 nt, synthetic construct
  source 1..21: mol_type = other RNA
aaagcagccattggcactagt

SEQ ID NO: 5362 - RNA, 21 nt, synthetic construct
  source 1..21: mol_type = other RNA
aaagcatgtcattctccttgt

SEQ ID NO: 5363 - RNA, 21 nt, synthetic construct
  source 1..21: mol_type = other RNA
aaagcccagggtaagggttca

SEQ ID NO: 5364 - RNA, 21 nt, synthetic construct
  source 1..21: mol_type = other RNA
aaagcccgtgagaaagaggaa

SEQ ID NO: 5365 - RNA, 21 nt, synthetic construct
  source 1..21: mol_type = other RNA
aaagcgtgagctgcatgccac

SEQ ID NO: 5366 - RNA, 21 nt, synthetic construct
  source 1..21: mol_type = other RNA
aaagctctgctcgctgtctga

SEQ ID NO: 5367 - RNA, 21 nt, synthetic construct
  source 1..21: mol_type = other RNA
aaaggaccatgtccgtgacca

SEQ ID NO: 5368 - RNA, 21 nt, synthetic construct
  source 1..21: mol_type = other RNA
aaagggggtgatatcatatat

SEQ ID NO: 5369 - RNA, 21 nt, synthetic construct
  source 1..21: mol_type = other RNA
aaaggggttgtggcatgcagc

SEQ ID NO: 5370 - RNA, 21 nt, synthetic construct
  source 1..21: mol_type = other RNA
aaagtatggcccagactatgt

SEQ ID NO: 5371 - RNA, 21 nt, synthetic construct
  source 1..21: mol_type = other RNA
aaagtcgcaaaagttctgtgg

SEQ ID NO: 5372 - RNA, 21 nt, synthetic construct
  source 1..21: mol_type = other RNA
aaagtgaaacgggagcctgct

SEQ ID NO: 5373 - RNA, 21 nt, synthetic construct
  source 1..21: mol_type = other RNA
aaagtgtatggatgggtggta

SEQ ID NO: 5374 - RNA, 21 nt, synthetic construct
  source 1..21: mol_type = other RNA
aaagttctgtggacagggtaa

SEQ ID NO: 5375 - RNA, 21 nt, synthetic construct
  source 1..21: mol_type = other RNA
aaatacttaggttatggaaac

SEQ ID NO: 5376 - RNA, 21 nt, synthetic construct
  source 1..21: mol_type = other RNA
aaatagccagagttttacatc

SEQ ID NO: 5377 - RNA, 21 nt, synthetic construct
  source 1..21: mol_type = other RNA
aaatatgaacctgcagcttga

SEQ ID NO: 5378 - RNA, 21 nt, synthetic construct
  source 1..21: mol_type = other RNA
aaatatgcagggagatggttt

SEQ ID NO: 5379 - RNA, 21 nt, synthetic construct
  source 1..21: mol_type = other RNA
aaatcccatggcaaaaaagtg

SEQ ID NO: 5380 - RNA, 21 nt, synthetic construct
  source 1..21: mol_type = other RNA
aaatggctgaaaaagcccgtg

SEQ ID NO: 5381 - RNA, 21 nt, synthetic construct
  source 1..21: mol_type = other RNA
aaatggtgaacatcattcacc

SEQ ID NO: 5382 - RNA, 21 nt, synthetic construct
  source 1..21: mol_type = other RNA
aaatgtacatcatgtagggaa

SEQ ID NO: 5383 - RNA, 21 nt, synthetic construct
  source 1..21: mol_type = other RNA
aaattaagtgatgctaatggt

SEQ ID NO: 5384 - RNA, 21 nt, synthetic construct
  source 1..21: mol_type = other RNA
aaattgcctccttatcccact

SEQ ID NO: 5385 - RNA, 21 nt, synthetic construct
  source 1..21: mol_type = other RNA
aacaaaagggggtgatatcat

SEQ ID NO: 5386 - RNA, 21 nt, synthetic construct
  source 1..21: mol_type = other RNA
aacaaggagaatgacatgctt

SEQ ID NO: 5387 - RNA, 21 nt, synthetic construct
  source 1..21: mol_type = other RNA
aacagctctcttcatgccctg

SEQ ID NO: 5388 - RNA, 21 nt, synthetic construct
  source 1..21: mol_type = other RNA
aacatcattcaccttctcaca

SEQ ID NO: 5389 - RNA, 21 nt, synthetic construct
  source 1..21: mol_type = other RNA
aacatgcccggagctgcactg

SEQ ID NO: 5390 - RNA, 21 nt, synthetic construct
  source 1..21: mol_type = other RNA
aacatggactataaaaatggt

SEQ ID NO: 5391 - RNA, 21 nt, synthetic construct
  source 1..21: mol_type = other RNA
aacatggcttggctctttggg

SEQ ID NO: 5392 - RNA, 21 nt, synthetic construct
  source 1..21: mol_type = other RNA
aaccaaaatatgcagggagat

SEQ ID NO: 5393 - RNA, 21 nt, synthetic construct
  source 1..21: mol_type = other RNA
aaccaacaaaagggggtgata

SEQ ID NO: 5394 - RNA, 21 nt, synthetic construct
  source 1..21: mol_type = other RNA
aaccatctccctgcatatttt

SEQ ID NO: 5395 - RNA, 21 nt, synthetic construct
  source 1..21: mol_type = other RNA
aaccatgatagaactgcttgt

SEQ ID NO: 5396 - RNA, 21 nt, synthetic construct
  source 1..21: mol_type = other RNA
aacccagatatggggagcagt

SEQ ID NO: 5397 - RNA, 21 nt, synthetic construct
  source 1..21: mol_type = other RNA
aacccattagctgtgtgggaa

SEQ ID NO: 5398 - RNA, 21 nt, synthetic construct
  source 1..21: mol_type = other RNA
aacccctttaaagaatcccaa

SEQ ID NO: 5399 - RNA, 21 nt, synthetic construct
  source 1..21: mol_type = other RNA
aacccttaccctgggcttttg

SEQ ID NO: 5400 - RNA, 21 nt, synthetic construct
  source 1..21: mol_type = other RNA
aacctatcagtggacaactgc

SEQ ID NO: 5401 - RNA, 21 nt, synthetic construct
  source 1..21: mol_type = other RNA
aacctgcagcttgagatgagg

SEQ ID NO: 5402 - RNA, 21 nt, synthetic construct
  source 1..21: mol_type = other RNA
aaccttggctggtaaagtgta

SEQ ID NO: 5403 - RNA, 21 nt, synthetic construct
  source 1..21: mol_type = other RNA
aacgatgaggtctggtcagac

SEQ ID NO: 5404 - RNA, 21 nt, synthetic construct
  source 1..21: mol_type = other RNA
aacgcaggtaagtgggctctg

SEQ ID NO: 5405 - RNA, 21 nt, synthetic construct
  source 1..21: mol_type = other RNA
aacgggagcctgctgagccac

SEQ ID NO: 5406 - RNA, 21 nt, synthetic construct
  source 1..21: mol_type = other RNA
aactacagtgcagctccgggc

SEQ ID NO: 5407 - RNA, 21 nt, synthetic construct
  source 1..21: mol_type = other RNA
aactacatctccatatgcctt

SEQ ID NO: 5408 - RNA, 21 nt, synthetic construct
  source 1..21: mol_type = other RNA
aactcatgggtcaattctcat

SEQ ID NO: 5409 - RNA, 21 nt, synthetic construct
  source 1..21: mol_type = other RNA
aactctggctatttccaaacc

SEQ ID NO: 5410 - RNA, 21 nt, synthetic construct
  source 1..21: mol_type = other RNA
aactcttattctgcttctgga

SEQ ID NO: 5411 - RNA, 21 nt, synthetic construct
  source 1..21: mol_type = other RNA
aactcttcacacacttcagat

SEQ ID NO: 5412 - RNA, 21 nt, synthetic construct
  source 1..21: mol_type = other RNA
aactgctccccatatctgggt

SEQ ID NO: 5413 - RNA, 21 nt, synthetic construct
  source 1..21: mol_type = other RNA
aactgctgaaaccatctccct

SEQ ID NO: 5414 - RNA, 21 nt, synthetic construct
  source 1..21: mol_type = other RNA
aactgcttgtgtccaaggagg

SEQ ID NO: 5415 - RNA, 21 nt, synthetic construct
  source 1..21: mol_type = other RNA
aactggattgggccgtctcat

SEQ ID NO: 5416 - RNA, 21 nt, synthetic construct
  source 1..21: mol_type = other RNA
aacttcagagcccacttacct

SEQ ID NO: 5417 - RNA, 21 nt, synthetic construct
  source 1..21: mol_type = other RNA
aacttctattccacctcatct

SEQ ID NO: 5418 - RNA, 21 nt, synthetic construct
  source 1..21: mol_type = other RNA
aacttttgcgactttcaggac

SEQ ID NO: 5419 - RNA, 21 nt, synthetic construct
  source 1..21: mol_type = other RNA
aagaatcccaataggaatcac

SEQ ID NO: 5420 - RNA, 21 nt, synthetic construct
  source 1..21: mol_type = other RNA
aagaattcaaatatgaacctg

SEQ ID NO: 5421 - RNA, 21 nt, synthetic construct
  source 1..21: mol_type = other RNA
aagaccctctgtctaagctca

SEQ ID NO: 5422 - RNA, 21 nt, synthetic construct
  source 1..21: mol_type = other RNA
aagacgagggagatcctggtg

SEQ ID NO: 5423 - RNA, 21 nt, synthetic construct
  source 1..21: mol_type = other RNA
aagagacttgatgaaacgcag

SEQ ID NO: 5424 - RNA, 21 nt, synthetic construct
  source 1..21: mol_type = other RNA
aagagagctgttgaacatgcc

SEQ ID NO: 5425 - RNA, 21 nt, synthetic construct
  source 1..21: mol_type = other RNA
aagagcatgaatgagccaaaa

SEQ ID NO: 5426 - RNA, 21 nt, synthetic construct
  source 1..21: mol_type = other RNA
aagagccaagccatgttttgg

SEQ ID NO: 5427 - RNA, 21 nt, synthetic construct
  source 1..21: mol_type = other RNA
aagagctggaagcatctttga

SEQ ID NO: 5428 - RNA, 21 nt, synthetic construct
  source 1..21: mol_type = other RNA
aagaggaagagtgtgaaaagt

SEQ ID NO: 5429 - RNA, 21 nt, synthetic construct
  source 1..21: mol_type = other RNA
aagagtgtgaaaagtatggcc

SEQ ID NO: 5430 - RNA, 21 nt, synthetic construct
  source 1..21: mol_type = other RNA
aagagttgacagactctgtct

SEQ ID NO: 5431 - RNA, 21 nt, synthetic construct
  source 1..21: mol_type = other RNA
aagagtttggataaggactaa

SEQ ID NO: 5432 - RNA, 21 nt, synthetic construct
  source 1..21: mol_type = other RNA
aagatacctgtttctgttctc

SEQ ID NO: 5433 - RNA, 21 nt, synthetic construct
  source 1..21: mol_type = other RNA
aagatgcttccagctcttaac

SEQ ID NO: 5434 - RNA, 21 nt, synthetic construct
  source 1..21: mol_type = other RNA
aagcaccagccctatgaactt

SEQ ID NO: 5435 - RNA, 21 nt, synthetic construct
  source 1..21: mol_type = other RNA
aagcagaataagagttgacag

SEQ ID NO: 5436 - RNA, 21 nt, synthetic construct
  source 1..21: mol_type = other RNA
aagcagccaccacagccccag

SEQ ID NO: 5437 - RNA, 21 nt, synthetic construct
  source 1..21: mol_type = other RNA
aagcagccattggcactagtc

SEQ ID NO: 5438 - RNA, 21 nt, synthetic construct
  source 1..21: mol_type = other RNA
aagcagttctatcatggttaa

SEQ ID NO: 5439 - RNA, 21 nt, synthetic construct
  source 1..21: mol_type = other RNA
aagcatctttgataacccatt

SEQ ID NO: 5440 - RNA, 21 nt, synthetic construct
  source 1..21: mol_type = other RNA
aagcatgtcattctccttgtt

SEQ ID NO: 5441 - RNA, 21 nt, synthetic construct
  source 1..21: mol_type = other RNA
aagccaaaatggctgaaaaag

SEQ ID NO: 5442 - RNA, 21 nt, synthetic construct
  source 1..21: mol_type = other RNA
aagccaagaccctctgtctaa

SEQ ID NO: 5443 - RNA, 21 nt, synthetic construct
  source 1..21: mol_type = other RNA
aagccacaccctggactagtg

SEQ ID NO: 5444 - RNA, 21 nt, synthetic construct
  source 1..21: mol_type = other RNA
aagccatgttttggctcattc

SEQ ID NO: 5445 - RNA, 21 nt, synthetic construct
  source 1..21: mol_type = other RNA
aagcccagggtaagggttcat

SEQ ID NO: 5446 - RNA, 21 nt, synthetic construct
  source 1..21: mol_type = other RNA
aagcccgtgagaaagaggaag

SEQ ID NO: 5447 - RNA, 21 nt, synthetic construct
  source 1..21: mol_type = other RNA
aagcctccttggacacaagca

SEQ ID NO: 5448 - RNA, 21 nt, synthetic construct
  source 1..21: mol_type = other RNA
aagcgtgagctgcatgccaca

SEQ ID NO: 5449 - RNA, 21 nt, synthetic construct
  source 1..21: mol_type = other RNA
aagctcagtctaccacccatc

SEQ ID NO: 5450 - RNA, 21 nt, synthetic construct
  source 1..21: mol_type = other RNA
aagctctgctcgctgtctgac

SEQ ID NO: 5451 - RNA, 21 nt, synthetic construct
  source 1..21: mol_type = other RNA
aagctgcaggttcatatttga

SEQ ID NO: 5452 - RNA, 21 nt, synthetic construct
  source 1..21: mol_type = other RNA
aaggaccatgtccgtgaccac

SEQ ID NO: 5453 - RNA, 21 nt, synthetic construct
  source 1..21: mol_type = other RNA
aaggactaactggattgggcc

SEQ ID NO: 5454 - RNA, 21 nt, synthetic construct
  source 1..21: mol_type = other RNA
aaggagaatgacatgctttcc

SEQ ID NO: 5455 - RNA, 21 nt, synthetic construct
  source 1..21: mol_type = other RNA
aaggaggcaatttccctacat

SEQ ID NO: 5456 - RNA, 21 nt, synthetic construct
  source 1..21: mol_type = other RNA
aaggaggcttacacaaattaa

SEQ ID NO: 5457 - RNA, 21 nt, synthetic construct
  source 1..21: mol_type = other RNA
aaggcatatggagatgtagtt

SEQ ID NO: 5458 - RNA, 21 nt, synthetic construct
  source 1..21: mol_type = other RNA
aaggccctgtgacccgagtga

SEQ ID NO: 5459 - RNA, 21 nt, synthetic construct
  source 1..21: mol_type = other RNA
aagggggtgatatcatatata

SEQ ID NO: 5460 - RNA, 21 nt, synthetic construct
  source 1..21: mol_type = other RNA
aaggggttgtggcatgcagct

SEQ ID NO: 5461 - RNA, 21 nt, synthetic construct
  source 1..21: mol_type = other RNA
aagggttcatgggattagaag

SEQ ID NO: 5462 - RNA, 21 nt, synthetic construct
  source 1..21: mol_type = other RNA
aaggtgaatgatgttcaccat

SEQ ID NO: 5463 - RNA, 21 nt, synthetic construct
  source 1..21: mol_type = other RNA
aaggtttggaaatagccagag

SEQ ID NO: 5464 - RNA, 21 nt, synthetic construct
  source 1..21: mol_type = other RNA
aagtatggcccagactatgtg

SEQ ID NO: 5465 - RNA, 21 nt, synthetic construct
  source 1..21: mol_type = other RNA
aagtcgcaaaagttctgtgga

SEQ ID NO: 5466 - RNA, 21 nt, synthetic construct
  source 1..21: mol_type = other RNA
aagtctcttgccgaaaggacc

SEQ ID NO: 5467 - RNA, 21 nt, synthetic construct
  source 1..21: mol_type = other RNA
aagtgaaacgggagcctgctg

SEQ ID NO: 5468 - RNA, 21 nt, synthetic construct
  source 1..21: mol_type = other RNA
aagtgaggtaaccaacaaaag

SEQ ID NO: 5469 - RNA, 21 nt, synthetic construct
  source 1..21: mol_type = other RNA
aagtgatgctaatggtcagga

SEQ ID NO: 5470 - RNA, 21 nt, synthetic construct
  source 1..21: mol_type = other RNA
aagtggccatccatctcatga

SEQ ID NO: 5471 - RNA, 21 nt, synthetic construct
  source 1..21: mol_type = other RNA
aagtgggctctgaagtttcat

SEQ ID NO: 5472 - RNA, 21 nt, synthetic construct
  source 1..21: mol_type = other RNA
aagtgtatggatgggtggtag

SEQ ID NO: 5473 - RNA, 21 nt, synthetic construct
  source 1..21: mol_type = other RNA
aagtgtgtgaagagtttggat

SEQ ID NO: 5474 - RNA, 21 nt, synthetic construct
  source 1..21: mol_type = other RNA
aagttcatagggctggtgctt

SEQ ID NO: 5475 - RNA, 21 nt, synthetic construct
  source 1..21: mol_type = other RNA
aagttctgtggacagggtaag

SEQ ID NO: 5476 - RNA, 21 nt, synthetic construct
  source 1..21: mol_type = other RNA
aagtttcatgtggctcagcag

SEQ ID NO: 5477 - RNA, 21 nt, synthetic construct
  source 1..21: mol_type = other RNA
aataagagttgacagactctg

SEQ ID NO: 5478 - RNA, 21 nt, synthetic construct
  source 1..21: mol_type = other RNA
aatacccaatatccatcatat

SEQ ID NO: 5479 - RNA, 21 nt, synthetic construct
  source 1..21: mol_type = other RNA
aatacttaggttatggaaacc

SEQ ID NO: 5480 - RNA, 21 nt, synthetic construct
  source 1..21: mol_type = other RNA
aatagaagttcatagggctgg

SEQ ID NO: 5481 - RNA, 21 nt, synthetic construct
  source 1..21: mol_type = other RNA
aatagccagagttttacatct

SEQ ID NO: 5482 - RNA, 21 nt, synthetic construct
  source 1..21: mol_type = other RNA
aataggaacccagatatgggg

SEQ ID NO: 5483 - RNA, 21 nt, synthetic construct
  source 1..21: mol_type = other RNA
aataggaatcaccccaccagg

SEQ ID NO: 5484 - RNA, 21 nt, synthetic construct
  source 1..21: mol_type = other RNA
aatatccatcatatcaatgca

SEQ ID NO: 5485 - RNA, 21 nt, synthetic construct
  source 1..21: mol_type = other RNA
aatatgaacctgcagcttgag

SEQ ID NO: 5486 - RNA, 21 nt, synthetic construct
  source 1..21: mol_type = other RNA
aatatgcagggagatggtttc

SEQ ID NO: 5487 - RNA, 21 nt, synthetic construct
  source 1..21: mol_type = other RNA
aatcaccccaccaggatctcc

SEQ ID NO: 5488 - RNA, 21 nt, synthetic construct
  source 1..21: mol_type = other RNA
aatcagaatacccaatatcca

SEQ ID NO: 5489 - RNA, 21 nt, synthetic construct
  source 1..21: mol_type = other RNA
aatccaaacatggactataaa

SEQ ID NO: 5490 - RNA, 21 nt, synthetic construct
  source 1..21: mol_type = other RNA
aatccagttagtccttatcca

SEQ ID NO: 5491 - RNA, 21 nt, synthetic construct
  source 1..21: mol_type = other RNA
aatccataactacagtgcagc

SEQ ID NO: 5492 - RNA, 21 nt, synthetic construct
  source 1..21: mol_type = other RNA
aatccatacatgagacggccc

SEQ ID NO: 5493 - RNA, 21 nt, synthetic construct
  source 1..21: mol_type = other RNA
aatcccaataggaatcacccc

SEQ ID NO: 5494 - RNA, 21 nt, synthetic construct
  source 1..21: mol_type = other RNA
aatcccatgaacccttaccct

SEQ ID NO: 5495 - RNA, 21 nt, synthetic construct
  source 1..21: mol_type = other RNA
aatcccatggcaaaaaagtga

SEQ ID NO: 5496 - RNA, 21 nt, synthetic construct
  source 1..21: mol_type = other RNA
aatctagaggtggctcccatg

SEQ ID NO: 5497 - RNA, 21 nt, synthetic construct
  source 1..21: mol_type = other RNA
aatctgagcaatccaaacatg

SEQ ID NO: 5498 - RNA, 21 nt, synthetic construct
  source 1..21: mol_type = other RNA
aatgacatgctttcccacaca

SEQ ID NO: 5499 - RNA, 21 nt, synthetic construct
  source 1..21: mol_type = other RNA
aatgagaattgacccatgagt

SEQ ID NO: 5500 - RNA, 21 nt, synthetic construct
  source 1..21: mol_type = other RNA
aatgagccaaaacatggcttg

SEQ ID NO: 5501 - RNA, 21 nt, synthetic construct
  source 1..21: mol_type = other RNA
aatgcaatggaaacctatcag

SEQ ID NO: 5502 - RNA, 21 nt, synthetic construct
  source 1..21: mol_type = other RNA
aatggaaacctatcagtggac

SEQ ID NO: 5503 - RNA, 21 nt, synthetic construct
  source 1..21: mol_type = other RNA
aatggctgaaaaagcccgtga

SEQ ID NO: 5504 - RNA, 21 nt, synthetic construct
  source 1..21: mol_type = other RNA
aatggctgcttttcctgacca

SEQ ID NO: 5505 - RNA, 21 nt, synthetic construct
  source 1..21: mol_type = other RNA
aatgggttatcaaagatgctt

SEQ ID NO: 5506 - RNA, 21 nt, synthetic construct
  source 1..21: mol_type = other RNA
aatggtacaactgctgaaacc

SEQ ID NO: 5507 - RNA, 21 nt, synthetic construct
  source 1..21: mol_type = other RNA
aatggtcaggaaaagcagcca

SEQ ID NO: 5508 - RNA, 21 nt, synthetic construct
  source 1..21: mol_type = other RNA
aatggtgaacatcattcacct

SEQ ID NO: 5509 - RNA, 21 nt, synthetic construct
  source 1..21: mol_type = other RNA
aatgtacatcatgtagggaaa

SEQ ID NO: 5510 - RNA, 21 nt, synthetic construct
  source 1..21: mol_type = other RNA
aatgtcaggatccagaaagct

SEQ ID NO: 5511 - RNA, 21 nt, synthetic construct
  source 1..21: mol_type = other RNA
aattaagtgatgctaatggtc

SEQ ID NO: 5512 - RNA, 21 nt, synthetic construct
  source 1..21: mol_type = other RNA
aattcaaatatgaacctgcag

SEQ ID NO: 5513 - RNA, 21 nt, synthetic construct
  source 1..21: mol_type = other RNA
aattctcattgagtgtgcaaa

SEQ ID NO: 5514 - RNA, 21 nt, synthetic construct
  source 1..21: mol_type = other RNA
aattcttctaatcccatgaac

SEQ ID NO: 5515 - RNA, 21 nt, synthetic construct
  source 1..21: mol_type = other RNA
aattgacccatgagttggagc

SEQ ID NO: 5516 - RNA, 21 nt, synthetic construct
  source 1..21: mol_type = other RNA
aattgcctccttatcccactc

SEQ ID NO: 5517 - RNA, 21 nt, synthetic construct
  source 1..21: mol_type = other RNA
aatttccctacatgatgtaca

SEQ ID NO: 5518 - RNA, 21 nt, synthetic construct
  source 1..21: mol_type = other RNA
aatttgtgtaagcctccttgg

SEQ ID NO: 5519 - RNA, 21 nt, synthetic construct
  source 1..21: mol_type = other RNA
acaaaagggggtgatatcata

SEQ ID NO: 5520 - RNA, 21 nt, synthetic construct
  source 1..21: mol_type = other RNA
acaaattaagtgatgctaatg

SEQ ID NO: 5521 - RNA, 21 nt, synthetic construct
  source 1..21: mol_type = other RNA
acaacccctttaaagaatccc

SEQ ID NO: 5522 - RNA, 21 nt, synthetic construct
  source 1..21: mol_type = other RNA
acaacgatgaggtctggtcag

SEQ ID NO: 5523 - RNA, 21 nt, synthetic construct
  source 1..21: mol_type = other RNA
acaactgctccccatatctgg

SEQ ID NO: 5524 - RNA, 21 nt, synthetic construct
  source 1..21: mol_type = other RNA
acaactgctgaaaccatctcc

SEQ ID NO: 5525 - RNA, 21 nt, synthetic construct
  source 1..21: mol_type = other RNA
acaagcagttctatcatggtt

SEQ ID NO: 5526 - RNA, 21 nt, synthetic construct
  source 1..21: mol_type = other RNA
acaaggagaatgacatgcttt

SEQ ID NO: 5527 - RNA, 21 nt, synthetic construct
  source 1..21: mol_type = other RNA
acacaaattaagtgatgctaa

SEQ ID NO: 5528 - RNA, 21 nt, synthetic construct
  source 1..21: mol_type = other RNA
acacaagcagttctatcatgg

SEQ ID NO: 5529 - RNA, 21 nt, synthetic construct
  source 1..21: mol_type = other RNA
acacacttcagatatctatgg

SEQ ID NO: 5530 - RNA, 21 nt, synthetic construct
  source 1..21: mol_type = other RNA
acacagctaatgggttatcaa

SEQ ID NO: 5531 - RNA, 21 nt, synthetic construct
  source 1..21: mol_type = other RNA
acaccctggactagtgccaat

SEQ ID NO: 5532 - RNA, 21 nt, synthetic construct
  source 1..21: mol_type = other RNA
acactcaatgagaattgaccc

SEQ ID NO: 5533 - RNA, 21 nt, synthetic construct
  source 1..21: mol_type = other RNA
acactcttcctctttctcacg

SEQ ID NO: 5534 - RNA, 21 nt, synthetic construct
  source 1..21: mol_type = other RNA
acacttcagatatctatggaa

SEQ ID NO: 5535 - RNA, 21 nt, synthetic construct
  source 1..21: mol_type = other RNA
acactttaccagccaaggttt

SEQ ID NO: 5536 - RNA, 21 nt, synthetic construct
  source 1..21: mol_type = other RNA
acagaacttttgcgactttca

SEQ ID NO: 5537 - RNA, 21 nt, synthetic construct
  source 1..21: mol_type = other RNA
acagaagcagccaccacagcc

SEQ ID NO: 5538 - RNA, 21 nt, synthetic construct
  source 1..21: mol_type = other RNA
acagactccacagtaactaca

SEQ ID NO: 5539 - RNA, 21 nt, synthetic construct
  source 1..21: mol_type = other RNA
acagactctgtctgagggtga

SEQ ID NO: 5540 - RNA, 21 nt, synthetic construct
  source 1..21: mol_type = other RNA
acagagggtcttggcttggat

SEQ ID NO: 5541 - RNA, 21 nt, synthetic construct
  source 1..21: mol_type = other RNA
acagagtctgtcaactcttat

SEQ ID NO: 5542 - RNA, 21 nt, synthetic construct
  source 1..21: mol_type = other RNA
acagatatatatgatatcacc

SEQ ID NO: 5543 - RNA, 21 nt, synthetic construct
  source 1..21: mol_type = other RNA
acagatccatcggctgagact

SEQ ID NO: 5544 - RNA, 21 nt, synthetic construct
  source 1..21: mol_type = other RNA
acagccccagcagcagcagag

SEQ ID NO: 5545 - RNA, 21 nt, synthetic construct
  source 1..21: mol_type = other RNA
acagcgagcagagctttctgg

SEQ ID NO: 5546 - RNA, 21 nt, synthetic construct
  source 1..21: mol_type = other RNA
acagctaatgggttatcaaag

SEQ ID NO: 5547 - RNA, 21 nt, synthetic construct
  source 1..21: mol_type = other RNA
acagctctcttcatgccctgc

SEQ ID NO: 5548 - RNA, 21 nt, synthetic construct
  source 1..21: mol_type = other RNA
acagggccttacaacagatat

SEQ ID NO: 5549 - RNA, 21 nt, synthetic construct
  source 1..21: mol_type = other RNA
acagggtaagagagaacagaa

SEQ ID NO: 5550 - RNA, 21 nt, synthetic construct
  source 1..21: mol_type = other RNA
acagtaactacatctccatat

SEQ ID NO: 5551 - RNA, 21 nt, synthetic construct
  source 1..21: mol_type = other RNA
acagtgcagctccgggcatgt

SEQ ID NO: 5552 - RNA, 21 nt, synthetic construct
  source 1..21: mol_type = other RNA
acataatccataactacagtg

SEQ ID NO: 5553 - RNA, 21 nt, synthetic construct
  source 1..21: mol_type = other RNA
acatagtctgggccatacttt

SEQ ID NO: 5554 - RNA, 21 nt, synthetic construct
  source 1..21: mol_type = other RNA
acatcaccctcagacagagtc

SEQ ID NO: 5555 - RNA, 21 nt, synthetic construct
  source 1..21: mol_type = other RNA
acatcatgtagggaaattgcc

SEQ ID NO: 5556 - RNA, 21 nt, synthetic construct
  source 1..21: mol_type = other RNA
acatcattcaccttctcacat

SEQ ID NO: 5557 - RNA, 21 nt, synthetic construct
  source 1..21: mol_type = other RNA
acatctccatatgccttcact

SEQ ID NO: 5558 - RNA, 21 nt, synthetic construct
  source 1..21: mol_type = other RNA
acatgaaacttcagagcccac

SEQ ID NO: 5559 - RNA, 21 nt, synthetic construct
  source 1..21: mol_type = other RNA
acatgagacggcccaatccag

SEQ ID NO: 5560 - RNA, 21 nt, synthetic construct
  source 1..21: mol_type = other RNA
acatgatgtacatttggtcta

SEQ ID NO: 5561 - RNA, 21 nt, synthetic construct
  source 1..21: mol_type = other RNA
acatgcccggagctgcactgt

SEQ ID NO: 5562 - RNA, 21 nt, synthetic construct
  source 1..21: mol_type = other RNA
acatgctttcccacacagcta

SEQ ID NO: 5563 - RNA, 21 nt, synthetic construct
  source 1..21: mol_type = other RNA
acatggactataaaaatggtg

SEQ ID NO: 5564 - RNA, 21 nt, synthetic construct
  source 1..21: mol_type = other RNA
acatggcttggctctttggga

SEQ ID NO: 5565 - RNA, 21 nt, synthetic construct
  source 1..21: mol_type = other RNA
acatggtcctttcggcaagag

SEQ ID NO: 5566 - RNA, 21 nt, synthetic construct
  source 1..21: mol_type = other RNA
acattgggggagtggccgtgg

SEQ ID NO: 5567 - RNA, 21 nt, synthetic construct
  source 1..21: mol_type = other RNA
acatttggtctaatggtacaa

SEQ ID NO: 5568 - RNA, 21 nt, synthetic construct
  source 1..21: mol_type = other RNA
accaaaatatgcagggagatg

SEQ ID NO: 5569 - RNA, 21 nt, synthetic construct
  source 1..21: mol_type = other RNA
accaaatgtacatcatgtagg

SEQ ID NO: 5570 - RNA, 21 nt, synthetic construct
  source 1..21: mol_type = other RNA
accaacaaaagggggtgatat

SEQ ID NO: 5571 - RNA, 21 nt, synthetic construct
  source 1..21: mol_type = other RNA
accaatccatacatgagacgg

SEQ ID NO: 5572 - RNA, 21 nt, synthetic construct
  source 1..21: mol_type = other RNA
accacagactccacagtaact

SEQ ID NO: 5573 - RNA, 21 nt, synthetic construct
  source 1..21: mol_type = other RNA
accacagccccagcagcagca

SEQ ID NO: 5574 - RNA, 21 nt, synthetic construct
  source 1..21: mol_type = other RNA
accacccaatctgagcaatcc

SEQ ID NO: 5575 - RNA, 21 nt, synthetic construct
  source 1..21: mol_type = other RNA
accacccatccatacacttta

SEQ ID NO: 5576 - RNA, 21 nt, synthetic construct
  source 1..21: mol_type = other RNA
accagaagccacaccctggac

SEQ ID NO: 5577 - RNA, 21 nt, synthetic construct
  source 1..21: mol_type = other RNA
accagacctcatcgttgtcct

SEQ ID NO: 5578 - RNA, 21 nt, synthetic construct
  source 1..21: mol_type = other RNA
accagcataagagcatgaatg

SEQ ID NO: 5579 - RNA, 21 nt, synthetic construct
  source 1..21: mol_type = other RNA
accagccaaggtttggaaata

SEQ ID NO: 5580 - RNA, 21 nt, synthetic construct
  source 1..21: mol_type = other RNA
accagccctatgaacttctat

SEQ ID NO: 5581 - RNA, 21 nt, synthetic construct
  source 1..21: mol_type = other RNA
accaggatctccctcgtcttt

SEQ ID NO: 5582 - RNA, 21 nt, synthetic construct
  source 1..21: mol_type = other RNA
accagtcatgcagcagtccca

SEQ ID NO: 5583 - RNA, 21 nt, synthetic construct
  source 1..21: mol_type = other RNA
accatctccctgcatattttg

SEQ ID NO: 5584 - RNA, 21 nt, synthetic construct
  source 1..21: mol_type = other RNA
accatgatagaactgcttgtg

SEQ ID NO: 5585 - RNA, 21 nt, synthetic construct
  source 1..21: mol_type = other RNA
accatgtccgtgaccacagac

SEQ ID NO: 5586 - RNA, 21 nt, synthetic construct
  source 1..21: mol_type = other RNA
accattagaccaaatgtacat

SEQ ID NO: 5587 - RNA, 21 nt, synthetic construct
  source 1..21: mol_type = other RNA
accattagcatcacttaattt

SEQ ID NO: 5588 - RNA, 21 nt, synthetic construct
  source 1..21: mol_type = other RNA
accatttttatagtccatgtt

SEQ ID NO: 5589 - RNA, 21 nt, synthetic construct
  source 1..21: mol_type = other RNA
acccaatatccatcatatcaa

SEQ ID NO: 5590 - RNA, 21 nt, synthetic construct
  source 1..21: mol_type = other RNA
acccaatctgagcaatccaaa

SEQ ID NO: 5591 - RNA, 21 nt, synthetic construct
  source 1..21: mol_type = other RNA
acccagatatggggagcagtt

SEQ ID NO: 5592 - RNA, 21 nt, synthetic construct
  source 1..21: mol_type = other RNA
acccatccatacactttacca

SEQ ID NO: 5593 - RNA, 21 nt, synthetic construct
  source 1..21: mol_type = other RNA
acccatgagttggagccacgg

SEQ ID NO: 5594 - RNA, 21 nt, synthetic construct
  source 1..21: mol_type = other RNA
acccattagctgtgtgggaaa

SEQ ID NO: 5595 - RNA, 21 nt, synthetic construct
  source 1..21: mol_type = other RNA
accccaccaggatctccctcg

SEQ ID NO: 5596 - RNA, 21 nt, synthetic construct
  source 1..21: mol_type = other RNA
accccagcagcagcagccaca

SEQ ID NO: 5597 - RNA, 21 nt, synthetic construct
  source 1..21: mol_type = other RNA
acccccttttgttggttacct

SEQ ID NO: 5598 - RNA, 21 nt, synthetic construct
  source 1..21: mol_type = other RNA
acccctttaaagaatcccaat

SEQ ID NO: 5599 - RNA, 21 nt, synthetic construct
  source 1..21: mol_type = other RNA
acccgagtgaaggcatatgga

SEQ ID NO: 5600 - RNA, 21 nt, synthetic construct
  source 1..21: mol_type = other RNA
accctcagacagagtctgtca

SEQ ID NO: 5601 - RNA, 21 nt, synthetic construct
  source 1..21: mol_type = other RNA
accctctgtctaagctcagtc

SEQ ID NO: 5602 - RNA, 21 nt, synthetic construct
  source 1..21: mol_type = other RNA
accctggactagtgccaatgg

SEQ ID NO: 5603 - RNA, 21 nt, synthetic construct
  source 1..21: mol_type = other RNA
accctgggcttttgaatcaga

SEQ ID NO: 5604 - RNA, 21 nt, synthetic construct
  source 1..21: mol_type = other RNA
accctgtccacagaacttttg

SEQ ID NO: 5605 - RNA, 21 nt, synthetic construct
  source 1..21: mol_type = other RNA
acccttaccctgggcttttga

SEQ ID NO: 5606 - RNA, 21 nt, synthetic construct
  source 1..21: mol_type = other RNA
acctatacagatccatcggct

SEQ ID NO: 5607 - RNA, 21 nt, synthetic construct
  source 1..21: mol_type = other RNA
acctatcagtggacaactgct

SEQ ID NO: 5608 - RNA, 21 nt, synthetic construct
  source 1..21: mol_type = other RNA
acctcatcgttgtcctctgca

SEQ ID NO: 5609 - RNA, 21 nt, synthetic construct
  source 1..21: mol_type = other RNA
acctcatctcaagctgcaggt

SEQ ID NO: 5610 - RNA, 21 nt, synthetic construct
  source 1..21: mol_type = other RNA
acctctagattaccacccaat

SEQ ID NO: 5611 - RNA, 21 nt, synthetic construct
  source 1..21: mol_type = other RNA
acctgcagcttgagatgaggt

SEQ ID NO: 5612 - RNA, 21 nt, synthetic construct
  source 1..21: mol_type = other RNA
acctgcgtttcatcaagtctc

SEQ ID NO: 5613 - RNA, 21 nt, synthetic construct
  source 1..21: mol_type = other RNA
acctgtttctgttctctctta

SEQ ID NO: 5614 - RNA, 21 nt, synthetic construct
  source 1..21: mol_type = other RNA
accttctcacataatccataa

SEQ ID NO: 5615 - RNA, 21 nt, synthetic construct
  source 1..21: mol_type = other RNA
accttggctggtaaagtgtat

SEQ ID NO: 5616 - RNA, 21 nt, synthetic construct
  source 1..21: mol_type = other RNA
acgagggagatcctggtgggg

SEQ ID NO: 5617 - RNA, 21 nt, synthetic construct
  source 1..21: mol_type = other RNA
acgatgaggtctggtcagaca

SEQ ID NO: 5618 - RNA, 21 nt, synthetic construct
  source 1..21: mol_type = other RNA
acgcaggtaagtgggctctga

SEQ ID NO: 5619 - RNA, 21 nt, synthetic construct
  source 1..21: mol_type = other RNA
acgctttgcacactcaatgag

SEQ ID NO: 5620 - RNA, 21 nt, synthetic construct
  source 1..21: mol_type = other RNA
acggacatggtcctttcggca

SEQ ID NO: 5621 - RNA, 21 nt, synthetic construct
  source 1..21: mol_type = other RNA
acggccactcccccaatgtca

SEQ ID NO: 5622 - RNA, 21 nt, synthetic construct
  source 1..21: mol_type = other RNA
acggcccaatccagttagtcc

SEQ ID NO: 5623 - RNA, 21 nt, synthetic construct
  source 1..21: mol_type = other RNA
acgggagcctgctgagccaca

SEQ ID NO: 5624 - RNA, 21 nt, synthetic construct
  source 1..21: mol_type = other RNA
acgggctttttcagccatttt

SEQ ID NO: 5625 - RNA, 21 nt, synthetic construct
  source 1..21: mol_type = other RNA
actaactggattgggccgtct

SEQ ID NO: 5626 - RNA, 21 nt, synthetic construct
  source 1..21: mol_type = other RNA
actacagtgcagctccgggca

SEQ ID NO: 5627 - RNA, 21 nt, synthetic construct
  source 1..21: mol_type = other RNA
actacatctccatatgccttc

SEQ ID NO: 5628 - RNA, 21 nt, synthetic construct
  source 1..21: mol_type = other RNA
actagtccagggtgtggcttc

SEQ ID NO: 5629 - RNA, 21 nt, synthetic construct
  source 1..21: mol_type = other RNA
actagtgccaatggctgcttt

SEQ ID NO: 5630 - RNA, 21 nt, synthetic construct
  source 1..21: mol_type = other RNA
actataaaaatggtgaacatc

SEQ ID NO: 5631 - RNA, 21 nt, synthetic construct
  source 1..21: mol_type = other RNA
actatgtgcctcagaaatccc

SEQ ID NO: 5632 - RNA, 21 nt, synthetic construct
  source 1..21: mol_type = other RNA
actcaatgagaattgacccat

SEQ ID NO: 5633 - RNA, 21 nt, synthetic construct
  source 1..21: mol_type = other RNA
actcatgagatggatggccac

SEQ ID NO: 5634 - RNA, 21 nt, synthetic construct
  source 1..21: mol_type = other RNA
actcatgggtcaattctcatt

SEQ ID NO: 5635 - RNA, 21 nt, synthetic construct
  source 1..21: mol_type = other RNA
actccacagtaactacatctc

SEQ ID NO: 5636 - RNA, 21 nt, synthetic construct
  source 1..21: mol_type = other RNA
actcccccaatgtcaggatcc

SEQ ID NO: 5637 - RNA, 21 nt, synthetic construct
  source 1..21: mol_type = other RNA
actcgggtcacagggccttac

SEQ ID NO: 5638 - RNA, 21 nt, synthetic construct
  source 1..21: mol_type = other RNA
actctggctatttccaaacct

SEQ ID NO: 5639 - RNA, 21 nt, synthetic construct
  source 1..21: mol_type = other RNA
actctgtctgagggtgatgtg

SEQ ID NO: 5640 - RNA, 21 nt, synthetic construct
  source 1..21: mol_type = other RNA
actcttattctgcttctggat

SEQ ID NO: 5641 - RNA, 21 nt, synthetic construct
  source 1..21: mol_type = other RNA
actcttcacacacttcagata

SEQ ID NO: 5642 - RNA, 21 nt, synthetic construct
  source 1..21: mol_type = other RNA
actcttcctctttctcacggg

SEQ ID NO: 5643 - RNA, 21 nt, synthetic construct
  source 1..21: mol_type = other RNA
actgagcttagacagagggtc

SEQ ID NO: 5644 - RNA, 21 nt, synthetic construct
  source 1..21: mol_type = other RNA
actgataggtttccattgcat

SEQ ID NO: 5645 - RNA, 21 nt, synthetic construct
  source 1..21: mol_type = other RNA
actgctccccatatctgggtt

SEQ ID NO: 5646 - RNA, 21 nt, synthetic construct
  source 1..21: mol_type = other RNA
actgctgaaaccatctccctg

SEQ ID NO: 5647 - RNA, 21 nt, synthetic construct
  source 1..21: mol_type = other RNA
actgctgcatgactggtcctg

SEQ ID NO: 5648 - RNA, 21 nt, synthetic construct
  source 1..21: mol_type = other RNA
actgcttgtgtccaaggaggc

SEQ ID NO: 5649 - RNA, 21 nt, synthetic construct
  source 1..21: mol_type = other RNA
actggattgggccgtctcatg

SEQ ID NO: 5650 - RNA, 21 nt, synthetic construct
  source 1..21: mol_type = other RNA
actggggagaataggaaccca

SEQ ID NO: 5651 - RNA, 21 nt, synthetic construct
  source 1..21: mol_type = other RNA
actggtcctgaaagtcgcaaa

SEQ ID NO: 5652 - RNA, 21 nt, synthetic construct
  source 1..21: mol_type = other RNA
actgtagttatggattatgtg

SEQ ID NO: 5653 - RNA, 21 nt, synthetic construct
  source 1..21: mol_type = other RNA
actgtggagtctgtggtcacg

SEQ ID NO: 5654 - RNA, 21 nt, synthetic construct
  source 1..21: mol_type = other RNA
acttaatttgtgtaagcctcc

SEQ ID NO: 5655 - RNA, 21 nt, synthetic construct
  source 1..21: mol_type = other RNA
acttacctgcgtttcatcaag

SEQ ID NO: 5656 - RNA, 21 nt, synthetic construct
  source 1..21: mol_type = other RNA
acttaggttatggaaaccaaa

SEQ ID NO: 5657 - RNA, 21 nt, synthetic construct
  source 1..21: mol_type = other RNA
acttcagagcccacttacctg

SEQ ID NO: 5658 - RNA, 21 nt, synthetic construct
  source 1..21: mol_type = other RNA
acttcagatatctatggaagc

SEQ ID NO: 5659 - RNA, 21 nt, synthetic construct
  source 1..21: mol_type = other RNA
acttcatgggagccacctcta

SEQ ID NO: 5660 - RNA, 21 nt, synthetic construct
  source 1..21: mol_type = other RNA
acttctattccacctcatctc

SEQ ID NO: 5661 - RNA, 21 nt, synthetic construct
  source 1..21: mol_type = other RNA
acttgatgaaacgcaggtaag

SEQ ID NO: 5662 - RNA, 21 nt, synthetic construct
  source 1..21: mol_type = other RNA
actttaccagccaaggtttgg

SEQ ID NO: 5663 - RNA, 21 nt, synthetic construct
  source 1..21: mol_type = other RNA
actttcaggaccagtcatgca

SEQ ID NO: 5664 - RNA, 21 nt, synthetic construct
  source 1..21: mol_type = other RNA
acttttcacactcttcctctt

SEQ ID NO: 5665 - RNA, 21 nt, synthetic construct
  source 1..21: mol_type = other RNA
acttttgcgactttcaggacc

SEQ ID NO: 5666 - RNA, 21 nt, synthetic construct
  source 1..21: mol_type = other RNA
acttttttgccatgggatttc

SEQ ID NO: 5667 - RNA, 21 nt, synthetic construct
  source 1..21: mol_type = other RNA
agaaagaggaagagtgtgaaa

SEQ ID NO: 5668 - RNA, 21 nt, synthetic construct
  source 1..21: mol_type = other RNA
agaaagctctgctcgctgtct

SEQ ID NO: 5669 - RNA, 21 nt, synthetic construct
  source 1..21: mol_type = other RNA
agaaatcccatggcaaaaaag

SEQ ID NO: 5670 - RNA, 21 nt, synthetic construct
  source 1..21: mol_type = other RNA
agaactgcttgtgtccaagga

SEQ ID NO: 5671 - RNA, 21 nt, synthetic construct
  source 1..21: mol_type = other RNA
agaacttttgcgactttcagg

SEQ ID NO: 5672 - RNA, 21 nt, synthetic construct
  source 1..21: mol_type = other RNA
agaagaattcaaatatgaacc

SEQ ID NO: 5673 - RNA, 21 nt, synthetic construct
  source 1..21: mol_type = other RNA
agaagcagaataagagttgac

SEQ ID NO: 5674 - RNA, 21 nt, synthetic construct
  source 1..21: mol_type = other RNA
agaagcagccaccacagcccc

SEQ ID NO: 5675 - RNA, 21 nt, synthetic construct
  source 1..21: mol_type = other RNA
agaagccacaccctggactag

SEQ ID NO: 5676 - RNA, 21 nt, synthetic construct
  source 1..21: mol_type = other RNA
agaaggtgaatgatgttcacc

SEQ ID NO: 5677 - RNA, 21 nt, synthetic construct
  source 1..21: mol_type = other RNA
agaagttcatagggctggtgc

SEQ ID NO: 5678 - RNA, 21 nt, synthetic construct
  source 1..21: mol_type = other RNA
agaataagagttgacagactc

SEQ ID NO: 5679 - RNA, 21 nt, synthetic construct
  source 1..21: mol_type = other RNA
agaatacccaatatccatcat

SEQ ID NO: 5680 - RNA, 21 nt, synthetic construct
  source 1..21: mol_type = other RNA
agaataggaacccagatatgg

SEQ ID NO: 5681 - RNA, 21 nt, synthetic construct
  source 1..21: mol_type = other RNA
agaatcccaataggaatcacc

SEQ ID NO: 5682 - RNA, 21 nt, synthetic construct
  source 1..21: mol_type = other RNA
agaatgacatgctttcccaca

SEQ ID NO: 5683 - RNA, 21 nt, synthetic construct
  source 1..21: mol_type = other RNA
agaattcaaatatgaacctgc

SEQ ID NO: 5684 - RNA, 21 nt, synthetic construct
  source 1..21: mol_type = other RNA
agaattgacccatgagttgga

SEQ ID NO: 5685 - RNA, 21 nt, synthetic construct
  source 1..21: mol_type = other RNA
agacagagggtcttggcttgg

SEQ ID NO: 5686 - RNA, 21 nt, synthetic construct
  source 1..21: mol_type = other RNA
agacagagtctgtcaactctt

SEQ ID NO: 5687 - RNA, 21 nt, synthetic construct
  source 1..21: mol_type = other RNA
agacagcgagcagagctttct

SEQ ID NO: 5688 - RNA, 21 nt, synthetic construct
  source 1..21: mol_type = other RNA
agaccaaatgtacatcatgta

SEQ ID NO: 5689 - RNA, 21 nt, synthetic construct
  source 1..21: mol_type = other RNA
agaccccagcagcagcagcca

SEQ ID NO: 5690 - RNA, 21 nt, synthetic construct
  source 1..21: mol_type = other RNA
agaccctctgtctaagctcag

SEQ ID NO: 5691 - RNA, 21 nt, synthetic construct
  source 1..21: mol_type = other RNA
agacctcatcgttgtcctctg

SEQ ID NO: 5692 - RNA, 21 nt, synthetic construct
  source 1..21: mol_type = other RNA
agacgagggagatcctggtgg

SEQ ID NO: 5693 - RNA, 21 nt, synthetic construct
  source 1..21: mol_type = other RNA
agacggcccaatccagttagt

SEQ ID NO: 5694 - RNA, 21 nt, synthetic construct
  source 1..21: mol_type = other RNA
agactatgtgcctcagaaatc

SEQ ID NO: 5695 - RNA, 21 nt, synthetic construct
  source 1..21: mol_type = other RNA
agactccacagtaactacatc

SEQ ID NO: 5696 - RNA, 21 nt, synthetic construct
  source 1..21: mol_type = other RNA
agactctgtctgagggtgatg

SEQ ID NO: 5697 - RNA, 21 nt, synthetic construct
  source 1..21: mol_type = other RNA
agactgagcttagacagaggg

SEQ ID NO: 5698 - RNA, 21 nt, synthetic construct
  source 1..21: mol_type = other RNA
agactggggagaataggaacc

SEQ ID NO: 5699 - RNA, 21 nt, synthetic construct
  source 1..21: mol_type = other RNA
agacttgatgaaacgcaggta

SEQ ID NO: 5700 - RNA, 21 nt, synthetic construct
  source 1..21: mol_type = other RNA
agagaccccagcagcagcagc

SEQ ID NO: 5701 - RNA, 21 nt, synthetic construct
  source 1..21: mol_type = other RNA
agagacttgatgaaacgcagg

SEQ ID NO: 5702 - RNA, 21 nt, synthetic construct
  source 1..21: mol_type = other RNA
agagagctgttgaacatgccc

SEQ ID NO: 5703 - RNA, 21 nt, synthetic construct
  source 1..21: mol_type = other RNA
agagcatgaatgagccaaaac

SEQ ID NO: 5704 - RNA, 21 nt, synthetic construct
  source 1..21: mol_type = other RNA
agagccaagccatgttttggc

SEQ ID NO: 5705 - RNA, 21 nt, synthetic construct
  source 1..21: mol_type = other RNA
agagcccacttacctgcgttt

SEQ ID NO: 5706 - RNA, 21 nt, synthetic construct
  source 1..21: mol_type = other RNA
agagctggaagcatctttgat

SEQ ID NO: 5707 - RNA, 21 nt, synthetic construct
  source 1..21: mol_type = other RNA
agagctgttgaacatgcccgg

SEQ ID NO: 5708 - RNA, 21 nt, synthetic construct
  source 1..21: mol_type = other RNA
agagctttctggatcctgaca

SEQ ID NO: 5709 - RNA, 21 nt, synthetic construct
  source 1..21: mol_type = other RNA
agaggaagagtgtgaaaagta

SEQ ID NO: 5710 - RNA, 21 nt, synthetic construct
  source 1..21: mol_type = other RNA
agaggacaacgatgaggtctg

SEQ ID NO: 5711 - RNA, 21 nt, synthetic construct
  source 1..21: mol_type = other RNA
agaggctggggctgctgggac

SEQ ID NO: 5712 - RNA, 21 nt, synthetic construct
  source 1..21: mol_type = other RNA
agagggtcttggcttggatac

SEQ ID NO: 5713 - RNA, 21 nt, synthetic construct
  source 1..21: mol_type = other RNA
agaggtggctcccatgaagtg

SEQ ID NO: 5714 - RNA, 21 nt, synthetic construct
  source 1..21: mol_type = other RNA
agagtctgtcaactcttattc

SEQ ID NO: 5715 - RNA, 21 nt, synthetic construct
  source 1..21: mol_type = other RNA
agagtgtgaaaagtatggccc

SEQ ID NO: 5716 - RNA, 21 nt, synthetic construct
  source 1..21: mol_type = other RNA
agagttgacagactctgtctg

SEQ ID NO: 5717 - RNA, 21 nt, synthetic construct
  source 1..21: mol_type = other RNA
agagtttggataaggactaac

SEQ ID NO: 5718 - RNA, 21 nt, synthetic construct
  source 1..21: mol_type = other RNA
agatacctgtttctgttctct

SEQ ID NO: 5719 - RNA, 21 nt, synthetic construct
  source 1..21: mol_type = other RNA
agatatatatgatatcacccc

SEQ ID NO: 5720 - RNA, 21 nt, synthetic construct
  source 1..21: mol_type = other RNA
agatatctatggaagcaccag

SEQ ID NO: 5721 - RNA, 21 nt, synthetic construct
  source 1..21: mol_type = other RNA
agatatctgaagtgtgtgaag

SEQ ID NO: 5722 - RNA, 21 nt, synthetic construct
  source 1..21: mol_type = other RNA
agatatggggagcagttgtcc

SEQ ID NO: 5723 - RNA, 21 nt, synthetic construct
  source 1..21: mol_type = other RNA
agatccatcggctgagactgg

SEQ ID NO: 5724 - RNA, 21 nt, synthetic construct
  source 1..21: mol_type = other RNA
agatcctggtggggtgattcc

SEQ ID NO: 5725 - RNA, 21 nt, synthetic construct
  source 1..21: mol_type = other RNA
agatgaggtggaatagaagtt

SEQ ID NO: 5726 - RNA, 21 nt, synthetic construct
  source 1..21: mol_type = other RNA
agatgcagggcatgaagagag

SEQ ID NO: 5727 - RNA, 21 nt, synthetic construct
  source 1..21: mol_type = other RNA
agatgcttccagctcttaacc

SEQ ID NO: 5728 - RNA, 21 nt, synthetic construct
  source 1..21: mol_type = other RNA
agatggatggccacttcatgg

SEQ ID NO: 5729 - RNA, 21 nt, synthetic construct
  source 1..21: mol_type = other RNA
agatggtttcagcagttgtac

SEQ ID NO: 5730 - RNA, 21 nt, synthetic construct
  source 1..21: mol_type = other RNA
agatgtaaaactctggctatt

SEQ ID NO: 5731 - RNA, 21 nt, synthetic construct
  source 1..21: mol_type = other RNA
agatgtagttactgtggagtc

SEQ ID NO: 5732 - RNA, 21 nt, synthetic construct
  source 1..21: mol_type = other RNA
agattaccacccaatctgagc

SEQ ID NO: 5733 - RNA, 21 nt, synthetic construct
  source 1..21: mol_type = other RNA
agattgggtggtaatctagag

SEQ ID NO: 5734 - RNA, 21 nt, synthetic construct
  source 1..21: mol_type = other RNA
agcaatccaaacatggactat

SEQ ID NO: 5735 - RNA, 21 nt, synthetic construct
  source 1..21: mol_type = other RNA
agcaccagccctatgaacttc

SEQ ID NO: 5736 - RNA, 21 nt, synthetic construct
  source 1..21: mol_type = other RNA
agcagaataagagttgacaga

SEQ ID NO: 5737 - RNA, 21 nt, synthetic construct
  source 1..21: mol_type = other RNA
agcagagaccccagcagcagc

SEQ ID NO: 5738 - RNA, 21 nt, synthetic construct
  source 1..21: mol_type = other RNA
agcagagctttctggatcctg

SEQ ID NO: 5739 - RNA, 21 nt, synthetic construct
  source 1..21: mol_type = other RNA
agcagcagagaccccagcagc

SEQ ID NO: 5740 - RNA, 21 nt, synthetic construct
  source 1..21: mol_type = other RNA
agcagcagcagagaccccagc

SEQ ID NO: 5741 - RNA, 21 nt, synthetic construct
  source 1..21: mol_type = other RNA
agcagcagcagccacatcacc

SEQ ID NO: 5742 - RNA, 21 nt, synthetic construct
  source 1..21: mol_type = other RNA
agcagcagccacatcaccctc

SEQ ID NO: 5743 - RNA, 21 nt, synthetic construct
  source 1..21: mol_type = other RNA
agcagccacatcaccctcaga

SEQ ID NO: 5744 - RNA, 21 nt, synthetic construct
  source 1..21: mol_type = other RNA
agcagccaccacagccccagc

SEQ ID NO: 5745 - RNA, 21 nt, synthetic construct
  source 1..21: mol_type = other RNA
agcagccattggcactagtcc

SEQ ID NO: 5746 - RNA, 21 nt, synthetic construct
  source 1..21: mol_type = other RNA
agcagccccagcctctacaga

SEQ ID NO: 5747 - RNA, 21 nt, synthetic construct
  source 1..21: mol_type = other RNA
agcaggctcccgtttcacttt

SEQ ID NO: 5748 - RNA, 21 nt, synthetic construct
  source 1..21: mol_type = other RNA
agcagtcccagcagccccagc

SEQ ID NO: 5749 - RNA, 21 nt, synthetic construct
  source 1..21: mol_type = other RNA
agcagttctatcatggttaag

SEQ ID NO: 5750 - RNA, 21 nt, synthetic construct
  source 1..21: mol_type = other RNA
agcagttgtaccattagacca

SEQ ID NO: 5751 - RNA, 21 nt, synthetic construct
  source 1..21: mol_type = other RNA
agcagttgtccactgataggt

SEQ ID NO: 5752 - RNA, 21 nt, synthetic construct
  source 1..21: mol_type = other RNA
agcataagagcatgaatgagc

SEQ ID NO: 5753 - RNA, 21 nt, synthetic construct
  source 1..21: mol_type = other RNA
agcatcacttaatttgtgtaa

SEQ ID NO: 5754 - RNA, 21 nt, synthetic construct
  source 1..21: mol_type = other RNA
agcatctttgataacccatta

SEQ ID NO: 5755 - RNA, 21 nt, synthetic construct
  source 1..21: mol_type = other RNA
agcatgaatgagccaaaacat

SEQ ID NO: 5756 - RNA, 21 nt, synthetic construct
  source 1..21: mol_type = other RNA
agcatgtcattctccttgttt

SEQ ID NO: 5757 - RNA, 21 nt, synthetic construct
  source 1..21: mol_type = other RNA
agccaaaacatggcttggctc

SEQ ID NO: 5758 - RNA, 21 nt, synthetic construct
  source 1..21: mol_type = other RNA
agccaaaatggctgaaaaagc

SEQ ID NO: 5759 - RNA, 21 nt, synthetic construct
  source 1..21: mol_type = other RNA
agccaagaccctctgtctaag

SEQ ID NO: 5760 - RNA, 21 nt, synthetic construct
  source 1..21: mol_type = other RNA
agccaagccatgttttggctc

SEQ ID NO: 5761 - RNA, 21 nt, synthetic construct
  source 1..21: mol_type = other RNA
agccaaggtttggaaatagcc

SEQ ID NO: 5762 - RNA, 21 nt, synthetic construct
  source 1..21: mol_type = other RNA
agccacaccctggactagtgc

SEQ ID NO: 5763 - RNA, 21 nt, synthetic construct
  source 1..21: mol_type = other RNA
agccacatcaccctcagacag

SEQ ID NO: 5764 - RNA, 21 nt, synthetic construct
  source 1..21: mol_type = other RNA
agccacatgaaacttcagagc

SEQ ID NO: 5765 - RNA, 21 nt, synthetic construct
  source 1..21: mol_type = other RNA
agccaccacagccccagcagc

SEQ ID NO: 5766 - RNA, 21 nt, synthetic construct
  source 1..21: mol_type = other RNA
agccacctctagattaccacc

SEQ ID NO: 5767 - RNA, 21 nt, synthetic construct
  source 1..21: mol_type = other RNA
agccacggccactcccccaat

SEQ ID NO: 5768 - RNA, 21 nt, synthetic construct
  source 1..21: mol_type = other RNA
agccagagttttacatctaaa

SEQ ID NO: 5769 - RNA, 21 nt, synthetic construct
  source 1..21: mol_type = other RNA
agccatgttttggctcattca

SEQ ID NO: 5770 - RNA, 21 nt, synthetic construct
  source 1..21: mol_type = other RNA
agccattggcactagtccagg

SEQ ID NO: 5771 - RNA, 21 nt, synthetic construct
  source 1..21: mol_type = other RNA
agccattttggcttcccaaag

SEQ ID NO: 5772 - RNA, 21 nt, synthetic construct
  source 1..21: mol_type = other RNA
agcccacttacctgcgtttca

SEQ ID NO: 5773 - RNA, 21 nt, synthetic construct
  source 1..21: mol_type = other RNA
agcccagggtaagggttcatg

SEQ ID NO: 5774 - RNA, 21 nt, synthetic construct
  source 1..21: mol_type = other RNA
agccccagcagcagcagagac

SEQ ID NO: 5775 - RNA, 21 nt, synthetic construct
  source 1..21: mol_type = other RNA
agccccagcctctacagaagc

SEQ ID NO: 5776 - RNA, 21 nt, synthetic construct
  source 1..21: mol_type = other RNA
agcccgtgagaaagaggaaga

SEQ ID NO: 5777 - RNA, 21 nt, synthetic construct
  source 1..21: mol_type = other RNA
agccctatgaacttctattcc

SEQ ID NO: 5778 - RNA, 21 nt, synthetic construct
  source 1..21: mol_type = other RNA
agccgatggatctgtataggt

SEQ ID NO: 5779 - RNA, 21 nt, synthetic construct
  source 1..21: mol_type = other RNA
agcctccttggacacaagcag

SEQ ID NO: 5780 - RNA, 21 nt, synthetic construct
  source 1..21: mol_type = other RNA
agcctctacagaagcagccac

SEQ ID NO: 5781 - RNA, 21 nt, synthetic construct
  source 1..21: mol_type = other RNA
agcctgctgagccacatgaaa

SEQ ID NO: 5782 - RNA, 21 nt, synthetic construct
  source 1..21: mol_type = other RNA
agcgagcagagctttctggat

SEQ ID NO: 5783 - RNA, 21 nt, synthetic construct
  source 1..21: mol_type = other RNA
agcgtgagctgcatgccacaa

SEQ ID NO: 5784 - RNA, 21 nt, synthetic construct
  source 1..21: mol_type = other RNA
agctaatgggttatcaaagat

SEQ ID NO: 5785 - RNA, 21 nt, synthetic construct
  source 1..21: mol_type = other RNA
agctcacgctttgcacactca

SEQ ID NO: 5786 - RNA, 21 nt, synthetic construct
  source 1..21: mol_type = other RNA
agctcagtctaccacccatcc

SEQ ID NO: 5787 - RNA, 21 nt, synthetic construct
  source 1..21: mol_type = other RNA
agctccgggcatgttcaacag

SEQ ID NO: 5788 - RNA, 21 nt, synthetic construct
  source 1..21: mol_type = other RNA
agctctcttcatgccctgcat

SEQ ID NO: 5789 - RNA, 21 nt, synthetic construct
  source 1..21: mol_type = other RNA
agctctgctcgctgtctgacc

SEQ ID NO: 5790 - RNA, 21 nt, synthetic construct
  source 1..21: mol_type = other RNA
agctcttaaccatgatagaac

SEQ ID NO: 5791 - RNA, 21 nt, synthetic construct
  source 1..21: mol_type = other RNA
agctgcactgtagttatggat

SEQ ID NO: 5792 - RNA, 21 nt, synthetic construct
  source 1..21: mol_type = other RNA
agctgcaggttcatatttgaa

SEQ ID NO: 5793 - RNA, 21 nt, synthetic construct
  source 1..21: mol_type = other RNA
agctgcatgccacaacccctt

SEQ ID NO: 5794 - RNA, 21 nt, synthetic construct
  source 1..21: mol_type = other RNA
agctggaagcatctttgataa

SEQ ID NO: 5795 - RNA, 21 nt, synthetic construct
  source 1..21: mol_type = other RNA
agctgtgtgggaaagcatgtc

SEQ ID NO: 5796 - RNA, 21 nt, synthetic construct
  source 1..21: mol_type = other RNA
agctgttgaacatgcccggag

SEQ ID NO: 5797 - RNA, 21 nt, synthetic construct
  source 1..21: mol_type = other RNA
agcttagacagagggtcttgg

SEQ ID NO: 5798 - RNA, 21 nt, synthetic construct
  source 1..21: mol_type = other RNA
agcttgagatgaggtggaata

SEQ ID NO: 5799 - RNA, 21 nt, synthetic construct
  source 1..21: mol_type = other RNA
agctttctggatcctgacatt

SEQ ID NO: 5800 - RNA, 21 nt, synthetic construct
  source 1..21: mol_type = other RNA
aggaaaagcagccattggcac

SEQ ID NO: 5801 - RNA, 21 nt, synthetic construct
  source 1..21: mol_type = other RNA
aggaacccagatatggggagc

SEQ ID NO: 5802 - RNA, 21 nt, synthetic construct
  source 1..21: mol_type = other RNA
aggaagagtgtgaaaagtatg

SEQ ID NO: 5803 - RNA, 21 nt, synthetic construct
  source 1..21: mol_type = other RNA
aggaatcaccccaccaggatc

SEQ ID NO: 5804 - RNA, 21 nt, synthetic construct
  source 1..21: mol_type = other RNA
aggacaacgatgaggtctggt

SEQ ID NO: 5805 - RNA, 21 nt, synthetic construct
  source 1..21: mol_type = other RNA
aggaccagtcatgcagcagtc

SEQ ID NO: 5806 - RNA, 21 nt, synthetic construct
  source 1..21: mol_type = other RNA
aggaccatgtccgtgaccaca

SEQ ID NO: 5807 - RNA, 21 nt, synthetic construct
  source 1..21: mol_type = other RNA
aggactaactggattgggccg

SEQ ID NO: 5808 - RNA, 21 nt, synthetic construct
  source 1..21: mol_type = other RNA
aggagaatgacatgctttccc

SEQ ID NO: 5809 - RNA, 21 nt, synthetic construct
  source 1..21: mol_type = other RNA
aggaggcaatttccctacatg

SEQ ID NO: 5810 - RNA, 21 nt, synthetic construct
  source 1..21: mol_type = other RNA
aggaggcttacacaaattaag

SEQ ID NO: 5811 - RNA, 21 nt, synthetic construct
  source 1..21: mol_type = other RNA
aggatccagaaagctctgctc

SEQ ID NO: 5812 - RNA, 21 nt, synthetic construct
  source 1..21: mol_type = other RNA
aggatctccctcgtcttttac

SEQ ID NO: 5813 - RNA, 21 nt, synthetic construct
  source 1..21: mol_type = other RNA
aggcaatttccctacatgatg

SEQ ID NO: 5814 - RNA, 21 nt, synthetic construct
  source 1..21: mol_type = other RNA
aggcacatagtctgggccata

SEQ ID NO: 5815 - RNA, 21 nt, synthetic construct
  source 1..21: mol_type = other RNA
aggcatatggagatgtagtta

SEQ ID NO: 5816 - RNA, 21 nt, synthetic construct
  source 1..21: mol_type = other RNA
aggccctgtgacccgagtgaa

SEQ ID NO: 5817 - RNA, 21 nt, synthetic construct
  source 1..21: mol_type = other RNA
aggctcccgtttcactttttt

SEQ ID NO: 5818 - RNA, 21 nt, synthetic construct
  source 1..21: mol_type = other RNA
aggctggggctgctgggactg

SEQ ID NO: 5819 - RNA, 21 nt, synthetic construct
  source 1..21: mol_type = other RNA
aggcttacacaaattaagtga

SEQ ID NO: 5820 - RNA, 21 nt, synthetic construct
  source 1..21: mol_type = other RNA
agggaaattgcctccttatcc

SEQ ID NO: 5821 - RNA, 21 nt, synthetic construct
  source 1..21: mol_type = other RNA
agggagatcctggtggggtga

SEQ ID NO: 5822 - RNA, 21 nt, synthetic construct
  source 1..21: mol_type = other RNA
agggagatggtttcagcagtt

SEQ ID NO: 5823 - RNA, 21 nt, synthetic construct
  source 1..21: mol_type = other RNA
agggcatgaagagagctgttg

SEQ ID NO: 5824 - RNA, 21 nt, synthetic construct
  source 1..21: mol_type = other RNA
agggccttacaacagatatat

SEQ ID NO: 5825 - RNA, 21 nt, synthetic construct
  source 1..21: mol_type = other RNA
agggctggtgcttccatagat

SEQ ID NO: 5826 - RNA, 21 nt, synthetic construct
  source 1..21: mol_type = other RNA
agggggtgatatcatatatat

SEQ ID NO: 5827 - RNA, 21 nt, synthetic construct
  source 1..21: mol_type = other RNA
aggggttgtggcatgcagctc

SEQ ID NO: 5828 - RNA, 21 nt, synthetic construct
  source 1..21: mol_type = other RNA
agggtaagagagaacagaaac

SEQ ID NO: 5829 - RNA, 21 nt, synthetic construct
  source 1..21: mol_type = other RNA
agggtaagggttcatgggatt

SEQ ID NO: 5830 - RNA, 21 nt, synthetic construct
  source 1..21: mol_type = other RNA
agggtcttggcttggatacct

SEQ ID NO: 5831 - RNA, 21 nt, synthetic construct
  source 1..21: mol_type = other RNA
agggtgatgtggctgctgctg

SEQ ID NO: 5832 - RNA, 21 nt, synthetic construct
  source 1..21: mol_type = other RNA
agggtgtggcttctggtgcag

SEQ ID NO: 5833 - RNA, 21 nt, synthetic construct
  source 1..21: mol_type = other RNA
agggttcatgggattagaaga

SEQ ID NO: 5834 - RNA, 21 nt, synthetic construct
  source 1..21: mol_type = other RNA
aggtaaccaacaaaagggggt

SEQ ID NO: 5835 - RNA, 21 nt, synthetic construct
  source 1..21: mol_type = other RNA
aggtaagtgggctctgaagtt

SEQ ID NO: 5836 - RNA, 21 nt, synthetic construct
  source 1..21: mol_type = other RNA
aggtatccaagccaagaccct

SEQ ID NO: 5837 - RNA, 21 nt, synthetic construct
  source 1..21: mol_type = other RNA
aggtctggtcagacagcgagc

SEQ ID NO: 5838 - RNA, 21 nt, synthetic construct
  source 1..21: mol_type = other RNA
aggtgaatgatgttcaccatt

SEQ ID NO: 5839 - RNA, 21 nt, synthetic construct
  source 1..21: mol_type = other RNA
aggtggaatagaagttcatag

SEQ ID NO: 5840 - RNA, 21 nt, synthetic construct
  source 1..21: mol_type = other RNA
aggtggctcccatgaagtggc

SEQ ID NO: 5841 - RNA, 21 nt, synthetic construct
  source 1..21: mol_type = other RNA
aggttatggaaaccaaaatat

SEQ ID NO: 5842 - RNA, 21 nt, synthetic construct
  source 1..21: mol_type = other RNA
aggttcatatttgaattcttc

SEQ ID NO: 5843 - RNA, 21 nt, synthetic construct
  source 1..21: mol_type = other RNA
aggtttccattgcattgatat

SEQ ID NO: 5844 - RNA, 21 nt, synthetic construct
  source 1..21: mol_type = other RNA
aggtttggaaatagccagagt

SEQ ID NO: 5845 - RNA, 21 nt, synthetic construct
  source 1..21: mol_type = other RNA
agtaactacatctccatatgc

SEQ ID NO: 5846 - RNA, 21 nt, synthetic construct
  source 1..21: mol_type = other RNA
agtatggcccagactatgtgc

SEQ ID NO: 5847 - RNA, 21 nt, synthetic construct
  source 1..21: mol_type = other RNA
agtcatgcagcagtcccagca

SEQ ID NO: 5848 - RNA, 21 nt, synthetic construct
  source 1..21: mol_type = other RNA
agtccagggtgtggcttctgg

SEQ ID NO: 5849 - RNA, 21 nt, synthetic construct
  source 1..21: mol_type = other RNA
agtccatgtttggattgctca

SEQ ID NO: 5850 - RNA, 21 nt, synthetic construct
  source 1..21: mol_type = other RNA
agtcccagcagccccagcctc

SEQ ID NO: 5851 - RNA, 21 nt, synthetic construct
  source 1..21: mol_type = other RNA
agtccttatccaaactcttca

SEQ ID NO: 5852 - RNA, 21 nt, synthetic construct
  source 1..21: mol_type = other RNA
agtcgcaaaagttctgtggac

SEQ ID NO: 5853 - RNA, 21 nt, synthetic construct
  source 1..21: mol_type = other RNA
agtctaccacccatccataca

SEQ ID NO: 5854 - RNA, 21 nt, synthetic construct
  source 1..21: mol_type = other RNA
agtctcagccgatggatctgt

SEQ ID NO: 5855 - RNA, 21 nt, synthetic construct
  source 1..21: mol_type = other RNA
agtctcttgccgaaaggacca

SEQ ID NO: 5856 - RNA, 21 nt, synthetic construct
  source 1..21: mol_type = other RNA
agtctgggccatacttttcac

SEQ ID NO: 5857 - RNA, 21 nt, synthetic construct
  source 1..21: mol_type = other RNA
agtctgtcaactcttattctg

SEQ ID NO: 5858 - RNA, 21 nt, synthetic construct
  source 1..21: mol_type = other RNA
agtctgtggtcacggacatgg

SEQ ID NO: 5859 - RNA, 21 nt, synthetic construct
  source 1..21: mol_type = other RNA
agtgaaacgggagcctgctga

SEQ ID NO: 5860 - RNA, 21 nt, synthetic construct
  source 1..21: mol_type = other RNA
agtgaaggcatatggagatgt

SEQ ID NO: 5861 - RNA, 21 nt, synthetic construct
  source 1..21: mol_type = other RNA
agtgaggtaaccaacaaaagg

SEQ ID NO: 5862 - RNA, 21 nt, synthetic construct
  source 1..21: mol_type = other RNA
agtgatgctaatggtcaggaa

SEQ ID NO: 5863 - RNA, 21 nt, synthetic construct
  source 1..21: mol_type = other RNA
agtgcagctccgggcatgttc

SEQ ID NO: 5864 - RNA, 21 nt, synthetic construct
  source 1..21: mol_type = other RNA
agtgccaatggctgcttttcc

SEQ ID NO: 5865 - RNA, 21 nt, synthetic construct
  source 1..21: mol_type = other RNA
agtggacaactgctccccata

SEQ ID NO: 5866 - RNA, 21 nt, synthetic construct
  source 1..21: mol_type = other RNA
agtggccatccatctcatgag

SEQ ID NO: 5867 - RNA, 21 nt, synthetic construct
  source 1..21: mol_type = other RNA
agtggccgtggctccaactca

SEQ ID NO: 5868 - RNA, 21 nt, synthetic construct
  source 1..21: mol_type = other RNA
agtgggataaggaggcaattt

SEQ ID NO: 5869 - RNA, 21 nt, synthetic construct
  source 1..21: mol_type = other RNA
agtgggctctgaagtttcatg

SEQ ID NO: 5870 - RNA, 21 nt, synthetic construct
  source 1..21: mol_type = other RNA
agtgtatggatgggtggtaga

SEQ ID NO: 5871 - RNA, 21 nt, synthetic construct
  source 1..21: mol_type = other RNA
agtgtgaaaagtatggcccag

SEQ ID NO: 5872 - RNA, 21 nt, synthetic construct
  source 1..21: mol_type = other RNA
agtgtgcaaagcgtgagctgc

SEQ ID NO: 5873 - RNA, 21 nt, synthetic construct
  source 1..21: mol_type = other RNA
agtgtgtgaagagtttggata

SEQ ID NO: 5874 - RNA, 21 nt, synthetic construct
  source 1..21: mol_type = other RNA
agttactgtggagtctgtggt

SEQ ID NO: 5875 - RNA, 21 nt, synthetic construct
  source 1..21: mol_type = other RNA
agttagtccttatccaaactc

SEQ ID NO: 5876 - RNA, 21 nt, synthetic construct
  source 1..21: mol_type = other RNA
agttatggattatgtgagaag

SEQ ID NO: 5877 - RNA, 21 nt, synthetic construct
  source 1..21: mol_type = other RNA
agttcatagggctggtgcttc

SEQ ID NO: 5878 - RNA, 21 nt, synthetic construct
  source 1..21: mol_type = other RNA
agttctatcatggttaagagc

SEQ ID NO: 5879 - RNA, 21 nt, synthetic construct
  source 1..21: mol_type = other RNA
agttctgtggacagggtaaga

SEQ ID NO: 5880 - RNA, 21 nt, synthetic construct
  source 1..21: mol_type = other RNA
agttgacagactctgtctgag

SEQ ID NO: 5881 - RNA, 21 nt, synthetic construct
  source 1..21: mol_type = other RNA
agttggagccacggccactcc

SEQ ID NO: 5882 - RNA, 21 nt, synthetic construct
  source 1..21: mol_type = other RNA
agttgtaccattagaccaaat

SEQ ID NO: 5883 - RNA, 21 nt, synthetic construct
  source 1..21: mol_type = other RNA
agttgtccactgataggtttc

SEQ ID NO: 5884 - RNA, 21 nt, synthetic construct
  source 1..21: mol_type = other RNA
agtttcatgtggctcagcagg

SEQ ID NO: 5885 - RNA, 21 nt, synthetic construct
  source 1..21: mol_type = other RNA
agtttggataaggactaactg

SEQ ID NO: 5886 - RNA, 21 nt, synthetic construct
  source 1..21: mol_type = other RNA
ataacccattagctgtgtggg

SEQ ID NO: 5887 - RNA, 21 nt, synthetic construct
  source 1..21: mol_type = other RNA
ataactacagtgcagctccgg

SEQ ID NO: 5888 - RNA, 21 nt, synthetic construct
  source 1..21: mol_type = other RNA
ataagagcatgaatgagccaa

SEQ ID NO: 5889 - RNA, 21 nt, synthetic construct
  source 1..21: mol_type = other RNA
ataagagttgacagactctgt

SEQ ID NO: 5890 - RNA, 21 nt, synthetic construct
  source 1..21: mol_type = other RNA
ataaggactaactggattggg

SEQ ID NO: 5891 - RNA, 21 nt, synthetic construct
  source 1..21: mol_type = other RNA
ataaggaggcaatttccctac

SEQ ID NO: 5892 - RNA, 21 nt, synthetic construct
  source 1..21: mol_type = other RNA
ataatccataactacagtgca

SEQ ID NO: 5893 - RNA, 21 nt, synthetic construct
  source 1..21: mol_type = other RNA
atacactttaccagccaaggt

SEQ ID NO: 5894 - RNA, 21 nt, synthetic construct
  source 1..21: mol_type = other RNA
atacagatccatcggctgaga

SEQ ID NO: 5895 - RNA, 21 nt, synthetic construct
  source 1..21: mol_type = other RNA
atacatgagacggcccaatcc

SEQ ID NO: 5896 - RNA, 21 nt, synthetic construct
  source 1..21: mol_type = other RNA
atacccaatatccatcatatc

SEQ ID NO: 5897 - RNA, 21 nt, synthetic construct
  source 1..21: mol_type = other RNA
atacctatacagatccatcgg

SEQ ID NO: 5898 - RNA, 21 nt, synthetic construct
  source 1..21: mol_type = other RNA
atacctgtttctgttctctct

SEQ ID NO: 5899 - RNA, 21 nt, synthetic construct
  source 1..21: mol_type = other RNA
atacttaggttatggaaacca

SEQ ID NO: 5900 - RNA, 21 nt, synthetic construct
  source 1..21: mol_type = other RNA
atacttttcacactcttcctc

SEQ ID NO: 5901 - RNA, 21 nt, synthetic construct
  source 1..21: mol_type = other RNA
atagaactgcttgtgtccaag

SEQ ID NO: 5902 - RNA, 21 nt, synthetic construct
  source 1..21: mol_type = other RNA
atagaagttcatagggctggt

SEQ ID NO: 5903 - RNA, 21 nt, synthetic construct
  source 1..21: mol_type = other RNA
atagatatctgaagtgtgtga

SEQ ID NO: 5904 - RNA, 21 nt, synthetic construct
  source 1..21: mol_type = other RNA
atagccagagttttacatcta

SEQ ID NO: 5905 - RNA, 21 nt, synthetic construct
  source 1..21: mol_type = other RNA
ataggaacccagatatgggga

SEQ ID NO: 5906 - RNA, 21 nt, synthetic construct
  source 1..21: mol_type = other RNA
ataggaatcaccccaccagga

SEQ ID NO: 5907 - RNA, 21 nt, synthetic construct
  source 1..21: mol_type = other RNA
atagggctggtgcttccatag

SEQ ID NO: 5908 - RNA, 21 nt, synthetic construct
  source 1..21: mol_type = other RNA
ataggtatccaagccaagacc

SEQ ID NO: 5909 - RNA, 21 nt, synthetic construct
  source 1..21: mol_type = other RNA
ataggtttccattgcattgat

SEQ ID NO: 5910 - RNA, 21 nt, synthetic construct
  source 1..21: mol_type = other RNA
atagtccatgtttggattgct

SEQ ID NO: 5911 - RNA, 21 nt, synthetic construct
  source 1..21: mol_type = other RNA
atagtctgggccatacttttc

SEQ ID NO: 5912 - RNA, 21 nt, synthetic construct
  source 1..21: mol_type = other RNA
atatatatctgttgtaaggcc

SEQ ID NO: 5913 - RNA, 21 nt, synthetic construct
  source 1..21: mol_type = other RNA
atatatatgatatcaccccct

SEQ ID NO: 5914 - RNA, 21 nt, synthetic construct
  source 1..21: mol_type = other RNA
atatatctgttgtaaggccct

SEQ ID NO: 5915 - RNA, 21 nt, synthetic construct
  source 1..21: mol_type = other RNA
atatatgatatcacccccttt

SEQ ID NO: 5916 - RNA, 21 nt, synthetic construct
  source 1..21: mol_type = other RNA
atatcaatgcaatggaaacct

SEQ ID NO: 5917 - RNA, 21 nt, synthetic construct
  source 1..21: mol_type = other RNA
atatcacccccttttgttggt

SEQ ID NO: 5918 - RNA, 21 nt, synthetic construct
  source 1..21: mol_type = other RNA
atatccatcatatcaatgcaa

SEQ ID NO: 5919 - RNA, 21 nt, synthetic construct
  source 1..21: mol_type = other RNA
atatctatggaagcaccagcc

SEQ ID NO: 5920 - RNA, 21 nt, synthetic construct
  source 1..21: mol_type = other RNA
atatctgaagtgtgtgaagag

SEQ ID NO: 5921 - RNA, 21 nt, synthetic construct
  source 1..21: mol_type = other RNA
atatctgggttcctattctcc

SEQ ID NO: 5922 - RNA, 21 nt, synthetic construct
  source 1..21: mol_type = other RNA
atatctgttgtaaggccctgt

SEQ ID NO: 5923 - RNA, 21 nt, synthetic construct
  source 1..21: mol_type = other RNA
atatgaacctgcagcttgaga

SEQ ID NO: 5924 - RNA, 21 nt, synthetic construct
  source 1..21: mol_type = other RNA
atatgatatcacccccttttg

SEQ ID NO: 5925 - RNA, 21 nt, synthetic construct
  source 1..21: mol_type = other RNA
atatgatggatattgggtatt

SEQ ID NO: 5926 - RNA, 21 nt, synthetic construct
  source 1..21: mol_type = other RNA
atatgcagggagatggtttca

SEQ ID NO: 5927 - RNA, 21 nt, synthetic construct
  source 1..21: mol_type = other RNA
atatgccttcactcgggtcac

SEQ ID NO: 5928 - RNA, 21 nt, synthetic construct
  source 1..21: mol_type = other RNA
atatggagatgtagttactgt

SEQ ID NO: 5929 - RNA, 21 nt, synthetic construct
  source 1..21: mol_type = other RNA
atatggggagcagttgtccac

SEQ ID NO: 5930 - RNA, 21 nt, synthetic construct
  source 1..21: mol_type = other RNA
atattgggtattctgattcaa

SEQ ID NO: 5931 - RNA, 21 nt, synthetic construct
  source 1..21: mol_type = other RNA
atattttggtttccataacct

SEQ ID NO: 5932 - RNA, 21 nt, synthetic construct
  source 1..21: mol_type = other RNA
atcaaagatgcttccagctct

SEQ ID NO: 5933 - RNA, 21 nt, synthetic construct
  source 1..21: mol_type = other RNA
atcaagtctcttgccgaaagg

SEQ ID NO: 5934 - RNA, 21 nt, synthetic construct
  source 1..21: mol_type = other RNA
atcaatgcaatggaaacctat

SEQ ID NO: 5935 - RNA, 21 nt, synthetic construct
  source 1..21: mol_type = other RNA
atcaccccaccaggatctccc

SEQ ID NO: 5936 - RNA, 21 nt, synthetic construct
  source 1..21: mol_type = other RNA
atcacccccttttgttggtta

SEQ ID NO: 5937 - RNA, 21 nt, synthetic construct
  source 1..21: mol_type = other RNA
atcaccctcagacagagtctg

SEQ ID NO: 5938 - RNA, 21 nt, synthetic construct
  source 1..21: mol_type = other RNA
atcacttaatttgtgtaagcc

SEQ ID NO: 5939 - RNA, 21 nt, synthetic construct
  source 1..21: mol_type = other RNA
atcagaatacccaatatccat

SEQ ID NO: 5940 - RNA, 21 nt, synthetic construct
  source 1..21: mol_type = other RNA
atcagtggacaactgctcccc

SEQ ID NO: 5941 - RNA, 21 nt, synthetic construct
  source 1..21: mol_type = other RNA
atcatatcaatgcaatggaaa

SEQ ID NO: 5942 - RNA, 21 nt, synthetic construct
  source 1..21: mol_type = other RNA
atcatggttaagagctggaag

SEQ ID NO: 5943 - RNA, 21 nt, synthetic construct
  source 1..21: mol_type = other RNA
atcatgtagggaaattgcctc

SEQ ID NO: 5944 - RNA, 21 nt, synthetic construct
  source 1..21: mol_type = other RNA
atcattcaccttctcacataa

SEQ ID NO: 5945 - RNA, 21 nt, synthetic construct
  source 1..21: mol_type = other RNA
atccaaacatggactataaaa

SEQ ID NO: 5946 - RNA, 21 nt, synthetic construct
  source 1..21: mol_type = other RNA
atccaaactcttcacacactt

SEQ ID NO: 5947 - RNA, 21 nt, synthetic construct
  source 1..21: mol_type = other RNA
atccaagccaagaccctctgt

SEQ ID NO: 5948 - RNA, 21 nt, synthetic construct
  source 1..21: mol_type = other RNA
atccaccaatccatacatgag

SEQ ID NO: 5949 - RNA, 21 nt, synthetic construct
  source 1..21: mol_type = other RNA
atccagaaagctctgctcgct

SEQ ID NO: 5950 - RNA, 21 nt, synthetic construct
  source 1..21: mol_type = other RNA
atccagaagcagaataagagt

SEQ ID NO: 5951 - RNA, 21 nt, synthetic construct
  source 1..21: mol_type = other RNA
atccagttagtccttatccaa

SEQ ID NO: 5952 - RNA, 21 nt, synthetic construct
  source 1..21: mol_type = other RNA
atccataactacagtgcagct

SEQ ID NO: 5953 - RNA, 21 nt, synthetic construct
  source 1..21: mol_type = other RNA
atccatacactttaccagcca

SEQ ID NO: 5954 - RNA, 21 nt, synthetic construct
  source 1..21: mol_type = other RNA
atccatacatgagacggccca

SEQ ID NO: 5955 - RNA, 21 nt, synthetic construct
  source 1..21: mol_type = other RNA
atccatcatatcaatgcaatg

SEQ ID NO: 5956 - RNA, 21 nt, synthetic construct
  source 1..21: mol_type = other RNA
atccatcggctgagactgggg

SEQ ID NO: 5957 - RNA, 21 nt, synthetic construct
  source 1..21: mol_type = other RNA
atccatctcatgagtgggata

SEQ ID NO: 5958 - RNA, 21 nt, synthetic construct
  source 1..21: mol_type = other RNA
atcccaataggaatcacccca

SEQ ID NO: 5959 - RNA, 21 nt, synthetic construct
  source 1..21: mol_type = other RNA
atcccactcatgagatggatg

SEQ ID NO: 5960 - RNA, 21 nt, synthetic construct
  source 1..21: mol_type = other RNA
atcccatgaacccttaccctg

SEQ ID NO: 5961 - RNA, 21 nt, synthetic construct
  source 1..21: mol_type = other RNA
atcccatggcaaaaaagtgaa

SEQ ID NO: 5962 - RNA, 21 nt, synthetic construct
  source 1..21: mol_type = other RNA
atcctgacattgggggagtgg

SEQ ID NO: 5963 - RNA, 21 nt, synthetic construct
  source 1..21: mol_type = other RNA
atcctggtggggtgattccta

SEQ ID NO: 5964 - RNA, 21 nt, synthetic construct
  source 1..21: mol_type = other RNA
atcggctgagactggggagaa

SEQ ID NO: 5965 - RNA, 21 nt, synthetic construct
  source 1..21: mol_type = other RNA
atcgttgtcctctgcaccaga

SEQ ID NO: 5966 - RNA, 21 nt, synthetic construct
  source 1..21: mol_type = other RNA
atctaaatacttaggttatgg

SEQ ID NO: 5967 - RNA, 21 nt, synthetic construct
  source 1..21: mol_type = other RNA
atctagaggtggctcccatga

SEQ ID NO: 5968 - RNA, 21 nt, synthetic construct
  source 1..21: mol_type = other RNA
atctatggaagcaccagccct

SEQ ID NO: 5969 - RNA, 21 nt, synthetic construct
  source 1..21: mol_type = other RNA
atctcaagctgcaggttcata

SEQ ID NO: 5970 - RNA, 21 nt, synthetic construct
  source 1..21: mol_type = other RNA
atctcatgagtgggataagga

SEQ ID NO: 5971 - RNA, 21 nt, synthetic construct
  source 1..21: mol_type = other RNA
atctccaaaacaaggagaatg

SEQ ID NO: 5972 - RNA, 21 nt, synthetic construct
  source 1..21: mol_type = other RNA
atctccatatgccttcactcg

SEQ ID NO: 5973 - RNA, 21 nt, synthetic construct
  source 1..21: mol_type = other RNA
atctccctcgtcttttaccag

SEQ ID NO: 5974 - RNA, 21 nt, synthetic construct
  source 1..21: mol_type = other RNA
atctccctgcatattttggtt

SEQ ID NO: 5975 - RNA, 21 nt, synthetic construct
  source 1..21: mol_type = other RNA
atctgaagtgtgtgaagagtt

SEQ ID NO: 5976 - RNA, 21 nt, synthetic construct
  source 1..21: mol_type = other RNA
atctgagcaatccaaacatgg

SEQ ID NO: 5977 - RNA, 21 nt, synthetic construct
  source 1..21: mol_type = other RNA
atctgggttcctattctcccc

SEQ ID NO: 5978 - RNA, 21 nt, synthetic construct
  source 1..21: mol_type = other RNA
atctgtataggtatccaagcc

SEQ ID NO: 5979 - RNA, 21 nt, synthetic construct
  source 1..21: mol_type = other RNA
atctgttgtaaggccctgtga

SEQ ID NO: 5980 - RNA, 21 nt, synthetic construct
  source 1..21: mol_type = other RNA
atctttgataacccattagct

SEQ ID NO: 5981 - RNA, 21 nt, synthetic construct
  source 1..21: mol_type = other RNA
atgaaacgcaggtaagtgggc

SEQ ID NO: 5982 - RNA, 21 nt, synthetic construct
  source 1..21: mol_type = other RNA
atgaaacttcagagcccactt

SEQ ID NO: 5983 - RNA, 21 nt, synthetic construct
  source 1..21: mol_type = other RNA
atgaacccttaccctgggctt

SEQ ID NO: 5984 - RNA, 21 nt, synthetic construct
  source 1..21: mol_type = other RNA
atgaacctgcagcttgagatg

SEQ ID NO: 5985 - RNA, 21 nt, synthetic construct
  source 1..21: mol_type = other RNA
atgaacttctattccacctca

SEQ ID NO: 5986 - RNA, 21 nt, synthetic construct
  source 1..21: mol_type = other RNA
atgaagagagctgttgaacat

SEQ ID NO: 5987 - RNA, 21 nt, synthetic construct
  source 1..21: mol_type = other RNA
atgaagtggccatccatctca

SEQ ID NO: 5988 - RNA, 21 nt, synthetic construct
  source 1..21: mol_type = other RNA
atgaatgagccaaaacatggc

SEQ ID NO: 5989 - RNA, 21 nt, synthetic construct
  source 1..21: mol_type = other RNA
atgacatgctttcccacacag

SEQ ID NO: 5990 - RNA, 21 nt, synthetic construct
  source 1..21: mol_type = other RNA
atgactggtcctgaaagtcgc

SEQ ID NO: 5991 - RNA, 21 nt, synthetic construct
  source 1..21: mol_type = other RNA
atgagaattgacccatgagtt

SEQ ID NO: 5992 - RNA, 21 nt, synthetic construct
  source 1..21: mol_type = other RNA
atgagacggcccaatccagtt

SEQ ID NO: 5993 - RNA, 21 nt, synthetic construct
  source 1..21: mol_type = other RNA
atgagatggatggccacttca

SEQ ID NO: 5994 - RNA, 21 nt, synthetic construct
  source 1..21: mol_type = other RNA
atgagccaaaacatggcttgg

SEQ ID NO: 5995 - RNA, 21 nt, synthetic construct
  source 1..21: mol_type = other RNA
atgaggtctggtcagacagcg

SEQ ID NO: 5996 - RNA, 21 nt, synthetic construct
  source 1..21: mol_type = other RNA
atgaggtggaatagaagttca

SEQ ID NO: 5997 - RNA, 21 nt, synthetic construct
  source 1..21: mol_type = other RNA
atgagtgggataaggaggcaa

SEQ ID NO: 5998 - RNA, 21 nt, synthetic construct
  source 1..21: mol_type = other RNA
atgagttggagccacggccac

SEQ ID NO: 5999 - RNA, 21 nt, synthetic construct
  source 1..21: mol_type = other RNA
atgatagaactgcttgtgtcc

SEQ ID NO: 6000 - RNA, 21 nt, synthetic construct
  source 1..21: mol_type = other RNA
atgatatcacccccttttgtt

SEQ ID NO: 6001 - RNA, 21 nt, synthetic construct
  source 1..21: mol_type = other RNA
atgatggatattgggtattct

SEQ ID NO: 6002 - RNA, 21 nt, synthetic construct
  source 1..21: mol_type = other RNA
atgatgtacatttggtctaat

SEQ ID NO: 6003 - RNA, 21 nt, synthetic construct
  source 1..21: mol_type = other RNA
atgcaatggaaacctatcagt

SEQ ID NO: 6004 - RNA, 21 nt, synthetic construct
  source 1..21: mol_type = other RNA
atgcagcagtcccagcagccc

SEQ ID NO: 6005 - RNA, 21 nt, synthetic construct
  source 1..21: mol_type = other RNA
atgcagctcacgctttgcaca

SEQ ID NO: 6006 - RNA, 21 nt, synthetic construct
  source 1..21: mol_type = other RNA
atgcagggagatggtttcagc

SEQ ID NO: 6007 - RNA, 21 nt, synthetic construct
  source 1..21: mol_type = other RNA
atgcagggcatgaagagagct

SEQ ID NO: 6008 - RNA, 21 nt, synthetic construct
  source 1..21: mol_type = other RNA
atgccacaacccctttaaaga

SEQ ID NO: 6009 - RNA, 21 nt, synthetic construct
  source 1..21: mol_type = other RNA
atgcccggagctgcactgtag

SEQ ID NO: 6010 - RNA, 21 nt, synthetic construct
  source 1..21: mol_type = other RNA
atgccctgcatctccaaaaca

SEQ ID NO: 6011 - RNA, 21 nt, synthetic construct
  source 1..21: mol_type = other RNA
atgccttcactcgggtcacag

SEQ ID NO: 6012 - RNA, 21 nt, synthetic construct
  source 1..21: mol_type = other RNA
atgctaatggtcaggaaaagc

SEQ ID NO: 6013 - RNA, 21 nt, synthetic construct
  source 1..21: mol_type = other RNA
atgctcttatgctggtaaaag

SEQ ID NO: 6014 - RNA, 21 nt, synthetic construct
  source 1..21: mol_type = other RNA
atgctggtaaaagacgaggga

SEQ ID NO: 6015 - RNA, 21 nt, synthetic construct
  source 1..21: mol_type = other RNA
atgcttccagctcttaaccat

SEQ ID NO: 6016 - RNA, 21 nt, synthetic construct
  source 1..21: mol_type = other RNA
atgctttcccacacagctaat

SEQ ID NO: 6017 - RNA, 21 nt, synthetic construct
  source 1..21: mol_type = other RNA
atggaaaccaaaatatgcagg

SEQ ID NO: 6018 - RNA, 21 nt, synthetic construct
  source 1..21: mol_type = other RNA
atggaaacctatcagtggaca

SEQ ID NO: 6019 - RNA, 21 nt, synthetic construct
  source 1..21: mol_type = other RNA
atggaagcaccagccctatga

SEQ ID NO: 6020 - RNA, 21 nt, synthetic construct
  source 1..21: mol_type = other RNA
atggactataaaaatggtgaa

SEQ ID NO: 6021 - RNA, 21 nt, synthetic construct
  source 1..21: mol_type = other RNA
atggagatgtagttactgtgg

SEQ ID NO: 6022 - RNA, 21 nt, synthetic construct
  source 1..21: mol_type = other RNA
atggatattgggtattctgat

SEQ ID NO: 6023 - RNA, 21 nt, synthetic construct
  source 1..21: mol_type = other RNA
atggatctgtataggtatcca

SEQ ID NO: 6024 - RNA, 21 nt, synthetic construct
  source 1..21: mol_type = other RNA
atggatggccacttcatggga

SEQ ID NO: 6025 - RNA, 21 nt, synthetic construct
  source 1..21: mol_type = other RNA
atggatgggtggtagactgag

SEQ ID NO: 6026 - RNA, 21 nt, synthetic construct
  source 1..21: mol_type = other RNA
atggattatgtgagaaggtga

SEQ ID NO: 6027 - RNA, 21 nt, synthetic construct
  source 1..21: mol_type = other RNA
atggattggtggatccagaag

SEQ ID NO: 6028 - RNA, 21 nt, synthetic construct
  source 1..21: mol_type = other RNA
atggcaaaaaagtgaaacggg

SEQ ID NO: 6029 - RNA, 21 nt, synthetic construct
  source 1..21: mol_type = other RNA
atggccacttcatgggagcca

SEQ ID NO: 6030 - RNA, 21 nt, synthetic construct
  source 1..21: mol_type = other RNA
atggcccagactatgtgcctc

SEQ ID NO: 6031 - RNA, 21 nt, synthetic construct
  source 1..21: mol_type = other RNA
atggctgaaaaagcccgtgag

SEQ ID NO: 6032 - RNA, 21 nt, synthetic construct
  source 1..21: mol_type = other RNA
atggctgcttttcctgaccat

SEQ ID NO: 6033 - RNA, 21 nt, synthetic construct
  source 1..21: mol_type = other RNA
atggcttggctctttgggaag

SEQ ID NO: 6034 - RNA, 21 nt, synthetic construct
  source 1..21: mol_type = other RNA
atgggagccacctctagatta

SEQ ID NO: 6035 - RNA, 21 nt, synthetic construct
  source 1..21: mol_type = other RNA
atgggattagaagaattcaaa

SEQ ID NO: 6036 - RNA, 21 nt, synthetic construct
  source 1..21: mol_type = other RNA
atgggatttctgaggcacata

SEQ ID NO: 6037 - RNA, 21 nt, synthetic construct
  source 1..21: mol_type = other RNA
atggggagcagttgtccactg

SEQ ID NO: 6038 - RNA, 21 nt, synthetic construct
  source 1..21: mol_type = other RNA
atgggtcaattctcattgagt

SEQ ID NO: 6039 - RNA, 21 nt, synthetic construct
  source 1..21: mol_type = other RNA
atgggtggtagactgagctta

SEQ ID NO: 6040 - RNA, 21 nt, synthetic construct
  source 1..21: mol_type = other RNA
atgggttatcaaagatgcttc

SEQ ID NO: 6041 - RNA, 21 nt, synthetic construct
  source 1..21: mol_type = other RNA
atggtacaactgctgaaacca

SEQ ID NO: 6042 - RNA, 21 nt, synthetic construct
  source 1..21: mol_type = other RNA
atggtcaggaaaagcagccat

SEQ ID NO: 6043 - RNA, 21 nt, synthetic construct
  source 1..21: mol_type = other RNA
atggtcctttcggcaagagac

SEQ ID NO: 6044 - RNA, 21 nt, synthetic construct
  source 1..21: mol_type = other RNA
atggtgaacatcattcacctt

SEQ ID NO: 6045 - RNA, 21 nt, synthetic construct
  source 1..21: mol_type = other RNA
atggttaagagctggaagcat

SEQ ID NO: 6046 - RNA, 21 nt, synthetic construct
  source 1..21: mol_type = other RNA
atggtttcagcagttgtacca

SEQ ID NO: 6047 - RNA, 21 nt, synthetic construct
  source 1..21: mol_type = other RNA
atgtaaaactctggctatttc

SEQ ID NO: 6048 - RNA, 21 nt, synthetic construct
  source 1..21: mol_type = other RNA
atgtacatcatgtagggaaat

SEQ ID NO: 6049 - RNA, 21 nt, synthetic construct
  source 1..21: mol_type = other RNA
atgtacatttggtctaatggt

SEQ ID NO: 6050 - RNA, 21 nt, synthetic construct
  source 1..21: mol_type = other RNA
atgtagggaaattgcctcctt

SEQ ID NO: 6051 - RNA, 21 nt, synthetic construct
  source 1..21: mol_type = other RNA
atgtagttactgtggagtctg

SEQ ID NO: 6052 - RNA, 21 nt, synthetic construct
  source 1..21: mol_type = other RNA
atgtatggattggtggatcca

SEQ ID NO: 6053 - RNA, 21 nt, synthetic construct
  source 1..21: mol_type = other RNA
atgtcaggatccagaaagctc

SEQ ID NO: 6054 - RNA, 21 nt, synthetic construct
  source 1..21: mol_type = other RNA
atgtcattctccttgttttgg

SEQ ID NO: 6055 - RNA, 21 nt, synthetic construct
  source 1..21: mol_type = other RNA
atgtccgtgaccacagactcc

SEQ ID NO: 6056 - RNA, 21 nt, synthetic construct
  source 1..21: mol_type = other RNA
atgtgagaaggtgaatgatgt

SEQ ID NO: 6057 - RNA, 21 nt, synthetic construct
  source 1..21: mol_type = other RNA
atgtgcctcagaaatcccatg

SEQ ID NO: 6058 - RNA, 21 nt, synthetic construct
  source 1..21: mol_type = other RNA
atgtggctcagcaggctcccg

SEQ ID NO: 6059 - RNA, 21 nt, synthetic construct
  source 1..21: mol_type = other RNA
atgtggctgctgctgctgggg

SEQ ID NO: 6060 - RNA, 21 nt, synthetic construct
  source 1..21: mol_type = other RNA
atgttcaacagctctcttcat

SEQ ID NO: 6061 - RNA, 21 nt, synthetic construct
  source 1..21: mol_type = other RNA
atgttcaccatttttatagtc

SEQ ID NO: 6062 - RNA, 21 nt, synthetic construct
  source 1..21: mol_type = other RNA
atgtttggattgctcagattg

SEQ ID NO: 6063 - RNA, 21 nt, synthetic construct
  source 1..21: mol_type = other RNA
atgttttggctcattcatgct

SEQ ID NO: 6064 - RNA, 21 nt, synthetic construct
  source 1..21: mol_type = other RNA
attaagtgatgctaatggtca

SEQ ID NO: 6065 - RNA, 21 nt, synthetic construct
  source 1..21: mol_type = other RNA
attaccacccaatctgagcaa

SEQ ID NO: 6066 - RNA, 21 nt, synthetic construct
  source 1..21: mol_type = other RNA
attagaccaaatgtacatcat

SEQ ID NO: 6067 - RNA, 21 nt, synthetic construct
  source 1..21: mol_type = other RNA
attagcatcacttaatttgtg

SEQ ID NO: 6068 - RNA, 21 nt, synthetic construct
  source 1..21: mol_type = other RNA
attagctgtgtgggaaagcat

SEQ ID NO: 6069 - RNA, 21 nt, synthetic construct
  source 1..21: mol_type = other RNA
attatgtgagaaggtgaatga

SEQ ID NO: 6070 - RNA, 21 nt, synthetic construct
  source 1..21: mol_type = other RNA
attcaaaagcccagggtaagg

SEQ ID NO: 6071 - RNA, 21 nt, synthetic construct
  source 1..21: mol_type = other RNA
attcaaatatgaacctgcagc

SEQ ID NO: 6072 - RNA, 21 nt, synthetic construct
  source 1..21: mol_type = other RNA
attcaccttctcacataatcc

SEQ ID NO: 6073 - RNA, 21 nt, synthetic construct
  source 1..21: mol_type = other RNA
attcatgctcttatgctggta

SEQ ID NO: 6074 - RNA, 21 nt, synthetic construct
  source 1..21: mol_type = other RNA
attccacctcatctcaagctg

SEQ ID NO: 6075 - RNA, 21 nt, synthetic construct
  source 1..21: mol_type = other RNA
attcctattgggattctttaa

SEQ ID NO: 6076 - RNA, 21 nt, synthetic construct
  source 1..21: mol_type = other RNA
attctcattgagtgtgcaaag

SEQ ID NO: 6077 - RNA, 21 nt, synthetic construct
  source 1..21: mol_type = other RNA
attctccccagtctcagccga

SEQ ID NO: 6078 - RNA, 21 nt, synthetic construct
  source 1..21: mol_type = other RNA
attctccttgttttggagatg

SEQ ID NO: 6079 - RNA, 21 nt, synthetic construct
  source 1..21: mol_type = other RNA
attctgattcaaaagcccagg

SEQ ID NO: 6080 - RNA, 21 nt, synthetic construct
  source 1..21: mol_type = other RNA
attctgcttctggatccacca

SEQ ID NO: 6081 - RNA, 21 nt, synthetic construct
  source 1..21: mol_type = other RNA
attcttctaatcccatgaacc

SEQ ID NO: 6082 - RNA, 21 nt, synthetic construct
  source 1..21: mol_type = other RNA
attctttaaaggggttgtggc

SEQ ID NO: 6083 - RNA, 21 nt, synthetic construct
  source 1..21: mol_type = other RNA
attgacccatgagttggagcc

SEQ ID NO: 6084 - RNA, 21 nt, synthetic construct
  source 1..21: mol_type = other RNA
attgagtgtgcaaagcgtgag

SEQ ID NO: 6085 - RNA, 21 nt, synthetic construct
  source 1..21: mol_type = other RNA
attgatatgatggatattggg

SEQ ID NO: 6086 - RNA, 21 nt, synthetic construct
  source 1..21: mol_type = other RNA
attgcattgatatgatggata

SEQ ID NO: 6087 - RNA, 21 nt, synthetic construct
  source 1..21: mol_type = other RNA
attgcctccttatcccactca

SEQ ID NO: 6088 - RNA, 21 nt, synthetic construct
  source 1..21: mol_type = other RNA
attgctcagattgggtggtaa

SEQ ID NO: 6089 - RNA, 21 nt, synthetic construct
  source 1..21: mol_type = other RNA
attggcactagtccagggtgt

SEQ ID NO: 6090 - RNA, 21 nt, synthetic construct
  source 1..21: mol_type = other RNA
attgggattctttaaaggggt

SEQ ID NO: 6091 - RNA, 21 nt, synthetic construct
  source 1..21: mol_type = other RNA
attgggccgtctcatgtatgg

SEQ ID NO: 6092 - RNA, 21 nt, synthetic construct
  source 1..21: mol_type = other RNA
attgggggagtggccgtggct

SEQ ID NO: 6093 - RNA, 21 nt, synthetic construct
  source 1..21: mol_type = other RNA
attgggtattctgattcaaaa

SEQ ID NO: 6094 - RNA, 21 nt, synthetic construct
  source 1..21: mol_type = other RNA
attgggtggtaatctagaggt

SEQ ID NO: 6095 - RNA, 21 nt, synthetic construct
  source 1..21: mol_type = other RNA
attggtggatccagaagcaga

SEQ ID NO: 6096 - RNA, 21 nt, synthetic construct
  source 1..21: mol_type = other RNA
atttagatgtaaaactctggc

SEQ ID NO: 6097 - RNA, 21 nt, synthetic construct
  source 1..21: mol_type = other RNA
atttccaaaccttggctggta

SEQ ID NO: 6098 - RNA, 21 nt, synthetic construct
  source 1..21: mol_type = other RNA
atttccctacatgatgtacat

SEQ ID NO: 6099 - RNA, 21 nt, synthetic construct
  source 1..21: mol_type = other RNA
atttctgaggcacatagtctg

SEQ ID NO: 6100 - RNA, 21 nt, synthetic construct
  source 1..21: mol_type = other RNA
atttgaattcttctaatccca

SEQ ID NO: 6101 - RNA, 21 nt, synthetic construct
  source 1..21: mol_type = other RNA
atttggtctaatggtacaact

SEQ ID NO: 6102 - RNA, 21 nt, synthetic construct
  source 1..21: mol_type = other RNA
atttgtgtaagcctccttgga

SEQ ID NO: 6103 - RNA, 21 nt, synthetic construct
  source 1..21: mol_type = other RNA
attttggcttcccaaagagcc

SEQ ID NO: 6104 - RNA, 21 nt, synthetic construct
  source 1..21: mol_type = other RNA
attttggtttccataacctaa

SEQ ID NO: 6105 - RNA, 21 nt, synthetic construct
  source 1..21: mol_type = other RNA
atttttatagtccatgtttgg

SEQ ID NO: 6106 - RNA, 21 nt, synthetic construct
  source 1..21: mol_type = other RNA
caaaaaagtgaaacgggagcc

SEQ ID NO: 6107 - RNA, 21 nt, synthetic construct
  source 1..21: mol_type = other RNA
caaaacaaggagaatgacatg

SEQ ID NO: 6108 - RNA, 21 nt, synthetic construct
  source 1..21: mol_type = other RNA
caaaacatggcttggctcttt

SEQ ID NO: 6109 - RNA, 21 nt, synthetic construct
  source 1..21: mol_type = other RNA
caaaagcccagggtaagggtt

SEQ ID NO: 6110 - RNA, 21 nt, synthetic construct
  source 1..21: mol_type = other RNA
caaaagggggtgatatcatat

SEQ ID NO: 6111 - RNA, 21 nt, synthetic construct
  source 1..21: mol_type = other RNA
caaaagttctgtggacagggt

SEQ ID NO: 6112 - RNA, 21 nt, synthetic construct
  source 1..21: mol_type = other RNA
caaaatatgcagggagatggt

SEQ ID NO: 6113 - RNA, 21 nt, synthetic construct
  source 1..21: mol_type = other RNA
caaaatggctgaaaaagcccg

SEQ ID NO: 6114 - RNA, 21 nt, synthetic construct
  source 1..21: mol_type = other RNA
caaacatggactataaaaatg

SEQ ID NO: 6115 - RNA, 21 nt, synthetic construct
  source 1..21: mol_type = other RNA
caaaccttggctggtaaagtg

SEQ ID NO: 6116 - RNA, 21 nt, synthetic construct
  source 1..21: mol_type = other RNA
caaactcttcacacacttcag

SEQ ID NO: 6117 - RNA, 21 nt, synthetic construct
  source 1..21: mol_type = other RNA
caaagagccaagccatgtttt

SEQ ID NO: 6118 - RNA, 21 nt, synthetic construct
  source 1..21: mol_type = other RNA
caaagatgcttccagctctta

SEQ ID NO: 6119 - RNA, 21 nt, synthetic construct
  source 1..21: mol_type = other RNA
caaagcgtgagctgcatgcca

SEQ ID NO: 6120 - RNA, 21 nt, synthetic construct
  source 1..21: mol_type = other RNA
caaatatgaacctgcagcttg

SEQ ID NO: 6121 - RNA, 21 nt, synthetic construct
  source 1..21: mol_type = other RNA
caaatgtacatcatgtaggga

SEQ ID NO: 6122 - RNA, 21 nt, synthetic construct
  source 1..21: mol_type = other RNA
caaattaagtgatgctaatgg

SEQ ID NO: 6123 - RNA, 21 nt, synthetic construct
  source 1..21: mol_type = other RNA
caacaaaagggggtgatatca

SEQ ID NO: 6124 - RNA, 21 nt, synthetic construct
  source 1..21: mol_type = other RNA
caacagctctcttcatgccct

SEQ ID NO: 6125 - RNA, 21 nt, synthetic construct
  source 1..21: mol_type = other RNA
caacccctttaaagaatccca

SEQ ID NO: 6126 - RNA, 21 nt, synthetic construct
  source 1..21: mol_type = other RNA
caacgatgaggtctggtcaga

SEQ ID NO: 6127 - RNA, 21 nt, synthetic construct
  source 1..21: mol_type = other RNA
caactcatgggtcaattctca

SEQ ID NO: 6128 - RNA, 21 nt, synthetic construct
  source 1..21: mol_type = other RNA
caactcttattctgcttctgg

SEQ ID NO: 6129 - RNA, 21 nt, synthetic construct
  source 1..21: mol_type = other RNA
caactgctccccatatctggg

SEQ ID NO: 6130 - RNA, 21 nt, synthetic construct
  source 1..21: mol_type = other RNA
caactgctgaaaccatctccc

SEQ ID NO: 6131 - RNA, 21 nt, synthetic construct
  source 1..21: mol_type = other RNA
caagaccctctgtctaagctc

SEQ ID NO: 6132 - RNA, 21 nt, synthetic construct
  source 1..21: mol_type = other RNA
caagagacttgatgaaacgca

SEQ ID NO: 6133 - RNA, 21 nt, synthetic construct
  source 1..21: mol_type = other RNA
caagcagttctatcatggtta

SEQ ID NO: 6134 - RNA, 21 nt, synthetic construct
  source 1..21: mol_type = other RNA
caagccaagaccctctgtcta

SEQ ID NO: 6135 - RNA, 21 nt, synthetic construct
  source 1..21: mol_type = other RNA
caagccatgttttggctcatt

SEQ ID NO: 6136 - RNA, 21 nt, synthetic construct
  source 1..21: mol_type = other RNA
caagctgcaggttcatatttg

SEQ ID NO: 6137 - RNA, 21 nt, synthetic construct
  source 1..21: mol_type = other RNA
caaggagaatgacatgctttc

SEQ ID NO: 6138 - RNA, 21 nt, synthetic construct
  source 1..21: mol_type = other RNA
caaggaggcttacacaaatta

SEQ ID NO: 6139 - RNA, 21 nt, synthetic construct
  source 1..21: mol_type = other RNA
caaggtttggaaatagccaga

SEQ ID NO: 6140 - RNA, 21 nt, synthetic construct
  source 1..21: mol_type = other RNA
caagtctcttgccgaaaggac

SEQ ID NO: 6141 - RNA, 21 nt, synthetic construct
  source 1..21: mol_type = other RNA
caagtgaggtaaccaacaaaa

SEQ ID NO: 6142 - RNA, 21 nt, synthetic construct
  source 1..21: mol_type = other RNA
caataggaatcaccccaccag

SEQ ID NO: 6143 - RNA, 21 nt, synthetic construct
  source 1..21: mol_type = other RNA
caatatccatcatatcaatgc

SEQ ID NO: 6144 - RNA, 21 nt, synthetic construct
  source 1..21: mol_type = other RNA
caatccaaacatggactataa

SEQ ID NO: 6145 - RNA, 21 nt, synthetic construct
  source 1..21: mol_type = other RNA
caatccagttagtccttatcc

SEQ ID NO: 6146 - RNA, 21 nt, synthetic construct
  source 1..21: mol_type = other RNA
caatccatacatgagacggcc

SEQ ID NO: 6147 - RNA, 21 nt, synthetic construct
  source 1..21: mol_type = other RNA
caatctgagcaatccaaacat

SEQ ID NO: 6148 - RNA, 21 nt, synthetic construct
  source 1..21: mol_type = other RNA
caatgagaattgacccatgag

SEQ ID NO: 6149 - RNA, 21 nt, synthetic construct
  source 1..21: mol_type = other RNA
caatgcaatggaaacctatca

SEQ ID NO: 6150 - RNA, 21 nt, synthetic construct
  source 1..21: mol_type = other RNA
caatggaaacctatcagtgga

SEQ ID NO: 6151 - RNA, 21 nt, synthetic construct
  source 1..21: mol_type = other RNA
caatggctgcttttcctgacc

SEQ ID NO: 6152 - RNA, 21 nt, synthetic construct
  source 1..21: mol_type = other RNA
caatgtcaggatccagaaagc

SEQ ID NO: 6153 - RNA, 21 nt, synthetic construct
  source 1..21: mol_type = other RNA
caattctcattgagtgtgcaa

SEQ ID NO: 6154 - RNA, 21 nt, synthetic construct
  source 1..21: mol_type = other RNA
caatttccctacatgatgtac

SEQ ID NO: 6155 - RNA, 21 nt, synthetic construct
  source 1..21: mol_type = other RNA
cacaaattaagtgatgctaat

SEQ ID NO: 6156 - RNA, 21 nt, synthetic construct
  source 1..21: mol_type = other RNA
cacaacccctttaaagaatcc

SEQ ID NO: 6157 - RNA, 21 nt, synthetic construct
  source 1..21: mol_type = other RNA
cacaagcagttctatcatggt

SEQ ID NO: 6158 - RNA, 21 nt, synthetic construct
  source 1..21: mol_type = other RNA
cacacacttcagatatctatg

SEQ ID NO: 6159 - RNA, 21 nt, synthetic construct
  source 1..21: mol_type = other RNA
cacacagctaatgggttatca

SEQ ID NO: 6160 - RNA, 21 nt, synthetic construct
  source 1..21: mol_type = other RNA
cacaccctggactagtgccaa

SEQ ID NO: 6161 - RNA, 21 nt, synthetic construct
  source 1..21: mol_type = other RNA
cacactcaatgagaattgacc

SEQ ID NO: 6162 - RNA, 21 nt, synthetic construct
  source 1..21: mol_type = other RNA
cacactcttcctctttctcac

SEQ ID NO: 6163 - RNA, 21 nt, synthetic construct
  source 1..21: mol_type = other RNA
cacacttcagatatctatgga

SEQ ID NO: 6164 - RNA, 21 nt, synthetic construct
  source 1..21: mol_type = other RNA
cacagaacttttgcgactttc

SEQ ID NO: 6165 - RNA, 21 nt, synthetic construct
  source 1..21: mol_type = other RNA
cacagactccacagtaactac

SEQ ID NO: 6166 - RNA, 21 nt, synthetic construct
  source 1..21: mol_type = other RNA
cacagccccagcagcagcaga

SEQ ID NO: 6167 - RNA, 21 nt, synthetic construct
  source 1..21: mol_type = other RNA
cacagctaatgggttatcaaa

SEQ ID NO: 6168 - RNA, 21 nt, synthetic construct
  source 1..21: mol_type = other RNA
cacagggccttacaacagata

SEQ ID NO: 6169 - RNA, 21 nt, synthetic construct
  source 1..21: mol_type = other RNA
cacagtaactacatctccata

SEQ ID NO: 6170 - RNA, 21 nt, synthetic construct
  source 1..21: mol_type = other RNA
cacataatccataactacagt

SEQ ID NO: 6171 - RNA, 21 nt, synthetic construct
  source 1..21: mol_type = other RNA
cacatagtctgggccatactt

SEQ ID NO: 6172 - RNA, 21 nt, synthetic construct
  source 1..21: mol_type = other RNA
cacatcaccctcagacagagt

SEQ ID NO: 6173 - RNA, 21 nt, synthetic construct
  source 1..21: mol_type = other RNA
cacatgaaacttcagagccca

SEQ ID NO: 6174 - RNA, 21 nt, synthetic construct
  source 1..21: mol_type = other RNA
caccaatccatacatgagacg

SEQ ID NO: 6175 - RNA, 21 nt, synthetic construct
  source 1..21: mol_type = other RNA
caccacagccccagcagcagc

SEQ ID NO: 6176 - RNA, 21 nt, synthetic construct
  source 1..21: mol_type = other RNA
caccagaagccacaccctgga

SEQ ID NO: 6177 - RNA, 21 nt, synthetic construct
  source 1..21: mol_type = other RNA
caccagccctatgaacttcta

SEQ ID NO: 6178 - RNA, 21 nt, synthetic construct
  source 1..21: mol_type = other RNA
caccaggatctccctcgtctt

SEQ ID NO: 6179 - RNA, 21 nt, synthetic construct
  source 1..21: mol_type = other RNA
caccatttttatagtccatgt

SEQ ID NO: 6180 - RNA, 21 nt, synthetic construct
  source 1..21: mol_type = other RNA
cacccaatctgagcaatccaa

SEQ ID NO: 6181 - RNA, 21 nt, synthetic construct
  source 1..21: mol_type = other RNA
cacccatccatacactttacc

SEQ ID NO: 6182 - RNA, 21 nt, synthetic construct
  source 1..21: mol_type = other RNA
caccccaccaggatctccctc

SEQ ID NO: 6183 - RNA, 21 nt, synthetic construct
  source 1..21: mol_type = other RNA
cacccccttttgttggttacc

SEQ ID NO: 6184 - RNA, 21 nt, synthetic construct
  source 1..21: mol_type = other RNA
caccctcagacagagtctgtc

SEQ ID NO: 6185 - RNA, 21 nt, synthetic construct
  source 1..21: mol_type = other RNA
caccctggactagtgccaatg

SEQ ID NO: 6186 - RNA, 21 nt, synthetic construct
  source 1..21: mol_type = other RNA
cacctcatctcaagctgcagg

SEQ ID NO: 6187 - RNA, 21 nt, synthetic construct
  source 1..21: mol_type = other RNA
cacctctagattaccacccaa

SEQ ID NO: 6188 - RNA, 21 nt, synthetic construct
  source 1..21: mol_type = other RNA
caccttctcacataatccata

SEQ ID NO: 6189 - RNA, 21 nt, synthetic construct
  source 1..21: mol_type = other RNA
cacgctttgcacactcaatga

SEQ ID NO: 6190 - RNA, 21 nt, synthetic construct
  source 1..21: mol_type = other RNA
cacggacatggtcctttcggc

SEQ ID NO: 6191 - RNA, 21 nt, synthetic construct
  source 1..21: mol_type = other RNA
cacggccactcccccaatgtc

SEQ ID NO: 6192 - RNA, 21 nt, synthetic construct
  source 1..21: mol_type = other RNA
cacgggctttttcagccattt

SEQ ID NO: 6193 - RNA, 21 nt, synthetic construct
  source 1..21: mol_type = other RNA
cactagtccagggtgtggctt

SEQ ID NO: 6194 - RNA, 21 nt, synthetic construct
  source 1..21: mol_type = other RNA
cactcaatgagaattgaccca

SEQ ID NO: 6195 - RNA, 21 nt, synthetic construct
  source 1..21: mol_type = other RNA
cactcatgagatggatggcca

SEQ ID NO: 6196 - RNA, 21 nt, synthetic construct
  source 1..21: mol_type = other RNA
cactcccccaatgtcaggatc

SEQ ID NO: 6197 - RNA, 21 nt, synthetic construct
  source 1..21: mol_type = other RNA
cactcgggtcacagggcctta

SEQ ID NO: 6198 - RNA, 21 nt, synthetic construct
  source 1..21: mol_type = other RNA
cactcttcctctttctcacgg

SEQ ID NO: 6199 - RNA, 21 nt, synthetic construct
  source 1..21: mol_type = other RNA
cactgataggtttccattgca

SEQ ID NO: 6200 - RNA, 21 nt, synthetic construct
  source 1..21: mol_type = other RNA
cactgtagttatggattatgt

SEQ ID NO: 6201 - RNA, 21 nt, synthetic construct
  source 1..21: mol_type = other RNA
cacttaatttgtgtaagcctc

SEQ ID NO: 6202 - RNA, 21 nt, synthetic construct
  source 1..21: mol_type = other RNA
cacttacctgcgtttcatcaa

SEQ ID NO: 6203 - RNA, 21 nt, synthetic construct
  source 1..21: mol_type = other RNA
cacttcagatatctatggaag

SEQ ID NO: 6204 - RNA, 21 nt, synthetic construct
  source 1..21: mol_type = other RNA
cacttcatgggagccacctct

SEQ ID NO: 6205 - RNA, 21 nt, synthetic construct
  source 1..21: mol_type = other RNA
cactttaccagccaaggtttg

SEQ ID NO: 6206 - RNA, 21 nt, synthetic construct
  source 1..21: mol_type = other RNA
cacttttttgccatgggattt

SEQ ID NO: 6207 - RNA, 21 nt, synthetic construct
  source 1..21: mol_type = other RNA
cagaaagctctgctcgctgtc

SEQ ID NO: 6208 - RNA, 21 nt, synthetic construct
  source 1..21: mol_type = other RNA
cagaaatcccatggcaaaaaa

SEQ ID NO: 6209 - RNA, 21 nt, synthetic construct
  source 1..21: mol_type = other RNA
cagaacttttgcgactttcag

SEQ ID NO: 6210 - RNA, 21 nt, synthetic construct
  source 1..21: mol_type = other RNA
cagaagcagaataagagttga

SEQ ID NO: 6211 - RNA, 21 nt, synthetic construct
  source 1..21: mol_type = other RNA
cagaagcagccaccacagccc

SEQ ID NO: 6212 - RNA, 21 nt, synthetic construct
  source 1..21: mol_type = other RNA
cagaagccacaccctggacta

SEQ ID NO: 6213 - RNA, 21 nt, synthetic construct
  source 1..21: mol_type = other RNA
cagaataagagttgacagact

SEQ ID NO: 6214 - RNA, 21 nt, synthetic construct
  source 1..21: mol_type = other RNA
cagaatacccaatatccatca

SEQ ID NO: 6215 - RNA, 21 nt, synthetic construct
  source 1..21: mol_type = other RNA
cagacagagtctgtcaactct

SEQ ID NO: 6216 - RNA, 21 nt, synthetic construct
  source 1..21: mol_type = other RNA
cagacagcgagcagagctttc

SEQ ID NO: 6217 - RNA, 21 nt, synthetic construct
  source 1..21: mol_type = other RNA
cagacctcatcgttgtcctct

SEQ ID NO: 6218 - RNA, 21 nt, synthetic construct
  source 1..21: mol_type = other RNA
cagactatgtgcctcagaaat

SEQ ID NO: 6219 - RNA, 21 nt, synthetic construct
  source 1..21: mol_type = other RNA
cagactccacagtaactacat

SEQ ID NO: 6220 - RNA, 21 nt, synthetic construct
  source 1..21: mol_type = other RNA
cagactctgtctgagggtgat

SEQ ID NO: 6221 - RNA, 21 nt, synthetic construct
  source 1..21: mol_type = other RNA
cagagaccccagcagcagcag

SEQ ID NO: 6222 - RNA, 21 nt, synthetic construct
  source 1..21: mol_type = other RNA
cagagcccacttacctgcgtt

SEQ ID NO: 6223 - RNA, 21 nt, synthetic construct
  source 1..21: mol_type = other RNA
cagagctttctggatcctgac

SEQ ID NO: 6224 - RNA, 21 nt, synthetic construct
  source 1..21: mol_type = other RNA
cagaggacaacgatgaggtct

SEQ ID NO: 6225 - RNA, 21 nt, synthetic construct
  source 1..21: mol_type = other RNA
cagagggtcttggcttggata

SEQ ID NO: 6226 - RNA, 21 nt, synthetic construct
  source 1..21: mol_type = other RNA
cagagtctgtcaactcttatt

SEQ ID NO: 6227 - RNA, 21 nt, synthetic construct
  source 1..21: mol_type = other RNA
cagagttttacatctaaatac

SEQ ID NO: 6228 - RNA, 21 nt, synthetic construct
  source 1..21: mol_type = other RNA
cagatatatatgatatcaccc

SEQ ID NO: 6229 - RNA, 21 nt, synthetic construct
  source 1..21: mol_type = other RNA
cagatatctatggaagcacca

SEQ ID NO: 6230 - RNA, 21 nt, synthetic construct
  source 1..21: mol_type = other RNA
cagatatggggagcagttgtc

SEQ ID NO: 6231 - RNA, 21 nt, synthetic construct
  source 1..21: mol_type = other RNA
cagatccatcggctgagactg

SEQ ID NO: 6232 - RNA, 21 nt, synthetic construct
  source 1..21: mol_type = other RNA
cagattgggtggtaatctaga

SEQ ID NO: 6233 - RNA, 21 nt, synthetic construct
  source 1..21: mol_type = other RNA
cagcagagaccccagcagcag

SEQ ID NO: 6234 - RNA, 21 nt, synthetic construct
  source 1..21: mol_type = other RNA
cagcagcagagaccccagcag

SEQ ID NO: 6235 - RNA, 21 nt, synthetic construct
  source 1..21: mol_type = other RNA
cagcagcagcagagaccccag

SEQ ID NO: 6236 - RNA, 21 nt, synthetic construct
  source 1..21: mol_type = other RNA
cagcagcagcagccacatcac

SEQ ID NO: 6237 - RNA, 21 nt, synthetic construct
  source 1..21: mol_type = other RNA
cagcagcagccacatcaccct

SEQ ID NO: 6238 - RNA, 21 nt, synthetic construct
  source 1..21: mol_type = other RNA
cagcagccacatcaccctcag

SEQ ID NO: 6239 - RNA, 21 nt, synthetic construct
  source 1..21: mol_type = other RNA
cagcagccccagcctctacag

SEQ ID NO: 6240 - RNA, 21 nt, synthetic construct
  source 1..21: mol_type = other RNA
cagcaggctcccgtttcactt

SEQ ID NO: 6241 - RNA, 21 nt, synthetic construct
  source 1..21: mol_type = other RNA
cagcagtcccagcagccccag

SEQ ID NO: 6242 - RNA, 21 nt, synthetic construct
  source 1..21: mol_type = other RNA
cagcagttgtaccattagacc

SEQ ID NO: 6243 - RNA, 21 nt, synthetic construct
  source 1..21: mol_type = other RNA
cagcataagagcatgaatgag

SEQ ID NO: 6244 - RNA, 21 nt, synthetic construct
  source 1..21: mol_type = other RNA
cagccaaggtttggaaatagc

SEQ ID NO: 6245 - RNA, 21 nt, synthetic construct
  source 1..21: mol_type = other RNA
cagccacatcaccctcagaca

SEQ ID NO: 6246 - RNA, 21 nt, synthetic construct
  source 1..21: mol_type = other RNA
cagccaccacagccccagcag

SEQ ID NO: 6247 - RNA, 21 nt, synthetic construct
  source 1..21: mol_type = other RNA
cagccattggcactagtccag

SEQ ID NO: 6248 - RNA, 21 nt, synthetic construct
  source 1..21: mol_type = other RNA
cagccattttggcttcccaaa

SEQ ID NO: 6249 - RNA, 21 nt, synthetic construct
  source 1..21: mol_type = other RNA
cagccccagcagcagcagaga

SEQ ID NO: 6250 - RNA, 21 nt, synthetic construct
  source 1..21: mol_type = other RNA
cagccccagcctctacagaag

SEQ ID NO: 6251 - RNA, 21 nt, synthetic construct
  source 1..21: mol_type = other RNA
cagccctatgaacttctattc

SEQ ID NO: 6252 - RNA, 21 nt, synthetic construct
  source 1..21: mol_type = other RNA
cagccgatggatctgtatagg

SEQ ID NO: 6253 - RNA, 21 nt, synthetic construct
  source 1..21: mol_type = other RNA
cagcctctacagaagcagcca

SEQ ID NO: 6254 - RNA, 21 nt, synthetic construct
  source 1..21: mol_type = other RNA
cagcgagcagagctttctgga

SEQ ID NO: 6255 - RNA, 21 nt, synthetic construct
  source 1..21: mol_type = other RNA
cagctaatgggttatcaaaga

SEQ ID NO: 6256 - RNA, 21 nt, synthetic construct
  source 1..21: mol_type = other RNA
cagctcacgctttgcacactc

SEQ ID NO: 6257 - RNA, 21 nt, synthetic construct
  source 1..21: mol_type = other RNA
cagctccgggcatgttcaaca

SEQ ID NO: 6258 - RNA, 21 nt, synthetic construct
  source 1..21: mol_type = other RNA
cagctctcttcatgccctgca

SEQ ID NO: 6259 - RNA, 21 nt, synthetic construct
  source 1..21: mol_type = other RNA
cagctcttaaccatgatagaa

SEQ ID NO: 6260 - RNA, 21 nt, synthetic construct
  source 1..21: mol_type = other RNA
cagcttgagatgaggtggaat

SEQ ID NO: 6261 - RNA, 21 nt, synthetic construct
  source 1..21: mol_type = other RNA
caggaaaagcagccattggca

SEQ ID NO: 6262 - RNA, 21 nt, synthetic construct
  source 1..21: mol_type = other RNA
caggaccagtcatgcagcagt

SEQ ID NO: 6263 - RNA, 21 nt, synthetic construct
  source 1..21: mol_type = other RNA
caggatccagaaagctctgct

SEQ ID NO: 6264 - RNA, 21 nt, synthetic construct
  source 1..21: mol_type = other RNA
caggatctccctcgtctttta

SEQ ID NO: 6265 - RNA, 21 nt, synthetic construct
  source 1..21: mol_type = other RNA
caggctcccgtttcacttttt

SEQ ID NO: 6266 - RNA, 21 nt, synthetic construct
  source 1..21: mol_type = other RNA
cagggagatggtttcagcagt

SEQ ID NO: 6267 - RNA, 21 nt, synthetic construct
  source 1..21: mol_type = other RNA
cagggcatgaagagagctgtt

SEQ ID NO: 6268 - RNA, 21 nt, synthetic construct
  source 1..21: mol_type = other RNA
cagggccttacaacagatata

SEQ ID NO: 6269 - RNA, 21 nt, synthetic construct
  source 1..21: mol_type = other RNA
cagggtaagagagaacagaaa

SEQ ID NO: 6270 - RNA, 21 nt, synthetic construct
  source 1..21: mol_type = other RNA
cagggtaagggttcatgggat

SEQ ID NO: 6271 - RNA, 21 nt, synthetic construct
  source 1..21: mol_type = other RNA
cagggtgtggcttctggtgca

SEQ ID NO: 6272 - RNA, 21 nt, synthetic construct
  source 1..21: mol_type = other RNA
caggtaagtgggctctgaagt

SEQ ID NO: 6273 - RNA, 21 nt, synthetic construct
  source 1..21: mol_type = other RNA
caggttcatatttgaattctt

SEQ ID NO: 6274 - RNA, 21 nt, synthetic construct
  source 1..21: mol_type = other RNA
cagtaactacatctccatatg

SEQ ID NO: 6275 - RNA, 21 nt, synthetic construct
  source 1..21: mol_type = other RNA
cagtcatgcagcagtcccagc

SEQ ID NO: 6276 - RNA, 21 nt, synthetic construct
  source 1..21: mol_type = other RNA
cagtcccagcagccccagcct

SEQ ID NO: 6277 - RNA, 21 nt, synthetic construct
  source 1..21: mol_type = other RNA
cagtctaccacccatccatac

SEQ ID NO: 6278 - RNA, 21 nt, synthetic construct
  source 1..21: mol_type = other RNA
cagtctcagccgatggatctg

SEQ ID NO: 6279 - RNA, 21 nt, synthetic construct
  source 1..21: mol_type = other RNA
cagtgcagctccgggcatgtt

SEQ ID NO: 6280 - RNA, 21 nt, synthetic construct
  source 1..21: mol_type = other RNA
cagtggacaactgctccccat

SEQ ID NO: 6281 - RNA, 21 nt, synthetic construct
  source 1..21: mol_type = other RNA
cagttagtccttatccaaact

SEQ ID NO: 6282 - RNA, 21 nt, synthetic construct
  source 1..21: mol_type = other RNA
cagttctatcatggttaagag

SEQ ID NO: 6283 - RNA, 21 nt, synthetic construct
  source 1..21: mol_type = other RNA
cagttgtaccattagaccaaa

SEQ ID NO: 6284 - RNA, 21 nt, synthetic construct
  source 1..21: mol_type = other RNA
cagttgtccactgataggttt

SEQ ID NO: 6285 - RNA, 21 nt, synthetic construct
  source 1..21: mol_type = other RNA
cataacctaagtatttagatg

SEQ ID NO: 6286 - RNA, 21 nt, synthetic construct
  source 1..21: mol_type = other RNA
cataactacagtgcagctccg

SEQ ID NO: 6287 - RNA, 21 nt, synthetic construct
  source 1..21: mol_type = other RNA
cataagagcatgaatgagcca

SEQ ID NO: 6288 - RNA, 21 nt, synthetic construct
  source 1..21: mol_type = other RNA
cataatccataactacagtgc

SEQ ID NO: 6289 - RNA, 21 nt, synthetic construct
  source 1..21: mol_type = other RNA
catacactttaccagccaagg

SEQ ID NO: 6290 - RNA, 21 nt, synthetic construct
  source 1..21: mol_type = other RNA
catacatgagacggcccaatc

SEQ ID NO: 6291 - RNA, 21 nt, synthetic construct
  source 1..21: mol_type = other RNA
catacttttcacactcttcct

SEQ ID NO: 6292 - RNA, 21 nt, synthetic construct
  source 1..21: mol_type = other RNA
catagatatctgaagtgtgtg

SEQ ID NO: 6293 - RNA, 21 nt, synthetic construct
  source 1..21: mol_type = other RNA
catagggctggtgcttccata

SEQ ID NO: 6294 - RNA, 21 nt, synthetic construct
  source 1..21: mol_type = other RNA
catagtctgggccatactttt

SEQ ID NO: 6295 - RNA, 21 nt, synthetic construct
  source 1..21: mol_type = other RNA
catatatatctgttgtaaggc

SEQ ID NO: 6296 - RNA, 21 nt, synthetic construct
  source 1..21: mol_type = other RNA
catatcaatgcaatggaaacc

SEQ ID NO: 6297 - RNA, 21 nt, synthetic construct
  source 1..21: mol_type = other RNA
catatctgggttcctattctc

SEQ ID NO: 6298 - RNA, 21 nt, synthetic construct
  source 1..21: mol_type = other RNA
catatgccttcactcgggtca

SEQ ID NO: 6299 - RNA, 21 nt, synthetic construct
  source 1..21: mol_type = other RNA
catatggagatgtagttactg

SEQ ID NO: 6300 - RNA, 21 nt, synthetic construct
  source 1..21: mol_type = other RNA
catattttggtttccataacc

SEQ ID NO: 6301 - RNA, 21 nt, synthetic construct
  source 1..21: mol_type = other RNA
catcaagtctcttgccgaaag

SEQ ID NO: 6302 - RNA, 21 nt, synthetic construct
  source 1..21: mol_type = other RNA
catcaccctcagacagagtct

SEQ ID NO: 6303 - RNA, 21 nt, synthetic construct
  source 1..21: mol_type = other RNA
catcacttaatttgtgtaagc

SEQ ID NO: 6304 - RNA, 21 nt, synthetic construct
  source 1..21: mol_type = other RNA
catcatatcaatgcaatggaa

SEQ ID NO: 6305 - RNA, 21 nt, synthetic construct
  source 1..21: mol_type = other RNA
catcatgtagggaaattgcct

SEQ ID NO: 6306 - RNA, 21 nt, synthetic construct
  source 1..21: mol_type = other RNA
catcattcaccttctcacata

SEQ ID NO: 6307 - RNA, 21 nt, synthetic construct
  source 1..21: mol_type = other RNA
catccatacactttaccagcc

SEQ ID NO: 6308 - RNA, 21 nt, synthetic construct
  source 1..21: mol_type = other RNA
catccatctcatgagtgggat

SEQ ID NO: 6309 - RNA, 21 nt, synthetic construct
  source 1..21: mol_type = other RNA
catcggctgagactggggaga

SEQ ID NO: 6310 - RNA, 21 nt, synthetic construct
  source 1..21: mol_type = other RNA
catcgttgtcctctgcaccag

SEQ ID NO: 6311 - RNA, 21 nt, synthetic construct
  source 1..21: mol_type = other RNA
catctaaatacttaggttatg

SEQ ID NO: 6312 - RNA, 21 nt, synthetic construct
  source 1..21: mol_type = other RNA
catctcaagctgcaggttcat

SEQ ID NO: 6313 - RNA, 21 nt, synthetic construct
  source 1..21: mol_type = other RNA
catctcatgagtgggataagg

SEQ ID NO: 6314 - RNA, 21 nt, synthetic construct
  source 1..21: mol_type = other RNA
catctccaaaacaaggagaat

SEQ ID NO: 6315 - RNA, 21 nt, synthetic construct
  source 1..21: mol_type = other RNA
catctccatatgccttcactc

SEQ ID NO: 6316 - RNA, 21 nt, synthetic construct
  source 1..21: mol_type = other RNA
catctccctgcatattttggt

SEQ ID NO: 6317 - RNA, 21 nt, synthetic construct
  source 1..21: mol_type = other RNA
catctttgataacccattagc

SEQ ID NO: 6318 - RNA, 21 nt, synthetic construct
  source 1..21: mol_type = other RNA
catgaaacttcagagcccact

SEQ ID NO: 6319 - RNA, 21 nt, synthetic construct
  source 1..21: mol_type = other RNA
catgaacccttaccctgggct

SEQ ID NO: 6320 - RNA, 21 nt, synthetic construct
  source 1..21: mol_type = other RNA
catgaagagagctgttgaaca

SEQ ID NO: 6321 - RNA, 21 nt, synthetic construct
  source 1..21: mol_type = other RNA
catgaagtggccatccatctc

SEQ ID NO: 6322 - RNA, 21 nt, synthetic construct
  source 1..21: mol_type = other RNA
catgaatgagccaaaacatgg

SEQ ID NO: 6323 - RNA, 21 nt, synthetic construct
  source 1..21: mol_type = other RNA
catgactggtcctgaaagtcg

SEQ ID NO: 6324 - RNA, 21 nt, synthetic construct
  source 1..21: mol_type = other RNA
catgagacggcccaatccagt

SEQ ID NO: 6325 - RNA, 21 nt, synthetic construct
  source 1..21: mol_type = other RNA
catgagatggatggccacttc

SEQ ID NO: 6326 - RNA, 21 nt, synthetic construct
  source 1..21: mol_type = other RNA
catgagtgggataaggaggca

SEQ ID NO: 6327 - RNA, 21 nt, synthetic construct
  source 1..21: mol_type = other RNA
catgagttggagccacggcca

SEQ ID NO: 6328 - RNA, 21 nt, synthetic construct
  source 1..21: mol_type = other RNA
catgatagaactgcttgtgtc

SEQ ID NO: 6329 - RNA, 21 nt, synthetic construct
  source 1..21: mol_type = other RNA
catgatgtacatttggtctaa

SEQ ID NO: 6330 - RNA, 21 nt, synthetic construct
  source 1..21: mol_type = other RNA
catgcagcagtcccagcagcc

SEQ ID NO: 6331 - RNA, 21 nt, synthetic construct
  source 1..21: mol_type = other RNA
catgcagctcacgctttgcac

SEQ ID NO: 6332 - RNA, 21 nt, synthetic construct
  source 1..21: mol_type = other RNA
catgccacaacccctttaaag

SEQ ID NO: 6333 - RNA, 21 nt, synthetic construct
  source 1..21: mol_type = other RNA
catgcccggagctgcactgta

SEQ ID NO: 6334 - RNA, 21 nt, synthetic construct
  source 1..21: mol_type = other RNA
catgccctgcatctccaaaac

SEQ ID NO: 6335 - RNA, 21 nt, synthetic construct
  source 1..21: mol_type = other RNA
catgctcttatgctggtaaaa

SEQ ID NO: 6336 - RNA, 21 nt, synthetic construct
  source 1..21: mol_type = other RNA
catgctttcccacacagctaa

SEQ ID NO: 6337 - RNA, 21 nt, synthetic construct
  source 1..21: mol_type = other RNA
catggactataaaaatggtga

SEQ ID NO: 6338 - RNA, 21 nt, synthetic construct
  source 1..21: mol_type = other RNA
catggcaaaaaagtgaaacgg

SEQ ID NO: 6339 - RNA, 21 nt, synthetic construct
  source 1..21: mol_type = other RNA
catggcttggctctttgggaa

SEQ ID NO: 6340 - RNA, 21 nt, synthetic construct
  source 1..21: mol_type = other RNA
catgggagccacctctagatt

SEQ ID NO: 6341 - RNA, 21 nt, synthetic construct
  source 1..21: mol_type = other RNA
catgggattagaagaattcaa

SEQ ID NO: 6342 - RNA, 21 nt, synthetic construct
  source 1..21: mol_type = other RNA
catgggatttctgaggcacat

SEQ ID NO: 6343 - RNA, 21 nt, synthetic construct
  source 1..21: mol_type = other RNA
catgggtcaattctcattgag

SEQ ID NO: 6344 - RNA, 21 nt, synthetic construct
  source 1..21: mol_type = other RNA
catggtcctttcggcaagaga

SEQ ID NO: 6345 - RNA, 21 nt, synthetic construct
  source 1..21: mol_type = other RNA
catggttaagagctggaagca

SEQ ID NO: 6346 - RNA, 21 nt, synthetic construct
  source 1..21: mol_type = other RNA
catgtagggaaattgcctcct

SEQ ID NO: 6347 - RNA, 21 nt, synthetic construct
  source 1..21: mol_type = other RNA
catgtatggattggtggatcc

SEQ ID NO: 6348 - RNA, 21 nt, synthetic construct
  source 1..21: mol_type = other RNA
catgtcattctccttgttttg

SEQ ID NO: 6349 - RNA, 21 nt, synthetic construct
  source 1..21: mol_type = other RNA
catgtccgtgaccacagactc

SEQ ID NO: 6350 - RNA, 21 nt, synthetic construct
  source 1..21: mol_type = other RNA
catgtggctcagcaggctccc

SEQ ID NO: 6351 - RNA, 21 nt, synthetic construct
  source 1..21: mol_type = other RNA
catgttcaacagctctcttca

SEQ ID NO: 6352 - RNA, 21 nt, synthetic construct
  source 1..21: mol_type = other RNA
catgtttggattgctcagatt

SEQ ID NO: 6353 - RNA, 21 nt, synthetic construct
  source 1..21: mol_type = other RNA
catgttttggctcattcatgc

SEQ ID NO: 6354 - RNA, 21 nt, synthetic construct
  source 1..21: mol_type = other RNA
cattagaccaaatgtacatca

SEQ ID NO: 6355 - RNA, 21 nt, synthetic construct
  source 1..21: mol_type = other RNA
cattagcatcacttaatttgt

SEQ ID NO: 6356 - RNA, 21 nt, synthetic construct
  source 1..21: mol_type = other RNA
cattagctgtgtgggaaagca

SEQ ID NO: 6357 - RNA, 21 nt, synthetic construct
  source 1..21: mol_type = other RNA
cattcaccttctcacataatc

SEQ ID NO: 6358 - RNA, 21 nt, synthetic construct
  source 1..21: mol_type = other RNA
cattcatgctcttatgctggt

SEQ ID NO: 6359 - RNA, 21 nt, synthetic construct
  source 1..21: mol_type = other RNA
cattctccttgttttggagat

SEQ ID NO: 6360 - RNA, 21 nt, synthetic construct
  source 1..21: mol_type = other RNA
cattgagtgtgcaaagcgtga

SEQ ID NO: 6361 - RNA, 21 nt, synthetic construct
  source 1..21: mol_type = other RNA
cattgatatgatggatattgg

SEQ ID NO: 6362 - RNA, 21 nt, synthetic construct
  source 1..21: mol_type = other RNA
cattgcattgatatgatggat

SEQ ID NO: 6363 - RNA, 21 nt, synthetic construct
  source 1..21: mol_type = other RNA
cattggcactagtccagggtg

SEQ ID NO: 6364 - RNA, 21 nt, synthetic construct
  source 1..21: mol_type = other RNA
cattgggggagtggccgtggc

SEQ ID NO: 6365 - RNA, 21 nt, synthetic construct
  source 1..21: mol_type = other RNA
catttggtctaatggtacaac

SEQ ID NO: 6366 - RNA, 21 nt, synthetic construct
  source 1..21: mol_type = other RNA
cattttggcttcccaaagagc

SEQ ID NO: 6367 - RNA, 21 nt, synthetic construct
  source 1..21: mol_type = other RNA
catttttatagtccatgtttg

SEQ ID NO: 6368 - RNA, 21 nt, synthetic construct
  source 1..21: mol_type = other RNA
ccaaaacaaggagaatgacat

SEQ ID NO: 6369 - RNA, 21 nt, synthetic construct
  source 1..21: mol_type = other RNA
ccaaaacatggcttggctctt

SEQ ID NO: 6370 - RNA, 21 nt, synthetic construct
  source 1..21: mol_type = other RNA
ccaaaatatgcagggagatgg

SEQ ID NO: 6371 - RNA, 21 nt, synthetic construct
  source 1..21: mol_type = other RNA
ccaaaatggctgaaaaagccc

SEQ ID NO: 6372 - RNA, 21 nt, synthetic construct
  source 1..21: mol_type = other RNA
ccaaacatggactataaaaat

SEQ ID NO: 6373 - RNA, 21 nt, synthetic construct
  source 1..21: mol_type = other RNA
ccaaaccttggctggtaaagt

SEQ ID NO: 6374 - RNA, 21 nt, synthetic construct
  source 1..21: mol_type = other RNA
ccaaactcttcacacacttca

SEQ ID NO: 6375 - RNA, 21 nt, synthetic construct
  source 1..21: mol_type = other RNA
ccaaagagccaagccatgttt

SEQ ID NO: 6376 - RNA, 21 nt, synthetic construct
  source 1..21: mol_type = other RNA
ccaaatgtacatcatgtaggg

SEQ ID NO: 6377 - RNA, 21 nt, synthetic construct
  source 1..21: mol_type = other RNA
ccaacaaaagggggtgatatc

SEQ ID NO: 6378 - RNA, 21 nt, synthetic construct
  source 1..21: mol_type = other RNA
ccaactcatgggtcaattctc

SEQ ID NO: 6379 - RNA, 21 nt, synthetic construct
  source 1..21: mol_type = other RNA
ccaagaccctctgtctaagct

SEQ ID NO: 6380 - RNA, 21 nt, synthetic construct
  source 1..21: mol_type = other RNA
ccaagccaagaccctctgtct

SEQ ID NO: 6381 - RNA, 21 nt, synthetic construct
  source 1..21: mol_type = other RNA
ccaagccatgttttggctcat

SEQ ID NO: 6382 - RNA, 21 nt, synthetic construct
  source 1..21: mol_type = other RNA
ccaaggaggcttacacaaatt

SEQ ID NO: 6383 - RNA, 21 nt, synthetic construct
  source 1..21: mol_type = other RNA
ccaaggtttggaaatagccag

SEQ ID NO: 6384 - RNA, 21 nt, synthetic construct
  source 1..21: mol_type = other RNA
ccaataggaatcaccccacca

SEQ ID NO: 6385 - RNA, 21 nt, synthetic construct
  source 1..21: mol_type = other RNA
ccaatatccatcatatcaatg

SEQ ID NO: 6386 - RNA, 21 nt, synthetic construct
  source 1..21: mol_type = other RNA
ccaatccagttagtccttatc

SEQ ID NO: 6387 - RNA, 21 nt, synthetic construct
  source 1..21: mol_type = other RNA
ccaatccatacatgagacggc

SEQ ID NO: 6388 - RNA, 21 nt, synthetic construct
  source 1..21: mol_type = other RNA
ccaatctgagcaatccaaaca

SEQ ID NO: 6389 - RNA, 21 nt, synthetic construct
  source 1..21: mol_type = other RNA
ccaatggctgcttttcctgac

SEQ ID NO: 6390 - RNA, 21 nt, synthetic construct
  source 1..21: mol_type = other RNA
ccaatgtcaggatccagaaag

SEQ ID NO: 6391 - RNA, 21 nt, synthetic construct
  source 1..21: mol_type = other RNA
ccacaacccctttaaagaatc

SEQ ID NO: 6392 - RNA, 21 nt, synthetic construct
  source 1..21: mol_type = other RNA
ccacacagctaatgggttatc

SEQ ID NO: 6393 - RNA, 21 nt, synthetic construct
  source 1..21: mol_type = other RNA
ccacaccctggactagtgcca

SEQ ID NO: 6394 - RNA, 21 nt, synthetic construct
  source 1..21: mol_type = other RNA
ccacagaacttttgcgacttt

SEQ ID NO: 6395 - RNA, 21 nt, synthetic construct
  source 1..21: mol_type = other RNA
ccacagactccacagtaacta

SEQ ID NO: 6396 - RNA, 21 nt, synthetic construct
  source 1..21: mol_type = other RNA
ccacagccccagcagcagcag

SEQ ID NO: 6397 - RNA, 21 nt, synthetic construct
  source 1..21: mol_type = other RNA
ccacagtaactacatctccat

SEQ ID NO: 6398 - RNA, 21 nt, synthetic construct
  source 1..21: mol_type = other RNA
ccacatcaccctcagacagag

SEQ ID NO: 6399 - RNA, 21 nt, synthetic construct
  source 1..21: mol_type = other RNA
ccacatgaaacttcagagccc

SEQ ID NO: 6400 - RNA, 21 nt, synthetic construct
  source 1..21: mol_type = other RNA
ccaccaatccatacatgagac

SEQ ID NO: 6401 - RNA, 21 nt, synthetic construct
  source 1..21: mol_type = other RNA
ccaccacagccccagcagcag

SEQ ID NO: 6402 - RNA, 21 nt, synthetic construct
  source 1..21: mol_type = other RNA
ccaccaggatctccctcgtct

SEQ ID NO: 6403 - RNA, 21 nt, synthetic construct
  source 1..21: mol_type = other RNA
ccacccaatctgagcaatcca

SEQ ID NO: 6404 - RNA, 21 nt, synthetic construct
  source 1..21: mol_type = other RNA
ccacccatccatacactttac

SEQ ID NO: 6405 - RNA, 21 nt, synthetic construct
  source 1..21: mol_type = other RNA
ccacctcatctcaagctgcag

SEQ ID NO: 6406 - RNA, 21 nt, synthetic construct
  source 1..21: mol_type = other RNA
ccacctctagattaccaccca

SEQ ID NO: 6407 - RNA, 21 nt, synthetic construct
  source 1..21: mol_type = other RNA
ccacggccactcccccaatgt

SEQ ID NO: 6408 - RNA, 21 nt, synthetic construct
  source 1..21: mol_type = other RNA
ccactcatgagatggatggcc

SEQ ID NO: 6409 - RNA, 21 nt, synthetic construct
  source 1..21: mol_type = other RNA
ccactcccccaatgtcaggat

SEQ ID NO: 6410 - RNA, 21 nt, synthetic construct
  source 1..21: mol_type = other RNA
ccactgataggtttccattgc

SEQ ID NO: 6411 - RNA, 21 nt, synthetic construct
  source 1..21: mol_type = other RNA
ccacttacctgcgtttcatca

SEQ ID NO: 6412 - RNA, 21 nt, synthetic construct
  source 1..21: mol_type = other RNA
ccacttcatgggagccacctc

SEQ ID NO: 6413 - RNA, 21 nt, synthetic construct
  source 1..21: mol_type = other RNA
ccagaaagctctgctcgctgt

SEQ ID NO: 6414 - RNA, 21 nt, synthetic construct
  source 1..21: mol_type = other RNA
ccagaagcagaataagagttg

SEQ ID NO: 6415 - RNA, 21 nt, synthetic construct
  source 1..21: mol_type = other RNA
ccagaagccacaccctggact

SEQ ID NO: 6416 - RNA, 21 nt, synthetic construct
  source 1..21: mol_type = other RNA
ccagacctcatcgttgtcctc

SEQ ID NO: 6417 - RNA, 21 nt, synthetic construct
  source 1..21: mol_type = other RNA
ccagactatgtgcctcagaaa

SEQ ID NO: 6418 - RNA, 21 nt, synthetic construct
  source 1..21: mol_type = other RNA
ccagagttttacatctaaata

SEQ ID NO: 6419 - RNA, 21 nt, synthetic construct
  source 1..21: mol_type = other RNA
ccagatatggggagcagttgt

SEQ ID NO: 6420 - RNA, 21 nt, synthetic construct
  source 1..21: mol_type = other RNA
ccagcagcagcagagacccca

SEQ ID NO: 6421 - RNA, 21 nt, synthetic construct
  source 1..21: mol_type = other RNA
ccagcagcagcagccacatca

SEQ ID NO: 6422 - RNA, 21 nt, synthetic construct
  source 1..21: mol_type = other RNA
ccagcagccccagcctctaca

SEQ ID NO: 6423 - RNA, 21 nt, synthetic construct
  source 1..21: mol_type = other RNA
ccagcataagagcatgaatga

SEQ ID NO: 6424 - RNA, 21 nt, synthetic construct
  source 1..21: mol_type = other RNA
ccagccaaggtttggaaatag

SEQ ID NO: 6425 - RNA, 21 nt, synthetic construct
  source 1..21: mol_type = other RNA
ccagccctatgaacttctatt

SEQ ID NO: 6426 - RNA, 21 nt, synthetic construct
  source 1..21: mol_type = other RNA
ccagcctctacagaagcagcc

SEQ ID NO: 6427 - RNA, 21 nt, synthetic construct
  source 1..21: mol_type = other RNA
ccagctcttaaccatgataga

SEQ ID NO: 6428 - RNA, 21 nt, synthetic construct
  source 1..21: mol_type = other RNA
ccaggatctccctcgtctttt

SEQ ID NO: 6429 - RNA, 21 nt, synthetic construct
  source 1..21: mol_type = other RNA
ccagggtaagggttcatggga

SEQ ID NO: 6430 - RNA, 21 nt, synthetic construct
  source 1..21: mol_type = other RNA
ccagggtgtggcttctggtgc

SEQ ID NO: 6431 - RNA, 21 nt, synthetic construct
  source 1..21: mol_type = other RNA
ccagtcatgcagcagtcccag

SEQ ID NO: 6432 - RNA, 21 nt, synthetic construct
  source 1..21: mol_type = other RNA
ccagtctcagccgatggatct

SEQ ID NO: 6433 - RNA, 21 nt, synthetic construct
  source 1..21: mol_type = other RNA
ccagttagtccttatccaaac

SEQ ID NO: 6434 - RNA, 21 nt, synthetic construct
  source 1..21: mol_type = other RNA
ccataacctaagtatttagat

SEQ ID NO: 6435 - RNA, 21 nt, synthetic construct
  source 1..21: mol_type = other RNA
ccataactacagtgcagctcc

SEQ ID NO: 6436 - RNA, 21 nt, synthetic construct
  source 1..21: mol_type = other RNA
ccatacactttaccagccaag

SEQ ID NO: 6437 - RNA, 21 nt, synthetic construct
  source 1..21: mol_type = other RNA
ccatacatgagacggcccaat

SEQ ID NO: 6438 - RNA, 21 nt, synthetic construct
  source 1..21: mol_type = other RNA
ccatacttttcacactcttcc

SEQ ID NO: 6439 - RNA, 21 nt, synthetic construct
  source 1..21: mol_type = other RNA
ccatagatatctgaagtgtgt

SEQ ID NO: 6440 - RNA, 21 nt, synthetic construct
  source 1..21: mol_type = other RNA
ccatatctgggttcctattct

SEQ ID NO: 6441 - RNA, 21 nt, synthetic construct
  source 1..21: mol_type = other RNA
ccatatgccttcactcgggtc

SEQ ID NO: 6442 - RNA, 21 nt, synthetic construct
  source 1..21: mol_type = other RNA
ccatcatatcaatgcaatgga

SEQ ID NO: 6443 - RNA, 21 nt, synthetic construct
  source 1..21: mol_type = other RNA
ccatccatacactttaccagc

SEQ ID NO: 6444 - RNA, 21 nt, synthetic construct
  source 1..21: mol_type = other RNA
ccatccatctcatgagtggga

SEQ ID NO: 6445 - RNA, 21 nt, synthetic construct
  source 1..21: mol_type = other RNA
ccatcggctgagactggggag

SEQ ID NO: 6446 - RNA, 21 nt, synthetic construct
  source 1..21: mol_type = other RNA
ccatctcatgagtgggataag

SEQ ID NO: 6447 - RNA, 21 nt, synthetic construct
  source 1..21: mol_type = other RNA
ccatctccctgcatattttgg

SEQ ID NO: 6448 - RNA, 21 nt, synthetic construct
  source 1..21: mol_type = other RNA
ccatgaacccttaccctgggc

SEQ ID NO: 6449 - RNA, 21 nt, synthetic construct
  source 1..21: mol_type = other RNA
ccatgaagtggccatccatct

SEQ ID NO: 6450 - RNA, 21 nt, synthetic construct
  source 1..21: mol_type = other RNA
ccatgagttggagccacggcc

SEQ ID NO: 6451 - RNA, 21 nt, synthetic construct
  source 1..21: mol_type = other RNA
ccatgatagaactgcttgtgt

SEQ ID NO: 6452 - RNA, 21 nt, synthetic construct
  source 1..21: mol_type = other RNA
ccatggcaaaaaagtgaaacg

SEQ ID NO: 6453 - RNA, 21 nt, synthetic construct
  source 1..21: mol_type = other RNA
ccatgggatttctgaggcaca

SEQ ID NO: 6454 - RNA, 21 nt, synthetic construct
  source 1..21: mol_type = other RNA
ccatgtccgtgaccacagact

SEQ ID NO: 6455 - RNA, 21 nt, synthetic construct
  source 1..21: mol_type = other RNA
ccatgtttggattgctcagat

SEQ ID NO: 6456 - RNA, 21 nt, synthetic construct
  source 1..21: mol_type = other RNA
ccatgttttggctcattcatg

SEQ ID NO: 6457 - RNA, 21 nt, synthetic construct
  source 1..21: mol_type = other RNA
ccattagaccaaatgtacatc

SEQ ID NO: 6458 - RNA, 21 nt, synthetic construct
  source 1..21: mol_type = other RNA
ccattagcatcacttaatttg

SEQ ID NO: 6459 - RNA, 21 nt, synthetic construct
  source 1..21: mol_type = other RNA
ccattagctgtgtgggaaagc

SEQ ID NO: 6460 - RNA, 21 nt, synthetic construct
  source 1..21: mol_type = other RNA
ccattgcattgatatgatgga

SEQ ID NO: 6461 - RNA, 21 nt, synthetic construct
  source 1..21: mol_type = other RNA
ccattggcactagtccagggt

SEQ ID NO: 6462 - RNA, 21 nt, synthetic construct
  source 1..21: mol_type = other RNA
ccattttggcttcccaaagag

SEQ ID NO: 6463 - RNA, 21 nt, synthetic construct
  source 1..21: mol_type = other RNA
ccatttttatagtccatgttt

SEQ ID NO: 6464 - RNA, 21 nt, synthetic construct
  source 1..21: mol_type = other RNA
cccaaagagccaagccatgtt

SEQ ID NO: 6465 - RNA, 21 nt, synthetic construct
  source 1..21: mol_type = other RNA
cccaataggaatcaccccacc

SEQ ID NO: 6466 - RNA, 21 nt, synthetic construct
  source 1..21: mol_type = other RNA
cccaatatccatcatatcaat

SEQ ID NO: 6467 - RNA, 21 nt, synthetic construct
  source 1..21: mol_type = other RNA
cccaatccagttagtccttat

SEQ ID NO: 6468 - RNA, 21 nt, synthetic construct
  source 1..21: mol_type = other RNA
cccaatctgagcaatccaaac

SEQ ID NO: 6469 - RNA, 21 nt, synthetic construct
  source 1..21: mol_type = other RNA
cccaatgtcaggatccagaaa

SEQ ID NO: 6470 - RNA, 21 nt, synthetic construct
  source 1..21: mol_type = other RNA
cccacacagctaatgggttat

SEQ ID NO: 6471 - RNA, 21 nt, synthetic construct
  source 1..21: mol_type = other RNA
cccaccaggatctccctcgtc

SEQ ID NO: 6472 - RNA, 21 nt, synthetic construct
  source 1..21: mol_type = other RNA
cccactcatgagatggatggc

SEQ ID NO: 6473 - RNA, 21 nt, synthetic construct
  source 1..21: mol_type = other RNA
cccacttacctgcgtttcatc

SEQ ID NO: 6474 - RNA, 21 nt, synthetic construct
  source 1..21: mol_type = other RNA
cccagactatgtgcctcagaa

SEQ ID NO: 6475 - RNA, 21 nt, synthetic construct
  source 1..21: mol_type = other RNA
cccagatatggggagcagttg

SEQ ID NO: 6476 - RNA, 21 nt, synthetic construct
  source 1..21: mol_type = other RNA
cccagcagcagcagagacccc

SEQ ID NO: 6477 - RNA, 21 nt, synthetic construct
  source 1..21: mol_type = other RNA
cccagcagcagcagccacatc

SEQ ID NO: 6478 - RNA, 21 nt, synthetic construct
  source 1..21: mol_type = other RNA
cccagcagccccagcctctac

SEQ ID NO: 6479 - RNA, 21 nt, synthetic construct
  source 1..21: mol_type = other RNA
cccagcctctacagaagcagc

SEQ ID NO: 6480 - RNA, 21 nt, synthetic construct
  source 1..21: mol_type = other RNA
cccagggtaagggttcatggg

SEQ ID NO: 6481 - RNA, 21 nt, synthetic construct
  source 1..21: mol_type = other RNA
cccagtctcagccgatggatc

SEQ ID NO: 6482 - RNA, 21 nt, synthetic construct
  source 1..21: mol_type = other RNA
cccatatctgggttcctattc

SEQ ID NO: 6483 - RNA, 21 nt, synthetic construct
  source 1..21: mol_type = other RNA
cccatccatacactttaccag

SEQ ID NO: 6484 - RNA, 21 nt, synthetic construct
  source 1..21: mol_type = other RNA
cccatgaacccttaccctggg

SEQ ID NO: 6485 - RNA, 21 nt, synthetic construct
  source 1..21: mol_type = other RNA
cccatgaagtggccatccatc

SEQ ID NO: 6486 - RNA, 21 nt, synthetic construct
  source 1..21: mol_type = other RNA
cccatgagttggagccacggc

SEQ ID NO: 6487 - RNA, 21 nt, synthetic construct
  source 1..21: mol_type = other RNA
cccatggcaaaaaagtgaaac

SEQ ID NO: 6488 - RNA, 21 nt, synthetic construct
  source 1..21: mol_type = other RNA
cccattagctgtgtgggaaag

SEQ ID NO: 6489 - RNA, 21 nt, synthetic construct
  source 1..21: mol_type = other RNA
ccccaatgtcaggatccagaa

SEQ ID NO: 6490 - RNA, 21 nt, synthetic construct
  source 1..21: mol_type = other RNA
ccccaccaggatctccctcgt

SEQ ID NO: 6491 - RNA, 21 nt, synthetic construct
  source 1..21: mol_type = other RNA
ccccagcagcagcagagaccc

SEQ ID NO: 6492 - RNA, 21 nt, synthetic construct
  source 1..21: mol_type = other RNA
ccccagcagcagcagccacat

SEQ ID NO: 6493 - RNA, 21 nt, synthetic construct
  source 1..21: mol_type = other RNA
ccccagcctctacagaagcag

SEQ ID NO: 6494 - RNA, 21 nt, synthetic construct
  source 1..21: mol_type = other RNA
ccccagtctcagccgatggat

SEQ ID NO: 6495 - RNA, 21 nt, synthetic construct
  source 1..21: mol_type = other RNA
ccccatatctgggttcctatt

SEQ ID NO: 6496 - RNA, 21 nt, synthetic construct
  source 1..21: mol_type = other RNA
cccccaatgtcaggatccaga

SEQ ID NO: 6497 - RNA, 21 nt, synthetic construct
  source 1..21: mol_type = other RNA
cccccttttgttggttacctc

SEQ ID NO: 6498 - RNA, 21 nt, synthetic construct
  source 1..21: mol_type = other RNA
cccctttaaagaatcccaata

SEQ ID NO: 6499 - RNA, 21 nt, synthetic construct
  source 1..21: mol_type = other RNA
ccccttttgttggttacctca

SEQ ID NO: 6500 - RNA, 21 nt, synthetic construct
  source 1..21: mol_type = other RNA
cccgagtgaaggcatatggag

SEQ ID NO: 6501 - RNA, 21 nt, synthetic construct
  source 1..21: mol_type = other RNA
cccggagctgcactgtagtta

SEQ ID NO: 6502 - RNA, 21 nt, synthetic construct
  source 1..21: mol_type = other RNA
cccgtgagaaagaggaagagt

SEQ ID NO: 6503 - RNA, 21 nt, synthetic construct
  source 1..21: mol_type = other RNA
cccgtttcacttttttgccat

SEQ ID NO: 6504 - RNA, 21 nt, synthetic construct
  source 1..21: mol_type = other RNA
ccctacatgatgtacatttgg

SEQ ID NO: 6505 - RNA, 21 nt, synthetic construct
  source 1..21: mol_type = other RNA
ccctatgaacttctattccac

SEQ ID NO: 6506 - RNA, 21 nt, synthetic construct
  source 1..21: mol_type = other RNA
ccctcagacagagtctgtcaa

SEQ ID NO: 6507 - RNA, 21 nt, synthetic construct
  source 1..21: mol_type = other RNA
ccctcgtcttttaccagcata

SEQ ID NO: 6508 - RNA, 21 nt, synthetic construct
  source 1..21: mol_type = other RNA
ccctctgtctaagctcagtct

SEQ ID NO: 6509 - RNA, 21 nt, synthetic construct
  source 1..21: mol_type = other RNA
ccctgcatattttggtttcca

SEQ ID NO: 6510 - RNA, 21 nt, synthetic construct
  source 1..21: mol_type = other RNA
ccctgcatctccaaaacaagg

SEQ ID NO: 6511 - RNA, 21 nt, synthetic construct
  source 1..21: mol_type = other RNA
ccctggactagtgccaatggc

SEQ ID NO: 6512 - RNA, 21 nt, synthetic construct
  source 1..21: mol_type = other RNA
ccctgggcttttgaatcagaa

SEQ ID NO: 6513 - RNA, 21 nt, synthetic construct
  source 1..21: mol_type = other RNA
ccctgtccacagaacttttgc

SEQ ID NO: 6514 - RNA, 21 nt, synthetic construct
  source 1..21: mol_type = other RNA
ccctgtgacccgagtgaaggc

SEQ ID NO: 6515 - RNA, 21 nt, synthetic construct
  source 1..21: mol_type = other RNA
cccttaccctgggcttttgaa

SEQ ID NO: 6516 - RNA, 21 nt, synthetic construct
  source 1..21: mol_type = other RNA
ccctttaaagaatcccaatag

SEQ ID NO: 6517 - RNA, 21 nt, synthetic construct
  source 1..21: mol_type = other RNA
cccttttgttggttacctcac

SEQ ID NO: 6518 - RNA, 21 nt, synthetic construct
  source 1..21: mol_type = other RNA
ccgaaaggaccatgtccgtga

SEQ ID NO: 6519 - RNA, 21 nt, synthetic construct
  source 1..21: mol_type = other RNA
ccgagtgaaggcatatggaga

SEQ ID NO: 6520 - RNA, 21 nt, synthetic construct
  source 1..21: mol_type = other RNA
ccgatggatctgtataggtat

SEQ ID NO: 6521 - RNA, 21 nt, synthetic construct
  source 1..21: mol_type = other RNA
ccggagctgcactgtagttat

SEQ ID NO: 6522 - RNA, 21 nt, synthetic construct
  source 1..21: mol_type = other RNA
ccgggcatgttcaacagctct

SEQ ID NO: 6523 - RNA, 21 nt, synthetic construct
  source 1..21: mol_type = other RNA
ccgtctcatgtatggattggt

SEQ ID NO: 6524 - RNA, 21 nt, synthetic construct
  source 1..21: mol_type = other RNA
ccgtgaccacagactccacag

SEQ ID NO: 6525 - RNA, 21 nt, synthetic construct
  source 1..21: mol_type = other RNA
ccgtgagaaagaggaagagtg

SEQ ID NO: 6526 - RNA, 21 nt, synthetic construct
  source 1..21: mol_type = other RNA
ccgtggctccaactcatgggt

SEQ ID NO: 6527 - RNA, 21 nt, synthetic construct
  source 1..21: mol_type = other RNA
ccgtttcacttttttgccatg

SEQ ID NO: 6528 - RNA, 21 nt, synthetic construct
  source 1..21: mol_type = other RNA
cctacatgatgtacatttggt

SEQ ID NO: 6529 - RNA, 21 nt, synthetic construct
  source 1..21: mol_type = other RNA
cctatacagatccatcggctg

SEQ ID NO: 6530 - RNA, 21 nt, synthetic construct
  source 1..21: mol_type = other RNA
cctatcagtggacaactgctc

SEQ ID NO: 6531 - RNA, 21 nt, synthetic construct
  source 1..21: mol_type = other RNA
cctatgaacttctattccacc

SEQ ID NO: 6532 - RNA, 21 nt, synthetic construct
  source 1..21: mol_type = other RNA
cctattctccccagtctcagc

SEQ ID NO: 6533 - RNA, 21 nt, synthetic construct
  source 1..21: mol_type = other RNA
cctattgggattctttaaagg

SEQ ID NO: 6534 - RNA, 21 nt, synthetic construct
  source 1..21: mol_type = other RNA
cctcagaaatcccatggcaaa

SEQ ID NO: 6535 - RNA, 21 nt, synthetic construct
  source 1..21: mol_type = other RNA
cctcagacagagtctgtcaac

SEQ ID NO: 6536 - RNA, 21 nt, synthetic construct
  source 1..21: mol_type = other RNA
cctcatcgttgtcctctgcac

SEQ ID NO: 6537 - RNA, 21 nt, synthetic construct
  source 1..21: mol_type = other RNA
cctcatctcaagctgcaggtt

SEQ ID NO: 6538 - RNA, 21 nt, synthetic construct
  source 1..21: mol_type = other RNA
cctccttatcccactcatgag

SEQ ID NO: 6539 - RNA, 21 nt, synthetic construct
  source 1..21: mol_type = other RNA
cctccttggacacaagcagtt

SEQ ID NO: 6540 - RNA, 21 nt, synthetic construct
  source 1..21: mol_type = other RNA
cctcgtcttttaccagcataa

SEQ ID NO: 6541 - RNA, 21 nt, synthetic construct
  source 1..21: mol_type = other RNA
cctctacagaagcagccacca

SEQ ID NO: 6542 - RNA, 21 nt, synthetic construct
  source 1..21: mol_type = other RNA
cctctagattaccacccaatc

SEQ ID NO: 6543 - RNA, 21 nt, synthetic construct
  source 1..21: mol_type = other RNA
cctctgcaccagaagccacac

SEQ ID NO: 6544 - RNA, 21 nt, synthetic construct
  source 1..21: mol_type = other RNA
cctctgtctaagctcagtcta

SEQ ID NO: 6545 - RNA, 21 nt, synthetic construct
  source 1..21: mol_type = other RNA
cctctttctcacgggcttttt

SEQ ID NO: 6546 - RNA, 21 nt, synthetic construct
  source 1..21: mol_type = other RNA
cctgaaagtcgcaaaagttct

SEQ ID NO: 6547 - RNA, 21 nt, synthetic construct
  source 1..21: mol_type = other RNA
cctgacattgggggagtggcc

SEQ ID NO: 6548 - RNA, 21 nt, synthetic construct
  source 1..21: mol_type = other RNA
cctgaccattagcatcactta

SEQ ID NO: 6549 - RNA, 21 nt, synthetic construct
  source 1..21: mol_type = other RNA
cctgcagcttgagatgaggtg

SEQ ID NO: 6550 - RNA, 21 nt, synthetic construct
  source 1..21: mol_type = other RNA
cctgcatattttggtttccat

SEQ ID NO: 6551 - RNA, 21 nt, synthetic construct
  source 1..21: mol_type = other RNA
cctgcatctccaaaacaagga

SEQ ID NO: 6552 - RNA, 21 nt, synthetic construct
  source 1..21: mol_type = other RNA
cctgcgtttcatcaagtctct

SEQ ID NO: 6553 - RNA, 21 nt, synthetic construct
  source 1..21: mol_type = other RNA
cctgctgagccacatgaaact

SEQ ID NO: 6554 - RNA, 21 nt, synthetic construct
  source 1..21: mol_type = other RNA
cctggactagtgccaatggct

SEQ ID NO: 6555 - RNA, 21 nt, synthetic construct
  source 1..21: mol_type = other RNA
cctgggcttttgaatcagaat

SEQ ID NO: 6556 - RNA, 21 nt, synthetic construct
  source 1..21: mol_type = other RNA
cctggtggggtgattcctatt

SEQ ID NO: 6557 - RNA, 21 nt, synthetic construct
  source 1..21: mol_type = other RNA
cctgtccacagaacttttgcg

SEQ ID NO: 6558 - RNA, 21 nt, synthetic construct
  source 1..21: mol_type = other RNA
cctgtgacccgagtgaaggca

SEQ ID NO: 6559 - RNA, 21 nt, synthetic construct
  source 1..21: mol_type = other RNA
cctgtttctgttctctcttac

SEQ ID NO: 6560 - RNA, 21 nt, synthetic construct
  source 1..21: mol_type = other RNA
ccttacaacagatatatatga

SEQ ID NO: 6561 - RNA, 21 nt, synthetic construct
  source 1..21: mol_type = other RNA
ccttaccctgggcttttgaat

SEQ ID NO: 6562 - RNA, 21 nt, synthetic construct
  source 1..21: mol_type = other RNA
ccttatccaaactcttcacac

SEQ ID NO: 6563 - RNA, 21 nt, synthetic construct
  source 1..21: mol_type = other RNA
ccttatcccactcatgagatg

SEQ ID NO: 6564 - RNA, 21 nt, synthetic construct
  source 1..21: mol_type = other RNA
ccttcactcgggtcacagggc

SEQ ID NO: 6565 - RNA, 21 nt, synthetic construct
  source 1..21: mol_type = other RNA
ccttctcacataatccataac

SEQ ID NO: 6566 - RNA, 21 nt, synthetic construct
  source 1..21: mol_type = other RNA
ccttggacacaagcagttcta

SEQ ID NO: 6567 - RNA, 21 nt, synthetic construct
  source 1..21: mol_type = other RNA
ccttggctggtaaagtgtatg

SEQ ID NO: 6568 - RNA, 21 nt, synthetic construct
  source 1..21: mol_type = other RNA
ccttgttttggagatgcaggg

SEQ ID NO: 6569 - RNA, 21 nt, synthetic construct
  source 1..21: mol_type = other RNA
cctttaaagaatcccaatagg

SEQ ID NO: 6570 - RNA, 21 nt, synthetic construct
  source 1..21: mol_type = other RNA
cctttcggcaagagacttgat

SEQ ID NO: 6571 - RNA, 21 nt, synthetic construct
  source 1..21: mol_type = other RNA
ccttttgttggttacctcact

SEQ ID NO: 6572 - RNA, 21 nt, synthetic construct
  source 1..21: mol_type = other RNA
cgaaaggaccatgtccgtgac

SEQ ID NO: 6573 - RNA, 21 nt, synthetic construct
  source 1..21: mol_type = other RNA
cgactttcaggaccagtcatg

SEQ ID NO: 6574 - RNA, 21 nt, synthetic construct
  source 1..21: mol_type = other RNA
cgagcagagctttctggatcc

SEQ ID NO: 6575 - RNA, 21 nt, synthetic construct
  source 1..21: mol_type = other RNA
cgagggagatcctggtggggt

SEQ ID NO: 6576 - RNA, 21 nt, synthetic construct
  source 1..21: mol_type = other RNA
cgagtgaaggcatatggagat

SEQ ID NO: 6577 - RNA, 21 nt, synthetic construct
  source 1..21: mol_type = other RNA
cgatgaggtctggtcagacag

SEQ ID NO: 6578 - RNA, 21 nt, synthetic construct
  source 1..21: mol_type = other RNA
cgatggatctgtataggtatc

SEQ ID NO: 6579 - RNA, 21 nt, synthetic construct
  source 1..21: mol_type = other RNA
cgcaaaagttctgtggacagg

SEQ ID NO: 6580 - RNA, 21 nt, synthetic construct
  source 1..21: mol_type = other RNA
cgcaggtaagtgggctctgaa

SEQ ID NO: 6581 - RNA, 21 nt, synthetic construct
  source 1..21: mol_type = other RNA
cgctgtctgaccagacctcat

SEQ ID NO: 6582 - RNA, 21 nt, synthetic construct
  source 1..21: mol_type = other RNA
cgctttgcacactcaatgaga

SEQ ID NO: 6583 - RNA, 21 nt, synthetic construct
  source 1..21: mol_type = other RNA
cggacatggtcctttcggcaa

SEQ ID NO: 6584 - RNA, 21 nt, synthetic construct
  source 1..21: mol_type = other RNA
cggagctgcactgtagttatg

SEQ ID NO: 6585 - RNA, 21 nt, synthetic construct
  source 1..21: mol_type = other RNA
cggcaagagacttgatgaaac

SEQ ID NO: 6586 - RNA, 21 nt, synthetic construct
  source 1..21: mol_type = other RNA
cggccactcccccaatgtcag

SEQ ID NO: 6587 - RNA, 21 nt, synthetic construct
  source 1..21: mol_type = other RNA
cggcccaatccagttagtcct

SEQ ID NO: 6588 - RNA, 21 nt, synthetic construct
  source 1..21: mol_type = other RNA
cggctgagactggggagaata

SEQ ID NO: 6589 - RNA, 21 nt, synthetic construct
  source 1..21: mol_type = other RNA
cgggagcctgctgagccacat

SEQ ID NO: 6590 - RNA, 21 nt, synthetic construct
  source 1..21: mol_type = other RNA
cgggcatgttcaacagctctc

SEQ ID NO: 6591 - RNA, 21 nt, synthetic construct
  source 1..21: mol_type = other RNA
cgggctttttcagccattttg

SEQ ID NO: 6592 - RNA, 21 nt, synthetic construct
  source 1..21: mol_type = other RNA
cgggtcacagggccttacaac

SEQ ID NO: 6593 - RNA, 21 nt, synthetic construct
  source 1..21: mol_type = other RNA
cgtctcatgtatggattggtg

SEQ ID NO: 6594 - RNA, 21 nt, synthetic construct
  source 1..21: mol_type = other RNA
cgtcttttaccagcataagag

SEQ ID NO: 6595 - RNA, 21 nt, synthetic construct
  source 1..21: mol_type = other RNA
cgtgaccacagactccacagt

SEQ ID NO: 6596 - RNA, 21 nt, synthetic construct
  source 1..21: mol_type = other RNA
cgtgagaaagaggaagagtgt

SEQ ID NO: 6597 - RNA, 21 nt, synthetic construct
  source 1..21: mol_type = other RNA
cgtgagctgcatgccacaacc

SEQ ID NO: 6598 - RNA, 21 nt, synthetic construct
  source 1..21: mol_type = other RNA
cgtggctccaactcatgggtc

SEQ ID NO: 6599 - RNA, 21 nt, synthetic construct
  source 1..21: mol_type = other RNA
cgttgtcctctgcaccagaag

SEQ ID NO: 6600 - RNA, 21 nt, synthetic construct
  source 1..21: mol_type = other RNA
cgtttcacttttttgccatgg

SEQ ID NO: 6601 - RNA, 21 nt, synthetic construct
  source 1..21: mol_type = other RNA
cgtttcatcaagtctcttgcc

SEQ ID NO: 6602 - RNA, 21 nt, synthetic construct
  source 1..21: mol_type = other RNA
ctaaatacttaggttatggaa

SEQ ID NO: 6603 - RNA, 21 nt, synthetic construct
  source 1..21: mol_type = other RNA
ctaactggattgggccgtctc

SEQ ID NO: 6604 - RNA, 21 nt, synthetic construct
  source 1..21: mol_type = other RNA
ctaagctcagtctaccaccca

SEQ ID NO: 6605 - RNA, 21 nt, synthetic construct
  source 1..21: mol_type = other RNA
ctaatcccatgaacccttacc

SEQ ID NO: 6606 - RNA, 21 nt, synthetic construct
  source 1..21: mol_type = other RNA
ctaatgggttatcaaagatgc

SEQ ID NO: 6607 - RNA, 21 nt, synthetic construct
  source 1..21: mol_type = other RNA
ctaatggtacaactgctgaaa

SEQ ID NO: 6608 - RNA, 21 nt, synthetic construct
  source 1..21: mol_type = other RNA
ctaatggtcaggaaaagcagc

SEQ ID NO: 6609 - RNA, 21 nt, synthetic construct
  source 1..21: mol_type = other RNA
ctacagaagcagccaccacag

SEQ ID NO: 6610 - RNA, 21 nt, synthetic construct
  source 1..21: mol_type = other RNA
ctacagtgcagctccgggcat

SEQ ID NO: 6611 - RNA, 21 nt, synthetic construct
  source 1..21: mol_type = other RNA
ctacatctccatatgccttca

SEQ ID NO: 6612 - RNA, 21 nt, synthetic construct
  source 1..21: mol_type = other RNA
ctacatgatgtacatttggtc

SEQ ID NO: 6613 - RNA, 21 nt, synthetic construct
  source 1..21: mol_type = other RNA
ctaccacccatccatacactt

SEQ ID NO: 6614 - RNA, 21 nt, synthetic construct
  source 1..21: mol_type = other RNA
ctagaggtggctcccatgaag

SEQ ID NO: 6615 - RNA, 21 nt, synthetic construct
  source 1..21: mol_type = other RNA
ctagattaccacccaatctga

SEQ ID NO: 6616 - RNA, 21 nt, synthetic construct
  source 1..21: mol_type = other RNA
ctagtccagggtgtggcttct

SEQ ID NO: 6617 - RNA, 21 nt, synthetic construct
  source 1..21: mol_type = other RNA
ctagtgccaatggctgctttt

SEQ ID NO: 6618 - RNA, 21 nt, synthetic construct
  source 1..21: mol_type = other RNA
ctataaaaatggtgaacatca

SEQ ID NO: 6619 - RNA, 21 nt, synthetic construct
  source 1..21: mol_type = other RNA
ctatacagatccatcggctga

SEQ ID NO: 6620 - RNA, 21 nt, synthetic construct
  source 1..21: mol_type = other RNA
ctatcagtggacaactgctcc

SEQ ID NO: 6621 - RNA, 21 nt, synthetic construct
  source 1..21: mol_type = other RNA
ctatcatggttaagagctgga

SEQ ID NO: 6622 - RNA, 21 nt, synthetic construct
  source 1..21: mol_type = other RNA
ctatgaacttctattccacct

SEQ ID NO: 6623 - RNA, 21 nt, synthetic construct
  source 1..21: mol_type = other RNA
ctatggaagcaccagccctat

SEQ ID NO: 6624 - RNA, 21 nt, synthetic construct
  source 1..21: mol_type = other RNA
ctatgtgcctcagaaatccca

SEQ ID NO: 6625 - RNA, 21 nt, synthetic construct
  source 1..21: mol_type = other RNA
ctattccacctcatctcaagc

SEQ ID NO: 6626 - RNA, 21 nt, synthetic construct
  source 1..21: mol_type = other RNA
ctattctccccagtctcagcc

SEQ ID NO: 6627 - RNA, 21 nt, synthetic construct
  source 1..21: mol_type = other RNA
ctattgggattctttaaaggg

SEQ ID NO: 6628 - RNA, 21 nt, synthetic construct
  source 1..21: mol_type = other RNA
ctatttccaaaccttggctgg

SEQ ID NO: 6629 - RNA, 21 nt, synthetic construct
  source 1..21: mol_type = other RNA
ctcaagctgcaggttcatatt

SEQ ID NO: 6630 - RNA, 21 nt, synthetic construct
  source 1..21: mol_type = other RNA
ctcaatgagaattgacccatg

SEQ ID NO: 6631 - RNA, 21 nt, synthetic construct
  source 1..21: mol_type = other RNA
ctcacataatccataactaca

SEQ ID NO: 6632 - RNA, 21 nt, synthetic construct
  source 1..21: mol_type = other RNA
ctcacgctttgcacactcaat

SEQ ID NO: 6633 - RNA, 21 nt, synthetic construct
  source 1..21: mol_type = other RNA
ctcacgggctttttcagccat

SEQ ID NO: 6634 - RNA, 21 nt, synthetic construct
  source 1..21: mol_type = other RNA
ctcagaaatcccatggcaaaa

SEQ ID NO: 6635 - RNA, 21 nt, synthetic construct
  source 1..21: mol_type = other RNA
ctcagacagagtctgtcaact

SEQ ID NO: 6636 - RNA, 21 nt, synthetic construct
  source 1..21: mol_type = other RNA
ctcagattgggtggtaatcta

SEQ ID NO: 6637 - RNA, 21 nt, synthetic construct
  source 1..21: mol_type = other RNA
ctcagcaggctcccgtttcac

SEQ ID NO: 6638 - RNA, 21 nt, synthetic construct
  source 1..21: mol_type = other RNA
ctcagccgatggatctgtata

SEQ ID NO: 6639 - RNA, 21 nt, synthetic construct
  source 1..21: mol_type = other RNA
ctcagtctaccacccatccat

SEQ ID NO: 6640 - RNA, 21 nt, synthetic construct
  source 1..21: mol_type = other RNA
ctcatcgttgtcctctgcacc

SEQ ID NO: 6641 - RNA, 21 nt, synthetic construct
  source 1..21: mol_type = other RNA
ctcatctcaagctgcaggttc

SEQ ID NO: 6642 - RNA, 21 nt, synthetic construct
  source 1..21: mol_type = other RNA
ctcatgagatggatggccact

SEQ ID NO: 6643 - RNA, 21 nt, synthetic construct
  source 1..21: mol_type = other RNA
ctcatgagtgggataaggagg

SEQ ID NO: 6644 - RNA, 21 nt, synthetic construct
  source 1..21: mol_type = other RNA
ctcatgggtcaattctcattg

SEQ ID NO: 6645 - RNA, 21 nt, synthetic construct
  source 1..21: mol_type = other RNA
ctcatgtatggattggtggat

SEQ ID NO: 6646 - RNA, 21 nt, synthetic construct
  source 1..21: mol_type = other RNA
ctcattcatgctcttatgctg

SEQ ID NO: 6647 - RNA, 21 nt, synthetic construct
  source 1..21: mol_type = other RNA
ctcattgagtgtgcaaagcgt

SEQ ID NO: 6648 - RNA, 21 nt, synthetic construct
  source 1..21: mol_type = other RNA
ctccaaaacaaggagaatgac

SEQ ID NO: 6649 - RNA, 21 nt, synthetic construct
  source 1..21: mol_type = other RNA
ctccaactcatgggtcaattc

SEQ ID NO: 6650 - RNA, 21 nt, synthetic construct
  source 1..21: mol_type = other RNA
ctccacagtaactacatctcc

SEQ ID NO: 6651 - RNA, 21 nt, synthetic construct
  source 1..21: mol_type = other RNA
ctccatatgccttcactcggg

SEQ ID NO: 6652 - RNA, 21 nt, synthetic construct
  source 1..21: mol_type = other RNA
ctcccatgaagtggccatcca

SEQ ID NO: 6653 - RNA, 21 nt, synthetic construct
  source 1..21: mol_type = other RNA
ctccccagtctcagccgatgg

SEQ ID NO: 6654 - RNA, 21 nt, synthetic construct
  source 1..21: mol_type = other RNA
ctccccatatctgggttccta

SEQ ID NO: 6655 - RNA, 21 nt, synthetic construct
  source 1..21: mol_type = other RNA
ctcccccaatgtcaggatcca

SEQ ID NO: 6656 - RNA, 21 nt, synthetic construct
  source 1..21: mol_type = other RNA
ctcccgtttcacttttttgcc

SEQ ID NO: 6657 - RNA, 21 nt, synthetic construct
  source 1..21: mol_type = other RNA
ctccctcgtcttttaccagca

SEQ ID NO: 6658 - RNA, 21 nt, synthetic construct
  source 1..21: mol_type = other RNA
ctccctgcatattttggtttc

SEQ ID NO: 6659 - RNA, 21 nt, synthetic construct
  source 1..21: mol_type = other RNA
ctccgggcatgttcaacagct

SEQ ID NO: 6660 - RNA, 21 nt, synthetic construct
  source 1..21: mol_type = other RNA
ctccttatcccactcatgaga

SEQ ID NO: 6661 - RNA, 21 nt, synthetic construct
  source 1..21: mol_type = other RNA
ctccttggacacaagcagttc

SEQ ID NO: 6662 - RNA, 21 nt, synthetic construct
  source 1..21: mol_type = other RNA
ctccttgttttggagatgcag

SEQ ID NO: 6663 - RNA, 21 nt, synthetic construct
  source 1..21: mol_type = other RNA
ctcgctgtctgaccagacctc

SEQ ID NO: 6664 - RNA, 21 nt, synthetic construct
  source 1..21: mol_type = other RNA
ctcgggtcacagggccttaca

SEQ ID NO: 6665 - RNA, 21 nt, synthetic construct
  source 1..21: mol_type = other RNA
ctcgtcttttaccagcataag

SEQ ID NO: 6666 - RNA, 21 nt, synthetic construct
  source 1..21: mol_type = other RNA
ctctacagaagcagccaccac

SEQ ID NO: 6667 - RNA, 21 nt, synthetic construct
  source 1..21: mol_type = other RNA
ctctagattaccacccaatct

SEQ ID NO: 6668 - RNA, 21 nt, synthetic construct
  source 1..21: mol_type = other RNA
ctctcttaccctgtccacaga

SEQ ID NO: 6669 - RNA, 21 nt, synthetic construct
  source 1..21: mol_type = other RNA
ctctcttcatgccctgcatct

SEQ ID NO: 6670 - RNA, 21 nt, synthetic construct
  source 1..21: mol_type = other RNA
ctctgaagtttcatgtggctc

SEQ ID NO: 6671 - RNA, 21 nt, synthetic construct
  source 1..21: mol_type = other RNA
ctctgcaccagaagccacacc

SEQ ID NO: 6672 - RNA, 21 nt, synthetic construct
  source 1..21: mol_type = other RNA
ctctgctcgctgtctgaccag

SEQ ID NO: 6673 - RNA, 21 nt, synthetic construct
  source 1..21: mol_type = other RNA
ctctgctgctgctggggctgt

SEQ ID NO: 6674 - RNA, 21 nt, synthetic construct
  source 1..21: mol_type = other RNA
ctctggctatttccaaacctt

SEQ ID NO: 6675 - RNA, 21 nt, synthetic construct
  source 1..21: mol_type = other RNA
ctctgtctaagctcagtctac

SEQ ID NO: 6676 - RNA, 21 nt, synthetic construct
  source 1..21: mol_type = other RNA
ctctgtctgagggtgatgtgg

SEQ ID NO: 6677 - RNA, 21 nt, synthetic construct
  source 1..21: mol_type = other RNA
ctcttaaccatgatagaactg

SEQ ID NO: 6678 - RNA, 21 nt, synthetic construct
  source 1..21: mol_type = other RNA
ctcttaccctgtccacagaac

SEQ ID NO: 6679 - RNA, 21 nt, synthetic construct
  source 1..21: mol_type = other RNA
ctcttatgctggtaaaagacg

SEQ ID NO: 6680 - RNA, 21 nt, synthetic construct
  source 1..21: mol_type = other RNA
ctcttattctgcttctggatc

SEQ ID NO: 6681 - RNA, 21 nt, synthetic construct
  source 1..21: mol_type = other RNA
ctcttcacacacttcagatat

SEQ ID NO: 6682 - RNA, 21 nt, synthetic construct
  source 1..21: mol_type = other RNA
ctcttcatgccctgcatctcc

SEQ ID NO: 6683 - RNA, 21 nt, synthetic construct
  source 1..21: mol_type = other RNA
ctcttcctctttctcacgggc

SEQ ID NO: 6684 - RNA, 21 nt, synthetic construct
  source 1..21: mol_type = other RNA
ctcttgccgaaaggaccatgt

SEQ ID NO: 6685 - RNA, 21 nt, synthetic construct
  source 1..21: mol_type = other RNA
ctctttctcacgggctttttc

SEQ ID NO: 6686 - RNA, 21 nt, synthetic construct
  source 1..21: mol_type = other RNA
ctctttgggaagccaaaatgg

SEQ ID NO: 6687 - RNA, 21 nt, synthetic construct
  source 1..21: mol_type = other RNA
ctgaaaaagcccgtgagaaag

SEQ ID NO: 6688 - RNA, 21 nt, synthetic construct
  source 1..21: mol_type = other RNA
ctgaaaccatctccctgcata

SEQ ID NO: 6689 - RNA, 21 nt, synthetic construct
  source 1..21: mol_type = other RNA
ctgaaagtcgcaaaagttctg

SEQ ID NO: 6690 - RNA, 21 nt, synthetic construct
  source 1..21: mol_type = other RNA
ctgaagtgtgtgaagagtttg

SEQ ID NO: 6691 - RNA, 21 nt, synthetic construct
  source 1..21: mol_type = other RNA
ctgaagtttcatgtggctcag

SEQ ID NO: 6692 - RNA, 21 nt, synthetic construct
  source 1..21: mol_type = other RNA
ctgacattgggggagtggccg

SEQ ID NO: 6693 - RNA, 21 nt, synthetic construct
  source 1..21: mol_type = other RNA
ctgaccagacctcatcgttgt

SEQ ID NO: 6694 - RNA, 21 nt, synthetic construct
  source 1..21: mol_type = other RNA
ctgaccattagcatcacttaa

SEQ ID NO: 6695 - RNA, 21 nt, synthetic construct
  source 1..21: mol_type = other RNA
ctgagactggggagaatagga

SEQ ID NO: 6696 - RNA, 21 nt, synthetic construct
  source 1..21: mol_type = other RNA
ctgagcaatccaaacatggac

SEQ ID NO: 6697 - RNA, 21 nt, synthetic construct
  source 1..21: mol_type = other RNA
ctgagccacatgaaacttcag

SEQ ID NO: 6698 - RNA, 21 nt, synthetic construct
  source 1..21: mol_type = other RNA
ctgagcttagacagagggtct

SEQ ID NO: 6699 - RNA, 21 nt, synthetic construct
  source 1..21: mol_type = other RNA
ctgaggcacatagtctgggcc

SEQ ID NO: 6700 - RNA, 21 nt, synthetic construct
  source 1..21: mol_type = other RNA
ctgagggtgatgtggctgctg

SEQ ID NO: 6701 - RNA, 21 nt, synthetic construct
  source 1..21: mol_type = other RNA
ctgataggtttccattgcatt

SEQ ID NO: 6702 - RNA, 21 nt, synthetic construct
  source 1..21: mol_type = other RNA
ctgattcaaaagcccagggta

SEQ ID NO: 6703 - RNA, 21 nt, synthetic construct
  source 1..21: mol_type = other RNA
ctgcaccagaagccacaccct

SEQ ID NO: 6704 - RNA, 21 nt, synthetic construct
  source 1..21: mol_type = other RNA
ctgcactgtagttatggatta

SEQ ID NO: 6705 - RNA, 21 nt, synthetic construct
  source 1..21: mol_type = other RNA
ctgcagcttgagatgaggtgg

SEQ ID NO: 6706 - RNA, 21 nt, synthetic construct
  source 1..21: mol_type = other RNA
ctgcaggttcatatttgaatt

SEQ ID NO: 6707 - RNA, 21 nt, synthetic construct
  source 1..21: mol_type = other RNA
ctgcatattttggtttccata

SEQ ID NO: 6708 - RNA, 21 nt, synthetic construct
  source 1..21: mol_type = other RNA
ctgcatctccaaaacaaggag

SEQ ID NO: 6709 - RNA, 21 nt, synthetic construct
  source 1..21: mol_type = other RNA
ctgcatgactggtcctgaaag

SEQ ID NO: 6710 - RNA, 21 nt, synthetic construct
  source 1..21: mol_type = other RNA
ctgcatgccacaaccccttta

SEQ ID NO: 6711 - RNA, 21 nt, synthetic construct
  source 1..21: mol_type = other RNA
ctgcgtttcatcaagtctctt

SEQ ID NO: 6712 - RNA, 21 nt, synthetic construct
  source 1..21: mol_type = other RNA
ctgctccccatatctgggttc

SEQ ID NO: 6713 - RNA, 21 nt, synthetic construct
  source 1..21: mol_type = other RNA
ctgctcgctgtctgaccagac

SEQ ID NO: 6714 - RNA, 21 nt, synthetic construct
  source 1..21: mol_type = other RNA
ctgctgaaaccatctccctgc

SEQ ID NO: 6715 - RNA, 21 nt, synthetic construct
  source 1..21: mol_type = other RNA
ctgctgagccacatgaaactt

SEQ ID NO: 6716 - RNA, 21 nt, synthetic construct
  source 1..21: mol_type = other RNA
ctgctgcatgactggtcctga

SEQ ID NO: 6717 - RNA, 21 nt, synthetic construct
  source 1..21: mol_type = other RNA
ctgctgctgctggggctgtgg

SEQ ID NO: 6718 - RNA, 21 nt, synthetic construct
  source 1..21: mol_type = other RNA
ctgctgctgctggggtctctg

SEQ ID NO: 6719 - RNA, 21 nt, synthetic construct
  source 1..21: mol_type = other RNA
ctgctgctggggctgtggtgg

SEQ ID NO: 6720 - RNA, 21 nt, synthetic construct
  source 1..21: mol_type = other RNA
ctgctgctggggtctctgctg

SEQ ID NO: 6721 - RNA, 21 nt, synthetic construct
  source 1..21: mol_type = other RNA
ctgctgggactgctgcatgac

SEQ ID NO: 6722 - RNA, 21 nt, synthetic construct
  source 1..21: mol_type = other RNA
ctgctggggctgtggtggctg

SEQ ID NO: 6723 - RNA, 21 nt, synthetic construct
  source 1..21: mol_type = other RNA
ctgctggggtctctgctgctg

SEQ ID NO: 6724 - RNA, 21 nt, synthetic construct
  source 1..21: mol_type = other RNA
ctgcttctggatccaccaatc

SEQ ID NO: 6725 - RNA, 21 nt, synthetic construct
  source 1..21: mol_type = other RNA
ctgcttctgtagaggctgggg

SEQ ID NO: 6726 - RNA, 21 nt, synthetic construct
  source 1..21: mol_type = other RNA
ctgcttgtgtccaaggaggct

SEQ ID NO: 6727 - RNA, 21 nt, synthetic construct
  source 1..21: mol_type = other RNA
ctgcttttcctgaccattagc

SEQ ID NO: 6728 - RNA, 21 nt, synthetic construct
  source 1..21: mol_type = other RNA
ctggaagcatctttgataacc

SEQ ID NO: 6729 - RNA, 21 nt, synthetic construct
  source 1..21: mol_type = other RNA
ctggactagtgccaatggctg

SEQ ID NO: 6730 - RNA, 21 nt, synthetic construct
  source 1..21: mol_type = other RNA
ctggatccaccaatccataca

SEQ ID NO: 6731 - RNA, 21 nt, synthetic construct
  source 1..21: mol_type = other RNA
ctggatcctgacattggggga

SEQ ID NO: 6732 - RNA, 21 nt, synthetic construct
  source 1..21: mol_type = other RNA
ctggattgggccgtctcatgt

SEQ ID NO: 6733 - RNA, 21 nt, synthetic construct
  source 1..21: mol_type = other RNA
ctggctatttccaaaccttgg

SEQ ID NO: 6734 - RNA, 21 nt, synthetic construct
  source 1..21: mol_type = other RNA
ctgggactgctgcatgactgg

SEQ ID NO: 6735 - RNA, 21 nt, synthetic construct
  source 1..21: mol_type = other RNA
ctgggccatacttttcacact

SEQ ID NO: 6736 - RNA, 21 nt, synthetic construct
  source 1..21: mol_type = other RNA
ctgggcttttgaatcagaata

SEQ ID NO: 6737 - RNA, 21 nt, synthetic construct
  source 1..21: mol_type = other RNA
ctggggagaataggaacccag

SEQ ID NO: 6738 - RNA, 21 nt, synthetic construct
  source 1..21: mol_type = other RNA
ctggggctgctgggactgctg

SEQ ID NO: 6739 - RNA, 21 nt, synthetic construct
  source 1..21: mol_type = other RNA
ctggggctgtggtggctgctt

SEQ ID NO: 6740 - RNA, 21 nt, synthetic construct
  source 1..21: mol_type = other RNA
ctggggtctctgctgctgctg

SEQ ID NO: 6741 - RNA, 21 nt, synthetic construct
  source 1..21: mol_type = other RNA
ctgggttcctattctccccag

SEQ ID NO: 6742 - RNA, 21 nt, synthetic construct
  source 1..21: mol_type = other RNA
ctggtaaaagacgagggagat

SEQ ID NO: 6743 - RNA, 21 nt, synthetic construct
  source 1..21: mol_type = other RNA
ctggtaaagtgtatggatggg

SEQ ID NO: 6744 - RNA, 21 nt, synthetic construct
  source 1..21: mol_type = other RNA
ctggtcagacagcgagcagag

SEQ ID NO: 6745 - RNA, 21 nt, synthetic construct
  source 1..21: mol_type = other RNA
ctggtcctgaaagtcgcaaaa

SEQ ID NO: 6746 - RNA, 21 nt, synthetic construct
  source 1..21: mol_type = other RNA
ctggtgcagaggacaacgatg

SEQ ID NO: 6747 - RNA, 21 nt, synthetic construct
  source 1..21: mol_type = other RNA
ctggtgcttccatagatatct

SEQ ID NO: 6748 - RNA, 21 nt, synthetic construct
  source 1..21: mol_type = other RNA
ctggtggggtgattcctattg

SEQ ID NO: 6749 - RNA, 21 nt, synthetic construct
  source 1..21: mol_type = other RNA
ctgtagaggctggggctgctg

SEQ ID NO: 6750 - RNA, 21 nt, synthetic construct
  source 1..21: mol_type = other RNA
ctgtagttatggattatgtga

SEQ ID NO: 6751 - RNA, 21 nt, synthetic construct
  source 1..21: mol_type = other RNA
ctgtataggtatccaagccaa

SEQ ID NO: 6752 - RNA, 21 nt, synthetic construct
  source 1..21: mol_type = other RNA
ctgtcaactcttattctgctt

SEQ ID NO: 6753 - RNA, 21 nt, synthetic construct
  source 1..21: mol_type = other RNA
ctgtccacagaacttttgcga

SEQ ID NO: 6754 - RNA, 21 nt, synthetic construct
  source 1..21: mol_type = other RNA
ctgtctaagctcagtctacca

SEQ ID NO: 6755 - RNA, 21 nt, synthetic construct
  source 1..21: mol_type = other RNA
ctgtctgaccagacctcatcg

SEQ ID NO: 6756 - RNA, 21 nt, synthetic construct
  source 1..21: mol_type = other RNA
ctgtctgagggtgatgtggct

SEQ ID NO: 6757 - RNA, 21 nt, synthetic construct
  source 1..21: mol_type = other RNA
ctgtgacccgagtgaaggcat

SEQ ID NO: 6758 - RNA, 21 nt, synthetic construct
  source 1..21: mol_type = other RNA
ctgtggacagggtaagagaga

SEQ ID NO: 6759 - RNA, 21 nt, synthetic construct
  source 1..21: mol_type = other RNA
ctgtggagtctgtggtcacgg

SEQ ID NO: 6760 - RNA, 21 nt, synthetic construct
  source 1..21: mol_type = other RNA
ctgtggtcacggacatggtcc

SEQ ID NO: 6761 - RNA, 21 nt, synthetic construct
  source 1..21: mol_type = other RNA
ctgtggtggctgcttctgtag

SEQ ID NO: 6762 - RNA, 21 nt, synthetic construct
  source 1..21: mol_type = other RNA
ctgtgtgggaaagcatgtcat

SEQ ID NO: 6763 - RNA, 21 nt, synthetic construct
  source 1..21: mol_type = other RNA
ctgttctctcttaccctgtcc

SEQ ID NO: 6764 - RNA, 21 nt, synthetic construct
  source 1..21: mol_type = other RNA
ctgttgaacatgcccggagct

SEQ ID NO: 6765 - RNA, 21 nt, synthetic construct
  source 1..21: mol_type = other RNA
ctgttgtaaggccctgtgacc

SEQ ID NO: 6766 - RNA, 21 nt, synthetic construct
  source 1..21: mol_type = other RNA
ctgtttctgttctctcttacc

SEQ ID NO: 6767 - RNA, 21 nt, synthetic construct
  source 1..21: mol_type = other RNA
cttaaccatgatagaactgct

SEQ ID NO: 6768 - RNA, 21 nt, synthetic construct
  source 1..21: mol_type = other RNA
cttaatttgtgtaagcctcct

SEQ ID NO: 6769 - RNA, 21 nt, synthetic construct
  source 1..21: mol_type = other RNA
cttacacaaattaagtgatgc

SEQ ID NO: 6770 - RNA, 21 nt, synthetic construct
  source 1..21: mol_type = other RNA
cttaccctgggcttttgaatc

SEQ ID NO: 6771 - RNA, 21 nt, synthetic construct
  source 1..21: mol_type = other RNA
cttaccctgtccacagaactt

SEQ ID NO: 6772 - RNA, 21 nt, synthetic construct
  source 1..21: mol_type = other RNA
cttacctgcgtttcatcaagt

SEQ ID NO: 6773 - RNA, 21 nt, synthetic construct
  source 1..21: mol_type = other RNA
cttagacagagggtcttggct

SEQ ID NO: 6774 - RNA, 21 nt, synthetic construct
  source 1..21: mol_type = other RNA
cttaggttatggaaaccaaaa

SEQ ID NO: 6775 - RNA, 21 nt, synthetic construct
  source 1..21: mol_type = other RNA
cttatccaaactcttcacaca

SEQ ID NO: 6776 - RNA, 21 nt, synthetic construct
  source 1..21: mol_type = other RNA
cttatcccactcatgagatgg

SEQ ID NO: 6777 - RNA, 21 nt, synthetic construct
  source 1..21: mol_type = other RNA
cttatgctggtaaaagacgag

SEQ ID NO: 6778 - RNA, 21 nt, synthetic construct
  source 1..21: mol_type = other RNA
cttattctgcttctggatcca

SEQ ID NO: 6779 - RNA, 21 nt, synthetic construct
  source 1..21: mol_type = other RNA
cttcacacacttcagatatct

SEQ ID NO: 6780 - RNA, 21 nt, synthetic construct
  source 1..21: mol_type = other RNA
cttcactcgggtcacagggcc

SEQ ID NO: 6781 - RNA, 21 nt, synthetic construct
  source 1..21: mol_type = other RNA
cttcagagcccacttacctgc

SEQ ID NO: 6782 - RNA, 21 nt, synthetic construct
  source 1..21: mol_type = other RNA
cttcagatatctatggaagca

SEQ ID NO: 6783 - RNA, 21 nt, synthetic construct
  source 1..21: mol_type = other RNA
cttcatgccctgcatctccaa

SEQ ID NO: 6784 - RNA, 21 nt, synthetic construct
  source 1..21: mol_type = other RNA
cttcatgggagccacctctag

SEQ ID NO: 6785 - RNA, 21 nt, synthetic construct
  source 1..21: mol_type = other RNA
cttccagctcttaaccatgat

SEQ ID NO: 6786 - RNA, 21 nt, synthetic construct
  source 1..21: mol_type = other RNA
cttccatagatatctgaagtg

SEQ ID NO: 6787 - RNA, 21 nt, synthetic construct
  source 1..21: mol_type = other RNA
cttcccaaagagccaagccat

SEQ ID NO: 6788 - RNA, 21 nt, synthetic construct
  source 1..21: mol_type = other RNA
cttcctctttctcacgggctt

SEQ ID NO: 6789 - RNA, 21 nt, synthetic construct
  source 1..21: mol_type = other RNA
cttctaatcccatgaaccctt

SEQ ID NO: 6790 - RNA, 21 nt, synthetic construct
  source 1..21: mol_type = other RNA
cttctattccacctcatctca

SEQ ID NO: 6791 - RNA, 21 nt, synthetic construct
  source 1..21: mol_type = other RNA
cttctcacataatccataact

SEQ ID NO: 6792 - RNA, 21 nt, synthetic construct
  source 1..21: mol_type = other RNA
cttctggatccaccaatccat

SEQ ID NO: 6793 - RNA, 21 nt, synthetic construct
  source 1..21: mol_type = other RNA
cttctggtgcagaggacaacg

SEQ ID NO: 6794 - RNA, 21 nt, synthetic construct
  source 1..21: mol_type = other RNA
cttctgtagaggctggggctg

SEQ ID NO: 6795 - RNA, 21 nt, synthetic construct
  source 1..21: mol_type = other RNA
cttgagatgaggtggaataga

SEQ ID NO: 6796 - RNA, 21 nt, synthetic construct
  source 1..21: mol_type = other RNA
cttgatgaaacgcaggtaagt

SEQ ID NO: 6797 - RNA, 21 nt, synthetic construct
  source 1..21: mol_type = other RNA
cttgccgaaaggaccatgtcc

SEQ ID NO: 6798 - RNA, 21 nt, synthetic construct
  source 1..21: mol_type = other RNA
cttggacacaagcagttctat

SEQ ID NO: 6799 - RNA, 21 nt, synthetic construct
  source 1..21: mol_type = other RNA
cttggatacctatacagatcc

SEQ ID NO: 6800 - RNA, 21 nt, synthetic construct
  source 1..21: mol_type = other RNA
cttggctctttgggaagccaa

SEQ ID NO: 6801 - RNA, 21 nt, synthetic construct
  source 1..21: mol_type = other RNA
cttggctggtaaagtgtatgg

SEQ ID NO: 6802 - RNA, 21 nt, synthetic construct
  source 1..21: mol_type = other RNA
cttggcttggatacctataca

SEQ ID NO: 6803 - RNA, 21 nt, synthetic construct
  source 1..21: mol_type = other RNA
cttgtgtccaaggaggcttac

SEQ ID NO: 6804 - RNA, 21 nt, synthetic construct
  source 1..21: mol_type = other RNA
cttgttttggagatgcagggc

SEQ ID NO: 6805 - RNA, 21 nt, synthetic construct
  source 1..21: mol_type = other RNA
ctttaaagaatcccaatagga

SEQ ID NO: 6806 - RNA, 21 nt, synthetic construct
  source 1..21: mol_type = other RNA
ctttaaaggggttgtggcatg

SEQ ID NO: 6807 - RNA, 21 nt, synthetic construct
  source 1..21: mol_type = other RNA
ctttaccagccaaggtttgga

SEQ ID NO: 6808 - RNA, 21 nt, synthetic construct
  source 1..21: mol_type = other RNA
ctttcaggaccagtcatgcag

SEQ ID NO: 6809 - RNA, 21 nt, synthetic construct
  source 1..21: mol_type = other RNA
ctttcccacacagctaatggg

SEQ ID NO: 6810 - RNA, 21 nt, synthetic construct
  source 1..21: mol_type = other RNA
ctttcggcaagagacttgatg

SEQ ID NO: 6811 - RNA, 21 nt, synthetic construct
  source 1..21: mol_type = other RNA
ctttctcacgggctttttcag

SEQ ID NO: 6812 - RNA, 21 nt, synthetic construct
  source 1..21: mol_type = other RNA
ctttctggatcctgacattgg

SEQ ID NO: 6813 - RNA, 21 nt, synthetic construct
  source 1..21: mol_type = other RNA
ctttgataacccattagctgt

SEQ ID NO: 6814 - RNA, 21 nt, synthetic construct
  source 1..21: mol_type = other RNA
ctttgcacactcaatgagaat

SEQ ID NO: 6815 - RNA, 21 nt, synthetic construct
  source 1..21: mol_type = other RNA
ctttgggaagccaaaatggct

SEQ ID NO: 6816 - RNA, 21 nt, synthetic construct
  source 1..21: mol_type = other RNA
cttttaccagcataagagcat

SEQ ID NO: 6817 - RNA, 21 nt, synthetic construct
  source 1..21: mol_type = other RNA
cttttcaagtgaggtaaccaa

SEQ ID NO: 6818 - RNA, 21 nt, synthetic construct
  source 1..21: mol_type = other RNA
cttttcacactcttcctcttt

SEQ ID NO: 6819 - RNA, 21 nt, synthetic construct
  source 1..21: mol_type = other RNA
cttttcctgaccattagcatc

SEQ ID NO: 6820 - RNA, 21 nt, synthetic construct
  source 1..21: mol_type = other RNA
cttttgaatcagaatacccaa

SEQ ID NO: 6821 - RNA, 21 nt, synthetic construct
  source 1..21: mol_type = other RNA
cttttgcgactttcaggacca

SEQ ID NO: 6822 - RNA, 21 nt, synthetic construct
  source 1..21: mol_type = other RNA
cttttgttggttacctcactt

SEQ ID NO: 6823 - RNA, 21 nt, synthetic construct
  source 1..21: mol_type = other RNA
ctttttcagccattttggctt

SEQ ID NO: 6824 - RNA, 21 nt, synthetic construct
  source 1..21: mol_type = other RNA
cttttttgccatgggatttct

SEQ ID NO: 6825 - RNA, 21 nt, synthetic construct
  source 1..21: mol_type = other RNA
gaaaaagcccgtgagaaagag

SEQ ID NO: 6826 - RNA, 21 nt, synthetic construct
  source 1..21: mol_type = other RNA
gaaaagcagccattggcacta

SEQ ID NO: 6827 - RNA, 21 nt, synthetic construct
  source 1..21: mol_type = other RNA
gaaaagtatggcccagactat

SEQ ID NO: 6828 - RNA, 21 nt, synthetic construct
  source 1..21: mol_type = other RNA
gaaaccaaaatatgcagggag

SEQ ID NO: 6829 - RNA, 21 nt, synthetic construct
  source 1..21: mol_type = other RNA
gaaaccatctccctgcatatt

SEQ ID NO: 6830 - RNA, 21 nt, synthetic construct
  source 1..21: mol_type = other RNA
gaaacctatcagtggacaact

SEQ ID NO: 6831 - RNA, 21 nt, synthetic construct
  source 1..21: mol_type = other RNA
gaaacgcaggtaagtgggctc

SEQ ID NO: 6832 - RNA, 21 nt, synthetic construct
  source 1..21: mol_type = other RNA
gaaacgggagcctgctgagcc

SEQ ID NO: 6833 - RNA, 21 nt, synthetic construct
  source 1..21: mol_type = other RNA
gaaacttcagagcccacttac

SEQ ID NO: 6834 - RNA, 21 nt, synthetic construct
  source 1..21: mol_type = other RNA
gaaagaggaagagtgtgaaaa

SEQ ID NO: 6835 - RNA, 21 nt, synthetic construct
  source 1..21: mol_type = other RNA
gaaagcatgtcattctccttg

SEQ ID NO: 6836 - RNA, 21 nt, synthetic construct
  source 1..21: mol_type = other RNA
gaaagctctgctcgctgtctg

SEQ ID NO: 6837 - RNA, 21 nt, synthetic construct
  source 1..21: mol_type = other RNA
gaaaggaccatgtccgtgacc

SEQ ID NO: 6838 - RNA, 21 nt, synthetic construct
  source 1..21: mol_type = other RNA
gaaagtcgcaaaagttctgtg

SEQ ID NO: 6839 - RNA, 21 nt, synthetic construct
  source 1..21: mol_type = other RNA
gaaatagccagagttttacat

SEQ ID NO: 6840 - RNA, 21 nt, synthetic construct
  source 1..21: mol_type = other RNA
gaaatcccatggcaaaaaagt

SEQ ID NO: 6841 - RNA, 21 nt, synthetic construct
  source 1..21: mol_type = other RNA
gaaattgcctccttatcccac

SEQ ID NO: 6842 - RNA, 21 nt, synthetic construct
  source 1..21: mol_type = other RNA
gaacatcattcaccttctcac

SEQ ID NO: 6843 - RNA, 21 nt, synthetic construct
  source 1..21: mol_type = other RNA
gaacatgcccggagctgcact

SEQ ID NO: 6844 - RNA, 21 nt, synthetic construct
  source 1..21: mol_type = other RNA
gaacccagatatggggagcag

SEQ ID NO: 6845 - RNA, 21 nt, synthetic construct
  source 1..21: mol_type = other RNA
gaacccttaccctgggctttt

SEQ ID NO: 6846 - RNA, 21 nt, synthetic construct
  source 1..21: mol_type = other RNA
gaacctgcagcttgagatgag

SEQ ID NO: 6847 - RNA, 21 nt, synthetic construct
  source 1..21: mol_type = other RNA
gaactgcttgtgtccaaggag

SEQ ID NO: 6848 - RNA, 21 nt, synthetic construct
  source 1..21: mol_type = other RNA
gaacttctattccacctcatc

SEQ ID NO: 6849 - RNA, 21 nt, synthetic construct
  source 1..21: mol_type = other RNA
gaacttttgcgactttcagga

SEQ ID NO: 6850 - RNA, 21 nt, synthetic construct
  source 1..21: mol_type = other RNA
gaagaattcaaatatgaacct

SEQ ID NO: 6851 - RNA, 21 nt, synthetic construct
  source 1..21: mol_type = other RNA
gaagagagctgttgaacatgc

SEQ ID NO: 6852 - RNA, 21 nt, synthetic construct
  source 1..21: mol_type = other RNA
gaagagtgtgaaaagtatggc

SEQ ID NO: 6853 - RNA, 21 nt, synthetic construct
  source 1..21: mol_type = other RNA
gaagagtttggataaggacta

SEQ ID NO: 6854 - RNA, 21 nt, synthetic construct
  source 1..21: mol_type = other RNA
gaagcaccagccctatgaact

SEQ ID NO: 6855 - RNA, 21 nt, synthetic construct
  source 1..21: mol_type = other RNA
gaagcagaataagagttgaca

SEQ ID NO: 6856 - RNA, 21 nt, synthetic construct
  source 1..21: mol_type = other RNA
gaagcagccaccacagcccca

SEQ ID NO: 6857 - RNA, 21 nt, synthetic construct
  source 1..21: mol_type = other RNA
gaagcatctttgataacccat

SEQ ID NO: 6858 - RNA, 21 nt, synthetic construct
  source 1..21: mol_type = other RNA
gaagccaaaatggctgaaaaa

SEQ ID NO: 6859 - RNA, 21 nt, synthetic construct
  source 1..21: mol_type = other RNA
gaagccacaccctggactagt

SEQ ID NO: 6860 - RNA, 21 nt, synthetic construct
  source 1..21: mol_type = other RNA
gaaggcatatggagatgtagt

SEQ ID NO: 6861 - RNA, 21 nt, synthetic construct
  source 1..21: mol_type = other RNA
gaaggtgaatgatgttcacca

SEQ ID NO: 6862 - RNA, 21 nt, synthetic construct
  source 1..21: mol_type = other RNA
gaagtggccatccatctcatg

SEQ ID NO: 6863 - RNA, 21 nt, synthetic construct
  source 1..21: mol_type = other RNA
gaagtgtgtgaagagtttgga

SEQ ID NO: 6864 - RNA, 21 nt, synthetic construct
  source 1..21: mol_type = other RNA
gaagttcatagggctggtgct

SEQ ID NO: 6865 - RNA, 21 nt, synthetic construct
  source 1..21: mol_type = other RNA
gaagtttcatgtggctcagca

SEQ ID NO: 6866 - RNA, 21 nt, synthetic construct
  source 1..21: mol_type = other RNA
gaataagagttgacagactct

SEQ ID NO: 6867 - RNA, 21 nt, synthetic construct
  source 1..21: mol_type = other RNA
gaatacccaatatccatcata

SEQ ID NO: 6868 - RNA, 21 nt, synthetic construct
  source 1..21: mol_type = other RNA
gaatagaagttcatagggctg

SEQ ID NO: 6869 - RNA, 21 nt, synthetic construct
  source 1..21: mol_type = other RNA
gaataggaacccagatatggg

SEQ ID NO: 6870 - RNA, 21 nt, synthetic construct
  source 1..21: mol_type = other RNA
gaatcaccccaccaggatctc

SEQ ID NO: 6871 - RNA, 21 nt, synthetic construct
  source 1..21: mol_type = other RNA
gaatcagaatacccaatatcc

SEQ ID NO: 6872 - RNA, 21 nt, synthetic construct
  source 1..21: mol_type = other RNA
gaatcccaataggaatcaccc

SEQ ID NO: 6873 - RNA, 21 nt, synthetic construct
  source 1..21: mol_type = other RNA
gaatgacatgctttcccacac

SEQ ID NO: 6874 - RNA, 21 nt, synthetic construct
  source 1..21: mol_type = other RNA
gaatgagccaaaacatggctt

SEQ ID NO: 6875 - RNA, 21 nt, synthetic construct
  source 1..21: mol_type = other RNA
gaatgatgttcaccattttta

SEQ ID NO: 6876 - RNA, 21 nt, synthetic construct
  source 1..21: mol_type = other RNA
gaattcaaatatgaacctgca

SEQ ID NO: 6877 - RNA, 21 nt, synthetic construct
  source 1..21: mol_type = other RNA
gaattcttctaatcccatgaa

SEQ ID NO: 6878 - RNA, 21 nt, synthetic construct
  source 1..21: mol_type = other RNA
gaattgacccatgagttggag

SEQ ID NO: 6879 - RNA, 21 nt, synthetic construct
  source 1..21: mol_type = other RNA
gacaacgatgaggtctggtca

SEQ ID NO: 6880 - RNA, 21 nt, synthetic construct
  source 1..21: mol_type = other RNA
gacaactgctccccatatctg

SEQ ID NO: 6881 - RNA, 21 nt, synthetic construct
  source 1..21: mol_type = other RNA
gacacaagcagttctatcatg

SEQ ID NO: 6882 - RNA, 21 nt, synthetic construct
  source 1..21: mol_type = other RNA
gacagactctgtctgagggtg

SEQ ID NO: 6883 - RNA, 21 nt, synthetic construct
  source 1..21: mol_type = other RNA
gacagagggtcttggcttgga

SEQ ID NO: 6884 - RNA, 21 nt, synthetic construct
  source 1..21: mol_type = other RNA
gacagagtctgtcaactctta

SEQ ID NO: 6885 - RNA, 21 nt, synthetic construct
  source 1..21: mol_type = other RNA
gacagcgagcagagctttctg

SEQ ID NO: 6886 - RNA, 21 nt, synthetic construct
  source 1..21: mol_type = other RNA
gacagggtaagagagaacaga

SEQ ID NO: 6887 - RNA, 21 nt, synthetic construct
  source 1..21: mol_type = other RNA
gacatgctttcccacacagct

SEQ ID NO: 6888 - RNA, 21 nt, synthetic construct
  source 1..21: mol_type = other RNA
gacatggtcctttcggcaaga

SEQ ID NO: 6889 - RNA, 21 nt, synthetic construct
  source 1..21: mol_type = other RNA
gacattgggggagtggccgtg

SEQ ID NO: 6890 - RNA, 21 nt, synthetic construct
  source 1..21: mol_type = other RNA
gaccaaatgtacatcatgtag

SEQ ID NO: 6891 - RNA, 21 nt, synthetic construct
  source 1..21: mol_type = other RNA
gaccacagactccacagtaac

SEQ ID NO: 6892 - RNA, 21 nt, synthetic construct
  source 1..21: mol_type = other RNA
gaccagacctcatcgttgtcc

SEQ ID NO: 6893 - RNA, 21 nt, synthetic construct
  source 1..21: mol_type = other RNA
gaccagtcatgcagcagtccc

SEQ ID NO: 6894 - RNA, 21 nt, synthetic construct
  source 1..21: mol_type = other RNA
gaccatgtccgtgaccacaga

SEQ ID NO: 6895 - RNA, 21 nt, synthetic construct
  source 1..21: mol_type = other RNA
gaccattagcatcacttaatt

SEQ ID NO: 6896 - RNA, 21 nt, synthetic construct
  source 1..21: mol_type = other RNA
gacccatgagttggagccacg

SEQ ID NO: 6897 - RNA, 21 nt, synthetic construct
  source 1..21: mol_type = other RNA
gaccccagcagcagcagccac

SEQ ID NO: 6898 - RNA, 21 nt, synthetic construct
  source 1..21: mol_type = other RNA
gacccgagtgaaggcatatgg

SEQ ID NO: 6899 - RNA, 21 nt, synthetic construct
  source 1..21: mol_type = other RNA
gaccctctgtctaagctcagt

SEQ ID NO: 6900 - RNA, 21 nt, synthetic construct
  source 1..21: mol_type = other RNA
gacctcatcgttgtcctctgc

SEQ ID NO: 6901 - RNA, 21 nt, synthetic construct
  source 1..21: mol_type = other RNA
gacgagggagatcctggtggg

SEQ ID NO: 6902 - RNA, 21 nt, synthetic construct
  source 1..21: mol_type = other RNA
gacggcccaatccagttagtc

SEQ ID NO: 6903 - RNA, 21 nt, synthetic construct
  source 1..21: mol_type = other RNA
gactaactggattgggccgtc

SEQ ID NO: 6904 - RNA, 21 nt, synthetic construct
  source 1..21: mol_type = other RNA
gactagtgccaatggctgctt

SEQ ID NO: 6905 - RNA, 21 nt, synthetic construct
  source 1..21: mol_type = other RNA
gactataaaaatggtgaacat

SEQ ID NO: 6906 - RNA, 21 nt, synthetic construct
  source 1..21: mol_type = other RNA
gactatgtgcctcagaaatcc

SEQ ID NO: 6907 - RNA, 21 nt, synthetic construct
  source 1..21: mol_type = other RNA
gactccacagtaactacatct

SEQ ID NO: 6908 - RNA, 21 nt, synthetic construct
  source 1..21: mol_type = other RNA
gactctgtctgagggtgatgt

SEQ ID NO: 6909 - RNA, 21 nt, synthetic construct
  source 1..21: mol_type = other RNA
gactgagcttagacagagggt

SEQ ID NO: 6910 - RNA, 21 nt, synthetic construct
  source 1..21: mol_type = other RNA
gactgctgcatgactggtcct

SEQ ID NO: 6911 - RNA, 21 nt, synthetic construct
  source 1..21: mol_type = other RNA
gactggggagaataggaaccc

SEQ ID NO: 6912 - RNA, 21 nt, synthetic construct
  source 1..21: mol_type = other RNA
gactggtcctgaaagtcgcaa

SEQ ID NO: 6913 - RNA, 21 nt, synthetic construct
  source 1..21: mol_type = other RNA
gacttgatgaaacgcaggtaa

SEQ ID NO: 6914 - RNA, 21 nt, synthetic construct
  source 1..21: mol_type = other RNA
gactttcaggaccagtcatgc

SEQ ID NO: 6915 - RNA, 21 nt, synthetic construct
  source 1..21: mol_type = other RNA
gagaaagaggaagagtgtgaa

SEQ ID NO: 6916 - RNA, 21 nt, synthetic construct
  source 1..21: mol_type = other RNA
gagaaggtgaatgatgttcac

SEQ ID NO: 6917 - RNA, 21 nt, synthetic construct
  source 1..21: mol_type = other RNA
gagaataggaacccagatatg

SEQ ID NO: 6918 - RNA, 21 nt, synthetic construct
  source 1..21: mol_type = other RNA
gagaatgacatgctttcccac

SEQ ID NO: 6919 - RNA, 21 nt, synthetic construct
  source 1..21: mol_type = other RNA
gagaattgacccatgagttgg

SEQ ID NO: 6920 - RNA, 21 nt, synthetic construct
  source 1..21: mol_type = other RNA
gagaccccagcagcagcagcc

SEQ ID NO: 6921 - RNA, 21 nt, synthetic construct
  source 1..21: mol_type = other RNA
gagacggcccaatccagttag

SEQ ID NO: 6922 - RNA, 21 nt, synthetic construct
  source 1..21: mol_type = other RNA
gagactggggagaataggaac

SEQ ID NO: 6923 - RNA, 21 nt, synthetic construct
  source 1..21: mol_type = other RNA
gagacttgatgaaacgcaggt

SEQ ID NO: 6924 - RNA, 21 nt, synthetic construct
  source 1..21: mol_type = other RNA
gagagctgttgaacatgcccg

SEQ ID NO: 6925 - RNA, 21 nt, synthetic construct
  source 1..21: mol_type = other RNA
gagatcctggtggggtgattc

SEQ ID NO: 6926 - RNA, 21 nt, synthetic construct
  source 1..21: mol_type = other RNA
gagatgaggtggaatagaagt

SEQ ID NO: 6927 - RNA, 21 nt, synthetic construct
  source 1..21: mol_type = other RNA
gagatgcagggcatgaagaga

SEQ ID NO: 6928 - RNA, 21 nt, synthetic construct
  source 1..21: mol_type = other RNA
gagatggatggccacttcatg

SEQ ID NO: 6929 - RNA, 21 nt, synthetic construct
  source 1..21: mol_type = other RNA
gagatggtttcagcagttgta

SEQ ID NO: 6930 - RNA, 21 nt, synthetic construct
  source 1..21: mol_type = other RNA
gagatgtagttactgtggagt

SEQ ID NO: 6931 - RNA, 21 nt, synthetic construct
  source 1..21: mol_type = other RNA
gagcaatccaaacatggacta

SEQ ID NO: 6932 - RNA, 21 nt, synthetic construct
  source 1..21: mol_type = other RNA
gagcagagctttctggatcct

SEQ ID NO: 6933 - RNA, 21 nt, synthetic construct
  source 1..21: mol_type = other RNA
gagcagttgtccactgatagg

SEQ ID NO: 6934 - RNA, 21 nt, synthetic construct
  source 1..21: mol_type = other RNA
gagcatgaatgagccaaaaca

SEQ ID NO: 6935 - RNA, 21 nt, synthetic construct
  source 1..21: mol_type = other RNA
gagccaaaacatggcttggct

SEQ ID NO: 6936 - RNA, 21 nt, synthetic construct
  source 1..21: mol_type = other RNA
gagccaagccatgttttggct

SEQ ID NO: 6937 - RNA, 21 nt, synthetic construct
  source 1..21: mol_type = other RNA
gagccacatgaaacttcagag

SEQ ID NO: 6938 - RNA, 21 nt, synthetic construct
  source 1..21: mol_type = other RNA
gagccacctctagattaccac

SEQ ID NO: 6939 - RNA, 21 nt, synthetic construct
  source 1..21: mol_type = other RNA
gagccacggccactcccccaa

SEQ ID NO: 6940 - RNA, 21 nt, synthetic construct
  source 1..21: mol_type = other RNA
gagcccacttacctgcgtttc

SEQ ID NO: 6941 - RNA, 21 nt, synthetic construct
  source 1..21: mol_type = other RNA
gagcctgctgagccacatgaa

SEQ ID NO: 6942 - RNA, 21 nt, synthetic construct
  source 1..21: mol_type = other RNA
gagctgcactgtagttatgga

SEQ ID NO: 6943 - RNA, 21 nt, synthetic construct
  source 1..21: mol_type = other RNA
gagctgcatgccacaacccct

SEQ ID NO: 6944 - RNA, 21 nt, synthetic construct
  source 1..21: mol_type = other RNA
gagctggaagcatctttgata

SEQ ID NO: 6945 - RNA, 21 nt, synthetic construct
  source 1..21: mol_type = other RNA
gagctgttgaacatgcccgga

SEQ ID NO: 6946 - RNA, 21 nt, synthetic construct
  source 1..21: mol_type = other RNA
gagcttagacagagggtcttg

SEQ ID NO: 6947 - RNA, 21 nt, synthetic construct
  source 1..21: mol_type = other RNA
gagctttctggatcctgacat

SEQ ID NO: 6948 - RNA, 21 nt, synthetic construct
  source 1..21: mol_type = other RNA
gaggaagagtgtgaaaagtat

SEQ ID NO: 6949 - RNA, 21 nt, synthetic construct
  source 1..21: mol_type = other RNA
gaggacaacgatgaggtctgg

SEQ ID NO: 6950 - RNA, 21 nt, synthetic construct
  source 1..21: mol_type = other RNA
gaggcaatttccctacatgat

SEQ ID NO: 6951 - RNA, 21 nt, synthetic construct
  source 1..21: mol_type = other RNA
gaggcacatagtctgggccat

SEQ ID NO: 6952 - RNA, 21 nt, synthetic construct
  source 1..21: mol_type = other RNA
gaggctggggctgctgggact

SEQ ID NO: 6953 - RNA, 21 nt, synthetic construct
  source 1..21: mol_type = other RNA
gaggcttacacaaattaagtg

SEQ ID NO: 6954 - RNA, 21 nt, synthetic construct
  source 1..21: mol_type = other RNA
gagggagatcctggtggggtg

SEQ ID NO: 6955 - RNA, 21 nt, synthetic construct
  source 1..21: mol_type = other RNA
gagggtcttggcttggatacc

SEQ ID NO: 6956 - RNA, 21 nt, synthetic construct
  source 1..21: mol_type = other RNA
gagggtgatgtggctgctgct

SEQ ID NO: 6957 - RNA, 21 nt, synthetic construct
  source 1..21: mol_type = other RNA
gaggtaaccaacaaaaggggg

SEQ ID NO: 6958 - RNA, 21 nt, synthetic construct
  source 1..21: mol_type = other RNA
gaggtctggtcagacagcgag

SEQ ID NO: 6959 - RNA, 21 nt, synthetic construct
  source 1..21: mol_type = other RNA
gaggtggaatagaagttcata

SEQ ID NO: 6960 - RNA, 21 nt, synthetic construct
  source 1..21: mol_type = other RNA
gaggtggctcccatgaagtgg

SEQ ID NO: 6961 - RNA, 21 nt, synthetic construct
  source 1..21: mol_type = other RNA
gagtctgtcaactcttattct

SEQ ID NO: 6962 - RNA, 21 nt, synthetic construct
  source 1..21: mol_type = other RNA
gagtctgtggtcacggacatg

SEQ ID NO: 6963 - RNA, 21 nt, synthetic construct
  source 1..21: mol_type = other RNA
gagtgaaggcatatggagatg

SEQ ID NO: 6964 - RNA, 21 nt, synthetic construct
  source 1..21: mol_type = other RNA
gagtggccgtggctccaactc

SEQ ID NO: 6965 - RNA, 21 nt, synthetic construct
  source 1..21: mol_type = other RNA
gagtgggataaggaggcaatt

SEQ ID NO: 6966 - RNA, 21 nt, synthetic construct
  source 1..21: mol_type = other RNA
gagtgtgaaaagtatggccca

SEQ ID NO: 6967 - RNA, 21 nt, synthetic construct
  source 1..21: mol_type = other RNA
gagtgtgcaaagcgtgagctg

SEQ ID NO: 6968 - RNA, 21 nt, synthetic construct
  source 1..21: mol_type = other RNA
gagttgacagactctgtctga

SEQ ID NO: 6969 - RNA, 21 nt, synthetic construct
  source 1..21: mol_type = other RNA
gagttggagccacggccactc

SEQ ID NO: 6970 - RNA, 21 nt, synthetic construct
  source 1..21: mol_type = other RNA
gagtttggataaggactaact

SEQ ID NO: 6971 - RNA, 21 nt, synthetic construct
  source 1..21: mol_type = other RNA
gataacccattagctgtgtgg

SEQ ID NO: 6972 - RNA, 21 nt, synthetic construct
  source 1..21: mol_type = other RNA
gataaggactaactggattgg

SEQ ID NO: 6973 - RNA, 21 nt, synthetic construct
  source 1..21: mol_type = other RNA
gataaggaggcaatttcccta

SEQ ID NO: 6974 - RNA, 21 nt, synthetic construct
  source 1..21: mol_type = other RNA
gatacctatacagatccatcg

SEQ ID NO: 6975 - RNA, 21 nt, synthetic construct
  source 1..21: mol_type = other RNA
gatacctgtttctgttctctc

SEQ ID NO: 6976 - RNA, 21 nt, synthetic construct
  source 1..21: mol_type = other RNA
gatagaactgcttgtgtccaa

SEQ ID NO: 6977 - RNA, 21 nt, synthetic construct
  source 1..21: mol_type = other RNA
gataggtttccattgcattga

SEQ ID NO: 6978 - RNA, 21 nt, synthetic construct
  source 1..21: mol_type = other RNA
gatatatatgatatcaccccc

SEQ ID NO: 6979 - RNA, 21 nt, synthetic construct
  source 1..21: mol_type = other RNA
gatatcacccccttttgttgg

SEQ ID NO: 6980 - RNA, 21 nt, synthetic construct
  source 1..21: mol_type = other RNA
gatatctatggaagcaccagc

SEQ ID NO: 6981 - RNA, 21 nt, synthetic construct
  source 1..21: mol_type = other RNA
gatatctgaagtgtgtgaaga

SEQ ID NO: 6982 - RNA, 21 nt, synthetic construct
  source 1..21: mol_type = other RNA
gatatgatggatattgggtat

SEQ ID NO: 6983 - RNA, 21 nt, synthetic construct
  source 1..21: mol_type = other RNA
gatatggggagcagttgtcca

SEQ ID NO: 6984 - RNA, 21 nt, synthetic construct
  source 1..21: mol_type = other RNA
gatattgggtattctgattca

SEQ ID NO: 6985 - RNA, 21 nt, synthetic construct
  source 1..21: mol_type = other RNA
gatccaccaatccatacatga

SEQ ID NO: 6986 - RNA, 21 nt, synthetic construct
  source 1..21: mol_type = other RNA
gatccagaaagctctgctcgc

SEQ ID NO: 6987 - RNA, 21 nt, synthetic construct
  source 1..21: mol_type = other RNA
gatccagaagcagaataagag

SEQ ID NO: 6988 - RNA, 21 nt, synthetic construct
  source 1..21: mol_type = other RNA
gatccatcggctgagactggg

SEQ ID NO: 6989 - RNA, 21 nt, synthetic construct
  source 1..21: mol_type = other RNA
gatcctgacattgggggagtg

SEQ ID NO: 6990 - RNA, 21 nt, synthetic construct
  source 1..21: mol_type = other RNA
gatcctggtggggtgattcct

SEQ ID NO: 6991 - RNA, 21 nt, synthetic construct
  source 1..21: mol_type = other RNA
gatctccctcgtcttttacca

SEQ ID NO: 6992 - RNA, 21 nt, synthetic construct
  source 1..21: mol_type = other RNA
gatctgtataggtatccaagc

SEQ ID NO: 6993 - RNA, 21 nt, synthetic construct
  source 1..21: mol_type = other RNA
gatgaaacgcaggtaagtggg

SEQ ID NO: 6994 - RNA, 21 nt, synthetic construct
  source 1..21: mol_type = other RNA
gatgaggtctggtcagacagc

SEQ ID NO: 6995 - RNA, 21 nt, synthetic construct
  source 1..21: mol_type = other RNA
gatgaggtggaatagaagttc

SEQ ID NO: 6996 - RNA, 21 nt, synthetic construct
  source 1..21: mol_type = other RNA
gatgcagggcatgaagagagc

SEQ ID NO: 6997 - RNA, 21 nt, synthetic construct
  source 1..21: mol_type = other RNA
gatgctaatggtcaggaaaag

SEQ ID NO: 6998 - RNA, 21 nt, synthetic construct
  source 1..21: mol_type = other RNA
gatgcttccagctcttaacca

SEQ ID NO: 6999 - RNA, 21 nt, synthetic construct
  source 1..21: mol_type = other RNA
gatggatattgggtattctga

SEQ ID NO: 7000 - RNA, 21 nt, synthetic construct
  source 1..21: mol_type = other RNA
gatggatctgtataggtatcc

SEQ ID NO: 7001 - RNA, 21 nt, synthetic construct
  source 1..21: mol_type = other RNA
gatggatggccacttcatggg

SEQ ID NO: 7002 - RNA, 21 nt, synthetic construct
  source 1..21: mol_type = other RNA
gatggccacttcatgggagcc

SEQ ID NO: 7003 - RNA, 21 nt, synthetic construct
  source 1..21: mol_type = other RNA
gatgggtggtagactgagctt

SEQ ID NO: 7004 - RNA, 21 nt, synthetic construct
  source 1..21: mol_type = other RNA
gatggtttcagcagttgtacc

SEQ ID NO: 7005 - RNA, 21 nt, synthetic construct
  source 1..21: mol_type = other RNA
gatgtaaaactctggctattt

SEQ ID NO: 7006 - RNA, 21 nt, synthetic construct
  source 1..21: mol_type = other RNA
gatgtacatttggtctaatgg

SEQ ID NO: 7007 - RNA, 21 nt, synthetic construct
  source 1..21: mol_type = other RNA
gatgtagttactgtggagtct

SEQ ID NO: 7008 - RNA, 21 nt, synthetic construct
  source 1..21: mol_type = other RNA
gatgtggctgctgctgctggg

SEQ ID NO: 7009 - RNA, 21 nt, synthetic construct
  source 1..21: mol_type = other RNA
gatgttcaccatttttatagt

SEQ ID NO: 7010 - RNA, 21 nt, synthetic construct
  source 1..21: mol_type = other RNA
gattaccacccaatctgagca

SEQ ID NO: 7011 - RNA, 21 nt, synthetic construct
  source 1..21: mol_type = other RNA
gattatgtgagaaggtgaatg

SEQ ID NO: 7012 - RNA, 21 nt, synthetic construct
  source 1..21: mol_type = other RNA
gattcaaaagcccagggtaag

SEQ ID NO: 7013 - RNA, 21 nt, synthetic construct
  source 1..21: mol_type = other RNA
gattcctattgggattcttta

SEQ ID NO: 7014 - RNA, 21 nt, synthetic construct
  source 1..21: mol_type = other RNA
gattctttaaaggggttgtgg

SEQ ID NO: 7015 - RNA, 21 nt, synthetic construct
  source 1..21: mol_type = other RNA
gattgctcagattgggtggta

SEQ ID NO: 7016 - RNA, 21 nt, synthetic construct
  source 1..21: mol_type = other RNA
gattgggccgtctcatgtatg

SEQ ID NO: 7017 - RNA, 21 nt, synthetic construct
  source 1..21: mol_type = other RNA
gattgggtggtaatctagagg

SEQ ID NO: 7018 - RNA, 21 nt, synthetic construct
  source 1..21: mol_type = other RNA
gattggtggatccagaagcag

SEQ ID NO: 7019 - RNA, 21 nt, synthetic construct
  source 1..21: mol_type = other RNA
gatttctgaggcacatagtct

SEQ ID NO: 7020 - RNA, 21 nt, synthetic construct
  source 1..21: mol_type = other RNA
gcaaaaaagtgaaacgggagc

SEQ ID NO: 7021 - RNA, 21 nt, synthetic construct
  source 1..21: mol_type = other RNA
gcaaaagttctgtggacaggg

SEQ ID NO: 7022 - RNA, 21 nt, synthetic construct
  source 1..21: mol_type = other RNA
gcaaagcgtgagctgcatgcc

SEQ ID NO: 7023 - RNA, 21 nt, synthetic construct
  source 1..21: mol_type = other RNA
gcaagagacttgatgaaacgc

SEQ ID NO: 7024 - RNA, 21 nt, synthetic construct
  source 1..21: mol_type = other RNA
gcaatccaaacatggactata

SEQ ID NO: 7025 - RNA, 21 nt, synthetic construct
  source 1..21: mol_type = other RNA
gcaatggaaacctatcagtgg

SEQ ID NO: 7026 - RNA, 21 nt, synthetic construct
  source 1..21: mol_type = other RNA
gcaatttccctacatgatgta

SEQ ID NO: 7027 - RNA, 21 nt, synthetic construct
  source 1..21: mol_type = other RNA
gcacactcaatgagaattgac

SEQ ID NO: 7028 - RNA, 21 nt, synthetic construct
  source 1..21: mol_type = other RNA
gcacatagtctgggccatact

SEQ ID NO: 7029 - RNA, 21 nt, synthetic construct
  source 1..21: mol_type = other RNA
gcaccagaagccacaccctgg

SEQ ID NO: 7030 - RNA, 21 nt, synthetic construct
  source 1..21: mol_type = other RNA
gcaccagccctatgaacttct

SEQ ID NO: 7031 - RNA, 21 nt, synthetic construct
  source 1..21: mol_type = other RNA
gcactagtccagggtgtggct

SEQ ID NO: 7032 - RNA, 21 nt, synthetic construct
  source 1..21: mol_type = other RNA
gcactgtagttatggattatg

SEQ ID NO: 7033 - RNA, 21 nt, synthetic construct
  source 1..21: mol_type = other RNA
gcagaataagagttgacagac

SEQ ID NO: 7034 - RNA, 21 nt, synthetic construct
  source 1..21: mol_type = other RNA
gcagagaccccagcagcagca

SEQ ID NO: 7035 - RNA, 21 nt, synthetic construct
  source 1..21: mol_type = other RNA
gcagagctttctggatcctga

SEQ ID NO: 7036 - RNA, 21 nt, synthetic construct
  source 1..21: mol_type = other RNA
gcagaggacaacgatgaggtc

SEQ ID NO: 7037 - RNA, 21 nt, synthetic construct
  source 1..21: mol_type = other RNA
gcagcagagaccccagcagca

SEQ ID NO: 7038 - RNA, 21 nt, synthetic construct
  source 1..21: mol_type = other RNA
gcagcagcagagaccccagca

SEQ ID NO: 7039 - RNA, 21 nt, synthetic construct
  source 1..21: mol_type = other RNA
gcagcagcagccacatcaccc

SEQ ID NO: 7040 - RNA, 21 nt, synthetic construct
  source 1..21: mol_type = other RNA
gcagcagccacatcaccctca

SEQ ID NO: 7041 - RNA, 21 nt, synthetic construct
  source 1..21: mol_type = other RNA
gcagcagtcccagcagcccca

SEQ ID NO: 7042 - RNA, 21 nt, synthetic construct
  source 1..21: mol_type = other RNA
gcagccacatcaccctcagac

SEQ ID NO: 7043 - RNA, 21 nt, synthetic construct
  source 1..21: mol_type = other RNA
gcagccaccacagccccagca

SEQ ID NO: 7044 - RNA, 21 nt, synthetic construct
  source 1..21: mol_type = other RNA
gcagccattggcactagtcca

SEQ ID NO: 7045 - RNA, 21 nt, synthetic construct
  source 1..21: mol_type = other RNA
gcagccccagcctctacagaa

SEQ ID NO: 7046 - RNA, 21 nt, synthetic construct
  source 1..21: mol_type = other RNA
gcagctcacgctttgcacact

SEQ ID NO: 7047 - RNA, 21 nt, synthetic construct
  source 1..21: mol_type = other RNA
gcagctccgggcatgttcaac

SEQ ID NO: 7048 - RNA, 21 nt, synthetic construct
  source 1..21: mol_type = other RNA
gcagcttgagatgaggtggaa

SEQ ID NO: 7049 - RNA, 21 nt, synthetic construct
  source 1..21: mol_type = other RNA
gcaggctcccgtttcactttt

SEQ ID NO: 7050 - RNA, 21 nt, synthetic construct
  source 1..21: mol_type = other RNA
gcagggagatggtttcagcag

SEQ ID NO: 7051 - RNA, 21 nt, synthetic construct
  source 1..21: mol_type = other RNA
gcagggcatgaagagagctgt

SEQ ID NO: 7052 - RNA, 21 nt, synthetic construct
  source 1..21: mol_type = other RNA
gcaggtaagtgggctctgaag

SEQ ID NO: 7053 - RNA, 21 nt, synthetic construct
  source 1..21: mol_type = other RNA
gcaggttcatatttgaattct

SEQ ID NO: 7054 - RNA, 21 nt, synthetic construct
  source 1..21: mol_type = other RNA
gcagtcccagcagccccagcc

SEQ ID NO: 7055 - RNA, 21 nt, synthetic construct
  source 1..21: mol_type = other RNA
gcagttctatcatggttaaga

SEQ ID NO: 7056 - RNA, 21 nt, synthetic construct
  source 1..21: mol_type = other RNA
gcagttgtaccattagaccaa

SEQ ID NO: 7057 - RNA, 21 nt, synthetic construct
  source 1..21: mol_type = other RNA
gcagttgtccactgataggtt

SEQ ID NO: 7058 - RNA, 21 nt, synthetic construct
  source 1..21: mol_type = other RNA
gcataagagcatgaatgagcc

SEQ ID NO: 7059 - RNA, 21 nt, synthetic construct
  source 1..21: mol_type = other RNA
gcatatggagatgtagttact

SEQ ID NO: 7060 - RNA, 21 nt, synthetic construct
  source 1..21: mol_type = other RNA
gcatattttggtttccataac

SEQ ID NO: 7061 - RNA, 21 nt, synthetic construct
  source 1..21: mol_type = other RNA
gcatcacttaatttgtgtaag

SEQ ID NO: 7062 - RNA, 21 nt, synthetic construct
  source 1..21: mol_type = other RNA
gcatctccaaaacaaggagaa

SEQ ID NO: 7063 - RNA, 21 nt, synthetic construct
  source 1..21: mol_type = other RNA
gcatctttgataacccattag

SEQ ID NO: 7064 - RNA, 21 nt, synthetic construct
  source 1..21: mol_type = other RNA
gcatgaagagagctgttgaac

SEQ ID NO: 7065 - RNA, 21 nt, synthetic construct
  source 1..21: mol_type = other RNA
gcatgaatgagccaaaacatg

SEQ ID NO: 7066 - RNA, 21 nt, synthetic construct
  source 1..21: mol_type = other RNA
gcatgactggtcctgaaagtc

SEQ ID NO: 7067 - RNA, 21 nt, synthetic construct
  source 1..21: mol_type = other RNA
gcatgcagctcacgctttgca

SEQ ID NO: 7068 - RNA, 21 nt, synthetic construct
  source 1..21: mol_type = other RNA
gcatgccacaacccctttaaa

SEQ ID NO: 7069 - RNA, 21 nt, synthetic construct
  source 1..21: mol_type = other RNA
gcatgtcattctccttgtttt

SEQ ID NO: 7070 - RNA, 21 nt, synthetic construct
  source 1..21: mol_type = other RNA
gcatgttcaacagctctcttc

SEQ ID NO: 7071 - RNA, 21 nt, synthetic construct
  source 1..21: mol_type = other RNA
gcattgatatgatggatattg

SEQ ID NO: 7072 - RNA, 21 nt, synthetic construct
  source 1..21: mol_type = other RNA
gccaaaacatggcttggctct

SEQ ID NO: 7073 - RNA, 21 nt, synthetic construct
  source 1..21: mol_type = other RNA
gccaaaatggctgaaaaagcc

SEQ ID NO: 7074 - RNA, 21 nt, synthetic construct
  source 1..21: mol_type = other RNA
gccaagaccctctgtctaagc

SEQ ID NO: 7075 - RNA, 21 nt, synthetic construct
  source 1..21: mol_type = other RNA
gccaagccatgttttggctca

SEQ ID NO: 7076 - RNA, 21 nt, synthetic construct
  source 1..21: mol_type = other RNA
gccaaggtttggaaatagcca

SEQ ID NO: 7077 - RNA, 21 nt, synthetic construct
  source 1..21: mol_type = other RNA
gccaatggctgcttttcctga

SEQ ID NO: 7078 - RNA, 21 nt, synthetic construct
  source 1..21: mol_type = other RNA
gccacaacccctttaaagaat

SEQ ID NO: 7079 - RNA, 21 nt, synthetic construct
  source 1..21: mol_type = other RNA
gccacaccctggactagtgcc

SEQ ID NO: 7080 - RNA, 21 nt, synthetic construct
  source 1..21: mol_type = other RNA
gccacatcaccctcagacaga

SEQ ID NO: 7081 - RNA, 21 nt, synthetic construct
  source 1..21: mol_type = other RNA
gccacatgaaacttcagagcc

SEQ ID NO: 7082 - RNA, 21 nt, synthetic construct
  source 1..21: mol_type = other RNA
gccaccacagccccagcagca

SEQ ID NO: 7083 - RNA, 21 nt, synthetic construct
  source 1..21: mol_type = other RNA
gccacctctagattaccaccc

SEQ ID NO: 7084 - RNA, 21 nt, synthetic construct
  source 1..21: mol_type = other RNA
gccacggccactcccccaatg

SEQ ID NO: 7085 - RNA, 21 nt, synthetic construct
  source 1..21: mol_type = other RNA
gccactcccccaatgtcagga

SEQ ID NO: 7086 - RNA, 21 nt, synthetic construct
  source 1..21: mol_type = other RNA
gccacttcatgggagccacct

SEQ ID NO: 7087 - RNA, 21 nt, synthetic construct
  source 1..21: mol_type = other RNA
gccagagttttacatctaaat

SEQ ID NO: 7088 - RNA, 21 nt, synthetic construct
  source 1..21: mol_type = other RNA
gccatacttttcacactcttc

SEQ ID NO: 7089 - RNA, 21 nt, synthetic construct
  source 1..21: mol_type = other RNA
gccatccatctcatgagtggg

SEQ ID NO: 7090 - RNA, 21 nt, synthetic construct
  source 1..21: mol_type = other RNA
gccatgggatttctgaggcac

SEQ ID NO: 7091 - RNA, 21 nt, synthetic construct
  source 1..21: mol_type = other RNA
gccatgttttggctcattcat

SEQ ID NO: 7092 - RNA, 21 nt, synthetic construct
  source 1..21: mol_type = other RNA
gccattggcactagtccaggg

SEQ ID NO: 7093 - RNA, 21 nt, synthetic construct
  source 1..21: mol_type = other RNA
gccattttggcttcccaaaga

SEQ ID NO: 7094 - RNA, 21 nt, synthetic construct
  source 1..21: mol_type = other RNA
gcccaatccagttagtcctta

SEQ ID NO: 7095 - RNA, 21 nt, synthetic construct
  source 1..21: mol_type = other RNA
gcccacttacctgcgtttcat

SEQ ID NO: 7096 - RNA, 21 nt, synthetic construct
  source 1..21: mol_type = other RNA
gcccagactatgtgcctcaga

SEQ ID NO: 7097 - RNA, 21 nt, synthetic construct
  source 1..21: mol_type = other RNA
gcccagggtaagggttcatgg

SEQ ID NO: 7098 - RNA, 21 nt, synthetic construct
  source 1..21: mol_type = other RNA
gccccagcagcagcagagacc

SEQ ID NO: 7099 - RNA, 21 nt, synthetic construct
  source 1..21: mol_type = other RNA
gccccagcctctacagaagca

SEQ ID NO: 7100 - RNA, 21 nt, synthetic construct
  source 1..21: mol_type = other RNA
gcccggagctgcactgtagtt

SEQ ID NO: 7101 - RNA, 21 nt, synthetic construct
  source 1..21: mol_type = other RNA
gcccgtgagaaagaggaagag

SEQ ID NO: 7102 - RNA, 21 nt, synthetic construct
  source 1..21: mol_type = other RNA
gccctatgaacttctattcca

SEQ ID NO: 7103 - RNA, 21 nt, synthetic construct
  source 1..21: mol_type = other RNA
gccctgcatctccaaaacaag

SEQ ID NO: 7104 - RNA, 21 nt, synthetic construct
  source 1..21: mol_type = other RNA
gccctgtgacccgagtgaagg

SEQ ID NO: 7105 - RNA, 21 nt, synthetic construct
  source 1..21: mol_type = other RNA
gccgaaaggaccatgtccgtg

SEQ ID NO: 7106 - RNA, 21 nt, synthetic construct
  source 1..21: mol_type = other RNA
gccgatggatctgtataggta

SEQ ID NO: 7107 - RNA, 21 nt, synthetic construct
  source 1..21: mol_type = other RNA
gccgtctcatgtatggattgg

SEQ ID NO: 7108 - RNA, 21 nt, synthetic construct
  source 1..21: mol_type = other RNA
gccgtggctccaactcatggg

SEQ ID NO: 7109 - RNA, 21 nt, synthetic construct
  source 1..21: mol_type = other RNA
gcctcagaaatcccatggcaa

SEQ ID NO: 7110 - RNA, 21 nt, synthetic construct
  source 1..21: mol_type = other RNA
gcctccttatcccactcatga

SEQ ID NO: 7111 - RNA, 21 nt, synthetic construct
  source 1..21: mol_type = other RNA
gcctccttggacacaagcagt

SEQ ID NO: 7112 - RNA, 21 nt, synthetic construct
  source 1..21: mol_type = other RNA
gcctctacagaagcagccacc

SEQ ID NO: 7113 - RNA, 21 nt, synthetic construct
  source 1..21: mol_type = other RNA
gcctgctgagccacatgaaac

SEQ ID NO: 7114 - RNA, 21 nt, synthetic construct
  source 1..21: mol_type = other RNA
gccttacaacagatatatatg

SEQ ID NO: 7115 - RNA, 21 nt, synthetic construct
  source 1..21: mol_type = other RNA
gccttcactcgggtcacaggg

SEQ ID NO: 7116 - RNA, 21 nt, synthetic construct
  source 1..21: mol_type = other RNA
gcgactttcaggaccagtcat

SEQ ID NO: 7117 - RNA, 21 nt, synthetic construct
  source 1..21: mol_type = other RNA
gcgagcagagctttctggatc

SEQ ID NO: 7118 - RNA, 21 nt, synthetic construct
  source 1..21: mol_type = other RNA
gcgtgagctgcatgccacaac

SEQ ID NO: 7119 - RNA, 21 nt, synthetic construct
  source 1..21: mol_type = other RNA
gcgtttcatcaagtctcttgc

SEQ ID NO: 7120 - RNA, 21 nt, synthetic construct
  source 1..21: mol_type = other RNA
gctaatgggttatcaaagatg

SEQ ID NO: 7121 - RNA, 21 nt, synthetic construct
  source 1..21: mol_type = other RNA
gctaatggtcaggaaaagcag

SEQ ID NO: 7122 - RNA, 21 nt, synthetic construct
  source 1..21: mol_type = other RNA
gctatttccaaaccttggctg

SEQ ID NO: 7123 - RNA, 21 nt, synthetic construct
  source 1..21: mol_type = other RNA
gctcacgctttgcacactcaa

SEQ ID NO: 7124 - RNA, 21 nt, synthetic construct
  source 1..21: mol_type = other RNA
gctcagattgggtggtaatct

SEQ ID NO: 7125 - RNA, 21 nt, synthetic construct
  source 1..21: mol_type = other RNA
gctcagcaggctcccgtttca

SEQ ID NO: 7126 - RNA, 21 nt, synthetic construct
  source 1..21: mol_type = other RNA
gctcagtctaccacccatcca

SEQ ID NO: 7127 - RNA, 21 nt, synthetic construct
  source 1..21: mol_type = other RNA
gctcattcatgctcttatgct

SEQ ID NO: 7128 - RNA, 21 nt, synthetic construct
  source 1..21: mol_type = other RNA
gctccaactcatgggtcaatt

SEQ ID NO: 7129 - RNA, 21 nt, synthetic construct
  source 1..21: mol_type = other RNA
gctcccatgaagtggccatcc

SEQ ID NO: 7130 - RNA, 21 nt, synthetic construct
  source 1..21: mol_type = other RNA
gctccccatatctgggttcct

SEQ ID NO: 7131 - RNA, 21 nt, synthetic construct
  source 1..21: mol_type = other RNA
gctcccgtttcacttttttgc

SEQ ID NO: 7132 - RNA, 21 nt, synthetic construct
  source 1..21: mol_type = other RNA
gctccgggcatgttcaacagc

SEQ ID NO: 7133 - RNA, 21 nt, synthetic construct
  source 1..21: mol_type = other RNA
gctcgctgtctgaccagacct

SEQ ID NO: 7134 - RNA, 21 nt, synthetic construct
  source 1..21: mol_type = other RNA
gctctcttcatgccctgcatc

SEQ ID NO: 7135 - RNA, 21 nt, synthetic construct
  source 1..21: mol_type = other RNA
gctctgaagtttcatgtggct

SEQ ID NO: 7136 - RNA, 21 nt, synthetic construct
  source 1..21: mol_type = other RNA
gctctgctcgctgtctgacca

SEQ ID NO: 7137 - RNA, 21 nt, synthetic construct
  source 1..21: mol_type = other RNA
gctcttaaccatgatagaact

SEQ ID NO: 7138 - RNA, 21 nt, synthetic construct
  source 1..21: mol_type = other RNA
gctcttatgctggtaaaagac

SEQ ID NO: 7139 - RNA, 21 nt, synthetic construct
  source 1..21: mol_type = other RNA
gctctttgggaagccaaaatg

SEQ ID NO: 7140 - RNA, 21 nt, synthetic construct
  source 1..21: mol_type = other RNA
gctgaaaaagcccgtgagaaa

SEQ ID NO: 7141 - RNA, 21 nt, synthetic construct
  source 1..21: mol_type = other RNA
gctgaaaccatctccctgcat

SEQ ID NO: 7142 - RNA, 21 nt, synthetic construct
  source 1..21: mol_type = other RNA
gctgagactggggagaatagg

SEQ ID NO: 7143 - RNA, 21 nt, synthetic construct
  source 1..21: mol_type = other RNA
gctgagccacatgaaacttca

SEQ ID NO: 7144 - RNA, 21 nt, synthetic construct
  source 1..21: mol_type = other RNA
gctgcactgtagttatggatt

SEQ ID NO: 7145 - RNA, 21 nt, synthetic construct
  source 1..21: mol_type = other RNA
gctgcaggttcatatttgaat

SEQ ID NO: 7146 - RNA, 21 nt, synthetic construct
  source 1..21: mol_type = other RNA
gctgcatgactggtcctgaaa

SEQ ID NO: 7147 - RNA, 21 nt, synthetic construct
  source 1..21: mol_type = other RNA
gctgcatgccacaaccccttt

SEQ ID NO: 7148 - RNA, 21 nt, synthetic construct
  source 1..21: mol_type = other RNA
gctgctgctgctggggtctct

SEQ ID NO: 7149 - RNA, 21 nt, synthetic construct
  source 1..21: mol_type = other RNA
gctgctgctggggctgtggtg

SEQ ID NO: 7150 - RNA, 21 nt, synthetic construct
  source 1..21: mol_type = other RNA
gctgctgctggggtctctgct

SEQ ID NO: 7151 - RNA, 21 nt, synthetic construct
  source 1..21: mol_type = other RNA
gctgctgggactgctgcatga

SEQ ID NO: 7152 - RNA, 21 nt, synthetic construct
  source 1..21: mol_type = other RNA
gctgctggggctgtggtggct

SEQ ID NO: 7153 - RNA, 21 nt, synthetic construct
  source 1..21: mol_type = other RNA
gctgctggggtctctgctgct

SEQ ID NO: 7154 - RNA, 21 nt, synthetic construct
  source 1..21: mol_type = other RNA
gctgcttctgtagaggctggg

SEQ ID NO: 7155 - RNA, 21 nt, synthetic construct
  source 1..21: mol_type = other RNA
gctgcttttcctgaccattag

SEQ ID NO: 7156 - RNA, 21 nt, synthetic construct
  source 1..21: mol_type = other RNA
gctggaagcatctttgataac

SEQ ID NO: 7157 - RNA, 21 nt, synthetic construct
  source 1..21: mol_type = other RNA
gctgggactgctgcatgactg

SEQ ID NO: 7158 - RNA, 21 nt, synthetic construct
  source 1..21: mol_type = other RNA
gctggggctgctgggactgct

SEQ ID NO: 7159 - RNA, 21 nt, synthetic construct
  source 1..21: mol_type = other RNA
gctggggctgtggtggctgct

SEQ ID NO: 7160 - RNA, 21 nt, synthetic construct
  source 1..21: mol_type = other RNA
gctggggtctctgctgctgct

SEQ ID NO: 7161 - RNA, 21 nt, synthetic construct
  source 1..21: mol_type = other RNA
gctggtaaaagacgagggaga

SEQ ID NO: 7162 - RNA, 21 nt, synthetic construct
  source 1..21: mol_type = other RNA
gctggtaaagtgtatggatgg

SEQ ID NO: 7163 - RNA, 21 nt, synthetic construct
  source 1..21: mol_type = other RNA
gctggtgcttccatagatatc

SEQ ID NO: 7164 - RNA, 21 nt, synthetic construct
  source 1..21: mol_type = other RNA
gctgtctgaccagacctcatc

SEQ ID NO: 7165 - RNA, 21 nt, synthetic construct
  source 1..21: mol_type = other RNA
gctgtggtggctgcttctgta

SEQ ID NO: 7166 - RNA, 21 nt, synthetic construct
  source 1..21: mol_type = other RNA
gctgtgtgggaaagcatgtca

SEQ ID NO: 7167 - RNA, 21 nt, synthetic construct
  source 1..21: mol_type = other RNA
gctgttgaacatgcccggagc

SEQ ID NO: 7168 - RNA, 21 nt, synthetic construct
  source 1..21: mol_type = other RNA
gcttacacaaattaagtgatg

SEQ ID NO: 7169 - RNA, 21 nt, synthetic construct
  source 1..21: mol_type = other RNA
gcttagacagagggtcttggc

SEQ ID NO: 7170 - RNA, 21 nt, synthetic construct
  source 1..21: mol_type = other RNA
gcttccagctcttaaccatga

SEQ ID NO: 7171 - RNA, 21 nt, synthetic construct
  source 1..21: mol_type = other RNA
gcttccatagatatctgaagt

SEQ ID NO: 7172 - RNA, 21 nt, synthetic construct
  source 1..21: mol_type = other RNA
gcttcccaaagagccaagcca

SEQ ID NO: 7173 - RNA, 21 nt, synthetic construct
  source 1..21: mol_type = other RNA
gcttctggatccaccaatcca

SEQ ID NO: 7174 - RNA, 21 nt, synthetic construct
  source 1..21: mol_type = other RNA
gcttctggtgcagaggacaac

SEQ ID NO: 7175 - RNA, 21 nt, synthetic construct
  source 1..21: mol_type = other RNA
gcttctgtagaggctggggct

SEQ ID NO: 7176 - RNA, 21 nt, synthetic construct
  source 1..21: mol_type = other RNA
gcttgagatgaggtggaatag

SEQ ID NO: 7177 - RNA, 21 nt, synthetic construct
  source 1..21: mol_type = other RNA
gcttggatacctatacagatc

SEQ ID NO: 7178 - RNA, 21 nt, synthetic construct
  source 1..21: mol_type = other RNA
gcttggctctttgggaagcca

SEQ ID NO: 7179 - RNA, 21 nt, synthetic construct
  source 1..21: mol_type = other RNA
gcttgtgtccaaggaggctta

SEQ ID NO: 7180 - RNA, 21 nt, synthetic construct
  source 1..21: mol_type = other RNA
gctttcccacacagctaatgg

SEQ ID NO: 7181 - RNA, 21 nt, synthetic construct
  source 1..21: mol_type = other RNA
gctttctggatcctgacattg

SEQ ID NO: 7182 - RNA, 21 nt, synthetic construct
  source 1..21: mol_type = other RNA
gctttgcacactcaatgagaa

SEQ ID NO: 7183 - RNA, 21 nt, synthetic construct
  source 1..21: mol_type = other RNA
gcttttcctgaccattagcat

SEQ ID NO: 7184 - RNA, 21 nt, synthetic construct
  source 1..21: mol_type = other RNA
gcttttgaatcagaataccca

SEQ ID NO: 7185 - RNA, 21 nt, synthetic construct
  source 1..21: mol_type = other RNA
gctttttcagccattttggct

SEQ ID NO: 7186 - RNA, 21 nt, synthetic construct
  source 1..21: mol_type = other RNA
ggaaaagcagccattggcact

SEQ ID NO: 7187 - RNA, 21 nt, synthetic construct
  source 1..21: mol_type = other RNA
ggaaaccaaaatatgcaggga

SEQ ID NO: 7188 - RNA, 21 nt, synthetic construct
  source 1..21: mol_type = other RNA
ggaaacctatcagtggacaac

SEQ ID NO: 7189 - RNA, 21 nt, synthetic construct
  source 1..21: mol_type = other RNA
ggaaagcatgtcattctcctt

SEQ ID NO: 7190 - RNA, 21 nt, synthetic construct
  source 1..21: mol_type = other RNA
ggaaatagccagagttttaca

SEQ ID NO: 7191 - RNA, 21 nt, synthetic construct
  source 1..21: mol_type = other RNA
ggaaattgcctccttatccca

SEQ ID NO: 7192 - RNA, 21 nt, synthetic construct
  source 1..21: mol_type = other RNA
ggaacccagatatggggagca

SEQ ID NO: 7193 - RNA, 21 nt, synthetic construct
  source 1..21: mol_type = other RNA
ggaagagtgtgaaaagtatgg

SEQ ID NO: 7194 - RNA, 21 nt, synthetic construct
  source 1..21: mol_type = other RNA
ggaagcaccagccctatgaac

SEQ ID NO: 7195 - RNA, 21 nt, synthetic construct
  source 1..21: mol_type = other RNA
ggaagcatctttgataaccca

SEQ ID NO: 7196 - RNA, 21 nt, synthetic construct
  source 1..21: mol_type = other RNA
ggaagccaaaatggctgaaaa

SEQ ID NO: 7197 - RNA, 21 nt, synthetic construct
  source 1..21: mol_type = other RNA
ggaatagaagttcatagggct

SEQ ID NO: 7198 - RNA, 21 nt, synthetic construct
  source 1..21: mol_type = other RNA
ggaatcaccccaccaggatct

SEQ ID NO: 7199 - RNA, 21 nt, synthetic construct
  source 1..21: mol_type = other RNA
ggacaacgatgaggtctggtc

SEQ ID NO: 7200 - RNA, 21 nt, synthetic construct
  source 1..21: mol_type = other RNA
ggacaactgctccccatatct

SEQ ID NO: 7201 - RNA, 21 nt, synthetic construct
  source 1..21: mol_type = other RNA
ggacacaagcagttctatcat

SEQ ID NO: 7202 - RNA, 21 nt, synthetic construct
  source 1..21: mol_type = other RNA
ggacagggtaagagagaacag

SEQ ID NO: 7203 - RNA, 21 nt, synthetic construct
  source 1..21: mol_type = other RNA
ggacatggtcctttcggcaag

SEQ ID NO: 7204 - RNA, 21 nt, synthetic construct
  source 1..21: mol_type = other RNA
ggaccagtcatgcagcagtcc

SEQ ID NO: 7205 - RNA, 21 nt, synthetic construct
  source 1..21: mol_type = other RNA
ggaccatgtccgtgaccacag

SEQ ID NO: 7206 - RNA, 21 nt, synthetic construct
  source 1..21: mol_type = other RNA
ggactaactggattgggccgt

SEQ ID NO: 7207 - RNA, 21 nt, synthetic construct
  source 1..21: mol_type = other RNA
ggactagtgccaatggctgct

SEQ ID NO: 7208 - RNA, 21 nt, synthetic construct
  source 1..21: mol_type = other RNA
ggactataaaaatggtgaaca

SEQ ID NO: 7209 - RNA, 21 nt, synthetic construct
  source 1..21: mol_type = other RNA
ggactgctgcatgactggtcc

SEQ ID NO: 7210 - RNA, 21 nt, synthetic construct
  source 1..21: mol_type = other RNA
ggagaataggaacccagatat

SEQ ID NO: 7211 - RNA, 21 nt, synthetic construct
  source 1..21: mol_type = other RNA
ggagaatgacatgctttccca

SEQ ID NO: 7212 - RNA, 21 nt, synthetic construct
  source 1..21: mol_type = other RNA
ggagatcctggtggggtgatt

SEQ ID NO: 7213 - RNA, 21 nt, synthetic construct
  source 1..21: mol_type = other RNA
ggagatgcagggcatgaagag

SEQ ID NO: 7214 - RNA, 21 nt, synthetic construct
  source 1..21: mol_type = other RNA
ggagatggtttcagcagttgt

SEQ ID NO: 7215 - RNA, 21 nt, synthetic construct
  source 1..21: mol_type = other RNA
ggagatgtagttactgtggag

SEQ ID NO: 7216 - RNA, 21 nt, synthetic construct
  source 1..21: mol_type = other RNA
ggagcagttgtccactgatag

SEQ ID NO: 7217 - RNA, 21 nt, synthetic construct
  source 1..21: mol_type = other RNA
ggagccacctctagattacca

SEQ ID NO: 7218 - RNA, 21 nt, synthetic construct
  source 1..21: mol_type = other RNA
ggagccacggccactccccca

SEQ ID NO: 7219 - RNA, 21 nt, synthetic construct
  source 1..21: mol_type = other RNA
ggagcctgctgagccacatga

SEQ ID NO: 7220 - RNA, 21 nt, synthetic construct
  source 1..21: mol_type = other RNA
ggagctgcactgtagttatgg

SEQ ID NO: 7221 - RNA, 21 nt, synthetic construct
  source 1..21: mol_type = other RNA
ggaggcaatttccctacatga

SEQ ID NO: 7222 - RNA, 21 nt, synthetic construct
  source 1..21: mol_type = other RNA
ggaggcttacacaaattaagt

SEQ ID NO: 7223 - RNA, 21 nt, synthetic construct
  source 1..21: mol_type = other RNA
ggagtctgtggtcacggacat

SEQ ID NO: 7224 - RNA, 21 nt, synthetic construct
  source 1..21: mol_type = other RNA
ggagtggccgtggctccaact

SEQ ID NO: 7225 - RNA, 21 nt, synthetic construct
  source 1..21: mol_type = other RNA
ggataaggactaactggattg

SEQ ID NO: 7226 - RNA, 21 nt, synthetic construct
  source 1..21: mol_type = other RNA
ggataaggaggcaatttccct

SEQ ID NO: 7227 - RNA, 21 nt, synthetic construct
  source 1..21: mol_type = other RNA
ggatacctatacagatccatc

SEQ ID NO: 7228 - RNA, 21 nt, synthetic construct
  source 1..21: mol_type = other RNA
ggatattgggtattctgattc

SEQ ID NO: 7229 - RNA, 21 nt, synthetic construct
  source 1..21: mol_type = other RNA
ggatccaccaatccatacatg

SEQ ID NO: 7230 - RNA, 21 nt, synthetic construct
  source 1..21: mol_type = other RNA
ggatccagaaagctctgctcg

SEQ ID NO: 7231 - RNA, 21 nt, synthetic construct
  source 1..21: mol_type = other RNA
ggatccagaagcagaataaga

SEQ ID NO: 7232 - RNA, 21 nt, synthetic construct
  source 1..21: mol_type = other RNA
ggatcctgacattgggggagt

SEQ ID NO: 7233 - RNA, 21 nt, synthetic construct
  source 1..21: mol_type = other RNA
ggatctccctcgtcttttacc

SEQ ID NO: 7234 - RNA, 21 nt, synthetic construct
  source 1..21: mol_type = other RNA
ggatctgtataggtatccaag

SEQ ID NO: 7235 - RNA, 21 nt, synthetic construct
  source 1..21: mol_type = other RNA
ggatggccacttcatgggagc

SEQ ID NO: 7236 - RNA, 21 nt, synthetic construct
  source 1..21: mol_type = other RNA
ggatgggtggtagactgagct

SEQ ID NO: 7237 - RNA, 21 nt, synthetic construct
  source 1..21: mol_type = other RNA
ggattatgtgagaaggtgaat

SEQ ID NO: 7238 - RNA, 21 nt, synthetic construct
  source 1..21: mol_type = other RNA
ggattctttaaaggggttgtg

SEQ ID NO: 7239 - RNA, 21 nt, synthetic construct
  source 1..21: mol_type = other RNA
ggattgctcagattgggtggt

SEQ ID NO: 7240 - RNA, 21 nt, synthetic construct
  source 1..21: mol_type = other RNA
ggattgggccgtctcatgtat

SEQ ID NO: 7241 - RNA, 21 nt, synthetic construct
  source 1..21: mol_type = other RNA
ggattggtggatccagaagca

SEQ ID NO: 7242 - RNA, 21 nt, synthetic construct
  source 1..21: mol_type = other RNA
ggatttctgaggcacatagtc

SEQ ID NO: 7243 - RNA, 21 nt, synthetic construct
  source 1..21: mol_type = other RNA
ggcaaaaaagtgaaacgggag

SEQ ID NO: 7244 - RNA, 21 nt, synthetic construct
  source 1..21: mol_type = other RNA
ggcaagagacttgatgaaacg

SEQ ID NO: 7245 - RNA, 21 nt, synthetic construct
  source 1..21: mol_type = other RNA
ggcaatttccctacatgatgt

SEQ ID NO: 7246 - RNA, 21 nt, synthetic construct
  source 1..21: mol_type = other RNA
ggcacatagtctgggccatac

SEQ ID NO: 7247 - RNA, 21 nt, synthetic construct
  source 1..21: mol_type = other RNA
ggcactagtccagggtgtggc

SEQ ID NO: 7248 - RNA, 21 nt, synthetic construct
  source 1..21: mol_type = other RNA
ggcatatggagatgtagttac

SEQ ID NO: 7249 - RNA, 21 nt, synthetic construct
  source 1..21: mol_type = other RNA
ggcatgaagagagctgttgaa

SEQ ID NO: 7250 - RNA, 21 nt, synthetic construct
  source 1..21: mol_type = other RNA
ggcatgcagctcacgctttgc

SEQ ID NO: 7251 - RNA, 21 nt, synthetic construct
  source 1..21: mol_type = other RNA
ggcatgttcaacagctctctt

SEQ ID NO: 7252 - RNA, 21 nt, synthetic construct
  source 1..21: mol_type = other RNA
ggccactcccccaatgtcagg

SEQ ID NO: 7253 - RNA, 21 nt, synthetic construct
  source 1..21: mol_type = other RNA
ggccacttcatgggagccacc

SEQ ID NO: 7254 - RNA, 21 nt, synthetic construct
  source 1..21: mol_type = other RNA
ggccatacttttcacactctt

SEQ ID NO: 7255 - RNA, 21 nt, synthetic construct
  source 1..21: mol_type = other RNA
ggccatccatctcatgagtgg

SEQ ID NO: 7256 - RNA, 21 nt, synthetic construct
  source 1..21: mol_type = other RNA
ggcccaatccagttagtcctt

SEQ ID NO: 7257 - RNA, 21 nt, synthetic construct
  source 1..21: mol_type = other RNA
ggcccagactatgtgcctcag

SEQ ID NO: 7258 - RNA, 21 nt, synthetic construct
  source 1..21: mol_type = other RNA
ggccctgtgacccgagtgaag

SEQ ID NO: 7259 - RNA, 21 nt, synthetic construct
  source 1..21: mol_type = other RNA
ggccgtctcatgtatggattg

SEQ ID NO: 7260 - RNA, 21 nt, synthetic construct
  source 1..21: mol_type = other RNA
ggccgtggctccaactcatgg

SEQ ID NO: 7261 - RNA, 21 nt, synthetic construct
  source 1..21: mol_type = other RNA
ggccttacaacagatatatat

SEQ ID NO: 7262 - RNA, 21 nt, synthetic construct
  source 1..21: mol_type = other RNA
ggctatttccaaaccttggct

SEQ ID NO: 7263 - RNA, 21 nt, synthetic construct
  source 1..21: mol_type = other RNA
ggctcagcaggctcccgtttc

SEQ ID NO: 7264 - RNA, 21 nt, synthetic construct
  source 1..21: mol_type = other RNA
ggctcattcatgctcttatgc

SEQ ID NO: 7265 - RNA, 21 nt, synthetic construct
  source 1..21: mol_type = other RNA
ggctccaactcatgggtcaat

SEQ ID NO: 7266 - RNA, 21 nt, synthetic construct
  source 1..21: mol_type = other RNA
ggctcccatgaagtggccatc

SEQ ID NO: 7267 - RNA, 21 nt, synthetic construct
  source 1..21: mol_type = other RNA
ggctcccgtttcacttttttg

SEQ ID NO: 7268 - RNA, 21 nt, synthetic construct
  source 1..21: mol_type = other RNA
ggctctgaagtttcatgtggc

SEQ ID NO: 7269 - RNA, 21 nt, synthetic construct
  source 1..21: mol_type = other RNA
ggctctttgggaagccaaaat

SEQ ID NO: 7270 - RNA, 21 nt, synthetic construct
  source 1..21: mol_type = other RNA
ggctgaaaaagcccgtgagaa

SEQ ID NO: 7271 - RNA, 21 nt, synthetic construct
  source 1..21: mol_type = other RNA
ggctgagactggggagaatag

SEQ ID NO: 7272 - RNA, 21 nt, synthetic construct
  source 1..21: mol_type = other RNA
ggctgctgctgctggggtctc

SEQ ID NO: 7273 - RNA, 21 nt, synthetic construct
  source 1..21: mol_type = other RNA
ggctgctgggactgctgcatg

SEQ ID NO: 7274 - RNA, 21 nt, synthetic construct
  source 1..21: mol_type = other RNA
ggctgcttctgtagaggctgg

SEQ ID NO: 7275 - RNA, 21 nt, synthetic construct
  source 1..21: mol_type = other RNA
ggctgcttttcctgaccatta

SEQ ID NO: 7276 - RNA, 21 nt, synthetic construct
  source 1..21: mol_type = other RNA
ggctggggctgctgggactgc

SEQ ID NO: 7277 - RNA, 21 nt, synthetic construct
  source 1..21: mol_type = other RNA
ggctggtaaagtgtatggatg

SEQ ID NO: 7278 - RNA, 21 nt, synthetic construct
  source 1..21: mol_type = other RNA
ggctggtgcttccatagatat

SEQ ID NO: 7279 - RNA, 21 nt, synthetic construct
  source 1..21: mol_type = other RNA
ggctgtggtggctgcttctgt

SEQ ID NO: 7280 - RNA, 21 nt, synthetic construct
  source 1..21: mol_type = other RNA
ggcttacacaaattaagtgat

SEQ ID NO: 7281 - RNA, 21 nt, synthetic construct
  source 1..21: mol_type = other RNA
ggcttcccaaagagccaagcc

SEQ ID NO: 7282 - RNA, 21 nt, synthetic construct
  source 1..21: mol_type = other RNA
ggcttctggtgcagaggacaa

SEQ ID NO: 7283 - RNA, 21 nt, synthetic construct
  source 1..21: mol_type = other RNA
ggcttggatacctatacagat

SEQ ID NO: 7284 - RNA, 21 nt, synthetic construct
  source 1..21: mol_type = other RNA
ggcttggctctttgggaagcc

SEQ ID NO: 7285 - RNA, 21 nt, synthetic construct
  source 1..21: mol_type = other RNA
ggcttttgaatcagaataccc

SEQ ID NO: 7286 - RNA, 21 nt, synthetic construct
  source 1..21: mol_type = other RNA
ggctttttcagccattttggc

SEQ ID NO: 7287 - RNA, 21 nt, synthetic construct
  source 1..21: mol_type = other RNA
gggaaagcatgtcattctcct

SEQ ID NO: 7288 - RNA, 21 nt, synthetic construct
  source 1..21: mol_type = other RNA
gggaaattgcctccttatccc

SEQ ID NO: 7289 - RNA, 21 nt, synthetic construct
  source 1..21: mol_type = other RNA
gggaagccaaaatggctgaaa

SEQ ID NO: 7290 - RNA, 21 nt, synthetic construct
  source 1..21: mol_type = other RNA
gggactgctgcatgactggtc

SEQ ID NO: 7291 - RNA, 21 nt, synthetic construct
  source 1..21: mol_type = other RNA
gggagaataggaacccagata

SEQ ID NO: 7292 - RNA, 21 nt, synthetic construct
  source 1..21: mol_type = other RNA
gggagatcctggtggggtgat

SEQ ID NO: 7293 - RNA, 21 nt, synthetic construct
  source 1..21: mol_type = other RNA
gggagatggtttcagcagttg

SEQ ID NO: 7294 - RNA, 21 nt, synthetic construct
  source 1..21: mol_type = other RNA
gggagcagttgtccactgata

SEQ ID NO: 7295 - RNA, 21 nt, synthetic construct
  source 1..21: mol_type = other RNA
gggagccacctctagattacc

SEQ ID NO: 7296 - RNA, 21 nt, synthetic construct
  source 1..21: mol_type = other RNA
gggagcctgctgagccacatg

SEQ ID NO: 7297 - RNA, 21 nt, synthetic construct
  source 1..21: mol_type = other RNA
gggagtggccgtggctccaac

SEQ ID NO: 7298 - RNA, 21 nt, synthetic construct
  source 1..21: mol_type = other RNA
gggataaggaggcaatttccc

SEQ ID NO: 7299 - RNA, 21 nt, synthetic construct
  source 1..21: mol_type = other RNA
gggattagaagaattcaaata

SEQ ID NO: 7300 - RNA, 21 nt, synthetic construct
  source 1..21: mol_type = other RNA
gggattctttaaaggggttgt

SEQ ID NO: 7301 - RNA, 21 nt, synthetic construct
  source 1..21: mol_type = other RNA
gggatttctgaggcacatagt

SEQ ID NO: 7302 - RNA, 21 nt, synthetic construct
  source 1..21: mol_type = other RNA
gggcatgaagagagctgttga

SEQ ID NO: 7303 - RNA, 21 nt, synthetic construct
  source 1..21: mol_type = other RNA
gggcatgttcaacagctctct

SEQ ID NO: 7304 - RNA, 21 nt, synthetic construct
  source 1..21: mol_type = other RNA
gggccatacttttcacactct

SEQ ID NO: 7305 - RNA, 21 nt, synthetic construct
  source 1..21: mol_type = other RNA
gggccgtctcatgtatggatt

SEQ ID NO: 7306 - RNA, 21 nt, synthetic construct
  source 1..21: mol_type = other RNA
gggccttacaacagatatata

SEQ ID NO: 7307 - RNA, 21 nt, synthetic construct
  source 1..21: mol_type = other RNA
gggctctgaagtttcatgtgg

SEQ ID NO: 7308 - RNA, 21 nt, synthetic construct
  source 1..21: mol_type = other RNA
gggctgctgggactgctgcat

SEQ ID NO: 7309 - RNA, 21 nt, synthetic construct
  source 1..21: mol_type = other RNA
gggctggtgcttccatagata

SEQ ID NO: 7310 - RNA, 21 nt, synthetic construct
  source 1..21: mol_type = other RNA
gggctgtggtggctgcttctg

SEQ ID NO: 7311 - RNA, 21 nt, synthetic construct
  source 1..21: mol_type = other RNA
gggcttttgaatcagaatacc

SEQ ID NO: 7312 - RNA, 21 nt, synthetic construct
  source 1..21: mol_type = other RNA
gggctttttcagccattttgg

SEQ ID NO: 7313 - RNA, 21 nt, synthetic construct
  source 1..21: mol_type = other RNA
ggggagaataggaacccagat

SEQ ID NO: 7314 - RNA, 21 nt, synthetic construct
  source 1..21: mol_type = other RNA
ggggagcagttgtccactgat

SEQ ID NO: 7315 - RNA, 21 nt, synthetic construct
  source 1..21: mol_type = other RNA
ggggagtggccgtggctccaa

SEQ ID NO: 7316 - RNA, 21 nt, synthetic construct
  source 1..21: mol_type = other RNA
ggggctgctgggactgctgca

SEQ ID NO: 7317 - RNA, 21 nt, synthetic construct
  source 1..21: mol_type = other RNA
ggggctgtggtggctgcttct

SEQ ID NO: 7318 - RNA, 21 nt, synthetic construct
  source 1..21: mol_type = other RNA
gggggagtggccgtggctcca

SEQ ID NO: 7319 - RNA, 21 nt, synthetic construct
  source 1..21: mol_type = other RNA
gggggtgatatcatatatatc

SEQ ID NO: 7320 - RNA, 21 nt, synthetic construct
  source 1..21: mol_type = other RNA
ggggtctctgctgctgctggg

SEQ ID NO: 7321 - RNA, 21 nt, synthetic construct
  source 1..21: mol_type = other RNA
ggggtgatatcatatatatct

SEQ ID NO: 7322 - RNA, 21 nt, synthetic construct
  source 1..21: mol_type = other RNA
ggggtgattcctattgggatt

SEQ ID NO: 7323 - RNA, 21 nt, synthetic construct
  source 1..21: mol_type = other RNA
ggggttgtggcatgcagctca

SEQ ID NO: 7324 - RNA, 21 nt, synthetic construct
  source 1..21: mol_type = other RNA
gggtaagagagaacagaaaca

SEQ ID NO: 7325 - RNA, 21 nt, synthetic construct
  source 1..21: mol_type = other RNA
gggtaagggttcatgggatta

SEQ ID NO: 7326 - RNA, 21 nt, synthetic construct
  source 1..21: mol_type = other RNA
gggtattctgattcaaaagcc

SEQ ID NO: 7327 - RNA, 21 nt, synthetic construct
  source 1..21: mol_type = other RNA
gggtcaattctcattgagtgt

SEQ ID NO: 7328 - RNA, 21 nt, synthetic construct
  source 1..21: mol_type = other RNA
gggtcacagggccttacaaca

SEQ ID NO: 7329 - RNA, 21 nt, synthetic construct
  source 1..21: mol_type = other RNA
gggtctctgctgctgctgggg

SEQ ID NO: 7330 - RNA, 21 nt, synthetic construct
  source 1..21: mol_type = other RNA
gggtcttggcttggataccta

SEQ ID NO: 7331 - RNA, 21 nt, synthetic construct
  source 1..21: mol_type = other RNA
gggtgatatcatatatatctg

SEQ ID NO: 7332 - RNA, 21 nt, synthetic construct
  source 1..21: mol_type = other RNA
gggtgatgtggctgctgctgc

SEQ ID NO: 7333 - RNA, 21 nt, synthetic construct
  source 1..21: mol_type = other RNA
gggtgattcctattgggattc

SEQ ID NO: 7334 - RNA, 21 nt, synthetic construct
  source 1..21: mol_type = other RNA
gggtggtaatctagaggtggc

SEQ ID NO: 7335 - RNA, 21 nt, synthetic construct
  source 1..21: mol_type = other RNA
gggtggtagactgagcttaga

SEQ ID NO: 7336 - RNA, 21 nt, synthetic construct
  source 1..21: mol_type = other RNA
gggtgtggcttctggtgcaga

SEQ ID NO: 7337 - RNA, 21 nt, synthetic construct
  source 1..21: mol_type = other RNA
gggttatcaaagatgcttcca

SEQ ID NO: 7338 - RNA, 21 nt, synthetic construct
  source 1..21: mol_type = other RNA
gggttcatgggattagaagaa

SEQ ID NO: 7339 - RNA, 21 nt, synthetic construct
  source 1..21: mol_type = other RNA
gggttcctattctccccagtc

SEQ ID NO: 7340 - RNA, 21 nt, synthetic construct
  source 1..21: mol_type = other RNA
gggttgtggcatgcagctcac

SEQ ID NO: 7341 - RNA, 21 nt, synthetic construct
  source 1..21: mol_type = other RNA
ggtaaaagacgagggagatcc

SEQ ID NO: 7342 - RNA, 21 nt, synthetic construct
  source 1..21: mol_type = other RNA
ggtaaagtgtatggatgggtg

SEQ ID NO: 7343 - RNA, 21 nt, synthetic construct
  source 1..21: mol_type = other RNA
ggtaaccaacaaaagggggtg

SEQ ID NO: 7344 - RNA, 21 nt, synthetic construct
  source 1..21: mol_type = other RNA
ggtaagagagaacagaaacag

SEQ ID NO: 7345 - RNA, 21 nt, synthetic construct
  source 1..21: mol_type = other RNA
ggtaagggttcatgggattag

SEQ ID NO: 7346 - RNA, 21 nt, synthetic construct
  source 1..21: mol_type = other RNA
ggtaagtgggctctgaagttt

SEQ ID NO: 7347 - RNA, 21 nt, synthetic construct
  source 1..21: mol_type = other RNA
ggtaatctagaggtggctccc

SEQ ID NO: 7348 - RNA, 21 nt, synthetic construct
  source 1..21: mol_type = other RNA
ggtacaactgctgaaaccatc

SEQ ID NO: 7349 - RNA, 21 nt, synthetic construct
  source 1..21: mol_type = other RNA
ggtagactgagcttagacaga

SEQ ID NO: 7350 - RNA, 21 nt, synthetic construct
  source 1..21: mol_type = other RNA
ggtatccaagccaagaccctc

SEQ ID NO: 7351 - RNA, 21 nt, synthetic construct
  source 1..21: mol_type = other RNA
ggtattctgattcaaaagccc

SEQ ID NO: 7352 - RNA, 21 nt, synthetic construct
  source 1..21: mol_type = other RNA
ggtcaattctcattgagtgtg

SEQ ID NO: 7353 - RNA, 21 nt, synthetic construct
  source 1..21: mol_type = other RNA
ggtcacagggccttacaacag

SEQ ID NO: 7354 - RNA, 21 nt, synthetic construct
  source 1..21: mol_type = other RNA
ggtcacggacatggtcctttc

SEQ ID NO: 7355 - RNA, 21 nt, synthetic construct
  source 1..21: mol_type = other RNA
ggtcagacagcgagcagagct

SEQ ID NO: 7356 - RNA, 21 nt, synthetic construct
  source 1..21: mol_type = other RNA
ggtcaggaaaagcagccattg

SEQ ID NO: 7357 - RNA, 21 nt, synthetic construct
  source 1..21: mol_type = other RNA
ggtcctgaaagtcgcaaaagt

SEQ ID NO: 7358 - RNA, 21 nt, synthetic construct
  source 1..21: mol_type = other RNA
ggtcctttcggcaagagactt

SEQ ID NO: 7359 - RNA, 21 nt, synthetic construct
  source 1..21: mol_type = other RNA
ggtctaatggtacaactgctg

SEQ ID NO: 7360 - RNA, 21 nt, synthetic construct
  source 1..21: mol_type = other RNA
ggtctctgctgctgctggggc

SEQ ID NO: 7361 - RNA, 21 nt, synthetic construct
  source 1..21: mol_type = other RNA
ggtctggtcagacagcgagca

SEQ ID NO: 7362 - RNA, 21 nt, synthetic construct
  source 1..21: mol_type = other RNA
ggtcttggcttggatacctat

SEQ ID NO: 7363 - RNA, 21 nt, synthetic construct
  source 1..21: mol_type = other RNA
ggtgaacatcattcaccttct

SEQ ID NO: 7364 - RNA, 21 nt, synthetic construct
  source 1..21: mol_type = other RNA
ggtgaatgatgttcaccattt

SEQ ID NO: 7365 - RNA, 21 nt, synthetic construct
  source 1..21: mol_type = other RNA
ggtgatatcatatatatctgt

SEQ ID NO: 7366 - RNA, 21 nt, synthetic construct
  source 1..21: mol_type = other RNA
ggtgatgtggctgctgctgct

SEQ ID NO: 7367 - RNA, 21 nt, synthetic construct
  source 1..21: mol_type = other RNA
ggtgattcctattgggattct

SEQ ID NO: 7368 - RNA, 21 nt, synthetic construct
  source 1..21: mol_type = other RNA
ggtgcagaggacaacgatgag

SEQ ID NO: 7369 - RNA, 21 nt, synthetic construct
  source 1..21: mol_type = other RNA
ggtgcttccatagatatctga

SEQ ID NO: 7370 - RNA, 21 nt, synthetic construct
  source 1..21: mol_type = other RNA
ggtggaatagaagttcatagg

SEQ ID NO: 7371 - RNA, 21 nt, synthetic construct
  source 1..21: mol_type = other RNA
ggtggatccagaagcagaata

SEQ ID NO: 7372 - RNA, 21 nt, synthetic construct
  source 1..21: mol_type = other RNA
ggtggctcccatgaagtggcc

SEQ ID NO: 7373 - RNA, 21 nt, synthetic construct
  source 1..21: mol_type = other RNA
ggtggctgcttctgtagaggc

SEQ ID NO: 7374 - RNA, 21 nt, synthetic construct
  source 1..21: mol_type = other RNA
ggtggggtgattcctattggg

SEQ ID NO: 7375 - RNA, 21 nt, synthetic construct
  source 1..21: mol_type = other RNA
ggtggtaatctagaggtggct

SEQ ID NO: 7376 - RNA, 21 nt, synthetic construct
  source 1..21: mol_type = other RNA
ggtggtagactgagcttagac

SEQ ID NO: 7377 - RNA, 21 nt, synthetic construct
  source 1..21: mol_type = other RNA
ggtgtggcttctggtgcagag

SEQ ID NO: 7378 - RNA, 21 nt, synthetic construct
  source 1..21: mol_type = other RNA
ggttaagagctggaagcatct

SEQ ID NO: 7379 - RNA, 21 nt, synthetic construct
  source 1..21: mol_type = other RNA
ggttatcaaagatgcttccag

SEQ ID NO: 7380 - RNA, 21 nt, synthetic construct
  source 1..21: mol_type = other RNA
ggttatggaaaccaaaatatg

SEQ ID NO: 7381 - RNA, 21 nt, synthetic construct
  source 1..21: mol_type = other RNA
ggttcatatttgaattcttct

SEQ ID NO: 7382 - RNA, 21 nt, synthetic construct
  source 1..21: mol_type = other RNA
ggttcatgggattagaagaat

SEQ ID NO: 7383 - RNA, 21 nt, synthetic construct
  source 1..21: mol_type = other RNA
ggttcctattctccccagtct

SEQ ID NO: 7384 - RNA, 21 nt, synthetic construct
  source 1..21: mol_type = other RNA
ggttgtggcatgcagctcacg

SEQ ID NO: 7385 - RNA, 21 nt, synthetic construct
  source 1..21: mol_type = other RNA
ggtttcagcagttgtaccatt

SEQ ID NO: 7386 - RNA, 21 nt, synthetic construct
  source 1..21: mol_type = other RNA
ggtttccataacctaagtatt

SEQ ID NO: 7387 - RNA, 21 nt, synthetic construct
  source 1..21: mol_type = other RNA
ggtttccattgcattgatatg

SEQ ID NO: 7388 - RNA, 21 nt, synthetic construct
  source 1..21: mol_type = other RNA
ggtttggaaatagccagagtt

SEQ ID NO: 7389 - RNA, 21 nt, synthetic construct
  source 1..21: mol_type = other RNA
gtaaaactctggctatttcca

SEQ ID NO: 7390 - RNA, 21 nt, synthetic construct
  source 1..21: mol_type = other RNA
gtaaaagacgagggagatcct

SEQ ID NO: 7391 - RNA, 21 nt, synthetic construct
  source 1..21: mol_type = other RNA
gtaaagtgtatggatgggtgg

SEQ ID NO: 7392 - RNA, 21 nt, synthetic construct
  source 1..21: mol_type = other RNA
gtaaccaacaaaagggggtga

SEQ ID NO: 7393 - RNA, 21 nt, synthetic construct
  source 1..21: mol_type = other RNA
gtaactacatctccatatgcc

SEQ ID NO: 7394 - RNA, 21 nt, synthetic construct
  source 1..21: mol_type = other RNA
gtaagcctccttggacacaag

SEQ ID NO: 7395 - RNA, 21 nt, synthetic construct
  source 1..21: mol_type = other RNA
gtaaggccctgtgacccgagt

SEQ ID NO: 7396 - RNA, 21 nt, synthetic construct
  source 1..21: mol_type = other RNA
gtaagggttcatgggattaga

SEQ ID NO: 7397 - RNA, 21 nt, synthetic construct
  source 1..21: mol_type = other RNA
gtaagtgggctctgaagtttc

SEQ ID NO: 7398 - RNA, 21 nt, synthetic construct
  source 1..21: mol_type = other RNA
gtaatctagaggtggctccca

SEQ ID NO: 7399 - RNA, 21 nt, synthetic construct
  source 1..21: mol_type = other RNA
gtacaactgctgaaaccatct

SEQ ID NO: 7400 - RNA, 21 nt, synthetic construct
  source 1..21: mol_type = other RNA
gtacatcatgtagggaaattg

SEQ ID NO: 7401 - RNA, 21 nt, synthetic construct
  source 1..21: mol_type = other RNA
gtacatttggtctaatggtac

SEQ ID NO: 7402 - RNA, 21 nt, synthetic construct
  source 1..21: mol_type = other RNA
gtaccattagaccaaatgtac

SEQ ID NO: 7403 - RNA, 21 nt, synthetic construct
  source 1..21: mol_type = other RNA
gtagactgagcttagacagag

SEQ ID NO: 7404 - RNA, 21 nt, synthetic construct
  source 1..21: mol_type = other RNA
gtagaggctggggctgctggg

SEQ ID NO: 7405 - RNA, 21 nt, synthetic construct
  source 1..21: mol_type = other RNA
gtagggaaattgcctccttat

SEQ ID NO: 7406 - RNA, 21 nt, synthetic construct
  source 1..21: mol_type = other RNA
gtagttactgtggagtctgtg

SEQ ID NO: 7407 - RNA, 21 nt, synthetic construct
  source 1..21: mol_type = other RNA
gtagttatggattatgtgaga

SEQ ID NO: 7408 - RNA, 21 nt, synthetic construct
  source 1..21: mol_type = other RNA
gtataggtatccaagccaaga

SEQ ID NO: 7409 - RNA, 21 nt, synthetic construct
  source 1..21: mol_type = other RNA
gtatccaagccaagaccctct

SEQ ID NO: 7410 - RNA, 21 nt, synthetic construct
  source 1..21: mol_type = other RNA
gtatggatgggtggtagactg

SEQ ID NO: 7411 - RNA, 21 nt, synthetic construct
  source 1..21: mol_type = other RNA
gtatggattggtggatccaga

SEQ ID NO: 7412 - RNA, 21 nt, synthetic construct
  source 1..21: mol_type = other RNA
gtatggcccagactatgtgcc

SEQ ID NO: 7413 - RNA, 21 nt, synthetic construct
  source 1..21: mol_type = other RNA
gtattctgattcaaaagccca

SEQ ID NO: 7414 - RNA, 21 nt, synthetic construct
  source 1..21: mol_type = other RNA
gtatttagatgtaaaactctg

SEQ ID NO: 7415 - RNA, 21 nt, synthetic construct
  source 1..21: mol_type = other RNA
gtcaactcttattctgcttct

SEQ ID NO: 7416 - RNA, 21 nt, synthetic construct
  source 1..21: mol_type = other RNA
gtcaattctcattgagtgtgc

SEQ ID NO: 7417 - RNA, 21 nt, synthetic construct
  source 1..21: mol_type = other RNA
gtcacagggccttacaacaga

SEQ ID NO: 7418 - RNA, 21 nt, synthetic construct
  source 1..21: mol_type = other RNA
gtcacggacatggtcctttcg

SEQ ID NO: 7419 - RNA, 21 nt, synthetic construct
  source 1..21: mol_type = other RNA
gtcagacagcgagcagagctt

SEQ ID NO: 7420 - RNA, 21 nt, synthetic construct
  source 1..21: mol_type = other RNA
gtcaggaaaagcagccattgg

SEQ ID NO: 7421 - RNA, 21 nt, synthetic construct
  source 1..21: mol_type = other RNA
gtcaggatccagaaagctctg

SEQ ID NO: 7422 - RNA, 21 nt, synthetic construct
  source 1..21: mol_type = other RNA
gtcatgcagcagtcccagcag

SEQ ID NO: 7423 - RNA, 21 nt, synthetic construct
  source 1..21: mol_type = other RNA
gtcattctccttgttttggag

SEQ ID NO: 7424 - RNA, 21 nt, synthetic construct
  source 1..21: mol_type = other RNA
gtccaaggaggcttacacaaa

SEQ ID NO: 7425 - RNA, 21 nt, synthetic construct
  source 1..21: mol_type = other RNA
gtccacagaacttttgcgact

SEQ ID NO: 7426 - RNA, 21 nt, synthetic construct
  source 1..21: mol_type = other RNA
gtccactgataggtttccatt

SEQ ID NO: 7427 - RNA, 21 nt, synthetic construct
  source 1..21: mol_type = other RNA
gtccagggtgtggcttctggt

SEQ ID NO: 7428 - RNA, 21 nt, synthetic construct
  source 1..21: mol_type = other RNA
gtccatgtttggattgctcag

SEQ ID NO: 7429 - RNA, 21 nt, synthetic construct
  source 1..21: mol_type = other RNA
gtcccagcagccccagcctct

SEQ ID NO: 7430 - RNA, 21 nt, synthetic construct
  source 1..21: mol_type = other RNA
gtccgtgaccacagactccac

SEQ ID NO: 7431 - RNA, 21 nt, synthetic construct
  source 1..21: mol_type = other RNA
gtcctctgcaccagaagccac

SEQ ID NO: 7432 - RNA, 21 nt, synthetic construct
  source 1..21: mol_type = other RNA
gtcctgaaagtcgcaaaagtt

SEQ ID NO: 7433 - RNA, 21 nt, synthetic construct
  source 1..21: mol_type = other RNA
gtccttatccaaactcttcac

SEQ ID NO: 7434 - RNA, 21 nt, synthetic construct
  source 1..21: mol_type = other RNA
gtcctttcggcaagagacttg

SEQ ID NO: 7435 - RNA, 21 nt, synthetic construct
  source 1..21: mol_type = other RNA
gtcgcaaaagttctgtggaca

SEQ ID NO: 7436 - RNA, 21 nt, synthetic construct
  source 1..21: mol_type = other RNA
gtctaagctcagtctaccacc

SEQ ID NO: 7437 - RNA, 21 nt, synthetic construct
  source 1..21: mol_type = other RNA
gtctaatggtacaactgctga

SEQ ID NO: 7438 - RNA, 21 nt, synthetic construct
  source 1..21: mol_type = other RNA
gtctaccacccatccatacac

SEQ ID NO: 7439 - RNA, 21 nt, synthetic construct
  source 1..21: mol_type = other RNA
gtctcagccgatggatctgta

SEQ ID NO: 7440 - RNA, 21 nt, synthetic construct
  source 1..21: mol_type = other RNA
gtctcatgtatggattggtgg

SEQ ID NO: 7441 - RNA, 21 nt, synthetic construct
  source 1..21: mol_type = other RNA
gtctctgctgctgctggggct

SEQ ID NO: 7442 - RNA, 21 nt, synthetic construct
  source 1..21: mol_type = other RNA
gtctcttgccgaaaggaccat

SEQ ID NO: 7443 - RNA, 21 nt, synthetic construct
  source 1..21: mol_type = other RNA
gtctgaccagacctcatcgtt

SEQ ID NO: 7444 - RNA, 21 nt, synthetic construct
  source 1..21: mol_type = other RNA
gtctgagggtgatgtggctgc

SEQ ID NO: 7445 - RNA, 21 nt, synthetic construct
  source 1..21: mol_type = other RNA
gtctgggccatacttttcaca

SEQ ID NO: 7446 - RNA, 21 nt, synthetic construct
  source 1..21: mol_type = other RNA
gtctggtcagacagcgagcag

SEQ ID NO: 7447 - RNA, 21 nt, synthetic construct
  source 1..21: mol_type = other RNA
gtctgtcaactcttattctgc

SEQ ID NO: 7448 - RNA, 21 nt, synthetic construct
  source 1..21: mol_type = other RNA
gtctgtggtcacggacatggt

SEQ ID NO: 7449 - RNA, 21 nt, synthetic construct
  source 1..21: mol_type = other RNA
gtcttggcttggatacctata

SEQ ID NO: 7450 - RNA, 21 nt, synthetic construct
  source 1..21: mol_type = other RNA
gtcttttaccagcataagagc

SEQ ID NO: 7451 - RNA, 21 nt, synthetic construct
  source 1..21: mol_type = other RNA
gtcttttcaagtgaggtaacc

SEQ ID NO: 7452 - RNA, 21 nt, synthetic construct
  source 1..21: mol_type = other RNA
gtgaaaagtatggcccagact

SEQ ID NO: 7453 - RNA, 21 nt, synthetic construct
  source 1..21: mol_type = other RNA
gtgaaacgggagcctgctgag

SEQ ID NO: 7454 - RNA, 21 nt, synthetic construct
  source 1..21: mol_type = other RNA
gtgaacatcattcaccttctc

SEQ ID NO: 7455 - RNA, 21 nt, synthetic construct
  source 1..21: mol_type = other RNA
gtgaagagtttggataaggac

SEQ ID NO: 7456 - RNA, 21 nt, synthetic construct
  source 1..21: mol_type = other RNA
gtgaaggcatatggagatgta

SEQ ID NO: 7457 - RNA, 21 nt, synthetic construct
  source 1..21: mol_type = other RNA
gtgaatgatgttcaccatttt

SEQ ID NO: 7458 - RNA, 21 nt, synthetic construct
  source 1..21: mol_type = other RNA
gtgaccacagactccacagta

SEQ ID NO: 7459 - RNA, 21 nt, synthetic construct
  source 1..21: mol_type = other RNA
gtgacccgagtgaaggcatat

SEQ ID NO: 7460 - RNA, 21 nt, synthetic construct
  source 1..21: mol_type = other RNA
gtgagaaagaggaagagtgtg

SEQ ID NO: 7461 - RNA, 21 nt, synthetic construct
  source 1..21: mol_type = other RNA
gtgagaaggtgaatgatgttc

SEQ ID NO: 7462 - RNA, 21 nt, synthetic construct
  source 1..21: mol_type = other RNA
gtgagctgcatgccacaaccc

SEQ ID NO: 7463 - RNA, 21 nt, synthetic construct
  source 1..21: mol_type = other RNA
gtgaggtaaccaacaaaaggg

SEQ ID NO: 7464 - RNA, 21 nt, synthetic construct
  source 1..21: mol_type = other RNA
gtgatgctaatggtcaggaaa

SEQ ID NO: 7465 - RNA, 21 nt, synthetic construct
  source 1..21: mol_type = other RNA
gtgatgtggctgctgctgctg

SEQ ID NO: 7466 - RNA, 21 nt, synthetic construct
  source 1..21: mol_type = other RNA
gtgattcctattgggattctt

SEQ ID NO: 7467 - RNA, 21 nt, synthetic construct
  source 1..21: mol_type = other RNA
gtgcaaagcgtgagctgcatg

SEQ ID NO: 7468 - RNA, 21 nt, synthetic construct
  source 1..21: mol_type = other RNA
gtgcagaggacaacgatgagg

SEQ ID NO: 7469 - RNA, 21 nt, synthetic construct
  source 1..21: mol_type = other RNA
gtgcagctccgggcatgttca

SEQ ID NO: 7470 - RNA, 21 nt, synthetic construct
  source 1..21: mol_type = other RNA
gtgccaatggctgcttttcct

SEQ ID NO: 7471 - RNA, 21 nt, synthetic construct
  source 1..21: mol_type = other RNA
gtgcctcagaaatcccatggc

SEQ ID NO: 7472 - RNA, 21 nt, synthetic construct
  source 1..21: mol_type = other RNA
gtgcttccatagatatctgaa

SEQ ID NO: 7473 - RNA, 21 nt, synthetic construct
  source 1..21: mol_type = other RNA
gtggaatagaagttcataggg

SEQ ID NO: 7474 - RNA, 21 nt, synthetic construct
  source 1..21: mol_type = other RNA
gtggacaactgctccccatat

SEQ ID NO: 7475 - RNA, 21 nt, synthetic construct
  source 1..21: mol_type = other RNA
gtggacagggtaagagagaac

SEQ ID NO: 7476 - RNA, 21 nt, synthetic construct
  source 1..21: mol_type = other RNA
gtggagtctgtggtcacggac

SEQ ID NO: 7477 - RNA, 21 nt, synthetic construct
  source 1..21: mol_type = other RNA
gtggatccagaagcagaataa

SEQ ID NO: 7478 - RNA, 21 nt, synthetic construct
  source 1..21: mol_type = other RNA
gtggcatgcagctcacgcttt

SEQ ID NO: 7479 - RNA, 21 nt, synthetic construct
  source 1..21: mol_type = other RNA
gtggccatccatctcatgagt

SEQ ID NO: 7480 - RNA, 21 nt, synthetic construct
  source 1..21: mol_type = other RNA
gtggccgtggctccaactcat

SEQ ID NO: 7481 - RNA, 21 nt, synthetic construct
  source 1..21: mol_type = other RNA
gtggctcagcaggctcccgtt

SEQ ID NO: 7482 - RNA, 21 nt, synthetic construct
  source 1..21: mol_type = other RNA
gtggctccaactcatgggtca

SEQ ID NO: 7483 - RNA, 21 nt, synthetic construct
  source 1..21: mol_type = other RNA
gtggctcccatgaagtggcca

SEQ ID NO: 7484 - RNA, 21 nt, synthetic construct
  source 1..21: mol_type = other RNA
gtggctgctgctgctggggtc

SEQ ID NO: 7485 - RNA, 21 nt, synthetic construct
  source 1..21: mol_type = other RNA
gtggctgcttctgtagaggct

SEQ ID NO: 7486 - RNA, 21 nt, synthetic construct
  source 1..21: mol_type = other RNA
gtggcttctggtgcagaggac

SEQ ID NO: 7487 - RNA, 21 nt, synthetic construct
  source 1..21: mol_type = other RNA
gtgggaaagcatgtcattctc

SEQ ID NO: 7488 - RNA, 21 nt, synthetic construct
  source 1..21: mol_type = other RNA
gtgggataaggaggcaatttc

SEQ ID NO: 7489 - RNA, 21 nt, synthetic construct
  source 1..21: mol_type = other RNA
gtgggctctgaagtttcatgt

SEQ ID NO: 7490 - RNA, 21 nt, synthetic construct
  source 1..21: mol_type = other RNA
gtggggtgattcctattggga

SEQ ID NO: 7491 - RNA, 21 nt, synthetic construct
  source 1..21: mol_type = other RNA
gtggtaatctagaggtggctc

SEQ ID NO: 7492 - RNA, 21 nt, synthetic construct
  source 1..21: mol_type = other RNA
gtggtagactgagcttagaca

SEQ ID NO: 7493 - RNA, 21 nt, synthetic construct
  source 1..21: mol_type = other RNA
gtggtcacggacatggtcctt

SEQ ID NO: 7494 - RNA, 21 nt, synthetic construct
  source 1..21: mol_type = other RNA
gtggtggctgcttctgtagag

SEQ ID NO: 7495 - RNA, 21 nt, synthetic construct
  source 1..21: mol_type = other RNA
gtgtaagcctccttggacaca

SEQ ID NO: 7496 - RNA, 21 nt, synthetic construct
  source 1..21: mol_type = other RNA
gtgtatggatgggtggtagac

SEQ ID NO: 7497 - RNA, 21 nt, synthetic construct
  source 1..21: mol_type = other RNA
gtgtccaaggaggcttacaca

SEQ ID NO: 7498 - RNA, 21 nt, synthetic construct
  source 1..21: mol_type = other RNA
gtgtgaaaagtatggcccaga

SEQ ID NO: 7499 - RNA, 21 nt, synthetic construct
  source 1..21: mol_type = other RNA
gtgtgaagagtttggataagg

SEQ ID NO: 7500 - RNA, 21 nt, synthetic construct
  source 1..21: mol_type = other RNA
gtgtgcaaagcgtgagctgca

SEQ ID NO: 7501 - RNA, 21 nt, synthetic construct
  source 1..21: mol_type = other RNA
gtgtggcttctggtgcagagg

SEQ ID NO: 7502 - RNA, 21 nt, synthetic construct
  source 1..21: mol_type = other RNA
gtgtgggaaagcatgtcattc

SEQ ID NO: 7503 - RNA, 21 nt, synthetic construct
  source 1..21: mol_type = other RNA
gtgtgtgaagagtttggataa

SEQ ID NO: 7504 - RNA, 21 nt, synthetic construct
  source 1..21: mol_type = other RNA
gttaagagctggaagcatctt

SEQ ID NO: 7505 - RNA, 21 nt, synthetic construct
  source 1..21: mol_type = other RNA
gttactgtggagtctgtggtc

SEQ ID NO: 7506 - RNA, 21 nt, synthetic construct
  source 1..21: mol_type = other RNA
gttagtccttatccaaactct

SEQ ID NO: 7507 - RNA, 21 nt, synthetic construct
  source 1..21: mol_type = other RNA
gttatcaaagatgcttccagc

SEQ ID NO: 7508 - RNA, 21 nt, synthetic construct
  source 1..21: mol_type = other RNA
gttatggaaaccaaaatatgc

SEQ ID NO: 7509 - RNA, 21 nt, synthetic construct
  source 1..21: mol_type = other RNA
gttatggattatgtgagaagg

SEQ ID NO: 7510 - RNA, 21 nt, synthetic construct
  source 1..21: mol_type = other RNA
gttcaacagctctcttcatgc

SEQ ID NO: 7511 - RNA, 21 nt, synthetic construct
  source 1..21: mol_type = other RNA
gttcaccatttttatagtcca

SEQ ID NO: 7512 - RNA, 21 nt, synthetic construct
  source 1..21: mol_type = other RNA
gttcatagggctggtgcttcc

SEQ ID NO: 7513 - RNA, 21 nt, synthetic construct
  source 1..21: mol_type = other RNA
gttcatgggattagaagaatt

SEQ ID NO: 7514 - RNA, 21 nt, synthetic construct
  source 1..21: mol_type = other RNA
gttcctattctccccagtctc

SEQ ID NO: 7515 - RNA, 21 nt, synthetic construct
  source 1..21: mol_type = other RNA
gttctatcatggttaagagct

SEQ ID NO: 7516 - RNA, 21 nt, synthetic construct
  source 1..21: mol_type = other RNA
gttctctcttaccctgtccac

SEQ ID NO: 7517 - RNA, 21 nt, synthetic construct
  source 1..21: mol_type = other RNA
gttctgtggacagggtaagag

SEQ ID NO: 7518 - RNA, 21 nt, synthetic construct
  source 1..21: mol_type = other RNA
gttgaacatgcccggagctgc

SEQ ID NO: 7519 - RNA, 21 nt, synthetic construct
  source 1..21: mol_type = other RNA
gttgacagactctgtctgagg

SEQ ID NO: 7520 - RNA, 21 nt, synthetic construct
  source 1..21: mol_type = other RNA
gttggagccacggccactccc

SEQ ID NO: 7521 - RNA, 21 nt, synthetic construct
  source 1..21: mol_type = other RNA
gttgtaaggccctgtgacccg

SEQ ID NO: 7522 - RNA, 21 nt, synthetic construct
  source 1..21: mol_type = other RNA
gttgtaccattagaccaaatg

SEQ ID NO: 7523 - RNA, 21 nt, synthetic construct
  source 1..21: mol_type = other RNA
gttgtccactgataggtttcc

SEQ ID NO: 7524 - RNA, 21 nt, synthetic construct
  source 1..21: mol_type = other RNA
gttgtcctctgcaccagaagc

SEQ ID NO: 7525 - RNA, 21 nt, synthetic construct
  source 1..21: mol_type = other RNA
gttgtggcatgcagctcacgc

SEQ ID NO: 7526 - RNA, 21 nt, synthetic construct
  source 1..21: mol_type = other RNA
gtttcacttttttgccatggg

SEQ ID NO: 7527 - RNA, 21 nt, synthetic construct
  source 1..21: mol_type = other RNA
gtttcagcagttgtaccatta

SEQ ID NO: 7528 - RNA, 21 nt, synthetic construct
  source 1..21: mol_type = other RNA
gtttcatcaagtctcttgccg

SEQ ID NO: 7529 - RNA, 21 nt, synthetic construct
  source 1..21: mol_type = other RNA
gtttcatgtggctcagcaggc

SEQ ID NO: 7530 - RNA, 21 nt, synthetic construct
  source 1..21: mol_type = other RNA
gtttccataacctaagtattt

SEQ ID NO: 7531 - RNA, 21 nt, synthetic construct
  source 1..21: mol_type = other RNA
gtttccattgcattgatatga

SEQ ID NO: 7532 - RNA, 21 nt, synthetic construct
  source 1..21: mol_type = other RNA
gtttctgttctctcttaccct

SEQ ID NO: 7533 - RNA, 21 nt, synthetic construct
  source 1..21: mol_type = other RNA
gtttggaaatagccagagttt

SEQ ID NO: 7534 - RNA, 21 nt, synthetic construct
  source 1..21: mol_type = other RNA
gtttggataaggactaactgg

SEQ ID NO: 7535 - RNA, 21 nt, synthetic construct
  source 1..21: mol_type = other RNA
gtttggattgctcagattggg

SEQ ID NO: 7536 - RNA, 21 nt, synthetic construct
  source 1..21: mol_type = other RNA
gttttggagatgcagggcatg

SEQ ID NO: 7537 - RNA, 21 nt, synthetic construct
  source 1..21: mol_type = other RNA
gttttggctcattcatgctct

SEQ ID NO: 7538 - RNA, 21 nt, synthetic construct
  source 1..21: mol_type = other RNA
taaaaatggtgaacatcattc

SEQ ID NO: 7539 - RNA, 21 nt, synthetic construct
  source 1..21: mol_type = other RNA
taaaactctggctatttccaa

SEQ ID NO: 7540 - RNA, 21 nt, synthetic construct
  source 1..21: mol_type = other RNA
taaaagacgagggagatcctg

SEQ ID NO: 7541 - RNA, 21 nt, synthetic construct
  source 1..21: mol_type = other RNA
taaagaatcccaataggaatc

SEQ ID NO: 7542 - RNA, 21 nt, synthetic construct
  source 1..21: mol_type = other RNA
taaaggggttgtggcatgcag

SEQ ID NO: 7543 - RNA, 21 nt, synthetic construct
  source 1..21: mol_type = other RNA
taaagtgtatggatgggtggt

SEQ ID NO: 7544 - RNA, 21 nt, synthetic construct
  source 1..21: mol_type = other RNA
taaccaacaaaagggggtgat

SEQ ID NO: 7545 - RNA, 21 nt, synthetic construct
  source 1..21: mol_type = other RNA
taaccatgatagaactgcttg

SEQ ID NO: 7546 - RNA, 21 nt, synthetic construct
  source 1..21: mol_type = other RNA
taacccattagctgtgtggga

SEQ ID NO: 7547 - RNA, 21 nt, synthetic construct
  source 1..21: mol_type = other RNA
taactacagtgcagctccggg

SEQ ID NO: 7548 - RNA, 21 nt, synthetic construct
  source 1..21: mol_type = other RNA
taactacatctccatatgcct

SEQ ID NO: 7549 - RNA, 21 nt, synthetic construct
  source 1..21: mol_type = other RNA
taactggattgggccgtctca

SEQ ID NO: 7550 - RNA, 21 nt, synthetic construct
  source 1..21: mol_type = other RNA
taagagcatgaatgagccaaa

SEQ ID NO: 7551 - RNA, 21 nt, synthetic construct
  source 1..21: mol_type = other RNA
taagagctggaagcatctttg

SEQ ID NO: 7552 - RNA, 21 nt, synthetic construct
  source 1..21: mol_type = other RNA
taagagttgacagactctgtc

SEQ ID NO: 7553 - RNA, 21 nt, synthetic construct
  source 1..21: mol_type = other RNA
taagcctccttggacacaagc

SEQ ID NO: 7554 - RNA, 21 nt, synthetic construct
  source 1..21: mol_type = other RNA
taagctcagtctaccacccat

SEQ ID NO: 7555 - RNA, 21 nt, synthetic construct
  source 1..21: mol_type = other RNA
taaggactaactggattgggc

SEQ ID NO: 7556 - RNA, 21 nt, synthetic construct
  source 1..21: mol_type = other RNA
taaggaggcaatttccctaca

SEQ ID NO: 7557 - RNA, 21 nt, synthetic construct
  source 1..21: mol_type = other RNA
taaggccctgtgacccgagtg

SEQ ID NO: 7558 - RNA, 21 nt, synthetic construct
  source 1..21: mol_type = other RNA
taagggttcatgggattagaa

SEQ ID NO: 7559 - RNA, 21 nt, synthetic construct
  source 1..21: mol_type = other RNA
taagtgatgctaatggtcagg

SEQ ID NO: 7560 - RNA, 21 nt, synthetic construct
  source 1..21: mol_type = other RNA
taagtgggctctgaagtttca

SEQ ID NO: 7561 - RNA, 21 nt, synthetic construct
  source 1..21: mol_type = other RNA
taatccataactacagtgcag

SEQ ID NO: 7562 - RNA, 21 nt, synthetic construct
  source 1..21: mol_type = other RNA
taatcccatgaacccttaccc

SEQ ID NO: 7563 - RNA, 21 nt, synthetic construct
  source 1..21: mol_type = other RNA
taatctagaggtggctcccat

SEQ ID NO: 7564 - RNA, 21 nt, synthetic construct
  source 1..21: mol_type = other RNA
taatgggttatcaaagatgct

SEQ ID NO: 7565 - RNA, 21 nt, synthetic construct
  source 1..21: mol_type = other RNA
taatggtacaactgctgaaac

SEQ ID NO: 7566 - RNA, 21 nt, synthetic construct
  source 1..21: mol_type = other RNA
taatggtcaggaaaagcagcc

SEQ ID NO: 7567 - RNA, 21 nt, synthetic construct
  source 1..21: mol_type = other RNA
taatttgtgtaagcctccttg

SEQ ID NO: 7568 - RNA, 21 nt, synthetic construct
  source 1..21: mol_type = other RNA
tacaactgctgaaaccatctc

SEQ ID NO: 7569 - RNA, 21 nt, synthetic construct
  source 1..21: mol_type = other RNA
tacacaaattaagtgatgcta

SEQ ID NO: 7570 - RNA, 21 nt, synthetic construct
  source 1..21: mol_type = other RNA
tacactttaccagccaaggtt

SEQ ID NO: 7571 - RNA, 21 nt, synthetic construct
  source 1..21: mol_type = other RNA
tacagaagcagccaccacagc

SEQ ID NO: 7572 - RNA, 21 nt, synthetic construct
  source 1..21: mol_type = other RNA
tacagatccatcggctgagac

SEQ ID NO: 7573 - RNA, 21 nt, synthetic construct
  source 1..21: mol_type = other RNA
tacagtgcagctccgggcatg

SEQ ID NO: 7574 - RNA, 21 nt, synthetic construct
  source 1..21: mol_type = other RNA
tacatcatgtagggaaattgc

SEQ ID NO: 7575 - RNA, 21 nt, synthetic construct
  source 1..21: mol_type = other RNA
tacatctccatatgccttcac

SEQ ID NO: 7576 - RNA, 21 nt, synthetic construct
  source 1..21: mol_type = other RNA
tacatgagacggcccaatcca

SEQ ID NO: 7577 - RNA, 21 nt, synthetic construct
  source 1..21: mol_type = other RNA
tacatgatgtacatttggtct

SEQ ID NO: 7578 - RNA, 21 nt, synthetic construct
  source 1..21: mol_type = other RNA
tacatttggtctaatggtaca

SEQ ID NO: 7579 - RNA, 21 nt, synthetic construct
  source 1..21: mol_type = other RNA
taccacccaatctgagcaatc

SEQ ID NO: 7580 - RNA, 21 nt, synthetic construct
  source 1..21: mol_type = other RNA
taccacccatccatacacttt

SEQ ID NO: 7581 - RNA, 21 nt, synthetic construct
  source 1..21: mol_type = other RNA
taccagcataagagcatgaat

SEQ ID NO: 7582 - RNA, 21 nt, synthetic construct
  source 1..21: mol_type = other RNA
taccagccaaggtttggaaat

SEQ ID NO: 7583 - RNA, 21 nt, synthetic construct
  source 1..21: mol_type = other RNA
taccattagaccaaatgtaca

SEQ ID NO: 7584 - RNA, 21 nt, synthetic construct
  source 1..21: mol_type = other RNA
tacccaatatccatcatatca

SEQ ID NO: 7585 - RNA, 21 nt, synthetic construct
  source 1..21: mol_type = other RNA
taccctgggcttttgaatcag

SEQ ID NO: 7586 - RNA, 21 nt, synthetic construct
  source 1..21: mol_type = other RNA
taccctgtccacagaactttt

SEQ ID NO: 7587 - RNA, 21 nt, synthetic construct
  source 1..21: mol_type = other RNA
tacctatacagatccatcggc

SEQ ID NO: 7588 - RNA, 21 nt, synthetic construct
  source 1..21: mol_type = other RNA
tacctgcgtttcatcaagtct

SEQ ID NO: 7589 - RNA, 21 nt, synthetic construct
  source 1..21: mol_type = other RNA
tacctgtttctgttctctctt

SEQ ID NO: 7590 - RNA, 21 nt, synthetic construct
  source 1..21: mol_type = other RNA
tactgtggagtctgtggtcac

SEQ ID NO: 7591 - RNA, 21 nt, synthetic construct
  source 1..21: mol_type = other RNA
tacttaggttatggaaaccaa

SEQ ID NO: 7592 - RNA, 21 nt, synthetic construct
  source 1..21: mol_type = other RNA
tacttttcacactcttcctct

SEQ ID NO: 7593 - RNA, 21 nt, synthetic construct
  source 1..21: mol_type = other RNA
tagaactgcttgtgtccaagg

SEQ ID NO: 7594 - RNA, 21 nt, synthetic construct
  source 1..21: mol_type = other RNA
tagaagttcatagggctggtg

SEQ ID NO: 7595 - RNA, 21 nt, synthetic construct
  source 1..21: mol_type = other RNA
tagacagagggtcttggcttg

SEQ ID NO: 7596 - RNA, 21 nt, synthetic construct
  source 1..21: mol_type = other RNA
tagaccaaatgtacatcatgt

SEQ ID NO: 7597 - RNA, 21 nt, synthetic construct
  source 1..21: mol_type = other RNA
tagactgagcttagacagagg

SEQ ID NO: 7598 - RNA, 21 nt, synthetic construct
  source 1..21: mol_type = other RNA
tagaggctggggctgctggga

SEQ ID NO: 7599 - RNA, 21 nt, synthetic construct
  source 1..21: mol_type = other RNA
tagaggtggctcccatgaagt

SEQ ID NO: 7600 - RNA, 21 nt, synthetic construct
  source 1..21: mol_type = other RNA
tagatatctgaagtgtgtgaa

SEQ ID NO: 7601 - RNA, 21 nt, synthetic construct
  source 1..21: mol_type = other RNA
tagatgtaaaactctggctat

SEQ ID NO: 7602 - RNA, 21 nt, synthetic construct
  source 1..21: mol_type = other RNA
tagattaccacccaatctgag

SEQ ID NO: 7603 - RNA, 21 nt, synthetic construct
  source 1..21: mol_type = other RNA
tagcatcacttaatttgtgta

SEQ ID NO: 7604 - RNA, 21 nt, synthetic construct
  source 1..21: mol_type = other RNA
tagccagagttttacatctaa

SEQ ID NO: 7605 - RNA, 21 nt, synthetic construct
  source 1..21: mol_type = other RNA
tagctgtgtgggaaagcatgt

SEQ ID NO: 7606 - RNA, 21 nt, synthetic construct
  source 1..21: mol_type = other RNA
taggaacccagatatggggag

SEQ ID NO: 7607 - RNA, 21 nt, synthetic construct
  source 1..21: mol_type = other RNA
taggaatcaccccaccaggat

SEQ ID NO: 7608 - RNA, 21 nt, synthetic construct
  source 1..21: mol_type = other RNA
tagggaaattgcctccttatc

SEQ ID NO: 7609 - RNA, 21 nt, synthetic construct
  source 1..21: mol_type = other RNA
tagggctggtgcttccataga

SEQ ID NO: 7610 - RNA, 21 nt, synthetic construct
  source 1..21: mol_type = other RNA
taggtatccaagccaagaccc

SEQ ID NO: 7611 - RNA, 21 nt, synthetic construct
  source 1..21: mol_type = other RNA
taggttatggaaaccaaaata

SEQ ID NO: 7612 - RNA, 21 nt, synthetic construct
  source 1..21: mol_type = other RNA
taggtttccattgcattgata

SEQ ID NO: 7613 - RNA, 21 nt, synthetic construct
  source 1..21: mol_type = other RNA
tagtccagggtgtggcttctg

SEQ ID NO: 7614 - RNA, 21 nt, synthetic construct
  source 1..21: mol_type = other RNA
tagtccatgtttggattgctc

SEQ ID NO: 7615 - RNA, 21 nt, synthetic construct
  source 1..21: mol_type = other RNA
tagtccttatccaaactcttc

SEQ ID NO: 7616 - RNA, 21 nt, synthetic construct
  source 1..21: mol_type = other RNA
tagtctgggccatacttttca

SEQ ID NO: 7617 - RNA, 21 nt, synthetic construct
  source 1..21: mol_type = other RNA
tagtgccaatggctgcttttc

SEQ ID NO: 7618 - RNA, 21 nt, synthetic construct
  source 1..21: mol_type = other RNA
tagttactgtggagtctgtgg

SEQ ID NO: 7619 - RNA, 21 nt, synthetic construct
  source 1..21: mol_type = other RNA
tagttatggattatgtgagaa

SEQ ID NO: 7620 - RNA, 21 nt, synthetic construct
  source 1..21: mol_type = other RNA
tatacagatccatcggctgag

SEQ ID NO: 7621 - RNA, 21 nt, synthetic construct
  source 1..21: mol_type = other RNA
tataggtatccaagccaagac

SEQ ID NO: 7622 - RNA, 21 nt, synthetic construct
  source 1..21: mol_type = other RNA
tatagtccatgtttggattgc

SEQ ID NO: 7623 - RNA, 21 nt, synthetic construct
  source 1..21: mol_type = other RNA
tatatatctgttgtaaggccc

SEQ ID NO: 7624 - RNA, 21 nt, synthetic construct
  source 1..21: mol_type = other RNA
tatatatgatatcaccccctt

SEQ ID NO: 7625 - RNA, 21 nt, synthetic construct
  source 1..21: mol_type = other RNA
tatatctgttgtaaggccctg

SEQ ID NO: 7626 - RNA, 21 nt, synthetic construct
  source 1..21: mol_type = other RNA
tatatgatatcaccccctttt

SEQ ID NO: 7627 - RNA, 21 nt, synthetic construct
  source 1..21: mol_type = other RNA
tatcaaagatgcttccagctc

SEQ ID NO: 7628 - RNA, 21 nt, synthetic construct
  source 1..21: mol_type = other RNA
tatcaatgcaatggaaaccta

SEQ ID NO: 7629 - RNA, 21 nt, synthetic construct
  source 1..21: mol_type = other RNA
tatcacccccttttgttggtt

SEQ ID NO: 7630 - RNA, 21 nt, synthetic construct
  source 1..21: mol_type = other RNA
tatcagtggacaactgctccc

SEQ ID NO: 7631 - RNA, 21 nt, synthetic construct
  source 1..21: mol_type = other RNA
tatcatggttaagagctggaa

SEQ ID NO: 7632 - RNA, 21 nt, synthetic construct
  source 1..21: mol_type = other RNA
tatccaaactcttcacacact

SEQ ID NO: 7633 - RNA, 21 nt, synthetic construct
  source 1..21: mol_type = other RNA
tatccaagccaagaccctctg

SEQ ID NO: 7634 - RNA, 21 nt, synthetic construct
  source 1..21: mol_type = other RNA
tatccatcatatcaatgcaat

SEQ ID NO: 7635 - RNA, 21 nt, synthetic construct
  source 1..21: mol_type = other RNA
tatcccactcatgagatggat

SEQ ID NO: 7636 - RNA, 21 nt, synthetic construct
  source 1..21: mol_type = other RNA
tatctatggaagcaccagccc

SEQ ID NO: 7637 - RNA, 21 nt, synthetic construct
  source 1..21: mol_type = other RNA
tatctgaagtgtgtgaagagt

SEQ ID NO: 7638 - RNA, 21 nt, synthetic construct
  source 1..21: mol_type = other RNA
tatctgggttcctattctccc

SEQ ID NO: 7639 - RNA, 21 nt, synthetic construct
  source 1..21: mol_type = other RNA
tatctgttgtaaggccctgtg

SEQ ID NO: 7640 - RNA, 21 nt, synthetic construct
  source 1..21: mol_type = other RNA
tatgaacctgcagcttgagat

SEQ ID NO: 7641 - RNA, 21 nt, synthetic construct
  source 1..21: mol_type = other RNA
tatgaacttctattccacctc

SEQ ID NO: 7642 - RNA, 21 nt, synthetic construct
  source 1..21: mol_type = other RNA
tatgatatcacccccttttgt

SEQ ID NO: 7643 - RNA, 21 nt, synthetic construct
  source 1..21: mol_type = other RNA
tatgatggatattgggtattc

SEQ ID NO: 7644 - RNA, 21 nt, synthetic construct
  source 1..21: mol_type = other RNA
tatgcagggagatggtttcag

SEQ ID NO: 7645 - RNA, 21 nt, synthetic construct
  source 1..21: mol_type = other RNA
tatgccttcactcgggtcaca

SEQ ID NO: 7646 - RNA, 21 nt, synthetic construct
  source 1..21: mol_type = other RNA
tatgctggtaaaagacgaggg

SEQ ID NO: 7647 - RNA, 21 nt, synthetic construct
  source 1..21: mol_type = other RNA
tatggaaaccaaaatatgcag

SEQ ID NO: 7648 - RNA, 21 nt, synthetic construct
  source 1..21: mol_type = other RNA
tatggaagcaccagccctatg

SEQ ID NO: 7649 - RNA, 21 nt, synthetic construct
  source 1..21: mol_type = other RNA
tatggagatgtagttactgtg

SEQ ID NO: 7650 - RNA, 21 nt, synthetic construct
  source 1..21: mol_type = other RNA
tatggatgggtggtagactga

SEQ ID NO: 7651 - RNA, 21 nt, synthetic construct
  source 1..21: mol_type = other RNA
tatggattatgtgagaaggtg

SEQ ID NO: 7652 - RNA, 21 nt, synthetic construct
  source 1..21: mol_type = other RNA
tatggattggtggatccagaa

SEQ ID NO: 7653 - RNA, 21 nt, synthetic construct
  source 1..21: mol_type = other RNA
tatggcccagactatgtgcct

SEQ ID NO: 7654 - RNA, 21 nt, synthetic construct
  source 1..21: mol_type = other RNA
tatggggagcagttgtccact

SEQ ID NO: 7655 - RNA, 21 nt, synthetic construct
  source 1..21: mol_type = other RNA
tatgtgagaaggtgaatgatg

SEQ ID NO: 7656 - RNA, 21 nt, synthetic construct
  source 1..21: mol_type = other RNA
tatgtgcctcagaaatcccat

SEQ ID NO: 7657 - RNA, 21 nt, synthetic construct
  source 1..21: mol_type = other RNA
tattccacctcatctcaagct

SEQ ID NO: 7658 - RNA, 21 nt, synthetic construct
  source 1..21: mol_type = other RNA
tattctccccagtctcagccg

SEQ ID NO: 7659 - RNA, 21 nt, synthetic construct
  source 1..21: mol_type = other RNA
tattctgattcaaaagcccag

SEQ ID NO: 7660 - RNA, 21 nt, synthetic construct
  source 1..21: mol_type = other RNA
tattctgcttctggatccacc

SEQ ID NO: 7661 - RNA, 21 nt, synthetic construct
  source 1..21: mol_type = other RNA
tattgggattctttaaagggg

SEQ ID NO: 7662 - RNA, 21 nt, synthetic construct
  source 1..21: mol_type = other RNA
tattgggtattctgattcaaa

SEQ ID NO: 7663 - RNA, 21 nt, synthetic construct
  source 1..21: mol_type = other RNA
tatttagatgtaaaactctgg

SEQ ID NO: 7664 - RNA, 21 nt, synthetic construct
  source 1..21: mol_type = other RNA
tatttccaaaccttggctggt

SEQ ID NO: 7665 - RNA, 21 nt, synthetic construct
  source 1..21: mol_type = other RNA
tatttgaattcttctaatccc

SEQ ID NO: 7666 - RNA, 21 nt, synthetic construct
  source 1..21: mol_type = other RNA
tattttggtttccataaccta

SEQ ID NO: 7667 - RNA, 21 nt, synthetic construct
  source 1..21: mol_type = other RNA
tcaaaagcccagggtaagggt

SEQ ID NO: 7668 - RNA, 21 nt, synthetic construct
  source 1..21: mol_type = other RNA
tcaaagatgcttccagctctt

SEQ ID NO: 7669 - RNA, 21 nt, synthetic construct
  source 1..21: mol_type = other RNA
tcaaatatgaacctgcagctt

SEQ ID NO: 7670 - RNA, 21 nt, synthetic construct
  source 1..21: mol_type = other RNA
tcaacagctctcttcatgccc

SEQ ID NO: 7671 - RNA, 21 nt, synthetic construct
  source 1..21: mol_type = other RNA
tcaactcttattctgcttctg

SEQ ID NO: 7672 - RNA, 21 nt, synthetic construct
  source 1..21: mol_type = other RNA
tcaagctgcaggttcatattt

SEQ ID NO: 7673 - RNA, 21 nt, synthetic construct
  source 1..21: mol_type = other RNA
tcaagtctcttgccgaaagga

SEQ ID NO: 7674 - RNA, 21 nt, synthetic construct
  source 1..21: mol_type = other RNA
tcaagtgaggtaaccaacaaa

SEQ ID NO: 7675 - RNA, 21 nt, synthetic construct
  source 1..21: mol_type = other RNA
tcaatgagaattgacccatga

SEQ ID NO: 7676 - RNA, 21 nt, synthetic construct
  source 1..21: mol_type = other RNA
tcaatgcaatggaaacctatc

SEQ ID NO: 7677 - RNA, 21 nt, synthetic construct
  source 1..21: mol_type = other RNA
tcaattctcattgagtgtgca

SEQ ID NO: 7678 - RNA, 21 nt, synthetic construct
  source 1..21: mol_type = other RNA
tcacacacttcagatatctat

SEQ ID NO: 7679 - RNA, 21 nt, synthetic construct
  source 1..21: mol_type = other RNA
tcacactcttcctctttctca

SEQ ID NO: 7680 - RNA, 21 nt, synthetic construct
  source 1..21: mol_type = other RNA
tcacagggccttacaacagat

SEQ ID NO: 7681 - RNA, 21 nt, synthetic construct
  source 1..21: mol_type = other RNA
tcacataatccataactacag

SEQ ID NO: 7682 - RNA, 21 nt, synthetic construct
  source 1..21: mol_type = other RNA
tcaccatttttatagtccatg

SEQ ID NO: 7683 - RNA, 21 nt, synthetic construct
  source 1..21: mol_type = other RNA
tcaccccaccaggatctccct

SEQ ID NO: 7684 - RNA, 21 nt, synthetic construct
  source 1..21: mol_type = other RNA
tcacccccttttgttggttac

SEQ ID NO: 7685 - RNA, 21 nt, synthetic construct
  source 1..21: mol_type = other RNA
tcaccctcagacagagtctgt

SEQ ID NO: 7686 - RNA, 21 nt, synthetic construct
  source 1..21: mol_type = other RNA
tcaccttctcacataatccat

SEQ ID NO: 7687 - RNA, 21 nt, synthetic construct
  source 1..21: mol_type = other RNA
tcacgctttgcacactcaatg

SEQ ID NO: 7688 - RNA, 21 nt, synthetic construct
  source 1..21: mol_type = other RNA
tcacggacatggtcctttcgg

SEQ ID NO: 7689 - RNA, 21 nt, synthetic construct
  source 1..21: mol_type = other RNA
tcacgggctttttcagccatt

SEQ ID NO: 7690 - RNA, 21 nt, synthetic construct
  source 1..21: mol_type = other RNA
tcactcgggtcacagggcctt

SEQ ID NO: 7691 - RNA, 21 nt, synthetic construct
  source 1..21: mol_type = other RNA
tcacttaatttgtgtaagcct

SEQ ID NO: 7692 - RNA, 21 nt, synthetic construct
  source 1..21: mol_type = other RNA
tcacttttttgccatgggatt

SEQ ID NO: 7693 - RNA, 21 nt, synthetic construct
  source 1..21: mol_type = other RNA
tcagaaatcccatggcaaaaa

SEQ ID NO: 7694 - RNA, 21 nt, synthetic construct
  source 1..21: mol_type = other RNA
tcagaatacccaatatccatc

SEQ ID NO: 7695 - RNA, 21 nt, synthetic construct
  source 1..21: mol_type = other RNA
tcagacagagtctgtcaactc

SEQ ID NO: 7696 - RNA, 21 nt, synthetic construct
  source 1..21: mol_type = other RNA
tcagacagcgagcagagcttt

SEQ ID NO: 7697 - RNA, 21 nt, synthetic construct
  source 1..21: mol_type = other RNA
tcagagcccacttacctgcgt

SEQ ID NO: 7698 - RNA, 21 nt, synthetic construct
  source 1..21: mol_type = other RNA
tcagatatctatggaagcacc

SEQ ID NO: 7699 - RNA, 21 nt, synthetic construct
  source 1..21: mol_type = other RNA
tcagattgggtggtaatctag

SEQ ID NO: 7700 - RNA, 21 nt, synthetic construct
  source 1..21: mol_type = other RNA
tcagcaggctcccgtttcact

SEQ ID NO: 7701 - RNA, 21 nt, synthetic construct
  source 1..21: mol_type = other RNA
tcagcagttgtaccattagac

SEQ ID NO: 7702 - RNA, 21 nt, synthetic construct
  source 1..21: mol_type = other RNA
tcagccattttggcttcccaa

SEQ ID NO: 7703 - RNA, 21 nt, synthetic construct
  source 1..21: mol_type = other RNA
tcagccgatggatctgtatag

SEQ ID NO: 7704 - RNA, 21 nt, synthetic construct
  source 1..21: mol_type = other RNA
tcaggaaaagcagccattggc

SEQ ID NO: 7705 - RNA, 21 nt, synthetic construct
  source 1..21: mol_type = other RNA
tcaggaccagtcatgcagcag

SEQ ID NO: 7706 - RNA, 21 nt, synthetic construct
  source 1..21: mol_type = other RNA
tcaggatccagaaagctctgc

SEQ ID NO: 7707 - RNA, 21 nt, synthetic construct
  source 1..21: mol_type = other RNA
tcagtctaccacccatccata

SEQ ID NO: 7708 - RNA, 21 nt, synthetic construct
  source 1..21: mol_type = other RNA
tcagtggacaactgctcccca

SEQ ID NO: 7709 - RNA, 21 nt, synthetic construct
  source 1..21: mol_type = other RNA
tcatagggctggtgcttccat

SEQ ID NO: 7710 - RNA, 21 nt, synthetic construct
  source 1..21: mol_type = other RNA
tcatatatatctgttgtaagg

SEQ ID NO: 7711 - RNA, 21 nt, synthetic construct
  source 1..21: mol_type = other RNA
tcatatcaatgcaatggaaac

SEQ ID NO: 7712 - RNA, 21 nt, synthetic construct
  source 1..21: mol_type = other RNA
tcatcaagtctcttgccgaaa

SEQ ID NO: 7713 - RNA, 21 nt, synthetic construct
  source 1..21: mol_type = other RNA
tcatcgttgtcctctgcacca

SEQ ID NO: 7714 - RNA, 21 nt, synthetic construct
  source 1..21: mol_type = other RNA
tcatctcaagctgcaggttca

SEQ ID NO: 7715 - RNA, 21 nt, synthetic construct
  source 1..21: mol_type = other RNA
tcatgagatggatggccactt

SEQ ID NO: 7716 - RNA, 21 nt, synthetic construct
  source 1..21: mol_type = other RNA
tcatgagtgggataaggaggc

SEQ ID NO: 7717 - RNA, 21 nt, synthetic construct
  source 1..21: mol_type = other RNA
tcatgcagcagtcccagcagc

SEQ ID NO: 7718 - RNA, 21 nt, synthetic construct
  source 1..21: mol_type = other RNA
tcatgccctgcatctccaaaa

SEQ ID NO: 7719 - RNA, 21 nt, synthetic construct
  source 1..21: mol_type = other RNA
tcatgctcttatgctggtaaa

SEQ ID NO: 7720 - RNA, 21 nt, synthetic construct
  source 1..21: mol_type = other RNA
tcatgggagccacctctagat

SEQ ID NO: 7721 - RNA, 21 nt, synthetic construct
  source 1..21: mol_type = other RNA
tcatgggattagaagaattca

SEQ ID NO: 7722 - RNA, 21 nt, synthetic construct
  source 1..21: mol_type = other RNA
tcatgggtcaattctcattga

SEQ ID NO: 7723 - RNA, 21 nt, synthetic construct
  source 1..21: mol_type = other RNA
tcatggttaagagctggaagc

SEQ ID NO: 7724 - RNA, 21 nt, synthetic construct
  source 1..21: mol_type = other RNA
tcatgtagggaaattgcctcc

SEQ ID NO: 7725 - RNA, 21 nt, synthetic construct
  source 1..21: mol_type = other RNA
tcatgtatggattggtggatc

SEQ ID NO: 7726 - RNA, 21 nt, synthetic construct
  source 1..21: mol_type = other RNA
tcatgtggctcagcaggctcc

SEQ ID NO: 7727 - RNA, 21 nt, synthetic construct
  source 1..21: mol_type = other RNA
tcattcaccttctcacataat

SEQ ID NO: 7728 - RNA, 21 nt, synthetic construct
  source 1..21: mol_type = other RNA
tcattcatgctcttatgctgg

SEQ ID NO: 7729 - RNA, 21 nt, synthetic construct
  source 1..21: mol_type = other RNA
tcattctccttgttttggaga

SEQ ID NO: 7730 - RNA, 21 nt, synthetic construct
  source 1..21: mol_type = other RNA
tcattgagtgtgcaaagcgtg

SEQ ID NO: 7731 - RNA, 21 nt, synthetic construct
  source 1..21: mol_type = other RNA
tccaaaacaaggagaatgaca

SEQ ID NO: 7732 - RNA, 21 nt, synthetic construct
  source 1..21: mol_type = other RNA
tccaaacatggactataaaaa

SEQ ID NO: 7733 - RNA, 21 nt, synthetic construct
  source 1..21: mol_type = other RNA
tccaaaccttggctggtaaag

SEQ ID NO: 7734 - RNA, 21 nt, synthetic construct
  source 1..21: mol_type = other RNA
tccaaactcttcacacacttc

SEQ ID NO: 7735 - RNA, 21 nt, synthetic construct
  source 1..21: mol_type = other RNA
tccaactcatgggtcaattct

SEQ ID NO: 7736 - RNA, 21 nt, synthetic construct
  source 1..21: mol_type = other RNA
tccaagccaagaccctctgtc

SEQ ID NO: 7737 - RNA, 21 nt, synthetic construct
  source 1..21: mol_type = other RNA
tccaaggaggcttacacaaat

SEQ ID NO: 7738 - RNA, 21 nt, synthetic construct
  source 1..21: mol_type = other RNA
tccacagaacttttgcgactt

SEQ ID NO: 7739 - RNA, 21 nt, synthetic construct
  source 1..21: mol_type = other RNA
tccacagtaactacatctcca

SEQ ID NO: 7740 - RNA, 21 nt, synthetic construct
  source 1..21: mol_type = other RNA
tccaccaatccatacatgaga

SEQ ID NO: 7741 - RNA, 21 nt, synthetic construct
  source 1..21: mol_type = other RNA
tccacctcatctcaagctgca

SEQ ID NO: 7742 - RNA, 21 nt, synthetic construct
  source 1..21: mol_type = other RNA
tccactgataggtttccattg

SEQ ID NO: 7743 - RNA, 21 nt, synthetic construct
  source 1..21: mol_type = other RNA
tccagaaagctctgctcgctg

SEQ ID NO: 7744 - RNA, 21 nt, synthetic construct
  source 1..21: mol_type = other RNA
tccagaagcagaataagagtt

SEQ ID NO: 7745 - RNA, 21 nt, synthetic construct
  source 1..21: mol_type = other RNA
tccagctcttaaccatgatag

SEQ ID NO: 7746 - RNA, 21 nt, synthetic construct
  source 1..21: mol_type = other RNA
tccagggtgtggcttctggtg

SEQ ID NO: 7747 - RNA, 21 nt, synthetic construct
  source 1..21: mol_type = other RNA
tccagttagtccttatccaaa

SEQ ID NO: 7748 - RNA, 21 nt, synthetic construct
  source 1..21: mol_type = other RNA
tccataacctaagtatttaga

SEQ ID NO: 7749 - RNA, 21 nt, synthetic construct
  source 1..21: mol_type = other RNA
tccataactacagtgcagctc

SEQ ID NO: 7750 - RNA, 21 nt, synthetic construct
  source 1..21: mol_type = other RNA
tccatacactttaccagccaa

SEQ ID NO: 7751 - RNA, 21 nt, synthetic construct
  source 1..21: mol_type = other RNA
tccatacatgagacggcccaa

SEQ ID NO: 7752 - RNA, 21 nt, synthetic construct
  source 1..21: mol_type = other RNA
tccatagatatctgaagtgtg

SEQ ID NO: 7753 - RNA, 21 nt, synthetic construct
  source 1..21: mol_type = other RNA
tccatatgccttcactcgggt

SEQ ID NO: 7754 - RNA, 21 nt, synthetic construct
  source 1..21: mol_type = other RNA
tccatcatatcaatgcaatgg

SEQ ID NO: 7755 - RNA, 21 nt, synthetic construct
  source 1..21: mol_type = other RNA
tccatcggctgagactgggga

SEQ ID NO: 7756 - RNA, 21 nt, synthetic construct
  source 1..21: mol_type = other RNA
tccatctcatgagtgggataa

SEQ ID NO: 7757 - RNA, 21 nt, synthetic construct
  source 1..21: mol_type = other RNA
tccatgtttggattgctcaga

SEQ ID NO: 7758 - RNA, 21 nt, synthetic construct
  source 1..21: mol_type = other RNA
tccattgcattgatatgatgg

SEQ ID NO: 7759 - RNA, 21 nt, synthetic construct
  source 1..21: mol_type = other RNA
tcccaaagagccaagccatgt

SEQ ID NO: 7760 - RNA, 21 nt, synthetic construct
  source 1..21: mol_type = other RNA
tcccaataggaatcaccccac

SEQ ID NO: 7761 - RNA, 21 nt, synthetic construct
  source 1..21: mol_type = other RNA
tcccacacagctaatgggtta

SEQ ID NO: 7762 - RNA, 21 nt, synthetic construct
  source 1..21: mol_type = other RNA
tcccactcatgagatggatgg

SEQ ID NO: 7763 - RNA, 21 nt, synthetic construct
  source 1..21: mol_type = other RNA
tcccagcagccccagcctcta

SEQ ID NO: 7764 - RNA, 21 nt, synthetic construct
  source 1..21: mol_type = other RNA
tcccatgaacccttaccctgg

SEQ ID NO: 7765 - RNA, 21 nt, synthetic construct
  source 1..21: mol_type = other RNA
tcccatgaagtggccatccat

SEQ ID NO: 7766 - RNA, 21 nt, synthetic construct
  source 1..21: mol_type = other RNA
tcccatggcaaaaaagtgaaa

SEQ ID NO: 7767 - RNA, 21 nt, synthetic construct
  source 1..21: mol_type = other RNA
tccccagtctcagccgatgga

SEQ ID NO: 7768 - RNA, 21 nt, synthetic construct
  source 1..21: mol_type = other RNA
tccccatatctgggttcctat

SEQ ID NO: 7769 - RNA, 21 nt, synthetic construct
  source 1..21: mol_type = other RNA
tcccccaatgtcaggatccag

SEQ ID NO: 7770 - RNA, 21 nt, synthetic construct
  source 1..21: mol_type = other RNA
tcccgtttcacttttttgcca

SEQ ID NO: 7771 - RNA, 21 nt, synthetic construct
  source 1..21: mol_type = other RNA
tccctacatgatgtacatttg

SEQ ID NO: 7772 - RNA, 21 nt, synthetic construct
  source 1..21: mol_type = other RNA
tccctcgtcttttaccagcat

SEQ ID NO: 7773 - RNA, 21 nt, synthetic construct
  source 1..21: mol_type = other RNA
tccctgcatattttggtttcc

SEQ ID NO: 7774 - RNA, 21 nt, synthetic construct
  source 1..21: mol_type = other RNA
tccgggcatgttcaacagctc

SEQ ID NO: 7775 - RNA, 21 nt, synthetic construct
  source 1..21: mol_type = other RNA
tccgtgaccacagactccaca

SEQ ID NO: 7776 - RNA, 21 nt, synthetic construct
  source 1..21: mol_type = other RNA
tcctattctccccagtctcag

SEQ ID NO: 7777 - RNA, 21 nt, synthetic construct
  source 1..21: mol_type = other RNA
tcctattgggattctttaaag

SEQ ID NO: 7778 - RNA, 21 nt, synthetic construct
  source 1..21: mol_type = other RNA
tcctctgcaccagaagccaca

SEQ ID NO: 7779 - RNA, 21 nt, synthetic construct
  source 1..21: mol_type = other RNA
tcctctttctcacgggctttt

SEQ ID NO: 7780 - RNA, 21 nt, synthetic construct
  source 1..21: mol_type = other RNA
tcctgaaagtcgcaaaagttc

SEQ ID NO: 7781 - RNA, 21 nt, synthetic construct
  source 1..21: mol_type = other RNA
tcctgacattgggggagtggc

SEQ ID NO: 7782 - RNA, 21 nt, synthetic construct
  source 1..21: mol_type = other RNA
tcctgaccattagcatcactt

SEQ ID NO: 7783 - RNA, 21 nt, synthetic construct
  source 1..21: mol_type = other RNA
tcctggtggggtgattcctat

SEQ ID NO: 7784 - RNA, 21 nt, synthetic construct
  source 1..21: mol_type = other RNA
tccttatccaaactcttcaca

SEQ ID NO: 7785 - RNA, 21 nt, synthetic construct
  source 1..21: mol_type = other RNA
tccttatcccactcatgagat

SEQ ID NO: 7786 - RNA, 21 nt, synthetic construct
  source 1..21: mol_type = other RNA
tccttggacacaagcagttct

SEQ ID NO: 7787 - RNA, 21 nt, synthetic construct
  source 1..21: mol_type = other RNA
tccttgttttggagatgcagg

SEQ ID NO: 7788 - RNA, 21 nt, synthetic construct
  source 1..21: mol_type = other RNA
tcctttcggcaagagacttga

SEQ ID NO: 7789 - RNA, 21 nt, synthetic construct
  source 1..21: mol_type = other RNA
tcgcaaaagttctgtggacag

SEQ ID NO: 7790 - RNA, 21 nt, synthetic construct
  source 1..21: mol_type = other RNA
tcgctgtctgaccagacctca

SEQ ID NO: 7791 - RNA, 21 nt, synthetic construct
  source 1..21: mol_type = other RNA
tcggcaagagacttgatgaaa

SEQ ID NO: 7792 - RNA, 21 nt, synthetic construct
  source 1..21: mol_type = other RNA
tcggctgagactggggagaat

SEQ ID NO: 7793 - RNA, 21 nt, synthetic construct
  source 1..21: mol_type = other RNA
tcgggtcacagggccttacaa

SEQ ID NO: 7794 - RNA, 21 nt, synthetic construct
  source 1..21: mol_type = other RNA
tcgtcttttaccagcataaga

SEQ ID NO: 7795 - RNA, 21 nt, synthetic construct
  source 1..21: mol_type = other RNA
tcgttgtcctctgcaccagaa

SEQ ID NO: 7796 - RNA, 21 nt, synthetic construct
  source 1..21: mol_type = other RNA
tctaaatacttaggttatgga

SEQ ID NO: 7797 - RNA, 21 nt, synthetic construct
  source 1..21: mol_type = other RNA
tctaagctcagtctaccaccc

SEQ ID NO: 7798 - RNA, 21 nt, synthetic construct
  source 1..21: mol_type = other RNA
tctaatcccatgaacccttac

SEQ ID NO: 7799 - RNA, 21 nt, synthetic construct
  source 1..21: mol_type = other RNA
tctaatggtacaactgctgaa

SEQ ID NO: 7800 - RNA, 21 nt, synthetic construct
  source 1..21: mol_type = other RNA
tctacagaagcagccaccaca

SEQ ID NO: 7801 - RNA, 21 nt, synthetic construct
  source 1..21: mol_type = other RNA
tctaccacccatccatacact

SEQ ID NO: 7802 - RNA, 21 nt, synthetic construct
  source 1..21: mol_type = other RNA
tctagaggtggctcccatgaa

SEQ ID NO: 7803 - RNA, 21 nt, synthetic construct
  source 1..21: mol_type = other RNA
tctagattaccacccaatctg

SEQ ID NO: 7804 - RNA, 21 nt, synthetic construct
  source 1..21: mol_type = other RNA
tctatcatggttaagagctgg

SEQ ID NO: 7805 - RNA, 21 nt, synthetic construct
  source 1..21: mol_type = other RNA
tctatggaagcaccagcccta

SEQ ID NO: 7806 - RNA, 21 nt, synthetic construct
  source 1..21: mol_type = other RNA
tctattccacctcatctcaag

SEQ ID NO: 7807 - RNA, 21 nt, synthetic construct
  source 1..21: mol_type = other RNA
tctcaagctgcaggttcatat

SEQ ID NO: 7808 - RNA, 21 nt, synthetic construct
  source 1..21: mol_type = other RNA
tctcacataatccataactac

SEQ ID NO: 7809 - RNA, 21 nt, synthetic construct
  source 1..21: mol_type = other RNA
tctcacgggctttttcagcca

SEQ ID NO: 7810 - RNA, 21 nt, synthetic construct
  source 1..21: mol_type = other RNA
tctcagccgatggatctgtat

SEQ ID NO: 7811 - RNA, 21 nt, synthetic construct
  source 1..21: mol_type = other RNA
tctcatgagtgggataaggag

SEQ ID NO: 7812 - RNA, 21 nt, synthetic construct
  source 1..21: mol_type = other RNA
tctcatgtatggattggtgga

SEQ ID NO: 7813 - RNA, 21 nt, synthetic construct
  source 1..21: mol_type = other RNA
tctcattgagtgtgcaaagcg

SEQ ID NO: 7814 - RNA, 21 nt, synthetic construct
  source 1..21: mol_type = other RNA
tctccaaaacaaggagaatga

SEQ ID NO: 7815 - RNA, 21 nt, synthetic construct
  source 1..21: mol_type = other RNA
tctccatatgccttcactcgg

SEQ ID NO: 7816 - RNA, 21 nt, synthetic construct
  source 1..21: mol_type = other RNA
tctccccagtctcagccgatg

SEQ ID NO: 7817 - RNA, 21 nt, synthetic construct
  source 1..21: mol_type = other RNA
tctccctcgtcttttaccagc

SEQ ID NO: 7818 - RNA, 21 nt, synthetic construct
  source 1..21: mol_type = other RNA
tctccctgcatattttggttt

SEQ ID NO: 7819 - RNA, 21 nt, synthetic construct
  source 1..21: mol_type = other RNA
tctccttgttttggagatgca

SEQ ID NO: 7820 - RNA, 21 nt, synthetic construct
  source 1..21: mol_type = other RNA
tctctcttaccctgtccacag

SEQ ID NO: 7821 - RNA, 21 nt, synthetic construct
  source 1..21: mol_type = other RNA
tctctgctgctgctggggctg

SEQ ID NO: 7822 - RNA, 21 nt, synthetic construct
  source 1..21: mol_type = other RNA
tctcttaccctgtccacagaa

SEQ ID NO: 7823 - RNA, 21 nt, synthetic construct
  source 1..21: mol_type = other RNA
tctcttcatgccctgcatctc

SEQ ID NO: 7824 - RNA, 21 nt, synthetic construct
  source 1..21: mol_type = other RNA
tctcttgccgaaaggaccatg

SEQ ID NO: 7825 - RNA, 21 nt, synthetic construct
  source 1..21: mol_type = other RNA
tctgaagtgtgtgaagagttt

SEQ ID NO: 7826 - RNA, 21 nt, synthetic construct
  source 1..21: mol_type = other RNA
tctgaagtttcatgtggctca

SEQ ID NO: 7827 - RNA, 21 nt, synthetic construct
  source 1..21: mol_type = other RNA
tctgaccagacctcatcgttg

SEQ ID NO: 7828 - RNA, 21 nt, synthetic construct
  source 1..21: mol_type = other RNA
tctgagcaatccaaacatgga

SEQ ID NO: 7829 - RNA, 21 nt, synthetic construct
  source 1..21: mol_type = other RNA
tctgaggcacatagtctgggc

SEQ ID NO: 7830 - RNA, 21 nt, synthetic construct
  source 1..21: mol_type = other RNA
tctgagggtgatgtggctgct

SEQ ID NO: 7831 - RNA, 21 nt, synthetic construct
  source 1..21: mol_type = other RNA
tctgattcaaaagcccagggt

SEQ ID NO: 7832 - RNA, 21 nt, synthetic construct
  source 1..21: mol_type = other RNA
tctgcaccagaagccacaccc

SEQ ID NO: 7833 - RNA, 21 nt, synthetic construct
  source 1..21: mol_type = other RNA
tctgctcgctgtctgaccaga

SEQ ID NO: 7834 - RNA, 21 nt, synthetic construct
  source 1..21: mol_type = other RNA
tctgctgctgctggggctgtg

SEQ ID NO: 7835 - RNA, 21 nt, synthetic construct
  source 1..21: mol_type = other RNA
tctgcttctggatccaccaat

SEQ ID NO: 7836 - RNA, 21 nt, synthetic construct
  source 1..21: mol_type = other RNA
tctggatccaccaatccatac

SEQ ID NO: 7837 - RNA, 21 nt, synthetic construct
  source 1..21: mol_type = other RNA
tctggatcctgacattggggg

SEQ ID NO: 7838 - RNA, 21 nt, synthetic construct
  source 1..21: mol_type = other RNA
tctggctatttccaaaccttg

SEQ ID NO: 7839 - RNA, 21 nt, synthetic construct
  source 1..21: mol_type = other RNA
tctgggccatacttttcacac

SEQ ID NO: 7840 - RNA, 21 nt, synthetic construct
  source 1..21: mol_type = other RNA
tctgggttcctattctcccca

SEQ ID NO: 7841 - RNA, 21 nt, synthetic construct
  source 1..21: mol_type = other RNA
tctggtcagacagcgagcaga

SEQ ID NO: 7842 - RNA, 21 nt, synthetic construct
  source 1..21: mol_type = other RNA
tctggtgcagaggacaacgat

SEQ ID NO: 7843 - RNA, 21 nt, synthetic construct
  source 1..21: mol_type = other RNA
tctgtagaggctggggctgct

SEQ ID NO: 7844 - RNA, 21 nt, synthetic construct
  source 1..21: mol_type = other RNA
tctgtataggtatccaagcca

SEQ ID NO: 7845 - RNA, 21 nt, synthetic construct
  source 1..21: mol_type = other RNA
tctgtcaactcttattctgct

SEQ ID NO: 7846 - RNA, 21 nt, synthetic construct
  source 1..21: mol_type = other RNA
tctgtctaagctcagtctacc

SEQ ID NO: 7847 - RNA, 21 nt, synthetic construct
  source 1..21: mol_type = other RNA
tctgtctgagggtgatgtggc

SEQ ID NO: 7848 - RNA, 21 nt, synthetic construct
  source 1..21: mol_type = other RNA
tctgtggacagggtaagagag

SEQ ID NO: 7849 - RNA, 21 nt, synthetic construct
  source 1..21: mol_type = other RNA
tctgtggtcacggacatggtc

SEQ ID NO: 7850 - RNA, 21 nt, synthetic construct
  source 1..21: mol_type = other RNA
tctgttctctcttaccctgtc

SEQ ID NO: 7851 - RNA, 21 nt, synthetic construct
  source 1..21: mol_type = other RNA
tctgttgtaaggccctgtgac

SEQ ID NO: 7852 - RNA, 21 nt, synthetic construct
  source 1..21: mol_type = other RNA
tcttaaccatgatagaactgc

SEQ ID NO: 7853 - RNA, 21 nt, synthetic construct
  source 1..21: mol_type = other RNA
tcttaccctgtccacagaact

SEQ ID NO: 7854 - RNA, 21 nt, synthetic construct
  source 1..21: mol_type = other RNA
tcttatgctggtaaaagacga

SEQ ID NO: 7855 - RNA, 21 nt, synthetic construct
  source 1..21: mol_type = other RNA
tcttattctgcttctggatcc

SEQ ID NO: 7856 - RNA, 21 nt, synthetic construct
  source 1..21: mol_type = other RNA
tcttcacacacttcagatatc

SEQ ID NO: 7857 - RNA, 21 nt, synthetic construct
  source 1..21: mol_type = other RNA
tcttcatgccctgcatctcca

SEQ ID NO: 7858 - RNA, 21 nt, synthetic construct
  source 1..21: mol_type = other RNA
tcttcctctttctcacgggct

SEQ ID NO: 7859 - RNA, 21 nt, synthetic construct
  source 1..21: mol_type = other RNA
tcttctaatcccatgaaccct

SEQ ID NO: 7860 - RNA, 21 nt, synthetic construct
  source 1..21: mol_type = other RNA
tcttgccgaaaggaccatgtc

SEQ ID NO: 7861 - RNA, 21 nt, synthetic construct
  source 1..21: mol_type = other RNA
tcttggcttggatacctatac

SEQ ID NO: 7862 - RNA, 21 nt, synthetic construct
  source 1..21: mol_type = other RNA
tctttaaaggggttgtggcat

SEQ ID NO: 7863 - RNA, 21 nt, synthetic construct
  source 1..21: mol_type = other RNA
tctttctcacgggctttttca

SEQ ID NO: 7864 - RNA, 21 nt, synthetic construct
  source 1..21: mol_type = other RNA
tctttgataacccattagctg

SEQ ID NO: 7865 - RNA, 21 nt, synthetic construct
  source 1..21: mol_type = other RNA
tctttgggaagccaaaatggc

SEQ ID NO: 7866 - RNA, 21 nt, synthetic construct
  source 1..21: mol_type = other RNA
tcttttaccagcataagagca

SEQ ID NO: 7867 - RNA, 21 nt, synthetic construct
  source 1..21: mol_type = other RNA
tcttttcaagtgaggtaacca

SEQ ID NO: 7868 - RNA, 21 nt, synthetic construct
  source 1..21: mol_type = other RNA
tgaaaaagcccgtgagaaaga

SEQ ID NO: 7869 - RNA, 21 nt, synthetic construct
  source 1..21: mol_type = other RNA
tgaaaagtatggcccagacta

SEQ ID NO: 7870 - RNA, 21 nt, synthetic construct
  source 1..21: mol_type = other RNA
tgaaaccatctccctgcatat

SEQ ID NO: 7871 - RNA, 21 nt, synthetic construct
  source 1..21: mol_type = other RNA
tgaaacgcaggtaagtgggct

SEQ ID NO: 7872 - RNA, 21 nt, synthetic construct
  source 1..21: mol_type = other RNA
tgaaacgggagcctgctgagc

SEQ ID NO: 7873 - RNA, 21 nt, synthetic construct
  source 1..21: mol_type = other RNA
tgaaacttcagagcccactta

SEQ ID NO: 7874 - RNA, 21 nt, synthetic construct
  source 1..21: mol_type = other RNA
tgaaagtcgcaaaagttctgt

SEQ ID NO: 7875 - RNA, 21 nt, synthetic construct
  source 1..21: mol_type = other RNA
tgaacatcattcaccttctca

SEQ ID NO: 7876 - RNA, 21 nt, synthetic construct
  source 1..21: mol_type = other RNA
tgaacatgcccggagctgcac

SEQ ID NO: 7877 - RNA, 21 nt, synthetic construct
  source 1..21: mol_type = other RNA
tgaacccttaccctgggcttt

SEQ ID NO: 7878 - RNA, 21 nt, synthetic construct
  source 1..21: mol_type = other RNA
tgaacctgcagcttgagatga

SEQ ID NO: 7879 - RNA, 21 nt, synthetic construct
  source 1..21: mol_type = other RNA
tgaacttctattccacctcat

SEQ ID NO: 7880 - RNA, 21 nt, synthetic construct
  source 1..21: mol_type = other RNA
tgaagagagctgttgaacatg

SEQ ID NO: 7881 - RNA, 21 nt, synthetic construct
  source 1..21: mol_type = other RNA
tgaagagtttggataaggact

SEQ ID NO: 7882 - RNA, 21 nt, synthetic construct
  source 1..21: mol_type = other RNA
tgaaggcatatggagatgtag

SEQ ID NO: 7883 - RNA, 21 nt, synthetic construct
  source 1..21: mol_type = other RNA
tgaagtggccatccatctcat

SEQ ID NO: 7884 - RNA, 21 nt, synthetic construct
  source 1..21: mol_type = other RNA
tgaagtgtgtgaagagtttgg

SEQ ID NO: 7885 - RNA, 21 nt, synthetic construct
  source 1..21: mol_type = other RNA
tgaagtttcatgtggctcagc

SEQ ID NO: 7886 - RNA, 21 nt, synthetic construct
  source 1..21: mol_type = other RNA
tgaatcagaatacccaatatc

SEQ ID NO: 7887 - RNA, 21 nt, synthetic construct
  source 1..21: mol_type = other RNA
tgaatgagccaaaacatggct

SEQ ID NO: 7888 - RNA, 21 nt, synthetic construct
  source 1..21: mol_type = other RNA
tgaatgatgttcaccattttt

SEQ ID NO: 7889 - RNA, 21 nt, synthetic construct
  source 1..21: mol_type = other RNA
tgaattcttctaatcccatga

SEQ ID NO: 7890 - RNA, 21 nt, synthetic construct
  source 1..21: mol_type = other RNA
tgacagactctgtctgagggt

SEQ ID NO: 7891 - RNA, 21 nt, synthetic construct
  source 1..21: mol_type = other RNA
tgacatgctttcccacacagc

SEQ ID NO: 7892 - RNA, 21 nt, synthetic construct
  source 1..21: mol_type = other RNA
tgacattgggggagtggccgt

SEQ ID NO: 7893 - RNA, 21 nt, synthetic construct
  source 1..21: mol_type = other RNA
tgaccacagactccacagtaa

SEQ ID NO: 7894 - RNA, 21 nt, synthetic construct
  source 1..21: mol_type = other RNA
tgaccagacctcatcgttgtc

SEQ ID NO: 7895 - RNA, 21 nt, synthetic construct
  source 1..21: mol_type = other RNA
tgaccattagcatcacttaat

SEQ ID NO: 7896 - RNA, 21 nt, synthetic construct
  source 1..21: mol_type = other RNA
tgacccatgagttggagccac

SEQ ID NO: 7897 - RNA, 21 nt, synthetic construct
  source 1..21: mol_type = other RNA
tgacccgagtgaaggcatatg

SEQ ID NO: 7898 - RNA, 21 nt, synthetic construct
  source 1..21: mol_type = other RNA
tgactggtcctgaaagtcgca

SEQ ID NO: 7899 - RNA, 21 nt, synthetic construct
  source 1..21: mol_type = other RNA
tgagaaagaggaagagtgtga

SEQ ID NO: 7900 - RNA, 21 nt, synthetic construct
  source 1..21: mol_type = other RNA
tgagaaggtgaatgatgttca

SEQ ID NO: 7901 - RNA, 21 nt, synthetic construct
  source 1..21: mol_type = other RNA
tgagaattgacccatgagttg

SEQ ID NO: 7902 - RNA, 21 nt, synthetic construct
  source 1..21: mol_type = other RNA
tgagacggcccaatccagtta

SEQ ID NO: 7903 - RNA, 21 nt, synthetic construct
  source 1..21: mol_type = other RNA
tgagactggggagaataggaa

SEQ ID NO: 7904 - RNA, 21 nt, synthetic construct
  source 1..21: mol_type = other RNA
tgagatgaggtggaatagaag

SEQ ID NO: 7905 - RNA, 21 nt, synthetic construct
  source 1..21: mol_type = other RNA
tgagatggatggccacttcat

SEQ ID NO: 7906 - RNA, 21 nt, synthetic construct
  source 1..21: mol_type = other RNA
tgagcaatccaaacatggact

SEQ ID NO: 7907 - RNA, 21 nt, synthetic construct
  source 1..21: mol_type = other RNA
tgagccaaaacatggcttggc

SEQ ID NO: 7908 - RNA, 21 nt, synthetic construct
  source 1..21: mol_type = other RNA
tgagccacatgaaacttcaga

SEQ ID NO: 7909 - RNA, 21 nt, synthetic construct
  source 1..21: mol_type = other RNA
tgagctgcatgccacaacccc

SEQ ID NO: 7910 - RNA, 21 nt, synthetic construct
  source 1..21: mol_type = other RNA
tgagcttagacagagggtctt

SEQ ID NO: 7911 - RNA, 21 nt, synthetic construct
  source 1..21: mol_type = other RNA
tgaggcacatagtctgggcca

SEQ ID NO: 7912 - RNA, 21 nt, synthetic construct
  source 1..21: mol_type = other RNA
tgagggtgatgtggctgctgc

SEQ ID NO: 7913 - RNA, 21 nt, synthetic construct
  source 1..21: mol_type = other RNA
tgaggtaaccaacaaaagggg

SEQ ID NO: 7914 - RNA, 21 nt, synthetic construct
  source 1..21: mol_type = other RNA
tgaggtctggtcagacagcga

SEQ ID NO: 7915 - RNA, 21 nt, synthetic construct
  source 1..21: mol_type = other RNA
tgaggtggaatagaagttcat

SEQ ID NO: 7916 - RNA, 21 nt, synthetic construct
  source 1..21: mol_type = other RNA
tgagtgggataaggaggcaat

SEQ ID NO: 7917 - RNA, 21 nt, synthetic construct
  source 1..21: mol_type = other RNA
tgagtgtgcaaagcgtgagct

SEQ ID NO: 7918 - RNA, 21 nt, synthetic construct
  source 1..21: mol_type = other RNA
tgagttggagccacggccact

SEQ ID NO: 7919 - RNA, 21 nt, synthetic construct
  source 1..21: mol_type = other RNA
tgataacccattagctgtgtg

SEQ ID NO: 7920 - RNA, 21 nt, synthetic construct
  source 1..21: mol_type = other RNA
tgatagaactgcttgtgtcca

SEQ ID NO: 7921 - RNA, 21 nt, synthetic construct
  source 1..21: mol_type = other RNA
tgataggtttccattgcattg

SEQ ID NO: 7922 - RNA, 21 nt, synthetic construct
  source 1..21: mol_type = other RNA
tgatatcacccccttttgttg

SEQ ID NO: 7923 - RNA, 21 nt, synthetic construct
  source 1..21: mol_type = other RNA
tgatatgatggatattgggta

SEQ ID NO: 7924 - RNA, 21 nt, synthetic construct
  source 1..21: mol_type = other RNA
tgatgaaacgcaggtaagtgg

SEQ ID NO: 7925 - RNA, 21 nt, synthetic construct
  source 1..21: mol_type = other RNA
tgatgctaatggtcaggaaaa

SEQ ID NO: 7926 - RNA, 21 nt, synthetic construct
  source 1..21: mol_type = other RNA
tgatggatattgggtattctg

SEQ ID NO: 7927 - RNA, 21 nt, synthetic construct
  source 1..21: mol_type = other RNA
tgatgtacatttggtctaatg

SEQ ID NO: 7928 - RNA, 21 nt, synthetic construct
  source 1..21: mol_type = other RNA
tgatgtggctgctgctgctgg

SEQ ID NO: 7929 - RNA, 21 nt, synthetic construct
  source 1..21: mol_type = other RNA
tgatgttcaccatttttatag

SEQ ID NO: 7930 - RNA, 21 nt, synthetic construct
  source 1..21: mol_type = other RNA
tgattcaaaagcccagggtaa

SEQ ID NO: 7931 - RNA, 21 nt, synthetic construct
  source 1..21: mol_type = other RNA
tgattcctattgggattcttt

SEQ ID NO: 7932 - RNA, 21 nt, synthetic construct
  source 1..21: mol_type = other RNA
tgcaaagcgtgagctgcatgc

SEQ ID NO: 7933 - RNA, 21 nt, synthetic construct
  source 1..21: mol_type = other RNA
tgcaatggaaacctatcagtg

SEQ ID NO: 7934 - RNA, 21 nt, synthetic construct
  source 1..21: mol_type = other RNA
tgcacactcaatgagaattga

SEQ ID NO: 7935 - RNA, 21 nt, synthetic construct
  source 1..21: mol_type = other RNA
tgcaccagaagccacaccctg

SEQ ID NO: 7936 - RNA, 21 nt, synthetic construct
  source 1..21: mol_type = other RNA
tgcactgtagttatggattat

SEQ ID NO: 7937 - RNA, 21 nt, synthetic construct
  source 1..21: mol_type = other RNA
tgcagaggacaacgatgaggt

SEQ ID NO: 7938 - RNA, 21 nt, synthetic construct
  source 1..21: mol_type = other RNA
tgcagcagtcccagcagcccc

SEQ ID NO: 7939 - RNA, 21 nt, synthetic construct
  source 1..21: mol_type = other RNA
tgcagctcacgctttgcacac

SEQ ID NO: 7940 - RNA, 21 nt, synthetic construct
  source 1..21: mol_type = other RNA
tgcagctccgggcatgttcaa

SEQ ID NO: 7941 - RNA, 21 nt, synthetic construct
  source 1..21: mol_type = other RNA
tgcagcttgagatgaggtgga

SEQ ID NO: 7942 - RNA, 21 nt, synthetic construct
  source 1..21: mol_type = other RNA
tgcagggagatggtttcagca

SEQ ID NO: 7943 - RNA, 21 nt, synthetic construct
  source 1..21: mol_type = other RNA
tgcagggcatgaagagagctg

SEQ ID NO: 7944 - RNA, 21 nt, synthetic construct
  source 1..21: mol_type = other RNA
tgcaggttcatatttgaattc

SEQ ID NO: 7945 - RNA, 21 nt, synthetic construct
  source 1..21: mol_type = other RNA
tgcatattttggtttccataa

SEQ ID NO: 7946 - RNA, 21 nt, synthetic construct
  source 1..21: mol_type = other RNA
tgcatctccaaaacaaggaga

SEQ ID NO: 7947 - RNA, 21 nt, synthetic construct
  source 1..21: mol_type = other RNA
tgcatgactggtcctgaaagt

SEQ ID NO: 7948 - RNA, 21 nt, synthetic construct
  source 1..21: mol_type = other RNA
tgcatgccacaacccctttaa

SEQ ID NO: 7949 - RNA, 21 nt, synthetic construct
  source 1..21: mol_type = other RNA
tgcattgatatgatggatatt

SEQ ID NO: 7950 - RNA, 21 nt, synthetic construct
  source 1..21: mol_type = other RNA
tgccaatggctgcttttcctg

SEQ ID NO: 7951 - RNA, 21 nt, synthetic construct
  source 1..21: mol_type = other RNA
tgccacaacccctttaaagaa

SEQ ID NO: 7952 - RNA, 21 nt, synthetic construct
  source 1..21: mol_type = other RNA
tgccatgggatttctgaggca

SEQ ID NO: 7953 - RNA, 21 nt, synthetic construct
  source 1..21: mol_type = other RNA
tgcccggagctgcactgtagt

SEQ ID NO: 7954 - RNA, 21 nt, synthetic construct
  source 1..21: mol_type = other RNA
tgccctgcatctccaaaacaa

SEQ ID NO: 7955 - RNA, 21 nt, synthetic construct
  source 1..21: mol_type = other RNA
tgccgaaaggaccatgtccgt

SEQ ID NO: 7956 - RNA, 21 nt, synthetic construct
  source 1..21: mol_type = other RNA
tgcctcagaaatcccatggca

SEQ ID NO: 7957 - RNA, 21 nt, synthetic construct
  source 1..21: mol_type = other RNA
tgcctccttatcccactcatg

SEQ ID NO: 7958 - RNA, 21 nt, synthetic construct
  source 1..21: mol_type = other RNA
tgccttcactcgggtcacagg

SEQ ID NO: 7959 - RNA, 21 nt, synthetic construct
  source 1..21: mol_type = other RNA
tgcgactttcaggaccagtca

SEQ ID NO: 7960 - RNA, 21 nt, synthetic construct
  source 1..21: mol_type = other RNA
tgcgtttcatcaagtctcttg

SEQ ID NO: 7961 - RNA, 21 nt, synthetic construct
  source 1..21: mol_type = other RNA
tgctaatggtcaggaaaagca

SEQ ID NO: 7962 - RNA, 21 nt, synthetic construct
  source 1..21: mol_type = other RNA
tgctcagattgggtggtaatc

SEQ ID NO: 7963 - RNA, 21 nt, synthetic construct
  source 1..21: mol_type = other RNA
tgctccccatatctgggttcc

SEQ ID NO: 7964 - RNA, 21 nt, synthetic construct
  source 1..21: mol_type = other RNA
tgctcgctgtctgaccagacc

SEQ ID NO: 7965 - RNA, 21 nt, synthetic construct
  source 1..21: mol_type = other RNA
tgctcttatgctggtaaaaga

SEQ ID NO: 7966 - RNA, 21 nt, synthetic construct
  source 1..21: mol_type = other RNA
tgctgaaaccatctccctgca

SEQ ID NO: 7967 - RNA, 21 nt, synthetic construct
  source 1..21: mol_type = other RNA
tgctgagccacatgaaacttc

SEQ ID NO: 7968 - RNA, 21 nt, synthetic construct
  source 1..21: mol_type = other RNA
tgctgcatgactggtcctgaa

SEQ ID NO: 7969 - RNA, 21 nt, synthetic construct
  source 1..21: mol_type = other RNA
tgctgctgctggggctgtggt

SEQ ID NO: 7970 - RNA, 21 nt, synthetic construct
  source 1..21: mol_type = other RNA
tgctgctgctggggtctctgc

SEQ ID NO: 7971 - RNA, 21 nt, synthetic construct
  source 1..21: mol_type = other RNA
tgctgctggggctgtggtggc

SEQ ID NO: 7972 - RNA, 21 nt, synthetic construct
  source 1..21: mol_type = other RNA
tgctgctggggtctctgctgc

SEQ ID NO: 7973 - RNA, 21 nt, synthetic construct
  source 1..21: mol_type = other RNA
tgctgggactgctgcatgact

SEQ ID NO: 7974 - RNA, 21 nt, synthetic construct
  source 1..21: mol_type = other RNA
tgctggggctgtggtggctgc

SEQ ID NO: 7975 - RNA, 21 nt, synthetic construct
  source 1..21: mol_type = other RNA
tgctggggtctctgctgctgc

SEQ ID NO: 7976 - RNA, 21 nt, synthetic construct
  source 1..21: mol_type = other RNA
tgctggtaaaagacgagggag

SEQ ID NO: 7977 - RNA, 21 nt, synthetic construct
  source 1..21: mol_type = other RNA
tgcttccagctcttaaccatg

SEQ ID NO: 7978 - RNA, 21 nt, synthetic construct
  source 1..21: mol_type = other RNA
tgcttccatagatatctgaag

SEQ ID NO: 7979 - RNA, 21 nt, synthetic construct
  source 1..21: mol_type = other RNA
tgcttctggatccaccaatcc

SEQ ID NO: 7980 - RNA, 21 nt, synthetic construct
  source 1..21: mol_type = other RNA
tgcttctgtagaggctggggc

SEQ ID NO: 7981 - RNA, 21 nt, synthetic construct
  source 1..21: mol_type = other RNA
tgcttgtgtccaaggaggctt

SEQ ID NO: 7982 - RNA, 21 nt, synthetic construct
  source 1..21: mol_type = other RNA
tgctttcccacacagctaatg

SEQ ID NO: 7983 - RNA, 21 nt, synthetic construct
  source 1..21: mol_type = other RNA
tgcttttcctgaccattagca

SEQ ID NO: 7984 - RNA, 21 nt, synthetic construct
  source 1..21: mol_type = other RNA
tggaaaccaaaatatgcaggg

SEQ ID NO: 7985 - RNA, 21 nt, synthetic construct
  source 1..21: mol_type = other RNA
tggaaacctatcagtggacaa

SEQ ID NO: 7986 - RNA, 21 nt, synthetic construct
  source 1..21: mol_type = other RNA
tggaaatagccagagttttac

SEQ ID NO: 7987 - RNA, 21 nt, synthetic construct
  source 1..21: mol_type = other RNA
tggaagcaccagccctatgaa

SEQ ID NO: 7988 - RNA, 21 nt, synthetic construct
  source 1..21: mol_type = other RNA
tggaagcatctttgataaccc

SEQ ID NO: 7989 - RNA, 21 nt, synthetic construct
  source 1..21: mol_type = other RNA
tggaatagaagttcatagggc

SEQ ID NO: 7990 - RNA, 21 nt, synthetic construct
  source 1..21: mol_type = other RNA
tggacaactgctccccatatc

SEQ ID NO: 7991 - RNA, 21 nt, synthetic construct
  source 1..21: mol_type = other RNA
tggacacaagcagttctatca

SEQ ID NO: 7992 - RNA, 21 nt, synthetic construct
  source 1..21: mol_type = other RNA
tggacagggtaagagagaaca

SEQ ID NO: 7993 - RNA, 21 nt, synthetic construct
  source 1..21: mol_type = other RNA
tggactagtgccaatggctgc

SEQ ID NO: 7994 - RNA, 21 nt, synthetic construct
  source 1..21: mol_type = other RNA
tggactataaaaatggtgaac

SEQ ID NO: 7995 - RNA, 21 nt, synthetic construct
  source 1..21: mol_type = other RNA
tggagatgcagggcatgaaga

SEQ ID NO: 7996 - RNA, 21 nt, synthetic construct
  source 1..21: mol_type = other RNA
tggagatgtagttactgtgga

SEQ ID NO: 7997 - RNA, 21 nt, synthetic construct
  source 1..21: mol_type = other RNA
tggagccacggccactccccc

SEQ ID NO: 7998 - RNA, 21 nt, synthetic construct
  source 1..21: mol_type = other RNA
tggagtctgtggtcacggaca

SEQ ID NO: 7999 - RNA, 21 nt, synthetic construct
  source 1..21: mol_type = other RNA
tggataaggactaactggatt

SEQ ID NO: 8000 - RNA, 21 nt, synthetic construct
  source 1..21: mol_type = other RNA
tggatacctatacagatccat

SEQ ID NO: 8001 - RNA, 21 nt, synthetic construct
  source 1..21: mol_type = other RNA
tggatattgggtattctgatt

SEQ ID NO: 8002 - RNA, 21 nt, synthetic construct
  source 1..21: mol_type = other RNA
tggatccaccaatccatacat

SEQ ID NO: 8003 - RNA, 21 nt, synthetic construct
  source 1..21: mol_type = other RNA
tggatccagaagcagaataag

SEQ ID NO: 8004 - RNA, 21 nt, synthetic construct
  source 1..21: mol_type = other RNA
tggatcctgacattgggggag

SEQ ID NO: 8005 - RNA, 21 nt, synthetic construct
  source 1..21: mol_type = other RNA
tggatctgtataggtatccaa

SEQ ID NO: 8006 - RNA, 21 nt, synthetic construct
  source 1..21: mol_type = other RNA
tggatggccacttcatgggag

SEQ ID NO: 8007 - RNA, 21 nt, synthetic construct
  source 1..21: mol_type = other RNA
tggatgggtggtagactgagc

SEQ ID NO: 8008 - RNA, 21 nt, synthetic construct
  source 1..21: mol_type = other RNA
tggattatgtgagaaggtgaa

SEQ ID NO: 8009 - RNA, 21 nt, synthetic construct
  source 1..21: mol_type = other RNA
tggattgctcagattgggtgg

SEQ ID NO: 8010 - RNA, 21 nt, synthetic construct
  source 1..21: mol_type = other RNA
tggattgggccgtctcatgta

SEQ ID NO: 8011 - RNA, 21 nt, synthetic construct
  source 1..21: mol_type = other RNA
tggattggtggatccagaagc

SEQ ID NO: 8012 - RNA, 21 nt, synthetic construct
  source 1..21: mol_type = other RNA
tggcaaaaaagtgaaacggga

SEQ ID NO: 8013 - RNA, 21 nt, synthetic construct
  source 1..21: mol_type = other RNA
tggcactagtccagggtgtgg

SEQ ID NO: 8014 - RNA, 21 nt, synthetic construct
  source 1..21: mol_type = other RNA
tggcatgcagctcacgctttg

SEQ ID NO: 8015 - RNA, 21 nt, synthetic construct
  source 1..21: mol_type = other RNA
tggccacttcatgggagccac

SEQ ID NO: 8016 - RNA, 21 nt, synthetic construct
  source 1..21: mol_type = other RNA
tggccatccatctcatgagtg

SEQ ID NO: 8017 - RNA, 21 nt, synthetic construct
  source 1..21: mol_type = other RNA
tggcccagactatgtgcctca

SEQ ID NO: 8018 - RNA, 21 nt, synthetic construct
  source 1..21: mol_type = other RNA
tggccgtggctccaactcatg

SEQ ID NO: 8019 - RNA, 21 nt, synthetic construct
  source 1..21: mol_type = other RNA
tggctatttccaaaccttggc

SEQ ID NO: 8020 - RNA, 21 nt, synthetic construct
  source 1..21: mol_type = other RNA
tggctcagcaggctcccgttt

SEQ ID NO: 8021 - RNA, 21 nt, synthetic construct
  source 1..21: mol_type = other RNA
tggctcattcatgctcttatg

SEQ ID NO: 8022 - RNA, 21 nt, synthetic construct
  source 1..21: mol_type = other RNA
tggctccaactcatgggtcaa

SEQ ID NO: 8023 - RNA, 21 nt, synthetic construct
  source 1..21: mol_type = other RNA
tggctcccatgaagtggccat

SEQ ID NO: 8024 - RNA, 21 nt, synthetic construct
  source 1..21: mol_type = other RNA
tggctctttgggaagccaaaa

SEQ ID NO: 8025 - RNA, 21 nt, synthetic construct
  source 1..21: mol_type = other RNA
tggctgaaaaagcccgtgaga

SEQ ID NO: 8026 - RNA, 21 nt, synthetic construct
  source 1..21: mol_type = other RNA
tggctgctgctgctggggtct

SEQ ID NO: 8027 - RNA, 21 nt, synthetic construct
  source 1..21: mol_type = other RNA
tggctgcttctgtagaggctg

SEQ ID NO: 8028 - RNA, 21 nt, synthetic construct
  source 1..21: mol_type = other RNA
tggctgcttttcctgaccatt

SEQ ID NO: 8029 - RNA, 21 nt, synthetic construct
  source 1..21: mol_type = other RNA
tggctggtaaagtgtatggat

SEQ ID NO: 8030 - RNA, 21 nt, synthetic construct
  source 1..21: mol_type = other RNA
tggcttcccaaagagccaagc

SEQ ID NO: 8031 - RNA, 21 nt, synthetic construct
  source 1..21: mol_type = other RNA
tggcttctggtgcagaggaca

SEQ ID NO: 8032 - RNA, 21 nt, synthetic construct
  source 1..21: mol_type = other RNA
tggcttggatacctatacaga

SEQ ID NO: 8033 - RNA, 21 nt, synthetic construct
  source 1..21: mol_type = other RNA
tggcttggctctttgggaagc

SEQ ID NO: 8034 - RNA, 21 nt, synthetic construct
  source 1..21: mol_type = other RNA
tgggaaagcatgtcattctcc

SEQ ID NO: 8035 - RNA, 21 nt, synthetic construct
  source 1..21: mol_type = other RNA
tgggaagccaaaatggctgaa

SEQ ID NO: 8036 - RNA, 21 nt, synthetic construct
  source 1..21: mol_type = other RNA
tgggactgctgcatgactggt

SEQ ID NO: 8037 - RNA, 21 nt, synthetic construct
  source 1..21: mol_type = other RNA
tgggagccacctctagattac

SEQ ID NO: 8038 - RNA, 21 nt, synthetic construct
  source 1..21: mol_type = other RNA
tgggataaggaggcaatttcc

SEQ ID NO: 8039 - RNA, 21 nt, synthetic construct
  source 1..21: mol_type = other RNA
tgggattagaagaattcaaat

SEQ ID NO: 8040 - RNA, 21 nt, synthetic construct
  source 1..21: mol_type = other RNA
tgggattctttaaaggggttg

SEQ ID NO: 8041 - RNA, 21 nt, synthetic construct
  source 1..21: mol_type = other RNA
tgggatttctgaggcacatag

SEQ ID NO: 8042 - RNA, 21 nt, synthetic construct
  source 1..21: mol_type = other RNA
tgggccatacttttcacactc

SEQ ID NO: 8043 - RNA, 21 nt, synthetic construct
  source 1..21: mol_type = other RNA
tgggccgtctcatgtatggat

SEQ ID NO: 8044 - RNA, 21 nt, synthetic construct
  source 1..21: mol_type = other RNA
tgggctctgaagtttcatgtg

SEQ ID NO: 8045 - RNA, 21 nt, synthetic construct
  source 1..21: mol_type = other RNA
tgggcttttgaatcagaatac

SEQ ID NO: 8046 - RNA, 21 nt, synthetic construct
  source 1..21: mol_type = other RNA
tggggagaataggaacccaga

SEQ ID NO: 8047 - RNA, 21 nt, synthetic construct
  source 1..21: mol_type = other RNA
tggggagcagttgtccactga

SEQ ID NO: 8048 - RNA, 21 nt, synthetic construct
  source 1..21: mol_type = other RNA
tggggctgctgggactgctgc

SEQ ID NO: 8049 - RNA, 21 nt, synthetic construct
  source 1..21: mol_type = other RNA
tggggctgtggtggctgcttc

SEQ ID NO: 8050 - RNA, 21 nt, synthetic construct
  source 1..21: mol_type = other RNA
tgggggagtggccgtggctcc

SEQ ID NO: 8051 - RNA, 21 nt, synthetic construct
  source 1..21: mol_type = other RNA
tggggtctctgctgctgctgg

SEQ ID NO: 8052 - RNA, 21 nt, synthetic construct
  source 1..21: mol_type = other RNA
tggggtgattcctattgggat

SEQ ID NO: 8053 - RNA, 21 nt, synthetic construct
  source 1..21: mol_type = other RNA
tgggtattctgattcaaaagc

SEQ ID NO: 8054 - RNA, 21 nt, synthetic construct
  source 1..21: mol_type = other RNA
tgggtcaattctcattgagtg

SEQ ID NO: 8055 - RNA, 21 nt, synthetic construct
  source 1..21: mol_type = other RNA
tgggtggtaatctagaggtgg

SEQ ID NO: 8056 - RNA, 21 nt, synthetic construct
  source 1..21: mol_type = other RNA
tgggtggtagactgagcttag

SEQ ID NO: 8057 - RNA, 21 nt, synthetic construct
  source 1..21: mol_type = other RNA
tgggttatcaaagatgcttcc

SEQ ID NO: 8058 - RNA, 21 nt, synthetic construct
  source 1..21: mol_type = other RNA
tgggttcctattctccccagt

SEQ ID NO: 8059 - RNA, 21 nt, synthetic construct
  source 1..21: mol_type = other RNA
tggtaaaagacgagggagatc

SEQ ID NO: 8060 - RNA, 21 nt, synthetic construct
  source 1..21: mol_type = other RNA
tggtaaagtgtatggatgggt

SEQ ID NO: 8061 - RNA, 21 nt, synthetic construct
  source 1..21: mol_type = other RNA
tggtaatctagaggtggctcc

SEQ ID NO: 8062 - RNA, 21 nt, synthetic construct
  source 1..21: mol_type = other RNA
tggtacaactgctgaaaccat

SEQ ID NO: 8063 - RNA, 21 nt, synthetic construct
  source 1..21: mol_type = other RNA
tggtagactgagcttagacag

SEQ ID NO: 8064 - RNA, 21 nt, synthetic construct
  source 1..21: mol_type = other RNA
tggtcacggacatggtccttt

SEQ ID NO: 8065 - RNA, 21 nt, synthetic construct
  source 1..21: mol_type = other RNA
tggtcagacagcgagcagagc

SEQ ID NO: 8066 - RNA, 21 nt, synthetic construct
  source 1..21: mol_type = other RNA
tggtcaggaaaagcagccatt

SEQ ID NO: 8067 - RNA, 21 nt, synthetic construct
  source 1..21: mol_type = other RNA
tggtcctgaaagtcgcaaaag

SEQ ID NO: 8068 - RNA, 21 nt, synthetic construct
  source 1..21: mol_type = other RNA
tggtcctttcggcaagagact

SEQ ID NO: 8069 - RNA, 21 nt, synthetic construct
  source 1..21: mol_type = other RNA
tggtctaatggtacaactgct

SEQ ID NO: 8070 - RNA, 21 nt, synthetic construct
  source 1..21: mol_type = other RNA
tggtgaacatcattcaccttc

SEQ ID NO: 8071 - RNA, 21 nt, synthetic construct
  source 1..21: mol_type = other RNA
tggtgcagaggacaacgatga

SEQ ID NO: 8072 - RNA, 21 nt, synthetic construct
  source 1..21: mol_type = other RNA
tggtgcttccatagatatctg

SEQ ID NO: 8073 - RNA, 21 nt, synthetic construct
  source 1..21: mol_type = other RNA
tggtggatccagaagcagaat

SEQ ID NO: 8074 - RNA, 21 nt, synthetic construct
  source 1..21: mol_type = other RNA
tggtggctgcttctgtagagg

SEQ ID NO: 8075 - RNA, 21 nt, synthetic construct
  source 1..21: mol_type = other RNA
tggtggggtgattcctattgg

SEQ ID NO: 8076 - RNA, 21 nt, synthetic construct
  source 1..21: mol_type = other RNA
tggttaagagctggaagcatc

SEQ ID NO: 8077 - RNA, 21 nt, synthetic construct
  source 1..21: mol_type = other RNA
tggtttcagcagttgtaccat

SEQ ID NO: 8078 - RNA, 21 nt, synthetic construct
  source 1..21: mol_type = other RNA
tggtttccataacctaagtat

SEQ ID NO: 8079 - RNA, 21 nt, synthetic construct
  source 1..21: mol_type = other RNA
tgtaaaactctggctatttcc

SEQ ID NO: 8080 - RNA, 21 nt, synthetic construct
  source 1..21: mol_type = other RNA
tgtaagcctccttggacacaa

SEQ ID NO: 8081 - RNA, 21 nt, synthetic construct
  source 1..21: mol_type = other RNA
tgtaaggccctgtgacccgag

SEQ ID NO: 8082 - RNA, 21 nt, synthetic construct
  source 1..21: mol_type = other RNA
tgtacatcatgtagggaaatt

SEQ ID NO: 8083 - RNA, 21 nt, synthetic construct
  source 1..21: mol_type = other RNA
tgtacatttggtctaatggta

SEQ ID NO: 8084 - RNA, 21 nt, synthetic construct
  source 1..21: mol_type = other RNA
tgtaccattagaccaaatgta

SEQ ID NO: 8085 - RNA, 21 nt, synthetic construct
  source 1..21: mol_type = other RNA
tgtagaggctggggctgctgg

SEQ ID NO: 8086 - RNA, 21 nt, synthetic construct
  source 1..21: mol_type = other RNA
tgtagggaaattgcctcctta

SEQ ID NO: 8087 - RNA, 21 nt, synthetic construct
  source 1..21: mol_type = other RNA
tgtagttactgtggagtctgt

SEQ ID NO: 8088 - RNA, 21 nt, synthetic construct
  source 1..21: mol_type = other RNA
tgtagttatggattatgtgag

SEQ ID NO: 8089 - RNA, 21 nt, synthetic construct
  source 1..21: mol_type = other RNA
tgtataggtatccaagccaag

SEQ ID NO: 8090 - RNA, 21 nt, synthetic construct
  source 1..21: mol_type = other RNA
tgtatggatgggtggtagact

SEQ ID NO: 8091 - RNA, 21 nt, synthetic construct
  source 1..21: mol_type = other RNA
tgtatggattggtggatccag

SEQ ID NO: 8092 - RNA, 21 nt, synthetic construct
  source 1..21: mol_type = other RNA
tgtcaactcttattctgcttc

SEQ ID NO: 8093 - RNA, 21 nt, synthetic construct
  source 1..21: mol_type = other RNA
tgtcaggatccagaaagctct

SEQ ID NO: 8094 - RNA, 21 nt, synthetic construct
  source 1..21: mol_type = other RNA
tgtcattctccttgttttgga

SEQ ID NO: 8095 - RNA, 21 nt, synthetic construct
  source 1..21: mol_type = other RNA
tgtccaaggaggcttacacaa

SEQ ID NO: 8096 - RNA, 21 nt, synthetic construct
  source 1..21: mol_type = other RNA
tgtccacagaacttttgcgac

SEQ ID NO: 8097 - RNA, 21 nt, synthetic construct
  source 1..21: mol_type = other RNA
tgtccactgataggtttccat

SEQ ID NO: 8098 - RNA, 21 nt, synthetic construct
  source 1..21: mol_type = other RNA
tgtccgtgaccacagactcca

SEQ ID NO: 8099 - RNA, 21 nt, synthetic construct
  source 1..21: mol_type = other RNA
tgtcctctgcaccagaagcca

SEQ ID NO: 8100 - RNA, 21 nt, synthetic construct
  source 1..21: mol_type = other RNA
tgtctaagctcagtctaccac

SEQ ID NO: 8101 - RNA, 21 nt, synthetic construct
  source 1..21: mol_type = other RNA
tgtctgaccagacctcatcgt

SEQ ID NO: 8102 - RNA, 21 nt, synthetic construct
  source 1..21: mol_type = other RNA
tgtctgagggtgatgtggctg

SEQ ID NO: 8103 - RNA, 21 nt, synthetic construct
  source 1..21: mol_type = other RNA
tgtgaaaagtatggcccagac

SEQ ID NO: 8104 - RNA, 21 nt, synthetic construct
  source 1..21: mol_type = other RNA
tgtgaagagtttggataagga

SEQ ID NO: 8105 - RNA, 21 nt, synthetic construct
  source 1..21: mol_type = other RNA
tgtgacccgagtgaaggcata

SEQ ID NO: 8106 - RNA, 21 nt, synthetic construct
  source 1..21: mol_type = other RNA
tgtgagaaggtgaatgatgtt

SEQ ID NO: 8107 - RNA, 21 nt, synthetic construct
  source 1..21: mol_type = other RNA
tgtgcaaagcgtgagctgcat

SEQ ID NO: 8108 - RNA, 21 nt, synthetic construct
  source 1..21: mol_type = other RNA
tgtgcctcagaaatcccatgg

SEQ ID NO: 8109 - RNA, 21 nt, synthetic construct
  source 1..21: mol_type = other RNA
tgtggacagggtaagagagaa

SEQ ID NO: 8110 - RNA, 21 nt, synthetic construct
  source 1..21: mol_type = other RNA
tgtggagtctgtggtcacgga

SEQ ID NO: 8111 - RNA, 21 nt, synthetic construct
  source 1..21: mol_type = other RNA
tgtggcatgcagctcacgctt

SEQ ID NO: 8112 - RNA, 21 nt, synthetic construct
  source 1..21: mol_type = other RNA
tgtggctcagcaggctcccgt

SEQ ID NO: 8113 - RNA, 21 nt, synthetic construct
  source 1..21: mol_type = other RNA
tgtggctgctgctgctggggt

SEQ ID NO: 8114 - RNA, 21 nt, synthetic construct
  source 1..21: mol_type = other RNA
tgtggcttctggtgcagagga

SEQ ID NO: 8115 - RNA, 21 nt, synthetic construct
  source 1..21: mol_type = other RNA
tgtgggaaagcatgtcattct

SEQ ID NO: 8116 - RNA, 21 nt, synthetic construct
  source 1..21: mol_type = other RNA
tgtggtcacggacatggtcct

SEQ ID NO: 8117 - RNA, 21 nt, synthetic construct
  source 1..21: mol_type = other RNA
tgtggtggctgcttctgtaga

SEQ ID NO: 8118 - RNA, 21 nt, synthetic construct
  source 1..21: mol_type = other RNA
tgtgtaagcctccttggacac

SEQ ID NO: 8119 - RNA, 21 nt, synthetic construct
  source 1..21: mol_type = other RNA
tgtgtccaaggaggcttacac

SEQ ID NO: 8120 - RNA, 21 nt, synthetic construct
  source 1..21: mol_type = other RNA
tgtgtgaagagtttggataag

SEQ ID NO: 8121 - RNA, 21 nt, synthetic construct
  source 1..21: mol_type = other RNA
tgtgtgggaaagcatgtcatt

SEQ ID NO: 8122 - RNA, 21 nt, synthetic construct
  source 1..21: mol_type = other RNA
tgttcaacagctctcttcatg

SEQ ID NO: 8123 - RNA, 21 nt, synthetic construct
  source 1..21: mol_type = other RNA
tgttcaccatttttatagtcc

SEQ ID NO: 8124 - RNA, 21 nt, synthetic construct
  source 1..21: mol_type = other RNA
tgttctctcttaccctgtcca

SEQ ID NO: 8125 - RNA, 21 nt, synthetic construct
  source 1..21: mol_type = other RNA
tgttgaacatgcccggagctg

SEQ ID NO: 8126 - RNA, 21 nt, synthetic construct
  source 1..21: mol_type = other RNA
tgttgtaaggccctgtgaccc

SEQ ID NO: 8127 - RNA, 21 nt, synthetic construct
  source 1..21: mol_type = other RNA
tgtttctgttctctcttaccc

SEQ ID NO: 8128 - RNA, 21 nt, synthetic construct
  source 1..21: mol_type = other RNA
tgtttggattgctcagattgg

SEQ ID NO: 8129 - RNA, 21 nt, synthetic construct
  source 1..21: mol_type = other RNA
tgttttggagatgcagggcat

SEQ ID NO: 8130 - RNA, 21 nt, synthetic construct
  source 1..21: mol_type = other RNA
tgttttggctcattcatgctc

SEQ ID NO: 8131 - RNA, 21 nt, synthetic construct
  source 1..21: mol_type = other RNA
ttaaagaatcccaataggaat

SEQ ID NO: 8132 - RNA, 21 nt, synthetic construct
  source 1..21: mol_type = other RNA
ttaaaggggttgtggcatgca

SEQ ID NO: 8133 - RNA, 21 nt, synthetic construct
  source 1..21: mol_type = other RNA
ttaaccatgatagaactgctt

SEQ ID NO: 8134 - RNA, 21 nt, synthetic construct
  source 1..21: mol_type = other RNA
ttaagagctggaagcatcttt

SEQ ID NO: 8135 - RNA, 21 nt, synthetic construct
  source 1..21: mol_type = other RNA
ttaagtgatgctaatggtcag

SEQ ID NO: 8136 - RNA, 21 nt, synthetic construct
  source 1..21: mol_type = other RNA
ttaatttgtgtaagcctcctt

SEQ ID NO: 8137 - RNA, 21 nt, synthetic construct
  source 1..21: mol_type = other RNA
ttacacaaattaagtgatgct

SEQ ID NO: 8138 - RNA, 21 nt, synthetic construct
  source 1..21: mol_type = other RNA
ttaccacccaatctgagcaat

SEQ ID NO: 8139 - RNA, 21 nt, synthetic construct
  source 1..21: mol_type = other RNA
ttaccagcataagagcatgaa

SEQ ID NO: 8140 - RNA, 21 nt, synthetic construct
  source 1..21: mol_type = other RNA
ttaccagccaaggtttggaaa

SEQ ID NO: 8141 - RNA, 21 nt, synthetic construct
  source 1..21: mol_type = other RNA
ttaccctgggcttttgaatca

SEQ ID NO: 8142 - RNA, 21 nt, synthetic construct
  source 1..21: mol_type = other RNA
ttaccctgtccacagaacttt

SEQ ID NO: 8143 - RNA, 21 nt, synthetic construct
  source 1..21: mol_type = other RNA
ttacctgcgtttcatcaagtc

SEQ ID NO: 8144 - RNA, 21 nt, synthetic construct
  source 1..21: mol_type = other RNA
ttactgtggagtctgtggtca

SEQ ID NO: 8145 - RNA, 21 nt, synthetic construct
  source 1..21: mol_type = other RNA
ttagacagagggtcttggctt

SEQ ID NO: 8146 - RNA, 21 nt, synthetic construct
  source 1..21: mol_type = other RNA
ttagaccaaatgtacatcatg

SEQ ID NO: 8147 - RNA, 21 nt, synthetic construct
  source 1..21: mol_type = other RNA
ttagatgtaaaactctggcta

SEQ ID NO: 8148 - RNA, 21 nt, synthetic construct
  source 1..21: mol_type = other RNA
ttagcatcacttaatttgtgt

SEQ ID NO: 8149 - RNA, 21 nt, synthetic construct
  source 1..21: mol_type = other RNA
ttagctgtgtgggaaagcatg

SEQ ID NO: 8150 - RNA, 21 nt, synthetic construct
  source 1..21: mol_type = other RNA
ttaggttatggaaaccaaaat

SEQ ID NO: 8151 - RNA, 21 nt, synthetic construct
  source 1..21: mol_type = other RNA
ttagtccttatccaaactctt

SEQ ID NO: 8152 - RNA, 21 nt, synthetic construct
  source 1..21: mol_type = other RNA
ttatagtccatgtttggattg

SEQ ID NO: 8153 - RNA, 21 nt, synthetic construct
  source 1..21: mol_type = other RNA
ttatcaaagatgcttccagct

SEQ ID NO: 8154 - RNA, 21 nt, synthetic construct
  source 1..21: mol_type = other RNA
ttatccaaactcttcacacac

SEQ ID NO: 8155 - RNA, 21 nt, synthetic construct
  source 1..21: mol_type = other RNA
ttatcccactcatgagatgga

SEQ ID NO: 8156 - RNA, 21 nt, synthetic construct
  source 1..21: mol_type = other RNA
ttatgctggtaaaagacgagg

SEQ ID NO: 8157 - RNA, 21 nt, synthetic construct
  source 1..21: mol_type = other RNA
ttatggaaaccaaaatatgca

SEQ ID NO: 8158 - RNA, 21 nt, synthetic construct
  source 1..21: mol_type = other RNA
ttatggattatgtgagaaggt

SEQ ID NO: 8159 - RNA, 21 nt, synthetic construct
  source 1..21: mol_type = other RNA
ttatgtgagaaggtgaatgat

SEQ ID NO: 8160 - RNA, 21 nt, synthetic construct
  source 1..21: mol_type = other RNA
ttattctgcttctggatccac

SEQ ID NO: 8161 - RNA, 21 nt, synthetic construct
  source 1..21: mol_type = other RNA
ttcaaaagcccagggtaaggg

SEQ ID NO: 8162 - RNA, 21 nt, synthetic construct
  source 1..21: mol_type = other RNA
ttcaaatatgaacctgcagct

SEQ ID NO: 8163 - RNA, 21 nt, synthetic construct
  source 1..21: mol_type = other RNA
ttcaacagctctcttcatgcc

SEQ ID NO: 8164 - RNA, 21 nt, synthetic construct
  source 1..21: mol_type = other RNA
ttcaagtgaggtaaccaacaa

SEQ ID NO: 8165 - RNA, 21 nt, synthetic construct
  source 1..21: mol_type = other RNA
ttcacacacttcagatatcta

SEQ ID NO: 8166 - RNA, 21 nt, synthetic construct
  source 1..21: mol_type = other RNA
ttcacactcttcctctttctc

SEQ ID NO: 8167 - RNA, 21 nt, synthetic construct
  source 1..21: mol_type = other RNA
ttcaccatttttatagtccat

SEQ ID NO: 8168 - RNA, 21 nt, synthetic construct
  source 1..21: mol_type = other RNA
ttcaccttctcacataatcca

SEQ ID NO: 8169 - RNA, 21 nt, synthetic construct
  source 1..21: mol_type = other RNA
ttcactcgggtcacagggcct

SEQ ID NO: 8170 - RNA, 21 nt, synthetic construct
  source 1..21: mol_type = other RNA
ttcacttttttgccatgggat

SEQ ID NO: 8171 - RNA, 21 nt, synthetic construct
  source 1..21: mol_type = other RNA
ttcagagcccacttacctgcg

SEQ ID NO: 8172 - RNA, 21 nt, synthetic construct
  source 1..21: mol_type = other RNA
ttcagatatctatggaagcac

SEQ ID NO: 8173 - RNA, 21 nt, synthetic construct
  source 1..21: mol_type = other RNA
ttcagcagttgtaccattaga

SEQ ID NO: 8174 - RNA, 21 nt, synthetic construct
  source 1..21: mol_type = other RNA
ttcagccattttggcttccca

SEQ ID NO: 8175 - RNA, 21 nt, synthetic construct
  source 1..21: mol_type = other RNA
ttcaggaccagtcatgcagca

SEQ ID NO: 8176 - RNA, 21 nt, synthetic construct
  source 1..21: mol_type = other RNA
ttcatagggctggtgcttcca

SEQ ID NO: 8177 - RNA, 21 nt, synthetic construct
  source 1..21: mol_type = other RNA
ttcatcaagtctcttgccgaa

SEQ ID NO: 8178 - RNA, 21 nt, synthetic construct
  source 1..21: mol_type = other RNA
ttcatgccctgcatctccaaa

SEQ ID NO: 8179 - RNA, 21 nt, synthetic construct
  source 1..21: mol_type = other RNA
ttcatgctcttatgctggtaa

SEQ ID NO: 8180 - RNA, 21 nt, synthetic construct
  source 1..21: mol_type = other RNA
ttcatgggagccacctctaga

SEQ ID NO: 8181 - RNA, 21 nt, synthetic construct
  source 1..21: mol_type = other RNA
ttcatgggattagaagaattc

SEQ ID NO: 8182 - RNA, 21 nt, synthetic construct
  source 1..21: mol_type = other RNA
ttcatgtggctcagcaggctc

SEQ ID NO: 8183 - RNA, 21 nt, synthetic construct
  source 1..21: mol_type = other RNA
ttccaaaccttggctggtaaa

SEQ ID NO: 8184 - RNA, 21 nt, synthetic construct
  source 1..21: mol_type = other RNA
ttccacctcatctcaagctgc

SEQ ID NO: 8185 - RNA, 21 nt, synthetic construct
  source 1..21: mol_type = other RNA
ttccagctcttaaccatgata

SEQ ID NO: 8186 - RNA, 21 nt, synthetic construct
  source 1..21: mol_type = other RNA
ttccataacctaagtatttag

SEQ ID NO: 8187 - RNA, 21 nt, synthetic construct
  source 1..21: mol_type = other RNA
ttccatagatatctgaagtgt

SEQ ID NO: 8188 - RNA, 21 nt, synthetic construct
  source 1..21: mol_type = other RNA
ttccattgcattgatatgatg

SEQ ID NO: 8189 - RNA, 21 nt, synthetic construct
  source 1..21: mol_type = other RNA
ttcccaaagagccaagccatg

SEQ ID NO: 8190 - RNA, 21 nt, synthetic construct
  source 1..21: mol_type = other RNA
ttcccacacagctaatgggtt

SEQ ID NO: 8191 - RNA, 21 nt, synthetic construct
  source 1..21: mol_type = other RNA
ttccctacatgatgtacattt

SEQ ID NO: 8192 - RNA, 21 nt, synthetic construct
  source 1..21: mol_type = other RNA
ttcctattctccccagtctca

SEQ ID NO: 8193 - RNA, 21 nt, synthetic construct
  source 1..21: mol_type = other RNA
ttcctattgggattctttaaa

SEQ ID NO: 8194 - RNA, 21 nt, synthetic construct
  source 1..21: mol_type = other RNA
ttcctctttctcacgggcttt

SEQ ID NO: 8195 - RNA, 21 nt, synthetic construct
  source 1..21: mol_type = other RNA
ttcctgaccattagcatcact

SEQ ID NO: 8196 - RNA, 21 nt, synthetic construct
  source 1..21: mol_type = other RNA
ttcggcaagagacttgatgaa

SEQ ID NO: 8197 - RNA, 21 nt, synthetic construct
  source 1..21: mol_type = other RNA
ttctaatcccatgaaccctta

SEQ ID NO: 8198 - RNA, 21 nt, synthetic construct
  source 1..21: mol_type = other RNA
ttctatcatggttaagagctg

SEQ ID NO: 8199 - RNA, 21 nt, synthetic construct
  source 1..21: mol_type = other RNA
ttctattccacctcatctcaa

SEQ ID NO: 8200 - RNA, 21 nt, synthetic construct
  source 1..21: mol_type = other RNA
ttctcacataatccataacta

SEQ ID NO: 8201 - RNA, 21 nt, synthetic construct
  source 1..21: mol_type = other RNA
ttctcacgggctttttcagcc

SEQ ID NO: 8202 - RNA, 21 nt, synthetic construct
  source 1..21: mol_type = other RNA
ttctcattgagtgtgcaaagc

SEQ ID NO: 8203 - RNA, 21 nt, synthetic construct
  source 1..21: mol_type = other RNA
ttctccccagtctcagccgat

SEQ ID NO: 8204 - RNA, 21 nt, synthetic construct
  source 1..21: mol_type = other RNA
ttctccttgttttggagatgc

SEQ ID NO: 8205 - RNA, 21 nt, synthetic construct
  source 1..21: mol_type = other RNA
ttctctcttaccctgtccaca

SEQ ID NO: 8206 - RNA, 21 nt, synthetic construct
  source 1..21: mol_type = other RNA
ttctgaggcacatagtctggg

SEQ ID NO: 8207 - RNA, 21 nt, synthetic construct
  source 1..21: mol_type = other RNA
ttctgattcaaaagcccaggg

SEQ ID NO: 8208 - RNA, 21 nt, synthetic construct
  source 1..21: mol_type = other RNA
ttctgcttctggatccaccaa

SEQ ID NO: 8209 - RNA, 21 nt, synthetic construct
  source 1..21: mol_type = other RNA
ttctggatccaccaatccata

SEQ ID NO: 8210 - RNA, 21 nt, synthetic construct
  source 1..21: mol_type = other RNA
ttctggatcctgacattgggg

SEQ ID NO: 8211 - RNA, 21 nt, synthetic construct
  source 1..21: mol_type = other RNA
ttctggtgcagaggacaacga

SEQ ID NO: 8212 - RNA, 21 nt, synthetic construct
  source 1..21: mol_type = other RNA
ttctgtagaggctggggctgc

SEQ ID NO: 8213 - RNA, 21 nt, synthetic construct
  source 1..21: mol_type = other RNA
ttctgtggacagggtaagaga

SEQ ID NO: 8214 - RNA, 21 nt, synthetic construct
  source 1..21: mol_type = other RNA
ttctgttctctcttaccctgt

SEQ ID NO: 8215 - RNA, 21 nt, synthetic construct
  source 1..21: mol_type = other RNA
ttcttctaatcccatgaaccc

SEQ ID NO: 8216 - RNA, 21 nt, synthetic construct
  source 1..21: mol_type = other RNA
ttctttaaaggggttgtggca

SEQ ID NO: 8217 - RNA, 21 nt, synthetic construct
  source 1..21: mol_type = other RNA
ttgaacatgcccggagctgca

SEQ ID NO: 8218 - RNA, 21 nt, synthetic construct
  source 1..21: mol_type = other RNA
ttgaatcagaatacccaatat

SEQ ID NO: 8219 - RNA, 21 nt, synthetic construct
  source 1..21: mol_type = other RNA
ttgaattcttctaatcccatg

SEQ ID NO: 8220 - RNA, 21 nt, synthetic construct
  source 1..21: mol_type = other RNA
ttgacagactctgtctgaggg

SEQ ID NO: 8221 - RNA, 21 nt, synthetic construct
  source 1..21: mol_type = other RNA
ttgacccatgagttggagcca

SEQ ID NO: 8222 - RNA, 21 nt, synthetic construct
  source 1..21: mol_type = other RNA
ttgagatgaggtggaatagaa

SEQ ID NO: 8223 - RNA, 21 nt, synthetic construct
  source 1..21: mol_type = other RNA
ttgagtgtgcaaagcgtgagc

SEQ ID NO: 8224 - RNA, 21 nt, synthetic construct
  source 1..21: mol_type = other RNA
ttgataacccattagctgtgt

SEQ ID NO: 8225 - RNA, 21 nt, synthetic construct
  source 1..21: mol_type = other RNA
ttgatatgatggatattgggt

SEQ ID NO: 8226 - RNA, 21 nt, synthetic construct
  source 1..21: mol_type = other RNA
ttgatgaaacgcaggtaagtg

SEQ ID NO: 8227 - RNA, 21 nt, synthetic construct
  source 1..21: mol_type = other RNA
ttgcacactcaatgagaattg

SEQ ID NO: 8228 - RNA, 21 nt, synthetic construct
  source 1..21: mol_type = other RNA
ttgcattgatatgatggatat

SEQ ID NO: 8229 - RNA, 21 nt, synthetic construct
  source 1..21: mol_type = other RNA
ttgccatgggatttctgaggc

SEQ ID NO: 8230 - RNA, 21 nt, synthetic construct
  source 1..21: mol_type = other RNA
ttgccgaaaggaccatgtccg

SEQ ID NO: 8231 - RNA, 21 nt, synthetic construct
  source 1..21: mol_type = other RNA
ttgcctccttatcccactcat

SEQ ID NO: 8232 - RNA, 21 nt, synthetic construct
  source 1..21: mol_type = other RNA
ttgcgactttcaggaccagtc

SEQ ID NO: 8233 - RNA, 21 nt, synthetic construct
  source 1..21: mol_type = other RNA
ttgctcagattgggtggtaat

SEQ ID NO: 8234 - RNA, 21 nt, synthetic construct
  source 1..21: mol_type = other RNA
ttggaaatagccagagtttta

SEQ ID NO: 8235 - RNA, 21 nt, synthetic construct
  source 1..21: mol_type = other RNA
ttggacacaagcagttctatc

SEQ ID NO: 8236 - RNA, 21 nt, synthetic construct
  source 1..21: mol_type = other RNA
ttggagatgcagggcatgaag

SEQ ID NO: 8237 - RNA, 21 nt, synthetic construct
  source 1..21: mol_type = other RNA
ttggagccacggccactcccc

SEQ ID NO: 8238 - RNA, 21 nt, synthetic construct
  source 1..21: mol_type = other RNA
ttggataaggactaactggat

SEQ ID NO: 8239 - RNA, 21 nt, synthetic construct
  source 1..21: mol_type = other RNA
ttggatacctatacagatcca

SEQ ID NO: 8240 - RNA, 21 nt, synthetic construct
  source 1..21: mol_type = other RNA
ttggattgctcagattgggtg

SEQ ID NO: 8241 - RNA, 21 nt, synthetic construct
  source 1..21: mol_type = other RNA
ttggcactagtccagggtgtg

SEQ ID NO: 8242 - RNA, 21 nt, synthetic construct
  source 1..21: mol_type = other RNA
ttggctcattcatgctcttat

SEQ ID NO: 8243 - RNA, 21 nt, synthetic construct
  source 1..21: mol_type = other RNA
ttggctctttgggaagccaaa

SEQ ID NO: 8244 - RNA, 21 nt, synthetic construct
  source 1..21: mol_type = other RNA
ttggctggtaaagtgtatgga

SEQ ID NO: 8245 - RNA, 21 nt, synthetic construct
  source 1..21: mol_type = other RNA
ttggcttcccaaagagccaag

SEQ ID NO: 8246 - RNA, 21 nt, synthetic construct
  source 1..21: mol_type = other RNA
ttggcttggatacctatacag

SEQ ID NO: 8247 - RNA, 21 nt, synthetic construct
  source 1..21: mol_type = other RNA
ttgggaagccaaaatggctga

SEQ ID NO: 8248 - RNA, 21 nt, synthetic construct
  source 1..21: mol_type = other RNA
ttgggattctttaaaggggtt

SEQ ID NO: 8249 - RNA, 21 nt, synthetic construct
  source 1..21: mol_type = other RNA
ttgggccgtctcatgtatgga

SEQ ID NO: 8250 - RNA, 21 nt, synthetic construct
  source 1..21: mol_type = other RNA
ttgggggagtggccgtggctc

SEQ ID NO: 8251 - RNA, 21 nt, synthetic construct
  source 1..21: mol_type = other RNA
ttgggtattctgattcaaaag

SEQ ID NO: 8252 - RNA, 21 nt, synthetic construct
  source 1..21: mol_type = other RNA
ttgggtggtaatctagaggtg

SEQ ID NO: 8253 - RNA, 21 nt, synthetic construct
  source 1..21: mol_type = other RNA
ttggtctaatggtacaactgc

SEQ ID NO: 8254 - RNA, 21 nt, synthetic construct
  source 1..21: mol_type = other RNA
ttggtggatccagaagcagaa

SEQ ID NO: 8255 - RNA, 21 nt, synthetic construct
  source 1..21: mol_type = other RNA
ttggtttccataacctaagta

SEQ ID NO: 8256 - RNA, 21 nt, synthetic construct
  source 1..21: mol_type = other RNA
ttgtaaggccctgtgacccga

SEQ ID NO: 8257 - RNA, 21 nt, synthetic construct
  source 1..21: mol_type = other RNA
ttgtaccattagaccaaatgt

SEQ ID NO: 8258 - RNA, 21 nt, synthetic construct
  source 1..21: mol_type = other RNA
ttgtccactgataggtttcca

SEQ ID NO: 8259 - RNA, 21 nt, synthetic construct
  source 1..21: mol_type = other RNA
ttgtcctctgcaccagaagcc

SEQ ID NO: 8260 - RNA, 21 nt, synthetic construct
  source 1..21: mol_type = other RNA
ttgtggcatgcagctcacgct

SEQ ID NO: 8261 - RNA, 21 nt, synthetic construct
  source 1..21: mol_type = other RNA
ttgtgtaagcctccttggaca

SEQ ID NO: 8262 - RNA, 21 nt, synthetic construct
  source 1..21: mol_type = other RNA
ttgtgtccaaggaggcttaca

SEQ ID NO: 8263 - RNA, 21 nt, synthetic construct
  source 1..21: mol_type = other RNA
ttgttttggagatgcagggca

SEQ ID NO: 8264 - RNA, 21 nt, synthetic construct
  source 1..21: mol_type = other RNA
tttaaagaatcccaataggaa

SEQ ID NO: 8265 - RNA, 21 nt, synthetic construct
  source 1..21: mol_type = other RNA
tttaaaggggttgtggcatgc

SEQ ID NO: 8266 - RNA, 21 nt, synthetic construct
  source 1..21: mol_type = other RNA
tttaccagcataagagcatga

SEQ ID NO: 8267 - RNA, 21 nt, synthetic construct
  source 1..21: mol_type = other RNA
tttaccagccaaggtttggaa

SEQ ID NO: 8268 - RNA, 21 nt, synthetic construct
  source 1..21: mol_type = other RNA
tttagatgtaaaactctggct

SEQ ID NO: 8269 - RNA, 21 nt, synthetic construct
  source 1..21: mol_type = other RNA
tttatagtccatgtttggatt

SEQ ID NO: 8270 - RNA, 21 nt, synthetic construct
  source 1..21: mol_type = other RNA
tttcaagtgaggtaaccaaca

SEQ ID NO: 8271 - RNA, 21 nt, synthetic construct
  source 1..21: mol_type = other RNA
tttcacactcttcctctttct

SEQ ID NO: 8272 - RNA, 21 nt, synthetic construct
  source 1..21: mol_type = other RNA
tttcacttttttgccatggga

SEQ ID NO: 8273 - RNA, 21 nt, synthetic construct
  source 1..21: mol_type = other RNA
tttcagcagttgtaccattag

SEQ ID NO: 8274 - RNA, 21 nt, synthetic construct
  source 1..21: mol_type = other RNA
tttcagccattttggcttccc

SEQ ID NO: 8275 - RNA, 21 nt, synthetic construct
  source 1..21: mol_type = other RNA
tttcaggaccagtcatgcagc

SEQ ID NO: 8276 - RNA, 21 nt, synthetic construct
  source 1..21: mol_type = other RNA
tttcatcaagtctcttgccga

SEQ ID NO: 8277 - RNA, 21 nt, synthetic construct
  source 1..21: mol_type = other RNA
tttcatgtggctcagcaggct

SEQ ID NO: 8278 - RNA, 21 nt, synthetic construct
  source 1..21: mol_type = other RNA
tttccaaaccttggctggtaa

SEQ ID NO: 8279 - RNA, 21 nt, synthetic construct
  source 1..21: mol_type = other RNA
tttccattgcattgatatgat

SEQ ID NO: 8280 - RNA, 21 nt, synthetic construct
  source 1..21: mol_type = other RNA
tttcccacacagctaatgggt

SEQ ID NO: 8281 - RNA, 21 nt, synthetic construct
  source 1..21: mol_type = other RNA
tttccctacatgatgtacatt

SEQ ID NO: 8282 - RNA, 21 nt, synthetic construct
  source 1..21: mol_type = other RNA
tttcctgaccattagcatcac

SEQ ID NO: 8283 - RNA, 21 nt, synthetic construct
  source 1..21: mol_type = other RNA
tttcggcaagagacttgatga

SEQ ID NO: 8284 - RNA, 21 nt, synthetic construct
  source 1..21: mol_type = other RNA
tttctcacgggctttttcagc

SEQ ID NO: 8285 - RNA, 21 nt, synthetic construct
  source 1..21: mol_type = other RNA
tttctgaggcacatagtctgg

SEQ ID NO: 8286 - RNA, 21 nt, synthetic construct
  source 1..21: mol_type = other RNA
tttctggatcctgacattggg

SEQ ID NO: 8287 - RNA, 21 nt, synthetic construct
  source 1..21: mol_type = other RNA
tttctgttctctcttaccctg

SEQ ID NO: 8288 - RNA, 21 nt, synthetic construct
  source 1..21: mol_type = other RNA
tttgaatcagaatacccaata

SEQ ID NO: 8289 - RNA, 21 nt, synthetic construct
  source 1..21: mol_type = other RNA
tttgaattcttctaatcccat

SEQ ID NO: 8290 - RNA, 21 nt, synthetic construct
  source 1..21: mol_type = other RNA
tttgataacccattagctgtg

SEQ ID NO: 8291 - RNA, 21 nt, synthetic construct
  source 1..21: mol_type = other RNA
tttgcacactcaatgagaatt

SEQ ID NO: 8292 - RNA, 21 nt, synthetic construct
  source 1..21: mol_type = other RNA
tttgccatgggatttctgagg

SEQ ID NO: 8293 - RNA, 21 nt, synthetic construct
  source 1..21: mol_type = other RNA
tttgcgactttcaggaccagt

SEQ ID NO: 8294 - RNA, 21 nt, synthetic construct
  source 1..21: mol_type = other RNA
tttggaaatagccagagtttt

SEQ ID NO: 8295 - RNA, 21 nt, synthetic construct
  source 1..21: mol_type = other RNA
tttggagatgcagggcatgaa

SEQ ID NO: 8296 - RNA, 21 nt, synthetic construct
  source 1..21: mol_type = other RNA
tttggataaggactaactgga

SEQ ID NO: 8297 - RNA, 21 nt, synthetic construct
  source 1..21: mol_type = other RNA
tttggattgctcagattgggt

SEQ ID NO: 8298 - RNA, 21 nt, synthetic construct
  source 1..21: mol_type = other RNA
tttggctcattcatgctctta

SEQ ID NO: 8299 - RNA, 21 nt, synthetic construct
  source 1..21: mol_type = other RNA
tttggcttcccaaagagccaa

SEQ ID NO: 8300 - RNA, 21 nt, synthetic construct
  source 1..21: mol_type = other RNA
tttgggaagccaaaatggctg

SEQ ID NO: 8301 - RNA, 21 nt, synthetic construct
  source 1..21: mol_type = other RNA
tttggtctaatggtacaactg

SEQ ID NO: 8302 - RNA, 21 nt, synthetic construct
  source 1..21: mol_type = other RNA
tttggtttccataacctaagt

SEQ ID NO: 8303 - RNA, 21 nt, synthetic construct
  source 1..21: mol_type = other RNA
tttgtgtaagcctccttggac

SEQ ID NO: 8304 - RNA, 21 nt, synthetic construct
  source 1..21: mol_type = other RNA
ttttaccagcataagagcatg

SEQ ID NO: 8305 - RNA, 21 nt, synthetic construct
  source 1..21: mol_type = other RNA
ttttatagtccatgtttggat

SEQ ID NO: 8306 - RNA, 21 nt, synthetic construct
  source 1..21: mol_type = other RNA
ttttcaagtgaggtaaccaac

SEQ ID NO: 8307 - RNA, 21 nt, synthetic construct
  source 1..21: mol_type = other RNA
ttttcacactcttcctctttc

SEQ ID NO: 8308 - RNA, 21 nt, synthetic construct
  source 1..21: mol_type = other RNA
ttttcagccattttggcttcc

SEQ ID NO: 8309 - RNA, 21 nt, synthetic construct
  source 1..21: mol_type = other RNA
ttttcctgaccattagcatca

SEQ ID NO: 8310 - RNA, 21 nt, synthetic construct
  source 1..21: mol_type = other RNA
ttttgaatcagaatacccaat

SEQ ID NO: 8311 - RNA, 21 nt, synthetic construct
  source 1..21: mol_type = other RNA
ttttgccatgggatttctgag

SEQ ID NO: 8312 - RNA, 21 nt, synthetic construct
  source 1..21: mol_type = other RNA
ttttgcgactttcaggaccag

SEQ ID NO: 8313 - RNA, 21 nt, synthetic construct
  source 1..21: mol_type = other RNA
ttttggagatgcagggcatga

SEQ ID NO: 8314 - RNA, 21 nt, synthetic construct
  source 1..21: mol_type = other RNA
ttttggctcattcatgctctt

SEQ ID NO: 8315 - RNA, 21 nt, synthetic construct
  source 1..21: mol_type = other RNA
ttttggcttcccaaagagcca

SEQ ID NO: 8316 - RNA, 21 nt, synthetic construct
  source 1..21: mol_type = other RNA
ttttggtttccataacctaag

SEQ ID NO: 8317 - RNA, 21 nt, synthetic construct
  source 1..21: mol_type = other RNA
tttttatagtccatgtttgga

SEQ ID NO: 8318 - RNA, 21 nt, synthetic construct
  source 1..21: mol_type = other RNA
tttttcagccattttggcttc

SEQ ID NO: 8319 - RNA, 21 nt, synthetic construct
  source 1..21: mol_type = other RNA
tttttgccatgggatttctga

SEQ ID NO: 8320 - RNA, 21 nt, synthetic construct
  source 1..21: mol_type = other RNA
ttttttgccatgggatttctg

SEQ ID NO: 8321 - RNA, 22 nt, synthetic construct
  source 1..22: mol_type = other RNA
aaaaaagtgaaacgggagcctg

SEQ ID NO: 8322 - RNA, 22 nt, synthetic construct
  source 1..22: mol_type = other RNA
aaaaagcccgtgagaaagagga

SEQ ID NO: 8323 - RNA, 22 nt, synthetic construct
  source 1..22: mol_type = other RNA
aaaaagtgaaacgggagcctgc

SEQ ID NO: 8324 - RNA, 22 nt, synthetic construct
  source 1..22: mol_type = other RNA
aaaaatggtgaacatcattcac

SEQ ID NO: 8325 - RNA, 22 nt, synthetic construct
  source 1..22: mol_type = other RNA
aaaacaaggagaatgacatgct

SEQ ID NO: 8326 - RNA, 22 nt, synthetic construct
  source 1..22: mol_type = other RNA
aaaacatggcttggctctttgg

SEQ ID NO: 8327 - RNA, 22 nt, synthetic construct
  source 1..22: mol_type = other RNA
aaaactctggctatttccaaac

SEQ ID NO: 8328 - RNA, 22 nt, synthetic construct
  source 1..22: mol_type = other RNA
aaaagacgagggagatcctggt

SEQ ID NO: 8329 - RNA, 22 nt, synthetic construct
  source 1..22: mol_type = other RNA
aaaagcagccattggcactagt

SEQ ID NO: 8330 - RNA, 22 nt, synthetic construct
  source 1..22: mol_type = other RNA
aaaagcccagggtaagggttca

SEQ ID NO: 8331 - RNA, 22 nt, synthetic construct
  source 1..22: mol_type = other RNA
aaaagcccgtgagaaagaggaa

SEQ ID NO: 8332 - RNA, 22 nt, synthetic construct
  source 1..22: mol_type = other RNA
aaaagggggtgatatcatatat

SEQ ID NO: 8333 - RNA, 22 nt, synthetic construct
  source 1..22: mol_type = other RNA
aaaagtatggcccagactatgt

SEQ ID NO: 8334 - RNA, 22 nt, synthetic construct
  source 1..22: mol_type = other RNA
aaaagtgaaacgggagcctgct

SEQ ID NO: 8335 - RNA, 22 nt, synthetic construct
  source 1..22: mol_type = other RNA
aaaagttctgtggacagggtaa

SEQ ID NO: 8336 - RNA, 22 nt, synthetic construct
  source 1..22: mol_type = other RNA
aaaatatgcagggagatggttt

SEQ ID NO: 8337 - RNA, 22 nt, synthetic construct
  source 1..22: mol_type = other RNA
aaaatggctgaaaaagcccgtg

SEQ ID NO: 8338 - RNA, 22 nt, synthetic construct
  source 1..22: mol_type = other RNA
aaaatggtgaacatcattcacc

SEQ ID NO: 8339 - RNA, 22 nt, synthetic construct
  source 1..22: mol_type = other RNA
aaacaaggagaatgacatgctt

SEQ ID NO: 8340 - RNA, 22 nt, synthetic construct
  source 1..22: mol_type = other RNA
aaacatggactataaaaatggt

SEQ ID NO: 8341 - RNA, 22 nt, synthetic construct
  source 1..22: mol_type = other RNA
aaacatggcttggctctttggg

SEQ ID NO: 8342 - RNA, 22 nt, synthetic construct
  source 1..22: mol_type = other RNA
aaaccaaaatatgcagggagat

SEQ ID NO: 8343 - RNA, 22 nt, synthetic construct
  source 1..22: mol_type = other RNA
aaaccatctccctgcatatttt

SEQ ID NO: 8344 - RNA, 22 nt, synthetic construct
  source 1..22: mol_type = other RNA
aaacctatcagtggacaactgc

SEQ ID NO: 8345 - RNA, 22 nt, synthetic construct
  source 1..22: mol_type = other RNA
aaaccttggctggtaaagtgta

SEQ ID NO: 8346 - RNA, 22 nt, synthetic construct
  source 1..22: mol_type = other RNA
aaacgcaggtaagtgggctctg

SEQ ID NO: 8347 - RNA, 22 nt, synthetic construct
  source 1..22: mol_type = other RNA
aaacgggagcctgctgagccac

SEQ ID NO: 8348 - RNA, 22 nt, synthetic construct
  source 1..22: mol_type = other RNA
aaactctggctatttccaaacc

SEQ ID NO: 8349 - RNA, 22 nt, synthetic construct
  source 1..22: mol_type = other RNA
aaactcttcacacacttcagat

SEQ ID NO: 8350 - RNA, 22 nt, synthetic construct
  source 1..22: mol_type = other RNA
aaacttcagagcccacttacct

SEQ ID NO: 8351 - RNA, 22 nt, synthetic construct
  source 1..22: mol_type = other RNA
aaagaatcccaataggaatcac

SEQ ID NO: 8352 - RNA, 22 nt, synthetic construct
  source 1..22: mol_type = other RNA
aaagacgagggagatcctggtg

SEQ ID NO: 8353 - RNA, 22 nt, synthetic construct
  source 1..22: mol_type = other RNA
aaagagccaagccatgttttgg

SEQ ID NO: 8354 - RNA, 22 nt, synthetic construct
  source 1..22: mol_type = other RNA
aaagaggaagagtgtgaaaagt

SEQ ID NO: 8355 - RNA, 22 nt, synthetic construct
  source 1..22: mol_type = other RNA
aaagatacctgtttctgttctc

SEQ ID NO: 8356 - RNA, 22 nt, synthetic construct
  source 1..22: mol_type = other RNA
aaagatgcttccagctcttaac

SEQ ID NO: 8357 - RNA, 22 nt, synthetic construct
  source 1..22: mol_type = other RNA
aaagcagccattggcactagtc

SEQ ID NO: 8358 - RNA, 22 nt, synthetic construct
  source 1..22: mol_type = other RNA
aaagcatgtcattctccttgtt

SEQ ID NO: 8359 - RNA, 22 nt, synthetic construct
  source 1..22: mol_type = other RNA
aaagcccagggtaagggttcat

SEQ ID NO: 8360 - RNA, 22 nt, synthetic construct
  source 1..22: mol_type = other RNA
aaagcccgtgagaaagaggaag

SEQ ID NO: 8361 - RNA, 22 nt, synthetic construct
  source 1..22: mol_type = other RNA
aaagcgtgagctgcatgccaca

SEQ ID NO: 8362 - RNA, 22 nt, synthetic construct
  source 1..22: mol_type = other RNA
aaagctctgctcgctgtctgac

SEQ ID NO: 8363 - RNA, 22 nt, synthetic construct
  source 1..22: mol_type = other RNA
aaaggaccatgtccgtgaccac

SEQ ID NO: 8364 - RNA, 22 nt, synthetic construct
  source 1..22: mol_type = other RNA
aaagggggtgatatcatatata

SEQ ID NO: 8365 - RNA, 22 nt, synthetic construct
  source 1..22: mol_type = other RNA
aaaggggttgtggcatgcagct

SEQ ID NO: 8366 - RNA, 22 nt, synthetic construct
  source 1..22: mol_type = other RNA
aaagtatggcccagactatgtg

SEQ ID NO: 8367 - RNA, 22 nt, synthetic construct
  source 1..22: mol_type = other RNA
aaagtcgcaaaagttctgtgga

SEQ ID NO: 8368 - RNA, 22 nt, synthetic construct
  source 1..22: mol_type = other RNA
aaagtgaaacgggagcctgctg

SEQ ID NO: 8369 - RNA, 22 nt, synthetic construct
  source 1..22: mol_type = other RNA
aaagtgtatggatgggtggtag

SEQ ID NO: 8370 - RNA, 22 nt, synthetic construct
  source 1..22: mol_type = other RNA
aaagttctgtggacagggtaag

SEQ ID NO: 8371 - RNA, 22 nt, synthetic construct
  source 1..22: mol_type = other RNA
aaatacttaggttatggaaacc

SEQ ID NO: 8372 - RNA, 22 nt, synthetic construct
  source 1..22: mol_type = other RNA
aaatagccagagttttacatct

SEQ ID NO: 8373 - RNA, 22 nt, synthetic construct
  source 1..22: mol_type = other RNA
aaatatgaacctgcagcttgag

SEQ ID NO: 8374 - RNA, 22 nt, synthetic construct
  source 1..22: mol_type = other RNA
aaatatgcagggagatggtttc

SEQ ID NO: 8375 - RNA, 22 nt, synthetic construct
  source 1..22: mol_type = other RNA
aaatcccatggcaaaaaagtga

SEQ ID NO: 8376 - RNA, 22 nt, synthetic construct
  source 1..22: mol_type = other RNA
aaatggctgaaaaagcccgtga

SEQ ID NO: 8377 - RNA, 22 nt, synthetic construct
  source 1..22: mol_type = other RNA
aaatggtgaacatcattcacct

SEQ ID NO: 8378 - RNA, 22 nt, synthetic construct
  source 1..22: mol_type = other RNA
aaatgtacatcatgtagggaaa

SEQ ID NO: 8379 - RNA, 22 nt, synthetic construct
  source 1..22: mol_type = other RNA
aaattaagtgatgctaatggtc

SEQ ID NO: 8380 - RNA, 22 nt, synthetic construct
  source 1..22: mol_type = other RNA
aaattgcctccttatcccactc

SEQ ID NO: 8381 - RNA, 22 nt, synthetic construct
  source 1..22: mol_type = other RNA
aacaaaagggggtgatatcata

SEQ ID NO: 8382 - RNA, 22 nt, synthetic construct
  source 1..22: mol_type = other RNA
aacaaggagaatgacatgcttt

SEQ ID NO: 8383 - RNA, 22 nt, synthetic construct
  source 1..22: mol_type = other RNA
aacagatatatatgatatcacc

SEQ ID NO: 8384 - RNA, 22 nt, synthetic construct
  source 1..22: mol_type = other RNA
aacagctctcttcatgccctgc

SEQ ID NO: 8385 - RNA, 22 nt, synthetic construct
  source 1..22: mol_type = other RNA
aacatcattcaccttctcacat

SEQ ID NO: 8386 - RNA, 22 nt, synthetic construct
  source 1..22: mol_type = other RNA
aacatgcccggagctgcactgt

SEQ ID NO: 8387 - RNA, 22 nt, synthetic construct
  source 1..22: mol_type = other RNA
aacatggactataaaaatggtg

SEQ ID NO: 8388 - RNA, 22 nt, synthetic construct
  source 1..22: mol_type = other RNA
aacatggcttggctctttggga

SEQ ID NO: 8389 - RNA, 22 nt, synthetic construct
  source 1..22: mol_type = other RNA
aaccaaaatatgcagggagatg

SEQ ID NO: 8390 - RNA, 22 nt, synthetic construct
  source 1..22: mol_type = other RNA
aaccaacaaaagggggtgatat

SEQ ID NO: 8391 - RNA, 22 nt, synthetic construct
  source 1..22: mol_type = other RNA
aaccatctccctgcatattttg

SEQ ID NO: 8392 - RNA, 22 nt, synthetic construct
  source 1..22: mol_type = other RNA
aaccatgatagaactgcttgtg

SEQ ID NO: 8393 - RNA, 22 nt, synthetic construct
  source 1..22: mol_type = other RNA
aacccagatatggggagcagtt

SEQ ID NO: 8394 - RNA, 22 nt, synthetic construct
  source 1..22: mol_type = other RNA
aacccattagctgtgtgggaaa

SEQ ID NO: 8395 - RNA, 22 nt, synthetic construct
  source 1..22: mol_type = other RNA
aacccctttaaagaatcccaat

SEQ ID NO: 8396 - RNA, 22 nt, synthetic construct
  source 1..22: mol_type = other RNA
aacccttaccctgggcttttga

SEQ ID NO: 8397 - RNA, 22 nt, synthetic construct
  source 1..22: mol_type = other RNA
aacctatcagtggacaactgct

SEQ ID NO: 8398 - RNA, 22 nt, synthetic construct
  source 1..22: mol_type = other RNA
aacctgcagcttgagatgaggt

SEQ ID NO: 8399 - RNA, 22 nt, synthetic construct
  source 1..22: mol_type = other RNA
aaccttggctggtaaagtgtat

SEQ ID NO: 8400 - RNA, 22 nt, synthetic construct
  source 1..22: mol_type = other RNA
aacgatgaggtctggtcagaca

SEQ ID NO: 8401 - RNA, 22 nt, synthetic construct
  source 1..22: mol_type = other RNA
aacgcaggtaagtgggctctga

SEQ ID NO: 8402 - RNA, 22 nt, synthetic construct
  source 1..22: mol_type = other RNA
aacgggagcctgctgagccaca

SEQ ID NO: 8403 - RNA, 22 nt, synthetic construct
  source 1..22: mol_type = other RNA
aactacagtgcagctccgggca

SEQ ID NO: 8404 - RNA, 22 nt, synthetic construct
  source 1..22: mol_type = other RNA
aactacatctccatatgccttc

SEQ ID NO: 8405 - RNA, 22 nt, synthetic construct
  source 1..22: mol_type = other RNA
aactcatgggtcaattctcatt

SEQ ID NO: 8406 - RNA, 22 nt, synthetic construct
  source 1..22: mol_type = other RNA
aactctggctatttccaaacct

SEQ ID NO: 8407 - RNA, 22 nt, synthetic construct
  source 1..22: mol_type = other RNA
aactcttattctgcttctggat

SEQ ID NO: 8408 - RNA, 22 nt, synthetic construct
  source 1..22: mol_type = other RNA
aactcttcacacacttcagata

SEQ ID NO: 8409 - RNA, 22 nt, synthetic construct
  source 1..22: mol_type = other RNA
aactgctccccatatctgggtt

SEQ ID NO: 8410 - RNA, 22 nt, synthetic construct
  source 1..22: mol_type = other RNA
aactgctgaaaccatctccctg

SEQ ID NO: 8411 - RNA, 22 nt, synthetic construct
  source 1..22: mol_type = other RNA
aactgcttgtgtccaaggaggc

SEQ ID NO: 8412 - RNA, 22 nt, synthetic construct
  source 1..22: mol_type = other RNA
aactggattgggccgtctcatg

SEQ ID NO: 8413 - RNA, 22 nt, synthetic construct
  source 1..22: mol_type = other RNA
aacttcagagcccacttacctg

SEQ ID NO: 8414 - RNA, 22 nt, synthetic construct
  source 1..22: mol_type = other RNA
aacttctattccacctcatctc

SEQ ID NO: 8415 - RNA, 22 nt, synthetic construct
  source 1..22: mol_type = other RNA
aacttttgcgactttcaggacc

SEQ ID NO: 8416 - RNA, 22 nt, synthetic construct
  source 1..22: mol_type = other RNA
aagaatcccaataggaatcacc

SEQ ID NO: 8417 - RNA, 22 nt, synthetic construct
  source 1..22: mol_type = other RNA
aagaattcaaatatgaacctgc

SEQ ID NO: 8418 - RNA, 22 nt, synthetic construct
  source 1..22: mol_type = other RNA
aagaccctctgtctaagctcag

SEQ ID NO: 8419 - RNA, 22 nt, synthetic construct
  source 1..22: mol_type = other RNA
aagacgagggagatcctggtgg

SEQ ID NO: 8420 - RNA, 22 nt, synthetic construct
  source 1..22: mol_type = other RNA
aagagacttgatgaaacgcagg

SEQ ID NO: 8421 - RNA, 22 nt, synthetic construct
  source 1..22: mol_type = other RNA
aagagagctgttgaacatgccc

SEQ ID NO: 8422 - RNA, 22 nt, synthetic construct
  source 1..22: mol_type = other RNA
aagagcatgaatgagccaaaac

SEQ ID NO: 8423 - RNA, 22 nt, synthetic construct
  source 1..22: mol_type = other RNA
aagagccaagccatgttttggc

SEQ ID NO: 8424 - RNA, 22 nt, synthetic construct
  source 1..22: mol_type = other RNA
aagagctggaagcatctttgat

SEQ ID NO: 8425 - RNA, 22 nt, synthetic construct
  source 1..22: mol_type = other RNA
aagaggaagagtgtgaaaagta

SEQ ID NO: 8426 - RNA, 22 nt, synthetic construct
  source 1..22: mol_type = other RNA
aagagtgtgaaaagtatggccc

SEQ ID NO: 8427 - RNA, 22 nt, synthetic construct
  source 1..22: mol_type = other RNA
aagagttgacagactctgtctg

SEQ ID NO: 8428 - RNA, 22 nt, synthetic construct
  source 1..22: mol_type = other RNA
aagagtttggataaggactaac

SEQ ID NO: 8429 - RNA, 22 nt, synthetic construct
  source 1..22: mol_type = other RNA
aagatacctgtttctgttctct

SEQ ID NO: 8430 - RNA, 22 nt, synthetic construct
  source 1..22: mol_type = other RNA
aagatgcttccagctcttaacc

SEQ ID NO: 8431 - RNA, 22 nt, synthetic construct
  source 1..22: mol_type = other RNA
aagcaccagccctatgaacttc

SEQ ID NO: 8432 - RNA, 22 nt, synthetic construct
  source 1..22: mol_type = other RNA
aagcagaataagagttgacaga

SEQ ID NO: 8433 - RNA, 22 nt, synthetic construct
  source 1..22: mol_type = other RNA
aagcagccaccacagccccagc

SEQ ID NO: 8434 - RNA, 22 nt, synthetic construct
  source 1..22: mol_type = other RNA
aagcagccattggcactagtcc

SEQ ID NO: 8435 - RNA, 22 nt, synthetic construct
  source 1..22: mol_type = other RNA
aagcagttctatcatggttaag

SEQ ID NO: 8436 - RNA, 22 nt, synthetic construct
  source 1..22: mol_type = other RNA
aagcatctttgataacccatta

SEQ ID NO: 8437 - RNA, 22 nt, synthetic construct
  source 1..22: mol_type = other RNA
aagcatgtcattctccttgttt

SEQ ID NO: 8438 - RNA, 22 nt, synthetic construct
  source 1..22: mol_type = other RNA
aagccaaaatggctgaaaaagc

SEQ ID NO: 8439 - RNA, 22 nt, synthetic construct
  source 1..22: mol_type = other RNA
aagccaagaccctctgtctaag

SEQ ID NO: 8440 - RNA, 22 nt, synthetic construct
  source 1..22: mol_type = other RNA
aagccacaccctggactagtgc

SEQ ID NO: 8441 - RNA, 22 nt, synthetic construct
  source 1..22: mol_type = other RNA
aagccatgttttggctcattca

SEQ ID NO: 8442 - RNA, 22 nt, synthetic construct
  source 1..22: mol_type = other RNA
aagcccagggtaagggttcatg

SEQ ID NO: 8443 - RNA, 22 nt, synthetic construct
  source 1..22: mol_type = other RNA
aagcccgtgagaaagaggaaga

SEQ ID NO: 8444 - RNA, 22 nt, synthetic construct
  source 1..22: mol_type = other RNA
aagcctccttggacacaagcag

SEQ ID NO: 8445 - RNA, 22 nt, synthetic construct
  source 1..22: mol_type = other RNA
aagcgtgagctgcatgccacaa

SEQ ID NO: 8446 - RNA, 22 nt, synthetic construct
  source 1..22: mol_type = other RNA
aagctcagtctaccacccatcc

SEQ ID NO: 8447 - RNA, 22 nt, synthetic construct
  source 1..22: mol_type = other RNA
aagctctgctcgctgtctgacc

SEQ ID NO: 8448 - RNA, 22 nt, synthetic construct
  source 1..22: mol_type = other RNA
aagctgcaggttcatatttgaa

SEQ ID NO: 8449 - RNA, 22 nt, synthetic construct
  source 1..22: mol_type = other RNA
aaggaccatgtccgtgaccaca

SEQ ID NO: 8450 - RNA, 22 nt, synthetic construct
  source 1..22: mol_type = other RNA
aaggactaactggattgggccg

SEQ ID NO: 8451 - RNA, 22 nt, synthetic construct
  source 1..22: mol_type = other RNA
aaggagaatgacatgctttccc

SEQ ID NO: 8452 - RNA, 22 nt, synthetic construct
  source 1..22: mol_type = other RNA
aaggaggcaatttccctacatg

SEQ ID NO: 8453 - RNA, 22 nt, synthetic construct
  source 1..22: mol_type = other RNA
aaggaggcttacacaaattaag

SEQ ID NO: 8454 - RNA, 22 nt, synthetic construct
  source 1..22: mol_type = other RNA
aaggcatatggagatgtagtta

SEQ ID NO: 8455 - RNA, 22 nt, synthetic construct
  source 1..22: mol_type = other RNA
aaggccctgtgacccgagtgaa

SEQ ID NO: 8456 - RNA, 22 nt, synthetic construct
  source 1..22: mol_type = other RNA
aagggggtgatatcatatatat

SEQ ID NO: 8457 - RNA, 22 nt, synthetic construct
  source 1..22: mol_type = other RNA
aaggggttgtggcatgcagctc

SEQ ID NO: 8458 - RNA, 22 nt, synthetic construct
  source 1..22: mol_type = other RNA
aagggttcatgggattagaaga

SEQ ID NO: 8459 - RNA, 22 nt, synthetic construct
  source 1..22: mol_type = other RNA
aaggtgaatgatgttcaccatt

SEQ ID NO: 8460 - RNA, 22 nt, synthetic construct
  source 1..22: mol_type = other RNA
aaggtttggaaatagccagagt

SEQ ID NO: 8461 - RNA, 22 nt, synthetic construct
  source 1..22: mol_type = other RNA
aagtatggcccagactatgtgc

SEQ ID NO: 8462 - RNA, 22 nt, synthetic construct
  source 1..22: mol_type = other RNA
aagtcgcaaaagttctgtggac

SEQ ID NO: 8463 - RNA, 22 nt, synthetic construct
  source 1..22: mol_type = other RNA
aagtctcttgccgaaaggacca

SEQ ID NO: 8464 - RNA, 22 nt, synthetic construct
  source 1..22: mol_type = other RNA
aagtgaaacgggagcctgctga

SEQ ID NO: 8465 - RNA, 22 nt, synthetic construct
  source 1..22: mol_type = other RNA
aagtgaggtaaccaacaaaagg

SEQ ID NO: 8466 - RNA, 22 nt, synthetic construct
  source 1..22: mol_type = other RNA
aagtgatgctaatggtcaggaa

SEQ ID NO: 8467 - RNA, 22 nt, synthetic construct
  source 1..22: mol_type = other RNA
aagtggccatccatctcatgag

SEQ ID NO: 8468 - RNA, 22 nt, synthetic construct
  source 1..22: mol_type = other RNA
aagtgggctctgaagtttcatg

SEQ ID NO: 8469 - RNA, 22 nt, synthetic construct
  source 1..22: mol_type = other RNA
aagtgtatggatgggtggtaga

SEQ ID NO: 8470 - RNA, 22 nt, synthetic construct
  source 1..22: mol_type = other RNA
aagtgtgtgaagagtttggata

SEQ ID NO: 8471 - RNA, 22 nt, synthetic construct
  source 1..22: mol_type = other RNA
aagttcatagggctggtgcttc

SEQ ID NO: 8472 - RNA, 22 nt, synthetic construct
  source 1..22: mol_type = other RNA
aagttctgtggacagggtaaga

SEQ ID NO: 8473 - RNA, 22 nt, synthetic construct
  source 1..22: mol_type = other RNA
aagtttcatgtggctcagcagg

SEQ ID NO: 8474 - RNA, 22 nt, synthetic construct
  source 1..22: mol_type = other RNA
aataagagttgacagactctgt

SEQ ID NO: 8475 - RNA, 22 nt, synthetic construct
  source 1..22: mol_type = other RNA
aatacccaatatccatcatatc

SEQ ID NO: 8476 - RNA, 22 nt, synthetic construct
  source 1..22: mol_type = other RNA
aatacttaggttatggaaacca

SEQ ID NO: 8477 - RNA, 22 nt, synthetic construct
  source 1..22: mol_type = other RNA
aatagaagttcatagggctggt

SEQ ID NO: 8478 - RNA, 22 nt, synthetic construct
  source 1..22: mol_type = other RNA
aatagccagagttttacatcta

SEQ ID NO: 8479 - RNA, 22 nt, synthetic construct
  source 1..22: mol_type = other RNA
aataggaacccagatatgggga

SEQ ID NO: 8480 - RNA, 22 nt, synthetic construct
  source 1..22: mol_type = other RNA
aataggaatcaccccaccagga

SEQ ID NO: 8481 - RNA, 22 nt, synthetic construct
  source 1..22: mol_type = other RNA
aatatccatcatatcaatgcaa

SEQ ID NO: 8482 - RNA, 22 nt, synthetic construct
  source 1..22: mol_type = other RNA
aatatgaacctgcagcttgaga

SEQ ID NO: 8483 - RNA, 22 nt, synthetic construct
  source 1..22: mol_type = other RNA
aatatgcagggagatggtttca

SEQ ID NO: 8484 - RNA, 22 nt, synthetic construct
  source 1..22: mol_type = other RNA
aatcaccccaccaggatctccc

SEQ ID NO: 8485 - RNA, 22 nt, synthetic construct
  source 1..22: mol_type = other RNA
aatcagaatacccaatatccat

SEQ ID NO: 8486 - RNA, 22 nt, synthetic construct
  source 1..22: mol_type = other RNA
aatccaaacatggactataaaa

SEQ ID NO: 8487 - RNA, 22 nt, synthetic construct
  source 1..22: mol_type = other RNA
aatccagttagtccttatccaa

SEQ ID NO: 8488 - RNA, 22 nt, synthetic construct
  source 1..22: mol_type = other RNA
aatccataactacagtgcagct

SEQ ID NO: 8489 - RNA, 22 nt, synthetic construct
  source 1..22: mol_type = other RNA
aatccatacatgagacggccca

SEQ ID NO: 8490 - RNA, 22 nt, synthetic construct
  source 1..22: mol_type = other RNA
aatcccaataggaatcacccca

SEQ ID NO: 8491 - RNA, 22 nt, synthetic construct
  source 1..22: mol_type = other RNA
aatcccatgaacccttaccctg

SEQ ID NO: 8492 - RNA, 22 nt, synthetic construct
  source 1..22: mol_type = other RNA
aatcccatggcaaaaaagtgaa

SEQ ID NO: 8493 - RNA, 22 nt, synthetic construct
  source 1..22: mol_type = other RNA
aatctagaggtggctcccatga

SEQ ID NO: 8494 - RNA, 22 nt, synthetic construct
  source 1..22: mol_type = other RNA
aatctgagcaatccaaacatgg

SEQ ID NO: 8495 - RNA, 22 nt, synthetic construct
  source 1..22: mol_type = other RNA
aatgacatgctttcccacacag

SEQ ID NO: 8496 - RNA, 22 nt, synthetic construct
  source 1..22: mol_type = other RNA
aatgagaattgacccatgagtt

SEQ ID NO: 8497 - RNA, 22 nt, synthetic construct
  source 1..22: mol_type = other RNA
aatgagccaaaacatggcttgg

SEQ ID NO: 8498 - RNA, 22 nt, synthetic construct
  source 1..22: mol_type = other RNA
aatgcaatggaaacctatcagt

SEQ ID NO: 8499 - RNA, 22 nt, synthetic construct
  source 1..22: mol_type = other RNA
aatggaaacctatcagtggaca

SEQ ID NO: 8500 - RNA, 22 nt, synthetic construct
  source 1..22: mol_type = other RNA
aatggctgaaaaagcccgtgag

SEQ ID NO: 8501 - RNA, 22 nt, synthetic construct
  source 1..22: mol_type = other RNA
aatggctgcttttcctgaccat

SEQ ID NO: 8502 - RNA, 22 nt, synthetic construct
  source 1..22: mol_type = other RNA
aatgggttatcaaagatgcttc

SEQ ID NO: 8503 - RNA, 22 nt, synthetic construct
  source 1..22: mol_type = other RNA
aatggtacaactgctgaaacca

SEQ ID NO: 8504 - RNA, 22 nt, synthetic construct
  source 1..22: mol_type = other RNA
aatggtcaggaaaagcagccat

SEQ ID NO: 8505 - RNA, 22 nt, synthetic construct
  source 1..22: mol_type = other RNA
aatggtgaacatcattcacctt

SEQ ID NO: 8506 - RNA, 22 nt, synthetic construct
  source 1..22: mol_type = other RNA
aatgtacatcatgtagggaaat

SEQ ID NO: 8507 - RNA, 22 nt, synthetic construct
  source 1..22: mol_type = other RNA
aatgtcaggatccagaaagctc

SEQ ID NO: 8508 - RNA, 22 nt, synthetic construct
  source 1..22: mol_type = other RNA
aattaagtgatgctaatggtca

SEQ ID NO: 8509 - RNA, 22 nt, synthetic construct
  source 1..22: mol_type = other RNA
aattcaaatatgaacctgcagc

SEQ ID NO: 8510 - RNA, 22 nt, synthetic construct
  source 1..22: mol_type = other RNA
aattctcattgagtgtgcaaag

SEQ ID NO: 8511 - RNA, 22 nt, synthetic construct
  source 1..22: mol_type = other RNA
aattcttctaatcccatgaacc

SEQ ID NO: 8512 - RNA, 22 nt, synthetic construct
  source 1..22: mol_type = other RNA
aattgacccatgagttggagcc

SEQ ID NO: 8513 - RNA, 22 nt, synthetic construct
  source 1..22: mol_type = other RNA
aattgcctccttatcccactca

SEQ ID NO: 8514 - RNA, 22 nt, synthetic construct
  source 1..22: mol_type = other RNA
aatttccctacatgatgtacat

SEQ ID NO: 8515 - RNA, 22 nt, synthetic construct
  source 1..22: mol_type = other RNA
aatttgtgtaagcctccttgga

SEQ ID NO: 8516 - RNA, 22 nt, synthetic construct
  source 1..22: mol_type = other RNA
acaaaagggggtgatatcatat

SEQ ID NO: 8517 - RNA, 22 nt, synthetic construct
  source 1..22: mol_type = other RNA
acaaattaagtgatgctaatgg

SEQ ID NO: 8518 - RNA, 22 nt, synthetic construct
  source 1..22: mol_type = other RNA
acaacccctttaaagaatccca

SEQ ID NO: 8519 - RNA, 22 nt, synthetic construct
  source 1..22: mol_type = other RNA
acaacgatgaggtctggtcaga

SEQ ID NO: 8520 - RNA, 22 nt, synthetic construct
  source 1..22: mol_type = other RNA
acaactgctccccatatctggg

SEQ ID NO: 8521 - RNA, 22 nt, synthetic construct
  source 1..22: mol_type = other RNA
acaactgctgaaaccatctccc

SEQ ID NO: 8522 - RNA, 22 nt, synthetic construct
  source 1..22: mol_type = other RNA
acaagcagttctatcatggtta

SEQ ID NO: 8523 - RNA, 22 nt, synthetic construct
  source 1..22: mol_type = other RNA
acaaggagaatgacatgctttc

SEQ ID NO: 8524 - RNA, 22 nt, synthetic construct
  source 1..22: mol_type = other RNA
acacaaattaagtgatgctaat

SEQ ID NO: 8525 - RNA, 22 nt, synthetic construct
  source 1..22: mol_type = other RNA
acacaagcagttctatcatggt

SEQ ID NO: 8526 - RNA, 22 nt, synthetic construct
  source 1..22: mol_type = other RNA
acacacttcagatatctatgga

SEQ ID NO: 8527 - RNA, 22 nt, synthetic construct
  source 1..22: mol_type = other RNA
acacagctaatgggttatcaaa

SEQ ID NO: 8528 - RNA, 22 nt, synthetic construct
  source 1..22: mol_type = other RNA
acaccctggactagtgccaatg

SEQ ID NO: 8529 - RNA, 22 nt, synthetic construct
  source 1..22: mol_type = other RNA
acactcaatgagaattgaccca

SEQ ID NO: 8530 - RNA, 22 nt, synthetic construct
  source 1..22: mol_type = other RNA
acactcttcctctttctcacgg

SEQ ID NO: 8531 - RNA, 22 nt, synthetic construct
  source 1..22: mol_type = other RNA
acacttcagatatctatggaag

SEQ ID NO: 8532 - RNA, 22 nt, synthetic construct
  source 1..22: mol_type = other RNA
acactttaccagccaaggtttg

SEQ ID NO: 8533 - RNA, 22 nt, synthetic construct
  source 1..22: mol_type = other RNA
acagaacttttgcgactttcag

SEQ ID NO: 8534 - RNA, 22 nt, synthetic construct
  source 1..22: mol_type = other RNA
acagaagcagccaccacagccc

SEQ ID NO: 8535 - RNA, 22 nt, synthetic construct
  source 1..22: mol_type = other RNA
acagactccacagtaactacat

SEQ ID NO: 8536 - RNA, 22 nt, synthetic construct
  source 1..22: mol_type = other RNA
acagactctgtctgagggtgat

SEQ ID NO: 8537 - RNA, 22 nt, synthetic construct
  source 1..22: mol_type = other RNA
acagagggtcttggcttggata

SEQ ID NO: 8538 - RNA, 22 nt, synthetic construct
  source 1..22: mol_type = other RNA
acagagtctgtcaactcttatt

SEQ ID NO: 8539 - RNA, 22 nt, synthetic construct
  source 1..22: mol_type = other RNA
acagatatatatgatatcaccc

SEQ ID NO: 8540 - RNA, 22 nt, synthetic construct
  source 1..22: mol_type = other RNA
acagatccatcggctgagactg

SEQ ID NO: 8541 - RNA, 22 nt, synthetic construct
  source 1..22: mol_type = other RNA
acagccccagcagcagcagaga

SEQ ID NO: 8542 - RNA, 22 nt, synthetic construct
  source 1..22: mol_type = other RNA
acagcgagcagagctttctgga

SEQ ID NO: 8543 - RNA, 22 nt, synthetic construct
  source 1..22: mol_type = other RNA
acagctaatgggttatcaaaga

SEQ ID NO: 8544 - RNA, 22 nt, synthetic construct
  source 1..22: mol_type = other RNA
acagctctcttcatgccctgca

SEQ ID NO: 8545 - RNA, 22 nt, synthetic construct
  source 1..22: mol_type = other RNA
acagggccttacaacagatata

SEQ ID NO: 8546 - RNA, 22 nt, synthetic construct
  source 1..22: mol_type = other RNA
acagggtaagagagaacagaaa

SEQ ID NO: 8547 - RNA, 22 nt, synthetic construct
  source 1..22: mol_type = other RNA
acagtaactacatctccatatg

SEQ ID NO: 8548 - RNA, 22 nt, synthetic construct
  source 1..22: mol_type = other RNA
acagtgcagctccgggcatgtt

SEQ ID NO: 8549 - RNA, 22 nt, synthetic construct
  source 1..22: mol_type = other RNA
acataatccataactacagtgc

SEQ ID NO: 8550 - RNA, 22 nt, synthetic construct
  source 1..22: mol_type = other RNA
acatagtctgggccatactttt

SEQ ID NO: 8551 - RNA, 22 nt, synthetic construct
  source 1..22: mol_type = other RNA
acatcaccctcagacagagtct

SEQ ID NO: 8552 - RNA, 22 nt, synthetic construct
  source 1..22: mol_type = other RNA
acatcatgtagggaaattgcct

SEQ ID NO: 8553 - RNA, 22 nt, synthetic construct
  source 1..22: mol_type = other RNA
acatcattcaccttctcacata

SEQ ID NO: 8554 - RNA, 22 nt, synthetic construct
  source 1..22: mol_type = other RNA
acatctaaatacttaggttatg

SEQ ID NO: 8555 - RNA, 22 nt, synthetic construct
  source 1..22: mol_type = other RNA
acatctccatatgccttcactc

SEQ ID NO: 8556 - RNA, 22 nt, synthetic construct
  source 1..22: mol_type = other RNA
acatgaaacttcagagcccact

SEQ ID NO: 8557 - RNA, 22 nt, synthetic construct
  source 1..22: mol_type = other RNA
acatgagacggcccaatccagt

SEQ ID NO: 8558 - RNA, 22 nt, synthetic construct
  source 1..22: mol_type = other RNA
acatgatgtacatttggtctaa

SEQ ID NO: 8559 - RNA, 22 nt, synthetic construct
  source 1..22: mol_type = other RNA
acatgcccggagctgcactgta

SEQ ID NO: 8560 - RNA, 22 nt, synthetic construct
  source 1..22: mol_type = other RNA
acatgctttcccacacagctaa

SEQ ID NO: 8561 - RNA, 22 nt, synthetic construct
  source 1..22: mol_type = other RNA
acatggactataaaaatggtga

SEQ ID NO: 8562 - RNA, 22 nt, synthetic construct
  source 1..22: mol_type = other RNA
acatggcttggctctttgggaa

SEQ ID NO: 8563 - RNA, 22 nt, synthetic construct
  source 1..22: mol_type = other RNA
acatggtcctttcggcaagaga

SEQ ID NO: 8564 - RNA, 22 nt, synthetic construct
  source 1..22: mol_type = other RNA
acattgggggagtggccgtggc

SEQ ID NO: 8565 - RNA, 22 nt, synthetic construct
  source 1..22: mol_type = other RNA
acatttggtctaatggtacaac

SEQ ID NO: 8566 - RNA, 22 nt, synthetic construct
  source 1..22: mol_type = other RNA
accaaaatatgcagggagatgg

SEQ ID NO: 8567 - RNA, 22 nt, synthetic construct
  source 1..22: mol_type = other RNA
accaaatgtacatcatgtaggg

SEQ ID NO: 8568 - RNA, 22 nt, synthetic construct
  source 1..22: mol_type = other RNA
accaacaaaagggggtgatatc

SEQ ID NO: 8569 - RNA, 22 nt, synthetic construct
  source 1..22: mol_type = other RNA
accaatccatacatgagacggc

SEQ ID NO: 8570 - RNA, 22 nt, synthetic construct
  source 1..22: mol_type = other RNA
accacagactccacagtaacta

SEQ ID NO: 8571 - RNA, 22 nt, synthetic construct
  source 1..22: mol_type = other RNA
accacagccccagcagcagcag

SEQ ID NO: 8572 - RNA, 22 nt, synthetic construct
  source 1..22: mol_type = other RNA
accacccaatctgagcaatcca

SEQ ID NO: 8573 - RNA, 22 nt, synthetic construct
  source 1..22: mol_type = other RNA
accacccatccatacactttac

SEQ ID NO: 8574 - RNA, 22 nt, synthetic construct
  source 1..22: mol_type = other RNA
accagaagccacaccctggact

SEQ ID NO: 8575 - RNA, 22 nt, synthetic construct
  source 1..22: mol_type = other RNA
accagacctcatcgttgtcctc

SEQ ID NO: 8576 - RNA, 22 nt, synthetic construct
  source 1..22: mol_type = other RNA
accagcataagagcatgaatga

SEQ ID NO: 8577 - RNA, 22 nt, synthetic construct
  source 1..22: mol_type = other RNA
accagccaaggtttggaaatag

SEQ ID NO: 8578 - RNA, 22 nt, synthetic construct
  source 1..22: mol_type = other RNA
accagccctatgaacttctatt

SEQ ID NO: 8579 - RNA, 22 nt, synthetic construct
  source 1..22: mol_type = other RNA
accaggatctccctcgtctttt

SEQ ID NO: 8580 - RNA, 22 nt, synthetic construct
  source 1..22: mol_type = other RNA
accagtcatgcagcagtcccag

SEQ ID NO: 8581 - RNA, 22 nt, synthetic construct
  source 1..22: mol_type = other RNA
accatctccctgcatattttgg

SEQ ID NO: 8582 - RNA, 22 nt, synthetic construct
  source 1..22: mol_type = other RNA
accatgatagaactgcttgtgt

SEQ ID NO: 8583 - RNA, 22 nt, synthetic construct
  source 1..22: mol_type = other RNA
accatgtccgtgaccacagact

SEQ ID NO: 8584 - RNA, 22 nt, synthetic construct
  source 1..22: mol_type = other RNA
accattagaccaaatgtacatc

SEQ ID NO: 8585 - RNA, 22 nt, synthetic construct
  source 1..22: mol_type = other RNA
accattagcatcacttaatttg

SEQ ID NO: 8586 - RNA, 22 nt, synthetic construct
  source 1..22: mol_type = other RNA
accatttttatagtccatgttt

SEQ ID NO: 8587 - RNA, 22 nt, synthetic construct
  source 1..22: mol_type = other RNA
acccaatatccatcatatcaat

SEQ ID NO: 8588 - RNA, 22 nt, synthetic construct
  source 1..22: mol_type = other RNA
acccaatctgagcaatccaaac

SEQ ID NO: 8589 - RNA, 22 nt, synthetic construct
  source 1..22: mol_type = other RNA
acccagatatggggagcagttg

SEQ ID NO: 8590 - RNA, 22 nt, synthetic construct
  source 1..22: mol_type = other RNA
acccatccatacactttaccag

SEQ ID NO: 8591 - RNA, 22 nt, synthetic construct
  source 1..22: mol_type = other RNA
acccatgagttggagccacggc

SEQ ID NO: 8592 - RNA, 22 nt, synthetic construct
  source 1..22: mol_type = other RNA
acccattagctgtgtgggaaag

SEQ ID NO: 8593 - RNA, 22 nt, synthetic construct
  source 1..22: mol_type = other RNA
accccaccaggatctccctcgt

SEQ ID NO: 8594 - RNA, 22 nt, synthetic construct
  source 1..22: mol_type = other RNA
accccagcagcagcagccacat

SEQ ID NO: 8595 - RNA, 22 nt, synthetic construct
  source 1..22: mol_type = other RNA
acccccttttgttggttacctc

SEQ ID NO: 8596 - RNA, 22 nt, synthetic construct
  source 1..22: mol_type = other RNA
acccctttaaagaatcccaata

SEQ ID NO: 8597 - RNA, 22 nt, synthetic construct
  source 1..22: mol_type = other RNA
acccgagtgaaggcatatggag

SEQ ID NO: 8598 - RNA, 22 nt, synthetic construct
  source 1..22: mol_type = other RNA
accctcagacagagtctgtcaa

SEQ ID NO: 8599 - RNA, 22 nt, synthetic construct
  source 1..22: mol_type = other RNA
accctctgtctaagctcagtct

SEQ ID NO: 8600 - RNA, 22 nt, synthetic construct
  source 1..22: mol_type = other RNA
accctggactagtgccaatggc

SEQ ID NO: 8601 - RNA, 22 nt, synthetic construct
  source 1..22: mol_type = other RNA
accctgggcttttgaatcagaa

SEQ ID NO: 8602 - RNA, 22 nt, synthetic construct
  source 1..22: mol_type = other RNA
accctgtccacagaacttttgc

SEQ ID NO: 8603 - RNA, 22 nt, synthetic construct
  source 1..22: mol_type = other RNA
acccttaccctgggcttttgaa

SEQ ID NO: 8604 - RNA, 22 nt, synthetic construct
  source 1..22: mol_type = other RNA
acctatacagatccatcggctg

SEQ ID NO: 8605 - RNA, 22 nt, synthetic construct
  source 1..22: mol_type = other RNA
acctatcagtggacaactgctc

SEQ ID NO: 8606 - RNA, 22 nt, synthetic construct
  source 1..22: mol_type = other RNA
acctcatcgttgtcctctgcac

SEQ ID NO: 8607 - RNA, 22 nt, synthetic construct
  source 1..22: mol_type = other RNA
acctcatctcaagctgcaggtt

SEQ ID NO: 8608 - RNA, 22 nt, synthetic construct
  source 1..22: mol_type = other RNA
acctctagattaccacccaatc

SEQ ID NO: 8609 - RNA, 22 nt, synthetic construct
  source 1..22: mol_type = other RNA
acctgcagcttgagatgaggtg

SEQ ID NO: 8610 - RNA, 22 nt, synthetic construct
  source 1..22: mol_type = other RNA
acctgcgtttcatcaagtctct

SEQ ID NO: 8611 - RNA, 22 nt, synthetic construct
  source 1..22: mol_type = other RNA
acctgtttctgttctctcttac

SEQ ID NO: 8612 - RNA, 22 nt, synthetic construct
  source 1..22: mol_type = other RNA
accttctcacataatccataac

SEQ ID NO: 8613 - RNA, 22 nt, synthetic construct
  source 1..22: mol_type = other RNA
accttggctggtaaagtgtatg

SEQ ID NO: 8614 - RNA, 22 nt, synthetic construct
  source 1..22: mol_type = other RNA
acgagggagatcctggtggggt

SEQ ID NO: 8615 - RNA, 22 nt, synthetic construct
  source 1..22: mol_type = other RNA
acgatgaggtctggtcagacag

SEQ ID NO: 8616 - RNA, 22 nt, synthetic construct
  source 1..22: mol_type = other RNA
acgcaggtaagtgggctctgaa

SEQ ID NO: 8617 - RNA, 22 nt, synthetic construct
  source 1..22: mol_type = other RNA
acgctttgcacactcaatgaga

SEQ ID NO: 8618 - RNA, 22 nt, synthetic construct
  source 1..22: mol_type = other RNA
acggacatggtcctttcggcaa

SEQ ID NO: 8619 - RNA, 22 nt, synthetic construct
  source 1..22: mol_type = other RNA
acggccactcccccaatgtcag

SEQ ID NO: 8620 - RNA, 22 nt, synthetic construct
  source 1..22: mol_type = other RNA
acggcccaatccagttagtcct

SEQ ID NO: 8621 - RNA, 22 nt, synthetic construct
  source 1..22: mol_type = other RNA
acgggagcctgctgagccacat

SEQ ID NO: 8622 - RNA, 22 nt, synthetic construct
  source 1..22: mol_type = other RNA
acgggctttttcagccattttg

SEQ ID NO: 8623 - RNA, 22 nt, synthetic construct
  source 1..22: mol_type = other RNA
actaactggattgggccgtctc

SEQ ID NO: 8624 - RNA, 22 nt, synthetic construct
  source 1..22: mol_type = other RNA
actacagtgcagctccgggcat

SEQ ID NO: 8625 - RNA, 22 nt, synthetic construct
  source 1..22: mol_type = other RNA
actacatctccatatgccttca

SEQ ID NO: 8626 - RNA, 22 nt, synthetic construct
  source 1..22: mol_type = other RNA
actagtccagggtgtggcttct

SEQ ID NO: 8627 - RNA, 22 nt, synthetic construct
  source 1..22: mol_type = other RNA
actagtgccaatggctgctttt

SEQ ID NO: 8628 - RNA, 22 nt, synthetic construct
  source 1..22: mol_type = other RNA
actataaaaatggtgaacatca

SEQ ID NO: 8629 - RNA, 22 nt, synthetic construct
  source 1..22: mol_type = other RNA
actatgtgcctcagaaatccca

SEQ ID NO: 8630 - RNA, 22 nt, synthetic construct
  source 1..22: mol_type = other RNA
actcaatgagaattgacccatg

SEQ ID NO: 8631 - RNA, 22 nt, synthetic construct
  source 1..22: mol_type = other RNA
actcatgagatggatggccact

SEQ ID NO: 8632 - RNA, 22 nt, synthetic construct
  source 1..22: mol_type = other RNA
actcatgggtcaattctcattg

SEQ ID NO: 8633 - RNA, 22 nt, synthetic construct
  source 1..22: mol_type = other RNA
actccacagtaactacatctcc

SEQ ID NO: 8634 - RNA, 22 nt, synthetic construct
  source 1..22: mol_type = other RNA
actcccccaatgtcaggatcca

SEQ ID NO: 8635 - RNA, 22 nt, synthetic construct
  source 1..22: mol_type = other RNA
actcgggtcacagggccttaca

SEQ ID NO: 8636 - RNA, 22 nt, synthetic construct
  source 1..22: mol_type = other RNA
actctggctatttccaaacctt

SEQ ID NO: 8637 - RNA, 22 nt, synthetic construct
  source 1..22: mol_type = other RNA
actctgtctgagggtgatgtgg

SEQ ID NO: 8638 - RNA, 22 nt, synthetic construct
  source 1..22: mol_type = other RNA
actcttattctgcttctggatc

SEQ ID NO: 8639 - RNA, 22 nt, synthetic construct
  source 1..22: mol_type = other RNA
actcttcacacacttcagatat

SEQ ID NO: 8640 - RNA, 22 nt, synthetic construct
  source 1..22: mol_type = other RNA
actcttcctctttctcacgggc

SEQ ID NO: 8641 - RNA, 22 nt, synthetic construct
  source 1..22: mol_type = other RNA
actgagcttagacagagggtct

SEQ ID NO: 8642 - RNA, 22 nt, synthetic construct
  source 1..22: mol_type = other RNA
actgataggtttccattgcatt

SEQ ID NO: 8643 - RNA, 22 nt, synthetic construct
  source 1..22: mol_type = other RNA
actgctccccatatctgggttc

SEQ ID NO: 8644 - RNA, 22 nt, synthetic construct
  source 1..22: mol_type = other RNA
actgctgaaaccatctccctgc

SEQ ID NO: 8645 - RNA, 22 nt, synthetic construct
  source 1..22: mol_type = other RNA
actgctgcatgactggtcctga

SEQ ID NO: 8646 - RNA, 22 nt, synthetic construct
  source 1..22: mol_type = other RNA
actgcttgtgtccaaggaggct

SEQ ID NO: 8647 - RNA, 22 nt, synthetic construct
  source 1..22: mol_type = other RNA
actggattgggccgtctcatgt

SEQ ID NO: 8648 - RNA, 22 nt, synthetic construct
  source 1..22: mol_type = other RNA
actggggagaataggaacccag

SEQ ID NO: 8649 - RNA, 22 nt, synthetic construct
  source 1..22: mol_type = other RNA
actggtcctgaaagtcgcaaaa

SEQ ID NO: 8650 - RNA, 22 nt, synthetic construct
  source 1..22: mol_type = other RNA
actgtagttatggattatgtga

SEQ ID NO: 8651 - RNA, 22 nt, synthetic construct
  source 1..22: mol_type = other RNA
actgtggagtctgtggtcacgg

SEQ ID NO: 8652 - RNA, 22 nt, synthetic construct
  source 1..22: mol_type = other RNA
acttaatttgtgtaagcctcct

SEQ ID NO: 8653 - RNA, 22 nt, synthetic construct
  source 1..22: mol_type = other RNA
acttacctgcgtttcatcaagt

SEQ ID NO: 8654 - RNA, 22 nt, synthetic construct
  source 1..22: mol_type = other RNA
acttaggttatggaaaccaaaa

SEQ ID NO: 8655 - RNA, 22 nt, synthetic construct
  source 1..22: mol_type = other RNA
acttcagagcccacttacctgc

SEQ ID NO: 8656 - RNA, 22 nt, synthetic construct
  source 1..22: mol_type = other RNA
acttcagatatctatggaagca

SEQ ID NO: 8657 - RNA, 22 nt, synthetic construct
  source 1..22: mol_type = other RNA
acttcatgggagccacctctag

SEQ ID NO: 8658 - RNA, 22 nt, synthetic construct
  source 1..22: mol_type = other RNA
acttctattccacctcatctca

SEQ ID NO: 8659 - RNA, 22 nt, synthetic construct
  source 1..22: mol_type = other RNA
acttgatgaaacgcaggtaagt

SEQ ID NO: 8660 - RNA, 22 nt, synthetic construct
  source 1..22: mol_type = other RNA
actttaccagccaaggtttgga

SEQ ID NO: 8661 - RNA, 22 nt, synthetic construct
  source 1..22: mol_type = other RNA
actttcaggaccagtcatgcag

SEQ ID NO: 8662 - RNA, 22 nt, synthetic construct
  source 1..22: mol_type = other RNA
acttttcacactcttcctcttt

SEQ ID NO: 8663 - RNA, 22 nt, synthetic construct
  source 1..22: mol_type = other RNA
acttttgcgactttcaggacca

SEQ ID NO: 8664 - RNA, 22 nt, synthetic construct
  source 1..22: mol_type = other RNA
acttttttgccatgggatttct

SEQ ID NO: 8665 - RNA, 22 nt, synthetic construct
  source 1..22: mol_type = other RNA
agaaagaggaagagtgtgaaaa

SEQ ID NO: 8666 - RNA, 22 nt, synthetic construct
  source 1..22: mol_type = other RNA
agaaagctctgctcgctgtctg

SEQ ID NO: 8667 - RNA, 22 nt, synthetic construct
  source 1..22: mol_type = other RNA
agaaatcccatggcaaaaaagt

SEQ ID NO: 8668 - RNA, 22 nt, synthetic construct
  source 1..22: mol_type = other RNA
agaactgcttgtgtccaaggag

SEQ ID NO: 8669 - RNA, 22 nt, synthetic construct
  source 1..22: mol_type = other RNA
agaacttttgcgactttcagga

SEQ ID NO: 8670 - RNA, 22 nt, synthetic construct
  source 1..22: mol_type = other RNA
agaagaattcaaatatgaacct

SEQ ID NO: 8671 - RNA, 22 nt, synthetic construct
  source 1..22: mol_type = other RNA
agaagcagaataagagttgaca

SEQ ID NO: 8672 - RNA, 22 nt, synthetic construct
  source 1..22: mol_type = other RNA
agaagcagccaccacagcccca

SEQ ID NO: 8673 - RNA, 22 nt, synthetic construct
  source 1..22: mol_type = other RNA
agaagccacaccctggactagt

SEQ ID NO: 8674 - RNA, 22 nt, synthetic construct
  source 1..22: mol_type = other RNA
agaaggtgaatgatgttcacca

SEQ ID NO: 8675 - RNA, 22 nt, synthetic construct
  source 1..22: mol_type = other RNA
agaagttcatagggctggtgct

SEQ ID NO: 8676 - RNA, 22 nt, synthetic construct
  source 1..22: mol_type = other RNA
agaataagagttgacagactct

SEQ ID NO: 8677 - RNA, 22 nt, synthetic construct
  source 1..22: mol_type = other RNA
agaatacccaatatccatcata

SEQ ID NO: 8678 - RNA, 22 nt, synthetic construct
  source 1..22: mol_type = other RNA
agaataggaacccagatatggg

SEQ ID NO: 8679 - RNA, 22 nt, synthetic construct
  source 1..22: mol_type = other RNA
agaatcccaataggaatcaccc

SEQ ID NO: 8680 - RNA, 22 nt, synthetic construct
  source 1..22: mol_type = other RNA
agaatgacatgctttcccacac

SEQ ID NO: 8681 - RNA, 22 nt, synthetic construct
  source 1..22: mol_type = other RNA
agaattcaaatatgaacctgca

SEQ ID NO: 8682 - RNA, 22 nt, synthetic construct
  source 1..22: mol_type = other RNA
agaattgacccatgagttggag

SEQ ID NO: 8683 - RNA, 22 nt, synthetic construct
  source 1..22: mol_type = other RNA
agacagagggtcttggcttgga

SEQ ID NO: 8684 - RNA, 22 nt, synthetic construct
  source 1..22: mol_type = other RNA
agacagagtctgtcaactctta

SEQ ID NO: 8685 - RNA, 22 nt, synthetic construct
  source 1..22: mol_type = other RNA
agacagcgagcagagctttctg

SEQ ID NO: 8686 - RNA, 22 nt, synthetic construct
  source 1..22: mol_type = other RNA
agaccaaatgtacatcatgtag

SEQ ID NO: 8687 - RNA, 22 nt, synthetic construct
  source 1..22: mol_type = other RNA
agaccccagcagcagcagccac

SEQ ID NO: 8688 - RNA, 22 nt, synthetic construct
  source 1..22: mol_type = other RNA
agaccctctgtctaagctcagt

SEQ ID NO: 8689 - RNA, 22 nt, synthetic construct
  source 1..22: mol_type = other RNA
agacctcatcgttgtcctctgc

SEQ ID NO: 8690 - RNA, 22 nt, synthetic construct
  source 1..22: mol_type = other RNA
agacgagggagatcctggtggg

SEQ ID NO: 8691 - RNA, 22 nt, synthetic construct
  source 1..22: mol_type = other RNA
agacggcccaatccagttagtc

SEQ ID NO: 8692 - RNA, 22 nt, synthetic construct
  source 1..22: mol_type = other RNA
agactatgtgcctcagaaatcc

SEQ ID NO: 8693 - RNA, 22 nt, synthetic construct
  source 1..22: mol_type = other RNA
agactccacagtaactacatct

SEQ ID NO: 8694 - RNA, 22 nt, synthetic construct
  source 1..22: mol_type = other RNA
agactctgtctgagggtgatgt

SEQ ID NO: 8695 - RNA, 22 nt, synthetic construct
  source 1..22: mol_type = other RNA
agactgagcttagacagagggt

SEQ ID NO: 8696 - RNA, 22 nt, synthetic construct
  source 1..22: mol_type = other RNA
agactggggagaataggaaccc

SEQ ID NO: 8697 - RNA, 22 nt, synthetic construct
  source 1..22: mol_type = other RNA
agacttgatgaaacgcaggtaa

SEQ ID NO: 8698 - RNA, 22 nt, synthetic construct
  source 1..22: mol_type = other RNA
agagaccccagcagcagcagcc

SEQ ID NO: 8699 - RNA, 22 nt, synthetic construct
  source 1..22: mol_type = other RNA
agagacttgatgaaacgcaggt

SEQ ID NO: 8700 - RNA, 22 nt, synthetic construct
  source 1..22: mol_type = other RNA
agagagctgttgaacatgcccg

SEQ ID NO: 8701 - RNA, 22 nt, synthetic construct
  source 1..22: mol_type = other RNA
agagcatgaatgagccaaaaca

SEQ ID NO: 8702 - RNA, 22 nt, synthetic construct
  source 1..22: mol_type = other RNA
agagccaagccatgttttggct

SEQ ID NO: 8703 - RNA, 22 nt, synthetic construct
  source 1..22: mol_type = other RNA
agagcccacttacctgcgtttc

SEQ ID NO: 8704 - RNA, 22 nt, synthetic construct
  source 1..22: mol_type = other RNA
agagctggaagcatctttgata

SEQ ID NO: 8705 - RNA, 22 nt, synthetic construct
  source 1..22: mol_type = other RNA
agagctgttgaacatgcccgga

SEQ ID NO: 8706 - RNA, 22 nt, synthetic construct
  source 1..22: mol_type = other RNA
agagctttctggatcctgacat

SEQ ID NO: 8707 - RNA, 22 nt, synthetic construct
  source 1..22: mol_type = other RNA
agaggaagagtgtgaaaagtat

SEQ ID NO: 8708 - RNA, 22 nt, synthetic construct
  source 1..22: mol_type = other RNA
agaggacaacgatgaggtctgg

SEQ ID NO: 8709 - RNA, 22 nt, synthetic construct
  source 1..22: mol_type = other RNA
agaggctggggctgctgggact

SEQ ID NO: 8710 - RNA, 22 nt, synthetic construct
  source 1..22: mol_type = other RNA
agagggtcttggcttggatacc

SEQ ID NO: 8711 - RNA, 22 nt, synthetic construct
  source 1..22: mol_type = other RNA
agaggtggctcccatgaagtgg

SEQ ID NO: 8712 - RNA, 22 nt, synthetic construct
  source 1..22: mol_type = other RNA
agagtctgtcaactcttattct

SEQ ID NO: 8713 - RNA, 22 nt, synthetic construct
  source 1..22: mol_type = other RNA
agagtgtgaaaagtatggccca

SEQ ID NO: 8714 - RNA, 22 nt, synthetic construct
  source 1..22: mol_type = other RNA
agagttgacagactctgtctga

SEQ ID NO: 8715 - RNA, 22 nt, synthetic construct
  source 1..22: mol_type = other RNA
agagtttggataaggactaact

SEQ ID NO: 8716 - RNA, 22 nt, synthetic construct
  source 1..22: mol_type = other RNA
agatacctgtttctgttctctc

SEQ ID NO: 8717 - RNA, 22 nt, synthetic construct
  source 1..22: mol_type = other RNA
agatatatatgatatcaccccc

SEQ ID NO: 8718 - RNA, 22 nt, synthetic construct
  source 1..22: mol_type = other RNA
agatatctatggaagcaccagc

SEQ ID NO: 8719 - RNA, 22 nt, synthetic construct
  source 1..22: mol_type = other RNA
agatatctgaagtgtgtgaaga

SEQ ID NO: 8720 - RNA, 22 nt, synthetic construct
  source 1..22: mol_type = other RNA
agatatggggagcagttgtcca

SEQ ID NO: 8721 - RNA, 22 nt, synthetic construct
  source 1..22: mol_type = other RNA
agatccatcggctgagactggg

SEQ ID NO: 8722 - RNA, 22 nt, synthetic construct
  source 1..22: mol_type = other RNA
agatcctggtggggtgattcct

SEQ ID NO: 8723 - RNA, 22 nt, synthetic construct
  source 1..22: mol_type = other RNA
agatgaggtggaatagaagttc

SEQ ID NO: 8724 - RNA, 22 nt, synthetic construct
  source 1..22: mol_type = other RNA
agatgcagggcatgaagagagc

SEQ ID NO: 8725 - RNA, 22 nt, synthetic construct
  source 1..22: mol_type = other RNA
agatgcttccagctcttaacca

SEQ ID NO: 8726 - RNA, 22 nt, synthetic construct
  source 1..22: mol_type = other RNA
agatggatggccacttcatggg

SEQ ID NO: 8727 - RNA, 22 nt, synthetic construct
  source 1..22: mol_type = other RNA
agatggtttcagcagttgtacc

SEQ ID NO: 8728 - RNA, 22 nt, synthetic construct
  source 1..22: mol_type = other RNA
agatgtaaaactctggctattt

SEQ ID NO: 8729 - RNA, 22 nt, synthetic construct
  source 1..22: mol_type = other RNA
agatgtagttactgtggagtct

SEQ ID NO: 8730 - RNA, 22 nt, synthetic construct
  source 1..22: mol_type = other RNA
agattaccacccaatctgagca

SEQ ID NO: 8731 - RNA, 22 nt, synthetic construct
  source 1..22: mol_type = other RNA
agattgggtggtaatctagagg

SEQ ID NO: 8732 - RNA, 22 nt, synthetic construct
  source 1..22: mol_type = other RNA
agcaatccaaacatggactata

SEQ ID NO: 8733 - RNA, 22 nt, synthetic construct
  source 1..22: mol_type = other RNA
agcaccagccctatgaacttct

SEQ ID NO: 8734 - RNA, 22 nt, synthetic construct
  source 1..22: mol_type = other RNA
agcagaataagagttgacagac

SEQ ID NO: 8735 - RNA, 22 nt, synthetic construct
  source 1..22: mol_type = other RNA
agcagagaccccagcagcagca

SEQ ID NO: 8736 - RNA, 22 nt, synthetic construct
  source 1..22: mol_type = other RNA
agcagagctttctggatcctga

SEQ ID NO: 8737 - RNA, 22 nt, synthetic construct
  source 1..22: mol_type = other RNA
agcagcagagaccccagcagca

SEQ ID NO: 8738 - RNA, 22 nt, synthetic construct
  source 1..22: mol_type = other RNA
agcagcagcagagaccccagca

SEQ ID NO: 8739 - RNA, 22 nt, synthetic construct
  source 1..22: mol_type = other RNA
agcagcagcagccacatcaccc

SEQ ID NO: 8740 - RNA, 22 nt, synthetic construct
  source 1..22: mol_type = other RNA
agcagcagccacatcaccctca

SEQ ID NO: 8741 - RNA, 22 nt, synthetic construct
  source 1..22: mol_type = other RNA
agcagccacatcaccctcagac

SEQ ID NO: 8742 - RNA, 22 nt, synthetic construct
  source 1..22: mol_type = other RNA
agcagccaccacagccccagca

SEQ ID NO: 8743 - RNA, 22 nt, synthetic construct
  source 1..22: mol_type = other RNA
agcagccattggcactagtcca

SEQ ID NO: 8744 - RNA, 22 nt, synthetic construct
  source 1..22: mol_type = other RNA
agcagccccagcctctacagaa

SEQ ID NO: 8745 - RNA, 22 nt, synthetic construct
  source 1..22: mol_type = other RNA
agcaggctcccgtttcactttt

SEQ ID NO: 8746 - RNA, 22 nt, synthetic construct
  source 1..22: mol_type = other RNA
agcagtcccagcagccccagcc

SEQ ID NO: 8747 - RNA, 22 nt, synthetic construct
  source 1..22: mol_type = other RNA
agcagttctatcatggttaaga

SEQ ID NO: 8748 - RNA, 22 nt, synthetic construct
  source 1..22: mol_type = other RNA
agcagttgtaccattagaccaa

SEQ ID NO: 8749 - RNA, 22 nt, synthetic construct
  source 1..22: mol_type = other RNA
agcagttgtccactgataggtt

SEQ ID NO: 8750 - RNA, 22 nt, synthetic construct
  source 1..22: mol_type = other RNA
agcataagagcatgaatgagcc

SEQ ID NO: 8751 - RNA, 22 nt, synthetic construct
  source 1..22: mol_type = other RNA
agcatcacttaatttgtgtaag

SEQ ID NO: 8752 - RNA, 22 nt, synthetic construct
  source 1..22: mol_type = other RNA
agcatctttgataacccattag

SEQ ID NO: 8753 - RNA, 22 nt, synthetic construct
  source 1..22: mol_type = other RNA
agcatgaatgagccaaaacatg

SEQ ID NO: 8754 - RNA, 22 nt, synthetic construct
  source 1..22: mol_type = other RNA
agcatgtcattctccttgtttt

SEQ ID NO: 8755 - RNA, 22 nt, synthetic construct
  source 1..22: mol_type = other RNA
agccaaaacatggcttggctct

SEQ ID NO: 8756 - RNA, 22 nt, synthetic construct
  source 1..22: mol_type = other RNA
agccaaaatggctgaaaaagcc

SEQ ID NO: 8757 - RNA, 22 nt, synthetic construct
  source 1..22: mol_type = other RNA
agccaagaccctctgtctaagc

SEQ ID NO: 8758 - RNA, 22 nt, synthetic construct
  source 1..22: mol_type = other RNA
agccaagccatgttttggctca

SEQ ID NO: 8759 - RNA, 22 nt, synthetic construct
  source 1..22: mol_type = other RNA
agccaaggtttggaaatagcca

SEQ ID NO: 8760 - RNA, 22 nt, synthetic construct
  source 1..22: mol_type = other RNA
agccacaccctggactagtgcc

SEQ ID NO: 8761 - RNA, 22 nt, synthetic construct
  source 1..22: mol_type = other RNA
agccacatcaccctcagacaga

SEQ ID NO: 8762 - RNA, 22 nt, synthetic construct
  source 1..22: mol_type = other RNA
agccacatgaaacttcagagcc

SEQ ID NO: 8763 - RNA, 22 nt, synthetic construct
  source 1..22: mol_type = other RNA
agccaccacagccccagcagca

SEQ ID NO: 8764 - RNA, 22 nt, synthetic construct
  source 1..22: mol_type = other RNA
agccacctctagattaccaccc

SEQ ID NO: 8765 - RNA, 22 nt, synthetic construct
  source 1..22: mol_type = other RNA
agccacggccactcccccaatg

SEQ ID NO: 8766 - RNA, 22 nt, synthetic construct
  source 1..22: mol_type = other RNA
agccagagttttacatctaaat

SEQ ID NO: 8767 - RNA, 22 nt, synthetic construct
  source 1..22: mol_type = other RNA
agccatgttttggctcattcat

SEQ ID NO: 8768 - RNA, 22 nt, synthetic construct
  source 1..22: mol_type = other RNA
agccattggcactagtccaggg

SEQ ID NO: 8769 - RNA, 22 nt, synthetic construct
  source 1..22: mol_type = other RNA
agccattttggcttcccaaaga

SEQ ID NO: 8770 - RNA, 22 nt, synthetic construct
  source 1..22: mol_type = other RNA
agcccacttacctgcgtttcat

SEQ ID NO: 8771 - RNA, 22 nt, synthetic construct
  source 1..22: mol_type = other RNA
agcccagggtaagggttcatgg

SEQ ID NO: 8772 - RNA, 22 nt, synthetic construct
  source 1..22: mol_type = other RNA
agccccagcagcagcagagacc

SEQ ID NO: 8773 - RNA, 22 nt, synthetic construct
  source 1..22: mol_type = other RNA
agccccagcctctacagaagca

SEQ ID NO: 8774 - RNA, 22 nt, synthetic construct
  source 1..22: mol_type = other RNA
agcccgtgagaaagaggaagag

SEQ ID NO: 8775 - RNA, 22 nt, synthetic construct
  source 1..22: mol_type = other RNA
agccctatgaacttctattcca

SEQ ID NO: 8776 - RNA, 22 nt, synthetic construct
  source 1..22: mol_type = other RNA
agccgatggatctgtataggta

SEQ ID NO: 8777 - RNA, 22 nt, synthetic construct
  source 1..22: mol_type = other RNA
agcctccttggacacaagcagt

SEQ ID NO: 8778 - RNA, 22 nt, synthetic construct
  source 1..22: mol_type = other RNA
agcctctacagaagcagccacc

SEQ ID NO: 8779 - RNA, 22 nt, synthetic construct
  source 1..22: mol_type = other RNA
agcctgctgagccacatgaaac

SEQ ID NO: 8780 - RNA, 22 nt, synthetic construct
  source 1..22: mol_type = other RNA
agcgagcagagctttctggatc

SEQ ID NO: 8781 - RNA, 22 nt, synthetic construct
  source 1..22: mol_type = other RNA
agcgtgagctgcatgccacaac

SEQ ID NO: 8782 - RNA, 22 nt, synthetic construct
  source 1..22: mol_type = other RNA
agctaatgggttatcaaagatg

SEQ ID NO: 8783 - RNA, 22 nt, synthetic construct
  source 1..22: mol_type = other RNA
agctcacgctttgcacactcaa

SEQ ID NO: 8784 - RNA, 22 nt, synthetic construct
  source 1..22: mol_type = other RNA
agctcagtctaccacccatcca

SEQ ID NO: 8785 - RNA, 22 nt, synthetic construct
  source 1..22: mol_type = other RNA
agctccgggcatgttcaacagc

SEQ ID NO: 8786 - RNA, 22 nt, synthetic construct
  source 1..22: mol_type = other RNA
agctctcttcatgccctgcatc

SEQ ID NO: 8787 - RNA, 22 nt, synthetic construct
  source 1..22: mol_type = other RNA
agctctgctcgctgtctgacca

SEQ ID NO: 8788 - RNA, 22 nt, synthetic construct
  source 1..22: mol_type = other RNA
agctcttaaccatgatagaact

SEQ ID NO: 8789 - RNA, 22 nt, synthetic construct
  source 1..22: mol_type = other RNA
agctgcactgtagttatggatt

SEQ ID NO: 8790 - RNA, 22 nt, synthetic construct
  source 1..22: mol_type = other RNA
agctgcaggttcatatttgaat

SEQ ID NO: 8791 - RNA, 22 nt, synthetic construct
  source 1..22: mol_type = other RNA
agctgcatgccacaaccccttt

SEQ ID NO: 8792 - RNA, 22 nt, synthetic construct
  source 1..22: mol_type = other RNA
agctggaagcatctttgataac

SEQ ID NO: 8793 - RNA, 22 nt, synthetic construct
  source 1..22: mol_type = other RNA
agctgtgtgggaaagcatgtca

SEQ ID NO: 8794 - RNA, 22 nt, synthetic construct
  source 1..22: mol_type = other RNA
agctgttgaacatgcccggagc

SEQ ID NO: 8795 - RNA, 22 nt, synthetic construct
  source 1..22: mol_type = other RNA
agcttagacagagggtcttggc

SEQ ID NO: 8796 - RNA, 22 nt, synthetic construct
  source 1..22: mol_type = other RNA
agcttgagatgaggtggaatag

SEQ ID NO: 8797 - RNA, 22 nt, synthetic construct
  source 1..22: mol_type = other RNA
agctttctggatcctgacattg

SEQ ID NO: 8798 - RNA, 22 nt, synthetic construct
  source 1..22: mol_type = other RNA
aggaaaagcagccattggcact

SEQ ID NO: 8799 - RNA, 22 nt, synthetic construct
  source 1..22: mol_type = other RNA
aggaacccagatatggggagca

SEQ ID NO: 8800 - RNA, 22 nt, synthetic construct
  source 1..22: mol_type = other RNA
aggaagagtgtgaaaagtatgg

SEQ ID NO: 8801 - RNA, 22 nt, synthetic construct
  source 1..22: mol_type = other RNA
aggaatcaccccaccaggatct

SEQ ID NO: 8802 - RNA, 22 nt, synthetic construct
  source 1..22: mol_type = other RNA
aggacaacgatgaggtctggtc

SEQ ID NO: 8803 - RNA, 22 nt, synthetic construct
  source 1..22: mol_type = other RNA
aggaccagtcatgcagcagtcc

SEQ ID NO: 8804 - RNA, 22 nt, synthetic construct
  source 1..22: mol_type = other RNA
aggaccatgtccgtgaccacag

SEQ ID NO: 8805 - RNA, 22 nt, synthetic construct
  source 1..22: mol_type = other RNA
aggactaactggattgggccgt

SEQ ID NO: 8806 - RNA, 22 nt, synthetic construct
  source 1..22: mol_type = other RNA
aggagaatgacatgctttccca

SEQ ID NO: 8807 - RNA, 22 nt, synthetic construct
  source 1..22: mol_type = other RNA
aggaggcaatttccctacatga

SEQ ID NO: 8808 - RNA, 22 nt, synthetic construct
  source 1..22: mol_type = other RNA
aggaggcttacacaaattaagt

SEQ ID NO: 8809 - RNA, 22 nt, synthetic construct
  source 1..22: mol_type = other RNA
aggatccagaaagctctgctcg

SEQ ID NO: 8810 - RNA, 22 nt, synthetic construct
  source 1..22: mol_type = other RNA
aggatctccctcgtcttttacc

SEQ ID NO: 8811 - RNA, 22 nt, synthetic construct
  source 1..22: mol_type = other RNA
aggcaatttccctacatgatgt

SEQ ID NO: 8812 - RNA, 22 nt, synthetic construct
  source 1..22: mol_type = other RNA
aggcacatagtctgggccatac

SEQ ID NO: 8813 - RNA, 22 nt, synthetic construct
  source 1..22: mol_type = other RNA
aggcatatggagatgtagttac

SEQ ID NO: 8814 - RNA, 22 nt, synthetic construct
  source 1..22: mol_type = other RNA
aggccctgtgacccgagtgaag

SEQ ID NO: 8815 - RNA, 22 nt, synthetic construct
  source 1..22: mol_type = other RNA
aggctcccgtttcacttttttg

SEQ ID NO: 8816 - RNA, 22 nt, synthetic construct
  source 1..22: mol_type = other RNA
aggctggggctgctgggactgc

SEQ ID NO: 8817 - RNA, 22 nt, synthetic construct
  source 1..22: mol_type = other RNA
aggcttacacaaattaagtgat

SEQ ID NO: 8818 - RNA, 22 nt, synthetic construct
  source 1..22: mol_type = other RNA
agggaaattgcctccttatccc

SEQ ID NO: 8819 - RNA, 22 nt, synthetic construct
  source 1..22: mol_type = other RNA
agggagatcctggtggggtgat

SEQ ID NO: 8820 - RNA, 22 nt, synthetic construct
  source 1..22: mol_type = other RNA
agggagatggtttcagcagttg

SEQ ID NO: 8821 - RNA, 22 nt, synthetic construct
  source 1..22: mol_type = other RNA
agggcatgaagagagctgttga

SEQ ID NO: 8822 - RNA, 22 nt, synthetic construct
  source 1..22: mol_type = other RNA
agggccttacaacagatatata

SEQ ID NO: 8823 - RNA, 22 nt, synthetic construct
  source 1..22: mol_type = other RNA
agggctggtgcttccatagata

SEQ ID NO: 8824 - RNA, 22 nt, synthetic construct
  source 1..22: mol_type = other RNA
agggggtgatatcatatatatc

SEQ ID NO: 8825 - RNA, 22 nt, synthetic construct
  source 1..22: mol_type = other RNA
aggggttgtggcatgcagctca

SEQ ID NO: 8826 - RNA, 22 nt, synthetic construct
  source 1..22: mol_type = other RNA
agggtaagagagaacagaaaca

SEQ ID NO: 8827 - RNA, 22 nt, synthetic construct
  source 1..22: mol_type = other RNA
agggtaagggttcatgggatta

SEQ ID NO: 8828 - RNA, 22 nt, synthetic construct
  source 1..22: mol_type = other RNA
agggtcttggcttggataccta

SEQ ID NO: 8829 - RNA, 22 nt, synthetic construct
  source 1..22: mol_type = other RNA
agggtgatgtggctgctgctgc

SEQ ID NO: 8830 - RNA, 22 nt, synthetic construct
  source 1..22: mol_type = other RNA
agggtgtggcttctggtgcaga

SEQ ID NO: 8831 - RNA, 22 nt, synthetic construct
  source 1..22: mol_type = other RNA
agggttcatgggattagaagaa

SEQ ID NO: 8832 - RNA, 22 nt, synthetic construct
  source 1..22: mol_type = other RNA
aggtaaccaacaaaagggggtg

SEQ ID NO: 8833 - RNA, 22 nt, synthetic construct
  source 1..22: mol_type = other RNA
aggtaagtgggctctgaagttt

SEQ ID NO: 8834 - RNA, 22 nt, synthetic construct
  source 1..22: mol_type = other RNA
aggtatccaagccaagaccctc

SEQ ID NO: 8835 - RNA, 22 nt, synthetic construct
  source 1..22: mol_type = other RNA
aggtctggtcagacagcgagca

SEQ ID NO: 8836 - RNA, 22 nt, synthetic construct
  source 1..22: mol_type = other RNA
aggtgaatgatgttcaccattt

SEQ ID NO: 8837 - RNA, 22 nt, synthetic construct
  source 1..22: mol_type = other RNA
aggtggaatagaagttcatagg

SEQ ID NO: 8838 - RNA, 22 nt, synthetic construct
  source 1..22: mol_type = other RNA
aggtggctcccatgaagtggcc

SEQ ID NO: 8839 - RNA, 22 nt, synthetic construct
  source 1..22: mol_type = other RNA
aggttatggaaaccaaaatatg

SEQ ID NO: 8840 - RNA, 22 nt, synthetic construct
  source 1..22: mol_type = other RNA
aggttcatatttgaattcttct

SEQ ID NO: 8841 - RNA, 22 nt, synthetic construct
  source 1..22: mol_type = other RNA
aggtttccattgcattgatatg

SEQ ID NO: 8842 - RNA, 22 nt, synthetic construct
  source 1..22: mol_type = other RNA
aggtttggaaatagccagagtt

SEQ ID NO: 8843 - RNA, 22 nt, synthetic construct
  source 1..22: mol_type = other RNA
agtaactacatctccatatgcc

SEQ ID NO: 8844 - RNA, 22 nt, synthetic construct
  source 1..22: mol_type = other RNA
agtatggcccagactatgtgcc

SEQ ID NO: 8845 - RNA, 22 nt, synthetic construct
  source 1..22: mol_type = other RNA
agtatttagatgtaaaactctg

SEQ ID NO: 8846 - RNA, 22 nt, synthetic construct
  source 1..22: mol_type = other RNA
agtcatgcagcagtcccagcag

SEQ ID NO: 8847 - RNA, 22 nt, synthetic construct
  source 1..22: mol_type = other RNA
agtccagggtgtggcttctggt

SEQ ID NO: 8848 - RNA, 22 nt, synthetic construct
  source 1..22: mol_type = other RNA
agtccatgtttggattgctcag

SEQ ID NO: 8849 - RNA, 22 nt, synthetic construct
  source 1..22: mol_type = other RNA
agtcccagcagccccagcctct

SEQ ID NO: 8850 - RNA, 22 nt, synthetic construct
  source 1..22: mol_type = other RNA
agtccttatccaaactcttcac

SEQ ID NO: 8851 - RNA, 22 nt, synthetic construct
  source 1..22: mol_type = other RNA
agtcgcaaaagttctgtggaca

SEQ ID NO: 8852 - RNA, 22 nt, synthetic construct
  source 1..22: mol_type = other RNA
agtctaccacccatccatacac

SEQ ID NO: 8853 - RNA, 22 nt, synthetic construct
  source 1..22: mol_type = other RNA
agtctcagccgatggatctgta

SEQ ID NO: 8854 - RNA, 22 nt, synthetic construct
  source 1..22: mol_type = other RNA
agtctcttgccgaaaggaccat

SEQ ID NO: 8855 - RNA, 22 nt, synthetic construct
  source 1..22: mol_type = other RNA
agtctgggccatacttttcaca

SEQ ID NO: 8856 - RNA, 22 nt, synthetic construct
  source 1..22: mol_type = other RNA
agtctgtcaactcttattctgc

SEQ ID NO: 8857 - RNA, 22 nt, synthetic construct
  source 1..22: mol_type = other RNA
agtctgtggtcacggacatggt

SEQ ID NO: 8858 - RNA, 22 nt, synthetic construct
  source 1..22: mol_type = other RNA
agtgaaacgggagcctgctgag

SEQ ID NO: 8859 - RNA, 22 nt, synthetic construct
  source 1..22: mol_type = other RNA
agtgaaggcatatggagatgta

SEQ ID NO: 8860 - RNA, 22 nt, synthetic construct
  source 1..22: mol_type = other RNA
agtgaggtaaccaacaaaaggg

SEQ ID NO: 8861 - RNA, 22 nt, synthetic construct
  source 1..22: mol_type = other RNA
agtgatgctaatggtcaggaaa

SEQ ID NO: 8862 - RNA, 22 nt, synthetic construct
  source 1..22: mol_type = other RNA
agtgcagctccgggcatgttca

SEQ ID NO: 8863 - RNA, 22 nt, synthetic construct
  source 1..22: mol_type = other RNA
agtgccaatggctgcttttcct

SEQ ID NO: 8864 - RNA, 22 nt, synthetic construct
  source 1..22: mol_type = other RNA
agtggacaactgctccccatat

SEQ ID NO: 8865 - RNA, 22 nt, synthetic construct
  source 1..22: mol_type = other RNA
agtggccatccatctcatgagt

SEQ ID NO: 8866 - RNA, 22 nt, synthetic construct
  source 1..22: mol_type = other RNA
agtggccgtggctccaactcat

SEQ ID NO: 8867 - RNA, 22 nt, synthetic construct
  source 1..22: mol_type = other RNA
agtgggataaggaggcaatttc

SEQ ID NO: 8868 - RNA, 22 nt, synthetic construct
  source 1..22: mol_type = other RNA
agtgggctctgaagtttcatgt

SEQ ID NO: 8869 - RNA, 22 nt, synthetic construct
  source 1..22: mol_type = other RNA
agtgtatggatgggtggtagac

SEQ ID NO: 8870 - RNA, 22 nt, synthetic construct
  source 1..22: mol_type = other RNA
agtgtgaaaagtatggcccaga

SEQ ID NO: 8871 - RNA, 22 nt, synthetic construct
  source 1..22: mol_type = other RNA
agtgtgcaaagcgtgagctgca

SEQ ID NO: 8872 - RNA, 22 nt, synthetic construct
  source 1..22: mol_type = other RNA
agtgtgtgaagagtttggataa

SEQ ID NO: 8873 - RNA, 22 nt, synthetic construct
  source 1..22: mol_type = other RNA
agttactgtggagtctgtggtc

SEQ ID NO: 8874 - RNA, 22 nt, synthetic construct
  source 1..22: mol_type = other RNA
agttagtccttatccaaactct

SEQ ID NO: 8875 - RNA, 22 nt, synthetic construct
  source 1..22: mol_type = other RNA
agttatggattatgtgagaagg

SEQ ID NO: 8876 - RNA, 22 nt, synthetic construct
  source 1..22: mol_type = other RNA
agttcatagggctggtgcttcc

SEQ ID NO: 8877 - RNA, 22 nt, synthetic construct
  source 1..22: mol_type = other RNA
agttctatcatggttaagagct

SEQ ID NO: 8878 - RNA, 22 nt, synthetic construct
  source 1..22: mol_type = other RNA
agttctgtggacagggtaagag

SEQ ID NO: 8879 - RNA, 22 nt, synthetic construct
  source 1..22: mol_type = other RNA
agttgacagactctgtctgagg

SEQ ID NO: 8880 - RNA, 22 nt, synthetic construct
  source 1..22: mol_type = other RNA
agttggagccacggccactccc

SEQ ID NO: 8881 - RNA, 22 nt, synthetic construct
  source 1..22: mol_type = other RNA
agttgtaccattagaccaaatg

SEQ ID NO: 8882 - RNA, 22 nt, synthetic construct
  source 1..22: mol_type = other RNA
agttgtccactgataggtttcc

SEQ ID NO: 8883 - RNA, 22 nt, synthetic construct
  source 1..22: mol_type = other RNA
agtttcatgtggctcagcaggc

SEQ ID NO: 8884 - RNA, 22 nt, synthetic construct
  source 1..22: mol_type = other RNA
agtttggataaggactaactgg

SEQ ID NO: 8885 - RNA, 22 nt, synthetic construct
  source 1..22: mol_type = other RNA
ataaaaatggtgaacatcattc

SEQ ID NO: 8886 - RNA, 22 nt, synthetic construct
  source 1..22: mol_type = other RNA
ataacccattagctgtgtggga

SEQ ID NO: 8887 - RNA, 22 nt, synthetic construct
  source 1..22: mol_type = other RNA
ataactacagtgcagctccggg

SEQ ID NO: 8888 - RNA, 22 nt, synthetic construct
  source 1..22: mol_type = other RNA
ataagagcatgaatgagccaaa

SEQ ID NO: 8889 - RNA, 22 nt, synthetic construct
  source 1..22: mol_type = other RNA
ataagagttgacagactctgtc

SEQ ID NO: 8890 - RNA, 22 nt, synthetic construct
  source 1..22: mol_type = other RNA
ataaggactaactggattgggc

SEQ ID NO: 8891 - RNA, 22 nt, synthetic construct
  source 1..22: mol_type = other RNA
ataaggaggcaatttccctaca

SEQ ID NO: 8892 - RNA, 22 nt, synthetic construct
  source 1..22: mol_type = other RNA
ataatccataactacagtgcag

SEQ ID NO: 8893 - RNA, 22 nt, synthetic construct
  source 1..22: mol_type = other RNA
atacactttaccagccaaggtt

SEQ ID NO: 8894 - RNA, 22 nt, synthetic construct
  source 1..22: mol_type = other RNA
atacagatccatcggctgagac

SEQ ID NO: 8895 - RNA, 22 nt, synthetic construct
  source 1..22: mol_type = other RNA
atacatgagacggcccaatcca

SEQ ID NO: 8896 - RNA, 22 nt, synthetic construct
  source 1..22: mol_type = other RNA
atacccaatatccatcatatca

SEQ ID NO: 8897 - RNA, 22 nt, synthetic construct
  source 1..22: mol_type = other RNA
atacctatacagatccatcggc

SEQ ID NO: 8898 - RNA, 22 nt, synthetic construct
  source 1..22: mol_type = other RNA
atacctgtttctgttctctctt

SEQ ID NO: 8899 - RNA, 22 nt, synthetic construct
  source 1..22: mol_type = other RNA
atacttaggttatggaaaccaa

SEQ ID NO: 8900 - RNA, 22 nt, synthetic construct
  source 1..22: mol_type = other RNA
atacttttcacactcttcctct

SEQ ID NO: 8901 - RNA, 22 nt, synthetic construct
  source 1..22: mol_type = other RNA
atagaactgcttgtgtccaagg

SEQ ID NO: 8902 - RNA, 22 nt, synthetic construct
  source 1..22: mol_type = other RNA
atagaagttcatagggctggtg

SEQ ID NO: 8903 - RNA, 22 nt, synthetic construct
  source 1..22: mol_type = other RNA
atagatatctgaagtgtgtgaa

SEQ ID NO: 8904 - RNA, 22 nt, synthetic construct
  source 1..22: mol_type = other RNA
atagccagagttttacatctaa

SEQ ID NO: 8905 - RNA, 22 nt, synthetic construct
  source 1..22: mol_type = other RNA
ataggaacccagatatggggag

SEQ ID NO: 8906 - RNA, 22 nt, synthetic construct
  source 1..22: mol_type = other RNA
ataggaatcaccccaccaggat

SEQ ID NO: 8907 - RNA, 22 nt, synthetic construct
  source 1..22: mol_type = other RNA
atagggctggtgcttccataga

SEQ ID NO: 8908 - RNA, 22 nt, synthetic construct
  source 1..22: mol_type = other RNA
ataggtatccaagccaagaccc

SEQ ID NO: 8909 - RNA, 22 nt, synthetic construct
  source 1..22: mol_type = other RNA
ataggtttccattgcattgata

SEQ ID NO: 8910 - RNA, 22 nt, synthetic construct
  source 1..22: mol_type = other RNA
atagtccatgtttggattgctc

SEQ ID NO: 8911 - RNA, 22 nt, synthetic construct
  source 1..22: mol_type = other RNA
atagtctgggccatacttttca

SEQ ID NO: 8912 - RNA, 22 nt, synthetic construct
  source 1..22: mol_type = other RNA
atatatatctgttgtaaggccc

SEQ ID NO: 8913 - RNA, 22 nt, synthetic construct
  source 1..22: mol_type = other RNA
atatatatgatatcaccccctt

SEQ ID NO: 8914 - RNA, 22 nt, synthetic construct
  source 1..22: mol_type = other RNA
atatatctgttgtaaggccctg

SEQ ID NO: 8915 - RNA, 22 nt, synthetic construct
  source 1..22: mol_type = other RNA
atatatgatatcaccccctttt

SEQ ID NO: 8916 - RNA, 22 nt, synthetic construct
  source 1..22: mol_type = other RNA
atatcaatgcaatggaaaccta

SEQ ID NO: 8917 - RNA, 22 nt, synthetic construct
  source 1..22: mol_type = other RNA
atatcacccccttttgttggtt

SEQ ID NO: 8918 - RNA, 22 nt, synthetic construct
  source 1..22: mol_type = other RNA
atatccatcatatcaatgcaat

SEQ ID NO: 8919 - RNA, 22 nt, synthetic construct
  source 1..22: mol_type = other RNA
atatctatggaagcaccagccc

SEQ ID NO: 8920 - RNA, 22 nt, synthetic construct
  source 1..22: mol_type = other RNA
atatctgaagtgtgtgaagagt

SEQ ID NO: 8921 - RNA, 22 nt, synthetic construct
  source 1..22: mol_type = other RNA
atatctgggttcctattctccc

SEQ ID NO: 8922 - RNA, 22 nt, synthetic construct
  source 1..22: mol_type = other RNA
atatctgttgtaaggccctgtg

SEQ ID NO: 8923 - RNA, 22 nt, synthetic construct
  source 1..22: mol_type = other RNA
atatgaacctgcagcttgagat

SEQ ID NO: 8924 - RNA, 22 nt, synthetic construct
  source 1..22: mol_type = other RNA
atatgatatcacccccttttgt

SEQ ID NO: 8925 - RNA, 22 nt, synthetic construct
  source 1..22: mol_type = other RNA
atatgatggatattgggtattc

SEQ ID NO: 8926 - RNA, 22 nt, synthetic construct
  source 1..22: mol_type = other RNA
atatgcagggagatggtttcag

SEQ ID NO: 8927 - RNA, 22 nt, synthetic construct
  source 1..22: mol_type = other RNA
atatgccttcactcgggtcaca

SEQ ID NO: 8928 - RNA, 22 nt, synthetic construct
  source 1..22: mol_type = other RNA
atatggagatgtagttactgtg

SEQ ID NO: 8929 - RNA, 22 nt, synthetic construct
  source 1..22: mol_type = other RNA
atatggggagcagttgtccact

SEQ ID NO: 8930 - RNA, 22 nt, synthetic construct
  source 1..22: mol_type = other RNA
atattgggtattctgattcaaa

SEQ ID NO: 8931 - RNA, 22 nt, synthetic construct
  source 1..22: mol_type = other RNA
atatttgaattcttctaatccc

SEQ ID NO: 8932 - RNA, 22 nt, synthetic construct
  source 1..22: mol_type = other RNA
atattttggtttccataaccta

SEQ ID NO: 8933 - RNA, 22 nt, synthetic construct
  source 1..22: mol_type = other RNA
atcaaagatgcttccagctctt

SEQ ID NO: 8934 - RNA, 22 nt, synthetic construct
  source 1..22: mol_type = other RNA
atcaagtctcttgccgaaagga

SEQ ID NO: 8935 - RNA, 22 nt, synthetic construct
  source 1..22: mol_type = other RNA
atcaatgcaatggaaacctatc

SEQ ID NO: 8936 - RNA, 22 nt, synthetic construct
  source 1..22: mol_type = other RNA
atcaccccaccaggatctccct

SEQ ID NO: 8937 - RNA, 22 nt, synthetic construct
  source 1..22: mol_type = other RNA
atcacccccttttgttggttac

SEQ ID NO: 8938 - RNA, 22 nt, synthetic construct
  source 1..22: mol_type = other RNA
atcaccctcagacagagtctgt

SEQ ID NO: 8939 - RNA, 22 nt, synthetic construct
  source 1..22: mol_type = other RNA
atcacttaatttgtgtaagcct

SEQ ID NO: 8940 - RNA, 22 nt, synthetic construct
  source 1..22: mol_type = other RNA
atcagaatacccaatatccatc

SEQ ID NO: 8941 - RNA, 22 nt, synthetic construct
  source 1..22: mol_type = other RNA
atcagtggacaactgctcccca

SEQ ID NO: 8942 - RNA, 22 nt, synthetic construct
  source 1..22: mol_type = other RNA
atcatatatatctgttgtaagg

SEQ ID NO: 8943 - RNA, 22 nt, synthetic construct
  source 1..22: mol_type = other RNA
atcatatcaatgcaatggaaac

SEQ ID NO: 8944 - RNA, 22 nt, synthetic construct
  source 1..22: mol_type = other RNA
atcatggttaagagctggaagc

SEQ ID NO: 8945 - RNA, 22 nt, synthetic construct
  source 1..22: mol_type = other RNA
atcatgtagggaaattgcctcc

SEQ ID NO: 8946 - RNA, 22 nt, synthetic construct
  source 1..22: mol_type = other RNA
atcattcaccttctcacataat

SEQ ID NO: 8947 - RNA, 22 nt, synthetic construct
  source 1..22: mol_type = other RNA
atccaaacatggactataaaaa

SEQ ID NO: 8948 - RNA, 22 nt, synthetic construct
  source 1..22: mol_type = other RNA
atccaaactcttcacacacttc

SEQ ID NO: 8949 - RNA, 22 nt, synthetic construct
  source 1..22: mol_type = other RNA
atccaagccaagaccctctgtc

SEQ ID NO: 8950 - RNA, 22 nt, synthetic construct
  source 1..22: mol_type = other RNA
atccaccaatccatacatgaga

SEQ ID NO: 8951 - RNA, 22 nt, synthetic construct
  source 1..22: mol_type = other RNA
atccagaaagctctgctcgctg

SEQ ID NO: 8952 - RNA, 22 nt, synthetic construct
  source 1..22: mol_type = other RNA
atccagaagcagaataagagtt

SEQ ID NO: 8953 - RNA, 22 nt, synthetic construct
  source 1..22: mol_type = other RNA
atccagttagtccttatccaaa

SEQ ID NO: 8954 - RNA, 22 nt, synthetic construct
  source 1..22: mol_type = other RNA
atccataactacagtgcagctc

SEQ ID NO: 8955 - RNA, 22 nt, synthetic construct
  source 1..22: mol_type = other RNA
atccatacactttaccagccaa

SEQ ID NO: 8956 - RNA, 22 nt, synthetic construct
  source 1..22: mol_type = other RNA
atccatacatgagacggcccaa

SEQ ID NO: 8957 - RNA, 22 nt, synthetic construct
  source 1..22: mol_type = other RNA
atccatcatatcaatgcaatgg

SEQ ID NO: 8958 - RNA, 22 nt, synthetic construct
  source 1..22: mol_type = other RNA
atccatcggctgagactgggga

SEQ ID NO: 8959 - RNA, 22 nt, synthetic construct
  source 1..22: mol_type = other RNA
atccatctcatgagtgggataa

SEQ ID NO: 8960 - RNA, 22 nt, synthetic construct
  source 1..22: mol_type = other RNA
atcccaataggaatcaccccac

SEQ ID NO: 8961 - RNA, 22 nt, synthetic construct
  source 1..22: mol_type = other RNA
atcccactcatgagatggatgg

SEQ ID NO: 8962 - RNA, 22 nt, synthetic construct
  source 1..22: mol_type = other RNA
atcccatgaacccttaccctgg

SEQ ID NO: 8963 - RNA, 22 nt, synthetic construct
  source 1..22: mol_type = other RNA
atcccatggcaaaaaagtgaaa

SEQ ID NO: 8964 - RNA, 22 nt, synthetic construct
  source 1..22: mol_type = other RNA
atcctgacattgggggagtggc

SEQ ID NO: 8965 - RNA, 22 nt, synthetic construct
  source 1..22: mol_type = other RNA
atcctggtggggtgattcctat

SEQ ID NO: 8966 - RNA, 22 nt, synthetic construct
  source 1..22: mol_type = other RNA
atcggctgagactggggagaat

SEQ ID NO: 8967 - RNA, 22 nt, synthetic construct
  source 1..22: mol_type = other RNA
atcgttgtcctctgcaccagaa

SEQ ID NO: 8968 - RNA, 22 nt, synthetic construct
  source 1..22: mol_type = other RNA
atctaaatacttaggttatgga

SEQ ID NO: 8969 - RNA, 22 nt, synthetic construct
  source 1..22: mol_type = other RNA
atctagaggtggctcccatgaa

SEQ ID NO: 8970 - RNA, 22 nt, synthetic construct
  source 1..22: mol_type = other RNA
atctatggaagcaccagcccta

SEQ ID NO: 8971 - RNA, 22 nt, synthetic construct
  source 1..22: mol_type = other RNA
atctcaagctgcaggttcatat

SEQ ID NO: 8972 - RNA, 22 nt, synthetic construct
  source 1..22: mol_type = other RNA
atctcatgagtgggataaggag

SEQ ID NO: 8973 - RNA, 22 nt, synthetic construct
  source 1..22: mol_type = other RNA
atctccaaaacaaggagaatga

SEQ ID NO: 8974 - RNA, 22 nt, synthetic construct
  source 1..22: mol_type = other RNA
atctccatatgccttcactcgg

SEQ ID NO: 8975 - RNA, 22 nt, synthetic construct
  source 1..22: mol_type = other RNA
atctccctcgtcttttaccagc

SEQ ID NO: 8976 - RNA, 22 nt, synthetic construct
  source 1..22: mol_type = other RNA
atctccctgcatattttggttt

SEQ ID NO: 8977 - RNA, 22 nt, synthetic construct
  source 1..22: mol_type = other RNA
atctgaagtgtgtgaagagttt

SEQ ID NO: 8978 - RNA, 22 nt, synthetic construct
  source 1..22: mol_type = other RNA
atctgagcaatccaaacatgga

SEQ ID NO: 8979 - RNA, 22 nt, synthetic construct
  source 1..22: mol_type = other RNA
atctgggttcctattctcccca

SEQ ID NO: 8980 - RNA, 22 nt, synthetic construct
  source 1..22: mol_type = other RNA
atctgtataggtatccaagcca

SEQ ID NO: 8981 - RNA, 22 nt, synthetic construct
  source 1..22: mol_type = other RNA
atctgttgtaaggccctgtgac

SEQ ID NO: 8982 - RNA, 22 nt, synthetic construct
  source 1..22: mol_type = other RNA
atctttgataacccattagctg

SEQ ID NO: 8983 - RNA, 22 nt, synthetic construct
  source 1..22: mol_type = other RNA
atgaaacgcaggtaagtgggct

SEQ ID NO: 8984 - RNA, 22 nt, synthetic construct
  source 1..22: mol_type = other RNA
atgaaacttcagagcccactta

SEQ ID NO: 8985 - RNA, 22 nt, synthetic construct
  source 1..22: mol_type = other RNA
atgaacccttaccctgggcttt

SEQ ID NO: 8986 - RNA, 22 nt, synthetic construct
  source 1..22: mol_type = other RNA
atgaacctgcagcttgagatga

SEQ ID NO: 8987 - RNA, 22 nt, synthetic construct
  source 1..22: mol_type = other RNA
atgaacttctattccacctcat

SEQ ID NO: 8988 - RNA, 22 nt, synthetic construct
  source 1..22: mol_type = other RNA
atgaagagagctgttgaacatg

SEQ ID NO: 8989 - RNA, 22 nt, synthetic construct
  source 1..22: mol_type = other RNA
atgaagtggccatccatctcat

SEQ ID NO: 8990 - RNA, 22 nt, synthetic construct
  source 1..22: mol_type = other RNA
atgaatgagccaaaacatggct

SEQ ID NO: 8991 - RNA, 22 nt, synthetic construct
  source 1..22: mol_type = other RNA
atgacatgctttcccacacagc

SEQ ID NO: 8992 - RNA, 22 nt, synthetic construct
  source 1..22: mol_type = other RNA
atgactggtcctgaaagtcgca

SEQ ID NO: 8993 - RNA, 22 nt, synthetic construct
  source 1..22: mol_type = other RNA
atgagaattgacccatgagttg

SEQ ID NO: 8994 - RNA, 22 nt, synthetic construct
  source 1..22: mol_type = other RNA
atgagacggcccaatccagtta

SEQ ID NO: 8995 - RNA, 22 nt, synthetic construct
  source 1..22: mol_type = other RNA
atgagatggatggccacttcat

SEQ ID NO: 8996 - RNA, 22 nt, synthetic construct
  source 1..22: mol_type = other RNA
atgagccaaaacatggcttggc

SEQ ID NO: 8997 - RNA, 22 nt, synthetic construct
  source 1..22: mol_type = other RNA
atgaggtctggtcagacagcga

SEQ ID NO: 8998 - RNA, 22 nt, synthetic construct
  source 1..22: mol_type = other RNA
atgaggtggaatagaagttcat

SEQ ID NO: 8999 - RNA, 22 nt, synthetic construct
  source 1..22: mol_type = other RNA
atgagtgggataaggaggcaat

SEQ ID NO: 9000 - RNA, 22 nt, synthetic construct
  source 1..22: mol_type = other RNA
atgagttggagccacggccact

SEQ ID NO: 9001 - RNA, 22 nt, synthetic construct
  source 1..22: mol_type = other RNA
atgatagaactgcttgtgtcca

SEQ ID NO: 9002 - RNA, 22 nt, synthetic construct
  source 1..22: mol_type = other RNA
atgatatcacccccttttgttg

SEQ ID NO: 9003 - RNA, 22 nt, synthetic construct
  source 1..22: mol_type = other RNA
atgatggatattgggtattctg

SEQ ID NO: 9004 - RNA, 22 nt, synthetic construct
  source 1..22: mol_type = other RNA
atgatgtacatttggtctaatg

SEQ ID NO: 9005 - RNA, 22 nt, synthetic construct
  source 1..22: mol_type = other RNA
atgatgttcaccatttttatag

SEQ ID NO: 9006 - RNA, 22 nt, synthetic construct
  source 1..22: mol_type = other RNA
atgcaatggaaacctatcagtg

SEQ ID NO: 9007 - RNA, 22 nt, synthetic construct
  source 1..22: mol_type = other RNA
atgcagcagtcccagcagcccc

SEQ ID NO: 9008 - RNA, 22 nt, synthetic construct
  source 1..22: mol_type = other RNA
atgcagctcacgctttgcacac

SEQ ID NO: 9009 - RNA, 22 nt, synthetic construct
  source 1..22: mol_type = other RNA
atgcagggagatggtttcagca

SEQ ID NO: 9010 - RNA, 22 nt, synthetic construct
  source 1..22: mol_type = other RNA
atgcagggcatgaagagagctg

SEQ ID NO: 9011 - RNA, 22 nt, synthetic construct
  source 1..22: mol_type = other RNA
atgccacaacccctttaaagaa

SEQ ID NO: 9012 - RNA, 22 nt, synthetic construct
  source 1..22: mol_type = other RNA
atgcccggagctgcactgtagt

SEQ ID NO: 9013 - RNA, 22 nt, synthetic construct
  source 1..22: mol_type = other RNA
atgccctgcatctccaaaacaa

SEQ ID NO: 9014 - RNA, 22 nt, synthetic construct
  source 1..22: mol_type = other RNA
atgccttcactcgggtcacagg

SEQ ID NO: 9015 - RNA, 22 nt, synthetic construct
  source 1..22: mol_type = other RNA
atgctaatggtcaggaaaagca

SEQ ID NO: 9016 - RNA, 22 nt, synthetic construct
  source 1..22: mol_type = other RNA
atgctcttatgctggtaaaaga

SEQ ID NO: 9017 - RNA, 22 nt, synthetic construct
  source 1..22: mol_type = other RNA
atgctggtaaaagacgagggag

SEQ ID NO: 9018 - RNA, 22 nt, synthetic construct
  source 1..22: mol_type = other RNA
atgcttccagctcttaaccatg

SEQ ID NO: 9019 - RNA, 22 nt, synthetic construct
  source 1..22: mol_type = other RNA
atgctttcccacacagctaatg

SEQ ID NO: 9020 - RNA, 22 nt, synthetic construct
  source 1..22: mol_type = other RNA
atggaaaccaaaatatgcaggg

SEQ ID NO: 9021 - RNA, 22 nt, synthetic construct
  source 1..22: mol_type = other RNA
atggaaacctatcagtggacaa

SEQ ID NO: 9022 - RNA, 22 nt, synthetic construct
  source 1..22: mol_type = other RNA
atggaagcaccagccctatgaa

SEQ ID NO: 9023 - RNA, 22 nt, synthetic construct
  source 1..22: mol_type = other RNA
atggactataaaaatggtgaac

SEQ ID NO: 9024 - RNA, 22 nt, synthetic construct
  source 1..22: mol_type = other RNA
atggagatgtagttactgtgga

SEQ ID NO: 9025 - RNA, 22 nt, synthetic construct
  source 1..22: mol_type = other RNA
atggatattgggtattctgatt

SEQ ID NO: 9026 - RNA, 22 nt, synthetic construct
  source 1..22: mol_type = other RNA
atggatctgtataggtatccaa

SEQ ID NO: 9027 - RNA, 22 nt, synthetic construct
  source 1..22: mol_type = other RNA
atggatggccacttcatgggag

SEQ ID NO: 9028 - RNA, 22 nt, synthetic construct
  source 1..22: mol_type = other RNA
atggatgggtggtagactgagc

SEQ ID NO: 9029 - RNA, 22 nt, synthetic construct
  source 1..22: mol_type = other RNA
atggattatgtgagaaggtgaa

SEQ ID NO: 9030 - RNA, 22 nt, synthetic construct
  source 1..22: mol_type = other RNA
atggattggtggatccagaagc

SEQ ID NO: 9031 - RNA, 22 nt, synthetic construct
  source 1..22: mol_type = other RNA
atggcaaaaaagtgaaacggga

SEQ ID NO: 9032 - RNA, 22 nt, synthetic construct
  source 1..22: mol_type = other RNA
atggccacttcatgggagccac

SEQ ID NO: 9033 - RNA, 22 nt, synthetic construct
  source 1..22: mol_type = other RNA
atggcccagactatgtgcctca

SEQ ID NO: 9034 - RNA, 22 nt, synthetic construct
  source 1..22: mol_type = other RNA
atggctgaaaaagcccgtgaga

SEQ ID NO: 9035 - RNA, 22 nt, synthetic construct
  source 1..22: mol_type = other RNA
atggctgcttttcctgaccatt

SEQ ID NO: 9036 - RNA, 22 nt, synthetic construct
  source 1..22: mol_type = other RNA
atggcttggctctttgggaagc

SEQ ID NO: 9037 - RNA, 22 nt, synthetic construct
  source 1..22: mol_type = other RNA
atgggagccacctctagattac

SEQ ID NO: 9038 - RNA, 22 nt, synthetic construct
  source 1..22: mol_type = other RNA
atgggattagaagaattcaaat

SEQ ID NO: 9039 - RNA, 22 nt, synthetic construct
  source 1..22: mol_type = other RNA
atgggatttctgaggcacatag

SEQ ID NO: 9040 - RNA, 22 nt, synthetic construct
  source 1..22: mol_type = other RNA
atggggagcagttgtccactga

SEQ ID NO: 9041 - RNA, 22 nt, synthetic construct
  source 1..22: mol_type = other RNA
atgggtcaattctcattgagtg

SEQ ID NO: 9042 - RNA, 22 nt, synthetic construct
  source 1..22: mol_type = other RNA
atgggtggtagactgagcttag

SEQ ID NO: 9043 - RNA, 22 nt, synthetic construct
  source 1..22: mol_type = other RNA
atgggttatcaaagatgcttcc

SEQ ID NO: 9044 - RNA, 22 nt, synthetic construct
  source 1..22: mol_type = other RNA
atggtacaactgctgaaaccat

SEQ ID NO: 9045 - RNA, 22 nt, synthetic construct
  source 1..22: mol_type = other RNA
atggtcaggaaaagcagccatt

SEQ ID NO: 9046 - RNA, 22 nt, synthetic construct
  source 1..22: mol_type = other RNA
atggtcctttcggcaagagact

SEQ ID NO: 9047 - RNA, 22 nt, synthetic construct
  source 1..22: mol_type = other RNA
atggtgaacatcattcaccttc

SEQ ID NO: 9048 - RNA, 22 nt, synthetic construct
  source 1..22: mol_type = other RNA
atggttaagagctggaagcatc

SEQ ID NO: 9049 - RNA, 22 nt, synthetic construct
  source 1..22: mol_type = other RNA
atggtttcagcagttgtaccat

SEQ ID NO: 9050 - RNA, 22 nt, synthetic construct
  source 1..22: mol_type = other RNA
atgtaaaactctggctatttcc

SEQ ID NO: 9051 - RNA, 22 nt, synthetic construct
  source 1..22: mol_type = other RNA
atgtacatcatgtagggaaatt

SEQ ID NO: 9052 - RNA, 22 nt, synthetic construct
  source 1..22: mol_type = other RNA
atgtacatttggtctaatggta

SEQ ID NO: 9053 - RNA, 22 nt, synthetic construct
  source 1..22: mol_type = other RNA
atgtagggaaattgcctcctta

SEQ ID NO: 9054 - RNA, 22 nt, synthetic construct
  source 1..22: mol_type = other RNA
atgtagttactgtggagtctgt

SEQ ID NO: 9055 - RNA, 22 nt, synthetic construct
  source 1..22: mol_type = other RNA
atgtatggattggtggatccag

SEQ ID NO: 9056 - RNA, 22 nt, synthetic construct
  source 1..22: mol_type = other RNA
atgtcaggatccagaaagctct

SEQ ID NO: 9057 - RNA, 22 nt, synthetic construct
  source 1..22: mol_type = other RNA
atgtcattctccttgttttgga

SEQ ID NO: 9058 - RNA, 22 nt, synthetic construct
  source 1..22: mol_type = other RNA
atgtccgtgaccacagactcca

SEQ ID NO: 9059 - RNA, 22 nt, synthetic construct
  source 1..22: mol_type = other RNA
atgtgagaaggtgaatgatgtt

SEQ ID NO: 9060 - RNA, 22 nt, synthetic construct
  source 1..22: mol_type = other RNA
atgtgcctcagaaatcccatgg

SEQ ID NO: 9061 - RNA, 22 nt, synthetic construct
  source 1..22: mol_type = other RNA
atgtggctcagcaggctcccgt

SEQ ID NO: 9062 - RNA, 22 nt, synthetic construct
  source 1..22: mol_type = other RNA
atgtggctgctgctgctggggt

SEQ ID NO: 9063 - RNA, 22 nt, synthetic construct
  source 1..22: mol_type = other RNA
atgttcaacagctctcttcatg

SEQ ID NO: 9064 - RNA, 22 nt, synthetic construct
  source 1..22: mol_type = other RNA
atgttcaccatttttatagtcc

SEQ ID NO: 9065 - RNA, 22 nt, synthetic construct
  source 1..22: mol_type = other RNA
atgtttggattgctcagattgg

SEQ ID NO: 9066 - RNA, 22 nt, synthetic construct
  source 1..22: mol_type = other RNA
atgttttggctcattcatgctc

SEQ ID NO: 9067 - RNA, 22 nt, synthetic construct
  source 1..22: mol_type = other RNA
attaagtgatgctaatggtcag

SEQ ID NO: 9068 - RNA, 22 nt, synthetic construct
  source 1..22: mol_type = other RNA
attaccacccaatctgagcaat

SEQ ID NO: 9069 - RNA, 22 nt, synthetic construct
  source 1..22: mol_type = other RNA
attagaccaaatgtacatcatg

SEQ ID NO: 9070 - RNA, 22 nt, synthetic construct
  source 1..22: mol_type = other RNA
attagcatcacttaatttgtgt

SEQ ID NO: 9071 - RNA, 22 nt, synthetic construct
  source 1..22: mol_type = other RNA
attagctgtgtgggaaagcatg

SEQ ID NO: 9072 - RNA, 22 nt, synthetic construct
  source 1..22: mol_type = other RNA
attatgtgagaaggtgaatgat

SEQ ID NO: 9073 - RNA, 22 nt, synthetic construct
  source 1..22: mol_type = other RNA
attcaaaagcccagggtaaggg

SEQ ID NO: 9074 - RNA, 22 nt, synthetic construct
  source 1..22: mol_type = other RNA
attcaaatatgaacctgcagct

SEQ ID NO: 9075 - RNA, 22 nt, synthetic construct
  source 1..22: mol_type = other RNA
attcaccttctcacataatcca

SEQ ID NO: 9076 - RNA, 22 nt, synthetic construct
  source 1..22: mol_type = other RNA
attcatgctcttatgctggtaa

SEQ ID NO: 9077 - RNA, 22 nt, synthetic construct
  source 1..22: mol_type = other RNA
attccacctcatctcaagctgc

SEQ ID NO: 9078 - RNA, 22 nt, synthetic construct
  source 1..22: mol_type = other RNA
attcctattgggattctttaaa

SEQ ID NO: 9079 - RNA, 22 nt, synthetic construct
  source 1..22: mol_type = other RNA
attctcattgagtgtgcaaagc

SEQ ID NO: 9080 - RNA, 22 nt, synthetic construct
  source 1..22: mol_type = other RNA
attctccccagtctcagccgat

SEQ ID NO: 9081 - RNA, 22 nt, synthetic construct
  source 1..22: mol_type = other RNA
attctccttgttttggagatgc

SEQ ID NO: 9082 - RNA, 22 nt, synthetic construct
  source 1..22: mol_type = other RNA
attctgattcaaaagcccaggg

SEQ ID NO: 9083 - RNA, 22 nt, synthetic construct
  source 1..22: mol_type = other RNA
attctgcttctggatccaccaa

SEQ ID NO: 9084 - RNA, 22 nt, synthetic construct
  source 1..22: mol_type = other RNA
attcttctaatcccatgaaccc

SEQ ID NO: 9085 - RNA, 22 nt, synthetic construct
  source 1..22: mol_type = other RNA
attctttaaaggggttgtggca

SEQ ID NO: 9086 - RNA, 22 nt, synthetic construct
  source 1..22: mol_type = other RNA
attgacccatgagttggagcca

SEQ ID NO: 9087 - RNA, 22 nt, synthetic construct
  source 1..22: mol_type = other RNA
attgagtgtgcaaagcgtgagc

SEQ ID NO: 9088 - RNA, 22 nt, synthetic construct
  source 1..22: mol_type = other RNA
attgatatgatggatattgggt

SEQ ID NO: 9089 - RNA, 22 nt, synthetic construct
  source 1..22: mol_type = other RNA
attgcattgatatgatggatat

SEQ ID NO: 9090 - RNA, 22 nt, synthetic construct
  source 1..22: mol_type = other RNA
attgcctccttatcccactcat

SEQ ID NO: 9091 - RNA, 22 nt, synthetic construct
  source 1..22: mol_type = other RNA
attgctcagattgggtggtaat

SEQ ID NO: 9092 - RNA, 22 nt, synthetic construct
  source 1..22: mol_type = other RNA
attggcactagtccagggtgtg

SEQ ID NO: 9093 - RNA, 22 nt, synthetic construct
  source 1..22: mol_type = other RNA
attgggattctttaaaggggtt

SEQ ID NO: 9094 - RNA, 22 nt, synthetic construct
  source 1..22: mol_type = other RNA
attgggccgtctcatgtatgga

SEQ ID NO: 9095 - RNA, 22 nt, synthetic construct
  source 1..22: mol_type = other RNA
attgggggagtggccgtggctc

SEQ ID NO: 9096 - RNA, 22 nt, synthetic construct
  source 1..22: mol_type = other RNA
attgggtattctgattcaaaag

SEQ ID NO: 9097 - RNA, 22 nt, synthetic construct
  source 1..22: mol_type = other RNA
attgggtggtaatctagaggtg

SEQ ID NO: 9098 - RNA, 22 nt, synthetic construct
  source 1..22: mol_type = other RNA
attggtggatccagaagcagaa

SEQ ID NO: 9099 - RNA, 22 nt, synthetic construct
  source 1..22: mol_type = other RNA
atttagatgtaaaactctggct

SEQ ID NO: 9100 - RNA, 22 nt, synthetic construct
  source 1..22: mol_type = other RNA
atttccaaaccttggctggtaa

SEQ ID NO: 9101 - RNA, 22 nt, synthetic construct
  source 1..22: mol_type = other RNA
atttccctacatgatgtacatt

SEQ ID NO: 9102 - RNA, 22 nt, synthetic construct
  source 1..22: mol_type = other RNA
atttctgaggcacatagtctgg

SEQ ID NO: 9103 - RNA, 22 nt, synthetic construct
  source 1..22: mol_type = other RNA
atttgaattcttctaatcccat

SEQ ID NO: 9104 - RNA, 22 nt, synthetic construct
  source 1..22: mol_type = other RNA
atttggtctaatggtacaactg

SEQ ID NO: 9105 - RNA, 22 nt, synthetic construct
  source 1..22: mol_type = other RNA
atttgtgtaagcctccttggac

SEQ ID NO: 9106 - RNA, 22 nt, synthetic construct
  source 1..22: mol_type = other RNA
attttggcttcccaaagagcca

SEQ ID NO: 9107 - RNA, 22 nt, synthetic construct
  source 1..22: mol_type = other RNA
attttggtttccataacctaag

SEQ ID NO: 9108 - RNA, 22 nt, synthetic construct
  source 1..22: mol_type = other RNA
atttttatagtccatgtttgga

SEQ ID NO: 9109 - RNA, 22 nt, synthetic construct
  source 1..22: mol_type = other RNA
caaaaaagtgaaacgggagcct

SEQ ID NO: 9110 - RNA, 22 nt, synthetic construct
  source 1..22: mol_type = other RNA
caaaacaaggagaatgacatgc

SEQ ID NO: 9111 - RNA, 22 nt, synthetic construct
  source 1..22: mol_type = other RNA
caaaacatggcttggctctttg

SEQ ID NO: 9112 - RNA, 22 nt, synthetic construct
  source 1..22: mol_type = other RNA
caaaagcccagggtaagggttc

SEQ ID NO: 9113 - RNA, 22 nt, synthetic construct
  source 1..22: mol_type = other RNA
caaaagggggtgatatcatata

SEQ ID NO: 9114 - RNA, 22 nt, synthetic construct
  source 1..22: mol_type = other RNA
caaaagttctgtggacagggta

SEQ ID NO: 9115 - RNA, 22 nt, synthetic construct
  source 1..22: mol_type = other RNA
caaaatatgcagggagatggtt

SEQ ID NO: 9116 - RNA, 22 nt, synthetic construct
  source 1..22: mol_type = other RNA
caaaatggctgaaaaagcccgt

SEQ ID NO: 9117 - RNA, 22 nt, synthetic construct
  source 1..22: mol_type = other RNA
caaacatggactataaaaatgg

SEQ ID NO: 9118 - RNA, 22 nt, synthetic construct
  source 1..22: mol_type = other RNA
caaaccttggctggtaaagtgt

SEQ ID NO: 9119 - RNA, 22 nt, synthetic construct
  source 1..22: mol_type = other RNA
caaactcttcacacacttcaga

SEQ ID NO: 9120 - RNA, 22 nt, synthetic construct
  source 1..22: mol_type = other RNA
caaagagccaagccatgttttg

SEQ ID NO: 9121 - RNA, 22 nt, synthetic construct
  source 1..22: mol_type = other RNA
caaagatgcttccagctcttaa

SEQ ID NO: 9122 - RNA, 22 nt, synthetic construct
  source 1..22: mol_type = other RNA
caaagcgtgagctgcatgccac

SEQ ID NO: 9123 - RNA, 22 nt, synthetic construct
  source 1..22: mol_type = other RNA
caaatatgaacctgcagcttga

SEQ ID NO: 9124 - RNA, 22 nt, synthetic construct
  source 1..22: mol_type = other RNA
caaatgtacatcatgtagggaa

SEQ ID NO: 9125 - RNA, 22 nt, synthetic construct
  source 1..22: mol_type = other RNA
caaattaagtgatgctaatggt

SEQ ID NO: 9126 - RNA, 22 nt, synthetic construct
  source 1..22: mol_type = other RNA
caacaaaagggggtgatatcat

SEQ ID NO: 9127 - RNA, 22 nt, synthetic construct
  source 1..22: mol_type = other RNA
caacagatatatatgatatcac

SEQ ID NO: 9128 - RNA, 22 nt, synthetic construct
  source 1..22: mol_type = other RNA
caacagctctcttcatgccctg

SEQ ID NO: 9129 - RNA, 22 nt, synthetic construct
  source 1..22: mol_type = other RNA
caacccctttaaagaatcccaa

SEQ ID NO: 9130 - RNA, 22 nt, synthetic construct
  source 1..22: mol_type = other RNA
caacgatgaggtctggtcagac

SEQ ID NO: 9131 - RNA, 22 nt, synthetic construct
  source 1..22: mol_type = other RNA
caactcatgggtcaattctcat

SEQ ID NO: 9132 - RNA, 22 nt, synthetic construct
  source 1..22: mol_type = other RNA
caactcttattctgcttctgga

SEQ ID NO: 9133 - RNA, 22 nt, synthetic construct
  source 1..22: mol_type = other RNA
caactgctccccatatctgggt

SEQ ID NO: 9134 - RNA, 22 nt, synthetic construct
  source 1..22: mol_type = other RNA
caactgctgaaaccatctccct

SEQ ID NO: 9135 - RNA, 22 nt, synthetic construct
  source 1..22: mol_type = other RNA
caagaccctctgtctaagctca

SEQ ID NO: 9136 - RNA, 22 nt, synthetic construct
  source 1..22: mol_type = other RNA
caagagacttgatgaaacgcag

SEQ ID NO: 9137 - RNA, 22 nt, synthetic construct
  source 1..22: mol_type = other RNA
caagcagttctatcatggttaa

SEQ ID NO: 9138 - RNA, 22 nt, synthetic construct
  source 1..22: mol_type = other RNA
caagccaagaccctctgtctaa

SEQ ID NO: 9139 - RNA, 22 nt, synthetic construct
  source 1..22: mol_type = other RNA
caagccatgttttggctcattc

SEQ ID NO: 9140 - RNA, 22 nt, synthetic construct
  source 1..22: mol_type = other RNA
caagctgcaggttcatatttga

SEQ ID NO: 9141 - RNA, 22 nt, synthetic construct
  source 1..22: mol_type = other RNA
caaggagaatgacatgctttcc

SEQ ID NO: 9142 - RNA, 22 nt, synthetic construct
  source 1..22: mol_type = other RNA
caaggaggcttacacaaattaa

SEQ ID NO: 9143 - RNA, 22 nt, synthetic construct
  source 1..22: mol_type = other RNA
caaggtttggaaatagccagag

SEQ ID NO: 9144 - RNA, 22 nt, synthetic construct
  source 1..22: mol_type = other RNA
caagtctcttgccgaaaggacc

SEQ ID NO: 9145 - RNA, 22 nt, synthetic construct
  source 1..22: mol_type = other RNA
caagtgaggtaaccaacaaaag

SEQ ID NO: 9146 - RNA, 22 nt, synthetic construct
  source 1..22: mol_type = other RNA
caataggaatcaccccaccagg

SEQ ID NO: 9147 - RNA, 22 nt, synthetic construct
  source 1..22: mol_type = other RNA
caatatccatcatatcaatgca

SEQ ID NO: 9148 - RNA, 22 nt, synthetic construct
  source 1..22: mol_type = other RNA
caatccaaacatggactataaa

SEQ ID NO: 9149 - RNA, 22 nt, synthetic construct
  source 1..22: mol_type = other RNA
caatccagttagtccttatcca

SEQ ID NO: 9150 - RNA, 22 nt, synthetic construct
  source 1..22: mol_type = other RNA
caatccatacatgagacggccc

SEQ ID NO: 9151 - RNA, 22 nt, synthetic construct
  source 1..22: mol_type = other RNA
caatctgagcaatccaaacatg

SEQ ID NO: 9152 - RNA, 22 nt, synthetic construct
  source 1..22: mol_type = other RNA
caatgagaattgacccatgagt

SEQ ID NO: 9153 - RNA, 22 nt, synthetic construct
  source 1..22: mol_type = other RNA
caatgcaatggaaacctatcag

SEQ ID NO: 9154 - RNA, 22 nt, synthetic construct
  source 1..22: mol_type = other RNA
caatggaaacctatcagtggac

SEQ ID NO: 9155 - RNA, 22 nt, synthetic construct
  source 1..22: mol_type = other RNA
caatggctgcttttcctgacca

SEQ ID NO: 9156 - RNA, 22 nt, synthetic construct
  source 1..22: mol_type = other RNA
caatgtcaggatccagaaagct

SEQ ID NO: 9157 - RNA, 22 nt, synthetic construct
  source 1..22: mol_type = other RNA
caattctcattgagtgtgcaaa

SEQ ID NO: 9158 - RNA, 22 nt, synthetic construct
  source 1..22: mol_type = other RNA
caatttccctacatgatgtaca

SEQ ID NO: 9159 - RNA, 22 nt, synthetic construct
  source 1..22: mol_type = other RNA
cacaaattaagtgatgctaatg

SEQ ID NO: 9160 - RNA, 22 nt, synthetic construct
  source 1..22: mol_type = other RNA
cacaacccctttaaagaatccc

SEQ ID NO: 9161 - RNA, 22 nt, synthetic construct
  source 1..22: mol_type = other RNA
cacaagcagttctatcatggtt

SEQ ID NO: 9162 - RNA, 22 nt, synthetic construct
  source 1..22: mol_type = other RNA
cacacacttcagatatctatgg

SEQ ID NO: 9163 - RNA, 22 nt, synthetic construct
  source 1..22: mol_type = other RNA
cacacagctaatgggttatcaa

SEQ ID NO: 9164 - RNA, 22 nt, synthetic construct
  source 1..22: mol_type = other RNA
cacaccctggactagtgccaat

SEQ ID NO: 9165 - RNA, 22 nt, synthetic construct
  source 1..22: mol_type = other RNA
cacactcaatgagaattgaccc

SEQ ID NO: 9166 - RNA, 22 nt, synthetic construct
  source 1..22: mol_type = other RNA
cacactcttcctctttctcacg

SEQ ID NO: 9167 - RNA, 22 nt, synthetic construct
  source 1..22: mol_type = other RNA
cacacttcagatatctatggaa

SEQ ID NO: 9168 - RNA, 22 nt, synthetic construct
  source 1..22: mol_type = other RNA
cacagaacttttgcgactttca

SEQ ID NO: 9169 - RNA, 22 nt, synthetic construct
  source 1..22: mol_type = other RNA
cacagactccacagtaactaca

SEQ ID NO: 9170 - RNA, 22 nt, synthetic construct
  source 1..22: mol_type = other RNA
cacagccccagcagcagcagag

SEQ ID NO: 9171 - RNA, 22 nt, synthetic construct
  source 1..22: mol_type = other RNA
cacagctaatgggttatcaaag

SEQ ID NO: 9172 - RNA, 22 nt, synthetic construct
  source 1..22: mol_type = other RNA
cacagggccttacaacagatat

SEQ ID NO: 9173 - RNA, 22 nt, synthetic construct
  source 1..22: mol_type = other RNA
cacagtaactacatctccatat

SEQ ID NO: 9174 - RNA, 22 nt, synthetic construct
  source 1..22: mol_type = other RNA
cacataatccataactacagtg

SEQ ID NO: 9175 - RNA, 22 nt, synthetic construct
  source 1..22: mol_type = other RNA
cacatagtctgggccatacttt

SEQ ID NO: 9176 - RNA, 22 nt, synthetic construct
  source 1..22: mol_type = other RNA
cacatcaccctcagacagagtc

SEQ ID NO: 9177 - RNA, 22 nt, synthetic construct
  source 1..22: mol_type = other RNA
cacatgaaacttcagagcccac

SEQ ID NO: 9178 - RNA, 22 nt, synthetic construct
  source 1..22: mol_type = other RNA
caccaatccatacatgagacgg

SEQ ID NO: 9179 - RNA, 22 nt, synthetic construct
  source 1..22: mol_type = other RNA
caccacagccccagcagcagca

SEQ ID NO: 9180 - RNA, 22 nt, synthetic construct
  source 1..22: mol_type = other RNA
caccagaagccacaccctggac

SEQ ID NO: 9181 - RNA, 22 nt, synthetic construct
  source 1..22: mol_type = other RNA
caccagccctatgaacttctat

SEQ ID NO: 9182 - RNA, 22 nt, synthetic construct
  source 1..22: mol_type = other RNA
caccaggatctccctcgtcttt

SEQ ID NO: 9183 - RNA, 22 nt, synthetic construct
  source 1..22: mol_type = other RNA
caccatttttatagtccatgtt

SEQ ID NO: 9184 - RNA, 22 nt, synthetic construct
  source 1..22: mol_type = other RNA
cacccaatctgagcaatccaaa

SEQ ID NO: 9185 - RNA, 22 nt, synthetic construct
  source 1..22: mol_type = other RNA
cacccatccatacactttacca

SEQ ID NO: 9186 - RNA, 22 nt, synthetic construct
  source 1..22: mol_type = other RNA
caccccaccaggatctccctcg

SEQ ID NO: 9187 - RNA, 22 nt, synthetic construct
  source 1..22: mol_type = other RNA
cacccccttttgttggttacct

SEQ ID NO: 9188 - RNA, 22 nt, synthetic construct
  source 1..22: mol_type = other RNA
caccctcagacagagtctgtca

SEQ ID NO: 9189 - RNA, 22 nt, synthetic construct
  source 1..22: mol_type = other RNA
caccctggactagtgccaatgg

SEQ ID NO: 9190 - RNA, 22 nt, synthetic construct
  source 1..22: mol_type = other RNA
cacctcatctcaagctgcaggt

SEQ ID NO: 9191 - RNA, 22 nt, synthetic construct
  source 1..22: mol_type = other RNA
cacctctagattaccacccaat

SEQ ID NO: 9192 - RNA, 22 nt, synthetic construct
  source 1..22: mol_type = other RNA
caccttctcacataatccataa

SEQ ID NO: 9193 - RNA, 22 nt, synthetic construct
  source 1..22: mol_type = other RNA
cacgctttgcacactcaatgag

SEQ ID NO: 9194 - RNA, 22 nt, synthetic construct
  source 1..22: mol_type = other RNA
cacggacatggtcctttcggca

SEQ ID NO: 9195 - RNA, 22 nt, synthetic construct
  source 1..22: mol_type = other RNA
cacggccactcccccaatgtca

SEQ ID NO: 9196 - RNA, 22 nt, synthetic construct
  source 1..22: mol_type = other RNA
cacgggctttttcagccatttt

SEQ ID NO: 9197 - RNA, 22 nt, synthetic construct
  source 1..22: mol_type = other RNA
cactagtccagggtgtggcttc

SEQ ID NO: 9198 - RNA, 22 nt, synthetic construct
  source 1..22: mol_type = other RNA
cactcaatgagaattgacccat

SEQ ID NO: 9199 - RNA, 22 nt, synthetic construct
  source 1..22: mol_type = other RNA
cactcatgagatggatggccac

SEQ ID NO: 9200 - RNA, 22 nt, synthetic construct
  source 1..22: mol_type = other RNA
cactcccccaatgtcaggatcc

SEQ ID NO: 9201 - RNA, 22 nt, synthetic construct
  source 1..22: mol_type = other RNA
cactcgggtcacagggccttac

SEQ ID NO: 9202 - RNA, 22 nt, synthetic construct
  source 1..22: mol_type = other RNA
cactcttcctctttctcacggg

SEQ ID NO: 9203 - RNA, 22 nt, synthetic construct
  source 1..22: mol_type = other RNA
cactgataggtttccattgcat

SEQ ID NO: 9204 - RNA, 22 nt, synthetic construct
  source 1..22: mol_type = other RNA
cactgtagttatggattatgtg

SEQ ID NO: 9205 - RNA, 22 nt, synthetic construct
  source 1..22: mol_type = other RNA
cacttaatttgtgtaagcctcc

SEQ ID NO: 9206 - RNA, 22 nt, synthetic construct
  source 1..22: mol_type = other RNA
cacttacctgcgtttcatcaag

SEQ ID NO: 9207 - RNA, 22 nt, synthetic construct
  source 1..22: mol_type = other RNA
cacttcagatatctatggaagc

SEQ ID NO: 9208 - RNA, 22 nt, synthetic construct
  source 1..22: mol_type = other RNA
cacttcatgggagccacctcta

SEQ ID NO: 9209 - RNA, 22 nt, synthetic construct
  source 1..22: mol_type = other RNA
cactttaccagccaaggtttgg

SEQ ID NO: 9210 - RNA, 22 nt, synthetic construct
  source 1..22: mol_type = other RNA
cacttttttgccatgggatttc

SEQ ID NO: 9211 - RNA, 22 nt, synthetic construct
  source 1..22: mol_type = other RNA
cagaaagctctgctcgctgtct

SEQ ID NO: 9212 - RNA, 22 nt, synthetic construct
  source 1..22: mol_type = other RNA
cagaaatcccatggcaaaaaag

SEQ ID NO: 9213 - RNA, 22 nt, synthetic construct
  source 1..22: mol_type = other RNA
cagaacttttgcgactttcagg

SEQ ID NO: 9214 - RNA, 22 nt, synthetic construct
  source 1..22: mol_type = other RNA
cagaagcagaataagagttgac

SEQ ID NO: 9215 - RNA, 22 nt, synthetic construct
  source 1..22: mol_type = other RNA
cagaagcagccaccacagcccc

SEQ ID NO: 9216 - RNA, 22 nt, synthetic construct
  source 1..22: mol_type = other RNA
cagaagccacaccctggactag

SEQ ID NO: 9217 - RNA, 22 nt, synthetic construct
  source 1..22: mol_type = other RNA
cagaataagagttgacagactc

SEQ ID NO: 9218 - RNA, 22 nt, synthetic construct
  source 1..22: mol_type = other RNA
cagaatacccaatatccatcat

SEQ ID NO: 9219 - RNA, 22 nt, synthetic construct
  source 1..22: mol_type = other RNA
cagacagagtctgtcaactctt

SEQ ID NO: 9220 - RNA, 22 nt, synthetic construct
  source 1..22: mol_type = other RNA
cagacagcgagcagagctttct

SEQ ID NO: 9221 - RNA, 22 nt, synthetic construct
  source 1..22: mol_type = other RNA
cagacctcatcgttgtcctctg

SEQ ID NO: 9222 - RNA, 22 nt, synthetic construct
  source 1..22: mol_type = other RNA
cagactatgtgcctcagaaatc

SEQ ID NO: 9223 - RNA, 22 nt, synthetic construct
  source 1..22: mol_type = other RNA
cagactccacagtaactacatc

SEQ ID NO: 9224 - RNA, 22 nt, synthetic construct
  source 1..22: mol_type = other RNA
cagactctgtctgagggtgatg

SEQ ID NO: 9225 - RNA, 22 nt, synthetic construct
  source 1..22: mol_type = other RNA
cagagaccccagcagcagcagc

SEQ ID NO: 9226 - RNA, 22 nt, synthetic construct
  source 1..22: mol_type = other RNA
cagagcccacttacctgcgttt

SEQ ID NO: 9227 - RNA, 22 nt, synthetic construct
  source 1..22: mol_type = other RNA
cagagctttctggatcctgaca

SEQ ID NO: 9228 - RNA, 22 nt, synthetic construct
  source 1..22: mol_type = other RNA
cagaggacaacgatgaggtctg

SEQ ID NO: 9229 - RNA, 22 nt, synthetic construct
  source 1..22: mol_type = other RNA
cagagggtcttggcttggatac

SEQ ID NO: 9230 - RNA, 22 nt, synthetic construct
  source 1..22: mol_type = other RNA
cagagtctgtcaactcttattc

SEQ ID NO: 9231 - RNA, 22 nt, synthetic construct
  source 1..22: mol_type = other RNA
cagagttttacatctaaatact

SEQ ID NO: 9232 - RNA, 22 nt, synthetic construct
  source 1..22: mol_type = other RNA
cagatatatatgatatcacccc

SEQ ID NO: 9233 - RNA, 22 nt, synthetic construct
  source 1..22: mol_type = other RNA
cagatatctatggaagcaccag

SEQ ID NO: 9234 - RNA, 22 nt, synthetic construct
  source 1..22: mol_type = other RNA
cagatatggggagcagttgtcc

SEQ ID NO: 9235 - RNA, 22 nt, synthetic construct
  source 1..22: mol_type = other RNA
cagatccatcggctgagactgg

SEQ ID NO: 9236 - RNA, 22 nt, synthetic construct
  source 1..22: mol_type = other RNA
cagattgggtggtaatctagag

SEQ ID NO: 9237 - RNA, 22 nt, synthetic construct
  source 1..22: mol_type = other RNA
cagcagagaccccagcagcagc

SEQ ID NO: 9238 - RNA, 22 nt, synthetic construct
  source 1..22: mol_type = other RNA
cagcagcagagaccccagcagc

SEQ ID NO: 9239 - RNA, 22 nt, synthetic construct
  source 1..22: mol_type = other RNA
cagcagcagcagagaccccagc

SEQ ID NO: 9240 - RNA, 22 nt, synthetic construct
  source 1..22: mol_type = other RNA
cagcagcagcagccacatcacc

SEQ ID NO: 9241 - RNA, 22 nt, synthetic construct
  source 1..22: mol_type = other RNA
cagcagcagccacatcaccctc

SEQ ID NO: 9242 - RNA, 22 nt, synthetic construct
  source 1..22: mol_type = other RNA
cagcagccacatcaccctcaga

SEQ ID NO: 9243 - RNA, 22 nt, synthetic construct
  source 1..22: mol_type = other RNA
cagcagccccagcctctacaga

SEQ ID NO: 9244 - RNA, 22 nt, synthetic construct
  source 1..22: mol_type = other RNA
cagcaggctcccgtttcacttt

SEQ ID NO: 9245 - RNA, 22 nt, synthetic construct
  source 1..22: mol_type = other RNA
cagcagtcccagcagccccagc

SEQ ID NO: 9246 - RNA, 22 nt, synthetic construct
  source 1..22: mol_type = other RNA
cagcagttgtaccattagacca

SEQ ID NO: 9247 - RNA, 22 nt, synthetic construct
  source 1..22: mol_type = other RNA
cagcataagagcatgaatgagc

SEQ ID NO: 9248 - RNA, 22 nt, synthetic construct
  source 1..22: mol_type = other RNA
cagccaaggtttggaaatagcc

SEQ ID NO: 9249 - RNA, 22 nt, synthetic construct
  source 1..22: mol_type = other RNA
cagccacatcaccctcagacag

SEQ ID NO: 9250 - RNA, 22 nt, synthetic construct
  source 1..22: mol_type = other RNA
cagccaccacagccccagcagc

SEQ ID NO: 9251 - RNA, 22 nt, synthetic construct
  source 1..22: mol_type = other RNA
cagccattggcactagtccagg

SEQ ID NO: 9252 - RNA, 22 nt, synthetic construct
  source 1..22: mol_type = other RNA
cagccattttggcttcccaaag

SEQ ID NO: 9253 - RNA, 22 nt, synthetic construct
  source 1..22: mol_type = other RNA
cagccccagcagcagcagagac

SEQ ID NO: 9254 - RNA, 22 nt, synthetic construct
  source 1..22: mol_type = other RNA
cagccccagcctctacagaagc

SEQ ID NO: 9255 - RNA, 22 nt, synthetic construct
  source 1..22: mol_type = other RNA
cagccctatgaacttctattcc

SEQ ID NO: 9256 - RNA, 22 nt, synthetic construct
  source 1..22: mol_type = other RNA
cagccgatggatctgtataggt

SEQ ID NO: 9257 - RNA, 22 nt, synthetic construct
  source 1..22: mol_type = other RNA
cagcctctacagaagcagccac

SEQ ID NO: 9258 - RNA, 22 nt, synthetic construct
  source 1..22: mol_type = other RNA
cagcgagcagagctttctggat

SEQ ID NO: 9259 - RNA, 22 nt, synthetic construct
  source 1..22: mol_type = other RNA
cagctaatgggttatcaaagat

SEQ ID NO: 9260 - RNA, 22 nt, synthetic construct
  source 1..22: mol_type = other RNA
cagctcacgctttgcacactca

SEQ ID NO: 9261 - RNA, 22 nt, synthetic construct
  source 1..22: mol_type = other RNA
cagctccgggcatgttcaacag

SEQ ID NO: 9262 - RNA, 22 nt, synthetic construct
  source 1..22: mol_type = other RNA
cagctctcttcatgccctgcat

SEQ ID NO: 9263 - RNA, 22 nt, synthetic construct
  source 1..22: mol_type = other RNA
cagctcttaaccatgatagaac

SEQ ID NO: 9264 - RNA, 22 nt, synthetic construct
  source 1..22: mol_type = other RNA
cagcttgagatgaggtggaata

SEQ ID NO: 9265 - RNA, 22 nt, synthetic construct
  source 1..22: mol_type = other RNA
caggaaaagcagccattggcac

SEQ ID NO: 9266 - RNA, 22 nt, synthetic construct
  source 1..22: mol_type = other RNA
caggaccagtcatgcagcagtc

SEQ ID NO: 9267 - RNA, 22 nt, synthetic construct
  source 1..22: mol_type = other RNA
caggatccagaaagctctgctc

SEQ ID NO: 9268 - RNA, 22 nt, synthetic construct
  source 1..22: mol_type = other RNA
caggatctccctcgtcttttac

SEQ ID NO: 9269 - RNA, 22 nt, synthetic construct
  source 1..22: mol_type = other RNA
caggctcccgtttcactttttt

SEQ ID NO: 9270 - RNA, 22 nt, synthetic construct
  source 1..22: mol_type = other RNA
cagggagatggtttcagcagtt

SEQ ID NO: 9271 - RNA, 22 nt, synthetic construct
  source 1..22: mol_type = other RNA
cagggcatgaagagagctgttg

SEQ ID NO: 9272 - RNA, 22 nt, synthetic construct
  source 1..22: mol_type = other RNA
cagggccttacaacagatatat

SEQ ID NO: 9273 - RNA, 22 nt, synthetic construct
  source 1..22: mol_type = other RNA
cagggtaagagagaacagaaac

SEQ ID NO: 9274 - RNA, 22 nt, synthetic construct
  source 1..22: mol_type = other RNA
cagggtaagggttcatgggatt

SEQ ID NO: 9275 - RNA, 22 nt, synthetic construct
  source 1..22: mol_type = other RNA
cagggtgtggcttctggtgcag

SEQ ID NO: 9276 - RNA, 22 nt, synthetic construct
  source 1..22: mol_type = other RNA
caggtaagtgggctctgaagtt

SEQ ID NO: 9277 - RNA, 22 nt, synthetic construct
  source 1..22: mol_type = other RNA
caggttcatatttgaattcttc

SEQ ID NO: 9278 - RNA, 22 nt, synthetic construct
  source 1..22: mol_type = other RNA
cagtaactacatctccatatgc

SEQ ID NO: 9279 - RNA, 22 nt, synthetic construct
  source 1..22: mol_type = other RNA
cagtcatgcagcagtcccagca

SEQ ID NO: 9280 - RNA, 22 nt, synthetic construct
  source 1..22: mol_type = other RNA
cagtcccagcagccccagcctc

SEQ ID NO: 9281 - RNA, 22 nt, synthetic construct
  source 1..22: mol_type = other RNA
cagtctaccacccatccataca

SEQ ID NO: 9282 - RNA, 22 nt, synthetic construct
  source 1..22: mol_type = other RNA
cagtctcagccgatggatctgt

SEQ ID NO: 9283 - RNA, 22 nt, synthetic construct
  source 1..22: mol_type = other RNA
cagtgcagctccgggcatgttc

SEQ ID NO: 9284 - RNA, 22 nt, synthetic construct
  source 1..22: mol_type = other RNA
cagtggacaactgctccccata

SEQ ID NO: 9285 - RNA, 22 nt, synthetic construct
  source 1..22: mol_type = other RNA
cagttagtccttatccaaactc

SEQ ID NO: 9286 - RNA, 22 nt, synthetic construct
  source 1..22: mol_type = other RNA
cagttctatcatggttaagagc

SEQ ID NO: 9287 - RNA, 22 nt, synthetic construct
  source 1..22: mol_type = other RNA
cagttgtaccattagaccaaat

SEQ ID NO: 9288 - RNA, 22 nt, synthetic construct
  source 1..22: mol_type = other RNA
cagttgtccactgataggtttc

SEQ ID NO: 9289 - RNA, 22 nt, synthetic construct
  source 1..22: mol_type = other RNA
cataacctaagtatttagatgt

SEQ ID NO: 9290 - RNA, 22 nt, synthetic construct
  source 1..22: mol_type = other RNA
cataactacagtgcagctccgg

SEQ ID NO: 9291 - RNA, 22 nt, synthetic construct
  source 1..22: mol_type = other RNA
cataagagcatgaatgagccaa

SEQ ID NO: 9292 - RNA, 22 nt, synthetic construct
  source 1..22: mol_type = other RNA
cataatccataactacagtgca

SEQ ID NO: 9293 - RNA, 22 nt, synthetic construct
  source 1..22: mol_type = other RNA
catacactttaccagccaaggt

SEQ ID NO: 9294 - RNA, 22 nt, synthetic construct
  source 1..22: mol_type = other RNA
catacatgagacggcccaatcc

SEQ ID NO: 9295 - RNA, 22 nt, synthetic construct
  source 1..22: mol_type = other RNA
catacttttcacactcttcctc

SEQ ID NO: 9296 - RNA, 22 nt, synthetic construct
  source 1..22: mol_type = other RNA
catagatatctgaagtgtgtga

SEQ ID NO: 9297 - RNA, 22 nt, synthetic construct
  source 1..22: mol_type = other RNA
catagggctggtgcttccatag

SEQ ID NO: 9298 - RNA, 22 nt, synthetic construct
  source 1..22: mol_type = other RNA
catagtctgggccatacttttc

SEQ ID NO: 9299 - RNA, 22 nt, synthetic construct
  source 1..22: mol_type = other RNA
catatatatctgttgtaaggcc

SEQ ID NO: 9300 - RNA, 22 nt, synthetic construct
  source 1..22: mol_type = other RNA
catatcaatgcaatggaaacct

SEQ ID NO: 9301 - RNA, 22 nt, synthetic construct
  source 1..22: mol_type = other RNA
catatctgggttcctattctcc

SEQ ID NO: 9302 - RNA, 22 nt, synthetic construct
  source 1..22: mol_type = other RNA
catatgccttcactcgggtcac

SEQ ID NO: 9303 - RNA, 22 nt, synthetic construct
  source 1..22: mol_type = other RNA
catatggagatgtagttactgt

SEQ ID NO: 9304 - RNA, 22 nt, synthetic construct
  source 1..22: mol_type = other RNA
catatttgaattcttctaatcc

SEQ ID NO: 9305 - RNA, 22 nt, synthetic construct
  source 1..22: mol_type = other RNA
catattttggtttccataacct

SEQ ID NO: 9306 - RNA, 22 nt, synthetic construct
  source 1..22: mol_type = other RNA
catcaagtctcttgccgaaagg

SEQ ID NO: 9307 - RNA, 22 nt, synthetic construct
  source 1..22: mol_type = other RNA
catcaccctcagacagagtctg

SEQ ID NO: 9308 - RNA, 22 nt, synthetic construct
  source 1..22: mol_type = other RNA
catcacttaatttgtgtaagcc

SEQ ID NO: 9309 - RNA, 22 nt, synthetic construct
  source 1..22: mol_type = other RNA
catcatatcaatgcaatggaaa

SEQ ID NO: 9310 - RNA, 22 nt, synthetic construct
  source 1..22: mol_type = other RNA
catcatgtagggaaattgcctc

SEQ ID NO: 9311 - RNA, 22 nt, synthetic construct
  source 1..22: mol_type = other RNA
catcattcaccttctcacataa

SEQ ID NO: 9312 - RNA, 22 nt, synthetic construct
  source 1..22: mol_type = other RNA
catccatacactttaccagcca

SEQ ID NO: 9313 - RNA, 22 nt, synthetic construct
  source 1..22: mol_type = other RNA
catccatctcatgagtgggata

SEQ ID NO: 9314 - RNA, 22 nt, synthetic construct
  source 1..22: mol_type = other RNA
catcggctgagactggggagaa

SEQ ID NO: 9315 - RNA, 22 nt, synthetic construct
  source 1..22: mol_type = other RNA
catcgttgtcctctgcaccaga

SEQ ID NO: 9316 - RNA, 22 nt, synthetic construct
  source 1..22: mol_type = other RNA
catctaaatacttaggttatgg

SEQ ID NO: 9317 - RNA, 22 nt, synthetic construct
  source 1..22: mol_type = other RNA
catctcaagctgcaggttcata

SEQ ID NO: 9318 - RNA, 22 nt, synthetic construct
  source 1..22: mol_type = other RNA
catctcatgagtgggataagga

SEQ ID NO: 9319 - RNA, 22 nt, synthetic construct
  source 1..22: mol_type = other RNA
catctccaaaacaaggagaatg

SEQ ID NO: 9320 - RNA, 22 nt, synthetic construct
  source 1..22: mol_type = other RNA
catctccatatgccttcactcg

SEQ ID NO: 9321 - RNA, 22 nt, synthetic construct
  source 1..22: mol_type = other RNA
catctccctgcatattttggtt

SEQ ID NO: 9322 - RNA, 22 nt, synthetic construct
  source 1..22: mol_type = other RNA
catctttgataacccattagct

SEQ ID NO: 9323 - RNA, 22 nt, synthetic construct
  source 1..22: mol_type = other RNA
catgaaacttcagagcccactt

SEQ ID NO: 9324 - RNA, 22 nt, synthetic construct
  source 1..22: mol_type = other RNA
catgaacccttaccctgggctt

SEQ ID NO: 9325 - RNA, 22 nt, synthetic construct
  source 1..22: mol_type = other RNA
catgaagagagctgttgaacat

SEQ ID NO: 9326 - RNA, 22 nt, synthetic construct
  source 1..22: mol_type = other RNA
catgaagtggccatccatctca

SEQ ID NO: 9327 - RNA, 22 nt, synthetic construct
  source 1..22: mol_type = other RNA
catgaatgagccaaaacatggc

SEQ ID NO: 9328 - RNA, 22 nt, synthetic construct
  source 1..22: mol_type = other RNA
catgactggtcctgaaagtcgc

SEQ ID NO: 9329 - RNA, 22 nt, synthetic construct
  source 1..22: mol_type = other RNA
catgagacggcccaatccagtt

SEQ ID NO: 9330 - RNA, 22 nt, synthetic construct
  source 1..22: mol_type = other RNA
catgagatggatggccacttca

SEQ ID NO: 9331 - RNA, 22 nt, synthetic construct
  source 1..22: mol_type = other RNA
catgagtgggataaggaggcaa

SEQ ID NO: 9332 - RNA, 22 nt, synthetic construct
  source 1..22: mol_type = other RNA
catgagttggagccacggccac

SEQ ID NO: 9333 - RNA, 22 nt, synthetic construct
  source 1..22: mol_type = other RNA
catgatagaactgcttgtgtcc

SEQ ID NO: 9334 - RNA, 22 nt, synthetic construct
  source 1..22: mol_type = other RNA
catgatgtacatttggtctaat

SEQ ID NO: 9335 - RNA, 22 nt, synthetic construct
  source 1..22: mol_type = other RNA
catgcagcagtcccagcagccc

SEQ ID NO: 9336 - RNA, 22 nt, synthetic construct
  source 1..22: mol_type = other RNA
catgcagctcacgctttgcaca

SEQ ID NO: 9337 - RNA, 22 nt, synthetic construct
  source 1..22: mol_type = other RNA
catgccacaacccctttaaaga

SEQ ID NO: 9338 - RNA, 22 nt, synthetic construct
  source 1..22: mol_type = other RNA
catgcccggagctgcactgtag

SEQ ID NO: 9339 - RNA, 22 nt, synthetic construct
  source 1..22: mol_type = other RNA
catgccctgcatctccaaaaca

SEQ ID NO: 9340 - RNA, 22 nt, synthetic construct
  source 1..22: mol_type = other RNA
catgctcttatgctggtaaaag

SEQ ID NO: 9341 - RNA, 22 nt, synthetic construct
  source 1..22: mol_type = other RNA
catgctttcccacacagctaat

SEQ ID NO: 9342 - RNA, 22 nt, synthetic construct
  source 1..22: mol_type = other RNA
catggactataaaaatggtgaa

SEQ ID NO: 9343 - RNA, 22 nt, synthetic construct
  source 1..22: mol_type = other RNA
catggcaaaaaagtgaaacggg

SEQ ID NO: 9344 - RNA, 22 nt, synthetic construct
  source 1..22: mol_type = other RNA
catggcttggctctttgggaag

SEQ ID NO: 9345 - RNA, 22 nt, synthetic construct
  source 1..22: mol_type = other RNA
catgggagccacctctagatta

SEQ ID NO: 9346 - RNA, 22 nt, synthetic construct
  source 1..22: mol_type = other RNA
catgggattagaagaattcaaa

SEQ ID NO: 9347 - RNA, 22 nt, synthetic construct
  source 1..22: mol_type = other RNA
catgggatttctgaggcacata

SEQ ID NO: 9348 - RNA, 22 nt, synthetic construct
  source 1..22: mol_type = other RNA
catgggtcaattctcattgagt

SEQ ID NO: 9349 - RNA, 22 nt, synthetic construct
  source 1..22: mol_type = other RNA
catggtcctttcggcaagagac

SEQ ID NO: 9350 - RNA, 22 nt, synthetic construct
  source 1..22: mol_type = other RNA
catggttaagagctggaagcat

SEQ ID NO: 9351 - RNA, 22 nt, synthetic construct
  source 1..22: mol_type = other RNA
catgtagggaaattgcctcctt

SEQ ID NO: 9352 - RNA, 22 nt, synthetic construct
  source 1..22: mol_type = other RNA
catgtatggattggtggatcca

SEQ ID NO: 9353 - RNA, 22 nt, synthetic construct
  source 1..22: mol_type = other RNA
catgtcattctccttgttttgg

SEQ ID NO: 9354 - RNA, 22 nt, synthetic construct
  source 1..22: mol_type = other RNA
catgtccgtgaccacagactcc

SEQ ID NO: 9355 - RNA, 22 nt, synthetic construct
  source 1..22: mol_type = other RNA
catgtggctcagcaggctcccg

SEQ ID NO: 9356 - RNA, 22 nt, synthetic construct
  source 1..22: mol_type = other RNA
catgttcaacagctctcttcat

SEQ ID NO: 9357 - RNA, 22 nt, synthetic construct
  source 1..22: mol_type = other RNA
catgtttggattgctcagattg

SEQ ID NO: 9358 - RNA, 22 nt, synthetic construct
  source 1..22: mol_type = other RNA
catgttttggctcattcatgct

SEQ ID NO: 9359 - RNA, 22 nt, synthetic construct
  source 1..22: mol_type = other RNA
cattagaccaaatgtacatcat

SEQ ID NO: 9360 - RNA, 22 nt, synthetic construct
  source 1..22: mol_type = other RNA
cattagcatcacttaatttgtg

SEQ ID NO: 9361 - RNA, 22 nt, synthetic construct
  source 1..22: mol_type = other RNA
cattagctgtgtgggaaagcat

SEQ ID NO: 9362 - RNA, 22 nt, synthetic construct
  source 1..22: mol_type = other RNA
cattcaccttctcacataatcc

SEQ ID NO: 9363 - RNA, 22 nt, synthetic construct
  source 1..22: mol_type = other RNA
cattcatgctcttatgctggta

SEQ ID NO: 9364 - RNA, 22 nt, synthetic construct
  source 1..22: mol_type = other RNA
cattctccttgttttggagatg

SEQ ID NO: 9365 - RNA, 22 nt, synthetic construct
  source 1..22: mol_type = other RNA
cattgagtgtgcaaagcgtgag

SEQ ID NO: 9366 - RNA, 22 nt, synthetic construct
  source 1..22: mol_type = other RNA
cattgatatgatggatattggg

SEQ ID NO: 9367 - RNA, 22 nt, synthetic construct
  source 1..22: mol_type = other RNA
cattgcattgatatgatggata

SEQ ID NO: 9368 - RNA, 22 nt, synthetic construct
  source 1..22: mol_type = other RNA
cattggcactagtccagggtgt

SEQ ID NO: 9369 - RNA, 22 nt, synthetic construct
  source 1..22: mol_type = other RNA
cattgggggagtggccgtggct

SEQ ID NO: 9370 - RNA, 22 nt, synthetic construct
  source 1..22: mol_type = other RNA
catttggtctaatggtacaact

SEQ ID NO: 9371 - RNA, 22 nt, synthetic construct
  source 1..22: mol_type = other RNA
cattttggcttcccaaagagcc

SEQ ID NO: 9372 - RNA, 22 nt, synthetic construct
  source 1..22: mol_type = other RNA
catttttatagtccatgtttgg

SEQ ID NO: 9373 - RNA, 22 nt, synthetic construct
  source 1..22: mol_type = other RNA
ccaaaacaaggagaatgacatg

SEQ ID NO: 9374 - RNA, 22 nt, synthetic construct
  source 1..22: mol_type = other RNA
ccaaaacatggcttggctcttt

SEQ ID NO: 9375 - RNA, 22 nt, synthetic construct
  source 1..22: mol_type = other RNA
ccaaaatatgcagggagatggt

SEQ ID NO: 9376 - RNA, 22 nt, synthetic construct
  source 1..22: mol_type = other RNA
ccaaaatggctgaaaaagcccg

SEQ ID NO: 9377 - RNA, 22 nt, synthetic construct
  source 1..22: mol_type = other RNA
ccaaacatggactataaaaatg

SEQ ID NO: 9378 - RNA, 22 nt, synthetic construct
  source 1..22: mol_type = other RNA
ccaaaccttggctggtaaagtg

SEQ ID NO: 9379 - RNA, 22 nt, synthetic construct
  source 1..22: mol_type = other RNA
ccaaactcttcacacacttcag

SEQ ID NO: 9380 - RNA, 22 nt, synthetic construct
  source 1..22: mol_type = other RNA
ccaaagagccaagccatgtttt

SEQ ID NO: 9381 - RNA, 22 nt, synthetic construct
  source 1..22: mol_type = other RNA
ccaaatgtacatcatgtaggga

SEQ ID NO: 9382 - RNA, 22 nt, synthetic construct
  source 1..22: mol_type = other RNA
ccaacaaaagggggtgatatca

SEQ ID NO: 9383 - RNA, 22 nt, synthetic construct
  source 1..22: mol_type = other RNA
ccaactcatgggtcaattctca

SEQ ID NO: 9384 - RNA, 22 nt, synthetic construct
  source 1..22: mol_type = other RNA
ccaagaccctctgtctaagctc

SEQ ID NO: 9385 - RNA, 22 nt, synthetic construct
  source 1..22: mol_type = other RNA
ccaagccaagaccctctgtcta

SEQ ID NO: 9386 - RNA, 22 nt, synthetic construct
  source 1..22: mol_type = other RNA
ccaagccatgttttggctcatt

SEQ ID NO: 9387 - RNA, 22 nt, synthetic construct
  source 1..22: mol_type = other RNA
ccaaggaggcttacacaaatta

SEQ ID NO: 9388 - RNA, 22 nt, synthetic construct
  source 1..22: mol_type = other RNA
ccaaggtttggaaatagccaga

SEQ ID NO: 9389 - RNA, 22 nt, synthetic construct
  source 1..22: mol_type = other RNA
ccaataggaatcaccccaccag

SEQ ID NO: 9390 - RNA, 22 nt, synthetic construct
  source 1..22: mol_type = other RNA
ccaatatccatcatatcaatgc

SEQ ID NO: 9391 - RNA, 22 nt, synthetic construct
  source 1..22: mol_type = other RNA
ccaatccagttagtccttatcc

SEQ ID NO: 9392 - RNA, 22 nt, synthetic construct
  source 1..22: mol_type = other RNA
ccaatccatacatgagacggcc

SEQ ID NO: 9393 - RNA, 22 nt, synthetic construct
  source 1..22: mol_type = other RNA
ccaatctgagcaatccaaacat

SEQ ID NO: 9394 - RNA, 22 nt, synthetic construct
  source 1..22: mol_type = other RNA
ccaatggctgcttttcctgacc

SEQ ID NO: 9395 - RNA, 22 nt, synthetic construct
  source 1..22: mol_type = other RNA
ccaatgtcaggatccagaaagc

SEQ ID NO: 9396 - RNA, 22 nt, synthetic construct
  source 1..22: mol_type = other RNA
ccacaacccctttaaagaatcc

SEQ ID NO: 9397 - RNA, 22 nt, synthetic construct
  source 1..22: mol_type = other RNA
ccacacagctaatgggttatca

SEQ ID NO: 9398 - RNA, 22 nt, synthetic construct
  source 1..22: mol_type = other RNA
ccacaccctggactagtgccaa

SEQ ID NO: 9399 - RNA, 22 nt, synthetic construct
  source 1..22: mol_type = other RNA
ccacagaacttttgcgactttc

SEQ ID NO: 9400 - RNA, 22 nt, synthetic construct
  source 1..22: mol_type = other RNA
ccacagactccacagtaactac

SEQ ID NO: 9401 - RNA, 22 nt, synthetic construct
  source 1..22: mol_type = other RNA
ccacagccccagcagcagcaga

SEQ ID NO: 9402 - RNA, 22 nt, synthetic construct
  source 1..22: mol_type = other RNA
ccacagtaactacatctccata

SEQ ID NO: 9403 - RNA, 22 nt, synthetic construct
  source 1..22: mol_type = other RNA
ccacatcaccctcagacagagt

SEQ ID NO: 9404 - RNA, 22 nt, synthetic construct
  source 1..22: mol_type = other RNA
ccacatgaaacttcagagccca

SEQ ID NO: 9405 - RNA, 22 nt, synthetic construct
  source 1..22: mol_type = other RNA
ccaccaatccatacatgagacg

SEQ ID NO: 9406 - RNA, 22 nt, synthetic construct
  source 1..22: mol_type = other RNA
ccaccacagccccagcagcagc

SEQ ID NO: 9407 - RNA, 22 nt, synthetic construct
  source 1..22: mol_type = other RNA
ccaccaggatctccctcgtctt

SEQ ID NO: 9408 - RNA, 22 nt, synthetic construct
  source 1..22: mol_type = other RNA
ccacccaatctgagcaatccaa

SEQ ID NO: 9409 - RNA, 22 nt, synthetic construct
  source 1..22: mol_type = other RNA
ccacccatccatacactttacc

SEQ ID NO: 9410 - RNA, 22 nt, synthetic construct
  source 1..22: mol_type = other RNA
ccacctcatctcaagctgcagg

SEQ ID NO: 9411 - RNA, 22 nt, synthetic construct
  source 1..22: mol_type = other RNA
ccacctctagattaccacccaa

SEQ ID NO: 9412 - RNA, 22 nt, synthetic construct
  source 1..22: mol_type = other RNA
ccacggccactcccccaatgtc

SEQ ID NO: 9413 - RNA, 22 nt, synthetic construct
  source 1..22: mol_type = other RNA
ccactcatgagatggatggcca

SEQ ID NO: 9414 - RNA, 22 nt, synthetic construct
  source 1..22: mol_type = other RNA
ccactcccccaatgtcaggatc

SEQ ID NO: 9415 - RNA, 22 nt, synthetic construct
  source 1..22: mol_type = other RNA
ccactgataggtttccattgca

SEQ ID NO: 9416 - RNA, 22 nt, synthetic construct
  source 1..22: mol_type = other RNA
ccacttacctgcgtttcatcaa

SEQ ID NO: 9417 - RNA, 22 nt, synthetic construct
  source 1..22: mol_type = other RNA
ccacttcatgggagccacctct

SEQ ID NO: 9418 - RNA, 22 nt, synthetic construct
  source 1..22: mol_type = other RNA
ccagaaagctctgctcgctgtc

SEQ ID NO: 9419 - RNA, 22 nt, synthetic construct
  source 1..22: mol_type = other RNA
ccagaagcagaataagagttga

SEQ ID NO: 9420 - RNA, 22 nt, synthetic construct
  source 1..22: mol_type = other RNA
ccagaagccacaccctggacta

SEQ ID NO: 9421 - RNA, 22 nt, synthetic construct
  source 1..22: mol_type = other RNA
ccagacctcatcgttgtcctct

SEQ ID NO: 9422 - RNA, 22 nt, synthetic construct
  source 1..22: mol_type = other RNA
ccagactatgtgcctcagaaat

SEQ ID NO: 9423 - RNA, 22 nt, synthetic construct
  source 1..22: mol_type = other RNA
ccagagttttacatctaaatac

SEQ ID NO: 9424 - RNA, 22 nt, synthetic construct
  source 1..22: mol_type = other RNA
ccagatatggggagcagttgtc

SEQ ID NO: 9425 - RNA, 22 nt, synthetic construct
  source 1..22: mol_type = other RNA
ccagcagcagcagagaccccag

SEQ ID NO: 9426 - RNA, 22 nt, synthetic construct
  source 1..22: mol_type = other RNA
ccagcagcagcagccacatcac

SEQ ID NO: 9427 - RNA, 22 nt, synthetic construct
  source 1..22: mol_type = other RNA
ccagcagccccagcctctacag

SEQ ID NO: 9428 - RNA, 22 nt, synthetic construct
  source 1..22: mol_type = other RNA
ccagcataagagcatgaatgag

SEQ ID NO: 9429 - RNA, 22 nt, synthetic construct
  source 1..22: mol_type = other RNA
ccagccaaggtttggaaatagc

SEQ ID NO: 9430 - RNA, 22 nt, synthetic construct
  source 1..22: mol_type = other RNA
ccagccctatgaacttctattc

SEQ ID NO: 9431 - RNA, 22 nt, synthetic construct
  source 1..22: mol_type = other RNA
ccagcctctacagaagcagcca

SEQ ID NO: 9432 - RNA, 22 nt, synthetic construct
  source 1..22: mol_type = other RNA
ccagctcttaaccatgatagaa

SEQ ID NO: 9433 - RNA, 22 nt, synthetic construct
  source 1..22: mol_type = other RNA
ccaggatctccctcgtctttta

SEQ ID NO: 9434 - RNA, 22 nt, synthetic construct
  source 1..22: mol_type = other RNA
ccagggtaagggttcatgggat

SEQ ID NO: 9435 - RNA, 22 nt, synthetic construct
  source 1..22: mol_type = other RNA
ccagggtgtggcttctggtgca

SEQ ID NO: 9436 - RNA, 22 nt, synthetic construct
  source 1..22: mol_type = other RNA
ccagtcatgcagcagtcccagc

SEQ ID NO: 9437 - RNA, 22 nt, synthetic construct
  source 1..22: mol_type = other RNA
ccagtctcagccgatggatctg

SEQ ID NO: 9438 - RNA, 22 nt, synthetic construct
  source 1..22: mol_type = other RNA
ccagttagtccttatccaaact

SEQ ID NO: 9439 - RNA, 22 nt, synthetic construct
  source 1..22: mol_type = other RNA
ccataacctaagtatttagatg

SEQ ID NO: 9440 - RNA, 22 nt, synthetic construct
  source 1..22: mol_type = other RNA
ccataactacagtgcagctccg

SEQ ID NO: 9441 - RNA, 22 nt, synthetic construct
  source 1..22: mol_type = other RNA
ccatacactttaccagccaagg

SEQ ID NO: 9442 - RNA, 22 nt, synthetic construct
  source 1..22: mol_type = other RNA
ccatacatgagacggcccaatc

SEQ ID NO: 9443 - RNA, 22 nt, synthetic construct
  source 1..22: mol_type = other RNA
ccatacttttcacactcttcct

SEQ ID NO: 9444 - RNA, 22 nt, synthetic construct
  source 1..22: mol_type = other RNA
ccatagatatctgaagtgtgtg

SEQ ID NO: 9445 - RNA, 22 nt, synthetic construct
  source 1..22: mol_type = other RNA
ccatatctgggttcctattctc

SEQ ID NO: 9446 - RNA, 22 nt, synthetic construct
  source 1..22: mol_type = other RNA
ccatatgccttcactcgggtca

SEQ ID NO: 9447 - RNA, 22 nt, synthetic construct
  source 1..22: mol_type = other RNA
ccatcatatcaatgcaatggaa

SEQ ID NO: 9448 - RNA, 22 nt, synthetic construct
  source 1..22: mol_type = other RNA
ccatccatacactttaccagcc

SEQ ID NO: 9449 - RNA, 22 nt, synthetic construct
  source 1..22: mol_type = other RNA
ccatccatctcatgagtgggat

SEQ ID NO: 9450 - RNA, 22 nt, synthetic construct
  source 1..22: mol_type = other RNA
ccatcggctgagactggggaga

SEQ ID NO: 9451 - RNA, 22 nt, synthetic construct
  source 1..22: mol_type = other RNA
ccatctcatgagtgggataagg

SEQ ID NO: 9452 - RNA, 22 nt, synthetic construct
  source 1..22: mol_type = other RNA
ccatctccctgcatattttggt

SEQ ID NO: 9453 - RNA, 22 nt, synthetic construct
  source 1..22: mol_type = other RNA
ccatgaacccttaccctgggct

SEQ ID NO: 9454 - RNA, 22 nt, synthetic construct
  source 1..22: mol_type = other RNA
ccatgaagtggccatccatctc

SEQ ID NO: 9455 - RNA, 22 nt, synthetic construct
  source 1..22: mol_type = other RNA
ccatgagttggagccacggcca

SEQ ID NO: 9456 - RNA, 22 nt, synthetic construct
  source 1..22: mol_type = other RNA
ccatgatagaactgcttgtgtc

SEQ ID NO: 9457 - RNA, 22 nt, synthetic construct
  source 1..22: mol_type = other RNA
ccatggcaaaaaagtgaaacgg

SEQ ID NO: 9458 - RNA, 22 nt, synthetic construct
  source 1..22: mol_type = other RNA
ccatgggatttctgaggcacat

SEQ ID NO: 9459 - RNA, 22 nt, synthetic construct
  source 1..22: mol_type = other RNA
ccatgtccgtgaccacagactc

SEQ ID NO: 9460 - RNA, 22 nt, synthetic construct
  source 1..22: mol_type = other RNA
ccatgtttggattgctcagatt

SEQ ID NO: 9461 - RNA, 22 nt, synthetic construct
  source 1..22: mol_type = other RNA
ccatgttttggctcattcatgc

SEQ ID NO: 9462 - RNA, 22 nt, synthetic construct
  source 1..22: mol_type = other RNA
ccattagaccaaatgtacatca

SEQ ID NO: 9463 - RNA, 22 nt, synthetic construct
  source 1..22: mol_type = other RNA
ccattagcatcacttaatttgt

SEQ ID NO: 9464 - RNA, 22 nt, synthetic construct
  source 1..22: mol_type = other RNA
ccattagctgtgtgggaaagca

SEQ ID NO: 9465 - RNA, 22 nt, synthetic construct
  source 1..22: mol_type = other RNA
ccattgcattgatatgatggat

SEQ ID NO: 9466 - RNA, 22 nt, synthetic construct
  source 1..22: mol_type = other RNA
ccattggcactagtccagggtg

SEQ ID NO: 9467 - RNA, 22 nt, synthetic construct
  source 1..22: mol_type = other RNA
ccattttggcttcccaaagagc

SEQ ID NO: 9468 - RNA, 22 nt, synthetic construct
  source 1..22: mol_type = other RNA
ccatttttatagtccatgtttg

SEQ ID NO: 9469 - RNA, 22 nt, synthetic construct
  source 1..22: mol_type = other RNA
cccaaagagccaagccatgttt

SEQ ID NO: 9470 - RNA, 22 nt, synthetic construct
  source 1..22: mol_type = other RNA
cccaataggaatcaccccacca

SEQ ID NO: 9471 - RNA, 22 nt, synthetic construct
  source 1..22: mol_type = other RNA
cccaatatccatcatatcaatg

SEQ ID NO: 9472 - RNA, 22 nt, synthetic construct
  source 1..22: mol_type = other RNA
cccaatccagttagtccttatc

SEQ ID NO: 9473 - RNA, 22 nt, synthetic construct
  source 1..22: mol_type = other RNA
cccaatctgagcaatccaaaca

SEQ ID NO: 9474 - RNA, 22 nt, synthetic construct
  source 1..22: mol_type = other RNA
cccaatgtcaggatccagaaag

SEQ ID NO: 9475 - RNA, 22 nt, synthetic construct
  source 1..22: mol_type = other RNA
cccacacagctaatgggttatc

SEQ ID NO: 9476 - RNA, 22 nt, synthetic construct
  source 1..22: mol_type = other RNA
cccaccaggatctccctcgtct

SEQ ID NO: 9477 - RNA, 22 nt, synthetic construct
  source 1..22: mol_type = other RNA
cccactcatgagatggatggcc

SEQ ID NO: 9478 - RNA, 22 nt, synthetic construct
  source 1..22: mol_type = other RNA
cccacttacctgcgtttcatca

SEQ ID NO: 9479 - RNA, 22 nt, synthetic construct
  source 1..22: mol_type = other RNA
cccagactatgtgcctcagaaa

SEQ ID NO: 9480 - RNA, 22 nt, synthetic construct
  source 1..22: mol_type = other RNA
cccagatatggggagcagttgt

SEQ ID NO: 9481 - RNA, 22 nt, synthetic construct
  source 1..22: mol_type = other RNA
cccagcagcagcagagacccca

SEQ ID NO: 9482 - RNA, 22 nt, synthetic construct
  source 1..22: mol_type = other RNA
cccagcagcagcagccacatca

SEQ ID NO: 9483 - RNA, 22 nt, synthetic construct
  source 1..22: mol_type = other RNA
cccagcagccccagcctctaca

SEQ ID NO: 9484 - RNA, 22 nt, synthetic construct
  source 1..22: mol_type = other RNA
cccagcctctacagaagcagcc

SEQ ID NO: 9485 - RNA, 22 nt, synthetic construct
  source 1..22: mol_type = other RNA
cccagggtaagggttcatggga

SEQ ID NO: 9486 - RNA, 22 nt, synthetic construct
  source 1..22: mol_type = other RNA
cccagtctcagccgatggatct

SEQ ID NO: 9487 - RNA, 22 nt, synthetic construct
  source 1..22: mol_type = other RNA
cccatatctgggttcctattct

SEQ ID NO: 9488 - RNA, 22 nt, synthetic construct
  source 1..22: mol_type = other RNA
cccatccatacactttaccagc

SEQ ID NO: 9489 - RNA, 22 nt, synthetic construct
  source 1..22: mol_type = other RNA
cccatgaacccttaccctgggc

SEQ ID NO: 9490 - RNA, 22 nt, synthetic construct
  source 1..22: mol_type = other RNA
cccatgaagtggccatccatct

SEQ ID NO: 9491 - RNA, 22 nt, synthetic construct
  source 1..22: mol_type = other RNA
cccatgagttggagccacggcc

SEQ ID NO: 9492 - RNA, 22 nt, synthetic construct
  source 1..22: mol_type = other RNA
cccatggcaaaaaagtgaaacg

SEQ ID NO: 9493 - RNA, 22 nt, synthetic construct
  source 1..22: mol_type = other RNA
cccattagctgtgtgggaaagc

SEQ ID NO: 9494 - RNA, 22 nt, synthetic construct
  source 1..22: mol_type = other RNA
ccccaatgtcaggatccagaaa

SEQ ID NO: 9495 - RNA, 22 nt, synthetic construct
  source 1..22: mol_type = other RNA
ccccaccaggatctccctcgtc

SEQ ID NO: 9496 - RNA, 22 nt, synthetic construct
  source 1..22: mol_type = other RNA
ccccagcagcagcagagacccc

SEQ ID NO: 9497 - RNA, 22 nt, synthetic construct
  source 1..22: mol_type = other RNA
ccccagcagcagcagccacatc

SEQ ID NO: 9498 - RNA, 22 nt, synthetic construct
  source 1..22: mol_type = other RNA
ccccagcctctacagaagcagc

SEQ ID NO: 9499 - RNA, 22 nt, synthetic construct
  source 1..22: mol_type = other RNA
ccccagtctcagccgatggatc

SEQ ID NO: 9500 - RNA, 22 nt, synthetic construct
  source 1..22: mol_type = other RNA
ccccatatctgggttcctattc

SEQ ID NO: 9501 - RNA, 22 nt, synthetic construct
  source 1..22: mol_type = other RNA
cccccaatgtcaggatccagaa

SEQ ID NO: 9502 - RNA, 22 nt, synthetic construct
  source 1..22: mol_type = other RNA
cccccttttgttggttacctca

SEQ ID NO: 9503 - RNA, 22 nt, synthetic construct
  source 1..22: mol_type = other RNA
cccctttaaagaatcccaatag

SEQ ID NO: 9504 - RNA, 22 nt, synthetic construct
  source 1..22: mol_type = other RNA
ccccttttgttggttacctcac

SEQ ID NO: 9505 - RNA, 22 nt, synthetic construct
  source 1..22: mol_type = other RNA
cccgagtgaaggcatatggaga

SEQ ID NO: 9506 - RNA, 22 nt, synthetic construct
  source 1..22: mol_type = other RNA
cccggagctgcactgtagttat

SEQ ID NO: 9507 - RNA, 22 nt, synthetic construct
  source 1..22: mol_type = other RNA
cccgtgagaaagaggaagagtg

SEQ ID NO: 9508 - RNA, 22 nt, synthetic construct
  source 1..22: mol_type = other RNA
cccgtttcacttttttgccatg

SEQ ID NO: 9509 - RNA, 22 nt, synthetic construct
  source 1..22: mol_type = other RNA
ccctacatgatgtacatttggt

SEQ ID NO: 9510 - RNA, 22 nt, synthetic construct
  source 1..22: mol_type = other RNA
ccctatgaacttctattccacc

SEQ ID NO: 9511 - RNA, 22 nt, synthetic construct
  source 1..22: mol_type = other RNA
ccctcagacagagtctgtcaac

SEQ ID NO: 9512 - RNA, 22 nt, synthetic construct
  source 1..22: mol_type = other RNA
ccctcgtcttttaccagcataa

SEQ ID NO: 9513 - RNA, 22 nt, synthetic construct
  source 1..22: mol_type = other RNA
ccctctgtctaagctcagtcta

SEQ ID NO: 9514 - RNA, 22 nt, synthetic construct
  source 1..22: mol_type = other RNA
ccctgcatattttggtttccat

SEQ ID NO: 9515 - RNA, 22 nt, synthetic construct
  source 1..22: mol_type = other RNA
ccctgcatctccaaaacaagga

SEQ ID NO: 9516 - RNA, 22 nt, synthetic construct
  source 1..22: mol_type = other RNA
ccctggactagtgccaatggct

SEQ ID NO: 9517 - RNA, 22 nt, synthetic construct
  source 1..22: mol_type = other RNA
ccctgggcttttgaatcagaat

SEQ ID NO: 9518 - RNA, 22 nt, synthetic construct
  source 1..22: mol_type = other RNA
ccctgtccacagaacttttgcg

SEQ ID NO: 9519 - RNA, 22 nt, synthetic construct
  source 1..22: mol_type = other RNA
ccctgtgacccgagtgaaggca

SEQ ID NO: 9520 - RNA, 22 nt, synthetic construct
  source 1..22: mol_type = other RNA
cccttaccctgggcttttgaat

SEQ ID NO: 9521 - RNA, 22 nt, synthetic construct
  source 1..22: mol_type = other RNA
ccctttaaagaatcccaatagg

SEQ ID NO: 9522 - RNA, 22 nt, synthetic construct
  source 1..22: mol_type = other RNA
cccttttgttggttacctcact

SEQ ID NO: 9523 - RNA, 22 nt, synthetic construct
  source 1..22: mol_type = other RNA
ccgaaaggaccatgtccgtgac

SEQ ID NO: 9524 - RNA, 22 nt, synthetic construct
  source 1..22: mol_type = other RNA
ccgagtgaaggcatatggagat

SEQ ID NO: 9525 - RNA, 22 nt, synthetic construct
  source 1..22: mol_type = other RNA
ccgatggatctgtataggtatc

SEQ ID NO: 9526 - RNA, 22 nt, synthetic construct
  source 1..22: mol_type = other RNA
ccggagctgcactgtagttatg

SEQ ID NO: 9527 - RNA, 22 nt, synthetic construct
  source 1..22: mol_type = other RNA
ccgggcatgttcaacagctctc

SEQ ID NO: 9528 - RNA, 22 nt, synthetic construct
  source 1..22: mol_type = other RNA
ccgtctcatgtatggattggtg

SEQ ID NO: 9529 - RNA, 22 nt, synthetic construct
  source 1..22: mol_type = other RNA
ccgtgaccacagactccacagt

SEQ ID NO: 9530 - RNA, 22 nt, synthetic construct
  source 1..22: mol_type = other RNA
ccgtgagaaagaggaagagtgt

SEQ ID NO: 9531 - RNA, 22 nt, synthetic construct
  source 1..22: mol_type = other RNA
ccgtggctccaactcatgggtc

SEQ ID NO: 9532 - RNA, 22 nt, synthetic construct
  source 1..22: mol_type = other RNA
ccgtttcacttttttgccatgg

SEQ ID NO: 9533 - RNA, 22 nt, synthetic construct
  source 1..22: mol_type = other RNA
cctaagtatttagatgtaaaac

SEQ ID NO: 9534 - RNA, 22 nt, synthetic construct
  source 1..22: mol_type = other RNA
cctacatgatgtacatttggtc

SEQ ID NO: 9535 - RNA, 22 nt, synthetic construct
  source 1..22: mol_type = other RNA
cctatacagatccatcggctga

SEQ ID NO: 9536 - RNA, 22 nt, synthetic construct
  source 1..22: mol_type = other RNA
cctatcagtggacaactgctcc

SEQ ID NO: 9537 - RNA, 22 nt, synthetic construct
  source 1..22: mol_type = other RNA
cctatgaacttctattccacct

SEQ ID NO: 9538 - RNA, 22 nt, synthetic construct
  source 1..22: mol_type = other RNA
cctattctccccagtctcagcc

SEQ ID NO: 9539 - RNA, 22 nt, synthetic construct
  source 1..22: mol_type = other RNA
cctattgggattctttaaaggg

SEQ ID NO: 9540 - RNA, 22 nt, synthetic construct
  source 1..22: mol_type = other RNA
cctcagaaatcccatggcaaaa

SEQ ID NO: 9541 - RNA, 22 nt, synthetic construct
  source 1..22: mol_type = other RNA
cctcagacagagtctgtcaact

SEQ ID NO: 9542 - RNA, 22 nt, synthetic construct
  source 1..22: mol_type = other RNA
cctcatcgttgtcctctgcacc

SEQ ID NO: 9543 - RNA, 22 nt, synthetic construct
  source 1..22: mol_type = other RNA
cctcatctcaagctgcaggttc

SEQ ID NO: 9544 - RNA, 22 nt, synthetic construct
  source 1..22: mol_type = other RNA
cctccttatcccactcatgaga

SEQ ID NO: 9545 - RNA, 22 nt, synthetic construct
  source 1..22: mol_type = other RNA
cctccttggacacaagcagttc

SEQ ID NO: 9546 - RNA, 22 nt, synthetic construct
  source 1..22: mol_type = other RNA
cctcgtcttttaccagcataag

SEQ ID NO: 9547 - RNA, 22 nt, synthetic construct
  source 1..22: mol_type = other RNA
cctctacagaagcagccaccac

SEQ ID NO: 9548 - RNA, 22 nt, synthetic construct
  source 1..22: mol_type = other RNA
cctctagattaccacccaatct

SEQ ID NO: 9549 - RNA, 22 nt, synthetic construct
  source 1..22: mol_type = other RNA
cctctgcaccagaagccacacc

SEQ ID NO: 9550 - RNA, 22 nt, synthetic construct
  source 1..22: mol_type = other RNA
cctctgtctaagctcagtctac

SEQ ID NO: 9551 - RNA, 22 nt, synthetic construct
  source 1..22: mol_type = other RNA
cctctttctcacgggctttttc

SEQ ID NO: 9552 - RNA, 22 nt, synthetic construct
  source 1..22: mol_type = other RNA
cctgaaagtcgcaaaagttctg

SEQ ID NO: 9553 - RNA, 22 nt, synthetic construct
  source 1..22: mol_type = other RNA
cctgacattgggggagtggccg

SEQ ID NO: 9554 - RNA, 22 nt, synthetic construct
  source 1..22: mol_type = other RNA
cctgaccattagcatcacttaa

SEQ ID NO: 9555 - RNA, 22 nt, synthetic construct
  source 1..22: mol_type = other RNA
cctgcagcttgagatgaggtgg

SEQ ID NO: 9556 - RNA, 22 nt, synthetic construct
  source 1..22: mol_type = other RNA
cctgcatattttggtttccata

SEQ ID NO: 9557 - RNA, 22 nt, synthetic construct
  source 1..22: mol_type = other RNA
cctgcatctccaaaacaaggag

SEQ ID NO: 9558 - RNA, 22 nt, synthetic construct
  source 1..22: mol_type = other RNA
cctgcgtttcatcaagtctctt

SEQ ID NO: 9559 - RNA, 22 nt, synthetic construct
  source 1..22: mol_type = other RNA
cctgctgagccacatgaaactt

SEQ ID NO: 9560 - RNA, 22 nt, synthetic construct
  source 1..22: mol_type = other RNA
cctggactagtgccaatggctg

SEQ ID NO: 9561 - RNA, 22 nt, synthetic construct
  source 1..22: mol_type = other RNA
cctgggcttttgaatcagaata

SEQ ID NO: 9562 - RNA, 22 nt, synthetic construct
  source 1..22: mol_type = other RNA
cctggtggggtgattcctattg

SEQ ID NO: 9563 - RNA, 22 nt, synthetic construct
  source 1..22: mol_type = other RNA
cctgtccacagaacttttgcga

SEQ ID NO: 9564 - RNA, 22 nt, synthetic construct
  source 1..22: mol_type = other RNA
cctgtgacccgagtgaaggcat

SEQ ID NO: 9565 - RNA, 22 nt, synthetic construct
  source 1..22: mol_type = other RNA
cctgtttctgttctctcttacc

SEQ ID NO: 9566 - RNA, 22 nt, synthetic construct
  source 1..22: mol_type = other RNA
ccttacaacagatatatatgat

SEQ ID NO: 9567 - RNA, 22 nt, synthetic construct
  source 1..22: mol_type = other RNA
ccttaccctgggcttttgaatc

SEQ ID NO: 9568 - RNA, 22 nt, synthetic construct
  source 1..22: mol_type = other RNA
ccttatccaaactcttcacaca

SEQ ID NO: 9569 - RNA, 22 nt, synthetic construct
  source 1..22: mol_type = other RNA
ccttatcccactcatgagatgg

SEQ ID NO: 9570 - RNA, 22 nt, synthetic construct
  source 1..22: mol_type = other RNA
ccttcactcgggtcacagggcc

SEQ ID NO: 9571 - RNA, 22 nt, synthetic construct
  source 1..22: mol_type = other RNA
ccttctcacataatccataact

SEQ ID NO: 9572 - RNA, 22 nt, synthetic construct
  source 1..22: mol_type = other RNA
ccttggacacaagcagttctat

SEQ ID NO: 9573 - RNA, 22 nt, synthetic construct
  source 1..22: mol_type = other RNA
ccttggctggtaaagtgtatgg

SEQ ID NO: 9574 - RNA, 22 nt, synthetic construct
  source 1..22: mol_type = other RNA
ccttgttttggagatgcagggc

SEQ ID NO: 9575 - RNA, 22 nt, synthetic construct
  source 1..22: mol_type = other RNA
cctttaaagaatcccaatagga

SEQ ID NO: 9576 - RNA, 22 nt, synthetic construct
  source 1..22: mol_type = other RNA
cctttcggcaagagacttgatg

SEQ ID NO: 9577 - RNA, 22 nt, synthetic construct
  source 1..22: mol_type = other RNA
ccttttgttggttacctcactt

SEQ ID NO: 9578 - RNA, 22 nt, synthetic construct
  source 1..22: mol_type = other RNA
cgaaaggaccatgtccgtgacc

SEQ ID NO: 9579 - RNA, 22 nt, synthetic construct
  source 1..22: mol_type = other RNA
cgactttcaggaccagtcatgc

SEQ ID NO: 9580 - RNA, 22 nt, synthetic construct
  source 1..22: mol_type = other RNA
cgagcagagctttctggatcct

SEQ ID NO: 9581 - RNA, 22 nt, synthetic construct
  source 1..22: mol_type = other RNA
cgagggagatcctggtggggtg

SEQ ID NO: 9582 - RNA, 22 nt, synthetic construct
  source 1..22: mol_type = other RNA
cgagtgaaggcatatggagatg

SEQ ID NO: 9583 - RNA, 22 nt, synthetic construct
  source 1..22: mol_type = other RNA
cgatgaggtctggtcagacagc

SEQ ID NO: 9584 - RNA, 22 nt, synthetic construct
  source 1..22: mol_type = other RNA
cgatggatctgtataggtatcc

SEQ ID NO: 9585 - RNA, 22 nt, synthetic construct
  source 1..22: mol_type = other RNA
cgcaaaagttctgtggacaggg

SEQ ID NO: 9586 - RNA, 22 nt, synthetic construct
  source 1..22: mol_type = other RNA
cgcaggtaagtgggctctgaag

SEQ ID NO: 9587 - RNA, 22 nt, synthetic construct
  source 1..22: mol_type = other RNA
cgctgtctgaccagacctcatc

SEQ ID NO: 9588 - RNA, 22 nt, synthetic construct
  source 1..22: mol_type = other RNA
cgctttgcacactcaatgagaa

SEQ ID NO: 9589 - RNA, 22 nt, synthetic construct
  source 1..22: mol_type = other RNA
cggacatggtcctttcggcaag

SEQ ID NO: 9590 - RNA, 22 nt, synthetic construct
  source 1..22: mol_type = other RNA
cggagctgcactgtagttatgg

SEQ ID NO: 9591 - RNA, 22 nt, synthetic construct
  source 1..22: mol_type = other RNA
cggcaagagacttgatgaaacg

SEQ ID NO: 9592 - RNA, 22 nt, synthetic construct
  source 1..22: mol_type = other RNA
cggccactcccccaatgtcagg

SEQ ID NO: 9593 - RNA, 22 nt, synthetic construct
  source 1..22: mol_type = other RNA
cggcccaatccagttagtcctt

SEQ ID NO: 9594 - RNA, 22 nt, synthetic construct
  source 1..22: mol_type = other RNA
cggctgagactggggagaatag

SEQ ID NO: 9595 - RNA, 22 nt, synthetic construct
  source 1..22: mol_type = other RNA
cgggagcctgctgagccacatg

SEQ ID NO: 9596 - RNA, 22 nt, synthetic construct
  source 1..22: mol_type = other RNA
cgggcatgttcaacagctctct

SEQ ID NO: 9597 - RNA, 22 nt, synthetic construct
  source 1..22: mol_type = other RNA
cgggctttttcagccattttgg

SEQ ID NO: 9598 - RNA, 22 nt, synthetic construct
  source 1..22: mol_type = other RNA
cgggtcacagggccttacaaca

SEQ ID NO: 9599 - RNA, 22 nt, synthetic construct
  source 1..22: mol_type = other RNA
cgtctcatgtatggattggtgg

SEQ ID NO: 9600 - RNA, 22 nt, synthetic construct
  source 1..22: mol_type = other RNA
cgtcttttaccagcataagagc

SEQ ID NO: 9601 - RNA, 22 nt, synthetic construct
  source 1..22: mol_type = other RNA
cgtgaccacagactccacagta

SEQ ID NO: 9602 - RNA, 22 nt, synthetic construct
  source 1..22: mol_type = other RNA
cgtgagaaagaggaagagtgtg

SEQ ID NO: 9603 - RNA, 22 nt, synthetic construct
  source 1..22: mol_type = other RNA
cgtgagctgcatgccacaaccc

SEQ ID NO: 9604 - RNA, 22 nt, synthetic construct
  source 1..22: mol_type = other RNA
cgtggctccaactcatgggtca

SEQ ID NO: 9605 - RNA, 22 nt, synthetic construct
  source 1..22: mol_type = other RNA
cgttgtcctctgcaccagaagc

SEQ ID NO: 9606 - RNA, 22 nt, synthetic construct
  source 1..22: mol_type = other RNA
cgtttcacttttttgccatggg

SEQ ID NO: 9607 - RNA, 22 nt, synthetic construct
  source 1..22: mol_type = other RNA
cgtttcatcaagtctcttgccg

SEQ ID NO: 9608 - RNA, 22 nt, synthetic construct
  source 1..22: mol_type = other RNA
ctaaatacttaggttatggaaa

SEQ ID NO: 9609 - RNA, 22 nt, synthetic construct
  source 1..22: mol_type = other RNA
ctaactggattgggccgtctca

SEQ ID NO: 9610 - RNA, 22 nt, synthetic construct
  source 1..22: mol_type = other RNA
ctaagctcagtctaccacccat

SEQ ID NO: 9611 - RNA, 22 nt, synthetic construct
  source 1..22: mol_type = other RNA
ctaatcccatgaacccttaccc

SEQ ID NO: 9612 - RNA, 22 nt, synthetic construct
  source 1..22: mol_type = other RNA
ctaatgggttatcaaagatgct

SEQ ID NO: 9613 - RNA, 22 nt, synthetic construct
  source 1..22: mol_type = other RNA
ctaatggtacaactgctgaaac

SEQ ID NO: 9614 - RNA, 22 nt, synthetic construct
  source 1..22: mol_type = other RNA
ctaatggtcaggaaaagcagcc

SEQ ID NO: 9615 - RNA, 22 nt, synthetic construct
  source 1..22: mol_type = other RNA
ctacagaagcagccaccacagc

SEQ ID NO: 9616 - RNA, 22 nt, synthetic construct
  source 1..22: mol_type = other RNA
ctacagtgcagctccgggcatg

SEQ ID NO: 9617 - RNA, 22 nt, synthetic construct
  source 1..22: mol_type = other RNA
ctacatctccatatgccttcac

SEQ ID NO: 9618 - RNA, 22 nt, synthetic construct
  source 1..22: mol_type = other RNA
ctacatgatgtacatttggtct

SEQ ID NO: 9619 - RNA, 22 nt, synthetic construct
  source 1..22: mol_type = other RNA
ctaccacccatccatacacttt

SEQ ID NO: 9620 - RNA, 22 nt, synthetic construct
  source 1..22: mol_type = other RNA
ctagaggtggctcccatgaagt

SEQ ID NO: 9621 - RNA, 22 nt, synthetic construct
  source 1..22: mol_type = other RNA
ctagattaccacccaatctgag

SEQ ID NO: 9622 - RNA, 22 nt, synthetic construct
  source 1..22: mol_type = other RNA
ctagtccagggtgtggcttctg

SEQ ID NO: 9623 - RNA, 22 nt, synthetic construct
  source 1..22: mol_type = other RNA
ctagtgccaatggctgcttttc

SEQ ID NO: 9624 - RNA, 22 nt, synthetic construct
  source 1..22: mol_type = other RNA
ctataaaaatggtgaacatcat

SEQ ID NO: 9625 - RNA, 22 nt, synthetic construct
  source 1..22: mol_type = other RNA
ctatacagatccatcggctgag

SEQ ID NO: 9626 - RNA, 22 nt, synthetic construct
  source 1..22: mol_type = other RNA
ctatcagtggacaactgctccc

SEQ ID NO: 9627 - RNA, 22 nt, synthetic construct
  source 1..22: mol_type = other RNA
ctatcatggttaagagctggaa

SEQ ID NO: 9628 - RNA, 22 nt, synthetic construct
  source 1..22: mol_type = other RNA
ctatgaacttctattccacctc

SEQ ID NO: 9629 - RNA, 22 nt, synthetic construct
  source 1..22: mol_type = other RNA
ctatggaagcaccagccctatg

SEQ ID NO: 9630 - RNA, 22 nt, synthetic construct
  source 1..22: mol_type = other RNA
ctatgtgcctcagaaatcccat

SEQ ID NO: 9631 - RNA, 22 nt, synthetic construct
  source 1..22: mol_type = other RNA
ctattccacctcatctcaagct

SEQ ID NO: 9632 - RNA, 22 nt, synthetic construct
  source 1..22: mol_type = other RNA
ctattctccccagtctcagccg

SEQ ID NO: 9633 - RNA, 22 nt, synthetic construct
  source 1..22: mol_type = other RNA
ctattgggattctttaaagggg

SEQ ID NO: 9634 - RNA, 22 nt, synthetic construct
  source 1..22: mol_type = other RNA
ctatttccaaaccttggctggt

SEQ ID NO: 9635 - RNA, 22 nt, synthetic construct
  source 1..22: mol_type = other RNA
ctcaagctgcaggttcatattt

SEQ ID NO: 9636 - RNA, 22 nt, synthetic construct
  source 1..22: mol_type = other RNA
ctcaatgagaattgacccatga

SEQ ID NO: 9637 - RNA, 22 nt, synthetic construct
  source 1..22: mol_type = other RNA
ctcacataatccataactacag

SEQ ID NO: 9638 - RNA, 22 nt, synthetic construct
  source 1..22: mol_type = other RNA
ctcacgctttgcacactcaatg

SEQ ID NO: 9639 - RNA, 22 nt, synthetic construct
  source 1..22: mol_type = other RNA
ctcacgggctttttcagccatt

SEQ ID NO: 9640 - RNA, 22 nt, synthetic construct
  source 1..22: mol_type = other RNA
ctcagaaatcccatggcaaaaa

SEQ ID NO: 9641 - RNA, 22 nt, synthetic construct
  source 1..22: mol_type = other RNA
ctcagacagagtctgtcaactc

SEQ ID NO: 9642 - RNA, 22 nt, synthetic construct
  source 1..22: mol_type = other RNA
ctcagattgggtggtaatctag

SEQ ID NO: 9643 - RNA, 22 nt, synthetic construct
  source 1..22: mol_type = other RNA
ctcagcaggctcccgtttcact

SEQ ID NO: 9644 - RNA, 22 nt, synthetic construct
  source 1..22: mol_type = other RNA
ctcagccgatggatctgtatag

SEQ ID NO: 9645 - RNA, 22 nt, synthetic construct
  source 1..22: mol_type = other RNA
ctcagtctaccacccatccata

SEQ ID NO: 9646 - RNA, 22 nt, synthetic construct
  source 1..22: mol_type = other RNA
ctcatcgttgtcctctgcacca

SEQ ID NO: 9647 - RNA, 22 nt, synthetic construct
  source 1..22: mol_type = other RNA
ctcatctcaagctgcaggttca

SEQ ID NO: 9648 - RNA, 22 nt, synthetic construct
  source 1..22: mol_type = other RNA
ctcatgagatggatggccactt

SEQ ID NO: 9649 - RNA, 22 nt, synthetic construct
  source 1..22: mol_type = other RNA
ctcatgagtgggataaggaggc

SEQ ID NO: 9650 - RNA, 22 nt, synthetic construct
  source 1..22: mol_type = other RNA
ctcatgggtcaattctcattga

SEQ ID NO: 9651 - RNA, 22 nt, synthetic construct
  source 1..22: mol_type = other RNA
ctcatgtatggattggtggatc

SEQ ID NO: 9652 - RNA, 22 nt, synthetic construct
  source 1..22: mol_type = other RNA
ctcattcatgctcttatgctgg

SEQ ID NO: 9653 - RNA, 22 nt, synthetic construct
  source 1..22: mol_type = other RNA
ctcattgagtgtgcaaagcgtg

SEQ ID NO: 9654 - RNA, 22 nt, synthetic construct
  source 1..22: mol_type = other RNA
ctccaaaacaaggagaatgaca

SEQ ID NO: 9655 - RNA, 22 nt, synthetic construct
  source 1..22: mol_type = other RNA
ctccaactcatgggtcaattct

SEQ ID NO: 9656 - RNA, 22 nt, synthetic construct
  source 1..22: mol_type = other RNA
ctccacagtaactacatctcca

SEQ ID NO: 9657 - RNA, 22 nt, synthetic construct
  source 1..22: mol_type = other RNA
ctccatatgccttcactcgggt

SEQ ID NO: 9658 - RNA, 22 nt, synthetic construct
  source 1..22: mol_type = other RNA
ctcccatgaagtggccatccat

SEQ ID NO: 9659 - RNA, 22 nt, synthetic construct
  source 1..22: mol_type = other RNA
ctccccagtctcagccgatgga

SEQ ID NO: 9660 - RNA, 22 nt, synthetic construct
  source 1..22: mol_type = other RNA
ctccccatatctgggttcctat

SEQ ID NO: 9661 - RNA, 22 nt, synthetic construct
  source 1..22: mol_type = other RNA
ctcccccaatgtcaggatccag

SEQ ID NO: 9662 - RNA, 22 nt, synthetic construct
  source 1..22: mol_type = other RNA
ctcccgtttcacttttttgcca

SEQ ID NO: 9663 - RNA, 22 nt, synthetic construct
  source 1..22: mol_type = other RNA
ctccctcgtcttttaccagcat

SEQ ID NO: 9664 - RNA, 22 nt, synthetic construct
  source 1..22: mol_type = other RNA
ctccctgcatattttggtttcc

SEQ ID NO: 9665 - RNA, 22 nt, synthetic construct
  source 1..22: mol_type = other RNA
ctccgggcatgttcaacagctc

SEQ ID NO: 9666 - RNA, 22 nt, synthetic construct
  source 1..22: mol_type = other RNA
ctccttatcccactcatgagat

SEQ ID NO: 9667 - RNA, 22 nt, synthetic construct
  source 1..22: mol_type = other RNA
ctccttggacacaagcagttct

SEQ ID NO: 9668 - RNA, 22 nt, synthetic construct
  source 1..22: mol_type = other RNA
ctccttgttttggagatgcagg

SEQ ID NO: 9669 - RNA, 22 nt, synthetic construct
  source 1..22: mol_type = other RNA
ctcgctgtctgaccagacctca

SEQ ID NO: 9670 - RNA, 22 nt, synthetic construct
  source 1..22: mol_type = other RNA
ctcgggtcacagggccttacaa

SEQ ID NO: 9671 - RNA, 22 nt, synthetic construct
  source 1..22: mol_type = other RNA
ctcgtcttttaccagcataaga

SEQ ID NO: 9672 - RNA, 22 nt, synthetic construct
  source 1..22: mol_type = other RNA
ctctacagaagcagccaccaca

SEQ ID NO: 9673 - RNA, 22 nt, synthetic construct
  source 1..22: mol_type = other RNA
ctctagattaccacccaatctg

SEQ ID NO: 9674 - RNA, 22 nt, synthetic construct
  source 1..22: mol_type = other RNA
ctctcttaccctgtccacagaa

SEQ ID NO: 9675 - RNA, 22 nt, synthetic construct
  source 1..22: mol_type = other RNA
ctctcttcatgccctgcatctc

SEQ ID NO: 9676 - RNA, 22 nt, synthetic construct
  source 1..22: mol_type = other RNA
ctctgaagtttcatgtggctca

SEQ ID NO: 9677 - RNA, 22 nt, synthetic construct
  source 1..22: mol_type = other RNA
ctctgcaccagaagccacaccc

SEQ ID NO: 9678 - RNA, 22 nt, synthetic construct
  source 1..22: mol_type = other RNA
ctctgctcgctgtctgaccaga

SEQ ID NO: 9679 - RNA, 22 nt, synthetic construct
  source 1..22: mol_type = other RNA
ctctgctgctgctggggctgtg

SEQ ID NO: 9680 - RNA, 22 nt, synthetic construct
  source 1..22: mol_type = other RNA
ctctggctatttccaaaccttg

SEQ ID NO: 9681 - RNA, 22 nt, synthetic construct
  source 1..22: mol_type = other RNA
ctctgtctaagctcagtctacc

SEQ ID NO: 9682 - RNA, 22 nt, synthetic construct
  source 1..22: mol_type = other RNA
ctctgtctgagggtgatgtggc

SEQ ID NO: 9683 - RNA, 22 nt, synthetic construct
  source 1..22: mol_type = other RNA
ctcttaaccatgatagaactgc

SEQ ID NO: 9684 - RNA, 22 nt, synthetic construct
  source 1..22: mol_type = other RNA
ctcttaccctgtccacagaact

SEQ ID NO: 9685 - RNA, 22 nt, synthetic construct
  source 1..22: mol_type = other RNA
ctcttatgctggtaaaagacga

SEQ ID NO: 9686 - RNA, 22 nt, synthetic construct
  source 1..22: mol_type = other RNA
ctcttattctgcttctggatcc

SEQ ID NO: 9687 - RNA, 22 nt, synthetic construct
  source 1..22: mol_type = other RNA
ctcttcacacacttcagatatc

SEQ ID NO: 9688 - RNA, 22 nt, synthetic construct
  source 1..22: mol_type = other RNA
ctcttcatgccctgcatctcca

SEQ ID NO: 9689 - RNA, 22 nt, synthetic construct
  source 1..22: mol_type = other RNA
ctcttcctctttctcacgggct

SEQ ID NO: 9690 - RNA, 22 nt, synthetic construct
  source 1..22: mol_type = other RNA
ctcttgccgaaaggaccatgtc

SEQ ID NO: 9691 - RNA, 22 nt, synthetic construct
  source 1..22: mol_type = other RNA
ctctttctcacgggctttttca

SEQ ID NO: 9692 - RNA, 22 nt, synthetic construct
  source 1..22: mol_type = other RNA
ctctttgggaagccaaaatggc

SEQ ID NO: 9693 - RNA, 22 nt, synthetic construct
  source 1..22: mol_type = other RNA
ctgaaaaagcccgtgagaaaga

SEQ ID NO: 9694 - RNA, 22 nt, synthetic construct
  source 1..22: mol_type = other RNA
ctgaaaccatctccctgcatat

SEQ ID NO: 9695 - RNA, 22 nt, synthetic construct
  source 1..22: mol_type = other RNA
ctgaaagtcgcaaaagttctgt

SEQ ID NO: 9696 - RNA, 22 nt, synthetic construct
  source 1..22: mol_type = other RNA
ctgaagtgtgtgaagagtttgg

SEQ ID NO: 9697 - RNA, 22 nt, synthetic construct
  source 1..22: mol_type = other RNA
ctgaagtttcatgtggctcagc

SEQ ID NO: 9698 - RNA, 22 nt, synthetic construct
  source 1..22: mol_type = other RNA
ctgacattgggggagtggccgt

SEQ ID NO: 9699 - RNA, 22 nt, synthetic construct
  source 1..22: mol_type = other RNA
ctgaccagacctcatcgttgtc

SEQ ID NO: 9700 - RNA, 22 nt, synthetic construct
  source 1..22: mol_type = other RNA
ctgaccattagcatcacttaat

SEQ ID NO: 9701 - RNA, 22 nt, synthetic construct
  source 1..22: mol_type = other RNA
ctgagactggggagaataggaa

SEQ ID NO: 9702 - RNA, 22 nt, synthetic construct
  source 1..22: mol_type = other RNA
ctgagcaatccaaacatggact

SEQ ID NO: 9703 - RNA, 22 nt, synthetic construct
  source 1..22: mol_type = other RNA
ctgagccacatgaaacttcaga

SEQ ID NO: 9704 - RNA, 22 nt, synthetic construct
  source 1..22: mol_type = other RNA
ctgagcttagacagagggtctt

SEQ ID NO: 9705 - RNA, 22 nt, synthetic construct
  source 1..22: mol_type = other RNA
ctgaggcacatagtctgggcca

SEQ ID NO: 9706 - RNA, 22 nt, synthetic construct
  source 1..22: mol_type = other RNA
ctgagggtgatgtggctgctgc

SEQ ID NO: 9707 - RNA, 22 nt, synthetic construct
  source 1..22: mol_type = other RNA
ctgataggtttccattgcattg

SEQ ID NO: 9708 - RNA, 22 nt, synthetic construct
  source 1..22: mol_type = other RNA
ctgattcaaaagcccagggtaa

SEQ ID NO: 9709 - RNA, 22 nt, synthetic construct
  source 1..22: mol_type = other RNA
ctgcaccagaagccacaccctg

SEQ ID NO: 9710 - RNA, 22 nt, synthetic construct
  source 1..22: mol_type = other RNA
ctgcactgtagttatggattat

SEQ ID NO: 9711 - RNA, 22 nt, synthetic construct
  source 1..22: mol_type = other RNA
ctgcagcttgagatgaggtgga

SEQ ID NO: 9712 - RNA, 22 nt, synthetic construct
  source 1..22: mol_type = other RNA
ctgcaggttcatatttgaattc

SEQ ID NO: 9713 - RNA, 22 nt, synthetic construct
  source 1..22: mol_type = other RNA
ctgcatattttggtttccataa

SEQ ID NO: 9714 - RNA, 22 nt, synthetic construct
  source 1..22: mol_type = other RNA
ctgcatctccaaaacaaggaga

SEQ ID NO: 9715 - RNA, 22 nt, synthetic construct
  source 1..22: mol_type = other RNA
ctgcatgactggtcctgaaagt

SEQ ID NO: 9716 - RNA, 22 nt, synthetic construct
  source 1..22: mol_type = other RNA
ctgcatgccacaacccctttaa

SEQ ID NO: 9717 - RNA, 22 nt, synthetic construct
  source 1..22: mol_type = other RNA
ctgcgtttcatcaagtctcttg

SEQ ID NO: 9718 - RNA, 22 nt, synthetic construct
  source 1..22: mol_type = other RNA
ctgctccccatatctgggttcc

SEQ ID NO: 9719 - RNA, 22 nt, synthetic construct
  source 1..22: mol_type = other RNA
ctgctcgctgtctgaccagacc

SEQ ID NO: 9720 - RNA, 22 nt, synthetic construct
  source 1..22: mol_type = other RNA
ctgctgaaaccatctccctgca

SEQ ID NO: 9721 - RNA, 22 nt, synthetic construct
  source 1..22: mol_type = other RNA
ctgctgagccacatgaaacttc

SEQ ID NO: 9722 - RNA, 22 nt, synthetic construct
  source 1..22: mol_type = other RNA
ctgctgcatgactggtcctgaa

SEQ ID NO: 9723 - RNA, 22 nt, synthetic construct
  source 1..22: mol_type = other RNA
ctgctgctgctggggctgtggt

SEQ ID NO: 9724 - RNA, 22 nt, synthetic construct
  source 1..22: mol_type = other RNA
ctgctgctgctggggtctctgc

SEQ ID NO: 9725 - RNA, 22 nt, synthetic construct
  source 1..22: mol_type = other RNA
ctgctgctggggctgtggtggc

SEQ ID NO: 9726 - RNA, 22 nt, synthetic construct
  source 1..22: mol_type = other RNA
ctgctgctggggtctctgctgc

SEQ ID NO: 9727 - RNA, 22 nt, synthetic construct
  source 1..22: mol_type = other RNA
ctgctgggactgctgcatgact

SEQ ID NO: 9728 - RNA, 22 nt, synthetic construct
  source 1..22: mol_type = other RNA
ctgctggggctgtggtggctgc

SEQ ID NO: 9729 - RNA, 22 nt, synthetic construct
  source 1..22: mol_type = other RNA
ctgctggggtctctgctgctgc

SEQ ID NO: 9730 - RNA, 22 nt, synthetic construct
  source 1..22: mol_type = other RNA
ctgcttctggatccaccaatcc

SEQ ID NO: 9731 - RNA, 22 nt, synthetic construct
  source 1..22: mol_type = other RNA
ctgcttctgtagaggctggggc

SEQ ID NO: 9732 - RNA, 22 nt, synthetic construct
  source 1..22: mol_type = other RNA
ctgcttgtgtccaaggaggctt

SEQ ID NO: 9733 - RNA, 22 nt, synthetic construct
  source 1..22: mol_type = other RNA
ctgcttttcctgaccattagca

SEQ ID NO: 9734 - RNA, 22 nt, synthetic construct
  source 1..22: mol_type = other RNA
ctggaagcatctttgataaccc

SEQ ID NO: 9735 - RNA, 22 nt, synthetic construct
  source 1..22: mol_type = other RNA
ctggactagtgccaatggctgc

SEQ ID NO: 9736 - RNA, 22 nt, synthetic construct
  source 1..22: mol_type = other RNA
ctggatccaccaatccatacat

SEQ ID NO: 9737 - RNA, 22 nt, synthetic construct
  source 1..22: mol_type = other RNA
ctggatcctgacattgggggag

SEQ ID NO: 9738 - RNA, 22 nt, synthetic construct
  source 1..22: mol_type = other RNA
ctggattgggccgtctcatgta

SEQ ID NO: 9739 - RNA, 22 nt, synthetic construct
  source 1..22: mol_type = other RNA
ctggctatttccaaaccttggc

SEQ ID NO: 9740 - RNA, 22 nt, synthetic construct
  source 1..22: mol_type = other RNA
ctgggactgctgcatgactggt

SEQ ID NO: 9741 - RNA, 22 nt, synthetic construct
  source 1..22: mol_type = other RNA
ctgggccatacttttcacactc

SEQ ID NO: 9742 - RNA, 22 nt, synthetic construct
  source 1..22: mol_type = other RNA
ctgggcttttgaatcagaatac

SEQ ID NO: 9743 - RNA, 22 nt, synthetic construct
  source 1..22: mol_type = other RNA
ctggggagaataggaacccaga

SEQ ID NO: 9744 - RNA, 22 nt, synthetic construct
  source 1..22: mol_type = other RNA
ctggggctgctgggactgctgc

SEQ ID NO: 9745 - RNA, 22 nt, synthetic construct
  source 1..22: mol_type = other RNA
ctggggctgtggtggctgcttc

SEQ ID NO: 9746 - RNA, 22 nt, synthetic construct
  source 1..22: mol_type = other RNA
ctggggtctctgctgctgctgg

SEQ ID NO: 9747 - RNA, 22 nt, synthetic construct
  source 1..22: mol_type = other RNA
ctgggttcctattctccccagt

SEQ ID NO: 9748 - RNA, 22 nt, synthetic construct
  source 1..22: mol_type = other RNA
ctggtaaaagacgagggagatc

SEQ ID NO: 9749 - RNA, 22 nt, synthetic construct
  source 1..22: mol_type = other RNA
ctggtaaagtgtatggatgggt

SEQ ID NO: 9750 - RNA, 22 nt, synthetic construct
  source 1..22: mol_type = other RNA
ctggtcagacagcgagcagagc

SEQ ID NO: 9751 - RNA, 22 nt, synthetic construct
  source 1..22: mol_type = other RNA
ctggtcctgaaagtcgcaaaag

SEQ ID NO: 9752 - RNA, 22 nt, synthetic construct
  source 1..22: mol_type = other RNA
ctggtgcagaggacaacgatga

SEQ ID NO: 9753 - RNA, 22 nt, synthetic construct
  source 1..22: mol_type = other RNA
ctggtgcttccatagatatctg

SEQ ID NO: 9754 - RNA, 22 nt, synthetic construct
  source 1..22: mol_type = other RNA
ctggtggggtgattcctattgg

SEQ ID NO: 9755 - RNA, 22 nt, synthetic construct
  source 1..22: mol_type = other RNA
ctgtagaggctggggctgctgg

SEQ ID NO: 9756 - RNA, 22 nt, synthetic construct
  source 1..22: mol_type = other RNA
ctgtagttatggattatgtgag

SEQ ID NO: 9757 - RNA, 22 nt, synthetic construct
  source 1..22: mol_type = other RNA
ctgtataggtatccaagccaag

SEQ ID NO: 9758 - RNA, 22 nt, synthetic construct
  source 1..22: mol_type = other RNA
ctgtcaactcttattctgcttc

SEQ ID NO: 9759 - RNA, 22 nt, synthetic construct
  source 1..22: mol_type = other RNA
ctgtccacagaacttttgcgac

SEQ ID NO: 9760 - RNA, 22 nt, synthetic construct
  source 1..22: mol_type = other RNA
ctgtctaagctcagtctaccac

SEQ ID NO: 9761 - RNA, 22 nt, synthetic construct
  source 1..22: mol_type = other RNA
ctgtctgaccagacctcatcgt

SEQ ID NO: 9762 - RNA, 22 nt, synthetic construct
  source 1..22: mol_type = other RNA
ctgtctgagggtgatgtggctg

SEQ ID NO: 9763 - RNA, 22 nt, synthetic construct
  source 1..22: mol_type = other RNA
ctgtgacccgagtgaaggcata

SEQ ID NO: 9764 - RNA, 22 nt, synthetic construct
  source 1..22: mol_type = other RNA
ctgtggacagggtaagagagaa

SEQ ID NO: 9765 - RNA, 22 nt, synthetic construct
  source 1..22: mol_type = other RNA
ctgtggagtctgtggtcacgga

SEQ ID NO: 9766 - RNA, 22 nt, synthetic construct
  source 1..22: mol_type = other RNA
ctgtggtcacggacatggtcct

SEQ ID NO: 9767 - RNA, 22 nt, synthetic construct
  source 1..22: mol_type = other RNA
ctgtggtggctgcttctgtaga

SEQ ID NO: 9768 - RNA, 22 nt, synthetic construct
  source 1..22: mol_type = other RNA
ctgtgtgggaaagcatgtcatt

SEQ ID NO: 9769 - RNA, 22 nt, synthetic construct
  source 1..22: mol_type = other RNA
ctgttctctcttaccctgtcca

SEQ ID NO: 9770 - RNA, 22 nt, synthetic construct
  source 1..22: mol_type = other RNA
ctgttgaacatgcccggagctg

SEQ ID NO: 9771 - RNA, 22 nt, synthetic construct
  source 1..22: mol_type = other RNA
ctgttgtaaggccctgtgaccc

SEQ ID NO: 9772 - RNA, 22 nt, synthetic construct
  source 1..22: mol_type = other RNA
ctgtttctgttctctcttaccc

SEQ ID NO: 9773 - RNA, 22 nt, synthetic construct
  source 1..22: mol_type = other RNA
cttaaccatgatagaactgctt

SEQ ID NO: 9774 - RNA, 22 nt, synthetic construct
  source 1..22: mol_type = other RNA
cttaatttgtgtaagcctcctt

SEQ ID NO: 9775 - RNA, 22 nt, synthetic construct
  source 1..22: mol_type = other RNA
cttacacaaattaagtgatgct

SEQ ID NO: 9776 - RNA, 22 nt, synthetic construct
  source 1..22: mol_type = other RNA
cttaccctgggcttttgaatca

SEQ ID NO: 9777 - RNA, 22 nt, synthetic construct
  source 1..22: mol_type = other RNA
cttaccctgtccacagaacttt

SEQ ID NO: 9778 - RNA, 22 nt, synthetic construct
  source 1..22: mol_type = other RNA
cttacctgcgtttcatcaagtc

SEQ ID NO: 9779 - RNA, 22 nt, synthetic construct
  source 1..22: mol_type = other RNA
cttagacagagggtcttggctt

SEQ ID NO: 9780 - RNA, 22 nt, synthetic construct
  source 1..22: mol_type = other RNA
cttaggttatggaaaccaaaat

SEQ ID NO: 9781 - RNA, 22 nt, synthetic construct
  source 1..22: mol_type = other RNA
cttatccaaactcttcacacac

SEQ ID NO: 9782 - RNA, 22 nt, synthetic construct
  source 1..22: mol_type = other RNA
cttatcccactcatgagatgga

SEQ ID NO: 9783 - RNA, 22 nt, synthetic construct
  source 1..22: mol_type = other RNA
cttatgctggtaaaagacgagg

SEQ ID NO: 9784 - RNA, 22 nt, synthetic construct
  source 1..22: mol_type = other RNA
cttattctgcttctggatccac

SEQ ID NO: 9785 - RNA, 22 nt, synthetic construct
  source 1..22: mol_type = other RNA
cttcacacacttcagatatcta

SEQ ID NO: 9786 - RNA, 22 nt, synthetic construct
  source 1..22: mol_type = other RNA
cttcactcgggtcacagggcct

SEQ ID NO: 9787 - RNA, 22 nt, synthetic construct
  source 1..22: mol_type = other RNA
cttcagagcccacttacctgcg

SEQ ID NO: 9788 - RNA, 22 nt, synthetic construct
  source 1..22: mol_type = other RNA
cttcagatatctatggaagcac

SEQ ID NO: 9789 - RNA, 22 nt, synthetic construct
  source 1..22: mol_type = other RNA
cttcatgccctgcatctccaaa

SEQ ID NO: 9790 - RNA, 22 nt, synthetic construct
  source 1..22: mol_type = other RNA
cttcatgggagccacctctaga

SEQ ID NO: 9791 - RNA, 22 nt, synthetic construct
  source 1..22: mol_type = other RNA
cttccagctcttaaccatgata

SEQ ID NO: 9792 - RNA, 22 nt, synthetic construct
  source 1..22: mol_type = other RNA
cttccatagatatctgaagtgt

SEQ ID NO: 9793 - RNA, 22 nt, synthetic construct
  source 1..22: mol_type = other RNA
cttcccaaagagccaagccatg

SEQ ID NO: 9794 - RNA, 22 nt, synthetic construct
  source 1..22: mol_type = other RNA
cttcctctttctcacgggcttt

SEQ ID NO: 9795 - RNA, 22 nt, synthetic construct
  source 1..22: mol_type = other RNA
cttctaatcccatgaaccctta

SEQ ID NO: 9796 - RNA, 22 nt, synthetic construct
  source 1..22: mol_type = other RNA
cttctattccacctcatctcaa

SEQ ID NO: 9797 - RNA, 22 nt, synthetic construct
  source 1..22: mol_type = other RNA
cttctcacataatccataacta

SEQ ID NO: 9798 - RNA, 22 nt, synthetic construct
  source 1..22: mol_type = other RNA
cttctggatccaccaatccata

SEQ ID NO: 9799 - RNA, 22 nt, synthetic construct
  source 1..22: mol_type = other RNA
cttctggtgcagaggacaacga

SEQ ID NO: 9800 - RNA, 22 nt, synthetic construct
  source 1..22: mol_type = other RNA
cttctgtagaggctggggctgc

SEQ ID NO: 9801 - RNA, 22 nt, synthetic construct
  source 1..22: mol_type = other RNA
cttgagatgaggtggaatagaa

SEQ ID NO: 9802 - RNA, 22 nt, synthetic construct
  source 1..22: mol_type = other RNA
cttgatgaaacgcaggtaagtg

SEQ ID NO: 9803 - RNA, 22 nt, synthetic construct
  source 1..22: mol_type = other RNA
cttgccgaaaggaccatgtccg

SEQ ID NO: 9804 - RNA, 22 nt, synthetic construct
  source 1..22: mol_type = other RNA
cttggacacaagcagttctatc

SEQ ID NO: 9805 - RNA, 22 nt, synthetic construct
  source 1..22: mol_type = other RNA
cttggatacctatacagatcca

SEQ ID NO: 9806 - RNA, 22 nt, synthetic construct
  source 1..22: mol_type = other RNA
cttggctctttgggaagccaaa

SEQ ID NO: 9807 - RNA, 22 nt, synthetic construct
  source 1..22: mol_type = other RNA
cttggctggtaaagtgtatgga

SEQ ID NO: 9808 - RNA, 22 nt, synthetic construct
  source 1..22: mol_type = other RNA
cttggcttggatacctatacag

SEQ ID NO: 9809 - RNA, 22 nt, synthetic construct
  source 1..22: mol_type = other RNA
cttgtgtccaaggaggcttaca

SEQ ID NO: 9810 - RNA, 22 nt, synthetic construct
  source 1..22: mol_type = other RNA
cttgttttggagatgcagggca

SEQ ID NO: 9811 - RNA, 22 nt, synthetic construct
  source 1..22: mol_type = other RNA
ctttaaagaatcccaataggaa

SEQ ID NO: 9812 - RNA, 22 nt, synthetic construct
  source 1..22: mol_type = other RNA
ctttaaaggggttgtggcatgc

SEQ ID NO: 9813 - RNA, 22 nt, synthetic construct
  source 1..22: mol_type = other RNA
ctttaccagccaaggtttggaa

SEQ ID NO: 9814 - RNA, 22 nt, synthetic construct
  source 1..22: mol_type = other RNA
ctttcaggaccagtcatgcagc

SEQ ID NO: 9815 - RNA, 22 nt, synthetic construct
  source 1..22: mol_type = other RNA
ctttcccacacagctaatgggt

SEQ ID NO: 9816 - RNA, 22 nt, synthetic construct
  source 1..22: mol_type = other RNA
ctttcggcaagagacttgatga

SEQ ID NO: 9817 - RNA, 22 nt, synthetic construct
  source 1..22: mol_type = other RNA
ctttctcacgggctttttcagc

SEQ ID NO: 9818 - RNA, 22 nt, synthetic construct
  source 1..22: mol_type = other RNA
ctttctggatcctgacattggg

SEQ ID NO: 9819 - RNA, 22 nt, synthetic construct
  source 1..22: mol_type = other RNA
ctttgataacccattagctgtg

SEQ ID NO: 9820 - RNA, 22 nt, synthetic construct
  source 1..22: mol_type = other RNA
ctttgcacactcaatgagaatt

SEQ ID NO: 9821 - RNA, 22 nt, synthetic construct
  source 1..22: mol_type = other RNA
ctttgggaagccaaaatggctg

SEQ ID NO: 9822 - RNA, 22 nt, synthetic construct
  source 1..22: mol_type = other RNA
cttttaccagcataagagcatg

SEQ ID NO: 9823 - RNA, 22 nt, synthetic construct
  source 1..22: mol_type = other RNA
cttttcaagtgaggtaaccaac

SEQ ID NO: 9824 - RNA, 22 nt, synthetic construct
  source 1..22: mol_type = other RNA
cttttcacactcttcctctttc

SEQ ID NO: 9825 - RNA, 22 nt, synthetic construct
  source 1..22: mol_type = other RNA
cttttcctgaccattagcatca

SEQ ID NO: 9826 - RNA, 22 nt, synthetic construct
  source 1..22: mol_type = other RNA
cttttgaatcagaatacccaat

SEQ ID NO: 9827 - RNA, 22 nt, synthetic construct
  source 1..22: mol_type = other RNA
cttttgcgactttcaggaccag

SEQ ID NO: 9828 - RNA, 22 nt, synthetic construct
  source 1..22: mol_type = other RNA
ctttttcagccattttggcttc

SEQ ID NO: 9829 - RNA, 22 nt, synthetic construct
  source 1..22: mol_type = other RNA
cttttttgccatgggatttctg

SEQ ID NO: 9830 - RNA, 22 nt, synthetic construct
  source 1..22: mol_type = other RNA
gaaaaagcccgtgagaaagagg

SEQ ID NO: 9831 - RNA, 22 nt, synthetic construct
  source 1..22: mol_type = other RNA
gaaaagcagccattggcactag

SEQ ID NO: 9832 - RNA, 22 nt, synthetic construct
  source 1..22: mol_type = other RNA
gaaaagtatggcccagactatg

SEQ ID NO: 9833 - RNA, 22 nt, synthetic construct
  source 1..22: mol_type = other RNA
gaaaccaaaatatgcagggaga

SEQ ID NO: 9834 - RNA, 22 nt, synthetic construct
  source 1..22: mol_type = other RNA
gaaaccatctccctgcatattt

SEQ ID NO: 9835 - RNA, 22 nt, synthetic construct
  source 1..22: mol_type = other RNA
gaaacctatcagtggacaactg

SEQ ID NO: 9836 - RNA, 22 nt, synthetic construct
  source 1..22: mol_type = other RNA
gaaacgcaggtaagtgggctct

SEQ ID NO: 9837 - RNA, 22 nt, synthetic construct
  source 1..22: mol_type = other RNA
gaaacgggagcctgctgagcca

SEQ ID NO: 9838 - RNA, 22 nt, synthetic construct
  source 1..22: mol_type = other RNA
gaaacttcagagcccacttacc

SEQ ID NO: 9839 - RNA, 22 nt, synthetic construct
  source 1..22: mol_type = other RNA
gaaagaggaagagtgtgaaaag

SEQ ID NO: 9840 - RNA, 22 nt, synthetic construct
  source 1..22: mol_type = other RNA
gaaagcatgtcattctccttgt

SEQ ID NO: 9841 - RNA, 22 nt, synthetic construct
  source 1..22: mol_type = other RNA
gaaagctctgctcgctgtctga

SEQ ID NO: 9842 - RNA, 22 nt, synthetic construct
  source 1..22: mol_type = other RNA
gaaaggaccatgtccgtgacca

SEQ ID NO: 9843 - RNA, 22 nt, synthetic construct
  source 1..22: mol_type = other RNA
gaaagtcgcaaaagttctgtgg

SEQ ID NO: 9844 - RNA, 22 nt, synthetic construct
  source 1..22: mol_type = other RNA
gaaatagccagagttttacatc

SEQ ID NO: 9845 - RNA, 22 nt, synthetic construct
  source 1..22: mol_type = other RNA
gaaatcccatggcaaaaaagtg

SEQ ID NO: 9846 - RNA, 22 nt, synthetic construct
  source 1..22: mol_type = other RNA
gaaattgcctccttatcccact

SEQ ID NO: 9847 - RNA, 22 nt, synthetic construct
  source 1..22: mol_type = other RNA
gaacatcattcaccttctcaca

SEQ ID NO: 9848 - RNA, 22 nt, synthetic construct
  source 1..22: mol_type = other RNA
gaacatgcccggagctgcactg

SEQ ID NO: 9849 - RNA, 22 nt, synthetic construct
  source 1..22: mol_type = other RNA
gaacccagatatggggagcagt

SEQ ID NO: 9850 - RNA, 22 nt, synthetic construct
  source 1..22: mol_type = other RNA
gaacccttaccctgggcttttg

SEQ ID NO: 9851 - RNA, 22 nt, synthetic construct
  source 1..22: mol_type = other RNA
gaacctgcagcttgagatgagg

SEQ ID NO: 9852 - RNA, 22 nt, synthetic construct
  source 1..22: mol_type = other RNA
gaactgcttgtgtccaaggagg

SEQ ID NO: 9853 - RNA, 22 nt, synthetic construct
  source 1..22: mol_type = other RNA
gaacttctattccacctcatct

SEQ ID NO: 9854 - RNA, 22 nt, synthetic construct
  source 1..22: mol_type = other RNA
gaacttttgcgactttcaggac

SEQ ID NO: 9855 - RNA, 22 nt, synthetic construct
  source 1..22: mol_type = other RNA
gaagaattcaaatatgaacctg

SEQ ID NO: 9856 - RNA, 22 nt, synthetic construct
  source 1..22: mol_type = other RNA
gaagagagctgttgaacatgcc

SEQ ID NO: 9857 - RNA, 22 nt, synthetic construct
  source 1..22: mol_type = other RNA
gaagagtgtgaaaagtatggcc

SEQ ID NO: 9858 - RNA, 22 nt, synthetic construct
  source 1..22: mol_type = other RNA
gaagagtttggataaggactaa

SEQ ID NO: 9859 - RNA, 22 nt, synthetic construct
  source 1..22: mol_type = other RNA
gaagcaccagccctatgaactt

SEQ ID NO: 9860 - RNA, 22 nt, synthetic construct
  source 1..22: mol_type = other RNA
gaagcagaataagagttgacag

SEQ ID NO: 9861 - RNA, 22 nt, synthetic construct
  source 1..22: mol_type = other RNA
gaagcagccaccacagccccag

SEQ ID NO: 9862 - RNA, 22 nt, synthetic construct
  source 1..22: mol_type = other RNA
gaagcatctttgataacccatt

SEQ ID NO: 9863 - RNA, 22 nt, synthetic construct
  source 1..22: mol_type = other RNA
gaagccaaaatggctgaaaaag

SEQ ID NO: 9864 - RNA, 22 nt, synthetic construct
  source 1..22: mol_type = other RNA
gaagccacaccctggactagtg

SEQ ID NO: 9865 - RNA, 22 nt, synthetic construct
  source 1..22: mol_type = other RNA
gaaggcatatggagatgtagtt

SEQ ID NO: 9866 - RNA, 22 nt, synthetic construct
  source 1..22: mol_type = other RNA
gaaggtgaatgatgttcaccat

SEQ ID NO: 9867 - RNA, 22 nt, synthetic construct
  source 1..22: mol_type = other RNA
gaagtggccatccatctcatga

SEQ ID NO: 9868 - RNA, 22 nt, synthetic construct
  source 1..22: mol_type = other RNA
gaagtgtgtgaagagtttggat

SEQ ID NO: 9869 - RNA, 22 nt, synthetic construct
  source 1..22: mol_type = other RNA
gaagttcatagggctggtgctt

SEQ ID NO: 9870 - RNA, 22 nt, synthetic construct
  source 1..22: mol_type = other RNA
gaagtttcatgtggctcagcag

SEQ ID NO: 9871 - RNA, 22 nt, synthetic construct
  source 1..22: mol_type = other RNA
gaataagagttgacagactctg

SEQ ID NO: 9872 - RNA, 22 nt, synthetic construct
  source 1..22: mol_type = other RNA
gaatacccaatatccatcatat

SEQ ID NO: 9873 - RNA, 22 nt, synthetic construct
  source 1..22: mol_type = other RNA
gaatagaagttcatagggctgg

SEQ ID NO: 9874 - RNA, 22 nt, synthetic construct
  source 1..22: mol_type = other RNA
gaataggaacccagatatgggg

SEQ ID NO: 9875 - RNA, 22 nt, synthetic construct
  source 1..22: mol_type = other RNA
gaatcaccccaccaggatctcc

SEQ ID NO: 9876 - RNA, 22 nt, synthetic construct
  source 1..22: mol_type = other RNA
gaatcagaatacccaatatcca

SEQ ID NO: 9877 - RNA, 22 nt, synthetic construct
  source 1..22: mol_type = other RNA
gaatcccaataggaatcacccc

SEQ ID NO: 9878 - RNA, 22 nt, synthetic construct
  source 1..22: mol_type = other RNA
gaatgacatgctttcccacaca

SEQ ID NO: 9879 - RNA, 22 nt, synthetic construct
  source 1..22: mol_type = other RNA
gaatgagccaaaacatggcttg

SEQ ID NO: 9880 - RNA, 22 nt, synthetic construct
  source 1..22: mol_type = other RNA
gaatgatgttcaccatttttat

SEQ ID NO: 9881 - RNA, 22 nt, synthetic construct
  source 1..22: mol_type = other RNA
gaattcaaatatgaacctgcag

SEQ ID NO: 9882 - RNA, 22 nt, synthetic construct
  source 1..22: mol_type = other RNA
gaattcttctaatcccatgaac

SEQ ID NO: 9883 - RNA, 22 nt, synthetic construct
  source 1..22: mol_type = other RNA
gaattgacccatgagttggagc

SEQ ID NO: 9884 - RNA, 22 nt, synthetic construct
  source 1..22: mol_type = other RNA
gacaacgatgaggtctggtcag

SEQ ID NO: 9885 - RNA, 22 nt, synthetic construct
  source 1..22: mol_type = other RNA
gacaactgctccccatatctgg

SEQ ID NO: 9886 - RNA, 22 nt, synthetic construct
  source 1..22: mol_type = other RNA
gacacaagcagttctatcatgg

SEQ ID NO: 9887 - RNA, 22 nt, synthetic construct
  source 1..22: mol_type = other RNA
gacagactctgtctgagggtga

SEQ ID NO: 9888 - RNA, 22 nt, synthetic construct
  source 1..22: mol_type = other RNA
gacagagggtcttggcttggat

SEQ ID NO: 9889 - RNA, 22 nt, synthetic construct
  source 1..22: mol_type = other RNA
gacagagtctgtcaactcttat

SEQ ID NO: 9890 - RNA, 22 nt, synthetic construct
  source 1..22: mol_type = other RNA
gacagcgagcagagctttctgg

SEQ ID NO: 9891 - RNA, 22 nt, synthetic construct
  source 1..22: mol_type = other RNA
gacagggtaagagagaacagaa

SEQ ID NO: 9892 - RNA, 22 nt, synthetic construct
  source 1..22: mol_type = other RNA
gacatgctttcccacacagcta

SEQ ID NO: 9893 - RNA, 22 nt, synthetic construct
  source 1..22: mol_type = other RNA
gacatggtcctttcggcaagag

SEQ ID NO: 9894 - RNA, 22 nt, synthetic construct
  source 1..22: mol_type = other RNA
gacattgggggagtggccgtgg

SEQ ID NO: 9895 - RNA, 22 nt, synthetic construct
  source 1..22: mol_type = other RNA
gaccaaatgtacatcatgtagg

SEQ ID NO: 9896 - RNA, 22 nt, synthetic construct
  source 1..22: mol_type = other RNA
gaccacagactccacagtaact

SEQ ID NO: 9897 - RNA, 22 nt, synthetic construct
  source 1..22: mol_type = other RNA
gaccagacctcatcgttgtcct

SEQ ID NO: 9898 - RNA, 22 nt, synthetic construct
  source 1..22: mol_type = other RNA
gaccagtcatgcagcagtccca

SEQ ID NO: 9899 - RNA, 22 nt, synthetic construct
  source 1..22: mol_type = other RNA
gaccatgtccgtgaccacagac

SEQ ID NO: 9900 - RNA, 22 nt, synthetic construct
  source 1..22: mol_type = other RNA
gaccattagcatcacttaattt

SEQ ID NO: 9901 - RNA, 22 nt, synthetic construct
  source 1..22: mol_type = other RNA
gacccatgagttggagccacgg

SEQ ID NO: 9902 - RNA, 22 nt, synthetic construct
  source 1..22: mol_type = other RNA
gaccccagcagcagcagccaca

SEQ ID NO: 9903 - RNA, 22 nt, synthetic construct
  source 1..22: mol_type = other RNA
gacccgagtgaaggcatatgga

SEQ ID NO: 9904 - RNA, 22 nt, synthetic construct
  source 1..22: mol_type = other RNA
gaccctctgtctaagctcagtc

SEQ ID NO: 9905 - RNA, 22 nt, synthetic construct
  source 1..22: mol_type = other RNA
gacctcatcgttgtcctctgca

SEQ ID NO: 9906 - RNA, 22 nt, synthetic construct
  source 1..22: mol_type = other RNA
gacgagggagatcctggtgggg

SEQ ID NO: 9907 - RNA, 22 nt, synthetic construct
  source 1..22: mol_type = other RNA
gacggcccaatccagttagtcc

SEQ ID NO: 9908 - RNA, 22 nt, synthetic construct
  source 1..22: mol_type = other RNA
gactaactggattgggccgtct

SEQ ID NO: 9909 - RNA, 22 nt, synthetic construct
  source 1..22: mol_type = other RNA
gactagtgccaatggctgcttt

SEQ ID NO: 9910 - RNA, 22 nt, synthetic construct
  source 1..22: mol_type = other RNA
gactataaaaatggtgaacatc

SEQ ID NO: 9911 - RNA, 22 nt, synthetic construct
  source 1..22: mol_type = other RNA
gactatgtgcctcagaaatccc

SEQ ID NO: 9912 - RNA, 22 nt, synthetic construct
  source 1..22: mol_type = other RNA
gactccacagtaactacatctc

SEQ ID NO: 9913 - RNA, 22 nt, synthetic construct
  source 1..22: mol_type = other RNA
gactctgtctgagggtgatgtg

SEQ ID NO: 9914 - RNA, 22 nt, synthetic construct
  source 1..22: mol_type = other RNA
gactgagcttagacagagggtc

SEQ ID NO: 9915 - RNA, 22 nt, synthetic construct
  source 1..22: mol_type = other RNA
gactgctgcatgactggtcctg

SEQ ID NO: 9916 - RNA, 22 nt, synthetic construct
  source 1..22: mol_type = other RNA
gactggggagaataggaaccca

SEQ ID NO: 9917 - RNA, 22 nt, synthetic construct
  source 1..22: mol_type = other RNA
gactggtcctgaaagtcgcaaa

SEQ ID NO: 9918 - RNA, 22 nt, synthetic construct
  source 1..22: mol_type = other RNA
gacttgatgaaacgcaggtaag

SEQ ID NO: 9919 - RNA, 22 nt, synthetic construct
  source 1..22: mol_type = other RNA
gactttcaggaccagtcatgca

SEQ ID NO: 9920 - RNA, 22 nt, synthetic construct
  source 1..22: mol_type = other RNA
gagaaagaggaagagtgtgaaa

SEQ ID NO: 9921 - RNA, 22 nt, synthetic construct
  source 1..22: mol_type = other RNA
gagaaggtgaatgatgttcacc

SEQ ID NO: 9922 - RNA, 22 nt, synthetic construct
  source 1..22: mol_type = other RNA
gagaataggaacccagatatgg

SEQ ID NO: 9923 - RNA, 22 nt, synthetic construct
  source 1..22: mol_type = other RNA
gagaatgacatgctttcccaca

SEQ ID NO: 9924 - RNA, 22 nt, synthetic construct
  source 1..22: mol_type = other RNA
gagaattgacccatgagttgga

SEQ ID NO: 9925 - RNA, 22 nt, synthetic construct
  source 1..22: mol_type = other RNA
gagaccccagcagcagcagcca

SEQ ID NO: 9926 - RNA, 22 nt, synthetic construct
  source 1..22: mol_type = other RNA
gagacggcccaatccagttagt

SEQ ID NO: 9927 - RNA, 22 nt, synthetic construct
  source 1..22: mol_type = other RNA
gagactggggagaataggaacc

SEQ ID NO: 9928 - RNA, 22 nt, synthetic construct
  source 1..22: mol_type = other RNA
gagacttgatgaaacgcaggta

SEQ ID NO: 9929 - RNA, 22 nt, synthetic construct
  source 1..22: mol_type = other RNA
gagagctgttgaacatgcccgg

SEQ ID NO: 9930 - RNA, 22 nt, synthetic construct
  source 1..22: mol_type = other RNA
gagatcctggtggggtgattcc

SEQ ID NO: 9931 - RNA, 22 nt, synthetic construct
  source 1..22: mol_type = other RNA
gagatgaggtggaatagaagtt

SEQ ID NO: 9932 - RNA, 22 nt, synthetic construct
  source 1..22: mol_type = other RNA
gagatgcagggcatgaagagag

SEQ ID NO: 9933 - RNA, 22 nt, synthetic construct
  source 1..22: mol_type = other RNA
gagatggatggccacttcatgg

SEQ ID NO: 9934 - RNA, 22 nt, synthetic construct
  source 1..22: mol_type = other RNA
gagatggtttcagcagttgtac

SEQ ID NO: 9935 - RNA, 22 nt, synthetic construct
  source 1..22: mol_type = other RNA
gagatgtagttactgtggagtc

SEQ ID NO: 9936 - RNA, 22 nt, synthetic construct
  source 1..22: mol_type = other RNA
gagcaatccaaacatggactat

SEQ ID NO: 9937 - RNA, 22 nt, synthetic construct
  source 1..22: mol_type = other RNA
gagcagagctttctggatcctg

SEQ ID NO: 9938 - RNA, 22 nt, synthetic construct
  source 1..22: mol_type = other RNA
gagcagttgtccactgataggt

SEQ ID NO: 9939 - RNA, 22 nt, synthetic construct
  source 1..22: mol_type = other RNA
gagcatgaatgagccaaaacat

SEQ ID NO: 9940 - RNA, 22 nt, synthetic construct
  source 1..22: mol_type = other RNA
gagccaaaacatggcttggctc

SEQ ID NO: 9941 - RNA, 22 nt, synthetic construct
  source 1..22: mol_type = other RNA
gagccaagccatgttttggctc

SEQ ID NO: 9942 - RNA, 22 nt, synthetic construct
  source 1..22: mol_type = other RNA
gagccacatgaaacttcagagc

SEQ ID NO: 9943 - RNA, 22 nt, synthetic construct
  source 1..22: mol_type = other RNA
gagccacctctagattaccacc

SEQ ID NO: 9944 - RNA, 22 nt, synthetic construct
  source 1..22: mol_type = other RNA
gagccacggccactcccccaat

SEQ ID NO: 9945 - RNA, 22 nt, synthetic construct
  source 1..22: mol_type = other RNA
gagcccacttacctgcgtttca

SEQ ID NO: 9946 - RNA, 22 nt, synthetic construct
  source 1..22: mol_type = other RNA
gagcctgctgagccacatgaaa

SEQ ID NO: 9947 - RNA, 22 nt, synthetic construct
  source 1..22: mol_type = other RNA
gagctgcactgtagttatggat

SEQ ID NO: 9948 - RNA, 22 nt, synthetic construct
  source 1..22: mol_type = other RNA
gagctgcatgccacaacccctt

SEQ ID NO: 9949 - RNA, 22 nt, synthetic construct
  source 1..22: mol_type = other RNA
gagctggaagcatctttgataa

SEQ ID NO: 9950 - RNA, 22 nt, synthetic construct
  source 1..22: mol_type = other RNA
gagctgttgaacatgcccggag

SEQ ID NO: 9951 - RNA, 22 nt, synthetic construct
  source 1..22: mol_type = other RNA
gagcttagacagagggtcttgg

SEQ ID NO: 9952 - RNA, 22 nt, synthetic construct
  source 1..22: mol_type = other RNA
gagctttctggatcctgacatt

SEQ ID NO: 9953 - RNA, 22 nt, synthetic construct
  source 1..22: mol_type = other RNA
gaggaagagtgtgaaaagtatg

SEQ ID NO: 9954 - RNA, 22 nt, synthetic construct
  source 1..22: mol_type = other RNA
gaggacaacgatgaggtctggt

SEQ ID NO: 9955 - RNA, 22 nt, synthetic construct
  source 1..22: mol_type = other RNA
gaggcaatttccctacatgatg

SEQ ID NO: 9956 - RNA, 22 nt, synthetic construct
  source 1..22: mol_type = other RNA
gaggcacatagtctgggccata

SEQ ID NO: 9957 - RNA, 22 nt, synthetic construct
  source 1..22: mol_type = other RNA
gaggctggggctgctgggactg

SEQ ID NO: 9958 - RNA, 22 nt, synthetic construct
  source 1..22: mol_type = other RNA
gaggcttacacaaattaagtga

SEQ ID NO: 9959 - RNA, 22 nt, synthetic construct
  source 1..22: mol_type = other RNA
gagggagatcctggtggggtga

SEQ ID NO: 9960 - RNA, 22 nt, synthetic construct
  source 1..22: mol_type = other RNA
gagggtcttggcttggatacct

SEQ ID NO: 9961 - RNA, 22 nt, synthetic construct
  source 1..22: mol_type = other RNA
gagggtgatgtggctgctgctg

SEQ ID NO: 9962 - RNA, 22 nt, synthetic construct
  source 1..22: mol_type = other RNA
gaggtaaccaacaaaagggggt

SEQ ID NO: 9963 - RNA, 22 nt, synthetic construct
  source 1..22: mol_type = other RNA
gaggtctggtcagacagcgagc

SEQ ID NO: 9964 - RNA, 22 nt, synthetic construct
  source 1..22: mol_type = other RNA
gaggtggaatagaagttcatag

SEQ ID NO: 9965 - RNA, 22 nt, synthetic construct
  source 1..22: mol_type = other RNA
gaggtggctcccatgaagtggc

SEQ ID NO: 9966 - RNA, 22 nt, synthetic construct
  source 1..22: mol_type = other RNA
gagtctgtcaactcttattctg

SEQ ID NO: 9967 - RNA, 22 nt, synthetic construct
  source 1..22: mol_type = other RNA
gagtctgtggtcacggacatgg

SEQ ID NO: 9968 - RNA, 22 nt, synthetic construct
  source 1..22: mol_type = other RNA
gagtgaaggcatatggagatgt

SEQ ID NO: 9969 - RNA, 22 nt, synthetic construct
  source 1..22: mol_type = other RNA
gagtggccgtggctccaactca

SEQ ID NO: 9970 - RNA, 22 nt, synthetic construct
  source 1..22: mol_type = other RNA
gagtgggataaggaggcaattt

SEQ ID NO: 9971 - RNA, 22 nt, synthetic construct
  source 1..22: mol_type = other RNA
gagtgtgaaaagtatggcccag

SEQ ID NO: 9972 - RNA, 22 nt, synthetic construct
  source 1..22: mol_type = other RNA
gagtgtgcaaagcgtgagctgc

SEQ ID NO: 9973 - RNA, 22 nt, synthetic construct
  source 1..22: mol_type = other RNA
gagttgacagactctgtctgag

SEQ ID NO: 9974 - RNA, 22 nt, synthetic construct
  source 1..22: mol_type = other RNA
gagttggagccacggccactcc

SEQ ID NO: 9975 - RNA, 22 nt, synthetic construct
  source 1..22: mol_type = other RNA
gagtttggataaggactaactg

SEQ ID NO: 9976 - RNA, 22 nt, synthetic construct
  source 1..22: mol_type = other RNA
gataacccattagctgtgtggg

SEQ ID NO: 9977 - RNA, 22 nt, synthetic construct
  source 1..22: mol_type = other RNA
gataaggactaactggattggg

SEQ ID NO: 9978 - RNA, 22 nt, synthetic construct
  source 1..22: mol_type = other RNA
gataaggaggcaatttccctac

SEQ ID NO: 9979 - RNA, 22 nt, synthetic construct
  source 1..22: mol_type = other RNA
gatacctatacagatccatcgg

SEQ ID NO: 9980 - RNA, 22 nt, synthetic construct
  source 1..22: mol_type = other RNA
gatacctgtttctgttctctct

SEQ ID NO: 9981 - RNA, 22 nt, synthetic construct
  source 1..22: mol_type = other RNA
gatagaactgcttgtgtccaag

SEQ ID NO: 9982 - RNA, 22 nt, synthetic construct
  source 1..22: mol_type = other RNA
gataggtttccattgcattgat

SEQ ID NO: 9983 - RNA, 22 nt, synthetic construct
  source 1..22: mol_type = other RNA
gatatatatgatatcaccccct

SEQ ID NO: 9984 - RNA, 22 nt, synthetic construct
  source 1..22: mol_type = other RNA
gatatcacccccttttgttggt

SEQ ID NO: 9985 - RNA, 22 nt, synthetic construct
  source 1..22: mol_type = other RNA
gatatctatggaagcaccagcc

SEQ ID NO: 9986 - RNA, 22 nt, synthetic construct
  source 1..22: mol_type = other RNA
gatatctgaagtgtgtgaagag

SEQ ID NO: 9987 - RNA, 22 nt, synthetic construct
  source 1..22: mol_type = other RNA
gatatgatggatattgggtatt

SEQ ID NO: 9988 - RNA, 22 nt, synthetic construct
  source 1..22: mol_type = other RNA
gatatggggagcagttgtccac

SEQ ID NO: 9989 - RNA, 22 nt, synthetic construct
  source 1..22: mol_type = other RNA
gatattgggtattctgattcaa

SEQ ID NO: 9990 - RNA, 22 nt, synthetic construct
  source 1..22: mol_type = other RNA
gatccaccaatccatacatgag

SEQ ID NO: 9991 - RNA, 22 nt, synthetic construct
  source 1..22: mol_type = other RNA
gatccagaaagctctgctcgct

SEQ ID NO: 9992 - RNA, 22 nt, synthetic construct
  source 1..22: mol_type = other RNA
gatccagaagcagaataagagt

SEQ ID NO: 9993 - RNA, 22 nt, synthetic construct
  source 1..22: mol_type = other RNA
gatccatcggctgagactgggg

SEQ ID NO: 9994 - RNA, 22 nt, synthetic construct
  source 1..22: mol_type = other RNA
gatcctgacattgggggagtgg

SEQ ID NO: 9995 - RNA, 22 nt, synthetic construct
  source 1..22: mol_type = other RNA
gatcctggtggggtgattccta

SEQ ID NO: 9996 - RNA, 22 nt, synthetic construct
  source 1..22: mol_type = other RNA
gatctccctcgtcttttaccag

SEQ ID NO: 9997 - RNA, 22 nt, synthetic construct
  source 1..22: mol_type = other RNA
gatctgtataggtatccaagcc

SEQ ID NO: 9998 - RNA, 22 nt, synthetic construct
  source 1..22: mol_type = other RNA
gatgaaacgcaggtaagtgggc

SEQ ID NO: 9999 - RNA, 22 nt, synthetic construct
  source 1..22: mol_type = other RNA
gatgaggtctggtcagacagcg

SEQ ID NO: 10000 - RNA, 22 nt, synthetic construct
  source 1..22: mol_type = other RNA
gatgaggtggaatagaagttca

SEQ ID NO: 10001 - RNA, 22 nt, synthetic construct
  source 1..22: mol_type = other RNA
gatgcagggcatgaagagagct

SEQ ID NO: 10002 - RNA, 22 nt, synthetic construct
  source 1..22: mol_type = other RNA
gatgctaatggtcaggaaaagc

SEQ ID NO: 10003 - RNA, 22 nt, synthetic construct
  source 1..22: mol_type = other RNA
gatgcttccagctcttaaccat

SEQ ID NO: 10004 - RNA, 22 nt, synthetic construct
  source 1..22: mol_type = other RNA
gatggatattgggtattctgat

SEQ ID NO: 10005 - RNA, 22 nt, synthetic construct
  source 1..22: mol_type = other RNA
gatggatctgtataggtatcca

SEQ ID NO: 10006 - RNA, 22 nt, synthetic construct
  source 1..22: mol_type = other RNA
gatggatggccacttcatggga

SEQ ID NO: 10007 - RNA, 22 nt, synthetic construct
  source 1..22: mol_type = other RNA
gatggccacttcatgggagcca

SEQ ID NO: 10008 - RNA, 22 nt, synthetic construct
  source 1..22: mol_type = other RNA
gatgggtggtagactgagctta

SEQ ID NO: 10009 - RNA, 22 nt, synthetic construct
  source 1..22: mol_type = other RNA
gatggtttcagcagttgtacca

SEQ ID NO: 10010 - RNA, 22 nt, synthetic construct
  source 1..22: mol_type = other RNA
gatgtaaaactctggctatttc

SEQ ID NO: 10011 - RNA, 22 nt, synthetic construct
  source 1..22: mol_type = other RNA
gatgtacatttggtctaatggt

SEQ ID NO: 10012 - RNA, 22 nt, synthetic construct
  source 1..22: mol_type = other RNA
gatgtagttactgtggagtctg

SEQ ID NO: 10013 - RNA, 22 nt, synthetic construct
  source 1..22: mol_type = other RNA
gatgtggctgctgctgctgggg

SEQ ID NO: 10014 - RNA, 22 nt, synthetic construct
  source 1..22: mol_type = other RNA
gatgttcaccatttttatagtc

SEQ ID NO: 10015 - RNA, 22 nt, synthetic construct
  source 1..22: mol_type = other RNA
gattaccacccaatctgagcaa

SEQ ID NO: 10016 - RNA, 22 nt, synthetic construct
  source 1..22: mol_type = other RNA
gattatgtgagaaggtgaatga

SEQ ID NO: 10017 - RNA, 22 nt, synthetic construct
  source 1..22: mol_type = other RNA
gattcaaaagcccagggtaagg

SEQ ID NO: 10018 - RNA, 22 nt, synthetic construct
  source 1..22: mol_type = other RNA
gattcctattgggattctttaa

SEQ ID NO: 10019 - RNA, 22 nt, synthetic construct
  source 1..22: mol_type = other RNA
gattctttaaaggggttgtggc

SEQ ID NO: 10020 - RNA, 22 nt, synthetic construct
  source 1..22: mol_type = other RNA
gattgctcagattgggtggtaa

SEQ ID NO: 10021 - RNA, 22 nt, synthetic construct
  source 1..22: mol_type = other RNA
gattgggccgtctcatgtatgg

SEQ ID NO: 10022 - RNA, 22 nt, synthetic construct
  source 1..22: mol_type = other RNA
gattgggtggtaatctagaggt

SEQ ID NO: 10023 - RNA, 22 nt, synthetic construct
  source 1..22: mol_type = other RNA
gattggtggatccagaagcaga

SEQ ID NO: 10024 - RNA, 22 nt, synthetic construct
  source 1..22: mol_type = other RNA
gatttctgaggcacatagtctg

SEQ ID NO: 10025 - RNA, 22 nt, synthetic construct
  source 1..22: mol_type = other RNA
gcaaaaaagtgaaacgggagcc

SEQ ID NO: 10026 - RNA, 22 nt, synthetic construct
  source 1..22: mol_type = other RNA
gcaaaagttctgtggacagggt

SEQ ID NO: 10027 - RNA, 22 nt, synthetic construct
  source 1..22: mol_type = other RNA
gcaaagcgtgagctgcatgcca

SEQ ID NO: 10028 - RNA, 22 nt, synthetic construct
  source 1..22: mol_type = other RNA
gcaagagacttgatgaaacgca

SEQ ID NO: 10029 - RNA, 22 nt, synthetic construct
  source 1..22: mol_type = other RNA
gcaatccaaacatggactataa

SEQ ID NO: 10030 - RNA, 22 nt, synthetic construct
  source 1..22: mol_type = other RNA
gcaatggaaacctatcagtgga

SEQ ID NO: 10031 - RNA, 22 nt, synthetic construct
  source 1..22: mol_type = other RNA
gcaatttccctacatgatgtac

SEQ ID NO: 10032 - RNA, 22 nt, synthetic construct
  source 1..22: mol_type = other RNA
gcacactcaatgagaattgacc

SEQ ID NO: 10033 - RNA, 22 nt, synthetic construct
  source 1..22: mol_type = other RNA
gcacatagtctgggccatactt

SEQ ID NO: 10034 - RNA, 22 nt, synthetic construct
  source 1..22: mol_type = other RNA
gcaccagaagccacaccctgga

SEQ ID NO: 10035 - RNA, 22 nt, synthetic construct
  source 1..22: mol_type = other RNA
gcaccagccctatgaacttcta

SEQ ID NO: 10036 - RNA, 22 nt, synthetic construct
  source 1..22: mol_type = other RNA
gcactagtccagggtgtggctt

SEQ ID NO: 10037 - RNA, 22 nt, synthetic construct
  source 1..22: mol_type = other RNA
gcactgtagttatggattatgt

SEQ ID NO: 10038 - RNA, 22 nt, synthetic construct
  source 1..22: mol_type = other RNA
gcagaataagagttgacagact

SEQ ID NO: 10039 - RNA, 22 nt, synthetic construct
  source 1..22: mol_type = other RNA
gcagagaccccagcagcagcag

SEQ ID NO: 10040 - RNA, 22 nt, synthetic construct
  source 1..22: mol_type = other RNA
gcagagctttctggatcctgac

SEQ ID NO: 10041 - RNA, 22 nt, synthetic construct
  source 1..22: mol_type = other RNA
gcagaggacaacgatgaggtct

SEQ ID NO: 10042 - RNA, 22 nt, synthetic construct
  source 1..22: mol_type = other RNA
gcagcagagaccccagcagcag

SEQ ID NO: 10043 - RNA, 22 nt, synthetic construct
  source 1..22: mol_type = other RNA
gcagcagcagagaccccagcag

SEQ ID NO: 10044 - RNA, 22 nt, synthetic construct
  source 1..22: mol_type = other RNA
gcagcagcagccacatcaccct

SEQ ID NO: 10045 - RNA, 22 nt, synthetic construct
  source 1..22: mol_type = other RNA
gcagcagccacatcaccctcag

SEQ ID NO: 10046 - RNA, 22 nt, synthetic construct
  source 1..22: mol_type = other RNA
gcagcagtcccagcagccccag

SEQ ID NO: 10047 - RNA, 22 nt, synthetic construct
  source 1..22: mol_type = other RNA
gcagccacatcaccctcagaca

SEQ ID NO: 10048 - RNA, 22 nt, synthetic construct
  source 1..22: mol_type = other RNA
gcagccaccacagccccagcag

SEQ ID NO: 10049 - RNA, 22 nt, synthetic construct
  source 1..22: mol_type = other RNA
gcagccattggcactagtccag

SEQ ID NO: 10050 - RNA, 22 nt, synthetic construct
  source 1..22: mol_type = other RNA
gcagccccagcctctacagaag

SEQ ID NO: 10051 - RNA, 22 nt, synthetic construct
  source 1..22: mol_type = other RNA
gcagctcacgctttgcacactc

SEQ ID NO: 10052 - RNA, 22 nt, synthetic construct
  source 1..22: mol_type = other RNA
gcagctccgggcatgttcaaca

SEQ ID NO: 10053 - RNA, 22 nt, synthetic construct
  source 1..22: mol_type = other RNA
gcagcttgagatgaggtggaat

SEQ ID NO: 10054 - RNA, 22 nt, synthetic construct
  source 1..22: mol_type = other RNA
gcaggctcccgtttcacttttt

SEQ ID NO: 10055 - RNA, 22 nt, synthetic construct
  source 1..22: mol_type = other RNA
gcagggagatggtttcagcagt

SEQ ID NO: 10056 - RNA, 22 nt, synthetic construct
  source 1..22: mol_type = other RNA
gcagggcatgaagagagctgtt

SEQ ID NO: 10057 - RNA, 22 nt, synthetic construct
  source 1..22: mol_type = other RNA
gcaggtaagtgggctctgaagt

SEQ ID NO: 10058 - RNA, 22 nt, synthetic construct
  source 1..22: mol_type = other RNA
gcaggttcatatttgaattctt

SEQ ID NO: 10059 - RNA, 22 nt, synthetic construct
  source 1..22: mol_type = other RNA
gcagtcccagcagccccagcct

SEQ ID NO: 10060 - RNA, 22 nt, synthetic construct
  source 1..22: mol_type = other RNA
gcagttctatcatggttaagag

SEQ ID NO: 10061 - RNA, 22 nt, synthetic construct
  source 1..22: mol_type = other RNA
gcagttgtaccattagaccaaa

SEQ ID NO: 10062 - RNA, 22 nt, synthetic construct
  source 1..22: mol_type = other RNA
gcagttgtccactgataggttt

SEQ ID NO: 10063 - RNA, 22 nt, synthetic construct
  source 1..22: mol_type = other RNA
gcataagagcatgaatgagcca

SEQ ID NO: 10064 - RNA, 22 nt, synthetic construct
  source 1..22: mol_type = other RNA
gcatatggagatgtagttactg

SEQ ID NO: 10065 - RNA, 22 nt, synthetic construct
  source 1..22: mol_type = other RNA
gcatattttggtttccataacc

SEQ ID NO: 10066 - RNA, 22 nt, synthetic construct
  source 1..22: mol_type = other RNA
gcatcacttaatttgtgtaagc

SEQ ID NO: 10067 - RNA, 22 nt, synthetic construct
  source 1..22: mol_type = other RNA
gcatctccaaaacaaggagaat

SEQ ID NO: 10068 - RNA, 22 nt, synthetic construct
  source 1..22: mol_type = other RNA
gcatctttgataacccattagc

SEQ ID NO: 10069 - RNA, 22 nt, synthetic construct
  source 1..22: mol_type = other RNA
gcatgaagagagctgttgaaca

SEQ ID NO: 10070 - RNA, 22 nt, synthetic construct
  source 1..22: mol_type = other RNA
gcatgaatgagccaaaacatgg

SEQ ID NO: 10071 - RNA, 22 nt, synthetic construct
  source 1..22: mol_type = other RNA
gcatgactggtcctgaaagtcg

SEQ ID NO: 10072 - RNA, 22 nt, synthetic construct
  source 1..22: mol_type = other RNA
gcatgcagctcacgctttgcac

SEQ ID NO: 10073 - RNA, 22 nt, synthetic construct
  source 1..22: mol_type = other RNA
gcatgccacaacccctttaaag

SEQ ID NO: 10074 - RNA, 22 nt, synthetic construct
  source 1..22: mol_type = other RNA
gcatgtcattctccttgttttg

SEQ ID NO: 10075 - RNA, 22 nt, synthetic construct
  source 1..22: mol_type = other RNA
gcatgttcaacagctctcttca

SEQ ID NO: 10076 - RNA, 22 nt, synthetic construct
  source 1..22: mol_type = other RNA
gcattgatatgatggatattgg

SEQ ID NO: 10077 - RNA, 22 nt, synthetic construct
  source 1..22: mol_type = other RNA
gccaaaacatggcttggctctt

SEQ ID NO: 10078 - RNA, 22 nt, synthetic construct
  source 1..22: mol_type = other RNA
gccaaaatggctgaaaaagccc

SEQ ID NO: 10079 - RNA, 22 nt, synthetic construct
  source 1..22: mol_type = other RNA
gccaagaccctctgtctaagct

SEQ ID NO: 10080 - RNA, 22 nt, synthetic construct
  source 1..22: mol_type = other RNA
gccaagccatgttttggctcat

SEQ ID NO: 10081 - RNA, 22 nt, synthetic construct
  source 1..22: mol_type = other RNA
gccaaggtttggaaatagccag

SEQ ID NO: 10082 - RNA, 22 nt, synthetic construct
  source 1..22: mol_type = other RNA
gccaatggctgcttttcctgac

SEQ ID NO: 10083 - RNA, 22 nt, synthetic construct
  source 1..22: mol_type = other RNA
gccacaacccctttaaagaatc

SEQ ID NO: 10084 - RNA, 22 nt, synthetic construct
  source 1..22: mol_type = other RNA
gccacaccctggactagtgcca

SEQ ID NO: 10085 - RNA, 22 nt, synthetic construct
  source 1..22: mol_type = other RNA
gccacatcaccctcagacagag

SEQ ID NO: 10086 - RNA, 22 nt, synthetic construct
  source 1..22: mol_type = other RNA
gccacatgaaacttcagagccc

SEQ ID NO: 10087 - RNA, 22 nt, synthetic construct
  source 1..22: mol_type = other RNA
gccaccacagccccagcagcag

SEQ ID NO: 10088 - RNA, 22 nt, synthetic construct
  source 1..22: mol_type = other RNA
gccacctctagattaccaccca

SEQ ID NO: 10089 - RNA, 22 nt, synthetic construct
  source 1..22: mol_type = other RNA
gccacggccactcccccaatgt

SEQ ID NO: 10090 - RNA, 22 nt, synthetic construct
  source 1..22: mol_type = other RNA
gccactcccccaatgtcaggat

SEQ ID NO: 10091 - RNA, 22 nt, synthetic construct
  source 1..22: mol_type = other RNA
gccacttcatgggagccacctc

SEQ ID NO: 10092 - RNA, 22 nt, synthetic construct
  source 1..22: mol_type = other RNA
gccagagttttacatctaaata

SEQ ID NO: 10093 - RNA, 22 nt, synthetic construct
  source 1..22: mol_type = other RNA
gccatacttttcacactcttcc

SEQ ID NO: 10094 - RNA, 22 nt, synthetic construct
  source 1..22: mol_type = other RNA
gccatccatctcatgagtggga

SEQ ID NO: 10095 - RNA, 22 nt, synthetic construct
  source 1..22: mol_type = other RNA
gccatgggatttctgaggcaca

SEQ ID NO: 10096 - RNA, 22 nt, synthetic construct
  source 1..22: mol_type = other RNA
gccatgttttggctcattcatg

SEQ ID NO: 10097 - RNA, 22 nt, synthetic construct
  source 1..22: mol_type = other RNA
gccattggcactagtccagggt

SEQ ID NO: 10098 - RNA, 22 nt, synthetic construct
  source 1..22: mol_type = other RNA
gccattttggcttcccaaagag

SEQ ID NO: 10099 - RNA, 22 nt, synthetic construct
  source 1..22: mol_type = other RNA
gcccaatccagttagtccttat

SEQ ID NO: 10100 - RNA, 22 nt, synthetic construct
  source 1..22: mol_type = other RNA
gcccacttacctgcgtttcatc

SEQ ID NO: 10101 - RNA, 22 nt, synthetic construct
  source 1..22: mol_type = other RNA
gcccagactatgtgcctcagaa

SEQ ID NO: 10102 - RNA, 22 nt, synthetic construct
  source 1..22: mol_type = other RNA
gcccagggtaagggttcatggg

SEQ ID NO: 10103 - RNA, 22 nt, synthetic construct
  source 1..22: mol_type = other RNA
gccccagcagcagcagagaccc

SEQ ID NO: 10104 - RNA, 22 nt, synthetic construct
  source 1..22: mol_type = other RNA
gccccagcctctacagaagcag

SEQ ID NO: 10105 - RNA, 22 nt, synthetic construct
  source 1..22: mol_type = other RNA
gcccggagctgcactgtagtta

SEQ ID NO: 10106 - RNA, 22 nt, synthetic construct
  source 1..22: mol_type = other RNA
gcccgtgagaaagaggaagagt

SEQ ID NO: 10107 - RNA, 22 nt, synthetic construct
  source 1..22: mol_type = other RNA
gccctatgaacttctattccac

SEQ ID NO: 10108 - RNA, 22 nt, synthetic construct
  source 1..22: mol_type = other RNA
gccctgcatctccaaaacaagg

SEQ ID NO: 10109 - RNA, 22 nt, synthetic construct
  source 1..22: mol_type = other RNA
gccctgtgacccgagtgaaggc

SEQ ID NO: 10110 - RNA, 22 nt, synthetic construct
  source 1..22: mol_type = other RNA
gccgaaaggaccatgtccgtga

SEQ ID NO: 10111 - RNA, 22 nt, synthetic construct
  source 1..22: mol_type = other RNA
gccgatggatctgtataggtat

SEQ ID NO: 10112 - RNA, 22 nt, synthetic construct
  source 1..22: mol_type = other RNA
gccgtctcatgtatggattggt

SEQ ID NO: 10113 - RNA, 22 nt, synthetic construct
  source 1..22: mol_type = other RNA
gccgtggctccaactcatgggt

SEQ ID NO: 10114 - RNA, 22 nt, synthetic construct
  source 1..22: mol_type = other RNA
gcctcagaaatcccatggcaaa

SEQ ID NO: 10115 - RNA, 22 nt, synthetic construct
  source 1..22: mol_type = other RNA
gcctccttatcccactcatgag

SEQ ID NO: 10116 - RNA, 22 nt, synthetic construct
  source 1..22: mol_type = other RNA
gcctccttggacacaagcagtt

SEQ ID NO: 10117 - RNA, 22 nt, synthetic construct
  source 1..22: mol_type = other RNA
gcctctacagaagcagccacca

SEQ ID NO: 10118 - RNA, 22 nt, synthetic construct
  source 1..22: mol_type = other RNA
gcctgctgagccacatgaaact

SEQ ID NO: 10119 - RNA, 22 nt, synthetic construct
  source 1..22: mol_type = other RNA
gccttacaacagatatatatga

SEQ ID NO: 10120 - RNA, 22 nt, synthetic construct
  source 1..22: mol_type = other RNA
gccttcactcgggtcacagggc

SEQ ID NO: 10121 - RNA, 22 nt, synthetic construct
  source 1..22: mol_type = other RNA
gcgactttcaggaccagtcatg

SEQ ID NO: 10122 - RNA, 22 nt, synthetic construct
  source 1..22: mol_type = other RNA
gcgagcagagctttctggatcc

SEQ ID NO: 10123 - RNA, 22 nt, synthetic construct
  source 1..22: mol_type = other RNA
gcgtgagctgcatgccacaacc

SEQ ID NO: 10124 - RNA, 22 nt, synthetic construct
  source 1..22: mol_type = other RNA
gcgtttcatcaagtctcttgcc

SEQ ID NO: 10125 - RNA, 22 nt, synthetic construct
  source 1..22: mol_type = other RNA
gctaatgggttatcaaagatgc

SEQ ID NO: 10126 - RNA, 22 nt, synthetic construct
  source 1..22: mol_type = other RNA
gctaatggtcaggaaaagcagc

SEQ ID NO: 10127 - RNA, 22 nt, synthetic construct
  source 1..22: mol_type = other RNA
gctatttccaaaccttggctgg

SEQ ID NO: 10128 - RNA, 22 nt, synthetic construct
  source 1..22: mol_type = other RNA
gctcacgctttgcacactcaat

SEQ ID NO: 10129 - RNA, 22 nt, synthetic construct
  source 1..22: mol_type = other RNA
gctcagattgggtggtaatcta

SEQ ID NO: 10130 - RNA, 22 nt, synthetic construct
  source 1..22: mol_type = other RNA
gctcagcaggctcccgtttcac

SEQ ID NO: 10131 - RNA, 22 nt, synthetic construct
  source 1..22: mol_type = other RNA
gctcagtctaccacccatccat

SEQ ID NO: 10132 - RNA, 22 nt, synthetic construct
  source 1..22: mol_type = other RNA
gctcattcatgctcttatgctg

SEQ ID NO: 10133 - RNA, 22 nt, synthetic construct
  source 1..22: mol_type = other RNA
gctccaactcatgggtcaattc

SEQ ID NO: 10134 - RNA, 22 nt, synthetic construct
  source 1..22: mol_type = other RNA
gctcccatgaagtggccatcca

SEQ ID NO: 10135 - RNA, 22 nt, synthetic construct
  source 1..22: mol_type = other RNA
gctccccatatctgggttccta

SEQ ID NO: 10136 - RNA, 22 nt, synthetic construct
  source 1..22: mol_type = other RNA
gctcccgtttcacttttttgcc

SEQ ID NO: 10137 - RNA, 22 nt, synthetic construct
  source 1..22: mol_type = other RNA
gctccgggcatgttcaacagct

SEQ ID NO: 10138 - RNA, 22 nt, synthetic construct
  source 1..22: mol_type = other RNA
gctcgctgtctgaccagacctc

SEQ ID NO: 10139 - RNA, 22 nt, synthetic construct
  source 1..22: mol_type = other RNA
gctctcttcatgccctgcatct

SEQ ID NO: 10140 - RNA, 22 nt, synthetic construct
  source 1..22: mol_type = other RNA
gctctgaagtttcatgtggctc

SEQ ID NO: 10141 - RNA, 22 nt, synthetic construct
  source 1..22: mol_type = other RNA
gctctgctcgctgtctgaccag

SEQ ID NO: 10142 - RNA, 22 nt, synthetic construct
  source 1..22: mol_type = other RNA
gctcttaaccatgatagaactg

SEQ ID NO: 10143 - RNA, 22 nt, synthetic construct
  source 1..22: mol_type = other RNA
gctcttatgctggtaaaagacg

SEQ ID NO: 10144 - RNA, 22 nt, synthetic construct
  source 1..22: mol_type = other RNA
gctctttgggaagccaaaatgg

SEQ ID NO: 10145 - RNA, 22 nt, synthetic construct
  source 1..22: mol_type = other RNA
gctgaaaaagcccgtgagaaag

SEQ ID NO: 10146 - RNA, 22 nt, synthetic construct
  source 1..22: mol_type = other RNA
gctgaaaccatctccctgcata

SEQ ID NO: 10147 - RNA, 22 nt, synthetic construct
  source 1..22: mol_type = other RNA
gctgagactggggagaatagga

SEQ ID NO: 10148 - RNA, 22 nt, synthetic construct
  source 1..22: mol_type = other RNA
gctgagccacatgaaacttcag

SEQ ID NO: 10149 - RNA, 22 nt, synthetic construct
  source 1..22: mol_type = other RNA
gctgcactgtagttatggatta

SEQ ID NO: 10150 - RNA, 22 nt, synthetic construct
  source 1..22: mol_type = other RNA
gctgcaggttcatatttgaatt

SEQ ID NO: 10151 - RNA, 22 nt, synthetic construct
  source 1..22: mol_type = other RNA
gctgcatgactggtcctgaaag

SEQ ID NO: 10152 - RNA, 22 nt, synthetic construct
  source 1..22: mol_type = other RNA
gctgcatgccacaaccccttta

SEQ ID NO: 10153 - RNA, 22 nt, synthetic construct
  source 1..22: mol_type = other RNA
gctgctgctgctggggtctctg

SEQ ID NO: 10154 - RNA, 22 nt, synthetic construct
  source 1..22: mol_type = other RNA
gctgctgctggggctgtggtgg

SEQ ID NO: 10155 - RNA, 22 nt, synthetic construct
  source 1..22: mol_type = other RNA
gctgctgctggggtctctgctg

SEQ ID NO: 10156 - RNA, 22 nt, synthetic construct
  source 1..22: mol_type = other RNA
gctgctgggactgctgcatgac

SEQ ID NO: 10157 - RNA, 22 nt, synthetic construct
  source 1..22: mol_type = other RNA
gctgctggggctgtggtggctg

SEQ ID NO: 10158 - RNA, 22 nt, synthetic construct
  source 1..22: mol_type = other RNA
gctgctggggtctctgctgctg

SEQ ID NO: 10159 - RNA, 22 nt, synthetic construct
  source 1..22: mol_type = other RNA
gctgcttctgtagaggctgggg

SEQ ID NO: 10160 - RNA, 22 nt, synthetic construct
  source 1..22: mol_type = other RNA
gctgcttttcctgaccattagc

SEQ ID NO: 10161 - RNA, 22 nt, synthetic construct
  source 1..22: mol_type = other RNA
gctggaagcatctttgataacc

SEQ ID NO: 10162 - RNA, 22 nt, synthetic construct
  source 1..22: mol_type = other RNA
gctgggactgctgcatgactgg

SEQ ID NO: 10163 - RNA, 22 nt, synthetic construct
  source 1..22: mol_type = other RNA
gctggggctgctgggactgctg

SEQ ID NO: 10164 - RNA, 22 nt, synthetic construct
  source 1..22: mol_type = other RNA
gctggggctgtggtggctgctt

SEQ ID NO: 10165 - RNA, 22 nt, synthetic construct
  source 1..22: mol_type = other RNA
gctggggtctctgctgctgctg

SEQ ID NO: 10166 - RNA, 22 nt, synthetic construct
  source 1..22: mol_type = other RNA
gctggtaaaagacgagggagat

SEQ ID NO: 10167 - RNA, 22 nt, synthetic construct
  source 1..22: mol_type = other RNA
gctggtaaagtgtatggatggg

SEQ ID NO: 10168 - RNA, 22 nt, synthetic construct
  source 1..22: mol_type = other RNA
gctggtgcttccatagatatct

SEQ ID NO: 10169 - RNA, 22 nt, synthetic construct
  source 1..22: mol_type = other RNA
gctgtctgaccagacctcatcg

SEQ ID NO: 10170 - RNA, 22 nt, synthetic construct
  source 1..22: mol_type = other RNA
gctgtggtggctgcttctgtag

SEQ ID NO: 10171 - RNA, 22 nt, synthetic construct
  source 1..22: mol_type = other RNA
gctgtgtgggaaagcatgtcat

SEQ ID NO: 10172 - RNA, 22 nt, synthetic construct
  source 1..22: mol_type = other RNA
gctgttgaacatgcccggagct

SEQ ID NO: 10173 - RNA, 22 nt, synthetic construct
  source 1..22: mol_type = other RNA
gcttacacaaattaagtgatgc

SEQ ID NO: 10174 - RNA, 22 nt, synthetic construct
  source 1..22: mol_type = other RNA
gcttagacagagggtcttggct

SEQ ID NO: 10175 - RNA, 22 nt, synthetic construct
  source 1..22: mol_type = other RNA
gcttccagctcttaaccatgat

SEQ ID NO: 10176 - RNA, 22 nt, synthetic construct
  source 1..22: mol_type = other RNA
gcttccatagatatctgaagtg

SEQ ID NO: 10177 - RNA, 22 nt, synthetic construct
  source 1..22: mol_type = other RNA
gcttcccaaagagccaagccat

SEQ ID NO: 10178 - RNA, 22 nt, synthetic construct
  source 1..22: mol_type = other RNA
gcttctggatccaccaatccat

SEQ ID NO: 10179 - RNA, 22 nt, synthetic construct
  source 1..22: mol_type = other RNA
gcttctggtgcagaggacaacg

SEQ ID NO: 10180 - RNA, 22 nt, synthetic construct
  source 1..22: mol_type = other RNA
gcttctgtagaggctggggctg

SEQ ID NO: 10181 - RNA, 22 nt, synthetic construct
  source 1..22: mol_type = other RNA
gcttgagatgaggtggaataga

SEQ ID NO: 10182 - RNA, 22 nt, synthetic construct
  source 1..22: mol_type = other RNA
gcttggatacctatacagatcc

SEQ ID NO: 10183 - RNA, 22 nt, synthetic construct
  source 1..22: mol_type = other RNA
gcttggctctttgggaagccaa

SEQ ID NO: 10184 - RNA, 22 nt, synthetic construct
  source 1..22: mol_type = other RNA
gcttgtgtccaaggaggcttac

SEQ ID NO: 10185 - RNA, 22 nt, synthetic construct
  source 1..22: mol_type = other RNA
gctttcccacacagctaatggg

SEQ ID NO: 10186 - RNA, 22 nt, synthetic construct
  source 1..22: mol_type = other RNA
gctttctggatcctgacattgg

SEQ ID NO: 10187 - RNA, 22 nt, synthetic construct
  source 1..22: mol_type = other RNA
gctttgcacactcaatgagaat

SEQ ID NO: 10188 - RNA, 22 nt, synthetic construct
  source 1..22: mol_type = other RNA
gcttttcctgaccattagcatc

SEQ ID NO: 10189 - RNA, 22 nt, synthetic construct
  source 1..22: mol_type = other RNA
gcttttgaatcagaatacccaa

SEQ ID NO: 10190 - RNA, 22 nt, synthetic construct
  source 1..22: mol_type = other RNA
gctttttcagccattttggctt

SEQ ID NO: 10191 - RNA, 22 nt, synthetic construct
  source 1..22: mol_type = other RNA
ggaaaagcagccattggcacta

SEQ ID NO: 10192 - RNA, 22 nt, synthetic construct
  source 1..22: mol_type = other RNA
ggaaaccaaaatatgcagggag

SEQ ID NO: 10193 - RNA, 22 nt, synthetic construct
  source 1..22: mol_type = other RNA
ggaaacctatcagtggacaact

SEQ ID NO: 10194 - RNA, 22 nt, synthetic construct
  source 1..22: mol_type = other RNA
ggaaagcatgtcattctccttg

SEQ ID NO: 10195 - RNA, 22 nt, synthetic construct
  source 1..22: mol_type = other RNA
ggaaatagccagagttttacat

SEQ ID NO: 10196 - RNA, 22 nt, synthetic construct
  source 1..22: mol_type = other RNA
ggaaattgcctccttatcccac

SEQ ID NO: 10197 - RNA, 22 nt, synthetic construct
  source 1..22: mol_type = other RNA
ggaacccagatatggggagcag

SEQ ID NO: 10198 - RNA, 22 nt, synthetic construct
  source 1..22: mol_type = other RNA
ggaagagtgtgaaaagtatggc

SEQ ID NO: 10199 - RNA, 22 nt, synthetic construct
  source 1..22: mol_type = other RNA
ggaagcaccagccctatgaact

SEQ ID NO: 10200 - RNA, 22 nt, synthetic construct
  source 1..22: mol_type = other RNA
ggaagcatctttgataacccat

SEQ ID NO: 10201 - RNA, 22 nt, synthetic construct
  source 1..22: mol_type = other RNA
ggaagccaaaatggctgaaaaa

SEQ ID NO: 10202 - RNA, 22 nt, synthetic construct
  source 1..22: mol_type = other RNA
ggaatagaagttcatagggctg

SEQ ID NO: 10203 - RNA, 22 nt, synthetic construct
  source 1..22: mol_type = other RNA
ggaatcaccccaccaggatctc

SEQ ID NO: 10204 - RNA, 22 nt, synthetic construct
  source 1..22: mol_type = other RNA
ggacaacgatgaggtctggtca

SEQ ID NO: 10205 - RNA, 22 nt, synthetic construct
  source 1..22: mol_type = other RNA
ggacaactgctccccatatctg

SEQ ID NO: 10206 - RNA, 22 nt, synthetic construct
  source 1..22: mol_type = other RNA
ggacacaagcagttctatcatg

SEQ ID NO: 10207 - RNA, 22 nt, synthetic construct
  source 1..22: mol_type = other RNA
ggacagggtaagagagaacaga

SEQ ID NO: 10208 - RNA, 22 nt, synthetic construct
  source 1..22: mol_type = other RNA
ggacatggtcctttcggcaaga

SEQ ID NO: 10209 - RNA, 22 nt, synthetic construct
  source 1..22: mol_type = other RNA
ggaccagtcatgcagcagtccc

SEQ ID NO: 10210 - RNA, 22 nt, synthetic construct
  source 1..22: mol_type = other RNA
ggaccatgtccgtgaccacaga

SEQ ID NO: 10211 - RNA, 22 nt, synthetic construct
  source 1..22: mol_type = other RNA
ggactaactggattgggccgtc

SEQ ID NO: 10212 - RNA, 22 nt, synthetic construct
  source 1..22: mol_type = other RNA
ggactagtgccaatggctgctt

SEQ ID NO: 10213 - RNA, 22 nt, synthetic construct
  source 1..22: mol_type = other RNA
ggactataaaaatggtgaacat

SEQ ID NO: 10214 - RNA, 22 nt, synthetic construct
  source 1..22: mol_type = other RNA
ggactgctgcatgactggtcct

SEQ ID NO: 10215 - RNA, 22 nt, synthetic construct
  source 1..22: mol_type = other RNA
ggagaataggaacccagatatg

SEQ ID NO: 10216 - RNA, 22 nt, synthetic construct
  source 1..22: mol_type = other RNA
ggagaatgacatgctttcccac

SEQ ID NO: 10217 - RNA, 22 nt, synthetic construct
  source 1..22: mol_type = other RNA
ggagatcctggtggggtgattc

SEQ ID NO: 10218 - RNA, 22 nt, synthetic construct
  source 1..22: mol_type = other RNA
ggagatgcagggcatgaagaga

SEQ ID NO: 10219 - RNA, 22 nt, synthetic construct
  source 1..22: mol_type = other RNA
ggagatggtttcagcagttgta

SEQ ID NO: 10220 - RNA, 22 nt, synthetic construct
  source 1..22: mol_type = other RNA
ggagatgtagttactgtggagt

SEQ ID NO: 10221 - RNA, 22 nt, synthetic construct
  source 1..22: mol_type = other RNA
ggagcagttgtccactgatagg

SEQ ID NO: 10222 - RNA, 22 nt, synthetic construct
  source 1..22: mol_type = other RNA
ggagccacctctagattaccac

SEQ ID NO: 10223 - RNA, 22 nt, synthetic construct
  source 1..22: mol_type = other RNA
ggagccacggccactcccccaa

SEQ ID NO: 10224 - RNA, 22 nt, synthetic construct
  source 1..22: mol_type = other RNA
ggagcctgctgagccacatgaa

SEQ ID NO: 10225 - RNA, 22 nt, synthetic construct
  source 1..22: mol_type = other RNA
ggagctgcactgtagttatgga

SEQ ID NO: 10226 - RNA, 22 nt, synthetic construct
  source 1..22: mol_type = other RNA
ggaggcaatttccctacatgat

SEQ ID NO: 10227 - RNA, 22 nt, synthetic construct
  source 1..22: mol_type = other RNA
ggaggcttacacaaattaagtg

SEQ ID NO: 10228 - RNA, 22 nt, synthetic construct
  source 1..22: mol_type = other RNA
ggagtctgtggtcacggacatg

SEQ ID NO: 10229 - RNA, 22 nt, synthetic construct
  source 1..22: mol_type = other RNA
ggagtggccgtggctccaactc

SEQ ID NO: 10230 - RNA, 22 nt, synthetic construct
  source 1..22: mol_type = other RNA
ggataaggactaactggattgg

SEQ ID NO: 10231 - RNA, 22 nt, synthetic construct
  source 1..22: mol_type = other RNA
ggataaggaggcaatttcccta

SEQ ID NO: 10232 - RNA, 22 nt, synthetic construct
  source 1..22: mol_type = other RNA
ggatacctatacagatccatcg

SEQ ID NO: 10233 - RNA, 22 nt, synthetic construct
  source 1..22: mol_type = other RNA
ggatattgggtattctgattca

SEQ ID NO: 10234 - RNA, 22 nt, synthetic construct
  source 1..22: mol_type = other RNA
ggatccaccaatccatacatga

SEQ ID NO: 10235 - RNA, 22 nt, synthetic construct
  source 1..22: mol_type = other RNA
ggatccagaaagctctgctcgc

SEQ ID NO: 10236 - RNA, 22 nt, synthetic construct
  source 1..22: mol_type = other RNA
ggatccagaagcagaataagag

SEQ ID NO: 10237 - RNA, 22 nt, synthetic construct
  source 1..22: mol_type = other RNA
ggatcctgacattgggggagtg

SEQ ID NO: 10238 - RNA, 22 nt, synthetic construct
  source 1..22: mol_type = other RNA
ggatctccctcgtcttttacca

SEQ ID NO: 10239 - RNA, 22 nt, synthetic construct
  source 1..22: mol_type = other RNA
ggatctgtataggtatccaagc

SEQ ID NO: 10240 - RNA, 22 nt, synthetic construct
  source 1..22: mol_type = other RNA
ggatggccacttcatgggagcc

SEQ ID NO: 10241 - RNA, 22 nt, synthetic construct
  source 1..22: mol_type = other RNA
ggatgggtggtagactgagctt

SEQ ID NO: 10242 - RNA, 22 nt, synthetic construct
  source 1..22: mol_type = other RNA
ggattagaagaattcaaatatg

SEQ ID NO: 10243 - RNA, 22 nt, synthetic construct
  source 1..22: mol_type = other RNA
ggattatgtgagaaggtgaatg

SEQ ID NO: 10244 - RNA, 22 nt, synthetic construct
  source 1..22: mol_type = other RNA
ggattctttaaaggggttgtgg

SEQ ID NO: 10245 - RNA, 22 nt, synthetic construct
  source 1..22: mol_type = other RNA
ggattgctcagattgggtggta

SEQ ID NO: 10246 - RNA, 22 nt, synthetic construct
  source 1..22: mol_type = other RNA
ggattgggccgtctcatgtatg

SEQ ID NO: 10247 - RNA, 22 nt, synthetic construct
  source 1..22: mol_type = other RNA
ggattggtggatccagaagcag

SEQ ID NO: 10248 - RNA, 22 nt, synthetic construct
  source 1..22: mol_type = other RNA
ggatttctgaggcacatagtct

SEQ ID NO: 10249 - RNA, 22 nt, synthetic construct
  source 1..22: mol_type = other RNA
ggcaaaaaagtgaaacgggagc

SEQ ID NO: 10250 - RNA, 22 nt, synthetic construct
  source 1..22: mol_type = other RNA
ggcaagagacttgatgaaacgc

SEQ ID NO: 10251 - RNA, 22 nt, synthetic construct
  source 1..22: mol_type = other RNA
ggcaatttccctacatgatgta

SEQ ID NO: 10252 - RNA, 22 nt, synthetic construct
  source 1..22: mol_type = other RNA
ggcacatagtctgggccatact

SEQ ID NO: 10253 - RNA, 22 nt, synthetic construct
  source 1..22: mol_type = other RNA
ggcactagtccagggtgtggct

SEQ ID NO: 10254 - RNA, 22 nt, synthetic construct
  source 1..22: mol_type = other RNA
ggcatatggagatgtagttact

SEQ ID NO: 10255 - RNA, 22 nt, synthetic construct
  source 1..22: mol_type = other RNA
ggcatgaagagagctgttgaac

SEQ ID NO: 10256 - RNA, 22 nt, synthetic construct
  source 1..22: mol_type = other RNA
ggcatgcagctcacgctttgca

SEQ ID NO: 10257 - RNA, 22 nt, synthetic construct
  source 1..22: mol_type = other RNA
ggcatgttcaacagctctcttc

SEQ ID NO: 10258 - RNA, 22 nt, synthetic construct
  source 1..22: mol_type = other RNA
ggccactcccccaatgtcagga

SEQ ID NO: 10259 - RNA, 22 nt, synthetic construct
  source 1..22: mol_type = other RNA
ggccacttcatgggagccacct

SEQ ID NO: 10260 - RNA, 22 nt, synthetic construct
  source 1..22: mol_type = other RNA
ggccatacttttcacactcttc

SEQ ID NO: 10261 - RNA, 22 nt, synthetic construct
  source 1..22: mol_type = other RNA
ggccatccatctcatgagtggg

SEQ ID NO: 10262 - RNA, 22 nt, synthetic construct
  source 1..22: mol_type = other RNA
ggcccaatccagttagtcctta

SEQ ID NO: 10263 - RNA, 22 nt, synthetic construct
  source 1..22: mol_type = other RNA
ggcccagactatgtgcctcaga

SEQ ID NO: 10264 - RNA, 22 nt, synthetic construct
  source 1..22: mol_type = other RNA
ggccctgtgacccgagtgaagg

SEQ ID NO: 10265 - RNA, 22 nt, synthetic construct
  source 1..22: mol_type = other RNA
ggccgtctcatgtatggattgg

SEQ ID NO: 10266 - RNA, 22 nt, synthetic construct
  source 1..22: mol_type = other RNA
ggccgtggctccaactcatggg

SEQ ID NO: 10267 - RNA, 22 nt, synthetic construct
  source 1..22: mol_type = other RNA
ggccttacaacagatatatatg

SEQ ID NO: 10268 - RNA, 22 nt, synthetic construct
  source 1..22: mol_type = other RNA
ggctatttccaaaccttggctg

SEQ ID NO: 10269 - RNA, 22 nt, synthetic construct
  source 1..22: mol_type = other RNA
ggctcagcaggctcccgtttca

SEQ ID NO: 10270 - RNA, 22 nt, synthetic construct
  source 1..22: mol_type = other RNA
ggctcattcatgctcttatgct

SEQ ID NO: 10271 - RNA, 22 nt, synthetic construct
  source 1..22: mol_type = other RNA
ggctccaactcatgggtcaatt

SEQ ID NO: 10272 - RNA, 22 nt, synthetic construct
  source 1..22: mol_type = other RNA
ggctcccatgaagtggccatcc

SEQ ID NO: 10273 - RNA, 22 nt, synthetic construct
  source 1..22: mol_type = other RNA
ggctcccgtttcacttttttgc

SEQ ID NO: 10274 - RNA, 22 nt, synthetic construct
  source 1..22: mol_type = other RNA
ggctctgaagtttcatgtggct

SEQ ID NO: 10275 - RNA, 22 nt, synthetic construct
  source 1..22: mol_type = other RNA
ggctctttgggaagccaaaatg

SEQ ID NO: 10276 - RNA, 22 nt, synthetic construct
  source 1..22: mol_type = other RNA
ggctgaaaaagcccgtgagaaa

SEQ ID NO: 10277 - RNA, 22 nt, synthetic construct
  source 1..22: mol_type = other RNA
ggctgagactggggagaatagg

SEQ ID NO: 10278 - RNA, 22 nt, synthetic construct
  source 1..22: mol_type = other RNA
ggctgctgctgctggggtctct

SEQ ID NO: 10279 - RNA, 22 nt, synthetic construct
  source 1..22: mol_type = other RNA
ggctgctgggactgctgcatga

SEQ ID NO: 10280 - RNA, 22 nt, synthetic construct
  source 1..22: mol_type = other RNA
ggctgcttctgtagaggctggg

SEQ ID NO: 10281 - RNA, 22 nt, synthetic construct
  source 1..22: mol_type = other RNA
ggctgcttttcctgaccattag

SEQ ID NO: 10282 - RNA, 22 nt, synthetic construct
  source 1..22: mol_type = other RNA
ggctggggctgctgggactgct

SEQ ID NO: 10283 - RNA, 22 nt, synthetic construct
  source 1..22: mol_type = other RNA
ggctggtaaagtgtatggatgg

SEQ ID NO: 10284 - RNA, 22 nt, synthetic construct
  source 1..22: mol_type = other RNA
ggctggtgcttccatagatatc

SEQ ID NO: 10285 - RNA, 22 nt, synthetic construct
  source 1..22: mol_type = other RNA
ggctgtggtggctgcttctgta

SEQ ID NO: 10286 - RNA, 22 nt, synthetic construct
  source 1..22: mol_type = other RNA
ggcttacacaaattaagtgatg

SEQ ID NO: 10287 - RNA, 22 nt, synthetic construct
  source 1..22: mol_type = other RNA
ggcttcccaaagagccaagcca

SEQ ID NO: 10288 - RNA, 22 nt, synthetic construct
  source 1..22: mol_type = other RNA
ggcttctggtgcagaggacaac

SEQ ID NO: 10289 - RNA, 22 nt, synthetic construct
  source 1..22: mol_type = other RNA
ggcttggatacctatacagatc

SEQ ID NO: 10290 - RNA, 22 nt, synthetic construct
  source 1..22: mol_type = other RNA
ggcttggctctttgggaagcca

SEQ ID NO: 10291 - RNA, 22 nt, synthetic construct
  source 1..22: mol_type = other RNA
ggcttttgaatcagaataccca

SEQ ID NO: 10292 - RNA, 22 nt, synthetic construct
  source 1..22: mol_type = other RNA
ggctttttcagccattttggct

SEQ ID NO: 10293 - RNA, 22 nt, synthetic construct
  source 1..22: mol_type = other RNA
gggaaagcatgtcattctcctt

SEQ ID NO: 10294 - RNA, 22 nt, synthetic construct
  source 1..22: mol_type = other RNA
gggaaattgcctccttatccca

SEQ ID NO: 10295 - RNA, 22 nt, synthetic construct
  source 1..22: mol_type = other RNA
gggaagccaaaatggctgaaaa

SEQ ID NO: 10296 - RNA, 22 nt, synthetic construct
  source 1..22: mol_type = other RNA
gggactgctgcatgactggtcc

SEQ ID NO: 10297 - RNA, 22 nt, synthetic construct
  source 1..22: mol_type = other RNA
gggagaataggaacccagatat

SEQ ID NO: 10298 - RNA, 22 nt, synthetic construct
  source 1..22: mol_type = other RNA
gggagatcctggtggggtgatt

SEQ ID NO: 10299 - RNA, 22 nt, synthetic construct
  source 1..22: mol_type = other RNA
gggagatggtttcagcagttgt

SEQ ID NO: 10300 - RNA, 22 nt, synthetic construct
  source 1..22: mol_type = other RNA
gggagcagttgtccactgatag

SEQ ID NO: 10301 - RNA, 22 nt, synthetic construct
  source 1..22: mol_type = other RNA
gggagccacctctagattacca

SEQ ID NO: 10302 - RNA, 22 nt, synthetic construct
  source 1..22: mol_type = other RNA
gggagcctgctgagccacatga

SEQ ID NO: 10303 - RNA, 22 nt, synthetic construct
  source 1..22: mol_type = other RNA
gggagtggccgtggctccaact

SEQ ID NO: 10304 - RNA, 22 nt, synthetic construct
  source 1..22: mol_type = other RNA
gggataaggaggcaatttccct

SEQ ID NO: 10305 - RNA, 22 nt, synthetic construct
  source 1..22: mol_type = other RNA
gggattagaagaattcaaatat

SEQ ID NO: 10306 - RNA, 22 nt, synthetic construct
  source 1..22: mol_type = other RNA
gggattctttaaaggggttgtg

SEQ ID NO: 10307 - RNA, 22 nt, synthetic construct
  source 1..22: mol_type = other RNA
gggatttctgaggcacatagtc

SEQ ID NO: 10308 - RNA, 22 nt, synthetic construct
  source 1..22: mol_type = other RNA
gggcatgaagagagctgttgaa

SEQ ID NO: 10309 - RNA, 22 nt, synthetic construct
  source 1..22: mol_type = other RNA
gggcatgttcaacagctctctt

SEQ ID NO: 10310 - RNA, 22 nt, synthetic construct
  source 1..22: mol_type = other RNA
gggccatacttttcacactctt

SEQ ID NO: 10311 - RNA, 22 nt, synthetic construct
  source 1..22: mol_type = other RNA
gggccgtctcatgtatggattg

SEQ ID NO: 10312 - RNA, 22 nt, synthetic construct
  source 1..22: mol_type = other RNA
gggccttacaacagatatatat

SEQ ID NO: 10313 - RNA, 22 nt, synthetic construct
  source 1..22: mol_type = other RNA
gggctctgaagtttcatgtggc

SEQ ID NO: 10314 - RNA, 22 nt, synthetic construct
  source 1..22: mol_type = other RNA
gggctgctgggactgctgcatg

SEQ ID NO: 10315 - RNA, 22 nt, synthetic construct
  source 1..22: mol_type = other RNA
gggctggtgcttccatagatat

SEQ ID NO: 10316 - RNA, 22 nt, synthetic construct
  source 1..22: mol_type = other RNA
gggctgtggtggctgcttctgt

SEQ ID NO: 10317 - RNA, 22 nt, synthetic construct
  source 1..22: mol_type = other RNA
gggcttttgaatcagaataccc

SEQ ID NO: 10318 - RNA, 22 nt, synthetic construct
  source 1..22: mol_type = other RNA
gggctttttcagccattttggc

SEQ ID NO: 10319 - RNA, 22 nt, synthetic construct
  source 1..22: mol_type = other RNA
ggggagaataggaacccagata

SEQ ID NO: 10320 - RNA, 22 nt, synthetic construct
  source 1..22: mol_type = other RNA
ggggagcagttgtccactgata

SEQ ID NO: 10321 - RNA, 22 nt, synthetic construct
  source 1..22: mol_type = other RNA
ggggagtggccgtggctccaac

SEQ ID NO: 10322 - RNA, 22 nt, synthetic construct
  source 1..22: mol_type = other RNA
ggggctgctgggactgctgcat

SEQ ID NO: 10323 - RNA, 22 nt, synthetic construct
  source 1..22: mol_type = other RNA
ggggctgtggtggctgcttctg

SEQ ID NO: 10324 - RNA, 22 nt, synthetic construct
  source 1..22: mol_type = other RNA
gggggagtggccgtggctccaa

SEQ ID NO: 10325 - RNA, 22 nt, synthetic construct
  source 1..22: mol_type = other RNA
gggggtgatatcatatatatct

SEQ ID NO: 10326 - RNA, 22 nt, synthetic construct
  source 1..22: mol_type = other RNA
ggggtctctgctgctgctgggg

SEQ ID NO: 10327 - RNA, 22 nt, synthetic construct
  source 1..22: mol_type = other RNA
ggggtgatatcatatatatctg

SEQ ID NO: 10328 - RNA, 22 nt, synthetic construct
  source 1..22: mol_type = other RNA
ggggtgattcctattgggattc

SEQ ID NO: 10329 - RNA, 22 nt, synthetic construct
  source 1..22: mol_type = other RNA
ggggttgtggcatgcagctcac

SEQ ID NO: 10330 - RNA, 22 nt, synthetic construct
  source 1..22: mol_type = other RNA
gggtaagagagaacagaaacag

SEQ ID NO: 10331 - RNA, 22 nt, synthetic construct
  source 1..22: mol_type = other RNA
gggtaagggttcatgggattag

SEQ ID NO: 10332 - RNA, 22 nt, synthetic construct
  source 1..22: mol_type = other RNA
gggtattctgattcaaaagccc

SEQ ID NO: 10333 - RNA, 22 nt, synthetic construct
  source 1..22: mol_type = other RNA
gggtcaattctcattgagtgtg

SEQ ID NO: 10334 - RNA, 22 nt, synthetic construct
  source 1..22: mol_type = other RNA
gggtcacagggccttacaacag

SEQ ID NO: 10335 - RNA, 22 nt, synthetic construct
  source 1..22: mol_type = other RNA
gggtctctgctgctgctggggc

SEQ ID NO: 10336 - RNA, 22 nt, synthetic construct
  source 1..22: mol_type = other RNA
gggtcttggcttggatacctat

SEQ ID NO: 10337 - RNA, 22 nt, synthetic construct
  source 1..22: mol_type = other RNA
gggtgatatcatatatatctgt

SEQ ID NO: 10338 - RNA, 22 nt, synthetic construct
  source 1..22: mol_type = other RNA
gggtgatgtggctgctgctgct

SEQ ID NO: 10339 - RNA, 22 nt, synthetic construct
  source 1..22: mol_type = other RNA
gggtgattcctattgggattct

SEQ ID NO: 10340 - RNA, 22 nt, synthetic construct
  source 1..22: mol_type = other RNA
gggtggtaatctagaggtggct

SEQ ID NO: 10341 - RNA, 22 nt, synthetic construct
  source 1..22: mol_type = other RNA
gggtggtagactgagcttagac

SEQ ID NO: 10342 - RNA, 22 nt, synthetic construct
  source 1..22: mol_type = other RNA
gggtgtggcttctggtgcagag

SEQ ID NO: 10343 - RNA, 22 nt, synthetic construct
  source 1..22: mol_type = other RNA
gggttatcaaagatgcttccag

SEQ ID NO: 10344 - RNA, 22 nt, synthetic construct
  source 1..22: mol_type = other RNA
gggttcatgggattagaagaat

SEQ ID NO: 10345 - RNA, 22 nt, synthetic construct
  source 1..22: mol_type = other RNA
gggttcctattctccccagtct

SEQ ID NO: 10346 - RNA, 22 nt, synthetic construct
  source 1..22: mol_type = other RNA
gggttgtggcatgcagctcacg

SEQ ID NO: 10347 - RNA, 22 nt, synthetic construct
  source 1..22: mol_type = other RNA
ggtaaaagacgagggagatcct

SEQ ID NO: 10348 - RNA, 22 nt, synthetic construct
  source 1..22: mol_type = other RNA
ggtaaagtgtatggatgggtgg

SEQ ID NO: 10349 - RNA, 22 nt, synthetic construct
  source 1..22: mol_type = other RNA
ggtaaccaacaaaagggggtga

SEQ ID NO: 10350 - RNA, 22 nt, synthetic construct
  source 1..22: mol_type = other RNA
ggtaagggttcatgggattaga

SEQ ID NO: 10351 - RNA, 22 nt, synthetic construct
  source 1..22: mol_type = other RNA
ggtaagtgggctctgaagtttc

SEQ ID NO: 10352 - RNA, 22 nt, synthetic construct
  source 1..22: mol_type = other RNA
ggtaatctagaggtggctccca

SEQ ID NO: 10353 - RNA, 22 nt, synthetic construct
  source 1..22: mol_type = other RNA
ggtacaactgctgaaaccatct

SEQ ID NO: 10354 - RNA, 22 nt, synthetic construct
  source 1..22: mol_type = other RNA
ggtagactgagcttagacagag

SEQ ID NO: 10355 - RNA, 22 nt, synthetic construct
  source 1..22: mol_type = other RNA
ggtatccaagccaagaccctct

SEQ ID NO: 10356 - RNA, 22 nt, synthetic construct
  source 1..22: mol_type = other RNA
ggtattctgattcaaaagccca

SEQ ID NO: 10357 - RNA, 22 nt, synthetic construct
  source 1..22: mol_type = other RNA
ggtcaattctcattgagtgtgc

SEQ ID NO: 10358 - RNA, 22 nt, synthetic construct
  source 1..22: mol_type = other RNA
ggtcacagggccttacaacaga

SEQ ID NO: 10359 - RNA, 22 nt, synthetic construct
  source 1..22: mol_type = other RNA
ggtcacggacatggtcctttcg

SEQ ID NO: 10360 - RNA, 22 nt, synthetic construct
  source 1..22: mol_type = other RNA
ggtcagacagcgagcagagctt

SEQ ID NO: 10361 - RNA, 22 nt, synthetic construct
  source 1..22: mol_type = other RNA
ggtcaggaaaagcagccattgg

SEQ ID NO: 10362 - RNA, 22 nt, synthetic construct
  source 1..22: mol_type = other RNA
ggtcctgaaagtcgcaaaagtt

SEQ ID NO: 10363 - RNA, 22 nt, synthetic construct
  source 1..22: mol_type = other RNA
ggtcctttcggcaagagacttg

SEQ ID NO: 10364 - RNA, 22 nt, synthetic construct
  source 1..22: mol_type = other RNA
ggtctaatggtacaactgctga

SEQ ID NO: 10365 - RNA, 22 nt, synthetic construct
  source 1..22: mol_type = other RNA
ggtctctgctgctgctggggct

SEQ ID NO: 10366 - RNA, 22 nt, synthetic construct
  source 1..22: mol_type = other RNA
ggtctggtcagacagcgagcag

SEQ ID NO: 10367 - RNA, 22 nt, synthetic construct
  source 1..22: mol_type = other RNA
ggtcttggcttggatacctata

SEQ ID NO: 10368 - RNA, 22 nt, synthetic construct
  source 1..22: mol_type = other RNA
ggtgaacatcattcaccttctc

SEQ ID NO: 10369 - RNA, 22 nt, synthetic construct
  source 1..22: mol_type = other RNA
ggtgaatgatgttcaccatttt

SEQ ID NO: 10370 - RNA, 22 nt, synthetic construct
  source 1..22: mol_type = other RNA
ggtgatatcatatatatctgtt

SEQ ID NO: 10371 - RNA, 22 nt, synthetic construct
  source 1..22: mol_type = other RNA
ggtgatgtggctgctgctgctg

SEQ ID NO: 10372 - RNA, 22 nt, synthetic construct
  source 1..22: mol_type = other RNA
ggtgattcctattgggattctt

SEQ ID NO: 10373 - RNA, 22 nt, synthetic construct
  source 1..22: mol_type = other RNA
ggtgcagaggacaacgatgagg

SEQ ID NO: 10374 - RNA, 22 nt, synthetic construct
  source 1..22: mol_type = other RNA
ggtgcttccatagatatctgaa

SEQ ID NO: 10375 - RNA, 22 nt, synthetic construct
  source 1..22: mol_type = other RNA
ggtggaatagaagttcataggg

SEQ ID NO: 10376 - RNA, 22 nt, synthetic construct
  source 1..22: mol_type = other RNA
ggtggatccagaagcagaataa

SEQ ID NO: 10377 - RNA, 22 nt, synthetic construct
  source 1..22: mol_type = other RNA
ggtggctcccatgaagtggcca

SEQ ID NO: 10378 - RNA, 22 nt, synthetic construct
  source 1..22: mol_type = other RNA
ggtggctgcttctgtagaggct

SEQ ID NO: 10379 - RNA, 22 nt, synthetic construct
  source 1..22: mol_type = other RNA
ggtggggtgattcctattggga

SEQ ID NO: 10380 - RNA, 22 nt, synthetic construct
  source 1..22: mol_type = other RNA
ggtggtaatctagaggtggctc

SEQ ID NO: 10381 - RNA, 22 nt, synthetic construct
  source 1..22: mol_type = other RNA
ggtggtagactgagcttagaca

SEQ ID NO: 10382 - RNA, 22 nt, synthetic construct
  source 1..22: mol_type = other RNA
ggtgtggcttctggtgcagagg

SEQ ID NO: 10383 - RNA, 22 nt, synthetic construct
  source 1..22: mol_type = other RNA
ggttaagagctggaagcatctt

SEQ ID NO: 10384 - RNA, 22 nt, synthetic construct
  source 1..22: mol_type = other RNA
ggttatcaaagatgcttccagc

SEQ ID NO: 10385 - RNA, 22 nt, synthetic construct
  source 1..22: mol_type = other RNA
ggttatggaaaccaaaatatgc

SEQ ID NO: 10386 - RNA, 22 nt, synthetic construct
  source 1..22: mol_type = other RNA
ggttcatatttgaattcttcta

SEQ ID NO: 10387 - RNA, 22 nt, synthetic construct
  source 1..22: mol_type = other RNA
ggttcatgggattagaagaatt

SEQ ID NO: 10388 - RNA, 22 nt, synthetic construct
  source 1..22: mol_type = other RNA
ggttcctattctccccagtctc

SEQ ID NO: 10389 - RNA, 22 nt, synthetic construct
  source 1..22: mol_type = other RNA
ggttgtggcatgcagctcacgc

SEQ ID NO: 10390 - RNA, 22 nt, synthetic construct
  source 1..22: mol_type = other RNA
ggtttcagcagttgtaccatta

SEQ ID NO: 10391 - RNA, 22 nt, synthetic construct
  source 1..22: mol_type = other RNA
ggtttccataacctaagtattt

SEQ ID NO: 10392 - RNA, 22 nt, synthetic construct
  source 1..22: mol_type = other RNA
ggtttccattgcattgatatga

SEQ ID NO: 10393 - RNA, 22 nt, synthetic construct
  source 1..22: mol_type = other RNA
ggtttggaaatagccagagttt

SEQ ID NO: 10394 - RNA, 22 nt, synthetic construct
  source 1..22: mol_type = other RNA
gtaaaactctggctatttccaa

SEQ ID NO: 10395 - RNA, 22 nt, synthetic construct
  source 1..22: mol_type = other RNA
gtaaaagacgagggagatcctg

SEQ ID NO: 10396 - RNA, 22 nt, synthetic construct
  source 1..22: mol_type = other RNA
gtaaagtgtatggatgggtggt

SEQ ID NO: 10397 - RNA, 22 nt, synthetic construct
  source 1..22: mol_type = other RNA
gtaaccaacaaaagggggtgat

SEQ ID NO: 10398 - RNA, 22 nt, synthetic construct
  source 1..22: mol_type = other RNA
gtaactacatctccatatgcct

SEQ ID NO: 10399 - RNA, 22 nt, synthetic construct
  source 1..22: mol_type = other RNA
gtaagcctccttggacacaagc

SEQ ID NO: 10400 - RNA, 22 nt, synthetic construct
  source 1..22: mol_type = other RNA
gtaaggccctgtgacccgagtg

SEQ ID NO: 10401 - RNA, 22 nt, synthetic construct
  source 1..22: mol_type = other RNA
gtaagggttcatgggattagaa

SEQ ID NO: 10402 - RNA, 22 nt, synthetic construct
  source 1..22: mol_type = other RNA
gtaagtgggctctgaagtttca

SEQ ID NO: 10403 - RNA, 22 nt, synthetic construct
  source 1..22: mol_type = other RNA
gtaatctagaggtggctcccat

SEQ ID NO: 10404 - RNA, 22 nt, synthetic construct
  source 1..22: mol_type = other RNA
gtacaactgctgaaaccatctc

SEQ ID NO: 10405 - RNA, 22 nt, synthetic construct
  source 1..22: mol_type = other RNA
gtacatcatgtagggaaattgc

SEQ ID NO: 10406 - RNA, 22 nt, synthetic construct
  source 1..22: mol_type = other RNA
gtacatttggtctaatggtaca

SEQ ID NO: 10407 - RNA, 22 nt, synthetic construct
  source 1..22: mol_type = other RNA
gtaccattagaccaaatgtaca

SEQ ID NO: 10408 - RNA, 22 nt, synthetic construct
  source 1..22: mol_type = other RNA
gtagactgagcttagacagagg

SEQ ID NO: 10409 - RNA, 22 nt, synthetic construct
  source 1..22: mol_type = other RNA
gtagaggctggggctgctggga

SEQ ID NO: 10410 - RNA, 22 nt, synthetic construct
  source 1..22: mol_type = other RNA
gtagggaaattgcctccttatc

SEQ ID NO: 10411 - RNA, 22 nt, synthetic construct
  source 1..22: mol_type = other RNA
gtagttactgtggagtctgtgg

SEQ ID NO: 10412 - RNA, 22 nt, synthetic construct
  source 1..22: mol_type = other RNA
gtagttatggattatgtgagaa

SEQ ID NO: 10413 - RNA, 22 nt, synthetic construct
  source 1..22: mol_type = other RNA
gtataggtatccaagccaagac

SEQ ID NO: 10414 - RNA, 22 nt, synthetic construct
  source 1..22: mol_type = other RNA
gtatccaagccaagaccctctg

SEQ ID NO: 10415 - RNA, 22 nt, synthetic construct
  source 1..22: mol_type = other RNA
gtatggatgggtggtagactga

SEQ ID NO: 10416 - RNA, 22 nt, synthetic construct
  source 1..22: mol_type = other RNA
gtatggattggtggatccagaa

SEQ ID NO: 10417 - RNA, 22 nt, synthetic construct
  source 1..22: mol_type = other RNA
gtatggcccagactatgtgcct

SEQ ID NO: 10418 - RNA, 22 nt, synthetic construct
  source 1..22: mol_type = other RNA
gtattctgattcaaaagcccag

SEQ ID NO: 10419 - RNA, 22 nt, synthetic construct
  source 1..22: mol_type = other RNA
gtatttagatgtaaaactctgg

SEQ ID NO: 10420 - RNA, 22 nt, synthetic construct
  source 1..22: mol_type = other RNA
gtcaactcttattctgcttctg

SEQ ID NO: 10421 - RNA, 22 nt, synthetic construct
  source 1..22: mol_type = other RNA
gtcaattctcattgagtgtgca

SEQ ID NO: 10422 - RNA, 22 nt, synthetic construct
  source 1..22: mol_type = other RNA
gtcacagggccttacaacagat

SEQ ID NO: 10423 - RNA, 22 nt, synthetic construct
  source 1..22: mol_type = other RNA
gtcacggacatggtcctttcgg

SEQ ID NO: 10424 - RNA, 22 nt, synthetic construct
  source 1..22: mol_type = other RNA
gtcagacagcgagcagagcttt

SEQ ID NO: 10425 - RNA, 22 nt, synthetic construct
  source 1..22: mol_type = other RNA
gtcaggaaaagcagccattggc

SEQ ID NO: 10426 - RNA, 22 nt, synthetic construct
  source 1..22: mol_type = other RNA
gtcaggatccagaaagctctgc

SEQ ID NO: 10427 - RNA, 22 nt, synthetic construct
  source 1..22: mol_type = other RNA
gtcatgcagcagtcccagcagc

SEQ ID NO: 10428 - RNA, 22 nt, synthetic construct
  source 1..22: mol_type = other RNA
gtcattctccttgttttggaga

SEQ ID NO: 10429 - RNA, 22 nt, synthetic construct
  source 1..22: mol_type = other RNA
gtccaaggaggcttacacaaat

SEQ ID NO: 10430 - RNA, 22 nt, synthetic construct
  source 1..22: mol_type = other RNA
gtccacagaacttttgcgactt

SEQ ID NO: 10431 - RNA, 22 nt, synthetic construct
  source 1..22: mol_type = other RNA
gtccactgataggtttccattg

SEQ ID NO: 10432 - RNA, 22 nt, synthetic construct
  source 1..22: mol_type = other RNA
gtccagggtgtggcttctggtg

SEQ ID NO: 10433 - RNA, 22 nt, synthetic construct
  source 1..22: mol_type = other RNA
gtccatgtttggattgctcaga

SEQ ID NO: 10434 - RNA, 22 nt, synthetic construct
  source 1..22: mol_type = other RNA
gtcccagcagccccagcctcta

SEQ ID NO: 10435 - RNA, 22 nt, synthetic construct
  source 1..22: mol_type = other RNA
gtccgtgaccacagactccaca

SEQ ID NO: 10436 - RNA, 22 nt, synthetic construct
  source 1..22: mol_type = other RNA
gtcctctgcaccagaagccaca

SEQ ID NO: 10437 - RNA, 22 nt, synthetic construct
  source 1..22: mol_type = other RNA
gtcctgaaagtcgcaaaagttc

SEQ ID NO: 10438 - RNA, 22 nt, synthetic construct
  source 1..22: mol_type = other RNA
gtccttatccaaactcttcaca

SEQ ID NO: 10439 - RNA, 22 nt, synthetic construct
  source 1..22: mol_type = other RNA
gtcctttcggcaagagacttga

SEQ ID NO: 10440 - RNA, 22 nt, synthetic construct
  source 1..22: mol_type = other RNA
gtcgcaaaagttctgtggacag

SEQ ID NO: 10441 - RNA, 22 nt, synthetic construct
  source 1..22: mol_type = other RNA
gtctaagctcagtctaccaccc

SEQ ID NO: 10442 - RNA, 22 nt, synthetic construct
  source 1..22: mol_type = other RNA
gtctaatggtacaactgctgaa

SEQ ID NO: 10443 - RNA, 22 nt, synthetic construct
  source 1..22: mol_type = other RNA
gtctaccacccatccatacact

SEQ ID NO: 10444 - RNA, 22 nt, synthetic construct
  source 1..22: mol_type = other RNA
gtctcagccgatggatctgtat

SEQ ID NO: 10445 - RNA, 22 nt, synthetic construct
  source 1..22: mol_type = other RNA
gtctcatgtatggattggtgga

SEQ ID NO: 10446 - RNA, 22 nt, synthetic construct
  source 1..22: mol_type = other RNA
gtctctgctgctgctggggctg

SEQ ID NO: 10447 - RNA, 22 nt, synthetic construct
  source 1..22: mol_type = other RNA
gtctcttgccgaaaggaccatg

SEQ ID NO: 10448 - RNA, 22 nt, synthetic construct
  source 1..22: mol_type = other RNA
gtctgaccagacctcatcgttg

SEQ ID NO: 10449 - RNA, 22 nt, synthetic construct
  source 1..22: mol_type = other RNA
gtctgagggtgatgtggctgct

SEQ ID NO: 10450 - RNA, 22 nt, synthetic construct
  source 1..22: mol_type = other RNA
gtctgggccatacttttcacac

SEQ ID NO: 10451 - RNA, 22 nt, synthetic construct
  source 1..22: mol_type = other RNA
gtctggtcagacagcgagcaga

SEQ ID NO: 10452 - RNA, 22 nt, synthetic construct
  source 1..22: mol_type = other RNA
gtctgtcaactcttattctgct

SEQ ID NO: 10453 - RNA, 22 nt, synthetic construct
  source 1..22: mol_type = other RNA
gtctgtggtcacggacatggtc

SEQ ID NO: 10454 - RNA, 22 nt, synthetic construct
  source 1..22: mol_type = other RNA
gtcttggcttggatacctatac

SEQ ID NO: 10455 - RNA, 22 nt, synthetic construct
  source 1..22: mol_type = other RNA
gtcttttaccagcataagagca

SEQ ID NO: 10456 - RNA, 22 nt, synthetic construct
  source 1..22: mol_type = other RNA
gtcttttcaagtgaggtaacca

SEQ ID NO: 10457 - RNA, 22 nt, synthetic construct
  source 1..22: mol_type = other RNA
gtgaaaagtatggcccagacta

SEQ ID NO: 10458 - RNA, 22 nt, synthetic construct
  source 1..22: mol_type = other RNA
gtgaaacgggagcctgctgagc

SEQ ID NO: 10459 - RNA, 22 nt, synthetic construct
  source 1..22: mol_type = other RNA
gtgaacatcattcaccttctca

SEQ ID NO: 10460 - RNA, 22 nt, synthetic construct
  source 1..22: mol_type = other RNA
gtgaagagtttggataaggact

SEQ ID NO: 10461 - RNA, 22 nt, synthetic construct
  source 1..22: mol_type = other RNA
gtgaaggcatatggagatgtag

SEQ ID NO: 10462 - RNA, 22 nt, synthetic construct
  source 1..22: mol_type = other RNA
gtgaatgatgttcaccattttt

SEQ ID NO: 10463 - RNA, 22 nt, synthetic construct
  source 1..22: mol_type = other RNA
gtgaccacagactccacagtaa

SEQ ID NO: 10464 - RNA, 22 nt, synthetic construct
  source 1..22: mol_type = other RNA
gtgacccgagtgaaggcatatg

SEQ ID NO: 10465 - RNA, 22 nt, synthetic construct
  source 1..22: mol_type = other RNA
gtgagaaagaggaagagtgtga

SEQ ID NO: 10466 - RNA, 22 nt, synthetic construct
  source 1..22: mol_type = other RNA
gtgagaaggtgaatgatgttca

SEQ ID NO: 10467 - RNA, 22 nt, synthetic construct
  source 1..22: mol_type = other RNA
gtgagctgcatgccacaacccc

SEQ ID NO: 10468 - RNA, 22 nt, synthetic construct
  source 1..22: mol_type = other RNA
gtgaggtaaccaacaaaagggg

SEQ ID NO: 10469 - RNA, 22 nt, synthetic construct
  source 1..22: mol_type = other RNA
gtgatatcatatatatctgttg

SEQ ID NO: 10470 - RNA, 22 nt, synthetic construct
  source 1..22: mol_type = other RNA
gtgatgctaatggtcaggaaaa

SEQ ID NO: 10471 - RNA, 22 nt, synthetic construct
  source 1..22: mol_type = other RNA
gtgatgtggctgctgctgctgg

SEQ ID NO: 10472 - RNA, 22 nt, synthetic construct
  source 1..22: mol_type = other RNA
gtgattcctattgggattcttt

SEQ ID NO: 10473 - RNA, 22 nt, synthetic construct
  source 1..22: mol_type = other RNA
gtgcaaagcgtgagctgcatgc

SEQ ID NO: 10474 - RNA, 22 nt, synthetic construct
  source 1..22: mol_type = other RNA
gtgcagaggacaacgatgaggt

SEQ ID NO: 10475 - RNA, 22 nt, synthetic construct
  source 1..22: mol_type = other RNA
gtgcagctccgggcatgttcaa

SEQ ID NO: 10476 - RNA, 22 nt, synthetic construct
  source 1..22: mol_type = other RNA
gtgccaatggctgcttttcctg

SEQ ID NO: 10477 - RNA, 22 nt, synthetic construct
  source 1..22: mol_type = other RNA
gtgcctcagaaatcccatggca

SEQ ID NO: 10478 - RNA, 22 nt, synthetic construct
  source 1..22: mol_type = other RNA
gtgcttccatagatatctgaag

SEQ ID NO: 10479 - RNA, 22 nt, synthetic construct
  source 1..22: mol_type = other RNA
gtggaatagaagttcatagggc

SEQ ID NO: 10480 - RNA, 22 nt, synthetic construct
  source 1..22: mol_type = other RNA
gtggacaactgctccccatatc

SEQ ID NO: 10481 - RNA, 22 nt, synthetic construct
  source 1..22: mol_type = other RNA
gtggacagggtaagagagaaca

SEQ ID NO: 10482 - RNA, 22 nt, synthetic construct
  source 1..22: mol_type = other RNA
gtggagtctgtggtcacggaca

SEQ ID NO: 10483 - RNA, 22 nt, synthetic construct
  source 1..22: mol_type = other RNA
gtggatccagaagcagaataag

SEQ ID NO: 10484 - RNA, 22 nt, synthetic construct
  source 1..22: mol_type = other RNA
gtggcatgcagctcacgctttg

SEQ ID NO: 10485 - RNA, 22 nt, synthetic construct
  source 1..22: mol_type = other RNA
gtggccatccatctcatgagtg

SEQ ID NO: 10486 - RNA, 22 nt, synthetic construct
  source 1..22: mol_type = other RNA
gtggccgtggctccaactcatg

SEQ ID NO: 10487 - RNA, 22 nt, synthetic construct
  source 1..22: mol_type = other RNA
gtggctcagcaggctcccgttt

SEQ ID NO: 10488 - RNA, 22 nt, synthetic construct
  source 1..22: mol_type = other RNA
gtggctccaactcatgggtcaa

SEQ ID NO: 10489 - RNA, 22 nt, synthetic construct
  source 1..22: mol_type = other RNA
gtggctcccatgaagtggccat

SEQ ID NO: 10490 - RNA, 22 nt, synthetic construct
  source 1..22: mol_type = other RNA
gtggctgctgctgctggggtct

SEQ ID NO: 10491 - RNA, 22 nt, synthetic construct
  source 1..22: mol_type = other RNA
gtggctgcttctgtagaggctg

SEQ ID NO: 10492 - RNA, 22 nt, synthetic construct
  source 1..22: mol_type = other RNA
gtggcttctggtgcagaggaca

SEQ ID NO: 10493 - RNA, 22 nt, synthetic construct
  source 1..22: mol_type = other RNA
gtgggaaagcatgtcattctcc

SEQ ID NO: 10494 - RNA, 22 nt, synthetic construct
  source 1..22: mol_type = other RNA
gtgggataaggaggcaatttcc

SEQ ID NO: 10495 - RNA, 22 nt, synthetic construct
  source 1..22: mol_type = other RNA
gtgggctctgaagtttcatgtg

SEQ ID NO: 10496 - RNA, 22 nt, synthetic construct
  source 1..22: mol_type = other RNA
gtggggtgattcctattgggat

SEQ ID NO: 10497 - RNA, 22 nt, synthetic construct
  source 1..22: mol_type = other RNA
gtggtaatctagaggtggctcc

SEQ ID NO: 10498 - RNA, 22 nt, synthetic construct
  source 1..22: mol_type = other RNA
gtggtagactgagcttagacag

SEQ ID NO: 10499 - RNA, 22 nt, synthetic construct
  source 1..22: mol_type = other RNA
gtggtcacggacatggtccttt

SEQ ID NO: 10500 - RNA, 22 nt, synthetic construct
  source 1..22: mol_type = other RNA
gtggtggctgcttctgtagagg

SEQ ID NO: 10501 - RNA, 22 nt, synthetic construct
  source 1..22: mol_type = other RNA
gtgtaagcctccttggacacaa

SEQ ID NO: 10502 - RNA, 22 nt, synthetic construct
  source 1..22: mol_type = other RNA
gtgtatggatgggtggtagact

SEQ ID NO: 10503 - RNA, 22 nt, synthetic construct
  source 1..22: mol_type = other RNA
gtgtccaaggaggcttacacaa

SEQ ID NO: 10504 - RNA, 22 nt, synthetic construct
  source 1..22: mol_type = other RNA
gtgtgaaaagtatggcccagac

SEQ ID NO: 10505 - RNA, 22 nt, synthetic construct
  source 1..22: mol_type = other RNA
gtgtgaagagtttggataagga

SEQ ID NO: 10506 - RNA, 22 nt, synthetic construct
  source 1..22: mol_type = other RNA
gtgtgcaaagcgtgagctgcat

SEQ ID NO: 10507 - RNA, 22 nt, synthetic construct
  source 1..22: mol_type = other RNA
gtgtggcttctggtgcagagga

SEQ ID NO: 10508 - RNA, 22 nt, synthetic construct
  source 1..22: mol_type = other RNA
gtgtgggaaagcatgtcattct

SEQ ID NO: 10509 - RNA, 22 nt, synthetic construct
  source 1..22: mol_type = other RNA
gtgtgtgaagagtttggataag

SEQ ID NO: 10510 - RNA, 22 nt, synthetic construct
  source 1..22: mol_type = other RNA
gttaagagctggaagcatcttt

SEQ ID NO: 10511 - RNA, 22 nt, synthetic construct
  source 1..22: mol_type = other RNA
gttactgtggagtctgtggtca

SEQ ID NO: 10512 - RNA, 22 nt, synthetic construct
  source 1..22: mol_type = other RNA
gttagtccttatccaaactctt

SEQ ID NO: 10513 - RNA, 22 nt, synthetic construct
  source 1..22: mol_type = other RNA
gttatcaaagatgcttccagct

SEQ ID NO: 10514 - RNA, 22 nt, synthetic construct
  source 1..22: mol_type = other RNA
gttatggaaaccaaaatatgca

SEQ ID NO: 10515 - RNA, 22 nt, synthetic construct
  source 1..22: mol_type = other RNA
gttatggattatgtgagaaggt

SEQ ID NO: 10516 - RNA, 22 nt, synthetic construct
  source 1..22: mol_type = other RNA
gttcaacagctctcttcatgcc

SEQ ID NO: 10517 - RNA, 22 nt, synthetic construct
  source 1..22: mol_type = other RNA
gttcaccatttttatagtccat

SEQ ID NO: 10518 - RNA, 22 nt, synthetic construct
  source 1..22: mol_type = other RNA
gttcatagggctggtgcttcca

SEQ ID NO: 10519 - RNA, 22 nt, synthetic construct
  source 1..22: mol_type = other RNA
gttcatgggattagaagaattc

SEQ ID NO: 10520 - RNA, 22 nt, synthetic construct
  source 1..22: mol_type = other RNA
gttcctattctccccagtctca

SEQ ID NO: 10521 - RNA, 22 nt, synthetic construct
  source 1..22: mol_type = other RNA
gttctatcatggttaagagctg

SEQ ID NO: 10522 - RNA, 22 nt, synthetic construct
  source 1..22: mol_type = other RNA
gttctctcttaccctgtccaca

SEQ ID NO: 10523 - RNA, 22 nt, synthetic construct
  source 1..22: mol_type = other RNA
gttctgtggacagggtaagaga

SEQ ID NO: 10524 - RNA, 22 nt, synthetic construct
  source 1..22: mol_type = other RNA
gttgaacatgcccggagctgca

SEQ ID NO: 10525 - RNA, 22 nt, synthetic construct
  source 1..22: mol_type = other RNA
gttgacagactctgtctgaggg

SEQ ID NO: 10526 - RNA, 22 nt, synthetic construct
  source 1..22: mol_type = other RNA
gttggagccacggccactcccc

SEQ ID NO: 10527 - RNA, 22 nt, synthetic construct
  source 1..22: mol_type = other RNA
gttgtaaggccctgtgacccga

SEQ ID NO: 10528 - RNA, 22 nt, synthetic construct
  source 1..22: mol_type = other RNA
gttgtaccattagaccaaatgt

SEQ ID NO: 10529 - RNA, 22 nt, synthetic construct
  source 1..22: mol_type = other RNA
gttgtccactgataggtttcca

SEQ ID NO: 10530 - RNA, 22 nt, synthetic construct
  source 1..22: mol_type = other RNA
gttgtcctctgcaccagaagcc

SEQ ID NO: 10531 - RNA, 22 nt, synthetic construct
  source 1..22: mol_type = other RNA
gttgtggcatgcagctcacgct

SEQ ID NO: 10532 - RNA, 22 nt, synthetic construct
  source 1..22: mol_type = other RNA
gtttcacttttttgccatggga

SEQ ID NO: 10533 - RNA, 22 nt, synthetic construct
  source 1..22: mol_type = other RNA
gtttcagcagttgtaccattag

SEQ ID NO: 10534 - RNA, 22 nt, synthetic construct
  source 1..22: mol_type = other RNA
gtttcatcaagtctcttgccga

SEQ ID NO: 10535 - RNA, 22 nt, synthetic construct
  source 1..22: mol_type = other RNA
gtttcatgtggctcagcaggct

SEQ ID NO: 10536 - RNA, 22 nt, synthetic construct
  source 1..22: mol_type = other RNA
gtttccataacctaagtattta

SEQ ID NO: 10537 - RNA, 22 nt, synthetic construct
  source 1..22: mol_type = other RNA
gtttccattgcattgatatgat

SEQ ID NO: 10538 - RNA, 22 nt, synthetic construct
  source 1..22: mol_type = other RNA
gtttctgttctctcttaccctg

SEQ ID NO: 10539 - RNA, 22 nt, synthetic construct
  source 1..22: mol_type = other RNA
gtttggaaatagccagagtttt

SEQ ID NO: 10540 - RNA, 22 nt, synthetic construct
  source 1..22: mol_type = other RNA
gtttggataaggactaactgga

SEQ ID NO: 10541 - RNA, 22 nt, synthetic construct
  source 1..22: mol_type = other RNA
gtttggattgctcagattgggt

SEQ ID NO: 10542 - RNA, 22 nt, synthetic construct
  source 1..22: mol_type = other RNA
gttttacatctaaatacttagg

SEQ ID NO: 10543 - RNA, 22 nt, synthetic construct
  source 1..22: mol_type = other RNA
gttttggagatgcagggcatga

SEQ ID NO: 10544 - RNA, 22 nt, synthetic construct
  source 1..22: mol_type = other RNA
gttttggctcattcatgctctt

SEQ ID NO: 10545 - RNA, 22 nt, synthetic construct
  source 1..22: mol_type = other RNA
taaaaatggtgaacatcattca

SEQ ID NO: 10546 - RNA, 22 nt, synthetic construct
  source 1..22: mol_type = other RNA
taaaactctggctatttccaaa

SEQ ID NO: 10547 - RNA, 22 nt, synthetic construct
  source 1..22: mol_type = other RNA
taaaagacgagggagatcctgg

SEQ ID NO: 10548 - RNA, 22 nt, synthetic construct
  source 1..22: mol_type = other RNA
taaagaatcccaataggaatca

SEQ ID NO: 10549 - RNA, 22 nt, synthetic construct
  source 1..22: mol_type = other RNA
taaaggggttgtggcatgcagc

SEQ ID NO: 10550 - RNA, 22 nt, synthetic construct
  source 1..22: mol_type = other RNA
taaagtgtatggatgggtggta

SEQ ID NO: 10551 - RNA, 22 nt, synthetic construct
  source 1..22: mol_type = other RNA
taaatacttaggttatggaaac

SEQ ID NO: 10552 - RNA, 22 nt, synthetic construct
  source 1..22: mol_type = other RNA
taaccaacaaaagggggtgata

SEQ ID NO: 10553 - RNA, 22 nt, synthetic construct
  source 1..22: mol_type = other RNA
taaccatgatagaactgcttgt

SEQ ID NO: 10554 - RNA, 22 nt, synthetic construct
  source 1..22: mol_type = other RNA
taacccattagctgtgtgggaa

SEQ ID NO: 10555 - RNA, 22 nt, synthetic construct
  source 1..22: mol_type = other RNA
taactacagtgcagctccgggc

SEQ ID NO: 10556 - RNA, 22 nt, synthetic construct
  source 1..22: mol_type = other RNA
taactacatctccatatgcctt

SEQ ID NO: 10557 - RNA, 22 nt, synthetic construct
  source 1..22: mol_type = other RNA
taactggattgggccgtctcat

SEQ ID NO: 10558 - RNA, 22 nt, synthetic construct
  source 1..22: mol_type = other RNA
taagagcatgaatgagccaaaa

SEQ ID NO: 10559 - RNA, 22 nt, synthetic construct
  source 1..22: mol_type = other RNA
taagagctggaagcatctttga

SEQ ID NO: 10560 - RNA, 22 nt, synthetic construct
  source 1..22: mol_type = other RNA
taagagttgacagactctgtct

SEQ ID NO: 10561 - RNA, 22 nt, synthetic construct
  source 1..22: mol_type = other RNA
taagcctccttggacacaagca

SEQ ID NO: 10562 - RNA, 22 nt, synthetic construct
  source 1..22: mol_type = other RNA
taagctcagtctaccacccatc

SEQ ID NO: 10563 - RNA, 22 nt, synthetic construct
  source 1..22: mol_type = other RNA
taaggactaactggattgggcc

SEQ ID NO: 10564 - RNA, 22 nt, synthetic construct
  source 1..22: mol_type = other RNA
taaggaggcaatttccctacat

SEQ ID NO: 10565 - RNA, 22 nt, synthetic construct
  source 1..22: mol_type = other RNA
taaggccctgtgacccgagtga

SEQ ID NO: 10566 - RNA, 22 nt, synthetic construct
  source 1..22: mol_type = other RNA
taagggttcatgggattagaag

SEQ ID NO: 10567 - RNA, 22 nt, synthetic construct
  source 1..22: mol_type = other RNA
taagtgatgctaatggtcagga

SEQ ID NO: 10568 - RNA, 22 nt, synthetic construct
  source 1..22: mol_type = other RNA
taagtgggctctgaagtttcat

SEQ ID NO: 10569 - RNA, 22 nt, synthetic construct
  source 1..22: mol_type = other RNA
taatccataactacagtgcagc

SEQ ID NO: 10570 - RNA, 22 nt, synthetic construct
  source 1..22: mol_type = other RNA
taatcccatgaacccttaccct

SEQ ID NO: 10571 - RNA, 22 nt, synthetic construct
  source 1..22: mol_type = other RNA
taatctagaggtggctcccatg

SEQ ID NO: 10572 - RNA, 22 nt, synthetic construct
  source 1..22: mol_type = other RNA
taatgggttatcaaagatgctt

SEQ ID NO: 10573 - RNA, 22 nt, synthetic construct
  source 1..22: mol_type = other RNA
taatggtacaactgctgaaacc

SEQ ID NO: 10574 - RNA, 22 nt, synthetic construct
  source 1..22: mol_type = other RNA
taatggtcaggaaaagcagcca

SEQ ID NO: 10575 - RNA, 22 nt, synthetic construct
  source 1..22: mol_type = other RNA
taatttgtgtaagcctccttgg

SEQ ID NO: 10576 - RNA, 22 nt, synthetic construct
  source 1..22: mol_type = other RNA
tacaactgctgaaaccatctcc

SEQ ID NO: 10577 - RNA, 22 nt, synthetic construct
  source 1..22: mol_type = other RNA
tacacaaattaagtgatgctaa

SEQ ID NO: 10578 - RNA, 22 nt, synthetic construct
  source 1..22: mol_type = other RNA
tacactttaccagccaaggttt

SEQ ID NO: 10579 - RNA, 22 nt, synthetic construct
  source 1..22: mol_type = other RNA
tacagaagcagccaccacagcc

SEQ ID NO: 10580 - RNA, 22 nt, synthetic construct
  source 1..22: mol_type = other RNA
tacagatccatcggctgagact

SEQ ID NO: 10581 - RNA, 22 nt, synthetic construct
  source 1..22: mol_type = other RNA
tacagtgcagctccgggcatgt

SEQ ID NO: 10582 - RNA, 22 nt, synthetic construct
  source 1..22: mol_type = other RNA
tacatcatgtagggaaattgcc

SEQ ID NO: 10583 - RNA, 22 nt, synthetic construct
  source 1..22: mol_type = other RNA
tacatctccatatgccttcact

SEQ ID NO: 10584 - RNA, 22 nt, synthetic construct
  source 1..22: mol_type = other RNA
tacatgagacggcccaatccag

SEQ ID NO: 10585 - RNA, 22 nt, synthetic construct
  source 1..22: mol_type = other RNA
tacatgatgtacatttggtcta

SEQ ID NO: 10586 - RNA, 22 nt, synthetic construct
  source 1..22: mol_type = other RNA
tacatttggtctaatggtacaa

SEQ ID NO: 10587 - RNA, 22 nt, synthetic construct
  source 1..22: mol_type = other RNA
taccacccaatctgagcaatcc

SEQ ID NO: 10588 - RNA, 22 nt, synthetic construct
  source 1..22: mol_type = other RNA
taccacccatccatacacttta

SEQ ID NO: 10589 - RNA, 22 nt, synthetic construct
  source 1..22: mol_type = other RNA
taccagcataagagcatgaatg

SEQ ID NO: 10590 - RNA, 22 nt, synthetic construct
  source 1..22: mol_type = other RNA
taccagccaaggtttggaaata

SEQ ID NO: 10591 - RNA, 22 nt, synthetic construct
  source 1..22: mol_type = other RNA
taccattagaccaaatgtacat

SEQ ID NO: 10592 - RNA, 22 nt, synthetic construct
  source 1..22: mol_type = other RNA
tacccaatatccatcatatcaa

SEQ ID NO: 10593 - RNA, 22 nt, synthetic construct
  source 1..22: mol_type = other RNA
taccctgggcttttgaatcaga

SEQ ID NO: 10594 - RNA, 22 nt, synthetic construct
  source 1..22: mol_type = other RNA
taccctgtccacagaacttttg

SEQ ID NO: 10595 - RNA, 22 nt, synthetic construct
  source 1..22: mol_type = other RNA
tacctatacagatccatcggct

SEQ ID NO: 10596 - RNA, 22 nt, synthetic construct
  source 1..22: mol_type = other RNA
tacctgcgtttcatcaagtctc

SEQ ID NO: 10597 - RNA, 22 nt, synthetic construct
  source 1..22: mol_type = other RNA
tacctgtttctgttctctctta

SEQ ID NO: 10598 - RNA, 22 nt, synthetic construct
  source 1..22: mol_type = other RNA
tactgtggagtctgtggtcacg

SEQ ID NO: 10599 - RNA, 22 nt, synthetic construct
  source 1..22: mol_type = other RNA
tacttaggttatggaaaccaaa

SEQ ID NO: 10600 - RNA, 22 nt, synthetic construct
  source 1..22: mol_type = other RNA
tacttttcacactcttcctctt

SEQ ID NO: 10601 - RNA, 22 nt, synthetic construct
  source 1..22: mol_type = other RNA
tagaactgcttgtgtccaagga

SEQ ID NO: 10602 - RNA, 22 nt, synthetic construct
  source 1..22: mol_type = other RNA
tagaagaattcaaatatgaacc

SEQ ID NO: 10603 - RNA, 22 nt, synthetic construct
  source 1..22: mol_type = other RNA
tagaagttcatagggctggtgc

SEQ ID NO: 10604 - RNA, 22 nt, synthetic construct
  source 1..22: mol_type = other RNA
tagacagagggtcttggcttgg

SEQ ID NO: 10605 - RNA, 22 nt, synthetic construct
  source 1..22: mol_type = other RNA
tagaccaaatgtacatcatgta

SEQ ID NO: 10606 - RNA, 22 nt, synthetic construct
  source 1..22: mol_type = other RNA
tagactgagcttagacagaggg

SEQ ID NO: 10607 - RNA, 22 nt, synthetic construct
  source 1..22: mol_type = other RNA
tagaggctggggctgctgggac

SEQ ID NO: 10608 - RNA, 22 nt, synthetic construct
  source 1..22: mol_type = other RNA
tagaggtggctcccatgaagtg

SEQ ID NO: 10609 - RNA, 22 nt, synthetic construct
  source 1..22: mol_type = other RNA
tagatatctgaagtgtgtgaag

SEQ ID NO: 10610 - RNA, 22 nt, synthetic construct
  source 1..22: mol_type = other RNA
tagatgtaaaactctggctatt

SEQ ID NO: 10611 - RNA, 22 nt, synthetic construct
  source 1..22: mol_type = other RNA
tagattaccacccaatctgagc

SEQ ID NO: 10612 - RNA, 22 nt, synthetic construct
  source 1..22: mol_type = other RNA
tagcatcacttaatttgtgtaa

SEQ ID NO: 10613 - RNA, 22 nt, synthetic construct
  source 1..22: mol_type = other RNA
tagccagagttttacatctaaa

SEQ ID NO: 10614 - RNA, 22 nt, synthetic construct
  source 1..22: mol_type = other RNA
tagctgtgtgggaaagcatgtc

SEQ ID NO: 10615 - RNA, 22 nt, synthetic construct
  source 1..22: mol_type = other RNA
taggaacccagatatggggagc

SEQ ID NO: 10616 - RNA, 22 nt, synthetic construct
  source 1..22: mol_type = other RNA
taggaatcaccccaccaggatc

SEQ ID NO: 10617 - RNA, 22 nt, synthetic construct
  source 1..22: mol_type = other RNA
tagggaaattgcctccttatcc

SEQ ID NO: 10618 - RNA, 22 nt, synthetic construct
  source 1..22: mol_type = other RNA
tagggctggtgcttccatagat

SEQ ID NO: 10619 - RNA, 22 nt, synthetic construct
  source 1..22: mol_type = other RNA
taggtatccaagccaagaccct

SEQ ID NO: 10620 - RNA, 22 nt, synthetic construct
  source 1..22: mol_type = other RNA
taggttatggaaaccaaaatat

SEQ ID NO: 10621 - RNA, 22 nt, synthetic construct
  source 1..22: mol_type = other RNA
taggtttccattgcattgatat

SEQ ID NO: 10622 - RNA, 22 nt, synthetic construct
  source 1..22: mol_type = other RNA
tagtccagggtgtggcttctgg

SEQ ID NO: 10623 - RNA, 22 nt, synthetic construct
  source 1..22: mol_type = other RNA
tagtccatgtttggattgctca

SEQ ID NO: 10624 - RNA, 22 nt, synthetic construct
  source 1..22: mol_type = other RNA
tagtccttatccaaactcttca

SEQ ID NO: 10625 - RNA, 22 nt, synthetic construct
  source 1..22: mol_type = other RNA
tagtctgggccatacttttcac

SEQ ID NO: 10626 - RNA, 22 nt, synthetic construct
  source 1..22: mol_type = other RNA
tagtgccaatggctgcttttcc

SEQ ID NO: 10627 - RNA, 22 nt, synthetic construct
  source 1..22: mol_type = other RNA
tagttactgtggagtctgtggt

SEQ ID NO: 10628 - RNA, 22 nt, synthetic construct
  source 1..22: mol_type = other RNA
tagttatggattatgtgagaag

SEQ ID NO: 10629 - RNA, 22 nt, synthetic construct
  source 1..22: mol_type = other RNA
tatacagatccatcggctgaga

SEQ ID NO: 10630 - RNA, 22 nt, synthetic construct
  source 1..22: mol_type = other RNA
tataggtatccaagccaagacc

SEQ ID NO: 10631 - RNA, 22 nt, synthetic construct
  source 1..22: mol_type = other RNA
tatagtccatgtttggattgct

SEQ ID NO: 10632 - RNA, 22 nt, synthetic construct
  source 1..22: mol_type = other RNA
tatatatctgttgtaaggccct

SEQ ID NO: 10633 - RNA, 22 nt, synthetic construct
  source 1..22: mol_type = other RNA
tatatatgatatcacccccttt

SEQ ID NO: 10634 - RNA, 22 nt, synthetic construct
  source 1..22: mol_type = other RNA
tatatctgttgtaaggccctgt

SEQ ID NO: 10635 - RNA, 22 nt, synthetic construct
  source 1..22: mol_type = other RNA
tatatgatatcacccccttttg

SEQ ID NO: 10636 - RNA, 22 nt, synthetic construct
  source 1..22: mol_type = other RNA
tatcaaagatgcttccagctct

SEQ ID NO: 10637 - RNA, 22 nt, synthetic construct
  source 1..22: mol_type = other RNA
tatcaatgcaatggaaacctat

SEQ ID NO: 10638 - RNA, 22 nt, synthetic construct
  source 1..22: mol_type = other RNA
tatcacccccttttgttggtta

SEQ ID NO: 10639 - RNA, 22 nt, synthetic construct
  source 1..22: mol_type = other RNA
tatcagtggacaactgctcccc

SEQ ID NO: 10640 - RNA, 22 nt, synthetic construct
  source 1..22: mol_type = other RNA
tatcatggttaagagctggaag

SEQ ID NO: 10641 - RNA, 22 nt, synthetic construct
  source 1..22: mol_type = other RNA
tatccaaactcttcacacactt

SEQ ID NO: 10642 - RNA, 22 nt, synthetic construct
  source 1..22: mol_type = other RNA
tatccaagccaagaccctctgt

SEQ ID NO: 10643 - RNA, 22 nt, synthetic construct
  source 1..22: mol_type = other RNA
tatccatcatatcaatgcaatg

SEQ ID NO: 10644 - RNA, 22 nt, synthetic construct
  source 1..22: mol_type = other RNA
tatcccactcatgagatggatg

SEQ ID NO: 10645 - RNA, 22 nt, synthetic construct
  source 1..22: mol_type = other RNA
tatctatggaagcaccagccct

SEQ ID NO: 10646 - RNA, 22 nt, synthetic construct
  source 1..22: mol_type = other RNA
tatctgaagtgtgtgaagagtt

SEQ ID NO: 10647 - RNA, 22 nt, synthetic construct
  source 1..22: mol_type = other RNA
tatctgggttcctattctcccc

SEQ ID NO: 10648 - RNA, 22 nt, synthetic construct
  source 1..22: mol_type = other RNA
tatctgttgtaaggccctgtga

SEQ ID NO: 10649 - RNA, 22 nt, synthetic construct
  source 1..22: mol_type = other RNA
tatgaacctgcagcttgagatg

SEQ ID NO: 10650 - RNA, 22 nt, synthetic construct
  source 1..22: mol_type = other RNA
tatgaacttctattccacctca

SEQ ID NO: 10651 - RNA, 22 nt, synthetic construct
  source 1..22: mol_type = other RNA
tatgatatcacccccttttgtt

SEQ ID NO: 10652 - RNA, 22 nt, synthetic construct
  source 1..22: mol_type = other RNA
tatgatggatattgggtattct

SEQ ID NO: 10653 - RNA, 22 nt, synthetic construct
  source 1..22: mol_type = other RNA
tatgcagggagatggtttcagc

SEQ ID NO: 10654 - RNA, 22 nt, synthetic construct
  source 1..22: mol_type = other RNA
tatgccttcactcgggtcacag

SEQ ID NO: 10655 - RNA, 22 nt, synthetic construct
  source 1..22: mol_type = other RNA
tatgctggtaaaagacgaggga

SEQ ID NO: 10656 - RNA, 22 nt, synthetic construct
  source 1..22: mol_type = other RNA
tatggaaaccaaaatatgcagg

SEQ ID NO: 10657 - RNA, 22 nt, synthetic construct
  source 1..22: mol_type = other RNA
tatggaagcaccagccctatga

SEQ ID NO: 10658 - RNA, 22 nt, synthetic construct
  source 1..22: mol_type = other RNA
tatggagatgtagttactgtgg

SEQ ID NO: 10659 - RNA, 22 nt, synthetic construct
  source 1..22: mol_type = other RNA
tatggatgggtggtagactgag

SEQ ID NO: 10660 - RNA, 22 nt, synthetic construct
  source 1..22: mol_type = other RNA
tatggattatgtgagaaggtga

SEQ ID NO: 10661 - RNA, 22 nt, synthetic construct
  source 1..22: mol_type = other RNA
tatggattggtggatccagaag

SEQ ID NO: 10662 - RNA, 22 nt, synthetic construct
  source 1..22: mol_type = other RNA
tatggcccagactatgtgcctc

SEQ ID NO: 10663 - RNA, 22 nt, synthetic construct
  source 1..22: mol_type = other RNA
tatggggagcagttgtccactg

SEQ ID NO: 10664 - RNA, 22 nt, synthetic construct
  source 1..22: mol_type = other RNA
tatgtgagaaggtgaatgatgt

SEQ ID NO: 10665 - RNA, 22 nt, synthetic construct
  source 1..22: mol_type = other RNA
tatgtgcctcagaaatcccatg

SEQ ID NO: 10666 - RNA, 22 nt, synthetic construct
  source 1..22: mol_type = other RNA
tattccacctcatctcaagctg

SEQ ID NO: 10667 - RNA, 22 nt, synthetic construct
  source 1..22: mol_type = other RNA
tattctccccagtctcagccga

SEQ ID NO: 10668 - RNA, 22 nt, synthetic construct
  source 1..22: mol_type = other RNA
tattctgattcaaaagcccagg

SEQ ID NO: 10669 - RNA, 22 nt, synthetic construct
  source 1..22: mol_type = other RNA
tattctgcttctggatccacca

SEQ ID NO: 10670 - RNA, 22 nt, synthetic construct
  source 1..22: mol_type = other RNA
tattgggattctttaaaggggt

SEQ ID NO: 10671 - RNA, 22 nt, synthetic construct
  source 1..22: mol_type = other RNA
tattgggtattctgattcaaaa

SEQ ID NO: 10672 - RNA, 22 nt, synthetic construct
  source 1..22: mol_type = other RNA
tatttagatgtaaaactctggc

SEQ ID NO: 10673 - RNA, 22 nt, synthetic construct
  source 1..22: mol_type = other RNA
tatttccaaaccttggctggta

SEQ ID NO: 10674 - RNA, 22 nt, synthetic construct
  source 1..22: mol_type = other RNA
tatttgaattcttctaatccca

SEQ ID NO: 10675 - RNA, 22 nt, synthetic construct
  source 1..22: mol_type = other RNA
tattttggtttccataacctaa

SEQ ID NO: 10676 - RNA, 22 nt, synthetic construct
  source 1..22: mol_type = other RNA
tcaaaagcccagggtaagggtt

SEQ ID NO: 10677 - RNA, 22 nt, synthetic construct
  source 1..22: mol_type = other RNA
tcaaagatgcttccagctctta

SEQ ID NO: 10678 - RNA, 22 nt, synthetic construct
  source 1..22: mol_type = other RNA
tcaaatatgaacctgcagcttg

SEQ ID NO: 10679 - RNA, 22 nt, synthetic construct
  source 1..22: mol_type = other RNA
tcaacagctctcttcatgccct

SEQ ID NO: 10680 - RNA, 22 nt, synthetic construct
  source 1..22: mol_type = other RNA
tcaactcttattctgcttctgg

SEQ ID NO: 10681 - RNA, 22 nt, synthetic construct
  source 1..22: mol_type = other RNA
tcaagctgcaggttcatatttg

SEQ ID NO: 10682 - RNA, 22 nt, synthetic construct
  source 1..22: mol_type = other RNA
tcaagtctcttgccgaaaggac

SEQ ID NO: 10683 - RNA, 22 nt, synthetic construct
  source 1..22: mol_type = other RNA
tcaagtgaggtaaccaacaaaa

SEQ ID NO: 10684 - RNA, 22 nt, synthetic construct
  source 1..22: mol_type = other RNA
tcaatgagaattgacccatgag

SEQ ID NO: 10685 - RNA, 22 nt, synthetic construct
  source 1..22: mol_type = other RNA
tcaatgcaatggaaacctatca

SEQ ID NO: 10686 - RNA, 22 nt, synthetic construct
  source 1..22: mol_type = other RNA
tcaattctcattgagtgtgcaa

SEQ ID NO: 10687 - RNA, 22 nt, synthetic construct
  source 1..22: mol_type = other RNA
tcacacacttcagatatctatg

SEQ ID NO: 10688 - RNA, 22 nt, synthetic construct
  source 1..22: mol_type = other RNA
tcacactcttcctctttctcac

SEQ ID NO: 10689 - RNA, 22 nt, synthetic construct
  source 1..22: mol_type = other RNA
tcacagggccttacaacagata

SEQ ID NO: 10690 - RNA, 22 nt, synthetic construct
  source 1..22: mol_type = other RNA
tcacataatccataactacagt

SEQ ID NO: 10691 - RNA, 22 nt, synthetic construct
  source 1..22: mol_type = other RNA
tcaccatttttatagtccatgt

SEQ ID NO: 10692 - RNA, 22 nt, synthetic construct
  source 1..22: mol_type = other RNA
tcaccccaccaggatctccctc

SEQ ID NO: 10693 - RNA, 22 nt, synthetic construct
  source 1..22: mol_type = other RNA
tcacccccttttgttggttacc

SEQ ID NO: 10694 - RNA, 22 nt, synthetic construct
  source 1..22: mol_type = other RNA
tcaccctcagacagagtctgtc

SEQ ID NO: 10695 - RNA, 22 nt, synthetic construct
  source 1..22: mol_type = other RNA
tcaccttctcacataatccata

SEQ ID NO: 10696 - RNA, 22 nt, synthetic construct
  source 1..22: mol_type = other RNA
tcacgctttgcacactcaatga

SEQ ID NO: 10697 - RNA, 22 nt, synthetic construct
  source 1..22: mol_type = other RNA
tcacggacatggtcctttcggc

SEQ ID NO: 10698 - RNA, 22 nt, synthetic construct
  source 1..22: mol_type = other RNA
tcacgggctttttcagccattt

SEQ ID NO: 10699 - RNA, 22 nt, synthetic construct
  source 1..22: mol_type = other RNA
tcactcgggtcacagggcctta

SEQ ID NO: 10700 - RNA, 22 nt, synthetic construct
  source 1..22: mol_type = other RNA
tcacttaatttgtgtaagcctc

SEQ ID NO: 10701 - RNA, 22 nt, synthetic construct
  source 1..22: mol_type = other RNA
tcacttttttgccatgggattt

SEQ ID NO: 10702 - RNA, 22 nt, synthetic construct
  source 1..22: mol_type = other RNA
tcagaaatcccatggcaaaaaa

SEQ ID NO: 10703 - RNA, 22 nt, synthetic construct
  source 1..22: mol_type = other RNA
tcagaatacccaatatccatca

SEQ ID NO: 10704 - RNA, 22 nt, synthetic construct
  source 1..22: mol_type = other RNA
tcagacagagtctgtcaactct

SEQ ID NO: 10705 - RNA, 22 nt, synthetic construct
  source 1..22: mol_type = other RNA
tcagacagcgagcagagctttc

SEQ ID NO: 10706 - RNA, 22 nt, synthetic construct
  source 1..22: mol_type = other RNA
tcagagcccacttacctgcgtt

SEQ ID NO: 10707 - RNA, 22 nt, synthetic construct
  source 1..22: mol_type = other RNA
tcagatatctatggaagcacca

SEQ ID NO: 10708 - RNA, 22 nt, synthetic construct
  source 1..22: mol_type = other RNA
tcagattgggtggtaatctaga

SEQ ID NO: 10709 - RNA, 22 nt, synthetic construct
  source 1..22: mol_type = other RNA
tcagcaggctcccgtttcactt

SEQ ID NO: 10710 - RNA, 22 nt, synthetic construct
  source 1..22: mol_type = other RNA
tcagcagttgtaccattagacc

SEQ ID NO: 10711 - RNA, 22 nt, synthetic construct
  source 1..22: mol_type = other RNA
tcagccattttggcttcccaaa

SEQ ID NO: 10712 - RNA, 22 nt, synthetic construct
  source 1..22: mol_type = other RNA
tcagccgatggatctgtatagg

SEQ ID NO: 10713 - RNA, 22 nt, synthetic construct
  source 1..22: mol_type = other RNA
tcaggaaaagcagccattggca

SEQ ID NO: 10714 - RNA, 22 nt, synthetic construct
  source 1..22: mol_type = other RNA
tcaggaccagtcatgcagcagt

SEQ ID NO: 10715 - RNA, 22 nt, synthetic construct
  source 1..22: mol_type = other RNA
tcaggatccagaaagctctgct

SEQ ID NO: 10716 - RNA, 22 nt, synthetic construct
  source 1..22: mol_type = other RNA
tcagtctaccacccatccatac

SEQ ID NO: 10717 - RNA, 22 nt, synthetic construct
  source 1..22: mol_type = other RNA
tcagtggacaactgctccccat

SEQ ID NO: 10718 - RNA, 22 nt, synthetic construct
  source 1..22: mol_type = other RNA
tcatagggctggtgcttccata

SEQ ID NO: 10719 - RNA, 22 nt, synthetic construct
  source 1..22: mol_type = other RNA
tcatatatatctgttgtaaggc

SEQ ID NO: 10720 - RNA, 22 nt, synthetic construct
  source 1..22: mol_type = other RNA
tcatatcaatgcaatggaaacc

SEQ ID NO: 10721 - RNA, 22 nt, synthetic construct
  source 1..22: mol_type = other RNA
tcatcaagtctcttgccgaaag

SEQ ID NO: 10722 - RNA, 22 nt, synthetic construct
  source 1..22: mol_type = other RNA
tcatcgttgtcctctgcaccag

SEQ ID NO: 10723 - RNA, 22 nt, synthetic construct
  source 1..22: mol_type = other RNA
tcatctcaagctgcaggttcat

SEQ ID NO: 10724 - RNA, 22 nt, synthetic construct
  source 1..22: mol_type = other RNA
tcatgagatggatggccacttc

SEQ ID NO: 10725 - RNA, 22 nt, synthetic construct
  source 1..22: mol_type = other RNA
tcatgagtgggataaggaggca

SEQ ID NO: 10726 - RNA, 22 nt, synthetic construct
  source 1..22: mol_type = other RNA
tcatgcagcagtcccagcagcc

SEQ ID NO: 10727 - RNA, 22 nt, synthetic construct
  source 1..22: mol_type = other RNA
tcatgccctgcatctccaaaac

SEQ ID NO: 10728 - RNA, 22 nt, synthetic construct
  source 1..22: mol_type = other RNA
tcatgctcttatgctggtaaaa

SEQ ID NO: 10729 - RNA, 22 nt, synthetic construct
  source 1..22: mol_type = other RNA
tcatgggagccacctctagatt

SEQ ID NO: 10730 - RNA, 22 nt, synthetic construct
  source 1..22: mol_type = other RNA
tcatgggattagaagaattcaa

SEQ ID NO: 10731 - RNA, 22 nt, synthetic construct
  source 1..22: mol_type = other RNA
tcatgggtcaattctcattgag

SEQ ID NO: 10732 - RNA, 22 nt, synthetic construct
  source 1..22: mol_type = other RNA
tcatggttaagagctggaagca

SEQ ID NO: 10733 - RNA, 22 nt, synthetic construct
  source 1..22: mol_type = other RNA
tcatgtagggaaattgcctcct

SEQ ID NO: 10734 - RNA, 22 nt, synthetic construct
  source 1..22: mol_type = other RNA
tcatgtatggattggtggatcc

SEQ ID NO: 10735 - RNA, 22 nt, synthetic construct
  source 1..22: mol_type = other RNA
tcatgtggctcagcaggctccc

SEQ ID NO: 10736 - RNA, 22 nt, synthetic construct
  source 1..22: mol_type = other RNA
tcattcaccttctcacataatc

SEQ ID NO: 10737 - RNA, 22 nt, synthetic construct
  source 1..22: mol_type = other RNA
tcattcatgctcttatgctggt

SEQ ID NO: 10738 - RNA, 22 nt, synthetic construct
  source 1..22: mol_type = other RNA
tcattctccttgttttggagat

SEQ ID NO: 10739 - RNA, 22 nt, synthetic construct
  source 1..22: mol_type = other RNA
tcattgagtgtgcaaagcgtga

SEQ ID NO: 10740 - RNA, 22 nt, synthetic construct
  source 1..22: mol_type = other RNA
tccaaaacaaggagaatgacat

SEQ ID NO: 10741 - RNA, 22 nt, synthetic construct
  source 1..22: mol_type = other RNA
tccaaacatggactataaaaat

SEQ ID NO: 10742 - RNA, 22 nt, synthetic construct
  source 1..22: mol_type = other RNA
tccaaaccttggctggtaaagt

SEQ ID NO: 10743 - RNA, 22 nt, synthetic construct
  source 1..22: mol_type = other RNA
tccaaactcttcacacacttca

SEQ ID NO: 10744 - RNA, 22 nt, synthetic construct
  source 1..22: mol_type = other RNA
tccaactcatgggtcaattctc

SEQ ID NO: 10745 - RNA, 22 nt, synthetic construct
  source 1..22: mol_type = other RNA
tccaagccaagaccctctgtct

SEQ ID NO: 10746 - RNA, 22 nt, synthetic construct
  source 1..22: mol_type = other RNA
tccaaggaggcttacacaaatt

SEQ ID NO: 10747 - RNA, 22 nt, synthetic construct
  source 1..22: mol_type = other RNA
tccacagaacttttgcgacttt

SEQ ID NO: 10748 - RNA, 22 nt, synthetic construct
  source 1..22: mol_type = other RNA
tccacagtaactacatctccat

SEQ ID NO: 10749 - RNA, 22 nt, synthetic construct
  source 1..22: mol_type = other RNA
tccaccaatccatacatgagac

SEQ ID NO: 10750 - RNA, 22 nt, synthetic construct
  source 1..22: mol_type = other RNA
tccacctcatctcaagctgcag

SEQ ID NO: 10751 - RNA, 22 nt, synthetic construct
  source 1..22: mol_type = other RNA
tccactgataggtttccattgc

SEQ ID NO: 10752 - RNA, 22 nt, synthetic construct
  source 1..22: mol_type = other RNA
tccagaaagctctgctcgctgt

SEQ ID NO: 10753 - RNA, 22 nt, synthetic construct
  source 1..22: mol_type = other RNA
tccagaagcagaataagagttg

SEQ ID NO: 10754 - RNA, 22 nt, synthetic construct
  source 1..22: mol_type = other RNA
tccagctcttaaccatgataga

SEQ ID NO: 10755 - RNA, 22 nt, synthetic construct
  source 1..22: mol_type = other RNA
tccagggtgtggcttctggtgc

SEQ ID NO: 10756 - RNA, 22 nt, synthetic construct
  source 1..22: mol_type = other RNA
tccagttagtccttatccaaac

SEQ ID NO: 10757 - RNA, 22 nt, synthetic construct
  source 1..22: mol_type = other RNA
tccataacctaagtatttagat

SEQ ID NO: 10758 - RNA, 22 nt, synthetic construct
  source 1..22: mol_type = other RNA
tccataactacagtgcagctcc

SEQ ID NO: 10759 - RNA, 22 nt, synthetic construct
  source 1..22: mol_type = other RNA
tccatacactttaccagccaag

SEQ ID NO: 10760 - RNA, 22 nt, synthetic construct
  source 1..22: mol_type = other RNA
tccatacatgagacggcccaat

SEQ ID NO: 10761 - RNA, 22 nt, synthetic construct
  source 1..22: mol_type = other RNA
tccatagatatctgaagtgtgt

SEQ ID NO: 10762 - RNA, 22 nt, synthetic construct
  source 1..22: mol_type = other RNA
tccatatgccttcactcgggtc

SEQ ID NO: 10763 - RNA, 22 nt, synthetic construct
  source 1..22: mol_type = other RNA
tccatcatatcaatgcaatgga

SEQ ID NO: 10764 - RNA, 22 nt, synthetic construct
  source 1..22: mol_type = other RNA
tccatcggctgagactggggag

SEQ ID NO: 10765 - RNA, 22 nt, synthetic construct
  source 1..22: mol_type = other RNA
tccatctcatgagtgggataag

SEQ ID NO: 10766 - RNA, 22 nt, synthetic construct
  source 1..22: mol_type = other RNA
tccatgtttggattgctcagat

SEQ ID NO: 10767 - RNA, 22 nt, synthetic construct
  source 1..22: mol_type = other RNA
tccattgcattgatatgatgga

SEQ ID NO: 10768 - RNA, 22 nt, synthetic construct
  source 1..22: mol_type = other RNA
tcccaaagagccaagccatgtt

SEQ ID NO: 10769 - RNA, 22 nt, synthetic construct
  source 1..22: mol_type = other RNA
tcccaataggaatcaccccacc

SEQ ID NO: 10770 - RNA, 22 nt, synthetic construct
  source 1..22: mol_type = other RNA
tcccacacagctaatgggttat

SEQ ID NO: 10771 - RNA, 22 nt, synthetic construct
  source 1..22: mol_type = other RNA
tcccactcatgagatggatggc

SEQ ID NO: 10772 - RNA, 22 nt, synthetic construct
  source 1..22: mol_type = other RNA
tcccagcagccccagcctctac

SEQ ID NO: 10773 - RNA, 22 nt, synthetic construct
  source 1..22: mol_type = other RNA
tcccatgaacccttaccctggg

SEQ ID NO: 10774 - RNA, 22 nt, synthetic construct
  source 1..22: mol_type = other RNA
tcccatgaagtggccatccatc

SEQ ID NO: 10775 - RNA, 22 nt, synthetic construct
  source 1..22: mol_type = other RNA
tcccatggcaaaaaagtgaaac

SEQ ID NO: 10776 - RNA, 22 nt, synthetic construct
  source 1..22: mol_type = other RNA
tccccagtctcagccgatggat

SEQ ID NO: 10777 - RNA, 22 nt, synthetic construct
  source 1..22: mol_type = other RNA
tccccatatctgggttcctatt

SEQ ID NO: 10778 - RNA, 22 nt, synthetic construct
  source 1..22: mol_type = other RNA
tcccccaatgtcaggatccaga

SEQ ID NO: 10779 - RNA, 22 nt, synthetic construct
  source 1..22: mol_type = other RNA
tcccgtttcacttttttgccat

SEQ ID NO: 10780 - RNA, 22 nt, synthetic construct
  source 1..22: mol_type = other RNA
tccctacatgatgtacatttgg

SEQ ID NO: 10781 - RNA, 22 nt, synthetic construct
  source 1..22: mol_type = other RNA
tccctcgtcttttaccagcata

SEQ ID NO: 10782 - RNA, 22 nt, synthetic construct
  source 1..22: mol_type = other RNA
tccctgcatattttggtttcca

SEQ ID NO: 10783 - RNA, 22 nt, synthetic construct
  source 1..22: mol_type = other RNA
tccgggcatgttcaacagctct

SEQ ID NO: 10784 - RNA, 22 nt, synthetic construct
  source 1..22: mol_type = other RNA
tccgtgaccacagactccacag

SEQ ID NO: 10785 - RNA, 22 nt, synthetic construct
  source 1..22: mol_type = other RNA
tcctattctccccagtctcagc

SEQ ID NO: 10786 - RNA, 22 nt, synthetic construct
  source 1..22: mol_type = other RNA
tcctattgggattctttaaagg

SEQ ID NO: 10787 - RNA, 22 nt, synthetic construct
  source 1..22: mol_type = other RNA
tcctctgcaccagaagccacac

SEQ ID NO: 10788 - RNA, 22 nt, synthetic construct
  source 1..22: mol_type = other RNA
tcctctttctcacgggcttttt

SEQ ID NO: 10789 - RNA, 22 nt, synthetic construct
  source 1..22: mol_type = other RNA
tcctgaaagtcgcaaaagttct

SEQ ID NO: 10790 - RNA, 22 nt, synthetic construct
  source 1..22: mol_type = other RNA
tcctgacattgggggagtggcc

SEQ ID NO: 10791 - RNA, 22 nt, synthetic construct
  source 1..22: mol_type = other RNA
tcctgaccattagcatcactta

SEQ ID NO: 10792 - RNA, 22 nt, synthetic construct
  source 1..22: mol_type = other RNA
tcctggtggggtgattcctatt

SEQ ID NO: 10793 - RNA, 22 nt, synthetic construct
  source 1..22: mol_type = other RNA
tccttatccaaactcttcacac

SEQ ID NO: 10794 - RNA, 22 nt, synthetic construct
  source 1..22: mol_type = other RNA
tccttatcccactcatgagatg

SEQ ID NO: 10795 - RNA, 22 nt, synthetic construct
  source 1..22: mol_type = other RNA
tccttggacacaagcagttcta

SEQ ID NO: 10796 - RNA, 22 nt, synthetic construct
  source 1..22: mol_type = other RNA
tccttgttttggagatgcaggg

SEQ ID NO: 10797 - RNA, 22 nt, synthetic construct
  source 1..22: mol_type = other RNA
tcctttcggcaagagacttgat

SEQ ID NO: 10798 - RNA, 22 nt, synthetic construct
  source 1..22: mol_type = other RNA
tcgcaaaagttctgtggacagg

SEQ ID NO: 10799 - RNA, 22 nt, synthetic construct
  source 1..22: mol_type = other RNA
tcgctgtctgaccagacctcat

SEQ ID NO: 10800 - RNA, 22 nt, synthetic construct
  source 1..22: mol_type = other RNA
tcggcaagagacttgatgaaac

SEQ ID NO: 10801 - RNA, 22 nt, synthetic construct
  source 1..22: mol_type = other RNA
tcggctgagactggggagaata

SEQ ID NO: 10802 - RNA, 22 nt, synthetic construct
  source 1..22: mol_type = other RNA
tcgggtcacagggccttacaac

SEQ ID NO: 10803 - RNA, 22 nt, synthetic construct
  source 1..22: mol_type = other RNA
tcgtcttttaccagcataagag

SEQ ID NO: 10804 - RNA, 22 nt, synthetic construct
  source 1..22: mol_type = other RNA
tcgttgtcctctgcaccagaag

SEQ ID NO: 10805 - RNA, 22 nt, synthetic construct
  source 1..22: mol_type = other RNA
tctaaatacttaggttatggaa

SEQ ID NO: 10806 - RNA, 22 nt, synthetic construct
  source 1..22: mol_type = other RNA
tctaagctcagtctaccaccca

SEQ ID NO: 10807 - RNA, 22 nt, synthetic construct
  source 1..22: mol_type = other RNA
tctaatcccatgaacccttacc

SEQ ID NO: 10808 - RNA, 22 nt, synthetic construct
  source 1..22: mol_type = other RNA
tctaatggtacaactgctgaaa

SEQ ID NO: 10809 - RNA, 22 nt, synthetic construct
  source 1..22: mol_type = other RNA
tctacagaagcagccaccacag

SEQ ID NO: 10810 - RNA, 22 nt, synthetic construct
  source 1..22: mol_type = other RNA
tctaccacccatccatacactt

SEQ ID NO: 10811 - RNA, 22 nt, synthetic construct
  source 1..22: mol_type = other RNA
tctagaggtggctcccatgaag

SEQ ID NO: 10812 - RNA, 22 nt, synthetic construct
  source 1..22: mol_type = other RNA
tctagattaccacccaatctga

SEQ ID NO: 10813 - RNA, 22 nt, synthetic construct
  source 1..22: mol_type = other RNA
tctatcatggttaagagctgga

SEQ ID NO: 10814 - RNA, 22 nt, synthetic construct
  source 1..22: mol_type = other RNA
tctatggaagcaccagccctat

SEQ ID NO: 10815 - RNA, 22 nt, synthetic construct
  source 1..22: mol_type = other RNA
tctattccacctcatctcaagc

SEQ ID NO: 10816 - RNA, 22 nt, synthetic construct
  source 1..22: mol_type = other RNA
tctcaagctgcaggttcatatt

SEQ ID NO: 10817 - RNA, 22 nt, synthetic construct
  source 1..22: mol_type = other RNA
tctcacataatccataactaca

SEQ ID NO: 10818 - RNA, 22 nt, synthetic construct
  source 1..22: mol_type = other RNA
tctcacgggctttttcagccat

SEQ ID NO: 10819 - RNA, 22 nt, synthetic construct
  source 1..22: mol_type = other RNA
tctcagccgatggatctgtata

SEQ ID NO: 10820 - RNA, 22 nt, synthetic construct
  source 1..22: mol_type = other RNA
tctcatgagtgggataaggagg

SEQ ID NO: 10821 - RNA, 22 nt, synthetic construct
  source 1..22: mol_type = other RNA
tctcatgtatggattggtggat

SEQ ID NO: 10822 - RNA, 22 nt, synthetic construct
  source 1..22: mol_type = other RNA
tctcattgagtgtgcaaagcgt

SEQ ID NO: 10823 - RNA, 22 nt, synthetic construct
  source 1..22: mol_type = other RNA
tctccaaaacaaggagaatgac

SEQ ID NO: 10824 - RNA, 22 nt, synthetic construct
  source 1..22: mol_type = other RNA
tctccatatgccttcactcggg

SEQ ID NO: 10825 - RNA, 22 nt, synthetic construct
  source 1..22: mol_type = other RNA
tctccccagtctcagccgatgg

SEQ ID NO: 10826 - RNA, 22 nt, synthetic construct
  source 1..22: mol_type = other RNA
tctccctcgtcttttaccagca

SEQ ID NO: 10827 - RNA, 22 nt, synthetic construct
  source 1..22: mol_type = other RNA
tctccctgcatattttggtttc

SEQ ID NO: 10828 - RNA, 22 nt, synthetic construct
  source 1..22: mol_type = other RNA
tctccttgttttggagatgcag

SEQ ID NO: 10829 - RNA, 22 nt, synthetic construct
  source 1..22: mol_type = other RNA
tctctcttaccctgtccacaga

SEQ ID NO: 10830 - RNA, 22 nt, synthetic construct
  source 1..22: mol_type = other RNA
tctctgctgctgctggggctgt

SEQ ID NO: 10831 - RNA, 22 nt, synthetic construct
  source 1..22: mol_type = other RNA
tctcttaccctgtccacagaac

SEQ ID NO: 10832 - RNA, 22 nt, synthetic construct
  source 1..22: mol_type = other RNA
tctcttcatgccctgcatctcc

SEQ ID NO: 10833 - RNA, 22 nt, synthetic construct
  source 1..22: mol_type = other RNA
tctcttgccgaaaggaccatgt

SEQ ID NO: 10834 - RNA, 22 nt, synthetic construct
  source 1..22: mol_type = other RNA
tctgaagtgtgtgaagagtttg

SEQ ID NO: 10835 - RNA, 22 nt, synthetic construct
  source 1..22: mol_type = other RNA
tctgaagtttcatgtggctcag

SEQ ID NO: 10836 - RNA, 22 nt, synthetic construct
  source 1..22: mol_type = other RNA
tctgaccagacctcatcgttgt

SEQ ID NO: 10837 - RNA, 22 nt, synthetic construct
  source 1..22: mol_type = other RNA
tctgagcaatccaaacatggac

SEQ ID NO: 10838 - RNA, 22 nt, synthetic construct
  source 1..22: mol_type = other RNA
tctgaggcacatagtctgggcc

SEQ ID NO: 10839 - RNA, 22 nt, synthetic construct
  source 1..22: mol_type = other RNA
tctgagggtgatgtggctgctg

SEQ ID NO: 10840 - RNA, 22 nt, synthetic construct
  source 1..22: mol_type = other RNA
tctgattcaaaagcccagggta

SEQ ID NO: 10841 - RNA, 22 nt, synthetic construct
  source 1..22: mol_type = other RNA
tctgcaccagaagccacaccct

SEQ ID NO: 10842 - RNA, 22 nt, synthetic construct
  source 1..22: mol_type = other RNA
tctgctcgctgtctgaccagac

SEQ ID NO: 10843 - RNA, 22 nt, synthetic construct
  source 1..22: mol_type = other RNA
tctgctgctgctggggctgtgg

SEQ ID NO: 10844 - RNA, 22 nt, synthetic construct
  source 1..22: mol_type = other RNA
tctgcttctggatccaccaatc

SEQ ID NO: 10845 - RNA, 22 nt, synthetic construct
  source 1..22: mol_type = other RNA
tctggatccaccaatccataca

SEQ ID NO: 10846 - RNA, 22 nt, synthetic construct
  source 1..22: mol_type = other RNA
tctggatcctgacattggggga

SEQ ID NO: 10847 - RNA, 22 nt, synthetic construct
  source 1..22: mol_type = other RNA
tctggctatttccaaaccttgg

SEQ ID NO: 10848 - RNA, 22 nt, synthetic construct
  source 1..22: mol_type = other RNA
tctgggccatacttttcacact

SEQ ID NO: 10849 - RNA, 22 nt, synthetic construct
  source 1..22: mol_type = other RNA
tctgggttcctattctccccag

SEQ ID NO: 10850 - RNA, 22 nt, synthetic construct
  source 1..22: mol_type = other RNA
tctggtcagacagcgagcagag

SEQ ID NO: 10851 - RNA, 22 nt, synthetic construct
  source 1..22: mol_type = other RNA
tctggtgcagaggacaacgatg

SEQ ID NO: 10852 - RNA, 22 nt, synthetic construct
  source 1..22: mol_type = other RNA
tctgtagaggctggggctgctg

SEQ ID NO: 10853 - RNA, 22 nt, synthetic construct
  source 1..22: mol_type = other RNA
tctgtataggtatccaagccaa

SEQ ID NO: 10854 - RNA, 22 nt, synthetic construct
  source 1..22: mol_type = other RNA
tctgtcaactcttattctgctt

SEQ ID NO: 10855 - RNA, 22 nt, synthetic construct
  source 1..22: mol_type = other RNA
tctgtctaagctcagtctacca

SEQ ID NO: 10856 - RNA, 22 nt, synthetic construct
  source 1..22: mol_type = other RNA
tctgtctgagggtgatgtggct

SEQ ID NO: 10857 - RNA, 22 nt, synthetic construct
  source 1..22: mol_type = other RNA
tctgtggacagggtaagagaga

SEQ ID NO: 10858 - RNA, 22 nt, synthetic construct
  source 1..22: mol_type = other RNA
tctgtggtcacggacatggtcc

SEQ ID NO: 10859 - RNA, 22 nt, synthetic construct
  source 1..22: mol_type = other RNA
tctgttctctcttaccctgtcc

SEQ ID NO: 10860 - RNA, 22 nt, synthetic construct
  source 1..22: mol_type = other RNA
tctgttgtaaggccctgtgacc

SEQ ID NO: 10861 - RNA, 22 nt, synthetic construct
  source 1..22: mol_type = other RNA
tcttaaccatgatagaactgct

SEQ ID NO: 10862 - RNA, 22 nt, synthetic construct
  source 1..22: mol_type = other RNA
tcttaccctgtccacagaactt

SEQ ID NO: 10863 - RNA, 22 nt, synthetic construct
  source 1..22: mol_type = other RNA
tcttatgctggtaaaagacgag

SEQ ID NO: 10864 - RNA, 22 nt, synthetic construct
  source 1..22: mol_type = other RNA
tcttattctgcttctggatcca

SEQ ID NO: 10865 - RNA, 22 nt, synthetic construct
  source 1..22: mol_type = other RNA
tcttcacacacttcagatatct

SEQ ID NO: 10866 - RNA, 22 nt, synthetic construct
  source 1..22: mol_type = other RNA
tcttcatgccctgcatctccaa

SEQ ID NO: 10867 - RNA, 22 nt, synthetic construct
  source 1..22: mol_type = other RNA
tcttcctctttctcacgggctt

SEQ ID NO: 10868 - RNA, 22 nt, synthetic construct
  source 1..22: mol_type = other RNA
tcttctaatcccatgaaccctt

SEQ ID NO: 10869 - RNA, 22 nt, synthetic construct
  source 1..22: mol_type = other RNA
tcttgccgaaaggaccatgtcc

SEQ ID NO: 10870 - RNA, 22 nt, synthetic construct
  source 1..22: mol_type = other RNA
tcttggcttggatacctataca

SEQ ID NO: 10871 - RNA, 22 nt, synthetic construct
  source 1..22: mol_type = other RNA
tctttaaaggggttgtggcatg

SEQ ID NO: 10872 - RNA, 22 nt, synthetic construct
  source 1..22: mol_type = other RNA
tctttctcacgggctttttcag

SEQ ID NO: 10873 - RNA, 22 nt, synthetic construct
  source 1..22: mol_type = other RNA
tctttgataacccattagctgt

SEQ ID NO: 10874 - RNA, 22 nt, synthetic construct
  source 1..22: mol_type = other RNA
tctttgggaagccaaaatggct

SEQ ID NO: 10875 - RNA, 22 nt, synthetic construct
  source 1..22: mol_type = other RNA
tcttttaccagcataagagcat

SEQ ID NO: 10876 - RNA, 22 nt, synthetic construct
  source 1..22: mol_type = other RNA
tcttttcaagtgaggtaaccaa

SEQ ID NO: 10877 - RNA, 22 nt, synthetic construct
  source 1..22: mol_type = other RNA
tgaaaaagcccgtgagaaagag

SEQ ID NO: 10878 - RNA, 22 nt, synthetic construct
  source 1..22: mol_type = other RNA
tgaaaagtatggcccagactat

SEQ ID NO: 10879 - RNA, 22 nt, synthetic construct
  source 1..22: mol_type = other RNA
tgaaaccatctccctgcatatt

SEQ ID NO: 10880 - RNA, 22 nt, synthetic construct
  source 1..22: mol_type = other RNA
tgaaacgcaggtaagtgggctc

SEQ ID NO: 10881 - RNA, 22 nt, synthetic construct
  source 1..22: mol_type = other RNA
tgaaacgggagcctgctgagcc

SEQ ID NO: 10882 - RNA, 22 nt, synthetic construct
  source 1..22: mol_type = other RNA
tgaaacttcagagcccacttac

SEQ ID NO: 10883 - RNA, 22 nt, synthetic construct
  source 1..22: mol_type = other RNA
tgaaagtcgcaaaagttctgtg

SEQ ID NO: 10884 - RNA, 22 nt, synthetic construct
  source 1..22: mol_type = other RNA
tgaacatcattcaccttctcac

SEQ ID NO: 10885 - RNA, 22 nt, synthetic construct
  source 1..22: mol_type = other RNA
tgaacatgcccggagctgcact

SEQ ID NO: 10886 - RNA, 22 nt, synthetic construct
  source 1..22: mol_type = other RNA
tgaacccttaccctgggctttt

SEQ ID NO: 10887 - RNA, 22 nt, synthetic construct
  source 1..22: mol_type = other RNA
tgaacctgcagcttgagatgag

SEQ ID NO: 10888 - RNA, 22 nt, synthetic construct
  source 1..22: mol_type = other RNA
tgaacttctattccacctcatc

SEQ ID NO: 10889 - RNA, 22 nt, synthetic construct
  source 1..22: mol_type = other RNA
tgaagagagctgttgaacatgc

SEQ ID NO: 10890 - RNA, 22 nt, synthetic construct
  source 1..22: mol_type = other RNA
tgaagagtttggataaggacta

SEQ ID NO: 10891 - RNA, 22 nt, synthetic construct
  source 1..22: mol_type = other RNA
tgaaggcatatggagatgtagt

SEQ ID NO: 10892 - RNA, 22 nt, synthetic construct
  source 1..22: mol_type = other RNA
tgaagtggccatccatctcatg

SEQ ID NO: 10893 - RNA, 22 nt, synthetic construct
  source 1..22: mol_type = other RNA
tgaagtgtgtgaagagtttgga

SEQ ID NO: 10894 - RNA, 22 nt, synthetic construct
  source 1..22: mol_type = other RNA
tgaagtttcatgtggctcagca

SEQ ID NO: 10895 - RNA, 22 nt, synthetic construct
  source 1..22: mol_type = other RNA
tgaatcagaatacccaatatcc

SEQ ID NO: 10896 - RNA, 22 nt, synthetic construct
  source 1..22: mol_type = other RNA
tgaatgagccaaaacatggctt

SEQ ID NO: 10897 - RNA, 22 nt, synthetic construct
  source 1..22: mol_type = other RNA
tgaatgatgttcaccattttta

SEQ ID NO: 10898 - RNA, 22 nt, synthetic construct
  source 1..22: mol_type = other RNA
tgaattcttctaatcccatgaa

SEQ ID NO: 10899 - RNA, 22 nt, synthetic construct
  source 1..22: mol_type = other RNA
tgacagactctgtctgagggtg

SEQ ID NO: 10900 - RNA, 22 nt, synthetic construct
  source 1..22: mol_type = other RNA
tgacatgctttcccacacagct

SEQ ID NO: 10901 - RNA, 22 nt, synthetic construct
  source 1..22: mol_type = other RNA
tgacattgggggagtggccgtg

SEQ ID NO: 10902 - RNA, 22 nt, synthetic construct
  source 1..22: mol_type = other RNA
tgaccacagactccacagtaac

SEQ ID NO: 10903 - RNA, 22 nt, synthetic construct
  source 1..22: mol_type = other RNA
tgaccagacctcatcgttgtcc

SEQ ID NO: 10904 - RNA, 22 nt, synthetic construct
  source 1..22: mol_type = other RNA
tgaccattagcatcacttaatt

SEQ ID NO: 10905 - RNA, 22 nt, synthetic construct
  source 1..22: mol_type = other RNA
tgacccatgagttggagccacg

SEQ ID NO: 10906 - RNA, 22 nt, synthetic construct
  source 1..22: mol_type = other RNA
tgacccgagtgaaggcatatgg

SEQ ID NO: 10907 - RNA, 22 nt, synthetic construct
  source 1..22: mol_type = other RNA
tgactggtcctgaaagtcgcaa

SEQ ID NO: 10908 - RNA, 22 nt, synthetic construct
  source 1..22: mol_type = other RNA
tgagaaagaggaagagtgtgaa

SEQ ID NO: 10909 - RNA, 22 nt, synthetic construct
  source 1..22: mol_type = other RNA
tgagaaggtgaatgatgttcac

SEQ ID NO: 10910 - RNA, 22 nt, synthetic construct
  source 1..22: mol_type = other RNA
tgagaattgacccatgagttgg

SEQ ID NO: 10911 - RNA, 22 nt, synthetic construct
  source 1..22: mol_type = other RNA
tgagacggcccaatccagttag

SEQ ID NO: 10912 - RNA, 22 nt, synthetic construct
  source 1..22: mol_type = other RNA
tgagactggggagaataggaac

SEQ ID NO: 10913 - RNA, 22 nt, synthetic construct
  source 1..22: mol_type = other RNA
tgagatgaggtggaatagaagt

SEQ ID NO: 10914 - RNA, 22 nt, synthetic construct
  source 1..22: mol_type = other RNA
tgagatggatggccacttcatg

SEQ ID NO: 10915 - RNA, 22 nt, synthetic construct
  source 1..22: mol_type = other RNA
tgagcaatccaaacatggacta

SEQ ID NO: 10916 - RNA, 22 nt, synthetic construct
  source 1..22: mol_type = other RNA
tgagccaaaacatggcttggct

SEQ ID NO: 10917 - RNA, 22 nt, synthetic construct
  source 1..22: mol_type = other RNA
tgagccacatgaaacttcagag

SEQ ID NO: 10918 - RNA, 22 nt, synthetic construct
  source 1..22: mol_type = other RNA
tgagctgcatgccacaacccct

SEQ ID NO: 10919 - RNA, 22 nt, synthetic construct
  source 1..22: mol_type = other RNA
tgagcttagacagagggtcttg

SEQ ID NO: 10920 - RNA, 22 nt, synthetic construct
  source 1..22: mol_type = other RNA
tgaggcacatagtctgggccat

SEQ ID NO: 10921 - RNA, 22 nt, synthetic construct
  source 1..22: mol_type = other RNA
tgagggtgatgtggctgctgct

SEQ ID NO: 10922 - RNA, 22 nt, synthetic construct
  source 1..22: mol_type = other RNA
tgaggtaaccaacaaaaggggg

SEQ ID NO: 10923 - RNA, 22 nt, synthetic construct
  source 1..22: mol_type = other RNA
tgaggtctggtcagacagcgag

SEQ ID NO: 10924 - RNA, 22 nt, synthetic construct
  source 1..22: mol_type = other RNA
tgaggtggaatagaagttcata

SEQ ID NO: 10925 - RNA, 22 nt, synthetic construct
  source 1..22: mol_type = other RNA
tgagtgggataaggaggcaatt

SEQ ID NO: 10926 - RNA, 22 nt, synthetic construct
  source 1..22: mol_type = other RNA
tgagtgtgcaaagcgtgagctg

SEQ ID NO: 10927 - RNA, 22 nt, synthetic construct
  source 1..22: mol_type = other RNA
tgagttggagccacggccactc

SEQ ID NO: 10928 - RNA, 22 nt, synthetic construct
  source 1..22: mol_type = other RNA
tgataacccattagctgtgtgg

SEQ ID NO: 10929 - RNA, 22 nt, synthetic construct
  source 1..22: mol_type = other RNA
tgatagaactgcttgtgtccaa

SEQ ID NO: 10930 - RNA, 22 nt, synthetic construct
  source 1..22: mol_type = other RNA
tgataggtttccattgcattga

SEQ ID NO: 10931 - RNA, 22 nt, synthetic construct
  source 1..22: mol_type = other RNA
tgatatcacccccttttgttgg

SEQ ID NO: 10932 - RNA, 22 nt, synthetic construct
  source 1..22: mol_type = other RNA
tgatatgatggatattgggtat

SEQ ID NO: 10933 - RNA, 22 nt, synthetic construct
  source 1..22: mol_type = other RNA
tgatgaaacgcaggtaagtggg

SEQ ID NO: 10934 - RNA, 22 nt, synthetic construct
  source 1..22: mol_type = other RNA
tgatgctaatggtcaggaaaag

SEQ ID NO: 10935 - RNA, 22 nt, synthetic construct
  source 1..22: mol_type = other RNA
tgatggatattgggtattctga

SEQ ID NO: 10936 - RNA, 22 nt, synthetic construct
  source 1..22: mol_type = other RNA
tgatgtacatttggtctaatgg

SEQ ID NO: 10937 - RNA, 22 nt, synthetic construct
  source 1..22: mol_type = other RNA
tgatgtggctgctgctgctggg

SEQ ID NO: 10938 - RNA, 22 nt, synthetic construct
  source 1..22: mol_type = other RNA
tgatgttcaccatttttatagt

SEQ ID NO: 10939 - RNA, 22 nt, synthetic construct
  source 1..22: mol_type = other RNA
tgattcaaaagcccagggtaag

SEQ ID NO: 10940 - RNA, 22 nt, synthetic construct
  source 1..22: mol_type = other RNA
tgattcctattgggattcttta

SEQ ID NO: 10941 - RNA, 22 nt, synthetic construct
  source 1..22: mol_type = other RNA
tgcaaagcgtgagctgcatgcc

SEQ ID NO: 10942 - RNA, 22 nt, synthetic construct
  source 1..22: mol_type = other RNA
tgcaatggaaacctatcagtgg

SEQ ID NO: 10943 - RNA, 22 nt, synthetic construct
  source 1..22: mol_type = other RNA
tgcacactcaatgagaattgac

SEQ ID NO: 10944 - RNA, 22 nt, synthetic construct
  source 1..22: mol_type = other RNA
tgcaccagaagccacaccctgg

SEQ ID NO: 10945 - RNA, 22 nt, synthetic construct
  source 1..22: mol_type = other RNA
tgcactgtagttatggattatg

SEQ ID NO: 10946 - RNA, 22 nt, synthetic construct
  source 1..22: mol_type = other RNA
tgcagaggacaacgatgaggtc

SEQ ID NO: 10947 - RNA, 22 nt, synthetic construct
  source 1..22: mol_type = other RNA
tgcagcagtcccagcagcccca

SEQ ID NO: 10948 - RNA, 22 nt, synthetic construct
  source 1..22: mol_type = other RNA
tgcagctcacgctttgcacact

SEQ ID NO: 10949 - RNA, 22 nt, synthetic construct
  source 1..22: mol_type = other RNA
tgcagctccgggcatgttcaac

SEQ ID NO: 10950 - RNA, 22 nt, synthetic construct
  source 1..22: mol_type = other RNA
tgcagcttgagatgaggtggaa

SEQ ID NO: 10951 - RNA, 22 nt, synthetic construct
  source 1..22: mol_type = other RNA
tgcagggagatggtttcagcag

SEQ ID NO: 10952 - RNA, 22 nt, synthetic construct
  source 1..22: mol_type = other RNA
tgcagggcatgaagagagctgt

SEQ ID NO: 10953 - RNA, 22 nt, synthetic construct
  source 1..22: mol_type = other RNA
tgcaggttcatatttgaattct

SEQ ID NO: 10954 - RNA, 22 nt, synthetic construct
  source 1..22: mol_type = other RNA
tgcatattttggtttccataac

SEQ ID NO: 10955 - RNA, 22 nt, synthetic construct
  source 1..22: mol_type = other RNA
tgcatctccaaaacaaggagaa

SEQ ID NO: 10956 - RNA, 22 nt, synthetic construct
  source 1..22: mol_type = other RNA
tgcatgactggtcctgaaagtc

SEQ ID NO: 10957 - RNA, 22 nt, synthetic construct
  source 1..22: mol_type = other RNA
tgcatgccacaacccctttaaa

SEQ ID NO: 10958 - RNA, 22 nt, synthetic construct
  source 1..22: mol_type = other RNA
tgcattgatatgatggatattg

SEQ ID NO: 10959 - RNA, 22 nt, synthetic construct
  source 1..22: mol_type = other RNA
tgccaatggctgcttttcctga

SEQ ID NO: 10960 - RNA, 22 nt, synthetic construct
  source 1..22: mol_type = other RNA
tgccacaacccctttaaagaat

SEQ ID NO: 10961 - RNA, 22 nt, synthetic construct
  source 1..22: mol_type = other RNA
tgccatgggatttctgaggcac

SEQ ID NO: 10962 - RNA, 22 nt, synthetic construct
  source 1..22: mol_type = other RNA
tgcccggagctgcactgtagtt

SEQ ID NO: 10963 - RNA, 22 nt, synthetic construct
  source 1..22: mol_type = other RNA
tgccctgcatctccaaaacaag

SEQ ID NO: 10964 - RNA, 22 nt, synthetic construct
  source 1..22: mol_type = other RNA
tgccgaaaggaccatgtccgtg

SEQ ID NO: 10965 - RNA, 22 nt, synthetic construct
  source 1..22: mol_type = other RNA
tgcctcagaaatcccatggcaa

SEQ ID NO: 10966 - RNA, 22 nt, synthetic construct
  source 1..22: mol_type = other RNA
tgcctccttatcccactcatga

SEQ ID NO: 10967 - RNA, 22 nt, synthetic construct
  source 1..22: mol_type = other RNA
tgccttcactcgggtcacaggg

SEQ ID NO: 10968 - RNA, 22 nt, synthetic construct
  source 1..22: mol_type = other RNA
tgcgactttcaggaccagtcat

SEQ ID NO: 10969 - RNA, 22 nt, synthetic construct
  source 1..22: mol_type = other RNA
tgcgtttcatcaagtctcttgc

SEQ ID NO: 10970 - RNA, 22 nt, synthetic construct
  source 1..22: mol_type = other RNA
tgctaatggtcaggaaaagcag

SEQ ID NO: 10971 - RNA, 22 nt, synthetic construct
  source 1..22: mol_type = other RNA
tgctcagattgggtggtaatct

SEQ ID NO: 10972 - RNA, 22 nt, synthetic construct
  source 1..22: mol_type = other RNA
tgctccccatatctgggttcct

SEQ ID NO: 10973 - RNA, 22 nt, synthetic construct
  source 1..22: mol_type = other RNA
tgctcgctgtctgaccagacct

SEQ ID NO: 10974 - RNA, 22 nt, synthetic construct
  source 1..22: mol_type = other RNA
tgctcttatgctggtaaaagac

SEQ ID NO: 10975 - RNA, 22 nt, synthetic construct
  source 1..22: mol_type = other RNA
tgctgaaaccatctccctgcat

SEQ ID NO: 10976 - RNA, 22 nt, synthetic construct
  source 1..22: mol_type = other RNA
tgctgagccacatgaaacttca

SEQ ID NO: 10977 - RNA, 22 nt, synthetic construct
  source 1..22: mol_type = other RNA
tgctgcatgactggtcctgaaa

SEQ ID NO: 10978 - RNA, 22 nt, synthetic construct
  source 1..22: mol_type = other RNA
tgctgctgctggggctgtggtg

SEQ ID NO: 10979 - RNA, 22 nt, synthetic construct
  source 1..22: mol_type = other RNA
tgctgctgctggggtctctgct

SEQ ID NO: 10980 - RNA, 22 nt, synthetic construct
  source 1..22: mol_type = other RNA
tgctgctggggctgtggtggct

SEQ ID NO: 10981 - RNA, 22 nt, synthetic construct
  source 1..22: mol_type = other RNA
tgctgctggggtctctgctgct

SEQ ID NO: 10982 - RNA, 22 nt, synthetic construct
  source 1..22: mol_type = other RNA
tgctgggactgctgcatgactg

SEQ ID NO: 10983 - RNA, 22 nt, synthetic construct
  source 1..22: mol_type = other RNA
tgctggggctgtggtggctgct

SEQ ID NO: 10984 - RNA, 22 nt, synthetic construct
  source 1..22: mol_type = other RNA
tgctggggtctctgctgctgct

SEQ ID NO: 10985 - RNA, 22 nt, synthetic construct
  source 1..22: mol_type = other RNA
tgctggtaaaagacgagggaga

SEQ ID NO: 10986 - RNA, 22 nt, synthetic construct
  source 1..22: mol_type = other RNA
tgcttccagctcttaaccatga

SEQ ID NO: 10987 - RNA, 22 nt, synthetic construct
  source 1..22: mol_type = other RNA
tgcttccatagatatctgaagt

SEQ ID NO: 10988 - RNA, 22 nt, synthetic construct
  source 1..22: mol_type = other RNA
tgcttctggatccaccaatcca

SEQ ID NO: 10989 - RNA, 22 nt, synthetic construct
  source 1..22: mol_type = other RNA
tgcttctgtagaggctggggct

SEQ ID NO: 10990 - RNA, 22 nt, synthetic construct
  source 1..22: mol_type = other RNA
tgcttgtgtccaaggaggctta

SEQ ID NO: 10991 - RNA, 22 nt, synthetic construct
  source 1..22: mol_type = other RNA
tgctttcccacacagctaatgg

SEQ ID NO: 10992 - RNA, 22 nt, synthetic construct
  source 1..22: mol_type = other RNA
tgcttttcctgaccattagcat

SEQ ID NO: 10993 - RNA, 22 nt, synthetic construct
  source 1..22: mol_type = other RNA
tggaaaccaaaatatgcaggga

SEQ ID NO: 10994 - RNA, 22 nt, synthetic construct
  source 1..22: mol_type = other RNA
tggaaacctatcagtggacaac

SEQ ID NO: 10995 - RNA, 22 nt, synthetic construct
  source 1..22: mol_type = other RNA
tggaaatagccagagttttaca

SEQ ID NO: 10996 - RNA, 22 nt, synthetic construct
  source 1..22: mol_type = other RNA
tggaagcaccagccctatgaac

SEQ ID NO: 10997 - RNA, 22 nt, synthetic construct
  source 1..22: mol_type = other RNA
tggaagcatctttgataaccca

SEQ ID NO: 10998 - RNA, 22 nt, synthetic construct
  source 1..22: mol_type = other RNA
tggaatagaagttcatagggct

SEQ ID NO: 10999 - RNA, 22 nt, synthetic construct
  source 1..22: mol_type = other RNA
tggacaactgctccccatatct

SEQ ID NO: 11000 - RNA, 22 nt, synthetic construct
  source 1..22: mol_type = other RNA
tggacacaagcagttctatcat

SEQ ID NO: 11001 - RNA, 22 nt, synthetic construct
  source 1..22: mol_type = other RNA
tggacagggtaagagagaacag

SEQ ID NO: 11002 - RNA, 22 nt, synthetic construct
  source 1..22: mol_type = other RNA
tggactagtgccaatggctgct

SEQ ID NO: 11003 - RNA, 22 nt, synthetic construct
  source 1..22: mol_type = other RNA
tggactataaaaatggtgaaca

SEQ ID NO: 11004 - RNA, 22 nt, synthetic construct
  source 1..22: mol_type = other RNA
tggagatgcagggcatgaagag

SEQ ID NO: 11005 - RNA, 22 nt, synthetic construct
  source 1..22: mol_type = other RNA
tggagatgtagttactgtggag

SEQ ID NO: 11006 - RNA, 22 nt, synthetic construct
  source 1..22: mol_type = other RNA
tggagccacggccactccccca

SEQ ID NO: 11007 - RNA, 22 nt, synthetic construct
  source 1..22: mol_type = other RNA
tggagtctgtggtcacggacat

SEQ ID NO: 11008 - RNA, 22 nt, synthetic construct
  source 1..22: mol_type = other RNA
tggataaggactaactggattg

SEQ ID NO: 11009 - RNA, 22 nt, synthetic construct
  source 1..22: mol_type = other RNA
tggatacctatacagatccatc

SEQ ID NO: 11010 - RNA, 22 nt, synthetic construct
  source 1..22: mol_type = other RNA
tggatattgggtattctgattc

SEQ ID NO: 11011 - RNA, 22 nt, synthetic construct
  source 1..22: mol_type = other RNA
tggatccaccaatccatacatg

SEQ ID NO: 11012 - RNA, 22 nt, synthetic construct
  source 1..22: mol_type = other RNA
tggatccagaagcagaataaga

SEQ ID NO: 11013 - RNA, 22 nt, synthetic construct
  source 1..22: mol_type = other RNA
tggatcctgacattgggggagt

SEQ ID NO: 11014 - RNA, 22 nt, synthetic construct
  source 1..22: mol_type = other RNA
tggatctgtataggtatccaag

SEQ ID NO: 11015 - RNA, 22 nt, synthetic construct
  source 1..22: mol_type = other RNA
tggatggccacttcatgggagc

SEQ ID NO: 11016 - RNA, 22 nt, synthetic construct
  source 1..22: mol_type = other RNA
tggatgggtggtagactgagct

SEQ ID NO: 11017 - RNA, 22 nt, synthetic construct
  source 1..22: mol_type = other RNA
tggattatgtgagaaggtgaat

SEQ ID NO: 11018 - RNA, 22 nt, synthetic construct
  source 1..22: mol_type = other RNA
tggattgctcagattgggtggt

SEQ ID NO: 11019 - RNA, 22 nt, synthetic construct
  source 1..22: mol_type = other RNA
tggattgggccgtctcatgtat

SEQ ID NO: 11020 - RNA, 22 nt, synthetic construct
  source 1..22: mol_type = other RNA
tggattggtggatccagaagca

SEQ ID NO: 11021 - RNA, 22 nt, synthetic construct
  source 1..22: mol_type = other RNA
tggcaaaaaagtgaaacgggag

SEQ ID NO: 11022 - RNA, 22 nt, synthetic construct
  source 1..22: mol_type = other RNA
tggcactagtccagggtgtggc

SEQ ID NO: 11023 - RNA, 22 nt, synthetic construct
  source 1..22: mol_type = other RNA
tggcatgcagctcacgctttgc

SEQ ID NO: 11024 - RNA, 22 nt, synthetic construct
  source 1..22: mol_type = other RNA
tggccacttcatgggagccacc

SEQ ID NO: 11025 - RNA, 22 nt, synthetic construct
  source 1..22: mol_type = other RNA
tggccatccatctcatgagtgg

SEQ ID NO: 11026 - RNA, 22 nt, synthetic construct
  source 1..22: mol_type = other RNA
tggcccagactatgtgcctcag

SEQ ID NO: 11027 - RNA, 22 nt, synthetic construct
  source 1..22: mol_type = other RNA
tggccgtggctccaactcatgg

SEQ ID NO: 11028 - RNA, 22 nt, synthetic construct
  source 1..22: mol_type = other RNA
tggctatttccaaaccttggct

SEQ ID NO: 11029 - RNA, 22 nt, synthetic construct
  source 1..22: mol_type = other RNA
tggctcagcaggctcccgtttc

SEQ ID NO: 11030 - RNA, 22 nt, synthetic construct
  source 1..22: mol_type = other RNA
tggctcattcatgctcttatgc

SEQ ID NO: 11031 - RNA, 22 nt, synthetic construct
  source 1..22: mol_type = other RNA
tggctccaactcatgggtcaat

SEQ ID NO: 11032 - RNA, 22 nt, synthetic construct
  source 1..22: mol_type = other RNA
tggctcccatgaagtggccatc

SEQ ID NO: 11033 - RNA, 22 nt, synthetic construct
  source 1..22: mol_type = other RNA
tggctctttgggaagccaaaat

SEQ ID NO: 11034 - RNA, 22 nt, synthetic construct
  source 1..22: mol_type = other RNA
tggctgaaaaagcccgtgagaa

SEQ ID NO: 11035 - RNA, 22 nt, synthetic construct
  source 1..22: mol_type = other RNA
tggctgctgctgctggggtctc

SEQ ID NO: 11036 - RNA, 22 nt, synthetic construct
  source 1..22: mol_type = other RNA
tggctgcttctgtagaggctgg

SEQ ID NO: 11037 - RNA, 22 nt, synthetic construct
  source 1..22: mol_type = other RNA
tggctgcttttcctgaccatta

SEQ ID NO: 11038 - RNA, 22 nt, synthetic construct
  source 1..22: mol_type = other RNA
tggctggtaaagtgtatggatg

SEQ ID NO: 11039 - RNA, 22 nt, synthetic construct
  source 1..22: mol_type = other RNA
tggcttcccaaagagccaagcc

SEQ ID NO: 11040 - RNA, 22 nt, synthetic construct
  source 1..22: mol_type = other RNA
tggcttctggtgcagaggacaa

SEQ ID NO: 11041 - RNA, 22 nt, synthetic construct
  source 1..22: mol_type = other RNA
tggcttggatacctatacagat

SEQ ID NO: 11042 - RNA, 22 nt, synthetic construct
  source 1..22: mol_type = other RNA
tggcttggctctttgggaagcc

SEQ ID NO: 11043 - RNA, 22 nt, synthetic construct
  source 1..22: mol_type = other RNA
tgggaaagcatgtcattctcct

SEQ ID NO: 11044 - RNA, 22 nt, synthetic construct
  source 1..22: mol_type = other RNA
tgggaagccaaaatggctgaaa

SEQ ID NO: 11045 - RNA, 22 nt, synthetic construct
  source 1..22: mol_type = other RNA
tgggactgctgcatgactggtc

SEQ ID NO: 11046 - RNA, 22 nt, synthetic construct
  source 1..22: mol_type = other RNA
tgggagccacctctagattacc

SEQ ID NO: 11047 - RNA, 22 nt, synthetic construct
  source 1..22: mol_type = other RNA
tgggataaggaggcaatttccc

SEQ ID NO: 11048 - RNA, 22 nt, synthetic construct
  source 1..22: mol_type = other RNA
tgggattagaagaattcaaata

SEQ ID NO: 11049 - RNA, 22 nt, synthetic construct
  source 1..22: mol_type = other RNA
tgggattctttaaaggggttgt

SEQ ID NO: 11050 - RNA, 22 nt, synthetic construct
  source 1..22: mol_type = other RNA
tgggatttctgaggcacatagt

SEQ ID NO: 11051 - RNA, 22 nt, synthetic construct
  source 1..22: mol_type = other RNA
tgggccatacttttcacactct

SEQ ID NO: 11052 - RNA, 22 nt, synthetic construct
  source 1..22: mol_type = other RNA
tgggccgtctcatgtatggatt

SEQ ID NO: 11053 - RNA, 22 nt, synthetic construct
  source 1..22: mol_type = other RNA
tgggctctgaagtttcatgtgg

SEQ ID NO: 11054 - RNA, 22 nt, synthetic construct
  source 1..22: mol_type = other RNA
tgggcttttgaatcagaatacc

SEQ ID NO: 11055 - RNA, 22 nt, synthetic construct
  source 1..22: mol_type = other RNA
tggggagaataggaacccagat

SEQ ID NO: 11056 - RNA, 22 nt, synthetic construct
  source 1..22: mol_type = other RNA
tggggagcagttgtccactgat

SEQ ID NO: 11057 - RNA, 22 nt, synthetic construct
  source 1..22: mol_type = other RNA
tggggctgctgggactgctgca

SEQ ID NO: 11058 - RNA, 22 nt, synthetic construct
  source 1..22: mol_type = other RNA
tggggctgtggtggctgcttct

SEQ ID NO: 11059 - RNA, 22 nt, synthetic construct
  source 1..22: mol_type = other RNA
tgggggagtggccgtggctcca

SEQ ID NO: 11060 - RNA, 22 nt, synthetic construct
  source 1..22: mol_type = other RNA
tggggtctctgctgctgctggg

SEQ ID NO: 11061 - RNA, 22 nt, synthetic construct
  source 1..22: mol_type = other RNA
tggggtgattcctattgggatt

SEQ ID NO: 11062 - RNA, 22 nt, synthetic construct
  source 1..22: mol_type = other RNA
tgggtattctgattcaaaagcc

SEQ ID NO: 11063 - RNA, 22 nt, synthetic construct
  source 1..22: mol_type = other RNA
tgggtcaattctcattgagtgt

SEQ ID NO: 11064 - RNA, 22 nt, synthetic construct
  source 1..22: mol_type = other RNA
tgggtggtaatctagaggtggc

SEQ ID NO: 11065 - RNA, 22 nt, synthetic construct
  source 1..22: mol_type = other RNA
tgggtggtagactgagcttaga

SEQ ID NO: 11066 - RNA, 22 nt, synthetic construct
  source 1..22: mol_type = other RNA
tgggttatcaaagatgcttcca

SEQ ID NO: 11067 - RNA, 22 nt, synthetic construct
  source 1..22: mol_type = other RNA
tgggttcctattctccccagtc

SEQ ID NO: 11068 - RNA, 22 nt, synthetic construct
  source 1..22: mol_type = other RNA
tggtaaaagacgagggagatcc

SEQ ID NO: 11069 - RNA, 22 nt, synthetic construct
  source 1..22: mol_type = other RNA
tggtaaagtgtatggatgggtg

SEQ ID NO: 11070 - RNA, 22 nt, synthetic construct
  source 1..22: mol_type = other RNA
tggtaatctagaggtggctccc

SEQ ID NO: 11071 - RNA, 22 nt, synthetic construct
  source 1..22: mol_type = other RNA
tggtacaactgctgaaaccatc

SEQ ID NO: 11072 - RNA, 22 nt, synthetic construct
  source 1..22: mol_type = other RNA
tggtagactgagcttagacaga

SEQ ID NO: 11073 - RNA, 22 nt, synthetic construct
  source 1..22: mol_type = other RNA
tggtcacggacatggtcctttc

SEQ ID NO: 11074 - RNA, 22 nt, synthetic construct
  source 1..22: mol_type = other RNA
tggtcagacagcgagcagagct

SEQ ID NO: 11075 - RNA, 22 nt, synthetic construct
  source 1..22: mol_type = other RNA
tggtcaggaaaagcagccattg

SEQ ID NO: 11076 - RNA, 22 nt, synthetic construct
  source 1..22: mol_type = other RNA
tggtcctgaaagtcgcaaaagt

SEQ ID NO: 11077 - RNA, 22 nt, synthetic construct
  source 1..22: mol_type = other RNA
tggtcctttcggcaagagactt

SEQ ID NO: 11078 - RNA, 22 nt, synthetic construct
  source 1..22: mol_type = other RNA
tggtctaatggtacaactgctg

SEQ ID NO: 11079 - RNA, 22 nt, synthetic construct
  source 1..22: mol_type = other RNA
tggtgaacatcattcaccttct

SEQ ID NO: 11080 - RNA, 22 nt, synthetic construct
  source 1..22: mol_type = other RNA
tggtgcagaggacaacgatgag

SEQ ID NO: 11081 - RNA, 22 nt, synthetic construct
  source 1..22: mol_type = other RNA
tggtgcttccatagatatctga

SEQ ID NO: 11082 - RNA, 22 nt, synthetic construct
  source 1..22: mol_type = other RNA
tggtggatccagaagcagaata

SEQ ID NO: 11083 - RNA, 22 nt, synthetic construct
  source 1..22: mol_type = other RNA
tggtggctgcttctgtagaggc

SEQ ID NO: 11084 - RNA, 22 nt, synthetic construct
  source 1..22: mol_type = other RNA
tggtggggtgattcctattggg

SEQ ID NO: 11085 - RNA, 22 nt, synthetic construct
  source 1..22: mol_type = other RNA
tggttaagagctggaagcatct

SEQ ID NO: 11086 - RNA, 22 nt, synthetic construct
  source 1..22: mol_type = other RNA
tggtttcagcagttgtaccatt

SEQ ID NO: 11087 - RNA, 22 nt, synthetic construct
  source 1..22: mol_type = other RNA
tggtttccataacctaagtatt

SEQ ID NO: 11088 - RNA, 22 nt, synthetic construct
  source 1..22: mol_type = other RNA
tgtaaaactctggctatttcca

SEQ ID NO: 11089 - RNA, 22 nt, synthetic construct
  source 1..22: mol_type = other RNA
tgtaagcctccttggacacaag

SEQ ID NO: 11090 - RNA, 22 nt, synthetic construct
  source 1..22: mol_type = other RNA
tgtaaggccctgtgacccgagt

SEQ ID NO: 11091 - RNA, 22 nt, synthetic construct
  source 1..22: mol_type = other RNA
tgtacatcatgtagggaaattg

SEQ ID NO: 11092 - RNA, 22 nt, synthetic construct
  source 1..22: mol_type = other RNA
tgtacatttggtctaatggtac

SEQ ID NO: 11093 - RNA, 22 nt, synthetic construct
  source 1..22: mol_type = other RNA
tgtaccattagaccaaatgtac

SEQ ID NO: 11094 - RNA, 22 nt, synthetic construct
  source 1..22: mol_type = other RNA
tgtagaggctggggctgctggg

SEQ ID NO: 11095 - RNA, 22 nt, synthetic construct
  source 1..22: mol_type = other RNA
tgtagggaaattgcctccttat

SEQ ID NO: 11096 - RNA, 22 nt, synthetic construct
  source 1..22: mol_type = other RNA
tgtagttactgtggagtctgtg

SEQ ID NO: 11097 - RNA, 22 nt, synthetic construct
  source 1..22: mol_type = other RNA
tgtagttatggattatgtgaga

SEQ ID NO: 11098 - RNA, 22 nt, synthetic construct
  source 1..22: mol_type = other RNA
tgtataggtatccaagccaaga

SEQ ID NO: 11099 - RNA, 22 nt, synthetic construct
  source 1..22: mol_type = other RNA
tgtatggatgggtggtagactg

SEQ ID NO: 11100 - RNA, 22 nt, synthetic construct
  source 1..22: mol_type = other RNA
tgtatggattggtggatccaga

SEQ ID NO: 11101 - RNA, 22 nt, synthetic construct
  source 1..22: mol_type = other RNA
tgtcaactcttattctgcttct

SEQ ID NO: 11102 - RNA, 22 nt, synthetic construct
  source 1..22: mol_type = other RNA
tgtcaggatccagaaagctctg

SEQ ID NO: 11103 - RNA, 22 nt, synthetic construct
  source 1..22: mol_type = other RNA
tgtcattctccttgttttggag

SEQ ID NO: 11104 - RNA, 22 nt, synthetic construct
  source 1..22: mol_type = other RNA
tgtccaaggaggcttacacaaa

SEQ ID NO: 11105 - RNA, 22 nt, synthetic construct
  source 1..22: mol_type = other RNA
tgtccacagaacttttgcgact

SEQ ID NO: 11106 - RNA, 22 nt, synthetic construct
  source 1..22: mol_type = other RNA
tgtccactgataggtttccatt

SEQ ID NO: 11107 - RNA, 22 nt, synthetic construct
  source 1..22: mol_type = other RNA
tgtccgtgaccacagactccac

SEQ ID NO: 11108 - RNA, 22 nt, synthetic construct
  source 1..22: mol_type = other RNA
tgtcctctgcaccagaagccac

SEQ ID NO: 11109 - RNA, 22 nt, synthetic construct
  source 1..22: mol_type = other RNA
tgtctaagctcagtctaccacc

SEQ ID NO: 11110 - RNA, 22 nt, synthetic construct
  source 1..22: mol_type = other RNA
tgtctgaccagacctcatcgtt

SEQ ID NO: 11111 - RNA, 22 nt, synthetic construct
  source 1..22: mol_type = other RNA
tgtctgagggtgatgtggctgc

SEQ ID NO: 11112 - RNA, 22 nt, synthetic construct
  source 1..22: mol_type = other RNA
tgtgaaaagtatggcccagact

SEQ ID NO: 11113 - RNA, 22 nt, synthetic construct
  source 1..22: mol_type = other RNA
tgtgaagagtttggataaggac

SEQ ID NO: 11114 - RNA, 22 nt, synthetic construct
  source 1..22: mol_type = other RNA
tgtgacccgagtgaaggcatat

SEQ ID NO: 11115 - RNA, 22 nt, synthetic construct
  source 1..22: mol_type = other RNA
tgtgagaaggtgaatgatgttc

SEQ ID NO: 11116 - RNA, 22 nt, synthetic construct
  source 1..22: mol_type = other RNA
tgtgcaaagcgtgagctgcatg

SEQ ID NO: 11117 - RNA, 22 nt, synthetic construct
  source 1..22: mol_type = other RNA
tgtgcctcagaaatcccatggc

SEQ ID NO: 11118 - RNA, 22 nt, synthetic construct
  source 1..22: mol_type = other RNA
tgtggacagggtaagagagaac

SEQ ID NO: 11119 - RNA, 22 nt, synthetic construct
  source 1..22: mol_type = other RNA
tgtggagtctgtggtcacggac

SEQ ID NO: 11120 - RNA, 22 nt, synthetic construct
  source 1..22: mol_type = other RNA
tgtggcatgcagctcacgcttt

SEQ ID NO: 11121 - RNA, 22 nt, synthetic construct
  source 1..22: mol_type = other RNA
tgtggctcagcaggctcccgtt

SEQ ID NO: 11122 - RNA, 22 nt, synthetic construct
  source 1..22: mol_type = other RNA
tgtggctgctgctgctggggtc

SEQ ID NO: 11123 - RNA, 22 nt, synthetic construct
  source 1..22: mol_type = other RNA
tgtggcttctggtgcagaggac

SEQ ID NO: 11124 - RNA, 22 nt, synthetic construct
  source 1..22: mol_type = other RNA
tgtgggaaagcatgtcattctc

SEQ ID NO: 11125 - RNA, 22 nt, synthetic construct
  source 1..22: mol_type = other RNA
tgtggtcacggacatggtcctt

SEQ ID NO: 11126 - RNA, 22 nt, synthetic construct
  source 1..22: mol_type = other RNA
tgtggtggctgcttctgtagag

SEQ ID NO: 11127 - RNA, 22 nt, synthetic construct
  source 1..22: mol_type = other RNA
tgtgtaagcctccttggacaca

SEQ ID NO: 11128 - RNA, 22 nt, synthetic construct
  source 1..22: mol_type = other RNA
tgtgtccaaggaggcttacaca

SEQ ID NO: 11129 - RNA, 22 nt, synthetic construct
  source 1..22: mol_type = other RNA
tgtgtgaagagtttggataagg

SEQ ID NO: 11130 - RNA, 22 nt, synthetic construct
  source 1..22: mol_type = other RNA
tgtgtgggaaagcatgtcattc

SEQ ID NO: 11131 - RNA, 22 nt, synthetic construct
  source 1..22: mol_type = other RNA
tgttcaacagctctcttcatgc

SEQ ID NO: 11132 - RNA, 22 nt, synthetic construct
  source 1..22: mol_type = other RNA
tgttcaccatttttatagtcca

SEQ ID NO: 11133 - RNA, 22 nt, synthetic construct
  source 1..22: mol_type = other RNA
tgttctctcttaccctgtccac

SEQ ID NO: 11134 - RNA, 22 nt, synthetic construct
  source 1..22: mol_type = other RNA
tgttgaacatgcccggagctgc

SEQ ID NO: 11135 - RNA, 22 nt, synthetic construct
  source 1..22: mol_type = other RNA
tgttgtaaggccctgtgacccg

SEQ ID NO: 11136 - RNA, 22 nt, synthetic construct
  source 1..22: mol_type = other RNA
tgtttctgttctctcttaccct

SEQ ID NO: 11137 - RNA, 22 nt, synthetic construct
  source 1..22: mol_type = other RNA
tgtttggattgctcagattggg

SEQ ID NO: 11138 - RNA, 22 nt, synthetic construct
  source 1..22: mol_type = other RNA
tgttttggagatgcagggcatg

SEQ ID NO: 11139 - RNA, 22 nt, synthetic construct
  source 1..22: mol_type = other RNA
tgttttggctcattcatgctct

SEQ ID NO: 11140 - RNA, 22 nt, synthetic construct
  source 1..22: mol_type = other RNA
ttaaagaatcccaataggaatc

SEQ ID NO: 11141 - RNA, 22 nt, synthetic construct
  source 1..22: mol_type = other RNA
ttaaaggggttgtggcatgcag

SEQ ID NO: 11142 - RNA, 22 nt, synthetic construct
  source 1..22: mol_type = other RNA
ttaaccatgatagaactgcttg

SEQ ID NO: 11143 - RNA, 22 nt, synthetic construct
  source 1..22: mol_type = other RNA
ttaagagctggaagcatctttg

SEQ ID NO: 11144 - RNA, 22 nt, synthetic construct
  source 1..22: mol_type = other RNA
ttaagtgatgctaatggtcagg

SEQ ID NO: 11145 - RNA, 22 nt, synthetic construct
  source 1..22: mol_type = other RNA
ttaatttgtgtaagcctccttg

SEQ ID NO: 11146 - RNA, 22 nt, synthetic construct
  source 1..22: mol_type = other RNA
ttacacaaattaagtgatgcta

SEQ ID NO: 11147 - RNA, 22 nt, synthetic construct
  source 1..22: mol_type = other RNA
ttaccacccaatctgagcaatc

SEQ ID NO: 11148 - RNA, 22 nt, synthetic construct
  source 1..22: mol_type = other RNA
ttaccagcataagagcatgaat

SEQ ID NO: 11149 - RNA, 22 nt, synthetic construct
  source 1..22: mol_type = other RNA
ttaccagccaaggtttggaaat

SEQ ID NO: 11150 - RNA, 22 nt, synthetic construct
  source 1..22: mol_type = other RNA
ttaccctgggcttttgaatcag

SEQ ID NO: 11151 - RNA, 22 nt, synthetic construct
  source 1..22: mol_type = other RNA
ttaccctgtccacagaactttt

SEQ ID NO: 11152 - RNA, 22 nt, synthetic construct
  source 1..22: mol_type = other RNA
ttacctgcgtttcatcaagtct

SEQ ID NO: 11153 - RNA, 22 nt, synthetic construct
  source 1..22: mol_type = other RNA
ttactgtggagtctgtggtcac

SEQ ID NO: 11154 - RNA, 22 nt, synthetic construct
  source 1..22: mol_type = other RNA
ttagacagagggtcttggcttg

SEQ ID NO: 11155 - RNA, 22 nt, synthetic construct
  source 1..22: mol_type = other RNA
ttagaccaaatgtacatcatgt

SEQ ID NO: 11156 - RNA, 22 nt, synthetic construct
  source 1..22: mol_type = other RNA
ttagatgtaaaactctggctat

SEQ ID NO: 11157 - RNA, 22 nt, synthetic construct
  source 1..22: mol_type = other RNA
ttagcatcacttaatttgtgta

SEQ ID NO: 11158 - RNA, 22 nt, synthetic construct
  source 1..22: mol_type = other RNA
ttagctgtgtgggaaagcatgt

SEQ ID NO: 11159 - RNA, 22 nt, synthetic construct
  source 1..22: mol_type = other RNA
ttaggttatggaaaccaaaata

SEQ ID NO: 11160 - RNA, 22 nt, synthetic construct
  source 1..22: mol_type = other RNA
ttagtccttatccaaactcttc

SEQ ID NO: 11161 - RNA, 22 nt, synthetic construct
  source 1..22: mol_type = other RNA
ttatagtccatgtttggattgc

SEQ ID NO: 11162 - RNA, 22 nt, synthetic construct
  source 1..22: mol_type = other RNA
ttatcaaagatgcttccagctc

SEQ ID NO: 11163 - RNA, 22 nt, synthetic construct
  source 1..22: mol_type = other RNA
ttatccaaactcttcacacact

SEQ ID NO: 11164 - RNA, 22 nt, synthetic construct
  source 1..22: mol_type = other RNA
ttatcccactcatgagatggat

SEQ ID NO: 11165 - RNA, 22 nt, synthetic construct
  source 1..22: mol_type = other RNA
ttatgctggtaaaagacgaggg

SEQ ID NO: 11166 - RNA, 22 nt, synthetic construct
  source 1..22: mol_type = other RNA
ttatggaaaccaaaatatgcag

SEQ ID NO: 11167 - RNA, 22 nt, synthetic construct
  source 1..22: mol_type = other RNA
ttatggattatgtgagaaggtg

SEQ ID NO: 11168 - RNA, 22 nt, synthetic construct
  source 1..22: mol_type = other RNA
ttatgtgagaaggtgaatgatg

SEQ ID NO: 11169 - RNA, 22 nt, synthetic construct
  source 1..22: mol_type = other RNA
ttattctgcttctggatccacc

SEQ ID NO: 11170 - RNA, 22 nt, synthetic construct
  source 1..22: mol_type = other RNA
ttcaaaagcccagggtaagggt

SEQ ID NO: 11171 - RNA, 22 nt, synthetic construct
  source 1..22: mol_type = other RNA
ttcaaatatgaacctgcagctt

SEQ ID NO: 11172 - RNA, 22 nt, synthetic construct
  source 1..22: mol_type = other RNA
ttcaacagctctcttcatgccc

SEQ ID NO: 11173 - RNA, 22 nt, synthetic construct
  source 1..22: mol_type = other RNA
ttcaagtgaggtaaccaacaaa

SEQ ID NO: 11174 - RNA, 22 nt, synthetic construct
  source 1..22: mol_type = other RNA
ttcacacacttcagatatctat

SEQ ID NO: 11175 - RNA, 22 nt, synthetic construct
  source 1..22: mol_type = other RNA
ttcacactcttcctctttctca

SEQ ID NO: 11176 - RNA, 22 nt, synthetic construct
  source 1..22: mol_type = other RNA
ttcaccatttttatagtccatg

SEQ ID NO: 11177 - RNA, 22 nt, synthetic construct
  source 1..22: mol_type = other RNA
ttcaccttctcacataatccat

SEQ ID NO: 11178 - RNA, 22 nt, synthetic construct
  source 1..22: mol_type = other RNA
ttcactcgggtcacagggcctt

SEQ ID NO: 11179 - RNA, 22 nt, synthetic construct
  source 1..22: mol_type = other RNA
ttcacttttttgccatgggatt

SEQ ID NO: 11180 - RNA, 22 nt, synthetic construct
  source 1..22: mol_type = other RNA
ttcagagcccacttacctgcgt

SEQ ID NO: 11181 - RNA, 22 nt, synthetic construct
  source 1..22: mol_type = other RNA
ttcagatatctatggaagcacc

SEQ ID NO: 11182 - RNA, 22 nt, synthetic construct
  source 1..22: mol_type = other RNA
ttcagcagttgtaccattagac

SEQ ID NO: 11183 - RNA, 22 nt, synthetic construct
  source 1..22: mol_type = other RNA
ttcagccattttggcttcccaa

SEQ ID NO: 11184 - RNA, 22 nt, synthetic construct
  source 1..22: mol_type = other RNA
ttcaggaccagtcatgcagcag

SEQ ID NO: 11185 - RNA, 22 nt, synthetic construct
  source 1..22: mol_type = other RNA
ttcatagggctggtgcttccat

SEQ ID NO: 11186 - RNA, 22 nt, synthetic construct
  source 1..22: mol_type = other RNA
ttcatcaagtctcttgccgaaa

SEQ ID NO: 11187 - RNA, 22 nt, synthetic construct
  source 1..22: mol_type = other RNA
ttcatgccctgcatctccaaaa

SEQ ID NO: 11188 - RNA, 22 nt, synthetic construct
  source 1..22: mol_type = other RNA
ttcatgctcttatgctggtaaa

SEQ ID NO: 11189 - RNA, 22 nt, synthetic construct
  source 1..22: mol_type = other RNA
ttcatgggagccacctctagat

SEQ ID NO: 11190 - RNA, 22 nt, synthetic construct
  source 1..22: mol_type = other RNA
ttcatgggattagaagaattca

SEQ ID NO: 11191 - RNA, 22 nt, synthetic construct
  source 1..22: mol_type = other RNA
ttcatgtggctcagcaggctcc

SEQ ID NO: 11192 - RNA, 22 nt, synthetic construct
  source 1..22: mol_type = other RNA
ttccaaaccttggctggtaaag

SEQ ID NO: 11193 - RNA, 22 nt, synthetic construct
  source 1..22: mol_type = other RNA
ttccacctcatctcaagctgca

SEQ ID NO: 11194 - RNA, 22 nt, synthetic construct
  source 1..22: mol_type = other RNA
ttccagctcttaaccatgatag

SEQ ID NO: 11195 - RNA, 22 nt, synthetic construct
  source 1..22: mol_type = other RNA
ttccataacctaagtatttaga

SEQ ID NO: 11196 - RNA, 22 nt, synthetic construct
  source 1..22: mol_type = other RNA
ttccatagatatctgaagtgtg

SEQ ID NO: 11197 - RNA, 22 nt, synthetic construct
  source 1..22: mol_type = other RNA
ttccattgcattgatatgatgg

SEQ ID NO: 11198 - RNA, 22 nt, synthetic construct
  source 1..22: mol_type = other RNA
ttcccaaagagccaagccatgt

SEQ ID NO: 11199 - RNA, 22 nt, synthetic construct
  source 1..22: mol_type = other RNA
ttcccacacagctaatgggtta

SEQ ID NO: 11200 - RNA, 22 nt, synthetic construct
  source 1..22: mol_type = other RNA
ttccctacatgatgtacatttg

SEQ ID NO: 11201 - RNA, 22 nt, synthetic construct
  source 1..22: mol_type = other RNA
ttcctattctccccagtctcag

SEQ ID NO: 11202 - RNA, 22 nt, synthetic construct
  source 1..22: mol_type = other RNA
ttcctattgggattctttaaag

SEQ ID NO: 11203 - RNA, 22 nt, synthetic construct
  source 1..22: mol_type = other RNA
ttcctctttctcacgggctttt

SEQ ID NO: 11204 - RNA, 22 nt, synthetic construct
  source 1..22: mol_type = other RNA
ttcctgaccattagcatcactt

SEQ ID NO: 11205 - RNA, 22 nt, synthetic construct
  source 1..22: mol_type = other RNA
ttcggcaagagacttgatgaaa

SEQ ID NO: 11206 - RNA, 22 nt, synthetic construct
  source 1..22: mol_type = other RNA
ttctaatcccatgaacccttac

SEQ ID NO: 11207 - RNA, 22 nt, synthetic construct
  source 1..22: mol_type = other RNA
ttctatcatggttaagagctgg

SEQ ID NO: 11208 - RNA, 22 nt, synthetic construct
  source 1..22: mol_type = other RNA
ttctattccacctcatctcaag

SEQ ID NO: 11209 - RNA, 22 nt, synthetic construct
  source 1..22: mol_type = other RNA
ttctcacataatccataactac

SEQ ID NO: 11210 - RNA, 22 nt, synthetic construct
  source 1..22: mol_type = other RNA
ttctcacgggctttttcagcca

SEQ ID NO: 11211 - RNA, 22 nt, synthetic construct
  source 1..22: mol_type = other RNA
ttctcattgagtgtgcaaagcg

SEQ ID NO: 11212 - RNA, 22 nt, synthetic construct
  source 1..22: mol_type = other RNA
ttctccccagtctcagccgatg

SEQ ID NO: 11213 - RNA, 22 nt, synthetic construct
  source 1..22: mol_type = other RNA
ttctccttgttttggagatgca

SEQ ID NO: 11214 - RNA, 22 nt, synthetic construct
  source 1..22: mol_type = other RNA
ttctctcttaccctgtccacag

SEQ ID NO: 11215 - RNA, 22 nt, synthetic construct
  source 1..22: mol_type = other RNA
ttctgaggcacatagtctgggc

SEQ ID NO: 11216 - RNA, 22 nt, synthetic construct
  source 1..22: mol_type = other RNA
ttctgattcaaaagcccagggt

SEQ ID NO: 11217 - RNA, 22 nt, synthetic construct
  source 1..22: mol_type = other RNA
ttctgcttctggatccaccaat

SEQ ID NO: 11218 - RNA, 22 nt, synthetic construct
  source 1..22: mol_type = other RNA
ttctggatccaccaatccatac

SEQ ID NO: 11219 - RNA, 22 nt, synthetic construct
  source 1..22: mol_type = other RNA
ttctggatcctgacattggggg

SEQ ID NO: 11220 - RNA, 22 nt, synthetic construct
  source 1..22: mol_type = other RNA
ttctggtgcagaggacaacgat

SEQ ID NO: 11221 - RNA, 22 nt, synthetic construct
  source 1..22: mol_type = other RNA
ttctgtagaggctggggctgct

SEQ ID NO: 11222 - RNA, 22 nt, synthetic construct
  source 1..22: mol_type = other RNA
ttctgtggacagggtaagagag

SEQ ID NO: 11223 - RNA, 22 nt, synthetic construct
  source 1..22: mol_type = other RNA
ttctgttctctcttaccctgtc

SEQ ID NO: 11224 - RNA, 22 nt, synthetic construct
  source 1..22: mol_type = other RNA
ttcttctaatcccatgaaccct

SEQ ID NO: 11225 - RNA, 22 nt, synthetic construct
  source 1..22: mol_type = other RNA
ttctttaaaggggttgtggcat

SEQ ID NO: 11226 - RNA, 22 nt, synthetic construct
  source 1..22: mol_type = other RNA
ttgaacatgcccggagctgcac

SEQ ID NO: 11227 - RNA, 22 nt, synthetic construct
  source 1..22: mol_type = other RNA
ttgaatcagaatacccaatatc

SEQ ID NO: 11228 - RNA, 22 nt, synthetic construct
  source 1..22: mol_type = other RNA
ttgaattcttctaatcccatga

SEQ ID NO: 11229 - RNA, 22 nt, synthetic construct
  source 1..22: mol_type = other RNA
ttgacagactctgtctgagggt

SEQ ID NO: 11230 - RNA, 22 nt, synthetic construct
  source 1..22: mol_type = other RNA
ttgacccatgagttggagccac

SEQ ID NO: 11231 - RNA, 22 nt, synthetic construct
  source 1..22: mol_type = other RNA
ttgagatgaggtggaatagaag

SEQ ID NO: 11232 - RNA, 22 nt, synthetic construct
  source 1..22: mol_type = other RNA
ttgagtgtgcaaagcgtgagct

SEQ ID NO: 11233 - RNA, 22 nt, synthetic construct
  source 1..22: mol_type = other RNA
ttgataacccattagctgtgtg

SEQ ID NO: 11234 - RNA, 22 nt, synthetic construct
  source 1..22: mol_type = other RNA
ttgatatgatggatattgggta

SEQ ID NO: 11235 - RNA, 22 nt, synthetic construct
  source 1..22: mol_type = other RNA
ttgatgaaacgcaggtaagtgg

SEQ ID NO: 11236 - RNA, 22 nt, synthetic construct
  source 1..22: mol_type = other RNA
ttgcacactcaatgagaattga

SEQ ID NO: 11237 - RNA, 22 nt, synthetic construct
  source 1..22: mol_type = other RNA
ttgcattgatatgatggatatt

SEQ ID NO: 11238 - RNA, 22 nt, synthetic construct
  source 1..22: mol_type = other RNA
ttgccatgggatttctgaggca

SEQ ID NO: 11239 - RNA, 22 nt, synthetic construct
  source 1..22: mol_type = other RNA
ttgccgaaaggaccatgtccgt

SEQ ID NO: 11240 - RNA, 22 nt, synthetic construct
  source 1..22: mol_type = other RNA
ttgcctccttatcccactcatg

SEQ ID NO: 11241 - RNA, 22 nt, synthetic construct
  source 1..22: mol_type = other RNA
ttgcgactttcaggaccagtca

SEQ ID NO: 11242 - RNA, 22 nt, synthetic construct
  source 1..22: mol_type = other RNA
ttgctcagattgggtggtaatc

SEQ ID NO: 11243 - RNA, 22 nt, synthetic construct
  source 1..22: mol_type = other RNA
ttggaaatagccagagttttac

SEQ ID NO: 11244 - RNA, 22 nt, synthetic construct
  source 1..22: mol_type = other RNA
ttggacacaagcagttctatca

SEQ ID NO: 11245 - RNA, 22 nt, synthetic construct
  source 1..22: mol_type = other RNA
ttggagatgcagggcatgaaga

SEQ ID NO: 11246 - RNA, 22 nt, synthetic construct
  source 1..22: mol_type = other RNA
ttggagccacggccactccccc

SEQ ID NO: 11247 - RNA, 22 nt, synthetic construct
  source 1..22: mol_type = other RNA
ttggataaggactaactggatt

SEQ ID NO: 11248 - RNA, 22 nt, synthetic construct
  source 1..22: mol_type = other RNA
ttggatacctatacagatccat

SEQ ID NO: 11249 - RNA, 22 nt, synthetic construct
  source 1..22: mol_type = other RNA
ttggattgctcagattgggtgg

SEQ ID NO: 11250 - RNA, 22 nt, synthetic construct
  source 1..22: mol_type = other RNA
ttggcactagtccagggtgtgg

SEQ ID NO: 11251 - RNA, 22 nt, synthetic construct
  source 1..22: mol_type = other RNA
ttggctcattcatgctcttatg

SEQ ID NO: 11252 - RNA, 22 nt, synthetic construct
  source 1..22: mol_type = other RNA
ttggctctttgggaagccaaaa

SEQ ID NO: 11253 - RNA, 22 nt, synthetic construct
  source 1..22: mol_type = other RNA
ttggctggtaaagtgtatggat

SEQ ID NO: 11254 - RNA, 22 nt, synthetic construct
  source 1..22: mol_type = other RNA
ttggcttcccaaagagccaagc

SEQ ID NO: 11255 - RNA, 22 nt, synthetic construct
  source 1..22: mol_type = other RNA
ttggcttggatacctatacaga

SEQ ID NO: 11256 - RNA, 22 nt, synthetic construct
  source 1..22: mol_type = other RNA
ttgggaagccaaaatggctgaa

SEQ ID NO: 11257 - RNA, 22 nt, synthetic construct
  source 1..22: mol_type = other RNA
ttgggattctttaaaggggttg

SEQ ID NO: 11258 - RNA, 22 nt, synthetic construct
  source 1..22: mol_type = other RNA
ttgggccgtctcatgtatggat

SEQ ID NO: 11259 - RNA, 22 nt, synthetic construct
  source 1..22: mol_type = other RNA
ttgggggagtggccgtggctcc

SEQ ID NO: 11260 - RNA, 22 nt, synthetic construct
  source 1..22: mol_type = other RNA
ttgggtattctgattcaaaagc

SEQ ID NO: 11261 - RNA, 22 nt, synthetic construct
  source 1..22: mol_type = other RNA
ttgggtggtaatctagaggtgg

SEQ ID NO: 11262 - RNA, 22 nt, synthetic construct
  source 1..22: mol_type = other RNA
ttggtctaatggtacaactgct

SEQ ID NO: 11263 - RNA, 22 nt, synthetic construct
  source 1..22: mol_type = other RNA
ttggtggatccagaagcagaat

SEQ ID NO: 11264 - RNA, 22 nt, synthetic construct
  source 1..22: mol_type = other RNA
ttggtttccataacctaagtat

SEQ ID NO: 11265 - RNA, 22 nt, synthetic construct
  source 1..22: mol_type = other RNA
ttgtaaggccctgtgacccgag

SEQ ID NO: 11266 - RNA, 22 nt, synthetic construct
  source 1..22: mol_type = other RNA
ttgtaccattagaccaaatgta

SEQ ID NO: 11267 - RNA, 22 nt, synthetic construct
  source 1..22: mol_type = other RNA
ttgtccactgataggtttccat

SEQ ID NO: 11268 - RNA, 22 nt, synthetic construct
  source 1..22: mol_type = other RNA
ttgtcctctgcaccagaagcca

SEQ ID NO: 11269 - RNA, 22 nt, synthetic construct
  source 1..22: mol_type = other RNA
ttgtggcatgcagctcacgctt

SEQ ID NO: 11270 - RNA, 22 nt, synthetic construct
  source 1..22: mol_type = other RNA
ttgtgtaagcctccttggacac

SEQ ID NO: 11271 - RNA, 22 nt, synthetic construct
  source 1..22: mol_type = other RNA
ttgtgtccaaggaggcttacac

SEQ ID NO: 11272 - RNA, 22 nt, synthetic construct
  source 1..22: mol_type = other RNA
ttgttttggagatgcagggcat

SEQ ID NO: 11273 - RNA, 22 nt, synthetic construct
  source 1..22: mol_type = other RNA
tttaaagaatcccaataggaat

SEQ ID NO: 11274 - RNA, 22 nt, synthetic construct
  source 1..22: mol_type = other RNA
tttaaaggggttgtggcatgca

SEQ ID NO: 11275 - RNA, 22 nt, synthetic construct
  source 1..22: mol_type = other RNA
tttaccagcataagagcatgaa

SEQ ID NO: 11276 - RNA, 22 nt, synthetic construct
  source 1..22: mol_type = other RNA
tttaccagccaaggtttggaaa

SEQ ID NO: 11277 - RNA, 22 nt, synthetic construct
  source 1..22: mol_type = other RNA
tttagatgtaaaactctggcta

SEQ ID NO: 11278 - RNA, 22 nt, synthetic construct
  source 1..22: mol_type = other RNA
tttatagtccatgtttggattg

SEQ ID NO: 11279 - RNA, 22 nt, synthetic construct
  source 1..22: mol_type = other RNA
tttcaagtgaggtaaccaacaa

SEQ ID NO: 11280 - RNA, 22 nt, synthetic construct
  source 1..22: mol_type = other RNA
tttcacactcttcctctttctc

SEQ ID NO: 11281 - RNA, 22 nt, synthetic construct
  source 1..22: mol_type = other RNA
tttcacttttttgccatgggat

SEQ ID NO: 11282 - RNA, 22 nt, synthetic construct
  source 1..22: mol_type = other RNA
tttcagcagttgtaccattaga

SEQ ID NO: 11283 - RNA, 22 nt, synthetic construct
  source 1..22: mol_type = other RNA
tttcagccattttggcttccca

SEQ ID NO: 11284 - RNA, 22 nt, synthetic construct
  source 1..22: mol_type = other RNA
tttcaggaccagtcatgcagca

SEQ ID NO: 11285 - RNA, 22 nt, synthetic construct
  source 1..22: mol_type = other RNA
tttcatcaagtctcttgccgaa

SEQ ID NO: 11286 - RNA, 22 nt, synthetic construct
  source 1..22: mol_type = other RNA
tttcatgtggctcagcaggctc

SEQ ID NO: 11287 - RNA, 22 nt, synthetic construct
  source 1..22: mol_type = other RNA
tttccaaaccttggctggtaaa

SEQ ID NO: 11288 - RNA, 22 nt, synthetic construct
  source 1..22: mol_type = other RNA
tttccataacctaagtatttag

SEQ ID NO: 11289 - RNA, 22 nt, synthetic construct
  source 1..22: mol_type = other RNA
tttccattgcattgatatgatg

SEQ ID NO: 11290 - RNA, 22 nt, synthetic construct
  source 1..22: mol_type = other RNA
tttcccacacagctaatgggtt

SEQ ID NO: 11291 - RNA, 22 nt, synthetic construct
  source 1..22: mol_type = other RNA
tttccctacatgatgtacattt

SEQ ID NO: 11292 - RNA, 22 nt, synthetic construct
  source 1..22: mol_type = other RNA
tttcctgaccattagcatcact

SEQ ID NO: 11293 - RNA, 22 nt, synthetic construct
  source 1..22: mol_type = other RNA
tttcggcaagagacttgatgaa

SEQ ID NO: 11294 - RNA, 22 nt, synthetic construct
  source 1..22: mol_type = other RNA
tttctcacgggctttttcagcc

SEQ ID NO: 11295 - RNA, 22 nt, synthetic construct
  source 1..22: mol_type = other RNA
tttctgaggcacatagtctggg

SEQ ID NO: 11296 - RNA, 22 nt, synthetic construct
  source 1..22: mol_type = other RNA
tttctggatcctgacattgggg

SEQ ID NO: 11297 - RNA, 22 nt, synthetic construct
  source 1..22: mol_type = other RNA
tttctgttctctcttaccctgt

SEQ ID NO: 11298 - RNA, 22 nt, synthetic construct
  source 1..22: mol_type = other RNA
tttgaatcagaatacccaatat

SEQ ID NO: 11299 - RNA, 22 nt, synthetic construct
  source 1..22: mol_type = other RNA
tttgaattcttctaatcccatg

SEQ ID NO: 11300 - RNA, 22 nt, synthetic construct
  source 1..22: mol_type = other RNA
tttgataacccattagctgtgt

SEQ ID NO: 11301 - RNA, 22 nt, synthetic construct
  source 1..22: mol_type = other RNA
tttgcacactcaatgagaattg

SEQ ID NO: 11302 - RNA, 22 nt, synthetic construct
  source 1..22: mol_type = other RNA
tttgccatgggatttctgaggc

SEQ ID NO: 11303 - RNA, 22 nt, synthetic construct
  source 1..22: mol_type = other RNA
tttgcgactttcaggaccagtc

SEQ ID NO: 11304 - RNA, 22 nt, synthetic construct
  source 1..22: mol_type = other RNA
tttggaaatagccagagtttta

SEQ ID NO: 11305 - RNA, 22 nt, synthetic construct
  source 1..22: mol_type = other RNA
tttggagatgcagggcatgaag

SEQ ID NO: 11306 - RNA, 22 nt, synthetic construct
  source 1..22: mol_type = other RNA
tttggataaggactaactggat

SEQ ID NO: 11307 - RNA, 22 nt, synthetic construct
  source 1..22: mol_type = other RNA
tttggattgctcagattgggtg

SEQ ID NO: 11308 - RNA, 22 nt, synthetic construct
  source 1..22: mol_type = other RNA
tttggctcattcatgctcttat

SEQ ID NO: 11309 - RNA, 22 nt, synthetic construct
  source 1..22: mol_type = other RNA
tttggcttcccaaagagccaag

SEQ ID NO: 11310 - RNA, 22 nt, synthetic construct
  source 1..22: mol_type = other RNA
tttgggaagccaaaatggctga

SEQ ID NO: 11311 - RNA, 22 nt, synthetic construct
  source 1..22: mol_type = other RNA
tttggtctaatggtacaactgc

SEQ ID NO: 11312 - RNA, 22 nt, synthetic construct
  source 1..22: mol_type = other RNA
tttggtttccataacctaagta

SEQ ID NO: 11313 - RNA, 22 nt, synthetic construct
  source 1..22: mol_type = other RNA
tttgtgtaagcctccttggaca

SEQ ID NO: 11314 - RNA, 22 nt, synthetic construct
  source 1..22: mol_type = other RNA
ttttaccagcataagagcatga

SEQ ID NO: 11315 - RNA, 22 nt, synthetic construct
  source 1..22: mol_type = other RNA
ttttatagtccatgtttggatt

SEQ ID NO: 11316 - RNA, 22 nt, synthetic construct
  source 1..22: mol_type = other RNA
ttttcaagtgaggtaaccaaca

SEQ ID NO: 11317 - RNA, 22 nt, synthetic construct
  source 1..22: mol_type = other RNA
ttttcacactcttcctctttct

SEQ ID NO: 11318 - RNA, 22 nt, synthetic construct
  source 1..22: mol_type = other RNA
ttttcagccattttggcttccc

SEQ ID NO: 11319 - RNA, 22 nt, synthetic construct
  source 1..22: mol_type = other RNA
ttttcctgaccattagcatcac

SEQ ID NO: 11320 - RNA, 22 nt, synthetic construct
  source 1..22: mol_type = other RNA
ttttgaatcagaatacccaata

SEQ ID NO: 11321 - RNA, 22 nt, synthetic construct
  source 1..22: mol_type = other RNA
ttttgccatgggatttctgagg

SEQ ID NO: 11322 - RNA, 22 nt, synthetic construct
  source 1..22: mol_type = other RNA
ttttgcgactttcaggaccagt

SEQ ID NO: 11323 - RNA, 22 nt, synthetic construct
  source 1..22: mol_type = other RNA
ttttggagatgcagggcatgaa

SEQ ID NO: 11324 - RNA, 22 nt, synthetic construct
  source 1..22: mol_type = other RNA
ttttggctcattcatgctctta

SEQ ID NO: 11325 - RNA, 22 nt, synthetic construct
  source 1..22: mol_type = other RNA
ttttggcttcccaaagagccaa

SEQ ID NO: 11326 - RNA, 22 nt, synthetic construct
  source 1..22: mol_type = other RNA
ttttggtttccataacctaagt

SEQ ID NO: 11327 - RNA, 22 nt, synthetic construct
  source 1..22: mol_type = other RNA
tttttatagtccatgtttggat

SEQ ID NO: 11328 - RNA, 22 nt, synthetic construct
  source 1..22: mol_type = other RNA
tttttcagccattttggcttcc

SEQ ID NO: 11329 - RNA, 22 nt, synthetic construct
  source 1..22: mol_type = other RNA
tttttgccatgggatttctgag

SEQ ID NO: 11330 - RNA, 22 nt, synthetic construct
  source 1..22: mol_type = other RNA
ttttttgccatgggatttctga

SEQ ID NO: 11331 - RNA, 20 nt, synthetic construct
  source 1..20: mol_type = other RNA
aaaaaacactgtctcaatat

SEQ ID NO: 11332 - RNA, 20 nt, synthetic construct
  source 1..20: mol_type = other RNA
aaaaacaaggcagtgctaat

SEQ ID NO: 11333 - RNA, 20 nt, synthetic construct
  source 1..20: mol_type = other RNA
aaaaacactgtctcaatatt

SEQ ID NO: 11334 - RNA, 20 nt, synthetic construct
  source 1..20: mol_type = other RNA
aaaaacatttgcatggttat

SEQ ID NO: 11335 - RNA, 20 nt, synthetic construct
  source 1..20: mol_type = other RNA
aaaaaccctcacaccaggtg

SEQ ID NO: 11336 - RNA, 20 nt, synthetic construct
  source 1..20: mol_type = other RNA
aaaaactggtgaaatcttta

SEQ ID NO: 11337 - RNA, 20 nt, synthetic construct
  source 1..20: mol_type = other RNA
aaaaacttatgtccccagtg

SEQ ID NO: 11338 - RNA, 20 nt, synthetic construct
  source 1..20: mol_type = other RNA
aaaaagcactctgaatggtg

SEQ ID NO: 11339 - RNA, 20 nt, synthetic construct
  source 1..20: mol_type = other RNA
aaaaaggtaactaagcaaga

SEQ ID NO: 11340 - RNA, 20 nt, synthetic construct
  source 1..20: mol_type = other RNA
aaaaagttcaggatgtgtag

SEQ ID NO: 11341 - RNA, 20 nt, synthetic construct
  source 1..20: mol_type = other RNA
aaaaattggtgggttatgct

SEQ ID NO: 11342 - RNA, 20 nt, synthetic construct
  source 1..20: mol_type = other RNA
aaaaatttattggatacacc

SEQ ID NO: 11343 - RNA, 20 nt, synthetic construct
  source 1..20: mol_type = other RNA
aaaacaaaacatggaaaaag

SEQ ID NO: 11344 - RNA, 20 nt, synthetic construct
  source 1..20: mol_type = other RNA
aaaacaacacagctggagca

SEQ ID NO: 11345 - RNA, 20 nt, synthetic construct
  source 1..20: mol_type = other RNA
aaaacaagaccaatgtcaga

SEQ ID NO: 11346 - RNA, 20 nt, synthetic construct
  source 1..20: mol_type = other RNA
aaaacaaggcagtgctaatg

SEQ ID NO: 11347 - RNA, 20 nt, synthetic construct
  source 1..20: mol_type = other RNA
aaaacactgtctcaatatta

SEQ ID NO: 11348 - RNA, 20 nt, synthetic construct
  source 1..20: mol_type = other RNA
aaaacagaccatttaccaaa

SEQ ID NO: 11349 - RNA, 20 nt, synthetic construct
  source 1..20: mol_type = other RNA
aaaacatggaaaaaggtaac

SEQ ID NO: 11350 - RNA, 20 nt, synthetic construct
  source 1..20: mol_type = other RNA
aaaacattcttccactttag

SEQ ID NO: 11351 - RNA, 20 nt, synthetic construct
  source 1..20: mol_type = other RNA
aaaacatttgcatggttatg

SEQ ID NO: 11352 - RNA, 20 nt, synthetic construct
  source 1..20: mol_type = other RNA
aaaaccacatctcacataaa

SEQ ID NO: 11353 - RNA, 20 nt, synthetic construct
  source 1..20: mol_type = other RNA
aaaaccagcaacagcagcaa

SEQ ID NO: 11354 - RNA, 20 nt, synthetic construct
  source 1..20: mol_type = other RNA
aaaaccctcacaccaggtgc

SEQ ID NO: 11355 - RNA, 20 nt, synthetic construct
  source 1..20: mol_type = other RNA
aaaacgaggggccttcaatt

SEQ ID NO: 11356 - RNA, 20 nt, synthetic construct
  source 1..20: mol_type = other RNA
aaaacgcacagttagtgaac

SEQ ID NO: 11357 - RNA, 20 nt, synthetic construct
  source 1..20: mol_type = other RNA
aaaacgtaatgaggcatcac

SEQ ID NO: 11358 - RNA, 20 nt, synthetic construct
  source 1..20: mol_type = other RNA
aaaactccaccattcagagt

SEQ ID NO: 11359 - RNA, 20 nt, synthetic construct
  source 1..20: mol_type = other RNA
aaaactgatttttgttgttg

SEQ ID NO: 11360 - RNA, 20 nt, synthetic construct
  source 1..20: mol_type = other RNA
aaaactggtgaaatctttaa

SEQ ID NO: 11361 - RNA, 20 nt, synthetic construct
  source 1..20: mol_type = other RNA
aaaactgtgactggccctga

SEQ ID NO: 11362 - RNA, 20 nt, synthetic construct
  source 1..20: mol_type = other RNA
aaaacttatgtccccagtgt

SEQ ID NO: 11363 - RNA, 20 nt, synthetic construct
  source 1..20: mol_type = other RNA
aaaacttgcatcacatgcaa

SEQ ID NO: 11364 - RNA, 20 nt, synthetic construct
  source 1..20: mol_type = other RNA
aaaagaacagctgcttctgt

SEQ ID NO: 11365 - RNA, 20 nt, synthetic construct
  source 1..20: mol_type = other RNA
aaaagacaccaaccaaaaga

SEQ ID NO: 11366 - RNA, 20 nt, synthetic construct
  source 1..20: mol_type = other RNA
aaaagagcatcattgagacc

SEQ ID NO: 11367 - RNA, 20 nt, synthetic construct
  source 1..20: mol_type = other RNA
aaaagcactctgaatggtgg

SEQ ID NO: 11368 - RNA, 20 nt, synthetic construct
  source 1..20: mol_type = other RNA
aaaagcatgctgctctaagg

SEQ ID NO: 11369 - RNA, 20 nt, synthetic construct
  source 1..20: mol_type = other RNA
aaaagctcatgtgcagtcac

SEQ ID NO: 11370 - RNA, 20 nt, synthetic construct
  source 1..20: mol_type = other RNA
aaaaggaatccttagtgaac

SEQ ID NO: 11371 - RNA, 20 nt, synthetic construct
  source 1..20: mol_type = other RNA
aaaaggctaatggagaaaga

SEQ ID NO: 11372 - RNA, 20 nt, synthetic construct
  source 1..20: mol_type = other RNA
aaaaggtaactaagcaagag

SEQ ID NO: 11373 - RNA, 20 nt, synthetic construct
  source 1..20: mol_type = other RNA
aaaaggtgtgagtttgaaaa

SEQ ID NO: 11374 - RNA, 20 nt, synthetic construct
  source 1..20: mol_type = other RNA
aaaagtctggagtatttcct

SEQ ID NO: 11375 - RNA, 20 nt, synthetic construct
  source 1..20: mol_type = other RNA
aaaagtgctaattaccatga

SEQ ID NO: 11376 - RNA, 20 nt, synthetic construct
  source 1..20: mol_type = other RNA
aaaagtgttgtgttactttg

SEQ ID NO: 11377 - RNA, 20 nt, synthetic construct
  source 1..20: mol_type = other RNA
aaaagttattatggaatacc

SEQ ID NO: 11378 - RNA, 20 nt, synthetic construct
  source 1..20: mol_type = other RNA
aaaagttcaggatgtgtagt

SEQ ID NO: 11379 - RNA, 20 nt, synthetic construct
  source 1..20: mol_type = other RNA
aaaagttgaaatgtcagggc

SEQ ID NO: 11380 - RNA, 20 nt, synthetic construct
  source 1..20: mol_type = other RNA
aaaataacatccagggaacc

SEQ ID NO: 11381 - RNA, 20 nt, synthetic construct
  source 1..20: mol_type = other RNA
aaaatacaggtttcttgttc

SEQ ID NO: 11382 - RNA, 20 nt, synthetic construct
  source 1..20: mol_type = other RNA
aaaatagaaaccaagatatg

SEQ ID NO: 11383 - RNA, 20 nt, synthetic construct
  source 1..20: mol_type = other RNA
aaaatagagggtaaacctga

SEQ ID NO: 11384 - RNA, 20 nt, synthetic construct
  source 1..20: mol_type = other RNA
aaaatattgcatgtgatgca

SEQ ID NO: 11385 - RNA, 20 nt, synthetic construct
  source 1..20: mol_type = other RNA
aaaatcaagcgagttcgaga

SEQ ID NO: 11386 - RNA, 20 nt, synthetic construct
  source 1..20: mol_type = other RNA
aaaatccagagcttcagatt

SEQ ID NO: 11387 - RNA, 20 nt, synthetic construct
  source 1..20: mol_type = other RNA
aaaatgaaatctagtgccac

SEQ ID NO: 11388 - RNA, 20 nt, synthetic construct
  source 1..20: mol_type = other RNA
aaaatgaaatgaatggtgct

SEQ ID NO: 11389 - RNA, 20 nt, synthetic construct
  source 1..20: mol_type = other RNA
aaaatgcagttaaagatttc

SEQ ID NO: 11390 - RNA, 20 nt, synthetic construct
  source 1..20: mol_type = other RNA
aaaatggaggaataaaacgc

SEQ ID NO: 11391 - RNA, 20 nt, synthetic construct
  source 1..20: mol_type = other RNA
aaaatggctcagtctctgaa

SEQ ID NO: 11392 - RNA, 20 nt, synthetic construct
  source 1..20: mol_type = other RNA
aaaattattgagaacagaag

SEQ ID NO: 11393 - RNA, 20 nt, synthetic construct
  source 1..20: mol_type = other RNA
aaaattggtgggttatgctt

SEQ ID NO: 11394 - RNA, 20 nt, synthetic construct
  source 1..20: mol_type = other RNA
aaaatttattggatacacct

SEQ ID NO: 11395 - RNA, 20 nt, synthetic construct
  source 1..20: mol_type = other RNA
aaacaaaacatggaaaaagg

SEQ ID NO: 11396 - RNA, 20 nt, synthetic construct
  source 1..20: mol_type = other RNA
aaacaaaatgaaatgaatgg

SEQ ID NO: 11397 - RNA, 20 nt, synthetic construct
  source 1..20: mol_type = other RNA
aaacaaagagcaagagattc

SEQ ID NO: 11398 - RNA, 20 nt, synthetic construct
  source 1..20: mol_type = other RNA
aaacaacacagctggagcac

SEQ ID NO: 11399 - RNA, 20 nt, synthetic construct
  source 1..20: mol_type = other RNA
aaacaacttcttcagaaaag

SEQ ID NO: 11400 - RNA, 20 nt, synthetic construct
  source 1..20: mol_type = other RNA
aaacaagaccaaaaggctaa

SEQ ID NO: 11401 - RNA, 20 nt, synthetic construct
  source 1..20: mol_type = other RNA
aaacaagaccaatgtcagaa

SEQ ID NO: 11402 - RNA, 20 nt, synthetic construct
  source 1..20: mol_type = other RNA
aaacaagacccaaaacttgc

SEQ ID NO: 11403 - RNA, 20 nt, synthetic construct
  source 1..20: mol_type = other RNA
aaacaaggcagtgctaatgc

SEQ ID NO: 11404 - RNA, 20 nt, synthetic construct
  source 1..20: mol_type = other RNA
aaacaatacacacctagttt

SEQ ID NO: 11405 - RNA, 20 nt, synthetic construct
  source 1..20: mol_type = other RNA
aaacaatacactggaaattc

SEQ ID NO: 11406 - RNA, 20 nt, synthetic construct
  source 1..20: mol_type = other RNA
aaacacaaccatcccagagt

SEQ ID NO: 11407 - RNA, 20 nt, synthetic construct
  source 1..20: mol_type = other RNA
aaacacaatctggataatat

SEQ ID NO: 11408 - RNA, 20 nt, synthetic construct
  source 1..20: mol_type = other RNA
aaacacagcaaccccaaact

SEQ ID NO: 11409 - RNA, 20 nt, synthetic construct
  source 1..20: mol_type = other RNA
aaacacgagatcttgtgccc

SEQ ID NO: 11410 - RNA, 20 nt, synthetic construct
  source 1..20: mol_type = other RNA
aaacactgtctcaatattat

SEQ ID NO: 11411 - RNA, 20 nt, synthetic construct
  source 1..20: mol_type = other RNA
aaacacttggaataccctct

SEQ ID NO: 11412 - RNA, 20 nt, synthetic construct
  source 1..20: mol_type = other RNA
aaacagaccatttaccaaaa

SEQ ID NO: 11413 - RNA, 20 nt, synthetic construct
  source 1..20: mol_type = other RNA
aaacagcacttgaatcaaca

SEQ ID NO: 11414 - RNA, 20 nt, synthetic construct
  source 1..20: mol_type = other RNA
aaacaggcagcacaaacaca

SEQ ID NO: 11415 - RNA, 20 nt, synthetic construct
  source 1..20: mol_type = other RNA
aaacatggaaaaaggtaact

SEQ ID NO: 11416 - RNA, 20 nt, synthetic construct
  source 1..20: mol_type = other RNA
aaacattcttccactttagt

SEQ ID NO: 11417 - RNA, 20 nt, synthetic construct
  source 1..20: mol_type = other RNA
aaacatttgcatggttatgt

SEQ ID NO: 11418 - RNA, 20 nt, synthetic construct
  source 1..20: mol_type = other RNA
aaaccaagatatgtctggtc

SEQ ID NO: 11419 - RNA, 20 nt, synthetic construct
  source 1..20: mol_type = other RNA
aaaccacatctcacataaat

SEQ ID NO: 11420 - RNA, 20 nt, synthetic construct
  source 1..20: mol_type = other RNA
aaaccactgctgcagaactt

SEQ ID NO: 11421 - RNA, 20 nt, synthetic construct
  source 1..20: mol_type = other RNA
aaaccagaacaactacaaca

SEQ ID NO: 11422 - RNA, 20 nt, synthetic construct
  source 1..20: mol_type = other RNA
aaaccagcaacagcagcaaa

SEQ ID NO: 11423 - RNA, 20 nt, synthetic construct
  source 1..20: mol_type = other RNA
aaaccaggatggattgaatt

SEQ ID NO: 11424 - RNA, 20 nt, synthetic construct
  source 1..20: mol_type = other RNA
aaaccctcacaccaggtgca

SEQ ID NO: 11425 - RNA, 20 nt, synthetic construct
  source 1..20: mol_type = other RNA
aaacctgaggcaccaccttc

SEQ ID NO: 11426 - RNA, 20 nt, synthetic construct
  source 1..20: mol_type = other RNA
aaacctgtattttgcatgca

SEQ ID NO: 11427 - RNA, 20 nt, synthetic construct
  source 1..20: mol_type = other RNA
aaacgaggggccttcaattc

SEQ ID NO: 11428 - RNA, 20 nt, synthetic construct
  source 1..20: mol_type = other RNA
aaacgcacagttagtgaacc

SEQ ID NO: 11429 - RNA, 20 nt, synthetic construct
  source 1..20: mol_type = other RNA
aaacgccatgtgtctcagta

SEQ ID NO: 11430 - RNA, 20 nt, synthetic construct
  source 1..20: mol_type = other RNA
aaacgtaatgaggcatcact

SEQ ID NO: 11431 - RNA, 20 nt, synthetic construct
  source 1..20: mol_type = other RNA
aaactagctgcaatgctaaa

SEQ ID NO: 11432 - RNA, 20 nt, synthetic construct
  source 1..20: mol_type = other RNA
aaactaggtgtgtattgttt

SEQ ID NO: 11433 - RNA, 20 nt, synthetic construct
  source 1..20: mol_type = other RNA
aaactcacaccttttgcaac

SEQ ID NO: 11434 - RNA, 20 nt, synthetic construct
  source 1..20: mol_type = other RNA
aaactccaccattcagagtg

SEQ ID NO: 11435 - RNA, 20 nt, synthetic construct
  source 1..20: mol_type = other RNA
aaactgaaaaacttatgtcc

SEQ ID NO: 11436 - RNA, 20 nt, synthetic construct
  source 1..20: mol_type = other RNA
aaactgagtcttgccatagt

SEQ ID NO: 11437 - RNA, 20 nt, synthetic construct
  source 1..20: mol_type = other RNA
aaactgatttttgttgttgt

SEQ ID NO: 11438 - RNA, 20 nt, synthetic construct
  source 1..20: mol_type = other RNA
aaactgcttcagatgctgct

SEQ ID NO: 11439 - RNA, 20 nt, synthetic construct
  source 1..20: mol_type = other RNA
aaactggtgaaatctttaac

SEQ ID NO: 11440 - RNA, 20 nt, synthetic construct
  source 1..20: mol_type = other RNA
aaactgtagcaccattaggc

SEQ ID NO: 11441 - RNA, 20 nt, synthetic construct
  source 1..20: mol_type = other RNA
aaactgtgactggccctgac

SEQ ID NO: 11442 - RNA, 20 nt, synthetic construct
  source 1..20: mol_type = other RNA
aaacttatgtccccagtgtt

SEQ ID NO: 11443 - RNA, 20 nt, synthetic construct
  source 1..20: mol_type = other RNA
aaacttgcatcacatgcaat

SEQ ID NO: 11444 - RNA, 20 nt, synthetic construct
  source 1..20: mol_type = other RNA
aaagaaatccaggtgaaagc

SEQ ID NO: 11445 - RNA, 20 nt, synthetic construct
  source 1..20: mol_type = other RNA
aaagaacagactacacatcc

SEQ ID NO: 11446 - RNA, 20 nt, synthetic construct
  source 1..20: mol_type = other RNA
aaagaacagctgcttctgtt

SEQ ID NO: 11447 - RNA, 20 nt, synthetic construct
  source 1..20: mol_type = other RNA
aaagaagcaattgtgatggt

SEQ ID NO: 11448 - RNA, 20 nt, synthetic construct
  source 1..20: mol_type = other RNA
aaagaataaagaggaaatac

SEQ ID NO: 11449 - RNA, 20 nt, synthetic construct
  source 1..20: mol_type = other RNA
aaagaatctgtgagttctgt

SEQ ID NO: 11450 - RNA, 20 nt, synthetic construct
  source 1..20: mol_type = other RNA
aaagaatgatccttctcttt

SEQ ID NO: 11451 - RNA, 20 nt, synthetic construct
  source 1..20: mol_type = other RNA
aaagacaccaaccaaaagaa

SEQ ID NO: 11452 - RNA, 20 nt, synthetic construct
  source 1..20: mol_type = other RNA
aaagacgtaacttcggggta

SEQ ID NO: 11453 - RNA, 20 nt, synthetic construct
  source 1..20: mol_type = other RNA
aaagagaaggatcattcttt

SEQ ID NO: 11454 - RNA, 20 nt, synthetic construct
  source 1..20: mol_type = other RNA
aaagagcaagagattctgaa

SEQ ID NO: 11455 - RNA, 20 nt, synthetic construct
  source 1..20: mol_type = other RNA
aaagagcagattcccaaact

SEQ ID NO: 11456 - RNA, 20 nt, synthetic construct
  source 1..20: mol_type = other RNA
aaagagcatcattgagacca

SEQ ID NO: 11457 - RNA, 20 nt, synthetic construct
  source 1..20: mol_type = other RNA
aaagaggaaatactccagac

SEQ ID NO: 11458 - RNA, 20 nt, synthetic construct
  source 1..20: mol_type = other RNA
aaagagtgccacttggtgtc

SEQ ID NO: 11459 - RNA, 20 nt, synthetic construct
  source 1..20: mol_type = other RNA
aaagatttcaccagtttttc

SEQ ID NO: 11460 - RNA, 20 nt, synthetic construct
  source 1..20: mol_type = other RNA
aaagcaacaatgatcagcaa

SEQ ID NO: 11461 - RNA, 20 nt, synthetic construct
  source 1..20: mol_type = other RNA
aaagcaagatcttcttcaca

SEQ ID NO: 11462 - RNA, 20 nt, synthetic construct
  source 1..20: mol_type = other RNA
aaagcacctgtgaagaagat

SEQ ID NO: 11463 - RNA, 20 nt, synthetic construct
  source 1..20: mol_type = other RNA
aaagcactctgaatggtgga

SEQ ID NO: 11464 - RNA, 20 nt, synthetic construct
  source 1..20: mol_type = other RNA
aaagcagtcaaccaaatgtc

SEQ ID NO: 11465 - RNA, 20 nt, synthetic construct
  source 1..20: mol_type = other RNA
aaagcatcggagaagggctg

SEQ ID NO: 11466 - RNA, 20 nt, synthetic construct
  source 1..20: mol_type = other RNA
aaagcatgctgctctaaggt

SEQ ID NO: 11467 - RNA, 20 nt, synthetic construct
  source 1..20: mol_type = other RNA
aaagccagctgcagtggtga

SEQ ID NO: 11468 - RNA, 20 nt, synthetic construct
  source 1..20: mol_type = other RNA
aaagctagcgtctggtgaag

SEQ ID NO: 11469 - RNA, 20 nt, synthetic construct
  source 1..20: mol_type = other RNA
aaagctcagtgttcactaag

SEQ ID NO: 11470 - RNA, 20 nt, synthetic construct
  source 1..20: mol_type = other RNA
aaagctcatgtgcagtcact

SEQ ID NO: 11471 - RNA, 20 nt, synthetic construct
  source 1..20: mol_type = other RNA
aaagctccagaatggaagcc

SEQ ID NO: 11472 - RNA, 20 nt, synthetic construct
  source 1..20: mol_type = other RNA
aaagctggggtgtggctatc

SEQ ID NO: 11473 - RNA, 20 nt, synthetic construct
  source 1..20: mol_type = other RNA
aaaggaacaggtatttagca

SEQ ID NO: 11474 - RNA, 20 nt, synthetic construct
  source 1..20: mol_type = other RNA
aaaggaatccttagtgaaca

SEQ ID NO: 11475 - RNA, 20 nt, synthetic construct
  source 1..20: mol_type = other RNA
aaaggcctcagaataattgt

SEQ ID NO: 11476 - RNA, 20 nt, synthetic construct
  source 1..20: mol_type = other RNA
aaaggctaatggagaaagac

SEQ ID NO: 11477 - RNA, 20 nt, synthetic construct
  source 1..20: mol_type = other RNA
aaaggtaactaagcaagaga

SEQ ID NO: 11478 - RNA, 20 nt, synthetic construct
  source 1..20: mol_type = other RNA
aaaggtacttgatacataac

SEQ ID NO: 11479 - RNA, 20 nt, synthetic construct
  source 1..20: mol_type = other RNA
aaaggtgtgagtttgaaaat

SEQ ID NO: 11480 - RNA, 20 nt, synthetic construct
  source 1..20: mol_type = other RNA
aaagtaacacaacactttta

SEQ ID NO: 11481 - RNA, 20 nt, synthetic construct
  source 1..20: mol_type = other RNA
aaagtagagggtattccaag

SEQ ID NO: 11482 - RNA, 20 nt, synthetic construct
  source 1..20: mol_type = other RNA
aaagtcaggactcacacgac

SEQ ID NO: 11483 - RNA, 20 nt, synthetic construct
  source 1..20: mol_type = other RNA
aaagtctggagtatttcctc

SEQ ID NO: 11484 - RNA, 20 nt, synthetic construct
  source 1..20: mol_type = other RNA
aaagtgctaattaccatgac

SEQ ID NO: 11485 - RNA, 20 nt, synthetic construct
  source 1..20: mol_type = other RNA
aaagtggaagaatgttttca

SEQ ID NO: 11486 - RNA, 20 nt, synthetic construct
  source 1..20: mol_type = other RNA
aaagtgttgtgttactttgg

SEQ ID NO: 11487 - RNA, 20 nt, synthetic construct
  source 1..20: mol_type = other RNA
aaagttattatggaataccc

SEQ ID NO: 11488 - RNA, 20 nt, synthetic construct
  source 1..20: mol_type = other RNA
aaagttcaggatgtgtagtc

SEQ ID NO: 11489 - RNA, 20 nt, synthetic construct
  source 1..20: mol_type = other RNA
aaagttgaaatgtcagggcc

SEQ ID NO: 11490 - RNA, 20 nt, synthetic construct
  source 1..20: mol_type = other RNA
aaataacatccagggaacca

SEQ ID NO: 11491 - RNA, 20 nt, synthetic construct
  source 1..20: mol_type = other RNA
aaataacgacttggcgtgaa

SEQ ID NO: 11492 - RNA, 20 nt, synthetic construct
  source 1..20: mol_type = other RNA
aaataatgtgatcccaaagc

SEQ ID NO: 11493 - RNA, 20 nt, synthetic construct
  source 1..20: mol_type = other RNA
aaatacaggtttcttgttca

SEQ ID NO: 11494 - RNA, 20 nt, synthetic construct
  source 1..20: mol_type = other RNA
aaataccgttcagagctgcc

SEQ ID NO: 11495 - RNA, 20 nt, synthetic construct
  source 1..20: mol_type = other RNA
aaatacctgttcctttcaga

SEQ ID NO: 11496 - RNA, 20 nt, synthetic construct
  source 1..20: mol_type = other RNA
aaatactccagacttttcct

SEQ ID NO: 11497 - RNA, 20 nt, synthetic construct
  source 1..20: mol_type = other RNA
aaatagaaaccaagatatgt

SEQ ID NO: 11498 - RNA, 20 nt, synthetic construct
  source 1..20: mol_type = other RNA
aaatagagggtaaacctgag

SEQ ID NO: 11499 - RNA, 20 nt, synthetic construct
  source 1..20: mol_type = other RNA
aaatattgcatgtgatgcaa

SEQ ID NO: 11500 - RNA, 20 nt, synthetic construct
  source 1..20: mol_type = other RNA
aaatcaagcgagttcgagac

SEQ ID NO: 11501 - RNA, 20 nt, synthetic construct
  source 1..20: mol_type = other RNA
aaatcaagtgcatgcaaaat

SEQ ID NO: 11502 - RNA, 20 nt, synthetic construct
  source 1..20: mol_type = other RNA
aaatcacagaagcaagtaaa

SEQ ID NO: 11503 - RNA, 20 nt, synthetic construct
  source 1..20: mol_type = other RNA
aaatcagtttttgagatatg

SEQ ID NO: 11504 - RNA, 20 nt, synthetic construct
  source 1..20: mol_type = other RNA
aaatcatattgagtcttgac

SEQ ID NO: 11505 - RNA, 20 nt, synthetic construct
  source 1..20: mol_type = other RNA
aaatccagagcttcagattc

SEQ ID NO: 11506 - RNA, 20 nt, synthetic construct
  source 1..20: mol_type = other RNA
aaatccaggtgaaagcagtc

SEQ ID NO: 11507 - RNA, 20 nt, synthetic construct
  source 1..20: mol_type = other RNA
aaatcggagacatttggttg

SEQ ID NO: 11508 - RNA, 20 nt, synthetic construct
  source 1..20: mol_type = other RNA
aaatcgtagaaattcccctt

SEQ ID NO: 11509 - RNA, 20 nt, synthetic construct
  source 1..20: mol_type = other RNA
aaatctagtgccacacagtg

SEQ ID NO: 11510 - RNA, 20 nt, synthetic construct
  source 1..20: mol_type = other RNA
aaatctttaactgcattttc

SEQ ID NO: 11511 - RNA, 20 nt, synthetic construct
  source 1..20: mol_type = other RNA
aaatgaaatctagtgccaca

SEQ ID NO: 11512 - RNA, 20 nt, synthetic construct
  source 1..20: mol_type = other RNA
aaatgaaatgaatggtgctt

SEQ ID NO: 11513 - RNA, 20 nt, synthetic construct
  source 1..20: mol_type = other RNA
aaatgaatcaagggcagtcc

SEQ ID NO: 11514 - RNA, 20 nt, synthetic construct
  source 1..20: mol_type = other RNA
aaatgaatggtgcttacttc

SEQ ID NO: 11515 - RNA, 20 nt, synthetic construct
  source 1..20: mol_type = other RNA
aaatgacctccaaacaatac

SEQ ID NO: 11516 - RNA, 20 nt, synthetic construct
  source 1..20: mol_type = other RNA
aaatgcagttaaagatttca

SEQ ID NO: 11517 - RNA, 20 nt, synthetic construct
  source 1..20: mol_type = other RNA
aaatgccattaacagtcagg

SEQ ID NO: 11518 - RNA, 20 nt, synthetic construct
  source 1..20: mol_type = other RNA
aaatggagacaccaagtggc

SEQ ID NO: 11519 - RNA, 20 nt, synthetic construct
  source 1..20: mol_type = other RNA
aaatggaggaataaaacgca

SEQ ID NO: 11520 - RNA, 20 nt, synthetic construct
  source 1..20: mol_type = other RNA
aaatggctcagtctctgaag

SEQ ID NO: 11521 - RNA, 20 nt, synthetic construct
  source 1..20: mol_type = other RNA
aaatgggactggaggaagta

SEQ ID NO: 11522 - RNA, 20 nt, synthetic construct
  source 1..20: mol_type = other RNA
aaatgggaggtgatggtatc

SEQ ID NO: 11523 - RNA, 20 nt, synthetic construct
  source 1..20: mol_type = other RNA
aaatggtctgttttggagaa

SEQ ID NO: 11524 - RNA, 20 nt, synthetic construct
  source 1..20: mol_type = other RNA
aaatgtaccaagttgaaatg

SEQ ID NO: 11525 - RNA, 20 nt, synthetic construct
  source 1..20: mol_type = other RNA
aaatgtcagggccagtcaca

SEQ ID NO: 11526 - RNA, 20 nt, synthetic construct
  source 1..20: mol_type = other RNA
aaatgtctccgatttgagtg

SEQ ID NO: 11527 - RNA, 20 nt, synthetic construct
  source 1..20: mol_type = other RNA
aaatgtttttcctgtgcctg

SEQ ID NO: 11528 - RNA, 20 nt, synthetic construct
  source 1..20: mol_type = other RNA
aaattactagatactcctat

SEQ ID NO: 11529 - RNA, 20 nt, synthetic construct
  source 1..20: mol_type = other RNA
aaattattgagaacagaagc

SEQ ID NO: 11530 - RNA, 20 nt, synthetic construct
  source 1..20: mol_type = other RNA
aaattccaacatgcctgggg

SEQ ID NO: 11531 - RNA, 20 nt, synthetic construct
  source 1..20: mol_type = other RNA
aaattccccttatagtcaga

SEQ ID NO: 11532 - RNA, 20 nt, synthetic construct
  source 1..20: mol_type = other RNA
aaattgaaacaagaccaaaa

SEQ ID NO: 11533 - RNA, 20 nt, synthetic construct
  source 1..20: mol_type = other RNA
aaattgctgctggaacctga

SEQ ID NO: 11534 - RNA, 20 nt, synthetic construct
  source 1..20: mol_type = other RNA
aaattggtgggttatgcttg

SEQ ID NO: 11535 - RNA, 20 nt, synthetic construct
  source 1..20: mol_type = other RNA
aaatttattggatacacctg

SEQ ID NO: 11536 - RNA, 20 nt, synthetic construct
  source 1..20: mol_type = other RNA
aacaaaaatcagtttttgag

SEQ ID NO: 11537 - RNA, 20 nt, synthetic construct
  source 1..20: mol_type = other RNA
aacaaaacatggaaaaaggt

SEQ ID NO: 11538 - RNA, 20 nt, synthetic construct
  source 1..20: mol_type = other RNA
aacaaaatgaaatgaatggt

SEQ ID NO: 11539 - RNA, 20 nt, synthetic construct
  source 1..20: mol_type = other RNA
aacaaagagcaagagattct

SEQ ID NO: 11540 - RNA, 20 nt, synthetic construct
  source 1..20: mol_type = other RNA
aacaaagagcagattcccaa

SEQ ID NO: 11541 - RNA, 20 nt, synthetic construct
  source 1..20: mol_type = other RNA
aacaacacagctggagcaca

SEQ ID NO: 11542 - RNA, 20 nt, synthetic construct
  source 1..20: mol_type = other RNA
aacaactacaacaacaaaaa

SEQ ID NO: 11543 - RNA, 20 nt, synthetic construct
  source 1..20: mol_type = other RNA
aacaacttcttcagaaaaga

SEQ ID NO: 11544 - RNA, 20 nt, synthetic construct
  source 1..20: mol_type = other RNA
aacaagaaacctgtattttg

SEQ ID NO: 11545 - RNA, 20 nt, synthetic construct
  source 1..20: mol_type = other RNA
aacaagaccaaaaggctaat

SEQ ID NO: 11546 - RNA, 20 nt, synthetic construct
  source 1..20: mol_type = other RNA
aacaagaccaatgtcagaac

SEQ ID NO: 11547 - RNA, 20 nt, synthetic construct
  source 1..20: mol_type = other RNA
aacaagacccaaaacttgca

SEQ ID NO: 11548 - RNA, 20 nt, synthetic construct
  source 1..20: mol_type = other RNA
aacaagctgcgcaacttgct

SEQ ID NO: 11549 - RNA, 20 nt, synthetic construct
  source 1..20: mol_type = other RNA
aacaagcttcagttctacag

SEQ ID NO: 11550 - RNA, 20 nt, synthetic construct
  source 1..20: mol_type = other RNA
aacaaggcagtgctaatgcc

SEQ ID NO: 11551 - RNA, 20 nt, synthetic construct
  source 1..20: mol_type = other RNA
aacaatacacacctagtttc

SEQ ID NO: 11552 - RNA, 20 nt, synthetic construct
  source 1..20: mol_type = other RNA
aacaatacactggaaattcc

SEQ ID NO: 11553 - RNA, 20 nt, synthetic construct
  source 1..20: mol_type = other RNA
aacaatgatcagcaaagaga

SEQ ID NO: 11554 - RNA, 20 nt, synthetic construct
  source 1..20: mol_type = other RNA
aacacaacacttttaaggga

SEQ ID NO: 11555 - RNA, 20 nt, synthetic construct
  source 1..20: mol_type = other RNA
aacacaaccatcccagagtt

SEQ ID NO: 11556 - RNA, 20 nt, synthetic construct
  source 1..20: mol_type = other RNA
aacacaatctggataatatt

SEQ ID NO: 11557 - RNA, 20 nt, synthetic construct
  source 1..20: mol_type = other RNA
aacacaatggaacagtcatt

SEQ ID NO: 11558 - RNA, 20 nt, synthetic construct
  source 1..20: mol_type = other RNA
aacacacacatggtgaactc

SEQ ID NO: 11559 - RNA, 20 nt, synthetic construct
  source 1..20: mol_type = other RNA
aacacagcaaccccaaactg

SEQ ID NO: 11560 - RNA, 20 nt, synthetic construct
  source 1..20: mol_type = other RNA
aacacagcactatctgaaac

SEQ ID NO: 11561 - RNA, 20 nt, synthetic construct
  source 1..20: mol_type = other RNA
aacacagctggagcacaagt

SEQ ID NO: 11562 - RNA, 20 nt, synthetic construct
  source 1..20: mol_type = other RNA
aacacataactgcagtgggc

SEQ ID NO: 11563 - RNA, 20 nt, synthetic construct
  source 1..20: mol_type = other RNA
aacaccaccactaccccaac

SEQ ID NO: 11564 - RNA, 20 nt, synthetic construct
  source 1..20: mol_type = other RNA
aacacctcaagcataaccca

SEQ ID NO: 11565 - RNA, 20 nt, synthetic construct
  source 1..20: mol_type = other RNA
aacacgagatcttgtgcccc

SEQ ID NO: 11566 - RNA, 20 nt, synthetic construct
  source 1..20: mol_type = other RNA
aacactgagctttgcttgaa

SEQ ID NO: 11567 - RNA, 20 nt, synthetic construct
  source 1..20: mol_type = other RNA
aacactggggacataagttt

SEQ ID NO: 11568 - RNA, 20 nt, synthetic construct
  source 1..20: mol_type = other RNA
aacactgtctcaatattatc

SEQ ID NO: 11569 - RNA, 20 nt, synthetic construct
  source 1..20: mol_type = other RNA
aacacttggaataccctcta

SEQ ID NO: 11570 - RNA, 20 nt, synthetic construct
  source 1..20: mol_type = other RNA
aacacttttaagggaagtga

SEQ ID NO: 11571 - RNA, 20 nt, synthetic construct
  source 1..20: mol_type = other RNA
aacagaagcagctgttcttt

SEQ ID NO: 11572 - RNA, 20 nt, synthetic construct
  source 1..20: mol_type = other RNA
aacagaattcttcaccagac

SEQ ID NO: 11573 - RNA, 20 nt, synthetic construct
  source 1..20: mol_type = other RNA
aacagaccatttaccaaaag

SEQ ID NO: 11574 - RNA, 20 nt, synthetic construct
  source 1..20: mol_type = other RNA
aacagactaagtccattcct

SEQ ID NO: 11575 - RNA, 20 nt, synthetic construct
  source 1..20: mol_type = other RNA
aacagactacacatcctgaa

SEQ ID NO: 11576 - RNA, 20 nt, synthetic construct
  source 1..20: mol_type = other RNA
aacagcacttgaatcaacag

SEQ ID NO: 11577 - RNA, 20 nt, synthetic construct
  source 1..20: mol_type = other RNA
aacagcagcaaaaattacaa

SEQ ID NO: 11578 - RNA, 20 nt, synthetic construct
  source 1..20: mol_type = other RNA
aacagcagcaaacacagcaa

SEQ ID NO: 11579 - RNA, 20 nt, synthetic construct
  source 1..20: mol_type = other RNA
aacagctgcttctgttctca

SEQ ID NO: 11580 - RNA, 20 nt, synthetic construct
  source 1..20: mol_type = other RNA
aacaggaatgacatacagac

SEQ ID NO: 11581 - RNA, 20 nt, synthetic construct
  source 1..20: mol_type = other RNA
aacaggagcagaagtcacaa

SEQ ID NO: 11582 - RNA, 20 nt, synthetic construct
  source 1..20: mol_type = other RNA
aacaggatagaaccaaccat

SEQ ID NO: 11583 - RNA, 20 nt, synthetic construct
  source 1..20: mol_type = other RNA
aacaggcagcacaaacacaa

SEQ ID NO: 11584 - RNA, 20 nt, synthetic construct
  source 1..20: mol_type = other RNA
aacaggcttcagagactgag

SEQ ID NO: 11585 - RNA, 20 nt, synthetic construct
  source 1..20: mol_type = other RNA
aacaggtatttagcattgca

SEQ ID NO: 11586 - RNA, 20 nt, synthetic construct
  source 1..20: mol_type = other RNA
aacagtcaggctactaatga

SEQ ID NO: 11587 - RNA, 20 nt, synthetic construct
  source 1..20: mol_type = other RNA
aacagtcattgtccctgcag

SEQ ID NO: 11588 - RNA, 20 nt, synthetic construct
  source 1..20: mol_type = other RNA
aacataagcctcataaacag

SEQ ID NO: 11589 - RNA, 20 nt, synthetic construct
  source 1..20: mol_type = other RNA
aacatccagggaaccacaaa

SEQ ID NO: 11590 - RNA, 20 nt, synthetic construct
  source 1..20: mol_type = other RNA
aacatctccagttccaaaaa

SEQ ID NO: 11591 - RNA, 20 nt, synthetic construct
  source 1..20: mol_type = other RNA
aacatgcctggggggctccc

SEQ ID NO: 11592 - RNA, 20 nt, synthetic construct
  source 1..20: mol_type = other RNA
aacatggaaaaaggtaacta

SEQ ID NO: 11593 - RNA, 20 nt, synthetic construct
  source 1..20: mol_type = other RNA
aacatggttggttctatcct

SEQ ID NO: 11594 - RNA, 20 nt, synthetic construct
  source 1..20: mol_type = other RNA
aacattcttccactttagtc

SEQ ID NO: 11595 - RNA, 20 nt, synthetic construct
  source 1..20: mol_type = other RNA
aacatttgcatggttatgta

SEQ ID NO: 11596 - RNA, 20 nt, synthetic construct
  source 1..20: mol_type = other RNA
aaccaaaagaacagctgctt

SEQ ID NO: 11597 - RNA, 20 nt, synthetic construct
  source 1..20: mol_type = other RNA
aaccaaagtaacacaacact

SEQ ID NO: 11598 - RNA, 20 nt, synthetic construct
  source 1..20: mol_type = other RNA
aaccaaatgtctccgatttg

SEQ ID NO: 11599 - RNA, 20 nt, synthetic construct
  source 1..20: mol_type = other RNA
aaccaaccatgttgagggca

SEQ ID NO: 11600 - RNA, 20 nt, synthetic construct
  source 1..20: mol_type = other RNA
aaccaagatatgtctggtca

SEQ ID NO: 11601 - RNA, 20 nt, synthetic construct
  source 1..20: mol_type = other RNA
aaccacaaagctagcgtctg

SEQ ID NO: 11602 - RNA, 20 nt, synthetic construct
  source 1..20: mol_type = other RNA
aaccacatctcacataaatg

SEQ ID NO: 11603 - RNA, 20 nt, synthetic construct
  source 1..20: mol_type = other RNA
aaccactgctgcagaacttg

SEQ ID NO: 11604 - RNA, 20 nt, synthetic construct
  source 1..20: mol_type = other RNA
aaccagaacaactacaacaa

SEQ ID NO: 11605 - RNA, 20 nt, synthetic construct
  source 1..20: mol_type = other RNA
aaccagcaacagcagcaaaa

SEQ ID NO: 11606 - RNA, 20 nt, synthetic construct
  source 1..20: mol_type = other RNA
aaccaggatggattgaattg

SEQ ID NO: 11607 - RNA, 20 nt, synthetic construct
  source 1..20: mol_type = other RNA
aaccatcccagagttcacat

SEQ ID NO: 11608 - RNA, 20 nt, synthetic construct
  source 1..20: mol_type = other RNA
aaccatgcaaatgtttttcc

SEQ ID NO: 11609 - RNA, 20 nt, synthetic construct
  source 1..20: mol_type = other RNA
aaccatgttgagggcaacag

SEQ ID NO: 11610 - RNA, 20 nt, synthetic construct
  source 1..20: mol_type = other RNA
aacccaatctctccaatcaa

SEQ ID NO: 11611 - RNA, 20 nt, synthetic construct
  source 1..20: mol_type = other RNA
aacccaccaatttttggtag

SEQ ID NO: 11612 - RNA, 20 nt, synthetic construct
  source 1..20: mol_type = other RNA
aaccccaaactgagtcttgc

SEQ ID NO: 11613 - RNA, 20 nt, synthetic construct
  source 1..20: mol_type = other RNA
aaccctcacaccaggtgcac

SEQ ID NO: 11614 - RNA, 20 nt, synthetic construct
  source 1..20: mol_type = other RNA
aacctctggctacaaagctc

SEQ ID NO: 11615 - RNA, 20 nt, synthetic construct
  source 1..20: mol_type = other RNA
aacctgaacagaattcttca

SEQ ID NO: 11616 - RNA, 20 nt, synthetic construct
  source 1..20: mol_type = other RNA
aacctgaggcaccaccttcc

SEQ ID NO: 11617 - RNA, 20 nt, synthetic construct
  source 1..20: mol_type = other RNA
aacctggatgcaagccacat

SEQ ID NO: 11618 - RNA, 20 nt, synthetic construct
  source 1..20: mol_type = other RNA
aacctgtattttgcatgcac

SEQ ID NO: 11619 - RNA, 20 nt, synthetic construct
  source 1..20: mol_type = other RNA
aacctgtggaagaggaggag

SEQ ID NO: 11620 - RNA, 20 nt, synthetic construct
  source 1..20: mol_type = other RNA
aaccttctctctctgggctc

SEQ ID NO: 11621 - RNA, 20 nt, synthetic construct
  source 1..20: mol_type = other RNA
aacgacttggcgtgaaactg

SEQ ID NO: 11622 - RNA, 20 nt, synthetic construct
  source 1..20: mol_type = other RNA
aacgaggggccttcaattca

SEQ ID NO: 11623 - RNA, 20 nt, synthetic construct
  source 1..20: mol_type = other RNA
aacgcacagttagtgaacct

SEQ ID NO: 11624 - RNA, 20 nt, synthetic construct
  source 1..20: mol_type = other RNA
aacgccatgtgtctcagtac

SEQ ID NO: 11625 - RNA, 20 nt, synthetic construct
  source 1..20: mol_type = other RNA
aacgtaatgaggcatcactg

SEQ ID NO: 11626 - RNA, 20 nt, synthetic construct
  source 1..20: mol_type = other RNA
aactaagcaagagaatccac

SEQ ID NO: 11627 - RNA, 20 nt, synthetic construct
  source 1..20: mol_type = other RNA
aactacaacaacaaaaatca

SEQ ID NO: 11628 - RNA, 20 nt, synthetic construct
  source 1..20: mol_type = other RNA
aactagctgcaatgctaaat

SEQ ID NO: 11629 - RNA, 20 nt, synthetic construct
  source 1..20: mol_type = other RNA
aactaggtgtgtattgtttg

SEQ ID NO: 11630 - RNA, 20 nt, synthetic construct
  source 1..20: mol_type = other RNA
aactcacaccttttgcaaca

SEQ ID NO: 11631 - RNA, 20 nt, synthetic construct
  source 1..20: mol_type = other RNA
aactcacagattctttctta

SEQ ID NO: 11632 - RNA, 20 nt, synthetic construct
  source 1..20: mol_type = other RNA
aactcattagtagcctgact

SEQ ID NO: 11633 - RNA, 20 nt, synthetic construct
  source 1..20: mol_type = other RNA
aactccaccattcagagtgc

SEQ ID NO: 11634 - RNA, 20 nt, synthetic construct
  source 1..20: mol_type = other RNA
aactcctggaaaaaacactg

SEQ ID NO: 11635 - RNA, 20 nt, synthetic construct
  source 1..20: mol_type = other RNA
aactcgcttgattttgaata

SEQ ID NO: 11636 - RNA, 20 nt, synthetic construct
  source 1..20: mol_type = other RNA
aactctgagctgcctccaaa

SEQ ID NO: 11637 - RNA, 20 nt, synthetic construct
  source 1..20: mol_type = other RNA
aactctgggatggttgtgtt

SEQ ID NO: 11638 - RNA, 20 nt, synthetic construct
  source 1..20: mol_type = other RNA
aactgaaaaacttatgtccc

SEQ ID NO: 11639 - RNA, 20 nt, synthetic construct
  source 1..20: mol_type = other RNA
aactgaagcttgttgtgact

SEQ ID NO: 11640 - RNA, 20 nt, synthetic construct
  source 1..20: mol_type = other RNA
aactgagtcttgccatagtc

SEQ ID NO: 11641 - RNA, 20 nt, synthetic construct
  source 1..20: mol_type = other RNA
aactgatttttgttgttgta

SEQ ID NO: 11642 - RNA, 20 nt, synthetic construct
  source 1..20: mol_type = other RNA
aactgcagtgggcctgaaaa

SEQ ID NO: 11643 - RNA, 20 nt, synthetic construct
  source 1..20: mol_type = other RNA
aactgcattttcttgggcta

SEQ ID NO: 11644 - RNA, 20 nt, synthetic construct
  source 1..20: mol_type = other RNA
aactgccagcagttgatgag

SEQ ID NO: 11645 - RNA, 20 nt, synthetic construct
  source 1..20: mol_type = other RNA
aactgctggcagttgtcctg

SEQ ID NO: 11646 - RNA, 20 nt, synthetic construct
  source 1..20: mol_type = other RNA
aactgcttcagatgctgctc

SEQ ID NO: 11647 - RNA, 20 nt, synthetic construct
  source 1..20: mol_type = other RNA
aactggagatgttggtccac

SEQ ID NO: 11648 - RNA, 20 nt, synthetic construct
  source 1..20: mol_type = other RNA
aactggtgaaatctttaact

SEQ ID NO: 11649 - RNA, 20 nt, synthetic construct
  source 1..20: mol_type = other RNA
aactgtagcaccattaggca

SEQ ID NO: 11650 - RNA, 20 nt, synthetic construct
  source 1..20: mol_type = other RNA
aactgtgactggccctgaca

SEQ ID NO: 11651 - RNA, 20 nt, synthetic construct
  source 1..20: mol_type = other RNA
aactgtgcgttttattcctc

SEQ ID NO: 11652 - RNA, 20 nt, synthetic construct
  source 1..20: mol_type = other RNA
aacttatgtccccagtgttg

SEQ ID NO: 11653 - RNA, 20 nt, synthetic construct
  source 1..20: mol_type = other RNA
aacttcggggtaagccaaga

SEQ ID NO: 11654 - RNA, 20 nt, synthetic construct
  source 1..20: mol_type = other RNA
aacttcttcagaaaagacac

SEQ ID NO: 11655 - RNA, 20 nt, synthetic construct
  source 1..20: mol_type = other RNA
aacttgatagccacacccca

SEQ ID NO: 11656 - RNA, 20 nt, synthetic construct
  source 1..20: mol_type = other RNA
aacttgcatcacatgcaata

SEQ ID NO: 11657 - RNA, 20 nt, synthetic construct
  source 1..20: mol_type = other RNA
aacttgctcagcaaaggtac

SEQ ID NO: 11658 - RNA, 20 nt, synthetic construct
  source 1..20: mol_type = other RNA
aacttggtacatttgtgact

SEQ ID NO: 11659 - RNA, 20 nt, synthetic construct
  source 1..20: mol_type = other RNA
aacttttacttgcttctgtg

SEQ ID NO: 11660 - RNA, 20 nt, synthetic construct
  source 1..20: mol_type = other RNA
aacttttgaaagagtgccac

SEQ ID NO: 11661 - RNA, 20 nt, synthetic construct
  source 1..20: mol_type = other RNA
aactttttgcaggaaacaag

SEQ ID NO: 11662 - RNA, 20 nt, synthetic construct
  source 1..20: mol_type = other RNA
aagaaaatgcagttaaagat

SEQ ID NO: 11663 - RNA, 20 nt, synthetic construct
  source 1..20: mol_type = other RNA
aagaaacctgtattttgcat

SEQ ID NO: 11664 - RNA, 20 nt, synthetic construct
  source 1..20: mol_type = other RNA
aagaaagaaatccaggtgaa

SEQ ID NO: 11665 - RNA, 20 nt, synthetic construct
  source 1..20: mol_type = other RNA
aagaaagaatctgtgagttc

SEQ ID NO: 11666 - RNA, 20 nt, synthetic construct
  source 1..20: mol_type = other RNA
aagaaagtagagggtattcc

SEQ ID NO: 11667 - RNA, 20 nt, synthetic construct
  source 1..20: mol_type = other RNA
aagaaatccaggtgaaagca

SEQ ID NO: 11668 - RNA, 20 nt, synthetic construct
  source 1..20: mol_type = other RNA
aagaaattgaaacaagacca

SEQ ID NO: 11669 - RNA, 20 nt, synthetic construct
  source 1..20: mol_type = other RNA
aagaacaccaccactacccc

SEQ ID NO: 11670 - RNA, 20 nt, synthetic construct
  source 1..20: mol_type = other RNA
aagaacagactacacatcct

SEQ ID NO: 11671 - RNA, 20 nt, synthetic construct
  source 1..20: mol_type = other RNA
aagaacagcagcaaacacag

SEQ ID NO: 11672 - RNA, 20 nt, synthetic construct
  source 1..20: mol_type = other RNA
aagaacagctgcttctgttc

SEQ ID NO: 11673 - RNA, 20 nt, synthetic construct
  source 1..20: mol_type = other RNA
aagaacaggagcagaagtca

SEQ ID NO: 11674 - RNA, 20 nt, synthetic construct
  source 1..20: mol_type = other RNA
aagaagatcttgctttggga

SEQ ID NO: 11675 - RNA, 20 nt, synthetic construct
  source 1..20: mol_type = other RNA
aagaagcaattgtgatggtg

SEQ ID NO: 11676 - RNA, 20 nt, synthetic construct
  source 1..20: mol_type = other RNA
aagaagttgtttgctgctct

SEQ ID NO: 11677 - RNA, 20 nt, synthetic construct
  source 1..20: mol_type = other RNA
aagaataaagaggaaatact

SEQ ID NO: 11678 - RNA, 20 nt, synthetic construct
  source 1..20: mol_type = other RNA
aagaatctgtgagttctgta

SEQ ID NO: 11679 - RNA, 20 nt, synthetic construct
  source 1..20: mol_type = other RNA
aagaatgatccttctctttg

SEQ ID NO: 11680 - RNA, 20 nt, synthetic construct
  source 1..20: mol_type = other RNA
aagaatgttttcatggtgaa

SEQ ID NO: 11681 - RNA, 20 nt, synthetic construct
  source 1..20: mol_type = other RNA
aagaattctgttcaggttcc

SEQ ID NO: 11682 - RNA, 20 nt, synthetic construct
  source 1..20: mol_type = other RNA
aagaattgatggcagtgatg

SEQ ID NO: 11683 - RNA, 20 nt, synthetic construct
  source 1..20: mol_type = other RNA
aagacaccaaccaaaagaac

SEQ ID NO: 11684 - RNA, 20 nt, synthetic construct
  source 1..20: mol_type = other RNA
aagaccaaaaggctaatgga

SEQ ID NO: 11685 - RNA, 20 nt, synthetic construct
  source 1..20: mol_type = other RNA
aagaccaatgtcagaacacc

SEQ ID NO: 11686 - RNA, 20 nt, synthetic construct
  source 1..20: mol_type = other RNA
aagacccaaaacttgcatca

SEQ ID NO: 11687 - RNA, 20 nt, synthetic construct
  source 1..20: mol_type = other RNA
aagacgtaacttcggggtaa

SEQ ID NO: 11688 - RNA, 20 nt, synthetic construct
  source 1..20: mol_type = other RNA
aagactcaatatgatttccc

SEQ ID NO: 11689 - RNA, 20 nt, synthetic construct
  source 1..20: mol_type = other RNA
aagactcagtttggggttgc

SEQ ID NO: 11690 - RNA, 20 nt, synthetic construct
  source 1..20: mol_type = other RNA
aagagaaggatcattctttg

SEQ ID NO: 11691 - RNA, 20 nt, synthetic construct
  source 1..20: mol_type = other RNA
aagagaatccacctgcaagc

SEQ ID NO: 11692 - RNA, 20 nt, synthetic construct
  source 1..20: mol_type = other RNA
aagagatgccaccttagagc

SEQ ID NO: 11693 - RNA, 20 nt, synthetic construct
  source 1..20: mol_type = other RNA
aagagattctgaagggtcga

SEQ ID NO: 11694 - RNA, 20 nt, synthetic construct
  source 1..20: mol_type = other RNA
aagagcaagagattctgaag

SEQ ID NO: 11695 - RNA, 20 nt, synthetic construct
  source 1..20: mol_type = other RNA
aagagcagattcccaaactg

SEQ ID NO: 11696 - RNA, 20 nt, synthetic construct
  source 1..20: mol_type = other RNA
aagagcatcattgagaccat

SEQ ID NO: 11697 - RNA, 20 nt, synthetic construct
  source 1..20: mol_type = other RNA
aagagccttatggtcaaata

SEQ ID NO: 11698 - RNA, 20 nt, synthetic construct
  source 1..20: mol_type = other RNA
aagaggaaatactccagact

SEQ ID NO: 11699 - RNA, 20 nt, synthetic construct
  source 1..20: mol_type = other RNA
aagaggaggagggggagaaa

SEQ ID NO: 11700 - RNA, 20 nt, synthetic construct
  source 1..20: mol_type = other RNA
aagaggcagaaactgtagca

SEQ ID NO: 11701 - RNA, 20 nt, synthetic construct
  source 1..20: mol_type = other RNA
aagagtgccacttggtgtct

SEQ ID NO: 11702 - RNA, 20 nt, synthetic construct
  source 1..20: mol_type = other RNA
aagatatgtctggtcaacaa

SEQ ID NO: 11703 - RNA, 20 nt, synthetic construct
  source 1..20: mol_type = other RNA
aagatctcgtgtttgctcct

SEQ ID NO: 11704 - RNA, 20 nt, synthetic construct
  source 1..20: mol_type = other RNA
aagatcttcttcacaggtgc

SEQ ID NO: 11705 - RNA, 20 nt, synthetic construct
  source 1..20: mol_type = other RNA
aagatcttgctttgggatca

SEQ ID NO: 11706 - RNA, 20 nt, synthetic construct
  source 1..20: mol_type = other RNA
aagatgggaaatcatattga

SEQ ID NO: 11707 - RNA, 20 nt, synthetic construct
  source 1..20: mol_type = other RNA
aagatttcaccagtttttca

SEQ ID NO: 11708 - RNA, 20 nt, synthetic construct
  source 1..20: mol_type = other RNA
aagcaaagctcagtgttcac

SEQ ID NO: 11709 - RNA, 20 nt, synthetic construct
  source 1..20: mol_type = other RNA
aagcaacaatgatcagcaaa

SEQ ID NO: 11710 - RNA, 20 nt, synthetic construct
  source 1..20: mol_type = other RNA
aagcaagaacagcagcaaac

SEQ ID NO: 11711 - RNA, 20 nt, synthetic construct
  source 1..20: mol_type = other RNA
aagcaagagaatccacctgc

SEQ ID NO: 11712 - RNA, 20 nt, synthetic construct
  source 1..20: mol_type = other RNA
aagcaagatcttcttcacag

SEQ ID NO: 11713 - RNA, 20 nt, synthetic construct
  source 1..20: mol_type = other RNA
aagcaagcctgatggaacag

SEQ ID NO: 11714 - RNA, 20 nt, synthetic construct
  source 1..20: mol_type = other RNA
aagcaagtaaaagttgaaat

SEQ ID NO: 11715 - RNA, 20 nt, synthetic construct
  source 1..20: mol_type = other RNA
aagcaattgtgatggtggtg

SEQ ID NO: 11716 - RNA, 20 nt, synthetic construct
  source 1..20: mol_type = other RNA
aagcaccattcatttcattt

SEQ ID NO: 11717 - RNA, 20 nt, synthetic construct
  source 1..20: mol_type = other RNA
aagcacctgtgaagaagatc

SEQ ID NO: 11718 - RNA, 20 nt, synthetic construct
  source 1..20: mol_type = other RNA
aagcactctgaatggtggag

SEQ ID NO: 11719 - RNA, 20 nt, synthetic construct
  source 1..20: mol_type = other RNA
aagcagctgttcttttggtt

SEQ ID NO: 11720 - RNA, 20 nt, synthetic construct
  source 1..20: mol_type = other RNA
aagcagtcaaccaaatgtct

SEQ ID NO: 11721 - RNA, 20 nt, synthetic construct
  source 1..20: mol_type = other RNA
aagcagtttcacgccaagtc

SEQ ID NO: 11722 - RNA, 20 nt, synthetic construct
  source 1..20: mol_type = other RNA
aagcataacccaccaatttt

SEQ ID NO: 11723 - RNA, 20 nt, synthetic construct
  source 1..20: mol_type = other RNA
aagcatcggagaagggctgc

SEQ ID NO: 11724 - RNA, 20 nt, synthetic construct
  source 1..20: mol_type = other RNA
aagcatgctgctctaaggtg

SEQ ID NO: 11725 - RNA, 20 nt, synthetic construct
  source 1..20: mol_type = other RNA
aagccaagaaagaaatccag

SEQ ID NO: 11726 - RNA, 20 nt, synthetic construct
  source 1..20: mol_type = other RNA
aagccacatgcctgtatgca

SEQ ID NO: 11727 - RNA, 20 nt, synthetic construct
  source 1..20: mol_type = other RNA
aagccagaatagtcgtgtga

SEQ ID NO: 11728 - RNA, 20 nt, synthetic construct
  source 1..20: mol_type = other RNA
aagccagctgcagtggtgag

SEQ ID NO: 11729 - RNA, 20 nt, synthetic construct
  source 1..20: mol_type = other RNA
aagcccactgcctgagagag

SEQ ID NO: 11730 - RNA, 20 nt, synthetic construct
  source 1..20: mol_type = other RNA
aagcctcataaacaggcagc

SEQ ID NO: 11731 - RNA, 20 nt, synthetic construct
  source 1..20: mol_type = other RNA
aagcctgatggaacaggata

SEQ ID NO: 11732 - RNA, 20 nt, synthetic construct
  source 1..20: mol_type = other RNA
aagcctgttgattcaagtgc

SEQ ID NO: 11733 - RNA, 20 nt, synthetic construct
  source 1..20: mol_type = other RNA
aagcgagttcgagactcata

SEQ ID NO: 11734 - RNA, 20 nt, synthetic construct
  source 1..20: mol_type = other RNA
aagcggaatcccatctaaaa

SEQ ID NO: 11735 - RNA, 20 nt, synthetic construct
  source 1..20: mol_type = other RNA
aagctagcgtctggtgaaga

SEQ ID NO: 11736 - RNA, 20 nt, synthetic construct
  source 1..20: mol_type = other RNA
aagctcagtgttcactaagg

SEQ ID NO: 11737 - RNA, 20 nt, synthetic construct
  source 1..20: mol_type = other RNA
aagctcatgtgcagtcactg

SEQ ID NO: 11738 - RNA, 20 nt, synthetic construct
  source 1..20: mol_type = other RNA
aagctccagaatggaagccc

SEQ ID NO: 11739 - RNA, 20 nt, synthetic construct
  source 1..20: mol_type = other RNA
aagctcctggtggcagctct

SEQ ID NO: 11740 - RNA, 20 nt, synthetic construct
  source 1..20: mol_type = other RNA
aagctctggattttcaggcc

SEQ ID NO: 11741 - RNA, 20 nt, synthetic construct
  source 1..20: mol_type = other RNA
aagctgaggaacctgtggaa

SEQ ID NO: 11742 - RNA, 20 nt, synthetic construct
  source 1..20: mol_type = other RNA
aagctgcgcaacttgctcag

SEQ ID NO: 11743 - RNA, 20 nt, synthetic construct
  source 1..20: mol_type = other RNA
aagctggggtgtggctatca

SEQ ID NO: 11744 - RNA, 20 nt, synthetic construct
  source 1..20: mol_type = other RNA
aagctgtgataatgtgcagc

SEQ ID NO: 11745 - RNA, 20 nt, synthetic construct
  source 1..20: mol_type = other RNA
aagcttacacccagaaaaca

SEQ ID NO: 11746 - RNA, 20 nt, synthetic construct
  source 1..20: mol_type = other RNA
aagcttcagttctacaggga

SEQ ID NO: 11747 - RNA, 20 nt, synthetic construct
  source 1..20: mol_type = other RNA
aagcttgccttgggagcccc

SEQ ID NO: 11748 - RNA, 20 nt, synthetic construct
  source 1..20: mol_type = other RNA
aagcttgttgtgacttctgc

SEQ ID NO: 11749 - RNA, 20 nt, synthetic construct
  source 1..20: mol_type = other RNA
aaggaaaaagcactctgaat

SEQ ID NO: 11750 - RNA, 20 nt, synthetic construct
  source 1..20: mol_type = other RNA
aaggaacaggtatttagcat

SEQ ID NO: 11751 - RNA, 20 nt, synthetic construct
  source 1..20: mol_type = other RNA
aaggaagctgaggaacctgt

SEQ ID NO: 11752 - RNA, 20 nt, synthetic construct
  source 1..20: mol_type = other RNA
aaggaatccttagtgaacac

SEQ ID NO: 11753 - RNA, 20 nt, synthetic construct
  source 1..20: mol_type = other RNA
aaggacactcaaaagcatgc

SEQ ID NO: 11754 - RNA, 20 nt, synthetic construct
  source 1..20: mol_type = other RNA
aaggagcaaacacgagatct

SEQ ID NO: 11755 - RNA, 20 nt, synthetic construct
  source 1..20: mol_type = other RNA
aaggagcccagagagagaag

SEQ ID NO: 11756 - RNA, 20 nt, synthetic construct
  source 1..20: mol_type = other RNA
aaggatcattctttggccag

SEQ ID NO: 11757 - RNA, 20 nt, synthetic construct
  source 1..20: mol_type = other RNA
aaggattccttttctgccac

SEQ ID NO: 11758 - RNA, 20 nt, synthetic construct
  source 1..20: mol_type = other RNA
aaggcaagcttacacccaga

SEQ ID NO: 11759 - RNA, 20 nt, synthetic construct
  source 1..20: mol_type = other RNA
aaggcagtgctaatgcctaa

SEQ ID NO: 11760 - RNA, 20 nt, synthetic construct
  source 1..20: mol_type = other RNA
aaggcccctcgttttcacca

SEQ ID NO: 11761 - RNA, 20 nt, synthetic construct
  source 1..20: mol_type = other RNA
aaggcctcagaataattgtg

SEQ ID NO: 11762 - RNA, 20 nt, synthetic construct
  source 1..20: mol_type = other RNA
aaggctaatggagaaagacg

SEQ ID NO: 11763 - RNA, 20 nt, synthetic construct
  source 1..20: mol_type = other RNA
aaggctcttactctcaaatc

SEQ ID NO: 11764 - RNA, 20 nt, synthetic construct
  source 1..20: mol_type = other RNA
aagggaagccagaatagtcg

SEQ ID NO: 11765 - RNA, 20 nt, synthetic construct
  source 1..20: mol_type = other RNA
aagggaagtgaaaatagagg

SEQ ID NO: 11766 - RNA, 20 nt, synthetic construct
  source 1..20: mol_type = other RNA
aagggcagtcccaaggtaca

SEQ ID NO: 11767 - RNA, 20 nt, synthetic construct
  source 1..20: mol_type = other RNA
aagggctgcatacatgtgta

SEQ ID NO: 11768 - RNA, 20 nt, synthetic construct
  source 1..20: mol_type = other RNA
aaggggaatttctacgattt

SEQ ID NO: 11769 - RNA, 20 nt, synthetic construct
  source 1..20: mol_type = other RNA
aagggtcgagacaaggagca

SEQ ID NO: 11770 - RNA, 20 nt, synthetic construct
  source 1..20: mol_type = other RNA
aaggtaactaagcaagagaa

SEQ ID NO: 11771 - RNA, 20 nt, synthetic construct
  source 1..20: mol_type = other RNA
aaggtacagtggaccaacat

SEQ ID NO: 11772 - RNA, 20 nt, synthetic construct
  source 1..20: mol_type = other RNA
aaggtacttgatacataacc

SEQ ID NO: 11773 - RNA, 20 nt, synthetic construct
  source 1..20: mol_type = other RNA
aaggtgactctataaaatta

SEQ ID NO: 11774 - RNA, 20 nt, synthetic construct
  source 1..20: mol_type = other RNA
aaggtggaacctggatgcaa

SEQ ID NO: 11775 - RNA, 20 nt, synthetic construct
  source 1..20: mol_type = other RNA
aaggtggcatctcttacaga

SEQ ID NO: 11776 - RNA, 20 nt, synthetic construct
  source 1..20: mol_type = other RNA
aaggtggtgcctcaggttta

SEQ ID NO: 11777 - RNA, 20 nt, synthetic construct
  source 1..20: mol_type = other RNA
aaggtgtgagtttgaaaatg

SEQ ID NO: 11778 - RNA, 20 nt, synthetic construct
  source 1..20: mol_type = other RNA
aaggttcactaactgtgcgt

SEQ ID NO: 11779 - RNA, 20 nt, synthetic construct
  source 1..20: mol_type = other RNA
aagtaaaagttgaaatgtca

SEQ ID NO: 11780 - RNA, 20 nt, synthetic construct
  source 1..20: mol_type = other RNA
aagtaaatggagacaccaag

SEQ ID NO: 11781 - RNA, 20 nt, synthetic construct
  source 1..20: mol_type = other RNA
aagtaacacaacacttttaa

SEQ ID NO: 11782 - RNA, 20 nt, synthetic construct
  source 1..20: mol_type = other RNA
aagtaagcaccattcatttc

SEQ ID NO: 11783 - RNA, 20 nt, synthetic construct
  source 1..20: mol_type = other RNA
aagtaatacaatgttcttgt

SEQ ID NO: 11784 - RNA, 20 nt, synthetic construct
  source 1..20: mol_type = other RNA
aagtacagaatataaatcgt

SEQ ID NO: 11785 - RNA, 20 nt, synthetic construct
  source 1..20: mol_type = other RNA
aagtacctttgctgagcaag

SEQ ID NO: 11786 - RNA, 20 nt, synthetic construct
  source 1..20: mol_type = other RNA
aagtagagggtattccaagt

SEQ ID NO: 11787 - RNA, 20 nt, synthetic construct
  source 1..20: mol_type = other RNA
aagtcacaaatgtaccaagt

SEQ ID NO: 11788 - RNA, 20 nt, synthetic construct
  source 1..20: mol_type = other RNA
aagtcacaacaagcttcagt

SEQ ID NO: 11789 - RNA, 20 nt, synthetic construct
  source 1..20: mol_type = other RNA
aagtcacactcagacccctc

SEQ ID NO: 11790 - RNA, 20 nt, synthetic construct
  source 1..20: mol_type = other RNA
aagtcaggactcacacgact

SEQ ID NO: 11791 - RNA, 20 nt, synthetic construct
  source 1..20: mol_type = other RNA
aagtccattcctgataccat

SEQ ID NO: 11792 - RNA, 20 nt, synthetic construct
  source 1..20: mol_type = other RNA
aagtcgttatttgaccataa

SEQ ID NO: 11793 - RNA, 20 nt, synthetic construct
  source 1..20: mol_type = other RNA
aagtctggagtatttcctct

SEQ ID NO: 11794 - RNA, 20 nt, synthetic construct
  source 1..20: mol_type = other RNA
aagtgaaaatagagggtaaa

SEQ ID NO: 11795 - RNA, 20 nt, synthetic construct
  source 1..20: mol_type = other RNA
aagtgcacctggtgtgaggg

SEQ ID NO: 11796 - RNA, 20 nt, synthetic construct
  source 1..20: mol_type = other RNA
aagtgcatgcaaaatacagg

SEQ ID NO: 11797 - RNA, 20 nt, synthetic construct
  source 1..20: mol_type = other RNA
aagtgccagaaatgtactga

SEQ ID NO: 11798 - RNA, 20 nt, synthetic construct
  source 1..20: mol_type = other RNA
aagtgctaattaccatgaca

SEQ ID NO: 11799 - RNA, 20 nt, synthetic construct
  source 1..20: mol_type = other RNA
aagtgctgtttcaacactgg

SEQ ID NO: 11800 - RNA, 20 nt, synthetic construct
  source 1..20: mol_type = other RNA
aagtggaagaatgttttcat

SEQ ID NO: 11801 - RNA, 20 nt, synthetic construct
  source 1..20: mol_type = other RNA
aagtggcactctttcaaaag

SEQ ID NO: 11802 - RNA, 20 nt, synthetic construct
  source 1..20: mol_type = other RNA
aagtgttgtgttactttggt

SEQ ID NO: 11803 - RNA, 20 nt, synthetic construct
  source 1..20: mol_type = other RNA
aagtgtttgcaaaatggagg

SEQ ID NO: 11804 - RNA, 20 nt, synthetic construct
  source 1..20: mol_type = other RNA
aagttacgtctttctccatt

SEQ ID NO: 11805 - RNA, 20 nt, synthetic construct
  source 1..20: mol_type = other RNA
aagttattatggaataccct

SEQ ID NO: 11806 - RNA, 20 nt, synthetic construct
  source 1..20: mol_type = other RNA
aagttcaggatgtgtagtct

SEQ ID NO: 11807 - RNA, 20 nt, synthetic construct
  source 1..20: mol_type = other RNA
aagttctgcagcagtggttt

SEQ ID NO: 11808 - RNA, 20 nt, synthetic construct
  source 1..20: mol_type = other RNA
aagttgaaatgaatcaaggg

SEQ ID NO: 11809 - RNA, 20 nt, synthetic construct
  source 1..20: mol_type = other RNA
aagttgaaatgtcagggcca

SEQ ID NO: 11810 - RNA, 20 nt, synthetic construct
  source 1..20: mol_type = other RNA
aagttgcgcagcttgttgac

SEQ ID NO: 11811 - RNA, 20 nt, synthetic construct
  source 1..20: mol_type = other RNA
aagttgtttgctgctctaaa

SEQ ID NO: 11812 - RNA, 20 nt, synthetic construct
  source 1..20: mol_type = other RNA
aagttttgggtcttgtttcc

SEQ ID NO: 11813 - RNA, 20 nt, synthetic construct
  source 1..20: mol_type = other RNA
aagtttttcagtttgggaat

SEQ ID NO: 11814 - RNA, 20 nt, synthetic construct
  source 1..20: mol_type = other RNA
aataaaacgcacagttagtg

SEQ ID NO: 11815 - RNA, 20 nt, synthetic construct
  source 1..20: mol_type = other RNA
aataaagaacagactacaca

SEQ ID NO: 11816 - RNA, 20 nt, synthetic construct
  source 1..20: mol_type = other RNA
aataaagaggaaatactcca

SEQ ID NO: 11817 - RNA, 20 nt, synthetic construct
  source 1..20: mol_type = other RNA
aataacatccagggaaccac

SEQ ID NO: 11818 - RNA, 20 nt, synthetic construct
  source 1..20: mol_type = other RNA
aataacgacttggcgtgaaa

SEQ ID NO: 11819 - RNA, 20 nt, synthetic construct
  source 1..20: mol_type = other RNA
aataacttttgaaagagtgc

SEQ ID NO: 11820 - RNA, 20 nt, synthetic construct
  source 1..20: mol_type = other RNA
aataatgtgatcccaaagca

SEQ ID NO: 11821 - RNA, 20 nt, synthetic construct
  source 1..20: mol_type = other RNA
aataattgtgtgaacaggaa

SEQ ID NO: 11822 - RNA, 20 nt, synthetic construct
  source 1..20: mol_type = other RNA
aataattttatagagtcacc

SEQ ID NO: 11823 - RNA, 20 nt, synthetic construct
  source 1..20: mol_type = other RNA
aatacaatgttcttgtcatg

SEQ ID NO: 11824 - RNA, 20 nt, synthetic construct
  source 1..20: mol_type = other RNA
aatacacacctagtttcaga

SEQ ID NO: 11825 - RNA, 20 nt, synthetic construct
  source 1..20: mol_type = other RNA
aatacactggaaattccaac

SEQ ID NO: 11826 - RNA, 20 nt, synthetic construct
  source 1..20: mol_type = other RNA
aatacaggtttcttgttcaa

SEQ ID NO: 11827 - RNA, 20 nt, synthetic construct
  source 1..20: mol_type = other RNA
aataccctctactttcttgt

SEQ ID NO: 11828 - RNA, 20 nt, synthetic construct
  source 1..20: mol_type = other RNA
aataccctgtatgaagggaa

SEQ ID NO: 11829 - RNA, 20 nt, synthetic construct
  source 1..20: mol_type = other RNA
aataccgttcagagctgcca

SEQ ID NO: 11830 - RNA, 20 nt, synthetic construct
  source 1..20: mol_type = other RNA
aatacctgttcctttcagaa

SEQ ID NO: 11831 - RNA, 20 nt, synthetic construct
  source 1..20: mol_type = other RNA
aatactccagacttttcctc

SEQ ID NO: 11832 - RNA, 20 nt, synthetic construct
  source 1..20: mol_type = other RNA
aatactgattttcaccatga

SEQ ID NO: 11833 - RNA, 20 nt, synthetic construct
  source 1..20: mol_type = other RNA
aatagaaaccaagatatgtc

SEQ ID NO: 11834 - RNA, 20 nt, synthetic construct
  source 1..20: mol_type = other RNA
aatagagggtaaacctgagg

SEQ ID NO: 11835 - RNA, 20 nt, synthetic construct
  source 1..20: mol_type = other RNA
aatagtcgtgtgagtcctga

SEQ ID NO: 11836 - RNA, 20 nt, synthetic construct
  source 1..20: mol_type = other RNA
aatatgatttcccatcttgc

SEQ ID NO: 11837 - RNA, 20 nt, synthetic construct
  source 1..20: mol_type = other RNA
aatattatccagattgtgtt

SEQ ID NO: 11838 - RNA, 20 nt, synthetic construct
  source 1..20: mol_type = other RNA
aatattgagacagtgttttt

SEQ ID NO: 11839 - RNA, 20 nt, synthetic construct
  source 1..20: mol_type = other RNA
aatattgcatgtgatgcaag

SEQ ID NO: 11840 - RNA, 20 nt, synthetic construct
  source 1..20: mol_type = other RNA
aatcaaatgacctccaaaca

SEQ ID NO: 11841 - RNA, 20 nt, synthetic construct
  source 1..20: mol_type = other RNA
aatcaacaggcttcagagac

SEQ ID NO: 11842 - RNA, 20 nt, synthetic construct
  source 1..20: mol_type = other RNA
aatcaagcgagttcgagact

SEQ ID NO: 11843 - RNA, 20 nt, synthetic construct
  source 1..20: mol_type = other RNA
aatcaagggcagtcccaagg

SEQ ID NO: 11844 - RNA, 20 nt, synthetic construct
  source 1..20: mol_type = other RNA
aatcaagtgcatgcaaaata

SEQ ID NO: 11845 - RNA, 20 nt, synthetic construct
  source 1..20: mol_type = other RNA
aatcacagaagcaagtaaaa

SEQ ID NO: 11846 - RNA, 20 nt, synthetic construct
  source 1..20: mol_type = other RNA
aatcagtattcaaaatcaag

SEQ ID NO: 11847 - RNA, 20 nt, synthetic construct
  source 1..20: mol_type = other RNA
aatcagtttttgagatatgc

SEQ ID NO: 11848 - RNA, 20 nt, synthetic construct
  source 1..20: mol_type = other RNA
aatcatattgagtcttgaca

SEQ ID NO: 11849 - RNA, 20 nt, synthetic construct
  source 1..20: mol_type = other RNA
aatccacctgcaagctgtga

SEQ ID NO: 11850 - RNA, 20 nt, synthetic construct
  source 1..20: mol_type = other RNA
aatccagagcttcagattct

SEQ ID NO: 11851 - RNA, 20 nt, synthetic construct
  source 1..20: mol_type = other RNA
aatccaggtgaaagcagtca

SEQ ID NO: 11852 - RNA, 20 nt, synthetic construct
  source 1..20: mol_type = other RNA
aatccatcctggtttcagat

SEQ ID NO: 11853 - RNA, 20 nt, synthetic construct
  source 1..20: mol_type = other RNA
aatccatctacacatgtatg

SEQ ID NO: 11854 - RNA, 20 nt, synthetic construct
  source 1..20: mol_type = other RNA
aatcccatctaaaacgtaat

SEQ ID NO: 11855 - RNA, 20 nt, synthetic construct
  source 1..20: mol_type = other RNA
aatccttagtgaacactgag

SEQ ID NO: 11856 - RNA, 20 nt, synthetic construct
  source 1..20: mol_type = other RNA
aatcggagacatttggttga

SEQ ID NO: 11857 - RNA, 20 nt, synthetic construct
  source 1..20: mol_type = other RNA
aatcgtagaaattcccctta

SEQ ID NO: 11858 - RNA, 20 nt, synthetic construct
  source 1..20: mol_type = other RNA
aatctagtgccacacagtga

SEQ ID NO: 11859 - RNA, 20 nt, synthetic construct
  source 1..20: mol_type = other RNA
aatctctccaatcaaatgac

SEQ ID NO: 11860 - RNA, 20 nt, synthetic construct
  source 1..20: mol_type = other RNA
aatctcttgctctttgtttc

SEQ ID NO: 11861 - RNA, 20 nt, synthetic construct
  source 1..20: mol_type = other RNA
aatctgaagctctggatttt

SEQ ID NO: 11862 - RNA, 20 nt, synthetic construct
  source 1..20: mol_type = other RNA
aatctgctctttgttgaaaa

SEQ ID NO: 11863 - RNA, 20 nt, synthetic construct
  source 1..20: mol_type = other RNA
aatctggataatattgagac

SEQ ID NO: 11864 - RNA, 20 nt, synthetic construct
  source 1..20: mol_type = other RNA
aatctgtgagttctgtagcc

SEQ ID NO: 11865 - RNA, 20 nt, synthetic construct
  source 1..20: mol_type = other RNA
aatctttaactgcattttct

SEQ ID NO: 11866 - RNA, 20 nt, synthetic construct
  source 1..20: mol_type = other RNA
aatgaaatctagtgccacac

SEQ ID NO: 11867 - RNA, 20 nt, synthetic construct
  source 1..20: mol_type = other RNA
aatgaaatgaatggtgctta

SEQ ID NO: 11868 - RNA, 20 nt, synthetic construct
  source 1..20: mol_type = other RNA
aatgaatcaagggcagtccc

SEQ ID NO: 11869 - RNA, 20 nt, synthetic construct
  source 1..20: mol_type = other RNA
aatgaatggtgcttacttca

SEQ ID NO: 11870 - RNA, 20 nt, synthetic construct
  source 1..20: mol_type = other RNA
aatgacatacagactgcagg

SEQ ID NO: 11871 - RNA, 20 nt, synthetic construct
  source 1..20: mol_type = other RNA
aatgacctccaaacaataca

SEQ ID NO: 11872 - RNA, 20 nt, synthetic construct
  source 1..20: mol_type = other RNA
aatgactgttccattgtgtt

SEQ ID NO: 11873 - RNA, 20 nt, synthetic construct
  source 1..20: mol_type = other RNA
aatgagcaggaggggaaaag

SEQ ID NO: 11874 - RNA, 20 nt, synthetic construct
  source 1..20: mol_type = other RNA
aatgaggcatcactgccatc

SEQ ID NO: 11875 - RNA, 20 nt, synthetic construct
  source 1..20: mol_type = other RNA
aatgagttgtcctgtgagat

SEQ ID NO: 11876 - RNA, 20 nt, synthetic construct
  source 1..20: mol_type = other RNA
aatgatcagcaaagagaagg

SEQ ID NO: 11877 - RNA, 20 nt, synthetic construct
  source 1..20: mol_type = other RNA
aatgatccttctctttgctg

SEQ ID NO: 11878 - RNA, 20 nt, synthetic construct
  source 1..20: mol_type = other RNA
aatgatgctcttttgctgca

SEQ ID NO: 11879 - RNA, 20 nt, synthetic construct
  source 1..20: mol_type = other RNA
aatgcagttaaagatttcac

SEQ ID NO: 11880 - RNA, 20 nt, synthetic construct
  source 1..20: mol_type = other RNA
aatgccagtaaactagctgc

SEQ ID NO: 11881 - RNA, 20 nt, synthetic construct
  source 1..20: mol_type = other RNA
aatgccattaacagtcaggc

SEQ ID NO: 11882 - RNA, 20 nt, synthetic construct
  source 1..20: mol_type = other RNA
aatgcctaatggtgctacag

SEQ ID NO: 11883 - RNA, 20 nt, synthetic construct
  source 1..20: mol_type = other RNA
aatgctaaatacctgttcct

SEQ ID NO: 11884 - RNA, 20 nt, synthetic construct
  source 1..20: mol_type = other RNA
aatggaaacacaatctggat

SEQ ID NO: 11885 - RNA, 20 nt, synthetic construct
  source 1..20: mol_type = other RNA
aatggaacagtcattgtccc

SEQ ID NO: 11886 - RNA, 20 nt, synthetic construct
  source 1..20: mol_type = other RNA
aatggaagcccactgcctga

SEQ ID NO: 11887 - RNA, 20 nt, synthetic construct
  source 1..20: mol_type = other RNA
aatggacttagtctgttgcc

SEQ ID NO: 11888 - RNA, 20 nt, synthetic construct
  source 1..20: mol_type = other RNA
aatggagaaagacgtaactt

SEQ ID NO: 11889 - RNA, 20 nt, synthetic construct
  source 1..20: mol_type = other RNA
aatggagacaccaagtggca

SEQ ID NO: 11890 - RNA, 20 nt, synthetic construct
  source 1..20: mol_type = other RNA
aatggaggaataaaacgcac

SEQ ID NO: 11891 - RNA, 20 nt, synthetic construct
  source 1..20: mol_type = other RNA
aatggcatttatgtgagatg

SEQ ID NO: 11892 - RNA, 20 nt, synthetic construct
  source 1..20: mol_type = other RNA
aatggctcagtctctgaagc

SEQ ID NO: 11893 - RNA, 20 nt, synthetic construct
  source 1..20: mol_type = other RNA
aatgggactggaggaagtac

SEQ ID NO: 11894 - RNA, 20 nt, synthetic construct
  source 1..20: mol_type = other RNA
aatgggaggtgatggtatca

SEQ ID NO: 11895 - RNA, 20 nt, synthetic construct
  source 1..20: mol_type = other RNA
aatggtctgttttggagaag

SEQ ID NO: 11896 - RNA, 20 nt, synthetic construct
  source 1..20: mol_type = other RNA
aatggtgctacagtttctgc

SEQ ID NO: 11897 - RNA, 20 nt, synthetic construct
  source 1..20: mol_type = other RNA
aatggtgcttacttcaagca

SEQ ID NO: 11898 - RNA, 20 nt, synthetic construct
  source 1..20: mol_type = other RNA
aatggtggagttttagaaga

SEQ ID NO: 11899 - RNA, 20 nt, synthetic construct
  source 1..20: mol_type = other RNA
aatgtaccaagttgaaatga

SEQ ID NO: 11900 - RNA, 20 nt, synthetic construct
  source 1..20: mol_type = other RNA
aatgtcagaacacctcaagc

SEQ ID NO: 11901 - RNA, 20 nt, synthetic construct
  source 1..20: mol_type = other RNA
aatgtcagggccagtcacag

SEQ ID NO: 11902 - RNA, 20 nt, synthetic construct
  source 1..20: mol_type = other RNA
aatgtccaaatgggactgga

SEQ ID NO: 11903 - RNA, 20 nt, synthetic construct
  source 1..20: mol_type = other RNA
aatgtctccgatttgagtga

SEQ ID NO: 11904 - RNA, 20 nt, synthetic construct
  source 1..20: mol_type = other RNA
aatgtgatcccaaagcaaga

SEQ ID NO: 11905 - RNA, 20 nt, synthetic construct
  source 1..20: mol_type = other RNA
aatgtgcagcaaaagagcat

SEQ ID NO: 11906 - RNA, 20 nt, synthetic construct
  source 1..20: mol_type = other RNA
aatgttcttgtcatggtaat

SEQ ID NO: 11907 - RNA, 20 nt, synthetic construct
  source 1..20: mol_type = other RNA
aatgttttcatggtgaaaat

SEQ ID NO: 11908 - RNA, 20 nt, synthetic construct
  source 1..20: mol_type = other RNA
aatgtttttcctgtgcctga

SEQ ID NO: 11909 - RNA, 20 nt, synthetic construct
  source 1..20: mol_type = other RNA
aattaaggtggaacctggat

SEQ ID NO: 11910 - RNA, 20 nt, synthetic construct
  source 1..20: mol_type = other RNA
aattaccatgacaagaacat

SEQ ID NO: 11911 - RNA, 20 nt, synthetic construct
  source 1..20: mol_type = other RNA
aattactagatactcctata

SEQ ID NO: 11912 - RNA, 20 nt, synthetic construct
  source 1..20: mol_type = other RNA
aattagcacttttcccctcc

SEQ ID NO: 11913 - RNA, 20 nt, synthetic construct
  source 1..20: mol_type = other RNA
aattattctgaggcctttca

SEQ ID NO: 11914 - RNA, 20 nt, synthetic construct
  source 1..20: mol_type = other RNA
aattattgagaacagaagca

SEQ ID NO: 11915 - RNA, 20 nt, synthetic construct
  source 1..20: mol_type = other RNA
aattcaatccatcctggttt

SEQ ID NO: 11916 - RNA, 20 nt, synthetic construct
  source 1..20: mol_type = other RNA
aattccaacatgcctggggg

SEQ ID NO: 11917 - RNA, 20 nt, synthetic construct
  source 1..20: mol_type = other RNA
aattccccttatagtcagac

SEQ ID NO: 11918 - RNA, 20 nt, synthetic construct
  source 1..20: mol_type = other RNA
aattccgcacagacctctaa

SEQ ID NO: 11919 - RNA, 20 nt, synthetic construct
  source 1..20: mol_type = other RNA
aattctgttcaggttccagc

SEQ ID NO: 11920 - RNA, 20 nt, synthetic construct
  source 1..20: mol_type = other RNA
aattcttcaccagacgctag

SEQ ID NO: 11921 - RNA, 20 nt, synthetic construct
  source 1..20: mol_type = other RNA
aattcttcagtatcaaccca

SEQ ID NO: 11922 - RNA, 20 nt, synthetic construct
  source 1..20: mol_type = other RNA
aattgaaacaagaccaaaag

SEQ ID NO: 11923 - RNA, 20 nt, synthetic construct
  source 1..20: mol_type = other RNA
aattgaaggcccctcgtttt

SEQ ID NO: 11924 - RNA, 20 nt, synthetic construct
  source 1..20: mol_type = other RNA
aattgatctgccctgaggta

SEQ ID NO: 11925 - RNA, 20 nt, synthetic construct
  source 1..20: mol_type = other RNA
aattgatggcagtgatgcct

SEQ ID NO: 11926 - RNA, 20 nt, synthetic construct
  source 1..20: mol_type = other RNA
aattgctgctggaacctgaa

SEQ ID NO: 11927 - RNA, 20 nt, synthetic construct
  source 1..20: mol_type = other RNA
aattgcttctttctccccct

SEQ ID NO: 11928 - RNA, 20 nt, synthetic construct
  source 1..20: mol_type = other RNA
aattggcctgtgcatctgac

SEQ ID NO: 11929 - RNA, 20 nt, synthetic construct
  source 1..20: mol_type = other RNA
aattggtgggttatgcttga

SEQ ID NO: 11930 - RNA, 20 nt, synthetic construct
  source 1..20: mol_type = other RNA
aattgtgatggtggtggtgg

SEQ ID NO: 11931 - RNA, 20 nt, synthetic construct
  source 1..20: mol_type = other RNA
aattgtgtgaacaggaatga

SEQ ID NO: 11932 - RNA, 20 nt, synthetic construct
  source 1..20: mol_type = other RNA
aatttattggatacacctgt

SEQ ID NO: 11933 - RNA, 20 nt, synthetic construct
  source 1..20: mol_type = other RNA
aatttccagtgtattgtttg

SEQ ID NO: 11934 - RNA, 20 nt, synthetic construct
  source 1..20: mol_type = other RNA
aatttcttgatctgaaggag

SEQ ID NO: 11935 - RNA, 20 nt, synthetic construct
  source 1..20: mol_type = other RNA
aatttgcaagctcctggtgg

SEQ ID NO: 11936 - RNA, 20 nt, synthetic construct
  source 1..20: mol_type = other RNA
aatttggaaggtgactctat

SEQ ID NO: 11937 - RNA, 20 nt, synthetic construct
  source 1..20: mol_type = other RNA
aattttatagagtcaccttc

SEQ ID NO: 11938 - RNA, 20 nt, synthetic construct
  source 1..20: mol_type = other RNA
aatttttgctgctgttgctg

SEQ ID NO: 11939 - RNA, 20 nt, synthetic construct
  source 1..20: mol_type = other RNA
aatttttggtagcagtggag

SEQ ID NO: 11940 - RNA, 20 nt, synthetic construct
  source 1..20: mol_type = other RNA
acaaaaatcagtttttgaga

SEQ ID NO: 11941 - RNA, 20 nt, synthetic construct
  source 1..20: mol_type = other RNA
acaaaacatggaaaaaggta

SEQ ID NO: 11942 - RNA, 20 nt, synthetic construct
  source 1..20: mol_type = other RNA
acaaaatgaaatgaatggtg

SEQ ID NO: 11943 - RNA, 20 nt, synthetic construct
  source 1..20: mol_type = other RNA
acaaacacaaccatcccaga

SEQ ID NO: 11944 - RNA, 20 nt, synthetic construct
  source 1..20: mol_type = other RNA
acaaaccactgctgcagaac

SEQ ID NO: 11945 - RNA, 20 nt, synthetic construct
  source 1..20: mol_type = other RNA
acaaagagcaagagattctg

SEQ ID NO: 11946 - RNA, 20 nt, synthetic construct
  source 1..20: mol_type = other RNA
acaaagagcagattcccaaa

SEQ ID NO: 11947 - RNA, 20 nt, synthetic construct
  source 1..20: mol_type = other RNA
acaaagctagcgtctggtga

SEQ ID NO: 11948 - RNA, 20 nt, synthetic construct
  source 1..20: mol_type = other RNA
acaaagctccagaatggaag

SEQ ID NO: 11949 - RNA, 20 nt, synthetic construct
  source 1..20: mol_type = other RNA
acaaataaagaataaagagg

SEQ ID NO: 11950 - RNA, 20 nt, synthetic construct
  source 1..20: mol_type = other RNA
acaaatgtaccaagttgaaa

SEQ ID NO: 11951 - RNA, 20 nt, synthetic construct
  source 1..20: mol_type = other RNA
acaacaaaaatcagtttttg

SEQ ID NO: 11952 - RNA, 20 nt, synthetic construct
  source 1..20: mol_type = other RNA
acaacaacaaaaatcagttt

SEQ ID NO: 11953 - RNA, 20 nt, synthetic construct
  source 1..20: mol_type = other RNA
acaacaagcttcagttctac

SEQ ID NO: 11954 - RNA, 20 nt, synthetic construct
  source 1..20: mol_type = other RNA
acaacacagctggagcacaa

SEQ ID NO: 11955 - RNA, 20 nt, synthetic construct
  source 1..20: mol_type = other RNA
acaacacttttaagggaagt

SEQ ID NO: 11956 - RNA, 20 nt, synthetic construct
  source 1..20: mol_type = other RNA
acaaccatcccagagttcac

SEQ ID NO: 11957 - RNA, 20 nt, synthetic construct
  source 1..20: mol_type = other RNA
acaactacaacaacaaaaat

SEQ ID NO: 11958 - RNA, 20 nt, synthetic construct
  source 1..20: mol_type = other RNA
acaactcattagtagcctga

SEQ ID NO: 11959 - RNA, 20 nt, synthetic construct
  source 1..20: mol_type = other RNA
acaactgccagcagttgatg

SEQ ID NO: 11960 - RNA, 20 nt, synthetic construct
  source 1..20: mol_type = other RNA
acaacttcttcagaaaagac

SEQ ID NO: 11961 - RNA, 20 nt, synthetic construct
  source 1..20: mol_type = other RNA
acaagaaacctgtattttgc

SEQ ID NO: 11962 - RNA, 20 nt, synthetic construct
  source 1..20: mol_type = other RNA
acaagaaagtagagggtatt

SEQ ID NO: 11963 - RNA, 20 nt, synthetic construct
  source 1..20: mol_type = other RNA
acaagaacattgtattactt

SEQ ID NO: 11964 - RNA, 20 nt, synthetic construct
  source 1..20: mol_type = other RNA
acaagaccaaaaggctaatg

SEQ ID NO: 11965 - RNA, 20 nt, synthetic construct
  source 1..20: mol_type = other RNA
acaagaccaatgtcagaaca

SEQ ID NO: 11966 - RNA, 20 nt, synthetic construct
  source 1..20: mol_type = other RNA
acaagacccaaaacttgcat

SEQ ID NO: 11967 - RNA, 20 nt, synthetic construct
  source 1..20: mol_type = other RNA
acaagatctcgtgtttgctc

SEQ ID NO: 11968 - RNA, 20 nt, synthetic construct
  source 1..20: mol_type = other RNA
acaagctgcgcaacttgctc

SEQ ID NO: 11969 - RNA, 20 nt, synthetic construct
  source 1..20: mol_type = other RNA
acaagcttcagttctacagg

SEQ ID NO: 11970 - RNA, 20 nt, synthetic construct
  source 1..20: mol_type = other RNA
acaaggagcaaacacgagat

SEQ ID NO: 11971 - RNA, 20 nt, synthetic construct
  source 1..20: mol_type = other RNA
acaaggcagtgctaatgcct

SEQ ID NO: 11972 - RNA, 20 nt, synthetic construct
  source 1..20: mol_type = other RNA
acaagtcacaaatgtaccaa

SEQ ID NO: 11973 - RNA, 20 nt, synthetic construct
  source 1..20: mol_type = other RNA
acaatacacacctagtttca

SEQ ID NO: 11974 - RNA, 20 nt, synthetic construct
  source 1..20: mol_type = other RNA
acaatacactggaaattcca

SEQ ID NO: 11975 - RNA, 20 nt, synthetic construct
  source 1..20: mol_type = other RNA
acaatctggataatattgag

SEQ ID NO: 11976 - RNA, 20 nt, synthetic construct
  source 1..20: mol_type = other RNA
acaatgactgttccattgtg

SEQ ID NO: 11977 - RNA, 20 nt, synthetic construct
  source 1..20: mol_type = other RNA
acaatgatcagcaaagagaa

SEQ ID NO: 11978 - RNA, 20 nt, synthetic construct
  source 1..20: mol_type = other RNA
acaatggaacagtcattgtc

SEQ ID NO: 11979 - RNA, 20 nt, synthetic construct
  source 1..20: mol_type = other RNA
acaatgttcttgtcatggta

SEQ ID NO: 11980 - RNA, 20 nt, synthetic construct
  source 1..20: mol_type = other RNA
acaattattctgaggccttt

SEQ ID NO: 11981 - RNA, 20 nt, synthetic construct
  source 1..20: mol_type = other RNA
acaattgcttctttctcccc

SEQ ID NO: 11982 - RNA, 20 nt, synthetic construct
  source 1..20: mol_type = other RNA
acacaacacttttaagggaa

SEQ ID NO: 11983 - RNA, 20 nt, synthetic construct
  source 1..20: mol_type = other RNA
acacaaccatcccagagttc

SEQ ID NO: 11984 - RNA, 20 nt, synthetic construct
  source 1..20: mol_type = other RNA
acacaagaaagtagagggta

SEQ ID NO: 11985 - RNA, 20 nt, synthetic construct
  source 1..20: mol_type = other RNA
acacaatctggataatattg

SEQ ID NO: 11986 - RNA, 20 nt, synthetic construct
  source 1..20: mol_type = other RNA
acacaatggaacagtcattg

SEQ ID NO: 11987 - RNA, 20 nt, synthetic construct
  source 1..20: mol_type = other RNA
acacaattattctgaggcct

SEQ ID NO: 11988 - RNA, 20 nt, synthetic construct
  source 1..20: mol_type = other RNA
acacacacatggtgaactcc

SEQ ID NO: 11989 - RNA, 20 nt, synthetic construct
  source 1..20: mol_type = other RNA
acacacatggtgaactcctg

SEQ ID NO: 11990 - RNA, 20 nt, synthetic construct
  source 1..20: mol_type = other RNA
acacacctagtttcagagaa

SEQ ID NO: 11991 - RNA, 20 nt, synthetic construct
  source 1..20: mol_type = other RNA
acacagcaaccccaaactga

SEQ ID NO: 11992 - RNA, 20 nt, synthetic construct
  source 1..20: mol_type = other RNA
acacagcaccaccagaaaac

SEQ ID NO: 11993 - RNA, 20 nt, synthetic construct
  source 1..20: mol_type = other RNA
acacagcactatctgaaacc

SEQ ID NO: 11994 - RNA, 20 nt, synthetic construct
  source 1..20: mol_type = other RNA
acacagctggagcacaagtc

SEQ ID NO: 11995 - RNA, 20 nt, synthetic construct
  source 1..20: mol_type = other RNA
acacagtgactgcacatgag

SEQ ID NO: 11996 - RNA, 20 nt, synthetic construct
  source 1..20: mol_type = other RNA
acacataactgcagtgggcc

SEQ ID NO: 11997 - RNA, 20 nt, synthetic construct
  source 1..20: mol_type = other RNA
acacatcctgaactttttgc

SEQ ID NO: 11998 - RNA, 20 nt, synthetic construct
  source 1..20: mol_type = other RNA
acacatctgcaagatgggaa

SEQ ID NO: 11999 - RNA, 20 nt, synthetic construct
  source 1..20: mol_type = other RNA
acacatggtgaactcctgga

SEQ ID NO: 12000 - RNA, 20 nt, synthetic construct
  source 1..20: mol_type = other RNA
acacatgtatgcagcccttc

SEQ ID NO: 12001 - RNA, 20 nt, synthetic construct
  source 1..20: mol_type = other RNA
acaccaaccaaaagaacagc

SEQ ID NO: 12002 - RNA, 20 nt, synthetic construct
  source 1..20: mol_type = other RNA
acaccaagtggcactctttc

SEQ ID NO: 12003 - RNA, 20 nt, synthetic construct
  source 1..20: mol_type = other RNA
acaccaccaccaccatcaca

SEQ ID NO: 12004 - RNA, 20 nt, synthetic construct
  source 1..20: mol_type = other RNA
acaccaccactaccccaacc

SEQ ID NO: 12005 - RNA, 20 nt, synthetic construct
  source 1..20: mol_type = other RNA
acaccaggtgcacttctcca

SEQ ID NO: 12006 - RNA, 20 nt, synthetic construct
  source 1..20: mol_type = other RNA
acacccagaaaacaacacag

SEQ ID NO: 12007 - RNA, 20 nt, synthetic construct
  source 1..20: mol_type = other RNA
acaccccagctttagagcag

SEQ ID NO: 12008 - RNA, 20 nt, synthetic construct
  source 1..20: mol_type = other RNA
acacctagtttcagagaata

SEQ ID NO: 12009 - RNA, 20 nt, synthetic construct
  source 1..20: mol_type = other RNA
acacctcaagcataacccac

SEQ ID NO: 12010 - RNA, 20 nt, synthetic construct
  source 1..20: mol_type = other RNA
acacctgtcaagactcaata

SEQ ID NO: 12011 - RNA, 20 nt, synthetic construct
  source 1..20: mol_type = other RNA
acaccttttgcaacataagc

SEQ ID NO: 12012 - RNA, 20 nt, synthetic construct
  source 1..20: mol_type = other RNA
acacgactattctggcttcc

SEQ ID NO: 12013 - RNA, 20 nt, synthetic construct
  source 1..20: mol_type = other RNA
acacgagatcttgtgccccc

SEQ ID NO: 12014 - RNA, 20 nt, synthetic construct
  source 1..20: mol_type = other RNA
acactcaaaagcatgctgct

SEQ ID NO: 12015 - RNA, 20 nt, synthetic construct
  source 1..20: mol_type = other RNA
acactcagacccctccccag

SEQ ID NO: 12016 - RNA, 20 nt, synthetic construct
  source 1..20: mol_type = other RNA
acactgagctttgcttgaag

SEQ ID NO: 12017 - RNA, 20 nt, synthetic construct
  source 1..20: mol_type = other RNA
acactggaaattccaacatg

SEQ ID NO: 12018 - RNA, 20 nt, synthetic construct
  source 1..20: mol_type = other RNA
acactggggacataagtttt

SEQ ID NO: 12019 - RNA, 20 nt, synthetic construct
  source 1..20: mol_type = other RNA
acactgtctcaatattatcc

SEQ ID NO: 12020 - RNA, 20 nt, synthetic construct
  source 1..20: mol_type = other RNA
acacttggaataccctctac

SEQ ID NO: 12021 - RNA, 20 nt, synthetic construct
  source 1..20: mol_type = other RNA
acacttttaagggaagtgaa

SEQ ID NO: 12022 - RNA, 20 nt, synthetic construct
  source 1..20: mol_type = other RNA
acagaacctctggctacaaa

SEQ ID NO: 12023 - RNA, 20 nt, synthetic construct
  source 1..20: mol_type = other RNA
acagaactcacagattcttt

SEQ ID NO: 12024 - RNA, 20 nt, synthetic construct
  source 1..20: mol_type = other RNA
acagaagcaagaacagcagc

SEQ ID NO: 12025 - RNA, 20 nt, synthetic construct
  source 1..20: mol_type = other RNA
acagaagcaagtaaaagttg

SEQ ID NO: 12026 - RNA, 20 nt, synthetic construct
  source 1..20: mol_type = other RNA
acagaagcagctgttctttt

SEQ ID NO: 12027 - RNA, 20 nt, synthetic construct
  source 1..20: mol_type = other RNA
acagaatataaatcgtagaa

SEQ ID NO: 12028 - RNA, 20 nt, synthetic construct
  source 1..20: mol_type = other RNA
acagaattcttcaccagacg

SEQ ID NO: 12029 - RNA, 20 nt, synthetic construct
  source 1..20: mol_type = other RNA
acagaccatttaccaaaagc

SEQ ID NO: 12030 - RNA, 20 nt, synthetic construct
  source 1..20: mol_type = other RNA
acagacctctaactctgagc

SEQ ID NO: 12031 - RNA, 20 nt, synthetic construct
  source 1..20: mol_type = other RNA
acagactaagtccattcctg

SEQ ID NO: 12032 - RNA, 20 nt, synthetic construct
  source 1..20: mol_type = other RNA
acagactacacatcctgaac

SEQ ID NO: 12033 - RNA, 20 nt, synthetic construct
  source 1..20: mol_type = other RNA
acagactgcagggacaatga

SEQ ID NO: 12034 - RNA, 20 nt, synthetic construct
  source 1..20: mol_type = other RNA
acagattctttcttatcact

SEQ ID NO: 12035 - RNA, 20 nt, synthetic construct
  source 1..20: mol_type = other RNA
acagcaaccccaaactgagt

SEQ ID NO: 12036 - RNA, 20 nt, synthetic construct
  source 1..20: mol_type = other RNA
acagcaccaccagaaaacaa

SEQ ID NO: 12037 - RNA, 20 nt, synthetic construct
  source 1..20: mol_type = other RNA
acagcactatctgaaaccag

SEQ ID NO: 12038 - RNA, 20 nt, synthetic construct
  source 1..20: mol_type = other RNA
acagcacttgaatcaacagg

SEQ ID NO: 12039 - RNA, 20 nt, synthetic construct
  source 1..20: mol_type = other RNA
acagcagcaaaaattacaaa

SEQ ID NO: 12040 - RNA, 20 nt, synthetic construct
  source 1..20: mol_type = other RNA
acagcagcaaacacagcaac

SEQ ID NO: 12041 - RNA, 20 nt, synthetic construct
  source 1..20: mol_type = other RNA
acagctgcttctgttctcaa

SEQ ID NO: 12042 - RNA, 20 nt, synthetic construct
  source 1..20: mol_type = other RNA
acagctggagcacaagtcac

SEQ ID NO: 12043 - RNA, 20 nt, synthetic construct
  source 1..20: mol_type = other RNA
acagcttgcaggtggattct

SEQ ID NO: 12044 - RNA, 20 nt, synthetic construct
  source 1..20: mol_type = other RNA
acaggaaaaacatttgcatg

SEQ ID NO: 12045 - RNA, 20 nt, synthetic construct
  source 1..20: mol_type = other RNA
acaggaatgacatacagact

SEQ ID NO: 12046 - RNA, 20 nt, synthetic construct
  source 1..20: mol_type = other RNA
acaggacaactcattagtag

SEQ ID NO: 12047 - RNA, 20 nt, synthetic construct
  source 1..20: mol_type = other RNA
acaggacaactgccagcagt

SEQ ID NO: 12048 - RNA, 20 nt, synthetic construct
  source 1..20: mol_type = other RNA
acaggagcagaagtcacaac

SEQ ID NO: 12049 - RNA, 20 nt, synthetic construct
  source 1..20: mol_type = other RNA
acaggatagaaccaaccatg

SEQ ID NO: 12050 - RNA, 20 nt, synthetic construct
  source 1..20: mol_type = other RNA
acaggcagcacaaacacaac

SEQ ID NO: 12051 - RNA, 20 nt, synthetic construct
  source 1..20: mol_type = other RNA
acaggcatgtggcttgcatc

SEQ ID NO: 12052 - RNA, 20 nt, synthetic construct
  source 1..20: mol_type = other RNA
acaggccaattaaggtggaa

SEQ ID NO: 12053 - RNA, 20 nt, synthetic construct
  source 1..20: mol_type = other RNA
acaggcctcactcaccactg

SEQ ID NO: 12054 - RNA, 20 nt, synthetic construct
  source 1..20: mol_type = other RNA
acaggcttcagagactgagc

SEQ ID NO: 12055 - RNA, 20 nt, synthetic construct
  source 1..20: mol_type = other RNA
acagggatataaaaatagaa

SEQ ID NO: 12056 - RNA, 20 nt, synthetic construct
  source 1..20: mol_type = other RNA
acagggtattccataataac

SEQ ID NO: 12057 - RNA, 20 nt, synthetic construct
  source 1..20: mol_type = other RNA
acaggtatttagcattgcag

SEQ ID NO: 12058 - RNA, 20 nt, synthetic construct
  source 1..20: mol_type = other RNA
acaggtgctttcaagaacag

SEQ ID NO: 12059 - RNA, 20 nt, synthetic construct
  source 1..20: mol_type = other RNA
acaggtgtatccaataaatt

SEQ ID NO: 12060 - RNA, 20 nt, synthetic construct
  source 1..20: mol_type = other RNA
acaggttcctcagcttcctt

SEQ ID NO: 12061 - RNA, 20 nt, synthetic construct
  source 1..20: mol_type = other RNA
acaggtttcttgttcaaaca

SEQ ID NO: 12062 - RNA, 20 nt, synthetic construct
  source 1..20: mol_type = other RNA
acagtcaggctactaatgag

SEQ ID NO: 12063 - RNA, 20 nt, synthetic construct
  source 1..20: mol_type = other RNA
acagtcattgtccctgcagt

SEQ ID NO: 12064 - RNA, 20 nt, synthetic construct
  source 1..20: mol_type = other RNA
acagtgactgcacatgagct

SEQ ID NO: 12065 - RNA, 20 nt, synthetic construct
  source 1..20: mol_type = other RNA
acagtggaccaacatctcca

SEQ ID NO: 12066 - RNA, 20 nt, synthetic construct
  source 1..20: mol_type = other RNA
acagtgttttttccaggagt

SEQ ID NO: 12067 - RNA, 20 nt, synthetic construct
  source 1..20: mol_type = other RNA
acagttagtgaaccttctct

SEQ ID NO: 12068 - RNA, 20 nt, synthetic construct
  source 1..20: mol_type = other RNA
acagtttctgcctcttccgt

SEQ ID NO: 12069 - RNA, 20 nt, synthetic construct
  source 1..20: mol_type = other RNA
acagttttgactagacaaac

SEQ ID NO: 12070 - RNA, 20 nt, synthetic construct
  source 1..20: mol_type = other RNA
acataaatgccattaacagt

SEQ ID NO: 12071 - RNA, 20 nt, synthetic construct
  source 1..20: mol_type = other RNA
acataaccatgcaaatgttt

SEQ ID NO: 12072 - RNA, 20 nt, synthetic construct
  source 1..20: mol_type = other RNA
acataactgcagtgggcctg

SEQ ID NO: 12073 - RNA, 20 nt, synthetic construct
  source 1..20: mol_type = other RNA
acataagcctcataaacagg

SEQ ID NO: 12074 - RNA, 20 nt, synthetic construct
  source 1..20: mol_type = other RNA
acataagtttttcagtttgg

SEQ ID NO: 12075 - RNA, 20 nt, synthetic construct
  source 1..20: mol_type = other RNA
acatacagactgcagggaca

SEQ ID NO: 12076 - RNA, 20 nt, synthetic construct
  source 1..20: mol_type = other RNA
acatatcttggtttctattt

SEQ ID NO: 12077 - RNA, 20 nt, synthetic construct
  source 1..20: mol_type = other RNA
acatccagggaaccacaaag

SEQ ID NO: 12078 - RNA, 20 nt, synthetic construct
  source 1..20: mol_type = other RNA
acatcctgaactttttgcag

SEQ ID NO: 12079 - RNA, 20 nt, synthetic construct
  source 1..20: mol_type = other RNA
acatctcacataaatgccat

SEQ ID NO: 12080 - RNA, 20 nt, synthetic construct
  source 1..20: mol_type = other RNA
acatctccagttccaaaaac

SEQ ID NO: 12081 - RNA, 20 nt, synthetic construct
  source 1..20: mol_type = other RNA
acatctccctcaaaaccagc

SEQ ID NO: 12082 - RNA, 20 nt, synthetic construct
  source 1..20: mol_type = other RNA
acatctgcaagatgggaaat

SEQ ID NO: 12083 - RNA, 20 nt, synthetic construct
  source 1..20: mol_type = other RNA
acatgagcttttggtaaatg

SEQ ID NO: 12084 - RNA, 20 nt, synthetic construct
  source 1..20: mol_type = other RNA
acatgcaatattttccaaat

SEQ ID NO: 12085 - RNA, 20 nt, synthetic construct
  source 1..20: mol_type = other RNA
acatgcctggggggctccca

SEQ ID NO: 12086 - RNA, 20 nt, synthetic construct
  source 1..20: mol_type = other RNA
acatgcctgtatgcacacag

SEQ ID NO: 12087 - RNA, 20 nt, synthetic construct
  source 1..20: mol_type = other RNA
acatggaaaaaggtaactaa

SEQ ID NO: 12088 - RNA, 20 nt, synthetic construct
  source 1..20: mol_type = other RNA
acatggtgaactcctggaaa

SEQ ID NO: 12089 - RNA, 20 nt, synthetic construct
  source 1..20: mol_type = other RNA
acatggttggttctatcctg

SEQ ID NO: 12090 - RNA, 20 nt, synthetic construct
  source 1..20: mol_type = other RNA
acatgtatgcagcccttctc

SEQ ID NO: 12091 - RNA, 20 nt, synthetic construct
  source 1..20: mol_type = other RNA
acatgtgtagatggattagg

SEQ ID NO: 12092 - RNA, 20 nt, synthetic construct
  source 1..20: mol_type = other RNA
acattatcacagcttgcagg

SEQ ID NO: 12093 - RNA, 20 nt, synthetic construct
  source 1..20: mol_type = other RNA
acattatgagtctcgaactc

SEQ ID NO: 12094 - RNA, 20 nt, synthetic construct
  source 1..20: mol_type = other RNA
acattcttccactttagtct

SEQ ID NO: 12095 - RNA, 20 nt, synthetic construct
  source 1..20: mol_type = other RNA
acattggtcttgttttctca

SEQ ID NO: 12096 - RNA, 20 nt, synthetic construct
  source 1..20: mol_type = other RNA
acatttcaacttttacttgc

SEQ ID NO: 12097 - RNA, 20 nt, synthetic construct
  source 1..20: mol_type = other RNA
acatttctggcacttaccta

SEQ ID NO: 12098 - RNA, 20 nt, synthetic construct
  source 1..20: mol_type = other RNA
acatttgcatggttatgtat

SEQ ID NO: 12099 - RNA, 20 nt, synthetic construct
  source 1..20: mol_type = other RNA
acatttggttgactgctttc

SEQ ID NO: 12100 - RNA, 20 nt, synthetic construct
  source 1..20: mol_type = other RNA
acatttgtgacttgtgctcc

SEQ ID NO: 12101 - RNA, 20 nt, synthetic construct
  source 1..20: mol_type = other RNA
accaaaaattggtgggttat

SEQ ID NO: 12102 - RNA, 20 nt, synthetic construct
  source 1..20: mol_type = other RNA
accaaaagaacagctgcttc

SEQ ID NO: 12103 - RNA, 20 nt, synthetic construct
  source 1..20: mol_type = other RNA
accaaaagctcatgtgcagt

SEQ ID NO: 12104 - RNA, 20 nt, synthetic construct
  source 1..20: mol_type = other RNA
accaaaaggctaatggagaa

SEQ ID NO: 12105 - RNA, 20 nt, synthetic construct
  source 1..20: mol_type = other RNA
accaaagtaacacaacactt

SEQ ID NO: 12106 - RNA, 20 nt, synthetic construct
  source 1..20: mol_type = other RNA
accaaatgtctccgatttga

SEQ ID NO: 12107 - RNA, 20 nt, synthetic construct
  source 1..20: mol_type = other RNA
accaacatctccagttccaa

SEQ ID NO: 12108 - RNA, 20 nt, synthetic construct
  source 1..20: mol_type = other RNA
accaaccaaaagaacagctg

SEQ ID NO: 12109 - RNA, 20 nt, synthetic construct
  source 1..20: mol_type = other RNA
accaaccatgttgagggcaa

SEQ ID NO: 12110 - RNA, 20 nt, synthetic construct
  source 1..20: mol_type = other RNA
accaagatatgtctggtcaa

SEQ ID NO: 12111 - RNA, 20 nt, synthetic construct
  source 1..20: mol_type = other RNA
accaagcggaatcccatcta

SEQ ID NO: 12112 - RNA, 20 nt, synthetic construct
  source 1..20: mol_type = other RNA
accaagtggcactctttcaa

SEQ ID NO: 12113 - RNA, 20 nt, synthetic construct
  source 1..20: mol_type = other RNA
accaagttgaaatgaatcaa

SEQ ID NO: 12114 - RNA, 20 nt, synthetic construct
  source 1..20: mol_type = other RNA
accaatgtcagaacacctca

SEQ ID NO: 12115 - RNA, 20 nt, synthetic construct
  source 1..20: mol_type = other RNA
accaatttttggtagcagtg

SEQ ID NO: 12116 - RNA, 20 nt, synthetic construct
  source 1..20: mol_type = other RNA
accacaaagctagcgtctgg

SEQ ID NO: 12117 - RNA, 20 nt, synthetic construct
  source 1..20: mol_type = other RNA
accacaccaccaccaccatc

SEQ ID NO: 12118 - RNA, 20 nt, synthetic construct
  source 1..20: mol_type = other RNA
accacatctcacataaatgc

SEQ ID NO: 12119 - RNA, 20 nt, synthetic construct
  source 1..20: mol_type = other RNA
accaccaccaccatcacaat

SEQ ID NO: 12120 - RNA, 20 nt, synthetic construct
  source 1..20: mol_type = other RNA
accaccaccatcacaattgc

SEQ ID NO: 12121 - RNA, 20 nt, synthetic construct
  source 1..20: mol_type = other RNA
accaccactaccccaaccaa

SEQ ID NO: 12122 - RNA, 20 nt, synthetic construct
  source 1..20: mol_type = other RNA
accaccagaaaacaaaacat

SEQ ID NO: 12123 - RNA, 20 nt, synthetic construct
  source 1..20: mol_type = other RNA
accaccatcacaattgcttc

SEQ ID NO: 12124 - RNA, 20 nt, synthetic construct
  source 1..20: mol_type = other RNA
accaccttcccagagtccta

SEQ ID NO: 12125 - RNA, 20 nt, synthetic construct
  source 1..20: mol_type = other RNA
accactaccccaaccaaagt

SEQ ID NO: 12126 - RNA, 20 nt, synthetic construct
  source 1..20: mol_type = other RNA
accactgcagctggctttgg

SEQ ID NO: 12127 - RNA, 20 nt, synthetic construct
  source 1..20: mol_type = other RNA
accactgctgcagaacttga

SEQ ID NO: 12128 - RNA, 20 nt, synthetic construct
  source 1..20: mol_type = other RNA
accagaaaacaaaacatgga

SEQ ID NO: 12129 - RNA, 20 nt, synthetic construct
  source 1..20: mol_type = other RNA
accagaacaactacaacaac

SEQ ID NO: 12130 - RNA, 20 nt, synthetic construct
  source 1..20: mol_type = other RNA
accagacatatcttggtttc

SEQ ID NO: 12131 - RNA, 20 nt, synthetic construct
  source 1..20: mol_type = other RNA
accagacgctagctttgtgg

SEQ ID NO: 12132 - RNA, 20 nt, synthetic construct
  source 1..20: mol_type = other RNA
accagcaacagcagcaaaaa

SEQ ID NO: 12133 - RNA, 20 nt, synthetic construct
  source 1..20: mol_type = other RNA
accaggagcttgcaaattgc

SEQ ID NO: 12134 - RNA, 20 nt, synthetic construct
  source 1..20: mol_type = other RNA
accaggatggattgaattga

SEQ ID NO: 12135 - RNA, 20 nt, synthetic construct
  source 1..20: mol_type = other RNA
accagggaggaagtcacact

SEQ ID NO: 12136 - RNA, 20 nt, synthetic construct
  source 1..20: mol_type = other RNA
accaggtgcacttctccaaa

SEQ ID NO: 12137 - RNA, 20 nt, synthetic construct
  source 1..20: mol_type = other RNA
accagtttttcaacacataa

SEQ ID NO: 12138 - RNA, 20 nt, synthetic construct
  source 1..20: mol_type = other RNA
accataaggctcttactctc

SEQ ID NO: 12139 - RNA, 20 nt, synthetic construct
  source 1..20: mol_type = other RNA
accatcacaattgcttcttt

SEQ ID NO: 12140 - RNA, 20 nt, synthetic construct
  source 1..20: mol_type = other RNA
accatcacctcccatttgcc

SEQ ID NO: 12141 - RNA, 20 nt, synthetic construct
  source 1..20: mol_type = other RNA
accatcccagagttcacatc

SEQ ID NO: 12142 - RNA, 20 nt, synthetic construct
  source 1..20: mol_type = other RNA
accatgaaaacattcttcca

SEQ ID NO: 12143 - RNA, 20 nt, synthetic construct
  source 1..20: mol_type = other RNA
accatgaaatcaagtgcatg

SEQ ID NO: 12144 - RNA, 20 nt, synthetic construct
  source 1..20: mol_type = other RNA
accatgacaagaacattgta

SEQ ID NO: 12145 - RNA, 20 nt, synthetic construct
  source 1..20: mol_type = other RNA
accatgcaaatgtttttcct

SEQ ID NO: 12146 - RNA, 20 nt, synthetic construct
  source 1..20: mol_type = other RNA
accatggagcagcatctgaa

SEQ ID NO: 12147 - RNA, 20 nt, synthetic construct
  source 1..20: mol_type = other RNA
accatgtgtgtgttccacgg

SEQ ID NO: 12148 - RNA, 20 nt, synthetic construct
  source 1..20: mol_type = other RNA
accatgttgagggcaacaga

SEQ ID NO: 12149 - RNA, 20 nt, synthetic construct
  source 1..20: mol_type = other RNA
accattaggcattagcactg

SEQ ID NO: 12150 - RNA, 20 nt, synthetic construct
  source 1..20: mol_type = other RNA
accattcagagtgctttttc

SEQ ID NO: 12151 - RNA, 20 nt, synthetic construct
  source 1..20: mol_type = other RNA
accattcatttcattttgtt

SEQ ID NO: 12152 - RNA, 20 nt, synthetic construct
  source 1..20: mol_type = other RNA
accatttaccaaaagctcat

SEQ ID NO: 12153 - RNA, 20 nt, synthetic construct
  source 1..20: mol_type = other RNA
acccaaaacttgcatcacat

SEQ ID NO: 12154 - RNA, 20 nt, synthetic construct
  source 1..20: mol_type = other RNA
acccaatctctccaatcaaa

SEQ ID NO: 12155 - RNA, 20 nt, synthetic construct
  source 1..20: mol_type = other RNA
acccaccaatttttggtagc

SEQ ID NO: 12156 - RNA, 20 nt, synthetic construct
  source 1..20: mol_type = other RNA
acccagaaaacaacacagct

SEQ ID NO: 12157 - RNA, 20 nt, synthetic construct
  source 1..20: mol_type = other RNA
acccatcgcatacctcaggg

SEQ ID NO: 12158 - RNA, 20 nt, synthetic construct
  source 1..20: mol_type = other RNA
accccaaactgagtcttgcc

SEQ ID NO: 12159 - RNA, 20 nt, synthetic construct
  source 1..20: mol_type = other RNA
accccaaccaaagtaacaca

SEQ ID NO: 12160 - RNA, 20 nt, synthetic construct
  source 1..20: mol_type = other RNA
accccagctttagagcagca

SEQ ID NO: 12161 - RNA, 20 nt, synthetic construct
  source 1..20: mol_type = other RNA
acccccaaagcaacaatgat

SEQ ID NO: 12162 - RNA, 20 nt, synthetic construct
  source 1..20: mol_type = other RNA
accccgaagttacgtctttc

SEQ ID NO: 12163 - RNA, 20 nt, synthetic construct
  source 1..20: mol_type = other RNA
acccctccccagaaggacac

SEQ ID NO: 12164 - RNA, 20 nt, synthetic construct
  source 1..20: mol_type = other RNA
accctcacaccaggtgcact

SEQ ID NO: 12165 - RNA, 20 nt, synthetic construct
  source 1..20: mol_type = other RNA
accctctactttcttgtgta

SEQ ID NO: 12166 - RNA, 20 nt, synthetic construct
  source 1..20: mol_type = other RNA
accctctattttcacttccc

SEQ ID NO: 12167 - RNA, 20 nt, synthetic construct
  source 1..20: mol_type = other RNA
accctgtatgaagggaagcc

SEQ ID NO: 12168 - RNA, 20 nt, synthetic construct
  source 1..20: mol_type = other RNA
acccttcagaatctcttgct

SEQ ID NO: 12169 - RNA, 20 nt, synthetic construct
  source 1..20: mol_type = other RNA
accgcaatggaaacacaatc

SEQ ID NO: 12170 - RNA, 20 nt, synthetic construct
  source 1..20: mol_type = other RNA
accgttcagagctgccacca

SEQ ID NO: 12171 - RNA, 20 nt, synthetic construct
  source 1..20: mol_type = other RNA
acctacacatctgcaagatg

SEQ ID NO: 12172 - RNA, 20 nt, synthetic construct
  source 1..20: mol_type = other RNA
acctagtttcagagaataaa

SEQ ID NO: 12173 - RNA, 20 nt, synthetic construct
  source 1..20: mol_type = other RNA
acctcaagcataacccacca

SEQ ID NO: 12174 - RNA, 20 nt, synthetic construct
  source 1..20: mol_type = other RNA
acctcagggcagatcaattc

SEQ ID NO: 12175 - RNA, 20 nt, synthetic construct
  source 1..20: mol_type = other RNA
acctccaaacaatacactgg

SEQ ID NO: 12176 - RNA, 20 nt, synthetic construct
  source 1..20: mol_type = other RNA
acctcccatttgccagacag

SEQ ID NO: 12177 - RNA, 20 nt, synthetic construct
  source 1..20: mol_type = other RNA
acctctaactctgagctgcc

SEQ ID NO: 12178 - RNA, 20 nt, synthetic construct
  source 1..20: mol_type = other RNA
acctctggctacaaagctcc

SEQ ID NO: 12179 - RNA, 20 nt, synthetic construct
  source 1..20: mol_type = other RNA
acctgaacagaattcttcac

SEQ ID NO: 12180 - RNA, 20 nt, synthetic construct
  source 1..20: mol_type = other RNA
acctgaggcaccaccttccc

SEQ ID NO: 12181 - RNA, 20 nt, synthetic construct
  source 1..20: mol_type = other RNA
acctgcaagctgtgataatg

SEQ ID NO: 12182 - RNA, 20 nt, synthetic construct
  source 1..20: mol_type = other RNA
acctggatgcaagccacatg

SEQ ID NO: 12183 - RNA, 20 nt, synthetic construct
  source 1..20: mol_type = other RNA
acctggatttctttcttggc

SEQ ID NO: 12184 - RNA, 20 nt, synthetic construct
  source 1..20: mol_type = other RNA
acctggtgtgagggtttttg

SEQ ID NO: 12185 - RNA, 20 nt, synthetic construct
  source 1..20: mol_type = other RNA
acctgtattttgcatgcact

SEQ ID NO: 12186 - RNA, 20 nt, synthetic construct
  source 1..20: mol_type = other RNA
acctgtcaagactcaatatg

SEQ ID NO: 12187 - RNA, 20 nt, synthetic construct
  source 1..20: mol_type = other RNA
acctgtgaagaagatcttgc

SEQ ID NO: 12188 - RNA, 20 nt, synthetic construct
  source 1..20: mol_type = other RNA
acctgtggaagaggaggagg

SEQ ID NO: 12189 - RNA, 20 nt, synthetic construct
  source 1..20: mol_type = other RNA
acctgttcctttcagaaacc

SEQ ID NO: 12190 - RNA, 20 nt, synthetic construct
  source 1..20: mol_type = other RNA
accttaattggcctgtgcat

SEQ ID NO: 12191 - RNA, 20 nt, synthetic construct
  source 1..20: mol_type = other RNA
accttagagcagcatgcttt

SEQ ID NO: 12192 - RNA, 20 nt, synthetic construct
  source 1..20: mol_type = other RNA
accttccaaattactagata

SEQ ID NO: 12193 - RNA, 20 nt, synthetic construct
  source 1..20: mol_type = other RNA
accttcccagagtcctaatc

SEQ ID NO: 12194 - RNA, 20 nt, synthetic construct
  source 1..20: mol_type = other RNA
accttctctctctgggctcc

SEQ ID NO: 12195 - RNA, 20 nt, synthetic construct
  source 1..20: mol_type = other RNA
accttgggactgcccttgat

SEQ ID NO: 12196 - RNA, 20 nt, synthetic construct
  source 1..20: mol_type = other RNA
acctttgctgagcaagttgc

SEQ ID NO: 12197 - RNA, 20 nt, synthetic construct
  source 1..20: mol_type = other RNA
accttttgcaacataagcct

SEQ ID NO: 12198 - RNA, 20 nt, synthetic construct
  source 1..20: mol_type = other RNA
acctttttccatgttttgtt

SEQ ID NO: 12199 - RNA, 20 nt, synthetic construct
  source 1..20: mol_type = other RNA
acgactattctggcttccct

SEQ ID NO: 12200 - RNA, 20 nt, synthetic construct
  source 1..20: mol_type = other RNA
acgacttggcgtgaaactgc

SEQ ID NO: 12201 - RNA, 20 nt, synthetic construct
  source 1..20: mol_type = other RNA
acgagatcttgtgcccccaa

SEQ ID NO: 12202 - RNA, 20 nt, synthetic construct
  source 1..20: mol_type = other RNA
acgaggggccttcaattcaa

SEQ ID NO: 12203 - RNA, 20 nt, synthetic construct
  source 1..20: mol_type = other RNA
acgatttatattctgtactt

SEQ ID NO: 12204 - RNA, 20 nt, synthetic construct
  source 1..20: mol_type = other RNA
acgcacagttagtgaacctt

SEQ ID NO: 12205 - RNA, 20 nt, synthetic construct
  source 1..20: mol_type = other RNA
acgccaagtcgttatttgac

SEQ ID NO: 12206 - RNA, 20 nt, synthetic construct
  source 1..20: mol_type = other RNA
acgccatgtgtctcagtaca

SEQ ID NO: 12207 - RNA, 20 nt, synthetic construct
  source 1..20: mol_type = other RNA
acgctagctttgtggttccc

SEQ ID NO: 12208 - RNA, 20 nt, synthetic construct
  source 1..20: mol_type = other RNA
acggaagaggcagaaactgt

SEQ ID NO: 12209 - RNA, 20 nt, synthetic construct
  source 1..20: mol_type = other RNA
acggtatttaaaacaaaatg

SEQ ID NO: 12210 - RNA, 20 nt, synthetic construct
  source 1..20: mol_type = other RNA
acgtaacttcggggtaagcc

SEQ ID NO: 12211 - RNA, 20 nt, synthetic construct
  source 1..20: mol_type = other RNA
acgtaatgaggcatcactgc

SEQ ID NO: 12212 - RNA, 20 nt, synthetic construct
  source 1..20: mol_type = other RNA
acgtctttctccattagcct

SEQ ID NO: 12213 - RNA, 20 nt, synthetic construct
  source 1..20: mol_type = other RNA
acgttttagatgggattccg

SEQ ID NO: 12214 - RNA, 20 nt, synthetic construct
  source 1..20: mol_type = other RNA
actaaagtggaagaatgttt

SEQ ID NO: 12215 - RNA, 20 nt, synthetic construct
  source 1..20: mol_type = other RNA
actaactgtgcgttttattc

SEQ ID NO: 12216 - RNA, 20 nt, synthetic construct
  source 1..20: mol_type = other RNA
actaagcaagagaatccacc

SEQ ID NO: 12217 - RNA, 20 nt, synthetic construct
  source 1..20: mol_type = other RNA
actaaggattccttttctgc

SEQ ID NO: 12218 - RNA, 20 nt, synthetic construct
  source 1..20: mol_type = other RNA
actaagtccattcctgatac

SEQ ID NO: 12219 - RNA, 20 nt, synthetic construct
  source 1..20: mol_type = other RNA
actaatgagttgtcctgtga

SEQ ID NO: 12220 - RNA, 20 nt, synthetic construct
  source 1..20: mol_type = other RNA
actacaacaacaaaaatcag

SEQ ID NO: 12221 - RNA, 20 nt, synthetic construct
  source 1..20: mol_type = other RNA
actacacatcctgaactttt

SEQ ID NO: 12222 - RNA, 20 nt, synthetic construct
  source 1..20: mol_type = other RNA
actaccacaccaccaccacc

SEQ ID NO: 12223 - RNA, 20 nt, synthetic construct
  source 1..20: mol_type = other RNA
actaccccaaccaaagtaac

SEQ ID NO: 12224 - RNA, 20 nt, synthetic construct
  source 1..20: mol_type = other RNA
actagacaaaccactgctgc

SEQ ID NO: 12225 - RNA, 20 nt, synthetic construct
  source 1..20: mol_type = other RNA
actagatactcctataaaaa

SEQ ID NO: 12226 - RNA, 20 nt, synthetic construct
  source 1..20: mol_type = other RNA
actagatttcattttcaaca

SEQ ID NO: 12227 - RNA, 20 nt, synthetic construct
  source 1..20: mol_type = other RNA
actagctgcaatgctaaata

SEQ ID NO: 12228 - RNA, 20 nt, synthetic construct
  source 1..20: mol_type = other RNA
actaggtgtgtattgtttga

SEQ ID NO: 12229 - RNA, 20 nt, synthetic construct
  source 1..20: mol_type = other RNA
actataaggggaatttctac

SEQ ID NO: 12230 - RNA, 20 nt, synthetic construct
  source 1..20: mol_type = other RNA
actatctgaaaccaggatgg

SEQ ID NO: 12231 - RNA, 20 nt, synthetic construct
  source 1..20: mol_type = other RNA
actatggcaagactcagttt

SEQ ID NO: 12232 - RNA, 20 nt, synthetic construct
  source 1..20: mol_type = other RNA
actattctggcttcccttca

SEQ ID NO: 12233 - RNA, 20 nt, synthetic construct
  source 1..20: mol_type = other RNA
actcaaaagcatgctgctct

SEQ ID NO: 12234 - RNA, 20 nt, synthetic construct
  source 1..20: mol_type = other RNA
actcaaatcggagacatttg

SEQ ID NO: 12235 - RNA, 20 nt, synthetic construct
  source 1..20: mol_type = other RNA
actcaatatgatttcccatc

SEQ ID NO: 12236 - RNA, 20 nt, synthetic construct
  source 1..20: mol_type = other RNA
actcacaccttttgcaacat

SEQ ID NO: 12237 - RNA, 20 nt, synthetic construct
  source 1..20: mol_type = other RNA
actcacacgactattctggc

SEQ ID NO: 12238 - RNA, 20 nt, synthetic construct
  source 1..20: mol_type = other RNA
actcacagattctttcttat

SEQ ID NO: 12239 - RNA, 20 nt, synthetic construct
  source 1..20: mol_type = other RNA
actcaccactgcagctggct

SEQ ID NO: 12240 - RNA, 20 nt, synthetic construct
  source 1..20: mol_type = other RNA
actcacccatcgcatacctc

SEQ ID NO: 12241 - RNA, 20 nt, synthetic construct
  source 1..20: mol_type = other RNA
actcagacccctccccagaa

SEQ ID NO: 12242 - RNA, 20 nt, synthetic construct
  source 1..20: mol_type = other RNA
actcagtttggggttgctgt

SEQ ID NO: 12243 - RNA, 20 nt, synthetic construct
  source 1..20: mol_type = other RNA
actcataatgtccaaatggg

SEQ ID NO: 12244 - RNA, 20 nt, synthetic construct
  source 1..20: mol_type = other RNA
actcattagtagcctgactg

SEQ ID NO: 12245 - RNA, 20 nt, synthetic construct
  source 1..20: mol_type = other RNA
actccaccattcagagtgct

SEQ ID NO: 12246 - RNA, 20 nt, synthetic construct
  source 1..20: mol_type = other RNA
actccagacttttcctcacc

SEQ ID NO: 12247 - RNA, 20 nt, synthetic construct
  source 1..20: mol_type = other RNA
actcctggaaaaaacactgt

SEQ ID NO: 12248 - RNA, 20 nt, synthetic construct
  source 1..20: mol_type = other RNA
actcgcttgattttgaatac

SEQ ID NO: 12249 - RNA, 20 nt, synthetic construct
  source 1..20: mol_type = other RNA
actctcaaatcacagaagca

SEQ ID NO: 12250 - RNA, 20 nt, synthetic construct
  source 1..20: mol_type = other RNA
actctgaatggtggagtttt

SEQ ID NO: 12251 - RNA, 20 nt, synthetic construct
  source 1..20: mol_type = other RNA
actctgagctgcctccaaag

SEQ ID NO: 12252 - RNA, 20 nt, synthetic construct
  source 1..20: mol_type = other RNA
actctgggaaggtggtgcct

SEQ ID NO: 12253 - RNA, 20 nt, synthetic construct
  source 1..20: mol_type = other RNA
actctgggatggttgtgttt

SEQ ID NO: 12254 - RNA, 20 nt, synthetic construct
  source 1..20: mol_type = other RNA
actgaaaaacttatgtcccc

SEQ ID NO: 12255 - RNA, 20 nt, synthetic construct
  source 1..20: mol_type = other RNA
actgaagaattgatggcagt

SEQ ID NO: 12256 - RNA, 20 nt, synthetic construct
  source 1..20: mol_type = other RNA
actgaagcttgttgtgactt

SEQ ID NO: 12257 - RNA, 20 nt, synthetic construct
  source 1..20: mol_type = other RNA
actgagccattttcaaactc

SEQ ID NO: 12258 - RNA, 20 nt, synthetic construct
  source 1..20: mol_type = other RNA
actgagctttgcttgaagta

SEQ ID NO: 12259 - RNA, 20 nt, synthetic construct
  source 1..20: mol_type = other RNA
actgagtcttgccatagtca

SEQ ID NO: 12260 - RNA, 20 nt, synthetic construct
  source 1..20: mol_type = other RNA
actgattttcaccatgaaaa

SEQ ID NO: 12261 - RNA, 20 nt, synthetic construct
  source 1..20: mol_type = other RNA
actgatttttgttgttgtag

SEQ ID NO: 12262 - RNA, 20 nt, synthetic construct
  source 1..20: mol_type = other RNA
actgcacatgagcttttggt

SEQ ID NO: 12263 - RNA, 20 nt, synthetic construct
  source 1..20: mol_type = other RNA
actgcagctggctttggagg

SEQ ID NO: 12264 - RNA, 20 nt, synthetic construct
  source 1..20: mol_type = other RNA
actgcagggacaatgactgt

SEQ ID NO: 12265 - RNA, 20 nt, synthetic construct
  source 1..20: mol_type = other RNA
actgcagtgggcctgaaaat

SEQ ID NO: 12266 - RNA, 20 nt, synthetic construct
  source 1..20: mol_type = other RNA
actgcagttatgtgttgaaa

SEQ ID NO: 12267 - RNA, 20 nt, synthetic construct
  source 1..20: mol_type = other RNA
actgcattttcttgggctac

SEQ ID NO: 12268 - RNA, 20 nt, synthetic construct
  source 1..20: mol_type = other RNA
actgccagcagttgatgaga

SEQ ID NO: 12269 - RNA, 20 nt, synthetic construct
  source 1..20: mol_type = other RNA
actgccatcaattcttcagt

SEQ ID NO: 12270 - RNA, 20 nt, synthetic construct
  source 1..20: mol_type = other RNA
actgcccttgattcatttca

SEQ ID NO: 12271 - RNA, 20 nt, synthetic construct
  source 1..20: mol_type = other RNA
actgcctgagagagctcatc

SEQ ID NO: 12272 - RNA, 20 nt, synthetic construct
  source 1..20: mol_type = other RNA
actgccttgtttttaagtaa

SEQ ID NO: 12273 - RNA, 20 nt, synthetic construct
  source 1..20: mol_type = other RNA
actgctaccaaaaattggtg

SEQ ID NO: 12274 - RNA, 20 nt, synthetic construct
  source 1..20: mol_type = other RNA
actgctgcagaacttgatag

SEQ ID NO: 12275 - RNA, 20 nt, synthetic construct
  source 1..20: mol_type = other RNA
actgctggcagttgtcctgt

SEQ ID NO: 12276 - RNA, 20 nt, synthetic construct
  source 1..20: mol_type = other RNA
actgcttcagatgctgctcc

SEQ ID NO: 12277 - RNA, 20 nt, synthetic construct
  source 1..20: mol_type = other RNA
actgctttcacctggatttc

SEQ ID NO: 12278 - RNA, 20 nt, synthetic construct
  source 1..20: mol_type = other RNA
actggaaattccaacatgcc

SEQ ID NO: 12279 - RNA, 20 nt, synthetic construct
  source 1..20: mol_type = other RNA
actggagatgttggtccact

SEQ ID NO: 12280 - RNA, 20 nt, synthetic construct
  source 1..20: mol_type = other RNA
actggaggaagtacagaata

SEQ ID NO: 12281 - RNA, 20 nt, synthetic construct
  source 1..20: mol_type = other RNA
actggcattatcagcatcat

SEQ ID NO: 12282 - RNA, 20 nt, synthetic construct
  source 1..20: mol_type = other RNA
actggccctgacatttcaac

SEQ ID NO: 12283 - RNA, 20 nt, synthetic construct
  source 1..20: mol_type = other RNA
actggggacataagtttttc

SEQ ID NO: 12284 - RNA, 20 nt, synthetic construct
  source 1..20: mol_type = other RNA
actggtgaaatctttaactg

SEQ ID NO: 12285 - RNA, 20 nt, synthetic construct
  source 1..20: mol_type = other RNA
actgtaccttgggactgccc

SEQ ID NO: 12286 - RNA, 20 nt, synthetic construct
  source 1..20: mol_type = other RNA
actgtagcaccattaggcat

SEQ ID NO: 12287 - RNA, 20 nt, synthetic construct
  source 1..20: mol_type = other RNA
actgtctcaatattatccag

SEQ ID NO: 12288 - RNA, 20 nt, synthetic construct
  source 1..20: mol_type = other RNA
actgtgactggccctgacat

SEQ ID NO: 12289 - RNA, 20 nt, synthetic construct
  source 1..20: mol_type = other RNA
actgtgcgttttattcctcc

SEQ ID NO: 12290 - RNA, 20 nt, synthetic construct
  source 1..20: mol_type = other RNA
actgtgtggcactagatttc

SEQ ID NO: 12291 - RNA, 20 nt, synthetic construct
  source 1..20: mol_type = other RNA
actgttaatggcatttatgt

SEQ ID NO: 12292 - RNA, 20 nt, synthetic construct
  source 1..20: mol_type = other RNA
actgttccattgtgttctga

SEQ ID NO: 12293 - RNA, 20 nt, synthetic construct
  source 1..20: mol_type = other RNA
acttaaaaacaaggcagtgc

SEQ ID NO: 12294 - RNA, 20 nt, synthetic construct
  source 1..20: mol_type = other RNA
acttacctacacatctgcaa

SEQ ID NO: 12295 - RNA, 20 nt, synthetic construct
  source 1..20: mol_type = other RNA
acttagtctgttgccctcaa

SEQ ID NO: 12296 - RNA, 20 nt, synthetic construct
  source 1..20: mol_type = other RNA
acttatgtccccagtgttga

SEQ ID NO: 12297 - RNA, 20 nt, synthetic construct
  source 1..20: mol_type = other RNA
acttcaagcaaagctcagtg

SEQ ID NO: 12298 - RNA, 20 nt, synthetic construct
  source 1..20: mol_type = other RNA
acttcccttaaaagtgttgt

SEQ ID NO: 12299 - RNA, 20 nt, synthetic construct
  source 1..20: mol_type = other RNA
acttcctccagtcccatttg

SEQ ID NO: 12300 - RNA, 20 nt, synthetic construct
  source 1..20: mol_type = other RNA
acttcctccctggtcaggca

SEQ ID NO: 12301 - RNA, 20 nt, synthetic construct
  source 1..20: mol_type = other RNA
acttcggggtaagccaagaa

SEQ ID NO: 12302 - RNA, 20 nt, synthetic construct
  source 1..20: mol_type = other RNA
acttctccaaaacagaccat

SEQ ID NO: 12303 - RNA, 20 nt, synthetic construct
  source 1..20: mol_type = other RNA
acttctgctcctgttcttga

SEQ ID NO: 12304 - RNA, 20 nt, synthetic construct
  source 1..20: mol_type = other RNA
acttctggatgagctctctc

SEQ ID NO: 12305 - RNA, 20 nt, synthetic construct
  source 1..20: mol_type = other RNA
acttcttcagaaaagacacc

SEQ ID NO: 12306 - RNA, 20 nt, synthetic construct
  source 1..20: mol_type = other RNA
acttgaatcaacaggcttca

SEQ ID NO: 12307 - RNA, 20 nt, synthetic construct
  source 1..20: mol_type = other RNA
acttgatacataaccatgca

SEQ ID NO: 12308 - RNA, 20 nt, synthetic construct
  source 1..20: mol_type = other RNA
acttgatagccacaccccag

SEQ ID NO: 12309 - RNA, 20 nt, synthetic construct
  source 1..20: mol_type = other RNA
acttgatttcatggtctgac

SEQ ID NO: 12310 - RNA, 20 nt, synthetic construct
  source 1..20: mol_type = other RNA
acttgcatcacatgcaatat

SEQ ID NO: 12311 - RNA, 20 nt, synthetic construct
  source 1..20: mol_type = other RNA
acttgctcagcaaaggtact

SEQ ID NO: 12312 - RNA, 20 nt, synthetic construct
  source 1..20: mol_type = other RNA
acttgcttctgtgatttgag

SEQ ID NO: 12313 - RNA, 20 nt, synthetic construct
  source 1..20: mol_type = other RNA
acttggaataccctctactt

SEQ ID NO: 12314 - RNA, 20 nt, synthetic construct
  source 1..20: mol_type = other RNA
acttggcgtgaaactgcttc

SEQ ID NO: 12315 - RNA, 20 nt, synthetic construct
  source 1..20: mol_type = other RNA
acttggtacatttgtgactt

SEQ ID NO: 12316 - RNA, 20 nt, synthetic construct
  source 1..20: mol_type = other RNA
acttggtgtctccatttact

SEQ ID NO: 12317 - RNA, 20 nt, synthetic construct
  source 1..20: mol_type = other RNA
acttgtgctccagctgtgtt

SEQ ID NO: 12318 - RNA, 20 nt, synthetic construct
  source 1..20: mol_type = other RNA
actttacacaagaaagtaga

SEQ ID NO: 12319 - RNA, 20 nt, synthetic construct
  source 1..20: mol_type = other RNA
actttagtctggccaaagaa

SEQ ID NO: 12320 - RNA, 20 nt, synthetic construct
  source 1..20: mol_type = other RNA
actttcttgtgtaaagtcag

SEQ ID NO: 12321 - RNA, 20 nt, synthetic construct
  source 1..20: mol_type = other RNA
actttggttggggtagtggt

SEQ ID NO: 12322 - RNA, 20 nt, synthetic construct
  source 1..20: mol_type = other RNA
acttttaagggaagtgaaaa

SEQ ID NO: 12323 - RNA, 20 nt, synthetic construct
  source 1..20: mol_type = other RNA
acttttacttgcttctgtga

SEQ ID NO: 12324 - RNA, 20 nt, synthetic construct
  source 1..20: mol_type = other RNA
acttttcccctcctgctcat

SEQ ID NO: 12325 - RNA, 20 nt, synthetic construct
  source 1..20: mol_type = other RNA
acttttcctcacccccaaag

SEQ ID NO: 12326 - RNA, 20 nt, synthetic construct
  source 1..20: mol_type = other RNA
acttttgaaagagtgccact

SEQ ID NO: 12327 - RNA, 20 nt, synthetic construct
  source 1..20: mol_type = other RNA
actttttgcaggaaacaaga

SEQ ID NO: 12328 - RNA, 20 nt, synthetic construct
  source 1..20: mol_type = other RNA
agaaaacaaaacatggaaaa

SEQ ID NO: 12329 - RNA, 20 nt, synthetic construct
  source 1..20: mol_type = other RNA
agaaaacaacacagctggag

SEQ ID NO: 12330 - RNA, 20 nt, synthetic construct
  source 1..20: mol_type = other RNA
agaaaacaagaccaatgtca

SEQ ID NO: 12331 - RNA, 20 nt, synthetic construct
  source 1..20: mol_type = other RNA
agaaaaccacatctcacata

SEQ ID NO: 12332 - RNA, 20 nt, synthetic construct
  source 1..20: mol_type = other RNA
agaaaagacaccaaccaaaa

SEQ ID NO: 12333 - RNA, 20 nt, synthetic construct
  source 1..20: mol_type = other RNA
agaaaaggaatccttagtga

SEQ ID NO: 12334 - RNA, 20 nt, synthetic construct
  source 1..20: mol_type = other RNA
agaaaataacatccagggaa

SEQ ID NO: 12335 - RNA, 20 nt, synthetic construct
  source 1..20: mol_type = other RNA
agaaaatgcagttaaagatt

SEQ ID NO: 12336 - RNA, 20 nt, synthetic construct
  source 1..20: mol_type = other RNA
agaaacaaagagcaagagat

SEQ ID NO: 12337 - RNA, 20 nt, synthetic construct
  source 1..20: mol_type = other RNA
agaaaccaagatatgtctgg

SEQ ID NO: 12338 - RNA, 20 nt, synthetic construct
  source 1..20: mol_type = other RNA
agaaaccagaacaactacaa

SEQ ID NO: 12339 - RNA, 20 nt, synthetic construct
  source 1..20: mol_type = other RNA
agaaacctgtattttgcatg

SEQ ID NO: 12340 - RNA, 20 nt, synthetic construct
  source 1..20: mol_type = other RNA
agaaactgtagcaccattag

SEQ ID NO: 12341 - RNA, 20 nt, synthetic construct
  source 1..20: mol_type = other RNA
agaaagaaatccaggtgaaa

SEQ ID NO: 12342 - RNA, 20 nt, synthetic construct
  source 1..20: mol_type = other RNA
agaaagaagcaattgtgatg

SEQ ID NO: 12343 - RNA, 20 nt, synthetic construct
  source 1..20: mol_type = other RNA
agaaagaatctgtgagttct

SEQ ID NO: 12344 - RNA, 20 nt, synthetic construct
  source 1..20: mol_type = other RNA
agaaagacgtaacttcgggg

SEQ ID NO: 12345 - RNA, 20 nt, synthetic construct
  source 1..20: mol_type = other RNA
agaaagcatcggagaagggc

SEQ ID NO: 12346 - RNA, 20 nt, synthetic construct
  source 1..20: mol_type = other RNA
agaaagtagagggtattcca

SEQ ID NO: 12347 - RNA, 20 nt, synthetic construct
  source 1..20: mol_type = other RNA
agaaatccaggtgaaagcag

SEQ ID NO: 12348 - RNA, 20 nt, synthetic construct
  source 1..20: mol_type = other RNA
agaaatgtactgagacacat

SEQ ID NO: 12349 - RNA, 20 nt, synthetic construct
  source 1..20: mol_type = other RNA
agaaattccccttatagtca

SEQ ID NO: 12350 - RNA, 20 nt, synthetic construct
  source 1..20: mol_type = other RNA
agaaattgaaacaagaccaa

SEQ ID NO: 12351 - RNA, 20 nt, synthetic construct
  source 1..20: mol_type = other RNA
agaacaactacaacaacaaa

SEQ ID NO: 12352 - RNA, 20 nt, synthetic construct
  source 1..20: mol_type = other RNA
agaacacaatggaacagtca

SEQ ID NO: 12353 - RNA, 20 nt, synthetic construct
  source 1..20: mol_type = other RNA
agaacaccaccactacccca

SEQ ID NO: 12354 - RNA, 20 nt, synthetic construct
  source 1..20: mol_type = other RNA
agaacacctcaagcataacc

SEQ ID NO: 12355 - RNA, 20 nt, synthetic construct
  source 1..20: mol_type = other RNA
agaacagaagcagctgttct

SEQ ID NO: 12356 - RNA, 20 nt, synthetic construct
  source 1..20: mol_type = other RNA
agaacagactacacatcctg

SEQ ID NO: 12357 - RNA, 20 nt, synthetic construct
  source 1..20: mol_type = other RNA
agaacagcagcaaacacagc

SEQ ID NO: 12358 - RNA, 20 nt, synthetic construct
  source 1..20: mol_type = other RNA
agaacagctgcttctgttct

SEQ ID NO: 12359 - RNA, 20 nt, synthetic construct
  source 1..20: mol_type = other RNA
agaacaggagcagaagtcac

SEQ ID NO: 12360 - RNA, 20 nt, synthetic construct
  source 1..20: mol_type = other RNA
agaaccaaccatgttgaggg

SEQ ID NO: 12361 - RNA, 20 nt, synthetic construct
  source 1..20: mol_type = other RNA
agaacctctggctacaaagc

SEQ ID NO: 12362 - RNA, 20 nt, synthetic construct
  source 1..20: mol_type = other RNA
agaactcacagattctttct

SEQ ID NO: 12363 - RNA, 20 nt, synthetic construct
  source 1..20: mol_type = other RNA
agaactgaagcttgttgtga

SEQ ID NO: 12364 - RNA, 20 nt, synthetic construct
  source 1..20: mol_type = other RNA
agaacttgatagccacaccc

SEQ ID NO: 12365 - RNA, 20 nt, synthetic construct
  source 1..20: mol_type = other RNA
agaagaacaccaccactacc

SEQ ID NO: 12366 - RNA, 20 nt, synthetic construct
  source 1..20: mol_type = other RNA
agaagatcttgctttgggat

SEQ ID NO: 12367 - RNA, 20 nt, synthetic construct
  source 1..20: mol_type = other RNA
agaagcaagaacagcagcaa

SEQ ID NO: 12368 - RNA, 20 nt, synthetic construct
  source 1..20: mol_type = other RNA
agaagcaagtaaaagttgaa

SEQ ID NO: 12369 - RNA, 20 nt, synthetic construct
  source 1..20: mol_type = other RNA
agaagcaattgtgatggtgg

SEQ ID NO: 12370 - RNA, 20 nt, synthetic construct
  source 1..20: mol_type = other RNA
agaagcagctgttcttttgg

SEQ ID NO: 12371 - RNA, 20 nt, synthetic construct
  source 1..20: mol_type = other RNA
agaaggaaaaagcactctga

SEQ ID NO: 12372 - RNA, 20 nt, synthetic construct
  source 1..20: mol_type = other RNA
agaaggacactcaaaagcat

SEQ ID NO: 12373 - RNA, 20 nt, synthetic construct
  source 1..20: mol_type = other RNA
agaaggatcattctttggcc

SEQ ID NO: 12374 - RNA, 20 nt, synthetic construct
  source 1..20: mol_type = other RNA
agaagggctgcatacatgtg

SEQ ID NO: 12375 - RNA, 20 nt, synthetic construct
  source 1..20: mol_type = other RNA
agaaggttcactaactgtgc

SEQ ID NO: 12376 - RNA, 20 nt, synthetic construct
  source 1..20: mol_type = other RNA
agaagtaaatggagacacca

SEQ ID NO: 12377 - RNA, 20 nt, synthetic construct
  source 1..20: mol_type = other RNA
agaagtcacaacaagcttca

SEQ ID NO: 12378 - RNA, 20 nt, synthetic construct
  source 1..20: mol_type = other RNA
agaagtgcacctggtgtgag

SEQ ID NO: 12379 - RNA, 20 nt, synthetic construct
  source 1..20: mol_type = other RNA
agaagttgtttgctgctcta

SEQ ID NO: 12380 - RNA, 20 nt, synthetic construct
  source 1..20: mol_type = other RNA
agaataaagaacagactaca

SEQ ID NO: 12381 - RNA, 20 nt, synthetic construct
  source 1..20: mol_type = other RNA
agaataaagaggaaatactc

SEQ ID NO: 12382 - RNA, 20 nt, synthetic construct
  source 1..20: mol_type = other RNA
agaataattgtgtgaacagg

SEQ ID NO: 12383 - RNA, 20 nt, synthetic construct
  source 1..20: mol_type = other RNA
agaatagtcgtgtgagtcct

SEQ ID NO: 12384 - RNA, 20 nt, synthetic construct
  source 1..20: mol_type = other RNA
agaatccacctgcaagctgt

SEQ ID NO: 12385 - RNA, 20 nt, synthetic construct
  source 1..20: mol_type = other RNA
agaatctcttgctctttgtt

SEQ ID NO: 12386 - RNA, 20 nt, synthetic construct
  source 1..20: mol_type = other RNA
agaatctgaagctctggatt

SEQ ID NO: 12387 - RNA, 20 nt, synthetic construct
  source 1..20: mol_type = other RNA
agaatctgtgagttctgtag

SEQ ID NO: 12388 - RNA, 20 nt, synthetic construct
  source 1..20: mol_type = other RNA
agaatgatccttctctttgc

SEQ ID NO: 12389 - RNA, 20 nt, synthetic construct
  source 1..20: mol_type = other RNA
agaatggaagcccactgcct

SEQ ID NO: 12390 - RNA, 20 nt, synthetic construct
  source 1..20: mol_type = other RNA
agaatgttttcatggtgaaa

SEQ ID NO: 12391 - RNA, 20 nt, synthetic construct
  source 1..20: mol_type = other RNA
agaattctgttcaggttcca

SEQ ID NO: 12392 - RNA, 20 nt, synthetic construct
  source 1..20: mol_type = other RNA
agaattcttcaccagacgct

SEQ ID NO: 12393 - RNA, 20 nt, synthetic construct
  source 1..20: mol_type = other RNA
agaattgatggcagtgatgc

SEQ ID NO: 12394 - RNA, 20 nt, synthetic construct
  source 1..20: mol_type = other RNA
agacaaaccactgctgcaga

SEQ ID NO: 12395 - RNA, 20 nt, synthetic construct
  source 1..20: mol_type = other RNA
agacaaggagcaaacacgag

SEQ ID NO: 12396 - RNA, 20 nt, synthetic construct
  source 1..20: mol_type = other RNA
agacaccaaccaaaagaaca

SEQ ID NO: 12397 - RNA, 20 nt, synthetic construct
  source 1..20: mol_type = other RNA
agacaccaagtggcactctt

SEQ ID NO: 12398 - RNA, 20 nt, synthetic construct
  source 1..20: mol_type = other RNA
agacagaacctctggctaca

SEQ ID NO: 12399 - RNA, 20 nt, synthetic construct
  source 1..20: mol_type = other RNA
agacagtgttttttccagga

SEQ ID NO: 12400 - RNA, 20 nt, synthetic construct
  source 1..20: mol_type = other RNA
agacatatcttggtttctat

SEQ ID NO: 12401 - RNA, 20 nt, synthetic construct
  source 1..20: mol_type = other RNA
agacatttggttgactgctt

SEQ ID NO: 12402 - RNA, 20 nt, synthetic construct
  source 1..20: mol_type = other RNA
agaccaaaaggctaatggag

SEQ ID NO: 12403 - RNA, 20 nt, synthetic construct
  source 1..20: mol_type = other RNA
agaccaatgtcagaacacct

SEQ ID NO: 12404 - RNA, 20 nt, synthetic construct
  source 1..20: mol_type = other RNA
agaccatgaaatcaagtgca

SEQ ID NO: 12405 - RNA, 20 nt, synthetic construct
  source 1..20: mol_type = other RNA
agaccatggagcagcatctg

SEQ ID NO: 12406 - RNA, 20 nt, synthetic construct
  source 1..20: mol_type = other RNA
agaccatttaccaaaagctc

SEQ ID NO: 12407 - RNA, 20 nt, synthetic construct
  source 1..20: mol_type = other RNA
agacccaaaacttgcatcac

SEQ ID NO: 12408 - RNA, 20 nt, synthetic construct
  source 1..20: mol_type = other RNA
agacccctccccagaaggac

SEQ ID NO: 12409 - RNA, 20 nt, synthetic construct
  source 1..20: mol_type = other RNA
agacctctaactctgagctg

SEQ ID NO: 12410 - RNA, 20 nt, synthetic construct
  source 1..20: mol_type = other RNA
agacgctagctttgtggttc

SEQ ID NO: 12411 - RNA, 20 nt, synthetic construct
  source 1..20: mol_type = other RNA
agacgtaacttcggggtaag

SEQ ID NO: 12412 - RNA, 20 nt, synthetic construct
  source 1..20: mol_type = other RNA
agactaaagtggaagaatgt

SEQ ID NO: 12413 - RNA, 20 nt, synthetic construct
  source 1..20: mol_type = other RNA
agactaagtccattcctgat

SEQ ID NO: 12414 - RNA, 20 nt, synthetic construct
  source 1..20: mol_type = other RNA
agactacacatcctgaactt

SEQ ID NO: 12415 - RNA, 20 nt, synthetic construct
  source 1..20: mol_type = other RNA
agactcaatatgatttccca

SEQ ID NO: 12416 - RNA, 20 nt, synthetic construct
  source 1..20: mol_type = other RNA
agactcagtttggggttgct

SEQ ID NO: 12417 - RNA, 20 nt, synthetic construct
  source 1..20: mol_type = other RNA
agactcataatgtccaaatg

SEQ ID NO: 12418 - RNA, 20 nt, synthetic construct
  source 1..20: mol_type = other RNA
agactgagccattttcaaac

SEQ ID NO: 12419 - RNA, 20 nt, synthetic construct
  source 1..20: mol_type = other RNA
agactgcagggacaatgact

SEQ ID NO: 12420 - RNA, 20 nt, synthetic construct
  source 1..20: mol_type = other RNA
agacttttcctcacccccaa

SEQ ID NO: 12421 - RNA, 20 nt, synthetic construct
  source 1..20: mol_type = other RNA
agagaaggatcattctttgg

SEQ ID NO: 12422 - RNA, 20 nt, synthetic construct
  source 1..20: mol_type = other RNA
agagaaggttcactaactgt

SEQ ID NO: 12423 - RNA, 20 nt, synthetic construct
  source 1..20: mol_type = other RNA
agagaataaagaacagacta

SEQ ID NO: 12424 - RNA, 20 nt, synthetic construct
  source 1..20: mol_type = other RNA
agagaatccacctgcaagct

SEQ ID NO: 12425 - RNA, 20 nt, synthetic construct
  source 1..20: mol_type = other RNA
agagactgagccattttcaa

SEQ ID NO: 12426 - RNA, 20 nt, synthetic construct
  source 1..20: mol_type = other RNA
agagagaaggttcactaact

SEQ ID NO: 12427 - RNA, 20 nt, synthetic construct
  source 1..20: mol_type = other RNA
agagagagaaggttcactaa

SEQ ID NO: 12428 - RNA, 20 nt, synthetic construct
  source 1..20: mol_type = other RNA
agagagctcatccagaagta

SEQ ID NO: 12429 - RNA, 20 nt, synthetic construct
  source 1..20: mol_type = other RNA
agagatgccaccttagagca

SEQ ID NO: 12430 - RNA, 20 nt, synthetic construct
  source 1..20: mol_type = other RNA
agagattctgaagggtcgag

SEQ ID NO: 12431 - RNA, 20 nt, synthetic construct
  source 1..20: mol_type = other RNA
agagattgggttgatactga

SEQ ID NO: 12432 - RNA, 20 nt, synthetic construct
  source 1..20: mol_type = other RNA
agagcaagagattctgaagg

SEQ ID NO: 12433 - RNA, 20 nt, synthetic construct
  source 1..20: mol_type = other RNA
agagcagattcccaaactga

SEQ ID NO: 12434 - RNA, 20 nt, synthetic construct
  source 1..20: mol_type = other RNA
agagcagcaaacaacttctt

SEQ ID NO: 12435 - RNA, 20 nt, synthetic construct
  source 1..20: mol_type = other RNA
agagcagcatgcttttgagt

SEQ ID NO: 12436 - RNA, 20 nt, synthetic construct
  source 1..20: mol_type = other RNA
agagcatcattgagaccatg

SEQ ID NO: 12437 - RNA, 20 nt, synthetic construct
  source 1..20: mol_type = other RNA
agagccttatggtcaaataa

SEQ ID NO: 12438 - RNA, 20 nt, synthetic construct
  source 1..20: mol_type = other RNA
agagctacaggacaactgcc

SEQ ID NO: 12439 - RNA, 20 nt, synthetic construct
  source 1..20: mol_type = other RNA
agagctcatccagaagtaaa

SEQ ID NO: 12440 - RNA, 20 nt, synthetic construct
  source 1..20: mol_type = other RNA
agagctgccaccaggagctt

SEQ ID NO: 12441 - RNA, 20 nt, synthetic construct
  source 1..20: mol_type = other RNA
agagcttcagattctgaatg

SEQ ID NO: 12442 - RNA, 20 nt, synthetic construct
  source 1..20: mol_type = other RNA
agaggaaatactccagactt

SEQ ID NO: 12443 - RNA, 20 nt, synthetic construct
  source 1..20: mol_type = other RNA
agaggaggagggggagaaag

SEQ ID NO: 12444 - RNA, 20 nt, synthetic construct
  source 1..20: mol_type = other RNA
agaggcagaaactgtagcac

SEQ ID NO: 12445 - RNA, 20 nt, synthetic construct
  source 1..20: mol_type = other RNA
agagggcagccttgtggatg

SEQ ID NO: 12446 - RNA, 20 nt, synthetic construct
  source 1..20: mol_type = other RNA
agagggtaaacctgaggcac

SEQ ID NO: 12447 - RNA, 20 nt, synthetic construct
  source 1..20: mol_type = other RNA
agagggtattccaagtgttt

SEQ ID NO: 12448 - RNA, 20 nt, synthetic construct
  source 1..20: mol_type = other RNA
agaggtctgtgcggaattga

SEQ ID NO: 12449 - RNA, 20 nt, synthetic construct
  source 1..20: mol_type = other RNA
agaggttctgtctggcaaat

SEQ ID NO: 12450 - RNA, 20 nt, synthetic construct
  source 1..20: mol_type = other RNA
agagtaagagccttatggtc

SEQ ID NO: 12451 - RNA, 20 nt, synthetic construct
  source 1..20: mol_type = other RNA
agagtcaccttccaaattac

SEQ ID NO: 12452 - RNA, 20 nt, synthetic construct
  source 1..20: mol_type = other RNA
agagtcctaatccatctaca

SEQ ID NO: 12453 - RNA, 20 nt, synthetic construct
  source 1..20: mol_type = other RNA
agagtgccacttggtgtctc

SEQ ID NO: 12454 - RNA, 20 nt, synthetic construct
  source 1..20: mol_type = other RNA
agagtgctttttccttctga

SEQ ID NO: 12455 - RNA, 20 nt, synthetic construct
  source 1..20: mol_type = other RNA
agagttagaggtctgtgcgg

SEQ ID NO: 12456 - RNA, 20 nt, synthetic construct
  source 1..20: mol_type = other RNA
agagttcacatctccctcaa

SEQ ID NO: 12457 - RNA, 20 nt, synthetic construct
  source 1..20: mol_type = other RNA
agatagtgctgtgttggggg

SEQ ID NO: 12458 - RNA, 20 nt, synthetic construct
  source 1..20: mol_type = other RNA
agatatgcccatctcctgca

SEQ ID NO: 12459 - RNA, 20 nt, synthetic construct
  source 1..20: mol_type = other RNA
agatatgtctggtcaacaag

SEQ ID NO: 12460 - RNA, 20 nt, synthetic construct
  source 1..20: mol_type = other RNA
agatcaagaaattgaaacaa

SEQ ID NO: 12461 - RNA, 20 nt, synthetic construct
  source 1..20: mol_type = other RNA
agatcaattccgcacagacc

SEQ ID NO: 12462 - RNA, 20 nt, synthetic construct
  source 1..20: mol_type = other RNA
agatcactcacccatcgcat

SEQ ID NO: 12463 - RNA, 20 nt, synthetic construct
  source 1..20: mol_type = other RNA
agatctcgtgtttgctcctt

SEQ ID NO: 12464 - RNA, 20 nt, synthetic construct
  source 1..20: mol_type = other RNA
agatcttcttcacaggtgct

SEQ ID NO: 12465 - RNA, 20 nt, synthetic construct
  source 1..20: mol_type = other RNA
agatcttgctttgggatcac

SEQ ID NO: 12466 - RNA, 20 nt, synthetic construct
  source 1..20: mol_type = other RNA
agatcttgtgcccccaacac

SEQ ID NO: 12467 - RNA, 20 nt, synthetic construct
  source 1..20: mol_type = other RNA
agatgcacaggccaattaag

SEQ ID NO: 12468 - RNA, 20 nt, synthetic construct
  source 1..20: mol_type = other RNA
agatgccaccttagagcagc

SEQ ID NO: 12469 - RNA, 20 nt, synthetic construct
  source 1..20: mol_type = other RNA
agatgctgctccatggtctc

SEQ ID NO: 12470 - RNA, 20 nt, synthetic construct
  source 1..20: mol_type = other RNA
agatggattaggactctggg

SEQ ID NO: 12471 - RNA, 20 nt, synthetic construct
  source 1..20: mol_type = other RNA
agatgggaaatcatattgag

SEQ ID NO: 12472 - RNA, 20 nt, synthetic construct
  source 1..20: mol_type = other RNA
agatgggattccgcttggtg

SEQ ID NO: 12473 - RNA, 20 nt, synthetic construct
  source 1..20: mol_type = other RNA
agatgggcatatctcaaaaa

SEQ ID NO: 12474 - RNA, 20 nt, synthetic construct
  source 1..20: mol_type = other RNA
agatgtgaactctgggatgg

SEQ ID NO: 12475 - RNA, 20 nt, synthetic construct
  source 1..20: mol_type = other RNA
agatgtggttttctgcaccg

SEQ ID NO: 12476 - RNA, 20 nt, synthetic construct
  source 1..20: mol_type = other RNA
agatgtgtaggtaagtgcca

SEQ ID NO: 12477 - RNA, 20 nt, synthetic construct
  source 1..20: mol_type = other RNA
agatgttggtccactgtacc

SEQ ID NO: 12478 - RNA, 20 nt, synthetic construct
  source 1..20: mol_type = other RNA
agattcccaaactgaaaaac

SEQ ID NO: 12479 - RNA, 20 nt, synthetic construct
  source 1..20: mol_type = other RNA
agattctgaagggtcgagac

SEQ ID NO: 12480 - RNA, 20 nt, synthetic construct
  source 1..20: mol_type = other RNA
agattctgaatgagcaggag

SEQ ID NO: 12481 - RNA, 20 nt, synthetic construct
  source 1..20: mol_type = other RNA
agattctttcttatcactca

SEQ ID NO: 12482 - RNA, 20 nt, synthetic construct
  source 1..20: mol_type = other RNA
agattgggttgatactgaag

SEQ ID NO: 12483 - RNA, 20 nt, synthetic construct
  source 1..20: mol_type = other RNA
agattgtgtttccattgcgg

SEQ ID NO: 12484 - RNA, 20 nt, synthetic construct
  source 1..20: mol_type = other RNA
agatttcaccagtttttcaa

SEQ ID NO: 12485 - RNA, 20 nt, synthetic construct
  source 1..20: mol_type = other RNA
agatttcattttcaacaaag

SEQ ID NO: 12486 - RNA, 20 nt, synthetic construct
  source 1..20: mol_type = other RNA
agcaaaagagcatcattgag

SEQ ID NO: 12487 - RNA, 20 nt, synthetic construct
  source 1..20: mol_type = other RNA
agcaaacaacttcttcagaa

SEQ ID NO: 12488 - RNA, 20 nt, synthetic construct
  source 1..20: mol_type = other RNA
agcaaacacagcaaccccaa

SEQ ID NO: 12489 - RNA, 20 nt, synthetic construct
  source 1..20: mol_type = other RNA
agcaaacacgagatcttgtg

SEQ ID NO: 12490 - RNA, 20 nt, synthetic construct
  source 1..20: mol_type = other RNA
agcaaagagaaggatcattc

SEQ ID NO: 12491 - RNA, 20 nt, synthetic construct
  source 1..20: mol_type = other RNA
agcaaagctcagtgttcact

SEQ ID NO: 12492 - RNA, 20 nt, synthetic construct
  source 1..20: mol_type = other RNA
agcaaaggtacttgatacat

SEQ ID NO: 12493 - RNA, 20 nt, synthetic construct
  source 1..20: mol_type = other RNA
agcaacaatgatcagcaaag

SEQ ID NO: 12494 - RNA, 20 nt, synthetic construct
  source 1..20: mol_type = other RNA
agcaacagcagcaaaaatta

SEQ ID NO: 12495 - RNA, 20 nt, synthetic construct
  source 1..20: mol_type = other RNA
agcaaccccaaactgagtct

SEQ ID NO: 12496 - RNA, 20 nt, synthetic construct
  source 1..20: mol_type = other RNA
agcaagaacagcagcaaaca

SEQ ID NO: 12497 - RNA, 20 nt, synthetic construct
  source 1..20: mol_type = other RNA
agcaagagaatccacctgca

SEQ ID NO: 12498 - RNA, 20 nt, synthetic construct
  source 1..20: mol_type = other RNA
agcaagagattctgaagggt

SEQ ID NO: 12499 - RNA, 20 nt, synthetic construct
  source 1..20: mol_type = other RNA
agcaagatcttcttcacagg

SEQ ID NO: 12500 - RNA, 20 nt, synthetic construct
  source 1..20: mol_type = other RNA
agcaagcctgatggaacagg

SEQ ID NO: 12501 - RNA, 20 nt, synthetic construct
  source 1..20: mol_type = other RNA
agcaagtaaaagttgaaatg

SEQ ID NO: 12502 - RNA, 20 nt, synthetic construct
  source 1..20: mol_type = other RNA
agcaagttgcgcagcttgtt

SEQ ID NO: 12503 - RNA, 20 nt, synthetic construct
  source 1..20: mol_type = other RNA
agcaattgtgatggtggtgg

SEQ ID NO: 12504 - RNA, 20 nt, synthetic construct
  source 1..20: mol_type = other RNA
agcaatttgcaagctcctgg

SEQ ID NO: 12505 - RNA, 20 nt, synthetic construct
  source 1..20: mol_type = other RNA
agcacaaacacaaccatccc

SEQ ID NO: 12506 - RNA, 20 nt, synthetic construct
  source 1..20: mol_type = other RNA
agcacaagtcacaaatgtac

SEQ ID NO: 12507 - RNA, 20 nt, synthetic construct
  source 1..20: mol_type = other RNA
agcaccaccagaaaacaaaa

SEQ ID NO: 12508 - RNA, 20 nt, synthetic construct
  source 1..20: mol_type = other RNA
agcaccattaggcattagca

SEQ ID NO: 12509 - RNA, 20 nt, synthetic construct
  source 1..20: mol_type = other RNA
agcaccattcatttcatttt

SEQ ID NO: 12510 - RNA, 20 nt, synthetic construct
  source 1..20: mol_type = other RNA
agcacctgtgaagaagatct

SEQ ID NO: 12511 - RNA, 20 nt, synthetic construct
  source 1..20: mol_type = other RNA
agcactatctgaaaccagga

SEQ ID NO: 12512 - RNA, 20 nt, synthetic construct
  source 1..20: mol_type = other RNA
agcactctgaatggtggagt

SEQ ID NO: 12513 - RNA, 20 nt, synthetic construct
  source 1..20: mol_type = other RNA
agcactgccttgtttttaag

SEQ ID NO: 12514 - RNA, 20 nt, synthetic construct
  source 1..20: mol_type = other RNA
agcacttgaatcaacaggct

SEQ ID NO: 12515 - RNA, 20 nt, synthetic construct
  source 1..20: mol_type = other RNA
agcacttttcccctcctgct

SEQ ID NO: 12516 - RNA, 20 nt, synthetic construct
  source 1..20: mol_type = other RNA
agcagaagtcacaacaagct

SEQ ID NO: 12517 - RNA, 20 nt, synthetic construct
  source 1..20: mol_type = other RNA
agcagattcccaaactgaaa

SEQ ID NO: 12518 - RNA, 20 nt, synthetic construct
  source 1..20: mol_type = other RNA
agcagcaaaaattacaaata

SEQ ID NO: 12519 - RNA, 20 nt, synthetic construct
  source 1..20: mol_type = other RNA
agcagcaaacaacttcttca

SEQ ID NO: 12520 - RNA, 20 nt, synthetic construct
  source 1..20: mol_type = other RNA
agcagcaaacacagcaaccc

SEQ ID NO: 12521 - RNA, 20 nt, synthetic construct
  source 1..20: mol_type = other RNA
agcagcaatttgcaagctcc

SEQ ID NO: 12522 - RNA, 20 nt, synthetic construct
  source 1..20: mol_type = other RNA
agcagcatctgaagcagttt

SEQ ID NO: 12523 - RNA, 20 nt, synthetic construct
  source 1..20: mol_type = other RNA
agcagcatgcttttgagtgt

SEQ ID NO: 12524 - RNA, 20 nt, synthetic construct
  source 1..20: mol_type = other RNA
agcagctgttcttttggttg

SEQ ID NO: 12525 - RNA, 20 nt, synthetic construct
  source 1..20: mol_type = other RNA
agcaggaggggaaaagtgct

SEQ ID NO: 12526 - RNA, 20 nt, synthetic construct
  source 1..20: mol_type = other RNA
agcagtcaaccaaatgtctc

SEQ ID NO: 12527 - RNA, 20 nt, synthetic construct
  source 1..20: mol_type = other RNA
agcagtggagagctacagga

SEQ ID NO: 12528 - RNA, 20 nt, synthetic construct
  source 1..20: mol_type = other RNA
agcagtggtttgtctagtca

SEQ ID NO: 12529 - RNA, 20 nt, synthetic construct
  source 1..20: mol_type = other RNA
agcagttgatgagaaacaaa

SEQ ID NO: 12530 - RNA, 20 nt, synthetic construct
  source 1..20: mol_type = other RNA
agcagtttcacgccaagtcg

SEQ ID NO: 12531 - RNA, 20 nt, synthetic construct
  source 1..20: mol_type = other RNA
agcataacccaccaattttt

SEQ ID NO: 12532 - RNA, 20 nt, synthetic construct
  source 1..20: mol_type = other RNA
agcatcacaggcctcactca

SEQ ID NO: 12533 - RNA, 20 nt, synthetic construct
  source 1..20: mol_type = other RNA
agcatcatcagcatcacagg

SEQ ID NO: 12534 - RNA, 20 nt, synthetic construct
  source 1..20: mol_type = other RNA
agcatcattgagaccatgga

SEQ ID NO: 12535 - RNA, 20 nt, synthetic construct
  source 1..20: mol_type = other RNA
agcatcggagaagggctgca

SEQ ID NO: 12536 - RNA, 20 nt, synthetic construct
  source 1..20: mol_type = other RNA
agcatctgaagcagtttcac

SEQ ID NO: 12537 - RNA, 20 nt, synthetic construct
  source 1..20: mol_type = other RNA
agcatgctgctctaaggtgg

SEQ ID NO: 12538 - RNA, 20 nt, synthetic construct
  source 1..20: mol_type = other RNA
agcatgcttttgagtgtcct

SEQ ID NO: 12539 - RNA, 20 nt, synthetic construct
  source 1..20: mol_type = other RNA
agcattgcagctagtttact

SEQ ID NO: 12540 - RNA, 20 nt, synthetic construct
  source 1..20: mol_type = other RNA
agccaagaaagaaatccagg

SEQ ID NO: 12541 - RNA, 20 nt, synthetic construct
  source 1..20: mol_type = other RNA
agccacaccccagctttaga

SEQ ID NO: 12542 - RNA, 20 nt, synthetic construct
  source 1..20: mol_type = other RNA
agccacatgcctgtatgcac

SEQ ID NO: 12543 - RNA, 20 nt, synthetic construct
  source 1..20: mol_type = other RNA
agccagaatagtcgtgtgag

SEQ ID NO: 12544 - RNA, 20 nt, synthetic construct
  source 1..20: mol_type = other RNA
agccagaggttctgtctggc

SEQ ID NO: 12545 - RNA, 20 nt, synthetic construct
  source 1..20: mol_type = other RNA
agccagctgcagtggtgagt

SEQ ID NO: 12546 - RNA, 20 nt, synthetic construct
  source 1..20: mol_type = other RNA
agccattttcaaactcacac

SEQ ID NO: 12547 - RNA, 20 nt, synthetic construct
  source 1..20: mol_type = other RNA
agcccaagaaaatgcagtta

SEQ ID NO: 12548 - RNA, 20 nt, synthetic construct
  source 1..20: mol_type = other RNA
agcccactgcctgagagagc

SEQ ID NO: 12549 - RNA, 20 nt, synthetic construct
  source 1..20: mol_type = other RNA
agcccagagagagaaggttc

SEQ ID NO: 12550 - RNA, 20 nt, synthetic construct
  source 1..20: mol_type = other RNA
agccccccaggcatgttgga

SEQ ID NO: 12551 - RNA, 20 nt, synthetic construct
  source 1..20: mol_type = other RNA
agcccttctccgatgctttc

SEQ ID NO: 12552 - RNA, 20 nt, synthetic construct
  source 1..20: mol_type = other RNA
agcctcataaacaggcagca

SEQ ID NO: 12553 - RNA, 20 nt, synthetic construct
  source 1..20: mol_type = other RNA
agcctgactgttaatggcat

SEQ ID NO: 12554 - RNA, 20 nt, synthetic construct
  source 1..20: mol_type = other RNA
agcctgatggaacaggatag

SEQ ID NO: 12555 - RNA, 20 nt, synthetic construct
  source 1..20: mol_type = other RNA
agcctgttgattcaagtgct

SEQ ID NO: 12556 - RNA, 20 nt, synthetic construct
  source 1..20: mol_type = other RNA
agccttatggtcaaataacg

SEQ ID NO: 12557 - RNA, 20 nt, synthetic construct
  source 1..20: mol_type = other RNA
agccttgtggatggccccga

SEQ ID NO: 12558 - RNA, 20 nt, synthetic construct
  source 1..20: mol_type = other RNA
agccttttggtcttgtttca

SEQ ID NO: 12559 - RNA, 20 nt, synthetic construct
  source 1..20: mol_type = other RNA
agcgagttcgagactcataa

SEQ ID NO: 12560 - RNA, 20 nt, synthetic construct
  source 1..20: mol_type = other RNA
agcggaatcccatctaaaac

SEQ ID NO: 12561 - RNA, 20 nt, synthetic construct
  source 1..20: mol_type = other RNA
agcgtctggtgaagaattct

SEQ ID NO: 12562 - RNA, 20 nt, synthetic construct
  source 1..20: mol_type = other RNA
agctacaggacaactgccag

SEQ ID NO: 12563 - RNA, 20 nt, synthetic construct
  source 1..20: mol_type = other RNA
agctagcgtctggtgaagaa

SEQ ID NO: 12564 - RNA, 20 nt, synthetic construct
  source 1..20: mol_type = other RNA
agctagtttactggcattat

SEQ ID NO: 12565 - RNA, 20 nt, synthetic construct
  source 1..20: mol_type = other RNA
agctcagagttagaggtctg

SEQ ID NO: 12566 - RNA, 20 nt, synthetic construct
  source 1..20: mol_type = other RNA
agctcagtgttcactaagga

SEQ ID NO: 12567 - RNA, 20 nt, synthetic construct
  source 1..20: mol_type = other RNA
agctcatccagaagtaaatg

SEQ ID NO: 12568 - RNA, 20 nt, synthetic construct
  source 1..20: mol_type = other RNA
agctcatgtgcagtcactgt

SEQ ID NO: 12569 - RNA, 20 nt, synthetic construct
  source 1..20: mol_type = other RNA
agctccagaatggaagccca

SEQ ID NO: 12570 - RNA, 20 nt, synthetic construct
  source 1..20: mol_type = other RNA
agctcctggtggcagctctg

SEQ ID NO: 12571 - RNA, 20 nt, synthetic construct
  source 1..20: mol_type = other RNA
agctctccactgctaccaaa

SEQ ID NO: 12572 - RNA, 20 nt, synthetic construct
  source 1..20: mol_type = other RNA
agctctctcaggcagtgggc

SEQ ID NO: 12573 - RNA, 20 nt, synthetic construct
  source 1..20: mol_type = other RNA
agctctgaacggtatttaaa

SEQ ID NO: 12574 - RNA, 20 nt, synthetic construct
  source 1..20: mol_type = other RNA
agctctggattttcaggccc

SEQ ID NO: 12575 - RNA, 20 nt, synthetic construct
  source 1..20: mol_type = other RNA
agctgaggaacctgtggaag

SEQ ID NO: 12576 - RNA, 20 nt, synthetic construct
  source 1..20: mol_type = other RNA
agctgcaatgctaaatacct

SEQ ID NO: 12577 - RNA, 20 nt, synthetic construct
  source 1..20: mol_type = other RNA
agctgcagtggtgagtgagg

SEQ ID NO: 12578 - RNA, 20 nt, synthetic construct
  source 1..20: mol_type = other RNA
agctgccaccaggagcttgc

SEQ ID NO: 12579 - RNA, 20 nt, synthetic construct
  source 1..20: mol_type = other RNA
agctgcctccaaagccagct

SEQ ID NO: 12580 - RNA, 20 nt, synthetic construct
  source 1..20: mol_type = other RNA
agctgcgcaacttgctcagc

SEQ ID NO: 12581 - RNA, 20 nt, synthetic construct
  source 1..20: mol_type = other RNA
agctgcttctgttctcaata

SEQ ID NO: 12582 - RNA, 20 nt, synthetic construct
  source 1..20: mol_type = other RNA
agctggagcacaagtcacaa

SEQ ID NO: 12583 - RNA, 20 nt, synthetic construct
  source 1..20: mol_type = other RNA
agctggctttggaggcagct

SEQ ID NO: 12584 - RNA, 20 nt, synthetic construct
  source 1..20: mol_type = other RNA
agctggggtgtggctatcaa

SEQ ID NO: 12585 - RNA, 20 nt, synthetic construct
  source 1..20: mol_type = other RNA
agctgtgataatgtgcagca

SEQ ID NO: 12586 - RNA, 20 nt, synthetic construct
  source 1..20: mol_type = other RNA
agctgtgttgttttctgggt

SEQ ID NO: 12587 - RNA, 20 nt, synthetic construct
  source 1..20: mol_type = other RNA
agctgttcttttggttggtg

SEQ ID NO: 12588 - RNA, 20 nt, synthetic construct
  source 1..20: mol_type = other RNA
agcttacacccagaaaacaa

SEQ ID NO: 12589 - RNA, 20 nt, synthetic construct
  source 1..20: mol_type = other RNA
agcttcagattctgaatgag

SEQ ID NO: 12590 - RNA, 20 nt, synthetic construct
  source 1..20: mol_type = other RNA
agcttcagttctacagggat

SEQ ID NO: 12591 - RNA, 20 nt, synthetic construct
  source 1..20: mol_type = other RNA
agcttccttcagaaggaaaa

SEQ ID NO: 12592 - RNA, 20 nt, synthetic construct
  source 1..20: mol_type = other RNA
agcttgcaaattgctgctgg

SEQ ID NO: 12593 - RNA, 20 nt, synthetic construct
  source 1..20: mol_type = other RNA
agcttgcaggtggattctct

SEQ ID NO: 12594 - RNA, 20 nt, synthetic construct
  source 1..20: mol_type = other RNA
agcttgccttgggagccccc

SEQ ID NO: 12595 - RNA, 20 nt, synthetic construct
  source 1..20: mol_type = other RNA
agcttgttgaccagacatat

SEQ ID NO: 12596 - RNA, 20 nt, synthetic construct
  source 1..20: mol_type = other RNA
agcttgttgtgacttctgct

SEQ ID NO: 12597 - RNA, 20 nt, synthetic construct
  source 1..20: mol_type = other RNA
agctttagagcagcaaacaa

SEQ ID NO: 12598 - RNA, 20 nt, synthetic construct
  source 1..20: mol_type = other RNA
agctttgcttgaagtaagca

SEQ ID NO: 12599 - RNA, 20 nt, synthetic construct
  source 1..20: mol_type = other RNA
agctttgtagccagaggttc

SEQ ID NO: 12600 - RNA, 20 nt, synthetic construct
  source 1..20: mol_type = other RNA
agctttgtggttccctggat

SEQ ID NO: 12601 - RNA, 20 nt, synthetic construct
  source 1..20: mol_type = other RNA
agcttttggtaaatggtctg

SEQ ID NO: 12602 - RNA, 20 nt, synthetic construct
  source 1..20: mol_type = other RNA
aggaaaaacatttgcatggt

SEQ ID NO: 12603 - RNA, 20 nt, synthetic construct
  source 1..20: mol_type = other RNA
aggaaaaagcactctgaatg

SEQ ID NO: 12604 - RNA, 20 nt, synthetic construct
  source 1..20: mol_type = other RNA
aggaaaagtctggagtattt

SEQ ID NO: 12605 - RNA, 20 nt, synthetic construct
  source 1..20: mol_type = other RNA
aggaaacaagacccaaaact

SEQ ID NO: 12606 - RNA, 20 nt, synthetic construct
  source 1..20: mol_type = other RNA
aggaaatactccagactttt

SEQ ID NO: 12607 - RNA, 20 nt, synthetic construct
  source 1..20: mol_type = other RNA
aggaacaggtatttagcatt

SEQ ID NO: 12608 - RNA, 20 nt, synthetic construct
  source 1..20: mol_type = other RNA
aggaacctgtggaagaggag

SEQ ID NO: 12609 - RNA, 20 nt, synthetic construct
  source 1..20: mol_type = other RNA
aggaagctgaggaacctgtg

SEQ ID NO: 12610 - RNA, 20 nt, synthetic construct
  source 1..20: mol_type = other RNA
aggaagtacagaatataaat

SEQ ID NO: 12611 - RNA, 20 nt, synthetic construct
  source 1..20: mol_type = other RNA
aggaagtcacactcagaccc

SEQ ID NO: 12612 - RNA, 20 nt, synthetic construct
  source 1..20: mol_type = other RNA
aggaataaaacgcacagtta

SEQ ID NO: 12613 - RNA, 20 nt, synthetic construct
  source 1..20: mol_type = other RNA
aggaatccttagtgaacact

SEQ ID NO: 12614 - RNA, 20 nt, synthetic construct
  source 1..20: mol_type = other RNA
aggaatgacatacagactgc

SEQ ID NO: 12615 - RNA, 20 nt, synthetic construct
  source 1..20: mol_type = other RNA
aggaatggacttagtctgtt

SEQ ID NO: 12616 - RNA, 20 nt, synthetic construct
  source 1..20: mol_type = other RNA
aggacaactcattagtagcc

SEQ ID NO: 12617 - RNA, 20 nt, synthetic construct
  source 1..20: mol_type = other RNA
aggacaactgccagcagttg

SEQ ID NO: 12618 - RNA, 20 nt, synthetic construct
  source 1..20: mol_type = other RNA
aggacactcaaaagcatgct

SEQ ID NO: 12619 - RNA, 20 nt, synthetic construct
  source 1..20: mol_type = other RNA
aggactcacacgactattct

SEQ ID NO: 12620 - RNA, 20 nt, synthetic construct
  source 1..20: mol_type = other RNA
aggactctgggaaggtggtg

SEQ ID NO: 12621 - RNA, 20 nt, synthetic construct
  source 1..20: mol_type = other RNA
aggagatgggcatatctcaa

SEQ ID NO: 12622 - RNA, 20 nt, synthetic construct
  source 1..20: mol_type = other RNA
aggagcaaacacgagatctt

SEQ ID NO: 12623 - RNA, 20 nt, synthetic construct
  source 1..20: mol_type = other RNA
aggagcagaagtcacaacaa

SEQ ID NO: 12624 - RNA, 20 nt, synthetic construct
  source 1..20: mol_type = other RNA
aggagcccagagagagaagg

SEQ ID NO: 12625 - RNA, 20 nt, synthetic construct
  source 1..20: mol_type = other RNA
aggagcttgcaaattgctgc

SEQ ID NO: 12626 - RNA, 20 nt, synthetic construct
  source 1..20: mol_type = other RNA
aggaggagggggagaaagaa

SEQ ID NO: 12627 - RNA, 20 nt, synthetic construct
  source 1..20: mol_type = other RNA
aggaggggaaaagtgctaat

SEQ ID NO: 12628 - RNA, 20 nt, synthetic construct
  source 1..20: mol_type = other RNA
aggagggggagaaagaagca

SEQ ID NO: 12629 - RNA, 20 nt, synthetic construct
  source 1..20: mol_type = other RNA
aggagtatctagtaatttgg

SEQ ID NO: 12630 - RNA, 20 nt, synthetic construct
  source 1..20: mol_type = other RNA
aggagttcaccatgtgtgtg

SEQ ID NO: 12631 - RNA, 20 nt, synthetic construct
  source 1..20: mol_type = other RNA
aggatagaaccaaccatgtt

SEQ ID NO: 12632 - RNA, 20 nt, synthetic construct
  source 1..20: mol_type = other RNA
aggatcattctttggccaga

SEQ ID NO: 12633 - RNA, 20 nt, synthetic construct
  source 1..20: mol_type = other RNA
aggatggattgaattgaagg

SEQ ID NO: 12634 - RNA, 20 nt, synthetic construct
  source 1..20: mol_type = other RNA
aggatgtgtagtctgttctt

SEQ ID NO: 12635 - RNA, 20 nt, synthetic construct
  source 1..20: mol_type = other RNA
aggattccttttctgccact

SEQ ID NO: 12636 - RNA, 20 nt, synthetic construct
  source 1..20: mol_type = other RNA
aggcaagcttacacccagaa

SEQ ID NO: 12637 - RNA, 20 nt, synthetic construct
  source 1..20: mol_type = other RNA
aggcacaggaaaaacatttg

SEQ ID NO: 12638 - RNA, 20 nt, synthetic construct
  source 1..20: mol_type = other RNA
aggcaccaccttcccagagt

SEQ ID NO: 12639 - RNA, 20 nt, synthetic construct
  source 1..20: mol_type = other RNA
aggcagaaactgtagcacca

SEQ ID NO: 12640 - RNA, 20 nt, synthetic construct
  source 1..20: mol_type = other RNA
aggcagcacaaacacaacca

SEQ ID NO: 12641 - RNA, 20 nt, synthetic construct
  source 1..20: mol_type = other RNA
aggcagctcagagttagagg

SEQ ID NO: 12642 - RNA, 20 nt, synthetic construct
  source 1..20: mol_type = other RNA
aggcagtgctaatgcctaat

SEQ ID NO: 12643 - RNA, 20 nt, synthetic construct
  source 1..20: mol_type = other RNA
aggcagtgggcttccattct

SEQ ID NO: 12644 - RNA, 20 nt, synthetic construct
  source 1..20: mol_type = other RNA
aggcatcactgccatcaatt

SEQ ID NO: 12645 - RNA, 20 nt, synthetic construct
  source 1..20: mol_type = other RNA
aggcatgtggcttgcatcca

SEQ ID NO: 12646 - RNA, 20 nt, synthetic construct
  source 1..20: mol_type = other RNA
aggcatgttggaatttccag

SEQ ID NO: 12647 - RNA, 20 nt, synthetic construct
  source 1..20: mol_type = other RNA
aggcattagcactgccttgt

SEQ ID NO: 12648 - RNA, 20 nt, synthetic construct
  source 1..20: mol_type = other RNA
aggccaattaaggtggaacc

SEQ ID NO: 12649 - RNA, 20 nt, synthetic construct
  source 1..20: mol_type = other RNA
aggcccactgcagttatgtg

SEQ ID NO: 12650 - RNA, 20 nt, synthetic construct
  source 1..20: mol_type = other RNA
aggcccctcgttttcaccaa

SEQ ID NO: 12651 - RNA, 20 nt, synthetic construct
  source 1..20: mol_type = other RNA
aggcctcactcaccactgca

SEQ ID NO: 12652 - RNA, 20 nt, synthetic construct
  source 1..20: mol_type = other RNA
aggcctcagaataattgtgt

SEQ ID NO: 12653 - RNA, 20 nt, synthetic construct
  source 1..20: mol_type = other RNA
aggcctgtgatgctgatgat

SEQ ID NO: 12654 - RNA, 20 nt, synthetic construct
  source 1..20: mol_type = other RNA
aggcctttcagaaagcatcg

SEQ ID NO: 12655 - RNA, 20 nt, synthetic construct
  source 1..20: mol_type = other RNA
aggctaatggagaaagacgt

SEQ ID NO: 12656 - RNA, 20 nt, synthetic construct
  source 1..20: mol_type = other RNA
aggctactaatgagttgtcc

SEQ ID NO: 12657 - RNA, 20 nt, synthetic construct
  source 1..20: mol_type = other RNA
aggctcttactctcaaatca

SEQ ID NO: 12658 - RNA, 20 nt, synthetic construct
  source 1..20: mol_type = other RNA
aggcttatgttgcaaaaggt

SEQ ID NO: 12659 - RNA, 20 nt, synthetic construct
  source 1..20: mol_type = other RNA
aggcttcagagactgagcca

SEQ ID NO: 12660 - RNA, 20 nt, synthetic construct
  source 1..20: mol_type = other RNA
aggcttgcttcggggccatc

SEQ ID NO: 12661 - RNA, 20 nt, synthetic construct
  source 1..20: mol_type = other RNA
agggaaccacaaagctagcg

SEQ ID NO: 12662 - RNA, 20 nt, synthetic construct
  source 1..20: mol_type = other RNA
agggaagccagaatagtcgt

SEQ ID NO: 12663 - RNA, 20 nt, synthetic construct
  source 1..20: mol_type = other RNA
agggaagtgaaaatagaggg

SEQ ID NO: 12664 - RNA, 20 nt, synthetic construct
  source 1..20: mol_type = other RNA
agggacaatgactgttccat

SEQ ID NO: 12665 - RNA, 20 nt, synthetic construct
  source 1..20: mol_type = other RNA
agggagatgtgaactctggg

SEQ ID NO: 12666 - RNA, 20 nt, synthetic construct
  source 1..20: mol_type = other RNA
agggaggaagtcacactcag

SEQ ID NO: 12667 - RNA, 20 nt, synthetic construct
  source 1..20: mol_type = other RNA
agggatataaaaatagaaac

SEQ ID NO: 12668 - RNA, 20 nt, synthetic construct
  source 1..20: mol_type = other RNA
agggcaacagactaagtcca

SEQ ID NO: 12669 - RNA, 20 nt, synthetic construct
  source 1..20: mol_type = other RNA
agggcagatcaattccgcac

SEQ ID NO: 12670 - RNA, 20 nt, synthetic construct
  source 1..20: mol_type = other RNA
agggcagccttgtggatggc

SEQ ID NO: 12671 - RNA, 20 nt, synthetic construct
  source 1..20: mol_type = other RNA
agggcagtcccaaggtacag

SEQ ID NO: 12672 - RNA, 20 nt, synthetic construct
  source 1..20: mol_type = other RNA
agggccagtcacagttttga

SEQ ID NO: 12673 - RNA, 20 nt, synthetic construct
  source 1..20: mol_type = other RNA
agggctgcatacatgtgtag

SEQ ID NO: 12674 - RNA, 20 nt, synthetic construct
  source 1..20: mol_type = other RNA
aggggaaaagtgctaattac

SEQ ID NO: 12675 - RNA, 20 nt, synthetic construct
  source 1..20: mol_type = other RNA
aggggaatttctacgattta

SEQ ID NO: 12676 - RNA, 20 nt, synthetic construct
  source 1..20: mol_type = other RNA
aggggccttcaattcaatcc

SEQ ID NO: 12677 - RNA, 20 nt, synthetic construct
  source 1..20: mol_type = other RNA
agggggagaaagaagcaatt

SEQ ID NO: 12678 - RNA, 20 nt, synthetic construct
  source 1..20: mol_type = other RNA
aggggtctgagtgtgacttc

SEQ ID NO: 12679 - RNA, 20 nt, synthetic construct
  source 1..20: mol_type = other RNA
agggtaaacctgaggcacca

SEQ ID NO: 12680 - RNA, 20 nt, synthetic construct
  source 1..20: mol_type = other RNA
agggtattccaagtgtttgc

SEQ ID NO: 12681 - RNA, 20 nt, synthetic construct
  source 1..20: mol_type = other RNA
agggtattccataataactt

SEQ ID NO: 12682 - RNA, 20 nt, synthetic construct
  source 1..20: mol_type = other RNA
agggtcgagacaaggagcaa

SEQ ID NO: 12683 - RNA, 20 nt, synthetic construct
  source 1..20: mol_type = other RNA
agggtttttggaactggaga

SEQ ID NO: 12684 - RNA, 20 nt, synthetic construct
  source 1..20: mol_type = other RNA
aggtaactaagcaagagaat

SEQ ID NO: 12685 - RNA, 20 nt, synthetic construct
  source 1..20: mol_type = other RNA
aggtaagtgccagaaatgta

SEQ ID NO: 12686 - RNA, 20 nt, synthetic construct
  source 1..20: mol_type = other RNA
aggtacagtggaccaacatc

SEQ ID NO: 12687 - RNA, 20 nt, synthetic construct
  source 1..20: mol_type = other RNA
aggtacttgatacataacca

SEQ ID NO: 12688 - RNA, 20 nt, synthetic construct
  source 1..20: mol_type = other RNA
aggtatgcgatgggtgagtg

SEQ ID NO: 12689 - RNA, 20 nt, synthetic construct
  source 1..20: mol_type = other RNA
aggtatttagcattgcagct

SEQ ID NO: 12690 - RNA, 20 nt, synthetic construct
  source 1..20: mol_type = other RNA
aggtcatttgattggagaga

SEQ ID NO: 12691 - RNA, 20 nt, synthetic construct
  source 1..20: mol_type = other RNA
aggtctgtgcggaattgatc

SEQ ID NO: 12692 - RNA, 20 nt, synthetic construct
  source 1..20: mol_type = other RNA
aggtgaaagcagtcaaccaa

SEQ ID NO: 12693 - RNA, 20 nt, synthetic construct
  source 1..20: mol_type = other RNA
aggtgactctataaaattat

SEQ ID NO: 12694 - RNA, 20 nt, synthetic construct
  source 1..20: mol_type = other RNA
aggtgatggtatcaggaatg

SEQ ID NO: 12695 - RNA, 20 nt, synthetic construct
  source 1..20: mol_type = other RNA
aggtgcacttctccaaaaca

SEQ ID NO: 12696 - RNA, 20 nt, synthetic construct
  source 1..20: mol_type = other RNA
aggtgctttcaagaacagga

SEQ ID NO: 12697 - RNA, 20 nt, synthetic construct
  source 1..20: mol_type = other RNA
aggtggaacctggatgcaag

SEQ ID NO: 12698 - RNA, 20 nt, synthetic construct
  source 1..20: mol_type = other RNA
aggtggattctcttgcttag

SEQ ID NO: 12699 - RNA, 20 nt, synthetic construct
  source 1..20: mol_type = other RNA
aggtggcatctcttacagaa

SEQ ID NO: 12700 - RNA, 20 nt, synthetic construct
  source 1..20: mol_type = other RNA
aggtggtgcctcaggtttac

SEQ ID NO: 12701 - RNA, 20 nt, synthetic construct
  source 1..20: mol_type = other RNA
aggtgtatccaataaatttt

SEQ ID NO: 12702 - RNA, 20 nt, synthetic construct
  source 1..20: mol_type = other RNA
aggtgtgagtttgaaaatgg

SEQ ID NO: 12703 - RNA, 20 nt, synthetic construct
  source 1..20: mol_type = other RNA
aggtgtgtattgtttgaaca

SEQ ID NO: 12704 - RNA, 20 nt, synthetic construct
  source 1..20: mol_type = other RNA
aggtgttctgacattggtct

SEQ ID NO: 12705 - RNA, 20 nt, synthetic construct
  source 1..20: mol_type = other RNA
aggttcactaactgtgcgtt

SEQ ID NO: 12706 - RNA, 20 nt, synthetic construct
  source 1..20: mol_type = other RNA
aggttccaccttaattggcc

SEQ ID NO: 12707 - RNA, 20 nt, synthetic construct
  source 1..20: mol_type = other RNA
aggttccagcagcaatttgc

SEQ ID NO: 12708 - RNA, 20 nt, synthetic construct
  source 1..20: mol_type = other RNA
aggttcctcagcttccttca

SEQ ID NO: 12709 - RNA, 20 nt, synthetic construct
  source 1..20: mol_type = other RNA
aggttctgtctggcaaatgg

SEQ ID NO: 12710 - RNA, 20 nt, synthetic construct
  source 1..20: mol_type = other RNA
aggtttaccctctattttca

SEQ ID NO: 12711 - RNA, 20 nt, synthetic construct
  source 1..20: mol_type = other RNA
aggtttcttgttcaaacaat

SEQ ID NO: 12712 - RNA, 20 nt, synthetic construct
  source 1..20: mol_type = other RNA
agtaaaagttgaaatgtcag

SEQ ID NO: 12713 - RNA, 20 nt, synthetic construct
  source 1..20: mol_type = other RNA
agtaaactagctgcaatgct

SEQ ID NO: 12714 - RNA, 20 nt, synthetic construct
  source 1..20: mol_type = other RNA
agtaaatggagacaccaagt

SEQ ID NO: 12715 - RNA, 20 nt, synthetic construct
  source 1..20: mol_type = other RNA
agtaacacaacacttttaag

SEQ ID NO: 12716 - RNA, 20 nt, synthetic construct
  source 1..20: mol_type = other RNA
agtaagagccttatggtcaa

SEQ ID NO: 12717 - RNA, 20 nt, synthetic construct
  source 1..20: mol_type = other RNA
agtaagcaccattcatttca

SEQ ID NO: 12718 - RNA, 20 nt, synthetic construct
  source 1..20: mol_type = other RNA
agtaatacaatgttcttgtc

SEQ ID NO: 12719 - RNA, 20 nt, synthetic construct
  source 1..20: mol_type = other RNA
agtaatttggaaggtgactc

SEQ ID NO: 12720 - RNA, 20 nt, synthetic construct
  source 1..20: mol_type = other RNA
agtacagaatataaatcgta

SEQ ID NO: 12721 - RNA, 20 nt, synthetic construct
  source 1..20: mol_type = other RNA
agtacatttctggcacttac

SEQ ID NO: 12722 - RNA, 20 nt, synthetic construct
  source 1..20: mol_type = other RNA
agtacctttgctgagcaagt

SEQ ID NO: 12723 - RNA, 20 nt, synthetic construct
  source 1..20: mol_type = other RNA
agtagagggtattccaagtg

SEQ ID NO: 12724 - RNA, 20 nt, synthetic construct
  source 1..20: mol_type = other RNA
agtagcctgactgttaatgg

SEQ ID NO: 12725 - RNA, 20 nt, synthetic construct
  source 1..20: mol_type = other RNA
agtatcaacccaatctctcc

SEQ ID NO: 12726 - RNA, 20 nt, synthetic construct
  source 1..20: mol_type = other RNA
agtatctagtaatttggaag

SEQ ID NO: 12727 - RNA, 20 nt, synthetic construct
  source 1..20: mol_type = other RNA
agtattcaaaatcaagcgag

SEQ ID NO: 12728 - RNA, 20 nt, synthetic construct
  source 1..20: mol_type = other RNA
agtatttcctctttattctt

SEQ ID NO: 12729 - RNA, 20 nt, synthetic construct
  source 1..20: mol_type = other RNA
agtcaaaactgtgactggcc

SEQ ID NO: 12730 - RNA, 20 nt, synthetic construct
  source 1..20: mol_type = other RNA
agtcaaccaaatgtctccga

SEQ ID NO: 12731 - RNA, 20 nt, synthetic construct
  source 1..20: mol_type = other RNA
agtcacaaatgtaccaagtt

SEQ ID NO: 12732 - RNA, 20 nt, synthetic construct
  source 1..20: mol_type = other RNA
agtcacaacaagcttcagtt

SEQ ID NO: 12733 - RNA, 20 nt, synthetic construct
  source 1..20: mol_type = other RNA
agtcacactcagacccctcc

SEQ ID NO: 12734 - RNA, 20 nt, synthetic construct
  source 1..20: mol_type = other RNA
agtcacagttttgactagac

SEQ ID NO: 12735 - RNA, 20 nt, synthetic construct
  source 1..20: mol_type = other RNA
agtcaccttccaaattacta

SEQ ID NO: 12736 - RNA, 20 nt, synthetic construct
  source 1..20: mol_type = other RNA
agtcactgtgtggcactaga

SEQ ID NO: 12737 - RNA, 20 nt, synthetic construct
  source 1..20: mol_type = other RNA
agtcagaccatgaaatcaag

SEQ ID NO: 12738 - RNA, 20 nt, synthetic construct
  source 1..20: mol_type = other RNA
agtcagatgcacaggccaat

SEQ ID NO: 12739 - RNA, 20 nt, synthetic construct
  source 1..20: mol_type = other RNA
agtcaggactcacacgacta

SEQ ID NO: 12740 - RNA, 20 nt, synthetic construct
  source 1..20: mol_type = other RNA
agtcaggctactaatgagtt

SEQ ID NO: 12741 - RNA, 20 nt, synthetic construct
  source 1..20: mol_type = other RNA
agtcattgtccctgcagtct

SEQ ID NO: 12742 - RNA, 20 nt, synthetic construct
  source 1..20: mol_type = other RNA
agtccattcctgataccatc

SEQ ID NO: 12743 - RNA, 20 nt, synthetic construct
  source 1..20: mol_type = other RNA
agtcccaaggtacagtggac

SEQ ID NO: 12744 - RNA, 20 nt, synthetic construct
  source 1..20: mol_type = other RNA
agtcccatttggacattatg

SEQ ID NO: 12745 - RNA, 20 nt, synthetic construct
  source 1..20: mol_type = other RNA
agtcctaatccatctacaca

SEQ ID NO: 12746 - RNA, 20 nt, synthetic construct
  source 1..20: mol_type = other RNA
agtcctgactttacacaaga

SEQ ID NO: 12747 - RNA, 20 nt, synthetic construct
  source 1..20: mol_type = other RNA
agtcgtgtgagtcctgactt

SEQ ID NO: 12748 - RNA, 20 nt, synthetic construct
  source 1..20: mol_type = other RNA
agtcgttatttgaccataag

SEQ ID NO: 12749 - RNA, 20 nt, synthetic construct
  source 1..20: mol_type = other RNA
agtctcgaactcgcttgatt

SEQ ID NO: 12750 - RNA, 20 nt, synthetic construct
  source 1..20: mol_type = other RNA
agtctctgaagcctgttgat

SEQ ID NO: 12751 - RNA, 20 nt, synthetic construct
  source 1..20: mol_type = other RNA
agtctggagtatttcctctt

SEQ ID NO: 12752 - RNA, 20 nt, synthetic construct
  source 1..20: mol_type = other RNA
agtctggccaaagaatgatc

SEQ ID NO: 12753 - RNA, 20 nt, synthetic construct
  source 1..20: mol_type = other RNA
agtctgtatgtcattcctgt

SEQ ID NO: 12754 - RNA, 20 nt, synthetic construct
  source 1..20: mol_type = other RNA
agtctgttctttattctctg

SEQ ID NO: 12755 - RNA, 20 nt, synthetic construct
  source 1..20: mol_type = other RNA
agtctgttgccctcaacatg

SEQ ID NO: 12756 - RNA, 20 nt, synthetic construct
  source 1..20: mol_type = other RNA
agtcttgacaggtgtatcca

SEQ ID NO: 12757 - RNA, 20 nt, synthetic construct
  source 1..20: mol_type = other RNA
agtcttgccatagtcagatg

SEQ ID NO: 12758 - RNA, 20 nt, synthetic construct
  source 1..20: mol_type = other RNA
agtgaaaatagagggtaaac

SEQ ID NO: 12759 - RNA, 20 nt, synthetic construct
  source 1..20: mol_type = other RNA
agtgaacactgagctttgct

SEQ ID NO: 12760 - RNA, 20 nt, synthetic construct
  source 1..20: mol_type = other RNA
agtgaaccttctctctctgg

SEQ ID NO: 12761 - RNA, 20 nt, synthetic construct
  source 1..20: mol_type = other RNA
agtgactgcacatgagcttt

SEQ ID NO: 12762 - RNA, 20 nt, synthetic construct
  source 1..20: mol_type = other RNA
agtgaggcctgtgatgctga

SEQ ID NO: 12763 - RNA, 20 nt, synthetic construct
  source 1..20: mol_type = other RNA
agtgataagaaagaatctgt

SEQ ID NO: 12764 - RNA, 20 nt, synthetic construct
  source 1..20: mol_type = other RNA
agtgatctcacaggacaact

SEQ ID NO: 12765 - RNA, 20 nt, synthetic construct
  source 1..20: mol_type = other RNA
agtgatgcctcattacgttt

SEQ ID NO: 12766 - RNA, 20 nt, synthetic construct
  source 1..20: mol_type = other RNA
agtgcacctggtgtgagggt

SEQ ID NO: 12767 - RNA, 20 nt, synthetic construct
  source 1..20: mol_type = other RNA
agtgcatgcaaaatacaggt

SEQ ID NO: 12768 - RNA, 20 nt, synthetic construct
  source 1..20: mol_type = other RNA
agtgccacacagtgactgca

SEQ ID NO: 12769 - RNA, 20 nt, synthetic construct
  source 1..20: mol_type = other RNA
agtgccacttggtgtctcca

SEQ ID NO: 12770 - RNA, 20 nt, synthetic construct
  source 1..20: mol_type = other RNA
agtgccagaaatgtactgag

SEQ ID NO: 12771 - RNA, 20 nt, synthetic construct
  source 1..20: mol_type = other RNA
agtgctaatgcctaatggtg

SEQ ID NO: 12772 - RNA, 20 nt, synthetic construct
  source 1..20: mol_type = other RNA
agtgctaattaccatgacaa

SEQ ID NO: 12773 - RNA, 20 nt, synthetic construct
  source 1..20: mol_type = other RNA
agtgctgtgttgggggcaca

SEQ ID NO: 12774 - RNA, 20 nt, synthetic construct
  source 1..20: mol_type = other RNA
agtgctgtttcaacactggg

SEQ ID NO: 12775 - RNA, 20 nt, synthetic construct
  source 1..20: mol_type = other RNA
agtgctttttccttctgaag

SEQ ID NO: 12776 - RNA, 20 nt, synthetic construct
  source 1..20: mol_type = other RNA
agtggaagaatgttttcatg

SEQ ID NO: 12777 - RNA, 20 nt, synthetic construct
  source 1..20: mol_type = other RNA
agtggaccaacatctccagt

SEQ ID NO: 12778 - RNA, 20 nt, synthetic construct
  source 1..20: mol_type = other RNA
agtggagagctacaggacaa

SEQ ID NO: 12779 - RNA, 20 nt, synthetic construct
  source 1..20: mol_type = other RNA
agtggcactctttcaaaagt

SEQ ID NO: 12780 - RNA, 20 nt, synthetic construct
  source 1..20: mol_type = other RNA
agtggcagaaaaggaatcct

SEQ ID NO: 12781 - RNA, 20 nt, synthetic construct
  source 1..20: mol_type = other RNA
agtgggcctgaaaatccaga

SEQ ID NO: 12782 - RNA, 20 nt, synthetic construct
  source 1..20: mol_type = other RNA
agtgggcttccattctggag

SEQ ID NO: 12783 - RNA, 20 nt, synthetic construct
  source 1..20: mol_type = other RNA
agtggtgagtgaggcctgtg

SEQ ID NO: 12784 - RNA, 20 nt, synthetic construct
  source 1..20: mol_type = other RNA
agtggtggtgttcttctaaa

SEQ ID NO: 12785 - RNA, 20 nt, synthetic construct
  source 1..20: mol_type = other RNA
agtggtttgtctagtcaaaa

SEQ ID NO: 12786 - RNA, 20 nt, synthetic construct
  source 1..20: mol_type = other RNA
agtgtattgtttggaggtca

SEQ ID NO: 12787 - RNA, 20 nt, synthetic construct
  source 1..20: mol_type = other RNA
agtgtccttctggggagggg

SEQ ID NO: 12788 - RNA, 20 nt, synthetic construct
  source 1..20: mol_type = other RNA
agtgtgacttcctccctggt

SEQ ID NO: 12789 - RNA, 20 nt, synthetic construct
  source 1..20: mol_type = other RNA
agtgttcactaaggattcct

SEQ ID NO: 12790 - RNA, 20 nt, synthetic construct
  source 1..20: mol_type = other RNA
agtgttgaaacagcacttga

SEQ ID NO: 12791 - RNA, 20 nt, synthetic construct
  source 1..20: mol_type = other RNA
agtgttgtgttactttggtt

SEQ ID NO: 12792 - RNA, 20 nt, synthetic construct
  source 1..20: mol_type = other RNA
agtgtttgcaaaatggagga

SEQ ID NO: 12793 - RNA, 20 nt, synthetic construct
  source 1..20: mol_type = other RNA
agtgttttttccaggagttc

SEQ ID NO: 12794 - RNA, 20 nt, synthetic construct
  source 1..20: mol_type = other RNA
agttaaagatttcaccagtt

SEQ ID NO: 12795 - RNA, 20 nt, synthetic construct
  source 1..20: mol_type = other RNA
agttacctttttccatgttt

SEQ ID NO: 12796 - RNA, 20 nt, synthetic construct
  source 1..20: mol_type = other RNA
agttacgtctttctccatta

SEQ ID NO: 12797 - RNA, 20 nt, synthetic construct
  source 1..20: mol_type = other RNA
agttagaggtctgtgcggaa

SEQ ID NO: 12798 - RNA, 20 nt, synthetic construct
  source 1..20: mol_type = other RNA
agttagtgaaccttctctct

SEQ ID NO: 12799 - RNA, 20 nt, synthetic construct
  source 1..20: mol_type = other RNA
agttatgtgttgaaaaactg

SEQ ID NO: 12800 - RNA, 20 nt, synthetic construct
  source 1..20: mol_type = other RNA
agttattatggaataccctg

SEQ ID NO: 12801 - RNA, 20 nt, synthetic construct
  source 1..20: mol_type = other RNA
agttcacatctccctcaaaa

SEQ ID NO: 12802 - RNA, 20 nt, synthetic construct
  source 1..20: mol_type = other RNA
agttcaccatgtgtgtgttc

SEQ ID NO: 12803 - RNA, 20 nt, synthetic construct
  source 1..20: mol_type = other RNA
agttcaggatgtgtagtctg

SEQ ID NO: 12804 - RNA, 20 nt, synthetic construct
  source 1..20: mol_type = other RNA
agttccaaaaaccctcacac

SEQ ID NO: 12805 - RNA, 20 nt, synthetic construct
  source 1..20: mol_type = other RNA
agttcgagactcataatgtc

SEQ ID NO: 12806 - RNA, 20 nt, synthetic construct
  source 1..20: mol_type = other RNA
agttctacagggatataaaa

SEQ ID NO: 12807 - RNA, 20 nt, synthetic construct
  source 1..20: mol_type = other RNA
agttctgcagcagtggtttg

SEQ ID NO: 12808 - RNA, 20 nt, synthetic construct
  source 1..20: mol_type = other RNA
agttctgtagcccaagaaaa

SEQ ID NO: 12809 - RNA, 20 nt, synthetic construct
  source 1..20: mol_type = other RNA
agttgaaatgaatcaagggc

SEQ ID NO: 12810 - RNA, 20 nt, synthetic construct
  source 1..20: mol_type = other RNA
agttgaaatgtcagggccag

SEQ ID NO: 12811 - RNA, 20 nt, synthetic construct
  source 1..20: mol_type = other RNA
agttgatgagaaacaaagag

SEQ ID NO: 12812 - RNA, 20 nt, synthetic construct
  source 1..20: mol_type = other RNA
agttgcgcagcttgttgacc

SEQ ID NO: 12813 - RNA, 20 nt, synthetic construct
  source 1..20: mol_type = other RNA
agttgtcctgtagctctcca

SEQ ID NO: 12814 - RNA, 20 nt, synthetic construct
  source 1..20: mol_type = other RNA
agttgtcctgtgagatcact

SEQ ID NO: 12815 - RNA, 20 nt, synthetic construct
  source 1..20: mol_type = other RNA
agttgttctggtttctgaaa

SEQ ID NO: 12816 - RNA, 20 nt, synthetic construct
  source 1..20: mol_type = other RNA
agttgtttgctgctctaaag

SEQ ID NO: 12817 - RNA, 20 nt, synthetic construct
  source 1..20: mol_type = other RNA
agtttactggcattatcagc

SEQ ID NO: 12818 - RNA, 20 nt, synthetic construct
  source 1..20: mol_type = other RNA
agtttcacgccaagtcgtta

SEQ ID NO: 12819 - RNA, 20 nt, synthetic construct
  source 1..20: mol_type = other RNA
agtttcagagaataaagaac

SEQ ID NO: 12820 - RNA, 20 nt, synthetic construct
  source 1..20: mol_type = other RNA
agtttctgcctcttccgtgg

SEQ ID NO: 12821 - RNA, 20 nt, synthetic construct
  source 1..20: mol_type = other RNA
agtttgaaaatggctcagtc

SEQ ID NO: 12822 - RNA, 20 nt, synthetic construct
  source 1..20: mol_type = other RNA
agtttgggaatctgctcttt

SEQ ID NO: 12823 - RNA, 20 nt, synthetic construct
  source 1..20: mol_type = other RNA
agtttggggttgctgtgttt

SEQ ID NO: 12824 - RNA, 20 nt, synthetic construct
  source 1..20: mol_type = other RNA
agttttagaagaacaccacc

SEQ ID NO: 12825 - RNA, 20 nt, synthetic construct
  source 1..20: mol_type = other RNA
agttttgactagacaaacca

SEQ ID NO: 12826 - RNA, 20 nt, synthetic construct
  source 1..20: mol_type = other RNA
agttttgggtcttgtttcct

SEQ ID NO: 12827 - RNA, 20 nt, synthetic construct
  source 1..20: mol_type = other RNA
agtttttcaacacataactg

SEQ ID NO: 12828 - RNA, 20 nt, synthetic construct
  source 1..20: mol_type = other RNA
agtttttcagtttgggaatc

SEQ ID NO: 12829 - RNA, 20 nt, synthetic construct
  source 1..20: mol_type = other RNA
agtttttgagatatgcccat

SEQ ID NO: 12830 - RNA, 20 nt, synthetic construct
  source 1..20: mol_type = other RNA
ataaaacgcacagttagtga

SEQ ID NO: 12831 - RNA, 20 nt, synthetic construct
  source 1..20: mol_type = other RNA
ataaacaggcagcacaaaca

SEQ ID NO: 12832 - RNA, 20 nt, synthetic construct
  source 1..20: mol_type = other RNA
ataaacgccatgtgtctcag

SEQ ID NO: 12833 - RNA, 20 nt, synthetic construct
  source 1..20: mol_type = other RNA
ataaagaacagactacacat

SEQ ID NO: 12834 - RNA, 20 nt, synthetic construct
  source 1..20: mol_type = other RNA
ataaagaggaaatactccag

SEQ ID NO: 12835 - RNA, 20 nt, synthetic construct
  source 1..20: mol_type = other RNA
ataaatcgtagaaattcccc

SEQ ID NO: 12836 - RNA, 20 nt, synthetic construct
  source 1..20: mol_type = other RNA
ataaatgccattaacagtca

SEQ ID NO: 12837 - RNA, 20 nt, synthetic construct
  source 1..20: mol_type = other RNA
ataacatccagggaaccaca

SEQ ID NO: 12838 - RNA, 20 nt, synthetic construct
  source 1..20: mol_type = other RNA
ataaccatgcaaatgttttt

SEQ ID NO: 12839 - RNA, 20 nt, synthetic construct
  source 1..20: mol_type = other RNA
ataacccaccaatttttggt

SEQ ID NO: 12840 - RNA, 20 nt, synthetic construct
  source 1..20: mol_type = other RNA
ataacgacttggcgtgaaac

SEQ ID NO: 12841 - RNA, 20 nt, synthetic construct
  source 1..20: mol_type = other RNA
ataactgcagtgggcctgaa

SEQ ID NO: 12842 - RNA, 20 nt, synthetic construct
  source 1..20: mol_type = other RNA
ataacttttgaaagagtgcc

SEQ ID NO: 12843 - RNA, 20 nt, synthetic construct
  source 1..20: mol_type = other RNA
ataagaaagaatctgtgagt

SEQ ID NO: 12844 - RNA, 20 nt, synthetic construct
  source 1..20: mol_type = other RNA
ataagcctcataaacaggca

SEQ ID NO: 12845 - RNA, 20 nt, synthetic construct
  source 1..20: mol_type = other RNA
ataaggctcttactctcaaa

SEQ ID NO: 12846 - RNA, 20 nt, synthetic construct
  source 1..20: mol_type = other RNA
ataaggggaatttctacgat

SEQ ID NO: 12847 - RNA, 20 nt, synthetic construct
  source 1..20: mol_type = other RNA
ataagtttttcagtttggga

SEQ ID NO: 12848 - RNA, 20 nt, synthetic construct
  source 1..20: mol_type = other RNA
ataatattgagacagtgttt

SEQ ID NO: 12849 - RNA, 20 nt, synthetic construct
  source 1..20: mol_type = other RNA
ataatgccagtaaactagct

SEQ ID NO: 12850 - RNA, 20 nt, synthetic construct
  source 1..20: mol_type = other RNA
ataatgtccaaatgggactg

SEQ ID NO: 12851 - RNA, 20 nt, synthetic construct
  source 1..20: mol_type = other RNA
ataatgtgatcccaaagcaa

SEQ ID NO: 12852 - RNA, 20 nt, synthetic construct
  source 1..20: mol_type = other RNA
ataatgtgcagcaaaagagc

SEQ ID NO: 12853 - RNA, 20 nt, synthetic construct
  source 1..20: mol_type = other RNA
ataattgtgtgaacaggaat

SEQ ID NO: 12854 - RNA, 20 nt, synthetic construct
  source 1..20: mol_type = other RNA
ataattttatagagtcacct

SEQ ID NO: 12855 - RNA, 20 nt, synthetic construct
  source 1..20: mol_type = other RNA
atacaatgttcttgtcatgg

SEQ ID NO: 12856 - RNA, 20 nt, synthetic construct
  source 1..20: mol_type = other RNA
atacacacctagtttcagag

SEQ ID NO: 12857 - RNA, 20 nt, synthetic construct
  source 1..20: mol_type = other RNA
atacacctgtcaagactcaa

SEQ ID NO: 12858 - RNA, 20 nt, synthetic construct
  source 1..20: mol_type = other RNA
atacactggaaattccaaca

SEQ ID NO: 12859 - RNA, 20 nt, synthetic construct
  source 1..20: mol_type = other RNA
atacagactgcagggacaat

SEQ ID NO: 12860 - RNA, 20 nt, synthetic construct
  source 1..20: mol_type = other RNA
atacaggcatgtggcttgca

SEQ ID NO: 12861 - RNA, 20 nt, synthetic construct
  source 1..20: mol_type = other RNA
atacagggtattccataata

SEQ ID NO: 12862 - RNA, 20 nt, synthetic construct
  source 1..20: mol_type = other RNA
atacaggtttcttgttcaaa

SEQ ID NO: 12863 - RNA, 20 nt, synthetic construct
  source 1..20: mol_type = other RNA
atacataaccatgcaaatgt

SEQ ID NO: 12864 - RNA, 20 nt, synthetic construct
  source 1..20: mol_type = other RNA
atacatgtgtagatggatta

SEQ ID NO: 12865 - RNA, 20 nt, synthetic construct
  source 1..20: mol_type = other RNA
ataccatcacctcccatttg

SEQ ID NO: 12866 - RNA, 20 nt, synthetic construct
  source 1..20: mol_type = other RNA
ataccctctactttcttgtg

SEQ ID NO: 12867 - RNA, 20 nt, synthetic construct
  source 1..20: mol_type = other RNA
ataccctgtatgaagggaag

SEQ ID NO: 12868 - RNA, 20 nt, synthetic construct
  source 1..20: mol_type = other RNA
ataccgttcagagctgccac

SEQ ID NO: 12869 - RNA, 20 nt, synthetic construct
  source 1..20: mol_type = other RNA
atacctcagggcagatcaat

SEQ ID NO: 12870 - RNA, 20 nt, synthetic construct
  source 1..20: mol_type = other RNA
atacctgttcctttcagaaa

SEQ ID NO: 12871 - RNA, 20 nt, synthetic construct
  source 1..20: mol_type = other RNA
atactccagacttttcctca

SEQ ID NO: 12872 - RNA, 20 nt, synthetic construct
  source 1..20: mol_type = other RNA
atactgaagaattgatggca

SEQ ID NO: 12873 - RNA, 20 nt, synthetic construct
  source 1..20: mol_type = other RNA
atactgattttcaccatgaa

SEQ ID NO: 12874 - RNA, 20 nt, synthetic construct
  source 1..20: mol_type = other RNA
atagaaaccaagatatgtct

SEQ ID NO: 12875 - RNA, 20 nt, synthetic construct
  source 1..20: mol_type = other RNA
atagaaccaaccatgttgag

SEQ ID NO: 12876 - RNA, 20 nt, synthetic construct
  source 1..20: mol_type = other RNA
atagagggtaaacctgaggc

SEQ ID NO: 12877 - RNA, 20 nt, synthetic construct
  source 1..20: mol_type = other RNA
atagagtcaccttccaaatt

SEQ ID NO: 12878 - RNA, 20 nt, synthetic construct
  source 1..20: mol_type = other RNA
atagccacaccccagcttta

SEQ ID NO: 12879 - RNA, 20 nt, synthetic construct
  source 1..20: mol_type = other RNA
ataggagtatctagtaattt

SEQ ID NO: 12880 - RNA, 20 nt, synthetic construct
  source 1..20: mol_type = other RNA
atagtcagaccatgaaatca

SEQ ID NO: 12881 - RNA, 20 nt, synthetic construct
  source 1..20: mol_type = other RNA
atagtcagatgcacaggcca

SEQ ID NO: 12882 - RNA, 20 nt, synthetic construct
  source 1..20: mol_type = other RNA
atagtcgtgtgagtcctgac

SEQ ID NO: 12883 - RNA, 20 nt, synthetic construct
  source 1..20: mol_type = other RNA
atagtgctgtgttgggggca

SEQ ID NO: 12884 - RNA, 20 nt, synthetic construct
  source 1..20: mol_type = other RNA
atataaatcgtagaaattcc

SEQ ID NO: 12885 - RNA, 20 nt, synthetic construct
  source 1..20: mol_type = other RNA
atatccctgtagaactgaag

SEQ ID NO: 12886 - RNA, 20 nt, synthetic construct
  source 1..20: mol_type = other RNA
atatgatttcccatcttgca

SEQ ID NO: 12887 - RNA, 20 nt, synthetic construct
  source 1..20: mol_type = other RNA
atatgcccatctcctgcaga

SEQ ID NO: 12888 - RNA, 20 nt, synthetic construct
  source 1..20: mol_type = other RNA
atatgtctggtcaacaagct

SEQ ID NO: 12889 - RNA, 20 nt, synthetic construct
  source 1..20: mol_type = other RNA
atattatccagattgtgttt

SEQ ID NO: 12890 - RNA, 20 nt, synthetic construct
  source 1..20: mol_type = other RNA
atattctgtacttcctccag

SEQ ID NO: 12891 - RNA, 20 nt, synthetic construct
  source 1..20: mol_type = other RNA
atattgagacagtgtttttt

SEQ ID NO: 12892 - RNA, 20 nt, synthetic construct
  source 1..20: mol_type = other RNA
atattgagtcttgacaggtg

SEQ ID NO: 12893 - RNA, 20 nt, synthetic construct
  source 1..20: mol_type = other RNA
atattgcatgtgatgcaagt

SEQ ID NO: 12894 - RNA, 20 nt, synthetic construct
  source 1..20: mol_type = other RNA
atcaaatgacctccaaacaa

SEQ ID NO: 12895 - RNA, 20 nt, synthetic construct
  source 1..20: mol_type = other RNA
atcaacaggcttcagagact

SEQ ID NO: 12896 - RNA, 20 nt, synthetic construct
  source 1..20: mol_type = other RNA
atcaacccaatctctccaat

SEQ ID NO: 12897 - RNA, 20 nt, synthetic construct
  source 1..20: mol_type = other RNA
atcaactgctggcagttgtc

SEQ ID NO: 12898 - RNA, 20 nt, synthetic construct
  source 1..20: mol_type = other RNA
atcaagaaattgaaacaaga

SEQ ID NO: 12899 - RNA, 20 nt, synthetic construct
  source 1..20: mol_type = other RNA
atcaagcgagttcgagactc

SEQ ID NO: 12900 - RNA, 20 nt, synthetic construct
  source 1..20: mol_type = other RNA
atcaagggcagtcccaaggt

SEQ ID NO: 12901 - RNA, 20 nt, synthetic construct
  source 1..20: mol_type = other RNA
atcaagtacctttgctgagc

SEQ ID NO: 12902 - RNA, 20 nt, synthetic construct
  source 1..20: mol_type = other RNA
atcaagtgcatgcaaaatac

SEQ ID NO: 12903 - RNA, 20 nt, synthetic construct
  source 1..20: mol_type = other RNA
atcaagttctgcagcagtgg

SEQ ID NO: 12904 - RNA, 20 nt, synthetic construct
  source 1..20: mol_type = other RNA
atcaattccgcacagacctc

SEQ ID NO: 12905 - RNA, 20 nt, synthetic construct
  source 1..20: mol_type = other RNA
atcaattcttcagtatcaac

SEQ ID NO: 12906 - RNA, 20 nt, synthetic construct
  source 1..20: mol_type = other RNA
atcacaattgcttctttctc

SEQ ID NO: 12907 - RNA, 20 nt, synthetic construct
  source 1..20: mol_type = other RNA
atcacagaagcaagtaaaag

SEQ ID NO: 12908 - RNA, 20 nt, synthetic construct
  source 1..20: mol_type = other RNA
atcacagcttgcaggtggat

SEQ ID NO: 12909 - RNA, 20 nt, synthetic construct
  source 1..20: mol_type = other RNA
atcacaggcctcactcacca

SEQ ID NO: 12910 - RNA, 20 nt, synthetic construct
  source 1..20: mol_type = other RNA
atcacatgcaatattttcca

SEQ ID NO: 12911 - RNA, 20 nt, synthetic construct
  source 1..20: mol_type = other RNA
atcacctcccatttgccaga

SEQ ID NO: 12912 - RNA, 20 nt, synthetic construct
  source 1..20: mol_type = other RNA
atcactcaaatcggagacat

SEQ ID NO: 12913 - RNA, 20 nt, synthetic construct
  source 1..20: mol_type = other RNA
atcactcacccatcgcatac

SEQ ID NO: 12914 - RNA, 20 nt, synthetic construct
  source 1..20: mol_type = other RNA
atcactgccatcaattcttc

SEQ ID NO: 12915 - RNA, 20 nt, synthetic construct
  source 1..20: mol_type = other RNA
atcagcaaagagaaggatca

SEQ ID NO: 12916 - RNA, 20 nt, synthetic construct
  source 1..20: mol_type = other RNA
atcagcatcacaggcctcac

SEQ ID NO: 12917 - RNA, 20 nt, synthetic construct
  source 1..20: mol_type = other RNA
atcagcatcatcagcatcac

SEQ ID NO: 12918 - RNA, 20 nt, synthetic construct
  source 1..20: mol_type = other RNA
atcaggaatggacttagtct

SEQ ID NO: 12919 - RNA, 20 nt, synthetic construct
  source 1..20: mol_type = other RNA
atcaggcttgcttcggggcc

SEQ ID NO: 12920 - RNA, 20 nt, synthetic construct
  source 1..20: mol_type = other RNA
atcagtattcaaaatcaagc

SEQ ID NO: 12921 - RNA, 20 nt, synthetic construct
  source 1..20: mol_type = other RNA
atcagtttttgagatatgcc

SEQ ID NO: 12922 - RNA, 20 nt, synthetic construct
  source 1..20: mol_type = other RNA
atcatattgagtcttgacag

SEQ ID NO: 12923 - RNA, 20 nt, synthetic construct
  source 1..20: mol_type = other RNA
atcatcagcatcacaggcct

SEQ ID NO: 12924 - RNA, 20 nt, synthetic construct
  source 1..20: mol_type = other RNA
atcattctttggccagacta

SEQ ID NO: 12925 - RNA, 20 nt, synthetic construct
  source 1..20: mol_type = other RNA
atcattgagaccatggagca

SEQ ID NO: 12926 - RNA, 20 nt, synthetic construct
  source 1..20: mol_type = other RNA
atcattgttgctttgggggt

SEQ ID NO: 12927 - RNA, 20 nt, synthetic construct
  source 1..20: mol_type = other RNA
atccacctgcaagctgtgat

SEQ ID NO: 12928 - RNA, 20 nt, synthetic construct
  source 1..20: mol_type = other RNA
atccagaagtaaatggagac

SEQ ID NO: 12929 - RNA, 20 nt, synthetic construct
  source 1..20: mol_type = other RNA
atccagagcttcagattctg

SEQ ID NO: 12930 - RNA, 20 nt, synthetic construct
  source 1..20: mol_type = other RNA
atccagattgtgtttccatt

SEQ ID NO: 12931 - RNA, 20 nt, synthetic construct
  source 1..20: mol_type = other RNA
atccagggaaccacaaagct

SEQ ID NO: 12932 - RNA, 20 nt, synthetic construct
  source 1..20: mol_type = other RNA
atccaggtgaaagcagtcaa

SEQ ID NO: 12933 - RNA, 20 nt, synthetic construct
  source 1..20: mol_type = other RNA
atccaggttccaccttaatt

SEQ ID NO: 12934 - RNA, 20 nt, synthetic construct
  source 1..20: mol_type = other RNA
atccatcctggtttcagata

SEQ ID NO: 12935 - RNA, 20 nt, synthetic construct
  source 1..20: mol_type = other RNA
atccatctacacatgtatgc

SEQ ID NO: 12936 - RNA, 20 nt, synthetic construct
  source 1..20: mol_type = other RNA
atcccaaagcaagatcttct

SEQ ID NO: 12937 - RNA, 20 nt, synthetic construct
  source 1..20: mol_type = other RNA
atcccagagttcacatctcc

SEQ ID NO: 12938 - RNA, 20 nt, synthetic construct
  source 1..20: mol_type = other RNA
atcccatctaaaacgtaatg

SEQ ID NO: 12939 - RNA, 20 nt, synthetic construct
  source 1..20: mol_type = other RNA
atccctgtagaactgaagct

SEQ ID NO: 12940 - RNA, 20 nt, synthetic construct
  source 1..20: mol_type = other RNA
atcctgaactttttgcagga

SEQ ID NO: 12941 - RNA, 20 nt, synthetic construct
  source 1..20: mol_type = other RNA
atcctggtttcagatagtgc

SEQ ID NO: 12942 - RNA, 20 nt, synthetic construct
  source 1..20: mol_type = other RNA
atcctgttccatcaggcttg

SEQ ID NO: 12943 - RNA, 20 nt, synthetic construct
  source 1..20: mol_type = other RNA
atccttagtgaacactgagc

SEQ ID NO: 12944 - RNA, 20 nt, synthetic construct
  source 1..20: mol_type = other RNA
atccttctctttgctgatca

SEQ ID NO: 12945 - RNA, 20 nt, synthetic construct
  source 1..20: mol_type = other RNA
atcgcatacctcagggcaga

SEQ ID NO: 12946 - RNA, 20 nt, synthetic construct
  source 1..20: mol_type = other RNA
atcggagaagggctgcatac

SEQ ID NO: 12947 - RNA, 20 nt, synthetic construct
  source 1..20: mol_type = other RNA
atcggagacatttggttgac

SEQ ID NO: 12948 - RNA, 20 nt, synthetic construct
  source 1..20: mol_type = other RNA
atcgtagaaattccccttat

SEQ ID NO: 12949 - RNA, 20 nt, synthetic construct
  source 1..20: mol_type = other RNA
atctaaaacgtaatgaggca

SEQ ID NO: 12950 - RNA, 20 nt, synthetic construct
  source 1..20: mol_type = other RNA
atctacacatgtatgcagcc

SEQ ID NO: 12951 - RNA, 20 nt, synthetic construct
  source 1..20: mol_type = other RNA
atctagtaatttggaaggtg

SEQ ID NO: 12952 - RNA, 20 nt, synthetic construct
  source 1..20: mol_type = other RNA
atctagtgccacacagtgac

SEQ ID NO: 12953 - RNA, 20 nt, synthetic construct
  source 1..20: mol_type = other RNA
atctcaaaaactgatttttg

SEQ ID NO: 12954 - RNA, 20 nt, synthetic construct
  source 1..20: mol_type = other RNA
atctcacaggacaactcatt

SEQ ID NO: 12955 - RNA, 20 nt, synthetic construct
  source 1..20: mol_type = other RNA
atctcacataaatgccatta

SEQ ID NO: 12956 - RNA, 20 nt, synthetic construct
  source 1..20: mol_type = other RNA
atctccagttccaaaaaccc

SEQ ID NO: 12957 - RNA, 20 nt, synthetic construct
  source 1..20: mol_type = other RNA
atctccctcaaaaccagcaa

SEQ ID NO: 12958 - RNA, 20 nt, synthetic construct
  source 1..20: mol_type = other RNA
atctcctgcagaaaataaca

SEQ ID NO: 12959 - RNA, 20 nt, synthetic construct
  source 1..20: mol_type = other RNA
atctcgtgtttgctccttgt

SEQ ID NO: 12960 - RNA, 20 nt, synthetic construct
  source 1..20: mol_type = other RNA
atctctccaatcaaatgacc

SEQ ID NO: 12961 - RNA, 20 nt, synthetic construct
  source 1..20: mol_type = other RNA
atctcttacagaagcaagaa

SEQ ID NO: 12962 - RNA, 20 nt, synthetic construct
  source 1..20: mol_type = other RNA
atctcttgctctttgtttct

SEQ ID NO: 12963 - RNA, 20 nt, synthetic construct
  source 1..20: mol_type = other RNA
atctgaaaccaggatggatt

SEQ ID NO: 12964 - RNA, 20 nt, synthetic construct
  source 1..20: mol_type = other RNA
atctgaagcagtttcacgcc

SEQ ID NO: 12965 - RNA, 20 nt, synthetic construct
  source 1..20: mol_type = other RNA
atctgaagctctggattttc

SEQ ID NO: 12966 - RNA, 20 nt, synthetic construct
  source 1..20: mol_type = other RNA
atctgaaggagcccagagag

SEQ ID NO: 12967 - RNA, 20 nt, synthetic construct
  source 1..20: mol_type = other RNA
atctgactatggcaagactc

SEQ ID NO: 12968 - RNA, 20 nt, synthetic construct
  source 1..20: mol_type = other RNA
atctgcaagatgggaaatca

SEQ ID NO: 12969 - RNA, 20 nt, synthetic construct
  source 1..20: mol_type = other RNA
atctgccctgaggtatgcga

SEQ ID NO: 12970 - RNA, 20 nt, synthetic construct
  source 1..20: mol_type = other RNA
atctgctctttgttgaaaat

SEQ ID NO: 12971 - RNA, 20 nt, synthetic construct
  source 1..20: mol_type = other RNA
atctggataatattgagaca

SEQ ID NO: 12972 - RNA, 20 nt, synthetic construct
  source 1..20: mol_type = other RNA
atctgtgagttctgtagccc

SEQ ID NO: 12973 - RNA, 20 nt, synthetic construct
  source 1..20: mol_type = other RNA
atcttcttcacaggtgcttt

SEQ ID NO: 12974 - RNA, 20 nt, synthetic construct
  source 1..20: mol_type = other RNA
atcttgcagatgtgtaggta

SEQ ID NO: 12975 - RNA, 20 nt, synthetic construct
  source 1..20: mol_type = other RNA
atcttgctttgggatcacat

SEQ ID NO: 12976 - RNA, 20 nt, synthetic construct
  source 1..20: mol_type = other RNA
atcttgtgcccccaacacag

SEQ ID NO: 12977 - RNA, 20 nt, synthetic construct
  source 1..20: mol_type = other RNA
atctttaactgcattttctt

SEQ ID NO: 12978 - RNA, 20 nt, synthetic construct
  source 1..20: mol_type = other RNA
atgaaaacattcttccactt

SEQ ID NO: 12979 - RNA, 20 nt, synthetic construct
  source 1..20: mol_type = other RNA
atgaaatcaagtgcatgcaa

SEQ ID NO: 12980 - RNA, 20 nt, synthetic construct
  source 1..20: mol_type = other RNA
atgaaatctagtgccacaca

SEQ ID NO: 12981 - RNA, 20 nt, synthetic construct
  source 1..20: mol_type = other RNA
atgaaatgaatggtgcttac

SEQ ID NO: 12982 - RNA, 20 nt, synthetic construct
  source 1..20: mol_type = other RNA
atgaagggaagccagaatag

SEQ ID NO: 12983 - RNA, 20 nt, synthetic construct
  source 1..20: mol_type = other RNA
atgaatcaagggcagtccca

SEQ ID NO: 12984 - RNA, 20 nt, synthetic construct
  source 1..20: mol_type = other RNA
atgaatggtgcttacttcaa

SEQ ID NO: 12985 - RNA, 20 nt, synthetic construct
  source 1..20: mol_type = other RNA
atgacaagaacattgtatta

SEQ ID NO: 12986 - RNA, 20 nt, synthetic construct
  source 1..20: mol_type = other RNA
atgacatacagactgcaggg

SEQ ID NO: 12987 - RNA, 20 nt, synthetic construct
  source 1..20: mol_type = other RNA
atgacctccaaacaatacac

SEQ ID NO: 12988 - RNA, 20 nt, synthetic construct
  source 1..20: mol_type = other RNA
atgactgttccattgtgttc

SEQ ID NO: 12989 - RNA, 20 nt, synthetic construct
  source 1..20: mol_type = other RNA
atgagaaacaaagagcaaga

SEQ ID NO: 12990 - RNA, 20 nt, synthetic construct
  source 1..20: mol_type = other RNA
atgagcaggaggggaaaagt

SEQ ID NO: 12991 - RNA, 20 nt, synthetic construct
  source 1..20: mol_type = other RNA
atgagctctctcaggcagtg

SEQ ID NO: 12992 - RNA, 20 nt, synthetic construct
  source 1..20: mol_type = other RNA
atgagcttttggtaaatggt

SEQ ID NO: 12993 - RNA, 20 nt, synthetic construct
  source 1..20: mol_type = other RNA
atgaggcatcactgccatca

SEQ ID NO: 12994 - RNA, 20 nt, synthetic construct
  source 1..20: mol_type = other RNA
atgaggcttatgttgcaaaa

SEQ ID NO: 12995 - RNA, 20 nt, synthetic construct
  source 1..20: mol_type = other RNA
atgagtctcgaactcgcttg

SEQ ID NO: 12996 - RNA, 20 nt, synthetic construct
  source 1..20: mol_type = other RNA
atgagttgtcctgtgagatc

SEQ ID NO: 12997 - RNA, 20 nt, synthetic construct
  source 1..20: mol_type = other RNA
atgatcagcaaagagaagga

SEQ ID NO: 12998 - RNA, 20 nt, synthetic construct
  source 1..20: mol_type = other RNA
atgatccttctctttgctga

SEQ ID NO: 12999 - RNA, 20 nt, synthetic construct
  source 1..20: mol_type = other RNA
atgatgctcttttgctgcac

SEQ ID NO: 13000 - RNA, 20 nt, synthetic construct
  source 1..20: mol_type = other RNA
atgatgctgataatgccagt

SEQ ID NO: 13001 - RNA, 20 nt, synthetic construct
  source 1..20: mol_type = other RNA
atgatttcccatcttgcaga

SEQ ID NO: 13002 - RNA, 20 nt, synthetic construct
  source 1..20: mol_type = other RNA
atgcaaaatacaggtttctt

SEQ ID NO: 13003 - RNA, 20 nt, synthetic construct
  source 1..20: mol_type = other RNA
atgcaaatgtttttcctgtg

SEQ ID NO: 13004 - RNA, 20 nt, synthetic construct
  source 1..20: mol_type = other RNA
atgcaagccacatgcctgta

SEQ ID NO: 13005 - RNA, 20 nt, synthetic construct
  source 1..20: mol_type = other RNA
atgcaagttttgggtcttgt

SEQ ID NO: 13006 - RNA, 20 nt, synthetic construct
  source 1..20: mol_type = other RNA
atgcacacagcaccaccaga

SEQ ID NO: 13007 - RNA, 20 nt, synthetic construct
  source 1..20: mol_type = other RNA
atgcacaggccaattaaggt

SEQ ID NO: 13008 - RNA, 20 nt, synthetic construct
  source 1..20: mol_type = other RNA
atgcacttgatttcatggtc

SEQ ID NO: 13009 - RNA, 20 nt, synthetic construct
  source 1..20: mol_type = other RNA
atgcagcccttctccgatgc

SEQ ID NO: 13010 - RNA, 20 nt, synthetic construct
  source 1..20: mol_type = other RNA
atgcagttaaagatttcacc

SEQ ID NO: 13011 - RNA, 20 nt, synthetic construct
  source 1..20: mol_type = other RNA
atgccaccttagagcagcat

SEQ ID NO: 13012 - RNA, 20 nt, synthetic construct
  source 1..20: mol_type = other RNA
atgccagtaaactagctgca

SEQ ID NO: 13013 - RNA, 20 nt, synthetic construct
  source 1..20: mol_type = other RNA
atgccattaacagtcaggct

SEQ ID NO: 13014 - RNA, 20 nt, synthetic construct
  source 1..20: mol_type = other RNA
atgcccatctcctgcagaaa

SEQ ID NO: 13015 - RNA, 20 nt, synthetic construct
  source 1..20: mol_type = other RNA
atgcctaatggtgctacagt

SEQ ID NO: 13016 - RNA, 20 nt, synthetic construct
  source 1..20: mol_type = other RNA
atgcctcattacgttttaga

SEQ ID NO: 13017 - RNA, 20 nt, synthetic construct
  source 1..20: mol_type = other RNA
atgcctggggggctcccaag

SEQ ID NO: 13018 - RNA, 20 nt, synthetic construct
  source 1..20: mol_type = other RNA
atgcctgtatgcacacagca

SEQ ID NO: 13019 - RNA, 20 nt, synthetic construct
  source 1..20: mol_type = other RNA
atgcgatgggtgagtgatct

SEQ ID NO: 13020 - RNA, 20 nt, synthetic construct
  source 1..20: mol_type = other RNA
atgctaaatacctgttcctt

SEQ ID NO: 13021 - RNA, 20 nt, synthetic construct
  source 1..20: mol_type = other RNA
atgctcttttgctgcacatt

SEQ ID NO: 13022 - RNA, 20 nt, synthetic construct
  source 1..20: mol_type = other RNA
atgctgataatgccagtaaa

SEQ ID NO: 13023 - RNA, 20 nt, synthetic construct
  source 1..20: mol_type = other RNA
atgctgatgatgctgataat

SEQ ID NO: 13024 - RNA, 20 nt, synthetic construct
  source 1..20: mol_type = other RNA
atgctgctccatggtctcaa

SEQ ID NO: 13025 - RNA, 20 nt, synthetic construct
  source 1..20: mol_type = other RNA
atgctgctctaaggtggcat

SEQ ID NO: 13026 - RNA, 20 nt, synthetic construct
  source 1..20: mol_type = other RNA
atgcttgaggtgttctgaca

SEQ ID NO: 13027 - RNA, 20 nt, synthetic construct
  source 1..20: mol_type = other RNA
atgctttctgaaaggcctca

SEQ ID NO: 13028 - RNA, 20 nt, synthetic construct
  source 1..20: mol_type = other RNA
atgcttttgagtgtccttct

SEQ ID NO: 13029 - RNA, 20 nt, synthetic construct
  source 1..20: mol_type = other RNA
atggaaaaaggtaactaagc

SEQ ID NO: 13030 - RNA, 20 nt, synthetic construct
  source 1..20: mol_type = other RNA
atggaaacacaatctggata

SEQ ID NO: 13031 - RNA, 20 nt, synthetic construct
  source 1..20: mol_type = other RNA
atggaacaggatagaaccaa

SEQ ID NO: 13032 - RNA, 20 nt, synthetic construct
  source 1..20: mol_type = other RNA
atggaacagtcattgtccct

SEQ ID NO: 13033 - RNA, 20 nt, synthetic construct
  source 1..20: mol_type = other RNA
atggaagcccactgcctgag

SEQ ID NO: 13034 - RNA, 20 nt, synthetic construct
  source 1..20: mol_type = other RNA
atggaataccctgtatgaag

SEQ ID NO: 13035 - RNA, 20 nt, synthetic construct
  source 1..20: mol_type = other RNA
atggacttagtctgttgccc

SEQ ID NO: 13036 - RNA, 20 nt, synthetic construct
  source 1..20: mol_type = other RNA
atggagaaagacgtaacttc

SEQ ID NO: 13037 - RNA, 20 nt, synthetic construct
  source 1..20: mol_type = other RNA
atggagacaccaagtggcac

SEQ ID NO: 13038 - RNA, 20 nt, synthetic construct
  source 1..20: mol_type = other RNA
atggagcagcatctgaagca

SEQ ID NO: 13039 - RNA, 20 nt, synthetic construct
  source 1..20: mol_type = other RNA
atggaggaataaaacgcaca

SEQ ID NO: 13040 - RNA, 20 nt, synthetic construct
  source 1..20: mol_type = other RNA
atggattaggactctgggaa

SEQ ID NO: 13041 - RNA, 20 nt, synthetic construct
  source 1..20: mol_type = other RNA
atggattgaattgaaggccc

SEQ ID NO: 13042 - RNA, 20 nt, synthetic construct
  source 1..20: mol_type = other RNA
atggcaagactcagtttggg

SEQ ID NO: 13043 - RNA, 20 nt, synthetic construct
  source 1..20: mol_type = other RNA
atggcagtgatgcctcatta

SEQ ID NO: 13044 - RNA, 20 nt, synthetic construct
  source 1..20: mol_type = other RNA
atggcatttatgtgagatgt

SEQ ID NO: 13045 - RNA, 20 nt, synthetic construct
  source 1..20: mol_type = other RNA
atggccccgaagcaagcctg

SEQ ID NO: 13046 - RNA, 20 nt, synthetic construct
  source 1..20: mol_type = other RNA
atggctcagtctctgaagcc

SEQ ID NO: 13047 - RNA, 20 nt, synthetic construct
  source 1..20: mol_type = other RNA
atgggaaatcatattgagtc

SEQ ID NO: 13048 - RNA, 20 nt, synthetic construct
  source 1..20: mol_type = other RNA
atgggactggaggaagtaca

SEQ ID NO: 13049 - RNA, 20 nt, synthetic construct
  source 1..20: mol_type = other RNA
atgggaggtgatggtatcag

SEQ ID NO: 13050 - RNA, 20 nt, synthetic construct
  source 1..20: mol_type = other RNA
atgggattccgcttggtgaa

SEQ ID NO: 13051 - RNA, 20 nt, synthetic construct
  source 1..20: mol_type = other RNA
atgggcatatctcaaaaact

SEQ ID NO: 13052 - RNA, 20 nt, synthetic construct
  source 1..20: mol_type = other RNA
atgggtgagtgatctcacag

SEQ ID NO: 13053 - RNA, 20 nt, synthetic construct
  source 1..20: mol_type = other RNA
atggtaattagcacttttcc

SEQ ID NO: 13054 - RNA, 20 nt, synthetic construct
  source 1..20: mol_type = other RNA
atggtatcaggaatggactt

SEQ ID NO: 13055 - RNA, 20 nt, synthetic construct
  source 1..20: mol_type = other RNA
atggtcaaataacgacttgg

SEQ ID NO: 13056 - RNA, 20 nt, synthetic construct
  source 1..20: mol_type = other RNA
atggtctcaatgatgctctt

SEQ ID NO: 13057 - RNA, 20 nt, synthetic construct
  source 1..20: mol_type = other RNA
atggtctgactataagggga

SEQ ID NO: 13058 - RNA, 20 nt, synthetic construct
  source 1..20: mol_type = other RNA
atggtctgttttggagaagt

SEQ ID NO: 13059 - RNA, 20 nt, synthetic construct
  source 1..20: mol_type = other RNA
atggtgaaaatcagtattca

SEQ ID NO: 13060 - RNA, 20 nt, synthetic construct
  source 1..20: mol_type = other RNA
atggtgaactcctggaaaaa

SEQ ID NO: 13061 - RNA, 20 nt, synthetic construct
  source 1..20: mol_type = other RNA
atggtgctacagtttctgcc

SEQ ID NO: 13062 - RNA, 20 nt, synthetic construct
  source 1..20: mol_type = other RNA
atggtgcttacttcaagcaa

SEQ ID NO: 13063 - RNA, 20 nt, synthetic construct
  source 1..20: mol_type = other RNA
atggtggagttttagaagaa

SEQ ID NO: 13064 - RNA, 20 nt, synthetic construct
  source 1..20: mol_type = other RNA
atggtggtggtggtgtggta

SEQ ID NO: 13065 - RNA, 20 nt, synthetic construct
  source 1..20: mol_type = other RNA
atggttatgtatcaagtacc

SEQ ID NO: 13066 - RNA, 20 nt, synthetic construct
  source 1..20: mol_type = other RNA
atggttggttctatcctgtt

SEQ ID NO: 13067 - RNA, 20 nt, synthetic construct
  source 1..20: mol_type = other RNA
atggttgtgtttgtgctgcc

SEQ ID NO: 13068 - RNA, 20 nt, synthetic construct
  source 1..20: mol_type = other RNA
atgtaccaagttgaaatgaa

SEQ ID NO: 13069 - RNA, 20 nt, synthetic construct
  source 1..20: mol_type = other RNA
atgtatcaagtacctttgct

SEQ ID NO: 13070 - RNA, 20 nt, synthetic construct
  source 1..20: mol_type = other RNA
atgtatgcagcccttctccg

SEQ ID NO: 13071 - RNA, 20 nt, synthetic construct
  source 1..20: mol_type = other RNA
atgtcagaacacctcaagca

SEQ ID NO: 13072 - RNA, 20 nt, synthetic construct
  source 1..20: mol_type = other RNA
atgtcagggccagtcacagt

SEQ ID NO: 13073 - RNA, 20 nt, synthetic construct
  source 1..20: mol_type = other RNA
atgtcattcctgttcacaca

SEQ ID NO: 13074 - RNA, 20 nt, synthetic construct
  source 1..20: mol_type = other RNA
atgtccaaatgggactggag

SEQ ID NO: 13075 - RNA, 20 nt, synthetic construct
  source 1..20: mol_type = other RNA
atgtccccagtgttgaaaca

SEQ ID NO: 13076 - RNA, 20 nt, synthetic construct
  source 1..20: mol_type = other RNA
atgtctccgatttgagtgat

SEQ ID NO: 13077 - RNA, 20 nt, synthetic construct
  source 1..20: mol_type = other RNA
atgtctggtcaacaagctgc

SEQ ID NO: 13078 - RNA, 20 nt, synthetic construct
  source 1..20: mol_type = other RNA
atgtgaactctgggatggtt

SEQ ID NO: 13079 - RNA, 20 nt, synthetic construct
  source 1..20: mol_type = other RNA
atgtgagatgtggttttctg

SEQ ID NO: 13080 - RNA, 20 nt, synthetic construct
  source 1..20: mol_type = other RNA
atgtgatcccaaagcaagat

SEQ ID NO: 13081 - RNA, 20 nt, synthetic construct
  source 1..20: mol_type = other RNA
atgtgatgcaagttttgggt

SEQ ID NO: 13082 - RNA, 20 nt, synthetic construct
  source 1..20: mol_type = other RNA
atgtgcagcaaaagagcatc

SEQ ID NO: 13083 - RNA, 20 nt, synthetic construct
  source 1..20: mol_type = other RNA
atgtgcagtcactgtgtggc

SEQ ID NO: 13084 - RNA, 20 nt, synthetic construct
  source 1..20: mol_type = other RNA
atgtggcttgcatccaggtt

SEQ ID NO: 13085 - RNA, 20 nt, synthetic construct
  source 1..20: mol_type = other RNA
atgtggttttctgcaccgca

SEQ ID NO: 13086 - RNA, 20 nt, synthetic construct
  source 1..20: mol_type = other RNA
atgtgtagatggattaggac

SEQ ID NO: 13087 - RNA, 20 nt, synthetic construct
  source 1..20: mol_type = other RNA
atgtgtaggtaagtgccaga

SEQ ID NO: 13088 - RNA, 20 nt, synthetic construct
  source 1..20: mol_type = other RNA
atgtgtagtctgttctttat

SEQ ID NO: 13089 - RNA, 20 nt, synthetic construct
  source 1..20: mol_type = other RNA
atgtgtctcagtacatttct

SEQ ID NO: 13090 - RNA, 20 nt, synthetic construct
  source 1..20: mol_type = other RNA
atgtgtgtgttccacggaag

SEQ ID NO: 13091 - RNA, 20 nt, synthetic construct
  source 1..20: mol_type = other RNA
atgtgttgaaaaactggtga

SEQ ID NO: 13092 - RNA, 20 nt, synthetic construct
  source 1..20: mol_type = other RNA
atgttattttctgcaggaga

SEQ ID NO: 13093 - RNA, 20 nt, synthetic construct
  source 1..20: mol_type = other RNA
atgttcttgtcatggtaatt

SEQ ID NO: 13094 - RNA, 20 nt, synthetic construct
  source 1..20: mol_type = other RNA
atgttgagggcaacagacta

SEQ ID NO: 13095 - RNA, 20 nt, synthetic construct
  source 1..20: mol_type = other RNA
atgttgcaaaaggtgtgagt

SEQ ID NO: 13096 - RNA, 20 nt, synthetic construct
  source 1..20: mol_type = other RNA
atgttggaatttccagtgta

SEQ ID NO: 13097 - RNA, 20 nt, synthetic construct
  source 1..20: mol_type = other RNA
atgttggtccactgtacctt

SEQ ID NO: 13098 - RNA, 20 nt, synthetic construct
  source 1..20: mol_type = other RNA
atgttttcatggtgaaaatc

SEQ ID NO: 13099 - RNA, 20 nt, synthetic construct
  source 1..20: mol_type = other RNA
atgttttgttttctggtggt

SEQ ID NO: 13100 - RNA, 20 nt, synthetic construct
  source 1..20: mol_type = other RNA
atgtttttcctgtgcctgac

SEQ ID NO: 13101 - RNA, 20 nt, synthetic construct
  source 1..20: mol_type = other RNA
attaacagtcaggctactaa

SEQ ID NO: 13102 - RNA, 20 nt, synthetic construct
  source 1..20: mol_type = other RNA
attaaggtggaacctggatg

SEQ ID NO: 13103 - RNA, 20 nt, synthetic construct
  source 1..20: mol_type = other RNA
attaccatgacaagaacatt

SEQ ID NO: 13104 - RNA, 20 nt, synthetic construct
  source 1..20: mol_type = other RNA
attacgttttagatgggatt

SEQ ID NO: 13105 - RNA, 20 nt, synthetic construct
  source 1..20: mol_type = other RNA
attactagatactcctataa

SEQ ID NO: 13106 - RNA, 20 nt, synthetic construct
  source 1..20: mol_type = other RNA
attacttaaaaacaaggcag

SEQ ID NO: 13107 - RNA, 20 nt, synthetic construct
  source 1..20: mol_type = other RNA
attagcactgccttgttttt

SEQ ID NO: 13108 - RNA, 20 nt, synthetic construct
  source 1..20: mol_type = other RNA
attagcacttttcccctcct

SEQ ID NO: 13109 - RNA, 20 nt, synthetic construct
  source 1..20: mol_type = other RNA
attagccttttggtcttgtt

SEQ ID NO: 13110 - RNA, 20 nt, synthetic construct
  source 1..20: mol_type = other RNA
attaggactctgggaaggtg

SEQ ID NO: 13111 - RNA, 20 nt, synthetic construct
  source 1..20: mol_type = other RNA
attaggcattagcactgcct

SEQ ID NO: 13112 - RNA, 20 nt, synthetic construct
  source 1..20: mol_type = other RNA
attagtagcctgactgttaa

SEQ ID NO: 13113 - RNA, 20 nt, synthetic construct
  source 1..20: mol_type = other RNA
attatcacagcttgcaggtg

SEQ ID NO: 13114 - RNA, 20 nt, synthetic construct
  source 1..20: mol_type = other RNA
attatcagcatcatcagcat

SEQ ID NO: 13115 - RNA, 20 nt, synthetic construct
  source 1..20: mol_type = other RNA
attatccagattgtgtttcc

SEQ ID NO: 13116 - RNA, 20 nt, synthetic construct
  source 1..20: mol_type = other RNA
attatgagtctcgaactcgc

SEQ ID NO: 13117 - RNA, 20 nt, synthetic construct
  source 1..20: mol_type = other RNA
attatggaataccctgtatg

SEQ ID NO: 13118 - RNA, 20 nt, synthetic construct
  source 1..20: mol_type = other RNA
attattctgaggcctttcag

SEQ ID NO: 13119 - RNA, 20 nt, synthetic construct
  source 1..20: mol_type = other RNA
attattgagaacagaagcag

SEQ ID NO: 13120 - RNA, 20 nt, synthetic construct
  source 1..20: mol_type = other RNA
attcaaaatcaagcgagttc

SEQ ID NO: 13121 - RNA, 20 nt, synthetic construct
  source 1..20: mol_type = other RNA
attcaagtgctgtttcaaca

SEQ ID NO: 13122 - RNA, 20 nt, synthetic construct
  source 1..20: mol_type = other RNA
attcaatccatcctggtttc

SEQ ID NO: 13123 - RNA, 20 nt, synthetic construct
  source 1..20: mol_type = other RNA
attcagaatctgaagctctg

SEQ ID NO: 13124 - RNA, 20 nt, synthetic construct
  source 1..20: mol_type = other RNA
attcagagtgctttttcctt

SEQ ID NO: 13125 - RNA, 20 nt, synthetic construct
  source 1..20: mol_type = other RNA
attcatttcaacttggtaca

SEQ ID NO: 13126 - RNA, 20 nt, synthetic construct
  source 1..20: mol_type = other RNA
attccaacatgcctgggggg

SEQ ID NO: 13127 - RNA, 20 nt, synthetic construct
  source 1..20: mol_type = other RNA
attccaagtgtttgcaaaat

SEQ ID NO: 13128 - RNA, 20 nt, synthetic construct
  source 1..20: mol_type = other RNA
attcccaaactgaaaaactt

SEQ ID NO: 13129 - RNA, 20 nt, synthetic construct
  source 1..20: mol_type = other RNA
attccccttatagtcagacc

SEQ ID NO: 13130 - RNA, 20 nt, synthetic construct
  source 1..20: mol_type = other RNA
attccgcacagacctctaac

SEQ ID NO: 13131 - RNA, 20 nt, synthetic construct
  source 1..20: mol_type = other RNA
attccgcttggtgaaaacga

SEQ ID NO: 13132 - RNA, 20 nt, synthetic construct
  source 1..20: mol_type = other RNA
attcctccattttgcaaaca

SEQ ID NO: 13133 - RNA, 20 nt, synthetic construct
  source 1..20: mol_type = other RNA
attcctgataccatcacctc

SEQ ID NO: 13134 - RNA, 20 nt, synthetic construct
  source 1..20: mol_type = other RNA
attcctgttcacacaattat

SEQ ID NO: 13135 - RNA, 20 nt, synthetic construct
  source 1..20: mol_type = other RNA
attccttttctgccactacc

SEQ ID NO: 13136 - RNA, 20 nt, synthetic construct
  source 1..20: mol_type = other RNA
attctctgaaactaggtgtg

SEQ ID NO: 13137 - RNA, 20 nt, synthetic construct
  source 1..20: mol_type = other RNA
attctcttgcttagttacct

SEQ ID NO: 13138 - RNA, 20 nt, synthetic construct
  source 1..20: mol_type = other RNA
attctgaagggtcgagacaa

SEQ ID NO: 13139 - RNA, 20 nt, synthetic construct
  source 1..20: mol_type = other RNA
attctgaatgagcaggaggg

SEQ ID NO: 13140 - RNA, 20 nt, synthetic construct
  source 1..20: mol_type = other RNA
attctgaggcctttcagaaa

SEQ ID NO: 13141 - RNA, 20 nt, synthetic construct
  source 1..20: mol_type = other RNA
attctggagctttgtagcca

SEQ ID NO: 13142 - RNA, 20 nt, synthetic construct
  source 1..20: mol_type = other RNA
attctggcttcccttcatac

SEQ ID NO: 13143 - RNA, 20 nt, synthetic construct
  source 1..20: mol_type = other RNA
attctgtacttcctccagtc

SEQ ID NO: 13144 - RNA, 20 nt, synthetic construct
  source 1..20: mol_type = other RNA
attctgttcaggttccagca

SEQ ID NO: 13145 - RNA, 20 nt, synthetic construct
  source 1..20: mol_type = other RNA
attcttcaccagacgctagc

SEQ ID NO: 13146 - RNA, 20 nt, synthetic construct
  source 1..20: mol_type = other RNA
attcttcagtatcaacccaa

SEQ ID NO: 13147 - RNA, 20 nt, synthetic construct
  source 1..20: mol_type = other RNA
attcttccactttagtctgg

SEQ ID NO: 13148 - RNA, 20 nt, synthetic construct
  source 1..20: mol_type = other RNA
attctttcttatcactcaaa

SEQ ID NO: 13149 - RNA, 20 nt, synthetic construct
  source 1..20: mol_type = other RNA
attctttggccagactaaag

SEQ ID NO: 13150 - RNA, 20 nt, synthetic construct
  source 1..20: mol_type = other RNA
attgaaacaagaccaaaagg

SEQ ID NO: 13151 - RNA, 20 nt, synthetic construct
  source 1..20: mol_type = other RNA
attgaaggcccctcgttttc

SEQ ID NO: 13152 - RNA, 20 nt, synthetic construct
  source 1..20: mol_type = other RNA
attgaattgaaggcccctcg

SEQ ID NO: 13153 - RNA, 20 nt, synthetic construct
  source 1..20: mol_type = other RNA
attgagaacagaagcagctg

SEQ ID NO: 13154 - RNA, 20 nt, synthetic construct
  source 1..20: mol_type = other RNA
attgagacagtgttttttcc

SEQ ID NO: 13155 - RNA, 20 nt, synthetic construct
  source 1..20: mol_type = other RNA
attgagaccatggagcagca

SEQ ID NO: 13156 - RNA, 20 nt, synthetic construct
  source 1..20: mol_type = other RNA
attgagtcttgacaggtgta

SEQ ID NO: 13157 - RNA, 20 nt, synthetic construct
  source 1..20: mol_type = other RNA
attgatctgccctgaggtat

SEQ ID NO: 13158 - RNA, 20 nt, synthetic construct
  source 1..20: mol_type = other RNA
attgatggcagtgatgcctc

SEQ ID NO: 13159 - RNA, 20 nt, synthetic construct
  source 1..20: mol_type = other RNA
attgcagctagtttactggc

SEQ ID NO: 13160 - RNA, 20 nt, synthetic construct
  source 1..20: mol_type = other RNA
attgcatgtgatgcaagttt

SEQ ID NO: 13161 - RNA, 20 nt, synthetic construct
  source 1..20: mol_type = other RNA
attgcggtgcagaaaaccac

SEQ ID NO: 13162 - RNA, 20 nt, synthetic construct
  source 1..20: mol_type = other RNA
attgctgctggaacctgaac

SEQ ID NO: 13163 - RNA, 20 nt, synthetic construct
  source 1..20: mol_type = other RNA
attgcttctttctccccctc

SEQ ID NO: 13164 - RNA, 20 nt, synthetic construct
  source 1..20: mol_type = other RNA
attggagagattgggttgat

SEQ ID NO: 13165 - RNA, 20 nt, synthetic construct
  source 1..20: mol_type = other RNA
attggatacacctgtcaaga

SEQ ID NO: 13166 - RNA, 20 nt, synthetic construct
  source 1..20: mol_type = other RNA
attggcctgtgcatctgact

SEQ ID NO: 13167 - RNA, 20 nt, synthetic construct
  source 1..20: mol_type = other RNA
attgggttgatactgaagaa

SEQ ID NO: 13168 - RNA, 20 nt, synthetic construct
  source 1..20: mol_type = other RNA
attggtcttgttttctcaga

SEQ ID NO: 13169 - RNA, 20 nt, synthetic construct
  source 1..20: mol_type = other RNA
attggtgggttatgcttgag

SEQ ID NO: 13170 - RNA, 20 nt, synthetic construct
  source 1..20: mol_type = other RNA
attgtccctgcagtctgtat

SEQ ID NO: 13171 - RNA, 20 nt, synthetic construct
  source 1..20: mol_type = other RNA
attgtgatggtggtggtggt

SEQ ID NO: 13172 - RNA, 20 nt, synthetic construct
  source 1..20: mol_type = other RNA
attgtgtgaacaggaatgac

SEQ ID NO: 13173 - RNA, 20 nt, synthetic construct
  source 1..20: mol_type = other RNA
attgtgttctgagaaaacaa

SEQ ID NO: 13174 - RNA, 20 nt, synthetic construct
  source 1..20: mol_type = other RNA
attgtgtttccattgcggtg

SEQ ID NO: 13175 - RNA, 20 nt, synthetic construct
  source 1..20: mol_type = other RNA
attgttgctttgggggtgag

SEQ ID NO: 13176 - RNA, 20 nt, synthetic construct
  source 1..20: mol_type = other RNA
attgtttgaacaagaaacct

SEQ ID NO: 13177 - RNA, 20 nt, synthetic construct
  source 1..20: mol_type = other RNA
attgtttggaggtcatttga

SEQ ID NO: 13178 - RNA, 20 nt, synthetic construct
  source 1..20: mol_type = other RNA
atttaccaaaagctcatgtg

SEQ ID NO: 13179 - RNA, 20 nt, synthetic construct
  source 1..20: mol_type = other RNA
atttacttctggatgagctc

SEQ ID NO: 13180 - RNA, 20 nt, synthetic construct
  source 1..20: mol_type = other RNA
atttagcattgcagctagtt

SEQ ID NO: 13181 - RNA, 20 nt, synthetic construct
  source 1..20: mol_type = other RNA
atttatattctgtacttcct

SEQ ID NO: 13182 - RNA, 20 nt, synthetic construct
  source 1..20: mol_type = other RNA
atttatgtgagatgtggttt

SEQ ID NO: 13183 - RNA, 20 nt, synthetic construct
  source 1..20: mol_type = other RNA
atttattggatacacctgtc

SEQ ID NO: 13184 - RNA, 20 nt, synthetic construct
  source 1..20: mol_type = other RNA
atttcaacttggtacatttg

SEQ ID NO: 13185 - RNA, 20 nt, synthetic construct
  source 1..20: mol_type = other RNA
atttcaacttttacttgctt

SEQ ID NO: 13186 - RNA, 20 nt, synthetic construct
  source 1..20: mol_type = other RNA
atttcaccagtttttcaaca

SEQ ID NO: 13187 - RNA, 20 nt, synthetic construct
  source 1..20: mol_type = other RNA
atttcatggtctgactataa

SEQ ID NO: 13188 - RNA, 20 nt, synthetic construct
  source 1..20: mol_type = other RNA
atttcattttcaacaaagag

SEQ ID NO: 13189 - RNA, 20 nt, synthetic construct
  source 1..20: mol_type = other RNA
atttccagtgtattgtttgg

SEQ ID NO: 13190 - RNA, 20 nt, synthetic construct
  source 1..20: mol_type = other RNA
atttcccatcttgcagatgt

SEQ ID NO: 13191 - RNA, 20 nt, synthetic construct
  source 1..20: mol_type = other RNA
atttctggcacttacctaca

SEQ ID NO: 13192 - RNA, 20 nt, synthetic construct
  source 1..20: mol_type = other RNA
atttcttgatctgaaggagc

SEQ ID NO: 13193 - RNA, 20 nt, synthetic construct
  source 1..20: mol_type = other RNA
atttctttcttggcttaccc

SEQ ID NO: 13194 - RNA, 20 nt, synthetic construct
  source 1..20: mol_type = other RNA
atttgaccataaggctctta

SEQ ID NO: 13195 - RNA, 20 nt, synthetic construct
  source 1..20: mol_type = other RNA
atttgagagtaagagcctta

SEQ ID NO: 13196 - RNA, 20 nt, synthetic construct
  source 1..20: mol_type = other RNA
atttgagtgataagaaagaa

SEQ ID NO: 13197 - RNA, 20 nt, synthetic construct
  source 1..20: mol_type = other RNA
atttgattggagagattggg

SEQ ID NO: 13198 - RNA, 20 nt, synthetic construct
  source 1..20: mol_type = other RNA
atttgcaagctcctggtggc

SEQ ID NO: 13199 - RNA, 20 nt, synthetic construct
  source 1..20: mol_type = other RNA
atttgcatggttatgtatca

SEQ ID NO: 13200 - RNA, 20 nt, synthetic construct
  source 1..20: mol_type = other RNA
atttgccagacagaacctct

SEQ ID NO: 13201 - RNA, 20 nt, synthetic construct
  source 1..20: mol_type = other RNA
atttggaaaatattgcatgt

SEQ ID NO: 13202 - RNA, 20 nt, synthetic construct
  source 1..20: mol_type = other RNA
atttggaaggtgactctata

SEQ ID NO: 13203 - RNA, 20 nt, synthetic construct
  source 1..20: mol_type = other RNA
atttggacattatgagtctc

SEQ ID NO: 13204 - RNA, 20 nt, synthetic construct
  source 1..20: mol_type = other RNA
atttggttgactgctttcac

SEQ ID NO: 13205 - RNA, 20 nt, synthetic construct
  source 1..20: mol_type = other RNA
atttgtaatttttgctgctg

SEQ ID NO: 13206 - RNA, 20 nt, synthetic construct
  source 1..20: mol_type = other RNA
atttgtgacttgtgctccag

SEQ ID NO: 13207 - RNA, 20 nt, synthetic construct
  source 1..20: mol_type = other RNA
attttatagagtcaccttcc

SEQ ID NO: 13208 - RNA, 20 nt, synthetic construct
  source 1..20: mol_type = other RNA
attttcaaactcacaccttt

SEQ ID NO: 13209 - RNA, 20 nt, synthetic construct
  source 1..20: mol_type = other RNA
attttcaacaaagagcagat

SEQ ID NO: 13210 - RNA, 20 nt, synthetic construct
  source 1..20: mol_type = other RNA
attttcaccatgaaaacatt

SEQ ID NO: 13211 - RNA, 20 nt, synthetic construct
  source 1..20: mol_type = other RNA
attttcacttcccttaaaag

SEQ ID NO: 13212 - RNA, 20 nt, synthetic construct
  source 1..20: mol_type = other RNA
attttcaggcccactgcagt

SEQ ID NO: 13213 - RNA, 20 nt, synthetic construct
  source 1..20: mol_type = other RNA
attttccaaataatgtgatc

SEQ ID NO: 13214 - RNA, 20 nt, synthetic construct
  source 1..20: mol_type = other RNA
attttctgcaggagatgggc

SEQ ID NO: 13215 - RNA, 20 nt, synthetic construct
  source 1..20: mol_type = other RNA
attttcttgggctacagaac

SEQ ID NO: 13216 - RNA, 20 nt, synthetic construct
  source 1..20: mol_type = other RNA
attttgcaaacacttggaat

SEQ ID NO: 13217 - RNA, 20 nt, synthetic construct
  source 1..20: mol_type = other RNA
attttgcatgcacttgattt

SEQ ID NO: 13218 - RNA, 20 nt, synthetic construct
  source 1..20: mol_type = other RNA
atttttatatccctgtagaa

SEQ ID NO: 13219 - RNA, 20 nt, synthetic construct
  source 1..20: mol_type = other RNA
atttttgctgctgttgctgg

SEQ ID NO: 13220 - RNA, 20 nt, synthetic construct
  source 1..20: mol_type = other RNA
atttttggtagcagtggaga

SEQ ID NO: 13221 - RNA, 20 nt, synthetic construct
  source 1..20: mol_type = other RNA
atttttgttgttgtagttgt

SEQ ID NO: 13222 - RNA, 20 nt, synthetic construct
  source 1..20: mol_type = other RNA
caaaaaccctcacaccaggt

SEQ ID NO: 13223 - RNA, 20 nt, synthetic construct
  source 1..20: mol_type = other RNA
caaaaactgatttttgttgt

SEQ ID NO: 13224 - RNA, 20 nt, synthetic construct
  source 1..20: mol_type = other RNA
caaaaagttcaggatgtgta

SEQ ID NO: 13225 - RNA, 20 nt, synthetic construct
  source 1..20: mol_type = other RNA
caaaaatcagtttttgagat

SEQ ID NO: 13226 - RNA, 20 nt, synthetic construct
  source 1..20: mol_type = other RNA
caaaaattggtgggttatgc

SEQ ID NO: 13227 - RNA, 20 nt, synthetic construct
  source 1..20: mol_type = other RNA
caaaacagaccatttaccaa

SEQ ID NO: 13228 - RNA, 20 nt, synthetic construct
  source 1..20: mol_type = other RNA
caaaacatggaaaaaggtaa

SEQ ID NO: 13229 - RNA, 20 nt, synthetic construct
  source 1..20: mol_type = other RNA
caaaaccagcaacagcagca

SEQ ID NO: 13230 - RNA, 20 nt, synthetic construct
  source 1..20: mol_type = other RNA
caaaactgtgactggccctg

SEQ ID NO: 13231 - RNA, 20 nt, synthetic construct
  source 1..20: mol_type = other RNA
caaaacttgcatcacatgca

SEQ ID NO: 13232 - RNA, 20 nt, synthetic construct
  source 1..20: mol_type = other RNA
caaaagaacagctgcttctg

SEQ ID NO: 13233 - RNA, 20 nt, synthetic construct
  source 1..20: mol_type = other RNA
caaaagagcatcattgagac

SEQ ID NO: 13234 - RNA, 20 nt, synthetic construct
  source 1..20: mol_type = other RNA
caaaagcatgctgctctaag

SEQ ID NO: 13235 - RNA, 20 nt, synthetic construct
  source 1..20: mol_type = other RNA
caaaagctcatgtgcagtca

SEQ ID NO: 13236 - RNA, 20 nt, synthetic construct
  source 1..20: mol_type = other RNA
caaaaggctaatggagaaag

SEQ ID NO: 13237 - RNA, 20 nt, synthetic construct
  source 1..20: mol_type = other RNA
caaaaggtgtgagtttgaaa

SEQ ID NO: 13238 - RNA, 20 nt, synthetic construct
  source 1..20: mol_type = other RNA
caaaagttattatggaatac

SEQ ID NO: 13239 - RNA, 20 nt, synthetic construct
  source 1..20: mol_type = other RNA
caaaatacaggtttcttgtt

SEQ ID NO: 13240 - RNA, 20 nt, synthetic construct
  source 1..20: mol_type = other RNA
caaaatcaagcgagttcgag

SEQ ID NO: 13241 - RNA, 20 nt, synthetic construct
  source 1..20: mol_type = other RNA
caaaatgaaatgaatggtgc

SEQ ID NO: 13242 - RNA, 20 nt, synthetic construct
  source 1..20: mol_type = other RNA
caaaatggaggaataaaacg

SEQ ID NO: 13243 - RNA, 20 nt, synthetic construct
  source 1..20: mol_type = other RNA
caaacaacttcttcagaaaa

SEQ ID NO: 13244 - RNA, 20 nt, synthetic construct
  source 1..20: mol_type = other RNA
caaacaatacacacctagtt

SEQ ID NO: 13245 - RNA, 20 nt, synthetic construct
  source 1..20: mol_type = other RNA
caaacaatacactggaaatt

SEQ ID NO: 13246 - RNA, 20 nt, synthetic construct
  source 1..20: mol_type = other RNA
caaacacaaccatcccagag

SEQ ID NO: 13247 - RNA, 20 nt, synthetic construct
  source 1..20: mol_type = other RNA
caaacacagcaaccccaaac

SEQ ID NO: 13248 - RNA, 20 nt, synthetic construct
  source 1..20: mol_type = other RNA
caaacacgagatcttgtgcc

SEQ ID NO: 13249 - RNA, 20 nt, synthetic construct
  source 1..20: mol_type = other RNA
caaacacttggaataccctc

SEQ ID NO: 13250 - RNA, 20 nt, synthetic construct
  source 1..20: mol_type = other RNA
caaaccactgctgcagaact

SEQ ID NO: 13251 - RNA, 20 nt, synthetic construct
  source 1..20: mol_type = other RNA
caaactcacaccttttgcaa

SEQ ID NO: 13252 - RNA, 20 nt, synthetic construct
  source 1..20: mol_type = other RNA
caaactgaaaaacttatgtc

SEQ ID NO: 13253 - RNA, 20 nt, synthetic construct
  source 1..20: mol_type = other RNA
caaactgagtcttgccatag

SEQ ID NO: 13254 - RNA, 20 nt, synthetic construct
  source 1..20: mol_type = other RNA
caaagaatgatccttctctt

SEQ ID NO: 13255 - RNA, 20 nt, synthetic construct
  source 1..20: mol_type = other RNA
caaagagaaggatcattctt

SEQ ID NO: 13256 - RNA, 20 nt, synthetic construct
  source 1..20: mol_type = other RNA
caaagagcaagagattctga

SEQ ID NO: 13257 - RNA, 20 nt, synthetic construct
  source 1..20: mol_type = other RNA
caaagagcagattcccaaac

SEQ ID NO: 13258 - RNA, 20 nt, synthetic construct
  source 1..20: mol_type = other RNA
caaagcaacaatgatcagca

SEQ ID NO: 13259 - RNA, 20 nt, synthetic construct
  source 1..20: mol_type = other RNA
caaagcaagatcttcttcac

SEQ ID NO: 13260 - RNA, 20 nt, synthetic construct
  source 1..20: mol_type = other RNA
caaagccagctgcagtggtg

SEQ ID NO: 13261 - RNA, 20 nt, synthetic construct
  source 1..20: mol_type = other RNA
caaagctagcgtctggtgaa

SEQ ID NO: 13262 - RNA, 20 nt, synthetic construct
  source 1..20: mol_type = other RNA
caaagctcagtgttcactaa

SEQ ID NO: 13263 - RNA, 20 nt, synthetic construct
  source 1..20: mol_type = other RNA
caaagctccagaatggaagc

SEQ ID NO: 13264 - RNA, 20 nt, synthetic construct
  source 1..20: mol_type = other RNA
caaaggtacttgatacataa

SEQ ID NO: 13265 - RNA, 20 nt, synthetic construct
  source 1..20: mol_type = other RNA
caaagtaacacaacactttt

SEQ ID NO: 13266 - RNA, 20 nt, synthetic construct
  source 1..20: mol_type = other RNA
caaataaagaataaagagga

SEQ ID NO: 13267 - RNA, 20 nt, synthetic construct
  source 1..20: mol_type = other RNA
caaataacgacttggcgtga

SEQ ID NO: 13268 - RNA, 20 nt, synthetic construct
  source 1..20: mol_type = other RNA
caaataatgtgatcccaaag

SEQ ID NO: 13269 - RNA, 20 nt, synthetic construct
  source 1..20: mol_type = other RNA
caaatcacagaagcaagtaa

SEQ ID NO: 13270 - RNA, 20 nt, synthetic construct
  source 1..20: mol_type = other RNA
caaatcggagacatttggtt

SEQ ID NO: 13271 - RNA, 20 nt, synthetic construct
  source 1..20: mol_type = other RNA
caaatgacctccaaacaata

SEQ ID NO: 13272 - RNA, 20 nt, synthetic construct
  source 1..20: mol_type = other RNA
caaatgggactggaggaagt

SEQ ID NO: 13273 - RNA, 20 nt, synthetic construct
  source 1..20: mol_type = other RNA
caaatgggaggtgatggtat

SEQ ID NO: 13274 - RNA, 20 nt, synthetic construct
  source 1..20: mol_type = other RNA
caaatgtaccaagttgaaat

SEQ ID NO: 13275 - RNA, 20 nt, synthetic construct
  source 1..20: mol_type = other RNA
caaatgtctccgatttgagt

SEQ ID NO: 13276 - RNA, 20 nt, synthetic construct
  source 1..20: mol_type = other RNA
caaatgtttttcctgtgcct

SEQ ID NO: 13277 - RNA, 20 nt, synthetic construct
  source 1..20: mol_type = other RNA
caaattactagatactccta

SEQ ID NO: 13278 - RNA, 20 nt, synthetic construct
  source 1..20: mol_type = other RNA
caaattgctgctggaacctg

SEQ ID NO: 13279 - RNA, 20 nt, synthetic construct
  source 1..20: mol_type = other RNA
caacaaaaatcagtttttga

SEQ ID NO: 13280 - RNA, 20 nt, synthetic construct
  source 1..20: mol_type = other RNA
caacaaagagcagattccca

SEQ ID NO: 13281 - RNA, 20 nt, synthetic construct
  source 1..20: mol_type = other RNA
caacaacaaaaatcagtttt

SEQ ID NO: 13282 - RNA, 20 nt, synthetic construct
  source 1..20: mol_type = other RNA
caacaagctgcgcaacttgc

SEQ ID NO: 13283 - RNA, 20 nt, synthetic construct
  source 1..20: mol_type = other RNA
caacaagcttcagttctaca

SEQ ID NO: 13284 - RNA, 20 nt, synthetic construct
  source 1..20: mol_type = other RNA
caacaatgatcagcaaagag

SEQ ID NO: 13285 - RNA, 20 nt, synthetic construct
  source 1..20: mol_type = other RNA
caacacagcactatctgaaa

SEQ ID NO: 13286 - RNA, 20 nt, synthetic construct
  source 1..20: mol_type = other RNA
caacacagctggagcacaag

SEQ ID NO: 13287 - RNA, 20 nt, synthetic construct
  source 1..20: mol_type = other RNA
caacacataactgcagtggg

SEQ ID NO: 13288 - RNA, 20 nt, synthetic construct
  source 1..20: mol_type = other RNA
caacactggggacataagtt

SEQ ID NO: 13289 - RNA, 20 nt, synthetic construct
  source 1..20: mol_type = other RNA
caacacttttaagggaagtg

SEQ ID NO: 13290 - RNA, 20 nt, synthetic construct
  source 1..20: mol_type = other RNA
caacagactaagtccattcc

SEQ ID NO: 13291 - RNA, 20 nt, synthetic construct
  source 1..20: mol_type = other RNA
caacagcagcaaaaattaca

SEQ ID NO: 13292 - RNA, 20 nt, synthetic construct
  source 1..20: mol_type = other RNA
caacaggcttcagagactga

SEQ ID NO: 13293 - RNA, 20 nt, synthetic construct
  source 1..20: mol_type = other RNA
caacataagcctcataaaca

SEQ ID NO: 13294 - RNA, 20 nt, synthetic construct
  source 1..20: mol_type = other RNA
caacatctccagttccaaaa

SEQ ID NO: 13295 - RNA, 20 nt, synthetic construct
  source 1..20: mol_type = other RNA
caacatgcctggggggctcc

SEQ ID NO: 13296 - RNA, 20 nt, synthetic construct
  source 1..20: mol_type = other RNA
caacatggttggttctatcc

SEQ ID NO: 13297 - RNA, 20 nt, synthetic construct
  source 1..20: mol_type = other RNA
caaccaaaagaacagctgct

SEQ ID NO: 13298 - RNA, 20 nt, synthetic construct
  source 1..20: mol_type = other RNA
caaccaaagtaacacaacac

SEQ ID NO: 13299 - RNA, 20 nt, synthetic construct
  source 1..20: mol_type = other RNA
caaccaaatgtctccgattt

SEQ ID NO: 13300 - RNA, 20 nt, synthetic construct
  source 1..20: mol_type = other RNA
caaccatcccagagttcaca

SEQ ID NO: 13301 - RNA, 20 nt, synthetic construct
  source 1..20: mol_type = other RNA
caaccatgttgagggcaaca

SEQ ID NO: 13302 - RNA, 20 nt, synthetic construct
  source 1..20: mol_type = other RNA
caacccaatctctccaatca

SEQ ID NO: 13303 - RNA, 20 nt, synthetic construct
  source 1..20: mol_type = other RNA
caaccccaaactgagtcttg

SEQ ID NO: 13304 - RNA, 20 nt, synthetic construct
  source 1..20: mol_type = other RNA
caactacaacaacaaaaatc

SEQ ID NO: 13305 - RNA, 20 nt, synthetic construct
  source 1..20: mol_type = other RNA
caactcattagtagcctgac

SEQ ID NO: 13306 - RNA, 20 nt, synthetic construct
  source 1..20: mol_type = other RNA
caactgccagcagttgatga

SEQ ID NO: 13307 - RNA, 20 nt, synthetic construct
  source 1..20: mol_type = other RNA
caactgctggcagttgtcct

SEQ ID NO: 13308 - RNA, 20 nt, synthetic construct
  source 1..20: mol_type = other RNA
caacttcttcagaaaagaca

SEQ ID NO: 13309 - RNA, 20 nt, synthetic construct
  source 1..20: mol_type = other RNA
caacttgctcagcaaaggta

SEQ ID NO: 13310 - RNA, 20 nt, synthetic construct
  source 1..20: mol_type = other RNA
caacttggtacatttgtgac

SEQ ID NO: 13311 - RNA, 20 nt, synthetic construct
  source 1..20: mol_type = other RNA
caacttttacttgcttctgt

SEQ ID NO: 13312 - RNA, 20 nt, synthetic construct
  source 1..20: mol_type = other RNA
caagaaaatgcagttaaaga

SEQ ID NO: 13313 - RNA, 20 nt, synthetic construct
  source 1..20: mol_type = other RNA
caagaaacctgtattttgca

SEQ ID NO: 13314 - RNA, 20 nt, synthetic construct
  source 1..20: mol_type = other RNA
caagaaagaaatccaggtga

SEQ ID NO: 13315 - RNA, 20 nt, synthetic construct
  source 1..20: mol_type = other RNA
caagaaagtagagggtattc

SEQ ID NO: 13316 - RNA, 20 nt, synthetic construct
  source 1..20: mol_type = other RNA
caagaaattgaaacaagacc

SEQ ID NO: 13317 - RNA, 20 nt, synthetic construct
  source 1..20: mol_type = other RNA
caagaacagcagcaaacaca

SEQ ID NO: 13318 - RNA, 20 nt, synthetic construct
  source 1..20: mol_type = other RNA
caagaacaggagcagaagtc

SEQ ID NO: 13319 - RNA, 20 nt, synthetic construct
  source 1..20: mol_type = other RNA
caagaacattgtattactta

SEQ ID NO: 13320 - RNA, 20 nt, synthetic construct
  source 1..20: mol_type = other RNA
caagaccaaaaggctaatgg

SEQ ID NO: 13321 - RNA, 20 nt, synthetic construct
  source 1..20: mol_type = other RNA
caagaccaatgtcagaacac

SEQ ID NO: 13322 - RNA, 20 nt, synthetic construct
  source 1..20: mol_type = other RNA
caagacccaaaacttgcatc

SEQ ID NO: 13323 - RNA, 20 nt, synthetic construct
  source 1..20: mol_type = other RNA
caagactcaatatgatttcc

SEQ ID NO: 13324 - RNA, 20 nt, synthetic construct
  source 1..20: mol_type = other RNA
caagactcagtttggggttg

SEQ ID NO: 13325 - RNA, 20 nt, synthetic construct
  source 1..20: mol_type = other RNA
caagagaatccacctgcaag

SEQ ID NO: 13326 - RNA, 20 nt, synthetic construct
  source 1..20: mol_type = other RNA
caagagattctgaagggtcg

SEQ ID NO: 13327 - RNA, 20 nt, synthetic construct
  source 1..20: mol_type = other RNA
caagatatgtctggtcaaca

SEQ ID NO: 13328 - RNA, 20 nt, synthetic construct
  source 1..20: mol_type = other RNA
caagatctcgtgtttgctcc

SEQ ID NO: 13329 - RNA, 20 nt, synthetic construct
  source 1..20: mol_type = other RNA
caagatcttcttcacaggtg

SEQ ID NO: 13330 - RNA, 20 nt, synthetic construct
  source 1..20: mol_type = other RNA
caagatgggaaatcatattg

SEQ ID NO: 13331 - RNA, 20 nt, synthetic construct
  source 1..20: mol_type = other RNA
caagcaaagctcagtgttca

SEQ ID NO: 13332 - RNA, 20 nt, synthetic construct
  source 1..20: mol_type = other RNA
caagcataacccaccaattt

SEQ ID NO: 13333 - RNA, 20 nt, synthetic construct
  source 1..20: mol_type = other RNA
caagccacatgcctgtatgc

SEQ ID NO: 13334 - RNA, 20 nt, synthetic construct
  source 1..20: mol_type = other RNA
caagcctgatggaacaggat

SEQ ID NO: 13335 - RNA, 20 nt, synthetic construct
  source 1..20: mol_type = other RNA
caagcgagttcgagactcat

SEQ ID NO: 13336 - RNA, 20 nt, synthetic construct
  source 1..20: mol_type = other RNA
caagcggaatcccatctaaa

SEQ ID NO: 13337 - RNA, 20 nt, synthetic construct
  source 1..20: mol_type = other RNA
caagctcctggtggcagctc

SEQ ID NO: 13338 - RNA, 20 nt, synthetic construct
  source 1..20: mol_type = other RNA
caagctgcgcaacttgctca

SEQ ID NO: 13339 - RNA, 20 nt, synthetic construct
  source 1..20: mol_type = other RNA
caagctgtgataatgtgcag

SEQ ID NO: 13340 - RNA, 20 nt, synthetic construct
  source 1..20: mol_type = other RNA
caagcttacacccagaaaac

SEQ ID NO: 13341 - RNA, 20 nt, synthetic construct
  source 1..20: mol_type = other RNA
caagcttcagttctacaggg

SEQ ID NO: 13342 - RNA, 20 nt, synthetic construct
  source 1..20: mol_type = other RNA
caaggagcaaacacgagatc

SEQ ID NO: 13343 - RNA, 20 nt, synthetic construct
  source 1..20: mol_type = other RNA
caaggcaagcttacacccag

SEQ ID NO: 13344 - RNA, 20 nt, synthetic construct
  source 1..20: mol_type = other RNA
caaggcagtgctaatgccta

SEQ ID NO: 13345 - RNA, 20 nt, synthetic construct
  source 1..20: mol_type = other RNA
caagggcagtcccaaggtac

SEQ ID NO: 13346 - RNA, 20 nt, synthetic construct
  source 1..20: mol_type = other RNA
caaggtacagtggaccaaca

SEQ ID NO: 13347 - RNA, 20 nt, synthetic construct
  source 1..20: mol_type = other RNA
caagtaaaagttgaaatgtc

SEQ ID NO: 13348 - RNA, 20 nt, synthetic construct
  source 1..20: mol_type = other RNA
caagtacctttgctgagcaa

SEQ ID NO: 13349 - RNA, 20 nt, synthetic construct
  source 1..20: mol_type = other RNA
caagtcacaaatgtaccaag

SEQ ID NO: 13350 - RNA, 20 nt, synthetic construct
  source 1..20: mol_type = other RNA
caagtcgttatttgaccata

SEQ ID NO: 13351 - RNA, 20 nt, synthetic construct
  source 1..20: mol_type = other RNA
caagtgcatgcaaaatacag

SEQ ID NO: 13352 - RNA, 20 nt, synthetic construct
  source 1..20: mol_type = other RNA
caagtgctgtttcaacactg

SEQ ID NO: 13353 - RNA, 20 nt, synthetic construct
  source 1..20: mol_type = other RNA
caagtggcactctttcaaaa

SEQ ID NO: 13354 - RNA, 20 nt, synthetic construct
  source 1..20: mol_type = other RNA
caagtgtttgcaaaatggag

SEQ ID NO: 13355 - RNA, 20 nt, synthetic construct
  source 1..20: mol_type = other RNA
caagttctgcagcagtggtt

SEQ ID NO: 13356 - RNA, 20 nt, synthetic construct
  source 1..20: mol_type = other RNA
caagttgaaatgaatcaagg

SEQ ID NO: 13357 - RNA, 20 nt, synthetic construct
  source 1..20: mol_type = other RNA
caagttgcgcagcttgttga

SEQ ID NO: 13358 - RNA, 20 nt, synthetic construct
  source 1..20: mol_type = other RNA
caagttttgggtcttgtttc

SEQ ID NO: 13359 - RNA, 20 nt, synthetic construct
  source 1..20: mol_type = other RNA
caataattttatagagtcac

SEQ ID NO: 13360 - RNA, 20 nt, synthetic construct
  source 1..20: mol_type = other RNA
caatacacacctagtttcag

SEQ ID NO: 13361 - RNA, 20 nt, synthetic construct
  source 1..20: mol_type = other RNA
caatacactggaaattccaa

SEQ ID NO: 13362 - RNA, 20 nt, synthetic construct
  source 1..20: mol_type = other RNA
caatatgatttcccatcttg

SEQ ID NO: 13363 - RNA, 20 nt, synthetic construct
  source 1..20: mol_type = other RNA
caatattatccagattgtgt

SEQ ID NO: 13364 - RNA, 20 nt, synthetic construct
  source 1..20: mol_type = other RNA
caatcaaatgacctccaaac

SEQ ID NO: 13365 - RNA, 20 nt, synthetic construct
  source 1..20: mol_type = other RNA
caatccatcctggtttcaga

SEQ ID NO: 13366 - RNA, 20 nt, synthetic construct
  source 1..20: mol_type = other RNA
caatctctccaatcaaatga

SEQ ID NO: 13367 - RNA, 20 nt, synthetic construct
  source 1..20: mol_type = other RNA
caatctggataatattgaga

SEQ ID NO: 13368 - RNA, 20 nt, synthetic construct
  source 1..20: mol_type = other RNA
caatgactgttccattgtgt

SEQ ID NO: 13369 - RNA, 20 nt, synthetic construct
  source 1..20: mol_type = other RNA
caatgatcagcaaagagaag

SEQ ID NO: 13370 - RNA, 20 nt, synthetic construct
  source 1..20: mol_type = other RNA
caatgatgctcttttgctgc

SEQ ID NO: 13371 - RNA, 20 nt, synthetic construct
  source 1..20: mol_type = other RNA
caatgctaaatacctgttcc

SEQ ID NO: 13372 - RNA, 20 nt, synthetic construct
  source 1..20: mol_type = other RNA
caatggaaacacaatctgga

SEQ ID NO: 13373 - RNA, 20 nt, synthetic construct
  source 1..20: mol_type = other RNA
caatggaacagtcattgtcc

SEQ ID NO: 13374 - RNA, 20 nt, synthetic construct
  source 1..20: mol_type = other RNA
caatgtcagaacacctcaag

SEQ ID NO: 13375 - RNA, 20 nt, synthetic construct
  source 1..20: mol_type = other RNA
caatgttcttgtcatggtaa

SEQ ID NO: 13376 - RNA, 20 nt, synthetic construct
  source 1..20: mol_type = other RNA
caattaaggtggaacctgga

SEQ ID NO: 13377 - RNA, 20 nt, synthetic construct
  source 1..20: mol_type = other RNA
caattattctgaggcctttc

SEQ ID NO: 13378 - RNA, 20 nt, synthetic construct
  source 1..20: mol_type = other RNA
caattcaatccatcctggtt

SEQ ID NO: 13379 - RNA, 20 nt, synthetic construct
  source 1..20: mol_type = other RNA
caattccgcacagacctcta

SEQ ID NO: 13380 - RNA, 20 nt, synthetic construct
  source 1..20: mol_type = other RNA
caattcttcagtatcaaccc

SEQ ID NO: 13381 - RNA, 20 nt, synthetic construct
  source 1..20: mol_type = other RNA
caattgcttctttctccccc

SEQ ID NO: 13382 - RNA, 20 nt, synthetic construct
  source 1..20: mol_type = other RNA
caattgtgatggtggtggtg

SEQ ID NO: 13383 - RNA, 20 nt, synthetic construct
  source 1..20: mol_type = other RNA
caatttcttgatctgaagga

SEQ ID NO: 13384 - RNA, 20 nt, synthetic construct
  source 1..20: mol_type = other RNA
caatttgcaagctcctggtg

SEQ ID NO: 13385 - RNA, 20 nt, synthetic construct
  source 1..20: mol_type = other RNA
caatttttggtagcagtgga

SEQ ID NO: 13386 - RNA, 20 nt, synthetic construct
  source 1..20: mol_type = other RNA
cacaaacacaaccatcccag

SEQ ID NO: 13387 - RNA, 20 nt, synthetic construct
  source 1..20: mol_type = other RNA
cacaaagctagcgtctggtg

SEQ ID NO: 13388 - RNA, 20 nt, synthetic construct
  source 1..20: mol_type = other RNA
cacaaatgtaccaagttgaa

SEQ ID NO: 13389 - RNA, 20 nt, synthetic construct
  source 1..20: mol_type = other RNA
cacaacaagcttcagttcta

SEQ ID NO: 13390 - RNA, 20 nt, synthetic construct
  source 1..20: mol_type = other RNA
cacaacacttttaagggaag

SEQ ID NO: 13391 - RNA, 20 nt, synthetic construct
  source 1..20: mol_type = other RNA
cacaaccatcccagagttca

SEQ ID NO: 13392 - RNA, 20 nt, synthetic construct
  source 1..20: mol_type = other RNA
cacaagaaagtagagggtat

SEQ ID NO: 13393 - RNA, 20 nt, synthetic construct
  source 1..20: mol_type = other RNA
cacaagatctcgtgtttgct

SEQ ID NO: 13394 - RNA, 20 nt, synthetic construct
  source 1..20: mol_type = other RNA
cacaagtcacaaatgtacca

SEQ ID NO: 13395 - RNA, 20 nt, synthetic construct
  source 1..20: mol_type = other RNA
cacaatctggataatattga

SEQ ID NO: 13396 - RNA, 20 nt, synthetic construct
  source 1..20: mol_type = other RNA
cacaatggaacagtcattgt

SEQ ID NO: 13397 - RNA, 20 nt, synthetic construct
  source 1..20: mol_type = other RNA
cacaattattctgaggcctt

SEQ ID NO: 13398 - RNA, 20 nt, synthetic construct
  source 1..20: mol_type = other RNA
cacaattgcttctttctccc

SEQ ID NO: 13399 - RNA, 20 nt, synthetic construct
  source 1..20: mol_type = other RNA
cacacaattattctgaggcc

SEQ ID NO: 13400 - RNA, 20 nt, synthetic construct
  source 1..20: mol_type = other RNA
cacacacatggtgaactcct

SEQ ID NO: 13401 - RNA, 20 nt, synthetic construct
  source 1..20: mol_type = other RNA
cacacagcaccaccagaaaa

SEQ ID NO: 13402 - RNA, 20 nt, synthetic construct
  source 1..20: mol_type = other RNA
cacacagtgactgcacatga

SEQ ID NO: 13403 - RNA, 20 nt, synthetic construct
  source 1..20: mol_type = other RNA
cacacatggtgaactcctgg

SEQ ID NO: 13404 - RNA, 20 nt, synthetic construct
  source 1..20: mol_type = other RNA
cacaccaccaccaccatcac

SEQ ID NO: 13405 - RNA, 20 nt, synthetic construct
  source 1..20: mol_type = other RNA
cacaccaggtgcacttctcc

SEQ ID NO: 13406 - RNA, 20 nt, synthetic construct
  source 1..20: mol_type = other RNA
cacaccccagctttagagca

SEQ ID NO: 13407 - RNA, 20 nt, synthetic construct
  source 1..20: mol_type = other RNA
cacacctagtttcagagaat

SEQ ID NO: 13408 - RNA, 20 nt, synthetic construct
  source 1..20: mol_type = other RNA
cacaccttttgcaacataag

SEQ ID NO: 13409 - RNA, 20 nt, synthetic construct
  source 1..20: mol_type = other RNA
cacacgactattctggcttc

SEQ ID NO: 13410 - RNA, 20 nt, synthetic construct
  source 1..20: mol_type = other RNA
cacactcagacccctcccca

SEQ ID NO: 13411 - RNA, 20 nt, synthetic construct
  source 1..20: mol_type = other RNA
cacagaagcaagtaaaagtt

SEQ ID NO: 13412 - RNA, 20 nt, synthetic construct
  source 1..20: mol_type = other RNA
cacagacctctaactctgag

SEQ ID NO: 13413 - RNA, 20 nt, synthetic construct
  source 1..20: mol_type = other RNA
cacagattctttcttatcac

SEQ ID NO: 13414 - RNA, 20 nt, synthetic construct
  source 1..20: mol_type = other RNA
cacagcaaccccaaactgag

SEQ ID NO: 13415 - RNA, 20 nt, synthetic construct
  source 1..20: mol_type = other RNA
cacagcaccaccagaaaaca

SEQ ID NO: 13416 - RNA, 20 nt, synthetic construct
  source 1..20: mol_type = other RNA
cacagcactatctgaaacca

SEQ ID NO: 13417 - RNA, 20 nt, synthetic construct
  source 1..20: mol_type = other RNA
cacagctggagcacaagtca

SEQ ID NO: 13418 - RNA, 20 nt, synthetic construct
  source 1..20: mol_type = other RNA
cacagcttgcaggtggattc

SEQ ID NO: 13419 - RNA, 20 nt, synthetic construct
  source 1..20: mol_type = other RNA
cacaggaaaaacatttgcat

SEQ ID NO: 13420 - RNA, 20 nt, synthetic construct
  source 1..20: mol_type = other RNA
cacaggacaactcattagta

SEQ ID NO: 13421 - RNA, 20 nt, synthetic construct
  source 1..20: mol_type = other RNA
cacaggccaattaaggtgga

SEQ ID NO: 13422 - RNA, 20 nt, synthetic construct
  source 1..20: mol_type = other RNA
cacaggcctcactcaccact

SEQ ID NO: 13423 - RNA, 20 nt, synthetic construct
  source 1..20: mol_type = other RNA
cacaggtgctttcaagaaca

SEQ ID NO: 13424 - RNA, 20 nt, synthetic construct
  source 1..20: mol_type = other RNA
cacaggttcctcagcttcct

SEQ ID NO: 13425 - RNA, 20 nt, synthetic construct
  source 1..20: mol_type = other RNA
cacagtgactgcacatgagc

SEQ ID NO: 13426 - RNA, 20 nt, synthetic construct
  source 1..20: mol_type = other RNA
cacagttagtgaaccttctc

SEQ ID NO: 13427 - RNA, 20 nt, synthetic construct
  source 1..20: mol_type = other RNA
cacagttttgactagacaaa

SEQ ID NO: 13428 - RNA, 20 nt, synthetic construct
  source 1..20: mol_type = other RNA
cacataaatgccattaacag

SEQ ID NO: 13429 - RNA, 20 nt, synthetic construct
  source 1..20: mol_type = other RNA
cacataactgcagtgggcct

SEQ ID NO: 13430 - RNA, 20 nt, synthetic construct
  source 1..20: mol_type = other RNA
cacatcctgaactttttgca

SEQ ID NO: 13431 - RNA, 20 nt, synthetic construct
  source 1..20: mol_type = other RNA
cacatctcacataaatgcca

SEQ ID NO: 13432 - RNA, 20 nt, synthetic construct
  source 1..20: mol_type = other RNA
cacatctccctcaaaaccag

SEQ ID NO: 13433 - RNA, 20 nt, synthetic construct
  source 1..20: mol_type = other RNA
cacatctgcaagatgggaaa

SEQ ID NO: 13434 - RNA, 20 nt, synthetic construct
  source 1..20: mol_type = other RNA
cacatgagcttttggtaaat

SEQ ID NO: 13435 - RNA, 20 nt, synthetic construct
  source 1..20: mol_type = other RNA
cacatgcaatattttccaaa

SEQ ID NO: 13436 - RNA, 20 nt, synthetic construct
  source 1..20: mol_type = other RNA
cacatgcctgtatgcacaca

SEQ ID NO: 13437 - RNA, 20 nt, synthetic construct
  source 1..20: mol_type = other RNA
cacatggtgaactcctggaa

SEQ ID NO: 13438 - RNA, 20 nt, synthetic construct
  source 1..20: mol_type = other RNA
cacatgtatgcagcccttct

SEQ ID NO: 13439 - RNA, 20 nt, synthetic construct
  source 1..20: mol_type = other RNA
cacattatcacagcttgcag

SEQ ID NO: 13440 - RNA, 20 nt, synthetic construct
  source 1..20: mol_type = other RNA
caccaaccaaaagaacagct

SEQ ID NO: 13441 - RNA, 20 nt, synthetic construct
  source 1..20: mol_type = other RNA
caccaagcggaatcccatct

SEQ ID NO: 13442 - RNA, 20 nt, synthetic construct
  source 1..20: mol_type = other RNA
caccaagtggcactctttca

SEQ ID NO: 13443 - RNA, 20 nt, synthetic construct
  source 1..20: mol_type = other RNA
caccaatttttggtagcagt

SEQ ID NO: 13444 - RNA, 20 nt, synthetic construct
  source 1..20: mol_type = other RNA
caccaccaccaccatcacaa

SEQ ID NO: 13445 - RNA, 20 nt, synthetic construct
  source 1..20: mol_type = other RNA
caccaccaccatcacaattg

SEQ ID NO: 13446 - RNA, 20 nt, synthetic construct
  source 1..20: mol_type = other RNA
caccaccactaccccaacca

SEQ ID NO: 13447 - RNA, 20 nt, synthetic construct
  source 1..20: mol_type = other RNA
caccaccagaaaacaaaaca

SEQ ID NO: 13448 - RNA, 20 nt, synthetic construct
  source 1..20: mol_type = other RNA
caccaccatcacaattgctt

SEQ ID NO: 13449 - RNA, 20 nt, synthetic construct
  source 1..20: mol_type = other RNA
caccaccttcccagagtcct

SEQ ID NO: 13450 - RNA, 20 nt, synthetic construct
  source 1..20: mol_type = other RNA
caccactaccccaaccaaag

SEQ ID NO: 13451 - RNA, 20 nt, synthetic construct
  source 1..20: mol_type = other RNA
caccactgcagctggctttg

SEQ ID NO: 13452 - RNA, 20 nt, synthetic construct
  source 1..20: mol_type = other RNA
caccagaaaacaaaacatgg

SEQ ID NO: 13453 - RNA, 20 nt, synthetic construct
  source 1..20: mol_type = other RNA
caccagacgctagctttgtg

SEQ ID NO: 13454 - RNA, 20 nt, synthetic construct
  source 1..20: mol_type = other RNA
caccaggagcttgcaaattg

SEQ ID NO: 13455 - RNA, 20 nt, synthetic construct
  source 1..20: mol_type = other RNA
caccaggtgcacttctccaa

SEQ ID NO: 13456 - RNA, 20 nt, synthetic construct
  source 1..20: mol_type = other RNA
caccagtttttcaacacata

SEQ ID NO: 13457 - RNA, 20 nt, synthetic construct
  source 1..20: mol_type = other RNA
caccatcacaattgcttctt

SEQ ID NO: 13458 - RNA, 20 nt, synthetic construct
  source 1..20: mol_type = other RNA
caccatgaaaacattcttcc

SEQ ID NO: 13459 - RNA, 20 nt, synthetic construct
  source 1..20: mol_type = other RNA
caccatgtgtgtgttccacg

SEQ ID NO: 13460 - RNA, 20 nt, synthetic construct
  source 1..20: mol_type = other RNA
caccattaggcattagcact

SEQ ID NO: 13461 - RNA, 20 nt, synthetic construct
  source 1..20: mol_type = other RNA
caccattcagagtgcttttt

SEQ ID NO: 13462 - RNA, 20 nt, synthetic construct
  source 1..20: mol_type = other RNA
caccattcatttcattttgt

SEQ ID NO: 13463 - RNA, 20 nt, synthetic construct
  source 1..20: mol_type = other RNA
cacccagaaaacaacacagc

SEQ ID NO: 13464 - RNA, 20 nt, synthetic construct
  source 1..20: mol_type = other RNA
cacccatcgcatacctcagg

SEQ ID NO: 13465 - RNA, 20 nt, synthetic construct
  source 1..20: mol_type = other RNA
caccccagctttagagcagc

SEQ ID NO: 13466 - RNA, 20 nt, synthetic construct
  source 1..20: mol_type = other RNA
cacccccaaagcaacaatga

SEQ ID NO: 13467 - RNA, 20 nt, synthetic construct
  source 1..20: mol_type = other RNA
caccgcaatggaaacacaat

SEQ ID NO: 13468 - RNA, 20 nt, synthetic construct
  source 1..20: mol_type = other RNA
cacctagtttcagagaataa

SEQ ID NO: 13469 - RNA, 20 nt, synthetic construct
  source 1..20: mol_type = other RNA
cacctcaagcataacccacc

SEQ ID NO: 13470 - RNA, 20 nt, synthetic construct
  source 1..20: mol_type = other RNA
cacctcccatttgccagaca

SEQ ID NO: 13471 - RNA, 20 nt, synthetic construct
  source 1..20: mol_type = other RNA
cacctgcaagctgtgataat

SEQ ID NO: 13472 - RNA, 20 nt, synthetic construct
  source 1..20: mol_type = other RNA
cacctggatttctttcttgg

SEQ ID NO: 13473 - RNA, 20 nt, synthetic construct
  source 1..20: mol_type = other RNA
cacctggtgtgagggttttt

SEQ ID NO: 13474 - RNA, 20 nt, synthetic construct
  source 1..20: mol_type = other RNA
cacctgtcaagactcaatat

SEQ ID NO: 13475 - RNA, 20 nt, synthetic construct
  source 1..20: mol_type = other RNA
cacctgtgaagaagatcttg

SEQ ID NO: 13476 - RNA, 20 nt, synthetic construct
  source 1..20: mol_type = other RNA
caccttaattggcctgtgca

SEQ ID NO: 13477 - RNA, 20 nt, synthetic construct
  source 1..20: mol_type = other RNA
caccttagagcagcatgctt

SEQ ID NO: 13478 - RNA, 20 nt, synthetic construct
  source 1..20: mol_type = other RNA
caccttccaaattactagat

SEQ ID NO: 13479 - RNA, 20 nt, synthetic construct
  source 1..20: mol_type = other RNA
caccttcccagagtcctaat

SEQ ID NO: 13480 - RNA, 20 nt, synthetic construct
  source 1..20: mol_type = other RNA
caccttttgcaacataagcc

SEQ ID NO: 13481 - RNA, 20 nt, synthetic construct
  source 1..20: mol_type = other RNA
cacgactattctggcttccc

SEQ ID NO: 13482 - RNA, 20 nt, synthetic construct
  source 1..20: mol_type = other RNA
cacgagatcttgtgccccca

SEQ ID NO: 13483 - RNA, 20 nt, synthetic construct
  source 1..20: mol_type = other RNA
cacgccaagtcgttatttga

SEQ ID NO: 13484 - RNA, 20 nt, synthetic construct
  source 1..20: mol_type = other RNA
cacggaagaggcagaaactg

SEQ ID NO: 13485 - RNA, 20 nt, synthetic construct
  source 1..20: mol_type = other RNA
cactaactgtgcgttttatt

SEQ ID NO: 13486 - RNA, 20 nt, synthetic construct
  source 1..20: mol_type = other RNA
cactaaggattccttttctg

SEQ ID NO: 13487 - RNA, 20 nt, synthetic construct
  source 1..20: mol_type = other RNA
cactaccacaccaccaccac

SEQ ID NO: 13488 - RNA, 20 nt, synthetic construct
  source 1..20: mol_type = other RNA
cactaccccaaccaaagtaa

SEQ ID NO: 13489 - RNA, 20 nt, synthetic construct
  source 1..20: mol_type = other RNA
cactagatttcattttcaac

SEQ ID NO: 13490 - RNA, 20 nt, synthetic construct
  source 1..20: mol_type = other RNA
cactatctgaaaccaggatg

SEQ ID NO: 13491 - RNA, 20 nt, synthetic construct
  source 1..20: mol_type = other RNA
cactcaaaagcatgctgctc

SEQ ID NO: 13492 - RNA, 20 nt, synthetic construct
  source 1..20: mol_type = other RNA
cactcaaatcggagacattt

SEQ ID NO: 13493 - RNA, 20 nt, synthetic construct
  source 1..20: mol_type = other RNA
cactcaccactgcagctggc

SEQ ID NO: 13494 - RNA, 20 nt, synthetic construct
  source 1..20: mol_type = other RNA
cactcacccatcgcatacct

SEQ ID NO: 13495 - RNA, 20 nt, synthetic construct
  source 1..20: mol_type = other RNA
cactcagacccctccccaga

SEQ ID NO: 13496 - RNA, 20 nt, synthetic construct
  source 1..20: mol_type = other RNA
cactctgaatggtggagttt

SEQ ID NO: 13497 - RNA, 20 nt, synthetic construct
  source 1..20: mol_type = other RNA
cactctttcaaaagttatta

SEQ ID NO: 13498 - RNA, 20 nt, synthetic construct
  source 1..20: mol_type = other RNA
cactgagctttgcttgaagt

SEQ ID NO: 13499 - RNA, 20 nt, synthetic construct
  source 1..20: mol_type = other RNA
cactgcagctggctttggag

SEQ ID NO: 13500 - RNA, 20 nt, synthetic construct
  source 1..20: mol_type = other RNA
cactgcagttatgtgttgaa

SEQ ID NO: 13501 - RNA, 20 nt, synthetic construct
  source 1..20: mol_type = other RNA
cactgccatcaattcttcag

SEQ ID NO: 13502 - RNA, 20 nt, synthetic construct
  source 1..20: mol_type = other RNA
cactgcctgagagagctcat

SEQ ID NO: 13503 - RNA, 20 nt, synthetic construct
  source 1..20: mol_type = other RNA
cactgccttgtttttaagta

SEQ ID NO: 13504 - RNA, 20 nt, synthetic construct
  source 1..20: mol_type = other RNA
cactgctaccaaaaattggt

SEQ ID NO: 13505 - RNA, 20 nt, synthetic construct
  source 1..20: mol_type = other RNA
cactgctgcagaacttgata

SEQ ID NO: 13506 - RNA, 20 nt, synthetic construct
  source 1..20: mol_type = other RNA
cactggaaattccaacatgc

SEQ ID NO: 13507 - RNA, 20 nt, synthetic construct
  source 1..20: mol_type = other RNA
cactggggacataagttttt

SEQ ID NO: 13508 - RNA, 20 nt, synthetic construct
  source 1..20: mol_type = other RNA
cactgtaccttgggactgcc

SEQ ID NO: 13509 - RNA, 20 nt, synthetic construct
  source 1..20: mol_type = other RNA
cactgtctcaatattatcca

SEQ ID NO: 13510 - RNA, 20 nt, synthetic construct
  source 1..20: mol_type = other RNA
cactgtgtggcactagattt

SEQ ID NO: 13511 - RNA, 20 nt, synthetic construct
  source 1..20: mol_type = other RNA
cacttacctacacatctgca

SEQ ID NO: 13512 - RNA, 20 nt, synthetic construct
  source 1..20: mol_type = other RNA
cacttcccttaaaagtgttg

SEQ ID NO: 13513 - RNA, 20 nt, synthetic construct
  source 1..20: mol_type = other RNA
cacttctccaaaacagacca

SEQ ID NO: 13514 - RNA, 20 nt, synthetic construct
  source 1..20: mol_type = other RNA
cacttgaatcaacaggcttc

SEQ ID NO: 13515 - RNA, 20 nt, synthetic construct
  source 1..20: mol_type = other RNA
cacttgatttcatggtctga

SEQ ID NO: 13516 - RNA, 20 nt, synthetic construct
  source 1..20: mol_type = other RNA
cacttggaataccctctact

SEQ ID NO: 13517 - RNA, 20 nt, synthetic construct
  source 1..20: mol_type = other RNA
cacttggtgtctccatttac

SEQ ID NO: 13518 - RNA, 20 nt, synthetic construct
  source 1..20: mol_type = other RNA
cactttagtctggccaaaga

SEQ ID NO: 13519 - RNA, 20 nt, synthetic construct
  source 1..20: mol_type = other RNA
cacttttaagggaagtgaaa

SEQ ID NO: 13520 - RNA, 20 nt, synthetic construct
  source 1..20: mol_type = other RNA
cacttttcccctcctgctca

SEQ ID NO: 13521 - RNA, 20 nt, synthetic construct
  source 1..20: mol_type = other RNA
cagaaaacaaaacatggaaa

SEQ ID NO: 13522 - RNA, 20 nt, synthetic construct
  source 1..20: mol_type = other RNA
cagaaaacaacacagctgga

SEQ ID NO: 13523 - RNA, 20 nt, synthetic construct
  source 1..20: mol_type = other RNA
cagaaaaccacatctcacat

SEQ ID NO: 13524 - RNA, 20 nt, synthetic construct
  source 1..20: mol_type = other RNA
cagaaaagacaccaaccaaa

SEQ ID NO: 13525 - RNA, 20 nt, synthetic construct
  source 1..20: mol_type = other RNA
cagaaaaggaatccttagtg

SEQ ID NO: 13526 - RNA, 20 nt, synthetic construct
  source 1..20: mol_type = other RNA
cagaaaataacatccaggga

SEQ ID NO: 13527 - RNA, 20 nt, synthetic construct
  source 1..20: mol_type = other RNA
cagaaaccagaacaactaca

SEQ ID NO: 13528 - RNA, 20 nt, synthetic construct
  source 1..20: mol_type = other RNA
cagaaactgtagcaccatta

SEQ ID NO: 13529 - RNA, 20 nt, synthetic construct
  source 1..20: mol_type = other RNA
cagaaagcatcggagaaggg

SEQ ID NO: 13530 - RNA, 20 nt, synthetic construct
  source 1..20: mol_type = other RNA
cagaaatgtactgagacaca

SEQ ID NO: 13531 - RNA, 20 nt, synthetic construct
  source 1..20: mol_type = other RNA
cagaacaactacaacaacaa

SEQ ID NO: 13532 - RNA, 20 nt, synthetic construct
  source 1..20: mol_type = other RNA
cagaacacaatggaacagtc

SEQ ID NO: 13533 - RNA, 20 nt, synthetic construct
  source 1..20: mol_type = other RNA
cagaacacctcaagcataac

SEQ ID NO: 13534 - RNA, 20 nt, synthetic construct
  source 1..20: mol_type = other RNA
cagaacctctggctacaaag

SEQ ID NO: 13535 - RNA, 20 nt, synthetic construct
  source 1..20: mol_type = other RNA
cagaactcacagattctttc

SEQ ID NO: 13536 - RNA, 20 nt, synthetic construct
  source 1..20: mol_type = other RNA
cagaacttgatagccacacc

SEQ ID NO: 13537 - RNA, 20 nt, synthetic construct
  source 1..20: mol_type = other RNA
cagaagcaagaacagcagca

SEQ ID NO: 13538 - RNA, 20 nt, synthetic construct
  source 1..20: mol_type = other RNA
cagaagcaagtaaaagttga

SEQ ID NO: 13539 - RNA, 20 nt, synthetic construct
  source 1..20: mol_type = other RNA
cagaagcagctgttcttttg

SEQ ID NO: 13540 - RNA, 20 nt, synthetic construct
  source 1..20: mol_type = other RNA
cagaaggaaaaagcactctg

SEQ ID NO: 13541 - RNA, 20 nt, synthetic construct
  source 1..20: mol_type = other RNA
cagaaggacactcaaaagca

SEQ ID NO: 13542 - RNA, 20 nt, synthetic construct
  source 1..20: mol_type = other RNA
cagaagtaaatggagacacc

SEQ ID NO: 13543 - RNA, 20 nt, synthetic construct
  source 1..20: mol_type = other RNA
cagaagtcacaacaagcttc

SEQ ID NO: 13544 - RNA, 20 nt, synthetic construct
  source 1..20: mol_type = other RNA
cagaataattgtgtgaacag

SEQ ID NO: 13545 - RNA, 20 nt, synthetic construct
  source 1..20: mol_type = other RNA
cagaatagtcgtgtgagtcc

SEQ ID NO: 13546 - RNA, 20 nt, synthetic construct
  source 1..20: mol_type = other RNA
cagaatataaatcgtagaaa

SEQ ID NO: 13547 - RNA, 20 nt, synthetic construct
  source 1..20: mol_type = other RNA
cagaatctcttgctctttgt

SEQ ID NO: 13548 - RNA, 20 nt, synthetic construct
  source 1..20: mol_type = other RNA
cagaatctgaagctctggat

SEQ ID NO: 13549 - RNA, 20 nt, synthetic construct
  source 1..20: mol_type = other RNA
cagaatggaagcccactgcc

SEQ ID NO: 13550 - RNA, 20 nt, synthetic construct
  source 1..20: mol_type = other RNA
cagaattcttcaccagacgc

SEQ ID NO: 13551 - RNA, 20 nt, synthetic construct
  source 1..20: mol_type = other RNA
cagacagaacctctggctac

SEQ ID NO: 13552 - RNA, 20 nt, synthetic construct
  source 1..20: mol_type = other RNA
cagacatatcttggtttcta

SEQ ID NO: 13553 - RNA, 20 nt, synthetic construct
  source 1..20: mol_type = other RNA
cagaccatgaaatcaagtgc

SEQ ID NO: 13554 - RNA, 20 nt, synthetic construct
  source 1..20: mol_type = other RNA
cagaccatttaccaaaagct

SEQ ID NO: 13555 - RNA, 20 nt, synthetic construct
  source 1..20: mol_type = other RNA
cagacccctccccagaagga

SEQ ID NO: 13556 - RNA, 20 nt, synthetic construct
  source 1..20: mol_type = other RNA
cagacctctaactctgagct

SEQ ID NO: 13557 - RNA, 20 nt, synthetic construct
  source 1..20: mol_type = other RNA
cagacgctagctttgtggtt

SEQ ID NO: 13558 - RNA, 20 nt, synthetic construct
  source 1..20: mol_type = other RNA
cagactaaagtggaagaatg

SEQ ID NO: 13559 - RNA, 20 nt, synthetic construct
  source 1..20: mol_type = other RNA
cagactaagtccattcctga

SEQ ID NO: 13560 - RNA, 20 nt, synthetic construct
  source 1..20: mol_type = other RNA
cagactacacatcctgaact

SEQ ID NO: 13561 - RNA, 20 nt, synthetic construct
  source 1..20: mol_type = other RNA
cagactgcagggacaatgac

SEQ ID NO: 13562 - RNA, 20 nt, synthetic construct
  source 1..20: mol_type = other RNA
cagacttttcctcaccccca

SEQ ID NO: 13563 - RNA, 20 nt, synthetic construct
  source 1..20: mol_type = other RNA
cagagaataaagaacagact

SEQ ID NO: 13564 - RNA, 20 nt, synthetic construct
  source 1..20: mol_type = other RNA
cagagactgagccattttca

SEQ ID NO: 13565 - RNA, 20 nt, synthetic construct
  source 1..20: mol_type = other RNA
cagagagagaaggttcacta

SEQ ID NO: 13566 - RNA, 20 nt, synthetic construct
  source 1..20: mol_type = other RNA
cagagctgccaccaggagct

SEQ ID NO: 13567 - RNA, 20 nt, synthetic construct
  source 1..20: mol_type = other RNA
cagagcttcagattctgaat

SEQ ID NO: 13568 - RNA, 20 nt, synthetic construct
  source 1..20: mol_type = other RNA
cagaggttctgtctggcaaa

SEQ ID NO: 13569 - RNA, 20 nt, synthetic construct
  source 1..20: mol_type = other RNA
cagagtcctaatccatctac

SEQ ID NO: 13570 - RNA, 20 nt, synthetic construct
  source 1..20: mol_type = other RNA
cagagtgctttttccttctg

SEQ ID NO: 13571 - RNA, 20 nt, synthetic construct
  source 1..20: mol_type = other RNA
cagagttagaggtctgtgcg

SEQ ID NO: 13572 - RNA, 20 nt, synthetic construct
  source 1..20: mol_type = other RNA
cagagttcacatctccctca

SEQ ID NO: 13573 - RNA, 20 nt, synthetic construct
  source 1..20: mol_type = other RNA
cagatagtgctgtgttgggg

SEQ ID NO: 13574 - RNA, 20 nt, synthetic construct
  source 1..20: mol_type = other RNA
cagatcaagaaattgaaaca

SEQ ID NO: 13575 - RNA, 20 nt, synthetic construct
  source 1..20: mol_type = other RNA
cagatcaattccgcacagac

SEQ ID NO: 13576 - RNA, 20 nt, synthetic construct
  source 1..20: mol_type = other RNA
cagatgcacaggccaattaa

SEQ ID NO: 13577 - RNA, 20 nt, synthetic construct
  source 1..20: mol_type = other RNA
cagatgctgctccatggtct

SEQ ID NO: 13578 - RNA, 20 nt, synthetic construct
  source 1..20: mol_type = other RNA
cagatgtgtaggtaagtgcc

SEQ ID NO: 13579 - RNA, 20 nt, synthetic construct
  source 1..20: mol_type = other RNA
cagattcccaaactgaaaaa

SEQ ID NO: 13580 - RNA, 20 nt, synthetic construct
  source 1..20: mol_type = other RNA
cagattctgaatgagcagga

SEQ ID NO: 13581 - RNA, 20 nt, synthetic construct
  source 1..20: mol_type = other RNA
cagattctttcttatcactc

SEQ ID NO: 13582 - RNA, 20 nt, synthetic construct
  source 1..20: mol_type = other RNA
cagattgtgtttccattgcg

SEQ ID NO: 13583 - RNA, 20 nt, synthetic construct
  source 1..20: mol_type = other RNA
cagcaaaagagcatcattga

SEQ ID NO: 13584 - RNA, 20 nt, synthetic construct
  source 1..20: mol_type = other RNA
cagcaaacaacttcttcaga

SEQ ID NO: 13585 - RNA, 20 nt, synthetic construct
  source 1..20: mol_type = other RNA
cagcaaacacagcaacccca

SEQ ID NO: 13586 - RNA, 20 nt, synthetic construct
  source 1..20: mol_type = other RNA
cagcaaagagaaggatcatt

SEQ ID NO: 13587 - RNA, 20 nt, synthetic construct
  source 1..20: mol_type = other RNA
cagcaaaggtacttgataca

SEQ ID NO: 13588 - RNA, 20 nt, synthetic construct
  source 1..20: mol_type = other RNA
cagcaacagcagcaaaaatt

SEQ ID NO: 13589 - RNA, 20 nt, synthetic construct
  source 1..20: mol_type = other RNA
cagcaaccccaaactgagtc

SEQ ID NO: 13590 - RNA, 20 nt, synthetic construct
  source 1..20: mol_type = other RNA
cagcaatttgcaagctcctg

SEQ ID NO: 13591 - RNA, 20 nt, synthetic construct
  source 1..20: mol_type = other RNA
cagcacaaacacaaccatcc

SEQ ID NO: 13592 - RNA, 20 nt, synthetic construct
  source 1..20: mol_type = other RNA
cagcaccaccagaaaacaaa

SEQ ID NO: 13593 - RNA, 20 nt, synthetic construct
  source 1..20: mol_type = other RNA
cagcactatctgaaaccagg

SEQ ID NO: 13594 - RNA, 20 nt, synthetic construct
  source 1..20: mol_type = other RNA
cagcacttgaatcaacaggc

SEQ ID NO: 13595 - RNA, 20 nt, synthetic construct
  source 1..20: mol_type = other RNA
cagcagcaaaaattacaaat

SEQ ID NO: 13596 - RNA, 20 nt, synthetic construct
  source 1..20: mol_type = other RNA
cagcagcaaacacagcaacc

SEQ ID NO: 13597 - RNA, 20 nt, synthetic construct
  source 1..20: mol_type = other RNA
cagcagcaatttgcaagctc

SEQ ID NO: 13598 - RNA, 20 nt, synthetic construct
  source 1..20: mol_type = other RNA
cagcagtggtttgtctagtc

SEQ ID NO: 13599 - RNA, 20 nt, synthetic construct
  source 1..20: mol_type = other RNA
cagcagttgatgagaaacaa

SEQ ID NO: 13600 - RNA, 20 nt, synthetic construct
  source 1..20: mol_type = other RNA
cagcatcacaggcctcactc

SEQ ID NO: 13601 - RNA, 20 nt, synthetic construct
  source 1..20: mol_type = other RNA
cagcatcatcagcatcacag

SEQ ID NO: 13602 - RNA, 20 nt, synthetic construct
  source 1..20: mol_type = other RNA
cagcatctgaagcagtttca

SEQ ID NO: 13603 - RNA, 20 nt, synthetic construct
  source 1..20: mol_type = other RNA
cagcatgcttttgagtgtcc

SEQ ID NO: 13604 - RNA, 20 nt, synthetic construct
  source 1..20: mol_type = other RNA
cagcccttctccgatgcttt

SEQ ID NO: 13605 - RNA, 20 nt, synthetic construct
  source 1..20: mol_type = other RNA
cagccttgtggatggccccg

SEQ ID NO: 13606 - RNA, 20 nt, synthetic construct
  source 1..20: mol_type = other RNA
cagctagtttactggcatta

SEQ ID NO: 13607 - RNA, 20 nt, synthetic construct
  source 1..20: mol_type = other RNA
cagctcagagttagaggtct

SEQ ID NO: 13608 - RNA, 20 nt, synthetic construct
  source 1..20: mol_type = other RNA
cagctctgaacggtatttaa

SEQ ID NO: 13609 - RNA, 20 nt, synthetic construct
  source 1..20: mol_type = other RNA
cagctgcagtggtgagtgag

SEQ ID NO: 13610 - RNA, 20 nt, synthetic construct
  source 1..20: mol_type = other RNA
cagctgcttctgttctcaat

SEQ ID NO: 13611 - RNA, 20 nt, synthetic construct
  source 1..20: mol_type = other RNA
cagctggagcacaagtcaca

SEQ ID NO: 13612 - RNA, 20 nt, synthetic construct
  source 1..20: mol_type = other RNA
cagctggctttggaggcagc

SEQ ID NO: 13613 - RNA, 20 nt, synthetic construct
  source 1..20: mol_type = other RNA
cagctgtgttgttttctggg

SEQ ID NO: 13614 - RNA, 20 nt, synthetic construct
  source 1..20: mol_type = other RNA
cagctgttcttttggttggt

SEQ ID NO: 13615 - RNA, 20 nt, synthetic construct
  source 1..20: mol_type = other RNA
cagcttccttcagaaggaaa

SEQ ID NO: 13616 - RNA, 20 nt, synthetic construct
  source 1..20: mol_type = other RNA
cagcttgcaggtggattctc

SEQ ID NO: 13617 - RNA, 20 nt, synthetic construct
  source 1..20: mol_type = other RNA
cagcttgttgaccagacata

SEQ ID NO: 13618 - RNA, 20 nt, synthetic construct
  source 1..20: mol_type = other RNA
cagctttagagcagcaaaca

SEQ ID NO: 13619 - RNA, 20 nt, synthetic construct
  source 1..20: mol_type = other RNA
caggaaaaacatttgcatgg

SEQ ID NO: 13620 - RNA, 20 nt, synthetic construct
  source 1..20: mol_type = other RNA
caggaaacaagacccaaaac

SEQ ID NO: 13621 - RNA, 20 nt, synthetic construct
  source 1..20: mol_type = other RNA
caggaatgacatacagactg

SEQ ID NO: 13622 - RNA, 20 nt, synthetic construct
  source 1..20: mol_type = other RNA
caggaatggacttagtctgt

SEQ ID NO: 13623 - RNA, 20 nt, synthetic construct
  source 1..20: mol_type = other RNA
caggacaactcattagtagc

SEQ ID NO: 13624 - RNA, 20 nt, synthetic construct
  source 1..20: mol_type = other RNA
caggacaactgccagcagtt

SEQ ID NO: 13625 - RNA, 20 nt, synthetic construct
  source 1..20: mol_type = other RNA
caggactcacacgactattc

SEQ ID NO: 13626 - RNA, 20 nt, synthetic construct
  source 1..20: mol_type = other RNA
caggagatgggcatatctca

SEQ ID NO: 13627 - RNA, 20 nt, synthetic construct
  source 1..20: mol_type = other RNA
caggagcagaagtcacaaca

SEQ ID NO: 13628 - RNA, 20 nt, synthetic construct
  source 1..20: mol_type = other RNA
caggagcttgcaaattgctg

SEQ ID NO: 13629 - RNA, 20 nt, synthetic construct
  source 1..20: mol_type = other RNA
caggaggggaaaagtgctaa

SEQ ID NO: 13630 - RNA, 20 nt, synthetic construct
  source 1..20: mol_type = other RNA
caggagttcaccatgtgtgt

SEQ ID NO: 13631 - RNA, 20 nt, synthetic construct
  source 1..20: mol_type = other RNA
caggatagaaccaaccatgt

SEQ ID NO: 13632 - RNA, 20 nt, synthetic construct
  source 1..20: mol_type = other RNA
caggatggattgaattgaag

SEQ ID NO: 13633 - RNA, 20 nt, synthetic construct
  source 1..20: mol_type = other RNA
caggatgtgtagtctgttct

SEQ ID NO: 13634 - RNA, 20 nt, synthetic construct
  source 1..20: mol_type = other RNA
caggcacaggaaaaacattt

SEQ ID NO: 13635 - RNA, 20 nt, synthetic construct
  source 1..20: mol_type = other RNA
caggcagcacaaacacaacc

SEQ ID NO: 13636 - RNA, 20 nt, synthetic construct
  source 1..20: mol_type = other RNA
caggcagtgggcttccattc

SEQ ID NO: 13637 - RNA, 20 nt, synthetic construct
  source 1..20: mol_type = other RNA
caggcatgtggcttgcatcc

SEQ ID NO: 13638 - RNA, 20 nt, synthetic construct
  source 1..20: mol_type = other RNA
caggcatgttggaatttcca

SEQ ID NO: 13639 - RNA, 20 nt, synthetic construct
  source 1..20: mol_type = other RNA
caggccaattaaggtggaac

SEQ ID NO: 13640 - RNA, 20 nt, synthetic construct
  source 1..20: mol_type = other RNA
caggcccactgcagttatgt

SEQ ID NO: 13641 - RNA, 20 nt, synthetic construct
  source 1..20: mol_type = other RNA
caggcctcactcaccactgc

SEQ ID NO: 13642 - RNA, 20 nt, synthetic construct
  source 1..20: mol_type = other RNA
caggctactaatgagttgtc

SEQ ID NO: 13643 - RNA, 20 nt, synthetic construct
  source 1..20: mol_type = other RNA
caggcttcagagactgagcc

SEQ ID NO: 13644 - RNA, 20 nt, synthetic construct
  source 1..20: mol_type = other RNA
caggcttgcttcggggccat

SEQ ID NO: 13645 - RNA, 20 nt, synthetic construct
  source 1..20: mol_type = other RNA
cagggaaccacaaagctagc

SEQ ID NO: 13646 - RNA, 20 nt, synthetic construct
  source 1..20: mol_type = other RNA
cagggacaatgactgttcca

SEQ ID NO: 13647 - RNA, 20 nt, synthetic construct
  source 1..20: mol_type = other RNA
cagggaggaagtcacactca

SEQ ID NO: 13648 - RNA, 20 nt, synthetic construct
  source 1..20: mol_type = other RNA
cagggatataaaaatagaaa

SEQ ID NO: 13649 - RNA, 20 nt, synthetic construct
  source 1..20: mol_type = other RNA
cagggcagatcaattccgca

SEQ ID NO: 13650 - RNA, 20 nt, synthetic construct
  source 1..20: mol_type = other RNA
cagggccagtcacagttttg

SEQ ID NO: 13651 - RNA, 20 nt, synthetic construct
  source 1..20: mol_type = other RNA
cagggtattccataataact

SEQ ID NO: 13652 - RNA, 20 nt, synthetic construct
  source 1..20: mol_type = other RNA
caggtatttagcattgcagc

SEQ ID NO: 13653 - RNA, 20 nt, synthetic construct
  source 1..20: mol_type = other RNA
caggtgaaagcagtcaacca

SEQ ID NO: 13654 - RNA, 20 nt, synthetic construct
  source 1..20: mol_type = other RNA
caggtgcacttctccaaaac

SEQ ID NO: 13655 - RNA, 20 nt, synthetic construct
  source 1..20: mol_type = other RNA
caggtgctttcaagaacagg

SEQ ID NO: 13656 - RNA, 20 nt, synthetic construct
  source 1..20: mol_type = other RNA
caggtggattctcttgctta

SEQ ID NO: 13657 - RNA, 20 nt, synthetic construct
  source 1..20: mol_type = other RNA
caggtgtatccaataaattt

SEQ ID NO: 13658 - RNA, 20 nt, synthetic construct
  source 1..20: mol_type = other RNA
caggttccaccttaattggc

SEQ ID NO: 13659 - RNA, 20 nt, synthetic construct
  source 1..20: mol_type = other RNA
caggttccagcagcaatttg

SEQ ID NO: 13660 - RNA, 20 nt, synthetic construct
  source 1..20: mol_type = other RNA
caggttcctcagcttccttc

SEQ ID NO: 13661 - RNA, 20 nt, synthetic construct
  source 1..20: mol_type = other RNA
caggtttaccctctattttc

SEQ ID NO: 13662 - RNA, 20 nt, synthetic construct
  source 1..20: mol_type = other RNA
caggtttcttgttcaaacaa

SEQ ID NO: 13663 - RNA, 20 nt, synthetic construct
  source 1..20: mol_type = other RNA
cagtaaactagctgcaatgc

SEQ ID NO: 13664 - RNA, 20 nt, synthetic construct
  source 1..20: mol_type = other RNA
cagtacatttctggcactta

SEQ ID NO: 13665 - RNA, 20 nt, synthetic construct
  source 1..20: mol_type = other RNA
cagtatcaacccaatctctc

SEQ ID NO: 13666 - RNA, 20 nt, synthetic construct
  source 1..20: mol_type = other RNA
cagtattcaaaatcaagcga

SEQ ID NO: 13667 - RNA, 20 nt, synthetic construct
  source 1..20: mol_type = other RNA
cagtcaaccaaatgtctccg

SEQ ID NO: 13668 - RNA, 20 nt, synthetic construct
  source 1..20: mol_type = other RNA
cagtcacagttttgactaga

SEQ ID NO: 13669 - RNA, 20 nt, synthetic construct
  source 1..20: mol_type = other RNA
cagtcactgtgtggcactag

SEQ ID NO: 13670 - RNA, 20 nt, synthetic construct
  source 1..20: mol_type = other RNA
cagtcaggctactaatgagt

SEQ ID NO: 13671 - RNA, 20 nt, synthetic construct
  source 1..20: mol_type = other RNA
cagtcattgtccctgcagtc

SEQ ID NO: 13672 - RNA, 20 nt, synthetic construct
  source 1..20: mol_type = other RNA
cagtcccaaggtacagtgga

SEQ ID NO: 13673 - RNA, 20 nt, synthetic construct
  source 1..20: mol_type = other RNA
cagtcccatttggacattat

SEQ ID NO: 13674 - RNA, 20 nt, synthetic construct
  source 1..20: mol_type = other RNA
cagtctctgaagcctgttga

SEQ ID NO: 13675 - RNA, 20 nt, synthetic construct
  source 1..20: mol_type = other RNA
cagtctgtatgtcattcctg

SEQ ID NO: 13676 - RNA, 20 nt, synthetic construct
  source 1..20: mol_type = other RNA
cagtgactgcacatgagctt

SEQ ID NO: 13677 - RNA, 20 nt, synthetic construct
  source 1..20: mol_type = other RNA
cagtgatgcctcattacgtt

SEQ ID NO: 13678 - RNA, 20 nt, synthetic construct
  source 1..20: mol_type = other RNA
cagtgctaatgcctaatggt

SEQ ID NO: 13679 - RNA, 20 nt, synthetic construct
  source 1..20: mol_type = other RNA
cagtggaccaacatctccag

SEQ ID NO: 13680 - RNA, 20 nt, synthetic construct
  source 1..20: mol_type = other RNA
cagtggagagctacaggaca

SEQ ID NO: 13681 - RNA, 20 nt, synthetic construct
  source 1..20: mol_type = other RNA
cagtgggcctgaaaatccag

SEQ ID NO: 13682 - RNA, 20 nt, synthetic construct
  source 1..20: mol_type = other RNA
cagtgggcttccattctgga

SEQ ID NO: 13683 - RNA, 20 nt, synthetic construct
  source 1..20: mol_type = other RNA
cagtggtgagtgaggcctgt

SEQ ID NO: 13684 - RNA, 20 nt, synthetic construct
  source 1..20: mol_type = other RNA
cagtggtttgtctagtcaaa

SEQ ID NO: 13685 - RNA, 20 nt, synthetic construct
  source 1..20: mol_type = other RNA
cagtgtattgtttggaggtc

SEQ ID NO: 13686 - RNA, 20 nt, synthetic construct
  source 1..20: mol_type = other RNA
cagtgttcactaaggattcc

SEQ ID NO: 13687 - RNA, 20 nt, synthetic construct
  source 1..20: mol_type = other RNA
cagtgttgaaacagcacttg

SEQ ID NO: 13688 - RNA, 20 nt, synthetic construct
  source 1..20: mol_type = other RNA
cagtgttttttccaggagtt

SEQ ID NO: 13689 - RNA, 20 nt, synthetic construct
  source 1..20: mol_type = other RNA
cagttaaagatttcaccagt

SEQ ID NO: 13690 - RNA, 20 nt, synthetic construct
  source 1..20: mol_type = other RNA
cagttagtgaaccttctctc

SEQ ID NO: 13691 - RNA, 20 nt, synthetic construct
  source 1..20: mol_type = other RNA
cagttatgtgttgaaaaact

SEQ ID NO: 13692 - RNA, 20 nt, synthetic construct
  source 1..20: mol_type = other RNA
cagttccaaaaaccctcaca

SEQ ID NO: 13693 - RNA, 20 nt, synthetic construct
  source 1..20: mol_type = other RNA
cagttctacagggatataaa

SEQ ID NO: 13694 - RNA, 20 nt, synthetic construct
  source 1..20: mol_type = other RNA
cagttgatgagaaacaaaga

SEQ ID NO: 13695 - RNA, 20 nt, synthetic construct
  source 1..20: mol_type = other RNA
cagttgtcctgtagctctcc

SEQ ID NO: 13696 - RNA, 20 nt, synthetic construct
  source 1..20: mol_type = other RNA
cagtttcacgccaagtcgtt

SEQ ID NO: 13697 - RNA, 20 nt, synthetic construct
  source 1..20: mol_type = other RNA
cagtttctgcctcttccgtg

SEQ ID NO: 13698 - RNA, 20 nt, synthetic construct
  source 1..20: mol_type = other RNA
cagtttgggaatctgctctt

SEQ ID NO: 13699 - RNA, 20 nt, synthetic construct
  source 1..20: mol_type = other RNA
cagtttggggttgctgtgtt

SEQ ID NO: 13700 - RNA, 20 nt, synthetic construct
  source 1..20: mol_type = other RNA
cagttttgactagacaaacc

SEQ ID NO: 13701 - RNA, 20 nt, synthetic construct
  source 1..20: mol_type = other RNA
cagtttttcaacacataact

SEQ ID NO: 13702 - RNA, 20 nt, synthetic construct
  source 1..20: mol_type = other RNA
cagtttttgagatatgccca

SEQ ID NO: 13703 - RNA, 20 nt, synthetic construct
  source 1..20: mol_type = other RNA
cataaacaggcagcacaaac

SEQ ID NO: 13704 - RNA, 20 nt, synthetic construct
  source 1..20: mol_type = other RNA
cataaatgccattaacagtc

SEQ ID NO: 13705 - RNA, 20 nt, synthetic construct
  source 1..20: mol_type = other RNA
cataaccatgcaaatgtttt

SEQ ID NO: 13706 - RNA, 20 nt, synthetic construct
  source 1..20: mol_type = other RNA
cataacccaccaatttttgg

SEQ ID NO: 13707 - RNA, 20 nt, synthetic construct
  source 1..20: mol_type = other RNA
cataactgcagtgggcctga

SEQ ID NO: 13708 - RNA, 20 nt, synthetic construct
  source 1..20: mol_type = other RNA
cataagcctcataaacaggc

SEQ ID NO: 13709 - RNA, 20 nt, synthetic construct
  source 1..20: mol_type = other RNA
cataaggctcttactctcaa

SEQ ID NO: 13710 - RNA, 20 nt, synthetic construct
  source 1..20: mol_type = other RNA
cataagtttttcagtttggg

SEQ ID NO: 13711 - RNA, 20 nt, synthetic construct
  source 1..20: mol_type = other RNA
cataataacttttgaaagag

SEQ ID NO: 13712 - RNA, 20 nt, synthetic construct
  source 1..20: mol_type = other RNA
cataatgtccaaatgggact

SEQ ID NO: 13713 - RNA, 20 nt, synthetic construct
  source 1..20: mol_type = other RNA
catacagactgcagggacaa

SEQ ID NO: 13714 - RNA, 20 nt, synthetic construct
  source 1..20: mol_type = other RNA
catacaggcatgtggcttgc

SEQ ID NO: 13715 - RNA, 20 nt, synthetic construct
  source 1..20: mol_type = other RNA
catacagggtattccataat

SEQ ID NO: 13716 - RNA, 20 nt, synthetic construct
  source 1..20: mol_type = other RNA
catacatgtgtagatggatt

SEQ ID NO: 13717 - RNA, 20 nt, synthetic construct
  source 1..20: mol_type = other RNA
catacctcagggcagatcaa

SEQ ID NO: 13718 - RNA, 20 nt, synthetic construct
  source 1..20: mol_type = other RNA
catagtcagatgcacaggcc

SEQ ID NO: 13719 - RNA, 20 nt, synthetic construct
  source 1..20: mol_type = other RNA
catatctcaaaaactgattt

SEQ ID NO: 13720 - RNA, 20 nt, synthetic construct
  source 1..20: mol_type = other RNA
catatcttggtttctatttt

SEQ ID NO: 13721 - RNA, 20 nt, synthetic construct
  source 1..20: mol_type = other RNA
catattgagtcttgacaggt

SEQ ID NO: 13722 - RNA, 20 nt, synthetic construct
  source 1..20: mol_type = other RNA
catcaactgctggcagttgt

SEQ ID NO: 13723 - RNA, 20 nt, synthetic construct
  source 1..20: mol_type = other RNA
catcaattcttcagtatcaa

SEQ ID NO: 13724 - RNA, 20 nt, synthetic construct
  source 1..20: mol_type = other RNA
catcacaattgcttctttct

SEQ ID NO: 13725 - RNA, 20 nt, synthetic construct
  source 1..20: mol_type = other RNA
catcacaggcctcactcacc

SEQ ID NO: 13726 - RNA, 20 nt, synthetic construct
  source 1..20: mol_type = other RNA
catcacatgcaatattttcc

SEQ ID NO: 13727 - RNA, 20 nt, synthetic construct
  source 1..20: mol_type = other RNA
catcacctcccatttgccag

SEQ ID NO: 13728 - RNA, 20 nt, synthetic construct
  source 1..20: mol_type = other RNA
catcactgccatcaattctt

SEQ ID NO: 13729 - RNA, 20 nt, synthetic construct
  source 1..20: mol_type = other RNA
catcagcatcacaggcctca

SEQ ID NO: 13730 - RNA, 20 nt, synthetic construct
  source 1..20: mol_type = other RNA
catcaggcttgcttcggggc

SEQ ID NO: 13731 - RNA, 20 nt, synthetic construct
  source 1..20: mol_type = other RNA
catcatcagcatcacaggcc

SEQ ID NO: 13732 - RNA, 20 nt, synthetic construct
  source 1..20: mol_type = other RNA
catcattgagaccatggagc

SEQ ID NO: 13733 - RNA, 20 nt, synthetic construct
  source 1..20: mol_type = other RNA
catccagaagtaaatggaga

SEQ ID NO: 13734 - RNA, 20 nt, synthetic construct
  source 1..20: mol_type = other RNA
catccagggaaccacaaagc

SEQ ID NO: 13735 - RNA, 20 nt, synthetic construct
  source 1..20: mol_type = other RNA
catccaggttccaccttaat

SEQ ID NO: 13736 - RNA, 20 nt, synthetic construct
  source 1..20: mol_type = other RNA
catcccagagttcacatctc

SEQ ID NO: 13737 - RNA, 20 nt, synthetic construct
  source 1..20: mol_type = other RNA
catcctgaactttttgcagg

SEQ ID NO: 13738 - RNA, 20 nt, synthetic construct
  source 1..20: mol_type = other RNA
catcctggtttcagatagtg

SEQ ID NO: 13739 - RNA, 20 nt, synthetic construct
  source 1..20: mol_type = other RNA
catcgcatacctcagggcag

SEQ ID NO: 13740 - RNA, 20 nt, synthetic construct
  source 1..20: mol_type = other RNA
catcggagaagggctgcata

SEQ ID NO: 13741 - RNA, 20 nt, synthetic construct
  source 1..20: mol_type = other RNA
catctaaaacgtaatgaggc

SEQ ID NO: 13742 - RNA, 20 nt, synthetic construct
  source 1..20: mol_type = other RNA
catctacacatgtatgcagc

SEQ ID NO: 13743 - RNA, 20 nt, synthetic construct
  source 1..20: mol_type = other RNA
catctcacataaatgccatt

SEQ ID NO: 13744 - RNA, 20 nt, synthetic construct
  source 1..20: mol_type = other RNA
catctccagttccaaaaacc

SEQ ID NO: 13745 - RNA, 20 nt, synthetic construct
  source 1..20: mol_type = other RNA
catctccctcaaaaccagca

SEQ ID NO: 13746 - RNA, 20 nt, synthetic construct
  source 1..20: mol_type = other RNA
catctcctgcagaaaataac

SEQ ID NO: 13747 - RNA, 20 nt, synthetic construct
  source 1..20: mol_type = other RNA
catctcttacagaagcaaga

SEQ ID NO: 13748 - RNA, 20 nt, synthetic construct
  source 1..20: mol_type = other RNA
catctgaagcagtttcacgc

SEQ ID NO: 13749 - RNA, 20 nt, synthetic construct
  source 1..20: mol_type = other RNA
catctgactatggcaagact

SEQ ID NO: 13750 - RNA, 20 nt, synthetic construct
  source 1..20: mol_type = other RNA
catctgcaagatgggaaatc

SEQ ID NO: 13751 - RNA, 20 nt, synthetic construct
  source 1..20: mol_type = other RNA
catcttgcagatgtgtaggt

SEQ ID NO: 13752 - RNA, 20 nt, synthetic construct
  source 1..20: mol_type = other RNA
catgaaaacattcttccact

SEQ ID NO: 13753 - RNA, 20 nt, synthetic construct
  source 1..20: mol_type = other RNA
catgaaatcaagtgcatgca

SEQ ID NO: 13754 - RNA, 20 nt, synthetic construct
  source 1..20: mol_type = other RNA
catgacaagaacattgtatt

SEQ ID NO: 13755 - RNA, 20 nt, synthetic construct
  source 1..20: mol_type = other RNA
catgagcttttggtaaatgg

SEQ ID NO: 13756 - RNA, 20 nt, synthetic construct
  source 1..20: mol_type = other RNA
catgcaaaatacaggtttct

SEQ ID NO: 13757 - RNA, 20 nt, synthetic construct
  source 1..20: mol_type = other RNA
catgcaaatgtttttcctgt

SEQ ID NO: 13758 - RNA, 20 nt, synthetic construct
  source 1..20: mol_type = other RNA
catgcaatattttccaaata

SEQ ID NO: 13759 - RNA, 20 nt, synthetic construct
  source 1..20: mol_type = other RNA
catgcacttgatttcatggt

SEQ ID NO: 13760 - RNA, 20 nt, synthetic construct
  source 1..20: mol_type = other RNA
catgcctggggggctcccaa

SEQ ID NO: 13761 - RNA, 20 nt, synthetic construct
  source 1..20: mol_type = other RNA
catgcctgtatgcacacagc

SEQ ID NO: 13762 - RNA, 20 nt, synthetic construct
  source 1..20: mol_type = other RNA
catgctgctctaaggtggca

SEQ ID NO: 13763 - RNA, 20 nt, synthetic construct
  source 1..20: mol_type = other RNA
catgcttttgagtgtccttc

SEQ ID NO: 13764 - RNA, 20 nt, synthetic construct
  source 1..20: mol_type = other RNA
catggaaaaaggtaactaag

SEQ ID NO: 13765 - RNA, 20 nt, synthetic construct
  source 1..20: mol_type = other RNA
catggagcagcatctgaagc

SEQ ID NO: 13766 - RNA, 20 nt, synthetic construct
  source 1..20: mol_type = other RNA
catggtaattagcacttttc

SEQ ID NO: 13767 - RNA, 20 nt, synthetic construct
  source 1..20: mol_type = other RNA
catggtctcaatgatgctct

SEQ ID NO: 13768 - RNA, 20 nt, synthetic construct
  source 1..20: mol_type = other RNA
catggtctgactataagggg

SEQ ID NO: 13769 - RNA, 20 nt, synthetic construct
  source 1..20: mol_type = other RNA
catggtgaaaatcagtattc

SEQ ID NO: 13770 - RNA, 20 nt, synthetic construct
  source 1..20: mol_type = other RNA
catggtgaactcctggaaaa

SEQ ID NO: 13771 - RNA, 20 nt, synthetic construct
  source 1..20: mol_type = other RNA
catggttatgtatcaagtac

SEQ ID NO: 13772 - RNA, 20 nt, synthetic construct
  source 1..20: mol_type = other RNA
catggttggttctatcctgt

SEQ ID NO: 13773 - RNA, 20 nt, synthetic construct
  source 1..20: mol_type = other RNA
catgtatgcagcccttctcc

SEQ ID NO: 13774 - RNA, 20 nt, synthetic construct
  source 1..20: mol_type = other RNA
catgtgatgcaagttttggg

SEQ ID NO: 13775 - RNA, 20 nt, synthetic construct
  source 1..20: mol_type = other RNA
catgtgcagtcactgtgtgg

SEQ ID NO: 13776 - RNA, 20 nt, synthetic construct
  source 1..20: mol_type = other RNA
catgtggcttgcatccaggt

SEQ ID NO: 13777 - RNA, 20 nt, synthetic construct
  source 1..20: mol_type = other RNA
catgtgtagatggattagga

SEQ ID NO: 13778 - RNA, 20 nt, synthetic construct
  source 1..20: mol_type = other RNA
catgtgtctcagtacatttc

SEQ ID NO: 13779 - RNA, 20 nt, synthetic construct
  source 1..20: mol_type = other RNA
catgtgtgtgttccacggaa

SEQ ID NO: 13780 - RNA, 20 nt, synthetic construct
  source 1..20: mol_type = other RNA
catgttgagggcaacagact

SEQ ID NO: 13781 - RNA, 20 nt, synthetic construct
  source 1..20: mol_type = other RNA
catgttggaatttccagtgt

SEQ ID NO: 13782 - RNA, 20 nt, synthetic construct
  source 1..20: mol_type = other RNA
catgttttgttttctggtgg

SEQ ID NO: 13783 - RNA, 20 nt, synthetic construct
  source 1..20: mol_type = other RNA
cattaacagtcaggctacta

SEQ ID NO: 13784 - RNA, 20 nt, synthetic construct
  source 1..20: mol_type = other RNA
cattacgttttagatgggat

SEQ ID NO: 13785 - RNA, 20 nt, synthetic construct
  source 1..20: mol_type = other RNA
cattagcactgccttgtttt

SEQ ID NO: 13786 - RNA, 20 nt, synthetic construct
  source 1..20: mol_type = other RNA
cattagccttttggtcttgt

SEQ ID NO: 13787 - RNA, 20 nt, synthetic construct
  source 1..20: mol_type = other RNA
cattaggcattagcactgcc

SEQ ID NO: 13788 - RNA, 20 nt, synthetic construct
  source 1..20: mol_type = other RNA
cattagtagcctgactgtta

SEQ ID NO: 13789 - RNA, 20 nt, synthetic construct
  source 1..20: mol_type = other RNA
cattatcacagcttgcaggt

SEQ ID NO: 13790 - RNA, 20 nt, synthetic construct
  source 1..20: mol_type = other RNA
cattatcagcatcatcagca

SEQ ID NO: 13791 - RNA, 20 nt, synthetic construct
  source 1..20: mol_type = other RNA
cattatgagtctcgaactcg

SEQ ID NO: 13792 - RNA, 20 nt, synthetic construct
  source 1..20: mol_type = other RNA
cattatttggaaaatattgc

SEQ ID NO: 13793 - RNA, 20 nt, synthetic construct
  source 1..20: mol_type = other RNA
cattcagaatctgaagctct

SEQ ID NO: 13794 - RNA, 20 nt, synthetic construct
  source 1..20: mol_type = other RNA
cattcagagtgctttttcct

SEQ ID NO: 13795 - RNA, 20 nt, synthetic construct
  source 1..20: mol_type = other RNA
cattcctgataccatcacct

SEQ ID NO: 13796 - RNA, 20 nt, synthetic construct
  source 1..20: mol_type = other RNA
cattcctgttcacacaatta

SEQ ID NO: 13797 - RNA, 20 nt, synthetic construct
  source 1..20: mol_type = other RNA
cattctggagctttgtagcc

SEQ ID NO: 13798 - RNA, 20 nt, synthetic construct
  source 1..20: mol_type = other RNA
cattcttccactttagtctg

SEQ ID NO: 13799 - RNA, 20 nt, synthetic construct
  source 1..20: mol_type = other RNA
cattctttggccagactaaa

SEQ ID NO: 13800 - RNA, 20 nt, synthetic construct
  source 1..20: mol_type = other RNA
cattgagaccatggagcagc

SEQ ID NO: 13801 - RNA, 20 nt, synthetic construct
  source 1..20: mol_type = other RNA
cattgcagctagtttactgg

SEQ ID NO: 13802 - RNA, 20 nt, synthetic construct
  source 1..20: mol_type = other RNA
cattgcggtgcagaaaacca

SEQ ID NO: 13803 - RNA, 20 nt, synthetic construct
  source 1..20: mol_type = other RNA
cattggtcttgttttctcag

SEQ ID NO: 13804 - RNA, 20 nt, synthetic construct
  source 1..20: mol_type = other RNA
cattgtccctgcagtctgta

SEQ ID NO: 13805 - RNA, 20 nt, synthetic construct
  source 1..20: mol_type = other RNA
cattgtgttctgagaaaaca

SEQ ID NO: 13806 - RNA, 20 nt, synthetic construct
  source 1..20: mol_type = other RNA
cattgttgctttgggggtga

SEQ ID NO: 13807 - RNA, 20 nt, synthetic construct
  source 1..20: mol_type = other RNA
catttaccaaaagctcatgt

SEQ ID NO: 13808 - RNA, 20 nt, synthetic construct
  source 1..20: mol_type = other RNA
catttacttctggatgagct

SEQ ID NO: 13809 - RNA, 20 nt, synthetic construct
  source 1..20: mol_type = other RNA
catttatgtgagatgtggtt

SEQ ID NO: 13810 - RNA, 20 nt, synthetic construct
  source 1..20: mol_type = other RNA
catttcaacttggtacattt

SEQ ID NO: 13811 - RNA, 20 nt, synthetic construct
  source 1..20: mol_type = other RNA
catttcaacttttacttgct

SEQ ID NO: 13812 - RNA, 20 nt, synthetic construct
  source 1..20: mol_type = other RNA
catttctggcacttacctac

SEQ ID NO: 13813 - RNA, 20 nt, synthetic construct
  source 1..20: mol_type = other RNA
catttgattggagagattgg

SEQ ID NO: 13814 - RNA, 20 nt, synthetic construct
  source 1..20: mol_type = other RNA
catttgcatggttatgtatc

SEQ ID NO: 13815 - RNA, 20 nt, synthetic construct
  source 1..20: mol_type = other RNA
catttgccagacagaacctc

SEQ ID NO: 13816 - RNA, 20 nt, synthetic construct
  source 1..20: mol_type = other RNA
catttggacattatgagtct

SEQ ID NO: 13817 - RNA, 20 nt, synthetic construct
  source 1..20: mol_type = other RNA
catttggttgactgctttca

SEQ ID NO: 13818 - RNA, 20 nt, synthetic construct
  source 1..20: mol_type = other RNA
catttgtgacttgtgctcca

SEQ ID NO: 13819 - RNA, 20 nt, synthetic construct
  source 1..20: mol_type = other RNA
cattttcaaactcacacctt

SEQ ID NO: 13820 - RNA, 20 nt, synthetic construct
  source 1..20: mol_type = other RNA
cattttcaacaaagagcaga

SEQ ID NO: 13821 - RNA, 20 nt, synthetic construct
  source 1..20: mol_type = other RNA
cattttcttgggctacagaa

SEQ ID NO: 13822 - RNA, 20 nt, synthetic construct
  source 1..20: mol_type = other RNA
cattttgcaaacacttggaa

SEQ ID NO: 13823 - RNA, 20 nt, synthetic construct
  source 1..20: mol_type = other RNA
cattttgttttaaataccgt

SEQ ID NO: 13824 - RNA, 20 nt, synthetic construct
  source 1..20: mol_type = other RNA
ccaaaaaccctcacaccagg

SEQ ID NO: 13825 - RNA, 20 nt, synthetic construct
  source 1..20: mol_type = other RNA
ccaaaaattggtgggttatg

SEQ ID NO: 13826 - RNA, 20 nt, synthetic construct
  source 1..20: mol_type = other RNA
ccaaaacagaccatttacca

SEQ ID NO: 13827 - RNA, 20 nt, synthetic construct
  source 1..20: mol_type = other RNA
ccaaaacttgcatcacatgc

SEQ ID NO: 13828 - RNA, 20 nt, synthetic construct
  source 1..20: mol_type = other RNA
ccaaaagaacagctgcttct

SEQ ID NO: 13829 - RNA, 20 nt, synthetic construct
  source 1..20: mol_type = other RNA
ccaaaagctcatgtgcagtc

SEQ ID NO: 13830 - RNA, 20 nt, synthetic construct
  source 1..20: mol_type = other RNA
ccaaaaggctaatggagaaa

SEQ ID NO: 13831 - RNA, 20 nt, synthetic construct
  source 1..20: mol_type = other RNA
ccaaacaatacactggaaat

SEQ ID NO: 13832 - RNA, 20 nt, synthetic construct
  source 1..20: mol_type = other RNA
ccaaactgaaaaacttatgt

SEQ ID NO: 13833 - RNA, 20 nt, synthetic construct
  source 1..20: mol_type = other RNA
ccaaactgagtcttgccata

SEQ ID NO: 13834 - RNA, 20 nt, synthetic construct
  source 1..20: mol_type = other RNA
ccaaagaatgatccttctct

SEQ ID NO: 13835 - RNA, 20 nt, synthetic construct
  source 1..20: mol_type = other RNA
ccaaagcaacaatgatcagc

SEQ ID NO: 13836 - RNA, 20 nt, synthetic construct
  source 1..20: mol_type = other RNA
ccaaagcaagatcttcttca

SEQ ID NO: 13837 - RNA, 20 nt, synthetic construct
  source 1..20: mol_type = other RNA
ccaaagccagctgcagtggt

SEQ ID NO: 13838 - RNA, 20 nt, synthetic construct
  source 1..20: mol_type = other RNA
ccaaagtaacacaacacttt

SEQ ID NO: 13839 - RNA, 20 nt, synthetic construct
  source 1..20: mol_type = other RNA
ccaaataatgtgatcccaaa

SEQ ID NO: 13840 - RNA, 20 nt, synthetic construct
  source 1..20: mol_type = other RNA
ccaaatgggactggaggaag

SEQ ID NO: 13841 - RNA, 20 nt, synthetic construct
  source 1..20: mol_type = other RNA
ccaaatgtctccgatttgag

SEQ ID NO: 13842 - RNA, 20 nt, synthetic construct
  source 1..20: mol_type = other RNA
ccaaattactagatactcct

SEQ ID NO: 13843 - RNA, 20 nt, synthetic construct
  source 1..20: mol_type = other RNA
ccaacacagcactatctgaa

SEQ ID NO: 13844 - RNA, 20 nt, synthetic construct
  source 1..20: mol_type = other RNA
ccaacatctccagttccaaa

SEQ ID NO: 13845 - RNA, 20 nt, synthetic construct
  source 1..20: mol_type = other RNA
ccaacatgcctggggggctc

SEQ ID NO: 13846 - RNA, 20 nt, synthetic construct
  source 1..20: mol_type = other RNA
ccaaccaaaagaacagctgc

SEQ ID NO: 13847 - RNA, 20 nt, synthetic construct
  source 1..20: mol_type = other RNA
ccaaccaaagtaacacaaca

SEQ ID NO: 13848 - RNA, 20 nt, synthetic construct
  source 1..20: mol_type = other RNA
ccaaccatgttgagggcaac

SEQ ID NO: 13849 - RNA, 20 nt, synthetic construct
  source 1..20: mol_type = other RNA
ccaagaaaatgcagttaaag

SEQ ID NO: 13850 - RNA, 20 nt, synthetic construct
  source 1..20: mol_type = other RNA
ccaagaaagaaatccaggtg

SEQ ID NO: 13851 - RNA, 20 nt, synthetic construct
  source 1..20: mol_type = other RNA
ccaagatatgtctggtcaac

SEQ ID NO: 13852 - RNA, 20 nt, synthetic construct
  source 1..20: mol_type = other RNA
ccaagcggaatcccatctaa

SEQ ID NO: 13853 - RNA, 20 nt, synthetic construct
  source 1..20: mol_type = other RNA
ccaaggcaagcttacaccca

SEQ ID NO: 13854 - RNA, 20 nt, synthetic construct
  source 1..20: mol_type = other RNA
ccaaggtacagtggaccaac

SEQ ID NO: 13855 - RNA, 20 nt, synthetic construct
  source 1..20: mol_type = other RNA
ccaagtcgttatttgaccat

SEQ ID NO: 13856 - RNA, 20 nt, synthetic construct
  source 1..20: mol_type = other RNA
ccaagtggcactctttcaaa

SEQ ID NO: 13857 - RNA, 20 nt, synthetic construct
  source 1..20: mol_type = other RNA
ccaagtgtttgcaaaatgga

SEQ ID NO: 13858 - RNA, 20 nt, synthetic construct
  source 1..20: mol_type = other RNA
ccaagttgaaatgaatcaag

SEQ ID NO: 13859 - RNA, 20 nt, synthetic construct
  source 1..20: mol_type = other RNA
ccaatcaaatgacctccaaa

SEQ ID NO: 13860 - RNA, 20 nt, synthetic construct
  source 1..20: mol_type = other RNA
ccaatctctccaatcaaatg

SEQ ID NO: 13861 - RNA, 20 nt, synthetic construct
  source 1..20: mol_type = other RNA
ccaatgtcagaacacctcaa

SEQ ID NO: 13862 - RNA, 20 nt, synthetic construct
  source 1..20: mol_type = other RNA
ccaattaaggtggaacctgg

SEQ ID NO: 13863 - RNA, 20 nt, synthetic construct
  source 1..20: mol_type = other RNA
ccaatttttggtagcagtgg

SEQ ID NO: 13864 - RNA, 20 nt, synthetic construct
  source 1..20: mol_type = other RNA
ccacaaagctagcgtctggt

SEQ ID NO: 13865 - RNA, 20 nt, synthetic construct
  source 1..20: mol_type = other RNA
ccacacagtgactgcacatg

SEQ ID NO: 13866 - RNA, 20 nt, synthetic construct
  source 1..20: mol_type = other RNA
ccacaccaccaccaccatca

SEQ ID NO: 13867 - RNA, 20 nt, synthetic construct
  source 1..20: mol_type = other RNA
ccacaccccagctttagagc

SEQ ID NO: 13868 - RNA, 20 nt, synthetic construct
  source 1..20: mol_type = other RNA
ccacaggttcctcagcttcc

SEQ ID NO: 13869 - RNA, 20 nt, synthetic construct
  source 1..20: mol_type = other RNA
ccacatctcacataaatgcc

SEQ ID NO: 13870 - RNA, 20 nt, synthetic construct
  source 1..20: mol_type = other RNA
ccacatgcctgtatgcacac

SEQ ID NO: 13871 - RNA, 20 nt, synthetic construct
  source 1..20: mol_type = other RNA
ccaccaatttttggtagcag

SEQ ID NO: 13872 - RNA, 20 nt, synthetic construct
  source 1..20: mol_type = other RNA
ccaccaccaccatcacaatt

SEQ ID NO: 13873 - RNA, 20 nt, synthetic construct
  source 1..20: mol_type = other RNA
ccaccaccatcacaattgct

SEQ ID NO: 13874 - RNA, 20 nt, synthetic construct
  source 1..20: mol_type = other RNA
ccaccactaccccaaccaaa

SEQ ID NO: 13875 - RNA, 20 nt, synthetic construct
  source 1..20: mol_type = other RNA
ccaccagaaaacaaaacatg

SEQ ID NO: 13876 - RNA, 20 nt, synthetic construct
  source 1..20: mol_type = other RNA
ccaccaggagcttgcaaatt

SEQ ID NO: 13877 - RNA, 20 nt, synthetic construct
  source 1..20: mol_type = other RNA
ccaccatcacaattgcttct

SEQ ID NO: 13878 - RNA, 20 nt, synthetic construct
  source 1..20: mol_type = other RNA
ccaccattcagagtgctttt

SEQ ID NO: 13879 - RNA, 20 nt, synthetic construct
  source 1..20: mol_type = other RNA
ccacctgcaagctgtgataa

SEQ ID NO: 13880 - RNA, 20 nt, synthetic construct
  source 1..20: mol_type = other RNA
ccaccttaattggcctgtgc

SEQ ID NO: 13881 - RNA, 20 nt, synthetic construct
  source 1..20: mol_type = other RNA
ccaccttagagcagcatgct

SEQ ID NO: 13882 - RNA, 20 nt, synthetic construct
  source 1..20: mol_type = other RNA
ccaccttcccagagtcctaa

SEQ ID NO: 13883 - RNA, 20 nt, synthetic construct
  source 1..20: mol_type = other RNA
ccacggaagaggcagaaact

SEQ ID NO: 13884 - RNA, 20 nt, synthetic construct
  source 1..20: mol_type = other RNA
ccactaccacaccaccacca

SEQ ID NO: 13885 - RNA, 20 nt, synthetic construct
  source 1..20: mol_type = other RNA
ccactaccccaaccaaagta

SEQ ID NO: 13886 - RNA, 20 nt, synthetic construct
  source 1..20: mol_type = other RNA
ccactgcagctggctttgga

SEQ ID NO: 13887 - RNA, 20 nt, synthetic construct
  source 1..20: mol_type = other RNA
ccactgcagttatgtgttga

SEQ ID NO: 13888 - RNA, 20 nt, synthetic construct
  source 1..20: mol_type = other RNA
ccactgcctgagagagctca

SEQ ID NO: 13889 - RNA, 20 nt, synthetic construct
  source 1..20: mol_type = other RNA
ccactgctaccaaaaattgg

SEQ ID NO: 13890 - RNA, 20 nt, synthetic construct
  source 1..20: mol_type = other RNA
ccactgctgcagaacttgat

SEQ ID NO: 13891 - RNA, 20 nt, synthetic construct
  source 1..20: mol_type = other RNA
ccactgtaccttgggactgc

SEQ ID NO: 13892 - RNA, 20 nt, synthetic construct
  source 1..20: mol_type = other RNA
ccacttggtgtctccattta

SEQ ID NO: 13893 - RNA, 20 nt, synthetic construct
  source 1..20: mol_type = other RNA
ccactttagtctggccaaag

SEQ ID NO: 13894 - RNA, 20 nt, synthetic construct
  source 1..20: mol_type = other RNA
ccagaaaacaaaacatggaa

SEQ ID NO: 13895 - RNA, 20 nt, synthetic construct
  source 1..20: mol_type = other RNA
ccagaaaacaacacagctgg

SEQ ID NO: 13896 - RNA, 20 nt, synthetic construct
  source 1..20: mol_type = other RNA
ccagaaatgtactgagacac

SEQ ID NO: 13897 - RNA, 20 nt, synthetic construct
  source 1..20: mol_type = other RNA
ccagaacaactacaacaaca

SEQ ID NO: 13898 - RNA, 20 nt, synthetic construct
  source 1..20: mol_type = other RNA
ccagaaggacactcaaaagc

SEQ ID NO: 13899 - RNA, 20 nt, synthetic construct
  source 1..20: mol_type = other RNA
ccagaagtaaatggagacac

SEQ ID NO: 13900 - RNA, 20 nt, synthetic construct
  source 1..20: mol_type = other RNA
ccagaatagtcgtgtgagtc

SEQ ID NO: 13901 - RNA, 20 nt, synthetic construct
  source 1..20: mol_type = other RNA
ccagaatggaagcccactgc

SEQ ID NO: 13902 - RNA, 20 nt, synthetic construct
  source 1..20: mol_type = other RNA
ccagacagaacctctggcta

SEQ ID NO: 13903 - RNA, 20 nt, synthetic construct
  source 1..20: mol_type = other RNA
ccagacatatcttggtttct

SEQ ID NO: 13904 - RNA, 20 nt, synthetic construct
  source 1..20: mol_type = other RNA
ccagacgctagctttgtggt

SEQ ID NO: 13905 - RNA, 20 nt, synthetic construct
  source 1..20: mol_type = other RNA
ccagactaaagtggaagaat

SEQ ID NO: 13906 - RNA, 20 nt, synthetic construct
  source 1..20: mol_type = other RNA
ccagacttttcctcaccccc

SEQ ID NO: 13907 - RNA, 20 nt, synthetic construct
  source 1..20: mol_type = other RNA
ccagagagagaaggttcact

SEQ ID NO: 13908 - RNA, 20 nt, synthetic construct
  source 1..20: mol_type = other RNA
ccagagcttcagattctgaa

SEQ ID NO: 13909 - RNA, 20 nt, synthetic construct
  source 1..20: mol_type = other RNA
ccagaggttctgtctggcaa

SEQ ID NO: 13910 - RNA, 20 nt, synthetic construct
  source 1..20: mol_type = other RNA
ccagagtcctaatccatcta

SEQ ID NO: 13911 - RNA, 20 nt, synthetic construct
  source 1..20: mol_type = other RNA
ccagagttcacatctccctc

SEQ ID NO: 13912 - RNA, 20 nt, synthetic construct
  source 1..20: mol_type = other RNA
ccagattgtgtttccattgc

SEQ ID NO: 13913 - RNA, 20 nt, synthetic construct
  source 1..20: mol_type = other RNA
ccagcaacagcagcaaaaat

SEQ ID NO: 13914 - RNA, 20 nt, synthetic construct
  source 1..20: mol_type = other RNA
ccagcagcaatttgcaagct

SEQ ID NO: 13915 - RNA, 20 nt, synthetic construct
  source 1..20: mol_type = other RNA
ccagcagttgatgagaaaca

SEQ ID NO: 13916 - RNA, 20 nt, synthetic construct
  source 1..20: mol_type = other RNA
ccagctgcagtggtgagtga

SEQ ID NO: 13917 - RNA, 20 nt, synthetic construct
  source 1..20: mol_type = other RNA
ccagctgtgttgttttctgg

SEQ ID NO: 13918 - RNA, 20 nt, synthetic construct
  source 1..20: mol_type = other RNA
ccagctttagagcagcaaac

SEQ ID NO: 13919 - RNA, 20 nt, synthetic construct
  source 1..20: mol_type = other RNA
ccaggagcttgcaaattgct

SEQ ID NO: 13920 - RNA, 20 nt, synthetic construct
  source 1..20: mol_type = other RNA
ccaggagttcaccatgtgtg

SEQ ID NO: 13921 - RNA, 20 nt, synthetic construct
  source 1..20: mol_type = other RNA
ccaggatggattgaattgaa

SEQ ID NO: 13922 - RNA, 20 nt, synthetic construct
  source 1..20: mol_type = other RNA
ccaggcatgttggaatttcc

SEQ ID NO: 13923 - RNA, 20 nt, synthetic construct
  source 1..20: mol_type = other RNA
ccagggaaccacaaagctag

SEQ ID NO: 13924 - RNA, 20 nt, synthetic construct
  source 1..20: mol_type = other RNA
ccagggaggaagtcacactc

SEQ ID NO: 13925 - RNA, 20 nt, synthetic construct
  source 1..20: mol_type = other RNA
ccaggtgaaagcagtcaacc

SEQ ID NO: 13926 - RNA, 20 nt, synthetic construct
  source 1..20: mol_type = other RNA
ccaggtgcacttctccaaaa

SEQ ID NO: 13927 - RNA, 20 nt, synthetic construct
  source 1..20: mol_type = other RNA
ccaggttccaccttaattgg

SEQ ID NO: 13928 - RNA, 20 nt, synthetic construct
  source 1..20: mol_type = other RNA
ccagtaaactagctgcaatg

SEQ ID NO: 13929 - RNA, 20 nt, synthetic construct
  source 1..20: mol_type = other RNA
ccagtcacagttttgactag

SEQ ID NO: 13930 - RNA, 20 nt, synthetic construct
  source 1..20: mol_type = other RNA
ccagtcccatttggacatta

SEQ ID NO: 13931 - RNA, 20 nt, synthetic construct
  source 1..20: mol_type = other RNA
ccagtgtattgtttggaggt

SEQ ID NO: 13932 - RNA, 20 nt, synthetic construct
  source 1..20: mol_type = other RNA
ccagtgttgaaacagcactt

SEQ ID NO: 13933 - RNA, 20 nt, synthetic construct
  source 1..20: mol_type = other RNA
ccagttccaaaaaccctcac

SEQ ID NO: 13934 - RNA, 20 nt, synthetic construct
  source 1..20: mol_type = other RNA
ccagtttttcaacacataac

SEQ ID NO: 13935 - RNA, 20 nt, synthetic construct
  source 1..20: mol_type = other RNA
ccataaggctcttactctca

SEQ ID NO: 13936 - RNA, 20 nt, synthetic construct
  source 1..20: mol_type = other RNA
ccataataacttttgaaaga

SEQ ID NO: 13937 - RNA, 20 nt, synthetic construct
  source 1..20: mol_type = other RNA
ccatagtcagatgcacaggc

SEQ ID NO: 13938 - RNA, 20 nt, synthetic construct
  source 1..20: mol_type = other RNA
ccatcaattcttcagtatca

SEQ ID NO: 13939 - RNA, 20 nt, synthetic construct
  source 1..20: mol_type = other RNA
ccatcacaattgcttctttc

SEQ ID NO: 13940 - RNA, 20 nt, synthetic construct
  source 1..20: mol_type = other RNA
ccatcacctcccatttgcca

SEQ ID NO: 13941 - RNA, 20 nt, synthetic construct
  source 1..20: mol_type = other RNA
ccatcaggcttgcttcgggg

SEQ ID NO: 13942 - RNA, 20 nt, synthetic construct
  source 1..20: mol_type = other RNA
ccatcccagagttcacatct

SEQ ID NO: 13943 - RNA, 20 nt, synthetic construct
  source 1..20: mol_type = other RNA
ccatcctggtttcagatagt

SEQ ID NO: 13944 - RNA, 20 nt, synthetic construct
  source 1..20: mol_type = other RNA
ccatcgcatacctcagggca

SEQ ID NO: 13945 - RNA, 20 nt, synthetic construct
  source 1..20: mol_type = other RNA
ccatctaaaacgtaatgagg

SEQ ID NO: 13946 - RNA, 20 nt, synthetic construct
  source 1..20: mol_type = other RNA
ccatctacacatgtatgcag

SEQ ID NO: 13947 - RNA, 20 nt, synthetic construct
  source 1..20: mol_type = other RNA
ccatctcctgcagaaaataa

SEQ ID NO: 13948 - RNA, 20 nt, synthetic construct
  source 1..20: mol_type = other RNA
ccatcttgcagatgtgtagg

SEQ ID NO: 13949 - RNA, 20 nt, synthetic construct
  source 1..20: mol_type = other RNA
ccatgaaaacattcttccac

SEQ ID NO: 13950 - RNA, 20 nt, synthetic construct
  source 1..20: mol_type = other RNA
ccatgaaatcaagtgcatgc

SEQ ID NO: 13951 - RNA, 20 nt, synthetic construct
  source 1..20: mol_type = other RNA
ccatgacaagaacattgtat

SEQ ID NO: 13952 - RNA, 20 nt, synthetic construct
  source 1..20: mol_type = other RNA
ccatgcaaatgtttttcctg

SEQ ID NO: 13953 - RNA, 20 nt, synthetic construct
  source 1..20: mol_type = other RNA
ccatggagcagcatctgaag

SEQ ID NO: 13954 - RNA, 20 nt, synthetic construct
  source 1..20: mol_type = other RNA
ccatggtctcaatgatgctc

SEQ ID NO: 13955 - RNA, 20 nt, synthetic construct
  source 1..20: mol_type = other RNA
ccatgtgtctcagtacattt

SEQ ID NO: 13956 - RNA, 20 nt, synthetic construct
  source 1..20: mol_type = other RNA
ccatgtgtgtgttccacgga

SEQ ID NO: 13957 - RNA, 20 nt, synthetic construct
  source 1..20: mol_type = other RNA
ccatgttgagggcaacagac

SEQ ID NO: 13958 - RNA, 20 nt, synthetic construct
  source 1..20: mol_type = other RNA
ccatgttttgttttctggtg

SEQ ID NO: 13959 - RNA, 20 nt, synthetic construct
  source 1..20: mol_type = other RNA
ccattaacagtcaggctact

SEQ ID NO: 13960 - RNA, 20 nt, synthetic construct
  source 1..20: mol_type = other RNA
ccattagccttttggtcttg

SEQ ID NO: 13961 - RNA, 20 nt, synthetic construct
  source 1..20: mol_type = other RNA
ccattaggcattagcactgc

SEQ ID NO: 13962 - RNA, 20 nt, synthetic construct
  source 1..20: mol_type = other RNA
ccattcagagtgctttttcc

SEQ ID NO: 13963 - RNA, 20 nt, synthetic construct
  source 1..20: mol_type = other RNA
ccattcatttcattttgttt

SEQ ID NO: 13964 - RNA, 20 nt, synthetic construct
  source 1..20: mol_type = other RNA
ccattcctgataccatcacc

SEQ ID NO: 13965 - RNA, 20 nt, synthetic construct
  source 1..20: mol_type = other RNA
ccattctggagctttgtagc

SEQ ID NO: 13966 - RNA, 20 nt, synthetic construct
  source 1..20: mol_type = other RNA
ccattgcggtgcagaaaacc

SEQ ID NO: 13967 - RNA, 20 nt, synthetic construct
  source 1..20: mol_type = other RNA
ccattgtgttctgagaaaac

SEQ ID NO: 13968 - RNA, 20 nt, synthetic construct
  source 1..20: mol_type = other RNA
ccatttaccaaaagctcatg

SEQ ID NO: 13969 - RNA, 20 nt, synthetic construct
  source 1..20: mol_type = other RNA
ccatttacttctggatgagc

SEQ ID NO: 13970 - RNA, 20 nt, synthetic construct
  source 1..20: mol_type = other RNA
ccatttgccagacagaacct

SEQ ID NO: 13971 - RNA, 20 nt, synthetic construct
  source 1..20: mol_type = other RNA
ccatttggacattatgagtc

SEQ ID NO: 13972 - RNA, 20 nt, synthetic construct
  source 1..20: mol_type = other RNA
ccattttcaaactcacacct

SEQ ID NO: 13973 - RNA, 20 nt, synthetic construct
  source 1..20: mol_type = other RNA
ccattttgcaaacacttgga

SEQ ID NO: 13974 - RNA, 20 nt, synthetic construct
  source 1..20: mol_type = other RNA
cccaaaacttgcatcacatg

SEQ ID NO: 13975 - RNA, 20 nt, synthetic construct
  source 1..20: mol_type = other RNA
cccaaactgaaaaacttatg

SEQ ID NO: 13976 - RNA, 20 nt, synthetic construct
  source 1..20: mol_type = other RNA
cccaaactgagtcttgccat

SEQ ID NO: 13977 - RNA, 20 nt, synthetic construct
  source 1..20: mol_type = other RNA
cccaaagcaacaatgatcag

SEQ ID NO: 13978 - RNA, 20 nt, synthetic construct
  source 1..20: mol_type = other RNA
cccaaagcaagatcttcttc

SEQ ID NO: 13979 - RNA, 20 nt, synthetic construct
  source 1..20: mol_type = other RNA
cccaacacagcactatctga

SEQ ID NO: 13980 - RNA, 20 nt, synthetic construct
  source 1..20: mol_type = other RNA
cccaaccaaagtaacacaac

SEQ ID NO: 13981 - RNA, 20 nt, synthetic construct
  source 1..20: mol_type = other RNA
cccaagaaaatgcagttaaa

SEQ ID NO: 13982 - RNA, 20 nt, synthetic construct
  source 1..20: mol_type = other RNA
cccaaggcaagcttacaccc

SEQ ID NO: 13983 - RNA, 20 nt, synthetic construct
  source 1..20: mol_type = other RNA
cccaaggtacagtggaccaa

SEQ ID NO: 13984 - RNA, 20 nt, synthetic construct
  source 1..20: mol_type = other RNA
cccaatctctccaatcaaat

SEQ ID NO: 13985 - RNA, 20 nt, synthetic construct
  source 1..20: mol_type = other RNA
cccaccaatttttggtagca

SEQ ID NO: 13986 - RNA, 20 nt, synthetic construct
  source 1..20: mol_type = other RNA
cccactgcagttatgtgttg

SEQ ID NO: 13987 - RNA, 20 nt, synthetic construct
  source 1..20: mol_type = other RNA
cccactgcctgagagagctc

SEQ ID NO: 13988 - RNA, 20 nt, synthetic construct
  source 1..20: mol_type = other RNA
cccagaaaacaacacagctg

SEQ ID NO: 13989 - RNA, 20 nt, synthetic construct
  source 1..20: mol_type = other RNA
cccagaaggacactcaaaag

SEQ ID NO: 13990 - RNA, 20 nt, synthetic construct
  source 1..20: mol_type = other RNA
cccagagagagaaggttcac

SEQ ID NO: 13991 - RNA, 20 nt, synthetic construct
  source 1..20: mol_type = other RNA
cccagagtcctaatccatct

SEQ ID NO: 13992 - RNA, 20 nt, synthetic construct
  source 1..20: mol_type = other RNA
cccagagttcacatctccct

SEQ ID NO: 13993 - RNA, 20 nt, synthetic construct
  source 1..20: mol_type = other RNA
cccagctttagagcagcaaa

SEQ ID NO: 13994 - RNA, 20 nt, synthetic construct
  source 1..20: mol_type = other RNA
cccaggcatgttggaatttc

SEQ ID NO: 13995 - RNA, 20 nt, synthetic construct
  source 1..20: mol_type = other RNA
cccagtgttgaaacagcact

SEQ ID NO: 13996 - RNA, 20 nt, synthetic construct
  source 1..20: mol_type = other RNA
cccatcgcatacctcagggc

SEQ ID NO: 13997 - RNA, 20 nt, synthetic construct
  source 1..20: mol_type = other RNA
cccatctaaaacgtaatgag

SEQ ID NO: 13998 - RNA, 20 nt, synthetic construct
  source 1..20: mol_type = other RNA
cccatctcctgcagaaaata

SEQ ID NO: 13999 - RNA, 20 nt, synthetic construct
  source 1..20: mol_type = other RNA
cccatcttgcagatgtgtag

SEQ ID NO: 14000 - RNA, 20 nt, synthetic construct
  source 1..20: mol_type = other RNA
cccatttgccagacagaacc

SEQ ID NO: 14001 - RNA, 20 nt, synthetic construct
  source 1..20: mol_type = other RNA
cccatttggacattatgagt

SEQ ID NO: 14002 - RNA, 20 nt, synthetic construct
  source 1..20: mol_type = other RNA
ccccaaactgagtcttgcca

SEQ ID NO: 14003 - RNA, 20 nt, synthetic construct
  source 1..20: mol_type = other RNA
ccccaaagcaacaatgatca

SEQ ID NO: 14004 - RNA, 20 nt, synthetic construct
  source 1..20: mol_type = other RNA
ccccaacacagcactatctg

SEQ ID NO: 14005 - RNA, 20 nt, synthetic construct
  source 1..20: mol_type = other RNA
ccccaaccaaagtaacacaa

SEQ ID NO: 14006 - RNA, 20 nt, synthetic construct
  source 1..20: mol_type = other RNA
ccccagaaggacactcaaaa

SEQ ID NO: 14007 - RNA, 20 nt, synthetic construct
  source 1..20: mol_type = other RNA
ccccagctttagagcagcaa

SEQ ID NO: 14008 - RNA, 20 nt, synthetic construct
  source 1..20: mol_type = other RNA
ccccaggcatgttggaattt

SEQ ID NO: 14009 - RNA, 20 nt, synthetic construct
  source 1..20: mol_type = other RNA
ccccagtgttgaaacagcac

SEQ ID NO: 14010 - RNA, 20 nt, synthetic construct
  source 1..20: mol_type = other RNA
cccccaaagcaacaatgatc

SEQ ID NO: 14011 - RNA, 20 nt, synthetic construct
  source 1..20: mol_type = other RNA
cccccaacacagcactatct

SEQ ID NO: 14012 - RNA, 20 nt, synthetic construct
  source 1..20: mol_type = other RNA
cccccaggcatgttggaatt

SEQ ID NO: 14013 - RNA, 20 nt, synthetic construct
  source 1..20: mol_type = other RNA
ccccccaggcatgttggaat

SEQ ID NO: 14014 - RNA, 20 nt, synthetic construct
  source 1..20: mol_type = other RNA
ccccctcctcctcttccaca

SEQ ID NO: 14015 - RNA, 20 nt, synthetic construct
  source 1..20: mol_type = other RNA
ccccgaagcaagcctgatgg

SEQ ID NO: 14016 - RNA, 20 nt, synthetic construct
  source 1..20: mol_type = other RNA
ccccgaagttacgtctttct

SEQ ID NO: 14017 - RNA, 20 nt, synthetic construct
  source 1..20: mol_type = other RNA
cccctccccagaaggacact

SEQ ID NO: 14018 - RNA, 20 nt, synthetic construct
  source 1..20: mol_type = other RNA
cccctcctcctcttccacag

SEQ ID NO: 14019 - RNA, 20 nt, synthetic construct
  source 1..20: mol_type = other RNA
cccctcctgctcattcagaa

SEQ ID NO: 14020 - RNA, 20 nt, synthetic construct
  source 1..20: mol_type = other RNA
cccctcgttttcaccaagcg

SEQ ID NO: 14021 - RNA, 20 nt, synthetic construct
  source 1..20: mol_type = other RNA
ccccttatagtcagaccatg

SEQ ID NO: 14022 - RNA, 20 nt, synthetic construct
  source 1..20: mol_type = other RNA
cccgaagcaagcctgatgga

SEQ ID NO: 14023 - RNA, 20 nt, synthetic construct
  source 1..20: mol_type = other RNA
cccgaagttacgtctttctc

SEQ ID NO: 14024 - RNA, 20 nt, synthetic construct
  source 1..20: mol_type = other RNA
ccctcaaaaccagcaacagc

SEQ ID NO: 14025 - RNA, 20 nt, synthetic construct
  source 1..20: mol_type = other RNA
ccctcaacatggttggttct

SEQ ID NO: 14026 - RNA, 20 nt, synthetic construct
  source 1..20: mol_type = other RNA
ccctcacaccaggtgcactt

SEQ ID NO: 14027 - RNA, 20 nt, synthetic construct
  source 1..20: mol_type = other RNA
ccctccccagaaggacactc

SEQ ID NO: 14028 - RNA, 20 nt, synthetic construct
  source 1..20: mol_type = other RNA
ccctcctcctcttccacagg

SEQ ID NO: 14029 - RNA, 20 nt, synthetic construct
  source 1..20: mol_type = other RNA
ccctcctgctcattcagaat

SEQ ID NO: 14030 - RNA, 20 nt, synthetic construct
  source 1..20: mol_type = other RNA
ccctcgttttcaccaagcgg

SEQ ID NO: 14031 - RNA, 20 nt, synthetic construct
  source 1..20: mol_type = other RNA
ccctctactttcttgtgtaa

SEQ ID NO: 14032 - RNA, 20 nt, synthetic construct
  source 1..20: mol_type = other RNA
ccctctattttcacttccct

SEQ ID NO: 14033 - RNA, 20 nt, synthetic construct
  source 1..20: mol_type = other RNA
ccctgacatttcaactttta

SEQ ID NO: 14034 - RNA, 20 nt, synthetic construct
  source 1..20: mol_type = other RNA
ccctgaggtatgcgatgggt

SEQ ID NO: 14035 - RNA, 20 nt, synthetic construct
  source 1..20: mol_type = other RNA
ccctgcagtctgtatgtcat

SEQ ID NO: 14036 - RNA, 20 nt, synthetic construct
  source 1..20: mol_type = other RNA
ccctggatgttattttctgc

SEQ ID NO: 14037 - RNA, 20 nt, synthetic construct
  source 1..20: mol_type = other RNA
ccctggtcaggcacaggaaa

SEQ ID NO: 14038 - RNA, 20 nt, synthetic construct
  source 1..20: mol_type = other RNA
ccctgtagaactgaagcttg

SEQ ID NO: 14039 - RNA, 20 nt, synthetic construct
  source 1..20: mol_type = other RNA
ccctgtatgaagggaagcca

SEQ ID NO: 14040 - RNA, 20 nt, synthetic construct
  source 1..20: mol_type = other RNA
cccttaaaagtgttgtgtta

SEQ ID NO: 14041 - RNA, 20 nt, synthetic construct
  source 1..20: mol_type = other RNA
cccttatagtcagaccatga

SEQ ID NO: 14042 - RNA, 20 nt, synthetic construct
  source 1..20: mol_type = other RNA
cccttcagaatctcttgctc

SEQ ID NO: 14043 - RNA, 20 nt, synthetic construct
  source 1..20: mol_type = other RNA
cccttcatacagggtattcc

SEQ ID NO: 14044 - RNA, 20 nt, synthetic construct
  source 1..20: mol_type = other RNA
cccttctccgatgctttctg

SEQ ID NO: 14045 - RNA, 20 nt, synthetic construct
  source 1..20: mol_type = other RNA
cccttgattcatttcaactt

SEQ ID NO: 14046 - RNA, 20 nt, synthetic construct
  source 1..20: mol_type = other RNA
ccgaagcaagcctgatggaa

SEQ ID NO: 14047 - RNA, 20 nt, synthetic construct
  source 1..20: mol_type = other RNA
ccgaagttacgtctttctcc

SEQ ID NO: 14048 - RNA, 20 nt, synthetic construct
  source 1..20: mol_type = other RNA
ccgatgctttctgaaaggcc

SEQ ID NO: 14049 - RNA, 20 nt, synthetic construct
  source 1..20: mol_type = other RNA
ccgatttgagtgataagaaa

SEQ ID NO: 14050 - RNA, 20 nt, synthetic construct
  source 1..20: mol_type = other RNA
ccgcaatggaaacacaatct

SEQ ID NO: 14051 - RNA, 20 nt, synthetic construct
  source 1..20: mol_type = other RNA
ccgcacagacctctaactct

SEQ ID NO: 14052 - RNA, 20 nt, synthetic construct
  source 1..20: mol_type = other RNA
ccgcttggtgaaaacgaggg

SEQ ID NO: 14053 - RNA, 20 nt, synthetic construct
  source 1..20: mol_type = other RNA
ccgtggaacacacacatggt

SEQ ID NO: 14054 - RNA, 20 nt, synthetic construct
  source 1..20: mol_type = other RNA
ccgttcagagctgccaccag

SEQ ID NO: 14055 - RNA, 20 nt, synthetic construct
  source 1..20: mol_type = other RNA
cctaatccatctacacatgt

SEQ ID NO: 14056 - RNA, 20 nt, synthetic construct
  source 1..20: mol_type = other RNA
cctaatggtgctacagtttc

SEQ ID NO: 14057 - RNA, 20 nt, synthetic construct
  source 1..20: mol_type = other RNA
cctacacatctgcaagatgg

SEQ ID NO: 14058 - RNA, 20 nt, synthetic construct
  source 1..20: mol_type = other RNA
cctagtttcagagaataaag

SEQ ID NO: 14059 - RNA, 20 nt, synthetic construct
  source 1..20: mol_type = other RNA
cctcaaaaccagcaacagca

SEQ ID NO: 14060 - RNA, 20 nt, synthetic construct
  source 1..20: mol_type = other RNA
cctcaacatggttggttcta

SEQ ID NO: 14061 - RNA, 20 nt, synthetic construct
  source 1..20: mol_type = other RNA
cctcaagcataacccaccaa

SEQ ID NO: 14062 - RNA, 20 nt, synthetic construct
  source 1..20: mol_type = other RNA
cctcacaccaggtgcacttc

SEQ ID NO: 14063 - RNA, 20 nt, synthetic construct
  source 1..20: mol_type = other RNA
cctcacccccaaagcaacaa

SEQ ID NO: 14064 - RNA, 20 nt, synthetic construct
  source 1..20: mol_type = other RNA
cctcactcaccactgcagct

SEQ ID NO: 14065 - RNA, 20 nt, synthetic construct
  source 1..20: mol_type = other RNA
cctcagaataattgtgtgaa

SEQ ID NO: 14066 - RNA, 20 nt, synthetic construct
  source 1..20: mol_type = other RNA
cctcagcttccttcagaagg

SEQ ID NO: 14067 - RNA, 20 nt, synthetic construct
  source 1..20: mol_type = other RNA
cctcagggcagatcaattcc

SEQ ID NO: 14068 - RNA, 20 nt, synthetic construct
  source 1..20: mol_type = other RNA
cctcaggtttaccctctatt

SEQ ID NO: 14069 - RNA, 20 nt, synthetic construct
  source 1..20: mol_type = other RNA
cctcataaacaggcagcaca

SEQ ID NO: 14070 - RNA, 20 nt, synthetic construct
  source 1..20: mol_type = other RNA
cctcattacgttttagatgg

SEQ ID NO: 14071 - RNA, 20 nt, synthetic construct
  source 1..20: mol_type = other RNA
cctccaaacaatacactgga

SEQ ID NO: 14072 - RNA, 20 nt, synthetic construct
  source 1..20: mol_type = other RNA
cctccaaagccagctgcagt

SEQ ID NO: 14073 - RNA, 20 nt, synthetic construct
  source 1..20: mol_type = other RNA
cctccagtcccatttggaca

SEQ ID NO: 14074 - RNA, 20 nt, synthetic construct
  source 1..20: mol_type = other RNA
cctccattttgcaaacactt

SEQ ID NO: 14075 - RNA, 20 nt, synthetic construct
  source 1..20: mol_type = other RNA
cctcccatttgccagacaga

SEQ ID NO: 14076 - RNA, 20 nt, synthetic construct
  source 1..20: mol_type = other RNA
cctccccagaaggacactca

SEQ ID NO: 14077 - RNA, 20 nt, synthetic construct
  source 1..20: mol_type = other RNA
cctccctggtcaggcacagg

SEQ ID NO: 14078 - RNA, 20 nt, synthetic construct
  source 1..20: mol_type = other RNA
cctcctcctcttccacaggt

SEQ ID NO: 14079 - RNA, 20 nt, synthetic construct
  source 1..20: mol_type = other RNA
cctcctcttccacaggttcc

SEQ ID NO: 14080 - RNA, 20 nt, synthetic construct
  source 1..20: mol_type = other RNA
cctcctgctcattcagaatc

SEQ ID NO: 14081 - RNA, 20 nt, synthetic construct
  source 1..20: mol_type = other RNA
cctcgttttcaccaagcgga

SEQ ID NO: 14082 - RNA, 20 nt, synthetic construct
  source 1..20: mol_type = other RNA
cctctaactctgagctgcct

SEQ ID NO: 14083 - RNA, 20 nt, synthetic construct
  source 1..20: mol_type = other RNA
cctctactttcttgtgtaaa

SEQ ID NO: 14084 - RNA, 20 nt, synthetic construct
  source 1..20: mol_type = other RNA
cctctattttcacttccctt

SEQ ID NO: 14085 - RNA, 20 nt, synthetic construct
  source 1..20: mol_type = other RNA
cctctggctacaaagctcca

SEQ ID NO: 14086 - RNA, 20 nt, synthetic construct
  source 1..20: mol_type = other RNA
cctcttccacaggttcctca

SEQ ID NO: 14087 - RNA, 20 nt, synthetic construct
  source 1..20: mol_type = other RNA
cctcttccgtggaacacaca

SEQ ID NO: 14088 - RNA, 20 nt, synthetic construct
  source 1..20: mol_type = other RNA
cctctttattctttatttgt

SEQ ID NO: 14089 - RNA, 20 nt, synthetic construct
  source 1..20: mol_type = other RNA
cctgaaaatccagagcttca

SEQ ID NO: 14090 - RNA, 20 nt, synthetic construct
  source 1..20: mol_type = other RNA
cctgaacagaattcttcacc

SEQ ID NO: 14091 - RNA, 20 nt, synthetic construct
  source 1..20: mol_type = other RNA
cctgaactttttgcaggaaa

SEQ ID NO: 14092 - RNA, 20 nt, synthetic construct
  source 1..20: mol_type = other RNA
cctgacatttcaacttttac

SEQ ID NO: 14093 - RNA, 20 nt, synthetic construct
  source 1..20: mol_type = other RNA
cctgaccagggaggaagtca

SEQ ID NO: 14094 - RNA, 20 nt, synthetic construct
  source 1..20: mol_type = other RNA
cctgactgttaatggcattt

SEQ ID NO: 14095 - RNA, 20 nt, synthetic construct
  source 1..20: mol_type = other RNA
cctgactttacacaagaaag

SEQ ID NO: 14096 - RNA, 20 nt, synthetic construct
  source 1..20: mol_type = other RNA
cctgagagagctcatccaga

SEQ ID NO: 14097 - RNA, 20 nt, synthetic construct
  source 1..20: mol_type = other RNA
cctgaggcaccaccttccca

SEQ ID NO: 14098 - RNA, 20 nt, synthetic construct
  source 1..20: mol_type = other RNA
cctgaggtatgcgatgggtg

SEQ ID NO: 14099 - RNA, 20 nt, synthetic construct
  source 1..20: mol_type = other RNA
cctgataccatcacctccca

SEQ ID NO: 14100 - RNA, 20 nt, synthetic construct
  source 1..20: mol_type = other RNA
cctgatggaacaggatagaa

SEQ ID NO: 14101 - RNA, 20 nt, synthetic construct
  source 1..20: mol_type = other RNA
cctgcaaaaagttcaggatg

SEQ ID NO: 14102 - RNA, 20 nt, synthetic construct
  source 1..20: mol_type = other RNA
cctgcaagctgtgataatgt

SEQ ID NO: 14103 - RNA, 20 nt, synthetic construct
  source 1..20: mol_type = other RNA
cctgcagaaaataacatcca

SEQ ID NO: 14104 - RNA, 20 nt, synthetic construct
  source 1..20: mol_type = other RNA
cctgcagtctgtatgtcatt

SEQ ID NO: 14105 - RNA, 20 nt, synthetic construct
  source 1..20: mol_type = other RNA
cctgctcattcagaatctga

SEQ ID NO: 14106 - RNA, 20 nt, synthetic construct
  source 1..20: mol_type = other RNA
cctggaaaaaacactgtctc

SEQ ID NO: 14107 - RNA, 20 nt, synthetic construct
  source 1..20: mol_type = other RNA
cctggatgcaagccacatgc

SEQ ID NO: 14108 - RNA, 20 nt, synthetic construct
  source 1..20: mol_type = other RNA
cctggatgttattttctgca

SEQ ID NO: 14109 - RNA, 20 nt, synthetic construct
  source 1..20: mol_type = other RNA
cctggatttctttcttggct

SEQ ID NO: 14110 - RNA, 20 nt, synthetic construct
  source 1..20: mol_type = other RNA
cctggggggctcccaaggca

SEQ ID NO: 14111 - RNA, 20 nt, synthetic construct
  source 1..20: mol_type = other RNA
cctggtcaggcacaggaaaa

SEQ ID NO: 14112 - RNA, 20 nt, synthetic construct
  source 1..20: mol_type = other RNA
cctggtggcagctctgaacg

SEQ ID NO: 14113 - RNA, 20 nt, synthetic construct
  source 1..20: mol_type = other RNA
cctggtgtgagggtttttgg

SEQ ID NO: 14114 - RNA, 20 nt, synthetic construct
  source 1..20: mol_type = other RNA
cctggtttcagatagtgctg

SEQ ID NO: 14115 - RNA, 20 nt, synthetic construct
  source 1..20: mol_type = other RNA
cctgtagaactgaagcttgt

SEQ ID NO: 14116 - RNA, 20 nt, synthetic construct
  source 1..20: mol_type = other RNA
cctgtagctctccactgcta

SEQ ID NO: 14117 - RNA, 20 nt, synthetic construct
  source 1..20: mol_type = other RNA
cctgtatgaagggaagccag

SEQ ID NO: 14118 - RNA, 20 nt, synthetic construct
  source 1..20: mol_type = other RNA
cctgtatgcacacagcacca

SEQ ID NO: 14119 - RNA, 20 nt, synthetic construct
  source 1..20: mol_type = other RNA
cctgtattttgcatgcactt

SEQ ID NO: 14120 - RNA, 20 nt, synthetic construct
  source 1..20: mol_type = other RNA
cctgtcaagactcaatatga

SEQ ID NO: 14121 - RNA, 20 nt, synthetic construct
  source 1..20: mol_type = other RNA
cctgtgaagaagatcttgct

SEQ ID NO: 14122 - RNA, 20 nt, synthetic construct
  source 1..20: mol_type = other RNA
cctgtgagatcactcaccca

SEQ ID NO: 14123 - RNA, 20 nt, synthetic construct
  source 1..20: mol_type = other RNA
cctgtgatgctgatgatgct

SEQ ID NO: 14124 - RNA, 20 nt, synthetic construct
  source 1..20: mol_type = other RNA
cctgtgcatctgactatggc

SEQ ID NO: 14125 - RNA, 20 nt, synthetic construct
  source 1..20: mol_type = other RNA
cctgtgcctgaccagggagg

SEQ ID NO: 14126 - RNA, 20 nt, synthetic construct
  source 1..20: mol_type = other RNA
cctgtggaagaggaggaggg

SEQ ID NO: 14127 - RNA, 20 nt, synthetic construct
  source 1..20: mol_type = other RNA
cctgttcacacaattattct

SEQ ID NO: 14128 - RNA, 20 nt, synthetic construct
  source 1..20: mol_type = other RNA
cctgttccatcaggcttgct

SEQ ID NO: 14129 - RNA, 20 nt, synthetic construct
  source 1..20: mol_type = other RNA
cctgttcctttcagaaacca

SEQ ID NO: 14130 - RNA, 20 nt, synthetic construct
  source 1..20: mol_type = other RNA
cctgttcttgaaagcacctg

SEQ ID NO: 14131 - RNA, 20 nt, synthetic construct
  source 1..20: mol_type = other RNA
cctgttgattcaagtgctgt

SEQ ID NO: 14132 - RNA, 20 nt, synthetic construct
  source 1..20: mol_type = other RNA
cctgtttatgaggcttatgt

SEQ ID NO: 14133 - RNA, 20 nt, synthetic construct
  source 1..20: mol_type = other RNA
ccttaaaagtgttgtgttac

SEQ ID NO: 14134 - RNA, 20 nt, synthetic construct
  source 1..20: mol_type = other RNA
ccttaattggcctgtgcatc

SEQ ID NO: 14135 - RNA, 20 nt, synthetic construct
  source 1..20: mol_type = other RNA
ccttagagcagcatgctttt

SEQ ID NO: 14136 - RNA, 20 nt, synthetic construct
  source 1..20: mol_type = other RNA
ccttagtgaacactgagctt

SEQ ID NO: 14137 - RNA, 20 nt, synthetic construct
  source 1..20: mol_type = other RNA
ccttatagtcagaccatgaa

SEQ ID NO: 14138 - RNA, 20 nt, synthetic construct
  source 1..20: mol_type = other RNA
ccttatggtcaaataacgac

SEQ ID NO: 14139 - RNA, 20 nt, synthetic construct
  source 1..20: mol_type = other RNA
ccttcaattcaatccatcct

SEQ ID NO: 14140 - RNA, 20 nt, synthetic construct
  source 1..20: mol_type = other RNA
ccttcagaaggaaaaagcac

SEQ ID NO: 14141 - RNA, 20 nt, synthetic construct
  source 1..20: mol_type = other RNA
ccttcagaatctcttgctct

SEQ ID NO: 14142 - RNA, 20 nt, synthetic construct
  source 1..20: mol_type = other RNA
ccttcagatcaagaaattga

SEQ ID NO: 14143 - RNA, 20 nt, synthetic construct
  source 1..20: mol_type = other RNA
ccttcatacagggtattcca

SEQ ID NO: 14144 - RNA, 20 nt, synthetic construct
  source 1..20: mol_type = other RNA
ccttccaaattactagatac

SEQ ID NO: 14145 - RNA, 20 nt, synthetic construct
  source 1..20: mol_type = other RNA
ccttcccagagtcctaatcc

SEQ ID NO: 14146 - RNA, 20 nt, synthetic construct
  source 1..20: mol_type = other RNA
ccttctccgatgctttctga

SEQ ID NO: 14147 - RNA, 20 nt, synthetic construct
  source 1..20: mol_type = other RNA
ccttctctctctgggctcct

SEQ ID NO: 14148 - RNA, 20 nt, synthetic construct
  source 1..20: mol_type = other RNA
ccttctctttgctgatcatt

SEQ ID NO: 14149 - RNA, 20 nt, synthetic construct
  source 1..20: mol_type = other RNA
ccttctgaaggaagctgagg

SEQ ID NO: 14150 - RNA, 20 nt, synthetic construct
  source 1..20: mol_type = other RNA
ccttctggggaggggtctga

SEQ ID NO: 14151 - RNA, 20 nt, synthetic construct
  source 1..20: mol_type = other RNA
ccttgattcatttcaacttg

SEQ ID NO: 14152 - RNA, 20 nt, synthetic construct
  source 1..20: mol_type = other RNA
ccttgggactgcccttgatt

SEQ ID NO: 14153 - RNA, 20 nt, synthetic construct
  source 1..20: mol_type = other RNA
ccttgggagccccccaggca

SEQ ID NO: 14154 - RNA, 20 nt, synthetic construct
  source 1..20: mol_type = other RNA
ccttgtctcgacccttcaga

SEQ ID NO: 14155 - RNA, 20 nt, synthetic construct
  source 1..20: mol_type = other RNA
ccttgtggatggccccgaag

SEQ ID NO: 14156 - RNA, 20 nt, synthetic construct
  source 1..20: mol_type = other RNA
ccttgtttttaagtaataca

SEQ ID NO: 14157 - RNA, 20 nt, synthetic construct
  source 1..20: mol_type = other RNA
cctttcagaaaccagaacaa

SEQ ID NO: 14158 - RNA, 20 nt, synthetic construct
  source 1..20: mol_type = other RNA
cctttcagaaagcatcggag

SEQ ID NO: 14159 - RNA, 20 nt, synthetic construct
  source 1..20: mol_type = other RNA
cctttgctgagcaagttgcg

SEQ ID NO: 14160 - RNA, 20 nt, synthetic construct
  source 1..20: mol_type = other RNA
ccttttctgccactaccaca

SEQ ID NO: 14161 - RNA, 20 nt, synthetic construct
  source 1..20: mol_type = other RNA
ccttttgcaacataagcctc

SEQ ID NO: 14162 - RNA, 20 nt, synthetic construct
  source 1..20: mol_type = other RNA
ccttttggtcttgtttcaat

SEQ ID NO: 14163 - RNA, 20 nt, synthetic construct
  source 1..20: mol_type = other RNA
cctttttccatgttttgttt

SEQ ID NO: 14164 - RNA, 20 nt, synthetic construct
  source 1..20: mol_type = other RNA
cgaactcgcttgattttgaa

SEQ ID NO: 14165 - RNA, 20 nt, synthetic construct
  source 1..20: mol_type = other RNA
cgaagcaagcctgatggaac

SEQ ID NO: 14166 - RNA, 20 nt, synthetic construct
  source 1..20: mol_type = other RNA
cgaagttacgtctttctcca

SEQ ID NO: 14167 - RNA, 20 nt, synthetic construct
  source 1..20: mol_type = other RNA
cgacccttcagaatctcttg

SEQ ID NO: 14168 - RNA, 20 nt, synthetic construct
  source 1..20: mol_type = other RNA
cgactattctggcttccctt

SEQ ID NO: 14169 - RNA, 20 nt, synthetic construct
  source 1..20: mol_type = other RNA
cgacttggcgtgaaactgct

SEQ ID NO: 14170 - RNA, 20 nt, synthetic construct
  source 1..20: mol_type = other RNA
cgagacaaggagcaaacacg

SEQ ID NO: 14171 - RNA, 20 nt, synthetic construct
  source 1..20: mol_type = other RNA
cgagactcataatgtccaaa

SEQ ID NO: 14172 - RNA, 20 nt, synthetic construct
  source 1..20: mol_type = other RNA
cgagatcttgtgcccccaac

SEQ ID NO: 14173 - RNA, 20 nt, synthetic construct
  source 1..20: mol_type = other RNA
cgaggggccttcaattcaat

SEQ ID NO: 14174 - RNA, 20 nt, synthetic construct
  source 1..20: mol_type = other RNA
cgagttcgagactcataatg

SEQ ID NO: 14175 - RNA, 20 nt, synthetic construct
  source 1..20: mol_type = other RNA
cgatgctttctgaaaggcct

SEQ ID NO: 14176 - RNA, 20 nt, synthetic construct
  source 1..20: mol_type = other RNA
cgatgggtgagtgatctcac

SEQ ID NO: 14177 - RNA, 20 nt, synthetic construct
  source 1..20: mol_type = other RNA
cgatttatattctgtacttc

SEQ ID NO: 14178 - RNA, 20 nt, synthetic construct
  source 1..20: mol_type = other RNA
cgatttgagtgataagaaag

SEQ ID NO: 14179 - RNA, 20 nt, synthetic construct
  source 1..20: mol_type = other RNA
cgcaacttgctcagcaaagg

SEQ ID NO: 14180 - RNA, 20 nt, synthetic construct
  source 1..20: mol_type = other RNA
cgcaatggaaacacaatctg

SEQ ID NO: 14181 - RNA, 20 nt, synthetic construct
  source 1..20: mol_type = other RNA
cgcacagacctctaactctg

SEQ ID NO: 14182 - RNA, 20 nt, synthetic construct
  source 1..20: mol_type = other RNA
cgcacagttagtgaaccttc

SEQ ID NO: 14183 - RNA, 20 nt, synthetic construct
  source 1..20: mol_type = other RNA
cgcagcttgttgaccagaca

SEQ ID NO: 14184 - RNA, 20 nt, synthetic construct
  source 1..20: mol_type = other RNA
cgcatacctcagggcagatc

SEQ ID NO: 14185 - RNA, 20 nt, synthetic construct
  source 1..20: mol_type = other RNA
cgccaagtcgttatttgacc

SEQ ID NO: 14186 - RNA, 20 nt, synthetic construct
  source 1..20: mol_type = other RNA
cgccatgtgtctcagtacat

SEQ ID NO: 14187 - RNA, 20 nt, synthetic construct
  source 1..20: mol_type = other RNA
cgctagctttgtggttccct

SEQ ID NO: 14188 - RNA, 20 nt, synthetic construct
  source 1..20: mol_type = other RNA
cgcttgattttgaatactga

SEQ ID NO: 14189 - RNA, 20 nt, synthetic construct
  source 1..20: mol_type = other RNA
cgcttggtgaaaacgagggg

SEQ ID NO: 14190 - RNA, 20 nt, synthetic construct
  source 1..20: mol_type = other RNA
cggaagaggcagaaactgta

SEQ ID NO: 14191 - RNA, 20 nt, synthetic construct
  source 1..20: mol_type = other RNA
cggaatcccatctaaaacgt

SEQ ID NO: 14192 - RNA, 20 nt, synthetic construct
  source 1..20: mol_type = other RNA
cggaattgatctgccctgag

SEQ ID NO: 14193 - RNA, 20 nt, synthetic construct
  source 1..20: mol_type = other RNA
cggagaagggctgcatacat

SEQ ID NO: 14194 - RNA, 20 nt, synthetic construct
  source 1..20: mol_type = other RNA
cggagacatttggttgactg

SEQ ID NO: 14195 - RNA, 20 nt, synthetic construct
  source 1..20: mol_type = other RNA
cggggccatccacaaggctg

SEQ ID NO: 14196 - RNA, 20 nt, synthetic construct
  source 1..20: mol_type = other RNA
cggggtaagccaagaaagaa

SEQ ID NO: 14197 - RNA, 20 nt, synthetic construct
  source 1..20: mol_type = other RNA
cggtatttaaaacaaaatga

SEQ ID NO: 14198 - RNA, 20 nt, synthetic construct
  source 1..20: mol_type = other RNA
cggtgcagaaaaccacatct

SEQ ID NO: 14199 - RNA, 20 nt, synthetic construct
  source 1..20: mol_type = other RNA
cgtaacttcggggtaagcca

SEQ ID NO: 14200 - RNA, 20 nt, synthetic construct
  source 1..20: mol_type = other RNA
cgtaatgaggcatcactgcc

SEQ ID NO: 14201 - RNA, 20 nt, synthetic construct
  source 1..20: mol_type = other RNA
cgtagaaattccccttatag

SEQ ID NO: 14202 - RNA, 20 nt, synthetic construct
  source 1..20: mol_type = other RNA
cgtctggtgaagaattctgt

SEQ ID NO: 14203 - RNA, 20 nt, synthetic construct
  source 1..20: mol_type = other RNA
cgtctttctccattagcctt

SEQ ID NO: 14204 - RNA, 20 nt, synthetic construct
  source 1..20: mol_type = other RNA
cgtgaaactgcttcagatgc

SEQ ID NO: 14205 - RNA, 20 nt, synthetic construct
  source 1..20: mol_type = other RNA
cgtggaacacacacatggtg

SEQ ID NO: 14206 - RNA, 20 nt, synthetic construct
  source 1..20: mol_type = other RNA
cgtgtgagtcctgactttac

SEQ ID NO: 14207 - RNA, 20 nt, synthetic construct
  source 1..20: mol_type = other RNA
cgtgtttgctccttgtctcg

SEQ ID NO: 14208 - RNA, 20 nt, synthetic construct
  source 1..20: mol_type = other RNA
cgttatttgaccataaggct

SEQ ID NO: 14209 - RNA, 20 nt, synthetic construct
  source 1..20: mol_type = other RNA
cgttcagagctgccaccagg

SEQ ID NO: 14210 - RNA, 20 nt, synthetic construct
  source 1..20: mol_type = other RNA
cgttttagatgggattccgc

SEQ ID NO: 14211 - RNA, 20 nt, synthetic construct
  source 1..20: mol_type = other RNA
cgttttattcctccattttg

SEQ ID NO: 14212 - RNA, 20 nt, synthetic construct
  source 1..20: mol_type = other RNA
cgttttcaccaagcggaatc

SEQ ID NO: 14213 - RNA, 20 nt, synthetic construct
  source 1..20: mol_type = other RNA
ctaaaacgtaatgaggcatc

SEQ ID NO: 14214 - RNA, 20 nt, synthetic construct
  source 1..20: mol_type = other RNA
ctaaaactccaccattcaga

SEQ ID NO: 14215 - RNA, 20 nt, synthetic construct
  source 1..20: mol_type = other RNA
ctaaagctggggtgtggcta

SEQ ID NO: 14216 - RNA, 20 nt, synthetic construct
  source 1..20: mol_type = other RNA
ctaaagtggaagaatgtttt

SEQ ID NO: 14217 - RNA, 20 nt, synthetic construct
  source 1..20: mol_type = other RNA
ctaaatacctgttcctttca

SEQ ID NO: 14218 - RNA, 20 nt, synthetic construct
  source 1..20: mol_type = other RNA
ctaactctgagctgcctcca

SEQ ID NO: 14219 - RNA, 20 nt, synthetic construct
  source 1..20: mol_type = other RNA
ctaactgtgcgttttattcc

SEQ ID NO: 14220 - RNA, 20 nt, synthetic construct
  source 1..20: mol_type = other RNA
ctaagcaagagaatccacct

SEQ ID NO: 14221 - RNA, 20 nt, synthetic construct
  source 1..20: mol_type = other RNA
ctaaggattccttttctgcc

SEQ ID NO: 14222 - RNA, 20 nt, synthetic construct
  source 1..20: mol_type = other RNA
ctaaggtggcatctcttaca

SEQ ID NO: 14223 - RNA, 20 nt, synthetic construct
  source 1..20: mol_type = other RNA
ctaagtccattcctgatacc

SEQ ID NO: 14224 - RNA, 20 nt, synthetic construct
  source 1..20: mol_type = other RNA
ctaatccatctacacatgta

SEQ ID NO: 14225 - RNA, 20 nt, synthetic construct
  source 1..20: mol_type = other RNA
ctaatgagttgtcctgtgag

SEQ ID NO: 14226 - RNA, 20 nt, synthetic construct
  source 1..20: mol_type = other RNA
ctaatgcctaatggtgctac

SEQ ID NO: 14227 - RNA, 20 nt, synthetic construct
  source 1..20: mol_type = other RNA
ctaatggagaaagacgtaac

SEQ ID NO: 14228 - RNA, 20 nt, synthetic construct
  source 1..20: mol_type = other RNA
ctaatggtgctacagtttct

SEQ ID NO: 14229 - RNA, 20 nt, synthetic construct
  source 1..20: mol_type = other RNA
ctaattaccatgacaagaac

SEQ ID NO: 14230 - RNA, 20 nt, synthetic construct
  source 1..20: mol_type = other RNA
ctacaaagctccagaatgga

SEQ ID NO: 14231 - RNA, 20 nt, synthetic construct
  source 1..20: mol_type = other RNA
ctacaacaacaaaaatcagt

SEQ ID NO: 14232 - RNA, 20 nt, synthetic construct
  source 1..20: mol_type = other RNA
ctacacatcctgaacttttt

SEQ ID NO: 14233 - RNA, 20 nt, synthetic construct
  source 1..20: mol_type = other RNA
ctacacatctgcaagatggg

SEQ ID NO: 14234 - RNA, 20 nt, synthetic construct
  source 1..20: mol_type = other RNA
ctacacatgtatgcagccct

SEQ ID NO: 14235 - RNA, 20 nt, synthetic construct
  source 1..20: mol_type = other RNA
ctacagaactcacagattct

SEQ ID NO: 14236 - RNA, 20 nt, synthetic construct
  source 1..20: mol_type = other RNA
ctacaggacaactgccagca

SEQ ID NO: 14237 - RNA, 20 nt, synthetic construct
  source 1..20: mol_type = other RNA
ctacagggatataaaaatag

SEQ ID NO: 14238 - RNA, 20 nt, synthetic construct
  source 1..20: mol_type = other RNA
ctacagtttctgcctcttcc

SEQ ID NO: 14239 - RNA, 20 nt, synthetic construct
  source 1..20: mol_type = other RNA
ctaccaaaaattggtgggtt

SEQ ID NO: 14240 - RNA, 20 nt, synthetic construct
  source 1..20: mol_type = other RNA
ctaccacaccaccaccacca

SEQ ID NO: 14241 - RNA, 20 nt, synthetic construct
  source 1..20: mol_type = other RNA
ctaccccaaccaaagtaaca

SEQ ID NO: 14242 - RNA, 20 nt, synthetic construct
  source 1..20: mol_type = other RNA
ctacgatttatattctgtac

SEQ ID NO: 14243 - RNA, 20 nt, synthetic construct
  source 1..20: mol_type = other RNA
ctactaatgagttgtcctgt

SEQ ID NO: 14244 - RNA, 20 nt, synthetic construct
  source 1..20: mol_type = other RNA
ctactttcttgtgtaaagtc

SEQ ID NO: 14245 - RNA, 20 nt, synthetic construct
  source 1..20: mol_type = other RNA
ctagacaaaccactgctgca

SEQ ID NO: 14246 - RNA, 20 nt, synthetic construct
  source 1..20: mol_type = other RNA
ctagagggcagccttgtgga

SEQ ID NO: 14247 - RNA, 20 nt, synthetic construct
  source 1..20: mol_type = other RNA
ctagatactcctataaaaaa

SEQ ID NO: 14248 - RNA, 20 nt, synthetic construct
  source 1..20: mol_type = other RNA
ctagatttcattttcaacaa

SEQ ID NO: 14249 - RNA, 20 nt, synthetic construct
  source 1..20: mol_type = other RNA
ctagcgtctggtgaagaatt

SEQ ID NO: 14250 - RNA, 20 nt, synthetic construct
  source 1..20: mol_type = other RNA
ctagctgcaatgctaaatac

SEQ ID NO: 14251 - RNA, 20 nt, synthetic construct
  source 1..20: mol_type = other RNA
ctagctttgtggttccctgg

SEQ ID NO: 14252 - RNA, 20 nt, synthetic construct
  source 1..20: mol_type = other RNA
ctaggtgtgtattgtttgaa

SEQ ID NO: 14253 - RNA, 20 nt, synthetic construct
  source 1..20: mol_type = other RNA
ctagtaatttggaaggtgac

SEQ ID NO: 14254 - RNA, 20 nt, synthetic construct
  source 1..20: mol_type = other RNA
ctagtcaaaactgtgactgg

SEQ ID NO: 14255 - RNA, 20 nt, synthetic construct
  source 1..20: mol_type = other RNA
ctagtgccacacagtgactg

SEQ ID NO: 14256 - RNA, 20 nt, synthetic construct
  source 1..20: mol_type = other RNA
ctagtttactggcattatca

SEQ ID NO: 14257 - RNA, 20 nt, synthetic construct
  source 1..20: mol_type = other RNA
ctagtttcagagaataaaga

SEQ ID NO: 14258 - RNA, 20 nt, synthetic construct
  source 1..20: mol_type = other RNA
ctataaggggaatttctacg

SEQ ID NO: 14259 - RNA, 20 nt, synthetic construct
  source 1..20: mol_type = other RNA
ctatcaagttctgcagcagt

SEQ ID NO: 14260 - RNA, 20 nt, synthetic construct
  source 1..20: mol_type = other RNA
ctatcctgttccatcaggct

SEQ ID NO: 14261 - RNA, 20 nt, synthetic construct
  source 1..20: mol_type = other RNA
ctatctgaaaccaggatgga

SEQ ID NO: 14262 - RNA, 20 nt, synthetic construct
  source 1..20: mol_type = other RNA
ctatggcaagactcagtttg

SEQ ID NO: 14263 - RNA, 20 nt, synthetic construct
  source 1..20: mol_type = other RNA
ctattctggcttcccttcat

SEQ ID NO: 14264 - RNA, 20 nt, synthetic construct
  source 1..20: mol_type = other RNA
ctattttcacttcccttaaa

SEQ ID NO: 14265 - RNA, 20 nt, synthetic construct
  source 1..20: mol_type = other RNA
ctatttttatatccctgtag

SEQ ID NO: 14266 - RNA, 20 nt, synthetic construct
  source 1..20: mol_type = other RNA
ctcaaaaactgatttttgtt

SEQ ID NO: 14267 - RNA, 20 nt, synthetic construct
  source 1..20: mol_type = other RNA
ctcaaaaccagcaacagcag

SEQ ID NO: 14268 - RNA, 20 nt, synthetic construct
  source 1..20: mol_type = other RNA
ctcaaaagcatgctgctcta

SEQ ID NO: 14269 - RNA, 20 nt, synthetic construct
  source 1..20: mol_type = other RNA
ctcaaatcacagaagcaagt

SEQ ID NO: 14270 - RNA, 20 nt, synthetic construct
  source 1..20: mol_type = other RNA
ctcaaatcggagacatttgg

SEQ ID NO: 14271 - RNA, 20 nt, synthetic construct
  source 1..20: mol_type = other RNA
ctcaacatggttggttctat

SEQ ID NO: 14272 - RNA, 20 nt, synthetic construct
  source 1..20: mol_type = other RNA
ctcaagcataacccaccaat

SEQ ID NO: 14273 - RNA, 20 nt, synthetic construct
  source 1..20: mol_type = other RNA
ctcaataattttatagagtc

SEQ ID NO: 14274 - RNA, 20 nt, synthetic construct
  source 1..20: mol_type = other RNA
ctcaatatgatttcccatct

SEQ ID NO: 14275 - RNA, 20 nt, synthetic construct
  source 1..20: mol_type = other RNA
ctcaatattatccagattgt

SEQ ID NO: 14276 - RNA, 20 nt, synthetic construct
  source 1..20: mol_type = other RNA
ctcaatgatgctcttttgct

SEQ ID NO: 14277 - RNA, 20 nt, synthetic construct
  source 1..20: mol_type = other RNA
ctcacaccaggtgcacttct

SEQ ID NO: 14278 - RNA, 20 nt, synthetic construct
  source 1..20: mol_type = other RNA
ctcacaccttttgcaacata

SEQ ID NO: 14279 - RNA, 20 nt, synthetic construct
  source 1..20: mol_type = other RNA
ctcacacgactattctggct

SEQ ID NO: 14280 - RNA, 20 nt, synthetic construct
  source 1..20: mol_type = other RNA
ctcacagattctttcttatc

SEQ ID NO: 14281 - RNA, 20 nt, synthetic construct
  source 1..20: mol_type = other RNA
ctcacaggacaactcattag

SEQ ID NO: 14282 - RNA, 20 nt, synthetic construct
  source 1..20: mol_type = other RNA
ctcacataaatgccattaac

SEQ ID NO: 14283 - RNA, 20 nt, synthetic construct
  source 1..20: mol_type = other RNA
ctcaccactgcagctggctt

SEQ ID NO: 14284 - RNA, 20 nt, synthetic construct
  source 1..20: mol_type = other RNA
ctcacccatcgcatacctca

SEQ ID NO: 14285 - RNA, 20 nt, synthetic construct
  source 1..20: mol_type = other RNA
ctcacccccaaagcaacaat

SEQ ID NO: 14286 - RNA, 20 nt, synthetic construct
  source 1..20: mol_type = other RNA
ctcactcaccactgcagctg

SEQ ID NO: 14287 - RNA, 20 nt, synthetic construct
  source 1..20: mol_type = other RNA
ctcagaacacaatggaacag

SEQ ID NO: 14288 - RNA, 20 nt, synthetic construct
  source 1..20: mol_type = other RNA
ctcagaataattgtgtgaac

SEQ ID NO: 14289 - RNA, 20 nt, synthetic construct
  source 1..20: mol_type = other RNA
ctcagacccctccccagaag

SEQ ID NO: 14290 - RNA, 20 nt, synthetic construct
  source 1..20: mol_type = other RNA
ctcagagttagaggtctgtg

SEQ ID NO: 14291 - RNA, 20 nt, synthetic construct
  source 1..20: mol_type = other RNA
ctcagcaaaggtacttgata

SEQ ID NO: 14292 - RNA, 20 nt, synthetic construct
  source 1..20: mol_type = other RNA
ctcagcttccttcagaagga

SEQ ID NO: 14293 - RNA, 20 nt, synthetic construct
  source 1..20: mol_type = other RNA
ctcaggcagtgggcttccat

SEQ ID NO: 14294 - RNA, 20 nt, synthetic construct
  source 1..20: mol_type = other RNA
ctcagggcagatcaattccg

SEQ ID NO: 14295 - RNA, 20 nt, synthetic construct
  source 1..20: mol_type = other RNA
ctcaggtttaccctctattt

SEQ ID NO: 14296 - RNA, 20 nt, synthetic construct
  source 1..20: mol_type = other RNA
ctcagtacatttctggcact

SEQ ID NO: 14297 - RNA, 20 nt, synthetic construct
  source 1..20: mol_type = other RNA
ctcagtctctgaagcctgtt

SEQ ID NO: 14298 - RNA, 20 nt, synthetic construct
  source 1..20: mol_type = other RNA
ctcagtgttcactaaggatt

SEQ ID NO: 14299 - RNA, 20 nt, synthetic construct
  source 1..20: mol_type = other RNA
ctcagtttggggttgctgtg

SEQ ID NO: 14300 - RNA, 20 nt, synthetic construct
  source 1..20: mol_type = other RNA
ctcataaacaggcagcacaa

SEQ ID NO: 14301 - RNA, 20 nt, synthetic construct
  source 1..20: mol_type = other RNA
ctcataatgtccaaatggga

SEQ ID NO: 14302 - RNA, 20 nt, synthetic construct
  source 1..20: mol_type = other RNA
ctcatcaactgctggcagtt

SEQ ID NO: 14303 - RNA, 20 nt, synthetic construct
  source 1..20: mol_type = other RNA
ctcatccagaagtaaatgga

SEQ ID NO: 14304 - RNA, 20 nt, synthetic construct
  source 1..20: mol_type = other RNA
ctcatgtgcagtcactgtgt

SEQ ID NO: 14305 - RNA, 20 nt, synthetic construct
  source 1..20: mol_type = other RNA
ctcattacgttttagatggg

SEQ ID NO: 14306 - RNA, 20 nt, synthetic construct
  source 1..20: mol_type = other RNA
ctcattagtagcctgactgt

SEQ ID NO: 14307 - RNA, 20 nt, synthetic construct
  source 1..20: mol_type = other RNA
ctcattcagaatctgaagct

SEQ ID NO: 14308 - RNA, 20 nt, synthetic construct
  source 1..20: mol_type = other RNA
ctccaaaacagaccatttac

SEQ ID NO: 14309 - RNA, 20 nt, synthetic construct
  source 1..20: mol_type = other RNA
ctccaaacaatacactggaa

SEQ ID NO: 14310 - RNA, 20 nt, synthetic construct
  source 1..20: mol_type = other RNA
ctccaaagccagctgcagtg

SEQ ID NO: 14311 - RNA, 20 nt, synthetic construct
  source 1..20: mol_type = other RNA
ctccaatcaaatgacctcca

SEQ ID NO: 14312 - RNA, 20 nt, synthetic construct
  source 1..20: mol_type = other RNA
ctccaccattcagagtgctt

SEQ ID NO: 14313 - RNA, 20 nt, synthetic construct
  source 1..20: mol_type = other RNA
ctccactgctaccaaaaatt

SEQ ID NO: 14314 - RNA, 20 nt, synthetic construct
  source 1..20: mol_type = other RNA
ctccagaatggaagcccact

SEQ ID NO: 14315 - RNA, 20 nt, synthetic construct
  source 1..20: mol_type = other RNA
ctccagacttttcctcaccc

SEQ ID NO: 14316 - RNA, 20 nt, synthetic construct
  source 1..20: mol_type = other RNA
ctccagctgtgttgttttct

SEQ ID NO: 14317 - RNA, 20 nt, synthetic construct
  source 1..20: mol_type = other RNA
ctccagtcccatttggacat

SEQ ID NO: 14318 - RNA, 20 nt, synthetic construct
  source 1..20: mol_type = other RNA
ctccagttccaaaaaccctc

SEQ ID NO: 14319 - RNA, 20 nt, synthetic construct
  source 1..20: mol_type = other RNA
ctccatggtctcaatgatgc

SEQ ID NO: 14320 - RNA, 20 nt, synthetic construct
  source 1..20: mol_type = other RNA
ctccattagccttttggtct

SEQ ID NO: 14321 - RNA, 20 nt, synthetic construct
  source 1..20: mol_type = other RNA
ctccatttacttctggatga

SEQ ID NO: 14322 - RNA, 20 nt, synthetic construct
  source 1..20: mol_type = other RNA
ctccattttgcaaacacttg

SEQ ID NO: 14323 - RNA, 20 nt, synthetic construct
  source 1..20: mol_type = other RNA
ctcccaaggcaagcttacac

SEQ ID NO: 14324 - RNA, 20 nt, synthetic construct
  source 1..20: mol_type = other RNA
ctcccatttgccagacagaa

SEQ ID NO: 14325 - RNA, 20 nt, synthetic construct
  source 1..20: mol_type = other RNA
ctccccagaaggacactcaa

SEQ ID NO: 14326 - RNA, 20 nt, synthetic construct
  source 1..20: mol_type = other RNA
ctccccctcctcctcttcca

SEQ ID NO: 14327 - RNA, 20 nt, synthetic construct
  source 1..20: mol_type = other RNA
ctccctcaaaaccagcaaca

SEQ ID NO: 14328 - RNA, 20 nt, synthetic construct
  source 1..20: mol_type = other RNA
ctccctggtcaggcacagga

SEQ ID NO: 14329 - RNA, 20 nt, synthetic construct
  source 1..20: mol_type = other RNA
ctccgatgctttctgaaagg

SEQ ID NO: 14330 - RNA, 20 nt, synthetic construct
  source 1..20: mol_type = other RNA
ctccgatttgagtgataaga

SEQ ID NO: 14331 - RNA, 20 nt, synthetic construct
  source 1..20: mol_type = other RNA
ctcctcctcttccacaggtt

SEQ ID NO: 14332 - RNA, 20 nt, synthetic construct
  source 1..20: mol_type = other RNA
ctcctcttccacaggttcct

SEQ ID NO: 14333 - RNA, 20 nt, synthetic construct
  source 1..20: mol_type = other RNA
ctcctgcagaaaataacatc

SEQ ID NO: 14334 - RNA, 20 nt, synthetic construct
  source 1..20: mol_type = other RNA
ctcctgctcattcagaatct

SEQ ID NO: 14335 - RNA, 20 nt, synthetic construct
  source 1..20: mol_type = other RNA
ctcctggaaaaaacactgtc

SEQ ID NO: 14336 - RNA, 20 nt, synthetic construct
  source 1..20: mol_type = other RNA
ctcctggtggcagctctgaa

SEQ ID NO: 14337 - RNA, 20 nt, synthetic construct
  source 1..20: mol_type = other RNA
ctcctgttcttgaaagcacc

SEQ ID NO: 14338 - RNA, 20 nt, synthetic construct
  source 1..20: mol_type = other RNA
ctccttcagatcaagaaatt

SEQ ID NO: 14339 - RNA, 20 nt, synthetic construct
  source 1..20: mol_type = other RNA
ctccttgtctcgacccttca

SEQ ID NO: 14340 - RNA, 20 nt, synthetic construct
  source 1..20: mol_type = other RNA
ctcgaactcgcttgattttg

SEQ ID NO: 14341 - RNA, 20 nt, synthetic construct
  source 1..20: mol_type = other RNA
ctcgacccttcagaatctct

SEQ ID NO: 14342 - RNA, 20 nt, synthetic construct
  source 1..20: mol_type = other RNA
ctcgcttgattttgaatact

SEQ ID NO: 14343 - RNA, 20 nt, synthetic construct
  source 1..20: mol_type = other RNA
ctcgtgtttgctccttgtct

SEQ ID NO: 14344 - RNA, 20 nt, synthetic construct
  source 1..20: mol_type = other RNA
ctcgttttcaccaagcggaa

SEQ ID NO: 14345 - RNA, 20 nt, synthetic construct
  source 1..20: mol_type = other RNA
ctctaaagctggggtgtggc

SEQ ID NO: 14346 - RNA, 20 nt, synthetic construct
  source 1..20: mol_type = other RNA
ctctaactctgagctgcctc

SEQ ID NO: 14347 - RNA, 20 nt, synthetic construct
  source 1..20: mol_type = other RNA
ctctaaggtggcatctctta

SEQ ID NO: 14348 - RNA, 20 nt, synthetic construct
  source 1..20: mol_type = other RNA
ctctactttcttgtgtaaag

SEQ ID NO: 14349 - RNA, 20 nt, synthetic construct
  source 1..20: mol_type = other RNA
ctctattttcacttccctta

SEQ ID NO: 14350 - RNA, 20 nt, synthetic construct
  source 1..20: mol_type = other RNA
ctctcaaatcacagaagcaa

SEQ ID NO: 14351 - RNA, 20 nt, synthetic construct
  source 1..20: mol_type = other RNA
ctctcaggcagtgggcttcc

SEQ ID NO: 14352 - RNA, 20 nt, synthetic construct
  source 1..20: mol_type = other RNA
ctctccaatcaaatgacctc

SEQ ID NO: 14353 - RNA, 20 nt, synthetic construct
  source 1..20: mol_type = other RNA
ctctccactgctaccaaaaa

SEQ ID NO: 14354 - RNA, 20 nt, synthetic construct
  source 1..20: mol_type = other RNA
ctctctcaggcagtgggctt

SEQ ID NO: 14355 - RNA, 20 nt, synthetic construct
  source 1..20: mol_type = other RNA
ctctctctgggctccttcag

SEQ ID NO: 14356 - RNA, 20 nt, synthetic construct
  source 1..20: mol_type = other RNA
ctctctgggctccttcagat

SEQ ID NO: 14357 - RNA, 20 nt, synthetic construct
  source 1..20: mol_type = other RNA
ctctgaaactaggtgtgtat

SEQ ID NO: 14358 - RNA, 20 nt, synthetic construct
  source 1..20: mol_type = other RNA
ctctgaacggtatttaaaac

SEQ ID NO: 14359 - RNA, 20 nt, synthetic construct
  source 1..20: mol_type = other RNA
ctctgaagcctgttgattca

SEQ ID NO: 14360 - RNA, 20 nt, synthetic construct
  source 1..20: mol_type = other RNA
ctctgaatggtggagtttta

SEQ ID NO: 14361 - RNA, 20 nt, synthetic construct
  source 1..20: mol_type = other RNA
ctctgagctgcctccaaagc

SEQ ID NO: 14362 - RNA, 20 nt, synthetic construct
  source 1..20: mol_type = other RNA
ctctggattttcaggcccac

SEQ ID NO: 14363 - RNA, 20 nt, synthetic construct
  source 1..20: mol_type = other RNA
ctctggctacaaagctccag

SEQ ID NO: 14364 - RNA, 20 nt, synthetic construct
  source 1..20: mol_type = other RNA
ctctgggaaggtggtgcctc

SEQ ID NO: 14365 - RNA, 20 nt, synthetic construct
  source 1..20: mol_type = other RNA
ctctgggatggttgtgtttg

SEQ ID NO: 14366 - RNA, 20 nt, synthetic construct
  source 1..20: mol_type = other RNA
ctctgggctccttcagatca

SEQ ID NO: 14367 - RNA, 20 nt, synthetic construct
  source 1..20: mol_type = other RNA
ctcttacagaagcaagaaca

SEQ ID NO: 14368 - RNA, 20 nt, synthetic construct
  source 1..20: mol_type = other RNA
ctcttactctcaaatcacag

SEQ ID NO: 14369 - RNA, 20 nt, synthetic construct
  source 1..20: mol_type = other RNA
ctcttccacaggttcctcag

SEQ ID NO: 14370 - RNA, 20 nt, synthetic construct
  source 1..20: mol_type = other RNA
ctcttccgtggaacacacac

SEQ ID NO: 14371 - RNA, 20 nt, synthetic construct
  source 1..20: mol_type = other RNA
ctcttgctctttgtttctca

SEQ ID NO: 14372 - RNA, 20 nt, synthetic construct
  source 1..20: mol_type = other RNA
ctcttgcttagttacctttt

SEQ ID NO: 14373 - RNA, 20 nt, synthetic construct
  source 1..20: mol_type = other RNA
ctctttcaaaagttattatg

SEQ ID NO: 14374 - RNA, 20 nt, synthetic construct
  source 1..20: mol_type = other RNA
ctctttgctgatcattgttg

SEQ ID NO: 14375 - RNA, 20 nt, synthetic construct
  source 1..20: mol_type = other RNA
ctctttgttgaaaatgaaat

SEQ ID NO: 14376 - RNA, 20 nt, synthetic construct
  source 1..20: mol_type = other RNA
ctctttgtttctcatcaact

SEQ ID NO: 14377 - RNA, 20 nt, synthetic construct
  source 1..20: mol_type = other RNA
ctcttttgctgcacattatc

SEQ ID NO: 14378 - RNA, 20 nt, synthetic construct
  source 1..20: mol_type = other RNA
ctgaaaaacttatgtcccca

SEQ ID NO: 14379 - RNA, 20 nt, synthetic construct
  source 1..20: mol_type = other RNA
ctgaaaatccagagcttcag

SEQ ID NO: 14380 - RNA, 20 nt, synthetic construct
  source 1..20: mol_type = other RNA
ctgaaaccaggatggattga

SEQ ID NO: 14381 - RNA, 20 nt, synthetic construct
  source 1..20: mol_type = other RNA
ctgaaactaggtgtgtattg

SEQ ID NO: 14382 - RNA, 20 nt, synthetic construct
  source 1..20: mol_type = other RNA
ctgaaaggaacaggtattta

SEQ ID NO: 14383 - RNA, 20 nt, synthetic construct
  source 1..20: mol_type = other RNA
ctgaaaggcctcagaataat

SEQ ID NO: 14384 - RNA, 20 nt, synthetic construct
  source 1..20: mol_type = other RNA
ctgaacagaattcttcacca

SEQ ID NO: 14385 - RNA, 20 nt, synthetic construct
  source 1..20: mol_type = other RNA
ctgaacggtatttaaaacaa

SEQ ID NO: 14386 - RNA, 20 nt, synthetic construct
  source 1..20: mol_type = other RNA
ctgaactttttgcaggaaac

SEQ ID NO: 14387 - RNA, 20 nt, synthetic construct
  source 1..20: mol_type = other RNA
ctgaagaagttgtttgctgc

SEQ ID NO: 14388 - RNA, 20 nt, synthetic construct
  source 1..20: mol_type = other RNA
ctgaagaattgatggcagtg

SEQ ID NO: 14389 - RNA, 20 nt, synthetic construct
  source 1..20: mol_type = other RNA
ctgaagcagtttcacgccaa

SEQ ID NO: 14390 - RNA, 20 nt, synthetic construct
  source 1..20: mol_type = other RNA
ctgaagcctgttgattcaag

SEQ ID NO: 14391 - RNA, 20 nt, synthetic construct
  source 1..20: mol_type = other RNA
ctgaagctctggattttcag

SEQ ID NO: 14392 - RNA, 20 nt, synthetic construct
  source 1..20: mol_type = other RNA
ctgaagcttgttgtgacttc

SEQ ID NO: 14393 - RNA, 20 nt, synthetic construct
  source 1..20: mol_type = other RNA
ctgaaggaagctgaggaacc

SEQ ID NO: 14394 - RNA, 20 nt, synthetic construct
  source 1..20: mol_type = other RNA
ctgaaggagcccagagagag

SEQ ID NO: 14395 - RNA, 20 nt, synthetic construct
  source 1..20: mol_type = other RNA
ctgaagggtcgagacaagga

SEQ ID NO: 14396 - RNA, 20 nt, synthetic construct
  source 1..20: mol_type = other RNA
ctgaatgagcaggaggggaa

SEQ ID NO: 14397 - RNA, 20 nt, synthetic construct
  source 1..20: mol_type = other RNA
ctgaatggtggagttttaga

SEQ ID NO: 14398 - RNA, 20 nt, synthetic construct
  source 1..20: mol_type = other RNA
ctgacattggtcttgttttc

SEQ ID NO: 14399 - RNA, 20 nt, synthetic construct
  source 1..20: mol_type = other RNA
ctgacatttcaacttttact

SEQ ID NO: 14400 - RNA, 20 nt, synthetic construct
  source 1..20: mol_type = other RNA
ctgaccagggaggaagtcac

SEQ ID NO: 14401 - RNA, 20 nt, synthetic construct
  source 1..20: mol_type = other RNA
ctgactataaggggaatttc

SEQ ID NO: 14402 - RNA, 20 nt, synthetic construct
  source 1..20: mol_type = other RNA
ctgactatggcaagactcag

SEQ ID NO: 14403 - RNA, 20 nt, synthetic construct
  source 1..20: mol_type = other RNA
ctgactgttaatggcattta

SEQ ID NO: 14404 - RNA, 20 nt, synthetic construct
  source 1..20: mol_type = other RNA
ctgactttacacaagaaagt

SEQ ID NO: 14405 - RNA, 20 nt, synthetic construct
  source 1..20: mol_type = other RNA
ctgagaaaacaagaccaatg

SEQ ID NO: 14406 - RNA, 20 nt, synthetic construct
  source 1..20: mol_type = other RNA
ctgagagagctcatccagaa

SEQ ID NO: 14407 - RNA, 20 nt, synthetic construct
  source 1..20: mol_type = other RNA
ctgagcaagttgcgcagctt

SEQ ID NO: 14408 - RNA, 20 nt, synthetic construct
  source 1..20: mol_type = other RNA
ctgagccattttcaaactca

SEQ ID NO: 14409 - RNA, 20 nt, synthetic construct
  source 1..20: mol_type = other RNA
ctgagctgcctccaaagcca

SEQ ID NO: 14410 - RNA, 20 nt, synthetic construct
  source 1..20: mol_type = other RNA
ctgagctttgcttgaagtaa

SEQ ID NO: 14411 - RNA, 20 nt, synthetic construct
  source 1..20: mol_type = other RNA
ctgaggaacctgtggaagag

SEQ ID NO: 14412 - RNA, 20 nt, synthetic construct
  source 1..20: mol_type = other RNA
ctgaggcaccaccttcccag

SEQ ID NO: 14413 - RNA, 20 nt, synthetic construct
  source 1..20: mol_type = other RNA
ctgaggcctttcagaaagca

SEQ ID NO: 14414 - RNA, 20 nt, synthetic construct
  source 1..20: mol_type = other RNA
ctgaggtatgcgatgggtga

SEQ ID NO: 14415 - RNA, 20 nt, synthetic construct
  source 1..20: mol_type = other RNA
ctgagtcttgccatagtcag

SEQ ID NO: 14416 - RNA, 20 nt, synthetic construct
  source 1..20: mol_type = other RNA
ctgagtgtgacttcctccct

SEQ ID NO: 14417 - RNA, 20 nt, synthetic construct
  source 1..20: mol_type = other RNA
ctgataatgccagtaaacta

SEQ ID NO: 14418 - RNA, 20 nt, synthetic construct
  source 1..20: mol_type = other RNA
ctgataccatcacctcccat

SEQ ID NO: 14419 - RNA, 20 nt, synthetic construct
  source 1..20: mol_type = other RNA
ctgatcattgttgctttggg

SEQ ID NO: 14420 - RNA, 20 nt, synthetic construct
  source 1..20: mol_type = other RNA
ctgatgatgctgataatgcc

SEQ ID NO: 14421 - RNA, 20 nt, synthetic construct
  source 1..20: mol_type = other RNA
ctgatggaacaggatagaac

SEQ ID NO: 14422 - RNA, 20 nt, synthetic construct
  source 1..20: mol_type = other RNA
ctgattttcaccatgaaaac

SEQ ID NO: 14423 - RNA, 20 nt, synthetic construct
  source 1..20: mol_type = other RNA
ctgatttttgttgttgtagt

SEQ ID NO: 14424 - RNA, 20 nt, synthetic construct
  source 1..20: mol_type = other RNA
ctgcaaaaagttcaggatgt

SEQ ID NO: 14425 - RNA, 20 nt, synthetic construct
  source 1..20: mol_type = other RNA
ctgcaagatgggaaatcata

SEQ ID NO: 14426 - RNA, 20 nt, synthetic construct
  source 1..20: mol_type = other RNA
ctgcaagctgtgataatgtg

SEQ ID NO: 14427 - RNA, 20 nt, synthetic construct
  source 1..20: mol_type = other RNA
ctgcaatgctaaatacctgt

SEQ ID NO: 14428 - RNA, 20 nt, synthetic construct
  source 1..20: mol_type = other RNA
ctgcacatgagcttttggta

SEQ ID NO: 14429 - RNA, 20 nt, synthetic construct
  source 1..20: mol_type = other RNA
ctgcacattatcacagcttg

SEQ ID NO: 14430 - RNA, 20 nt, synthetic construct
  source 1..20: mol_type = other RNA
ctgcaccgcaatggaaacac

SEQ ID NO: 14431 - RNA, 20 nt, synthetic construct
  source 1..20: mol_type = other RNA
ctgcagaaaataacatccag

SEQ ID NO: 14432 - RNA, 20 nt, synthetic construct
  source 1..20: mol_type = other RNA
ctgcagaacttgatagccac

SEQ ID NO: 14433 - RNA, 20 nt, synthetic construct
  source 1..20: mol_type = other RNA
ctgcagcagtggtttgtcta

SEQ ID NO: 14434 - RNA, 20 nt, synthetic construct
  source 1..20: mol_type = other RNA
ctgcagctggctttggaggc

SEQ ID NO: 14435 - RNA, 20 nt, synthetic construct
  source 1..20: mol_type = other RNA
ctgcaggagatgggcatatc

SEQ ID NO: 14436 - RNA, 20 nt, synthetic construct
  source 1..20: mol_type = other RNA
ctgcagggacaatgactgtt

SEQ ID NO: 14437 - RNA, 20 nt, synthetic construct
  source 1..20: mol_type = other RNA
ctgcagtctgtatgtcattc

SEQ ID NO: 14438 - RNA, 20 nt, synthetic construct
  source 1..20: mol_type = other RNA
ctgcagtgggcctgaaaatc

SEQ ID NO: 14439 - RNA, 20 nt, synthetic construct
  source 1..20: mol_type = other RNA
ctgcagtggtgagtgaggcc

SEQ ID NO: 14440 - RNA, 20 nt, synthetic construct
  source 1..20: mol_type = other RNA
ctgcagttatgtgttgaaaa

SEQ ID NO: 14441 - RNA, 20 nt, synthetic construct
  source 1..20: mol_type = other RNA
ctgcatacatgtgtagatgg

SEQ ID NO: 14442 - RNA, 20 nt, synthetic construct
  source 1..20: mol_type = other RNA
ctgcattttcttgggctaca

SEQ ID NO: 14443 - RNA, 20 nt, synthetic construct
  source 1..20: mol_type = other RNA
ctgccaccaggagcttgcaa

SEQ ID NO: 14444 - RNA, 20 nt, synthetic construct
  source 1..20: mol_type = other RNA
ctgccactaccacaccacca

SEQ ID NO: 14445 - RNA, 20 nt, synthetic construct
  source 1..20: mol_type = other RNA
ctgccagcagttgatgagaa

SEQ ID NO: 14446 - RNA, 20 nt, synthetic construct
  source 1..20: mol_type = other RNA
ctgccatcaattcttcagta

SEQ ID NO: 14447 - RNA, 20 nt, synthetic construct
  source 1..20: mol_type = other RNA
ctgccctgaggtatgcgatg

SEQ ID NO: 14448 - RNA, 20 nt, synthetic construct
  source 1..20: mol_type = other RNA
ctgcccttgattcatttcaa

SEQ ID NO: 14449 - RNA, 20 nt, synthetic construct
  source 1..20: mol_type = other RNA
ctgcctccaaagccagctgc

SEQ ID NO: 14450 - RNA, 20 nt, synthetic construct
  source 1..20: mol_type = other RNA
ctgcctcttccgtggaacac

SEQ ID NO: 14451 - RNA, 20 nt, synthetic construct
  source 1..20: mol_type = other RNA
ctgcctgagagagctcatcc

SEQ ID NO: 14452 - RNA, 20 nt, synthetic construct
  source 1..20: mol_type = other RNA
ctgcctgtttatgaggctta

SEQ ID NO: 14453 - RNA, 20 nt, synthetic construct
  source 1..20: mol_type = other RNA
ctgccttgtttttaagtaat

SEQ ID NO: 14454 - RNA, 20 nt, synthetic construct
  source 1..20: mol_type = other RNA
ctgcgcaacttgctcagcaa

SEQ ID NO: 14455 - RNA, 20 nt, synthetic construct
  source 1..20: mol_type = other RNA
ctgctaccaaaaattggtgg

SEQ ID NO: 14456 - RNA, 20 nt, synthetic construct
  source 1..20: mol_type = other RNA
ctgctcattcagaatctgaa

SEQ ID NO: 14457 - RNA, 20 nt, synthetic construct
  source 1..20: mol_type = other RNA
ctgctccatggtctcaatga

SEQ ID NO: 14458 - RNA, 20 nt, synthetic construct
  source 1..20: mol_type = other RNA
ctgctcctgttcttgaaagc

SEQ ID NO: 14459 - RNA, 20 nt, synthetic construct
  source 1..20: mol_type = other RNA
ctgctctaaagctggggtgt

SEQ ID NO: 14460 - RNA, 20 nt, synthetic construct
  source 1..20: mol_type = other RNA
ctgctctaaggtggcatctc

SEQ ID NO: 14461 - RNA, 20 nt, synthetic construct
  source 1..20: mol_type = other RNA
ctgctctttgttgaaaatga

SEQ ID NO: 14462 - RNA, 20 nt, synthetic construct
  source 1..20: mol_type = other RNA
ctgctgcagaacttgatagc

SEQ ID NO: 14463 - RNA, 20 nt, synthetic construct
  source 1..20: mol_type = other RNA
ctgctggaacctgaacagaa

SEQ ID NO: 14464 - RNA, 20 nt, synthetic construct
  source 1..20: mol_type = other RNA
ctgctggcagttgtcctgta

SEQ ID NO: 14465 - RNA, 20 nt, synthetic construct
  source 1..20: mol_type = other RNA
ctgctgttcttgcttctgta

SEQ ID NO: 14466 - RNA, 20 nt, synthetic construct
  source 1..20: mol_type = other RNA
ctgctgttgctggttttgag

SEQ ID NO: 14467 - RNA, 20 nt, synthetic construct
  source 1..20: mol_type = other RNA
ctgcttcagatgctgctcca

SEQ ID NO: 14468 - RNA, 20 nt, synthetic construct
  source 1..20: mol_type = other RNA
ctgcttctgttctcaataat

SEQ ID NO: 14469 - RNA, 20 nt, synthetic construct
  source 1..20: mol_type = other RNA
ctgctttcacctggatttct

SEQ ID NO: 14470 - RNA, 20 nt, synthetic construct
  source 1..20: mol_type = other RNA
ctggaaaaaacactgtctca

SEQ ID NO: 14471 - RNA, 20 nt, synthetic construct
  source 1..20: mol_type = other RNA
ctggaaattccaacatgcct

SEQ ID NO: 14472 - RNA, 20 nt, synthetic construct
  source 1..20: mol_type = other RNA
ctggaacctgaacagaattc

SEQ ID NO: 14473 - RNA, 20 nt, synthetic construct
  source 1..20: mol_type = other RNA
ctggagatgttggtccactg

SEQ ID NO: 14474 - RNA, 20 nt, synthetic construct
  source 1..20: mol_type = other RNA
ctggagcacaagtcacaaat

SEQ ID NO: 14475 - RNA, 20 nt, synthetic construct
  source 1..20: mol_type = other RNA
ctggagctttgtagccagag

SEQ ID NO: 14476 - RNA, 20 nt, synthetic construct
  source 1..20: mol_type = other RNA
ctggaggaagtacagaatat

SEQ ID NO: 14477 - RNA, 20 nt, synthetic construct
  source 1..20: mol_type = other RNA
ctggagtatttcctctttat

SEQ ID NO: 14478 - RNA, 20 nt, synthetic construct
  source 1..20: mol_type = other RNA
ctggataatattgagacagt

SEQ ID NO: 14479 - RNA, 20 nt, synthetic construct
  source 1..20: mol_type = other RNA
ctggatgagctctctcaggc

SEQ ID NO: 14480 - RNA, 20 nt, synthetic construct
  source 1..20: mol_type = other RNA
ctggatgcaagccacatgcc

SEQ ID NO: 14481 - RNA, 20 nt, synthetic construct
  source 1..20: mol_type = other RNA
ctggatgttattttctgcag

SEQ ID NO: 14482 - RNA, 20 nt, synthetic construct
  source 1..20: mol_type = other RNA
ctggatttctttcttggctt

SEQ ID NO: 14483 - RNA, 20 nt, synthetic construct
  source 1..20: mol_type = other RNA
ctggattttcaggcccactg

SEQ ID NO: 14484 - RNA, 20 nt, synthetic construct
  source 1..20: mol_type = other RNA
ctggcaaatgggaggtgatg

SEQ ID NO: 14485 - RNA, 20 nt, synthetic construct
  source 1..20: mol_type = other RNA
ctggcacttacctacacatc

SEQ ID NO: 14486 - RNA, 20 nt, synthetic construct
  source 1..20: mol_type = other RNA
ctggcagttgtcctgtagct

SEQ ID NO: 14487 - RNA, 20 nt, synthetic construct
  source 1..20: mol_type = other RNA
ctggcattatcagcatcatc

SEQ ID NO: 14488 - RNA, 20 nt, synthetic construct
  source 1..20: mol_type = other RNA
ctggccaaagaatgatcctt

SEQ ID NO: 14489 - RNA, 20 nt, synthetic construct
  source 1..20: mol_type = other RNA
ctggccctgacatttcaact

SEQ ID NO: 14490 - RNA, 20 nt, synthetic construct
  source 1..20: mol_type = other RNA
ctggctacaaagctccagaa

SEQ ID NO: 14491 - RNA, 20 nt, synthetic construct
  source 1..20: mol_type = other RNA
ctggcttcccttcatacagg

SEQ ID NO: 14492 - RNA, 20 nt, synthetic construct
  source 1..20: mol_type = other RNA
ctggctttggaggcagctca

SEQ ID NO: 14493 - RNA, 20 nt, synthetic construct
  source 1..20: mol_type = other RNA
ctgggaaggtggtgcctcag

SEQ ID NO: 14494 - RNA, 20 nt, synthetic construct
  source 1..20: mol_type = other RNA
ctgggatggttgtgtttgtg

SEQ ID NO: 14495 - RNA, 20 nt, synthetic construct
  source 1..20: mol_type = other RNA
ctgggctccttcagatcaag

SEQ ID NO: 14496 - RNA, 20 nt, synthetic construct
  source 1..20: mol_type = other RNA
ctggggacataagtttttca

SEQ ID NO: 14497 - RNA, 20 nt, synthetic construct
  source 1..20: mol_type = other RNA
ctggggaggggtctgagtgt

SEQ ID NO: 14498 - RNA, 20 nt, synthetic construct
  source 1..20: mol_type = other RNA
ctggggggctcccaaggcaa

SEQ ID NO: 14499 - RNA, 20 nt, synthetic construct
  source 1..20: mol_type = other RNA
ctggggtgtggctatcaagt

SEQ ID NO: 14500 - RNA, 20 nt, synthetic construct
  source 1..20: mol_type = other RNA
ctgggtgtaagcttgccttg

SEQ ID NO: 14501 - RNA, 20 nt, synthetic construct
  source 1..20: mol_type = other RNA
ctggtcaacaagctgcgcaa

SEQ ID NO: 14502 - RNA, 20 nt, synthetic construct
  source 1..20: mol_type = other RNA
ctggtcaggcacaggaaaaa

SEQ ID NO: 14503 - RNA, 20 nt, synthetic construct
  source 1..20: mol_type = other RNA
ctggtgaaatctttaactgc

SEQ ID NO: 14504 - RNA, 20 nt, synthetic construct
  source 1..20: mol_type = other RNA
ctggtgaagaattctgttca

SEQ ID NO: 14505 - RNA, 20 nt, synthetic construct
  source 1..20: mol_type = other RNA
ctggtggcagctctgaacgg

SEQ ID NO: 14506 - RNA, 20 nt, synthetic construct
  source 1..20: mol_type = other RNA
ctggtggtgctgtgtgcata

SEQ ID NO: 14507 - RNA, 20 nt, synthetic construct
  source 1..20: mol_type = other RNA
ctggtgtgagggtttttgga

SEQ ID NO: 14508 - RNA, 20 nt, synthetic construct
  source 1..20: mol_type = other RNA
ctggtttcagatagtgctgt

SEQ ID NO: 14509 - RNA, 20 nt, synthetic construct
  source 1..20: mol_type = other RNA
ctggtttctgaaaggaacag

SEQ ID NO: 14510 - RNA, 20 nt, synthetic construct
  source 1..20: mol_type = other RNA
ctggttttgagggagatgtg

SEQ ID NO: 14511 - RNA, 20 nt, synthetic construct
  source 1..20: mol_type = other RNA
ctgtaagagatgccacctta

SEQ ID NO: 14512 - RNA, 20 nt, synthetic construct
  source 1..20: mol_type = other RNA
ctgtaccttgggactgccct

SEQ ID NO: 14513 - RNA, 20 nt, synthetic construct
  source 1..20: mol_type = other RNA
ctgtacttcctccagtccca

SEQ ID NO: 14514 - RNA, 20 nt, synthetic construct
  source 1..20: mol_type = other RNA
ctgtagaactgaagcttgtt

SEQ ID NO: 14515 - RNA, 20 nt, synthetic construct
  source 1..20: mol_type = other RNA
ctgtagcaccattaggcatt

SEQ ID NO: 14516 - RNA, 20 nt, synthetic construct
  source 1..20: mol_type = other RNA
ctgtagcccaagaaaatgca

SEQ ID NO: 14517 - RNA, 20 nt, synthetic construct
  source 1..20: mol_type = other RNA
ctgtagctctccactgctac

SEQ ID NO: 14518 - RNA, 20 nt, synthetic construct
  source 1..20: mol_type = other RNA
ctgtatgaagggaagccaga

SEQ ID NO: 14519 - RNA, 20 nt, synthetic construct
  source 1..20: mol_type = other RNA
ctgtatgcacacagcaccac

SEQ ID NO: 14520 - RNA, 20 nt, synthetic construct
  source 1..20: mol_type = other RNA
ctgtatgtcattcctgttca

SEQ ID NO: 14521 - RNA, 20 nt, synthetic construct
  source 1..20: mol_type = other RNA
ctgtattttgcatgcacttg

SEQ ID NO: 14522 - RNA, 20 nt, synthetic construct
  source 1..20: mol_type = other RNA
ctgtcaagactcaatatgat

SEQ ID NO: 14523 - RNA, 20 nt, synthetic construct
  source 1..20: mol_type = other RNA
ctgtctcaatattatccaga

SEQ ID NO: 14524 - RNA, 20 nt, synthetic construct
  source 1..20: mol_type = other RNA
ctgtctggcaaatgggaggt

SEQ ID NO: 14525 - RNA, 20 nt, synthetic construct
  source 1..20: mol_type = other RNA
ctgtgaagaagatcttgctt

SEQ ID NO: 14526 - RNA, 20 nt, synthetic construct
  source 1..20: mol_type = other RNA
ctgtgactggccctgacatt

SEQ ID NO: 14527 - RNA, 20 nt, synthetic construct
  source 1..20: mol_type = other RNA
ctgtgagatcactcacccat

SEQ ID NO: 14528 - RNA, 20 nt, synthetic construct
  source 1..20: mol_type = other RNA
ctgtgagttctgtagcccaa

SEQ ID NO: 14529 - RNA, 20 nt, synthetic construct
  source 1..20: mol_type = other RNA
ctgtgataatgtgcagcaaa

SEQ ID NO: 14530 - RNA, 20 nt, synthetic construct
  source 1..20: mol_type = other RNA
ctgtgatgctgatgatgctg

SEQ ID NO: 14531 - RNA, 20 nt, synthetic construct
  source 1..20: mol_type = other RNA
ctgtgatttgagagtaagag

SEQ ID NO: 14532 - RNA, 20 nt, synthetic construct
  source 1..20: mol_type = other RNA
ctgtgcatctgactatggca

SEQ ID NO: 14533 - RNA, 20 nt, synthetic construct
  source 1..20: mol_type = other RNA
ctgtgcctgaccagggagga

SEQ ID NO: 14534 - RNA, 20 nt, synthetic construct
  source 1..20: mol_type = other RNA
ctgtgcggaattgatctgcc

SEQ ID NO: 14535 - RNA, 20 nt, synthetic construct
  source 1..20: mol_type = other RNA
ctgtgcgttttattcctcca

SEQ ID NO: 14536 - RNA, 20 nt, synthetic construct
  source 1..20: mol_type = other RNA
ctgtggaagaggaggagggg

SEQ ID NO: 14537 - RNA, 20 nt, synthetic construct
  source 1..20: mol_type = other RNA
ctgtgtgcatacaggcatgt

SEQ ID NO: 14538 - RNA, 20 nt, synthetic construct
  source 1..20: mol_type = other RNA
ctgtgtggcactagatttca

SEQ ID NO: 14539 - RNA, 20 nt, synthetic construct
  source 1..20: mol_type = other RNA
ctgtgttgggggcacaagat

SEQ ID NO: 14540 - RNA, 20 nt, synthetic construct
  source 1..20: mol_type = other RNA
ctgtgttgttttctgggtgt

SEQ ID NO: 14541 - RNA, 20 nt, synthetic construct
  source 1..20: mol_type = other RNA
ctgtgtttgctgctgttctt

SEQ ID NO: 14542 - RNA, 20 nt, synthetic construct
  source 1..20: mol_type = other RNA
ctgttaatggcatttatgtg

SEQ ID NO: 14543 - RNA, 20 nt, synthetic construct
  source 1..20: mol_type = other RNA
ctgttcacacaattattctg

SEQ ID NO: 14544 - RNA, 20 nt, synthetic construct
  source 1..20: mol_type = other RNA
ctgttcaggttccagcagca

SEQ ID NO: 14545 - RNA, 20 nt, synthetic construct
  source 1..20: mol_type = other RNA
ctgttccatcaggcttgctt

SEQ ID NO: 14546 - RNA, 20 nt, synthetic construct
  source 1..20: mol_type = other RNA
ctgttccattgtgttctgag

SEQ ID NO: 14547 - RNA, 20 nt, synthetic construct
  source 1..20: mol_type = other RNA
ctgttcctttcagaaaccag

SEQ ID NO: 14548 - RNA, 20 nt, synthetic construct
  source 1..20: mol_type = other RNA
ctgttcttgaaagcacctgt

SEQ ID NO: 14549 - RNA, 20 nt, synthetic construct
  source 1..20: mol_type = other RNA
ctgttcttgcttctgtaaga

SEQ ID NO: 14550 - RNA, 20 nt, synthetic construct
  source 1..20: mol_type = other RNA
ctgttctttattctctgaaa

SEQ ID NO: 14551 - RNA, 20 nt, synthetic construct
  source 1..20: mol_type = other RNA
ctgttcttttggttggtgtc

SEQ ID NO: 14552 - RNA, 20 nt, synthetic construct
  source 1..20: mol_type = other RNA
ctgttgattcaagtgctgtt

SEQ ID NO: 14553 - RNA, 20 nt, synthetic construct
  source 1..20: mol_type = other RNA
ctgttgccctcaacatggtt

SEQ ID NO: 14554 - RNA, 20 nt, synthetic construct
  source 1..20: mol_type = other RNA
ctgttgctggttttgaggga

SEQ ID NO: 14555 - RNA, 20 nt, synthetic construct
  source 1..20: mol_type = other RNA
ctgtttatgaggcttatgtt

SEQ ID NO: 14556 - RNA, 20 nt, synthetic construct
  source 1..20: mol_type = other RNA
ctgtttcaacactggggaca

SEQ ID NO: 14557 - RNA, 20 nt, synthetic construct
  source 1..20: mol_type = other RNA
ctgttttggagaagtgcacc

SEQ ID NO: 14558 - RNA, 20 nt, synthetic construct
  source 1..20: mol_type = other RNA
cttaaaaacaaggcagtgct

SEQ ID NO: 14559 - RNA, 20 nt, synthetic construct
  source 1..20: mol_type = other RNA
cttaaaagtgttgtgttact

SEQ ID NO: 14560 - RNA, 20 nt, synthetic construct
  source 1..20: mol_type = other RNA
cttaattggcctgtgcatct

SEQ ID NO: 14561 - RNA, 20 nt, synthetic construct
  source 1..20: mol_type = other RNA
cttacacccagaaaacaaca

SEQ ID NO: 14562 - RNA, 20 nt, synthetic construct
  source 1..20: mol_type = other RNA
cttacagaagcaagaacagc

SEQ ID NO: 14563 - RNA, 20 nt, synthetic construct
  source 1..20: mol_type = other RNA
cttaccccgaagttacgtct

SEQ ID NO: 14564 - RNA, 20 nt, synthetic construct
  source 1..20: mol_type = other RNA
cttacctacacatctgcaag

SEQ ID NO: 14565 - RNA, 20 nt, synthetic construct
  source 1..20: mol_type = other RNA
cttactctcaaatcacagaa

SEQ ID NO: 14566 - RNA, 20 nt, synthetic construct
  source 1..20: mol_type = other RNA
cttacttcaagcaaagctca

SEQ ID NO: 14567 - RNA, 20 nt, synthetic construct
  source 1..20: mol_type = other RNA
cttagagcagcatgcttttg

SEQ ID NO: 14568 - RNA, 20 nt, synthetic construct
  source 1..20: mol_type = other RNA
cttagtctgttgccctcaac

SEQ ID NO: 14569 - RNA, 20 nt, synthetic construct
  source 1..20: mol_type = other RNA
cttagtgaacactgagcttt

SEQ ID NO: 14570 - RNA, 20 nt, synthetic construct
  source 1..20: mol_type = other RNA
cttagttacctttttccatg

SEQ ID NO: 14571 - RNA, 20 nt, synthetic construct
  source 1..20: mol_type = other RNA
cttatagtcagaccatgaaa

SEQ ID NO: 14572 - RNA, 20 nt, synthetic construct
  source 1..20: mol_type = other RNA
cttatcactcaaatcggaga

SEQ ID NO: 14573 - RNA, 20 nt, synthetic construct
  source 1..20: mol_type = other RNA
cttatggtcaaataacgact

SEQ ID NO: 14574 - RNA, 20 nt, synthetic construct
  source 1..20: mol_type = other RNA
cttatgtccccagtgttgaa

SEQ ID NO: 14575 - RNA, 20 nt, synthetic construct
  source 1..20: mol_type = other RNA
cttatgttgcaaaaggtgtg

SEQ ID NO: 14576 - RNA, 20 nt, synthetic construct
  source 1..20: mol_type = other RNA
cttcaagcaaagctcagtgt

SEQ ID NO: 14577 - RNA, 20 nt, synthetic construct
  source 1..20: mol_type = other RNA
cttcaattcaatccatcctg

SEQ ID NO: 14578 - RNA, 20 nt, synthetic construct
  source 1..20: mol_type = other RNA
cttcacaggtgctttcaaga

SEQ ID NO: 14579 - RNA, 20 nt, synthetic construct
  source 1..20: mol_type = other RNA
cttcaccagacgctagcttt

SEQ ID NO: 14580 - RNA, 20 nt, synthetic construct
  source 1..20: mol_type = other RNA
cttcagaaaagacaccaacc

SEQ ID NO: 14581 - RNA, 20 nt, synthetic construct
  source 1..20: mol_type = other RNA
cttcagaaggaaaaagcact

SEQ ID NO: 14582 - RNA, 20 nt, synthetic construct
  source 1..20: mol_type = other RNA
cttcagaatctcttgctctt

SEQ ID NO: 14583 - RNA, 20 nt, synthetic construct
  source 1..20: mol_type = other RNA
cttcagagactgagccattt

SEQ ID NO: 14584 - RNA, 20 nt, synthetic construct
  source 1..20: mol_type = other RNA
cttcagatcaagaaattgaa

SEQ ID NO: 14585 - RNA, 20 nt, synthetic construct
  source 1..20: mol_type = other RNA
cttcagatgctgctccatgg

SEQ ID NO: 14586 - RNA, 20 nt, synthetic construct
  source 1..20: mol_type = other RNA
cttcagattctgaatgagca

SEQ ID NO: 14587 - RNA, 20 nt, synthetic construct
  source 1..20: mol_type = other RNA
cttcagtatcaacccaatct

SEQ ID NO: 14588 - RNA, 20 nt, synthetic construct
  source 1..20: mol_type = other RNA
cttcagttctacagggatat

SEQ ID NO: 14589 - RNA, 20 nt, synthetic construct
  source 1..20: mol_type = other RNA
cttcatacagggtattccat

SEQ ID NO: 14590 - RNA, 20 nt, synthetic construct
  source 1..20: mol_type = other RNA
cttccaaattactagatact

SEQ ID NO: 14591 - RNA, 20 nt, synthetic construct
  source 1..20: mol_type = other RNA
cttccacaggttcctcagct

SEQ ID NO: 14592 - RNA, 20 nt, synthetic construct
  source 1..20: mol_type = other RNA
cttccactttagtctggcca

SEQ ID NO: 14593 - RNA, 20 nt, synthetic construct
  source 1..20: mol_type = other RNA
cttccattctggagctttgt

SEQ ID NO: 14594 - RNA, 20 nt, synthetic construct
  source 1..20: mol_type = other RNA
cttcccagagtcctaatcca

SEQ ID NO: 14595 - RNA, 20 nt, synthetic construct
  source 1..20: mol_type = other RNA
cttcccttaaaagtgttgtg

SEQ ID NO: 14596 - RNA, 20 nt, synthetic construct
  source 1..20: mol_type = other RNA
cttcccttcatacagggtat

SEQ ID NO: 14597 - RNA, 20 nt, synthetic construct
  source 1..20: mol_type = other RNA
cttccgtggaacacacacat

SEQ ID NO: 14598 - RNA, 20 nt, synthetic construct
  source 1..20: mol_type = other RNA
cttcctccagtcccatttgg

SEQ ID NO: 14599 - RNA, 20 nt, synthetic construct
  source 1..20: mol_type = other RNA
cttcctccctggtcaggcac

SEQ ID NO: 14600 - RNA, 20 nt, synthetic construct
  source 1..20: mol_type = other RNA
cttccttcagaaggaaaaag

SEQ ID NO: 14601 - RNA, 20 nt, synthetic construct
  source 1..20: mol_type = other RNA
cttcggggccatccacaagg

SEQ ID NO: 14602 - RNA, 20 nt, synthetic construct
  source 1..20: mol_type = other RNA
cttcggggtaagccaagaaa

SEQ ID NO: 14603 - RNA, 20 nt, synthetic construct
  source 1..20: mol_type = other RNA
cttctaaaactccaccattc

SEQ ID NO: 14604 - RNA, 20 nt, synthetic construct
  source 1..20: mol_type = other RNA
cttctccaaaacagaccatt

SEQ ID NO: 14605 - RNA, 20 nt, synthetic construct
  source 1..20: mol_type = other RNA
cttctccgatgctttctgaa

SEQ ID NO: 14606 - RNA, 20 nt, synthetic construct
  source 1..20: mol_type = other RNA
cttctctctctgggctcctt

SEQ ID NO: 14607 - RNA, 20 nt, synthetic construct
  source 1..20: mol_type = other RNA
cttctctttgctgatcattg

SEQ ID NO: 14608 - RNA, 20 nt, synthetic construct
  source 1..20: mol_type = other RNA
cttctgaaggaagctgagga

SEQ ID NO: 14609 - RNA, 20 nt, synthetic construct
  source 1..20: mol_type = other RNA
cttctgctcctgttcttgaa

SEQ ID NO: 14610 - RNA, 20 nt, synthetic construct
  source 1..20: mol_type = other RNA
cttctggatgagctctctca

SEQ ID NO: 14611 - RNA, 20 nt, synthetic construct
  source 1..20: mol_type = other RNA
cttctggggaggggtctgag

SEQ ID NO: 14612 - RNA, 20 nt, synthetic construct
  source 1..20: mol_type = other RNA
cttctgtaagagatgccacc

SEQ ID NO: 14613 - RNA, 20 nt, synthetic construct
  source 1..20: mol_type = other RNA
cttctgtgatttgagagtaa

SEQ ID NO: 14614 - RNA, 20 nt, synthetic construct
  source 1..20: mol_type = other RNA
cttctgttctcaataatttt

SEQ ID NO: 14615 - RNA, 20 nt, synthetic construct
  source 1..20: mol_type = other RNA
cttcttcacaggtgctttca

SEQ ID NO: 14616 - RNA, 20 nt, synthetic construct
  source 1..20: mol_type = other RNA
cttcttcagaaaagacacca

SEQ ID NO: 14617 - RNA, 20 nt, synthetic construct
  source 1..20: mol_type = other RNA
cttctttctccccctcctcc

SEQ ID NO: 14618 - RNA, 20 nt, synthetic construct
  source 1..20: mol_type = other RNA
cttgaaagcacctgtgaaga

SEQ ID NO: 14619 - RNA, 20 nt, synthetic construct
  source 1..20: mol_type = other RNA
cttgaagtaagcaccattca

SEQ ID NO: 14620 - RNA, 20 nt, synthetic construct
  source 1..20: mol_type = other RNA
cttgaatcaacaggcttcag

SEQ ID NO: 14621 - RNA, 20 nt, synthetic construct
  source 1..20: mol_type = other RNA
cttgacaggtgtatccaata

SEQ ID NO: 14622 - RNA, 20 nt, synthetic construct
  source 1..20: mol_type = other RNA
cttgaggtgttctgacattg

SEQ ID NO: 14623 - RNA, 20 nt, synthetic construct
  source 1..20: mol_type = other RNA
cttgatacataaccatgcaa

SEQ ID NO: 14624 - RNA, 20 nt, synthetic construct
  source 1..20: mol_type = other RNA
cttgatagccacaccccagc

SEQ ID NO: 14625 - RNA, 20 nt, synthetic construct
  source 1..20: mol_type = other RNA
cttgatctgaaggagcccag

SEQ ID NO: 14626 - RNA, 20 nt, synthetic construct
  source 1..20: mol_type = other RNA
cttgattcatttcaacttgg

SEQ ID NO: 14627 - RNA, 20 nt, synthetic construct
  source 1..20: mol_type = other RNA
cttgatttcatggtctgact

SEQ ID NO: 14628 - RNA, 20 nt, synthetic construct
  source 1..20: mol_type = other RNA
cttgattttgaatactgatt

SEQ ID NO: 14629 - RNA, 20 nt, synthetic construct
  source 1..20: mol_type = other RNA
cttgcaaattgctgctggaa

SEQ ID NO: 14630 - RNA, 20 nt, synthetic construct
  source 1..20: mol_type = other RNA
cttgcagatgtgtaggtaag

SEQ ID NO: 14631 - RNA, 20 nt, synthetic construct
  source 1..20: mol_type = other RNA
cttgcaggtggattctcttg

SEQ ID NO: 14632 - RNA, 20 nt, synthetic construct
  source 1..20: mol_type = other RNA
cttgcatcacatgcaatatt

SEQ ID NO: 14633 - RNA, 20 nt, synthetic construct
  source 1..20: mol_type = other RNA
cttgcatccaggttccacct

SEQ ID NO: 14634 - RNA, 20 nt, synthetic construct
  source 1..20: mol_type = other RNA
cttgccatagtcagatgcac

SEQ ID NO: 14635 - RNA, 20 nt, synthetic construct
  source 1..20: mol_type = other RNA
cttgccttgggagcccccca

SEQ ID NO: 14636 - RNA, 20 nt, synthetic construct
  source 1..20: mol_type = other RNA
cttgctcagcaaaggtactt

SEQ ID NO: 14637 - RNA, 20 nt, synthetic construct
  source 1..20: mol_type = other RNA
cttgctctttgtttctcatc

SEQ ID NO: 14638 - RNA, 20 nt, synthetic construct
  source 1..20: mol_type = other RNA
cttgcttagttacctttttc

SEQ ID NO: 14639 - RNA, 20 nt, synthetic construct
  source 1..20: mol_type = other RNA
cttgcttcggggccatccac

SEQ ID NO: 14640 - RNA, 20 nt, synthetic construct
  source 1..20: mol_type = other RNA
cttgcttctgtaagagatgc

SEQ ID NO: 14641 - RNA, 20 nt, synthetic construct
  source 1..20: mol_type = other RNA
cttgcttctgtgatttgaga

SEQ ID NO: 14642 - RNA, 20 nt, synthetic construct
  source 1..20: mol_type = other RNA
cttgctttgggatcacatta

SEQ ID NO: 14643 - RNA, 20 nt, synthetic construct
  source 1..20: mol_type = other RNA
cttggaataccctctacttt

SEQ ID NO: 14644 - RNA, 20 nt, synthetic construct
  source 1..20: mol_type = other RNA
cttggcgtgaaactgcttca

SEQ ID NO: 14645 - RNA, 20 nt, synthetic construct
  source 1..20: mol_type = other RNA
cttggcttaccccgaagtta

SEQ ID NO: 14646 - RNA, 20 nt, synthetic construct
  source 1..20: mol_type = other RNA
cttgggactgcccttgattc

SEQ ID NO: 14647 - RNA, 20 nt, synthetic construct
  source 1..20: mol_type = other RNA
cttgggagccccccaggcat

SEQ ID NO: 14648 - RNA, 20 nt, synthetic construct
  source 1..20: mol_type = other RNA
cttgggctacagaactcaca

SEQ ID NO: 14649 - RNA, 20 nt, synthetic construct
  source 1..20: mol_type = other RNA
cttggtacatttgtgacttg

SEQ ID NO: 14650 - RNA, 20 nt, synthetic construct
  source 1..20: mol_type = other RNA
cttggtgaaaacgaggggcc

SEQ ID NO: 14651 - RNA, 20 nt, synthetic construct
  source 1..20: mol_type = other RNA
cttggtgtctccatttactt

SEQ ID NO: 14652 - RNA, 20 nt, synthetic construct
  source 1..20: mol_type = other RNA
cttgtcatggtaattagcac

SEQ ID NO: 14653 - RNA, 20 nt, synthetic construct
  source 1..20: mol_type = other RNA
cttgtctcgacccttcagaa

SEQ ID NO: 14654 - RNA, 20 nt, synthetic construct
  source 1..20: mol_type = other RNA
cttgtgcccccaacacagca

SEQ ID NO: 14655 - RNA, 20 nt, synthetic construct
  source 1..20: mol_type = other RNA
cttgtgctccagctgtgttg

SEQ ID NO: 14656 - RNA, 20 nt, synthetic construct
  source 1..20: mol_type = other RNA
cttgtggatggccccgaagc

SEQ ID NO: 14657 - RNA, 20 nt, synthetic construct
  source 1..20: mol_type = other RNA
cttgtgtaaagtcaggactc

SEQ ID NO: 14658 - RNA, 20 nt, synthetic construct
  source 1..20: mol_type = other RNA
cttgttcaaacaatacacac

SEQ ID NO: 14659 - RNA, 20 nt, synthetic construct
  source 1..20: mol_type = other RNA
cttgttgaccagacatatct

SEQ ID NO: 14660 - RNA, 20 nt, synthetic construct
  source 1..20: mol_type = other RNA
cttgttgtgacttctgctcc

SEQ ID NO: 14661 - RNA, 20 nt, synthetic construct
  source 1..20: mol_type = other RNA
cttgtttcaatttcttgatc

SEQ ID NO: 14662 - RNA, 20 nt, synthetic construct
  source 1..20: mol_type = other RNA
cttgtttcctgcaaaaagtt

SEQ ID NO: 14663 - RNA, 20 nt, synthetic construct
  source 1..20: mol_type = other RNA
cttgttttctcagaacacaa

SEQ ID NO: 14664 - RNA, 20 nt, synthetic construct
  source 1..20: mol_type = other RNA
ctttaactgcattttcttgg

SEQ ID NO: 14665 - RNA, 20 nt, synthetic construct
  source 1..20: mol_type = other RNA
ctttacacaagaaagtagag

SEQ ID NO: 14666 - RNA, 20 nt, synthetic construct
  source 1..20: mol_type = other RNA
ctttagagcagcaaacaact

SEQ ID NO: 14667 - RNA, 20 nt, synthetic construct
  source 1..20: mol_type = other RNA
ctttagtctggccaaagaat

SEQ ID NO: 14668 - RNA, 20 nt, synthetic construct
  source 1..20: mol_type = other RNA
ctttattctctgaaactagg

SEQ ID NO: 14669 - RNA, 20 nt, synthetic construct
  source 1..20: mol_type = other RNA
ctttcaaaagttattatgga

SEQ ID NO: 14670 - RNA, 20 nt, synthetic construct
  source 1..20: mol_type = other RNA
ctttcaagaacaggagcaga

SEQ ID NO: 14671 - RNA, 20 nt, synthetic construct
  source 1..20: mol_type = other RNA
ctttcacctggatttctttc

SEQ ID NO: 14672 - RNA, 20 nt, synthetic construct
  source 1..20: mol_type = other RNA
ctttcagaaaccagaacaac

SEQ ID NO: 14673 - RNA, 20 nt, synthetic construct
  source 1..20: mol_type = other RNA
ctttcagaaagcatcggaga

SEQ ID NO: 14674 - RNA, 20 nt, synthetic construct
  source 1..20: mol_type = other RNA
ctttctccattagccttttg

SEQ ID NO: 14675 - RNA, 20 nt, synthetic construct
  source 1..20: mol_type = other RNA
ctttctccccctcctcctct

SEQ ID NO: 14676 - RNA, 20 nt, synthetic construct
  source 1..20: mol_type = other RNA
ctttctgaaaggcctcagaa

SEQ ID NO: 14677 - RNA, 20 nt, synthetic construct
  source 1..20: mol_type = other RNA
ctttcttatcactcaaatcg

SEQ ID NO: 14678 - RNA, 20 nt, synthetic construct
  source 1..20: mol_type = other RNA
ctttcttggcttaccccgaa

SEQ ID NO: 14679 - RNA, 20 nt, synthetic construct
  source 1..20: mol_type = other RNA
ctttcttgtgtaaagtcagg

SEQ ID NO: 14680 - RNA, 20 nt, synthetic construct
  source 1..20: mol_type = other RNA
ctttgctgagcaagttgcgc

SEQ ID NO: 14681 - RNA, 20 nt, synthetic construct
  source 1..20: mol_type = other RNA
ctttgctgatcattgttgct

SEQ ID NO: 14682 - RNA, 20 nt, synthetic construct
  source 1..20: mol_type = other RNA
ctttgcttgaagtaagcacc

SEQ ID NO: 14683 - RNA, 20 nt, synthetic construct
  source 1..20: mol_type = other RNA
ctttggaggcagctcagagt

SEQ ID NO: 14684 - RNA, 20 nt, synthetic construct
  source 1..20: mol_type = other RNA
ctttggccagactaaagtgg

SEQ ID NO: 14685 - RNA, 20 nt, synthetic construct
  source 1..20: mol_type = other RNA
ctttgggatcacattatttg

SEQ ID NO: 14686 - RNA, 20 nt, synthetic construct
  source 1..20: mol_type = other RNA
ctttgggggtgaggaaaagt

SEQ ID NO: 14687 - RNA, 20 nt, synthetic construct
  source 1..20: mol_type = other RNA
ctttggttggggtagtggtg

SEQ ID NO: 14688 - RNA, 20 nt, synthetic construct
  source 1..20: mol_type = other RNA
ctttgtagccagaggttctg

SEQ ID NO: 14689 - RNA, 20 nt, synthetic construct
  source 1..20: mol_type = other RNA
ctttgtggttccctggatgt

SEQ ID NO: 14690 - RNA, 20 nt, synthetic construct
  source 1..20: mol_type = other RNA
ctttgttgaaaatgaaatct

SEQ ID NO: 14691 - RNA, 20 nt, synthetic construct
  source 1..20: mol_type = other RNA
ctttgtttctcatcaactgc

SEQ ID NO: 14692 - RNA, 20 nt, synthetic construct
  source 1..20: mol_type = other RNA
cttttaagggaagtgaaaat

SEQ ID NO: 14693 - RNA, 20 nt, synthetic construct
  source 1..20: mol_type = other RNA
cttttacttgcttctgtgat

SEQ ID NO: 14694 - RNA, 20 nt, synthetic construct
  source 1..20: mol_type = other RNA
cttttcccctcctgctcatt

SEQ ID NO: 14695 - RNA, 20 nt, synthetic construct
  source 1..20: mol_type = other RNA
cttttcctcacccccaaagc

SEQ ID NO: 14696 - RNA, 20 nt, synthetic construct
  source 1..20: mol_type = other RNA
cttttctgaagaagttgttt

SEQ ID NO: 14697 - RNA, 20 nt, synthetic construct
  source 1..20: mol_type = other RNA
cttttctgccactaccacac

SEQ ID NO: 14698 - RNA, 20 nt, synthetic construct
  source 1..20: mol_type = other RNA
cttttgaaagagtgccactt

SEQ ID NO: 14699 - RNA, 20 nt, synthetic construct
  source 1..20: mol_type = other RNA
cttttgagtgtccttctggg

SEQ ID NO: 14700 - RNA, 20 nt, synthetic construct
  source 1..20: mol_type = other RNA
cttttgcaacataagcctca

SEQ ID NO: 14701 - RNA, 20 nt, synthetic construct
  source 1..20: mol_type = other RNA
cttttgctgcacattatcac

SEQ ID NO: 14702 - RNA, 20 nt, synthetic construct
  source 1..20: mol_type = other RNA
cttttggtaaatggtctgtt

SEQ ID NO: 14703 - RNA, 20 nt, synthetic construct
  source 1..20: mol_type = other RNA
cttttggtcttgtttcaatt

SEQ ID NO: 14704 - RNA, 20 nt, synthetic construct
  source 1..20: mol_type = other RNA
cttttggttggtgtcttttc

SEQ ID NO: 14705 - RNA, 20 nt, synthetic construct
  source 1..20: mol_type = other RNA
ctttttccatgttttgtttt

SEQ ID NO: 14706 - RNA, 20 nt, synthetic construct
  source 1..20: mol_type = other RNA
ctttttccttctgaaggaag

SEQ ID NO: 14707 - RNA, 20 nt, synthetic construct
  source 1..20: mol_type = other RNA
ctttttgcaggaaacaagac

SEQ ID NO: 14708 - RNA, 20 nt, synthetic construct
  source 1..20: mol_type = other RNA
gaaaaaacactgtctcaata

SEQ ID NO: 14709 - RNA, 20 nt, synthetic construct
  source 1..20: mol_type = other RNA
gaaaaacatttgcatggtta

SEQ ID NO: 14710 - RNA, 20 nt, synthetic construct
  source 1..20: mol_type = other RNA
gaaaaactggtgaaatcttt

SEQ ID NO: 14711 - RNA, 20 nt, synthetic construct
  source 1..20: mol_type = other RNA
gaaaaacttatgtccccagt

SEQ ID NO: 14712 - RNA, 20 nt, synthetic construct
  source 1..20: mol_type = other RNA
gaaaaagcactctgaatggt

SEQ ID NO: 14713 - RNA, 20 nt, synthetic construct
  source 1..20: mol_type = other RNA
gaaaaaggtaactaagcaag

SEQ ID NO: 14714 - RNA, 20 nt, synthetic construct
  source 1..20: mol_type = other RNA
gaaaacaaaacatggaaaaa

SEQ ID NO: 14715 - RNA, 20 nt, synthetic construct
  source 1..20: mol_type = other RNA
gaaaacaacacagctggagc

SEQ ID NO: 14716 - RNA, 20 nt, synthetic construct
  source 1..20: mol_type = other RNA
gaaaacaagaccaatgtcag

SEQ ID NO: 14717 - RNA, 20 nt, synthetic construct
  source 1..20: mol_type = other RNA
gaaaacattcttccacttta

SEQ ID NO: 14718 - RNA, 20 nt, synthetic construct
  source 1..20: mol_type = other RNA
gaaaaccacatctcacataa

SEQ ID NO: 14719 - RNA, 20 nt, synthetic construct
  source 1..20: mol_type = other RNA
gaaaacgaggggccttcaat

SEQ ID NO: 14720 - RNA, 20 nt, synthetic construct
  source 1..20: mol_type = other RNA
gaaaagacaccaaccaaaag

SEQ ID NO: 14721 - RNA, 20 nt, synthetic construct
  source 1..20: mol_type = other RNA
gaaaaggaatccttagtgaa

SEQ ID NO: 14722 - RNA, 20 nt, synthetic construct
  source 1..20: mol_type = other RNA
gaaaagtctggagtatttcc

SEQ ID NO: 14723 - RNA, 20 nt, synthetic construct
  source 1..20: mol_type = other RNA
gaaaagtgctaattaccatg

SEQ ID NO: 14724 - RNA, 20 nt, synthetic construct
  source 1..20: mol_type = other RNA
gaaaataacatccagggaac

SEQ ID NO: 14725 - RNA, 20 nt, synthetic construct
  source 1..20: mol_type = other RNA
gaaaatagagggtaaacctg

SEQ ID NO: 14726 - RNA, 20 nt, synthetic construct
  source 1..20: mol_type = other RNA
gaaaatattgcatgtgatgc

SEQ ID NO: 14727 - RNA, 20 nt, synthetic construct
  source 1..20: mol_type = other RNA
gaaaatcagtattcaaaatc

SEQ ID NO: 14728 - RNA, 20 nt, synthetic construct
  source 1..20: mol_type = other RNA
gaaaatccagagcttcagat

SEQ ID NO: 14729 - RNA, 20 nt, synthetic construct
  source 1..20: mol_type = other RNA
gaaaatgaaatctagtgcca

SEQ ID NO: 14730 - RNA, 20 nt, synthetic construct
  source 1..20: mol_type = other RNA
gaaaatgcagttaaagattt

SEQ ID NO: 14731 - RNA, 20 nt, synthetic construct
  source 1..20: mol_type = other RNA
gaaaatggctcagtctctga

SEQ ID NO: 14732 - RNA, 20 nt, synthetic construct
  source 1..20: mol_type = other RNA
gaaacaaagagcaagagatt

SEQ ID NO: 14733 - RNA, 20 nt, synthetic construct
  source 1..20: mol_type = other RNA
gaaacaagaccaaaaggcta

SEQ ID NO: 14734 - RNA, 20 nt, synthetic construct
  source 1..20: mol_type = other RNA
gaaacaagacccaaaacttg

SEQ ID NO: 14735 - RNA, 20 nt, synthetic construct
  source 1..20: mol_type = other RNA
gaaacacaatctggataata

SEQ ID NO: 14736 - RNA, 20 nt, synthetic construct
  source 1..20: mol_type = other RNA
gaaacagcacttgaatcaac

SEQ ID NO: 14737 - RNA, 20 nt, synthetic construct
  source 1..20: mol_type = other RNA
gaaaccaagatatgtctggt

SEQ ID NO: 14738 - RNA, 20 nt, synthetic construct
  source 1..20: mol_type = other RNA
gaaaccagaacaactacaac

SEQ ID NO: 14739 - RNA, 20 nt, synthetic construct
  source 1..20: mol_type = other RNA
gaaaccaggatggattgaat

SEQ ID NO: 14740 - RNA, 20 nt, synthetic construct
  source 1..20: mol_type = other RNA
gaaacctgtattttgcatgc

SEQ ID NO: 14741 - RNA, 20 nt, synthetic construct
  source 1..20: mol_type = other RNA
gaaactaggtgtgtattgtt

SEQ ID NO: 14742 - RNA, 20 nt, synthetic construct
  source 1..20: mol_type = other RNA
gaaactgcttcagatgctgc

SEQ ID NO: 14743 - RNA, 20 nt, synthetic construct
  source 1..20: mol_type = other RNA
gaaactgtagcaccattagg

SEQ ID NO: 14744 - RNA, 20 nt, synthetic construct
  source 1..20: mol_type = other RNA
gaaagaaatccaggtgaaag

SEQ ID NO: 14745 - RNA, 20 nt, synthetic construct
  source 1..20: mol_type = other RNA
gaaagaagcaattgtgatgg

SEQ ID NO: 14746 - RNA, 20 nt, synthetic construct
  source 1..20: mol_type = other RNA
gaaagaatctgtgagttctg

SEQ ID NO: 14747 - RNA, 20 nt, synthetic construct
  source 1..20: mol_type = other RNA
gaaagacgtaacttcggggt

SEQ ID NO: 14748 - RNA, 20 nt, synthetic construct
  source 1..20: mol_type = other RNA
gaaagagtgccacttggtgt

SEQ ID NO: 14749 - RNA, 20 nt, synthetic construct
  source 1..20: mol_type = other RNA
gaaagcacctgtgaagaaga

SEQ ID NO: 14750 - RNA, 20 nt, synthetic construct
  source 1..20: mol_type = other RNA
gaaagcagtcaaccaaatgt

SEQ ID NO: 14751 - RNA, 20 nt, synthetic construct
  source 1..20: mol_type = other RNA
gaaagcatcggagaagggct

SEQ ID NO: 14752 - RNA, 20 nt, synthetic construct
  source 1..20: mol_type = other RNA
gaaaggaacaggtatttagc

SEQ ID NO: 14753 - RNA, 20 nt, synthetic construct
  source 1..20: mol_type = other RNA
gaaaggcctcagaataattg

SEQ ID NO: 14754 - RNA, 20 nt, synthetic construct
  source 1..20: mol_type = other RNA
gaaagtagagggtattccaa

SEQ ID NO: 14755 - RNA, 20 nt, synthetic construct
  source 1..20: mol_type = other RNA
gaaatactccagacttttcc

SEQ ID NO: 14756 - RNA, 20 nt, synthetic construct
  source 1..20: mol_type = other RNA
gaaatcaagtgcatgcaaaa

SEQ ID NO: 14757 - RNA, 20 nt, synthetic construct
  source 1..20: mol_type = other RNA
gaaatcatattgagtcttga

SEQ ID NO: 14758 - RNA, 20 nt, synthetic construct
  source 1..20: mol_type = other RNA
gaaatccaggtgaaagcagt

SEQ ID NO: 14759 - RNA, 20 nt, synthetic construct
  source 1..20: mol_type = other RNA
gaaatctagtgccacacagt

SEQ ID NO: 14760 - RNA, 20 nt, synthetic construct
  source 1..20: mol_type = other RNA
gaaatctttaactgcatttt

SEQ ID NO: 14761 - RNA, 20 nt, synthetic construct
  source 1..20: mol_type = other RNA
gaaatgaatcaagggcagtc

SEQ ID NO: 14762 - RNA, 20 nt, synthetic construct
  source 1..20: mol_type = other RNA
gaaatgaatggtgcttactt

SEQ ID NO: 14763 - RNA, 20 nt, synthetic construct
  source 1..20: mol_type = other RNA
gaaatgtactgagacacatg

SEQ ID NO: 14764 - RNA, 20 nt, synthetic construct
  source 1..20: mol_type = other RNA
gaaatgtcagggccagtcac

SEQ ID NO: 14765 - RNA, 20 nt, synthetic construct
  source 1..20: mol_type = other RNA
gaaattccaacatgcctggg

SEQ ID NO: 14766 - RNA, 20 nt, synthetic construct
  source 1..20: mol_type = other RNA
gaaattccccttatagtcag

SEQ ID NO: 14767 - RNA, 20 nt, synthetic construct
  source 1..20: mol_type = other RNA
gaaattgaaacaagaccaaa

SEQ ID NO: 14768 - RNA, 20 nt, synthetic construct
  source 1..20: mol_type = other RNA
gaacaactacaacaacaaaa

SEQ ID NO: 14769 - RNA, 20 nt, synthetic construct
  source 1..20: mol_type = other RNA
gaacaagaaacctgtatttt

SEQ ID NO: 14770 - RNA, 20 nt, synthetic construct
  source 1..20: mol_type = other RNA
gaacacaatggaacagtcat

SEQ ID NO: 14771 - RNA, 20 nt, synthetic construct
  source 1..20: mol_type = other RNA
gaacacacacatggtgaact

SEQ ID NO: 14772 - RNA, 20 nt, synthetic construct
  source 1..20: mol_type = other RNA
gaacaccaccactaccccaa

SEQ ID NO: 14773 - RNA, 20 nt, synthetic construct
  source 1..20: mol_type = other RNA
gaacacctcaagcataaccc

SEQ ID NO: 14774 - RNA, 20 nt, synthetic construct
  source 1..20: mol_type = other RNA
gaacactgagctttgcttga

SEQ ID NO: 14775 - RNA, 20 nt, synthetic construct
  source 1..20: mol_type = other RNA
gaacagaagcagctgttctt

SEQ ID NO: 14776 - RNA, 20 nt, synthetic construct
  source 1..20: mol_type = other RNA
gaacagaattcttcaccaga

SEQ ID NO: 14777 - RNA, 20 nt, synthetic construct
  source 1..20: mol_type = other RNA
gaacagactacacatcctga

SEQ ID NO: 14778 - RNA, 20 nt, synthetic construct
  source 1..20: mol_type = other RNA
gaacagcagcaaacacagca

SEQ ID NO: 14779 - RNA, 20 nt, synthetic construct
  source 1..20: mol_type = other RNA
gaacagctgcttctgttctc

SEQ ID NO: 14780 - RNA, 20 nt, synthetic construct
  source 1..20: mol_type = other RNA
gaacaggaatgacatacaga

SEQ ID NO: 14781 - RNA, 20 nt, synthetic construct
  source 1..20: mol_type = other RNA
gaacaggagcagaagtcaca

SEQ ID NO: 14782 - RNA, 20 nt, synthetic construct
  source 1..20: mol_type = other RNA
gaacaggatagaaccaacca

SEQ ID NO: 14783 - RNA, 20 nt, synthetic construct
  source 1..20: mol_type = other RNA
gaacaggtatttagcattgc

SEQ ID NO: 14784 - RNA, 20 nt, synthetic construct
  source 1..20: mol_type = other RNA
gaacagtcattgtccctgca

SEQ ID NO: 14785 - RNA, 20 nt, synthetic construct
  source 1..20: mol_type = other RNA
gaaccaaccatgttgagggc

SEQ ID NO: 14786 - RNA, 20 nt, synthetic construct
  source 1..20: mol_type = other RNA
gaaccacaaagctagcgtct

SEQ ID NO: 14787 - RNA, 20 nt, synthetic construct
  source 1..20: mol_type = other RNA
gaacctctggctacaaagct

SEQ ID NO: 14788 - RNA, 20 nt, synthetic construct
  source 1..20: mol_type = other RNA
gaacctgaacagaattcttc

SEQ ID NO: 14789 - RNA, 20 nt, synthetic construct
  source 1..20: mol_type = other RNA
gaacctggatgcaagccaca

SEQ ID NO: 14790 - RNA, 20 nt, synthetic construct
  source 1..20: mol_type = other RNA
gaacctgtggaagaggagga

SEQ ID NO: 14791 - RNA, 20 nt, synthetic construct
  source 1..20: mol_type = other RNA
gaaccttctctctctgggct

SEQ ID NO: 14792 - RNA, 20 nt, synthetic construct
  source 1..20: mol_type = other RNA
gaacggtatttaaaacaaaa

SEQ ID NO: 14793 - RNA, 20 nt, synthetic construct
  source 1..20: mol_type = other RNA
gaactcacagattctttctt

SEQ ID NO: 14794 - RNA, 20 nt, synthetic construct
  source 1..20: mol_type = other RNA
gaactcctggaaaaaacact

SEQ ID NO: 14795 - RNA, 20 nt, synthetic construct
  source 1..20: mol_type = other RNA
gaactcgcttgattttgaat

SEQ ID NO: 14796 - RNA, 20 nt, synthetic construct
  source 1..20: mol_type = other RNA
gaactctgggatggttgtgt

SEQ ID NO: 14797 - RNA, 20 nt, synthetic construct
  source 1..20: mol_type = other RNA
gaactgaagcttgttgtgac

SEQ ID NO: 14798 - RNA, 20 nt, synthetic construct
  source 1..20: mol_type = other RNA
gaactggagatgttggtcca

SEQ ID NO: 14799 - RNA, 20 nt, synthetic construct
  source 1..20: mol_type = other RNA
gaacttgatagccacacccc

SEQ ID NO: 14800 - RNA, 20 nt, synthetic construct
  source 1..20: mol_type = other RNA
gaactttttgcaggaaacaa

SEQ ID NO: 14801 - RNA, 20 nt, synthetic construct
  source 1..20: mol_type = other RNA
gaagaacaccaccactaccc

SEQ ID NO: 14802 - RNA, 20 nt, synthetic construct
  source 1..20: mol_type = other RNA
gaagaagatcttgctttggg

SEQ ID NO: 14803 - RNA, 20 nt, synthetic construct
  source 1..20: mol_type = other RNA
gaagaagttgtttgctgctc

SEQ ID NO: 14804 - RNA, 20 nt, synthetic construct
  source 1..20: mol_type = other RNA
gaagaatgttttcatggtga

SEQ ID NO: 14805 - RNA, 20 nt, synthetic construct
  source 1..20: mol_type = other RNA
gaagaattctgttcaggttc

SEQ ID NO: 14806 - RNA, 20 nt, synthetic construct
  source 1..20: mol_type = other RNA
gaagaattgatggcagtgat

SEQ ID NO: 14807 - RNA, 20 nt, synthetic construct
  source 1..20: mol_type = other RNA
gaagaggaggagggggagaa

SEQ ID NO: 14808 - RNA, 20 nt, synthetic construct
  source 1..20: mol_type = other RNA
gaagaggcagaaactgtagc

SEQ ID NO: 14809 - RNA, 20 nt, synthetic construct
  source 1..20: mol_type = other RNA
gaagatcttgctttgggatc

SEQ ID NO: 14810 - RNA, 20 nt, synthetic construct
  source 1..20: mol_type = other RNA
gaagcaagaacagcagcaaa

SEQ ID NO: 14811 - RNA, 20 nt, synthetic construct
  source 1..20: mol_type = other RNA
gaagcaagcctgatggaaca

SEQ ID NO: 14812 - RNA, 20 nt, synthetic construct
  source 1..20: mol_type = other RNA
gaagcaagtaaaagttgaaa

SEQ ID NO: 14813 - RNA, 20 nt, synthetic construct
  source 1..20: mol_type = other RNA
gaagcaattgtgatggtggt

SEQ ID NO: 14814 - RNA, 20 nt, synthetic construct
  source 1..20: mol_type = other RNA
gaagcagctgttcttttggt

SEQ ID NO: 14815 - RNA, 20 nt, synthetic construct
  source 1..20: mol_type = other RNA
gaagcagtttcacgccaagt

SEQ ID NO: 14816 - RNA, 20 nt, synthetic construct
  source 1..20: mol_type = other RNA
gaagccagaatagtcgtgtg

SEQ ID NO: 14817 - RNA, 20 nt, synthetic construct
  source 1..20: mol_type = other RNA
gaagcccactgcctgagaga

SEQ ID NO: 14818 - RNA, 20 nt, synthetic construct
  source 1..20: mol_type = other RNA
gaagcctgttgattcaagtg

SEQ ID NO: 14819 - RNA, 20 nt, synthetic construct
  source 1..20: mol_type = other RNA
gaagctctggattttcaggc

SEQ ID NO: 14820 - RNA, 20 nt, synthetic construct
  source 1..20: mol_type = other RNA
gaagctgaggaacctgtgga

SEQ ID NO: 14821 - RNA, 20 nt, synthetic construct
  source 1..20: mol_type = other RNA
gaagcttgttgtgacttctg

SEQ ID NO: 14822 - RNA, 20 nt, synthetic construct
  source 1..20: mol_type = other RNA
gaaggaaaaagcactctgaa

SEQ ID NO: 14823 - RNA, 20 nt, synthetic construct
  source 1..20: mol_type = other RNA
gaaggaagctgaggaacctg

SEQ ID NO: 14824 - RNA, 20 nt, synthetic construct
  source 1..20: mol_type = other RNA
gaaggacactcaaaagcatg

SEQ ID NO: 14825 - RNA, 20 nt, synthetic construct
  source 1..20: mol_type = other RNA
gaaggagcccagagagagaa

SEQ ID NO: 14826 - RNA, 20 nt, synthetic construct
  source 1..20: mol_type = other RNA
gaaggatcattctttggcca

SEQ ID NO: 14827 - RNA, 20 nt, synthetic construct
  source 1..20: mol_type = other RNA
gaaggcccctcgttttcacc

SEQ ID NO: 14828 - RNA, 20 nt, synthetic construct
  source 1..20: mol_type = other RNA
gaagggaagccagaatagtc

SEQ ID NO: 14829 - RNA, 20 nt, synthetic construct
  source 1..20: mol_type = other RNA
gaagggctgcatacatgtgt

SEQ ID NO: 14830 - RNA, 20 nt, synthetic construct
  source 1..20: mol_type = other RNA
gaagggtcgagacaaggagc

SEQ ID NO: 14831 - RNA, 20 nt, synthetic construct
  source 1..20: mol_type = other RNA
gaaggtgactctataaaatt

SEQ ID NO: 14832 - RNA, 20 nt, synthetic construct
  source 1..20: mol_type = other RNA
gaaggtggtgcctcaggttt

SEQ ID NO: 14833 - RNA, 20 nt, synthetic construct
  source 1..20: mol_type = other RNA
gaaggttcactaactgtgcg

SEQ ID NO: 14834 - RNA, 20 nt, synthetic construct
  source 1..20: mol_type = other RNA
gaagtaaatggagacaccaa

SEQ ID NO: 14835 - RNA, 20 nt, synthetic construct
  source 1..20: mol_type = other RNA
gaagtaagcaccattcattt

SEQ ID NO: 14836 - RNA, 20 nt, synthetic construct
  source 1..20: mol_type = other RNA
gaagtacagaatataaatcg

SEQ ID NO: 14837 - RNA, 20 nt, synthetic construct
  source 1..20: mol_type = other RNA
gaagtcacaacaagcttcag

SEQ ID NO: 14838 - RNA, 20 nt, synthetic construct
  source 1..20: mol_type = other RNA
gaagtcacactcagacccct

SEQ ID NO: 14839 - RNA, 20 nt, synthetic construct
  source 1..20: mol_type = other RNA
gaagtgaaaatagagggtaa

SEQ ID NO: 14840 - RNA, 20 nt, synthetic construct
  source 1..20: mol_type = other RNA
gaagtgcacctggtgtgagg

SEQ ID NO: 14841 - RNA, 20 nt, synthetic construct
  source 1..20: mol_type = other RNA
gaagttacgtctttctccat

SEQ ID NO: 14842 - RNA, 20 nt, synthetic construct
  source 1..20: mol_type = other RNA
gaagttgtttgctgctctaa

SEQ ID NO: 14843 - RNA, 20 nt, synthetic construct
  source 1..20: mol_type = other RNA
gaataaaacgcacagttagt

SEQ ID NO: 14844 - RNA, 20 nt, synthetic construct
  source 1..20: mol_type = other RNA
gaataaagaacagactacac

SEQ ID NO: 14845 - RNA, 20 nt, synthetic construct
  source 1..20: mol_type = other RNA
gaataaagaggaaatactcc

SEQ ID NO: 14846 - RNA, 20 nt, synthetic construct
  source 1..20: mol_type = other RNA
gaataattgtgtgaacagga

SEQ ID NO: 14847 - RNA, 20 nt, synthetic construct
  source 1..20: mol_type = other RNA
gaataccctctactttcttg

SEQ ID NO: 14848 - RNA, 20 nt, synthetic construct
  source 1..20: mol_type = other RNA
gaataccctgtatgaaggga

SEQ ID NO: 14849 - RNA, 20 nt, synthetic construct
  source 1..20: mol_type = other RNA
gaatactgattttcaccatg

SEQ ID NO: 14850 - RNA, 20 nt, synthetic construct
  source 1..20: mol_type = other RNA
gaatagtcgtgtgagtcctg

SEQ ID NO: 14851 - RNA, 20 nt, synthetic construct
  source 1..20: mol_type = other RNA
gaatcaacaggcttcagaga

SEQ ID NO: 14852 - RNA, 20 nt, synthetic construct
  source 1..20: mol_type = other RNA
gaatcaagggcagtcccaag

SEQ ID NO: 14853 - RNA, 20 nt, synthetic construct
  source 1..20: mol_type = other RNA
gaatccacctgcaagctgtg

SEQ ID NO: 14854 - RNA, 20 nt, synthetic construct
  source 1..20: mol_type = other RNA
gaatcccatctaaaacgtaa

SEQ ID NO: 14855 - RNA, 20 nt, synthetic construct
  source 1..20: mol_type = other RNA
gaatccttagtgaacactga

SEQ ID NO: 14856 - RNA, 20 nt, synthetic construct
  source 1..20: mol_type = other RNA
gaatctcttgctctttgttt

SEQ ID NO: 14857 - RNA, 20 nt, synthetic construct
  source 1..20: mol_type = other RNA
gaatctgaagctctggattt

SEQ ID NO: 14858 - RNA, 20 nt, synthetic construct
  source 1..20: mol_type = other RNA
gaatctgctctttgttgaaa

SEQ ID NO: 14859 - RNA, 20 nt, synthetic construct
  source 1..20: mol_type = other RNA
gaatctgtgagttctgtagc

SEQ ID NO: 14860 - RNA, 20 nt, synthetic construct
  source 1..20: mol_type = other RNA
gaatgacatacagactgcag

SEQ ID NO: 14861 - RNA, 20 nt, synthetic construct
  source 1..20: mol_type = other RNA
gaatgagcaggaggggaaaa

SEQ ID NO: 14862 - RNA, 20 nt, synthetic construct
  source 1..20: mol_type = other RNA
gaatgatccttctctttgct

SEQ ID NO: 14863 - RNA, 20 nt, synthetic construct
  source 1..20: mol_type = other RNA
gaatggaagcccactgcctg

SEQ ID NO: 14864 - RNA, 20 nt, synthetic construct
  source 1..20: mol_type = other RNA
gaatggacttagtctgttgc

SEQ ID NO: 14865 - RNA, 20 nt, synthetic construct
  source 1..20: mol_type = other RNA
gaatggtgcttacttcaagc

SEQ ID NO: 14866 - RNA, 20 nt, synthetic construct
  source 1..20: mol_type = other RNA
gaatggtggagttttagaag

SEQ ID NO: 14867 - RNA, 20 nt, synthetic construct
  source 1..20: mol_type = other RNA
gaatgttttcatggtgaaaa

SEQ ID NO: 14868 - RNA, 20 nt, synthetic construct
  source 1..20: mol_type = other RNA
gaattctgttcaggttccag

SEQ ID NO: 14869 - RNA, 20 nt, synthetic construct
  source 1..20: mol_type = other RNA
gaattcttcaccagacgcta

SEQ ID NO: 14870 - RNA, 20 nt, synthetic construct
  source 1..20: mol_type = other RNA
gaattgaaggcccctcgttt

SEQ ID NO: 14871 - RNA, 20 nt, synthetic construct
  source 1..20: mol_type = other RNA
gaattgatctgccctgaggt

SEQ ID NO: 14872 - RNA, 20 nt, synthetic construct
  source 1..20: mol_type = other RNA
gaattgatggcagtgatgcc

SEQ ID NO: 14873 - RNA, 20 nt, synthetic construct
  source 1..20: mol_type = other RNA
gaatttccagtgtattgttt

SEQ ID NO: 14874 - RNA, 20 nt, synthetic construct
  source 1..20: mol_type = other RNA
gacaaaccactgctgcagaa

SEQ ID NO: 14875 - RNA, 20 nt, synthetic construct
  source 1..20: mol_type = other RNA
gacaactcattagtagcctg

SEQ ID NO: 14876 - RNA, 20 nt, synthetic construct
  source 1..20: mol_type = other RNA
gacaactgccagcagttgat

SEQ ID NO: 14877 - RNA, 20 nt, synthetic construct
  source 1..20: mol_type = other RNA
gacaagaacattgtattact

SEQ ID NO: 14878 - RNA, 20 nt, synthetic construct
  source 1..20: mol_type = other RNA
gacaaggagcaaacacgaga

SEQ ID NO: 14879 - RNA, 20 nt, synthetic construct
  source 1..20: mol_type = other RNA
gacaatgactgttccattgt

SEQ ID NO: 14880 - RNA, 20 nt, synthetic construct
  source 1..20: mol_type = other RNA
gacaccaaccaaaagaacag

SEQ ID NO: 14881 - RNA, 20 nt, synthetic construct
  source 1..20: mol_type = other RNA
gacaccaagtggcactcttt

SEQ ID NO: 14882 - RNA, 20 nt, synthetic construct
  source 1..20: mol_type = other RNA
gacactcaaaagcatgctgc

SEQ ID NO: 14883 - RNA, 20 nt, synthetic construct
  source 1..20: mol_type = other RNA
gacagaacctctggctacaa

SEQ ID NO: 14884 - RNA, 20 nt, synthetic construct
  source 1..20: mol_type = other RNA
gacaggtgtatccaataaat

SEQ ID NO: 14885 - RNA, 20 nt, synthetic construct
  source 1..20: mol_type = other RNA
gacagtgttttttccaggag

SEQ ID NO: 14886 - RNA, 20 nt, synthetic construct
  source 1..20: mol_type = other RNA
gacataagtttttcagtttg

SEQ ID NO: 14887 - RNA, 20 nt, synthetic construct
  source 1..20: mol_type = other RNA
gacatacagactgcagggac

SEQ ID NO: 14888 - RNA, 20 nt, synthetic construct
  source 1..20: mol_type = other RNA
gacatatcttggtttctatt

SEQ ID NO: 14889 - RNA, 20 nt, synthetic construct
  source 1..20: mol_type = other RNA
gacattatgagtctcgaact

SEQ ID NO: 14890 - RNA, 20 nt, synthetic construct
  source 1..20: mol_type = other RNA
gacattggtcttgttttctc

SEQ ID NO: 14891 - RNA, 20 nt, synthetic construct
  source 1..20: mol_type = other RNA
gacatttcaacttttacttg

SEQ ID NO: 14892 - RNA, 20 nt, synthetic construct
  source 1..20: mol_type = other RNA
gacatttggttgactgcttt

SEQ ID NO: 14893 - RNA, 20 nt, synthetic construct
  source 1..20: mol_type = other RNA
gaccaaaaggctaatggaga

SEQ ID NO: 14894 - RNA, 20 nt, synthetic construct
  source 1..20: mol_type = other RNA
gaccaacatctccagttcca

SEQ ID NO: 14895 - RNA, 20 nt, synthetic construct
  source 1..20: mol_type = other RNA
gaccaatgtcagaacacctc

SEQ ID NO: 14896 - RNA, 20 nt, synthetic construct
  source 1..20: mol_type = other RNA
gaccagacatatcttggttt

SEQ ID NO: 14897 - RNA, 20 nt, synthetic construct
  source 1..20: mol_type = other RNA
gaccagggaggaagtcacac

SEQ ID NO: 14898 - RNA, 20 nt, synthetic construct
  source 1..20: mol_type = other RNA
gaccataaggctcttactct

SEQ ID NO: 14899 - RNA, 20 nt, synthetic construct
  source 1..20: mol_type = other RNA
gaccatgaaatcaagtgcat

SEQ ID NO: 14900 - RNA, 20 nt, synthetic construct
  source 1..20: mol_type = other RNA
gaccatggagcagcatctga

SEQ ID NO: 14901 - RNA, 20 nt, synthetic construct
  source 1..20: mol_type = other RNA
gaccatttaccaaaagctca

SEQ ID NO: 14902 - RNA, 20 nt, synthetic construct
  source 1..20: mol_type = other RNA
gacccaaaacttgcatcaca

SEQ ID NO: 14903 - RNA, 20 nt, synthetic construct
  source 1..20: mol_type = other RNA
gacccctccccagaaggaca

SEQ ID NO: 14904 - RNA, 20 nt, synthetic construct
  source 1..20: mol_type = other RNA
gacccttcagaatctcttgc

SEQ ID NO: 14905 - RNA, 20 nt, synthetic construct
  source 1..20: mol_type = other RNA
gacctccaaacaatacactg

SEQ ID NO: 14906 - RNA, 20 nt, synthetic construct
  source 1..20: mol_type = other RNA
gacctctaactctgagctgc

SEQ ID NO: 14907 - RNA, 20 nt, synthetic construct
  source 1..20: mol_type = other RNA
gacgctagctttgtggttcc

SEQ ID NO: 14908 - RNA, 20 nt, synthetic construct
  source 1..20: mol_type = other RNA
gacgtaacttcggggtaagc

SEQ ID NO: 14909 - RNA, 20 nt, synthetic construct
  source 1..20: mol_type = other RNA
gactaaagtggaagaatgtt

SEQ ID NO: 14910 - RNA, 20 nt, synthetic construct
  source 1..20: mol_type = other RNA
gactaagtccattcctgata

SEQ ID NO: 14911 - RNA, 20 nt, synthetic construct
  source 1..20: mol_type = other RNA
gactacacatcctgaacttt

SEQ ID NO: 14912 - RNA, 20 nt, synthetic construct
  source 1..20: mol_type = other RNA
gactagacaaaccactgctg

SEQ ID NO: 14913 - RNA, 20 nt, synthetic construct
  source 1..20: mol_type = other RNA
gactataaggggaatttcta

SEQ ID NO: 14914 - RNA, 20 nt, synthetic construct
  source 1..20: mol_type = other RNA
gactatggcaagactcagtt

SEQ ID NO: 14915 - RNA, 20 nt, synthetic construct
  source 1..20: mol_type = other RNA
gactattctggcttcccttc

SEQ ID NO: 14916 - RNA, 20 nt, synthetic construct
  source 1..20: mol_type = other RNA
gactcaatatgatttcccat

SEQ ID NO: 14917 - RNA, 20 nt, synthetic construct
  source 1..20: mol_type = other RNA
gactcacacgactattctgg

SEQ ID NO: 14918 - RNA, 20 nt, synthetic construct
  source 1..20: mol_type = other RNA
gactcagtttggggttgctg

SEQ ID NO: 14919 - RNA, 20 nt, synthetic construct
  source 1..20: mol_type = other RNA
gactcataatgtccaaatgg

SEQ ID NO: 14920 - RNA, 20 nt, synthetic construct
  source 1..20: mol_type = other RNA
gactctataaaattattgag

SEQ ID NO: 14921 - RNA, 20 nt, synthetic construct
  source 1..20: mol_type = other RNA
gactctgggaaggtggtgcc

SEQ ID NO: 14922 - RNA, 20 nt, synthetic construct
  source 1..20: mol_type = other RNA
gactgagccattttcaaact

SEQ ID NO: 14923 - RNA, 20 nt, synthetic construct
  source 1..20: mol_type = other RNA
gactgcacatgagcttttgg

SEQ ID NO: 14924 - RNA, 20 nt, synthetic construct
  source 1..20: mol_type = other RNA
gactgcagggacaatgactg

SEQ ID NO: 14925 - RNA, 20 nt, synthetic construct
  source 1..20: mol_type = other RNA
gactgcccttgattcatttc

SEQ ID NO: 14926 - RNA, 20 nt, synthetic construct
  source 1..20: mol_type = other RNA
gactgctttcacctggattt

SEQ ID NO: 14927 - RNA, 20 nt, synthetic construct
  source 1..20: mol_type = other RNA
gactggaggaagtacagaat

SEQ ID NO: 14928 - RNA, 20 nt, synthetic construct
  source 1..20: mol_type = other RNA
gactggccctgacatttcaa

SEQ ID NO: 14929 - RNA, 20 nt, synthetic construct
  source 1..20: mol_type = other RNA
gactgttaatggcatttatg

SEQ ID NO: 14930 - RNA, 20 nt, synthetic construct
  source 1..20: mol_type = other RNA
gactgttccattgtgttctg

SEQ ID NO: 14931 - RNA, 20 nt, synthetic construct
  source 1..20: mol_type = other RNA
gacttagtctgttgccctca

SEQ ID NO: 14932 - RNA, 20 nt, synthetic construct
  source 1..20: mol_type = other RNA
gacttcctccctggtcaggc

SEQ ID NO: 14933 - RNA, 20 nt, synthetic construct
  source 1..20: mol_type = other RNA
gacttctgctcctgttcttg

SEQ ID NO: 14934 - RNA, 20 nt, synthetic construct
  source 1..20: mol_type = other RNA
gacttggcgtgaaactgctt

SEQ ID NO: 14935 - RNA, 20 nt, synthetic construct
  source 1..20: mol_type = other RNA
gacttgtgctccagctgtgt

SEQ ID NO: 14936 - RNA, 20 nt, synthetic construct
  source 1..20: mol_type = other RNA
gactttacacaagaaagtag

SEQ ID NO: 14937 - RNA, 20 nt, synthetic construct
  source 1..20: mol_type = other RNA
gacttttcctcacccccaaa

SEQ ID NO: 14938 - RNA, 20 nt, synthetic construct
  source 1..20: mol_type = other RNA
gagaaaacaagaccaatgtc

SEQ ID NO: 14939 - RNA, 20 nt, synthetic construct
  source 1..20: mol_type = other RNA
gagaaacaaagagcaagaga

SEQ ID NO: 14940 - RNA, 20 nt, synthetic construct
  source 1..20: mol_type = other RNA
gagaaagaagcaattgtgat

SEQ ID NO: 14941 - RNA, 20 nt, synthetic construct
  source 1..20: mol_type = other RNA
gagaaagacgtaacttcggg

SEQ ID NO: 14942 - RNA, 20 nt, synthetic construct
  source 1..20: mol_type = other RNA
gagaacagaagcagctgttc

SEQ ID NO: 14943 - RNA, 20 nt, synthetic construct
  source 1..20: mol_type = other RNA
gagaaggatcattctttggc

SEQ ID NO: 14944 - RNA, 20 nt, synthetic construct
  source 1..20: mol_type = other RNA
gagaagggctgcatacatgt

SEQ ID NO: 14945 - RNA, 20 nt, synthetic construct
  source 1..20: mol_type = other RNA
gagaaggttcactaactgtg

SEQ ID NO: 14946 - RNA, 20 nt, synthetic construct
  source 1..20: mol_type = other RNA
gagaagtgcacctggtgtga

SEQ ID NO: 14947 - RNA, 20 nt, synthetic construct
  source 1..20: mol_type = other RNA
gagaataaagaacagactac

SEQ ID NO: 14948 - RNA, 20 nt, synthetic construct
  source 1..20: mol_type = other RNA
gagaatccacctgcaagctg

SEQ ID NO: 14949 - RNA, 20 nt, synthetic construct
  source 1..20: mol_type = other RNA
gagacaaggagcaaacacga

SEQ ID NO: 14950 - RNA, 20 nt, synthetic construct
  source 1..20: mol_type = other RNA
gagacaccaagtggcactct

SEQ ID NO: 14951 - RNA, 20 nt, synthetic construct
  source 1..20: mol_type = other RNA
gagacagtgttttttccagg

SEQ ID NO: 14952 - RNA, 20 nt, synthetic construct
  source 1..20: mol_type = other RNA
gagacatttggttgactgct

SEQ ID NO: 14953 - RNA, 20 nt, synthetic construct
  source 1..20: mol_type = other RNA
gagaccatggagcagcatct

SEQ ID NO: 14954 - RNA, 20 nt, synthetic construct
  source 1..20: mol_type = other RNA
gagactcataatgtccaaat

SEQ ID NO: 14955 - RNA, 20 nt, synthetic construct
  source 1..20: mol_type = other RNA
gagactgagccattttcaaa

SEQ ID NO: 14956 - RNA, 20 nt, synthetic construct
  source 1..20: mol_type = other RNA
gagagaaggttcactaactg

SEQ ID NO: 14957 - RNA, 20 nt, synthetic construct
  source 1..20: mol_type = other RNA
gagagagaaggttcactaac

SEQ ID NO: 14958 - RNA, 20 nt, synthetic construct
  source 1..20: mol_type = other RNA
gagagagctcatccagaagt

SEQ ID NO: 14959 - RNA, 20 nt, synthetic construct
  source 1..20: mol_type = other RNA
gagagattgggttgatactg

SEQ ID NO: 14960 - RNA, 20 nt, synthetic construct
  source 1..20: mol_type = other RNA
gagagctacaggacaactgc

SEQ ID NO: 14961 - RNA, 20 nt, synthetic construct
  source 1..20: mol_type = other RNA
gagagctcatccagaagtaa

SEQ ID NO: 14962 - RNA, 20 nt, synthetic construct
  source 1..20: mol_type = other RNA
gagagtaagagccttatggt

SEQ ID NO: 14963 - RNA, 20 nt, synthetic construct
  source 1..20: mol_type = other RNA
gagatatgcccatctcctgc

SEQ ID NO: 14964 - RNA, 20 nt, synthetic construct
  source 1..20: mol_type = other RNA
gagatcactcacccatcgca

SEQ ID NO: 14965 - RNA, 20 nt, synthetic construct
  source 1..20: mol_type = other RNA
gagatcttgtgcccccaaca

SEQ ID NO: 14966 - RNA, 20 nt, synthetic construct
  source 1..20: mol_type = other RNA
gagatgccaccttagagcag

SEQ ID NO: 14967 - RNA, 20 nt, synthetic construct
  source 1..20: mol_type = other RNA
gagatgggcatatctcaaaa

SEQ ID NO: 14968 - RNA, 20 nt, synthetic construct
  source 1..20: mol_type = other RNA
gagatgtgaactctgggatg

SEQ ID NO: 14969 - RNA, 20 nt, synthetic construct
  source 1..20: mol_type = other RNA
gagatgtggttttctgcacc

SEQ ID NO: 14970 - RNA, 20 nt, synthetic construct
  source 1..20: mol_type = other RNA
gagatgttggtccactgtac

SEQ ID NO: 14971 - RNA, 20 nt, synthetic construct
  source 1..20: mol_type = other RNA
gagattctgaagggtcgaga

SEQ ID NO: 14972 - RNA, 20 nt, synthetic construct
  source 1..20: mol_type = other RNA
gagattgggttgatactgaa

SEQ ID NO: 14973 - RNA, 20 nt, synthetic construct
  source 1..20: mol_type = other RNA
gagcaaacacgagatcttgt

SEQ ID NO: 14974 - RNA, 20 nt, synthetic construct
  source 1..20: mol_type = other RNA
gagcaagagattctgaaggg

SEQ ID NO: 14975 - RNA, 20 nt, synthetic construct
  source 1..20: mol_type = other RNA
gagcaagttgcgcagcttgt

SEQ ID NO: 14976 - RNA, 20 nt, synthetic construct
  source 1..20: mol_type = other RNA
gagcacaagtcacaaatgta

SEQ ID NO: 14977 - RNA, 20 nt, synthetic construct
  source 1..20: mol_type = other RNA
gagcagaagtcacaacaagc

SEQ ID NO: 14978 - RNA, 20 nt, synthetic construct
  source 1..20: mol_type = other RNA
gagcagattcccaaactgaa

SEQ ID NO: 14979 - RNA, 20 nt, synthetic construct
  source 1..20: mol_type = other RNA
gagcagcaaacaacttcttc

SEQ ID NO: 14980 - RNA, 20 nt, synthetic construct
  source 1..20: mol_type = other RNA
gagcagcatctgaagcagtt

SEQ ID NO: 14981 - RNA, 20 nt, synthetic construct
  source 1..20: mol_type = other RNA
gagcagcatgcttttgagtg

SEQ ID NO: 14982 - RNA, 20 nt, synthetic construct
  source 1..20: mol_type = other RNA
gagcaggaggggaaaagtgc

SEQ ID NO: 14983 - RNA, 20 nt, synthetic construct
  source 1..20: mol_type = other RNA
gagcatcattgagaccatgg

SEQ ID NO: 14984 - RNA, 20 nt, synthetic construct
  source 1..20: mol_type = other RNA
gagccattttcaaactcaca

SEQ ID NO: 14985 - RNA, 20 nt, synthetic construct
  source 1..20: mol_type = other RNA
gagcccagagagagaaggtt

SEQ ID NO: 14986 - RNA, 20 nt, synthetic construct
  source 1..20: mol_type = other RNA
gagccccccaggcatgttgg

SEQ ID NO: 14987 - RNA, 20 nt, synthetic construct
  source 1..20: mol_type = other RNA
gagccttatggtcaaataac

SEQ ID NO: 14988 - RNA, 20 nt, synthetic construct
  source 1..20: mol_type = other RNA
gagctacaggacaactgcca

SEQ ID NO: 14989 - RNA, 20 nt, synthetic construct
  source 1..20: mol_type = other RNA
gagctcatccagaagtaaat

SEQ ID NO: 14990 - RNA, 20 nt, synthetic construct
  source 1..20: mol_type = other RNA
gagctctctcaggcagtggg

SEQ ID NO: 14991 - RNA, 20 nt, synthetic construct
  source 1..20: mol_type = other RNA
gagctgccaccaggagcttg

SEQ ID NO: 14992 - RNA, 20 nt, synthetic construct
  source 1..20: mol_type = other RNA
gagctgcctccaaagccagc

SEQ ID NO: 14993 - RNA, 20 nt, synthetic construct
  source 1..20: mol_type = other RNA
gagcttcagattctgaatga

SEQ ID NO: 14994 - RNA, 20 nt, synthetic construct
  source 1..20: mol_type = other RNA
gagcttgcaaattgctgctg

SEQ ID NO: 14995 - RNA, 20 nt, synthetic construct
  source 1..20: mol_type = other RNA
gagctttgcttgaagtaagc

SEQ ID NO: 14996 - RNA, 20 nt, synthetic construct
  source 1..20: mol_type = other RNA
gagctttgtagccagaggtt

SEQ ID NO: 14997 - RNA, 20 nt, synthetic construct
  source 1..20: mol_type = other RNA
gagcttttggtaaatggtct

SEQ ID NO: 14998 - RNA, 20 nt, synthetic construct
  source 1..20: mol_type = other RNA
gaggaaaagtctggagtatt

SEQ ID NO: 14999 - RNA, 20 nt, synthetic construct
  source 1..20: mol_type = other RNA
gaggaaatactccagacttt

SEQ ID NO: 15000 - RNA, 20 nt, synthetic construct
  source 1..20: mol_type = other RNA
gaggaacctgtggaagagga

SEQ ID NO: 15001 - RNA, 20 nt, synthetic construct
  source 1..20: mol_type = other RNA
gaggaagtacagaatataaa

SEQ ID NO: 15002 - RNA, 20 nt, synthetic construct
  source 1..20: mol_type = other RNA
gaggaagtcacactcagacc

SEQ ID NO: 15003 - RNA, 20 nt, synthetic construct
  source 1..20: mol_type = other RNA
gaggaataaaacgcacagtt

SEQ ID NO: 15004 - RNA, 20 nt, synthetic construct
  source 1..20: mol_type = other RNA
gaggaggagggggagaaaga

SEQ ID NO: 15005 - RNA, 20 nt, synthetic construct
  source 1..20: mol_type = other RNA
gaggagggggagaaagaagc

SEQ ID NO: 15006 - RNA, 20 nt, synthetic construct
  source 1..20: mol_type = other RNA
gaggcaccaccttcccagag

SEQ ID NO: 15007 - RNA, 20 nt, synthetic construct
  source 1..20: mol_type = other RNA
gaggcagaaactgtagcacc

SEQ ID NO: 15008 - RNA, 20 nt, synthetic construct
  source 1..20: mol_type = other RNA
gaggcagctcagagttagag

SEQ ID NO: 15009 - RNA, 20 nt, synthetic construct
  source 1..20: mol_type = other RNA
gaggcatcactgccatcaat

SEQ ID NO: 15010 - RNA, 20 nt, synthetic construct
  source 1..20: mol_type = other RNA
gaggcctgtgatgctgatga

SEQ ID NO: 15011 - RNA, 20 nt, synthetic construct
  source 1..20: mol_type = other RNA
gaggcctttcagaaagcatc

SEQ ID NO: 15012 - RNA, 20 nt, synthetic construct
  source 1..20: mol_type = other RNA
gaggcttatgttgcaaaagg

SEQ ID NO: 15013 - RNA, 20 nt, synthetic construct
  source 1..20: mol_type = other RNA
gagggagatgtgaactctgg

SEQ ID NO: 15014 - RNA, 20 nt, synthetic construct
  source 1..20: mol_type = other RNA
gagggcaacagactaagtcc

SEQ ID NO: 15015 - RNA, 20 nt, synthetic construct
  source 1..20: mol_type = other RNA
gagggcagccttgtggatgg

SEQ ID NO: 15016 - RNA, 20 nt, synthetic construct
  source 1..20: mol_type = other RNA
gaggggaaaagtgctaatta

SEQ ID NO: 15017 - RNA, 20 nt, synthetic construct
  source 1..20: mol_type = other RNA
gaggggccttcaattcaatc

SEQ ID NO: 15018 - RNA, 20 nt, synthetic construct
  source 1..20: mol_type = other RNA
gagggggagaaagaagcaat

SEQ ID NO: 15019 - RNA, 20 nt, synthetic construct
  source 1..20: mol_type = other RNA
gaggggtctgagtgtgactt

SEQ ID NO: 15020 - RNA, 20 nt, synthetic construct
  source 1..20: mol_type = other RNA
gagggtaaacctgaggcacc

SEQ ID NO: 15021 - RNA, 20 nt, synthetic construct
  source 1..20: mol_type = other RNA
gagggtattccaagtgtttg

SEQ ID NO: 15022 - RNA, 20 nt, synthetic construct
  source 1..20: mol_type = other RNA
gagggtttttggaactggag

SEQ ID NO: 15023 - RNA, 20 nt, synthetic construct
  source 1..20: mol_type = other RNA
gaggtatgcgatgggtgagt

SEQ ID NO: 15024 - RNA, 20 nt, synthetic construct
  source 1..20: mol_type = other RNA
gaggtcatttgattggagag

SEQ ID NO: 15025 - RNA, 20 nt, synthetic construct
  source 1..20: mol_type = other RNA
gaggtctgtgcggaattgat

SEQ ID NO: 15026 - RNA, 20 nt, synthetic construct
  source 1..20: mol_type = other RNA
gaggtgatggtatcaggaat

SEQ ID NO: 15027 - RNA, 20 nt, synthetic construct
  source 1..20: mol_type = other RNA
gaggtgttctgacattggtc

SEQ ID NO: 15028 - RNA, 20 nt, synthetic construct
  source 1..20: mol_type = other RNA
gaggttctgtctggcaaatg

SEQ ID NO: 15029 - RNA, 20 nt, synthetic construct
  source 1..20: mol_type = other RNA
gagtaagagccttatggtca

SEQ ID NO: 15030 - RNA, 20 nt, synthetic construct
  source 1..20: mol_type = other RNA
gagtatctagtaatttggaa

SEQ ID NO: 15031 - RNA, 20 nt, synthetic construct
  source 1..20: mol_type = other RNA
gagtatttcctctttattct

SEQ ID NO: 15032 - RNA, 20 nt, synthetic construct
  source 1..20: mol_type = other RNA
gagtcaccttccaaattact

SEQ ID NO: 15033 - RNA, 20 nt, synthetic construct
  source 1..20: mol_type = other RNA
gagtcctaatccatctacac

SEQ ID NO: 15034 - RNA, 20 nt, synthetic construct
  source 1..20: mol_type = other RNA
gagtcctgactttacacaag

SEQ ID NO: 15035 - RNA, 20 nt, synthetic construct
  source 1..20: mol_type = other RNA
gagtctcgaactcgcttgat

SEQ ID NO: 15036 - RNA, 20 nt, synthetic construct
  source 1..20: mol_type = other RNA
gagtcttgacaggtgtatcc

SEQ ID NO: 15037 - RNA, 20 nt, synthetic construct
  source 1..20: mol_type = other RNA
gagtcttgccatagtcagat

SEQ ID NO: 15038 - RNA, 20 nt, synthetic construct
  source 1..20: mol_type = other RNA
gagtgaggcctgtgatgctg

SEQ ID NO: 15039 - RNA, 20 nt, synthetic construct
  source 1..20: mol_type = other RNA
gagtgataagaaagaatctg

SEQ ID NO: 15040 - RNA, 20 nt, synthetic construct
  source 1..20: mol_type = other RNA
gagtgatctcacaggacaac

SEQ ID NO: 15041 - RNA, 20 nt, synthetic construct
  source 1..20: mol_type = other RNA
gagtgccacttggtgtctcc

SEQ ID NO: 15042 - RNA, 20 nt, synthetic construct
  source 1..20: mol_type = other RNA
gagtgctttttccttctgaa

SEQ ID NO: 15043 - RNA, 20 nt, synthetic construct
  source 1..20: mol_type = other RNA
gagtgtccttctggggaggg

SEQ ID NO: 15044 - RNA, 20 nt, synthetic construct
  source 1..20: mol_type = other RNA
gagtgtgacttcctccctgg

SEQ ID NO: 15045 - RNA, 20 nt, synthetic construct
  source 1..20: mol_type = other RNA
gagttagaggtctgtgcgga

SEQ ID NO: 15046 - RNA, 20 nt, synthetic construct
  source 1..20: mol_type = other RNA
gagttcacatctccctcaaa

SEQ ID NO: 15047 - RNA, 20 nt, synthetic construct
  source 1..20: mol_type = other RNA
gagttcaccatgtgtgtgtt

SEQ ID NO: 15048 - RNA, 20 nt, synthetic construct
  source 1..20: mol_type = other RNA
gagttcgagactcataatgt

SEQ ID NO: 15049 - RNA, 20 nt, synthetic construct
  source 1..20: mol_type = other RNA
gagttctgtagcccaagaaa

SEQ ID NO: 15050 - RNA, 20 nt, synthetic construct
  source 1..20: mol_type = other RNA
gagttgtcctgtgagatcac

SEQ ID NO: 15051 - RNA, 20 nt, synthetic construct
  source 1..20: mol_type = other RNA
gagtttgaaaatggctcagt

SEQ ID NO: 15052 - RNA, 20 nt, synthetic construct
  source 1..20: mol_type = other RNA
gagttttagaagaacaccac

SEQ ID NO: 15053 - RNA, 20 nt, synthetic construct
  source 1..20: mol_type = other RNA
gataagaaagaatctgtgag

SEQ ID NO: 15054 - RNA, 20 nt, synthetic construct
  source 1..20: mol_type = other RNA
gataatattgagacagtgtt

SEQ ID NO: 15055 - RNA, 20 nt, synthetic construct
  source 1..20: mol_type = other RNA
gataatgccagtaaactagc

SEQ ID NO: 15056 - RNA, 20 nt, synthetic construct
  source 1..20: mol_type = other RNA
gataatgtgcagcaaaagag

SEQ ID NO: 15057 - RNA, 20 nt, synthetic construct
  source 1..20: mol_type = other RNA
gatacacctgtcaagactca

SEQ ID NO: 15058 - RNA, 20 nt, synthetic construct
  source 1..20: mol_type = other RNA
gatacataaccatgcaaatg

SEQ ID NO: 15059 - RNA, 20 nt, synthetic construct
  source 1..20: mol_type = other RNA
gataccatcacctcccattt

SEQ ID NO: 15060 - RNA, 20 nt, synthetic construct
  source 1..20: mol_type = other RNA
gatactgaagaattgatggc

SEQ ID NO: 15061 - RNA, 20 nt, synthetic construct
  source 1..20: mol_type = other RNA
gatagaaccaaccatgttga

SEQ ID NO: 15062 - RNA, 20 nt, synthetic construct
  source 1..20: mol_type = other RNA
gatagccacaccccagcttt

SEQ ID NO: 15063 - RNA, 20 nt, synthetic construct
  source 1..20: mol_type = other RNA
gatagtgctgtgttgggggc

SEQ ID NO: 15064 - RNA, 20 nt, synthetic construct
  source 1..20: mol_type = other RNA
gatatgcccatctcctgcag

SEQ ID NO: 15065 - RNA, 20 nt, synthetic construct
  source 1..20: mol_type = other RNA
gatatgtctggtcaacaagc

SEQ ID NO: 15066 - RNA, 20 nt, synthetic construct
  source 1..20: mol_type = other RNA
gatcaagaaattgaaacaag

SEQ ID NO: 15067 - RNA, 20 nt, synthetic construct
  source 1..20: mol_type = other RNA
gatcaattccgcacagacct

SEQ ID NO: 15068 - RNA, 20 nt, synthetic construct
  source 1..20: mol_type = other RNA
gatcacattatttggaaaat

SEQ ID NO: 15069 - RNA, 20 nt, synthetic construct
  source 1..20: mol_type = other RNA
gatcactcacccatcgcata

SEQ ID NO: 15070 - RNA, 20 nt, synthetic construct
  source 1..20: mol_type = other RNA
gatcagcaaagagaaggatc

SEQ ID NO: 15071 - RNA, 20 nt, synthetic construct
  source 1..20: mol_type = other RNA
gatcattctttggccagact

SEQ ID NO: 15072 - RNA, 20 nt, synthetic construct
  source 1..20: mol_type = other RNA
gatcattgttgctttggggg

SEQ ID NO: 15073 - RNA, 20 nt, synthetic construct
  source 1..20: mol_type = other RNA
gatcccaaagcaagatcttc

SEQ ID NO: 15074 - RNA, 20 nt, synthetic construct
  source 1..20: mol_type = other RNA
gatccttctctttgctgatc

SEQ ID NO: 15075 - RNA, 20 nt, synthetic construct
  source 1..20: mol_type = other RNA
gatctcacaggacaactcat

SEQ ID NO: 15076 - RNA, 20 nt, synthetic construct
  source 1..20: mol_type = other RNA
gatctcgtgtttgctccttg

SEQ ID NO: 15077 - RNA, 20 nt, synthetic construct
  source 1..20: mol_type = other RNA
gatctgaaggagcccagaga

SEQ ID NO: 15078 - RNA, 20 nt, synthetic construct
  source 1..20: mol_type = other RNA
gatctgccctgaggtatgcg

SEQ ID NO: 15079 - RNA, 20 nt, synthetic construct
  source 1..20: mol_type = other RNA
gatcttcttcacaggtgctt

SEQ ID NO: 15080 - RNA, 20 nt, synthetic construct
  source 1..20: mol_type = other RNA
gatcttgctttgggatcaca

SEQ ID NO: 15081 - RNA, 20 nt, synthetic construct
  source 1..20: mol_type = other RNA
gatcttgtgcccccaacaca

SEQ ID NO: 15082 - RNA, 20 nt, synthetic construct
  source 1..20: mol_type = other RNA
gatgagaaacaaagagcaag

SEQ ID NO: 15083 - RNA, 20 nt, synthetic construct
  source 1..20: mol_type = other RNA
gatgagctctctcaggcagt

SEQ ID NO: 15084 - RNA, 20 nt, synthetic construct
  source 1..20: mol_type = other RNA
gatgatgctgataatgccag

SEQ ID NO: 15085 - RNA, 20 nt, synthetic construct
  source 1..20: mol_type = other RNA
gatgcaagccacatgcctgt

SEQ ID NO: 15086 - RNA, 20 nt, synthetic construct
  source 1..20: mol_type = other RNA
gatgcaagttttgggtcttg

SEQ ID NO: 15087 - RNA, 20 nt, synthetic construct
  source 1..20: mol_type = other RNA
gatgcacaggccaattaagg

SEQ ID NO: 15088 - RNA, 20 nt, synthetic construct
  source 1..20: mol_type = other RNA
gatgccaccttagagcagca

SEQ ID NO: 15089 - RNA, 20 nt, synthetic construct
  source 1..20: mol_type = other RNA
gatgcctcattacgttttag

SEQ ID NO: 15090 - RNA, 20 nt, synthetic construct
  source 1..20: mol_type = other RNA
gatgctcttttgctgcacat

SEQ ID NO: 15091 - RNA, 20 nt, synthetic construct
  source 1..20: mol_type = other RNA
gatgctgataatgccagtaa

SEQ ID NO: 15092 - RNA, 20 nt, synthetic construct
  source 1..20: mol_type = other RNA
gatgctgatgatgctgataa

SEQ ID NO: 15093 - RNA, 20 nt, synthetic construct
  source 1..20: mol_type = other RNA
gatgctgctccatggtctca

SEQ ID NO: 15094 - RNA, 20 nt, synthetic construct
  source 1..20: mol_type = other RNA
gatgctttctgaaaggcctc

SEQ ID NO: 15095 - RNA, 20 nt, synthetic construct
  source 1..20: mol_type = other RNA
gatggaacaggatagaacca

SEQ ID NO: 15096 - RNA, 20 nt, synthetic construct
  source 1..20: mol_type = other RNA
gatggattaggactctggga

SEQ ID NO: 15097 - RNA, 20 nt, synthetic construct
  source 1..20: mol_type = other RNA
gatggattgaattgaaggcc

SEQ ID NO: 15098 - RNA, 20 nt, synthetic construct
  source 1..20: mol_type = other RNA
gatggcagtgatgcctcatt

SEQ ID NO: 15099 - RNA, 20 nt, synthetic construct
  source 1..20: mol_type = other RNA
gatggccccgaagcaagcct

SEQ ID NO: 15100 - RNA, 20 nt, synthetic construct
  source 1..20: mol_type = other RNA
gatgggaaatcatattgagt

SEQ ID NO: 15101 - RNA, 20 nt, synthetic construct
  source 1..20: mol_type = other RNA
gatgggattccgcttggtga

SEQ ID NO: 15102 - RNA, 20 nt, synthetic construct
  source 1..20: mol_type = other RNA
gatgggcatatctcaaaaac

SEQ ID NO: 15103 - RNA, 20 nt, synthetic construct
  source 1..20: mol_type = other RNA
gatgggtgagtgatctcaca

SEQ ID NO: 15104 - RNA, 20 nt, synthetic construct
  source 1..20: mol_type = other RNA
gatggtatcaggaatggact

SEQ ID NO: 15105 - RNA, 20 nt, synthetic construct
  source 1..20: mol_type = other RNA
gatggtggtggtggtgtggt

SEQ ID NO: 15106 - RNA, 20 nt, synthetic construct
  source 1..20: mol_type = other RNA
gatggttgtgtttgtgctgc

SEQ ID NO: 15107 - RNA, 20 nt, synthetic construct
  source 1..20: mol_type = other RNA
gatgtgaactctgggatggt

SEQ ID NO: 15108 - RNA, 20 nt, synthetic construct
  source 1..20: mol_type = other RNA
gatgtggttttctgcaccgc

SEQ ID NO: 15109 - RNA, 20 nt, synthetic construct
  source 1..20: mol_type = other RNA
gatgtgtaggtaagtgccag

SEQ ID NO: 15110 - RNA, 20 nt, synthetic construct
  source 1..20: mol_type = other RNA
gatgtgtagtctgttcttta

SEQ ID NO: 15111 - RNA, 20 nt, synthetic construct
  source 1..20: mol_type = other RNA
gatgttattttctgcaggag

SEQ ID NO: 15112 - RNA, 20 nt, synthetic construct
  source 1..20: mol_type = other RNA
gatgttggtccactgtacct

SEQ ID NO: 15113 - RNA, 20 nt, synthetic construct
  source 1..20: mol_type = other RNA
gattaggactctgggaaggt

SEQ ID NO: 15114 - RNA, 20 nt, synthetic construct
  source 1..20: mol_type = other RNA
gattcaagtgctgtttcaac

SEQ ID NO: 15115 - RNA, 20 nt, synthetic construct
  source 1..20: mol_type = other RNA
gattcatttcaacttggtac

SEQ ID NO: 15116 - RNA, 20 nt, synthetic construct
  source 1..20: mol_type = other RNA
gattcccaaactgaaaaact

SEQ ID NO: 15117 - RNA, 20 nt, synthetic construct
  source 1..20: mol_type = other RNA
gattccgcttggtgaaaacg

SEQ ID NO: 15118 - RNA, 20 nt, synthetic construct
  source 1..20: mol_type = other RNA
gattccttttctgccactac

SEQ ID NO: 15119 - RNA, 20 nt, synthetic construct
  source 1..20: mol_type = other RNA
gattctcttgcttagttacc

SEQ ID NO: 15120 - RNA, 20 nt, synthetic construct
  source 1..20: mol_type = other RNA
gattctgaagggtcgagaca

SEQ ID NO: 15121 - RNA, 20 nt, synthetic construct
  source 1..20: mol_type = other RNA
gattctgaatgagcaggagg

SEQ ID NO: 15122 - RNA, 20 nt, synthetic construct
  source 1..20: mol_type = other RNA
gattctttcttatcactcaa

SEQ ID NO: 15123 - RNA, 20 nt, synthetic construct
  source 1..20: mol_type = other RNA
gattgaattgaaggcccctc

SEQ ID NO: 15124 - RNA, 20 nt, synthetic construct
  source 1..20: mol_type = other RNA
gattggagagattgggttga

SEQ ID NO: 15125 - RNA, 20 nt, synthetic construct
  source 1..20: mol_type = other RNA
gattgggttgatactgaaga

SEQ ID NO: 15126 - RNA, 20 nt, synthetic construct
  source 1..20: mol_type = other RNA
gattgtgtttccattgcggt

SEQ ID NO: 15127 - RNA, 20 nt, synthetic construct
  source 1..20: mol_type = other RNA
gatttatattctgtacttcc

SEQ ID NO: 15128 - RNA, 20 nt, synthetic construct
  source 1..20: mol_type = other RNA
gatttcaccagtttttcaac

SEQ ID NO: 15129 - RNA, 20 nt, synthetic construct
  source 1..20: mol_type = other RNA
gatttcatggtctgactata

SEQ ID NO: 15130 - RNA, 20 nt, synthetic construct
  source 1..20: mol_type = other RNA
gatttcattttcaacaaaga

SEQ ID NO: 15131 - RNA, 20 nt, synthetic construct
  source 1..20: mol_type = other RNA
gatttcccatcttgcagatg

SEQ ID NO: 15132 - RNA, 20 nt, synthetic construct
  source 1..20: mol_type = other RNA
gatttctttcttggcttacc

SEQ ID NO: 15133 - RNA, 20 nt, synthetic construct
  source 1..20: mol_type = other RNA
gatttgagagtaagagcctt

SEQ ID NO: 15134 - RNA, 20 nt, synthetic construct
  source 1..20: mol_type = other RNA
gatttgagtgataagaaaga

SEQ ID NO: 15135 - RNA, 20 nt, synthetic construct
  source 1..20: mol_type = other RNA
gattttcaccatgaaaacat

SEQ ID NO: 15136 - RNA, 20 nt, synthetic construct
  source 1..20: mol_type = other RNA
gattttcaggcccactgcag

SEQ ID NO: 15137 - RNA, 20 nt, synthetic construct
  source 1..20: mol_type = other RNA
gattttgaatactgattttc

SEQ ID NO: 15138 - RNA, 20 nt, synthetic construct
  source 1..20: mol_type = other RNA
gatttttgttgttgtagttg

SEQ ID NO: 15139 - RNA, 20 nt, synthetic construct
  source 1..20: mol_type = other RNA
gcaaaaagttcaggatgtgt

SEQ ID NO: 15140 - RNA, 20 nt, synthetic construct
  source 1..20: mol_type = other RNA
gcaaaagagcatcattgaga

SEQ ID NO: 15141 - RNA, 20 nt, synthetic construct
  source 1..20: mol_type = other RNA
gcaaaaggtgtgagtttgaa

SEQ ID NO: 15142 - RNA, 20 nt, synthetic construct
  source 1..20: mol_type = other RNA
gcaaaatacaggtttcttgt

SEQ ID NO: 15143 - RNA, 20 nt, synthetic construct
  source 1..20: mol_type = other RNA
gcaaaatggaggaataaaac

SEQ ID NO: 15144 - RNA, 20 nt, synthetic construct
  source 1..20: mol_type = other RNA
gcaaacaacttcttcagaaa

SEQ ID NO: 15145 - RNA, 20 nt, synthetic construct
  source 1..20: mol_type = other RNA
gcaaacacagcaaccccaaa

SEQ ID NO: 15146 - RNA, 20 nt, synthetic construct
  source 1..20: mol_type = other RNA
gcaaacacgagatcttgtgc

SEQ ID NO: 15147 - RNA, 20 nt, synthetic construct
  source 1..20: mol_type = other RNA
gcaaacacttggaataccct

SEQ ID NO: 15148 - RNA, 20 nt, synthetic construct
  source 1..20: mol_type = other RNA
gcaaagagaaggatcattct

SEQ ID NO: 15149 - RNA, 20 nt, synthetic construct
  source 1..20: mol_type = other RNA
gcaaagctcagtgttcacta

SEQ ID NO: 15150 - RNA, 20 nt, synthetic construct
  source 1..20: mol_type = other RNA
gcaaaggtacttgatacata

SEQ ID NO: 15151 - RNA, 20 nt, synthetic construct
  source 1..20: mol_type = other RNA
gcaaatgggaggtgatggta

SEQ ID NO: 15152 - RNA, 20 nt, synthetic construct
  source 1..20: mol_type = other RNA
gcaaatgtttttcctgtgcc

SEQ ID NO: 15153 - RNA, 20 nt, synthetic construct
  source 1..20: mol_type = other RNA
gcaaattgctgctggaacct

SEQ ID NO: 15154 - RNA, 20 nt, synthetic construct
  source 1..20: mol_type = other RNA
gcaacaatgatcagcaaaga

SEQ ID NO: 15155 - RNA, 20 nt, synthetic construct
  source 1..20: mol_type = other RNA
gcaacagactaagtccattc

SEQ ID NO: 15156 - RNA, 20 nt, synthetic construct
  source 1..20: mol_type = other RNA
gcaacagcagcaaaaattac

SEQ ID NO: 15157 - RNA, 20 nt, synthetic construct
  source 1..20: mol_type = other RNA
gcaacataagcctcataaac

SEQ ID NO: 15158 - RNA, 20 nt, synthetic construct
  source 1..20: mol_type = other RNA
gcaaccccaaactgagtctt

SEQ ID NO: 15159 - RNA, 20 nt, synthetic construct
  source 1..20: mol_type = other RNA
gcaacttgctcagcaaaggt

SEQ ID NO: 15160 - RNA, 20 nt, synthetic construct
  source 1..20: mol_type = other RNA
gcaagaacagcagcaaacac

SEQ ID NO: 15161 - RNA, 20 nt, synthetic construct
  source 1..20: mol_type = other RNA
gcaagactcagtttggggtt

SEQ ID NO: 15162 - RNA, 20 nt, synthetic construct
  source 1..20: mol_type = other RNA
gcaagagaatccacctgcaa

SEQ ID NO: 15163 - RNA, 20 nt, synthetic construct
  source 1..20: mol_type = other RNA
gcaagagattctgaagggtc

SEQ ID NO: 15164 - RNA, 20 nt, synthetic construct
  source 1..20: mol_type = other RNA
gcaagatcttcttcacaggt

SEQ ID NO: 15165 - RNA, 20 nt, synthetic construct
  source 1..20: mol_type = other RNA
gcaagatgggaaatcatatt

SEQ ID NO: 15166 - RNA, 20 nt, synthetic construct
  source 1..20: mol_type = other RNA
gcaagccacatgcctgtatg

SEQ ID NO: 15167 - RNA, 20 nt, synthetic construct
  source 1..20: mol_type = other RNA
gcaagcctgatggaacagga

SEQ ID NO: 15168 - RNA, 20 nt, synthetic construct
  source 1..20: mol_type = other RNA
gcaagctcctggtggcagct

SEQ ID NO: 15169 - RNA, 20 nt, synthetic construct
  source 1..20: mol_type = other RNA
gcaagctgtgataatgtgca

SEQ ID NO: 15170 - RNA, 20 nt, synthetic construct
  source 1..20: mol_type = other RNA
gcaagcttacacccagaaaa

SEQ ID NO: 15171 - RNA, 20 nt, synthetic construct
  source 1..20: mol_type = other RNA
gcaagtaaaagttgaaatgt

SEQ ID NO: 15172 - RNA, 20 nt, synthetic construct
  source 1..20: mol_type = other RNA
gcaagttgcgcagcttgttg

SEQ ID NO: 15173 - RNA, 20 nt, synthetic construct
  source 1..20: mol_type = other RNA
gcaagttttgggtcttgttt

SEQ ID NO: 15174 - RNA, 20 nt, synthetic construct
  source 1..20: mol_type = other RNA
gcaatattttccaaataatg

SEQ ID NO: 15175 - RNA, 20 nt, synthetic construct
  source 1..20: mol_type = other RNA
gcaatgctaaatacctgttc

SEQ ID NO: 15176 - RNA, 20 nt, synthetic construct
  source 1..20: mol_type = other RNA
gcaatggaaacacaatctgg

SEQ ID NO: 15177 - RNA, 20 nt, synthetic construct
  source 1..20: mol_type = other RNA
gcaattgtgatggtggtggt

SEQ ID NO: 15178 - RNA, 20 nt, synthetic construct
  source 1..20: mol_type = other RNA
gcaatttgcaagctcctggt

SEQ ID NO: 15179 - RNA, 20 nt, synthetic construct
  source 1..20: mol_type = other RNA
gcacaaacacaaccatccca

SEQ ID NO: 15180 - RNA, 20 nt, synthetic construct
  source 1..20: mol_type = other RNA
gcacaagatctcgtgtttgc

SEQ ID NO: 15181 - RNA, 20 nt, synthetic construct
  source 1..20: mol_type = other RNA
gcacaagtcacaaatgtacc

SEQ ID NO: 15182 - RNA, 20 nt, synthetic construct
  source 1..20: mol_type = other RNA
gcacacagcaccaccagaaa

SEQ ID NO: 15183 - RNA, 20 nt, synthetic construct
  source 1..20: mol_type = other RNA
gcacagacctctaactctga

SEQ ID NO: 15184 - RNA, 20 nt, synthetic construct
  source 1..20: mol_type = other RNA
gcacaggaaaaacatttgca

SEQ ID NO: 15185 - RNA, 20 nt, synthetic construct
  source 1..20: mol_type = other RNA
gcacaggccaattaaggtgg

SEQ ID NO: 15186 - RNA, 20 nt, synthetic construct
  source 1..20: mol_type = other RNA
gcacagttagtgaaccttct

SEQ ID NO: 15187 - RNA, 20 nt, synthetic construct
  source 1..20: mol_type = other RNA
gcacatgagcttttggtaaa

SEQ ID NO: 15188 - RNA, 20 nt, synthetic construct
  source 1..20: mol_type = other RNA
gcacattatcacagcttgca

SEQ ID NO: 15189 - RNA, 20 nt, synthetic construct
  source 1..20: mol_type = other RNA
gcaccaccagaaaacaaaac

SEQ ID NO: 15190 - RNA, 20 nt, synthetic construct
  source 1..20: mol_type = other RNA
gcaccaccttcccagagtcc

SEQ ID NO: 15191 - RNA, 20 nt, synthetic construct
  source 1..20: mol_type = other RNA
gcaccattaggcattagcac

SEQ ID NO: 15192 - RNA, 20 nt, synthetic construct
  source 1..20: mol_type = other RNA
gcaccattcatttcattttg

SEQ ID NO: 15193 - RNA, 20 nt, synthetic construct
  source 1..20: mol_type = other RNA
gcaccgcaatggaaacacaa

SEQ ID NO: 15194 - RNA, 20 nt, synthetic construct
  source 1..20: mol_type = other RNA
gcacctggtgtgagggtttt

SEQ ID NO: 15195 - RNA, 20 nt, synthetic construct
  source 1..20: mol_type = other RNA
gcacctgtgaagaagatctt

SEQ ID NO: 15196 - RNA, 20 nt, synthetic construct
  source 1..20: mol_type = other RNA
gcactagatttcattttcaa

SEQ ID NO: 15197 - RNA, 20 nt, synthetic construct
  source 1..20: mol_type = other RNA
gcactatctgaaaccaggat

SEQ ID NO: 15198 - RNA, 20 nt, synthetic construct
  source 1..20: mol_type = other RNA
gcactctgaatggtggagtt

SEQ ID NO: 15199 - RNA, 20 nt, synthetic construct
  source 1..20: mol_type = other RNA
gcactctttcaaaagttatt

SEQ ID NO: 15200 - RNA, 20 nt, synthetic construct
  source 1..20: mol_type = other RNA
gcactgccttgtttttaagt

SEQ ID NO: 15201 - RNA, 20 nt, synthetic construct
  source 1..20: mol_type = other RNA
gcacttacctacacatctgc

SEQ ID NO: 15202 - RNA, 20 nt, synthetic construct
  source 1..20: mol_type = other RNA
gcacttctccaaaacagacc

SEQ ID NO: 15203 - RNA, 20 nt, synthetic construct
  source 1..20: mol_type = other RNA
gcacttgaatcaacaggctt

SEQ ID NO: 15204 - RNA, 20 nt, synthetic construct
  source 1..20: mol_type = other RNA
gcacttgatttcatggtctg

SEQ ID NO: 15205 - RNA, 20 nt, synthetic construct
  source 1..20: mol_type = other RNA
gcacttttcccctcctgctc

SEQ ID NO: 15206 - RNA, 20 nt, synthetic construct
  source 1..20: mol_type = other RNA
gcagaaaaccacatctcaca

SEQ ID NO: 15207 - RNA, 20 nt, synthetic construct
  source 1..20: mol_type = other RNA
gcagaaaaggaatccttagt

SEQ ID NO: 15208 - RNA, 20 nt, synthetic construct
  source 1..20: mol_type = other RNA
gcagaaaataacatccaggg

SEQ ID NO: 15209 - RNA, 20 nt, synthetic construct
  source 1..20: mol_type = other RNA
gcagaaactgtagcaccatt

SEQ ID NO: 15210 - RNA, 20 nt, synthetic construct
  source 1..20: mol_type = other RNA
gcagaacttgatagccacac

SEQ ID NO: 15211 - RNA, 20 nt, synthetic construct
  source 1..20: mol_type = other RNA
gcagaagtcacaacaagctt

SEQ ID NO: 15212 - RNA, 20 nt, synthetic construct
  source 1..20: mol_type = other RNA
gcagatcaattccgcacaga

SEQ ID NO: 15213 - RNA, 20 nt, synthetic construct
  source 1..20: mol_type = other RNA
gcagatgtgtaggtaagtgc

SEQ ID NO: 15214 - RNA, 20 nt, synthetic construct
  source 1..20: mol_type = other RNA
gcagattcccaaactgaaaa

SEQ ID NO: 15215 - RNA, 20 nt, synthetic construct
  source 1..20: mol_type = other RNA
gcagcaaaaattacaaataa

SEQ ID NO: 15216 - RNA, 20 nt, synthetic construct
  source 1..20: mol_type = other RNA
gcagcaaaagagcatcattg

SEQ ID NO: 15217 - RNA, 20 nt, synthetic construct
  source 1..20: mol_type = other RNA
gcagcaaacaacttcttcag

SEQ ID NO: 15218 - RNA, 20 nt, synthetic construct
  source 1..20: mol_type = other RNA
gcagcaaacacagcaacccc

SEQ ID NO: 15219 - RNA, 20 nt, synthetic construct
  source 1..20: mol_type = other RNA
gcagcaatttgcaagctcct

SEQ ID NO: 15220 - RNA, 20 nt, synthetic construct
  source 1..20: mol_type = other RNA
gcagcacaaacacaaccatc

SEQ ID NO: 15221 - RNA, 20 nt, synthetic construct
  source 1..20: mol_type = other RNA
gcagcagtggtttgtctagt

SEQ ID NO: 15222 - RNA, 20 nt, synthetic construct
  source 1..20: mol_type = other RNA
gcagcatctgaagcagtttc

SEQ ID NO: 15223 - RNA, 20 nt, synthetic construct
  source 1..20: mol_type = other RNA
gcagcatgcttttgagtgtc

SEQ ID NO: 15224 - RNA, 20 nt, synthetic construct
  source 1..20: mol_type = other RNA
gcagcccttctccgatgctt

SEQ ID NO: 15225 - RNA, 20 nt, synthetic construct
  source 1..20: mol_type = other RNA
gcagccttgtggatggcccc

SEQ ID NO: 15226 - RNA, 20 nt, synthetic construct
  source 1..20: mol_type = other RNA
gcagctagtttactggcatt

SEQ ID NO: 15227 - RNA, 20 nt, synthetic construct
  source 1..20: mol_type = other RNA
gcagctcagagttagaggtc

SEQ ID NO: 15228 - RNA, 20 nt, synthetic construct
  source 1..20: mol_type = other RNA
gcagctctgaacggtattta

SEQ ID NO: 15229 - RNA, 20 nt, synthetic construct
  source 1..20: mol_type = other RNA
gcagctggctttggaggcag

SEQ ID NO: 15230 - RNA, 20 nt, synthetic construct
  source 1..20: mol_type = other RNA
gcagctgttcttttggttgg

SEQ ID NO: 15231 - RNA, 20 nt, synthetic construct
  source 1..20: mol_type = other RNA
gcagcttgttgaccagacat

SEQ ID NO: 15232 - RNA, 20 nt, synthetic construct
  source 1..20: mol_type = other RNA
gcaggaaacaagacccaaaa

SEQ ID NO: 15233 - RNA, 20 nt, synthetic construct
  source 1..20: mol_type = other RNA
gcaggagatgggcatatctc

SEQ ID NO: 15234 - RNA, 20 nt, synthetic construct
  source 1..20: mol_type = other RNA
gcaggaggggaaaagtgcta

SEQ ID NO: 15235 - RNA, 20 nt, synthetic construct
  source 1..20: mol_type = other RNA
gcagggacaatgactgttcc

SEQ ID NO: 15236 - RNA, 20 nt, synthetic construct
  source 1..20: mol_type = other RNA
gcaggtggattctcttgctt

SEQ ID NO: 15237 - RNA, 20 nt, synthetic construct
  source 1..20: mol_type = other RNA
gcagtcaaccaaatgtctcc

SEQ ID NO: 15238 - RNA, 20 nt, synthetic construct
  source 1..20: mol_type = other RNA
gcagtcactgtgtggcacta

SEQ ID NO: 15239 - RNA, 20 nt, synthetic construct
  source 1..20: mol_type = other RNA
gcagtcccaaggtacagtgg

SEQ ID NO: 15240 - RNA, 20 nt, synthetic construct
  source 1..20: mol_type = other RNA
gcagtctgtatgtcattcct

SEQ ID NO: 15241 - RNA, 20 nt, synthetic construct
  source 1..20: mol_type = other RNA
gcagtgatgcctcattacgt

SEQ ID NO: 15242 - RNA, 20 nt, synthetic construct
  source 1..20: mol_type = other RNA
gcagtgctaatgcctaatgg

SEQ ID NO: 15243 - RNA, 20 nt, synthetic construct
  source 1..20: mol_type = other RNA
gcagtggagagctacaggac

SEQ ID NO: 15244 - RNA, 20 nt, synthetic construct
  source 1..20: mol_type = other RNA
gcagtgggcctgaaaatcca

SEQ ID NO: 15245 - RNA, 20 nt, synthetic construct
  source 1..20: mol_type = other RNA
gcagtgggcttccattctgg

SEQ ID NO: 15246 - RNA, 20 nt, synthetic construct
  source 1..20: mol_type = other RNA
gcagtggtgagtgaggcctg

SEQ ID NO: 15247 - RNA, 20 nt, synthetic construct
  source 1..20: mol_type = other RNA
gcagtggtttgtctagtcaa

SEQ ID NO: 15248 - RNA, 20 nt, synthetic construct
  source 1..20: mol_type = other RNA
gcagttaaagatttcaccag

SEQ ID NO: 15249 - RNA, 20 nt, synthetic construct
  source 1..20: mol_type = other RNA
gcagttatgtgttgaaaaac

SEQ ID NO: 15250 - RNA, 20 nt, synthetic construct
  source 1..20: mol_type = other RNA
gcagttgatgagaaacaaag

SEQ ID NO: 15251 - RNA, 20 nt, synthetic construct
  source 1..20: mol_type = other RNA
gcagttgtcctgtagctctc

SEQ ID NO: 15252 - RNA, 20 nt, synthetic construct
  source 1..20: mol_type = other RNA
gcagtttcacgccaagtcgt

SEQ ID NO: 15253 - RNA, 20 nt, synthetic construct
  source 1..20: mol_type = other RNA
gcataacccaccaatttttg

SEQ ID NO: 15254 - RNA, 20 nt, synthetic construct
  source 1..20: mol_type = other RNA
gcatacaggcatgtggcttg

SEQ ID NO: 15255 - RNA, 20 nt, synthetic construct
  source 1..20: mol_type = other RNA
gcatacatgtgtagatggat

SEQ ID NO: 15256 - RNA, 20 nt, synthetic construct
  source 1..20: mol_type = other RNA
gcatacctcagggcagatca

SEQ ID NO: 15257 - RNA, 20 nt, synthetic construct
  source 1..20: mol_type = other RNA
gcatatctcaaaaactgatt

SEQ ID NO: 15258 - RNA, 20 nt, synthetic construct
  source 1..20: mol_type = other RNA
gcatcacaggcctcactcac

SEQ ID NO: 15259 - RNA, 20 nt, synthetic construct
  source 1..20: mol_type = other RNA
gcatcacatgcaatattttc

SEQ ID NO: 15260 - RNA, 20 nt, synthetic construct
  source 1..20: mol_type = other RNA
gcatcactgccatcaattct

SEQ ID NO: 15261 - RNA, 20 nt, synthetic construct
  source 1..20: mol_type = other RNA
gcatcatcagcatcacaggc

SEQ ID NO: 15262 - RNA, 20 nt, synthetic construct
  source 1..20: mol_type = other RNA
gcatcattgagaccatggag

SEQ ID NO: 15263 - RNA, 20 nt, synthetic construct
  source 1..20: mol_type = other RNA
gcatccaggttccaccttaa

SEQ ID NO: 15264 - RNA, 20 nt, synthetic construct
  source 1..20: mol_type = other RNA
gcatcggagaagggctgcat

SEQ ID NO: 15265 - RNA, 20 nt, synthetic construct
  source 1..20: mol_type = other RNA
gcatctcttacagaagcaag

SEQ ID NO: 15266 - RNA, 20 nt, synthetic construct
  source 1..20: mol_type = other RNA
gcatctgaagcagtttcacg

SEQ ID NO: 15267 - RNA, 20 nt, synthetic construct
  source 1..20: mol_type = other RNA
gcatctgactatggcaagac

SEQ ID NO: 15268 - RNA, 20 nt, synthetic construct
  source 1..20: mol_type = other RNA
gcatgcaaaatacaggtttc

SEQ ID NO: 15269 - RNA, 20 nt, synthetic construct
  source 1..20: mol_type = other RNA
gcatgcacttgatttcatgg

SEQ ID NO: 15270 - RNA, 20 nt, synthetic construct
  source 1..20: mol_type = other RNA
gcatgctgctctaaggtggc

SEQ ID NO: 15271 - RNA, 20 nt, synthetic construct
  source 1..20: mol_type = other RNA
gcatgcttttgagtgtcctt

SEQ ID NO: 15272 - RNA, 20 nt, synthetic construct
  source 1..20: mol_type = other RNA
gcatggttatgtatcaagta

SEQ ID NO: 15273 - RNA, 20 nt, synthetic construct
  source 1..20: mol_type = other RNA
gcatgtgatgcaagttttgg

SEQ ID NO: 15274 - RNA, 20 nt, synthetic construct
  source 1..20: mol_type = other RNA
gcatgtggcttgcatccagg

SEQ ID NO: 15275 - RNA, 20 nt, synthetic construct
  source 1..20: mol_type = other RNA
gcatgttggaatttccagtg

SEQ ID NO: 15276 - RNA, 20 nt, synthetic construct
  source 1..20: mol_type = other RNA
gcattagcactgccttgttt

SEQ ID NO: 15277 - RNA, 20 nt, synthetic construct
  source 1..20: mol_type = other RNA
gcattatcagcatcatcagc

SEQ ID NO: 15278 - RNA, 20 nt, synthetic construct
  source 1..20: mol_type = other RNA
gcattgcagctagtttactg

SEQ ID NO: 15279 - RNA, 20 nt, synthetic construct
  source 1..20: mol_type = other RNA
gcatttatgtgagatgtggt

SEQ ID NO: 15280 - RNA, 20 nt, synthetic construct
  source 1..20: mol_type = other RNA
gcattttcttgggctacaga

SEQ ID NO: 15281 - RNA, 20 nt, synthetic construct
  source 1..20: mol_type = other RNA
gccaaagaatgatccttctc

SEQ ID NO: 15282 - RNA, 20 nt, synthetic construct
  source 1..20: mol_type = other RNA
gccaagaaagaaatccaggt

SEQ ID NO: 15283 - RNA, 20 nt, synthetic construct
  source 1..20: mol_type = other RNA
gccaagtcgttatttgacca

SEQ ID NO: 15284 - RNA, 20 nt, synthetic construct
  source 1..20: mol_type = other RNA
gccaattaaggtggaacctg

SEQ ID NO: 15285 - RNA, 20 nt, synthetic construct
  source 1..20: mol_type = other RNA
gccacacagtgactgcacat

SEQ ID NO: 15286 - RNA, 20 nt, synthetic construct
  source 1..20: mol_type = other RNA
gccacaccccagctttagag

SEQ ID NO: 15287 - RNA, 20 nt, synthetic construct
  source 1..20: mol_type = other RNA
gccacatgcctgtatgcaca

SEQ ID NO: 15288 - RNA, 20 nt, synthetic construct
  source 1..20: mol_type = other RNA
gccaccaggagcttgcaaat

SEQ ID NO: 15289 - RNA, 20 nt, synthetic construct
  source 1..20: mol_type = other RNA
gccaccttagagcagcatgc

SEQ ID NO: 15290 - RNA, 20 nt, synthetic construct
  source 1..20: mol_type = other RNA
gccactaccacaccaccacc

SEQ ID NO: 15291 - RNA, 20 nt, synthetic construct
  source 1..20: mol_type = other RNA
gccacttggtgtctccattt

SEQ ID NO: 15292 - RNA, 20 nt, synthetic construct
  source 1..20: mol_type = other RNA
gccagaaatgtactgagaca

SEQ ID NO: 15293 - RNA, 20 nt, synthetic construct
  source 1..20: mol_type = other RNA
gccagaatagtcgtgtgagt

SEQ ID NO: 15294 - RNA, 20 nt, synthetic construct
  source 1..20: mol_type = other RNA
gccagacagaacctctggct

SEQ ID NO: 15295 - RNA, 20 nt, synthetic construct
  source 1..20: mol_type = other RNA
gccagactaaagtggaagaa

SEQ ID NO: 15296 - RNA, 20 nt, synthetic construct
  source 1..20: mol_type = other RNA
gccagaggttctgtctggca

SEQ ID NO: 15297 - RNA, 20 nt, synthetic construct
  source 1..20: mol_type = other RNA
gccagcagttgatgagaaac

SEQ ID NO: 15298 - RNA, 20 nt, synthetic construct
  source 1..20: mol_type = other RNA
gccagctgcagtggtgagtg

SEQ ID NO: 15299 - RNA, 20 nt, synthetic construct
  source 1..20: mol_type = other RNA
gccagtaaactagctgcaat

SEQ ID NO: 15300 - RNA, 20 nt, synthetic construct
  source 1..20: mol_type = other RNA
gccagtcacagttttgacta

SEQ ID NO: 15301 - RNA, 20 nt, synthetic construct
  source 1..20: mol_type = other RNA
gccatagtcagatgcacagg

SEQ ID NO: 15302 - RNA, 20 nt, synthetic construct
  source 1..20: mol_type = other RNA
gccatcaattcttcagtatc

SEQ ID NO: 15303 - RNA, 20 nt, synthetic construct
  source 1..20: mol_type = other RNA
gccatgtgtctcagtacatt

SEQ ID NO: 15304 - RNA, 20 nt, synthetic construct
  source 1..20: mol_type = other RNA
gccattaacagtcaggctac

SEQ ID NO: 15305 - RNA, 20 nt, synthetic construct
  source 1..20: mol_type = other RNA
gccattttcaaactcacacc

SEQ ID NO: 15306 - RNA, 20 nt, synthetic construct
  source 1..20: mol_type = other RNA
gcccaagaaaatgcagttaa

SEQ ID NO: 15307 - RNA, 20 nt, synthetic construct
  source 1..20: mol_type = other RNA
gcccactgcagttatgtgtt

SEQ ID NO: 15308 - RNA, 20 nt, synthetic construct
  source 1..20: mol_type = other RNA
gcccactgcctgagagagct

SEQ ID NO: 15309 - RNA, 20 nt, synthetic construct
  source 1..20: mol_type = other RNA
gcccagagagagaaggttca

SEQ ID NO: 15310 - RNA, 20 nt, synthetic construct
  source 1..20: mol_type = other RNA
gcccatctcctgcagaaaat

SEQ ID NO: 15311 - RNA, 20 nt, synthetic construct
  source 1..20: mol_type = other RNA
gcccccaacacagcactatc

SEQ ID NO: 15312 - RNA, 20 nt, synthetic construct
  source 1..20: mol_type = other RNA
gccccccaggcatgttggaa

SEQ ID NO: 15313 - RNA, 20 nt, synthetic construct
  source 1..20: mol_type = other RNA
gccccgaagcaagcctgatg

SEQ ID NO: 15314 - RNA, 20 nt, synthetic construct
  source 1..20: mol_type = other RNA
gcccctcgttttcaccaagc

SEQ ID NO: 15315 - RNA, 20 nt, synthetic construct
  source 1..20: mol_type = other RNA
gccctcaacatggttggttc

SEQ ID NO: 15316 - RNA, 20 nt, synthetic construct
  source 1..20: mol_type = other RNA
gccctgacatttcaactttt

SEQ ID NO: 15317 - RNA, 20 nt, synthetic construct
  source 1..20: mol_type = other RNA
gccctgaggtatgcgatggg

SEQ ID NO: 15318 - RNA, 20 nt, synthetic construct
  source 1..20: mol_type = other RNA
gcccttctccgatgctttct

SEQ ID NO: 15319 - RNA, 20 nt, synthetic construct
  source 1..20: mol_type = other RNA
gcccttgattcatttcaact

SEQ ID NO: 15320 - RNA, 20 nt, synthetic construct
  source 1..20: mol_type = other RNA
gcctaatggtgctacagttt

SEQ ID NO: 15321 - RNA, 20 nt, synthetic construct
  source 1..20: mol_type = other RNA
gcctcactcaccactgcagc

SEQ ID NO: 15322 - RNA, 20 nt, synthetic construct
  source 1..20: mol_type = other RNA
gcctcagaataattgtgtga

SEQ ID NO: 15323 - RNA, 20 nt, synthetic construct
  source 1..20: mol_type = other RNA
gcctcaggtttaccctctat

SEQ ID NO: 15324 - RNA, 20 nt, synthetic construct
  source 1..20: mol_type = other RNA
gcctcataaacaggcagcac

SEQ ID NO: 15325 - RNA, 20 nt, synthetic construct
  source 1..20: mol_type = other RNA
gcctcattacgttttagatg

SEQ ID NO: 15326 - RNA, 20 nt, synthetic construct
  source 1..20: mol_type = other RNA
gcctccaaagccagctgcag

SEQ ID NO: 15327 - RNA, 20 nt, synthetic construct
  source 1..20: mol_type = other RNA
gcctcttccgtggaacacac

SEQ ID NO: 15328 - RNA, 20 nt, synthetic construct
  source 1..20: mol_type = other RNA
gcctgaaaatccagagcttc

SEQ ID NO: 15329 - RNA, 20 nt, synthetic construct
  source 1..20: mol_type = other RNA
gcctgaccagggaggaagtc

SEQ ID NO: 15330 - RNA, 20 nt, synthetic construct
  source 1..20: mol_type = other RNA
gcctgactgttaatggcatt

SEQ ID NO: 15331 - RNA, 20 nt, synthetic construct
  source 1..20: mol_type = other RNA
gcctgagagagctcatccag

SEQ ID NO: 15332 - RNA, 20 nt, synthetic construct
  source 1..20: mol_type = other RNA
gcctgatggaacaggataga

SEQ ID NO: 15333 - RNA, 20 nt, synthetic construct
  source 1..20: mol_type = other RNA
gcctggggggctcccaaggc

SEQ ID NO: 15334 - RNA, 20 nt, synthetic construct
  source 1..20: mol_type = other RNA
gcctgtatgcacacagcacc

SEQ ID NO: 15335 - RNA, 20 nt, synthetic construct
  source 1..20: mol_type = other RNA
gcctgtgatgctgatgatgc

SEQ ID NO: 15336 - RNA, 20 nt, synthetic construct
  source 1..20: mol_type = other RNA
gcctgtgcatctgactatgg

SEQ ID NO: 15337 - RNA, 20 nt, synthetic construct
  source 1..20: mol_type = other RNA
gcctgttgattcaagtgctg

SEQ ID NO: 15338 - RNA, 20 nt, synthetic construct
  source 1..20: mol_type = other RNA
gcctgtttatgaggcttatg

SEQ ID NO: 15339 - RNA, 20 nt, synthetic construct
  source 1..20: mol_type = other RNA
gccttatggtcaaataacga

SEQ ID NO: 15340 - RNA, 20 nt, synthetic construct
  source 1..20: mol_type = other RNA
gccttcaattcaatccatcc

SEQ ID NO: 15341 - RNA, 20 nt, synthetic construct
  source 1..20: mol_type = other RNA
gccttgggagccccccaggc

SEQ ID NO: 15342 - RNA, 20 nt, synthetic construct
  source 1..20: mol_type = other RNA
gccttgtggatggccccgaa

SEQ ID NO: 15343 - RNA, 20 nt, synthetic construct
  source 1..20: mol_type = other RNA
gccttgtttttaagtaatac

SEQ ID NO: 15344 - RNA, 20 nt, synthetic construct
  source 1..20: mol_type = other RNA
gcctttcagaaagcatcgga

SEQ ID NO: 15345 - RNA, 20 nt, synthetic construct
  source 1..20: mol_type = other RNA
gccttttggtcttgtttcaa

SEQ ID NO: 15346 - RNA, 20 nt, synthetic construct
  source 1..20: mol_type = other RNA
gcgagttcgagactcataat

SEQ ID NO: 15347 - RNA, 20 nt, synthetic construct
  source 1..20: mol_type = other RNA
gcgatgggtgagtgatctca

SEQ ID NO: 15348 - RNA, 20 nt, synthetic construct
  source 1..20: mol_type = other RNA
gcgcaacttgctcagcaaag

SEQ ID NO: 15349 - RNA, 20 nt, synthetic construct
  source 1..20: mol_type = other RNA
gcgcagcttgttgaccagac

SEQ ID NO: 15350 - RNA, 20 nt, synthetic construct
  source 1..20: mol_type = other RNA
gcggaatcccatctaaaacg

SEQ ID NO: 15351 - RNA, 20 nt, synthetic construct
  source 1..20: mol_type = other RNA
gcggaattgatctgccctga

SEQ ID NO: 15352 - RNA, 20 nt, synthetic construct
  source 1..20: mol_type = other RNA
gcggtgcagaaaaccacatc

SEQ ID NO: 15353 - RNA, 20 nt, synthetic construct
  source 1..20: mol_type = other RNA
gcgtctggtgaagaattctg

SEQ ID NO: 15354 - RNA, 20 nt, synthetic construct
  source 1..20: mol_type = other RNA
gcgtgaaactgcttcagatg

SEQ ID NO: 15355 - RNA, 20 nt, synthetic construct
  source 1..20: mol_type = other RNA
gcgttttattcctccatttt

SEQ ID NO: 15356 - RNA, 20 nt, synthetic construct
  source 1..20: mol_type = other RNA
gctaaatacctgttcctttc

SEQ ID NO: 15357 - RNA, 20 nt, synthetic construct
  source 1..20: mol_type = other RNA
gctaatgcctaatggtgcta

SEQ ID NO: 15358 - RNA, 20 nt, synthetic construct
  source 1..20: mol_type = other RNA
gctaatggagaaagacgtaa

SEQ ID NO: 15359 - RNA, 20 nt, synthetic construct
  source 1..20: mol_type = other RNA
gctaattaccatgacaagaa

SEQ ID NO: 15360 - RNA, 20 nt, synthetic construct
  source 1..20: mol_type = other RNA
gctacaaagctccagaatgg

SEQ ID NO: 15361 - RNA, 20 nt, synthetic construct
  source 1..20: mol_type = other RNA
gctacagaactcacagattc

SEQ ID NO: 15362 - RNA, 20 nt, synthetic construct
  source 1..20: mol_type = other RNA
gctacaggacaactgccagc

SEQ ID NO: 15363 - RNA, 20 nt, synthetic construct
  source 1..20: mol_type = other RNA
gctacagtttctgcctcttc

SEQ ID NO: 15364 - RNA, 20 nt, synthetic construct
  source 1..20: mol_type = other RNA
gctaccaaaaattggtgggt

SEQ ID NO: 15365 - RNA, 20 nt, synthetic construct
  source 1..20: mol_type = other RNA
gctactaatgagttgtcctg

SEQ ID NO: 15366 - RNA, 20 nt, synthetic construct
  source 1..20: mol_type = other RNA
gctagcgtctggtgaagaat

SEQ ID NO: 15367 - RNA, 20 nt, synthetic construct
  source 1..20: mol_type = other RNA
gctagctttgtggttccctg

SEQ ID NO: 15368 - RNA, 20 nt, synthetic construct
  source 1..20: mol_type = other RNA
gctagtttactggcattatc

SEQ ID NO: 15369 - RNA, 20 nt, synthetic construct
  source 1..20: mol_type = other RNA
gctatcaagttctgcagcag

SEQ ID NO: 15370 - RNA, 20 nt, synthetic construct
  source 1..20: mol_type = other RNA
gctcagagttagaggtctgt

SEQ ID NO: 15371 - RNA, 20 nt, synthetic construct
  source 1..20: mol_type = other RNA
gctcagcaaaggtacttgat

SEQ ID NO: 15372 - RNA, 20 nt, synthetic construct
  source 1..20: mol_type = other RNA
gctcagtctctgaagcctgt

SEQ ID NO: 15373 - RNA, 20 nt, synthetic construct
  source 1..20: mol_type = other RNA
gctcagtgttcactaaggat

SEQ ID NO: 15374 - RNA, 20 nt, synthetic construct
  source 1..20: mol_type = other RNA
gctcatccagaagtaaatgg

SEQ ID NO: 15375 - RNA, 20 nt, synthetic construct
  source 1..20: mol_type = other RNA
gctcatgtgcagtcactgtg

SEQ ID NO: 15376 - RNA, 20 nt, synthetic construct
  source 1..20: mol_type = other RNA
gctcattcagaatctgaagc

SEQ ID NO: 15377 - RNA, 20 nt, synthetic construct
  source 1..20: mol_type = other RNA
gctccagaatggaagcccac

SEQ ID NO: 15378 - RNA, 20 nt, synthetic construct
  source 1..20: mol_type = other RNA
gctccagctgtgttgttttc

SEQ ID NO: 15379 - RNA, 20 nt, synthetic construct
  source 1..20: mol_type = other RNA
gctccatggtctcaatgatg

SEQ ID NO: 15380 - RNA, 20 nt, synthetic construct
  source 1..20: mol_type = other RNA
gctcccaaggcaagcttaca

SEQ ID NO: 15381 - RNA, 20 nt, synthetic construct
  source 1..20: mol_type = other RNA
gctcctggtggcagctctga

SEQ ID NO: 15382 - RNA, 20 nt, synthetic construct
  source 1..20: mol_type = other RNA
gctcctgttcttgaaagcac

SEQ ID NO: 15383 - RNA, 20 nt, synthetic construct
  source 1..20: mol_type = other RNA
gctccttcagatcaagaaat

SEQ ID NO: 15384 - RNA, 20 nt, synthetic construct
  source 1..20: mol_type = other RNA
gctccttgtctcgacccttc

SEQ ID NO: 15385 - RNA, 20 nt, synthetic construct
  source 1..20: mol_type = other RNA
gctctaaagctggggtgtgg

SEQ ID NO: 15386 - RNA, 20 nt, synthetic construct
  source 1..20: mol_type = other RNA
gctctaaggtggcatctctt

SEQ ID NO: 15387 - RNA, 20 nt, synthetic construct
  source 1..20: mol_type = other RNA
gctctccactgctaccaaaa

SEQ ID NO: 15388 - RNA, 20 nt, synthetic construct
  source 1..20: mol_type = other RNA
gctctctcaggcagtgggct

SEQ ID NO: 15389 - RNA, 20 nt, synthetic construct
  source 1..20: mol_type = other RNA
gctctgaacggtatttaaaa

SEQ ID NO: 15390 - RNA, 20 nt, synthetic construct
  source 1..20: mol_type = other RNA
gctctggattttcaggccca

SEQ ID NO: 15391 - RNA, 20 nt, synthetic construct
  source 1..20: mol_type = other RNA
gctcttactctcaaatcaca

SEQ ID NO: 15392 - RNA, 20 nt, synthetic construct
  source 1..20: mol_type = other RNA
gctctttgttgaaaatgaaa

SEQ ID NO: 15393 - RNA, 20 nt, synthetic construct
  source 1..20: mol_type = other RNA
gctctttgtttctcatcaac

SEQ ID NO: 15394 - RNA, 20 nt, synthetic construct
  source 1..20: mol_type = other RNA
gctcttttgctgcacattat

SEQ ID NO: 15395 - RNA, 20 nt, synthetic construct
  source 1..20: mol_type = other RNA
gctgagcaagttgcgcagct

SEQ ID NO: 15396 - RNA, 20 nt, synthetic construct
  source 1..20: mol_type = other RNA
gctgaggaacctgtggaaga

SEQ ID NO: 15397 - RNA, 20 nt, synthetic construct
  source 1..20: mol_type = other RNA
gctgataatgccagtaaact

SEQ ID NO: 15398 - RNA, 20 nt, synthetic construct
  source 1..20: mol_type = other RNA
gctgatcattgttgctttgg

SEQ ID NO: 15399 - RNA, 20 nt, synthetic construct
  source 1..20: mol_type = other RNA
gctgatgatgctgataatgc

SEQ ID NO: 15400 - RNA, 20 nt, synthetic construct
  source 1..20: mol_type = other RNA
gctgcaatgctaaatacctg

SEQ ID NO: 15401 - RNA, 20 nt, synthetic construct
  source 1..20: mol_type = other RNA
gctgcacattatcacagctt

SEQ ID NO: 15402 - RNA, 20 nt, synthetic construct
  source 1..20: mol_type = other RNA
gctgcagaacttgatagcca

SEQ ID NO: 15403 - RNA, 20 nt, synthetic construct
  source 1..20: mol_type = other RNA
gctgcagtggtgagtgaggc

SEQ ID NO: 15404 - RNA, 20 nt, synthetic construct
  source 1..20: mol_type = other RNA
gctgcatacatgtgtagatg

SEQ ID NO: 15405 - RNA, 20 nt, synthetic construct
  source 1..20: mol_type = other RNA
gctgccaccaggagcttgca

SEQ ID NO: 15406 - RNA, 20 nt, synthetic construct
  source 1..20: mol_type = other RNA
gctgcctccaaagccagctg

SEQ ID NO: 15407 - RNA, 20 nt, synthetic construct
  source 1..20: mol_type = other RNA
gctgcctgtttatgaggctt

SEQ ID NO: 15408 - RNA, 20 nt, synthetic construct
  source 1..20: mol_type = other RNA
gctgcgcaacttgctcagca

SEQ ID NO: 15409 - RNA, 20 nt, synthetic construct
  source 1..20: mol_type = other RNA
gctgctccatggtctcaatg

SEQ ID NO: 15410 - RNA, 20 nt, synthetic construct
  source 1..20: mol_type = other RNA
gctgctctaaagctggggtg

SEQ ID NO: 15411 - RNA, 20 nt, synthetic construct
  source 1..20: mol_type = other RNA
gctgctctaaggtggcatct

SEQ ID NO: 15412 - RNA, 20 nt, synthetic construct
  source 1..20: mol_type = other RNA
gctgctggaacctgaacaga

SEQ ID NO: 15413 - RNA, 20 nt, synthetic construct
  source 1..20: mol_type = other RNA
gctgctgttcttgcttctgt

SEQ ID NO: 15414 - RNA, 20 nt, synthetic construct
  source 1..20: mol_type = other RNA
gctgctgttgctggttttga

SEQ ID NO: 15415 - RNA, 20 nt, synthetic construct
  source 1..20: mol_type = other RNA
gctgcttctgttctcaataa

SEQ ID NO: 15416 - RNA, 20 nt, synthetic construct
  source 1..20: mol_type = other RNA
gctggaacctgaacagaatt

SEQ ID NO: 15417 - RNA, 20 nt, synthetic construct
  source 1..20: mol_type = other RNA
gctggagcacaagtcacaaa

SEQ ID NO: 15418 - RNA, 20 nt, synthetic construct
  source 1..20: mol_type = other RNA
gctggcagttgtcctgtagc

SEQ ID NO: 15419 - RNA, 20 nt, synthetic construct
  source 1..20: mol_type = other RNA
gctggctttggaggcagctc

SEQ ID NO: 15420 - RNA, 20 nt, synthetic construct
  source 1..20: mol_type = other RNA
gctggggtgtggctatcaag

SEQ ID NO: 15421 - RNA, 20 nt, synthetic construct
  source 1..20: mol_type = other RNA
gctggttttgagggagatgt

SEQ ID NO: 15422 - RNA, 20 nt, synthetic construct
  source 1..20: mol_type = other RNA
gctgtgataatgtgcagcaa

SEQ ID NO: 15423 - RNA, 20 nt, synthetic construct
  source 1..20: mol_type = other RNA
gctgtgtgcatacaggcatg

SEQ ID NO: 15424 - RNA, 20 nt, synthetic construct
  source 1..20: mol_type = other RNA
gctgtgttgggggcacaaga

SEQ ID NO: 15425 - RNA, 20 nt, synthetic construct
  source 1..20: mol_type = other RNA
gctgtgttgttttctgggtg

SEQ ID NO: 15426 - RNA, 20 nt, synthetic construct
  source 1..20: mol_type = other RNA
gctgtgtttgctgctgttct

SEQ ID NO: 15427 - RNA, 20 nt, synthetic construct
  source 1..20: mol_type = other RNA
gctgttcttgcttctgtaag

SEQ ID NO: 15428 - RNA, 20 nt, synthetic construct
  source 1..20: mol_type = other RNA
gctgttcttttggttggtgt

SEQ ID NO: 15429 - RNA, 20 nt, synthetic construct
  source 1..20: mol_type = other RNA
gctgttgctggttttgaggg

SEQ ID NO: 15430 - RNA, 20 nt, synthetic construct
  source 1..20: mol_type = other RNA
gctgtttcaacactggggac

SEQ ID NO: 15431 - RNA, 20 nt, synthetic construct
  source 1..20: mol_type = other RNA
gcttacacccagaaaacaac

SEQ ID NO: 15432 - RNA, 20 nt, synthetic construct
  source 1..20: mol_type = other RNA
gcttaccccgaagttacgtc

SEQ ID NO: 15433 - RNA, 20 nt, synthetic construct
  source 1..20: mol_type = other RNA
gcttacttcaagcaaagctc

SEQ ID NO: 15434 - RNA, 20 nt, synthetic construct
  source 1..20: mol_type = other RNA
gcttagttacctttttccat

SEQ ID NO: 15435 - RNA, 20 nt, synthetic construct
  source 1..20: mol_type = other RNA
gcttatgttgcaaaaggtgt

SEQ ID NO: 15436 - RNA, 20 nt, synthetic construct
  source 1..20: mol_type = other RNA
gcttcagagactgagccatt

SEQ ID NO: 15437 - RNA, 20 nt, synthetic construct
  source 1..20: mol_type = other RNA
gcttcagatgctgctccatg

SEQ ID NO: 15438 - RNA, 20 nt, synthetic construct
  source 1..20: mol_type = other RNA
gcttcagattctgaatgagc

SEQ ID NO: 15439 - RNA, 20 nt, synthetic construct
  source 1..20: mol_type = other RNA
gcttcagttctacagggata

SEQ ID NO: 15440 - RNA, 20 nt, synthetic construct
  source 1..20: mol_type = other RNA
gcttccattctggagctttg

SEQ ID NO: 15441 - RNA, 20 nt, synthetic construct
  source 1..20: mol_type = other RNA
gcttcccttcatacagggta

SEQ ID NO: 15442 - RNA, 20 nt, synthetic construct
  source 1..20: mol_type = other RNA
gcttccttcagaaggaaaaa

SEQ ID NO: 15443 - RNA, 20 nt, synthetic construct
  source 1..20: mol_type = other RNA
gcttcggggccatccacaag

SEQ ID NO: 15444 - RNA, 20 nt, synthetic construct
  source 1..20: mol_type = other RNA
gcttctgtaagagatgccac

SEQ ID NO: 15445 - RNA, 20 nt, synthetic construct
  source 1..20: mol_type = other RNA
gcttctgtgatttgagagta

SEQ ID NO: 15446 - RNA, 20 nt, synthetic construct
  source 1..20: mol_type = other RNA
gcttctgttctcaataattt

SEQ ID NO: 15447 - RNA, 20 nt, synthetic construct
  source 1..20: mol_type = other RNA
gcttctttctccccctcctc

SEQ ID NO: 15448 - RNA, 20 nt, synthetic construct
  source 1..20: mol_type = other RNA
gcttgaagtaagcaccattc

SEQ ID NO: 15449 - RNA, 20 nt, synthetic construct
  source 1..20: mol_type = other RNA
gcttgaggtgttctgacatt

SEQ ID NO: 15450 - RNA, 20 nt, synthetic construct
  source 1..20: mol_type = other RNA
gcttgattttgaatactgat

SEQ ID NO: 15451 - RNA, 20 nt, synthetic construct
  source 1..20: mol_type = other RNA
gcttgcaaattgctgctgga

SEQ ID NO: 15452 - RNA, 20 nt, synthetic construct
  source 1..20: mol_type = other RNA
gcttgcaggtggattctctt

SEQ ID NO: 15453 - RNA, 20 nt, synthetic construct
  source 1..20: mol_type = other RNA
gcttgcatccaggttccacc

SEQ ID NO: 15454 - RNA, 20 nt, synthetic construct
  source 1..20: mol_type = other RNA
gcttgccttgggagcccccc

SEQ ID NO: 15455 - RNA, 20 nt, synthetic construct
  source 1..20: mol_type = other RNA
gcttgcttcggggccatcca

SEQ ID NO: 15456 - RNA, 20 nt, synthetic construct
  source 1..20: mol_type = other RNA
gcttggtgaaaacgaggggc

SEQ ID NO: 15457 - RNA, 20 nt, synthetic construct
  source 1..20: mol_type = other RNA
gcttgttgaccagacatatc

SEQ ID NO: 15458 - RNA, 20 nt, synthetic construct
  source 1..20: mol_type = other RNA
gcttgttgtgacttctgctc

SEQ ID NO: 15459 - RNA, 20 nt, synthetic construct
  source 1..20: mol_type = other RNA
gctttagagcagcaaacaac

SEQ ID NO: 15460 - RNA, 20 nt, synthetic construct
  source 1..20: mol_type = other RNA
gctttcaagaacaggagcag

SEQ ID NO: 15461 - RNA, 20 nt, synthetic construct
  source 1..20: mol_type = other RNA
gctttcacctggatttcttt

SEQ ID NO: 15462 - RNA, 20 nt, synthetic construct
  source 1..20: mol_type = other RNA
gctttctgaaaggcctcaga

SEQ ID NO: 15463 - RNA, 20 nt, synthetic construct
  source 1..20: mol_type = other RNA
gctttgcttgaagtaagcac

SEQ ID NO: 15464 - RNA, 20 nt, synthetic construct
  source 1..20: mol_type = other RNA
gctttggaggcagctcagag

SEQ ID NO: 15465 - RNA, 20 nt, synthetic construct
  source 1..20: mol_type = other RNA
gctttgggatcacattattt

SEQ ID NO: 15466 - RNA, 20 nt, synthetic construct
  source 1..20: mol_type = other RNA
gctttgggggtgaggaaaag

SEQ ID NO: 15467 - RNA, 20 nt, synthetic construct
  source 1..20: mol_type = other RNA
gctttgtagccagaggttct

SEQ ID NO: 15468 - RNA, 20 nt, synthetic construct
  source 1..20: mol_type = other RNA
gctttgtggttccctggatg

SEQ ID NO: 15469 - RNA, 20 nt, synthetic construct
  source 1..20: mol_type = other RNA
gcttttgagtgtccttctgg

SEQ ID NO: 15470 - RNA, 20 nt, synthetic construct
  source 1..20: mol_type = other RNA
gcttttggtaaatggtctgt

SEQ ID NO: 15471 - RNA, 20 nt, synthetic construct
  source 1..20: mol_type = other RNA
gctttttccttctgaaggaa

SEQ ID NO: 15472 - RNA, 20 nt, synthetic construct
  source 1..20: mol_type = other RNA
ggaaaaaacactgtctcaat

SEQ ID NO: 15473 - RNA, 20 nt, synthetic construct
  source 1..20: mol_type = other RNA
ggaaaaacatttgcatggtt

SEQ ID NO: 15474 - RNA, 20 nt, synthetic construct
  source 1..20: mol_type = other RNA
ggaaaaagcactctgaatgg

SEQ ID NO: 15475 - RNA, 20 nt, synthetic construct
  source 1..20: mol_type = other RNA
ggaaaaaggtaactaagcaa

SEQ ID NO: 15476 - RNA, 20 nt, synthetic construct
  source 1..20: mol_type = other RNA
ggaaaagtctggagtatttc

SEQ ID NO: 15477 - RNA, 20 nt, synthetic construct
  source 1..20: mol_type = other RNA
ggaaaagtgctaattaccat

SEQ ID NO: 15478 - RNA, 20 nt, synthetic construct
  source 1..20: mol_type = other RNA
ggaaaatattgcatgtgatg

SEQ ID NO: 15479 - RNA, 20 nt, synthetic construct
  source 1..20: mol_type = other RNA
ggaaacaagacccaaaactt

SEQ ID NO: 15480 - RNA, 20 nt, synthetic construct
  source 1..20: mol_type = other RNA
ggaaacacaatctggataat

SEQ ID NO: 15481 - RNA, 20 nt, synthetic construct
  source 1..20: mol_type = other RNA
ggaaatactccagacttttc

SEQ ID NO: 15482 - RNA, 20 nt, synthetic construct
  source 1..20: mol_type = other RNA
ggaaatcatattgagtcttg

SEQ ID NO: 15483 - RNA, 20 nt, synthetic construct
  source 1..20: mol_type = other RNA
ggaaattccaacatgcctgg

SEQ ID NO: 15484 - RNA, 20 nt, synthetic construct
  source 1..20: mol_type = other RNA
ggaacacacacatggtgaac

SEQ ID NO: 15485 - RNA, 20 nt, synthetic construct
  source 1..20: mol_type = other RNA
ggaacaggatagaaccaacc

SEQ ID NO: 15486 - RNA, 20 nt, synthetic construct
  source 1..20: mol_type = other RNA
ggaacaggtatttagcattg

SEQ ID NO: 15487 - RNA, 20 nt, synthetic construct
  source 1..20: mol_type = other RNA
ggaacagtcattgtccctgc

SEQ ID NO: 15488 - RNA, 20 nt, synthetic construct
  source 1..20: mol_type = other RNA
ggaaccacaaagctagcgtc

SEQ ID NO: 15489 - RNA, 20 nt, synthetic construct
  source 1..20: mol_type = other RNA
ggaacctgaacagaattctt

SEQ ID NO: 15490 - RNA, 20 nt, synthetic construct
  source 1..20: mol_type = other RNA
ggaacctggatgcaagccac

SEQ ID NO: 15491 - RNA, 20 nt, synthetic construct
  source 1..20: mol_type = other RNA
ggaacctgtggaagaggagg

SEQ ID NO: 15492 - RNA, 20 nt, synthetic construct
  source 1..20: mol_type = other RNA
ggaactggagatgttggtcc

SEQ ID NO: 15493 - RNA, 20 nt, synthetic construct
  source 1..20: mol_type = other RNA
ggaagaatgttttcatggtg

SEQ ID NO: 15494 - RNA, 20 nt, synthetic construct
  source 1..20: mol_type = other RNA
ggaagaggaggagggggaga

SEQ ID NO: 15495 - RNA, 20 nt, synthetic construct
  source 1..20: mol_type = other RNA
ggaagaggcagaaactgtag

SEQ ID NO: 15496 - RNA, 20 nt, synthetic construct
  source 1..20: mol_type = other RNA
ggaagccagaatagtcgtgt

SEQ ID NO: 15497 - RNA, 20 nt, synthetic construct
  source 1..20: mol_type = other RNA
ggaagcccactgcctgagag

SEQ ID NO: 15498 - RNA, 20 nt, synthetic construct
  source 1..20: mol_type = other RNA
ggaagctgaggaacctgtgg

SEQ ID NO: 15499 - RNA, 20 nt, synthetic construct
  source 1..20: mol_type = other RNA
ggaaggtgactctataaaat

SEQ ID NO: 15500 - RNA, 20 nt, synthetic construct
  source 1..20: mol_type = other RNA
ggaaggtggtgcctcaggtt

SEQ ID NO: 15501 - RNA, 20 nt, synthetic construct
  source 1..20: mol_type = other RNA
ggaagtacagaatataaatc

SEQ ID NO: 15502 - RNA, 20 nt, synthetic construct
  source 1..20: mol_type = other RNA
ggaagtcacactcagacccc

SEQ ID NO: 15503 - RNA, 20 nt, synthetic construct
  source 1..20: mol_type = other RNA
ggaagtgaaaatagagggta

SEQ ID NO: 15504 - RNA, 20 nt, synthetic construct
  source 1..20: mol_type = other RNA
ggaataaaacgcacagttag

SEQ ID NO: 15505 - RNA, 20 nt, synthetic construct
  source 1..20: mol_type = other RNA
ggaataccctctactttctt

SEQ ID NO: 15506 - RNA, 20 nt, synthetic construct
  source 1..20: mol_type = other RNA
ggaataccctgtatgaaggg

SEQ ID NO: 15507 - RNA, 20 nt, synthetic construct
  source 1..20: mol_type = other RNA
ggaatcccatctaaaacgta

SEQ ID NO: 15508 - RNA, 20 nt, synthetic construct
  source 1..20: mol_type = other RNA
ggaatccttagtgaacactg

SEQ ID NO: 15509 - RNA, 20 nt, synthetic construct
  source 1..20: mol_type = other RNA
ggaatctgctctttgttgaa

SEQ ID NO: 15510 - RNA, 20 nt, synthetic construct
  source 1..20: mol_type = other RNA
ggaatgacatacagactgca

SEQ ID NO: 15511 - RNA, 20 nt, synthetic construct
  source 1..20: mol_type = other RNA
ggaatggacttagtctgttg

SEQ ID NO: 15512 - RNA, 20 nt, synthetic construct
  source 1..20: mol_type = other RNA
ggaattgatctgccctgagg

SEQ ID NO: 15513 - RNA, 20 nt, synthetic construct
  source 1..20: mol_type = other RNA
ggaatttccagtgtattgtt

SEQ ID NO: 15514 - RNA, 20 nt, synthetic construct
  source 1..20: mol_type = other RNA
ggaatttctacgatttatat

SEQ ID NO: 15515 - RNA, 20 nt, synthetic construct
  source 1..20: mol_type = other RNA
ggacaactcattagtagcct

SEQ ID NO: 15516 - RNA, 20 nt, synthetic construct
  source 1..20: mol_type = other RNA
ggacaactgccagcagttga

SEQ ID NO: 15517 - RNA, 20 nt, synthetic construct
  source 1..20: mol_type = other RNA
ggacaatgactgttccattg

SEQ ID NO: 15518 - RNA, 20 nt, synthetic construct
  source 1..20: mol_type = other RNA
ggacactcaaaagcatgctg

SEQ ID NO: 15519 - RNA, 20 nt, synthetic construct
  source 1..20: mol_type = other RNA
ggacataagtttttcagttt

SEQ ID NO: 15520 - RNA, 20 nt, synthetic construct
  source 1..20: mol_type = other RNA
ggacattatgagtctcgaac

SEQ ID NO: 15521 - RNA, 20 nt, synthetic construct
  source 1..20: mol_type = other RNA
ggaccaacatctccagttcc

SEQ ID NO: 15522 - RNA, 20 nt, synthetic construct
  source 1..20: mol_type = other RNA
ggactcacacgactattctg

SEQ ID NO: 15523 - RNA, 20 nt, synthetic construct
  source 1..20: mol_type = other RNA
ggactctgggaaggtggtgc

SEQ ID NO: 15524 - RNA, 20 nt, synthetic construct
  source 1..20: mol_type = other RNA
ggactgcccttgattcattt

SEQ ID NO: 15525 - RNA, 20 nt, synthetic construct
  source 1..20: mol_type = other RNA
ggactggaggaagtacagaa

SEQ ID NO: 15526 - RNA, 20 nt, synthetic construct
  source 1..20: mol_type = other RNA
ggacttagtctgttgccctc

SEQ ID NO: 15527 - RNA, 20 nt, synthetic construct
  source 1..20: mol_type = other RNA
ggagaaagaagcaattgtga

SEQ ID NO: 15528 - RNA, 20 nt, synthetic construct
  source 1..20: mol_type = other RNA
ggagaaagacgtaacttcgg

SEQ ID NO: 15529 - RNA, 20 nt, synthetic construct
  source 1..20: mol_type = other RNA
ggagaagggctgcatacatg

SEQ ID NO: 15530 - RNA, 20 nt, synthetic construct
  source 1..20: mol_type = other RNA
ggagaagtgcacctggtgtg

SEQ ID NO: 15531 - RNA, 20 nt, synthetic construct
  source 1..20: mol_type = other RNA
ggagacaccaagtggcactc

SEQ ID NO: 15532 - RNA, 20 nt, synthetic construct
  source 1..20: mol_type = other RNA
ggagacatttggttgactgc

SEQ ID NO: 15533 - RNA, 20 nt, synthetic construct
  source 1..20: mol_type = other RNA
ggagagattgggttgatact

SEQ ID NO: 15534 - RNA, 20 nt, synthetic construct
  source 1..20: mol_type = other RNA
ggagagctacaggacaactg

SEQ ID NO: 15535 - RNA, 20 nt, synthetic construct
  source 1..20: mol_type = other RNA
ggagatgggcatatctcaaa

SEQ ID NO: 15536 - RNA, 20 nt, synthetic construct
  source 1..20: mol_type = other RNA
ggagatgtgaactctgggat

SEQ ID NO: 15537 - RNA, 20 nt, synthetic construct
  source 1..20: mol_type = other RNA
ggagatgttggtccactgta

SEQ ID NO: 15538 - RNA, 20 nt, synthetic construct
  source 1..20: mol_type = other RNA
ggagcaaacacgagatcttg

SEQ ID NO: 15539 - RNA, 20 nt, synthetic construct
  source 1..20: mol_type = other RNA
ggagcacaagtcacaaatgt

SEQ ID NO: 15540 - RNA, 20 nt, synthetic construct
  source 1..20: mol_type = other RNA
ggagcagaagtcacaacaag

SEQ ID NO: 15541 - RNA, 20 nt, synthetic construct
  source 1..20: mol_type = other RNA
ggagcagcatctgaagcagt

SEQ ID NO: 15542 - RNA, 20 nt, synthetic construct
  source 1..20: mol_type = other RNA
ggagcccagagagagaaggt

SEQ ID NO: 15543 - RNA, 20 nt, synthetic construct
  source 1..20: mol_type = other RNA
ggagccccccaggcatgttg

SEQ ID NO: 15544 - RNA, 20 nt, synthetic construct
  source 1..20: mol_type = other RNA
ggagcttgcaaattgctgct

SEQ ID NO: 15545 - RNA, 20 nt, synthetic construct
  source 1..20: mol_type = other RNA
ggagctttgtagccagaggt

SEQ ID NO: 15546 - RNA, 20 nt, synthetic construct
  source 1..20: mol_type = other RNA
ggaggaagtacagaatataa

SEQ ID NO: 15547 - RNA, 20 nt, synthetic construct
  source 1..20: mol_type = other RNA
ggaggaagtcacactcagac

SEQ ID NO: 15548 - RNA, 20 nt, synthetic construct
  source 1..20: mol_type = other RNA
ggaggaataaaacgcacagt

SEQ ID NO: 15549 - RNA, 20 nt, synthetic construct
  source 1..20: mol_type = other RNA
ggaggagggggagaaagaag

SEQ ID NO: 15550 - RNA, 20 nt, synthetic construct
  source 1..20: mol_type = other RNA
ggaggcagctcagagttaga

SEQ ID NO: 15551 - RNA, 20 nt, synthetic construct
  source 1..20: mol_type = other RNA
ggaggggaaaagtgctaatt

SEQ ID NO: 15552 - RNA, 20 nt, synthetic construct
  source 1..20: mol_type = other RNA
ggagggggagaaagaagcaa

SEQ ID NO: 15553 - RNA, 20 nt, synthetic construct
  source 1..20: mol_type = other RNA
ggaggggtctgagtgtgact

SEQ ID NO: 15554 - RNA, 20 nt, synthetic construct
  source 1..20: mol_type = other RNA
ggaggtcatttgattggaga

SEQ ID NO: 15555 - RNA, 20 nt, synthetic construct
  source 1..20: mol_type = other RNA
ggaggtgatggtatcaggaa

SEQ ID NO: 15556 - RNA, 20 nt, synthetic construct
  source 1..20: mol_type = other RNA
ggagtatctagtaatttgga

SEQ ID NO: 15557 - RNA, 20 nt, synthetic construct
  source 1..20: mol_type = other RNA
ggagtatttcctctttattc

SEQ ID NO: 15558 - RNA, 20 nt, synthetic construct
  source 1..20: mol_type = other RNA
ggagttcaccatgtgtgtgt

SEQ ID NO: 15559 - RNA, 20 nt, synthetic construct
  source 1..20: mol_type = other RNA
ggagttttagaagaacacca

SEQ ID NO: 15560 - RNA, 20 nt, synthetic construct
  source 1..20: mol_type = other RNA
ggataatattgagacagtgt

SEQ ID NO: 15561 - RNA, 20 nt, synthetic construct
  source 1..20: mol_type = other RNA
ggatacacctgtcaagactc

SEQ ID NO: 15562 - RNA, 20 nt, synthetic construct
  source 1..20: mol_type = other RNA
ggatagaaccaaccatgttg

SEQ ID NO: 15563 - RNA, 20 nt, synthetic construct
  source 1..20: mol_type = other RNA
ggatataaaaatagaaacca

SEQ ID NO: 15564 - RNA, 20 nt, synthetic construct
  source 1..20: mol_type = other RNA
ggatcacattatttggaaaa

SEQ ID NO: 15565 - RNA, 20 nt, synthetic construct
  source 1..20: mol_type = other RNA
ggatcattctttggccagac

SEQ ID NO: 15566 - RNA, 20 nt, synthetic construct
  source 1..20: mol_type = other RNA
ggatgagctctctcaggcag

SEQ ID NO: 15567 - RNA, 20 nt, synthetic construct
  source 1..20: mol_type = other RNA
ggatgcaagccacatgcctg

SEQ ID NO: 15568 - RNA, 20 nt, synthetic construct
  source 1..20: mol_type = other RNA
ggatggattgaattgaaggc

SEQ ID NO: 15569 - RNA, 20 nt, synthetic construct
  source 1..20: mol_type = other RNA
ggatggccccgaagcaagcc

SEQ ID NO: 15570 - RNA, 20 nt, synthetic construct
  source 1..20: mol_type = other RNA
ggatggttgtgtttgtgctg

SEQ ID NO: 15571 - RNA, 20 nt, synthetic construct
  source 1..20: mol_type = other RNA
ggatgtgtagtctgttcttt

SEQ ID NO: 15572 - RNA, 20 nt, synthetic construct
  source 1..20: mol_type = other RNA
ggatgttattttctgcagga

SEQ ID NO: 15573 - RNA, 20 nt, synthetic construct
  source 1..20: mol_type = other RNA
ggattaggactctgggaagg

SEQ ID NO: 15574 - RNA, 20 nt, synthetic construct
  source 1..20: mol_type = other RNA
ggattccgcttggtgaaaac

SEQ ID NO: 15575 - RNA, 20 nt, synthetic construct
  source 1..20: mol_type = other RNA
ggattccttttctgccacta

SEQ ID NO: 15576 - RNA, 20 nt, synthetic construct
  source 1..20: mol_type = other RNA
ggattctcttgcttagttac

SEQ ID NO: 15577 - RNA, 20 nt, synthetic construct
  source 1..20: mol_type = other RNA
ggattgaattgaaggcccct

SEQ ID NO: 15578 - RNA, 20 nt, synthetic construct
  source 1..20: mol_type = other RNA
ggatttctttcttggcttac

SEQ ID NO: 15579 - RNA, 20 nt, synthetic construct
  source 1..20: mol_type = other RNA
ggattttcaggcccactgca

SEQ ID NO: 15580 - RNA, 20 nt, synthetic construct
  source 1..20: mol_type = other RNA
ggcaaatgggaggtgatggt

SEQ ID NO: 15581 - RNA, 20 nt, synthetic construct
  source 1..20: mol_type = other RNA
ggcaacagactaagtccatt

SEQ ID NO: 15582 - RNA, 20 nt, synthetic construct
  source 1..20: mol_type = other RNA
ggcaagactcagtttggggt

SEQ ID NO: 15583 - RNA, 20 nt, synthetic construct
  source 1..20: mol_type = other RNA
ggcaagcttacacccagaaa

SEQ ID NO: 15584 - RNA, 20 nt, synthetic construct
  source 1..20: mol_type = other RNA
ggcacaagatctcgtgtttg

SEQ ID NO: 15585 - RNA, 20 nt, synthetic construct
  source 1..20: mol_type = other RNA
ggcacaggaaaaacatttgc

SEQ ID NO: 15586 - RNA, 20 nt, synthetic construct
  source 1..20: mol_type = other RNA
ggcaccaccttcccagagtc

SEQ ID NO: 15587 - RNA, 20 nt, synthetic construct
  source 1..20: mol_type = other RNA
ggcactagatttcattttca

SEQ ID NO: 15588 - RNA, 20 nt, synthetic construct
  source 1..20: mol_type = other RNA
ggcactctttcaaaagttat

SEQ ID NO: 15589 - RNA, 20 nt, synthetic construct
  source 1..20: mol_type = other RNA
ggcacttacctacacatctg

SEQ ID NO: 15590 - RNA, 20 nt, synthetic construct
  source 1..20: mol_type = other RNA
ggcagaaaaggaatccttag

SEQ ID NO: 15591 - RNA, 20 nt, synthetic construct
  source 1..20: mol_type = other RNA
ggcagaaactgtagcaccat

SEQ ID NO: 15592 - RNA, 20 nt, synthetic construct
  source 1..20: mol_type = other RNA
ggcagatcaattccgcacag

SEQ ID NO: 15593 - RNA, 20 nt, synthetic construct
  source 1..20: mol_type = other RNA
ggcagcacaaacacaaccat

SEQ ID NO: 15594 - RNA, 20 nt, synthetic construct
  source 1..20: mol_type = other RNA
ggcagccttgtggatggccc

SEQ ID NO: 15595 - RNA, 20 nt, synthetic construct
  source 1..20: mol_type = other RNA
ggcagctcagagttagaggt

SEQ ID NO: 15596 - RNA, 20 nt, synthetic construct
  source 1..20: mol_type = other RNA
ggcagctctgaacggtattt

SEQ ID NO: 15597 - RNA, 20 nt, synthetic construct
  source 1..20: mol_type = other RNA
ggcagtcccaaggtacagtg

SEQ ID NO: 15598 - RNA, 20 nt, synthetic construct
  source 1..20: mol_type = other RNA
ggcagtgatgcctcattacg

SEQ ID NO: 15599 - RNA, 20 nt, synthetic construct
  source 1..20: mol_type = other RNA
ggcagtgctaatgcctaatg

SEQ ID NO: 15600 - RNA, 20 nt, synthetic construct
  source 1..20: mol_type = other RNA
ggcagtgggcttccattctg

SEQ ID NO: 15601 - RNA, 20 nt, synthetic construct
  source 1..20: mol_type = other RNA
ggcagttgtcctgtagctct

SEQ ID NO: 15602 - RNA, 20 nt, synthetic construct
  source 1..20: mol_type = other RNA
ggcatatctcaaaaactgat

SEQ ID NO: 15603 - RNA, 20 nt, synthetic construct
  source 1..20: mol_type = other RNA
ggcatcactgccatcaattc

SEQ ID NO: 15604 - RNA, 20 nt, synthetic construct
  source 1..20: mol_type = other RNA
ggcatctcttacagaagcaa

SEQ ID NO: 15605 - RNA, 20 nt, synthetic construct
  source 1..20: mol_type = other RNA
ggcatgtggcttgcatccag

SEQ ID NO: 15606 - RNA, 20 nt, synthetic construct
  source 1..20: mol_type = other RNA
ggcatgttggaatttccagt

SEQ ID NO: 15607 - RNA, 20 nt, synthetic construct
  source 1..20: mol_type = other RNA
ggcattagcactgccttgtt

SEQ ID NO: 15608 - RNA, 20 nt, synthetic construct
  source 1..20: mol_type = other RNA
ggcattatcagcatcatcag

SEQ ID NO: 15609 - RNA, 20 nt, synthetic construct
  source 1..20: mol_type = other RNA
ggcatttatgtgagatgtgg

SEQ ID NO: 15610 - RNA, 20 nt, synthetic construct
  source 1..20: mol_type = other RNA
ggccaaagaatgatccttct

SEQ ID NO: 15611 - RNA, 20 nt, synthetic construct
  source 1..20: mol_type = other RNA
ggccaattaaggtggaacct

SEQ ID NO: 15612 - RNA, 20 nt, synthetic construct
  source 1..20: mol_type = other RNA
ggccagactaaagtggaaga

SEQ ID NO: 15613 - RNA, 20 nt, synthetic construct
  source 1..20: mol_type = other RNA
ggccagtcacagttttgact

SEQ ID NO: 15614 - RNA, 20 nt, synthetic construct
  source 1..20: mol_type = other RNA
ggcccactgcagttatgtgt

SEQ ID NO: 15615 - RNA, 20 nt, synthetic construct
  source 1..20: mol_type = other RNA
ggccccgaagcaagcctgat

SEQ ID NO: 15616 - RNA, 20 nt, synthetic construct
  source 1..20: mol_type = other RNA
ggcccctcgttttcaccaag

SEQ ID NO: 15617 - RNA, 20 nt, synthetic construct
  source 1..20: mol_type = other RNA
ggccctgacatttcaacttt

SEQ ID NO: 15618 - RNA, 20 nt, synthetic construct
  source 1..20: mol_type = other RNA
ggcctcactcaccactgcag

SEQ ID NO: 15619 - RNA, 20 nt, synthetic construct
  source 1..20: mol_type = other RNA
ggcctcagaataattgtgtg

SEQ ID NO: 15620 - RNA, 20 nt, synthetic construct
  source 1..20: mol_type = other RNA
ggcctgaaaatccagagctt

SEQ ID NO: 15621 - RNA, 20 nt, synthetic construct
  source 1..20: mol_type = other RNA
ggcctgtgatgctgatgatg

SEQ ID NO: 15622 - RNA, 20 nt, synthetic construct
  source 1..20: mol_type = other RNA
ggcctgtgcatctgactatg

SEQ ID NO: 15623 - RNA, 20 nt, synthetic construct
  source 1..20: mol_type = other RNA
ggccttcaattcaatccatc

SEQ ID NO: 15624 - RNA, 20 nt, synthetic construct
  source 1..20: mol_type = other RNA
ggcctttcagaaagcatcgg

SEQ ID NO: 15625 - RNA, 20 nt, synthetic construct
  source 1..20: mol_type = other RNA
ggcgtgaaactgcttcagat

SEQ ID NO: 15626 - RNA, 20 nt, synthetic construct
  source 1..20: mol_type = other RNA
ggctaatggagaaagacgta

SEQ ID NO: 15627 - RNA, 20 nt, synthetic construct
  source 1..20: mol_type = other RNA
ggctacaaagctccagaatg

SEQ ID NO: 15628 - RNA, 20 nt, synthetic construct
  source 1..20: mol_type = other RNA
ggctacagaactcacagatt

SEQ ID NO: 15629 - RNA, 20 nt, synthetic construct
  source 1..20: mol_type = other RNA
ggctactaatgagttgtcct

SEQ ID NO: 15630 - RNA, 20 nt, synthetic construct
  source 1..20: mol_type = other RNA
ggctatcaagttctgcagca

SEQ ID NO: 15631 - RNA, 20 nt, synthetic construct
  source 1..20: mol_type = other RNA
ggctcagtctctgaagcctg

SEQ ID NO: 15632 - RNA, 20 nt, synthetic construct
  source 1..20: mol_type = other RNA
ggctcccaaggcaagcttac

SEQ ID NO: 15633 - RNA, 20 nt, synthetic construct
  source 1..20: mol_type = other RNA
ggctccttcagatcaagaaa

SEQ ID NO: 15634 - RNA, 20 nt, synthetic construct
  source 1..20: mol_type = other RNA
ggctcttactctcaaatcac

SEQ ID NO: 15635 - RNA, 20 nt, synthetic construct
  source 1..20: mol_type = other RNA
ggctgcatacatgtgtagat

SEQ ID NO: 15636 - RNA, 20 nt, synthetic construct
  source 1..20: mol_type = other RNA
ggcttaccccgaagttacgt

SEQ ID NO: 15637 - RNA, 20 nt, synthetic construct
  source 1..20: mol_type = other RNA
ggcttatgttgcaaaaggtg

SEQ ID NO: 15638 - RNA, 20 nt, synthetic construct
  source 1..20: mol_type = other RNA
ggcttcagagactgagccat

SEQ ID NO: 15639 - RNA, 20 nt, synthetic construct
  source 1..20: mol_type = other RNA
ggcttccattctggagcttt

SEQ ID NO: 15640 - RNA, 20 nt, synthetic construct
  source 1..20: mol_type = other RNA
ggcttcccttcatacagggt

SEQ ID NO: 15641 - RNA, 20 nt, synthetic construct
  source 1..20: mol_type = other RNA
ggcttgcatccaggttccac

SEQ ID NO: 15642 - RNA, 20 nt, synthetic construct
  source 1..20: mol_type = other RNA
ggcttgcttcggggccatcc

SEQ ID NO: 15643 - RNA, 20 nt, synthetic construct
  source 1..20: mol_type = other RNA
ggctttggaggcagctcaga

SEQ ID NO: 15644 - RNA, 20 nt, synthetic construct
  source 1..20: mol_type = other RNA
gggaaaagtgctaattacca

SEQ ID NO: 15645 - RNA, 20 nt, synthetic construct
  source 1..20: mol_type = other RNA
gggaaatcatattgagtctt

SEQ ID NO: 15646 - RNA, 20 nt, synthetic construct
  source 1..20: mol_type = other RNA
gggaaccacaaagctagcgt

SEQ ID NO: 15647 - RNA, 20 nt, synthetic construct
  source 1..20: mol_type = other RNA
gggaagccagaatagtcgtg

SEQ ID NO: 15648 - RNA, 20 nt, synthetic construct
  source 1..20: mol_type = other RNA
gggaaggtggtgcctcaggt

SEQ ID NO: 15649 - RNA, 20 nt, synthetic construct
  source 1..20: mol_type = other RNA
gggaagtgaaaatagagggt

SEQ ID NO: 15650 - RNA, 20 nt, synthetic construct
  source 1..20: mol_type = other RNA
gggaatctgctctttgttga

SEQ ID NO: 15651 - RNA, 20 nt, synthetic construct
  source 1..20: mol_type = other RNA
gggaatttctacgatttata

SEQ ID NO: 15652 - RNA, 20 nt, synthetic construct
  source 1..20: mol_type = other RNA
gggacaatgactgttccatt

SEQ ID NO: 15653 - RNA, 20 nt, synthetic construct
  source 1..20: mol_type = other RNA
gggacataagtttttcagtt

SEQ ID NO: 15654 - RNA, 20 nt, synthetic construct
  source 1..20: mol_type = other RNA
gggactgcccttgattcatt

SEQ ID NO: 15655 - RNA, 20 nt, synthetic construct
  source 1..20: mol_type = other RNA
gggactggaggaagtacaga

SEQ ID NO: 15656 - RNA, 20 nt, synthetic construct
  source 1..20: mol_type = other RNA
gggagaaagaagcaattgtg

SEQ ID NO: 15657 - RNA, 20 nt, synthetic construct
  source 1..20: mol_type = other RNA
gggagatgtgaactctggga

SEQ ID NO: 15658 - RNA, 20 nt, synthetic construct
  source 1..20: mol_type = other RNA
gggagccccccaggcatgtt

SEQ ID NO: 15659 - RNA, 20 nt, synthetic construct
  source 1..20: mol_type = other RNA
gggaggaagtcacactcaga

SEQ ID NO: 15660 - RNA, 20 nt, synthetic construct
  source 1..20: mol_type = other RNA
gggaggggtctgagtgtgac

SEQ ID NO: 15661 - RNA, 20 nt, synthetic construct
  source 1..20: mol_type = other RNA
gggaggtgatggtatcagga

SEQ ID NO: 15662 - RNA, 20 nt, synthetic construct
  source 1..20: mol_type = other RNA
gggatataaaaatagaaacc

SEQ ID NO: 15663 - RNA, 20 nt, synthetic construct
  source 1..20: mol_type = other RNA
gggatcacattatttggaaa

SEQ ID NO: 15664 - RNA, 20 nt, synthetic construct
  source 1..20: mol_type = other RNA
gggatggttgtgtttgtgct

SEQ ID NO: 15665 - RNA, 20 nt, synthetic construct
  source 1..20: mol_type = other RNA
gggattccgcttggtgaaaa

SEQ ID NO: 15666 - RNA, 20 nt, synthetic construct
  source 1..20: mol_type = other RNA
gggcaacagactaagtccat

SEQ ID NO: 15667 - RNA, 20 nt, synthetic construct
  source 1..20: mol_type = other RNA
gggcacaagatctcgtgttt

SEQ ID NO: 15668 - RNA, 20 nt, synthetic construct
  source 1..20: mol_type = other RNA
gggcagatcaattccgcaca

SEQ ID NO: 15669 - RNA, 20 nt, synthetic construct
  source 1..20: mol_type = other RNA
gggcagccttgtggatggcc

SEQ ID NO: 15670 - RNA, 20 nt, synthetic construct
  source 1..20: mol_type = other RNA
gggcagtcccaaggtacagt

SEQ ID NO: 15671 - RNA, 20 nt, synthetic construct
  source 1..20: mol_type = other RNA
gggcatatctcaaaaactga

SEQ ID NO: 15672 - RNA, 20 nt, synthetic construct
  source 1..20: mol_type = other RNA
gggccagtcacagttttgac

SEQ ID NO: 15673 - RNA, 20 nt, synthetic construct
  source 1..20: mol_type = other RNA
gggcctgaaaatccagagct

SEQ ID NO: 15674 - RNA, 20 nt, synthetic construct
  source 1..20: mol_type = other RNA
gggccttcaattcaatccat

SEQ ID NO: 15675 - RNA, 20 nt, synthetic construct
  source 1..20: mol_type = other RNA
gggctacagaactcacagat

SEQ ID NO: 15676 - RNA, 20 nt, synthetic construct
  source 1..20: mol_type = other RNA
gggctcccaaggcaagctta

SEQ ID NO: 15677 - RNA, 20 nt, synthetic construct
  source 1..20: mol_type = other RNA
gggctccttcagatcaagaa

SEQ ID NO: 15678 - RNA, 20 nt, synthetic construct
  source 1..20: mol_type = other RNA
gggctgcatacatgtgtaga

SEQ ID NO: 15679 - RNA, 20 nt, synthetic construct
  source 1..20: mol_type = other RNA
gggcttccattctggagctt

SEQ ID NO: 15680 - RNA, 20 nt, synthetic construct
  source 1..20: mol_type = other RNA
ggggaaaagtgctaattacc

SEQ ID NO: 15681 - RNA, 20 nt, synthetic construct
  source 1..20: mol_type = other RNA
ggggaatttctacgatttat

SEQ ID NO: 15682 - RNA, 20 nt, synthetic construct
  source 1..20: mol_type = other RNA
ggggacataagtttttcagt

SEQ ID NO: 15683 - RNA, 20 nt, synthetic construct
  source 1..20: mol_type = other RNA
ggggagaaagaagcaattgt

SEQ ID NO: 15684 - RNA, 20 nt, synthetic construct
  source 1..20: mol_type = other RNA
ggggaggggtctgagtgtga

SEQ ID NO: 15685 - RNA, 20 nt, synthetic construct
  source 1..20: mol_type = other RNA
ggggcacaagatctcgtgtt

SEQ ID NO: 15686 - RNA, 20 nt, synthetic construct
  source 1..20: mol_type = other RNA
ggggccttcaattcaatcca

SEQ ID NO: 15687 - RNA, 20 nt, synthetic construct
  source 1..20: mol_type = other RNA
ggggctcccaaggcaagctt

SEQ ID NO: 15688 - RNA, 20 nt, synthetic construct
  source 1..20: mol_type = other RNA
gggggagaaagaagcaattg

SEQ ID NO: 15689 - RNA, 20 nt, synthetic construct
  source 1..20: mol_type = other RNA
gggggcacaagatctcgtgt

SEQ ID NO: 15690 - RNA, 20 nt, synthetic construct
  source 1..20: mol_type = other RNA
gggggctcccaaggcaagct

SEQ ID NO: 15691 - RNA, 20 nt, synthetic construct
  source 1..20: mol_type = other RNA
ggggggctcccaaggcaagc

SEQ ID NO: 15692 - RNA, 20 nt, synthetic construct
  source 1..20: mol_type = other RNA
gggggtgaggaaaagtctgg

SEQ ID NO: 15693 - RNA, 20 nt, synthetic construct
  source 1..20: mol_type = other RNA
ggggtaagccaagaaagaaa

SEQ ID NO: 15694 - RNA, 20 nt, synthetic construct
  source 1..20: mol_type = other RNA
ggggtagtggtggtgttctt

SEQ ID NO: 15695 - RNA, 20 nt, synthetic construct
  source 1..20: mol_type = other RNA
ggggtctgagtgtgacttcc

SEQ ID NO: 15696 - RNA, 20 nt, synthetic construct
  source 1..20: mol_type = other RNA
ggggtgaggaaaagtctgga

SEQ ID NO: 15697 - RNA, 20 nt, synthetic construct
  source 1..20: mol_type = other RNA
ggggtgtggctatcaagttc

SEQ ID NO: 15698 - RNA, 20 nt, synthetic construct
  source 1..20: mol_type = other RNA
ggggttgctgtgtttgctgc

SEQ ID NO: 15699 - RNA, 20 nt, synthetic construct
  source 1..20: mol_type = other RNA
gggtaaacctgaggcaccac

SEQ ID NO: 15700 - RNA, 20 nt, synthetic construct
  source 1..20: mol_type = other RNA
gggtaagccaagaaagaaat

SEQ ID NO: 15701 - RNA, 20 nt, synthetic construct
  source 1..20: mol_type = other RNA
gggtagtggtggtgttcttc

SEQ ID NO: 15702 - RNA, 20 nt, synthetic construct
  source 1..20: mol_type = other RNA
gggtattccaagtgtttgca

SEQ ID NO: 15703 - RNA, 20 nt, synthetic construct
  source 1..20: mol_type = other RNA
gggtattccataataacttt

SEQ ID NO: 15704 - RNA, 20 nt, synthetic construct
  source 1..20: mol_type = other RNA
gggtcgagacaaggagcaaa

SEQ ID NO: 15705 - RNA, 20 nt, synthetic construct
  source 1..20: mol_type = other RNA
gggtctgagtgtgacttcct

SEQ ID NO: 15706 - RNA, 20 nt, synthetic construct
  source 1..20: mol_type = other RNA
gggtcttgtttcctgcaaaa

SEQ ID NO: 15707 - RNA, 20 nt, synthetic construct
  source 1..20: mol_type = other RNA
gggtgaggaaaagtctggag

SEQ ID NO: 15708 - RNA, 20 nt, synthetic construct
  source 1..20: mol_type = other RNA
gggtgagtgatctcacagga

SEQ ID NO: 15709 - RNA, 20 nt, synthetic construct
  source 1..20: mol_type = other RNA
gggtgtaagcttgccttggg

SEQ ID NO: 15710 - RNA, 20 nt, synthetic construct
  source 1..20: mol_type = other RNA
gggtgtggctatcaagttct

SEQ ID NO: 15711 - RNA, 20 nt, synthetic construct
  source 1..20: mol_type = other RNA
gggttatgcttgaggtgttc

SEQ ID NO: 15712 - RNA, 20 nt, synthetic construct
  source 1..20: mol_type = other RNA
gggttgatactgaagaattg

SEQ ID NO: 15713 - RNA, 20 nt, synthetic construct
  source 1..20: mol_type = other RNA
gggttgctgtgtttgctgct

SEQ ID NO: 15714 - RNA, 20 nt, synthetic construct
  source 1..20: mol_type = other RNA
gggtttttggaactggagat

SEQ ID NO: 15715 - RNA, 20 nt, synthetic construct
  source 1..20: mol_type = other RNA
ggtaaacctgaggcaccacc

SEQ ID NO: 15716 - RNA, 20 nt, synthetic construct
  source 1..20: mol_type = other RNA
ggtaaatggtctgttttgga

SEQ ID NO: 15717 - RNA, 20 nt, synthetic construct
  source 1..20: mol_type = other RNA
ggtaactaagcaagagaatc

SEQ ID NO: 15718 - RNA, 20 nt, synthetic construct
  source 1..20: mol_type = other RNA
ggtaagccaagaaagaaatc

SEQ ID NO: 15719 - RNA, 20 nt, synthetic construct
  source 1..20: mol_type = other RNA
ggtaagtgccagaaatgtac

SEQ ID NO: 15720 - RNA, 20 nt, synthetic construct
  source 1..20: mol_type = other RNA
ggtaattagcacttttcccc

SEQ ID NO: 15721 - RNA, 20 nt, synthetic construct
  source 1..20: mol_type = other RNA
ggtacagtggaccaacatct

SEQ ID NO: 15722 - RNA, 20 nt, synthetic construct
  source 1..20: mol_type = other RNA
ggtacatttgtgacttgtgc

SEQ ID NO: 15723 - RNA, 20 nt, synthetic construct
  source 1..20: mol_type = other RNA
ggtacttgatacataaccat

SEQ ID NO: 15724 - RNA, 20 nt, synthetic construct
  source 1..20: mol_type = other RNA
ggtagcagtggagagctaca

SEQ ID NO: 15725 - RNA, 20 nt, synthetic construct
  source 1..20: mol_type = other RNA
ggtagtggcagaaaaggaat

SEQ ID NO: 15726 - RNA, 20 nt, synthetic construct
  source 1..20: mol_type = other RNA
ggtagtggtggtgttcttct

SEQ ID NO: 15727 - RNA, 20 nt, synthetic construct
  source 1..20: mol_type = other RNA
ggtatcaggaatggacttag

SEQ ID NO: 15728 - RNA, 20 nt, synthetic construct
  source 1..20: mol_type = other RNA
ggtatgcgatgggtgagtga

SEQ ID NO: 15729 - RNA, 20 nt, synthetic construct
  source 1..20: mol_type = other RNA
ggtattccaagtgtttgcaa

SEQ ID NO: 15730 - RNA, 20 nt, synthetic construct
  source 1..20: mol_type = other RNA
ggtattccataataactttt

SEQ ID NO: 15731 - RNA, 20 nt, synthetic construct
  source 1..20: mol_type = other RNA
ggtatttagcattgcagcta

SEQ ID NO: 15732 - RNA, 20 nt, synthetic construct
  source 1..20: mol_type = other RNA
ggtcaaataacgacttggcg

SEQ ID NO: 15733 - RNA, 20 nt, synthetic construct
  source 1..20: mol_type = other RNA
ggtcaacaagctgcgcaact

SEQ ID NO: 15734 - RNA, 20 nt, synthetic construct
  source 1..20: mol_type = other RNA
ggtcaggcacaggaaaaaca

SEQ ID NO: 15735 - RNA, 20 nt, synthetic construct
  source 1..20: mol_type = other RNA
ggtcatttgattggagagat

SEQ ID NO: 15736 - RNA, 20 nt, synthetic construct
  source 1..20: mol_type = other RNA
ggtccactgtaccttgggac

SEQ ID NO: 15737 - RNA, 20 nt, synthetic construct
  source 1..20: mol_type = other RNA
ggtcgagacaaggagcaaac

SEQ ID NO: 15738 - RNA, 20 nt, synthetic construct
  source 1..20: mol_type = other RNA
ggtctcaatgatgctctttt

SEQ ID NO: 15739 - RNA, 20 nt, synthetic construct
  source 1..20: mol_type = other RNA
ggtctgactataaggggaat

SEQ ID NO: 15740 - RNA, 20 nt, synthetic construct
  source 1..20: mol_type = other RNA
ggtctgagtgtgacttcctc

SEQ ID NO: 15741 - RNA, 20 nt, synthetic construct
  source 1..20: mol_type = other RNA
ggtctgtgcggaattgatct

SEQ ID NO: 15742 - RNA, 20 nt, synthetic construct
  source 1..20: mol_type = other RNA
ggtctgttttggagaagtgc

SEQ ID NO: 15743 - RNA, 20 nt, synthetic construct
  source 1..20: mol_type = other RNA
ggtcttgtttcaatttcttg

SEQ ID NO: 15744 - RNA, 20 nt, synthetic construct
  source 1..20: mol_type = other RNA
ggtcttgtttcctgcaaaaa

SEQ ID NO: 15745 - RNA, 20 nt, synthetic construct
  source 1..20: mol_type = other RNA
ggtcttgttttctcagaaca

SEQ ID NO: 15746 - RNA, 20 nt, synthetic construct
  source 1..20: mol_type = other RNA
ggtgaaaacgaggggccttc

SEQ ID NO: 15747 - RNA, 20 nt, synthetic construct
  source 1..20: mol_type = other RNA
ggtgaaaatcagtattcaaa

SEQ ID NO: 15748 - RNA, 20 nt, synthetic construct
  source 1..20: mol_type = other RNA
ggtgaaagcagtcaaccaaa

SEQ ID NO: 15749 - RNA, 20 nt, synthetic construct
  source 1..20: mol_type = other RNA
ggtgaaatctttaactgcat

SEQ ID NO: 15750 - RNA, 20 nt, synthetic construct
  source 1..20: mol_type = other RNA
ggtgaactcctggaaaaaac

SEQ ID NO: 15751 - RNA, 20 nt, synthetic construct
  source 1..20: mol_type = other RNA
ggtgaagaattctgttcagg

SEQ ID NO: 15752 - RNA, 20 nt, synthetic construct
  source 1..20: mol_type = other RNA
ggtgactctataaaattatt

SEQ ID NO: 15753 - RNA, 20 nt, synthetic construct
  source 1..20: mol_type = other RNA
ggtgaggaaaagtctggagt

SEQ ID NO: 15754 - RNA, 20 nt, synthetic construct
  source 1..20: mol_type = other RNA
ggtgagtgaggcctgtgatg

SEQ ID NO: 15755 - RNA, 20 nt, synthetic construct
  source 1..20: mol_type = other RNA
ggtgagtgatctcacaggac

SEQ ID NO: 15756 - RNA, 20 nt, synthetic construct
  source 1..20: mol_type = other RNA
ggtgatggtatcaggaatgg

SEQ ID NO: 15757 - RNA, 20 nt, synthetic construct
  source 1..20: mol_type = other RNA
ggtgcacttctccaaaacag

SEQ ID NO: 15758 - RNA, 20 nt, synthetic construct
  source 1..20: mol_type = other RNA
ggtgcagaaaaccacatctc

SEQ ID NO: 15759 - RNA, 20 nt, synthetic construct
  source 1..20: mol_type = other RNA
ggtgcctcaggtttaccctc

SEQ ID NO: 15760 - RNA, 20 nt, synthetic construct
  source 1..20: mol_type = other RNA
ggtgctacagtttctgcctc

SEQ ID NO: 15761 - RNA, 20 nt, synthetic construct
  source 1..20: mol_type = other RNA
ggtgctgtgtgcatacaggc

SEQ ID NO: 15762 - RNA, 20 nt, synthetic construct
  source 1..20: mol_type = other RNA
ggtgcttacttcaagcaaag

SEQ ID NO: 15763 - RNA, 20 nt, synthetic construct
  source 1..20: mol_type = other RNA
ggtgctttcaagaacaggag

SEQ ID NO: 15764 - RNA, 20 nt, synthetic construct
  source 1..20: mol_type = other RNA
ggtggaacctggatgcaagc

SEQ ID NO: 15765 - RNA, 20 nt, synthetic construct
  source 1..20: mol_type = other RNA
ggtggagttttagaagaaca

SEQ ID NO: 15766 - RNA, 20 nt, synthetic construct
  source 1..20: mol_type = other RNA
ggtggattctcttgcttagt

SEQ ID NO: 15767 - RNA, 20 nt, synthetic construct
  source 1..20: mol_type = other RNA
ggtggcagctctgaacggta

SEQ ID NO: 15768 - RNA, 20 nt, synthetic construct
  source 1..20: mol_type = other RNA
ggtggcatctcttacagaag

SEQ ID NO: 15769 - RNA, 20 nt, synthetic construct
  source 1..20: mol_type = other RNA
ggtgggttatgcttgaggtg

SEQ ID NO: 15770 - RNA, 20 nt, synthetic construct
  source 1..20: mol_type = other RNA
ggtggtgcctcaggtttacc

SEQ ID NO: 15771 - RNA, 20 nt, synthetic construct
  source 1..20: mol_type = other RNA
ggtggtgctgtgtgcataca

SEQ ID NO: 15772 - RNA, 20 nt, synthetic construct
  source 1..20: mol_type = other RNA
ggtggtggtggtgtggtagt

SEQ ID NO: 15773 - RNA, 20 nt, synthetic construct
  source 1..20: mol_type = other RNA
ggtggtggtgtggtagtggc

SEQ ID NO: 15774 - RNA, 20 nt, synthetic construct
  source 1..20: mol_type = other RNA
ggtggtgtggtagtggcaga

SEQ ID NO: 15775 - RNA, 20 nt, synthetic construct
  source 1..20: mol_type = other RNA
ggtggtgttcttctaaaact

SEQ ID NO: 15776 - RNA, 20 nt, synthetic construct
  source 1..20: mol_type = other RNA
ggtgtaagcttgccttggga

SEQ ID NO: 15777 - RNA, 20 nt, synthetic construct
  source 1..20: mol_type = other RNA
ggtgtatccaataaattttt

SEQ ID NO: 15778 - RNA, 20 nt, synthetic construct
  source 1..20: mol_type = other RNA
ggtgtctccatttacttctg

SEQ ID NO: 15779 - RNA, 20 nt, synthetic construct
  source 1..20: mol_type = other RNA
ggtgtcttttctgaagaagt

SEQ ID NO: 15780 - RNA, 20 nt, synthetic construct
  source 1..20: mol_type = other RNA
ggtgtgagggtttttggaac

SEQ ID NO: 15781 - RNA, 20 nt, synthetic construct
  source 1..20: mol_type = other RNA
ggtgtgagtttgaaaatggc

SEQ ID NO: 15782 - RNA, 20 nt, synthetic construct
  source 1..20: mol_type = other RNA
ggtgtggctatcaagttctg

SEQ ID NO: 15783 - RNA, 20 nt, synthetic construct
  source 1..20: mol_type = other RNA
ggtgtggtagtggcagaaaa

SEQ ID NO: 15784 - RNA, 20 nt, synthetic construct
  source 1..20: mol_type = other RNA
ggtgtgtattgtttgaacaa

SEQ ID NO: 15785 - RNA, 20 nt, synthetic construct
  source 1..20: mol_type = other RNA
ggtgttctgacattggtctt

SEQ ID NO: 15786 - RNA, 20 nt, synthetic construct
  source 1..20: mol_type = other RNA
ggtgttcttctaaaactcca

SEQ ID NO: 15787 - RNA, 20 nt, synthetic construct
  source 1..20: mol_type = other RNA
ggttatgcttgaggtgttct

SEQ ID NO: 15788 - RNA, 20 nt, synthetic construct
  source 1..20: mol_type = other RNA
ggttatgtatcaagtacctt

SEQ ID NO: 15789 - RNA, 20 nt, synthetic construct
  source 1..20: mol_type = other RNA
ggttcactaactgtgcgttt

SEQ ID NO: 15790 - RNA, 20 nt, synthetic construct
  source 1..20: mol_type = other RNA
ggttccaccttaattggcct

SEQ ID NO: 15791 - RNA, 20 nt, synthetic construct
  source 1..20: mol_type = other RNA
ggttccagcagcaatttgca

SEQ ID NO: 15792 - RNA, 20 nt, synthetic construct
  source 1..20: mol_type = other RNA
ggttccctggatgttatttt

SEQ ID NO: 15793 - RNA, 20 nt, synthetic construct
  source 1..20: mol_type = other RNA
ggttcctcagcttccttcag

SEQ ID NO: 15794 - RNA, 20 nt, synthetic construct
  source 1..20: mol_type = other RNA
ggttctatcctgttccatca

SEQ ID NO: 15795 - RNA, 20 nt, synthetic construct
  source 1..20: mol_type = other RNA
ggttctgtctggcaaatggg

SEQ ID NO: 15796 - RNA, 20 nt, synthetic construct
  source 1..20: mol_type = other RNA
ggttgactgctttcacctgg

SEQ ID NO: 15797 - RNA, 20 nt, synthetic construct
  source 1..20: mol_type = other RNA
ggttgatactgaagaattga

SEQ ID NO: 15798 - RNA, 20 nt, synthetic construct
  source 1..20: mol_type = other RNA
ggttgctgtgtttgctgctg

SEQ ID NO: 15799 - RNA, 20 nt, synthetic construct
  source 1..20: mol_type = other RNA
ggttggggtagtggtggtgt

SEQ ID NO: 15800 - RNA, 20 nt, synthetic construct
  source 1..20: mol_type = other RNA
ggttggtgtcttttctgaag

SEQ ID NO: 15801 - RNA, 20 nt, synthetic construct
  source 1..20: mol_type = other RNA
ggttggttctatcctgttcc

SEQ ID NO: 15802 - RNA, 20 nt, synthetic construct
  source 1..20: mol_type = other RNA
ggttgtgtttgtgctgcctg

SEQ ID NO: 15803 - RNA, 20 nt, synthetic construct
  source 1..20: mol_type = other RNA
ggtttaccctctattttcac

SEQ ID NO: 15804 - RNA, 20 nt, synthetic construct
  source 1..20: mol_type = other RNA
ggtttcagatagtgctgtgt

SEQ ID NO: 15805 - RNA, 20 nt, synthetic construct
  source 1..20: mol_type = other RNA
ggtttctatttttatatccc

SEQ ID NO: 15806 - RNA, 20 nt, synthetic construct
  source 1..20: mol_type = other RNA
ggtttctgaaaggaacaggt

SEQ ID NO: 15807 - RNA, 20 nt, synthetic construct
  source 1..20: mol_type = other RNA
ggtttcttgttcaaacaata

SEQ ID NO: 15808 - RNA, 20 nt, synthetic construct
  source 1..20: mol_type = other RNA
ggtttgtctagtcaaaactg

SEQ ID NO: 15809 - RNA, 20 nt, synthetic construct
  source 1..20: mol_type = other RNA
ggttttctgcaccgcaatgg

SEQ ID NO: 15810 - RNA, 20 nt, synthetic construct
  source 1..20: mol_type = other RNA
ggttttgagggagatgtgaa

SEQ ID NO: 15811 - RNA, 20 nt, synthetic construct
  source 1..20: mol_type = other RNA
ggtttttggaactggagatg

SEQ ID NO: 15812 - RNA, 20 nt, synthetic construct
  source 1..20: mol_type = other RNA
gtaaaagttgaaatgtcagg

SEQ ID NO: 15813 - RNA, 20 nt, synthetic construct
  source 1..20: mol_type = other RNA
gtaaacctgaggcaccacct

SEQ ID NO: 15814 - RNA, 20 nt, synthetic construct
  source 1..20: mol_type = other RNA
gtaaactagctgcaatgcta

SEQ ID NO: 15815 - RNA, 20 nt, synthetic construct
  source 1..20: mol_type = other RNA
gtaaagtcaggactcacacg

SEQ ID NO: 15816 - RNA, 20 nt, synthetic construct
  source 1..20: mol_type = other RNA
gtaaatggagacaccaagtg

SEQ ID NO: 15817 - RNA, 20 nt, synthetic construct
  source 1..20: mol_type = other RNA
gtaaatggtctgttttggag

SEQ ID NO: 15818 - RNA, 20 nt, synthetic construct
  source 1..20: mol_type = other RNA
gtaacacaacacttttaagg

SEQ ID NO: 15819 - RNA, 20 nt, synthetic construct
  source 1..20: mol_type = other RNA
gtaactaagcaagagaatcc

SEQ ID NO: 15820 - RNA, 20 nt, synthetic construct
  source 1..20: mol_type = other RNA
gtaacttcggggtaagccaa

SEQ ID NO: 15821 - RNA, 20 nt, synthetic construct
  source 1..20: mol_type = other RNA
gtaagagatgccaccttaga

SEQ ID NO: 15822 - RNA, 20 nt, synthetic construct
  source 1..20: mol_type = other RNA
gtaagagccttatggtcaaa

SEQ ID NO: 15823 - RNA, 20 nt, synthetic construct
  source 1..20: mol_type = other RNA
gtaagcaccattcatttcat

SEQ ID NO: 15824 - RNA, 20 nt, synthetic construct
  source 1..20: mol_type = other RNA
gtaagccaagaaagaaatcc

SEQ ID NO: 15825 - RNA, 20 nt, synthetic construct
  source 1..20: mol_type = other RNA
gtaagcttgccttgggagcc

SEQ ID NO: 15826 - RNA, 20 nt, synthetic construct
  source 1..20: mol_type = other RNA
gtaagtgccagaaatgtact

SEQ ID NO: 15827 - RNA, 20 nt, synthetic construct
  source 1..20: mol_type = other RNA
gtaatacaatgttcttgtca

SEQ ID NO: 15828 - RNA, 20 nt, synthetic construct
  source 1..20: mol_type = other RNA
gtaatgaggcatcactgcca

SEQ ID NO: 15829 - RNA, 20 nt, synthetic construct
  source 1..20: mol_type = other RNA
gtaattagcacttttcccct

SEQ ID NO: 15830 - RNA, 20 nt, synthetic construct
  source 1..20: mol_type = other RNA
gtaatttggaaggtgactct

SEQ ID NO: 15831 - RNA, 20 nt, synthetic construct
  source 1..20: mol_type = other RNA
gtaatttttgctgctgttgc

SEQ ID NO: 15832 - RNA, 20 nt, synthetic construct
  source 1..20: mol_type = other RNA
gtacagaatataaatcgtag

SEQ ID NO: 15833 - RNA, 20 nt, synthetic construct
  source 1..20: mol_type = other RNA
gtacagtggaccaacatctc

SEQ ID NO: 15834 - RNA, 20 nt, synthetic construct
  source 1..20: mol_type = other RNA
gtacatttctggcacttacc

SEQ ID NO: 15835 - RNA, 20 nt, synthetic construct
  source 1..20: mol_type = other RNA
gtacatttgtgacttgtgct

SEQ ID NO: 15836 - RNA, 20 nt, synthetic construct
  source 1..20: mol_type = other RNA
gtaccaagttgaaatgaatc

SEQ ID NO: 15837 - RNA, 20 nt, synthetic construct
  source 1..20: mol_type = other RNA
gtaccttgggactgcccttg

SEQ ID NO: 15838 - RNA, 20 nt, synthetic construct
  source 1..20: mol_type = other RNA
gtacctttgctgagcaagtt

SEQ ID NO: 15839 - RNA, 20 nt, synthetic construct
  source 1..20: mol_type = other RNA
gtacttcctccagtcccatt

SEQ ID NO: 15840 - RNA, 20 nt, synthetic construct
  source 1..20: mol_type = other RNA
gtacttgatacataaccatg

SEQ ID NO: 15841 - RNA, 20 nt, synthetic construct
  source 1..20: mol_type = other RNA
gtagaaattccccttatagt

SEQ ID NO: 15842 - RNA, 20 nt, synthetic construct
  source 1..20: mol_type = other RNA
gtagaactgaagcttgttgt

SEQ ID NO: 15843 - RNA, 20 nt, synthetic construct
  source 1..20: mol_type = other RNA
gtagagggtattccaagtgt

SEQ ID NO: 15844 - RNA, 20 nt, synthetic construct
  source 1..20: mol_type = other RNA
gtagatggattaggactctg

SEQ ID NO: 15845 - RNA, 20 nt, synthetic construct
  source 1..20: mol_type = other RNA
gtagcaccattaggcattag

SEQ ID NO: 15846 - RNA, 20 nt, synthetic construct
  source 1..20: mol_type = other RNA
gtagcagtggagagctacag

SEQ ID NO: 15847 - RNA, 20 nt, synthetic construct
  source 1..20: mol_type = other RNA
gtagccagaggttctgtctg

SEQ ID NO: 15848 - RNA, 20 nt, synthetic construct
  source 1..20: mol_type = other RNA
gtagcccaagaaaatgcagt

SEQ ID NO: 15849 - RNA, 20 nt, synthetic construct
  source 1..20: mol_type = other RNA
gtagcctgactgttaatggc

SEQ ID NO: 15850 - RNA, 20 nt, synthetic construct
  source 1..20: mol_type = other RNA
gtagctctccactgctacca

SEQ ID NO: 15851 - RNA, 20 nt, synthetic construct
  source 1..20: mol_type = other RNA
gtaggtaagtgccagaaatg

SEQ ID NO: 15852 - RNA, 20 nt, synthetic construct
  source 1..20: mol_type = other RNA
gtagtctgttctttattctc

SEQ ID NO: 15853 - RNA, 20 nt, synthetic construct
  source 1..20: mol_type = other RNA
gtagtggcagaaaaggaatc

SEQ ID NO: 15854 - RNA, 20 nt, synthetic construct
  source 1..20: mol_type = other RNA
gtagtggtggtgttcttcta

SEQ ID NO: 15855 - RNA, 20 nt, synthetic construct
  source 1..20: mol_type = other RNA
gtagttgttctggtttctga

SEQ ID NO: 15856 - RNA, 20 nt, synthetic construct
  source 1..20: mol_type = other RNA
gtatcaacccaatctctcca

SEQ ID NO: 15857 - RNA, 20 nt, synthetic construct
  source 1..20: mol_type = other RNA
gtatcaagtacctttgctga

SEQ ID NO: 15858 - RNA, 20 nt, synthetic construct
  source 1..20: mol_type = other RNA
gtatcaggaatggacttagt

SEQ ID NO: 15859 - RNA, 20 nt, synthetic construct
  source 1..20: mol_type = other RNA
gtatctagtaatttggaagg

SEQ ID NO: 15860 - RNA, 20 nt, synthetic construct
  source 1..20: mol_type = other RNA
gtatgaagggaagccagaat

SEQ ID NO: 15861 - RNA, 20 nt, synthetic construct
  source 1..20: mol_type = other RNA
gtatgcacacagcaccacca

SEQ ID NO: 15862 - RNA, 20 nt, synthetic construct
  source 1..20: mol_type = other RNA
gtatgcagcccttctccgat

SEQ ID NO: 15863 - RNA, 20 nt, synthetic construct
  source 1..20: mol_type = other RNA
gtatgcgatgggtgagtgat

SEQ ID NO: 15864 - RNA, 20 nt, synthetic construct
  source 1..20: mol_type = other RNA
gtatgtcattcctgttcaca

SEQ ID NO: 15865 - RNA, 20 nt, synthetic construct
  source 1..20: mol_type = other RNA
gtattacttaaaaacaaggc

SEQ ID NO: 15866 - RNA, 20 nt, synthetic construct
  source 1..20: mol_type = other RNA
gtattcaaaatcaagcgagt

SEQ ID NO: 15867 - RNA, 20 nt, synthetic construct
  source 1..20: mol_type = other RNA
gtattccaagtgtttgcaaa

SEQ ID NO: 15868 - RNA, 20 nt, synthetic construct
  source 1..20: mol_type = other RNA
gtattccataataacttttg

SEQ ID NO: 15869 - RNA, 20 nt, synthetic construct
  source 1..20: mol_type = other RNA
gtattgtttgaacaagaaac

SEQ ID NO: 15870 - RNA, 20 nt, synthetic construct
  source 1..20: mol_type = other RNA
gtattgtttggaggtcattt

SEQ ID NO: 15871 - RNA, 20 nt, synthetic construct
  source 1..20: mol_type = other RNA
gtatttagcattgcagctag

SEQ ID NO: 15872 - RNA, 20 nt, synthetic construct
  source 1..20: mol_type = other RNA
gtatttcctctttattcttt

SEQ ID NO: 15873 - RNA, 20 nt, synthetic construct
  source 1..20: mol_type = other RNA
gtattttgcatgcacttgat

SEQ ID NO: 15874 - RNA, 20 nt, synthetic construct
  source 1..20: mol_type = other RNA
gtcaaaactgtgactggccc

SEQ ID NO: 15875 - RNA, 20 nt, synthetic construct
  source 1..20: mol_type = other RNA
gtcaaataacgacttggcgt

SEQ ID NO: 15876 - RNA, 20 nt, synthetic construct
  source 1..20: mol_type = other RNA
gtcaacaagctgcgcaactt

SEQ ID NO: 15877 - RNA, 20 nt, synthetic construct
  source 1..20: mol_type = other RNA
gtcaaccaaatgtctccgat

SEQ ID NO: 15878 - RNA, 20 nt, synthetic construct
  source 1..20: mol_type = other RNA
gtcaagactcaatatgattt

SEQ ID NO: 15879 - RNA, 20 nt, synthetic construct
  source 1..20: mol_type = other RNA
gtcacaaatgtaccaagttg

SEQ ID NO: 15880 - RNA, 20 nt, synthetic construct
  source 1..20: mol_type = other RNA
gtcacaacaagcttcagttc

SEQ ID NO: 15881 - RNA, 20 nt, synthetic construct
  source 1..20: mol_type = other RNA
gtcacactcagacccctccc

SEQ ID NO: 15882 - RNA, 20 nt, synthetic construct
  source 1..20: mol_type = other RNA
gtcacagttttgactagaca

SEQ ID NO: 15883 - RNA, 20 nt, synthetic construct
  source 1..20: mol_type = other RNA
gtcaccttccaaattactag

SEQ ID NO: 15884 - RNA, 20 nt, synthetic construct
  source 1..20: mol_type = other RNA
gtcactgtgtggcactagat

SEQ ID NO: 15885 - RNA, 20 nt, synthetic construct
  source 1..20: mol_type = other RNA
gtcagaacacctcaagcata

SEQ ID NO: 15886 - RNA, 20 nt, synthetic construct
  source 1..20: mol_type = other RNA
gtcagaccatgaaatcaagt

SEQ ID NO: 15887 - RNA, 20 nt, synthetic construct
  source 1..20: mol_type = other RNA
gtcagatgcacaggccaatt

SEQ ID NO: 15888 - RNA, 20 nt, synthetic construct
  source 1..20: mol_type = other RNA
gtcaggactcacacgactat

SEQ ID NO: 15889 - RNA, 20 nt, synthetic construct
  source 1..20: mol_type = other RNA
gtcaggcacaggaaaaacat

SEQ ID NO: 15890 - RNA, 20 nt, synthetic construct
  source 1..20: mol_type = other RNA
gtcaggctactaatgagttg

SEQ ID NO: 15891 - RNA, 20 nt, synthetic construct
  source 1..20: mol_type = other RNA
gtcagggccagtcacagttt

SEQ ID NO: 15892 - RNA, 20 nt, synthetic construct
  source 1..20: mol_type = other RNA
gtcatggtaattagcacttt

SEQ ID NO: 15893 - RNA, 20 nt, synthetic construct
  source 1..20: mol_type = other RNA
gtcattcctgttcacacaat

SEQ ID NO: 15894 - RNA, 20 nt, synthetic construct
  source 1..20: mol_type = other RNA
gtcattgtccctgcagtctg

SEQ ID NO: 15895 - RNA, 20 nt, synthetic construct
  source 1..20: mol_type = other RNA
gtcatttgattggagagatt

SEQ ID NO: 15896 - RNA, 20 nt, synthetic construct
  source 1..20: mol_type = other RNA
gtccaaatgggactggagga

SEQ ID NO: 15897 - RNA, 20 nt, synthetic construct
  source 1..20: mol_type = other RNA
gtccactgtaccttgggact

SEQ ID NO: 15898 - RNA, 20 nt, synthetic construct
  source 1..20: mol_type = other RNA
gtccattcctgataccatca

SEQ ID NO: 15899 - RNA, 20 nt, synthetic construct
  source 1..20: mol_type = other RNA
gtcccaaggtacagtggacc

SEQ ID NO: 15900 - RNA, 20 nt, synthetic construct
  source 1..20: mol_type = other RNA
gtcccatttggacattatga

SEQ ID NO: 15901 - RNA, 20 nt, synthetic construct
  source 1..20: mol_type = other RNA
gtccccagtgttgaaacagc

SEQ ID NO: 15902 - RNA, 20 nt, synthetic construct
  source 1..20: mol_type = other RNA
gtccctgcagtctgtatgtc

SEQ ID NO: 15903 - RNA, 20 nt, synthetic construct
  source 1..20: mol_type = other RNA
gtcctaatccatctacacat

SEQ ID NO: 15904 - RNA, 20 nt, synthetic construct
  source 1..20: mol_type = other RNA
gtcctgactttacacaagaa

SEQ ID NO: 15905 - RNA, 20 nt, synthetic construct
  source 1..20: mol_type = other RNA
gtcctgtagctctccactgc

SEQ ID NO: 15906 - RNA, 20 nt, synthetic construct
  source 1..20: mol_type = other RNA
gtcctgtgagatcactcacc

SEQ ID NO: 15907 - RNA, 20 nt, synthetic construct
  source 1..20: mol_type = other RNA
gtccttctggggaggggtct

SEQ ID NO: 15908 - RNA, 20 nt, synthetic construct
  source 1..20: mol_type = other RNA
gtcgagacaaggagcaaaca

SEQ ID NO: 15909 - RNA, 20 nt, synthetic construct
  source 1..20: mol_type = other RNA
gtcgtgtgagtcctgacttt

SEQ ID NO: 15910 - RNA, 20 nt, synthetic construct
  source 1..20: mol_type = other RNA
gtcgttatttgaccataagg

SEQ ID NO: 15911 - RNA, 20 nt, synthetic construct
  source 1..20: mol_type = other RNA
gtctagtcaaaactgtgact

SEQ ID NO: 15912 - RNA, 20 nt, synthetic construct
  source 1..20: mol_type = other RNA
gtctcaatattatccagatt

SEQ ID NO: 15913 - RNA, 20 nt, synthetic construct
  source 1..20: mol_type = other RNA
gtctcaatgatgctcttttg

SEQ ID NO: 15914 - RNA, 20 nt, synthetic construct
  source 1..20: mol_type = other RNA
gtctcagtacatttctggca

SEQ ID NO: 15915 - RNA, 20 nt, synthetic construct
  source 1..20: mol_type = other RNA
gtctccatttacttctggat

SEQ ID NO: 15916 - RNA, 20 nt, synthetic construct
  source 1..20: mol_type = other RNA
gtctccgatttgagtgataa

SEQ ID NO: 15917 - RNA, 20 nt, synthetic construct
  source 1..20: mol_type = other RNA
gtctcgaactcgcttgattt

SEQ ID NO: 15918 - RNA, 20 nt, synthetic construct
  source 1..20: mol_type = other RNA
gtctcgacccttcagaatct

SEQ ID NO: 15919 - RNA, 20 nt, synthetic construct
  source 1..20: mol_type = other RNA
gtctctgaagcctgttgatt

SEQ ID NO: 15920 - RNA, 20 nt, synthetic construct
  source 1..20: mol_type = other RNA
gtctgactataaggggaatt

SEQ ID NO: 15921 - RNA, 20 nt, synthetic construct
  source 1..20: mol_type = other RNA
gtctgagtgtgacttcctcc

SEQ ID NO: 15922 - RNA, 20 nt, synthetic construct
  source 1..20: mol_type = other RNA
gtctggagtatttcctcttt

SEQ ID NO: 15923 - RNA, 20 nt, synthetic construct
  source 1..20: mol_type = other RNA
gtctggcaaatgggaggtga

SEQ ID NO: 15924 - RNA, 20 nt, synthetic construct
  source 1..20: mol_type = other RNA
gtctggccaaagaatgatcc

SEQ ID NO: 15925 - RNA, 20 nt, synthetic construct
  source 1..20: mol_type = other RNA
gtctggtcaacaagctgcgc

SEQ ID NO: 15926 - RNA, 20 nt, synthetic construct
  source 1..20: mol_type = other RNA
gtctggtgaagaattctgtt

SEQ ID NO: 15927 - RNA, 20 nt, synthetic construct
  source 1..20: mol_type = other RNA
gtctgtatgtcattcctgtt

SEQ ID NO: 15928 - RNA, 20 nt, synthetic construct
  source 1..20: mol_type = other RNA
gtctgtgcggaattgatctg

SEQ ID NO: 15929 - RNA, 20 nt, synthetic construct
  source 1..20: mol_type = other RNA
gtctgttctttattctctga

SEQ ID NO: 15930 - RNA, 20 nt, synthetic construct
  source 1..20: mol_type = other RNA
gtctgttgccctcaacatgg

SEQ ID NO: 15931 - RNA, 20 nt, synthetic construct
  source 1..20: mol_type = other RNA
gtctgttttggagaagtgca

SEQ ID NO: 15932 - RNA, 20 nt, synthetic construct
  source 1..20: mol_type = other RNA
gtcttgacaggtgtatccaa

SEQ ID NO: 15933 - RNA, 20 nt, synthetic construct
  source 1..20: mol_type = other RNA
gtcttgccatagtcagatgc

SEQ ID NO: 15934 - RNA, 20 nt, synthetic construct
  source 1..20: mol_type = other RNA
gtcttgtttcaatttcttga

SEQ ID NO: 15935 - RNA, 20 nt, synthetic construct
  source 1..20: mol_type = other RNA
gtcttgtttcctgcaaaaag

SEQ ID NO: 15936 - RNA, 20 nt, synthetic construct
  source 1..20: mol_type = other RNA
gtcttgttttctcagaacac

SEQ ID NO: 15937 - RNA, 20 nt, synthetic construct
  source 1..20: mol_type = other RNA
gtctttctccattagccttt

SEQ ID NO: 15938 - RNA, 20 nt, synthetic construct
  source 1..20: mol_type = other RNA
gtcttttctgaagaagttgt

SEQ ID NO: 15939 - RNA, 20 nt, synthetic construct
  source 1..20: mol_type = other RNA
gtgaaaacgaggggccttca

SEQ ID NO: 15940 - RNA, 20 nt, synthetic construct
  source 1..20: mol_type = other RNA
gtgaaaatagagggtaaacc

SEQ ID NO: 15941 - RNA, 20 nt, synthetic construct
  source 1..20: mol_type = other RNA
gtgaaaatcagtattcaaaa

SEQ ID NO: 15942 - RNA, 20 nt, synthetic construct
  source 1..20: mol_type = other RNA
gtgaaactgcttcagatgct

SEQ ID NO: 15943 - RNA, 20 nt, synthetic construct
  source 1..20: mol_type = other RNA
gtgaaagcagtcaaccaaat

SEQ ID NO: 15944 - RNA, 20 nt, synthetic construct
  source 1..20: mol_type = other RNA
gtgaaatctttaactgcatt

SEQ ID NO: 15945 - RNA, 20 nt, synthetic construct
  source 1..20: mol_type = other RNA
gtgaacactgagctttgctt

SEQ ID NO: 15946 - RNA, 20 nt, synthetic construct
  source 1..20: mol_type = other RNA
gtgaacaggaatgacataca

SEQ ID NO: 15947 - RNA, 20 nt, synthetic construct
  source 1..20: mol_type = other RNA
gtgaaccttctctctctggg

SEQ ID NO: 15948 - RNA, 20 nt, synthetic construct
  source 1..20: mol_type = other RNA
gtgaactcctggaaaaaaca

SEQ ID NO: 15949 - RNA, 20 nt, synthetic construct
  source 1..20: mol_type = other RNA
gtgaactctgggatggttgt

SEQ ID NO: 15950 - RNA, 20 nt, synthetic construct
  source 1..20: mol_type = other RNA
gtgaagaagatcttgctttg

SEQ ID NO: 15951 - RNA, 20 nt, synthetic construct
  source 1..20: mol_type = other RNA
gtgaagaattctgttcaggt

SEQ ID NO: 15952 - RNA, 20 nt, synthetic construct
  source 1..20: mol_type = other RNA
gtgactctataaaattattg

SEQ ID NO: 15953 - RNA, 20 nt, synthetic construct
  source 1..20: mol_type = other RNA
gtgactgcacatgagctttt

SEQ ID NO: 15954 - RNA, 20 nt, synthetic construct
  source 1..20: mol_type = other RNA
gtgactggccctgacatttc

SEQ ID NO: 15955 - RNA, 20 nt, synthetic construct
  source 1..20: mol_type = other RNA
gtgacttcctccctggtcag

SEQ ID NO: 15956 - RNA, 20 nt, synthetic construct
  source 1..20: mol_type = other RNA
gtgacttctgctcctgttct

SEQ ID NO: 15957 - RNA, 20 nt, synthetic construct
  source 1..20: mol_type = other RNA
gtgacttgtgctccagctgt

SEQ ID NO: 15958 - RNA, 20 nt, synthetic construct
  source 1..20: mol_type = other RNA
gtgagatcactcacccatcg

SEQ ID NO: 15959 - RNA, 20 nt, synthetic construct
  source 1..20: mol_type = other RNA
gtgagatgtggttttctgca

SEQ ID NO: 15960 - RNA, 20 nt, synthetic construct
  source 1..20: mol_type = other RNA
gtgaggaaaagtctggagta

SEQ ID NO: 15961 - RNA, 20 nt, synthetic construct
  source 1..20: mol_type = other RNA
gtgaggcctgtgatgctgat

SEQ ID NO: 15962 - RNA, 20 nt, synthetic construct
  source 1..20: mol_type = other RNA
gtgagggtttttggaactgg

SEQ ID NO: 15963 - RNA, 20 nt, synthetic construct
  source 1..20: mol_type = other RNA
gtgagtcctgactttacaca

SEQ ID NO: 15964 - RNA, 20 nt, synthetic construct
  source 1..20: mol_type = other RNA
gtgagtgaggcctgtgatgc

SEQ ID NO: 15965 - RNA, 20 nt, synthetic construct
  source 1..20: mol_type = other RNA
gtgagtgatctcacaggaca

SEQ ID NO: 15966 - RNA, 20 nt, synthetic construct
  source 1..20: mol_type = other RNA
gtgagttctgtagcccaaga

SEQ ID NO: 15967 - RNA, 20 nt, synthetic construct
  source 1..20: mol_type = other RNA
gtgagtttgaaaatggctca

SEQ ID NO: 15968 - RNA, 20 nt, synthetic construct
  source 1..20: mol_type = other RNA
gtgataagaaagaatctgtg

SEQ ID NO: 15969 - RNA, 20 nt, synthetic construct
  source 1..20: mol_type = other RNA
gtgataatgtgcagcaaaag

SEQ ID NO: 15970 - RNA, 20 nt, synthetic construct
  source 1..20: mol_type = other RNA
gtgatcccaaagcaagatct

SEQ ID NO: 15971 - RNA, 20 nt, synthetic construct
  source 1..20: mol_type = other RNA
gtgatctcacaggacaactc

SEQ ID NO: 15972 - RNA, 20 nt, synthetic construct
  source 1..20: mol_type = other RNA
gtgatgcaagttttgggtct

SEQ ID NO: 15973 - RNA, 20 nt, synthetic construct
  source 1..20: mol_type = other RNA
gtgatgcctcattacgtttt

SEQ ID NO: 15974 - RNA, 20 nt, synthetic construct
  source 1..20: mol_type = other RNA
gtgatgctgatgatgctgat

SEQ ID NO: 15975 - RNA, 20 nt, synthetic construct
  source 1..20: mol_type = other RNA
gtgatggtatcaggaatgga

SEQ ID NO: 15976 - RNA, 20 nt, synthetic construct
  source 1..20: mol_type = other RNA
gtgatggtggtggtggtgtg

SEQ ID NO: 15977 - RNA, 20 nt, synthetic construct
  source 1..20: mol_type = other RNA
gtgatttgagagtaagagcc

SEQ ID NO: 15978 - RNA, 20 nt, synthetic construct
  source 1..20: mol_type = other RNA
gtgcacctggtgtgagggtt

SEQ ID NO: 15979 - RNA, 20 nt, synthetic construct
  source 1..20: mol_type = other RNA
gtgcacttctccaaaacaga

SEQ ID NO: 15980 - RNA, 20 nt, synthetic construct
  source 1..20: mol_type = other RNA
gtgcagaaaaccacatctca

SEQ ID NO: 15981 - RNA, 20 nt, synthetic construct
  source 1..20: mol_type = other RNA
gtgcagcaaaagagcatcat

SEQ ID NO: 15982 - RNA, 20 nt, synthetic construct
  source 1..20: mol_type = other RNA
gtgcagtcactgtgtggcac

SEQ ID NO: 15983 - RNA, 20 nt, synthetic construct
  source 1..20: mol_type = other RNA
gtgcatacaggcatgtggct

SEQ ID NO: 15984 - RNA, 20 nt, synthetic construct
  source 1..20: mol_type = other RNA
gtgcatctgactatggcaag

SEQ ID NO: 15985 - RNA, 20 nt, synthetic construct
  source 1..20: mol_type = other RNA
gtgcatgcaaaatacaggtt

SEQ ID NO: 15986 - RNA, 20 nt, synthetic construct
  source 1..20: mol_type = other RNA
gtgccacacagtgactgcac

SEQ ID NO: 15987 - RNA, 20 nt, synthetic construct
  source 1..20: mol_type = other RNA
gtgccacttggtgtctccat

SEQ ID NO: 15988 - RNA, 20 nt, synthetic construct
  source 1..20: mol_type = other RNA
gtgccagaaatgtactgaga

SEQ ID NO: 15989 - RNA, 20 nt, synthetic construct
  source 1..20: mol_type = other RNA
gtgcccccaacacagcacta

SEQ ID NO: 15990 - RNA, 20 nt, synthetic construct
  source 1..20: mol_type = other RNA
gtgcctcaggtttaccctct

SEQ ID NO: 15991 - RNA, 20 nt, synthetic construct
  source 1..20: mol_type = other RNA
gtgcctgaccagggaggaag

SEQ ID NO: 15992 - RNA, 20 nt, synthetic construct
  source 1..20: mol_type = other RNA
gtgcggaattgatctgccct

SEQ ID NO: 15993 - RNA, 20 nt, synthetic construct
  source 1..20: mol_type = other RNA
gtgcgttttattcctccatt

SEQ ID NO: 15994 - RNA, 20 nt, synthetic construct
  source 1..20: mol_type = other RNA
gtgctaatgcctaatggtgc

SEQ ID NO: 15995 - RNA, 20 nt, synthetic construct
  source 1..20: mol_type = other RNA
gtgctaattaccatgacaag

SEQ ID NO: 15996 - RNA, 20 nt, synthetic construct
  source 1..20: mol_type = other RNA
gtgctacagtttctgcctct

SEQ ID NO: 15997 - RNA, 20 nt, synthetic construct
  source 1..20: mol_type = other RNA
gtgctccagctgtgttgttt

SEQ ID NO: 15998 - RNA, 20 nt, synthetic construct
  source 1..20: mol_type = other RNA
gtgctgcctgtttatgaggc

SEQ ID NO: 15999 - RNA, 20 nt, synthetic construct
  source 1..20: mol_type = other RNA
gtgctgtgtgcatacaggca

SEQ ID NO: 16000 - RNA, 20 nt, synthetic construct
  source 1..20: mol_type = other RNA
gtgctgtgttgggggcacaa

SEQ ID NO: 16001 - RNA, 20 nt, synthetic construct
  source 1..20: mol_type = other RNA
gtgctgtttcaacactgggg

SEQ ID NO: 16002 - RNA, 20 nt, synthetic construct
  source 1..20: mol_type = other RNA
gtgcttacttcaagcaaagc

SEQ ID NO: 16003 - RNA, 20 nt, synthetic construct
  source 1..20: mol_type = other RNA
gtgctttcaagaacaggagc

SEQ ID NO: 16004 - RNA, 20 nt, synthetic construct
  source 1..20: mol_type = other RNA
gtgctttttccttctgaagg

SEQ ID NO: 16005 - RNA, 20 nt, synthetic construct
  source 1..20: mol_type = other RNA
gtggaacacacacatggtga

SEQ ID NO: 16006 - RNA, 20 nt, synthetic construct
  source 1..20: mol_type = other RNA
gtggaacctggatgcaagcc

SEQ ID NO: 16007 - RNA, 20 nt, synthetic construct
  source 1..20: mol_type = other RNA
gtggaagaatgttttcatgg

SEQ ID NO: 16008 - RNA, 20 nt, synthetic construct
  source 1..20: mol_type = other RNA
gtggaagaggaggaggggga

SEQ ID NO: 16009 - RNA, 20 nt, synthetic construct
  source 1..20: mol_type = other RNA
gtggaccaacatctccagtt

SEQ ID NO: 16010 - RNA, 20 nt, synthetic construct
  source 1..20: mol_type = other RNA
gtggagagctacaggacaac

SEQ ID NO: 16011 - RNA, 20 nt, synthetic construct
  source 1..20: mol_type = other RNA
gtggagttttagaagaacac

SEQ ID NO: 16012 - RNA, 20 nt, synthetic construct
  source 1..20: mol_type = other RNA
gtggatggccccgaagcaag

SEQ ID NO: 16013 - RNA, 20 nt, synthetic construct
  source 1..20: mol_type = other RNA
gtggattctcttgcttagtt

SEQ ID NO: 16014 - RNA, 20 nt, synthetic construct
  source 1..20: mol_type = other RNA
gtggcactagatttcatttt

SEQ ID NO: 16015 - RNA, 20 nt, synthetic construct
  source 1..20: mol_type = other RNA
gtggcactctttcaaaagtt

SEQ ID NO: 16016 - RNA, 20 nt, synthetic construct
  source 1..20: mol_type = other RNA
gtggcagaaaaggaatcctt

SEQ ID NO: 16017 - RNA, 20 nt, synthetic construct
  source 1..20: mol_type = other RNA
gtggcagctctgaacggtat

SEQ ID NO: 16018 - RNA, 20 nt, synthetic construct
  source 1..20: mol_type = other RNA
gtggcatctcttacagaagc

SEQ ID NO: 16019 - RNA, 20 nt, synthetic construct
  source 1..20: mol_type = other RNA
gtggctatcaagttctgcag

SEQ ID NO: 16020 - RNA, 20 nt, synthetic construct
  source 1..20: mol_type = other RNA
gtggcttgcatccaggttcc

SEQ ID NO: 16021 - RNA, 20 nt, synthetic construct
  source 1..20: mol_type = other RNA
gtgggcctgaaaatccagag

SEQ ID NO: 16022 - RNA, 20 nt, synthetic construct
  source 1..20: mol_type = other RNA
gtgggcttccattctggagc

SEQ ID NO: 16023 - RNA, 20 nt, synthetic construct
  source 1..20: mol_type = other RNA
gtgggttatgcttgaggtgt

SEQ ID NO: 16024 - RNA, 20 nt, synthetic construct
  source 1..20: mol_type = other RNA
gtggtagtggcagaaaagga

SEQ ID NO: 16025 - RNA, 20 nt, synthetic construct
  source 1..20: mol_type = other RNA
gtggtgagtgaggcctgtga

SEQ ID NO: 16026 - RNA, 20 nt, synthetic construct
  source 1..20: mol_type = other RNA
gtggtgcctcaggtttaccc

SEQ ID NO: 16027 - RNA, 20 nt, synthetic construct
  source 1..20: mol_type = other RNA
gtggtgctgtgtgcatacag

SEQ ID NO: 16028 - RNA, 20 nt, synthetic construct
  source 1..20: mol_type = other RNA
gtggtggtggtgtggtagtg

SEQ ID NO: 16029 - RNA, 20 nt, synthetic construct
  source 1..20: mol_type = other RNA
gtggtggtgtggtagtggca

SEQ ID NO: 16030 - RNA, 20 nt, synthetic construct
  source 1..20: mol_type = other RNA
gtggtggtgttcttctaaaa

SEQ ID NO: 16031 - RNA, 20 nt, synthetic construct
  source 1..20: mol_type = other RNA
gtggtgtggtagtggcagaa

SEQ ID NO: 16032 - RNA, 20 nt, synthetic construct
  source 1..20: mol_type = other RNA
gtggtgttcttctaaaactc

SEQ ID NO: 16033 - RNA, 20 nt, synthetic construct
  source 1..20: mol_type = other RNA
gtggttccctggatgttatt

SEQ ID NO: 16034 - RNA, 20 nt, synthetic construct
  source 1..20: mol_type = other RNA
gtggtttgtctagtcaaaac

SEQ ID NO: 16035 - RNA, 20 nt, synthetic construct
  source 1..20: mol_type = other RNA
gtggttttctgcaccgcaat

SEQ ID NO: 16036 - RNA, 20 nt, synthetic construct
  source 1..20: mol_type = other RNA
gtgtaaagtcaggactcaca

SEQ ID NO: 16037 - RNA, 20 nt, synthetic construct
  source 1..20: mol_type = other RNA
gtgtaagcttgccttgggag

SEQ ID NO: 16038 - RNA, 20 nt, synthetic construct
  source 1..20: mol_type = other RNA
gtgtagatggattaggactc

SEQ ID NO: 16039 - RNA, 20 nt, synthetic construct
  source 1..20: mol_type = other RNA
gtgtaggtaagtgccagaaa

SEQ ID NO: 16040 - RNA, 20 nt, synthetic construct
  source 1..20: mol_type = other RNA
gtgtagtctgttctttattc

SEQ ID NO: 16041 - RNA, 20 nt, synthetic construct
  source 1..20: mol_type = other RNA
gtgtattgtttgaacaagaa

SEQ ID NO: 16042 - RNA, 20 nt, synthetic construct
  source 1..20: mol_type = other RNA
gtgtattgtttggaggtcat

SEQ ID NO: 16043 - RNA, 20 nt, synthetic construct
  source 1..20: mol_type = other RNA
gtgtccttctggggaggggt

SEQ ID NO: 16044 - RNA, 20 nt, synthetic construct
  source 1..20: mol_type = other RNA
gtgtctcagtacatttctgg

SEQ ID NO: 16045 - RNA, 20 nt, synthetic construct
  source 1..20: mol_type = other RNA
gtgtctccatttacttctgg

SEQ ID NO: 16046 - RNA, 20 nt, synthetic construct
  source 1..20: mol_type = other RNA
gtgtcttttctgaagaagtt

SEQ ID NO: 16047 - RNA, 20 nt, synthetic construct
  source 1..20: mol_type = other RNA
gtgtgaacaggaatgacata

SEQ ID NO: 16048 - RNA, 20 nt, synthetic construct
  source 1..20: mol_type = other RNA
gtgtgacttcctccctggtc

SEQ ID NO: 16049 - RNA, 20 nt, synthetic construct
  source 1..20: mol_type = other RNA
gtgtgagggtttttggaact

SEQ ID NO: 16050 - RNA, 20 nt, synthetic construct
  source 1..20: mol_type = other RNA
gtgtgagtcctgactttaca

SEQ ID NO: 16051 - RNA, 20 nt, synthetic construct
  source 1..20: mol_type = other RNA
gtgtgagtttgaaaatggct

SEQ ID NO: 16052 - RNA, 20 nt, synthetic construct
  source 1..20: mol_type = other RNA
gtgtgcatacaggcatgtgg

SEQ ID NO: 16053 - RNA, 20 nt, synthetic construct
  source 1..20: mol_type = other RNA
gtgtggcactagatttcatt

SEQ ID NO: 16054 - RNA, 20 nt, synthetic construct
  source 1..20: mol_type = other RNA
gtgtggctatcaagttctgc

SEQ ID NO: 16055 - RNA, 20 nt, synthetic construct
  source 1..20: mol_type = other RNA
gtgtggtagtggcagaaaag

SEQ ID NO: 16056 - RNA, 20 nt, synthetic construct
  source 1..20: mol_type = other RNA
gtgtgtattgtttgaacaag

SEQ ID NO: 16057 - RNA, 20 nt, synthetic construct
  source 1..20: mol_type = other RNA
gtgtgtgttccacggaagag

SEQ ID NO: 16058 - RNA, 20 nt, synthetic construct
  source 1..20: mol_type = other RNA
gtgtgttccacggaagaggc

SEQ ID NO: 16059 - RNA, 20 nt, synthetic construct
  source 1..20: mol_type = other RNA
gtgttactttggttggggta

SEQ ID NO: 16060 - RNA, 20 nt, synthetic construct
  source 1..20: mol_type = other RNA
gtgttcactaaggattcctt

SEQ ID NO: 16061 - RNA, 20 nt, synthetic construct
  source 1..20: mol_type = other RNA
gtgttccacggaagaggcag

SEQ ID NO: 16062 - RNA, 20 nt, synthetic construct
  source 1..20: mol_type = other RNA
gtgttctgacattggtcttg

SEQ ID NO: 16063 - RNA, 20 nt, synthetic construct
  source 1..20: mol_type = other RNA
gtgttctgagaaaacaagac

SEQ ID NO: 16064 - RNA, 20 nt, synthetic construct
  source 1..20: mol_type = other RNA
gtgttcttctaaaactccac

SEQ ID NO: 16065 - RNA, 20 nt, synthetic construct
  source 1..20: mol_type = other RNA
gtgttgaaaaactggtgaaa

SEQ ID NO: 16066 - RNA, 20 nt, synthetic construct
  source 1..20: mol_type = other RNA
gtgttgaaacagcacttgaa

SEQ ID NO: 16067 - RNA, 20 nt, synthetic construct
  source 1..20: mol_type = other RNA
gtgttgggggcacaagatct

SEQ ID NO: 16068 - RNA, 20 nt, synthetic construct
  source 1..20: mol_type = other RNA
gtgttgtgttactttggttg

SEQ ID NO: 16069 - RNA, 20 nt, synthetic construct
  source 1..20: mol_type = other RNA
gtgttgttttctgggtgtaa

SEQ ID NO: 16070 - RNA, 20 nt, synthetic construct
  source 1..20: mol_type = other RNA
gtgtttccattgcggtgcag

SEQ ID NO: 16071 - RNA, 20 nt, synthetic construct
  source 1..20: mol_type = other RNA
gtgtttgcaaaatggaggaa

SEQ ID NO: 16072 - RNA, 20 nt, synthetic construct
  source 1..20: mol_type = other RNA
gtgtttgctccttgtctcga

SEQ ID NO: 16073 - RNA, 20 nt, synthetic construct
  source 1..20: mol_type = other RNA
gtgtttgctgctgttcttgc

SEQ ID NO: 16074 - RNA, 20 nt, synthetic construct
  source 1..20: mol_type = other RNA
gtgtttgtgctgcctgttta

SEQ ID NO: 16075 - RNA, 20 nt, synthetic construct
  source 1..20: mol_type = other RNA
gtgttttttccaggagttca

SEQ ID NO: 16076 - RNA, 20 nt, synthetic construct
  source 1..20: mol_type = other RNA
gttaaagatttcaccagttt

SEQ ID NO: 16077 - RNA, 20 nt, synthetic construct
  source 1..20: mol_type = other RNA
gttaatggcatttatgtgag

SEQ ID NO: 16078 - RNA, 20 nt, synthetic construct
  source 1..20: mol_type = other RNA
gttacctttttccatgtttt

SEQ ID NO: 16079 - RNA, 20 nt, synthetic construct
  source 1..20: mol_type = other RNA
gttacgtctttctccattag

SEQ ID NO: 16080 - RNA, 20 nt, synthetic construct
  source 1..20: mol_type = other RNA
gttactttggttggggtagt

SEQ ID NO: 16081 - RNA, 20 nt, synthetic construct
  source 1..20: mol_type = other RNA
gttagaggtctgtgcggaat

SEQ ID NO: 16082 - RNA, 20 nt, synthetic construct
  source 1..20: mol_type = other RNA
gttagtgaaccttctctctc

SEQ ID NO: 16083 - RNA, 20 nt, synthetic construct
  source 1..20: mol_type = other RNA
gttatgcttgaggtgttctg

SEQ ID NO: 16084 - RNA, 20 nt, synthetic construct
  source 1..20: mol_type = other RNA
gttatgtatcaagtaccttt

SEQ ID NO: 16085 - RNA, 20 nt, synthetic construct
  source 1..20: mol_type = other RNA
gttatgtgttgaaaaactgg

SEQ ID NO: 16086 - RNA, 20 nt, synthetic construct
  source 1..20: mol_type = other RNA
gttattatggaataccctgt

SEQ ID NO: 16087 - RNA, 20 nt, synthetic construct
  source 1..20: mol_type = other RNA
gttatttgaccataaggctc

SEQ ID NO: 16088 - RNA, 20 nt, synthetic construct
  source 1..20: mol_type = other RNA
gttattttctgcaggagatg

SEQ ID NO: 16089 - RNA, 20 nt, synthetic construct
  source 1..20: mol_type = other RNA
gttcaaacaatacacaccta

SEQ ID NO: 16090 - RNA, 20 nt, synthetic construct
  source 1..20: mol_type = other RNA
gttcacacaattattctgag

SEQ ID NO: 16091 - RNA, 20 nt, synthetic construct
  source 1..20: mol_type = other RNA
gttcacatctccctcaaaac

SEQ ID NO: 16092 - RNA, 20 nt, synthetic construct
  source 1..20: mol_type = other RNA
gttcaccatgtgtgtgttcc

SEQ ID NO: 16093 - RNA, 20 nt, synthetic construct
  source 1..20: mol_type = other RNA
gttcactaactgtgcgtttt

SEQ ID NO: 16094 - RNA, 20 nt, synthetic construct
  source 1..20: mol_type = other RNA
gttcactaaggattcctttt

SEQ ID NO: 16095 - RNA, 20 nt, synthetic construct
  source 1..20: mol_type = other RNA
gttcagagctgccaccagga

SEQ ID NO: 16096 - RNA, 20 nt, synthetic construct
  source 1..20: mol_type = other RNA
gttcaggatgtgtagtctgt

SEQ ID NO: 16097 - RNA, 20 nt, synthetic construct
  source 1..20: mol_type = other RNA
gttcaggttccagcagcaat

SEQ ID NO: 16098 - RNA, 20 nt, synthetic construct
  source 1..20: mol_type = other RNA
gttccaaaaaccctcacacc

SEQ ID NO: 16099 - RNA, 20 nt, synthetic construct
  source 1..20: mol_type = other RNA
gttccaccttaattggcctg

SEQ ID NO: 16100 - RNA, 20 nt, synthetic construct
  source 1..20: mol_type = other RNA
gttccacggaagaggcagaa

SEQ ID NO: 16101 - RNA, 20 nt, synthetic construct
  source 1..20: mol_type = other RNA
gttccagcagcaatttgcaa

SEQ ID NO: 16102 - RNA, 20 nt, synthetic construct
  source 1..20: mol_type = other RNA
gttccatcaggcttgcttcg

SEQ ID NO: 16103 - RNA, 20 nt, synthetic construct
  source 1..20: mol_type = other RNA
gttccattgtgttctgagaa

SEQ ID NO: 16104 - RNA, 20 nt, synthetic construct
  source 1..20: mol_type = other RNA
gttccctggatgttattttc

SEQ ID NO: 16105 - RNA, 20 nt, synthetic construct
  source 1..20: mol_type = other RNA
gttcctcagcttccttcaga

SEQ ID NO: 16106 - RNA, 20 nt, synthetic construct
  source 1..20: mol_type = other RNA
gttcctttcagaaaccagaa

SEQ ID NO: 16107 - RNA, 20 nt, synthetic construct
  source 1..20: mol_type = other RNA
gttcgagactcataatgtcc

SEQ ID NO: 16108 - RNA, 20 nt, synthetic construct
  source 1..20: mol_type = other RNA
gttctacagggatataaaaa

SEQ ID NO: 16109 - RNA, 20 nt, synthetic construct
  source 1..20: mol_type = other RNA
gttctatcctgttccatcag

SEQ ID NO: 16110 - RNA, 20 nt, synthetic construct
  source 1..20: mol_type = other RNA
gttctgacattggtcttgtt

SEQ ID NO: 16111 - RNA, 20 nt, synthetic construct
  source 1..20: mol_type = other RNA
gttctgagaaaacaagacca

SEQ ID NO: 16112 - RNA, 20 nt, synthetic construct
  source 1..20: mol_type = other RNA
gttctgcagcagtggtttgt

SEQ ID NO: 16113 - RNA, 20 nt, synthetic construct
  source 1..20: mol_type = other RNA
gttctggtttctgaaaggaa

SEQ ID NO: 16114 - RNA, 20 nt, synthetic construct
  source 1..20: mol_type = other RNA
gttctgtagcccaagaaaat

SEQ ID NO: 16115 - RNA, 20 nt, synthetic construct
  source 1..20: mol_type = other RNA
gttctgtctggcaaatggga

SEQ ID NO: 16116 - RNA, 20 nt, synthetic construct
  source 1..20: mol_type = other RNA
gttcttctaaaactccacca

SEQ ID NO: 16117 - RNA, 20 nt, synthetic construct
  source 1..20: mol_type = other RNA
gttcttgaaagcacctgtga

SEQ ID NO: 16118 - RNA, 20 nt, synthetic construct
  source 1..20: mol_type = other RNA
gttcttgcttctgtaagaga

SEQ ID NO: 16119 - RNA, 20 nt, synthetic construct
  source 1..20: mol_type = other RNA
gttcttgtcatggtaattag

SEQ ID NO: 16120 - RNA, 20 nt, synthetic construct
  source 1..20: mol_type = other RNA
gttctttattctctgaaact

SEQ ID NO: 16121 - RNA, 20 nt, synthetic construct
  source 1..20: mol_type = other RNA
gttcttttggttggtgtctt

SEQ ID NO: 16122 - RNA, 20 nt, synthetic construct
  source 1..20: mol_type = other RNA
gttgaaaaactggtgaaatc

SEQ ID NO: 16123 - RNA, 20 nt, synthetic construct
  source 1..20: mol_type = other RNA
gttgaaaatgaaatctagtg

SEQ ID NO: 16124 - RNA, 20 nt, synthetic construct
  source 1..20: mol_type = other RNA
gttgaaacagcacttgaatc

SEQ ID NO: 16125 - RNA, 20 nt, synthetic construct
  source 1..20: mol_type = other RNA
gttgaaatgaatcaagggca

SEQ ID NO: 16126 - RNA, 20 nt, synthetic construct
  source 1..20: mol_type = other RNA
gttgaaatgtcagggccagt

SEQ ID NO: 16127 - RNA, 20 nt, synthetic construct
  source 1..20: mol_type = other RNA
gttgaccagacatatcttgg

SEQ ID NO: 16128 - RNA, 20 nt, synthetic construct
  source 1..20: mol_type = other RNA
gttgactgctttcacctgga

SEQ ID NO: 16129 - RNA, 20 nt, synthetic construct
  source 1..20: mol_type = other RNA
gttgagggcaacagactaag

SEQ ID NO: 16130 - RNA, 20 nt, synthetic construct
  source 1..20: mol_type = other RNA
gttgatactgaagaattgat

SEQ ID NO: 16131 - RNA, 20 nt, synthetic construct
  source 1..20: mol_type = other RNA
gttgatgagaaacaaagagc

SEQ ID NO: 16132 - RNA, 20 nt, synthetic construct
  source 1..20: mol_type = other RNA
gttgattcaagtgctgtttc

SEQ ID NO: 16133 - RNA, 20 nt, synthetic construct
  source 1..20: mol_type = other RNA
gttgcaaaaggtgtgagttt

SEQ ID NO: 16134 - RNA, 20 nt, synthetic construct
  source 1..20: mol_type = other RNA
gttgccctcaacatggttgg

SEQ ID NO: 16135 - RNA, 20 nt, synthetic construct
  source 1..20: mol_type = other RNA
gttgcgcagcttgttgacca

SEQ ID NO: 16136 - RNA, 20 nt, synthetic construct
  source 1..20: mol_type = other RNA
gttgctggttttgagggaga

SEQ ID NO: 16137 - RNA, 20 nt, synthetic construct
  source 1..20: mol_type = other RNA
gttgctgtgtttgctgctgt

SEQ ID NO: 16138 - RNA, 20 nt, synthetic construct
  source 1..20: mol_type = other RNA
gttgctttgggggtgaggaa

SEQ ID NO: 16139 - RNA, 20 nt, synthetic construct
  source 1..20: mol_type = other RNA
gttggaatttccagtgtatt

SEQ ID NO: 16140 - RNA, 20 nt, synthetic construct
  source 1..20: mol_type = other RNA
gttgggggcacaagatctcg

SEQ ID NO: 16141 - RNA, 20 nt, synthetic construct
  source 1..20: mol_type = other RNA
gttggggtagtggtggtgtt

SEQ ID NO: 16142 - RNA, 20 nt, synthetic construct
  source 1..20: mol_type = other RNA
gttggtccactgtaccttgg

SEQ ID NO: 16143 - RNA, 20 nt, synthetic construct
  source 1..20: mol_type = other RNA
gttggtgtcttttctgaaga

SEQ ID NO: 16144 - RNA, 20 nt, synthetic construct
  source 1..20: mol_type = other RNA
gttggttctatcctgttcca

SEQ ID NO: 16145 - RNA, 20 nt, synthetic construct
  source 1..20: mol_type = other RNA
gttgtagttgttctggtttc

SEQ ID NO: 16146 - RNA, 20 nt, synthetic construct
  source 1..20: mol_type = other RNA
gttgtcctgtagctctccac

SEQ ID NO: 16147 - RNA, 20 nt, synthetic construct
  source 1..20: mol_type = other RNA
gttgtcctgtgagatcactc

SEQ ID NO: 16148 - RNA, 20 nt, synthetic construct
  source 1..20: mol_type = other RNA
gttgtgacttctgctcctgt

SEQ ID NO: 16149 - RNA, 20 nt, synthetic construct
  source 1..20: mol_type = other RNA
gttgtgttactttggttggg

SEQ ID NO: 16150 - RNA, 20 nt, synthetic construct
  source 1..20: mol_type = other RNA
gttgtgtttgtgctgcctgt

SEQ ID NO: 16151 - RNA, 20 nt, synthetic construct
  source 1..20: mol_type = other RNA
gttgttctggtttctgaaag

SEQ ID NO: 16152 - RNA, 20 nt, synthetic construct
  source 1..20: mol_type = other RNA
gttgttgtagttgttctggt

SEQ ID NO: 16153 - RNA, 20 nt, synthetic construct
  source 1..20: mol_type = other RNA
gttgtttgctgctctaaagc

SEQ ID NO: 16154 - RNA, 20 nt, synthetic construct
  source 1..20: mol_type = other RNA
gttgttttctgggtgtaagc

SEQ ID NO: 16155 - RNA, 20 nt, synthetic construct
  source 1..20: mol_type = other RNA
gtttaccctctattttcact

SEQ ID NO: 16156 - RNA, 20 nt, synthetic construct
  source 1..20: mol_type = other RNA
gtttactggcattatcagca

SEQ ID NO: 16157 - RNA, 20 nt, synthetic construct
  source 1..20: mol_type = other RNA
gtttatgaggcttatgttgc

SEQ ID NO: 16158 - RNA, 20 nt, synthetic construct
  source 1..20: mol_type = other RNA
gtttcaacactggggacata

SEQ ID NO: 16159 - RNA, 20 nt, synthetic construct
  source 1..20: mol_type = other RNA
gtttcaatttcttgatctga

SEQ ID NO: 16160 - RNA, 20 nt, synthetic construct
  source 1..20: mol_type = other RNA
gtttcacgccaagtcgttat

SEQ ID NO: 16161 - RNA, 20 nt, synthetic construct
  source 1..20: mol_type = other RNA
gtttcagagaataaagaaca

SEQ ID NO: 16162 - RNA, 20 nt, synthetic construct
  source 1..20: mol_type = other RNA
gtttcagatagtgctgtgtt

SEQ ID NO: 16163 - RNA, 20 nt, synthetic construct
  source 1..20: mol_type = other RNA
gtttccattgcggtgcagaa

SEQ ID NO: 16164 - RNA, 20 nt, synthetic construct
  source 1..20: mol_type = other RNA
gtttcctgcaaaaagttcag

SEQ ID NO: 16165 - RNA, 20 nt, synthetic construct
  source 1..20: mol_type = other RNA
gtttctatttttatatccct

SEQ ID NO: 16166 - RNA, 20 nt, synthetic construct
  source 1..20: mol_type = other RNA
gtttctcatcaactgctggc

SEQ ID NO: 16167 - RNA, 20 nt, synthetic construct
  source 1..20: mol_type = other RNA
gtttctgaaaggaacaggta

SEQ ID NO: 16168 - RNA, 20 nt, synthetic construct
  source 1..20: mol_type = other RNA
gtttctgcctcttccgtgga

SEQ ID NO: 16169 - RNA, 20 nt, synthetic construct
  source 1..20: mol_type = other RNA
gtttcttgttcaaacaatac

SEQ ID NO: 16170 - RNA, 20 nt, synthetic construct
  source 1..20: mol_type = other RNA
gtttgaaaatggctcagtct

SEQ ID NO: 16171 - RNA, 20 nt, synthetic construct
  source 1..20: mol_type = other RNA
gtttgaacaagaaacctgta

SEQ ID NO: 16172 - RNA, 20 nt, synthetic construct
  source 1..20: mol_type = other RNA
gtttgcaaaatggaggaata

SEQ ID NO: 16173 - RNA, 20 nt, synthetic construct
  source 1..20: mol_type = other RNA
gtttgctccttgtctcgacc

SEQ ID NO: 16174 - RNA, 20 nt, synthetic construct
  source 1..20: mol_type = other RNA
gtttgctgctctaaagctgg

SEQ ID NO: 16175 - RNA, 20 nt, synthetic construct
  source 1..20: mol_type = other RNA
gtttgctgctgttcttgctt

SEQ ID NO: 16176 - RNA, 20 nt, synthetic construct
  source 1..20: mol_type = other RNA
gtttggaggtcatttgattg

SEQ ID NO: 16177 - RNA, 20 nt, synthetic construct
  source 1..20: mol_type = other RNA
gtttgggaatctgctctttg

SEQ ID NO: 16178 - RNA, 20 nt, synthetic construct
  source 1..20: mol_type = other RNA
gtttggggttgctgtgtttg

SEQ ID NO: 16179 - RNA, 20 nt, synthetic construct
  source 1..20: mol_type = other RNA
gtttgtctagtcaaaactgt

SEQ ID NO: 16180 - RNA, 20 nt, synthetic construct
  source 1..20: mol_type = other RNA
gtttgtgctgcctgtttatg

SEQ ID NO: 16181 - RNA, 20 nt, synthetic construct
  source 1..20: mol_type = other RNA
gttttaaataccgttcagag

SEQ ID NO: 16182 - RNA, 20 nt, synthetic construct
  source 1..20: mol_type = other RNA
gttttagaagaacaccacca

SEQ ID NO: 16183 - RNA, 20 nt, synthetic construct
  source 1..20: mol_type = other RNA
gttttagatgggattccgct

SEQ ID NO: 16184 - RNA, 20 nt, synthetic construct
  source 1..20: mol_type = other RNA
gttttattcctccattttgc

SEQ ID NO: 16185 - RNA, 20 nt, synthetic construct
  source 1..20: mol_type = other RNA
gttttcaccaagcggaatcc

SEQ ID NO: 16186 - RNA, 20 nt, synthetic construct
  source 1..20: mol_type = other RNA
gttttcatggtgaaaatcag

SEQ ID NO: 16187 - RNA, 20 nt, synthetic construct
  source 1..20: mol_type = other RNA
gttttctcagaacacaatgg

SEQ ID NO: 16188 - RNA, 20 nt, synthetic construct
  source 1..20: mol_type = other RNA
gttttctgcaccgcaatgga

SEQ ID NO: 16189 - RNA, 20 nt, synthetic construct
  source 1..20: mol_type = other RNA
gttttctgggtgtaagcttg

SEQ ID NO: 16190 - RNA, 20 nt, synthetic construct
  source 1..20: mol_type = other RNA
gttttctggtggtgctgtgt

SEQ ID NO: 16191 - RNA, 20 nt, synthetic construct
  source 1..20: mol_type = other RNA
gttttgactagacaaaccac

SEQ ID NO: 16192 - RNA, 20 nt, synthetic construct
  source 1..20: mol_type = other RNA
gttttgagggagatgtgaac

SEQ ID NO: 16193 - RNA, 20 nt, synthetic construct
  source 1..20: mol_type = other RNA
gttttggagaagtgcacctg

SEQ ID NO: 16194 - RNA, 20 nt, synthetic construct
  source 1..20: mol_type = other RNA
gttttgggtcttgtttcctg

SEQ ID NO: 16195 - RNA, 20 nt, synthetic construct
  source 1..20: mol_type = other RNA
gttttgttttctggtggtgc

SEQ ID NO: 16196 - RNA, 20 nt, synthetic construct
  source 1..20: mol_type = other RNA
gtttttcaacacataactgc

SEQ ID NO: 16197 - RNA, 20 nt, synthetic construct
  source 1..20: mol_type = other RNA
gtttttcagtttgggaatct

SEQ ID NO: 16198 - RNA, 20 nt, synthetic construct
  source 1..20: mol_type = other RNA
gtttttcctgtgcctgacca

SEQ ID NO: 16199 - RNA, 20 nt, synthetic construct
  source 1..20: mol_type = other RNA
gtttttgagatatgcccatc

SEQ ID NO: 16200 - RNA, 20 nt, synthetic construct
  source 1..20: mol_type = other RNA
gtttttggaactggagatgt

SEQ ID NO: 16201 - RNA, 20 nt, synthetic construct
  source 1..20: mol_type = other RNA
gttttttccaggagttcacc

SEQ ID NO: 16202 - RNA, 20 nt, synthetic construct
  source 1..20: mol_type = other RNA
taaaaacaaggcagtgctaa

SEQ ID NO: 16203 - RNA, 20 nt, synthetic construct
  source 1..20: mol_type = other RNA
taaaacgcacagttagtgaa

SEQ ID NO: 16204 - RNA, 20 nt, synthetic construct
  source 1..20: mol_type = other RNA
taaaacgtaatgaggcatca

SEQ ID NO: 16205 - RNA, 20 nt, synthetic construct
  source 1..20: mol_type = other RNA
taaaactccaccattcagag

SEQ ID NO: 16206 - RNA, 20 nt, synthetic construct
  source 1..20: mol_type = other RNA
taaaagtgttgtgttacttt

SEQ ID NO: 16207 - RNA, 20 nt, synthetic construct
  source 1..20: mol_type = other RNA
taaaagttgaaatgtcaggg

SEQ ID NO: 16208 - RNA, 20 nt, synthetic construct
  source 1..20: mol_type = other RNA
taaacaggcagcacaaacac

SEQ ID NO: 16209 - RNA, 20 nt, synthetic construct
  source 1..20: mol_type = other RNA
taaacctgaggcaccacctt

SEQ ID NO: 16210 - RNA, 20 nt, synthetic construct
  source 1..20: mol_type = other RNA
taaacgccatgtgtctcagt

SEQ ID NO: 16211 - RNA, 20 nt, synthetic construct
  source 1..20: mol_type = other RNA
taaactagctgcaatgctaa

SEQ ID NO: 16212 - RNA, 20 nt, synthetic construct
  source 1..20: mol_type = other RNA
taaagaacagactacacatc

SEQ ID NO: 16213 - RNA, 20 nt, synthetic construct
  source 1..20: mol_type = other RNA
taaagaggaaatactccaga

SEQ ID NO: 16214 - RNA, 20 nt, synthetic construct
  source 1..20: mol_type = other RNA
taaagatttcaccagttttt

SEQ ID NO: 16215 - RNA, 20 nt, synthetic construct
  source 1..20: mol_type = other RNA
taaagctggggtgtggctat

SEQ ID NO: 16216 - RNA, 20 nt, synthetic construct
  source 1..20: mol_type = other RNA
taaagtcaggactcacacga

SEQ ID NO: 16217 - RNA, 20 nt, synthetic construct
  source 1..20: mol_type = other RNA
taaagtggaagaatgttttc

SEQ ID NO: 16218 - RNA, 20 nt, synthetic construct
  source 1..20: mol_type = other RNA
taaataccgttcagagctgc

SEQ ID NO: 16219 - RNA, 20 nt, synthetic construct
  source 1..20: mol_type = other RNA
taaatacctgttcctttcag

SEQ ID NO: 16220 - RNA, 20 nt, synthetic construct
  source 1..20: mol_type = other RNA
taaatcgtagaaattcccct

SEQ ID NO: 16221 - RNA, 20 nt, synthetic construct
  source 1..20: mol_type = other RNA
taaatgccattaacagtcag

SEQ ID NO: 16222 - RNA, 20 nt, synthetic construct
  source 1..20: mol_type = other RNA
taaatggagacaccaagtgg

SEQ ID NO: 16223 - RNA, 20 nt, synthetic construct
  source 1..20: mol_type = other RNA
taaatggtctgttttggaga

SEQ ID NO: 16224 - RNA, 20 nt, synthetic construct
  source 1..20: mol_type = other RNA
taacacaacacttttaaggg

SEQ ID NO: 16225 - RNA, 20 nt, synthetic construct
  source 1..20: mol_type = other RNA
taacagtcaggctactaatg

SEQ ID NO: 16226 - RNA, 20 nt, synthetic construct
  source 1..20: mol_type = other RNA
taacatccagggaaccacaa

SEQ ID NO: 16227 - RNA, 20 nt, synthetic construct
  source 1..20: mol_type = other RNA
taaccatgcaaatgtttttc

SEQ ID NO: 16228 - RNA, 20 nt, synthetic construct
  source 1..20: mol_type = other RNA
taacccaccaatttttggta

SEQ ID NO: 16229 - RNA, 20 nt, synthetic construct
  source 1..20: mol_type = other RNA
taacgacttggcgtgaaact

SEQ ID NO: 16230 - RNA, 20 nt, synthetic construct
  source 1..20: mol_type = other RNA
taactaagcaagagaatcca

SEQ ID NO: 16231 - RNA, 20 nt, synthetic construct
  source 1..20: mol_type = other RNA
taactctgagctgcctccaa

SEQ ID NO: 16232 - RNA, 20 nt, synthetic construct
  source 1..20: mol_type = other RNA
taactgcagtgggcctgaaa

SEQ ID NO: 16233 - RNA, 20 nt, synthetic construct
  source 1..20: mol_type = other RNA
taactgcattttcttgggct

SEQ ID NO: 16234 - RNA, 20 nt, synthetic construct
  source 1..20: mol_type = other RNA
taactgtgcgttttattcct

SEQ ID NO: 16235 - RNA, 20 nt, synthetic construct
  source 1..20: mol_type = other RNA
taacttcggggtaagccaag

SEQ ID NO: 16236 - RNA, 20 nt, synthetic construct
  source 1..20: mol_type = other RNA
taacttttgaaagagtgcca

SEQ ID NO: 16237 - RNA, 20 nt, synthetic construct
  source 1..20: mol_type = other RNA
taagaaagaatctgtgagtt

SEQ ID NO: 16238 - RNA, 20 nt, synthetic construct
  source 1..20: mol_type = other RNA
taagagatgccaccttagag

SEQ ID NO: 16239 - RNA, 20 nt, synthetic construct
  source 1..20: mol_type = other RNA
taagagccttatggtcaaat

SEQ ID NO: 16240 - RNA, 20 nt, synthetic construct
  source 1..20: mol_type = other RNA
taagcaagagaatccacctg

SEQ ID NO: 16241 - RNA, 20 nt, synthetic construct
  source 1..20: mol_type = other RNA
taagcaccattcatttcatt

SEQ ID NO: 16242 - RNA, 20 nt, synthetic construct
  source 1..20: mol_type = other RNA
taagccaagaaagaaatcca

SEQ ID NO: 16243 - RNA, 20 nt, synthetic construct
  source 1..20: mol_type = other RNA
taagcctcataaacaggcag

SEQ ID NO: 16244 - RNA, 20 nt, synthetic construct
  source 1..20: mol_type = other RNA
taagcttgccttgggagccc

SEQ ID NO: 16245 - RNA, 20 nt, synthetic construct
  source 1..20: mol_type = other RNA
taaggattccttttctgcca

SEQ ID NO: 16246 - RNA, 20 nt, synthetic construct
  source 1..20: mol_type = other RNA
taaggctcttactctcaaat

SEQ ID NO: 16247 - RNA, 20 nt, synthetic construct
  source 1..20: mol_type = other RNA
taagggaagtgaaaatagag

SEQ ID NO: 16248 - RNA, 20 nt, synthetic construct
  source 1..20: mol_type = other RNA
taaggggaatttctacgatt

SEQ ID NO: 16249 - RNA, 20 nt, synthetic construct
  source 1..20: mol_type = other RNA
taaggtggaacctggatgca

SEQ ID NO: 16250 - RNA, 20 nt, synthetic construct
  source 1..20: mol_type = other RNA
taaggtggcatctcttacag

SEQ ID NO: 16251 - RNA, 20 nt, synthetic construct
  source 1..20: mol_type = other RNA
taagtaatacaatgttcttg

SEQ ID NO: 16252 - RNA, 20 nt, synthetic construct
  source 1..20: mol_type = other RNA
taagtccattcctgatacca

SEQ ID NO: 16253 - RNA, 20 nt, synthetic construct
  source 1..20: mol_type = other RNA
taagtgccagaaatgtactg

SEQ ID NO: 16254 - RNA, 20 nt, synthetic construct
  source 1..20: mol_type = other RNA
taagtttttcagtttgggaa

SEQ ID NO: 16255 - RNA, 20 nt, synthetic construct
  source 1..20: mol_type = other RNA
taataacttttgaaagagtg

SEQ ID NO: 16256 - RNA, 20 nt, synthetic construct
  source 1..20: mol_type = other RNA
taatacaatgttcttgtcat

SEQ ID NO: 16257 - RNA, 20 nt, synthetic construct
  source 1..20: mol_type = other RNA
taatattgagacagtgtttt

SEQ ID NO: 16258 - RNA, 20 nt, synthetic construct
  source 1..20: mol_type = other RNA
taatccatctacacatgtat

SEQ ID NO: 16259 - RNA, 20 nt, synthetic construct
  source 1..20: mol_type = other RNA
taatgaggcatcactgccat

SEQ ID NO: 16260 - RNA, 20 nt, synthetic construct
  source 1..20: mol_type = other RNA
taatgagttgtcctgtgaga

SEQ ID NO: 16261 - RNA, 20 nt, synthetic construct
  source 1..20: mol_type = other RNA
taatgccagtaaactagctg

SEQ ID NO: 16262 - RNA, 20 nt, synthetic construct
  source 1..20: mol_type = other RNA
taatgcctaatggtgctaca

SEQ ID NO: 16263 - RNA, 20 nt, synthetic construct
  source 1..20: mol_type = other RNA
taatggagaaagacgtaact

SEQ ID NO: 16264 - RNA, 20 nt, synthetic construct
  source 1..20: mol_type = other RNA
taatggcatttatgtgagat

SEQ ID NO: 16265 - RNA, 20 nt, synthetic construct
  source 1..20: mol_type = other RNA
taatggtgctacagtttctg

SEQ ID NO: 16266 - RNA, 20 nt, synthetic construct
  source 1..20: mol_type = other RNA
taatgtccaaatgggactgg

SEQ ID NO: 16267 - RNA, 20 nt, synthetic construct
  source 1..20: mol_type = other RNA
taatgtgatcccaaagcaag

SEQ ID NO: 16268 - RNA, 20 nt, synthetic construct
  source 1..20: mol_type = other RNA
taatgtgcagcaaaagagca

SEQ ID NO: 16269 - RNA, 20 nt, synthetic construct
  source 1..20: mol_type = other RNA
taattaccatgacaagaaca

SEQ ID NO: 16270 - RNA, 20 nt, synthetic construct
  source 1..20: mol_type = other RNA
taattagcacttttcccctc

SEQ ID NO: 16271 - RNA, 20 nt, synthetic construct
  source 1..20: mol_type = other RNA
taattggcctgtgcatctga

SEQ ID NO: 16272 - RNA, 20 nt, synthetic construct
  source 1..20: mol_type = other RNA
taattgtgtgaacaggaatg

SEQ ID NO: 16273 - RNA, 20 nt, synthetic construct
  source 1..20: mol_type = other RNA
taatttggaaggtgactcta

SEQ ID NO: 16274 - RNA, 20 nt, synthetic construct
  source 1..20: mol_type = other RNA
taattttatagagtcacctt

SEQ ID NO: 16275 - RNA, 20 nt, synthetic construct
  source 1..20: mol_type = other RNA
taatttttgctgctgttgct

SEQ ID NO: 16276 - RNA, 20 nt, synthetic construct
  source 1..20: mol_type = other RNA
tacaaagctccagaatggaa

SEQ ID NO: 16277 - RNA, 20 nt, synthetic construct
  source 1..20: mol_type = other RNA
tacaacaacaaaaatcagtt

SEQ ID NO: 16278 - RNA, 20 nt, synthetic construct
  source 1..20: mol_type = other RNA
tacaatgttcttgtcatggt

SEQ ID NO: 16279 - RNA, 20 nt, synthetic construct
  source 1..20: mol_type = other RNA
tacacaagaaagtagagggt

SEQ ID NO: 16280 - RNA, 20 nt, synthetic construct
  source 1..20: mol_type = other RNA
tacacacctagtttcagaga

SEQ ID NO: 16281 - RNA, 20 nt, synthetic construct
  source 1..20: mol_type = other RNA
tacacatcctgaactttttg

SEQ ID NO: 16282 - RNA, 20 nt, synthetic construct
  source 1..20: mol_type = other RNA
tacacatctgcaagatggga

SEQ ID NO: 16283 - RNA, 20 nt, synthetic construct
  source 1..20: mol_type = other RNA
tacacatgtatgcagccctt

SEQ ID NO: 16284 - RNA, 20 nt, synthetic construct
  source 1..20: mol_type = other RNA
tacacccagaaaacaacaca

SEQ ID NO: 16285 - RNA, 20 nt, synthetic construct
  source 1..20: mol_type = other RNA
tacacctgtcaagactcaat

SEQ ID NO: 16286 - RNA, 20 nt, synthetic construct
  source 1..20: mol_type = other RNA
tacactggaaattccaacat

SEQ ID NO: 16287 - RNA, 20 nt, synthetic construct
  source 1..20: mol_type = other RNA
tacagaactcacagattctt

SEQ ID NO: 16288 - RNA, 20 nt, synthetic construct
  source 1..20: mol_type = other RNA
tacagaagcaagaacagcag

SEQ ID NO: 16289 - RNA, 20 nt, synthetic construct
  source 1..20: mol_type = other RNA
tacagaatataaatcgtaga

SEQ ID NO: 16290 - RNA, 20 nt, synthetic construct
  source 1..20: mol_type = other RNA
tacagactgcagggacaatg

SEQ ID NO: 16291 - RNA, 20 nt, synthetic construct
  source 1..20: mol_type = other RNA
tacaggacaactgccagcag

SEQ ID NO: 16292 - RNA, 20 nt, synthetic construct
  source 1..20: mol_type = other RNA
tacaggcatgtggcttgcat

SEQ ID NO: 16293 - RNA, 20 nt, synthetic construct
  source 1..20: mol_type = other RNA
tacagggatataaaaataga

SEQ ID NO: 16294 - RNA, 20 nt, synthetic construct
  source 1..20: mol_type = other RNA
tacagggtattccataataa

SEQ ID NO: 16295 - RNA, 20 nt, synthetic construct
  source 1..20: mol_type = other RNA
tacaggtttcttgttcaaac

SEQ ID NO: 16296 - RNA, 20 nt, synthetic construct
  source 1..20: mol_type = other RNA
tacagtggaccaacatctcc

SEQ ID NO: 16297 - RNA, 20 nt, synthetic construct
  source 1..20: mol_type = other RNA
tacagtttctgcctcttccg

SEQ ID NO: 16298 - RNA, 20 nt, synthetic construct
  source 1..20: mol_type = other RNA
tacataaccatgcaaatgtt

SEQ ID NO: 16299 - RNA, 20 nt, synthetic construct
  source 1..20: mol_type = other RNA
tacatgtgtagatggattag

SEQ ID NO: 16300 - RNA, 20 nt, synthetic construct
  source 1..20: mol_type = other RNA
tacatttctggcacttacct

SEQ ID NO: 16301 - RNA, 20 nt, synthetic construct
  source 1..20: mol_type = other RNA
tacatttgtgacttgtgctc

SEQ ID NO: 16302 - RNA, 20 nt, synthetic construct
  source 1..20: mol_type = other RNA
taccaaaaattggtgggtta

SEQ ID NO: 16303 - RNA, 20 nt, synthetic construct
  source 1..20: mol_type = other RNA
taccaaaagctcatgtgcag

SEQ ID NO: 16304 - RNA, 20 nt, synthetic construct
  source 1..20: mol_type = other RNA
taccaagttgaaatgaatca

SEQ ID NO: 16305 - RNA, 20 nt, synthetic construct
  source 1..20: mol_type = other RNA
taccacaccaccaccaccat

SEQ ID NO: 16306 - RNA, 20 nt, synthetic construct
  source 1..20: mol_type = other RNA
taccatcacctcccatttgc

SEQ ID NO: 16307 - RNA, 20 nt, synthetic construct
  source 1..20: mol_type = other RNA
taccatgacaagaacattgt

SEQ ID NO: 16308 - RNA, 20 nt, synthetic construct
  source 1..20: mol_type = other RNA
taccccaaccaaagtaacac

SEQ ID NO: 16309 - RNA, 20 nt, synthetic construct
  source 1..20: mol_type = other RNA
taccccgaagttacgtcttt

SEQ ID NO: 16310 - RNA, 20 nt, synthetic construct
  source 1..20: mol_type = other RNA
taccctctactttcttgtgt

SEQ ID NO: 16311 - RNA, 20 nt, synthetic construct
  source 1..20: mol_type = other RNA
taccctctattttcacttcc

SEQ ID NO: 16312 - RNA, 20 nt, synthetic construct
  source 1..20: mol_type = other RNA
taccctgtatgaagggaagc

SEQ ID NO: 16313 - RNA, 20 nt, synthetic construct
  source 1..20: mol_type = other RNA
taccgttcagagctgccacc

SEQ ID NO: 16314 - RNA, 20 nt, synthetic construct
  source 1..20: mol_type = other RNA
tacctacacatctgcaagat

SEQ ID NO: 16315 - RNA, 20 nt, synthetic construct
  source 1..20: mol_type = other RNA
tacctcagggcagatcaatt

SEQ ID NO: 16316 - RNA, 20 nt, synthetic construct
  source 1..20: mol_type = other RNA
tacctgttcctttcagaaac

SEQ ID NO: 16317 - RNA, 20 nt, synthetic construct
  source 1..20: mol_type = other RNA
taccttgggactgcccttga

SEQ ID NO: 16318 - RNA, 20 nt, synthetic construct
  source 1..20: mol_type = other RNA
tacctttgctgagcaagttg

SEQ ID NO: 16319 - RNA, 20 nt, synthetic construct
  source 1..20: mol_type = other RNA
tacctttttccatgttttgt

SEQ ID NO: 16320 - RNA, 20 nt, synthetic construct
  source 1..20: mol_type = other RNA
tacgatttatattctgtact

SEQ ID NO: 16321 - RNA, 20 nt, synthetic construct
  source 1..20: mol_type = other RNA
tacgtctttctccattagcc

SEQ ID NO: 16322 - RNA, 20 nt, synthetic construct
  source 1..20: mol_type = other RNA
tacgttttagatgggattcc

SEQ ID NO: 16323 - RNA, 20 nt, synthetic construct
  source 1..20: mol_type = other RNA
tactaatgagttgtcctgtg

SEQ ID NO: 16324 - RNA, 20 nt, synthetic construct
  source 1..20: mol_type = other RNA
tactagatactcctataaaa

SEQ ID NO: 16325 - RNA, 20 nt, synthetic construct
  source 1..20: mol_type = other RNA
tactccagacttttcctcac

SEQ ID NO: 16326 - RNA, 20 nt, synthetic construct
  source 1..20: mol_type = other RNA
tactctcaaatcacagaagc

SEQ ID NO: 16327 - RNA, 20 nt, synthetic construct
  source 1..20: mol_type = other RNA
tactgaagaattgatggcag

SEQ ID NO: 16328 - RNA, 20 nt, synthetic construct
  source 1..20: mol_type = other RNA
tactgattttcaccatgaaa

SEQ ID NO: 16329 - RNA, 20 nt, synthetic construct
  source 1..20: mol_type = other RNA
tactggcattatcagcatca

SEQ ID NO: 16330 - RNA, 20 nt, synthetic construct
  source 1..20: mol_type = other RNA
tacttaaaaacaaggcagtg

SEQ ID NO: 16331 - RNA, 20 nt, synthetic construct
  source 1..20: mol_type = other RNA
tacttcaagcaaagctcagt

SEQ ID NO: 16332 - RNA, 20 nt, synthetic construct
  source 1..20: mol_type = other RNA
tacttcctccagtcccattt

SEQ ID NO: 16333 - RNA, 20 nt, synthetic construct
  source 1..20: mol_type = other RNA
tacttctggatgagctctct

SEQ ID NO: 16334 - RNA, 20 nt, synthetic construct
  source 1..20: mol_type = other RNA
tacttgatacataaccatgc

SEQ ID NO: 16335 - RNA, 20 nt, synthetic construct
  source 1..20: mol_type = other RNA
tacttgcttctgtgatttga

SEQ ID NO: 16336 - RNA, 20 nt, synthetic construct
  source 1..20: mol_type = other RNA
tactttcttgtgtaaagtca

SEQ ID NO: 16337 - RNA, 20 nt, synthetic construct
  source 1..20: mol_type = other RNA
tactttggttggggtagtgg

SEQ ID NO: 16338 - RNA, 20 nt, synthetic construct
  source 1..20: mol_type = other RNA
tagaaaccaagatatgtctg

SEQ ID NO: 16339 - RNA, 20 nt, synthetic construct
  source 1..20: mol_type = other RNA
tagaaattccccttatagtc

SEQ ID NO: 16340 - RNA, 20 nt, synthetic construct
  source 1..20: mol_type = other RNA
tagaaccaaccatgttgagg

SEQ ID NO: 16341 - RNA, 20 nt, synthetic construct
  source 1..20: mol_type = other RNA
tagaactgaagcttgttgtg

SEQ ID NO: 16342 - RNA, 20 nt, synthetic construct
  source 1..20: mol_type = other RNA
tagaagaacaccaccactac

SEQ ID NO: 16343 - RNA, 20 nt, synthetic construct
  source 1..20: mol_type = other RNA
tagacaaaccactgctgcag

SEQ ID NO: 16344 - RNA, 20 nt, synthetic construct
  source 1..20: mol_type = other RNA
tagagcagcaaacaacttct

SEQ ID NO: 16345 - RNA, 20 nt, synthetic construct
  source 1..20: mol_type = other RNA
tagagcagcatgcttttgag

SEQ ID NO: 16346 - RNA, 20 nt, synthetic construct
  source 1..20: mol_type = other RNA
tagagggcagccttgtggat

SEQ ID NO: 16347 - RNA, 20 nt, synthetic construct
  source 1..20: mol_type = other RNA
tagagggtaaacctgaggca

SEQ ID NO: 16348 - RNA, 20 nt, synthetic construct
  source 1..20: mol_type = other RNA
tagagggtattccaagtgtt

SEQ ID NO: 16349 - RNA, 20 nt, synthetic construct
  source 1..20: mol_type = other RNA
tagaggtctgtgcggaattg

SEQ ID NO: 16350 - RNA, 20 nt, synthetic construct
  source 1..20: mol_type = other RNA
tagagtcaccttccaaatta

SEQ ID NO: 16351 - RNA, 20 nt, synthetic construct
  source 1..20: mol_type = other RNA
tagatggattaggactctgg

SEQ ID NO: 16352 - RNA, 20 nt, synthetic construct
  source 1..20: mol_type = other RNA
tagatgggattccgcttggt

SEQ ID NO: 16353 - RNA, 20 nt, synthetic construct
  source 1..20: mol_type = other RNA
tagcaccattaggcattagc

SEQ ID NO: 16354 - RNA, 20 nt, synthetic construct
  source 1..20: mol_type = other RNA
tagcactgccttgtttttaa

SEQ ID NO: 16355 - RNA, 20 nt, synthetic construct
  source 1..20: mol_type = other RNA
tagcacttttcccctcctgc

SEQ ID NO: 16356 - RNA, 20 nt, synthetic construct
  source 1..20: mol_type = other RNA
tagcagtggagagctacagg

SEQ ID NO: 16357 - RNA, 20 nt, synthetic construct
  source 1..20: mol_type = other RNA
tagcattgcagctagtttac

SEQ ID NO: 16358 - RNA, 20 nt, synthetic construct
  source 1..20: mol_type = other RNA
tagccacaccccagctttag

SEQ ID NO: 16359 - RNA, 20 nt, synthetic construct
  source 1..20: mol_type = other RNA
tagccagaggttctgtctgg

SEQ ID NO: 16360 - RNA, 20 nt, synthetic construct
  source 1..20: mol_type = other RNA
tagcccaagaaaatgcagtt

SEQ ID NO: 16361 - RNA, 20 nt, synthetic construct
  source 1..20: mol_type = other RNA
tagcctgactgttaatggca

SEQ ID NO: 16362 - RNA, 20 nt, synthetic construct
  source 1..20: mol_type = other RNA
tagccttttggtcttgtttc

SEQ ID NO: 16363 - RNA, 20 nt, synthetic construct
  source 1..20: mol_type = other RNA
tagcgtctggtgaagaattc

SEQ ID NO: 16364 - RNA, 20 nt, synthetic construct
  source 1..20: mol_type = other RNA
tagctctccactgctaccaa

SEQ ID NO: 16365 - RNA, 20 nt, synthetic construct
  source 1..20: mol_type = other RNA
tagctgcaatgctaaatacc

SEQ ID NO: 16366 - RNA, 20 nt, synthetic construct
  source 1..20: mol_type = other RNA
tagctttgtggttccctgga

SEQ ID NO: 16367 - RNA, 20 nt, synthetic construct
  source 1..20: mol_type = other RNA
taggactctgggaaggtggt

SEQ ID NO: 16368 - RNA, 20 nt, synthetic construct
  source 1..20: mol_type = other RNA
taggagtatctagtaatttg

SEQ ID NO: 16369 - RNA, 20 nt, synthetic construct
  source 1..20: mol_type = other RNA
taggcattagcactgccttg

SEQ ID NO: 16370 - RNA, 20 nt, synthetic construct
  source 1..20: mol_type = other RNA
taggtaagtgccagaaatgt

SEQ ID NO: 16371 - RNA, 20 nt, synthetic construct
  source 1..20: mol_type = other RNA
taggtgtgtattgtttgaac

SEQ ID NO: 16372 - RNA, 20 nt, synthetic construct
  source 1..20: mol_type = other RNA
tagtaatttggaaggtgact

SEQ ID NO: 16373 - RNA, 20 nt, synthetic construct
  source 1..20: mol_type = other RNA
tagtagcctgactgttaatg

SEQ ID NO: 16374 - RNA, 20 nt, synthetic construct
  source 1..20: mol_type = other RNA
tagtcaaaactgtgactggc

SEQ ID NO: 16375 - RNA, 20 nt, synthetic construct
  source 1..20: mol_type = other RNA
tagtcagaccatgaaatcaa

SEQ ID NO: 16376 - RNA, 20 nt, synthetic construct
  source 1..20: mol_type = other RNA
tagtcagatgcacaggccaa

SEQ ID NO: 16377 - RNA, 20 nt, synthetic construct
  source 1..20: mol_type = other RNA
tagtcgtgtgagtcctgact

SEQ ID NO: 16378 - RNA, 20 nt, synthetic construct
  source 1..20: mol_type = other RNA
tagtctggccaaagaatgat

SEQ ID NO: 16379 - RNA, 20 nt, synthetic construct
  source 1..20: mol_type = other RNA
tagtctgttctttattctct

SEQ ID NO: 16380 - RNA, 20 nt, synthetic construct
  source 1..20: mol_type = other RNA
tagtctgttgccctcaacat

SEQ ID NO: 16381 - RNA, 20 nt, synthetic construct
  source 1..20: mol_type = other RNA
tagtgaacactgagctttgc

SEQ ID NO: 16382 - RNA, 20 nt, synthetic construct
  source 1..20: mol_type = other RNA
tagtgaaccttctctctctg

SEQ ID NO: 16383 - RNA, 20 nt, synthetic construct
  source 1..20: mol_type = other RNA
tagtgccacacagtgactgc

SEQ ID NO: 16384 - RNA, 20 nt, synthetic construct
  source 1..20: mol_type = other RNA
tagtgctgtgttgggggcac

SEQ ID NO: 16385 - RNA, 20 nt, synthetic construct
  source 1..20: mol_type = other RNA
tagtggcagaaaaggaatcc

SEQ ID NO: 16386 - RNA, 20 nt, synthetic construct
  source 1..20: mol_type = other RNA
tagtggtggtgttcttctaa

SEQ ID NO: 16387 - RNA, 20 nt, synthetic construct
  source 1..20: mol_type = other RNA
tagttacctttttccatgtt

SEQ ID NO: 16388 - RNA, 20 nt, synthetic construct
  source 1..20: mol_type = other RNA
tagttgttctggtttctgaa

SEQ ID NO: 16389 - RNA, 20 nt, synthetic construct
  source 1..20: mol_type = other RNA
tagtttactggcattatcag

SEQ ID NO: 16390 - RNA, 20 nt, synthetic construct
  source 1..20: mol_type = other RNA
tagtttcagagaataaagaa

SEQ ID NO: 16391 - RNA, 20 nt, synthetic construct
  source 1..20: mol_type = other RNA
tataaatcgtagaaattccc

SEQ ID NO: 16392 - RNA, 20 nt, synthetic construct
  source 1..20: mol_type = other RNA
tataaggggaatttctacga

SEQ ID NO: 16393 - RNA, 20 nt, synthetic construct
  source 1..20: mol_type = other RNA
tatagagtcaccttccaaat

SEQ ID NO: 16394 - RNA, 20 nt, synthetic construct
  source 1..20: mol_type = other RNA
tataggagtatctagtaatt

SEQ ID NO: 16395 - RNA, 20 nt, synthetic construct
  source 1..20: mol_type = other RNA
tatagtcagaccatgaaatc

SEQ ID NO: 16396 - RNA, 20 nt, synthetic construct
  source 1..20: mol_type = other RNA
tatatccctgtagaactgaa

SEQ ID NO: 16397 - RNA, 20 nt, synthetic construct
  source 1..20: mol_type = other RNA
tatattctgtacttcctcca

SEQ ID NO: 16398 - RNA, 20 nt, synthetic construct
  source 1..20: mol_type = other RNA
tatcaacccaatctctccaa

SEQ ID NO: 16399 - RNA, 20 nt, synthetic construct
  source 1..20: mol_type = other RNA
tatcaagtacctttgctgag

SEQ ID NO: 16400 - RNA, 20 nt, synthetic construct
  source 1..20: mol_type = other RNA
tatcaagttctgcagcagtg

SEQ ID NO: 16401 - RNA, 20 nt, synthetic construct
  source 1..20: mol_type = other RNA
tatcacagcttgcaggtgga

SEQ ID NO: 16402 - RNA, 20 nt, synthetic construct
  source 1..20: mol_type = other RNA
tatcactcaaatcggagaca

SEQ ID NO: 16403 - RNA, 20 nt, synthetic construct
  source 1..20: mol_type = other RNA
tatcagcatcatcagcatca

SEQ ID NO: 16404 - RNA, 20 nt, synthetic construct
  source 1..20: mol_type = other RNA
tatcaggaatggacttagtc

SEQ ID NO: 16405 - RNA, 20 nt, synthetic construct
  source 1..20: mol_type = other RNA
tatccagattgtgtttccat

SEQ ID NO: 16406 - RNA, 20 nt, synthetic construct
  source 1..20: mol_type = other RNA
tatccctgtagaactgaagc

SEQ ID NO: 16407 - RNA, 20 nt, synthetic construct
  source 1..20: mol_type = other RNA
tatcctgttccatcaggctt

SEQ ID NO: 16408 - RNA, 20 nt, synthetic construct
  source 1..20: mol_type = other RNA
tatctagtaatttggaaggt

SEQ ID NO: 16409 - RNA, 20 nt, synthetic construct
  source 1..20: mol_type = other RNA
tatctgaaaccaggatggat

SEQ ID NO: 16410 - RNA, 20 nt, synthetic construct
  source 1..20: mol_type = other RNA
tatgaagggaagccagaata

SEQ ID NO: 16411 - RNA, 20 nt, synthetic construct
  source 1..20: mol_type = other RNA
tatgaggcttatgttgcaaa

SEQ ID NO: 16412 - RNA, 20 nt, synthetic construct
  source 1..20: mol_type = other RNA
tatgagtctcgaactcgctt

SEQ ID NO: 16413 - RNA, 20 nt, synthetic construct
  source 1..20: mol_type = other RNA
tatgatttcccatcttgcag

SEQ ID NO: 16414 - RNA, 20 nt, synthetic construct
  source 1..20: mol_type = other RNA
tatgcacacagcaccaccag

SEQ ID NO: 16415 - RNA, 20 nt, synthetic construct
  source 1..20: mol_type = other RNA
tatgcagcccttctccgatg

SEQ ID NO: 16416 - RNA, 20 nt, synthetic construct
  source 1..20: mol_type = other RNA
tatgcccatctcctgcagaa

SEQ ID NO: 16417 - RNA, 20 nt, synthetic construct
  source 1..20: mol_type = other RNA
tatgcgatgggtgagtgatc

SEQ ID NO: 16418 - RNA, 20 nt, synthetic construct
  source 1..20: mol_type = other RNA
tatgcttgaggtgttctgac

SEQ ID NO: 16419 - RNA, 20 nt, synthetic construct
  source 1..20: mol_type = other RNA
tatggaataccctgtatgaa

SEQ ID NO: 16420 - RNA, 20 nt, synthetic construct
  source 1..20: mol_type = other RNA
tatggcaagactcagtttgg

SEQ ID NO: 16421 - RNA, 20 nt, synthetic construct
  source 1..20: mol_type = other RNA
tatggtcaaataacgacttg

SEQ ID NO: 16422 - RNA, 20 nt, synthetic construct
  source 1..20: mol_type = other RNA
tatgtatcaagtacctttgc

SEQ ID NO: 16423 - RNA, 20 nt, synthetic construct
  source 1..20: mol_type = other RNA
tatgtcattcctgttcacac

SEQ ID NO: 16424 - RNA, 20 nt, synthetic construct
  source 1..20: mol_type = other RNA
tatgtccccagtgttgaaac

SEQ ID NO: 16425 - RNA, 20 nt, synthetic construct
  source 1..20: mol_type = other RNA
tatgtctggtcaacaagctg

SEQ ID NO: 16426 - RNA, 20 nt, synthetic construct
  source 1..20: mol_type = other RNA
tatgtgagatgtggttttct

SEQ ID NO: 16427 - RNA, 20 nt, synthetic construct
  source 1..20: mol_type = other RNA
tatgtgttgaaaaactggtg

SEQ ID NO: 16428 - RNA, 20 nt, synthetic construct
  source 1..20: mol_type = other RNA
tatgttgcaaaaggtgtgag

SEQ ID NO: 16429 - RNA, 20 nt, synthetic construct
  source 1..20: mol_type = other RNA
tattacttaaaaacaaggca

SEQ ID NO: 16430 - RNA, 20 nt, synthetic construct
  source 1..20: mol_type = other RNA
tattatccagattgtgtttc

SEQ ID NO: 16431 - RNA, 20 nt, synthetic construct
  source 1..20: mol_type = other RNA
tattatggaataccctgtat

SEQ ID NO: 16432 - RNA, 20 nt, synthetic construct
  source 1..20: mol_type = other RNA
tattcaaaatcaagcgagtt

SEQ ID NO: 16433 - RNA, 20 nt, synthetic construct
  source 1..20: mol_type = other RNA
tattccaagtgtttgcaaaa

SEQ ID NO: 16434 - RNA, 20 nt, synthetic construct
  source 1..20: mol_type = other RNA
tattcctccattttgcaaac

SEQ ID NO: 16435 - RNA, 20 nt, synthetic construct
  source 1..20: mol_type = other RNA
tattctctgaaactaggtgt

SEQ ID NO: 16436 - RNA, 20 nt, synthetic construct
  source 1..20: mol_type = other RNA
tattctgaggcctttcagaa

SEQ ID NO: 16437 - RNA, 20 nt, synthetic construct
  source 1..20: mol_type = other RNA
tattctggcttcccttcata

SEQ ID NO: 16438 - RNA, 20 nt, synthetic construct
  source 1..20: mol_type = other RNA
tattctgtacttcctccagt

SEQ ID NO: 16439 - RNA, 20 nt, synthetic construct
  source 1..20: mol_type = other RNA
tattgagaacagaagcagct

SEQ ID NO: 16440 - RNA, 20 nt, synthetic construct
  source 1..20: mol_type = other RNA
tattgagacagtgttttttc

SEQ ID NO: 16441 - RNA, 20 nt, synthetic construct
  source 1..20: mol_type = other RNA
tattgagtcttgacaggtgt

SEQ ID NO: 16442 - RNA, 20 nt, synthetic construct
  source 1..20: mol_type = other RNA
tattgcatgtgatgcaagtt

SEQ ID NO: 16443 - RNA, 20 nt, synthetic construct
  source 1..20: mol_type = other RNA
tattggatacacctgtcaag

SEQ ID NO: 16444 - RNA, 20 nt, synthetic construct
  source 1..20: mol_type = other RNA
tattgtttgaacaagaaacc

SEQ ID NO: 16445 - RNA, 20 nt, synthetic construct
  source 1..20: mol_type = other RNA
tattgtttggaggtcatttg

SEQ ID NO: 16446 - RNA, 20 nt, synthetic construct
  source 1..20: mol_type = other RNA
tatttagcattgcagctagt

SEQ ID NO: 16447 - RNA, 20 nt, synthetic construct
  source 1..20: mol_type = other RNA
tatttgaccataaggctctt

SEQ ID NO: 16448 - RNA, 20 nt, synthetic construct
  source 1..20: mol_type = other RNA
tatttggaaaatattgcatg

SEQ ID NO: 16449 - RNA, 20 nt, synthetic construct
  source 1..20: mol_type = other RNA
tatttgtaatttttgctgct

SEQ ID NO: 16450 - RNA, 20 nt, synthetic construct
  source 1..20: mol_type = other RNA
tattttcacttcccttaaaa

SEQ ID NO: 16451 - RNA, 20 nt, synthetic construct
  source 1..20: mol_type = other RNA
tattttctgcaggagatggg

SEQ ID NO: 16452 - RNA, 20 nt, synthetic construct
  source 1..20: mol_type = other RNA
tattttgcatgcacttgatt

SEQ ID NO: 16453 - RNA, 20 nt, synthetic construct
  source 1..20: mol_type = other RNA
tatttttatatccctgtaga

SEQ ID NO: 16454 - RNA, 20 nt, synthetic construct
  source 1..20: mol_type = other RNA
tcaaaaactgatttttgttg

SEQ ID NO: 16455 - RNA, 20 nt, synthetic construct
  source 1..20: mol_type = other RNA
tcaaaaccagcaacagcagc

SEQ ID NO: 16456 - RNA, 20 nt, synthetic construct
  source 1..20: mol_type = other RNA
tcaaaactgtgactggccct

SEQ ID NO: 16457 - RNA, 20 nt, synthetic construct
  source 1..20: mol_type = other RNA
tcaaaagcatgctgctctaa

SEQ ID NO: 16458 - RNA, 20 nt, synthetic construct
  source 1..20: mol_type = other RNA
tcaaaatcaagcgagttcga

SEQ ID NO: 16459 - RNA, 20 nt, synthetic construct
  source 1..20: mol_type = other RNA
tcaaacaatacacacctagt

SEQ ID NO: 16460 - RNA, 20 nt, synthetic construct
  source 1..20: mol_type = other RNA
tcaaactcacaccttttgca

SEQ ID NO: 16461 - RNA, 20 nt, synthetic construct
  source 1..20: mol_type = other RNA
tcaaataacgacttggcgtg

SEQ ID NO: 16462 - RNA, 20 nt, synthetic construct
  source 1..20: mol_type = other RNA
tcaaatcacagaagcaagta

SEQ ID NO: 16463 - RNA, 20 nt, synthetic construct
  source 1..20: mol_type = other RNA
tcaaatcggagacatttggt

SEQ ID NO: 16464 - RNA, 20 nt, synthetic construct
  source 1..20: mol_type = other RNA
tcaaatgacctccaaacaat

SEQ ID NO: 16465 - RNA, 20 nt, synthetic construct
  source 1..20: mol_type = other RNA
tcaacaaagagcagattccc

SEQ ID NO: 16466 - RNA, 20 nt, synthetic construct
  source 1..20: mol_type = other RNA
tcaacaagctgcgcaacttg

SEQ ID NO: 16467 - RNA, 20 nt, synthetic construct
  source 1..20: mol_type = other RNA
tcaacacataactgcagtgg

SEQ ID NO: 16468 - RNA, 20 nt, synthetic construct
  source 1..20: mol_type = other RNA
tcaacactggggacataagt

SEQ ID NO: 16469 - RNA, 20 nt, synthetic construct
  source 1..20: mol_type = other RNA
tcaacaggcttcagagactg

SEQ ID NO: 16470 - RNA, 20 nt, synthetic construct
  source 1..20: mol_type = other RNA
tcaacatggttggttctatc

SEQ ID NO: 16471 - RNA, 20 nt, synthetic construct
  source 1..20: mol_type = other RNA
tcaaccaaatgtctccgatt

SEQ ID NO: 16472 - RNA, 20 nt, synthetic construct
  source 1..20: mol_type = other RNA
tcaacccaatctctccaatc

SEQ ID NO: 16473 - RNA, 20 nt, synthetic construct
  source 1..20: mol_type = other RNA
tcaactgctggcagttgtcc

SEQ ID NO: 16474 - RNA, 20 nt, synthetic construct
  source 1..20: mol_type = other RNA
tcaacttggtacatttgtga

SEQ ID NO: 16475 - RNA, 20 nt, synthetic construct
  source 1..20: mol_type = other RNA
tcaacttttacttgcttctg

SEQ ID NO: 16476 - RNA, 20 nt, synthetic construct
  source 1..20: mol_type = other RNA
tcaagaaattgaaacaagac

SEQ ID NO: 16477 - RNA, 20 nt, synthetic construct
  source 1..20: mol_type = other RNA
tcaagaacaggagcagaagt

SEQ ID NO: 16478 - RNA, 20 nt, synthetic construct
  source 1..20: mol_type = other RNA
tcaagactcaatatgatttc

SEQ ID NO: 16479 - RNA, 20 nt, synthetic construct
  source 1..20: mol_type = other RNA
tcaagcaaagctcagtgttc

SEQ ID NO: 16480 - RNA, 20 nt, synthetic construct
  source 1..20: mol_type = other RNA
tcaagcataacccaccaatt

SEQ ID NO: 16481 - RNA, 20 nt, synthetic construct
  source 1..20: mol_type = other RNA
tcaagcgagttcgagactca

SEQ ID NO: 16482 - RNA, 20 nt, synthetic construct
  source 1..20: mol_type = other RNA
tcaagggcagtcccaaggta

SEQ ID NO: 16483 - RNA, 20 nt, synthetic construct
  source 1..20: mol_type = other RNA
tcaagtacctttgctgagca

SEQ ID NO: 16484 - RNA, 20 nt, synthetic construct
  source 1..20: mol_type = other RNA
tcaagtgcatgcaaaataca

SEQ ID NO: 16485 - RNA, 20 nt, synthetic construct
  source 1..20: mol_type = other RNA
tcaagtgctgtttcaacact

SEQ ID NO: 16486 - RNA, 20 nt, synthetic construct
  source 1..20: mol_type = other RNA
tcaagttctgcagcagtggt

SEQ ID NO: 16487 - RNA, 20 nt, synthetic construct
  source 1..20: mol_type = other RNA
tcaatatgatttcccatctt

SEQ ID NO: 16488 - RNA, 20 nt, synthetic construct
  source 1..20: mol_type = other RNA
tcaatattatccagattgtg

SEQ ID NO: 16489 - RNA, 20 nt, synthetic construct
  source 1..20: mol_type = other RNA
tcaatccatcctggtttcag

SEQ ID NO: 16490 - RNA, 20 nt, synthetic construct
  source 1..20: mol_type = other RNA
tcaatgatgctcttttgctg

SEQ ID NO: 16491 - RNA, 20 nt, synthetic construct
  source 1..20: mol_type = other RNA
tcaattcaatccatcctggt

SEQ ID NO: 16492 - RNA, 20 nt, synthetic construct
  source 1..20: mol_type = other RNA
tcaattccgcacagacctct

SEQ ID NO: 16493 - RNA, 20 nt, synthetic construct
  source 1..20: mol_type = other RNA
tcaattcttcagtatcaacc

SEQ ID NO: 16494 - RNA, 20 nt, synthetic construct
  source 1..20: mol_type = other RNA
tcaatttcttgatctgaagg

SEQ ID NO: 16495 - RNA, 20 nt, synthetic construct
  source 1..20: mol_type = other RNA
tcacaaatgtaccaagttga

SEQ ID NO: 16496 - RNA, 20 nt, synthetic construct
  source 1..20: mol_type = other RNA
tcacaacaagcttcagttct

SEQ ID NO: 16497 - RNA, 20 nt, synthetic construct
  source 1..20: mol_type = other RNA
tcacaattgcttctttctcc

SEQ ID NO: 16498 - RNA, 20 nt, synthetic construct
  source 1..20: mol_type = other RNA
tcacacaattattctgaggc

SEQ ID NO: 16499 - RNA, 20 nt, synthetic construct
  source 1..20: mol_type = other RNA
tcacaccaggtgcacttctc

SEQ ID NO: 16500 - RNA, 20 nt, synthetic construct
  source 1..20: mol_type = other RNA
tcacaccttttgcaacataa

SEQ ID NO: 16501 - RNA, 20 nt, synthetic construct
  source 1..20: mol_type = other RNA
tcacacgactattctggctt

SEQ ID NO: 16502 - RNA, 20 nt, synthetic construct
  source 1..20: mol_type = other RNA
tcacactcagacccctcccc

SEQ ID NO: 16503 - RNA, 20 nt, synthetic construct
  source 1..20: mol_type = other RNA
tcacagaagcaagtaaaagt

SEQ ID NO: 16504 - RNA, 20 nt, synthetic construct
  source 1..20: mol_type = other RNA
tcacagattctttcttatca

SEQ ID NO: 16505 - RNA, 20 nt, synthetic construct
  source 1..20: mol_type = other RNA
tcacagcttgcaggtggatt

SEQ ID NO: 16506 - RNA, 20 nt, synthetic construct
  source 1..20: mol_type = other RNA
tcacaggacaactcattagt

SEQ ID NO: 16507 - RNA, 20 nt, synthetic construct
  source 1..20: mol_type = other RNA
tcacaggcctcactcaccac

SEQ ID NO: 16508 - RNA, 20 nt, synthetic construct
  source 1..20: mol_type = other RNA
tcacaggtgctttcaagaac

SEQ ID NO: 16509 - RNA, 20 nt, synthetic construct
  source 1..20: mol_type = other RNA
tcacagttttgactagacaa

SEQ ID NO: 16510 - RNA, 20 nt, synthetic construct
  source 1..20: mol_type = other RNA
tcacataaatgccattaaca

SEQ ID NO: 16511 - RNA, 20 nt, synthetic construct
  source 1..20: mol_type = other RNA
tcacatctccctcaaaacca

SEQ ID NO: 16512 - RNA, 20 nt, synthetic construct
  source 1..20: mol_type = other RNA
tcacatgcaatattttccaa

SEQ ID NO: 16513 - RNA, 20 nt, synthetic construct
  source 1..20: mol_type = other RNA
tcaccaagcggaatcccatc

SEQ ID NO: 16514 - RNA, 20 nt, synthetic construct
  source 1..20: mol_type = other RNA
tcaccactgcagctggcttt

SEQ ID NO: 16515 - RNA, 20 nt, synthetic construct
  source 1..20: mol_type = other RNA
tcaccagacgctagctttgt

SEQ ID NO: 16516 - RNA, 20 nt, synthetic construct
  source 1..20: mol_type = other RNA
tcaccagtttttcaacacat

SEQ ID NO: 16517 - RNA, 20 nt, synthetic construct
  source 1..20: mol_type = other RNA
tcaccatgaaaacattcttc

SEQ ID NO: 16518 - RNA, 20 nt, synthetic construct
  source 1..20: mol_type = other RNA
tcaccatgtgtgtgttccac

SEQ ID NO: 16519 - RNA, 20 nt, synthetic construct
  source 1..20: mol_type = other RNA
tcacccatcgcatacctcag

SEQ ID NO: 16520 - RNA, 20 nt, synthetic construct
  source 1..20: mol_type = other RNA
tcacccccaaagcaacaatg

SEQ ID NO: 16521 - RNA, 20 nt, synthetic construct
  source 1..20: mol_type = other RNA
tcacctcccatttgccagac

SEQ ID NO: 16522 - RNA, 20 nt, synthetic construct
  source 1..20: mol_type = other RNA
tcacctggatttctttcttg

SEQ ID NO: 16523 - RNA, 20 nt, synthetic construct
  source 1..20: mol_type = other RNA
tcaccttccaaattactaga

SEQ ID NO: 16524 - RNA, 20 nt, synthetic construct
  source 1..20: mol_type = other RNA
tcacgccaagtcgttatttg

SEQ ID NO: 16525 - RNA, 20 nt, synthetic construct
  source 1..20: mol_type = other RNA
tcactaactgtgcgttttat

SEQ ID NO: 16526 - RNA, 20 nt, synthetic construct
  source 1..20: mol_type = other RNA
tcactaaggattccttttct

SEQ ID NO: 16527 - RNA, 20 nt, synthetic construct
  source 1..20: mol_type = other RNA
tcactcaaatcggagacatt

SEQ ID NO: 16528 - RNA, 20 nt, synthetic construct
  source 1..20: mol_type = other RNA
tcactcaccactgcagctgg

SEQ ID NO: 16529 - RNA, 20 nt, synthetic construct
  source 1..20: mol_type = other RNA
tcactcacccatcgcatacc

SEQ ID NO: 16530 - RNA, 20 nt, synthetic construct
  source 1..20: mol_type = other RNA
tcactgccatcaattcttca

SEQ ID NO: 16531 - RNA, 20 nt, synthetic construct
  source 1..20: mol_type = other RNA
tcactgtgtggcactagatt

SEQ ID NO: 16532 - RNA, 20 nt, synthetic construct
  source 1..20: mol_type = other RNA
tcacttcccttaaaagtgtt

SEQ ID NO: 16533 - RNA, 20 nt, synthetic construct
  source 1..20: mol_type = other RNA
tcagaaaagacaccaaccaa

SEQ ID NO: 16534 - RNA, 20 nt, synthetic construct
  source 1..20: mol_type = other RNA
tcagaaaccagaacaactac

SEQ ID NO: 16535 - RNA, 20 nt, synthetic construct
  source 1..20: mol_type = other RNA
tcagaaagcatcggagaagg

SEQ ID NO: 16536 - RNA, 20 nt, synthetic construct
  source 1..20: mol_type = other RNA
tcagaacacaatggaacagt

SEQ ID NO: 16537 - RNA, 20 nt, synthetic construct
  source 1..20: mol_type = other RNA
tcagaacacctcaagcataa

SEQ ID NO: 16538 - RNA, 20 nt, synthetic construct
  source 1..20: mol_type = other RNA
tcagaaggaaaaagcactct

SEQ ID NO: 16539 - RNA, 20 nt, synthetic construct
  source 1..20: mol_type = other RNA
tcagaataattgtgtgaaca

SEQ ID NO: 16540 - RNA, 20 nt, synthetic construct
  source 1..20: mol_type = other RNA
tcagaatctcttgctctttg

SEQ ID NO: 16541 - RNA, 20 nt, synthetic construct
  source 1..20: mol_type = other RNA
tcagaatctgaagctctgga

SEQ ID NO: 16542 - RNA, 20 nt, synthetic construct
  source 1..20: mol_type = other RNA
tcagaccatgaaatcaagtg

SEQ ID NO: 16543 - RNA, 20 nt, synthetic construct
  source 1..20: mol_type = other RNA
tcagacccctccccagaagg

SEQ ID NO: 16544 - RNA, 20 nt, synthetic construct
  source 1..20: mol_type = other RNA
tcagagaataaagaacagac

SEQ ID NO: 16545 - RNA, 20 nt, synthetic construct
  source 1..20: mol_type = other RNA
tcagagactgagccattttc

SEQ ID NO: 16546 - RNA, 20 nt, synthetic construct
  source 1..20: mol_type = other RNA
tcagagctgccaccaggagc

SEQ ID NO: 16547 - RNA, 20 nt, synthetic construct
  source 1..20: mol_type = other RNA
tcagagtgctttttccttct

SEQ ID NO: 16548 - RNA, 20 nt, synthetic construct
  source 1..20: mol_type = other RNA
tcagagttagaggtctgtgc

SEQ ID NO: 16549 - RNA, 20 nt, synthetic construct
  source 1..20: mol_type = other RNA
tcagatagtgctgtgttggg

SEQ ID NO: 16550 - RNA, 20 nt, synthetic construct
  source 1..20: mol_type = other RNA
tcagatcaagaaattgaaac

SEQ ID NO: 16551 - RNA, 20 nt, synthetic construct
  source 1..20: mol_type = other RNA
tcagatgcacaggccaatta

SEQ ID NO: 16552 - RNA, 20 nt, synthetic construct
  source 1..20: mol_type = other RNA
tcagatgctgctccatggtc

SEQ ID NO: 16553 - RNA, 20 nt, synthetic construct
  source 1..20: mol_type = other RNA
tcagattctgaatgagcagg

SEQ ID NO: 16554 - RNA, 20 nt, synthetic construct
  source 1..20: mol_type = other RNA
tcagcaaagagaaggatcat

SEQ ID NO: 16555 - RNA, 20 nt, synthetic construct
  source 1..20: mol_type = other RNA
tcagcaaaggtacttgatac

SEQ ID NO: 16556 - RNA, 20 nt, synthetic construct
  source 1..20: mol_type = other RNA
tcagcatcacaggcctcact

SEQ ID NO: 16557 - RNA, 20 nt, synthetic construct
  source 1..20: mol_type = other RNA
tcagcatcatcagcatcaca

SEQ ID NO: 16558 - RNA, 20 nt, synthetic construct
  source 1..20: mol_type = other RNA
tcagcttccttcagaaggaa

SEQ ID NO: 16559 - RNA, 20 nt, synthetic construct
  source 1..20: mol_type = other RNA
tcaggaatggacttagtctg

SEQ ID NO: 16560 - RNA, 20 nt, synthetic construct
  source 1..20: mol_type = other RNA
tcaggactcacacgactatt

SEQ ID NO: 16561 - RNA, 20 nt, synthetic construct
  source 1..20: mol_type = other RNA
tcaggatgtgtagtctgttc

SEQ ID NO: 16562 - RNA, 20 nt, synthetic construct
  source 1..20: mol_type = other RNA
tcaggcacaggaaaaacatt

SEQ ID NO: 16563 - RNA, 20 nt, synthetic construct
  source 1..20: mol_type = other RNA
tcaggcagtgggcttccatt

SEQ ID NO: 16564 - RNA, 20 nt, synthetic construct
  source 1..20: mol_type = other RNA
tcaggcccactgcagttatg

SEQ ID NO: 16565 - RNA, 20 nt, synthetic construct
  source 1..20: mol_type = other RNA
tcaggctactaatgagttgt

SEQ ID NO: 16566 - RNA, 20 nt, synthetic construct
  source 1..20: mol_type = other RNA
tcaggcttgcttcggggcca

SEQ ID NO: 16567 - RNA, 20 nt, synthetic construct
  source 1..20: mol_type = other RNA
tcagggcagatcaattccgc

SEQ ID NO: 16568 - RNA, 20 nt, synthetic construct
  source 1..20: mol_type = other RNA
tcagggccagtcacagtttt

SEQ ID NO: 16569 - RNA, 20 nt, synthetic construct
  source 1..20: mol_type = other RNA
tcaggttccagcagcaattt

SEQ ID NO: 16570 - RNA, 20 nt, synthetic construct
  source 1..20: mol_type = other RNA
tcaggtttaccctctatttt

SEQ ID NO: 16571 - RNA, 20 nt, synthetic construct
  source 1..20: mol_type = other RNA
tcagtacatttctggcactt

SEQ ID NO: 16572 - RNA, 20 nt, synthetic construct
  source 1..20: mol_type = other RNA
tcagtatcaacccaatctct

SEQ ID NO: 16573 - RNA, 20 nt, synthetic construct
  source 1..20: mol_type = other RNA
tcagtattcaaaatcaagcg

SEQ ID NO: 16574 - RNA, 20 nt, synthetic construct
  source 1..20: mol_type = other RNA
tcagtctctgaagcctgttg

SEQ ID NO: 16575 - RNA, 20 nt, synthetic construct
  source 1..20: mol_type = other RNA
tcagtgttcactaaggattc

SEQ ID NO: 16576 - RNA, 20 nt, synthetic construct
  source 1..20: mol_type = other RNA
tcagttctacagggatataa

SEQ ID NO: 16577 - RNA, 20 nt, synthetic construct
  source 1..20: mol_type = other RNA
tcagtttgggaatctgctct

SEQ ID NO: 16578 - RNA, 20 nt, synthetic construct
  source 1..20: mol_type = other RNA
tcagtttggggttgctgtgt

SEQ ID NO: 16579 - RNA, 20 nt, synthetic construct
  source 1..20: mol_type = other RNA
tcagtttttgagatatgccc

SEQ ID NO: 16580 - RNA, 20 nt, synthetic construct
  source 1..20: mol_type = other RNA
tcataaacaggcagcacaaa

SEQ ID NO: 16581 - RNA, 20 nt, synthetic construct
  source 1..20: mol_type = other RNA
tcataatgtccaaatgggac

SEQ ID NO: 16582 - RNA, 20 nt, synthetic construct
  source 1..20: mol_type = other RNA
tcatacagggtattccataa

SEQ ID NO: 16583 - RNA, 20 nt, synthetic construct
  source 1..20: mol_type = other RNA
tcatattgagtcttgacagg

SEQ ID NO: 16584 - RNA, 20 nt, synthetic construct
  source 1..20: mol_type = other RNA
tcatcaactgctggcagttg

SEQ ID NO: 16585 - RNA, 20 nt, synthetic construct
  source 1..20: mol_type = other RNA
tcatcagcatcacaggcctc

SEQ ID NO: 16586 - RNA, 20 nt, synthetic construct
  source 1..20: mol_type = other RNA
tcatccagaagtaaatggag

SEQ ID NO: 16587 - RNA, 20 nt, synthetic construct
  source 1..20: mol_type = other RNA
tcatggtaattagcactttt

SEQ ID NO: 16588 - RNA, 20 nt, synthetic construct
  source 1..20: mol_type = other RNA
tcatggtctgactataaggg

SEQ ID NO: 16589 - RNA, 20 nt, synthetic construct
  source 1..20: mol_type = other RNA
tcatggtgaaaatcagtatt

SEQ ID NO: 16590 - RNA, 20 nt, synthetic construct
  source 1..20: mol_type = other RNA
tcatgtgcagtcactgtgtg

SEQ ID NO: 16591 - RNA, 20 nt, synthetic construct
  source 1..20: mol_type = other RNA
tcattacgttttagatggga

SEQ ID NO: 16592 - RNA, 20 nt, synthetic construct
  source 1..20: mol_type = other RNA
tcattagtagcctgactgtt

SEQ ID NO: 16593 - RNA, 20 nt, synthetic construct
  source 1..20: mol_type = other RNA
tcattcagaatctgaagctc

SEQ ID NO: 16594 - RNA, 20 nt, synthetic construct
  source 1..20: mol_type = other RNA
tcattcctgttcacacaatt

SEQ ID NO: 16595 - RNA, 20 nt, synthetic construct
  source 1..20: mol_type = other RNA
tcattctttggccagactaa

SEQ ID NO: 16596 - RNA, 20 nt, synthetic construct
  source 1..20: mol_type = other RNA
tcattgagaccatggagcag

SEQ ID NO: 16597 - RNA, 20 nt, synthetic construct
  source 1..20: mol_type = other RNA
tcattgtccctgcagtctgt

SEQ ID NO: 16598 - RNA, 20 nt, synthetic construct
  source 1..20: mol_type = other RNA
tcattgttgctttgggggtg

SEQ ID NO: 16599 - RNA, 20 nt, synthetic construct
  source 1..20: mol_type = other RNA
tcatttcaacttggtacatt

SEQ ID NO: 16600 - RNA, 20 nt, synthetic construct
  source 1..20: mol_type = other RNA
tcatttgattggagagattg

SEQ ID NO: 16601 - RNA, 20 nt, synthetic construct
  source 1..20: mol_type = other RNA
tcattttcaacaaagagcag

SEQ ID NO: 16602 - RNA, 20 nt, synthetic construct
  source 1..20: mol_type = other RNA
tcattttgttttaaataccg

SEQ ID NO: 16603 - RNA, 20 nt, synthetic construct
  source 1..20: mol_type = other RNA
tccaaaaaccctcacaccag

SEQ ID NO: 16604 - RNA, 20 nt, synthetic construct
  source 1..20: mol_type = other RNA
tccaaaacagaccatttacc

SEQ ID NO: 16605 - RNA, 20 nt, synthetic construct
  source 1..20: mol_type = other RNA
tccaaacaatacactggaaa

SEQ ID NO: 16606 - RNA, 20 nt, synthetic construct
  source 1..20: mol_type = other RNA
tccaaagccagctgcagtgg

SEQ ID NO: 16607 - RNA, 20 nt, synthetic construct
  source 1..20: mol_type = other RNA
tccaaataatgtgatcccaa

SEQ ID NO: 16608 - RNA, 20 nt, synthetic construct
  source 1..20: mol_type = other RNA
tccaaatgggactggaggaa

SEQ ID NO: 16609 - RNA, 20 nt, synthetic construct
  source 1..20: mol_type = other RNA
tccaaattactagatactcc

SEQ ID NO: 16610 - RNA, 20 nt, synthetic construct
  source 1..20: mol_type = other RNA
tccaacatgcctggggggct

SEQ ID NO: 16611 - RNA, 20 nt, synthetic construct
  source 1..20: mol_type = other RNA
tccaagtgtttgcaaaatgg

SEQ ID NO: 16612 - RNA, 20 nt, synthetic construct
  source 1..20: mol_type = other RNA
tccaatcaaatgacctccaa

SEQ ID NO: 16613 - RNA, 20 nt, synthetic construct
  source 1..20: mol_type = other RNA
tccacaggttcctcagcttc

SEQ ID NO: 16614 - RNA, 20 nt, synthetic construct
  source 1..20: mol_type = other RNA
tccaccattcagagtgcttt

SEQ ID NO: 16615 - RNA, 20 nt, synthetic construct
  source 1..20: mol_type = other RNA
tccacctgcaagctgtgata

SEQ ID NO: 16616 - RNA, 20 nt, synthetic construct
  source 1..20: mol_type = other RNA
tccaccttaattggcctgtg

SEQ ID NO: 16617 - RNA, 20 nt, synthetic construct
  source 1..20: mol_type = other RNA
tccacggaagaggcagaaac

SEQ ID NO: 16618 - RNA, 20 nt, synthetic construct
  source 1..20: mol_type = other RNA
tccactgctaccaaaaattg

SEQ ID NO: 16619 - RNA, 20 nt, synthetic construct
  source 1..20: mol_type = other RNA
tccactgtaccttgggactg

SEQ ID NO: 16620 - RNA, 20 nt, synthetic construct
  source 1..20: mol_type = other RNA
tccactttagtctggccaaa

SEQ ID NO: 16621 - RNA, 20 nt, synthetic construct
  source 1..20: mol_type = other RNA
tccagaagtaaatggagaca

SEQ ID NO: 16622 - RNA, 20 nt, synthetic construct
  source 1..20: mol_type = other RNA
tccagaatggaagcccactg

SEQ ID NO: 16623 - RNA, 20 nt, synthetic construct
  source 1..20: mol_type = other RNA
tccagacttttcctcacccc

SEQ ID NO: 16624 - RNA, 20 nt, synthetic construct
  source 1..20: mol_type = other RNA
tccagagcttcagattctga

SEQ ID NO: 16625 - RNA, 20 nt, synthetic construct
  source 1..20: mol_type = other RNA
tccagattgtgtttccattg

SEQ ID NO: 16626 - RNA, 20 nt, synthetic construct
  source 1..20: mol_type = other RNA
tccagcagcaatttgcaagc

SEQ ID NO: 16627 - RNA, 20 nt, synthetic construct
  source 1..20: mol_type = other RNA
tccagctgtgttgttttctg

SEQ ID NO: 16628 - RNA, 20 nt, synthetic construct
  source 1..20: mol_type = other RNA
tccaggagttcaccatgtgt

SEQ ID NO: 16629 - RNA, 20 nt, synthetic construct
  source 1..20: mol_type = other RNA
tccagggaaccacaaagcta

SEQ ID NO: 16630 - RNA, 20 nt, synthetic construct
  source 1..20: mol_type = other RNA
tccaggtgaaagcagtcaac

SEQ ID NO: 16631 - RNA, 20 nt, synthetic construct
  source 1..20: mol_type = other RNA
tccaggttccaccttaattg

SEQ ID NO: 16632 - RNA, 20 nt, synthetic construct
  source 1..20: mol_type = other RNA
tccagtcccatttggacatt

SEQ ID NO: 16633 - RNA, 20 nt, synthetic construct
  source 1..20: mol_type = other RNA
tccagtgtattgtttggagg

SEQ ID NO: 16634 - RNA, 20 nt, synthetic construct
  source 1..20: mol_type = other RNA
tccagttccaaaaaccctca

SEQ ID NO: 16635 - RNA, 20 nt, synthetic construct
  source 1..20: mol_type = other RNA
tccataataacttttgaaag

SEQ ID NO: 16636 - RNA, 20 nt, synthetic construct
  source 1..20: mol_type = other RNA
tccatcaggcttgcttcggg

SEQ ID NO: 16637 - RNA, 20 nt, synthetic construct
  source 1..20: mol_type = other RNA
tccatcctggtttcagatag

SEQ ID NO: 16638 - RNA, 20 nt, synthetic construct
  source 1..20: mol_type = other RNA
tccatctacacatgtatgca

SEQ ID NO: 16639 - RNA, 20 nt, synthetic construct
  source 1..20: mol_type = other RNA
tccatggtctcaatgatgct

SEQ ID NO: 16640 - RNA, 20 nt, synthetic construct
  source 1..20: mol_type = other RNA
tccatgttttgttttctggt

SEQ ID NO: 16641 - RNA, 20 nt, synthetic construct
  source 1..20: mol_type = other RNA
tccattagccttttggtctt

SEQ ID NO: 16642 - RNA, 20 nt, synthetic construct
  source 1..20: mol_type = other RNA
tccattcctgataccatcac

SEQ ID NO: 16643 - RNA, 20 nt, synthetic construct
  source 1..20: mol_type = other RNA
tccattctggagctttgtag

SEQ ID NO: 16644 - RNA, 20 nt, synthetic construct
  source 1..20: mol_type = other RNA
tccattgcggtgcagaaaac

SEQ ID NO: 16645 - RNA, 20 nt, synthetic construct
  source 1..20: mol_type = other RNA
tccattgtgttctgagaaaa

SEQ ID NO: 16646 - RNA, 20 nt, synthetic construct
  source 1..20: mol_type = other RNA
tccatttacttctggatgag

SEQ ID NO: 16647 - RNA, 20 nt, synthetic construct
  source 1..20: mol_type = other RNA
tccattttgcaaacacttgg

SEQ ID NO: 16648 - RNA, 20 nt, synthetic construct
  source 1..20: mol_type = other RNA
tcccaaactgaaaaacttat

SEQ ID NO: 16649 - RNA, 20 nt, synthetic construct
  source 1..20: mol_type = other RNA
tcccaaagcaagatcttctt

SEQ ID NO: 16650 - RNA, 20 nt, synthetic construct
  source 1..20: mol_type = other RNA
tcccaaggcaagcttacacc

SEQ ID NO: 16651 - RNA, 20 nt, synthetic construct
  source 1..20: mol_type = other RNA
tcccaaggtacagtggacca

SEQ ID NO: 16652 - RNA, 20 nt, synthetic construct
  source 1..20: mol_type = other RNA
tcccagagtcctaatccatc

SEQ ID NO: 16653 - RNA, 20 nt, synthetic construct
  source 1..20: mol_type = other RNA
tcccagagttcacatctccc

SEQ ID NO: 16654 - RNA, 20 nt, synthetic construct
  source 1..20: mol_type = other RNA
tcccatctaaaacgtaatga

SEQ ID NO: 16655 - RNA, 20 nt, synthetic construct
  source 1..20: mol_type = other RNA
tcccatcttgcagatgtgta

SEQ ID NO: 16656 - RNA, 20 nt, synthetic construct
  source 1..20: mol_type = other RNA
tcccatttgccagacagaac

SEQ ID NO: 16657 - RNA, 20 nt, synthetic construct
  source 1..20: mol_type = other RNA
tcccatttggacattatgag

SEQ ID NO: 16658 - RNA, 20 nt, synthetic construct
  source 1..20: mol_type = other RNA
tccccagaaggacactcaaa

SEQ ID NO: 16659 - RNA, 20 nt, synthetic construct
  source 1..20: mol_type = other RNA
tccccagtgttgaaacagca

SEQ ID NO: 16660 - RNA, 20 nt, synthetic construct
  source 1..20: mol_type = other RNA
tccccctcctcctcttccac

SEQ ID NO: 16661 - RNA, 20 nt, synthetic construct
  source 1..20: mol_type = other RNA
tcccctcctgctcattcaga

SEQ ID NO: 16662 - RNA, 20 nt, synthetic construct
  source 1..20: mol_type = other RNA
tccccttatagtcagaccat

SEQ ID NO: 16663 - RNA, 20 nt, synthetic construct
  source 1..20: mol_type = other RNA
tccctcaaaaccagcaacag

SEQ ID NO: 16664 - RNA, 20 nt, synthetic construct
  source 1..20: mol_type = other RNA
tccctgcagtctgtatgtca

SEQ ID NO: 16665 - RNA, 20 nt, synthetic construct
  source 1..20: mol_type = other RNA
tccctggatgttattttctg

SEQ ID NO: 16666 - RNA, 20 nt, synthetic construct
  source 1..20: mol_type = other RNA
tccctggtcaggcacaggaa

SEQ ID NO: 16667 - RNA, 20 nt, synthetic construct
  source 1..20: mol_type = other RNA
tccctgtagaactgaagctt

SEQ ID NO: 16668 - RNA, 20 nt, synthetic construct
  source 1..20: mol_type = other RNA
tcccttaaaagtgttgtgtt

SEQ ID NO: 16669 - RNA, 20 nt, synthetic construct
  source 1..20: mol_type = other RNA
tcccttcatacagggtattc

SEQ ID NO: 16670 - RNA, 20 nt, synthetic construct
  source 1..20: mol_type = other RNA
tccgatgctttctgaaaggc

SEQ ID NO: 16671 - RNA, 20 nt, synthetic construct
  source 1..20: mol_type = other RNA
tccgatttgagtgataagaa

SEQ ID NO: 16672 - RNA, 20 nt, synthetic construct
  source 1..20: mol_type = other RNA
tccgcacagacctctaactc

SEQ ID NO: 16673 - RNA, 20 nt, synthetic construct
  source 1..20: mol_type = other RNA
tccgcttggtgaaaacgagg

SEQ ID NO: 16674 - RNA, 20 nt, synthetic construct
  source 1..20: mol_type = other RNA
tccgtggaacacacacatgg

SEQ ID NO: 16675 - RNA, 20 nt, synthetic construct
  source 1..20: mol_type = other RNA
tcctaatccatctacacatg

SEQ ID NO: 16676 - RNA, 20 nt, synthetic construct
  source 1..20: mol_type = other RNA
tcctcacccccaaagcaaca

SEQ ID NO: 16677 - RNA, 20 nt, synthetic construct
  source 1..20: mol_type = other RNA
tcctcagcttccttcagaag

SEQ ID NO: 16678 - RNA, 20 nt, synthetic construct
  source 1..20: mol_type = other RNA
tcctccagtcccatttggac

SEQ ID NO: 16679 - RNA, 20 nt, synthetic construct
  source 1..20: mol_type = other RNA
tcctccattttgcaaacact

SEQ ID NO: 16680 - RNA, 20 nt, synthetic construct
  source 1..20: mol_type = other RNA
tcctccctggtcaggcacag

SEQ ID NO: 16681 - RNA, 20 nt, synthetic construct
  source 1..20: mol_type = other RNA
tcctcctcttccacaggttc

SEQ ID NO: 16682 - RNA, 20 nt, synthetic construct
  source 1..20: mol_type = other RNA
tcctcttccacaggttcctc

SEQ ID NO: 16683 - RNA, 20 nt, synthetic construct
  source 1..20: mol_type = other RNA
tcctctttattctttatttg

SEQ ID NO: 16684 - RNA, 20 nt, synthetic construct
  source 1..20: mol_type = other RNA
tcctgaactttttgcaggaa

SEQ ID NO: 16685 - RNA, 20 nt, synthetic construct
  source 1..20: mol_type = other RNA
tcctgactttacacaagaaa

SEQ ID NO: 16686 - RNA, 20 nt, synthetic construct
  source 1..20: mol_type = other RNA
tcctgataccatcacctccc

SEQ ID NO: 16687 - RNA, 20 nt, synthetic construct
  source 1..20: mol_type = other RNA
tcctgcaaaaagttcaggat

SEQ ID NO: 16688 - RNA, 20 nt, synthetic construct
  source 1..20: mol_type = other RNA
tcctgcagaaaataacatcc

SEQ ID NO: 16689 - RNA, 20 nt, synthetic construct
  source 1..20: mol_type = other RNA
tcctgctcattcagaatctg

SEQ ID NO: 16690 - RNA, 20 nt, synthetic construct
  source 1..20: mol_type = other RNA
tcctggaaaaaacactgtct

SEQ ID NO: 16691 - RNA, 20 nt, synthetic construct
  source 1..20: mol_type = other RNA
tcctggtggcagctctgaac

SEQ ID NO: 16692 - RNA, 20 nt, synthetic construct
  source 1..20: mol_type = other RNA
tcctggtttcagatagtgct

SEQ ID NO: 16693 - RNA, 20 nt, synthetic construct
  source 1..20: mol_type = other RNA
tcctgtagctctccactgct

SEQ ID NO: 16694 - RNA, 20 nt, synthetic construct
  source 1..20: mol_type = other RNA
tcctgtgagatcactcaccc

SEQ ID NO: 16695 - RNA, 20 nt, synthetic construct
  source 1..20: mol_type = other RNA
tcctgtgcctgaccagggag

SEQ ID NO: 16696 - RNA, 20 nt, synthetic construct
  source 1..20: mol_type = other RNA
tcctgttcacacaattattc

SEQ ID NO: 16697 - RNA, 20 nt, synthetic construct
  source 1..20: mol_type = other RNA
tcctgttccatcaggcttgc

SEQ ID NO: 16698 - RNA, 20 nt, synthetic construct
  source 1..20: mol_type = other RNA
tcctgttcttgaaagcacct

SEQ ID NO: 16699 - RNA, 20 nt, synthetic construct
  source 1..20: mol_type = other RNA
tccttagtgaacactgagct

SEQ ID NO: 16700 - RNA, 20 nt, synthetic construct
  source 1..20: mol_type = other RNA
tccttcagaaggaaaaagca

SEQ ID NO: 16701 - RNA, 20 nt, synthetic construct
  source 1..20: mol_type = other RNA
tccttcagatcaagaaattg

SEQ ID NO: 16702 - RNA, 20 nt, synthetic construct
  source 1..20: mol_type = other RNA
tccttctctttgctgatcat

SEQ ID NO: 16703 - RNA, 20 nt, synthetic construct
  source 1..20: mol_type = other RNA
tccttctgaaggaagctgag

SEQ ID NO: 16704 - RNA, 20 nt, synthetic construct
  source 1..20: mol_type = other RNA
tccttctggggaggggtctg

SEQ ID NO: 16705 - RNA, 20 nt, synthetic construct
  source 1..20: mol_type = other RNA
tccttgtctcgacccttcag

SEQ ID NO: 16706 - RNA, 20 nt, synthetic construct
  source 1..20: mol_type = other RNA
tcctttcagaaaccagaaca

SEQ ID NO: 16707 - RNA, 20 nt, synthetic construct
  source 1..20: mol_type = other RNA
tccttttctgccactaccac

SEQ ID NO: 16708 - RNA, 20 nt, synthetic construct
  source 1..20: mol_type = other RNA
tcgaactcgcttgattttga

SEQ ID NO: 16709 - RNA, 20 nt, synthetic construct
  source 1..20: mol_type = other RNA
tcgacccttcagaatctctt

SEQ ID NO: 16710 - RNA, 20 nt, synthetic construct
  source 1..20: mol_type = other RNA
tcgagacaaggagcaaacac

SEQ ID NO: 16711 - RNA, 20 nt, synthetic construct
  source 1..20: mol_type = other RNA
tcgagactcataatgtccaa

SEQ ID NO: 16712 - RNA, 20 nt, synthetic construct
  source 1..20: mol_type = other RNA
tcgcatacctcagggcagat

SEQ ID NO: 16713 - RNA, 20 nt, synthetic construct
  source 1..20: mol_type = other RNA
tcgcttgattttgaatactg

SEQ ID NO: 16714 - RNA, 20 nt, synthetic construct
  source 1..20: mol_type = other RNA
tcggagaagggctgcataca

SEQ ID NO: 16715 - RNA, 20 nt, synthetic construct
  source 1..20: mol_type = other RNA
tcggagacatttggttgact

SEQ ID NO: 16716 - RNA, 20 nt, synthetic construct
  source 1..20: mol_type = other RNA
tcggggccatccacaaggct

SEQ ID NO: 16717 - RNA, 20 nt, synthetic construct
  source 1..20: mol_type = other RNA
tcggggtaagccaagaaaga

SEQ ID NO: 16718 - RNA, 20 nt, synthetic construct
  source 1..20: mol_type = other RNA
tcgtagaaattccccttata

SEQ ID NO: 16719 - RNA, 20 nt, synthetic construct
  source 1..20: mol_type = other RNA
tcgtgtgagtcctgacttta

SEQ ID NO: 16720 - RNA, 20 nt, synthetic construct
  source 1..20: mol_type = other RNA
tcgtgtttgctccttgtctc

SEQ ID NO: 16721 - RNA, 20 nt, synthetic construct
  source 1..20: mol_type = other RNA
tcgttatttgaccataaggc

SEQ ID NO: 16722 - RNA, 20 nt, synthetic construct
  source 1..20: mol_type = other RNA
tcgttttcaccaagcggaat

SEQ ID NO: 16723 - RNA, 20 nt, synthetic construct
  source 1..20: mol_type = other RNA
tctaaaacgtaatgaggcat

SEQ ID NO: 16724 - RNA, 20 nt, synthetic construct
  source 1..20: mol_type = other RNA
tctaaaactccaccattcag

SEQ ID NO: 16725 - RNA, 20 nt, synthetic construct
  source 1..20: mol_type = other RNA
tctaaagctggggtgtggct

SEQ ID NO: 16726 - RNA, 20 nt, synthetic construct
  source 1..20: mol_type = other RNA
tctaactctgagctgcctcc

SEQ ID NO: 16727 - RNA, 20 nt, synthetic construct
  source 1..20: mol_type = other RNA
tctaaggtggcatctcttac

SEQ ID NO: 16728 - RNA, 20 nt, synthetic construct
  source 1..20: mol_type = other RNA
tctacacatgtatgcagccc

SEQ ID NO: 16729 - RNA, 20 nt, synthetic construct
  source 1..20: mol_type = other RNA
tctacagggatataaaaata

SEQ ID NO: 16730 - RNA, 20 nt, synthetic construct
  source 1..20: mol_type = other RNA
tctacgatttatattctgta

SEQ ID NO: 16731 - RNA, 20 nt, synthetic construct
  source 1..20: mol_type = other RNA
tctactttcttgtgtaaagt

SEQ ID NO: 16732 - RNA, 20 nt, synthetic construct
  source 1..20: mol_type = other RNA
tctagtaatttggaaggtga

SEQ ID NO: 16733 - RNA, 20 nt, synthetic construct
  source 1..20: mol_type = other RNA
tctagtcaaaactgtgactg

SEQ ID NO: 16734 - RNA, 20 nt, synthetic construct
  source 1..20: mol_type = other RNA
tctagtgccacacagtgact

SEQ ID NO: 16735 - RNA, 20 nt, synthetic construct
  source 1..20: mol_type = other RNA
tctatcctgttccatcaggc

SEQ ID NO: 16736 - RNA, 20 nt, synthetic construct
  source 1..20: mol_type = other RNA
tctattttcacttcccttaa

SEQ ID NO: 16737 - RNA, 20 nt, synthetic construct
  source 1..20: mol_type = other RNA
tctatttttatatccctgta

SEQ ID NO: 16738 - RNA, 20 nt, synthetic construct
  source 1..20: mol_type = other RNA
tctcaaaaactgatttttgt

SEQ ID NO: 16739 - RNA, 20 nt, synthetic construct
  source 1..20: mol_type = other RNA
tctcaaatcacagaagcaag

SEQ ID NO: 16740 - RNA, 20 nt, synthetic construct
  source 1..20: mol_type = other RNA
tctcaatattatccagattg

SEQ ID NO: 16741 - RNA, 20 nt, synthetic construct
  source 1..20: mol_type = other RNA
tctcaatgatgctcttttgc

SEQ ID NO: 16742 - RNA, 20 nt, synthetic construct
  source 1..20: mol_type = other RNA
tctcacaggacaactcatta

SEQ ID NO: 16743 - RNA, 20 nt, synthetic construct
  source 1..20: mol_type = other RNA
tctcacataaatgccattaa

SEQ ID NO: 16744 - RNA, 20 nt, synthetic construct
  source 1..20: mol_type = other RNA
tctcagaacacaatggaaca

SEQ ID NO: 16745 - RNA, 20 nt, synthetic construct
  source 1..20: mol_type = other RNA
tctcaggcagtgggcttcca

SEQ ID NO: 16746 - RNA, 20 nt, synthetic construct
  source 1..20: mol_type = other RNA
tctcagtacatttctggcac

SEQ ID NO: 16747 - RNA, 20 nt, synthetic construct
  source 1..20: mol_type = other RNA
tctcatcaactgctggcagt

SEQ ID NO: 16748 - RNA, 20 nt, synthetic construct
  source 1..20: mol_type = other RNA
tctccaaaacagaccattta

SEQ ID NO: 16749 - RNA, 20 nt, synthetic construct
  source 1..20: mol_type = other RNA
tctccaatcaaatgacctcc

SEQ ID NO: 16750 - RNA, 20 nt, synthetic construct
  source 1..20: mol_type = other RNA
tctccactgctaccaaaaat

SEQ ID NO: 16751 - RNA, 20 nt, synthetic construct
  source 1..20: mol_type = other RNA
tctccagttccaaaaaccct

SEQ ID NO: 16752 - RNA, 20 nt, synthetic construct
  source 1..20: mol_type = other RNA
tctccattagccttttggtc

SEQ ID NO: 16753 - RNA, 20 nt, synthetic construct
  source 1..20: mol_type = other RNA
tctccatttacttctggatg

SEQ ID NO: 16754 - RNA, 20 nt, synthetic construct
  source 1..20: mol_type = other RNA
tctccccctcctcctcttcc

SEQ ID NO: 16755 - RNA, 20 nt, synthetic construct
  source 1..20: mol_type = other RNA
tctccctcaaaaccagcaac

SEQ ID NO: 16756 - RNA, 20 nt, synthetic construct
  source 1..20: mol_type = other RNA
tctccgatgctttctgaaag

SEQ ID NO: 16757 - RNA, 20 nt, synthetic construct
  source 1..20: mol_type = other RNA
tctccgatttgagtgataag

SEQ ID NO: 16758 - RNA, 20 nt, synthetic construct
  source 1..20: mol_type = other RNA
tctcctgcagaaaataacat

SEQ ID NO: 16759 - RNA, 20 nt, synthetic construct
  source 1..20: mol_type = other RNA
tctcgaactcgcttgatttt

SEQ ID NO: 16760 - RNA, 20 nt, synthetic construct
  source 1..20: mol_type = other RNA
tctcgacccttcagaatctc

SEQ ID NO: 16761 - RNA, 20 nt, synthetic construct
  source 1..20: mol_type = other RNA
tctcgtgtttgctccttgtc

SEQ ID NO: 16762 - RNA, 20 nt, synthetic construct
  source 1..20: mol_type = other RNA
tctctcaggcagtgggcttc

SEQ ID NO: 16763 - RNA, 20 nt, synthetic construct
  source 1..20: mol_type = other RNA
tctctccaatcaaatgacct

SEQ ID NO: 16764 - RNA, 20 nt, synthetic construct
  source 1..20: mol_type = other RNA
tctctctctgggctccttca

SEQ ID NO: 16765 - RNA, 20 nt, synthetic construct
  source 1..20: mol_type = other RNA
tctctctgggctccttcaga

SEQ ID NO: 16766 - RNA, 20 nt, synthetic construct
  source 1..20: mol_type = other RNA
tctctgaaactaggtgtgta

SEQ ID NO: 16767 - RNA, 20 nt, synthetic construct
  source 1..20: mol_type = other RNA
tctctgaagcctgttgattc

SEQ ID NO: 16768 - RNA, 20 nt, synthetic construct
  source 1..20: mol_type = other RNA
tctctgggctccttcagatc

SEQ ID NO: 16769 - RNA, 20 nt, synthetic construct
  source 1..20: mol_type = other RNA
tctcttacagaagcaagaac

SEQ ID NO: 16770 - RNA, 20 nt, synthetic construct
  source 1..20: mol_type = other RNA
tctcttgctctttgtttctc

SEQ ID NO: 16771 - RNA, 20 nt, synthetic construct
  source 1..20: mol_type = other RNA
tctcttgcttagttaccttt

SEQ ID NO: 16772 - RNA, 20 nt, synthetic construct
  source 1..20: mol_type = other RNA
tctctttgctgatcattgtt

SEQ ID NO: 16773 - RNA, 20 nt, synthetic construct
  source 1..20: mol_type = other RNA
tctgaaaccaggatggattg

SEQ ID NO: 16774 - RNA, 20 nt, synthetic construct
  source 1..20: mol_type = other RNA
tctgaaactaggtgtgtatt

SEQ ID NO: 16775 - RNA, 20 nt, synthetic construct
  source 1..20: mol_type = other RNA
tctgaaaggaacaggtattt

SEQ ID NO: 16776 - RNA, 20 nt, synthetic construct
  source 1..20: mol_type = other RNA
tctgaaaggcctcagaataa

SEQ ID NO: 16777 - RNA, 20 nt, synthetic construct
  source 1..20: mol_type = other RNA
tctgaacggtatttaaaaca

SEQ ID NO: 16778 - RNA, 20 nt, synthetic construct
  source 1..20: mol_type = other RNA
tctgaagaagttgtttgctg

SEQ ID NO: 16779 - RNA, 20 nt, synthetic construct
  source 1..20: mol_type = other RNA
tctgaagcagtttcacgcca

SEQ ID NO: 16780 - RNA, 20 nt, synthetic construct
  source 1..20: mol_type = other RNA
tctgaagcctgttgattcaa

SEQ ID NO: 16781 - RNA, 20 nt, synthetic construct
  source 1..20: mol_type = other RNA
tctgaagctctggattttca

SEQ ID NO: 16782 - RNA, 20 nt, synthetic construct
  source 1..20: mol_type = other RNA
tctgaaggaagctgaggaac

SEQ ID NO: 16783 - RNA, 20 nt, synthetic construct
  source 1..20: mol_type = other RNA
tctgaaggagcccagagaga

SEQ ID NO: 16784 - RNA, 20 nt, synthetic construct
  source 1..20: mol_type = other RNA
tctgaagggtcgagacaagg

SEQ ID NO: 16785 - RNA, 20 nt, synthetic construct
  source 1..20: mol_type = other RNA
tctgaatgagcaggagggga

SEQ ID NO: 16786 - RNA, 20 nt, synthetic construct
  source 1..20: mol_type = other RNA
tctgaatggtggagttttag

SEQ ID NO: 16787 - RNA, 20 nt, synthetic construct
  source 1..20: mol_type = other RNA
tctgacattggtcttgtttt

SEQ ID NO: 16788 - RNA, 20 nt, synthetic construct
  source 1..20: mol_type = other RNA
tctgactataaggggaattt

SEQ ID NO: 16789 - RNA, 20 nt, synthetic construct
  source 1..20: mol_type = other RNA
tctgactatggcaagactca

SEQ ID NO: 16790 - RNA, 20 nt, synthetic construct
  source 1..20: mol_type = other RNA
tctgagaaaacaagaccaat

SEQ ID NO: 16791 - RNA, 20 nt, synthetic construct
  source 1..20: mol_type = other RNA
tctgagctgcctccaaagcc

SEQ ID NO: 16792 - RNA, 20 nt, synthetic construct
  source 1..20: mol_type = other RNA
tctgaggcctttcagaaagc

SEQ ID NO: 16793 - RNA, 20 nt, synthetic construct
  source 1..20: mol_type = other RNA
tctgagtgtgacttcctccc

SEQ ID NO: 16794 - RNA, 20 nt, synthetic construct
  source 1..20: mol_type = other RNA
tctgcaagatgggaaatcat

SEQ ID NO: 16795 - RNA, 20 nt, synthetic construct
  source 1..20: mol_type = other RNA
tctgcaccgcaatggaaaca

SEQ ID NO: 16796 - RNA, 20 nt, synthetic construct
  source 1..20: mol_type = other RNA
tctgcagcagtggtttgtct

SEQ ID NO: 16797 - RNA, 20 nt, synthetic construct
  source 1..20: mol_type = other RNA
tctgcaggagatgggcatat

SEQ ID NO: 16798 - RNA, 20 nt, synthetic construct
  source 1..20: mol_type = other RNA
tctgccactaccacaccacc

SEQ ID NO: 16799 - RNA, 20 nt, synthetic construct
  source 1..20: mol_type = other RNA
tctgccctgaggtatgcgat

SEQ ID NO: 16800 - RNA, 20 nt, synthetic construct
  source 1..20: mol_type = other RNA
tctgcctcttccgtggaaca

SEQ ID NO: 16801 - RNA, 20 nt, synthetic construct
  source 1..20: mol_type = other RNA
tctgctcctgttcttgaaag

SEQ ID NO: 16802 - RNA, 20 nt, synthetic construct
  source 1..20: mol_type = other RNA
tctgctctttgttgaaaatg

SEQ ID NO: 16803 - RNA, 20 nt, synthetic construct
  source 1..20: mol_type = other RNA
tctggagctttgtagccaga

SEQ ID NO: 16804 - RNA, 20 nt, synthetic construct
  source 1..20: mol_type = other RNA
tctggagtatttcctcttta

SEQ ID NO: 16805 - RNA, 20 nt, synthetic construct
  source 1..20: mol_type = other RNA
tctggataatattgagacag

SEQ ID NO: 16806 - RNA, 20 nt, synthetic construct
  source 1..20: mol_type = other RNA
tctggatgagctctctcagg

SEQ ID NO: 16807 - RNA, 20 nt, synthetic construct
  source 1..20: mol_type = other RNA
tctggattttcaggcccact

SEQ ID NO: 16808 - RNA, 20 nt, synthetic construct
  source 1..20: mol_type = other RNA
tctggcaaatgggaggtgat

SEQ ID NO: 16809 - RNA, 20 nt, synthetic construct
  source 1..20: mol_type = other RNA
tctggcacttacctacacat

SEQ ID NO: 16810 - RNA, 20 nt, synthetic construct
  source 1..20: mol_type = other RNA
tctggccaaagaatgatcct

SEQ ID NO: 16811 - RNA, 20 nt, synthetic construct
  source 1..20: mol_type = other RNA
tctggctacaaagctccaga

SEQ ID NO: 16812 - RNA, 20 nt, synthetic construct
  source 1..20: mol_type = other RNA
tctggcttcccttcatacag

SEQ ID NO: 16813 - RNA, 20 nt, synthetic construct
  source 1..20: mol_type = other RNA
tctgggaaggtggtgcctca

SEQ ID NO: 16814 - RNA, 20 nt, synthetic construct
  source 1..20: mol_type = other RNA
tctgggatggttgtgtttgt

SEQ ID NO: 16815 - RNA, 20 nt, synthetic construct
  source 1..20: mol_type = other RNA
tctgggctccttcagatcaa

SEQ ID NO: 16816 - RNA, 20 nt, synthetic construct
  source 1..20: mol_type = other RNA
tctggggaggggtctgagtg

SEQ ID NO: 16817 - RNA, 20 nt, synthetic construct
  source 1..20: mol_type = other RNA
tctgggtgtaagcttgcctt

SEQ ID NO: 16818 - RNA, 20 nt, synthetic construct
  source 1..20: mol_type = other RNA
tctggtcaacaagctgcgca

SEQ ID NO: 16819 - RNA, 20 nt, synthetic construct
  source 1..20: mol_type = other RNA
tctggtgaagaattctgttc

SEQ ID NO: 16820 - RNA, 20 nt, synthetic construct
  source 1..20: mol_type = other RNA
tctggtggtgctgtgtgcat

SEQ ID NO: 16821 - RNA, 20 nt, synthetic construct
  source 1..20: mol_type = other RNA
tctggtttctgaaaggaaca

SEQ ID NO: 16822 - RNA, 20 nt, synthetic construct
  source 1..20: mol_type = other RNA
tctgtaagagatgccacctt

SEQ ID NO: 16823 - RNA, 20 nt, synthetic construct
  source 1..20: mol_type = other RNA
tctgtacttcctccagtccc

SEQ ID NO: 16824 - RNA, 20 nt, synthetic construct
  source 1..20: mol_type = other RNA
tctgtagcccaagaaaatgc

SEQ ID NO: 16825 - RNA, 20 nt, synthetic construct
  source 1..20: mol_type = other RNA
tctgtatgtcattcctgttc

SEQ ID NO: 16826 - RNA, 20 nt, synthetic construct
  source 1..20: mol_type = other RNA
tctgtctggcaaatgggagg

SEQ ID NO: 16827 - RNA, 20 nt, synthetic construct
  source 1..20: mol_type = other RNA
tctgtgagttctgtagccca

SEQ ID NO: 16828 - RNA, 20 nt, synthetic construct
  source 1..20: mol_type = other RNA
tctgtgatttgagagtaaga

SEQ ID NO: 16829 - RNA, 20 nt, synthetic construct
  source 1..20: mol_type = other RNA
tctgtgcggaattgatctgc

SEQ ID NO: 16830 - RNA, 20 nt, synthetic construct
  source 1..20: mol_type = other RNA
tctgttcaggttccagcagc

SEQ ID NO: 16831 - RNA, 20 nt, synthetic construct
  source 1..20: mol_type = other RNA
tctgttctttattctctgaa

SEQ ID NO: 16832 - RNA, 20 nt, synthetic construct
  source 1..20: mol_type = other RNA
tctgttgccctcaacatggt

SEQ ID NO: 16833 - RNA, 20 nt, synthetic construct
  source 1..20: mol_type = other RNA
tctgttttggagaagtgcac

SEQ ID NO: 16834 - RNA, 20 nt, synthetic construct
  source 1..20: mol_type = other RNA
tcttacagaagcaagaacag

SEQ ID NO: 16835 - RNA, 20 nt, synthetic construct
  source 1..20: mol_type = other RNA
tcttactctcaaatcacaga

SEQ ID NO: 16836 - RNA, 20 nt, synthetic construct
  source 1..20: mol_type = other RNA
tcttatcactcaaatcggag

SEQ ID NO: 16837 - RNA, 20 nt, synthetic construct
  source 1..20: mol_type = other RNA
tcttcacaggtgctttcaag

SEQ ID NO: 16838 - RNA, 20 nt, synthetic construct
  source 1..20: mol_type = other RNA
tcttcaccagacgctagctt

SEQ ID NO: 16839 - RNA, 20 nt, synthetic construct
  source 1..20: mol_type = other RNA
tcttcagaaaagacaccaac

SEQ ID NO: 16840 - RNA, 20 nt, synthetic construct
  source 1..20: mol_type = other RNA
tcttcagtatcaacccaatc

SEQ ID NO: 16841 - RNA, 20 nt, synthetic construct
  source 1..20: mol_type = other RNA
tcttccacaggttcctcagc

SEQ ID NO: 16842 - RNA, 20 nt, synthetic construct
  source 1..20: mol_type = other RNA
tcttccactttagtctggcc

SEQ ID NO: 16843 - RNA, 20 nt, synthetic construct
  source 1..20: mol_type = other RNA
tcttccgtggaacacacaca

SEQ ID NO: 16844 - RNA, 20 nt, synthetic construct
  source 1..20: mol_type = other RNA
tcttctaaaactccaccatt

SEQ ID NO: 16845 - RNA, 20 nt, synthetic construct
  source 1..20: mol_type = other RNA
tcttcttcacaggtgctttc

SEQ ID NO: 16846 - RNA, 20 nt, synthetic construct
  source 1..20: mol_type = other RNA
tcttgaaagcacctgtgaag

SEQ ID NO: 16847 - RNA, 20 nt, synthetic construct
  source 1..20: mol_type = other RNA
tcttgacaggtgtatccaat

SEQ ID NO: 16848 - RNA, 20 nt, synthetic construct
  source 1..20: mol_type = other RNA
tcttgatctgaaggagccca

SEQ ID NO: 16849 - RNA, 20 nt, synthetic construct
  source 1..20: mol_type = other RNA
tcttgcagatgtgtaggtaa

SEQ ID NO: 16850 - RNA, 20 nt, synthetic construct
  source 1..20: mol_type = other RNA
tcttgccatagtcagatgca

SEQ ID NO: 16851 - RNA, 20 nt, synthetic construct
  source 1..20: mol_type = other RNA
tcttgctctttgtttctcat

SEQ ID NO: 16852 - RNA, 20 nt, synthetic construct
  source 1..20: mol_type = other RNA
tcttgcttagttaccttttt

SEQ ID NO: 16853 - RNA, 20 nt, synthetic construct
  source 1..20: mol_type = other RNA
tcttgcttctgtaagagatg

SEQ ID NO: 16854 - RNA, 20 nt, synthetic construct
  source 1..20: mol_type = other RNA
tcttgctttgggatcacatt

SEQ ID NO: 16855 - RNA, 20 nt, synthetic construct
  source 1..20: mol_type = other RNA
tcttggcttaccccgaagtt

SEQ ID NO: 16856 - RNA, 20 nt, synthetic construct
  source 1..20: mol_type = other RNA
tcttgggctacagaactcac

SEQ ID NO: 16857 - RNA, 20 nt, synthetic construct
  source 1..20: mol_type = other RNA
tcttgtcatggtaattagca

SEQ ID NO: 16858 - RNA, 20 nt, synthetic construct
  source 1..20: mol_type = other RNA
tcttgtgcccccaacacagc

SEQ ID NO: 16859 - RNA, 20 nt, synthetic construct
  source 1..20: mol_type = other RNA
tcttgtgtaaagtcaggact

SEQ ID NO: 16860 - RNA, 20 nt, synthetic construct
  source 1..20: mol_type = other RNA
tcttgttcaaacaatacaca

SEQ ID NO: 16861 - RNA, 20 nt, synthetic construct
  source 1..20: mol_type = other RNA
tcttgtttcaatttcttgat

SEQ ID NO: 16862 - RNA, 20 nt, synthetic construct
  source 1..20: mol_type = other RNA
tcttgtttcctgcaaaaagt

SEQ ID NO: 16863 - RNA, 20 nt, synthetic construct
  source 1..20: mol_type = other RNA
tcttgttttctcagaacaca

SEQ ID NO: 16864 - RNA, 20 nt, synthetic construct
  source 1..20: mol_type = other RNA
tctttaactgcattttcttg

SEQ ID NO: 16865 - RNA, 20 nt, synthetic construct
  source 1..20: mol_type = other RNA
tctttattctctgaaactag

SEQ ID NO: 16866 - RNA, 20 nt, synthetic construct
  source 1..20: mol_type = other RNA
tctttcaaaagttattatgg

SEQ ID NO: 16867 - RNA, 20 nt, synthetic construct
  source 1..20: mol_type = other RNA
tctttctccattagcctttt

SEQ ID NO: 16868 - RNA, 20 nt, synthetic construct
  source 1..20: mol_type = other RNA
tctttctccccctcctcctc

SEQ ID NO: 16869 - RNA, 20 nt, synthetic construct
  source 1..20: mol_type = other RNA
tctttcttatcactcaaatc

SEQ ID NO: 16870 - RNA, 20 nt, synthetic construct
  source 1..20: mol_type = other RNA
tctttcttggcttaccccga

SEQ ID NO: 16871 - RNA, 20 nt, synthetic construct
  source 1..20: mol_type = other RNA
tctttgctgatcattgttgc

SEQ ID NO: 16872 - RNA, 20 nt, synthetic construct
  source 1..20: mol_type = other RNA
tctttggccagactaaagtg

SEQ ID NO: 16873 - RNA, 20 nt, synthetic construct
  source 1..20: mol_type = other RNA
tctttgttgaaaatgaaatc

SEQ ID NO: 16874 - RNA, 20 nt, synthetic construct
  source 1..20: mol_type = other RNA
tctttgtttctcatcaactg

SEQ ID NO: 16875 - RNA, 20 nt, synthetic construct
  source 1..20: mol_type = other RNA
tcttttctgaagaagttgtt

SEQ ID NO: 16876 - RNA, 20 nt, synthetic construct
  source 1..20: mol_type = other RNA
tcttttgctgcacattatca

SEQ ID NO: 16877 - RNA, 20 nt, synthetic construct
  source 1..20: mol_type = other RNA
tcttttggttggtgtctttt

SEQ ID NO: 16878 - RNA, 20 nt, synthetic construct
  source 1..20: mol_type = other RNA
tgaaaaactggtgaaatctt

SEQ ID NO: 16879 - RNA, 20 nt, synthetic construct
  source 1..20: mol_type = other RNA
tgaaaaacttatgtccccag

SEQ ID NO: 16880 - RNA, 20 nt, synthetic construct
  source 1..20: mol_type = other RNA
tgaaaacattcttccacttt

SEQ ID NO: 16881 - RNA, 20 nt, synthetic construct
  source 1..20: mol_type = other RNA
tgaaaacgaggggccttcaa

SEQ ID NO: 16882 - RNA, 20 nt, synthetic construct
  source 1..20: mol_type = other RNA
tgaaaatagagggtaaacct

SEQ ID NO: 16883 - RNA, 20 nt, synthetic construct
  source 1..20: mol_type = other RNA
tgaaaatccagagcttcaga

SEQ ID NO: 16884 - RNA, 20 nt, synthetic construct
  source 1..20: mol_type = other RNA
tgaaaatgaaatctagtgcc

SEQ ID NO: 16885 - RNA, 20 nt, synthetic construct
  source 1..20: mol_type = other RNA
tgaaaatggctcagtctctg

SEQ ID NO: 16886 - RNA, 20 nt, synthetic construct
  source 1..20: mol_type = other RNA
tgaaacaagaccaaaaggct

SEQ ID NO: 16887 - RNA, 20 nt, synthetic construct
  source 1..20: mol_type = other RNA
tgaaacagcacttgaatcaa

SEQ ID NO: 16888 - RNA, 20 nt, synthetic construct
  source 1..20: mol_type = other RNA
tgaaaccaggatggattgaa

SEQ ID NO: 16889 - RNA, 20 nt, synthetic construct
  source 1..20: mol_type = other RNA
tgaaactaggtgtgtattgt

SEQ ID NO: 16890 - RNA, 20 nt, synthetic construct
  source 1..20: mol_type = other RNA
tgaaactgcttcagatgctg

SEQ ID NO: 16891 - RNA, 20 nt, synthetic construct
  source 1..20: mol_type = other RNA
tgaaagagtgccacttggtg

SEQ ID NO: 16892 - RNA, 20 nt, synthetic construct
  source 1..20: mol_type = other RNA
tgaaagcacctgtgaagaag

SEQ ID NO: 16893 - RNA, 20 nt, synthetic construct
  source 1..20: mol_type = other RNA
tgaaagcagtcaaccaaatg

SEQ ID NO: 16894 - RNA, 20 nt, synthetic construct
  source 1..20: mol_type = other RNA
tgaaaggaacaggtatttag

SEQ ID NO: 16895 - RNA, 20 nt, synthetic construct
  source 1..20: mol_type = other RNA
tgaaaggcctcagaataatt

SEQ ID NO: 16896 - RNA, 20 nt, synthetic construct
  source 1..20: mol_type = other RNA
tgaaatcaagtgcatgcaaa

SEQ ID NO: 16897 - RNA, 20 nt, synthetic construct
  source 1..20: mol_type = other RNA
tgaaatctagtgccacacag

SEQ ID NO: 16898 - RNA, 20 nt, synthetic construct
  source 1..20: mol_type = other RNA
tgaaatctttaactgcattt

SEQ ID NO: 16899 - RNA, 20 nt, synthetic construct
  source 1..20: mol_type = other RNA
tgaaatgaatcaagggcagt

SEQ ID NO: 16900 - RNA, 20 nt, synthetic construct
  source 1..20: mol_type = other RNA
tgaaatgaatggtgcttact

SEQ ID NO: 16901 - RNA, 20 nt, synthetic construct
  source 1..20: mol_type = other RNA
tgaaatgtcagggccagtca

SEQ ID NO: 16902 - RNA, 20 nt, synthetic construct
  source 1..20: mol_type = other RNA
tgaacaagaaacctgtattt

SEQ ID NO: 16903 - RNA, 20 nt, synthetic construct
  source 1..20: mol_type = other RNA
tgaacactgagctttgcttg

SEQ ID NO: 16904 - RNA, 20 nt, synthetic construct
  source 1..20: mol_type = other RNA
tgaacagaattcttcaccag

SEQ ID NO: 16905 - RNA, 20 nt, synthetic construct
  source 1..20: mol_type = other RNA
tgaacaggaatgacatacag

SEQ ID NO: 16906 - RNA, 20 nt, synthetic construct
  source 1..20: mol_type = other RNA
tgaaccttctctctctgggc

SEQ ID NO: 16907 - RNA, 20 nt, synthetic construct
  source 1..20: mol_type = other RNA
tgaacggtatttaaaacaaa

SEQ ID NO: 16908 - RNA, 20 nt, synthetic construct
  source 1..20: mol_type = other RNA
tgaactcctggaaaaaacac

SEQ ID NO: 16909 - RNA, 20 nt, synthetic construct
  source 1..20: mol_type = other RNA
tgaactctgggatggttgtg

SEQ ID NO: 16910 - RNA, 20 nt, synthetic construct
  source 1..20: mol_type = other RNA
tgaactttttgcaggaaaca

SEQ ID NO: 16911 - RNA, 20 nt, synthetic construct
  source 1..20: mol_type = other RNA
tgaagaagatcttgctttgg

SEQ ID NO: 16912 - RNA, 20 nt, synthetic construct
  source 1..20: mol_type = other RNA
tgaagaagttgtttgctgct

SEQ ID NO: 16913 - RNA, 20 nt, synthetic construct
  source 1..20: mol_type = other RNA
tgaagaattctgttcaggtt

SEQ ID NO: 16914 - RNA, 20 nt, synthetic construct
  source 1..20: mol_type = other RNA
tgaagaattgatggcagtga

SEQ ID NO: 16915 - RNA, 20 nt, synthetic construct
  source 1..20: mol_type = other RNA
tgaagcagtttcacgccaag

SEQ ID NO: 16916 - RNA, 20 nt, synthetic construct
  source 1..20: mol_type = other RNA
tgaagcctgttgattcaagt

SEQ ID NO: 16917 - RNA, 20 nt, synthetic construct
  source 1..20: mol_type = other RNA
tgaagctctggattttcagg

SEQ ID NO: 16918 - RNA, 20 nt, synthetic construct
  source 1..20: mol_type = other RNA
tgaagcttgttgtgacttct

SEQ ID NO: 16919 - RNA, 20 nt, synthetic construct
  source 1..20: mol_type = other RNA
tgaaggaagctgaggaacct

SEQ ID NO: 16920 - RNA, 20 nt, synthetic construct
  source 1..20: mol_type = other RNA
tgaaggagcccagagagaga

SEQ ID NO: 16921 - RNA, 20 nt, synthetic construct
  source 1..20: mol_type = other RNA
tgaaggcccctcgttttcac

SEQ ID NO: 16922 - RNA, 20 nt, synthetic construct
  source 1..20: mol_type = other RNA
tgaagggaagccagaatagt

SEQ ID NO: 16923 - RNA, 20 nt, synthetic construct
  source 1..20: mol_type = other RNA
tgaagggtcgagacaaggag

SEQ ID NO: 16924 - RNA, 20 nt, synthetic construct
  source 1..20: mol_type = other RNA
tgaagtaagcaccattcatt

SEQ ID NO: 16925 - RNA, 20 nt, synthetic construct
  source 1..20: mol_type = other RNA
tgaatactgattttcaccat

SEQ ID NO: 16926 - RNA, 20 nt, synthetic construct
  source 1..20: mol_type = other RNA
tgaatcaacaggcttcagag

SEQ ID NO: 16927 - RNA, 20 nt, synthetic construct
  source 1..20: mol_type = other RNA
tgaatcaagggcagtcccaa

SEQ ID NO: 16928 - RNA, 20 nt, synthetic construct
  source 1..20: mol_type = other RNA
tgaatgagcaggaggggaaa

SEQ ID NO: 16929 - RNA, 20 nt, synthetic construct
  source 1..20: mol_type = other RNA
tgaatggtgcttacttcaag

SEQ ID NO: 16930 - RNA, 20 nt, synthetic construct
  source 1..20: mol_type = other RNA
tgaatggtggagttttagaa

SEQ ID NO: 16931 - RNA, 20 nt, synthetic construct
  source 1..20: mol_type = other RNA
tgaattgaaggcccctcgtt

SEQ ID NO: 16932 - RNA, 20 nt, synthetic construct
  source 1..20: mol_type = other RNA
tgacaagaacattgtattac

SEQ ID NO: 16933 - RNA, 20 nt, synthetic construct
  source 1..20: mol_type = other RNA
tgacaggtgtatccaataaa

SEQ ID NO: 16934 - RNA, 20 nt, synthetic construct
  source 1..20: mol_type = other RNA
tgacatacagactgcaggga

SEQ ID NO: 16935 - RNA, 20 nt, synthetic construct
  source 1..20: mol_type = other RNA
tgacattggtcttgttttct

SEQ ID NO: 16936 - RNA, 20 nt, synthetic construct
  source 1..20: mol_type = other RNA
tgacatttcaacttttactt

SEQ ID NO: 16937 - RNA, 20 nt, synthetic construct
  source 1..20: mol_type = other RNA
tgaccagacatatcttggtt

SEQ ID NO: 16938 - RNA, 20 nt, synthetic construct
  source 1..20: mol_type = other RNA
tgaccagggaggaagtcaca

SEQ ID NO: 16939 - RNA, 20 nt, synthetic construct
  source 1..20: mol_type = other RNA
tgaccataaggctcttactc

SEQ ID NO: 16940 - RNA, 20 nt, synthetic construct
  source 1..20: mol_type = other RNA
tgacctccaaacaatacact

SEQ ID NO: 16941 - RNA, 20 nt, synthetic construct
  source 1..20: mol_type = other RNA
tgactagacaaaccactgct

SEQ ID NO: 16942 - RNA, 20 nt, synthetic construct
  source 1..20: mol_type = other RNA
tgactataaggggaatttct

SEQ ID NO: 16943 - RNA, 20 nt, synthetic construct
  source 1..20: mol_type = other RNA
tgactatggcaagactcagt

SEQ ID NO: 16944 - RNA, 20 nt, synthetic construct
  source 1..20: mol_type = other RNA
tgactgcacatgagcttttg

SEQ ID NO: 16945 - RNA, 20 nt, synthetic construct
  source 1..20: mol_type = other RNA
tgactgctttcacctggatt

SEQ ID NO: 16946 - RNA, 20 nt, synthetic construct
  source 1..20: mol_type = other RNA
tgactggccctgacatttca

SEQ ID NO: 16947 - RNA, 20 nt, synthetic construct
  source 1..20: mol_type = other RNA
tgactgttaatggcatttat

SEQ ID NO: 16948 - RNA, 20 nt, synthetic construct
  source 1..20: mol_type = other RNA
tgactgttccattgtgttct

SEQ ID NO: 16949 - RNA, 20 nt, synthetic construct
  source 1..20: mol_type = other RNA
tgacttcctccctggtcagg

SEQ ID NO: 16950 - RNA, 20 nt, synthetic construct
  source 1..20: mol_type = other RNA
tgacttctgctcctgttctt

SEQ ID NO: 16951 - RNA, 20 nt, synthetic construct
  source 1..20: mol_type = other RNA
tgacttgtgctccagctgtg

SEQ ID NO: 16952 - RNA, 20 nt, synthetic construct
  source 1..20: mol_type = other RNA
tgactttacacaagaaagta

SEQ ID NO: 16953 - RNA, 20 nt, synthetic construct
  source 1..20: mol_type = other RNA
tgagaaaacaagaccaatgt

SEQ ID NO: 16954 - RNA, 20 nt, synthetic construct
  source 1..20: mol_type = other RNA
tgagaaacaaagagcaagag

SEQ ID NO: 16955 - RNA, 20 nt, synthetic construct
  source 1..20: mol_type = other RNA
tgagaacagaagcagctgtt

SEQ ID NO: 16956 - RNA, 20 nt, synthetic construct
  source 1..20: mol_type = other RNA
tgagacagtgttttttccag

SEQ ID NO: 16957 - RNA, 20 nt, synthetic construct
  source 1..20: mol_type = other RNA
tgagaccatggagcagcatc

SEQ ID NO: 16958 - RNA, 20 nt, synthetic construct
  source 1..20: mol_type = other RNA
tgagagagctcatccagaag

SEQ ID NO: 16959 - RNA, 20 nt, synthetic construct
  source 1..20: mol_type = other RNA
tgagagtaagagccttatgg

SEQ ID NO: 16960 - RNA, 20 nt, synthetic construct
  source 1..20: mol_type = other RNA
tgagatatgcccatctcctg

SEQ ID NO: 16961 - RNA, 20 nt, synthetic construct
  source 1..20: mol_type = other RNA
tgagatcactcacccatcgc

SEQ ID NO: 16962 - RNA, 20 nt, synthetic construct
  source 1..20: mol_type = other RNA
tgagatgtggttttctgcac

SEQ ID NO: 16963 - RNA, 20 nt, synthetic construct
  source 1..20: mol_type = other RNA
tgagcaagttgcgcagcttg

SEQ ID NO: 16964 - RNA, 20 nt, synthetic construct
  source 1..20: mol_type = other RNA
tgagcaggaggggaaaagtg

SEQ ID NO: 16965 - RNA, 20 nt, synthetic construct
  source 1..20: mol_type = other RNA
tgagccattttcaaactcac

SEQ ID NO: 16966 - RNA, 20 nt, synthetic construct
  source 1..20: mol_type = other RNA
tgagctctctcaggcagtgg

SEQ ID NO: 16967 - RNA, 20 nt, synthetic construct
  source 1..20: mol_type = other RNA
tgagctgcctccaaagccag

SEQ ID NO: 16968 - RNA, 20 nt, synthetic construct
  source 1..20: mol_type = other RNA
tgagctttgcttgaagtaag

SEQ ID NO: 16969 - RNA, 20 nt, synthetic construct
  source 1..20: mol_type = other RNA
tgagcttttggtaaatggtc

SEQ ID NO: 16970 - RNA, 20 nt, synthetic construct
  source 1..20: mol_type = other RNA
tgaggaaaagtctggagtat

SEQ ID NO: 16971 - RNA, 20 nt, synthetic construct
  source 1..20: mol_type = other RNA
tgaggaacctgtggaagagg

SEQ ID NO: 16972 - RNA, 20 nt, synthetic construct
  source 1..20: mol_type = other RNA
tgaggcaccaccttcccaga

SEQ ID NO: 16973 - RNA, 20 nt, synthetic construct
  source 1..20: mol_type = other RNA
tgaggcatcactgccatcaa

SEQ ID NO: 16974 - RNA, 20 nt, synthetic construct
  source 1..20: mol_type = other RNA
tgaggcctgtgatgctgatg

SEQ ID NO: 16975 - RNA, 20 nt, synthetic construct
  source 1..20: mol_type = other RNA
tgaggcctttcagaaagcat

SEQ ID NO: 16976 - RNA, 20 nt, synthetic construct
  source 1..20: mol_type = other RNA
tgaggcttatgttgcaaaag

SEQ ID NO: 16977 - RNA, 20 nt, synthetic construct
  source 1..20: mol_type = other RNA
tgagggagatgtgaactctg

SEQ ID NO: 16978 - RNA, 20 nt, synthetic construct
  source 1..20: mol_type = other RNA
tgagggcaacagactaagtc

SEQ ID NO: 16979 - RNA, 20 nt, synthetic construct
  source 1..20: mol_type = other RNA
tgagggtttttggaactgga

SEQ ID NO: 16980 - RNA, 20 nt, synthetic construct
  source 1..20: mol_type = other RNA
tgaggtatgcgatgggtgag

SEQ ID NO: 16981 - RNA, 20 nt, synthetic construct
  source 1..20: mol_type = other RNA
tgaggtgttctgacattggt

SEQ ID NO: 16982 - RNA, 20 nt, synthetic construct
  source 1..20: mol_type = other RNA
tgagtcctgactttacacaa

SEQ ID NO: 16983 - RNA, 20 nt, synthetic construct
  source 1..20: mol_type = other RNA
tgagtctcgaactcgcttga

SEQ ID NO: 16984 - RNA, 20 nt, synthetic construct
  source 1..20: mol_type = other RNA
tgagtcttgacaggtgtatc

SEQ ID NO: 16985 - RNA, 20 nt, synthetic construct
  source 1..20: mol_type = other RNA
tgagtcttgccatagtcaga

SEQ ID NO: 16986 - RNA, 20 nt, synthetic construct
  source 1..20: mol_type = other RNA
tgagtgaggcctgtgatgct

SEQ ID NO: 16987 - RNA, 20 nt, synthetic construct
  source 1..20: mol_type = other RNA
tgagtgataagaaagaatct

SEQ ID NO: 16988 - RNA, 20 nt, synthetic construct
  source 1..20: mol_type = other RNA
tgagtgatctcacaggacaa

SEQ ID NO: 16989 - RNA, 20 nt, synthetic construct
  source 1..20: mol_type = other RNA
tgagtgtccttctggggagg

SEQ ID NO: 16990 - RNA, 20 nt, synthetic construct
  source 1..20: mol_type = other RNA
tgagtgtgacttcctccctg

SEQ ID NO: 16991 - RNA, 20 nt, synthetic construct
  source 1..20: mol_type = other RNA
tgagttctgtagcccaagaa

SEQ ID NO: 16992 - RNA, 20 nt, synthetic construct
  source 1..20: mol_type = other RNA
tgagttgtcctgtgagatca

SEQ ID NO: 16993 - RNA, 20 nt, synthetic construct
  source 1..20: mol_type = other RNA
tgagtttgaaaatggctcag

SEQ ID NO: 16994 - RNA, 20 nt, synthetic construct
  source 1..20: mol_type = other RNA
tgataagaaagaatctgtga

SEQ ID NO: 16995 - RNA, 20 nt, synthetic construct
  source 1..20: mol_type = other RNA
tgataatgccagtaaactag

SEQ ID NO: 16996 - RNA, 20 nt, synthetic construct
  source 1..20: mol_type = other RNA
tgataatgtgcagcaaaaga

SEQ ID NO: 16997 - RNA, 20 nt, synthetic construct
  source 1..20: mol_type = other RNA
tgatacataaccatgcaaat

SEQ ID NO: 16998 - RNA, 20 nt, synthetic construct
  source 1..20: mol_type = other RNA
tgataccatcacctcccatt

SEQ ID NO: 16999 - RNA, 20 nt, synthetic construct
  source 1..20: mol_type = other RNA
tgatactgaagaattgatgg

SEQ ID NO: 17000 - RNA, 20 nt, synthetic construct
  source 1..20: mol_type = other RNA
tgatagccacaccccagctt

SEQ ID NO: 17001 - RNA, 20 nt, synthetic construct
  source 1..20: mol_type = other RNA
tgatcagcaaagagaaggat

SEQ ID NO: 17002 - RNA, 20 nt, synthetic construct
  source 1..20: mol_type = other RNA
tgatcattgttgctttgggg

SEQ ID NO: 17003 - RNA, 20 nt, synthetic construct
  source 1..20: mol_type = other RNA
tgatcccaaagcaagatctt

SEQ ID NO: 17004 - RNA, 20 nt, synthetic construct
  source 1..20: mol_type = other RNA
tgatccttctctttgctgat

SEQ ID NO: 17005 - RNA, 20 nt, synthetic construct
  source 1..20: mol_type = other RNA
tgatctcacaggacaactca

SEQ ID NO: 17006 - RNA, 20 nt, synthetic construct
  source 1..20: mol_type = other RNA
tgatctgaaggagcccagag

SEQ ID NO: 17007 - RNA, 20 nt, synthetic construct
  source 1..20: mol_type = other RNA
tgatctgccctgaggtatgc

SEQ ID NO: 17008 - RNA, 20 nt, synthetic construct
  source 1..20: mol_type = other RNA
tgatgagaaacaaagagcaa

SEQ ID NO: 17009 - RNA, 20 nt, synthetic construct
  source 1..20: mol_type = other RNA
tgatgatgctgataatgcca

SEQ ID NO: 17010 - RNA, 20 nt, synthetic construct
  source 1..20: mol_type = other RNA
tgatgcaagttttgggtctt

SEQ ID NO: 17011 - RNA, 20 nt, synthetic construct
  source 1..20: mol_type = other RNA
tgatgcctcattacgtttta

SEQ ID NO: 17012 - RNA, 20 nt, synthetic construct
  source 1..20: mol_type = other RNA
tgatgctcttttgctgcaca

SEQ ID NO: 17013 - RNA, 20 nt, synthetic construct
  source 1..20: mol_type = other RNA
tgatgctgataatgccagta

SEQ ID NO: 17014 - RNA, 20 nt, synthetic construct
  source 1..20: mol_type = other RNA
tgatgctgatgatgctgata

SEQ ID NO: 17015 - RNA, 20 nt, synthetic construct
  source 1..20: mol_type = other RNA
tgatggaacaggatagaacc

SEQ ID NO: 17016 - RNA, 20 nt, synthetic construct
  source 1..20: mol_type = other RNA
tgatggcagtgatgcctcat

SEQ ID NO: 17017 - RNA, 20 nt, synthetic construct
  source 1..20: mol_type = other RNA
tgatggtatcaggaatggac

SEQ ID NO: 17018 - RNA, 20 nt, synthetic construct
  source 1..20: mol_type = other RNA
tgatggtggtggtggtgtgg

SEQ ID NO: 17019 - RNA, 20 nt, synthetic construct
  source 1..20: mol_type = other RNA
tgattcaagtgctgtttcaa

SEQ ID NO: 17020 - RNA, 20 nt, synthetic construct
  source 1..20: mol_type = other RNA
tgattcatttcaacttggta

SEQ ID NO: 17021 - RNA, 20 nt, synthetic construct
  source 1..20: mol_type = other RNA
tgattggagagattgggttg

SEQ ID NO: 17022 - RNA, 20 nt, synthetic construct
  source 1..20: mol_type = other RNA
tgatttcatggtctgactat

SEQ ID NO: 17023 - RNA, 20 nt, synthetic construct
  source 1..20: mol_type = other RNA
tgatttcccatcttgcagat

SEQ ID NO: 17024 - RNA, 20 nt, synthetic construct
  source 1..20: mol_type = other RNA
tgatttgagagtaagagcct

SEQ ID NO: 17025 - RNA, 20 nt, synthetic construct
  source 1..20: mol_type = other RNA
tgattttcaccatgaaaaca

SEQ ID NO: 17026 - RNA, 20 nt, synthetic construct
  source 1..20: mol_type = other RNA
tgatttttgttgttgtagtt

SEQ ID NO: 17027 - RNA, 20 nt, synthetic construct
  source 1..20: mol_type = other RNA
tgcaaaaagttcaggatgtg

SEQ ID NO: 17028 - RNA, 20 nt, synthetic construct
  source 1..20: mol_type = other RNA
tgcaaaaggtgtgagtttga

SEQ ID NO: 17029 - RNA, 20 nt, synthetic construct
  source 1..20: mol_type = other RNA
tgcaaaatacaggtttcttg

SEQ ID NO: 17030 - RNA, 20 nt, synthetic construct
  source 1..20: mol_type = other RNA
tgcaaaatggaggaataaaa

SEQ ID NO: 17031 - RNA, 20 nt, synthetic construct
  source 1..20: mol_type = other RNA
tgcaaacacttggaataccc

SEQ ID NO: 17032 - RNA, 20 nt, synthetic construct
  source 1..20: mol_type = other RNA
tgcaaatgtttttcctgtgc

SEQ ID NO: 17033 - RNA, 20 nt, synthetic construct
  source 1..20: mol_type = other RNA
tgcaaattgctgctggaacc

SEQ ID NO: 17034 - RNA, 20 nt, synthetic construct
  source 1..20: mol_type = other RNA
tgcaacataagcctcataaa

SEQ ID NO: 17035 - RNA, 20 nt, synthetic construct
  source 1..20: mol_type = other RNA
tgcaagatgggaaatcatat

SEQ ID NO: 17036 - RNA, 20 nt, synthetic construct
  source 1..20: mol_type = other RNA
tgcaagccacatgcctgtat

SEQ ID NO: 17037 - RNA, 20 nt, synthetic construct
  source 1..20: mol_type = other RNA
tgcaagctcctggtggcagc

SEQ ID NO: 17038 - RNA, 20 nt, synthetic construct
  source 1..20: mol_type = other RNA
tgcaagctgtgataatgtgc

SEQ ID NO: 17039 - RNA, 20 nt, synthetic construct
  source 1..20: mol_type = other RNA
tgcaagttttgggtcttgtt

SEQ ID NO: 17040 - RNA, 20 nt, synthetic construct
  source 1..20: mol_type = other RNA
tgcaatgctaaatacctgtt

SEQ ID NO: 17041 - RNA, 20 nt, synthetic construct
  source 1..20: mol_type = other RNA
tgcacacagcaccaccagaa

SEQ ID NO: 17042 - RNA, 20 nt, synthetic construct
  source 1..20: mol_type = other RNA
tgcacaggccaattaaggtg

SEQ ID NO: 17043 - RNA, 20 nt, synthetic construct
  source 1..20: mol_type = other RNA
tgcacatgagcttttggtaa

SEQ ID NO: 17044 - RNA, 20 nt, synthetic construct
  source 1..20: mol_type = other RNA
tgcacattatcacagcttgc

SEQ ID NO: 17045 - RNA, 20 nt, synthetic construct
  source 1..20: mol_type = other RNA
tgcaccgcaatggaaacaca

SEQ ID NO: 17046 - RNA, 20 nt, synthetic construct
  source 1..20: mol_type = other RNA
tgcacctggtgtgagggttt

SEQ ID NO: 17047 - RNA, 20 nt, synthetic construct
  source 1..20: mol_type = other RNA
tgcacttctccaaaacagac

SEQ ID NO: 17048 - RNA, 20 nt, synthetic construct
  source 1..20: mol_type = other RNA
tgcacttgatttcatggtct

SEQ ID NO: 17049 - RNA, 20 nt, synthetic construct
  source 1..20: mol_type = other RNA
tgcagaaaaccacatctcac

SEQ ID NO: 17050 - RNA, 20 nt, synthetic construct
  source 1..20: mol_type = other RNA
tgcagaaaataacatccagg

SEQ ID NO: 17051 - RNA, 20 nt, synthetic construct
  source 1..20: mol_type = other RNA
tgcagaacttgatagccaca

SEQ ID NO: 17052 - RNA, 20 nt, synthetic construct
  source 1..20: mol_type = other RNA
tgcagatgtgtaggtaagtg

SEQ ID NO: 17053 - RNA, 20 nt, synthetic construct
  source 1..20: mol_type = other RNA
tgcagcaaaagagcatcatt

SEQ ID NO: 17054 - RNA, 20 nt, synthetic construct
  source 1..20: mol_type = other RNA
tgcagcagtggtttgtctag

SEQ ID NO: 17055 - RNA, 20 nt, synthetic construct
  source 1..20: mol_type = other RNA
tgcagcccttctccgatgct

SEQ ID NO: 17056 - RNA, 20 nt, synthetic construct
  source 1..20: mol_type = other RNA
tgcagctagtttactggcat

SEQ ID NO: 17057 - RNA, 20 nt, synthetic construct
  source 1..20: mol_type = other RNA
tgcagctggctttggaggca

SEQ ID NO: 17058 - RNA, 20 nt, synthetic construct
  source 1..20: mol_type = other RNA
tgcaggaaacaagacccaaa

SEQ ID NO: 17059 - RNA, 20 nt, synthetic construct
  source 1..20: mol_type = other RNA
tgcaggagatgggcatatct

SEQ ID NO: 17060 - RNA, 20 nt, synthetic construct
  source 1..20: mol_type = other RNA
tgcagggacaatgactgttc

SEQ ID NO: 17061 - RNA, 20 nt, synthetic construct
  source 1..20: mol_type = other RNA
tgcaggtggattctcttgct

SEQ ID NO: 17062 - RNA, 20 nt, synthetic construct
  source 1..20: mol_type = other RNA
tgcagtcactgtgtggcact

SEQ ID NO: 17063 - RNA, 20 nt, synthetic construct
  source 1..20: mol_type = other RNA
tgcagtctgtatgtcattcc

SEQ ID NO: 17064 - RNA, 20 nt, synthetic construct
  source 1..20: mol_type = other RNA
tgcagtgggcctgaaaatcc

SEQ ID NO: 17065 - RNA, 20 nt, synthetic construct
  source 1..20: mol_type = other RNA
tgcagtggtgagtgaggcct

SEQ ID NO: 17066 - RNA, 20 nt, synthetic construct
  source 1..20: mol_type = other RNA
tgcagttaaagatttcacca

SEQ ID NO: 17067 - RNA, 20 nt, synthetic construct
  source 1..20: mol_type = other RNA
tgcagttatgtgttgaaaaa

SEQ ID NO: 17068 - RNA, 20 nt, synthetic construct
  source 1..20: mol_type = other RNA
tgcatacaggcatgtggctt

SEQ ID NO: 17069 - RNA, 20 nt, synthetic construct
  source 1..20: mol_type = other RNA
tgcatacatgtgtagatgga

SEQ ID NO: 17070 - RNA, 20 nt, synthetic construct
  source 1..20: mol_type = other RNA
tgcatcacatgcaatatttt

SEQ ID NO: 17071 - RNA, 20 nt, synthetic construct
  source 1..20: mol_type = other RNA
tgcatccaggttccacctta

SEQ ID NO: 17072 - RNA, 20 nt, synthetic construct
  source 1..20: mol_type = other RNA
tgcatctgactatggcaaga

SEQ ID NO: 17073 - RNA, 20 nt, synthetic construct
  source 1..20: mol_type = other RNA
tgcatgcaaaatacaggttt

SEQ ID NO: 17074 - RNA, 20 nt, synthetic construct
  source 1..20: mol_type = other RNA
tgcatgcacttgatttcatg

SEQ ID NO: 17075 - RNA, 20 nt, synthetic construct
  source 1..20: mol_type = other RNA
tgcatggttatgtatcaagt

SEQ ID NO: 17076 - RNA, 20 nt, synthetic construct
  source 1..20: mol_type = other RNA
tgcatgtgatgcaagttttg

SEQ ID NO: 17077 - RNA, 20 nt, synthetic construct
  source 1..20: mol_type = other RNA
tgcattttcttgggctacag

SEQ ID NO: 17078 - RNA, 20 nt, synthetic construct
  source 1..20: mol_type = other RNA
tgccacacagtgactgcaca

SEQ ID NO: 17079 - RNA, 20 nt, synthetic construct
  source 1..20: mol_type = other RNA
tgccaccaggagcttgcaaa

SEQ ID NO: 17080 - RNA, 20 nt, synthetic construct
  source 1..20: mol_type = other RNA
tgccaccttagagcagcatg

SEQ ID NO: 17081 - RNA, 20 nt, synthetic construct
  source 1..20: mol_type = other RNA
tgccactaccacaccaccac

SEQ ID NO: 17082 - RNA, 20 nt, synthetic construct
  source 1..20: mol_type = other RNA
tgccacttggtgtctccatt

SEQ ID NO: 17083 - RNA, 20 nt, synthetic construct
  source 1..20: mol_type = other RNA
tgccagaaatgtactgagac

SEQ ID NO: 17084 - RNA, 20 nt, synthetic construct
  source 1..20: mol_type = other RNA
tgccagacagaacctctggc

SEQ ID NO: 17085 - RNA, 20 nt, synthetic construct
  source 1..20: mol_type = other RNA
tgccagcagttgatgagaaa

SEQ ID NO: 17086 - RNA, 20 nt, synthetic construct
  source 1..20: mol_type = other RNA
tgccagtaaactagctgcaa

SEQ ID NO: 17087 - RNA, 20 nt, synthetic construct
  source 1..20: mol_type = other RNA
tgccatagtcagatgcacag

SEQ ID NO: 17088 - RNA, 20 nt, synthetic construct
  source 1..20: mol_type = other RNA
tgccatcaattcttcagtat

SEQ ID NO: 17089 - RNA, 20 nt, synthetic construct
  source 1..20: mol_type = other RNA
tgccattaacagtcaggcta

SEQ ID NO: 17090 - RNA, 20 nt, synthetic construct
  source 1..20: mol_type = other RNA
tgcccatctcctgcagaaaa

SEQ ID NO: 17091 - RNA, 20 nt, synthetic construct
  source 1..20: mol_type = other RNA
tgcccccaacacagcactat

SEQ ID NO: 17092 - RNA, 20 nt, synthetic construct
  source 1..20: mol_type = other RNA
tgccctcaacatggttggtt

SEQ ID NO: 17093 - RNA, 20 nt, synthetic construct
  source 1..20: mol_type = other RNA
tgccctgaggtatgcgatgg

SEQ ID NO: 17094 - RNA, 20 nt, synthetic construct
  source 1..20: mol_type = other RNA
tgcccttgattcatttcaac

SEQ ID NO: 17095 - RNA, 20 nt, synthetic construct
  source 1..20: mol_type = other RNA
tgcctaatggtgctacagtt

SEQ ID NO: 17096 - RNA, 20 nt, synthetic construct
  source 1..20: mol_type = other RNA
tgcctcaggtttaccctcta

SEQ ID NO: 17097 - RNA, 20 nt, synthetic construct
  source 1..20: mol_type = other RNA
tgcctcattacgttttagat

SEQ ID NO: 17098 - RNA, 20 nt, synthetic construct
  source 1..20: mol_type = other RNA
tgcctccaaagccagctgca

SEQ ID NO: 17099 - RNA, 20 nt, synthetic construct
  source 1..20: mol_type = other RNA
tgcctcttccgtggaacaca

SEQ ID NO: 17100 - RNA, 20 nt, synthetic construct
  source 1..20: mol_type = other RNA
tgcctgaccagggaggaagt

SEQ ID NO: 17101 - RNA, 20 nt, synthetic construct
  source 1..20: mol_type = other RNA
tgcctgagagagctcatcca

SEQ ID NO: 17102 - RNA, 20 nt, synthetic construct
  source 1..20: mol_type = other RNA
tgcctggggggctcccaagg

SEQ ID NO: 17103 - RNA, 20 nt, synthetic construct
  source 1..20: mol_type = other RNA
tgcctgtatgcacacagcac

SEQ ID NO: 17104 - RNA, 20 nt, synthetic construct
  source 1..20: mol_type = other RNA
tgcctgtttatgaggcttat

SEQ ID NO: 17105 - RNA, 20 nt, synthetic construct
  source 1..20: mol_type = other RNA
tgccttgggagccccccagg

SEQ ID NO: 17106 - RNA, 20 nt, synthetic construct
  source 1..20: mol_type = other RNA
tgccttgtttttaagtaata

SEQ ID NO: 17107 - RNA, 20 nt, synthetic construct
  source 1..20: mol_type = other RNA
tgcgatgggtgagtgatctc

SEQ ID NO: 17108 - RNA, 20 nt, synthetic construct
  source 1..20: mol_type = other RNA
tgcgcaacttgctcagcaaa

SEQ ID NO: 17109 - RNA, 20 nt, synthetic construct
  source 1..20: mol_type = other RNA
tgcgcagcttgttgaccaga

SEQ ID NO: 17110 - RNA, 20 nt, synthetic construct
  source 1..20: mol_type = other RNA
tgcggaattgatctgccctg

SEQ ID NO: 17111 - RNA, 20 nt, synthetic construct
  source 1..20: mol_type = other RNA
tgcggtgcagaaaaccacat

SEQ ID NO: 17112 - RNA, 20 nt, synthetic construct
  source 1..20: mol_type = other RNA
tgcgttttattcctccattt

SEQ ID NO: 17113 - RNA, 20 nt, synthetic construct
  source 1..20: mol_type = other RNA
tgctaaatacctgttccttt

SEQ ID NO: 17114 - RNA, 20 nt, synthetic construct
  source 1..20: mol_type = other RNA
tgctaatgcctaatggtgct

SEQ ID NO: 17115 - RNA, 20 nt, synthetic construct
  source 1..20: mol_type = other RNA
tgctaattaccatgacaaga

SEQ ID NO: 17116 - RNA, 20 nt, synthetic construct
  source 1..20: mol_type = other RNA
tgctacagtttctgcctctt

SEQ ID NO: 17117 - RNA, 20 nt, synthetic construct
  source 1..20: mol_type = other RNA
tgctaccaaaaattggtggg

SEQ ID NO: 17118 - RNA, 20 nt, synthetic construct
  source 1..20: mol_type = other RNA
tgctcagcaaaggtacttga

SEQ ID NO: 17119 - RNA, 20 nt, synthetic construct
  source 1..20: mol_type = other RNA
tgctcattcagaatctgaag

SEQ ID NO: 17120 - RNA, 20 nt, synthetic construct
  source 1..20: mol_type = other RNA
tgctccagctgtgttgtttt

SEQ ID NO: 17121 - RNA, 20 nt, synthetic construct
  source 1..20: mol_type = other RNA
tgctccatggtctcaatgat

SEQ ID NO: 17122 - RNA, 20 nt, synthetic construct
  source 1..20: mol_type = other RNA
tgctcctgttcttgaaagca

SEQ ID NO: 17123 - RNA, 20 nt, synthetic construct
  source 1..20: mol_type = other RNA
tgctccttgtctcgaccctt

SEQ ID NO: 17124 - RNA, 20 nt, synthetic construct
  source 1..20: mol_type = other RNA
tgctctaaagctggggtgtg

SEQ ID NO: 17125 - RNA, 20 nt, synthetic construct
  source 1..20: mol_type = other RNA
tgctctaaggtggcatctct

SEQ ID NO: 17126 - RNA, 20 nt, synthetic construct
  source 1..20: mol_type = other RNA
tgctctttgttgaaaatgaa

SEQ ID NO: 17127 - RNA, 20 nt, synthetic construct
  source 1..20: mol_type = other RNA
tgctctttgtttctcatcaa

SEQ ID NO: 17128 - RNA, 20 nt, synthetic construct
  source 1..20: mol_type = other RNA
tgctcttttgctgcacatta

SEQ ID NO: 17129 - RNA, 20 nt, synthetic construct
  source 1..20: mol_type = other RNA
tgctgagcaagttgcgcagc

SEQ ID NO: 17130 - RNA, 20 nt, synthetic construct
  source 1..20: mol_type = other RNA
tgctgataatgccagtaaac

SEQ ID NO: 17131 - RNA, 20 nt, synthetic construct
  source 1..20: mol_type = other RNA
tgctgatcattgttgctttg

SEQ ID NO: 17132 - RNA, 20 nt, synthetic construct
  source 1..20: mol_type = other RNA
tgctgatgatgctgataatg

SEQ ID NO: 17133 - RNA, 20 nt, synthetic construct
  source 1..20: mol_type = other RNA
tgctgcacattatcacagct

SEQ ID NO: 17134 - RNA, 20 nt, synthetic construct
  source 1..20: mol_type = other RNA
tgctgcagaacttgatagcc

SEQ ID NO: 17135 - RNA, 20 nt, synthetic construct
  source 1..20: mol_type = other RNA
tgctgcctgtttatgaggct

SEQ ID NO: 17136 - RNA, 20 nt, synthetic construct
  source 1..20: mol_type = other RNA
tgctgctccatggtctcaat

SEQ ID NO: 17137 - RNA, 20 nt, synthetic construct
  source 1..20: mol_type = other RNA
tgctgctctaaagctggggt

SEQ ID NO: 17138 - RNA, 20 nt, synthetic construct
  source 1..20: mol_type = other RNA
tgctgctctaaggtggcatc

SEQ ID NO: 17139 - RNA, 20 nt, synthetic construct
  source 1..20: mol_type = other RNA
tgctgctggaacctgaacag

SEQ ID NO: 17140 - RNA, 20 nt, synthetic construct
  source 1..20: mol_type = other RNA
tgctgctgttcttgcttctg

SEQ ID NO: 17141 - RNA, 20 nt, synthetic construct
  source 1..20: mol_type = other RNA
tgctgctgttgctggttttg

SEQ ID NO: 17142 - RNA, 20 nt, synthetic construct
  source 1..20: mol_type = other RNA
tgctggaacctgaacagaat

SEQ ID NO: 17143 - RNA, 20 nt, synthetic construct
  source 1..20: mol_type = other RNA
tgctggcagttgtcctgtag

SEQ ID NO: 17144 - RNA, 20 nt, synthetic construct
  source 1..20: mol_type = other RNA
tgctggttttgagggagatg

SEQ ID NO: 17145 - RNA, 20 nt, synthetic construct
  source 1..20: mol_type = other RNA
tgctgtgtgcatacaggcat

SEQ ID NO: 17146 - RNA, 20 nt, synthetic construct
  source 1..20: mol_type = other RNA
tgctgtgttgggggcacaag

SEQ ID NO: 17147 - RNA, 20 nt, synthetic construct
  source 1..20: mol_type = other RNA
tgctgtgtttgctgctgttc

SEQ ID NO: 17148 - RNA, 20 nt, synthetic construct
  source 1..20: mol_type = other RNA
tgctgttcttgcttctgtaa

SEQ ID NO: 17149 - RNA, 20 nt, synthetic construct
  source 1..20: mol_type = other RNA
tgctgttgctggttttgagg

SEQ ID NO: 17150 - RNA, 20 nt, synthetic construct
  source 1..20: mol_type = other RNA
tgctgtttcaacactgggga

SEQ ID NO: 17151 - RNA, 20 nt, synthetic construct
  source 1..20: mol_type = other RNA
tgcttacttcaagcaaagct

SEQ ID NO: 17152 - RNA, 20 nt, synthetic construct
  source 1..20: mol_type = other RNA
tgcttagttacctttttcca

SEQ ID NO: 17153 - RNA, 20 nt, synthetic construct
  source 1..20: mol_type = other RNA
tgcttcagatgctgctccat

SEQ ID NO: 17154 - RNA, 20 nt, synthetic construct
  source 1..20: mol_type = other RNA
tgcttcggggccatccacaa

SEQ ID NO: 17155 - RNA, 20 nt, synthetic construct
  source 1..20: mol_type = other RNA
tgcttctgtaagagatgcca

SEQ ID NO: 17156 - RNA, 20 nt, synthetic construct
  source 1..20: mol_type = other RNA
tgcttctgtgatttgagagt

SEQ ID NO: 17157 - RNA, 20 nt, synthetic construct
  source 1..20: mol_type = other RNA
tgcttctgttctcaataatt

SEQ ID NO: 17158 - RNA, 20 nt, synthetic construct
  source 1..20: mol_type = other RNA
tgcttctttctccccctcct

SEQ ID NO: 17159 - RNA, 20 nt, synthetic construct
  source 1..20: mol_type = other RNA
tgcttgaagtaagcaccatt

SEQ ID NO: 17160 - RNA, 20 nt, synthetic construct
  source 1..20: mol_type = other RNA
tgcttgaggtgttctgacat

SEQ ID NO: 17161 - RNA, 20 nt, synthetic construct
  source 1..20: mol_type = other RNA
tgctttcaagaacaggagca

SEQ ID NO: 17162 - RNA, 20 nt, synthetic construct
  source 1..20: mol_type = other RNA
tgctttcacctggatttctt

SEQ ID NO: 17163 - RNA, 20 nt, synthetic construct
  source 1..20: mol_type = other RNA
tgctttctgaaaggcctcag

SEQ ID NO: 17164 - RNA, 20 nt, synthetic construct
  source 1..20: mol_type = other RNA
tgctttgggatcacattatt

SEQ ID NO: 17165 - RNA, 20 nt, synthetic construct
  source 1..20: mol_type = other RNA
tgctttgggggtgaggaaaa

SEQ ID NO: 17166 - RNA, 20 nt, synthetic construct
  source 1..20: mol_type = other RNA
tgcttttgagtgtccttctg

SEQ ID NO: 17167 - RNA, 20 nt, synthetic construct
  source 1..20: mol_type = other RNA
tgctttttccttctgaagga

SEQ ID NO: 17168 - RNA, 20 nt, synthetic construct
  source 1..20: mol_type = other RNA
tggaaaaaacactgtctcaa

SEQ ID NO: 17169 - RNA, 20 nt, synthetic construct
  source 1..20: mol_type = other RNA
tggaaaaaggtaactaagca

SEQ ID NO: 17170 - RNA, 20 nt, synthetic construct
  source 1..20: mol_type = other RNA
tggaaaatattgcatgtgat

SEQ ID NO: 17171 - RNA, 20 nt, synthetic construct
  source 1..20: mol_type = other RNA
tggaaacacaatctggataa

SEQ ID NO: 17172 - RNA, 20 nt, synthetic construct
  source 1..20: mol_type = other RNA
tggaaattccaacatgcctg

SEQ ID NO: 17173 - RNA, 20 nt, synthetic construct
  source 1..20: mol_type = other RNA
tggaacacacacatggtgaa

SEQ ID NO: 17174 - RNA, 20 nt, synthetic construct
  source 1..20: mol_type = other RNA
tggaacaggatagaaccaac

SEQ ID NO: 17175 - RNA, 20 nt, synthetic construct
  source 1..20: mol_type = other RNA
tggaacagtcattgtccctg

SEQ ID NO: 17176 - RNA, 20 nt, synthetic construct
  source 1..20: mol_type = other RNA
tggaacctgaacagaattct

SEQ ID NO: 17177 - RNA, 20 nt, synthetic construct
  source 1..20: mol_type = other RNA
tggaacctggatgcaagcca

SEQ ID NO: 17178 - RNA, 20 nt, synthetic construct
  source 1..20: mol_type = other RNA
tggaactggagatgttggtc

SEQ ID NO: 17179 - RNA, 20 nt, synthetic construct
  source 1..20: mol_type = other RNA
tggaagaatgttttcatggt

SEQ ID NO: 17180 - RNA, 20 nt, synthetic construct
  source 1..20: mol_type = other RNA
tggaagaggaggagggggag

SEQ ID NO: 17181 - RNA, 20 nt, synthetic construct
  source 1..20: mol_type = other RNA
tggaagcccactgcctgaga

SEQ ID NO: 17182 - RNA, 20 nt, synthetic construct
  source 1..20: mol_type = other RNA
tggaaggtgactctataaaa

SEQ ID NO: 17183 - RNA, 20 nt, synthetic construct
  source 1..20: mol_type = other RNA
tggaataccctctactttct

SEQ ID NO: 17184 - RNA, 20 nt, synthetic construct
  source 1..20: mol_type = other RNA
tggaataccctgtatgaagg

SEQ ID NO: 17185 - RNA, 20 nt, synthetic construct
  source 1..20: mol_type = other RNA
tggaatttccagtgtattgt

SEQ ID NO: 17186 - RNA, 20 nt, synthetic construct
  source 1..20: mol_type = other RNA
tggacattatgagtctcgaa

SEQ ID NO: 17187 - RNA, 20 nt, synthetic construct
  source 1..20: mol_type = other RNA
tggaccaacatctccagttc

SEQ ID NO: 17188 - RNA, 20 nt, synthetic construct
  source 1..20: mol_type = other RNA
tggacttagtctgttgccct

SEQ ID NO: 17189 - RNA, 20 nt, synthetic construct
  source 1..20: mol_type = other RNA
tggagaaagacgtaacttcg

SEQ ID NO: 17190 - RNA, 20 nt, synthetic construct
  source 1..20: mol_type = other RNA
tggagaagtgcacctggtgt

SEQ ID NO: 17191 - RNA, 20 nt, synthetic construct
  source 1..20: mol_type = other RNA
tggagacaccaagtggcact

SEQ ID NO: 17192 - RNA, 20 nt, synthetic construct
  source 1..20: mol_type = other RNA
tggagagattgggttgatac

SEQ ID NO: 17193 - RNA, 20 nt, synthetic construct
  source 1..20: mol_type = other RNA
tggagagctacaggacaact

SEQ ID NO: 17194 - RNA, 20 nt, synthetic construct
  source 1..20: mol_type = other RNA
tggagatgttggtccactgt

SEQ ID NO: 17195 - RNA, 20 nt, synthetic construct
  source 1..20: mol_type = other RNA
tggagcacaagtcacaaatg

SEQ ID NO: 17196 - RNA, 20 nt, synthetic construct
  source 1..20: mol_type = other RNA
tggagcagcatctgaagcag

SEQ ID NO: 17197 - RNA, 20 nt, synthetic construct
  source 1..20: mol_type = other RNA
tggagctttgtagccagagg

SEQ ID NO: 17198 - RNA, 20 nt, synthetic construct
  source 1..20: mol_type = other RNA
tggaggaagtacagaatata

SEQ ID NO: 17199 - RNA, 20 nt, synthetic construct
  source 1..20: mol_type = other RNA
tggaggaataaaacgcacag

SEQ ID NO: 17200 - RNA, 20 nt, synthetic construct
  source 1..20: mol_type = other RNA
tggaggcagctcagagttag

SEQ ID NO: 17201 - RNA, 20 nt, synthetic construct
  source 1..20: mol_type = other RNA
tggaggtcatttgattggag

SEQ ID NO: 17202 - RNA, 20 nt, synthetic construct
  source 1..20: mol_type = other RNA
tggagtatttcctctttatt

SEQ ID NO: 17203 - RNA, 20 nt, synthetic construct
  source 1..20: mol_type = other RNA
tggagttttagaagaacacc

SEQ ID NO: 17204 - RNA, 20 nt, synthetic construct
  source 1..20: mol_type = other RNA
tggataatattgagacagtg

SEQ ID NO: 17205 - RNA, 20 nt, synthetic construct
  source 1..20: mol_type = other RNA
tggatacacctgtcaagact

SEQ ID NO: 17206 - RNA, 20 nt, synthetic construct
  source 1..20: mol_type = other RNA
tggatgagctctctcaggca

SEQ ID NO: 17207 - RNA, 20 nt, synthetic construct
  source 1..20: mol_type = other RNA
tggatgcaagccacatgcct

SEQ ID NO: 17208 - RNA, 20 nt, synthetic construct
  source 1..20: mol_type = other RNA
tggatggccccgaagcaagc

SEQ ID NO: 17209 - RNA, 20 nt, synthetic construct
  source 1..20: mol_type = other RNA
tggatgttattttctgcagg

SEQ ID NO: 17210 - RNA, 20 nt, synthetic construct
  source 1..20: mol_type = other RNA
tggattaggactctgggaag

SEQ ID NO: 17211 - RNA, 20 nt, synthetic construct
  source 1..20: mol_type = other RNA
tggattctcttgcttagtta

SEQ ID NO: 17212 - RNA, 20 nt, synthetic construct
  source 1..20: mol_type = other RNA
tggattgaattgaaggcccc

SEQ ID NO: 17213 - RNA, 20 nt, synthetic construct
  source 1..20: mol_type = other RNA
tggatttctttcttggctta

SEQ ID NO: 17214 - RNA, 20 nt, synthetic construct
  source 1..20: mol_type = other RNA
tggattttcaggcccactgc

SEQ ID NO: 17215 - RNA, 20 nt, synthetic construct
  source 1..20: mol_type = other RNA
tggcaaatgggaggtgatgg

SEQ ID NO: 17216 - RNA, 20 nt, synthetic construct
  source 1..20: mol_type = other RNA
tggcaagactcagtttgggg

SEQ ID NO: 17217 - RNA, 20 nt, synthetic construct
  source 1..20: mol_type = other RNA
tggcactagatttcattttc

SEQ ID NO: 17218 - RNA, 20 nt, synthetic construct
  source 1..20: mol_type = other RNA
tggcactctttcaaaagtta

SEQ ID NO: 17219 - RNA, 20 nt, synthetic construct
  source 1..20: mol_type = other RNA
tggcacttacctacacatct

SEQ ID NO: 17220 - RNA, 20 nt, synthetic construct
  source 1..20: mol_type = other RNA
tggcagaaaaggaatcctta

SEQ ID NO: 17221 - RNA, 20 nt, synthetic construct
  source 1..20: mol_type = other RNA
tggcagctctgaacggtatt

SEQ ID NO: 17222 - RNA, 20 nt, synthetic construct
  source 1..20: mol_type = other RNA
tggcagtgatgcctcattac

SEQ ID NO: 17223 - RNA, 20 nt, synthetic construct
  source 1..20: mol_type = other RNA
tggcagttgtcctgtagctc

SEQ ID NO: 17224 - RNA, 20 nt, synthetic construct
  source 1..20: mol_type = other RNA
tggcatctcttacagaagca

SEQ ID NO: 17225 - RNA, 20 nt, synthetic construct
  source 1..20: mol_type = other RNA
tggcattatcagcatcatca

SEQ ID NO: 17226 - RNA, 20 nt, synthetic construct
  source 1..20: mol_type = other RNA
tggcatttatgtgagatgtg

SEQ ID NO: 17227 - RNA, 20 nt, synthetic construct
  source 1..20: mol_type = other RNA
tggccaaagaatgatccttc

SEQ ID NO: 17228 - RNA, 20 nt, synthetic construct
  source 1..20: mol_type = other RNA
tggccagactaaagtggaag

SEQ ID NO: 17229 - RNA, 20 nt, synthetic construct
  source 1..20: mol_type = other RNA
tggccccgaagcaagcctga

SEQ ID NO: 17230 - RNA, 20 nt, synthetic construct
  source 1..20: mol_type = other RNA
tggccctgacatttcaactt

SEQ ID NO: 17231 - RNA, 20 nt, synthetic construct
  source 1..20: mol_type = other RNA
tggcctgtgcatctgactat

SEQ ID NO: 17232 - RNA, 20 nt, synthetic construct
  source 1..20: mol_type = other RNA
tggcgtgaaactgcttcaga

SEQ ID NO: 17233 - RNA, 20 nt, synthetic construct
  source 1..20: mol_type = other RNA
tggctacaaagctccagaat

SEQ ID NO: 17234 - RNA, 20 nt, synthetic construct
  source 1..20: mol_type = other RNA
tggctatcaagttctgcagc

SEQ ID NO: 17235 - RNA, 20 nt, synthetic construct
  source 1..20: mol_type = other RNA
tggctcagtctctgaagcct

SEQ ID NO: 17236 - RNA, 20 nt, synthetic construct
  source 1..20: mol_type = other RNA
tggcttaccccgaagttacg

SEQ ID NO: 17237 - RNA, 20 nt, synthetic construct
  source 1..20: mol_type = other RNA
tggcttcccttcatacaggg

SEQ ID NO: 17238 - RNA, 20 nt, synthetic construct
  source 1..20: mol_type = other RNA
tggcttgcatccaggttcca

SEQ ID NO: 17239 - RNA, 20 nt, synthetic construct
  source 1..20: mol_type = other RNA
tggctttggaggcagctcag

SEQ ID NO: 17240 - RNA, 20 nt, synthetic construct
  source 1..20: mol_type = other RNA
tgggaaatcatattgagtct

SEQ ID NO: 17241 - RNA, 20 nt, synthetic construct
  source 1..20: mol_type = other RNA
tgggaaggtggtgcctcagg

SEQ ID NO: 17242 - RNA, 20 nt, synthetic construct
  source 1..20: mol_type = other RNA
tgggaatctgctctttgttg

SEQ ID NO: 17243 - RNA, 20 nt, synthetic construct
  source 1..20: mol_type = other RNA
tgggactgcccttgattcat

SEQ ID NO: 17244 - RNA, 20 nt, synthetic construct
  source 1..20: mol_type = other RNA
tgggactggaggaagtacag

SEQ ID NO: 17245 - RNA, 20 nt, synthetic construct
  source 1..20: mol_type = other RNA
tgggagccccccaggcatgt

SEQ ID NO: 17246 - RNA, 20 nt, synthetic construct
  source 1..20: mol_type = other RNA
tgggaggtgatggtatcagg

SEQ ID NO: 17247 - RNA, 20 nt, synthetic construct
  source 1..20: mol_type = other RNA
tgggatcacattatttggaa

SEQ ID NO: 17248 - RNA, 20 nt, synthetic construct
  source 1..20: mol_type = other RNA
tgggatggttgtgtttgtgc

SEQ ID NO: 17249 - RNA, 20 nt, synthetic construct
  source 1..20: mol_type = other RNA
tgggattccgcttggtgaaa

SEQ ID NO: 17250 - RNA, 20 nt, synthetic construct
  source 1..20: mol_type = other RNA
tgggcatatctcaaaaactg

SEQ ID NO: 17251 - RNA, 20 nt, synthetic construct
  source 1..20: mol_type = other RNA
tgggcctgaaaatccagagc

SEQ ID NO: 17252 - RNA, 20 nt, synthetic construct
  source 1..20: mol_type = other RNA
tgggctacagaactcacaga

SEQ ID NO: 17253 - RNA, 20 nt, synthetic construct
  source 1..20: mol_type = other RNA
tgggctccttcagatcaaga

SEQ ID NO: 17254 - RNA, 20 nt, synthetic construct
  source 1..20: mol_type = other RNA
tgggcttccattctggagct

SEQ ID NO: 17255 - RNA, 20 nt, synthetic construct
  source 1..20: mol_type = other RNA
tggggacataagtttttcag

SEQ ID NO: 17256 - RNA, 20 nt, synthetic construct
  source 1..20: mol_type = other RNA
tggggaggggtctgagtgtg

SEQ ID NO: 17257 - RNA, 20 nt, synthetic construct
  source 1..20: mol_type = other RNA
tgggggcacaagatctcgtg

SEQ ID NO: 17258 - RNA, 20 nt, synthetic construct
  source 1..20: mol_type = other RNA
tggggggctcccaaggcaag

SEQ ID NO: 17259 - RNA, 20 nt, synthetic construct
  source 1..20: mol_type = other RNA
tgggggtgaggaaaagtctg

SEQ ID NO: 17260 - RNA, 20 nt, synthetic construct
  source 1..20: mol_type = other RNA
tggggtagtggtggtgttct

SEQ ID NO: 17261 - RNA, 20 nt, synthetic construct
  source 1..20: mol_type = other RNA
tggggtgtggctatcaagtt

SEQ ID NO: 17262 - RNA, 20 nt, synthetic construct
  source 1..20: mol_type = other RNA
tggggttgctgtgtttgctg

SEQ ID NO: 17263 - RNA, 20 nt, synthetic construct
  source 1..20: mol_type = other RNA
tgggtcttgtttcctgcaaa

SEQ ID NO: 17264 - RNA, 20 nt, synthetic construct
  source 1..20: mol_type = other RNA
tgggtgagtgatctcacagg

SEQ ID NO: 17265 - RNA, 20 nt, synthetic construct
  source 1..20: mol_type = other RNA
tgggtgtaagcttgccttgg

SEQ ID NO: 17266 - RNA, 20 nt, synthetic construct
  source 1..20: mol_type = other RNA
tgggttatgcttgaggtgtt

SEQ ID NO: 17267 - RNA, 20 nt, synthetic construct
  source 1..20: mol_type = other RNA
tgggttgatactgaagaatt

SEQ ID NO: 17268 - RNA, 20 nt, synthetic construct
  source 1..20: mol_type = other RNA
tggtaaatggtctgttttgg

SEQ ID NO: 17269 - RNA, 20 nt, synthetic construct
  source 1..20: mol_type = other RNA
tggtaattagcacttttccc

SEQ ID NO: 17270 - RNA, 20 nt, synthetic construct
  source 1..20: mol_type = other RNA
tggtacatttgtgacttgtg

SEQ ID NO: 17271 - RNA, 20 nt, synthetic construct
  source 1..20: mol_type = other RNA
tggtagcagtggagagctac

SEQ ID NO: 17272 - RNA, 20 nt, synthetic construct
  source 1..20: mol_type = other RNA
tggtagtggcagaaaaggaa

SEQ ID NO: 17273 - RNA, 20 nt, synthetic construct
  source 1..20: mol_type = other RNA
tggtatcaggaatggactta

SEQ ID NO: 17274 - RNA, 20 nt, synthetic construct
  source 1..20: mol_type = other RNA
tggtcaaataacgacttggc

SEQ ID NO: 17275 - RNA, 20 nt, synthetic construct
  source 1..20: mol_type = other RNA
tggtcaacaagctgcgcaac

SEQ ID NO: 17276 - RNA, 20 nt, synthetic construct
  source 1..20: mol_type = other RNA
tggtcaggcacaggaaaaac

SEQ ID NO: 17277 - RNA, 20 nt, synthetic construct
  source 1..20: mol_type = other RNA
tggtccactgtaccttggga

SEQ ID NO: 17278 - RNA, 20 nt, synthetic construct
  source 1..20: mol_type = other RNA
tggtctcaatgatgctcttt

SEQ ID NO: 17279 - RNA, 20 nt, synthetic construct
  source 1..20: mol_type = other RNA
tggtctgactataaggggaa

SEQ ID NO: 17280 - RNA, 20 nt, synthetic construct
  source 1..20: mol_type = other RNA
tggtctgttttggagaagtg

SEQ ID NO: 17281 - RNA, 20 nt, synthetic construct
  source 1..20: mol_type = other RNA
tggtcttgtttcaatttctt

SEQ ID NO: 17282 - RNA, 20 nt, synthetic construct
  source 1..20: mol_type = other RNA
tggtcttgttttctcagaac

SEQ ID NO: 17283 - RNA, 20 nt, synthetic construct
  source 1..20: mol_type = other RNA
tggtgaaaacgaggggcctt

SEQ ID NO: 17284 - RNA, 20 nt, synthetic construct
  source 1..20: mol_type = other RNA
tggtgaaaatcagtattcaa

SEQ ID NO: 17285 - RNA, 20 nt, synthetic construct
  source 1..20: mol_type = other RNA
tggtgaaatctttaactgca

SEQ ID NO: 17286 - RNA, 20 nt, synthetic construct
  source 1..20: mol_type = other RNA
tggtgaactcctggaaaaaa

SEQ ID NO: 17287 - RNA, 20 nt, synthetic construct
  source 1..20: mol_type = other RNA
tggtgaagaattctgttcag

SEQ ID NO: 17288 - RNA, 20 nt, synthetic construct
  source 1..20: mol_type = other RNA
tggtgagtgaggcctgtgat

SEQ ID NO: 17289 - RNA, 20 nt, synthetic construct
  source 1..20: mol_type = other RNA
tggtgcctcaggtttaccct

SEQ ID NO: 17290 - RNA, 20 nt, synthetic construct
  source 1..20: mol_type = other RNA
tggtgctacagtttctgcct

SEQ ID NO: 17291 - RNA, 20 nt, synthetic construct
  source 1..20: mol_type = other RNA
tggtgctgtgtgcatacagg

SEQ ID NO: 17292 - RNA, 20 nt, synthetic construct
  source 1..20: mol_type = other RNA
tggtgcttacttcaagcaaa

SEQ ID NO: 17293 - RNA, 20 nt, synthetic construct
  source 1..20: mol_type = other RNA
tggtggagttttagaagaac

SEQ ID NO: 17294 - RNA, 20 nt, synthetic construct
  source 1..20: mol_type = other RNA
tggtggcagctctgaacggt

SEQ ID NO: 17295 - RNA, 20 nt, synthetic construct
  source 1..20: mol_type = other RNA
tggtgggttatgcttgaggt

SEQ ID NO: 17296 - RNA, 20 nt, synthetic construct
  source 1..20: mol_type = other RNA
tggtggtgctgtgtgcatac

SEQ ID NO: 17297 - RNA, 20 nt, synthetic construct
  source 1..20: mol_type = other RNA
tggtggtggtggtgtggtag

SEQ ID NO: 17298 - RNA, 20 nt, synthetic construct
  source 1..20: mol_type = other RNA
tggtggtggtgtggtagtgg

SEQ ID NO: 17299 - RNA, 20 nt, synthetic construct
  source 1..20: mol_type = other RNA
tggtggtgtggtagtggcag

SEQ ID NO: 17300 - RNA, 20 nt, synthetic construct
  source 1..20: mol_type = other RNA
tggtggtgttcttctaaaac

SEQ ID NO: 17301 - RNA, 20 nt, synthetic construct
  source 1..20: mol_type = other RNA
tggtgtctccatttacttct

SEQ ID NO: 17302 - RNA, 20 nt, synthetic construct
  source 1..20: mol_type = other RNA
tggtgtcttttctgaagaag

SEQ ID NO: 17303 - RNA, 20 nt, synthetic construct
  source 1..20: mol_type = other RNA
tggtgtgagggtttttggaa

SEQ ID NO: 17304 - RNA, 20 nt, synthetic construct
  source 1..20: mol_type = other RNA
tggtgtggtagtggcagaaa

SEQ ID NO: 17305 - RNA, 20 nt, synthetic construct
  source 1..20: mol_type = other RNA
tggtgttcttctaaaactcc

SEQ ID NO: 17306 - RNA, 20 nt, synthetic construct
  source 1..20: mol_type = other RNA
tggttatgtatcaagtacct

SEQ ID NO: 17307 - RNA, 20 nt, synthetic construct
  source 1..20: mol_type = other RNA
tggttccctggatgttattt

SEQ ID NO: 17308 - RNA, 20 nt, synthetic construct
  source 1..20: mol_type = other RNA
tggttctatcctgttccatc

SEQ ID NO: 17309 - RNA, 20 nt, synthetic construct
  source 1..20: mol_type = other RNA
tggttgactgctttcacctg

SEQ ID NO: 17310 - RNA, 20 nt, synthetic construct
  source 1..20: mol_type = other RNA
tggttggggtagtggtggtg

SEQ ID NO: 17311 - RNA, 20 nt, synthetic construct
  source 1..20: mol_type = other RNA
tggttggtgtcttttctgaa

SEQ ID NO: 17312 - RNA, 20 nt, synthetic construct
  source 1..20: mol_type = other RNA
tggttggttctatcctgttc

SEQ ID NO: 17313 - RNA, 20 nt, synthetic construct
  source 1..20: mol_type = other RNA
tggttgtgtttgtgctgcct

SEQ ID NO: 17314 - RNA, 20 nt, synthetic construct
  source 1..20: mol_type = other RNA
tggtttcagatagtgctgtg

SEQ ID NO: 17315 - RNA, 20 nt, synthetic construct
  source 1..20: mol_type = other RNA
tggtttctatttttatatcc

SEQ ID NO: 17316 - RNA, 20 nt, synthetic construct
  source 1..20: mol_type = other RNA
tggtttctgaaaggaacagg

SEQ ID NO: 17317 - RNA, 20 nt, synthetic construct
  source 1..20: mol_type = other RNA
tggtttgtctagtcaaaact

SEQ ID NO: 17318 - RNA, 20 nt, synthetic construct
  source 1..20: mol_type = other RNA
tggttttctgcaccgcaatg

SEQ ID NO: 17319 - RNA, 20 nt, synthetic construct
  source 1..20: mol_type = other RNA
tggttttgagggagatgtga

SEQ ID NO: 17320 - RNA, 20 nt, synthetic construct
  source 1..20: mol_type = other RNA
tgtaaagtcaggactcacac

SEQ ID NO: 17321 - RNA, 20 nt, synthetic construct
  source 1..20: mol_type = other RNA
tgtaagagatgccaccttag

SEQ ID NO: 17322 - RNA, 20 nt, synthetic construct
  source 1..20: mol_type = other RNA
tgtaagcttgccttgggagc

SEQ ID NO: 17323 - RNA, 20 nt, synthetic construct
  source 1..20: mol_type = other RNA
tgtaatttttgctgctgttg

SEQ ID NO: 17324 - RNA, 20 nt, synthetic construct
  source 1..20: mol_type = other RNA
tgtaccaagttgaaatgaat

SEQ ID NO: 17325 - RNA, 20 nt, synthetic construct
  source 1..20: mol_type = other RNA
tgtaccttgggactgccctt

SEQ ID NO: 17326 - RNA, 20 nt, synthetic construct
  source 1..20: mol_type = other RNA
tgtacttcctccagtcccat

SEQ ID NO: 17327 - RNA, 20 nt, synthetic construct
  source 1..20: mol_type = other RNA
tgtagaactgaagcttgttg

SEQ ID NO: 17328 - RNA, 20 nt, synthetic construct
  source 1..20: mol_type = other RNA
tgtagatggattaggactct

SEQ ID NO: 17329 - RNA, 20 nt, synthetic construct
  source 1..20: mol_type = other RNA
tgtagcaccattaggcatta

SEQ ID NO: 17330 - RNA, 20 nt, synthetic construct
  source 1..20: mol_type = other RNA
tgtagccagaggttctgtct

SEQ ID NO: 17331 - RNA, 20 nt, synthetic construct
  source 1..20: mol_type = other RNA
tgtagcccaagaaaatgcag

SEQ ID NO: 17332 - RNA, 20 nt, synthetic construct
  source 1..20: mol_type = other RNA
tgtagctctccactgctacc

SEQ ID NO: 17333 - RNA, 20 nt, synthetic construct
  source 1..20: mol_type = other RNA
tgtaggtaagtgccagaaat

SEQ ID NO: 17334 - RNA, 20 nt, synthetic construct
  source 1..20: mol_type = other RNA
tgtagtctgttctttattct

SEQ ID NO: 17335 - RNA, 20 nt, synthetic construct
  source 1..20: mol_type = other RNA
tgtagttgttctggtttctg

SEQ ID NO: 17336 - RNA, 20 nt, synthetic construct
  source 1..20: mol_type = other RNA
tgtatcaagtacctttgctg

SEQ ID NO: 17337 - RNA, 20 nt, synthetic construct
  source 1..20: mol_type = other RNA
tgtatgaagggaagccagaa

SEQ ID NO: 17338 - RNA, 20 nt, synthetic construct
  source 1..20: mol_type = other RNA
tgtatgcacacagcaccacc

SEQ ID NO: 17339 - RNA, 20 nt, synthetic construct
  source 1..20: mol_type = other RNA
tgtatgcagcccttctccga

SEQ ID NO: 17340 - RNA, 20 nt, synthetic construct
  source 1..20: mol_type = other RNA
tgtatgtcattcctgttcac

SEQ ID NO: 17341 - RNA, 20 nt, synthetic construct
  source 1..20: mol_type = other RNA
tgtattacttaaaaacaagg

SEQ ID NO: 17342 - RNA, 20 nt, synthetic construct
  source 1..20: mol_type = other RNA
tgtattgtttgaacaagaaa

SEQ ID NO: 17343 - RNA, 20 nt, synthetic construct
  source 1..20: mol_type = other RNA
tgtattgtttggaggtcatt

SEQ ID NO: 17344 - RNA, 20 nt, synthetic construct
  source 1..20: mol_type = other RNA
tgtattttgcatgcacttga

SEQ ID NO: 17345 - RNA, 20 nt, synthetic construct
  source 1..20: mol_type = other RNA
tgtcaagactcaatatgatt

SEQ ID NO: 17346 - RNA, 20 nt, synthetic construct
  source 1..20: mol_type = other RNA
tgtcagaacacctcaagcat

SEQ ID NO: 17347 - RNA, 20 nt, synthetic construct
  source 1..20: mol_type = other RNA
tgtcagggccagtcacagtt

SEQ ID NO: 17348 - RNA, 20 nt, synthetic construct
  source 1..20: mol_type = other RNA
tgtcatggtaattagcactt

SEQ ID NO: 17349 - RNA, 20 nt, synthetic construct
  source 1..20: mol_type = other RNA
tgtcattcctgttcacacaa

SEQ ID NO: 17350 - RNA, 20 nt, synthetic construct
  source 1..20: mol_type = other RNA
tgtccaaatgggactggagg

SEQ ID NO: 17351 - RNA, 20 nt, synthetic construct
  source 1..20: mol_type = other RNA
tgtccccagtgttgaaacag

SEQ ID NO: 17352 - RNA, 20 nt, synthetic construct
  source 1..20: mol_type = other RNA
tgtccctgcagtctgtatgt

SEQ ID NO: 17353 - RNA, 20 nt, synthetic construct
  source 1..20: mol_type = other RNA
tgtcctgtagctctccactg

SEQ ID NO: 17354 - RNA, 20 nt, synthetic construct
  source 1..20: mol_type = other RNA
tgtcctgtgagatcactcac

SEQ ID NO: 17355 - RNA, 20 nt, synthetic construct
  source 1..20: mol_type = other RNA
tgtccttctggggaggggtc

SEQ ID NO: 17356 - RNA, 20 nt, synthetic construct
  source 1..20: mol_type = other RNA
tgtctagtcaaaactgtgac

SEQ ID NO: 17357 - RNA, 20 nt, synthetic construct
  source 1..20: mol_type = other RNA
tgtctcaatattatccagat

SEQ ID NO: 17358 - RNA, 20 nt, synthetic construct
  source 1..20: mol_type = other RNA
tgtctcagtacatttctggc

SEQ ID NO: 17359 - RNA, 20 nt, synthetic construct
  source 1..20: mol_type = other RNA
tgtctccatttacttctgga

SEQ ID NO: 17360 - RNA, 20 nt, synthetic construct
  source 1..20: mol_type = other RNA
tgtctccgatttgagtgata

SEQ ID NO: 17361 - RNA, 20 nt, synthetic construct
  source 1..20: mol_type = other RNA
tgtctcgacccttcagaatc

SEQ ID NO: 17362 - RNA, 20 nt, synthetic construct
  source 1..20: mol_type = other RNA
tgtctggcaaatgggaggtg

SEQ ID NO: 17363 - RNA, 20 nt, synthetic construct
  source 1..20: mol_type = other RNA
tgtctggtcaacaagctgcg

SEQ ID NO: 17364 - RNA, 20 nt, synthetic construct
  source 1..20: mol_type = other RNA
tgtcttttctgaagaagttg

SEQ ID NO: 17365 - RNA, 20 nt, synthetic construct
  source 1..20: mol_type = other RNA
tgtgaacaggaatgacatac

SEQ ID NO: 17366 - RNA, 20 nt, synthetic construct
  source 1..20: mol_type = other RNA
tgtgaactctgggatggttg

SEQ ID NO: 17367 - RNA, 20 nt, synthetic construct
  source 1..20: mol_type = other RNA
tgtgaagaagatcttgcttt

SEQ ID NO: 17368 - RNA, 20 nt, synthetic construct
  source 1..20: mol_type = other RNA
tgtgactggccctgacattt

SEQ ID NO: 17369 - RNA, 20 nt, synthetic construct
  source 1..20: mol_type = other RNA
tgtgacttcctccctggtca

SEQ ID NO: 17370 - RNA, 20 nt, synthetic construct
  source 1..20: mol_type = other RNA
tgtgacttctgctcctgttc

SEQ ID NO: 17371 - RNA, 20 nt, synthetic construct
  source 1..20: mol_type = other RNA
tgtgacttgtgctccagctg

SEQ ID NO: 17372 - RNA, 20 nt, synthetic construct
  source 1..20: mol_type = other RNA
tgtgagatcactcacccatc

SEQ ID NO: 17373 - RNA, 20 nt, synthetic construct
  source 1..20: mol_type = other RNA
tgtgagatgtggttttctgc

SEQ ID NO: 17374 - RNA, 20 nt, synthetic construct
  source 1..20: mol_type = other RNA
tgtgagggtttttggaactg

SEQ ID NO: 17375 - RNA, 20 nt, synthetic construct
  source 1..20: mol_type = other RNA
tgtgagtcctgactttacac

SEQ ID NO: 17376 - RNA, 20 nt, synthetic construct
  source 1..20: mol_type = other RNA
tgtgagttctgtagcccaag

SEQ ID NO: 17377 - RNA, 20 nt, synthetic construct
  source 1..20: mol_type = other RNA
tgtgagtttgaaaatggctc

SEQ ID NO: 17378 - RNA, 20 nt, synthetic construct
  source 1..20: mol_type = other RNA
tgtgataatgtgcagcaaaa

SEQ ID NO: 17379 - RNA, 20 nt, synthetic construct
  source 1..20: mol_type = other RNA
tgtgatcccaaagcaagatc

SEQ ID NO: 17380 - RNA, 20 nt, synthetic construct
  source 1..20: mol_type = other RNA
tgtgatgcaagttttgggtc

SEQ ID NO: 17381 - RNA, 20 nt, synthetic construct
  source 1..20: mol_type = other RNA
tgtgatgctgatgatgctga

SEQ ID NO: 17382 - RNA, 20 nt, synthetic construct
  source 1..20: mol_type = other RNA
tgtgatggtggtggtggtgt

SEQ ID NO: 17383 - RNA, 20 nt, synthetic construct
  source 1..20: mol_type = other RNA
tgtgatttgagagtaagagc

SEQ ID NO: 17384 - RNA, 20 nt, synthetic construct
  source 1..20: mol_type = other RNA
tgtgcagcaaaagagcatca

SEQ ID NO: 17385 - RNA, 20 nt, synthetic construct
  source 1..20: mol_type = other RNA
tgtgcagtcactgtgtggca

SEQ ID NO: 17386 - RNA, 20 nt, synthetic construct
  source 1..20: mol_type = other RNA
tgtgcatacaggcatgtggc

SEQ ID NO: 17387 - RNA, 20 nt, synthetic construct
  source 1..20: mol_type = other RNA
tgtgcatctgactatggcaa

SEQ ID NO: 17388 - RNA, 20 nt, synthetic construct
  source 1..20: mol_type = other RNA
tgtgcccccaacacagcact

SEQ ID NO: 17389 - RNA, 20 nt, synthetic construct
  source 1..20: mol_type = other RNA
tgtgcctgaccagggaggaa

SEQ ID NO: 17390 - RNA, 20 nt, synthetic construct
  source 1..20: mol_type = other RNA
tgtgcggaattgatctgccc

SEQ ID NO: 17391 - RNA, 20 nt, synthetic construct
  source 1..20: mol_type = other RNA
tgtgcgttttattcctccat

SEQ ID NO: 17392 - RNA, 20 nt, synthetic construct
  source 1..20: mol_type = other RNA
tgtgctccagctgtgttgtt

SEQ ID NO: 17393 - RNA, 20 nt, synthetic construct
  source 1..20: mol_type = other RNA
tgtgctgcctgtttatgagg

SEQ ID NO: 17394 - RNA, 20 nt, synthetic construct
  source 1..20: mol_type = other RNA
tgtggaagaggaggaggggg

SEQ ID NO: 17395 - RNA, 20 nt, synthetic construct
  source 1..20: mol_type = other RNA
tgtggatggccccgaagcaa

SEQ ID NO: 17396 - RNA, 20 nt, synthetic construct
  source 1..20: mol_type = other RNA
tgtggcactagatttcattt

SEQ ID NO: 17397 - RNA, 20 nt, synthetic construct
  source 1..20: mol_type = other RNA
tgtggctatcaagttctgca

SEQ ID NO: 17398 - RNA, 20 nt, synthetic construct
  source 1..20: mol_type = other RNA
tgtggcttgcatccaggttc

SEQ ID NO: 17399 - RNA, 20 nt, synthetic construct
  source 1..20: mol_type = other RNA
tgtggtagtggcagaaaagg

SEQ ID NO: 17400 - RNA, 20 nt, synthetic construct
  source 1..20: mol_type = other RNA
tgtggttccctggatgttat

SEQ ID NO: 17401 - RNA, 20 nt, synthetic construct
  source 1..20: mol_type = other RNA
tgtggttttctgcaccgcaa

SEQ ID NO: 17402 - RNA, 20 nt, synthetic construct
  source 1..20: mol_type = other RNA
tgtgtaaagtcaggactcac

SEQ ID NO: 17403 - RNA, 20 nt, synthetic construct
  source 1..20: mol_type = other RNA
tgtgtagatggattaggact

SEQ ID NO: 17404 - RNA, 20 nt, synthetic construct
  source 1..20: mol_type = other RNA
tgtgtaggtaagtgccagaa

SEQ ID NO: 17405 - RNA, 20 nt, synthetic construct
  source 1..20: mol_type = other RNA
tgtgtagtctgttctttatt

SEQ ID NO: 17406 - RNA, 20 nt, synthetic construct
  source 1..20: mol_type = other RNA
tgtgtattgtttgaacaaga

SEQ ID NO: 17407 - RNA, 20 nt, synthetic construct
  source 1..20: mol_type = other RNA
tgtgtctcagtacatttctg

SEQ ID NO: 17408 - RNA, 20 nt, synthetic construct
  source 1..20: mol_type = other RNA
tgtgtgaacaggaatgacat

SEQ ID NO: 17409 - RNA, 20 nt, synthetic construct
  source 1..20: mol_type = other RNA
tgtgtgcatacaggcatgtg

SEQ ID NO: 17410 - RNA, 20 nt, synthetic construct
  source 1..20: mol_type = other RNA
tgtgtggcactagatttcat

SEQ ID NO: 17411 - RNA, 20 nt, synthetic construct
  source 1..20: mol_type = other RNA
tgtgtgtgttccacggaaga

SEQ ID NO: 17412 - RNA, 20 nt, synthetic construct
  source 1..20: mol_type = other RNA
tgtgtgttccacggaagagg

SEQ ID NO: 17413 - RNA, 20 nt, synthetic construct
  source 1..20: mol_type = other RNA
tgtgttactttggttggggt

SEQ ID NO: 17414 - RNA, 20 nt, synthetic construct
  source 1..20: mol_type = other RNA
tgtgttccacggaagaggca

SEQ ID NO: 17415 - RNA, 20 nt, synthetic construct
  source 1..20: mol_type = other RNA
tgtgttctgagaaaacaaga

SEQ ID NO: 17416 - RNA, 20 nt, synthetic construct
  source 1..20: mol_type = other RNA
tgtgttgaaaaactggtgaa

SEQ ID NO: 17417 - RNA, 20 nt, synthetic construct
  source 1..20: mol_type = other RNA
tgtgttgggggcacaagatc

SEQ ID NO: 17418 - RNA, 20 nt, synthetic construct
  source 1..20: mol_type = other RNA
tgtgttgttttctgggtgta

SEQ ID NO: 17419 - RNA, 20 nt, synthetic construct
  source 1..20: mol_type = other RNA
tgtgtttccattgcggtgca

SEQ ID NO: 17420 - RNA, 20 nt, synthetic construct
  source 1..20: mol_type = other RNA
tgtgtttgctgctgttcttg

SEQ ID NO: 17421 - RNA, 20 nt, synthetic construct
  source 1..20: mol_type = other RNA
tgtgtttgtgctgcctgttt

SEQ ID NO: 17422 - RNA, 20 nt, synthetic construct
  source 1..20: mol_type = other RNA
tgttaatggcatttatgtga

SEQ ID NO: 17423 - RNA, 20 nt, synthetic construct
  source 1..20: mol_type = other RNA
tgttactttggttggggtag

SEQ ID NO: 17424 - RNA, 20 nt, synthetic construct
  source 1..20: mol_type = other RNA
tgttattttctgcaggagat

SEQ ID NO: 17425 - RNA, 20 nt, synthetic construct
  source 1..20: mol_type = other RNA
tgttcaaacaatacacacct

SEQ ID NO: 17426 - RNA, 20 nt, synthetic construct
  source 1..20: mol_type = other RNA
tgttcacacaattattctga

SEQ ID NO: 17427 - RNA, 20 nt, synthetic construct
  source 1..20: mol_type = other RNA
tgttcactaaggattccttt

SEQ ID NO: 17428 - RNA, 20 nt, synthetic construct
  source 1..20: mol_type = other RNA
tgttcaggttccagcagcaa

SEQ ID NO: 17429 - RNA, 20 nt, synthetic construct
  source 1..20: mol_type = other RNA
tgttccacggaagaggcaga

SEQ ID NO: 17430 - RNA, 20 nt, synthetic construct
  source 1..20: mol_type = other RNA
tgttccatcaggcttgcttc

SEQ ID NO: 17431 - RNA, 20 nt, synthetic construct
  source 1..20: mol_type = other RNA
tgttccattgtgttctgaga

SEQ ID NO: 17432 - RNA, 20 nt, synthetic construct
  source 1..20: mol_type = other RNA
tgttcctttcagaaaccaga

SEQ ID NO: 17433 - RNA, 20 nt, synthetic construct
  source 1..20: mol_type = other RNA
tgttctgacattggtcttgt

SEQ ID NO: 17434 - RNA, 20 nt, synthetic construct
  source 1..20: mol_type = other RNA
tgttctgagaaaacaagacc

SEQ ID NO: 17435 - RNA, 20 nt, synthetic construct
  source 1..20: mol_type = other RNA
tgttctggtttctgaaagga

SEQ ID NO: 17436 - RNA, 20 nt, synthetic construct
  source 1..20: mol_type = other RNA
tgttcttctaaaactccacc

SEQ ID NO: 17437 - RNA, 20 nt, synthetic construct
  source 1..20: mol_type = other RNA
tgttcttgaaagcacctgtg

SEQ ID NO: 17438 - RNA, 20 nt, synthetic construct
  source 1..20: mol_type = other RNA
tgttcttgcttctgtaagag

SEQ ID NO: 17439 - RNA, 20 nt, synthetic construct
  source 1..20: mol_type = other RNA
tgttcttgtcatggtaatta

SEQ ID NO: 17440 - RNA, 20 nt, synthetic construct
  source 1..20: mol_type = other RNA
tgttctttattctctgaaac

SEQ ID NO: 17441 - RNA, 20 nt, synthetic construct
  source 1..20: mol_type = other RNA
tgttcttttggttggtgtct

SEQ ID NO: 17442 - RNA, 20 nt, synthetic construct
  source 1..20: mol_type = other RNA
tgttgaaaaactggtgaaat

SEQ ID NO: 17443 - RNA, 20 nt, synthetic construct
  source 1..20: mol_type = other RNA
tgttgaaaatgaaatctagt

SEQ ID NO: 17444 - RNA, 20 nt, synthetic construct
  source 1..20: mol_type = other RNA
tgttgaaacagcacttgaat

SEQ ID NO: 17445 - RNA, 20 nt, synthetic construct
  source 1..20: mol_type = other RNA
tgttgaccagacatatcttg

SEQ ID NO: 17446 - RNA, 20 nt, synthetic construct
  source 1..20: mol_type = other RNA
tgttgagggcaacagactaa

SEQ ID NO: 17447 - RNA, 20 nt, synthetic construct
  source 1..20: mol_type = other RNA
tgttgattcaagtgctgttt

SEQ ID NO: 17448 - RNA, 20 nt, synthetic construct
  source 1..20: mol_type = other RNA
tgttgcaaaaggtgtgagtt

SEQ ID NO: 17449 - RNA, 20 nt, synthetic construct
  source 1..20: mol_type = other RNA
tgttgccctcaacatggttg

SEQ ID NO: 17450 - RNA, 20 nt, synthetic construct
  source 1..20: mol_type = other RNA
tgttgctggttttgagggag

SEQ ID NO: 17451 - RNA, 20 nt, synthetic construct
  source 1..20: mol_type = other RNA
tgttgctttgggggtgagga

SEQ ID NO: 17452 - RNA, 20 nt, synthetic construct
  source 1..20: mol_type = other RNA
tgttggaatttccagtgtat

SEQ ID NO: 17453 - RNA, 20 nt, synthetic construct
  source 1..20: mol_type = other RNA
tgttgggggcacaagatctc

SEQ ID NO: 17454 - RNA, 20 nt, synthetic construct
  source 1..20: mol_type = other RNA
tgttggtccactgtaccttg

SEQ ID NO: 17455 - RNA, 20 nt, synthetic construct
  source 1..20: mol_type = other RNA
tgttgtagttgttctggttt

SEQ ID NO: 17456 - RNA, 20 nt, synthetic construct
  source 1..20: mol_type = other RNA
tgttgtgacttctgctcctg

SEQ ID NO: 17457 - RNA, 20 nt, synthetic construct
  source 1..20: mol_type = other RNA
tgttgtgttactttggttgg

SEQ ID NO: 17458 - RNA, 20 nt, synthetic construct
  source 1..20: mol_type = other RNA
tgttgttgtagttgttctgg

SEQ ID NO: 17459 - RNA, 20 nt, synthetic construct
  source 1..20: mol_type = other RNA
tgttgttttctgggtgtaag

SEQ ID NO: 17460 - RNA, 20 nt, synthetic construct
  source 1..20: mol_type = other RNA
tgtttatgaggcttatgttg

SEQ ID NO: 17461 - RNA, 20 nt, synthetic construct
  source 1..20: mol_type = other RNA
tgtttcaacactggggacat

SEQ ID NO: 17462 - RNA, 20 nt, synthetic construct
  source 1..20: mol_type = other RNA
tgtttcaatttcttgatctg

SEQ ID NO: 17463 - RNA, 20 nt, synthetic construct
  source 1..20: mol_type = other RNA
tgtttccattgcggtgcaga

SEQ ID NO: 17464 - RNA, 20 nt, synthetic construct
  source 1..20: mol_type = other RNA
tgtttcctgcaaaaagttca

SEQ ID NO: 17465 - RNA, 20 nt, synthetic construct
  source 1..20: mol_type = other RNA
tgtttctcatcaactgctgg

SEQ ID NO: 17466 - RNA, 20 nt, synthetic construct
  source 1..20: mol_type = other RNA
tgtttgaacaagaaacctgt

SEQ ID NO: 17467 - RNA, 20 nt, synthetic construct
  source 1..20: mol_type = other RNA
tgtttgcaaaatggaggaat

SEQ ID NO: 17468 - RNA, 20 nt, synthetic construct
  source 1..20: mol_type = other RNA
tgtttgctccttgtctcgac

SEQ ID NO: 17469 - RNA, 20 nt, synthetic construct
  source 1..20: mol_type = other RNA
tgtttgctgctctaaagctg

SEQ ID NO: 17470 - RNA, 20 nt, synthetic construct
  source 1..20: mol_type = other RNA
tgtttgctgctgttcttgct

SEQ ID NO: 17471 - RNA, 20 nt, synthetic construct
  source 1..20: mol_type = other RNA
tgtttggaggtcatttgatt

SEQ ID NO: 17472 - RNA, 20 nt, synthetic construct
  source 1..20: mol_type = other RNA
tgtttgtgctgcctgtttat

SEQ ID NO: 17473 - RNA, 20 nt, synthetic construct
  source 1..20: mol_type = other RNA
tgttttaaataccgttcaga

SEQ ID NO: 17474 - RNA, 20 nt, synthetic construct
  source 1..20: mol_type = other RNA
tgttttcatggtgaaaatca

SEQ ID NO: 17475 - RNA, 20 nt, synthetic construct
  source 1..20: mol_type = other RNA
tgttttctcagaacacaatg

SEQ ID NO: 17476 - RNA, 20 nt, synthetic construct
  source 1..20: mol_type = other RNA
tgttttctgggtgtaagctt

SEQ ID NO: 17477 - RNA, 20 nt, synthetic construct
  source 1..20: mol_type = other RNA
tgttttctggtggtgctgtg

SEQ ID NO: 17478 - RNA, 20 nt, synthetic construct
  source 1..20: mol_type = other RNA
tgttttggagaagtgcacct

SEQ ID NO: 17479 - RNA, 20 nt, synthetic construct
  source 1..20: mol_type = other RNA
tgttttgttttctggtggtg

SEQ ID NO: 17480 - RNA, 20 nt, synthetic construct
  source 1..20: mol_type = other RNA
tgtttttcctgtgcctgacc

SEQ ID NO: 17481 - RNA, 20 nt, synthetic construct
  source 1..20: mol_type = other RNA
tgttttttccaggagttcac

SEQ ID NO: 17482 - RNA, 20 nt, synthetic construct
  source 1..20: mol_type = other RNA
ttaaaaacaaggcagtgcta

SEQ ID NO: 17483 - RNA, 20 nt, synthetic construct
  source 1..20: mol_type = other RNA
ttaaaagtgttgtgttactt

SEQ ID NO: 17484 - RNA, 20 nt, synthetic construct
  source 1..20: mol_type = other RNA
ttaaagatttcaccagtttt

SEQ ID NO: 17485 - RNA, 20 nt, synthetic construct
  source 1..20: mol_type = other RNA
ttaaataccgttcagagctg

SEQ ID NO: 17486 - RNA, 20 nt, synthetic construct
  source 1..20: mol_type = other RNA
ttaacagtcaggctactaat

SEQ ID NO: 17487 - RNA, 20 nt, synthetic construct
  source 1..20: mol_type = other RNA
ttaactgcattttcttgggc

SEQ ID NO: 17488 - RNA, 20 nt, synthetic construct
  source 1..20: mol_type = other RNA
ttaagggaagtgaaaataga

SEQ ID NO: 17489 - RNA, 20 nt, synthetic construct
  source 1..20: mol_type = other RNA
ttaaggtggaacctggatgc

SEQ ID NO: 17490 - RNA, 20 nt, synthetic construct
  source 1..20: mol_type = other RNA
ttaatggcatttatgtgaga

SEQ ID NO: 17491 - RNA, 20 nt, synthetic construct
  source 1..20: mol_type = other RNA
ttaattggcctgtgcatctg

SEQ ID NO: 17492 - RNA, 20 nt, synthetic construct
  source 1..20: mol_type = other RNA
ttacacaagaaagtagaggg

SEQ ID NO: 17493 - RNA, 20 nt, synthetic construct
  source 1..20: mol_type = other RNA
ttacacccagaaaacaacac

SEQ ID NO: 17494 - RNA, 20 nt, synthetic construct
  source 1..20: mol_type = other RNA
ttacagaagcaagaacagca

SEQ ID NO: 17495 - RNA, 20 nt, synthetic construct
  source 1..20: mol_type = other RNA
ttaccaaaagctcatgtgca

SEQ ID NO: 17496 - RNA, 20 nt, synthetic construct
  source 1..20: mol_type = other RNA
ttaccatgacaagaacattg

SEQ ID NO: 17497 - RNA, 20 nt, synthetic construct
  source 1..20: mol_type = other RNA
ttaccccgaagttacgtctt

SEQ ID NO: 17498 - RNA, 20 nt, synthetic construct
  source 1..20: mol_type = other RNA
ttaccctctattttcacttc

SEQ ID NO: 17499 - RNA, 20 nt, synthetic construct
  source 1..20: mol_type = other RNA
ttacctacacatctgcaaga

SEQ ID NO: 17500 - RNA, 20 nt, synthetic construct
  source 1..20: mol_type = other RNA
ttacctttttccatgttttg

SEQ ID NO: 17501 - RNA, 20 nt, synthetic construct
  source 1..20: mol_type = other RNA
ttacgtctttctccattagc

SEQ ID NO: 17502 - RNA, 20 nt, synthetic construct
  source 1..20: mol_type = other RNA
ttacgttttagatgggattc

SEQ ID NO: 17503 - RNA, 20 nt, synthetic construct
  source 1..20: mol_type = other RNA
ttactagatactcctataaa

SEQ ID NO: 17504 - RNA, 20 nt, synthetic construct
  source 1..20: mol_type = other RNA
ttactctcaaatcacagaag

SEQ ID NO: 17505 - RNA, 20 nt, synthetic construct
  source 1..20: mol_type = other RNA
ttactggcattatcagcatc

SEQ ID NO: 17506 - RNA, 20 nt, synthetic construct
  source 1..20: mol_type = other RNA
ttacttaaaaacaaggcagt

SEQ ID NO: 17507 - RNA, 20 nt, synthetic construct
  source 1..20: mol_type = other RNA
ttacttcaagcaaagctcag

SEQ ID NO: 17508 - RNA, 20 nt, synthetic construct
  source 1..20: mol_type = other RNA
ttacttctggatgagctctc

SEQ ID NO: 17509 - RNA, 20 nt, synthetic construct
  source 1..20: mol_type = other RNA
ttacttgcttctgtgatttg

SEQ ID NO: 17510 - RNA, 20 nt, synthetic construct
  source 1..20: mol_type = other RNA
ttactttggttggggtagtg

SEQ ID NO: 17511 - RNA, 20 nt, synthetic construct
  source 1..20: mol_type = other RNA
ttagaagaacaccaccacta

SEQ ID NO: 17512 - RNA, 20 nt, synthetic construct
  source 1..20: mol_type = other RNA
ttagagcagcaaacaacttc

SEQ ID NO: 17513 - RNA, 20 nt, synthetic construct
  source 1..20: mol_type = other RNA
ttagagcagcatgcttttga

SEQ ID NO: 17514 - RNA, 20 nt, synthetic construct
  source 1..20: mol_type = other RNA
ttagaggtctgtgcggaatt

SEQ ID NO: 17515 - RNA, 20 nt, synthetic construct
  source 1..20: mol_type = other RNA
ttagatgggattccgcttgg

SEQ ID NO: 17516 - RNA, 20 nt, synthetic construct
  source 1..20: mol_type = other RNA
ttagcactgccttgttttta

SEQ ID NO: 17517 - RNA, 20 nt, synthetic construct
  source 1..20: mol_type = other RNA
ttagcacttttcccctcctg

SEQ ID NO: 17518 - RNA, 20 nt, synthetic construct
  source 1..20: mol_type = other RNA
ttagcattgcagctagttta

SEQ ID NO: 17519 - RNA, 20 nt, synthetic construct
  source 1..20: mol_type = other RNA
ttagccttttggtcttgttt

SEQ ID NO: 17520 - RNA, 20 nt, synthetic construct
  source 1..20: mol_type = other RNA
ttaggactctgggaaggtgg

SEQ ID NO: 17521 - RNA, 20 nt, synthetic construct
  source 1..20: mol_type = other RNA
ttaggcattagcactgcctt

SEQ ID NO: 17522 - RNA, 20 nt, synthetic construct
  source 1..20: mol_type = other RNA
ttagtagcctgactgttaat

SEQ ID NO: 17523 - RNA, 20 nt, synthetic construct
  source 1..20: mol_type = other RNA
ttagtctggccaaagaatga

SEQ ID NO: 17524 - RNA, 20 nt, synthetic construct
  source 1..20: mol_type = other RNA
ttagtctgttgccctcaaca

SEQ ID NO: 17525 - RNA, 20 nt, synthetic construct
  source 1..20: mol_type = other RNA
ttagtgaacactgagctttg

SEQ ID NO: 17526 - RNA, 20 nt, synthetic construct
  source 1..20: mol_type = other RNA
ttagtgaaccttctctctct

SEQ ID NO: 17527 - RNA, 20 nt, synthetic construct
  source 1..20: mol_type = other RNA
ttagttacctttttccatgt

SEQ ID NO: 17528 - RNA, 20 nt, synthetic construct
  source 1..20: mol_type = other RNA
ttatagagtcaccttccaaa

SEQ ID NO: 17529 - RNA, 20 nt, synthetic construct
  source 1..20: mol_type = other RNA
ttataggagtatctagtaat

SEQ ID NO: 17530 - RNA, 20 nt, synthetic construct
  source 1..20: mol_type = other RNA
ttatagtcagaccatgaaat

SEQ ID NO: 17531 - RNA, 20 nt, synthetic construct
  source 1..20: mol_type = other RNA
ttatatccctgtagaactga

SEQ ID NO: 17532 - RNA, 20 nt, synthetic construct
  source 1..20: mol_type = other RNA
ttatattctgtacttcctcc

SEQ ID NO: 17533 - RNA, 20 nt, synthetic construct
  source 1..20: mol_type = other RNA
ttatcacagcttgcaggtgg

SEQ ID NO: 17534 - RNA, 20 nt, synthetic construct
  source 1..20: mol_type = other RNA
ttatcactcaaatcggagac

SEQ ID NO: 17535 - RNA, 20 nt, synthetic construct
  source 1..20: mol_type = other RNA
ttatcagcatcatcagcatc

SEQ ID NO: 17536 - RNA, 20 nt, synthetic construct
  source 1..20: mol_type = other RNA
ttatccagattgtgtttcca

SEQ ID NO: 17537 - RNA, 20 nt, synthetic construct
  source 1..20: mol_type = other RNA
ttatgaggcttatgttgcaa

SEQ ID NO: 17538 - RNA, 20 nt, synthetic construct
  source 1..20: mol_type = other RNA
ttatgagtctcgaactcgct

SEQ ID NO: 17539 - RNA, 20 nt, synthetic construct
  source 1..20: mol_type = other RNA
ttatgcttgaggtgttctga

SEQ ID NO: 17540 - RNA, 20 nt, synthetic construct
  source 1..20: mol_type = other RNA
ttatggaataccctgtatga

SEQ ID NO: 17541 - RNA, 20 nt, synthetic construct
  source 1..20: mol_type = other RNA
ttatggtcaaataacgactt

SEQ ID NO: 17542 - RNA, 20 nt, synthetic construct
  source 1..20: mol_type = other RNA
ttatgtatcaagtacctttg

SEQ ID NO: 17543 - RNA, 20 nt, synthetic construct
  source 1..20: mol_type = other RNA
ttatgtccccagtgttgaaa

SEQ ID NO: 17544 - RNA, 20 nt, synthetic construct
  source 1..20: mol_type = other RNA
ttatgtgagatgtggttttc

SEQ ID NO: 17545 - RNA, 20 nt, synthetic construct
  source 1..20: mol_type = other RNA
ttatgtgttgaaaaactggt

SEQ ID NO: 17546 - RNA, 20 nt, synthetic construct
  source 1..20: mol_type = other RNA
ttatgttgcaaaaggtgtga

SEQ ID NO: 17547 - RNA, 20 nt, synthetic construct
  source 1..20: mol_type = other RNA
ttattatggaataccctgta

SEQ ID NO: 17548 - RNA, 20 nt, synthetic construct
  source 1..20: mol_type = other RNA
ttattcctccattttgcaaa

SEQ ID NO: 17549 - RNA, 20 nt, synthetic construct
  source 1..20: mol_type = other RNA
ttattctctgaaactaggtg

SEQ ID NO: 17550 - RNA, 20 nt, synthetic construct
  source 1..20: mol_type = other RNA
ttattctgaggcctttcaga

SEQ ID NO: 17551 - RNA, 20 nt, synthetic construct
  source 1..20: mol_type = other RNA
ttattgagaacagaagcagc

SEQ ID NO: 17552 - RNA, 20 nt, synthetic construct
  source 1..20: mol_type = other RNA
ttattggatacacctgtcaa

SEQ ID NO: 17553 - RNA, 20 nt, synthetic construct
  source 1..20: mol_type = other RNA
ttatttgaccataaggctct

SEQ ID NO: 17554 - RNA, 20 nt, synthetic construct
  source 1..20: mol_type = other RNA
ttatttgtaatttttgctgc

SEQ ID NO: 17555 - RNA, 20 nt, synthetic construct
  source 1..20: mol_type = other RNA
ttattttctgcaggagatgg

SEQ ID NO: 17556 - RNA, 20 nt, synthetic construct
  source 1..20: mol_type = other RNA
ttcaaaatcaagcgagttcg

SEQ ID NO: 17557 - RNA, 20 nt, synthetic construct
  source 1..20: mol_type = other RNA
ttcaaacaatacacacctag

SEQ ID NO: 17558 - RNA, 20 nt, synthetic construct
  source 1..20: mol_type = other RNA
ttcaaactcacaccttttgc

SEQ ID NO: 17559 - RNA, 20 nt, synthetic construct
  source 1..20: mol_type = other RNA
ttcaacaaagagcagattcc

SEQ ID NO: 17560 - RNA, 20 nt, synthetic construct
  source 1..20: mol_type = other RNA
ttcaacacataactgcagtg

SEQ ID NO: 17561 - RNA, 20 nt, synthetic construct
  source 1..20: mol_type = other RNA
ttcaacactggggacataag

SEQ ID NO: 17562 - RNA, 20 nt, synthetic construct
  source 1..20: mol_type = other RNA
ttcaacttggtacatttgtg

SEQ ID NO: 17563 - RNA, 20 nt, synthetic construct
  source 1..20: mol_type = other RNA
ttcaacttttacttgcttct

SEQ ID NO: 17564 - RNA, 20 nt, synthetic construct
  source 1..20: mol_type = other RNA
ttcaagaacaggagcagaag

SEQ ID NO: 17565 - RNA, 20 nt, synthetic construct
  source 1..20: mol_type = other RNA
ttcaagcaaagctcagtgtt

SEQ ID NO: 17566 - RNA, 20 nt, synthetic construct
  source 1..20: mol_type = other RNA
ttcaagtgctgtttcaacac

SEQ ID NO: 17567 - RNA, 20 nt, synthetic construct
  source 1..20: mol_type = other RNA
ttcaatccatcctggtttca

SEQ ID NO: 17568 - RNA, 20 nt, synthetic construct
  source 1..20: mol_type = other RNA
ttcaattcaatccatcctgg

SEQ ID NO: 17569 - RNA, 20 nt, synthetic construct
  source 1..20: mol_type = other RNA
ttcaatttcttgatctgaag

SEQ ID NO: 17570 - RNA, 20 nt, synthetic construct
  source 1..20: mol_type = other RNA
ttcacacaattattctgagg

SEQ ID NO: 17571 - RNA, 20 nt, synthetic construct
  source 1..20: mol_type = other RNA
ttcacaggtgctttcaagaa

SEQ ID NO: 17572 - RNA, 20 nt, synthetic construct
  source 1..20: mol_type = other RNA
ttcacatctccctcaaaacc

SEQ ID NO: 17573 - RNA, 20 nt, synthetic construct
  source 1..20: mol_type = other RNA
ttcaccaagcggaatcccat

SEQ ID NO: 17574 - RNA, 20 nt, synthetic construct
  source 1..20: mol_type = other RNA
ttcaccagacgctagctttg

SEQ ID NO: 17575 - RNA, 20 nt, synthetic construct
  source 1..20: mol_type = other RNA
ttcaccagtttttcaacaca

SEQ ID NO: 17576 - RNA, 20 nt, synthetic construct
  source 1..20: mol_type = other RNA
ttcaccatgaaaacattctt

SEQ ID NO: 17577 - RNA, 20 nt, synthetic construct
  source 1..20: mol_type = other RNA
ttcaccatgtgtgtgttcca

SEQ ID NO: 17578 - RNA, 20 nt, synthetic construct
  source 1..20: mol_type = other RNA
ttcacctggatttctttctt

SEQ ID NO: 17579 - RNA, 20 nt, synthetic construct
  source 1..20: mol_type = other RNA
ttcacgccaagtcgttattt

SEQ ID NO: 17580 - RNA, 20 nt, synthetic construct
  source 1..20: mol_type = other RNA
ttcactaactgtgcgtttta

SEQ ID NO: 17581 - RNA, 20 nt, synthetic construct
  source 1..20: mol_type = other RNA
ttcactaaggattccttttc

SEQ ID NO: 17582 - RNA, 20 nt, synthetic construct
  source 1..20: mol_type = other RNA
ttcacttcccttaaaagtgt

SEQ ID NO: 17583 - RNA, 20 nt, synthetic construct
  source 1..20: mol_type = other RNA
ttcagaaaagacaccaacca

SEQ ID NO: 17584 - RNA, 20 nt, synthetic construct
  source 1..20: mol_type = other RNA
ttcagaaaccagaacaacta

SEQ ID NO: 17585 - RNA, 20 nt, synthetic construct
  source 1..20: mol_type = other RNA
ttcagaaagcatcggagaag

SEQ ID NO: 17586 - RNA, 20 nt, synthetic construct
  source 1..20: mol_type = other RNA
ttcagaaggaaaaagcactc

SEQ ID NO: 17587 - RNA, 20 nt, synthetic construct
  source 1..20: mol_type = other RNA
ttcagaatctcttgctcttt

SEQ ID NO: 17588 - RNA, 20 nt, synthetic construct
  source 1..20: mol_type = other RNA
ttcagaatctgaagctctgg

SEQ ID NO: 17589 - RNA, 20 nt, synthetic construct
  source 1..20: mol_type = other RNA
ttcagagaataaagaacaga

SEQ ID NO: 17590 - RNA, 20 nt, synthetic construct
  source 1..20: mol_type = other RNA
ttcagagactgagccatttt

SEQ ID NO: 17591 - RNA, 20 nt, synthetic construct
  source 1..20: mol_type = other RNA
ttcagagctgccaccaggag

SEQ ID NO: 17592 - RNA, 20 nt, synthetic construct
  source 1..20: mol_type = other RNA
ttcagagtgctttttccttc

SEQ ID NO: 17593 - RNA, 20 nt, synthetic construct
  source 1..20: mol_type = other RNA
ttcagatagtgctgtgttgg

SEQ ID NO: 17594 - RNA, 20 nt, synthetic construct
  source 1..20: mol_type = other RNA
ttcagatcaagaaattgaaa

SEQ ID NO: 17595 - RNA, 20 nt, synthetic construct
  source 1..20: mol_type = other RNA
ttcagatgctgctccatggt

SEQ ID NO: 17596 - RNA, 20 nt, synthetic construct
  source 1..20: mol_type = other RNA
ttcagattctgaatgagcag

SEQ ID NO: 17597 - RNA, 20 nt, synthetic construct
  source 1..20: mol_type = other RNA
ttcaggatgtgtagtctgtt

SEQ ID NO: 17598 - RNA, 20 nt, synthetic construct
  source 1..20: mol_type = other RNA
ttcaggcccactgcagttat

SEQ ID NO: 17599 - RNA, 20 nt, synthetic construct
  source 1..20: mol_type = other RNA
ttcaggttccagcagcaatt

SEQ ID NO: 17600 - RNA, 20 nt, synthetic construct
  source 1..20: mol_type = other RNA
ttcagtatcaacccaatctc

SEQ ID NO: 17601 - RNA, 20 nt, synthetic construct
  source 1..20: mol_type = other RNA
ttcagttctacagggatata

SEQ ID NO: 17602 - RNA, 20 nt, synthetic construct
  source 1..20: mol_type = other RNA
ttcagtttgggaatctgctc

SEQ ID NO: 17603 - RNA, 20 nt, synthetic construct
  source 1..20: mol_type = other RNA
ttcatacagggtattccata

SEQ ID NO: 17604 - RNA, 20 nt, synthetic construct
  source 1..20: mol_type = other RNA
ttcatggtctgactataagg

SEQ ID NO: 17605 - RNA, 20 nt, synthetic construct
  source 1..20: mol_type = other RNA
ttcatggtgaaaatcagtat

SEQ ID NO: 17606 - RNA, 20 nt, synthetic construct
  source 1..20: mol_type = other RNA
ttcatttcaacttggtacat

SEQ ID NO: 17607 - RNA, 20 nt, synthetic construct
  source 1..20: mol_type = other RNA
ttcattttcaacaaagagca

SEQ ID NO: 17608 - RNA, 20 nt, synthetic construct
  source 1..20: mol_type = other RNA
ttccaaaaaccctcacacca

SEQ ID NO: 17609 - RNA, 20 nt, synthetic construct
  source 1..20: mol_type = other RNA
ttccaaataatgtgatccca

SEQ ID NO: 17610 - RNA, 20 nt, synthetic construct
  source 1..20: mol_type = other RNA
ttccaaattactagatactc

SEQ ID NO: 17611 - RNA, 20 nt, synthetic construct
  source 1..20: mol_type = other RNA
ttccaacatgcctggggggc

SEQ ID NO: 17612 - RNA, 20 nt, synthetic construct
  source 1..20: mol_type = other RNA
ttccaagtgtttgcaaaatg

SEQ ID NO: 17613 - RNA, 20 nt, synthetic construct
  source 1..20: mol_type = other RNA
ttccacaggttcctcagctt

SEQ ID NO: 17614 - RNA, 20 nt, synthetic construct
  source 1..20: mol_type = other RNA
ttccaccttaattggcctgt

SEQ ID NO: 17615 - RNA, 20 nt, synthetic construct
  source 1..20: mol_type = other RNA
ttccacggaagaggcagaaa

SEQ ID NO: 17616 - RNA, 20 nt, synthetic construct
  source 1..20: mol_type = other RNA
ttccactttagtctggccaa

SEQ ID NO: 17617 - RNA, 20 nt, synthetic construct
  source 1..20: mol_type = other RNA
ttccagcagcaatttgcaag

SEQ ID NO: 17618 - RNA, 20 nt, synthetic construct
  source 1..20: mol_type = other RNA
ttccaggagttcaccatgtg

SEQ ID NO: 17619 - RNA, 20 nt, synthetic construct
  source 1..20: mol_type = other RNA
ttccagtgtattgtttggag

SEQ ID NO: 17620 - RNA, 20 nt, synthetic construct
  source 1..20: mol_type = other RNA
ttccatcaggcttgcttcgg

SEQ ID NO: 17621 - RNA, 20 nt, synthetic construct
  source 1..20: mol_type = other RNA
ttccatgttttgttttctgg

SEQ ID NO: 17622 - RNA, 20 nt, synthetic construct
  source 1..20: mol_type = other RNA
ttccattctggagctttgta

SEQ ID NO: 17623 - RNA, 20 nt, synthetic construct
  source 1..20: mol_type = other RNA
ttccattgcggtgcagaaaa

SEQ ID NO: 17624 - RNA, 20 nt, synthetic construct
  source 1..20: mol_type = other RNA
ttccattgtgttctgagaaa

SEQ ID NO: 17625 - RNA, 20 nt, synthetic construct
  source 1..20: mol_type = other RNA
ttcccaaactgaaaaactta

SEQ ID NO: 17626 - RNA, 20 nt, synthetic construct
  source 1..20: mol_type = other RNA
ttcccagagtcctaatccat

SEQ ID NO: 17627 - RNA, 20 nt, synthetic construct
  source 1..20: mol_type = other RNA
ttcccatcttgcagatgtgt

SEQ ID NO: 17628 - RNA, 20 nt, synthetic construct
  source 1..20: mol_type = other RNA
ttcccctcctgctcattcag

SEQ ID NO: 17629 - RNA, 20 nt, synthetic construct
  source 1..20: mol_type = other RNA
ttccccttatagtcagacca

SEQ ID NO: 17630 - RNA, 20 nt, synthetic construct
  source 1..20: mol_type = other RNA
ttccctggatgttattttct

SEQ ID NO: 17631 - RNA, 20 nt, synthetic construct
  source 1..20: mol_type = other RNA
ttcccttaaaagtgttgtgt

SEQ ID NO: 17632 - RNA, 20 nt, synthetic construct
  source 1..20: mol_type = other RNA
ttcccttcatacagggtatt

SEQ ID NO: 17633 - RNA, 20 nt, synthetic construct
  source 1..20: mol_type = other RNA
ttccgcacagacctctaact

SEQ ID NO: 17634 - RNA, 20 nt, synthetic construct
  source 1..20: mol_type = other RNA
ttccgcttggtgaaaacgag

SEQ ID NO: 17635 - RNA, 20 nt, synthetic construct
  source 1..20: mol_type = other RNA
ttccgtggaacacacacatg

SEQ ID NO: 17636 - RNA, 20 nt, synthetic construct
  source 1..20: mol_type = other RNA
ttcctcacccccaaagcaac

SEQ ID NO: 17637 - RNA, 20 nt, synthetic construct
  source 1..20: mol_type = other RNA
ttcctcagcttccttcagaa

SEQ ID NO: 17638 - RNA, 20 nt, synthetic construct
  source 1..20: mol_type = other RNA
ttcctccagtcccatttgga

SEQ ID NO: 17639 - RNA, 20 nt, synthetic construct
  source 1..20: mol_type = other RNA
ttcctccattttgcaaacac

SEQ ID NO: 17640 - RNA, 20 nt, synthetic construct
  source 1..20: mol_type = other RNA
ttcctccctggtcaggcaca

SEQ ID NO: 17641 - RNA, 20 nt, synthetic construct
  source 1..20: mol_type = other RNA
ttcctgataccatcacctcc

SEQ ID NO: 17642 - RNA, 20 nt, synthetic construct
  source 1..20: mol_type = other RNA
ttcctgcaaaaagttcagga

SEQ ID NO: 17643 - RNA, 20 nt, synthetic construct
  source 1..20: mol_type = other RNA
ttcctgtgcctgaccaggga

SEQ ID NO: 17644 - RNA, 20 nt, synthetic construct
  source 1..20: mol_type = other RNA
ttcctgttcacacaattatt

SEQ ID NO: 17645 - RNA, 20 nt, synthetic construct
  source 1..20: mol_type = other RNA
ttccttcagaaggaaaaagc

SEQ ID NO: 17646 - RNA, 20 nt, synthetic construct
  source 1..20: mol_type = other RNA
ttccttctgaaggaagctga

SEQ ID NO: 17647 - RNA, 20 nt, synthetic construct
  source 1..20: mol_type = other RNA
ttcctttcagaaaccagaac

SEQ ID NO: 17648 - RNA, 20 nt, synthetic construct
  source 1..20: mol_type = other RNA
ttccttttctgccactacca

SEQ ID NO: 17649 - RNA, 20 nt, synthetic construct
  source 1..20: mol_type = other RNA
ttcgagactcataatgtcca

SEQ ID NO: 17650 - RNA, 20 nt, synthetic construct
  source 1..20: mol_type = other RNA
ttcggggccatccacaaggc

SEQ ID NO: 17651 - RNA, 20 nt, synthetic construct
  source 1..20: mol_type = other RNA
ttcggggtaagccaagaaag

SEQ ID NO: 17652 - RNA, 20 nt, synthetic construct
  source 1..20: mol_type = other RNA
ttctaaaactccaccattca

SEQ ID NO: 17653 - RNA, 20 nt, synthetic construct
  source 1..20: mol_type = other RNA
ttctacagggatataaaaat

SEQ ID NO: 17654 - RNA, 20 nt, synthetic construct
  source 1..20: mol_type = other RNA
ttctacgatttatattctgt

SEQ ID NO: 17655 - RNA, 20 nt, synthetic construct
  source 1..20: mol_type = other RNA
ttctatcctgttccatcagg

SEQ ID NO: 17656 - RNA, 20 nt, synthetic construct
  source 1..20: mol_type = other RNA
ttctatttttatatccctgt

SEQ ID NO: 17657 - RNA, 20 nt, synthetic construct
  source 1..20: mol_type = other RNA
ttctcagaacacaatggaac

SEQ ID NO: 17658 - RNA, 20 nt, synthetic construct
  source 1..20: mol_type = other RNA
ttctcatcaactgctggcag

SEQ ID NO: 17659 - RNA, 20 nt, synthetic construct
  source 1..20: mol_type = other RNA
ttctccaaaacagaccattt

SEQ ID NO: 17660 - RNA, 20 nt, synthetic construct
  source 1..20: mol_type = other RNA
ttctccattagccttttggt

SEQ ID NO: 17661 - RNA, 20 nt, synthetic construct
  source 1..20: mol_type = other RNA
ttctccccctcctcctcttc

SEQ ID NO: 17662 - RNA, 20 nt, synthetic construct
  source 1..20: mol_type = other RNA
ttctccgatgctttctgaaa

SEQ ID NO: 17663 - RNA, 20 nt, synthetic construct
  source 1..20: mol_type = other RNA
ttctctctctgggctccttc

SEQ ID NO: 17664 - RNA, 20 nt, synthetic construct
  source 1..20: mol_type = other RNA
ttctctgaaactaggtgtgt

SEQ ID NO: 17665 - RNA, 20 nt, synthetic construct
  source 1..20: mol_type = other RNA
ttctcttgcttagttacctt

SEQ ID NO: 17666 - RNA, 20 nt, synthetic construct
  source 1..20: mol_type = other RNA
ttctctttgctgatcattgt

SEQ ID NO: 17667 - RNA, 20 nt, synthetic construct
  source 1..20: mol_type = other RNA
ttctgaaaggaacaggtatt

SEQ ID NO: 17668 - RNA, 20 nt, synthetic construct
  source 1..20: mol_type = other RNA
ttctgaaaggcctcagaata

SEQ ID NO: 17669 - RNA, 20 nt, synthetic construct
  source 1..20: mol_type = other RNA
ttctgaagaagttgtttgct

SEQ ID NO: 17670 - RNA, 20 nt, synthetic construct
  source 1..20: mol_type = other RNA
ttctgaaggaagctgaggaa

SEQ ID NO: 17671 - RNA, 20 nt, synthetic construct
  source 1..20: mol_type = other RNA
ttctgaagggtcgagacaag

SEQ ID NO: 17672 - RNA, 20 nt, synthetic construct
  source 1..20: mol_type = other RNA
ttctgaatgagcaggagggg

SEQ ID NO: 17673 - RNA, 20 nt, synthetic construct
  source 1..20: mol_type = other RNA
ttctgacattggtcttgttt

SEQ ID NO: 17674 - RNA, 20 nt, synthetic construct
  source 1..20: mol_type = other RNA
ttctgagaaaacaagaccaa

SEQ ID NO: 17675 - RNA, 20 nt, synthetic construct
  source 1..20: mol_type = other RNA
ttctgaggcctttcagaaag

SEQ ID NO: 17676 - RNA, 20 nt, synthetic construct
  source 1..20: mol_type = other RNA
ttctgcaccgcaatggaaac

SEQ ID NO: 17677 - RNA, 20 nt, synthetic construct
  source 1..20: mol_type = other RNA
ttctgcagcagtggtttgtc

SEQ ID NO: 17678 - RNA, 20 nt, synthetic construct
  source 1..20: mol_type = other RNA
ttctgcaggagatgggcata

SEQ ID NO: 17679 - RNA, 20 nt, synthetic construct
  source 1..20: mol_type = other RNA
ttctgccactaccacaccac

SEQ ID NO: 17680 - RNA, 20 nt, synthetic construct
  source 1..20: mol_type = other RNA
ttctgcctcttccgtggaac

SEQ ID NO: 17681 - RNA, 20 nt, synthetic construct
  source 1..20: mol_type = other RNA
ttctgctcctgttcttgaaa

SEQ ID NO: 17682 - RNA, 20 nt, synthetic construct
  source 1..20: mol_type = other RNA
ttctggagctttgtagccag

SEQ ID NO: 17683 - RNA, 20 nt, synthetic construct
  source 1..20: mol_type = other RNA
ttctggatgagctctctcag

SEQ ID NO: 17684 - RNA, 20 nt, synthetic construct
  source 1..20: mol_type = other RNA
ttctggcacttacctacaca

SEQ ID NO: 17685 - RNA, 20 nt, synthetic construct
  source 1..20: mol_type = other RNA
ttctggcttcccttcataca

SEQ ID NO: 17686 - RNA, 20 nt, synthetic construct
  source 1..20: mol_type = other RNA
ttctggggaggggtctgagt

SEQ ID NO: 17687 - RNA, 20 nt, synthetic construct
  source 1..20: mol_type = other RNA
ttctgggtgtaagcttgcct

SEQ ID NO: 17688 - RNA, 20 nt, synthetic construct
  source 1..20: mol_type = other RNA
ttctggtggtgctgtgtgca

SEQ ID NO: 17689 - RNA, 20 nt, synthetic construct
  source 1..20: mol_type = other RNA
ttctggtttctgaaaggaac

SEQ ID NO: 17690 - RNA, 20 nt, synthetic construct
  source 1..20: mol_type = other RNA
ttctgtaagagatgccacct

SEQ ID NO: 17691 - RNA, 20 nt, synthetic construct
  source 1..20: mol_type = other RNA
ttctgtacttcctccagtcc

SEQ ID NO: 17692 - RNA, 20 nt, synthetic construct
  source 1..20: mol_type = other RNA
ttctgtagcccaagaaaatg

SEQ ID NO: 17693 - RNA, 20 nt, synthetic construct
  source 1..20: mol_type = other RNA
ttctgtctggcaaatgggag

SEQ ID NO: 17694 - RNA, 20 nt, synthetic construct
  source 1..20: mol_type = other RNA
ttctgtgatttgagagtaag

SEQ ID NO: 17695 - RNA, 20 nt, synthetic construct
  source 1..20: mol_type = other RNA
ttctgttcaggttccagcag

SEQ ID NO: 17696 - RNA, 20 nt, synthetic construct
  source 1..20: mol_type = other RNA
ttcttatcactcaaatcgga

SEQ ID NO: 17697 - RNA, 20 nt, synthetic construct
  source 1..20: mol_type = other RNA
ttcttcacaggtgctttcaa

SEQ ID NO: 17698 - RNA, 20 nt, synthetic construct
  source 1..20: mol_type = other RNA
ttcttcaccagacgctagct

SEQ ID NO: 17699 - RNA, 20 nt, synthetic construct
  source 1..20: mol_type = other RNA
ttcttcagaaaagacaccaa

SEQ ID NO: 17700 - RNA, 20 nt, synthetic construct
  source 1..20: mol_type = other RNA
ttcttcagtatcaacccaat

SEQ ID NO: 17701 - RNA, 20 nt, synthetic construct
  source 1..20: mol_type = other RNA
ttcttccactttagtctggc

SEQ ID NO: 17702 - RNA, 20 nt, synthetic construct
  source 1..20: mol_type = other RNA
ttcttctaaaactccaccat

SEQ ID NO: 17703 - RNA, 20 nt, synthetic construct
  source 1..20: mol_type = other RNA
ttcttgaaagcacctgtgaa

SEQ ID NO: 17704 - RNA, 20 nt, synthetic construct
  source 1..20: mol_type = other RNA
ttcttgatctgaaggagccc

SEQ ID NO: 17705 - RNA, 20 nt, synthetic construct
  source 1..20: mol_type = other RNA
ttcttgcttctgtaagagat

SEQ ID NO: 17706 - RNA, 20 nt, synthetic construct
  source 1..20: mol_type = other RNA
ttcttggcttaccccgaagt

SEQ ID NO: 17707 - RNA, 20 nt, synthetic construct
  source 1..20: mol_type = other RNA
ttcttgggctacagaactca

SEQ ID NO: 17708 - RNA, 20 nt, synthetic construct
  source 1..20: mol_type = other RNA
ttcttgtcatggtaattagc

SEQ ID NO: 17709 - RNA, 20 nt, synthetic construct
  source 1..20: mol_type = other RNA
ttcttgtgtaaagtcaggac

SEQ ID NO: 17710 - RNA, 20 nt, synthetic construct
  source 1..20: mol_type = other RNA
ttcttgttcaaacaatacac

SEQ ID NO: 17711 - RNA, 20 nt, synthetic construct
  source 1..20: mol_type = other RNA
ttctttattctctgaaacta

SEQ ID NO: 17712 - RNA, 20 nt, synthetic construct
  source 1..20: mol_type = other RNA
ttctttctccccctcctcct

SEQ ID NO: 17713 - RNA, 20 nt, synthetic construct
  source 1..20: mol_type = other RNA
ttctttcttatcactcaaat

SEQ ID NO: 17714 - RNA, 20 nt, synthetic construct
  source 1..20: mol_type = other RNA
ttctttcttggcttaccccg

SEQ ID NO: 17715 - RNA, 20 nt, synthetic construct
  source 1..20: mol_type = other RNA
ttctttggccagactaaagt

SEQ ID NO: 17716 - RNA, 20 nt, synthetic construct
  source 1..20: mol_type = other RNA
ttcttttggttggtgtcttt

SEQ ID NO: 17717 - RNA, 20 nt, synthetic construct
  source 1..20: mol_type = other RNA
ttgaaaaactggtgaaatct

SEQ ID NO: 17718 - RNA, 20 nt, synthetic construct
  source 1..20: mol_type = other RNA
ttgaaaatgaaatctagtgc

SEQ ID NO: 17719 - RNA, 20 nt, synthetic construct
  source 1..20: mol_type = other RNA
ttgaaaatggctcagtctct

SEQ ID NO: 17720 - RNA, 20 nt, synthetic construct
  source 1..20: mol_type = other RNA
ttgaaacaagaccaaaaggc

SEQ ID NO: 17721 - RNA, 20 nt, synthetic construct
  source 1..20: mol_type = other RNA
ttgaaacagcacttgaatca

SEQ ID NO: 17722 - RNA, 20 nt, synthetic construct
  source 1..20: mol_type = other RNA
ttgaaagagtgccacttggt

SEQ ID NO: 17723 - RNA, 20 nt, synthetic construct
  source 1..20: mol_type = other RNA
ttgaaagcacctgtgaagaa

SEQ ID NO: 17724 - RNA, 20 nt, synthetic construct
  source 1..20: mol_type = other RNA
ttgaaatgaatcaagggcag

SEQ ID NO: 17725 - RNA, 20 nt, synthetic construct
  source 1..20: mol_type = other RNA
ttgaaatgtcagggccagtc

SEQ ID NO: 17726 - RNA, 20 nt, synthetic construct
  source 1..20: mol_type = other RNA
ttgaacaagaaacctgtatt

SEQ ID NO: 17727 - RNA, 20 nt, synthetic construct
  source 1..20: mol_type = other RNA
ttgaaggcccctcgttttca

SEQ ID NO: 17728 - RNA, 20 nt, synthetic construct
  source 1..20: mol_type = other RNA
ttgaagtaagcaccattcat

SEQ ID NO: 17729 - RNA, 20 nt, synthetic construct
  source 1..20: mol_type = other RNA
ttgaatactgattttcacca

SEQ ID NO: 17730 - RNA, 20 nt, synthetic construct
  source 1..20: mol_type = other RNA
ttgaatcaacaggcttcaga

SEQ ID NO: 17731 - RNA, 20 nt, synthetic construct
  source 1..20: mol_type = other RNA
ttgaattgaaggcccctcgt

SEQ ID NO: 17732 - RNA, 20 nt, synthetic construct
  source 1..20: mol_type = other RNA
ttgacaggtgtatccaataa

SEQ ID NO: 17733 - RNA, 20 nt, synthetic construct
  source 1..20: mol_type = other RNA
ttgaccagacatatcttggt

SEQ ID NO: 17734 - RNA, 20 nt, synthetic construct
  source 1..20: mol_type = other RNA
ttgaccataaggctcttact

SEQ ID NO: 17735 - RNA, 20 nt, synthetic construct
  source 1..20: mol_type = other RNA
ttgactagacaaaccactgc

SEQ ID NO: 17736 - RNA, 20 nt, synthetic construct
  source 1..20: mol_type = other RNA
ttgactgctttcacctggat

SEQ ID NO: 17737 - RNA, 20 nt, synthetic construct
  source 1..20: mol_type = other RNA
ttgagaacagaagcagctgt

SEQ ID NO: 17738 - RNA, 20 nt, synthetic construct
  source 1..20: mol_type = other RNA
ttgagacagtgttttttcca

SEQ ID NO: 17739 - RNA, 20 nt, synthetic construct
  source 1..20: mol_type = other RNA
ttgagaccatggagcagcat

SEQ ID NO: 17740 - RNA, 20 nt, synthetic construct
  source 1..20: mol_type = other RNA
ttgagagtaagagccttatg

SEQ ID NO: 17741 - RNA, 20 nt, synthetic construct
  source 1..20: mol_type = other RNA
ttgagatatgcccatctcct

SEQ ID NO: 17742 - RNA, 20 nt, synthetic construct
  source 1..20: mol_type = other RNA
ttgagggagatgtgaactct

SEQ ID NO: 17743 - RNA, 20 nt, synthetic construct
  source 1..20: mol_type = other RNA
ttgagggcaacagactaagt

SEQ ID NO: 17744 - RNA, 20 nt, synthetic construct
  source 1..20: mol_type = other RNA
ttgaggtgttctgacattgg

SEQ ID NO: 17745 - RNA, 20 nt, synthetic construct
  source 1..20: mol_type = other RNA
ttgagtcttgacaggtgtat

SEQ ID NO: 17746 - RNA, 20 nt, synthetic construct
  source 1..20: mol_type = other RNA
ttgagtgataagaaagaatc

SEQ ID NO: 17747 - RNA, 20 nt, synthetic construct
  source 1..20: mol_type = other RNA
ttgagtgtccttctggggag

SEQ ID NO: 17748 - RNA, 20 nt, synthetic construct
  source 1..20: mol_type = other RNA
ttgatacataaccatgcaaa

SEQ ID NO: 17749 - RNA, 20 nt, synthetic construct
  source 1..20: mol_type = other RNA
ttgatactgaagaattgatg

SEQ ID NO: 17750 - RNA, 20 nt, synthetic construct
  source 1..20: mol_type = other RNA
ttgatagccacaccccagct

SEQ ID NO: 17751 - RNA, 20 nt, synthetic construct
  source 1..20: mol_type = other RNA
ttgatctgaaggagcccaga

SEQ ID NO: 17752 - RNA, 20 nt, synthetic construct
  source 1..20: mol_type = other RNA
ttgatctgccctgaggtatg

SEQ ID NO: 17753 - RNA, 20 nt, synthetic construct
  source 1..20: mol_type = other RNA
ttgatgagaaacaaagagca

SEQ ID NO: 17754 - RNA, 20 nt, synthetic construct
  source 1..20: mol_type = other RNA
ttgatggcagtgatgcctca

SEQ ID NO: 17755 - RNA, 20 nt, synthetic construct
  source 1..20: mol_type = other RNA
ttgattcaagtgctgtttca

SEQ ID NO: 17756 - RNA, 20 nt, synthetic construct
  source 1..20: mol_type = other RNA
ttgattcatttcaacttggt

SEQ ID NO: 17757 - RNA, 20 nt, synthetic construct
  source 1..20: mol_type = other RNA
ttgattggagagattgggtt

SEQ ID NO: 17758 - RNA, 20 nt, synthetic construct
  source 1..20: mol_type = other RNA
ttgatttcatggtctgacta

SEQ ID NO: 17759 - RNA, 20 nt, synthetic construct
  source 1..20: mol_type = other RNA
ttgcaaaaggtgtgagtttg

SEQ ID NO: 17760 - RNA, 20 nt, synthetic construct
  source 1..20: mol_type = other RNA
ttgcaaaatggaggaataaa

SEQ ID NO: 17761 - RNA, 20 nt, synthetic construct
  source 1..20: mol_type = other RNA
ttgcaaacacttggaatacc

SEQ ID NO: 17762 - RNA, 20 nt, synthetic construct
  source 1..20: mol_type = other RNA
ttgcaaattgctgctggaac

SEQ ID NO: 17763 - RNA, 20 nt, synthetic construct
  source 1..20: mol_type = other RNA
ttgcaacataagcctcataa

SEQ ID NO: 17764 - RNA, 20 nt, synthetic construct
  source 1..20: mol_type = other RNA
ttgcaagctcctggtggcag

SEQ ID NO: 17765 - RNA, 20 nt, synthetic construct
  source 1..20: mol_type = other RNA
ttgcagatgtgtaggtaagt

SEQ ID NO: 17766 - RNA, 20 nt, synthetic construct
  source 1..20: mol_type = other RNA
ttgcagctagtttactggca

SEQ ID NO: 17767 - RNA, 20 nt, synthetic construct
  source 1..20: mol_type = other RNA
ttgcaggaaacaagacccaa

SEQ ID NO: 17768 - RNA, 20 nt, synthetic construct
  source 1..20: mol_type = other RNA
ttgcaggtggattctcttgc

SEQ ID NO: 17769 - RNA, 20 nt, synthetic construct
  source 1..20: mol_type = other RNA
ttgcatcacatgcaatattt

SEQ ID NO: 17770 - RNA, 20 nt, synthetic construct
  source 1..20: mol_type = other RNA
ttgcatccaggttccacctt

SEQ ID NO: 17771 - RNA, 20 nt, synthetic construct
  source 1..20: mol_type = other RNA
ttgcatgcacttgatttcat

SEQ ID NO: 17772 - RNA, 20 nt, synthetic construct
  source 1..20: mol_type = other RNA
ttgcatggttatgtatcaag

SEQ ID NO: 17773 - RNA, 20 nt, synthetic construct
  source 1..20: mol_type = other RNA
ttgcatgtgatgcaagtttt

SEQ ID NO: 17774 - RNA, 20 nt, synthetic construct
  source 1..20: mol_type = other RNA
ttgccagacagaacctctgg

SEQ ID NO: 17775 - RNA, 20 nt, synthetic construct
  source 1..20: mol_type = other RNA
ttgccatagtcagatgcaca

SEQ ID NO: 17776 - RNA, 20 nt, synthetic construct
  source 1..20: mol_type = other RNA
ttgccctcaacatggttggt

SEQ ID NO: 17777 - RNA, 20 nt, synthetic construct
  source 1..20: mol_type = other RNA
ttgccttgggagccccccag

SEQ ID NO: 17778 - RNA, 20 nt, synthetic construct
  source 1..20: mol_type = other RNA
ttgcgcagcttgttgaccag

SEQ ID NO: 17779 - RNA, 20 nt, synthetic construct
  source 1..20: mol_type = other RNA
ttgcggtgcagaaaaccaca

SEQ ID NO: 17780 - RNA, 20 nt, synthetic construct
  source 1..20: mol_type = other RNA
ttgctcagcaaaggtacttg

SEQ ID NO: 17781 - RNA, 20 nt, synthetic construct
  source 1..20: mol_type = other RNA
ttgctccttgtctcgaccct

SEQ ID NO: 17782 - RNA, 20 nt, synthetic construct
  source 1..20: mol_type = other RNA
ttgctctttgtttctcatca

SEQ ID NO: 17783 - RNA, 20 nt, synthetic construct
  source 1..20: mol_type = other RNA
ttgctgagcaagttgcgcag

SEQ ID NO: 17784 - RNA, 20 nt, synthetic construct
  source 1..20: mol_type = other RNA
ttgctgatcattgttgcttt

SEQ ID NO: 17785 - RNA, 20 nt, synthetic construct
  source 1..20: mol_type = other RNA
ttgctgcacattatcacagc

SEQ ID NO: 17786 - RNA, 20 nt, synthetic construct
  source 1..20: mol_type = other RNA
ttgctgctctaaagctgggg

SEQ ID NO: 17787 - RNA, 20 nt, synthetic construct
  source 1..20: mol_type = other RNA
ttgctgctggaacctgaaca

SEQ ID NO: 17788 - RNA, 20 nt, synthetic construct
  source 1..20: mol_type = other RNA
ttgctgctgttcttgcttct

SEQ ID NO: 17789 - RNA, 20 nt, synthetic construct
  source 1..20: mol_type = other RNA
ttgctgctgttgctggtttt

SEQ ID NO: 17790 - RNA, 20 nt, synthetic construct
  source 1..20: mol_type = other RNA
ttgctggttttgagggagat

SEQ ID NO: 17791 - RNA, 20 nt, synthetic construct
  source 1..20: mol_type = other RNA
ttgctgtgtttgctgctgtt

SEQ ID NO: 17792 - RNA, 20 nt, synthetic construct
  source 1..20: mol_type = other RNA
ttgcttagttacctttttcc

SEQ ID NO: 17793 - RNA, 20 nt, synthetic construct
  source 1..20: mol_type = other RNA
ttgcttcggggccatccaca

SEQ ID NO: 17794 - RNA, 20 nt, synthetic construct
  source 1..20: mol_type = other RNA
ttgcttctgtaagagatgcc

SEQ ID NO: 17795 - RNA, 20 nt, synthetic construct
  source 1..20: mol_type = other RNA
ttgcttctgtgatttgagag

SEQ ID NO: 17796 - RNA, 20 nt, synthetic construct
  source 1..20: mol_type = other RNA
ttgcttctttctccccctcc

SEQ ID NO: 17797 - RNA, 20 nt, synthetic construct
  source 1..20: mol_type = other RNA
ttgcttgaagtaagcaccat

SEQ ID NO: 17798 - RNA, 20 nt, synthetic construct
  source 1..20: mol_type = other RNA
ttgctttgggatcacattat

SEQ ID NO: 17799 - RNA, 20 nt, synthetic construct
  source 1..20: mol_type = other RNA
ttgctttgggggtgaggaaa

SEQ ID NO: 17800 - RNA, 20 nt, synthetic construct
  source 1..20: mol_type = other RNA
ttggaaaatattgcatgtga

SEQ ID NO: 17801 - RNA, 20 nt, synthetic construct
  source 1..20: mol_type = other RNA
ttggaactggagatgttggt

SEQ ID NO: 17802 - RNA, 20 nt, synthetic construct
  source 1..20: mol_type = other RNA
ttggaaggtgactctataaa

SEQ ID NO: 17803 - RNA, 20 nt, synthetic construct
  source 1..20: mol_type = other RNA
ttggaataccctctactttc

SEQ ID NO: 17804 - RNA, 20 nt, synthetic construct
  source 1..20: mol_type = other RNA
ttggaatttccagtgtattg

SEQ ID NO: 17805 - RNA, 20 nt, synthetic construct
  source 1..20: mol_type = other RNA
ttggacattatgagtctcga

SEQ ID NO: 17806 - RNA, 20 nt, synthetic construct
  source 1..20: mol_type = other RNA
ttggagaagtgcacctggtg

SEQ ID NO: 17807 - RNA, 20 nt, synthetic construct
  source 1..20: mol_type = other RNA
ttggagagattgggttgata

SEQ ID NO: 17808 - RNA, 20 nt, synthetic construct
  source 1..20: mol_type = other RNA
ttggaggcagctcagagtta

SEQ ID NO: 17809 - RNA, 20 nt, synthetic construct
  source 1..20: mol_type = other RNA
ttggaggtcatttgattgga

SEQ ID NO: 17810 - RNA, 20 nt, synthetic construct
  source 1..20: mol_type = other RNA
ttggatacacctgtcaagac

SEQ ID NO: 17811 - RNA, 20 nt, synthetic construct
  source 1..20: mol_type = other RNA
ttggccagactaaagtggaa

SEQ ID NO: 17812 - RNA, 20 nt, synthetic construct
  source 1..20: mol_type = other RNA
ttggcctgtgcatctgacta

SEQ ID NO: 17813 - RNA, 20 nt, synthetic construct
  source 1..20: mol_type = other RNA
ttggcgtgaaactgcttcag

SEQ ID NO: 17814 - RNA, 20 nt, synthetic construct
  source 1..20: mol_type = other RNA
ttggcttaccccgaagttac

SEQ ID NO: 17815 - RNA, 20 nt, synthetic construct
  source 1..20: mol_type = other RNA
ttgggaatctgctctttgtt

SEQ ID NO: 17816 - RNA, 20 nt, synthetic construct
  source 1..20: mol_type = other RNA
ttgggactgcccttgattca

SEQ ID NO: 17817 - RNA, 20 nt, synthetic construct
  source 1..20: mol_type = other RNA
ttgggagccccccaggcatg

SEQ ID NO: 17818 - RNA, 20 nt, synthetic construct
  source 1..20: mol_type = other RNA
ttgggatcacattatttgga

SEQ ID NO: 17819 - RNA, 20 nt, synthetic construct
  source 1..20: mol_type = other RNA
ttgggctacagaactcacag

SEQ ID NO: 17820 - RNA, 20 nt, synthetic construct
  source 1..20: mol_type = other RNA
ttgggggcacaagatctcgt

SEQ ID NO: 17821 - RNA, 20 nt, synthetic construct
  source 1..20: mol_type = other RNA
ttgggggtgaggaaaagtct

SEQ ID NO: 17822 - RNA, 20 nt, synthetic construct
  source 1..20: mol_type = other RNA
ttggggtagtggtggtgttc

SEQ ID NO: 17823 - RNA, 20 nt, synthetic construct
  source 1..20: mol_type = other RNA
ttggggttgctgtgtttgct

SEQ ID NO: 17824 - RNA, 20 nt, synthetic construct
  source 1..20: mol_type = other RNA
ttgggtcttgtttcctgcaa

SEQ ID NO: 17825 - RNA, 20 nt, synthetic construct
  source 1..20: mol_type = other RNA
ttgggttgatactgaagaat

SEQ ID NO: 17826 - RNA, 20 nt, synthetic construct
  source 1..20: mol_type = other RNA
ttggtaaatggtctgttttg

SEQ ID NO: 17827 - RNA, 20 nt, synthetic construct
  source 1..20: mol_type = other RNA
ttggtacatttgtgacttgt

SEQ ID NO: 17828 - RNA, 20 nt, synthetic construct
  source 1..20: mol_type = other RNA
ttggtagcagtggagagcta

SEQ ID NO: 17829 - RNA, 20 nt, synthetic construct
  source 1..20: mol_type = other RNA
ttggtccactgtaccttggg

SEQ ID NO: 17830 - RNA, 20 nt, synthetic construct
  source 1..20: mol_type = other RNA
ttggtcttgtttcaatttct

SEQ ID NO: 17831 - RNA, 20 nt, synthetic construct
  source 1..20: mol_type = other RNA
ttggtcttgttttctcagaa

SEQ ID NO: 17832 - RNA, 20 nt, synthetic construct
  source 1..20: mol_type = other RNA
ttggtgaaaacgaggggcct

SEQ ID NO: 17833 - RNA, 20 nt, synthetic construct
  source 1..20: mol_type = other RNA
ttggtgggttatgcttgagg

SEQ ID NO: 17834 - RNA, 20 nt, synthetic construct
  source 1..20: mol_type = other RNA
ttggtgtctccatttacttc

SEQ ID NO: 17835 - RNA, 20 nt, synthetic construct
  source 1..20: mol_type = other RNA
ttggtgtcttttctgaagaa

SEQ ID NO: 17836 - RNA, 20 nt, synthetic construct
  source 1..20: mol_type = other RNA
ttggttctatcctgttccat

SEQ ID NO: 17837 - RNA, 20 nt, synthetic construct
  source 1..20: mol_type = other RNA
ttggttgactgctttcacct

SEQ ID NO: 17838 - RNA, 20 nt, synthetic construct
  source 1..20: mol_type = other RNA
ttggttggggtagtggtggt

SEQ ID NO: 17839 - RNA, 20 nt, synthetic construct
  source 1..20: mol_type = other RNA
ttggttggtgtcttttctga

SEQ ID NO: 17840 - RNA, 20 nt, synthetic construct
  source 1..20: mol_type = other RNA
ttgtaatttttgctgctgtt

SEQ ID NO: 17841 - RNA, 20 nt, synthetic construct
  source 1..20: mol_type = other RNA
ttgtagccagaggttctgtc

SEQ ID NO: 17842 - RNA, 20 nt, synthetic construct
  source 1..20: mol_type = other RNA
ttgtagttgttctggtttct

SEQ ID NO: 17843 - RNA, 20 nt, synthetic construct
  source 1..20: mol_type = other RNA
ttgtcatggtaattagcact

SEQ ID NO: 17844 - RNA, 20 nt, synthetic construct
  source 1..20: mol_type = other RNA
ttgtccctgcagtctgtatg

SEQ ID NO: 17845 - RNA, 20 nt, synthetic construct
  source 1..20: mol_type = other RNA
ttgtcctgtagctctccact

SEQ ID NO: 17846 - RNA, 20 nt, synthetic construct
  source 1..20: mol_type = other RNA
ttgtcctgtgagatcactca

SEQ ID NO: 17847 - RNA, 20 nt, synthetic construct
  source 1..20: mol_type = other RNA
ttgtctagtcaaaactgtga

SEQ ID NO: 17848 - RNA, 20 nt, synthetic construct
  source 1..20: mol_type = other RNA
ttgtctcgacccttcagaat

SEQ ID NO: 17849 - RNA, 20 nt, synthetic construct
  source 1..20: mol_type = other RNA
ttgtgacttctgctcctgtt

SEQ ID NO: 17850 - RNA, 20 nt, synthetic construct
  source 1..20: mol_type = other RNA
ttgtgacttgtgctccagct

SEQ ID NO: 17851 - RNA, 20 nt, synthetic construct
  source 1..20: mol_type = other RNA
ttgtgatggtggtggtggtg

SEQ ID NO: 17852 - RNA, 20 nt, synthetic construct
  source 1..20: mol_type = other RNA
ttgtgcccccaacacagcac

SEQ ID NO: 17853 - RNA, 20 nt, synthetic construct
  source 1..20: mol_type = other RNA
ttgtgctccagctgtgttgt

SEQ ID NO: 17854 - RNA, 20 nt, synthetic construct
  source 1..20: mol_type = other RNA
ttgtgctgcctgtttatgag

SEQ ID NO: 17855 - RNA, 20 nt, synthetic construct
  source 1..20: mol_type = other RNA
ttgtggatggccccgaagca

SEQ ID NO: 17856 - RNA, 20 nt, synthetic construct
  source 1..20: mol_type = other RNA
ttgtggttccctggatgtta

SEQ ID NO: 17857 - RNA, 20 nt, synthetic construct
  source 1..20: mol_type = other RNA
ttgtgtaaagtcaggactca

SEQ ID NO: 17858 - RNA, 20 nt, synthetic construct
  source 1..20: mol_type = other RNA
ttgtgtgaacaggaatgaca

SEQ ID NO: 17859 - RNA, 20 nt, synthetic construct
  source 1..20: mol_type = other RNA
ttgtgttactttggttgggg

SEQ ID NO: 17860 - RNA, 20 nt, synthetic construct
  source 1..20: mol_type = other RNA
ttgtgttctgagaaaacaag

SEQ ID NO: 17861 - RNA, 20 nt, synthetic construct
  source 1..20: mol_type = other RNA
ttgtgtttccattgcggtgc

SEQ ID NO: 17862 - RNA, 20 nt, synthetic construct
  source 1..20: mol_type = other RNA
ttgtgtttgtgctgcctgtt

SEQ ID NO: 17863 - RNA, 20 nt, synthetic construct
  source 1..20: mol_type = other RNA
ttgttcaaacaatacacacc

SEQ ID NO: 17864 - RNA, 20 nt, synthetic construct
  source 1..20: mol_type = other RNA
ttgttctggtttctgaaagg

SEQ ID NO: 17865 - RNA, 20 nt, synthetic construct
  source 1..20: mol_type = other RNA
ttgttgaaaatgaaatctag

SEQ ID NO: 17866 - RNA, 20 nt, synthetic construct
  source 1..20: mol_type = other RNA
ttgttgaccagacatatctt

SEQ ID NO: 17867 - RNA, 20 nt, synthetic construct
  source 1..20: mol_type = other RNA
ttgttgctttgggggtgagg

SEQ ID NO: 17868 - RNA, 20 nt, synthetic construct
  source 1..20: mol_type = other RNA
ttgttgtagttgttctggtt

SEQ ID NO: 17869 - RNA, 20 nt, synthetic construct
  source 1..20: mol_type = other RNA
ttgttgtgacttctgctcct

SEQ ID NO: 17870 - RNA, 20 nt, synthetic construct
  source 1..20: mol_type = other RNA
ttgttgttgtagttgttctg

SEQ ID NO: 17871 - RNA, 20 nt, synthetic construct
  source 1..20: mol_type = other RNA
ttgtttcaatttcttgatct

SEQ ID NO: 17872 - RNA, 20 nt, synthetic construct
  source 1..20: mol_type = other RNA
ttgtttcctgcaaaaagttc

SEQ ID NO: 17873 - RNA, 20 nt, synthetic construct
  source 1..20: mol_type = other RNA
ttgtttctcatcaactgctg

SEQ ID NO: 17874 - RNA, 20 nt, synthetic construct
  source 1..20: mol_type = other RNA
ttgtttgaacaagaaacctg

SEQ ID NO: 17875 - RNA, 20 nt, synthetic construct
  source 1..20: mol_type = other RNA
ttgtttgctgctctaaagct

SEQ ID NO: 17876 - RNA, 20 nt, synthetic construct
  source 1..20: mol_type = other RNA
ttgtttggaggtcatttgat

SEQ ID NO: 17877 - RNA, 20 nt, synthetic construct
  source 1..20: mol_type = other RNA
ttgttttaaataccgttcag

SEQ ID NO: 17878 - RNA, 20 nt, synthetic construct
  source 1..20: mol_type = other RNA
ttgttttctcagaacacaat

SEQ ID NO: 17879 - RNA, 20 nt, synthetic construct
  source 1..20: mol_type = other RNA
ttgttttctgggtgtaagct

SEQ ID NO: 17880 - RNA, 20 nt, synthetic construct
  source 1..20: mol_type = other RNA
ttgttttctggtggtgctgt

SEQ ID NO: 17881 - RNA, 20 nt, synthetic construct
  source 1..20: mol_type = other RNA
tttaaataccgttcagagct

SEQ ID NO: 17882 - RNA, 20 nt, synthetic construct
  source 1..20: mol_type = other RNA
tttaactgcattttcttggg

SEQ ID NO: 17883 - RNA, 20 nt, synthetic construct
  source 1..20: mol_type = other RNA
tttaagggaagtgaaaatag

SEQ ID NO: 17884 - RNA, 20 nt, synthetic construct
  source 1..20: mol_type = other RNA
tttacacaagaaagtagagg

SEQ ID NO: 17885 - RNA, 20 nt, synthetic construct
  source 1..20: mol_type = other RNA
tttaccaaaagctcatgtgc

SEQ ID NO: 17886 - RNA, 20 nt, synthetic construct
  source 1..20: mol_type = other RNA
tttaccctctattttcactt

SEQ ID NO: 17887 - RNA, 20 nt, synthetic construct
  source 1..20: mol_type = other RNA
tttactggcattatcagcat

SEQ ID NO: 17888 - RNA, 20 nt, synthetic construct
  source 1..20: mol_type = other RNA
tttacttctggatgagctct

SEQ ID NO: 17889 - RNA, 20 nt, synthetic construct
  source 1..20: mol_type = other RNA
tttacttgcttctgtgattt

SEQ ID NO: 17890 - RNA, 20 nt, synthetic construct
  source 1..20: mol_type = other RNA
tttagaagaacaccaccact

SEQ ID NO: 17891 - RNA, 20 nt, synthetic construct
  source 1..20: mol_type = other RNA
tttagagcagcaaacaactt

SEQ ID NO: 17892 - RNA, 20 nt, synthetic construct
  source 1..20: mol_type = other RNA
tttagatgggattccgcttg

SEQ ID NO: 17893 - RNA, 20 nt, synthetic construct
  source 1..20: mol_type = other RNA
tttagcattgcagctagttt

SEQ ID NO: 17894 - RNA, 20 nt, synthetic construct
  source 1..20: mol_type = other RNA
tttagtctggccaaagaatg

SEQ ID NO: 17895 - RNA, 20 nt, synthetic construct
  source 1..20: mol_type = other RNA
tttatagagtcaccttccaa

SEQ ID NO: 17896 - RNA, 20 nt, synthetic construct
  source 1..20: mol_type = other RNA
tttataggagtatctagtaa

SEQ ID NO: 17897 - RNA, 20 nt, synthetic construct
  source 1..20: mol_type = other RNA
tttatatccctgtagaactg

SEQ ID NO: 17898 - RNA, 20 nt, synthetic construct
  source 1..20: mol_type = other RNA
tttatattctgtacttcctc

SEQ ID NO: 17899 - RNA, 20 nt, synthetic construct
  source 1..20: mol_type = other RNA
tttatgaggcttatgttgca

SEQ ID NO: 17900 - RNA, 20 nt, synthetic construct
  source 1..20: mol_type = other RNA
tttatgtgagatgtggtttt

SEQ ID NO: 17901 - RNA, 20 nt, synthetic construct
  source 1..20: mol_type = other RNA
tttattcctccattttgcaa

SEQ ID NO: 17902 - RNA, 20 nt, synthetic construct
  source 1..20: mol_type = other RNA
tttattctctgaaactaggt

SEQ ID NO: 17903 - RNA, 20 nt, synthetic construct
  source 1..20: mol_type = other RNA
tttattggatacacctgtca

SEQ ID NO: 17904 - RNA, 20 nt, synthetic construct
  source 1..20: mol_type = other RNA
tttcaaactcacaccttttg

SEQ ID NO: 17905 - RNA, 20 nt, synthetic construct
  source 1..20: mol_type = other RNA
tttcaacaaagagcagattc

SEQ ID NO: 17906 - RNA, 20 nt, synthetic construct
  source 1..20: mol_type = other RNA
tttcaacacataactgcagt

SEQ ID NO: 17907 - RNA, 20 nt, synthetic construct
  source 1..20: mol_type = other RNA
tttcaacactggggacataa

SEQ ID NO: 17908 - RNA, 20 nt, synthetic construct
  source 1..20: mol_type = other RNA
tttcaacttggtacatttgt

SEQ ID NO: 17909 - RNA, 20 nt, synthetic construct
  source 1..20: mol_type = other RNA
tttcaacttttacttgcttc

SEQ ID NO: 17910 - RNA, 20 nt, synthetic construct
  source 1..20: mol_type = other RNA
tttcaagaacaggagcagaa

SEQ ID NO: 17911 - RNA, 20 nt, synthetic construct
  source 1..20: mol_type = other RNA
tttcaatttcttgatctgaa

SEQ ID NO: 17912 - RNA, 20 nt, synthetic construct
  source 1..20: mol_type = other RNA
tttcaccaagcggaatccca

SEQ ID NO: 17913 - RNA, 20 nt, synthetic construct
  source 1..20: mol_type = other RNA
tttcaccagtttttcaacac

SEQ ID NO: 17914 - RNA, 20 nt, synthetic construct
  source 1..20: mol_type = other RNA
tttcaccatgaaaacattct

SEQ ID NO: 17915 - RNA, 20 nt, synthetic construct
  source 1..20: mol_type = other RNA
tttcacctggatttctttct

SEQ ID NO: 17916 - RNA, 20 nt, synthetic construct
  source 1..20: mol_type = other RNA
tttcacgccaagtcgttatt

SEQ ID NO: 17917 - RNA, 20 nt, synthetic construct
  source 1..20: mol_type = other RNA
tttcacttcccttaaaagtg

SEQ ID NO: 17918 - RNA, 20 nt, synthetic construct
  source 1..20: mol_type = other RNA
tttcagaaaccagaacaact

SEQ ID NO: 17919 - RNA, 20 nt, synthetic construct
  source 1..20: mol_type = other RNA
tttcagaaagcatcggagaa

SEQ ID NO: 17920 - RNA, 20 nt, synthetic construct
  source 1..20: mol_type = other RNA
tttcagagaataaagaacag

SEQ ID NO: 17921 - RNA, 20 nt, synthetic construct
  source 1..20: mol_type = other RNA
tttcagatagtgctgtgttg

SEQ ID NO: 17922 - RNA, 20 nt, synthetic construct
  source 1..20: mol_type = other RNA
tttcaggcccactgcagtta

SEQ ID NO: 17923 - RNA, 20 nt, synthetic construct
  source 1..20: mol_type = other RNA
tttcagtttgggaatctgct

SEQ ID NO: 17924 - RNA, 20 nt, synthetic construct
  source 1..20: mol_type = other RNA
tttcatggtctgactataag

SEQ ID NO: 17925 - RNA, 20 nt, synthetic construct
  source 1..20: mol_type = other RNA
tttcatggtgaaaatcagta

SEQ ID NO: 17926 - RNA, 20 nt, synthetic construct
  source 1..20: mol_type = other RNA
tttcattttcaacaaagagc

SEQ ID NO: 17927 - RNA, 20 nt, synthetic construct
  source 1..20: mol_type = other RNA
tttccaaataatgtgatccc

SEQ ID NO: 17928 - RNA, 20 nt, synthetic construct
  source 1..20: mol_type = other RNA
tttccaggagttcaccatgt

SEQ ID NO: 17929 - RNA, 20 nt, synthetic construct
  source 1..20: mol_type = other RNA
tttccagtgtattgtttgga

SEQ ID NO: 17930 - RNA, 20 nt, synthetic construct
  source 1..20: mol_type = other RNA
tttccatgttttgttttctg

SEQ ID NO: 17931 - RNA, 20 nt, synthetic construct
  source 1..20: mol_type = other RNA
tttccattgcggtgcagaaa

SEQ ID NO: 17932 - RNA, 20 nt, synthetic construct
  source 1..20: mol_type = other RNA
tttcccatcttgcagatgtg

SEQ ID NO: 17933 - RNA, 20 nt, synthetic construct
  source 1..20: mol_type = other RNA
tttcccctcctgctcattca

SEQ ID NO: 17934 - RNA, 20 nt, synthetic construct
  source 1..20: mol_type = other RNA
tttcctcacccccaaagcaa

SEQ ID NO: 17935 - RNA, 20 nt, synthetic construct
  source 1..20: mol_type = other RNA
tttcctgcaaaaagttcagg

SEQ ID NO: 17936 - RNA, 20 nt, synthetic construct
  source 1..20: mol_type = other RNA
tttcctgtgcctgaccaggg

SEQ ID NO: 17937 - RNA, 20 nt, synthetic construct
  source 1..20: mol_type = other RNA
tttccttctgaaggaagctg

SEQ ID NO: 17938 - RNA, 20 nt, synthetic construct
  source 1..20: mol_type = other RNA
tttctacgatttatattctg

SEQ ID NO: 17939 - RNA, 20 nt, synthetic construct
  source 1..20: mol_type = other RNA
tttctatttttatatccctg

SEQ ID NO: 17940 - RNA, 20 nt, synthetic construct
  source 1..20: mol_type = other RNA
tttctcagaacacaatggaa

SEQ ID NO: 17941 - RNA, 20 nt, synthetic construct
  source 1..20: mol_type = other RNA
tttctcatcaactgctggca

SEQ ID NO: 17942 - RNA, 20 nt, synthetic construct
  source 1..20: mol_type = other RNA
tttctccattagccttttgg

SEQ ID NO: 17943 - RNA, 20 nt, synthetic construct
  source 1..20: mol_type = other RNA
tttctccccctcctcctctt

SEQ ID NO: 17944 - RNA, 20 nt, synthetic construct
  source 1..20: mol_type = other RNA
tttctgaaaggaacaggtat

SEQ ID NO: 17945 - RNA, 20 nt, synthetic construct
  source 1..20: mol_type = other RNA
tttctgaaaggcctcagaat

SEQ ID NO: 17946 - RNA, 20 nt, synthetic construct
  source 1..20: mol_type = other RNA
tttctgaagaagttgtttgc

SEQ ID NO: 17947 - RNA, 20 nt, synthetic construct
  source 1..20: mol_type = other RNA
tttctgcaccgcaatggaaa

SEQ ID NO: 17948 - RNA, 20 nt, synthetic construct
  source 1..20: mol_type = other RNA
tttctgcaggagatgggcat

SEQ ID NO: 17949 - RNA, 20 nt, synthetic construct
  source 1..20: mol_type = other RNA
tttctgccactaccacacca

SEQ ID NO: 17950 - RNA, 20 nt, synthetic construct
  source 1..20: mol_type = other RNA
tttctgcctcttccgtggaa

SEQ ID NO: 17951 - RNA, 20 nt, synthetic construct
  source 1..20: mol_type = other RNA
tttctggcacttacctacac

SEQ ID NO: 17952 - RNA, 20 nt, synthetic construct
  source 1..20: mol_type = other RNA
tttctgggtgtaagcttgcc

SEQ ID NO: 17953 - RNA, 20 nt, synthetic construct
  source 1..20: mol_type = other RNA
tttctggtggtgctgtgtgc

SEQ ID NO: 17954 - RNA, 20 nt, synthetic construct
  source 1..20: mol_type = other RNA
tttcttatcactcaaatcgg

SEQ ID NO: 17955 - RNA, 20 nt, synthetic construct
  source 1..20: mol_type = other RNA
tttcttgatctgaaggagcc

SEQ ID NO: 17956 - RNA, 20 nt, synthetic construct
  source 1..20: mol_type = other RNA
tttcttggcttaccccgaag

SEQ ID NO: 17957 - RNA, 20 nt, synthetic construct
  source 1..20: mol_type = other RNA
tttcttgggctacagaactc

SEQ ID NO: 17958 - RNA, 20 nt, synthetic construct
  source 1..20: mol_type = other RNA
tttcttgtgtaaagtcagga

SEQ ID NO: 17959 - RNA, 20 nt, synthetic construct
  source 1..20: mol_type = other RNA
tttcttgttcaaacaataca

SEQ ID NO: 17960 - RNA, 20 nt, synthetic construct
  source 1..20: mol_type = other RNA
tttctttcttggcttacccc

SEQ ID NO: 17961 - RNA, 20 nt, synthetic construct
  source 1..20: mol_type = other RNA
tttgaaaatggctcagtctc

SEQ ID NO: 17962 - RNA, 20 nt, synthetic construct
  source 1..20: mol_type = other RNA
tttgaaagagtgccacttgg

SEQ ID NO: 17963 - RNA, 20 nt, synthetic construct
  source 1..20: mol_type = other RNA
tttgaacaagaaacctgtat

SEQ ID NO: 17964 - RNA, 20 nt, synthetic construct
  source 1..20: mol_type = other RNA
tttgaatactgattttcacc

SEQ ID NO: 17965 - RNA, 20 nt, synthetic construct
  source 1..20: mol_type = other RNA
tttgaccataaggctcttac

SEQ ID NO: 17966 - RNA, 20 nt, synthetic construct
  source 1..20: mol_type = other RNA
tttgactagacaaaccactg

SEQ ID NO: 17967 - RNA, 20 nt, synthetic construct
  source 1..20: mol_type = other RNA
tttgagagtaagagccttat

SEQ ID NO: 17968 - RNA, 20 nt, synthetic construct
  source 1..20: mol_type = other RNA
tttgagatatgcccatctcc

SEQ ID NO: 17969 - RNA, 20 nt, synthetic construct
  source 1..20: mol_type = other RNA
tttgagggagatgtgaactc

SEQ ID NO: 17970 - RNA, 20 nt, synthetic construct
  source 1..20: mol_type = other RNA
tttgagtgataagaaagaat

SEQ ID NO: 17971 - RNA, 20 nt, synthetic construct
  source 1..20: mol_type = other RNA
tttgagtgtccttctgggga

SEQ ID NO: 17972 - RNA, 20 nt, synthetic construct
  source 1..20: mol_type = other RNA
tttgattggagagattgggt

SEQ ID NO: 17973 - RNA, 20 nt, synthetic construct
  source 1..20: mol_type = other RNA
tttgcaaaatggaggaataa

SEQ ID NO: 17974 - RNA, 20 nt, synthetic construct
  source 1..20: mol_type = other RNA
tttgcaaacacttggaatac

SEQ ID NO: 17975 - RNA, 20 nt, synthetic construct
  source 1..20: mol_type = other RNA
tttgcaacataagcctcata

SEQ ID NO: 17976 - RNA, 20 nt, synthetic construct
  source 1..20: mol_type = other RNA
tttgcaagctcctggtggca

SEQ ID NO: 17977 - RNA, 20 nt, synthetic construct
  source 1..20: mol_type = other RNA
tttgcaggaaacaagaccca

SEQ ID NO: 17978 - RNA, 20 nt, synthetic construct
  source 1..20: mol_type = other RNA
tttgcatgcacttgatttca

SEQ ID NO: 17979 - RNA, 20 nt, synthetic construct
  source 1..20: mol_type = other RNA
tttgcatggttatgtatcaa

SEQ ID NO: 17980 - RNA, 20 nt, synthetic construct
  source 1..20: mol_type = other RNA
tttgccagacagaacctctg

SEQ ID NO: 17981 - RNA, 20 nt, synthetic construct
  source 1..20: mol_type = other RNA
tttgctccttgtctcgaccc

SEQ ID NO: 17982 - RNA, 20 nt, synthetic construct
  source 1..20: mol_type = other RNA
tttgctgagcaagttgcgca

SEQ ID NO: 17983 - RNA, 20 nt, synthetic construct
  source 1..20: mol_type = other RNA
tttgctgatcattgttgctt

SEQ ID NO: 17984 - RNA, 20 nt, synthetic construct
  source 1..20: mol_type = other RNA
tttgctgcacattatcacag

SEQ ID NO: 17985 - RNA, 20 nt, synthetic construct
  source 1..20: mol_type = other RNA
tttgctgctctaaagctggg

SEQ ID NO: 17986 - RNA, 20 nt, synthetic construct
  source 1..20: mol_type = other RNA
tttgctgctgttcttgcttc

SEQ ID NO: 17987 - RNA, 20 nt, synthetic construct
  source 1..20: mol_type = other RNA
tttgctgctgttgctggttt

SEQ ID NO: 17988 - RNA, 20 nt, synthetic construct
  source 1..20: mol_type = other RNA
tttgcttgaagtaagcacca

SEQ ID NO: 17989 - RNA, 20 nt, synthetic construct
  source 1..20: mol_type = other RNA
tttggaaaatattgcatgtg

SEQ ID NO: 17990 - RNA, 20 nt, synthetic construct
  source 1..20: mol_type = other RNA
tttggaactggagatgttgg

SEQ ID NO: 17991 - RNA, 20 nt, synthetic construct
  source 1..20: mol_type = other RNA
tttggaaggtgactctataa

SEQ ID NO: 17992 - RNA, 20 nt, synthetic construct
  source 1..20: mol_type = other RNA
tttggacattatgagtctcg

SEQ ID NO: 17993 - RNA, 20 nt, synthetic construct
  source 1..20: mol_type = other RNA
tttggagaagtgcacctggt

SEQ ID NO: 17994 - RNA, 20 nt, synthetic construct
  source 1..20: mol_type = other RNA
tttggaggcagctcagagtt

SEQ ID NO: 17995 - RNA, 20 nt, synthetic construct
  source 1..20: mol_type = other RNA
tttggaggtcatttgattgg

SEQ ID NO: 17996 - RNA, 20 nt, synthetic construct
  source 1..20: mol_type = other RNA
tttggccagactaaagtgga

SEQ ID NO: 17997 - RNA, 20 nt, synthetic construct
  source 1..20: mol_type = other RNA
tttgggaatctgctctttgt

SEQ ID NO: 17998 - RNA, 20 nt, synthetic construct
  source 1..20: mol_type = other RNA
tttgggatcacattatttgg

SEQ ID NO: 17999 - RNA, 20 nt, synthetic construct
  source 1..20: mol_type = other RNA
tttgggggtgaggaaaagtc

SEQ ID NO: 18000 - RNA, 20 nt, synthetic construct
  source 1..20: mol_type = other RNA
tttggggttgctgtgtttgc

SEQ ID NO: 18001 - RNA, 20 nt, synthetic construct
  source 1..20: mol_type = other RNA
tttgggtcttgtttcctgca

SEQ ID NO: 18002 - RNA, 20 nt, synthetic construct
  source 1..20: mol_type = other RNA
tttggtaaatggtctgtttt

SEQ ID NO: 18003 - RNA, 20 nt, synthetic construct
  source 1..20: mol_type = other RNA
tttggtagcagtggagagct

SEQ ID NO: 18004 - RNA, 20 nt, synthetic construct
  source 1..20: mol_type = other RNA
tttggtcttgtttcaatttc

SEQ ID NO: 18005 - RNA, 20 nt, synthetic construct
  source 1..20: mol_type = other RNA
tttggttgactgctttcacc

SEQ ID NO: 18006 - RNA, 20 nt, synthetic construct
  source 1..20: mol_type = other RNA
tttggttggggtagtggtgg

SEQ ID NO: 18007 - RNA, 20 nt, synthetic construct
  source 1..20: mol_type = other RNA
tttggttggtgtcttttctg

SEQ ID NO: 18008 - RNA, 20 nt, synthetic construct
  source 1..20: mol_type = other RNA
tttgtaatttttgctgctgt

SEQ ID NO: 18009 - RNA, 20 nt, synthetic construct
  source 1..20: mol_type = other RNA
tttgtagccagaggttctgt

SEQ ID NO: 18010 - RNA, 20 nt, synthetic construct
  source 1..20: mol_type = other RNA
tttgtctagtcaaaactgtg

SEQ ID NO: 18011 - RNA, 20 nt, synthetic construct
  source 1..20: mol_type = other RNA
tttgtgacttgtgctccagc

SEQ ID NO: 18012 - RNA, 20 nt, synthetic construct
  source 1..20: mol_type = other RNA
tttgtgctgcctgtttatga

SEQ ID NO: 18013 - RNA, 20 nt, synthetic construct
  source 1..20: mol_type = other RNA
tttgtggttccctggatgtt

SEQ ID NO: 18014 - RNA, 20 nt, synthetic construct
  source 1..20: mol_type = other RNA
tttgttgttgtagttgttct

SEQ ID NO: 18015 - RNA, 20 nt, synthetic construct
  source 1..20: mol_type = other RNA
tttgtttctcatcaactgct

SEQ ID NO: 18016 - RNA, 20 nt, synthetic construct
  source 1..20: mol_type = other RNA
tttgttttaaataccgttca

SEQ ID NO: 18017 - RNA, 20 nt, synthetic construct
  source 1..20: mol_type = other RNA
tttgttttctggtggtgctg

SEQ ID NO: 18018 - RNA, 20 nt, synthetic construct
  source 1..20: mol_type = other RNA
ttttaaataccgttcagagc

SEQ ID NO: 18019 - RNA, 20 nt, synthetic construct
  source 1..20: mol_type = other RNA
ttttaagggaagtgaaaata

SEQ ID NO: 18020 - RNA, 20 nt, synthetic construct
  source 1..20: mol_type = other RNA
ttttacttgcttctgtgatt

SEQ ID NO: 18021 - RNA, 20 nt, synthetic construct
  source 1..20: mol_type = other RNA
ttttagaagaacaccaccac

SEQ ID NO: 18022 - RNA, 20 nt, synthetic construct
  source 1..20: mol_type = other RNA
ttttagatgggattccgctt

SEQ ID NO: 18023 - RNA, 20 nt, synthetic construct
  source 1..20: mol_type = other RNA
ttttatagagtcaccttcca

SEQ ID NO: 18024 - RNA, 20 nt, synthetic construct
  source 1..20: mol_type = other RNA
ttttataggagtatctagta

SEQ ID NO: 18025 - RNA, 20 nt, synthetic construct
  source 1..20: mol_type = other RNA
ttttatatccctgtagaact

SEQ ID NO: 18026 - RNA, 20 nt, synthetic construct
  source 1..20: mol_type = other RNA
ttttattcctccattttgca

SEQ ID NO: 18027 - RNA, 20 nt, synthetic construct
  source 1..20: mol_type = other RNA
ttttcaaactcacacctttt

SEQ ID NO: 18028 - RNA, 20 nt, synthetic construct
  source 1..20: mol_type = other RNA
ttttcaacaaagagcagatt

SEQ ID NO: 18029 - RNA, 20 nt, synthetic construct
  source 1..20: mol_type = other RNA
ttttcaacacataactgcag

SEQ ID NO: 18030 - RNA, 20 nt, synthetic construct
  source 1..20: mol_type = other RNA
ttttcaccaagcggaatccc

SEQ ID NO: 18031 - RNA, 20 nt, synthetic construct
  source 1..20: mol_type = other RNA
ttttcaccatgaaaacattc

SEQ ID NO: 18032 - RNA, 20 nt, synthetic construct
  source 1..20: mol_type = other RNA
ttttcacttcccttaaaagt

SEQ ID NO: 18033 - RNA, 20 nt, synthetic construct
  source 1..20: mol_type = other RNA
ttttcaggcccactgcagtt

SEQ ID NO: 18034 - RNA, 20 nt, synthetic construct
  source 1..20: mol_type = other RNA
ttttcagtttgggaatctgc

SEQ ID NO: 18035 - RNA, 20 nt, synthetic construct
  source 1..20: mol_type = other RNA
ttttcatggtgaaaatcagt

SEQ ID NO: 18036 - RNA, 20 nt, synthetic construct
  source 1..20: mol_type = other RNA
ttttccaaataatgtgatcc

SEQ ID NO: 18037 - RNA, 20 nt, synthetic construct
  source 1..20: mol_type = other RNA
ttttccaggagttcaccatg

SEQ ID NO: 18038 - RNA, 20 nt, synthetic construct
  source 1..20: mol_type = other RNA
ttttccatgttttgttttct

SEQ ID NO: 18039 - RNA, 20 nt, synthetic construct
  source 1..20: mol_type = other RNA
ttttcccctcctgctcattc

SEQ ID NO: 18040 - RNA, 20 nt, synthetic construct
  source 1..20: mol_type = other RNA
ttttcctcacccccaaagca

SEQ ID NO: 18041 - RNA, 20 nt, synthetic construct
  source 1..20: mol_type = other RNA
ttttcctgtgcctgaccagg

SEQ ID NO: 18042 - RNA, 20 nt, synthetic construct
  source 1..20: mol_type = other RNA
ttttccttctgaaggaagct

SEQ ID NO: 18043 - RNA, 20 nt, synthetic construct
  source 1..20: mol_type = other RNA
ttttctcagaacacaatgga

SEQ ID NO: 18044 - RNA, 20 nt, synthetic construct
  source 1..20: mol_type = other RNA
ttttctgaagaagttgtttg

SEQ ID NO: 18045 - RNA, 20 nt, synthetic construct
  source 1..20: mol_type = other RNA
ttttctgcaccgcaatggaa

SEQ ID NO: 18046 - RNA, 20 nt, synthetic construct
  source 1..20: mol_type = other RNA
ttttctgcaggagatgggca

SEQ ID NO: 18047 - RNA, 20 nt, synthetic construct
  source 1..20: mol_type = other RNA
ttttctgccactaccacacc

SEQ ID NO: 18048 - RNA, 20 nt, synthetic construct
  source 1..20: mol_type = other RNA
ttttctgggtgtaagcttgc

SEQ ID NO: 18049 - RNA, 20 nt, synthetic construct
  source 1..20: mol_type = other RNA
ttttctggtggtgctgtgtg

SEQ ID NO: 18050 - RNA, 20 nt, synthetic construct
  source 1..20: mol_type = other RNA
ttttcttgggctacagaact

SEQ ID NO: 18051 - RNA, 20 nt, synthetic construct
  source 1..20: mol_type = other RNA
ttttgaaagagtgccacttg

SEQ ID NO: 18052 - RNA, 20 nt, synthetic construct
  source 1..20: mol_type = other RNA
ttttgaatactgattttcac

SEQ ID NO: 18053 - RNA, 20 nt, synthetic construct
  source 1..20: mol_type = other RNA
ttttgactagacaaaccact

SEQ ID NO: 18054 - RNA, 20 nt, synthetic construct
  source 1..20: mol_type = other RNA
ttttgagatatgcccatctc

SEQ ID NO: 18055 - RNA, 20 nt, synthetic construct
  source 1..20: mol_type = other RNA
ttttgagggagatgtgaact

SEQ ID NO: 18056 - RNA, 20 nt, synthetic construct
  source 1..20: mol_type = other RNA
ttttgagtgtccttctgggg

SEQ ID NO: 18057 - RNA, 20 nt, synthetic construct
  source 1..20: mol_type = other RNA
ttttgcaaacacttggaata

SEQ ID NO: 18058 - RNA, 20 nt, synthetic construct
  source 1..20: mol_type = other RNA
ttttgcaacataagcctcat

SEQ ID NO: 18059 - RNA, 20 nt, synthetic construct
  source 1..20: mol_type = other RNA
ttttgcaggaaacaagaccc

SEQ ID NO: 18060 - RNA, 20 nt, synthetic construct
  source 1..20: mol_type = other RNA
ttttgcatgcacttgatttc

SEQ ID NO: 18061 - RNA, 20 nt, synthetic construct
  source 1..20: mol_type = other RNA
ttttgctgcacattatcaca

SEQ ID NO: 18062 - RNA, 20 nt, synthetic construct
  source 1..20: mol_type = other RNA
ttttgctgctgttgctggtt

SEQ ID NO: 18063 - RNA, 20 nt, synthetic construct
  source 1..20: mol_type = other RNA
ttttggaactggagatgttg

SEQ ID NO: 18064 - RNA, 20 nt, synthetic construct
  source 1..20: mol_type = other RNA
ttttggagaagtgcacctgg

SEQ ID NO: 18065 - RNA, 20 nt, synthetic construct
  source 1..20: mol_type = other RNA
ttttgggtcttgtttcctgc

SEQ ID NO: 18066 - RNA, 20 nt, synthetic construct
  source 1..20: mol_type = other RNA
ttttggtaaatggtctgttt

SEQ ID NO: 18067 - RNA, 20 nt, synthetic construct
  source 1..20: mol_type = other RNA
ttttggtagcagtggagagc

SEQ ID NO: 18068 - RNA, 20 nt, synthetic construct
  source 1..20: mol_type = other RNA
ttttggtcttgtttcaattt

SEQ ID NO: 18069 - RNA, 20 nt, synthetic construct
  source 1..20: mol_type = other RNA
ttttggttggtgtcttttct

SEQ ID NO: 18070 - RNA, 20 nt, synthetic construct
  source 1..20: mol_type = other RNA
ttttgttgttgtagttgttc

SEQ ID NO: 18071 - RNA, 20 nt, synthetic construct
  source 1..20: mol_type = other RNA
ttttgttttaaataccgttc

SEQ ID NO: 18072 - RNA, 20 nt, synthetic construct
  source 1..20: mol_type = other RNA
ttttgttttctggtggtgct

SEQ ID NO: 18073 - RNA, 20 nt, synthetic construct
  source 1..20: mol_type = other RNA
tttttataggagtatctagt

SEQ ID NO: 18074 - RNA, 20 nt, synthetic construct
  source 1..20: mol_type = other RNA
tttttatatccctgtagaac

SEQ ID NO: 18075 - RNA, 20 nt, synthetic construct
  source 1..20: mol_type = other RNA
tttttcaacacataactgca

SEQ ID NO: 18076 - RNA, 20 nt, synthetic construct
  source 1..20: mol_type = other RNA
tttttcagtttgggaatctg

SEQ ID NO: 18077 - RNA, 20 nt, synthetic construct
  source 1..20: mol_type = other RNA
tttttccaggagttcaccat

SEQ ID NO: 18078 - RNA, 20 nt, synthetic construct
  source 1..20: mol_type = other RNA
tttttccatgttttgttttc

SEQ ID NO: 18079 - RNA, 20 nt, synthetic construct
  source 1..20: mol_type = other RNA
tttttcctgtgcctgaccag

SEQ ID NO: 18080 - RNA, 20 nt, synthetic construct
  source 1..20: mol_type = other RNA
tttttccttctgaaggaagc

SEQ ID NO: 18081 - RNA, 20 nt, synthetic construct
  source 1..20: mol_type = other RNA
tttttgagatatgcccatct

SEQ ID NO: 18082 - RNA, 20 nt, synthetic construct
  source 1..20: mol_type = other RNA
tttttgcaggaaacaagacc

SEQ ID NO: 18083 - RNA, 20 nt, synthetic construct
  source 1..20: mol_type = other RNA
tttttgctgctgttgctggt

SEQ ID NO: 18084 - RNA, 20 nt, synthetic construct
  source 1..20: mol_type = other RNA
tttttggaactggagatgtt

SEQ ID NO: 18085 - RNA, 20 nt, synthetic construct
  source 1..20: mol_type = other RNA
tttttggtagcagtggagag

SEQ ID NO: 18086 - RNA, 20 nt, synthetic construct
  source 1..20: mol_type = other RNA
tttttgttgttgtagttgtt

SEQ ID NO: 18087 - RNA, 20 nt, synthetic construct
  source 1..20: mol_type = other RNA
ttttttataggagtatctag

SEQ ID NO: 18088 - RNA, 20 nt, synthetic construct
  source 1..20: mol_type = other RNA
ttttttccaggagttcacca

SEQ ID NO: 18089 - RNA, 21 nt, synthetic construct
  source 1..21: mol_type = other RNA
aaaaacaaggcagtgctaatg

SEQ ID NO: 18090 - RNA, 21 nt, synthetic construct
  source 1..21: mol_type = other RNA
aaaaacatttgcatggttatg

SEQ ID NO: 18091 - RNA, 21 nt, synthetic construct
  source 1..21: mol_type = other RNA
aaaaaccctcacaccaggtgc

SEQ ID NO: 18092 - RNA, 21 nt, synthetic construct
  source 1..21: mol_type = other RNA
aaaaacttatgtccccagtgt

SEQ ID NO: 18093 - RNA, 21 nt, synthetic construct
  source 1..21: mol_type = other RNA
aaaaagcactctgaatggtgg

SEQ ID NO: 18094 - RNA, 21 nt, synthetic construct
  source 1..21: mol_type = other RNA
aaaaaggtaactaagcaagag

SEQ ID NO: 18095 - RNA, 21 nt, synthetic construct
  source 1..21: mol_type = other RNA
aaaaagttcaggatgtgtagt

SEQ ID NO: 18096 - RNA, 21 nt, synthetic construct
  source 1..21: mol_type = other RNA
aaaaattggtgggttatgctt

SEQ ID NO: 18097 - RNA, 21 nt, synthetic construct
  source 1..21: mol_type = other RNA
aaaacaaaacatggaaaaagg

SEQ ID NO: 18098 - RNA, 21 nt, synthetic construct
  source 1..21: mol_type = other RNA
aaaacaacacagctggagcac

SEQ ID NO: 18099 - RNA, 21 nt, synthetic construct
  source 1..21: mol_type = other RNA
aaaacaagaccaatgtcagaa

SEQ ID NO: 18100 - RNA, 21 nt, synthetic construct
  source 1..21: mol_type = other RNA
aaaacaaggcagtgctaatgc

SEQ ID NO: 18101 - RNA, 21 nt, synthetic construct
  source 1..21: mol_type = other RNA
aaaacagaccatttaccaaaa

SEQ ID NO: 18102 - RNA, 21 nt, synthetic construct
  source 1..21: mol_type = other RNA
aaaacatggaaaaaggtaact

SEQ ID NO: 18103 - RNA, 21 nt, synthetic construct
  source 1..21: mol_type = other RNA
aaaacattcttccactttagt

SEQ ID NO: 18104 - RNA, 21 nt, synthetic construct
  source 1..21: mol_type = other RNA
aaaacatttgcatggttatgt

SEQ ID NO: 18105 - RNA, 21 nt, synthetic construct
  source 1..21: mol_type = other RNA
aaaaccacatctcacataaat

SEQ ID NO: 18106 - RNA, 21 nt, synthetic construct
  source 1..21: mol_type = other RNA
aaaaccagcaacagcagcaaa

SEQ ID NO: 18107 - RNA, 21 nt, synthetic construct
  source 1..21: mol_type = other RNA
aaaaccctcacaccaggtgca

SEQ ID NO: 18108 - RNA, 21 nt, synthetic construct
  source 1..21: mol_type = other RNA
aaaacgaggggccttcaattc

SEQ ID NO: 18109 - RNA, 21 nt, synthetic construct
  source 1..21: mol_type = other RNA
aaaacgcacagttagtgaacc

SEQ ID NO: 18110 - RNA, 21 nt, synthetic construct
  source 1..21: mol_type = other RNA
aaaacgtaatgaggcatcact

SEQ ID NO: 18111 - RNA, 21 nt, synthetic construct
  source 1..21: mol_type = other RNA
aaaactccaccattcagagtg

SEQ ID NO: 18112 - RNA, 21 nt, synthetic construct
  source 1..21: mol_type = other RNA
aaaactggtgaaatctttaac

SEQ ID NO: 18113 - RNA, 21 nt, synthetic construct
  source 1..21: mol_type = other RNA
aaaactgtgactggccctgac

SEQ ID NO: 18114 - RNA, 21 nt, synthetic construct
  source 1..21: mol_type = other RNA
aaaacttatgtccccagtgtt

SEQ ID NO: 18115 - RNA, 21 nt, synthetic construct
  source 1..21: mol_type = other RNA
aaaacttgcatcacatgcaat

SEQ ID NO: 18116 - RNA, 21 nt, synthetic construct
  source 1..21: mol_type = other RNA
aaaagaacagctgcttctgtt

SEQ ID NO: 18117 - RNA, 21 nt, synthetic construct
  source 1..21: mol_type = other RNA
aaaagacaccaaccaaaagaa

SEQ ID NO: 18118 - RNA, 21 nt, synthetic construct
  source 1..21: mol_type = other RNA
aaaagagcatcattgagacca

SEQ ID NO: 18119 - RNA, 21 nt, synthetic construct
  source 1..21: mol_type = other RNA
aaaagcactctgaatggtgga

SEQ ID NO: 18120 - RNA, 21 nt, synthetic construct
  source 1..21: mol_type = other RNA
aaaagcatgctgctctaaggt

SEQ ID NO: 18121 - RNA, 21 nt, synthetic construct
  source 1..21: mol_type = other RNA
aaaagctcatgtgcagtcact

SEQ ID NO: 18122 - RNA, 21 nt, synthetic construct
  source 1..21: mol_type = other RNA
aaaaggaatccttagtgaaca

SEQ ID NO: 18123 - RNA, 21 nt, synthetic construct
  source 1..21: mol_type = other RNA
aaaaggctaatggagaaagac

SEQ ID NO: 18124 - RNA, 21 nt, synthetic construct
  source 1..21: mol_type = other RNA
aaaaggtaactaagcaagaga

SEQ ID NO: 18125 - RNA, 21 nt, synthetic construct
  source 1..21: mol_type = other RNA
aaaaggtgtgagtttgaaaat

SEQ ID NO: 18126 - RNA, 21 nt, synthetic construct
  source 1..21: mol_type = other RNA
aaaagtctggagtatttcctc

SEQ ID NO: 18127 - RNA, 21 nt, synthetic construct
  source 1..21: mol_type = other RNA
aaaagtgctaattaccatgac

SEQ ID NO: 18128 - RNA, 21 nt, synthetic construct
  source 1..21: mol_type = other RNA
aaaagtgttgtgttactttgg

SEQ ID NO: 18129 - RNA, 21 nt, synthetic construct
  source 1..21: mol_type = other RNA
aaaagttattatggaataccc

SEQ ID NO: 18130 - RNA, 21 nt, synthetic construct
  source 1..21: mol_type = other RNA
aaaagttcaggatgtgtagtc

SEQ ID NO: 18131 - RNA, 21 nt, synthetic construct
  source 1..21: mol_type = other RNA
aaaagttgaaatgtcagggcc

SEQ ID NO: 18132 - RNA, 21 nt, synthetic construct
  source 1..21: mol_type = other RNA
aaaataacatccagggaacca

SEQ ID NO: 18133 - RNA, 21 nt, synthetic construct
  source 1..21: mol_type = other RNA
aaaatacaggtttcttgttca

SEQ ID NO: 18134 - RNA, 21 nt, synthetic construct
  source 1..21: mol_type = other RNA
aaaatagagggtaaacctgag

SEQ ID NO: 18135 - RNA, 21 nt, synthetic construct
  source 1..21: mol_type = other RNA
aaaatattgcatgtgatgcaa

SEQ ID NO: 18136 - RNA, 21 nt, synthetic construct
  source 1..21: mol_type = other RNA
aaaatcaagcgagttcgagac

SEQ ID NO: 18137 - RNA, 21 nt, synthetic construct
  source 1..21: mol_type = other RNA
aaaatccagagcttcagattc

SEQ ID NO: 18138 - RNA, 21 nt, synthetic construct
  source 1..21: mol_type = other RNA
aaaatgaaatctagtgccaca

SEQ ID NO: 18139 - RNA, 21 nt, synthetic construct
  source 1..21: mol_type = other RNA
aaaatgaaatgaatggtgctt

SEQ ID NO: 18140 - RNA, 21 nt, synthetic construct
  source 1..21: mol_type = other RNA
aaaatggaggaataaaacgca

SEQ ID NO: 18141 - RNA, 21 nt, synthetic construct
  source 1..21: mol_type = other RNA
aaaatggctcagtctctgaag

SEQ ID NO: 18142 - RNA, 21 nt, synthetic construct
  source 1..21: mol_type = other RNA
aaaattattgagaacagaagc

SEQ ID NO: 18143 - RNA, 21 nt, synthetic construct
  source 1..21: mol_type = other RNA
aaaattggtgggttatgcttg

SEQ ID NO: 18144 - RNA, 21 nt, synthetic construct
  source 1..21: mol_type = other RNA
aaaatttattggatacacctg

SEQ ID NO: 18145 - RNA, 21 nt, synthetic construct
  source 1..21: mol_type = other RNA
aaacaaaacatggaaaaaggt

SEQ ID NO: 18146 - RNA, 21 nt, synthetic construct
  source 1..21: mol_type = other RNA
aaacaaagagcaagagattct

SEQ ID NO: 18147 - RNA, 21 nt, synthetic construct
  source 1..21: mol_type = other RNA
aaacaacacagctggagcaca

SEQ ID NO: 18148 - RNA, 21 nt, synthetic construct
  source 1..21: mol_type = other RNA
aaacaacttcttcagaaaaga

SEQ ID NO: 18149 - RNA, 21 nt, synthetic construct
  source 1..21: mol_type = other RNA
aaacaagaccaaaaggctaat

SEQ ID NO: 18150 - RNA, 21 nt, synthetic construct
  source 1..21: mol_type = other RNA
aaacaagaccaatgtcagaac

SEQ ID NO: 18151 - RNA, 21 nt, synthetic construct
  source 1..21: mol_type = other RNA
aaacaagacccaaaacttgca

SEQ ID NO: 18152 - RNA, 21 nt, synthetic construct
  source 1..21: mol_type = other RNA
aaacaaggcagtgctaatgcc

SEQ ID NO: 18153 - RNA, 21 nt, synthetic construct
  source 1..21: mol_type = other RNA
aaacaatacacacctagtttc

SEQ ID NO: 18154 - RNA, 21 nt, synthetic construct
  source 1..21: mol_type = other RNA
aaacaatacactggaaattcc

SEQ ID NO: 18155 - RNA, 21 nt, synthetic construct
  source 1..21: mol_type = other RNA
aaacacaaccatcccagagtt

SEQ ID NO: 18156 - RNA, 21 nt, synthetic construct
  source 1..21: mol_type = other RNA
aaacacagcaaccccaaactg

SEQ ID NO: 18157 - RNA, 21 nt, synthetic construct
  source 1..21: mol_type = other RNA
aaacacgagatcttgtgcccc

SEQ ID NO: 18158 - RNA, 21 nt, synthetic construct
  source 1..21: mol_type = other RNA
aaacactgtctcaatattatc

SEQ ID NO: 18159 - RNA, 21 nt, synthetic construct
  source 1..21: mol_type = other RNA
aaacacttggaataccctcta

SEQ ID NO: 18160 - RNA, 21 nt, synthetic construct
  source 1..21: mol_type = other RNA
aaacagaccatttaccaaaag

SEQ ID NO: 18161 - RNA, 21 nt, synthetic construct
  source 1..21: mol_type = other RNA
aaacagcacttgaatcaacag

SEQ ID NO: 18162 - RNA, 21 nt, synthetic construct
  source 1..21: mol_type = other RNA
aaacaggcagcacaaacacaa

SEQ ID NO: 18163 - RNA, 21 nt, synthetic construct
  source 1..21: mol_type = other RNA
aaacatggaaaaaggtaacta

SEQ ID NO: 18164 - RNA, 21 nt, synthetic construct
  source 1..21: mol_type = other RNA
aaacattcttccactttagtc

SEQ ID NO: 18165 - RNA, 21 nt, synthetic construct
  source 1..21: mol_type = other RNA
aaacatttgcatggttatgta

SEQ ID NO: 18166 - RNA, 21 nt, synthetic construct
  source 1..21: mol_type = other RNA
aaaccaagatatgtctggtca

SEQ ID NO: 18167 - RNA, 21 nt, synthetic construct
  source 1..21: mol_type = other RNA
aaaccacatctcacataaatg

SEQ ID NO: 18168 - RNA, 21 nt, synthetic construct
  source 1..21: mol_type = other RNA
aaaccactgctgcagaacttg

SEQ ID NO: 18169 - RNA, 21 nt, synthetic construct
  source 1..21: mol_type = other RNA
aaaccagaacaactacaacaa

SEQ ID NO: 18170 - RNA, 21 nt, synthetic construct
  source 1..21: mol_type = other RNA
aaaccagcaacagcagcaaaa

SEQ ID NO: 18171 - RNA, 21 nt, synthetic construct
  source 1..21: mol_type = other RNA
aaaccaggatggattgaattg

SEQ ID NO: 18172 - RNA, 21 nt, synthetic construct
  source 1..21: mol_type = other RNA
aaaccctcacaccaggtgcac

SEQ ID NO: 18173 - RNA, 21 nt, synthetic construct
  source 1..21: mol_type = other RNA
aaacctgaggcaccaccttcc

SEQ ID NO: 18174 - RNA, 21 nt, synthetic construct
  source 1..21: mol_type = other RNA
aaacctgtattttgcatgcac

SEQ ID NO: 18175 - RNA, 21 nt, synthetic construct
  source 1..21: mol_type = other RNA
aaacgaggggccttcaattca

SEQ ID NO: 18176 - RNA, 21 nt, synthetic construct
  source 1..21: mol_type = other RNA
aaacgcacagttagtgaacct

SEQ ID NO: 18177 - RNA, 21 nt, synthetic construct
  source 1..21: mol_type = other RNA
aaacgccatgtgtctcagtac

SEQ ID NO: 18178 - RNA, 21 nt, synthetic construct
  source 1..21: mol_type = other RNA
aaacgtaatgaggcatcactg

SEQ ID NO: 18179 - RNA, 21 nt, synthetic construct
  source 1..21: mol_type = other RNA
aaactagctgcaatgctaaat

SEQ ID NO: 18180 - RNA, 21 nt, synthetic construct
  source 1..21: mol_type = other RNA
aaactaggtgtgtattgtttg

SEQ ID NO: 18181 - RNA, 21 nt, synthetic construct
  source 1..21: mol_type = other RNA
aaactcacaccttttgcaaca

SEQ ID NO: 18182 - RNA, 21 nt, synthetic construct
  source 1..21: mol_type = other RNA
aaactccaccattcagagtgc

SEQ ID NO: 18183 - RNA, 21 nt, synthetic construct
  source 1..21: mol_type = other RNA
aaactgaaaaacttatgtccc

SEQ ID NO: 18184 - RNA, 21 nt, synthetic construct
  source 1..21: mol_type = other RNA
aaactgagtcttgccatagtc

SEQ ID NO: 18185 - RNA, 21 nt, synthetic construct
  source 1..21: mol_type = other RNA
aaactgcttcagatgctgctc

SEQ ID NO: 18186 - RNA, 21 nt, synthetic construct
  source 1..21: mol_type = other RNA
aaactggtgaaatctttaact

SEQ ID NO: 18187 - RNA, 21 nt, synthetic construct
  source 1..21: mol_type = other RNA
aaactgtagcaccattaggca

SEQ ID NO: 18188 - RNA, 21 nt, synthetic construct
  source 1..21: mol_type = other RNA
aaactgtgactggccctgaca

SEQ ID NO: 18189 - RNA, 21 nt, synthetic construct
  source 1..21: mol_type = other RNA
aaacttatgtccccagtgttg

SEQ ID NO: 18190 - RNA, 21 nt, synthetic construct
  source 1..21: mol_type = other RNA
aaacttgcatcacatgcaata

SEQ ID NO: 18191 - RNA, 21 nt, synthetic construct
  source 1..21: mol_type = other RNA
aaagaaatccaggtgaaagca

SEQ ID NO: 18192 - RNA, 21 nt, synthetic construct
  source 1..21: mol_type = other RNA
aaagaacagactacacatcct

SEQ ID NO: 18193 - RNA, 21 nt, synthetic construct
  source 1..21: mol_type = other RNA
aaagaacagctgcttctgttc

SEQ ID NO: 18194 - RNA, 21 nt, synthetic construct
  source 1..21: mol_type = other RNA
aaagaagcaattgtgatggtg

SEQ ID NO: 18195 - RNA, 21 nt, synthetic construct
  source 1..21: mol_type = other RNA
aaagaatctgtgagttctgta

SEQ ID NO: 18196 - RNA, 21 nt, synthetic construct
  source 1..21: mol_type = other RNA
aaagaatgatccttctctttg

SEQ ID NO: 18197 - RNA, 21 nt, synthetic construct
  source 1..21: mol_type = other RNA
aaagacaccaaccaaaagaac

SEQ ID NO: 18198 - RNA, 21 nt, synthetic construct
  source 1..21: mol_type = other RNA
aaagacgtaacttcggggtaa

SEQ ID NO: 18199 - RNA, 21 nt, synthetic construct
  source 1..21: mol_type = other RNA
aaagagaaggatcattctttg

SEQ ID NO: 18200 - RNA, 21 nt, synthetic construct
  source 1..21: mol_type = other RNA
aaagagcaagagattctgaag

SEQ ID NO: 18201 - RNA, 21 nt, synthetic construct
  source 1..21: mol_type = other RNA
aaagagcagattcccaaactg

SEQ ID NO: 18202 - RNA, 21 nt, synthetic construct
  source 1..21: mol_type = other RNA
aaagagcatcattgagaccat

SEQ ID NO: 18203 - RNA, 21 nt, synthetic construct
  source 1..21: mol_type = other RNA
aaagaggaaatactccagact

SEQ ID NO: 18204 - RNA, 21 nt, synthetic construct
  source 1..21: mol_type = other RNA
aaagagtgccacttggtgtct

SEQ ID NO: 18205 - RNA, 21 nt, synthetic construct
  source 1..21: mol_type = other RNA
aaagatttcaccagtttttca

SEQ ID NO: 18206 - RNA, 21 nt, synthetic construct
  source 1..21: mol_type = other RNA
aaagcaacaatgatcagcaaa

SEQ ID NO: 18207 - RNA, 21 nt, synthetic construct
  source 1..21: mol_type = other RNA
aaagcaagatcttcttcacag

SEQ ID NO: 18208 - RNA, 21 nt, synthetic construct
  source 1..21: mol_type = other RNA
aaagcacctgtgaagaagatc

SEQ ID NO: 18209 - RNA, 21 nt, synthetic construct
  source 1..21: mol_type = other RNA
aaagcactctgaatggtggag

SEQ ID NO: 18210 - RNA, 21 nt, synthetic construct
  source 1..21: mol_type = other RNA
aaagcagtcaaccaaatgtct

SEQ ID NO: 18211 - RNA, 21 nt, synthetic construct
  source 1..21: mol_type = other RNA
aaagcatcggagaagggctgc

SEQ ID NO: 18212 - RNA, 21 nt, synthetic construct
  source 1..21: mol_type = other RNA
aaagcatgctgctctaaggtg

SEQ ID NO: 18213 - RNA, 21 nt, synthetic construct
  source 1..21: mol_type = other RNA
aaagccagctgcagtggtgag

SEQ ID NO: 18214 - RNA, 21 nt, synthetic construct
  source 1..21: mol_type = other RNA
aaagctagcgtctggtgaaga

SEQ ID NO: 18215 - RNA, 21 nt, synthetic construct
  source 1..21: mol_type = other RNA
aaagctcagtgttcactaagg

SEQ ID NO: 18216 - RNA, 21 nt, synthetic construct
  source 1..21: mol_type = other RNA
aaagctcatgtgcagtcactg

SEQ ID NO: 18217 - RNA, 21 nt, synthetic construct
  source 1..21: mol_type = other RNA
aaagctccagaatggaagccc

SEQ ID NO: 18218 - RNA, 21 nt, synthetic construct
  source 1..21: mol_type = other RNA
aaagctggggtgtggctatca

SEQ ID NO: 18219 - RNA, 21 nt, synthetic construct
  source 1..21: mol_type = other RNA
aaaggaacaggtatttagcat

SEQ ID NO: 18220 - RNA, 21 nt, synthetic construct
  source 1..21: mol_type = other RNA
aaaggaatccttagtgaacac

SEQ ID NO: 18221 - RNA, 21 nt, synthetic construct
  source 1..21: mol_type = other RNA
aaaggcctcagaataattgtg

SEQ ID NO: 18222 - RNA, 21 nt, synthetic construct
  source 1..21: mol_type = other RNA
aaaggctaatggagaaagacg

SEQ ID NO: 18223 - RNA, 21 nt, synthetic construct
  source 1..21: mol_type = other RNA
aaaggtaactaagcaagagaa

SEQ ID NO: 18224 - RNA, 21 nt, synthetic construct
  source 1..21: mol_type = other RNA
aaaggtacttgatacataacc

SEQ ID NO: 18225 - RNA, 21 nt, synthetic construct
  source 1..21: mol_type = other RNA
aaaggtgtgagtttgaaaatg

SEQ ID NO: 18226 - RNA, 21 nt, synthetic construct
  source 1..21: mol_type = other RNA
aaagtagagggtattccaagt

SEQ ID NO: 18227 - RNA, 21 nt, synthetic construct
  source 1..21: mol_type = other RNA
aaagtcaggactcacacgact

SEQ ID NO: 18228 - RNA, 21 nt, synthetic construct
  source 1..21: mol_type = other RNA
aaagtctggagtatttcctct

SEQ ID NO: 18229 - RNA, 21 nt, synthetic construct
  source 1..21: mol_type = other RNA
aaagtgctaattaccatgaca

SEQ ID NO: 18230 - RNA, 21 nt, synthetic construct
  source 1..21: mol_type = other RNA
aaagtggaagaatgttttcat

SEQ ID NO: 18231 - RNA, 21 nt, synthetic construct
  source 1..21: mol_type = other RNA
aaagtgttgtgttactttggt

SEQ ID NO: 18232 - RNA, 21 nt, synthetic construct
  source 1..21: mol_type = other RNA
aaagttattatggaataccct

SEQ ID NO: 18233 - RNA, 21 nt, synthetic construct
  source 1..21: mol_type = other RNA
aaagttcaggatgtgtagtct

SEQ ID NO: 18234 - RNA, 21 nt, synthetic construct
  source 1..21: mol_type = other RNA
aaagttgaaatgtcagggcca

SEQ ID NO: 18235 - RNA, 21 nt, synthetic construct
  source 1..21: mol_type = other RNA
aaataacatccagggaaccac

SEQ ID NO: 18236 - RNA, 21 nt, synthetic construct
  source 1..21: mol_type = other RNA
aaataacgacttggcgtgaaa

SEQ ID NO: 18237 - RNA, 21 nt, synthetic construct
  source 1..21: mol_type = other RNA
aaataatgtgatcccaaagca

SEQ ID NO: 18238 - RNA, 21 nt, synthetic construct
  source 1..21: mol_type = other RNA
aaatacaggtttcttgttcaa

SEQ ID NO: 18239 - RNA, 21 nt, synthetic construct
  source 1..21: mol_type = other RNA
aaataccgttcagagctgcca

SEQ ID NO: 18240 - RNA, 21 nt, synthetic construct
  source 1..21: mol_type = other RNA
aaatacctgttcctttcagaa

SEQ ID NO: 18241 - RNA, 21 nt, synthetic construct
  source 1..21: mol_type = other RNA
aaatactccagacttttcctc

SEQ ID NO: 18242 - RNA, 21 nt, synthetic construct
  source 1..21: mol_type = other RNA
aaatagaaaccaagatatgtc

SEQ ID NO: 18243 - RNA, 21 nt, synthetic construct
  source 1..21: mol_type = other RNA
aaatagagggtaaacctgagg

SEQ ID NO: 18244 - RNA, 21 nt, synthetic construct
  source 1..21: mol_type = other RNA
aaatattgcatgtgatgcaag

SEQ ID NO: 18245 - RNA, 21 nt, synthetic construct
  source 1..21: mol_type = other RNA
aaatcaagcgagttcgagact

SEQ ID NO: 18246 - RNA, 21 nt, synthetic construct
  source 1..21: mol_type = other RNA
aaatcaagtgcatgcaaaata

SEQ ID NO: 18247 - RNA, 21 nt, synthetic construct
  source 1..21: mol_type = other RNA
aaatcacagaagcaagtaaaa

SEQ ID NO: 18248 - RNA, 21 nt, synthetic construct
  source 1..21: mol_type = other RNA
aaatcagtttttgagatatgc

SEQ ID NO: 18249 - RNA, 21 nt, synthetic construct
  source 1..21: mol_type = other RNA
aaatcatattgagtcttgaca

SEQ ID NO: 18250 - RNA, 21 nt, synthetic construct
  source 1..21: mol_type = other RNA
aaatccagagcttcagattct

SEQ ID NO: 18251 - RNA, 21 nt, synthetic construct
  source 1..21: mol_type = other RNA
aaatccaggtgaaagcagtca

SEQ ID NO: 18252 - RNA, 21 nt, synthetic construct
  source 1..21: mol_type = other RNA
aaatcggagacatttggttga

SEQ ID NO: 18253 - RNA, 21 nt, synthetic construct
  source 1..21: mol_type = other RNA
aaatcgtagaaattcccctta

SEQ ID NO: 18254 - RNA, 21 nt, synthetic construct
  source 1..21: mol_type = other RNA
aaatctagtgccacacagtga

SEQ ID NO: 18255 - RNA, 21 nt, synthetic construct
  source 1..21: mol_type = other RNA
aaatgaaatctagtgccacac

SEQ ID NO: 18256 - RNA, 21 nt, synthetic construct
  source 1..21: mol_type = other RNA
aaatgaaatgaatggtgctta

SEQ ID NO: 18257 - RNA, 21 nt, synthetic construct
  source 1..21: mol_type = other RNA
aaatgaatcaagggcagtccc

SEQ ID NO: 18258 - RNA, 21 nt, synthetic construct
  source 1..21: mol_type = other RNA
aaatgaatggtgcttacttca

SEQ ID NO: 18259 - RNA, 21 nt, synthetic construct
  source 1..21: mol_type = other RNA
aaatgacctccaaacaataca

SEQ ID NO: 18260 - RNA, 21 nt, synthetic construct
  source 1..21: mol_type = other RNA
aaatgcagttaaagatttcac

SEQ ID NO: 18261 - RNA, 21 nt, synthetic construct
  source 1..21: mol_type = other RNA
aaatgccattaacagtcaggc

SEQ ID NO: 18262 - RNA, 21 nt, synthetic construct
  source 1..21: mol_type = other RNA
aaatggagacaccaagtggca

SEQ ID NO: 18263 - RNA, 21 nt, synthetic construct
  source 1..21: mol_type = other RNA
aaatggaggaataaaacgcac

SEQ ID NO: 18264 - RNA, 21 nt, synthetic construct
  source 1..21: mol_type = other RNA
aaatggctcagtctctgaagc

SEQ ID NO: 18265 - RNA, 21 nt, synthetic construct
  source 1..21: mol_type = other RNA
aaatgggactggaggaagtac

SEQ ID NO: 18266 - RNA, 21 nt, synthetic construct
  source 1..21: mol_type = other RNA
aaatgggaggtgatggtatca

SEQ ID NO: 18267 - RNA, 21 nt, synthetic construct
  source 1..21: mol_type = other RNA
aaatggtctgttttggagaag

SEQ ID NO: 18268 - RNA, 21 nt, synthetic construct
  source 1..21: mol_type = other RNA
aaatgtaccaagttgaaatga

SEQ ID NO: 18269 - RNA, 21 nt, synthetic construct
  source 1..21: mol_type = other RNA
aaatgtcagggccagtcacag

SEQ ID NO: 18270 - RNA, 21 nt, synthetic construct
  source 1..21: mol_type = other RNA
aaatgtctccgatttgagtga

SEQ ID NO: 18271 - RNA, 21 nt, synthetic construct
  source 1..21: mol_type = other RNA
aaatgtttttcctgtgcctga

SEQ ID NO: 18272 - RNA, 21 nt, synthetic construct
  source 1..21: mol_type = other RNA
aaattattgagaacagaagca

SEQ ID NO: 18273 - RNA, 21 nt, synthetic construct
  source 1..21: mol_type = other RNA
aaattccaacatgcctggggg

SEQ ID NO: 18274 - RNA, 21 nt, synthetic construct
  source 1..21: mol_type = other RNA
aaattccccttatagtcagac

SEQ ID NO: 18275 - RNA, 21 nt, synthetic construct
  source 1..21: mol_type = other RNA
aaattgaaacaagaccaaaag

SEQ ID NO: 18276 - RNA, 21 nt, synthetic construct
  source 1..21: mol_type = other RNA
aaattgctgctggaacctgaa

SEQ ID NO: 18277 - RNA, 21 nt, synthetic construct
  source 1..21: mol_type = other RNA
aaattggtgggttatgcttga

SEQ ID NO: 18278 - RNA, 21 nt, synthetic construct
  source 1..21: mol_type = other RNA
aaatttattggatacacctgt

SEQ ID NO: 18279 - RNA, 21 nt, synthetic construct
  source 1..21: mol_type = other RNA
aacaaaacatggaaaaaggta

SEQ ID NO: 18280 - RNA, 21 nt, synthetic construct
  source 1..21: mol_type = other RNA
aacaaaatgaaatgaatggtg

SEQ ID NO: 18281 - RNA, 21 nt, synthetic construct
  source 1..21: mol_type = other RNA
aacaaagagcaagagattctg

SEQ ID NO: 18282 - RNA, 21 nt, synthetic construct
  source 1..21: mol_type = other RNA
aacaaagagcagattcccaaa

SEQ ID NO: 18283 - RNA, 21 nt, synthetic construct
  source 1..21: mol_type = other RNA
aacaacacagctggagcacaa

SEQ ID NO: 18284 - RNA, 21 nt, synthetic construct
  source 1..21: mol_type = other RNA
aacaacttcttcagaaaagac

SEQ ID NO: 18285 - RNA, 21 nt, synthetic construct
  source 1..21: mol_type = other RNA
aacaagaaacctgtattttgc

SEQ ID NO: 18286 - RNA, 21 nt, synthetic construct
  source 1..21: mol_type = other RNA
aacaagaccaaaaggctaatg

SEQ ID NO: 18287 - RNA, 21 nt, synthetic construct
  source 1..21: mol_type = other RNA
aacaagaccaatgtcagaaca

SEQ ID NO: 18288 - RNA, 21 nt, synthetic construct
  source 1..21: mol_type = other RNA
aacaagacccaaaacttgcat

SEQ ID NO: 18289 - RNA, 21 nt, synthetic construct
  source 1..21: mol_type = other RNA
aacaagctgcgcaacttgctc

SEQ ID NO: 18290 - RNA, 21 nt, synthetic construct
  source 1..21: mol_type = other RNA
aacaagcttcagttctacagg

SEQ ID NO: 18291 - RNA, 21 nt, synthetic construct
  source 1..21: mol_type = other RNA
aacaaggcagtgctaatgcct

SEQ ID NO: 18292 - RNA, 21 nt, synthetic construct
  source 1..21: mol_type = other RNA
aacaatacacacctagtttca

SEQ ID NO: 18293 - RNA, 21 nt, synthetic construct
  source 1..21: mol_type = other RNA
aacaatacactggaaattcca

SEQ ID NO: 18294 - RNA, 21 nt, synthetic construct
  source 1..21: mol_type = other RNA
aacaatgatcagcaaagagaa

SEQ ID NO: 18295 - RNA, 21 nt, synthetic construct
  source 1..21: mol_type = other RNA
aacacaacacttttaagggaa

SEQ ID NO: 18296 - RNA, 21 nt, synthetic construct
  source 1..21: mol_type = other RNA
aacacaaccatcccagagttc

SEQ ID NO: 18297 - RNA, 21 nt, synthetic construct
  source 1..21: mol_type = other RNA
aacacaatctggataatattg

SEQ ID NO: 18298 - RNA, 21 nt, synthetic construct
  source 1..21: mol_type = other RNA
aacacaatggaacagtcattg

SEQ ID NO: 18299 - RNA, 21 nt, synthetic construct
  source 1..21: mol_type = other RNA
aacacacacatggtgaactcc

SEQ ID NO: 18300 - RNA, 21 nt, synthetic construct
  source 1..21: mol_type = other RNA
aacacagcaaccccaaactga

SEQ ID NO: 18301 - RNA, 21 nt, synthetic construct
  source 1..21: mol_type = other RNA
aacacagcactatctgaaacc

SEQ ID NO: 18302 - RNA, 21 nt, synthetic construct
  source 1..21: mol_type = other RNA
aacacagctggagcacaagtc

SEQ ID NO: 18303 - RNA, 21 nt, synthetic construct
  source 1..21: mol_type = other RNA
aacacataactgcagtgggcc

SEQ ID NO: 18304 - RNA, 21 nt, synthetic construct
  source 1..21: mol_type = other RNA
aacaccaccactaccccaacc

SEQ ID NO: 18305 - RNA, 21 nt, synthetic construct
  source 1..21: mol_type = other RNA
aacacctcaagcataacccac

SEQ ID NO: 18306 - RNA, 21 nt, synthetic construct
  source 1..21: mol_type = other RNA
aacacgagatcttgtgccccc

SEQ ID NO: 18307 - RNA, 21 nt, synthetic construct
  source 1..21: mol_type = other RNA
aacactgagctttgcttgaag

SEQ ID NO: 18308 - RNA, 21 nt, synthetic construct
  source 1..21: mol_type = other RNA
aacactggggacataagtttt

SEQ ID NO: 18309 - RNA, 21 nt, synthetic construct
  source 1..21: mol_type = other RNA
aacactgtctcaatattatcc

SEQ ID NO: 18310 - RNA, 21 nt, synthetic construct
  source 1..21: mol_type = other RNA
aacacttggaataccctctac

SEQ ID NO: 18311 - RNA, 21 nt, synthetic construct
  source 1..21: mol_type = other RNA
aacacttttaagggaagtgaa

SEQ ID NO: 18312 - RNA, 21 nt, synthetic construct
  source 1..21: mol_type = other RNA
aacagaagcagctgttctttt

SEQ ID NO: 18313 - RNA, 21 nt, synthetic construct
  source 1..21: mol_type = other RNA
aacagaattcttcaccagacg

SEQ ID NO: 18314 - RNA, 21 nt, synthetic construct
  source 1..21: mol_type = other RNA
aacagaccatttaccaaaagc

SEQ ID NO: 18315 - RNA, 21 nt, synthetic construct
  source 1..21: mol_type = other RNA
aacagactaagtccattcctg

SEQ ID NO: 18316 - RNA, 21 nt, synthetic construct
  source 1..21: mol_type = other RNA
aacagactacacatcctgaac

SEQ ID NO: 18317 - RNA, 21 nt, synthetic construct
  source 1..21: mol_type = other RNA
aacagcacttgaatcaacagg

SEQ ID NO: 18318 - RNA, 21 nt, synthetic construct
  source 1..21: mol_type = other RNA
aacagcagcaaaaattacaaa

SEQ ID NO: 18319 - RNA, 21 nt, synthetic construct
  source 1..21: mol_type = other RNA
aacagcagcaaacacagcaac

SEQ ID NO: 18320 - RNA, 21 nt, synthetic construct
  source 1..21: mol_type = other RNA
aacagctgcttctgttctcaa

SEQ ID NO: 18321 - RNA, 21 nt, synthetic construct
  source 1..21: mol_type = other RNA
aacaggaatgacatacagact

SEQ ID NO: 18322 - RNA, 21 nt, synthetic construct
  source 1..21: mol_type = other RNA
aacaggagcagaagtcacaac

SEQ ID NO: 18323 - RNA, 21 nt, synthetic construct
  source 1..21: mol_type = other RNA
aacaggatagaaccaaccatg

SEQ ID NO: 18324 - RNA, 21 nt, synthetic construct
  source 1..21: mol_type = other RNA
aacaggcagcacaaacacaac

SEQ ID NO: 18325 - RNA, 21 nt, synthetic construct
  source 1..21: mol_type = other RNA
aacaggcttcagagactgagc

SEQ ID NO: 18326 - RNA, 21 nt, synthetic construct
  source 1..21: mol_type = other RNA
aacaggtatttagcattgcag

SEQ ID NO: 18327 - RNA, 21 nt, synthetic construct
  source 1..21: mol_type = other RNA
aacagtcaggctactaatgag

SEQ ID NO: 18328 - RNA, 21 nt, synthetic construct
  source 1..21: mol_type = other RNA
aacagtcattgtccctgcagt

SEQ ID NO: 18329 - RNA, 21 nt, synthetic construct
  source 1..21: mol_type = other RNA
aacataagcctcataaacagg

SEQ ID NO: 18330 - RNA, 21 nt, synthetic construct
  source 1..21: mol_type = other RNA
aacatccagggaaccacaaag

SEQ ID NO: 18331 - RNA, 21 nt, synthetic construct
  source 1..21: mol_type = other RNA
aacatctccagttccaaaaac

SEQ ID NO: 18332 - RNA, 21 nt, synthetic construct
  source 1..21: mol_type = other RNA
aacatgcctggggggctccca

SEQ ID NO: 18333 - RNA, 21 nt, synthetic construct
  source 1..21: mol_type = other RNA
aacatggaaaaaggtaactaa

SEQ ID NO: 18334 - RNA, 21 nt, synthetic construct
  source 1..21: mol_type = other RNA
aacatggttggttctatcctg

SEQ ID NO: 18335 - RNA, 21 nt, synthetic construct
  source 1..21: mol_type = other RNA
aacattcttccactttagtct

SEQ ID NO: 18336 - RNA, 21 nt, synthetic construct
  source 1..21: mol_type = other RNA
aacatttgcatggttatgtat

SEQ ID NO: 18337 - RNA, 21 nt, synthetic construct
  source 1..21: mol_type = other RNA
aaccaaaagaacagctgcttc

SEQ ID NO: 18338 - RNA, 21 nt, synthetic construct
  source 1..21: mol_type = other RNA
aaccaaagtaacacaacactt

SEQ ID NO: 18339 - RNA, 21 nt, synthetic construct
  source 1..21: mol_type = other RNA
aaccaaatgtctccgatttga

SEQ ID NO: 18340 - RNA, 21 nt, synthetic construct
  source 1..21: mol_type = other RNA
aaccaaccatgttgagggcaa

SEQ ID NO: 18341 - RNA, 21 nt, synthetic construct
  source 1..21: mol_type = other RNA
aaccaagatatgtctggtcaa

SEQ ID NO: 18342 - RNA, 21 nt, synthetic construct
  source 1..21: mol_type = other RNA
aaccacaaagctagcgtctgg

SEQ ID NO: 18343 - RNA, 21 nt, synthetic construct
  source 1..21: mol_type = other RNA
aaccacatctcacataaatgc

SEQ ID NO: 18344 - RNA, 21 nt, synthetic construct
  source 1..21: mol_type = other RNA
aaccactgctgcagaacttga

SEQ ID NO: 18345 - RNA, 21 nt, synthetic construct
  source 1..21: mol_type = other RNA
aaccagaacaactacaacaac

SEQ ID NO: 18346 - RNA, 21 nt, synthetic construct
  source 1..21: mol_type = other RNA
aaccagcaacagcagcaaaaa

SEQ ID NO: 18347 - RNA, 21 nt, synthetic construct
  source 1..21: mol_type = other RNA
aaccaggatggattgaattga

SEQ ID NO: 18348 - RNA, 21 nt, synthetic construct
  source 1..21: mol_type = other RNA
aaccatcccagagttcacatc

SEQ ID NO: 18349 - RNA, 21 nt, synthetic construct
  source 1..21: mol_type = other RNA
aaccatgcaaatgtttttcct

SEQ ID NO: 18350 - RNA, 21 nt, synthetic construct
  source 1..21: mol_type = other RNA
aaccatgttgagggcaacaga

SEQ ID NO: 18351 - RNA, 21 nt, synthetic construct
  source 1..21: mol_type = other RNA
aacccaatctctccaatcaaa

SEQ ID NO: 18352 - RNA, 21 nt, synthetic construct
  source 1..21: mol_type = other RNA
aacccaccaatttttggtagc

SEQ ID NO: 18353 - RNA, 21 nt, synthetic construct
  source 1..21: mol_type = other RNA
aaccccaaactgagtcttgcc

SEQ ID NO: 18354 - RNA, 21 nt, synthetic construct
  source 1..21: mol_type = other RNA
aaccctcacaccaggtgcact

SEQ ID NO: 18355 - RNA, 21 nt, synthetic construct
  source 1..21: mol_type = other RNA
aacctctggctacaaagctcc

SEQ ID NO: 18356 - RNA, 21 nt, synthetic construct
  source 1..21: mol_type = other RNA
aacctgaacagaattcttcac

SEQ ID NO: 18357 - RNA, 21 nt, synthetic construct
  source 1..21: mol_type = other RNA
aacctgaggcaccaccttccc

SEQ ID NO: 18358 - RNA, 21 nt, synthetic construct
  source 1..21: mol_type = other RNA
aacctggatgcaagccacatg

SEQ ID NO: 18359 - RNA, 21 nt, synthetic construct
  source 1..21: mol_type = other RNA
aacctgtattttgcatgcact

SEQ ID NO: 18360 - RNA, 21 nt, synthetic construct
  source 1..21: mol_type = other RNA
aacctgtggaagaggaggagg

SEQ ID NO: 18361 - RNA, 21 nt, synthetic construct
  source 1..21: mol_type = other RNA
aaccttctctctctgggctcc

SEQ ID NO: 18362 - RNA, 21 nt, synthetic construct
  source 1..21: mol_type = other RNA
aacgacttggcgtgaaactgc

SEQ ID NO: 18363 - RNA, 21 nt, synthetic construct
  source 1..21: mol_type = other RNA
aacgaggggccttcaattcaa

SEQ ID NO: 18364 - RNA, 21 nt, synthetic construct
  source 1..21: mol_type = other RNA
aacgcacagttagtgaacctt

SEQ ID NO: 18365 - RNA, 21 nt, synthetic construct
  source 1..21: mol_type = other RNA
aacgccatgtgtctcagtaca

SEQ ID NO: 18366 - RNA, 21 nt, synthetic construct
  source 1..21: mol_type = other RNA
aacgtaatgaggcatcactgc

SEQ ID NO: 18367 - RNA, 21 nt, synthetic construct
  source 1..21: mol_type = other RNA
aactaagcaagagaatccacc

SEQ ID NO: 18368 - RNA, 21 nt, synthetic construct
  source 1..21: mol_type = other RNA
aactacaacaacaaaaatcag

SEQ ID NO: 18369 - RNA, 21 nt, synthetic construct
  source 1..21: mol_type = other RNA
aactagctgcaatgctaaata

SEQ ID NO: 18370 - RNA, 21 nt, synthetic construct
  source 1..21: mol_type = other RNA
aactaggtgtgtattgtttga

SEQ ID NO: 18371 - RNA, 21 nt, synthetic construct
  source 1..21: mol_type = other RNA
aactcacaccttttgcaacat

SEQ ID NO: 18372 - RNA, 21 nt, synthetic construct
  source 1..21: mol_type = other RNA
aactcacagattctttcttat

SEQ ID NO: 18373 - RNA, 21 nt, synthetic construct
  source 1..21: mol_type = other RNA
aactcattagtagcctgactg

SEQ ID NO: 18374 - RNA, 21 nt, synthetic construct
  source 1..21: mol_type = other RNA
aactccaccattcagagtgct

SEQ ID NO: 18375 - RNA, 21 nt, synthetic construct
  source 1..21: mol_type = other RNA
aactcctggaaaaaacactgt

SEQ ID NO: 18376 - RNA, 21 nt, synthetic construct
  source 1..21: mol_type = other RNA
aactcgcttgattttgaatac

SEQ ID NO: 18377 - RNA, 21 nt, synthetic construct
  source 1..21: mol_type = other RNA
aactctgagctgcctccaaag

SEQ ID NO: 18378 - RNA, 21 nt, synthetic construct
  source 1..21: mol_type = other RNA
aactctgggatggttgtgttt

SEQ ID NO: 18379 - RNA, 21 nt, synthetic construct
  source 1..21: mol_type = other RNA
aactgaaaaacttatgtcccc

SEQ ID NO: 18380 - RNA, 21 nt, synthetic construct
  source 1..21: mol_type = other RNA
aactgaagcttgttgtgactt

SEQ ID NO: 18381 - RNA, 21 nt, synthetic construct
  source 1..21: mol_type = other RNA
aactgagtcttgccatagtca

SEQ ID NO: 18382 - RNA, 21 nt, synthetic construct
  source 1..21: mol_type = other RNA
aactgatttttgttgttgtag

SEQ ID NO: 18383 - RNA, 21 nt, synthetic construct
  source 1..21: mol_type = other RNA
aactgcagtgggcctgaaaat

SEQ ID NO: 18384 - RNA, 21 nt, synthetic construct
  source 1..21: mol_type = other RNA
aactgcattttcttgggctac

SEQ ID NO: 18385 - RNA, 21 nt, synthetic construct
  source 1..21: mol_type = other RNA
aactgccagcagttgatgaga

SEQ ID NO: 18386 - RNA, 21 nt, synthetic construct
  source 1..21: mol_type = other RNA
aactgctggcagttgtcctgt

SEQ ID NO: 18387 - RNA, 21 nt, synthetic construct
  source 1..21: mol_type = other RNA
aactgcttcagatgctgctcc

SEQ ID NO: 18388 - RNA, 21 nt, synthetic construct
  source 1..21: mol_type = other RNA
aactggagatgttggtccact

SEQ ID NO: 18389 - RNA, 21 nt, synthetic construct
  source 1..21: mol_type = other RNA
aactggtgaaatctttaactg

SEQ ID NO: 18390 - RNA, 21 nt, synthetic construct
  source 1..21: mol_type = other RNA
aactgtagcaccattaggcat

SEQ ID NO: 18391 - RNA, 21 nt, synthetic construct
  source 1..21: mol_type = other RNA
aactgtgactggccctgacat

SEQ ID NO: 18392 - RNA, 21 nt, synthetic construct
  source 1..21: mol_type = other RNA
aactgtgcgttttattcctcc

SEQ ID NO: 18393 - RNA, 21 nt, synthetic construct
  source 1..21: mol_type = other RNA
aacttatgtccccagtgttga

SEQ ID NO: 18394 - RNA, 21 nt, synthetic construct
  source 1..21: mol_type = other RNA
aacttcggggtaagccaagaa

SEQ ID NO: 18395 - RNA, 21 nt, synthetic construct
  source 1..21: mol_type = other RNA
aacttcttcagaaaagacacc

SEQ ID NO: 18396 - RNA, 21 nt, synthetic construct
  source 1..21: mol_type = other RNA
aacttgatagccacaccccag

SEQ ID NO: 18397 - RNA, 21 nt, synthetic construct
  source 1..21: mol_type = other RNA
aacttgcatcacatgcaatat

SEQ ID NO: 18398 - RNA, 21 nt, synthetic construct
  source 1..21: mol_type = other RNA
aacttgctcagcaaaggtact

SEQ ID NO: 18399 - RNA, 21 nt, synthetic construct
  source 1..21: mol_type = other RNA
aacttggtacatttgtgactt

SEQ ID NO: 18400 - RNA, 21 nt, synthetic construct
  source 1..21: mol_type = other RNA
aacttttacttgcttctgtga

SEQ ID NO: 18401 - RNA, 21 nt, synthetic construct
  source 1..21: mol_type = other RNA
aacttttgaaagagtgccact

SEQ ID NO: 18402 - RNA, 21 nt, synthetic construct
  source 1..21: mol_type = other RNA
aactttttgcaggaaacaaga

SEQ ID NO: 18403 - RNA, 21 nt, synthetic construct
  source 1..21: mol_type = other RNA
aagaaacctgtattttgcatg

SEQ ID NO: 18404 - RNA, 21 nt, synthetic construct
  source 1..21: mol_type = other RNA
aagaaagaaatccaggtgaaa

SEQ ID NO: 18405 - RNA, 21 nt, synthetic construct
  source 1..21: mol_type = other RNA
aagaaagaatctgtgagttct

SEQ ID NO: 18406 - RNA, 21 nt, synthetic construct
  source 1..21: mol_type = other RNA
aagaaagtagagggtattcca

SEQ ID NO: 18407 - RNA, 21 nt, synthetic construct
  source 1..21: mol_type = other RNA
aagaaatccaggtgaaagcag

SEQ ID NO: 18408 - RNA, 21 nt, synthetic construct
  source 1..21: mol_type = other RNA
aagaaattgaaacaagaccaa

SEQ ID NO: 18409 - RNA, 21 nt, synthetic construct
  source 1..21: mol_type = other RNA
aagaacaccaccactacccca

SEQ ID NO: 18410 - RNA, 21 nt, synthetic construct
  source 1..21: mol_type = other RNA
aagaacagactacacatcctg

SEQ ID NO: 18411 - RNA, 21 nt, synthetic construct
  source 1..21: mol_type = other RNA
aagaacagcagcaaacacagc

SEQ ID NO: 18412 - RNA, 21 nt, synthetic construct
  source 1..21: mol_type = other RNA
aagaacagctgcttctgttct

SEQ ID NO: 18413 - RNA, 21 nt, synthetic construct
  source 1..21: mol_type = other RNA
aagaacaggagcagaagtcac

SEQ ID NO: 18414 - RNA, 21 nt, synthetic construct
  source 1..21: mol_type = other RNA
aagaagatcttgctttgggat

SEQ ID NO: 18415 - RNA, 21 nt, synthetic construct
  source 1..21: mol_type = other RNA
aagaagcaattgtgatggtgg

SEQ ID NO: 18416 - RNA, 21 nt, synthetic construct
  source 1..21: mol_type = other RNA
aagaagttgtttgctgctcta

SEQ ID NO: 18417 - RNA, 21 nt, synthetic construct
  source 1..21: mol_type = other RNA
aagaataaagaggaaatactc

SEQ ID NO: 18418 - RNA, 21 nt, synthetic construct
  source 1..21: mol_type = other RNA
aagaatctgtgagttctgtag

SEQ ID NO: 18419 - RNA, 21 nt, synthetic construct
  source 1..21: mol_type = other RNA
aagaatgatccttctctttgc

SEQ ID NO: 18420 - RNA, 21 nt, synthetic construct
  source 1..21: mol_type = other RNA
aagaatgttttcatggtgaaa

SEQ ID NO: 18421 - RNA, 21 nt, synthetic construct
  source 1..21: mol_type = other RNA
aagaattctgttcaggttcca

SEQ ID NO: 18422 - RNA, 21 nt, synthetic construct
  source 1..21: mol_type = other RNA
aagaattgatggcagtgatgc

SEQ ID NO: 18423 - RNA, 21 nt, synthetic construct
  source 1..21: mol_type = other RNA
aagacaccaaccaaaagaaca

SEQ ID NO: 18424 - RNA, 21 nt, synthetic construct
  source 1..21: mol_type = other RNA
aagaccaaaaggctaatggag

SEQ ID NO: 18425 - RNA, 21 nt, synthetic construct
  source 1..21: mol_type = other RNA
aagaccaatgtcagaacacct

SEQ ID NO: 18426 - RNA, 21 nt, synthetic construct
  source 1..21: mol_type = other RNA
aagacccaaaacttgcatcac

SEQ ID NO: 18427 - RNA, 21 nt, synthetic construct
  source 1..21: mol_type = other RNA
aagacgtaacttcggggtaag

SEQ ID NO: 18428 - RNA, 21 nt, synthetic construct
  source 1..21: mol_type = other RNA
aagactcaatatgatttccca

SEQ ID NO: 18429 - RNA, 21 nt, synthetic construct
  source 1..21: mol_type = other RNA
aagactcagtttggggttgct

SEQ ID NO: 18430 - RNA, 21 nt, synthetic construct
  source 1..21: mol_type = other RNA
aagagaaggatcattctttgg

SEQ ID NO: 18431 - RNA, 21 nt, synthetic construct
  source 1..21: mol_type = other RNA
aagagaatccacctgcaagct

SEQ ID NO: 18432 - RNA, 21 nt, synthetic construct
  source 1..21: mol_type = other RNA
aagagatgccaccttagagca

SEQ ID NO: 18433 - RNA, 21 nt, synthetic construct
  source 1..21: mol_type = other RNA
aagagattctgaagggtcgag

SEQ ID NO: 18434 - RNA, 21 nt, synthetic construct
  source 1..21: mol_type = other RNA
aagagcaagagattctgaagg

SEQ ID NO: 18435 - RNA, 21 nt, synthetic construct
  source 1..21: mol_type = other RNA
aagagcagattcccaaactga

SEQ ID NO: 18436 - RNA, 21 nt, synthetic construct
  source 1..21: mol_type = other RNA
aagagcatcattgagaccatg

SEQ ID NO: 18437 - RNA, 21 nt, synthetic construct
  source 1..21: mol_type = other RNA
aagagccttatggtcaaataa

SEQ ID NO: 18438 - RNA, 21 nt, synthetic construct
  source 1..21: mol_type = other RNA
aagaggaaatactccagactt

SEQ ID NO: 18439 - RNA, 21 nt, synthetic construct
  source 1..21: mol_type = other RNA
aagaggaggagggggagaaag

SEQ ID NO: 18440 - RNA, 21 nt, synthetic construct
  source 1..21: mol_type = other RNA
aagaggcagaaactgtagcac

SEQ ID NO: 18441 - RNA, 21 nt, synthetic construct
  source 1..21: mol_type = other RNA
aagagtgccacttggtgtctc

SEQ ID NO: 18442 - RNA, 21 nt, synthetic construct
  source 1..21: mol_type = other RNA
aagatatgtctggtcaacaag

SEQ ID NO: 18443 - RNA, 21 nt, synthetic construct
  source 1..21: mol_type = other RNA
aagatctcgtgtttgctcctt

SEQ ID NO: 18444 - RNA, 21 nt, synthetic construct
  source 1..21: mol_type = other RNA
aagatcttcttcacaggtgct

SEQ ID NO: 18445 - RNA, 21 nt, synthetic construct
  source 1..21: mol_type = other RNA
aagatcttgctttgggatcac

SEQ ID NO: 18446 - RNA, 21 nt, synthetic construct
  source 1..21: mol_type = other RNA
aagatgggaaatcatattgag

SEQ ID NO: 18447 - RNA, 21 nt, synthetic construct
  source 1..21: mol_type = other RNA
aagatttcaccagtttttcaa

SEQ ID NO: 18448 - RNA, 21 nt, synthetic construct
  source 1..21: mol_type = other RNA
aagcaaagctcagtgttcact

SEQ ID NO: 18449 - RNA, 21 nt, synthetic construct
  source 1..21: mol_type = other RNA
aagcaacaatgatcagcaaag

SEQ ID NO: 18450 - RNA, 21 nt, synthetic construct
  source 1..21: mol_type = other RNA
aagcaagaacagcagcaaaca

SEQ ID NO: 18451 - RNA, 21 nt, synthetic construct
  source 1..21: mol_type = other RNA
aagcaagagaatccacctgca

SEQ ID NO: 18452 - RNA, 21 nt, synthetic construct
  source 1..21: mol_type = other RNA
aagcaagatcttcttcacagg

SEQ ID NO: 18453 - RNA, 21 nt, synthetic construct
  source 1..21: mol_type = other RNA
aagcaagcctgatggaacagg

SEQ ID NO: 18454 - RNA, 21 nt, synthetic construct
  source 1..21: mol_type = other RNA
aagcaagtaaaagttgaaatg

SEQ ID NO: 18455 - RNA, 21 nt, synthetic construct
  source 1..21: mol_type = other RNA
aagcaattgtgatggtggtgg

SEQ ID NO: 18456 - RNA, 21 nt, synthetic construct
  source 1..21: mol_type = other RNA
aagcaccattcatttcatttt

SEQ ID NO: 18457 - RNA, 21 nt, synthetic construct
  source 1..21: mol_type = other RNA
aagcacctgtgaagaagatct

SEQ ID NO: 18458 - RNA, 21 nt, synthetic construct
  source 1..21: mol_type = other RNA
aagcactctgaatggtggagt

SEQ ID NO: 18459 - RNA, 21 nt, synthetic construct
  source 1..21: mol_type = other RNA
aagcagctgttcttttggttg

SEQ ID NO: 18460 - RNA, 21 nt, synthetic construct
  source 1..21: mol_type = other RNA
aagcagtcaaccaaatgtctc

SEQ ID NO: 18461 - RNA, 21 nt, synthetic construct
  source 1..21: mol_type = other RNA
aagcagtttcacgccaagtcg

SEQ ID NO: 18462 - RNA, 21 nt, synthetic construct
  source 1..21: mol_type = other RNA
aagcataacccaccaattttt

SEQ ID NO: 18463 - RNA, 21 nt, synthetic construct
  source 1..21: mol_type = other RNA
aagcatcggagaagggctgca

SEQ ID NO: 18464 - RNA, 21 nt, synthetic construct
  source 1..21: mol_type = other RNA
aagcatgctgctctaaggtgg

SEQ ID NO: 18465 - RNA, 21 nt, synthetic construct
  source 1..21: mol_type = other RNA
aagccaagaaagaaatccagg

SEQ ID NO: 18466 - RNA, 21 nt, synthetic construct
  source 1..21: mol_type = other RNA
aagccacatgcctgtatgcac

SEQ ID NO: 18467 - RNA, 21 nt, synthetic construct
  source 1..21: mol_type = other RNA
aagccagaatagtcgtgtgag

SEQ ID NO: 18468 - RNA, 21 nt, synthetic construct
  source 1..21: mol_type = other RNA
aagccagctgcagtggtgagt

SEQ ID NO: 18469 - RNA, 21 nt, synthetic construct
  source 1..21: mol_type = other RNA
aagcccactgcctgagagagc

SEQ ID NO: 18470 - RNA, 21 nt, synthetic construct
  source 1..21: mol_type = other RNA
aagcctcataaacaggcagca

SEQ ID NO: 18471 - RNA, 21 nt, synthetic construct
  source 1..21: mol_type = other RNA
aagcctgatggaacaggatag

SEQ ID NO: 18472 - RNA, 21 nt, synthetic construct
  source 1..21: mol_type = other RNA
aagcctgttgattcaagtgct

SEQ ID NO: 18473 - RNA, 21 nt, synthetic construct
  source 1..21: mol_type = other RNA
aagcgagttcgagactcataa

SEQ ID NO: 18474 - RNA, 21 nt, synthetic construct
  source 1..21: mol_type = other RNA
aagcggaatcccatctaaaac

SEQ ID NO: 18475 - RNA, 21 nt, synthetic construct
  source 1..21: mol_type = other RNA
aagctagcgtctggtgaagaa

SEQ ID NO: 18476 - RNA, 21 nt, synthetic construct
  source 1..21: mol_type = other RNA
aagctcagtgttcactaagga

SEQ ID NO: 18477 - RNA, 21 nt, synthetic construct
  source 1..21: mol_type = other RNA
aagctcatgtgcagtcactgt

SEQ ID NO: 18478 - RNA, 21 nt, synthetic construct
  source 1..21: mol_type = other RNA
aagctccagaatggaagccca

SEQ ID NO: 18479 - RNA, 21 nt, synthetic construct
  source 1..21: mol_type = other RNA
aagctcctggtggcagctctg

SEQ ID NO: 18480 - RNA, 21 nt, synthetic construct
  source 1..21: mol_type = other RNA
aagctctggattttcaggccc

SEQ ID NO: 18481 - RNA, 21 nt, synthetic construct
  source 1..21: mol_type = other RNA
aagctgaggaacctgtggaag

SEQ ID NO: 18482 - RNA, 21 nt, synthetic construct
  source 1..21: mol_type = other RNA
aagctgcgcaacttgctcagc

SEQ ID NO: 18483 - RNA, 21 nt, synthetic construct
  source 1..21: mol_type = other RNA
aagctggggtgtggctatcaa

SEQ ID NO: 18484 - RNA, 21 nt, synthetic construct
  source 1..21: mol_type = other RNA
aagctgtgataatgtgcagca

SEQ ID NO: 18485 - RNA, 21 nt, synthetic construct
  source 1..21: mol_type = other RNA
aagcttacacccagaaaacaa

SEQ ID NO: 18486 - RNA, 21 nt, synthetic construct
  source 1..21: mol_type = other RNA
aagcttcagttctacagggat

SEQ ID NO: 18487 - RNA, 21 nt, synthetic construct
  source 1..21: mol_type = other RNA
aagcttgccttgggagccccc

SEQ ID NO: 18488 - RNA, 21 nt, synthetic construct
  source 1..21: mol_type = other RNA
aagcttgttgtgacttctgct

SEQ ID NO: 18489 - RNA, 21 nt, synthetic construct
  source 1..21: mol_type = other RNA
aaggaaaaagcactctgaatg

SEQ ID NO: 18490 - RNA, 21 nt, synthetic construct
  source 1..21: mol_type = other RNA
aaggaacaggtatttagcatt

SEQ ID NO: 18491 - RNA, 21 nt, synthetic construct
  source 1..21: mol_type = other RNA
aaggaagctgaggaacctgtg

SEQ ID NO: 18492 - RNA, 21 nt, synthetic construct
  source 1..21: mol_type = other RNA
aaggaatccttagtgaacact

SEQ ID NO: 18493 - RNA, 21 nt, synthetic construct
  source 1..21: mol_type = other RNA
aaggacactcaaaagcatgct

SEQ ID NO: 18494 - RNA, 21 nt, synthetic construct
  source 1..21: mol_type = other RNA
aaggagcaaacacgagatctt

SEQ ID NO: 18495 - RNA, 21 nt, synthetic construct
  source 1..21: mol_type = other RNA
aaggagcccagagagagaagg

SEQ ID NO: 18496 - RNA, 21 nt, synthetic construct
  source 1..21: mol_type = other RNA
aaggatcattctttggccaga

SEQ ID NO: 18497 - RNA, 21 nt, synthetic construct
  source 1..21: mol_type = other RNA
aaggattccttttctgccact

SEQ ID NO: 18498 - RNA, 21 nt, synthetic construct
  source 1..21: mol_type = other RNA
aaggcaagcttacacccagaa

SEQ ID NO: 18499 - RNA, 21 nt, synthetic construct
  source 1..21: mol_type = other RNA
aaggcagtgctaatgcctaat

SEQ ID NO: 18500 - RNA, 21 nt, synthetic construct
  source 1..21: mol_type = other RNA
aaggcccctcgttttcaccaa

SEQ ID NO: 18501 - RNA, 21 nt, synthetic construct
  source 1..21: mol_type = other RNA
aaggcctcagaataattgtgt

SEQ ID NO: 18502 - RNA, 21 nt, synthetic construct
  source 1..21: mol_type = other RNA
aaggctaatggagaaagacgt

SEQ ID NO: 18503 - RNA, 21 nt, synthetic construct
  source 1..21: mol_type = other RNA
aaggctcttactctcaaatca

SEQ ID NO: 18504 - RNA, 21 nt, synthetic construct
  source 1..21: mol_type = other RNA
aagggaagccagaatagtcgt

SEQ ID NO: 18505 - RNA, 21 nt, synthetic construct
  source 1..21: mol_type = other RNA
aagggaagtgaaaatagaggg

SEQ ID NO: 18506 - RNA, 21 nt, synthetic construct
  source 1..21: mol_type = other RNA
aagggcagtcccaaggtacag

SEQ ID NO: 18507 - RNA, 21 nt, synthetic construct
  source 1..21: mol_type = other RNA
aagggctgcatacatgtgtag

SEQ ID NO: 18508 - RNA, 21 nt, synthetic construct
  source 1..21: mol_type = other RNA
aaggggaatttctacgattta

SEQ ID NO: 18509 - RNA, 21 nt, synthetic construct
  source 1..21: mol_type = other RNA
aagggtcgagacaaggagcaa

SEQ ID NO: 18510 - RNA, 21 nt, synthetic construct
  source 1..21: mol_type = other RNA
aaggtaactaagcaagagaat

SEQ ID NO: 18511 - RNA, 21 nt, synthetic construct
  source 1..21: mol_type = other RNA
aaggtacagtggaccaacatc

SEQ ID NO: 18512 - RNA, 21 nt, synthetic construct
  source 1..21: mol_type = other RNA
aaggtacttgatacataacca

SEQ ID NO: 18513 - RNA, 21 nt, synthetic construct
  source 1..21: mol_type = other RNA
aaggtggaacctggatgcaag

SEQ ID NO: 18514 - RNA, 21 nt, synthetic construct
  source 1..21: mol_type = other RNA
aaggtggcatctcttacagaa

SEQ ID NO: 18515 - RNA, 21 nt, synthetic construct
  source 1..21: mol_type = other RNA
aaggtggtgcctcaggtttac

SEQ ID NO: 18516 - RNA, 21 nt, synthetic construct
  source 1..21: mol_type = other RNA
aaggtgtgagtttgaaaatgg

SEQ ID NO: 18517 - RNA, 21 nt, synthetic construct
  source 1..21: mol_type = other RNA
aaggttcactaactgtgcgtt

SEQ ID NO: 18518 - RNA, 21 nt, synthetic construct
  source 1..21: mol_type = other RNA
aagtaaaagttgaaatgtcag

SEQ ID NO: 18519 - RNA, 21 nt, synthetic construct
  source 1..21: mol_type = other RNA
aagtaaatggagacaccaagt

SEQ ID NO: 18520 - RNA, 21 nt, synthetic construct
  source 1..21: mol_type = other RNA
aagtaacacaacacttttaag

SEQ ID NO: 18521 - RNA, 21 nt, synthetic construct
  source 1..21: mol_type = other RNA
aagtaagcaccattcatttca

SEQ ID NO: 18522 - RNA, 21 nt, synthetic construct
  source 1..21: mol_type = other RNA
aagtaatacaatgttcttgtc

SEQ ID NO: 18523 - RNA, 21 nt, synthetic construct
  source 1..21: mol_type = other RNA
aagtacctttgctgagcaagt

SEQ ID NO: 18524 - RNA, 21 nt, synthetic construct
  source 1..21: mol_type = other RNA
aagtagagggtattccaagtg

SEQ ID NO: 18525 - RNA, 21 nt, synthetic construct
  source 1..21: mol_type = other RNA
aagtcacaaatgtaccaagtt

SEQ ID NO: 18526 - RNA, 21 nt, synthetic construct
  source 1..21: mol_type = other RNA
aagtcacaacaagcttcagtt

SEQ ID NO: 18527 - RNA, 21 nt, synthetic construct
  source 1..21: mol_type = other RNA
aagtcacactcagacccctcc

SEQ ID NO: 18528 - RNA, 21 nt, synthetic construct
  source 1..21: mol_type = other RNA
aagtcaggactcacacgacta

SEQ ID NO: 18529 - RNA, 21 nt, synthetic construct
  source 1..21: mol_type = other RNA
aagtccattcctgataccatc

SEQ ID NO: 18530 - RNA, 21 nt, synthetic construct
  source 1..21: mol_type = other RNA
aagtcgttatttgaccataag

SEQ ID NO: 18531 - RNA, 21 nt, synthetic construct
  source 1..21: mol_type = other RNA
aagtctggagtatttcctctt

SEQ ID NO: 18532 - RNA, 21 nt, synthetic construct
  source 1..21: mol_type = other RNA
aagtgaaaatagagggtaaac

SEQ ID NO: 18533 - RNA, 21 nt, synthetic construct
  source 1..21: mol_type = other RNA
aagtgcacctggtgtgagggt

SEQ ID NO: 18534 - RNA, 21 nt, synthetic construct
  source 1..21: mol_type = other RNA
aagtgcatgcaaaatacaggt

SEQ ID NO: 18535 - RNA, 21 nt, synthetic construct
  source 1..21: mol_type = other RNA
aagtgccagaaatgtactgag

SEQ ID NO: 18536 - RNA, 21 nt, synthetic construct
  source 1..21: mol_type = other RNA
aagtgctaattaccatgacaa

SEQ ID NO: 18537 - RNA, 21 nt, synthetic construct
  source 1..21: mol_type = other RNA
aagtgctgtttcaacactggg

SEQ ID NO: 18538 - RNA, 21 nt, synthetic construct
  source 1..21: mol_type = other RNA
aagtggaagaatgttttcatg

SEQ ID NO: 18539 - RNA, 21 nt, synthetic construct
  source 1..21: mol_type = other RNA
aagtggcactctttcaaaagt

SEQ ID NO: 18540 - RNA, 21 nt, synthetic construct
  source 1..21: mol_type = other RNA
aagtgttgtgttactttggtt

SEQ ID NO: 18541 - RNA, 21 nt, synthetic construct
  source 1..21: mol_type = other RNA
aagtgtttgcaaaatggagga

SEQ ID NO: 18542 - RNA, 21 nt, synthetic construct
  source 1..21: mol_type = other RNA
aagttacgtctttctccatta

SEQ ID NO: 18543 - RNA, 21 nt, synthetic construct
  source 1..21: mol_type = other RNA
aagttattatggaataccctg

SEQ ID NO: 18544 - RNA, 21 nt, synthetic construct
  source 1..21: mol_type = other RNA
aagttcaggatgtgtagtctg

SEQ ID NO: 18545 - RNA, 21 nt, synthetic construct
  source 1..21: mol_type = other RNA
aagttctgcagcagtggtttg

SEQ ID NO: 18546 - RNA, 21 nt, synthetic construct
  source 1..21: mol_type = other RNA
aagttgaaatgaatcaagggc

SEQ ID NO: 18547 - RNA, 21 nt, synthetic construct
  source 1..21: mol_type = other RNA
aagttgaaatgtcagggccag

SEQ ID NO: 18548 - RNA, 21 nt, synthetic construct
  source 1..21: mol_type = other RNA
aagttgcgcagcttgttgacc

SEQ ID NO: 18549 - RNA, 21 nt, synthetic construct
  source 1..21: mol_type = other RNA
aagttgtttgctgctctaaag

SEQ ID NO: 18550 - RNA, 21 nt, synthetic construct
  source 1..21: mol_type = other RNA
aagttttgggtcttgtttcct

SEQ ID NO: 18551 - RNA, 21 nt, synthetic construct
  source 1..21: mol_type = other RNA
aagtttttcagtttgggaatc

SEQ ID NO: 18552 - RNA, 21 nt, synthetic construct
  source 1..21: mol_type = other RNA
aataaaacgcacagttagtga

SEQ ID NO: 18553 - RNA, 21 nt, synthetic construct
  source 1..21: mol_type = other RNA
aataaagaacagactacacat

SEQ ID NO: 18554 - RNA, 21 nt, synthetic construct
  source 1..21: mol_type = other RNA
aataaagaggaaatactccag

SEQ ID NO: 18555 - RNA, 21 nt, synthetic construct
  source 1..21: mol_type = other RNA
aataacatccagggaaccaca

SEQ ID NO: 18556 - RNA, 21 nt, synthetic construct
  source 1..21: mol_type = other RNA
aataacgacttggcgtgaaac

SEQ ID NO: 18557 - RNA, 21 nt, synthetic construct
  source 1..21: mol_type = other RNA
aataacttttgaaagagtgcc

SEQ ID NO: 18558 - RNA, 21 nt, synthetic construct
  source 1..21: mol_type = other RNA
aataatgtgatcccaaagcaa

SEQ ID NO: 18559 - RNA, 21 nt, synthetic construct
  source 1..21: mol_type = other RNA
aataattgtgtgaacaggaat

SEQ ID NO: 18560 - RNA, 21 nt, synthetic construct
  source 1..21: mol_type = other RNA
aatacaatgttcttgtcatgg

SEQ ID NO: 18561 - RNA, 21 nt, synthetic construct
  source 1..21: mol_type = other RNA
aatacacacctagtttcagag

SEQ ID NO: 18562 - RNA, 21 nt, synthetic construct
  source 1..21: mol_type = other RNA
aatacactggaaattccaaca

SEQ ID NO: 18563 - RNA, 21 nt, synthetic construct
  source 1..21: mol_type = other RNA
aatacaggtttcttgttcaaa

SEQ ID NO: 18564 - RNA, 21 nt, synthetic construct
  source 1..21: mol_type = other RNA
aataccctctactttcttgtg

SEQ ID NO: 18565 - RNA, 21 nt, synthetic construct
  source 1..21: mol_type = other RNA
aataccctgtatgaagggaag

SEQ ID NO: 18566 - RNA, 21 nt, synthetic construct
  source 1..21: mol_type = other RNA
aataccgttcagagctgccac

SEQ ID NO: 18567 - RNA, 21 nt, synthetic construct
  source 1..21: mol_type = other RNA
aatacctgttcctttcagaaa

SEQ ID NO: 18568 - RNA, 21 nt, synthetic construct
  source 1..21: mol_type = other RNA
aatactccagacttttcctca

SEQ ID NO: 18569 - RNA, 21 nt, synthetic construct
  source 1..21: mol_type = other RNA
aatactgattttcaccatgaa

SEQ ID NO: 18570 - RNA, 21 nt, synthetic construct
  source 1..21: mol_type = other RNA
aatagaaaccaagatatgtct

SEQ ID NO: 18571 - RNA, 21 nt, synthetic construct
  source 1..21: mol_type = other RNA
aatagagggtaaacctgaggc

SEQ ID NO: 18572 - RNA, 21 nt, synthetic construct
  source 1..21: mol_type = other RNA
aatagtcgtgtgagtcctgac

SEQ ID NO: 18573 - RNA, 21 nt, synthetic construct
  source 1..21: mol_type = other RNA
aatatgatttcccatcttgca

SEQ ID NO: 18574 - RNA, 21 nt, synthetic construct
  source 1..21: mol_type = other RNA
aatattgcatgtgatgcaagt

SEQ ID NO: 18575 - RNA, 21 nt, synthetic construct
  source 1..21: mol_type = other RNA
aatcaaatgacctccaaacaa

SEQ ID NO: 18576 - RNA, 21 nt, synthetic construct
  source 1..21: mol_type = other RNA
aatcaacaggcttcagagact

SEQ ID NO: 18577 - RNA, 21 nt, synthetic construct
  source 1..21: mol_type = other RNA
aatcaagcgagttcgagactc

SEQ ID NO: 18578 - RNA, 21 nt, synthetic construct
  source 1..21: mol_type = other RNA
aatcaagggcagtcccaaggt

SEQ ID NO: 18579 - RNA, 21 nt, synthetic construct
  source 1..21: mol_type = other RNA
aatcaagtgcatgcaaaatac

SEQ ID NO: 18580 - RNA, 21 nt, synthetic construct
  source 1..21: mol_type = other RNA
aatcacagaagcaagtaaaag

SEQ ID NO: 18581 - RNA, 21 nt, synthetic construct
  source 1..21: mol_type = other RNA
aatcagtattcaaaatcaagc

SEQ ID NO: 18582 - RNA, 21 nt, synthetic construct
  source 1..21: mol_type = other RNA
aatcagtttttgagatatgcc

SEQ ID NO: 18583 - RNA, 21 nt, synthetic construct
  source 1..21: mol_type = other RNA
aatcatattgagtcttgacag

SEQ ID NO: 18584 - RNA, 21 nt, synthetic construct
  source 1..21: mol_type = other RNA
aatccacctgcaagctgtgat

SEQ ID NO: 18585 - RNA, 21 nt, synthetic construct
  source 1..21: mol_type = other RNA
aatccagagcttcagattctg

SEQ ID NO: 18586 - RNA, 21 nt, synthetic construct
  source 1..21: mol_type = other RNA
aatccaggtgaaagcagtcaa

SEQ ID NO: 18587 - RNA, 21 nt, synthetic construct
  source 1..21: mol_type = other RNA
aatccatcctggtttcagata

SEQ ID NO: 18588 - RNA, 21 nt, synthetic construct
  source 1..21: mol_type = other RNA
aatccatctacacatgtatgc

SEQ ID NO: 18589 - RNA, 21 nt, synthetic construct
  source 1..21: mol_type = other RNA
aatcccatctaaaacgtaatg

SEQ ID NO: 18590 - RNA, 21 nt, synthetic construct
  source 1..21: mol_type = other RNA
aatccttagtgaacactgagc

SEQ ID NO: 18591 - RNA, 21 nt, synthetic construct
  source 1..21: mol_type = other RNA
aatcggagacatttggttgac

SEQ ID NO: 18592 - RNA, 21 nt, synthetic construct
  source 1..21: mol_type = other RNA
aatcgtagaaattccccttat

SEQ ID NO: 18593 - RNA, 21 nt, synthetic construct
  source 1..21: mol_type = other RNA
aatctagtgccacacagtgac

SEQ ID NO: 18594 - RNA, 21 nt, synthetic construct
  source 1..21: mol_type = other RNA
aatctctccaatcaaatgacc

SEQ ID NO: 18595 - RNA, 21 nt, synthetic construct
  source 1..21: mol_type = other RNA
aatctcttgctctttgtttct

SEQ ID NO: 18596 - RNA, 21 nt, synthetic construct
  source 1..21: mol_type = other RNA
aatctgaagctctggattttc

SEQ ID NO: 18597 - RNA, 21 nt, synthetic construct
  source 1..21: mol_type = other RNA
aatctgctctttgttgaaaat

SEQ ID NO: 18598 - RNA, 21 nt, synthetic construct
  source 1..21: mol_type = other RNA
aatctggataatattgagaca

SEQ ID NO: 18599 - RNA, 21 nt, synthetic construct
  source 1..21: mol_type = other RNA
aatctgtgagttctgtagccc

SEQ ID NO: 18600 - RNA, 21 nt, synthetic construct
  source 1..21: mol_type = other RNA
aatgaaatctagtgccacaca

SEQ ID NO: 18601 - RNA, 21 nt, synthetic construct
  source 1..21: mol_type = other RNA
aatgaaatgaatggtgcttac

SEQ ID NO: 18602 - RNA, 21 nt, synthetic construct
  source 1..21: mol_type = other RNA
aatgaatcaagggcagtccca

SEQ ID NO: 18603 - RNA, 21 nt, synthetic construct
  source 1..21: mol_type = other RNA
aatgaatggtgcttacttcaa

SEQ ID NO: 18604 - RNA, 21 nt, synthetic construct
  source 1..21: mol_type = other RNA
aatgacatacagactgcaggg

SEQ ID NO: 18605 - RNA, 21 nt, synthetic construct
  source 1..21: mol_type = other RNA
aatgacctccaaacaatacac

SEQ ID NO: 18606 - RNA, 21 nt, synthetic construct
  source 1..21: mol_type = other RNA
aatgactgttccattgtgttc

SEQ ID NO: 18607 - RNA, 21 nt, synthetic construct
  source 1..21: mol_type = other RNA
aatgagcaggaggggaaaagt

SEQ ID NO: 18608 - RNA, 21 nt, synthetic construct
  source 1..21: mol_type = other RNA
aatgaggcatcactgccatca

SEQ ID NO: 18609 - RNA, 21 nt, synthetic construct
  source 1..21: mol_type = other RNA
aatgagttgtcctgtgagatc

SEQ ID NO: 18610 - RNA, 21 nt, synthetic construct
  source 1..21: mol_type = other RNA
aatgatcagcaaagagaagga

SEQ ID NO: 18611 - RNA, 21 nt, synthetic construct
  source 1..21: mol_type = other RNA
aatgatccttctctttgctga

SEQ ID NO: 18612 - RNA, 21 nt, synthetic construct
  source 1..21: mol_type = other RNA
aatgatgctcttttgctgcac

SEQ ID NO: 18613 - RNA, 21 nt, synthetic construct
  source 1..21: mol_type = other RNA
aatgcagttaaagatttcacc

SEQ ID NO: 18614 - RNA, 21 nt, synthetic construct
  source 1..21: mol_type = other RNA
aatgccagtaaactagctgca

SEQ ID NO: 18615 - RNA, 21 nt, synthetic construct
  source 1..21: mol_type = other RNA
aatgccattaacagtcaggct

SEQ ID NO: 18616 - RNA, 21 nt, synthetic construct
  source 1..21: mol_type = other RNA
aatgcctaatggtgctacagt

SEQ ID NO: 18617 - RNA, 21 nt, synthetic construct
  source 1..21: mol_type = other RNA
aatgctaaatacctgttcctt

SEQ ID NO: 18618 - RNA, 21 nt, synthetic construct
  source 1..21: mol_type = other RNA
aatggaaacacaatctggata

SEQ ID NO: 18619 - RNA, 21 nt, synthetic construct
  source 1..21: mol_type = other RNA
aatggaacagtcattgtccct

SEQ ID NO: 18620 - RNA, 21 nt, synthetic construct
  source 1..21: mol_type = other RNA
aatggaagcccactgcctgag

SEQ ID NO: 18621 - RNA, 21 nt, synthetic construct
  source 1..21: mol_type = other RNA
aatggacttagtctgttgccc

SEQ ID NO: 18622 - RNA, 21 nt, synthetic construct
  source 1..21: mol_type = other RNA
aatggagaaagacgtaacttc

SEQ ID NO: 18623 - RNA, 21 nt, synthetic construct
  source 1..21: mol_type = other RNA
aatggagacaccaagtggcac

SEQ ID NO: 18624 - RNA, 21 nt, synthetic construct
  source 1..21: mol_type = other RNA
aatggaggaataaaacgcaca

SEQ ID NO: 18625 - RNA, 21 nt, synthetic construct
  source 1..21: mol_type = other RNA
aatggcatttatgtgagatgt

SEQ ID NO: 18626 - RNA, 21 nt, synthetic construct
  source 1..21: mol_type = other RNA
aatggctcagtctctgaagcc

SEQ ID NO: 18627 - RNA, 21 nt, synthetic construct
  source 1..21: mol_type = other RNA
aatgggactggaggaagtaca

SEQ ID NO: 18628 - RNA, 21 nt, synthetic construct
  source 1..21: mol_type = other RNA
aatgggaggtgatggtatcag

SEQ ID NO: 18629 - RNA, 21 nt, synthetic construct
  source 1..21: mol_type = other RNA
aatggtctgttttggagaagt

SEQ ID NO: 18630 - RNA, 21 nt, synthetic construct
  source 1..21: mol_type = other RNA
aatggtgctacagtttctgcc

SEQ ID NO: 18631 - RNA, 21 nt, synthetic construct
  source 1..21: mol_type = other RNA
aatggtgcttacttcaagcaa

SEQ ID NO: 18632 - RNA, 21 nt, synthetic construct
  source 1..21: mol_type = other RNA
aatggtggagttttagaagaa

SEQ ID NO: 18633 - RNA, 21 nt, synthetic construct
  source 1..21: mol_type = other RNA
aatgtaccaagttgaaatgaa

SEQ ID NO: 18634 - RNA, 21 nt, synthetic construct
  source 1..21: mol_type = other RNA
aatgtcagaacacctcaagca

SEQ ID NO: 18635 - RNA, 21 nt, synthetic construct
  source 1..21: mol_type = other RNA
aatgtcagggccagtcacagt

SEQ ID NO: 18636 - RNA, 21 nt, synthetic construct
  source 1..21: mol_type = other RNA
aatgtccaaatgggactggag

SEQ ID NO: 18637 - RNA, 21 nt, synthetic construct
  source 1..21: mol_type = other RNA
aatgtctccgatttgagtgat

SEQ ID NO: 18638 - RNA, 21 nt, synthetic construct
  source 1..21: mol_type = other RNA
aatgtgatcccaaagcaagat

SEQ ID NO: 18639 - RNA, 21 nt, synthetic construct
  source 1..21: mol_type = other RNA
aatgtgcagcaaaagagcatc

SEQ ID NO: 18640 - RNA, 21 nt, synthetic construct
  source 1..21: mol_type = other RNA
aatgttcttgtcatggtaatt

SEQ ID NO: 18641 - RNA, 21 nt, synthetic construct
  source 1..21: mol_type = other RNA
aatgttttcatggtgaaaatc

SEQ ID NO: 18642 - RNA, 21 nt, synthetic construct
  source 1..21: mol_type = other RNA
aatgtttttcctgtgcctgac

SEQ ID NO: 18643 - RNA, 21 nt, synthetic construct
  source 1..21: mol_type = other RNA
aattaaggtggaacctggatg

SEQ ID NO: 18644 - RNA, 21 nt, synthetic construct
  source 1..21: mol_type = other RNA
aattaccatgacaagaacatt

SEQ ID NO: 18645 - RNA, 21 nt, synthetic construct
  source 1..21: mol_type = other RNA
aattagcacttttcccctcct

SEQ ID NO: 18646 - RNA, 21 nt, synthetic construct
  source 1..21: mol_type = other RNA
aattattctgaggcctttcag

SEQ ID NO: 18647 - RNA, 21 nt, synthetic construct
  source 1..21: mol_type = other RNA
aattattgagaacagaagcag

SEQ ID NO: 18648 - RNA, 21 nt, synthetic construct
  source 1..21: mol_type = other RNA
aattcaatccatcctggtttc

SEQ ID NO: 18649 - RNA, 21 nt, synthetic construct
  source 1..21: mol_type = other RNA
aattccaacatgcctgggggg

SEQ ID NO: 18650 - RNA, 21 nt, synthetic construct
  source 1..21: mol_type = other RNA
aattccccttatagtcagacc

SEQ ID NO: 18651 - RNA, 21 nt, synthetic construct
  source 1..21: mol_type = other RNA
aattccgcacagacctctaac

SEQ ID NO: 18652 - RNA, 21 nt, synthetic construct
  source 1..21: mol_type = other RNA
aattctgttcaggttccagca

SEQ ID NO: 18653 - RNA, 21 nt, synthetic construct
  source 1..21: mol_type = other RNA
aattcttcaccagacgctagc

SEQ ID NO: 18654 - RNA, 21 nt, synthetic construct
  source 1..21: mol_type = other RNA
aattcttcagtatcaacccaa

SEQ ID NO: 18655 - RNA, 21 nt, synthetic construct
  source 1..21: mol_type = other RNA
aattgaaacaagaccaaaagg

SEQ ID NO: 18656 - RNA, 21 nt, synthetic construct
  source 1..21: mol_type = other RNA
aattgaaggcccctcgttttc

SEQ ID NO: 18657 - RNA, 21 nt, synthetic construct
  source 1..21: mol_type = other RNA
aattgatctgccctgaggtat

SEQ ID NO: 18658 - RNA, 21 nt, synthetic construct
  source 1..21: mol_type = other RNA
aattgatggcagtgatgcctc

SEQ ID NO: 18659 - RNA, 21 nt, synthetic construct
  source 1..21: mol_type = other RNA
aattgctgctggaacctgaac

SEQ ID NO: 18660 - RNA, 21 nt, synthetic construct
  source 1..21: mol_type = other RNA
aattgcttctttctccccctc

SEQ ID NO: 18661 - RNA, 21 nt, synthetic construct
  source 1..21: mol_type = other RNA
aattggcctgtgcatctgact

SEQ ID NO: 18662 - RNA, 21 nt, synthetic construct
  source 1..21: mol_type = other RNA
aattggtgggttatgcttgag

SEQ ID NO: 18663 - RNA, 21 nt, synthetic construct
  source 1..21: mol_type = other RNA
aattgtgatggtggtggtggt

SEQ ID NO: 18664 - RNA, 21 nt, synthetic construct
  source 1..21: mol_type = other RNA
aattgtgtgaacaggaatgac

SEQ ID NO: 18665 - RNA, 21 nt, synthetic construct
  source 1..21: mol_type = other RNA
aatttattggatacacctgtc

SEQ ID NO: 18666 - RNA, 21 nt, synthetic construct
  source 1..21: mol_type = other RNA
aatttccagtgtattgtttgg

SEQ ID NO: 18667 - RNA, 21 nt, synthetic construct
  source 1..21: mol_type = other RNA
aatttcttgatctgaaggagc

SEQ ID NO: 18668 - RNA, 21 nt, synthetic construct
  source 1..21: mol_type = other RNA
aatttgcaagctcctggtggc

SEQ ID NO: 18669 - RNA, 21 nt, synthetic construct
  source 1..21: mol_type = other RNA
aatttggaaggtgactctata

SEQ ID NO: 18670 - RNA, 21 nt, synthetic construct
  source 1..21: mol_type = other RNA
aattttatagagtcaccttcc

SEQ ID NO: 18671 - RNA, 21 nt, synthetic construct
  source 1..21: mol_type = other RNA
aatttttgctgctgttgctgg

SEQ ID NO: 18672 - RNA, 21 nt, synthetic construct
  source 1..21: mol_type = other RNA
aatttttggtagcagtggaga

SEQ ID NO: 18673 - RNA, 21 nt, synthetic construct
  source 1..21: mol_type = other RNA
acaaaacatggaaaaaggtaa

SEQ ID NO: 18674 - RNA, 21 nt, synthetic construct
  source 1..21: mol_type = other RNA
acaaaatgaaatgaatggtgc

SEQ ID NO: 18675 - RNA, 21 nt, synthetic construct
  source 1..21: mol_type = other RNA
acaaacacaaccatcccagag

SEQ ID NO: 18676 - RNA, 21 nt, synthetic construct
  source 1..21: mol_type = other RNA
acaaaccactgctgcagaact

SEQ ID NO: 18677 - RNA, 21 nt, synthetic construct
  source 1..21: mol_type = other RNA
acaaagagcaagagattctga

SEQ ID NO: 18678 - RNA, 21 nt, synthetic construct
  source 1..21: mol_type = other RNA
acaaagagcagattcccaaac

SEQ ID NO: 18679 - RNA, 21 nt, synthetic construct
  source 1..21: mol_type = other RNA
acaaagctagcgtctggtgaa

SEQ ID NO: 18680 - RNA, 21 nt, synthetic construct
  source 1..21: mol_type = other RNA
acaaagctccagaatggaagc

SEQ ID NO: 18681 - RNA, 21 nt, synthetic construct
  source 1..21: mol_type = other RNA
acaaatgtaccaagttgaaat

SEQ ID NO: 18682 - RNA, 21 nt, synthetic construct
  source 1..21: mol_type = other RNA
acaacaagcttcagttctaca

SEQ ID NO: 18683 - RNA, 21 nt, synthetic construct
  source 1..21: mol_type = other RNA
acaacacagctggagcacaag

SEQ ID NO: 18684 - RNA, 21 nt, synthetic construct
  source 1..21: mol_type = other RNA
acaacacttttaagggaagtg

SEQ ID NO: 18685 - RNA, 21 nt, synthetic construct
  source 1..21: mol_type = other RNA
acaaccatcccagagttcaca

SEQ ID NO: 18686 - RNA, 21 nt, synthetic construct
  source 1..21: mol_type = other RNA
acaactacaacaacaaaaatc

SEQ ID NO: 18687 - RNA, 21 nt, synthetic construct
  source 1..21: mol_type = other RNA
acaactcattagtagcctgac

SEQ ID NO: 18688 - RNA, 21 nt, synthetic construct
  source 1..21: mol_type = other RNA
acaactgccagcagttgatga

SEQ ID NO: 18689 - RNA, 21 nt, synthetic construct
  source 1..21: mol_type = other RNA
acaacttcttcagaaaagaca

SEQ ID NO: 18690 - RNA, 21 nt, synthetic construct
  source 1..21: mol_type = other RNA
acaagaaacctgtattttgca

SEQ ID NO: 18691 - RNA, 21 nt, synthetic construct
  source 1..21: mol_type = other RNA
acaagaaagtagagggtattc

SEQ ID NO: 18692 - RNA, 21 nt, synthetic construct
  source 1..21: mol_type = other RNA
acaagaccaaaaggctaatgg

SEQ ID NO: 18693 - RNA, 21 nt, synthetic construct
  source 1..21: mol_type = other RNA
acaagaccaatgtcagaacac

SEQ ID NO: 18694 - RNA, 21 nt, synthetic construct
  source 1..21: mol_type = other RNA
acaagacccaaaacttgcatc

SEQ ID NO: 18695 - RNA, 21 nt, synthetic construct
  source 1..21: mol_type = other RNA
acaagatctcgtgtttgctcc

SEQ ID NO: 18696 - RNA, 21 nt, synthetic construct
  source 1..21: mol_type = other RNA
acaagctgcgcaacttgctca

SEQ ID NO: 18697 - RNA, 21 nt, synthetic construct
  source 1..21: mol_type = other RNA
acaagcttcagttctacaggg

SEQ ID NO: 18698 - RNA, 21 nt, synthetic construct
  source 1..21: mol_type = other RNA
acaaggagcaaacacgagatc

SEQ ID NO: 18699 - RNA, 21 nt, synthetic construct
  source 1..21: mol_type = other RNA
acaaggcagtgctaatgccta

SEQ ID NO: 18700 - RNA, 21 nt, synthetic construct
  source 1..21: mol_type = other RNA
acaagtcacaaatgtaccaag

SEQ ID NO: 18701 - RNA, 21 nt, synthetic construct
  source 1..21: mol_type = other RNA
acaatacacacctagtttcag

SEQ ID NO: 18702 - RNA, 21 nt, synthetic construct
  source 1..21: mol_type = other RNA
acaatacactggaaattccaa

SEQ ID NO: 18703 - RNA, 21 nt, synthetic construct
  source 1..21: mol_type = other RNA
acaatctggataatattgaga

SEQ ID NO: 18704 - RNA, 21 nt, synthetic construct
  source 1..21: mol_type = other RNA
acaatgactgttccattgtgt

SEQ ID NO: 18705 - RNA, 21 nt, synthetic construct
  source 1..21: mol_type = other RNA
acaatgatcagcaaagagaag

SEQ ID NO: 18706 - RNA, 21 nt, synthetic construct
  source 1..21: mol_type = other RNA
acaatggaacagtcattgtcc

SEQ ID NO: 18707 - RNA, 21 nt, synthetic construct
  source 1..21: mol_type = other RNA
acaatgttcttgtcatggtaa

SEQ ID NO: 18708 - RNA, 21 nt, synthetic construct
  source 1..21: mol_type = other RNA
acaattattctgaggcctttc

SEQ ID NO: 18709 - RNA, 21 nt, synthetic construct
  source 1..21: mol_type = other RNA
acaattgcttctttctccccc

SEQ ID NO: 18710 - RNA, 21 nt, synthetic construct
  source 1..21: mol_type = other RNA
acacaacacttttaagggaag

SEQ ID NO: 18711 - RNA, 21 nt, synthetic construct
  source 1..21: mol_type = other RNA
acacaaccatcccagagttca

SEQ ID NO: 18712 - RNA, 21 nt, synthetic construct
  source 1..21: mol_type = other RNA
acacaagaaagtagagggtat

SEQ ID NO: 18713 - RNA, 21 nt, synthetic construct
  source 1..21: mol_type = other RNA
acacaatctggataatattga

SEQ ID NO: 18714 - RNA, 21 nt, synthetic construct
  source 1..21: mol_type = other RNA
acacaatggaacagtcattgt

SEQ ID NO: 18715 - RNA, 21 nt, synthetic construct
  source 1..21: mol_type = other RNA
acacaattattctgaggcctt

SEQ ID NO: 18716 - RNA, 21 nt, synthetic construct
  source 1..21: mol_type = other RNA
acacacacatggtgaactcct

SEQ ID NO: 18717 - RNA, 21 nt, synthetic construct
  source 1..21: mol_type = other RNA
acacacatggtgaactcctgg

SEQ ID NO: 18718 - RNA, 21 nt, synthetic construct
  source 1..21: mol_type = other RNA
acacacctagtttcagagaat

SEQ ID NO: 18719 - RNA, 21 nt, synthetic construct
  source 1..21: mol_type = other RNA
acacagcaaccccaaactgag

SEQ ID NO: 18720 - RNA, 21 nt, synthetic construct
  source 1..21: mol_type = other RNA
acacagcaccaccagaaaaca

SEQ ID NO: 18721 - RNA, 21 nt, synthetic construct
  source 1..21: mol_type = other RNA
acacagcactatctgaaacca

SEQ ID NO: 18722 - RNA, 21 nt, synthetic construct
  source 1..21: mol_type = other RNA
acacagctggagcacaagtca

SEQ ID NO: 18723 - RNA, 21 nt, synthetic construct
  source 1..21: mol_type = other RNA
acacagtgactgcacatgagc

SEQ ID NO: 18724 - RNA, 21 nt, synthetic construct
  source 1..21: mol_type = other RNA
acacataactgcagtgggcct

SEQ ID NO: 18725 - RNA, 21 nt, synthetic construct
  source 1..21: mol_type = other RNA
acacatcctgaactttttgca

SEQ ID NO: 18726 - RNA, 21 nt, synthetic construct
  source 1..21: mol_type = other RNA
acacatctgcaagatgggaaa

SEQ ID NO: 18727 - RNA, 21 nt, synthetic construct
  source 1..21: mol_type = other RNA
acacatggtgaactcctggaa

SEQ ID NO: 18728 - RNA, 21 nt, synthetic construct
  source 1..21: mol_type = other RNA
acacatgtatgcagcccttct

SEQ ID NO: 18729 - RNA, 21 nt, synthetic construct
  source 1..21: mol_type = other RNA
acaccaaccaaaagaacagct

SEQ ID NO: 18730 - RNA, 21 nt, synthetic construct
  source 1..21: mol_type = other RNA
acaccaagtggcactctttca

SEQ ID NO: 18731 - RNA, 21 nt, synthetic construct
  source 1..21: mol_type = other RNA
acaccaccaccaccatcacaa

SEQ ID NO: 18732 - RNA, 21 nt, synthetic construct
  source 1..21: mol_type = other RNA
acaccaccactaccccaacca

SEQ ID NO: 18733 - RNA, 21 nt, synthetic construct
  source 1..21: mol_type = other RNA
acaccaggtgcacttctccaa

SEQ ID NO: 18734 - RNA, 21 nt, synthetic construct
  source 1..21: mol_type = other RNA
acacccagaaaacaacacagc

SEQ ID NO: 18735 - RNA, 21 nt, synthetic construct
  source 1..21: mol_type = other RNA
acaccccagctttagagcagc

SEQ ID NO: 18736 - RNA, 21 nt, synthetic construct
  source 1..21: mol_type = other RNA
acacctagtttcagagaataa

SEQ ID NO: 18737 - RNA, 21 nt, synthetic construct
  source 1..21: mol_type = other RNA
acacctcaagcataacccacc

SEQ ID NO: 18738 - RNA, 21 nt, synthetic construct
  source 1..21: mol_type = other RNA
acacctgtcaagactcaatat

SEQ ID NO: 18739 - RNA, 21 nt, synthetic construct
  source 1..21: mol_type = other RNA
acaccttttgcaacataagcc

SEQ ID NO: 18740 - RNA, 21 nt, synthetic construct
  source 1..21: mol_type = other RNA
acacgactattctggcttccc

SEQ ID NO: 18741 - RNA, 21 nt, synthetic construct
  source 1..21: mol_type = other RNA
acacgagatcttgtgccccca

SEQ ID NO: 18742 - RNA, 21 nt, synthetic construct
  source 1..21: mol_type = other RNA
acactcaaaagcatgctgctc

SEQ ID NO: 18743 - RNA, 21 nt, synthetic construct
  source 1..21: mol_type = other RNA
acactcagacccctccccaga

SEQ ID NO: 18744 - RNA, 21 nt, synthetic construct
  source 1..21: mol_type = other RNA
acactgagctttgcttgaagt

SEQ ID NO: 18745 - RNA, 21 nt, synthetic construct
  source 1..21: mol_type = other RNA
acactggaaattccaacatgc

SEQ ID NO: 18746 - RNA, 21 nt, synthetic construct
  source 1..21: mol_type = other RNA
acactggggacataagttttt

SEQ ID NO: 18747 - RNA, 21 nt, synthetic construct
  source 1..21: mol_type = other RNA
acactgtctcaatattatcca

SEQ ID NO: 18748 - RNA, 21 nt, synthetic construct
  source 1..21: mol_type = other RNA
acacttggaataccctctact

SEQ ID NO: 18749 - RNA, 21 nt, synthetic construct
  source 1..21: mol_type = other RNA
acacttttaagggaagtgaaa

SEQ ID NO: 18750 - RNA, 21 nt, synthetic construct
  source 1..21: mol_type = other RNA
acagaacctctggctacaaag

SEQ ID NO: 18751 - RNA, 21 nt, synthetic construct
  source 1..21: mol_type = other RNA
acagaactcacagattctttc

SEQ ID NO: 18752 - RNA, 21 nt, synthetic construct
  source 1..21: mol_type = other RNA
acagaagcaagaacagcagca

SEQ ID NO: 18753 - RNA, 21 nt, synthetic construct
  source 1..21: mol_type = other RNA
acagaagcaagtaaaagttga

SEQ ID NO: 18754 - RNA, 21 nt, synthetic construct
  source 1..21: mol_type = other RNA
acagaagcagctgttcttttg

SEQ ID NO: 18755 - RNA, 21 nt, synthetic construct
  source 1..21: mol_type = other RNA
acagaattcttcaccagacgc

SEQ ID NO: 18756 - RNA, 21 nt, synthetic construct
  source 1..21: mol_type = other RNA
acagaccatttaccaaaagct

SEQ ID NO: 18757 - RNA, 21 nt, synthetic construct
  source 1..21: mol_type = other RNA
acagacctctaactctgagct

SEQ ID NO: 18758 - RNA, 21 nt, synthetic construct
  source 1..21: mol_type = other RNA
acagactaagtccattcctga

SEQ ID NO: 18759 - RNA, 21 nt, synthetic construct
  source 1..21: mol_type = other RNA
acagactacacatcctgaact

SEQ ID NO: 18760 - RNA, 21 nt, synthetic construct
  source 1..21: mol_type = other RNA
acagactgcagggacaatgac

SEQ ID NO: 18761 - RNA, 21 nt, synthetic construct
  source 1..21: mol_type = other RNA
acagattctttcttatcactc

SEQ ID NO: 18762 - RNA, 21 nt, synthetic construct
  source 1..21: mol_type = other RNA
acagcaaccccaaactgagtc

SEQ ID NO: 18763 - RNA, 21 nt, synthetic construct
  source 1..21: mol_type = other RNA
acagcaccaccagaaaacaaa

SEQ ID NO: 18764 - RNA, 21 nt, synthetic construct
  source 1..21: mol_type = other RNA
acagcactatctgaaaccagg

SEQ ID NO: 18765 - RNA, 21 nt, synthetic construct
  source 1..21: mol_type = other RNA
acagcacttgaatcaacaggc

SEQ ID NO: 18766 - RNA, 21 nt, synthetic construct
  source 1..21: mol_type = other RNA
acagcagcaaaaattacaaat

SEQ ID NO: 18767 - RNA, 21 nt, synthetic construct
  source 1..21: mol_type = other RNA
acagcagcaaacacagcaacc

SEQ ID NO: 18768 - RNA, 21 nt, synthetic construct
  source 1..21: mol_type = other RNA
acagctgcttctgttctcaat

SEQ ID NO: 18769 - RNA, 21 nt, synthetic construct
  source 1..21: mol_type = other RNA
acagctggagcacaagtcaca

SEQ ID NO: 18770 - RNA, 21 nt, synthetic construct
  source 1..21: mol_type = other RNA
acagcttgcaggtggattctc

SEQ ID NO: 18771 - RNA, 21 nt, synthetic construct
  source 1..21: mol_type = other RNA
acaggaaaaacatttgcatgg

SEQ ID NO: 18772 - RNA, 21 nt, synthetic construct
  source 1..21: mol_type = other RNA
acaggaatgacatacagactg

SEQ ID NO: 18773 - RNA, 21 nt, synthetic construct
  source 1..21: mol_type = other RNA
acaggacaactcattagtagc

SEQ ID NO: 18774 - RNA, 21 nt, synthetic construct
  source 1..21: mol_type = other RNA
acaggacaactgccagcagtt

SEQ ID NO: 18775 - RNA, 21 nt, synthetic construct
  source 1..21: mol_type = other RNA
acaggagcagaagtcacaaca

SEQ ID NO: 18776 - RNA, 21 nt, synthetic construct
  source 1..21: mol_type = other RNA
acaggatagaaccaaccatgt

SEQ ID NO: 18777 - RNA, 21 nt, synthetic construct
  source 1..21: mol_type = other RNA
acaggcagcacaaacacaacc

SEQ ID NO: 18778 - RNA, 21 nt, synthetic construct
  source 1..21: mol_type = other RNA
acaggcatgtggcttgcatcc

SEQ ID NO: 18779 - RNA, 21 nt, synthetic construct
  source 1..21: mol_type = other RNA
acaggccaattaaggtggaac

SEQ ID NO: 18780 - RNA, 21 nt, synthetic construct
  source 1..21: mol_type = other RNA
acaggcctcactcaccactgc

SEQ ID NO: 18781 - RNA, 21 nt, synthetic construct
  source 1..21: mol_type = other RNA
acaggcttcagagactgagcc

SEQ ID NO: 18782 - RNA, 21 nt, synthetic construct
  source 1..21: mol_type = other RNA
acagggtattccataataact

SEQ ID NO: 18783 - RNA, 21 nt, synthetic construct
  source 1..21: mol_type = other RNA
acaggtatttagcattgcagc

SEQ ID NO: 18784 - RNA, 21 nt, synthetic construct
  source 1..21: mol_type = other RNA
acaggtgctttcaagaacagg

SEQ ID NO: 18785 - RNA, 21 nt, synthetic construct
  source 1..21: mol_type = other RNA
acaggtgtatccaataaattt

SEQ ID NO: 18786 - RNA, 21 nt, synthetic construct
  source 1..21: mol_type = other RNA
acaggttcctcagcttccttc

SEQ ID NO: 18787 - RNA, 21 nt, synthetic construct
  source 1..21: mol_type = other RNA
acaggtttcttgttcaaacaa

SEQ ID NO: 18788 - RNA, 21 nt, synthetic construct
  source 1..21: mol_type = other RNA
acagtcaggctactaatgagt

SEQ ID NO: 18789 - RNA, 21 nt, synthetic construct
  source 1..21: mol_type = other RNA
acagtcattgtccctgcagtc

SEQ ID NO: 18790 - RNA, 21 nt, synthetic construct
  source 1..21: mol_type = other RNA
acagtgactgcacatgagctt

SEQ ID NO: 18791 - RNA, 21 nt, synthetic construct
  source 1..21: mol_type = other RNA
acagtggaccaacatctccag

SEQ ID NO: 18792 - RNA, 21 nt, synthetic construct
  source 1..21: mol_type = other RNA
acagtgttttttccaggagtt

SEQ ID NO: 18793 - RNA, 21 nt, synthetic construct
  source 1..21: mol_type = other RNA
acagttagtgaaccttctctc

SEQ ID NO: 18794 - RNA, 21 nt, synthetic construct
  source 1..21: mol_type = other RNA
acagtttctgcctcttccgtg

SEQ ID NO: 18795 - RNA, 21 nt, synthetic construct
  source 1..21: mol_type = other RNA
acagttttgactagacaaacc

SEQ ID NO: 18796 - RNA, 21 nt, synthetic construct
  source 1..21: mol_type = other RNA
acataaatgccattaacagtc

SEQ ID NO: 18797 - RNA, 21 nt, synthetic construct
  source 1..21: mol_type = other RNA
acataaccatgcaaatgtttt

SEQ ID NO: 18798 - RNA, 21 nt, synthetic construct
  source 1..21: mol_type = other RNA
acataactgcagtgggcctga

SEQ ID NO: 18799 - RNA, 21 nt, synthetic construct
  source 1..21: mol_type = other RNA
acataagcctcataaacaggc

SEQ ID NO: 18800 - RNA, 21 nt, synthetic construct
  source 1..21: mol_type = other RNA
acataagtttttcagtttggg

SEQ ID NO: 18801 - RNA, 21 nt, synthetic construct
  source 1..21: mol_type = other RNA
acatacagactgcagggacaa

SEQ ID NO: 18802 - RNA, 21 nt, synthetic construct
  source 1..21: mol_type = other RNA
acatccagggaaccacaaagc

SEQ ID NO: 18803 - RNA, 21 nt, synthetic construct
  source 1..21: mol_type = other RNA
acatcctgaactttttgcagg

SEQ ID NO: 18804 - RNA, 21 nt, synthetic construct
  source 1..21: mol_type = other RNA
acatctcacataaatgccatt

SEQ ID NO: 18805 - RNA, 21 nt, synthetic construct
  source 1..21: mol_type = other RNA
acatctccagttccaaaaacc

SEQ ID NO: 18806 - RNA, 21 nt, synthetic construct
  source 1..21: mol_type = other RNA
acatctccctcaaaaccagca

SEQ ID NO: 18807 - RNA, 21 nt, synthetic construct
  source 1..21: mol_type = other RNA
acatctgcaagatgggaaatc

SEQ ID NO: 18808 - RNA, 21 nt, synthetic construct
  source 1..21: mol_type = other RNA
acatgagcttttggtaaatgg

SEQ ID NO: 18809 - RNA, 21 nt, synthetic construct
  source 1..21: mol_type = other RNA
acatgcctggggggctcccaa

SEQ ID NO: 18810 - RNA, 21 nt, synthetic construct
  source 1..21: mol_type = other RNA
acatgcctgtatgcacacagc

SEQ ID NO: 18811 - RNA, 21 nt, synthetic construct
  source 1..21: mol_type = other RNA
acatggaaaaaggtaactaag

SEQ ID NO: 18812 - RNA, 21 nt, synthetic construct
  source 1..21: mol_type = other RNA
acatggtgaactcctggaaaa

SEQ ID NO: 18813 - RNA, 21 nt, synthetic construct
  source 1..21: mol_type = other RNA
acatggttggttctatcctgt

SEQ ID NO: 18814 - RNA, 21 nt, synthetic construct
  source 1..21: mol_type = other RNA
acatgtatgcagcccttctcc

SEQ ID NO: 18815 - RNA, 21 nt, synthetic construct
  source 1..21: mol_type = other RNA
acatgtgtagatggattagga

SEQ ID NO: 18816 - RNA, 21 nt, synthetic construct
  source 1..21: mol_type = other RNA
acattatcacagcttgcaggt

SEQ ID NO: 18817 - RNA, 21 nt, synthetic construct
  source 1..21: mol_type = other RNA
acattatgagtctcgaactcg

SEQ ID NO: 18818 - RNA, 21 nt, synthetic construct
  source 1..21: mol_type = other RNA
acattcttccactttagtctg

SEQ ID NO: 18819 - RNA, 21 nt, synthetic construct
  source 1..21: mol_type = other RNA
acattggtcttgttttctcag

SEQ ID NO: 18820 - RNA, 21 nt, synthetic construct
  source 1..21: mol_type = other RNA
acatttcaacttttacttgct

SEQ ID NO: 18821 - RNA, 21 nt, synthetic construct
  source 1..21: mol_type = other RNA
acatttctggcacttacctac

SEQ ID NO: 18822 - RNA, 21 nt, synthetic construct
  source 1..21: mol_type = other RNA
acatttgcatggttatgtatc

SEQ ID NO: 18823 - RNA, 21 nt, synthetic construct
  source 1..21: mol_type = other RNA
acatttggttgactgctttca

SEQ ID NO: 18824 - RNA, 21 nt, synthetic construct
  source 1..21: mol_type = other RNA
acatttgtgacttgtgctcca

SEQ ID NO: 18825 - RNA, 21 nt, synthetic construct
  source 1..21: mol_type = other RNA
accaaaaattggtgggttatg

SEQ ID NO: 18826 - RNA, 21 nt, synthetic construct
  source 1..21: mol_type = other RNA
accaaaagaacagctgcttct

SEQ ID NO: 18827 - RNA, 21 nt, synthetic construct
  source 1..21: mol_type = other RNA
accaaaagctcatgtgcagtc

SEQ ID NO: 18828 - RNA, 21 nt, synthetic construct
  source 1..21: mol_type = other RNA
accaaaaggctaatggagaaa

SEQ ID NO: 18829 - RNA, 21 nt, synthetic construct
  source 1..21: mol_type = other RNA
accaaagtaacacaacacttt

SEQ ID NO: 18830 - RNA, 21 nt, synthetic construct
  source 1..21: mol_type = other RNA
accaaatgtctccgatttgag

SEQ ID NO: 18831 - RNA, 21 nt, synthetic construct
  source 1..21: mol_type = other RNA
accaacatctccagttccaaa

SEQ ID NO: 18832 - RNA, 21 nt, synthetic construct
  source 1..21: mol_type = other RNA
accaaccaaaagaacagctgc

SEQ ID NO: 18833 - RNA, 21 nt, synthetic construct
  source 1..21: mol_type = other RNA
accaaccatgttgagggcaac

SEQ ID NO: 18834 - RNA, 21 nt, synthetic construct
  source 1..21: mol_type = other RNA
accaagatatgtctggtcaac

SEQ ID NO: 18835 - RNA, 21 nt, synthetic construct
  source 1..21: mol_type = other RNA
accaagcggaatcccatctaa

SEQ ID NO: 18836 - RNA, 21 nt, synthetic construct
  source 1..21: mol_type = other RNA
accaagtggcactctttcaaa

SEQ ID NO: 18837 - RNA, 21 nt, synthetic construct
  source 1..21: mol_type = other RNA
accaagttgaaatgaatcaag

SEQ ID NO: 18838 - RNA, 21 nt, synthetic construct
  source 1..21: mol_type = other RNA
accaatgtcagaacacctcaa

SEQ ID NO: 18839 - RNA, 21 nt, synthetic construct
  source 1..21: mol_type = other RNA
accaatttttggtagcagtgg

SEQ ID NO: 18840 - RNA, 21 nt, synthetic construct
  source 1..21: mol_type = other RNA
accacaaagctagcgtctggt

SEQ ID NO: 18841 - RNA, 21 nt, synthetic construct
  source 1..21: mol_type = other RNA
accacaccaccaccaccatca

SEQ ID NO: 18842 - RNA, 21 nt, synthetic construct
  source 1..21: mol_type = other RNA
accacatctcacataaatgcc

SEQ ID NO: 18843 - RNA, 21 nt, synthetic construct
  source 1..21: mol_type = other RNA
accaccaccaccatcacaatt

SEQ ID NO: 18844 - RNA, 21 nt, synthetic construct
  source 1..21: mol_type = other RNA
accaccaccatcacaattgct

SEQ ID NO: 18845 - RNA, 21 nt, synthetic construct
  source 1..21: mol_type = other RNA
accaccactaccccaaccaaa

SEQ ID NO: 18846 - RNA, 21 nt, synthetic construct
  source 1..21: mol_type = other RNA
accaccagaaaacaaaacatg

SEQ ID NO: 18847 - RNA, 21 nt, synthetic construct
  source 1..21: mol_type = other RNA
accaccatcacaattgcttct

SEQ ID NO: 18848 - RNA, 21 nt, synthetic construct
  source 1..21: mol_type = other RNA
accaccttcccagagtcctaa

SEQ ID NO: 18849 - RNA, 21 nt, synthetic construct
  source 1..21: mol_type = other RNA
accactaccccaaccaaagta

SEQ ID NO: 18850 - RNA, 21 nt, synthetic construct
  source 1..21: mol_type = other RNA
accactgcagctggctttgga

SEQ ID NO: 18851 - RNA, 21 nt, synthetic construct
  source 1..21: mol_type = other RNA
accactgctgcagaacttgat

SEQ ID NO: 18852 - RNA, 21 nt, synthetic construct
  source 1..21: mol_type = other RNA
accagaaaacaaaacatggaa

SEQ ID NO: 18853 - RNA, 21 nt, synthetic construct
  source 1..21: mol_type = other RNA
accagaacaactacaacaaca

SEQ ID NO: 18854 - RNA, 21 nt, synthetic construct
  source 1..21: mol_type = other RNA
accagacatatcttggtttct

SEQ ID NO: 18855 - RNA, 21 nt, synthetic construct
  source 1..21: mol_type = other RNA
accagacgctagctttgtggt

SEQ ID NO: 18856 - RNA, 21 nt, synthetic construct
  source 1..21: mol_type = other RNA
accagcaacagcagcaaaaat

SEQ ID NO: 18857 - RNA, 21 nt, synthetic construct
  source 1..21: mol_type = other RNA
accaggagcttgcaaattgct

SEQ ID NO: 18858 - RNA, 21 nt, synthetic construct
  source 1..21: mol_type = other RNA
accaggatggattgaattgaa

SEQ ID NO: 18859 - RNA, 21 nt, synthetic construct
  source 1..21: mol_type = other RNA
accagggaggaagtcacactc

SEQ ID NO: 18860 - RNA, 21 nt, synthetic construct
  source 1..21: mol_type = other RNA
accaggtgcacttctccaaaa

SEQ ID NO: 18861 - RNA, 21 nt, synthetic construct
  source 1..21: mol_type = other RNA
accagtttttcaacacataac

SEQ ID NO: 18862 - RNA, 21 nt, synthetic construct
  source 1..21: mol_type = other RNA
accataaggctcttactctca

SEQ ID NO: 18863 - RNA, 21 nt, synthetic construct
  source 1..21: mol_type = other RNA
accatcacaattgcttctttc

SEQ ID NO: 18864 - RNA, 21 nt, synthetic construct
  source 1..21: mol_type = other RNA
accatcacctcccatttgcca

SEQ ID NO: 18865 - RNA, 21 nt, synthetic construct
  source 1..21: mol_type = other RNA
accatcccagagttcacatct

SEQ ID NO: 18866 - RNA, 21 nt, synthetic construct
  source 1..21: mol_type = other RNA
accatgaaaacattcttccac

SEQ ID NO: 18867 - RNA, 21 nt, synthetic construct
  source 1..21: mol_type = other RNA
accatgaaatcaagtgcatgc

SEQ ID NO: 18868 - RNA, 21 nt, synthetic construct
  source 1..21: mol_type = other RNA
accatgacaagaacattgtat

SEQ ID NO: 18869 - RNA, 21 nt, synthetic construct
  source 1..21: mol_type = other RNA
accatgcaaatgtttttcctg

SEQ ID NO: 18870 - RNA, 21 nt, synthetic construct
  source 1..21: mol_type = other RNA
accatggagcagcatctgaag

SEQ ID NO: 18871 - RNA, 21 nt, synthetic construct
  source 1..21: mol_type = other RNA
accatgtgtgtgttccacgga

SEQ ID NO: 18872 - RNA, 21 nt, synthetic construct
  source 1..21: mol_type = other RNA
accatgttgagggcaacagac

SEQ ID NO: 18873 - RNA, 21 nt, synthetic construct
  source 1..21: mol_type = other RNA
accattaggcattagcactgc

SEQ ID NO: 18874 - RNA, 21 nt, synthetic construct
  source 1..21: mol_type = other RNA
accattcagagtgctttttcc

SEQ ID NO: 18875 - RNA, 21 nt, synthetic construct
  source 1..21: mol_type = other RNA
accatttaccaaaagctcatg

SEQ ID NO: 18876 - RNA, 21 nt, synthetic construct
  source 1..21: mol_type = other RNA
acccaaaacttgcatcacatg

SEQ ID NO: 18877 - RNA, 21 nt, synthetic construct
  source 1..21: mol_type = other RNA
acccaatctctccaatcaaat

SEQ ID NO: 18878 - RNA, 21 nt, synthetic construct
  source 1..21: mol_type = other RNA
acccaccaatttttggtagca

SEQ ID NO: 18879 - RNA, 21 nt, synthetic construct
  source 1..21: mol_type = other RNA
acccagaaaacaacacagctg

SEQ ID NO: 18880 - RNA, 21 nt, synthetic construct
  source 1..21: mol_type = other RNA
acccatcgcatacctcagggc

SEQ ID NO: 18881 - RNA, 21 nt, synthetic construct
  source 1..21: mol_type = other RNA
accccaaactgagtcttgcca

SEQ ID NO: 18882 - RNA, 21 nt, synthetic construct
  source 1..21: mol_type = other RNA
accccaaccaaagtaacacaa

SEQ ID NO: 18883 - RNA, 21 nt, synthetic construct
  source 1..21: mol_type = other RNA
accccagctttagagcagcaa

SEQ ID NO: 18884 - RNA, 21 nt, synthetic construct
  source 1..21: mol_type = other RNA
acccccaaagcaacaatgatc

SEQ ID NO: 18885 - RNA, 21 nt, synthetic construct
  source 1..21: mol_type = other RNA
accccgaagttacgtctttct

SEQ ID NO: 18886 - RNA, 21 nt, synthetic construct
  source 1..21: mol_type = other RNA
acccctccccagaaggacact

SEQ ID NO: 18887 - RNA, 21 nt, synthetic construct
  source 1..21: mol_type = other RNA
accctcacaccaggtgcactt

SEQ ID NO: 18888 - RNA, 21 nt, synthetic construct
  source 1..21: mol_type = other RNA
accctctactttcttgtgtaa

SEQ ID NO: 18889 - RNA, 21 nt, synthetic construct
  source 1..21: mol_type = other RNA
accctctattttcacttccct

SEQ ID NO: 18890 - RNA, 21 nt, synthetic construct
  source 1..21: mol_type = other RNA
accctgtatgaagggaagcca

SEQ ID NO: 18891 - RNA, 21 nt, synthetic construct
  source 1..21: mol_type = other RNA
acccttcagaatctcttgctc

SEQ ID NO: 18892 - RNA, 21 nt, synthetic construct
  source 1..21: mol_type = other RNA
accgcaatggaaacacaatct

SEQ ID NO: 18893 - RNA, 21 nt, synthetic construct
  source 1..21: mol_type = other RNA
accgttcagagctgccaccag

SEQ ID NO: 18894 - RNA, 21 nt, synthetic construct
  source 1..21: mol_type = other RNA
acctacacatctgcaagatgg

SEQ ID NO: 18895 - RNA, 21 nt, synthetic construct
  source 1..21: mol_type = other RNA
acctagtttcagagaataaag

SEQ ID NO: 18896 - RNA, 21 nt, synthetic construct
  source 1..21: mol_type = other RNA
acctcaagcataacccaccaa

SEQ ID NO: 18897 - RNA, 21 nt, synthetic construct
  source 1..21: mol_type = other RNA
acctcagggcagatcaattcc

SEQ ID NO: 18898 - RNA, 21 nt, synthetic construct
  source 1..21: mol_type = other RNA
acctccaaacaatacactgga

SEQ ID NO: 18899 - RNA, 21 nt, synthetic construct
  source 1..21: mol_type = other RNA
acctcccatttgccagacaga

SEQ ID NO: 18900 - RNA, 21 nt, synthetic construct
  source 1..21: mol_type = other RNA
acctctaactctgagctgcct

SEQ ID NO: 18901 - RNA, 21 nt, synthetic construct
  source 1..21: mol_type = other RNA
acctctggctacaaagctcca

SEQ ID NO: 18902 - RNA, 21 nt, synthetic construct
  source 1..21: mol_type = other RNA
acctgaacagaattcttcacc

SEQ ID NO: 18903 - RNA, 21 nt, synthetic construct
  source 1..21: mol_type = other RNA
acctgaggcaccaccttccca

SEQ ID NO: 18904 - RNA, 21 nt, synthetic construct
  source 1..21: mol_type = other RNA
acctgcaagctgtgataatgt

SEQ ID NO: 18905 - RNA, 21 nt, synthetic construct
  source 1..21: mol_type = other RNA
acctggatgcaagccacatgc

SEQ ID NO: 18906 - RNA, 21 nt, synthetic construct
  source 1..21: mol_type = other RNA
acctggatttctttcttggct

SEQ ID NO: 18907 - RNA, 21 nt, synthetic construct
  source 1..21: mol_type = other RNA
acctggtgtgagggtttttgg

SEQ ID NO: 18908 - RNA, 21 nt, synthetic construct
  source 1..21: mol_type = other RNA
acctgtattttgcatgcactt

SEQ ID NO: 18909 - RNA, 21 nt, synthetic construct
  source 1..21: mol_type = other RNA
acctgtcaagactcaatatga

SEQ ID NO: 18910 - RNA, 21 nt, synthetic construct
  source 1..21: mol_type = other RNA
acctgtgaagaagatcttgct

SEQ ID NO: 18911 - RNA, 21 nt, synthetic construct
  source 1..21: mol_type = other RNA
acctgtggaagaggaggaggg

SEQ ID NO: 18912 - RNA, 21 nt, synthetic construct
  source 1..21: mol_type = other RNA
acctgttcctttcagaaacca

SEQ ID NO: 18913 - RNA, 21 nt, synthetic construct
  source 1..21: mol_type = other RNA
accttaattggcctgtgcatc

SEQ ID NO: 18914 - RNA, 21 nt, synthetic construct
  source 1..21: mol_type = other RNA
accttagagcagcatgctttt

SEQ ID NO: 18915 - RNA, 21 nt, synthetic construct
  source 1..21: mol_type = other RNA
accttccaaattactagatac

SEQ ID NO: 18916 - RNA, 21 nt, synthetic construct
  source 1..21: mol_type = other RNA
accttcccagagtcctaatcc

SEQ ID NO: 18917 - RNA, 21 nt, synthetic construct
  source 1..21: mol_type = other RNA
accttctctctctgggctcct

SEQ ID NO: 18918 - RNA, 21 nt, synthetic construct
  source 1..21: mol_type = other RNA
accttgggactgcccttgatt

SEQ ID NO: 18919 - RNA, 21 nt, synthetic construct
  source 1..21: mol_type = other RNA
acctttgctgagcaagttgcg

SEQ ID NO: 18920 - RNA, 21 nt, synthetic construct
  source 1..21: mol_type = other RNA
accttttgcaacataagcctc

SEQ ID NO: 18921 - RNA, 21 nt, synthetic construct
  source 1..21: mol_type = other RNA
acctttttccatgttttgttt

SEQ ID NO: 18922 - RNA, 21 nt, synthetic construct
  source 1..21: mol_type = other RNA
acgactattctggcttccctt

SEQ ID NO: 18923 - RNA, 21 nt, synthetic construct
  source 1..21: mol_type = other RNA
acgacttggcgtgaaactgct

SEQ ID NO: 18924 - RNA, 21 nt, synthetic construct
  source 1..21: mol_type = other RNA
acgagatcttgtgcccccaac

SEQ ID NO: 18925 - RNA, 21 nt, synthetic construct
  source 1..21: mol_type = other RNA
acgaggggccttcaattcaat

SEQ ID NO: 18926 - RNA, 21 nt, synthetic construct
  source 1..21: mol_type = other RNA
acgatttatattctgtacttc

SEQ ID NO: 18927 - RNA, 21 nt, synthetic construct
  source 1..21: mol_type = other RNA
acgcacagttagtgaaccttc

SEQ ID NO: 18928 - RNA, 21 nt, synthetic construct
  source 1..21: mol_type = other RNA
acgccaagtcgttatttgacc

SEQ ID NO: 18929 - RNA, 21 nt, synthetic construct
  source 1..21: mol_type = other RNA
acgccatgtgtctcagtacat

SEQ ID NO: 18930 - RNA, 21 nt, synthetic construct
  source 1..21: mol_type = other RNA
acgctagctttgtggttccct

SEQ ID NO: 18931 - RNA, 21 nt, synthetic construct
  source 1..21: mol_type = other RNA
acggaagaggcagaaactgta

SEQ ID NO: 18932 - RNA, 21 nt, synthetic construct
  source 1..21: mol_type = other RNA
acgtaacttcggggtaagcca

SEQ ID NO: 18933 - RNA, 21 nt, synthetic construct
  source 1..21: mol_type = other RNA
acgtaatgaggcatcactgcc

SEQ ID NO: 18934 - RNA, 21 nt, synthetic construct
  source 1..21: mol_type = other RNA
acgtctttctccattagcctt

SEQ ID NO: 18935 - RNA, 21 nt, synthetic construct
  source 1..21: mol_type = other RNA
acgttttagatgggattccgc

SEQ ID NO: 18936 - RNA, 21 nt, synthetic construct
  source 1..21: mol_type = other RNA
actaaagtggaagaatgtttt

SEQ ID NO: 18937 - RNA, 21 nt, synthetic construct
  source 1..21: mol_type = other RNA
actaactgtgcgttttattcc

SEQ ID NO: 18938 - RNA, 21 nt, synthetic construct
  source 1..21: mol_type = other RNA
actaagcaagagaatccacct

SEQ ID NO: 18939 - RNA, 21 nt, synthetic construct
  source 1..21: mol_type = other RNA
actaaggattccttttctgcc

SEQ ID NO: 18940 - RNA, 21 nt, synthetic construct
  source 1..21: mol_type = other RNA
actaagtccattcctgatacc

SEQ ID NO: 18941 - RNA, 21 nt, synthetic construct
  source 1..21: mol_type = other RNA
actaatgagttgtcctgtgag

SEQ ID NO: 18942 - RNA, 21 nt, synthetic construct
  source 1..21: mol_type = other RNA
actacaacaacaaaaatcagt

SEQ ID NO: 18943 - RNA, 21 nt, synthetic construct
  source 1..21: mol_type = other RNA
actacacatcctgaacttttt

SEQ ID NO: 18944 - RNA, 21 nt, synthetic construct
  source 1..21: mol_type = other RNA
actaccacaccaccaccacca

SEQ ID NO: 18945 - RNA, 21 nt, synthetic construct
  source 1..21: mol_type = other RNA
actaccccaaccaaagtaaca

SEQ ID NO: 18946 - RNA, 21 nt, synthetic construct
  source 1..21: mol_type = other RNA
actagacaaaccactgctgca

SEQ ID NO: 18947 - RNA, 21 nt, synthetic construct
  source 1..21: mol_type = other RNA
actagctgcaatgctaaatac

SEQ ID NO: 18948 - RNA, 21 nt, synthetic construct
  source 1..21: mol_type = other RNA
actaggtgtgtattgtttgaa

SEQ ID NO: 18949 - RNA, 21 nt, synthetic construct
  source 1..21: mol_type = other RNA
actataaggggaatttctacg

SEQ ID NO: 18950 - RNA, 21 nt, synthetic construct
  source 1..21: mol_type = other RNA
actatctgaaaccaggatgga

SEQ ID NO: 18951 - RNA, 21 nt, synthetic construct
  source 1..21: mol_type = other RNA
actatggcaagactcagtttg

SEQ ID NO: 18952 - RNA, 21 nt, synthetic construct
  source 1..21: mol_type = other RNA
actattctggcttcccttcat

SEQ ID NO: 18953 - RNA, 21 nt, synthetic construct
  source 1..21: mol_type = other RNA
actcaaaagcatgctgctcta

SEQ ID NO: 18954 - RNA, 21 nt, synthetic construct
  source 1..21: mol_type = other RNA
actcaaatcggagacatttgg

SEQ ID NO: 18955 - RNA, 21 nt, synthetic construct
  source 1..21: mol_type = other RNA
actcaatatgatttcccatct

SEQ ID NO: 18956 - RNA, 21 nt, synthetic construct
  source 1..21: mol_type = other RNA
actcacaccttttgcaacata

SEQ ID NO: 18957 - RNA, 21 nt, synthetic construct
  source 1..21: mol_type = other RNA
actcacacgactattctggct

SEQ ID NO: 18958 - RNA, 21 nt, synthetic construct
  source 1..21: mol_type = other RNA
actcacagattctttcttatc

SEQ ID NO: 18959 - RNA, 21 nt, synthetic construct
  source 1..21: mol_type = other RNA
actcaccactgcagctggctt

SEQ ID NO: 18960 - RNA, 21 nt, synthetic construct
  source 1..21: mol_type = other RNA
actcacccatcgcatacctca

SEQ ID NO: 18961 - RNA, 21 nt, synthetic construct
  source 1..21: mol_type = other RNA
actcagacccctccccagaag

SEQ ID NO: 18962 - RNA, 21 nt, synthetic construct
  source 1..21: mol_type = other RNA
actcagtttggggttgctgtg

SEQ ID NO: 18963 - RNA, 21 nt, synthetic construct
  source 1..21: mol_type = other RNA
actcataatgtccaaatggga

SEQ ID NO: 18964 - RNA, 21 nt, synthetic construct
  source 1..21: mol_type = other RNA
actcattagtagcctgactgt

SEQ ID NO: 18965 - RNA, 21 nt, synthetic construct
  source 1..21: mol_type = other RNA
actccaccattcagagtgctt

SEQ ID NO: 18966 - RNA, 21 nt, synthetic construct
  source 1..21: mol_type = other RNA
actccagacttttcctcaccc

SEQ ID NO: 18967 - RNA, 21 nt, synthetic construct
  source 1..21: mol_type = other RNA
actcctggaaaaaacactgtc

SEQ ID NO: 18968 - RNA, 21 nt, synthetic construct
  source 1..21: mol_type = other RNA
actcgcttgattttgaatact

SEQ ID NO: 18969 - RNA, 21 nt, synthetic construct
  source 1..21: mol_type = other RNA
actctcaaatcacagaagcaa

SEQ ID NO: 18970 - RNA, 21 nt, synthetic construct
  source 1..21: mol_type = other RNA
actctgaatggtggagtttta

SEQ ID NO: 18971 - RNA, 21 nt, synthetic construct
  source 1..21: mol_type = other RNA
actctgagctgcctccaaagc

SEQ ID NO: 18972 - RNA, 21 nt, synthetic construct
  source 1..21: mol_type = other RNA
actctgggaaggtggtgcctc

SEQ ID NO: 18973 - RNA, 21 nt, synthetic construct
  source 1..21: mol_type = other RNA
actctgggatggttgtgtttg

SEQ ID NO: 18974 - RNA, 21 nt, synthetic construct
  source 1..21: mol_type = other RNA
actgaaaaacttatgtcccca

SEQ ID NO: 18975 - RNA, 21 nt, synthetic construct
  source 1..21: mol_type = other RNA
actgaagaattgatggcagtg

SEQ ID NO: 18976 - RNA, 21 nt, synthetic construct
  source 1..21: mol_type = other RNA
actgaagcttgttgtgacttc

SEQ ID NO: 18977 - RNA, 21 nt, synthetic construct
  source 1..21: mol_type = other RNA
actgagccattttcaaactca

SEQ ID NO: 18978 - RNA, 21 nt, synthetic construct
  source 1..21: mol_type = other RNA
actgagctttgcttgaagtaa

SEQ ID NO: 18979 - RNA, 21 nt, synthetic construct
  source 1..21: mol_type = other RNA
actgagtcttgccatagtcag

SEQ ID NO: 18980 - RNA, 21 nt, synthetic construct
  source 1..21: mol_type = other RNA
actgattttcaccatgaaaac

SEQ ID NO: 18981 - RNA, 21 nt, synthetic construct
  source 1..21: mol_type = other RNA
actgatttttgttgttgtagt

SEQ ID NO: 18982 - RNA, 21 nt, synthetic construct
  source 1..21: mol_type = other RNA
actgcacatgagcttttggta

SEQ ID NO: 18983 - RNA, 21 nt, synthetic construct
  source 1..21: mol_type = other RNA
actgcagctggctttggaggc

SEQ ID NO: 18984 - RNA, 21 nt, synthetic construct
  source 1..21: mol_type = other RNA
actgcagggacaatgactgtt

SEQ ID NO: 18985 - RNA, 21 nt, synthetic construct
  source 1..21: mol_type = other RNA
actgcagtgggcctgaaaatc

SEQ ID NO: 18986 - RNA, 21 nt, synthetic construct
  source 1..21: mol_type = other RNA
actgcagttatgtgttgaaaa

SEQ ID NO: 18987 - RNA, 21 nt, synthetic construct
  source 1..21: mol_type = other RNA
actgcattttcttgggctaca

SEQ ID NO: 18988 - RNA, 21 nt, synthetic construct
  source 1..21: mol_type = other RNA
actgccagcagttgatgagaa

SEQ ID NO: 18989 - RNA, 21 nt, synthetic construct
  source 1..21: mol_type = other RNA
actgccatcaattcttcagta

SEQ ID NO: 18990 - RNA, 21 nt, synthetic construct
  source 1..21: mol_type = other RNA
actgcccttgattcatttcaa

SEQ ID NO: 18991 - RNA, 21 nt, synthetic construct
  source 1..21: mol_type = other RNA
actgcctgagagagctcatcc

SEQ ID NO: 18992 - RNA, 21 nt, synthetic construct
  source 1..21: mol_type = other RNA
actgccttgtttttaagtaat

SEQ ID NO: 18993 - RNA, 21 nt, synthetic construct
  source 1..21: mol_type = other RNA
actgctaccaaaaattggtgg

SEQ ID NO: 18994 - RNA, 21 nt, synthetic construct
  source 1..21: mol_type = other RNA
actgctgcagaacttgatagc

SEQ ID NO: 18995 - RNA, 21 nt, synthetic construct
  source 1..21: mol_type = other RNA
actgctggcagttgtcctgta

SEQ ID NO: 18996 - RNA, 21 nt, synthetic construct
  source 1..21: mol_type = other RNA
actgcttcagatgctgctcca

SEQ ID NO: 18997 - RNA, 21 nt, synthetic construct
  source 1..21: mol_type = other RNA
actgctttcacctggatttct

SEQ ID NO: 18998 - RNA, 21 nt, synthetic construct
  source 1..21: mol_type = other RNA
actggaaattccaacatgcct

SEQ ID NO: 18999 - RNA, 21 nt, synthetic construct
  source 1..21: mol_type = other RNA
actggagatgttggtccactg

SEQ ID NO: 19000 - RNA, 21 nt, synthetic construct
  source 1..21: mol_type = other RNA
actggaggaagtacagaatat

SEQ ID NO: 19001 - RNA, 21 nt, synthetic construct
  source 1..21: mol_type = other RNA
actggcattatcagcatcatc

SEQ ID NO: 19002 - RNA, 21 nt, synthetic construct
  source 1..21: mol_type = other RNA
actggccctgacatttcaact

SEQ ID NO: 19003 - RNA, 21 nt, synthetic construct
  source 1..21: mol_type = other RNA
actggggacataagtttttca

SEQ ID NO: 19004 - RNA, 21 nt, synthetic construct
  source 1..21: mol_type = other RNA
actggtgaaatctttaactgc

SEQ ID NO: 19005 - RNA, 21 nt, synthetic construct
  source 1..21: mol_type = other RNA
actgtaccttgggactgccct

SEQ ID NO: 19006 - RNA, 21 nt, synthetic construct
  source 1..21: mol_type = other RNA
actgtagcaccattaggcatt

SEQ ID NO: 19007 - RNA, 21 nt, synthetic construct
  source 1..21: mol_type = other RNA
actgtctcaatattatccaga

SEQ ID NO: 19008 - RNA, 21 nt, synthetic construct
  source 1..21: mol_type = other RNA
actgtgactggccctgacatt

SEQ ID NO: 19009 - RNA, 21 nt, synthetic construct
  source 1..21: mol_type = other RNA
actgtgcgttttattcctcca

SEQ ID NO: 19010 - RNA, 21 nt, synthetic construct
  source 1..21: mol_type = other RNA
actgtgtggcactagatttca

SEQ ID NO: 19011 - RNA, 21 nt, synthetic construct
  source 1..21: mol_type = other RNA
actgttaatggcatttatgtg

SEQ ID NO: 19012 - RNA, 21 nt, synthetic construct
  source 1..21: mol_type = other RNA
actgttccattgtgttctgag

SEQ ID NO: 19013 - RNA, 21 nt, synthetic construct
  source 1..21: mol_type = other RNA
acttaaaaacaaggcagtgct

SEQ ID NO: 19014 - RNA, 21 nt, synthetic construct
  source 1..21: mol_type = other RNA
acttacctacacatctgcaag

SEQ ID NO: 19015 - RNA, 21 nt, synthetic construct
  source 1..21: mol_type = other RNA
acttagtctgttgccctcaac

SEQ ID NO: 19016 - RNA, 21 nt, synthetic construct
  source 1..21: mol_type = other RNA
acttatgtccccagtgttgaa

SEQ ID NO: 19017 - RNA, 21 nt, synthetic construct
  source 1..21: mol_type = other RNA
acttcaagcaaagctcagtgt

SEQ ID NO: 19018 - RNA, 21 nt, synthetic construct
  source 1..21: mol_type = other RNA
acttcccttaaaagtgttgtg

SEQ ID NO: 19019 - RNA, 21 nt, synthetic construct
  source 1..21: mol_type = other RNA
acttcctccagtcccatttgg

SEQ ID NO: 19020 - RNA, 21 nt, synthetic construct
  source 1..21: mol_type = other RNA
acttcctccctggtcaggcac

SEQ ID NO: 19021 - RNA, 21 nt, synthetic construct
  source 1..21: mol_type = other RNA
acttcggggtaagccaagaaa

SEQ ID NO: 19022 - RNA, 21 nt, synthetic construct
  source 1..21: mol_type = other RNA
acttctccaaaacagaccatt

SEQ ID NO: 19023 - RNA, 21 nt, synthetic construct
  source 1..21: mol_type = other RNA
acttctgctcctgttcttgaa

SEQ ID NO: 19024 - RNA, 21 nt, synthetic construct
  source 1..21: mol_type = other RNA
acttctggatgagctctctca

SEQ ID NO: 19025 - RNA, 21 nt, synthetic construct
  source 1..21: mol_type = other RNA
acttcttcagaaaagacacca

SEQ ID NO: 19026 - RNA, 21 nt, synthetic construct
  source 1..21: mol_type = other RNA
acttgaatcaacaggcttcag

SEQ ID NO: 19027 - RNA, 21 nt, synthetic construct
  source 1..21: mol_type = other RNA
acttgatacataaccatgcaa

SEQ ID NO: 19028 - RNA, 21 nt, synthetic construct
  source 1..21: mol_type = other RNA
acttgatagccacaccccagc

SEQ ID NO: 19029 - RNA, 21 nt, synthetic construct
  source 1..21: mol_type = other RNA
acttgatttcatggtctgact

SEQ ID NO: 19030 - RNA, 21 nt, synthetic construct
  source 1..21: mol_type = other RNA
acttgcatcacatgcaatatt

SEQ ID NO: 19031 - RNA, 21 nt, synthetic construct
  source 1..21: mol_type = other RNA
acttgctcagcaaaggtactt

SEQ ID NO: 19032 - RNA, 21 nt, synthetic construct
  source 1..21: mol_type = other RNA
acttgcttctgtgatttgaga

SEQ ID NO: 19033 - RNA, 21 nt, synthetic construct
  source 1..21: mol_type = other RNA
acttggaataccctctacttt

SEQ ID NO: 19034 - RNA, 21 nt, synthetic construct
  source 1..21: mol_type = other RNA
acttggcgtgaaactgcttca

SEQ ID NO: 19035 - RNA, 21 nt, synthetic construct
  source 1..21: mol_type = other RNA
acttggtacatttgtgacttg

SEQ ID NO: 19036 - RNA, 21 nt, synthetic construct
  source 1..21: mol_type = other RNA
acttggtgtctccatttactt

SEQ ID NO: 19037 - RNA, 21 nt, synthetic construct
  source 1..21: mol_type = other RNA
acttgtgctccagctgtgttg

SEQ ID NO: 19038 - RNA, 21 nt, synthetic construct
  source 1..21: mol_type = other RNA
actttacacaagaaagtagag

SEQ ID NO: 19039 - RNA, 21 nt, synthetic construct
  source 1..21: mol_type = other RNA
actttagtctggccaaagaat

SEQ ID NO: 19040 - RNA, 21 nt, synthetic construct
  source 1..21: mol_type = other RNA
actttcttgtgtaaagtcagg

SEQ ID NO: 19041 - RNA, 21 nt, synthetic construct
  source 1..21: mol_type = other RNA
actttggttggggtagtggtg

SEQ ID NO: 19042 - RNA, 21 nt, synthetic construct
  source 1..21: mol_type = other RNA
acttttaagggaagtgaaaat

SEQ ID NO: 19043 - RNA, 21 nt, synthetic construct
  source 1..21: mol_type = other RNA
acttttacttgcttctgtgat

SEQ ID NO: 19044 - RNA, 21 nt, synthetic construct
  source 1..21: mol_type = other RNA
acttttcccctcctgctcatt

SEQ ID NO: 19045 - RNA, 21 nt, synthetic construct
  source 1..21: mol_type = other RNA
acttttcctcacccccaaagc

SEQ ID NO: 19046 - RNA, 21 nt, synthetic construct
  source 1..21: mol_type = other RNA
acttttgaaagagtgccactt

SEQ ID NO: 19047 - RNA, 21 nt, synthetic construct
  source 1..21: mol_type = other RNA
actttttgcaggaaacaagac

SEQ ID NO: 19048 - RNA, 21 nt, synthetic construct
  source 1..21: mol_type = other RNA
agaaaacaacacagctggagc

SEQ ID NO: 19049 - RNA, 21 nt, synthetic construct
  source 1..21: mol_type = other RNA
agaaaacaagaccaatgtcag

SEQ ID NO: 19050 - RNA, 21 nt, synthetic construct
  source 1..21: mol_type = other RNA
agaaaaccacatctcacataa

SEQ ID NO: 19051 - RNA, 21 nt, synthetic construct
  source 1..21: mol_type = other RNA
agaaaagacaccaaccaaaag

SEQ ID NO: 19052 - RNA, 21 nt, synthetic construct
  source 1..21: mol_type = other RNA
agaaaaggaatccttagtgaa

SEQ ID NO: 19053 - RNA, 21 nt, synthetic construct
  source 1..21: mol_type = other RNA
agaaaataacatccagggaac

SEQ ID NO: 19054 - RNA, 21 nt, synthetic construct
  source 1..21: mol_type = other RNA
agaaacaaagagcaagagatt

SEQ ID NO: 19055 - RNA, 21 nt, synthetic construct
  source 1..21: mol_type = other RNA
agaaaccaagatatgtctggt

SEQ ID NO: 19056 - RNA, 21 nt, synthetic construct
  source 1..21: mol_type = other RNA
agaaaccagaacaactacaac

SEQ ID NO: 19057 - RNA, 21 nt, synthetic construct
  source 1..21: mol_type = other RNA
agaaacctgtattttgcatgc

SEQ ID NO: 19058 - RNA, 21 nt, synthetic construct
  source 1..21: mol_type = other RNA
agaaactgtagcaccattagg

SEQ ID NO: 19059 - RNA, 21 nt, synthetic construct
  source 1..21: mol_type = other RNA
agaaagaaatccaggtgaaag

SEQ ID NO: 19060 - RNA, 21 nt, synthetic construct
  source 1..21: mol_type = other RNA
agaaagaagcaattgtgatgg

SEQ ID NO: 19061 - RNA, 21 nt, synthetic construct
  source 1..21: mol_type = other RNA
agaaagaatctgtgagttctg

SEQ ID NO: 19062 - RNA, 21 nt, synthetic construct
  source 1..21: mol_type = other RNA
agaaagacgtaacttcggggt

SEQ ID NO: 19063 - RNA, 21 nt, synthetic construct
  source 1..21: mol_type = other RNA
agaaagcatcggagaagggct

SEQ ID NO: 19064 - RNA, 21 nt, synthetic construct
  source 1..21: mol_type = other RNA
agaaagtagagggtattccaa

SEQ ID NO: 19065 - RNA, 21 nt, synthetic construct
  source 1..21: mol_type = other RNA
agaaatccaggtgaaagcagt

SEQ ID NO: 19066 - RNA, 21 nt, synthetic construct
  source 1..21: mol_type = other RNA
agaaatgtactgagacacatg

SEQ ID NO: 19067 - RNA, 21 nt, synthetic construct
  source 1..21: mol_type = other RNA
agaaattccccttatagtcag

SEQ ID NO: 19068 - RNA, 21 nt, synthetic construct
  source 1..21: mol_type = other RNA
agaaattgaaacaagaccaaa

SEQ ID NO: 19069 - RNA, 21 nt, synthetic construct
  source 1..21: mol_type = other RNA
agaacaactacaacaacaaaa

SEQ ID NO: 19070 - RNA, 21 nt, synthetic construct
  source 1..21: mol_type = other RNA
agaacacaatggaacagtcat

SEQ ID NO: 19071 - RNA, 21 nt, synthetic construct
  source 1..21: mol_type = other RNA
agaacaccaccactaccccaa

SEQ ID NO: 19072 - RNA, 21 nt, synthetic construct
  source 1..21: mol_type = other RNA
agaacacctcaagcataaccc

SEQ ID NO: 19073 - RNA, 21 nt, synthetic construct
  source 1..21: mol_type = other RNA
agaacagaagcagctgttctt

SEQ ID NO: 19074 - RNA, 21 nt, synthetic construct
  source 1..21: mol_type = other RNA
agaacagactacacatcctga

SEQ ID NO: 19075 - RNA, 21 nt, synthetic construct
  source 1..21: mol_type = other RNA
agaacagcagcaaacacagca

SEQ ID NO: 19076 - RNA, 21 nt, synthetic construct
  source 1..21: mol_type = other RNA
agaacagctgcttctgttctc

SEQ ID NO: 19077 - RNA, 21 nt, synthetic construct
  source 1..21: mol_type = other RNA
agaacaggagcagaagtcaca

SEQ ID NO: 19078 - RNA, 21 nt, synthetic construct
  source 1..21: mol_type = other RNA
agaaccaaccatgttgagggc

SEQ ID NO: 19079 - RNA, 21 nt, synthetic construct
  source 1..21: mol_type = other RNA
agaacctctggctacaaagct

SEQ ID NO: 19080 - RNA, 21 nt, synthetic construct
  source 1..21: mol_type = other RNA
agaactcacagattctttctt

SEQ ID NO: 19081 - RNA, 21 nt, synthetic construct
  source 1..21: mol_type = other RNA
agaactgaagcttgttgtgac

SEQ ID NO: 19082 - RNA, 21 nt, synthetic construct
  source 1..21: mol_type = other RNA
agaacttgatagccacacccc

SEQ ID NO: 19083 - RNA, 21 nt, synthetic construct
  source 1..21: mol_type = other RNA
agaagaacaccaccactaccc

SEQ ID NO: 19084 - RNA, 21 nt, synthetic construct
  source 1..21: mol_type = other RNA
agaagatcttgctttgggatc

SEQ ID NO: 19085 - RNA, 21 nt, synthetic construct
  source 1..21: mol_type = other RNA
agaagcaagaacagcagcaaa

SEQ ID NO: 19086 - RNA, 21 nt, synthetic construct
  source 1..21: mol_type = other RNA
agaagcaagtaaaagttgaaa

SEQ ID NO: 19087 - RNA, 21 nt, synthetic construct
  source 1..21: mol_type = other RNA
agaagcaattgtgatggtggt

SEQ ID NO: 19088 - RNA, 21 nt, synthetic construct
  source 1..21: mol_type = other RNA
agaagcagctgttcttttggt

SEQ ID NO: 19089 - RNA, 21 nt, synthetic construct
  source 1..21: mol_type = other RNA
agaaggaaaaagcactctgaa

SEQ ID NO: 19090 - RNA, 21 nt, synthetic construct
  source 1..21: mol_type = other RNA
agaaggacactcaaaagcatg

SEQ ID NO: 19091 - RNA, 21 nt, synthetic construct
  source 1..21: mol_type = other RNA
agaaggatcattctttggcca

SEQ ID NO: 19092 - RNA, 21 nt, synthetic construct
  source 1..21: mol_type = other RNA
agaagggctgcatacatgtgt

SEQ ID NO: 19093 - RNA, 21 nt, synthetic construct
  source 1..21: mol_type = other RNA
agaaggttcactaactgtgcg

SEQ ID NO: 19094 - RNA, 21 nt, synthetic construct
  source 1..21: mol_type = other RNA
agaagtaaatggagacaccaa

SEQ ID NO: 19095 - RNA, 21 nt, synthetic construct
  source 1..21: mol_type = other RNA
agaagtcacaacaagcttcag

SEQ ID NO: 19096 - RNA, 21 nt, synthetic construct
  source 1..21: mol_type = other RNA
agaagtgcacctggtgtgagg

SEQ ID NO: 19097 - RNA, 21 nt, synthetic construct
  source 1..21: mol_type = other RNA
agaagttgtttgctgctctaa

SEQ ID NO: 19098 - RNA, 21 nt, synthetic construct
  source 1..21: mol_type = other RNA
agaataaagaacagactacac

SEQ ID NO: 19099 - RNA, 21 nt, synthetic construct
  source 1..21: mol_type = other RNA
agaataaagaggaaatactcc

SEQ ID NO: 19100 - RNA, 21 nt, synthetic construct
  source 1..21: mol_type = other RNA
agaataattgtgtgaacagga

SEQ ID NO: 19101 - RNA, 21 nt, synthetic construct
  source 1..21: mol_type = other RNA
agaatagtcgtgtgagtcctg

SEQ ID NO: 19102 - RNA, 21 nt, synthetic construct
  source 1..21: mol_type = other RNA
agaatccacctgcaagctgtg

SEQ ID NO: 19103 - RNA, 21 nt, synthetic construct
  source 1..21: mol_type = other RNA
agaatctcttgctctttgttt

SEQ ID NO: 19104 - RNA, 21 nt, synthetic construct
  source 1..21: mol_type = other RNA
agaatctgaagctctggattt

SEQ ID NO: 19105 - RNA, 21 nt, synthetic construct
  source 1..21: mol_type = other RNA
agaatctgtgagttctgtagc

SEQ ID NO: 19106 - RNA, 21 nt, synthetic construct
  source 1..21: mol_type = other RNA
agaatgatccttctctttgct

SEQ ID NO: 19107 - RNA, 21 nt, synthetic construct
  source 1..21: mol_type = other RNA
agaatggaagcccactgcctg

SEQ ID NO: 19108 - RNA, 21 nt, synthetic construct
  source 1..21: mol_type = other RNA
agaatgttttcatggtgaaaa

SEQ ID NO: 19109 - RNA, 21 nt, synthetic construct
  source 1..21: mol_type = other RNA
agaattctgttcaggttccag

SEQ ID NO: 19110 - RNA, 21 nt, synthetic construct
  source 1..21: mol_type = other RNA
agaattcttcaccagacgcta

SEQ ID NO: 19111 - RNA, 21 nt, synthetic construct
  source 1..21: mol_type = other RNA
agaattgatggcagtgatgcc

SEQ ID NO: 19112 - RNA, 21 nt, synthetic construct
  source 1..21: mol_type = other RNA
agacaaaccactgctgcagaa

SEQ ID NO: 19113 - RNA, 21 nt, synthetic construct
  source 1..21: mol_type = other RNA
agacaaggagcaaacacgaga

SEQ ID NO: 19114 - RNA, 21 nt, synthetic construct
  source 1..21: mol_type = other RNA
agacaccaaccaaaagaacag

SEQ ID NO: 19115 - RNA, 21 nt, synthetic construct
  source 1..21: mol_type = other RNA
agacaccaagtggcactcttt

SEQ ID NO: 19116 - RNA, 21 nt, synthetic construct
  source 1..21: mol_type = other RNA
agacagaacctctggctacaa

SEQ ID NO: 19117 - RNA, 21 nt, synthetic construct
  source 1..21: mol_type = other RNA
agacagtgttttttccaggag

SEQ ID NO: 19118 - RNA, 21 nt, synthetic construct
  source 1..21: mol_type = other RNA
agacatatcttggtttctatt

SEQ ID NO: 19119 - RNA, 21 nt, synthetic construct
  source 1..21: mol_type = other RNA
agacatttggttgactgcttt

SEQ ID NO: 19120 - RNA, 21 nt, synthetic construct
  source 1..21: mol_type = other RNA
agaccaaaaggctaatggaga

SEQ ID NO: 19121 - RNA, 21 nt, synthetic construct
  source 1..21: mol_type = other RNA
agaccaatgtcagaacacctc

SEQ ID NO: 19122 - RNA, 21 nt, synthetic construct
  source 1..21: mol_type = other RNA
agaccatgaaatcaagtgcat

SEQ ID NO: 19123 - RNA, 21 nt, synthetic construct
  source 1..21: mol_type = other RNA
agaccatggagcagcatctga

SEQ ID NO: 19124 - RNA, 21 nt, synthetic construct
  source 1..21: mol_type = other RNA
agaccatttaccaaaagctca

SEQ ID NO: 19125 - RNA, 21 nt, synthetic construct
  source 1..21: mol_type = other RNA
agacccaaaacttgcatcaca

SEQ ID NO: 19126 - RNA, 21 nt, synthetic construct
  source 1..21: mol_type = other RNA
agacccctccccagaaggaca

SEQ ID NO: 19127 - RNA, 21 nt, synthetic construct
  source 1..21: mol_type = other RNA
agacctctaactctgagctgc

SEQ ID NO: 19128 - RNA, 21 nt, synthetic construct
  source 1..21: mol_type = other RNA
agacgctagctttgtggttcc

SEQ ID NO: 19129 - RNA, 21 nt, synthetic construct
  source 1..21: mol_type = other RNA
agacgtaacttcggggtaagc

SEQ ID NO: 19130 - RNA, 21 nt, synthetic construct
  source 1..21: mol_type = other RNA
agactaaagtggaagaatgtt

SEQ ID NO: 19131 - RNA, 21 nt, synthetic construct
  source 1..21: mol_type = other RNA
agactaagtccattcctgata

SEQ ID NO: 19132 - RNA, 21 nt, synthetic construct
  source 1..21: mol_type = other RNA
agactacacatcctgaacttt

SEQ ID NO: 19133 - RNA, 21 nt, synthetic construct
  source 1..21: mol_type = other RNA
agactcaatatgatttcccat

SEQ ID NO: 19134 - RNA, 21 nt, synthetic construct
  source 1..21: mol_type = other RNA
agactcagtttggggttgctg

SEQ ID NO: 19135 - RNA, 21 nt, synthetic construct
  source 1..21: mol_type = other RNA
agactcataatgtccaaatgg

SEQ ID NO: 19136 - RNA, 21 nt, synthetic construct
  source 1..21: mol_type = other RNA
agactgagccattttcaaact

SEQ ID NO: 19137 - RNA, 21 nt, synthetic construct
  source 1..21: mol_type = other RNA
agactgcagggacaatgactg

SEQ ID NO: 19138 - RNA, 21 nt, synthetic construct
  source 1..21: mol_type = other RNA
agacttttcctcacccccaaa

SEQ ID NO: 19139 - RNA, 21 nt, synthetic construct
  source 1..21: mol_type = other RNA
agagaaggatcattctttggc

SEQ ID NO: 19140 - RNA, 21 nt, synthetic construct
  source 1..21: mol_type = other RNA
agagaaggttcactaactgtg

SEQ ID NO: 19141 - RNA, 21 nt, synthetic construct
  source 1..21: mol_type = other RNA
agagaataaagaacagactac

SEQ ID NO: 19142 - RNA, 21 nt, synthetic construct
  source 1..21: mol_type = other RNA
agagaatccacctgcaagctg

SEQ ID NO: 19143 - RNA, 21 nt, synthetic construct
  source 1..21: mol_type = other RNA
agagactgagccattttcaaa

SEQ ID NO: 19144 - RNA, 21 nt, synthetic construct
  source 1..21: mol_type = other RNA
agagagaaggttcactaactg

SEQ ID NO: 19145 - RNA, 21 nt, synthetic construct
  source 1..21: mol_type = other RNA
agagagagaaggttcactaac

SEQ ID NO: 19146 - RNA, 21 nt, synthetic construct
  source 1..21: mol_type = other RNA
agagagctcatccagaagtaa

SEQ ID NO: 19147 - RNA, 21 nt, synthetic construct
  source 1..21: mol_type = other RNA
agagatgccaccttagagcag

SEQ ID NO: 19148 - RNA, 21 nt, synthetic construct
  source 1..21: mol_type = other RNA
agagattctgaagggtcgaga

SEQ ID NO: 19149 - RNA, 21 nt, synthetic construct
  source 1..21: mol_type = other RNA
agagattgggttgatactgaa

SEQ ID NO: 19150 - RNA, 21 nt, synthetic construct
  source 1..21: mol_type = other RNA
agagcaagagattctgaaggg

SEQ ID NO: 19151 - RNA, 21 nt, synthetic construct
  source 1..21: mol_type = other RNA
agagcagattcccaaactgaa

SEQ ID NO: 19152 - RNA, 21 nt, synthetic construct
  source 1..21: mol_type = other RNA
agagcagcaaacaacttcttc

SEQ ID NO: 19153 - RNA, 21 nt, synthetic construct
  source 1..21: mol_type = other RNA
agagcagcatgcttttgagtg

SEQ ID NO: 19154 - RNA, 21 nt, synthetic construct
  source 1..21: mol_type = other RNA
agagcatcattgagaccatgg

SEQ ID NO: 19155 - RNA, 21 nt, synthetic construct
  source 1..21: mol_type = other RNA
agagccttatggtcaaataac

SEQ ID NO: 19156 - RNA, 21 nt, synthetic construct
  source 1..21: mol_type = other RNA
agagctacaggacaactgcca

SEQ ID NO: 19157 - RNA, 21 nt, synthetic construct
  source 1..21: mol_type = other RNA
agagctcatccagaagtaaat

SEQ ID NO: 19158 - RNA, 21 nt, synthetic construct
  source 1..21: mol_type = other RNA
agagctgccaccaggagcttg

SEQ ID NO: 19159 - RNA, 21 nt, synthetic construct
  source 1..21: mol_type = other RNA
agagcttcagattctgaatga

SEQ ID NO: 19160 - RNA, 21 nt, synthetic construct
  source 1..21: mol_type = other RNA
agaggaaatactccagacttt

SEQ ID NO: 19161 - RNA, 21 nt, synthetic construct
  source 1..21: mol_type = other RNA
agaggaggagggggagaaaga

SEQ ID NO: 19162 - RNA, 21 nt, synthetic construct
  source 1..21: mol_type = other RNA
agaggcagaaactgtagcacc

SEQ ID NO: 19163 - RNA, 21 nt, synthetic construct
  source 1..21: mol_type = other RNA
agagggcagccttgtggatgg

SEQ ID NO: 19164 - RNA, 21 nt, synthetic construct
  source 1..21: mol_type = other RNA
agagggtaaacctgaggcacc

SEQ ID NO: 19165 - RNA, 21 nt, synthetic construct
  source 1..21: mol_type = other RNA
agagggtattccaagtgtttg

SEQ ID NO: 19166 - RNA, 21 nt, synthetic construct
  source 1..21: mol_type = other RNA
agaggtctgtgcggaattgat

SEQ ID NO: 19167 - RNA, 21 nt, synthetic construct
  source 1..21: mol_type = other RNA
agaggttctgtctggcaaatg

SEQ ID NO: 19168 - RNA, 21 nt, synthetic construct
  source 1..21: mol_type = other RNA
agagtaagagccttatggtca

SEQ ID NO: 19169 - RNA, 21 nt, synthetic construct
  source 1..21: mol_type = other RNA
agagtcaccttccaaattact

SEQ ID NO: 19170 - RNA, 21 nt, synthetic construct
  source 1..21: mol_type = other RNA
agagtcctaatccatctacac

SEQ ID NO: 19171 - RNA, 21 nt, synthetic construct
  source 1..21: mol_type = other RNA
agagtgccacttggtgtctcc

SEQ ID NO: 19172 - RNA, 21 nt, synthetic construct
  source 1..21: mol_type = other RNA
agagtgctttttccttctgaa

SEQ ID NO: 19173 - RNA, 21 nt, synthetic construct
  source 1..21: mol_type = other RNA
agagttagaggtctgtgcgga

SEQ ID NO: 19174 - RNA, 21 nt, synthetic construct
  source 1..21: mol_type = other RNA
agagttcacatctccctcaaa

SEQ ID NO: 19175 - RNA, 21 nt, synthetic construct
  source 1..21: mol_type = other RNA
agatagtgctgtgttgggggc

SEQ ID NO: 19176 - RNA, 21 nt, synthetic construct
  source 1..21: mol_type = other RNA
agatatgcccatctcctgcag

SEQ ID NO: 19177 - RNA, 21 nt, synthetic construct
  source 1..21: mol_type = other RNA
agatatgtctggtcaacaagc

SEQ ID NO: 19178 - RNA, 21 nt, synthetic construct
  source 1..21: mol_type = other RNA
agatcaagaaattgaaacaag

SEQ ID NO: 19179 - RNA, 21 nt, synthetic construct
  source 1..21: mol_type = other RNA
agatcaattccgcacagacct

SEQ ID NO: 19180 - RNA, 21 nt, synthetic construct
  source 1..21: mol_type = other RNA
agatcactcacccatcgcata

SEQ ID NO: 19181 - RNA, 21 nt, synthetic construct
  source 1..21: mol_type = other RNA
agatctcgtgtttgctccttg

SEQ ID NO: 19182 - RNA, 21 nt, synthetic construct
  source 1..21: mol_type = other RNA
agatcttcttcacaggtgctt

SEQ ID NO: 19183 - RNA, 21 nt, synthetic construct
  source 1..21: mol_type = other RNA
agatcttgctttgggatcaca

SEQ ID NO: 19184 - RNA, 21 nt, synthetic construct
  source 1..21: mol_type = other RNA
agatcttgtgcccccaacaca

SEQ ID NO: 19185 - RNA, 21 nt, synthetic construct
  source 1..21: mol_type = other RNA
agatgcacaggccaattaagg

SEQ ID NO: 19186 - RNA, 21 nt, synthetic construct
  source 1..21: mol_type = other RNA
agatgccaccttagagcagca

SEQ ID NO: 19187 - RNA, 21 nt, synthetic construct
  source 1..21: mol_type = other RNA
agatgctgctccatggtctca

SEQ ID NO: 19188 - RNA, 21 nt, synthetic construct
  source 1..21: mol_type = other RNA
agatggattaggactctggga

SEQ ID NO: 19189 - RNA, 21 nt, synthetic construct
  source 1..21: mol_type = other RNA
agatgggaaatcatattgagt

SEQ ID NO: 19190 - RNA, 21 nt, synthetic construct
  source 1..21: mol_type = other RNA
agatgggattccgcttggtga

SEQ ID NO: 19191 - RNA, 21 nt, synthetic construct
  source 1..21: mol_type = other RNA
agatgggcatatctcaaaaac

SEQ ID NO: 19192 - RNA, 21 nt, synthetic construct
  source 1..21: mol_type = other RNA
agatgtgaactctgggatggt

SEQ ID NO: 19193 - RNA, 21 nt, synthetic construct
  source 1..21: mol_type = other RNA
agatgtggttttctgcaccgc

SEQ ID NO: 19194 - RNA, 21 nt, synthetic construct
  source 1..21: mol_type = other RNA
agatgtgtaggtaagtgccag

SEQ ID NO: 19195 - RNA, 21 nt, synthetic construct
  source 1..21: mol_type = other RNA
agatgttggtccactgtacct

SEQ ID NO: 19196 - RNA, 21 nt, synthetic construct
  source 1..21: mol_type = other RNA
agattcccaaactgaaaaact

SEQ ID NO: 19197 - RNA, 21 nt, synthetic construct
  source 1..21: mol_type = other RNA
agattctgaagggtcgagaca

SEQ ID NO: 19198 - RNA, 21 nt, synthetic construct
  source 1..21: mol_type = other RNA
agattctgaatgagcaggagg

SEQ ID NO: 19199 - RNA, 21 nt, synthetic construct
  source 1..21: mol_type = other RNA
agattctttcttatcactcaa

SEQ ID NO: 19200 - RNA, 21 nt, synthetic construct
  source 1..21: mol_type = other RNA
agattgggttgatactgaaga

SEQ ID NO: 19201 - RNA, 21 nt, synthetic construct
  source 1..21: mol_type = other RNA
agattgtgtttccattgcggt

SEQ ID NO: 19202 - RNA, 21 nt, synthetic construct
  source 1..21: mol_type = other RNA
agatttcaccagtttttcaac

SEQ ID NO: 19203 - RNA, 21 nt, synthetic construct
  source 1..21: mol_type = other RNA
agcaaaagagcatcattgaga

SEQ ID NO: 19204 - RNA, 21 nt, synthetic construct
  source 1..21: mol_type = other RNA
agcaaacaacttcttcagaaa

SEQ ID NO: 19205 - RNA, 21 nt, synthetic construct
  source 1..21: mol_type = other RNA
agcaaacacagcaaccccaaa

SEQ ID NO: 19206 - RNA, 21 nt, synthetic construct
  source 1..21: mol_type = other RNA
agcaaacacgagatcttgtgc

SEQ ID NO: 19207 - RNA, 21 nt, synthetic construct
  source 1..21: mol_type = other RNA
agcaaagagaaggatcattct

SEQ ID NO: 19208 - RNA, 21 nt, synthetic construct
  source 1..21: mol_type = other RNA
agcaaagctcagtgttcacta

SEQ ID NO: 19209 - RNA, 21 nt, synthetic construct
  source 1..21: mol_type = other RNA
agcaaaggtacttgatacata

SEQ ID NO: 19210 - RNA, 21 nt, synthetic construct
  source 1..21: mol_type = other RNA
agcaacaatgatcagcaaaga

SEQ ID NO: 19211 - RNA, 21 nt, synthetic construct
  source 1..21: mol_type = other RNA
agcaacagcagcaaaaattac

SEQ ID NO: 19212 - RNA, 21 nt, synthetic construct
  source 1..21: mol_type = other RNA
agcaaccccaaactgagtctt

SEQ ID NO: 19213 - RNA, 21 nt, synthetic construct
  source 1..21: mol_type = other RNA
agcaagaacagcagcaaacac

SEQ ID NO: 19214 - RNA, 21 nt, synthetic construct
  source 1..21: mol_type = other RNA
agcaagagaatccacctgcaa

SEQ ID NO: 19215 - RNA, 21 nt, synthetic construct
  source 1..21: mol_type = other RNA
agcaagagattctgaagggtc

SEQ ID NO: 19216 - RNA, 21 nt, synthetic construct
  source 1..21: mol_type = other RNA
agcaagatcttcttcacaggt

SEQ ID NO: 19217 - RNA, 21 nt, synthetic construct
  source 1..21: mol_type = other RNA
agcaagcctgatggaacagga

SEQ ID NO: 19218 - RNA, 21 nt, synthetic construct
  source 1..21: mol_type = other RNA
agcaagtaaaagttgaaatgt

SEQ ID NO: 19219 - RNA, 21 nt, synthetic construct
  source 1..21: mol_type = other RNA
agcaagttgcgcagcttgttg

SEQ ID NO: 19220 - RNA, 21 nt, synthetic construct
  source 1..21: mol_type = other RNA
agcaattgtgatggtggtggt

SEQ ID NO: 19221 - RNA, 21 nt, synthetic construct
  source 1..21: mol_type = other RNA
agcaatttgcaagctcctggt

SEQ ID NO: 19222 - RNA, 21 nt, synthetic construct
  source 1..21: mol_type = other RNA
agcacaaacacaaccatccca

SEQ ID NO: 19223 - RNA, 21 nt, synthetic construct
  source 1..21: mol_type = other RNA
agcacaagtcacaaatgtacc

SEQ ID NO: 19224 - RNA, 21 nt, synthetic construct
  source 1..21: mol_type = other RNA
agcaccaccagaaaacaaaac

SEQ ID NO: 19225 - RNA, 21 nt, synthetic construct
  source 1..21: mol_type = other RNA
agcaccattaggcattagcac

SEQ ID NO: 19226 - RNA, 21 nt, synthetic construct
  source 1..21: mol_type = other RNA
agcaccattcatttcattttg

SEQ ID NO: 19227 - RNA, 21 nt, synthetic construct
  source 1..21: mol_type = other RNA
agcacctgtgaagaagatctt

SEQ ID NO: 19228 - RNA, 21 nt, synthetic construct
  source 1..21: mol_type = other RNA
agcactatctgaaaccaggat

SEQ ID NO: 19229 - RNA, 21 nt, synthetic construct
  source 1..21: mol_type = other RNA
agcactctgaatggtggagtt

SEQ ID NO: 19230 - RNA, 21 nt, synthetic construct
  source 1..21: mol_type = other RNA
agcactgccttgtttttaagt

SEQ ID NO: 19231 - RNA, 21 nt, synthetic construct
  source 1..21: mol_type = other RNA
agcacttgaatcaacaggctt

SEQ ID NO: 19232 - RNA, 21 nt, synthetic construct
  source 1..21: mol_type = other RNA
agcacttttcccctcctgctc

SEQ ID NO: 19233 - RNA, 21 nt, synthetic construct
  source 1..21: mol_type = other RNA
agcagaagtcacaacaagctt

SEQ ID NO: 19234 - RNA, 21 nt, synthetic construct
  source 1..21: mol_type = other RNA
agcagattcccaaactgaaaa

SEQ ID NO: 19235 - RNA, 21 nt, synthetic construct
  source 1..21: mol_type = other RNA
agcagcaaacaacttcttcag

SEQ ID NO: 19236 - RNA, 21 nt, synthetic construct
  source 1..21: mol_type = other RNA
agcagcaaacacagcaacccc

SEQ ID NO: 19237 - RNA, 21 nt, synthetic construct
  source 1..21: mol_type = other RNA
agcagcaatttgcaagctcct

SEQ ID NO: 19238 - RNA, 21 nt, synthetic construct
  source 1..21: mol_type = other RNA
agcagcatctgaagcagtttc

SEQ ID NO: 19239 - RNA, 21 nt, synthetic construct
  source 1..21: mol_type = other RNA
agcagcatgcttttgagtgtc

SEQ ID NO: 19240 - RNA, 21 nt, synthetic construct
  source 1..21: mol_type = other RNA
agcagctgttcttttggttgg

SEQ ID NO: 19241 - RNA, 21 nt, synthetic construct
  source 1..21: mol_type = other RNA
agcaggaggggaaaagtgcta

SEQ ID NO: 19242 - RNA, 21 nt, synthetic construct
  source 1..21: mol_type = other RNA
agcagtcaaccaaatgtctcc

SEQ ID NO: 19243 - RNA, 21 nt, synthetic construct
  source 1..21: mol_type = other RNA
agcagtggagagctacaggac

SEQ ID NO: 19244 - RNA, 21 nt, synthetic construct
  source 1..21: mol_type = other RNA
agcagtggtttgtctagtcaa

SEQ ID NO: 19245 - RNA, 21 nt, synthetic construct
  source 1..21: mol_type = other RNA
agcagttgatgagaaacaaag

SEQ ID NO: 19246 - RNA, 21 nt, synthetic construct
  source 1..21: mol_type = other RNA
agcagtttcacgccaagtcgt

SEQ ID NO: 19247 - RNA, 21 nt, synthetic construct
  source 1..21: mol_type = other RNA
agcataacccaccaatttttg

SEQ ID NO: 19248 - RNA, 21 nt, synthetic construct
  source 1..21: mol_type = other RNA
agcatcacaggcctcactcac

SEQ ID NO: 19249 - RNA, 21 nt, synthetic construct
  source 1..21: mol_type = other RNA
agcatcatcagcatcacaggc

SEQ ID NO: 19250 - RNA, 21 nt, synthetic construct
  source 1..21: mol_type = other RNA
agcatcattgagaccatggag

SEQ ID NO: 19251 - RNA, 21 nt, synthetic construct
  source 1..21: mol_type = other RNA
agcatcggagaagggctgcat

SEQ ID NO: 19252 - RNA, 21 nt, synthetic construct
  source 1..21: mol_type = other RNA
agcatctgaagcagtttcacg

SEQ ID NO: 19253 - RNA, 21 nt, synthetic construct
  source 1..21: mol_type = other RNA
agcatgctgctctaaggtggc

SEQ ID NO: 19254 - RNA, 21 nt, synthetic construct
  source 1..21: mol_type = other RNA
agcatgcttttgagtgtcctt

SEQ ID NO: 19255 - RNA, 21 nt, synthetic construct
  source 1..21: mol_type = other RNA
agcattgcagctagtttactg

SEQ ID NO: 19256 - RNA, 21 nt, synthetic construct
  source 1..21: mol_type = other RNA
agccaagaaagaaatccaggt

SEQ ID NO: 19257 - RNA, 21 nt, synthetic construct
  source 1..21: mol_type = other RNA
agccacaccccagctttagag

SEQ ID NO: 19258 - RNA, 21 nt, synthetic construct
  source 1..21: mol_type = other RNA
agccacatgcctgtatgcaca

SEQ ID NO: 19259 - RNA, 21 nt, synthetic construct
  source 1..21: mol_type = other RNA
agccagaatagtcgtgtgagt

SEQ ID NO: 19260 - RNA, 21 nt, synthetic construct
  source 1..21: mol_type = other RNA
agccagaggttctgtctggca

SEQ ID NO: 19261 - RNA, 21 nt, synthetic construct
  source 1..21: mol_type = other RNA
agccagctgcagtggtgagtg

SEQ ID NO: 19262 - RNA, 21 nt, synthetic construct
  source 1..21: mol_type = other RNA
agccattttcaaactcacacc

SEQ ID NO: 19263 - RNA, 21 nt, synthetic construct
  source 1..21: mol_type = other RNA
agcccaagaaaatgcagttaa

SEQ ID NO: 19264 - RNA, 21 nt, synthetic construct
  source 1..21: mol_type = other RNA
agcccactgcctgagagagct

SEQ ID NO: 19265 - RNA, 21 nt, synthetic construct
  source 1..21: mol_type = other RNA
agcccagagagagaaggttca

SEQ ID NO: 19266 - RNA, 21 nt, synthetic construct
  source 1..21: mol_type = other RNA
agccccccaggcatgttggaa

SEQ ID NO: 19267 - RNA, 21 nt, synthetic construct
  source 1..21: mol_type = other RNA
agcccttctccgatgctttct

SEQ ID NO: 19268 - RNA, 21 nt, synthetic construct
  source 1..21: mol_type = other RNA
agcctcataaacaggcagcac

SEQ ID NO: 19269 - RNA, 21 nt, synthetic construct
  source 1..21: mol_type = other RNA
agcctgactgttaatggcatt

SEQ ID NO: 19270 - RNA, 21 nt, synthetic construct
  source 1..21: mol_type = other RNA
agcctgatggaacaggataga

SEQ ID NO: 19271 - RNA, 21 nt, synthetic construct
  source 1..21: mol_type = other RNA
agcctgttgattcaagtgctg

SEQ ID NO: 19272 - RNA, 21 nt, synthetic construct
  source 1..21: mol_type = other RNA
agccttatggtcaaataacga

SEQ ID NO: 19273 - RNA, 21 nt, synthetic construct
  source 1..21: mol_type = other RNA
agccttgtggatggccccgaa

SEQ ID NO: 19274 - RNA, 21 nt, synthetic construct
  source 1..21: mol_type = other RNA
agccttttggtcttgtttcaa

SEQ ID NO: 19275 - RNA, 21 nt, synthetic construct
  source 1..21: mol_type = other RNA
agcgagttcgagactcataat

SEQ ID NO: 19276 - RNA, 21 nt, synthetic construct
  source 1..21: mol_type = other RNA
agcggaatcccatctaaaacg

SEQ ID NO: 19277 - RNA, 21 nt, synthetic construct
  source 1..21: mol_type = other RNA
agcgtctggtgaagaattctg

SEQ ID NO: 19278 - RNA, 21 nt, synthetic construct
  source 1..21: mol_type = other RNA
agctacaggacaactgccagc

SEQ ID NO: 19279 - RNA, 21 nt, synthetic construct
  source 1..21: mol_type = other RNA
agctagcgtctggtgaagaat

SEQ ID NO: 19280 - RNA, 21 nt, synthetic construct
  source 1..21: mol_type = other RNA
agctagtttactggcattatc

SEQ ID NO: 19281 - RNA, 21 nt, synthetic construct
  source 1..21: mol_type = other RNA
agctcagagttagaggtctgt

SEQ ID NO: 19282 - RNA, 21 nt, synthetic construct
  source 1..21: mol_type = other RNA
agctcagtgttcactaaggat

SEQ ID NO: 19283 - RNA, 21 nt, synthetic construct
  source 1..21: mol_type = other RNA
agctcatccagaagtaaatgg

SEQ ID NO: 19284 - RNA, 21 nt, synthetic construct
  source 1..21: mol_type = other RNA
agctcatgtgcagtcactgtg

SEQ ID NO: 19285 - RNA, 21 nt, synthetic construct
  source 1..21: mol_type = other RNA
agctccagaatggaagcccac

SEQ ID NO: 19286 - RNA, 21 nt, synthetic construct
  source 1..21: mol_type = other RNA
agctcctggtggcagctctga

SEQ ID NO: 19287 - RNA, 21 nt, synthetic construct
  source 1..21: mol_type = other RNA
agctctccactgctaccaaaa

SEQ ID NO: 19288 - RNA, 21 nt, synthetic construct
  source 1..21: mol_type = other RNA
agctctctcaggcagtgggct

SEQ ID NO: 19289 - RNA, 21 nt, synthetic construct
  source 1..21: mol_type = other RNA
agctctgaacggtatttaaaa

SEQ ID NO: 19290 - RNA, 21 nt, synthetic construct
  source 1..21: mol_type = other RNA
agctctggattttcaggccca

SEQ ID NO: 19291 - RNA, 21 nt, synthetic construct
  source 1..21: mol_type = other RNA
agctgaggaacctgtggaaga

SEQ ID NO: 19292 - RNA, 21 nt, synthetic construct
  source 1..21: mol_type = other RNA
agctgcaatgctaaatacctg

SEQ ID NO: 19293 - RNA, 21 nt, synthetic construct
  source 1..21: mol_type = other RNA
agctgcagtggtgagtgaggc

SEQ ID NO: 19294 - RNA, 21 nt, synthetic construct
  source 1..21: mol_type = other RNA
agctgccaccaggagcttgca

SEQ ID NO: 19295 - RNA, 21 nt, synthetic construct
  source 1..21: mol_type = other RNA
agctgcctccaaagccagctg

SEQ ID NO: 19296 - RNA, 21 nt, synthetic construct
  source 1..21: mol_type = other RNA
agctgcgcaacttgctcagca

SEQ ID NO: 19297 - RNA, 21 nt, synthetic construct
  source 1..21: mol_type = other RNA
agctgcttctgttctcaataa

SEQ ID NO: 19298 - RNA, 21 nt, synthetic construct
  source 1..21: mol_type = other RNA
agctggagcacaagtcacaaa

SEQ ID NO: 19299 - RNA, 21 nt, synthetic construct
  source 1..21: mol_type = other RNA
agctggctttggaggcagctc

SEQ ID NO: 19300 - RNA, 21 nt, synthetic construct
  source 1..21: mol_type = other RNA
agctggggtgtggctatcaag

SEQ ID NO: 19301 - RNA, 21 nt, synthetic construct
  source 1..21: mol_type = other RNA
agctgtgataatgtgcagcaa

SEQ ID NO: 19302 - RNA, 21 nt, synthetic construct
  source 1..21: mol_type = other RNA
agctgtgttgttttctgggtg

SEQ ID NO: 19303 - RNA, 21 nt, synthetic construct
  source 1..21: mol_type = other RNA
agctgttcttttggttggtgt

SEQ ID NO: 19304 - RNA, 21 nt, synthetic construct
  source 1..21: mol_type = other RNA
agcttacacccagaaaacaac

SEQ ID NO: 19305 - RNA, 21 nt, synthetic construct
  source 1..21: mol_type = other RNA
agcttcagattctgaatgagc

SEQ ID NO: 19306 - RNA, 21 nt, synthetic construct
  source 1..21: mol_type = other RNA
agcttcagttctacagggata

SEQ ID NO: 19307 - RNA, 21 nt, synthetic construct
  source 1..21: mol_type = other RNA
agcttccttcagaaggaaaaa

SEQ ID NO: 19308 - RNA, 21 nt, synthetic construct
  source 1..21: mol_type = other RNA
agcttgcaaattgctgctgga

SEQ ID NO: 19309 - RNA, 21 nt, synthetic construct
  source 1..21: mol_type = other RNA
agcttgcaggtggattctctt

SEQ ID NO: 19310 - RNA, 21 nt, synthetic construct
  source 1..21: mol_type = other RNA
agcttgccttgggagcccccc

SEQ ID NO: 19311 - RNA, 21 nt, synthetic construct
  source 1..21: mol_type = other RNA
agcttgttgaccagacatatc

SEQ ID NO: 19312 - RNA, 21 nt, synthetic construct
  source 1..21: mol_type = other RNA
agcttgttgtgacttctgctc

SEQ ID NO: 19313 - RNA, 21 nt, synthetic construct
  source 1..21: mol_type = other RNA
agctttagagcagcaaacaac

SEQ ID NO: 19314 - RNA, 21 nt, synthetic construct
  source 1..21: mol_type = other RNA
agctttgcttgaagtaagcac

SEQ ID NO: 19315 - RNA, 21 nt, synthetic construct
  source 1..21: mol_type = other RNA
agctttgtagccagaggttct

SEQ ID NO: 19316 - RNA, 21 nt, synthetic construct
  source 1..21: mol_type = other RNA
agctttgtggttccctggatg

SEQ ID NO: 19317 - RNA, 21 nt, synthetic construct
  source 1..21: mol_type = other RNA
agcttttggtaaatggtctgt

SEQ ID NO: 19318 - RNA, 21 nt, synthetic construct
  source 1..21: mol_type = other RNA
aggaaaaacatttgcatggtt

SEQ ID NO: 19319 - RNA, 21 nt, synthetic construct
  source 1..21: mol_type = other RNA
aggaaaaagcactctgaatgg

SEQ ID NO: 19320 - RNA, 21 nt, synthetic construct
  source 1..21: mol_type = other RNA
aggaaaagtctggagtatttc

SEQ ID NO: 19321 - RNA, 21 nt, synthetic construct
  source 1..21: mol_type = other RNA
aggaaacaagacccaaaactt

SEQ ID NO: 19322 - RNA, 21 nt, synthetic construct
  source 1..21: mol_type = other RNA
aggaaatactccagacttttc

SEQ ID NO: 19323 - RNA, 21 nt, synthetic construct
  source 1..21: mol_type = other RNA
aggaacaggtatttagcattg

SEQ ID NO: 19324 - RNA, 21 nt, synthetic construct
  source 1..21: mol_type = other RNA
aggaacctgtggaagaggagg

SEQ ID NO: 19325 - RNA, 21 nt, synthetic construct
  source 1..21: mol_type = other RNA
aggaagctgaggaacctgtgg

SEQ ID NO: 19326 - RNA, 21 nt, synthetic construct
  source 1..21: mol_type = other RNA
aggaagtacagaatataaatc

SEQ ID NO: 19327 - RNA, 21 nt, synthetic construct
  source 1..21: mol_type = other RNA
aggaagtcacactcagacccc

SEQ ID NO: 19328 - RNA, 21 nt, synthetic construct
  source 1..21: mol_type = other RNA
aggaataaaacgcacagttag

SEQ ID NO: 19329 - RNA, 21 nt, synthetic construct
  source 1..21: mol_type = other RNA
aggaatccttagtgaacactg

SEQ ID NO: 19330 - RNA, 21 nt, synthetic construct
  source 1..21: mol_type = other RNA
aggaatgacatacagactgca

SEQ ID NO: 19331 - RNA, 21 nt, synthetic construct
  source 1..21: mol_type = other RNA
aggaatggacttagtctgttg

SEQ ID NO: 19332 - RNA, 21 nt, synthetic construct
  source 1..21: mol_type = other RNA
aggacaactcattagtagcct

SEQ ID NO: 19333 - RNA, 21 nt, synthetic construct
  source 1..21: mol_type = other RNA
aggacaactgccagcagttga

SEQ ID NO: 19334 - RNA, 21 nt, synthetic construct
  source 1..21: mol_type = other RNA
aggacactcaaaagcatgctg

SEQ ID NO: 19335 - RNA, 21 nt, synthetic construct
  source 1..21: mol_type = other RNA
aggactcacacgactattctg

SEQ ID NO: 19336 - RNA, 21 nt, synthetic construct
  source 1..21: mol_type = other RNA
aggactctgggaaggtggtgc

SEQ ID NO: 19337 - RNA, 21 nt, synthetic construct
  source 1..21: mol_type = other RNA
aggagatgggcatatctcaaa

SEQ ID NO: 19338 - RNA, 21 nt, synthetic construct
  source 1..21: mol_type = other RNA
aggagcaaacacgagatcttg

SEQ ID NO: 19339 - RNA, 21 nt, synthetic construct
  source 1..21: mol_type = other RNA
aggagcagaagtcacaacaag

SEQ ID NO: 19340 - RNA, 21 nt, synthetic construct
  source 1..21: mol_type = other RNA
aggagcccagagagagaaggt

SEQ ID NO: 19341 - RNA, 21 nt, synthetic construct
  source 1..21: mol_type = other RNA
aggagcttgcaaattgctgct

SEQ ID NO: 19342 - RNA, 21 nt, synthetic construct
  source 1..21: mol_type = other RNA
aggaggagggggagaaagaag

SEQ ID NO: 19343 - RNA, 21 nt, synthetic construct
  source 1..21: mol_type = other RNA
aggaggggaaaagtgctaatt

SEQ ID NO: 19344 - RNA, 21 nt, synthetic construct
  source 1..21: mol_type = other RNA
aggagggggagaaagaagcaa

SEQ ID NO: 19345 - RNA, 21 nt, synthetic construct
  source 1..21: mol_type = other RNA
aggagtatctagtaatttgga

SEQ ID NO: 19346 - RNA, 21 nt, synthetic construct
  source 1..21: mol_type = other RNA
aggagttcaccatgtgtgtgt

SEQ ID NO: 19347 - RNA, 21 nt, synthetic construct
  source 1..21: mol_type = other RNA
aggatagaaccaaccatgttg

SEQ ID NO: 19348 - RNA, 21 nt, synthetic construct
  source 1..21: mol_type = other RNA
aggatcattctttggccagac

SEQ ID NO: 19349 - RNA, 21 nt, synthetic construct
  source 1..21: mol_type = other RNA
aggatggattgaattgaaggc

SEQ ID NO: 19350 - RNA, 21 nt, synthetic construct
  source 1..21: mol_type = other RNA
aggatgtgtagtctgttcttt

SEQ ID NO: 19351 - RNA, 21 nt, synthetic construct
  source 1..21: mol_type = other RNA
aggattccttttctgccacta

SEQ ID NO: 19352 - RNA, 21 nt, synthetic construct
  source 1..21: mol_type = other RNA
aggcaagcttacacccagaaa

SEQ ID NO: 19353 - RNA, 21 nt, synthetic construct
  source 1..21: mol_type = other RNA
aggcacaggaaaaacatttgc

SEQ ID NO: 19354 - RNA, 21 nt, synthetic construct
  source 1..21: mol_type = other RNA
aggcaccaccttcccagagtc

SEQ ID NO: 19355 - RNA, 21 nt, synthetic construct
  source 1..21: mol_type = other RNA
aggcagaaactgtagcaccat

SEQ ID NO: 19356 - RNA, 21 nt, synthetic construct
  source 1..21: mol_type = other RNA
aggcagcacaaacacaaccat

SEQ ID NO: 19357 - RNA, 21 nt, synthetic construct
  source 1..21: mol_type = other RNA
aggcagctcagagttagaggt

SEQ ID NO: 19358 - RNA, 21 nt, synthetic construct
  source 1..21: mol_type = other RNA
aggcagtgctaatgcctaatg

SEQ ID NO: 19359 - RNA, 21 nt, synthetic construct
  source 1..21: mol_type = other RNA
aggcagtgggcttccattctg

SEQ ID NO: 19360 - RNA, 21 nt, synthetic construct
  source 1..21: mol_type = other RNA
aggcatcactgccatcaattc

SEQ ID NO: 19361 - RNA, 21 nt, synthetic construct
  source 1..21: mol_type = other RNA
aggcatgtggcttgcatccag

SEQ ID NO: 19362 - RNA, 21 nt, synthetic construct
  source 1..21: mol_type = other RNA
aggcatgttggaatttccagt

SEQ ID NO: 19363 - RNA, 21 nt, synthetic construct
  source 1..21: mol_type = other RNA
aggcattagcactgccttgtt

SEQ ID NO: 19364 - RNA, 21 nt, synthetic construct
  source 1..21: mol_type = other RNA
aggccaattaaggtggaacct

SEQ ID NO: 19365 - RNA, 21 nt, synthetic construct
  source 1..21: mol_type = other RNA
aggcccactgcagttatgtgt

SEQ ID NO: 19366 - RNA, 21 nt, synthetic construct
  source 1..21: mol_type = other RNA
aggcccctcgttttcaccaag

SEQ ID NO: 19367 - RNA, 21 nt, synthetic construct
  source 1..21: mol_type = other RNA
aggcctcactcaccactgcag

SEQ ID NO: 19368 - RNA, 21 nt, synthetic construct
  source 1..21: mol_type = other RNA
aggcctcagaataattgtgtg

SEQ ID NO: 19369 - RNA, 21 nt, synthetic construct
  source 1..21: mol_type = other RNA
aggcctgtgatgctgatgatg

SEQ ID NO: 19370 - RNA, 21 nt, synthetic construct
  source 1..21: mol_type = other RNA
aggcctttcagaaagcatcgg

SEQ ID NO: 19371 - RNA, 21 nt, synthetic construct
  source 1..21: mol_type = other RNA
aggctaatggagaaagacgta

SEQ ID NO: 19372 - RNA, 21 nt, synthetic construct
  source 1..21: mol_type = other RNA
aggctactaatgagttgtcct

SEQ ID NO: 19373 - RNA, 21 nt, synthetic construct
  source 1..21: mol_type = other RNA
aggctcttactctcaaatcac

SEQ ID NO: 19374 - RNA, 21 nt, synthetic construct
  source 1..21: mol_type = other RNA
aggcttatgttgcaaaaggtg

SEQ ID NO: 19375 - RNA, 21 nt, synthetic construct
  source 1..21: mol_type = other RNA
aggcttcagagactgagccat

SEQ ID NO: 19376 - RNA, 21 nt, synthetic construct
  source 1..21: mol_type = other RNA
aggcttgcttcggggccatcc

SEQ ID NO: 19377 - RNA, 21 nt, synthetic construct
  source 1..21: mol_type = other RNA
agggaaccacaaagctagcgt

SEQ ID NO: 19378 - RNA, 21 nt, synthetic construct
  source 1..21: mol_type = other RNA
agggaagccagaatagtcgtg

SEQ ID NO: 19379 - RNA, 21 nt, synthetic construct
  source 1..21: mol_type = other RNA
agggaagtgaaaatagagggt

SEQ ID NO: 19380 - RNA, 21 nt, synthetic construct
  source 1..21: mol_type = other RNA
agggacaatgactgttccatt

SEQ ID NO: 19381 - RNA, 21 nt, synthetic construct
  source 1..21: mol_type = other RNA
agggagatgtgaactctggga

SEQ ID NO: 19382 - RNA, 21 nt, synthetic construct
  source 1..21: mol_type = other RNA
agggaggaagtcacactcaga

SEQ ID NO: 19383 - RNA, 21 nt, synthetic construct
  source 1..21: mol_type = other RNA
agggatataaaaatagaaacc

SEQ ID NO: 19384 - RNA, 21 nt, synthetic construct
  source 1..21: mol_type = other RNA
agggcaacagactaagtccat

SEQ ID NO: 19385 - RNA, 21 nt, synthetic construct
  source 1..21: mol_type = other RNA
agggcagatcaattccgcaca

SEQ ID NO: 19386 - RNA, 21 nt, synthetic construct
  source 1..21: mol_type = other RNA
agggcagccttgtggatggcc

SEQ ID NO: 19387 - RNA, 21 nt, synthetic construct
  source 1..21: mol_type = other RNA
agggcagtcccaaggtacagt

SEQ ID NO: 19388 - RNA, 21 nt, synthetic construct
  source 1..21: mol_type = other RNA
agggccagtcacagttttgac

SEQ ID NO: 19389 - RNA, 21 nt, synthetic construct
  source 1..21: mol_type = other RNA
agggctgcatacatgtgtaga

SEQ ID NO: 19390 - RNA, 21 nt, synthetic construct
  source 1..21: mol_type = other RNA
aggggaaaagtgctaattacc

SEQ ID NO: 19391 - RNA, 21 nt, synthetic construct
  source 1..21: mol_type = other RNA
aggggaatttctacgatttat

SEQ ID NO: 19392 - RNA, 21 nt, synthetic construct
  source 1..21: mol_type = other RNA
aggggccttcaattcaatcca

SEQ ID NO: 19393 - RNA, 21 nt, synthetic construct
  source 1..21: mol_type = other RNA
agggggagaaagaagcaattg

SEQ ID NO: 19394 - RNA, 21 nt, synthetic construct
  source 1..21: mol_type = other RNA
aggggtctgagtgtgacttcc

SEQ ID NO: 19395 - RNA, 21 nt, synthetic construct
  source 1..21: mol_type = other RNA
agggtaaacctgaggcaccac

SEQ ID NO: 19396 - RNA, 21 nt, synthetic construct
  source 1..21: mol_type = other RNA
agggtattccaagtgtttgca

SEQ ID NO: 19397 - RNA, 21 nt, synthetic construct
  source 1..21: mol_type = other RNA
agggtattccataataacttt

SEQ ID NO: 19398 - RNA, 21 nt, synthetic construct
  source 1..21: mol_type = other RNA
agggtcgagacaaggagcaaa

SEQ ID NO: 19399 - RNA, 21 nt, synthetic construct
  source 1..21: mol_type = other RNA
agggtttttggaactggagat

SEQ ID NO: 19400 - RNA, 21 nt, synthetic construct
  source 1..21: mol_type = other RNA
aggtaactaagcaagagaatc

SEQ ID NO: 19401 - RNA, 21 nt, synthetic construct
  source 1..21: mol_type = other RNA
aggtaagtgccagaaatgtac

SEQ ID NO: 19402 - RNA, 21 nt, synthetic construct
  source 1..21: mol_type = other RNA
aggtacagtggaccaacatct

SEQ ID NO: 19403 - RNA, 21 nt, synthetic construct
  source 1..21: mol_type = other RNA
aggtacttgatacataaccat

SEQ ID NO: 19404 - RNA, 21 nt, synthetic construct
  source 1..21: mol_type = other RNA
aggtatgcgatgggtgagtga

SEQ ID NO: 19405 - RNA, 21 nt, synthetic construct
  source 1..21: mol_type = other RNA
aggtatttagcattgcagcta

SEQ ID NO: 19406 - RNA, 21 nt, synthetic construct
  source 1..21: mol_type = other RNA
aggtcatttgattggagagat

SEQ ID NO: 19407 - RNA, 21 nt, synthetic construct
  source 1..21: mol_type = other RNA
aggtctgtgcggaattgatct

SEQ ID NO: 19408 - RNA, 21 nt, synthetic construct
  source 1..21: mol_type = other RNA
aggtgaaagcagtcaaccaaa

SEQ ID NO: 19409 - RNA, 21 nt, synthetic construct
  source 1..21: mol_type = other RNA
aggtgatggtatcaggaatgg

SEQ ID NO: 19410 - RNA, 21 nt, synthetic construct
  source 1..21: mol_type = other RNA
aggtgcacttctccaaaacag

SEQ ID NO: 19411 - RNA, 21 nt, synthetic construct
  source 1..21: mol_type = other RNA
aggtgctttcaagaacaggag

SEQ ID NO: 19412 - RNA, 21 nt, synthetic construct
  source 1..21: mol_type = other RNA
aggtggaacctggatgcaagc

SEQ ID NO: 19413 - RNA, 21 nt, synthetic construct
  source 1..21: mol_type = other RNA
aggtggattctcttgcttagt

SEQ ID NO: 19414 - RNA, 21 nt, synthetic construct
  source 1..21: mol_type = other RNA
aggtggcatctcttacagaag

SEQ ID NO: 19415 - RNA, 21 nt, synthetic construct
  source 1..21: mol_type = other RNA
aggtggtgcctcaggtttacc

SEQ ID NO: 19416 - RNA, 21 nt, synthetic construct
  source 1..21: mol_type = other RNA
aggtgtgagtttgaaaatggc

SEQ ID NO: 19417 - RNA, 21 nt, synthetic construct
  source 1..21: mol_type = other RNA
aggtgtgtattgtttgaacaa

SEQ ID NO: 19418 - RNA, 21 nt, synthetic construct
  source 1..21: mol_type = other RNA
aggtgttctgacattggtctt

SEQ ID NO: 19419 - RNA, 21 nt, synthetic construct
  source 1..21: mol_type = other RNA
aggttcactaactgtgcgttt

SEQ ID NO: 19420 - RNA, 21 nt, synthetic construct
  source 1..21: mol_type = other RNA
aggttccaccttaattggcct

SEQ ID NO: 19421 - RNA, 21 nt, synthetic construct
  source 1..21: mol_type = other RNA
aggttccagcagcaatttgca

SEQ ID NO: 19422 - RNA, 21 nt, synthetic construct
  source 1..21: mol_type = other RNA
aggttcctcagcttccttcag

SEQ ID NO: 19423 - RNA, 21 nt, synthetic construct
  source 1..21: mol_type = other RNA
aggttctgtctggcaaatggg

SEQ ID NO: 19424 - RNA, 21 nt, synthetic construct
  source 1..21: mol_type = other RNA
aggtttaccctctattttcac

SEQ ID NO: 19425 - RNA, 21 nt, synthetic construct
  source 1..21: mol_type = other RNA
aggtttcttgttcaaacaata

SEQ ID NO: 19426 - RNA, 21 nt, synthetic construct
  source 1..21: mol_type = other RNA
agtaaaagttgaaatgtcagg

SEQ ID NO: 19427 - RNA, 21 nt, synthetic construct
  source 1..21: mol_type = other RNA
agtaaactagctgcaatgcta

SEQ ID NO: 19428 - RNA, 21 nt, synthetic construct
  source 1..21: mol_type = other RNA
agtaaatggagacaccaagtg

SEQ ID NO: 19429 - RNA, 21 nt, synthetic construct
  source 1..21: mol_type = other RNA
agtaacacaacacttttaagg

SEQ ID NO: 19430 - RNA, 21 nt, synthetic construct
  source 1..21: mol_type = other RNA
agtaagagccttatggtcaaa

SEQ ID NO: 19431 - RNA, 21 nt, synthetic construct
  source 1..21: mol_type = other RNA
agtaagcaccattcatttcat

SEQ ID NO: 19432 - RNA, 21 nt, synthetic construct
  source 1..21: mol_type = other RNA
agtaatacaatgttcttgtca

SEQ ID NO: 19433 - RNA, 21 nt, synthetic construct
  source 1..21: mol_type = other RNA
agtaatttggaaggtgactct

SEQ ID NO: 19434 - RNA, 21 nt, synthetic construct
  source 1..21: mol_type = other RNA
agtacagaatataaatcgtag

SEQ ID NO: 19435 - RNA, 21 nt, synthetic construct
  source 1..21: mol_type = other RNA
agtacatttctggcacttacc

SEQ ID NO: 19436 - RNA, 21 nt, synthetic construct
  source 1..21: mol_type = other RNA
agtacctttgctgagcaagtt

SEQ ID NO: 19437 - RNA, 21 nt, synthetic construct
  source 1..21: mol_type = other RNA
agtagagggtattccaagtgt

SEQ ID NO: 19438 - RNA, 21 nt, synthetic construct
  source 1..21: mol_type = other RNA
agtagcctgactgttaatggc

SEQ ID NO: 19439 - RNA, 21 nt, synthetic construct
  source 1..21: mol_type = other RNA
agtatcaacccaatctctcca

SEQ ID NO: 19440 - RNA, 21 nt, synthetic construct
  source 1..21: mol_type = other RNA
agtatctagtaatttggaagg

SEQ ID NO: 19441 - RNA, 21 nt, synthetic construct
  source 1..21: mol_type = other RNA
agtattcaaaatcaagcgagt

SEQ ID NO: 19442 - RNA, 21 nt, synthetic construct
  source 1..21: mol_type = other RNA
agtcaaaactgtgactggccc

SEQ ID NO: 19443 - RNA, 21 nt, synthetic construct
  source 1..21: mol_type = other RNA
agtcaaccaaatgtctccgat

SEQ ID NO: 19444 - RNA, 21 nt, synthetic construct
  source 1..21: mol_type = other RNA
agtcacaaatgtaccaagttg

SEQ ID NO: 19445 - RNA, 21 nt, synthetic construct
  source 1..21: mol_type = other RNA
agtcacaacaagcttcagttc

SEQ ID NO: 19446 - RNA, 21 nt, synthetic construct
  source 1..21: mol_type = other RNA
agtcacactcagacccctccc

SEQ ID NO: 19447 - RNA, 21 nt, synthetic construct
  source 1..21: mol_type = other RNA
agtcacagttttgactagaca

SEQ ID NO: 19448 - RNA, 21 nt, synthetic construct
  source 1..21: mol_type = other RNA
agtcaccttccaaattactag

SEQ ID NO: 19449 - RNA, 21 nt, synthetic construct
  source 1..21: mol_type = other RNA
agtcactgtgtggcactagat

SEQ ID NO: 19450 - RNA, 21 nt, synthetic construct
  source 1..21: mol_type = other RNA
agtcagaccatgaaatcaagt

SEQ ID NO: 19451 - RNA, 21 nt, synthetic construct
  source 1..21: mol_type = other RNA
agtcagatgcacaggccaatt

SEQ ID NO: 19452 - RNA, 21 nt, synthetic construct
  source 1..21: mol_type = other RNA
agtcaggactcacacgactat

SEQ ID NO: 19453 - RNA, 21 nt, synthetic construct
  source 1..21: mol_type = other RNA
agtcaggctactaatgagttg

SEQ ID NO: 19454 - RNA, 21 nt, synthetic construct
  source 1..21: mol_type = other RNA
agtcattgtccctgcagtctg

SEQ ID NO: 19455 - RNA, 21 nt, synthetic construct
  source 1..21: mol_type = other RNA
agtccattcctgataccatca

SEQ ID NO: 19456 - RNA, 21 nt, synthetic construct
  source 1..21: mol_type = other RNA
agtcccaaggtacagtggacc

SEQ ID NO: 19457 - RNA, 21 nt, synthetic construct
  source 1..21: mol_type = other RNA
agtcccatttggacattatga

SEQ ID NO: 19458 - RNA, 21 nt, synthetic construct
  source 1..21: mol_type = other RNA
agtcctaatccatctacacat

SEQ ID NO: 19459 - RNA, 21 nt, synthetic construct
  source 1..21: mol_type = other RNA
agtcctgactttacacaagaa

SEQ ID NO: 19460 - RNA, 21 nt, synthetic construct
  source 1..21: mol_type = other RNA
agtcgtgtgagtcctgacttt

SEQ ID NO: 19461 - RNA, 21 nt, synthetic construct
  source 1..21: mol_type = other RNA
agtcgttatttgaccataagg

SEQ ID NO: 19462 - RNA, 21 nt, synthetic construct
  source 1..21: mol_type = other RNA
agtctcgaactcgcttgattt

SEQ ID NO: 19463 - RNA, 21 nt, synthetic construct
  source 1..21: mol_type = other RNA
agtctctgaagcctgttgatt

SEQ ID NO: 19464 - RNA, 21 nt, synthetic construct
  source 1..21: mol_type = other RNA
agtctggagtatttcctcttt

SEQ ID NO: 19465 - RNA, 21 nt, synthetic construct
  source 1..21: mol_type = other RNA
agtctggccaaagaatgatcc

SEQ ID NO: 19466 - RNA, 21 nt, synthetic construct
  source 1..21: mol_type = other RNA
agtctgtatgtcattcctgtt

SEQ ID NO: 19467 - RNA, 21 nt, synthetic construct
  source 1..21: mol_type = other RNA
agtctgttctttattctctga

SEQ ID NO: 19468 - RNA, 21 nt, synthetic construct
  source 1..21: mol_type = other RNA
agtctgttgccctcaacatgg

SEQ ID NO: 19469 - RNA, 21 nt, synthetic construct
  source 1..21: mol_type = other RNA
agtcttgacaggtgtatccaa

SEQ ID NO: 19470 - RNA, 21 nt, synthetic construct
  source 1..21: mol_type = other RNA
agtcttgccatagtcagatgc

SEQ ID NO: 19471 - RNA, 21 nt, synthetic construct
  source 1..21: mol_type = other RNA
agtgaaaatagagggtaaacc

SEQ ID NO: 19472 - RNA, 21 nt, synthetic construct
  source 1..21: mol_type = other RNA
agtgaacactgagctttgctt

SEQ ID NO: 19473 - RNA, 21 nt, synthetic construct
  source 1..21: mol_type = other RNA
agtgaaccttctctctctggg

SEQ ID NO: 19474 - RNA, 21 nt, synthetic construct
  source 1..21: mol_type = other RNA
agtgactgcacatgagctttt

SEQ ID NO: 19475 - RNA, 21 nt, synthetic construct
  source 1..21: mol_type = other RNA
agtgaggcctgtgatgctgat

SEQ ID NO: 19476 - RNA, 21 nt, synthetic construct
  source 1..21: mol_type = other RNA
agtgataagaaagaatctgtg

SEQ ID NO: 19477 - RNA, 21 nt, synthetic construct
  source 1..21: mol_type = other RNA
agtgatctcacaggacaactc

SEQ ID NO: 19478 - RNA, 21 nt, synthetic construct
  source 1..21: mol_type = other RNA
agtgatgcctcattacgtttt

SEQ ID NO: 19479 - RNA, 21 nt, synthetic construct
  source 1..21: mol_type = other RNA
agtgcacctggtgtgagggtt

SEQ ID NO: 19480 - RNA, 21 nt, synthetic construct
  source 1..21: mol_type = other RNA
agtgcatgcaaaatacaggtt

SEQ ID NO: 19481 - RNA, 21 nt, synthetic construct
  source 1..21: mol_type = other RNA
agtgccacacagtgactgcac

SEQ ID NO: 19482 - RNA, 21 nt, synthetic construct
  source 1..21: mol_type = other RNA
agtgccacttggtgtctccat

SEQ ID NO: 19483 - RNA, 21 nt, synthetic construct
  source 1..21: mol_type = other RNA
agtgccagaaatgtactgaga

SEQ ID NO: 19484 - RNA, 21 nt, synthetic construct
  source 1..21: mol_type = other RNA
agtgctaatgcctaatggtgc

SEQ ID NO: 19485 - RNA, 21 nt, synthetic construct
  source 1..21: mol_type = other RNA
agtgctaattaccatgacaag

SEQ ID NO: 19486 - RNA, 21 nt, synthetic construct
  source 1..21: mol_type = other RNA
agtgctgtgttgggggcacaa

SEQ ID NO: 19487 - RNA, 21 nt, synthetic construct
  source 1..21: mol_type = other RNA
agtgctgtttcaacactgggg

SEQ ID NO: 19488 - RNA, 21 nt, synthetic construct
  source 1..21: mol_type = other RNA
agtgctttttccttctgaagg

SEQ ID NO: 19489 - RNA, 21 nt, synthetic construct
  source 1..21: mol_type = other RNA
agtggaagaatgttttcatgg

SEQ ID NO: 19490 - RNA, 21 nt, synthetic construct
  source 1..21: mol_type = other RNA
agtggaccaacatctccagtt

SEQ ID NO: 19491 - RNA, 21 nt, synthetic construct
  source 1..21: mol_type = other RNA
agtggagagctacaggacaac

SEQ ID NO: 19492 - RNA, 21 nt, synthetic construct
  source 1..21: mol_type = other RNA
agtggcactctttcaaaagtt

SEQ ID NO: 19493 - RNA, 21 nt, synthetic construct
  source 1..21: mol_type = other RNA
agtggcagaaaaggaatcctt

SEQ ID NO: 19494 - RNA, 21 nt, synthetic construct
  source 1..21: mol_type = other RNA
agtgggcctgaaaatccagag

SEQ ID NO: 19495 - RNA, 21 nt, synthetic construct
  source 1..21: mol_type = other RNA
agtgggcttccattctggagc

SEQ ID NO: 19496 - RNA, 21 nt, synthetic construct
  source 1..21: mol_type = other RNA
agtggtgagtgaggcctgtga

SEQ ID NO: 19497 - RNA, 21 nt, synthetic construct
  source 1..21: mol_type = other RNA
agtggtggtgttcttctaaaa

SEQ ID NO: 19498 - RNA, 21 nt, synthetic construct
  source 1..21: mol_type = other RNA
agtggtttgtctagtcaaaac

SEQ ID NO: 19499 - RNA, 21 nt, synthetic construct
  source 1..21: mol_type = other RNA
agtgtattgtttggaggtcat

SEQ ID NO: 19500 - RNA, 21 nt, synthetic construct
  source 1..21: mol_type = other RNA
agtgtccttctggggaggggt

SEQ ID NO: 19501 - RNA, 21 nt, synthetic construct
  source 1..21: mol_type = other RNA
agtgtgacttcctccctggtc

SEQ ID NO: 19502 - RNA, 21 nt, synthetic construct
  source 1..21: mol_type = other RNA
agtgttcactaaggattcctt

SEQ ID NO: 19503 - RNA, 21 nt, synthetic construct
  source 1..21: mol_type = other RNA
agtgttgaaacagcacttgaa

SEQ ID NO: 19504 - RNA, 21 nt, synthetic construct
  source 1..21: mol_type = other RNA
agtgttgtgttactttggttg

SEQ ID NO: 19505 - RNA, 21 nt, synthetic construct
  source 1..21: mol_type = other RNA
agtgtttgcaaaatggaggaa

SEQ ID NO: 19506 - RNA, 21 nt, synthetic construct
  source 1..21: mol_type = other RNA
agtgttttttccaggagttca

SEQ ID NO: 19507 - RNA, 21 nt, synthetic construct
  source 1..21: mol_type = other RNA
agttaaagatttcaccagttt

SEQ ID NO: 19508 - RNA, 21 nt, synthetic construct
  source 1..21: mol_type = other RNA
agttacctttttccatgtttt

SEQ ID NO: 19509 - RNA, 21 nt, synthetic construct
  source 1..21: mol_type = other RNA
agttacgtctttctccattag

SEQ ID NO: 19510 - RNA, 21 nt, synthetic construct
  source 1..21: mol_type = other RNA
agttagaggtctgtgcggaat

SEQ ID NO: 19511 - RNA, 21 nt, synthetic construct
  source 1..21: mol_type = other RNA
agttagtgaaccttctctctc

SEQ ID NO: 19512 - RNA, 21 nt, synthetic construct
  source 1..21: mol_type = other RNA
agttatgtgttgaaaaactgg

SEQ ID NO: 19513 - RNA, 21 nt, synthetic construct
  source 1..21: mol_type = other RNA
agttattatggaataccctgt

SEQ ID NO: 19514 - RNA, 21 nt, synthetic construct
  source 1..21: mol_type = other RNA
agttcacatctccctcaaaac

SEQ ID NO: 19515 - RNA, 21 nt, synthetic construct
  source 1..21: mol_type = other RNA
agttcaccatgtgtgtgttcc

SEQ ID NO: 19516 - RNA, 21 nt, synthetic construct
  source 1..21: mol_type = other RNA
agttcaggatgtgtagtctgt

SEQ ID NO: 19517 - RNA, 21 nt, synthetic construct
  source 1..21: mol_type = other RNA
agttccaaaaaccctcacacc

SEQ ID NO: 19518 - RNA, 21 nt, synthetic construct
  source 1..21: mol_type = other RNA
agttcgagactcataatgtcc

SEQ ID NO: 19519 - RNA, 21 nt, synthetic construct
  source 1..21: mol_type = other RNA
agttctacagggatataaaaa

SEQ ID NO: 19520 - RNA, 21 nt, synthetic construct
  source 1..21: mol_type = other RNA
agttctgcagcagtggtttgt

SEQ ID NO: 19521 - RNA, 21 nt, synthetic construct
  source 1..21: mol_type = other RNA
agttctgtagcccaagaaaat

SEQ ID NO: 19522 - RNA, 21 nt, synthetic construct
  source 1..21: mol_type = other RNA
agttgaaatgaatcaagggca

SEQ ID NO: 19523 - RNA, 21 nt, synthetic construct
  source 1..21: mol_type = other RNA
agttgaaatgtcagggccagt

SEQ ID NO: 19524 - RNA, 21 nt, synthetic construct
  source 1..21: mol_type = other RNA
agttgatgagaaacaaagagc

SEQ ID NO: 19525 - RNA, 21 nt, synthetic construct
  source 1..21: mol_type = other RNA
agttgcgcagcttgttgacca

SEQ ID NO: 19526 - RNA, 21 nt, synthetic construct
  source 1..21: mol_type = other RNA
agttgtcctgtagctctccac

SEQ ID NO: 19527 - RNA, 21 nt, synthetic construct
  source 1..21: mol_type = other RNA
agttgtcctgtgagatcactc

SEQ ID NO: 19528 - RNA, 21 nt, synthetic construct
  source 1..21: mol_type = other RNA
agttgttctggtttctgaaag

SEQ ID NO: 19529 - RNA, 21 nt, synthetic construct
  source 1..21: mol_type = other RNA
agttgtttgctgctctaaagc

SEQ ID NO: 19530 - RNA, 21 nt, synthetic construct
  source 1..21: mol_type = other RNA
agtttactggcattatcagca

SEQ ID NO: 19531 - RNA, 21 nt, synthetic construct
  source 1..21: mol_type = other RNA
agtttcacgccaagtcgttat

SEQ ID NO: 19532 - RNA, 21 nt, synthetic construct
  source 1..21: mol_type = other RNA
agtttcagagaataaagaaca

SEQ ID NO: 19533 - RNA, 21 nt, synthetic construct
  source 1..21: mol_type = other RNA
agtttctgcctcttccgtgga

SEQ ID NO: 19534 - RNA, 21 nt, synthetic construct
  source 1..21: mol_type = other RNA
agtttgaaaatggctcagtct

SEQ ID NO: 19535 - RNA, 21 nt, synthetic construct
  source 1..21: mol_type = other RNA
agtttgggaatctgctctttg

SEQ ID NO: 19536 - RNA, 21 nt, synthetic construct
  source 1..21: mol_type = other RNA
agtttggggttgctgtgtttg

SEQ ID NO: 19537 - RNA, 21 nt, synthetic construct
  source 1..21: mol_type = other RNA
agttttagaagaacaccacca

SEQ ID NO: 19538 - RNA, 21 nt, synthetic construct
  source 1..21: mol_type = other RNA
agttttgactagacaaaccac

SEQ ID NO: 19539 - RNA, 21 nt, synthetic construct
  source 1..21: mol_type = other RNA
agttttgggtcttgtttcctg

SEQ ID NO: 19540 - RNA, 21 nt, synthetic construct
  source 1..21: mol_type = other RNA
agtttttcaacacataactgc

SEQ ID NO: 19541 - RNA, 21 nt, synthetic construct
  source 1..21: mol_type = other RNA
agtttttcagtttgggaatct

SEQ ID NO: 19542 - RNA, 21 nt, synthetic construct
  source 1..21: mol_type = other RNA
agtttttgagatatgcccatc

SEQ ID NO: 19543 - RNA, 21 nt, synthetic construct
  source 1..21: mol_type = other RNA
ataaaacgcacagttagtgaa

SEQ ID NO: 19544 - RNA, 21 nt, synthetic construct
  source 1..21: mol_type = other RNA
ataaacaggcagcacaaacac

SEQ ID NO: 19545 - RNA, 21 nt, synthetic construct
  source 1..21: mol_type = other RNA
ataaacgccatgtgtctcagt

SEQ ID NO: 19546 - RNA, 21 nt, synthetic construct
  source 1..21: mol_type = other RNA
ataaagaacagactacacatc

SEQ ID NO: 19547 - RNA, 21 nt, synthetic construct
  source 1..21: mol_type = other RNA
ataaagaggaaatactccaga

SEQ ID NO: 19548 - RNA, 21 nt, synthetic construct
  source 1..21: mol_type = other RNA
ataaatcgtagaaattcccct

SEQ ID NO: 19549 - RNA, 21 nt, synthetic construct
  source 1..21: mol_type = other RNA
ataaatgccattaacagtcag

SEQ ID NO: 19550 - RNA, 21 nt, synthetic construct
  source 1..21: mol_type = other RNA
ataacatccagggaaccacaa

SEQ ID NO: 19551 - RNA, 21 nt, synthetic construct
  source 1..21: mol_type = other RNA
ataaccatgcaaatgtttttc

SEQ ID NO: 19552 - RNA, 21 nt, synthetic construct
  source 1..21: mol_type = other RNA
ataacccaccaatttttggta

SEQ ID NO: 19553 - RNA, 21 nt, synthetic construct
  source 1..21: mol_type = other RNA
ataacgacttggcgtgaaact

SEQ ID NO: 19554 - RNA, 21 nt, synthetic construct
  source 1..21: mol_type = other RNA
ataactgcagtgggcctgaaa

SEQ ID NO: 19555 - RNA, 21 nt, synthetic construct
  source 1..21: mol_type = other RNA
ataacttttgaaagagtgcca

SEQ ID NO: 19556 - RNA, 21 nt, synthetic construct
  source 1..21: mol_type = other RNA
ataagaaagaatctgtgagtt

SEQ ID NO: 19557 - RNA, 21 nt, synthetic construct
  source 1..21: mol_type = other RNA
ataagcctcataaacaggcag

SEQ ID NO: 19558 - RNA, 21 nt, synthetic construct
  source 1..21: mol_type = other RNA
ataaggctcttactctcaaat

SEQ ID NO: 19559 - RNA, 21 nt, synthetic construct
  source 1..21: mol_type = other RNA
ataaggggaatttctacgatt

SEQ ID NO: 19560 - RNA, 21 nt, synthetic construct
  source 1..21: mol_type = other RNA
ataagtttttcagtttgggaa

SEQ ID NO: 19561 - RNA, 21 nt, synthetic construct
  source 1..21: mol_type = other RNA
ataatgccagtaaactagctg

SEQ ID NO: 19562 - RNA, 21 nt, synthetic construct
  source 1..21: mol_type = other RNA
ataatgtccaaatgggactgg

SEQ ID NO: 19563 - RNA, 21 nt, synthetic construct
  source 1..21: mol_type = other RNA
ataatgtgatcccaaagcaag

SEQ ID NO: 19564 - RNA, 21 nt, synthetic construct
  source 1..21: mol_type = other RNA
ataatgtgcagcaaaagagca

SEQ ID NO: 19565 - RNA, 21 nt, synthetic construct
  source 1..21: mol_type = other RNA
ataattgtgtgaacaggaatg

SEQ ID NO: 19566 - RNA, 21 nt, synthetic construct
  source 1..21: mol_type = other RNA
atacaatgttcttgtcatggt

SEQ ID NO: 19567 - RNA, 21 nt, synthetic construct
  source 1..21: mol_type = other RNA
atacacacctagtttcagaga

SEQ ID NO: 19568 - RNA, 21 nt, synthetic construct
  source 1..21: mol_type = other RNA
atacacctgtcaagactcaat

SEQ ID NO: 19569 - RNA, 21 nt, synthetic construct
  source 1..21: mol_type = other RNA
atacactggaaattccaacat

SEQ ID NO: 19570 - RNA, 21 nt, synthetic construct
  source 1..21: mol_type = other RNA
atacagactgcagggacaatg

SEQ ID NO: 19571 - RNA, 21 nt, synthetic construct
  source 1..21: mol_type = other RNA
atacaggcatgtggcttgcat

SEQ ID NO: 19572 - RNA, 21 nt, synthetic construct
  source 1..21: mol_type = other RNA
atacagggtattccataataa

SEQ ID NO: 19573 - RNA, 21 nt, synthetic construct
  source 1..21: mol_type = other RNA
atacaggtttcttgttcaaac

SEQ ID NO: 19574 - RNA, 21 nt, synthetic construct
  source 1..21: mol_type = other RNA
atacataaccatgcaaatgtt

SEQ ID NO: 19575 - RNA, 21 nt, synthetic construct
  source 1..21: mol_type = other RNA
atacatgtgtagatggattag

SEQ ID NO: 19576 - RNA, 21 nt, synthetic construct
  source 1..21: mol_type = other RNA
ataccatcacctcccatttgc

SEQ ID NO: 19577 - RNA, 21 nt, synthetic construct
  source 1..21: mol_type = other RNA
ataccctctactttcttgtgt

SEQ ID NO: 19578 - RNA, 21 nt, synthetic construct
  source 1..21: mol_type = other RNA
ataccctgtatgaagggaagc

SEQ ID NO: 19579 - RNA, 21 nt, synthetic construct
  source 1..21: mol_type = other RNA
ataccgttcagagctgccacc

SEQ ID NO: 19580 - RNA, 21 nt, synthetic construct
  source 1..21: mol_type = other RNA
atacctcagggcagatcaatt

SEQ ID NO: 19581 - RNA, 21 nt, synthetic construct
  source 1..21: mol_type = other RNA
atacctgttcctttcagaaac

SEQ ID NO: 19582 - RNA, 21 nt, synthetic construct
  source 1..21: mol_type = other RNA
atactccagacttttcctcac

SEQ ID NO: 19583 - RNA, 21 nt, synthetic construct
  source 1..21: mol_type = other RNA
atactgaagaattgatggcag

SEQ ID NO: 19584 - RNA, 21 nt, synthetic construct
  source 1..21: mol_type = other RNA
atactgattttcaccatgaaa

SEQ ID NO: 19585 - RNA, 21 nt, synthetic construct
  source 1..21: mol_type = other RNA
atagaaaccaagatatgtctg

SEQ ID NO: 19586 - RNA, 21 nt, synthetic construct
  source 1..21: mol_type = other RNA
atagaaccaaccatgttgagg

SEQ ID NO: 19587 - RNA, 21 nt, synthetic construct
  source 1..21: mol_type = other RNA
atagagggtaaacctgaggca

SEQ ID NO: 19588 - RNA, 21 nt, synthetic construct
  source 1..21: mol_type = other RNA
atagagtcaccttccaaatta

SEQ ID NO: 19589 - RNA, 21 nt, synthetic construct
  source 1..21: mol_type = other RNA
atagccacaccccagctttag

SEQ ID NO: 19590 - RNA, 21 nt, synthetic construct
  source 1..21: mol_type = other RNA
ataggagtatctagtaatttg

SEQ ID NO: 19591 - RNA, 21 nt, synthetic construct
  source 1..21: mol_type = other RNA
atagtcagaccatgaaatcaa

SEQ ID NO: 19592 - RNA, 21 nt, synthetic construct
  source 1..21: mol_type = other RNA
atagtcagatgcacaggccaa

SEQ ID NO: 19593 - RNA, 21 nt, synthetic construct
  source 1..21: mol_type = other RNA
atagtcgtgtgagtcctgact

SEQ ID NO: 19594 - RNA, 21 nt, synthetic construct
  source 1..21: mol_type = other RNA
atagtgctgtgttgggggcac

SEQ ID NO: 19595 - RNA, 21 nt, synthetic construct
  source 1..21: mol_type = other RNA
atataaatcgtagaaattccc

SEQ ID NO: 19596 - RNA, 21 nt, synthetic construct
  source 1..21: mol_type = other RNA
atatccctgtagaactgaagc

SEQ ID NO: 19597 - RNA, 21 nt, synthetic construct
  source 1..21: mol_type = other RNA
atatgatttcccatcttgcag

SEQ ID NO: 19598 - RNA, 21 nt, synthetic construct
  source 1..21: mol_type = other RNA
atatgcccatctcctgcagaa

SEQ ID NO: 19599 - RNA, 21 nt, synthetic construct
  source 1..21: mol_type = other RNA
atatgtctggtcaacaagctg

SEQ ID NO: 19600 - RNA, 21 nt, synthetic construct
  source 1..21: mol_type = other RNA
atattatccagattgtgtttc

SEQ ID NO: 19601 - RNA, 21 nt, synthetic construct
  source 1..21: mol_type = other RNA
atattctgtacttcctccagt

SEQ ID NO: 19602 - RNA, 21 nt, synthetic construct
  source 1..21: mol_type = other RNA
atattgagacagtgttttttc

SEQ ID NO: 19603 - RNA, 21 nt, synthetic construct
  source 1..21: mol_type = other RNA
atattgagtcttgacaggtgt

SEQ ID NO: 19604 - RNA, 21 nt, synthetic construct
  source 1..21: mol_type = other RNA
atattgcatgtgatgcaagtt

SEQ ID NO: 19605 - RNA, 21 nt, synthetic construct
  source 1..21: mol_type = other RNA
atcaaatgacctccaaacaat

SEQ ID NO: 19606 - RNA, 21 nt, synthetic construct
  source 1..21: mol_type = other RNA
atcaacaggcttcagagactg

SEQ ID NO: 19607 - RNA, 21 nt, synthetic construct
  source 1..21: mol_type = other RNA
atcaacccaatctctccaatc

SEQ ID NO: 19608 - RNA, 21 nt, synthetic construct
  source 1..21: mol_type = other RNA
atcaactgctggcagttgtcc

SEQ ID NO: 19609 - RNA, 21 nt, synthetic construct
  source 1..21: mol_type = other RNA
atcaagaaattgaaacaagac

SEQ ID NO: 19610 - RNA, 21 nt, synthetic construct
  source 1..21: mol_type = other RNA
atcaagcgagttcgagactca

SEQ ID NO: 19611 - RNA, 21 nt, synthetic construct
  source 1..21: mol_type = other RNA
atcaagggcagtcccaaggta

SEQ ID NO: 19612 - RNA, 21 nt, synthetic construct
  source 1..21: mol_type = other RNA
atcaagtacctttgctgagca

SEQ ID NO: 19613 - RNA, 21 nt, synthetic construct
  source 1..21: mol_type = other RNA
atcaagtgcatgcaaaataca

SEQ ID NO: 19614 - RNA, 21 nt, synthetic construct
  source 1..21: mol_type = other RNA
atcaagttctgcagcagtggt

SEQ ID NO: 19615 - RNA, 21 nt, synthetic construct
  source 1..21: mol_type = other RNA
atcaattccgcacagacctct

SEQ ID NO: 19616 - RNA, 21 nt, synthetic construct
  source 1..21: mol_type = other RNA
atcaattcttcagtatcaacc

SEQ ID NO: 19617 - RNA, 21 nt, synthetic construct
  source 1..21: mol_type = other RNA
atcacaattgcttctttctcc

SEQ ID NO: 19618 - RNA, 21 nt, synthetic construct
  source 1..21: mol_type = other RNA
atcacagaagcaagtaaaagt

SEQ ID NO: 19619 - RNA, 21 nt, synthetic construct
  source 1..21: mol_type = other RNA
atcacagcttgcaggtggatt

SEQ ID NO: 19620 - RNA, 21 nt, synthetic construct
  source 1..21: mol_type = other RNA
atcacaggcctcactcaccac

SEQ ID NO: 19621 - RNA, 21 nt, synthetic construct
  source 1..21: mol_type = other RNA
atcacatgcaatattttccaa

SEQ ID NO: 19622 - RNA, 21 nt, synthetic construct
  source 1..21: mol_type = other RNA
atcacctcccatttgccagac

SEQ ID NO: 19623 - RNA, 21 nt, synthetic construct
  source 1..21: mol_type = other RNA
atcactcaaatcggagacatt

SEQ ID NO: 19624 - RNA, 21 nt, synthetic construct
  source 1..21: mol_type = other RNA
atcactcacccatcgcatacc

SEQ ID NO: 19625 - RNA, 21 nt, synthetic construct
  source 1..21: mol_type = other RNA
atcactgccatcaattcttca

SEQ ID NO: 19626 - RNA, 21 nt, synthetic construct
  source 1..21: mol_type = other RNA
atcagcaaagagaaggatcat

SEQ ID NO: 19627 - RNA, 21 nt, synthetic construct
  source 1..21: mol_type = other RNA
atcagcatcacaggcctcact

SEQ ID NO: 19628 - RNA, 21 nt, synthetic construct
  source 1..21: mol_type = other RNA
atcagcatcatcagcatcaca

SEQ ID NO: 19629 - RNA, 21 nt, synthetic construct
  source 1..21: mol_type = other RNA
atcaggaatggacttagtctg

SEQ ID NO: 19630 - RNA, 21 nt, synthetic construct
  source 1..21: mol_type = other RNA
atcaggcttgcttcggggcca

SEQ ID NO: 19631 - RNA, 21 nt, synthetic construct
  source 1..21: mol_type = other RNA
atcagtattcaaaatcaagcg

SEQ ID NO: 19632 - RNA, 21 nt, synthetic construct
  source 1..21: mol_type = other RNA
atcagtttttgagatatgccc

SEQ ID NO: 19633 - RNA, 21 nt, synthetic construct
  source 1..21: mol_type = other RNA
atcatattgagtcttgacagg

SEQ ID NO: 19634 - RNA, 21 nt, synthetic construct
  source 1..21: mol_type = other RNA
atcatcagcatcacaggcctc

SEQ ID NO: 19635 - RNA, 21 nt, synthetic construct
  source 1..21: mol_type = other RNA
atcattctttggccagactaa

SEQ ID NO: 19636 - RNA, 21 nt, synthetic construct
  source 1..21: mol_type = other RNA
atcattgagaccatggagcag

SEQ ID NO: 19637 - RNA, 21 nt, synthetic construct
  source 1..21: mol_type = other RNA
atcattgttgctttgggggtg

SEQ ID NO: 19638 - RNA, 21 nt, synthetic construct
  source 1..21: mol_type = other RNA
atccacctgcaagctgtgata

SEQ ID NO: 19639 - RNA, 21 nt, synthetic construct
  source 1..21: mol_type = other RNA
atccagaagtaaatggagaca

SEQ ID NO: 19640 - RNA, 21 nt, synthetic construct
  source 1..21: mol_type = other RNA
atccagagcttcagattctga

SEQ ID NO: 19641 - RNA, 21 nt, synthetic construct
  source 1..21: mol_type = other RNA
atccagattgtgtttccattg

SEQ ID NO: 19642 - RNA, 21 nt, synthetic construct
  source 1..21: mol_type = other RNA
atccagggaaccacaaagcta

SEQ ID NO: 19643 - RNA, 21 nt, synthetic construct
  source 1..21: mol_type = other RNA
atccaggtgaaagcagtcaac

SEQ ID NO: 19644 - RNA, 21 nt, synthetic construct
  source 1..21: mol_type = other RNA
atccaggttccaccttaattg

SEQ ID NO: 19645 - RNA, 21 nt, synthetic construct
  source 1..21: mol_type = other RNA
atccatcctggtttcagatag

SEQ ID NO: 19646 - RNA, 21 nt, synthetic construct
  source 1..21: mol_type = other RNA
atccatctacacatgtatgca

SEQ ID NO: 19647 - RNA, 21 nt, synthetic construct
  source 1..21: mol_type = other RNA
atcccaaagcaagatcttctt

SEQ ID NO: 19648 - RNA, 21 nt, synthetic construct
  source 1..21: mol_type = other RNA
atcccagagttcacatctccc

SEQ ID NO: 19649 - RNA, 21 nt, synthetic construct
  source 1..21: mol_type = other RNA
atcccatctaaaacgtaatga

SEQ ID NO: 19650 - RNA, 21 nt, synthetic construct
  source 1..21: mol_type = other RNA
atccctgtagaactgaagctt

SEQ ID NO: 19651 - RNA, 21 nt, synthetic construct
  source 1..21: mol_type = other RNA
atcctgaactttttgcaggaa

SEQ ID NO: 19652 - RNA, 21 nt, synthetic construct
  source 1..21: mol_type = other RNA
atcctggtttcagatagtgct

SEQ ID NO: 19653 - RNA, 21 nt, synthetic construct
  source 1..21: mol_type = other RNA
atcctgttccatcaggcttgc

SEQ ID NO: 19654 - RNA, 21 nt, synthetic construct
  source 1..21: mol_type = other RNA
atccttagtgaacactgagct

SEQ ID NO: 19655 - RNA, 21 nt, synthetic construct
  source 1..21: mol_type = other RNA
atccttctctttgctgatcat

SEQ ID NO: 19656 - RNA, 21 nt, synthetic construct
  source 1..21: mol_type = other RNA
atcgcatacctcagggcagat

SEQ ID NO: 19657 - RNA, 21 nt, synthetic construct
  source 1..21: mol_type = other RNA
atcggagaagggctgcataca

SEQ ID NO: 19658 - RNA, 21 nt, synthetic construct
  source 1..21: mol_type = other RNA
atcggagacatttggttgact

SEQ ID NO: 19659 - RNA, 21 nt, synthetic construct
  source 1..21: mol_type = other RNA
atcgtagaaattccccttata

SEQ ID NO: 19660 - RNA, 21 nt, synthetic construct
  source 1..21: mol_type = other RNA
atctaaaacgtaatgaggcat

SEQ ID NO: 19661 - RNA, 21 nt, synthetic construct
  source 1..21: mol_type = other RNA
atctacacatgtatgcagccc

SEQ ID NO: 19662 - RNA, 21 nt, synthetic construct
  source 1..21: mol_type = other RNA
atctagtaatttggaaggtga

SEQ ID NO: 19663 - RNA, 21 nt, synthetic construct
  source 1..21: mol_type = other RNA
atctagtgccacacagtgact

SEQ ID NO: 19664 - RNA, 21 nt, synthetic construct
  source 1..21: mol_type = other RNA
atctcacaggacaactcatta

SEQ ID NO: 19665 - RNA, 21 nt, synthetic construct
  source 1..21: mol_type = other RNA
atctcacataaatgccattaa

SEQ ID NO: 19666 - RNA, 21 nt, synthetic construct
  source 1..21: mol_type = other RNA
atctccagttccaaaaaccct

SEQ ID NO: 19667 - RNA, 21 nt, synthetic construct
  source 1..21: mol_type = other RNA
atctccctcaaaaccagcaac

SEQ ID NO: 19668 - RNA, 21 nt, synthetic construct
  source 1..21: mol_type = other RNA
atctcctgcagaaaataacat

SEQ ID NO: 19669 - RNA, 21 nt, synthetic construct
  source 1..21: mol_type = other RNA
atctcgtgtttgctccttgtc

SEQ ID NO: 19670 - RNA, 21 nt, synthetic construct
  source 1..21: mol_type = other RNA
atctctccaatcaaatgacct

SEQ ID NO: 19671 - RNA, 21 nt, synthetic construct
  source 1..21: mol_type = other RNA
atctcttacagaagcaagaac

SEQ ID NO: 19672 - RNA, 21 nt, synthetic construct
  source 1..21: mol_type = other RNA
atctcttgctctttgtttctc

SEQ ID NO: 19673 - RNA, 21 nt, synthetic construct
  source 1..21: mol_type = other RNA
atctgaaaccaggatggattg

SEQ ID NO: 19674 - RNA, 21 nt, synthetic construct
  source 1..21: mol_type = other RNA
atctgaagcagtttcacgcca

SEQ ID NO: 19675 - RNA, 21 nt, synthetic construct
  source 1..21: mol_type = other RNA
atctgaagctctggattttca

SEQ ID NO: 19676 - RNA, 21 nt, synthetic construct
  source 1..21: mol_type = other RNA
atctgaaggagcccagagaga

SEQ ID NO: 19677 - RNA, 21 nt, synthetic construct
  source 1..21: mol_type = other RNA
atctgactatggcaagactca

SEQ ID NO: 19678 - RNA, 21 nt, synthetic construct
  source 1..21: mol_type = other RNA
atctgcaagatgggaaatcat

SEQ ID NO: 19679 - RNA, 21 nt, synthetic construct
  source 1..21: mol_type = other RNA
atctgccctgaggtatgcgat

SEQ ID NO: 19680 - RNA, 21 nt, synthetic construct
  source 1..21: mol_type = other RNA
atctgctctttgttgaaaatg

SEQ ID NO: 19681 - RNA, 21 nt, synthetic construct
  source 1..21: mol_type = other RNA
atctggataatattgagacag

SEQ ID NO: 19682 - RNA, 21 nt, synthetic construct
  source 1..21: mol_type = other RNA
atctgtgagttctgtagccca

SEQ ID NO: 19683 - RNA, 21 nt, synthetic construct
  source 1..21: mol_type = other RNA
atcttcttcacaggtgctttc

SEQ ID NO: 19684 - RNA, 21 nt, synthetic construct
  source 1..21: mol_type = other RNA
atcttgcagatgtgtaggtaa

SEQ ID NO: 19685 - RNA, 21 nt, synthetic construct
  source 1..21: mol_type = other RNA
atcttgctttgggatcacatt

SEQ ID NO: 19686 - RNA, 21 nt, synthetic construct
  source 1..21: mol_type = other RNA
atcttgtgcccccaacacagc

SEQ ID NO: 19687 - RNA, 21 nt, synthetic construct
  source 1..21: mol_type = other RNA
atctttaactgcattttcttg

SEQ ID NO: 19688 - RNA, 21 nt, synthetic construct
  source 1..21: mol_type = other RNA
atgaaaacattcttccacttt

SEQ ID NO: 19689 - RNA, 21 nt, synthetic construct
  source 1..21: mol_type = other RNA
atgaaatcaagtgcatgcaaa

SEQ ID NO: 19690 - RNA, 21 nt, synthetic construct
  source 1..21: mol_type = other RNA
atgaaatctagtgccacacag

SEQ ID NO: 19691 - RNA, 21 nt, synthetic construct
  source 1..21: mol_type = other RNA
atgaaatgaatggtgcttact

SEQ ID NO: 19692 - RNA, 21 nt, synthetic construct
  source 1..21: mol_type = other RNA
atgaagggaagccagaatagt

SEQ ID NO: 19693 - RNA, 21 nt, synthetic construct
  source 1..21: mol_type = other RNA
atgaatcaagggcagtcccaa

SEQ ID NO: 19694 - RNA, 21 nt, synthetic construct
  source 1..21: mol_type = other RNA
atgaatggtgcttacttcaag

SEQ ID NO: 19695 - RNA, 21 nt, synthetic construct
  source 1..21: mol_type = other RNA
atgacaagaacattgtattac

SEQ ID NO: 19696 - RNA, 21 nt, synthetic construct
  source 1..21: mol_type = other RNA
atgacatacagactgcaggga

SEQ ID NO: 19697 - RNA, 21 nt, synthetic construct
  source 1..21: mol_type = other RNA
atgacctccaaacaatacact

SEQ ID NO: 19698 - RNA, 21 nt, synthetic construct
  source 1..21: mol_type = other RNA
atgactgttccattgtgttct

SEQ ID NO: 19699 - RNA, 21 nt, synthetic construct
  source 1..21: mol_type = other RNA
atgagaaacaaagagcaagag

SEQ ID NO: 19700 - RNA, 21 nt, synthetic construct
  source 1..21: mol_type = other RNA
atgagcaggaggggaaaagtg

SEQ ID NO: 19701 - RNA, 21 nt, synthetic construct
  source 1..21: mol_type = other RNA
atgagctctctcaggcagtgg

SEQ ID NO: 19702 - RNA, 21 nt, synthetic construct
  source 1..21: mol_type = other RNA
atgagcttttggtaaatggtc

SEQ ID NO: 19703 - RNA, 21 nt, synthetic construct
  source 1..21: mol_type = other RNA
atgaggcatcactgccatcaa

SEQ ID NO: 19704 - RNA, 21 nt, synthetic construct
  source 1..21: mol_type = other RNA
atgaggcttatgttgcaaaag

SEQ ID NO: 19705 - RNA, 21 nt, synthetic construct
  source 1..21: mol_type = other RNA
atgagtctcgaactcgcttga

SEQ ID NO: 19706 - RNA, 21 nt, synthetic construct
  source 1..21: mol_type = other RNA
atgagttgtcctgtgagatca

SEQ ID NO: 19707 - RNA, 21 nt, synthetic construct
  source 1..21: mol_type = other RNA
atgatcagcaaagagaaggat

SEQ ID NO: 19708 - RNA, 21 nt, synthetic construct
  source 1..21: mol_type = other RNA
atgatccttctctttgctgat

SEQ ID NO: 19709 - RNA, 21 nt, synthetic construct
  source 1..21: mol_type = other RNA
atgatgctcttttgctgcaca

SEQ ID NO: 19710 - RNA, 21 nt, synthetic construct
  source 1..21: mol_type = other RNA
atgatgctgataatgccagta

SEQ ID NO: 19711 - RNA, 21 nt, synthetic construct
  source 1..21: mol_type = other RNA
atgatttcccatcttgcagat

SEQ ID NO: 19712 - RNA, 21 nt, synthetic construct
  source 1..21: mol_type = other RNA
atgcaaaatacaggtttcttg

SEQ ID NO: 19713 - RNA, 21 nt, synthetic construct
  source 1..21: mol_type = other RNA
atgcaaatgtttttcctgtgc

SEQ ID NO: 19714 - RNA, 21 nt, synthetic construct
  source 1..21: mol_type = other RNA
atgcaagccacatgcctgtat

SEQ ID NO: 19715 - RNA, 21 nt, synthetic construct
  source 1..21: mol_type = other RNA
atgcaagttttgggtcttgtt

SEQ ID NO: 19716 - RNA, 21 nt, synthetic construct
  source 1..21: mol_type = other RNA
atgcacacagcaccaccagaa

SEQ ID NO: 19717 - RNA, 21 nt, synthetic construct
  source 1..21: mol_type = other RNA
atgcacaggccaattaaggtg

SEQ ID NO: 19718 - RNA, 21 nt, synthetic construct
  source 1..21: mol_type = other RNA
atgcacttgatttcatggtct

SEQ ID NO: 19719 - RNA, 21 nt, synthetic construct
  source 1..21: mol_type = other RNA
atgcagcccttctccgatgct

SEQ ID NO: 19720 - RNA, 21 nt, synthetic construct
  source 1..21: mol_type = other RNA
atgcagttaaagatttcacca

SEQ ID NO: 19721 - RNA, 21 nt, synthetic construct
  source 1..21: mol_type = other RNA
atgccaccttagagcagcatg

SEQ ID NO: 19722 - RNA, 21 nt, synthetic construct
  source 1..21: mol_type = other RNA
atgccagtaaactagctgcaa

SEQ ID NO: 19723 - RNA, 21 nt, synthetic construct
  source 1..21: mol_type = other RNA
atgccattaacagtcaggcta

SEQ ID NO: 19724 - RNA, 21 nt, synthetic construct
  source 1..21: mol_type = other RNA
atgcccatctcctgcagaaaa

SEQ ID NO: 19725 - RNA, 21 nt, synthetic construct
  source 1..21: mol_type = other RNA
atgcctaatggtgctacagtt

SEQ ID NO: 19726 - RNA, 21 nt, synthetic construct
  source 1..21: mol_type = other RNA
atgcctcattacgttttagat

SEQ ID NO: 19727 - RNA, 21 nt, synthetic construct
  source 1..21: mol_type = other RNA
atgcctggggggctcccaagg

SEQ ID NO: 19728 - RNA, 21 nt, synthetic construct
  source 1..21: mol_type = other RNA
atgcctgtatgcacacagcac

SEQ ID NO: 19729 - RNA, 21 nt, synthetic construct
  source 1..21: mol_type = other RNA
atgcgatgggtgagtgatctc

SEQ ID NO: 19730 - RNA, 21 nt, synthetic construct
  source 1..21: mol_type = other RNA
atgctaaatacctgttccttt

SEQ ID NO: 19731 - RNA, 21 nt, synthetic construct
  source 1..21: mol_type = other RNA
atgctcttttgctgcacatta

SEQ ID NO: 19732 - RNA, 21 nt, synthetic construct
  source 1..21: mol_type = other RNA
atgctgataatgccagtaaac

SEQ ID NO: 19733 - RNA, 21 nt, synthetic construct
  source 1..21: mol_type = other RNA
atgctgatgatgctgataatg

SEQ ID NO: 19734 - RNA, 21 nt, synthetic construct
  source 1..21: mol_type = other RNA
atgctgctccatggtctcaat

SEQ ID NO: 19735 - RNA, 21 nt, synthetic construct
  source 1..21: mol_type = other RNA
atgctgctctaaggtggcatc

SEQ ID NO: 19736 - RNA, 21 nt, synthetic construct
  source 1..21: mol_type = other RNA
atgcttgaggtgttctgacat

SEQ ID NO: 19737 - RNA, 21 nt, synthetic construct
  source 1..21: mol_type = other RNA
atgctttctgaaaggcctcag

SEQ ID NO: 19738 - RNA, 21 nt, synthetic construct
  source 1..21: mol_type = other RNA
atgcttttgagtgtccttctg

SEQ ID NO: 19739 - RNA, 21 nt, synthetic construct
  source 1..21: mol_type = other RNA
atggaaaaaggtaactaagca

SEQ ID NO: 19740 - RNA, 21 nt, synthetic construct
  source 1..21: mol_type = other RNA
atggaaacacaatctggataa

SEQ ID NO: 19741 - RNA, 21 nt, synthetic construct
  source 1..21: mol_type = other RNA
atggaacaggatagaaccaac

SEQ ID NO: 19742 - RNA, 21 nt, synthetic construct
  source 1..21: mol_type = other RNA
atggaacagtcattgtccctg

SEQ ID NO: 19743 - RNA, 21 nt, synthetic construct
  source 1..21: mol_type = other RNA
atggaagcccactgcctgaga

SEQ ID NO: 19744 - RNA, 21 nt, synthetic construct
  source 1..21: mol_type = other RNA
atggaataccctgtatgaagg

SEQ ID NO: 19745 - RNA, 21 nt, synthetic construct
  source 1..21: mol_type = other RNA
atggacttagtctgttgccct

SEQ ID NO: 19746 - RNA, 21 nt, synthetic construct
  source 1..21: mol_type = other RNA
atggagaaagacgtaacttcg

SEQ ID NO: 19747 - RNA, 21 nt, synthetic construct
  source 1..21: mol_type = other RNA
atggagacaccaagtggcact

SEQ ID NO: 19748 - RNA, 21 nt, synthetic construct
  source 1..21: mol_type = other RNA
atggagcagcatctgaagcag

SEQ ID NO: 19749 - RNA, 21 nt, synthetic construct
  source 1..21: mol_type = other RNA
atggaggaataaaacgcacag

SEQ ID NO: 19750 - RNA, 21 nt, synthetic construct
  source 1..21: mol_type = other RNA
atggattaggactctgggaag

SEQ ID NO: 19751 - RNA, 21 nt, synthetic construct
  source 1..21: mol_type = other RNA
atggattgaattgaaggcccc

SEQ ID NO: 19752 - RNA, 21 nt, synthetic construct
  source 1..21: mol_type = other RNA
atggcaagactcagtttgggg

SEQ ID NO: 19753 - RNA, 21 nt, synthetic construct
  source 1..21: mol_type = other RNA
atggcagtgatgcctcattac

SEQ ID NO: 19754 - RNA, 21 nt, synthetic construct
  source 1..21: mol_type = other RNA
atggcatttatgtgagatgtg

SEQ ID NO: 19755 - RNA, 21 nt, synthetic construct
  source 1..21: mol_type = other RNA
atggccccgaagcaagcctga

SEQ ID NO: 19756 - RNA, 21 nt, synthetic construct
  source 1..21: mol_type = other RNA
atggctcagtctctgaagcct

SEQ ID NO: 19757 - RNA, 21 nt, synthetic construct
  source 1..21: mol_type = other RNA
atgggaaatcatattgagtct

SEQ ID NO: 19758 - RNA, 21 nt, synthetic construct
  source 1..21: mol_type = other RNA
atgggactggaggaagtacag

SEQ ID NO: 19759 - RNA, 21 nt, synthetic construct
  source 1..21: mol_type = other RNA
atgggaggtgatggtatcagg

SEQ ID NO: 19760 - RNA, 21 nt, synthetic construct
  source 1..21: mol_type = other RNA
atgggattccgcttggtgaaa

SEQ ID NO: 19761 - RNA, 21 nt, synthetic construct
  source 1..21: mol_type = other RNA
atgggcatatctcaaaaactg

SEQ ID NO: 19762 - RNA, 21 nt, synthetic construct
  source 1..21: mol_type = other RNA
atgggtgagtgatctcacagg

SEQ ID NO: 19763 - RNA, 21 nt, synthetic construct
  source 1..21: mol_type = other RNA
atggtaattagcacttttccc

SEQ ID NO: 19764 - RNA, 21 nt, synthetic construct
  source 1..21: mol_type = other RNA
atggtatcaggaatggactta

SEQ ID NO: 19765 - RNA, 21 nt, synthetic construct
  source 1..21: mol_type = other RNA
atggtcaaataacgacttggc

SEQ ID NO: 19766 - RNA, 21 nt, synthetic construct
  source 1..21: mol_type = other RNA
atggtctcaatgatgctcttt

SEQ ID NO: 19767 - RNA, 21 nt, synthetic construct
  source 1..21: mol_type = other RNA
atggtctgactataaggggaa

SEQ ID NO: 19768 - RNA, 21 nt, synthetic construct
  source 1..21: mol_type = other RNA
atggtctgttttggagaagtg

SEQ ID NO: 19769 - RNA, 21 nt, synthetic construct
  source 1..21: mol_type = other RNA
atggtgaaaatcagtattcaa

SEQ ID NO: 19770 - RNA, 21 nt, synthetic construct
  source 1..21: mol_type = other RNA
atggtgaactcctggaaaaaa

SEQ ID NO: 19771 - RNA, 21 nt, synthetic construct
  source 1..21: mol_type = other RNA
atggtgctacagtttctgcct

SEQ ID NO: 19772 - RNA, 21 nt, synthetic construct
  source 1..21: mol_type = other RNA
atggtgcttacttcaagcaaa

SEQ ID NO: 19773 - RNA, 21 nt, synthetic construct
  source 1..21: mol_type = other RNA
atggtggagttttagaagaac

SEQ ID NO: 19774 - RNA, 21 nt, synthetic construct
  source 1..21: mol_type = other RNA
atggtggtggtggtgtggtag

SEQ ID NO: 19775 - RNA, 21 nt, synthetic construct
  source 1..21: mol_type = other RNA
atggttatgtatcaagtacct

SEQ ID NO: 19776 - RNA, 21 nt, synthetic construct
  source 1..21: mol_type = other RNA
atggttggttctatcctgttc

SEQ ID NO: 19777 - RNA, 21 nt, synthetic construct
  source 1..21: mol_type = other RNA
atggttgtgtttgtgctgcct

SEQ ID NO: 19778 - RNA, 21 nt, synthetic construct
  source 1..21: mol_type = other RNA
atgtaccaagttgaaatgaat

SEQ ID NO: 19779 - RNA, 21 nt, synthetic construct
  source 1..21: mol_type = other RNA
atgtatcaagtacctttgctg

SEQ ID NO: 19780 - RNA, 21 nt, synthetic construct
  source 1..21: mol_type = other RNA
atgtatgcagcccttctccga

SEQ ID NO: 19781 - RNA, 21 nt, synthetic construct
  source 1..21: mol_type = other RNA
atgtcagaacacctcaagcat

SEQ ID NO: 19782 - RNA, 21 nt, synthetic construct
  source 1..21: mol_type = other RNA
atgtcagggccagtcacagtt

SEQ ID NO: 19783 - RNA, 21 nt, synthetic construct
  source 1..21: mol_type = other RNA
atgtcattcctgttcacacaa

SEQ ID NO: 19784 - RNA, 21 nt, synthetic construct
  source 1..21: mol_type = other RNA
atgtccaaatgggactggagg

SEQ ID NO: 19785 - RNA, 21 nt, synthetic construct
  source 1..21: mol_type = other RNA
atgtccccagtgttgaaacag

SEQ ID NO: 19786 - RNA, 21 nt, synthetic construct
  source 1..21: mol_type = other RNA
atgtctccgatttgagtgata

SEQ ID NO: 19787 - RNA, 21 nt, synthetic construct
  source 1..21: mol_type = other RNA
atgtctggtcaacaagctgcg

SEQ ID NO: 19788 - RNA, 21 nt, synthetic construct
  source 1..21: mol_type = other RNA
atgtgaactctgggatggttg

SEQ ID NO: 19789 - RNA, 21 nt, synthetic construct
  source 1..21: mol_type = other RNA
atgtgagatgtggttttctgc

SEQ ID NO: 19790 - RNA, 21 nt, synthetic construct
  source 1..21: mol_type = other RNA
atgtgatcccaaagcaagatc

SEQ ID NO: 19791 - RNA, 21 nt, synthetic construct
  source 1..21: mol_type = other RNA
atgtgatgcaagttttgggtc

SEQ ID NO: 19792 - RNA, 21 nt, synthetic construct
  source 1..21: mol_type = other RNA
atgtgcagcaaaagagcatca

SEQ ID NO: 19793 - RNA, 21 nt, synthetic construct
  source 1..21: mol_type = other RNA
atgtgcagtcactgtgtggca

SEQ ID NO: 19794 - RNA, 21 nt, synthetic construct
  source 1..21: mol_type = other RNA
atgtggcttgcatccaggttc

SEQ ID NO: 19795 - RNA, 21 nt, synthetic construct
  source 1..21: mol_type = other RNA
atgtggttttctgcaccgcaa

SEQ ID NO: 19796 - RNA, 21 nt, synthetic construct
  source 1..21: mol_type = other RNA
atgtgtagatggattaggact

SEQ ID NO: 19797 - RNA, 21 nt, synthetic construct
  source 1..21: mol_type = other RNA
atgtgtaggtaagtgccagaa

SEQ ID NO: 19798 - RNA, 21 nt, synthetic construct
  source 1..21: mol_type = other RNA
atgtgtagtctgttctttatt

SEQ ID NO: 19799 - RNA, 21 nt, synthetic construct
  source 1..21: mol_type = other RNA
atgtgtctcagtacatttctg

SEQ ID NO: 19800 - RNA, 21 nt, synthetic construct
  source 1..21: mol_type = other RNA
atgtgtgtgttccacggaaga

SEQ ID NO: 19801 - RNA, 21 nt, synthetic construct
  source 1..21: mol_type = other RNA
atgtgttgaaaaactggtgaa

SEQ ID NO: 19802 - RNA, 21 nt, synthetic construct
  source 1..21: mol_type = other RNA
atgttattttctgcaggagat

SEQ ID NO: 19803 - RNA, 21 nt, synthetic construct
  source 1..21: mol_type = other RNA
atgttcttgtcatggtaatta

SEQ ID NO: 19804 - RNA, 21 nt, synthetic construct
  source 1..21: mol_type = other RNA
atgttgagggcaacagactaa

SEQ ID NO: 19805 - RNA, 21 nt, synthetic construct
  source 1..21: mol_type = other RNA
atgttgcaaaaggtgtgagtt

SEQ ID NO: 19806 - RNA, 21 nt, synthetic construct
  source 1..21: mol_type = other RNA
atgttggaatttccagtgtat

SEQ ID NO: 19807 - RNA, 21 nt, synthetic construct
  source 1..21: mol_type = other RNA
atgttggtccactgtaccttg

SEQ ID NO: 19808 - RNA, 21 nt, synthetic construct
  source 1..21: mol_type = other RNA
atgttttcatggtgaaaatca

SEQ ID NO: 19809 - RNA, 21 nt, synthetic construct
  source 1..21: mol_type = other RNA
atgttttgttttctggtggtg

SEQ ID NO: 19810 - RNA, 21 nt, synthetic construct
  source 1..21: mol_type = other RNA
atgtttttcctgtgcctgacc

SEQ ID NO: 19811 - RNA, 21 nt, synthetic construct
  source 1..21: mol_type = other RNA
attaacagtcaggctactaat

SEQ ID NO: 19812 - RNA, 21 nt, synthetic construct
  source 1..21: mol_type = other RNA
attaaggtggaacctggatgc

SEQ ID NO: 19813 - RNA, 21 nt, synthetic construct
  source 1..21: mol_type = other RNA
attaccatgacaagaacattg

SEQ ID NO: 19814 - RNA, 21 nt, synthetic construct
  source 1..21: mol_type = other RNA
attacgttttagatgggattc

SEQ ID NO: 19815 - RNA, 21 nt, synthetic construct
  source 1..21: mol_type = other RNA
attacttaaaaacaaggcagt

SEQ ID NO: 19816 - RNA, 21 nt, synthetic construct
  source 1..21: mol_type = other RNA
attagcactgccttgttttta

SEQ ID NO: 19817 - RNA, 21 nt, synthetic construct
  source 1..21: mol_type = other RNA
attagcacttttcccctcctg

SEQ ID NO: 19818 - RNA, 21 nt, synthetic construct
  source 1..21: mol_type = other RNA
attagccttttggtcttgttt

SEQ ID NO: 19819 - RNA, 21 nt, synthetic construct
  source 1..21: mol_type = other RNA
attaggactctgggaaggtgg

SEQ ID NO: 19820 - RNA, 21 nt, synthetic construct
  source 1..21: mol_type = other RNA
attaggcattagcactgcctt

SEQ ID NO: 19821 - RNA, 21 nt, synthetic construct
  source 1..21: mol_type = other RNA
attagtagcctgactgttaat

SEQ ID NO: 19822 - RNA, 21 nt, synthetic construct
  source 1..21: mol_type = other RNA
attatcacagcttgcaggtgg

SEQ ID NO: 19823 - RNA, 21 nt, synthetic construct
  source 1..21: mol_type = other RNA
attatcagcatcatcagcatc

SEQ ID NO: 19824 - RNA, 21 nt, synthetic construct
  source 1..21: mol_type = other RNA
attatccagattgtgtttcca

SEQ ID NO: 19825 - RNA, 21 nt, synthetic construct
  source 1..21: mol_type = other RNA
attatgagtctcgaactcgct

SEQ ID NO: 19826 - RNA, 21 nt, synthetic construct
  source 1..21: mol_type = other RNA
attatggaataccctgtatga

SEQ ID NO: 19827 - RNA, 21 nt, synthetic construct
  source 1..21: mol_type = other RNA
attattctgaggcctttcaga

SEQ ID NO: 19828 - RNA, 21 nt, synthetic construct
  source 1..21: mol_type = other RNA
attattgagaacagaagcagc

SEQ ID NO: 19829 - RNA, 21 nt, synthetic construct
  source 1..21: mol_type = other RNA
attcaaaatcaagcgagttcg

SEQ ID NO: 19830 - RNA, 21 nt, synthetic construct
  source 1..21: mol_type = other RNA
attcaagtgctgtttcaacac

SEQ ID NO: 19831 - RNA, 21 nt, synthetic construct
  source 1..21: mol_type = other RNA
attcaatccatcctggtttca

SEQ ID NO: 19832 - RNA, 21 nt, synthetic construct
  source 1..21: mol_type = other RNA
attcagaatctgaagctctgg

SEQ ID NO: 19833 - RNA, 21 nt, synthetic construct
  source 1..21: mol_type = other RNA
attcagagtgctttttccttc

SEQ ID NO: 19834 - RNA, 21 nt, synthetic construct
  source 1..21: mol_type = other RNA
attcatttcaacttggtacat

SEQ ID NO: 19835 - RNA, 21 nt, synthetic construct
  source 1..21: mol_type = other RNA
attccaacatgcctggggggc

SEQ ID NO: 19836 - RNA, 21 nt, synthetic construct
  source 1..21: mol_type = other RNA
attccaagtgtttgcaaaatg

SEQ ID NO: 19837 - RNA, 21 nt, synthetic construct
  source 1..21: mol_type = other RNA
attcccaaactgaaaaactta

SEQ ID NO: 19838 - RNA, 21 nt, synthetic construct
  source 1..21: mol_type = other RNA
attccccttatagtcagacca

SEQ ID NO: 19839 - RNA, 21 nt, synthetic construct
  source 1..21: mol_type = other RNA
attccgcacagacctctaact

SEQ ID NO: 19840 - RNA, 21 nt, synthetic construct
  source 1..21: mol_type = other RNA
attccgcttggtgaaaacgag

SEQ ID NO: 19841 - RNA, 21 nt, synthetic construct
  source 1..21: mol_type = other RNA
attcctccattttgcaaacac

SEQ ID NO: 19842 - RNA, 21 nt, synthetic construct
  source 1..21: mol_type = other RNA
attcctgataccatcacctcc

SEQ ID NO: 19843 - RNA, 21 nt, synthetic construct
  source 1..21: mol_type = other RNA
attcctgttcacacaattatt

SEQ ID NO: 19844 - RNA, 21 nt, synthetic construct
  source 1..21: mol_type = other RNA
attccttttctgccactacca

SEQ ID NO: 19845 - RNA, 21 nt, synthetic construct
  source 1..21: mol_type = other RNA
attctctgaaactaggtgtgt

SEQ ID NO: 19846 - RNA, 21 nt, synthetic construct
  source 1..21: mol_type = other RNA
attctcttgcttagttacctt

SEQ ID NO: 19847 - RNA, 21 nt, synthetic construct
  source 1..21: mol_type = other RNA
attctgaagggtcgagacaag

SEQ ID NO: 19848 - RNA, 21 nt, synthetic construct
  source 1..21: mol_type = other RNA
attctgaatgagcaggagggg

SEQ ID NO: 19849 - RNA, 21 nt, synthetic construct
  source 1..21: mol_type = other RNA
attctgaggcctttcagaaag

SEQ ID NO: 19850 - RNA, 21 nt, synthetic construct
  source 1..21: mol_type = other RNA
attctggagctttgtagccag

SEQ ID NO: 19851 - RNA, 21 nt, synthetic construct
  source 1..21: mol_type = other RNA
attctggcttcccttcataca

SEQ ID NO: 19852 - RNA, 21 nt, synthetic construct
  source 1..21: mol_type = other RNA
attctgtacttcctccagtcc

SEQ ID NO: 19853 - RNA, 21 nt, synthetic construct
  source 1..21: mol_type = other RNA
attctgttcaggttccagcag

SEQ ID NO: 19854 - RNA, 21 nt, synthetic construct
  source 1..21: mol_type = other RNA
attcttcaccagacgctagct

SEQ ID NO: 19855 - RNA, 21 nt, synthetic construct
  source 1..21: mol_type = other RNA
attcttcagtatcaacccaat

SEQ ID NO: 19856 - RNA, 21 nt, synthetic construct
  source 1..21: mol_type = other RNA
attcttccactttagtctggc

SEQ ID NO: 19857 - RNA, 21 nt, synthetic construct
  source 1..21: mol_type = other RNA
attctttggccagactaaagt

SEQ ID NO: 19858 - RNA, 21 nt, synthetic construct
  source 1..21: mol_type = other RNA
attgaaacaagaccaaaaggc

SEQ ID NO: 19859 - RNA, 21 nt, synthetic construct
  source 1..21: mol_type = other RNA
attgaaggcccctcgttttca

SEQ ID NO: 19860 - RNA, 21 nt, synthetic construct
  source 1..21: mol_type = other RNA
attgaattgaaggcccctcgt

SEQ ID NO: 19861 - RNA, 21 nt, synthetic construct
  source 1..21: mol_type = other RNA
attgagaacagaagcagctgt

SEQ ID NO: 19862 - RNA, 21 nt, synthetic construct
  source 1..21: mol_type = other RNA
attgagacagtgttttttcca

SEQ ID NO: 19863 - RNA, 21 nt, synthetic construct
  source 1..21: mol_type = other RNA
attgagaccatggagcagcat

SEQ ID NO: 19864 - RNA, 21 nt, synthetic construct
  source 1..21: mol_type = other RNA
attgagtcttgacaggtgtat

SEQ ID NO: 19865 - RNA, 21 nt, synthetic construct
  source 1..21: mol_type = other RNA
attgatctgccctgaggtatg

SEQ ID NO: 19866 - RNA, 21 nt, synthetic construct
  source 1..21: mol_type = other RNA
attgatggcagtgatgcctca

SEQ ID NO: 19867 - RNA, 21 nt, synthetic construct
  source 1..21: mol_type = other RNA
attgcagctagtttactggca

SEQ ID NO: 19868 - RNA, 21 nt, synthetic construct
  source 1..21: mol_type = other RNA
attgcatgtgatgcaagtttt

SEQ ID NO: 19869 - RNA, 21 nt, synthetic construct
  source 1..21: mol_type = other RNA
attgcggtgcagaaaaccaca

SEQ ID NO: 19870 - RNA, 21 nt, synthetic construct
  source 1..21: mol_type = other RNA
attgctgctggaacctgaaca

SEQ ID NO: 19871 - RNA, 21 nt, synthetic construct
  source 1..21: mol_type = other RNA
attgcttctttctccccctcc

SEQ ID NO: 19872 - RNA, 21 nt, synthetic construct
  source 1..21: mol_type = other RNA
attggagagattgggttgata

SEQ ID NO: 19873 - RNA, 21 nt, synthetic construct
  source 1..21: mol_type = other RNA
attggatacacctgtcaagac

SEQ ID NO: 19874 - RNA, 21 nt, synthetic construct
  source 1..21: mol_type = other RNA
attggcctgtgcatctgacta

SEQ ID NO: 19875 - RNA, 21 nt, synthetic construct
  source 1..21: mol_type = other RNA
attgggttgatactgaagaat

SEQ ID NO: 19876 - RNA, 21 nt, synthetic construct
  source 1..21: mol_type = other RNA
attggtcttgttttctcagaa

SEQ ID NO: 19877 - RNA, 21 nt, synthetic construct
  source 1..21: mol_type = other RNA
attggtgggttatgcttgagg

SEQ ID NO: 19878 - RNA, 21 nt, synthetic construct
  source 1..21: mol_type = other RNA
attgtccctgcagtctgtatg

SEQ ID NO: 19879 - RNA, 21 nt, synthetic construct
  source 1..21: mol_type = other RNA
attgtgatggtggtggtggtg

SEQ ID NO: 19880 - RNA, 21 nt, synthetic construct
  source 1..21: mol_type = other RNA
attgtgtgaacaggaatgaca

SEQ ID NO: 19881 - RNA, 21 nt, synthetic construct
  source 1..21: mol_type = other RNA
attgtgttctgagaaaacaag

SEQ ID NO: 19882 - RNA, 21 nt, synthetic construct
  source 1..21: mol_type = other RNA
attgtgtttccattgcggtgc

SEQ ID NO: 19883 - RNA, 21 nt, synthetic construct
  source 1..21: mol_type = other RNA
attgttgctttgggggtgagg

SEQ ID NO: 19884 - RNA, 21 nt, synthetic construct
  source 1..21: mol_type = other RNA
attgtttgaacaagaaacctg

SEQ ID NO: 19885 - RNA, 21 nt, synthetic construct
  source 1..21: mol_type = other RNA
attgtttggaggtcatttgat

SEQ ID NO: 19886 - RNA, 21 nt, synthetic construct
  source 1..21: mol_type = other RNA
atttaccaaaagctcatgtgc

SEQ ID NO: 19887 - RNA, 21 nt, synthetic construct
  source 1..21: mol_type = other RNA
atttacttctggatgagctct

SEQ ID NO: 19888 - RNA, 21 nt, synthetic construct
  source 1..21: mol_type = other RNA
atttagcattgcagctagttt

SEQ ID NO: 19889 - RNA, 21 nt, synthetic construct
  source 1..21: mol_type = other RNA
atttatattctgtacttcctc

SEQ ID NO: 19890 - RNA, 21 nt, synthetic construct
  source 1..21: mol_type = other RNA
atttatgtgagatgtggtttt

SEQ ID NO: 19891 - RNA, 21 nt, synthetic construct
  source 1..21: mol_type = other RNA
atttattggatacacctgtca

SEQ ID NO: 19892 - RNA, 21 nt, synthetic construct
  source 1..21: mol_type = other RNA
atttcaacttggtacatttgt

SEQ ID NO: 19893 - RNA, 21 nt, synthetic construct
  source 1..21: mol_type = other RNA
atttcaacttttacttgcttc

SEQ ID NO: 19894 - RNA, 21 nt, synthetic construct
  source 1..21: mol_type = other RNA
atttcaccagtttttcaacac

SEQ ID NO: 19895 - RNA, 21 nt, synthetic construct
  source 1..21: mol_type = other RNA
atttcatggtctgactataag

SEQ ID NO: 19896 - RNA, 21 nt, synthetic construct
  source 1..21: mol_type = other RNA
atttcattttcaacaaagagc

SEQ ID NO: 19897 - RNA, 21 nt, synthetic construct
  source 1..21: mol_type = other RNA
atttccagtgtattgtttgga

SEQ ID NO: 19898 - RNA, 21 nt, synthetic construct
  source 1..21: mol_type = other RNA
atttcccatcttgcagatgtg

SEQ ID NO: 19899 - RNA, 21 nt, synthetic construct
  source 1..21: mol_type = other RNA
atttctggcacttacctacac

SEQ ID NO: 19900 - RNA, 21 nt, synthetic construct
  source 1..21: mol_type = other RNA
atttcttgatctgaaggagcc

SEQ ID NO: 19901 - RNA, 21 nt, synthetic construct
  source 1..21: mol_type = other RNA
atttctttcttggcttacccc

SEQ ID NO: 19902 - RNA, 21 nt, synthetic construct
  source 1..21: mol_type = other RNA
atttgaccataaggctcttac

SEQ ID NO: 19903 - RNA, 21 nt, synthetic construct
  source 1..21: mol_type = other RNA
atttgagagtaagagccttat

SEQ ID NO: 19904 - RNA, 21 nt, synthetic construct
  source 1..21: mol_type = other RNA
atttgattggagagattgggt

SEQ ID NO: 19905 - RNA, 21 nt, synthetic construct
  source 1..21: mol_type = other RNA
atttgcaagctcctggtggca

SEQ ID NO: 19906 - RNA, 21 nt, synthetic construct
  source 1..21: mol_type = other RNA
atttgcatggttatgtatcaa

SEQ ID NO: 19907 - RNA, 21 nt, synthetic construct
  source 1..21: mol_type = other RNA
atttgccagacagaacctctg

SEQ ID NO: 19908 - RNA, 21 nt, synthetic construct
  source 1..21: mol_type = other RNA
atttggaaaatattgcatgtg

SEQ ID NO: 19909 - RNA, 21 nt, synthetic construct
  source 1..21: mol_type = other RNA
atttggaaggtgactctataa

SEQ ID NO: 19910 - RNA, 21 nt, synthetic construct
  source 1..21: mol_type = other RNA
atttggacattatgagtctcg

SEQ ID NO: 19911 - RNA, 21 nt, synthetic construct
  source 1..21: mol_type = other RNA
atttggttgactgctttcacc

SEQ ID NO: 19912 - RNA, 21 nt, synthetic construct
  source 1..21: mol_type = other RNA
atttgtaatttttgctgctgt

SEQ ID NO: 19913 - RNA, 21 nt, synthetic construct
  source 1..21: mol_type = other RNA
atttgtgacttgtgctccagc

SEQ ID NO: 19914 - RNA, 21 nt, synthetic construct
  source 1..21: mol_type = other RNA
attttatagagtcaccttcca

SEQ ID NO: 19915 - RNA, 21 nt, synthetic construct
  source 1..21: mol_type = other RNA
attttcaaactcacacctttt

SEQ ID NO: 19916 - RNA, 21 nt, synthetic construct
  source 1..21: mol_type = other RNA
attttcaacaaagagcagatt

SEQ ID NO: 19917 - RNA, 21 nt, synthetic construct
  source 1..21: mol_type = other RNA
attttcaccatgaaaacattc

SEQ ID NO: 19918 - RNA, 21 nt, synthetic construct
  source 1..21: mol_type = other RNA
attttcacttcccttaaaagt

SEQ ID NO: 19919 - RNA, 21 nt, synthetic construct
  source 1..21: mol_type = other RNA
attttcaggcccactgcagtt

SEQ ID NO: 19920 - RNA, 21 nt, synthetic construct
  source 1..21: mol_type = other RNA
attttccaaataatgtgatcc

SEQ ID NO: 19921 - RNA, 21 nt, synthetic construct
  source 1..21: mol_type = other RNA
attttctgcaggagatgggca

SEQ ID NO: 19922 - RNA, 21 nt, synthetic construct
  source 1..21: mol_type = other RNA
attttcttgggctacagaact

SEQ ID NO: 19923 - RNA, 21 nt, synthetic construct
  source 1..21: mol_type = other RNA
attttgcaaacacttggaata

SEQ ID NO: 19924 - RNA, 21 nt, synthetic construct
  source 1..21: mol_type = other RNA
attttgcatgcacttgatttc

SEQ ID NO: 19925 - RNA, 21 nt, synthetic construct
  source 1..21: mol_type = other RNA
atttttatatccctgtagaac

SEQ ID NO: 19926 - RNA, 21 nt, synthetic construct
  source 1..21: mol_type = other RNA
atttttgctgctgttgctggt

SEQ ID NO: 19927 - RNA, 21 nt, synthetic construct
  source 1..21: mol_type = other RNA
atttttggtagcagtggagag

SEQ ID NO: 19928 - RNA, 21 nt, synthetic construct
  source 1..21: mol_type = other RNA
caaaaaccctcacaccaggtg

SEQ ID NO: 19929 - RNA, 21 nt, synthetic construct
  source 1..21: mol_type = other RNA
caaaaagttcaggatgtgtag

SEQ ID NO: 19930 - RNA, 21 nt, synthetic construct
  source 1..21: mol_type = other RNA
caaaaattggtgggttatgct

SEQ ID NO: 19931 - RNA, 21 nt, synthetic construct
  source 1..21: mol_type = other RNA
caaaacagaccatttaccaaa

SEQ ID NO: 19932 - RNA, 21 nt, synthetic construct
  source 1..21: mol_type = other RNA
caaaacatggaaaaaggtaac

SEQ ID NO: 19933 - RNA, 21 nt, synthetic construct
  source 1..21: mol_type = other RNA
caaaaccagcaacagcagcaa

SEQ ID NO: 19934 - RNA, 21 nt, synthetic construct
  source 1..21: mol_type = other RNA
caaaactgtgactggccctga

SEQ ID NO: 19935 - RNA, 21 nt, synthetic construct
  source 1..21: mol_type = other RNA
caaaacttgcatcacatgcaa

SEQ ID NO: 19936 - RNA, 21 nt, synthetic construct
  source 1..21: mol_type = other RNA
caaaagaacagctgcttctgt

SEQ ID NO: 19937 - RNA, 21 nt, synthetic construct
  source 1..21: mol_type = other RNA
caaaagagcatcattgagacc

SEQ ID NO: 19938 - RNA, 21 nt, synthetic construct
  source 1..21: mol_type = other RNA
caaaagcatgctgctctaagg

SEQ ID NO: 19939 - RNA, 21 nt, synthetic construct
  source 1..21: mol_type = other RNA
caaaagctcatgtgcagtcac

SEQ ID NO: 19940 - RNA, 21 nt, synthetic construct
  source 1..21: mol_type = other RNA
caaaaggctaatggagaaaga

SEQ ID NO: 19941 - RNA, 21 nt, synthetic construct
  source 1..21: mol_type = other RNA
caaaaggtgtgagtttgaaaa

SEQ ID NO: 19942 - RNA, 21 nt, synthetic construct
  source 1..21: mol_type = other RNA
caaaagttattatggaatacc

SEQ ID NO: 19943 - RNA, 21 nt, synthetic construct
  source 1..21: mol_type = other RNA
caaaatacaggtttcttgttc

SEQ ID NO: 19944 - RNA, 21 nt, synthetic construct
  source 1..21: mol_type = other RNA
caaaatcaagcgagttcgaga

SEQ ID NO: 19945 - RNA, 21 nt, synthetic construct
  source 1..21: mol_type = other RNA
caaaatgaaatgaatggtgct

SEQ ID NO: 19946 - RNA, 21 nt, synthetic construct
  source 1..21: mol_type = other RNA
caaaatggaggaataaaacgc

SEQ ID NO: 19947 - RNA, 21 nt, synthetic construct
  source 1..21: mol_type = other RNA
caaacaacttcttcagaaaag

SEQ ID NO: 19948 - RNA, 21 nt, synthetic construct
  source 1..21: mol_type = other RNA
caaacaatacacacctagttt

SEQ ID NO: 19949 - RNA, 21 nt, synthetic construct
  source 1..21: mol_type = other RNA
caaacaatacactggaaattc

SEQ ID NO: 19950 - RNA, 21 nt, synthetic construct
  source 1..21: mol_type = other RNA
caaacacaaccatcccagagt

SEQ ID NO: 19951 - RNA, 21 nt, synthetic construct
  source 1..21: mol_type = other RNA
caaacacagcaaccccaaact

SEQ ID NO: 19952 - RNA, 21 nt, synthetic construct
  source 1..21: mol_type = other RNA
caaacacgagatcttgtgccc

SEQ ID NO: 19953 - RNA, 21 nt, synthetic construct
  source 1..21: mol_type = other RNA
caaacacttggaataccctct

SEQ ID NO: 19954 - RNA, 21 nt, synthetic construct
  source 1..21: mol_type = other RNA
caaaccactgctgcagaactt

SEQ ID NO: 19955 - RNA, 21 nt, synthetic construct
  source 1..21: mol_type = other RNA
caaactcacaccttttgcaac

SEQ ID NO: 19956 - RNA, 21 nt, synthetic construct
  source 1..21: mol_type = other RNA
caaactgaaaaacttatgtcc

SEQ ID NO: 19957 - RNA, 21 nt, synthetic construct
  source 1..21: mol_type = other RNA
caaactgagtcttgccatagt

SEQ ID NO: 19958 - RNA, 21 nt, synthetic construct
  source 1..21: mol_type = other RNA
caaagaatgatccttctcttt

SEQ ID NO: 19959 - RNA, 21 nt, synthetic construct
  source 1..21: mol_type = other RNA
caaagagaaggatcattcttt

SEQ ID NO: 19960 - RNA, 21 nt, synthetic construct
  source 1..21: mol_type = other RNA
caaagagcaagagattctgaa

SEQ ID NO: 19961 - RNA, 21 nt, synthetic construct
  source 1..21: mol_type = other RNA
caaagagcagattcccaaact

SEQ ID NO: 19962 - RNA, 21 nt, synthetic construct
  source 1..21: mol_type = other RNA
caaagcaacaatgatcagcaa

SEQ ID NO: 19963 - RNA, 21 nt, synthetic construct
  source 1..21: mol_type = other RNA
caaagcaagatcttcttcaca

SEQ ID NO: 19964 - RNA, 21 nt, synthetic construct
  source 1..21: mol_type = other RNA
caaagccagctgcagtggtga

SEQ ID NO: 19965 - RNA, 21 nt, synthetic construct
  source 1..21: mol_type = other RNA
caaagctagcgtctggtgaag

SEQ ID NO: 19966 - RNA, 21 nt, synthetic construct
  source 1..21: mol_type = other RNA
caaagctcagtgttcactaag

SEQ ID NO: 19967 - RNA, 21 nt, synthetic construct
  source 1..21: mol_type = other RNA
caaagctccagaatggaagcc

SEQ ID NO: 19968 - RNA, 21 nt, synthetic construct
  source 1..21: mol_type = other RNA
caaaggtacttgatacataac

SEQ ID NO: 19969 - RNA, 21 nt, synthetic construct
  source 1..21: mol_type = other RNA
caaagtaacacaacactttta

SEQ ID NO: 19970 - RNA, 21 nt, synthetic construct
  source 1..21: mol_type = other RNA
caaataacgacttggcgtgaa

SEQ ID NO: 19971 - RNA, 21 nt, synthetic construct
  source 1..21: mol_type = other RNA
caaataatgtgatcccaaagc

SEQ ID NO: 19972 - RNA, 21 nt, synthetic construct
  source 1..21: mol_type = other RNA
caaatcacagaagcaagtaaa

SEQ ID NO: 19973 - RNA, 21 nt, synthetic construct
  source 1..21: mol_type = other RNA
caaatcggagacatttggttg

SEQ ID NO: 19974 - RNA, 21 nt, synthetic construct
  source 1..21: mol_type = other RNA
caaatgacctccaaacaatac

SEQ ID NO: 19975 - RNA, 21 nt, synthetic construct
  source 1..21: mol_type = other RNA
caaatgggactggaggaagta

SEQ ID NO: 19976 - RNA, 21 nt, synthetic construct
  source 1..21: mol_type = other RNA
caaatgggaggtgatggtatc

SEQ ID NO: 19977 - RNA, 21 nt, synthetic construct
  source 1..21: mol_type = other RNA
caaatgtaccaagttgaaatg

SEQ ID NO: 19978 - RNA, 21 nt, synthetic construct
  source 1..21: mol_type = other RNA
caaatgtctccgatttgagtg

SEQ ID NO: 19979 - RNA, 21 nt, synthetic construct
  source 1..21: mol_type = other RNA
caaatgtttttcctgtgcctg

SEQ ID NO: 19980 - RNA, 21 nt, synthetic construct
  source 1..21: mol_type = other RNA
caaattactagatactcctat

SEQ ID NO: 19981 - RNA, 21 nt, synthetic construct
  source 1..21: mol_type = other RNA
caaattgctgctggaacctga

SEQ ID NO: 19982 - RNA, 21 nt, synthetic construct
  source 1..21: mol_type = other RNA
caacaaaaatcagtttttgag

SEQ ID NO: 19983 - RNA, 21 nt, synthetic construct
  source 1..21: mol_type = other RNA
caacaaagagcagattcccaa

SEQ ID NO: 19984 - RNA, 21 nt, synthetic construct
  source 1..21: mol_type = other RNA
caacaagctgcgcaacttgct

SEQ ID NO: 19985 - RNA, 21 nt, synthetic construct
  source 1..21: mol_type = other RNA
caacaagcttcagttctacag

SEQ ID NO: 19986 - RNA, 21 nt, synthetic construct
  source 1..21: mol_type = other RNA
caacaatgatcagcaaagaga

SEQ ID NO: 19987 - RNA, 21 nt, synthetic construct
  source 1..21: mol_type = other RNA
caacacagcactatctgaaac

SEQ ID NO: 19988 - RNA, 21 nt, synthetic construct
  source 1..21: mol_type = other RNA
caacacagctggagcacaagt

SEQ ID NO: 19989 - RNA, 21 nt, synthetic construct
  source 1..21: mol_type = other RNA
caacacataactgcagtgggc

SEQ ID NO: 19990 - RNA, 21 nt, synthetic construct
  source 1..21: mol_type = other RNA
caacactggggacataagttt

SEQ ID NO: 19991 - RNA, 21 nt, synthetic construct
  source 1..21: mol_type = other RNA
caacacttttaagggaagtga

SEQ ID NO: 19992 - RNA, 21 nt, synthetic construct
  source 1..21: mol_type = other RNA
caacagactaagtccattcct

SEQ ID NO: 19993 - RNA, 21 nt, synthetic construct
  source 1..21: mol_type = other RNA
caacagcagcaaaaattacaa

SEQ ID NO: 19994 - RNA, 21 nt, synthetic construct
  source 1..21: mol_type = other RNA
caacaggcttcagagactgag

SEQ ID NO: 19995 - RNA, 21 nt, synthetic construct
  source 1..21: mol_type = other RNA
caacataagcctcataaacag

SEQ ID NO: 19996 - RNA, 21 nt, synthetic construct
  source 1..21: mol_type = other RNA
caacatctccagttccaaaaa

SEQ ID NO: 19997 - RNA, 21 nt, synthetic construct
  source 1..21: mol_type = other RNA
caacatgcctggggggctccc

SEQ ID NO: 19998 - RNA, 21 nt, synthetic construct
  source 1..21: mol_type = other RNA
caacatggttggttctatcct

SEQ ID NO: 19999 - RNA, 21 nt, synthetic construct
  source 1..21: mol_type = other RNA
caaccaaaagaacagctgctt

SEQ ID NO: 20000 - RNA, 21 nt, synthetic construct
  source 1..21: mol_type = other RNA
caaccaaagtaacacaacact

SEQ ID NO: 20001 - RNA, 21 nt, synthetic construct
  source 1..21: mol_type = other RNA
caaccaaatgtctccgatttg

SEQ ID NO: 20002 - RNA, 21 nt, synthetic construct
  source 1..21: mol_type = other RNA
caaccatcccagagttcacat

SEQ ID NO: 20003 - RNA, 21 nt, synthetic construct
  source 1..21: mol_type = other RNA
caaccatgttgagggcaacag

SEQ ID NO: 20004 - RNA, 21 nt, synthetic construct
  source 1..21: mol_type = other RNA
caacccaatctctccaatcaa

SEQ ID NO: 20005 - RNA, 21 nt, synthetic construct
  source 1..21: mol_type = other RNA
caaccccaaactgagtcttgc

SEQ ID NO: 20006 - RNA, 21 nt, synthetic construct
  source 1..21: mol_type = other RNA
caactacaacaacaaaaatca

SEQ ID NO: 20007 - RNA, 21 nt, synthetic construct
  source 1..21: mol_type = other RNA
caactcattagtagcctgact

SEQ ID NO: 20008 - RNA, 21 nt, synthetic construct
  source 1..21: mol_type = other RNA
caactgccagcagttgatgag

SEQ ID NO: 20009 - RNA, 21 nt, synthetic construct
  source 1..21: mol_type = other RNA
caactgctggcagttgtcctg

SEQ ID NO: 20010 - RNA, 21 nt, synthetic construct
  source 1..21: mol_type = other RNA
caacttcttcagaaaagacac

SEQ ID NO: 20011 - RNA, 21 nt, synthetic construct
  source 1..21: mol_type = other RNA
caacttgctcagcaaaggtac

SEQ ID NO: 20012 - RNA, 21 nt, synthetic construct
  source 1..21: mol_type = other RNA
caacttggtacatttgtgact

SEQ ID NO: 20013 - RNA, 21 nt, synthetic construct
  source 1..21: mol_type = other RNA
caacttttacttgcttctgtg

SEQ ID NO: 20014 - RNA, 21 nt, synthetic construct
  source 1..21: mol_type = other RNA
caagaaaatgcagttaaagat

SEQ ID NO: 20015 - RNA, 21 nt, synthetic construct
  source 1..21: mol_type = other RNA
caagaaacctgtattttgcat

SEQ ID NO: 20016 - RNA, 21 nt, synthetic construct
  source 1..21: mol_type = other RNA
caagaaagaaatccaggtgaa

SEQ ID NO: 20017 - RNA, 21 nt, synthetic construct
  source 1..21: mol_type = other RNA
caagaaagtagagggtattcc

SEQ ID NO: 20018 - RNA, 21 nt, synthetic construct
  source 1..21: mol_type = other RNA
caagaaattgaaacaagacca

SEQ ID NO: 20019 - RNA, 21 nt, synthetic construct
  source 1..21: mol_type = other RNA
caagaacagcagcaaacacag

SEQ ID NO: 20020 - RNA, 21 nt, synthetic construct
  source 1..21: mol_type = other RNA
caagaacaggagcagaagtca

SEQ ID NO: 20021 - RNA, 21 nt, synthetic construct
  source 1..21: mol_type = other RNA
caagaccaaaaggctaatgga

SEQ ID NO: 20022 - RNA, 21 nt, synthetic construct
  source 1..21: mol_type = other RNA
caagaccaatgtcagaacacc

SEQ ID NO: 20023 - RNA, 21 nt, synthetic construct
  source 1..21: mol_type = other RNA
caagacccaaaacttgcatca

SEQ ID NO: 20024 - RNA, 21 nt, synthetic construct
  source 1..21: mol_type = other RNA
caagactcaatatgatttccc

SEQ ID NO: 20025 - RNA, 21 nt, synthetic construct
  source 1..21: mol_type = other RNA
caagactcagtttggggttgc

SEQ ID NO: 20026 - RNA, 21 nt, synthetic construct
  source 1..21: mol_type = other RNA
caagagaatccacctgcaagc

SEQ ID NO: 20027 - RNA, 21 nt, synthetic construct
  source 1..21: mol_type = other RNA
caagagattctgaagggtcga

SEQ ID NO: 20028 - RNA, 21 nt, synthetic construct
  source 1..21: mol_type = other RNA
caagatatgtctggtcaacaa

SEQ ID NO: 20029 - RNA, 21 nt, synthetic construct
  source 1..21: mol_type = other RNA
caagatctcgtgtttgctcct

SEQ ID NO: 20030 - RNA, 21 nt, synthetic construct
  source 1..21: mol_type = other RNA
caagatcttcttcacaggtgc

SEQ ID NO: 20031 - RNA, 21 nt, synthetic construct
  source 1..21: mol_type = other RNA
caagatgggaaatcatattga

SEQ ID NO: 20032 - RNA, 21 nt, synthetic construct
  source 1..21: mol_type = other RNA
caagcaaagctcagtgttcac

SEQ ID NO: 20033 - RNA, 21 nt, synthetic construct
  source 1..21: mol_type = other RNA
caagcataacccaccaatttt

SEQ ID NO: 20034 - RNA, 21 nt, synthetic construct
  source 1..21: mol_type = other RNA
caagccacatgcctgtatgca

SEQ ID NO: 20035 - RNA, 21 nt, synthetic construct
  source 1..21: mol_type = other RNA
caagcctgatggaacaggata

SEQ ID NO: 20036 - RNA, 21 nt, synthetic construct
  source 1..21: mol_type = other RNA
caagcgagttcgagactcata

SEQ ID NO: 20037 - RNA, 21 nt, synthetic construct
  source 1..21: mol_type = other RNA
caagcggaatcccatctaaaa

SEQ ID NO: 20038 - RNA, 21 nt, synthetic construct
  source 1..21: mol_type = other RNA
caagctcctggtggcagctct

SEQ ID NO: 20039 - RNA, 21 nt, synthetic construct
  source 1..21: mol_type = other RNA
caagctgcgcaacttgctcag

SEQ ID NO: 20040 - RNA, 21 nt, synthetic construct
  source 1..21: mol_type = other RNA
caagctgtgataatgtgcagc

SEQ ID NO: 20041 - RNA, 21 nt, synthetic construct
  source 1..21: mol_type = other RNA
caagcttacacccagaaaaca

SEQ ID NO: 20042 - RNA, 21 nt, synthetic construct
  source 1..21: mol_type = other RNA
caagcttcagttctacaggga

SEQ ID NO: 20043 - RNA, 21 nt, synthetic construct
  source 1..21: mol_type = other RNA
caaggagcaaacacgagatct

SEQ ID NO: 20044 - RNA, 21 nt, synthetic construct
  source 1..21: mol_type = other RNA
caaggcaagcttacacccaga

SEQ ID NO: 20045 - RNA, 21 nt, synthetic construct
  source 1..21: mol_type = other RNA
caaggcagtgctaatgcctaa

SEQ ID NO: 20046 - RNA, 21 nt, synthetic construct
  source 1..21: mol_type = other RNA
caagggcagtcccaaggtaca

SEQ ID NO: 20047 - RNA, 21 nt, synthetic construct
  source 1..21: mol_type = other RNA
caaggtacagtggaccaacat

SEQ ID NO: 20048 - RNA, 21 nt, synthetic construct
  source 1..21: mol_type = other RNA
caagtaaaagttgaaatgtca

SEQ ID NO: 20049 - RNA, 21 nt, synthetic construct
  source 1..21: mol_type = other RNA
caagtacctttgctgagcaag

SEQ ID NO: 20050 - RNA, 21 nt, synthetic construct
  source 1..21: mol_type = other RNA
caagtcacaaatgtaccaagt

SEQ ID NO: 20051 - RNA, 21 nt, synthetic construct
  source 1..21: mol_type = other RNA
caagtcgttatttgaccataa

SEQ ID NO: 20052 - RNA, 21 nt, synthetic construct
  source 1..21: mol_type = other RNA
caagtgcatgcaaaatacagg

SEQ ID NO: 20053 - RNA, 21 nt, synthetic construct
  source 1..21: mol_type = other RNA
caagtgctgtttcaacactgg

SEQ ID NO: 20054 - RNA, 21 nt, synthetic construct
  source 1..21: mol_type = other RNA
caagtggcactctttcaaaag

SEQ ID NO: 20055 - RNA, 21 nt, synthetic construct
  source 1..21: mol_type = other RNA
caagtgtttgcaaaatggagg

SEQ ID NO: 20056 - RNA, 21 nt, synthetic construct
  source 1..21: mol_type = other RNA
caagttctgcagcagtggttt

SEQ ID NO: 20057 - RNA, 21 nt, synthetic construct
  source 1..21: mol_type = other RNA
caagttgaaatgaatcaaggg

SEQ ID NO: 20058 - RNA, 21 nt, synthetic construct
  source 1..21: mol_type = other RNA
caagttgcgcagcttgttgac

SEQ ID NO: 20059 - RNA, 21 nt, synthetic construct
  source 1..21: mol_type = other RNA
caagttttgggtcttgtttcc

SEQ ID NO: 20060 - RNA, 21 nt, synthetic construct
  source 1..21: mol_type = other RNA
caataattttatagagtcacc

SEQ ID NO: 20061 - RNA, 21 nt, synthetic construct
  source 1..21: mol_type = other RNA
caatacacacctagtttcaga

SEQ ID NO: 20062 - RNA, 21 nt, synthetic construct
  source 1..21: mol_type = other RNA
caatacactggaaattccaac

SEQ ID NO: 20063 - RNA, 21 nt, synthetic construct
  source 1..21: mol_type = other RNA
caatatgatttcccatcttgc

SEQ ID NO: 20064 - RNA, 21 nt, synthetic construct
  source 1..21: mol_type = other RNA
caatattatccagattgtgtt

SEQ ID NO: 20065 - RNA, 21 nt, synthetic construct
  source 1..21: mol_type = other RNA
caatcaaatgacctccaaaca

SEQ ID NO: 20066 - RNA, 21 nt, synthetic construct
  source 1..21: mol_type = other RNA
caatccatcctggtttcagat

SEQ ID NO: 20067 - RNA, 21 nt, synthetic construct
  source 1..21: mol_type = other RNA
caatctctccaatcaaatgac

SEQ ID NO: 20068 - RNA, 21 nt, synthetic construct
  source 1..21: mol_type = other RNA
caatctggataatattgagac

SEQ ID NO: 20069 - RNA, 21 nt, synthetic construct
  source 1..21: mol_type = other RNA
caatgactgttccattgtgtt

SEQ ID NO: 20070 - RNA, 21 nt, synthetic construct
  source 1..21: mol_type = other RNA
caatgatcagcaaagagaagg

SEQ ID NO: 20071 - RNA, 21 nt, synthetic construct
  source 1..21: mol_type = other RNA
caatgatgctcttttgctgca

SEQ ID NO: 20072 - RNA, 21 nt, synthetic construct
  source 1..21: mol_type = other RNA
caatgctaaatacctgttcct

SEQ ID NO: 20073 - RNA, 21 nt, synthetic construct
  source 1..21: mol_type = other RNA
caatggaaacacaatctggat

SEQ ID NO: 20074 - RNA, 21 nt, synthetic construct
  source 1..21: mol_type = other RNA
caatggaacagtcattgtccc

SEQ ID NO: 20075 - RNA, 21 nt, synthetic construct
  source 1..21: mol_type = other RNA
caatgtcagaacacctcaagc

SEQ ID NO: 20076 - RNA, 21 nt, synthetic construct
  source 1..21: mol_type = other RNA
caatgttcttgtcatggtaat

SEQ ID NO: 20077 - RNA, 21 nt, synthetic construct
  source 1..21: mol_type = other RNA
caattaaggtggaacctggat

SEQ ID NO: 20078 - RNA, 21 nt, synthetic construct
  source 1..21: mol_type = other RNA
caattattctgaggcctttca

SEQ ID NO: 20079 - RNA, 21 nt, synthetic construct
  source 1..21: mol_type = other RNA
caattcaatccatcctggttt

SEQ ID NO: 20080 - RNA, 21 nt, synthetic construct
  source 1..21: mol_type = other RNA
caattccgcacagacctctaa

SEQ ID NO: 20081 - RNA, 21 nt, synthetic construct
  source 1..21: mol_type = other RNA
caattcttcagtatcaaccca

SEQ ID NO: 20082 - RNA, 21 nt, synthetic construct
  source 1..21: mol_type = other RNA
caattgcttctttctccccct

SEQ ID NO: 20083 - RNA, 21 nt, synthetic construct
  source 1..21: mol_type = other RNA
caattgtgatggtggtggtgg

SEQ ID NO: 20084 - RNA, 21 nt, synthetic construct
  source 1..21: mol_type = other RNA
caatttcttgatctgaaggag

SEQ ID NO: 20085 - RNA, 21 nt, synthetic construct
  source 1..21: mol_type = other RNA
caatttgcaagctcctggtgg

SEQ ID NO: 20086 - RNA, 21 nt, synthetic construct
  source 1..21: mol_type = other RNA
caatttttggtagcagtggag

SEQ ID NO: 20087 - RNA, 21 nt, synthetic construct
  source 1..21: mol_type = other RNA
cacaaacacaaccatcccaga

SEQ ID NO: 20088 - RNA, 21 nt, synthetic construct
  source 1..21: mol_type = other RNA
cacaaagctagcgtctggtga

SEQ ID NO: 20089 - RNA, 21 nt, synthetic construct
  source 1..21: mol_type = other RNA
cacaaatgtaccaagttgaaa

SEQ ID NO: 20090 - RNA, 21 nt, synthetic construct
  source 1..21: mol_type = other RNA
cacaacaagcttcagttctac

SEQ ID NO: 20091 - RNA, 21 nt, synthetic construct
  source 1..21: mol_type = other RNA
cacaacacttttaagggaagt

SEQ ID NO: 20092 - RNA, 21 nt, synthetic construct
  source 1..21: mol_type = other RNA
cacaaccatcccagagttcac

SEQ ID NO: 20093 - RNA, 21 nt, synthetic construct
  source 1..21: mol_type = other RNA
cacaagaaagtagagggtatt

SEQ ID NO: 20094 - RNA, 21 nt, synthetic construct
  source 1..21: mol_type = other RNA
cacaagatctcgtgtttgctc

SEQ ID NO: 20095 - RNA, 21 nt, synthetic construct
  source 1..21: mol_type = other RNA
cacaagtcacaaatgtaccaa

SEQ ID NO: 20096 - RNA, 21 nt, synthetic construct
  source 1..21: mol_type = other RNA
cacaatctggataatattgag

SEQ ID NO: 20097 - RNA, 21 nt, synthetic construct
  source 1..21: mol_type = other RNA
cacaatggaacagtcattgtc

SEQ ID NO: 20098 - RNA, 21 nt, synthetic construct
  source 1..21: mol_type = other RNA
cacaattattctgaggccttt

SEQ ID NO: 20099 - RNA, 21 nt, synthetic construct
  source 1..21: mol_type = other RNA
cacaattgcttctttctcccc

SEQ ID NO: 20100 - RNA, 21 nt, synthetic construct
  source 1..21: mol_type = other RNA
cacacaattattctgaggcct

SEQ ID NO: 20101 - RNA, 21 nt, synthetic construct
  source 1..21: mol_type = other RNA
cacacacatggtgaactcctg

SEQ ID NO: 20102 - RNA, 21 nt, synthetic construct
  source 1..21: mol_type = other RNA
cacacagcaccaccagaaaac

SEQ ID NO: 20103 - RNA, 21 nt, synthetic construct
  source 1..21: mol_type = other RNA
cacacagtgactgcacatgag

SEQ ID NO: 20104 - RNA, 21 nt, synthetic construct
  source 1..21: mol_type = other RNA
cacacatggtgaactcctgga

SEQ ID NO: 20105 - RNA, 21 nt, synthetic construct
  source 1..21: mol_type = other RNA
cacaccaccaccaccatcaca

SEQ ID NO: 20106 - RNA, 21 nt, synthetic construct
  source 1..21: mol_type = other RNA
cacaccaggtgcacttctcca

SEQ ID NO: 20107 - RNA, 21 nt, synthetic construct
  source 1..21: mol_type = other RNA
cacaccccagctttagagcag

SEQ ID NO: 20108 - RNA, 21 nt, synthetic construct
  source 1..21: mol_type = other RNA
cacacctagtttcagagaata

SEQ ID NO: 20109 - RNA, 21 nt, synthetic construct
  source 1..21: mol_type = other RNA
cacaccttttgcaacataagc

SEQ ID NO: 20110 - RNA, 21 nt, synthetic construct
  source 1..21: mol_type = other RNA
cacacgactattctggcttcc

SEQ ID NO: 20111 - RNA, 21 nt, synthetic construct
  source 1..21: mol_type = other RNA
cacactcagacccctccccag

SEQ ID NO: 20112 - RNA, 21 nt, synthetic construct
  source 1..21: mol_type = other RNA
cacagaagcaagtaaaagttg

SEQ ID NO: 20113 - RNA, 21 nt, synthetic construct
  source 1..21: mol_type = other RNA
cacagacctctaactctgagc

SEQ ID NO: 20114 - RNA, 21 nt, synthetic construct
  source 1..21: mol_type = other RNA
cacagattctttcttatcact

SEQ ID NO: 20115 - RNA, 21 nt, synthetic construct
  source 1..21: mol_type = other RNA
cacagcaaccccaaactgagt

SEQ ID NO: 20116 - RNA, 21 nt, synthetic construct
  source 1..21: mol_type = other RNA
cacagcaccaccagaaaacaa

SEQ ID NO: 20117 - RNA, 21 nt, synthetic construct
  source 1..21: mol_type = other RNA
cacagcactatctgaaaccag

SEQ ID NO: 20118 - RNA, 21 nt, synthetic construct
  source 1..21: mol_type = other RNA
cacagctggagcacaagtcac

SEQ ID NO: 20119 - RNA, 21 nt, synthetic construct
  source 1..21: mol_type = other RNA
cacagcttgcaggtggattct

SEQ ID NO: 20120 - RNA, 21 nt, synthetic construct
  source 1..21: mol_type = other RNA
cacaggaaaaacatttgcatg

SEQ ID NO: 20121 - RNA, 21 nt, synthetic construct
  source 1..21: mol_type = other RNA
cacaggacaactcattagtag

SEQ ID NO: 20122 - RNA, 21 nt, synthetic construct
  source 1..21: mol_type = other RNA
cacaggccaattaaggtggaa

SEQ ID NO: 20123 - RNA, 21 nt, synthetic construct
  source 1..21: mol_type = other RNA
cacaggcctcactcaccactg

SEQ ID NO: 20124 - RNA, 21 nt, synthetic construct
  source 1..21: mol_type = other RNA
cacaggtgctttcaagaacag

SEQ ID NO: 20125 - RNA, 21 nt, synthetic construct
  source 1..21: mol_type = other RNA
cacaggttcctcagcttcctt

SEQ ID NO: 20126 - RNA, 21 nt, synthetic construct
  source 1..21: mol_type = other RNA
cacagtgactgcacatgagct

SEQ ID NO: 20127 - RNA, 21 nt, synthetic construct
  source 1..21: mol_type = other RNA
cacagttagtgaaccttctct

SEQ ID NO: 20128 - RNA, 21 nt, synthetic construct
  source 1..21: mol_type = other RNA
cacagttttgactagacaaac

SEQ ID NO: 20129 - RNA, 21 nt, synthetic construct
  source 1..21: mol_type = other RNA
cacataaatgccattaacagt

SEQ ID NO: 20130 - RNA, 21 nt, synthetic construct
  source 1..21: mol_type = other RNA
cacataactgcagtgggcctg

SEQ ID NO: 20131 - RNA, 21 nt, synthetic construct
  source 1..21: mol_type = other RNA
cacatcctgaactttttgcag

SEQ ID NO: 20132 - RNA, 21 nt, synthetic construct
  source 1..21: mol_type = other RNA
cacatctcacataaatgccat

SEQ ID NO: 20133 - RNA, 21 nt, synthetic construct
  source 1..21: mol_type = other RNA
cacatctccctcaaaaccagc

SEQ ID NO: 20134 - RNA, 21 nt, synthetic construct
  source 1..21: mol_type = other RNA
cacatctgcaagatgggaaat

SEQ ID NO: 20135 - RNA, 21 nt, synthetic construct
  source 1..21: mol_type = other RNA
cacatgagcttttggtaaatg

SEQ ID NO: 20136 - RNA, 21 nt, synthetic construct
  source 1..21: mol_type = other RNA
cacatgcaatattttccaaat

SEQ ID NO: 20137 - RNA, 21 nt, synthetic construct
  source 1..21: mol_type = other RNA
cacatgcctgtatgcacacag

SEQ ID NO: 20138 - RNA, 21 nt, synthetic construct
  source 1..21: mol_type = other RNA
cacatggtgaactcctggaaa

SEQ ID NO: 20139 - RNA, 21 nt, synthetic construct
  source 1..21: mol_type = other RNA
cacatgtatgcagcccttctc

SEQ ID NO: 20140 - RNA, 21 nt, synthetic construct
  source 1..21: mol_type = other RNA
cacattatcacagcttgcagg

SEQ ID NO: 20141 - RNA, 21 nt, synthetic construct
  source 1..21: mol_type = other RNA
caccaaccaaaagaacagctg

SEQ ID NO: 20142 - RNA, 21 nt, synthetic construct
  source 1..21: mol_type = other RNA
caccaagcggaatcccatcta

SEQ ID NO: 20143 - RNA, 21 nt, synthetic construct
  source 1..21: mol_type = other RNA
caccaagtggcactctttcaa

SEQ ID NO: 20144 - RNA, 21 nt, synthetic construct
  source 1..21: mol_type = other RNA
caccaatttttggtagcagtg

SEQ ID NO: 20145 - RNA, 21 nt, synthetic construct
  source 1..21: mol_type = other RNA
caccaccaccaccatcacaat

SEQ ID NO: 20146 - RNA, 21 nt, synthetic construct
  source 1..21: mol_type = other RNA
caccaccaccatcacaattgc

SEQ ID NO: 20147 - RNA, 21 nt, synthetic construct
  source 1..21: mol_type = other RNA
caccaccactaccccaaccaa

SEQ ID NO: 20148 - RNA, 21 nt, synthetic construct
  source 1..21: mol_type = other RNA
caccaccagaaaacaaaacat

SEQ ID NO: 20149 - RNA, 21 nt, synthetic construct
  source 1..21: mol_type = other RNA
caccaccatcacaattgcttc

SEQ ID NO: 20150 - RNA, 21 nt, synthetic construct
  source 1..21: mol_type = other RNA
caccaccttcccagagtccta

SEQ ID NO: 20151 - RNA, 21 nt, synthetic construct
  source 1..21: mol_type = other RNA
caccactaccccaaccaaagt

SEQ ID NO: 20152 - RNA, 21 nt, synthetic construct
  source 1..21: mol_type = other RNA
caccactgcagctggctttgg

SEQ ID NO: 20153 - RNA, 21 nt, synthetic construct
  source 1..21: mol_type = other RNA
caccagaaaacaaaacatgga

SEQ ID NO: 20154 - RNA, 21 nt, synthetic construct
  source 1..21: mol_type = other RNA
caccagacgctagctttgtgg

SEQ ID NO: 20155 - RNA, 21 nt, synthetic construct
  source 1..21: mol_type = other RNA
caccaggagcttgcaaattgc

SEQ ID NO: 20156 - RNA, 21 nt, synthetic construct
  source 1..21: mol_type = other RNA
caccaggtgcacttctccaaa

SEQ ID NO: 20157 - RNA, 21 nt, synthetic construct
  source 1..21: mol_type = other RNA
caccagtttttcaacacataa

SEQ ID NO: 20158 - RNA, 21 nt, synthetic construct
  source 1..21: mol_type = other RNA
caccatcacaattgcttcttt

SEQ ID NO: 20159 - RNA, 21 nt, synthetic construct
  source 1..21: mol_type = other RNA
caccatgaaaacattcttcca

SEQ ID NO: 20160 - RNA, 21 nt, synthetic construct
  source 1..21: mol_type = other RNA
caccatgtgtgtgttccacgg

SEQ ID NO: 20161 - RNA, 21 nt, synthetic construct
  source 1..21: mol_type = other RNA
caccattaggcattagcactg

SEQ ID NO: 20162 - RNA, 21 nt, synthetic construct
  source 1..21: mol_type = other RNA
caccattcagagtgctttttc

SEQ ID NO: 20163 - RNA, 21 nt, synthetic construct
  source 1..21: mol_type = other RNA
caccattcatttcattttgtt

SEQ ID NO: 20164 - RNA, 21 nt, synthetic construct
  source 1..21: mol_type = other RNA
cacccagaaaacaacacagct

SEQ ID NO: 20165 - RNA, 21 nt, synthetic construct
  source 1..21: mol_type = other RNA
cacccatcgcatacctcaggg

SEQ ID NO: 20166 - RNA, 21 nt, synthetic construct
  source 1..21: mol_type = other RNA
caccccagctttagagcagca

SEQ ID NO: 20167 - RNA, 21 nt, synthetic construct
  source 1..21: mol_type = other RNA
cacccccaaagcaacaatgat

SEQ ID NO: 20168 - RNA, 21 nt, synthetic construct
  source 1..21: mol_type = other RNA
caccgcaatggaaacacaatc

SEQ ID NO: 20169 - RNA, 21 nt, synthetic construct
  source 1..21: mol_type = other RNA
cacctagtttcagagaataaa

SEQ ID NO: 20170 - RNA, 21 nt, synthetic construct
  source 1..21: mol_type = other RNA
cacctcaagcataacccacca

SEQ ID NO: 20171 - RNA, 21 nt, synthetic construct
  source 1..21: mol_type = other RNA
cacctcccatttgccagacag

SEQ ID NO: 20172 - RNA, 21 nt, synthetic construct
  source 1..21: mol_type = other RNA
cacctgcaagctgtgataatg

SEQ ID NO: 20173 - RNA, 21 nt, synthetic construct
  source 1..21: mol_type = other RNA
cacctggatttctttcttggc

SEQ ID NO: 20174 - RNA, 21 nt, synthetic construct
  source 1..21: mol_type = other RNA
cacctggtgtgagggtttttg

SEQ ID NO: 20175 - RNA, 21 nt, synthetic construct
  source 1..21: mol_type = other RNA
cacctgtcaagactcaatatg

SEQ ID NO: 20176 - RNA, 21 nt, synthetic construct
  source 1..21: mol_type = other RNA
cacctgtgaagaagatcttgc

SEQ ID NO: 20177 - RNA, 21 nt, synthetic construct
  source 1..21: mol_type = other RNA
caccttaattggcctgtgcat

SEQ ID NO: 20178 - RNA, 21 nt, synthetic construct
  source 1..21: mol_type = other RNA
caccttagagcagcatgcttt

SEQ ID NO: 20179 - RNA, 21 nt, synthetic construct
  source 1..21: mol_type = other RNA
caccttccaaattactagata

SEQ ID NO: 20180 - RNA, 21 nt, synthetic construct
  source 1..21: mol_type = other RNA
caccttcccagagtcctaatc

SEQ ID NO: 20181 - RNA, 21 nt, synthetic construct
  source 1..21: mol_type = other RNA
caccttttgcaacataagcct

SEQ ID NO: 20182 - RNA, 21 nt, synthetic construct
  source 1..21: mol_type = other RNA
cacgactattctggcttccct

SEQ ID NO: 20183 - RNA, 21 nt, synthetic construct
  source 1..21: mol_type = other RNA
cacgagatcttgtgcccccaa

SEQ ID NO: 20184 - RNA, 21 nt, synthetic construct
  source 1..21: mol_type = other RNA
cacgccaagtcgttatttgac

SEQ ID NO: 20185 - RNA, 21 nt, synthetic construct
  source 1..21: mol_type = other RNA
cacggaagaggcagaaactgt

SEQ ID NO: 20186 - RNA, 21 nt, synthetic construct
  source 1..21: mol_type = other RNA
cactaactgtgcgttttattc

SEQ ID NO: 20187 - RNA, 21 nt, synthetic construct
  source 1..21: mol_type = other RNA
cactaaggattccttttctgc

SEQ ID NO: 20188 - RNA, 21 nt, synthetic construct
  source 1..21: mol_type = other RNA
cactaccacaccaccaccacc

SEQ ID NO: 20189 - RNA, 21 nt, synthetic construct
  source 1..21: mol_type = other RNA
cactaccccaaccaaagtaac

SEQ ID NO: 20190 - RNA, 21 nt, synthetic construct
  source 1..21: mol_type = other RNA
cactagatttcattttcaaca

SEQ ID NO: 20191 - RNA, 21 nt, synthetic construct
  source 1..21: mol_type = other RNA
cactatctgaaaccaggatgg

SEQ ID NO: 20192 - RNA, 21 nt, synthetic construct
  source 1..21: mol_type = other RNA
cactcaaaagcatgctgctct

SEQ ID NO: 20193 - RNA, 21 nt, synthetic construct
  source 1..21: mol_type = other RNA
cactcaaatcggagacatttg

SEQ ID NO: 20194 - RNA, 21 nt, synthetic construct
  source 1..21: mol_type = other RNA
cactcaccactgcagctggct

SEQ ID NO: 20195 - RNA, 21 nt, synthetic construct
  source 1..21: mol_type = other RNA
cactcacccatcgcatacctc

SEQ ID NO: 20196 - RNA, 21 nt, synthetic construct
  source 1..21: mol_type = other RNA
cactcagacccctccccagaa

SEQ ID NO: 20197 - RNA, 21 nt, synthetic construct
  source 1..21: mol_type = other RNA
cactctgaatggtggagtttt

SEQ ID NO: 20198 - RNA, 21 nt, synthetic construct
  source 1..21: mol_type = other RNA
cactgagctttgcttgaagta

SEQ ID NO: 20199 - RNA, 21 nt, synthetic construct
  source 1..21: mol_type = other RNA
cactgcagctggctttggagg

SEQ ID NO: 20200 - RNA, 21 nt, synthetic construct
  source 1..21: mol_type = other RNA
cactgcagttatgtgttgaaa

SEQ ID NO: 20201 - RNA, 21 nt, synthetic construct
  source 1..21: mol_type = other RNA
cactgccatcaattcttcagt

SEQ ID NO: 20202 - RNA, 21 nt, synthetic construct
  source 1..21: mol_type = other RNA
cactgcctgagagagctcatc

SEQ ID NO: 20203 - RNA, 21 nt, synthetic construct
  source 1..21: mol_type = other RNA
cactgccttgtttttaagtaa

SEQ ID NO: 20204 - RNA, 21 nt, synthetic construct
  source 1..21: mol_type = other RNA
cactgctaccaaaaattggtg

SEQ ID NO: 20205 - RNA, 21 nt, synthetic construct
  source 1..21: mol_type = other RNA
cactgctgcagaacttgatag

SEQ ID NO: 20206 - RNA, 21 nt, synthetic construct
  source 1..21: mol_type = other RNA
cactggaaattccaacatgcc

SEQ ID NO: 20207 - RNA, 21 nt, synthetic construct
  source 1..21: mol_type = other RNA
cactggggacataagtttttc

SEQ ID NO: 20208 - RNA, 21 nt, synthetic construct
  source 1..21: mol_type = other RNA
cactgtaccttgggactgccc

SEQ ID NO: 20209 - RNA, 21 nt, synthetic construct
  source 1..21: mol_type = other RNA
cactgtctcaatattatccag

SEQ ID NO: 20210 - RNA, 21 nt, synthetic construct
  source 1..21: mol_type = other RNA
cactgtgtggcactagatttc

SEQ ID NO: 20211 - RNA, 21 nt, synthetic construct
  source 1..21: mol_type = other RNA
cacttacctacacatctgcaa

SEQ ID NO: 20212 - RNA, 21 nt, synthetic construct
  source 1..21: mol_type = other RNA
cacttcccttaaaagtgttgt

SEQ ID NO: 20213 - RNA, 21 nt, synthetic construct
  source 1..21: mol_type = other RNA
cacttctccaaaacagaccat

SEQ ID NO: 20214 - RNA, 21 nt, synthetic construct
  source 1..21: mol_type = other RNA
cacttgaatcaacaggcttca

SEQ ID NO: 20215 - RNA, 21 nt, synthetic construct
  source 1..21: mol_type = other RNA
cacttgatttcatggtctgac

SEQ ID NO: 20216 - RNA, 21 nt, synthetic construct
  source 1..21: mol_type = other RNA
cacttggaataccctctactt

SEQ ID NO: 20217 - RNA, 21 nt, synthetic construct
  source 1..21: mol_type = other RNA
cacttggtgtctccatttact

SEQ ID NO: 20218 - RNA, 21 nt, synthetic construct
  source 1..21: mol_type = other RNA
cactttagtctggccaaagaa

SEQ ID NO: 20219 - RNA, 21 nt, synthetic construct
  source 1..21: mol_type = other RNA
cacttttaagggaagtgaaaa

SEQ ID NO: 20220 - RNA, 21 nt, synthetic construct
  source 1..21: mol_type = other RNA
cacttttcccctcctgctcat

SEQ ID NO: 20221 - RNA, 21 nt, synthetic construct
  source 1..21: mol_type = other RNA
cagaaaacaaaacatggaaaa

SEQ ID NO: 20222 - RNA, 21 nt, synthetic construct
  source 1..21: mol_type = other RNA
cagaaaacaacacagctggag

SEQ ID NO: 20223 - RNA, 21 nt, synthetic construct
  source 1..21: mol_type = other RNA
cagaaaaccacatctcacata

SEQ ID NO: 20224 - RNA, 21 nt, synthetic construct
  source 1..21: mol_type = other RNA
cagaaaagacaccaaccaaaa

SEQ ID NO: 20225 - RNA, 21 nt, synthetic construct
  source 1..21: mol_type = other RNA
cagaaaaggaatccttagtga

SEQ ID NO: 20226 - RNA, 21 nt, synthetic construct
  source 1..21: mol_type = other RNA
cagaaaataacatccagggaa

SEQ ID NO: 20227 - RNA, 21 nt, synthetic construct
  source 1..21: mol_type = other RNA
cagaaaccagaacaactacaa

SEQ ID NO: 20228 - RNA, 21 nt, synthetic construct
  source 1..21: mol_type = other RNA
cagaaactgtagcaccattag

SEQ ID NO: 20229 - RNA, 21 nt, synthetic construct
  source 1..21: mol_type = other RNA
cagaaagcatcggagaagggc

SEQ ID NO: 20230 - RNA, 21 nt, synthetic construct
  source 1..21: mol_type = other RNA
cagaaatgtactgagacacat

SEQ ID NO: 20231 - RNA, 21 nt, synthetic construct
  source 1..21: mol_type = other RNA
cagaacaactacaacaacaaa

SEQ ID NO: 20232 - RNA, 21 nt, synthetic construct
  source 1..21: mol_type = other RNA
cagaacacaatggaacagtca

SEQ ID NO: 20233 - RNA, 21 nt, synthetic construct
  source 1..21: mol_type = other RNA
cagaacacctcaagcataacc

SEQ ID NO: 20234 - RNA, 21 nt, synthetic construct
  source 1..21: mol_type = other RNA
cagaacctctggctacaaagc

SEQ ID NO: 20235 - RNA, 21 nt, synthetic construct
  source 1..21: mol_type = other RNA
cagaactcacagattctttct

SEQ ID NO: 20236 - RNA, 21 nt, synthetic construct
  source 1..21: mol_type = other RNA
cagaacttgatagccacaccc

SEQ ID NO: 20237 - RNA, 21 nt, synthetic construct
  source 1..21: mol_type = other RNA
cagaagcaagaacagcagcaa

SEQ ID NO: 20238 - RNA, 21 nt, synthetic construct
  source 1..21: mol_type = other RNA
cagaagcaagtaaaagttgaa

SEQ ID NO: 20239 - RNA, 21 nt, synthetic construct
  source 1..21: mol_type = other RNA
cagaagcagctgttcttttgg

SEQ ID NO: 20240 - RNA, 21 nt, synthetic construct
  source 1..21: mol_type = other RNA
cagaaggaaaaagcactctga

SEQ ID NO: 20241 - RNA, 21 nt, synthetic construct
  source 1..21: mol_type = other RNA
cagaaggacactcaaaagcat

SEQ ID NO: 20242 - RNA, 21 nt, synthetic construct
  source 1..21: mol_type = other RNA
cagaagtaaatggagacacca

SEQ ID NO: 20243 - RNA, 21 nt, synthetic construct
  source 1..21: mol_type = other RNA
cagaagtcacaacaagcttca

SEQ ID NO: 20244 - RNA, 21 nt, synthetic construct
  source 1..21: mol_type = other RNA
cagaataattgtgtgaacagg

SEQ ID NO: 20245 - RNA, 21 nt, synthetic construct
  source 1..21: mol_type = other RNA
cagaatagtcgtgtgagtcct

SEQ ID NO: 20246 - RNA, 21 nt, synthetic construct
  source 1..21: mol_type = other RNA
cagaatctcttgctctttgtt

SEQ ID NO: 20247 - RNA, 21 nt, synthetic construct
  source 1..21: mol_type = other RNA
cagaatctgaagctctggatt

SEQ ID NO: 20248 - RNA, 21 nt, synthetic construct
  source 1..21: mol_type = other RNA
cagaatggaagcccactgcct

SEQ ID NO: 20249 - RNA, 21 nt, synthetic construct
  source 1..21: mol_type = other RNA
cagaattcttcaccagacgct

SEQ ID NO: 20250 - RNA, 21 nt, synthetic construct
  source 1..21: mol_type = other RNA
cagacagaacctctggctaca

SEQ ID NO: 20251 - RNA, 21 nt, synthetic construct
  source 1..21: mol_type = other RNA
cagacatatcttggtttctat

SEQ ID NO: 20252 - RNA, 21 nt, synthetic construct
  source 1..21: mol_type = other RNA
cagaccatgaaatcaagtgca

SEQ ID NO: 20253 - RNA, 21 nt, synthetic construct
  source 1..21: mol_type = other RNA
cagaccatttaccaaaagctc

SEQ ID NO: 20254 - RNA, 21 nt, synthetic construct
  source 1..21: mol_type = other RNA
cagacccctccccagaaggac

SEQ ID NO: 20255 - RNA, 21 nt, synthetic construct
  source 1..21: mol_type = other RNA
cagacctctaactctgagctg

SEQ ID NO: 20256 - RNA, 21 nt, synthetic construct
  source 1..21: mol_type = other RNA
cagacgctagctttgtggttc

SEQ ID NO: 20257 - RNA, 21 nt, synthetic construct
  source 1..21: mol_type = other RNA
cagactaaagtggaagaatgt

SEQ ID NO: 20258 - RNA, 21 nt, synthetic construct
  source 1..21: mol_type = other RNA
cagactaagtccattcctgat

SEQ ID NO: 20259 - RNA, 21 nt, synthetic construct
  source 1..21: mol_type = other RNA
cagactacacatcctgaactt

SEQ ID NO: 20260 - RNA, 21 nt, synthetic construct
  source 1..21: mol_type = other RNA
cagactgcagggacaatgact

SEQ ID NO: 20261 - RNA, 21 nt, synthetic construct
  source 1..21: mol_type = other RNA
cagacttttcctcacccccaa

SEQ ID NO: 20262 - RNA, 21 nt, synthetic construct
  source 1..21: mol_type = other RNA
cagagaataaagaacagacta

SEQ ID NO: 20263 - RNA, 21 nt, synthetic construct
  source 1..21: mol_type = other RNA
cagagactgagccattttcaa

SEQ ID NO: 20264 - RNA, 21 nt, synthetic construct
  source 1..21: mol_type = other RNA
cagagagagaaggttcactaa

SEQ ID NO: 20265 - RNA, 21 nt, synthetic construct
  source 1..21: mol_type = other RNA
cagagctgccaccaggagctt

SEQ ID NO: 20266 - RNA, 21 nt, synthetic construct
  source 1..21: mol_type = other RNA
cagagcttcagattctgaatg

SEQ ID NO: 20267 - RNA, 21 nt, synthetic construct
  source 1..21: mol_type = other RNA
cagaggttctgtctggcaaat

SEQ ID NO: 20268 - RNA, 21 nt, synthetic construct
  source 1..21: mol_type = other RNA
cagagtcctaatccatctaca

SEQ ID NO: 20269 - RNA, 21 nt, synthetic construct
  source 1..21: mol_type = other RNA
cagagtgctttttccttctga

SEQ ID NO: 20270 - RNA, 21 nt, synthetic construct
  source 1..21: mol_type = other RNA
cagagttagaggtctgtgcgg

SEQ ID NO: 20271 - RNA, 21 nt, synthetic construct
  source 1..21: mol_type = other RNA
cagagttcacatctccctcaa

SEQ ID NO: 20272 - RNA, 21 nt, synthetic construct
  source 1..21: mol_type = other RNA
cagatagtgctgtgttggggg

SEQ ID NO: 20273 - RNA, 21 nt, synthetic construct
  source 1..21: mol_type = other RNA
cagatcaagaaattgaaacaa

SEQ ID NO: 20274 - RNA, 21 nt, synthetic construct
  source 1..21: mol_type = other RNA
cagatcaattccgcacagacc

SEQ ID NO: 20275 - RNA, 21 nt, synthetic construct
  source 1..21: mol_type = other RNA
cagatgcacaggccaattaag

SEQ ID NO: 20276 - RNA, 21 nt, synthetic construct
  source 1..21: mol_type = other RNA
cagatgctgctccatggtctc

SEQ ID NO: 20277 - RNA, 21 nt, synthetic construct
  source 1..21: mol_type = other RNA
cagatgtgtaggtaagtgcca

SEQ ID NO: 20278 - RNA, 21 nt, synthetic construct
  source 1..21: mol_type = other RNA
cagattcccaaactgaaaaac

SEQ ID NO: 20279 - RNA, 21 nt, synthetic construct
  source 1..21: mol_type = other RNA
cagattctgaatgagcaggag

SEQ ID NO: 20280 - RNA, 21 nt, synthetic construct
  source 1..21: mol_type = other RNA
cagattctttcttatcactca

SEQ ID NO: 20281 - RNA, 21 nt, synthetic construct
  source 1..21: mol_type = other RNA
cagattgtgtttccattgcgg

SEQ ID NO: 20282 - RNA, 21 nt, synthetic construct
  source 1..21: mol_type = other RNA
cagcaaaagagcatcattgag

SEQ ID NO: 20283 - RNA, 21 nt, synthetic construct
  source 1..21: mol_type = other RNA
cagcaaacaacttcttcagaa

SEQ ID NO: 20284 - RNA, 21 nt, synthetic construct
  source 1..21: mol_type = other RNA
cagcaaacacagcaaccccaa

SEQ ID NO: 20285 - RNA, 21 nt, synthetic construct
  source 1..21: mol_type = other RNA
cagcaaagagaaggatcattc

SEQ ID NO: 20286 - RNA, 21 nt, synthetic construct
  source 1..21: mol_type = other RNA
cagcaaaggtacttgatacat

SEQ ID NO: 20287 - RNA, 21 nt, synthetic construct
  source 1..21: mol_type = other RNA
cagcaacagcagcaaaaatta

SEQ ID NO: 20288 - RNA, 21 nt, synthetic construct
  source 1..21: mol_type = other RNA
cagcaaccccaaactgagtct

SEQ ID NO: 20289 - RNA, 21 nt, synthetic construct
  source 1..21: mol_type = other RNA
cagcaatttgcaagctcctgg

SEQ ID NO: 20290 - RNA, 21 nt, synthetic construct
  source 1..21: mol_type = other RNA
cagcacaaacacaaccatccc

SEQ ID NO: 20291 - RNA, 21 nt, synthetic construct
  source 1..21: mol_type = other RNA
cagcaccaccagaaaacaaaa

SEQ ID NO: 20292 - RNA, 21 nt, synthetic construct
  source 1..21: mol_type = other RNA
cagcactatctgaaaccagga

SEQ ID NO: 20293 - RNA, 21 nt, synthetic construct
  source 1..21: mol_type = other RNA
cagcacttgaatcaacaggct

SEQ ID NO: 20294 - RNA, 21 nt, synthetic construct
  source 1..21: mol_type = other RNA
cagcagcaaaaattacaaata

SEQ ID NO: 20295 - RNA, 21 nt, synthetic construct
  source 1..21: mol_type = other RNA
cagcagcaaacacagcaaccc

SEQ ID NO: 20296 - RNA, 21 nt, synthetic construct
  source 1..21: mol_type = other RNA
cagcagcaatttgcaagctcc

SEQ ID NO: 20297 - RNA, 21 nt, synthetic construct
  source 1..21: mol_type = other RNA
cagcagtggtttgtctagtca

SEQ ID NO: 20298 - RNA, 21 nt, synthetic construct
  source 1..21: mol_type = other RNA
cagcagttgatgagaaacaaa

SEQ ID NO: 20299 - RNA, 21 nt, synthetic construct
  source 1..21: mol_type = other RNA
cagcatcacaggcctcactca

SEQ ID NO: 20300 - RNA, 21 nt, synthetic construct
  source 1..21: mol_type = other RNA
cagcatcatcagcatcacagg

SEQ ID NO: 20301 - RNA, 21 nt, synthetic construct
  source 1..21: mol_type = other RNA
cagcatctgaagcagtttcac

SEQ ID NO: 20302 - RNA, 21 nt, synthetic construct
  source 1..21: mol_type = other RNA
cagcatgcttttgagtgtcct

SEQ ID NO: 20303 - RNA, 21 nt, synthetic construct
  source 1..21: mol_type = other RNA
cagcccttctccgatgctttc

SEQ ID NO: 20304 - RNA, 21 nt, synthetic construct
  source 1..21: mol_type = other RNA
cagccttgtggatggccccga

SEQ ID NO: 20305 - RNA, 21 nt, synthetic construct
  source 1..21: mol_type = other RNA
cagctagtttactggcattat

SEQ ID NO: 20306 - RNA, 21 nt, synthetic construct
  source 1..21: mol_type = other RNA
cagctcagagttagaggtctg

SEQ ID NO: 20307 - RNA, 21 nt, synthetic construct
  source 1..21: mol_type = other RNA
cagctctgaacggtatttaaa

SEQ ID NO: 20308 - RNA, 21 nt, synthetic construct
  source 1..21: mol_type = other RNA
cagctgcagtggtgagtgagg

SEQ ID NO: 20309 - RNA, 21 nt, synthetic construct
  source 1..21: mol_type = other RNA
cagctgcttctgttctcaata

SEQ ID NO: 20310 - RNA, 21 nt, synthetic construct
  source 1..21: mol_type = other RNA
cagctggagcacaagtcacaa

SEQ ID NO: 20311 - RNA, 21 nt, synthetic construct
  source 1..21: mol_type = other RNA
cagctggctttggaggcagct

SEQ ID NO: 20312 - RNA, 21 nt, synthetic construct
  source 1..21: mol_type = other RNA
cagctgtgttgttttctgggt

SEQ ID NO: 20313 - RNA, 21 nt, synthetic construct
  source 1..21: mol_type = other RNA
cagctgttcttttggttggtg

SEQ ID NO: 20314 - RNA, 21 nt, synthetic construct
  source 1..21: mol_type = other RNA
cagcttccttcagaaggaaaa

SEQ ID NO: 20315 - RNA, 21 nt, synthetic construct
  source 1..21: mol_type = other RNA
cagcttgcaggtggattctct

SEQ ID NO: 20316 - RNA, 21 nt, synthetic construct
  source 1..21: mol_type = other RNA
cagcttgttgaccagacatat

SEQ ID NO: 20317 - RNA, 21 nt, synthetic construct
  source 1..21: mol_type = other RNA
cagctttagagcagcaaacaa

SEQ ID NO: 20318 - RNA, 21 nt, synthetic construct
  source 1..21: mol_type = other RNA
caggaaaaacatttgcatggt

SEQ ID NO: 20319 - RNA, 21 nt, synthetic construct
  source 1..21: mol_type = other RNA
caggaaacaagacccaaaact

SEQ ID NO: 20320 - RNA, 21 nt, synthetic construct
  source 1..21: mol_type = other RNA
caggaatgacatacagactgc

SEQ ID NO: 20321 - RNA, 21 nt, synthetic construct
  source 1..21: mol_type = other RNA
caggaatggacttagtctgtt

SEQ ID NO: 20322 - RNA, 21 nt, synthetic construct
  source 1..21: mol_type = other RNA
caggacaactcattagtagcc

SEQ ID NO: 20323 - RNA, 21 nt, synthetic construct
  source 1..21: mol_type = other RNA
caggacaactgccagcagttg

SEQ ID NO: 20324 - RNA, 21 nt, synthetic construct
  source 1..21: mol_type = other RNA
caggactcacacgactattct

SEQ ID NO: 20325 - RNA, 21 nt, synthetic construct
  source 1..21: mol_type = other RNA
caggagatgggcatatctcaa

SEQ ID NO: 20326 - RNA, 21 nt, synthetic construct
  source 1..21: mol_type = other RNA
caggagcagaagtcacaacaa

SEQ ID NO: 20327 - RNA, 21 nt, synthetic construct
  source 1..21: mol_type = other RNA
caggagcttgcaaattgctgc

SEQ ID NO: 20328 - RNA, 21 nt, synthetic construct
  source 1..21: mol_type = other RNA
caggaggggaaaagtgctaat

SEQ ID NO: 20329 - RNA, 21 nt, synthetic construct
  source 1..21: mol_type = other RNA
caggagttcaccatgtgtgtg

SEQ ID NO: 20330 - RNA, 21 nt, synthetic construct
  source 1..21: mol_type = other RNA
caggatagaaccaaccatgtt

SEQ ID NO: 20331 - RNA, 21 nt, synthetic construct
  source 1..21: mol_type = other RNA
caggatggattgaattgaagg

SEQ ID NO: 20332 - RNA, 21 nt, synthetic construct
  source 1..21: mol_type = other RNA
caggatgtgtagtctgttctt

SEQ ID NO: 20333 - RNA, 21 nt, synthetic construct
  source 1..21: mol_type = other RNA
caggcacaggaaaaacatttg

SEQ ID NO: 20334 - RNA, 21 nt, synthetic construct
  source 1..21: mol_type = other RNA
caggcagcacaaacacaacca

SEQ ID NO: 20335 - RNA, 21 nt, synthetic construct
  source 1..21: mol_type = other RNA
caggcagtgggcttccattct

SEQ ID NO: 20336 - RNA, 21 nt, synthetic construct
  source 1..21: mol_type = other RNA
caggcatgtggcttgcatcca

SEQ ID NO: 20337 - RNA, 21 nt, synthetic construct
  source 1..21: mol_type = other RNA
caggcatgttggaatttccag

SEQ ID NO: 20338 - RNA, 21 nt, synthetic construct
  source 1..21: mol_type = other RNA
caggccaattaaggtggaacc

SEQ ID NO: 20339 - RNA, 21 nt, synthetic construct
  source 1..21: mol_type = other RNA
caggcccactgcagttatgtg

SEQ ID NO: 20340 - RNA, 21 nt, synthetic construct
  source 1..21: mol_type = other RNA
caggcctcactcaccactgca

SEQ ID NO: 20341 - RNA, 21 nt, synthetic construct
  source 1..21: mol_type = other RNA
caggctactaatgagttgtcc

SEQ ID NO: 20342 - RNA, 21 nt, synthetic construct
  source 1..21: mol_type = other RNA
caggcttcagagactgagcca

SEQ ID NO: 20343 - RNA, 21 nt, synthetic construct
  source 1..21: mol_type = other RNA
caggcttgcttcggggccatc

SEQ ID NO: 20344 - RNA, 21 nt, synthetic construct
  source 1..21: mol_type = other RNA
cagggaaccacaaagctagcg

SEQ ID NO: 20345 - RNA, 21 nt, synthetic construct
  source 1..21: mol_type = other RNA
cagggacaatgactgttccat

SEQ ID NO: 20346 - RNA, 21 nt, synthetic construct
  source 1..21: mol_type = other RNA
cagggaggaagtcacactcag

SEQ ID NO: 20347 - RNA, 21 nt, synthetic construct
  source 1..21: mol_type = other RNA
cagggatataaaaatagaaac

SEQ ID NO: 20348 - RNA, 21 nt, synthetic construct
  source 1..21: mol_type = other RNA
cagggcagatcaattccgcac

SEQ ID NO: 20349 - RNA, 21 nt, synthetic construct
  source 1..21: mol_type = other RNA
cagggccagtcacagttttga

SEQ ID NO: 20350 - RNA, 21 nt, synthetic construct
  source 1..21: mol_type = other RNA
cagggtattccataataactt

SEQ ID NO: 20351 - RNA, 21 nt, synthetic construct
  source 1..21: mol_type = other RNA
caggtatttagcattgcagct

SEQ ID NO: 20352 - RNA, 21 nt, synthetic construct
  source 1..21: mol_type = other RNA
caggtgaaagcagtcaaccaa

SEQ ID NO: 20353 - RNA, 21 nt, synthetic construct
  source 1..21: mol_type = other RNA
caggtgcacttctccaaaaca

SEQ ID NO: 20354 - RNA, 21 nt, synthetic construct
  source 1..21: mol_type = other RNA
caggtgctttcaagaacagga

SEQ ID NO: 20355 - RNA, 21 nt, synthetic construct
  source 1..21: mol_type = other RNA
caggtggattctcttgcttag

SEQ ID NO: 20356 - RNA, 21 nt, synthetic construct
  source 1..21: mol_type = other RNA
caggtgtatccaataaatttt

SEQ ID NO: 20357 - RNA, 21 nt, synthetic construct
  source 1..21: mol_type = other RNA
caggttccaccttaattggcc

SEQ ID NO: 20358 - RNA, 21 nt, synthetic construct
  source 1..21: mol_type = other RNA
caggttccagcagcaatttgc

SEQ ID NO: 20359 - RNA, 21 nt, synthetic construct
  source 1..21: mol_type = other RNA
caggttcctcagcttccttca

SEQ ID NO: 20360 - RNA, 21 nt, synthetic construct
  source 1..21: mol_type = other RNA
caggtttaccctctattttca

SEQ ID NO: 20361 - RNA, 21 nt, synthetic construct
  source 1..21: mol_type = other RNA
caggtttcttgttcaaacaat

SEQ ID NO: 20362 - RNA, 21 nt, synthetic construct
  source 1..21: mol_type = other RNA
cagtaaactagctgcaatgct

SEQ ID NO: 20363 - RNA, 21 nt, synthetic construct
  source 1..21: mol_type = other RNA
cagtacatttctggcacttac

SEQ ID NO: 20364 - RNA, 21 nt, synthetic construct
  source 1..21: mol_type = other RNA
cagtatcaacccaatctctcc

SEQ ID NO: 20365 - RNA, 21 nt, synthetic construct
  source 1..21: mol_type = other RNA
cagtattcaaaatcaagcgag

SEQ ID NO: 20366 - RNA, 21 nt, synthetic construct
  source 1..21: mol_type = other RNA
cagtcaaccaaatgtctccga

SEQ ID NO: 20367 - RNA, 21 nt, synthetic construct
  source 1..21: mol_type = other RNA
cagtcacagttttgactagac

SEQ ID NO: 20368 - RNA, 21 nt, synthetic construct
  source 1..21: mol_type = other RNA
cagtcactgtgtggcactaga

SEQ ID NO: 20369 - RNA, 21 nt, synthetic construct
  source 1..21: mol_type = other RNA
cagtcaggctactaatgagtt

SEQ ID NO: 20370 - RNA, 21 nt, synthetic construct
  source 1..21: mol_type = other RNA
cagtcattgtccctgcagtct

SEQ ID NO: 20371 - RNA, 21 nt, synthetic construct
  source 1..21: mol_type = other RNA
cagtcccaaggtacagtggac

SEQ ID NO: 20372 - RNA, 21 nt, synthetic construct
  source 1..21: mol_type = other RNA
cagtcccatttggacattatg

SEQ ID NO: 20373 - RNA, 21 nt, synthetic construct
  source 1..21: mol_type = other RNA
cagtctctgaagcctgttgat

SEQ ID NO: 20374 - RNA, 21 nt, synthetic construct
  source 1..21: mol_type = other RNA
cagtctgtatgtcattcctgt

SEQ ID NO: 20375 - RNA, 21 nt, synthetic construct
  source 1..21: mol_type = other RNA
cagtgactgcacatgagcttt

SEQ ID NO: 20376 - RNA, 21 nt, synthetic construct
  source 1..21: mol_type = other RNA
cagtgatgcctcattacgttt

SEQ ID NO: 20377 - RNA, 21 nt, synthetic construct
  source 1..21: mol_type = other RNA
cagtgctaatgcctaatggtg

SEQ ID NO: 20378 - RNA, 21 nt, synthetic construct
  source 1..21: mol_type = other RNA
cagtggaccaacatctccagt

SEQ ID NO: 20379 - RNA, 21 nt, synthetic construct
  source 1..21: mol_type = other RNA
cagtggagagctacaggacaa

SEQ ID NO: 20380 - RNA, 21 nt, synthetic construct
  source 1..21: mol_type = other RNA
cagtgggcctgaaaatccaga

SEQ ID NO: 20381 - RNA, 21 nt, synthetic construct
  source 1..21: mol_type = other RNA
cagtgggcttccattctggag

SEQ ID NO: 20382 - RNA, 21 nt, synthetic construct
  source 1..21: mol_type = other RNA
cagtggtgagtgaggcctgtg

SEQ ID NO: 20383 - RNA, 21 nt, synthetic construct
  source 1..21: mol_type = other RNA
cagtggtttgtctagtcaaaa

SEQ ID NO: 20384 - RNA, 21 nt, synthetic construct
  source 1..21: mol_type = other RNA
cagtgtattgtttggaggtca

SEQ ID NO: 20385 - RNA, 21 nt, synthetic construct
  source 1..21: mol_type = other RNA
cagtgttcactaaggattcct

SEQ ID NO: 20386 - RNA, 21 nt, synthetic construct
  source 1..21: mol_type = other RNA
cagtgttgaaacagcacttga

SEQ ID NO: 20387 - RNA, 21 nt, synthetic construct
  source 1..21: mol_type = other RNA
cagtgttttttccaggagttc

SEQ ID NO: 20388 - RNA, 21 nt, synthetic construct
  source 1..21: mol_type = other RNA
cagttaaagatttcaccagtt

SEQ ID NO: 20389 - RNA, 21 nt, synthetic construct
  source 1..21: mol_type = other RNA
cagttagtgaaccttctctct

SEQ ID NO: 20390 - RNA, 21 nt, synthetic construct
  source 1..21: mol_type = other RNA
cagttatgtgttgaaaaactg

SEQ ID NO: 20391 - RNA, 21 nt, synthetic construct
  source 1..21: mol_type = other RNA
cagttccaaaaaccctcacac

SEQ ID NO: 20392 - RNA, 21 nt, synthetic construct
  source 1..21: mol_type = other RNA
cagttctacagggatataaaa

SEQ ID NO: 20393 - RNA, 21 nt, synthetic construct
  source 1..21: mol_type = other RNA
cagttgatgagaaacaaagag

SEQ ID NO: 20394 - RNA, 21 nt, synthetic construct
  source 1..21: mol_type = other RNA
cagttgtcctgtagctctcca

SEQ ID NO: 20395 - RNA, 21 nt, synthetic construct
  source 1..21: mol_type = other RNA
cagtttcacgccaagtcgtta

SEQ ID NO: 20396 - RNA, 21 nt, synthetic construct
  source 1..21: mol_type = other RNA
cagtttctgcctcttccgtgg

SEQ ID NO: 20397 - RNA, 21 nt, synthetic construct
  source 1..21: mol_type = other RNA
cagtttgggaatctgctcttt

SEQ ID NO: 20398 - RNA, 21 nt, synthetic construct
  source 1..21: mol_type = other RNA
cagtttggggttgctgtgttt

SEQ ID NO: 20399 - RNA, 21 nt, synthetic construct
  source 1..21: mol_type = other RNA
cagttttgactagacaaacca

SEQ ID NO: 20400 - RNA, 21 nt, synthetic construct
  source 1..21: mol_type = other RNA
cagtttttcaacacataactg

SEQ ID NO: 20401 - RNA, 21 nt, synthetic construct
  source 1..21: mol_type = other RNA
cagtttttgagatatgcccat

SEQ ID NO: 20402 - RNA, 21 nt, synthetic construct
  source 1..21: mol_type = other RNA
cataaacaggcagcacaaaca

SEQ ID NO: 20403 - RNA, 21 nt, synthetic construct
  source 1..21: mol_type = other RNA
cataaatgccattaacagtca

SEQ ID NO: 20404 - RNA, 21 nt, synthetic construct
  source 1..21: mol_type = other RNA
cataaccatgcaaatgttttt

SEQ ID NO: 20405 - RNA, 21 nt, synthetic construct
  source 1..21: mol_type = other RNA
cataacccaccaatttttggt

SEQ ID NO: 20406 - RNA, 21 nt, synthetic construct
  source 1..21: mol_type = other RNA
cataactgcagtgggcctgaa

SEQ ID NO: 20407 - RNA, 21 nt, synthetic construct
  source 1..21: mol_type = other RNA
cataagcctcataaacaggca

SEQ ID NO: 20408 - RNA, 21 nt, synthetic construct
  source 1..21: mol_type = other RNA
cataaggctcttactctcaaa

SEQ ID NO: 20409 - RNA, 21 nt, synthetic construct
  source 1..21: mol_type = other RNA
cataagtttttcagtttggga

SEQ ID NO: 20410 - RNA, 21 nt, synthetic construct
  source 1..21: mol_type = other RNA
cataatgtccaaatgggactg

SEQ ID NO: 20411 - RNA, 21 nt, synthetic construct
  source 1..21: mol_type = other RNA
catacagactgcagggacaat

SEQ ID NO: 20412 - RNA, 21 nt, synthetic construct
  source 1..21: mol_type = other RNA
catacaggcatgtggcttgca

SEQ ID NO: 20413 - RNA, 21 nt, synthetic construct
  source 1..21: mol_type = other RNA
catacagggtattccataata

SEQ ID NO: 20414 - RNA, 21 nt, synthetic construct
  source 1..21: mol_type = other RNA
catacatgtgtagatggatta

SEQ ID NO: 20415 - RNA, 21 nt, synthetic construct
  source 1..21: mol_type = other RNA
catacctcagggcagatcaat

SEQ ID NO: 20416 - RNA, 21 nt, synthetic construct
  source 1..21: mol_type = other RNA
catagtcagatgcacaggcca

SEQ ID NO: 20417 - RNA, 21 nt, synthetic construct
  source 1..21: mol_type = other RNA
catattgagtcttgacaggtg

SEQ ID NO: 20418 - RNA, 21 nt, synthetic construct
  source 1..21: mol_type = other RNA
catcaactgctggcagttgtc

SEQ ID NO: 20419 - RNA, 21 nt, synthetic construct
  source 1..21: mol_type = other RNA
catcaattcttcagtatcaac

SEQ ID NO: 20420 - RNA, 21 nt, synthetic construct
  source 1..21: mol_type = other RNA
catcacaattgcttctttctc

SEQ ID NO: 20421 - RNA, 21 nt, synthetic construct
  source 1..21: mol_type = other RNA
catcacaggcctcactcacca

SEQ ID NO: 20422 - RNA, 21 nt, synthetic construct
  source 1..21: mol_type = other RNA
catcacatgcaatattttcca

SEQ ID NO: 20423 - RNA, 21 nt, synthetic construct
  source 1..21: mol_type = other RNA
catcacctcccatttgccaga

SEQ ID NO: 20424 - RNA, 21 nt, synthetic construct
  source 1..21: mol_type = other RNA
catcactgccatcaattcttc

SEQ ID NO: 20425 - RNA, 21 nt, synthetic construct
  source 1..21: mol_type = other RNA
catcagcatcacaggcctcac

SEQ ID NO: 20426 - RNA, 21 nt, synthetic construct
  source 1..21: mol_type = other RNA
catcaggcttgcttcggggcc

SEQ ID NO: 20427 - RNA, 21 nt, synthetic construct
  source 1..21: mol_type = other RNA
catcatcagcatcacaggcct

SEQ ID NO: 20428 - RNA, 21 nt, synthetic construct
  source 1..21: mol_type = other RNA
catcattgagaccatggagca

SEQ ID NO: 20429 - RNA, 21 nt, synthetic construct
  source 1..21: mol_type = other RNA
catccagaagtaaatggagac

SEQ ID NO: 20430 - RNA, 21 nt, synthetic construct
  source 1..21: mol_type = other RNA
catccagggaaccacaaagct

SEQ ID NO: 20431 - RNA, 21 nt, synthetic construct
  source 1..21: mol_type = other RNA
catccaggttccaccttaatt

SEQ ID NO: 20432 - RNA, 21 nt, synthetic construct
  source 1..21: mol_type = other RNA
catcccagagttcacatctcc

SEQ ID NO: 20433 - RNA, 21 nt, synthetic construct
  source 1..21: mol_type = other RNA
catcctgaactttttgcagga

SEQ ID NO: 20434 - RNA, 21 nt, synthetic construct
  source 1..21: mol_type = other RNA
catcctggtttcagatagtgc

SEQ ID NO: 20435 - RNA, 21 nt, synthetic construct
  source 1..21: mol_type = other RNA
catcgcatacctcagggcaga

SEQ ID NO: 20436 - RNA, 21 nt, synthetic construct
  source 1..21: mol_type = other RNA
catcggagaagggctgcatac

SEQ ID NO: 20437 - RNA, 21 nt, synthetic construct
  source 1..21: mol_type = other RNA
catctaaaacgtaatgaggca

SEQ ID NO: 20438 - RNA, 21 nt, synthetic construct
  source 1..21: mol_type = other RNA
catctacacatgtatgcagcc

SEQ ID NO: 20439 - RNA, 21 nt, synthetic construct
  source 1..21: mol_type = other RNA
catctcacataaatgccatta

SEQ ID NO: 20440 - RNA, 21 nt, synthetic construct
  source 1..21: mol_type = other RNA
catctccagttccaaaaaccc

SEQ ID NO: 20441 - RNA, 21 nt, synthetic construct
  source 1..21: mol_type = other RNA
catctccctcaaaaccagcaa

SEQ ID NO: 20442 - RNA, 21 nt, synthetic construct
  source 1..21: mol_type = other RNA
catctcctgcagaaaataaca

SEQ ID NO: 20443 - RNA, 21 nt, synthetic construct
  source 1..21: mol_type = other RNA
catctcttacagaagcaagaa

SEQ ID NO: 20444 - RNA, 21 nt, synthetic construct
  source 1..21: mol_type = other RNA
catctgaagcagtttcacgcc

SEQ ID NO: 20445 - RNA, 21 nt, synthetic construct
  source 1..21: mol_type = other RNA
catctgactatggcaagactc

SEQ ID NO: 20446 - RNA, 21 nt, synthetic construct
  source 1..21: mol_type = other RNA
catctgcaagatgggaaatca

SEQ ID NO: 20447 - RNA, 21 nt, synthetic construct
  source 1..21: mol_type = other RNA
catcttgcagatgtgtaggta

SEQ ID NO: 20448 - RNA, 21 nt, synthetic construct
  source 1..21: mol_type = other RNA
catgaaaacattcttccactt

SEQ ID NO: 20449 - RNA, 21 nt, synthetic construct
  source 1..21: mol_type = other RNA
catgaaatcaagtgcatgcaa

SEQ ID NO: 20450 - RNA, 21 nt, synthetic construct
  source 1..21: mol_type = other RNA
catgacaagaacattgtatta

SEQ ID NO: 20451 - RNA, 21 nt, synthetic construct
  source 1..21: mol_type = other RNA
catgagcttttggtaaatggt

SEQ ID NO: 20452 - RNA, 21 nt, synthetic construct
  source 1..21: mol_type = other RNA
catgcaaaatacaggtttctt

SEQ ID NO: 20453 - RNA, 21 nt, synthetic construct
  source 1..21: mol_type = other RNA
catgcaaatgtttttcctgtg

SEQ ID NO: 20454 - RNA, 21 nt, synthetic construct
  source 1..21: mol_type = other RNA
catgcacttgatttcatggtc

SEQ ID NO: 20455 - RNA, 21 nt, synthetic construct
  source 1..21: mol_type = other RNA
catgcctggggggctcccaag

SEQ ID NO: 20456 - RNA, 21 nt, synthetic construct
  source 1..21: mol_type = other RNA
catgcctgtatgcacacagca

SEQ ID NO: 20457 - RNA, 21 nt, synthetic construct
  source 1..21: mol_type = other RNA
catgctgctctaaggtggcat

SEQ ID NO: 20458 - RNA, 21 nt, synthetic construct
  source 1..21: mol_type = other RNA
catgcttttgagtgtccttct

SEQ ID NO: 20459 - RNA, 21 nt, synthetic construct
  source 1..21: mol_type = other RNA
catggaaaaaggtaactaagc

SEQ ID NO: 20460 - RNA, 21 nt, synthetic construct
  source 1..21: mol_type = other RNA
catggagcagcatctgaagca

SEQ ID NO: 20461 - RNA, 21 nt, synthetic construct
  source 1..21: mol_type = other RNA
catggtaattagcacttttcc

SEQ ID NO: 20462 - RNA, 21 nt, synthetic construct
  source 1..21: mol_type = other RNA
catggtctcaatgatgctctt

SEQ ID NO: 20463 - RNA, 21 nt, synthetic construct
  source 1..21: mol_type = other RNA
catggtctgactataagggga

SEQ ID NO: 20464 - RNA, 21 nt, synthetic construct
  source 1..21: mol_type = other RNA
catggtgaaaatcagtattca

SEQ ID NO: 20465 - RNA, 21 nt, synthetic construct
  source 1..21: mol_type = other RNA
catggtgaactcctggaaaaa

SEQ ID NO: 20466 - RNA, 21 nt, synthetic construct
  source 1..21: mol_type = other RNA
catggttatgtatcaagtacc

SEQ ID NO: 20467 - RNA, 21 nt, synthetic construct
  source 1..21: mol_type = other RNA
catggttggttctatcctgtt

SEQ ID NO: 20468 - RNA, 21 nt, synthetic construct
  source 1..21: mol_type = other RNA
catgtatgcagcccttctccg

SEQ ID NO: 20469 - RNA, 21 nt, synthetic construct
  source 1..21: mol_type = other RNA
catgtgatgcaagttttgggt

SEQ ID NO: 20470 - RNA, 21 nt, synthetic construct
  source 1..21: mol_type = other RNA
catgtgcagtcactgtgtggc

SEQ ID NO: 20471 - RNA, 21 nt, synthetic construct
  source 1..21: mol_type = other RNA
catgtggcttgcatccaggtt

SEQ ID NO: 20472 - RNA, 21 nt, synthetic construct
  source 1..21: mol_type = other RNA
catgtgtagatggattaggac

SEQ ID NO: 20473 - RNA, 21 nt, synthetic construct
  source 1..21: mol_type = other RNA
catgtgtctcagtacatttct

SEQ ID NO: 20474 - RNA, 21 nt, synthetic construct
  source 1..21: mol_type = other RNA
catgtgtgtgttccacggaag

SEQ ID NO: 20475 - RNA, 21 nt, synthetic construct
  source 1..21: mol_type = other RNA
catgttgagggcaacagacta

SEQ ID NO: 20476 - RNA, 21 nt, synthetic construct
  source 1..21: mol_type = other RNA
catgttggaatttccagtgta

SEQ ID NO: 20477 - RNA, 21 nt, synthetic construct
  source 1..21: mol_type = other RNA
catgttttgttttctggtggt

SEQ ID NO: 20478 - RNA, 21 nt, synthetic construct
  source 1..21: mol_type = other RNA
cattaacagtcaggctactaa

SEQ ID NO: 20479 - RNA, 21 nt, synthetic construct
  source 1..21: mol_type = other RNA
cattacgttttagatgggatt

SEQ ID NO: 20480 - RNA, 21 nt, synthetic construct
  source 1..21: mol_type = other RNA
cattagcactgccttgttttt

SEQ ID NO: 20481 - RNA, 21 nt, synthetic construct
  source 1..21: mol_type = other RNA
cattagccttttggtcttgtt

SEQ ID NO: 20482 - RNA, 21 nt, synthetic construct
  source 1..21: mol_type = other RNA
cattaggcattagcactgcct

SEQ ID NO: 20483 - RNA, 21 nt, synthetic construct
  source 1..21: mol_type = other RNA
cattagtagcctgactgttaa

SEQ ID NO: 20484 - RNA, 21 nt, synthetic construct
  source 1..21: mol_type = other RNA
cattatcacagcttgcaggtg

SEQ ID NO: 20485 - RNA, 21 nt, synthetic construct
  source 1..21: mol_type = other RNA
cattatcagcatcatcagcat

SEQ ID NO: 20486 - RNA, 21 nt, synthetic construct
  source 1..21: mol_type = other RNA
cattatgagtctcgaactcgc

SEQ ID NO: 20487 - RNA, 21 nt, synthetic construct
  source 1..21: mol_type = other RNA
cattcagaatctgaagctctg

SEQ ID NO: 20488 - RNA, 21 nt, synthetic construct
  source 1..21: mol_type = other RNA
cattcagagtgctttttcctt

SEQ ID NO: 20489 - RNA, 21 nt, synthetic construct
  source 1..21: mol_type = other RNA
cattcctgataccatcacctc

SEQ ID NO: 20490 - RNA, 21 nt, synthetic construct
  source 1..21: mol_type = other RNA
cattcctgttcacacaattat

SEQ ID NO: 20491 - RNA, 21 nt, synthetic construct
  source 1..21: mol_type = other RNA
cattctggagctttgtagcca

SEQ ID NO: 20492 - RNA, 21 nt, synthetic construct
  source 1..21: mol_type = other RNA
cattcttccactttagtctgg

SEQ ID NO: 20493 - RNA, 21 nt, synthetic construct
  source 1..21: mol_type = other RNA
cattctttggccagactaaag

SEQ ID NO: 20494 - RNA, 21 nt, synthetic construct
  source 1..21: mol_type = other RNA
cattgagaccatggagcagca

SEQ ID NO: 20495 - RNA, 21 nt, synthetic construct
  source 1..21: mol_type = other RNA
cattgcagctagtttactggc

SEQ ID NO: 20496 - RNA, 21 nt, synthetic construct
  source 1..21: mol_type = other RNA
cattgcggtgcagaaaaccac

SEQ ID NO: 20497 - RNA, 21 nt, synthetic construct
  source 1..21: mol_type = other RNA
cattggtcttgttttctcaga

SEQ ID NO: 20498 - RNA, 21 nt, synthetic construct
  source 1..21: mol_type = other RNA
cattgtccctgcagtctgtat

SEQ ID NO: 20499 - RNA, 21 nt, synthetic construct
  source 1..21: mol_type = other RNA
cattgtgttctgagaaaacaa

SEQ ID NO: 20500 - RNA, 21 nt, synthetic construct
  source 1..21: mol_type = other RNA
cattgttgctttgggggtgag

SEQ ID NO: 20501 - RNA, 21 nt, synthetic construct
  source 1..21: mol_type = other RNA
catttaccaaaagctcatgtg

SEQ ID NO: 20502 - RNA, 21 nt, synthetic construct
  source 1..21: mol_type = other RNA
catttacttctggatgagctc

SEQ ID NO: 20503 - RNA, 21 nt, synthetic construct
  source 1..21: mol_type = other RNA
catttatgtgagatgtggttt

SEQ ID NO: 20504 - RNA, 21 nt, synthetic construct
  source 1..21: mol_type = other RNA
catttcaacttggtacatttg

SEQ ID NO: 20505 - RNA, 21 nt, synthetic construct
  source 1..21: mol_type = other RNA
catttcaacttttacttgctt

SEQ ID NO: 20506 - RNA, 21 nt, synthetic construct
  source 1..21: mol_type = other RNA
catttctggcacttacctaca

SEQ ID NO: 20507 - RNA, 21 nt, synthetic construct
  source 1..21: mol_type = other RNA
catttgattggagagattggg

SEQ ID NO: 20508 - RNA, 21 nt, synthetic construct
  source 1..21: mol_type = other RNA
catttgcatggttatgtatca

SEQ ID NO: 20509 - RNA, 21 nt, synthetic construct
  source 1..21: mol_type = other RNA
catttgccagacagaacctct

SEQ ID NO: 20510 - RNA, 21 nt, synthetic construct
  source 1..21: mol_type = other RNA
catttggacattatgagtctc

SEQ ID NO: 20511 - RNA, 21 nt, synthetic construct
  source 1..21: mol_type = other RNA
catttggttgactgctttcac

SEQ ID NO: 20512 - RNA, 21 nt, synthetic construct
  source 1..21: mol_type = other RNA
catttgtgacttgtgctccag

SEQ ID NO: 20513 - RNA, 21 nt, synthetic construct
  source 1..21: mol_type = other RNA
cattttcaaactcacaccttt

SEQ ID NO: 20514 - RNA, 21 nt, synthetic construct
  source 1..21: mol_type = other RNA
cattttcaacaaagagcagat

SEQ ID NO: 20515 - RNA, 21 nt, synthetic construct
  source 1..21: mol_type = other RNA
cattttcttgggctacagaac

SEQ ID NO: 20516 - RNA, 21 nt, synthetic construct
  source 1..21: mol_type = other RNA
cattttgcaaacacttggaat

SEQ ID NO: 20517 - RNA, 21 nt, synthetic construct
  source 1..21: mol_type = other RNA
ccaaaaaccctcacaccaggt

SEQ ID NO: 20518 - RNA, 21 nt, synthetic construct
  source 1..21: mol_type = other RNA
ccaaaaattggtgggttatgc

SEQ ID NO: 20519 - RNA, 21 nt, synthetic construct
  source 1..21: mol_type = other RNA
ccaaaacagaccatttaccaa

SEQ ID NO: 20520 - RNA, 21 nt, synthetic construct
  source 1..21: mol_type = other RNA
ccaaaacttgcatcacatgca

SEQ ID NO: 20521 - RNA, 21 nt, synthetic construct
  source 1..21: mol_type = other RNA
ccaaaagaacagctgcttctg

SEQ ID NO: 20522 - RNA, 21 nt, synthetic construct
  source 1..21: mol_type = other RNA
ccaaaagctcatgtgcagtca

SEQ ID NO: 20523 - RNA, 21 nt, synthetic construct
  source 1..21: mol_type = other RNA
ccaaaaggctaatggagaaag

SEQ ID NO: 20524 - RNA, 21 nt, synthetic construct
  source 1..21: mol_type = other RNA
ccaaacaatacactggaaatt

SEQ ID NO: 20525 - RNA, 21 nt, synthetic construct
  source 1..21: mol_type = other RNA
ccaaactgaaaaacttatgtc

SEQ ID NO: 20526 - RNA, 21 nt, synthetic construct
  source 1..21: mol_type = other RNA
ccaaactgagtcttgccatag

SEQ ID NO: 20527 - RNA, 21 nt, synthetic construct
  source 1..21: mol_type = other RNA
ccaaagaatgatccttctctt

SEQ ID NO: 20528 - RNA, 21 nt, synthetic construct
  source 1..21: mol_type = other RNA
ccaaagcaacaatgatcagca

SEQ ID NO: 20529 - RNA, 21 nt, synthetic construct
  source 1..21: mol_type = other RNA
ccaaagcaagatcttcttcac

SEQ ID NO: 20530 - RNA, 21 nt, synthetic construct
  source 1..21: mol_type = other RNA
ccaaagccagctgcagtggtg

SEQ ID NO: 20531 - RNA, 21 nt, synthetic construct
  source 1..21: mol_type = other RNA
ccaaagtaacacaacactttt

SEQ ID NO: 20532 - RNA, 21 nt, synthetic construct
  source 1..21: mol_type = other RNA
ccaaataatgtgatcccaaag

SEQ ID NO: 20533 - RNA, 21 nt, synthetic construct
  source 1..21: mol_type = other RNA
ccaaatgggactggaggaagt

SEQ ID NO: 20534 - RNA, 21 nt, synthetic construct
  source 1..21: mol_type = other RNA
ccaaatgtctccgatttgagt

SEQ ID NO: 20535 - RNA, 21 nt, synthetic construct
  source 1..21: mol_type = other RNA
ccaaattactagatactccta

SEQ ID NO: 20536 - RNA, 21 nt, synthetic construct
  source 1..21: mol_type = other RNA
ccaacacagcactatctgaaa

SEQ ID NO: 20537 - RNA, 21 nt, synthetic construct
  source 1..21: mol_type = other RNA
ccaacatctccagttccaaaa

SEQ ID NO: 20538 - RNA, 21 nt, synthetic construct
  source 1..21: mol_type = other RNA
ccaacatgcctggggggctcc

SEQ ID NO: 20539 - RNA, 21 nt, synthetic construct
  source 1..21: mol_type = other RNA
ccaaccaaaagaacagctgct

SEQ ID NO: 20540 - RNA, 21 nt, synthetic construct
  source 1..21: mol_type = other RNA
ccaaccaaagtaacacaacac

SEQ ID NO: 20541 - RNA, 21 nt, synthetic construct
  source 1..21: mol_type = other RNA
ccaaccatgttgagggcaaca

SEQ ID NO: 20542 - RNA, 21 nt, synthetic construct
  source 1..21: mol_type = other RNA
ccaagaaaatgcagttaaaga

SEQ ID NO: 20543 - RNA, 21 nt, synthetic construct
  source 1..21: mol_type = other RNA
ccaagaaagaaatccaggtga

SEQ ID NO: 20544 - RNA, 21 nt, synthetic construct
  source 1..21: mol_type = other RNA
ccaagatatgtctggtcaaca

SEQ ID NO: 20545 - RNA, 21 nt, synthetic construct
  source 1..21: mol_type = other RNA
ccaagcggaatcccatctaaa

SEQ ID NO: 20546 - RNA, 21 nt, synthetic construct
  source 1..21: mol_type = other RNA
ccaaggcaagcttacacccag

SEQ ID NO: 20547 - RNA, 21 nt, synthetic construct
  source 1..21: mol_type = other RNA
ccaaggtacagtggaccaaca

SEQ ID NO: 20548 - RNA, 21 nt, synthetic construct
  source 1..21: mol_type = other RNA
ccaagtcgttatttgaccata

SEQ ID NO: 20549 - RNA, 21 nt, synthetic construct
  source 1..21: mol_type = other RNA
ccaagtggcactctttcaaaa

SEQ ID NO: 20550 - RNA, 21 nt, synthetic construct
  source 1..21: mol_type = other RNA
ccaagtgtttgcaaaatggag

SEQ ID NO: 20551 - RNA, 21 nt, synthetic construct
  source 1..21: mol_type = other RNA
ccaagttgaaatgaatcaagg

SEQ ID NO: 20552 - RNA, 21 nt, synthetic construct
  source 1..21: mol_type = other RNA
ccaatcaaatgacctccaaac

SEQ ID NO: 20553 - RNA, 21 nt, synthetic construct
  source 1..21: mol_type = other RNA
ccaatctctccaatcaaatga

SEQ ID NO: 20554 - RNA, 21 nt, synthetic construct
  source 1..21: mol_type = other RNA
ccaatgtcagaacacctcaag

SEQ ID NO: 20555 - RNA, 21 nt, synthetic construct
  source 1..21: mol_type = other RNA
ccaattaaggtggaacctgga

SEQ ID NO: 20556 - RNA, 21 nt, synthetic construct
  source 1..21: mol_type = other RNA
ccaatttttggtagcagtgga

SEQ ID NO: 20557 - RNA, 21 nt, synthetic construct
  source 1..21: mol_type = other RNA
ccacaaagctagcgtctggtg

SEQ ID NO: 20558 - RNA, 21 nt, synthetic construct
  source 1..21: mol_type = other RNA
ccacacagtgactgcacatga

SEQ ID NO: 20559 - RNA, 21 nt, synthetic construct
  source 1..21: mol_type = other RNA
ccacaccaccaccaccatcac

SEQ ID NO: 20560 - RNA, 21 nt, synthetic construct
  source 1..21: mol_type = other RNA
ccacaccccagctttagagca

SEQ ID NO: 20561 - RNA, 21 nt, synthetic construct
  source 1..21: mol_type = other RNA
ccacaggttcctcagcttcct

SEQ ID NO: 20562 - RNA, 21 nt, synthetic construct
  source 1..21: mol_type = other RNA
ccacatctcacataaatgcca

SEQ ID NO: 20563 - RNA, 21 nt, synthetic construct
  source 1..21: mol_type = other RNA
ccacatgcctgtatgcacaca

SEQ ID NO: 20564 - RNA, 21 nt, synthetic construct
  source 1..21: mol_type = other RNA
ccaccaatttttggtagcagt

SEQ ID NO: 20565 - RNA, 21 nt, synthetic construct
  source 1..21: mol_type = other RNA
ccaccaccaccatcacaattg

SEQ ID NO: 20566 - RNA, 21 nt, synthetic construct
  source 1..21: mol_type = other RNA
ccaccaccatcacaattgctt

SEQ ID NO: 20567 - RNA, 21 nt, synthetic construct
  source 1..21: mol_type = other RNA
ccaccactaccccaaccaaag

SEQ ID NO: 20568 - RNA, 21 nt, synthetic construct
  source 1..21: mol_type = other RNA
ccaccagaaaacaaaacatgg

SEQ ID NO: 20569 - RNA, 21 nt, synthetic construct
  source 1..21: mol_type = other RNA
ccaccaggagcttgcaaattg

SEQ ID NO: 20570 - RNA, 21 nt, synthetic construct
  source 1..21: mol_type = other RNA
ccaccatcacaattgcttctt

SEQ ID NO: 20571 - RNA, 21 nt, synthetic construct
  source 1..21: mol_type = other RNA
ccaccattcagagtgcttttt

SEQ ID NO: 20572 - RNA, 21 nt, synthetic construct
  source 1..21: mol_type = other RNA
ccacctgcaagctgtgataat

SEQ ID NO: 20573 - RNA, 21 nt, synthetic construct
  source 1..21: mol_type = other RNA
ccaccttaattggcctgtgca

SEQ ID NO: 20574 - RNA, 21 nt, synthetic construct
  source 1..21: mol_type = other RNA
ccaccttagagcagcatgctt

SEQ ID NO: 20575 - RNA, 21 nt, synthetic construct
  source 1..21: mol_type = other RNA
ccaccttcccagagtcctaat

SEQ ID NO: 20576 - RNA, 21 nt, synthetic construct
  source 1..21: mol_type = other RNA
ccacggaagaggcagaaactg

SEQ ID NO: 20577 - RNA, 21 nt, synthetic construct
  source 1..21: mol_type = other RNA
ccactaccacaccaccaccac

SEQ ID NO: 20578 - RNA, 21 nt, synthetic construct
  source 1..21: mol_type = other RNA
ccactaccccaaccaaagtaa

SEQ ID NO: 20579 - RNA, 21 nt, synthetic construct
  source 1..21: mol_type = other RNA
ccactgcagctggctttggag

SEQ ID NO: 20580 - RNA, 21 nt, synthetic construct
  source 1..21: mol_type = other RNA
ccactgcagttatgtgttgaa

SEQ ID NO: 20581 - RNA, 21 nt, synthetic construct
  source 1..21: mol_type = other RNA
ccactgcctgagagagctcat

SEQ ID NO: 20582 - RNA, 21 nt, synthetic construct
  source 1..21: mol_type = other RNA
ccactgctaccaaaaattggt

SEQ ID NO: 20583 - RNA, 21 nt, synthetic construct
  source 1..21: mol_type = other RNA
ccactgctgcagaacttgata

SEQ ID NO: 20584 - RNA, 21 nt, synthetic construct
  source 1..21: mol_type = other RNA
ccactgtaccttgggactgcc

SEQ ID NO: 20585 - RNA, 21 nt, synthetic construct
  source 1..21: mol_type = other RNA
ccacttggtgtctccatttac

SEQ ID NO: 20586 - RNA, 21 nt, synthetic construct
  source 1..21: mol_type = other RNA
ccactttagtctggccaaaga

SEQ ID NO: 20587 - RNA, 21 nt, synthetic construct
  source 1..21: mol_type = other RNA
ccagaaaacaaaacatggaaa

SEQ ID NO: 20588 - RNA, 21 nt, synthetic construct
  source 1..21: mol_type = other RNA
ccagaaaacaacacagctgga

SEQ ID NO: 20589 - RNA, 21 nt, synthetic construct
  source 1..21: mol_type = other RNA
ccagaaatgtactgagacaca

SEQ ID NO: 20590 - RNA, 21 nt, synthetic construct
  source 1..21: mol_type = other RNA
ccagaacaactacaacaacaa

SEQ ID NO: 20591 - RNA, 21 nt, synthetic construct
  source 1..21: mol_type = other RNA
ccagaaggacactcaaaagca

SEQ ID NO: 20592 - RNA, 21 nt, synthetic construct
  source 1..21: mol_type = other RNA
ccagaagtaaatggagacacc

SEQ ID NO: 20593 - RNA, 21 nt, synthetic construct
  source 1..21: mol_type = other RNA
ccagaatagtcgtgtgagtcc

SEQ ID NO: 20594 - RNA, 21 nt, synthetic construct
  source 1..21: mol_type = other RNA
ccagaatggaagcccactgcc

SEQ ID NO: 20595 - RNA, 21 nt, synthetic construct
  source 1..21: mol_type = other RNA
ccagacagaacctctggctac

SEQ ID NO: 20596 - RNA, 21 nt, synthetic construct
  source 1..21: mol_type = other RNA
ccagacatatcttggtttcta

SEQ ID NO: 20597 - RNA, 21 nt, synthetic construct
  source 1..21: mol_type = other RNA
ccagacgctagctttgtggtt

SEQ ID NO: 20598 - RNA, 21 nt, synthetic construct
  source 1..21: mol_type = other RNA
ccagactaaagtggaagaatg

SEQ ID NO: 20599 - RNA, 21 nt, synthetic construct
  source 1..21: mol_type = other RNA
ccagacttttcctcaccccca

SEQ ID NO: 20600 - RNA, 21 nt, synthetic construct
  source 1..21: mol_type = other RNA
ccagagagagaaggttcacta

SEQ ID NO: 20601 - RNA, 21 nt, synthetic construct
  source 1..21: mol_type = other RNA
ccagagcttcagattctgaat

SEQ ID NO: 20602 - RNA, 21 nt, synthetic construct
  source 1..21: mol_type = other RNA
ccagaggttctgtctggcaaa

SEQ ID NO: 20603 - RNA, 21 nt, synthetic construct
  source 1..21: mol_type = other RNA
ccagagtcctaatccatctac

SEQ ID NO: 20604 - RNA, 21 nt, synthetic construct
  source 1..21: mol_type = other RNA
ccagagttcacatctccctca

SEQ ID NO: 20605 - RNA, 21 nt, synthetic construct
  source 1..21: mol_type = other RNA
ccagattgtgtttccattgcg

SEQ ID NO: 20606 - RNA, 21 nt, synthetic construct
  source 1..21: mol_type = other RNA
ccagcaacagcagcaaaaatt

SEQ ID NO: 20607 - RNA, 21 nt, synthetic construct
  source 1..21: mol_type = other RNA
ccagcagcaatttgcaagctc

SEQ ID NO: 20608 - RNA, 21 nt, synthetic construct
  source 1..21: mol_type = other RNA
ccagcagttgatgagaaacaa

SEQ ID NO: 20609 - RNA, 21 nt, synthetic construct
  source 1..21: mol_type = other RNA
ccagctgcagtggtgagtgag

SEQ ID NO: 20610 - RNA, 21 nt, synthetic construct
  source 1..21: mol_type = other RNA
ccagctgtgttgttttctggg

SEQ ID NO: 20611 - RNA, 21 nt, synthetic construct
  source 1..21: mol_type = other RNA
ccagctttagagcagcaaaca

SEQ ID NO: 20612 - RNA, 21 nt, synthetic construct
  source 1..21: mol_type = other RNA
ccaggagcttgcaaattgctg

SEQ ID NO: 20613 - RNA, 21 nt, synthetic construct
  source 1..21: mol_type = other RNA
ccaggagttcaccatgtgtgt

SEQ ID NO: 20614 - RNA, 21 nt, synthetic construct
  source 1..21: mol_type = other RNA
ccaggatggattgaattgaag

SEQ ID NO: 20615 - RNA, 21 nt, synthetic construct
  source 1..21: mol_type = other RNA
ccaggcatgttggaatttcca

SEQ ID NO: 20616 - RNA, 21 nt, synthetic construct
  source 1..21: mol_type = other RNA
ccagggaaccacaaagctagc

SEQ ID NO: 20617 - RNA, 21 nt, synthetic construct
  source 1..21: mol_type = other RNA
ccagggaggaagtcacactca

SEQ ID NO: 20618 - RNA, 21 nt, synthetic construct
  source 1..21: mol_type = other RNA
ccaggtgaaagcagtcaacca

SEQ ID NO: 20619 - RNA, 21 nt, synthetic construct
  source 1..21: mol_type = other RNA
ccaggtgcacttctccaaaac

SEQ ID NO: 20620 - RNA, 21 nt, synthetic construct
  source 1..21: mol_type = other RNA
ccaggttccaccttaattggc

SEQ ID NO: 20621 - RNA, 21 nt, synthetic construct
  source 1..21: mol_type = other RNA
ccagtaaactagctgcaatgc

SEQ ID NO: 20622 - RNA, 21 nt, synthetic construct
  source 1..21: mol_type = other RNA
ccagtcacagttttgactaga

SEQ ID NO: 20623 - RNA, 21 nt, synthetic construct
  source 1..21: mol_type = other RNA
ccagtcccatttggacattat

SEQ ID NO: 20624 - RNA, 21 nt, synthetic construct
  source 1..21: mol_type = other RNA
ccagtgtattgtttggaggtc

SEQ ID NO: 20625 - RNA, 21 nt, synthetic construct
  source 1..21: mol_type = other RNA
ccagtgttgaaacagcacttg

SEQ ID NO: 20626 - RNA, 21 nt, synthetic construct
  source 1..21: mol_type = other RNA
ccagttccaaaaaccctcaca

SEQ ID NO: 20627 - RNA, 21 nt, synthetic construct
  source 1..21: mol_type = other RNA
ccagtttttcaacacataact

SEQ ID NO: 20628 - RNA, 21 nt, synthetic construct
  source 1..21: mol_type = other RNA
ccataaggctcttactctcaa

SEQ ID NO: 20629 - RNA, 21 nt, synthetic construct
  source 1..21: mol_type = other RNA
ccataataacttttgaaagag

SEQ ID NO: 20630 - RNA, 21 nt, synthetic construct
  source 1..21: mol_type = other RNA
ccatagtcagatgcacaggcc

SEQ ID NO: 20631 - RNA, 21 nt, synthetic construct
  source 1..21: mol_type = other RNA
ccatcaattcttcagtatcaa

SEQ ID NO: 20632 - RNA, 21 nt, synthetic construct
  source 1..21: mol_type = other RNA
ccatcacaattgcttctttct

SEQ ID NO: 20633 - RNA, 21 nt, synthetic construct
  source 1..21: mol_type = other RNA
ccatcacctcccatttgccag

SEQ ID NO: 20634 - RNA, 21 nt, synthetic construct
  source 1..21: mol_type = other RNA
ccatcaggcttgcttcggggc

SEQ ID NO: 20635 - RNA, 21 nt, synthetic construct
  source 1..21: mol_type = other RNA
ccatcccagagttcacatctc

SEQ ID NO: 20636 - RNA, 21 nt, synthetic construct
  source 1..21: mol_type = other RNA
ccatcctggtttcagatagtg

SEQ ID NO: 20637 - RNA, 21 nt, synthetic construct
  source 1..21: mol_type = other RNA
ccatcgcatacctcagggcag

SEQ ID NO: 20638 - RNA, 21 nt, synthetic construct
  source 1..21: mol_type = other RNA
ccatctaaaacgtaatgaggc

SEQ ID NO: 20639 - RNA, 21 nt, synthetic construct
  source 1..21: mol_type = other RNA
ccatctacacatgtatgcagc

SEQ ID NO: 20640 - RNA, 21 nt, synthetic construct
  source 1..21: mol_type = other RNA
ccatctcctgcagaaaataac

SEQ ID NO: 20641 - RNA, 21 nt, synthetic construct
  source 1..21: mol_type = other RNA
ccatcttgcagatgtgtaggt

SEQ ID NO: 20642 - RNA, 21 nt, synthetic construct
  source 1..21: mol_type = other RNA
ccatgaaaacattcttccact

SEQ ID NO: 20643 - RNA, 21 nt, synthetic construct
  source 1..21: mol_type = other RNA
ccatgaaatcaagtgcatgca

SEQ ID NO: 20644 - RNA, 21 nt, synthetic construct
  source 1..21: mol_type = other RNA
ccatgacaagaacattgtatt

SEQ ID NO: 20645 - RNA, 21 nt, synthetic construct
  source 1..21: mol_type = other RNA
ccatgcaaatgtttttcctgt

SEQ ID NO: 20646 - RNA, 21 nt, synthetic construct
  source 1..21: mol_type = other RNA
ccatggagcagcatctgaagc

SEQ ID NO: 20647 - RNA, 21 nt, synthetic construct
  source 1..21: mol_type = other RNA
ccatggtctcaatgatgctct

SEQ ID NO: 20648 - RNA, 21 nt, synthetic construct
  source 1..21: mol_type = other RNA
ccatgtgtctcagtacatttc

SEQ ID NO: 20649 - RNA, 21 nt, synthetic construct
  source 1..21: mol_type = other RNA
ccatgtgtgtgttccacggaa

SEQ ID NO: 20650 - RNA, 21 nt, synthetic construct
  source 1..21: mol_type = other RNA
ccatgttgagggcaacagact

SEQ ID NO: 20651 - RNA, 21 nt, synthetic construct
  source 1..21: mol_type = other RNA
ccatgttttgttttctggtgg

SEQ ID NO: 20652 - RNA, 21 nt, synthetic construct
  source 1..21: mol_type = other RNA
ccattaacagtcaggctacta

SEQ ID NO: 20653 - RNA, 21 nt, synthetic construct
  source 1..21: mol_type = other RNA
ccattagccttttggtcttgt

SEQ ID NO: 20654 - RNA, 21 nt, synthetic construct
  source 1..21: mol_type = other RNA
ccattaggcattagcactgcc

SEQ ID NO: 20655 - RNA, 21 nt, synthetic construct
  source 1..21: mol_type = other RNA
ccattcagagtgctttttcct

SEQ ID NO: 20656 - RNA, 21 nt, synthetic construct
  source 1..21: mol_type = other RNA
ccattcctgataccatcacct

SEQ ID NO: 20657 - RNA, 21 nt, synthetic construct
  source 1..21: mol_type = other RNA
ccattctggagctttgtagcc

SEQ ID NO: 20658 - RNA, 21 nt, synthetic construct
  source 1..21: mol_type = other RNA
ccattgcggtgcagaaaacca

SEQ ID NO: 20659 - RNA, 21 nt, synthetic construct
  source 1..21: mol_type = other RNA
ccattgtgttctgagaaaaca

SEQ ID NO: 20660 - RNA, 21 nt, synthetic construct
  source 1..21: mol_type = other RNA
ccatttaccaaaagctcatgt

SEQ ID NO: 20661 - RNA, 21 nt, synthetic construct
  source 1..21: mol_type = other RNA
ccatttacttctggatgagct

SEQ ID NO: 20662 - RNA, 21 nt, synthetic construct
  source 1..21: mol_type = other RNA
ccatttgccagacagaacctc

SEQ ID NO: 20663 - RNA, 21 nt, synthetic construct
  source 1..21: mol_type = other RNA
ccatttggacattatgagtct

SEQ ID NO: 20664 - RNA, 21 nt, synthetic construct
  source 1..21: mol_type = other RNA
ccattttcaaactcacacctt

SEQ ID NO: 20665 - RNA, 21 nt, synthetic construct
  source 1..21: mol_type = other RNA
ccattttgcaaacacttggaa

SEQ ID NO: 20666 - RNA, 21 nt, synthetic construct
  source 1..21: mol_type = other RNA
cccaaaacttgcatcacatgc

SEQ ID NO: 20667 - RNA, 21 nt, synthetic construct
  source 1..21: mol_type = other RNA
cccaaactgaaaaacttatgt

SEQ ID NO: 20668 - RNA, 21 nt, synthetic construct
  source 1..21: mol_type = other RNA
cccaaactgagtcttgccata

SEQ ID NO: 20669 - RNA, 21 nt, synthetic construct
  source 1..21: mol_type = other RNA
cccaaagcaacaatgatcagc

SEQ ID NO: 20670 - RNA, 21 nt, synthetic construct
  source 1..21: mol_type = other RNA
cccaaagcaagatcttcttca

SEQ ID NO: 20671 - RNA, 21 nt, synthetic construct
  source 1..21: mol_type = other RNA
cccaacacagcactatctgaa

SEQ ID NO: 20672 - RNA, 21 nt, synthetic construct
  source 1..21: mol_type = other RNA
cccaaccaaagtaacacaaca

SEQ ID NO: 20673 - RNA, 21 nt, synthetic construct
  source 1..21: mol_type = other RNA
cccaagaaaatgcagttaaag

SEQ ID NO: 20674 - RNA, 21 nt, synthetic construct
  source 1..21: mol_type = other RNA
cccaaggcaagcttacaccca

SEQ ID NO: 20675 - RNA, 21 nt, synthetic construct
  source 1..21: mol_type = other RNA
cccaaggtacagtggaccaac

SEQ ID NO: 20676 - RNA, 21 nt, synthetic construct
  source 1..21: mol_type = other RNA
cccaatctctccaatcaaatg

SEQ ID NO: 20677 - RNA, 21 nt, synthetic construct
  source 1..21: mol_type = other RNA
cccaccaatttttggtagcag

SEQ ID NO: 20678 - RNA, 21 nt, synthetic construct
  source 1..21: mol_type = other RNA
cccactgcagttatgtgttga

SEQ ID NO: 20679 - RNA, 21 nt, synthetic construct
  source 1..21: mol_type = other RNA
cccactgcctgagagagctca

SEQ ID NO: 20680 - RNA, 21 nt, synthetic construct
  source 1..21: mol_type = other RNA
cccagaaaacaacacagctgg

SEQ ID NO: 20681 - RNA, 21 nt, synthetic construct
  source 1..21: mol_type = other RNA
cccagaaggacactcaaaagc

SEQ ID NO: 20682 - RNA, 21 nt, synthetic construct
  source 1..21: mol_type = other RNA
cccagagagagaaggttcact

SEQ ID NO: 20683 - RNA, 21 nt, synthetic construct
  source 1..21: mol_type = other RNA
cccagagtcctaatccatcta

SEQ ID NO: 20684 - RNA, 21 nt, synthetic construct
  source 1..21: mol_type = other RNA
cccagagttcacatctccctc

SEQ ID NO: 20685 - RNA, 21 nt, synthetic construct
  source 1..21: mol_type = other RNA
cccagctttagagcagcaaac

SEQ ID NO: 20686 - RNA, 21 nt, synthetic construct
  source 1..21: mol_type = other RNA
cccaggcatgttggaatttcc

SEQ ID NO: 20687 - RNA, 21 nt, synthetic construct
  source 1..21: mol_type = other RNA
cccagtgttgaaacagcactt

SEQ ID NO: 20688 - RNA, 21 nt, synthetic construct
  source 1..21: mol_type = other RNA
cccatcgcatacctcagggca

SEQ ID NO: 20689 - RNA, 21 nt, synthetic construct
  source 1..21: mol_type = other RNA
cccatctaaaacgtaatgagg

SEQ ID NO: 20690 - RNA, 21 nt, synthetic construct
  source 1..21: mol_type = other RNA
cccatctcctgcagaaaataa

SEQ ID NO: 20691 - RNA, 21 nt, synthetic construct
  source 1..21: mol_type = other RNA
cccatcttgcagatgtgtagg

SEQ ID NO: 20692 - RNA, 21 nt, synthetic construct
  source 1..21: mol_type = other RNA
cccatttgccagacagaacct

SEQ ID NO: 20693 - RNA, 21 nt, synthetic construct
  source 1..21: mol_type = other RNA
cccatttggacattatgagtc

SEQ ID NO: 20694 - RNA, 21 nt, synthetic construct
  source 1..21: mol_type = other RNA
ccccaaactgagtcttgccat

SEQ ID NO: 20695 - RNA, 21 nt, synthetic construct
  source 1..21: mol_type = other RNA
ccccaaagcaacaatgatcag

SEQ ID NO: 20696 - RNA, 21 nt, synthetic construct
  source 1..21: mol_type = other RNA
ccccaacacagcactatctga

SEQ ID NO: 20697 - RNA, 21 nt, synthetic construct
  source 1..21: mol_type = other RNA
ccccaaccaaagtaacacaac

SEQ ID NO: 20698 - RNA, 21 nt, synthetic construct
  source 1..21: mol_type = other RNA
ccccagaaggacactcaaaag

SEQ ID NO: 20699 - RNA, 21 nt, synthetic construct
  source 1..21: mol_type = other RNA
ccccagctttagagcagcaaa

SEQ ID NO: 20700 - RNA, 21 nt, synthetic construct
  source 1..21: mol_type = other RNA
ccccaggcatgttggaatttc

SEQ ID NO: 20701 - RNA, 21 nt, synthetic construct
  source 1..21: mol_type = other RNA
ccccagtgttgaaacagcact

SEQ ID NO: 20702 - RNA, 21 nt, synthetic construct
  source 1..21: mol_type = other RNA
cccccaaagcaacaatgatca

SEQ ID NO: 20703 - RNA, 21 nt, synthetic construct
  source 1..21: mol_type = other RNA
cccccaacacagcactatctg

SEQ ID NO: 20704 - RNA, 21 nt, synthetic construct
  source 1..21: mol_type = other RNA
cccccaggcatgttggaattt

SEQ ID NO: 20705 - RNA, 21 nt, synthetic construct
  source 1..21: mol_type = other RNA
ccccccaggcatgttggaatt

SEQ ID NO: 20706 - RNA, 21 nt, synthetic construct
  source 1..21: mol_type = other RNA
ccccctcctcctcttccacag

SEQ ID NO: 20707 - RNA, 21 nt, synthetic construct
  source 1..21: mol_type = other RNA
ccccgaagcaagcctgatgga

SEQ ID NO: 20708 - RNA, 21 nt, synthetic construct
  source 1..21: mol_type = other RNA
ccccgaagttacgtctttctc

SEQ ID NO: 20709 - RNA, 21 nt, synthetic construct
  source 1..21: mol_type = other RNA
cccctccccagaaggacactc

SEQ ID NO: 20710 - RNA, 21 nt, synthetic construct
  source 1..21: mol_type = other RNA
cccctcctcctcttccacagg

SEQ ID NO: 20711 - RNA, 21 nt, synthetic construct
  source 1..21: mol_type = other RNA
cccctcctgctcattcagaat

SEQ ID NO: 20712 - RNA, 21 nt, synthetic construct
  source 1..21: mol_type = other RNA
cccctcgttttcaccaagcgg

SEQ ID NO: 20713 - RNA, 21 nt, synthetic construct
  source 1..21: mol_type = other RNA
ccccttatagtcagaccatga

SEQ ID NO: 20714 - RNA, 21 nt, synthetic construct
  source 1..21: mol_type = other RNA
cccgaagcaagcctgatggaa

SEQ ID NO: 20715 - RNA, 21 nt, synthetic construct
  source 1..21: mol_type = other RNA
cccgaagttacgtctttctcc

SEQ ID NO: 20716 - RNA, 21 nt, synthetic construct
  source 1..21: mol_type = other RNA
ccctcaaaaccagcaacagca

SEQ ID NO: 20717 - RNA, 21 nt, synthetic construct
  source 1..21: mol_type = other RNA
ccctcaacatggttggttcta

SEQ ID NO: 20718 - RNA, 21 nt, synthetic construct
  source 1..21: mol_type = other RNA
ccctcacaccaggtgcacttc

SEQ ID NO: 20719 - RNA, 21 nt, synthetic construct
  source 1..21: mol_type = other RNA
ccctccccagaaggacactca

SEQ ID NO: 20720 - RNA, 21 nt, synthetic construct
  source 1..21: mol_type = other RNA
ccctcctcctcttccacaggt

SEQ ID NO: 20721 - RNA, 21 nt, synthetic construct
  source 1..21: mol_type = other RNA
ccctcctgctcattcagaatc

SEQ ID NO: 20722 - RNA, 21 nt, synthetic construct
  source 1..21: mol_type = other RNA
ccctcgttttcaccaagcgga

SEQ ID NO: 20723 - RNA, 21 nt, synthetic construct
  source 1..21: mol_type = other RNA
ccctctactttcttgtgtaaa

SEQ ID NO: 20724 - RNA, 21 nt, synthetic construct
  source 1..21: mol_type = other RNA
ccctctattttcacttccctt

SEQ ID NO: 20725 - RNA, 21 nt, synthetic construct
  source 1..21: mol_type = other RNA
ccctgacatttcaacttttac

SEQ ID NO: 20726 - RNA, 21 nt, synthetic construct
  source 1..21: mol_type = other RNA
ccctgaggtatgcgatgggtg

SEQ ID NO: 20727 - RNA, 21 nt, synthetic construct
  source 1..21: mol_type = other RNA
ccctgcagtctgtatgtcatt

SEQ ID NO: 20728 - RNA, 21 nt, synthetic construct
  source 1..21: mol_type = other RNA
ccctggatgttattttctgca

SEQ ID NO: 20729 - RNA, 21 nt, synthetic construct
  source 1..21: mol_type = other RNA
ccctggtcaggcacaggaaaa

SEQ ID NO: 20730 - RNA, 21 nt, synthetic construct
  source 1..21: mol_type = other RNA
ccctgtagaactgaagcttgt

SEQ ID NO: 20731 - RNA, 21 nt, synthetic construct
  source 1..21: mol_type = other RNA
ccctgtatgaagggaagccag

SEQ ID NO: 20732 - RNA, 21 nt, synthetic construct
  source 1..21: mol_type = other RNA
cccttaaaagtgttgtgttac

SEQ ID NO: 20733 - RNA, 21 nt, synthetic construct
  source 1..21: mol_type = other RNA
cccttatagtcagaccatgaa

SEQ ID NO: 20734 - RNA, 21 nt, synthetic construct
  source 1..21: mol_type = other RNA
cccttcagaatctcttgctct

SEQ ID NO: 20735 - RNA, 21 nt, synthetic construct
  source 1..21: mol_type = other RNA
cccttcatacagggtattcca

SEQ ID NO: 20736 - RNA, 21 nt, synthetic construct
  source 1..21: mol_type = other RNA
cccttctccgatgctttctga

SEQ ID NO: 20737 - RNA, 21 nt, synthetic construct
  source 1..21: mol_type = other RNA
cccttgattcatttcaacttg

SEQ ID NO: 20738 - RNA, 21 nt, synthetic construct
  source 1..21: mol_type = other RNA
ccgaagcaagcctgatggaac

SEQ ID NO: 20739 - RNA, 21 nt, synthetic construct
  source 1..21: mol_type = other RNA
ccgaagttacgtctttctcca

SEQ ID NO: 20740 - RNA, 21 nt, synthetic construct
  source 1..21: mol_type = other RNA
ccgatgctttctgaaaggcct

SEQ ID NO: 20741 - RNA, 21 nt, synthetic construct
  source 1..21: mol_type = other RNA
ccgatttgagtgataagaaag

SEQ ID NO: 20742 - RNA, 21 nt, synthetic construct
  source 1..21: mol_type = other RNA
ccgcaatggaaacacaatctg

SEQ ID NO: 20743 - RNA, 21 nt, synthetic construct
  source 1..21: mol_type = other RNA
ccgcacagacctctaactctg

SEQ ID NO: 20744 - RNA, 21 nt, synthetic construct
  source 1..21: mol_type = other RNA
ccgcttggtgaaaacgagggg

SEQ ID NO: 20745 - RNA, 21 nt, synthetic construct
  source 1..21: mol_type = other RNA
ccgtggaacacacacatggtg

SEQ ID NO: 20746 - RNA, 21 nt, synthetic construct
  source 1..21: mol_type = other RNA
ccgttcagagctgccaccagg

SEQ ID NO: 20747 - RNA, 21 nt, synthetic construct
  source 1..21: mol_type = other RNA
cctaatccatctacacatgta

SEQ ID NO: 20748 - RNA, 21 nt, synthetic construct
  source 1..21: mol_type = other RNA
cctaatggtgctacagtttct

SEQ ID NO: 20749 - RNA, 21 nt, synthetic construct
  source 1..21: mol_type = other RNA
cctacacatctgcaagatggg

SEQ ID NO: 20750 - RNA, 21 nt, synthetic construct
  source 1..21: mol_type = other RNA
cctagtttcagagaataaaga

SEQ ID NO: 20751 - RNA, 21 nt, synthetic construct
  source 1..21: mol_type = other RNA
cctcaaaaccagcaacagcag

SEQ ID NO: 20752 - RNA, 21 nt, synthetic construct
  source 1..21: mol_type = other RNA
cctcaacatggttggttctat

SEQ ID NO: 20753 - RNA, 21 nt, synthetic construct
  source 1..21: mol_type = other RNA
cctcaagcataacccaccaat

SEQ ID NO: 20754 - RNA, 21 nt, synthetic construct
  source 1..21: mol_type = other RNA
cctcacaccaggtgcacttct

SEQ ID NO: 20755 - RNA, 21 nt, synthetic construct
  source 1..21: mol_type = other RNA
cctcacccccaaagcaacaat

SEQ ID NO: 20756 - RNA, 21 nt, synthetic construct
  source 1..21: mol_type = other RNA
cctcactcaccactgcagctg

SEQ ID NO: 20757 - RNA, 21 nt, synthetic construct
  source 1..21: mol_type = other RNA
cctcagaataattgtgtgaac

SEQ ID NO: 20758 - RNA, 21 nt, synthetic construct
  source 1..21: mol_type = other RNA
cctcagcttccttcagaagga

SEQ ID NO: 20759 - RNA, 21 nt, synthetic construct
  source 1..21: mol_type = other RNA
cctcagggcagatcaattccg

SEQ ID NO: 20760 - RNA, 21 nt, synthetic construct
  source 1..21: mol_type = other RNA
cctcaggtttaccctctattt

SEQ ID NO: 20761 - RNA, 21 nt, synthetic construct
  source 1..21: mol_type = other RNA
cctcataaacaggcagcacaa

SEQ ID NO: 20762 - RNA, 21 nt, synthetic construct
  source 1..21: mol_type = other RNA
cctcattacgttttagatggg

SEQ ID NO: 20763 - RNA, 21 nt, synthetic construct
  source 1..21: mol_type = other RNA
cctccaaacaatacactggaa

SEQ ID NO: 20764 - RNA, 21 nt, synthetic construct
  source 1..21: mol_type = other RNA
cctccaaagccagctgcagtg

SEQ ID NO: 20765 - RNA, 21 nt, synthetic construct
  source 1..21: mol_type = other RNA
cctccagtcccatttggacat

SEQ ID NO: 20766 - RNA, 21 nt, synthetic construct
  source 1..21: mol_type = other RNA
cctccattttgcaaacacttg

SEQ ID NO: 20767 - RNA, 21 nt, synthetic construct
  source 1..21: mol_type = other RNA
cctcccatttgccagacagaa

SEQ ID NO: 20768 - RNA, 21 nt, synthetic construct
  source 1..21: mol_type = other RNA
cctccccagaaggacactcaa

SEQ ID NO: 20769 - RNA, 21 nt, synthetic construct
  source 1..21: mol_type = other RNA
cctccctggtcaggcacagga

SEQ ID NO: 20770 - RNA, 21 nt, synthetic construct
  source 1..21: mol_type = other RNA
cctcctcctcttccacaggtt

SEQ ID NO: 20771 - RNA, 21 nt, synthetic construct
  source 1..21: mol_type = other RNA
cctcctcttccacaggttcct

SEQ ID NO: 20772 - RNA, 21 nt, synthetic construct
  source 1..21: mol_type = other RNA
cctcctgctcattcagaatct

SEQ ID NO: 20773 - RNA, 21 nt, synthetic construct
  source 1..21: mol_type = other RNA
cctcgttttcaccaagcggaa

SEQ ID NO: 20774 - RNA, 21 nt, synthetic construct
  source 1..21: mol_type = other RNA
cctctaactctgagctgcctc

SEQ ID NO: 20775 - RNA, 21 nt, synthetic construct
  source 1..21: mol_type = other RNA
cctctactttcttgtgtaaag

SEQ ID NO: 20776 - RNA, 21 nt, synthetic construct
  source 1..21: mol_type = other RNA
cctctattttcacttccctta

SEQ ID NO: 20777 - RNA, 21 nt, synthetic construct
  source 1..21: mol_type = other RNA
cctctggctacaaagctccag

SEQ ID NO: 20778 - RNA, 21 nt, synthetic construct
  source 1..21: mol_type = other RNA
cctcttccacaggttcctcag

SEQ ID NO: 20779 - RNA, 21 nt, synthetic construct
  source 1..21: mol_type = other RNA
cctcttccgtggaacacacac

SEQ ID NO: 20780 - RNA, 21 nt, synthetic construct
  source 1..21: mol_type = other RNA
cctgaaaatccagagcttcag

SEQ ID NO: 20781 - RNA, 21 nt, synthetic construct
  source 1..21: mol_type = other RNA
cctgaacagaattcttcacca

SEQ ID NO: 20782 - RNA, 21 nt, synthetic construct
  source 1..21: mol_type = other RNA
cctgaactttttgcaggaaac

SEQ ID NO: 20783 - RNA, 21 nt, synthetic construct
  source 1..21: mol_type = other RNA
cctgacatttcaacttttact

SEQ ID NO: 20784 - RNA, 21 nt, synthetic construct
  source 1..21: mol_type = other RNA
cctgaccagggaggaagtcac

SEQ ID NO: 20785 - RNA, 21 nt, synthetic construct
  source 1..21: mol_type = other RNA
cctgactgttaatggcattta

SEQ ID NO: 20786 - RNA, 21 nt, synthetic construct
  source 1..21: mol_type = other RNA
cctgactttacacaagaaagt

SEQ ID NO: 20787 - RNA, 21 nt, synthetic construct
  source 1..21: mol_type = other RNA
cctgagagagctcatccagaa

SEQ ID NO: 20788 - RNA, 21 nt, synthetic construct
  source 1..21: mol_type = other RNA
cctgaggcaccaccttcccag

SEQ ID NO: 20789 - RNA, 21 nt, synthetic construct
  source 1..21: mol_type = other RNA
cctgaggtatgcgatgggtga

SEQ ID NO: 20790 - RNA, 21 nt, synthetic construct
  source 1..21: mol_type = other RNA
cctgataccatcacctcccat

SEQ ID NO: 20791 - RNA, 21 nt, synthetic construct
  source 1..21: mol_type = other RNA
cctgatggaacaggatagaac

SEQ ID NO: 20792 - RNA, 21 nt, synthetic construct
  source 1..21: mol_type = other RNA
cctgcaaaaagttcaggatgt

SEQ ID NO: 20793 - RNA, 21 nt, synthetic construct
  source 1..21: mol_type = other RNA
cctgcaagctgtgataatgtg

SEQ ID NO: 20794 - RNA, 21 nt, synthetic construct
  source 1..21: mol_type = other RNA
cctgcagaaaataacatccag

SEQ ID NO: 20795 - RNA, 21 nt, synthetic construct
  source 1..21: mol_type = other RNA
cctgcagtctgtatgtcattc

SEQ ID NO: 20796 - RNA, 21 nt, synthetic construct
  source 1..21: mol_type = other RNA
cctgctcattcagaatctgaa

SEQ ID NO: 20797 - RNA, 21 nt, synthetic construct
  source 1..21: mol_type = other RNA
cctggaaaaaacactgtctca

SEQ ID NO: 20798 - RNA, 21 nt, synthetic construct
  source 1..21: mol_type = other RNA
cctggatgcaagccacatgcc

SEQ ID NO: 20799 - RNA, 21 nt, synthetic construct
  source 1..21: mol_type = other RNA
cctggatgttattttctgcag

SEQ ID NO: 20800 - RNA, 21 nt, synthetic construct
  source 1..21: mol_type = other RNA
cctggatttctttcttggctt

SEQ ID NO: 20801 - RNA, 21 nt, synthetic construct
  source 1..21: mol_type = other RNA
cctggggggctcccaaggcaa

SEQ ID NO: 20802 - RNA, 21 nt, synthetic construct
  source 1..21: mol_type = other RNA
cctggtcaggcacaggaaaaa

SEQ ID NO: 20803 - RNA, 21 nt, synthetic construct
  source 1..21: mol_type = other RNA
cctggtggcagctctgaacgg

SEQ ID NO: 20804 - RNA, 21 nt, synthetic construct
  source 1..21: mol_type = other RNA
cctggtgtgagggtttttgga

SEQ ID NO: 20805 - RNA, 21 nt, synthetic construct
  source 1..21: mol_type = other RNA
cctggtttcagatagtgctgt

SEQ ID NO: 20806 - RNA, 21 nt, synthetic construct
  source 1..21: mol_type = other RNA
cctgtagaactgaagcttgtt

SEQ ID NO: 20807 - RNA, 21 nt, synthetic construct
  source 1..21: mol_type = other RNA
cctgtagctctccactgctac

SEQ ID NO: 20808 - RNA, 21 nt, synthetic construct
  source 1..21: mol_type = other RNA
cctgtatgaagggaagccaga

SEQ ID NO: 20809 - RNA, 21 nt, synthetic construct
  source 1..21: mol_type = other RNA
cctgtatgcacacagcaccac

SEQ ID NO: 20810 - RNA, 21 nt, synthetic construct
  source 1..21: mol_type = other RNA
cctgtattttgcatgcacttg

SEQ ID NO: 20811 - RNA, 21 nt, synthetic construct
  source 1..21: mol_type = other RNA
cctgtcaagactcaatatgat

SEQ ID NO: 20812 - RNA, 21 nt, synthetic construct
  source 1..21: mol_type = other RNA
cctgtgaagaagatcttgctt

SEQ ID NO: 20813 - RNA, 21 nt, synthetic construct
  source 1..21: mol_type = other RNA
cctgtgagatcactcacccat

SEQ ID NO: 20814 - RNA, 21 nt, synthetic construct
  source 1..21: mol_type = other RNA
cctgtgatgctgatgatgctg

SEQ ID NO: 20815 - RNA, 21 nt, synthetic construct
  source 1..21: mol_type = other RNA
cctgtgcatctgactatggca

SEQ ID NO: 20816 - RNA, 21 nt, synthetic construct
  source 1..21: mol_type = other RNA
cctgtgcctgaccagggagga

SEQ ID NO: 20817 - RNA, 21 nt, synthetic construct
  source 1..21: mol_type = other RNA
cctgtggaagaggaggagggg

SEQ ID NO: 20818 - RNA, 21 nt, synthetic construct
  source 1..21: mol_type = other RNA
cctgttcacacaattattctg

SEQ ID NO: 20819 - RNA, 21 nt, synthetic construct
  source 1..21: mol_type = other RNA
cctgttccatcaggcttgctt

SEQ ID NO: 20820 - RNA, 21 nt, synthetic construct
  source 1..21: mol_type = other RNA
cctgttcctttcagaaaccag

SEQ ID NO: 20821 - RNA, 21 nt, synthetic construct
  source 1..21: mol_type = other RNA
cctgttcttgaaagcacctgt

SEQ ID NO: 20822 - RNA, 21 nt, synthetic construct
  source 1..21: mol_type = other RNA
cctgttgattcaagtgctgtt

SEQ ID NO: 20823 - RNA, 21 nt, synthetic construct
  source 1..21: mol_type = other RNA
cctgtttatgaggcttatgtt

SEQ ID NO: 20824 - RNA, 21 nt, synthetic construct
  source 1..21: mol_type = other RNA
ccttaaaagtgttgtgttact

SEQ ID NO: 20825 - RNA, 21 nt, synthetic construct
  source 1..21: mol_type = other RNA
ccttaattggcctgtgcatct

SEQ ID NO: 20826 - RNA, 21 nt, synthetic construct
  source 1..21: mol_type = other RNA
ccttagagcagcatgcttttg

SEQ ID NO: 20827 - RNA, 21 nt, synthetic construct
  source 1..21: mol_type = other RNA
ccttagtgaacactgagcttt

SEQ ID NO: 20828 - RNA, 21 nt, synthetic construct
  source 1..21: mol_type = other RNA
ccttatagtcagaccatgaaa

SEQ ID NO: 20829 - RNA, 21 nt, synthetic construct
  source 1..21: mol_type = other RNA
ccttatggtcaaataacgact

SEQ ID NO: 20830 - RNA, 21 nt, synthetic construct
  source 1..21: mol_type = other RNA
ccttcaattcaatccatcctg

SEQ ID NO: 20831 - RNA, 21 nt, synthetic construct
  source 1..21: mol_type = other RNA
ccttcagaaggaaaaagcact

SEQ ID NO: 20832 - RNA, 21 nt, synthetic construct
  source 1..21: mol_type = other RNA
ccttcagaatctcttgctctt

SEQ ID NO: 20833 - RNA, 21 nt, synthetic construct
  source 1..21: mol_type = other RNA
ccttcagatcaagaaattgaa

SEQ ID NO: 20834 - RNA, 21 nt, synthetic construct
  source 1..21: mol_type = other RNA
ccttcatacagggtattccat

SEQ ID NO: 20835 - RNA, 21 nt, synthetic construct
  source 1..21: mol_type = other RNA
ccttccaaattactagatact

SEQ ID NO: 20836 - RNA, 21 nt, synthetic construct
  source 1..21: mol_type = other RNA
ccttcccagagtcctaatcca

SEQ ID NO: 20837 - RNA, 21 nt, synthetic construct
  source 1..21: mol_type = other RNA
ccttctccgatgctttctgaa

SEQ ID NO: 20838 - RNA, 21 nt, synthetic construct
  source 1..21: mol_type = other RNA
ccttctctctctgggctcctt

SEQ ID NO: 20839 - RNA, 21 nt, synthetic construct
  source 1..21: mol_type = other RNA
ccttctctttgctgatcattg

SEQ ID NO: 20840 - RNA, 21 nt, synthetic construct
  source 1..21: mol_type = other RNA
ccttctgaaggaagctgagga

SEQ ID NO: 20841 - RNA, 21 nt, synthetic construct
  source 1..21: mol_type = other RNA
ccttctggggaggggtctgag

SEQ ID NO: 20842 - RNA, 21 nt, synthetic construct
  source 1..21: mol_type = other RNA
ccttgattcatttcaacttgg

SEQ ID NO: 20843 - RNA, 21 nt, synthetic construct
  source 1..21: mol_type = other RNA
ccttgggactgcccttgattc

SEQ ID NO: 20844 - RNA, 21 nt, synthetic construct
  source 1..21: mol_type = other RNA
ccttgggagccccccaggcat

SEQ ID NO: 20845 - RNA, 21 nt, synthetic construct
  source 1..21: mol_type = other RNA
ccttgtctcgacccttcagaa

SEQ ID NO: 20846 - RNA, 21 nt, synthetic construct
  source 1..21: mol_type = other RNA
ccttgtggatggccccgaagc

SEQ ID NO: 20847 - RNA, 21 nt, synthetic construct
  source 1..21: mol_type = other RNA
cctttcagaaaccagaacaac

SEQ ID NO: 20848 - RNA, 21 nt, synthetic construct
  source 1..21: mol_type = other RNA
cctttcagaaagcatcggaga

SEQ ID NO: 20849 - RNA, 21 nt, synthetic construct
  source 1..21: mol_type = other RNA
cctttgctgagcaagttgcgc

SEQ ID NO: 20850 - RNA, 21 nt, synthetic construct
  source 1..21: mol_type = other RNA
ccttttctgccactaccacac

SEQ ID NO: 20851 - RNA, 21 nt, synthetic construct
  source 1..21: mol_type = other RNA
ccttttgcaacataagcctca

SEQ ID NO: 20852 - RNA, 21 nt, synthetic construct
  source 1..21: mol_type = other RNA
ccttttggtcttgtttcaatt

SEQ ID NO: 20853 - RNA, 21 nt, synthetic construct
  source 1..21: mol_type = other RNA
cctttttccatgttttgtttt

SEQ ID NO: 20854 - RNA, 21 nt, synthetic construct
  source 1..21: mol_type = other RNA
cgaactcgcttgattttgaat

SEQ ID NO: 20855 - RNA, 21 nt, synthetic construct
  source 1..21: mol_type = other RNA
cgaagcaagcctgatggaaca

SEQ ID NO: 20856 - RNA, 21 nt, synthetic construct
  source 1..21: mol_type = other RNA
cgaagttacgtctttctccat

SEQ ID NO: 20857 - RNA, 21 nt, synthetic construct
  source 1..21: mol_type = other RNA
cgacccttcagaatctcttgc

SEQ ID NO: 20858 - RNA, 21 nt, synthetic construct
  source 1..21: mol_type = other RNA
cgactattctggcttcccttc

SEQ ID NO: 20859 - RNA, 21 nt, synthetic construct
  source 1..21: mol_type = other RNA
cgacttggcgtgaaactgctt

SEQ ID NO: 20860 - RNA, 21 nt, synthetic construct
  source 1..21: mol_type = other RNA
cgagacaaggagcaaacacga

SEQ ID NO: 20861 - RNA, 21 nt, synthetic construct
  source 1..21: mol_type = other RNA
cgagactcataatgtccaaat

SEQ ID NO: 20862 - RNA, 21 nt, synthetic construct
  source 1..21: mol_type = other RNA
cgagatcttgtgcccccaaca

SEQ ID NO: 20863 - RNA, 21 nt, synthetic construct
  source 1..21: mol_type = other RNA
cgaggggccttcaattcaatc

SEQ ID NO: 20864 - RNA, 21 nt, synthetic construct
  source 1..21: mol_type = other RNA
cgagttcgagactcataatgt

SEQ ID NO: 20865 - RNA, 21 nt, synthetic construct
  source 1..21: mol_type = other RNA
cgatgctttctgaaaggcctc

SEQ ID NO: 20866 - RNA, 21 nt, synthetic construct
  source 1..21: mol_type = other RNA
cgatgggtgagtgatctcaca

SEQ ID NO: 20867 - RNA, 21 nt, synthetic construct
  source 1..21: mol_type = other RNA
cgatttatattctgtacttcc

SEQ ID NO: 20868 - RNA, 21 nt, synthetic construct
  source 1..21: mol_type = other RNA
cgatttgagtgataagaaaga

SEQ ID NO: 20869 - RNA, 21 nt, synthetic construct
  source 1..21: mol_type = other RNA
cgcaacttgctcagcaaaggt

SEQ ID NO: 20870 - RNA, 21 nt, synthetic construct
  source 1..21: mol_type = other RNA
cgcaatggaaacacaatctgg

SEQ ID NO: 20871 - RNA, 21 nt, synthetic construct
  source 1..21: mol_type = other RNA
cgcacagacctctaactctga

SEQ ID NO: 20872 - RNA, 21 nt, synthetic construct
  source 1..21: mol_type = other RNA
cgcacagttagtgaaccttct

SEQ ID NO: 20873 - RNA, 21 nt, synthetic construct
  source 1..21: mol_type = other RNA
cgcagcttgttgaccagacat

SEQ ID NO: 20874 - RNA, 21 nt, synthetic construct
  source 1..21: mol_type = other RNA
cgcatacctcagggcagatca

SEQ ID NO: 20875 - RNA, 21 nt, synthetic construct
  source 1..21: mol_type = other RNA
cgccaagtcgttatttgacca

SEQ ID NO: 20876 - RNA, 21 nt, synthetic construct
  source 1..21: mol_type = other RNA
cgccatgtgtctcagtacatt

SEQ ID NO: 20877 - RNA, 21 nt, synthetic construct
  source 1..21: mol_type = other RNA
cgctagctttgtggttccctg

SEQ ID NO: 20878 - RNA, 21 nt, synthetic construct
  source 1..21: mol_type = other RNA
cgcttgattttgaatactgat

SEQ ID NO: 20879 - RNA, 21 nt, synthetic construct
  source 1..21: mol_type = other RNA
cgcttggtgaaaacgaggggc

SEQ ID NO: 20880 - RNA, 21 nt, synthetic construct
  source 1..21: mol_type = other RNA
cggaagaggcagaaactgtag

SEQ ID NO: 20881 - RNA, 21 nt, synthetic construct
  source 1..21: mol_type = other RNA
cggaatcccatctaaaacgta

SEQ ID NO: 20882 - RNA, 21 nt, synthetic construct
  source 1..21: mol_type = other RNA
cggaattgatctgccctgagg

SEQ ID NO: 20883 - RNA, 21 nt, synthetic construct
  source 1..21: mol_type = other RNA
cggagaagggctgcatacatg

SEQ ID NO: 20884 - RNA, 21 nt, synthetic construct
  source 1..21: mol_type = other RNA
cggagacatttggttgactgc

SEQ ID NO: 20885 - RNA, 21 nt, synthetic construct
  source 1..21: mol_type = other RNA
cggggtaagccaagaaagaaa

SEQ ID NO: 20886 - RNA, 21 nt, synthetic construct
  source 1..21: mol_type = other RNA
cggtgcagaaaaccacatctc

SEQ ID NO: 20887 - RNA, 21 nt, synthetic construct
  source 1..21: mol_type = other RNA
cgtaacttcggggtaagccaa

SEQ ID NO: 20888 - RNA, 21 nt, synthetic construct
  source 1..21: mol_type = other RNA
cgtaatgaggcatcactgcca

SEQ ID NO: 20889 - RNA, 21 nt, synthetic construct
  source 1..21: mol_type = other RNA
cgtagaaattccccttatagt

SEQ ID NO: 20890 - RNA, 21 nt, synthetic construct
  source 1..21: mol_type = other RNA
cgtctggtgaagaattctgtt

SEQ ID NO: 20891 - RNA, 21 nt, synthetic construct
  source 1..21: mol_type = other RNA
cgtctttctccattagccttt

SEQ ID NO: 20892 - RNA, 21 nt, synthetic construct
  source 1..21: mol_type = other RNA
cgtgaaactgcttcagatgct

SEQ ID NO: 20893 - RNA, 21 nt, synthetic construct
  source 1..21: mol_type = other RNA
cgtggaacacacacatggtga

SEQ ID NO: 20894 - RNA, 21 nt, synthetic construct
  source 1..21: mol_type = other RNA
cgtgtgagtcctgactttaca

SEQ ID NO: 20895 - RNA, 21 nt, synthetic construct
  source 1..21: mol_type = other RNA
cgtgtttgctccttgtctcga

SEQ ID NO: 20896 - RNA, 21 nt, synthetic construct
  source 1..21: mol_type = other RNA
cgttatttgaccataaggctc

SEQ ID NO: 20897 - RNA, 21 nt, synthetic construct
  source 1..21: mol_type = other RNA
cgttcagagctgccaccagga

SEQ ID NO: 20898 - RNA, 21 nt, synthetic construct
  source 1..21: mol_type = other RNA
cgttttagatgggattccgct

SEQ ID NO: 20899 - RNA, 21 nt, synthetic construct
  source 1..21: mol_type = other RNA
cgttttattcctccattttgc

SEQ ID NO: 20900 - RNA, 21 nt, synthetic construct
  source 1..21: mol_type = other RNA
cgttttcaccaagcggaatcc

SEQ ID NO: 20901 - RNA, 21 nt, synthetic construct
  source 1..21: mol_type = other RNA
ctaaaacgtaatgaggcatca

SEQ ID NO: 20902 - RNA, 21 nt, synthetic construct
  source 1..21: mol_type = other RNA
ctaaaactccaccattcagag

SEQ ID NO: 20903 - RNA, 21 nt, synthetic construct
  source 1..21: mol_type = other RNA
ctaaagctggggtgtggctat

SEQ ID NO: 20904 - RNA, 21 nt, synthetic construct
  source 1..21: mol_type = other RNA
ctaaagtggaagaatgttttc

SEQ ID NO: 20905 - RNA, 21 nt, synthetic construct
  source 1..21: mol_type = other RNA
ctaaatacctgttcctttcag

SEQ ID NO: 20906 - RNA, 21 nt, synthetic construct
  source 1..21: mol_type = other RNA
ctaactctgagctgcctccaa

SEQ ID NO: 20907 - RNA, 21 nt, synthetic construct
  source 1..21: mol_type = other RNA
ctaactgtgcgttttattcct

SEQ ID NO: 20908 - RNA, 21 nt, synthetic construct
  source 1..21: mol_type = other RNA
ctaagcaagagaatccacctg

SEQ ID NO: 20909 - RNA, 21 nt, synthetic construct
  source 1..21: mol_type = other RNA
ctaaggattccttttctgcca

SEQ ID NO: 20910 - RNA, 21 nt, synthetic construct
  source 1..21: mol_type = other RNA
ctaaggtggcatctcttacag

SEQ ID NO: 20911 - RNA, 21 nt, synthetic construct
  source 1..21: mol_type = other RNA
ctaagtccattcctgatacca

SEQ ID NO: 20912 - RNA, 21 nt, synthetic construct
  source 1..21: mol_type = other RNA
ctaatccatctacacatgtat

SEQ ID NO: 20913 - RNA, 21 nt, synthetic construct
  source 1..21: mol_type = other RNA
ctaatgagttgtcctgtgaga

SEQ ID NO: 20914 - RNA, 21 nt, synthetic construct
  source 1..21: mol_type = other RNA
ctaatgcctaatggtgctaca

SEQ ID NO: 20915 - RNA, 21 nt, synthetic construct
  source 1..21: mol_type = other RNA
ctaatggagaaagacgtaact

SEQ ID NO: 20916 - RNA, 21 nt, synthetic construct
  source 1..21: mol_type = other RNA
ctaatggtgctacagtttctg

SEQ ID NO: 20917 - RNA, 21 nt, synthetic construct
  source 1..21: mol_type = other RNA
ctaattaccatgacaagaaca

SEQ ID NO: 20918 - RNA, 21 nt, synthetic construct
  source 1..21: mol_type = other RNA
ctacaaagctccagaatggaa

SEQ ID NO: 20919 - RNA, 21 nt, synthetic construct
  source 1..21: mol_type = other RNA
ctacaacaacaaaaatcagtt

SEQ ID NO: 20920 - RNA, 21 nt, synthetic construct
  source 1..21: mol_type = other RNA
ctacacatcctgaactttttg

SEQ ID NO: 20921 - RNA, 21 nt, synthetic construct
  source 1..21: mol_type = other RNA
ctacacatctgcaagatggga

SEQ ID NO: 20922 - RNA, 21 nt, synthetic construct
  source 1..21: mol_type = other RNA
ctacacatgtatgcagccctt

SEQ ID NO: 20923 - RNA, 21 nt, synthetic construct
  source 1..21: mol_type = other RNA
ctacagaactcacagattctt

SEQ ID NO: 20924 - RNA, 21 nt, synthetic construct
  source 1..21: mol_type = other RNA
ctacaggacaactgccagcag

SEQ ID NO: 20925 - RNA, 21 nt, synthetic construct
  source 1..21: mol_type = other RNA
ctacagggatataaaaataga

SEQ ID NO: 20926 - RNA, 21 nt, synthetic construct
  source 1..21: mol_type = other RNA
ctacagtttctgcctcttccg

SEQ ID NO: 20927 - RNA, 21 nt, synthetic construct
  source 1..21: mol_type = other RNA
ctaccaaaaattggtgggtta

SEQ ID NO: 20928 - RNA, 21 nt, synthetic construct
  source 1..21: mol_type = other RNA
ctaccacaccaccaccaccat

SEQ ID NO: 20929 - RNA, 21 nt, synthetic construct
  source 1..21: mol_type = other RNA
ctaccccaaccaaagtaacac

SEQ ID NO: 20930 - RNA, 21 nt, synthetic construct
  source 1..21: mol_type = other RNA
ctacgatttatattctgtact

SEQ ID NO: 20931 - RNA, 21 nt, synthetic construct
  source 1..21: mol_type = other RNA
ctactaatgagttgtcctgtg

SEQ ID NO: 20932 - RNA, 21 nt, synthetic construct
  source 1..21: mol_type = other RNA
ctactttcttgtgtaaagtca

SEQ ID NO: 20933 - RNA, 21 nt, synthetic construct
  source 1..21: mol_type = other RNA
ctagacaaaccactgctgcag

SEQ ID NO: 20934 - RNA, 21 nt, synthetic construct
  source 1..21: mol_type = other RNA
ctagagggcagccttgtggat

SEQ ID NO: 20935 - RNA, 21 nt, synthetic construct
  source 1..21: mol_type = other RNA
ctagcgtctggtgaagaattc

SEQ ID NO: 20936 - RNA, 21 nt, synthetic construct
  source 1..21: mol_type = other RNA
ctagctgcaatgctaaatacc

SEQ ID NO: 20937 - RNA, 21 nt, synthetic construct
  source 1..21: mol_type = other RNA
ctagctttgtggttccctgga

SEQ ID NO: 20938 - RNA, 21 nt, synthetic construct
  source 1..21: mol_type = other RNA
ctaggtgtgtattgtttgaac

SEQ ID NO: 20939 - RNA, 21 nt, synthetic construct
  source 1..21: mol_type = other RNA
ctagtaatttggaaggtgact

SEQ ID NO: 20940 - RNA, 21 nt, synthetic construct
  source 1..21: mol_type = other RNA
ctagtcaaaactgtgactggc

SEQ ID NO: 20941 - RNA, 21 nt, synthetic construct
  source 1..21: mol_type = other RNA
ctagtgccacacagtgactgc

SEQ ID NO: 20942 - RNA, 21 nt, synthetic construct
  source 1..21: mol_type = other RNA
ctagtttactggcattatcag

SEQ ID NO: 20943 - RNA, 21 nt, synthetic construct
  source 1..21: mol_type = other RNA
ctagtttcagagaataaagaa

SEQ ID NO: 20944 - RNA, 21 nt, synthetic construct
  source 1..21: mol_type = other RNA
ctataaggggaatttctacga

SEQ ID NO: 20945 - RNA, 21 nt, synthetic construct
  source 1..21: mol_type = other RNA
ctatcaagttctgcagcagtg

SEQ ID NO: 20946 - RNA, 21 nt, synthetic construct
  source 1..21: mol_type = other RNA
ctatcctgttccatcaggctt

SEQ ID NO: 20947 - RNA, 21 nt, synthetic construct
  source 1..21: mol_type = other RNA
ctatctgaaaccaggatggat

SEQ ID NO: 20948 - RNA, 21 nt, synthetic construct
  source 1..21: mol_type = other RNA
ctatggcaagactcagtttgg

SEQ ID NO: 20949 - RNA, 21 nt, synthetic construct
  source 1..21: mol_type = other RNA
ctattctggcttcccttcata

SEQ ID NO: 20950 - RNA, 21 nt, synthetic construct
  source 1..21: mol_type = other RNA
ctattttcacttcccttaaaa

SEQ ID NO: 20951 - RNA, 21 nt, synthetic construct
  source 1..21: mol_type = other RNA
ctatttttatatccctgtaga

SEQ ID NO: 20952 - RNA, 21 nt, synthetic construct
  source 1..21: mol_type = other RNA
ctcaaaaactgatttttgttg

SEQ ID NO: 20953 - RNA, 21 nt, synthetic construct
  source 1..21: mol_type = other RNA
ctcaaaaccagcaacagcagc

SEQ ID NO: 20954 - RNA, 21 nt, synthetic construct
  source 1..21: mol_type = other RNA
ctcaaaagcatgctgctctaa

SEQ ID NO: 20955 - RNA, 21 nt, synthetic construct
  source 1..21: mol_type = other RNA
ctcaaatcacagaagcaagta

SEQ ID NO: 20956 - RNA, 21 nt, synthetic construct
  source 1..21: mol_type = other RNA
ctcaaatcggagacatttggt

SEQ ID NO: 20957 - RNA, 21 nt, synthetic construct
  source 1..21: mol_type = other RNA
ctcaacatggttggttctatc

SEQ ID NO: 20958 - RNA, 21 nt, synthetic construct
  source 1..21: mol_type = other RNA
ctcaagcataacccaccaatt

SEQ ID NO: 20959 - RNA, 21 nt, synthetic construct
  source 1..21: mol_type = other RNA
ctcaatatgatttcccatctt

SEQ ID NO: 20960 - RNA, 21 nt, synthetic construct
  source 1..21: mol_type = other RNA
ctcaatattatccagattgtg

SEQ ID NO: 20961 - RNA, 21 nt, synthetic construct
  source 1..21: mol_type = other RNA
ctcaatgatgctcttttgctg

SEQ ID NO: 20962 - RNA, 21 nt, synthetic construct
  source 1..21: mol_type = other RNA
ctcacaccaggtgcacttctc

SEQ ID NO: 20963 - RNA, 21 nt, synthetic construct
  source 1..21: mol_type = other RNA
ctcacaccttttgcaacataa

SEQ ID NO: 20964 - RNA, 21 nt, synthetic construct
  source 1..21: mol_type = other RNA
ctcacacgactattctggctt

SEQ ID NO: 20965 - RNA, 21 nt, synthetic construct
  source 1..21: mol_type = other RNA
ctcacagattctttcttatca

SEQ ID NO: 20966 - RNA, 21 nt, synthetic construct
  source 1..21: mol_type = other RNA
ctcacaggacaactcattagt

SEQ ID NO: 20967 - RNA, 21 nt, synthetic construct
  source 1..21: mol_type = other RNA
ctcacataaatgccattaaca

SEQ ID NO: 20968 - RNA, 21 nt, synthetic construct
  source 1..21: mol_type = other RNA
ctcaccactgcagctggcttt

SEQ ID NO: 20969 - RNA, 21 nt, synthetic construct
  source 1..21: mol_type = other RNA
ctcacccatcgcatacctcag

SEQ ID NO: 20970 - RNA, 21 nt, synthetic construct
  source 1..21: mol_type = other RNA
ctcacccccaaagcaacaatg

SEQ ID NO: 20971 - RNA, 21 nt, synthetic construct
  source 1..21: mol_type = other RNA
ctcactcaccactgcagctgg

SEQ ID NO: 20972 - RNA, 21 nt, synthetic construct
  source 1..21: mol_type = other RNA
ctcagaacacaatggaacagt

SEQ ID NO: 20973 - RNA, 21 nt, synthetic construct
  source 1..21: mol_type = other RNA
ctcagaataattgtgtgaaca

SEQ ID NO: 20974 - RNA, 21 nt, synthetic construct
  source 1..21: mol_type = other RNA
ctcagacccctccccagaagg

SEQ ID NO: 20975 - RNA, 21 nt, synthetic construct
  source 1..21: mol_type = other RNA
ctcagagttagaggtctgtgc

SEQ ID NO: 20976 - RNA, 21 nt, synthetic construct
  source 1..21: mol_type = other RNA
ctcagcaaaggtacttgatac

SEQ ID NO: 20977 - RNA, 21 nt, synthetic construct
  source 1..21: mol_type = other RNA
ctcagcttccttcagaaggaa

SEQ ID NO: 20978 - RNA, 21 nt, synthetic construct
  source 1..21: mol_type = other RNA
ctcaggcagtgggcttccatt

SEQ ID NO: 20979 - RNA, 21 nt, synthetic construct
  source 1..21: mol_type = other RNA
ctcagggcagatcaattccgc

SEQ ID NO: 20980 - RNA, 21 nt, synthetic construct
  source 1..21: mol_type = other RNA
ctcaggtttaccctctatttt

SEQ ID NO: 20981 - RNA, 21 nt, synthetic construct
  source 1..21: mol_type = other RNA
ctcagtacatttctggcactt

SEQ ID NO: 20982 - RNA, 21 nt, synthetic construct
  source 1..21: mol_type = other RNA
ctcagtctctgaagcctgttg

SEQ ID NO: 20983 - RNA, 21 nt, synthetic construct
  source 1..21: mol_type = other RNA
ctcagtgttcactaaggattc

SEQ ID NO: 20984 - RNA, 21 nt, synthetic construct
  source 1..21: mol_type = other RNA
ctcagtttggggttgctgtgt

SEQ ID NO: 20985 - RNA, 21 nt, synthetic construct
  source 1..21: mol_type = other RNA
ctcataaacaggcagcacaaa

SEQ ID NO: 20986 - RNA, 21 nt, synthetic construct
  source 1..21: mol_type = other RNA
ctcataatgtccaaatgggac

SEQ ID NO: 20987 - RNA, 21 nt, synthetic construct
  source 1..21: mol_type = other RNA
ctcatcaactgctggcagttg

SEQ ID NO: 20988 - RNA, 21 nt, synthetic construct
  source 1..21: mol_type = other RNA
ctcatccagaagtaaatggag

SEQ ID NO: 20989 - RNA, 21 nt, synthetic construct
  source 1..21: mol_type = other RNA
ctcatgtgcagtcactgtgtg

SEQ ID NO: 20990 - RNA, 21 nt, synthetic construct
  source 1..21: mol_type = other RNA
ctcattacgttttagatggga

SEQ ID NO: 20991 - RNA, 21 nt, synthetic construct
  source 1..21: mol_type = other RNA
ctcattagtagcctgactgtt

SEQ ID NO: 20992 - RNA, 21 nt, synthetic construct
  source 1..21: mol_type = other RNA
ctcattcagaatctgaagctc

SEQ ID NO: 20993 - RNA, 21 nt, synthetic construct
  source 1..21: mol_type = other RNA
ctccaaaacagaccatttacc

SEQ ID NO: 20994 - RNA, 21 nt, synthetic construct
  source 1..21: mol_type = other RNA
ctccaaacaatacactggaaa

SEQ ID NO: 20995 - RNA, 21 nt, synthetic construct
  source 1..21: mol_type = other RNA
ctccaaagccagctgcagtgg

SEQ ID NO: 20996 - RNA, 21 nt, synthetic construct
  source 1..21: mol_type = other RNA
ctccaatcaaatgacctccaa

SEQ ID NO: 20997 - RNA, 21 nt, synthetic construct
  source 1..21: mol_type = other RNA
ctccaccattcagagtgcttt

SEQ ID NO: 20998 - RNA, 21 nt, synthetic construct
  source 1..21: mol_type = other RNA
ctccactgctaccaaaaattg

SEQ ID NO: 20999 - RNA, 21 nt, synthetic construct
  source 1..21: mol_type = other RNA
ctccagaatggaagcccactg

SEQ ID NO: 21000 - RNA, 21 nt, synthetic construct
  source 1..21: mol_type = other RNA
ctccagacttttcctcacccc

SEQ ID NO: 21001 - RNA, 21 nt, synthetic construct
  source 1..21: mol_type = other RNA
ctccagctgtgttgttttctg

SEQ ID NO: 21002 - RNA, 21 nt, synthetic construct
  source 1..21: mol_type = other RNA
ctccagtcccatttggacatt

SEQ ID NO: 21003 - RNA, 21 nt, synthetic construct
  source 1..21: mol_type = other RNA
ctccagttccaaaaaccctca

SEQ ID NO: 21004 - RNA, 21 nt, synthetic construct
  source 1..21: mol_type = other RNA
ctccatggtctcaatgatgct

SEQ ID NO: 21005 - RNA, 21 nt, synthetic construct
  source 1..21: mol_type = other RNA
ctccattagccttttggtctt

SEQ ID NO: 21006 - RNA, 21 nt, synthetic construct
  source 1..21: mol_type = other RNA
ctccatttacttctggatgag

SEQ ID NO: 21007 - RNA, 21 nt, synthetic construct
  source 1..21: mol_type = other RNA
ctccattttgcaaacacttgg

SEQ ID NO: 21008 - RNA, 21 nt, synthetic construct
  source 1..21: mol_type = other RNA
ctcccaaggcaagcttacacc

SEQ ID NO: 21009 - RNA, 21 nt, synthetic construct
  source 1..21: mol_type = other RNA
ctcccatttgccagacagaac

SEQ ID NO: 21010 - RNA, 21 nt, synthetic construct
  source 1..21: mol_type = other RNA
ctccccagaaggacactcaaa

SEQ ID NO: 21011 - RNA, 21 nt, synthetic construct
  source 1..21: mol_type = other RNA
ctccccctcctcctcttccac

SEQ ID NO: 21012 - RNA, 21 nt, synthetic construct
  source 1..21: mol_type = other RNA
ctccctcaaaaccagcaacag

SEQ ID NO: 21013 - RNA, 21 nt, synthetic construct
  source 1..21: mol_type = other RNA
ctccctggtcaggcacaggaa

SEQ ID NO: 21014 - RNA, 21 nt, synthetic construct
  source 1..21: mol_type = other RNA
ctccgatgctttctgaaaggc

SEQ ID NO: 21015 - RNA, 21 nt, synthetic construct
  source 1..21: mol_type = other RNA
ctccgatttgagtgataagaa

SEQ ID NO: 21016 - RNA, 21 nt, synthetic construct
  source 1..21: mol_type = other RNA
ctcctcctcttccacaggttc

SEQ ID NO: 21017 - RNA, 21 nt, synthetic construct
  source 1..21: mol_type = other RNA
ctcctcttccacaggttcctc

SEQ ID NO: 21018 - RNA, 21 nt, synthetic construct
  source 1..21: mol_type = other RNA
ctcctgcagaaaataacatcc

SEQ ID NO: 21019 - RNA, 21 nt, synthetic construct
  source 1..21: mol_type = other RNA
ctcctgctcattcagaatctg

SEQ ID NO: 21020 - RNA, 21 nt, synthetic construct
  source 1..21: mol_type = other RNA
ctcctggaaaaaacactgtct

SEQ ID NO: 21021 - RNA, 21 nt, synthetic construct
  source 1..21: mol_type = other RNA
ctcctggtggcagctctgaac

SEQ ID NO: 21022 - RNA, 21 nt, synthetic construct
  source 1..21: mol_type = other RNA
ctcctgttcttgaaagcacct

SEQ ID NO: 21023 - RNA, 21 nt, synthetic construct
  source 1..21: mol_type = other RNA
ctccttcagatcaagaaattg

SEQ ID NO: 21024 - RNA, 21 nt, synthetic construct
  source 1..21: mol_type = other RNA
ctccttgtctcgacccttcag

SEQ ID NO: 21025 - RNA, 21 nt, synthetic construct
  source 1..21: mol_type = other RNA
ctcgaactcgcttgattttga

SEQ ID NO: 21026 - RNA, 21 nt, synthetic construct
  source 1..21: mol_type = other RNA
ctcgacccttcagaatctctt

SEQ ID NO: 21027 - RNA, 21 nt, synthetic construct
  source 1..21: mol_type = other RNA
ctcgcttgattttgaatactg

SEQ ID NO: 21028 - RNA, 21 nt, synthetic construct
  source 1..21: mol_type = other RNA
ctcgtgtttgctccttgtctc

SEQ ID NO: 21029 - RNA, 21 nt, synthetic construct
  source 1..21: mol_type = other RNA
ctcgttttcaccaagcggaat

SEQ ID NO: 21030 - RNA, 21 nt, synthetic construct
  source 1..21: mol_type = other RNA
ctctaaagctggggtgtggct

SEQ ID NO: 21031 - RNA, 21 nt, synthetic construct
  source 1..21: mol_type = other RNA
ctctaactctgagctgcctcc

SEQ ID NO: 21032 - RNA, 21 nt, synthetic construct
  source 1..21: mol_type = other RNA
ctctaaggtggcatctcttac

SEQ ID NO: 21033 - RNA, 21 nt, synthetic construct
  source 1..21: mol_type = other RNA
ctctactttcttgtgtaaagt

SEQ ID NO: 21034 - RNA, 21 nt, synthetic construct
  source 1..21: mol_type = other RNA
ctctattttcacttcccttaa

SEQ ID NO: 21035 - RNA, 21 nt, synthetic construct
  source 1..21: mol_type = other RNA
ctctcaaatcacagaagcaag

SEQ ID NO: 21036 - RNA, 21 nt, synthetic construct
  source 1..21: mol_type = other RNA
ctctcaggcagtgggcttcca

SEQ ID NO: 21037 - RNA, 21 nt, synthetic construct
  source 1..21: mol_type = other RNA
ctctccaatcaaatgacctcc

SEQ ID NO: 21038 - RNA, 21 nt, synthetic construct
  source 1..21: mol_type = other RNA
ctctccactgctaccaaaaat

SEQ ID NO: 21039 - RNA, 21 nt, synthetic construct
  source 1..21: mol_type = other RNA
ctctctcaggcagtgggcttc

SEQ ID NO: 21040 - RNA, 21 nt, synthetic construct
  source 1..21: mol_type = other RNA
ctctctctgggctccttcaga

SEQ ID NO: 21041 - RNA, 21 nt, synthetic construct
  source 1..21: mol_type = other RNA
ctctctgggctccttcagatc

SEQ ID NO: 21042 - RNA, 21 nt, synthetic construct
  source 1..21: mol_type = other RNA
ctctgaaactaggtgtgtatt

SEQ ID NO: 21043 - RNA, 21 nt, synthetic construct
  source 1..21: mol_type = other RNA
ctctgaacggtatttaaaaca

SEQ ID NO: 21044 - RNA, 21 nt, synthetic construct
  source 1..21: mol_type = other RNA
ctctgaagcctgttgattcaa

SEQ ID NO: 21045 - RNA, 21 nt, synthetic construct
  source 1..21: mol_type = other RNA
ctctgaatggtggagttttag

SEQ ID NO: 21046 - RNA, 21 nt, synthetic construct
  source 1..21: mol_type = other RNA
ctctgagctgcctccaaagcc

SEQ ID NO: 21047 - RNA, 21 nt, synthetic construct
  source 1..21: mol_type = other RNA
ctctggattttcaggcccact

SEQ ID NO: 21048 - RNA, 21 nt, synthetic construct
  source 1..21: mol_type = other RNA
ctctggctacaaagctccaga

SEQ ID NO: 21049 - RNA, 21 nt, synthetic construct
  source 1..21: mol_type = other RNA
ctctgggaaggtggtgcctca

SEQ ID NO: 21050 - RNA, 21 nt, synthetic construct
  source 1..21: mol_type = other RNA
ctctgggatggttgtgtttgt

SEQ ID NO: 21051 - RNA, 21 nt, synthetic construct
  source 1..21: mol_type = other RNA
ctctgggctccttcagatcaa

SEQ ID NO: 21052 - RNA, 21 nt, synthetic construct
  source 1..21: mol_type = other RNA
ctcttacagaagcaagaacag

SEQ ID NO: 21053 - RNA, 21 nt, synthetic construct
  source 1..21: mol_type = other RNA
ctcttactctcaaatcacaga

SEQ ID NO: 21054 - RNA, 21 nt, synthetic construct
  source 1..21: mol_type = other RNA
ctcttccacaggttcctcagc

SEQ ID NO: 21055 - RNA, 21 nt, synthetic construct
  source 1..21: mol_type = other RNA
ctcttccgtggaacacacaca

SEQ ID NO: 21056 - RNA, 21 nt, synthetic construct
  source 1..21: mol_type = other RNA
ctcttgctctttgtttctcat

SEQ ID NO: 21057 - RNA, 21 nt, synthetic construct
  source 1..21: mol_type = other RNA
ctcttgcttagttaccttttt

SEQ ID NO: 21058 - RNA, 21 nt, synthetic construct
  source 1..21: mol_type = other RNA
ctctttcaaaagttattatgg

SEQ ID NO: 21059 - RNA, 21 nt, synthetic construct
  source 1..21: mol_type = other RNA
ctctttgctgatcattgttgc

SEQ ID NO: 21060 - RNA, 21 nt, synthetic construct
  source 1..21: mol_type = other RNA
ctctttgttgaaaatgaaatc

SEQ ID NO: 21061 - RNA, 21 nt, synthetic construct
  source 1..21: mol_type = other RNA
ctctttgtttctcatcaactg

SEQ ID NO: 21062 - RNA, 21 nt, synthetic construct
  source 1..21: mol_type = other RNA
ctcttttgctgcacattatca

SEQ ID NO: 21063 - RNA, 21 nt, synthetic construct
  source 1..21: mol_type = other RNA
ctgaaaaacttatgtccccag

SEQ ID NO: 21064 - RNA, 21 nt, synthetic construct
  source 1..21: mol_type = other RNA
ctgaaaatccagagcttcaga

SEQ ID NO: 21065 - RNA, 21 nt, synthetic construct
  source 1..21: mol_type = other RNA
ctgaaaccaggatggattgaa

SEQ ID NO: 21066 - RNA, 21 nt, synthetic construct
  source 1..21: mol_type = other RNA
ctgaaactaggtgtgtattgt

SEQ ID NO: 21067 - RNA, 21 nt, synthetic construct
  source 1..21: mol_type = other RNA
ctgaaaggaacaggtatttag

SEQ ID NO: 21068 - RNA, 21 nt, synthetic construct
  source 1..21: mol_type = other RNA
ctgaaaggcctcagaataatt

SEQ ID NO: 21069 - RNA, 21 nt, synthetic construct
  source 1..21: mol_type = other RNA
ctgaacagaattcttcaccag

SEQ ID NO: 21070 - RNA, 21 nt, synthetic construct
  source 1..21: mol_type = other RNA
ctgaacggtatttaaaacaaa

SEQ ID NO: 21071 - RNA, 21 nt, synthetic construct
  source 1..21: mol_type = other RNA
ctgaactttttgcaggaaaca

SEQ ID NO: 21072 - RNA, 21 nt, synthetic construct
  source 1..21: mol_type = other RNA
ctgaagaagttgtttgctgct

SEQ ID NO: 21073 - RNA, 21 nt, synthetic construct
  source 1..21: mol_type = other RNA
ctgaagaattgatggcagtga

SEQ ID NO: 21074 - RNA, 21 nt, synthetic construct
  source 1..21: mol_type = other RNA
ctgaagcagtttcacgccaag

SEQ ID NO: 21075 - RNA, 21 nt, synthetic construct
  source 1..21: mol_type = other RNA
ctgaagcctgttgattcaagt

SEQ ID NO: 21076 - RNA, 21 nt, synthetic construct
  source 1..21: mol_type = other RNA
ctgaagctctggattttcagg

SEQ ID NO: 21077 - RNA, 21 nt, synthetic construct
  source 1..21: mol_type = other RNA
ctgaagcttgttgtgacttct

SEQ ID NO: 21078 - RNA, 21 nt, synthetic construct
  source 1..21: mol_type = other RNA
ctgaaggaagctgaggaacct

SEQ ID NO: 21079 - RNA, 21 nt, synthetic construct
  source 1..21: mol_type = other RNA
ctgaaggagcccagagagaga

SEQ ID NO: 21080 - RNA, 21 nt, synthetic construct
  source 1..21: mol_type = other RNA
ctgaagggtcgagacaaggag

SEQ ID NO: 21081 - RNA, 21 nt, synthetic construct
  source 1..21: mol_type = other RNA
ctgaatgagcaggaggggaaa

SEQ ID NO: 21082 - RNA, 21 nt, synthetic construct
  source 1..21: mol_type = other RNA
ctgaatggtggagttttagaa

SEQ ID NO: 21083 - RNA, 21 nt, synthetic construct
  source 1..21: mol_type = other RNA
ctgacattggtcttgttttct

SEQ ID NO: 21084 - RNA, 21 nt, synthetic construct
  source 1..21: mol_type = other RNA
ctgacatttcaacttttactt

SEQ ID NO: 21085 - RNA, 21 nt, synthetic construct
  source 1..21: mol_type = other RNA
ctgaccagggaggaagtcaca

SEQ ID NO: 21086 - RNA, 21 nt, synthetic construct
  source 1..21: mol_type = other RNA
ctgactataaggggaatttct

SEQ ID NO: 21087 - RNA, 21 nt, synthetic construct
  source 1..21: mol_type = other RNA
ctgactatggcaagactcagt

SEQ ID NO: 21088 - RNA, 21 nt, synthetic construct
  source 1..21: mol_type = other RNA
ctgactgttaatggcatttat

SEQ ID NO: 21089 - RNA, 21 nt, synthetic construct
  source 1..21: mol_type = other RNA
ctgactttacacaagaaagta

SEQ ID NO: 21090 - RNA, 21 nt, synthetic construct
  source 1..21: mol_type = other RNA
ctgagaaaacaagaccaatgt

SEQ ID NO: 21091 - RNA, 21 nt, synthetic construct
  source 1..21: mol_type = other RNA
ctgagagagctcatccagaag

SEQ ID NO: 21092 - RNA, 21 nt, synthetic construct
  source 1..21: mol_type = other RNA
ctgagcaagttgcgcagcttg

SEQ ID NO: 21093 - RNA, 21 nt, synthetic construct
  source 1..21: mol_type = other RNA
ctgagccattttcaaactcac

SEQ ID NO: 21094 - RNA, 21 nt, synthetic construct
  source 1..21: mol_type = other RNA
ctgagctgcctccaaagccag

SEQ ID NO: 21095 - RNA, 21 nt, synthetic construct
  source 1..21: mol_type = other RNA
ctgagctttgcttgaagtaag

SEQ ID NO: 21096 - RNA, 21 nt, synthetic construct
  source 1..21: mol_type = other RNA
ctgaggaacctgtggaagagg

SEQ ID NO: 21097 - RNA, 21 nt, synthetic construct
  source 1..21: mol_type = other RNA
ctgaggcaccaccttcccaga

SEQ ID NO: 21098 - RNA, 21 nt, synthetic construct
  source 1..21: mol_type = other RNA
ctgaggcctttcagaaagcat

SEQ ID NO: 21099 - RNA, 21 nt, synthetic construct
  source 1..21: mol_type = other RNA
ctgaggtatgcgatgggtgag

SEQ ID NO: 21100 - RNA, 21 nt, synthetic construct
  source 1..21: mol_type = other RNA
ctgagtcttgccatagtcaga

SEQ ID NO: 21101 - RNA, 21 nt, synthetic construct
  source 1..21: mol_type = other RNA
ctgagtgtgacttcctccctg

SEQ ID NO: 21102 - RNA, 21 nt, synthetic construct
  source 1..21: mol_type = other RNA
ctgataatgccagtaaactag

SEQ ID NO: 21103 - RNA, 21 nt, synthetic construct
  source 1..21: mol_type = other RNA
ctgataccatcacctcccatt

SEQ ID NO: 21104 - RNA, 21 nt, synthetic construct
  source 1..21: mol_type = other RNA
ctgatcattgttgctttgggg

SEQ ID NO: 21105 - RNA, 21 nt, synthetic construct
  source 1..21: mol_type = other RNA
ctgatgatgctgataatgcca

SEQ ID NO: 21106 - RNA, 21 nt, synthetic construct
  source 1..21: mol_type = other RNA
ctgatggaacaggatagaacc

SEQ ID NO: 21107 - RNA, 21 nt, synthetic construct
  source 1..21: mol_type = other RNA
ctgattttcaccatgaaaaca

SEQ ID NO: 21108 - RNA, 21 nt, synthetic construct
  source 1..21: mol_type = other RNA
ctgatttttgttgttgtagtt

SEQ ID NO: 21109 - RNA, 21 nt, synthetic construct
  source 1..21: mol_type = other RNA
ctgcaaaaagttcaggatgtg

SEQ ID NO: 21110 - RNA, 21 nt, synthetic construct
  source 1..21: mol_type = other RNA
ctgcaagatgggaaatcatat

SEQ ID NO: 21111 - RNA, 21 nt, synthetic construct
  source 1..21: mol_type = other RNA
ctgcaagctgtgataatgtgc

SEQ ID NO: 21112 - RNA, 21 nt, synthetic construct
  source 1..21: mol_type = other RNA
ctgcaatgctaaatacctgtt

SEQ ID NO: 21113 - RNA, 21 nt, synthetic construct
  source 1..21: mol_type = other RNA
ctgcacatgagcttttggtaa

SEQ ID NO: 21114 - RNA, 21 nt, synthetic construct
  source 1..21: mol_type = other RNA
ctgcacattatcacagcttgc

SEQ ID NO: 21115 - RNA, 21 nt, synthetic construct
  source 1..21: mol_type = other RNA
ctgcaccgcaatggaaacaca

SEQ ID NO: 21116 - RNA, 21 nt, synthetic construct
  source 1..21: mol_type = other RNA
ctgcagaaaataacatccagg

SEQ ID NO: 21117 - RNA, 21 nt, synthetic construct
  source 1..21: mol_type = other RNA
ctgcagaacttgatagccaca

SEQ ID NO: 21118 - RNA, 21 nt, synthetic construct
  source 1..21: mol_type = other RNA
ctgcagcagtggtttgtctag

SEQ ID NO: 21119 - RNA, 21 nt, synthetic construct
  source 1..21: mol_type = other RNA
ctgcagctggctttggaggca

SEQ ID NO: 21120 - RNA, 21 nt, synthetic construct
  source 1..21: mol_type = other RNA
ctgcaggagatgggcatatct

SEQ ID NO: 21121 - RNA, 21 nt, synthetic construct
  source 1..21: mol_type = other RNA
ctgcagggacaatgactgttc

SEQ ID NO: 21122 - RNA, 21 nt, synthetic construct
  source 1..21: mol_type = other RNA
ctgcagtctgtatgtcattcc

SEQ ID NO: 21123 - RNA, 21 nt, synthetic construct
  source 1..21: mol_type = other RNA
ctgcagtgggcctgaaaatcc

SEQ ID NO: 21124 - RNA, 21 nt, synthetic construct
  source 1..21: mol_type = other RNA
ctgcagtggtgagtgaggcct

SEQ ID NO: 21125 - RNA, 21 nt, synthetic construct
  source 1..21: mol_type = other RNA
ctgcagttatgtgttgaaaaa

SEQ ID NO: 21126 - RNA, 21 nt, synthetic construct
  source 1..21: mol_type = other RNA
ctgcatacatgtgtagatgga

SEQ ID NO: 21127 - RNA, 21 nt, synthetic construct
  source 1..21: mol_type = other RNA
ctgcattttcttgggctacag

SEQ ID NO: 21128 - RNA, 21 nt, synthetic construct
  source 1..21: mol_type = other RNA
ctgccaccaggagcttgcaaa

SEQ ID NO: 21129 - RNA, 21 nt, synthetic construct
  source 1..21: mol_type = other RNA
ctgccactaccacaccaccac

SEQ ID NO: 21130 - RNA, 21 nt, synthetic construct
  source 1..21: mol_type = other RNA
ctgccagcagttgatgagaaa

SEQ ID NO: 21131 - RNA, 21 nt, synthetic construct
  source 1..21: mol_type = other RNA
ctgccatcaattcttcagtat

SEQ ID NO: 21132 - RNA, 21 nt, synthetic construct
  source 1..21: mol_type = other RNA
ctgccctgaggtatgcgatgg

SEQ ID NO: 21133 - RNA, 21 nt, synthetic construct
  source 1..21: mol_type = other RNA
ctgcccttgattcatttcaac

SEQ ID NO: 21134 - RNA, 21 nt, synthetic construct
  source 1..21: mol_type = other RNA
ctgcctccaaagccagctgca

SEQ ID NO: 21135 - RNA, 21 nt, synthetic construct
  source 1..21: mol_type = other RNA
ctgcctcttccgtggaacaca

SEQ ID NO: 21136 - RNA, 21 nt, synthetic construct
  source 1..21: mol_type = other RNA
ctgcctgagagagctcatcca

SEQ ID NO: 21137 - RNA, 21 nt, synthetic construct
  source 1..21: mol_type = other RNA
ctgcctgtttatgaggcttat

SEQ ID NO: 21138 - RNA, 21 nt, synthetic construct
  source 1..21: mol_type = other RNA
ctgccttgtttttaagtaata

SEQ ID NO: 21139 - RNA, 21 nt, synthetic construct
  source 1..21: mol_type = other RNA
ctgcgcaacttgctcagcaaa

SEQ ID NO: 21140 - RNA, 21 nt, synthetic construct
  source 1..21: mol_type = other RNA
ctgctaccaaaaattggtggg

SEQ ID NO: 21141 - RNA, 21 nt, synthetic construct
  source 1..21: mol_type = other RNA
ctgctcattcagaatctgaag

SEQ ID NO: 21142 - RNA, 21 nt, synthetic construct
  source 1..21: mol_type = other RNA
ctgctccatggtctcaatgat

SEQ ID NO: 21143 - RNA, 21 nt, synthetic construct
  source 1..21: mol_type = other RNA
ctgctcctgttcttgaaagca

SEQ ID NO: 21144 - RNA, 21 nt, synthetic construct
  source 1..21: mol_type = other RNA
ctgctctaaagctggggtgtg

SEQ ID NO: 21145 - RNA, 21 nt, synthetic construct
  source 1..21: mol_type = other RNA
ctgctctaaggtggcatctct

SEQ ID NO: 21146 - RNA, 21 nt, synthetic construct
  source 1..21: mol_type = other RNA
ctgctctttgttgaaaatgaa

SEQ ID NO: 21147 - RNA, 21 nt, synthetic construct
  source 1..21: mol_type = other RNA
ctgctgcagaacttgatagcc

SEQ ID NO: 21148 - RNA, 21 nt, synthetic construct
  source 1..21: mol_type = other RNA
ctgctggaacctgaacagaat

SEQ ID NO: 21149 - RNA, 21 nt, synthetic construct
  source 1..21: mol_type = other RNA
ctgctggcagttgtcctgtag

SEQ ID NO: 21150 - RNA, 21 nt, synthetic construct
  source 1..21: mol_type = other RNA
ctgctgttcttgcttctgtaa

SEQ ID NO: 21151 - RNA, 21 nt, synthetic construct
  source 1..21: mol_type = other RNA
ctgctgttgctggttttgagg

SEQ ID NO: 21152 - RNA, 21 nt, synthetic construct
  source 1..21: mol_type = other RNA
ctgcttcagatgctgctccat

SEQ ID NO: 21153 - RNA, 21 nt, synthetic construct
  source 1..21: mol_type = other RNA
ctgcttctgttctcaataatt

SEQ ID NO: 21154 - RNA, 21 nt, synthetic construct
  source 1..21: mol_type = other RNA
ctgctttcacctggatttctt

SEQ ID NO: 21155 - RNA, 21 nt, synthetic construct
  source 1..21: mol_type = other RNA
ctggaaaaaacactgtctcaa

SEQ ID NO: 21156 - RNA, 21 nt, synthetic construct
  source 1..21: mol_type = other RNA
ctggaaattccaacatgcctg

SEQ ID NO: 21157 - RNA, 21 nt, synthetic construct
  source 1..21: mol_type = other RNA
ctggaacctgaacagaattct

SEQ ID NO: 21158 - RNA, 21 nt, synthetic construct
  source 1..21: mol_type = other RNA
ctggagatgttggtccactgt

SEQ ID NO: 21159 - RNA, 21 nt, synthetic construct
  source 1..21: mol_type = other RNA
ctggagcacaagtcacaaatg

SEQ ID NO: 21160 - RNA, 21 nt, synthetic construct
  source 1..21: mol_type = other RNA
ctggagctttgtagccagagg

SEQ ID NO: 21161 - RNA, 21 nt, synthetic construct
  source 1..21: mol_type = other RNA
ctggaggaagtacagaatata

SEQ ID NO: 21162 - RNA, 21 nt, synthetic construct
  source 1..21: mol_type = other RNA
ctggagtatttcctctttatt

SEQ ID NO: 21163 - RNA, 21 nt, synthetic construct
  source 1..21: mol_type = other RNA
ctggataatattgagacagtg

SEQ ID NO: 21164 - RNA, 21 nt, synthetic construct
  source 1..21: mol_type = other RNA
ctggatgagctctctcaggca

SEQ ID NO: 21165 - RNA, 21 nt, synthetic construct
  source 1..21: mol_type = other RNA
ctggatgcaagccacatgcct

SEQ ID NO: 21166 - RNA, 21 nt, synthetic construct
  source 1..21: mol_type = other RNA
ctggatgttattttctgcagg

SEQ ID NO: 21167 - RNA, 21 nt, synthetic construct
  source 1..21: mol_type = other RNA
ctggatttctttcttggctta

SEQ ID NO: 21168 - RNA, 21 nt, synthetic construct
  source 1..21: mol_type = other RNA
ctggattttcaggcccactgc

SEQ ID NO: 21169 - RNA, 21 nt, synthetic construct
  source 1..21: mol_type = other RNA
ctggcaaatgggaggtgatgg

SEQ ID NO: 21170 - RNA, 21 nt, synthetic construct
  source 1..21: mol_type = other RNA
ctggcacttacctacacatct

SEQ ID NO: 21171 - RNA, 21 nt, synthetic construct
  source 1..21: mol_type = other RNA
ctggcagttgtcctgtagctc

SEQ ID NO: 21172 - RNA, 21 nt, synthetic construct
  source 1..21: mol_type = other RNA
ctggcattatcagcatcatca

SEQ ID NO: 21173 - RNA, 21 nt, synthetic construct
  source 1..21: mol_type = other RNA
ctggccaaagaatgatccttc

SEQ ID NO: 21174 - RNA, 21 nt, synthetic construct
  source 1..21: mol_type = other RNA
ctggccctgacatttcaactt

SEQ ID NO: 21175 - RNA, 21 nt, synthetic construct
  source 1..21: mol_type = other RNA
ctggctacaaagctccagaat

SEQ ID NO: 21176 - RNA, 21 nt, synthetic construct
  source 1..21: mol_type = other RNA
ctggcttcccttcatacaggg

SEQ ID NO: 21177 - RNA, 21 nt, synthetic construct
  source 1..21: mol_type = other RNA
ctggctttggaggcagctcag

SEQ ID NO: 21178 - RNA, 21 nt, synthetic construct
  source 1..21: mol_type = other RNA
ctgggaaggtggtgcctcagg

SEQ ID NO: 21179 - RNA, 21 nt, synthetic construct
  source 1..21: mol_type = other RNA
ctgggatggttgtgtttgtgc

SEQ ID NO: 21180 - RNA, 21 nt, synthetic construct
  source 1..21: mol_type = other RNA
ctgggctccttcagatcaaga

SEQ ID NO: 21181 - RNA, 21 nt, synthetic construct
  source 1..21: mol_type = other RNA
ctggggacataagtttttcag

SEQ ID NO: 21182 - RNA, 21 nt, synthetic construct
  source 1..21: mol_type = other RNA
ctggggaggggtctgagtgtg

SEQ ID NO: 21183 - RNA, 21 nt, synthetic construct
  source 1..21: mol_type = other RNA
ctggggggctcccaaggcaag

SEQ ID NO: 21184 - RNA, 21 nt, synthetic construct
  source 1..21: mol_type = other RNA
ctggggtgtggctatcaagtt

SEQ ID NO: 21185 - RNA, 21 nt, synthetic construct
  source 1..21: mol_type = other RNA
ctgggtgtaagcttgccttgg

SEQ ID NO: 21186 - RNA, 21 nt, synthetic construct
  source 1..21: mol_type = other RNA
ctggtcaacaagctgcgcaac

SEQ ID NO: 21187 - RNA, 21 nt, synthetic construct
  source 1..21: mol_type = other RNA
ctggtcaggcacaggaaaaac

SEQ ID NO: 21188 - RNA, 21 nt, synthetic construct
  source 1..21: mol_type = other RNA
ctggtgaaatctttaactgca

SEQ ID NO: 21189 - RNA, 21 nt, synthetic construct
  source 1..21: mol_type = other RNA
ctggtgaagaattctgttcag

SEQ ID NO: 21190 - RNA, 21 nt, synthetic construct
  source 1..21: mol_type = other RNA
ctggtggcagctctgaacggt

SEQ ID NO: 21191 - RNA, 21 nt, synthetic construct
  source 1..21: mol_type = other RNA
ctggtggtgctgtgtgcatac

SEQ ID NO: 21192 - RNA, 21 nt, synthetic construct
  source 1..21: mol_type = other RNA
ctggtgtgagggtttttggaa

SEQ ID NO: 21193 - RNA, 21 nt, synthetic construct
  source 1..21: mol_type = other RNA
ctggtttcagatagtgctgtg

SEQ ID NO: 21194 - RNA, 21 nt, synthetic construct
  source 1..21: mol_type = other RNA
ctggtttctgaaaggaacagg

SEQ ID NO: 21195 - RNA, 21 nt, synthetic construct
  source 1..21: mol_type = other RNA
ctggttttgagggagatgtga

SEQ ID NO: 21196 - RNA, 21 nt, synthetic construct
  source 1..21: mol_type = other RNA
ctgtaagagatgccaccttag

SEQ ID NO: 21197 - RNA, 21 nt, synthetic construct
  source 1..21: mol_type = other RNA
ctgtaccttgggactgccctt

SEQ ID NO: 21198 - RNA, 21 nt, synthetic construct
  source 1..21: mol_type = other RNA
ctgtacttcctccagtcccat

SEQ ID NO: 21199 - RNA, 21 nt, synthetic construct
  source 1..21: mol_type = other RNA
ctgtagaactgaagcttgttg

SEQ ID NO: 21200 - RNA, 21 nt, synthetic construct
  source 1..21: mol_type = other RNA
ctgtagcaccattaggcatta

SEQ ID NO: 21201 - RNA, 21 nt, synthetic construct
  source 1..21: mol_type = other RNA
ctgtagcccaagaaaatgcag

SEQ ID NO: 21202 - RNA, 21 nt, synthetic construct
  source 1..21: mol_type = other RNA
ctgtagctctccactgctacc

SEQ ID NO: 21203 - RNA, 21 nt, synthetic construct
  source 1..21: mol_type = other RNA
ctgtatgaagggaagccagaa

SEQ ID NO: 21204 - RNA, 21 nt, synthetic construct
  source 1..21: mol_type = other RNA
ctgtatgcacacagcaccacc

SEQ ID NO: 21205 - RNA, 21 nt, synthetic construct
  source 1..21: mol_type = other RNA
ctgtatgtcattcctgttcac

SEQ ID NO: 21206 - RNA, 21 nt, synthetic construct
  source 1..21: mol_type = other RNA
ctgtattttgcatgcacttga

SEQ ID NO: 21207 - RNA, 21 nt, synthetic construct
  source 1..21: mol_type = other RNA
ctgtcaagactcaatatgatt

SEQ ID NO: 21208 - RNA, 21 nt, synthetic construct
  source 1..21: mol_type = other RNA
ctgtctcaatattatccagat

SEQ ID NO: 21209 - RNA, 21 nt, synthetic construct
  source 1..21: mol_type = other RNA
ctgtctggcaaatgggaggtg

SEQ ID NO: 21210 - RNA, 21 nt, synthetic construct
  source 1..21: mol_type = other RNA
ctgtgaagaagatcttgcttt

SEQ ID NO: 21211 - RNA, 21 nt, synthetic construct
  source 1..21: mol_type = other RNA
ctgtgactggccctgacattt

SEQ ID NO: 21212 - RNA, 21 nt, synthetic construct
  source 1..21: mol_type = other RNA
ctgtgagatcactcacccatc

SEQ ID NO: 21213 - RNA, 21 nt, synthetic construct
  source 1..21: mol_type = other RNA
ctgtgagttctgtagcccaag

SEQ ID NO: 21214 - RNA, 21 nt, synthetic construct
  source 1..21: mol_type = other RNA
ctgtgataatgtgcagcaaaa

SEQ ID NO: 21215 - RNA, 21 nt, synthetic construct
  source 1..21: mol_type = other RNA
ctgtgatgctgatgatgctga

SEQ ID NO: 21216 - RNA, 21 nt, synthetic construct
  source 1..21: mol_type = other RNA
ctgtgatttgagagtaagagc

SEQ ID NO: 21217 - RNA, 21 nt, synthetic construct
  source 1..21: mol_type = other RNA
ctgtgcatctgactatggcaa

SEQ ID NO: 21218 - RNA, 21 nt, synthetic construct
  source 1..21: mol_type = other RNA
ctgtgcctgaccagggaggaa

SEQ ID NO: 21219 - RNA, 21 nt, synthetic construct
  source 1..21: mol_type = other RNA
ctgtgcggaattgatctgccc

SEQ ID NO: 21220 - RNA, 21 nt, synthetic construct
  source 1..21: mol_type = other RNA
ctgtgcgttttattcctccat

SEQ ID NO: 21221 - RNA, 21 nt, synthetic construct
  source 1..21: mol_type = other RNA
ctgtggaagaggaggaggggg

SEQ ID NO: 21222 - RNA, 21 nt, synthetic construct
  source 1..21: mol_type = other RNA
ctgtgtgcatacaggcatgtg

SEQ ID NO: 21223 - RNA, 21 nt, synthetic construct
  source 1..21: mol_type = other RNA
ctgtgtggcactagatttcat

SEQ ID NO: 21224 - RNA, 21 nt, synthetic construct
  source 1..21: mol_type = other RNA
ctgtgttgggggcacaagatc

SEQ ID NO: 21225 - RNA, 21 nt, synthetic construct
  source 1..21: mol_type = other RNA
ctgtgttgttttctgggtgta

SEQ ID NO: 21226 - RNA, 21 nt, synthetic construct
  source 1..21: mol_type = other RNA
ctgtgtttgctgctgttcttg

SEQ ID NO: 21227 - RNA, 21 nt, synthetic construct
  source 1..21: mol_type = other RNA
ctgttaatggcatttatgtga

SEQ ID NO: 21228 - RNA, 21 nt, synthetic construct
  source 1..21: mol_type = other RNA
ctgttcacacaattattctga

SEQ ID NO: 21229 - RNA, 21 nt, synthetic construct
  source 1..21: mol_type = other RNA
ctgttcaggttccagcagcaa

SEQ ID NO: 21230 - RNA, 21 nt, synthetic construct
  source 1..21: mol_type = other RNA
ctgttccatcaggcttgcttc

SEQ ID NO: 21231 - RNA, 21 nt, synthetic construct
  source 1..21: mol_type = other RNA
ctgttccattgtgttctgaga

SEQ ID NO: 21232 - RNA, 21 nt, synthetic construct
  source 1..21: mol_type = other RNA
ctgttcctttcagaaaccaga

SEQ ID NO: 21233 - RNA, 21 nt, synthetic construct
  source 1..21: mol_type = other RNA
ctgttcttgaaagcacctgtg

SEQ ID NO: 21234 - RNA, 21 nt, synthetic construct
  source 1..21: mol_type = other RNA
ctgttcttgcttctgtaagag

SEQ ID NO: 21235 - RNA, 21 nt, synthetic construct
  source 1..21: mol_type = other RNA
ctgttctttattctctgaaac

SEQ ID NO: 21236 - RNA, 21 nt, synthetic construct
  source 1..21: mol_type = other RNA
ctgttcttttggttggtgtct

SEQ ID NO: 21237 - RNA, 21 nt, synthetic construct
  source 1..21: mol_type = other RNA
ctgttgattcaagtgctgttt

SEQ ID NO: 21238 - RNA, 21 nt, synthetic construct
  source 1..21: mol_type = other RNA
ctgttgccctcaacatggttg

SEQ ID NO: 21239 - RNA, 21 nt, synthetic construct
  source 1..21: mol_type = other RNA
ctgttgctggttttgagggag

SEQ ID NO: 21240 - RNA, 21 nt, synthetic construct
  source 1..21: mol_type = other RNA
ctgtttatgaggcttatgttg

SEQ ID NO: 21241 - RNA, 21 nt, synthetic construct
  source 1..21: mol_type = other RNA
ctgtttcaacactggggacat

SEQ ID NO: 21242 - RNA, 21 nt, synthetic construct
  source 1..21: mol_type = other RNA
ctgttttggagaagtgcacct

SEQ ID NO: 21243 - RNA, 21 nt, synthetic construct
  source 1..21: mol_type = other RNA
cttaaaaacaaggcagtgcta

SEQ ID NO: 21244 - RNA, 21 nt, synthetic construct
  source 1..21: mol_type = other RNA
cttaaaagtgttgtgttactt

SEQ ID NO: 21245 - RNA, 21 nt, synthetic construct
  source 1..21: mol_type = other RNA
cttaattggcctgtgcatctg

SEQ ID NO: 21246 - RNA, 21 nt, synthetic construct
  source 1..21: mol_type = other RNA
cttacacccagaaaacaacac

SEQ ID NO: 21247 - RNA, 21 nt, synthetic construct
  source 1..21: mol_type = other RNA
cttacagaagcaagaacagca

SEQ ID NO: 21248 - RNA, 21 nt, synthetic construct
  source 1..21: mol_type = other RNA
cttaccccgaagttacgtctt

SEQ ID NO: 21249 - RNA, 21 nt, synthetic construct
  source 1..21: mol_type = other RNA
cttacctacacatctgcaaga

SEQ ID NO: 21250 - RNA, 21 nt, synthetic construct
  source 1..21: mol_type = other RNA
cttactctcaaatcacagaag

SEQ ID NO: 21251 - RNA, 21 nt, synthetic construct
  source 1..21: mol_type = other RNA
cttacttcaagcaaagctcag

SEQ ID NO: 21252 - RNA, 21 nt, synthetic construct
  source 1..21: mol_type = other RNA
cttagagcagcatgcttttga

SEQ ID NO: 21253 - RNA, 21 nt, synthetic construct
  source 1..21: mol_type = other RNA
cttagtctgttgccctcaaca

SEQ ID NO: 21254 - RNA, 21 nt, synthetic construct
  source 1..21: mol_type = other RNA
cttagtgaacactgagctttg

SEQ ID NO: 21255 - RNA, 21 nt, synthetic construct
  source 1..21: mol_type = other RNA
cttagttacctttttccatgt

SEQ ID NO: 21256 - RNA, 21 nt, synthetic construct
  source 1..21: mol_type = other RNA
cttatagtcagaccatgaaat

SEQ ID NO: 21257 - RNA, 21 nt, synthetic construct
  source 1..21: mol_type = other RNA
cttatcactcaaatcggagac

SEQ ID NO: 21258 - RNA, 21 nt, synthetic construct
  source 1..21: mol_type = other RNA
cttatggtcaaataacgactt

SEQ ID NO: 21259 - RNA, 21 nt, synthetic construct
  source 1..21: mol_type = other RNA
cttatgtccccagtgttgaaa

SEQ ID NO: 21260 - RNA, 21 nt, synthetic construct
  source 1..21: mol_type = other RNA
cttatgttgcaaaaggtgtga

SEQ ID NO: 21261 - RNA, 21 nt, synthetic construct
  source 1..21: mol_type = other RNA
cttcaagcaaagctcagtgtt

SEQ ID NO: 21262 - RNA, 21 nt, synthetic construct
  source 1..21: mol_type = other RNA
cttcaattcaatccatcctgg

SEQ ID NO: 21263 - RNA, 21 nt, synthetic construct
  source 1..21: mol_type = other RNA
cttcacaggtgctttcaagaa

SEQ ID NO: 21264 - RNA, 21 nt, synthetic construct
  source 1..21: mol_type = other RNA
cttcaccagacgctagctttg

SEQ ID NO: 21265 - RNA, 21 nt, synthetic construct
  source 1..21: mol_type = other RNA
cttcagaaaagacaccaacca

SEQ ID NO: 21266 - RNA, 21 nt, synthetic construct
  source 1..21: mol_type = other RNA
cttcagaaggaaaaagcactc

SEQ ID NO: 21267 - RNA, 21 nt, synthetic construct
  source 1..21: mol_type = other RNA
cttcagaatctcttgctcttt

SEQ ID NO: 21268 - RNA, 21 nt, synthetic construct
  source 1..21: mol_type = other RNA
cttcagagactgagccatttt

SEQ ID NO: 21269 - RNA, 21 nt, synthetic construct
  source 1..21: mol_type = other RNA
cttcagatcaagaaattgaaa

SEQ ID NO: 21270 - RNA, 21 nt, synthetic construct
  source 1..21: mol_type = other RNA
cttcagatgctgctccatggt

SEQ ID NO: 21271 - RNA, 21 nt, synthetic construct
  source 1..21: mol_type = other RNA
cttcagattctgaatgagcag

SEQ ID NO: 21272 - RNA, 21 nt, synthetic construct
  source 1..21: mol_type = other RNA
cttcagtatcaacccaatctc

SEQ ID NO: 21273 - RNA, 21 nt, synthetic construct
  source 1..21: mol_type = other RNA
cttcagttctacagggatata

SEQ ID NO: 21274 - RNA, 21 nt, synthetic construct
  source 1..21: mol_type = other RNA
cttcatacagggtattccata

SEQ ID NO: 21275 - RNA, 21 nt, synthetic construct
  source 1..21: mol_type = other RNA
cttccaaattactagatactc

SEQ ID NO: 21276 - RNA, 21 nt, synthetic construct
  source 1..21: mol_type = other RNA
cttccacaggttcctcagctt

SEQ ID NO: 21277 - RNA, 21 nt, synthetic construct
  source 1..21: mol_type = other RNA
cttccactttagtctggccaa

SEQ ID NO: 21278 - RNA, 21 nt, synthetic construct
  source 1..21: mol_type = other RNA
cttccattctggagctttgta

SEQ ID NO: 21279 - RNA, 21 nt, synthetic construct
  source 1..21: mol_type = other RNA
cttcccagagtcctaatccat

SEQ ID NO: 21280 - RNA, 21 nt, synthetic construct
  source 1..21: mol_type = other RNA
cttcccttaaaagtgttgtgt

SEQ ID NO: 21281 - RNA, 21 nt, synthetic construct
  source 1..21: mol_type = other RNA
cttcccttcatacagggtatt

SEQ ID NO: 21282 - RNA, 21 nt, synthetic construct
  source 1..21: mol_type = other RNA
cttccgtggaacacacacatg

SEQ ID NO: 21283 - RNA, 21 nt, synthetic construct
  source 1..21: mol_type = other RNA
cttcctccagtcccatttgga

SEQ ID NO: 21284 - RNA, 21 nt, synthetic construct
  source 1..21: mol_type = other RNA
cttcctccctggtcaggcaca

SEQ ID NO: 21285 - RNA, 21 nt, synthetic construct
  source 1..21: mol_type = other RNA
cttccttcagaaggaaaaagc

SEQ ID NO: 21286 - RNA, 21 nt, synthetic construct
  source 1..21: mol_type = other RNA
cttcggggccatccacaaggc

SEQ ID NO: 21287 - RNA, 21 nt, synthetic construct
  source 1..21: mol_type = other RNA
cttcggggtaagccaagaaag

SEQ ID NO: 21288 - RNA, 21 nt, synthetic construct
  source 1..21: mol_type = other RNA
cttctaaaactccaccattca

SEQ ID NO: 21289 - RNA, 21 nt, synthetic construct
  source 1..21: mol_type = other RNA
cttctccaaaacagaccattt

SEQ ID NO: 21290 - RNA, 21 nt, synthetic construct
  source 1..21: mol_type = other RNA
cttctccgatgctttctgaaa

SEQ ID NO: 21291 - RNA, 21 nt, synthetic construct
  source 1..21: mol_type = other RNA
cttctctctctgggctccttc

SEQ ID NO: 21292 - RNA, 21 nt, synthetic construct
  source 1..21: mol_type = other RNA
cttctctttgctgatcattgt

SEQ ID NO: 21293 - RNA, 21 nt, synthetic construct
  source 1..21: mol_type = other RNA
cttctgaaggaagctgaggaa

SEQ ID NO: 21294 - RNA, 21 nt, synthetic construct
  source 1..21: mol_type = other RNA
cttctgctcctgttcttgaaa

SEQ ID NO: 21295 - RNA, 21 nt, synthetic construct
  source 1..21: mol_type = other RNA
cttctggatgagctctctcag

SEQ ID NO: 21296 - RNA, 21 nt, synthetic construct
  source 1..21: mol_type = other RNA
cttctggggaggggtctgagt

SEQ ID NO: 21297 - RNA, 21 nt, synthetic construct
  source 1..21: mol_type = other RNA
cttctgtaagagatgccacct

SEQ ID NO: 21298 - RNA, 21 nt, synthetic construct
  source 1..21: mol_type = other RNA
cttctgtgatttgagagtaag

SEQ ID NO: 21299 - RNA, 21 nt, synthetic construct
  source 1..21: mol_type = other RNA
cttcttcacaggtgctttcaa

SEQ ID NO: 21300 - RNA, 21 nt, synthetic construct
  source 1..21: mol_type = other RNA
cttcttcagaaaagacaccaa

SEQ ID NO: 21301 - RNA, 21 nt, synthetic construct
  source 1..21: mol_type = other RNA
cttctttctccccctcctcct

SEQ ID NO: 21302 - RNA, 21 nt, synthetic construct
  source 1..21: mol_type = other RNA
cttgaaagcacctgtgaagaa

SEQ ID NO: 21303 - RNA, 21 nt, synthetic construct
  source 1..21: mol_type = other RNA
cttgaagtaagcaccattcat

SEQ ID NO: 21304 - RNA, 21 nt, synthetic construct
  source 1..21: mol_type = other RNA
cttgaatcaacaggcttcaga

SEQ ID NO: 21305 - RNA, 21 nt, synthetic construct
  source 1..21: mol_type = other RNA
cttgacaggtgtatccaataa

SEQ ID NO: 21306 - RNA, 21 nt, synthetic construct
  source 1..21: mol_type = other RNA
cttgaggtgttctgacattgg

SEQ ID NO: 21307 - RNA, 21 nt, synthetic construct
  source 1..21: mol_type = other RNA
cttgatacataaccatgcaaa

SEQ ID NO: 21308 - RNA, 21 nt, synthetic construct
  source 1..21: mol_type = other RNA
cttgatagccacaccccagct

SEQ ID NO: 21309 - RNA, 21 nt, synthetic construct
  source 1..21: mol_type = other RNA
cttgatctgaaggagcccaga

SEQ ID NO: 21310 - RNA, 21 nt, synthetic construct
  source 1..21: mol_type = other RNA
cttgattcatttcaacttggt

SEQ ID NO: 21311 - RNA, 21 nt, synthetic construct
  source 1..21: mol_type = other RNA
cttgatttcatggtctgacta

SEQ ID NO: 21312 - RNA, 21 nt, synthetic construct
  source 1..21: mol_type = other RNA
cttgcaaattgctgctggaac

SEQ ID NO: 21313 - RNA, 21 nt, synthetic construct
  source 1..21: mol_type = other RNA
cttgcagatgtgtaggtaagt

SEQ ID NO: 21314 - RNA, 21 nt, synthetic construct
  source 1..21: mol_type = other RNA
cttgcaggtggattctcttgc

SEQ ID NO: 21315 - RNA, 21 nt, synthetic construct
  source 1..21: mol_type = other RNA
cttgcatcacatgcaatattt

SEQ ID NO: 21316 - RNA, 21 nt, synthetic construct
  source 1..21: mol_type = other RNA
cttgcatccaggttccacctt

SEQ ID NO: 21317 - RNA, 21 nt, synthetic construct
  source 1..21: mol_type = other RNA
cttgccatagtcagatgcaca

SEQ ID NO: 21318 - RNA, 21 nt, synthetic construct
  source 1..21: mol_type = other RNA
cttgccttgggagccccccag

SEQ ID NO: 21319 - RNA, 21 nt, synthetic construct
  source 1..21: mol_type = other RNA
cttgctcagcaaaggtacttg

SEQ ID NO: 21320 - RNA, 21 nt, synthetic construct
  source 1..21: mol_type = other RNA
cttgctctttgtttctcatca

SEQ ID NO: 21321 - RNA, 21 nt, synthetic construct
  source 1..21: mol_type = other RNA
cttgcttagttacctttttcc

SEQ ID NO: 21322 - RNA, 21 nt, synthetic construct
  source 1..21: mol_type = other RNA
cttgcttcggggccatccaca

SEQ ID NO: 21323 - RNA, 21 nt, synthetic construct
  source 1..21: mol_type = other RNA
cttgcttctgtaagagatgcc

SEQ ID NO: 21324 - RNA, 21 nt, synthetic construct
  source 1..21: mol_type = other RNA
cttgcttctgtgatttgagag

SEQ ID NO: 21325 - RNA, 21 nt, synthetic construct
  source 1..21: mol_type = other RNA
cttgctttgggatcacattat

SEQ ID NO: 21326 - RNA, 21 nt, synthetic construct
  source 1..21: mol_type = other RNA
cttggaataccctctactttc

SEQ ID NO: 21327 - RNA, 21 nt, synthetic construct
  source 1..21: mol_type = other RNA
cttggcgtgaaactgcttcag

SEQ ID NO: 21328 - RNA, 21 nt, synthetic construct
  source 1..21: mol_type = other RNA
cttggcttaccccgaagttac

SEQ ID NO: 21329 - RNA, 21 nt, synthetic construct
  source 1..21: mol_type = other RNA
cttgggactgcccttgattca

SEQ ID NO: 21330 - RNA, 21 nt, synthetic construct
  source 1..21: mol_type = other RNA
cttgggagccccccaggcatg

SEQ ID NO: 21331 - RNA, 21 nt, synthetic construct
  source 1..21: mol_type = other RNA
cttgggctacagaactcacag

SEQ ID NO: 21332 - RNA, 21 nt, synthetic construct
  source 1..21: mol_type = other RNA
cttggtacatttgtgacttgt

SEQ ID NO: 21333 - RNA, 21 nt, synthetic construct
  source 1..21: mol_type = other RNA
cttggtgaaaacgaggggcct

SEQ ID NO: 21334 - RNA, 21 nt, synthetic construct
  source 1..21: mol_type = other RNA
cttggtgtctccatttacttc

SEQ ID NO: 21335 - RNA, 21 nt, synthetic construct
  source 1..21: mol_type = other RNA
cttgtcatggtaattagcact

SEQ ID NO: 21336 - RNA, 21 nt, synthetic construct
  source 1..21: mol_type = other RNA
cttgtctcgacccttcagaat

SEQ ID NO: 21337 - RNA, 21 nt, synthetic construct
  source 1..21: mol_type = other RNA
cttgtgcccccaacacagcac

SEQ ID NO: 21338 - RNA, 21 nt, synthetic construct
  source 1..21: mol_type = other RNA
cttgtgctccagctgtgttgt

SEQ ID NO: 21339 - RNA, 21 nt, synthetic construct
  source 1..21: mol_type = other RNA
cttgtggatggccccgaagca

SEQ ID NO: 21340 - RNA, 21 nt, synthetic construct
  source 1..21: mol_type = other RNA
cttgtgtaaagtcaggactca

SEQ ID NO: 21341 - RNA, 21 nt, synthetic construct
  source 1..21: mol_type = other RNA
cttgttcaaacaatacacacc

SEQ ID NO: 21342 - RNA, 21 nt, synthetic construct
  source 1..21: mol_type = other RNA
cttgttgaccagacatatctt

SEQ ID NO: 21343 - RNA, 21 nt, synthetic construct
  source 1..21: mol_type = other RNA
cttgttgtgacttctgctcct

SEQ ID NO: 21344 - RNA, 21 nt, synthetic construct
  source 1..21: mol_type = other RNA
cttgtttcaatttcttgatct

SEQ ID NO: 21345 - RNA, 21 nt, synthetic construct
  source 1..21: mol_type = other RNA
cttgtttcctgcaaaaagttc

SEQ ID NO: 21346 - RNA, 21 nt, synthetic construct
  source 1..21: mol_type = other RNA
cttgttttctcagaacacaat

SEQ ID NO: 21347 - RNA, 21 nt, synthetic construct
  source 1..21: mol_type = other RNA
ctttaactgcattttcttggg

SEQ ID NO: 21348 - RNA, 21 nt, synthetic construct
  source 1..21: mol_type = other RNA
ctttacacaagaaagtagagg

SEQ ID NO: 21349 - RNA, 21 nt, synthetic construct
  source 1..21: mol_type = other RNA
ctttagagcagcaaacaactt

SEQ ID NO: 21350 - RNA, 21 nt, synthetic construct
  source 1..21: mol_type = other RNA
ctttagtctggccaaagaatg

SEQ ID NO: 21351 - RNA, 21 nt, synthetic construct
  source 1..21: mol_type = other RNA
ctttattctctgaaactaggt

SEQ ID NO: 21352 - RNA, 21 nt, synthetic construct
  source 1..21: mol_type = other RNA
ctttcaagaacaggagcagaa

SEQ ID NO: 21353 - RNA, 21 nt, synthetic construct
  source 1..21: mol_type = other RNA
ctttcacctggatttctttct

SEQ ID NO: 21354 - RNA, 21 nt, synthetic construct
  source 1..21: mol_type = other RNA
ctttcagaaaccagaacaact

SEQ ID NO: 21355 - RNA, 21 nt, synthetic construct
  source 1..21: mol_type = other RNA
ctttcagaaagcatcggagaa

SEQ ID NO: 21356 - RNA, 21 nt, synthetic construct
  source 1..21: mol_type = other RNA
ctttctccattagccttttgg

SEQ ID NO: 21357 - RNA, 21 nt, synthetic construct
  source 1..21: mol_type = other RNA
ctttctccccctcctcctctt

SEQ ID NO: 21358 - RNA, 21 nt, synthetic construct
  source 1..21: mol_type = other RNA
ctttctgaaaggcctcagaat

SEQ ID NO: 21359 - RNA, 21 nt, synthetic construct
  source 1..21: mol_type = other RNA
ctttcttatcactcaaatcgg

SEQ ID NO: 21360 - RNA, 21 nt, synthetic construct
  source 1..21: mol_type = other RNA
ctttcttggcttaccccgaag

SEQ ID NO: 21361 - RNA, 21 nt, synthetic construct
  source 1..21: mol_type = other RNA
ctttcttgtgtaaagtcagga

SEQ ID NO: 21362 - RNA, 21 nt, synthetic construct
  source 1..21: mol_type = other RNA
ctttgctgagcaagttgcgca

SEQ ID NO: 21363 - RNA, 21 nt, synthetic construct
  source 1..21: mol_type = other RNA
ctttgctgatcattgttgctt

SEQ ID NO: 21364 - RNA, 21 nt, synthetic construct
  source 1..21: mol_type = other RNA
ctttgcttgaagtaagcacca

SEQ ID NO: 21365 - RNA, 21 nt, synthetic construct
  source 1..21: mol_type = other RNA
ctttggaggcagctcagagtt

SEQ ID NO: 21366 - RNA, 21 nt, synthetic construct
  source 1..21: mol_type = other RNA
ctttggccagactaaagtgga

SEQ ID NO: 21367 - RNA, 21 nt, synthetic construct
  source 1..21: mol_type = other RNA
ctttgggatcacattatttgg

SEQ ID NO: 21368 - RNA, 21 nt, synthetic construct
  source 1..21: mol_type = other RNA
ctttgggggtgaggaaaagtc

SEQ ID NO: 21369 - RNA, 21 nt, synthetic construct
  source 1..21: mol_type = other RNA
ctttggttggggtagtggtgg

SEQ ID NO: 21370 - RNA, 21 nt, synthetic construct
  source 1..21: mol_type = other RNA
ctttgtagccagaggttctgt

SEQ ID NO: 21371 - RNA, 21 nt, synthetic construct
  source 1..21: mol_type = other RNA
ctttgtggttccctggatgtt

SEQ ID NO: 21372 - RNA, 21 nt, synthetic construct
  source 1..21: mol_type = other RNA
ctttgtttctcatcaactgct

SEQ ID NO: 21373 - RNA, 21 nt, synthetic construct
  source 1..21: mol_type = other RNA
cttttaagggaagtgaaaata

SEQ ID NO: 21374 - RNA, 21 nt, synthetic construct
  source 1..21: mol_type = other RNA
cttttacttgcttctgtgatt

SEQ ID NO: 21375 - RNA, 21 nt, synthetic construct
  source 1..21: mol_type = other RNA
cttttcccctcctgctcattc

SEQ ID NO: 21376 - RNA, 21 nt, synthetic construct
  source 1..21: mol_type = other RNA
cttttcctcacccccaaagca

SEQ ID NO: 21377 - RNA, 21 nt, synthetic construct
  source 1..21: mol_type = other RNA
cttttctgaagaagttgtttg

SEQ ID NO: 21378 - RNA, 21 nt, synthetic construct
  source 1..21: mol_type = other RNA
cttttctgccactaccacacc

SEQ ID NO: 21379 - RNA, 21 nt, synthetic construct
  source 1..21: mol_type = other RNA
cttttgaaagagtgccacttg

SEQ ID NO: 21380 - RNA, 21 nt, synthetic construct
  source 1..21: mol_type = other RNA
cttttgagtgtccttctgggg

SEQ ID NO: 21381 - RNA, 21 nt, synthetic construct
  source 1..21: mol_type = other RNA
cttttgcaacataagcctcat

SEQ ID NO: 21382 - RNA, 21 nt, synthetic construct
  source 1..21: mol_type = other RNA
cttttgctgcacattatcaca

SEQ ID NO: 21383 - RNA, 21 nt, synthetic construct
  source 1..21: mol_type = other RNA
cttttggtaaatggtctgttt

SEQ ID NO: 21384 - RNA, 21 nt, synthetic construct
  source 1..21: mol_type = other RNA
cttttggtcttgtttcaattt

SEQ ID NO: 21385 - RNA, 21 nt, synthetic construct
  source 1..21: mol_type = other RNA
cttttggttggtgtcttttct

SEQ ID NO: 21386 - RNA, 21 nt, synthetic construct
  source 1..21: mol_type = other RNA
ctttttccatgttttgttttc

SEQ ID NO: 21387 - RNA, 21 nt, synthetic construct
  source 1..21: mol_type = other RNA
ctttttccttctgaaggaagc

SEQ ID NO: 21388 - RNA, 21 nt, synthetic construct
  source 1..21: mol_type = other RNA
ctttttgcaggaaacaagacc

SEQ ID NO: 21389 - RNA, 21 nt, synthetic construct
  source 1..21: mol_type = other RNA
gaaaaaacactgtctcaatat

SEQ ID NO: 21390 - RNA, 21 nt, synthetic construct
  source 1..21: mol_type = other RNA
gaaaaacatttgcatggttat

SEQ ID NO: 21391 - RNA, 21 nt, synthetic construct
  source 1..21: mol_type = other RNA
gaaaaactggtgaaatcttta

SEQ ID NO: 21392 - RNA, 21 nt, synthetic construct
  source 1..21: mol_type = other RNA
gaaaaacttatgtccccagtg

SEQ ID NO: 21393 - RNA, 21 nt, synthetic construct
  source 1..21: mol_type = other RNA
gaaaaagcactctgaatggtg

SEQ ID NO: 21394 - RNA, 21 nt, synthetic construct
  source 1..21: mol_type = other RNA
gaaaaaggtaactaagcaaga

SEQ ID NO: 21395 - RNA, 21 nt, synthetic construct
  source 1..21: mol_type = other RNA
gaaaacaaaacatggaaaaag

SEQ ID NO: 21396 - RNA, 21 nt, synthetic construct
  source 1..21: mol_type = other RNA
gaaaacaacacagctggagca

SEQ ID NO: 21397 - RNA, 21 nt, synthetic construct
  source 1..21: mol_type = other RNA
gaaaacaagaccaatgtcaga

SEQ ID NO: 21398 - RNA, 21 nt, synthetic construct
  source 1..21: mol_type = other RNA
gaaaacattcttccactttag

SEQ ID NO: 21399 - RNA, 21 nt, synthetic construct
  source 1..21: mol_type = other RNA
gaaaaccacatctcacataaa

SEQ ID NO: 21400 - RNA, 21 nt, synthetic construct
  source 1..21: mol_type = other RNA
gaaaacgaggggccttcaatt

SEQ ID NO: 21401 - RNA, 21 nt, synthetic construct
  source 1..21: mol_type = other RNA
gaaaagacaccaaccaaaaga

SEQ ID NO: 21402 - RNA, 21 nt, synthetic construct
  source 1..21: mol_type = other RNA
gaaaaggaatccttagtgaac

SEQ ID NO: 21403 - RNA, 21 nt, synthetic construct
  source 1..21: mol_type = other RNA
gaaaagtctggagtatttcct

SEQ ID NO: 21404 - RNA, 21 nt, synthetic construct
  source 1..21: mol_type = other RNA
gaaaagtgctaattaccatga

SEQ ID NO: 21405 - RNA, 21 nt, synthetic construct
  source 1..21: mol_type = other RNA
gaaaataacatccagggaacc

SEQ ID NO: 21406 - RNA, 21 nt, synthetic construct
  source 1..21: mol_type = other RNA
gaaaatagagggtaaacctga

SEQ ID NO: 21407 - RNA, 21 nt, synthetic construct
  source 1..21: mol_type = other RNA
gaaaatattgcatgtgatgca

SEQ ID NO: 21408 - RNA, 21 nt, synthetic construct
  source 1..21: mol_type = other RNA
gaaaatccagagcttcagatt

SEQ ID NO: 21409 - RNA, 21 nt, synthetic construct
  source 1..21: mol_type = other RNA
gaaaatgaaatctagtgccac

SEQ ID NO: 21410 - RNA, 21 nt, synthetic construct
  source 1..21: mol_type = other RNA
gaaaatgcagttaaagatttc

SEQ ID NO: 21411 - RNA, 21 nt, synthetic construct
  source 1..21: mol_type = other RNA
gaaaatggctcagtctctgaa

SEQ ID NO: 21412 - RNA, 21 nt, synthetic construct
  source 1..21: mol_type = other RNA
gaaacaaagagcaagagattc

SEQ ID NO: 21413 - RNA, 21 nt, synthetic construct
  source 1..21: mol_type = other RNA
gaaacaagaccaaaaggctaa

SEQ ID NO: 21414 - RNA, 21 nt, synthetic construct
  source 1..21: mol_type = other RNA
gaaacaagacccaaaacttgc

SEQ ID NO: 21415 - RNA, 21 nt, synthetic construct
  source 1..21: mol_type = other RNA
gaaacacaatctggataatat

SEQ ID NO: 21416 - RNA, 21 nt, synthetic construct
  source 1..21: mol_type = other RNA
gaaacagcacttgaatcaaca

SEQ ID NO: 21417 - RNA, 21 nt, synthetic construct
  source 1..21: mol_type = other RNA
gaaaccaagatatgtctggtc

SEQ ID NO: 21418 - RNA, 21 nt, synthetic construct
  source 1..21: mol_type = other RNA
gaaaccagaacaactacaaca

SEQ ID NO: 21419 - RNA, 21 nt, synthetic construct
  source 1..21: mol_type = other RNA
gaaaccaggatggattgaatt

SEQ ID NO: 21420 - RNA, 21 nt, synthetic construct
  source 1..21: mol_type = other RNA
gaaacctgtattttgcatgca

SEQ ID NO: 21421 - RNA, 21 nt, synthetic construct
  source 1..21: mol_type = other RNA
gaaactaggtgtgtattgttt

SEQ ID NO: 21422 - RNA, 21 nt, synthetic construct
  source 1..21: mol_type = other RNA
gaaactgcttcagatgctgct

SEQ ID NO: 21423 - RNA, 21 nt, synthetic construct
  source 1..21: mol_type = other RNA
gaaactgtagcaccattaggc

SEQ ID NO: 21424 - RNA, 21 nt, synthetic construct
  source 1..21: mol_type = other RNA
gaaagaaatccaggtgaaagc

SEQ ID NO: 21425 - RNA, 21 nt, synthetic construct
  source 1..21: mol_type = other RNA
gaaagaagcaattgtgatggt

SEQ ID NO: 21426 - RNA, 21 nt, synthetic construct
  source 1..21: mol_type = other RNA
gaaagaatctgtgagttctgt

SEQ ID NO: 21427 - RNA, 21 nt, synthetic construct
  source 1..21: mol_type = other RNA
gaaagacgtaacttcggggta

SEQ ID NO: 21428 - RNA, 21 nt, synthetic construct
  source 1..21: mol_type = other RNA
gaaagagtgccacttggtgtc

SEQ ID NO: 21429 - RNA, 21 nt, synthetic construct
  source 1..21: mol_type = other RNA
gaaagcacctgtgaagaagat

SEQ ID NO: 21430 - RNA, 21 nt, synthetic construct
  source 1..21: mol_type = other RNA
gaaagcagtcaaccaaatgtc

SEQ ID NO: 21431 - RNA, 21 nt, synthetic construct
  source 1..21: mol_type = other RNA
gaaagcatcggagaagggctg

SEQ ID NO: 21432 - RNA, 21 nt, synthetic construct
  source 1..21: mol_type = other RNA
gaaaggaacaggtatttagca

SEQ ID NO: 21433 - RNA, 21 nt, synthetic construct
  source 1..21: mol_type = other RNA
gaaaggcctcagaataattgt

SEQ ID NO: 21434 - RNA, 21 nt, synthetic construct
  source 1..21: mol_type = other RNA
gaaagtagagggtattccaag

SEQ ID NO: 21435 - RNA, 21 nt, synthetic construct
  source 1..21: mol_type = other RNA
gaaatactccagacttttcct

SEQ ID NO: 21436 - RNA, 21 nt, synthetic construct
  source 1..21: mol_type = other RNA
gaaatcaagtgcatgcaaaat

SEQ ID NO: 21437 - RNA, 21 nt, synthetic construct
  source 1..21: mol_type = other RNA
gaaatcatattgagtcttgac

SEQ ID NO: 21438 - RNA, 21 nt, synthetic construct
  source 1..21: mol_type = other RNA
gaaatccaggtgaaagcagtc

SEQ ID NO: 21439 - RNA, 21 nt, synthetic construct
  source 1..21: mol_type = other RNA
gaaatctagtgccacacagtg

SEQ ID NO: 21440 - RNA, 21 nt, synthetic construct
  source 1..21: mol_type = other RNA
gaaatctttaactgcattttc

SEQ ID NO: 21441 - RNA, 21 nt, synthetic construct
  source 1..21: mol_type = other RNA
gaaatgaatcaagggcagtcc

SEQ ID NO: 21442 - RNA, 21 nt, synthetic construct
  source 1..21: mol_type = other RNA
gaaatgaatggtgcttacttc

SEQ ID NO: 21443 - RNA, 21 nt, synthetic construct
  source 1..21: mol_type = other RNA
gaaatgtcagggccagtcaca

SEQ ID NO: 21444 - RNA, 21 nt, synthetic construct
  source 1..21: mol_type = other RNA
gaaattccaacatgcctgggg

SEQ ID NO: 21445 - RNA, 21 nt, synthetic construct
  source 1..21: mol_type = other RNA
gaaattccccttatagtcaga

SEQ ID NO: 21446 - RNA, 21 nt, synthetic construct
  source 1..21: mol_type = other RNA
gaaattgaaacaagaccaaaa

SEQ ID NO: 21447 - RNA, 21 nt, synthetic construct
  source 1..21: mol_type = other RNA
gaacaactacaacaacaaaaa

SEQ ID NO: 21448 - RNA, 21 nt, synthetic construct
  source 1..21: mol_type = other RNA
gaacaagaaacctgtattttg

SEQ ID NO: 21449 - RNA, 21 nt, synthetic construct
  source 1..21: mol_type = other RNA
gaacacaatggaacagtcatt

SEQ ID NO: 21450 - RNA, 21 nt, synthetic construct
  source 1..21: mol_type = other RNA
gaacacacacatggtgaactc

SEQ ID NO: 21451 - RNA, 21 nt, synthetic construct
  source 1..21: mol_type = other RNA
gaacaccaccactaccccaac

SEQ ID NO: 21452 - RNA, 21 nt, synthetic construct
  source 1..21: mol_type = other RNA
gaacacctcaagcataaccca

SEQ ID NO: 21453 - RNA, 21 nt, synthetic construct
  source 1..21: mol_type = other RNA
gaacactgagctttgcttgaa

SEQ ID NO: 21454 - RNA, 21 nt, synthetic construct
  source 1..21: mol_type = other RNA
gaacagaagcagctgttcttt

SEQ ID NO: 21455 - RNA, 21 nt, synthetic construct
  source 1..21: mol_type = other RNA
gaacagaattcttcaccagac

SEQ ID NO: 21456 - RNA, 21 nt, synthetic construct
  source 1..21: mol_type = other RNA
gaacagactacacatcctgaa

SEQ ID NO: 21457 - RNA, 21 nt, synthetic construct
  source 1..21: mol_type = other RNA
gaacagcagcaaacacagcaa

SEQ ID NO: 21458 - RNA, 21 nt, synthetic construct
  source 1..21: mol_type = other RNA
gaacagctgcttctgttctca

SEQ ID NO: 21459 - RNA, 21 nt, synthetic construct
  source 1..21: mol_type = other RNA
gaacaggaatgacatacagac

SEQ ID NO: 21460 - RNA, 21 nt, synthetic construct
  source 1..21: mol_type = other RNA
gaacaggagcagaagtcacaa

SEQ ID NO: 21461 - RNA, 21 nt, synthetic construct
  source 1..21: mol_type = other RNA
gaacaggatagaaccaaccat

SEQ ID NO: 21462 - RNA, 21 nt, synthetic construct
  source 1..21: mol_type = other RNA
gaacaggtatttagcattgca

SEQ ID NO: 21463 - RNA, 21 nt, synthetic construct
  source 1..21: mol_type = other RNA
gaacagtcattgtccctgcag

SEQ ID NO: 21464 - RNA, 21 nt, synthetic construct
  source 1..21: mol_type = other RNA
gaaccaaccatgttgagggca

SEQ ID NO: 21465 - RNA, 21 nt, synthetic construct
  source 1..21: mol_type = other RNA
gaaccacaaagctagcgtctg

SEQ ID NO: 21466 - RNA, 21 nt, synthetic construct
  source 1..21: mol_type = other RNA
gaacctctggctacaaagctc

SEQ ID NO: 21467 - RNA, 21 nt, synthetic construct
  source 1..21: mol_type = other RNA
gaacctgaacagaattcttca

SEQ ID NO: 21468 - RNA, 21 nt, synthetic construct
  source 1..21: mol_type = other RNA
gaacctggatgcaagccacat

SEQ ID NO: 21469 - RNA, 21 nt, synthetic construct
  source 1..21: mol_type = other RNA
gaacctgtggaagaggaggag

SEQ ID NO: 21470 - RNA, 21 nt, synthetic construct
  source 1..21: mol_type = other RNA
gaaccttctctctctgggctc

SEQ ID NO: 21471 - RNA, 21 nt, synthetic construct
  source 1..21: mol_type = other RNA
gaactcacagattctttctta

SEQ ID NO: 21472 - RNA, 21 nt, synthetic construct
  source 1..21: mol_type = other RNA
gaactcctggaaaaaacactg

SEQ ID NO: 21473 - RNA, 21 nt, synthetic construct
  source 1..21: mol_type = other RNA
gaactcgcttgattttgaata

SEQ ID NO: 21474 - RNA, 21 nt, synthetic construct
  source 1..21: mol_type = other RNA
gaactctgggatggttgtgtt

SEQ ID NO: 21475 - RNA, 21 nt, synthetic construct
  source 1..21: mol_type = other RNA
gaactgaagcttgttgtgact

SEQ ID NO: 21476 - RNA, 21 nt, synthetic construct
  source 1..21: mol_type = other RNA
gaactggagatgttggtccac

SEQ ID NO: 21477 - RNA, 21 nt, synthetic construct
  source 1..21: mol_type = other RNA
gaacttgatagccacacccca

SEQ ID NO: 21478 - RNA, 21 nt, synthetic construct
  source 1..21: mol_type = other RNA
gaactttttgcaggaaacaag

SEQ ID NO: 21479 - RNA, 21 nt, synthetic construct
  source 1..21: mol_type = other RNA
gaagaacaccaccactacccc

SEQ ID NO: 21480 - RNA, 21 nt, synthetic construct
  source 1..21: mol_type = other RNA
gaagaagatcttgctttggga

SEQ ID NO: 21481 - RNA, 21 nt, synthetic construct
  source 1..21: mol_type = other RNA
gaagaagttgtttgctgctct

SEQ ID NO: 21482 - RNA, 21 nt, synthetic construct
  source 1..21: mol_type = other RNA
gaagaatgttttcatggtgaa

SEQ ID NO: 21483 - RNA, 21 nt, synthetic construct
  source 1..21: mol_type = other RNA
gaagaattctgttcaggttcc

SEQ ID NO: 21484 - RNA, 21 nt, synthetic construct
  source 1..21: mol_type = other RNA
gaagaattgatggcagtgatg

SEQ ID NO: 21485 - RNA, 21 nt, synthetic construct
  source 1..21: mol_type = other RNA
gaagaggaggagggggagaaa

SEQ ID NO: 21486 - RNA, 21 nt, synthetic construct
  source 1..21: mol_type = other RNA
gaagaggcagaaactgtagca

SEQ ID NO: 21487 - RNA, 21 nt, synthetic construct
  source 1..21: mol_type = other RNA
gaagatcttgctttgggatca

SEQ ID NO: 21488 - RNA, 21 nt, synthetic construct
  source 1..21: mol_type = other RNA
gaagcaagaacagcagcaaac

SEQ ID NO: 21489 - RNA, 21 nt, synthetic construct
  source 1..21: mol_type = other RNA
gaagcaagcctgatggaacag

SEQ ID NO: 21490 - RNA, 21 nt, synthetic construct
  source 1..21: mol_type = other RNA
gaagcaagtaaaagttgaaat

SEQ ID NO: 21491 - RNA, 21 nt, synthetic construct
  source 1..21: mol_type = other RNA
gaagcaattgtgatggtggtg

SEQ ID NO: 21492 - RNA, 21 nt, synthetic construct
  source 1..21: mol_type = other RNA
gaagcagctgttcttttggtt

SEQ ID NO: 21493 - RNA, 21 nt, synthetic construct
  source 1..21: mol_type = other RNA
gaagcagtttcacgccaagtc

SEQ ID NO: 21494 - RNA, 21 nt, synthetic construct
  source 1..21: mol_type = other RNA
gaagccagaatagtcgtgtga

SEQ ID NO: 21495 - RNA, 21 nt, synthetic construct
  source 1..21: mol_type = other RNA
gaagcccactgcctgagagag

SEQ ID NO: 21496 - RNA, 21 nt, synthetic construct
  source 1..21: mol_type = other RNA
gaagcctgttgattcaagtgc

SEQ ID NO: 21497 - RNA, 21 nt, synthetic construct
  source 1..21: mol_type = other RNA
gaagctctggattttcaggcc

SEQ ID NO: 21498 - RNA, 21 nt, synthetic construct
  source 1..21: mol_type = other RNA
gaagctgaggaacctgtggaa

SEQ ID NO: 21499 - RNA, 21 nt, synthetic construct
  source 1..21: mol_type = other RNA
gaagcttgttgtgacttctgc

SEQ ID NO: 21500 - RNA, 21 nt, synthetic construct
  source 1..21: mol_type = other RNA
gaaggaaaaagcactctgaat

SEQ ID NO: 21501 - RNA, 21 nt, synthetic construct
  source 1..21: mol_type = other RNA
gaaggaagctgaggaacctgt

SEQ ID NO: 21502 - RNA, 21 nt, synthetic construct
  source 1..21: mol_type = other RNA
gaaggacactcaaaagcatgc

SEQ ID NO: 21503 - RNA, 21 nt, synthetic construct
  source 1..21: mol_type = other RNA
gaaggagcccagagagagaag

SEQ ID NO: 21504 - RNA, 21 nt, synthetic construct
  source 1..21: mol_type = other RNA
gaaggatcattctttggccag

SEQ ID NO: 21505 - RNA, 21 nt, synthetic construct
  source 1..21: mol_type = other RNA
gaaggcccctcgttttcacca

SEQ ID NO: 21506 - RNA, 21 nt, synthetic construct
  source 1..21: mol_type = other RNA
gaagggaagccagaatagtcg

SEQ ID NO: 21507 - RNA, 21 nt, synthetic construct
  source 1..21: mol_type = other RNA
gaagggctgcatacatgtgta

SEQ ID NO: 21508 - RNA, 21 nt, synthetic construct
  source 1..21: mol_type = other RNA
gaagggtcgagacaaggagca

SEQ ID NO: 21509 - RNA, 21 nt, synthetic construct
  source 1..21: mol_type = other RNA
gaaggtgactctataaaatta

SEQ ID NO: 21510 - RNA, 21 nt, synthetic construct
  source 1..21: mol_type = other RNA
gaaggtggtgcctcaggttta

SEQ ID NO: 21511 - RNA, 21 nt, synthetic construct
  source 1..21: mol_type = other RNA
gaaggttcactaactgtgcgt

SEQ ID NO: 21512 - RNA, 21 nt, synthetic construct
  source 1..21: mol_type = other RNA
gaagtaaatggagacaccaag

SEQ ID NO: 21513 - RNA, 21 nt, synthetic construct
  source 1..21: mol_type = other RNA
gaagtaagcaccattcatttc

SEQ ID NO: 21514 - RNA, 21 nt, synthetic construct
  source 1..21: mol_type = other RNA
gaagtacagaatataaatcgt

SEQ ID NO: 21515 - RNA, 21 nt, synthetic construct
  source 1..21: mol_type = other RNA
gaagtcacaacaagcttcagt

SEQ ID NO: 21516 - RNA, 21 nt, synthetic construct
  source 1..21: mol_type = other RNA
gaagtcacactcagacccctc

SEQ ID NO: 21517 - RNA, 21 nt, synthetic construct
  source 1..21: mol_type = other RNA
gaagtgaaaatagagggtaaa

SEQ ID NO: 21518 - RNA, 21 nt, synthetic construct
  source 1..21: mol_type = other RNA
gaagtgcacctggtgtgaggg

SEQ ID NO: 21519 - RNA, 21 nt, synthetic construct
  source 1..21: mol_type = other RNA
gaagttacgtctttctccatt

SEQ ID NO: 21520 - RNA, 21 nt, synthetic construct
  source 1..21: mol_type = other RNA
gaagttgtttgctgctctaaa

SEQ ID NO: 21521 - RNA, 21 nt, synthetic construct
  source 1..21: mol_type = other RNA
gaataaaacgcacagttagtg

SEQ ID NO: 21522 - RNA, 21 nt, synthetic construct
  source 1..21: mol_type = other RNA
gaataaagaacagactacaca

SEQ ID NO: 21523 - RNA, 21 nt, synthetic construct
  source 1..21: mol_type = other RNA
gaataaagaggaaatactcca

SEQ ID NO: 21524 - RNA, 21 nt, synthetic construct
  source 1..21: mol_type = other RNA
gaataattgtgtgaacaggaa

SEQ ID NO: 21525 - RNA, 21 nt, synthetic construct
  source 1..21: mol_type = other RNA
gaataccctctactttcttgt

SEQ ID NO: 21526 - RNA, 21 nt, synthetic construct
  source 1..21: mol_type = other RNA
gaataccctgtatgaagggaa

SEQ ID NO: 21527 - RNA, 21 nt, synthetic construct
  source 1..21: mol_type = other RNA
gaatactgattttcaccatga

SEQ ID NO: 21528 - RNA, 21 nt, synthetic construct
  source 1..21: mol_type = other RNA
gaatagtcgtgtgagtcctga

SEQ ID NO: 21529 - RNA, 21 nt, synthetic construct
  source 1..21: mol_type = other RNA
gaatcaacaggcttcagagac

SEQ ID NO: 21530 - RNA, 21 nt, synthetic construct
  source 1..21: mol_type = other RNA
gaatcaagggcagtcccaagg

SEQ ID NO: 21531 - RNA, 21 nt, synthetic construct
  source 1..21: mol_type = other RNA
gaatccacctgcaagctgtga

SEQ ID NO: 21532 - RNA, 21 nt, synthetic construct
  source 1..21: mol_type = other RNA
gaatcccatctaaaacgtaat

SEQ ID NO: 21533 - RNA, 21 nt, synthetic construct
  source 1..21: mol_type = other RNA
gaatccttagtgaacactgag

SEQ ID NO: 21534 - RNA, 21 nt, synthetic construct
  source 1..21: mol_type = other RNA
gaatctcttgctctttgtttc

SEQ ID NO: 21535 - RNA, 21 nt, synthetic construct
  source 1..21: mol_type = other RNA
gaatctgaagctctggatttt

SEQ ID NO: 21536 - RNA, 21 nt, synthetic construct
  source 1..21: mol_type = other RNA
gaatctgctctttgttgaaaa

SEQ ID NO: 21537 - RNA, 21 nt, synthetic construct
  source 1..21: mol_type = other RNA
gaatctgtgagttctgtagcc

SEQ ID NO: 21538 - RNA, 21 nt, synthetic construct
  source 1..21: mol_type = other RNA
gaatgacatacagactgcagg

SEQ ID NO: 21539 - RNA, 21 nt, synthetic construct
  source 1..21: mol_type = other RNA
gaatgagcaggaggggaaaag

SEQ ID NO: 21540 - RNA, 21 nt, synthetic construct
  source 1..21: mol_type = other RNA
gaatgatccttctctttgctg

SEQ ID NO: 21541 - RNA, 21 nt, synthetic construct
  source 1..21: mol_type = other RNA
gaatggaagcccactgcctga

SEQ ID NO: 21542 - RNA, 21 nt, synthetic construct
  source 1..21: mol_type = other RNA
gaatggacttagtctgttgcc

SEQ ID NO: 21543 - RNA, 21 nt, synthetic construct
  source 1..21: mol_type = other RNA
gaatggtgcttacttcaagca

SEQ ID NO: 21544 - RNA, 21 nt, synthetic construct
  source 1..21: mol_type = other RNA
gaatggtggagttttagaaga

SEQ ID NO: 21545 - RNA, 21 nt, synthetic construct
  source 1..21: mol_type = other RNA
gaatgttttcatggtgaaaat

SEQ ID NO: 21546 - RNA, 21 nt, synthetic construct
  source 1..21: mol_type = other RNA
gaattctgttcaggttccagc

SEQ ID NO: 21547 - RNA, 21 nt, synthetic construct
  source 1..21: mol_type = other RNA
gaattcttcaccagacgctag

SEQ ID NO: 21548 - RNA, 21 nt, synthetic construct
  source 1..21: mol_type = other RNA
gaattgaaggcccctcgtttt

SEQ ID NO: 21549 - RNA, 21 nt, synthetic construct
  source 1..21: mol_type = other RNA
gaattgatctgccctgaggta

SEQ ID NO: 21550 - RNA, 21 nt, synthetic construct
  source 1..21: mol_type = other RNA
gaattgatggcagtgatgcct

SEQ ID NO: 21551 - RNA, 21 nt, synthetic construct
  source 1..21: mol_type = other RNA
gaatttccagtgtattgtttg

SEQ ID NO: 21552 - RNA, 21 nt, synthetic construct
  source 1..21: mol_type = other RNA
gacaaaccactgctgcagaac

SEQ ID NO: 21553 - RNA, 21 nt, synthetic construct
  source 1..21: mol_type = other RNA
gacaactcattagtagcctga

SEQ ID NO: 21554 - RNA, 21 nt, synthetic construct
  source 1..21: mol_type = other RNA
gacaactgccagcagttgatg

SEQ ID NO: 21555 - RNA, 21 nt, synthetic construct
  source 1..21: mol_type = other RNA
gacaagaacattgtattactt

SEQ ID NO: 21556 - RNA, 21 nt, synthetic construct
  source 1..21: mol_type = other RNA
gacaaggagcaaacacgagat

SEQ ID NO: 21557 - RNA, 21 nt, synthetic construct
  source 1..21: mol_type = other RNA
gacaatgactgttccattgtg

SEQ ID NO: 21558 - RNA, 21 nt, synthetic construct
  source 1..21: mol_type = other RNA
gacaccaaccaaaagaacagc

SEQ ID NO: 21559 - RNA, 21 nt, synthetic construct
  source 1..21: mol_type = other RNA
gacaccaagtggcactctttc

SEQ ID NO: 21560 - RNA, 21 nt, synthetic construct
  source 1..21: mol_type = other RNA
gacactcaaaagcatgctgct

SEQ ID NO: 21561 - RNA, 21 nt, synthetic construct
  source 1..21: mol_type = other RNA
gacagaacctctggctacaaa

SEQ ID NO: 21562 - RNA, 21 nt, synthetic construct
  source 1..21: mol_type = other RNA
gacaggtgtatccaataaatt

SEQ ID NO: 21563 - RNA, 21 nt, synthetic construct
  source 1..21: mol_type = other RNA
gacagtgttttttccaggagt

SEQ ID NO: 21564 - RNA, 21 nt, synthetic construct
  source 1..21: mol_type = other RNA
gacataagtttttcagtttgg

SEQ ID NO: 21565 - RNA, 21 nt, synthetic construct
  source 1..21: mol_type = other RNA
gacatacagactgcagggaca

SEQ ID NO: 21566 - RNA, 21 nt, synthetic construct
  source 1..21: mol_type = other RNA
gacatatcttggtttctattt

SEQ ID NO: 21567 - RNA, 21 nt, synthetic construct
  source 1..21: mol_type = other RNA
gacattatgagtctcgaactc

SEQ ID NO: 21568 - RNA, 21 nt, synthetic construct
  source 1..21: mol_type = other RNA
gacattggtcttgttttctca

SEQ ID NO: 21569 - RNA, 21 nt, synthetic construct
  source 1..21: mol_type = other RNA
gacatttcaacttttacttgc

SEQ ID NO: 21570 - RNA, 21 nt, synthetic construct
  source 1..21: mol_type = other RNA
gacatttggttgactgctttc

SEQ ID NO: 21571 - RNA, 21 nt, synthetic construct
  source 1..21: mol_type = other RNA
gaccaaaaggctaatggagaa

SEQ ID NO: 21572 - RNA, 21 nt, synthetic construct
  source 1..21: mol_type = other RNA
gaccaacatctccagttccaa

SEQ ID NO: 21573 - RNA, 21 nt, synthetic construct
  source 1..21: mol_type = other RNA
gaccaatgtcagaacacctca

SEQ ID NO: 21574 - RNA, 21 nt, synthetic construct
  source 1..21: mol_type = other RNA
gaccagacatatcttggtttc

SEQ ID NO: 21575 - RNA, 21 nt, synthetic construct
  source 1..21: mol_type = other RNA
gaccagggaggaagtcacact

SEQ ID NO: 21576 - RNA, 21 nt, synthetic construct
  source 1..21: mol_type = other RNA
gaccataaggctcttactctc

SEQ ID NO: 21577 - RNA, 21 nt, synthetic construct
  source 1..21: mol_type = other RNA
gaccatgaaatcaagtgcatg

SEQ ID NO: 21578 - RNA, 21 nt, synthetic construct
  source 1..21: mol_type = other RNA
gaccatggagcagcatctgaa

SEQ ID NO: 21579 - RNA, 21 nt, synthetic construct
  source 1..21: mol_type = other RNA
gaccatttaccaaaagctcat

SEQ ID NO: 21580 - RNA, 21 nt, synthetic construct
  source 1..21: mol_type = other RNA
gacccaaaacttgcatcacat

SEQ ID NO: 21581 - RNA, 21 nt, synthetic construct
  source 1..21: mol_type = other RNA
gacccctccccagaaggacac

SEQ ID NO: 21582 - RNA, 21 nt, synthetic construct
  source 1..21: mol_type = other RNA
gacccttcagaatctcttgct

SEQ ID NO: 21583 - RNA, 21 nt, synthetic construct
  source 1..21: mol_type = other RNA
gacctccaaacaatacactgg

SEQ ID NO: 21584 - RNA, 21 nt, synthetic construct
  source 1..21: mol_type = other RNA
gacctctaactctgagctgcc

SEQ ID NO: 21585 - RNA, 21 nt, synthetic construct
  source 1..21: mol_type = other RNA
gacgctagctttgtggttccc

SEQ ID NO: 21586 - RNA, 21 nt, synthetic construct
  source 1..21: mol_type = other RNA
gacgtaacttcggggtaagcc

SEQ ID NO: 21587 - RNA, 21 nt, synthetic construct
  source 1..21: mol_type = other RNA
gactaaagtggaagaatgttt

SEQ ID NO: 21588 - RNA, 21 nt, synthetic construct
  source 1..21: mol_type = other RNA
gactaagtccattcctgatac

SEQ ID NO: 21589 - RNA, 21 nt, synthetic construct
  source 1..21: mol_type = other RNA
gactacacatcctgaactttt

SEQ ID NO: 21590 - RNA, 21 nt, synthetic construct
  source 1..21: mol_type = other RNA
gactagacaaaccactgctgc

SEQ ID NO: 21591 - RNA, 21 nt, synthetic construct
  source 1..21: mol_type = other RNA
gactataaggggaatttctac

SEQ ID NO: 21592 - RNA, 21 nt, synthetic construct
  source 1..21: mol_type = other RNA
gactatggcaagactcagttt

SEQ ID NO: 21593 - RNA, 21 nt, synthetic construct
  source 1..21: mol_type = other RNA
gactattctggcttcccttca

SEQ ID NO: 21594 - RNA, 21 nt, synthetic construct
  source 1..21: mol_type = other RNA
gactcaatatgatttcccatc

SEQ ID NO: 21595 - RNA, 21 nt, synthetic construct
  source 1..21: mol_type = other RNA
gactcacacgactattctggc

SEQ ID NO: 21596 - RNA, 21 nt, synthetic construct
  source 1..21: mol_type = other RNA
gactcagtttggggttgctgt

SEQ ID NO: 21597 - RNA, 21 nt, synthetic construct
  source 1..21: mol_type = other RNA
gactcataatgtccaaatggg

SEQ ID NO: 21598 - RNA, 21 nt, synthetic construct
  source 1..21: mol_type = other RNA
gactctgggaaggtggtgcct

SEQ ID NO: 21599 - RNA, 21 nt, synthetic construct
  source 1..21: mol_type = other RNA
gactgagccattttcaaactc

SEQ ID NO: 21600 - RNA, 21 nt, synthetic construct
  source 1..21: mol_type = other RNA
gactgcacatgagcttttggt

SEQ ID NO: 21601 - RNA, 21 nt, synthetic construct
  source 1..21: mol_type = other RNA
gactgcagggacaatgactgt

SEQ ID NO: 21602 - RNA, 21 nt, synthetic construct
  source 1..21: mol_type = other RNA
gactgcccttgattcatttca

SEQ ID NO: 21603 - RNA, 21 nt, synthetic construct
  source 1..21: mol_type = other RNA
gactgctttcacctggatttc

SEQ ID NO: 21604 - RNA, 21 nt, synthetic construct
  source 1..21: mol_type = other RNA
gactggaggaagtacagaata

SEQ ID NO: 21605 - RNA, 21 nt, synthetic construct
  source 1..21: mol_type = other RNA
gactggccctgacatttcaac

SEQ ID NO: 21606 - RNA, 21 nt, synthetic construct
  source 1..21: mol_type = other RNA
gactgttaatggcatttatgt

SEQ ID NO: 21607 - RNA, 21 nt, synthetic construct
  source 1..21: mol_type = other RNA
gactgttccattgtgttctga

SEQ ID NO: 21608 - RNA, 21 nt, synthetic construct
  source 1..21: mol_type = other RNA
gacttagtctgttgccctcaa

SEQ ID NO: 21609 - RNA, 21 nt, synthetic construct
  source 1..21: mol_type = other RNA
gacttcctccctggtcaggca

SEQ ID NO: 21610 - RNA, 21 nt, synthetic construct
  source 1..21: mol_type = other RNA
gacttctgctcctgttcttga

SEQ ID NO: 21611 - RNA, 21 nt, synthetic construct
  source 1..21: mol_type = other RNA
gacttggcgtgaaactgcttc

SEQ ID NO: 21612 - RNA, 21 nt, synthetic construct
  source 1..21: mol_type = other RNA
gacttgtgctccagctgtgtt

SEQ ID NO: 21613 - RNA, 21 nt, synthetic construct
  source 1..21: mol_type = other RNA
gactttacacaagaaagtaga

SEQ ID NO: 21614 - RNA, 21 nt, synthetic construct
  source 1..21: mol_type = other RNA
gacttttcctcacccccaaag

SEQ ID NO: 21615 - RNA, 21 nt, synthetic construct
  source 1..21: mol_type = other RNA
gagaaaacaagaccaatgtca

SEQ ID NO: 21616 - RNA, 21 nt, synthetic construct
  source 1..21: mol_type = other RNA
gagaaacaaagagcaagagat

SEQ ID NO: 21617 - RNA, 21 nt, synthetic construct
  source 1..21: mol_type = other RNA
gagaaagaagcaattgtgatg

SEQ ID NO: 21618 - RNA, 21 nt, synthetic construct
  source 1..21: mol_type = other RNA
gagaaagacgtaacttcgggg

SEQ ID NO: 21619 - RNA, 21 nt, synthetic construct
  source 1..21: mol_type = other RNA
gagaacagaagcagctgttct

SEQ ID NO: 21620 - RNA, 21 nt, synthetic construct
  source 1..21: mol_type = other RNA
gagaaggatcattctttggcc

SEQ ID NO: 21621 - RNA, 21 nt, synthetic construct
  source 1..21: mol_type = other RNA
gagaagggctgcatacatgtg

SEQ ID NO: 21622 - RNA, 21 nt, synthetic construct
  source 1..21: mol_type = other RNA
gagaaggttcactaactgtgc

SEQ ID NO: 21623 - RNA, 21 nt, synthetic construct
  source 1..21: mol_type = other RNA
gagaagtgcacctggtgtgag

SEQ ID NO: 21624 - RNA, 21 nt, synthetic construct
  source 1..21: mol_type = other RNA
gagaataaagaacagactaca

SEQ ID NO: 21625 - RNA, 21 nt, synthetic construct
  source 1..21: mol_type = other RNA
gagaatccacctgcaagctgt

SEQ ID NO: 21626 - RNA, 21 nt, synthetic construct
  source 1..21: mol_type = other RNA
gagacaaggagcaaacacgag

SEQ ID NO: 21627 - RNA, 21 nt, synthetic construct
  source 1..21: mol_type = other RNA
gagacaccaagtggcactctt

SEQ ID NO: 21628 - RNA, 21 nt, synthetic construct
  source 1..21: mol_type = other RNA
gagacagtgttttttccagga

SEQ ID NO: 21629 - RNA, 21 nt, synthetic construct
  source 1..21: mol_type = other RNA
gagacatttggttgactgctt

SEQ ID NO: 21630 - RNA, 21 nt, synthetic construct
  source 1..21: mol_type = other RNA
gagaccatggagcagcatctg

SEQ ID NO: 21631 - RNA, 21 nt, synthetic construct
  source 1..21: mol_type = other RNA
gagactcataatgtccaaatg

SEQ ID NO: 21632 - RNA, 21 nt, synthetic construct
  source 1..21: mol_type = other RNA
gagactgagccattttcaaac

SEQ ID NO: 21633 - RNA, 21 nt, synthetic construct
  source 1..21: mol_type = other RNA
gagagaaggttcactaactgt

SEQ ID NO: 21634 - RNA, 21 nt, synthetic construct
  source 1..21: mol_type = other RNA
gagagagaaggttcactaact

SEQ ID NO: 21635 - RNA, 21 nt, synthetic construct
  source 1..21: mol_type = other RNA
gagagagctcatccagaagta

SEQ ID NO: 21636 - RNA, 21 nt, synthetic construct
  source 1..21: mol_type = other RNA
gagagattgggttgatactga

SEQ ID NO: 21637 - RNA, 21 nt, synthetic construct
  source 1..21: mol_type = other RNA
gagagctacaggacaactgcc

SEQ ID NO: 21638 - RNA, 21 nt, synthetic construct
  source 1..21: mol_type = other RNA
gagagctcatccagaagtaaa

SEQ ID NO: 21639 - RNA, 21 nt, synthetic construct
  source 1..21: mol_type = other RNA
gagagtaagagccttatggtc

SEQ ID NO: 21640 - RNA, 21 nt, synthetic construct
  source 1..21: mol_type = other RNA
gagatatgcccatctcctgca

SEQ ID NO: 21641 - RNA, 21 nt, synthetic construct
  source 1..21: mol_type = other RNA
gagatcactcacccatcgcat

SEQ ID NO: 21642 - RNA, 21 nt, synthetic construct
  source 1..21: mol_type = other RNA
gagatcttgtgcccccaacac

SEQ ID NO: 21643 - RNA, 21 nt, synthetic construct
  source 1..21: mol_type = other RNA
gagatgccaccttagagcagc

SEQ ID NO: 21644 - RNA, 21 nt, synthetic construct
  source 1..21: mol_type = other RNA
gagatgggcatatctcaaaaa

SEQ ID NO: 21645 - RNA, 21 nt, synthetic construct
  source 1..21: mol_type = other RNA
gagatgtgaactctgggatgg

SEQ ID NO: 21646 - RNA, 21 nt, synthetic construct
  source 1..21: mol_type = other RNA
gagatgtggttttctgcaccg

SEQ ID NO: 21647 - RNA, 21 nt, synthetic construct
  source 1..21: mol_type = other RNA
gagatgttggtccactgtacc

SEQ ID NO: 21648 - RNA, 21 nt, synthetic construct
  source 1..21: mol_type = other RNA
gagattctgaagggtcgagac

SEQ ID NO: 21649 - RNA, 21 nt, synthetic construct
  source 1..21: mol_type = other RNA
gagattgggttgatactgaag

SEQ ID NO: 21650 - RNA, 21 nt, synthetic construct
  source 1..21: mol_type = other RNA
gagcaaacacgagatcttgtg

SEQ ID NO: 21651 - RNA, 21 nt, synthetic construct
  source 1..21: mol_type = other RNA
gagcaagagattctgaagggt

SEQ ID NO: 21652 - RNA, 21 nt, synthetic construct
  source 1..21: mol_type = other RNA
gagcaagttgcgcagcttgtt

SEQ ID NO: 21653 - RNA, 21 nt, synthetic construct
  source 1..21: mol_type = other RNA
gagcacaagtcacaaatgtac

SEQ ID NO: 21654 - RNA, 21 nt, synthetic construct
  source 1..21: mol_type = other RNA
gagcagaagtcacaacaagct

SEQ ID NO: 21655 - RNA, 21 nt, synthetic construct
  source 1..21: mol_type = other RNA
gagcagattcccaaactgaaa

SEQ ID NO: 21656 - RNA, 21 nt, synthetic construct
  source 1..21: mol_type = other RNA
gagcagcaaacaacttcttca

SEQ ID NO: 21657 - RNA, 21 nt, synthetic construct
  source 1..21: mol_type = other RNA
gagcagcatctgaagcagttt

SEQ ID NO: 21658 - RNA, 21 nt, synthetic construct
  source 1..21: mol_type = other RNA
gagcagcatgcttttgagtgt

SEQ ID NO: 21659 - RNA, 21 nt, synthetic construct
  source 1..21: mol_type = other RNA
gagcaggaggggaaaagtgct

SEQ ID NO: 21660 - RNA, 21 nt, synthetic construct
  source 1..21: mol_type = other RNA
gagcatcattgagaccatgga

SEQ ID NO: 21661 - RNA, 21 nt, synthetic construct
  source 1..21: mol_type = other RNA
gagccattttcaaactcacac

SEQ ID NO: 21662 - RNA, 21 nt, synthetic construct
  source 1..21: mol_type = other RNA
gagcccagagagagaaggttc

SEQ ID NO: 21663 - RNA, 21 nt, synthetic construct
  source 1..21: mol_type = other RNA
gagccccccaggcatgttgga

SEQ ID NO: 21664 - RNA, 21 nt, synthetic construct
  source 1..21: mol_type = other RNA
gagccttatggtcaaataacg

SEQ ID NO: 21665 - RNA, 21 nt, synthetic construct
  source 1..21: mol_type = other RNA
gagctacaggacaactgccag

SEQ ID NO: 21666 - RNA, 21 nt, synthetic construct
  source 1..21: mol_type = other RNA
gagctcatccagaagtaaatg

SEQ ID NO: 21667 - RNA, 21 nt, synthetic construct
  source 1..21: mol_type = other RNA
gagctctctcaggcagtgggc

SEQ ID NO: 21668 - RNA, 21 nt, synthetic construct
  source 1..21: mol_type = other RNA
gagctgccaccaggagcttgc

SEQ ID NO: 21669 - RNA, 21 nt, synthetic construct
  source 1..21: mol_type = other RNA
gagctgcctccaaagccagct

SEQ ID NO: 21670 - RNA, 21 nt, synthetic construct
  source 1..21: mol_type = other RNA
gagcttcagattctgaatgag

SEQ ID NO: 21671 - RNA, 21 nt, synthetic construct
  source 1..21: mol_type = other RNA
gagcttgcaaattgctgctgg

SEQ ID NO: 21672 - RNA, 21 nt, synthetic construct
  source 1..21: mol_type = other RNA
gagctttgcttgaagtaagca

SEQ ID NO: 21673 - RNA, 21 nt, synthetic construct
  source 1..21: mol_type = other RNA
gagctttgtagccagaggttc

SEQ ID NO: 21674 - RNA, 21 nt, synthetic construct
  source 1..21: mol_type = other RNA
gagcttttggtaaatggtctg

SEQ ID NO: 21675 - RNA, 21 nt, synthetic construct
  source 1..21: mol_type = other RNA
gaggaaaagtctggagtattt

SEQ ID NO: 21676 - RNA, 21 nt, synthetic construct
  source 1..21: mol_type = other RNA
gaggaaatactccagactttt

SEQ ID NO: 21677 - RNA, 21 nt, synthetic construct
  source 1..21: mol_type = other RNA
gaggaacctgtggaagaggag

SEQ ID NO: 21678 - RNA, 21 nt, synthetic construct
  source 1..21: mol_type = other RNA
gaggaagtacagaatataaat

SEQ ID NO: 21679 - RNA, 21 nt, synthetic construct
  source 1..21: mol_type = other RNA
gaggaagtcacactcagaccc

SEQ ID NO: 21680 - RNA, 21 nt, synthetic construct
  source 1..21: mol_type = other RNA
gaggaataaaacgcacagtta

SEQ ID NO: 21681 - RNA, 21 nt, synthetic construct
  source 1..21: mol_type = other RNA
gaggaggagggggagaaagaa

SEQ ID NO: 21682 - RNA, 21 nt, synthetic construct
  source 1..21: mol_type = other RNA
gaggagggggagaaagaagca

SEQ ID NO: 21683 - RNA, 21 nt, synthetic construct
  source 1..21: mol_type = other RNA
gaggcaccaccttcccagagt

SEQ ID NO: 21684 - RNA, 21 nt, synthetic construct
  source 1..21: mol_type = other RNA
gaggcagaaactgtagcacca

SEQ ID NO: 21685 - RNA, 21 nt, synthetic construct
  source 1..21: mol_type = other RNA
gaggcagctcagagttagagg

SEQ ID NO: 21686 - RNA, 21 nt, synthetic construct
  source 1..21: mol_type = other RNA
gaggcatcactgccatcaatt

SEQ ID NO: 21687 - RNA, 21 nt, synthetic construct
  source 1..21: mol_type = other RNA
gaggcctgtgatgctgatgat

SEQ ID NO: 21688 - RNA, 21 nt, synthetic construct
  source 1..21: mol_type = other RNA
gaggcctttcagaaagcatcg

SEQ ID NO: 21689 - RNA, 21 nt, synthetic construct
  source 1..21: mol_type = other RNA
gaggcttatgttgcaaaaggt

SEQ ID NO: 21690 - RNA, 21 nt, synthetic construct
  source 1..21: mol_type = other RNA
gagggagatgtgaactctggg

SEQ ID NO: 21691 - RNA, 21 nt, synthetic construct
  source 1..21: mol_type = other RNA
gagggcaacagactaagtcca

SEQ ID NO: 21692 - RNA, 21 nt, synthetic construct
  source 1..21: mol_type = other RNA
gagggcagccttgtggatggc

SEQ ID NO: 21693 - RNA, 21 nt, synthetic construct
  source 1..21: mol_type = other RNA
gaggggaaaagtgctaattac

SEQ ID NO: 21694 - RNA, 21 nt, synthetic construct
  source 1..21: mol_type = other RNA
gaggggccttcaattcaatcc

SEQ ID NO: 21695 - RNA, 21 nt, synthetic construct
  source 1..21: mol_type = other RNA
gagggggagaaagaagcaatt

SEQ ID NO: 21696 - RNA, 21 nt, synthetic construct
  source 1..21: mol_type = other RNA
gaggggtctgagtgtgacttc

SEQ ID NO: 21697 - RNA, 21 nt, synthetic construct
  source 1..21: mol_type = other RNA
gagggtaaacctgaggcacca

SEQ ID NO: 21698 - RNA, 21 nt, synthetic construct
  source 1..21: mol_type = other RNA
gagggtattccaagtgtttgc

SEQ ID NO: 21699 - RNA, 21 nt, synthetic construct
  source 1..21: mol_type = other RNA
gagggtttttggaactggaga

SEQ ID NO: 21700 - RNA, 21 nt, synthetic construct
  source 1..21: mol_type = other RNA
gaggtatgcgatgggtgagtg

SEQ ID NO: 21701 - RNA, 21 nt, synthetic construct
  source 1..21: mol_type = other RNA
gaggtcatttgattggagaga

SEQ ID NO: 21702 - RNA, 21 nt, synthetic construct
  source 1..21: mol_type = other RNA
gaggtctgtgcggaattgatc

SEQ ID NO: 21703 - RNA, 21 nt, synthetic construct
  source 1..21: mol_type = other RNA
gaggtgatggtatcaggaatg

SEQ ID NO: 21704 - RNA, 21 nt, synthetic construct
  source 1..21: mol_type = other RNA
gaggtgttctgacattggtct

SEQ ID NO: 21705 - RNA, 21 nt, synthetic construct
  source 1..21: mol_type = other RNA
gaggttctgtctggcaaatgg

SEQ ID NO: 21706 - RNA, 21 nt, synthetic construct
  source 1..21: mol_type = other RNA
gagtaagagccttatggtcaa

SEQ ID NO: 21707 - RNA, 21 nt, synthetic construct
  source 1..21: mol_type = other RNA
gagtatctagtaatttggaag

SEQ ID NO: 21708 - RNA, 21 nt, synthetic construct
  source 1..21: mol_type = other RNA
gagtatttcctctttattctt

SEQ ID NO: 21709 - RNA, 21 nt, synthetic construct
  source 1..21: mol_type = other RNA
gagtcaccttccaaattacta

SEQ ID NO: 21710 - RNA, 21 nt, synthetic construct
  source 1..21: mol_type = other RNA
gagtcctaatccatctacaca

SEQ ID NO: 21711 - RNA, 21 nt, synthetic construct
  source 1..21: mol_type = other RNA
gagtcctgactttacacaaga

SEQ ID NO: 21712 - RNA, 21 nt, synthetic construct
  source 1..21: mol_type = other RNA
gagtctcgaactcgcttgatt

SEQ ID NO: 21713 - RNA, 21 nt, synthetic construct
  source 1..21: mol_type = other RNA
gagtcttgacaggtgtatcca

SEQ ID NO: 21714 - RNA, 21 nt, synthetic construct
  source 1..21: mol_type = other RNA
gagtcttgccatagtcagatg

SEQ ID NO: 21715 - RNA, 21 nt, synthetic construct
  source 1..21: mol_type = other RNA
gagtgaggcctgtgatgctga

SEQ ID NO: 21716 - RNA, 21 nt, synthetic construct
  source 1..21: mol_type = other RNA
gagtgataagaaagaatctgt

SEQ ID NO: 21717 - RNA, 21 nt, synthetic construct
  source 1..21: mol_type = other RNA
gagtgatctcacaggacaact

SEQ ID NO: 21718 - RNA, 21 nt, synthetic construct
  source 1..21: mol_type = other RNA
gagtgccacttggtgtctcca

SEQ ID NO: 21719 - RNA, 21 nt, synthetic construct
  source 1..21: mol_type = other RNA
gagtgctttttccttctgaag

SEQ ID NO: 21720 - RNA, 21 nt, synthetic construct
  source 1..21: mol_type = other RNA
gagtgtccttctggggagggg

SEQ ID NO: 21721 - RNA, 21 nt, synthetic construct
  source 1..21: mol_type = other RNA
gagtgtgacttcctccctggt

SEQ ID NO: 21722 - RNA, 21 nt, synthetic construct
  source 1..21: mol_type = other RNA
gagttagaggtctgtgcggaa

SEQ ID NO: 21723 - RNA, 21 nt, synthetic construct
  source 1..21: mol_type = other RNA
gagttcacatctccctcaaaa

SEQ ID NO: 21724 - RNA, 21 nt, synthetic construct
  source 1..21: mol_type = other RNA
gagttcaccatgtgtgtgttc

SEQ ID NO: 21725 - RNA, 21 nt, synthetic construct
  source 1..21: mol_type = other RNA
gagttcgagactcataatgtc

SEQ ID NO: 21726 - RNA, 21 nt, synthetic construct
  source 1..21: mol_type = other RNA
gagttctgtagcccaagaaaa

SEQ ID NO: 21727 - RNA, 21 nt, synthetic construct
  source 1..21: mol_type = other RNA
gagttgtcctgtgagatcact

SEQ ID NO: 21728 - RNA, 21 nt, synthetic construct
  source 1..21: mol_type = other RNA
gagtttgaaaatggctcagtc

SEQ ID NO: 21729 - RNA, 21 nt, synthetic construct
  source 1..21: mol_type = other RNA
gagttttagaagaacaccacc

SEQ ID NO: 21730 - RNA, 21 nt, synthetic construct
  source 1..21: mol_type = other RNA
gataagaaagaatctgtgagt

SEQ ID NO: 21731 - RNA, 21 nt, synthetic construct
  source 1..21: mol_type = other RNA
gataatattgagacagtgttt

SEQ ID NO: 21732 - RNA, 21 nt, synthetic construct
  source 1..21: mol_type = other RNA
gataatgccagtaaactagct

SEQ ID NO: 21733 - RNA, 21 nt, synthetic construct
  source 1..21: mol_type = other RNA
gataatgtgcagcaaaagagc

SEQ ID NO: 21734 - RNA, 21 nt, synthetic construct
  source 1..21: mol_type = other RNA
gatacacctgtcaagactcaa

SEQ ID NO: 21735 - RNA, 21 nt, synthetic construct
  source 1..21: mol_type = other RNA
gatacataaccatgcaaatgt

SEQ ID NO: 21736 - RNA, 21 nt, synthetic construct
  source 1..21: mol_type = other RNA
gataccatcacctcccatttg

SEQ ID NO: 21737 - RNA, 21 nt, synthetic construct
  source 1..21: mol_type = other RNA
gatactgaagaattgatggca

SEQ ID NO: 21738 - RNA, 21 nt, synthetic construct
  source 1..21: mol_type = other RNA
gatagaaccaaccatgttgag

SEQ ID NO: 21739 - RNA, 21 nt, synthetic construct
  source 1..21: mol_type = other RNA
gatagccacaccccagcttta

SEQ ID NO: 21740 - RNA, 21 nt, synthetic construct
  source 1..21: mol_type = other RNA
gatagtgctgtgttgggggca

SEQ ID NO: 21741 - RNA, 21 nt, synthetic construct
  source 1..21: mol_type = other RNA
gatatgcccatctcctgcaga

SEQ ID NO: 21742 - RNA, 21 nt, synthetic construct
  source 1..21: mol_type = other RNA
gatatgtctggtcaacaagct

SEQ ID NO: 21743 - RNA, 21 nt, synthetic construct
  source 1..21: mol_type = other RNA
gatcaagaaattgaaacaaga

SEQ ID NO: 21744 - RNA, 21 nt, synthetic construct
  source 1..21: mol_type = other RNA
gatcaattccgcacagacctc

SEQ ID NO: 21745 - RNA, 21 nt, synthetic construct
  source 1..21: mol_type = other RNA
gatcactcacccatcgcatac

SEQ ID NO: 21746 - RNA, 21 nt, synthetic construct
  source 1..21: mol_type = other RNA
gatcagcaaagagaaggatca

SEQ ID NO: 21747 - RNA, 21 nt, synthetic construct
  source 1..21: mol_type = other RNA
gatcattctttggccagacta

SEQ ID NO: 21748 - RNA, 21 nt, synthetic construct
  source 1..21: mol_type = other RNA
gatcattgttgctttgggggt

SEQ ID NO: 21749 - RNA, 21 nt, synthetic construct
  source 1..21: mol_type = other RNA
gatcccaaagcaagatcttct

SEQ ID NO: 21750 - RNA, 21 nt, synthetic construct
  source 1..21: mol_type = other RNA
gatccttctctttgctgatca

SEQ ID NO: 21751 - RNA, 21 nt, synthetic construct
  source 1..21: mol_type = other RNA
gatctcacaggacaactcatt

SEQ ID NO: 21752 - RNA, 21 nt, synthetic construct
  source 1..21: mol_type = other RNA
gatctcgtgtttgctccttgt

SEQ ID NO: 21753 - RNA, 21 nt, synthetic construct
  source 1..21: mol_type = other RNA
gatctgaaggagcccagagag

SEQ ID NO: 21754 - RNA, 21 nt, synthetic construct
  source 1..21: mol_type = other RNA
gatctgccctgaggtatgcga

SEQ ID NO: 21755 - RNA, 21 nt, synthetic construct
  source 1..21: mol_type = other RNA
gatcttcttcacaggtgcttt

SEQ ID NO: 21756 - RNA, 21 nt, synthetic construct
  source 1..21: mol_type = other RNA
gatcttgctttgggatcacat

SEQ ID NO: 21757 - RNA, 21 nt, synthetic construct
  source 1..21: mol_type = other RNA
gatcttgtgcccccaacacag

SEQ ID NO: 21758 - RNA, 21 nt, synthetic construct
  source 1..21: mol_type = other RNA
gatgagaaacaaagagcaaga

SEQ ID NO: 21759 - RNA, 21 nt, synthetic construct
  source 1..21: mol_type = other RNA
gatgagctctctcaggcagtg

SEQ ID NO: 21760 - RNA, 21 nt, synthetic construct
  source 1..21: mol_type = other RNA
gatgatgctgataatgccagt

SEQ ID NO: 21761 - RNA, 21 nt, synthetic construct
  source 1..21: mol_type = other RNA
gatgcaagccacatgcctgta

SEQ ID NO: 21762 - RNA, 21 nt, synthetic construct
  source 1..21: mol_type = other RNA
gatgcaagttttgggtcttgt

SEQ ID NO: 21763 - RNA, 21 nt, synthetic construct
  source 1..21: mol_type = other RNA
gatgcacaggccaattaaggt

SEQ ID NO: 21764 - RNA, 21 nt, synthetic construct
  source 1..21: mol_type = other RNA
gatgccaccttagagcagcat

SEQ ID NO: 21765 - RNA, 21 nt, synthetic construct
  source 1..21: mol_type = other RNA
gatgcctcattacgttttaga

SEQ ID NO: 21766 - RNA, 21 nt, synthetic construct
  source 1..21: mol_type = other RNA
gatgctcttttgctgcacatt

SEQ ID NO: 21767 - RNA, 21 nt, synthetic construct
  source 1..21: mol_type = other RNA
gatgctgataatgccagtaaa

SEQ ID NO: 21768 - RNA, 21 nt, synthetic construct
  source 1..21: mol_type = other RNA
gatgctgatgatgctgataat

SEQ ID NO: 21769 - RNA, 21 nt, synthetic construct
  source 1..21: mol_type = other RNA
gatgctgctccatggtctcaa

SEQ ID NO: 21770 - RNA, 21 nt, synthetic construct
  source 1..21: mol_type = other RNA
gatgctttctgaaaggcctca

SEQ ID NO: 21771 - RNA, 21 nt, synthetic construct
  source 1..21: mol_type = other RNA
gatggaacaggatagaaccaa

SEQ ID NO: 21772 - RNA, 21 nt, synthetic construct
  source 1..21: mol_type = other RNA
gatggattaggactctgggaa

SEQ ID NO: 21773 - RNA, 21 nt, synthetic construct
  source 1..21: mol_type = other RNA
gatggattgaattgaaggccc

SEQ ID NO: 21774 - RNA, 21 nt, synthetic construct
  source 1..21: mol_type = other RNA
gatggcagtgatgcctcatta

SEQ ID NO: 21775 - RNA, 21 nt, synthetic construct
  source 1..21: mol_type = other RNA
gatggccccgaagcaagcctg

SEQ ID NO: 21776 - RNA, 21 nt, synthetic construct
  source 1..21: mol_type = other RNA
gatgggaaatcatattgagtc

SEQ ID NO: 21777 - RNA, 21 nt, synthetic construct
  source 1..21: mol_type = other RNA
gatgggattccgcttggtgaa

SEQ ID NO: 21778 - RNA, 21 nt, synthetic construct
  source 1..21: mol_type = other RNA
gatgggcatatctcaaaaact

SEQ ID NO: 21779 - RNA, 21 nt, synthetic construct
  source 1..21: mol_type = other RNA
gatgggtgagtgatctcacag

SEQ ID NO: 21780 - RNA, 21 nt, synthetic construct
  source 1..21: mol_type = other RNA
gatggtatcaggaatggactt

SEQ ID NO: 21781 - RNA, 21 nt, synthetic construct
  source 1..21: mol_type = other RNA
gatggtggtggtggtgtggta

SEQ ID NO: 21782 - RNA, 21 nt, synthetic construct
  source 1..21: mol_type = other RNA
gatggttgtgtttgtgctgcc

SEQ ID NO: 21783 - RNA, 21 nt, synthetic construct
  source 1..21: mol_type = other RNA
gatgtgaactctgggatggtt

SEQ ID NO: 21784 - RNA, 21 nt, synthetic construct
  source 1..21: mol_type = other RNA
gatgtggttttctgcaccgca

SEQ ID NO: 21785 - RNA, 21 nt, synthetic construct
  source 1..21: mol_type = other RNA
gatgtgtaggtaagtgccaga

SEQ ID NO: 21786 - RNA, 21 nt, synthetic construct
  source 1..21: mol_type = other RNA
gatgtgtagtctgttctttat

SEQ ID NO: 21787 - RNA, 21 nt, synthetic construct
  source 1..21: mol_type = other RNA
gatgttattttctgcaggaga

SEQ ID NO: 21788 - RNA, 21 nt, synthetic construct
  source 1..21: mol_type = other RNA
gatgttggtccactgtacctt

SEQ ID NO: 21789 - RNA, 21 nt, synthetic construct
  source 1..21: mol_type = other RNA
gattaggactctgggaaggtg

SEQ ID NO: 21790 - RNA, 21 nt, synthetic construct
  source 1..21: mol_type = other RNA
gattcaagtgctgtttcaaca

SEQ ID NO: 21791 - RNA, 21 nt, synthetic construct
  source 1..21: mol_type = other RNA
gattcatttcaacttggtaca

SEQ ID NO: 21792 - RNA, 21 nt, synthetic construct
  source 1..21: mol_type = other RNA
gattcccaaactgaaaaactt

SEQ ID NO: 21793 - RNA, 21 nt, synthetic construct
  source 1..21: mol_type = other RNA
gattccgcttggtgaaaacga

SEQ ID NO: 21794 - RNA, 21 nt, synthetic construct
  source 1..21: mol_type = other RNA
gattccttttctgccactacc

SEQ ID NO: 21795 - RNA, 21 nt, synthetic construct
  source 1..21: mol_type = other RNA
gattctcttgcttagttacct

SEQ ID NO: 21796 - RNA, 21 nt, synthetic construct
  source 1..21: mol_type = other RNA
gattctgaagggtcgagacaa

SEQ ID NO: 21797 - RNA, 21 nt, synthetic construct
  source 1..21: mol_type = other RNA
gattctgaatgagcaggaggg

SEQ ID NO: 21798 - RNA, 21 nt, synthetic construct
  source 1..21: mol_type = other RNA
gattctttcttatcactcaaa

SEQ ID NO: 21799 - RNA, 21 nt, synthetic construct
  source 1..21: mol_type = other RNA
gattgaattgaaggcccctcg

SEQ ID NO: 21800 - RNA, 21 nt, synthetic construct
  source 1..21: mol_type = other RNA
gattggagagattgggttgat

SEQ ID NO: 21801 - RNA, 21 nt, synthetic construct
  source 1..21: mol_type = other RNA
gattgggttgatactgaagaa

SEQ ID NO: 21802 - RNA, 21 nt, synthetic construct
  source 1..21: mol_type = other RNA
gattgtgtttccattgcggtg

SEQ ID NO: 21803 - RNA, 21 nt, synthetic construct
  source 1..21: mol_type = other RNA
gatttatattctgtacttcct

SEQ ID NO: 21804 - RNA, 21 nt, synthetic construct
  source 1..21: mol_type = other RNA
gatttcaccagtttttcaaca

SEQ ID NO: 21805 - RNA, 21 nt, synthetic construct
  source 1..21: mol_type = other RNA
gatttcatggtctgactataa

SEQ ID NO: 21806 - RNA, 21 nt, synthetic construct
  source 1..21: mol_type = other RNA
gatttcattttcaacaaagag

SEQ ID NO: 21807 - RNA, 21 nt, synthetic construct
  source 1..21: mol_type = other RNA
gatttcccatcttgcagatgt

SEQ ID NO: 21808 - RNA, 21 nt, synthetic construct
  source 1..21: mol_type = other RNA
gatttctttcttggcttaccc

SEQ ID NO: 21809 - RNA, 21 nt, synthetic construct
  source 1..21: mol_type = other RNA
gatttgagagtaagagcctta

SEQ ID NO: 21810 - RNA, 21 nt, synthetic construct
  source 1..21: mol_type = other RNA
gatttgagtgataagaaagaa

SEQ ID NO: 21811 - RNA, 21 nt, synthetic construct
  source 1..21: mol_type = other RNA
gattttcaccatgaaaacatt

SEQ ID NO: 21812 - RNA, 21 nt, synthetic construct
  source 1..21: mol_type = other RNA
gattttcaggcccactgcagt

SEQ ID NO: 21813 - RNA, 21 nt, synthetic construct
  source 1..21: mol_type = other RNA
gatttttgttgttgtagttgt

SEQ ID NO: 21814 - RNA, 21 nt, synthetic construct
  source 1..21: mol_type = other RNA
gcaaaaagttcaggatgtgta

SEQ ID NO: 21815 - RNA, 21 nt, synthetic construct
  source 1..21: mol_type = other RNA
gcaaaagagcatcattgagac

SEQ ID NO: 21816 - RNA, 21 nt, synthetic construct
  source 1..21: mol_type = other RNA
gcaaaaggtgtgagtttgaaa

SEQ ID NO: 21817 - RNA, 21 nt, synthetic construct
  source 1..21: mol_type = other RNA
gcaaaatacaggtttcttgtt

SEQ ID NO: 21818 - RNA, 21 nt, synthetic construct
  source 1..21: mol_type = other RNA
gcaaaatggaggaataaaacg

SEQ ID NO: 21819 - RNA, 21 nt, synthetic construct
  source 1..21: mol_type = other RNA
gcaaacaacttcttcagaaaa

SEQ ID NO: 21820 - RNA, 21 nt, synthetic construct
  source 1..21: mol_type = other RNA
gcaaacacagcaaccccaaac

SEQ ID NO: 21821 - RNA, 21 nt, synthetic construct
  source 1..21: mol_type = other RNA
gcaaacacgagatcttgtgcc

SEQ ID NO: 21822 - RNA, 21 nt, synthetic construct
  source 1..21: mol_type = other RNA
gcaaacacttggaataccctc

SEQ ID NO: 21823 - RNA, 21 nt, synthetic construct
  source 1..21: mol_type = other RNA
gcaaagagaaggatcattctt

SEQ ID NO: 21824 - RNA, 21 nt, synthetic construct
  source 1..21: mol_type = other RNA
gcaaagctcagtgttcactaa

SEQ ID NO: 21825 - RNA, 21 nt, synthetic construct
  source 1..21: mol_type = other RNA
gcaaaggtacttgatacataa

SEQ ID NO: 21826 - RNA, 21 nt, synthetic construct
  source 1..21: mol_type = other RNA
gcaaatgggaggtgatggtat

SEQ ID NO: 21827 - RNA, 21 nt, synthetic construct
  source 1..21: mol_type = other RNA
gcaaatgtttttcctgtgcct

SEQ ID NO: 21828 - RNA, 21 nt, synthetic construct
  source 1..21: mol_type = other RNA
gcaaattgctgctggaacctg

SEQ ID NO: 21829 - RNA, 21 nt, synthetic construct
  source 1..21: mol_type = other RNA
gcaacaatgatcagcaaagag

SEQ ID NO: 21830 - RNA, 21 nt, synthetic construct
  source 1..21: mol_type = other RNA
gcaacagactaagtccattcc

SEQ ID NO: 21831 - RNA, 21 nt, synthetic construct
  source 1..21: mol_type = other RNA
gcaacagcagcaaaaattaca

SEQ ID NO: 21832 - RNA, 21 nt, synthetic construct
  source 1..21: mol_type = other RNA
gcaacataagcctcataaaca

SEQ ID NO: 21833 - RNA, 21 nt, synthetic construct
  source 1..21: mol_type = other RNA
gcaaccccaaactgagtcttg

SEQ ID NO: 21834 - RNA, 21 nt, synthetic construct
  source 1..21: mol_type = other RNA
gcaacttgctcagcaaaggta

SEQ ID NO: 21835 - RNA, 21 nt, synthetic construct
  source 1..21: mol_type = other RNA
gcaagaacagcagcaaacaca

SEQ ID NO: 21836 - RNA, 21 nt, synthetic construct
  source 1..21: mol_type = other RNA
gcaagactcagtttggggttg

SEQ ID NO: 21837 - RNA, 21 nt, synthetic construct
  source 1..21: mol_type = other RNA
gcaagagaatccacctgcaag

SEQ ID NO: 21838 - RNA, 21 nt, synthetic construct
  source 1..21: mol_type = other RNA
gcaagagattctgaagggtcg

SEQ ID NO: 21839 - RNA, 21 nt, synthetic construct
  source 1..21: mol_type = other RNA
gcaagatcttcttcacaggtg

SEQ ID NO: 21840 - RNA, 21 nt, synthetic construct
  source 1..21: mol_type = other RNA
gcaagatgggaaatcatattg

SEQ ID NO: 21841 - RNA, 21 nt, synthetic construct
  source 1..21: mol_type = other RNA
gcaagccacatgcctgtatgc

SEQ ID NO: 21842 - RNA, 21 nt, synthetic construct
  source 1..21: mol_type = other RNA
gcaagcctgatggaacaggat

SEQ ID NO: 21843 - RNA, 21 nt, synthetic construct
  source 1..21: mol_type = other RNA
gcaagctcctggtggcagctc

SEQ ID NO: 21844 - RNA, 21 nt, synthetic construct
  source 1..21: mol_type = other RNA
gcaagctgtgataatgtgcag

SEQ ID NO: 21845 - RNA, 21 nt, synthetic construct
  source 1..21: mol_type = other RNA
gcaagcttacacccagaaaac

SEQ ID NO: 21846 - RNA, 21 nt, synthetic construct
  source 1..21: mol_type = other RNA
gcaagtaaaagttgaaatgtc

SEQ ID NO: 21847 - RNA, 21 nt, synthetic construct
  source 1..21: mol_type = other RNA
gcaagttgcgcagcttgttga

SEQ ID NO: 21848 - RNA, 21 nt, synthetic construct
  source 1..21: mol_type = other RNA
gcaagttttgggtcttgtttc

SEQ ID NO: 21849 - RNA, 21 nt, synthetic construct
  source 1..21: mol_type = other RNA
gcaatgctaaatacctgttcc

SEQ ID NO: 21850 - RNA, 21 nt, synthetic construct
  source 1..21: mol_type = other RNA
gcaatggaaacacaatctgga

SEQ ID NO: 21851 - RNA, 21 nt, synthetic construct
  source 1..21: mol_type = other RNA
gcaattgtgatggtggtggtg

SEQ ID NO: 21852 - RNA, 21 nt, synthetic construct
  source 1..21: mol_type = other RNA
gcaatttgcaagctcctggtg

SEQ ID NO: 21853 - RNA, 21 nt, synthetic construct
  source 1..21: mol_type = other RNA
gcacaaacacaaccatcccag

SEQ ID NO: 21854 - RNA, 21 nt, synthetic construct
  source 1..21: mol_type = other RNA
gcacaagatctcgtgtttgct

SEQ ID NO: 21855 - RNA, 21 nt, synthetic construct
  source 1..21: mol_type = other RNA
gcacaagtcacaaatgtacca

SEQ ID NO: 21856 - RNA, 21 nt, synthetic construct
  source 1..21: mol_type = other RNA
gcacacagcaccaccagaaaa

SEQ ID NO: 21857 - RNA, 21 nt, synthetic construct
  source 1..21: mol_type = other RNA
gcacagacctctaactctgag

SEQ ID NO: 21858 - RNA, 21 nt, synthetic construct
  source 1..21: mol_type = other RNA
gcacaggaaaaacatttgcat

SEQ ID NO: 21859 - RNA, 21 nt, synthetic construct
  source 1..21: mol_type = other RNA
gcacaggccaattaaggtgga

SEQ ID NO: 21860 - RNA, 21 nt, synthetic construct
  source 1..21: mol_type = other RNA
gcacagttagtgaaccttctc

SEQ ID NO: 21861 - RNA, 21 nt, synthetic construct
  source 1..21: mol_type = other RNA
gcacatgagcttttggtaaat

SEQ ID NO: 21862 - RNA, 21 nt, synthetic construct
  source 1..21: mol_type = other RNA
gcacattatcacagcttgcag

SEQ ID NO: 21863 - RNA, 21 nt, synthetic construct
  source 1..21: mol_type = other RNA
gcaccaccagaaaacaaaaca

SEQ ID NO: 21864 - RNA, 21 nt, synthetic construct
  source 1..21: mol_type = other RNA
gcaccaccttcccagagtcct

SEQ ID NO: 21865 - RNA, 21 nt, synthetic construct
  source 1..21: mol_type = other RNA
gcaccattaggcattagcact

SEQ ID NO: 21866 - RNA, 21 nt, synthetic construct
  source 1..21: mol_type = other RNA
gcaccattcatttcattttgt

SEQ ID NO: 21867 - RNA, 21 nt, synthetic construct
  source 1..21: mol_type = other RNA
gcaccgcaatggaaacacaat

SEQ ID NO: 21868 - RNA, 21 nt, synthetic construct
  source 1..21: mol_type = other RNA
gcacctggtgtgagggttttt

SEQ ID NO: 21869 - RNA, 21 nt, synthetic construct
  source 1..21: mol_type = other RNA
gcacctgtgaagaagatcttg

SEQ ID NO: 21870 - RNA, 21 nt, synthetic construct
  source 1..21: mol_type = other RNA
gcactagatttcattttcaac

SEQ ID NO: 21871 - RNA, 21 nt, synthetic construct
  source 1..21: mol_type = other RNA
gcactatctgaaaccaggatg

SEQ ID NO: 21872 - RNA, 21 nt, synthetic construct
  source 1..21: mol_type = other RNA
gcactctgaatggtggagttt

SEQ ID NO: 21873 - RNA, 21 nt, synthetic construct
  source 1..21: mol_type = other RNA
gcactctttcaaaagttatta

SEQ ID NO: 21874 - RNA, 21 nt, synthetic construct
  source 1..21: mol_type = other RNA
gcactgccttgtttttaagta

SEQ ID NO: 21875 - RNA, 21 nt, synthetic construct
  source 1..21: mol_type = other RNA
gcacttacctacacatctgca

SEQ ID NO: 21876 - RNA, 21 nt, synthetic construct
  source 1..21: mol_type = other RNA
gcacttctccaaaacagacca

SEQ ID NO: 21877 - RNA, 21 nt, synthetic construct
  source 1..21: mol_type = other RNA
gcacttgaatcaacaggcttc

SEQ ID NO: 21878 - RNA, 21 nt, synthetic construct
  source 1..21: mol_type = other RNA
gcacttgatttcatggtctga

SEQ ID NO: 21879 - RNA, 21 nt, synthetic construct
  source 1..21: mol_type = other RNA
gcacttttcccctcctgctca

SEQ ID NO: 21880 - RNA, 21 nt, synthetic construct
  source 1..21: mol_type = other RNA
gcagaaaaccacatctcacat

SEQ ID NO: 21881 - RNA, 21 nt, synthetic construct
  source 1..21: mol_type = other RNA
gcagaaaaggaatccttagtg

SEQ ID NO: 21882 - RNA, 21 nt, synthetic construct
  source 1..21: mol_type = other RNA
gcagaaaataacatccaggga

SEQ ID NO: 21883 - RNA, 21 nt, synthetic construct
  source 1..21: mol_type = other RNA
gcagaaactgtagcaccatta

SEQ ID NO: 21884 - RNA, 21 nt, synthetic construct
  source 1..21: mol_type = other RNA
gcagaacttgatagccacacc

SEQ ID NO: 21885 - RNA, 21 nt, synthetic construct
  source 1..21: mol_type = other RNA
gcagaagtcacaacaagcttc

SEQ ID NO: 21886 - RNA, 21 nt, synthetic construct
  source 1..21: mol_type = other RNA
gcagatcaattccgcacagac

SEQ ID NO: 21887 - RNA, 21 nt, synthetic construct
  source 1..21: mol_type = other RNA
gcagatgtgtaggtaagtgcc

SEQ ID NO: 21888 - RNA, 21 nt, synthetic construct
  source 1..21: mol_type = other RNA
gcagattcccaaactgaaaaa

SEQ ID NO: 21889 - RNA, 21 nt, synthetic construct
  source 1..21: mol_type = other RNA
gcagcaaaagagcatcattga

SEQ ID NO: 21890 - RNA, 21 nt, synthetic construct
  source 1..21: mol_type = other RNA
gcagcaaacaacttcttcaga

SEQ ID NO: 21891 - RNA, 21 nt, synthetic construct
  source 1..21: mol_type = other RNA
gcagcaaacacagcaacccca

SEQ ID NO: 21892 - RNA, 21 nt, synthetic construct
  source 1..21: mol_type = other RNA
gcagcaatttgcaagctcctg

SEQ ID NO: 21893 - RNA, 21 nt, synthetic construct
  source 1..21: mol_type = other RNA
gcagcacaaacacaaccatcc

SEQ ID NO: 21894 - RNA, 21 nt, synthetic construct
  source 1..21: mol_type = other RNA
gcagcagtggtttgtctagtc

SEQ ID NO: 21895 - RNA, 21 nt, synthetic construct
  source 1..21: mol_type = other RNA
gcagcatctgaagcagtttca

SEQ ID NO: 21896 - RNA, 21 nt, synthetic construct
  source 1..21: mol_type = other RNA
gcagcatgcttttgagtgtcc

SEQ ID NO: 21897 - RNA, 21 nt, synthetic construct
  source 1..21: mol_type = other RNA
gcagcccttctccgatgcttt

SEQ ID NO: 21898 - RNA, 21 nt, synthetic construct
  source 1..21: mol_type = other RNA
gcagccttgtggatggccccg

SEQ ID NO: 21899 - RNA, 21 nt, synthetic construct
  source 1..21: mol_type = other RNA
gcagctagtttactggcatta

SEQ ID NO: 21900 - RNA, 21 nt, synthetic construct
  source 1..21: mol_type = other RNA
gcagctcagagttagaggtct

SEQ ID NO: 21901 - RNA, 21 nt, synthetic construct
  source 1..21: mol_type = other RNA
gcagctctgaacggtatttaa

SEQ ID NO: 21902 - RNA, 21 nt, synthetic construct
  source 1..21: mol_type = other RNA
gcagctggctttggaggcagc

SEQ ID NO: 21903 - RNA, 21 nt, synthetic construct
  source 1..21: mol_type = other RNA
gcagctgttcttttggttggt

SEQ ID NO: 21904 - RNA, 21 nt, synthetic construct
  source 1..21: mol_type = other RNA
gcagcttgttgaccagacata

SEQ ID NO: 21905 - RNA, 21 nt, synthetic construct
  source 1..21: mol_type = other RNA
gcaggaaacaagacccaaaac

SEQ ID NO: 21906 - RNA, 21 nt, synthetic construct
  source 1..21: mol_type = other RNA
gcaggagatgggcatatctca

SEQ ID NO: 21907 - RNA, 21 nt, synthetic construct
  source 1..21: mol_type = other RNA
gcaggaggggaaaagtgctaa

SEQ ID NO: 21908 - RNA, 21 nt, synthetic construct
  source 1..21: mol_type = other RNA
gcagggacaatgactgttcca

SEQ ID NO: 21909 - RNA, 21 nt, synthetic construct
  source 1..21: mol_type = other RNA
gcaggtggattctcttgctta

SEQ ID NO: 21910 - RNA, 21 nt, synthetic construct
  source 1..21: mol_type = other RNA
gcagtcaaccaaatgtctccg

SEQ ID NO: 21911 - RNA, 21 nt, synthetic construct
  source 1..21: mol_type = other RNA
gcagtcactgtgtggcactag

SEQ ID NO: 21912 - RNA, 21 nt, synthetic construct
  source 1..21: mol_type = other RNA
gcagtcccaaggtacagtgga

SEQ ID NO: 21913 - RNA, 21 nt, synthetic construct
  source 1..21: mol_type = other RNA
gcagtctgtatgtcattcctg

SEQ ID NO: 21914 - RNA, 21 nt, synthetic construct
  source 1..21: mol_type = other RNA
gcagtgatgcctcattacgtt

SEQ ID NO: 21915 - RNA, 21 nt, synthetic construct
  source 1..21: mol_type = other RNA
gcagtgctaatgcctaatggt

SEQ ID NO: 21916 - RNA, 21 nt, synthetic construct
  source 1..21: mol_type = other RNA
gcagtggagagctacaggaca

SEQ ID NO: 21917 - RNA, 21 nt, synthetic construct
  source 1..21: mol_type = other RNA
gcagtgggcctgaaaatccag

SEQ ID NO: 21918 - RNA, 21 nt, synthetic construct
  source 1..21: mol_type = other RNA
gcagtgggcttccattctgga

SEQ ID NO: 21919 - RNA, 21 nt, synthetic construct
  source 1..21: mol_type = other RNA
gcagtggtgagtgaggcctgt

SEQ ID NO: 21920 - RNA, 21 nt, synthetic construct
  source 1..21: mol_type = other RNA
gcagtggtttgtctagtcaaa

SEQ ID NO: 21921 - RNA, 21 nt, synthetic construct
  source 1..21: mol_type = other RNA
gcagttaaagatttcaccagt

SEQ ID NO: 21922 - RNA, 21 nt, synthetic construct
  source 1..21: mol_type = other RNA
gcagttatgtgttgaaaaact

SEQ ID NO: 21923 - RNA, 21 nt, synthetic construct
  source 1..21: mol_type = other RNA
gcagttgatgagaaacaaaga

SEQ ID NO: 21924 - RNA, 21 nt, synthetic construct
  source 1..21: mol_type = other RNA
gcagttgtcctgtagctctcc

SEQ ID NO: 21925 - RNA, 21 nt, synthetic construct
  source 1..21: mol_type = other RNA
gcagtttcacgccaagtcgtt

SEQ ID NO: 21926 - RNA, 21 nt, synthetic construct
  source 1..21: mol_type = other RNA
gcataacccaccaatttttgg

SEQ ID NO: 21927 - RNA, 21 nt, synthetic construct
  source 1..21: mol_type = other RNA
gcatacaggcatgtggcttgc

SEQ ID NO: 21928 - RNA, 21 nt, synthetic construct
  source 1..21: mol_type = other RNA
gcatacatgtgtagatggatt

SEQ ID NO: 21929 - RNA, 21 nt, synthetic construct
  source 1..21: mol_type = other RNA
gcatacctcagggcagatcaa

SEQ ID NO: 21930 - RNA, 21 nt, synthetic construct
  source 1..21: mol_type = other RNA
gcatatctcaaaaactgattt

SEQ ID NO: 21931 - RNA, 21 nt, synthetic construct
  source 1..21: mol_type = other RNA
gcatcacaggcctcactcacc

SEQ ID NO: 21932 - RNA, 21 nt, synthetic construct
  source 1..21: mol_type = other RNA
gcatcacatgcaatattttcc

SEQ ID NO: 21933 - RNA, 21 nt, synthetic construct
  source 1..21: mol_type = other RNA
gcatcactgccatcaattctt

SEQ ID NO: 21934 - RNA, 21 nt, synthetic construct
  source 1..21: mol_type = other RNA
gcatcatcagcatcacaggcc

SEQ ID NO: 21935 - RNA, 21 nt, synthetic construct
  source 1..21: mol_type = other RNA
gcatcattgagaccatggagc

SEQ ID NO: 21936 - RNA, 21 nt, synthetic construct
  source 1..21: mol_type = other RNA
gcatccaggttccaccttaat

SEQ ID NO: 21937 - RNA, 21 nt, synthetic construct
  source 1..21: mol_type = other RNA
gcatcggagaagggctgcata

SEQ ID NO: 21938 - RNA, 21 nt, synthetic construct
  source 1..21: mol_type = other RNA
gcatctcttacagaagcaaga

SEQ ID NO: 21939 - RNA, 21 nt, synthetic construct
  source 1..21: mol_type = other RNA
gcatctgaagcagtttcacgc

SEQ ID NO: 21940 - RNA, 21 nt, synthetic construct
  source 1..21: mol_type = other RNA
gcatctgactatggcaagact

SEQ ID NO: 21941 - RNA, 21 nt, synthetic construct
  source 1..21: mol_type = other RNA
gcatgcaaaatacaggtttct

SEQ ID NO: 21942 - RNA, 21 nt, synthetic construct
  source 1..21: mol_type = other RNA
gcatgcacttgatttcatggt

SEQ ID NO: 21943 - RNA, 21 nt, synthetic construct
  source 1..21: mol_type = other RNA
gcatgctgctctaaggtggca

SEQ ID NO: 21944 - RNA, 21 nt, synthetic construct
  source 1..21: mol_type = other RNA
gcatgcttttgagtgtccttc

SEQ ID NO: 21945 - RNA, 21 nt, synthetic construct
  source 1..21: mol_type = other RNA
gcatggttatgtatcaagtac

SEQ ID NO: 21946 - RNA, 21 nt, synthetic construct
  source 1..21: mol_type = other RNA
gcatgtgatgcaagttttggg

SEQ ID NO: 21947 - RNA, 21 nt, synthetic construct
  source 1..21: mol_type = other RNA
gcatgtggcttgcatccaggt

SEQ ID NO: 21948 - RNA, 21 nt, synthetic construct
  source 1..21: mol_type = other RNA
gcatgttggaatttccagtgt

SEQ ID NO: 21949 - RNA, 21 nt, synthetic construct
  source 1..21: mol_type = other RNA
gcattagcactgccttgtttt

SEQ ID NO: 21950 - RNA, 21 nt, synthetic construct
  source 1..21: mol_type = other RNA
gcattatcagcatcatcagca

SEQ ID NO: 21951 - RNA, 21 nt, synthetic construct
  source 1..21: mol_type = other RNA
gcattgcagctagtttactgg

SEQ ID NO: 21952 - RNA, 21 nt, synthetic construct
  source 1..21: mol_type = other RNA
gcatttatgtgagatgtggtt

SEQ ID NO: 21953 - RNA, 21 nt, synthetic construct
  source 1..21: mol_type = other RNA
gcattttcttgggctacagaa

SEQ ID NO: 21954 - RNA, 21 nt, synthetic construct
  source 1..21: mol_type = other RNA
gccaaagaatgatccttctct

SEQ ID NO: 21955 - RNA, 21 nt, synthetic construct
  source 1..21: mol_type = other RNA
gccaagaaagaaatccaggtg

SEQ ID NO: 21956 - RNA, 21 nt, synthetic construct
  source 1..21: mol_type = other RNA
gccaagtcgttatttgaccat

SEQ ID NO: 21957 - RNA, 21 nt, synthetic construct
  source 1..21: mol_type = other RNA
gccaattaaggtggaacctgg

SEQ ID NO: 21958 - RNA, 21 nt, synthetic construct
  source 1..21: mol_type = other RNA
gccacacagtgactgcacatg

SEQ ID NO: 21959 - RNA, 21 nt, synthetic construct
  source 1..21: mol_type = other RNA
gccacaccccagctttagagc

SEQ ID NO: 21960 - RNA, 21 nt, synthetic construct
  source 1..21: mol_type = other RNA
gccacatgcctgtatgcacac

SEQ ID NO: 21961 - RNA, 21 nt, synthetic construct
  source 1..21: mol_type = other RNA
gccaccaggagcttgcaaatt

SEQ ID NO: 21962 - RNA, 21 nt, synthetic construct
  source 1..21: mol_type = other RNA
gccaccttagagcagcatgct

SEQ ID NO: 21963 - RNA, 21 nt, synthetic construct
  source 1..21: mol_type = other RNA
gccactaccacaccaccacca

SEQ ID NO: 21964 - RNA, 21 nt, synthetic construct
  source 1..21: mol_type = other RNA
gccacttggtgtctccattta

SEQ ID NO: 21965 - RNA, 21 nt, synthetic construct
  source 1..21: mol_type = other RNA
gccagaaatgtactgagacac

SEQ ID NO: 21966 - RNA, 21 nt, synthetic construct
  source 1..21: mol_type = other RNA
gccagaatagtcgtgtgagtc

SEQ ID NO: 21967 - RNA, 21 nt, synthetic construct
  source 1..21: mol_type = other RNA
gccagacagaacctctggcta

SEQ ID NO: 21968 - RNA, 21 nt, synthetic construct
  source 1..21: mol_type = other RNA
gccagactaaagtggaagaat

SEQ ID NO: 21969 - RNA, 21 nt, synthetic construct
  source 1..21: mol_type = other RNA
gccagaggttctgtctggcaa

SEQ ID NO: 21970 - RNA, 21 nt, synthetic construct
  source 1..21: mol_type = other RNA
gccagcagttgatgagaaaca

SEQ ID NO: 21971 - RNA, 21 nt, synthetic construct
  source 1..21: mol_type = other RNA
gccagctgcagtggtgagtga

SEQ ID NO: 21972 - RNA, 21 nt, synthetic construct
  source 1..21: mol_type = other RNA
gccagtaaactagctgcaatg

SEQ ID NO: 21973 - RNA, 21 nt, synthetic construct
  source 1..21: mol_type = other RNA
gccagtcacagttttgactag

SEQ ID NO: 21974 - RNA, 21 nt, synthetic construct
  source 1..21: mol_type = other RNA
gccatagtcagatgcacaggc

SEQ ID NO: 21975 - RNA, 21 nt, synthetic construct
  source 1..21: mol_type = other RNA
gccatcaattcttcagtatca

SEQ ID NO: 21976 - RNA, 21 nt, synthetic construct
  source 1..21: mol_type = other RNA
gccatgtgtctcagtacattt

SEQ ID NO: 21977 - RNA, 21 nt, synthetic construct
  source 1..21: mol_type = other RNA
gccattaacagtcaggctact

SEQ ID NO: 21978 - RNA, 21 nt, synthetic construct
  source 1..21: mol_type = other RNA
gccattttcaaactcacacct

SEQ ID NO: 21979 - RNA, 21 nt, synthetic construct
  source 1..21: mol_type = other RNA
gcccaagaaaatgcagttaaa

SEQ ID NO: 21980 - RNA, 21 nt, synthetic construct
  source 1..21: mol_type = other RNA
gcccactgcagttatgtgttg

SEQ ID NO: 21981 - RNA, 21 nt, synthetic construct
  source 1..21: mol_type = other RNA
gcccactgcctgagagagctc

SEQ ID NO: 21982 - RNA, 21 nt, synthetic construct
  source 1..21: mol_type = other RNA
gcccagagagagaaggttcac

SEQ ID NO: 21983 - RNA, 21 nt, synthetic construct
  source 1..21: mol_type = other RNA
gcccatctcctgcagaaaata

SEQ ID NO: 21984 - RNA, 21 nt, synthetic construct
  source 1..21: mol_type = other RNA
gcccccaacacagcactatct

SEQ ID NO: 21985 - RNA, 21 nt, synthetic construct
  source 1..21: mol_type = other RNA
gccccccaggcatgttggaat

SEQ ID NO: 21986 - RNA, 21 nt, synthetic construct
  source 1..21: mol_type = other RNA
gccccgaagcaagcctgatgg

SEQ ID NO: 21987 - RNA, 21 nt, synthetic construct
  source 1..21: mol_type = other RNA
gcccctcgttttcaccaagcg

SEQ ID NO: 21988 - RNA, 21 nt, synthetic construct
  source 1..21: mol_type = other RNA
gccctcaacatggttggttct

SEQ ID NO: 21989 - RNA, 21 nt, synthetic construct
  source 1..21: mol_type = other RNA
gccctgacatttcaactttta

SEQ ID NO: 21990 - RNA, 21 nt, synthetic construct
  source 1..21: mol_type = other RNA
gccctgaggtatgcgatgggt

SEQ ID NO: 21991 - RNA, 21 nt, synthetic construct
  source 1..21: mol_type = other RNA
gcccttctccgatgctttctg

SEQ ID NO: 21992 - RNA, 21 nt, synthetic construct
  source 1..21: mol_type = other RNA
gcccttgattcatttcaactt

SEQ ID NO: 21993 - RNA, 21 nt, synthetic construct
  source 1..21: mol_type = other RNA
gcctaatggtgctacagtttc

SEQ ID NO: 21994 - RNA, 21 nt, synthetic construct
  source 1..21: mol_type = other RNA
gcctcactcaccactgcagct

SEQ ID NO: 21995 - RNA, 21 nt, synthetic construct
  source 1..21: mol_type = other RNA
gcctcagaataattgtgtgaa

SEQ ID NO: 21996 - RNA, 21 nt, synthetic construct
  source 1..21: mol_type = other RNA
gcctcaggtttaccctctatt

SEQ ID NO: 21997 - RNA, 21 nt, synthetic construct
  source 1..21: mol_type = other RNA
gcctcataaacaggcagcaca

SEQ ID NO: 21998 - RNA, 21 nt, synthetic construct
  source 1..21: mol_type = other RNA
gcctcattacgttttagatgg

SEQ ID NO: 21999 - RNA, 21 nt, synthetic construct
  source 1..21: mol_type = other RNA
gcctccaaagccagctgcagt

SEQ ID NO: 22000 - RNA, 21 nt, synthetic construct
  source 1..21: mol_type = other RNA
gcctcttccgtggaacacaca

SEQ ID NO: 22001 - RNA, 21 nt, synthetic construct
  source 1..21: mol_type = other RNA
gcctgaaaatccagagcttca

SEQ ID NO: 22002 - RNA, 21 nt, synthetic construct
  source 1..21: mol_type = other RNA
gcctgaccagggaggaagtca

SEQ ID NO: 22003 - RNA, 21 nt, synthetic construct
  source 1..21: mol_type = other RNA
gcctgactgttaatggcattt

SEQ ID NO: 22004 - RNA, 21 nt, synthetic construct
  source 1..21: mol_type = other RNA
gcctgagagagctcatccaga

SEQ ID NO: 22005 - RNA, 21 nt, synthetic construct
  source 1..21: mol_type = other RNA
gcctgatggaacaggatagaa

SEQ ID NO: 22006 - RNA, 21 nt, synthetic construct
  source 1..21: mol_type = other RNA
gcctggggggctcccaaggca

SEQ ID NO: 22007 - RNA, 21 nt, synthetic construct
  source 1..21: mol_type = other RNA
gcctgtatgcacacagcacca

SEQ ID NO: 22008 - RNA, 21 nt, synthetic construct
  source 1..21: mol_type = other RNA
gcctgtgatgctgatgatgct

SEQ ID NO: 22009 - RNA, 21 nt, synthetic construct
  source 1..21: mol_type = other RNA
gcctgtgcatctgactatggc

SEQ ID NO: 22010 - RNA, 21 nt, synthetic construct
  source 1..21: mol_type = other RNA
gcctgttgattcaagtgctgt

SEQ ID NO: 22011 - RNA, 21 nt, synthetic construct
  source 1..21: mol_type = other RNA
gcctgtttatgaggcttatgt

SEQ ID NO: 22012 - RNA, 21 nt, synthetic construct
  source 1..21: mol_type = other RNA
gccttatggtcaaataacgac

SEQ ID NO: 22013 - RNA, 21 nt, synthetic construct
  source 1..21: mol_type = other RNA
gccttcaattcaatccatcct

SEQ ID NO: 22014 - RNA, 21 nt, synthetic construct
  source 1..21: mol_type = other RNA
gccttgggagccccccaggca

SEQ ID NO: 22015 - RNA, 21 nt, synthetic construct
  source 1..21: mol_type = other RNA
gccttgtggatggccccgaag

SEQ ID NO: 22016 - RNA, 21 nt, synthetic construct
  source 1..21: mol_type = other RNA
gccttgtttttaagtaataca

SEQ ID NO: 22017 - RNA, 21 nt, synthetic construct
  source 1..21: mol_type = other RNA
gcctttcagaaagcatcggag

SEQ ID NO: 22018 - RNA, 21 nt, synthetic construct
  source 1..21: mol_type = other RNA
gccttttggtcttgtttcaat

SEQ ID NO: 22019 - RNA, 21 nt, synthetic construct
  source 1..21: mol_type = other RNA
gcgagttcgagactcataatg

SEQ ID NO: 22020 - RNA, 21 nt, synthetic construct
  source 1..21: mol_type = other RNA
gcgatgggtgagtgatctcac

SEQ ID NO: 22021 - RNA, 21 nt, synthetic construct
  source 1..21: mol_type = other RNA
gcgcaacttgctcagcaaagg

SEQ ID NO: 22022 - RNA, 21 nt, synthetic construct
  source 1..21: mol_type = other RNA
gcgcagcttgttgaccagaca

SEQ ID NO: 22023 - RNA, 21 nt, synthetic construct
  source 1..21: mol_type = other RNA
gcggaatcccatctaaaacgt

SEQ ID NO: 22024 - RNA, 21 nt, synthetic construct
  source 1..21: mol_type = other RNA
gcggaattgatctgccctgag

SEQ ID NO: 22025 - RNA, 21 nt, synthetic construct
  source 1..21: mol_type = other RNA
gcggtgcagaaaaccacatct

SEQ ID NO: 22026 - RNA, 21 nt, synthetic construct
  source 1..21: mol_type = other RNA
gcgtctggtgaagaattctgt

SEQ ID NO: 22027 - RNA, 21 nt, synthetic construct
  source 1..21: mol_type = other RNA
gcgtgaaactgcttcagatgc

SEQ ID NO: 22028 - RNA, 21 nt, synthetic construct
  source 1..21: mol_type = other RNA
gcgttttattcctccattttg

SEQ ID NO: 22029 - RNA, 21 nt, synthetic construct
  source 1..21: mol_type = other RNA
gctaaatacctgttcctttca

SEQ ID NO: 22030 - RNA, 21 nt, synthetic construct
  source 1..21: mol_type = other RNA
gctaatgcctaatggtgctac

SEQ ID NO: 22031 - RNA, 21 nt, synthetic construct
  source 1..21: mol_type = other RNA
gctaatggagaaagacgtaac

SEQ ID NO: 22032 - RNA, 21 nt, synthetic construct
  source 1..21: mol_type = other RNA
gctaattaccatgacaagaac

SEQ ID NO: 22033 - RNA, 21 nt, synthetic construct
  source 1..21: mol_type = other RNA
gctacaaagctccagaatgga

SEQ ID NO: 22034 - RNA, 21 nt, synthetic construct
  source 1..21: mol_type = other RNA
gctacagaactcacagattct

SEQ ID NO: 22035 - RNA, 21 nt, synthetic construct
  source 1..21: mol_type = other RNA
gctacaggacaactgccagca

SEQ ID NO: 22036 - RNA, 21 nt, synthetic construct
  source 1..21: mol_type = other RNA
gctacagtttctgcctcttcc

SEQ ID NO: 22037 - RNA, 21 nt, synthetic construct
  source 1..21: mol_type = other RNA
gctaccaaaaattggtgggtt

SEQ ID NO: 22038 - RNA, 21 nt, synthetic construct
  source 1..21: mol_type = other RNA
gctactaatgagttgtcctgt

SEQ ID NO: 22039 - RNA, 21 nt, synthetic construct
  source 1..21: mol_type = other RNA
gctagcgtctggtgaagaatt

SEQ ID NO: 22040 - RNA, 21 nt, synthetic construct
  source 1..21: mol_type = other RNA
gctagctttgtggttccctgg

SEQ ID NO: 22041 - RNA, 21 nt, synthetic construct
  source 1..21: mol_type = other RNA
gctagtttactggcattatca

SEQ ID NO: 22042 - RNA, 21 nt, synthetic construct
  source 1..21: mol_type = other RNA
gctatcaagttctgcagcagt

SEQ ID NO: 22043 - RNA, 21 nt, synthetic construct
  source 1..21: mol_type = other RNA
gctcagagttagaggtctgtg

SEQ ID NO: 22044 - RNA, 21 nt, synthetic construct
  source 1..21: mol_type = other RNA
gctcagcaaaggtacttgata

SEQ ID NO: 22045 - RNA, 21 nt, synthetic construct
  source 1..21: mol_type = other RNA
gctcagtctctgaagcctgtt

SEQ ID NO: 22046 - RNA, 21 nt, synthetic construct
  source 1..21: mol_type = other RNA
gctcagtgttcactaaggatt

SEQ ID NO: 22047 - RNA, 21 nt, synthetic construct
  source 1..21: mol_type = other RNA
gctcatccagaagtaaatgga

SEQ ID NO: 22048 - RNA, 21 nt, synthetic construct
  source 1..21: mol_type = other RNA
gctcatgtgcagtcactgtgt

SEQ ID NO: 22049 - RNA, 21 nt, synthetic construct
  source 1..21: mol_type = other RNA
gctcattcagaatctgaagct

SEQ ID NO: 22050 - RNA, 21 nt, synthetic construct
  source 1..21: mol_type = other RNA
gctccagaatggaagcccact

SEQ ID NO: 22051 - RNA, 21 nt, synthetic construct
  source 1..21: mol_type = other RNA
gctccagctgtgttgttttct

SEQ ID NO: 22052 - RNA, 21 nt, synthetic construct
  source 1..21: mol_type = other RNA
gctccatggtctcaatgatgc

SEQ ID NO: 22053 - RNA, 21 nt, synthetic construct
  source 1..21: mol_type = other RNA
gctcccaaggcaagcttacac

SEQ ID NO: 22054 - RNA, 21 nt, synthetic construct
  source 1..21: mol_type = other RNA
gctcctggtggcagctctgaa

SEQ ID NO: 22055 - RNA, 21 nt, synthetic construct
  source 1..21: mol_type = other RNA
gctcctgttcttgaaagcacc

SEQ ID NO: 22056 - RNA, 21 nt, synthetic construct
  source 1..21: mol_type = other RNA
gctccttcagatcaagaaatt

SEQ ID NO: 22057 - RNA, 21 nt, synthetic construct
  source 1..21: mol_type = other RNA
gctccttgtctcgacccttca

SEQ ID NO: 22058 - RNA, 21 nt, synthetic construct
  source 1..21: mol_type = other RNA
gctctaaagctggggtgtggc

SEQ ID NO: 22059 - RNA, 21 nt, synthetic construct
  source 1..21: mol_type = other RNA
gctctaaggtggcatctctta

SEQ ID NO: 22060 - RNA, 21 nt, synthetic construct
  source 1..21: mol_type = other RNA
gctctccactgctaccaaaaa

SEQ ID NO: 22061 - RNA, 21 nt, synthetic construct
  source 1..21: mol_type = other RNA
gctctctcaggcagtgggctt

SEQ ID NO: 22062 - RNA, 21 nt, synthetic construct
  source 1..21: mol_type = other RNA
gctctgaacggtatttaaaac

SEQ ID NO: 22063 - RNA, 21 nt, synthetic construct
  source 1..21: mol_type = other RNA
gctctggattttcaggcccac

SEQ ID NO: 22064 - RNA, 21 nt, synthetic construct
  source 1..21: mol_type = other RNA
gctcttactctcaaatcacag

SEQ ID NO: 22065 - RNA, 21 nt, synthetic construct
  source 1..21: mol_type = other RNA
gctctttgttgaaaatgaaat

SEQ ID NO: 22066 - RNA, 21 nt, synthetic construct
  source 1..21: mol_type = other RNA
gctctttgtttctcatcaact

SEQ ID NO: 22067 - RNA, 21 nt, synthetic construct
  source 1..21: mol_type = other RNA
gctcttttgctgcacattatc

SEQ ID NO: 22068 - RNA, 21 nt, synthetic construct
  source 1..21: mol_type = other RNA
gctgagcaagttgcgcagctt

SEQ ID NO: 22069 - RNA, 21 nt, synthetic construct
  source 1..21: mol_type = other RNA
gctgaggaacctgtggaagag

SEQ ID NO: 22070 - RNA, 21 nt, synthetic construct
  source 1..21: mol_type = other RNA
gctgataatgccagtaaacta

SEQ ID NO: 22071 - RNA, 21 nt, synthetic construct
  source 1..21: mol_type = other RNA
gctgatcattgttgctttggg

SEQ ID NO: 22072 - RNA, 21 nt, synthetic construct
  source 1..21: mol_type = other RNA
gctgatgatgctgataatgcc

SEQ ID NO: 22073 - RNA, 21 nt, synthetic construct
  source 1..21: mol_type = other RNA
gctgcaatgctaaatacctgt

SEQ ID NO: 22074 - RNA, 21 nt, synthetic construct
  source 1..21: mol_type = other RNA
gctgcacattatcacagcttg

SEQ ID NO: 22075 - RNA, 21 nt, synthetic construct
  source 1..21: mol_type = other RNA
gctgcagaacttgatagccac

SEQ ID NO: 22076 - RNA, 21 nt, synthetic construct
  source 1..21: mol_type = other RNA
gctgcagtggtgagtgaggcc

SEQ ID NO: 22077 - RNA, 21 nt, synthetic construct
  source 1..21: mol_type = other RNA
gctgcatacatgtgtagatgg

SEQ ID NO: 22078 - RNA, 21 nt, synthetic construct
  source 1..21: mol_type = other RNA
gctgccaccaggagcttgcaa

SEQ ID NO: 22079 - RNA, 21 nt, synthetic construct
  source 1..21: mol_type = other RNA
gctgcctccaaagccagctgc

SEQ ID NO: 22080 - RNA, 21 nt, synthetic construct
  source 1..21: mol_type = other RNA
gctgcctgtttatgaggctta

SEQ ID NO: 22081 - RNA, 21 nt, synthetic construct
  source 1..21: mol_type = other RNA
gctgcgcaacttgctcagcaa

SEQ ID NO: 22082 - RNA, 21 nt, synthetic construct
  source 1..21: mol_type = other RNA
gctgctccatggtctcaatga

SEQ ID NO: 22083 - RNA, 21 nt, synthetic construct
  source 1..21: mol_type = other RNA
gctgctctaaagctggggtgt

SEQ ID NO: 22084 - RNA, 21 nt, synthetic construct
  source 1..21: mol_type = other RNA
gctgctctaaggtggcatctc

SEQ ID NO: 22085 - RNA, 21 nt, synthetic construct
  source 1..21: mol_type = other RNA
gctgctggaacctgaacagaa

SEQ ID NO: 22086 - RNA, 21 nt, synthetic construct
  source 1..21: mol_type = other RNA
gctgctgttcttgcttctgta

SEQ ID NO: 22087 - RNA, 21 nt, synthetic construct
  source 1..21: mol_type = other RNA
gctgctgttgctggttttgag

SEQ ID NO: 22088 - RNA, 21 nt, synthetic construct
  source 1..21: mol_type = other RNA
gctgcttctgttctcaataat

SEQ ID NO: 22089 - RNA, 21 nt, synthetic construct
  source 1..21: mol_type = other RNA
gctggaacctgaacagaattc

SEQ ID NO: 22090 - RNA, 21 nt, synthetic construct
  source 1..21: mol_type = other RNA
gctggagcacaagtcacaaat

SEQ ID NO: 22091 - RNA, 21 nt, synthetic construct
  source 1..21: mol_type = other RNA
gctggcagttgtcctgtagct

SEQ ID NO: 22092 - RNA, 21 nt, synthetic construct
  source 1..21: mol_type = other RNA
gctggctttggaggcagctca

SEQ ID NO: 22093 - RNA, 21 nt, synthetic construct
  source 1..21: mol_type = other RNA
gctggggtgtggctatcaagt

SEQ ID NO: 22094 - RNA, 21 nt, synthetic construct
  source 1..21: mol_type = other RNA
gctggttttgagggagatgtg

SEQ ID NO: 22095 - RNA, 21 nt, synthetic construct
  source 1..21: mol_type = other RNA
gctgtgataatgtgcagcaaa

SEQ ID NO: 22096 - RNA, 21 nt, synthetic construct
  source 1..21: mol_type = other RNA
gctgtgtgcatacaggcatgt

SEQ ID NO: 22097 - RNA, 21 nt, synthetic construct
  source 1..21: mol_type = other RNA
gctgtgttgggggcacaagat

SEQ ID NO: 22098 - RNA, 21 nt, synthetic construct
  source 1..21: mol_type = other RNA
gctgtgttgttttctgggtgt

SEQ ID NO: 22099 - RNA, 21 nt, synthetic construct
  source 1..21: mol_type = other RNA
gctgtgtttgctgctgttctt

SEQ ID NO: 22100 - RNA, 21 nt, synthetic construct
  source 1..21: mol_type = other RNA
gctgttcttgcttctgtaaga

SEQ ID NO: 22101 - RNA, 21 nt, synthetic construct
  source 1..21: mol_type = other RNA
gctgttcttttggttggtgtc

SEQ ID NO: 22102 - RNA, 21 nt, synthetic construct
  source 1..21: mol_type = other RNA
gctgttgctggttttgaggga

SEQ ID NO: 22103 - RNA, 21 nt, synthetic construct
  source 1..21: mol_type = other RNA
gctgtttcaacactggggaca

SEQ ID NO: 22104 - RNA, 21 nt, synthetic construct
  source 1..21: mol_type = other RNA
gcttacacccagaaaacaaca

SEQ ID NO: 22105 - RNA, 21 nt, synthetic construct
  source 1..21: mol_type = other RNA
gcttaccccgaagttacgtct

SEQ ID NO: 22106 - RNA, 21 nt, synthetic construct
  source 1..21: mol_type = other RNA
gcttacttcaagcaaagctca

SEQ ID NO: 22107 - RNA, 21 nt, synthetic construct
  source 1..21: mol_type = other RNA
gcttagttacctttttccatg

SEQ ID NO: 22108 - RNA, 21 nt, synthetic construct
  source 1..21: mol_type = other RNA
gcttatgttgcaaaaggtgtg

SEQ ID NO: 22109 - RNA, 21 nt, synthetic construct
  source 1..21: mol_type = other RNA
gcttcagagactgagccattt

SEQ ID NO: 22110 - RNA, 21 nt, synthetic construct
  source 1..21: mol_type = other RNA
gcttcagatgctgctccatgg

SEQ ID NO: 22111 - RNA, 21 nt, synthetic construct
  source 1..21: mol_type = other RNA
gcttcagattctgaatgagca

SEQ ID NO: 22112 - RNA, 21 nt, synthetic construct
  source 1..21: mol_type = other RNA
gcttcagttctacagggatat

SEQ ID NO: 22113 - RNA, 21 nt, synthetic construct
  source 1..21: mol_type = other RNA
gcttccattctggagctttgt

SEQ ID NO: 22114 - RNA, 21 nt, synthetic construct
  source 1..21: mol_type = other RNA
gcttcccttcatacagggtat

SEQ ID NO: 22115 - RNA, 21 nt, synthetic construct
  source 1..21: mol_type = other RNA
gcttccttcagaaggaaaaag

SEQ ID NO: 22116 - RNA, 21 nt, synthetic construct
  source 1..21: mol_type = other RNA
gcttcggggccatccacaagg

SEQ ID NO: 22117 - RNA, 21 nt, synthetic construct
  source 1..21: mol_type = other RNA
gcttctgtaagagatgccacc

SEQ ID NO: 22118 - RNA, 21 nt, synthetic construct
  source 1..21: mol_type = other RNA
gcttctgtgatttgagagtaa

SEQ ID NO: 22119 - RNA, 21 nt, synthetic construct
  source 1..21: mol_type = other RNA
gcttctgttctcaataatttt

SEQ ID NO: 22120 - RNA, 21 nt, synthetic construct
  source 1..21: mol_type = other RNA
gcttctttctccccctcctcc

SEQ ID NO: 22121 - RNA, 21 nt, synthetic construct
  source 1..21: mol_type = other RNA
gcttgaagtaagcaccattca

SEQ ID NO: 22122 - RNA, 21 nt, synthetic construct
  source 1..21: mol_type = other RNA
gcttgaggtgttctgacattg

SEQ ID NO: 22123 - RNA, 21 nt, synthetic construct
  source 1..21: mol_type = other RNA
gcttgattttgaatactgatt

SEQ ID NO: 22124 - RNA, 21 nt, synthetic construct
  source 1..21: mol_type = other RNA
gcttgcaaattgctgctggaa

SEQ ID NO: 22125 - RNA, 21 nt, synthetic construct
  source 1..21: mol_type = other RNA
gcttgcaggtggattctcttg

SEQ ID NO: 22126 - RNA, 21 nt, synthetic construct
  source 1..21: mol_type = other RNA
gcttgcatccaggttccacct

SEQ ID NO: 22127 - RNA, 21 nt, synthetic construct
  source 1..21: mol_type = other RNA
gcttgccttgggagcccccca

SEQ ID NO: 22128 - RNA, 21 nt, synthetic construct
  source 1..21: mol_type = other RNA
gcttgcttcggggccatccac

SEQ ID NO: 22129 - RNA, 21 nt, synthetic construct
  source 1..21: mol_type = other RNA
gcttggtgaaaacgaggggcc

SEQ ID NO: 22130 - RNA, 21 nt, synthetic construct
  source 1..21: mol_type = other RNA
gcttgttgaccagacatatct

SEQ ID NO: 22131 - RNA, 21 nt, synthetic construct
  source 1..21: mol_type = other RNA
gcttgttgtgacttctgctcc

SEQ ID NO: 22132 - RNA, 21 nt, synthetic construct
  source 1..21: mol_type = other RNA
gctttagagcagcaaacaact

SEQ ID NO: 22133 - RNA, 21 nt, synthetic construct
  source 1..21: mol_type = other RNA
gctttcaagaacaggagcaga

SEQ ID NO: 22134 - RNA, 21 nt, synthetic construct
  source 1..21: mol_type = other RNA
gctttcacctggatttctttc

SEQ ID NO: 22135 - RNA, 21 nt, synthetic construct
  source 1..21: mol_type = other RNA
gctttctgaaaggcctcagaa

SEQ ID NO: 22136 - RNA, 21 nt, synthetic construct
  source 1..21: mol_type = other RNA
gctttgcttgaagtaagcacc

SEQ ID NO: 22137 - RNA, 21 nt, synthetic construct
  source 1..21: mol_type = other RNA
gctttggaggcagctcagagt

SEQ ID NO: 22138 - RNA, 21 nt, synthetic construct
  source 1..21: mol_type = other RNA
gctttgggatcacattatttg

SEQ ID NO: 22139 - RNA, 21 nt, synthetic construct
  source 1..21: mol_type = other RNA
gctttgggggtgaggaaaagt

SEQ ID NO: 22140 - RNA, 21 nt, synthetic construct
  source 1..21: mol_type = other RNA
gctttgtagccagaggttctg

SEQ ID NO: 22141 - RNA, 21 nt, synthetic construct
  source 1..21: mol_type = other RNA
gctttgtggttccctggatgt

SEQ ID NO: 22142 - RNA, 21 nt, synthetic construct
  source 1..21: mol_type = other RNA
gcttttgagtgtccttctggg

SEQ ID NO: 22143 - RNA, 21 nt, synthetic construct
  source 1..21: mol_type = other RNA
gcttttggtaaatggtctgtt

SEQ ID NO: 22144 - RNA, 21 nt, synthetic construct
  source 1..21: mol_type = other RNA
gctttttccttctgaaggaag

SEQ ID NO: 22145 - RNA, 21 nt, synthetic construct
  source 1..21: mol_type = other RNA
ggaaaaaacactgtctcaata

SEQ ID NO: 22146 - RNA, 21 nt, synthetic construct
  source 1..21: mol_type = other RNA
ggaaaaacatttgcatggtta

SEQ ID NO: 22147 - RNA, 21 nt, synthetic construct
  source 1..21: mol_type = other RNA
ggaaaaagcactctgaatggt

SEQ ID NO: 22148 - RNA, 21 nt, synthetic construct
  source 1..21: mol_type = other RNA
ggaaaaaggtaactaagcaag

SEQ ID NO: 22149 - RNA, 21 nt, synthetic construct
  source 1..21: mol_type = other RNA
ggaaaagtctggagtatttcc

SEQ ID NO: 22150 - RNA, 21 nt, synthetic construct
  source 1..21: mol_type = other RNA
ggaaaagtgctaattaccatg

SEQ ID NO: 22151 - RNA, 21 nt, synthetic construct
  source 1..21: mol_type = other RNA
ggaaaatattgcatgtgatgc

SEQ ID NO: 22152 - RNA, 21 nt, synthetic construct
  source 1..21: mol_type = other RNA
ggaaacaagacccaaaacttg

SEQ ID NO: 22153 - RNA, 21 nt, synthetic construct
  source 1..21: mol_type = other RNA
ggaaacacaatctggataata

SEQ ID NO: 22154 - RNA, 21 nt, synthetic construct
  source 1..21: mol_type = other RNA
ggaaatactccagacttttcc

SEQ ID NO: 22155 - RNA, 21 nt, synthetic construct
  source 1..21: mol_type = other RNA
ggaaatcatattgagtcttga

SEQ ID NO: 22156 - RNA, 21 nt, synthetic construct
  source 1..21: mol_type = other RNA
ggaaattccaacatgcctggg

SEQ ID NO: 22157 - RNA, 21 nt, synthetic construct
  source 1..21: mol_type = other RNA
ggaacacacacatggtgaact

SEQ ID NO: 22158 - RNA, 21 nt, synthetic construct
  source 1..21: mol_type = other RNA
ggaacaggatagaaccaacca

SEQ ID NO: 22159 - RNA, 21 nt, synthetic construct
  source 1..21: mol_type = other RNA
ggaacaggtatttagcattgc

SEQ ID NO: 22160 - RNA, 21 nt, synthetic construct
  source 1..21: mol_type = other RNA
ggaacagtcattgtccctgca

SEQ ID NO: 22161 - RNA, 21 nt, synthetic construct
  source 1..21: mol_type = other RNA
ggaaccacaaagctagcgtct

SEQ ID NO: 22162 - RNA, 21 nt, synthetic construct
  source 1..21: mol_type = other RNA
ggaacctgaacagaattcttc

SEQ ID NO: 22163 - RNA, 21 nt, synthetic construct
  source 1..21: mol_type = other RNA
ggaacctggatgcaagccaca

SEQ ID NO: 22164 - RNA, 21 nt, synthetic construct
  source 1..21: mol_type = other RNA
ggaacctgtggaagaggagga

SEQ ID NO: 22165 - RNA, 21 nt, synthetic construct
  source 1..21: mol_type = other RNA
ggaactggagatgttggtcca

SEQ ID NO: 22166 - RNA, 21 nt, synthetic construct
  source 1..21: mol_type = other RNA
ggaagaatgttttcatggtga

SEQ ID NO: 22167 - RNA, 21 nt, synthetic construct
  source 1..21: mol_type = other RNA
ggaagaggaggagggggagaa

SEQ ID NO: 22168 - RNA, 21 nt, synthetic construct
  source 1..21: mol_type = other RNA
ggaagaggcagaaactgtagc

SEQ ID NO: 22169 - RNA, 21 nt, synthetic construct
  source 1..21: mol_type = other RNA
ggaagccagaatagtcgtgtg

SEQ ID NO: 22170 - RNA, 21 nt, synthetic construct
  source 1..21: mol_type = other RNA
ggaagcccactgcctgagaga

SEQ ID NO: 22171 - RNA, 21 nt, synthetic construct
  source 1..21: mol_type = other RNA
ggaagctgaggaacctgtgga

SEQ ID NO: 22172 - RNA, 21 nt, synthetic construct
  source 1..21: mol_type = other RNA
ggaaggtgactctataaaatt

SEQ ID NO: 22173 - RNA, 21 nt, synthetic construct
  source 1..21: mol_type = other RNA
ggaaggtggtgcctcaggttt

SEQ ID NO: 22174 - RNA, 21 nt, synthetic construct
  source 1..21: mol_type = other RNA
ggaagtacagaatataaatcg

SEQ ID NO: 22175 - RNA, 21 nt, synthetic construct
  source 1..21: mol_type = other RNA
ggaagtcacactcagacccct

SEQ ID NO: 22176 - RNA, 21 nt, synthetic construct
  source 1..21: mol_type = other RNA
ggaagtgaaaatagagggtaa

SEQ ID NO: 22177 - RNA, 21 nt, synthetic construct
  source 1..21: mol_type = other RNA
ggaataaaacgcacagttagt

SEQ ID NO: 22178 - RNA, 21 nt, synthetic construct
  source 1..21: mol_type = other RNA
ggaataccctctactttcttg

SEQ ID NO: 22179 - RNA, 21 nt, synthetic construct
  source 1..21: mol_type = other RNA
ggaataccctgtatgaaggga

SEQ ID NO: 22180 - RNA, 21 nt, synthetic construct
  source 1..21: mol_type = other RNA
ggaatcccatctaaaacgtaa

SEQ ID NO: 22181 - RNA, 21 nt, synthetic construct
  source 1..21: mol_type = other RNA
ggaatccttagtgaacactga

SEQ ID NO: 22182 - RNA, 21 nt, synthetic construct
  source 1..21: mol_type = other RNA
ggaatctgctctttgttgaaa

SEQ ID NO: 22183 - RNA, 21 nt, synthetic construct
  source 1..21: mol_type = other RNA
ggaatgacatacagactgcag

SEQ ID NO: 22184 - RNA, 21 nt, synthetic construct
  source 1..21: mol_type = other RNA
ggaatggacttagtctgttgc

SEQ ID NO: 22185 - RNA, 21 nt, synthetic construct
  source 1..21: mol_type = other RNA
ggaattgatctgccctgaggt

SEQ ID NO: 22186 - RNA, 21 nt, synthetic construct
  source 1..21: mol_type = other RNA
ggaatttccagtgtattgttt

SEQ ID NO: 22187 - RNA, 21 nt, synthetic construct
  source 1..21: mol_type = other RNA
ggacaactcattagtagcctg

SEQ ID NO: 22188 - RNA, 21 nt, synthetic construct
  source 1..21: mol_type = other RNA
ggacaactgccagcagttgat

SEQ ID NO: 22189 - RNA, 21 nt, synthetic construct
  source 1..21: mol_type = other RNA
ggacaatgactgttccattgt

SEQ ID NO: 22190 - RNA, 21 nt, synthetic construct
  source 1..21: mol_type = other RNA
ggacactcaaaagcatgctgc

SEQ ID NO: 22191 - RNA, 21 nt, synthetic construct
  source 1..21: mol_type = other RNA
ggacataagtttttcagtttg

SEQ ID NO: 22192 - RNA, 21 nt, synthetic construct
  source 1..21: mol_type = other RNA
ggacattatgagtctcgaact

SEQ ID NO: 22193 - RNA, 21 nt, synthetic construct
  source 1..21: mol_type = other RNA
ggaccaacatctccagttcca

SEQ ID NO: 22194 - RNA, 21 nt, synthetic construct
  source 1..21: mol_type = other RNA
ggactcacacgactattctgg

SEQ ID NO: 22195 - RNA, 21 nt, synthetic construct
  source 1..21: mol_type = other RNA
ggactctgggaaggtggtgcc

SEQ ID NO: 22196 - RNA, 21 nt, synthetic construct
  source 1..21: mol_type = other RNA
ggactgcccttgattcatttc

SEQ ID NO: 22197 - RNA, 21 nt, synthetic construct
  source 1..21: mol_type = other RNA
ggactggaggaagtacagaat

SEQ ID NO: 22198 - RNA, 21 nt, synthetic construct
  source 1..21: mol_type = other RNA
ggacttagtctgttgccctca

SEQ ID NO: 22199 - RNA, 21 nt, synthetic construct
  source 1..21: mol_type = other RNA
ggagaaagaagcaattgtgat

SEQ ID NO: 22200 - RNA, 21 nt, synthetic construct
  source 1..21: mol_type = other RNA
ggagaaagacgtaacttcggg

SEQ ID NO: 22201 - RNA, 21 nt, synthetic construct
  source 1..21: mol_type = other RNA
ggagaagggctgcatacatgt

SEQ ID NO: 22202 - RNA, 21 nt, synthetic construct
  source 1..21: mol_type = other RNA
ggagaagtgcacctggtgtga

SEQ ID NO: 22203 - RNA, 21 nt, synthetic construct
  source 1..21: mol_type = other RNA
ggagacaccaagtggcactct

SEQ ID NO: 22204 - RNA, 21 nt, synthetic construct
  source 1..21: mol_type = other RNA
ggagacatttggttgactgct

SEQ ID NO: 22205 - RNA, 21 nt, synthetic construct
  source 1..21: mol_type = other RNA
ggagagattgggttgatactg

SEQ ID NO: 22206 - RNA, 21 nt, synthetic construct
  source 1..21: mol_type = other RNA
ggagagctacaggacaactgc

SEQ ID NO: 22207 - RNA, 21 nt, synthetic construct
  source 1..21: mol_type = other RNA
ggagatgggcatatctcaaaa

SEQ ID NO: 22208 - RNA, 21 nt, synthetic construct
  source 1..21: mol_type = other RNA
ggagatgtgaactctgggatg

SEQ ID NO: 22209 - RNA, 21 nt, synthetic construct
  source 1..21: mol_type = other RNA
ggagatgttggtccactgtac

SEQ ID NO: 22210 - RNA, 21 nt, synthetic construct
  source 1..21: mol_type = other RNA
ggagcaaacacgagatcttgt

SEQ ID NO: 22211 - RNA, 21 nt, synthetic construct
  source 1..21: mol_type = other RNA
ggagcacaagtcacaaatgta

SEQ ID NO: 22212 - RNA, 21 nt, synthetic construct
  source 1..21: mol_type = other RNA
ggagcagaagtcacaacaagc

SEQ ID NO: 22213 - RNA, 21 nt, synthetic construct
  source 1..21: mol_type = other RNA
ggagcagcatctgaagcagtt

SEQ ID NO: 22214 - RNA, 21 nt, synthetic construct
  source 1..21: mol_type = other RNA
ggagcccagagagagaaggtt

SEQ ID NO: 22215 - RNA, 21 nt, synthetic construct
  source 1..21: mol_type = other RNA
ggagccccccaggcatgttgg

SEQ ID NO: 22216 - RNA, 21 nt, synthetic construct
  source 1..21: mol_type = other RNA
ggagcttgcaaattgctgctg

SEQ ID NO: 22217 - RNA, 21 nt, synthetic construct
  source 1..21: mol_type = other RNA
ggagctttgtagccagaggtt

SEQ ID NO: 22218 - RNA, 21 nt, synthetic construct
  source 1..21: mol_type = other RNA
ggaggaagtacagaatataaa

SEQ ID NO: 22219 - RNA, 21 nt, synthetic construct
  source 1..21: mol_type = other RNA
ggaggaagtcacactcagacc

SEQ ID NO: 22220 - RNA, 21 nt, synthetic construct
  source 1..21: mol_type = other RNA
ggaggaataaaacgcacagtt

SEQ ID NO: 22221 - RNA, 21 nt, synthetic construct
  source 1..21: mol_type = other RNA
ggaggagggggagaaagaagc

SEQ ID NO: 22222 - RNA, 21 nt, synthetic construct
  source 1..21: mol_type = other RNA
ggaggcagctcagagttagag

SEQ ID NO: 22223 - RNA, 21 nt, synthetic construct
  source 1..21: mol_type = other RNA
ggaggggaaaagtgctaatta

SEQ ID NO: 22224 - RNA, 21 nt, synthetic construct
  source 1..21: mol_type = other RNA
ggagggggagaaagaagcaat

SEQ ID NO: 22225 - RNA, 21 nt, synthetic construct
  source 1..21: mol_type = other RNA
ggaggggtctgagtgtgactt

SEQ ID NO: 22226 - RNA, 21 nt, synthetic construct
  source 1..21: mol_type = other RNA
ggaggtcatttgattggagag

SEQ ID NO: 22227 - RNA, 21 nt, synthetic construct
  source 1..21: mol_type = other RNA
ggaggtgatggtatcaggaat

SEQ ID NO: 22228 - RNA, 21 nt, synthetic construct
  source 1..21: mol_type = other RNA
ggagtatctagtaatttggaa

SEQ ID NO: 22229 - RNA, 21 nt, synthetic construct
  source 1..21: mol_type = other RNA
ggagtatttcctctttattct

SEQ ID NO: 22230 - RNA, 21 nt, synthetic construct
  source 1..21: mol_type = other RNA
ggagttcaccatgtgtgtgtt

SEQ ID NO: 22231 - RNA, 21 nt, synthetic construct
  source 1..21: mol_type = other RNA
ggagttttagaagaacaccac

SEQ ID NO: 22232 - RNA, 21 nt, synthetic construct
  source 1..21: mol_type = other RNA
ggataatattgagacagtgtt

SEQ ID NO: 22233 - RNA, 21 nt, synthetic construct
  source 1..21: mol_type = other RNA
ggatacacctgtcaagactca

SEQ ID NO: 22234 - RNA, 21 nt, synthetic construct
  source 1..21: mol_type = other RNA
ggatagaaccaaccatgttga

SEQ ID NO: 22235 - RNA, 21 nt, synthetic construct
  source 1..21: mol_type = other RNA
ggatcacattatttggaaaat

SEQ ID NO: 22236 - RNA, 21 nt, synthetic construct
  source 1..21: mol_type = other RNA
ggatcattctttggccagact

SEQ ID NO: 22237 - RNA, 21 nt, synthetic construct
  source 1..21: mol_type = other RNA
ggatgagctctctcaggcagt

SEQ ID NO: 22238 - RNA, 21 nt, synthetic construct
  source 1..21: mol_type = other RNA
ggatgcaagccacatgcctgt

SEQ ID NO: 22239 - RNA, 21 nt, synthetic construct
  source 1..21: mol_type = other RNA
ggatggattgaattgaaggcc

SEQ ID NO: 22240 - RNA, 21 nt, synthetic construct
  source 1..21: mol_type = other RNA
ggatggccccgaagcaagcct

SEQ ID NO: 22241 - RNA, 21 nt, synthetic construct
  source 1..21: mol_type = other RNA
ggatggttgtgtttgtgctgc

SEQ ID NO: 22242 - RNA, 21 nt, synthetic construct
  source 1..21: mol_type = other RNA
ggatgtgtagtctgttcttta

SEQ ID NO: 22243 - RNA, 21 nt, synthetic construct
  source 1..21: mol_type = other RNA
ggatgttattttctgcaggag

SEQ ID NO: 22244 - RNA, 21 nt, synthetic construct
  source 1..21: mol_type = other RNA
ggattaggactctgggaaggt

SEQ ID NO: 22245 - RNA, 21 nt, synthetic construct
  source 1..21: mol_type = other RNA
ggattccgcttggtgaaaacg

SEQ ID NO: 22246 - RNA, 21 nt, synthetic construct
  source 1..21: mol_type = other RNA
ggattccttttctgccactac

SEQ ID NO: 22247 - RNA, 21 nt, synthetic construct
  source 1..21: mol_type = other RNA
ggattctcttgcttagttacc

SEQ ID NO: 22248 - RNA, 21 nt, synthetic construct
  source 1..21: mol_type = other RNA
ggattgaattgaaggcccctc

SEQ ID NO: 22249 - RNA, 21 nt, synthetic construct
  source 1..21: mol_type = other RNA
ggatttctttcttggcttacc

SEQ ID NO: 22250 - RNA, 21 nt, synthetic construct
  source 1..21: mol_type = other RNA
ggattttcaggcccactgcag

SEQ ID NO: 22251 - RNA, 21 nt, synthetic construct
  source 1..21: mol_type = other RNA
ggcaaatgggaggtgatggta

SEQ ID NO: 22252 - RNA, 21 nt, synthetic construct
  source 1..21: mol_type = other RNA
ggcaacagactaagtccattc

SEQ ID NO: 22253 - RNA, 21 nt, synthetic construct
  source 1..21: mol_type = other RNA
ggcaagactcagtttggggtt

SEQ ID NO: 22254 - RNA, 21 nt, synthetic construct
  source 1..21: mol_type = other RNA
ggcaagcttacacccagaaaa

SEQ ID NO: 22255 - RNA, 21 nt, synthetic construct
  source 1..21: mol_type = other RNA
ggcacaagatctcgtgtttgc

SEQ ID NO: 22256 - RNA, 21 nt, synthetic construct
  source 1..21: mol_type = other RNA
ggcacaggaaaaacatttgca

SEQ ID NO: 22257 - RNA, 21 nt, synthetic construct
  source 1..21: mol_type = other RNA
ggcaccaccttcccagagtcc

SEQ ID NO: 22258 - RNA, 21 nt, synthetic construct
  source 1..21: mol_type = other RNA
ggcactagatttcattttcaa

SEQ ID NO: 22259 - RNA, 21 nt, synthetic construct
  source 1..21: mol_type = other RNA
ggcactctttcaaaagttatt

SEQ ID NO: 22260 - RNA, 21 nt, synthetic construct
  source 1..21: mol_type = other RNA
ggcacttacctacacatctgc

SEQ ID NO: 22261 - RNA, 21 nt, synthetic construct
  source 1..21: mol_type = other RNA
ggcagaaaaggaatccttagt

SEQ ID NO: 22262 - RNA, 21 nt, synthetic construct
  source 1..21: mol_type = other RNA
ggcagaaactgtagcaccatt

SEQ ID NO: 22263 - RNA, 21 nt, synthetic construct
  source 1..21: mol_type = other RNA
ggcagatcaattccgcacaga

SEQ ID NO: 22264 - RNA, 21 nt, synthetic construct
  source 1..21: mol_type = other RNA
ggcagcacaaacacaaccatc

SEQ ID NO: 22265 - RNA, 21 nt, synthetic construct
  source 1..21: mol_type = other RNA
ggcagccttgtggatggcccc

SEQ ID NO: 22266 - RNA, 21 nt, synthetic construct
  source 1..21: mol_type = other RNA
ggcagctcagagttagaggtc

SEQ ID NO: 22267 - RNA, 21 nt, synthetic construct
  source 1..21: mol_type = other RNA
ggcagctctgaacggtattta

SEQ ID NO: 22268 - RNA, 21 nt, synthetic construct
  source 1..21: mol_type = other RNA
ggcagtcccaaggtacagtgg

SEQ ID NO: 22269 - RNA, 21 nt, synthetic construct
  source 1..21: mol_type = other RNA
ggcagtgatgcctcattacgt

SEQ ID NO: 22270 - RNA, 21 nt, synthetic construct
  source 1..21: mol_type = other RNA
ggcagtgctaatgcctaatgg

SEQ ID NO: 22271 - RNA, 21 nt, synthetic construct
  source 1..21: mol_type = other RNA
ggcagtgggcttccattctgg

SEQ ID NO: 22272 - RNA, 21 nt, synthetic construct
  source 1..21: mol_type = other RNA
ggcagttgtcctgtagctctc

SEQ ID NO: 22273 - RNA, 21 nt, synthetic construct
  source 1..21: mol_type = other RNA
ggcatatctcaaaaactgatt

SEQ ID NO: 22274 - RNA, 21 nt, synthetic construct
  source 1..21: mol_type = other RNA
ggcatcactgccatcaattct

SEQ ID NO: 22275 - RNA, 21 nt, synthetic construct
  source 1..21: mol_type = other RNA
ggcatctcttacagaagcaag

SEQ ID NO: 22276 - RNA, 21 nt, synthetic construct
  source 1..21: mol_type = other RNA
ggcatgtggcttgcatccagg

SEQ ID NO: 22277 - RNA, 21 nt, synthetic construct
  source 1..21: mol_type = other RNA
ggcatgttggaatttccagtg

SEQ ID NO: 22278 - RNA, 21 nt, synthetic construct
  source 1..21: mol_type = other RNA
ggcattagcactgccttgttt

SEQ ID NO: 22279 - RNA, 21 nt, synthetic construct
  source 1..21: mol_type = other RNA
ggcattatcagcatcatcagc

SEQ ID NO: 22280 - RNA, 21 nt, synthetic construct
  source 1..21: mol_type = other RNA
ggcatttatgtgagatgtggt

SEQ ID NO: 22281 - RNA, 21 nt, synthetic construct
  source 1..21: mol_type = other RNA
ggccaaagaatgatccttctc

SEQ ID NO: 22282 - RNA, 21 nt, synthetic construct
  source 1..21: mol_type = other RNA
ggccaattaaggtggaacctg

SEQ ID NO: 22283 - RNA, 21 nt, synthetic construct
  source 1..21: mol_type = other RNA
ggccagactaaagtggaagaa

SEQ ID NO: 22284 - RNA, 21 nt, synthetic construct
  source 1..21: mol_type = other RNA
ggccagtcacagttttgacta

SEQ ID NO: 22285 - RNA, 21 nt, synthetic construct
  source 1..21: mol_type = other RNA
ggcccactgcagttatgtgtt

SEQ ID NO: 22286 - RNA, 21 nt, synthetic construct
  source 1..21: mol_type = other RNA
ggccccgaagcaagcctgatg

SEQ ID NO: 22287 - RNA, 21 nt, synthetic construct
  source 1..21: mol_type = other RNA
ggcccctcgttttcaccaagc

SEQ ID NO: 22288 - RNA, 21 nt, synthetic construct
  source 1..21: mol_type = other RNA
ggccctgacatttcaactttt

SEQ ID NO: 22289 - RNA, 21 nt, synthetic construct
  source 1..21: mol_type = other RNA
ggcctcactcaccactgcagc

SEQ ID NO: 22290 - RNA, 21 nt, synthetic construct
  source 1..21: mol_type = other RNA
ggcctcagaataattgtgtga

SEQ ID NO: 22291 - RNA, 21 nt, synthetic construct
  source 1..21: mol_type = other RNA
ggcctgaaaatccagagcttc

SEQ ID NO: 22292 - RNA, 21 nt, synthetic construct
  source 1..21: mol_type = other RNA
ggcctgtgatgctgatgatgc

SEQ ID NO: 22293 - RNA, 21 nt, synthetic construct
  source 1..21: mol_type = other RNA
ggcctgtgcatctgactatgg

SEQ ID NO: 22294 - RNA, 21 nt, synthetic construct
  source 1..21: mol_type = other RNA
ggccttcaattcaatccatcc

SEQ ID NO: 22295 - RNA, 21 nt, synthetic construct
  source 1..21: mol_type = other RNA
ggcctttcagaaagcatcgga

SEQ ID NO: 22296 - RNA, 21 nt, synthetic construct
  source 1..21: mol_type = other RNA
ggcgtgaaactgcttcagatg

SEQ ID NO: 22297 - RNA, 21 nt, synthetic construct
  source 1..21: mol_type = other RNA
ggctaatggagaaagacgtaa

SEQ ID NO: 22298 - RNA, 21 nt, synthetic construct
  source 1..21: mol_type = other RNA
ggctacaaagctccagaatgg

SEQ ID NO: 22299 - RNA, 21 nt, synthetic construct
  source 1..21: mol_type = other RNA
ggctacagaactcacagattc

SEQ ID NO: 22300 - RNA, 21 nt, synthetic construct
  source 1..21: mol_type = other RNA
ggctactaatgagttgtcctg

SEQ ID NO: 22301 - RNA, 21 nt, synthetic construct
  source 1..21: mol_type = other RNA
ggctatcaagttctgcagcag

SEQ ID NO: 22302 - RNA, 21 nt, synthetic construct
  source 1..21: mol_type = other RNA
ggctcagtctctgaagcctgt

SEQ ID NO: 22303 - RNA, 21 nt, synthetic construct
  source 1..21: mol_type = other RNA
ggctcccaaggcaagcttaca

SEQ ID NO: 22304 - RNA, 21 nt, synthetic construct
  source 1..21: mol_type = other RNA
ggctccttcagatcaagaaat

SEQ ID NO: 22305 - RNA, 21 nt, synthetic construct
  source 1..21: mol_type = other RNA
ggctcttactctcaaatcaca

SEQ ID NO: 22306 - RNA, 21 nt, synthetic construct
  source 1..21: mol_type = other RNA
ggctgcatacatgtgtagatg

SEQ ID NO: 22307 - RNA, 21 nt, synthetic construct
  source 1..21: mol_type = other RNA
ggcttaccccgaagttacgtc

SEQ ID NO: 22308 - RNA, 21 nt, synthetic construct
  source 1..21: mol_type = other RNA
ggcttatgttgcaaaaggtgt

SEQ ID NO: 22309 - RNA, 21 nt, synthetic construct
  source 1..21: mol_type = other RNA
ggcttcagagactgagccatt

SEQ ID NO: 22310 - RNA, 21 nt, synthetic construct
  source 1..21: mol_type = other RNA
ggcttccattctggagctttg

SEQ ID NO: 22311 - RNA, 21 nt, synthetic construct
  source 1..21: mol_type = other RNA
ggcttcccttcatacagggta

SEQ ID NO: 22312 - RNA, 21 nt, synthetic construct
  source 1..21: mol_type = other RNA
ggcttgcatccaggttccacc

SEQ ID NO: 22313 - RNA, 21 nt, synthetic construct
  source 1..21: mol_type = other RNA
ggcttgcttcggggccatcca

SEQ ID NO: 22314 - RNA, 21 nt, synthetic construct
  source 1..21: mol_type = other RNA
ggctttggaggcagctcagag

SEQ ID NO: 22315 - RNA, 21 nt, synthetic construct
  source 1..21: mol_type = other RNA
gggaaaagtgctaattaccat

SEQ ID NO: 22316 - RNA, 21 nt, synthetic construct
  source 1..21: mol_type = other RNA
gggaaatcatattgagtcttg

SEQ ID NO: 22317 - RNA, 21 nt, synthetic construct
  source 1..21: mol_type = other RNA
gggaaccacaaagctagcgtc

SEQ ID NO: 22318 - RNA, 21 nt, synthetic construct
  source 1..21: mol_type = other RNA
gggaagccagaatagtcgtgt

SEQ ID NO: 22319 - RNA, 21 nt, synthetic construct
  source 1..21: mol_type = other RNA
gggaaggtggtgcctcaggtt

SEQ ID NO: 22320 - RNA, 21 nt, synthetic construct
  source 1..21: mol_type = other RNA
gggaagtgaaaatagagggta

SEQ ID NO: 22321 - RNA, 21 nt, synthetic construct
  source 1..21: mol_type = other RNA
gggaatctgctctttgttgaa

SEQ ID NO: 22322 - RNA, 21 nt, synthetic construct
  source 1..21: mol_type = other RNA
gggaatttctacgatttatat

SEQ ID NO: 22323 - RNA, 21 nt, synthetic construct
  source 1..21: mol_type = other RNA
gggacaatgactgttccattg

SEQ ID NO: 22324 - RNA, 21 nt, synthetic construct
  source 1..21: mol_type = other RNA
gggacataagtttttcagttt

SEQ ID NO: 22325 - RNA, 21 nt, synthetic construct
  source 1..21: mol_type = other RNA
gggactgcccttgattcattt

SEQ ID NO: 22326 - RNA, 21 nt, synthetic construct
  source 1..21: mol_type = other RNA
gggactggaggaagtacagaa

SEQ ID NO: 22327 - RNA, 21 nt, synthetic construct
  source 1..21: mol_type = other RNA
gggagaaagaagcaattgtga

SEQ ID NO: 22328 - RNA, 21 nt, synthetic construct
  source 1..21: mol_type = other RNA
gggagatgtgaactctgggat

SEQ ID NO: 22329 - RNA, 21 nt, synthetic construct
  source 1..21: mol_type = other RNA
gggagccccccaggcatgttg

SEQ ID NO: 22330 - RNA, 21 nt, synthetic construct
  source 1..21: mol_type = other RNA
gggaggaagtcacactcagac

SEQ ID NO: 22331 - RNA, 21 nt, synthetic construct
  source 1..21: mol_type = other RNA
gggaggggtctgagtgtgact

SEQ ID NO: 22332 - RNA, 21 nt, synthetic construct
  source 1..21: mol_type = other RNA
gggaggtgatggtatcaggaa

SEQ ID NO: 22333 - RNA, 21 nt, synthetic construct
  source 1..21: mol_type = other RNA
gggatataaaaatagaaacca

SEQ ID NO: 22334 - RNA, 21 nt, synthetic construct
  source 1..21: mol_type = other RNA
gggatcacattatttggaaaa

SEQ ID NO: 22335 - RNA, 21 nt, synthetic construct
  source 1..21: mol_type = other RNA
gggatggttgtgtttgtgctg

SEQ ID NO: 22336 - RNA, 21 nt, synthetic construct
  source 1..21: mol_type = other RNA
gggattccgcttggtgaaaac

SEQ ID NO: 22337 - RNA, 21 nt, synthetic construct
  source 1..21: mol_type = other RNA
gggcaacagactaagtccatt

SEQ ID NO: 22338 - RNA, 21 nt, synthetic construct
  source 1..21: mol_type = other RNA
gggcacaagatctcgtgtttg

SEQ ID NO: 22339 - RNA, 21 nt, synthetic construct
  source 1..21: mol_type = other RNA
gggcagatcaattccgcacag

SEQ ID NO: 22340 - RNA, 21 nt, synthetic construct
  source 1..21: mol_type = other RNA
gggcagccttgtggatggccc

SEQ ID NO: 22341 - RNA, 21 nt, synthetic construct
  source 1..21: mol_type = other RNA
gggcagtcccaaggtacagtg

SEQ ID NO: 22342 - RNA, 21 nt, synthetic construct
  source 1..21: mol_type = other RNA
gggcatatctcaaaaactgat

SEQ ID NO: 22343 - RNA, 21 nt, synthetic construct
  source 1..21: mol_type = other RNA
gggccagtcacagttttgact

SEQ ID NO: 22344 - RNA, 21 nt, synthetic construct
  source 1..21: mol_type = other RNA
gggcctgaaaatccagagctt

SEQ ID NO: 22345 - RNA, 21 nt, synthetic construct
  source 1..21: mol_type = other RNA
gggccttcaattcaatccatc

SEQ ID NO: 22346 - RNA, 21 nt, synthetic construct
  source 1..21: mol_type = other RNA
gggctacagaactcacagatt

SEQ ID NO: 22347 - RNA, 21 nt, synthetic construct
  source 1..21: mol_type = other RNA
gggctcccaaggcaagcttac

SEQ ID NO: 22348 - RNA, 21 nt, synthetic construct
  source 1..21: mol_type = other RNA
gggctccttcagatcaagaaa

SEQ ID NO: 22349 - RNA, 21 nt, synthetic construct
  source 1..21: mol_type = other RNA
gggctgcatacatgtgtagat

SEQ ID NO: 22350 - RNA, 21 nt, synthetic construct
  source 1..21: mol_type = other RNA
gggcttccattctggagcttt

SEQ ID NO: 22351 - RNA, 21 nt, synthetic construct
  source 1..21: mol_type = other RNA
ggggaaaagtgctaattacca

SEQ ID NO: 22352 - RNA, 21 nt, synthetic construct
  source 1..21: mol_type = other RNA
ggggaatttctacgatttata

SEQ ID NO: 22353 - RNA, 21 nt, synthetic construct
  source 1..21: mol_type = other RNA
ggggacataagtttttcagtt

SEQ ID NO: 22354 - RNA, 21 nt, synthetic construct
  source 1..21: mol_type = other RNA
ggggagaaagaagcaattgtg

SEQ ID NO: 22355 - RNA, 21 nt, synthetic construct
  source 1..21: mol_type = other RNA
ggggaggggtctgagtgtgac

SEQ ID NO: 22356 - RNA, 21 nt, synthetic construct
  source 1..21: mol_type = other RNA
ggggcacaagatctcgtgttt

SEQ ID NO: 22357 - RNA, 21 nt, synthetic construct
  source 1..21: mol_type = other RNA
ggggccttcaattcaatccat

SEQ ID NO: 22358 - RNA, 21 nt, synthetic construct
  source 1..21: mol_type = other RNA
ggggctcccaaggcaagctta

SEQ ID NO: 22359 - RNA, 21 nt, synthetic construct
  source 1..21: mol_type = other RNA
gggggagaaagaagcaattgt

SEQ ID NO: 22360 - RNA, 21 nt, synthetic construct
  source 1..21: mol_type = other RNA
gggggcacaagatctcgtgtt

SEQ ID NO: 22361 - RNA, 21 nt, synthetic construct
  source 1..21: mol_type = other RNA
gggggctcccaaggcaagctt

SEQ ID NO: 22362 - RNA, 21 nt, synthetic construct
  source 1..21: mol_type = other RNA
ggggggctcccaaggcaagct

SEQ ID NO: 22363 - RNA, 21 nt, synthetic construct
  source 1..21: mol_type = other RNA
gggggtgaggaaaagtctgga

SEQ ID NO: 22364 - RNA, 21 nt, synthetic construct
  source 1..21: mol_type = other RNA
ggggtaagccaagaaagaaat

SEQ ID NO: 22365 - RNA, 21 nt, synthetic construct
  source 1..21: mol_type = other RNA
ggggtagtggtggtgttcttc

SEQ ID NO: 22366 - RNA, 21 nt, synthetic construct
  source 1..21: mol_type = other RNA
ggggtctgagtgtgacttcct

SEQ ID NO: 22367 - RNA, 21 nt, synthetic construct
  source 1..21: mol_type = other RNA
ggggtgaggaaaagtctggag

SEQ ID NO: 22368 - RNA, 21 nt, synthetic construct
  source 1..21: mol_type = other RNA
ggggtgtggctatcaagttct

SEQ ID NO: 22369 - RNA, 21 nt, synthetic construct
  source 1..21: mol_type = other RNA
ggggttgctgtgtttgctgct

SEQ ID NO: 22370 - RNA, 21 nt, synthetic construct
  source 1..21: mol_type = other RNA
gggtaaacctgaggcaccacc

SEQ ID NO: 22371 - RNA, 21 nt, synthetic construct
  source 1..21: mol_type = other RNA
gggtaagccaagaaagaaatc

SEQ ID NO: 22372 - RNA, 21 nt, synthetic construct
  source 1..21: mol_type = other RNA
gggtagtggtggtgttcttct

SEQ ID NO: 22373 - RNA, 21 nt, synthetic construct
  source 1..21: mol_type = other RNA
gggtattccaagtgtttgcaa

SEQ ID NO: 22374 - RNA, 21 nt, synthetic construct
  source 1..21: mol_type = other RNA
gggtattccataataactttt

SEQ ID NO: 22375 - RNA, 21 nt, synthetic construct
  source 1..21: mol_type = other RNA
gggtcgagacaaggagcaaac

SEQ ID NO: 22376 - RNA, 21 nt, synthetic construct
  source 1..21: mol_type = other RNA
gggtctgagtgtgacttcctc

SEQ ID NO: 22377 - RNA, 21 nt, synthetic construct
  source 1..21: mol_type = other RNA
gggtcttgtttcctgcaaaaa

SEQ ID NO: 22378 - RNA, 21 nt, synthetic construct
  source 1..21: mol_type = other RNA
gggtgaggaaaagtctggagt

SEQ ID NO: 22379 - RNA, 21 nt, synthetic construct
  source 1..21: mol_type = other RNA
gggtgagtgatctcacaggac

SEQ ID NO: 22380 - RNA, 21 nt, synthetic construct
  source 1..21: mol_type = other RNA
gggtgtaagcttgccttggga

SEQ ID NO: 22381 - RNA, 21 nt, synthetic construct
  source 1..21: mol_type = other RNA
gggtgtggctatcaagttctg

SEQ ID NO: 22382 - RNA, 21 nt, synthetic construct
  source 1..21: mol_type = other RNA
gggttatgcttgaggtgttct

SEQ ID NO: 22383 - RNA, 21 nt, synthetic construct
  source 1..21: mol_type = other RNA
gggttgatactgaagaattga

SEQ ID NO: 22384 - RNA, 21 nt, synthetic construct
  source 1..21: mol_type = other RNA
gggttgctgtgtttgctgctg

SEQ ID NO: 22385 - RNA, 21 nt, synthetic construct
  source 1..21: mol_type = other RNA
gggtttttggaactggagatg

SEQ ID NO: 22386 - RNA, 21 nt, synthetic construct
  source 1..21: mol_type = other RNA
ggtaaacctgaggcaccacct

SEQ ID NO: 22387 - RNA, 21 nt, synthetic construct
  source 1..21: mol_type = other RNA
ggtaaatggtctgttttggag

SEQ ID NO: 22388 - RNA, 21 nt, synthetic construct
  source 1..21: mol_type = other RNA
ggtaactaagcaagagaatcc

SEQ ID NO: 22389 - RNA, 21 nt, synthetic construct
  source 1..21: mol_type = other RNA
ggtaagccaagaaagaaatcc

SEQ ID NO: 22390 - RNA, 21 nt, synthetic construct
  source 1..21: mol_type = other RNA
ggtaagtgccagaaatgtact

SEQ ID NO: 22391 - RNA, 21 nt, synthetic construct
  source 1..21: mol_type = other RNA
ggtaattagcacttttcccct

SEQ ID NO: 22392 - RNA, 21 nt, synthetic construct
  source 1..21: mol_type = other RNA
ggtacagtggaccaacatctc

SEQ ID NO: 22393 - RNA, 21 nt, synthetic construct
  source 1..21: mol_type = other RNA
ggtacatttgtgacttgtgct

SEQ ID NO: 22394 - RNA, 21 nt, synthetic construct
  source 1..21: mol_type = other RNA
ggtacttgatacataaccatg

SEQ ID NO: 22395 - RNA, 21 nt, synthetic construct
  source 1..21: mol_type = other RNA
ggtagcagtggagagctacag

SEQ ID NO: 22396 - RNA, 21 nt, synthetic construct
  source 1..21: mol_type = other RNA
ggtagtggcagaaaaggaatc

SEQ ID NO: 22397 - RNA, 21 nt, synthetic construct
  source 1..21: mol_type = other RNA
ggtagtggtggtgttcttcta

SEQ ID NO: 22398 - RNA, 21 nt, synthetic construct
  source 1..21: mol_type = other RNA
ggtatcaggaatggacttagt

SEQ ID NO: 22399 - RNA, 21 nt, synthetic construct
  source 1..21: mol_type = other RNA
ggtatgcgatgggtgagtgat

SEQ ID NO: 22400 - RNA, 21 nt, synthetic construct
  source 1..21: mol_type = other RNA
ggtattccaagtgtttgcaaa

SEQ ID NO: 22401 - RNA, 21 nt, synthetic construct
  source 1..21: mol_type = other RNA
ggtattccataataacttttg

SEQ ID NO: 22402 - RNA, 21 nt, synthetic construct
  source 1..21: mol_type = other RNA
ggtatttagcattgcagctag

SEQ ID NO: 22403 - RNA, 21 nt, synthetic construct
  source 1..21: mol_type = other RNA
ggtcaaataacgacttggcgt

SEQ ID NO: 22404 - RNA, 21 nt, synthetic construct
  source 1..21: mol_type = other RNA
ggtcaacaagctgcgcaactt

SEQ ID NO: 22405 - RNA, 21 nt, synthetic construct
  source 1..21: mol_type = other RNA
ggtcaggcacaggaaaaacat

SEQ ID NO: 22406 - RNA, 21 nt, synthetic construct
  source 1..21: mol_type = other RNA
ggtcatttgattggagagatt

SEQ ID NO: 22407 - RNA, 21 nt, synthetic construct
  source 1..21: mol_type = other RNA
ggtccactgtaccttgggact

SEQ ID NO: 22408 - RNA, 21 nt, synthetic construct
  source 1..21: mol_type = other RNA
ggtcgagacaaggagcaaaca

SEQ ID NO: 22409 - RNA, 21 nt, synthetic construct
  source 1..21: mol_type = other RNA
ggtctcaatgatgctcttttg

SEQ ID NO: 22410 - RNA, 21 nt, synthetic construct
  source 1..21: mol_type = other RNA
ggtctgactataaggggaatt

SEQ ID NO: 22411 - RNA, 21 nt, synthetic construct
  source 1..21: mol_type = other RNA
ggtctgagtgtgacttcctcc

SEQ ID NO: 22412 - RNA, 21 nt, synthetic construct
  source 1..21: mol_type = other RNA
ggtctgtgcggaattgatctg

SEQ ID NO: 22413 - RNA, 21 nt, synthetic construct
  source 1..21: mol_type = other RNA
ggtctgttttggagaagtgca

SEQ ID NO: 22414 - RNA, 21 nt, synthetic construct
  source 1..21: mol_type = other RNA
ggtcttgtttcaatttcttga

SEQ ID NO: 22415 - RNA, 21 nt, synthetic construct
  source 1..21: mol_type = other RNA
ggtcttgtttcctgcaaaaag

SEQ ID NO: 22416 - RNA, 21 nt, synthetic construct
  source 1..21: mol_type = other RNA
ggtcttgttttctcagaacac

SEQ ID NO: 22417 - RNA, 21 nt, synthetic construct
  source 1..21: mol_type = other RNA
ggtgaaaacgaggggccttca

SEQ ID NO: 22418 - RNA, 21 nt, synthetic construct
  source 1..21: mol_type = other RNA
ggtgaaaatcagtattcaaaa

SEQ ID NO: 22419 - RNA, 21 nt, synthetic construct
  source 1..21: mol_type = other RNA
ggtgaaagcagtcaaccaaat

SEQ ID NO: 22420 - RNA, 21 nt, synthetic construct
  source 1..21: mol_type = other RNA
ggtgaaatctttaactgcatt

SEQ ID NO: 22421 - RNA, 21 nt, synthetic construct
  source 1..21: mol_type = other RNA
ggtgaactcctggaaaaaaca

SEQ ID NO: 22422 - RNA, 21 nt, synthetic construct
  source 1..21: mol_type = other RNA
ggtgaagaattctgttcaggt

SEQ ID NO: 22423 - RNA, 21 nt, synthetic construct
  source 1..21: mol_type = other RNA
ggtgactctataaaattattg

SEQ ID NO: 22424 - RNA, 21 nt, synthetic construct
  source 1..21: mol_type = other RNA
ggtgaggaaaagtctggagta

SEQ ID NO: 22425 - RNA, 21 nt, synthetic construct
  source 1..21: mol_type = other RNA
ggtgagtgaggcctgtgatgc

SEQ ID NO: 22426 - RNA, 21 nt, synthetic construct
  source 1..21: mol_type = other RNA
ggtgagtgatctcacaggaca

SEQ ID NO: 22427 - RNA, 21 nt, synthetic construct
  source 1..21: mol_type = other RNA
ggtgatggtatcaggaatgga

SEQ ID NO: 22428 - RNA, 21 nt, synthetic construct
  source 1..21: mol_type = other RNA
ggtgcacttctccaaaacaga

SEQ ID NO: 22429 - RNA, 21 nt, synthetic construct
  source 1..21: mol_type = other RNA
ggtgcagaaaaccacatctca

SEQ ID NO: 22430 - RNA, 21 nt, synthetic construct
  source 1..21: mol_type = other RNA
ggtgcctcaggtttaccctct

SEQ ID NO: 22431 - RNA, 21 nt, synthetic construct
  source 1..21: mol_type = other RNA
ggtgctacagtttctgcctct

SEQ ID NO: 22432 - RNA, 21 nt, synthetic construct
  source 1..21: mol_type = other RNA
ggtgctgtgtgcatacaggca

SEQ ID NO: 22433 - RNA, 21 nt, synthetic construct
  source 1..21: mol_type = other RNA
ggtgcttacttcaagcaaagc

SEQ ID NO: 22434 - RNA, 21 nt, synthetic construct
  source 1..21: mol_type = other RNA
ggtgctttcaagaacaggagc

SEQ ID NO: 22435 - RNA, 21 nt, synthetic construct
  source 1..21: mol_type = other RNA
ggtggaacctggatgcaagcc

SEQ ID NO: 22436 - RNA, 21 nt, synthetic construct
  source 1..21: mol_type = other RNA
ggtggagttttagaagaacac

SEQ ID NO: 22437 - RNA, 21 nt, synthetic construct
  source 1..21: mol_type = other RNA
ggtggattctcttgcttagtt

SEQ ID NO: 22438 - RNA, 21 nt, synthetic construct
  source 1..21: mol_type = other RNA
ggtggcagctctgaacggtat

SEQ ID NO: 22439 - RNA, 21 nt, synthetic construct
  source 1..21: mol_type = other RNA
ggtggcatctcttacagaagc

SEQ ID NO: 22440 - RNA, 21 nt, synthetic construct
  source 1..21: mol_type = other RNA
ggtgggttatgcttgaggtgt

SEQ ID NO: 22441 - RNA, 21 nt, synthetic construct
  source 1..21: mol_type = other RNA
ggtggtgcctcaggtttaccc

SEQ ID NO: 22442 - RNA, 21 nt, synthetic construct
  source 1..21: mol_type = other RNA
ggtggtgctgtgtgcatacag

SEQ ID NO: 22443 - RNA, 21 nt, synthetic construct
  source 1..21: mol_type = other RNA
ggtggtggtggtgtggtagtg

SEQ ID NO: 22444 - RNA, 21 nt, synthetic construct
  source 1..21: mol_type = other RNA
ggtggtggtgtggtagtggca

SEQ ID NO: 22445 - RNA, 21 nt, synthetic construct
  source 1..21: mol_type = other RNA
ggtggtgtggtagtggcagaa

SEQ ID NO: 22446 - RNA, 21 nt, synthetic construct
  source 1..21: mol_type = other RNA
ggtggtgttcttctaaaactc

SEQ ID NO: 22447 - RNA, 21 nt, synthetic construct
  source 1..21: mol_type = other RNA
ggtgtaagcttgccttgggag

SEQ ID NO: 22448 - RNA, 21 nt, synthetic construct
  source 1..21: mol_type = other RNA
ggtgtctccatttacttctgg

SEQ ID NO: 22449 - RNA, 21 nt, synthetic construct
  source 1..21: mol_type = other RNA
ggtgtcttttctgaagaagtt

SEQ ID NO: 22450 - RNA, 21 nt, synthetic construct
  source 1..21: mol_type = other RNA
ggtgtgagggtttttggaact

SEQ ID NO: 22451 - RNA, 21 nt, synthetic construct
  source 1..21: mol_type = other RNA
ggtgtgagtttgaaaatggct

SEQ ID NO: 22452 - RNA, 21 nt, synthetic construct
  source 1..21: mol_type = other RNA
ggtgtggctatcaagttctgc

SEQ ID NO: 22453 - RNA, 21 nt, synthetic construct
  source 1..21: mol_type = other RNA
ggtgtggtagtggcagaaaag

SEQ ID NO: 22454 - RNA, 21 nt, synthetic construct
  source 1..21: mol_type = other RNA
ggtgtgtattgtttgaacaag

SEQ ID NO: 22455 - RNA, 21 nt, synthetic construct
  source 1..21: mol_type = other RNA
ggtgttctgacattggtcttg

SEQ ID NO: 22456 - RNA, 21 nt, synthetic construct
  source 1..21: mol_type = other RNA
ggtgttcttctaaaactccac

SEQ ID NO: 22457 - RNA, 21 nt, synthetic construct
  source 1..21: mol_type = other RNA
ggttatgcttgaggtgttctg

SEQ ID NO: 22458 - RNA, 21 nt, synthetic construct
  source 1..21: mol_type = other RNA
ggttatgtatcaagtaccttt

SEQ ID NO: 22459 - RNA, 21 nt, synthetic construct
  source 1..21: mol_type = other RNA
ggttcactaactgtgcgtttt

SEQ ID NO: 22460 - RNA, 21 nt, synthetic construct
  source 1..21: mol_type = other RNA
ggttccaccttaattggcctg

SEQ ID NO: 22461 - RNA, 21 nt, synthetic construct
  source 1..21: mol_type = other RNA
ggttccagcagcaatttgcaa

SEQ ID NO: 22462 - RNA, 21 nt, synthetic construct
  source 1..21: mol_type = other RNA
ggttccctggatgttattttc

SEQ ID NO: 22463 - RNA, 21 nt, synthetic construct
  source 1..21: mol_type = other RNA
ggttcctcagcttccttcaga

SEQ ID NO: 22464 - RNA, 21 nt, synthetic construct
  source 1..21: mol_type = other RNA
ggttctatcctgttccatcag

SEQ ID NO: 22465 - RNA, 21 nt, synthetic construct
  source 1..21: mol_type = other RNA
ggttctgtctggcaaatggga

SEQ ID NO: 22466 - RNA, 21 nt, synthetic construct
  source 1..21: mol_type = other RNA
ggttgactgctttcacctgga

SEQ ID NO: 22467 - RNA, 21 nt, synthetic construct
  source 1..21: mol_type = other RNA
ggttgatactgaagaattgat

SEQ ID NO: 22468 - RNA, 21 nt, synthetic construct
  source 1..21: mol_type = other RNA
ggttgctgtgtttgctgctgt

SEQ ID NO: 22469 - RNA, 21 nt, synthetic construct
  source 1..21: mol_type = other RNA
ggttggggtagtggtggtgtt

SEQ ID NO: 22470 - RNA, 21 nt, synthetic construct
  source 1..21: mol_type = other RNA
ggttggtgtcttttctgaaga

SEQ ID NO: 22471 - RNA, 21 nt, synthetic construct
  source 1..21: mol_type = other RNA
ggttggttctatcctgttcca

SEQ ID NO: 22472 - RNA, 21 nt, synthetic construct
  source 1..21: mol_type = other RNA
ggttgtgtttgtgctgcctgt

SEQ ID NO: 22473 - RNA, 21 nt, synthetic construct
  source 1..21: mol_type = other RNA
ggtttaccctctattttcact

SEQ ID NO: 22474 - RNA, 21 nt, synthetic construct
  source 1..21: mol_type = other RNA
ggtttcagatagtgctgtgtt

SEQ ID NO: 22475 - RNA, 21 nt, synthetic construct
  source 1..21: mol_type = other RNA
ggtttctatttttatatccct

SEQ ID NO: 22476 - RNA, 21 nt, synthetic construct
  source 1..21: mol_type = other RNA
ggtttctgaaaggaacaggta

SEQ ID NO: 22477 - RNA, 21 nt, synthetic construct
  source 1..21: mol_type = other RNA
ggtttcttgttcaaacaatac

SEQ ID NO: 22478 - RNA, 21 nt, synthetic construct
  source 1..21: mol_type = other RNA
ggtttgtctagtcaaaactgt

SEQ ID NO: 22479 - RNA, 21 nt, synthetic construct
  source 1..21: mol_type = other RNA
ggttttctgcaccgcaatgga

SEQ ID NO: 22480 - RNA, 21 nt, synthetic construct
  source 1..21: mol_type = other RNA
ggttttgagggagatgtgaac

SEQ ID NO: 22481 - RNA, 21 nt, synthetic construct
  source 1..21: mol_type = other RNA
ggtttttggaactggagatgt

SEQ ID NO: 22482 - RNA, 21 nt, synthetic construct
  source 1..21: mol_type = other RNA
gtaaaagttgaaatgtcaggg

SEQ ID NO: 22483 - RNA, 21 nt, synthetic construct
  source 1..21: mol_type = other RNA
gtaaacctgaggcaccacctt

SEQ ID NO: 22484 - RNA, 21 nt, synthetic construct
  source 1..21: mol_type = other RNA
gtaaactagctgcaatgctaa

SEQ ID NO: 22485 - RNA, 21 nt, synthetic construct
  source 1..21: mol_type = other RNA
gtaaagtcaggactcacacga

SEQ ID NO: 22486 - RNA, 21 nt, synthetic construct
  source 1..21: mol_type = other RNA
gtaaatggagacaccaagtgg

SEQ ID NO: 22487 - RNA, 21 nt, synthetic construct
  source 1..21: mol_type = other RNA
gtaaatggtctgttttggaga

SEQ ID NO: 22488 - RNA, 21 nt, synthetic construct
  source 1..21: mol_type = other RNA
gtaacacaacacttttaaggg

SEQ ID NO: 22489 - RNA, 21 nt, synthetic construct
  source 1..21: mol_type = other RNA
gtaactaagcaagagaatcca

SEQ ID NO: 22490 - RNA, 21 nt, synthetic construct
  source 1..21: mol_type = other RNA
gtaacttcggggtaagccaag

SEQ ID NO: 22491 - RNA, 21 nt, synthetic construct
  source 1..21: mol_type = other RNA
gtaagagatgccaccttagag

SEQ ID NO: 22492 - RNA, 21 nt, synthetic construct
  source 1..21: mol_type = other RNA
gtaagagccttatggtcaaat

SEQ ID NO: 22493 - RNA, 21 nt, synthetic construct
  source 1..21: mol_type = other RNA
gtaagcaccattcatttcatt

SEQ ID NO: 22494 - RNA, 21 nt, synthetic construct
  source 1..21: mol_type = other RNA
gtaagccaagaaagaaatcca

SEQ ID NO: 22495 - RNA, 21 nt, synthetic construct
  source 1..21: mol_type = other RNA
gtaagcttgccttgggagccc

SEQ ID NO: 22496 - RNA, 21 nt, synthetic construct
  source 1..21: mol_type = other RNA
gtaagtgccagaaatgtactg

SEQ ID NO: 22497 - RNA, 21 nt, synthetic construct
  source 1..21: mol_type = other RNA
gtaatacaatgttcttgtcat

SEQ ID NO: 22498 - RNA, 21 nt, synthetic construct
  source 1..21: mol_type = other RNA
gtaatgaggcatcactgccat

SEQ ID NO: 22499 - RNA, 21 nt, synthetic construct
  source 1..21: mol_type = other RNA
gtaattagcacttttcccctc

SEQ ID NO: 22500 - RNA, 21 nt, synthetic construct
  source 1..21: mol_type = other RNA
gtaatttggaaggtgactcta

SEQ ID NO: 22501 - RNA, 21 nt, synthetic construct
  source 1..21: mol_type = other RNA
gtaatttttgctgctgttgct

SEQ ID NO: 22502 - RNA, 21 nt, synthetic construct
  source 1..21: mol_type = other RNA
gtacagaatataaatcgtaga

SEQ ID NO: 22503 - RNA, 21 nt, synthetic construct
  source 1..21: mol_type = other RNA
gtacagtggaccaacatctcc

SEQ ID NO: 22504 - RNA, 21 nt, synthetic construct
  source 1..21: mol_type = other RNA
gtacatttctggcacttacct

SEQ ID NO: 22505 - RNA, 21 nt, synthetic construct
  source 1..21: mol_type = other RNA
gtacatttgtgacttgtgctc

SEQ ID NO: 22506 - RNA, 21 nt, synthetic construct
  source 1..21: mol_type = other RNA
gtaccaagttgaaatgaatca

SEQ ID NO: 22507 - RNA, 21 nt, synthetic construct
  source 1..21: mol_type = other RNA
gtaccttgggactgcccttga

SEQ ID NO: 22508 - RNA, 21 nt, synthetic construct
  source 1..21: mol_type = other RNA
gtacctttgctgagcaagttg

SEQ ID NO: 22509 - RNA, 21 nt, synthetic construct
  source 1..21: mol_type = other RNA
gtacttcctccagtcccattt

SEQ ID NO: 22510 - RNA, 21 nt, synthetic construct
  source 1..21: mol_type = other RNA
gtacttgatacataaccatgc

SEQ ID NO: 22511 - RNA, 21 nt, synthetic construct
  source 1..21: mol_type = other RNA
gtagaaattccccttatagtc

SEQ ID NO: 22512 - RNA, 21 nt, synthetic construct
  source 1..21: mol_type = other RNA
gtagaactgaagcttgttgtg

SEQ ID NO: 22513 - RNA, 21 nt, synthetic construct
  source 1..21: mol_type = other RNA
gtagagggtattccaagtgtt

SEQ ID NO: 22514 - RNA, 21 nt, synthetic construct
  source 1..21: mol_type = other RNA
gtagatggattaggactctgg

SEQ ID NO: 22515 - RNA, 21 nt, synthetic construct
  source 1..21: mol_type = other RNA
gtagcaccattaggcattagc

SEQ ID NO: 22516 - RNA, 21 nt, synthetic construct
  source 1..21: mol_type = other RNA
gtagcagtggagagctacagg

SEQ ID NO: 22517 - RNA, 21 nt, synthetic construct
  source 1..21: mol_type = other RNA
gtagccagaggttctgtctgg

SEQ ID NO: 22518 - RNA, 21 nt, synthetic construct
  source 1..21: mol_type = other RNA
gtagcccaagaaaatgcagtt

SEQ ID NO: 22519 - RNA, 21 nt, synthetic construct
  source 1..21: mol_type = other RNA
gtagcctgactgttaatggca

SEQ ID NO: 22520 - RNA, 21 nt, synthetic construct
  source 1..21: mol_type = other RNA
gtagctctccactgctaccaa

SEQ ID NO: 22521 - RNA, 21 nt, synthetic construct
  source 1..21: mol_type = other RNA
gtaggtaagtgccagaaatgt

SEQ ID NO: 22522 - RNA, 21 nt, synthetic construct
  source 1..21: mol_type = other RNA
gtagtctgttctttattctct

SEQ ID NO: 22523 - RNA, 21 nt, synthetic construct
  source 1..21: mol_type = other RNA
gtagtggcagaaaaggaatcc

SEQ ID NO: 22524 - RNA, 21 nt, synthetic construct
  source 1..21: mol_type = other RNA
gtagtggtggtgttcttctaa

SEQ ID NO: 22525 - RNA, 21 nt, synthetic construct
  source 1..21: mol_type = other RNA
gtagttgttctggtttctgaa

SEQ ID NO: 22526 - RNA, 21 nt, synthetic construct
  source 1..21: mol_type = other RNA
gtatcaacccaatctctccaa

SEQ ID NO: 22527 - RNA, 21 nt, synthetic construct
  source 1..21: mol_type = other RNA
gtatcaagtacctttgctgag

SEQ ID NO: 22528 - RNA, 21 nt, synthetic construct
  source 1..21: mol_type = other RNA
gtatcaggaatggacttagtc

SEQ ID NO: 22529 - RNA, 21 nt, synthetic construct
  source 1..21: mol_type = other RNA
gtatctagtaatttggaaggt

SEQ ID NO: 22530 - RNA, 21 nt, synthetic construct
  source 1..21: mol_type = other RNA
gtatgaagggaagccagaata

SEQ ID NO: 22531 - RNA, 21 nt, synthetic construct
  source 1..21: mol_type = other RNA
gtatgcacacagcaccaccag

SEQ ID NO: 22532 - RNA, 21 nt, synthetic construct
  source 1..21: mol_type = other RNA
gtatgcagcccttctccgatg

SEQ ID NO: 22533 - RNA, 21 nt, synthetic construct
  source 1..21: mol_type = other RNA
gtatgcgatgggtgagtgatc

SEQ ID NO: 22534 - RNA, 21 nt, synthetic construct
  source 1..21: mol_type = other RNA
gtatgtcattcctgttcacac

SEQ ID NO: 22535 - RNA, 21 nt, synthetic construct
  source 1..21: mol_type = other RNA
gtattacttaaaaacaaggca

SEQ ID NO: 22536 - RNA, 21 nt, synthetic construct
  source 1..21: mol_type = other RNA
gtattcaaaatcaagcgagtt

SEQ ID NO: 22537 - RNA, 21 nt, synthetic construct
  source 1..21: mol_type = other RNA
gtattccaagtgtttgcaaaa

SEQ ID NO: 22538 - RNA, 21 nt, synthetic construct
  source 1..21: mol_type = other RNA
gtattgtttgaacaagaaacc

SEQ ID NO: 22539 - RNA, 21 nt, synthetic construct
  source 1..21: mol_type = other RNA
gtattgtttggaggtcatttg

SEQ ID NO: 22540 - RNA, 21 nt, synthetic construct
  source 1..21: mol_type = other RNA
gtatttagcattgcagctagt

SEQ ID NO: 22541 - RNA, 21 nt, synthetic construct
  source 1..21: mol_type = other RNA
gtattttgcatgcacttgatt

SEQ ID NO: 22542 - RNA, 21 nt, synthetic construct
  source 1..21: mol_type = other RNA
gtcaaaactgtgactggccct

SEQ ID NO: 22543 - RNA, 21 nt, synthetic construct
  source 1..21: mol_type = other RNA
gtcaaataacgacttggcgtg

SEQ ID NO: 22544 - RNA, 21 nt, synthetic construct
  source 1..21: mol_type = other RNA
gtcaacaagctgcgcaacttg

SEQ ID NO: 22545 - RNA, 21 nt, synthetic construct
  source 1..21: mol_type = other RNA
gtcaaccaaatgtctccgatt

SEQ ID NO: 22546 - RNA, 21 nt, synthetic construct
  source 1..21: mol_type = other RNA
gtcaagactcaatatgatttc

SEQ ID NO: 22547 - RNA, 21 nt, synthetic construct
  source 1..21: mol_type = other RNA
gtcacaaatgtaccaagttga

SEQ ID NO: 22548 - RNA, 21 nt, synthetic construct
  source 1..21: mol_type = other RNA
gtcacaacaagcttcagttct

SEQ ID NO: 22549 - RNA, 21 nt, synthetic construct
  source 1..21: mol_type = other RNA
gtcacactcagacccctcccc

SEQ ID NO: 22550 - RNA, 21 nt, synthetic construct
  source 1..21: mol_type = other RNA
gtcacagttttgactagacaa

SEQ ID NO: 22551 - RNA, 21 nt, synthetic construct
  source 1..21: mol_type = other RNA
gtcaccttccaaattactaga

SEQ ID NO: 22552 - RNA, 21 nt, synthetic construct
  source 1..21: mol_type = other RNA
gtcactgtgtggcactagatt

SEQ ID NO: 22553 - RNA, 21 nt, synthetic construct
  source 1..21: mol_type = other RNA
gtcagaacacctcaagcataa

SEQ ID NO: 22554 - RNA, 21 nt, synthetic construct
  source 1..21: mol_type = other RNA
gtcagaccatgaaatcaagtg

SEQ ID NO: 22555 - RNA, 21 nt, synthetic construct
  source 1..21: mol_type = other RNA
gtcagatgcacaggccaatta

SEQ ID NO: 22556 - RNA, 21 nt, synthetic construct
  source 1..21: mol_type = other RNA
gtcaggactcacacgactatt

SEQ ID NO: 22557 - RNA, 21 nt, synthetic construct
  source 1..21: mol_type = other RNA
gtcaggcacaggaaaaacatt

SEQ ID NO: 22558 - RNA, 21 nt, synthetic construct
  source 1..21: mol_type = other RNA
gtcaggctactaatgagttgt

SEQ ID NO: 22559 - RNA, 21 nt, synthetic construct
  source 1..21: mol_type = other RNA
gtcagggccagtcacagtttt

SEQ ID NO: 22560 - RNA, 21 nt, synthetic construct
  source 1..21: mol_type = other RNA
gtcatggtaattagcactttt

SEQ ID NO: 22561 - RNA, 21 nt, synthetic construct
  source 1..21: mol_type = other RNA
gtcattcctgttcacacaatt

SEQ ID NO: 22562 - RNA, 21 nt, synthetic construct
  source 1..21: mol_type = other RNA
gtcattgtccctgcagtctgt

SEQ ID NO: 22563 - RNA, 21 nt, synthetic construct
  source 1..21: mol_type = other RNA
gtcatttgattggagagattg

SEQ ID NO: 22564 - RNA, 21 nt, synthetic construct
  source 1..21: mol_type = other RNA
gtccaaatgggactggaggaa

SEQ ID NO: 22565 - RNA, 21 nt, synthetic construct
  source 1..21: mol_type = other RNA
gtccactgtaccttgggactg

SEQ ID NO: 22566 - RNA, 21 nt, synthetic construct
  source 1..21: mol_type = other RNA
gtccattcctgataccatcac

SEQ ID NO: 22567 - RNA, 21 nt, synthetic construct
  source 1..21: mol_type = other RNA
gtcccaaggtacagtggacca

SEQ ID NO: 22568 - RNA, 21 nt, synthetic construct
  source 1..21: mol_type = other RNA
gtcccatttggacattatgag

SEQ ID NO: 22569 - RNA, 21 nt, synthetic construct
  source 1..21: mol_type = other RNA
gtccccagtgttgaaacagca

SEQ ID NO: 22570 - RNA, 21 nt, synthetic construct
  source 1..21: mol_type = other RNA
gtccctgcagtctgtatgtca

SEQ ID NO: 22571 - RNA, 21 nt, synthetic construct
  source 1..21: mol_type = other RNA
gtcctaatccatctacacatg

SEQ ID NO: 22572 - RNA, 21 nt, synthetic construct
  source 1..21: mol_type = other RNA
gtcctgactttacacaagaaa

SEQ ID NO: 22573 - RNA, 21 nt, synthetic construct
  source 1..21: mol_type = other RNA
gtcctgtagctctccactgct

SEQ ID NO: 22574 - RNA, 21 nt, synthetic construct
  source 1..21: mol_type = other RNA
gtcctgtgagatcactcaccc

SEQ ID NO: 22575 - RNA, 21 nt, synthetic construct
  source 1..21: mol_type = other RNA
gtccttctggggaggggtctg

SEQ ID NO: 22576 - RNA, 21 nt, synthetic construct
  source 1..21: mol_type = other RNA
gtcgagacaaggagcaaacac

SEQ ID NO: 22577 - RNA, 21 nt, synthetic construct
  source 1..21: mol_type = other RNA
gtcgtgtgagtcctgacttta

SEQ ID NO: 22578 - RNA, 21 nt, synthetic construct
  source 1..21: mol_type = other RNA
gtcgttatttgaccataaggc

SEQ ID NO: 22579 - RNA, 21 nt, synthetic construct
  source 1..21: mol_type = other RNA
gtctagtcaaaactgtgactg

SEQ ID NO: 22580 - RNA, 21 nt, synthetic construct
  source 1..21: mol_type = other RNA
gtctcaatattatccagattg

SEQ ID NO: 22581 - RNA, 21 nt, synthetic construct
  source 1..21: mol_type = other RNA
gtctcaatgatgctcttttgc

SEQ ID NO: 22582 - RNA, 21 nt, synthetic construct
  source 1..21: mol_type = other RNA
gtctcagtacatttctggcac

SEQ ID NO: 22583 - RNA, 21 nt, synthetic construct
  source 1..21: mol_type = other RNA
gtctccatttacttctggatg

SEQ ID NO: 22584 - RNA, 21 nt, synthetic construct
  source 1..21: mol_type = other RNA
gtctccgatttgagtgataag

SEQ ID NO: 22585 - RNA, 21 nt, synthetic construct
  source 1..21: mol_type = other RNA
gtctcgaactcgcttgatttt

SEQ ID NO: 22586 - RNA, 21 nt, synthetic construct
  source 1..21: mol_type = other RNA
gtctcgacccttcagaatctc

SEQ ID NO: 22587 - RNA, 21 nt, synthetic construct
  source 1..21: mol_type = other RNA
gtctctgaagcctgttgattc

SEQ ID NO: 22588 - RNA, 21 nt, synthetic construct
  source 1..21: mol_type = other RNA
gtctgactataaggggaattt

SEQ ID NO: 22589 - RNA, 21 nt, synthetic construct
  source 1..21: mol_type = other RNA
gtctgagtgtgacttcctccc

SEQ ID NO: 22590 - RNA, 21 nt, synthetic construct
  source 1..21: mol_type = other RNA
gtctggagtatttcctcttta

SEQ ID NO: 22591 - RNA, 21 nt, synthetic construct
  source 1..21: mol_type = other RNA
gtctggcaaatgggaggtgat

SEQ ID NO: 22592 - RNA, 21 nt, synthetic construct
  source 1..21: mol_type = other RNA
gtctggccaaagaatgatcct

SEQ ID NO: 22593 - RNA, 21 nt, synthetic construct
  source 1..21: mol_type = other RNA
gtctggtcaacaagctgcgca

SEQ ID NO: 22594 - RNA, 21 nt, synthetic construct
  source 1..21: mol_type = other RNA
gtctggtgaagaattctgttc

SEQ ID NO: 22595 - RNA, 21 nt, synthetic construct
  source 1..21: mol_type = other RNA
gtctgtatgtcattcctgttc

SEQ ID NO: 22596 - RNA, 21 nt, synthetic construct
  source 1..21: mol_type = other RNA
gtctgtgcggaattgatctgc

SEQ ID NO: 22597 - RNA, 21 nt, synthetic construct
  source 1..21: mol_type = other RNA
gtctgttctttattctctgaa

SEQ ID NO: 22598 - RNA, 21 nt, synthetic construct
  source 1..21: mol_type = other RNA
gtctgttgccctcaacatggt

SEQ ID NO: 22599 - RNA, 21 nt, synthetic construct
  source 1..21: mol_type = other RNA
gtctgttttggagaagtgcac

SEQ ID NO: 22600 - RNA, 21 nt, synthetic construct
  source 1..21: mol_type = other RNA
gtcttgacaggtgtatccaat

SEQ ID NO: 22601 - RNA, 21 nt, synthetic construct
  source 1..21: mol_type = other RNA
gtcttgccatagtcagatgca

SEQ ID NO: 22602 - RNA, 21 nt, synthetic construct
  source 1..21: mol_type = other RNA
gtcttgtttcaatttcttgat

SEQ ID NO: 22603 - RNA, 21 nt, synthetic construct
  source 1..21: mol_type = other RNA
gtcttgtttcctgcaaaaagt

SEQ ID NO: 22604 - RNA, 21 nt, synthetic construct
  source 1..21: mol_type = other RNA
gtcttgttttctcagaacaca

SEQ ID NO: 22605 - RNA, 21 nt, synthetic construct
  source 1..21: mol_type = other RNA
gtctttctccattagcctttt

SEQ ID NO: 22606 - RNA, 21 nt, synthetic construct
  source 1..21: mol_type = other RNA
gtcttttctgaagaagttgtt

SEQ ID NO: 22607 - RNA, 21 nt, synthetic construct
  source 1..21: mol_type = other RNA
gtgaaaacgaggggccttcaa

SEQ ID NO: 22608 - RNA, 21 nt, synthetic construct
  source 1..21: mol_type = other RNA
gtgaaaatagagggtaaacct

SEQ ID NO: 22609 - RNA, 21 nt, synthetic construct
  source 1..21: mol_type = other RNA
gtgaaactgcttcagatgctg

SEQ ID NO: 22610 - RNA, 21 nt, synthetic construct
  source 1..21: mol_type = other RNA
gtgaaagcagtcaaccaaatg

SEQ ID NO: 22611 - RNA, 21 nt, synthetic construct
  source 1..21: mol_type = other RNA
gtgaaatctttaactgcattt

SEQ ID NO: 22612 - RNA, 21 nt, synthetic construct
  source 1..21: mol_type = other RNA
gtgaacactgagctttgcttg

SEQ ID NO: 22613 - RNA, 21 nt, synthetic construct
  source 1..21: mol_type = other RNA
gtgaacaggaatgacatacag

SEQ ID NO: 22614 - RNA, 21 nt, synthetic construct
  source 1..21: mol_type = other RNA
gtgaaccttctctctctgggc

SEQ ID NO: 22615 - RNA, 21 nt, synthetic construct
  source 1..21: mol_type = other RNA
gtgaactcctggaaaaaacac

SEQ ID NO: 22616 - RNA, 21 nt, synthetic construct
  source 1..21: mol_type = other RNA
gtgaactctgggatggttgtg

SEQ ID NO: 22617 - RNA, 21 nt, synthetic construct
  source 1..21: mol_type = other RNA
gtgaagaagatcttgctttgg

SEQ ID NO: 22618 - RNA, 21 nt, synthetic construct
  source 1..21: mol_type = other RNA
gtgaagaattctgttcaggtt

SEQ ID NO: 22619 - RNA, 21 nt, synthetic construct
  source 1..21: mol_type = other RNA
gtgactgcacatgagcttttg

SEQ ID NO: 22620 - RNA, 21 nt, synthetic construct
  source 1..21: mol_type = other RNA
gtgactggccctgacatttca

SEQ ID NO: 22621 - RNA, 21 nt, synthetic construct
  source 1..21: mol_type = other RNA
gtgacttcctccctggtcagg

SEQ ID NO: 22622 - RNA, 21 nt, synthetic construct
  source 1..21: mol_type = other RNA
gtgacttctgctcctgttctt

SEQ ID NO: 22623 - RNA, 21 nt, synthetic construct
  source 1..21: mol_type = other RNA
gtgacttgtgctccagctgtg

SEQ ID NO: 22624 - RNA, 21 nt, synthetic construct
  source 1..21: mol_type = other RNA
gtgagatcactcacccatcgc

SEQ ID NO: 22625 - RNA, 21 nt, synthetic construct
  source 1..21: mol_type = other RNA
gtgagatgtggttttctgcac

SEQ ID NO: 22626 - RNA, 21 nt, synthetic construct
  source 1..21: mol_type = other RNA
gtgaggaaaagtctggagtat

SEQ ID NO: 22627 - RNA, 21 nt, synthetic construct
  source 1..21: mol_type = other RNA
gtgaggcctgtgatgctgatg

SEQ ID NO: 22628 - RNA, 21 nt, synthetic construct
  source 1..21: mol_type = other RNA
gtgagggtttttggaactgga

SEQ ID NO: 22629 - RNA, 21 nt, synthetic construct
  source 1..21: mol_type = other RNA
gtgagtcctgactttacacaa

SEQ ID NO: 22630 - RNA, 21 nt, synthetic construct
  source 1..21: mol_type = other RNA
gtgagtgaggcctgtgatgct

SEQ ID NO: 22631 - RNA, 21 nt, synthetic construct
  source 1..21: mol_type = other RNA
gtgagtgatctcacaggacaa

SEQ ID NO: 22632 - RNA, 21 nt, synthetic construct
  source 1..21: mol_type = other RNA
gtgagttctgtagcccaagaa

SEQ ID NO: 22633 - RNA, 21 nt, synthetic construct
  source 1..21: mol_type = other RNA
gtgagtttgaaaatggctcag

SEQ ID NO: 22634 - RNA, 21 nt, synthetic construct
  source 1..21: mol_type = other RNA
gtgataagaaagaatctgtga

SEQ ID NO: 22635 - RNA, 21 nt, synthetic construct
  source 1..21: mol_type = other RNA
gtgataatgtgcagcaaaaga

SEQ ID NO: 22636 - RNA, 21 nt, synthetic construct
  source 1..21: mol_type = other RNA
gtgatcccaaagcaagatctt

SEQ ID NO: 22637 - RNA, 21 nt, synthetic construct
  source 1..21: mol_type = other RNA
gtgatctcacaggacaactca

SEQ ID NO: 22638 - RNA, 21 nt, synthetic construct
  source 1..21: mol_type = other RNA
gtgatgcaagttttgggtctt

SEQ ID NO: 22639 - RNA, 21 nt, synthetic construct
  source 1..21: mol_type = other RNA
gtgatgcctcattacgtttta

SEQ ID NO: 22640 - RNA, 21 nt, synthetic construct
  source 1..21: mol_type = other RNA
gtgatgctgatgatgctgata

SEQ ID NO: 22641 - RNA, 21 nt, synthetic construct
  source 1..21: mol_type = other RNA
gtgatggtatcaggaatggac

SEQ ID NO: 22642 - RNA, 21 nt, synthetic construct
  source 1..21: mol_type = other RNA
gtgatggtggtggtggtgtgg

SEQ ID NO: 22643 - RNA, 21 nt, synthetic construct
  source 1..21: mol_type = other RNA
gtgatttgagagtaagagcct

SEQ ID NO: 22644 - RNA, 21 nt, synthetic construct
  source 1..21: mol_type = other RNA
gtgcacctggtgtgagggttt

SEQ ID NO: 22645 - RNA, 21 nt, synthetic construct
  source 1..21: mol_type = other RNA
gtgcacttctccaaaacagac

SEQ ID NO: 22646 - RNA, 21 nt, synthetic construct
  source 1..21: mol_type = other RNA
gtgcagaaaaccacatctcac

SEQ ID NO: 22647 - RNA, 21 nt, synthetic construct
  source 1..21: mol_type = other RNA
gtgcagcaaaagagcatcatt

SEQ ID NO: 22648 - RNA, 21 nt, synthetic construct
  source 1..21: mol_type = other RNA
gtgcagtcactgtgtggcact

SEQ ID NO: 22649 - RNA, 21 nt, synthetic construct
  source 1..21: mol_type = other RNA
gtgcatacaggcatgtggctt

SEQ ID NO: 22650 - RNA, 21 nt, synthetic construct
  source 1..21: mol_type = other RNA
gtgcatctgactatggcaaga

SEQ ID NO: 22651 - RNA, 21 nt, synthetic construct
  source 1..21: mol_type = other RNA
gtgcatgcaaaatacaggttt

SEQ ID NO: 22652 - RNA, 21 nt, synthetic construct
  source 1..21: mol_type = other RNA
gtgccacacagtgactgcaca

SEQ ID NO: 22653 - RNA, 21 nt, synthetic construct
  source 1..21: mol_type = other RNA
gtgccacttggtgtctccatt

SEQ ID NO: 22654 - RNA, 21 nt, synthetic construct
  source 1..21: mol_type = other RNA
gtgccagaaatgtactgagac

SEQ ID NO: 22655 - RNA, 21 nt, synthetic construct
  source 1..21: mol_type = other RNA
gtgcccccaacacagcactat

SEQ ID NO: 22656 - RNA, 21 nt, synthetic construct
  source 1..21: mol_type = other RNA
gtgcctcaggtttaccctcta

SEQ ID NO: 22657 - RNA, 21 nt, synthetic construct
  source 1..21: mol_type = other RNA
gtgcctgaccagggaggaagt

SEQ ID NO: 22658 - RNA, 21 nt, synthetic construct
  source 1..21: mol_type = other RNA
gtgcggaattgatctgccctg

SEQ ID NO: 22659 - RNA, 21 nt, synthetic construct
  source 1..21: mol_type = other RNA
gtgcgttttattcctccattt

SEQ ID NO: 22660 - RNA, 21 nt, synthetic construct
  source 1..21: mol_type = other RNA
gtgctaatgcctaatggtgct

SEQ ID NO: 22661 - RNA, 21 nt, synthetic construct
  source 1..21: mol_type = other RNA
gtgctaattaccatgacaaga

SEQ ID NO: 22662 - RNA, 21 nt, synthetic construct
  source 1..21: mol_type = other RNA
gtgctacagtttctgcctctt

SEQ ID NO: 22663 - RNA, 21 nt, synthetic construct
  source 1..21: mol_type = other RNA
gtgctccagctgtgttgtttt

SEQ ID NO: 22664 - RNA, 21 nt, synthetic construct
  source 1..21: mol_type = other RNA
gtgctgcctgtttatgaggct

SEQ ID NO: 22665 - RNA, 21 nt, synthetic construct
  source 1..21: mol_type = other RNA
gtgctgtgtgcatacaggcat

SEQ ID NO: 22666 - RNA, 21 nt, synthetic construct
  source 1..21: mol_type = other RNA
gtgctgtgttgggggcacaag

SEQ ID NO: 22667 - RNA, 21 nt, synthetic construct
  source 1..21: mol_type = other RNA
gtgctgtttcaacactgggga

SEQ ID NO: 22668 - RNA, 21 nt, synthetic construct
  source 1..21: mol_type = other RNA
gtgcttacttcaagcaaagct

SEQ ID NO: 22669 - RNA, 21 nt, synthetic construct
  source 1..21: mol_type = other RNA
gtgctttcaagaacaggagca

SEQ ID NO: 22670 - RNA, 21 nt, synthetic construct
  source 1..21: mol_type = other RNA
gtgctttttccttctgaagga

SEQ ID NO: 22671 - RNA, 21 nt, synthetic construct
  source 1..21: mol_type = other RNA
gtggaacacacacatggtgaa

SEQ ID NO: 22672 - RNA, 21 nt, synthetic construct
  source 1..21: mol_type = other RNA
gtggaacctggatgcaagcca

SEQ ID NO: 22673 - RNA, 21 nt, synthetic construct
  source 1..21: mol_type = other RNA
gtggaagaatgttttcatggt

SEQ ID NO: 22674 - RNA, 21 nt, synthetic construct
  source 1..21: mol_type = other RNA
gtggaagaggaggagggggag

SEQ ID NO: 22675 - RNA, 21 nt, synthetic construct
  source 1..21: mol_type = other RNA
gtggaccaacatctccagttc

SEQ ID NO: 22676 - RNA, 21 nt, synthetic construct
  source 1..21: mol_type = other RNA
gtggagagctacaggacaact

SEQ ID NO: 22677 - RNA, 21 nt, synthetic construct
  source 1..21: mol_type = other RNA
gtggagttttagaagaacacc

SEQ ID NO: 22678 - RNA, 21 nt, synthetic construct
  source 1..21: mol_type = other RNA
gtggatggccccgaagcaagc

SEQ ID NO: 22679 - RNA, 21 nt, synthetic construct
  source 1..21: mol_type = other RNA
gtggattctcttgcttagtta

SEQ ID NO: 22680 - RNA, 21 nt, synthetic construct
  source 1..21: mol_type = other RNA
gtggcactagatttcattttc

SEQ ID NO: 22681 - RNA, 21 nt, synthetic construct
  source 1..21: mol_type = other RNA
gtggcactctttcaaaagtta

SEQ ID NO: 22682 - RNA, 21 nt, synthetic construct
  source 1..21: mol_type = other RNA
gtggcagaaaaggaatcctta

SEQ ID NO: 22683 - RNA, 21 nt, synthetic construct
  source 1..21: mol_type = other RNA
gtggcagctctgaacggtatt

SEQ ID NO: 22684 - RNA, 21 nt, synthetic construct
  source 1..21: mol_type = other RNA
gtggcatctcttacagaagca

SEQ ID NO: 22685 - RNA, 21 nt, synthetic construct
  source 1..21: mol_type = other RNA
gtggctatcaagttctgcagc

SEQ ID NO: 22686 - RNA, 21 nt, synthetic construct
  source 1..21: mol_type = other RNA
gtggcttgcatccaggttcca

SEQ ID NO: 22687 - RNA, 21 nt, synthetic construct
  source 1..21: mol_type = other RNA
gtgggcctgaaaatccagagc

SEQ ID NO: 22688 - RNA, 21 nt, synthetic construct
  source 1..21: mol_type = other RNA
gtgggcttccattctggagct

SEQ ID NO: 22689 - RNA, 21 nt, synthetic construct
  source 1..21: mol_type = other RNA
gtgggttatgcttgaggtgtt

SEQ ID NO: 22690 - RNA, 21 nt, synthetic construct
  source 1..21: mol_type = other RNA
gtggtagtggcagaaaaggaa

SEQ ID NO: 22691 - RNA, 21 nt, synthetic construct
  source 1..21: mol_type = other RNA
gtggtgagtgaggcctgtgat

SEQ ID NO: 22692 - RNA, 21 nt, synthetic construct
  source 1..21: mol_type = other RNA
gtggtgcctcaggtttaccct

SEQ ID NO: 22693 - RNA, 21 nt, synthetic construct
  source 1..21: mol_type = other RNA
gtggtgctgtgtgcatacagg

SEQ ID NO: 22694 - RNA, 21 nt, synthetic construct
  source 1..21: mol_type = other RNA
gtggtggtggtgtggtagtgg

SEQ ID NO: 22695 - RNA, 21 nt, synthetic construct
  source 1..21: mol_type = other RNA
gtggtggtgtggtagtggcag

SEQ ID NO: 22696 - RNA, 21 nt, synthetic construct
  source 1..21: mol_type = other RNA
gtggtggtgttcttctaaaac

SEQ ID NO: 22697 - RNA, 21 nt, synthetic construct
  source 1..21: mol_type = other RNA
gtggtgtggtagtggcagaaa

SEQ ID NO: 22698 - RNA, 21 nt, synthetic construct
  source 1..21: mol_type = other RNA
gtggtgttcttctaaaactcc

SEQ ID NO: 22699 - RNA, 21 nt, synthetic construct
  source 1..21: mol_type = other RNA
gtggttccctggatgttattt

SEQ ID NO: 22700 - RNA, 21 nt, synthetic construct
  source 1..21: mol_type = other RNA
gtggtttgtctagtcaaaact

SEQ ID NO: 22701 - RNA, 21 nt, synthetic construct
  source 1..21: mol_type = other RNA
gtggttttctgcaccgcaatg

SEQ ID NO: 22702 - RNA, 21 nt, synthetic construct
  source 1..21: mol_type = other RNA
gtgtaaagtcaggactcacac

SEQ ID NO: 22703 - RNA, 21 nt, synthetic construct
  source 1..21: mol_type = other RNA
gtgtaagcttgccttgggagc

SEQ ID NO: 22704 - RNA, 21 nt, synthetic construct
  source 1..21: mol_type = other RNA
gtgtagatggattaggactct

SEQ ID NO: 22705 - RNA, 21 nt, synthetic construct
  source 1..21: mol_type = other RNA
gtgtaggtaagtgccagaaat

SEQ ID NO: 22706 - RNA, 21 nt, synthetic construct
  source 1..21: mol_type = other RNA
gtgtagtctgttctttattct

SEQ ID NO: 22707 - RNA, 21 nt, synthetic construct
  source 1..21: mol_type = other RNA
gtgtattgtttgaacaagaaa

SEQ ID NO: 22708 - RNA, 21 nt, synthetic construct
  source 1..21: mol_type = other RNA
gtgtattgtttggaggtcatt

SEQ ID NO: 22709 - RNA, 21 nt, synthetic construct
  source 1..21: mol_type = other RNA
gtgtccttctggggaggggtc

SEQ ID NO: 22710 - RNA, 21 nt, synthetic construct
  source 1..21: mol_type = other RNA
gtgtctcagtacatttctggc

SEQ ID NO: 22711 - RNA, 21 nt, synthetic construct
  source 1..21: mol_type = other RNA
gtgtctccatttacttctgga

SEQ ID NO: 22712 - RNA, 21 nt, synthetic construct
  source 1..21: mol_type = other RNA
gtgtcttttctgaagaagttg

SEQ ID NO: 22713 - RNA, 21 nt, synthetic construct
  source 1..21: mol_type = other RNA
gtgtgaacaggaatgacatac

SEQ ID NO: 22714 - RNA, 21 nt, synthetic construct
  source 1..21: mol_type = other RNA
gtgtgacttcctccctggtca

SEQ ID NO: 22715 - RNA, 21 nt, synthetic construct
  source 1..21: mol_type = other RNA
gtgtgagggtttttggaactg

SEQ ID NO: 22716 - RNA, 21 nt, synthetic construct
  source 1..21: mol_type = other RNA
gtgtgagtcctgactttacac

SEQ ID NO: 22717 - RNA, 21 nt, synthetic construct
  source 1..21: mol_type = other RNA
gtgtgagtttgaaaatggctc

SEQ ID NO: 22718 - RNA, 21 nt, synthetic construct
  source 1..21: mol_type = other RNA
gtgtgcatacaggcatgtggc

SEQ ID NO: 22719 - RNA, 21 nt, synthetic construct
  source 1..21: mol_type = other RNA
gtgtggcactagatttcattt

SEQ ID NO: 22720 - RNA, 21 nt, synthetic construct
  source 1..21: mol_type = other RNA
gtgtggctatcaagttctgca

SEQ ID NO: 22721 - RNA, 21 nt, synthetic construct
  source 1..21: mol_type = other RNA
gtgtggtagtggcagaaaagg

SEQ ID NO: 22722 - RNA, 21 nt, synthetic construct
  source 1..21: mol_type = other RNA
gtgtgtattgtttgaacaaga

SEQ ID NO: 22723 - RNA, 21 nt, synthetic construct
  source 1..21: mol_type = other RNA
gtgtgtgttccacggaagagg

SEQ ID NO: 22724 - RNA, 21 nt, synthetic construct
  source 1..21: mol_type = other RNA
gtgtgttccacggaagaggca

SEQ ID NO: 22725 - RNA, 21 nt, synthetic construct
  source 1..21: mol_type = other RNA
gtgttactttggttggggtag

SEQ ID NO: 22726 - RNA, 21 nt, synthetic construct
  source 1..21: mol_type = other RNA
gtgttcactaaggattccttt

SEQ ID NO: 22727 - RNA, 21 nt, synthetic construct
  source 1..21: mol_type = other RNA
gtgttccacggaagaggcaga

SEQ ID NO: 22728 - RNA, 21 nt, synthetic construct
  source 1..21: mol_type = other RNA
gtgttctgacattggtcttgt

SEQ ID NO: 22729 - RNA, 21 nt, synthetic construct
  source 1..21: mol_type = other RNA
gtgttctgagaaaacaagacc

SEQ ID NO: 22730 - RNA, 21 nt, synthetic construct
  source 1..21: mol_type = other RNA
gtgttcttctaaaactccacc

SEQ ID NO: 22731 - RNA, 21 nt, synthetic construct
  source 1..21: mol_type = other RNA
gtgttgaaaaactggtgaaat

SEQ ID NO: 22732 - RNA, 21 nt, synthetic construct
  source 1..21: mol_type = other RNA
gtgttgaaacagcacttgaat

SEQ ID NO: 22733 - RNA, 21 nt, synthetic construct
  source 1..21: mol_type = other RNA
gtgttgggggcacaagatctc

SEQ ID NO: 22734 - RNA, 21 nt, synthetic construct
  source 1..21: mol_type = other RNA
gtgttgtgttactttggttgg

SEQ ID NO: 22735 - RNA, 21 nt, synthetic construct
  source 1..21: mol_type = other RNA
gtgttgttttctgggtgtaag

SEQ ID NO: 22736 - RNA, 21 nt, synthetic construct
  source 1..21: mol_type = other RNA
gtgtttccattgcggtgcaga

SEQ ID NO: 22737 - RNA, 21 nt, synthetic construct
  source 1..21: mol_type = other RNA
gtgtttgcaaaatggaggaat

SEQ ID NO: 22738 - RNA, 21 nt, synthetic construct
  source 1..21: mol_type = other RNA
gtgtttgctccttgtctcgac

SEQ ID NO: 22739 - RNA, 21 nt, synthetic construct
  source 1..21: mol_type = other RNA
gtgtttgctgctgttcttgct

SEQ ID NO: 22740 - RNA, 21 nt, synthetic construct
  source 1..21: mol_type = other RNA
gtgtttgtgctgcctgtttat

SEQ ID NO: 22741 - RNA, 21 nt, synthetic construct
  source 1..21: mol_type = other RNA
gtgttttttccaggagttcac

SEQ ID NO: 22742 - RNA, 21 nt, synthetic construct
  source 1..21: mol_type = other RNA
gttaaagatttcaccagtttt

SEQ ID NO: 22743 - RNA, 21 nt, synthetic construct
  source 1..21: mol_type = other RNA
gttaatggcatttatgtgaga

SEQ ID NO: 22744 - RNA, 21 nt, synthetic construct
  source 1..21: mol_type = other RNA
gttacctttttccatgttttg

SEQ ID NO: 22745 - RNA, 21 nt, synthetic construct
  source 1..21: mol_type = other RNA
gttacgtctttctccattagc

SEQ ID NO: 22746 - RNA, 21 nt, synthetic construct
  source 1..21: mol_type = other RNA
gttactttggttggggtagtg

SEQ ID NO: 22747 - RNA, 21 nt, synthetic construct
  source 1..21: mol_type = other RNA
gttagaggtctgtgcggaatt

SEQ ID NO: 22748 - RNA, 21 nt, synthetic construct
  source 1..21: mol_type = other RNA
gttagtgaaccttctctctct

SEQ ID NO: 22749 - RNA, 21 nt, synthetic construct
  source 1..21: mol_type = other RNA
gttatgcttgaggtgttctga

SEQ ID NO: 22750 - RNA, 21 nt, synthetic construct
  source 1..21: mol_type = other RNA
gttatgtatcaagtacctttg

SEQ ID NO: 22751 - RNA, 21 nt, synthetic construct
  source 1..21: mol_type = other RNA
gttatgtgttgaaaaactggt

SEQ ID NO: 22752 - RNA, 21 nt, synthetic construct
  source 1..21: mol_type = other RNA
gttattatggaataccctgta

SEQ ID NO: 22753 - RNA, 21 nt, synthetic construct
  source 1..21: mol_type = other RNA
gttatttgaccataaggctct

SEQ ID NO: 22754 - RNA, 21 nt, synthetic construct
  source 1..21: mol_type = other RNA
gttattttctgcaggagatgg

SEQ ID NO: 22755 - RNA, 21 nt, synthetic construct
  source 1..21: mol_type = other RNA
gttcaaacaatacacacctag

SEQ ID NO: 22756 - RNA, 21 nt, synthetic construct
  source 1..21: mol_type = other RNA
gttcacacaattattctgagg

SEQ ID NO: 22757 - RNA, 21 nt, synthetic construct
  source 1..21: mol_type = other RNA
gttcacatctccctcaaaacc

SEQ ID NO: 22758 - RNA, 21 nt, synthetic construct
  source 1..21: mol_type = other RNA
gttcaccatgtgtgtgttcca

SEQ ID NO: 22759 - RNA, 21 nt, synthetic construct
  source 1..21: mol_type = other RNA
gttcactaactgtgcgtttta

SEQ ID NO: 22760 - RNA, 21 nt, synthetic construct
  source 1..21: mol_type = other RNA
gttcactaaggattccttttc

SEQ ID NO: 22761 - RNA, 21 nt, synthetic construct
  source 1..21: mol_type = other RNA
gttcagagctgccaccaggag

SEQ ID NO: 22762 - RNA, 21 nt, synthetic construct
  source 1..21: mol_type = other RNA
gttcaggatgtgtagtctgtt

SEQ ID NO: 22763 - RNA, 21 nt, synthetic construct
  source 1..21: mol_type = other RNA
gttcaggttccagcagcaatt

SEQ ID NO: 22764 - RNA, 21 nt, synthetic construct
  source 1..21: mol_type = other RNA
gttccaaaaaccctcacacca

SEQ ID NO: 22765 - RNA, 21 nt, synthetic construct
  source 1..21: mol_type = other RNA
gttccaccttaattggcctgt

SEQ ID NO: 22766 - RNA, 21 nt, synthetic construct
  source 1..21: mol_type = other RNA
gttccacggaagaggcagaaa

SEQ ID NO: 22767 - RNA, 21 nt, synthetic construct
  source 1..21: mol_type = other RNA
gttccagcagcaatttgcaag

SEQ ID NO: 22768 - RNA, 21 nt, synthetic construct
  source 1..21: mol_type = other RNA
gttccatcaggcttgcttcgg

SEQ ID NO: 22769 - RNA, 21 nt, synthetic construct
  source 1..21: mol_type = other RNA
gttccattgtgttctgagaaa

SEQ ID NO: 22770 - RNA, 21 nt, synthetic construct
  source 1..21: mol_type = other RNA
gttccctggatgttattttct

SEQ ID NO: 22771 - RNA, 21 nt, synthetic construct
  source 1..21: mol_type = other RNA
gttcctcagcttccttcagaa

SEQ ID NO: 22772 - RNA, 21 nt, synthetic construct
  source 1..21: mol_type = other RNA
gttcctttcagaaaccagaac

SEQ ID NO: 22773 - RNA, 21 nt, synthetic construct
  source 1..21: mol_type = other RNA
gttcgagactcataatgtcca

SEQ ID NO: 22774 - RNA, 21 nt, synthetic construct
  source 1..21: mol_type = other RNA
gttctacagggatataaaaat

SEQ ID NO: 22775 - RNA, 21 nt, synthetic construct
  source 1..21: mol_type = other RNA
gttctatcctgttccatcagg

SEQ ID NO: 22776 - RNA, 21 nt, synthetic construct
  source 1..21: mol_type = other RNA
gttctgacattggtcttgttt

SEQ ID NO: 22777 - RNA, 21 nt, synthetic construct
  source 1..21: mol_type = other RNA
gttctgagaaaacaagaccaa

SEQ ID NO: 22778 - RNA, 21 nt, synthetic construct
  source 1..21: mol_type = other RNA
gttctgcagcagtggtttgtc

SEQ ID NO: 22779 - RNA, 21 nt, synthetic construct
  source 1..21: mol_type = other RNA
gttctggtttctgaaaggaac

SEQ ID NO: 22780 - RNA, 21 nt, synthetic construct
  source 1..21: mol_type = other RNA
gttctgtagcccaagaaaatg

SEQ ID NO: 22781 - RNA, 21 nt, synthetic construct
  source 1..21: mol_type = other RNA
gttctgtctggcaaatgggag

SEQ ID NO: 22782 - RNA, 21 nt, synthetic construct
  source 1..21: mol_type = other RNA
gttcttctaaaactccaccat

SEQ ID NO: 22783 - RNA, 21 nt, synthetic construct
  source 1..21: mol_type = other RNA
gttcttgaaagcacctgtgaa

SEQ ID NO: 22784 - RNA, 21 nt, synthetic construct
  source 1..21: mol_type = other RNA
gttcttgcttctgtaagagat

SEQ ID NO: 22785 - RNA, 21 nt, synthetic construct
  source 1..21: mol_type = other RNA
gttcttgtcatggtaattagc

SEQ ID NO: 22786 - RNA, 21 nt, synthetic construct
  source 1..21: mol_type = other RNA
gttctttattctctgaaacta

SEQ ID NO: 22787 - RNA, 21 nt, synthetic construct
  source 1..21: mol_type = other RNA
gttcttttggttggtgtcttt

SEQ ID NO: 22788 - RNA, 21 nt, synthetic construct
  source 1..21: mol_type = other RNA
gttgaaaaactggtgaaatct

SEQ ID NO: 22789 - RNA, 21 nt, synthetic construct
  source 1..21: mol_type = other RNA
gttgaaaatgaaatctagtgc

SEQ ID NO: 22790 - RNA, 21 nt, synthetic construct
  source 1..21: mol_type = other RNA
gttgaaacagcacttgaatca

SEQ ID NO: 22791 - RNA, 21 nt, synthetic construct
  source 1..21: mol_type = other RNA
gttgaaatgaatcaagggcag

SEQ ID NO: 22792 - RNA, 21 nt, synthetic construct
  source 1..21: mol_type = other RNA
gttgaaatgtcagggccagtc

SEQ ID NO: 22793 - RNA, 21 nt, synthetic construct
  source 1..21: mol_type = other RNA
gttgaccagacatatcttggt

SEQ ID NO: 22794 - RNA, 21 nt, synthetic construct
  source 1..21: mol_type = other RNA
gttgactgctttcacctggat

SEQ ID NO: 22795 - RNA, 21 nt, synthetic construct
  source 1..21: mol_type = other RNA
gttgagggcaacagactaagt

SEQ ID NO: 22796 - RNA, 21 nt, synthetic construct
  source 1..21: mol_type = other RNA
gttgatactgaagaattgatg

SEQ ID NO: 22797 - RNA, 21 nt, synthetic construct
  source 1..21: mol_type = other RNA
gttgatgagaaacaaagagca

SEQ ID NO: 22798 - RNA, 21 nt, synthetic construct
  source 1..21: mol_type = other RNA
gttgattcaagtgctgtttca

SEQ ID NO: 22799 - RNA, 21 nt, synthetic construct
  source 1..21: mol_type = other RNA
gttgcaaaaggtgtgagtttg

SEQ ID NO: 22800 - RNA, 21 nt, synthetic construct
  source 1..21: mol_type = other RNA
gttgccctcaacatggttggt

SEQ ID NO: 22801 - RNA, 21 nt, synthetic construct
  source 1..21: mol_type = other RNA
gttgcgcagcttgttgaccag

SEQ ID NO: 22802 - RNA, 21 nt, synthetic construct
  source 1..21: mol_type = other RNA
gttgctggttttgagggagat

SEQ ID NO: 22803 - RNA, 21 nt, synthetic construct
  source 1..21: mol_type = other RNA
gttgctgtgtttgctgctgtt

SEQ ID NO: 22804 - RNA, 21 nt, synthetic construct
  source 1..21: mol_type = other RNA
gttgctttgggggtgaggaaa

SEQ ID NO: 22805 - RNA, 21 nt, synthetic construct
  source 1..21: mol_type = other RNA
gttggaatttccagtgtattg

SEQ ID NO: 22806 - RNA, 21 nt, synthetic construct
  source 1..21: mol_type = other RNA
gttgggggcacaagatctcgt

SEQ ID NO: 22807 - RNA, 21 nt, synthetic construct
  source 1..21: mol_type = other RNA
gttggggtagtggtggtgttc

SEQ ID NO: 22808 - RNA, 21 nt, synthetic construct
  source 1..21: mol_type = other RNA
gttggtccactgtaccttggg

SEQ ID NO: 22809 - RNA, 21 nt, synthetic construct
  source 1..21: mol_type = other RNA
gttggtgtcttttctgaagaa

SEQ ID NO: 22810 - RNA, 21 nt, synthetic construct
  source 1..21: mol_type = other RNA
gttggttctatcctgttccat

SEQ ID NO: 22811 - RNA, 21 nt, synthetic construct
  source 1..21: mol_type = other RNA
gttgtagttgttctggtttct

SEQ ID NO: 22812 - RNA, 21 nt, synthetic construct
  source 1..21: mol_type = other RNA
gttgtcctgtagctctccact

SEQ ID NO: 22813 - RNA, 21 nt, synthetic construct
  source 1..21: mol_type = other RNA
gttgtcctgtgagatcactca

SEQ ID NO: 22814 - RNA, 21 nt, synthetic construct
  source 1..21: mol_type = other RNA
gttgtgacttctgctcctgtt

SEQ ID NO: 22815 - RNA, 21 nt, synthetic construct
  source 1..21: mol_type = other RNA
gttgtgttactttggttgggg

SEQ ID NO: 22816 - RNA, 21 nt, synthetic construct
  source 1..21: mol_type = other RNA
gttgtgtttgtgctgcctgtt

SEQ ID NO: 22817 - RNA, 21 nt, synthetic construct
  source 1..21: mol_type = other RNA
gttgttctggtttctgaaagg

SEQ ID NO: 22818 - RNA, 21 nt, synthetic construct
  source 1..21: mol_type = other RNA
gttgttgtagttgttctggtt

SEQ ID NO: 22819 - RNA, 21 nt, synthetic construct
  source 1..21: mol_type = other RNA
gttgtttgctgctctaaagct

SEQ ID NO: 22820 - RNA, 21 nt, synthetic construct
  source 1..21: mol_type = other RNA
gttgttttctgggtgtaagct

SEQ ID NO: 22821 - RNA, 21 nt, synthetic construct
  source 1..21: mol_type = other RNA
gtttaccctctattttcactt

SEQ ID NO: 22822 - RNA, 21 nt, synthetic construct
  source 1..21: mol_type = other RNA
gtttactggcattatcagcat

SEQ ID NO: 22823 - RNA, 21 nt, synthetic construct
  source 1..21: mol_type = other RNA
gtttatgaggcttatgttgca

SEQ ID NO: 22824 - RNA, 21 nt, synthetic construct
  source 1..21: mol_type = other RNA
gtttcaacactggggacataa

SEQ ID NO: 22825 - RNA, 21 nt, synthetic construct
  source 1..21: mol_type = other RNA
gtttcaatttcttgatctgaa

SEQ ID NO: 22826 - RNA, 21 nt, synthetic construct
  source 1..21: mol_type = other RNA
gtttcacgccaagtcgttatt

SEQ ID NO: 22827 - RNA, 21 nt, synthetic construct
  source 1..21: mol_type = other RNA
gtttcagagaataaagaacag

SEQ ID NO: 22828 - RNA, 21 nt, synthetic construct
  source 1..21: mol_type = other RNA
gtttcagatagtgctgtgttg

SEQ ID NO: 22829 - RNA, 21 nt, synthetic construct
  source 1..21: mol_type = other RNA
gtttccattgcggtgcagaaa

SEQ ID NO: 22830 - RNA, 21 nt, synthetic construct
  source 1..21: mol_type = other RNA
gtttcctgcaaaaagttcagg

SEQ ID NO: 22831 - RNA, 21 nt, synthetic construct
  source 1..21: mol_type = other RNA
gtttctatttttatatccctg

SEQ ID NO: 22832 - RNA, 21 nt, synthetic construct
  source 1..21: mol_type = other RNA
gtttctcatcaactgctggca

SEQ ID NO: 22833 - RNA, 21 nt, synthetic construct
  source 1..21: mol_type = other RNA
gtttctgaaaggaacaggtat

SEQ ID NO: 22834 - RNA, 21 nt, synthetic construct
  source 1..21: mol_type = other RNA
gtttctgcctcttccgtggaa

SEQ ID NO: 22835 - RNA, 21 nt, synthetic construct
  source 1..21: mol_type = other RNA
gtttcttgttcaaacaataca

SEQ ID NO: 22836 - RNA, 21 nt, synthetic construct
  source 1..21: mol_type = other RNA
gtttgaaaatggctcagtctc

SEQ ID NO: 22837 - RNA, 21 nt, synthetic construct
  source 1..21: mol_type = other RNA
gtttgaacaagaaacctgtat

SEQ ID NO: 22838 - RNA, 21 nt, synthetic construct
  source 1..21: mol_type = other RNA
gtttgcaaaatggaggaataa

SEQ ID NO: 22839 - RNA, 21 nt, synthetic construct
  source 1..21: mol_type = other RNA
gtttgctccttgtctcgaccc

SEQ ID NO: 22840 - RNA, 21 nt, synthetic construct
  source 1..21: mol_type = other RNA
gtttgctgctctaaagctggg

SEQ ID NO: 22841 - RNA, 21 nt, synthetic construct
  source 1..21: mol_type = other RNA
gtttgctgctgttcttgcttc

SEQ ID NO: 22842 - RNA, 21 nt, synthetic construct
  source 1..21: mol_type = other RNA
gtttggaggtcatttgattgg

SEQ ID NO: 22843 - RNA, 21 nt, synthetic construct
  source 1..21: mol_type = other RNA
gtttgggaatctgctctttgt

SEQ ID NO: 22844 - RNA, 21 nt, synthetic construct
  source 1..21: mol_type = other RNA
gtttggggttgctgtgtttgc

SEQ ID NO: 22845 - RNA, 21 nt, synthetic construct
  source 1..21: mol_type = other RNA
gtttgtctagtcaaaactgtg

SEQ ID NO: 22846 - RNA, 21 nt, synthetic construct
  source 1..21: mol_type = other RNA
gtttgtgctgcctgtttatga

SEQ ID NO: 22847 - RNA, 21 nt, synthetic construct
  source 1..21: mol_type = other RNA
gttttaaataccgttcagagc

SEQ ID NO: 22848 - RNA, 21 nt, synthetic construct
  source 1..21: mol_type = other RNA
gttttagaagaacaccaccac

SEQ ID NO: 22849 - RNA, 21 nt, synthetic construct
  source 1..21: mol_type = other RNA
gttttagatgggattccgctt

SEQ ID NO: 22850 - RNA, 21 nt, synthetic construct
  source 1..21: mol_type = other RNA
gttttattcctccattttgca

SEQ ID NO: 22851 - RNA, 21 nt, synthetic construct
  source 1..21: mol_type = other RNA
gttttcaccaagcggaatccc

SEQ ID NO: 22852 - RNA, 21 nt, synthetic construct
  source 1..21: mol_type = other RNA
gttttcatggtgaaaatcagt

SEQ ID NO: 22853 - RNA, 21 nt, synthetic construct
  source 1..21: mol_type = other RNA
gttttctcagaacacaatgga

SEQ ID NO: 22854 - RNA, 21 nt, synthetic construct
  source 1..21: mol_type = other RNA
gttttctgcaccgcaatggaa

SEQ ID NO: 22855 - RNA, 21 nt, synthetic construct
  source 1..21: mol_type = other RNA
gttttctgggtgtaagcttgc

SEQ ID NO: 22856 - RNA, 21 nt, synthetic construct
  source 1..21: mol_type = other RNA
gttttctggtggtgctgtgtg

SEQ ID NO: 22857 - RNA, 21 nt, synthetic construct
  source 1..21: mol_type = other RNA
gttttgactagacaaaccact

SEQ ID NO: 22858 - RNA, 21 nt, synthetic construct
  source 1..21: mol_type = other RNA
gttttgagggagatgtgaact

SEQ ID NO: 22859 - RNA, 21 nt, synthetic construct
  source 1..21: mol_type = other RNA
gttttggagaagtgcacctgg

SEQ ID NO: 22860 - RNA, 21 nt, synthetic construct
  source 1..21: mol_type = other RNA
gttttgggtcttgtttcctgc

SEQ ID NO: 22861 - RNA, 21 nt, synthetic construct
  source 1..21: mol_type = other RNA
gttttgttttctggtggtgct

SEQ ID NO: 22862 - RNA, 21 nt, synthetic construct
  source 1..21: mol_type = other RNA
gtttttcaacacataactgca

SEQ ID NO: 22863 - RNA, 21 nt, synthetic construct
  source 1..21: mol_type = other RNA
gtttttcagtttgggaatctg

SEQ ID NO: 22864 - RNA, 21 nt, synthetic construct
  source 1..21: mol_type = other RNA
gtttttcctgtgcctgaccag

SEQ ID NO: 22865 - RNA, 21 nt, synthetic construct
  source 1..21: mol_type = other RNA
gtttttgagatatgcccatct

SEQ ID NO: 22866 - RNA, 21 nt, synthetic construct
  source 1..21: mol_type = other RNA
gtttttggaactggagatgtt

SEQ ID NO: 22867 - RNA, 21 nt, synthetic construct
  source 1..21: mol_type = other RNA
gttttttccaggagttcacca

SEQ ID NO: 22868 - RNA, 21 nt, synthetic construct
  source 1..21: mol_type = other RNA
taaaaacaaggcagtgctaat

SEQ ID NO: 22869 - RNA, 21 nt, synthetic construct
  source 1..21: mol_type = other RNA
taaaacgcacagttagtgaac

SEQ ID NO: 22870 - RNA, 21 nt, synthetic construct
  source 1..21: mol_type = other RNA
taaaacgtaatgaggcatcac

SEQ ID NO: 22871 - RNA, 21 nt, synthetic construct
  source 1..21: mol_type = other RNA
taaaactccaccattcagagt

SEQ ID NO: 22872 - RNA, 21 nt, synthetic construct
  source 1..21: mol_type = other RNA
taaaagtgttgtgttactttg

SEQ ID NO: 22873 - RNA, 21 nt, synthetic construct
  source 1..21: mol_type = other RNA
taaaagttgaaatgtcagggc

SEQ ID NO: 22874 - RNA, 21 nt, synthetic construct
  source 1..21: mol_type = other RNA
taaacaggcagcacaaacaca

SEQ ID NO: 22875 - RNA, 21 nt, synthetic construct
  source 1..21: mol_type = other RNA
taaacctgaggcaccaccttc

SEQ ID NO: 22876 - RNA, 21 nt, synthetic construct
  source 1..21: mol_type = other RNA
taaacgccatgtgtctcagta

SEQ ID NO: 22877 - RNA, 21 nt, synthetic construct
  source 1..21: mol_type = other RNA
taaactagctgcaatgctaaa

SEQ ID NO: 22878 - RNA, 21 nt, synthetic construct
  source 1..21: mol_type = other RNA
taaagaacagactacacatcc

SEQ ID NO: 22879 - RNA, 21 nt, synthetic construct
  source 1..21: mol_type = other RNA
taaagaggaaatactccagac

SEQ ID NO: 22880 - RNA, 21 nt, synthetic construct
  source 1..21: mol_type = other RNA
taaagatttcaccagtttttc

SEQ ID NO: 22881 - RNA, 21 nt, synthetic construct
  source 1..21: mol_type = other RNA
taaagctggggtgtggctatc

SEQ ID NO: 22882 - RNA, 21 nt, synthetic construct
  source 1..21: mol_type = other RNA
taaagtcaggactcacacgac

SEQ ID NO: 22883 - RNA, 21 nt, synthetic construct
  source 1..21: mol_type = other RNA
taaagtggaagaatgttttca

SEQ ID NO: 22884 - RNA, 21 nt, synthetic construct
  source 1..21: mol_type = other RNA
taaataccgttcagagctgcc

SEQ ID NO: 22885 - RNA, 21 nt, synthetic construct
  source 1..21: mol_type = other RNA
taaatacctgttcctttcaga

SEQ ID NO: 22886 - RNA, 21 nt, synthetic construct
  source 1..21: mol_type = other RNA
taaatcgtagaaattcccctt

SEQ ID NO: 22887 - RNA, 21 nt, synthetic construct
  source 1..21: mol_type = other RNA
taaatgccattaacagtcagg

SEQ ID NO: 22888 - RNA, 21 nt, synthetic construct
  source 1..21: mol_type = other RNA
taaatggagacaccaagtggc

SEQ ID NO: 22889 - RNA, 21 nt, synthetic construct
  source 1..21: mol_type = other RNA
taaatggtctgttttggagaa

SEQ ID NO: 22890 - RNA, 21 nt, synthetic construct
  source 1..21: mol_type = other RNA
taacacaacacttttaaggga

SEQ ID NO: 22891 - RNA, 21 nt, synthetic construct
  source 1..21: mol_type = other RNA
taacagtcaggctactaatga

SEQ ID NO: 22892 - RNA, 21 nt, synthetic construct
  source 1..21: mol_type = other RNA
taacatccagggaaccacaaa

SEQ ID NO: 22893 - RNA, 21 nt, synthetic construct
  source 1..21: mol_type = other RNA
taaccatgcaaatgtttttcc

SEQ ID NO: 22894 - RNA, 21 nt, synthetic construct
  source 1..21: mol_type = other RNA
taacccaccaatttttggtag

SEQ ID NO: 22895 - RNA, 21 nt, synthetic construct
  source 1..21: mol_type = other RNA
taacgacttggcgtgaaactg

SEQ ID NO: 22896 - RNA, 21 nt, synthetic construct
  source 1..21: mol_type = other RNA
taactaagcaagagaatccac

SEQ ID NO: 22897 - RNA, 21 nt, synthetic construct
  source 1..21: mol_type = other RNA
taactctgagctgcctccaaa

SEQ ID NO: 22898 - RNA, 21 nt, synthetic construct
  source 1..21: mol_type = other RNA
taactgcagtgggcctgaaaa

SEQ ID NO: 22899 - RNA, 21 nt, synthetic construct
  source 1..21: mol_type = other RNA
taactgcattttcttgggcta

SEQ ID NO: 22900 - RNA, 21 nt, synthetic construct
  source 1..21: mol_type = other RNA
taactgtgcgttttattcctc

SEQ ID NO: 22901 - RNA, 21 nt, synthetic construct
  source 1..21: mol_type = other RNA
taacttcggggtaagccaaga

SEQ ID NO: 22902 - RNA, 21 nt, synthetic construct
  source 1..21: mol_type = other RNA
taacttttgaaagagtgccac

SEQ ID NO: 22903 - RNA, 21 nt, synthetic construct
  source 1..21: mol_type = other RNA
taagaaagaatctgtgagttc

SEQ ID NO: 22904 - RNA, 21 nt, synthetic construct
  source 1..21: mol_type = other RNA
taagagatgccaccttagagc

SEQ ID NO: 22905 - RNA, 21 nt, synthetic construct
  source 1..21: mol_type = other RNA
taagagccttatggtcaaata

SEQ ID NO: 22906 - RNA, 21 nt, synthetic construct
  source 1..21: mol_type = other RNA
taagcaagagaatccacctgc

SEQ ID NO: 22907 - RNA, 21 nt, synthetic construct
  source 1..21: mol_type = other RNA
taagcaccattcatttcattt

SEQ ID NO: 22908 - RNA, 21 nt, synthetic construct
  source 1..21: mol_type = other RNA
taagccaagaaagaaatccag

SEQ ID NO: 22909 - RNA, 21 nt, synthetic construct
  source 1..21: mol_type = other RNA
taagcctcataaacaggcagc

SEQ ID NO: 22910 - RNA, 21 nt, synthetic construct
  source 1..21: mol_type = other RNA
taagcttgccttgggagcccc

SEQ ID NO: 22911 - RNA, 21 nt, synthetic construct
  source 1..21: mol_type = other RNA
taaggattccttttctgccac

SEQ ID NO: 22912 - RNA, 21 nt, synthetic construct
  source 1..21: mol_type = other RNA
taaggctcttactctcaaatc

SEQ ID NO: 22913 - RNA, 21 nt, synthetic construct
  source 1..21: mol_type = other RNA
taagggaagtgaaaatagagg

SEQ ID NO: 22914 - RNA, 21 nt, synthetic construct
  source 1..21: mol_type = other RNA
taaggggaatttctacgattt

SEQ ID NO: 22915 - RNA, 21 nt, synthetic construct
  source 1..21: mol_type = other RNA
taaggtggaacctggatgcaa

SEQ ID NO: 22916 - RNA, 21 nt, synthetic construct
  source 1..21: mol_type = other RNA
taaggtggcatctcttacaga

SEQ ID NO: 22917 - RNA, 21 nt, synthetic construct
  source 1..21: mol_type = other RNA
taagtccattcctgataccat

SEQ ID NO: 22918 - RNA, 21 nt, synthetic construct
  source 1..21: mol_type = other RNA
taagtgccagaaatgtactga

SEQ ID NO: 22919 - RNA, 21 nt, synthetic construct
  source 1..21: mol_type = other RNA
taagtttttcagtttgggaat

SEQ ID NO: 22920 - RNA, 21 nt, synthetic construct
  source 1..21: mol_type = other RNA
taataacttttgaaagagtgc

SEQ ID NO: 22921 - RNA, 21 nt, synthetic construct
  source 1..21: mol_type = other RNA
taatacaatgttcttgtcatg

SEQ ID NO: 22922 - RNA, 21 nt, synthetic construct
  source 1..21: mol_type = other RNA
taatccatctacacatgtatg

SEQ ID NO: 22923 - RNA, 21 nt, synthetic construct
  source 1..21: mol_type = other RNA
taatgaggcatcactgccatc

SEQ ID NO: 22924 - RNA, 21 nt, synthetic construct
  source 1..21: mol_type = other RNA
taatgagttgtcctgtgagat

SEQ ID NO: 22925 - RNA, 21 nt, synthetic construct
  source 1..21: mol_type = other RNA
taatgccagtaaactagctgc

SEQ ID NO: 22926 - RNA, 21 nt, synthetic construct
  source 1..21: mol_type = other RNA
taatgcctaatggtgctacag

SEQ ID NO: 22927 - RNA, 21 nt, synthetic construct
  source 1..21: mol_type = other RNA
taatggagaaagacgtaactt

SEQ ID NO: 22928 - RNA, 21 nt, synthetic construct
  source 1..21: mol_type = other RNA
taatggcatttatgtgagatg

SEQ ID NO: 22929 - RNA, 21 nt, synthetic construct
  source 1..21: mol_type = other RNA
taatggtgctacagtttctgc

SEQ ID NO: 22930 - RNA, 21 nt, synthetic construct
  source 1..21: mol_type = other RNA
taatgtccaaatgggactgga

SEQ ID NO: 22931 - RNA, 21 nt, synthetic construct
  source 1..21: mol_type = other RNA
taatgtgatcccaaagcaaga

SEQ ID NO: 22932 - RNA, 21 nt, synthetic construct
  source 1..21: mol_type = other RNA
taatgtgcagcaaaagagcat

SEQ ID NO: 22933 - RNA, 21 nt, synthetic construct
  source 1..21: mol_type = other RNA
taattaccatgacaagaacat

SEQ ID NO: 22934 - RNA, 21 nt, synthetic construct
  source 1..21: mol_type = other RNA
taattagcacttttcccctcc

SEQ ID NO: 22935 - RNA, 21 nt, synthetic construct
  source 1..21: mol_type = other RNA
taattggcctgtgcatctgac

SEQ ID NO: 22936 - RNA, 21 nt, synthetic construct
  source 1..21: mol_type = other RNA
taattgtgtgaacaggaatga

SEQ ID NO: 22937 - RNA, 21 nt, synthetic construct
  source 1..21: mol_type = other RNA
taatttggaaggtgactctat

SEQ ID NO: 22938 - RNA, 21 nt, synthetic construct
  source 1..21: mol_type = other RNA
taattttatagagtcaccttc

SEQ ID NO: 22939 - RNA, 21 nt, synthetic construct
  source 1..21: mol_type = other RNA
taatttttgctgctgttgctg

SEQ ID NO: 22940 - RNA, 21 nt, synthetic construct
  source 1..21: mol_type = other RNA
tacaaagctccagaatggaag

SEQ ID NO: 22941 - RNA, 21 nt, synthetic construct
  source 1..21: mol_type = other RNA
tacaatgttcttgtcatggta

SEQ ID NO: 22942 - RNA, 21 nt, synthetic construct
  source 1..21: mol_type = other RNA
tacacaagaaagtagagggta

SEQ ID NO: 22943 - RNA, 21 nt, synthetic construct
  source 1..21: mol_type = other RNA
tacacacctagtttcagagaa

SEQ ID NO: 22944 - RNA, 21 nt, synthetic construct
  source 1..21: mol_type = other RNA
tacacatcctgaactttttgc

SEQ ID NO: 22945 - RNA, 21 nt, synthetic construct
  source 1..21: mol_type = other RNA
tacacatctgcaagatgggaa

SEQ ID NO: 22946 - RNA, 21 nt, synthetic construct
  source 1..21: mol_type = other RNA
tacacatgtatgcagcccttc

SEQ ID NO: 22947 - RNA, 21 nt, synthetic construct
  source 1..21: mol_type = other RNA
tacacccagaaaacaacacag

SEQ ID NO: 22948 - RNA, 21 nt, synthetic construct
  source 1..21: mol_type = other RNA
tacacctgtcaagactcaata

SEQ ID NO: 22949 - RNA, 21 nt, synthetic construct
  source 1..21: mol_type = other RNA
tacactggaaattccaacatg

SEQ ID NO: 22950 - RNA, 21 nt, synthetic construct
  source 1..21: mol_type = other RNA
tacagaactcacagattcttt

SEQ ID NO: 22951 - RNA, 21 nt, synthetic construct
  source 1..21: mol_type = other RNA
tacagaagcaagaacagcagc

SEQ ID NO: 22952 - RNA, 21 nt, synthetic construct
  source 1..21: mol_type = other RNA
tacagactgcagggacaatga

SEQ ID NO: 22953 - RNA, 21 nt, synthetic construct
  source 1..21: mol_type = other RNA
tacaggacaactgccagcagt

SEQ ID NO: 22954 - RNA, 21 nt, synthetic construct
  source 1..21: mol_type = other RNA
tacaggcatgtggcttgcatc

SEQ ID NO: 22955 - RNA, 21 nt, synthetic construct
  source 1..21: mol_type = other RNA
tacagggtattccataataac

SEQ ID NO: 22956 - RNA, 21 nt, synthetic construct
  source 1..21: mol_type = other RNA
tacaggtttcttgttcaaaca

SEQ ID NO: 22957 - RNA, 21 nt, synthetic construct
  source 1..21: mol_type = other RNA
tacagtggaccaacatctcca

SEQ ID NO: 22958 - RNA, 21 nt, synthetic construct
  source 1..21: mol_type = other RNA
tacagtttctgcctcttccgt

SEQ ID NO: 22959 - RNA, 21 nt, synthetic construct
  source 1..21: mol_type = other RNA
tacataaccatgcaaatgttt

SEQ ID NO: 22960 - RNA, 21 nt, synthetic construct
  source 1..21: mol_type = other RNA
tacatgtgtagatggattagg

SEQ ID NO: 22961 - RNA, 21 nt, synthetic construct
  source 1..21: mol_type = other RNA
tacatttctggcacttaccta

SEQ ID NO: 22962 - RNA, 21 nt, synthetic construct
  source 1..21: mol_type = other RNA
tacatttgtgacttgtgctcc

SEQ ID NO: 22963 - RNA, 21 nt, synthetic construct
  source 1..21: mol_type = other RNA
taccaaaaattggtgggttat

SEQ ID NO: 22964 - RNA, 21 nt, synthetic construct
  source 1..21: mol_type = other RNA
taccaaaagctcatgtgcagt

SEQ ID NO: 22965 - RNA, 21 nt, synthetic construct
  source 1..21: mol_type = other RNA
taccaagttgaaatgaatcaa

SEQ ID NO: 22966 - RNA, 21 nt, synthetic construct
  source 1..21: mol_type = other RNA
taccacaccaccaccaccatc

SEQ ID NO: 22967 - RNA, 21 nt, synthetic construct
  source 1..21: mol_type = other RNA
taccatcacctcccatttgcc

SEQ ID NO: 22968 - RNA, 21 nt, synthetic construct
  source 1..21: mol_type = other RNA
taccatgacaagaacattgta

SEQ ID NO: 22969 - RNA, 21 nt, synthetic construct
  source 1..21: mol_type = other RNA
taccccaaccaaagtaacaca

SEQ ID NO: 22970 - RNA, 21 nt, synthetic construct
  source 1..21: mol_type = other RNA
taccccgaagttacgtctttc

SEQ ID NO: 22971 - RNA, 21 nt, synthetic construct
  source 1..21: mol_type = other RNA
taccctctactttcttgtgta

SEQ ID NO: 22972 - RNA, 21 nt, synthetic construct
  source 1..21: mol_type = other RNA
taccctctattttcacttccc

SEQ ID NO: 22973 - RNA, 21 nt, synthetic construct
  source 1..21: mol_type = other RNA
taccctgtatgaagggaagcc

SEQ ID NO: 22974 - RNA, 21 nt, synthetic construct
  source 1..21: mol_type = other RNA
taccgttcagagctgccacca

SEQ ID NO: 22975 - RNA, 21 nt, synthetic construct
  source 1..21: mol_type = other RNA
tacctacacatctgcaagatg

SEQ ID NO: 22976 - RNA, 21 nt, synthetic construct
  source 1..21: mol_type = other RNA
tacctcagggcagatcaattc

SEQ ID NO: 22977 - RNA, 21 nt, synthetic construct
  source 1..21: mol_type = other RNA
tacctgttcctttcagaaacc

SEQ ID NO: 22978 - RNA, 21 nt, synthetic construct
  source 1..21: mol_type = other RNA
taccttgggactgcccttgat

SEQ ID NO: 22979 - RNA, 21 nt, synthetic construct
  source 1..21: mol_type = other RNA
tacctttgctgagcaagttgc

SEQ ID NO: 22980 - RNA, 21 nt, synthetic construct
  source 1..21: mol_type = other RNA
tacctttttccatgttttgtt

SEQ ID NO: 22981 - RNA, 21 nt, synthetic construct
  source 1..21: mol_type = other RNA
tacgtctttctccattagcct

SEQ ID NO: 22982 - RNA, 21 nt, synthetic construct
  source 1..21: mol_type = other RNA
tacgttttagatgggattccg

SEQ ID NO: 22983 - RNA, 21 nt, synthetic construct
  source 1..21: mol_type = other RNA
tactaatgagttgtcctgtga

SEQ ID NO: 22984 - RNA, 21 nt, synthetic construct
  source 1..21: mol_type = other RNA
tactccagacttttcctcacc

SEQ ID NO: 22985 - RNA, 21 nt, synthetic construct
  source 1..21: mol_type = other RNA
tactctcaaatcacagaagca

SEQ ID NO: 22986 - RNA, 21 nt, synthetic construct
  source 1..21: mol_type = other RNA
tactgaagaattgatggcagt

SEQ ID NO: 22987 - RNA, 21 nt, synthetic construct
  source 1..21: mol_type = other RNA
tactgattttcaccatgaaaa

SEQ ID NO: 22988 - RNA, 21 nt, synthetic construct
  source 1..21: mol_type = other RNA
tactggcattatcagcatcat

SEQ ID NO: 22989 - RNA, 21 nt, synthetic construct
  source 1..21: mol_type = other RNA
tacttaaaaacaaggcagtgc

SEQ ID NO: 22990 - RNA, 21 nt, synthetic construct
  source 1..21: mol_type = other RNA
tacttcaagcaaagctcagtg

SEQ ID NO: 22991 - RNA, 21 nt, synthetic construct
  source 1..21: mol_type = other RNA
tacttcctccagtcccatttg

SEQ ID NO: 22992 - RNA, 21 nt, synthetic construct
  source 1..21: mol_type = other RNA
tacttctggatgagctctctc

SEQ ID NO: 22993 - RNA, 21 nt, synthetic construct
  source 1..21: mol_type = other RNA
tacttgatacataaccatgca

SEQ ID NO: 22994 - RNA, 21 nt, synthetic construct
  source 1..21: mol_type = other RNA
tacttgcttctgtgatttgag

SEQ ID NO: 22995 - RNA, 21 nt, synthetic construct
  source 1..21: mol_type = other RNA
tactttcttgtgtaaagtcag

SEQ ID NO: 22996 - RNA, 21 nt, synthetic construct
  source 1..21: mol_type = other RNA
tactttggttggggtagtggt

SEQ ID NO: 22997 - RNA, 21 nt, synthetic construct
  source 1..21: mol_type = other RNA
tagaaaccaagatatgtctgg

SEQ ID NO: 22998 - RNA, 21 nt, synthetic construct
  source 1..21: mol_type = other RNA
tagaaattccccttatagtca

SEQ ID NO: 22999 - RNA, 21 nt, synthetic construct
  source 1..21: mol_type = other RNA
tagaaccaaccatgttgaggg

SEQ ID NO: 23000 - RNA, 21 nt, synthetic construct
  source 1..21: mol_type = other RNA
tagaactgaagcttgttgtga

SEQ ID NO: 23001 - RNA, 21 nt, synthetic construct
  source 1..21: mol_type = other RNA
tagaagaacaccaccactacc

SEQ ID NO: 23002 - RNA, 21 nt, synthetic construct
  source 1..21: mol_type = other RNA
tagacaaaccactgctgcaga

SEQ ID NO: 23003 - RNA, 21 nt, synthetic construct
  source 1..21: mol_type = other RNA
tagagcagcaaacaacttctt

SEQ ID NO: 23004 - RNA, 21 nt, synthetic construct
  source 1..21: mol_type = other RNA
tagagcagcatgcttttgagt

SEQ ID NO: 23005 - RNA, 21 nt, synthetic construct
  source 1..21: mol_type = other RNA
tagagggcagccttgtggatg

SEQ ID NO: 23006 - RNA, 21 nt, synthetic construct
  source 1..21: mol_type = other RNA
tagagggtaaacctgaggcac

SEQ ID NO: 23007 - RNA, 21 nt, synthetic construct
  source 1..21: mol_type = other RNA
tagagggtattccaagtgttt

SEQ ID NO: 23008 - RNA, 21 nt, synthetic construct
  source 1..21: mol_type = other RNA
tagaggtctgtgcggaattga

SEQ ID NO: 23009 - RNA, 21 nt, synthetic construct
  source 1..21: mol_type = other RNA
tagagtcaccttccaaattac

SEQ ID NO: 23010 - RNA, 21 nt, synthetic construct
  source 1..21: mol_type = other RNA
tagatggattaggactctggg

SEQ ID NO: 23011 - RNA, 21 nt, synthetic construct
  source 1..21: mol_type = other RNA
tagatgggattccgcttggtg

SEQ ID NO: 23012 - RNA, 21 nt, synthetic construct
  source 1..21: mol_type = other RNA
tagcaccattaggcattagca

SEQ ID NO: 23013 - RNA, 21 nt, synthetic construct
  source 1..21: mol_type = other RNA
tagcactgccttgtttttaag

SEQ ID NO: 23014 - RNA, 21 nt, synthetic construct
  source 1..21: mol_type = other RNA
tagcacttttcccctcctgct

SEQ ID NO: 23015 - RNA, 21 nt, synthetic construct
  source 1..21: mol_type = other RNA
tagcagtggagagctacagga

SEQ ID NO: 23016 - RNA, 21 nt, synthetic construct
  source 1..21: mol_type = other RNA
tagcattgcagctagtttact

SEQ ID NO: 23017 - RNA, 21 nt, synthetic construct
  source 1..21: mol_type = other RNA
tagccacaccccagctttaga

SEQ ID NO: 23018 - RNA, 21 nt, synthetic construct
  source 1..21: mol_type = other RNA
tagccagaggttctgtctggc

SEQ ID NO: 23019 - RNA, 21 nt, synthetic construct
  source 1..21: mol_type = other RNA
tagcccaagaaaatgcagtta

SEQ ID NO: 23020 - RNA, 21 nt, synthetic construct
  source 1..21: mol_type = other RNA
tagcctgactgttaatggcat

SEQ ID NO: 23021 - RNA, 21 nt, synthetic construct
  source 1..21: mol_type = other RNA
tagccttttggtcttgtttca

SEQ ID NO: 23022 - RNA, 21 nt, synthetic construct
  source 1..21: mol_type = other RNA
tagcgtctggtgaagaattct

SEQ ID NO: 23023 - RNA, 21 nt, synthetic construct
  source 1..21: mol_type = other RNA
tagctctccactgctaccaaa

SEQ ID NO: 23024 - RNA, 21 nt, synthetic construct
  source 1..21: mol_type = other RNA
tagctgcaatgctaaatacct

SEQ ID NO: 23025 - RNA, 21 nt, synthetic construct
  source 1..21: mol_type = other RNA
tagctttgtggttccctggat

SEQ ID NO: 23026 - RNA, 21 nt, synthetic construct
  source 1..21: mol_type = other RNA
taggactctgggaaggtggtg

SEQ ID NO: 23027 - RNA, 21 nt, synthetic construct
  source 1..21: mol_type = other RNA
taggagtatctagtaatttgg

SEQ ID NO: 23028 - RNA, 21 nt, synthetic construct
  source 1..21: mol_type = other RNA
taggcattagcactgccttgt

SEQ ID NO: 23029 - RNA, 21 nt, synthetic construct
  source 1..21: mol_type = other RNA
taggtaagtgccagaaatgta

SEQ ID NO: 23030 - RNA, 21 nt, synthetic construct
  source 1..21: mol_type = other RNA
taggtgtgtattgtttgaaca

SEQ ID NO: 23031 - RNA, 21 nt, synthetic construct
  source 1..21: mol_type = other RNA
tagtaatttggaaggtgactc

SEQ ID NO: 23032 - RNA, 21 nt, synthetic construct
  source 1..21: mol_type = other RNA
tagtagcctgactgttaatgg

SEQ ID NO: 23033 - RNA, 21 nt, synthetic construct
  source 1..21: mol_type = other RNA
tagtcaaaactgtgactggcc

SEQ ID NO: 23034 - RNA, 21 nt, synthetic construct
  source 1..21: mol_type = other RNA
tagtcagaccatgaaatcaag

SEQ ID NO: 23035 - RNA, 21 nt, synthetic construct
  source 1..21: mol_type = other RNA
tagtcagatgcacaggccaat

SEQ ID NO: 23036 - RNA, 21 nt, synthetic construct
  source 1..21: mol_type = other RNA
tagtcgtgtgagtcctgactt

SEQ ID NO: 23037 - RNA, 21 nt, synthetic construct
  source 1..21: mol_type = other RNA
tagtctggccaaagaatgatc

SEQ ID NO: 23038 - RNA, 21 nt, synthetic construct
  source 1..21: mol_type = other RNA
tagtctgttctttattctctg

SEQ ID NO: 23039 - RNA, 21 nt, synthetic construct
  source 1..21: mol_type = other RNA
tagtctgttgccctcaacatg

SEQ ID NO: 23040 - RNA, 21 nt, synthetic construct
  source 1..21: mol_type = other RNA
tagtgaacactgagctttgct

SEQ ID NO: 23041 - RNA, 21 nt, synthetic construct
  source 1..21: mol_type = other RNA
tagtgaaccttctctctctgg

SEQ ID NO: 23042 - RNA, 21 nt, synthetic construct
  source 1..21: mol_type = other RNA
tagtgccacacagtgactgca

SEQ ID NO: 23043 - RNA, 21 nt, synthetic construct
  source 1..21: mol_type = other RNA
tagtgctgtgttgggggcaca

SEQ ID NO: 23044 - RNA, 21 nt, synthetic construct
  source 1..21: mol_type = other RNA
tagtggcagaaaaggaatcct

SEQ ID NO: 23045 - RNA, 21 nt, synthetic construct
  source 1..21: mol_type = other RNA
tagtggtggtgttcttctaaa

SEQ ID NO: 23046 - RNA, 21 nt, synthetic construct
  source 1..21: mol_type = other RNA
tagttacctttttccatgttt

SEQ ID NO: 23047 - RNA, 21 nt, synthetic construct
  source 1..21: mol_type = other RNA
tagttgttctggtttctgaaa

SEQ ID NO: 23048 - RNA, 21 nt, synthetic construct
  source 1..21: mol_type = other RNA
tagtttactggcattatcagc

SEQ ID NO: 23049 - RNA, 21 nt, synthetic construct
  source 1..21: mol_type = other RNA
tagtttcagagaataaagaac

SEQ ID NO: 23050 - RNA, 21 nt, synthetic construct
  source 1..21: mol_type = other RNA
tataaatcgtagaaattcccc

SEQ ID NO: 23051 - RNA, 21 nt, synthetic construct
  source 1..21: mol_type = other RNA
tataaggggaatttctacgat

SEQ ID NO: 23052 - RNA, 21 nt, synthetic construct
  source 1..21: mol_type = other RNA
tatagagtcaccttccaaatt

SEQ ID NO: 23053 - RNA, 21 nt, synthetic construct
  source 1..21: mol_type = other RNA
tatagtcagaccatgaaatca

SEQ ID NO: 23054 - RNA, 21 nt, synthetic construct
  source 1..21: mol_type = other RNA
tatatccctgtagaactgaag

SEQ ID NO: 23055 - RNA, 21 nt, synthetic construct
  source 1..21: mol_type = other RNA
tatattctgtacttcctccag

SEQ ID NO: 23056 - RNA, 21 nt, synthetic construct
  source 1..21: mol_type = other RNA
tatcaacccaatctctccaat

SEQ ID NO: 23057 - RNA, 21 nt, synthetic construct
  source 1..21: mol_type = other RNA
tatcaagtacctttgctgagc

SEQ ID NO: 23058 - RNA, 21 nt, synthetic construct
  source 1..21: mol_type = other RNA
tatcaagttctgcagcagtgg

SEQ ID NO: 23059 - RNA, 21 nt, synthetic construct
  source 1..21: mol_type = other RNA
tatcacagcttgcaggtggat

SEQ ID NO: 23060 - RNA, 21 nt, synthetic construct
  source 1..21: mol_type = other RNA
tatcactcaaatcggagacat

SEQ ID NO: 23061 - RNA, 21 nt, synthetic construct
  source 1..21: mol_type = other RNA
tatcagcatcatcagcatcac

SEQ ID NO: 23062 - RNA, 21 nt, synthetic construct
  source 1..21: mol_type = other RNA
tatcaggaatggacttagtct

SEQ ID NO: 23063 - RNA, 21 nt, synthetic construct
  source 1..21: mol_type = other RNA
tatccagattgtgtttccatt

SEQ ID NO: 23064 - RNA, 21 nt, synthetic construct
  source 1..21: mol_type = other RNA
tatccctgtagaactgaagct

SEQ ID NO: 23065 - RNA, 21 nt, synthetic construct
  source 1..21: mol_type = other RNA
tatcctgttccatcaggcttg

SEQ ID NO: 23066 - RNA, 21 nt, synthetic construct
  source 1..21: mol_type = other RNA
tatctagtaatttggaaggtg

SEQ ID NO: 23067 - RNA, 21 nt, synthetic construct
  source 1..21: mol_type = other RNA
tatctgaaaccaggatggatt

SEQ ID NO: 23068 - RNA, 21 nt, synthetic construct
  source 1..21: mol_type = other RNA
tatgaagggaagccagaatag

SEQ ID NO: 23069 - RNA, 21 nt, synthetic construct
  source 1..21: mol_type = other RNA
tatgaggcttatgttgcaaaa

SEQ ID NO: 23070 - RNA, 21 nt, synthetic construct
  source 1..21: mol_type = other RNA
tatgagtctcgaactcgcttg

SEQ ID NO: 23071 - RNA, 21 nt, synthetic construct
  source 1..21: mol_type = other RNA
tatgatttcccatcttgcaga

SEQ ID NO: 23072 - RNA, 21 nt, synthetic construct
  source 1..21: mol_type = other RNA
tatgcacacagcaccaccaga

SEQ ID NO: 23073 - RNA, 21 nt, synthetic construct
  source 1..21: mol_type = other RNA
tatgcagcccttctccgatgc

SEQ ID NO: 23074 - RNA, 21 nt, synthetic construct
  source 1..21: mol_type = other RNA
tatgcccatctcctgcagaaa

SEQ ID NO: 23075 - RNA, 21 nt, synthetic construct
  source 1..21: mol_type = other RNA
tatgcgatgggtgagtgatct

SEQ ID NO: 23076 - RNA, 21 nt, synthetic construct
  source 1..21: mol_type = other RNA
tatgcttgaggtgttctgaca

SEQ ID NO: 23077 - RNA, 21 nt, synthetic construct
  source 1..21: mol_type = other RNA
tatggaataccctgtatgaag

SEQ ID NO: 23078 - RNA, 21 nt, synthetic construct
  source 1..21: mol_type = other RNA
tatggcaagactcagtttggg

SEQ ID NO: 23079 - RNA, 21 nt, synthetic construct
  source 1..21: mol_type = other RNA
tatggtcaaataacgacttgg

SEQ ID NO: 23080 - RNA, 21 nt, synthetic construct
  source 1..21: mol_type = other RNA
tatgtatcaagtacctttgct

SEQ ID NO: 23081 - RNA, 21 nt, synthetic construct
  source 1..21: mol_type = other RNA
tatgtcattcctgttcacaca

SEQ ID NO: 23082 - RNA, 21 nt, synthetic construct
  source 1..21: mol_type = other RNA
tatgtccccagtgttgaaaca

SEQ ID NO: 23083 - RNA, 21 nt, synthetic construct
  source 1..21: mol_type = other RNA
tatgtctggtcaacaagctgc

SEQ ID NO: 23084 - RNA, 21 nt, synthetic construct
  source 1..21: mol_type = other RNA
tatgtgagatgtggttttctg

SEQ ID NO: 23085 - RNA, 21 nt, synthetic construct
  source 1..21: mol_type = other RNA
tatgtgttgaaaaactggtga

SEQ ID NO: 23086 - RNA, 21 nt, synthetic construct
  source 1..21: mol_type = other RNA
tatgttgcaaaaggtgtgagt

SEQ ID NO: 23087 - RNA, 21 nt, synthetic construct
  source 1..21: mol_type = other RNA
tattacttaaaaacaaggcag

SEQ ID NO: 23088 - RNA, 21 nt, synthetic construct
  source 1..21: mol_type = other RNA
tattatccagattgtgtttcc

SEQ ID NO: 23089 - RNA, 21 nt, synthetic construct
  source 1..21: mol_type = other RNA
tattatggaataccctgtatg

SEQ ID NO: 23090 - RNA, 21 nt, synthetic construct
  source 1..21: mol_type = other RNA
tattcaaaatcaagcgagttc

SEQ ID NO: 23091 - RNA, 21 nt, synthetic construct
  source 1..21: mol_type = other RNA
tattccaagtgtttgcaaaat

SEQ ID NO: 23092 - RNA, 21 nt, synthetic construct
  source 1..21: mol_type = other RNA
tattcctccattttgcaaaca

SEQ ID NO: 23093 - RNA, 21 nt, synthetic construct
  source 1..21: mol_type = other RNA
tattctctgaaactaggtgtg

SEQ ID NO: 23094 - RNA, 21 nt, synthetic construct
  source 1..21: mol_type = other RNA
tattctgaggcctttcagaaa

SEQ ID NO: 23095 - RNA, 21 nt, synthetic construct
  source 1..21: mol_type = other RNA
tattctggcttcccttcatac

SEQ ID NO: 23096 - RNA, 21 nt, synthetic construct
  source 1..21: mol_type = other RNA
tattctgtacttcctccagtc

SEQ ID NO: 23097 - RNA, 21 nt, synthetic construct
  source 1..21: mol_type = other RNA
tattgagaacagaagcagctg

SEQ ID NO: 23098 - RNA, 21 nt, synthetic construct
  source 1..21: mol_type = other RNA
tattgagacagtgttttttcc

SEQ ID NO: 23099 - RNA, 21 nt, synthetic construct
  source 1..21: mol_type = other RNA
tattgagtcttgacaggtgta

SEQ ID NO: 23100 - RNA, 21 nt, synthetic construct
  source 1..21: mol_type = other RNA
tattgcatgtgatgcaagttt

SEQ ID NO: 23101 - RNA, 21 nt, synthetic construct
  source 1..21: mol_type = other RNA
tattggatacacctgtcaaga

SEQ ID NO: 23102 - RNA, 21 nt, synthetic construct
  source 1..21: mol_type = other RNA
tattgtttgaacaagaaacct

SEQ ID NO: 23103 - RNA, 21 nt, synthetic construct
  source 1..21: mol_type = other RNA
tattgtttggaggtcatttga

SEQ ID NO: 23104 - RNA, 21 nt, synthetic construct
  source 1..21: mol_type = other RNA
tatttagcattgcagctagtt

SEQ ID NO: 23105 - RNA, 21 nt, synthetic construct
  source 1..21: mol_type = other RNA
tatttgaccataaggctctta

SEQ ID NO: 23106 - RNA, 21 nt, synthetic construct
  source 1..21: mol_type = other RNA
tatttgtaatttttgctgctg

SEQ ID NO: 23107 - RNA, 21 nt, synthetic construct
  source 1..21: mol_type = other RNA
tattttcacttcccttaaaag

SEQ ID NO: 23108 - RNA, 21 nt, synthetic construct
  source 1..21: mol_type = other RNA
tattttctgcaggagatgggc

SEQ ID NO: 23109 - RNA, 21 nt, synthetic construct
  source 1..21: mol_type = other RNA
tattttgcatgcacttgattt

SEQ ID NO: 23110 - RNA, 21 nt, synthetic construct
  source 1..21: mol_type = other RNA
tcaaaaccagcaacagcagca

SEQ ID NO: 23111 - RNA, 21 nt, synthetic construct
  source 1..21: mol_type = other RNA
tcaaaactgtgactggccctg

SEQ ID NO: 23112 - RNA, 21 nt, synthetic construct
  source 1..21: mol_type = other RNA
tcaaaagcatgctgctctaag

SEQ ID NO: 23113 - RNA, 21 nt, synthetic construct
  source 1..21: mol_type = other RNA
tcaaaatcaagcgagttcgag

SEQ ID NO: 23114 - RNA, 21 nt, synthetic construct
  source 1..21: mol_type = other RNA
tcaaacaatacacacctagtt

SEQ ID NO: 23115 - RNA, 21 nt, synthetic construct
  source 1..21: mol_type = other RNA
tcaaactcacaccttttgcaa

SEQ ID NO: 23116 - RNA, 21 nt, synthetic construct
  source 1..21: mol_type = other RNA
tcaaataacgacttggcgtga

SEQ ID NO: 23117 - RNA, 21 nt, synthetic construct
  source 1..21: mol_type = other RNA
tcaaatcacagaagcaagtaa

SEQ ID NO: 23118 - RNA, 21 nt, synthetic construct
  source 1..21: mol_type = other RNA
tcaaatcggagacatttggtt

SEQ ID NO: 23119 - RNA, 21 nt, synthetic construct
  source 1..21: mol_type = other RNA
tcaaatgacctccaaacaata

SEQ ID NO: 23120 - RNA, 21 nt, synthetic construct
  source 1..21: mol_type = other RNA
tcaacaaagagcagattccca

SEQ ID NO: 23121 - RNA, 21 nt, synthetic construct
  source 1..21: mol_type = other RNA
tcaacaagctgcgcaacttgc

SEQ ID NO: 23122 - RNA, 21 nt, synthetic construct
  source 1..21: mol_type = other RNA
tcaacacataactgcagtggg

SEQ ID NO: 23123 - RNA, 21 nt, synthetic construct
  source 1..21: mol_type = other RNA
tcaacactggggacataagtt

SEQ ID NO: 23124 - RNA, 21 nt, synthetic construct
  source 1..21: mol_type = other RNA
tcaacaggcttcagagactga

SEQ ID NO: 23125 - RNA, 21 nt, synthetic construct
  source 1..21: mol_type = other RNA
tcaacatggttggttctatcc

SEQ ID NO: 23126 - RNA, 21 nt, synthetic construct
  source 1..21: mol_type = other RNA
tcaaccaaatgtctccgattt

SEQ ID NO: 23127 - RNA, 21 nt, synthetic construct
  source 1..21: mol_type = other RNA
tcaacccaatctctccaatca

SEQ ID NO: 23128 - RNA, 21 nt, synthetic construct
  source 1..21: mol_type = other RNA
tcaactgctggcagttgtcct

SEQ ID NO: 23129 - RNA, 21 nt, synthetic construct
  source 1..21: mol_type = other RNA
tcaacttggtacatttgtgac

SEQ ID NO: 23130 - RNA, 21 nt, synthetic construct
  source 1..21: mol_type = other RNA
tcaacttttacttgcttctgt

SEQ ID NO: 23131 - RNA, 21 nt, synthetic construct
  source 1..21: mol_type = other RNA
tcaagaaattgaaacaagacc

SEQ ID NO: 23132 - RNA, 21 nt, synthetic construct
  source 1..21: mol_type = other RNA
tcaagaacaggagcagaagtc

SEQ ID NO: 23133 - RNA, 21 nt, synthetic construct
  source 1..21: mol_type = other RNA
tcaagactcaatatgatttcc

SEQ ID NO: 23134 - RNA, 21 nt, synthetic construct
  source 1..21: mol_type = other RNA
tcaagcaaagctcagtgttca

SEQ ID NO: 23135 - RNA, 21 nt, synthetic construct
  source 1..21: mol_type = other RNA
tcaagcataacccaccaattt

SEQ ID NO: 23136 - RNA, 21 nt, synthetic construct
  source 1..21: mol_type = other RNA
tcaagcgagttcgagactcat

SEQ ID NO: 23137 - RNA, 21 nt, synthetic construct
  source 1..21: mol_type = other RNA
tcaagggcagtcccaaggtac

SEQ ID NO: 23138 - RNA, 21 nt, synthetic construct
  source 1..21: mol_type = other RNA
tcaagtacctttgctgagcaa

SEQ ID NO: 23139 - RNA, 21 nt, synthetic construct
  source 1..21: mol_type = other RNA
tcaagtgcatgcaaaatacag

SEQ ID NO: 23140 - RNA, 21 nt, synthetic construct
  source 1..21: mol_type = other RNA
tcaagtgctgtttcaacactg

SEQ ID NO: 23141 - RNA, 21 nt, synthetic construct
  source 1..21: mol_type = other RNA
tcaagttctgcagcagtggtt

SEQ ID NO: 23142 - RNA, 21 nt, synthetic construct
  source 1..21: mol_type = other RNA
tcaatatgatttcccatcttg

SEQ ID NO: 23143 - RNA, 21 nt, synthetic construct
  source 1..21: mol_type = other RNA
tcaatattatccagattgtgt

SEQ ID NO: 23144 - RNA, 21 nt, synthetic construct
  source 1..21: mol_type = other RNA
tcaatccatcctggtttcaga

SEQ ID NO: 23145 - RNA, 21 nt, synthetic construct
  source 1..21: mol_type = other RNA
tcaatgatgctcttttgctgc

SEQ ID NO: 23146 - RNA, 21 nt, synthetic construct
  source 1..21: mol_type = other RNA
tcaattcaatccatcctggtt

SEQ ID NO: 23147 - RNA, 21 nt, synthetic construct
  source 1..21: mol_type = other RNA
tcaattccgcacagacctcta

SEQ ID NO: 23148 - RNA, 21 nt, synthetic construct
  source 1..21: mol_type = other RNA
tcaattcttcagtatcaaccc

SEQ ID NO: 23149 - RNA, 21 nt, synthetic construct
  source 1..21: mol_type = other RNA
tcaatttcttgatctgaagga

SEQ ID NO: 23150 - RNA, 21 nt, synthetic construct
  source 1..21: mol_type = other RNA
tcacaaatgtaccaagttgaa

SEQ ID NO: 23151 - RNA, 21 nt, synthetic construct
  source 1..21: mol_type = other RNA
tcacaacaagcttcagttcta

SEQ ID NO: 23152 - RNA, 21 nt, synthetic construct
  source 1..21: mol_type = other RNA
tcacaattgcttctttctccc

SEQ ID NO: 23153 - RNA, 21 nt, synthetic construct
  source 1..21: mol_type = other RNA
tcacacaattattctgaggcc

SEQ ID NO: 23154 - RNA, 21 nt, synthetic construct
  source 1..21: mol_type = other RNA
tcacaccaggtgcacttctcc

SEQ ID NO: 23155 - RNA, 21 nt, synthetic construct
  source 1..21: mol_type = other RNA
tcacaccttttgcaacataag

SEQ ID NO: 23156 - RNA, 21 nt, synthetic construct
  source 1..21: mol_type = other RNA
tcacacgactattctggcttc

SEQ ID NO: 23157 - RNA, 21 nt, synthetic construct
  source 1..21: mol_type = other RNA
tcacactcagacccctcccca

SEQ ID NO: 23158 - RNA, 21 nt, synthetic construct
  source 1..21: mol_type = other RNA
tcacagaagcaagtaaaagtt

SEQ ID NO: 23159 - RNA, 21 nt, synthetic construct
  source 1..21: mol_type = other RNA
tcacagattctttcttatcac

SEQ ID NO: 23160 - RNA, 21 nt, synthetic construct
  source 1..21: mol_type = other RNA
tcacagcttgcaggtggattc

SEQ ID NO: 23161 - RNA, 21 nt, synthetic construct
  source 1..21: mol_type = other RNA
tcacaggacaactcattagta

SEQ ID NO: 23162 - RNA, 21 nt, synthetic construct
  source 1..21: mol_type = other RNA
tcacaggcctcactcaccact

SEQ ID NO: 23163 - RNA, 21 nt, synthetic construct
  source 1..21: mol_type = other RNA
tcacaggtgctttcaagaaca

SEQ ID NO: 23164 - RNA, 21 nt, synthetic construct
  source 1..21: mol_type = other RNA
tcacagttttgactagacaaa

SEQ ID NO: 23165 - RNA, 21 nt, synthetic construct
  source 1..21: mol_type = other RNA
tcacataaatgccattaacag

SEQ ID NO: 23166 - RNA, 21 nt, synthetic construct
  source 1..21: mol_type = other RNA
tcacatctccctcaaaaccag

SEQ ID NO: 23167 - RNA, 21 nt, synthetic construct
  source 1..21: mol_type = other RNA
tcacatgcaatattttccaaa

SEQ ID NO: 23168 - RNA, 21 nt, synthetic construct
  source 1..21: mol_type = other RNA
tcaccaagcggaatcccatct

SEQ ID NO: 23169 - RNA, 21 nt, synthetic construct
  source 1..21: mol_type = other RNA
tcaccactgcagctggctttg

SEQ ID NO: 23170 - RNA, 21 nt, synthetic construct
  source 1..21: mol_type = other RNA
tcaccagacgctagctttgtg

SEQ ID NO: 23171 - RNA, 21 nt, synthetic construct
  source 1..21: mol_type = other RNA
tcaccagtttttcaacacata

SEQ ID NO: 23172 - RNA, 21 nt, synthetic construct
  source 1..21: mol_type = other RNA
tcaccatgaaaacattcttcc

SEQ ID NO: 23173 - RNA, 21 nt, synthetic construct
  source 1..21: mol_type = other RNA
tcaccatgtgtgtgttccacg

SEQ ID NO: 23174 - RNA, 21 nt, synthetic construct
  source 1..21: mol_type = other RNA
tcacccatcgcatacctcagg

SEQ ID NO: 23175 - RNA, 21 nt, synthetic construct
  source 1..21: mol_type = other RNA
tcacccccaaagcaacaatga

SEQ ID NO: 23176 - RNA, 21 nt, synthetic construct
  source 1..21: mol_type = other RNA
tcacctcccatttgccagaca

SEQ ID NO: 23177 - RNA, 21 nt, synthetic construct
  source 1..21: mol_type = other RNA
tcacctggatttctttcttgg

SEQ ID NO: 23178 - RNA, 21 nt, synthetic construct
  source 1..21: mol_type = other RNA
tcaccttccaaattactagat

SEQ ID NO: 23179 - RNA, 21 nt, synthetic construct
  source 1..21: mol_type = other RNA
tcacgccaagtcgttatttga

SEQ ID NO: 23180 - RNA, 21 nt, synthetic construct
  source 1..21: mol_type = other RNA
tcactaactgtgcgttttatt

SEQ ID NO: 23181 - RNA, 21 nt, synthetic construct
  source 1..21: mol_type = other RNA
tcactaaggattccttttctg

SEQ ID NO: 23182 - RNA, 21 nt, synthetic construct
  source 1..21: mol_type = other RNA
tcactcaaatcggagacattt

SEQ ID NO: 23183 - RNA, 21 nt, synthetic construct
  source 1..21: mol_type = other RNA
tcactcaccactgcagctggc

SEQ ID NO: 23184 - RNA, 21 nt, synthetic construct
  source 1..21: mol_type = other RNA
tcactcacccatcgcatacct

SEQ ID NO: 23185 - RNA, 21 nt, synthetic construct
  source 1..21: mol_type = other RNA
tcactgccatcaattcttcag

SEQ ID NO: 23186 - RNA, 21 nt, synthetic construct
  source 1..21: mol_type = other RNA
tcactgtgtggcactagattt

SEQ ID NO: 23187 - RNA, 21 nt, synthetic construct
  source 1..21: mol_type = other RNA
tcacttcccttaaaagtgttg

SEQ ID NO: 23188 - RNA, 21 nt, synthetic construct
  source 1..21: mol_type = other RNA
tcagaaaagacaccaaccaaa

SEQ ID NO: 23189 - RNA, 21 nt, synthetic construct
  source 1..21: mol_type = other RNA
tcagaaaccagaacaactaca

SEQ ID NO: 23190 - RNA, 21 nt, synthetic construct
  source 1..21: mol_type = other RNA
tcagaaagcatcggagaaggg

SEQ ID NO: 23191 - RNA, 21 nt, synthetic construct
  source 1..21: mol_type = other RNA
tcagaacacaatggaacagtc

SEQ ID NO: 23192 - RNA, 21 nt, synthetic construct
  source 1..21: mol_type = other RNA
tcagaacacctcaagcataac

SEQ ID NO: 23193 - RNA, 21 nt, synthetic construct
  source 1..21: mol_type = other RNA
tcagaaggaaaaagcactctg

SEQ ID NO: 23194 - RNA, 21 nt, synthetic construct
  source 1..21: mol_type = other RNA
tcagaataattgtgtgaacag

SEQ ID NO: 23195 - RNA, 21 nt, synthetic construct
  source 1..21: mol_type = other RNA
tcagaatctcttgctctttgt

SEQ ID NO: 23196 - RNA, 21 nt, synthetic construct
  source 1..21: mol_type = other RNA
tcagaatctgaagctctggat

SEQ ID NO: 23197 - RNA, 21 nt, synthetic construct
  source 1..21: mol_type = other RNA
tcagaccatgaaatcaagtgc

SEQ ID NO: 23198 - RNA, 21 nt, synthetic construct
  source 1..21: mol_type = other RNA
tcagacccctccccagaagga

SEQ ID NO: 23199 - RNA, 21 nt, synthetic construct
  source 1..21: mol_type = other RNA
tcagagaataaagaacagact

SEQ ID NO: 23200 - RNA, 21 nt, synthetic construct
  source 1..21: mol_type = other RNA
tcagagactgagccattttca

SEQ ID NO: 23201 - RNA, 21 nt, synthetic construct
  source 1..21: mol_type = other RNA
tcagagctgccaccaggagct

SEQ ID NO: 23202 - RNA, 21 nt, synthetic construct
  source 1..21: mol_type = other RNA
tcagagtgctttttccttctg

SEQ ID NO: 23203 - RNA, 21 nt, synthetic construct
  source 1..21: mol_type = other RNA
tcagagttagaggtctgtgcg

SEQ ID NO: 23204 - RNA, 21 nt, synthetic construct
  source 1..21: mol_type = other RNA
tcagatagtgctgtgttgggg

SEQ ID NO: 23205 - RNA, 21 nt, synthetic construct
  source 1..21: mol_type = other RNA
tcagatcaagaaattgaaaca

SEQ ID NO: 23206 - RNA, 21 nt, synthetic construct
  source 1..21: mol_type = other RNA
tcagatgcacaggccaattaa

SEQ ID NO: 23207 - RNA, 21 nt, synthetic construct
  source 1..21: mol_type = other RNA
tcagatgctgctccatggtct

SEQ ID NO: 23208 - RNA, 21 nt, synthetic construct
  source 1..21: mol_type = other RNA
tcagattctgaatgagcagga

SEQ ID NO: 23209 - RNA, 21 nt, synthetic construct
  source 1..21: mol_type = other RNA
tcagcaaagagaaggatcatt

SEQ ID NO: 23210 - RNA, 21 nt, synthetic construct
  source 1..21: mol_type = other RNA
tcagcaaaggtacttgataca

SEQ ID NO: 23211 - RNA, 21 nt, synthetic construct
  source 1..21: mol_type = other RNA
tcagcatcacaggcctcactc

SEQ ID NO: 23212 - RNA, 21 nt, synthetic construct
  source 1..21: mol_type = other RNA
tcagcatcatcagcatcacag

SEQ ID NO: 23213 - RNA, 21 nt, synthetic construct
  source 1..21: mol_type = other RNA
tcagcttccttcagaaggaaa

SEQ ID NO: 23214 - RNA, 21 nt, synthetic construct
  source 1..21: mol_type = other RNA
tcaggaatggacttagtctgt

SEQ ID NO: 23215 - RNA, 21 nt, synthetic construct
  source 1..21: mol_type = other RNA
tcaggactcacacgactattc

SEQ ID NO: 23216 - RNA, 21 nt, synthetic construct
  source 1..21: mol_type = other RNA
tcaggatgtgtagtctgttct

SEQ ID NO: 23217 - RNA, 21 nt, synthetic construct
  source 1..21: mol_type = other RNA
tcaggcacaggaaaaacattt

SEQ ID NO: 23218 - RNA, 21 nt, synthetic construct
  source 1..21: mol_type = other RNA
tcaggcagtgggcttccattc

SEQ ID NO: 23219 - RNA, 21 nt, synthetic construct
  source 1..21: mol_type = other RNA
tcaggcccactgcagttatgt

SEQ ID NO: 23220 - RNA, 21 nt, synthetic construct
  source 1..21: mol_type = other RNA
tcaggctactaatgagttgtc

SEQ ID NO: 23221 - RNA, 21 nt, synthetic construct
  source 1..21: mol_type = other RNA
tcaggcttgcttcggggccat

SEQ ID NO: 23222 - RNA, 21 nt, synthetic construct
  source 1..21: mol_type = other RNA
tcagggcagatcaattccgca

SEQ ID NO: 23223 - RNA, 21 nt, synthetic construct
  source 1..21: mol_type = other RNA
tcagggccagtcacagttttg

SEQ ID NO: 23224 - RNA, 21 nt, synthetic construct
  source 1..21: mol_type = other RNA
tcaggttccagcagcaatttg

SEQ ID NO: 23225 - RNA, 21 nt, synthetic construct
  source 1..21: mol_type = other RNA
tcaggtttaccctctattttc

SEQ ID NO: 23226 - RNA, 21 nt, synthetic construct
  source 1..21: mol_type = other RNA
tcagtacatttctggcactta

SEQ ID NO: 23227 - RNA, 21 nt, synthetic construct
  source 1..21: mol_type = other RNA
tcagtatcaacccaatctctc

SEQ ID NO: 23228 - RNA, 21 nt, synthetic construct
  source 1..21: mol_type = other RNA
tcagtattcaaaatcaagcga

SEQ ID NO: 23229 - RNA, 21 nt, synthetic construct
  source 1..21: mol_type = other RNA
tcagtctctgaagcctgttga

SEQ ID NO: 23230 - RNA, 21 nt, synthetic construct
  source 1..21: mol_type = other RNA
tcagtgttcactaaggattcc

SEQ ID NO: 23231 - RNA, 21 nt, synthetic construct
  source 1..21: mol_type = other RNA
tcagttctacagggatataaa

SEQ ID NO: 23232 - RNA, 21 nt, synthetic construct
  source 1..21: mol_type = other RNA
tcagtttgggaatctgctctt

SEQ ID NO: 23233 - RNA, 21 nt, synthetic construct
  source 1..21: mol_type = other RNA
tcagtttggggttgctgtgtt

SEQ ID NO: 23234 - RNA, 21 nt, synthetic construct
  source 1..21: mol_type = other RNA
tcagtttttgagatatgccca

SEQ ID NO: 23235 - RNA, 21 nt, synthetic construct
  source 1..21: mol_type = other RNA
tcataaacaggcagcacaaac

SEQ ID NO: 23236 - RNA, 21 nt, synthetic construct
  source 1..21: mol_type = other RNA
tcataatgtccaaatgggact

SEQ ID NO: 23237 - RNA, 21 nt, synthetic construct
  source 1..21: mol_type = other RNA
tcatacagggtattccataat

SEQ ID NO: 23238 - RNA, 21 nt, synthetic construct
  source 1..21: mol_type = other RNA
tcatattgagtcttgacaggt

SEQ ID NO: 23239 - RNA, 21 nt, synthetic construct
  source 1..21: mol_type = other RNA
tcatcaactgctggcagttgt

SEQ ID NO: 23240 - RNA, 21 nt, synthetic construct
  source 1..21: mol_type = other RNA
tcatcagcatcacaggcctca

SEQ ID NO: 23241 - RNA, 21 nt, synthetic construct
  source 1..21: mol_type = other RNA
tcatccagaagtaaatggaga

SEQ ID NO: 23242 - RNA, 21 nt, synthetic construct
  source 1..21: mol_type = other RNA
tcatggtaattagcacttttc

SEQ ID NO: 23243 - RNA, 21 nt, synthetic construct
  source 1..21: mol_type = other RNA
tcatggtctgactataagggg

SEQ ID NO: 23244 - RNA, 21 nt, synthetic construct
  source 1..21: mol_type = other RNA
tcatggtgaaaatcagtattc

SEQ ID NO: 23245 - RNA, 21 nt, synthetic construct
  source 1..21: mol_type = other RNA
tcatgtgcagtcactgtgtgg

SEQ ID NO: 23246 - RNA, 21 nt, synthetic construct
  source 1..21: mol_type = other RNA
tcattacgttttagatgggat

SEQ ID NO: 23247 - RNA, 21 nt, synthetic construct
  source 1..21: mol_type = other RNA
tcattagtagcctgactgtta

SEQ ID NO: 23248 - RNA, 21 nt, synthetic construct
  source 1..21: mol_type = other RNA
tcattcagaatctgaagctct

SEQ ID NO: 23249 - RNA, 21 nt, synthetic construct
  source 1..21: mol_type = other RNA
tcattcctgttcacacaatta

SEQ ID NO: 23250 - RNA, 21 nt, synthetic construct
  source 1..21: mol_type = other RNA
tcattctttggccagactaaa

SEQ ID NO: 23251 - RNA, 21 nt, synthetic construct
  source 1..21: mol_type = other RNA
tcattgagaccatggagcagc

SEQ ID NO: 23252 - RNA, 21 nt, synthetic construct
  source 1..21: mol_type = other RNA
tcattgtccctgcagtctgta

SEQ ID NO: 23253 - RNA, 21 nt, synthetic construct
  source 1..21: mol_type = other RNA
tcattgttgctttgggggtga

SEQ ID NO: 23254 - RNA, 21 nt, synthetic construct
  source 1..21: mol_type = other RNA
tcatttcaacttggtacattt

SEQ ID NO: 23255 - RNA, 21 nt, synthetic construct
  source 1..21: mol_type = other RNA
tcatttgattggagagattgg

SEQ ID NO: 23256 - RNA, 21 nt, synthetic construct
  source 1..21: mol_type = other RNA
tcattttcaacaaagagcaga

SEQ ID NO: 23257 - RNA, 21 nt, synthetic construct
  source 1..21: mol_type = other RNA
tccaaaaaccctcacaccagg

SEQ ID NO: 23258 - RNA, 21 nt, synthetic construct
  source 1..21: mol_type = other RNA
tccaaaacagaccatttacca

SEQ ID NO: 23259 - RNA, 21 nt, synthetic construct
  source 1..21: mol_type = other RNA
tccaaacaatacactggaaat

SEQ ID NO: 23260 - RNA, 21 nt, synthetic construct
  source 1..21: mol_type = other RNA
tccaaagccagctgcagtggt

SEQ ID NO: 23261 - RNA, 21 nt, synthetic construct
  source 1..21: mol_type = other RNA
tccaaataatgtgatcccaaa

SEQ ID NO: 23262 - RNA, 21 nt, synthetic construct
  source 1..21: mol_type = other RNA
tccaaatgggactggaggaag

SEQ ID NO: 23263 - RNA, 21 nt, synthetic construct
  source 1..21: mol_type = other RNA
tccaaattactagatactcct

SEQ ID NO: 23264 - RNA, 21 nt, synthetic construct
  source 1..21: mol_type = other RNA
tccaacatgcctggggggctc

SEQ ID NO: 23265 - RNA, 21 nt, synthetic construct
  source 1..21: mol_type = other RNA
tccaagtgtttgcaaaatgga

SEQ ID NO: 23266 - RNA, 21 nt, synthetic construct
  source 1..21: mol_type = other RNA
tccaatcaaatgacctccaaa

SEQ ID NO: 23267 - RNA, 21 nt, synthetic construct
  source 1..21: mol_type = other RNA
tccacaggttcctcagcttcc

SEQ ID NO: 23268 - RNA, 21 nt, synthetic construct
  source 1..21: mol_type = other RNA
tccaccattcagagtgctttt

SEQ ID NO: 23269 - RNA, 21 nt, synthetic construct
  source 1..21: mol_type = other RNA
tccacctgcaagctgtgataa

SEQ ID NO: 23270 - RNA, 21 nt, synthetic construct
  source 1..21: mol_type = other RNA
tccaccttaattggcctgtgc

SEQ ID NO: 23271 - RNA, 21 nt, synthetic construct
  source 1..21: mol_type = other RNA
tccacggaagaggcagaaact

SEQ ID NO: 23272 - RNA, 21 nt, synthetic construct
  source 1..21: mol_type = other RNA
tccactgctaccaaaaattgg

SEQ ID NO: 23273 - RNA, 21 nt, synthetic construct
  source 1..21: mol_type = other RNA
tccactgtaccttgggactgc

SEQ ID NO: 23274 - RNA, 21 nt, synthetic construct
  source 1..21: mol_type = other RNA
tccactttagtctggccaaag

SEQ ID NO: 23275 - RNA, 21 nt, synthetic construct
  source 1..21: mol_type = other RNA
tccagaagtaaatggagacac

SEQ ID NO: 23276 - RNA, 21 nt, synthetic construct
  source 1..21: mol_type = other RNA
tccagaatggaagcccactgc

SEQ ID NO: 23277 - RNA, 21 nt, synthetic construct
  source 1..21: mol_type = other RNA
tccagacttttcctcaccccc

SEQ ID NO: 23278 - RNA, 21 nt, synthetic construct
  source 1..21: mol_type = other RNA
tccagagcttcagattctgaa

SEQ ID NO: 23279 - RNA, 21 nt, synthetic construct
  source 1..21: mol_type = other RNA
tccagattgtgtttccattgc

SEQ ID NO: 23280 - RNA, 21 nt, synthetic construct
  source 1..21: mol_type = other RNA
tccagcagcaatttgcaagct

SEQ ID NO: 23281 - RNA, 21 nt, synthetic construct
  source 1..21: mol_type = other RNA
tccagctgtgttgttttctgg

SEQ ID NO: 23282 - RNA, 21 nt, synthetic construct
  source 1..21: mol_type = other RNA
tccaggagttcaccatgtgtg

SEQ ID NO: 23283 - RNA, 21 nt, synthetic construct
  source 1..21: mol_type = other RNA
tccagggaaccacaaagctag

SEQ ID NO: 23284 - RNA, 21 nt, synthetic construct
  source 1..21: mol_type = other RNA
tccaggtgaaagcagtcaacc

SEQ ID NO: 23285 - RNA, 21 nt, synthetic construct
  source 1..21: mol_type = other RNA
tccaggttccaccttaattgg

SEQ ID NO: 23286 - RNA, 21 nt, synthetic construct
  source 1..21: mol_type = other RNA
tccagtcccatttggacatta

SEQ ID NO: 23287 - RNA, 21 nt, synthetic construct
  source 1..21: mol_type = other RNA
tccagtgtattgtttggaggt

SEQ ID NO: 23288 - RNA, 21 nt, synthetic construct
  source 1..21: mol_type = other RNA
tccagttccaaaaaccctcac

SEQ ID NO: 23289 - RNA, 21 nt, synthetic construct
  source 1..21: mol_type = other RNA
tccatcaggcttgcttcgggg

SEQ ID NO: 23290 - RNA, 21 nt, synthetic construct
  source 1..21: mol_type = other RNA
tccatcctggtttcagatagt

SEQ ID NO: 23291 - RNA, 21 nt, synthetic construct
  source 1..21: mol_type = other RNA
tccatctacacatgtatgcag

SEQ ID NO: 23292 - RNA, 21 nt, synthetic construct
  source 1..21: mol_type = other RNA
tccatggtctcaatgatgctc

SEQ ID NO: 23293 - RNA, 21 nt, synthetic construct
  source 1..21: mol_type = other RNA
tccatgttttgttttctggtg

SEQ ID NO: 23294 - RNA, 21 nt, synthetic construct
  source 1..21: mol_type = other RNA
tccattagccttttggtcttg

SEQ ID NO: 23295 - RNA, 21 nt, synthetic construct
  source 1..21: mol_type = other RNA
tccattcctgataccatcacc

SEQ ID NO: 23296 - RNA, 21 nt, synthetic construct
  source 1..21: mol_type = other RNA
tccattctggagctttgtagc

SEQ ID NO: 23297 - RNA, 21 nt, synthetic construct
  source 1..21: mol_type = other RNA
tccattgcggtgcagaaaacc

SEQ ID NO: 23298 - RNA, 21 nt, synthetic construct
  source 1..21: mol_type = other RNA
tccattgtgttctgagaaaac

SEQ ID NO: 23299 - RNA, 21 nt, synthetic construct
  source 1..21: mol_type = other RNA
tccatttacttctggatgagc

SEQ ID NO: 23300 - RNA, 21 nt, synthetic construct
  source 1..21: mol_type = other RNA
tccattttgcaaacacttgga

SEQ ID NO: 23301 - RNA, 21 nt, synthetic construct
  source 1..21: mol_type = other RNA
tcccaaactgaaaaacttatg

SEQ ID NO: 23302 - RNA, 21 nt, synthetic construct
  source 1..21: mol_type = other RNA
tcccaaagcaagatcttcttc

SEQ ID NO: 23303 - RNA, 21 nt, synthetic construct
  source 1..21: mol_type = other RNA
tcccaaggcaagcttacaccc

SEQ ID NO: 23304 - RNA, 21 nt, synthetic construct
  source 1..21: mol_type = other RNA
tcccaaggtacagtggaccaa

SEQ ID NO: 23305 - RNA, 21 nt, synthetic construct
  source 1..21: mol_type = other RNA
tcccagagtcctaatccatct

SEQ ID NO: 23306 - RNA, 21 nt, synthetic construct
  source 1..21: mol_type = other RNA
tcccagagttcacatctccct

SEQ ID NO: 23307 - RNA, 21 nt, synthetic construct
  source 1..21: mol_type = other RNA
tcccatctaaaacgtaatgag

SEQ ID NO: 23308 - RNA, 21 nt, synthetic construct
  source 1..21: mol_type = other RNA
tcccatcttgcagatgtgtag

SEQ ID NO: 23309 - RNA, 21 nt, synthetic construct
  source 1..21: mol_type = other RNA
tcccatttgccagacagaacc

SEQ ID NO: 23310 - RNA, 21 nt, synthetic construct
  source 1..21: mol_type = other RNA
tcccatttggacattatgagt

SEQ ID NO: 23311 - RNA, 21 nt, synthetic construct
  source 1..21: mol_type = other RNA
tccccagaaggacactcaaaa

SEQ ID NO: 23312 - RNA, 21 nt, synthetic construct
  source 1..21: mol_type = other RNA
tccccagtgttgaaacagcac

SEQ ID NO: 23313 - RNA, 21 nt, synthetic construct
  source 1..21: mol_type = other RNA
tccccctcctcctcttccaca

SEQ ID NO: 23314 - RNA, 21 nt, synthetic construct
  source 1..21: mol_type = other RNA
tcccctcctgctcattcagaa

SEQ ID NO: 23315 - RNA, 21 nt, synthetic construct
  source 1..21: mol_type = other RNA
tccccttatagtcagaccatg

SEQ ID NO: 23316 - RNA, 21 nt, synthetic construct
  source 1..21: mol_type = other RNA
tccctcaaaaccagcaacagc

SEQ ID NO: 23317 - RNA, 21 nt, synthetic construct
  source 1..21: mol_type = other RNA
tccctgcagtctgtatgtcat

SEQ ID NO: 23318 - RNA, 21 nt, synthetic construct
  source 1..21: mol_type = other RNA
tccctggatgttattttctgc

SEQ ID NO: 23319 - RNA, 21 nt, synthetic construct
  source 1..21: mol_type = other RNA
tccctggtcaggcacaggaaa

SEQ ID NO: 23320 - RNA, 21 nt, synthetic construct
  source 1..21: mol_type = other RNA
tccctgtagaactgaagcttg

SEQ ID NO: 23321 - RNA, 21 nt, synthetic construct
  source 1..21: mol_type = other RNA
tcccttaaaagtgttgtgtta

SEQ ID NO: 23322 - RNA, 21 nt, synthetic construct
  source 1..21: mol_type = other RNA
tcccttcatacagggtattcc

SEQ ID NO: 23323 - RNA, 21 nt, synthetic construct
  source 1..21: mol_type = other RNA
tccgatgctttctgaaaggcc

SEQ ID NO: 23324 - RNA, 21 nt, synthetic construct
  source 1..21: mol_type = other RNA
tccgatttgagtgataagaaa

SEQ ID NO: 23325 - RNA, 21 nt, synthetic construct
  source 1..21: mol_type = other RNA
tccgcacagacctctaactct

SEQ ID NO: 23326 - RNA, 21 nt, synthetic construct
  source 1..21: mol_type = other RNA
tccgcttggtgaaaacgaggg

SEQ ID NO: 23327 - RNA, 21 nt, synthetic construct
  source 1..21: mol_type = other RNA
tccgtggaacacacacatggt

SEQ ID NO: 23328 - RNA, 21 nt, synthetic construct
  source 1..21: mol_type = other RNA
tcctaatccatctacacatgt

SEQ ID NO: 23329 - RNA, 21 nt, synthetic construct
  source 1..21: mol_type = other RNA
tcctcacccccaaagcaacaa

SEQ ID NO: 23330 - RNA, 21 nt, synthetic construct
  source 1..21: mol_type = other RNA
tcctcagcttccttcagaagg

SEQ ID NO: 23331 - RNA, 21 nt, synthetic construct
  source 1..21: mol_type = other RNA
tcctccagtcccatttggaca

SEQ ID NO: 23332 - RNA, 21 nt, synthetic construct
  source 1..21: mol_type = other RNA
tcctccattttgcaaacactt

SEQ ID NO: 23333 - RNA, 21 nt, synthetic construct
  source 1..21: mol_type = other RNA
tcctccctggtcaggcacagg

SEQ ID NO: 23334 - RNA, 21 nt, synthetic construct
  source 1..21: mol_type = other RNA
tcctcctcttccacaggttcc

SEQ ID NO: 23335 - RNA, 21 nt, synthetic construct
  source 1..21: mol_type = other RNA
tcctcttccacaggttcctca

SEQ ID NO: 23336 - RNA, 21 nt, synthetic construct
  source 1..21: mol_type = other RNA
tcctgaactttttgcaggaaa

SEQ ID NO: 23337 - RNA, 21 nt, synthetic construct
  source 1..21: mol_type = other RNA
tcctgactttacacaagaaag

SEQ ID NO: 23338 - RNA, 21 nt, synthetic construct
  source 1..21: mol_type = other RNA
tcctgataccatcacctccca

SEQ ID NO: 23339 - RNA, 21 nt, synthetic construct
  source 1..21: mol_type = other RNA
tcctgcaaaaagttcaggatg

SEQ ID NO: 23340 - RNA, 21 nt, synthetic construct
  source 1..21: mol_type = other RNA
tcctgcagaaaataacatcca

SEQ ID NO: 23341 - RNA, 21 nt, synthetic construct
  source 1..21: mol_type = other RNA
tcctgctcattcagaatctga

SEQ ID NO: 23342 - RNA, 21 nt, synthetic construct
  source 1..21: mol_type = other RNA
tcctggaaaaaacactgtctc

SEQ ID NO: 23343 - RNA, 21 nt, synthetic construct
  source 1..21: mol_type = other RNA
tcctggtggcagctctgaacg

SEQ ID NO: 23344 - RNA, 21 nt, synthetic construct
  source 1..21: mol_type = other RNA
tcctggtttcagatagtgctg

SEQ ID NO: 23345 - RNA, 21 nt, synthetic construct
  source 1..21: mol_type = other RNA
tcctgtagctctccactgcta

SEQ ID NO: 23346 - RNA, 21 nt, synthetic construct
  source 1..21: mol_type = other RNA
tcctgtgagatcactcaccca

SEQ ID NO: 23347 - RNA, 21 nt, synthetic construct
  source 1..21: mol_type = other RNA
tcctgtgcctgaccagggagg

SEQ ID NO: 23348 - RNA, 21 nt, synthetic construct
  source 1..21: mol_type = other RNA
tcctgttcacacaattattct

SEQ ID NO: 23349 - RNA, 21 nt, synthetic construct
  source 1..21: mol_type = other RNA
tcctgttccatcaggcttgct

SEQ ID NO: 23350 - RNA, 21 nt, synthetic construct
  source 1..21: mol_type = other RNA
tcctgttcttgaaagcacctg

SEQ ID NO: 23351 - RNA, 21 nt, synthetic construct
  source 1..21: mol_type = other RNA
tccttagtgaacactgagctt

SEQ ID NO: 23352 - RNA, 21 nt, synthetic construct
  source 1..21: mol_type = other RNA
tccttcagaaggaaaaagcac

SEQ ID NO: 23353 - RNA, 21 nt, synthetic construct
  source 1..21: mol_type = other RNA
tccttcagatcaagaaattga

SEQ ID NO: 23354 - RNA, 21 nt, synthetic construct
  source 1..21: mol_type = other RNA
tccttctctttgctgatcatt

SEQ ID NO: 23355 - RNA, 21 nt, synthetic construct
  source 1..21: mol_type = other RNA
tccttctgaaggaagctgagg

SEQ ID NO: 23356 - RNA, 21 nt, synthetic construct
  source 1..21: mol_type = other RNA
tccttctggggaggggtctga

SEQ ID NO: 23357 - RNA, 21 nt, synthetic construct
  source 1..21: mol_type = other RNA
tccttgtctcgacccttcaga

SEQ ID NO: 23358 - RNA, 21 nt, synthetic construct
  source 1..21: mol_type = other RNA
tcctttcagaaaccagaacaa

SEQ ID NO: 23359 - RNA, 21 nt, synthetic construct
  source 1..21: mol_type = other RNA
tccttttctgccactaccaca

SEQ ID NO: 23360 - RNA, 21 nt, synthetic construct
  source 1..21: mol_type = other RNA
tcgaactcgcttgattttgaa

SEQ ID NO: 23361 - RNA, 21 nt, synthetic construct
  source 1..21: mol_type = other RNA
tcgacccttcagaatctcttg

SEQ ID NO: 23362 - RNA, 21 nt, synthetic construct
  source 1..21: mol_type = other RNA
tcgagacaaggagcaaacacg

SEQ ID NO: 23363 - RNA, 21 nt, synthetic construct
  source 1..21: mol_type = other RNA
tcgagactcataatgtccaaa

SEQ ID NO: 23364 - RNA, 21 nt, synthetic construct
  source 1..21: mol_type = other RNA
tcgcatacctcagggcagatc

SEQ ID NO: 23365 - RNA, 21 nt, synthetic construct
  source 1..21: mol_type = other RNA
tcgcttgattttgaatactga

SEQ ID NO: 23366 - RNA, 21 nt, synthetic construct
  source 1..21: mol_type = other RNA
tcggagaagggctgcatacat

SEQ ID NO: 23367 - RNA, 21 nt, synthetic construct
  source 1..21: mol_type = other RNA
tcggagacatttggttgactg

SEQ ID NO: 23368 - RNA, 21 nt, synthetic construct
  source 1..21: mol_type = other RNA
tcggggccatccacaaggctg

SEQ ID NO: 23369 - RNA, 21 nt, synthetic construct
  source 1..21: mol_type = other RNA
tcggggtaagccaagaaagaa

SEQ ID NO: 23370 - RNA, 21 nt, synthetic construct
  source 1..21: mol_type = other RNA
tcgtagaaattccccttatag

SEQ ID NO: 23371 - RNA, 21 nt, synthetic construct
  source 1..21: mol_type = other RNA
tcgtgtgagtcctgactttac

SEQ ID NO: 23372 - RNA, 21 nt, synthetic construct
  source 1..21: mol_type = other RNA
tcgtgtttgctccttgtctcg

SEQ ID NO: 23373 - RNA, 21 nt, synthetic construct
  source 1..21: mol_type = other RNA
tcgttatttgaccataaggct

SEQ ID NO: 23374 - RNA, 21 nt, synthetic construct
  source 1..21: mol_type = other RNA
tcgttttcaccaagcggaatc

SEQ ID NO: 23375 - RNA, 21 nt, synthetic construct
  source 1..21: mol_type = other RNA
tctaaaacgtaatgaggcatc

SEQ ID NO: 23376 - RNA, 21 nt, synthetic construct
  source 1..21: mol_type = other RNA
tctaaaactccaccattcaga

SEQ ID NO: 23377 - RNA, 21 nt, synthetic construct
  source 1..21: mol_type = other RNA
tctaaagctggggtgtggcta

SEQ ID NO: 23378 - RNA, 21 nt, synthetic construct
  source 1..21: mol_type = other RNA
tctaactctgagctgcctcca

SEQ ID NO: 23379 - RNA, 21 nt, synthetic construct
  source 1..21: mol_type = other RNA
tctaaggtggcatctcttaca

SEQ ID NO: 23380 - RNA, 21 nt, synthetic construct
  source 1..21: mol_type = other RNA
tctacacatgtatgcagccct

SEQ ID NO: 23381 - RNA, 21 nt, synthetic construct
  source 1..21: mol_type = other RNA
tctacagggatataaaaatag

SEQ ID NO: 23382 - RNA, 21 nt, synthetic construct
  source 1..21: mol_type = other RNA
tctacgatttatattctgtac

SEQ ID NO: 23383 - RNA, 21 nt, synthetic construct
  source 1..21: mol_type = other RNA
tctactttcttgtgtaaagtc

SEQ ID NO: 23384 - RNA, 21 nt, synthetic construct
  source 1..21: mol_type = other RNA
tctagtaatttggaaggtgac

SEQ ID NO: 23385 - RNA, 21 nt, synthetic construct
  source 1..21: mol_type = other RNA
tctagtcaaaactgtgactgg

SEQ ID NO: 23386 - RNA, 21 nt, synthetic construct
  source 1..21: mol_type = other RNA
tctagtgccacacagtgactg

SEQ ID NO: 23387 - RNA, 21 nt, synthetic construct
  source 1..21: mol_type = other RNA
tctatcctgttccatcaggct

SEQ ID NO: 23388 - RNA, 21 nt, synthetic construct
  source 1..21: mol_type = other RNA
tctattttcacttcccttaaa

SEQ ID NO: 23389 - RNA, 21 nt, synthetic construct
  source 1..21: mol_type = other RNA
tctatttttatatccctgtag

SEQ ID NO: 23390 - RNA, 21 nt, synthetic construct
  source 1..21: mol_type = other RNA
tctcaaatcacagaagcaagt

SEQ ID NO: 23391 - RNA, 21 nt, synthetic construct
  source 1..21: mol_type = other RNA
tctcaatattatccagattgt

SEQ ID NO: 23392 - RNA, 21 nt, synthetic construct
  source 1..21: mol_type = other RNA
tctcaatgatgctcttttgct

SEQ ID NO: 23393 - RNA, 21 nt, synthetic construct
  source 1..21: mol_type = other RNA
tctcacaggacaactcattag

SEQ ID NO: 23394 - RNA, 21 nt, synthetic construct
  source 1..21: mol_type = other RNA
tctcacataaatgccattaac

SEQ ID NO: 23395 - RNA, 21 nt, synthetic construct
  source 1..21: mol_type = other RNA
tctcagaacacaatggaacag

SEQ ID NO: 23396 - RNA, 21 nt, synthetic construct
  source 1..21: mol_type = other RNA
tctcaggcagtgggcttccat

SEQ ID NO: 23397 - RNA, 21 nt, synthetic construct
  source 1..21: mol_type = other RNA
tctcagtacatttctggcact

SEQ ID NO: 23398 - RNA, 21 nt, synthetic construct
  source 1..21: mol_type = other RNA
tctcatcaactgctggcagtt

SEQ ID NO: 23399 - RNA, 21 nt, synthetic construct
  source 1..21: mol_type = other RNA
tctccaaaacagaccatttac

SEQ ID NO: 23400 - RNA, 21 nt, synthetic construct
  source 1..21: mol_type = other RNA
tctccaatcaaatgacctcca

SEQ ID NO: 23401 - RNA, 21 nt, synthetic construct
  source 1..21: mol_type = other RNA
tctccactgctaccaaaaatt

SEQ ID NO: 23402 - RNA, 21 nt, synthetic construct
  source 1..21: mol_type = other RNA
tctccagttccaaaaaccctc

SEQ ID NO: 23403 - RNA, 21 nt, synthetic construct
  source 1..21: mol_type = other RNA
tctccattagccttttggtct

SEQ ID NO: 23404 - RNA, 21 nt, synthetic construct
  source 1..21: mol_type = other RNA
tctccatttacttctggatga

SEQ ID NO: 23405 - RNA, 21 nt, synthetic construct
  source 1..21: mol_type = other RNA
tctccccctcctcctcttcca

SEQ ID NO: 23406 - RNA, 21 nt, synthetic construct
  source 1..21: mol_type = other RNA
tctccctcaaaaccagcaaca

SEQ ID NO: 23407 - RNA, 21 nt, synthetic construct
  source 1..21: mol_type = other RNA
tctccgatgctttctgaaagg

SEQ ID NO: 23408 - RNA, 21 nt, synthetic construct
  source 1..21: mol_type = other RNA
tctccgatttgagtgataaga

SEQ ID NO: 23409 - RNA, 21 nt, synthetic construct
  source 1..21: mol_type = other RNA
tctcctgcagaaaataacatc

SEQ ID NO: 23410 - RNA, 21 nt, synthetic construct
  source 1..21: mol_type = other RNA
tctcgaactcgcttgattttg

SEQ ID NO: 23411 - RNA, 21 nt, synthetic construct
  source 1..21: mol_type = other RNA
tctcgacccttcagaatctct

SEQ ID NO: 23412 - RNA, 21 nt, synthetic construct
  source 1..21: mol_type = other RNA
tctcgtgtttgctccttgtct

SEQ ID NO: 23413 - RNA, 21 nt, synthetic construct
  source 1..21: mol_type = other RNA
tctctcaggcagtgggcttcc

SEQ ID NO: 23414 - RNA, 21 nt, synthetic construct
  source 1..21: mol_type = other RNA
tctctccaatcaaatgacctc

SEQ ID NO: 23415 - RNA, 21 nt, synthetic construct
  source 1..21: mol_type = other RNA
tctctctctgggctccttcag

SEQ ID NO: 23416 - RNA, 21 nt, synthetic construct
  source 1..21: mol_type = other RNA
tctctctgggctccttcagat

SEQ ID NO: 23417 - RNA, 21 nt, synthetic construct
  source 1..21: mol_type = other RNA
tctctgaaactaggtgtgtat

SEQ ID NO: 23418 - RNA, 21 nt, synthetic construct
  source 1..21: mol_type = other RNA
tctctgaagcctgttgattca

SEQ ID NO: 23419 - RNA, 21 nt, synthetic construct
  source 1..21: mol_type = other RNA
tctctgggctccttcagatca

SEQ ID NO: 23420 - RNA, 21 nt, synthetic construct
  source 1..21: mol_type = other RNA
tctcttacagaagcaagaaca

SEQ ID NO: 23421 - RNA, 21 nt, synthetic construct
  source 1..21: mol_type = other RNA
tctcttgctctttgtttctca

SEQ ID NO: 23422 - RNA, 21 nt, synthetic construct
  source 1..21: mol_type = other RNA
tctcttgcttagttacctttt

SEQ ID NO: 23423 - RNA, 21 nt, synthetic construct
  source 1..21: mol_type = other RNA
tctctttgctgatcattgttg

SEQ ID NO: 23424 - RNA, 21 nt, synthetic construct
  source 1..21: mol_type = other RNA
tctgaaaccaggatggattga

SEQ ID NO: 23425 - RNA, 21 nt, synthetic construct
  source 1..21: mol_type = other RNA
tctgaaactaggtgtgtattg

SEQ ID NO: 23426 - RNA, 21 nt, synthetic construct
  source 1..21: mol_type = other RNA
tctgaaaggaacaggtattta

SEQ ID NO: 23427 - RNA, 21 nt, synthetic construct
  source 1..21: mol_type = other RNA
tctgaaaggcctcagaataat

SEQ ID NO: 23428 - RNA, 21 nt, synthetic construct
  source 1..21: mol_type = other RNA
tctgaacggtatttaaaacaa

SEQ ID NO: 23429 - RNA, 21 nt, synthetic construct
  source 1..21: mol_type = other RNA
tctgaagaagttgtttgctgc

SEQ ID NO: 23430 - RNA, 21 nt, synthetic construct
  source 1..21: mol_type = other RNA
tctgaagcagtttcacgccaa

SEQ ID NO: 23431 - RNA, 21 nt, synthetic construct
  source 1..21: mol_type = other RNA
tctgaagcctgttgattcaag

SEQ ID NO: 23432 - RNA, 21 nt, synthetic construct
  source 1..21: mol_type = other RNA
tctgaagctctggattttcag

SEQ ID NO: 23433 - RNA, 21 nt, synthetic construct
  source 1..21: mol_type = other RNA
tctgaaggaagctgaggaacc

SEQ ID NO: 23434 - RNA, 21 nt, synthetic construct
  source 1..21: mol_type = other RNA
tctgaaggagcccagagagag

SEQ ID NO: 23435 - RNA, 21 nt, synthetic construct
  source 1..21: mol_type = other RNA
tctgaagggtcgagacaagga

SEQ ID NO: 23436 - RNA, 21 nt, synthetic construct
  source 1..21: mol_type = other RNA
tctgaatgagcaggaggggaa

SEQ ID NO: 23437 - RNA, 21 nt, synthetic construct
  source 1..21: mol_type = other RNA
tctgaatggtggagttttaga

SEQ ID NO: 23438 - RNA, 21 nt, synthetic construct
  source 1..21: mol_type = other RNA
tctgacattggtcttgttttc

SEQ ID NO: 23439 - RNA, 21 nt, synthetic construct
  source 1..21: mol_type = other RNA
tctgactataaggggaatttc

SEQ ID NO: 23440 - RNA, 21 nt, synthetic construct
  source 1..21: mol_type = other RNA
tctgactatggcaagactcag

SEQ ID NO: 23441 - RNA, 21 nt, synthetic construct
  source 1..21: mol_type = other RNA
tctgagaaaacaagaccaatg

SEQ ID NO: 23442 - RNA, 21 nt, synthetic construct
  source 1..21: mol_type = other RNA
tctgagctgcctccaaagcca

SEQ ID NO: 23443 - RNA, 21 nt, synthetic construct
  source 1..21: mol_type = other RNA
tctgaggcctttcagaaagca

SEQ ID NO: 23444 - RNA, 21 nt, synthetic construct
  source 1..21: mol_type = other RNA
tctgagtgtgacttcctccct

SEQ ID NO: 23445 - RNA, 21 nt, synthetic construct
  source 1..21: mol_type = other RNA
tctgcaagatgggaaatcata

SEQ ID NO: 23446 - RNA, 21 nt, synthetic construct
  source 1..21: mol_type = other RNA
tctgcaccgcaatggaaacac

SEQ ID NO: 23447 - RNA, 21 nt, synthetic construct
  source 1..21: mol_type = other RNA
tctgcagcagtggtttgtcta

SEQ ID NO: 23448 - RNA, 21 nt, synthetic construct
  source 1..21: mol_type = other RNA
tctgcaggagatgggcatatc

SEQ ID NO: 23449 - RNA, 21 nt, synthetic construct
  source 1..21: mol_type = other RNA
tctgccactaccacaccacca

SEQ ID NO: 23450 - RNA, 21 nt, synthetic construct
  source 1..21: mol_type = other RNA
tctgccctgaggtatgcgatg

SEQ ID NO: 23451 - RNA, 21 nt, synthetic construct
  source 1..21: mol_type = other RNA
tctgcctcttccgtggaacac

SEQ ID NO: 23452 - RNA, 21 nt, synthetic construct
  source 1..21: mol_type = other RNA
tctgctcctgttcttgaaagc

SEQ ID NO: 23453 - RNA, 21 nt, synthetic construct
  source 1..21: mol_type = other RNA
tctgctctttgttgaaaatga

SEQ ID NO: 23454 - RNA, 21 nt, synthetic construct
  source 1..21: mol_type = other RNA
tctggagctttgtagccagag

SEQ ID NO: 23455 - RNA, 21 nt, synthetic construct
  source 1..21: mol_type = other RNA
tctggagtatttcctctttat

SEQ ID NO: 23456 - RNA, 21 nt, synthetic construct
  source 1..21: mol_type = other RNA
tctggataatattgagacagt

SEQ ID NO: 23457 - RNA, 21 nt, synthetic construct
  source 1..21: mol_type = other RNA
tctggatgagctctctcaggc

SEQ ID NO: 23458 - RNA, 21 nt, synthetic construct
  source 1..21: mol_type = other RNA
tctggattttcaggcccactg

SEQ ID NO: 23459 - RNA, 21 nt, synthetic construct
  source 1..21: mol_type = other RNA
tctggcaaatgggaggtgatg

SEQ ID NO: 23460 - RNA, 21 nt, synthetic construct
  source 1..21: mol_type = other RNA
tctggcacttacctacacatc

SEQ ID NO: 23461 - RNA, 21 nt, synthetic construct
  source 1..21: mol_type = other RNA
tctggccaaagaatgatcctt

SEQ ID NO: 23462 - RNA, 21 nt, synthetic construct
  source 1..21: mol_type = other RNA
tctggctacaaagctccagaa

SEQ ID NO: 23463 - RNA, 21 nt, synthetic construct
  source 1..21: mol_type = other RNA
tctggcttcccttcatacagg

SEQ ID NO: 23464 - RNA, 21 nt, synthetic construct
  source 1..21: mol_type = other RNA
tctgggaaggtggtgcctcag

SEQ ID NO: 23465 - RNA, 21 nt, synthetic construct
  source 1..21: mol_type = other RNA
tctgggatggttgtgtttgtg

SEQ ID NO: 23466 - RNA, 21 nt, synthetic construct
  source 1..21: mol_type = other RNA
tctgggctccttcagatcaag

SEQ ID NO: 23467 - RNA, 21 nt, synthetic construct
  source 1..21: mol_type = other RNA
tctggggaggggtctgagtgt

SEQ ID NO: 23468 - RNA, 21 nt, synthetic construct
  source 1..21: mol_type = other RNA
tctgggtgtaagcttgccttg

SEQ ID NO: 23469 - RNA, 21 nt, synthetic construct
  source 1..21: mol_type = other RNA
tctggtcaacaagctgcgcaa

SEQ ID NO: 23470 - RNA, 21 nt, synthetic construct
  source 1..21: mol_type = other RNA
tctggtgaagaattctgttca

SEQ ID NO: 23471 - RNA, 21 nt, synthetic construct
  source 1..21: mol_type = other RNA
tctggtggtgctgtgtgcata

SEQ ID NO: 23472 - RNA, 21 nt, synthetic construct
  source 1..21: mol_type = other RNA
tctggtttctgaaaggaacag

SEQ ID NO: 23473 - RNA, 21 nt, synthetic construct
  source 1..21: mol_type = other RNA
tctgtaagagatgccacctta

SEQ ID NO: 23474 - RNA, 21 nt, synthetic construct
  source 1..21: mol_type = other RNA
tctgtacttcctccagtccca

SEQ ID NO: 23475 - RNA, 21 nt, synthetic construct
  source 1..21: mol_type = other RNA
tctgtagcccaagaaaatgca

SEQ ID NO: 23476 - RNA, 21 nt, synthetic construct
  source 1..21: mol_type = other RNA
tctgtatgtcattcctgttca

SEQ ID NO: 23477 - RNA, 21 nt, synthetic construct
  source 1..21: mol_type = other RNA
tctgtctggcaaatgggaggt

SEQ ID NO: 23478 - RNA, 21 nt, synthetic construct
  source 1..21: mol_type = other RNA
tctgtgagttctgtagcccaa

SEQ ID NO: 23479 - RNA, 21 nt, synthetic construct
  source 1..21: mol_type = other RNA
tctgtgatttgagagtaagag

SEQ ID NO: 23480 - RNA, 21 nt, synthetic construct
  source 1..21: mol_type = other RNA
tctgtgcggaattgatctgcc

SEQ ID NO: 23481 - RNA, 21 nt, synthetic construct
  source 1..21: mol_type = other RNA
tctgttcaggttccagcagca

SEQ ID NO: 23482 - RNA, 21 nt, synthetic construct
  source 1..21: mol_type = other RNA
tctgttctttattctctgaaa

SEQ ID NO: 23483 - RNA, 21 nt, synthetic construct
  source 1..21: mol_type = other RNA
tctgttgccctcaacatggtt

SEQ ID NO: 23484 - RNA, 21 nt, synthetic construct
  source 1..21: mol_type = other RNA
tctgttttggagaagtgcacc

SEQ ID NO: 23485 - RNA, 21 nt, synthetic construct
  source 1..21: mol_type = other RNA
tcttacagaagcaagaacagc

SEQ ID NO: 23486 - RNA, 21 nt, synthetic construct
  source 1..21: mol_type = other RNA
tcttactctcaaatcacagaa

SEQ ID NO: 23487 - RNA, 21 nt, synthetic construct
  source 1..21: mol_type = other RNA
tcttatcactcaaatcggaga

SEQ ID NO: 23488 - RNA, 21 nt, synthetic construct
  source 1..21: mol_type = other RNA
tcttcacaggtgctttcaaga

SEQ ID NO: 23489 - RNA, 21 nt, synthetic construct
  source 1..21: mol_type = other RNA
tcttcaccagacgctagcttt

SEQ ID NO: 23490 - RNA, 21 nt, synthetic construct
  source 1..21: mol_type = other RNA
tcttcagaaaagacaccaacc

SEQ ID NO: 23491 - RNA, 21 nt, synthetic construct
  source 1..21: mol_type = other RNA
tcttcagtatcaacccaatct

SEQ ID NO: 23492 - RNA, 21 nt, synthetic construct
  source 1..21: mol_type = other RNA
tcttccacaggttcctcagct

SEQ ID NO: 23493 - RNA, 21 nt, synthetic construct
  source 1..21: mol_type = other RNA
tcttccactttagtctggcca

SEQ ID NO: 23494 - RNA, 21 nt, synthetic construct
  source 1..21: mol_type = other RNA
tcttccgtggaacacacacat

SEQ ID NO: 23495 - RNA, 21 nt, synthetic construct
  source 1..21: mol_type = other RNA
tcttctaaaactccaccattc

SEQ ID NO: 23496 - RNA, 21 nt, synthetic construct
  source 1..21: mol_type = other RNA
tcttcttcacaggtgctttca

SEQ ID NO: 23497 - RNA, 21 nt, synthetic construct
  source 1..21: mol_type = other RNA
tcttgaaagcacctgtgaaga

SEQ ID NO: 23498 - RNA, 21 nt, synthetic construct
  source 1..21: mol_type = other RNA
tcttgacaggtgtatccaata

SEQ ID NO: 23499 - RNA, 21 nt, synthetic construct
  source 1..21: mol_type = other RNA
tcttgatctgaaggagcccag

SEQ ID NO: 23500 - RNA, 21 nt, synthetic construct
  source 1..21: mol_type = other RNA
tcttgcagatgtgtaggtaag

SEQ ID NO: 23501 - RNA, 21 nt, synthetic construct
  source 1..21: mol_type = other RNA
tcttgccatagtcagatgcac

SEQ ID NO: 23502 - RNA, 21 nt, synthetic construct
  source 1..21: mol_type = other RNA
tcttgctctttgtttctcatc

SEQ ID NO: 23503 - RNA, 21 nt, synthetic construct
  source 1..21: mol_type = other RNA
tcttgcttagttacctttttc

SEQ ID NO: 23504 - RNA, 21 nt, synthetic construct
  source 1..21: mol_type = other RNA
tcttgcttctgtaagagatgc

SEQ ID NO: 23505 - RNA, 21 nt, synthetic construct
  source 1..21: mol_type = other RNA
tcttgctttgggatcacatta

SEQ ID NO: 23506 - RNA, 21 nt, synthetic construct
  source 1..21: mol_type = other RNA
tcttggcttaccccgaagtta

SEQ ID NO: 23507 - RNA, 21 nt, synthetic construct
  source 1..21: mol_type = other RNA
tcttgggctacagaactcaca

SEQ ID NO: 23508 - RNA, 21 nt, synthetic construct
  source 1..21: mol_type = other RNA
tcttgtcatggtaattagcac

SEQ ID NO: 23509 - RNA, 21 nt, synthetic construct
  source 1..21: mol_type = other RNA
tcttgtgcccccaacacagca

SEQ ID NO: 23510 - RNA, 21 nt, synthetic construct
  source 1..21: mol_type = other RNA
tcttgtgtaaagtcaggactc

SEQ ID NO: 23511 - RNA, 21 nt, synthetic construct
  source 1..21: mol_type = other RNA
tcttgttcaaacaatacacac

SEQ ID NO: 23512 - RNA, 21 nt, synthetic construct
  source 1..21: mol_type = other RNA
tcttgtttcaatttcttgatc

SEQ ID NO: 23513 - RNA, 21 nt, synthetic construct
  source 1..21: mol_type = other RNA
tcttgtttcctgcaaaaagtt

SEQ ID NO: 23514 - RNA, 21 nt, synthetic construct
  source 1..21: mol_type = other RNA
tcttgttttctcagaacacaa

SEQ ID NO: 23515 - RNA, 21 nt, synthetic construct
  source 1..21: mol_type = other RNA
tctttaactgcattttcttgg

SEQ ID NO: 23516 - RNA, 21 nt, synthetic construct
  source 1..21: mol_type = other RNA
tctttattctctgaaactagg

SEQ ID NO: 23517 - RNA, 21 nt, synthetic construct
  source 1..21: mol_type = other RNA
tctttctccattagccttttg

SEQ ID NO: 23518 - RNA, 21 nt, synthetic construct
  source 1..21: mol_type = other RNA
tctttctccccctcctcctct

SEQ ID NO: 23519 - RNA, 21 nt, synthetic construct
  source 1..21: mol_type = other RNA
tctttcttatcactcaaatcg

SEQ ID NO: 23520 - RNA, 21 nt, synthetic construct
  source 1..21: mol_type = other RNA
tctttcttggcttaccccgaa

SEQ ID NO: 23521 - RNA, 21 nt, synthetic construct
  source 1..21: mol_type = other RNA
tctttgctgatcattgttgct

SEQ ID NO: 23522 - RNA, 21 nt, synthetic construct
  source 1..21: mol_type = other RNA
tctttggccagactaaagtgg

SEQ ID NO: 23523 - RNA, 21 nt, synthetic construct
  source 1..21: mol_type = other RNA
tctttgtttctcatcaactgc

SEQ ID NO: 23524 - RNA, 21 nt, synthetic construct
  source 1..21: mol_type = other RNA
tcttttctgaagaagttgttt

SEQ ID NO: 23525 - RNA, 21 nt, synthetic construct
  source 1..21: mol_type = other RNA
tcttttgctgcacattatcac

SEQ ID NO: 23526 - RNA, 21 nt, synthetic construct
  source 1..21: mol_type = other RNA
tcttttggttggtgtcttttc

SEQ ID NO: 23527 - RNA, 21 nt, synthetic construct
  source 1..21: mol_type = other RNA
tgaaaaactggtgaaatcttt

SEQ ID NO: 23528 - RNA, 21 nt, synthetic construct
  source 1..21: mol_type = other RNA
tgaaaaacttatgtccccagt

SEQ ID NO: 23529 - RNA, 21 nt, synthetic construct
  source 1..21: mol_type = other RNA
tgaaaacattcttccacttta

SEQ ID NO: 23530 - RNA, 21 nt, synthetic construct
  source 1..21: mol_type = other RNA
tgaaaacgaggggccttcaat

SEQ ID NO: 23531 - RNA, 21 nt, synthetic construct
  source 1..21: mol_type = other RNA
tgaaaatagagggtaaacctg

SEQ ID NO: 23532 - RNA, 21 nt, synthetic construct
  source 1..21: mol_type = other RNA
tgaaaatccagagcttcagat

SEQ ID NO: 23533 - RNA, 21 nt, synthetic construct
  source 1..21: mol_type = other RNA
tgaaaatgaaatctagtgcca

SEQ ID NO: 23534 - RNA, 21 nt, synthetic construct
  source 1..21: mol_type = other RNA
tgaaaatggctcagtctctga

SEQ ID NO: 23535 - RNA, 21 nt, synthetic construct
  source 1..21: mol_type = other RNA
tgaaacaagaccaaaaggcta

SEQ ID NO: 23536 - RNA, 21 nt, synthetic construct
  source 1..21: mol_type = other RNA
tgaaacagcacttgaatcaac

SEQ ID NO: 23537 - RNA, 21 nt, synthetic construct
  source 1..21: mol_type = other RNA
tgaaaccaggatggattgaat

SEQ ID NO: 23538 - RNA, 21 nt, synthetic construct
  source 1..21: mol_type = other RNA
tgaaactaggtgtgtattgtt

SEQ ID NO: 23539 - RNA, 21 nt, synthetic construct
  source 1..21: mol_type = other RNA
tgaaactgcttcagatgctgc

SEQ ID NO: 23540 - RNA, 21 nt, synthetic construct
  source 1..21: mol_type = other RNA
tgaaagagtgccacttggtgt

SEQ ID NO: 23541 - RNA, 21 nt, synthetic construct
  source 1..21: mol_type = other RNA
tgaaagcacctgtgaagaaga

SEQ ID NO: 23542 - RNA, 21 nt, synthetic construct
  source 1..21: mol_type = other RNA
tgaaagcagtcaaccaaatgt

SEQ ID NO: 23543 - RNA, 21 nt, synthetic construct
  source 1..21: mol_type = other RNA
tgaaaggaacaggtatttagc

SEQ ID NO: 23544 - RNA, 21 nt, synthetic construct
  source 1..21: mol_type = other RNA
tgaaaggcctcagaataattg

SEQ ID NO: 23545 - RNA, 21 nt, synthetic construct
  source 1..21: mol_type = other RNA
tgaaatcaagtgcatgcaaaa

SEQ ID NO: 23546 - RNA, 21 nt, synthetic construct
  source 1..21: mol_type = other RNA
tgaaatctagtgccacacagt

SEQ ID NO: 23547 - RNA, 21 nt, synthetic construct
  source 1..21: mol_type = other RNA
tgaaatgaatcaagggcagtc

SEQ ID NO: 23548 - RNA, 21 nt, synthetic construct
  source 1..21: mol_type = other RNA
tgaaatgaatggtgcttactt

SEQ ID NO: 23549 - RNA, 21 nt, synthetic construct
  source 1..21: mol_type = other RNA
tgaaatgtcagggccagtcac

SEQ ID NO: 23550 - RNA, 21 nt, synthetic construct
  source 1..21: mol_type = other RNA
tgaacaagaaacctgtatttt

SEQ ID NO: 23551 - RNA, 21 nt, synthetic construct
  source 1..21: mol_type = other RNA
tgaacactgagctttgcttga

SEQ ID NO: 23552 - RNA, 21 nt, synthetic construct
  source 1..21: mol_type = other RNA
tgaacagaattcttcaccaga

SEQ ID NO: 23553 - RNA, 21 nt, synthetic construct
  source 1..21: mol_type = other RNA
tgaacaggaatgacatacaga

SEQ ID NO: 23554 - RNA, 21 nt, synthetic construct
  source 1..21: mol_type = other RNA
tgaaccttctctctctgggct

SEQ ID NO: 23555 - RNA, 21 nt, synthetic construct
  source 1..21: mol_type = other RNA
tgaactcctggaaaaaacact

SEQ ID NO: 23556 - RNA, 21 nt, synthetic construct
  source 1..21: mol_type = other RNA
tgaactctgggatggttgtgt

SEQ ID NO: 23557 - RNA, 21 nt, synthetic construct
  source 1..21: mol_type = other RNA
tgaactttttgcaggaaacaa

SEQ ID NO: 23558 - RNA, 21 nt, synthetic construct
  source 1..21: mol_type = other RNA
tgaagaagatcttgctttggg

SEQ ID NO: 23559 - RNA, 21 nt, synthetic construct
  source 1..21: mol_type = other RNA
tgaagaagttgtttgctgctc

SEQ ID NO: 23560 - RNA, 21 nt, synthetic construct
  source 1..21: mol_type = other RNA
tgaagaattctgttcaggttc

SEQ ID NO: 23561 - RNA, 21 nt, synthetic construct
  source 1..21: mol_type = other RNA
tgaagaattgatggcagtgat

SEQ ID NO: 23562 - RNA, 21 nt, synthetic construct
  source 1..21: mol_type = other RNA
tgaagcagtttcacgccaagt

SEQ ID NO: 23563 - RNA, 21 nt, synthetic construct
  source 1..21: mol_type = other RNA
tgaagcctgttgattcaagtg

SEQ ID NO: 23564 - RNA, 21 nt, synthetic construct
  source 1..21: mol_type = other RNA
tgaagctctggattttcaggc

SEQ ID NO: 23565 - RNA, 21 nt, synthetic construct
  source 1..21: mol_type = other RNA
tgaagcttgttgtgacttctg

SEQ ID NO: 23566 - RNA, 21 nt, synthetic construct
  source 1..21: mol_type = other RNA
tgaaggaagctgaggaacctg

SEQ ID NO: 23567 - RNA, 21 nt, synthetic construct
  source 1..21: mol_type = other RNA
tgaaggagcccagagagagaa

SEQ ID NO: 23568 - RNA, 21 nt, synthetic construct
  source 1..21: mol_type = other RNA
tgaaggcccctcgttttcacc

SEQ ID NO: 23569 - RNA, 21 nt, synthetic construct
  source 1..21: mol_type = other RNA
tgaagggaagccagaatagtc

SEQ ID NO: 23570 - RNA, 21 nt, synthetic construct
  source 1..21: mol_type = other RNA
tgaagggtcgagacaaggagc

SEQ ID NO: 23571 - RNA, 21 nt, synthetic construct
  source 1..21: mol_type = other RNA
tgaagtaagcaccattcattt

SEQ ID NO: 23572 - RNA, 21 nt, synthetic construct
  source 1..21: mol_type = other RNA
tgaatactgattttcaccatg

SEQ ID NO: 23573 - RNA, 21 nt, synthetic construct
  source 1..21: mol_type = other RNA
tgaatcaacaggcttcagaga

SEQ ID NO: 23574 - RNA, 21 nt, synthetic construct
  source 1..21: mol_type = other RNA
tgaatcaagggcagtcccaag

SEQ ID NO: 23575 - RNA, 21 nt, synthetic construct
  source 1..21: mol_type = other RNA
tgaatgagcaggaggggaaaa

SEQ ID NO: 23576 - RNA, 21 nt, synthetic construct
  source 1..21: mol_type = other RNA
tgaatggtgcttacttcaagc

SEQ ID NO: 23577 - RNA, 21 nt, synthetic construct
  source 1..21: mol_type = other RNA
tgaatggtggagttttagaag

SEQ ID NO: 23578 - RNA, 21 nt, synthetic construct
  source 1..21: mol_type = other RNA
tgaattgaaggcccctcgttt

SEQ ID NO: 23579 - RNA, 21 nt, synthetic construct
  source 1..21: mol_type = other RNA
tgacaagaacattgtattact

SEQ ID NO: 23580 - RNA, 21 nt, synthetic construct
  source 1..21: mol_type = other RNA
tgacaggtgtatccaataaat

SEQ ID NO: 23581 - RNA, 21 nt, synthetic construct
  source 1..21: mol_type = other RNA
tgacatacagactgcagggac

SEQ ID NO: 23582 - RNA, 21 nt, synthetic construct
  source 1..21: mol_type = other RNA
tgacattggtcttgttttctc

SEQ ID NO: 23583 - RNA, 21 nt, synthetic construct
  source 1..21: mol_type = other RNA
tgacatttcaacttttacttg

SEQ ID NO: 23584 - RNA, 21 nt, synthetic construct
  source 1..21: mol_type = other RNA
tgaccagacatatcttggttt

SEQ ID NO: 23585 - RNA, 21 nt, synthetic construct
  source 1..21: mol_type = other RNA
tgaccagggaggaagtcacac

SEQ ID NO: 23586 - RNA, 21 nt, synthetic construct
  source 1..21: mol_type = other RNA
tgaccataaggctcttactct

SEQ ID NO: 23587 - RNA, 21 nt, synthetic construct
  source 1..21: mol_type = other RNA
tgacctccaaacaatacactg

SEQ ID NO: 23588 - RNA, 21 nt, synthetic construct
  source 1..21: mol_type = other RNA
tgactagacaaaccactgctg

SEQ ID NO: 23589 - RNA, 21 nt, synthetic construct
  source 1..21: mol_type = other RNA
tgactataaggggaatttcta

SEQ ID NO: 23590 - RNA, 21 nt, synthetic construct
  source 1..21: mol_type = other RNA
tgactatggcaagactcagtt

SEQ ID NO: 23591 - RNA, 21 nt, synthetic construct
  source 1..21: mol_type = other RNA
tgactgcacatgagcttttgg

SEQ ID NO: 23592 - RNA, 21 nt, synthetic construct
  source 1..21: mol_type = other RNA
tgactgctttcacctggattt

SEQ ID NO: 23593 - RNA, 21 nt, synthetic construct
  source 1..21: mol_type = other RNA
tgactggccctgacatttcaa

SEQ ID NO: 23594 - RNA, 21 nt, synthetic construct
  source 1..21: mol_type = other RNA
tgactgttaatggcatttatg

SEQ ID NO: 23595 - RNA, 21 nt, synthetic construct
  source 1..21: mol_type = other RNA
tgactgttccattgtgttctg

SEQ ID NO: 23596 - RNA, 21 nt, synthetic construct
  source 1..21: mol_type = other RNA
tgacttcctccctggtcaggc

SEQ ID NO: 23597 - RNA, 21 nt, synthetic construct
  source 1..21: mol_type = other RNA
tgacttctgctcctgttcttg

SEQ ID NO: 23598 - RNA, 21 nt, synthetic construct
  source 1..21: mol_type = other RNA
tgacttgtgctccagctgtgt

SEQ ID NO: 23599 - RNA, 21 nt, synthetic construct
  source 1..21: mol_type = other RNA
tgactttacacaagaaagtag

SEQ ID NO: 23600 - RNA, 21 nt, synthetic construct
  source 1..21: mol_type = other RNA
tgagaaaacaagaccaatgtc

SEQ ID NO: 23601 - RNA, 21 nt, synthetic construct
  source 1..21: mol_type = other RNA
tgagaaacaaagagcaagaga

SEQ ID NO: 23602 - RNA, 21 nt, synthetic construct
  source 1..21: mol_type = other RNA
tgagaacagaagcagctgttc

SEQ ID NO: 23603 - RNA, 21 nt, synthetic construct
  source 1..21: mol_type = other RNA
tgagacagtgttttttccagg

SEQ ID NO: 23604 - RNA, 21 nt, synthetic construct
  source 1..21: mol_type = other RNA
tgagaccatggagcagcatct

SEQ ID NO: 23605 - RNA, 21 nt, synthetic construct
  source 1..21: mol_type = other RNA
tgagagagctcatccagaagt

SEQ ID NO: 23606 - RNA, 21 nt, synthetic construct
  source 1..21: mol_type = other RNA
tgagagtaagagccttatggt

SEQ ID NO: 23607 - RNA, 21 nt, synthetic construct
  source 1..21: mol_type = other RNA
tgagatatgcccatctcctgc

SEQ ID NO: 23608 - RNA, 21 nt, synthetic construct
  source 1..21: mol_type = other RNA
tgagatcactcacccatcgca

SEQ ID NO: 23609 - RNA, 21 nt, synthetic construct
  source 1..21: mol_type = other RNA
tgagatgtggttttctgcacc

SEQ ID NO: 23610 - RNA, 21 nt, synthetic construct
  source 1..21: mol_type = other RNA
tgagcaagttgcgcagcttgt

SEQ ID NO: 23611 - RNA, 21 nt, synthetic construct
  source 1..21: mol_type = other RNA
tgagcaggaggggaaaagtgc

SEQ ID NO: 23612 - RNA, 21 nt, synthetic construct
  source 1..21: mol_type = other RNA
tgagccattttcaaactcaca

SEQ ID NO: 23613 - RNA, 21 nt, synthetic construct
  source 1..21: mol_type = other RNA
tgagctctctcaggcagtggg

SEQ ID NO: 23614 - RNA, 21 nt, synthetic construct
  source 1..21: mol_type = other RNA
tgagctgcctccaaagccagc

SEQ ID NO: 23615 - RNA, 21 nt, synthetic construct
  source 1..21: mol_type = other RNA
tgagctttgcttgaagtaagc

SEQ ID NO: 23616 - RNA, 21 nt, synthetic construct
  source 1..21: mol_type = other RNA
tgagcttttggtaaatggtct

SEQ ID NO: 23617 - RNA, 21 nt, synthetic construct
  source 1..21: mol_type = other RNA
tgaggaaaagtctggagtatt

SEQ ID NO: 23618 - RNA, 21 nt, synthetic construct
  source 1..21: mol_type = other RNA
tgaggaacctgtggaagagga

SEQ ID NO: 23619 - RNA, 21 nt, synthetic construct
  source 1..21: mol_type = other RNA
tgaggcaccaccttcccagag

SEQ ID NO: 23620 - RNA, 21 nt, synthetic construct
  source 1..21: mol_type = other RNA
tgaggcatcactgccatcaat

SEQ ID NO: 23621 - RNA, 21 nt, synthetic construct
  source 1..21: mol_type = other RNA
tgaggcctgtgatgctgatga

SEQ ID NO: 23622 - RNA, 21 nt, synthetic construct
  source 1..21: mol_type = other RNA
tgaggcctttcagaaagcatc

SEQ ID NO: 23623 - RNA, 21 nt, synthetic construct
  source 1..21: mol_type = other RNA
tgaggcttatgttgcaaaagg

SEQ ID NO: 23624 - RNA, 21 nt, synthetic construct
  source 1..21: mol_type = other RNA
tgagggagatgtgaactctgg

SEQ ID NO: 23625 - RNA, 21 nt, synthetic construct
  source 1..21: mol_type = other RNA
tgagggcaacagactaagtcc

SEQ ID NO: 23626 - RNA, 21 nt, synthetic construct
  source 1..21: mol_type = other RNA
tgagggtttttggaactggag

SEQ ID NO: 23627 - RNA, 21 nt, synthetic construct
  source 1..21: mol_type = other RNA
tgaggtatgcgatgggtgagt

SEQ ID NO: 23628 - RNA, 21 nt, synthetic construct
  source 1..21: mol_type = other RNA
tgaggtgttctgacattggtc

SEQ ID NO: 23629 - RNA, 21 nt, synthetic construct
  source 1..21: mol_type = other RNA
tgagtcctgactttacacaag

SEQ ID NO: 23630 - RNA, 21 nt, synthetic construct
  source 1..21: mol_type = other RNA
tgagtctcgaactcgcttgat

SEQ ID NO: 23631 - RNA, 21 nt, synthetic construct
  source 1..21: mol_type = other RNA
tgagtcttgacaggtgtatcc

SEQ ID NO: 23632 - RNA, 21 nt, synthetic construct
  source 1..21: mol_type = other RNA
tgagtcttgccatagtcagat

SEQ ID NO: 23633 - RNA, 21 nt, synthetic construct
  source 1..21: mol_type = other RNA
tgagtgaggcctgtgatgctg

SEQ ID NO: 23634 - RNA, 21 nt, synthetic construct
  source 1..21: mol_type = other RNA
tgagtgataagaaagaatctg

SEQ ID NO: 23635 - RNA, 21 nt, synthetic construct
  source 1..21: mol_type = other RNA
tgagtgatctcacaggacaac

SEQ ID NO: 23636 - RNA, 21 nt, synthetic construct
  source 1..21: mol_type = other RNA
tgagtgtccttctggggaggg

SEQ ID NO: 23637 - RNA, 21 nt, synthetic construct
  source 1..21: mol_type = other RNA
tgagtgtgacttcctccctgg

SEQ ID NO: 23638 - RNA, 21 nt, synthetic construct
  source 1..21: mol_type = other RNA
tgagttctgtagcccaagaaa

SEQ ID NO: 23639 - RNA, 21 nt, synthetic construct
  source 1..21: mol_type = other RNA
tgagttgtcctgtgagatcac

SEQ ID NO: 23640 - RNA, 21 nt, synthetic construct
  source 1..21: mol_type = other RNA
tgagtttgaaaatggctcagt

SEQ ID NO: 23641 - RNA, 21 nt, synthetic construct
  source 1..21: mol_type = other RNA
tgataagaaagaatctgtgag

SEQ ID NO: 23642 - RNA, 21 nt, synthetic construct
  source 1..21: mol_type = other RNA
tgataatgccagtaaactagc

SEQ ID NO: 23643 - RNA, 21 nt, synthetic construct
  source 1..21: mol_type = other RNA
tgataatgtgcagcaaaagag

SEQ ID NO: 23644 - RNA, 21 nt, synthetic construct
  source 1..21: mol_type = other RNA
tgatacataaccatgcaaatg

SEQ ID NO: 23645 - RNA, 21 nt, synthetic construct
  source 1..21: mol_type = other RNA
tgataccatcacctcccattt

SEQ ID NO: 23646 - RNA, 21 nt, synthetic construct
  source 1..21: mol_type = other RNA
tgatactgaagaattgatggc

SEQ ID NO: 23647 - RNA, 21 nt, synthetic construct
  source 1..21: mol_type = other RNA
tgatagccacaccccagcttt

SEQ ID NO: 23648 - RNA, 21 nt, synthetic construct
  source 1..21: mol_type = other RNA
tgatcagcaaagagaaggatc

SEQ ID NO: 23649 - RNA, 21 nt, synthetic construct
  source 1..21: mol_type = other RNA
tgatcattgttgctttggggg

SEQ ID NO: 23650 - RNA, 21 nt, synthetic construct
  source 1..21: mol_type = other RNA
tgatcccaaagcaagatcttc

SEQ ID NO: 23651 - RNA, 21 nt, synthetic construct
  source 1..21: mol_type = other RNA
tgatccttctctttgctgatc

SEQ ID NO: 23652 - RNA, 21 nt, synthetic construct
  source 1..21: mol_type = other RNA
tgatctcacaggacaactcat

SEQ ID NO: 23653 - RNA, 21 nt, synthetic construct
  source 1..21: mol_type = other RNA
tgatctgaaggagcccagaga

SEQ ID NO: 23654 - RNA, 21 nt, synthetic construct
  source 1..21: mol_type = other RNA
tgatctgccctgaggtatgcg

SEQ ID NO: 23655 - RNA, 21 nt, synthetic construct
  source 1..21: mol_type = other RNA
tgatgagaaacaaagagcaag

SEQ ID NO: 23656 - RNA, 21 nt, synthetic construct
  source 1..21: mol_type = other RNA
tgatgatgctgataatgccag

SEQ ID NO: 23657 - RNA, 21 nt, synthetic construct
  source 1..21: mol_type = other RNA
tgatgcaagttttgggtcttg

SEQ ID NO: 23658 - RNA, 21 nt, synthetic construct
  source 1..21: mol_type = other RNA
tgatgcctcattacgttttag

SEQ ID NO: 23659 - RNA, 21 nt, synthetic construct
  source 1..21: mol_type = other RNA
tgatgctcttttgctgcacat

SEQ ID NO: 23660 - RNA, 21 nt, synthetic construct
  source 1..21: mol_type = other RNA
tgatgctgataatgccagtaa

SEQ ID NO: 23661 - RNA, 21 nt, synthetic construct
  source 1..21: mol_type = other RNA
tgatgctgatgatgctgataa

SEQ ID NO: 23662 - RNA, 21 nt, synthetic construct
  source 1..21: mol_type = other RNA
tgatggaacaggatagaacca

SEQ ID NO: 23663 - RNA, 21 nt, synthetic construct
  source 1..21: mol_type = other RNA
tgatggcagtgatgcctcatt

SEQ ID NO: 23664 - RNA, 21 nt, synthetic construct
  source 1..21: mol_type = other RNA
tgatggtatcaggaatggact

SEQ ID NO: 23665 - RNA, 21 nt, synthetic construct
  source 1..21: mol_type = other RNA
tgatggtggtggtggtgtggt

SEQ ID NO: 23666 - RNA, 21 nt, synthetic construct
  source 1..21: mol_type = other RNA
tgattcaagtgctgtttcaac

SEQ ID NO: 23667 - RNA, 21 nt, synthetic construct
  source 1..21: mol_type = other RNA
tgattcatttcaacttggtac

SEQ ID NO: 23668 - RNA, 21 nt, synthetic construct
  source 1..21: mol_type = other RNA
tgattggagagattgggttga

SEQ ID NO: 23669 - RNA, 21 nt, synthetic construct
  source 1..21: mol_type = other RNA
tgatttcatggtctgactata

SEQ ID NO: 23670 - RNA, 21 nt, synthetic construct
  source 1..21: mol_type = other RNA
tgatttcccatcttgcagatg

SEQ ID NO: 23671 - RNA, 21 nt, synthetic construct
  source 1..21: mol_type = other RNA
tgatttgagagtaagagcctt

SEQ ID NO: 23672 - RNA, 21 nt, synthetic construct
  source 1..21: mol_type = other RNA
tgattttcaccatgaaaacat

SEQ ID NO: 23673 - RNA, 21 nt, synthetic construct
  source 1..21: mol_type = other RNA
tgatttttgttgttgtagttg

SEQ ID NO: 23674 - RNA, 21 nt, synthetic construct
  source 1..21: mol_type = other RNA
tgcaaaaagttcaggatgtgt

SEQ ID NO: 23675 - RNA, 21 nt, synthetic construct
  source 1..21: mol_type = other RNA
tgcaaaaggtgtgagtttgaa

SEQ ID NO: 23676 - RNA, 21 nt, synthetic construct
  source 1..21: mol_type = other RNA
tgcaaaatacaggtttcttgt

SEQ ID NO: 23677 - RNA, 21 nt, synthetic construct
  source 1..21: mol_type = other RNA
tgcaaaatggaggaataaaac

SEQ ID NO: 23678 - RNA, 21 nt, synthetic construct
  source 1..21: mol_type = other RNA
tgcaaacacttggaataccct

SEQ ID NO: 23679 - RNA, 21 nt, synthetic construct
  source 1..21: mol_type = other RNA
tgcaaatgtttttcctgtgcc

SEQ ID NO: 23680 - RNA, 21 nt, synthetic construct
  source 1..21: mol_type = other RNA
tgcaaattgctgctggaacct

SEQ ID NO: 23681 - RNA, 21 nt, synthetic construct
  source 1..21: mol_type = other RNA
tgcaacataagcctcataaac

SEQ ID NO: 23682 - RNA, 21 nt, synthetic construct
  source 1..21: mol_type = other RNA
tgcaagatgggaaatcatatt

SEQ ID NO: 23683 - RNA, 21 nt, synthetic construct
  source 1..21: mol_type = other RNA
tgcaagccacatgcctgtatg

SEQ ID NO: 23684 - RNA, 21 nt, synthetic construct
  source 1..21: mol_type = other RNA
tgcaagctcctggtggcagct

SEQ ID NO: 23685 - RNA, 21 nt, synthetic construct
  source 1..21: mol_type = other RNA
tgcaagctgtgataatgtgca

SEQ ID NO: 23686 - RNA, 21 nt, synthetic construct
  source 1..21: mol_type = other RNA
tgcaagttttgggtcttgttt

SEQ ID NO: 23687 - RNA, 21 nt, synthetic construct
  source 1..21: mol_type = other RNA
tgcaatgctaaatacctgttc

SEQ ID NO: 23688 - RNA, 21 nt, synthetic construct
  source 1..21: mol_type = other RNA
tgcacacagcaccaccagaaa

SEQ ID NO: 23689 - RNA, 21 nt, synthetic construct
  source 1..21: mol_type = other RNA
tgcacaggccaattaaggtgg

SEQ ID NO: 23690 - RNA, 21 nt, synthetic construct
  source 1..21: mol_type = other RNA
tgcacatgagcttttggtaaa

SEQ ID NO: 23691 - RNA, 21 nt, synthetic construct
  source 1..21: mol_type = other RNA
tgcacattatcacagcttgca

SEQ ID NO: 23692 - RNA, 21 nt, synthetic construct
  source 1..21: mol_type = other RNA
tgcaccgcaatggaaacacaa

SEQ ID NO: 23693 - RNA, 21 nt, synthetic construct
  source 1..21: mol_type = other RNA
tgcacctggtgtgagggtttt

SEQ ID NO: 23694 - RNA, 21 nt, synthetic construct
  source 1..21: mol_type = other RNA
tgcacttctccaaaacagacc

SEQ ID NO: 23695 - RNA, 21 nt, synthetic construct
  source 1..21: mol_type = other RNA
tgcacttgatttcatggtctg

SEQ ID NO: 23696 - RNA, 21 nt, synthetic construct
  source 1..21: mol_type = other RNA
tgcagaaaaccacatctcaca

SEQ ID NO: 23697 - RNA, 21 nt, synthetic construct
  source 1..21: mol_type = other RNA
tgcagaaaataacatccaggg

SEQ ID NO: 23698 - RNA, 21 nt, synthetic construct
  source 1..21: mol_type = other RNA
tgcagaacttgatagccacac

SEQ ID NO: 23699 - RNA, 21 nt, synthetic construct
  source 1..21: mol_type = other RNA
tgcagatgtgtaggtaagtgc

SEQ ID NO: 23700 - RNA, 21 nt, synthetic construct
  source 1..21: mol_type = other RNA
tgcagcaaaagagcatcattg

SEQ ID NO: 23701 - RNA, 21 nt, synthetic construct
  source 1..21: mol_type = other RNA
tgcagcagtggtttgtctagt

SEQ ID NO: 23702 - RNA, 21 nt, synthetic construct
  source 1..21: mol_type = other RNA
tgcagcccttctccgatgctt

SEQ ID NO: 23703 - RNA, 21 nt, synthetic construct
  source 1..21: mol_type = other RNA
tgcagctagtttactggcatt

SEQ ID NO: 23704 - RNA, 21 nt, synthetic construct
  source 1..21: mol_type = other RNA
tgcagctggctttggaggcag

SEQ ID NO: 23705 - RNA, 21 nt, synthetic construct
  source 1..21: mol_type = other RNA
tgcaggaaacaagacccaaaa

SEQ ID NO: 23706 - RNA, 21 nt, synthetic construct
  source 1..21: mol_type = other RNA
tgcaggagatgggcatatctc

SEQ ID NO: 23707 - RNA, 21 nt, synthetic construct
  source 1..21: mol_type = other RNA
tgcagggacaatgactgttcc

SEQ ID NO: 23708 - RNA, 21 nt, synthetic construct
  source 1..21: mol_type = other RNA
tgcaggtggattctcttgctt

SEQ ID NO: 23709 - RNA, 21 nt, synthetic construct
  source 1..21: mol_type = other RNA
tgcagtcactgtgtggcacta

SEQ ID NO: 23710 - RNA, 21 nt, synthetic construct
  source 1..21: mol_type = other RNA
tgcagtctgtatgtcattcct

SEQ ID NO: 23711 - RNA, 21 nt, synthetic construct
  source 1..21: mol_type = other RNA
tgcagtgggcctgaaaatcca

SEQ ID NO: 23712 - RNA, 21 nt, synthetic construct
  source 1..21: mol_type = other RNA
tgcagtggtgagtgaggcctg

SEQ ID NO: 23713 - RNA, 21 nt, synthetic construct
  source 1..21: mol_type = other RNA
tgcagttaaagatttcaccag

SEQ ID NO: 23714 - RNA, 21 nt, synthetic construct
  source 1..21: mol_type = other RNA
tgcagttatgtgttgaaaaac

SEQ ID NO: 23715 - RNA, 21 nt, synthetic construct
  source 1..21: mol_type = other RNA
tgcatacaggcatgtggcttg

SEQ ID NO: 23716 - RNA, 21 nt, synthetic construct
  source 1..21: mol_type = other RNA
tgcatacatgtgtagatggat

SEQ ID NO: 23717 - RNA, 21 nt, synthetic construct
  source 1..21: mol_type = other RNA
tgcatcacatgcaatattttc

SEQ ID NO: 23718 - RNA, 21 nt, synthetic construct
  source 1..21: mol_type = other RNA
tgcatccaggttccaccttaa

SEQ ID NO: 23719 - RNA, 21 nt, synthetic construct
  source 1..21: mol_type = other RNA
tgcatctgactatggcaagac

SEQ ID NO: 23720 - RNA, 21 nt, synthetic construct
  source 1..21: mol_type = other RNA
tgcatgcaaaatacaggtttc

SEQ ID NO: 23721 - RNA, 21 nt, synthetic construct
  source 1..21: mol_type = other RNA
tgcatgcacttgatttcatgg

SEQ ID NO: 23722 - RNA, 21 nt, synthetic construct
  source 1..21: mol_type = other RNA
tgcatggttatgtatcaagta

SEQ ID NO: 23723 - RNA, 21 nt, synthetic construct
  source 1..21: mol_type = other RNA
tgcatgtgatgcaagttttgg

SEQ ID NO: 23724 - RNA, 21 nt, synthetic construct
  source 1..21: mol_type = other RNA
tgcattttcttgggctacaga

SEQ ID NO: 23725 - RNA, 21 nt, synthetic construct
  source 1..21: mol_type = other RNA
tgccacacagtgactgcacat

SEQ ID NO: 23726 - RNA, 21 nt, synthetic construct
  source 1..21: mol_type = other RNA
tgccaccaggagcttgcaaat

SEQ ID NO: 23727 - RNA, 21 nt, synthetic construct
  source 1..21: mol_type = other RNA
tgccaccttagagcagcatgc

SEQ ID NO: 23728 - RNA, 21 nt, synthetic construct
  source 1..21: mol_type = other RNA
tgccactaccacaccaccacc

SEQ ID NO: 23729 - RNA, 21 nt, synthetic construct
  source 1..21: mol_type = other RNA
tgccacttggtgtctccattt

SEQ ID NO: 23730 - RNA, 21 nt, synthetic construct
  source 1..21: mol_type = other RNA
tgccagaaatgtactgagaca

SEQ ID NO: 23731 - RNA, 21 nt, synthetic construct
  source 1..21: mol_type = other RNA
tgccagacagaacctctggct

SEQ ID NO: 23732 - RNA, 21 nt, synthetic construct
  source 1..21: mol_type = other RNA
tgccagcagttgatgagaaac

SEQ ID NO: 23733 - RNA, 21 nt, synthetic construct
  source 1..21: mol_type = other RNA
tgccagtaaactagctgcaat

SEQ ID NO: 23734 - RNA, 21 nt, synthetic construct
  source 1..21: mol_type = other RNA
tgccatagtcagatgcacagg

SEQ ID NO: 23735 - RNA, 21 nt, synthetic construct
  source 1..21: mol_type = other RNA
tgccatcaattcttcagtatc

SEQ ID NO: 23736 - RNA, 21 nt, synthetic construct
  source 1..21: mol_type = other RNA
tgccattaacagtcaggctac

SEQ ID NO: 23737 - RNA, 21 nt, synthetic construct
  source 1..21: mol_type = other RNA
tgcccatctcctgcagaaaat

SEQ ID NO: 23738 - RNA, 21 nt, synthetic construct
  source 1..21: mol_type = other RNA
tgcccccaacacagcactatc

SEQ ID NO: 23739 - RNA, 21 nt, synthetic construct
  source 1..21: mol_type = other RNA
tgccctcaacatggttggttc

SEQ ID NO: 23740 - RNA, 21 nt, synthetic construct
  source 1..21: mol_type = other RNA
tgccctgaggtatgcgatggg

SEQ ID NO: 23741 - RNA, 21 nt, synthetic construct
  source 1..21: mol_type = other RNA
tgcccttgattcatttcaact

SEQ ID NO: 23742 - RNA, 21 nt, synthetic construct
  source 1..21: mol_type = other RNA
tgcctaatggtgctacagttt

SEQ ID NO: 23743 - RNA, 21 nt, synthetic construct
  source 1..21: mol_type = other RNA
tgcctcaggtttaccctctat

SEQ ID NO: 23744 - RNA, 21 nt, synthetic construct
  source 1..21: mol_type = other RNA
tgcctcattacgttttagatg

SEQ ID NO: 23745 - RNA, 21 nt, synthetic construct
  source 1..21: mol_type = other RNA
tgcctccaaagccagctgcag

SEQ ID NO: 23746 - RNA, 21 nt, synthetic construct
  source 1..21: mol_type = other RNA
tgcctcttccgtggaacacac

SEQ ID NO: 23747 - RNA, 21 nt, synthetic construct
  source 1..21: mol_type = other RNA
tgcctgaccagggaggaagtc

SEQ ID NO: 23748 - RNA, 21 nt, synthetic construct
  source 1..21: mol_type = other RNA
tgcctgagagagctcatccag

SEQ ID NO: 23749 - RNA, 21 nt, synthetic construct
  source 1..21: mol_type = other RNA
tgcctggggggctcccaaggc

SEQ ID NO: 23750 - RNA, 21 nt, synthetic construct
  source 1..21: mol_type = other RNA
tgcctgtatgcacacagcacc

SEQ ID NO: 23751 - RNA, 21 nt, synthetic construct
  source 1..21: mol_type = other RNA
tgcctgtttatgaggcttatg

SEQ ID NO: 23752 - RNA, 21 nt, synthetic construct
  source 1..21: mol_type = other RNA
tgccttgggagccccccaggc

SEQ ID NO: 23753 - RNA, 21 nt, synthetic construct
  source 1..21: mol_type = other RNA
tgccttgtttttaagtaatac

SEQ ID NO: 23754 - RNA, 21 nt, synthetic construct
  source 1..21: mol_type = other RNA
tgcgatgggtgagtgatctca

SEQ ID NO: 23755 - RNA, 21 nt, synthetic construct
  source 1..21: mol_type = other RNA
tgcgcaacttgctcagcaaag

SEQ ID NO: 23756 - RNA, 21 nt, synthetic construct
  source 1..21: mol_type = other RNA
tgcgcagcttgttgaccagac

SEQ ID NO: 23757 - RNA, 21 nt, synthetic construct
  source 1..21: mol_type = other RNA
tgcggaattgatctgccctga

SEQ ID NO: 23758 - RNA, 21 nt, synthetic construct
  source 1..21: mol_type = other RNA
tgcggtgcagaaaaccacatc

SEQ ID NO: 23759 - RNA, 21 nt, synthetic construct
  source 1..21: mol_type = other RNA
tgcgttttattcctccatttt

SEQ ID NO: 23760 - RNA, 21 nt, synthetic construct
  source 1..21: mol_type = other RNA
tgctaaatacctgttcctttc

SEQ ID NO: 23761 - RNA, 21 nt, synthetic construct
  source 1..21: mol_type = other RNA
tgctaatgcctaatggtgcta

SEQ ID NO: 23762 - RNA, 21 nt, synthetic construct
  source 1..21: mol_type = other RNA
tgctaattaccatgacaagaa

SEQ ID NO: 23763 - RNA, 21 nt, synthetic construct
  source 1..21: mol_type = other RNA
tgctacagtttctgcctcttc

SEQ ID NO: 23764 - RNA, 21 nt, synthetic construct
  source 1..21: mol_type = other RNA
tgctaccaaaaattggtgggt

SEQ ID NO: 23765 - RNA, 21 nt, synthetic construct
  source 1..21: mol_type = other RNA
tgctcagcaaaggtacttgat

SEQ ID NO: 23766 - RNA, 21 nt, synthetic construct
  source 1..21: mol_type = other RNA
tgctcattcagaatctgaagc

SEQ ID NO: 23767 - RNA, 21 nt, synthetic construct
  source 1..21: mol_type = other RNA
tgctccagctgtgttgttttc

SEQ ID NO: 23768 - RNA, 21 nt, synthetic construct
  source 1..21: mol_type = other RNA
tgctccatggtctcaatgatg

SEQ ID NO: 23769 - RNA, 21 nt, synthetic construct
  source 1..21: mol_type = other RNA
tgctcctgttcttgaaagcac

SEQ ID NO: 23770 - RNA, 21 nt, synthetic construct
  source 1..21: mol_type = other RNA
tgctccttgtctcgacccttc

SEQ ID NO: 23771 - RNA, 21 nt, synthetic construct
  source 1..21: mol_type = other RNA
tgctctaaagctggggtgtgg

SEQ ID NO: 23772 - RNA, 21 nt, synthetic construct
  source 1..21: mol_type = other RNA
tgctctaaggtggcatctctt

SEQ ID NO: 23773 - RNA, 21 nt, synthetic construct
  source 1..21: mol_type = other RNA
tgctctttgttgaaaatgaaa

SEQ ID NO: 23774 - RNA, 21 nt, synthetic construct
  source 1..21: mol_type = other RNA
tgctctttgtttctcatcaac

SEQ ID NO: 23775 - RNA, 21 nt, synthetic construct
  source 1..21: mol_type = other RNA
tgctcttttgctgcacattat

SEQ ID NO: 23776 - RNA, 21 nt, synthetic construct
  source 1..21: mol_type = other RNA
tgctgagcaagttgcgcagct

SEQ ID NO: 23777 - RNA, 21 nt, synthetic construct
  source 1..21: mol_type = other RNA
tgctgataatgccagtaaact

SEQ ID NO: 23778 - RNA, 21 nt, synthetic construct
  source 1..21: mol_type = other RNA
tgctgatcattgttgctttgg

SEQ ID NO: 23779 - RNA, 21 nt, synthetic construct
  source 1..21: mol_type = other RNA
tgctgatgatgctgataatgc

SEQ ID NO: 23780 - RNA, 21 nt, synthetic construct
  source 1..21: mol_type = other RNA
tgctgcacattatcacagctt

SEQ ID NO: 23781 - RNA, 21 nt, synthetic construct
  source 1..21: mol_type = other RNA
tgctgcagaacttgatagcca

SEQ ID NO: 23782 - RNA, 21 nt, synthetic construct
  source 1..21: mol_type = other RNA
tgctgcctgtttatgaggctt

SEQ ID NO: 23783 - RNA, 21 nt, synthetic construct
  source 1..21: mol_type = other RNA
tgctgctccatggtctcaatg

SEQ ID NO: 23784 - RNA, 21 nt, synthetic construct
  source 1..21: mol_type = other RNA
tgctgctctaaagctggggtg

SEQ ID NO: 23785 - RNA, 21 nt, synthetic construct
  source 1..21: mol_type = other RNA
tgctgctctaaggtggcatct

SEQ ID NO: 23786 - RNA, 21 nt, synthetic construct
  source 1..21: mol_type = other RNA
tgctgctggaacctgaacaga

SEQ ID NO: 23787 - RNA, 21 nt, synthetic construct
  source 1..21: mol_type = other RNA
tgctgctgttcttgcttctgt

SEQ ID NO: 23788 - RNA, 21 nt, synthetic construct
  source 1..21: mol_type = other RNA
tgctgctgttgctggttttga

SEQ ID NO: 23789 - RNA, 21 nt, synthetic construct
  source 1..21: mol_type = other RNA
tgctggaacctgaacagaatt

SEQ ID NO: 23790 - RNA, 21 nt, synthetic construct
  source 1..21: mol_type = other RNA
tgctggcagttgtcctgtagc

SEQ ID NO: 23791 - RNA, 21 nt, synthetic construct
  source 1..21: mol_type = other RNA
tgctggttttgagggagatgt

SEQ ID NO: 23792 - RNA, 21 nt, synthetic construct
  source 1..21: mol_type = other RNA
tgctgtgtgcatacaggcatg

SEQ ID NO: 23793 - RNA, 21 nt, synthetic construct
  source 1..21: mol_type = other RNA
tgctgtgttgggggcacaaga

SEQ ID NO: 23794 - RNA, 21 nt, synthetic construct
  source 1..21: mol_type = other RNA
tgctgtgtttgctgctgttct

SEQ ID NO: 23795 - RNA, 21 nt, synthetic construct
  source 1..21: mol_type = other RNA
tgctgttcttgcttctgtaag

SEQ ID NO: 23796 - RNA, 21 nt, synthetic construct
  source 1..21: mol_type = other RNA
tgctgttgctggttttgaggg

SEQ ID NO: 23797 - RNA, 21 nt, synthetic construct
  source 1..21: mol_type = other RNA
tgctgtttcaacactggggac

SEQ ID NO: 23798 - RNA, 21 nt, synthetic construct
  source 1..21: mol_type = other RNA
tgcttacttcaagcaaagctc

SEQ ID NO: 23799 - RNA, 21 nt, synthetic construct
  source 1..21: mol_type = other RNA
tgcttagttacctttttccat

SEQ ID NO: 23800 - RNA, 21 nt, synthetic construct
  source 1..21: mol_type = other RNA
tgcttcagatgctgctccatg

SEQ ID NO: 23801 - RNA, 21 nt, synthetic construct
  source 1..21: mol_type = other RNA
tgcttcggggccatccacaag

SEQ ID NO: 23802 - RNA, 21 nt, synthetic construct
  source 1..21: mol_type = other RNA
tgcttctgtaagagatgccac

SEQ ID NO: 23803 - RNA, 21 nt, synthetic construct
  source 1..21: mol_type = other RNA
tgcttctgtgatttgagagta

SEQ ID NO: 23804 - RNA, 21 nt, synthetic construct
  source 1..21: mol_type = other RNA
tgcttctgttctcaataattt

SEQ ID NO: 23805 - RNA, 21 nt, synthetic construct
  source 1..21: mol_type = other RNA
tgcttctttctccccctcctc

SEQ ID NO: 23806 - RNA, 21 nt, synthetic construct
  source 1..21: mol_type = other RNA
tgcttgaagtaagcaccattc

SEQ ID NO: 23807 - RNA, 21 nt, synthetic construct
  source 1..21: mol_type = other RNA
tgcttgaggtgttctgacatt

SEQ ID NO: 23808 - RNA, 21 nt, synthetic construct
  source 1..21: mol_type = other RNA
tgctttcaagaacaggagcag

SEQ ID NO: 23809 - RNA, 21 nt, synthetic construct
  source 1..21: mol_type = other RNA
tgctttcacctggatttcttt

SEQ ID NO: 23810 - RNA, 21 nt, synthetic construct
  source 1..21: mol_type = other RNA
tgctttctgaaaggcctcaga

SEQ ID NO: 23811 - RNA, 21 nt, synthetic construct
  source 1..21: mol_type = other RNA
tgctttgggatcacattattt

SEQ ID NO: 23812 - RNA, 21 nt, synthetic construct
  source 1..21: mol_type = other RNA
tgctttgggggtgaggaaaag

SEQ ID NO: 23813 - RNA, 21 nt, synthetic construct
  source 1..21: mol_type = other RNA
tgcttttgagtgtccttctgg

SEQ ID NO: 23814 - RNA, 21 nt, synthetic construct
  source 1..21: mol_type = other RNA
tgctttttccttctgaaggaa

SEQ ID NO: 23815 - RNA, 21 nt, synthetic construct
  source 1..21: mol_type = other RNA
tggaaaaaacactgtctcaat

SEQ ID NO: 23816 - RNA, 21 nt, synthetic construct
  source 1..21: mol_type = other RNA
tggaaaaaggtaactaagcaa

SEQ ID NO: 23817 - RNA, 21 nt, synthetic construct
  source 1..21: mol_type = other RNA
tggaaaatattgcatgtgatg

SEQ ID NO: 23818 - RNA, 21 nt, synthetic construct
  source 1..21: mol_type = other RNA
tggaaacacaatctggataat

SEQ ID NO: 23819 - RNA, 21 nt, synthetic construct
  source 1..21: mol_type = other RNA
tggaaattccaacatgcctgg

SEQ ID NO: 23820 - RNA, 21 nt, synthetic construct
  source 1..21: mol_type = other RNA
tggaacacacacatggtgaac

SEQ ID NO: 23821 - RNA, 21 nt, synthetic construct
  source 1..21: mol_type = other RNA
tggaacaggatagaaccaacc

SEQ ID NO: 23822 - RNA, 21 nt, synthetic construct
  source 1..21: mol_type = other RNA
tggaacagtcattgtccctgc

SEQ ID NO: 23823 - RNA, 21 nt, synthetic construct
  source 1..21: mol_type = other RNA
tggaacctgaacagaattctt

SEQ ID NO: 23824 - RNA, 21 nt, synthetic construct
  source 1..21: mol_type = other RNA
tggaacctggatgcaagccac

SEQ ID NO: 23825 - RNA, 21 nt, synthetic construct
  source 1..21: mol_type = other RNA
tggaactggagatgttggtcc

SEQ ID NO: 23826 - RNA, 21 nt, synthetic construct
  source 1..21: mol_type = other RNA
tggaagaatgttttcatggtg

SEQ ID NO: 23827 - RNA, 21 nt, synthetic construct
  source 1..21: mol_type = other RNA
tggaagaggaggagggggaga

SEQ ID NO: 23828 - RNA, 21 nt, synthetic construct
  source 1..21: mol_type = other RNA
tggaagcccactgcctgagag

SEQ ID NO: 23829 - RNA, 21 nt, synthetic construct
  source 1..21: mol_type = other RNA
tggaaggtgactctataaaat

SEQ ID NO: 23830 - RNA, 21 nt, synthetic construct
  source 1..21: mol_type = other RNA
tggaataccctctactttctt

SEQ ID NO: 23831 - RNA, 21 nt, synthetic construct
  source 1..21: mol_type = other RNA
tggaataccctgtatgaaggg

SEQ ID NO: 23832 - RNA, 21 nt, synthetic construct
  source 1..21: mol_type = other RNA
tggaatttccagtgtattgtt

SEQ ID NO: 23833 - RNA, 21 nt, synthetic construct
  source 1..21: mol_type = other RNA
tggacattatgagtctcgaac

SEQ ID NO: 23834 - RNA, 21 nt, synthetic construct
  source 1..21: mol_type = other RNA
tggaccaacatctccagttcc

SEQ ID NO: 23835 - RNA, 21 nt, synthetic construct
  source 1..21: mol_type = other RNA
tggacttagtctgttgccctc

SEQ ID NO: 23836 - RNA, 21 nt, synthetic construct
  source 1..21: mol_type = other RNA
tggagaaagacgtaacttcgg

SEQ ID NO: 23837 - RNA, 21 nt, synthetic construct
  source 1..21: mol_type = other RNA
tggagaagtgcacctggtgtg

SEQ ID NO: 23838 - RNA, 21 nt, synthetic construct
  source 1..21: mol_type = other RNA
tggagacaccaagtggcactc

SEQ ID NO: 23839 - RNA, 21 nt, synthetic construct
  source 1..21: mol_type = other RNA
tggagagattgggttgatact

SEQ ID NO: 23840 - RNA, 21 nt, synthetic construct
  source 1..21: mol_type = other RNA
tggagagctacaggacaactg

SEQ ID NO: 23841 - RNA, 21 nt, synthetic construct
  source 1..21: mol_type = other RNA
tggagatgttggtccactgta

SEQ ID NO: 23842 - RNA, 21 nt, synthetic construct
  source 1..21: mol_type = other RNA
tggagcacaagtcacaaatgt

SEQ ID NO: 23843 - RNA, 21 nt, synthetic construct
  source 1..21: mol_type = other RNA
tggagcagcatctgaagcagt

SEQ ID NO: 23844 - RNA, 21 nt, synthetic construct
  source 1..21: mol_type = other RNA
tggagctttgtagccagaggt

SEQ ID NO: 23845 - RNA, 21 nt, synthetic construct
  source 1..21: mol_type = other RNA
tggaggaagtacagaatataa

SEQ ID NO: 23846 - RNA, 21 nt, synthetic construct
  source 1..21: mol_type = other RNA
tggaggaataaaacgcacagt

SEQ ID NO: 23847 - RNA, 21 nt, synthetic construct
  source 1..21: mol_type = other RNA
tggaggcagctcagagttaga

SEQ ID NO: 23848 - RNA, 21 nt, synthetic construct
  source 1..21: mol_type = other RNA
tggaggtcatttgattggaga

SEQ ID NO: 23849 - RNA, 21 nt, synthetic construct
  source 1..21: mol_type = other RNA
tggagtatttcctctttattc

SEQ ID NO: 23850 - RNA, 21 nt, synthetic construct
  source 1..21: mol_type = other RNA
tggagttttagaagaacacca

SEQ ID NO: 23851 - RNA, 21 nt, synthetic construct
  source 1..21: mol_type = other RNA
tggataatattgagacagtgt

SEQ ID NO: 23852 - RNA, 21 nt, synthetic construct
  source 1..21: mol_type = other RNA
tggatacacctgtcaagactc

SEQ ID NO: 23853 - RNA, 21 nt, synthetic construct
  source 1..21: mol_type = other RNA
tggatgagctctctcaggcag

SEQ ID NO: 23854 - RNA, 21 nt, synthetic construct
  source 1..21: mol_type = other RNA
tggatgcaagccacatgcctg

SEQ ID NO: 23855 - RNA, 21 nt, synthetic construct
  source 1..21: mol_type = other RNA
tggatggccccgaagcaagcc

SEQ ID NO: 23856 - RNA, 21 nt, synthetic construct
  source 1..21: mol_type = other RNA
tggatgttattttctgcagga

SEQ ID NO: 23857 - RNA, 21 nt, synthetic construct
  source 1..21: mol_type = other RNA
tggattaggactctgggaagg

SEQ ID NO: 23858 - RNA, 21 nt, synthetic construct
  source 1..21: mol_type = other RNA
tggattctcttgcttagttac

SEQ ID NO: 23859 - RNA, 21 nt, synthetic construct
  source 1..21: mol_type = other RNA
tggattgaattgaaggcccct

SEQ ID NO: 23860 - RNA, 21 nt, synthetic construct
  source 1..21: mol_type = other RNA
tggatttctttcttggcttac

SEQ ID NO: 23861 - RNA, 21 nt, synthetic construct
  source 1..21: mol_type = other RNA
tggattttcaggcccactgca

SEQ ID NO: 23862 - RNA, 21 nt, synthetic construct
  source 1..21: mol_type = other RNA
tggcaaatgggaggtgatggt

SEQ ID NO: 23863 - RNA, 21 nt, synthetic construct
  source 1..21: mol_type = other RNA
tggcaagactcagtttggggt

SEQ ID NO: 23864 - RNA, 21 nt, synthetic construct
  source 1..21: mol_type = other RNA
tggcactagatttcattttca

SEQ ID NO: 23865 - RNA, 21 nt, synthetic construct
  source 1..21: mol_type = other RNA
tggcactctttcaaaagttat

SEQ ID NO: 23866 - RNA, 21 nt, synthetic construct
  source 1..21: mol_type = other RNA
tggcacttacctacacatctg

SEQ ID NO: 23867 - RNA, 21 nt, synthetic construct
  source 1..21: mol_type = other RNA
tggcagaaaaggaatccttag

SEQ ID NO: 23868 - RNA, 21 nt, synthetic construct
  source 1..21: mol_type = other RNA
tggcagctctgaacggtattt

SEQ ID NO: 23869 - RNA, 21 nt, synthetic construct
  source 1..21: mol_type = other RNA
tggcagtgatgcctcattacg

SEQ ID NO: 23870 - RNA, 21 nt, synthetic construct
  source 1..21: mol_type = other RNA
tggcagttgtcctgtagctct

SEQ ID NO: 23871 - RNA, 21 nt, synthetic construct
  source 1..21: mol_type = other RNA
tggcatctcttacagaagcaa

SEQ ID NO: 23872 - RNA, 21 nt, synthetic construct
  source 1..21: mol_type = other RNA
tggcattatcagcatcatcag

SEQ ID NO: 23873 - RNA, 21 nt, synthetic construct
  source 1..21: mol_type = other RNA
tggcatttatgtgagatgtgg

SEQ ID NO: 23874 - RNA, 21 nt, synthetic construct
  source 1..21: mol_type = other RNA
tggccaaagaatgatccttct

SEQ ID NO: 23875 - RNA, 21 nt, synthetic construct
  source 1..21: mol_type = other RNA
tggccagactaaagtggaaga

SEQ ID NO: 23876 - RNA, 21 nt, synthetic construct
  source 1..21: mol_type = other RNA
tggccccgaagcaagcctgat

SEQ ID NO: 23877 - RNA, 21 nt, synthetic construct
  source 1..21: mol_type = other RNA
tggccctgacatttcaacttt

SEQ ID NO: 23878 - RNA, 21 nt, synthetic construct
  source 1..21: mol_type = other RNA
tggcctgtgcatctgactatg

SEQ ID NO: 23879 - RNA, 21 nt, synthetic construct
  source 1..21: mol_type = other RNA
tggcgtgaaactgcttcagat

SEQ ID NO: 23880 - RNA, 21 nt, synthetic construct
  source 1..21: mol_type = other RNA
tggctacaaagctccagaatg

SEQ ID NO: 23881 - RNA, 21 nt, synthetic construct
  source 1..21: mol_type = other RNA
tggctatcaagttctgcagca

SEQ ID NO: 23882 - RNA, 21 nt, synthetic construct
  source 1..21: mol_type = other RNA
tggctcagtctctgaagcctg

SEQ ID NO: 23883 - RNA, 21 nt, synthetic construct
  source 1..21: mol_type = other RNA
tggcttaccccgaagttacgt

SEQ ID NO: 23884 - RNA, 21 nt, synthetic construct
  source 1..21: mol_type = other RNA
tggcttcccttcatacagggt

SEQ ID NO: 23885 - RNA, 21 nt, synthetic construct
  source 1..21: mol_type = other RNA
tggcttgcatccaggttccac

SEQ ID NO: 23886 - RNA, 21 nt, synthetic construct
  source 1..21: mol_type = other RNA
tggctttggaggcagctcaga

SEQ ID NO: 23887 - RNA, 21 nt, synthetic construct
  source 1..21: mol_type = other RNA
tgggaaatcatattgagtctt

SEQ ID NO: 23888 - RNA, 21 nt, synthetic construct
  source 1..21: mol_type = other RNA
tgggaaggtggtgcctcaggt

SEQ ID NO: 23889 - RNA, 21 nt, synthetic construct
  source 1..21: mol_type = other RNA
tgggaatctgctctttgttga

SEQ ID NO: 23890 - RNA, 21 nt, synthetic construct
  source 1..21: mol_type = other RNA
tgggactgcccttgattcatt

SEQ ID NO: 23891 - RNA, 21 nt, synthetic construct
  source 1..21: mol_type = other RNA
tgggactggaggaagtacaga

SEQ ID NO: 23892 - RNA, 21 nt, synthetic construct
  source 1..21: mol_type = other RNA
tgggagccccccaggcatgtt

SEQ ID NO: 23893 - RNA, 21 nt, synthetic construct
  source 1..21: mol_type = other RNA
tgggaggtgatggtatcagga

SEQ ID NO: 23894 - RNA, 21 nt, synthetic construct
  source 1..21: mol_type = other RNA
tgggatcacattatttggaaa

SEQ ID NO: 23895 - RNA, 21 nt, synthetic construct
  source 1..21: mol_type = other RNA
tgggatggttgtgtttgtgct

SEQ ID NO: 23896 - RNA, 21 nt, synthetic construct
  source 1..21: mol_type = other RNA
tgggattccgcttggtgaaaa

SEQ ID NO: 23897 - RNA, 21 nt, synthetic construct
  source 1..21: mol_type = other RNA
tgggcatatctcaaaaactga

SEQ ID NO: 23898 - RNA, 21 nt, synthetic construct
  source 1..21: mol_type = other RNA
tgggcctgaaaatccagagct

SEQ ID NO: 23899 - RNA, 21 nt, synthetic construct
  source 1..21: mol_type = other RNA
tgggctacagaactcacagat

SEQ ID NO: 23900 - RNA, 21 nt, synthetic construct
  source 1..21: mol_type = other RNA
tgggctccttcagatcaagaa

SEQ ID NO: 23901 - RNA, 21 nt, synthetic construct
  source 1..21: mol_type = other RNA
tgggcttccattctggagctt

SEQ ID NO: 23902 - RNA, 21 nt, synthetic construct
  source 1..21: mol_type = other RNA
tggggacataagtttttcagt

SEQ ID NO: 23903 - RNA, 21 nt, synthetic construct
  source 1..21: mol_type = other RNA
tggggaggggtctgagtgtga

SEQ ID NO: 23904 - RNA, 21 nt, synthetic construct
  source 1..21: mol_type = other RNA
tgggggcacaagatctcgtgt

SEQ ID NO: 23905 - RNA, 21 nt, synthetic construct
  source 1..21: mol_type = other RNA
tggggggctcccaaggcaagc

SEQ ID NO: 23906 - RNA, 21 nt, synthetic construct
  source 1..21: mol_type = other RNA
tgggggtgaggaaaagtctgg

SEQ ID NO: 23907 - RNA, 21 nt, synthetic construct
  source 1..21: mol_type = other RNA
tggggtagtggtggtgttctt

SEQ ID NO: 23908 - RNA, 21 nt, synthetic construct
  source 1..21: mol_type = other RNA
tggggtgtggctatcaagttc

SEQ ID NO: 23909 - RNA, 21 nt, synthetic construct
  source 1..21: mol_type = other RNA
tggggttgctgtgtttgctgc

SEQ ID NO: 23910 - RNA, 21 nt, synthetic construct
  source 1..21: mol_type = other RNA
tgggtcttgtttcctgcaaaa

SEQ ID NO: 23911 - RNA, 21 nt, synthetic construct
  source 1..21: mol_type = other RNA
tgggtgagtgatctcacagga

SEQ ID NO: 23912 - RNA, 21 nt, synthetic construct
  source 1..21: mol_type = other RNA
tgggtgtaagcttgccttggg

SEQ ID NO: 23913 - RNA, 21 nt, synthetic construct
  source 1..21: mol_type = other RNA
tgggttatgcttgaggtgttc

SEQ ID NO: 23914 - RNA, 21 nt, synthetic construct
  source 1..21: mol_type = other RNA
tgggttgatactgaagaattg

SEQ ID NO: 23915 - RNA, 21 nt, synthetic construct
  source 1..21: mol_type = other RNA
tggtaaatggtctgttttgga

SEQ ID NO: 23916 - RNA, 21 nt, synthetic construct
  source 1..21: mol_type = other RNA
tggtaattagcacttttcccc

SEQ ID NO: 23917 - RNA, 21 nt, synthetic construct
  source 1..21: mol_type = other RNA
tggtacatttgtgacttgtgc

SEQ ID NO: 23918 - RNA, 21 nt, synthetic construct
  source 1..21: mol_type = other RNA
tggtagcagtggagagctaca

SEQ ID NO: 23919 - RNA, 21 nt, synthetic construct
  source 1..21: mol_type = other RNA
tggtagtggcagaaaaggaat

SEQ ID NO: 23920 - RNA, 21 nt, synthetic construct
  source 1..21: mol_type = other RNA
tggtatcaggaatggacttag

SEQ ID NO: 23921 - RNA, 21 nt, synthetic construct
  source 1..21: mol_type = other RNA
tggtcaaataacgacttggcg

SEQ ID NO: 23922 - RNA, 21 nt, synthetic construct
  source 1..21: mol_type = other RNA
tggtcaacaagctgcgcaact

SEQ ID NO: 23923 - RNA, 21 nt, synthetic construct
  source 1..21: mol_type = other RNA
tggtcaggcacaggaaaaaca

SEQ ID NO: 23924 - RNA, 21 nt, synthetic construct
  source 1..21: mol_type = other RNA
tggtccactgtaccttgggac

SEQ ID NO: 23925 - RNA, 21 nt, synthetic construct
  source 1..21: mol_type = other RNA
tggtctcaatgatgctctttt

SEQ ID NO: 23926 - RNA, 21 nt, synthetic construct
  source 1..21: mol_type = other RNA
tggtctgactataaggggaat

SEQ ID NO: 23927 - RNA, 21 nt, synthetic construct
  source 1..21: mol_type = other RNA
tggtctgttttggagaagtgc

SEQ ID NO: 23928 - RNA, 21 nt, synthetic construct
  source 1..21: mol_type = other RNA
tggtcttgtttcaatttcttg

SEQ ID NO: 23929 - RNA, 21 nt, synthetic construct
  source 1..21: mol_type = other RNA
tggtcttgttttctcagaaca

SEQ ID NO: 23930 - RNA, 21 nt, synthetic construct
  source 1..21: mol_type = other RNA
tggtgaaaacgaggggccttc

SEQ ID NO: 23931 - RNA, 21 nt, synthetic construct
  source 1..21: mol_type = other RNA
tggtgaaaatcagtattcaaa

SEQ ID NO: 23932 - RNA, 21 nt, synthetic construct
  source 1..21: mol_type = other RNA
tggtgaaatctttaactgcat

SEQ ID NO: 23933 - RNA, 21 nt, synthetic construct
  source 1..21: mol_type = other RNA
tggtgaactcctggaaaaaac

SEQ ID NO: 23934 - RNA, 21 nt, synthetic construct
  source 1..21: mol_type = other RNA
tggtgaagaattctgttcagg

SEQ ID NO: 23935 - RNA, 21 nt, synthetic construct
  source 1..21: mol_type = other RNA
tggtgagtgaggcctgtgatg

SEQ ID NO: 23936 - RNA, 21 nt, synthetic construct
  source 1..21: mol_type = other RNA
tggtgcctcaggtttaccctc

SEQ ID NO: 23937 - RNA, 21 nt, synthetic construct
  source 1..21: mol_type = other RNA
tggtgctacagtttctgcctc

SEQ ID NO: 23938 - RNA, 21 nt, synthetic construct
  source 1..21: mol_type = other RNA
tggtgctgtgtgcatacaggc

SEQ ID NO: 23939 - RNA, 21 nt, synthetic construct
  source 1..21: mol_type = other RNA
tggtgcttacttcaagcaaag

SEQ ID NO: 23940 - RNA, 21 nt, synthetic construct
  source 1..21: mol_type = other RNA
tggtggagttttagaagaaca

SEQ ID NO: 23941 - RNA, 21 nt, synthetic construct
  source 1..21: mol_type = other RNA
tggtggcagctctgaacggta

SEQ ID NO: 23942 - RNA, 21 nt, synthetic construct
  source 1..21: mol_type = other RNA
tggtgggttatgcttgaggtg

SEQ ID NO: 23943 - RNA, 21 nt, synthetic construct
  source 1..21: mol_type = other RNA
tggtggtgctgtgtgcataca

SEQ ID NO: 23944 - RNA, 21 nt, synthetic construct
  source 1..21: mol_type = other RNA
tggtggtggtggtgtggtagt

SEQ ID NO: 23945 - RNA, 21 nt, synthetic construct
  source 1..21: mol_type = other RNA
tggtggtggtgtggtagtggc

SEQ ID NO: 23946 - RNA, 21 nt, synthetic construct
  source 1..21: mol_type = other RNA
tggtggtgtggtagtggcaga

SEQ ID NO: 23947 - RNA, 21 nt, synthetic construct
  source 1..21: mol_type = other RNA
tggtggtgttcttctaaaact

SEQ ID NO: 23948 - RNA, 21 nt, synthetic construct
  source 1..21: mol_type = other RNA
tggtgtctccatttacttctg

SEQ ID NO: 23949 - RNA, 21 nt, synthetic construct
  source 1..21: mol_type = other RNA
tggtgtcttttctgaagaagt

SEQ ID NO: 23950 - RNA, 21 nt, synthetic construct
  source 1..21: mol_type = other RNA
tggtgtgagggtttttggaac

SEQ ID NO: 23951 - RNA, 21 nt, synthetic construct
  source 1..21: mol_type = other RNA
tggtgtggtagtggcagaaaa

SEQ ID NO: 23952 - RNA, 21 nt, synthetic construct
  source 1..21: mol_type = other RNA
tggtgttcttctaaaactcca

SEQ ID NO: 23953 - RNA, 21 nt, synthetic construct
  source 1..21: mol_type = other RNA
tggttatgtatcaagtacctt

SEQ ID NO: 23954 - RNA, 21 nt, synthetic construct
  source 1..21: mol_type = other RNA
tggttccctggatgttatttt

SEQ ID NO: 23955 - RNA, 21 nt, synthetic construct
  source 1..21: mol_type = other RNA
tggttctatcctgttccatca

SEQ ID NO: 23956 - RNA, 21 nt, synthetic construct
  source 1..21: mol_type = other RNA
tggttgactgctttcacctgg

SEQ ID NO: 23957 - RNA, 21 nt, synthetic construct
  source 1..21: mol_type = other RNA
tggttggggtagtggtggtgt

SEQ ID NO: 23958 - RNA, 21 nt, synthetic construct
  source 1..21: mol_type = other RNA
tggttggtgtcttttctgaag

SEQ ID NO: 23959 - RNA, 21 nt, synthetic construct
  source 1..21: mol_type = other RNA
tggttggttctatcctgttcc

SEQ ID NO: 23960 - RNA, 21 nt, synthetic construct
  source 1..21: mol_type = other RNA
tggttgtgtttgtgctgcctg

SEQ ID NO: 23961 - RNA, 21 nt, synthetic construct
  source 1..21: mol_type = other RNA
tggtttcagatagtgctgtgt

SEQ ID NO: 23962 - RNA, 21 nt, synthetic construct
  source 1..21: mol_type = other RNA
tggtttctatttttatatccc

SEQ ID NO: 23963 - RNA, 21 nt, synthetic construct
  source 1..21: mol_type = other RNA
tggtttctgaaaggaacaggt

SEQ ID NO: 23964 - RNA, 21 nt, synthetic construct
  source 1..21: mol_type = other RNA
tggtttgtctagtcaaaactg

SEQ ID NO: 23965 - RNA, 21 nt, synthetic construct
  source 1..21: mol_type = other RNA
tggttttctgcaccgcaatgg

SEQ ID NO: 23966 - RNA, 21 nt, synthetic construct
  source 1..21: mol_type = other RNA
tggttttgagggagatgtgaa

SEQ ID NO: 23967 - RNA, 21 nt, synthetic construct
  source 1..21: mol_type = other RNA
tgtaaagtcaggactcacacg

SEQ ID NO: 23968 - RNA, 21 nt, synthetic construct
  source 1..21: mol_type = other RNA
tgtaagagatgccaccttaga

SEQ ID NO: 23969 - RNA, 21 nt, synthetic construct
  source 1..21: mol_type = other RNA
tgtaagcttgccttgggagcc

SEQ ID NO: 23970 - RNA, 21 nt, synthetic construct
  source 1..21: mol_type = other RNA
tgtaatttttgctgctgttgc

SEQ ID NO: 23971 - RNA, 21 nt, synthetic construct
  source 1..21: mol_type = other RNA
tgtaccaagttgaaatgaatc

SEQ ID NO: 23972 - RNA, 21 nt, synthetic construct
  source 1..21: mol_type = other RNA
tgtaccttgggactgcccttg

SEQ ID NO: 23973 - RNA, 21 nt, synthetic construct
  source 1..21: mol_type = other RNA
tgtacttcctccagtcccatt

SEQ ID NO: 23974 - RNA, 21 nt, synthetic construct
  source 1..21: mol_type = other RNA
tgtagaactgaagcttgttgt

SEQ ID NO: 23975 - RNA, 21 nt, synthetic construct
  source 1..21: mol_type = other RNA
tgtagatggattaggactctg

SEQ ID NO: 23976 - RNA, 21 nt, synthetic construct
  source 1..21: mol_type = other RNA
tgtagcaccattaggcattag

SEQ ID NO: 23977 - RNA, 21 nt, synthetic construct
  source 1..21: mol_type = other RNA
tgtagccagaggttctgtctg

SEQ ID NO: 23978 - RNA, 21 nt, synthetic construct
  source 1..21: mol_type = other RNA
tgtagcccaagaaaatgcagt

SEQ ID NO: 23979 - RNA, 21 nt, synthetic construct
  source 1..21: mol_type = other RNA
tgtagctctccactgctacca

SEQ ID NO: 23980 - RNA, 21 nt, synthetic construct
  source 1..21: mol_type = other RNA
tgtaggtaagtgccagaaatg

SEQ ID NO: 23981 - RNA, 21 nt, synthetic construct
  source 1..21: mol_type = other RNA
tgtagtctgttctttattctc

SEQ ID NO: 23982 - RNA, 21 nt, synthetic construct
  source 1..21: mol_type = other RNA
tgtagttgttctggtttctga

SEQ ID NO: 23983 - RNA, 21 nt, synthetic construct
  source 1..21: mol_type = other RNA
tgtatcaagtacctttgctga

SEQ ID NO: 23984 - RNA, 21 nt, synthetic construct
  source 1..21: mol_type = other RNA
tgtatgaagggaagccagaat

SEQ ID NO: 23985 - RNA, 21 nt, synthetic construct
  source 1..21: mol_type = other RNA
tgtatgcacacagcaccacca

SEQ ID NO: 23986 - RNA, 21 nt, synthetic construct
  source 1..21: mol_type = other RNA
tgtatgcagcccttctccgat

SEQ ID NO: 23987 - RNA, 21 nt, synthetic construct
  source 1..21: mol_type = other RNA
tgtatgtcattcctgttcaca

SEQ ID NO: 23988 - RNA, 21 nt, synthetic construct
  source 1..21: mol_type = other RNA
tgtattacttaaaaacaaggc

SEQ ID NO: 23989 - RNA, 21 nt, synthetic construct
  source 1..21: mol_type = other RNA
tgtattgtttgaacaagaaac

SEQ ID NO: 23990 - RNA, 21 nt, synthetic construct
  source 1..21: mol_type = other RNA
tgtattgtttggaggtcattt

SEQ ID NO: 23991 - RNA, 21 nt, synthetic construct
  source 1..21: mol_type = other RNA
tgtattttgcatgcacttgat

SEQ ID NO: 23992 - RNA, 21 nt, synthetic construct
  source 1..21: mol_type = other RNA
tgtcaagactcaatatgattt

SEQ ID NO: 23993 - RNA, 21 nt, synthetic construct
  source 1..21: mol_type = other RNA
tgtcagaacacctcaagcata

SEQ ID NO: 23994 - RNA, 21 nt, synthetic construct
  source 1..21: mol_type = other RNA
tgtcagggccagtcacagttt

SEQ ID NO: 23995 - RNA, 21 nt, synthetic construct
  source 1..21: mol_type = other RNA
tgtcatggtaattagcacttt

SEQ ID NO: 23996 - RNA, 21 nt, synthetic construct
  source 1..21: mol_type = other RNA
tgtcattcctgttcacacaat

SEQ ID NO: 23997 - RNA, 21 nt, synthetic construct
  source 1..21: mol_type = other RNA
tgtccaaatgggactggagga

SEQ ID NO: 23998 - RNA, 21 nt, synthetic construct
  source 1..21: mol_type = other RNA
tgtccccagtgttgaaacagc

SEQ ID NO: 23999 - RNA, 21 nt, synthetic construct
  source 1..21: mol_type = other RNA
tgtccctgcagtctgtatgtc

SEQ ID NO: 24000 - RNA, 21 nt, synthetic construct
  source 1..21: mol_type = other RNA
tgtcctgtagctctccactgc

SEQ ID NO: 24001 - RNA, 21 nt, synthetic construct
  source 1..21: mol_type = other RNA
tgtcctgtgagatcactcacc

SEQ ID NO: 24002 - RNA, 21 nt, synthetic construct
  source 1..21: mol_type = other RNA
tgtccttctggggaggggtct

SEQ ID NO: 24003 - RNA, 21 nt, synthetic construct
  source 1..21: mol_type = other RNA
tgtctagtcaaaactgtgact

SEQ ID NO: 24004 - RNA, 21 nt, synthetic construct
  source 1..21: mol_type = other RNA
tgtctcaatattatccagatt

SEQ ID NO: 24005 - RNA, 21 nt, synthetic construct
  source 1..21: mol_type = other RNA
tgtctcagtacatttctggca

SEQ ID NO: 24006 - RNA, 21 nt, synthetic construct
  source 1..21: mol_type = other RNA
tgtctccatttacttctggat

SEQ ID NO: 24007 - RNA, 21 nt, synthetic construct
  source 1..21: mol_type = other RNA
tgtctccgatttgagtgataa

SEQ ID NO: 24008 - RNA, 21 nt, synthetic construct
  source 1..21: mol_type = other RNA
tgtctcgacccttcagaatct

SEQ ID NO: 24009 - RNA, 21 nt, synthetic construct
  source 1..21: mol_type = other RNA
tgtctggcaaatgggaggtga

SEQ ID NO: 24010 - RNA, 21 nt, synthetic construct
  source 1..21: mol_type = other RNA
tgtctggtcaacaagctgcgc

SEQ ID NO: 24011 - RNA, 21 nt, synthetic construct
  source 1..21: mol_type = other RNA
tgtcttttctgaagaagttgt

SEQ ID NO: 24012 - RNA, 21 nt, synthetic construct
  source 1..21: mol_type = other RNA
tgtgaacaggaatgacataca

SEQ ID NO: 24013 - RNA, 21 nt, synthetic construct
  source 1..21: mol_type = other RNA
tgtgaactctgggatggttgt

SEQ ID NO: 24014 - RNA, 21 nt, synthetic construct
  source 1..21: mol_type = other RNA
tgtgaagaagatcttgctttg

SEQ ID NO: 24015 - RNA, 21 nt, synthetic construct
  source 1..21: mol_type = other RNA
tgtgactggccctgacatttc

SEQ ID NO: 24016 - RNA, 21 nt, synthetic construct
  source 1..21: mol_type = other RNA
tgtgacttcctccctggtcag

SEQ ID NO: 24017 - RNA, 21 nt, synthetic construct
  source 1..21: mol_type = other RNA
tgtgacttctgctcctgttct

SEQ ID NO: 24018 - RNA, 21 nt, synthetic construct
  source 1..21: mol_type = other RNA
tgtgacttgtgctccagctgt

SEQ ID NO: 24019 - RNA, 21 nt, synthetic construct
  source 1..21: mol_type = other RNA
tgtgagatcactcacccatcg

SEQ ID NO: 24020 - RNA, 21 nt, synthetic construct
  source 1..21: mol_type = other RNA
tgtgagatgtggttttctgca

SEQ ID NO: 24021 - RNA, 21 nt, synthetic construct
  source 1..21: mol_type = other RNA
tgtgagggtttttggaactgg

SEQ ID NO: 24022 - RNA, 21 nt, synthetic construct
  source 1..21: mol_type = other RNA
tgtgagtcctgactttacaca

SEQ ID NO: 24023 - RNA, 21 nt, synthetic construct
  source 1..21: mol_type = other RNA
tgtgagttctgtagcccaaga

SEQ ID NO: 24024 - RNA, 21 nt, synthetic construct
  source 1..21: mol_type = other RNA
tgtgagtttgaaaatggctca

SEQ ID NO: 24025 - RNA, 21 nt, synthetic construct
  source 1..21: mol_type = other RNA
tgtgataatgtgcagcaaaag

SEQ ID NO: 24026 - RNA, 21 nt, synthetic construct
  source 1..21: mol_type = other RNA
tgtgatcccaaagcaagatct

SEQ ID NO: 24027 - RNA, 21 nt, synthetic construct
  source 1..21: mol_type = other RNA
tgtgatgcaagttttgggtct

SEQ ID NO: 24028 - RNA, 21 nt, synthetic construct
  source 1..21: mol_type = other RNA
tgtgatgctgatgatgctgat

SEQ ID NO: 24029 - RNA, 21 nt, synthetic construct
  source 1..21: mol_type = other RNA
tgtgatggtggtggtggtgtg

SEQ ID NO: 24030 - RNA, 21 nt, synthetic construct
  source 1..21: mol_type = other RNA
tgtgatttgagagtaagagcc

SEQ ID NO: 24031 - RNA, 21 nt, synthetic construct
  source 1..21: mol_type = other RNA
tgtgcagcaaaagagcatcat

SEQ ID NO: 24032 - RNA, 21 nt, synthetic construct
  source 1..21: mol_type = other RNA
tgtgcagtcactgtgtggcac

SEQ ID NO: 24033 - RNA, 21 nt, synthetic construct
  source 1..21: mol_type = other RNA
tgtgcatacaggcatgtggct

SEQ ID NO: 24034 - RNA, 21 nt, synthetic construct
  source 1..21: mol_type = other RNA
tgtgcatctgactatggcaag

SEQ ID NO: 24035 - RNA, 21 nt, synthetic construct
  source 1..21: mol_type = other RNA
tgtgcccccaacacagcacta

SEQ ID NO: 24036 - RNA, 21 nt, synthetic construct
  source 1..21: mol_type = other RNA
tgtgcctgaccagggaggaag

SEQ ID NO: 24037 - RNA, 21 nt, synthetic construct
  source 1..21: mol_type = other RNA
tgtgcggaattgatctgccct

SEQ ID NO: 24038 - RNA, 21 nt, synthetic construct
  source 1..21: mol_type = other RNA
tgtgcgttttattcctccatt

SEQ ID NO: 24039 - RNA, 21 nt, synthetic construct
  source 1..21: mol_type = other RNA
tgtgctccagctgtgttgttt

SEQ ID NO: 24040 - RNA, 21 nt, synthetic construct
  source 1..21: mol_type = other RNA
tgtgctgcctgtttatgaggc

SEQ ID NO: 24041 - RNA, 21 nt, synthetic construct
  source 1..21: mol_type = other RNA
tgtggaagaggaggaggggga

SEQ ID NO: 24042 - RNA, 21 nt, synthetic construct
  source 1..21: mol_type = other RNA
tgtggatggccccgaagcaag

SEQ ID NO: 24043 - RNA, 21 nt, synthetic construct
  source 1..21: mol_type = other RNA
tgtggcactagatttcatttt

SEQ ID NO: 24044 - RNA, 21 nt, synthetic construct
  source 1..21: mol_type = other RNA
tgtggctatcaagttctgcag

SEQ ID NO: 24045 - RNA, 21 nt, synthetic construct
  source 1..21: mol_type = other RNA
tgtggcttgcatccaggttcc

SEQ ID NO: 24046 - RNA, 21 nt, synthetic construct
  source 1..21: mol_type = other RNA
tgtggtagtggcagaaaagga

SEQ ID NO: 24047 - RNA, 21 nt, synthetic construct
  source 1..21: mol_type = other RNA
tgtggttccctggatgttatt

SEQ ID NO: 24048 - RNA, 21 nt, synthetic construct
  source 1..21: mol_type = other RNA
tgtggttttctgcaccgcaat

SEQ ID NO: 24049 - RNA, 21 nt, synthetic construct
  source 1..21: mol_type = other RNA
tgtgtaaagtcaggactcaca

SEQ ID NO: 24050 - RNA, 21 nt, synthetic construct
  source 1..21: mol_type = other RNA
tgtgtagatggattaggactc

SEQ ID NO: 24051 - RNA, 21 nt, synthetic construct
  source 1..21: mol_type = other RNA
tgtgtaggtaagtgccagaaa

SEQ ID NO: 24052 - RNA, 21 nt, synthetic construct
  source 1..21: mol_type = other RNA
tgtgtagtctgttctttattc

SEQ ID NO: 24053 - RNA, 21 nt, synthetic construct
  source 1..21: mol_type = other RNA
tgtgtattgtttgaacaagaa

SEQ ID NO: 24054 - RNA, 21 nt, synthetic construct
  source 1..21: mol_type = other RNA
tgtgtctcagtacatttctgg

SEQ ID NO: 24055 - RNA, 21 nt, synthetic construct
  source 1..21: mol_type = other RNA
tgtgtgaacaggaatgacata

SEQ ID NO: 24056 - RNA, 21 nt, synthetic construct
  source 1..21: mol_type = other RNA
tgtgtgcatacaggcatgtgg

SEQ ID NO: 24057 - RNA, 21 nt, synthetic construct
  source 1..21: mol_type = other RNA
tgtgtggcactagatttcatt

SEQ ID NO: 24058 - RNA, 21 nt, synthetic construct
  source 1..21: mol_type = other RNA
tgtgtgtgttccacggaagag

SEQ ID NO: 24059 - RNA, 21 nt, synthetic construct
  source 1..21: mol_type = other RNA
tgtgtgttccacggaagaggc

SEQ ID NO: 24060 - RNA, 21 nt, synthetic construct
  source 1..21: mol_type = other RNA
tgtgttactttggttggggta

SEQ ID NO: 24061 - RNA, 21 nt, synthetic construct
  source 1..21: mol_type = other RNA
tgtgttccacggaagaggcag

SEQ ID NO: 24062 - RNA, 21 nt, synthetic construct
  source 1..21: mol_type = other RNA
tgtgttctgagaaaacaagac

SEQ ID NO: 24063 - RNA, 21 nt, synthetic construct
  source 1..21: mol_type = other RNA
tgtgttgaaaaactggtgaaa

SEQ ID NO: 24064 - RNA, 21 nt, synthetic construct
  source 1..21: mol_type = other RNA
tgtgttgggggcacaagatct

SEQ ID NO: 24065 - RNA, 21 nt, synthetic construct
  source 1..21: mol_type = other RNA
tgtgttgttttctgggtgtaa

SEQ ID NO: 24066 - RNA, 21 nt, synthetic construct
  source 1..21: mol_type = other RNA
tgtgtttccattgcggtgcag

SEQ ID NO: 24067 - RNA, 21 nt, synthetic construct
  source 1..21: mol_type = other RNA
tgtgtttgctgctgttcttgc

SEQ ID NO: 24068 - RNA, 21 nt, synthetic construct
  source 1..21: mol_type = other RNA
tgtgtttgtgctgcctgttta

SEQ ID NO: 24069 - RNA, 21 nt, synthetic construct
  source 1..21: mol_type = other RNA
tgttaatggcatttatgtgag

SEQ ID NO: 24070 - RNA, 21 nt, synthetic construct
  source 1..21: mol_type = other RNA
tgttactttggttggggtagt

SEQ ID NO: 24071 - RNA, 21 nt, synthetic construct
  source 1..21: mol_type = other RNA
tgttattttctgcaggagatg

SEQ ID NO: 24072 - RNA, 21 nt, synthetic construct
  source 1..21: mol_type = other RNA
tgttcaaacaatacacaccta

SEQ ID NO: 24073 - RNA, 21 nt, synthetic construct
  source 1..21: mol_type = other RNA
tgttcacacaattattctgag

SEQ ID NO: 24074 - RNA, 21 nt, synthetic construct
  source 1..21: mol_type = other RNA
tgttcactaaggattcctttt

SEQ ID NO: 24075 - RNA, 21 nt, synthetic construct
  source 1..21: mol_type = other RNA
tgttcaggttccagcagcaat

SEQ ID NO: 24076 - RNA, 21 nt, synthetic construct
  source 1..21: mol_type = other RNA
tgttccacggaagaggcagaa

SEQ ID NO: 24077 - RNA, 21 nt, synthetic construct
  source 1..21: mol_type = other RNA
tgttccatcaggcttgcttcg

SEQ ID NO: 24078 - RNA, 21 nt, synthetic construct
  source 1..21: mol_type = other RNA
tgttccattgtgttctgagaa

SEQ ID NO: 24079 - RNA, 21 nt, synthetic construct
  source 1..21: mol_type = other RNA
tgttcctttcagaaaccagaa

SEQ ID NO: 24080 - RNA, 21 nt, synthetic construct
  source 1..21: mol_type = other RNA
tgttctgacattggtcttgtt

SEQ ID NO: 24081 - RNA, 21 nt, synthetic construct
  source 1..21: mol_type = other RNA
tgttctgagaaaacaagacca

SEQ ID NO: 24082 - RNA, 21 nt, synthetic construct
  source 1..21: mol_type = other RNA
tgttctggtttctgaaaggaa

SEQ ID NO: 24083 - RNA, 21 nt, synthetic construct
  source 1..21: mol_type = other RNA
tgttcttctaaaactccacca

SEQ ID NO: 24084 - RNA, 21 nt, synthetic construct
  source 1..21: mol_type = other RNA
tgttcttgaaagcacctgtga

SEQ ID NO: 24085 - RNA, 21 nt, synthetic construct
  source 1..21: mol_type = other RNA
tgttcttgcttctgtaagaga

SEQ ID NO: 24086 - RNA, 21 nt, synthetic construct
  source 1..21: mol_type = other RNA
tgttcttgtcatggtaattag

SEQ ID NO: 24087 - RNA, 21 nt, synthetic construct
  source 1..21: mol_type = other RNA
tgttctttattctctgaaact

SEQ ID NO: 24088 - RNA, 21 nt, synthetic construct
  source 1..21: mol_type = other RNA
tgttcttttggttggtgtctt

SEQ ID NO: 24089 - RNA, 21 nt, synthetic construct
  source 1..21: mol_type = other RNA
tgttgaaaaactggtgaaatc

SEQ ID NO: 24090 - RNA, 21 nt, synthetic construct
  source 1..21: mol_type = other RNA
tgttgaaaatgaaatctagtg

SEQ ID NO: 24091 - RNA, 21 nt, synthetic construct
  source 1..21: mol_type = other RNA
tgttgaaacagcacttgaatc

SEQ ID NO: 24092 - RNA, 21 nt, synthetic construct
  source 1..21: mol_type = other RNA
tgttgaccagacatatcttgg

SEQ ID NO: 24093 - RNA, 21 nt, synthetic construct
  source 1..21: mol_type = other RNA
tgttgagggcaacagactaag

SEQ ID NO: 24094 - RNA, 21 nt, synthetic construct
  source 1..21: mol_type = other RNA
tgttgattcaagtgctgtttc

SEQ ID NO: 24095 - RNA, 21 nt, synthetic construct
  source 1..21: mol_type = other RNA
tgttgcaaaaggtgtgagttt

SEQ ID NO: 24096 - RNA, 21 nt, synthetic construct
  source 1..21: mol_type = other RNA
tgttgccctcaacatggttgg

SEQ ID NO: 24097 - RNA, 21 nt, synthetic construct
  source 1..21: mol_type = other RNA
tgttgctggttttgagggaga

SEQ ID NO: 24098 - RNA, 21 nt, synthetic construct
  source 1..21: mol_type = other RNA
tgttgctttgggggtgaggaa

SEQ ID NO: 24099 - RNA, 21 nt, synthetic construct
  source 1..21: mol_type = other RNA
tgttggaatttccagtgtatt

SEQ ID NO: 24100 - RNA, 21 nt, synthetic construct
  source 1..21: mol_type = other RNA
tgttgggggcacaagatctcg

SEQ ID NO: 24101 - RNA, 21 nt, synthetic construct
  source 1..21: mol_type = other RNA
tgttggtccactgtaccttgg

SEQ ID NO: 24102 - RNA, 21 nt, synthetic construct
  source 1..21: mol_type = other RNA
tgttgtagttgttctggtttc

SEQ ID NO: 24103 - RNA, 21 nt, synthetic construct
  source 1..21: mol_type = other RNA
tgttgtgacttctgctcctgt

SEQ ID NO: 24104 - RNA, 21 nt, synthetic construct
  source 1..21: mol_type = other RNA
tgttgtgttactttggttggg

SEQ ID NO: 24105 - RNA, 21 nt, synthetic construct
  source 1..21: mol_type = other RNA
tgttgttgtagttgttctggt

SEQ ID NO: 24106 - RNA, 21 nt, synthetic construct
  source 1..21: mol_type = other RNA
tgttgttttctgggtgtaagc

SEQ ID NO: 24107 - RNA, 21 nt, synthetic construct
  source 1..21: mol_type = other RNA
tgtttatgaggcttatgttgc

SEQ ID NO: 24108 - RNA, 21 nt, synthetic construct
  source 1..21: mol_type = other RNA
tgtttcaacactggggacata

SEQ ID NO: 24109 - RNA, 21 nt, synthetic construct
  source 1..21: mol_type = other RNA
tgtttcaatttcttgatctga

SEQ ID NO: 24110 - RNA, 21 nt, synthetic construct
  source 1..21: mol_type = other RNA
tgtttccattgcggtgcagaa

SEQ ID NO: 24111 - RNA, 21 nt, synthetic construct
  source 1..21: mol_type = other RNA
tgtttcctgcaaaaagttcag

SEQ ID NO: 24112 - RNA, 21 nt, synthetic construct
  source 1..21: mol_type = other RNA
tgtttctcatcaactgctggc

SEQ ID NO: 24113 - RNA, 21 nt, synthetic construct
  source 1..21: mol_type = other RNA
tgtttgaacaagaaacctgta

SEQ ID NO: 24114 - RNA, 21 nt, synthetic construct
  source 1..21: mol_type = other RNA
tgtttgcaaaatggaggaata

SEQ ID NO: 24115 - RNA, 21 nt, synthetic construct
  source 1..21: mol_type = other RNA
tgtttgctccttgtctcgacc

SEQ ID NO: 24116 - RNA, 21 nt, synthetic construct
  source 1..21: mol_type = other RNA
tgtttgctgctctaaagctgg

SEQ ID NO: 24117 - RNA, 21 nt, synthetic construct
  source 1..21: mol_type = other RNA
tgtttgctgctgttcttgctt

SEQ ID NO: 24118 - RNA, 21 nt, synthetic construct
  source 1..21: mol_type = other RNA
tgtttggaggtcatttgattg

SEQ ID NO: 24119 - RNA, 21 nt, synthetic construct
  source 1..21: mol_type = other RNA
tgtttgtgctgcctgtttatg

SEQ ID NO: 24120 - RNA, 21 nt, synthetic construct
  source 1..21: mol_type = other RNA
tgttttaaataccgttcagag

SEQ ID NO: 24121 - RNA, 21 nt, synthetic construct
  source 1..21: mol_type = other RNA
tgttttcatggtgaaaatcag

SEQ ID NO: 24122 - RNA, 21 nt, synthetic construct
  source 1..21: mol_type = other RNA
tgttttctcagaacacaatgg

SEQ ID NO: 24123 - RNA, 21 nt, synthetic construct
  source 1..21: mol_type = other RNA
tgttttctgggtgtaagcttg

SEQ ID NO: 24124 - RNA, 21 nt, synthetic construct
  source 1..21: mol_type = other RNA
tgttttctggtggtgctgtgt

SEQ ID NO: 24125 - RNA, 21 nt, synthetic construct
  source 1..21: mol_type = other RNA
tgttttggagaagtgcacctg

SEQ ID NO: 24126 - RNA, 21 nt, synthetic construct
  source 1..21: mol_type = other RNA
tgttttgttttctggtggtgc

SEQ ID NO: 24127 - RNA, 21 nt, synthetic construct
  source 1..21: mol_type = other RNA
tgtttttcctgtgcctgacca

SEQ ID NO: 24128 - RNA, 21 nt, synthetic construct
  source 1..21: mol_type = other RNA
tgttttttccaggagttcacc

SEQ ID NO: 24129 - RNA, 21 nt, synthetic construct
  source 1..21: mol_type = other RNA
ttaaaaacaaggcagtgctaa

SEQ ID NO: 24130 - RNA, 21 nt, synthetic construct
  source 1..21: mol_type = other RNA
ttaaataccgttcagagctgc

SEQ ID NO: 24131 - RNA, 21 nt, synthetic construct
  source 1..21: mol_type = other RNA
ttaacagtcaggctactaatg

SEQ ID NO: 24132 - RNA, 21 nt, synthetic construct
  source 1..21: mol_type = other RNA
ttaactgcattttcttgggct

SEQ ID NO: 24133 - RNA, 21 nt, synthetic construct
  source 1..21: mol_type = other RNA
ttaagggaagtgaaaatagag

SEQ ID NO: 24134 - RNA, 21 nt, synthetic construct
  source 1..21: mol_type = other RNA
ttaaggtggaacctggatgca

SEQ ID NO: 24135 - RNA, 21 nt, synthetic construct
  source 1..21: mol_type = other RNA
ttaatggcatttatgtgagat

SEQ ID NO: 24136 - RNA, 21 nt, synthetic construct
  source 1..21: mol_type = other RNA
ttaattggcctgtgcatctga

SEQ ID NO: 24137 - RNA, 21 nt, synthetic construct
  source 1..21: mol_type = other RNA
ttacacaagaaagtagagggt

SEQ ID NO: 24138 - RNA, 21 nt, synthetic construct
  source 1..21: mol_type = other RNA
ttacacccagaaaacaacaca

SEQ ID NO: 24139 - RNA, 21 nt, synthetic construct
  source 1..21: mol_type = other RNA
ttacagaagcaagaacagcag

SEQ ID NO: 24140 - RNA, 21 nt, synthetic construct
  source 1..21: mol_type = other RNA
ttaccaaaagctcatgtgcag

SEQ ID NO: 24141 - RNA, 21 nt, synthetic construct
  source 1..21: mol_type = other RNA
ttaccatgacaagaacattgt

SEQ ID NO: 24142 - RNA, 21 nt, synthetic construct
  source 1..21: mol_type = other RNA
ttaccccgaagttacgtcttt

SEQ ID NO: 24143 - RNA, 21 nt, synthetic construct
  source 1..21: mol_type = other RNA
ttaccctctattttcacttcc

SEQ ID NO: 24144 - RNA, 21 nt, synthetic construct
  source 1..21: mol_type = other RNA
ttacctacacatctgcaagat

SEQ ID NO: 24145 - RNA, 21 nt, synthetic construct
  source 1..21: mol_type = other RNA
ttacctttttccatgttttgt

SEQ ID NO: 24146 - RNA, 21 nt, synthetic construct
  source 1..21: mol_type = other RNA
ttacgtctttctccattagcc

SEQ ID NO: 24147 - RNA, 21 nt, synthetic construct
  source 1..21: mol_type = other RNA
ttacgttttagatgggattcc

SEQ ID NO: 24148 - RNA, 21 nt, synthetic construct
  source 1..21: mol_type = other RNA
ttactctcaaatcacagaagc

SEQ ID NO: 24149 - RNA, 21 nt, synthetic construct
  source 1..21: mol_type = other RNA
ttactggcattatcagcatca

SEQ ID NO: 24150 - RNA, 21 nt, synthetic construct
  source 1..21: mol_type = other RNA
ttacttaaaaacaaggcagtg

SEQ ID NO: 24151 - RNA, 21 nt, synthetic construct
  source 1..21: mol_type = other RNA
ttacttcaagcaaagctcagt

SEQ ID NO: 24152 - RNA, 21 nt, synthetic construct
  source 1..21: mol_type = other RNA
ttacttctggatgagctctct

SEQ ID NO: 24153 - RNA, 21 nt, synthetic construct
  source 1..21: mol_type = other RNA
ttacttgcttctgtgatttga

SEQ ID NO: 24154 - RNA, 21 nt, synthetic construct
  source 1..21: mol_type = other RNA
ttactttggttggggtagtgg

SEQ ID NO: 24155 - RNA, 21 nt, synthetic construct
  source 1..21: mol_type = other RNA
ttagaagaacaccaccactac

SEQ ID NO: 24156 - RNA, 21 nt, synthetic construct
  source 1..21: mol_type = other RNA
ttagagcagcaaacaacttct

SEQ ID NO: 24157 - RNA, 21 nt, synthetic construct
  source 1..21: mol_type = other RNA
ttagagcagcatgcttttgag

SEQ ID NO: 24158 - RNA, 21 nt, synthetic construct
  source 1..21: mol_type = other RNA
ttagaggtctgtgcggaattg

SEQ ID NO: 24159 - RNA, 21 nt, synthetic construct
  source 1..21: mol_type = other RNA
ttagatgggattccgcttggt

SEQ ID NO: 24160 - RNA, 21 nt, synthetic construct
  source 1..21: mol_type = other RNA
ttagcactgccttgtttttaa

SEQ ID NO: 24161 - RNA, 21 nt, synthetic construct
  source 1..21: mol_type = other RNA
ttagcacttttcccctcctgc

SEQ ID NO: 24162 - RNA, 21 nt, synthetic construct
  source 1..21: mol_type = other RNA
ttagcattgcagctagtttac

SEQ ID NO: 24163 - RNA, 21 nt, synthetic construct
  source 1..21: mol_type = other RNA
ttagccttttggtcttgtttc

SEQ ID NO: 24164 - RNA, 21 nt, synthetic construct
  source 1..21: mol_type = other RNA
ttaggactctgggaaggtggt

SEQ ID NO: 24165 - RNA, 21 nt, synthetic construct
  source 1..21: mol_type = other RNA
ttaggcattagcactgccttg

SEQ ID NO: 24166 - RNA, 21 nt, synthetic construct
  source 1..21: mol_type = other RNA
ttagtagcctgactgttaatg

SEQ ID NO: 24167 - RNA, 21 nt, synthetic construct
  source 1..21: mol_type = other RNA
ttagtctggccaaagaatgat

SEQ ID NO: 24168 - RNA, 21 nt, synthetic construct
  source 1..21: mol_type = other RNA
ttagtctgttgccctcaacat

SEQ ID NO: 24169 - RNA, 21 nt, synthetic construct
  source 1..21: mol_type = other RNA
ttagtgaacactgagctttgc

SEQ ID NO: 24170 - RNA, 21 nt, synthetic construct
  source 1..21: mol_type = other RNA
ttagtgaaccttctctctctg

SEQ ID NO: 24171 - RNA, 21 nt, synthetic construct
  source 1..21: mol_type = other RNA
ttagttacctttttccatgtt

SEQ ID NO: 24172 - RNA, 21 nt, synthetic construct
  source 1..21: mol_type = other RNA
ttatagagtcaccttccaaat

SEQ ID NO: 24173 - RNA, 21 nt, synthetic construct
  source 1..21: mol_type = other RNA
ttatagtcagaccatgaaatc

SEQ ID NO: 24174 - RNA, 21 nt, synthetic construct
  source 1..21: mol_type = other RNA
ttatatccctgtagaactgaa

SEQ ID NO: 24175 - RNA, 21 nt, synthetic construct
  source 1..21: mol_type = other RNA
ttatattctgtacttcctcca

SEQ ID NO: 24176 - RNA, 21 nt, synthetic construct
  source 1..21: mol_type = other RNA
ttatcacagcttgcaggtgga

SEQ ID NO: 24177 - RNA, 21 nt, synthetic construct
  source 1..21: mol_type = other RNA
ttatcactcaaatcggagaca

SEQ ID NO: 24178 - RNA, 21 nt, synthetic construct
  source 1..21: mol_type = other RNA
ttatcagcatcatcagcatca

SEQ ID NO: 24179 - RNA, 21 nt, synthetic construct
  source 1..21: mol_type = other RNA
ttatccagattgtgtttccat

SEQ ID NO: 24180 - RNA, 21 nt, synthetic construct
  source 1..21: mol_type = other RNA
ttatgaggcttatgttgcaaa

SEQ ID NO: 24181 - RNA, 21 nt, synthetic construct
  source 1..21: mol_type = other RNA
ttatgagtctcgaactcgctt

SEQ ID NO: 24182 - RNA, 21 nt, synthetic construct
  source 1..21: mol_type = other RNA
ttatgcttgaggtgttctgac

SEQ ID NO: 24183 - RNA, 21 nt, synthetic construct
  source 1..21: mol_type = other RNA
ttatggaataccctgtatgaa

SEQ ID NO: 24184 - RNA, 21 nt, synthetic construct
  source 1..21: mol_type = other RNA
ttatggtcaaataacgacttg

SEQ ID NO: 24185 - RNA, 21 nt, synthetic construct
  source 1..21: mol_type = other RNA
ttatgtatcaagtacctttgc

SEQ ID NO: 24186 - RNA, 21 nt, synthetic construct
  source 1..21: mol_type = other RNA
ttatgtccccagtgttgaaac

SEQ ID NO: 24187 - RNA, 21 nt, synthetic construct
  source 1..21: mol_type = other RNA
ttatgtgagatgtggttttct

SEQ ID NO: 24188 - RNA, 21 nt, synthetic construct
  source 1..21: mol_type = other RNA
ttatgtgttgaaaaactggtg

SEQ ID NO: 24189 - RNA, 21 nt, synthetic construct
  source 1..21: mol_type = other RNA
ttatgttgcaaaaggtgtgag

SEQ ID NO: 24190 - RNA, 21 nt, synthetic construct
  source 1..21: mol_type = other RNA
ttattatggaataccctgtat

SEQ ID NO: 24191 - RNA, 21 nt, synthetic construct
  source 1..21: mol_type = other RNA
ttattcctccattttgcaaac

SEQ ID NO: 24192 - RNA, 21 nt, synthetic construct
  source 1..21: mol_type = other RNA
ttattctctgaaactaggtgt

SEQ ID NO: 24193 - RNA, 21 nt, synthetic construct
  source 1..21: mol_type = other RNA
ttattctgaggcctttcagaa

SEQ ID NO: 24194 - RNA, 21 nt, synthetic construct
  source 1..21: mol_type = other RNA
ttattgagaacagaagcagct

SEQ ID NO: 24195 - RNA, 21 nt, synthetic construct
  source 1..21: mol_type = other RNA
ttattggatacacctgtcaag

SEQ ID NO: 24196 - RNA, 21 nt, synthetic construct
  source 1..21: mol_type = other RNA
ttatttgaccataaggctctt

SEQ ID NO: 24197 - RNA, 21 nt, synthetic construct
  source 1..21: mol_type = other RNA
ttattttctgcaggagatggg

SEQ ID NO: 24198 - RNA, 21 nt, synthetic construct
  source 1..21: mol_type = other RNA
ttcaaaatcaagcgagttcga

SEQ ID NO: 24199 - RNA, 21 nt, synthetic construct
  source 1..21: mol_type = other RNA
ttcaaacaatacacacctagt

SEQ ID NO: 24200 - RNA, 21 nt, synthetic construct
  source 1..21: mol_type = other RNA
ttcaaactcacaccttttgca

SEQ ID NO: 24201 - RNA, 21 nt, synthetic construct
  source 1..21: mol_type = other RNA
ttcaacaaagagcagattccc

SEQ ID NO: 24202 - RNA, 21 nt, synthetic construct
  source 1..21: mol_type = other RNA
ttcaacacataactgcagtgg

SEQ ID NO: 24203 - RNA, 21 nt, synthetic construct
  source 1..21: mol_type = other RNA
ttcaacactggggacataagt

SEQ ID NO: 24204 - RNA, 21 nt, synthetic construct
  source 1..21: mol_type = other RNA
ttcaacttggtacatttgtga

SEQ ID NO: 24205 - RNA, 21 nt, synthetic construct
  source 1..21: mol_type = other RNA
ttcaacttttacttgcttctg

SEQ ID NO: 24206 - RNA, 21 nt, synthetic construct
  source 1..21: mol_type = other RNA
ttcaagaacaggagcagaagt

SEQ ID NO: 24207 - RNA, 21 nt, synthetic construct
  source 1..21: mol_type = other RNA
ttcaagcaaagctcagtgttc

SEQ ID NO: 24208 - RNA, 21 nt, synthetic construct
  source 1..21: mol_type = other RNA
ttcaagtgctgtttcaacact

SEQ ID NO: 24209 - RNA, 21 nt, synthetic construct
  source 1..21: mol_type = other RNA
ttcaatccatcctggtttcag

SEQ ID NO: 24210 - RNA, 21 nt, synthetic construct
  source 1..21: mol_type = other RNA
ttcaattcaatccatcctggt

SEQ ID NO: 24211 - RNA, 21 nt, synthetic construct
  source 1..21: mol_type = other RNA
ttcaatttcttgatctgaagg

SEQ ID NO: 24212 - RNA, 21 nt, synthetic construct
  source 1..21: mol_type = other RNA
ttcacacaattattctgaggc

SEQ ID NO: 24213 - RNA, 21 nt, synthetic construct
  source 1..21: mol_type = other RNA
ttcacaggtgctttcaagaac

SEQ ID NO: 24214 - RNA, 21 nt, synthetic construct
  source 1..21: mol_type = other RNA
ttcacatctccctcaaaacca

SEQ ID NO: 24215 - RNA, 21 nt, synthetic construct
  source 1..21: mol_type = other RNA
ttcaccaagcggaatcccatc

SEQ ID NO: 24216 - RNA, 21 nt, synthetic construct
  source 1..21: mol_type = other RNA
ttcaccagacgctagctttgt

SEQ ID NO: 24217 - RNA, 21 nt, synthetic construct
  source 1..21: mol_type = other RNA
ttcaccagtttttcaacacat

SEQ ID NO: 24218 - RNA, 21 nt, synthetic construct
  source 1..21: mol_type = other RNA
ttcaccatgaaaacattcttc

SEQ ID NO: 24219 - RNA, 21 nt, synthetic construct
  source 1..21: mol_type = other RNA
ttcaccatgtgtgtgttccac

SEQ ID NO: 24220 - RNA, 21 nt, synthetic construct
  source 1..21: mol_type = other RNA
ttcacctggatttctttcttg

SEQ ID NO: 24221 - RNA, 21 nt, synthetic construct
  source 1..21: mol_type = other RNA
ttcacgccaagtcgttatttg

SEQ ID NO: 24222 - RNA, 21 nt, synthetic construct
  source 1..21: mol_type = other RNA
ttcactaactgtgcgttttat

SEQ ID NO: 24223 - RNA, 21 nt, synthetic construct
  source 1..21: mol_type = other RNA
ttcactaaggattccttttct

SEQ ID NO: 24224 - RNA, 21 nt, synthetic construct
  source 1..21: mol_type = other RNA
ttcacttcccttaaaagtgtt

SEQ ID NO: 24225 - RNA, 21 nt, synthetic construct
  source 1..21: mol_type = other RNA
ttcagaaaagacaccaaccaa

SEQ ID NO: 24226 - RNA, 21 nt, synthetic construct
  source 1..21: mol_type = other RNA
ttcagaaaccagaacaactac

SEQ ID NO: 24227 - RNA, 21 nt, synthetic construct
  source 1..21: mol_type = other RNA
ttcagaaagcatcggagaagg

SEQ ID NO: 24228 - RNA, 21 nt, synthetic construct
  source 1..21: mol_type = other RNA
ttcagaaggaaaaagcactct

SEQ ID NO: 24229 - RNA, 21 nt, synthetic construct
  source 1..21: mol_type = other RNA
ttcagaatctcttgctctttg

SEQ ID NO: 24230 - RNA, 21 nt, synthetic construct
  source 1..21: mol_type = other RNA
ttcagaatctgaagctctgga

SEQ ID NO: 24231 - RNA, 21 nt, synthetic construct
  source 1..21: mol_type = other RNA
ttcagagaataaagaacagac

SEQ ID NO: 24232 - RNA, 21 nt, synthetic construct
  source 1..21: mol_type = other RNA
ttcagagactgagccattttc

SEQ ID NO: 24233 - RNA, 21 nt, synthetic construct
  source 1..21: mol_type = other RNA
ttcagagctgccaccaggagc

SEQ ID NO: 24234 - RNA, 21 nt, synthetic construct
  source 1..21: mol_type = other RNA
ttcagagtgctttttccttct

SEQ ID NO: 24235 - RNA, 21 nt, synthetic construct
  source 1..21: mol_type = other RNA
ttcagatagtgctgtgttggg

SEQ ID NO: 24236 - RNA, 21 nt, synthetic construct
  source 1..21: mol_type = other RNA
ttcagatcaagaaattgaaac

SEQ ID NO: 24237 - RNA, 21 nt, synthetic construct
  source 1..21: mol_type = other RNA
ttcagatgctgctccatggtc

SEQ ID NO: 24238 - RNA, 21 nt, synthetic construct
  source 1..21: mol_type = other RNA
ttcagattctgaatgagcagg

SEQ ID NO: 24239 - RNA, 21 nt, synthetic construct
  source 1..21: mol_type = other RNA
ttcaggatgtgtagtctgttc

SEQ ID NO: 24240 - RNA, 21 nt, synthetic construct
  source 1..21: mol_type = other RNA
ttcaggcccactgcagttatg

SEQ ID NO: 24241 - RNA, 21 nt, synthetic construct
  source 1..21: mol_type = other RNA
ttcaggttccagcagcaattt

SEQ ID NO: 24242 - RNA, 21 nt, synthetic construct
  source 1..21: mol_type = other RNA
ttcagtatcaacccaatctct

SEQ ID NO: 24243 - RNA, 21 nt, synthetic construct
  source 1..21: mol_type = other RNA
ttcagttctacagggatataa

SEQ ID NO: 24244 - RNA, 21 nt, synthetic construct
  source 1..21: mol_type = other RNA
ttcagtttgggaatctgctct

SEQ ID NO: 24245 - RNA, 21 nt, synthetic construct
  source 1..21: mol_type = other RNA
ttcatacagggtattccataa

SEQ ID NO: 24246 - RNA, 21 nt, synthetic construct
  source 1..21: mol_type = other RNA
ttcatggtctgactataaggg

SEQ ID NO: 24247 - RNA, 21 nt, synthetic construct
  source 1..21: mol_type = other RNA
ttcatggtgaaaatcagtatt

SEQ ID NO: 24248 - RNA, 21 nt, synthetic construct
  source 1..21: mol_type = other RNA
ttcatttcaacttggtacatt

SEQ ID NO: 24249 - RNA, 21 nt, synthetic construct
  source 1..21: mol_type = other RNA
ttcattttcaacaaagagcag

SEQ ID NO: 24250 - RNA, 21 nt, synthetic construct
  source 1..21: mol_type = other RNA
ttccaaaaaccctcacaccag

SEQ ID NO: 24251 - RNA, 21 nt, synthetic construct
  source 1..21: mol_type = other RNA
ttccaaataatgtgatcccaa

SEQ ID NO: 24252 - RNA, 21 nt, synthetic construct
  source 1..21: mol_type = other RNA
ttccaaattactagatactcc

SEQ ID NO: 24253 - RNA, 21 nt, synthetic construct
  source 1..21: mol_type = other RNA
ttccaacatgcctggggggct

SEQ ID NO: 24254 - RNA, 21 nt, synthetic construct
  source 1..21: mol_type = other RNA
ttccaagtgtttgcaaaatgg

SEQ ID NO: 24255 - RNA, 21 nt, synthetic construct
  source 1..21: mol_type = other RNA
ttccacaggttcctcagcttc

SEQ ID NO: 24256 - RNA, 21 nt, synthetic construct
  source 1..21: mol_type = other RNA
ttccaccttaattggcctgtg

SEQ ID NO: 24257 - RNA, 21 nt, synthetic construct
  source 1..21: mol_type = other RNA
ttccacggaagaggcagaaac

SEQ ID NO: 24258 - RNA, 21 nt, synthetic construct
  source 1..21: mol_type = other RNA
ttccactttagtctggccaaa

SEQ ID NO: 24259 - RNA, 21 nt, synthetic construct
  source 1..21: mol_type = other RNA
ttccagcagcaatttgcaagc

SEQ ID NO: 24260 - RNA, 21 nt, synthetic construct
  source 1..21: mol_type = other RNA
ttccaggagttcaccatgtgt

SEQ ID NO: 24261 - RNA, 21 nt, synthetic construct
  source 1..21: mol_type = other RNA
ttccagtgtattgtttggagg

SEQ ID NO: 24262 - RNA, 21 nt, synthetic construct
  source 1..21: mol_type = other RNA
ttccatcaggcttgcttcggg

SEQ ID NO: 24263 - RNA, 21 nt, synthetic construct
  source 1..21: mol_type = other RNA
ttccatgttttgttttctggt

SEQ ID NO: 24264 - RNA, 21 nt, synthetic construct
  source 1..21: mol_type = other RNA
ttccattctggagctttgtag

SEQ ID NO: 24265 - RNA, 21 nt, synthetic construct
  source 1..21: mol_type = other RNA
ttccattgcggtgcagaaaac

SEQ ID NO: 24266 - RNA, 21 nt, synthetic construct
  source 1..21: mol_type = other RNA
ttccattgtgttctgagaaaa

SEQ ID NO: 24267 - RNA, 21 nt, synthetic construct
  source 1..21: mol_type = other RNA
ttcccaaactgaaaaacttat

SEQ ID NO: 24268 - RNA, 21 nt, synthetic construct
  source 1..21: mol_type = other RNA
ttcccagagtcctaatccatc

SEQ ID NO: 24269 - RNA, 21 nt, synthetic construct
  source 1..21: mol_type = other RNA
ttcccatcttgcagatgtgta

SEQ ID NO: 24270 - RNA, 21 nt, synthetic construct
  source 1..21: mol_type = other RNA
ttcccctcctgctcattcaga

SEQ ID NO: 24271 - RNA, 21 nt, synthetic construct
  source 1..21: mol_type = other RNA
ttccccttatagtcagaccat

SEQ ID NO: 24272 - RNA, 21 nt, synthetic construct
  source 1..21: mol_type = other RNA
ttccctggatgttattttctg

SEQ ID NO: 24273 - RNA, 21 nt, synthetic construct
  source 1..21: mol_type = other RNA
ttcccttaaaagtgttgtgtt

SEQ ID NO: 24274 - RNA, 21 nt, synthetic construct
  source 1..21: mol_type = other RNA
ttcccttcatacagggtattc

SEQ ID NO: 24275 - RNA, 21 nt, synthetic construct
  source 1..21: mol_type = other RNA
ttccgcacagacctctaactc

SEQ ID NO: 24276 - RNA, 21 nt, synthetic construct
  source 1..21: mol_type = other RNA
ttccgcttggtgaaaacgagg

SEQ ID NO: 24277 - RNA, 21 nt, synthetic construct
  source 1..21: mol_type = other RNA
ttccgtggaacacacacatgg

SEQ ID NO: 24278 - RNA, 21 nt, synthetic construct
  source 1..21: mol_type = other RNA
ttcctcacccccaaagcaaca

SEQ ID NO: 24279 - RNA, 21 nt, synthetic construct
  source 1..21: mol_type = other RNA
ttcctcagcttccttcagaag

SEQ ID NO: 24280 - RNA, 21 nt, synthetic construct
  source 1..21: mol_type = other RNA
ttcctccagtcccatttggac

SEQ ID NO: 24281 - RNA, 21 nt, synthetic construct
  source 1..21: mol_type = other RNA
ttcctccattttgcaaacact

SEQ ID NO: 24282 - RNA, 21 nt, synthetic construct
  source 1..21: mol_type = other RNA
ttcctccctggtcaggcacag

SEQ ID NO: 24283 - RNA, 21 nt, synthetic construct
  source 1..21: mol_type = other RNA
ttcctgataccatcacctccc

SEQ ID NO: 24284 - RNA, 21 nt, synthetic construct
  source 1..21: mol_type = other RNA
ttcctgcaaaaagttcaggat

SEQ ID NO: 24285 - RNA, 21 nt, synthetic construct
  source 1..21: mol_type = other RNA
ttcctgtgcctgaccagggag

SEQ ID NO: 24286 - RNA, 21 nt, synthetic construct
  source 1..21: mol_type = other RNA
ttcctgttcacacaattattc

SEQ ID NO: 24287 - RNA, 21 nt, synthetic construct
  source 1..21: mol_type = other RNA
ttccttcagaaggaaaaagca

SEQ ID NO: 24288 - RNA, 21 nt, synthetic construct
  source 1..21: mol_type = other RNA
ttccttctgaaggaagctgag

SEQ ID NO: 24289 - RNA, 21 nt, synthetic construct
  source 1..21: mol_type = other RNA
ttcctttcagaaaccagaaca

SEQ ID NO: 24290 - RNA, 21 nt, synthetic construct
  source 1..21: mol_type = other RNA
ttccttttctgccactaccac

SEQ ID NO: 24291 - RNA, 21 nt, synthetic construct
  source 1..21: mol_type = other RNA
ttcgagactcataatgtccaa

SEQ ID NO: 24292 - RNA, 21 nt, synthetic construct
  source 1..21: mol_type = other RNA
ttcggggccatccacaaggct

SEQ ID NO: 24293 - RNA, 21 nt, synthetic construct
  source 1..21: mol_type = other RNA
ttcggggtaagccaagaaaga

SEQ ID NO: 24294 - RNA, 21 nt, synthetic construct
  source 1..21: mol_type = other RNA
ttctaaaactccaccattcag

SEQ ID NO: 24295 - RNA, 21 nt, synthetic construct
  source 1..21: mol_type = other RNA
ttctatcctgttccatcaggc

SEQ ID NO: 24296 - RNA, 21 nt, synthetic construct
  source 1..21: mol_type = other RNA
ttctcagaacacaatggaaca

SEQ ID NO: 24297 - RNA, 21 nt, synthetic construct
  source 1..21: mol_type = other RNA
ttctcatcaactgctggcagt

SEQ ID NO: 24298 - RNA, 21 nt, synthetic construct
  source 1..21: mol_type = other RNA
ttctccaaaacagaccattta

SEQ ID NO: 24299 - RNA, 21 nt, synthetic construct
  source 1..21: mol_type = other RNA
ttctccattagccttttggtc

SEQ ID NO: 24300 - RNA, 21 nt, synthetic construct
  source 1..21: mol_type = other RNA
ttctccccctcctcctcttcc

SEQ ID NO: 24301 - RNA, 21 nt, synthetic construct
  source 1..21: mol_type = other RNA
ttctccgatgctttctgaaag

SEQ ID NO: 24302 - RNA, 21 nt, synthetic construct
  source 1..21: mol_type = other RNA
ttctctctctgggctccttca

SEQ ID NO: 24303 - RNA, 21 nt, synthetic construct
  source 1..21: mol_type = other RNA
ttctctgaaactaggtgtgta

SEQ ID NO: 24304 - RNA, 21 nt, synthetic construct
  source 1..21: mol_type = other RNA
ttctcttgcttagttaccttt

SEQ ID NO: 24305 - RNA, 21 nt, synthetic construct
  source 1..21: mol_type = other RNA
ttctctttgctgatcattgtt

SEQ ID NO: 24306 - RNA, 21 nt, synthetic construct
  source 1..21: mol_type = other RNA
ttctgaaaggaacaggtattt

SEQ ID NO: 24307 - RNA, 21 nt, synthetic construct
  source 1..21: mol_type = other RNA
ttctgaaaggcctcagaataa

SEQ ID NO: 24308 - RNA, 21 nt, synthetic construct
  source 1..21: mol_type = other RNA
ttctgaagaagttgtttgctg

SEQ ID NO: 24309 - RNA, 21 nt, synthetic construct
  source 1..21: mol_type = other RNA
ttctgaaggaagctgaggaac

SEQ ID NO: 24310 - RNA, 21 nt, synthetic construct
  source 1..21: mol_type = other RNA
ttctgaagggtcgagacaagg

SEQ ID NO: 24311 - RNA, 21 nt, synthetic construct
  source 1..21: mol_type = other RNA
ttctgaatgagcaggagggga

SEQ ID NO: 24312 - RNA, 21 nt, synthetic construct
  source 1..21: mol_type = other RNA
ttctgacattggtcttgtttt

SEQ ID NO: 24313 - RNA, 21 nt, synthetic construct
  source 1..21: mol_type = other RNA
ttctgagaaaacaagaccaat

SEQ ID NO: 24314 - RNA, 21 nt, synthetic construct
  source 1..21: mol_type = other RNA
ttctgaggcctttcagaaagc

SEQ ID NO: 24315 - RNA, 21 nt, synthetic construct
  source 1..21: mol_type = other RNA
ttctgcaccgcaatggaaaca

SEQ ID NO: 24316 - RNA, 21 nt, synthetic construct
  source 1..21: mol_type = other RNA
ttctgcagcagtggtttgtct

SEQ ID NO: 24317 - RNA, 21 nt, synthetic construct
  source 1..21: mol_type = other RNA
ttctgcaggagatgggcatat

SEQ ID NO: 24318 - RNA, 21 nt, synthetic construct
  source 1..21: mol_type = other RNA
ttctgccactaccacaccacc

SEQ ID NO: 24319 - RNA, 21 nt, synthetic construct
  source 1..21: mol_type = other RNA
ttctgcctcttccgtggaaca

SEQ ID NO: 24320 - RNA, 21 nt, synthetic construct
  source 1..21: mol_type = other RNA
ttctgctcctgttcttgaaag

SEQ ID NO: 24321 - RNA, 21 nt, synthetic construct
  source 1..21: mol_type = other RNA
ttctggagctttgtagccaga

SEQ ID NO: 24322 - RNA, 21 nt, synthetic construct
  source 1..21: mol_type = other RNA
ttctggatgagctctctcagg

SEQ ID NO: 24323 - RNA, 21 nt, synthetic construct
  source 1..21: mol_type = other RNA
ttctggcacttacctacacat

SEQ ID NO: 24324 - RNA, 21 nt, synthetic construct
  source 1..21: mol_type = other RNA
ttctggcttcccttcatacag

SEQ ID NO: 24325 - RNA, 21 nt, synthetic construct
  source 1..21: mol_type = other RNA
ttctggggaggggtctgagtg

SEQ ID NO: 24326 - RNA, 21 nt, synthetic construct
  source 1..21: mol_type = other RNA
ttctgggtgtaagcttgcctt

SEQ ID NO: 24327 - RNA, 21 nt, synthetic construct
  source 1..21: mol_type = other RNA
ttctggtggtgctgtgtgcat

SEQ ID NO: 24328 - RNA, 21 nt, synthetic construct
  source 1..21: mol_type = other RNA
ttctggtttctgaaaggaaca

SEQ ID NO: 24329 - RNA, 21 nt, synthetic construct
  source 1..21: mol_type = other RNA
ttctgtaagagatgccacctt

SEQ ID NO: 24330 - RNA, 21 nt, synthetic construct
  source 1..21: mol_type = other RNA
ttctgtacttcctccagtccc

SEQ ID NO: 24331 - RNA, 21 nt, synthetic construct
  source 1..21: mol_type = other RNA
ttctgtagcccaagaaaatgc

SEQ ID NO: 24332 - RNA, 21 nt, synthetic construct
  source 1..21: mol_type = other RNA
ttctgtctggcaaatgggagg

SEQ ID NO: 24333 - RNA, 21 nt, synthetic construct
  source 1..21: mol_type = other RNA
ttctgtgatttgagagtaaga

SEQ ID NO: 24334 - RNA, 21 nt, synthetic construct
  source 1..21: mol_type = other RNA
ttctgttcaggttccagcagc

SEQ ID NO: 24335 - RNA, 21 nt, synthetic construct
  source 1..21: mol_type = other RNA
ttcttatcactcaaatcggag

SEQ ID NO: 24336 - RNA, 21 nt, synthetic construct
  source 1..21: mol_type = other RNA
ttcttcacaggtgctttcaag

SEQ ID NO: 24337 - RNA, 21 nt, synthetic construct
  source 1..21: mol_type = other RNA
ttcttcaccagacgctagctt

SEQ ID NO: 24338 - RNA, 21 nt, synthetic construct
  source 1..21: mol_type = other RNA
ttcttcagaaaagacaccaac

SEQ ID NO: 24339 - RNA, 21 nt, synthetic construct
  source 1..21: mol_type = other RNA
ttcttcagtatcaacccaatc

SEQ ID NO: 24340 - RNA, 21 nt, synthetic construct
  source 1..21: mol_type = other RNA
ttcttccactttagtctggcc

SEQ ID NO: 24341 - RNA, 21 nt, synthetic construct
  source 1..21: mol_type = other RNA
ttcttctaaaactccaccatt

SEQ ID NO: 24342 - RNA, 21 nt, synthetic construct
  source 1..21: mol_type = other RNA
ttcttgaaagcacctgtgaag

SEQ ID NO: 24343 - RNA, 21 nt, synthetic construct
  source 1..21: mol_type = other RNA
ttcttgatctgaaggagccca

SEQ ID NO: 24344 - RNA, 21 nt, synthetic construct
  source 1..21: mol_type = other RNA
ttcttgcttctgtaagagatg

SEQ ID NO: 24345 - RNA, 21 nt, synthetic construct
  source 1..21: mol_type = other RNA
ttcttggcttaccccgaagtt

SEQ ID NO: 24346 - RNA, 21 nt, synthetic construct
  source 1..21: mol_type = other RNA
ttcttgggctacagaactcac

SEQ ID NO: 24347 - RNA, 21 nt, synthetic construct
  source 1..21: mol_type = other RNA
ttcttgtcatggtaattagca

SEQ ID NO: 24348 - RNA, 21 nt, synthetic construct
  source 1..21: mol_type = other RNA
ttcttgtgtaaagtcaggact

SEQ ID NO: 24349 - RNA, 21 nt, synthetic construct
  source 1..21: mol_type = other RNA
ttcttgttcaaacaatacaca

SEQ ID NO: 24350 - RNA, 21 nt, synthetic construct
  source 1..21: mol_type = other RNA
ttctttattctctgaaactag

SEQ ID NO: 24351 - RNA, 21 nt, synthetic construct
  source 1..21: mol_type = other RNA
ttctttctccccctcctcctc

SEQ ID NO: 24352 - RNA, 21 nt, synthetic construct
  source 1..21: mol_type = other RNA
ttctttcttatcactcaaatc

SEQ ID NO: 24353 - RNA, 21 nt, synthetic construct
  source 1..21: mol_type = other RNA
ttctttcttggcttaccccga

SEQ ID NO: 24354 - RNA, 21 nt, synthetic construct
  source 1..21: mol_type = other RNA
ttctttggccagactaaagtg

SEQ ID NO: 24355 - RNA, 21 nt, synthetic construct
  source 1..21: mol_type = other RNA
ttcttttggttggtgtctttt

SEQ ID NO: 24356 - RNA, 21 nt, synthetic construct
  source 1..21: mol_type = other RNA
ttgaaaaactggtgaaatctt

SEQ ID NO: 24357 - RNA, 21 nt, synthetic construct
  source 1..21: mol_type = other RNA
ttgaaaatgaaatctagtgcc

SEQ ID NO: 24358 - RNA, 21 nt, synthetic construct
  source 1..21: mol_type = other RNA
ttgaaaatggctcagtctctg

SEQ ID NO: 24359 - RNA, 21 nt, synthetic construct
  source 1..21: mol_type = other RNA
ttgaaacaagaccaaaaggct

SEQ ID NO: 24360 - RNA, 21 nt, synthetic construct
  source 1..21: mol_type = other RNA
ttgaaacagcacttgaatcaa

SEQ ID NO: 24361 - RNA, 21 nt, synthetic construct
  source 1..21: mol_type = other RNA
ttgaaagagtgccacttggtg

SEQ ID NO: 24362 - RNA, 21 nt, synthetic construct
  source 1..21: mol_type = other RNA
ttgaaagcacctgtgaagaag

SEQ ID NO: 24363 - RNA, 21 nt, synthetic construct
  source 1..21: mol_type = other RNA
ttgaaatgaatcaagggcagt

SEQ ID NO: 24364 - RNA, 21 nt, synthetic construct
  source 1..21: mol_type = other RNA
ttgaaatgtcagggccagtca

SEQ ID NO: 24365 - RNA, 21 nt, synthetic construct
  source 1..21: mol_type = other RNA
ttgaacaagaaacctgtattt

SEQ ID NO: 24366 - RNA, 21 nt, synthetic construct
  source 1..21: mol_type = other RNA
ttgaaggcccctcgttttcac

SEQ ID NO: 24367 - RNA, 21 nt, synthetic construct
  source 1..21: mol_type = other RNA
ttgaagtaagcaccattcatt

SEQ ID NO: 24368 - RNA, 21 nt, synthetic construct
  source 1..21: mol_type = other RNA
ttgaatactgattttcaccat

SEQ ID NO: 24369 - RNA, 21 nt, synthetic construct
  source 1..21: mol_type = other RNA
ttgaatcaacaggcttcagag

SEQ ID NO: 24370 - RNA, 21 nt, synthetic construct
  source 1..21: mol_type = other RNA
ttgaattgaaggcccctcgtt

SEQ ID NO: 24371 - RNA, 21 nt, synthetic construct
  source 1..21: mol_type = other RNA
ttgacaggtgtatccaataaa

SEQ ID NO: 24372 - RNA, 21 nt, synthetic construct
  source 1..21: mol_type = other RNA
ttgaccagacatatcttggtt

SEQ ID NO: 24373 - RNA, 21 nt, synthetic construct
  source 1..21: mol_type = other RNA
ttgaccataaggctcttactc

SEQ ID NO: 24374 - RNA, 21 nt, synthetic construct
  source 1..21: mol_type = other RNA
ttgactagacaaaccactgct

SEQ ID NO: 24375 - RNA, 21 nt, synthetic construct
  source 1..21: mol_type = other RNA
ttgactgctttcacctggatt

SEQ ID NO: 24376 - RNA, 21 nt, synthetic construct
  source 1..21: mol_type = other RNA
ttgagaacagaagcagctgtt

SEQ ID NO: 24377 - RNA, 21 nt, synthetic construct
  source 1..21: mol_type = other RNA
ttgagacagtgttttttccag

SEQ ID NO: 24378 - RNA, 21 nt, synthetic construct
  source 1..21: mol_type = other RNA
ttgagaccatggagcagcatc

SEQ ID NO: 24379 - RNA, 21 nt, synthetic construct
  source 1..21: mol_type = other RNA
ttgagagtaagagccttatgg

SEQ ID NO: 24380 - RNA, 21 nt, synthetic construct
  source 1..21: mol_type = other RNA
ttgagatatgcccatctcctg

SEQ ID NO: 24381 - RNA, 21 nt, synthetic construct
  source 1..21: mol_type = other RNA
ttgagggagatgtgaactctg

SEQ ID NO: 24382 - RNA, 21 nt, synthetic construct
  source 1..21: mol_type = other RNA
ttgagggcaacagactaagtc

SEQ ID NO: 24383 - RNA, 21 nt, synthetic construct
  source 1..21: mol_type = other RNA
ttgaggtgttctgacattggt

SEQ ID NO: 24384 - RNA, 21 nt, synthetic construct
  source 1..21: mol_type = other RNA
ttgagtcttgacaggtgtatc

SEQ ID NO: 24385 - RNA, 21 nt, synthetic construct
  source 1..21: mol_type = other RNA
ttgagtgataagaaagaatct

SEQ ID NO: 24386 - RNA, 21 nt, synthetic construct
  source 1..21: mol_type = other RNA
ttgagtgtccttctggggagg

SEQ ID NO: 24387 - RNA, 21 nt, synthetic construct
  source 1..21: mol_type = other RNA
ttgatacataaccatgcaaat

SEQ ID NO: 24388 - RNA, 21 nt, synthetic construct
  source 1..21: mol_type = other RNA
ttgatactgaagaattgatgg

SEQ ID NO: 24389 - RNA, 21 nt, synthetic construct
  source 1..21: mol_type = other RNA
ttgatagccacaccccagctt

SEQ ID NO: 24390 - RNA, 21 nt, synthetic construct
  source 1..21: mol_type = other RNA
ttgatctgaaggagcccagag

SEQ ID NO: 24391 - RNA, 21 nt, synthetic construct
  source 1..21: mol_type = other RNA
ttgatctgccctgaggtatgc

SEQ ID NO: 24392 - RNA, 21 nt, synthetic construct
  source 1..21: mol_type = other RNA
ttgatgagaaacaaagagcaa

SEQ ID NO: 24393 - RNA, 21 nt, synthetic construct
  source 1..21: mol_type = other RNA
ttgatggcagtgatgcctcat

SEQ ID NO: 24394 - RNA, 21 nt, synthetic construct
  source 1..21: mol_type = other RNA
ttgattcaagtgctgtttcaa

SEQ ID NO: 24395 - RNA, 21 nt, synthetic construct
  source 1..21: mol_type = other RNA
ttgattcatttcaacttggta

SEQ ID NO: 24396 - RNA, 21 nt, synthetic construct
  source 1..21: mol_type = other RNA
ttgattggagagattgggttg

SEQ ID NO: 24397 - RNA, 21 nt, synthetic construct
  source 1..21: mol_type = other RNA
ttgatttcatggtctgactat

SEQ ID NO: 24398 - RNA, 21 nt, synthetic construct
  source 1..21: mol_type = other RNA
ttgcaaaaggtgtgagtttga

SEQ ID NO: 24399 - RNA, 21 nt, synthetic construct
  source 1..21: mol_type = other RNA
ttgcaaaatggaggaataaaa

SEQ ID NO: 24400 - RNA, 21 nt, synthetic construct
  source 1..21: mol_type = other RNA
ttgcaaacacttggaataccc

SEQ ID NO: 24401 - RNA, 21 nt, synthetic construct
  source 1..21: mol_type = other RNA
ttgcaaattgctgctggaacc

SEQ ID NO: 24402 - RNA, 21 nt, synthetic construct
  source 1..21: mol_type = other RNA
ttgcaacataagcctcataaa

SEQ ID NO: 24403 - RNA, 21 nt, synthetic construct
  source 1..21: mol_type = other RNA
ttgcaagctcctggtggcagc

SEQ ID NO: 24404 - RNA, 21 nt, synthetic construct
  source 1..21: mol_type = other RNA
ttgcagatgtgtaggtaagtg

SEQ ID NO: 24405 - RNA, 21 nt, synthetic construct
  source 1..21: mol_type = other RNA
ttgcagctagtttactggcat

SEQ ID NO: 24406 - RNA, 21 nt, synthetic construct
  source 1..21: mol_type = other RNA
ttgcaggaaacaagacccaaa

SEQ ID NO: 24407 - RNA, 21 nt, synthetic construct
  source 1..21: mol_type = other RNA
ttgcaggtggattctcttgct

SEQ ID NO: 24408 - RNA, 21 nt, synthetic construct
  source 1..21: mol_type = other RNA
ttgcatcacatgcaatatttt

SEQ ID NO: 24409 - RNA, 21 nt, synthetic construct
  source 1..21: mol_type = other RNA
ttgcatccaggttccacctta

SEQ ID NO: 24410 - RNA, 21 nt, synthetic construct
  source 1..21: mol_type = other RNA
ttgcatgcacttgatttcatg

SEQ ID NO: 24411 - RNA, 21 nt, synthetic construct
  source 1..21: mol_type = other RNA
ttgcatggttatgtatcaagt

SEQ ID NO: 24412 - RNA, 21 nt, synthetic construct
  source 1..21: mol_type = other RNA
ttgcatgtgatgcaagttttg

SEQ ID NO: 24413 - RNA, 21 nt, synthetic construct
  source 1..21: mol_type = other RNA
ttgccagacagaacctctggc

SEQ ID NO: 24414 - RNA, 21 nt, synthetic construct
  source 1..21: mol_type = other RNA
ttgccatagtcagatgcacag

SEQ ID NO: 24415 - RNA, 21 nt, synthetic construct
  source 1..21: mol_type = other RNA
ttgccctcaacatggttggtt

SEQ ID NO: 24416 - RNA, 21 nt, synthetic construct
  source 1..21: mol_type = other RNA
ttgccttgggagccccccagg

SEQ ID NO: 24417 - RNA, 21 nt, synthetic construct
  source 1..21: mol_type = other RNA
ttgcgcagcttgttgaccaga

SEQ ID NO: 24418 - RNA, 21 nt, synthetic construct
  source 1..21: mol_type = other RNA
ttgcggtgcagaaaaccacat

SEQ ID NO: 24419 - RNA, 21 nt, synthetic construct
  source 1..21: mol_type = other RNA
ttgctcagcaaaggtacttga

SEQ ID NO: 24420 - RNA, 21 nt, synthetic construct
  source 1..21: mol_type = other RNA
ttgctccttgtctcgaccctt

SEQ ID NO: 24421 - RNA, 21 nt, synthetic construct
  source 1..21: mol_type = other RNA
ttgctctttgtttctcatcaa

SEQ ID NO: 24422 - RNA, 21 nt, synthetic construct
  source 1..21: mol_type = other RNA
ttgctgagcaagttgcgcagc

SEQ ID NO: 24423 - RNA, 21 nt, synthetic construct
  source 1..21: mol_type = other RNA
ttgctgatcattgttgctttg

SEQ ID NO: 24424 - RNA, 21 nt, synthetic construct
  source 1..21: mol_type = other RNA
ttgctgcacattatcacagct

SEQ ID NO: 24425 - RNA, 21 nt, synthetic construct
  source 1..21: mol_type = other RNA
ttgctgctctaaagctggggt

SEQ ID NO: 24426 - RNA, 21 nt, synthetic construct
  source 1..21: mol_type = other RNA
ttgctgctggaacctgaacag

SEQ ID NO: 24427 - RNA, 21 nt, synthetic construct
  source 1..21: mol_type = other RNA
ttgctgctgttcttgcttctg

SEQ ID NO: 24428 - RNA, 21 nt, synthetic construct
  source 1..21: mol_type = other RNA
ttgctgctgttgctggttttg

SEQ ID NO: 24429 - RNA, 21 nt, synthetic construct
  source 1..21: mol_type = other RNA
ttgctggttttgagggagatg

SEQ ID NO: 24430 - RNA, 21 nt, synthetic construct
  source 1..21: mol_type = other RNA
ttgctgtgtttgctgctgttc

SEQ ID NO: 24431 - RNA, 21 nt, synthetic construct
  source 1..21: mol_type = other RNA
ttgcttagttacctttttcca

SEQ ID NO: 24432 - RNA, 21 nt, synthetic construct
  source 1..21: mol_type = other RNA
ttgcttcggggccatccacaa

SEQ ID NO: 24433 - RNA, 21 nt, synthetic construct
  source 1..21: mol_type = other RNA
ttgcttctgtaagagatgcca

SEQ ID NO: 24434 - RNA, 21 nt, synthetic construct
  source 1..21: mol_type = other RNA
ttgcttctgtgatttgagagt

SEQ ID NO: 24435 - RNA, 21 nt, synthetic construct
  source 1..21: mol_type = other RNA
ttgcttctttctccccctcct

SEQ ID NO: 24436 - RNA, 21 nt, synthetic construct
  source 1..21: mol_type = other RNA
ttgcttgaagtaagcaccatt

SEQ ID NO: 24437 - RNA, 21 nt, synthetic construct
  source 1..21: mol_type = other RNA
ttgctttgggatcacattatt

SEQ ID NO: 24438 - RNA, 21 nt, synthetic construct
  source 1..21: mol_type = other RNA
ttgctttgggggtgaggaaaa

SEQ ID NO: 24439 - RNA, 21 nt, synthetic construct
  source 1..21: mol_type = other RNA
ttggaaaatattgcatgtgat

SEQ ID NO: 24440 - RNA, 21 nt, synthetic construct
  source 1..21: mol_type = other RNA
ttggaactggagatgttggtc

SEQ ID NO: 24441 - RNA, 21 nt, synthetic construct
  source 1..21: mol_type = other RNA
ttggaaggtgactctataaaa

SEQ ID NO: 24442 - RNA, 21 nt, synthetic construct
  source 1..21: mol_type = other RNA
ttggaataccctctactttct

SEQ ID NO: 24443 - RNA, 21 nt, synthetic construct
  source 1..21: mol_type = other RNA
ttggaatttccagtgtattgt

SEQ ID NO: 24444 - RNA, 21 nt, synthetic construct
  source 1..21: mol_type = other RNA
ttggacattatgagtctcgaa

SEQ ID NO: 24445 - RNA, 21 nt, synthetic construct
  source 1..21: mol_type = other RNA
ttggagaagtgcacctggtgt

SEQ ID NO: 24446 - RNA, 21 nt, synthetic construct
  source 1..21: mol_type = other RNA
ttggagagattgggttgatac

SEQ ID NO: 24447 - RNA, 21 nt, synthetic construct
  source 1..21: mol_type = other RNA
ttggaggcagctcagagttag

SEQ ID NO: 24448 - RNA, 21 nt, synthetic construct
  source 1..21: mol_type = other RNA
ttggaggtcatttgattggag

SEQ ID NO: 24449 - RNA, 21 nt, synthetic construct
  source 1..21: mol_type = other RNA
ttggatacacctgtcaagact

SEQ ID NO: 24450 - RNA, 21 nt, synthetic construct
  source 1..21: mol_type = other RNA
ttggccagactaaagtggaag

SEQ ID NO: 24451 - RNA, 21 nt, synthetic construct
  source 1..21: mol_type = other RNA
ttggcctgtgcatctgactat

SEQ ID NO: 24452 - RNA, 21 nt, synthetic construct
  source 1..21: mol_type = other RNA
ttggcgtgaaactgcttcaga

SEQ ID NO: 24453 - RNA, 21 nt, synthetic construct
  source 1..21: mol_type = other RNA
ttggcttaccccgaagttacg

SEQ ID NO: 24454 - RNA, 21 nt, synthetic construct
  source 1..21: mol_type = other RNA
ttgggaatctgctctttgttg

SEQ ID NO: 24455 - RNA, 21 nt, synthetic construct
  source 1..21: mol_type = other RNA
ttgggactgcccttgattcat

SEQ ID NO: 24456 - RNA, 21 nt, synthetic construct
  source 1..21: mol_type = other RNA
ttgggagccccccaggcatgt

SEQ ID NO: 24457 - RNA, 21 nt, synthetic construct
  source 1..21: mol_type = other RNA
ttgggatcacattatttggaa

SEQ ID NO: 24458 - RNA, 21 nt, synthetic construct
  source 1..21: mol_type = other RNA
ttgggctacagaactcacaga

SEQ ID NO: 24459 - RNA, 21 nt, synthetic construct
  source 1..21: mol_type = other RNA
ttgggggcacaagatctcgtg

SEQ ID NO: 24460 - RNA, 21 nt, synthetic construct
  source 1..21: mol_type = other RNA
ttgggggtgaggaaaagtctg

SEQ ID NO: 24461 - RNA, 21 nt, synthetic construct
  source 1..21: mol_type = other RNA
ttggggtagtggtggtgttct

SEQ ID NO: 24462 - RNA, 21 nt, synthetic construct
  source 1..21: mol_type = other RNA
ttggggttgctgtgtttgctg

SEQ ID NO: 24463 - RNA, 21 nt, synthetic construct
  source 1..21: mol_type = other RNA
ttgggtcttgtttcctgcaaa

SEQ ID NO: 24464 - RNA, 21 nt, synthetic construct
  source 1..21: mol_type = other RNA
ttgggttgatactgaagaatt

SEQ ID NO: 24465 - RNA, 21 nt, synthetic construct
  source 1..21: mol_type = other RNA
ttggtaaatggtctgttttgg

SEQ ID NO: 24466 - RNA, 21 nt, synthetic construct
  source 1..21: mol_type = other RNA
ttggtacatttgtgacttgtg

SEQ ID NO: 24467 - RNA, 21 nt, synthetic construct
  source 1..21: mol_type = other RNA
ttggtagcagtggagagctac

SEQ ID NO: 24468 - RNA, 21 nt, synthetic construct
  source 1..21: mol_type = other RNA
ttggtccactgtaccttggga

SEQ ID NO: 24469 - RNA, 21 nt, synthetic construct
  source 1..21: mol_type = other RNA
ttggtcttgtttcaatttctt

SEQ ID NO: 24470 - RNA, 21 nt, synthetic construct
  source 1..21: mol_type = other RNA
ttggtcttgttttctcagaac

SEQ ID NO: 24471 - RNA, 21 nt, synthetic construct
  source 1..21: mol_type = other RNA
ttggtgaaaacgaggggcctt

SEQ ID NO: 24472 - RNA, 21 nt, synthetic construct
  source 1..21: mol_type = other RNA
ttggtgggttatgcttgaggt

SEQ ID NO: 24473 - RNA, 21 nt, synthetic construct
  source 1..21: mol_type = other RNA
ttggtgtctccatttacttct

SEQ ID NO: 24474 - RNA, 21 nt, synthetic construct
  source 1..21: mol_type = other RNA
ttggtgtcttttctgaagaag

SEQ ID NO: 24475 - RNA, 21 nt, synthetic construct
  source 1..21: mol_type = other RNA
ttggttctatcctgttccatc

SEQ ID NO: 24476 - RNA, 21 nt, synthetic construct
  source 1..21: mol_type = other RNA
ttggttgactgctttcacctg

SEQ ID NO: 24477 - RNA, 21 nt, synthetic construct
  source 1..21: mol_type = other RNA
ttggttggggtagtggtggtg

SEQ ID NO: 24478 - RNA, 21 nt, synthetic construct
  source 1..21: mol_type = other RNA
ttggttggtgtcttttctgaa

SEQ ID NO: 24479 - RNA, 21 nt, synthetic construct
  source 1..21: mol_type = other RNA
ttgtaatttttgctgctgttg

SEQ ID NO: 24480 - RNA, 21 nt, synthetic construct
  source 1..21: mol_type = other RNA
ttgtagccagaggttctgtct

SEQ ID NO: 24481 - RNA, 21 nt, synthetic construct
  source 1..21: mol_type = other RNA
ttgtagttgttctggtttctg

SEQ ID NO: 24482 - RNA, 21 nt, synthetic construct
  source 1..21: mol_type = other RNA
ttgtcatggtaattagcactt

SEQ ID NO: 24483 - RNA, 21 nt, synthetic construct
  source 1..21: mol_type = other RNA
ttgtccctgcagtctgtatgt

SEQ ID NO: 24484 - RNA, 21 nt, synthetic construct
  source 1..21: mol_type = other RNA
ttgtcctgtagctctccactg

SEQ ID NO: 24485 - RNA, 21 nt, synthetic construct
  source 1..21: mol_type = other RNA
ttgtcctgtgagatcactcac

SEQ ID NO: 24486 - RNA, 21 nt, synthetic construct
  source 1..21: mol_type = other RNA
ttgtctagtcaaaactgtgac

SEQ ID NO: 24487 - RNA, 21 nt, synthetic construct
  source 1..21: mol_type = other RNA
ttgtctcgacccttcagaatc

SEQ ID NO: 24488 - RNA, 21 nt, synthetic construct
  source 1..21: mol_type = other RNA
ttgtgacttctgctcctgttc

SEQ ID NO: 24489 - RNA, 21 nt, synthetic construct
  source 1..21: mol_type = other RNA
ttgtgacttgtgctccagctg

SEQ ID NO: 24490 - RNA, 21 nt, synthetic construct
  source 1..21: mol_type = other RNA
ttgtgatggtggtggtggtgt

SEQ ID NO: 24491 - RNA, 21 nt, synthetic construct
  source 1..21: mol_type = other RNA
ttgtgcccccaacacagcact

SEQ ID NO: 24492 - RNA, 21 nt, synthetic construct
  source 1..21: mol_type = other RNA
ttgtgctccagctgtgttgtt

SEQ ID NO: 24493 - RNA, 21 nt, synthetic construct
  source 1..21: mol_type = other RNA
ttgtgctgcctgtttatgagg

SEQ ID NO: 24494 - RNA, 21 nt, synthetic construct
  source 1..21: mol_type = other RNA
ttgtggatggccccgaagcaa

SEQ ID NO: 24495 - RNA, 21 nt, synthetic construct
  source 1..21: mol_type = other RNA
ttgtggttccctggatgttat

SEQ ID NO: 24496 - RNA, 21 nt, synthetic construct
  source 1..21: mol_type = other RNA
ttgtgtaaagtcaggactcac

SEQ ID NO: 24497 - RNA, 21 nt, synthetic construct
  source 1..21: mol_type = other RNA
ttgtgtgaacaggaatgacat

SEQ ID NO: 24498 - RNA, 21 nt, synthetic construct
  source 1..21: mol_type = other RNA
ttgtgttactttggttggggt

SEQ ID NO: 24499 - RNA, 21 nt, synthetic construct
  source 1..21: mol_type = other RNA
ttgtgttctgagaaaacaaga

SEQ ID NO: 24500 - RNA, 21 nt, synthetic construct
  source 1..21: mol_type = other RNA
ttgtgtttccattgcggtgca

SEQ ID NO: 24501 - RNA, 21 nt, synthetic construct
  source 1..21: mol_type = other RNA
ttgtgtttgtgctgcctgttt

SEQ ID NO: 24502 - RNA, 21 nt, synthetic construct
  source 1..21: mol_type = other RNA
ttgttcaaacaatacacacct

SEQ ID NO: 24503 - RNA, 21 nt, synthetic construct
  source 1..21: mol_type = other RNA
ttgttctggtttctgaaagga

SEQ ID NO: 24504 - RNA, 21 nt, synthetic construct
  source 1..21: mol_type = other RNA
ttgttgaccagacatatcttg

SEQ ID NO: 24505 - RNA, 21 nt, synthetic construct
  source 1..21: mol_type = other RNA
ttgttgctttgggggtgagga

SEQ ID NO: 24506 - RNA, 21 nt, synthetic construct
  source 1..21: mol_type = other RNA
ttgttgtagttgttctggttt

SEQ ID NO: 24507 - RNA, 21 nt, synthetic construct
  source 1..21: mol_type = other RNA
ttgttgtgacttctgctcctg

SEQ ID NO: 24508 - RNA, 21 nt, synthetic construct
  source 1..21: mol_type = other RNA
ttgttgttgtagttgttctgg

SEQ ID NO: 24509 - RNA, 21 nt, synthetic construct
  source 1..21: mol_type = other RNA
ttgtttcaatttcttgatctg

SEQ ID NO: 24510 - RNA, 21 nt, synthetic construct
  source 1..21: mol_type = other RNA
ttgtttcctgcaaaaagttca

SEQ ID NO: 24511 - RNA, 21 nt, synthetic construct
  source 1..21: mol_type = other RNA
ttgtttctcatcaactgctgg

SEQ ID NO: 24512 - RNA, 21 nt, synthetic construct
  source 1..21: mol_type = other RNA
ttgtttgaacaagaaacctgt

SEQ ID NO: 24513 - RNA, 21 nt, synthetic construct
  source 1..21: mol_type = other RNA
ttgtttgctgctctaaagctg

SEQ ID NO: 24514 - RNA, 21 nt, synthetic construct
  source 1..21: mol_type = other RNA
ttgtttggaggtcatttgatt

SEQ ID NO: 24515 - RNA, 21 nt, synthetic construct
  source 1..21: mol_type = other RNA
ttgttttaaataccgttcaga

SEQ ID NO: 24516 - RNA, 21 nt, synthetic construct
  source 1..21: mol_type = other RNA
ttgttttctcagaacacaatg

SEQ ID NO: 24517 - RNA, 21 nt, synthetic construct
  source 1..21: mol_type = other RNA
ttgttttctgggtgtaagctt

SEQ ID NO: 24518 - RNA, 21 nt, synthetic construct
  source 1..21: mol_type = other RNA
ttgttttctggtggtgctgtg

SEQ ID NO: 24519 - RNA, 21 nt, synthetic construct
  source 1..21: mol_type = other RNA
tttaaataccgttcagagctg

SEQ ID NO: 24520 - RNA, 21 nt, synthetic construct
  source 1..21: mol_type = other RNA
tttaactgcattttcttgggc

SEQ ID NO: 24521 - RNA, 21 nt, synthetic construct
  source 1..21: mol_type = other RNA
tttaagggaagtgaaaataga

SEQ ID NO: 24522 - RNA, 21 nt, synthetic construct
  source 1..21: mol_type = other RNA
tttacacaagaaagtagaggg

SEQ ID NO: 24523 - RNA, 21 nt, synthetic construct
  source 1..21: mol_type = other RNA
tttaccaaaagctcatgtgca

SEQ ID NO: 24524 - RNA, 21 nt, synthetic construct
  source 1..21: mol_type = other RNA
tttaccctctattttcacttc

SEQ ID NO: 24525 - RNA, 21 nt, synthetic construct
  source 1..21: mol_type = other RNA
tttactggcattatcagcatc

SEQ ID NO: 24526 - RNA, 21 nt, synthetic construct
  source 1..21: mol_type = other RNA
tttacttctggatgagctctc

SEQ ID NO: 24527 - RNA, 21 nt, synthetic construct
  source 1..21: mol_type = other RNA
tttacttgcttctgtgatttg

SEQ ID NO: 24528 - RNA, 21 nt, synthetic construct
  source 1..21: mol_type = other RNA
tttagaagaacaccaccacta

SEQ ID NO: 24529 - RNA, 21 nt, synthetic construct
  source 1..21: mol_type = other RNA
tttagagcagcaaacaacttc

SEQ ID NO: 24530 - RNA, 21 nt, synthetic construct
  source 1..21: mol_type = other RNA
tttagatgggattccgcttgg

SEQ ID NO: 24531 - RNA, 21 nt, synthetic construct
  source 1..21: mol_type = other RNA
tttagcattgcagctagttta

SEQ ID NO: 24532 - RNA, 21 nt, synthetic construct
  source 1..21: mol_type = other RNA
tttagtctggccaaagaatga

SEQ ID NO: 24533 - RNA, 21 nt, synthetic construct
  source 1..21: mol_type = other RNA
tttatagagtcaccttccaaa

SEQ ID NO: 24534 - RNA, 21 nt, synthetic construct
  source 1..21: mol_type = other RNA
tttatatccctgtagaactga

SEQ ID NO: 24535 - RNA, 21 nt, synthetic construct
  source 1..21: mol_type = other RNA
tttatattctgtacttcctcc

SEQ ID NO: 24536 - RNA, 21 nt, synthetic construct
  source 1..21: mol_type = other RNA
tttatgaggcttatgttgcaa

SEQ ID NO: 24537 - RNA, 21 nt, synthetic construct
  source 1..21: mol_type = other RNA
tttatgtgagatgtggttttc

SEQ ID NO: 24538 - RNA, 21 nt, synthetic construct
  source 1..21: mol_type = other RNA
tttattcctccattttgcaaa

SEQ ID NO: 24539 - RNA, 21 nt, synthetic construct
  source 1..21: mol_type = other RNA
tttattctctgaaactaggtg

SEQ ID NO: 24540 - RNA, 21 nt, synthetic construct
  source 1..21: mol_type = other RNA
tttattggatacacctgtcaa

SEQ ID NO: 24541 - RNA, 21 nt, synthetic construct
  source 1..21: mol_type = other RNA
tttcaaactcacaccttttgc

SEQ ID NO: 24542 - RNA, 21 nt, synthetic construct
  source 1..21: mol_type = other RNA
tttcaacaaagagcagattcc

SEQ ID NO: 24543 - RNA, 21 nt, synthetic construct
  source 1..21: mol_type = other RNA
tttcaacacataactgcagtg

SEQ ID NO: 24544 - RNA, 21 nt, synthetic construct
  source 1..21: mol_type = other RNA
tttcaacactggggacataag

SEQ ID NO: 24545 - RNA, 21 nt, synthetic construct
  source 1..21: mol_type = other RNA
tttcaacttggtacatttgtg

SEQ ID NO: 24546 - RNA, 21 nt, synthetic construct
  source 1..21: mol_type = other RNA
tttcaacttttacttgcttct

SEQ ID NO: 24547 - RNA, 21 nt, synthetic construct
  source 1..21: mol_type = other RNA
tttcaagaacaggagcagaag

SEQ ID NO: 24548 - RNA, 21 nt, synthetic construct
  source 1..21: mol_type = other RNA
tttcaatttcttgatctgaag

SEQ ID NO: 24549 - RNA, 21 nt, synthetic construct
  source 1..21: mol_type = other RNA
tttcaccaagcggaatcccat

SEQ ID NO: 24550 - RNA, 21 nt, synthetic construct
  source 1..21: mol_type = other RNA
tttcaccagtttttcaacaca

SEQ ID NO: 24551 - RNA, 21 nt, synthetic construct
  source 1..21: mol_type = other RNA
tttcaccatgaaaacattctt

SEQ ID NO: 24552 - RNA, 21 nt, synthetic construct
  source 1..21: mol_type = other RNA
tttcacctggatttctttctt

SEQ ID NO: 24553 - RNA, 21 nt, synthetic construct
  source 1..21: mol_type = other RNA
tttcacgccaagtcgttattt

SEQ ID NO: 24554 - RNA, 21 nt, synthetic construct
  source 1..21: mol_type = other RNA
tttcacttcccttaaaagtgt

SEQ ID NO: 24555 - RNA, 21 nt, synthetic construct
  source 1..21: mol_type = other RNA
tttcagaaaccagaacaacta

SEQ ID NO: 24556 - RNA, 21 nt, synthetic construct
  source 1..21: mol_type = other RNA
tttcagaaagcatcggagaag

SEQ ID NO: 24557 - RNA, 21 nt, synthetic construct
  source 1..21: mol_type = other RNA
tttcagagaataaagaacaga

SEQ ID NO: 24558 - RNA, 21 nt, synthetic construct
  source 1..21: mol_type = other RNA
tttcagatagtgctgtgttgg

SEQ ID NO: 24559 - RNA, 21 nt, synthetic construct
  source 1..21: mol_type = other RNA
tttcaggcccactgcagttat

SEQ ID NO: 24560 - RNA, 21 nt, synthetic construct
  source 1..21: mol_type = other RNA
tttcagtttgggaatctgctc

SEQ ID NO: 24561 - RNA, 21 nt, synthetic construct
  source 1..21: mol_type = other RNA
tttcatggtctgactataagg

SEQ ID NO: 24562 - RNA, 21 nt, synthetic construct
  source 1..21: mol_type = other RNA
tttcatggtgaaaatcagtat

SEQ ID NO: 24563 - RNA, 21 nt, synthetic construct
  source 1..21: mol_type = other RNA
tttcattttcaacaaagagca

SEQ ID NO: 24564 - RNA, 21 nt, synthetic construct
  source 1..21: mol_type = other RNA
tttccaaataatgtgatccca

SEQ ID NO: 24565 - RNA, 21 nt, synthetic construct
  source 1..21: mol_type = other RNA
tttccaggagttcaccatgtg

SEQ ID NO: 24566 - RNA, 21 nt, synthetic construct
  source 1..21: mol_type = other RNA
tttccagtgtattgtttggag

SEQ ID NO: 24567 - RNA, 21 nt, synthetic construct
  source 1..21: mol_type = other RNA
tttccatgttttgttttctgg

SEQ ID NO: 24568 - RNA, 21 nt, synthetic construct
  source 1..21: mol_type = other RNA
tttccattgcggtgcagaaaa

SEQ ID NO: 24569 - RNA, 21 nt, synthetic construct
  source 1..21: mol_type = other RNA
tttcccatcttgcagatgtgt

SEQ ID NO: 24570 - RNA, 21 nt, synthetic construct
  source 1..21: mol_type = other RNA
tttcccctcctgctcattcag

SEQ ID NO: 24571 - RNA, 21 nt, synthetic construct
  source 1..21: mol_type = other RNA
tttcctcacccccaaagcaac

SEQ ID NO: 24572 - RNA, 21 nt, synthetic construct
  source 1..21: mol_type = other RNA
tttcctgcaaaaagttcagga

SEQ ID NO: 24573 - RNA, 21 nt, synthetic construct
  source 1..21: mol_type = other RNA
tttcctgtgcctgaccaggga

SEQ ID NO: 24574 - RNA, 21 nt, synthetic construct
  source 1..21: mol_type = other RNA
tttccttctgaaggaagctga

SEQ ID NO: 24575 - RNA, 21 nt, synthetic construct
  source 1..21: mol_type = other RNA
tttctcagaacacaatggaac

SEQ ID NO: 24576 - RNA, 21 nt, synthetic construct
  source 1..21: mol_type = other RNA
tttctcatcaactgctggcag

SEQ ID NO: 24577 - RNA, 21 nt, synthetic construct
  source 1..21: mol_type = other RNA
tttctccattagccttttggt

SEQ ID NO: 24578 - RNA, 21 nt, synthetic construct
  source 1..21: mol_type = other RNA
tttctccccctcctcctcttc

SEQ ID NO: 24579 - RNA, 21 nt, synthetic construct
  source 1..21: mol_type = other RNA
tttctgaaaggaacaggtatt

SEQ ID NO: 24580 - RNA, 21 nt, synthetic construct
  source 1..21: mol_type = other RNA
tttctgaaaggcctcagaata

SEQ ID NO: 24581 - RNA, 21 nt, synthetic construct
  source 1..21: mol_type = other RNA
tttctgaagaagttgtttgct

SEQ ID NO: 24582 - RNA, 21 nt, synthetic construct
  source 1..21: mol_type = other RNA
tttctgcaccgcaatggaaac

SEQ ID NO: 24583 - RNA, 21 nt, synthetic construct
  source 1..21: mol_type = other RNA
tttctgcaggagatgggcata

SEQ ID NO: 24584 - RNA, 21 nt, synthetic construct
  source 1..21: mol_type = other RNA
tttctgccactaccacaccac

SEQ ID NO: 24585 - RNA, 21 nt, synthetic construct
  source 1..21: mol_type = other RNA
tttctgcctcttccgtggaac

SEQ ID NO: 24586 - RNA, 21 nt, synthetic construct
  source 1..21: mol_type = other RNA
tttctggcacttacctacaca

SEQ ID NO: 24587 - RNA, 21 nt, synthetic construct
  source 1..21: mol_type = other RNA
tttctgggtgtaagcttgcct

SEQ ID NO: 24588 - RNA, 21 nt, synthetic construct
  source 1..21: mol_type = other RNA
tttctggtggtgctgtgtgca

SEQ ID NO: 24589 - RNA, 21 nt, synthetic construct
  source 1..21: mol_type = other RNA
tttcttatcactcaaatcgga

SEQ ID NO: 24590 - RNA, 21 nt, synthetic construct
  source 1..21: mol_type = other RNA
tttcttgatctgaaggagccc

SEQ ID NO: 24591 - RNA, 21 nt, synthetic construct
  source 1..21: mol_type = other RNA
tttcttggcttaccccgaagt

SEQ ID NO: 24592 - RNA, 21 nt, synthetic construct
  source 1..21: mol_type = other RNA
tttcttgggctacagaactca

SEQ ID NO: 24593 - RNA, 21 nt, synthetic construct
  source 1..21: mol_type = other RNA
tttcttgtgtaaagtcaggac

SEQ ID NO: 24594 - RNA, 21 nt, synthetic construct
  source 1..21: mol_type = other RNA
tttcttgttcaaacaatacac

SEQ ID NO: 24595 - RNA, 21 nt, synthetic construct
  source 1..21: mol_type = other RNA
tttctttcttggcttaccccg

SEQ ID NO: 24596 - RNA, 21 nt, synthetic construct
  source 1..21: mol_type = other RNA
tttgaaaatggctcagtctct

SEQ ID NO: 24597 - RNA, 21 nt, synthetic construct
  source 1..21: mol_type = other RNA
tttgaaagagtgccacttggt

SEQ ID NO: 24598 - RNA, 21 nt, synthetic construct
  source 1..21: mol_type = other RNA
tttgaacaagaaacctgtatt

SEQ ID NO: 24599 - RNA, 21 nt, synthetic construct
  source 1..21: mol_type = other RNA
tttgaatactgattttcacca

SEQ ID NO: 24600 - RNA, 21 nt, synthetic construct
  source 1..21: mol_type = other RNA
tttgaccataaggctcttact

SEQ ID NO: 24601 - RNA, 21 nt, synthetic construct
  source 1..21: mol_type = other RNA
tttgactagacaaaccactgc

SEQ ID NO: 24602 - RNA, 21 nt, synthetic construct
  source 1..21: mol_type = other RNA
tttgagagtaagagccttatg

SEQ ID NO: 24603 - RNA, 21 nt, synthetic construct
  source 1..21: mol_type = other RNA
tttgagatatgcccatctcct

SEQ ID NO: 24604 - RNA, 21 nt, synthetic construct
  source 1..21: mol_type = other RNA
tttgagggagatgtgaactct

SEQ ID NO: 24605 - RNA, 21 nt, synthetic construct
  source 1..21: mol_type = other RNA
tttgagtgataagaaagaatc

SEQ ID NO: 24606 - RNA, 21 nt, synthetic construct
  source 1..21: mol_type = other RNA
tttgagtgtccttctggggag

SEQ ID NO: 24607 - RNA, 21 nt, synthetic construct
  source 1..21: mol_type = other RNA
tttgattggagagattgggtt

SEQ ID NO: 24608 - RNA, 21 nt, synthetic construct
  source 1..21: mol_type = other RNA
tttgcaaaatggaggaataaa

SEQ ID NO: 24609 - RNA, 21 nt, synthetic construct
  source 1..21: mol_type = other RNA
tttgcaaacacttggaatacc

SEQ ID NO: 24610 - RNA, 21 nt, synthetic construct
  source 1..21: mol_type = other RNA
tttgcaacataagcctcataa

SEQ ID NO: 24611 - RNA, 21 nt, synthetic construct
  source 1..21: mol_type = other RNA
tttgcaagctcctggtggcag

SEQ ID NO: 24612 - RNA, 21 nt, synthetic construct
  source 1..21: mol_type = other RNA
tttgcaggaaacaagacccaa

SEQ ID NO: 24613 - RNA, 21 nt, synthetic construct
  source 1..21: mol_type = other RNA
tttgcatgcacttgatttcat

SEQ ID NO: 24614 - RNA, 21 nt, synthetic construct
  source 1..21: mol_type = other RNA
tttgcatggttatgtatcaag

SEQ ID NO: 24615 - RNA, 21 nt, synthetic construct
  source 1..21: mol_type = other RNA
tttgccagacagaacctctgg

SEQ ID NO: 24616 - RNA, 21 nt, synthetic construct
  source 1..21: mol_type = other RNA
tttgctccttgtctcgaccct

SEQ ID NO: 24617 - RNA, 21 nt, synthetic construct
  source 1..21: mol_type = other RNA
tttgctgagcaagttgcgcag

SEQ ID NO: 24618 - RNA, 21 nt, synthetic construct
  source 1..21: mol_type = other RNA
tttgctgatcattgttgcttt

SEQ ID NO: 24619 - RNA, 21 nt, synthetic construct
  source 1..21: mol_type = other RNA
tttgctgcacattatcacagc

SEQ ID NO: 24620 - RNA, 21 nt, synthetic construct
  source 1..21: mol_type = other RNA
tttgctgctctaaagctgggg

SEQ ID NO: 24621 - RNA, 21 nt, synthetic construct
  source 1..21: mol_type = other RNA
tttgctgctgttcttgcttct

SEQ ID NO: 24622 - RNA, 21 nt, synthetic construct
  source 1..21: mol_type = other RNA
tttgctgctgttgctggtttt

SEQ ID NO: 24623 - RNA, 21 nt, synthetic construct
  source 1..21: mol_type = other RNA
tttgcttgaagtaagcaccat

SEQ ID NO: 24624 - RNA, 21 nt, synthetic construct
  source 1..21: mol_type = other RNA
tttggaaaatattgcatgtga

SEQ ID NO: 24625 - RNA, 21 nt, synthetic construct
  source 1..21: mol_type = other RNA
tttggaactggagatgttggt

SEQ ID NO: 24626 - RNA, 21 nt, synthetic construct
  source 1..21: mol_type = other RNA
tttggaaggtgactctataaa

SEQ ID NO: 24627 - RNA, 21 nt, synthetic construct
  source 1..21: mol_type = other RNA
tttggacattatgagtctcga

SEQ ID NO: 24628 - RNA, 21 nt, synthetic construct
  source 1..21: mol_type = other RNA
tttggagaagtgcacctggtg

SEQ ID NO: 24629 - RNA, 21 nt, synthetic construct
  source 1..21: mol_type = other RNA
tttggaggcagctcagagtta

SEQ ID NO: 24630 - RNA, 21 nt, synthetic construct
  source 1..21: mol_type = other RNA
tttggaggtcatttgattgga

SEQ ID NO: 24631 - RNA, 21 nt, synthetic construct
  source 1..21: mol_type = other RNA
tttggccagactaaagtggaa

SEQ ID NO: 24632 - RNA, 21 nt, synthetic construct
  source 1..21: mol_type = other RNA
tttgggaatctgctctttgtt

SEQ ID NO: 24633 - RNA, 21 nt, synthetic construct
  source 1..21: mol_type = other RNA
tttgggatcacattatttgga

SEQ ID NO: 24634 - RNA, 21 nt, synthetic construct
  source 1..21: mol_type = other RNA
tttgggggtgaggaaaagtct

SEQ ID NO: 24635 - RNA, 21 nt, synthetic construct
  source 1..21: mol_type = other RNA
tttggggttgctgtgtttgct

SEQ ID NO: 24636 - RNA, 21 nt, synthetic construct
  source 1..21: mol_type = other RNA
tttgggtcttgtttcctgcaa

SEQ ID NO: 24637 - RNA, 21 nt, synthetic construct
  source 1..21: mol_type = other RNA
tttggtaaatggtctgttttg

SEQ ID NO: 24638 - RNA, 21 nt, synthetic construct
  source 1..21: mol_type = other RNA
tttggtagcagtggagagcta

SEQ ID NO: 24639 - RNA, 21 nt, synthetic construct
  source 1..21: mol_type = other RNA
tttggtcttgtttcaatttct

SEQ ID NO: 24640 - RNA, 21 nt, synthetic construct
  source 1..21: mol_type = other RNA
tttggttgactgctttcacct

SEQ ID NO: 24641 - RNA, 21 nt, synthetic construct
  source 1..21: mol_type = other RNA
tttggttggggtagtggtggt

SEQ ID NO: 24642 - RNA, 21 nt, synthetic construct
  source 1..21: mol_type = other RNA
tttggttggtgtcttttctga

SEQ ID NO: 24643 - RNA, 21 nt, synthetic construct
  source 1..21: mol_type = other RNA
tttgtaatttttgctgctgtt

SEQ ID NO: 24644 - RNA, 21 nt, synthetic construct
  source 1..21: mol_type = other RNA
tttgtagccagaggttctgtc

SEQ ID NO: 24645 - RNA, 21 nt, synthetic construct
  source 1..21: mol_type = other RNA
tttgtctagtcaaaactgtga

SEQ ID NO: 24646 - RNA, 21 nt, synthetic construct
  source 1..21: mol_type = other RNA
tttgtgacttgtgctccagct

SEQ ID NO: 24647 - RNA, 21 nt, synthetic construct
  source 1..21: mol_type = other RNA
tttgtgctgcctgtttatgag

SEQ ID NO: 24648 - RNA, 21 nt, synthetic construct
  source 1..21: mol_type = other RNA
tttgtggttccctggatgtta

SEQ ID NO: 24649 - RNA, 21 nt, synthetic construct
  source 1..21: mol_type = other RNA
tttgttgttgtagttgttctg

SEQ ID NO: 24650 - RNA, 21 nt, synthetic construct
  source 1..21: mol_type = other RNA
tttgtttctcatcaactgctg

SEQ ID NO: 24651 - RNA, 21 nt, synthetic construct
  source 1..21: mol_type = other RNA
tttgttttaaataccgttcag

SEQ ID NO: 24652 - RNA, 21 nt, synthetic construct
  source 1..21: mol_type = other RNA
tttgttttctggtggtgctgt

SEQ ID NO: 24653 - RNA, 21 nt, synthetic construct
  source 1..21: mol_type = other RNA
ttttaaataccgttcagagct

SEQ ID NO: 24654 - RNA, 21 nt, synthetic construct
  source 1..21: mol_type = other RNA
ttttaagggaagtgaaaatag

SEQ ID NO: 24655 - RNA, 21 nt, synthetic construct
  source 1..21: mol_type = other RNA
ttttacttgcttctgtgattt

SEQ ID NO: 24656 - RNA, 21 nt, synthetic construct
  source 1..21: mol_type = other RNA
ttttagaagaacaccaccact

SEQ ID NO: 24657 - RNA, 21 nt, synthetic construct
  source 1..21: mol_type = other RNA
ttttagatgggattccgcttg

SEQ ID NO: 24658 - RNA, 21 nt, synthetic construct
  source 1..21: mol_type = other RNA
ttttatagagtcaccttccaa

SEQ ID NO: 24659 - RNA, 21 nt, synthetic construct
  source 1..21: mol_type = other RNA
ttttatatccctgtagaactg

SEQ ID NO: 24660 - RNA, 21 nt, synthetic construct
  source 1..21: mol_type = other RNA
ttttattcctccattttgcaa

SEQ ID NO: 24661 - RNA, 21 nt, synthetic construct
  source 1..21: mol_type = other RNA
ttttcaaactcacaccttttg

SEQ ID NO: 24662 - RNA, 21 nt, synthetic construct
  source 1..21: mol_type = other RNA
ttttcaacaaagagcagattc

SEQ ID NO: 24663 - RNA, 21 nt, synthetic construct
  source 1..21: mol_type = other RNA
ttttcaacacataactgcagt

SEQ ID NO: 24664 - RNA, 21 nt, synthetic construct
  source 1..21: mol_type = other RNA
ttttcaccaagcggaatccca

SEQ ID NO: 24665 - RNA, 21 nt, synthetic construct
  source 1..21: mol_type = other RNA
ttttcaccatgaaaacattct

SEQ ID NO: 24666 - RNA, 21 nt, synthetic construct
  source 1..21: mol_type = other RNA
ttttcacttcccttaaaagtg

SEQ ID NO: 24667 - RNA, 21 nt, synthetic construct
  source 1..21: mol_type = other RNA
ttttcaggcccactgcagtta

SEQ ID NO: 24668 - RNA, 21 nt, synthetic construct
  source 1..21: mol_type = other RNA
ttttcagtttgggaatctgct

SEQ ID NO: 24669 - RNA, 21 nt, synthetic construct
  source 1..21: mol_type = other RNA
ttttcatggtgaaaatcagta

SEQ ID NO: 24670 - RNA, 21 nt, synthetic construct
  source 1..21: mol_type = other RNA
ttttccaaataatgtgatccc

SEQ ID NO: 24671 - RNA, 21 nt, synthetic construct
  source 1..21: mol_type = other RNA
ttttccaggagttcaccatgt

SEQ ID NO: 24672 - RNA, 21 nt, synthetic construct
  source 1..21: mol_type = other RNA
ttttccatgttttgttttctg

SEQ ID NO: 24673 - RNA, 21 nt, synthetic construct
  source 1..21: mol_type = other RNA
ttttcccctcctgctcattca

SEQ ID NO: 24674 - RNA, 21 nt, synthetic construct
  source 1..21: mol_type = other RNA
ttttcctcacccccaaagcaa

SEQ ID NO: 24675 - RNA, 21 nt, synthetic construct
  source 1..21: mol_type = other RNA
ttttcctgtgcctgaccaggg

SEQ ID NO: 24676 - RNA, 21 nt, synthetic construct
  source 1..21: mol_type = other RNA
ttttccttctgaaggaagctg

SEQ ID NO: 24677 - RNA, 21 nt, synthetic construct
  source 1..21: mol_type = other RNA
ttttctcagaacacaatggaa

SEQ ID NO: 24678 - RNA, 21 nt, synthetic construct
  source 1..21: mol_type = other RNA
ttttctgaagaagttgtttgc

SEQ ID NO: 24679 - RNA, 21 nt, synthetic construct
  source 1..21: mol_type = other RNA
ttttctgcaccgcaatggaaa

SEQ ID NO: 24680 - RNA, 21 nt, synthetic construct
  source 1..21: mol_type = other RNA
ttttctgcaggagatgggcat

SEQ ID NO: 24681 - RNA, 21 nt, synthetic construct
  source 1..21: mol_type = other RNA
ttttctgccactaccacacca

SEQ ID NO: 24682 - RNA, 21 nt, synthetic construct
  source 1..21: mol_type = other RNA
ttttctgggtgtaagcttgcc

SEQ ID NO: 24683 - RNA, 21 nt, synthetic construct
  source 1..21: mol_type = other RNA
ttttctggtggtgctgtgtgc

SEQ ID NO: 24684 - RNA, 21 nt, synthetic construct
  source 1..21: mol_type = other RNA
ttttcttgggctacagaactc

SEQ ID NO: 24685 - RNA, 21 nt, synthetic construct
  source 1..21: mol_type = other RNA
ttttgaaagagtgccacttgg

SEQ ID NO: 24686 - RNA, 21 nt, synthetic construct
  source 1..21: mol_type = other RNA
ttttgaatactgattttcacc

SEQ ID NO: 24687 - RNA, 21 nt, synthetic construct
  source 1..21: mol_type = other RNA
ttttgactagacaaaccactg

SEQ ID NO: 24688 - RNA, 21 nt, synthetic construct
  source 1..21: mol_type = other RNA
ttttgagatatgcccatctcc

SEQ ID NO: 24689 - RNA, 21 nt, synthetic construct
  source 1..21: mol_type = other RNA
ttttgagggagatgtgaactc

SEQ ID NO: 24690 - RNA, 21 nt, synthetic construct
  source 1..21: mol_type = other RNA
ttttgagtgtccttctgggga

SEQ ID NO: 24691 - RNA, 21 nt, synthetic construct
  source 1..21: mol_type = other RNA
ttttgcaaacacttggaatac

SEQ ID NO: 24692 - RNA, 21 nt, synthetic construct
  source 1..21: mol_type = other RNA
ttttgcaacataagcctcata

SEQ ID NO: 24693 - RNA, 21 nt, synthetic construct
  source 1..21: mol_type = other RNA
ttttgcaggaaacaagaccca

SEQ ID NO: 24694 - RNA, 21 nt, synthetic construct
  source 1..21: mol_type = other RNA
ttttgcatgcacttgatttca

SEQ ID NO: 24695 - RNA, 21 nt, synthetic construct
  source 1..21: mol_type = other RNA
ttttgctgcacattatcacag

SEQ ID NO: 24696 - RNA, 21 nt, synthetic construct
  source 1..21: mol_type = other RNA
ttttgctgctgttgctggttt

SEQ ID NO: 24697 - RNA, 21 nt, synthetic construct
  source 1..21: mol_type = other RNA
ttttggaactggagatgttgg

SEQ ID NO: 24698 - RNA, 21 nt, synthetic construct
  source 1..21: mol_type = other RNA
ttttggagaagtgcacctggt

SEQ ID NO: 24699 - RNA, 21 nt, synthetic construct
  source 1..21: mol_type = other RNA
ttttgggtcttgtttcctgca

SEQ ID NO: 24700 - RNA, 21 nt, synthetic construct
  source 1..21: mol_type = other RNA
ttttggtaaatggtctgtttt

SEQ ID NO: 24701 - RNA, 21 nt, synthetic construct
  source 1..21: mol_type = other RNA
ttttggtagcagtggagagct

SEQ ID NO: 24702 - RNA, 21 nt, synthetic construct
  source 1..21: mol_type = other RNA
ttttggtcttgtttcaatttc

SEQ ID NO: 24703 - RNA, 21 nt, synthetic construct
  source 1..21: mol_type = other RNA
ttttggttggtgtcttttctg

SEQ ID NO: 24704 - RNA, 21 nt, synthetic construct
  source 1..21: mol_type = other RNA
ttttgttgttgtagttgttct

SEQ ID NO: 24705 - RNA, 21 nt, synthetic construct
  source 1..21: mol_type = other RNA
ttttgttttctggtggtgctg

SEQ ID NO: 24706 - RNA, 21 nt, synthetic construct
  source 1..21: mol_type = other RNA
tttttatatccctgtagaact

SEQ ID NO: 24707 - RNA, 21 nt, synthetic construct
  source 1..21: mol_type = other RNA
tttttcaacacataactgcag

SEQ ID NO: 24708 - RNA, 21 nt, synthetic construct
  source 1..21: mol_type = other RNA
tttttcagtttgggaatctgc

SEQ ID NO: 24709 - RNA, 21 nt, synthetic construct
  source 1..21: mol_type = other RNA
tttttccaggagttcaccatg

SEQ ID NO: 24710 - RNA, 21 nt, synthetic construct
  source 1..21: mol_type = other RNA
tttttcctgtgcctgaccagg

SEQ ID NO: 24711 - RNA, 21 nt, synthetic construct
  source 1..21: mol_type = other RNA
tttttccttctgaaggaagct

SEQ ID NO: 24712 - RNA, 21 nt, synthetic construct
  source 1..21: mol_type = other RNA
tttttgagatatgcccatctc

SEQ ID NO: 24713 - RNA, 21 nt, synthetic construct
  source 1..21: mol_type = other RNA
tttttgcaggaaacaagaccc

SEQ ID NO: 24714 - RNA, 21 nt, synthetic construct
  source 1..21: mol_type = other RNA
tttttgctgctgttgctggtt

SEQ ID NO: 24715 - RNA, 21 nt, synthetic construct
  source 1..21: mol_type = other RNA
tttttggaactggagatgttg

SEQ ID NO: 24716 - RNA, 21 nt, synthetic construct
  source 1..21: mol_type = other RNA
tttttggtagcagtggagagc

SEQ ID NO: 24717 - RNA, 21 nt, synthetic construct
  source 1..21: mol_type = other RNA
tttttgttgttgtagttgttc

SEQ ID NO: 24718 - RNA, 21 nt, synthetic construct
  source 1..21: mol_type = other RNA
ttttttccaggagttcaccat

SEQ ID NO: 24719 - RNA, 22 nt, synthetic construct
  source 1..22: mol_type = other RNA
aaaaacaaggcagtgctaatgc

SEQ ID NO: 24720 - RNA, 22 nt, synthetic construct
  source 1..22: mol_type = other RNA
aaaaacatttgcatggttatgt

SEQ ID NO: 24721 - RNA, 22 nt, synthetic construct
  source 1..22: mol_type = other RNA
aaaaaccctcacaccaggtgca

SEQ ID NO: 24722 - RNA, 22 nt, synthetic construct
  source 1..22: mol_type = other RNA
aaaaactggtgaaatctttaac

SEQ ID NO: 24723 - RNA, 22 nt, synthetic construct
  source 1..22: mol_type = other RNA
aaaaacttatgtccccagtgtt

SEQ ID NO: 24724 - RNA, 22 nt, synthetic construct
  source 1..22: mol_type = other RNA
aaaaagcactctgaatggtgga

SEQ ID NO: 24725 - RNA, 22 nt, synthetic construct
  source 1..22: mol_type = other RNA
aaaaaggtaactaagcaagaga

SEQ ID NO: 24726 - RNA, 22 nt, synthetic construct
  source 1..22: mol_type = other RNA
aaaaagttcaggatgtgtagtc

SEQ ID NO: 24727 - RNA, 22 nt, synthetic construct
  source 1..22: mol_type = other RNA
aaaaattggtgggttatgcttg

SEQ ID NO: 24728 - RNA, 22 nt, synthetic construct
  source 1..22: mol_type = other RNA
aaaaatttattggatacacctg

SEQ ID NO: 24729 - RNA, 22 nt, synthetic construct
  source 1..22: mol_type = other RNA
aaaacaaaacatggaaaaaggt

SEQ ID NO: 24730 - RNA, 22 nt, synthetic construct
  source 1..22: mol_type = other RNA
aaaacaacacagctggagcaca

SEQ ID NO: 24731 - RNA, 22 nt, synthetic construct
  source 1..22: mol_type = other RNA
aaaacaagaccaatgtcagaac

SEQ ID NO: 24732 - RNA, 22 nt, synthetic construct
  source 1..22: mol_type = other RNA
aaaacaaggcagtgctaatgcc

SEQ ID NO: 24733 - RNA, 22 nt, synthetic construct
  source 1..22: mol_type = other RNA
aaaacactgtctcaatattatc

SEQ ID NO: 24734 - RNA, 22 nt, synthetic construct
  source 1..22: mol_type = other RNA
aaaacagaccatttaccaaaag

SEQ ID NO: 24735 - RNA, 22 nt, synthetic construct
  source 1..22: mol_type = other RNA
aaaacatggaaaaaggtaacta

SEQ ID NO: 24736 - RNA, 22 nt, synthetic construct
  source 1..22: mol_type = other RNA
aaaacattcttccactttagtc

SEQ ID NO: 24737 - RNA, 22 nt, synthetic construct
  source 1..22: mol_type = other RNA
aaaacatttgcatggttatgta

SEQ ID NO: 24738 - RNA, 22 nt, synthetic construct
  source 1..22: mol_type = other RNA
aaaaccacatctcacataaatg

SEQ ID NO: 24739 - RNA, 22 nt, synthetic construct
  source 1..22: mol_type = other RNA
aaaaccagcaacagcagcaaaa

SEQ ID NO: 24740 - RNA, 22 nt, synthetic construct
  source 1..22: mol_type = other RNA
aaaaccctcacaccaggtgcac

SEQ ID NO: 24741 - RNA, 22 nt, synthetic construct
  source 1..22: mol_type = other RNA
aaaacgaggggccttcaattca

SEQ ID NO: 24742 - RNA, 22 nt, synthetic construct
  source 1..22: mol_type = other RNA
aaaacgcacagttagtgaacct

SEQ ID NO: 24743 - RNA, 22 nt, synthetic construct
  source 1..22: mol_type = other RNA
aaaacgtaatgaggcatcactg

SEQ ID NO: 24744 - RNA, 22 nt, synthetic construct
  source 1..22: mol_type = other RNA
aaaactccaccattcagagtgc

SEQ ID NO: 24745 - RNA, 22 nt, synthetic construct
  source 1..22: mol_type = other RNA
aaaactggtgaaatctttaact

SEQ ID NO: 24746 - RNA, 22 nt, synthetic construct
  source 1..22: mol_type = other RNA
aaaactgtgactggccctgaca

SEQ ID NO: 24747 - RNA, 22 nt, synthetic construct
  source 1..22: mol_type = other RNA
aaaacttatgtccccagtgttg

SEQ ID NO: 24748 - RNA, 22 nt, synthetic construct
  source 1..22: mol_type = other RNA
aaaacttgcatcacatgcaata

SEQ ID NO: 24749 - RNA, 22 nt, synthetic construct
  source 1..22: mol_type = other RNA
aaaagaacagctgcttctgttc

SEQ ID NO: 24750 - RNA, 22 nt, synthetic construct
  source 1..22: mol_type = other RNA
aaaagacaccaaccaaaagaac

SEQ ID NO: 24751 - RNA, 22 nt, synthetic construct
  source 1..22: mol_type = other RNA
aaaagagcatcattgagaccat

SEQ ID NO: 24752 - RNA, 22 nt, synthetic construct
  source 1..22: mol_type = other RNA
aaaagcactctgaatggtggag

SEQ ID NO: 24753 - RNA, 22 nt, synthetic construct
  source 1..22: mol_type = other RNA
aaaagcatgctgctctaaggtg

SEQ ID NO: 24754 - RNA, 22 nt, synthetic construct
  source 1..22: mol_type = other RNA
aaaagctcatgtgcagtcactg

SEQ ID NO: 24755 - RNA, 22 nt, synthetic construct
  source 1..22: mol_type = other RNA
aaaaggaatccttagtgaacac

SEQ ID NO: 24756 - RNA, 22 nt, synthetic construct
  source 1..22: mol_type = other RNA
aaaaggctaatggagaaagacg

SEQ ID NO: 24757 - RNA, 22 nt, synthetic construct
  source 1..22: mol_type = other RNA
aaaaggtaactaagcaagagaa

SEQ ID NO: 24758 - RNA, 22 nt, synthetic construct
  source 1..22: mol_type = other RNA
aaaaggtgtgagtttgaaaatg

SEQ ID NO: 24759 - RNA, 22 nt, synthetic construct
  source 1..22: mol_type = other RNA
aaaagtctggagtatttcctct

SEQ ID NO: 24760 - RNA, 22 nt, synthetic construct
  source 1..22: mol_type = other RNA
aaaagtgctaattaccatgaca

SEQ ID NO: 24761 - RNA, 22 nt, synthetic construct
  source 1..22: mol_type = other RNA
aaaagtgttgtgttactttggt

SEQ ID NO: 24762 - RNA, 22 nt, synthetic construct
  source 1..22: mol_type = other RNA
aaaagttattatggaataccct

SEQ ID NO: 24763 - RNA, 22 nt, synthetic construct
  source 1..22: mol_type = other RNA
aaaagttcaggatgtgtagtct

SEQ ID NO: 24764 - RNA, 22 nt, synthetic construct
  source 1..22: mol_type = other RNA
aaaagttgaaatgtcagggcca

SEQ ID NO: 24765 - RNA, 22 nt, synthetic construct
  source 1..22: mol_type = other RNA
aaaataacatccagggaaccac

SEQ ID NO: 24766 - RNA, 22 nt, synthetic construct
  source 1..22: mol_type = other RNA
aaaatacaggtttcttgttcaa

SEQ ID NO: 24767 - RNA, 22 nt, synthetic construct
  source 1..22: mol_type = other RNA
aaaatagaaaccaagatatgtc

SEQ ID NO: 24768 - RNA, 22 nt, synthetic construct
  source 1..22: mol_type = other RNA
aaaatagagggtaaacctgagg

SEQ ID NO: 24769 - RNA, 22 nt, synthetic construct
  source 1..22: mol_type = other RNA
aaaatattgcatgtgatgcaag

SEQ ID NO: 24770 - RNA, 22 nt, synthetic construct
  source 1..22: mol_type = other RNA
aaaatcaagcgagttcgagact

SEQ ID NO: 24771 - RNA, 22 nt, synthetic construct
  source 1..22: mol_type = other RNA
aaaatcagtttttgagatatgc

SEQ ID NO: 24772 - RNA, 22 nt, synthetic construct
  source 1..22: mol_type = other RNA
aaaatccagagcttcagattct

SEQ ID NO: 24773 - RNA, 22 nt, synthetic construct
  source 1..22: mol_type = other RNA
aaaatgaaatctagtgccacac

SEQ ID NO: 24774 - RNA, 22 nt, synthetic construct
  source 1..22: mol_type = other RNA
aaaatgaaatgaatggtgctta

SEQ ID NO: 24775 - RNA, 22 nt, synthetic construct
  source 1..22: mol_type = other RNA
aaaatgcagttaaagatttcac

SEQ ID NO: 24776 - RNA, 22 nt, synthetic construct
  source 1..22: mol_type = other RNA
aaaatggaggaataaaacgcac

SEQ ID NO: 24777 - RNA, 22 nt, synthetic construct
  source 1..22: mol_type = other RNA
aaaatggctcagtctctgaagc

SEQ ID NO: 24778 - RNA, 22 nt, synthetic construct
  source 1..22: mol_type = other RNA
aaaattattgagaacagaagca

SEQ ID NO: 24779 - RNA, 22 nt, synthetic construct
  source 1..22: mol_type = other RNA
aaaattggtgggttatgcttga

SEQ ID NO: 24780 - RNA, 22 nt, synthetic construct
  source 1..22: mol_type = other RNA
aaaatttattggatacacctgt

SEQ ID NO: 24781 - RNA, 22 nt, synthetic construct
  source 1..22: mol_type = other RNA
aaacaaaacatggaaaaaggta

SEQ ID NO: 24782 - RNA, 22 nt, synthetic construct
  source 1..22: mol_type = other RNA
aaacaaaatgaaatgaatggtg

SEQ ID NO: 24783 - RNA, 22 nt, synthetic construct
  source 1..22: mol_type = other RNA
aaacaaagagcaagagattctg

SEQ ID NO: 24784 - RNA, 22 nt, synthetic construct
  source 1..22: mol_type = other RNA
aaacaacacagctggagcacaa

SEQ ID NO: 24785 - RNA, 22 nt, synthetic construct
  source 1..22: mol_type = other RNA
aaacaacttcttcagaaaagac

SEQ ID NO: 24786 - RNA, 22 nt, synthetic construct
  source 1..22: mol_type = other RNA
aaacaagaccaaaaggctaatg

SEQ ID NO: 24787 - RNA, 22 nt, synthetic construct
  source 1..22: mol_type = other RNA
aaacaagaccaatgtcagaaca

SEQ ID NO: 24788 - RNA, 22 nt, synthetic construct
  source 1..22: mol_type = other RNA
aaacaagacccaaaacttgcat

SEQ ID NO: 24789 - RNA, 22 nt, synthetic construct
  source 1..22: mol_type = other RNA
aaacaaggcagtgctaatgcct

SEQ ID NO: 24790 - RNA, 22 nt, synthetic construct
  source 1..22: mol_type = other RNA
aaacaatacacacctagtttca

SEQ ID NO: 24791 - RNA, 22 nt, synthetic construct
  source 1..22: mol_type = other RNA
aaacaatacactggaaattcca

SEQ ID NO: 24792 - RNA, 22 nt, synthetic construct
  source 1..22: mol_type = other RNA
aaacacaaccatcccagagttc

SEQ ID NO: 24793 - RNA, 22 nt, synthetic construct
  source 1..22: mol_type = other RNA
aaacacaatctggataatattg

SEQ ID NO: 24794 - RNA, 22 nt, synthetic construct
  source 1..22: mol_type = other RNA
aaacacagcaaccccaaactga

SEQ ID NO: 24795 - RNA, 22 nt, synthetic construct
  source 1..22: mol_type = other RNA
aaacacgagatcttgtgccccc

SEQ ID NO: 24796 - RNA, 22 nt, synthetic construct
  source 1..22: mol_type = other RNA
aaacactgtctcaatattatcc

SEQ ID NO: 24797 - RNA, 22 nt, synthetic construct
  source 1..22: mol_type = other RNA
aaacacttggaataccctctac

SEQ ID NO: 24798 - RNA, 22 nt, synthetic construct
  source 1..22: mol_type = other RNA
aaacagaccatttaccaaaagc

SEQ ID NO: 24799 - RNA, 22 nt, synthetic construct
  source 1..22: mol_type = other RNA
aaacagcacttgaatcaacagg

SEQ ID NO: 24800 - RNA, 22 nt, synthetic construct
  source 1..22: mol_type = other RNA
aaacaggcagcacaaacacaac

SEQ ID NO: 24801 - RNA, 22 nt, synthetic construct
  source 1..22: mol_type = other RNA
aaacatggaaaaaggtaactaa

SEQ ID NO: 24802 - RNA, 22 nt, synthetic construct
  source 1..22: mol_type = other RNA
aaacattcttccactttagtct

SEQ ID NO: 24803 - RNA, 22 nt, synthetic construct
  source 1..22: mol_type = other RNA
aaacatttgcatggttatgtat

SEQ ID NO: 24804 - RNA, 22 nt, synthetic construct
  source 1..22: mol_type = other RNA
aaaccaagatatgtctggtcaa

SEQ ID NO: 24805 - RNA, 22 nt, synthetic construct
  source 1..22: mol_type = other RNA
aaaccacatctcacataaatgc

SEQ ID NO: 24806 - RNA, 22 nt, synthetic construct
  source 1..22: mol_type = other RNA
aaaccactgctgcagaacttga

SEQ ID NO: 24807 - RNA, 22 nt, synthetic construct
  source 1..22: mol_type = other RNA
aaaccagaacaactacaacaac

SEQ ID NO: 24808 - RNA, 22 nt, synthetic construct
  source 1..22: mol_type = other RNA
aaaccagcaacagcagcaaaaa

SEQ ID NO: 24809 - RNA, 22 nt, synthetic construct
  source 1..22: mol_type = other RNA
aaaccaggatggattgaattga

SEQ ID NO: 24810 - RNA, 22 nt, synthetic construct
  source 1..22: mol_type = other RNA
aaaccctcacaccaggtgcact

SEQ ID NO: 24811 - RNA, 22 nt, synthetic construct
  source 1..22: mol_type = other RNA
aaacctgaggcaccaccttccc

SEQ ID NO: 24812 - RNA, 22 nt, synthetic construct
  source 1..22: mol_type = other RNA
aaacctgtattttgcatgcact

SEQ ID NO: 24813 - RNA, 22 nt, synthetic construct
  source 1..22: mol_type = other RNA
aaacgaggggccttcaattcaa

SEQ ID NO: 24814 - RNA, 22 nt, synthetic construct
  source 1..22: mol_type = other RNA
aaacgcacagttagtgaacctt

SEQ ID NO: 24815 - RNA, 22 nt, synthetic construct
  source 1..22: mol_type = other RNA
aaacgccatgtgtctcagtaca

SEQ ID NO: 24816 - RNA, 22 nt, synthetic construct
  source 1..22: mol_type = other RNA
aaacgtaatgaggcatcactgc

SEQ ID NO: 24817 - RNA, 22 nt, synthetic construct
  source 1..22: mol_type = other RNA
aaactagctgcaatgctaaata

SEQ ID NO: 24818 - RNA, 22 nt, synthetic construct
  source 1..22: mol_type = other RNA
aaactaggtgtgtattgtttga

SEQ ID NO: 24819 - RNA, 22 nt, synthetic construct
  source 1..22: mol_type = other RNA
aaactcacaccttttgcaacat

SEQ ID NO: 24820 - RNA, 22 nt, synthetic construct
  source 1..22: mol_type = other RNA
aaactccaccattcagagtgct

SEQ ID NO: 24821 - RNA, 22 nt, synthetic construct
  source 1..22: mol_type = other RNA
aaactgaaaaacttatgtcccc

SEQ ID NO: 24822 - RNA, 22 nt, synthetic construct
  source 1..22: mol_type = other RNA
aaactgagtcttgccatagtca

SEQ ID NO: 24823 - RNA, 22 nt, synthetic construct
  source 1..22: mol_type = other RNA
aaactgatttttgttgttgtag

SEQ ID NO: 24824 - RNA, 22 nt, synthetic construct
  source 1..22: mol_type = other RNA
aaactgcttcagatgctgctcc

SEQ ID NO: 24825 - RNA, 22 nt, synthetic construct
  source 1..22: mol_type = other RNA
aaactggtgaaatctttaactg

SEQ ID NO: 24826 - RNA, 22 nt, synthetic construct
  source 1..22: mol_type = other RNA
aaactgtagcaccattaggcat

SEQ ID NO: 24827 - RNA, 22 nt, synthetic construct
  source 1..22: mol_type = other RNA
aaactgtgactggccctgacat

SEQ ID NO: 24828 - RNA, 22 nt, synthetic construct
  source 1..22: mol_type = other RNA
aaacttatgtccccagtgttga

SEQ ID NO: 24829 - RNA, 22 nt, synthetic construct
  source 1..22: mol_type = other RNA
aaacttgcatcacatgcaatat

SEQ ID NO: 24830 - RNA, 22 nt, synthetic construct
  source 1..22: mol_type = other RNA
aaagaaatccaggtgaaagcag

SEQ ID NO: 24831 - RNA, 22 nt, synthetic construct
  source 1..22: mol_type = other RNA
aaagaacagactacacatcctg

SEQ ID NO: 24832 - RNA, 22 nt, synthetic construct
  source 1..22: mol_type = other RNA
aaagaacagctgcttctgttct

SEQ ID NO: 24833 - RNA, 22 nt, synthetic construct
  source 1..22: mol_type = other RNA
aaagaagcaattgtgatggtgg

SEQ ID NO: 24834 - RNA, 22 nt, synthetic construct
  source 1..22: mol_type = other RNA
aaagaataaagaggaaatactc

SEQ ID NO: 24835 - RNA, 22 nt, synthetic construct
  source 1..22: mol_type = other RNA
aaagaatctgtgagttctgtag

SEQ ID NO: 24836 - RNA, 22 nt, synthetic construct
  source 1..22: mol_type = other RNA
aaagaatgatccttctctttgc

SEQ ID NO: 24837 - RNA, 22 nt, synthetic construct
  source 1..22: mol_type = other RNA
aaagacaccaaccaaaagaaca

SEQ ID NO: 24838 - RNA, 22 nt, synthetic construct
  source 1..22: mol_type = other RNA
aaagacgtaacttcggggtaag

SEQ ID NO: 24839 - RNA, 22 nt, synthetic construct
  source 1..22: mol_type = other RNA
aaagagaaggatcattctttgg

SEQ ID NO: 24840 - RNA, 22 nt, synthetic construct
  source 1..22: mol_type = other RNA
aaagagcaagagattctgaagg

SEQ ID NO: 24841 - RNA, 22 nt, synthetic construct
  source 1..22: mol_type = other RNA
aaagagcagattcccaaactga

SEQ ID NO: 24842 - RNA, 22 nt, synthetic construct
  source 1..22: mol_type = other RNA
aaagagcatcattgagaccatg

SEQ ID NO: 24843 - RNA, 22 nt, synthetic construct
  source 1..22: mol_type = other RNA
aaagaggaaatactccagactt

SEQ ID NO: 24844 - RNA, 22 nt, synthetic construct
  source 1..22: mol_type = other RNA
aaagagtgccacttggtgtctc

SEQ ID NO: 24845 - RNA, 22 nt, synthetic construct
  source 1..22: mol_type = other RNA
aaagatttcaccagtttttcaa

SEQ ID NO: 24846 - RNA, 22 nt, synthetic construct
  source 1..22: mol_type = other RNA
aaagcaacaatgatcagcaaag

SEQ ID NO: 24847 - RNA, 22 nt, synthetic construct
  source 1..22: mol_type = other RNA
aaagcaagatcttcttcacagg

SEQ ID NO: 24848 - RNA, 22 nt, synthetic construct
  source 1..22: mol_type = other RNA
aaagcacctgtgaagaagatct

SEQ ID NO: 24849 - RNA, 22 nt, synthetic construct
  source 1..22: mol_type = other RNA
aaagcactctgaatggtggagt

SEQ ID NO: 24850 - RNA, 22 nt, synthetic construct
  source 1..22: mol_type = other RNA
aaagcagtcaaccaaatgtctc

SEQ ID NO: 24851 - RNA, 22 nt, synthetic construct
  source 1..22: mol_type = other RNA
aaagcatcggagaagggctgca

SEQ ID NO: 24852 - RNA, 22 nt, synthetic construct
  source 1..22: mol_type = other RNA
aaagcatgctgctctaaggtgg

SEQ ID NO: 24853 - RNA, 22 nt, synthetic construct
  source 1..22: mol_type = other RNA
aaagccagctgcagtggtgagt

SEQ ID NO: 24854 - RNA, 22 nt, synthetic construct
  source 1..22: mol_type = other RNA
aaagctagcgtctggtgaagaa

SEQ ID NO: 24855 - RNA, 22 nt, synthetic construct
  source 1..22: mol_type = other RNA
aaagctcagtgttcactaagga

SEQ ID NO: 24856 - RNA, 22 nt, synthetic construct
  source 1..22: mol_type = other RNA
aaagctcatgtgcagtcactgt

SEQ ID NO: 24857 - RNA, 22 nt, synthetic construct
  source 1..22: mol_type = other RNA
aaagctccagaatggaagccca

SEQ ID NO: 24858 - RNA, 22 nt, synthetic construct
  source 1..22: mol_type = other RNA
aaagctggggtgtggctatcaa

SEQ ID NO: 24859 - RNA, 22 nt, synthetic construct
  source 1..22: mol_type = other RNA
aaaggaacaggtatttagcatt

SEQ ID NO: 24860 - RNA, 22 nt, synthetic construct
  source 1..22: mol_type = other RNA
aaaggaatccttagtgaacact

SEQ ID NO: 24861 - RNA, 22 nt, synthetic construct
  source 1..22: mol_type = other RNA
aaaggcctcagaataattgtgt

SEQ ID NO: 24862 - RNA, 22 nt, synthetic construct
  source 1..22: mol_type = other RNA
aaaggctaatggagaaagacgt

SEQ ID NO: 24863 - RNA, 22 nt, synthetic construct
  source 1..22: mol_type = other RNA
aaaggtaactaagcaagagaat

SEQ ID NO: 24864 - RNA, 22 nt, synthetic construct
  source 1..22: mol_type = other RNA
aaaggtacttgatacataacca

SEQ ID NO: 24865 - RNA, 22 nt, synthetic construct
  source 1..22: mol_type = other RNA
aaaggtgtgagtttgaaaatgg

SEQ ID NO: 24866 - RNA, 22 nt, synthetic construct
  source 1..22: mol_type = other RNA
aaagtaacacaacacttttaag

SEQ ID NO: 24867 - RNA, 22 nt, synthetic construct
  source 1..22: mol_type = other RNA
aaagtagagggtattccaagtg

SEQ ID NO: 24868 - RNA, 22 nt, synthetic construct
  source 1..22: mol_type = other RNA
aaagtcaggactcacacgacta

SEQ ID NO: 24869 - RNA, 22 nt, synthetic construct
  source 1..22: mol_type = other RNA
aaagtctggagtatttcctctt

SEQ ID NO: 24870 - RNA, 22 nt, synthetic construct
  source 1..22: mol_type = other RNA
aaagtgctaattaccatgacaa

SEQ ID NO: 24871 - RNA, 22 nt, synthetic construct
  source 1..22: mol_type = other RNA
aaagtggaagaatgttttcatg

SEQ ID NO: 24872 - RNA, 22 nt, synthetic construct
  source 1..22: mol_type = other RNA
aaagtgttgtgttactttggtt

SEQ ID NO: 24873 - RNA, 22 nt, synthetic construct
  source 1..22: mol_type = other RNA
aaagttattatggaataccctg

SEQ ID NO: 24874 - RNA, 22 nt, synthetic construct
  source 1..22: mol_type = other RNA
aaagttcaggatgtgtagtctg

SEQ ID NO: 24875 - RNA, 22 nt, synthetic construct
  source 1..22: mol_type = other RNA
aaagttgaaatgtcagggccag

SEQ ID NO: 24876 - RNA, 22 nt, synthetic construct
  source 1..22: mol_type = other RNA
aaataacatccagggaaccaca

SEQ ID NO: 24877 - RNA, 22 nt, synthetic construct
  source 1..22: mol_type = other RNA
aaataacgacttggcgtgaaac

SEQ ID NO: 24878 - RNA, 22 nt, synthetic construct
  source 1..22: mol_type = other RNA
aaataatgtgatcccaaagcaa

SEQ ID NO: 24879 - RNA, 22 nt, synthetic construct
  source 1..22: mol_type = other RNA
aaatacaggtttcttgttcaaa

SEQ ID NO: 24880 - RNA, 22 nt, synthetic construct
  source 1..22: mol_type = other RNA
aaataccgttcagagctgccac

SEQ ID NO: 24881 - RNA, 22 nt, synthetic construct
  source 1..22: mol_type = other RNA
aaatacctgttcctttcagaaa

SEQ ID NO: 24882 - RNA, 22 nt, synthetic construct
  source 1..22: mol_type = other RNA
aaatactccagacttttcctca

SEQ ID NO: 24883 - RNA, 22 nt, synthetic construct
  source 1..22: mol_type = other RNA
aaatagaaaccaagatatgtct

SEQ ID NO: 24884 - RNA, 22 nt, synthetic construct
  source 1..22: mol_type = other RNA
aaatagagggtaaacctgaggc

SEQ ID NO: 24885 - RNA, 22 nt, synthetic construct
  source 1..22: mol_type = other RNA
aaatattgcatgtgatgcaagt

SEQ ID NO: 24886 - RNA, 22 nt, synthetic construct
  source 1..22: mol_type = other RNA
aaatcaagcgagttcgagactc

SEQ ID NO: 24887 - RNA, 22 nt, synthetic construct
  source 1..22: mol_type = other RNA
aaatcaagtgcatgcaaaatac

SEQ ID NO: 24888 - RNA, 22 nt, synthetic construct
  source 1..22: mol_type = other RNA
aaatcacagaagcaagtaaaag

SEQ ID NO: 24889 - RNA, 22 nt, synthetic construct
  source 1..22: mol_type = other RNA
aaatcagtattcaaaatcaagc

SEQ ID NO: 24890 - RNA, 22 nt, synthetic construct
  source 1..22: mol_type = other RNA
aaatcagtttttgagatatgcc

SEQ ID NO: 24891 - RNA, 22 nt, synthetic construct
  source 1..22: mol_type = other RNA
aaatcatattgagtcttgacag

SEQ ID NO: 24892 - RNA, 22 nt, synthetic construct
  source 1..22: mol_type = other RNA
aaatccagagcttcagattctg

SEQ ID NO: 24893 - RNA, 22 nt, synthetic construct
  source 1..22: mol_type = other RNA
aaatccaggtgaaagcagtcaa

SEQ ID NO: 24894 - RNA, 22 nt, synthetic construct
  source 1..22: mol_type = other RNA
aaatcggagacatttggttgac

SEQ ID NO: 24895 - RNA, 22 nt, synthetic construct
  source 1..22: mol_type = other RNA
aaatcgtagaaattccccttat

SEQ ID NO: 24896 - RNA, 22 nt, synthetic construct
  source 1..22: mol_type = other RNA
aaatctagtgccacacagtgac

SEQ ID NO: 24897 - RNA, 22 nt, synthetic construct
  source 1..22: mol_type = other RNA
aaatgaaatctagtgccacaca

SEQ ID NO: 24898 - RNA, 22 nt, synthetic construct
  source 1..22: mol_type = other RNA
aaatgaaatgaatggtgcttac

SEQ ID NO: 24899 - RNA, 22 nt, synthetic construct
  source 1..22: mol_type = other RNA
aaatgaatcaagggcagtccca

SEQ ID NO: 24900 - RNA, 22 nt, synthetic construct
  source 1..22: mol_type = other RNA
aaatgaatggtgcttacttcaa

SEQ ID NO: 24901 - RNA, 22 nt, synthetic construct
  source 1..22: mol_type = other RNA
aaatgacctccaaacaatacac

SEQ ID NO: 24902 - RNA, 22 nt, synthetic construct
  source 1..22: mol_type = other RNA
aaatgcagttaaagatttcacc

SEQ ID NO: 24903 - RNA, 22 nt, synthetic construct
  source 1..22: mol_type = other RNA
aaatgccattaacagtcaggct

SEQ ID NO: 24904 - RNA, 22 nt, synthetic construct
  source 1..22: mol_type = other RNA
aaatggagacaccaagtggcac

SEQ ID NO: 24905 - RNA, 22 nt, synthetic construct
  source 1..22: mol_type = other RNA
aaatggaggaataaaacgcaca

SEQ ID NO: 24906 - RNA, 22 nt, synthetic construct
  source 1..22: mol_type = other RNA
aaatggctcagtctctgaagcc

SEQ ID NO: 24907 - RNA, 22 nt, synthetic construct
  source 1..22: mol_type = other RNA
aaatgggactggaggaagtaca

SEQ ID NO: 24908 - RNA, 22 nt, synthetic construct
  source 1..22: mol_type = other RNA
aaatgggaggtgatggtatcag

SEQ ID NO: 24909 - RNA, 22 nt, synthetic construct
  source 1..22: mol_type = other RNA
aaatggtctgttttggagaagt

SEQ ID NO: 24910 - RNA, 22 nt, synthetic construct
  source 1..22: mol_type = other RNA
aaatgtaccaagttgaaatgaa

SEQ ID NO: 24911 - RNA, 22 nt, synthetic construct
  source 1..22: mol_type = other RNA
aaatgtcagggccagtcacagt

SEQ ID NO: 24912 - RNA, 22 nt, synthetic construct
  source 1..22: mol_type = other RNA
aaatgtctccgatttgagtgat

SEQ ID NO: 24913 - RNA, 22 nt, synthetic construct
  source 1..22: mol_type = other RNA
aaatgtttttcctgtgcctgac

SEQ ID NO: 24914 - RNA, 22 nt, synthetic construct
  source 1..22: mol_type = other RNA
aaattattgagaacagaagcag

SEQ ID NO: 24915 - RNA, 22 nt, synthetic construct
  source 1..22: mol_type = other RNA
aaattccaacatgcctgggggg

SEQ ID NO: 24916 - RNA, 22 nt, synthetic construct
  source 1..22: mol_type = other RNA
aaattccccttatagtcagacc

SEQ ID NO: 24917 - RNA, 22 nt, synthetic construct
  source 1..22: mol_type = other RNA
aaattgaaacaagaccaaaagg

SEQ ID NO: 24918 - RNA, 22 nt, synthetic construct
  source 1..22: mol_type = other RNA
aaattgctgctggaacctgaac

SEQ ID NO: 24919 - RNA, 22 nt, synthetic construct
  source 1..22: mol_type = other RNA
aaattggtgggttatgcttgag

SEQ ID NO: 24920 - RNA, 22 nt, synthetic construct
  source 1..22: mol_type = other RNA
aaatttattggatacacctgtc

SEQ ID NO: 24921 - RNA, 22 nt, synthetic construct
  source 1..22: mol_type = other RNA
aacaaaacatggaaaaaggtaa

SEQ ID NO: 24922 - RNA, 22 nt, synthetic construct
  source 1..22: mol_type = other RNA
aacaaaatgaaatgaatggtgc

SEQ ID NO: 24923 - RNA, 22 nt, synthetic construct
  source 1..22: mol_type = other RNA
aacaaagagcaagagattctga

SEQ ID NO: 24924 - RNA, 22 nt, synthetic construct
  source 1..22: mol_type = other RNA
aacaaagagcagattcccaaac

SEQ ID NO: 24925 - RNA, 22 nt, synthetic construct
  source 1..22: mol_type = other RNA
aacaacacagctggagcacaag

SEQ ID NO: 24926 - RNA, 22 nt, synthetic construct
  source 1..22: mol_type = other RNA
aacaactacaacaacaaaaatc

SEQ ID NO: 24927 - RNA, 22 nt, synthetic construct
  source 1..22: mol_type = other RNA
aacaacttcttcagaaaagaca

SEQ ID NO: 24928 - RNA, 22 nt, synthetic construct
  source 1..22: mol_type = other RNA
aacaagaaacctgtattttgca

SEQ ID NO: 24929 - RNA, 22 nt, synthetic construct
  source 1..22: mol_type = other RNA
aacaagaccaaaaggctaatgg

SEQ ID NO: 24930 - RNA, 22 nt, synthetic construct
  source 1..22: mol_type = other RNA
aacaagaccaatgtcagaacac

SEQ ID NO: 24931 - RNA, 22 nt, synthetic construct
  source 1..22: mol_type = other RNA
aacaagacccaaaacttgcatc

SEQ ID NO: 24932 - RNA, 22 nt, synthetic construct
  source 1..22: mol_type = other RNA
aacaagctgcgcaacttgctca

SEQ ID NO: 24933 - RNA, 22 nt, synthetic construct
  source 1..22: mol_type = other RNA
aacaagcttcagttctacaggg

SEQ ID NO: 24934 - RNA, 22 nt, synthetic construct
  source 1..22: mol_type = other RNA
aacaaggcagtgctaatgccta

SEQ ID NO: 24935 - RNA, 22 nt, synthetic construct
  source 1..22: mol_type = other RNA
aacaatacacacctagtttcag

SEQ ID NO: 24936 - RNA, 22 nt, synthetic construct
  source 1..22: mol_type = other RNA
aacaatacactggaaattccaa

SEQ ID NO: 24937 - RNA, 22 nt, synthetic construct
  source 1..22: mol_type = other RNA
aacaatgatcagcaaagagaag

SEQ ID NO: 24938 - RNA, 22 nt, synthetic construct
  source 1..22: mol_type = other RNA
aacacaacacttttaagggaag

SEQ ID NO: 24939 - RNA, 22 nt, synthetic construct
  source 1..22: mol_type = other RNA
aacacaaccatcccagagttca

SEQ ID NO: 24940 - RNA, 22 nt, synthetic construct
  source 1..22: mol_type = other RNA
aacacaatctggataatattga

SEQ ID NO: 24941 - RNA, 22 nt, synthetic construct
  source 1..22: mol_type = other RNA
aacacaatggaacagtcattgt

SEQ ID NO: 24942 - RNA, 22 nt, synthetic construct
  source 1..22: mol_type = other RNA
aacacacacatggtgaactcct

SEQ ID NO: 24943 - RNA, 22 nt, synthetic construct
  source 1..22: mol_type = other RNA
aacacagcaaccccaaactgag

SEQ ID NO: 24944 - RNA, 22 nt, synthetic construct
  source 1..22: mol_type = other RNA
aacacagcactatctgaaacca

SEQ ID NO: 24945 - RNA, 22 nt, synthetic construct
  source 1..22: mol_type = other RNA
aacacagctggagcacaagtca

SEQ ID NO: 24946 - RNA, 22 nt, synthetic construct
  source 1..22: mol_type = other RNA
aacacataactgcagtgggcct

SEQ ID NO: 24947 - RNA, 22 nt, synthetic construct
  source 1..22: mol_type = other RNA
aacaccaccactaccccaacca

SEQ ID NO: 24948 - RNA, 22 nt, synthetic construct
  source 1..22: mol_type = other RNA
aacacctcaagcataacccacc

SEQ ID NO: 24949 - RNA, 22 nt, synthetic construct
  source 1..22: mol_type = other RNA
aacacgagatcttgtgccccca

SEQ ID NO: 24950 - RNA, 22 nt, synthetic construct
  source 1..22: mol_type = other RNA
aacactgagctttgcttgaagt

SEQ ID NO: 24951 - RNA, 22 nt, synthetic construct
  source 1..22: mol_type = other RNA
aacactggggacataagttttt

SEQ ID NO: 24952 - RNA, 22 nt, synthetic construct
  source 1..22: mol_type = other RNA
aacactgtctcaatattatcca

SEQ ID NO: 24953 - RNA, 22 nt, synthetic construct
  source 1..22: mol_type = other RNA
aacacttggaataccctctact

SEQ ID NO: 24954 - RNA, 22 nt, synthetic construct
  source 1..22: mol_type = other RNA
aacacttttaagggaagtgaaa

SEQ ID NO: 24955 - RNA, 22 nt, synthetic construct
  source 1..22: mol_type = other RNA
aacagaagcagctgttcttttg

SEQ ID NO: 24956 - RNA, 22 nt, synthetic construct
  source 1..22: mol_type = other RNA
aacagaattcttcaccagacgc

SEQ ID NO: 24957 - RNA, 22 nt, synthetic construct
  source 1..22: mol_type = other RNA
aacagaccatttaccaaaagct

SEQ ID NO: 24958 - RNA, 22 nt, synthetic construct
  source 1..22: mol_type = other RNA
aacagactaagtccattcctga

SEQ ID NO: 24959 - RNA, 22 nt, synthetic construct
  source 1..22: mol_type = other RNA
aacagactacacatcctgaact

SEQ ID NO: 24960 - RNA, 22 nt, synthetic construct
  source 1..22: mol_type = other RNA
aacagcacttgaatcaacaggc

SEQ ID NO: 24961 - RNA, 22 nt, synthetic construct
  source 1..22: mol_type = other RNA
aacagcagcaaaaattacaaat

SEQ ID NO: 24962 - RNA, 22 nt, synthetic construct
  source 1..22: mol_type = other RNA
aacagcagcaaacacagcaacc

SEQ ID NO: 24963 - RNA, 22 nt, synthetic construct
  source 1..22: mol_type = other RNA
aacagctgcttctgttctcaat

SEQ ID NO: 24964 - RNA, 22 nt, synthetic construct
  source 1..22: mol_type = other RNA
aacaggaatgacatacagactg

SEQ ID NO: 24965 - RNA, 22 nt, synthetic construct
  source 1..22: mol_type = other RNA
aacaggagcagaagtcacaaca

SEQ ID NO: 24966 - RNA, 22 nt, synthetic construct
  source 1..22: mol_type = other RNA
aacaggatagaaccaaccatgt

SEQ ID NO: 24967 - RNA, 22 nt, synthetic construct
  source 1..22: mol_type = other RNA
aacaggcagcacaaacacaacc

SEQ ID NO: 24968 - RNA, 22 nt, synthetic construct
  source 1..22: mol_type = other RNA
aacaggcttcagagactgagcc

SEQ ID NO: 24969 - RNA, 22 nt, synthetic construct
  source 1..22: mol_type = other RNA
aacaggtatttagcattgcagc

SEQ ID NO: 24970 - RNA, 22 nt, synthetic construct
  source 1..22: mol_type = other RNA
aacagtcaggctactaatgagt

SEQ ID NO: 24971 - RNA, 22 nt, synthetic construct
  source 1..22: mol_type = other RNA
aacagtcattgtccctgcagtc

SEQ ID NO: 24972 - RNA, 22 nt, synthetic construct
  source 1..22: mol_type = other RNA
aacataagcctcataaacaggc

SEQ ID NO: 24973 - RNA, 22 nt, synthetic construct
  source 1..22: mol_type = other RNA
aacatccagggaaccacaaagc

SEQ ID NO: 24974 - RNA, 22 nt, synthetic construct
  source 1..22: mol_type = other RNA
aacatctccagttccaaaaacc

SEQ ID NO: 24975 - RNA, 22 nt, synthetic construct
  source 1..22: mol_type = other RNA
aacatgcctggggggctcccaa

SEQ ID NO: 24976 - RNA, 22 nt, synthetic construct
  source 1..22: mol_type = other RNA
aacatggaaaaaggtaactaag

SEQ ID NO: 24977 - RNA, 22 nt, synthetic construct
  source 1..22: mol_type = other RNA
aacatggttggttctatcctgt

SEQ ID NO: 24978 - RNA, 22 nt, synthetic construct
  source 1..22: mol_type = other RNA
aacattcttccactttagtctg

SEQ ID NO: 24979 - RNA, 22 nt, synthetic construct
  source 1..22: mol_type = other RNA
aacatttgcatggttatgtatc

SEQ ID NO: 24980 - RNA, 22 nt, synthetic construct
  source 1..22: mol_type = other RNA
aaccaaaagaacagctgcttct

SEQ ID NO: 24981 - RNA, 22 nt, synthetic construct
  source 1..22: mol_type = other RNA
aaccaaagtaacacaacacttt

SEQ ID NO: 24982 - RNA, 22 nt, synthetic construct
  source 1..22: mol_type = other RNA
aaccaaatgtctccgatttgag

SEQ ID NO: 24983 - RNA, 22 nt, synthetic construct
  source 1..22: mol_type = other RNA
aaccaaccatgttgagggcaac

SEQ ID NO: 24984 - RNA, 22 nt, synthetic construct
  source 1..22: mol_type = other RNA
aaccaagatatgtctggtcaac

SEQ ID NO: 24985 - RNA, 22 nt, synthetic construct
  source 1..22: mol_type = other RNA
aaccacaaagctagcgtctggt

SEQ ID NO: 24986 - RNA, 22 nt, synthetic construct
  source 1..22: mol_type = other RNA
aaccacatctcacataaatgcc

SEQ ID NO: 24987 - RNA, 22 nt, synthetic construct
  source 1..22: mol_type = other RNA
aaccactgctgcagaacttgat

SEQ ID NO: 24988 - RNA, 22 nt, synthetic construct
  source 1..22: mol_type = other RNA
aaccagaacaactacaacaaca

SEQ ID NO: 24989 - RNA, 22 nt, synthetic construct
  source 1..22: mol_type = other RNA
aaccagcaacagcagcaaaaat

SEQ ID NO: 24990 - RNA, 22 nt, synthetic construct
  source 1..22: mol_type = other RNA
aaccaggatggattgaattgaa

SEQ ID NO: 24991 - RNA, 22 nt, synthetic construct
  source 1..22: mol_type = other RNA
aaccatcccagagttcacatct

SEQ ID NO: 24992 - RNA, 22 nt, synthetic construct
  source 1..22: mol_type = other RNA
aaccatgcaaatgtttttcctg

SEQ ID NO: 24993 - RNA, 22 nt, synthetic construct
  source 1..22: mol_type = other RNA
aaccatgttgagggcaacagac

SEQ ID NO: 24994 - RNA, 22 nt, synthetic construct
  source 1..22: mol_type = other RNA
aacccaatctctccaatcaaat

SEQ ID NO: 24995 - RNA, 22 nt, synthetic construct
  source 1..22: mol_type = other RNA
aacccaccaatttttggtagca

SEQ ID NO: 24996 - RNA, 22 nt, synthetic construct
  source 1..22: mol_type = other RNA
aaccccaaactgagtcttgcca

SEQ ID NO: 24997 - RNA, 22 nt, synthetic construct
  source 1..22: mol_type = other RNA
aaccctcacaccaggtgcactt

SEQ ID NO: 24998 - RNA, 22 nt, synthetic construct
  source 1..22: mol_type = other RNA
aacctctggctacaaagctcca

SEQ ID NO: 24999 - RNA, 22 nt, synthetic construct
  source 1..22: mol_type = other RNA
aacctgaacagaattcttcacc

SEQ ID NO: 25000 - RNA, 22 nt, synthetic construct
  source 1..22: mol_type = other RNA
aacctgaggcaccaccttccca

SEQ ID NO: 25001 - RNA, 22 nt, synthetic construct
  source 1..22: mol_type = other RNA
aacctggatgcaagccacatgc

SEQ ID NO: 25002 - RNA, 22 nt, synthetic construct
  source 1..22: mol_type = other RNA
aacctgtattttgcatgcactt

SEQ ID NO: 25003 - RNA, 22 nt, synthetic construct
  source 1..22: mol_type = other RNA
aacctgtggaagaggaggaggg

SEQ ID NO: 25004 - RNA, 22 nt, synthetic construct
  source 1..22: mol_type = other RNA
aaccttctctctctgggctcct

SEQ ID NO: 25005 - RNA, 22 nt, synthetic construct
  source 1..22: mol_type = other RNA
aacgacttggcgtgaaactgct

SEQ ID NO: 25006 - RNA, 22 nt, synthetic construct
  source 1..22: mol_type = other RNA
aacgaggggccttcaattcaat

SEQ ID NO: 25007 - RNA, 22 nt, synthetic construct
  source 1..22: mol_type = other RNA
aacgcacagttagtgaaccttc

SEQ ID NO: 25008 - RNA, 22 nt, synthetic construct
  source 1..22: mol_type = other RNA
aacgccatgtgtctcagtacat

SEQ ID NO: 25009 - RNA, 22 nt, synthetic construct
  source 1..22: mol_type = other RNA
aacgtaatgaggcatcactgcc

SEQ ID NO: 25010 - RNA, 22 nt, synthetic construct
  source 1..22: mol_type = other RNA
aactaagcaagagaatccacct

SEQ ID NO: 25011 - RNA, 22 nt, synthetic construct
  source 1..22: mol_type = other RNA
aactacaacaacaaaaatcagt

SEQ ID NO: 25012 - RNA, 22 nt, synthetic construct
  source 1..22: mol_type = other RNA
aactagctgcaatgctaaatac

SEQ ID NO: 25013 - RNA, 22 nt, synthetic construct
  source 1..22: mol_type = other RNA
aactaggtgtgtattgtttgaa

SEQ ID NO: 25014 - RNA, 22 nt, synthetic construct
  source 1..22: mol_type = other RNA
aactcacaccttttgcaacata

SEQ ID NO: 25015 - RNA, 22 nt, synthetic construct
  source 1..22: mol_type = other RNA
aactcacagattctttcttatc

SEQ ID NO: 25016 - RNA, 22 nt, synthetic construct
  source 1..22: mol_type = other RNA
aactcattagtagcctgactgt

SEQ ID NO: 25017 - RNA, 22 nt, synthetic construct
  source 1..22: mol_type = other RNA
aactccaccattcagagtgctt

SEQ ID NO: 25018 - RNA, 22 nt, synthetic construct
  source 1..22: mol_type = other RNA
aactcctggaaaaaacactgtc

SEQ ID NO: 25019 - RNA, 22 nt, synthetic construct
  source 1..22: mol_type = other RNA
aactcgcttgattttgaatact

SEQ ID NO: 25020 - RNA, 22 nt, synthetic construct
  source 1..22: mol_type = other RNA
aactctgagctgcctccaaagc

SEQ ID NO: 25021 - RNA, 22 nt, synthetic construct
  source 1..22: mol_type = other RNA
aactctgggatggttgtgtttg

SEQ ID NO: 25022 - RNA, 22 nt, synthetic construct
  source 1..22: mol_type = other RNA
aactgaaaaacttatgtcccca

SEQ ID NO: 25023 - RNA, 22 nt, synthetic construct
  source 1..22: mol_type = other RNA
aactgaagcttgttgtgacttc

SEQ ID NO: 25024 - RNA, 22 nt, synthetic construct
  source 1..22: mol_type = other RNA
aactgagtcttgccatagtcag

SEQ ID NO: 25025 - RNA, 22 nt, synthetic construct
  source 1..22: mol_type = other RNA
aactgatttttgttgttgtagt

SEQ ID NO: 25026 - RNA, 22 nt, synthetic construct
  source 1..22: mol_type = other RNA
aactgcagtgggcctgaaaatc

SEQ ID NO: 25027 - RNA, 22 nt, synthetic construct
  source 1..22: mol_type = other RNA
aactgcattttcttgggctaca

SEQ ID NO: 25028 - RNA, 22 nt, synthetic construct
  source 1..22: mol_type = other RNA
aactgccagcagttgatgagaa

SEQ ID NO: 25029 - RNA, 22 nt, synthetic construct
  source 1..22: mol_type = other RNA
aactgctggcagttgtcctgta

SEQ ID NO: 25030 - RNA, 22 nt, synthetic construct
  source 1..22: mol_type = other RNA
aactgcttcagatgctgctcca

SEQ ID NO: 25031 - RNA, 22 nt, synthetic construct
  source 1..22: mol_type = other RNA
aactggagatgttggtccactg

SEQ ID NO: 25032 - RNA, 22 nt, synthetic construct
  source 1..22: mol_type = other RNA
aactggtgaaatctttaactgc

SEQ ID NO: 25033 - RNA, 22 nt, synthetic construct
  source 1..22: mol_type = other RNA
aactgtagcaccattaggcatt

SEQ ID NO: 25034 - RNA, 22 nt, synthetic construct
  source 1..22: mol_type = other RNA
aactgtgactggccctgacatt

SEQ ID NO: 25035 - RNA, 22 nt, synthetic construct
  source 1..22: mol_type = other RNA
aactgtgcgttttattcctcca

SEQ ID NO: 25036 - RNA, 22 nt, synthetic construct
  source 1..22: mol_type = other RNA
aacttatgtccccagtgttgaa

SEQ ID NO: 25037 - RNA, 22 nt, synthetic construct
  source 1..22: mol_type = other RNA
aacttcggggtaagccaagaaa

SEQ ID NO: 25038 - RNA, 22 nt, synthetic construct
  source 1..22: mol_type = other RNA
aacttcttcagaaaagacacca

SEQ ID NO: 25039 - RNA, 22 nt, synthetic construct
  source 1..22: mol_type = other RNA
aacttgatagccacaccccagc

SEQ ID NO: 25040 - RNA, 22 nt, synthetic construct
  source 1..22: mol_type = other RNA
aacttgcatcacatgcaatatt

SEQ ID NO: 25041 - RNA, 22 nt, synthetic construct
  source 1..22: mol_type = other RNA
aacttgctcagcaaaggtactt

SEQ ID NO: 25042 - RNA, 22 nt, synthetic construct
  source 1..22: mol_type = other RNA
aacttggtacatttgtgacttg

SEQ ID NO: 25043 - RNA, 22 nt, synthetic construct
  source 1..22: mol_type = other RNA
aacttttacttgcttctgtgat

SEQ ID NO: 25044 - RNA, 22 nt, synthetic construct
  source 1..22: mol_type = other RNA
aacttttgaaagagtgccactt

SEQ ID NO: 25045 - RNA, 22 nt, synthetic construct
  source 1..22: mol_type = other RNA
aactttttgcaggaaacaagac

SEQ ID NO: 25046 - RNA, 22 nt, synthetic construct
  source 1..22: mol_type = other RNA
aagaaacctgtattttgcatgc

SEQ ID NO: 25047 - RNA, 22 nt, synthetic construct
  source 1..22: mol_type = other RNA
aagaaagaaatccaggtgaaag

SEQ ID NO: 25048 - RNA, 22 nt, synthetic construct
  source 1..22: mol_type = other RNA
aagaaagaatctgtgagttctg

SEQ ID NO: 25049 - RNA, 22 nt, synthetic construct
  source 1..22: mol_type = other RNA
aagaaagtagagggtattccaa

SEQ ID NO: 25050 - RNA, 22 nt, synthetic construct
  source 1..22: mol_type = other RNA
aagaaatccaggtgaaagcagt

SEQ ID NO: 25051 - RNA, 22 nt, synthetic construct
  source 1..22: mol_type = other RNA
aagaaattgaaacaagaccaaa

SEQ ID NO: 25052 - RNA, 22 nt, synthetic construct
  source 1..22: mol_type = other RNA
aagaacaccaccactaccccaa

SEQ ID NO: 25053 - RNA, 22 nt, synthetic construct
  source 1..22: mol_type = other RNA
aagaacagactacacatcctga

SEQ ID NO: 25054 - RNA, 22 nt, synthetic construct
  source 1..22: mol_type = other RNA
aagaacagcagcaaacacagca

SEQ ID NO: 25055 - RNA, 22 nt, synthetic construct
  source 1..22: mol_type = other RNA
aagaacagctgcttctgttctc

SEQ ID NO: 25056 - RNA, 22 nt, synthetic construct
  source 1..22: mol_type = other RNA
aagaacaggagcagaagtcaca

SEQ ID NO: 25057 - RNA, 22 nt, synthetic construct
  source 1..22: mol_type = other RNA
aagaagatcttgctttgggatc

SEQ ID NO: 25058 - RNA, 22 nt, synthetic construct
  source 1..22: mol_type = other RNA
aagaagcaattgtgatggtggt

SEQ ID NO: 25059 - RNA, 22 nt, synthetic construct
  source 1..22: mol_type = other RNA
aagaagttgtttgctgctctaa

SEQ ID NO: 25060 - RNA, 22 nt, synthetic construct
  source 1..22: mol_type = other RNA
aagaataaagaggaaatactcc

SEQ ID NO: 25061 - RNA, 22 nt, synthetic construct
  source 1..22: mol_type = other RNA
aagaatctgtgagttctgtagc

SEQ ID NO: 25062 - RNA, 22 nt, synthetic construct
  source 1..22: mol_type = other RNA
aagaatgatccttctctttgct

SEQ ID NO: 25063 - RNA, 22 nt, synthetic construct
  source 1..22: mol_type = other RNA
aagaatgttttcatggtgaaaa

SEQ ID NO: 25064 - RNA, 22 nt, synthetic construct
  source 1..22: mol_type = other RNA
aagaattctgttcaggttccag

SEQ ID NO: 25065 - RNA, 22 nt, synthetic construct
  source 1..22: mol_type = other RNA
aagaattgatggcagtgatgcc

SEQ ID NO: 25066 - RNA, 22 nt, synthetic construct
  source 1..22: mol_type = other RNA
aagacaccaaccaaaagaacag

SEQ ID NO: 25067 - RNA, 22 nt, synthetic construct
  source 1..22: mol_type = other RNA
aagaccaaaaggctaatggaga

SEQ ID NO: 25068 - RNA, 22 nt, synthetic construct
  source 1..22: mol_type = other RNA
aagaccaatgtcagaacacctc

SEQ ID NO: 25069 - RNA, 22 nt, synthetic construct
  source 1..22: mol_type = other RNA
aagacccaaaacttgcatcaca

SEQ ID NO: 25070 - RNA, 22 nt, synthetic construct
  source 1..22: mol_type = other RNA
aagacgtaacttcggggtaagc

SEQ ID NO: 25071 - RNA, 22 nt, synthetic construct
  source 1..22: mol_type = other RNA
aagactcaatatgatttcccat

SEQ ID NO: 25072 - RNA, 22 nt, synthetic construct
  source 1..22: mol_type = other RNA
aagactcagtttggggttgctg

SEQ ID NO: 25073 - RNA, 22 nt, synthetic construct
  source 1..22: mol_type = other RNA
aagagaaggatcattctttggc

SEQ ID NO: 25074 - RNA, 22 nt, synthetic construct
  source 1..22: mol_type = other RNA
aagagaatccacctgcaagctg

SEQ ID NO: 25075 - RNA, 22 nt, synthetic construct
  source 1..22: mol_type = other RNA
aagagatgccaccttagagcag

SEQ ID NO: 25076 - RNA, 22 nt, synthetic construct
  source 1..22: mol_type = other RNA
aagagattctgaagggtcgaga

SEQ ID NO: 25077 - RNA, 22 nt, synthetic construct
  source 1..22: mol_type = other RNA
aagagcaagagattctgaaggg

SEQ ID NO: 25078 - RNA, 22 nt, synthetic construct
  source 1..22: mol_type = other RNA
aagagcagattcccaaactgaa

SEQ ID NO: 25079 - RNA, 22 nt, synthetic construct
  source 1..22: mol_type = other RNA
aagagcatcattgagaccatgg

SEQ ID NO: 25080 - RNA, 22 nt, synthetic construct
  source 1..22: mol_type = other RNA
aagagccttatggtcaaataac

SEQ ID NO: 25081 - RNA, 22 nt, synthetic construct
  source 1..22: mol_type = other RNA
aagaggaaatactccagacttt

SEQ ID NO: 25082 - RNA, 22 nt, synthetic construct
  source 1..22: mol_type = other RNA
aagaggaggagggggagaaaga

SEQ ID NO: 25083 - RNA, 22 nt, synthetic construct
  source 1..22: mol_type = other RNA
aagaggcagaaactgtagcacc

SEQ ID NO: 25084 - RNA, 22 nt, synthetic construct
  source 1..22: mol_type = other RNA
aagagtgccacttggtgtctcc

SEQ ID NO: 25085 - RNA, 22 nt, synthetic construct
  source 1..22: mol_type = other RNA
aagatatgtctggtcaacaagc

SEQ ID NO: 25086 - RNA, 22 nt, synthetic construct
  source 1..22: mol_type = other RNA
aagatctcgtgtttgctccttg

SEQ ID NO: 25087 - RNA, 22 nt, synthetic construct
  source 1..22: mol_type = other RNA
aagatcttcttcacaggtgctt

SEQ ID NO: 25088 - RNA, 22 nt, synthetic construct
  source 1..22: mol_type = other RNA
aagatcttgctttgggatcaca

SEQ ID NO: 25089 - RNA, 22 nt, synthetic construct
  source 1..22: mol_type = other RNA
aagatgggaaatcatattgagt

SEQ ID NO: 25090 - RNA, 22 nt, synthetic construct
  source 1..22: mol_type = other RNA
aagatttcaccagtttttcaac

SEQ ID NO: 25091 - RNA, 22 nt, synthetic construct
  source 1..22: mol_type = other RNA
aagcaaagctcagtgttcacta

SEQ ID NO: 25092 - RNA, 22 nt, synthetic construct
  source 1..22: mol_type = other RNA
aagcaacaatgatcagcaaaga

SEQ ID NO: 25093 - RNA, 22 nt, synthetic construct
  source 1..22: mol_type = other RNA
aagcaagaacagcagcaaacac

SEQ ID NO: 25094 - RNA, 22 nt, synthetic construct
  source 1..22: mol_type = other RNA
aagcaagagaatccacctgcaa

SEQ ID NO: 25095 - RNA, 22 nt, synthetic construct
  source 1..22: mol_type = other RNA
aagcaagatcttcttcacaggt

SEQ ID NO: 25096 - RNA, 22 nt, synthetic construct
  source 1..22: mol_type = other RNA
aagcaagcctgatggaacagga

SEQ ID NO: 25097 - RNA, 22 nt, synthetic construct
  source 1..22: mol_type = other RNA
aagcaagtaaaagttgaaatgt

SEQ ID NO: 25098 - RNA, 22 nt, synthetic construct
  source 1..22: mol_type = other RNA
aagcaattgtgatggtggtggt

SEQ ID NO: 25099 - RNA, 22 nt, synthetic construct
  source 1..22: mol_type = other RNA
aagcaccattcatttcattttg

SEQ ID NO: 25100 - RNA, 22 nt, synthetic construct
  source 1..22: mol_type = other RNA
aagcacctgtgaagaagatctt

SEQ ID NO: 25101 - RNA, 22 nt, synthetic construct
  source 1..22: mol_type = other RNA
aagcactctgaatggtggagtt

SEQ ID NO: 25102 - RNA, 22 nt, synthetic construct
  source 1..22: mol_type = other RNA
aagcagctgttcttttggttgg

SEQ ID NO: 25103 - RNA, 22 nt, synthetic construct
  source 1..22: mol_type = other RNA
aagcagtcaaccaaatgtctcc

SEQ ID NO: 25104 - RNA, 22 nt, synthetic construct
  source 1..22: mol_type = other RNA
aagcagtttcacgccaagtcgt

SEQ ID NO: 25105 - RNA, 22 nt, synthetic construct
  source 1..22: mol_type = other RNA
aagcataacccaccaatttttg

SEQ ID NO: 25106 - RNA, 22 nt, synthetic construct
  source 1..22: mol_type = other RNA
aagcatcggagaagggctgcat

SEQ ID NO: 25107 - RNA, 22 nt, synthetic construct
  source 1..22: mol_type = other RNA
aagcatgctgctctaaggtggc

SEQ ID NO: 25108 - RNA, 22 nt, synthetic construct
  source 1..22: mol_type = other RNA
aagccaagaaagaaatccaggt

SEQ ID NO: 25109 - RNA, 22 nt, synthetic construct
  source 1..22: mol_type = other RNA
aagccacatgcctgtatgcaca

SEQ ID NO: 25110 - RNA, 22 nt, synthetic construct
  source 1..22: mol_type = other RNA
aagccagaatagtcgtgtgagt

SEQ ID NO: 25111 - RNA, 22 nt, synthetic construct
  source 1..22: mol_type = other RNA
aagccagctgcagtggtgagtg

SEQ ID NO: 25112 - RNA, 22 nt, synthetic construct
  source 1..22: mol_type = other RNA
aagcccactgcctgagagagct

SEQ ID NO: 25113 - RNA, 22 nt, synthetic construct
  source 1..22: mol_type = other RNA
aagcctcataaacaggcagcac

SEQ ID NO: 25114 - RNA, 22 nt, synthetic construct
  source 1..22: mol_type = other RNA
aagcctgatggaacaggataga

SEQ ID NO: 25115 - RNA, 22 nt, synthetic construct
  source 1..22: mol_type = other RNA
aagcctgttgattcaagtgctg

SEQ ID NO: 25116 - RNA, 22 nt, synthetic construct
  source 1..22: mol_type = other RNA
aagcgagttcgagactcataat

SEQ ID NO: 25117 - RNA, 22 nt, synthetic construct
  source 1..22: mol_type = other RNA
aagcggaatcccatctaaaacg

SEQ ID NO: 25118 - RNA, 22 nt, synthetic construct
  source 1..22: mol_type = other RNA
aagctagcgtctggtgaagaat

SEQ ID NO: 25119 - RNA, 22 nt, synthetic construct
  source 1..22: mol_type = other RNA
aagctcagtgttcactaaggat

SEQ ID NO: 25120 - RNA, 22 nt, synthetic construct
  source 1..22: mol_type = other RNA
aagctcatgtgcagtcactgtg

SEQ ID NO: 25121 - RNA, 22 nt, synthetic construct
  source 1..22: mol_type = other RNA
aagctccagaatggaagcccac

SEQ ID NO: 25122 - RNA, 22 nt, synthetic construct
  source 1..22: mol_type = other RNA
aagctcctggtggcagctctga

SEQ ID NO: 25123 - RNA, 22 nt, synthetic construct
  source 1..22: mol_type = other RNA
aagctctggattttcaggccca

SEQ ID NO: 25124 - RNA, 22 nt, synthetic construct
  source 1..22: mol_type = other RNA
aagctgaggaacctgtggaaga

SEQ ID NO: 25125 - RNA, 22 nt, synthetic construct
  source 1..22: mol_type = other RNA
aagctgcgcaacttgctcagca

SEQ ID NO: 25126 - RNA, 22 nt, synthetic construct
  source 1..22: mol_type = other RNA
aagctggggtgtggctatcaag

SEQ ID NO: 25127 - RNA, 22 nt, synthetic construct
  source 1..22: mol_type = other RNA
aagctgtgataatgtgcagcaa

SEQ ID NO: 25128 - RNA, 22 nt, synthetic construct
  source 1..22: mol_type = other RNA
aagcttacacccagaaaacaac

SEQ ID NO: 25129 - RNA, 22 nt, synthetic construct
  source 1..22: mol_type = other RNA
aagcttcagttctacagggata

SEQ ID NO: 25130 - RNA, 22 nt, synthetic construct
  source 1..22: mol_type = other RNA
aagcttgccttgggagcccccc

SEQ ID NO: 25131 - RNA, 22 nt, synthetic construct
  source 1..22: mol_type = other RNA
aagcttgttgtgacttctgctc

SEQ ID NO: 25132 - RNA, 22 nt, synthetic construct
  source 1..22: mol_type = other RNA
aaggaaaaagcactctgaatgg

SEQ ID NO: 25133 - RNA, 22 nt, synthetic construct
  source 1..22: mol_type = other RNA
aaggaacaggtatttagcattg

SEQ ID NO: 25134 - RNA, 22 nt, synthetic construct
  source 1..22: mol_type = other RNA
aaggaagctgaggaacctgtgg

SEQ ID NO: 25135 - RNA, 22 nt, synthetic construct
  source 1..22: mol_type = other RNA
aaggaatccttagtgaacactg

SEQ ID NO: 25136 - RNA, 22 nt, synthetic construct
  source 1..22: mol_type = other RNA
aaggacactcaaaagcatgctg

SEQ ID NO: 25137 - RNA, 22 nt, synthetic construct
  source 1..22: mol_type = other RNA
aaggagcaaacacgagatcttg

SEQ ID NO: 25138 - RNA, 22 nt, synthetic construct
  source 1..22: mol_type = other RNA
aaggagcccagagagagaaggt

SEQ ID NO: 25139 - RNA, 22 nt, synthetic construct
  source 1..22: mol_type = other RNA
aaggatcattctttggccagac

SEQ ID NO: 25140 - RNA, 22 nt, synthetic construct
  source 1..22: mol_type = other RNA
aaggattccttttctgccacta

SEQ ID NO: 25141 - RNA, 22 nt, synthetic construct
  source 1..22: mol_type = other RNA
aaggcaagcttacacccagaaa

SEQ ID NO: 25142 - RNA, 22 nt, synthetic construct
  source 1..22: mol_type = other RNA
aaggcagtgctaatgcctaatg

SEQ ID NO: 25143 - RNA, 22 nt, synthetic construct
  source 1..22: mol_type = other RNA
aaggcccctcgttttcaccaag

SEQ ID NO: 25144 - RNA, 22 nt, synthetic construct
  source 1..22: mol_type = other RNA
aaggcctcagaataattgtgtg

SEQ ID NO: 25145 - RNA, 22 nt, synthetic construct
  source 1..22: mol_type = other RNA
aaggctaatggagaaagacgta

SEQ ID NO: 25146 - RNA, 22 nt, synthetic construct
  source 1..22: mol_type = other RNA
aaggctcttactctcaaatcac

SEQ ID NO: 25147 - RNA, 22 nt, synthetic construct
  source 1..22: mol_type = other RNA
aagggaagccagaatagtcgtg

SEQ ID NO: 25148 - RNA, 22 nt, synthetic construct
  source 1..22: mol_type = other RNA
aagggaagtgaaaatagagggt

SEQ ID NO: 25149 - RNA, 22 nt, synthetic construct
  source 1..22: mol_type = other RNA
aagggcagtcccaaggtacagt

SEQ ID NO: 25150 - RNA, 22 nt, synthetic construct
  source 1..22: mol_type = other RNA
aagggctgcatacatgtgtaga

SEQ ID NO: 25151 - RNA, 22 nt, synthetic construct
  source 1..22: mol_type = other RNA
aaggggaatttctacgatttat

SEQ ID NO: 25152 - RNA, 22 nt, synthetic construct
  source 1..22: mol_type = other RNA
aagggtcgagacaaggagcaaa

SEQ ID NO: 25153 - RNA, 22 nt, synthetic construct
  source 1..22: mol_type = other RNA
aaggtaactaagcaagagaatc

SEQ ID NO: 25154 - RNA, 22 nt, synthetic construct
  source 1..22: mol_type = other RNA
aaggtacagtggaccaacatct

SEQ ID NO: 25155 - RNA, 22 nt, synthetic construct
  source 1..22: mol_type = other RNA
aaggtacttgatacataaccat

SEQ ID NO: 25156 - RNA, 22 nt, synthetic construct
  source 1..22: mol_type = other RNA
aaggtggaacctggatgcaagc

SEQ ID NO: 25157 - RNA, 22 nt, synthetic construct
  source 1..22: mol_type = other RNA
aaggtggcatctcttacagaag

SEQ ID NO: 25158 - RNA, 22 nt, synthetic construct
  source 1..22: mol_type = other RNA
aaggtggtgcctcaggtttacc

SEQ ID NO: 25159 - RNA, 22 nt, synthetic construct
  source 1..22: mol_type = other RNA
aaggtgtgagtttgaaaatggc

SEQ ID NO: 25160 - RNA, 22 nt, synthetic construct
  source 1..22: mol_type = other RNA
aaggttcactaactgtgcgttt

SEQ ID NO: 25161 - RNA, 22 nt, synthetic construct
  source 1..22: mol_type = other RNA
aagtaaaagttgaaatgtcagg

SEQ ID NO: 25162 - RNA, 22 nt, synthetic construct
  source 1..22: mol_type = other RNA
aagtaaatggagacaccaagtg

SEQ ID NO: 25163 - RNA, 22 nt, synthetic construct
  source 1..22: mol_type = other RNA
aagtaacacaacacttttaagg

SEQ ID NO: 25164 - RNA, 22 nt, synthetic construct
  source 1..22: mol_type = other RNA
aagtaagcaccattcatttcat

SEQ ID NO: 25165 - RNA, 22 nt, synthetic construct
  source 1..22: mol_type = other RNA
aagtaatacaatgttcttgtca

SEQ ID NO: 25166 - RNA, 22 nt, synthetic construct
  source 1..22: mol_type = other RNA
aagtacagaatataaatcgtag

SEQ ID NO: 25167 - RNA, 22 nt, synthetic construct
  source 1..22: mol_type = other RNA
aagtacctttgctgagcaagtt

SEQ ID NO: 25168 - RNA, 22 nt, synthetic construct
  source 1..22: mol_type = other RNA
aagtagagggtattccaagtgt

SEQ ID NO: 25169 - RNA, 22 nt, synthetic construct
  source 1..22: mol_type = other RNA
aagtcacaaatgtaccaagttg

SEQ ID NO: 25170 - RNA, 22 nt, synthetic construct
  source 1..22: mol_type = other RNA
aagtcacaacaagcttcagttc

SEQ ID NO: 25171 - RNA, 22 nt, synthetic construct
  source 1..22: mol_type = other RNA
aagtcacactcagacccctccc

SEQ ID NO: 25172 - RNA, 22 nt, synthetic construct
  source 1..22: mol_type = other RNA
aagtcaggactcacacgactat

SEQ ID NO: 25173 - RNA, 22 nt, synthetic construct
  source 1..22: mol_type = other RNA
aagtccattcctgataccatca

SEQ ID NO: 25174 - RNA, 22 nt, synthetic construct
  source 1..22: mol_type = other RNA
aagtcgttatttgaccataagg

SEQ ID NO: 25175 - RNA, 22 nt, synthetic construct
  source 1..22: mol_type = other RNA
aagtctggagtatttcctcttt

SEQ ID NO: 25176 - RNA, 22 nt, synthetic construct
  source 1..22: mol_type = other RNA
aagtgaaaatagagggtaaacc

SEQ ID NO: 25177 - RNA, 22 nt, synthetic construct
  source 1..22: mol_type = other RNA
aagtgcacctggtgtgagggtt

SEQ ID NO: 25178 - RNA, 22 nt, synthetic construct
  source 1..22: mol_type = other RNA
aagtgcatgcaaaatacaggtt

SEQ ID NO: 25179 - RNA, 22 nt, synthetic construct
  source 1..22: mol_type = other RNA
aagtgccagaaatgtactgaga

SEQ ID NO: 25180 - RNA, 22 nt, synthetic construct
  source 1..22: mol_type = other RNA
aagtgctaattaccatgacaag

SEQ ID NO: 25181 - RNA, 22 nt, synthetic construct
  source 1..22: mol_type = other RNA
aagtgctgtttcaacactgggg

SEQ ID NO: 25182 - RNA, 22 nt, synthetic construct
  source 1..22: mol_type = other RNA
aagtggaagaatgttttcatgg

SEQ ID NO: 25183 - RNA, 22 nt, synthetic construct
  source 1..22: mol_type = other RNA
aagtggcactctttcaaaagtt

SEQ ID NO: 25184 - RNA, 22 nt, synthetic construct
  source 1..22: mol_type = other RNA
aagtgttgtgttactttggttg

SEQ ID NO: 25185 - RNA, 22 nt, synthetic construct
  source 1..22: mol_type = other RNA
aagtgtttgcaaaatggaggaa

SEQ ID NO: 25186 - RNA, 22 nt, synthetic construct
  source 1..22: mol_type = other RNA
aagttacgtctttctccattag

SEQ ID NO: 25187 - RNA, 22 nt, synthetic construct
  source 1..22: mol_type = other RNA
aagttattatggaataccctgt

SEQ ID NO: 25188 - RNA, 22 nt, synthetic construct
  source 1..22: mol_type = other RNA
aagttcaggatgtgtagtctgt

SEQ ID NO: 25189 - RNA, 22 nt, synthetic construct
  source 1..22: mol_type = other RNA
aagttctgcagcagtggtttgt

SEQ ID NO: 25190 - RNA, 22 nt, synthetic construct
  source 1..22: mol_type = other RNA
aagttgaaatgaatcaagggca

SEQ ID NO: 25191 - RNA, 22 nt, synthetic construct
  source 1..22: mol_type = other RNA
aagttgaaatgtcagggccagt

SEQ ID NO: 25192 - RNA, 22 nt, synthetic construct
  source 1..22: mol_type = other RNA
aagttgcgcagcttgttgacca

SEQ ID NO: 25193 - RNA, 22 nt, synthetic construct
  source 1..22: mol_type = other RNA
aagttgtttgctgctctaaagc

SEQ ID NO: 25194 - RNA, 22 nt, synthetic construct
  source 1..22: mol_type = other RNA
aagttttgggtcttgtttcctg

SEQ ID NO: 25195 - RNA, 22 nt, synthetic construct
  source 1..22: mol_type = other RNA
aagtttttcagtttgggaatct

SEQ ID NO: 25196 - RNA, 22 nt, synthetic construct
  source 1..22: mol_type = other RNA
aataaaacgcacagttagtgaa

SEQ ID NO: 25197 - RNA, 22 nt, synthetic construct
  source 1..22: mol_type = other RNA
aataaagaacagactacacatc

SEQ ID NO: 25198 - RNA, 22 nt, synthetic construct
  source 1..22: mol_type = other RNA
aataaagaggaaatactccaga

SEQ ID NO: 25199 - RNA, 22 nt, synthetic construct
  source 1..22: mol_type = other RNA
aataacatccagggaaccacaa

SEQ ID NO: 25200 - RNA, 22 nt, synthetic construct
  source 1..22: mol_type = other RNA
aataacgacttggcgtgaaact

SEQ ID NO: 25201 - RNA, 22 nt, synthetic construct
  source 1..22: mol_type = other RNA
aataacttttgaaagagtgcca

SEQ ID NO: 25202 - RNA, 22 nt, synthetic construct
  source 1..22: mol_type = other RNA
aataatgtgatcccaaagcaag

SEQ ID NO: 25203 - RNA, 22 nt, synthetic construct
  source 1..22: mol_type = other RNA
aataattgtgtgaacaggaatg

SEQ ID NO: 25204 - RNA, 22 nt, synthetic construct
  source 1..22: mol_type = other RNA
aatacaatgttcttgtcatggt

SEQ ID NO: 25205 - RNA, 22 nt, synthetic construct
  source 1..22: mol_type = other RNA
aatacacacctagtttcagaga

SEQ ID NO: 25206 - RNA, 22 nt, synthetic construct
  source 1..22: mol_type = other RNA
aatacactggaaattccaacat

SEQ ID NO: 25207 - RNA, 22 nt, synthetic construct
  source 1..22: mol_type = other RNA
aatacaggtttcttgttcaaac

SEQ ID NO: 25208 - RNA, 22 nt, synthetic construct
  source 1..22: mol_type = other RNA
aataccctctactttcttgtgt

SEQ ID NO: 25209 - RNA, 22 nt, synthetic construct
  source 1..22: mol_type = other RNA
aataccctgtatgaagggaagc

SEQ ID NO: 25210 - RNA, 22 nt, synthetic construct
  source 1..22: mol_type = other RNA
aataccgttcagagctgccacc

SEQ ID NO: 25211 - RNA, 22 nt, synthetic construct
  source 1..22: mol_type = other RNA
aatacctgttcctttcagaaac

SEQ ID NO: 25212 - RNA, 22 nt, synthetic construct
  source 1..22: mol_type = other RNA
aatactccagacttttcctcac

SEQ ID NO: 25213 - RNA, 22 nt, synthetic construct
  source 1..22: mol_type = other RNA
aatactgattttcaccatgaaa

SEQ ID NO: 25214 - RNA, 22 nt, synthetic construct
  source 1..22: mol_type = other RNA
aatagaaaccaagatatgtctg

SEQ ID NO: 25215 - RNA, 22 nt, synthetic construct
  source 1..22: mol_type = other RNA
aatagagggtaaacctgaggca

SEQ ID NO: 25216 - RNA, 22 nt, synthetic construct
  source 1..22: mol_type = other RNA
aatagtcgtgtgagtcctgact

SEQ ID NO: 25217 - RNA, 22 nt, synthetic construct
  source 1..22: mol_type = other RNA
aatataaatcgtagaaattccc

SEQ ID NO: 25218 - RNA, 22 nt, synthetic construct
  source 1..22: mol_type = other RNA
aatatgatttcccatcttgcag

SEQ ID NO: 25219 - RNA, 22 nt, synthetic construct
  source 1..22: mol_type = other RNA
aatattatccagattgtgtttc

SEQ ID NO: 25220 - RNA, 22 nt, synthetic construct
  source 1..22: mol_type = other RNA
aatattgagacagtgttttttc

SEQ ID NO: 25221 - RNA, 22 nt, synthetic construct
  source 1..22: mol_type = other RNA
aatattgcatgtgatgcaagtt

SEQ ID NO: 25222 - RNA, 22 nt, synthetic construct
  source 1..22: mol_type = other RNA
aatcaaatgacctccaaacaat

SEQ ID NO: 25223 - RNA, 22 nt, synthetic construct
  source 1..22: mol_type = other RNA
aatcaacaggcttcagagactg

SEQ ID NO: 25224 - RNA, 22 nt, synthetic construct
  source 1..22: mol_type = other RNA
aatcaagcgagttcgagactca

SEQ ID NO: 25225 - RNA, 22 nt, synthetic construct
  source 1..22: mol_type = other RNA
aatcaagggcagtcccaaggta

SEQ ID NO: 25226 - RNA, 22 nt, synthetic construct
  source 1..22: mol_type = other RNA
aatcaagtgcatgcaaaataca

SEQ ID NO: 25227 - RNA, 22 nt, synthetic construct
  source 1..22: mol_type = other RNA
aatcacagaagcaagtaaaagt

SEQ ID NO: 25228 - RNA, 22 nt, synthetic construct
  source 1..22: mol_type = other RNA
aatcagtattcaaaatcaagcg

SEQ ID NO: 25229 - RNA, 22 nt, synthetic construct
  source 1..22: mol_type = other RNA
aatcagtttttgagatatgccc

SEQ ID NO: 25230 - RNA, 22 nt, synthetic construct
  source 1..22: mol_type = other RNA
aatcatattgagtcttgacagg

SEQ ID NO: 25231 - RNA, 22 nt, synthetic construct
  source 1..22: mol_type = other RNA
aatccacctgcaagctgtgata

SEQ ID NO: 25232 - RNA, 22 nt, synthetic construct
  source 1..22: mol_type = other RNA
aatccagagcttcagattctga

SEQ ID NO: 25233 - RNA, 22 nt, synthetic construct
  source 1..22: mol_type = other RNA
aatccaggtgaaagcagtcaac

SEQ ID NO: 25234 - RNA, 22 nt, synthetic construct
  source 1..22: mol_type = other RNA
aatccatcctggtttcagatag

SEQ ID NO: 25235 - RNA, 22 nt, synthetic construct
  source 1..22: mol_type = other RNA
aatccatctacacatgtatgca

SEQ ID NO: 25236 - RNA, 22 nt, synthetic construct
  source 1..22: mol_type = other RNA
aatcccatctaaaacgtaatga

SEQ ID NO: 25237 - RNA, 22 nt, synthetic construct
  source 1..22: mol_type = other RNA
aatccttagtgaacactgagct

SEQ ID NO: 25238 - RNA, 22 nt, synthetic construct
  source 1..22: mol_type = other RNA
aatcggagacatttggttgact

SEQ ID NO: 25239 - RNA, 22 nt, synthetic construct
  source 1..22: mol_type = other RNA
aatcgtagaaattccccttata

SEQ ID NO: 25240 - RNA, 22 nt, synthetic construct
  source 1..22: mol_type = other RNA
aatctagtgccacacagtgact

SEQ ID NO: 25241 - RNA, 22 nt, synthetic construct
  source 1..22: mol_type = other RNA
aatctctccaatcaaatgacct

SEQ ID NO: 25242 - RNA, 22 nt, synthetic construct
  source 1..22: mol_type = other RNA
aatctcttgctctttgtttctc

SEQ ID NO: 25243 - RNA, 22 nt, synthetic construct
  source 1..22: mol_type = other RNA
aatctgaagctctggattttca

SEQ ID NO: 25244 - RNA, 22 nt, synthetic construct
  source 1..22: mol_type = other RNA
aatctgctctttgttgaaaatg

SEQ ID NO: 25245 - RNA, 22 nt, synthetic construct
  source 1..22: mol_type = other RNA
aatctggataatattgagacag

SEQ ID NO: 25246 - RNA, 22 nt, synthetic construct
  source 1..22: mol_type = other RNA
aatctgtgagttctgtagccca

SEQ ID NO: 25247 - RNA, 22 nt, synthetic construct
  source 1..22: mol_type = other RNA
aatctttaactgcattttcttg

SEQ ID NO: 25248 - RNA, 22 nt, synthetic construct
  source 1..22: mol_type = other RNA
aatgaaatctagtgccacacag

SEQ ID NO: 25249 - RNA, 22 nt, synthetic construct
  source 1..22: mol_type = other RNA
aatgaaatgaatggtgcttact

SEQ ID NO: 25250 - RNA, 22 nt, synthetic construct
  source 1..22: mol_type = other RNA
aatgaatcaagggcagtcccaa

SEQ ID NO: 25251 - RNA, 22 nt, synthetic construct
  source 1..22: mol_type = other RNA
aatgaatggtgcttacttcaag

SEQ ID NO: 25252 - RNA, 22 nt, synthetic construct
  source 1..22: mol_type = other RNA
aatgacatacagactgcaggga

SEQ ID NO: 25253 - RNA, 22 nt, synthetic construct
  source 1..22: mol_type = other RNA
aatgacctccaaacaatacact

SEQ ID NO: 25254 - RNA, 22 nt, synthetic construct
  source 1..22: mol_type = other RNA
aatgactgttccattgtgttct

SEQ ID NO: 25255 - RNA, 22 nt, synthetic construct
  source 1..22: mol_type = other RNA
aatgagcaggaggggaaaagtg

SEQ ID NO: 25256 - RNA, 22 nt, synthetic construct
  source 1..22: mol_type = other RNA
aatgaggcatcactgccatcaa

SEQ ID NO: 25257 - RNA, 22 nt, synthetic construct
  source 1..22: mol_type = other RNA
aatgagttgtcctgtgagatca

SEQ ID NO: 25258 - RNA, 22 nt, synthetic construct
  source 1..22: mol_type = other RNA
aatgatcagcaaagagaaggat

SEQ ID NO: 25259 - RNA, 22 nt, synthetic construct
  source 1..22: mol_type = other RNA
aatgatccttctctttgctgat

SEQ ID NO: 25260 - RNA, 22 nt, synthetic construct
  source 1..22: mol_type = other RNA
aatgatgctcttttgctgcaca

SEQ ID NO: 25261 - RNA, 22 nt, synthetic construct
  source 1..22: mol_type = other RNA
aatgcagttaaagatttcacca

SEQ ID NO: 25262 - RNA, 22 nt, synthetic construct
  source 1..22: mol_type = other RNA
aatgccagtaaactagctgcaa

SEQ ID NO: 25263 - RNA, 22 nt, synthetic construct
  source 1..22: mol_type = other RNA
aatgccattaacagtcaggcta

SEQ ID NO: 25264 - RNA, 22 nt, synthetic construct
  source 1..22: mol_type = other RNA
aatgcctaatggtgctacagtt

SEQ ID NO: 25265 - RNA, 22 nt, synthetic construct
  source 1..22: mol_type = other RNA
aatgctaaatacctgttccttt

SEQ ID NO: 25266 - RNA, 22 nt, synthetic construct
  source 1..22: mol_type = other RNA
aatggaaacacaatctggataa

SEQ ID NO: 25267 - RNA, 22 nt, synthetic construct
  source 1..22: mol_type = other RNA
aatggaacagtcattgtccctg

SEQ ID NO: 25268 - RNA, 22 nt, synthetic construct
  source 1..22: mol_type = other RNA
aatggaagcccactgcctgaga

SEQ ID NO: 25269 - RNA, 22 nt, synthetic construct
  source 1..22: mol_type = other RNA
aatggacttagtctgttgccct

SEQ ID NO: 25270 - RNA, 22 nt, synthetic construct
  source 1..22: mol_type = other RNA
aatggagaaagacgtaacttcg

SEQ ID NO: 25271 - RNA, 22 nt, synthetic construct
  source 1..22: mol_type = other RNA
aatggagacaccaagtggcact

SEQ ID NO: 25272 - RNA, 22 nt, synthetic construct
  source 1..22: mol_type = other RNA
aatggaggaataaaacgcacag

SEQ ID NO: 25273 - RNA, 22 nt, synthetic construct
  source 1..22: mol_type = other RNA
aatggcatttatgtgagatgtg

SEQ ID NO: 25274 - RNA, 22 nt, synthetic construct
  source 1..22: mol_type = other RNA
aatggctcagtctctgaagcct

SEQ ID NO: 25275 - RNA, 22 nt, synthetic construct
  source 1..22: mol_type = other RNA
aatgggactggaggaagtacag

SEQ ID NO: 25276 - RNA, 22 nt, synthetic construct
  source 1..22: mol_type = other RNA
aatgggaggtgatggtatcagg

SEQ ID NO: 25277 - RNA, 22 nt, synthetic construct
  source 1..22: mol_type = other RNA
aatggtctgttttggagaagtg

SEQ ID NO: 25278 - RNA, 22 nt, synthetic construct
  source 1..22: mol_type = other RNA
aatggtgctacagtttctgcct

SEQ ID NO: 25279 - RNA, 22 nt, synthetic construct
  source 1..22: mol_type = other RNA
aatggtgcttacttcaagcaaa

SEQ ID NO: 25280 - RNA, 22 nt, synthetic construct
  source 1..22: mol_type = other RNA
aatggtggagttttagaagaac

SEQ ID NO: 25281 - RNA, 22 nt, synthetic construct
  source 1..22: mol_type = other RNA
aatgtaccaagttgaaatgaat

SEQ ID NO: 25282 - RNA, 22 nt, synthetic construct
  source 1..22: mol_type = other RNA
aatgtcagaacacctcaagcat

SEQ ID NO: 25283 - RNA, 22 nt, synthetic construct
  source 1..22: mol_type = other RNA
aatgtcagggccagtcacagtt

SEQ ID NO: 25284 - RNA, 22 nt, synthetic construct
  source 1..22: mol_type = other RNA
aatgtccaaatgggactggagg

SEQ ID NO: 25285 - RNA, 22 nt, synthetic construct
  source 1..22: mol_type = other RNA
aatgtctccgatttgagtgata

SEQ ID NO: 25286 - RNA, 22 nt, synthetic construct
  source 1..22: mol_type = other RNA
aatgtgatcccaaagcaagatc

SEQ ID NO: 25287 - RNA, 22 nt, synthetic construct
  source 1..22: mol_type = other RNA
aatgtgcagcaaaagagcatca

SEQ ID NO: 25288 - RNA, 22 nt, synthetic construct
  source 1..22: mol_type = other RNA
aatgttcttgtcatggtaatta

SEQ ID NO: 25289 - RNA, 22 nt, synthetic construct
  source 1..22: mol_type = other RNA
aatgttttcatggtgaaaatca

SEQ ID NO: 25290 - RNA, 22 nt, synthetic construct
  source 1..22: mol_type = other RNA
aatgtttttcctgtgcctgacc

SEQ ID NO: 25291 - RNA, 22 nt, synthetic construct
  source 1..22: mol_type = other RNA
aattaaggtggaacctggatgc

SEQ ID NO: 25292 - RNA, 22 nt, synthetic construct
  source 1..22: mol_type = other RNA
aattaccatgacaagaacattg

SEQ ID NO: 25293 - RNA, 22 nt, synthetic construct
  source 1..22: mol_type = other RNA
aattagcacttttcccctcctg

SEQ ID NO: 25294 - RNA, 22 nt, synthetic construct
  source 1..22: mol_type = other RNA
aattattctgaggcctttcaga

SEQ ID NO: 25295 - RNA, 22 nt, synthetic construct
  source 1..22: mol_type = other RNA
aattattgagaacagaagcagc

SEQ ID NO: 25296 - RNA, 22 nt, synthetic construct
  source 1..22: mol_type = other RNA
aattcaatccatcctggtttca

SEQ ID NO: 25297 - RNA, 22 nt, synthetic construct
  source 1..22: mol_type = other RNA
aattccaacatgcctggggggc

SEQ ID NO: 25298 - RNA, 22 nt, synthetic construct
  source 1..22: mol_type = other RNA
aattccccttatagtcagacca

SEQ ID NO: 25299 - RNA, 22 nt, synthetic construct
  source 1..22: mol_type = other RNA
aattccgcacagacctctaact

SEQ ID NO: 25300 - RNA, 22 nt, synthetic construct
  source 1..22: mol_type = other RNA
aattctgttcaggttccagcag

SEQ ID NO: 25301 - RNA, 22 nt, synthetic construct
  source 1..22: mol_type = other RNA
aattcttcaccagacgctagct

SEQ ID NO: 25302 - RNA, 22 nt, synthetic construct
  source 1..22: mol_type = other RNA
aattcttcagtatcaacccaat

SEQ ID NO: 25303 - RNA, 22 nt, synthetic construct
  source 1..22: mol_type = other RNA
aattgaaacaagaccaaaaggc

SEQ ID NO: 25304 - RNA, 22 nt, synthetic construct
  source 1..22: mol_type = other RNA
aattgaaggcccctcgttttca

SEQ ID NO: 25305 - RNA, 22 nt, synthetic construct
  source 1..22: mol_type = other RNA
aattgatctgccctgaggtatg

SEQ ID NO: 25306 - RNA, 22 nt, synthetic construct
  source 1..22: mol_type = other RNA
aattgatggcagtgatgcctca

SEQ ID NO: 25307 - RNA, 22 nt, synthetic construct
  source 1..22: mol_type = other RNA
aattgctgctggaacctgaaca

SEQ ID NO: 25308 - RNA, 22 nt, synthetic construct
  source 1..22: mol_type = other RNA
aattgcttctttctccccctcc

SEQ ID NO: 25309 - RNA, 22 nt, synthetic construct
  source 1..22: mol_type = other RNA
aattggcctgtgcatctgacta

SEQ ID NO: 25310 - RNA, 22 nt, synthetic construct
  source 1..22: mol_type = other RNA
aattggtgggttatgcttgagg

SEQ ID NO: 25311 - RNA, 22 nt, synthetic construct
  source 1..22: mol_type = other RNA
aattgtgatggtggtggtggtg

SEQ ID NO: 25312 - RNA, 22 nt, synthetic construct
  source 1..22: mol_type = other RNA
aattgtgtgaacaggaatgaca

SEQ ID NO: 25313 - RNA, 22 nt, synthetic construct
  source 1..22: mol_type = other RNA
aatttattggatacacctgtca

SEQ ID NO: 25314 - RNA, 22 nt, synthetic construct
  source 1..22: mol_type = other RNA
aatttccagtgtattgtttgga

SEQ ID NO: 25315 - RNA, 22 nt, synthetic construct
  source 1..22: mol_type = other RNA
aatttcttgatctgaaggagcc

SEQ ID NO: 25316 - RNA, 22 nt, synthetic construct
  source 1..22: mol_type = other RNA
aatttgcaagctcctggtggca

SEQ ID NO: 25317 - RNA, 22 nt, synthetic construct
  source 1..22: mol_type = other RNA
aatttggaaggtgactctataa

SEQ ID NO: 25318 - RNA, 22 nt, synthetic construct
  source 1..22: mol_type = other RNA
aattttatagagtcaccttcca

SEQ ID NO: 25319 - RNA, 22 nt, synthetic construct
  source 1..22: mol_type = other RNA
aatttttgctgctgttgctggt

SEQ ID NO: 25320 - RNA, 22 nt, synthetic construct
  source 1..22: mol_type = other RNA
aatttttggtagcagtggagag

SEQ ID NO: 25321 - RNA, 22 nt, synthetic construct
  source 1..22: mol_type = other RNA
acaaaacatggaaaaaggtaac

SEQ ID NO: 25322 - RNA, 22 nt, synthetic construct
  source 1..22: mol_type = other RNA
acaaaatgaaatgaatggtgct

SEQ ID NO: 25323 - RNA, 22 nt, synthetic construct
  source 1..22: mol_type = other RNA
acaaacacaaccatcccagagt

SEQ ID NO: 25324 - RNA, 22 nt, synthetic construct
  source 1..22: mol_type = other RNA
acaaaccactgctgcagaactt

SEQ ID NO: 25325 - RNA, 22 nt, synthetic construct
  source 1..22: mol_type = other RNA
acaaagagcaagagattctgaa

SEQ ID NO: 25326 - RNA, 22 nt, synthetic construct
  source 1..22: mol_type = other RNA
acaaagagcagattcccaaact

SEQ ID NO: 25327 - RNA, 22 nt, synthetic construct
  source 1..22: mol_type = other RNA
acaaagctagcgtctggtgaag

SEQ ID NO: 25328 - RNA, 22 nt, synthetic construct
  source 1..22: mol_type = other RNA
acaaagctccagaatggaagcc

SEQ ID NO: 25329 - RNA, 22 nt, synthetic construct
  source 1..22: mol_type = other RNA
acaaatgtaccaagttgaaatg

SEQ ID NO: 25330 - RNA, 22 nt, synthetic construct
  source 1..22: mol_type = other RNA
acaacaaaaatcagtttttgag

SEQ ID NO: 25331 - RNA, 22 nt, synthetic construct
  source 1..22: mol_type = other RNA
acaacaagcttcagttctacag

SEQ ID NO: 25332 - RNA, 22 nt, synthetic construct
  source 1..22: mol_type = other RNA
acaacacagctggagcacaagt

SEQ ID NO: 25333 - RNA, 22 nt, synthetic construct
  source 1..22: mol_type = other RNA
acaacacttttaagggaagtga

SEQ ID NO: 25334 - RNA, 22 nt, synthetic construct
  source 1..22: mol_type = other RNA
acaaccatcccagagttcacat

SEQ ID NO: 25335 - RNA, 22 nt, synthetic construct
  source 1..22: mol_type = other RNA
acaactacaacaacaaaaatca

SEQ ID NO: 25336 - RNA, 22 nt, synthetic construct
  source 1..22: mol_type = other RNA
acaactcattagtagcctgact

SEQ ID NO: 25337 - RNA, 22 nt, synthetic construct
  source 1..22: mol_type = other RNA
acaactgccagcagttgatgag

SEQ ID NO: 25338 - RNA, 22 nt, synthetic construct
  source 1..22: mol_type = other RNA
acaacttcttcagaaaagacac

SEQ ID NO: 25339 - RNA, 22 nt, synthetic construct
  source 1..22: mol_type = other RNA
acaagaaacctgtattttgcat

SEQ ID NO: 25340 - RNA, 22 nt, synthetic construct
  source 1..22: mol_type = other RNA
acaagaaagtagagggtattcc

SEQ ID NO: 25341 - RNA, 22 nt, synthetic construct
  source 1..22: mol_type = other RNA
acaagaccaaaaggctaatgga

SEQ ID NO: 25342 - RNA, 22 nt, synthetic construct
  source 1..22: mol_type = other RNA
acaagaccaatgtcagaacacc

SEQ ID NO: 25343 - RNA, 22 nt, synthetic construct
  source 1..22: mol_type = other RNA
acaagacccaaaacttgcatca

SEQ ID NO: 25344 - RNA, 22 nt, synthetic construct
  source 1..22: mol_type = other RNA
acaagatctcgtgtttgctcct

SEQ ID NO: 25345 - RNA, 22 nt, synthetic construct
  source 1..22: mol_type = other RNA
acaagctgcgcaacttgctcag

SEQ ID NO: 25346 - RNA, 22 nt, synthetic construct
  source 1..22: mol_type = other RNA
acaagcttcagttctacaggga

SEQ ID NO: 25347 - RNA, 22 nt, synthetic construct
  source 1..22: mol_type = other RNA
acaaggagcaaacacgagatct

SEQ ID NO: 25348 - RNA, 22 nt, synthetic construct
  source 1..22: mol_type = other RNA
acaaggcagtgctaatgcctaa

SEQ ID NO: 25349 - RNA, 22 nt, synthetic construct
  source 1..22: mol_type = other RNA
acaagtcacaaatgtaccaagt

SEQ ID NO: 25350 - RNA, 22 nt, synthetic construct
  source 1..22: mol_type = other RNA
acaatacacacctagtttcaga

SEQ ID NO: 25351 - RNA, 22 nt, synthetic construct
  source 1..22: mol_type = other RNA
acaatacactggaaattccaac

SEQ ID NO: 25352 - RNA, 22 nt, synthetic construct
  source 1..22: mol_type = other RNA
acaatctggataatattgagac

SEQ ID NO: 25353 - RNA, 22 nt, synthetic construct
  source 1..22: mol_type = other RNA
acaatgactgttccattgtgtt

SEQ ID NO: 25354 - RNA, 22 nt, synthetic construct
  source 1..22: mol_type = other RNA
acaatgatcagcaaagagaagg

SEQ ID NO: 25355 - RNA, 22 nt, synthetic construct
  source 1..22: mol_type = other RNA
acaatggaacagtcattgtccc

SEQ ID NO: 25356 - RNA, 22 nt, synthetic construct
  source 1..22: mol_type = other RNA
acaatgttcttgtcatggtaat

SEQ ID NO: 25357 - RNA, 22 nt, synthetic construct
  source 1..22: mol_type = other RNA
acaattattctgaggcctttca

SEQ ID NO: 25358 - RNA, 22 nt, synthetic construct
  source 1..22: mol_type = other RNA
acaattgcttctttctccccct

SEQ ID NO: 25359 - RNA, 22 nt, synthetic construct
  source 1..22: mol_type = other RNA
acacaacacttttaagggaagt

SEQ ID NO: 25360 - RNA, 22 nt, synthetic construct
  source 1..22: mol_type = other RNA
acacaaccatcccagagttcac

SEQ ID NO: 25361 - RNA, 22 nt, synthetic construct
  source 1..22: mol_type = other RNA
acacaagaaagtagagggtatt

SEQ ID NO: 25362 - RNA, 22 nt, synthetic construct
  source 1..22: mol_type = other RNA
acacaatctggataatattgag

SEQ ID NO: 25363 - RNA, 22 nt, synthetic construct
  source 1..22: mol_type = other RNA
acacaatggaacagtcattgtc

SEQ ID NO: 25364 - RNA, 22 nt, synthetic construct
  source 1..22: mol_type = other RNA
acacaattattctgaggccttt

SEQ ID NO: 25365 - RNA, 22 nt, synthetic construct
  source 1..22: mol_type = other RNA
acacacacatggtgaactcctg

SEQ ID NO: 25366 - RNA, 22 nt, synthetic construct
  source 1..22: mol_type = other RNA
acacacatggtgaactcctgga

SEQ ID NO: 25367 - RNA, 22 nt, synthetic construct
  source 1..22: mol_type = other RNA
acacacctagtttcagagaata

SEQ ID NO: 25368 - RNA, 22 nt, synthetic construct
  source 1..22: mol_type = other RNA
acacagcaaccccaaactgagt

SEQ ID NO: 25369 - RNA, 22 nt, synthetic construct
  source 1..22: mol_type = other RNA
acacagcaccaccagaaaacaa

SEQ ID NO: 25370 - RNA, 22 nt, synthetic construct
  source 1..22: mol_type = other RNA
acacagcactatctgaaaccag

SEQ ID NO: 25371 - RNA, 22 nt, synthetic construct
  source 1..22: mol_type = other RNA
acacagctggagcacaagtcac

SEQ ID NO: 25372 - RNA, 22 nt, synthetic construct
  source 1..22: mol_type = other RNA
acacagtgactgcacatgagct

SEQ ID NO: 25373 - RNA, 22 nt, synthetic construct
  source 1..22: mol_type = other RNA
acacataactgcagtgggcctg

SEQ ID NO: 25374 - RNA, 22 nt, synthetic construct
  source 1..22: mol_type = other RNA
acacatcctgaactttttgcag

SEQ ID NO: 25375 - RNA, 22 nt, synthetic construct
  source 1..22: mol_type = other RNA
acacatctgcaagatgggaaat

SEQ ID NO: 25376 - RNA, 22 nt, synthetic construct
  source 1..22: mol_type = other RNA
acacatggtgaactcctggaaa

SEQ ID NO: 25377 - RNA, 22 nt, synthetic construct
  source 1..22: mol_type = other RNA
acacatgtatgcagcccttctc

SEQ ID NO: 25378 - RNA, 22 nt, synthetic construct
  source 1..22: mol_type = other RNA
acaccaaccaaaagaacagctg

SEQ ID NO: 25379 - RNA, 22 nt, synthetic construct
  source 1..22: mol_type = other RNA
acaccaagtggcactctttcaa

SEQ ID NO: 25380 - RNA, 22 nt, synthetic construct
  source 1..22: mol_type = other RNA
acaccaccaccaccatcacaat

SEQ ID NO: 25381 - RNA, 22 nt, synthetic construct
  source 1..22: mol_type = other RNA
acaccaccactaccccaaccaa

SEQ ID NO: 25382 - RNA, 22 nt, synthetic construct
  source 1..22: mol_type = other RNA
acaccaggtgcacttctccaaa

SEQ ID NO: 25383 - RNA, 22 nt, synthetic construct
  source 1..22: mol_type = other RNA
acacccagaaaacaacacagct

SEQ ID NO: 25384 - RNA, 22 nt, synthetic construct
  source 1..22: mol_type = other RNA
acaccccagctttagagcagca

SEQ ID NO: 25385 - RNA, 22 nt, synthetic construct
  source 1..22: mol_type = other RNA
acacctagtttcagagaataaa

SEQ ID NO: 25386 - RNA, 22 nt, synthetic construct
  source 1..22: mol_type = other RNA
acacctcaagcataacccacca

SEQ ID NO: 25387 - RNA, 22 nt, synthetic construct
  source 1..22: mol_type = other RNA
acacctgtcaagactcaatatg

SEQ ID NO: 25388 - RNA, 22 nt, synthetic construct
  source 1..22: mol_type = other RNA
acaccttttgcaacataagcct

SEQ ID NO: 25389 - RNA, 22 nt, synthetic construct
  source 1..22: mol_type = other RNA
acacgactattctggcttccct

SEQ ID NO: 25390 - RNA, 22 nt, synthetic construct
  source 1..22: mol_type = other RNA
acacgagatcttgtgcccccaa

SEQ ID NO: 25391 - RNA, 22 nt, synthetic construct
  source 1..22: mol_type = other RNA
acactcaaaagcatgctgctct

SEQ ID NO: 25392 - RNA, 22 nt, synthetic construct
  source 1..22: mol_type = other RNA
acactcagacccctccccagaa

SEQ ID NO: 25393 - RNA, 22 nt, synthetic construct
  source 1..22: mol_type = other RNA
acactgagctttgcttgaagta

SEQ ID NO: 25394 - RNA, 22 nt, synthetic construct
  source 1..22: mol_type = other RNA
acactggaaattccaacatgcc

SEQ ID NO: 25395 - RNA, 22 nt, synthetic construct
  source 1..22: mol_type = other RNA
acactggggacataagtttttc

SEQ ID NO: 25396 - RNA, 22 nt, synthetic construct
  source 1..22: mol_type = other RNA
acactgtctcaatattatccag

SEQ ID NO: 25397 - RNA, 22 nt, synthetic construct
  source 1..22: mol_type = other RNA
acacttggaataccctctactt

SEQ ID NO: 25398 - RNA, 22 nt, synthetic construct
  source 1..22: mol_type = other RNA
acacttttaagggaagtgaaaa

SEQ ID NO: 25399 - RNA, 22 nt, synthetic construct
  source 1..22: mol_type = other RNA
acagaacctctggctacaaagc

SEQ ID NO: 25400 - RNA, 22 nt, synthetic construct
  source 1..22: mol_type = other RNA
acagaactcacagattctttct

SEQ ID NO: 25401 - RNA, 22 nt, synthetic construct
  source 1..22: mol_type = other RNA
acagaagcaagaacagcagcaa

SEQ ID NO: 25402 - RNA, 22 nt, synthetic construct
  source 1..22: mol_type = other RNA
acagaagcaagtaaaagttgaa

SEQ ID NO: 25403 - RNA, 22 nt, synthetic construct
  source 1..22: mol_type = other RNA
acagaagcagctgttcttttgg

SEQ ID NO: 25404 - RNA, 22 nt, synthetic construct
  source 1..22: mol_type = other RNA
acagaattcttcaccagacgct

SEQ ID NO: 25405 - RNA, 22 nt, synthetic construct
  source 1..22: mol_type = other RNA
acagaccatttaccaaaagctc

SEQ ID NO: 25406 - RNA, 22 nt, synthetic construct
  source 1..22: mol_type = other RNA
acagacctctaactctgagctg

SEQ ID NO: 25407 - RNA, 22 nt, synthetic construct
  source 1..22: mol_type = other RNA
acagactaagtccattcctgat

SEQ ID NO: 25408 - RNA, 22 nt, synthetic construct
  source 1..22: mol_type = other RNA
acagactacacatcctgaactt

SEQ ID NO: 25409 - RNA, 22 nt, synthetic construct
  source 1..22: mol_type = other RNA
acagactgcagggacaatgact

SEQ ID NO: 25410 - RNA, 22 nt, synthetic construct
  source 1..22: mol_type = other RNA
acagattctttcttatcactca

SEQ ID NO: 25411 - RNA, 22 nt, synthetic construct
  source 1..22: mol_type = other RNA
acagcaaccccaaactgagtct

SEQ ID NO: 25412 - RNA, 22 nt, synthetic construct
  source 1..22: mol_type = other RNA
acagcaccaccagaaaacaaaa

SEQ ID NO: 25413 - RNA, 22 nt, synthetic construct
  source 1..22: mol_type = other RNA
acagcactatctgaaaccagga

SEQ ID NO: 25414 - RNA, 22 nt, synthetic construct
  source 1..22: mol_type = other RNA
acagcacttgaatcaacaggct

SEQ ID NO: 25415 - RNA, 22 nt, synthetic construct
  source 1..22: mol_type = other RNA
acagcagcaaaaattacaaata

SEQ ID NO: 25416 - RNA, 22 nt, synthetic construct
  source 1..22: mol_type = other RNA
acagcagcaaacacagcaaccc

SEQ ID NO: 25417 - RNA, 22 nt, synthetic construct
  source 1..22: mol_type = other RNA
acagctgcttctgttctcaata

SEQ ID NO: 25418 - RNA, 22 nt, synthetic construct
  source 1..22: mol_type = other RNA
acagctggagcacaagtcacaa

SEQ ID NO: 25419 - RNA, 22 nt, synthetic construct
  source 1..22: mol_type = other RNA
acagcttgcaggtggattctct

SEQ ID NO: 25420 - RNA, 22 nt, synthetic construct
  source 1..22: mol_type = other RNA
acaggaaaaacatttgcatggt

SEQ ID NO: 25421 - RNA, 22 nt, synthetic construct
  source 1..22: mol_type = other RNA
acaggaatgacatacagactgc

SEQ ID NO: 25422 - RNA, 22 nt, synthetic construct
  source 1..22: mol_type = other RNA
acaggacaactcattagtagcc

SEQ ID NO: 25423 - RNA, 22 nt, synthetic construct
  source 1..22: mol_type = other RNA
acaggacaactgccagcagttg

SEQ ID NO: 25424 - RNA, 22 nt, synthetic construct
  source 1..22: mol_type = other RNA
acaggagcagaagtcacaacaa

SEQ ID NO: 25425 - RNA, 22 nt, synthetic construct
  source 1..22: mol_type = other RNA
acaggatagaaccaaccatgtt

SEQ ID NO: 25426 - RNA, 22 nt, synthetic construct
  source 1..22: mol_type = other RNA
acaggcagcacaaacacaacca

SEQ ID NO: 25427 - RNA, 22 nt, synthetic construct
  source 1..22: mol_type = other RNA
acaggcatgtggcttgcatcca

SEQ ID NO: 25428 - RNA, 22 nt, synthetic construct
  source 1..22: mol_type = other RNA
acaggccaattaaggtggaacc

SEQ ID NO: 25429 - RNA, 22 nt, synthetic construct
  source 1..22: mol_type = other RNA
acaggcctcactcaccactgca

SEQ ID NO: 25430 - RNA, 22 nt, synthetic construct
  source 1..22: mol_type = other RNA
acaggcttcagagactgagcca

SEQ ID NO: 25431 - RNA, 22 nt, synthetic construct
  source 1..22: mol_type = other RNA
acagggatataaaaatagaaac

SEQ ID NO: 25432 - RNA, 22 nt, synthetic construct
  source 1..22: mol_type = other RNA
acagggtattccataataactt

SEQ ID NO: 25433 - RNA, 22 nt, synthetic construct
  source 1..22: mol_type = other RNA
acaggtatttagcattgcagct

SEQ ID NO: 25434 - RNA, 22 nt, synthetic construct
  source 1..22: mol_type = other RNA
acaggtgctttcaagaacagga

SEQ ID NO: 25435 - RNA, 22 nt, synthetic construct
  source 1..22: mol_type = other RNA
acaggtgtatccaataaatttt

SEQ ID NO: 25436 - RNA, 22 nt, synthetic construct
  source 1..22: mol_type = other RNA
acaggttcctcagcttccttca

SEQ ID NO: 25437 - RNA, 22 nt, synthetic construct
  source 1..22: mol_type = other RNA
acaggtttcttgttcaaacaat

SEQ ID NO: 25438 - RNA, 22 nt, synthetic construct
  source 1..22: mol_type = other RNA
acagtcaggctactaatgagtt

SEQ ID NO: 25439 - RNA, 22 nt, synthetic construct
  source 1..22: mol_type = other RNA
acagtcattgtccctgcagtct

SEQ ID NO: 25440 - RNA, 22 nt, synthetic construct
  source 1..22: mol_type = other RNA
acagtgactgcacatgagcttt

SEQ ID NO: 25441 - RNA, 22 nt, synthetic construct
  source 1..22: mol_type = other RNA
acagtggaccaacatctccagt

SEQ ID NO: 25442 - RNA, 22 nt, synthetic construct
  source 1..22: mol_type = other RNA
acagtgttttttccaggagttc

SEQ ID NO: 25443 - RNA, 22 nt, synthetic construct
  source 1..22: mol_type = other RNA
acagttagtgaaccttctctct

SEQ ID NO: 25444 - RNA, 22 nt, synthetic construct
  source 1..22: mol_type = other RNA
acagtttctgcctcttccgtgg

SEQ ID NO: 25445 - RNA, 22 nt, synthetic construct
  source 1..22: mol_type = other RNA
acagttttgactagacaaacca

SEQ ID NO: 25446 - RNA, 22 nt, synthetic construct
  source 1..22: mol_type = other RNA
acataaatgccattaacagtca

SEQ ID NO: 25447 - RNA, 22 nt, synthetic construct
  source 1..22: mol_type = other RNA
acataaccatgcaaatgttttt

SEQ ID NO: 25448 - RNA, 22 nt, synthetic construct
  source 1..22: mol_type = other RNA
acataactgcagtgggcctgaa

SEQ ID NO: 25449 - RNA, 22 nt, synthetic construct
  source 1..22: mol_type = other RNA
acataagcctcataaacaggca

SEQ ID NO: 25450 - RNA, 22 nt, synthetic construct
  source 1..22: mol_type = other RNA
acataagtttttcagtttggga

SEQ ID NO: 25451 - RNA, 22 nt, synthetic construct
  source 1..22: mol_type = other RNA
acatacagactgcagggacaat

SEQ ID NO: 25452 - RNA, 22 nt, synthetic construct
  source 1..22: mol_type = other RNA
acatccagggaaccacaaagct

SEQ ID NO: 25453 - RNA, 22 nt, synthetic construct
  source 1..22: mol_type = other RNA
acatcctgaactttttgcagga

SEQ ID NO: 25454 - RNA, 22 nt, synthetic construct
  source 1..22: mol_type = other RNA
acatctcacataaatgccatta

SEQ ID NO: 25455 - RNA, 22 nt, synthetic construct
  source 1..22: mol_type = other RNA
acatctccagttccaaaaaccc

SEQ ID NO: 25456 - RNA, 22 nt, synthetic construct
  source 1..22: mol_type = other RNA
acatctccctcaaaaccagcaa

SEQ ID NO: 25457 - RNA, 22 nt, synthetic construct
  source 1..22: mol_type = other RNA
acatctgcaagatgggaaatca

SEQ ID NO: 25458 - RNA, 22 nt, synthetic construct
  source 1..22: mol_type = other RNA
acatgagcttttggtaaatggt

SEQ ID NO: 25459 - RNA, 22 nt, synthetic construct
  source 1..22: mol_type = other RNA
acatgcctggggggctcccaag

SEQ ID NO: 25460 - RNA, 22 nt, synthetic construct
  source 1..22: mol_type = other RNA
acatgcctgtatgcacacagca

SEQ ID NO: 25461 - RNA, 22 nt, synthetic construct
  source 1..22: mol_type = other RNA
acatggaaaaaggtaactaagc

SEQ ID NO: 25462 - RNA, 22 nt, synthetic construct
  source 1..22: mol_type = other RNA
acatggtgaactcctggaaaaa

SEQ ID NO: 25463 - RNA, 22 nt, synthetic construct
  source 1..22: mol_type = other RNA
acatggttggttctatcctgtt

SEQ ID NO: 25464 - RNA, 22 nt, synthetic construct
  source 1..22: mol_type = other RNA
acatgtatgcagcccttctccg

SEQ ID NO: 25465 - RNA, 22 nt, synthetic construct
  source 1..22: mol_type = other RNA
acatgtgtagatggattaggac

SEQ ID NO: 25466 - RNA, 22 nt, synthetic construct
  source 1..22: mol_type = other RNA
acattatcacagcttgcaggtg

SEQ ID NO: 25467 - RNA, 22 nt, synthetic construct
  source 1..22: mol_type = other RNA
acattatgagtctcgaactcgc

SEQ ID NO: 25468 - RNA, 22 nt, synthetic construct
  source 1..22: mol_type = other RNA
acattcttccactttagtctgg

SEQ ID NO: 25469 - RNA, 22 nt, synthetic construct
  source 1..22: mol_type = other RNA
acattggtcttgttttctcaga

SEQ ID NO: 25470 - RNA, 22 nt, synthetic construct
  source 1..22: mol_type = other RNA
acatttcaacttttacttgctt

SEQ ID NO: 25471 - RNA, 22 nt, synthetic construct
  source 1..22: mol_type = other RNA
acatttctggcacttacctaca

SEQ ID NO: 25472 - RNA, 22 nt, synthetic construct
  source 1..22: mol_type = other RNA
acatttgcatggttatgtatca

SEQ ID NO: 25473 - RNA, 22 nt, synthetic construct
  source 1..22: mol_type = other RNA
acatttggttgactgctttcac

SEQ ID NO: 25474 - RNA, 22 nt, synthetic construct
  source 1..22: mol_type = other RNA
acatttgtgacttgtgctccag

SEQ ID NO: 25475 - RNA, 22 nt, synthetic construct
  source 1..22: mol_type = other RNA
accaaaaattggtgggttatgc

SEQ ID NO: 25476 - RNA, 22 nt, synthetic construct
  source 1..22: mol_type = other RNA
accaaaagaacagctgcttctg

SEQ ID NO: 25477 - RNA, 22 nt, synthetic construct
  source 1..22: mol_type = other RNA
accaaaagctcatgtgcagtca

SEQ ID NO: 25478 - RNA, 22 nt, synthetic construct
  source 1..22: mol_type = other RNA
accaaaaggctaatggagaaag

SEQ ID NO: 25479 - RNA, 22 nt, synthetic construct
  source 1..22: mol_type = other RNA
accaaagtaacacaacactttt

SEQ ID NO: 25480 - RNA, 22 nt, synthetic construct
  source 1..22: mol_type = other RNA
accaaatgtctccgatttgagt

SEQ ID NO: 25481 - RNA, 22 nt, synthetic construct
  source 1..22: mol_type = other RNA
accaacatctccagttccaaaa

SEQ ID NO: 25482 - RNA, 22 nt, synthetic construct
  source 1..22: mol_type = other RNA
accaaccaaaagaacagctgct

SEQ ID NO: 25483 - RNA, 22 nt, synthetic construct
  source 1..22: mol_type = other RNA
accaaccatgttgagggcaaca

SEQ ID NO: 25484 - RNA, 22 nt, synthetic construct
  source 1..22: mol_type = other RNA
accaagatatgtctggtcaaca

SEQ ID NO: 25485 - RNA, 22 nt, synthetic construct
  source 1..22: mol_type = other RNA
accaagcggaatcccatctaaa

SEQ ID NO: 25486 - RNA, 22 nt, synthetic construct
  source 1..22: mol_type = other RNA
accaagtggcactctttcaaaa

SEQ ID NO: 25487 - RNA, 22 nt, synthetic construct
  source 1..22: mol_type = other RNA
accaagttgaaatgaatcaagg

SEQ ID NO: 25488 - RNA, 22 nt, synthetic construct
  source 1..22: mol_type = other RNA
accaatgtcagaacacctcaag

SEQ ID NO: 25489 - RNA, 22 nt, synthetic construct
  source 1..22: mol_type = other RNA
accaatttttggtagcagtgga

SEQ ID NO: 25490 - RNA, 22 nt, synthetic construct
  source 1..22: mol_type = other RNA
accacaaagctagcgtctggtg

SEQ ID NO: 25491 - RNA, 22 nt, synthetic construct
  source 1..22: mol_type = other RNA
accacaccaccaccaccatcac

SEQ ID NO: 25492 - RNA, 22 nt, synthetic construct
  source 1..22: mol_type = other RNA
accacatctcacataaatgcca

SEQ ID NO: 25493 - RNA, 22 nt, synthetic construct
  source 1..22: mol_type = other RNA
accaccaccaccatcacaattg

SEQ ID NO: 25494 - RNA, 22 nt, synthetic construct
  source 1..22: mol_type = other RNA
accaccaccatcacaattgctt

SEQ ID NO: 25495 - RNA, 22 nt, synthetic construct
  source 1..22: mol_type = other RNA
accaccactaccccaaccaaag

SEQ ID NO: 25496 - RNA, 22 nt, synthetic construct
  source 1..22: mol_type = other RNA
accaccagaaaacaaaacatgg

SEQ ID NO: 25497 - RNA, 22 nt, synthetic construct
  source 1..22: mol_type = other RNA
accaccatcacaattgcttctt

SEQ ID NO: 25498 - RNA, 22 nt, synthetic construct
  source 1..22: mol_type = other RNA
accaccttcccagagtcctaat

SEQ ID NO: 25499 - RNA, 22 nt, synthetic construct
  source 1..22: mol_type = other RNA
accactaccccaaccaaagtaa

SEQ ID NO: 25500 - RNA, 22 nt, synthetic construct
  source 1..22: mol_type = other RNA
accactgcagctggctttggag

SEQ ID NO: 25501 - RNA, 22 nt, synthetic construct
  source 1..22: mol_type = other RNA
accactgctgcagaacttgata

SEQ ID NO: 25502 - RNA, 22 nt, synthetic construct
  source 1..22: mol_type = other RNA
accagaaaacaaaacatggaaa

SEQ ID NO: 25503 - RNA, 22 nt, synthetic construct
  source 1..22: mol_type = other RNA
accagaacaactacaacaacaa

SEQ ID NO: 25504 - RNA, 22 nt, synthetic construct
  source 1..22: mol_type = other RNA
accagacatatcttggtttcta

SEQ ID NO: 25505 - RNA, 22 nt, synthetic construct
  source 1..22: mol_type = other RNA
accagacgctagctttgtggtt

SEQ ID NO: 25506 - RNA, 22 nt, synthetic construct
  source 1..22: mol_type = other RNA
accagcaacagcagcaaaaatt

SEQ ID NO: 25507 - RNA, 22 nt, synthetic construct
  source 1..22: mol_type = other RNA
accaggagcttgcaaattgctg

SEQ ID NO: 25508 - RNA, 22 nt, synthetic construct
  source 1..22: mol_type = other RNA
accaggatggattgaattgaag

SEQ ID NO: 25509 - RNA, 22 nt, synthetic construct
  source 1..22: mol_type = other RNA
accagggaggaagtcacactca

SEQ ID NO: 25510 - RNA, 22 nt, synthetic construct
  source 1..22: mol_type = other RNA
accaggtgcacttctccaaaac

SEQ ID NO: 25511 - RNA, 22 nt, synthetic construct
  source 1..22: mol_type = other RNA
accagtttttcaacacataact

SEQ ID NO: 25512 - RNA, 22 nt, synthetic construct
  source 1..22: mol_type = other RNA
accataaggctcttactctcaa

SEQ ID NO: 25513 - RNA, 22 nt, synthetic construct
  source 1..22: mol_type = other RNA
accatcacaattgcttctttct

SEQ ID NO: 25514 - RNA, 22 nt, synthetic construct
  source 1..22: mol_type = other RNA
accatcacctcccatttgccag

SEQ ID NO: 25515 - RNA, 22 nt, synthetic construct
  source 1..22: mol_type = other RNA
accatcccagagttcacatctc

SEQ ID NO: 25516 - RNA, 22 nt, synthetic construct
  source 1..22: mol_type = other RNA
accatgaaaacattcttccact

SEQ ID NO: 25517 - RNA, 22 nt, synthetic construct
  source 1..22: mol_type = other RNA
accatgaaatcaagtgcatgca

SEQ ID NO: 25518 - RNA, 22 nt, synthetic construct
  source 1..22: mol_type = other RNA
accatgacaagaacattgtatt

SEQ ID NO: 25519 - RNA, 22 nt, synthetic construct
  source 1..22: mol_type = other RNA
accatgcaaatgtttttcctgt

SEQ ID NO: 25520 - RNA, 22 nt, synthetic construct
  source 1..22: mol_type = other RNA
accatggagcagcatctgaagc

SEQ ID NO: 25521 - RNA, 22 nt, synthetic construct
  source 1..22: mol_type = other RNA
accatgtgtgtgttccacggaa

SEQ ID NO: 25522 - RNA, 22 nt, synthetic construct
  source 1..22: mol_type = other RNA
accatgttgagggcaacagact

SEQ ID NO: 25523 - RNA, 22 nt, synthetic construct
  source 1..22: mol_type = other RNA
accattaggcattagcactgcc

SEQ ID NO: 25524 - RNA, 22 nt, synthetic construct
  source 1..22: mol_type = other RNA
accattcagagtgctttttcct

SEQ ID NO: 25525 - RNA, 22 nt, synthetic construct
  source 1..22: mol_type = other RNA
accatttaccaaaagctcatgt

SEQ ID NO: 25526 - RNA, 22 nt, synthetic construct
  source 1..22: mol_type = other RNA
acccaaaacttgcatcacatgc

SEQ ID NO: 25527 - RNA, 22 nt, synthetic construct
  source 1..22: mol_type = other RNA
acccaatctctccaatcaaatg

SEQ ID NO: 25528 - RNA, 22 nt, synthetic construct
  source 1..22: mol_type = other RNA
acccaccaatttttggtagcag

SEQ ID NO: 25529 - RNA, 22 nt, synthetic construct
  source 1..22: mol_type = other RNA
acccagaaaacaacacagctgg

SEQ ID NO: 25530 - RNA, 22 nt, synthetic construct
  source 1..22: mol_type = other RNA
acccatcgcatacctcagggca

SEQ ID NO: 25531 - RNA, 22 nt, synthetic construct
  source 1..22: mol_type = other RNA
accccaaactgagtcttgccat

SEQ ID NO: 25532 - RNA, 22 nt, synthetic construct
  source 1..22: mol_type = other RNA
accccaaccaaagtaacacaac

SEQ ID NO: 25533 - RNA, 22 nt, synthetic construct
  source 1..22: mol_type = other RNA
accccagctttagagcagcaaa

SEQ ID NO: 25534 - RNA, 22 nt, synthetic construct
  source 1..22: mol_type = other RNA
acccccaaagcaacaatgatca

SEQ ID NO: 25535 - RNA, 22 nt, synthetic construct
  source 1..22: mol_type = other RNA
accccgaagttacgtctttctc

SEQ ID NO: 25536 - RNA, 22 nt, synthetic construct
  source 1..22: mol_type = other RNA
acccctccccagaaggacactc

SEQ ID NO: 25537 - RNA, 22 nt, synthetic construct
  source 1..22: mol_type = other RNA
accctcacaccaggtgcacttc

SEQ ID NO: 25538 - RNA, 22 nt, synthetic construct
  source 1..22: mol_type = other RNA
accctctactttcttgtgtaaa

SEQ ID NO: 25539 - RNA, 22 nt, synthetic construct
  source 1..22: mol_type = other RNA
accctctattttcacttccctt

SEQ ID NO: 25540 - RNA, 22 nt, synthetic construct
  source 1..22: mol_type = other RNA
accctgtatgaagggaagccag

SEQ ID NO: 25541 - RNA, 22 nt, synthetic construct
  source 1..22: mol_type = other RNA
acccttcagaatctcttgctct

SEQ ID NO: 25542 - RNA, 22 nt, synthetic construct
  source 1..22: mol_type = other RNA
accgcaatggaaacacaatctg

SEQ ID NO: 25543 - RNA, 22 nt, synthetic construct
  source 1..22: mol_type = other RNA
accgttcagagctgccaccagg

SEQ ID NO: 25544 - RNA, 22 nt, synthetic construct
  source 1..22: mol_type = other RNA
acctacacatctgcaagatggg

SEQ ID NO: 25545 - RNA, 22 nt, synthetic construct
  source 1..22: mol_type = other RNA
acctagtttcagagaataaaga

SEQ ID NO: 25546 - RNA, 22 nt, synthetic construct
  source 1..22: mol_type = other RNA
acctcaagcataacccaccaat

SEQ ID NO: 25547 - RNA, 22 nt, synthetic construct
  source 1..22: mol_type = other RNA
acctcagggcagatcaattccg

SEQ ID NO: 25548 - RNA, 22 nt, synthetic construct
  source 1..22: mol_type = other RNA
acctccaaacaatacactggaa

SEQ ID NO: 25549 - RNA, 22 nt, synthetic construct
  source 1..22: mol_type = other RNA
acctcccatttgccagacagaa

SEQ ID NO: 25550 - RNA, 22 nt, synthetic construct
  source 1..22: mol_type = other RNA
acctctaactctgagctgcctc

SEQ ID NO: 25551 - RNA, 22 nt, synthetic construct
  source 1..22: mol_type = other RNA
acctctggctacaaagctccag

SEQ ID NO: 25552 - RNA, 22 nt, synthetic construct
  source 1..22: mol_type = other RNA
acctgaacagaattcttcacca

SEQ ID NO: 25553 - RNA, 22 nt, synthetic construct
  source 1..22: mol_type = other RNA
acctgaggcaccaccttcccag

SEQ ID NO: 25554 - RNA, 22 nt, synthetic construct
  source 1..22: mol_type = other RNA
acctgcaagctgtgataatgtg

SEQ ID NO: 25555 - RNA, 22 nt, synthetic construct
  source 1..22: mol_type = other RNA
acctggatgcaagccacatgcc

SEQ ID NO: 25556 - RNA, 22 nt, synthetic construct
  source 1..22: mol_type = other RNA
acctggatttctttcttggctt

SEQ ID NO: 25557 - RNA, 22 nt, synthetic construct
  source 1..22: mol_type = other RNA
acctggtgtgagggtttttgga

SEQ ID NO: 25558 - RNA, 22 nt, synthetic construct
  source 1..22: mol_type = other RNA
acctgtattttgcatgcacttg

SEQ ID NO: 25559 - RNA, 22 nt, synthetic construct
  source 1..22: mol_type = other RNA
acctgtcaagactcaatatgat

SEQ ID NO: 25560 - RNA, 22 nt, synthetic construct
  source 1..22: mol_type = other RNA
acctgtgaagaagatcttgctt

SEQ ID NO: 25561 - RNA, 22 nt, synthetic construct
  source 1..22: mol_type = other RNA
acctgtggaagaggaggagggg

SEQ ID NO: 25562 - RNA, 22 nt, synthetic construct
  source 1..22: mol_type = other RNA
acctgttcctttcagaaaccag

SEQ ID NO: 25563 - RNA, 22 nt, synthetic construct
  source 1..22: mol_type = other RNA
accttaattggcctgtgcatct

SEQ ID NO: 25564 - RNA, 22 nt, synthetic construct
  source 1..22: mol_type = other RNA
accttagagcagcatgcttttg

SEQ ID NO: 25565 - RNA, 22 nt, synthetic construct
  source 1..22: mol_type = other RNA
accttccaaattactagatact

SEQ ID NO: 25566 - RNA, 22 nt, synthetic construct
  source 1..22: mol_type = other RNA
accttcccagagtcctaatcca

SEQ ID NO: 25567 - RNA, 22 nt, synthetic construct
  source 1..22: mol_type = other RNA
accttctctctctgggctcctt

SEQ ID NO: 25568 - RNA, 22 nt, synthetic construct
  source 1..22: mol_type = other RNA
accttgggactgcccttgattc

SEQ ID NO: 25569 - RNA, 22 nt, synthetic construct
  source 1..22: mol_type = other RNA
acctttgctgagcaagttgcgc

SEQ ID NO: 25570 - RNA, 22 nt, synthetic construct
  source 1..22: mol_type = other RNA
accttttgcaacataagcctca

SEQ ID NO: 25571 - RNA, 22 nt, synthetic construct
  source 1..22: mol_type = other RNA
acctttttccatgttttgtttt

SEQ ID NO: 25572 - RNA, 22 nt, synthetic construct
  source 1..22: mol_type = other RNA
acgactattctggcttcccttc

SEQ ID NO: 25573 - RNA, 22 nt, synthetic construct
  source 1..22: mol_type = other RNA
acgacttggcgtgaaactgctt

SEQ ID NO: 25574 - RNA, 22 nt, synthetic construct
  source 1..22: mol_type = other RNA
acgagatcttgtgcccccaaca

SEQ ID NO: 25575 - RNA, 22 nt, synthetic construct
  source 1..22: mol_type = other RNA
acgaggggccttcaattcaatc

SEQ ID NO: 25576 - RNA, 22 nt, synthetic construct
  source 1..22: mol_type = other RNA
acgatttatattctgtacttcc

SEQ ID NO: 25577 - RNA, 22 nt, synthetic construct
  source 1..22: mol_type = other RNA
acgcacagttagtgaaccttct

SEQ ID NO: 25578 - RNA, 22 nt, synthetic construct
  source 1..22: mol_type = other RNA
acgccaagtcgttatttgacca

SEQ ID NO: 25579 - RNA, 22 nt, synthetic construct
  source 1..22: mol_type = other RNA
acgccatgtgtctcagtacatt

SEQ ID NO: 25580 - RNA, 22 nt, synthetic construct
  source 1..22: mol_type = other RNA
acgctagctttgtggttccctg

SEQ ID NO: 25581 - RNA, 22 nt, synthetic construct
  source 1..22: mol_type = other RNA
acggaagaggcagaaactgtag

SEQ ID NO: 25582 - RNA, 22 nt, synthetic construct
  source 1..22: mol_type = other RNA
acgtaacttcggggtaagccaa

SEQ ID NO: 25583 - RNA, 22 nt, synthetic construct
  source 1..22: mol_type = other RNA
acgtaatgaggcatcactgcca

SEQ ID NO: 25584 - RNA, 22 nt, synthetic construct
  source 1..22: mol_type = other RNA
acgtctttctccattagccttt

SEQ ID NO: 25585 - RNA, 22 nt, synthetic construct
  source 1..22: mol_type = other RNA
acgttttagatgggattccgct

SEQ ID NO: 25586 - RNA, 22 nt, synthetic construct
  source 1..22: mol_type = other RNA
actaaagtggaagaatgttttc

SEQ ID NO: 25587 - RNA, 22 nt, synthetic construct
  source 1..22: mol_type = other RNA
actaactgtgcgttttattcct

SEQ ID NO: 25588 - RNA, 22 nt, synthetic construct
  source 1..22: mol_type = other RNA
actaagcaagagaatccacctg

SEQ ID NO: 25589 - RNA, 22 nt, synthetic construct
  source 1..22: mol_type = other RNA
actaaggattccttttctgcca

SEQ ID NO: 25590 - RNA, 22 nt, synthetic construct
  source 1..22: mol_type = other RNA
actaagtccattcctgatacca

SEQ ID NO: 25591 - RNA, 22 nt, synthetic construct
  source 1..22: mol_type = other RNA
actaatgagttgtcctgtgaga

SEQ ID NO: 25592 - RNA, 22 nt, synthetic construct
  source 1..22: mol_type = other RNA
actacaacaacaaaaatcagtt

SEQ ID NO: 25593 - RNA, 22 nt, synthetic construct
  source 1..22: mol_type = other RNA
actacacatcctgaactttttg

SEQ ID NO: 25594 - RNA, 22 nt, synthetic construct
  source 1..22: mol_type = other RNA
actaccacaccaccaccaccat

SEQ ID NO: 25595 - RNA, 22 nt, synthetic construct
  source 1..22: mol_type = other RNA
actaccccaaccaaagtaacac

SEQ ID NO: 25596 - RNA, 22 nt, synthetic construct
  source 1..22: mol_type = other RNA
actagacaaaccactgctgcag

SEQ ID NO: 25597 - RNA, 22 nt, synthetic construct
  source 1..22: mol_type = other RNA
actagctgcaatgctaaatacc

SEQ ID NO: 25598 - RNA, 22 nt, synthetic construct
  source 1..22: mol_type = other RNA
actaggtgtgtattgtttgaac

SEQ ID NO: 25599 - RNA, 22 nt, synthetic construct
  source 1..22: mol_type = other RNA
actataaggggaatttctacga

SEQ ID NO: 25600 - RNA, 22 nt, synthetic construct
  source 1..22: mol_type = other RNA
actatctgaaaccaggatggat

SEQ ID NO: 25601 - RNA, 22 nt, synthetic construct
  source 1..22: mol_type = other RNA
actatggcaagactcagtttgg

SEQ ID NO: 25602 - RNA, 22 nt, synthetic construct
  source 1..22: mol_type = other RNA
actattctggcttcccttcata

SEQ ID NO: 25603 - RNA, 22 nt, synthetic construct
  source 1..22: mol_type = other RNA
actcaaaagcatgctgctctaa

SEQ ID NO: 25604 - RNA, 22 nt, synthetic construct
  source 1..22: mol_type = other RNA
actcaaatcggagacatttggt

SEQ ID NO: 25605 - RNA, 22 nt, synthetic construct
  source 1..22: mol_type = other RNA
actcaatatgatttcccatctt

SEQ ID NO: 25606 - RNA, 22 nt, synthetic construct
  source 1..22: mol_type = other RNA
actcacaccttttgcaacataa

SEQ ID NO: 25607 - RNA, 22 nt, synthetic construct
  source 1..22: mol_type = other RNA
actcacacgactattctggctt

SEQ ID NO: 25608 - RNA, 22 nt, synthetic construct
  source 1..22: mol_type = other RNA
actcacagattctttcttatca

SEQ ID NO: 25609 - RNA, 22 nt, synthetic construct
  source 1..22: mol_type = other RNA
actcaccactgcagctggcttt

SEQ ID NO: 25610 - RNA, 22 nt, synthetic construct
  source 1..22: mol_type = other RNA
actcacccatcgcatacctcag

SEQ ID NO: 25611 - RNA, 22 nt, synthetic construct
  source 1..22: mol_type = other RNA
actcagacccctccccagaagg

SEQ ID NO: 25612 - RNA, 22 nt, synthetic construct
  source 1..22: mol_type = other RNA
actcagtttggggttgctgtgt

SEQ ID NO: 25613 - RNA, 22 nt, synthetic construct
  source 1..22: mol_type = other RNA
actcataatgtccaaatgggac

SEQ ID NO: 25614 - RNA, 22 nt, synthetic construct
  source 1..22: mol_type = other RNA
actcattagtagcctgactgtt

SEQ ID NO: 25615 - RNA, 22 nt, synthetic construct
  source 1..22: mol_type = other RNA
actccaccattcagagtgcttt

SEQ ID NO: 25616 - RNA, 22 nt, synthetic construct
  source 1..22: mol_type = other RNA
actccagacttttcctcacccc

SEQ ID NO: 25617 - RNA, 22 nt, synthetic construct
  source 1..22: mol_type = other RNA
actcctggaaaaaacactgtct

SEQ ID NO: 25618 - RNA, 22 nt, synthetic construct
  source 1..22: mol_type = other RNA
actcgcttgattttgaatactg

SEQ ID NO: 25619 - RNA, 22 nt, synthetic construct
  source 1..22: mol_type = other RNA
actctcaaatcacagaagcaag

SEQ ID NO: 25620 - RNA, 22 nt, synthetic construct
  source 1..22: mol_type = other RNA
actctgaatggtggagttttag

SEQ ID NO: 25621 - RNA, 22 nt, synthetic construct
  source 1..22: mol_type = other RNA
actctgagctgcctccaaagcc

SEQ ID NO: 25622 - RNA, 22 nt, synthetic construct
  source 1..22: mol_type = other RNA
actctgggaaggtggtgcctca

SEQ ID NO: 25623 - RNA, 22 nt, synthetic construct
  source 1..22: mol_type = other RNA
actctgggatggttgtgtttgt

SEQ ID NO: 25624 - RNA, 22 nt, synthetic construct
  source 1..22: mol_type = other RNA
actctttcaaaagttattatgg

SEQ ID NO: 25625 - RNA, 22 nt, synthetic construct
  source 1..22: mol_type = other RNA
actgaaaaacttatgtccccag

SEQ ID NO: 25626 - RNA, 22 nt, synthetic construct
  source 1..22: mol_type = other RNA
actgaagaattgatggcagtga

SEQ ID NO: 25627 - RNA, 22 nt, synthetic construct
  source 1..22: mol_type = other RNA
actgaagcttgttgtgacttct

SEQ ID NO: 25628 - RNA, 22 nt, synthetic construct
  source 1..22: mol_type = other RNA
actgagccattttcaaactcac

SEQ ID NO: 25629 - RNA, 22 nt, synthetic construct
  source 1..22: mol_type = other RNA
actgagctttgcttgaagtaag

SEQ ID NO: 25630 - RNA, 22 nt, synthetic construct
  source 1..22: mol_type = other RNA
actgagtcttgccatagtcaga

SEQ ID NO: 25631 - RNA, 22 nt, synthetic construct
  source 1..22: mol_type = other RNA
actgattttcaccatgaaaaca

SEQ ID NO: 25632 - RNA, 22 nt, synthetic construct
  source 1..22: mol_type = other RNA
actgatttttgttgttgtagtt

SEQ ID NO: 25633 - RNA, 22 nt, synthetic construct
  source 1..22: mol_type = other RNA
actgcacatgagcttttggtaa

SEQ ID NO: 25634 - RNA, 22 nt, synthetic construct
  source 1..22: mol_type = other RNA
actgcagctggctttggaggca

SEQ ID NO: 25635 - RNA, 22 nt, synthetic construct
  source 1..22: mol_type = other RNA
actgcagggacaatgactgttc

SEQ ID NO: 25636 - RNA, 22 nt, synthetic construct
  source 1..22: mol_type = other RNA
actgcagtgggcctgaaaatcc

SEQ ID NO: 25637 - RNA, 22 nt, synthetic construct
  source 1..22: mol_type = other RNA
actgcagttatgtgttgaaaaa

SEQ ID NO: 25638 - RNA, 22 nt, synthetic construct
  source 1..22: mol_type = other RNA
actgcattttcttgggctacag

SEQ ID NO: 25639 - RNA, 22 nt, synthetic construct
  source 1..22: mol_type = other RNA
actgccagcagttgatgagaaa

SEQ ID NO: 25640 - RNA, 22 nt, synthetic construct
  source 1..22: mol_type = other RNA
actgccatcaattcttcagtat

SEQ ID NO: 25641 - RNA, 22 nt, synthetic construct
  source 1..22: mol_type = other RNA
actgcccttgattcatttcaac

SEQ ID NO: 25642 - RNA, 22 nt, synthetic construct
  source 1..22: mol_type = other RNA
actgcctgagagagctcatcca

SEQ ID NO: 25643 - RNA, 22 nt, synthetic construct
  source 1..22: mol_type = other RNA
actgccttgtttttaagtaata

SEQ ID NO: 25644 - RNA, 22 nt, synthetic construct
  source 1..22: mol_type = other RNA
actgctaccaaaaattggtggg

SEQ ID NO: 25645 - RNA, 22 nt, synthetic construct
  source 1..22: mol_type = other RNA
actgctgcagaacttgatagcc

SEQ ID NO: 25646 - RNA, 22 nt, synthetic construct
  source 1..22: mol_type = other RNA
actgctggcagttgtcctgtag

SEQ ID NO: 25647 - RNA, 22 nt, synthetic construct
  source 1..22: mol_type = other RNA
actgcttcagatgctgctccat

SEQ ID NO: 25648 - RNA, 22 nt, synthetic construct
  source 1..22: mol_type = other RNA
actgctttcacctggatttctt

SEQ ID NO: 25649 - RNA, 22 nt, synthetic construct
  source 1..22: mol_type = other RNA
actggaaattccaacatgcctg

SEQ ID NO: 25650 - RNA, 22 nt, synthetic construct
  source 1..22: mol_type = other RNA
actggagatgttggtccactgt

SEQ ID NO: 25651 - RNA, 22 nt, synthetic construct
  source 1..22: mol_type = other RNA
actggaggaagtacagaatata

SEQ ID NO: 25652 - RNA, 22 nt, synthetic construct
  source 1..22: mol_type = other RNA
actggcattatcagcatcatca

SEQ ID NO: 25653 - RNA, 22 nt, synthetic construct
  source 1..22: mol_type = other RNA
actggccctgacatttcaactt

SEQ ID NO: 25654 - RNA, 22 nt, synthetic construct
  source 1..22: mol_type = other RNA
actggggacataagtttttcag

SEQ ID NO: 25655 - RNA, 22 nt, synthetic construct
  source 1..22: mol_type = other RNA
actggtgaaatctttaactgca

SEQ ID NO: 25656 - RNA, 22 nt, synthetic construct
  source 1..22: mol_type = other RNA
actgtaccttgggactgccctt

SEQ ID NO: 25657 - RNA, 22 nt, synthetic construct
  source 1..22: mol_type = other RNA
actgtagcaccattaggcatta

SEQ ID NO: 25658 - RNA, 22 nt, synthetic construct
  source 1..22: mol_type = other RNA
actgtctcaatattatccagat

SEQ ID NO: 25659 - RNA, 22 nt, synthetic construct
  source 1..22: mol_type = other RNA
actgtgactggccctgacattt

SEQ ID NO: 25660 - RNA, 22 nt, synthetic construct
  source 1..22: mol_type = other RNA
actgtgcgttttattcctccat

SEQ ID NO: 25661 - RNA, 22 nt, synthetic construct
  source 1..22: mol_type = other RNA
actgtgtggcactagatttcat

SEQ ID NO: 25662 - RNA, 22 nt, synthetic construct
  source 1..22: mol_type = other RNA
actgttaatggcatttatgtga

SEQ ID NO: 25663 - RNA, 22 nt, synthetic construct
  source 1..22: mol_type = other RNA
actgttccattgtgttctgaga

SEQ ID NO: 25664 - RNA, 22 nt, synthetic construct
  source 1..22: mol_type = other RNA
acttaaaaacaaggcagtgcta

SEQ ID NO: 25665 - RNA, 22 nt, synthetic construct
  source 1..22: mol_type = other RNA
acttacctacacatctgcaaga

SEQ ID NO: 25666 - RNA, 22 nt, synthetic construct
  source 1..22: mol_type = other RNA
acttagtctgttgccctcaaca

SEQ ID NO: 25667 - RNA, 22 nt, synthetic construct
  source 1..22: mol_type = other RNA
acttatgtccccagtgttgaaa

SEQ ID NO: 25668 - RNA, 22 nt, synthetic construct
  source 1..22: mol_type = other RNA
acttcaagcaaagctcagtgtt

SEQ ID NO: 25669 - RNA, 22 nt, synthetic construct
  source 1..22: mol_type = other RNA
acttcccttaaaagtgttgtgt

SEQ ID NO: 25670 - RNA, 22 nt, synthetic construct
  source 1..22: mol_type = other RNA
acttcctccagtcccatttgga

SEQ ID NO: 25671 - RNA, 22 nt, synthetic construct
  source 1..22: mol_type = other RNA
acttcctccctggtcaggcaca

SEQ ID NO: 25672 - RNA, 22 nt, synthetic construct
  source 1..22: mol_type = other RNA
acttcggggtaagccaagaaag

SEQ ID NO: 25673 - RNA, 22 nt, synthetic construct
  source 1..22: mol_type = other RNA
acttctccaaaacagaccattt

SEQ ID NO: 25674 - RNA, 22 nt, synthetic construct
  source 1..22: mol_type = other RNA
acttctgctcctgttcttgaaa

SEQ ID NO: 25675 - RNA, 22 nt, synthetic construct
  source 1..22: mol_type = other RNA
acttctggatgagctctctcag

SEQ ID NO: 25676 - RNA, 22 nt, synthetic construct
  source 1..22: mol_type = other RNA
acttcttcagaaaagacaccaa

SEQ ID NO: 25677 - RNA, 22 nt, synthetic construct
  source 1..22: mol_type = other RNA
acttgaatcaacaggcttcaga

SEQ ID NO: 25678 - RNA, 22 nt, synthetic construct
  source 1..22: mol_type = other RNA
acttgatacataaccatgcaaa

SEQ ID NO: 25679 - RNA, 22 nt, synthetic construct
  source 1..22: mol_type = other RNA
acttgatagccacaccccagct

SEQ ID NO: 25680 - RNA, 22 nt, synthetic construct
  source 1..22: mol_type = other RNA
acttgatttcatggtctgacta

SEQ ID NO: 25681 - RNA, 22 nt, synthetic construct
  source 1..22: mol_type = other RNA
acttgcatcacatgcaatattt

SEQ ID NO: 25682 - RNA, 22 nt, synthetic construct
  source 1..22: mol_type = other RNA
acttgctcagcaaaggtacttg

SEQ ID NO: 25683 - RNA, 22 nt, synthetic construct
  source 1..22: mol_type = other RNA
acttgcttctgtgatttgagag

SEQ ID NO: 25684 - RNA, 22 nt, synthetic construct
  source 1..22: mol_type = other RNA
acttggaataccctctactttc

SEQ ID NO: 25685 - RNA, 22 nt, synthetic construct
  source 1..22: mol_type = other RNA
acttggcgtgaaactgcttcag

SEQ ID NO: 25686 - RNA, 22 nt, synthetic construct
  source 1..22: mol_type = other RNA
acttggtacatttgtgacttgt

SEQ ID NO: 25687 - RNA, 22 nt, synthetic construct
  source 1..22: mol_type = other RNA
acttggtgtctccatttacttc

SEQ ID NO: 25688 - RNA, 22 nt, synthetic construct
  source 1..22: mol_type = other RNA
acttgtgctccagctgtgttgt

SEQ ID NO: 25689 - RNA, 22 nt, synthetic construct
  source 1..22: mol_type = other RNA
actttacacaagaaagtagagg

SEQ ID NO: 25690 - RNA, 22 nt, synthetic construct
  source 1..22: mol_type = other RNA
actttagtctggccaaagaatg

SEQ ID NO: 25691 - RNA, 22 nt, synthetic construct
  source 1..22: mol_type = other RNA
actttcttgtgtaaagtcagga

SEQ ID NO: 25692 - RNA, 22 nt, synthetic construct
  source 1..22: mol_type = other RNA
actttggttggggtagtggtgg

SEQ ID NO: 25693 - RNA, 22 nt, synthetic construct
  source 1..22: mol_type = other RNA
acttttaagggaagtgaaaata

SEQ ID NO: 25694 - RNA, 22 nt, synthetic construct
  source 1..22: mol_type = other RNA
acttttacttgcttctgtgatt

SEQ ID NO: 25695 - RNA, 22 nt, synthetic construct
  source 1..22: mol_type = other RNA
acttttcccctcctgctcattc

SEQ ID NO: 25696 - RNA, 22 nt, synthetic construct
  source 1..22: mol_type = other RNA
acttttcctcacccccaaagca

SEQ ID NO: 25697 - RNA, 22 nt, synthetic construct
  source 1..22: mol_type = other RNA
acttttgaaagagtgccacttg

SEQ ID NO: 25698 - RNA, 22 nt, synthetic construct
  source 1..22: mol_type = other RNA
actttttgcaggaaacaagacc

SEQ ID NO: 25699 - RNA, 22 nt, synthetic construct
  source 1..22: mol_type = other RNA
agaaaacaaaacatggaaaaag

SEQ ID NO: 25700 - RNA, 22 nt, synthetic construct
  source 1..22: mol_type = other RNA
agaaaacaacacagctggagca

SEQ ID NO: 25701 - RNA, 22 nt, synthetic construct
  source 1..22: mol_type = other RNA
agaaaacaagaccaatgtcaga

SEQ ID NO: 25702 - RNA, 22 nt, synthetic construct
  source 1..22: mol_type = other RNA
agaaaaccacatctcacataaa

SEQ ID NO: 25703 - RNA, 22 nt, synthetic construct
  source 1..22: mol_type = other RNA
agaaaagacaccaaccaaaaga

SEQ ID NO: 25704 - RNA, 22 nt, synthetic construct
  source 1..22: mol_type = other RNA
agaaaaggaatccttagtgaac

SEQ ID NO: 25705 - RNA, 22 nt, synthetic construct
  source 1..22: mol_type = other RNA
agaaaataacatccagggaacc

SEQ ID NO: 25706 - RNA, 22 nt, synthetic construct
  source 1..22: mol_type = other RNA
agaaaatgcagttaaagatttc

SEQ ID NO: 25707 - RNA, 22 nt, synthetic construct
  source 1..22: mol_type = other RNA
agaaacaaagagcaagagattc

SEQ ID NO: 25708 - RNA, 22 nt, synthetic construct
  source 1..22: mol_type = other RNA
agaaaccaagatatgtctggtc

SEQ ID NO: 25709 - RNA, 22 nt, synthetic construct
  source 1..22: mol_type = other RNA
agaaaccagaacaactacaaca

SEQ ID NO: 25710 - RNA, 22 nt, synthetic construct
  source 1..22: mol_type = other RNA
agaaacctgtattttgcatgca

SEQ ID NO: 25711 - RNA, 22 nt, synthetic construct
  source 1..22: mol_type = other RNA
agaaactgtagcaccattaggc

SEQ ID NO: 25712 - RNA, 22 nt, synthetic construct
  source 1..22: mol_type = other RNA
agaaagaaatccaggtgaaagc

SEQ ID NO: 25713 - RNA, 22 nt, synthetic construct
  source 1..22: mol_type = other RNA
agaaagaagcaattgtgatggt

SEQ ID NO: 25714 - RNA, 22 nt, synthetic construct
  source 1..22: mol_type = other RNA
agaaagaatctgtgagttctgt

SEQ ID NO: 25715 - RNA, 22 nt, synthetic construct
  source 1..22: mol_type = other RNA
agaaagacgtaacttcggggta

SEQ ID NO: 25716 - RNA, 22 nt, synthetic construct
  source 1..22: mol_type = other RNA
agaaagcatcggagaagggctg

SEQ ID NO: 25717 - RNA, 22 nt, synthetic construct
  source 1..22: mol_type = other RNA
agaaagtagagggtattccaag

SEQ ID NO: 25718 - RNA, 22 nt, synthetic construct
  source 1..22: mol_type = other RNA
agaaatccaggtgaaagcagtc

SEQ ID NO: 25719 - RNA, 22 nt, synthetic construct
  source 1..22: mol_type = other RNA
agaaattccccttatagtcaga

SEQ ID NO: 25720 - RNA, 22 nt, synthetic construct
  source 1..22: mol_type = other RNA
agaaattgaaacaagaccaaaa

SEQ ID NO: 25721 - RNA, 22 nt, synthetic construct
  source 1..22: mol_type = other RNA
agaacaactacaacaacaaaaa

SEQ ID NO: 25722 - RNA, 22 nt, synthetic construct
  source 1..22: mol_type = other RNA
agaacacaatggaacagtcatt

SEQ ID NO: 25723 - RNA, 22 nt, synthetic construct
  source 1..22: mol_type = other RNA
agaacaccaccactaccccaac

SEQ ID NO: 25724 - RNA, 22 nt, synthetic construct
  source 1..22: mol_type = other RNA
agaacacctcaagcataaccca

SEQ ID NO: 25725 - RNA, 22 nt, synthetic construct
  source 1..22: mol_type = other RNA
agaacagaagcagctgttcttt

SEQ ID NO: 25726 - RNA, 22 nt, synthetic construct
  source 1..22: mol_type = other RNA
agaacagactacacatcctgaa

SEQ ID NO: 25727 - RNA, 22 nt, synthetic construct
  source 1..22: mol_type = other RNA
agaacagcagcaaacacagcaa

SEQ ID NO: 25728 - RNA, 22 nt, synthetic construct
  source 1..22: mol_type = other RNA
agaacagctgcttctgttctca

SEQ ID NO: 25729 - RNA, 22 nt, synthetic construct
  source 1..22: mol_type = other RNA
agaacaggagcagaagtcacaa

SEQ ID NO: 25730 - RNA, 22 nt, synthetic construct
  source 1..22: mol_type = other RNA
agaaccaaccatgttgagggca

SEQ ID NO: 25731 - RNA, 22 nt, synthetic construct
  source 1..22: mol_type = other RNA
agaacctctggctacaaagctc

SEQ ID NO: 25732 - RNA, 22 nt, synthetic construct
  source 1..22: mol_type = other RNA
agaactcacagattctttctta

SEQ ID NO: 25733 - RNA, 22 nt, synthetic construct
  source 1..22: mol_type = other RNA
agaactgaagcttgttgtgact

SEQ ID NO: 25734 - RNA, 22 nt, synthetic construct
  source 1..22: mol_type = other RNA
agaacttgatagccacacccca

SEQ ID NO: 25735 - RNA, 22 nt, synthetic construct
  source 1..22: mol_type = other RNA
agaagaacaccaccactacccc

SEQ ID NO: 25736 - RNA, 22 nt, synthetic construct
  source 1..22: mol_type = other RNA
agaagatcttgctttgggatca

SEQ ID NO: 25737 - RNA, 22 nt, synthetic construct
  source 1..22: mol_type = other RNA
agaagcaagaacagcagcaaac

SEQ ID NO: 25738 - RNA, 22 nt, synthetic construct
  source 1..22: mol_type = other RNA
agaagcaagtaaaagttgaaat

SEQ ID NO: 25739 - RNA, 22 nt, synthetic construct
  source 1..22: mol_type = other RNA
agaagcaattgtgatggtggtg

SEQ ID NO: 25740 - RNA, 22 nt, synthetic construct
  source 1..22: mol_type = other RNA
agaagcagctgttcttttggtt

SEQ ID NO: 25741 - RNA, 22 nt, synthetic construct
  source 1..22: mol_type = other RNA
agaaggaaaaagcactctgaat

SEQ ID NO: 25742 - RNA, 22 nt, synthetic construct
  source 1..22: mol_type = other RNA
agaaggacactcaaaagcatgc

SEQ ID NO: 25743 - RNA, 22 nt, synthetic construct
  source 1..22: mol_type = other RNA
agaaggatcattctttggccag

SEQ ID NO: 25744 - RNA, 22 nt, synthetic construct
  source 1..22: mol_type = other RNA
agaagggctgcatacatgtgta

SEQ ID NO: 25745 - RNA, 22 nt, synthetic construct
  source 1..22: mol_type = other RNA
agaaggttcactaactgtgcgt

SEQ ID NO: 25746 - RNA, 22 nt, synthetic construct
  source 1..22: mol_type = other RNA
agaagtaaatggagacaccaag

SEQ ID NO: 25747 - RNA, 22 nt, synthetic construct
  source 1..22: mol_type = other RNA
agaagtcacaacaagcttcagt

SEQ ID NO: 25748 - RNA, 22 nt, synthetic construct
  source 1..22: mol_type = other RNA
agaagtgcacctggtgtgaggg

SEQ ID NO: 25749 - RNA, 22 nt, synthetic construct
  source 1..22: mol_type = other RNA
agaagttgtttgctgctctaaa

SEQ ID NO: 25750 - RNA, 22 nt, synthetic construct
  source 1..22: mol_type = other RNA
agaataaagaacagactacaca

SEQ ID NO: 25751 - RNA, 22 nt, synthetic construct
  source 1..22: mol_type = other RNA
agaataaagaggaaatactcca

SEQ ID NO: 25752 - RNA, 22 nt, synthetic construct
  source 1..22: mol_type = other RNA
agaataattgtgtgaacaggaa

SEQ ID NO: 25753 - RNA, 22 nt, synthetic construct
  source 1..22: mol_type = other RNA
agaatagtcgtgtgagtcctga

SEQ ID NO: 25754 - RNA, 22 nt, synthetic construct
  source 1..22: mol_type = other RNA
agaatccacctgcaagctgtga

SEQ ID NO: 25755 - RNA, 22 nt, synthetic construct
  source 1..22: mol_type = other RNA
agaatctcttgctctttgtttc

SEQ ID NO: 25756 - RNA, 22 nt, synthetic construct
  source 1..22: mol_type = other RNA
agaatctgaagctctggatttt

SEQ ID NO: 25757 - RNA, 22 nt, synthetic construct
  source 1..22: mol_type = other RNA
agaatctgtgagttctgtagcc

SEQ ID NO: 25758 - RNA, 22 nt, synthetic construct
  source 1..22: mol_type = other RNA
agaatgatccttctctttgctg

SEQ ID NO: 25759 - RNA, 22 nt, synthetic construct
  source 1..22: mol_type = other RNA
agaatggaagcccactgcctga

SEQ ID NO: 25760 - RNA, 22 nt, synthetic construct
  source 1..22: mol_type = other RNA
agaatgttttcatggtgaaaat

SEQ ID NO: 25761 - RNA, 22 nt, synthetic construct
  source 1..22: mol_type = other RNA
agaattctgttcaggttccagc

SEQ ID NO: 25762 - RNA, 22 nt, synthetic construct
  source 1..22: mol_type = other RNA
agaattcttcaccagacgctag

SEQ ID NO: 25763 - RNA, 22 nt, synthetic construct
  source 1..22: mol_type = other RNA
agaattgatggcagtgatgcct

SEQ ID NO: 25764 - RNA, 22 nt, synthetic construct
  source 1..22: mol_type = other RNA
agacaaaccactgctgcagaac

SEQ ID NO: 25765 - RNA, 22 nt, synthetic construct
  source 1..22: mol_type = other RNA
agacaaggagcaaacacgagat

SEQ ID NO: 25766 - RNA, 22 nt, synthetic construct
  source 1..22: mol_type = other RNA
agacaccaaccaaaagaacagc

SEQ ID NO: 25767 - RNA, 22 nt, synthetic construct
  source 1..22: mol_type = other RNA
agacaccaagtggcactctttc

SEQ ID NO: 25768 - RNA, 22 nt, synthetic construct
  source 1..22: mol_type = other RNA
agacagaacctctggctacaaa

SEQ ID NO: 25769 - RNA, 22 nt, synthetic construct
  source 1..22: mol_type = other RNA
agacagtgttttttccaggagt

SEQ ID NO: 25770 - RNA, 22 nt, synthetic construct
  source 1..22: mol_type = other RNA
agacatatcttggtttctattt

SEQ ID NO: 25771 - RNA, 22 nt, synthetic construct
  source 1..22: mol_type = other RNA
agacatttggttgactgctttc

SEQ ID NO: 25772 - RNA, 22 nt, synthetic construct
  source 1..22: mol_type = other RNA
agaccaaaaggctaatggagaa

SEQ ID NO: 25773 - RNA, 22 nt, synthetic construct
  source 1..22: mol_type = other RNA
agaccaatgtcagaacacctca

SEQ ID NO: 25774 - RNA, 22 nt, synthetic construct
  source 1..22: mol_type = other RNA
agaccatgaaatcaagtgcatg

SEQ ID NO: 25775 - RNA, 22 nt, synthetic construct
  source 1..22: mol_type = other RNA
agaccatggagcagcatctgaa

SEQ ID NO: 25776 - RNA, 22 nt, synthetic construct
  source 1..22: mol_type = other RNA
agaccatttaccaaaagctcat

SEQ ID NO: 25777 - RNA, 22 nt, synthetic construct
  source 1..22: mol_type = other RNA
agacccaaaacttgcatcacat

SEQ ID NO: 25778 - RNA, 22 nt, synthetic construct
  source 1..22: mol_type = other RNA
agacccctccccagaaggacac

SEQ ID NO: 25779 - RNA, 22 nt, synthetic construct
  source 1..22: mol_type = other RNA
agacctctaactctgagctgcc

SEQ ID NO: 25780 - RNA, 22 nt, synthetic construct
  source 1..22: mol_type = other RNA
agacgctagctttgtggttccc

SEQ ID NO: 25781 - RNA, 22 nt, synthetic construct
  source 1..22: mol_type = other RNA
agacgtaacttcggggtaagcc

SEQ ID NO: 25782 - RNA, 22 nt, synthetic construct
  source 1..22: mol_type = other RNA
agactaaagtggaagaatgttt

SEQ ID NO: 25783 - RNA, 22 nt, synthetic construct
  source 1..22: mol_type = other RNA
agactaagtccattcctgatac

SEQ ID NO: 25784 - RNA, 22 nt, synthetic construct
  source 1..22: mol_type = other RNA
agactacacatcctgaactttt

SEQ ID NO: 25785 - RNA, 22 nt, synthetic construct
  source 1..22: mol_type = other RNA
agactcaatatgatttcccatc

SEQ ID NO: 25786 - RNA, 22 nt, synthetic construct
  source 1..22: mol_type = other RNA
agactcagtttggggttgctgt

SEQ ID NO: 25787 - RNA, 22 nt, synthetic construct
  source 1..22: mol_type = other RNA
agactcataatgtccaaatggg

SEQ ID NO: 25788 - RNA, 22 nt, synthetic construct
  source 1..22: mol_type = other RNA
agactgagccattttcaaactc

SEQ ID NO: 25789 - RNA, 22 nt, synthetic construct
  source 1..22: mol_type = other RNA
agactgcagggacaatgactgt

SEQ ID NO: 25790 - RNA, 22 nt, synthetic construct
  source 1..22: mol_type = other RNA
agacttttcctcacccccaaag

SEQ ID NO: 25791 - RNA, 22 nt, synthetic construct
  source 1..22: mol_type = other RNA
agagaaggatcattctttggcc

SEQ ID NO: 25792 - RNA, 22 nt, synthetic construct
  source 1..22: mol_type = other RNA
agagaaggttcactaactgtgc

SEQ ID NO: 25793 - RNA, 22 nt, synthetic construct
  source 1..22: mol_type = other RNA
agagaataaagaacagactaca

SEQ ID NO: 25794 - RNA, 22 nt, synthetic construct
  source 1..22: mol_type = other RNA
agagaatccacctgcaagctgt

SEQ ID NO: 25795 - RNA, 22 nt, synthetic construct
  source 1..22: mol_type = other RNA
agagactgagccattttcaaac

SEQ ID NO: 25796 - RNA, 22 nt, synthetic construct
  source 1..22: mol_type = other RNA
agagagaaggttcactaactgt

SEQ ID NO: 25797 - RNA, 22 nt, synthetic construct
  source 1..22: mol_type = other RNA
agagagagaaggttcactaact

SEQ ID NO: 25798 - RNA, 22 nt, synthetic construct
  source 1..22: mol_type = other RNA
agagagctcatccagaagtaaa

SEQ ID NO: 25799 - RNA, 22 nt, synthetic construct
  source 1..22: mol_type = other RNA
agagatgccaccttagagcagc

SEQ ID NO: 25800 - RNA, 22 nt, synthetic construct
  source 1..22: mol_type = other RNA
agagattctgaagggtcgagac

SEQ ID NO: 25801 - RNA, 22 nt, synthetic construct
  source 1..22: mol_type = other RNA
agagattgggttgatactgaag

SEQ ID NO: 25802 - RNA, 22 nt, synthetic construct
  source 1..22: mol_type = other RNA
agagcaagagattctgaagggt

SEQ ID NO: 25803 - RNA, 22 nt, synthetic construct
  source 1..22: mol_type = other RNA
agagcagattcccaaactgaaa

SEQ ID NO: 25804 - RNA, 22 nt, synthetic construct
  source 1..22: mol_type = other RNA
agagcagcaaacaacttcttca

SEQ ID NO: 25805 - RNA, 22 nt, synthetic construct
  source 1..22: mol_type = other RNA
agagcagcatgcttttgagtgt

SEQ ID NO: 25806 - RNA, 22 nt, synthetic construct
  source 1..22: mol_type = other RNA
agagcatcattgagaccatgga

SEQ ID NO: 25807 - RNA, 22 nt, synthetic construct
  source 1..22: mol_type = other RNA
agagccttatggtcaaataacg

SEQ ID NO: 25808 - RNA, 22 nt, synthetic construct
  source 1..22: mol_type = other RNA
agagctacaggacaactgccag

SEQ ID NO: 25809 - RNA, 22 nt, synthetic construct
  source 1..22: mol_type = other RNA
agagctcatccagaagtaaatg

SEQ ID NO: 25810 - RNA, 22 nt, synthetic construct
  source 1..22: mol_type = other RNA
agagctgccaccaggagcttgc

SEQ ID NO: 25811 - RNA, 22 nt, synthetic construct
  source 1..22: mol_type = other RNA
agagcttcagattctgaatgag

SEQ ID NO: 25812 - RNA, 22 nt, synthetic construct
  source 1..22: mol_type = other RNA
agaggaaatactccagactttt

SEQ ID NO: 25813 - RNA, 22 nt, synthetic construct
  source 1..22: mol_type = other RNA
agaggaggagggggagaaagaa

SEQ ID NO: 25814 - RNA, 22 nt, synthetic construct
  source 1..22: mol_type = other RNA
agaggcagaaactgtagcacca

SEQ ID NO: 25815 - RNA, 22 nt, synthetic construct
  source 1..22: mol_type = other RNA
agagggcagccttgtggatggc

SEQ ID NO: 25816 - RNA, 22 nt, synthetic construct
  source 1..22: mol_type = other RNA
agagggtaaacctgaggcacca

SEQ ID NO: 25817 - RNA, 22 nt, synthetic construct
  source 1..22: mol_type = other RNA
agagggtattccaagtgtttgc

SEQ ID NO: 25818 - RNA, 22 nt, synthetic construct
  source 1..22: mol_type = other RNA
agaggtctgtgcggaattgatc

SEQ ID NO: 25819 - RNA, 22 nt, synthetic construct
  source 1..22: mol_type = other RNA
agaggttctgtctggcaaatgg

SEQ ID NO: 25820 - RNA, 22 nt, synthetic construct
  source 1..22: mol_type = other RNA
agagtaagagccttatggtcaa

SEQ ID NO: 25821 - RNA, 22 nt, synthetic construct
  source 1..22: mol_type = other RNA
agagtcaccttccaaattacta

SEQ ID NO: 25822 - RNA, 22 nt, synthetic construct
  source 1..22: mol_type = other RNA
agagtcctaatccatctacaca

SEQ ID NO: 25823 - RNA, 22 nt, synthetic construct
  source 1..22: mol_type = other RNA
agagtgccacttggtgtctcca

SEQ ID NO: 25824 - RNA, 22 nt, synthetic construct
  source 1..22: mol_type = other RNA
agagtgctttttccttctgaag

SEQ ID NO: 25825 - RNA, 22 nt, synthetic construct
  source 1..22: mol_type = other RNA
agagttagaggtctgtgcggaa

SEQ ID NO: 25826 - RNA, 22 nt, synthetic construct
  source 1..22: mol_type = other RNA
agagttcacatctccctcaaaa

SEQ ID NO: 25827 - RNA, 22 nt, synthetic construct
  source 1..22: mol_type = other RNA
agatagtgctgtgttgggggca

SEQ ID NO: 25828 - RNA, 22 nt, synthetic construct
  source 1..22: mol_type = other RNA
agatatgcccatctcctgcaga

SEQ ID NO: 25829 - RNA, 22 nt, synthetic construct
  source 1..22: mol_type = other RNA
agatatgtctggtcaacaagct

SEQ ID NO: 25830 - RNA, 22 nt, synthetic construct
  source 1..22: mol_type = other RNA
agatcaagaaattgaaacaaga

SEQ ID NO: 25831 - RNA, 22 nt, synthetic construct
  source 1..22: mol_type = other RNA
agatcaattccgcacagacctc

SEQ ID NO: 25832 - RNA, 22 nt, synthetic construct
  source 1..22: mol_type = other RNA
agatcactcacccatcgcatac

SEQ ID NO: 25833 - RNA, 22 nt, synthetic construct
  source 1..22: mol_type = other RNA
agatctcgtgtttgctccttgt

SEQ ID NO: 25834 - RNA, 22 nt, synthetic construct
  source 1..22: mol_type = other RNA
agatcttcttcacaggtgcttt

SEQ ID NO: 25835 - RNA, 22 nt, synthetic construct
  source 1..22: mol_type = other RNA
agatcttgctttgggatcacat

SEQ ID NO: 25836 - RNA, 22 nt, synthetic construct
  source 1..22: mol_type = other RNA
agatcttgtgcccccaacacag

SEQ ID NO: 25837 - RNA, 22 nt, synthetic construct
  source 1..22: mol_type = other RNA
agatgcacaggccaattaaggt

SEQ ID NO: 25838 - RNA, 22 nt, synthetic construct
  source 1..22: mol_type = other RNA
agatgccaccttagagcagcat

SEQ ID NO: 25839 - RNA, 22 nt, synthetic construct
  source 1..22: mol_type = other RNA
agatgctgctccatggtctcaa

SEQ ID NO: 25840 - RNA, 22 nt, synthetic construct
  source 1..22: mol_type = other RNA
agatggattaggactctgggaa

SEQ ID NO: 25841 - RNA, 22 nt, synthetic construct
  source 1..22: mol_type = other RNA
agatgggaaatcatattgagtc

SEQ ID NO: 25842 - RNA, 22 nt, synthetic construct
  source 1..22: mol_type = other RNA
agatgggattccgcttggtgaa

SEQ ID NO: 25843 - RNA, 22 nt, synthetic construct
  source 1..22: mol_type = other RNA
agatgggcatatctcaaaaact

SEQ ID NO: 25844 - RNA, 22 nt, synthetic construct
  source 1..22: mol_type = other RNA
agatgtgaactctgggatggtt

SEQ ID NO: 25845 - RNA, 22 nt, synthetic construct
  source 1..22: mol_type = other RNA
agatgtggttttctgcaccgca

SEQ ID NO: 25846 - RNA, 22 nt, synthetic construct
  source 1..22: mol_type = other RNA
agatgtgtaggtaagtgccaga

SEQ ID NO: 25847 - RNA, 22 nt, synthetic construct
  source 1..22: mol_type = other RNA
agatgttggtccactgtacctt

SEQ ID NO: 25848 - RNA, 22 nt, synthetic construct
  source 1..22: mol_type = other RNA
agattcccaaactgaaaaactt

SEQ ID NO: 25849 - RNA, 22 nt, synthetic construct
  source 1..22: mol_type = other RNA
agattctgaagggtcgagacaa

SEQ ID NO: 25850 - RNA, 22 nt, synthetic construct
  source 1..22: mol_type = other RNA
agattctgaatgagcaggaggg

SEQ ID NO: 25851 - RNA, 22 nt, synthetic construct
  source 1..22: mol_type = other RNA
agattctttcttatcactcaaa

SEQ ID NO: 25852 - RNA, 22 nt, synthetic construct
  source 1..22: mol_type = other RNA
agattgggttgatactgaagaa

SEQ ID NO: 25853 - RNA, 22 nt, synthetic construct
  source 1..22: mol_type = other RNA
agattgtgtttccattgcggtg

SEQ ID NO: 25854 - RNA, 22 nt, synthetic construct
  source 1..22: mol_type = other RNA
agatttcaccagtttttcaaca

SEQ ID NO: 25855 - RNA, 22 nt, synthetic construct
  source 1..22: mol_type = other RNA
agatttcattttcaacaaagag

SEQ ID NO: 25856 - RNA, 22 nt, synthetic construct
  source 1..22: mol_type = other RNA
agcaaaagagcatcattgagac

SEQ ID NO: 25857 - RNA, 22 nt, synthetic construct
  source 1..22: mol_type = other RNA
agcaaacaacttcttcagaaaa

SEQ ID NO: 25858 - RNA, 22 nt, synthetic construct
  source 1..22: mol_type = other RNA
agcaaacacagcaaccccaaac

SEQ ID NO: 25859 - RNA, 22 nt, synthetic construct
  source 1..22: mol_type = other RNA
agcaaacacgagatcttgtgcc

SEQ ID NO: 25860 - RNA, 22 nt, synthetic construct
  source 1..22: mol_type = other RNA
agcaaagagaaggatcattctt

SEQ ID NO: 25861 - RNA, 22 nt, synthetic construct
  source 1..22: mol_type = other RNA
agcaaagctcagtgttcactaa

SEQ ID NO: 25862 - RNA, 22 nt, synthetic construct
  source 1..22: mol_type = other RNA
agcaaaggtacttgatacataa

SEQ ID NO: 25863 - RNA, 22 nt, synthetic construct
  source 1..22: mol_type = other RNA
agcaacaatgatcagcaaagag

SEQ ID NO: 25864 - RNA, 22 nt, synthetic construct
  source 1..22: mol_type = other RNA
agcaacagcagcaaaaattaca

SEQ ID NO: 25865 - RNA, 22 nt, synthetic construct
  source 1..22: mol_type = other RNA
agcaaccccaaactgagtcttg

SEQ ID NO: 25866 - RNA, 22 nt, synthetic construct
  source 1..22: mol_type = other RNA
agcaagaacagcagcaaacaca

SEQ ID NO: 25867 - RNA, 22 nt, synthetic construct
  source 1..22: mol_type = other RNA
agcaagagaatccacctgcaag

SEQ ID NO: 25868 - RNA, 22 nt, synthetic construct
  source 1..22: mol_type = other RNA
agcaagagattctgaagggtcg

SEQ ID NO: 25869 - RNA, 22 nt, synthetic construct
  source 1..22: mol_type = other RNA
agcaagatcttcttcacaggtg

SEQ ID NO: 25870 - RNA, 22 nt, synthetic construct
  source 1..22: mol_type = other RNA
agcaagcctgatggaacaggat

SEQ ID NO: 25871 - RNA, 22 nt, synthetic construct
  source 1..22: mol_type = other RNA
agcaagtaaaagttgaaatgtc

SEQ ID NO: 25872 - RNA, 22 nt, synthetic construct
  source 1..22: mol_type = other RNA
agcaagttgcgcagcttgttga

SEQ ID NO: 25873 - RNA, 22 nt, synthetic construct
  source 1..22: mol_type = other RNA
agcaattgtgatggtggtggtg

SEQ ID NO: 25874 - RNA, 22 nt, synthetic construct
  source 1..22: mol_type = other RNA
agcaatttgcaagctcctggtg

SEQ ID NO: 25875 - RNA, 22 nt, synthetic construct
  source 1..22: mol_type = other RNA
agcacaaacacaaccatcccag

SEQ ID NO: 25876 - RNA, 22 nt, synthetic construct
  source 1..22: mol_type = other RNA
agcacaagtcacaaatgtacca

SEQ ID NO: 25877 - RNA, 22 nt, synthetic construct
  source 1..22: mol_type = other RNA
agcaccaccagaaaacaaaaca

SEQ ID NO: 25878 - RNA, 22 nt, synthetic construct
  source 1..22: mol_type = other RNA
agcaccattaggcattagcact

SEQ ID NO: 25879 - RNA, 22 nt, synthetic construct
  source 1..22: mol_type = other RNA
agcaccattcatttcattttgt

SEQ ID NO: 25880 - RNA, 22 nt, synthetic construct
  source 1..22: mol_type = other RNA
agcacctgtgaagaagatcttg

SEQ ID NO: 25881 - RNA, 22 nt, synthetic construct
  source 1..22: mol_type = other RNA
agcactatctgaaaccaggatg

SEQ ID NO: 25882 - RNA, 22 nt, synthetic construct
  source 1..22: mol_type = other RNA
agcactctgaatggtggagttt

SEQ ID NO: 25883 - RNA, 22 nt, synthetic construct
  source 1..22: mol_type = other RNA
agcactgccttgtttttaagta

SEQ ID NO: 25884 - RNA, 22 nt, synthetic construct
  source 1..22: mol_type = other RNA
agcacttgaatcaacaggcttc

SEQ ID NO: 25885 - RNA, 22 nt, synthetic construct
  source 1..22: mol_type = other RNA
agcacttttcccctcctgctca

SEQ ID NO: 25886 - RNA, 22 nt, synthetic construct
  source 1..22: mol_type = other RNA
agcagaagtcacaacaagcttc

SEQ ID NO: 25887 - RNA, 22 nt, synthetic construct
  source 1..22: mol_type = other RNA
agcagattcccaaactgaaaaa

SEQ ID NO: 25888 - RNA, 22 nt, synthetic construct
  source 1..22: mol_type = other RNA
agcagcaaacaacttcttcaga

SEQ ID NO: 25889 - RNA, 22 nt, synthetic construct
  source 1..22: mol_type = other RNA
agcagcaaacacagcaacccca

SEQ ID NO: 25890 - RNA, 22 nt, synthetic construct
  source 1..22: mol_type = other RNA
agcagcaatttgcaagctcctg

SEQ ID NO: 25891 - RNA, 22 nt, synthetic construct
  source 1..22: mol_type = other RNA
agcagcatctgaagcagtttca

SEQ ID NO: 25892 - RNA, 22 nt, synthetic construct
  source 1..22: mol_type = other RNA
agcagcatgcttttgagtgtcc

SEQ ID NO: 25893 - RNA, 22 nt, synthetic construct
  source 1..22: mol_type = other RNA
agcagctgttcttttggttggt

SEQ ID NO: 25894 - RNA, 22 nt, synthetic construct
  source 1..22: mol_type = other RNA
agcaggaggggaaaagtgctaa

SEQ ID NO: 25895 - RNA, 22 nt, synthetic construct
  source 1..22: mol_type = other RNA
agcagtcaaccaaatgtctccg

SEQ ID NO: 25896 - RNA, 22 nt, synthetic construct
  source 1..22: mol_type = other RNA
agcagtggagagctacaggaca

SEQ ID NO: 25897 - RNA, 22 nt, synthetic construct
  source 1..22: mol_type = other RNA
agcagtggtttgtctagtcaaa

SEQ ID NO: 25898 - RNA, 22 nt, synthetic construct
  source 1..22: mol_type = other RNA
agcagttgatgagaaacaaaga

SEQ ID NO: 25899 - RNA, 22 nt, synthetic construct
  source 1..22: mol_type = other RNA
agcagtttcacgccaagtcgtt

SEQ ID NO: 25900 - RNA, 22 nt, synthetic construct
  source 1..22: mol_type = other RNA
agcataacccaccaatttttgg

SEQ ID NO: 25901 - RNA, 22 nt, synthetic construct
  source 1..22: mol_type = other RNA
agcatcacaggcctcactcacc

SEQ ID NO: 25902 - RNA, 22 nt, synthetic construct
  source 1..22: mol_type = other RNA
agcatcatcagcatcacaggcc

SEQ ID NO: 25903 - RNA, 22 nt, synthetic construct
  source 1..22: mol_type = other RNA
agcatcattgagaccatggagc

SEQ ID NO: 25904 - RNA, 22 nt, synthetic construct
  source 1..22: mol_type = other RNA
agcatcggagaagggctgcata

SEQ ID NO: 25905 - RNA, 22 nt, synthetic construct
  source 1..22: mol_type = other RNA
agcatctgaagcagtttcacgc

SEQ ID NO: 25906 - RNA, 22 nt, synthetic construct
  source 1..22: mol_type = other RNA
agcatgctgctctaaggtggca

SEQ ID NO: 25907 - RNA, 22 nt, synthetic construct
  source 1..22: mol_type = other RNA
agcatgcttttgagtgtccttc

SEQ ID NO: 25908 - RNA, 22 nt, synthetic construct
  source 1..22: mol_type = other RNA
agcattgcagctagtttactgg

SEQ ID NO: 25909 - RNA, 22 nt, synthetic construct
  source 1..22: mol_type = other RNA
agccaagaaagaaatccaggtg

SEQ ID NO: 25910 - RNA, 22 nt, synthetic construct
  source 1..22: mol_type = other RNA
agccacaccccagctttagagc

SEQ ID NO: 25911 - RNA, 22 nt, synthetic construct
  source 1..22: mol_type = other RNA
agccacatgcctgtatgcacac

SEQ ID NO: 25912 - RNA, 22 nt, synthetic construct
  source 1..22: mol_type = other RNA
agccagaatagtcgtgtgagtc

SEQ ID NO: 25913 - RNA, 22 nt, synthetic construct
  source 1..22: mol_type = other RNA
agccagaggttctgtctggcaa

SEQ ID NO: 25914 - RNA, 22 nt, synthetic construct
  source 1..22: mol_type = other RNA
agccagctgcagtggtgagtga

SEQ ID NO: 25915 - RNA, 22 nt, synthetic construct
  source 1..22: mol_type = other RNA
agccattttcaaactcacacct

SEQ ID NO: 25916 - RNA, 22 nt, synthetic construct
  source 1..22: mol_type = other RNA
agcccaagaaaatgcagttaaa

SEQ ID NO: 25917 - RNA, 22 nt, synthetic construct
  source 1..22: mol_type = other RNA
agcccactgcctgagagagctc

SEQ ID NO: 25918 - RNA, 22 nt, synthetic construct
  source 1..22: mol_type = other RNA
agcccagagagagaaggttcac

SEQ ID NO: 25919 - RNA, 22 nt, synthetic construct
  source 1..22: mol_type = other RNA
agccccccaggcatgttggaat

SEQ ID NO: 25920 - RNA, 22 nt, synthetic construct
  source 1..22: mol_type = other RNA
agcccttctccgatgctttctg

SEQ ID NO: 25921 - RNA, 22 nt, synthetic construct
  source 1..22: mol_type = other RNA
agcctcataaacaggcagcaca

SEQ ID NO: 25922 - RNA, 22 nt, synthetic construct
  source 1..22: mol_type = other RNA
agcctgactgttaatggcattt

SEQ ID NO: 25923 - RNA, 22 nt, synthetic construct
  source 1..22: mol_type = other RNA
agcctgatggaacaggatagaa

SEQ ID NO: 25924 - RNA, 22 nt, synthetic construct
  source 1..22: mol_type = other RNA
agcctgttgattcaagtgctgt

SEQ ID NO: 25925 - RNA, 22 nt, synthetic construct
  source 1..22: mol_type = other RNA
agccttatggtcaaataacgac

SEQ ID NO: 25926 - RNA, 22 nt, synthetic construct
  source 1..22: mol_type = other RNA
agccttgtggatggccccgaag

SEQ ID NO: 25927 - RNA, 22 nt, synthetic construct
  source 1..22: mol_type = other RNA
agccttttggtcttgtttcaat

SEQ ID NO: 25928 - RNA, 22 nt, synthetic construct
  source 1..22: mol_type = other RNA
agcgagttcgagactcataatg

SEQ ID NO: 25929 - RNA, 22 nt, synthetic construct
  source 1..22: mol_type = other RNA
agcggaatcccatctaaaacgt

SEQ ID NO: 25930 - RNA, 22 nt, synthetic construct
  source 1..22: mol_type = other RNA
agcgtctggtgaagaattctgt

SEQ ID NO: 25931 - RNA, 22 nt, synthetic construct
  source 1..22: mol_type = other RNA
agctacaggacaactgccagca

SEQ ID NO: 25932 - RNA, 22 nt, synthetic construct
  source 1..22: mol_type = other RNA
agctagcgtctggtgaagaatt

SEQ ID NO: 25933 - RNA, 22 nt, synthetic construct
  source 1..22: mol_type = other RNA
agctagtttactggcattatca

SEQ ID NO: 25934 - RNA, 22 nt, synthetic construct
  source 1..22: mol_type = other RNA
agctcagagttagaggtctgtg

SEQ ID NO: 25935 - RNA, 22 nt, synthetic construct
  source 1..22: mol_type = other RNA
agctcagtgttcactaaggatt

SEQ ID NO: 25936 - RNA, 22 nt, synthetic construct
  source 1..22: mol_type = other RNA
agctcatccagaagtaaatgga

SEQ ID NO: 25937 - RNA, 22 nt, synthetic construct
  source 1..22: mol_type = other RNA
agctcatgtgcagtcactgtgt

SEQ ID NO: 25938 - RNA, 22 nt, synthetic construct
  source 1..22: mol_type = other RNA
agctccagaatggaagcccact

SEQ ID NO: 25939 - RNA, 22 nt, synthetic construct
  source 1..22: mol_type = other RNA
agctcctggtggcagctctgaa

SEQ ID NO: 25940 - RNA, 22 nt, synthetic construct
  source 1..22: mol_type = other RNA
agctctccactgctaccaaaaa

SEQ ID NO: 25941 - RNA, 22 nt, synthetic construct
  source 1..22: mol_type = other RNA
agctctctcaggcagtgggctt

SEQ ID NO: 25942 - RNA, 22 nt, synthetic construct
  source 1..22: mol_type = other RNA
agctctgaacggtatttaaaac

SEQ ID NO: 25943 - RNA, 22 nt, synthetic construct
  source 1..22: mol_type = other RNA
agctctggattttcaggcccac

SEQ ID NO: 25944 - RNA, 22 nt, synthetic construct
  source 1..22: mol_type = other RNA
agctgaggaacctgtggaagag

SEQ ID NO: 25945 - RNA, 22 nt, synthetic construct
  source 1..22: mol_type = other RNA
agctgcaatgctaaatacctgt

SEQ ID NO: 25946 - RNA, 22 nt, synthetic construct
  source 1..22: mol_type = other RNA
agctgcagtggtgagtgaggcc

SEQ ID NO: 25947 - RNA, 22 nt, synthetic construct
  source 1..22: mol_type = other RNA
agctgccaccaggagcttgcaa

SEQ ID NO: 25948 - RNA, 22 nt, synthetic construct
  source 1..22: mol_type = other RNA
agctgcctccaaagccagctgc

SEQ ID NO: 25949 - RNA, 22 nt, synthetic construct
  source 1..22: mol_type = other RNA
agctgcgcaacttgctcagcaa

SEQ ID NO: 25950 - RNA, 22 nt, synthetic construct
  source 1..22: mol_type = other RNA
agctgcttctgttctcaataat

SEQ ID NO: 25951 - RNA, 22 nt, synthetic construct
  source 1..22: mol_type = other RNA
agctggagcacaagtcacaaat

SEQ ID NO: 25952 - RNA, 22 nt, synthetic construct
  source 1..22: mol_type = other RNA
agctggctttggaggcagctca

SEQ ID NO: 25953 - RNA, 22 nt, synthetic construct
  source 1..22: mol_type = other RNA
agctggggtgtggctatcaagt

SEQ ID NO: 25954 - RNA, 22 nt, synthetic construct
  source 1..22: mol_type = other RNA
agctgtgataatgtgcagcaaa

SEQ ID NO: 25955 - RNA, 22 nt, synthetic construct
  source 1..22: mol_type = other RNA
agctgtgttgttttctgggtgt

SEQ ID NO: 25956 - RNA, 22 nt, synthetic construct
  source 1..22: mol_type = other RNA
agctgttcttttggttggtgtc

SEQ ID NO: 25957 - RNA, 22 nt, synthetic construct
  source 1..22: mol_type = other RNA
agcttacacccagaaaacaaca

SEQ ID NO: 25958 - RNA, 22 nt, synthetic construct
  source 1..22: mol_type = other RNA
agcttcagattctgaatgagca

SEQ ID NO: 25959 - RNA, 22 nt, synthetic construct
  source 1..22: mol_type = other RNA
agcttcagttctacagggatat

SEQ ID NO: 25960 - RNA, 22 nt, synthetic construct
  source 1..22: mol_type = other RNA
agcttccttcagaaggaaaaag

SEQ ID NO: 25961 - RNA, 22 nt, synthetic construct
  source 1..22: mol_type = other RNA
agcttgcaaattgctgctggaa

SEQ ID NO: 25962 - RNA, 22 nt, synthetic construct
  source 1..22: mol_type = other RNA
agcttgcaggtggattctcttg

SEQ ID NO: 25963 - RNA, 22 nt, synthetic construct
  source 1..22: mol_type = other RNA
agcttgccttgggagcccccca

SEQ ID NO: 25964 - RNA, 22 nt, synthetic construct
  source 1..22: mol_type = other RNA
agcttgttgaccagacatatct

SEQ ID NO: 25965 - RNA, 22 nt, synthetic construct
  source 1..22: mol_type = other RNA
agcttgttgtgacttctgctcc

SEQ ID NO: 25966 - RNA, 22 nt, synthetic construct
  source 1..22: mol_type = other RNA
agctttagagcagcaaacaact

SEQ ID NO: 25967 - RNA, 22 nt, synthetic construct
  source 1..22: mol_type = other RNA
agctttgcttgaagtaagcacc

SEQ ID NO: 25968 - RNA, 22 nt, synthetic construct
  source 1..22: mol_type = other RNA
agctttgtagccagaggttctg

SEQ ID NO: 25969 - RNA, 22 nt, synthetic construct
  source 1..22: mol_type = other RNA
agctttgtggttccctggatgt

SEQ ID NO: 25970 - RNA, 22 nt, synthetic construct
  source 1..22: mol_type = other RNA
agcttttggtaaatggtctgtt

SEQ ID NO: 25971 - RNA, 22 nt, synthetic construct
  source 1..22: mol_type = other RNA
aggaaaaacatttgcatggtta

SEQ ID NO: 25972 - RNA, 22 nt, synthetic construct
  source 1..22: mol_type = other RNA
aggaaaaagcactctgaatggt

SEQ ID NO: 25973 - RNA, 22 nt, synthetic construct
  source 1..22: mol_type = other RNA
aggaaaagtctggagtatttcc

SEQ ID NO: 25974 - RNA, 22 nt, synthetic construct
  source 1..22: mol_type = other RNA
aggaaacaagacccaaaacttg

SEQ ID NO: 25975 - RNA, 22 nt, synthetic construct
  source 1..22: mol_type = other RNA
aggaaatactccagacttttcc

SEQ ID NO: 25976 - RNA, 22 nt, synthetic construct
  source 1..22: mol_type = other RNA
aggaacaggtatttagcattgc

SEQ ID NO: 25977 - RNA, 22 nt, synthetic construct
  source 1..22: mol_type = other RNA
aggaacctgtggaagaggagga

SEQ ID NO: 25978 - RNA, 22 nt, synthetic construct
  source 1..22: mol_type = other RNA
aggaagctgaggaacctgtgga

SEQ ID NO: 25979 - RNA, 22 nt, synthetic construct
  source 1..22: mol_type = other RNA
aggaagtacagaatataaatcg

SEQ ID NO: 25980 - RNA, 22 nt, synthetic construct
  source 1..22: mol_type = other RNA
aggaagtcacactcagacccct

SEQ ID NO: 25981 - RNA, 22 nt, synthetic construct
  source 1..22: mol_type = other RNA
aggaataaaacgcacagttagt

SEQ ID NO: 25982 - RNA, 22 nt, synthetic construct
  source 1..22: mol_type = other RNA
aggaatccttagtgaacactga

SEQ ID NO: 25983 - RNA, 22 nt, synthetic construct
  source 1..22: mol_type = other RNA
aggaatgacatacagactgcag

SEQ ID NO: 25984 - RNA, 22 nt, synthetic construct
  source 1..22: mol_type = other RNA
aggaatggacttagtctgttgc

SEQ ID NO: 25985 - RNA, 22 nt, synthetic construct
  source 1..22: mol_type = other RNA
aggacaactcattagtagcctg

SEQ ID NO: 25986 - RNA, 22 nt, synthetic construct
  source 1..22: mol_type = other RNA
aggacaactgccagcagttgat

SEQ ID NO: 25987 - RNA, 22 nt, synthetic construct
  source 1..22: mol_type = other RNA
aggacactcaaaagcatgctgc

SEQ ID NO: 25988 - RNA, 22 nt, synthetic construct
  source 1..22: mol_type = other RNA
aggactcacacgactattctgg

SEQ ID NO: 25989 - RNA, 22 nt, synthetic construct
  source 1..22: mol_type = other RNA
aggactctgggaaggtggtgcc

SEQ ID NO: 25990 - RNA, 22 nt, synthetic construct
  source 1..22: mol_type = other RNA
aggagatgggcatatctcaaaa

SEQ ID NO: 25991 - RNA, 22 nt, synthetic construct
  source 1..22: mol_type = other RNA
aggagcaaacacgagatcttgt

SEQ ID NO: 25992 - RNA, 22 nt, synthetic construct
  source 1..22: mol_type = other RNA
aggagcagaagtcacaacaagc

SEQ ID NO: 25993 - RNA, 22 nt, synthetic construct
  source 1..22: mol_type = other RNA
aggagcccagagagagaaggtt

SEQ ID NO: 25994 - RNA, 22 nt, synthetic construct
  source 1..22: mol_type = other RNA
aggagcttgcaaattgctgctg

SEQ ID NO: 25995 - RNA, 22 nt, synthetic construct
  source 1..22: mol_type = other RNA
aggaggagggggagaaagaagc

SEQ ID NO: 25996 - RNA, 22 nt, synthetic construct
  source 1..22: mol_type = other RNA
aggaggggaaaagtgctaatta

SEQ ID NO: 25997 - RNA, 22 nt, synthetic construct
  source 1..22: mol_type = other RNA
aggagggggagaaagaagcaat

SEQ ID NO: 25998 - RNA, 22 nt, synthetic construct
  source 1..22: mol_type = other RNA
aggagtatctagtaatttggaa

SEQ ID NO: 25999 - RNA, 22 nt, synthetic construct
  source 1..22: mol_type = other RNA
aggagttcaccatgtgtgtgtt

SEQ ID NO: 26000 - RNA, 22 nt, synthetic construct
  source 1..22: mol_type = other RNA
aggatagaaccaaccatgttga

SEQ ID NO: 26001 - RNA, 22 nt, synthetic construct
  source 1..22: mol_type = other RNA
aggatcattctttggccagact

SEQ ID NO: 26002 - RNA, 22 nt, synthetic construct
  source 1..22: mol_type = other RNA
aggatggattgaattgaaggcc

SEQ ID NO: 26003 - RNA, 22 nt, synthetic construct
  source 1..22: mol_type = other RNA
aggatgtgtagtctgttcttta

SEQ ID NO: 26004 - RNA, 22 nt, synthetic construct
  source 1..22: mol_type = other RNA
aggattccttttctgccactac

SEQ ID NO: 26005 - RNA, 22 nt, synthetic construct
  source 1..22: mol_type = other RNA
aggcaagcttacacccagaaaa

SEQ ID NO: 26006 - RNA, 22 nt, synthetic construct
  source 1..22: mol_type = other RNA
aggcacaggaaaaacatttgca

SEQ ID NO: 26007 - RNA, 22 nt, synthetic construct
  source 1..22: mol_type = other RNA
aggcaccaccttcccagagtcc

SEQ ID NO: 26008 - RNA, 22 nt, synthetic construct
  source 1..22: mol_type = other RNA
aggcagaaactgtagcaccatt

SEQ ID NO: 26009 - RNA, 22 nt, synthetic construct
  source 1..22: mol_type = other RNA
aggcagcacaaacacaaccatc

SEQ ID NO: 26010 - RNA, 22 nt, synthetic construct
  source 1..22: mol_type = other RNA
aggcagctcagagttagaggtc

SEQ ID NO: 26011 - RNA, 22 nt, synthetic construct
  source 1..22: mol_type = other RNA
aggcagtgctaatgcctaatgg

SEQ ID NO: 26012 - RNA, 22 nt, synthetic construct
  source 1..22: mol_type = other RNA
aggcagtgggcttccattctgg

SEQ ID NO: 26013 - RNA, 22 nt, synthetic construct
  source 1..22: mol_type = other RNA
aggcatcactgccatcaattct

SEQ ID NO: 26014 - RNA, 22 nt, synthetic construct
  source 1..22: mol_type = other RNA
aggcatgtggcttgcatccagg

SEQ ID NO: 26015 - RNA, 22 nt, synthetic construct
  source 1..22: mol_type = other RNA
aggcatgttggaatttccagtg

SEQ ID NO: 26016 - RNA, 22 nt, synthetic construct
  source 1..22: mol_type = other RNA
aggcattagcactgccttgttt

SEQ ID NO: 26017 - RNA, 22 nt, synthetic construct
  source 1..22: mol_type = other RNA
aggccaattaaggtggaacctg

SEQ ID NO: 26018 - RNA, 22 nt, synthetic construct
  source 1..22: mol_type = other RNA
aggcccactgcagttatgtgtt

SEQ ID NO: 26019 - RNA, 22 nt, synthetic construct
  source 1..22: mol_type = other RNA
aggcccctcgttttcaccaagc

SEQ ID NO: 26020 - RNA, 22 nt, synthetic construct
  source 1..22: mol_type = other RNA
aggcctcactcaccactgcagc

SEQ ID NO: 26021 - RNA, 22 nt, synthetic construct
  source 1..22: mol_type = other RNA
aggcctcagaataattgtgtga

SEQ ID NO: 26022 - RNA, 22 nt, synthetic construct
  source 1..22: mol_type = other RNA
aggcctgtgatgctgatgatgc

SEQ ID NO: 26023 - RNA, 22 nt, synthetic construct
  source 1..22: mol_type = other RNA
aggcctttcagaaagcatcgga

SEQ ID NO: 26024 - RNA, 22 nt, synthetic construct
  source 1..22: mol_type = other RNA
aggctaatggagaaagacgtaa

SEQ ID NO: 26025 - RNA, 22 nt, synthetic construct
  source 1..22: mol_type = other RNA
aggctactaatgagttgtcctg

SEQ ID NO: 26026 - RNA, 22 nt, synthetic construct
  source 1..22: mol_type = other RNA
aggctcttactctcaaatcaca

SEQ ID NO: 26027 - RNA, 22 nt, synthetic construct
  source 1..22: mol_type = other RNA
aggcttatgttgcaaaaggtgt

SEQ ID NO: 26028 - RNA, 22 nt, synthetic construct
  source 1..22: mol_type = other RNA
aggcttcagagactgagccatt

SEQ ID NO: 26029 - RNA, 22 nt, synthetic construct
  source 1..22: mol_type = other RNA
aggcttgcttcggggccatcca

SEQ ID NO: 26030 - RNA, 22 nt, synthetic construct
  source 1..22: mol_type = other RNA
agggaaccacaaagctagcgtc

SEQ ID NO: 26031 - RNA, 22 nt, synthetic construct
  source 1..22: mol_type = other RNA
agggaagccagaatagtcgtgt

SEQ ID NO: 26032 - RNA, 22 nt, synthetic construct
  source 1..22: mol_type = other RNA
agggaagtgaaaatagagggta

SEQ ID NO: 26033 - RNA, 22 nt, synthetic construct
  source 1..22: mol_type = other RNA
agggacaatgactgttccattg

SEQ ID NO: 26034 - RNA, 22 nt, synthetic construct
  source 1..22: mol_type = other RNA
agggagatgtgaactctgggat

SEQ ID NO: 26035 - RNA, 22 nt, synthetic construct
  source 1..22: mol_type = other RNA
agggaggaagtcacactcagac

SEQ ID NO: 26036 - RNA, 22 nt, synthetic construct
  source 1..22: mol_type = other RNA
agggatataaaaatagaaacca

SEQ ID NO: 26037 - RNA, 22 nt, synthetic construct
  source 1..22: mol_type = other RNA
agggcaacagactaagtccatt

SEQ ID NO: 26038 - RNA, 22 nt, synthetic construct
  source 1..22: mol_type = other RNA
agggcagatcaattccgcacag

SEQ ID NO: 26039 - RNA, 22 nt, synthetic construct
  source 1..22: mol_type = other RNA
agggcagccttgtggatggccc

SEQ ID NO: 26040 - RNA, 22 nt, synthetic construct
  source 1..22: mol_type = other RNA
agggcagtcccaaggtacagtg

SEQ ID NO: 26041 - RNA, 22 nt, synthetic construct
  source 1..22: mol_type = other RNA
agggccagtcacagttttgact

SEQ ID NO: 26042 - RNA, 22 nt, synthetic construct
  source 1..22: mol_type = other RNA
agggctgcatacatgtgtagat

SEQ ID NO: 26043 - RNA, 22 nt, synthetic construct
  source 1..22: mol_type = other RNA
aggggaaaagtgctaattacca

SEQ ID NO: 26044 - RNA, 22 nt, synthetic construct
  source 1..22: mol_type = other RNA
aggggaatttctacgatttata

SEQ ID NO: 26045 - RNA, 22 nt, synthetic construct
  source 1..22: mol_type = other RNA
aggggccttcaattcaatccat

SEQ ID NO: 26046 - RNA, 22 nt, synthetic construct
  source 1..22: mol_type = other RNA
agggggagaaagaagcaattgt

SEQ ID NO: 26047 - RNA, 22 nt, synthetic construct
  source 1..22: mol_type = other RNA
aggggtctgagtgtgacttcct

SEQ ID NO: 26048 - RNA, 22 nt, synthetic construct
  source 1..22: mol_type = other RNA
agggtaaacctgaggcaccacc

SEQ ID NO: 26049 - RNA, 22 nt, synthetic construct
  source 1..22: mol_type = other RNA
agggtattccaagtgtttgcaa

SEQ ID NO: 26050 - RNA, 22 nt, synthetic construct
  source 1..22: mol_type = other RNA
agggtattccataataactttt

SEQ ID NO: 26051 - RNA, 22 nt, synthetic construct
  source 1..22: mol_type = other RNA
agggtcgagacaaggagcaaac

SEQ ID NO: 26052 - RNA, 22 nt, synthetic construct
  source 1..22: mol_type = other RNA
agggtttttggaactggagatg

SEQ ID NO: 26053 - RNA, 22 nt, synthetic construct
  source 1..22: mol_type = other RNA
aggtaactaagcaagagaatcc

SEQ ID NO: 26054 - RNA, 22 nt, synthetic construct
  source 1..22: mol_type = other RNA
aggtaagtgccagaaatgtact

SEQ ID NO: 26055 - RNA, 22 nt, synthetic construct
  source 1..22: mol_type = other RNA
aggtacagtggaccaacatctc

SEQ ID NO: 26056 - RNA, 22 nt, synthetic construct
  source 1..22: mol_type = other RNA
aggtacttgatacataaccatg

SEQ ID NO: 26057 - RNA, 22 nt, synthetic construct
  source 1..22: mol_type = other RNA
aggtatgcgatgggtgagtgat

SEQ ID NO: 26058 - RNA, 22 nt, synthetic construct
  source 1..22: mol_type = other RNA
aggtatttagcattgcagctag

SEQ ID NO: 26059 - RNA, 22 nt, synthetic construct
  source 1..22: mol_type = other RNA
aggtcatttgattggagagatt

SEQ ID NO: 26060 - RNA, 22 nt, synthetic construct
  source 1..22: mol_type = other RNA
aggtctgtgcggaattgatctg

SEQ ID NO: 26061 - RNA, 22 nt, synthetic construct
  source 1..22: mol_type = other RNA
aggtgaaagcagtcaaccaaat

SEQ ID NO: 26062 - RNA, 22 nt, synthetic construct
  source 1..22: mol_type = other RNA
aggtgactctataaaattattg

SEQ ID NO: 26063 - RNA, 22 nt, synthetic construct
  source 1..22: mol_type = other RNA
aggtgatggtatcaggaatgga

SEQ ID NO: 26064 - RNA, 22 nt, synthetic construct
  source 1..22: mol_type = other RNA
aggtgcacttctccaaaacaga

SEQ ID NO: 26065 - RNA, 22 nt, synthetic construct
  source 1..22: mol_type = other RNA
aggtgctttcaagaacaggagc

SEQ ID NO: 26066 - RNA, 22 nt, synthetic construct
  source 1..22: mol_type = other RNA
aggtggaacctggatgcaagcc

SEQ ID NO: 26067 - RNA, 22 nt, synthetic construct
  source 1..22: mol_type = other RNA
aggtggattctcttgcttagtt

SEQ ID NO: 26068 - RNA, 22 nt, synthetic construct
  source 1..22: mol_type = other RNA
aggtggcatctcttacagaagc

SEQ ID NO: 26069 - RNA, 22 nt, synthetic construct
  source 1..22: mol_type = other RNA
aggtggtgcctcaggtttaccc

SEQ ID NO: 26070 - RNA, 22 nt, synthetic construct
  source 1..22: mol_type = other RNA
aggtgtgagtttgaaaatggct

SEQ ID NO: 26071 - RNA, 22 nt, synthetic construct
  source 1..22: mol_type = other RNA
aggtgtgtattgtttgaacaag

SEQ ID NO: 26072 - RNA, 22 nt, synthetic construct
  source 1..22: mol_type = other RNA
aggtgttctgacattggtcttg

SEQ ID NO: 26073 - RNA, 22 nt, synthetic construct
  source 1..22: mol_type = other RNA
aggttcactaactgtgcgtttt

SEQ ID NO: 26074 - RNA, 22 nt, synthetic construct
  source 1..22: mol_type = other RNA
aggttccaccttaattggcctg

SEQ ID NO: 26075 - RNA, 22 nt, synthetic construct
  source 1..22: mol_type = other RNA
aggttccagcagcaatttgcaa

SEQ ID NO: 26076 - RNA, 22 nt, synthetic construct
  source 1..22: mol_type = other RNA
aggttcctcagcttccttcaga

SEQ ID NO: 26077 - RNA, 22 nt, synthetic construct
  source 1..22: mol_type = other RNA
aggttctgtctggcaaatggga

SEQ ID NO: 26078 - RNA, 22 nt, synthetic construct
  source 1..22: mol_type = other RNA
aggtttaccctctattttcact

SEQ ID NO: 26079 - RNA, 22 nt, synthetic construct
  source 1..22: mol_type = other RNA
aggtttcttgttcaaacaatac

SEQ ID NO: 26080 - RNA, 22 nt, synthetic construct
  source 1..22: mol_type = other RNA
agtaaaagttgaaatgtcaggg

SEQ ID NO: 26081 - RNA, 22 nt, synthetic construct
  source 1..22: mol_type = other RNA
agtaaactagctgcaatgctaa

SEQ ID NO: 26082 - RNA, 22 nt, synthetic construct
  source 1..22: mol_type = other RNA
agtaaatggagacaccaagtgg

SEQ ID NO: 26083 - RNA, 22 nt, synthetic construct
  source 1..22: mol_type = other RNA
agtaacacaacacttttaaggg

SEQ ID NO: 26084 - RNA, 22 nt, synthetic construct
  source 1..22: mol_type = other RNA
agtaagagccttatggtcaaat

SEQ ID NO: 26085 - RNA, 22 nt, synthetic construct
  source 1..22: mol_type = other RNA
agtaagcaccattcatttcatt

SEQ ID NO: 26086 - RNA, 22 nt, synthetic construct
  source 1..22: mol_type = other RNA
agtaatacaatgttcttgtcat

SEQ ID NO: 26087 - RNA, 22 nt, synthetic construct
  source 1..22: mol_type = other RNA
agtaatttggaaggtgactcta

SEQ ID NO: 26088 - RNA, 22 nt, synthetic construct
  source 1..22: mol_type = other RNA
agtacagaatataaatcgtaga

SEQ ID NO: 26089 - RNA, 22 nt, synthetic construct
  source 1..22: mol_type = other RNA
agtacatttctggcacttacct

SEQ ID NO: 26090 - RNA, 22 nt, synthetic construct
  source 1..22: mol_type = other RNA
agtacctttgctgagcaagttg

SEQ ID NO: 26091 - RNA, 22 nt, synthetic construct
  source 1..22: mol_type = other RNA
agtagagggtattccaagtgtt

SEQ ID NO: 26092 - RNA, 22 nt, synthetic construct
  source 1..22: mol_type = other RNA
agtagcctgactgttaatggca

SEQ ID NO: 26093 - RNA, 22 nt, synthetic construct
  source 1..22: mol_type = other RNA
agtatcaacccaatctctccaa

SEQ ID NO: 26094 - RNA, 22 nt, synthetic construct
  source 1..22: mol_type = other RNA
agtatctagtaatttggaaggt

SEQ ID NO: 26095 - RNA, 22 nt, synthetic construct
  source 1..22: mol_type = other RNA
agtattcaaaatcaagcgagtt

SEQ ID NO: 26096 - RNA, 22 nt, synthetic construct
  source 1..22: mol_type = other RNA
agtcaaaactgtgactggccct

SEQ ID NO: 26097 - RNA, 22 nt, synthetic construct
  source 1..22: mol_type = other RNA
agtcaaccaaatgtctccgatt

SEQ ID NO: 26098 - RNA, 22 nt, synthetic construct
  source 1..22: mol_type = other RNA
agtcacaaatgtaccaagttga

SEQ ID NO: 26099 - RNA, 22 nt, synthetic construct
  source 1..22: mol_type = other RNA
agtcacaacaagcttcagttct

SEQ ID NO: 26100 - RNA, 22 nt, synthetic construct
  source 1..22: mol_type = other RNA
agtcacactcagacccctcccc

SEQ ID NO: 26101 - RNA, 22 nt, synthetic construct
  source 1..22: mol_type = other RNA
agtcacagttttgactagacaa

SEQ ID NO: 26102 - RNA, 22 nt, synthetic construct
  source 1..22: mol_type = other RNA
agtcaccttccaaattactaga

SEQ ID NO: 26103 - RNA, 22 nt, synthetic construct
  source 1..22: mol_type = other RNA
agtcactgtgtggcactagatt

SEQ ID NO: 26104 - RNA, 22 nt, synthetic construct
  source 1..22: mol_type = other RNA
agtcagaccatgaaatcaagtg

SEQ ID NO: 26105 - RNA, 22 nt, synthetic construct
  source 1..22: mol_type = other RNA
agtcagatgcacaggccaatta

SEQ ID NO: 26106 - RNA, 22 nt, synthetic construct
  source 1..22: mol_type = other RNA
agtcaggactcacacgactatt

SEQ ID NO: 26107 - RNA, 22 nt, synthetic construct
  source 1..22: mol_type = other RNA
agtcaggctactaatgagttgt

SEQ ID NO: 26108 - RNA, 22 nt, synthetic construct
  source 1..22: mol_type = other RNA
agtcattgtccctgcagtctgt

SEQ ID NO: 26109 - RNA, 22 nt, synthetic construct
  source 1..22: mol_type = other RNA
agtccattcctgataccatcac

SEQ ID NO: 26110 - RNA, 22 nt, synthetic construct
  source 1..22: mol_type = other RNA
agtcccaaggtacagtggacca

SEQ ID NO: 26111 - RNA, 22 nt, synthetic construct
  source 1..22: mol_type = other RNA
agtcccatttggacattatgag

SEQ ID NO: 26112 - RNA, 22 nt, synthetic construct
  source 1..22: mol_type = other RNA
agtcctaatccatctacacatg

SEQ ID NO: 26113 - RNA, 22 nt, synthetic construct
  source 1..22: mol_type = other RNA
agtcctgactttacacaagaaa

SEQ ID NO: 26114 - RNA, 22 nt, synthetic construct
  source 1..22: mol_type = other RNA
agtcgtgtgagtcctgacttta

SEQ ID NO: 26115 - RNA, 22 nt, synthetic construct
  source 1..22: mol_type = other RNA
agtcgttatttgaccataaggc

SEQ ID NO: 26116 - RNA, 22 nt, synthetic construct
  source 1..22: mol_type = other RNA
agtctcgaactcgcttgatttt

SEQ ID NO: 26117 - RNA, 22 nt, synthetic construct
  source 1..22: mol_type = other RNA
agtctctgaagcctgttgattc

SEQ ID NO: 26118 - RNA, 22 nt, synthetic construct
  source 1..22: mol_type = other RNA
agtctggagtatttcctcttta

SEQ ID NO: 26119 - RNA, 22 nt, synthetic construct
  source 1..22: mol_type = other RNA
agtctggccaaagaatgatcct

SEQ ID NO: 26120 - RNA, 22 nt, synthetic construct
  source 1..22: mol_type = other RNA
agtctgtatgtcattcctgttc

SEQ ID NO: 26121 - RNA, 22 nt, synthetic construct
  source 1..22: mol_type = other RNA
agtctgttctttattctctgaa

SEQ ID NO: 26122 - RNA, 22 nt, synthetic construct
  source 1..22: mol_type = other RNA
agtctgttgccctcaacatggt

SEQ ID NO: 26123 - RNA, 22 nt, synthetic construct
  source 1..22: mol_type = other RNA
agtcttgacaggtgtatccaat

SEQ ID NO: 26124 - RNA, 22 nt, synthetic construct
  source 1..22: mol_type = other RNA
agtcttgccatagtcagatgca

SEQ ID NO: 26125 - RNA, 22 nt, synthetic construct
  source 1..22: mol_type = other RNA
agtgaaaatagagggtaaacct

SEQ ID NO: 26126 - RNA, 22 nt, synthetic construct
  source 1..22: mol_type = other RNA
agtgaacactgagctttgcttg

SEQ ID NO: 26127 - RNA, 22 nt, synthetic construct
  source 1..22: mol_type = other RNA
agtgaaccttctctctctgggc

SEQ ID NO: 26128 - RNA, 22 nt, synthetic construct
  source 1..22: mol_type = other RNA
agtgactgcacatgagcttttg

SEQ ID NO: 26129 - RNA, 22 nt, synthetic construct
  source 1..22: mol_type = other RNA
agtgaggcctgtgatgctgatg

SEQ ID NO: 26130 - RNA, 22 nt, synthetic construct
  source 1..22: mol_type = other RNA
agtgataagaaagaatctgtga

SEQ ID NO: 26131 - RNA, 22 nt, synthetic construct
  source 1..22: mol_type = other RNA
agtgatctcacaggacaactca

SEQ ID NO: 26132 - RNA, 22 nt, synthetic construct
  source 1..22: mol_type = other RNA
agtgatgcctcattacgtttta

SEQ ID NO: 26133 - RNA, 22 nt, synthetic construct
  source 1..22: mol_type = other RNA
agtgcacctggtgtgagggttt

SEQ ID NO: 26134 - RNA, 22 nt, synthetic construct
  source 1..22: mol_type = other RNA
agtgcatgcaaaatacaggttt

SEQ ID NO: 26135 - RNA, 22 nt, synthetic construct
  source 1..22: mol_type = other RNA
agtgccacacagtgactgcaca

SEQ ID NO: 26136 - RNA, 22 nt, synthetic construct
  source 1..22: mol_type = other RNA
agtgccacttggtgtctccatt

SEQ ID NO: 26137 - RNA, 22 nt, synthetic construct
  source 1..22: mol_type = other RNA
agtgccagaaatgtactgagac

SEQ ID NO: 26138 - RNA, 22 nt, synthetic construct
  source 1..22: mol_type = other RNA
agtgctaatgcctaatggtgct

SEQ ID NO: 26139 - RNA, 22 nt, synthetic construct
  source 1..22: mol_type = other RNA
agtgctaattaccatgacaaga

SEQ ID NO: 26140 - RNA, 22 nt, synthetic construct
  source 1..22: mol_type = other RNA
agtgctgtgttgggggcacaag

SEQ ID NO: 26141 - RNA, 22 nt, synthetic construct
  source 1..22: mol_type = other RNA
agtgctgtttcaacactgggga

SEQ ID NO: 26142 - RNA, 22 nt, synthetic construct
  source 1..22: mol_type = other RNA
agtgctttttccttctgaagga

SEQ ID NO: 26143 - RNA, 22 nt, synthetic construct
  source 1..22: mol_type = other RNA
agtggaagaatgttttcatggt

SEQ ID NO: 26144 - RNA, 22 nt, synthetic construct
  source 1..22: mol_type = other RNA
agtggaccaacatctccagttc

SEQ ID NO: 26145 - RNA, 22 nt, synthetic construct
  source 1..22: mol_type = other RNA
agtggagagctacaggacaact

SEQ ID NO: 26146 - RNA, 22 nt, synthetic construct
  source 1..22: mol_type = other RNA
agtggcactctttcaaaagtta

SEQ ID NO: 26147 - RNA, 22 nt, synthetic construct
  source 1..22: mol_type = other RNA
agtggcagaaaaggaatcctta

SEQ ID NO: 26148 - RNA, 22 nt, synthetic construct
  source 1..22: mol_type = other RNA
agtgggcctgaaaatccagagc

SEQ ID NO: 26149 - RNA, 22 nt, synthetic construct
  source 1..22: mol_type = other RNA
agtgggcttccattctggagct

SEQ ID NO: 26150 - RNA, 22 nt, synthetic construct
  source 1..22: mol_type = other RNA
agtggtgagtgaggcctgtgat

SEQ ID NO: 26151 - RNA, 22 nt, synthetic construct
  source 1..22: mol_type = other RNA
agtggtggtgttcttctaaaac

SEQ ID NO: 26152 - RNA, 22 nt, synthetic construct
  source 1..22: mol_type = other RNA
agtggtttgtctagtcaaaact

SEQ ID NO: 26153 - RNA, 22 nt, synthetic construct
  source 1..22: mol_type = other RNA
agtgtattgtttggaggtcatt

SEQ ID NO: 26154 - RNA, 22 nt, synthetic construct
  source 1..22: mol_type = other RNA
agtgtccttctggggaggggtc

SEQ ID NO: 26155 - RNA, 22 nt, synthetic construct
  source 1..22: mol_type = other RNA
agtgtgacttcctccctggtca

SEQ ID NO: 26156 - RNA, 22 nt, synthetic construct
  source 1..22: mol_type = other RNA
agtgttcactaaggattccttt

SEQ ID NO: 26157 - RNA, 22 nt, synthetic construct
  source 1..22: mol_type = other RNA
agtgttgaaacagcacttgaat

SEQ ID NO: 26158 - RNA, 22 nt, synthetic construct
  source 1..22: mol_type = other RNA
agtgttgtgttactttggttgg

SEQ ID NO: 26159 - RNA, 22 nt, synthetic construct
  source 1..22: mol_type = other RNA
agtgtttgcaaaatggaggaat

SEQ ID NO: 26160 - RNA, 22 nt, synthetic construct
  source 1..22: mol_type = other RNA
agtgttttttccaggagttcac

SEQ ID NO: 26161 - RNA, 22 nt, synthetic construct
  source 1..22: mol_type = other RNA
agttaaagatttcaccagtttt

SEQ ID NO: 26162 - RNA, 22 nt, synthetic construct
  source 1..22: mol_type = other RNA
agttacctttttccatgttttg

SEQ ID NO: 26163 - RNA, 22 nt, synthetic construct
  source 1..22: mol_type = other RNA
agttacgtctttctccattagc

SEQ ID NO: 26164 - RNA, 22 nt, synthetic construct
  source 1..22: mol_type = other RNA
agttagaggtctgtgcggaatt

SEQ ID NO: 26165 - RNA, 22 nt, synthetic construct
  source 1..22: mol_type = other RNA
agttagtgaaccttctctctct

SEQ ID NO: 26166 - RNA, 22 nt, synthetic construct
  source 1..22: mol_type = other RNA
agttatgtgttgaaaaactggt

SEQ ID NO: 26167 - RNA, 22 nt, synthetic construct
  source 1..22: mol_type = other RNA
agttattatggaataccctgta

SEQ ID NO: 26168 - RNA, 22 nt, synthetic construct
  source 1..22: mol_type = other RNA
agttcacatctccctcaaaacc

SEQ ID NO: 26169 - RNA, 22 nt, synthetic construct
  source 1..22: mol_type = other RNA
agttcaccatgtgtgtgttcca

SEQ ID NO: 26170 - RNA, 22 nt, synthetic construct
  source 1..22: mol_type = other RNA
agttcaggatgtgtagtctgtt

SEQ ID NO: 26171 - RNA, 22 nt, synthetic construct
  source 1..22: mol_type = other RNA
agttccaaaaaccctcacacca

SEQ ID NO: 26172 - RNA, 22 nt, synthetic construct
  source 1..22: mol_type = other RNA
agttcgagactcataatgtcca

SEQ ID NO: 26173 - RNA, 22 nt, synthetic construct
  source 1..22: mol_type = other RNA
agttctacagggatataaaaat

SEQ ID NO: 26174 - RNA, 22 nt, synthetic construct
  source 1..22: mol_type = other RNA
agttctgcagcagtggtttgtc

SEQ ID NO: 26175 - RNA, 22 nt, synthetic construct
  source 1..22: mol_type = other RNA
agttctgtagcccaagaaaatg

SEQ ID NO: 26176 - RNA, 22 nt, synthetic construct
  source 1..22: mol_type = other RNA
agttgaaatgaatcaagggcag

SEQ ID NO: 26177 - RNA, 22 nt, synthetic construct
  source 1..22: mol_type = other RNA
agttgaaatgtcagggccagtc

SEQ ID NO: 26178 - RNA, 22 nt, synthetic construct
  source 1..22: mol_type = other RNA
agttgatgagaaacaaagagca

SEQ ID NO: 26179 - RNA, 22 nt, synthetic construct
  source 1..22: mol_type = other RNA
agttgcgcagcttgttgaccag

SEQ ID NO: 26180 - RNA, 22 nt, synthetic construct
  source 1..22: mol_type = other RNA
agttgtcctgtagctctccact

SEQ ID NO: 26181 - RNA, 22 nt, synthetic construct
  source 1..22: mol_type = other RNA
agttgtcctgtgagatcactca

SEQ ID NO: 26182 - RNA, 22 nt, synthetic construct
  source 1..22: mol_type = other RNA
agttgttctggtttctgaaagg

SEQ ID NO: 26183 - RNA, 22 nt, synthetic construct
  source 1..22: mol_type = other RNA
agttgtttgctgctctaaagct

SEQ ID NO: 26184 - RNA, 22 nt, synthetic construct
  source 1..22: mol_type = other RNA
agtttactggcattatcagcat

SEQ ID NO: 26185 - RNA, 22 nt, synthetic construct
  source 1..22: mol_type = other RNA
agtttcacgccaagtcgttatt

SEQ ID NO: 26186 - RNA, 22 nt, synthetic construct
  source 1..22: mol_type = other RNA
agtttcagagaataaagaacag

SEQ ID NO: 26187 - RNA, 22 nt, synthetic construct
  source 1..22: mol_type = other RNA
agtttctgcctcttccgtggaa

SEQ ID NO: 26188 - RNA, 22 nt, synthetic construct
  source 1..22: mol_type = other RNA
agtttgaaaatggctcagtctc

SEQ ID NO: 26189 - RNA, 22 nt, synthetic construct
  source 1..22: mol_type = other RNA
agtttgggaatctgctctttgt

SEQ ID NO: 26190 - RNA, 22 nt, synthetic construct
  source 1..22: mol_type = other RNA
agtttggggttgctgtgtttgc

SEQ ID NO: 26191 - RNA, 22 nt, synthetic construct
  source 1..22: mol_type = other RNA
agttttagaagaacaccaccac

SEQ ID NO: 26192 - RNA, 22 nt, synthetic construct
  source 1..22: mol_type = other RNA
agttttgactagacaaaccact

SEQ ID NO: 26193 - RNA, 22 nt, synthetic construct
  source 1..22: mol_type = other RNA
agttttgggtcttgtttcctgc

SEQ ID NO: 26194 - RNA, 22 nt, synthetic construct
  source 1..22: mol_type = other RNA
agtttttcaacacataactgca

SEQ ID NO: 26195 - RNA, 22 nt, synthetic construct
  source 1..22: mol_type = other RNA
agtttttcagtttgggaatctg

SEQ ID NO: 26196 - RNA, 22 nt, synthetic construct
  source 1..22: mol_type = other RNA
agtttttgagatatgcccatct

SEQ ID NO: 26197 - RNA, 22 nt, synthetic construct
  source 1..22: mol_type = other RNA
ataaaacgcacagttagtgaac

SEQ ID NO: 26198 - RNA, 22 nt, synthetic construct
  source 1..22: mol_type = other RNA
ataaacaggcagcacaaacaca

SEQ ID NO: 26199 - RNA, 22 nt, synthetic construct
  source 1..22: mol_type = other RNA
ataaacgccatgtgtctcagta

SEQ ID NO: 26200 - RNA, 22 nt, synthetic construct
  source 1..22: mol_type = other RNA
ataaagaacagactacacatcc

SEQ ID NO: 26201 - RNA, 22 nt, synthetic construct
  source 1..22: mol_type = other RNA
ataaagaggaaatactccagac

SEQ ID NO: 26202 - RNA, 22 nt, synthetic construct
  source 1..22: mol_type = other RNA
ataaatcgtagaaattcccctt

SEQ ID NO: 26203 - RNA, 22 nt, synthetic construct
  source 1..22: mol_type = other RNA
ataaatgccattaacagtcagg

SEQ ID NO: 26204 - RNA, 22 nt, synthetic construct
  source 1..22: mol_type = other RNA
ataacatccagggaaccacaaa

SEQ ID NO: 26205 - RNA, 22 nt, synthetic construct
  source 1..22: mol_type = other RNA
ataaccatgcaaatgtttttcc

SEQ ID NO: 26206 - RNA, 22 nt, synthetic construct
  source 1..22: mol_type = other RNA
ataacccaccaatttttggtag

SEQ ID NO: 26207 - RNA, 22 nt, synthetic construct
  source 1..22: mol_type = other RNA
ataacgacttggcgtgaaactg

SEQ ID NO: 26208 - RNA, 22 nt, synthetic construct
  source 1..22: mol_type = other RNA
ataactgcagtgggcctgaaaa

SEQ ID NO: 26209 - RNA, 22 nt, synthetic construct
  source 1..22: mol_type = other RNA
ataacttttgaaagagtgccac

SEQ ID NO: 26210 - RNA, 22 nt, synthetic construct
  source 1..22: mol_type = other RNA
ataagaaagaatctgtgagttc

SEQ ID NO: 26211 - RNA, 22 nt, synthetic construct
  source 1..22: mol_type = other RNA
ataagcctcataaacaggcagc

SEQ ID NO: 26212 - RNA, 22 nt, synthetic construct
  source 1..22: mol_type = other RNA
ataaggctcttactctcaaatc

SEQ ID NO: 26213 - RNA, 22 nt, synthetic construct
  source 1..22: mol_type = other RNA
ataaggggaatttctacgattt

SEQ ID NO: 26214 - RNA, 22 nt, synthetic construct
  source 1..22: mol_type = other RNA
ataagtttttcagtttgggaat

SEQ ID NO: 26215 - RNA, 22 nt, synthetic construct
  source 1..22: mol_type = other RNA
ataataacttttgaaagagtgc

SEQ ID NO: 26216 - RNA, 22 nt, synthetic construct
  source 1..22: mol_type = other RNA
ataatgccagtaaactagctgc

SEQ ID NO: 26217 - RNA, 22 nt, synthetic construct
  source 1..22: mol_type = other RNA
ataatgtccaaatgggactgga

SEQ ID NO: 26218 - RNA, 22 nt, synthetic construct
  source 1..22: mol_type = other RNA
ataatgtgatcccaaagcaaga

SEQ ID NO: 26219 - RNA, 22 nt, synthetic construct
  source 1..22: mol_type = other RNA
ataatgtgcagcaaaagagcat

SEQ ID NO: 26220 - RNA, 22 nt, synthetic construct
  source 1..22: mol_type = other RNA
ataattgtgtgaacaggaatga

SEQ ID NO: 26221 - RNA, 22 nt, synthetic construct
  source 1..22: mol_type = other RNA
ataattttatagagtcaccttc

SEQ ID NO: 26222 - RNA, 22 nt, synthetic construct
  source 1..22: mol_type = other RNA
atacaatgttcttgtcatggta

SEQ ID NO: 26223 - RNA, 22 nt, synthetic construct
  source 1..22: mol_type = other RNA
atacacacctagtttcagagaa

SEQ ID NO: 26224 - RNA, 22 nt, synthetic construct
  source 1..22: mol_type = other RNA
atacacctgtcaagactcaata

SEQ ID NO: 26225 - RNA, 22 nt, synthetic construct
  source 1..22: mol_type = other RNA
atacactggaaattccaacatg

SEQ ID NO: 26226 - RNA, 22 nt, synthetic construct
  source 1..22: mol_type = other RNA
atacagactgcagggacaatga

SEQ ID NO: 26227 - RNA, 22 nt, synthetic construct
  source 1..22: mol_type = other RNA
atacaggcatgtggcttgcatc

SEQ ID NO: 26228 - RNA, 22 nt, synthetic construct
  source 1..22: mol_type = other RNA
atacagggtattccataataac

SEQ ID NO: 26229 - RNA, 22 nt, synthetic construct
  source 1..22: mol_type = other RNA
atacaggtttcttgttcaaaca

SEQ ID NO: 26230 - RNA, 22 nt, synthetic construct
  source 1..22: mol_type = other RNA
atacataaccatgcaaatgttt

SEQ ID NO: 26231 - RNA, 22 nt, synthetic construct
  source 1..22: mol_type = other RNA
atacatgtgtagatggattagg

SEQ ID NO: 26232 - RNA, 22 nt, synthetic construct
  source 1..22: mol_type = other RNA
ataccatcacctcccatttgcc

SEQ ID NO: 26233 - RNA, 22 nt, synthetic construct
  source 1..22: mol_type = other RNA
ataccctctactttcttgtgta

SEQ ID NO: 26234 - RNA, 22 nt, synthetic construct
  source 1..22: mol_type = other RNA
ataccctgtatgaagggaagcc

SEQ ID NO: 26235 - RNA, 22 nt, synthetic construct
  source 1..22: mol_type = other RNA
ataccgttcagagctgccacca

SEQ ID NO: 26236 - RNA, 22 nt, synthetic construct
  source 1..22: mol_type = other RNA
atacctcagggcagatcaattc

SEQ ID NO: 26237 - RNA, 22 nt, synthetic construct
  source 1..22: mol_type = other RNA
atacctgttcctttcagaaacc

SEQ ID NO: 26238 - RNA, 22 nt, synthetic construct
  source 1..22: mol_type = other RNA
atactccagacttttcctcacc

SEQ ID NO: 26239 - RNA, 22 nt, synthetic construct
  source 1..22: mol_type = other RNA
atactgaagaattgatggcagt

SEQ ID NO: 26240 - RNA, 22 nt, synthetic construct
  source 1..22: mol_type = other RNA
atactgattttcaccatgaaaa

SEQ ID NO: 26241 - RNA, 22 nt, synthetic construct
  source 1..22: mol_type = other RNA
atagaaaccaagatatgtctgg

SEQ ID NO: 26242 - RNA, 22 nt, synthetic construct
  source 1..22: mol_type = other RNA
atagaaccaaccatgttgaggg

SEQ ID NO: 26243 - RNA, 22 nt, synthetic construct
  source 1..22: mol_type = other RNA
atagagggtaaacctgaggcac

SEQ ID NO: 26244 - RNA, 22 nt, synthetic construct
  source 1..22: mol_type = other RNA
atagagtcaccttccaaattac

SEQ ID NO: 26245 - RNA, 22 nt, synthetic construct
  source 1..22: mol_type = other RNA
atagccacaccccagctttaga

SEQ ID NO: 26246 - RNA, 22 nt, synthetic construct
  source 1..22: mol_type = other RNA
ataggagtatctagtaatttgg

SEQ ID NO: 26247 - RNA, 22 nt, synthetic construct
  source 1..22: mol_type = other RNA
atagtcagaccatgaaatcaag

SEQ ID NO: 26248 - RNA, 22 nt, synthetic construct
  source 1..22: mol_type = other RNA
atagtcagatgcacaggccaat

SEQ ID NO: 26249 - RNA, 22 nt, synthetic construct
  source 1..22: mol_type = other RNA
atagtcgtgtgagtcctgactt

SEQ ID NO: 26250 - RNA, 22 nt, synthetic construct
  source 1..22: mol_type = other RNA
atagtgctgtgttgggggcaca

SEQ ID NO: 26251 - RNA, 22 nt, synthetic construct
  source 1..22: mol_type = other RNA
atataaatcgtagaaattcccc

SEQ ID NO: 26252 - RNA, 22 nt, synthetic construct
  source 1..22: mol_type = other RNA
atatccctgtagaactgaagct

SEQ ID NO: 26253 - RNA, 22 nt, synthetic construct
  source 1..22: mol_type = other RNA
atatgatttcccatcttgcaga

SEQ ID NO: 26254 - RNA, 22 nt, synthetic construct
  source 1..22: mol_type = other RNA
atatgcccatctcctgcagaaa

SEQ ID NO: 26255 - RNA, 22 nt, synthetic construct
  source 1..22: mol_type = other RNA
atatgtctggtcaacaagctgc

SEQ ID NO: 26256 - RNA, 22 nt, synthetic construct
  source 1..22: mol_type = other RNA
atattatccagattgtgtttcc

SEQ ID NO: 26257 - RNA, 22 nt, synthetic construct
  source 1..22: mol_type = other RNA
atattctgtacttcctccagtc

SEQ ID NO: 26258 - RNA, 22 nt, synthetic construct
  source 1..22: mol_type = other RNA
atattgagacagtgttttttcc

SEQ ID NO: 26259 - RNA, 22 nt, synthetic construct
  source 1..22: mol_type = other RNA
atattgagtcttgacaggtgta

SEQ ID NO: 26260 - RNA, 22 nt, synthetic construct
  source 1..22: mol_type = other RNA
atattgcatgtgatgcaagttt

SEQ ID NO: 26261 - RNA, 22 nt, synthetic construct
  source 1..22: mol_type = other RNA
atcaaatgacctccaaacaata

SEQ ID NO: 26262 - RNA, 22 nt, synthetic construct
  source 1..22: mol_type = other RNA
atcaacaggcttcagagactga

SEQ ID NO: 26263 - RNA, 22 nt, synthetic construct
  source 1..22: mol_type = other RNA
atcaacccaatctctccaatca

SEQ ID NO: 26264 - RNA, 22 nt, synthetic construct
  source 1..22: mol_type = other RNA
atcaactgctggcagttgtcct

SEQ ID NO: 26265 - RNA, 22 nt, synthetic construct
  source 1..22: mol_type = other RNA
atcaagaaattgaaacaagacc

SEQ ID NO: 26266 - RNA, 22 nt, synthetic construct
  source 1..22: mol_type = other RNA
atcaagcgagttcgagactcat

SEQ ID NO: 26267 - RNA, 22 nt, synthetic construct
  source 1..22: mol_type = other RNA
atcaagggcagtcccaaggtac

SEQ ID NO: 26268 - RNA, 22 nt, synthetic construct
  source 1..22: mol_type = other RNA
atcaagtacctttgctgagcaa

SEQ ID NO: 26269 - RNA, 22 nt, synthetic construct
  source 1..22: mol_type = other RNA
atcaagtgcatgcaaaatacag

SEQ ID NO: 26270 - RNA, 22 nt, synthetic construct
  source 1..22: mol_type = other RNA
atcaagttctgcagcagtggtt

SEQ ID NO: 26271 - RNA, 22 nt, synthetic construct
  source 1..22: mol_type = other RNA
atcaattccgcacagacctcta

SEQ ID NO: 26272 - RNA, 22 nt, synthetic construct
  source 1..22: mol_type = other RNA
atcaattcttcagtatcaaccc

SEQ ID NO: 26273 - RNA, 22 nt, synthetic construct
  source 1..22: mol_type = other RNA
atcacaattgcttctttctccc

SEQ ID NO: 26274 - RNA, 22 nt, synthetic construct
  source 1..22: mol_type = other RNA
atcacagaagcaagtaaaagtt

SEQ ID NO: 26275 - RNA, 22 nt, synthetic construct
  source 1..22: mol_type = other RNA
atcacagcttgcaggtggattc

SEQ ID NO: 26276 - RNA, 22 nt, synthetic construct
  source 1..22: mol_type = other RNA
atcacaggcctcactcaccact

SEQ ID NO: 26277 - RNA, 22 nt, synthetic construct
  source 1..22: mol_type = other RNA
atcacatgcaatattttccaaa

SEQ ID NO: 26278 - RNA, 22 nt, synthetic construct
  source 1..22: mol_type = other RNA
atcacctcccatttgccagaca

SEQ ID NO: 26279 - RNA, 22 nt, synthetic construct
  source 1..22: mol_type = other RNA
atcactcaaatcggagacattt

SEQ ID NO: 26280 - RNA, 22 nt, synthetic construct
  source 1..22: mol_type = other RNA
atcactcacccatcgcatacct

SEQ ID NO: 26281 - RNA, 22 nt, synthetic construct
  source 1..22: mol_type = other RNA
atcactgccatcaattcttcag

SEQ ID NO: 26282 - RNA, 22 nt, synthetic construct
  source 1..22: mol_type = other RNA
atcagcaaagagaaggatcatt

SEQ ID NO: 26283 - RNA, 22 nt, synthetic construct
  source 1..22: mol_type = other RNA
atcagcatcacaggcctcactc

SEQ ID NO: 26284 - RNA, 22 nt, synthetic construct
  source 1..22: mol_type = other RNA
atcagcatcatcagcatcacag

SEQ ID NO: 26285 - RNA, 22 nt, synthetic construct
  source 1..22: mol_type = other RNA
atcaggaatggacttagtctgt

SEQ ID NO: 26286 - RNA, 22 nt, synthetic construct
  source 1..22: mol_type = other RNA
atcaggcttgcttcggggccat

SEQ ID NO: 26287 - RNA, 22 nt, synthetic construct
  source 1..22: mol_type = other RNA
atcagtattcaaaatcaagcga

SEQ ID NO: 26288 - RNA, 22 nt, synthetic construct
  source 1..22: mol_type = other RNA
atcagtttttgagatatgccca

SEQ ID NO: 26289 - RNA, 22 nt, synthetic construct
  source 1..22: mol_type = other RNA
atcatattgagtcttgacaggt

SEQ ID NO: 26290 - RNA, 22 nt, synthetic construct
  source 1..22: mol_type = other RNA
atcatcagcatcacaggcctca

SEQ ID NO: 26291 - RNA, 22 nt, synthetic construct
  source 1..22: mol_type = other RNA
atcattctttggccagactaaa

SEQ ID NO: 26292 - RNA, 22 nt, synthetic construct
  source 1..22: mol_type = other RNA
atcattgagaccatggagcagc

SEQ ID NO: 26293 - RNA, 22 nt, synthetic construct
  source 1..22: mol_type = other RNA
atcattgttgctttgggggtga

SEQ ID NO: 26294 - RNA, 22 nt, synthetic construct
  source 1..22: mol_type = other RNA
atccacctgcaagctgtgataa

SEQ ID NO: 26295 - RNA, 22 nt, synthetic construct
  source 1..22: mol_type = other RNA
atccagaagtaaatggagacac

SEQ ID NO: 26296 - RNA, 22 nt, synthetic construct
  source 1..22: mol_type = other RNA
atccagagcttcagattctgaa

SEQ ID NO: 26297 - RNA, 22 nt, synthetic construct
  source 1..22: mol_type = other RNA
atccagattgtgtttccattgc

SEQ ID NO: 26298 - RNA, 22 nt, synthetic construct
  source 1..22: mol_type = other RNA
atccagggaaccacaaagctag

SEQ ID NO: 26299 - RNA, 22 nt, synthetic construct
  source 1..22: mol_type = other RNA
atccaggtgaaagcagtcaacc

SEQ ID NO: 26300 - RNA, 22 nt, synthetic construct
  source 1..22: mol_type = other RNA
atccaggttccaccttaattgg

SEQ ID NO: 26301 - RNA, 22 nt, synthetic construct
  source 1..22: mol_type = other RNA
atccatcctggtttcagatagt

SEQ ID NO: 26302 - RNA, 22 nt, synthetic construct
  source 1..22: mol_type = other RNA
atccatctacacatgtatgcag

SEQ ID NO: 26303 - RNA, 22 nt, synthetic construct
  source 1..22: mol_type = other RNA
atcccaaagcaagatcttcttc

SEQ ID NO: 26304 - RNA, 22 nt, synthetic construct
  source 1..22: mol_type = other RNA
atcccagagttcacatctccct

SEQ ID NO: 26305 - RNA, 22 nt, synthetic construct
  source 1..22: mol_type = other RNA
atcccatctaaaacgtaatgag

SEQ ID NO: 26306 - RNA, 22 nt, synthetic construct
  source 1..22: mol_type = other RNA
atccctgtagaactgaagcttg

SEQ ID NO: 26307 - RNA, 22 nt, synthetic construct
  source 1..22: mol_type = other RNA
atcctgaactttttgcaggaaa

SEQ ID NO: 26308 - RNA, 22 nt, synthetic construct
  source 1..22: mol_type = other RNA
atcctggtttcagatagtgctg

SEQ ID NO: 26309 - RNA, 22 nt, synthetic construct
  source 1..22: mol_type = other RNA
atcctgttccatcaggcttgct

SEQ ID NO: 26310 - RNA, 22 nt, synthetic construct
  source 1..22: mol_type = other RNA
atccttagtgaacactgagctt

SEQ ID NO: 26311 - RNA, 22 nt, synthetic construct
  source 1..22: mol_type = other RNA
atccttctctttgctgatcatt

SEQ ID NO: 26312 - RNA, 22 nt, synthetic construct
  source 1..22: mol_type = other RNA
atcgcatacctcagggcagatc

SEQ ID NO: 26313 - RNA, 22 nt, synthetic construct
  source 1..22: mol_type = other RNA
atcggagaagggctgcatacat

SEQ ID NO: 26314 - RNA, 22 nt, synthetic construct
  source 1..22: mol_type = other RNA
atcggagacatttggttgactg

SEQ ID NO: 26315 - RNA, 22 nt, synthetic construct
  source 1..22: mol_type = other RNA
atcgtagaaattccccttatag

SEQ ID NO: 26316 - RNA, 22 nt, synthetic construct
  source 1..22: mol_type = other RNA
atctaaaacgtaatgaggcatc

SEQ ID NO: 26317 - RNA, 22 nt, synthetic construct
  source 1..22: mol_type = other RNA
atctacacatgtatgcagccct

SEQ ID NO: 26318 - RNA, 22 nt, synthetic construct
  source 1..22: mol_type = other RNA
atctagtaatttggaaggtgac

SEQ ID NO: 26319 - RNA, 22 nt, synthetic construct
  source 1..22: mol_type = other RNA
atctagtgccacacagtgactg

SEQ ID NO: 26320 - RNA, 22 nt, synthetic construct
  source 1..22: mol_type = other RNA
atctcacaggacaactcattag

SEQ ID NO: 26321 - RNA, 22 nt, synthetic construct
  source 1..22: mol_type = other RNA
atctcacataaatgccattaac

SEQ ID NO: 26322 - RNA, 22 nt, synthetic construct
  source 1..22: mol_type = other RNA
atctccagttccaaaaaccctc

SEQ ID NO: 26323 - RNA, 22 nt, synthetic construct
  source 1..22: mol_type = other RNA
atctccctcaaaaccagcaaca

SEQ ID NO: 26324 - RNA, 22 nt, synthetic construct
  source 1..22: mol_type = other RNA
atctcctgcagaaaataacatc

SEQ ID NO: 26325 - RNA, 22 nt, synthetic construct
  source 1..22: mol_type = other RNA
atctcgtgtttgctccttgtct

SEQ ID NO: 26326 - RNA, 22 nt, synthetic construct
  source 1..22: mol_type = other RNA
atctctccaatcaaatgacctc

SEQ ID NO: 26327 - RNA, 22 nt, synthetic construct
  source 1..22: mol_type = other RNA
atctcttacagaagcaagaaca

SEQ ID NO: 26328 - RNA, 22 nt, synthetic construct
  source 1..22: mol_type = other RNA
atctcttgctctttgtttctca

SEQ ID NO: 26329 - RNA, 22 nt, synthetic construct
  source 1..22: mol_type = other RNA
atctgaaaccaggatggattga

SEQ ID NO: 26330 - RNA, 22 nt, synthetic construct
  source 1..22: mol_type = other RNA
atctgaagcagtttcacgccaa

SEQ ID NO: 26331 - RNA, 22 nt, synthetic construct
  source 1..22: mol_type = other RNA
atctgaagctctggattttcag

SEQ ID NO: 26332 - RNA, 22 nt, synthetic construct
  source 1..22: mol_type = other RNA
atctgaaggagcccagagagag

SEQ ID NO: 26333 - RNA, 22 nt, synthetic construct
  source 1..22: mol_type = other RNA
atctgactatggcaagactcag

SEQ ID NO: 26334 - RNA, 22 nt, synthetic construct
  source 1..22: mol_type = other RNA
atctgcaagatgggaaatcata

SEQ ID NO: 26335 - RNA, 22 nt, synthetic construct
  source 1..22: mol_type = other RNA
atctgccctgaggtatgcgatg

SEQ ID NO: 26336 - RNA, 22 nt, synthetic construct
  source 1..22: mol_type = other RNA
atctgctctttgttgaaaatga

SEQ ID NO: 26337 - RNA, 22 nt, synthetic construct
  source 1..22: mol_type = other RNA
atctggataatattgagacagt

SEQ ID NO: 26338 - RNA, 22 nt, synthetic construct
  source 1..22: mol_type = other RNA
atctgtgagttctgtagcccaa

SEQ ID NO: 26339 - RNA, 22 nt, synthetic construct
  source 1..22: mol_type = other RNA
atcttcttcacaggtgctttca

SEQ ID NO: 26340 - RNA, 22 nt, synthetic construct
  source 1..22: mol_type = other RNA
atcttgcagatgtgtaggtaag

SEQ ID NO: 26341 - RNA, 22 nt, synthetic construct
  source 1..22: mol_type = other RNA
atcttgctttgggatcacatta

SEQ ID NO: 26342 - RNA, 22 nt, synthetic construct
  source 1..22: mol_type = other RNA
atcttgtgcccccaacacagca

SEQ ID NO: 26343 - RNA, 22 nt, synthetic construct
  source 1..22: mol_type = other RNA
atctttaactgcattttcttgg

SEQ ID NO: 26344 - RNA, 22 nt, synthetic construct
  source 1..22: mol_type = other RNA
atgaaaacattcttccacttta

SEQ ID NO: 26345 - RNA, 22 nt, synthetic construct
  source 1..22: mol_type = other RNA
atgaaatcaagtgcatgcaaaa

SEQ ID NO: 26346 - RNA, 22 nt, synthetic construct
  source 1..22: mol_type = other RNA
atgaaatctagtgccacacagt

SEQ ID NO: 26347 - RNA, 22 nt, synthetic construct
  source 1..22: mol_type = other RNA
atgaaatgaatggtgcttactt

SEQ ID NO: 26348 - RNA, 22 nt, synthetic construct
  source 1..22: mol_type = other RNA
atgaagggaagccagaatagtc

SEQ ID NO: 26349 - RNA, 22 nt, synthetic construct
  source 1..22: mol_type = other RNA
atgaatcaagggcagtcccaag

SEQ ID NO: 26350 - RNA, 22 nt, synthetic construct
  source 1..22: mol_type = other RNA
atgaatggtgcttacttcaagc

SEQ ID NO: 26351 - RNA, 22 nt, synthetic construct
  source 1..22: mol_type = other RNA
atgacaagaacattgtattact

SEQ ID NO: 26352 - RNA, 22 nt, synthetic construct
  source 1..22: mol_type = other RNA
atgacatacagactgcagggac

SEQ ID NO: 26353 - RNA, 22 nt, synthetic construct
  source 1..22: mol_type = other RNA
atgacctccaaacaatacactg

SEQ ID NO: 26354 - RNA, 22 nt, synthetic construct
  source 1..22: mol_type = other RNA
atgactgttccattgtgttctg

SEQ ID NO: 26355 - RNA, 22 nt, synthetic construct
  source 1..22: mol_type = other RNA
atgagaaacaaagagcaagaga

SEQ ID NO: 26356 - RNA, 22 nt, synthetic construct
  source 1..22: mol_type = other RNA
atgagcaggaggggaaaagtgc

SEQ ID NO: 26357 - RNA, 22 nt, synthetic construct
  source 1..22: mol_type = other RNA
atgagctctctcaggcagtggg

SEQ ID NO: 26358 - RNA, 22 nt, synthetic construct
  source 1..22: mol_type = other RNA
atgagcttttggtaaatggtct

SEQ ID NO: 26359 - RNA, 22 nt, synthetic construct
  source 1..22: mol_type = other RNA
atgaggcatcactgccatcaat

SEQ ID NO: 26360 - RNA, 22 nt, synthetic construct
  source 1..22: mol_type = other RNA
atgaggcttatgttgcaaaagg

SEQ ID NO: 26361 - RNA, 22 nt, synthetic construct
  source 1..22: mol_type = other RNA
atgagtctcgaactcgcttgat

SEQ ID NO: 26362 - RNA, 22 nt, synthetic construct
  source 1..22: mol_type = other RNA
atgagttgtcctgtgagatcac

SEQ ID NO: 26363 - RNA, 22 nt, synthetic construct
  source 1..22: mol_type = other RNA
atgatcagcaaagagaaggatc

SEQ ID NO: 26364 - RNA, 22 nt, synthetic construct
  source 1..22: mol_type = other RNA
atgatccttctctttgctgatc

SEQ ID NO: 26365 - RNA, 22 nt, synthetic construct
  source 1..22: mol_type = other RNA
atgatgctcttttgctgcacat

SEQ ID NO: 26366 - RNA, 22 nt, synthetic construct
  source 1..22: mol_type = other RNA
atgatgctgataatgccagtaa

SEQ ID NO: 26367 - RNA, 22 nt, synthetic construct
  source 1..22: mol_type = other RNA
atgatttcccatcttgcagatg

SEQ ID NO: 26368 - RNA, 22 nt, synthetic construct
  source 1..22: mol_type = other RNA
atgcaaaatacaggtttcttgt

SEQ ID NO: 26369 - RNA, 22 nt, synthetic construct
  source 1..22: mol_type = other RNA
atgcaaatgtttttcctgtgcc

SEQ ID NO: 26370 - RNA, 22 nt, synthetic construct
  source 1..22: mol_type = other RNA
atgcaagccacatgcctgtatg

SEQ ID NO: 26371 - RNA, 22 nt, synthetic construct
  source 1..22: mol_type = other RNA
atgcaagttttgggtcttgttt

SEQ ID NO: 26372 - RNA, 22 nt, synthetic construct
  source 1..22: mol_type = other RNA
atgcacacagcaccaccagaaa

SEQ ID NO: 26373 - RNA, 22 nt, synthetic construct
  source 1..22: mol_type = other RNA
atgcacaggccaattaaggtgg

SEQ ID NO: 26374 - RNA, 22 nt, synthetic construct
  source 1..22: mol_type = other RNA
atgcacttgatttcatggtctg

SEQ ID NO: 26375 - RNA, 22 nt, synthetic construct
  source 1..22: mol_type = other RNA
atgcagcccttctccgatgctt

SEQ ID NO: 26376 - RNA, 22 nt, synthetic construct
  source 1..22: mol_type = other RNA
atgcagttaaagatttcaccag

SEQ ID NO: 26377 - RNA, 22 nt, synthetic construct
  source 1..22: mol_type = other RNA
atgccaccttagagcagcatgc

SEQ ID NO: 26378 - RNA, 22 nt, synthetic construct
  source 1..22: mol_type = other RNA
atgccagtaaactagctgcaat

SEQ ID NO: 26379 - RNA, 22 nt, synthetic construct
  source 1..22: mol_type = other RNA
atgccattaacagtcaggctac

SEQ ID NO: 26380 - RNA, 22 nt, synthetic construct
  source 1..22: mol_type = other RNA
atgcccatctcctgcagaaaat

SEQ ID NO: 26381 - RNA, 22 nt, synthetic construct
  source 1..22: mol_type = other RNA
atgcctaatggtgctacagttt

SEQ ID NO: 26382 - RNA, 22 nt, synthetic construct
  source 1..22: mol_type = other RNA
atgcctcattacgttttagatg

SEQ ID NO: 26383 - RNA, 22 nt, synthetic construct
  source 1..22: mol_type = other RNA
atgcctggggggctcccaaggc

SEQ ID NO: 26384 - RNA, 22 nt, synthetic construct
  source 1..22: mol_type = other RNA
atgcctgtatgcacacagcacc

SEQ ID NO: 26385 - RNA, 22 nt, synthetic construct
  source 1..22: mol_type = other RNA
atgcgatgggtgagtgatctca

SEQ ID NO: 26386 - RNA, 22 nt, synthetic construct
  source 1..22: mol_type = other RNA
atgctaaatacctgttcctttc

SEQ ID NO: 26387 - RNA, 22 nt, synthetic construct
  source 1..22: mol_type = other RNA
atgctcttttgctgcacattat

SEQ ID NO: 26388 - RNA, 22 nt, synthetic construct
  source 1..22: mol_type = other RNA
atgctgataatgccagtaaact

SEQ ID NO: 26389 - RNA, 22 nt, synthetic construct
  source 1..22: mol_type = other RNA
atgctgatgatgctgataatgc

SEQ ID NO: 26390 - RNA, 22 nt, synthetic construct
  source 1..22: mol_type = other RNA
atgctgctccatggtctcaatg

SEQ ID NO: 26391 - RNA, 22 nt, synthetic construct
  source 1..22: mol_type = other RNA
atgctgctctaaggtggcatct

SEQ ID NO: 26392 - RNA, 22 nt, synthetic construct
  source 1..22: mol_type = other RNA
atgcttgaggtgttctgacatt

SEQ ID NO: 26393 - RNA, 22 nt, synthetic construct
  source 1..22: mol_type = other RNA
atgctttctgaaaggcctcaga

SEQ ID NO: 26394 - RNA, 22 nt, synthetic construct
  source 1..22: mol_type = other RNA
atgcttttgagtgtccttctgg

SEQ ID NO: 26395 - RNA, 22 nt, synthetic construct
  source 1..22: mol_type = other RNA
atggaaaaaggtaactaagcaa

SEQ ID NO: 26396 - RNA, 22 nt, synthetic construct
  source 1..22: mol_type = other RNA
atggaaacacaatctggataat

SEQ ID NO: 26397 - RNA, 22 nt, synthetic construct
  source 1..22: mol_type = other RNA
atggaacaggatagaaccaacc

SEQ ID NO: 26398 - RNA, 22 nt, synthetic construct
  source 1..22: mol_type = other RNA
atggaacagtcattgtccctgc

SEQ ID NO: 26399 - RNA, 22 nt, synthetic construct
  source 1..22: mol_type = other RNA
atggaagcccactgcctgagag

SEQ ID NO: 26400 - RNA, 22 nt, synthetic construct
  source 1..22: mol_type = other RNA
atggaataccctgtatgaaggg

SEQ ID NO: 26401 - RNA, 22 nt, synthetic construct
  source 1..22: mol_type = other RNA
atggacttagtctgttgccctc

SEQ ID NO: 26402 - RNA, 22 nt, synthetic construct
  source 1..22: mol_type = other RNA
atggagaaagacgtaacttcgg

SEQ ID NO: 26403 - RNA, 22 nt, synthetic construct
  source 1..22: mol_type = other RNA
atggagacaccaagtggcactc

SEQ ID NO: 26404 - RNA, 22 nt, synthetic construct
  source 1..22: mol_type = other RNA
atggagcagcatctgaagcagt

SEQ ID NO: 26405 - RNA, 22 nt, synthetic construct
  source 1..22: mol_type = other RNA
atggaggaataaaacgcacagt

SEQ ID NO: 26406 - RNA, 22 nt, synthetic construct
  source 1..22: mol_type = other RNA
atggattaggactctgggaagg

SEQ ID NO: 26407 - RNA, 22 nt, synthetic construct
  source 1..22: mol_type = other RNA
atggattgaattgaaggcccct

SEQ ID NO: 26408 - RNA, 22 nt, synthetic construct
  source 1..22: mol_type = other RNA
atggcaagactcagtttggggt

SEQ ID NO: 26409 - RNA, 22 nt, synthetic construct
  source 1..22: mol_type = other RNA
atggcagtgatgcctcattacg

SEQ ID NO: 26410 - RNA, 22 nt, synthetic construct
  source 1..22: mol_type = other RNA
atggcatttatgtgagatgtgg

SEQ ID NO: 26411 - RNA, 22 nt, synthetic construct
  source 1..22: mol_type = other RNA
atggccccgaagcaagcctgat

SEQ ID NO: 26412 - RNA, 22 nt, synthetic construct
  source 1..22: mol_type = other RNA
atggctcagtctctgaagcctg

SEQ ID NO: 26413 - RNA, 22 nt, synthetic construct
  source 1..22: mol_type = other RNA
atgggaaatcatattgagtctt

SEQ ID NO: 26414 - RNA, 22 nt, synthetic construct
  source 1..22: mol_type = other RNA
atgggactggaggaagtacaga

SEQ ID NO: 26415 - RNA, 22 nt, synthetic construct
  source 1..22: mol_type = other RNA
atgggaggtgatggtatcagga

SEQ ID NO: 26416 - RNA, 22 nt, synthetic construct
  source 1..22: mol_type = other RNA
atgggattccgcttggtgaaaa

SEQ ID NO: 26417 - RNA, 22 nt, synthetic construct
  source 1..22: mol_type = other RNA
atgggcatatctcaaaaactga

SEQ ID NO: 26418 - RNA, 22 nt, synthetic construct
  source 1..22: mol_type = other RNA
atgggtgagtgatctcacagga

SEQ ID NO: 26419 - RNA, 22 nt, synthetic construct
  source 1..22: mol_type = other RNA
atggtaattagcacttttcccc

SEQ ID NO: 26420 - RNA, 22 nt, synthetic construct
  source 1..22: mol_type = other RNA
atggtatcaggaatggacttag

SEQ ID NO: 26421 - RNA, 22 nt, synthetic construct
  source 1..22: mol_type = other RNA
atggtcaaataacgacttggcg

SEQ ID NO: 26422 - RNA, 22 nt, synthetic construct
  source 1..22: mol_type = other RNA
atggtctcaatgatgctctttt

SEQ ID NO: 26423 - RNA, 22 nt, synthetic construct
  source 1..22: mol_type = other RNA
atggtctgactataaggggaat

SEQ ID NO: 26424 - RNA, 22 nt, synthetic construct
  source 1..22: mol_type = other RNA
atggtctgttttggagaagtgc

SEQ ID NO: 26425 - RNA, 22 nt, synthetic construct
  source 1..22: mol_type = other RNA
atggtgaaaatcagtattcaaa

SEQ ID NO: 26426 - RNA, 22 nt, synthetic construct
  source 1..22: mol_type = other RNA
atggtgaactcctggaaaaaac

SEQ ID NO: 26427 - RNA, 22 nt, synthetic construct
  source 1..22: mol_type = other RNA
atggtgctacagtttctgcctc

SEQ ID NO: 26428 - RNA, 22 nt, synthetic construct
  source 1..22: mol_type = other RNA
atggtgcttacttcaagcaaag

SEQ ID NO: 26429 - RNA, 22 nt, synthetic construct
  source 1..22: mol_type = other RNA
atggtggagttttagaagaaca

SEQ ID NO: 26430 - RNA, 22 nt, synthetic construct
  source 1..22: mol_type = other RNA
atggtggtggtggtgtggtagt

SEQ ID NO: 26431 - RNA, 22 nt, synthetic construct
  source 1..22: mol_type = other RNA
atggttatgtatcaagtacctt

SEQ ID NO: 26432 - RNA, 22 nt, synthetic construct
  source 1..22: mol_type = other RNA
atggttggttctatcctgttcc

SEQ ID NO: 26433 - RNA, 22 nt, synthetic construct
  source 1..22: mol_type = other RNA
atggttgtgtttgtgctgcctg

SEQ ID NO: 26434 - RNA, 22 nt, synthetic construct
  source 1..22: mol_type = other RNA
atgtaccaagttgaaatgaatc

SEQ ID NO: 26435 - RNA, 22 nt, synthetic construct
  source 1..22: mol_type = other RNA
atgtatcaagtacctttgctga

SEQ ID NO: 26436 - RNA, 22 nt, synthetic construct
  source 1..22: mol_type = other RNA
atgtatgcagcccttctccgat

SEQ ID NO: 26437 - RNA, 22 nt, synthetic construct
  source 1..22: mol_type = other RNA
atgtcagaacacctcaagcata

SEQ ID NO: 26438 - RNA, 22 nt, synthetic construct
  source 1..22: mol_type = other RNA
atgtcagggccagtcacagttt

SEQ ID NO: 26439 - RNA, 22 nt, synthetic construct
  source 1..22: mol_type = other RNA
atgtcattcctgttcacacaat

SEQ ID NO: 26440 - RNA, 22 nt, synthetic construct
  source 1..22: mol_type = other RNA
atgtccaaatgggactggagga

SEQ ID NO: 26441 - RNA, 22 nt, synthetic construct
  source 1..22: mol_type = other RNA
atgtccccagtgttgaaacagc

SEQ ID NO: 26442 - RNA, 22 nt, synthetic construct
  source 1..22: mol_type = other RNA
atgtctccgatttgagtgataa

SEQ ID NO: 26443 - RNA, 22 nt, synthetic construct
  source 1..22: mol_type = other RNA
atgtctggtcaacaagctgcgc

SEQ ID NO: 26444 - RNA, 22 nt, synthetic construct
  source 1..22: mol_type = other RNA
atgtgaactctgggatggttgt

SEQ ID NO: 26445 - RNA, 22 nt, synthetic construct
  source 1..22: mol_type = other RNA
atgtgagatgtggttttctgca

SEQ ID NO: 26446 - RNA, 22 nt, synthetic construct
  source 1..22: mol_type = other RNA
atgtgatcccaaagcaagatct

SEQ ID NO: 26447 - RNA, 22 nt, synthetic construct
  source 1..22: mol_type = other RNA
atgtgatgcaagttttgggtct

SEQ ID NO: 26448 - RNA, 22 nt, synthetic construct
  source 1..22: mol_type = other RNA
atgtgcagcaaaagagcatcat

SEQ ID NO: 26449 - RNA, 22 nt, synthetic construct
  source 1..22: mol_type = other RNA
atgtgcagtcactgtgtggcac

SEQ ID NO: 26450 - RNA, 22 nt, synthetic construct
  source 1..22: mol_type = other RNA
atgtggcttgcatccaggttcc

SEQ ID NO: 26451 - RNA, 22 nt, synthetic construct
  source 1..22: mol_type = other RNA
atgtggttttctgcaccgcaat

SEQ ID NO: 26452 - RNA, 22 nt, synthetic construct
  source 1..22: mol_type = other RNA
atgtgtagatggattaggactc

SEQ ID NO: 26453 - RNA, 22 nt, synthetic construct
  source 1..22: mol_type = other RNA
atgtgtaggtaagtgccagaaa

SEQ ID NO: 26454 - RNA, 22 nt, synthetic construct
  source 1..22: mol_type = other RNA
atgtgtagtctgttctttattc

SEQ ID NO: 26455 - RNA, 22 nt, synthetic construct
  source 1..22: mol_type = other RNA
atgtgtctcagtacatttctgg

SEQ ID NO: 26456 - RNA, 22 nt, synthetic construct
  source 1..22: mol_type = other RNA
atgtgtgtgttccacggaagag

SEQ ID NO: 26457 - RNA, 22 nt, synthetic construct
  source 1..22: mol_type = other RNA
atgtgttgaaaaactggtgaaa

SEQ ID NO: 26458 - RNA, 22 nt, synthetic construct
  source 1..22: mol_type = other RNA
atgttattttctgcaggagatg

SEQ ID NO: 26459 - RNA, 22 nt, synthetic construct
  source 1..22: mol_type = other RNA
atgttcttgtcatggtaattag

SEQ ID NO: 26460 - RNA, 22 nt, synthetic construct
  source 1..22: mol_type = other RNA
atgttgagggcaacagactaag

SEQ ID NO: 26461 - RNA, 22 nt, synthetic construct
  source 1..22: mol_type = other RNA
atgttgcaaaaggtgtgagttt

SEQ ID NO: 26462 - RNA, 22 nt, synthetic construct
  source 1..22: mol_type = other RNA
atgttggaatttccagtgtatt

SEQ ID NO: 26463 - RNA, 22 nt, synthetic construct
  source 1..22: mol_type = other RNA
atgttggtccactgtaccttgg

SEQ ID NO: 26464 - RNA, 22 nt, synthetic construct
  source 1..22: mol_type = other RNA
atgttttcatggtgaaaatcag

SEQ ID NO: 26465 - RNA, 22 nt, synthetic construct
  source 1..22: mol_type = other RNA
atgttttgttttctggtggtgc

SEQ ID NO: 26466 - RNA, 22 nt, synthetic construct
  source 1..22: mol_type = other RNA
atgtttttcctgtgcctgacca

SEQ ID NO: 26467 - RNA, 22 nt, synthetic construct
  source 1..22: mol_type = other RNA
attaacagtcaggctactaatg

SEQ ID NO: 26468 - RNA, 22 nt, synthetic construct
  source 1..22: mol_type = other RNA
attaaggtggaacctggatgca

SEQ ID NO: 26469 - RNA, 22 nt, synthetic construct
  source 1..22: mol_type = other RNA
attaccatgacaagaacattgt

SEQ ID NO: 26470 - RNA, 22 nt, synthetic construct
  source 1..22: mol_type = other RNA
attacgttttagatgggattcc

SEQ ID NO: 26471 - RNA, 22 nt, synthetic construct
  source 1..22: mol_type = other RNA
attacttaaaaacaaggcagtg

SEQ ID NO: 26472 - RNA, 22 nt, synthetic construct
  source 1..22: mol_type = other RNA
attagcactgccttgtttttaa

SEQ ID NO: 26473 - RNA, 22 nt, synthetic construct
  source 1..22: mol_type = other RNA
attagcacttttcccctcctgc

SEQ ID NO: 26474 - RNA, 22 nt, synthetic construct
  source 1..22: mol_type = other RNA
attagccttttggtcttgtttc

SEQ ID NO: 26475 - RNA, 22 nt, synthetic construct
  source 1..22: mol_type = other RNA
attaggactctgggaaggtggt

SEQ ID NO: 26476 - RNA, 22 nt, synthetic construct
  source 1..22: mol_type = other RNA
attaggcattagcactgccttg

SEQ ID NO: 26477 - RNA, 22 nt, synthetic construct
  source 1..22: mol_type = other RNA
attagtagcctgactgttaatg

SEQ ID NO: 26478 - RNA, 22 nt, synthetic construct
  source 1..22: mol_type = other RNA
attatcacagcttgcaggtgga

SEQ ID NO: 26479 - RNA, 22 nt, synthetic construct
  source 1..22: mol_type = other RNA
attatcagcatcatcagcatca

SEQ ID NO: 26480 - RNA, 22 nt, synthetic construct
  source 1..22: mol_type = other RNA
attatccagattgtgtttccat

SEQ ID NO: 26481 - RNA, 22 nt, synthetic construct
  source 1..22: mol_type = other RNA
attatgagtctcgaactcgctt

SEQ ID NO: 26482 - RNA, 22 nt, synthetic construct
  source 1..22: mol_type = other RNA
attatggaataccctgtatgaa

SEQ ID NO: 26483 - RNA, 22 nt, synthetic construct
  source 1..22: mol_type = other RNA
attattctgaggcctttcagaa

SEQ ID NO: 26484 - RNA, 22 nt, synthetic construct
  source 1..22: mol_type = other RNA
attattgagaacagaagcagct

SEQ ID NO: 26485 - RNA, 22 nt, synthetic construct
  source 1..22: mol_type = other RNA
attcaaaatcaagcgagttcga

SEQ ID NO: 26486 - RNA, 22 nt, synthetic construct
  source 1..22: mol_type = other RNA
attcaagtgctgtttcaacact

SEQ ID NO: 26487 - RNA, 22 nt, synthetic construct
  source 1..22: mol_type = other RNA
attcaatccatcctggtttcag

SEQ ID NO: 26488 - RNA, 22 nt, synthetic construct
  source 1..22: mol_type = other RNA
attcagaatctgaagctctgga

SEQ ID NO: 26489 - RNA, 22 nt, synthetic construct
  source 1..22: mol_type = other RNA
attcagagtgctttttccttct

SEQ ID NO: 26490 - RNA, 22 nt, synthetic construct
  source 1..22: mol_type = other RNA
attcatttcaacttggtacatt

SEQ ID NO: 26491 - RNA, 22 nt, synthetic construct
  source 1..22: mol_type = other RNA
attccaacatgcctggggggct

SEQ ID NO: 26492 - RNA, 22 nt, synthetic construct
  source 1..22: mol_type = other RNA
attccaagtgtttgcaaaatgg

SEQ ID NO: 26493 - RNA, 22 nt, synthetic construct
  source 1..22: mol_type = other RNA
attcccaaactgaaaaacttat

SEQ ID NO: 26494 - RNA, 22 nt, synthetic construct
  source 1..22: mol_type = other RNA
attccccttatagtcagaccat

SEQ ID NO: 26495 - RNA, 22 nt, synthetic construct
  source 1..22: mol_type = other RNA
attccgcacagacctctaactc

SEQ ID NO: 26496 - RNA, 22 nt, synthetic construct
  source 1..22: mol_type = other RNA
attccgcttggtgaaaacgagg

SEQ ID NO: 26497 - RNA, 22 nt, synthetic construct
  source 1..22: mol_type = other RNA
attcctccattttgcaaacact

SEQ ID NO: 26498 - RNA, 22 nt, synthetic construct
  source 1..22: mol_type = other RNA
attcctgataccatcacctccc

SEQ ID NO: 26499 - RNA, 22 nt, synthetic construct
  source 1..22: mol_type = other RNA
attcctgttcacacaattattc

SEQ ID NO: 26500 - RNA, 22 nt, synthetic construct
  source 1..22: mol_type = other RNA
attccttttctgccactaccac

SEQ ID NO: 26501 - RNA, 22 nt, synthetic construct
  source 1..22: mol_type = other RNA
attctctgaaactaggtgtgta

SEQ ID NO: 26502 - RNA, 22 nt, synthetic construct
  source 1..22: mol_type = other RNA
attctcttgcttagttaccttt

SEQ ID NO: 26503 - RNA, 22 nt, synthetic construct
  source 1..22: mol_type = other RNA
attctgaagggtcgagacaagg

SEQ ID NO: 26504 - RNA, 22 nt, synthetic construct
  source 1..22: mol_type = other RNA
attctgaatgagcaggagggga

SEQ ID NO: 26505 - RNA, 22 nt, synthetic construct
  source 1..22: mol_type = other RNA
attctgaggcctttcagaaagc

SEQ ID NO: 26506 - RNA, 22 nt, synthetic construct
  source 1..22: mol_type = other RNA
attctggagctttgtagccaga

SEQ ID NO: 26507 - RNA, 22 nt, synthetic construct
  source 1..22: mol_type = other RNA
attctggcttcccttcatacag

SEQ ID NO: 26508 - RNA, 22 nt, synthetic construct
  source 1..22: mol_type = other RNA
attctgtacttcctccagtccc

SEQ ID NO: 26509 - RNA, 22 nt, synthetic construct
  source 1..22: mol_type = other RNA
attctgttcaggttccagcagc

SEQ ID NO: 26510 - RNA, 22 nt, synthetic construct
  source 1..22: mol_type = other RNA
attcttcaccagacgctagctt

SEQ ID NO: 26511 - RNA, 22 nt, synthetic construct
  source 1..22: mol_type = other RNA
attcttcagtatcaacccaatc

SEQ ID NO: 26512 - RNA, 22 nt, synthetic construct
  source 1..22: mol_type = other RNA
attcttccactttagtctggcc

SEQ ID NO: 26513 - RNA, 22 nt, synthetic construct
  source 1..22: mol_type = other RNA
attctttcttatcactcaaatc

SEQ ID NO: 26514 - RNA, 22 nt, synthetic construct
  source 1..22: mol_type = other RNA
attctttggccagactaaagtg

SEQ ID NO: 26515 - RNA, 22 nt, synthetic construct
  source 1..22: mol_type = other RNA
attgaaacaagaccaaaaggct

SEQ ID NO: 26516 - RNA, 22 nt, synthetic construct
  source 1..22: mol_type = other RNA
attgaaggcccctcgttttcac

SEQ ID NO: 26517 - RNA, 22 nt, synthetic construct
  source 1..22: mol_type = other RNA
attgaattgaaggcccctcgtt

SEQ ID NO: 26518 - RNA, 22 nt, synthetic construct
  source 1..22: mol_type = other RNA
attgagaacagaagcagctgtt

SEQ ID NO: 26519 - RNA, 22 nt, synthetic construct
  source 1..22: mol_type = other RNA
attgagacagtgttttttccag

SEQ ID NO: 26520 - RNA, 22 nt, synthetic construct
  source 1..22: mol_type = other RNA
attgagaccatggagcagcatc

SEQ ID NO: 26521 - RNA, 22 nt, synthetic construct
  source 1..22: mol_type = other RNA
attgagtcttgacaggtgtatc

SEQ ID NO: 26522 - RNA, 22 nt, synthetic construct
  source 1..22: mol_type = other RNA
attgatctgccctgaggtatgc

SEQ ID NO: 26523 - RNA, 22 nt, synthetic construct
  source 1..22: mol_type = other RNA
attgatggcagtgatgcctcat

SEQ ID NO: 26524 - RNA, 22 nt, synthetic construct
  source 1..22: mol_type = other RNA
attgcagctagtttactggcat

SEQ ID NO: 26525 - RNA, 22 nt, synthetic construct
  source 1..22: mol_type = other RNA
attgcatgtgatgcaagttttg

SEQ ID NO: 26526 - RNA, 22 nt, synthetic construct
  source 1..22: mol_type = other RNA
attgcggtgcagaaaaccacat

SEQ ID NO: 26527 - RNA, 22 nt, synthetic construct
  source 1..22: mol_type = other RNA
attgctgctggaacctgaacag

SEQ ID NO: 26528 - RNA, 22 nt, synthetic construct
  source 1..22: mol_type = other RNA
attgcttctttctccccctcct

SEQ ID NO: 26529 - RNA, 22 nt, synthetic construct
  source 1..22: mol_type = other RNA
attggagagattgggttgatac

SEQ ID NO: 26530 - RNA, 22 nt, synthetic construct
  source 1..22: mol_type = other RNA
attggatacacctgtcaagact

SEQ ID NO: 26531 - RNA, 22 nt, synthetic construct
  source 1..22: mol_type = other RNA
attggcctgtgcatctgactat

SEQ ID NO: 26532 - RNA, 22 nt, synthetic construct
  source 1..22: mol_type = other RNA
attgggttgatactgaagaatt

SEQ ID NO: 26533 - RNA, 22 nt, synthetic construct
  source 1..22: mol_type = other RNA
attggtcttgttttctcagaac

SEQ ID NO: 26534 - RNA, 22 nt, synthetic construct
  source 1..22: mol_type = other RNA
attggtgggttatgcttgaggt

SEQ ID NO: 26535 - RNA, 22 nt, synthetic construct
  source 1..22: mol_type = other RNA
attgtccctgcagtctgtatgt

SEQ ID NO: 26536 - RNA, 22 nt, synthetic construct
  source 1..22: mol_type = other RNA
attgtgatggtggtggtggtgt

SEQ ID NO: 26537 - RNA, 22 nt, synthetic construct
  source 1..22: mol_type = other RNA
attgtgtgaacaggaatgacat

SEQ ID NO: 26538 - RNA, 22 nt, synthetic construct
  source 1..22: mol_type = other RNA
attgtgttctgagaaaacaaga

SEQ ID NO: 26539 - RNA, 22 nt, synthetic construct
  source 1..22: mol_type = other RNA
attgtgtttccattgcggtgca

SEQ ID NO: 26540 - RNA, 22 nt, synthetic construct
  source 1..22: mol_type = other RNA
attgttgctttgggggtgagga

SEQ ID NO: 26541 - RNA, 22 nt, synthetic construct
  source 1..22: mol_type = other RNA
attgtttgaacaagaaacctgt

SEQ ID NO: 26542 - RNA, 22 nt, synthetic construct
  source 1..22: mol_type = other RNA
attgtttggaggtcatttgatt

SEQ ID NO: 26543 - RNA, 22 nt, synthetic construct
  source 1..22: mol_type = other RNA
atttaccaaaagctcatgtgca

SEQ ID NO: 26544 - RNA, 22 nt, synthetic construct
  source 1..22: mol_type = other RNA
atttacttctggatgagctctc

SEQ ID NO: 26545 - RNA, 22 nt, synthetic construct
  source 1..22: mol_type = other RNA
atttagcattgcagctagttta

SEQ ID NO: 26546 - RNA, 22 nt, synthetic construct
  source 1..22: mol_type = other RNA
atttatattctgtacttcctcc

SEQ ID NO: 26547 - RNA, 22 nt, synthetic construct
  source 1..22: mol_type = other RNA
atttatgtgagatgtggttttc

SEQ ID NO: 26548 - RNA, 22 nt, synthetic construct
  source 1..22: mol_type = other RNA
atttattggatacacctgtcaa

SEQ ID NO: 26549 - RNA, 22 nt, synthetic construct
  source 1..22: mol_type = other RNA
atttcaacttggtacatttgtg

SEQ ID NO: 26550 - RNA, 22 nt, synthetic construct
  source 1..22: mol_type = other RNA
atttcaacttttacttgcttct

SEQ ID NO: 26551 - RNA, 22 nt, synthetic construct
  source 1..22: mol_type = other RNA
atttcaccagtttttcaacaca

SEQ ID NO: 26552 - RNA, 22 nt, synthetic construct
  source 1..22: mol_type = other RNA
atttcatggtctgactataagg

SEQ ID NO: 26553 - RNA, 22 nt, synthetic construct
  source 1..22: mol_type = other RNA
atttcattttcaacaaagagca

SEQ ID NO: 26554 - RNA, 22 nt, synthetic construct
  source 1..22: mol_type = other RNA
atttccagtgtattgtttggag

SEQ ID NO: 26555 - RNA, 22 nt, synthetic construct
  source 1..22: mol_type = other RNA
atttcccatcttgcagatgtgt

SEQ ID NO: 26556 - RNA, 22 nt, synthetic construct
  source 1..22: mol_type = other RNA
atttctggcacttacctacaca

SEQ ID NO: 26557 - RNA, 22 nt, synthetic construct
  source 1..22: mol_type = other RNA
atttcttgatctgaaggagccc

SEQ ID NO: 26558 - RNA, 22 nt, synthetic construct
  source 1..22: mol_type = other RNA
atttctttcttggcttaccccg

SEQ ID NO: 26559 - RNA, 22 nt, synthetic construct
  source 1..22: mol_type = other RNA
atttgaccataaggctcttact

SEQ ID NO: 26560 - RNA, 22 nt, synthetic construct
  source 1..22: mol_type = other RNA
atttgagagtaagagccttatg

SEQ ID NO: 26561 - RNA, 22 nt, synthetic construct
  source 1..22: mol_type = other RNA
atttgagtgataagaaagaatc

SEQ ID NO: 26562 - RNA, 22 nt, synthetic construct
  source 1..22: mol_type = other RNA
atttgattggagagattgggtt

SEQ ID NO: 26563 - RNA, 22 nt, synthetic construct
  source 1..22: mol_type = other RNA
atttgcaagctcctggtggcag

SEQ ID NO: 26564 - RNA, 22 nt, synthetic construct
  source 1..22: mol_type = other RNA
atttgcatggttatgtatcaag

SEQ ID NO: 26565 - RNA, 22 nt, synthetic construct
  source 1..22: mol_type = other RNA
atttgccagacagaacctctgg

SEQ ID NO: 26566 - RNA, 22 nt, synthetic construct
  source 1..22: mol_type = other RNA
atttggaaaatattgcatgtga

SEQ ID NO: 26567 - RNA, 22 nt, synthetic construct
  source 1..22: mol_type = other RNA
atttggaaggtgactctataaa

SEQ ID NO: 26568 - RNA, 22 nt, synthetic construct
  source 1..22: mol_type = other RNA
atttggacattatgagtctcga

SEQ ID NO: 26569 - RNA, 22 nt, synthetic construct
  source 1..22: mol_type = other RNA
atttggttgactgctttcacct

SEQ ID NO: 26570 - RNA, 22 nt, synthetic construct
  source 1..22: mol_type = other RNA
atttgtaatttttgctgctgtt

SEQ ID NO: 26571 - RNA, 22 nt, synthetic construct
  source 1..22: mol_type = other RNA
atttgtgacttgtgctccagct

SEQ ID NO: 26572 - RNA, 22 nt, synthetic construct
  source 1..22: mol_type = other RNA
attttatagagtcaccttccaa

SEQ ID NO: 26573 - RNA, 22 nt, synthetic construct
  source 1..22: mol_type = other RNA
attttcaaactcacaccttttg

SEQ ID NO: 26574 - RNA, 22 nt, synthetic construct
  source 1..22: mol_type = other RNA
attttcaacaaagagcagattc

SEQ ID NO: 26575 - RNA, 22 nt, synthetic construct
  source 1..22: mol_type = other RNA
attttcaccatgaaaacattct

SEQ ID NO: 26576 - RNA, 22 nt, synthetic construct
  source 1..22: mol_type = other RNA
attttcacttcccttaaaagtg

SEQ ID NO: 26577 - RNA, 22 nt, synthetic construct
  source 1..22: mol_type = other RNA
attttcaggcccactgcagtta

SEQ ID NO: 26578 - RNA, 22 nt, synthetic construct
  source 1..22: mol_type = other RNA
attttccaaataatgtgatccc

SEQ ID NO: 26579 - RNA, 22 nt, synthetic construct
  source 1..22: mol_type = other RNA
attttctgcaggagatgggcat

SEQ ID NO: 26580 - RNA, 22 nt, synthetic construct
  source 1..22: mol_type = other RNA
attttcttgggctacagaactc

SEQ ID NO: 26581 - RNA, 22 nt, synthetic construct
  source 1..22: mol_type = other RNA
attttgaatactgattttcacc

SEQ ID NO: 26582 - RNA, 22 nt, synthetic construct
  source 1..22: mol_type = other RNA
attttgcaaacacttggaatac

SEQ ID NO: 26583 - RNA, 22 nt, synthetic construct
  source 1..22: mol_type = other RNA
attttgcatgcacttgatttca

SEQ ID NO: 26584 - RNA, 22 nt, synthetic construct
  source 1..22: mol_type = other RNA
atttttatatccctgtagaact

SEQ ID NO: 26585 - RNA, 22 nt, synthetic construct
  source 1..22: mol_type = other RNA
atttttgctgctgttgctggtt

SEQ ID NO: 26586 - RNA, 22 nt, synthetic construct
  source 1..22: mol_type = other RNA
atttttggtagcagtggagagc

SEQ ID NO: 26587 - RNA, 22 nt, synthetic construct
  source 1..22: mol_type = other RNA
atttttgttgttgtagttgttc

SEQ ID NO: 26588 - RNA, 22 nt, synthetic construct
  source 1..22: mol_type = other RNA
caaaaaccctcacaccaggtgc

SEQ ID NO: 26589 - RNA, 22 nt, synthetic construct
  source 1..22: mol_type = other RNA
caaaaactgatttttgttgttg

SEQ ID NO: 26590 - RNA, 22 nt, synthetic construct
  source 1..22: mol_type = other RNA
caaaaagttcaggatgtgtagt

SEQ ID NO: 26591 - RNA, 22 nt, synthetic construct
  source 1..22: mol_type = other RNA
caaaaattggtgggttatgctt

SEQ ID NO: 26592 - RNA, 22 nt, synthetic construct
  source 1..22: mol_type = other RNA
caaaacagaccatttaccaaaa

SEQ ID NO: 26593 - RNA, 22 nt, synthetic construct
  source 1..22: mol_type = other RNA
caaaacatggaaaaaggtaact

SEQ ID NO: 26594 - RNA, 22 nt, synthetic construct
  source 1..22: mol_type = other RNA
caaaaccagcaacagcagcaaa

SEQ ID NO: 26595 - RNA, 22 nt, synthetic construct
  source 1..22: mol_type = other RNA
caaaactgtgactggccctgac

SEQ ID NO: 26596 - RNA, 22 nt, synthetic construct
  source 1..22: mol_type = other RNA
caaaacttgcatcacatgcaat

SEQ ID NO: 26597 - RNA, 22 nt, synthetic construct
  source 1..22: mol_type = other RNA
caaaagaacagctgcttctgtt

SEQ ID NO: 26598 - RNA, 22 nt, synthetic construct
  source 1..22: mol_type = other RNA
caaaagagcatcattgagacca

SEQ ID NO: 26599 - RNA, 22 nt, synthetic construct
  source 1..22: mol_type = other RNA
caaaagcatgctgctctaaggt

SEQ ID NO: 26600 - RNA, 22 nt, synthetic construct
  source 1..22: mol_type = other RNA
caaaagctcatgtgcagtcact

SEQ ID NO: 26601 - RNA, 22 nt, synthetic construct
  source 1..22: mol_type = other RNA
caaaaggctaatggagaaagac

SEQ ID NO: 26602 - RNA, 22 nt, synthetic construct
  source 1..22: mol_type = other RNA
caaaaggtgtgagtttgaaaat

SEQ ID NO: 26603 - RNA, 22 nt, synthetic construct
  source 1..22: mol_type = other RNA
caaaagttattatggaataccc

SEQ ID NO: 26604 - RNA, 22 nt, synthetic construct
  source 1..22: mol_type = other RNA
caaaatacaggtttcttgttca

SEQ ID NO: 26605 - RNA, 22 nt, synthetic construct
  source 1..22: mol_type = other RNA
caaaatcaagcgagttcgagac

SEQ ID NO: 26606 - RNA, 22 nt, synthetic construct
  source 1..22: mol_type = other RNA
caaaatgaaatgaatggtgctt

SEQ ID NO: 26607 - RNA, 22 nt, synthetic construct
  source 1..22: mol_type = other RNA
caaaatggaggaataaaacgca

SEQ ID NO: 26608 - RNA, 22 nt, synthetic construct
  source 1..22: mol_type = other RNA
caaacaacttcttcagaaaaga

SEQ ID NO: 26609 - RNA, 22 nt, synthetic construct
  source 1..22: mol_type = other RNA
caaacaatacacacctagtttc

SEQ ID NO: 26610 - RNA, 22 nt, synthetic construct
  source 1..22: mol_type = other RNA
caaacaatacactggaaattcc

SEQ ID NO: 26611 - RNA, 22 nt, synthetic construct
  source 1..22: mol_type = other RNA
caaacacaaccatcccagagtt

SEQ ID NO: 26612 - RNA, 22 nt, synthetic construct
  source 1..22: mol_type = other RNA
caaacacagcaaccccaaactg

SEQ ID NO: 26613 - RNA, 22 nt, synthetic construct
  source 1..22: mol_type = other RNA
caaacacgagatcttgtgcccc

SEQ ID NO: 26614 - RNA, 22 nt, synthetic construct
  source 1..22: mol_type = other RNA
caaacacttggaataccctcta

SEQ ID NO: 26615 - RNA, 22 nt, synthetic construct
  source 1..22: mol_type = other RNA
caaaccactgctgcagaacttg

SEQ ID NO: 26616 - RNA, 22 nt, synthetic construct
  source 1..22: mol_type = other RNA
caaactcacaccttttgcaaca

SEQ ID NO: 26617 - RNA, 22 nt, synthetic construct
  source 1..22: mol_type = other RNA
caaactgaaaaacttatgtccc

SEQ ID NO: 26618 - RNA, 22 nt, synthetic construct
  source 1..22: mol_type = other RNA
caaactgagtcttgccatagtc

SEQ ID NO: 26619 - RNA, 22 nt, synthetic construct
  source 1..22: mol_type = other RNA
caaagaatgatccttctctttg

SEQ ID NO: 26620 - RNA, 22 nt, synthetic construct
  source 1..22: mol_type = other RNA
caaagagaaggatcattctttg

SEQ ID NO: 26621 - RNA, 22 nt, synthetic construct
  source 1..22: mol_type = other RNA
caaagagcaagagattctgaag

SEQ ID NO: 26622 - RNA, 22 nt, synthetic construct
  source 1..22: mol_type = other RNA
caaagagcagattcccaaactg

SEQ ID NO: 26623 - RNA, 22 nt, synthetic construct
  source 1..22: mol_type = other RNA
caaagcaacaatgatcagcaaa

SEQ ID NO: 26624 - RNA, 22 nt, synthetic construct
  source 1..22: mol_type = other RNA
caaagcaagatcttcttcacag

SEQ ID NO: 26625 - RNA, 22 nt, synthetic construct
  source 1..22: mol_type = other RNA
caaagccagctgcagtggtgag

SEQ ID NO: 26626 - RNA, 22 nt, synthetic construct
  source 1..22: mol_type = other RNA
caaagctagcgtctggtgaaga

SEQ ID NO: 26627 - RNA, 22 nt, synthetic construct
  source 1..22: mol_type = other RNA
caaagctcagtgttcactaagg

SEQ ID NO: 26628 - RNA, 22 nt, synthetic construct
  source 1..22: mol_type = other RNA
caaagctccagaatggaagccc

SEQ ID NO: 26629 - RNA, 22 nt, synthetic construct
  source 1..22: mol_type = other RNA
caaaggtacttgatacataacc

SEQ ID NO: 26630 - RNA, 22 nt, synthetic construct
  source 1..22: mol_type = other RNA
caaagtaacacaacacttttaa

SEQ ID NO: 26631 - RNA, 22 nt, synthetic construct
  source 1..22: mol_type = other RNA
caaataacgacttggcgtgaaa

SEQ ID NO: 26632 - RNA, 22 nt, synthetic construct
  source 1..22: mol_type = other RNA
caaataatgtgatcccaaagca

SEQ ID NO: 26633 - RNA, 22 nt, synthetic construct
  source 1..22: mol_type = other RNA
caaatcacagaagcaagtaaaa

SEQ ID NO: 26634 - RNA, 22 nt, synthetic construct
  source 1..22: mol_type = other RNA
caaatcggagacatttggttga

SEQ ID NO: 26635 - RNA, 22 nt, synthetic construct
  source 1..22: mol_type = other RNA
caaatgacctccaaacaataca

SEQ ID NO: 26636 - RNA, 22 nt, synthetic construct
  source 1..22: mol_type = other RNA
caaatgggactggaggaagtac

SEQ ID NO: 26637 - RNA, 22 nt, synthetic construct
  source 1..22: mol_type = other RNA
caaatgggaggtgatggtatca

SEQ ID NO: 26638 - RNA, 22 nt, synthetic construct
  source 1..22: mol_type = other RNA
caaatgtaccaagttgaaatga

SEQ ID NO: 26639 - RNA, 22 nt, synthetic construct
  source 1..22: mol_type = other RNA
caaatgtctccgatttgagtga

SEQ ID NO: 26640 - RNA, 22 nt, synthetic construct
  source 1..22: mol_type = other RNA
caaatgtttttcctgtgcctga

SEQ ID NO: 26641 - RNA, 22 nt, synthetic construct
  source 1..22: mol_type = other RNA
caaattactagatactcctata

SEQ ID NO: 26642 - RNA, 22 nt, synthetic construct
  source 1..22: mol_type = other RNA
caaattgctgctggaacctgaa

SEQ ID NO: 26643 - RNA, 22 nt, synthetic construct
  source 1..22: mol_type = other RNA
caacaaaaatcagtttttgaga

SEQ ID NO: 26644 - RNA, 22 nt, synthetic construct
  source 1..22: mol_type = other RNA
caacaaagagcagattcccaaa

SEQ ID NO: 26645 - RNA, 22 nt, synthetic construct
  source 1..22: mol_type = other RNA
caacaacaaaaatcagtttttg

SEQ ID NO: 26646 - RNA, 22 nt, synthetic construct
  source 1..22: mol_type = other RNA
caacaagctgcgcaacttgctc

SEQ ID NO: 26647 - RNA, 22 nt, synthetic construct
  source 1..22: mol_type = other RNA
caacaagcttcagttctacagg

SEQ ID NO: 26648 - RNA, 22 nt, synthetic construct
  source 1..22: mol_type = other RNA
caacaatgatcagcaaagagaa

SEQ ID NO: 26649 - RNA, 22 nt, synthetic construct
  source 1..22: mol_type = other RNA
caacacagcactatctgaaacc

SEQ ID NO: 26650 - RNA, 22 nt, synthetic construct
  source 1..22: mol_type = other RNA
caacacagctggagcacaagtc

SEQ ID NO: 26651 - RNA, 22 nt, synthetic construct
  source 1..22: mol_type = other RNA
caacacataactgcagtgggcc

SEQ ID NO: 26652 - RNA, 22 nt, synthetic construct
  source 1..22: mol_type = other RNA
caacactggggacataagtttt

SEQ ID NO: 26653 - RNA, 22 nt, synthetic construct
  source 1..22: mol_type = other RNA
caacacttttaagggaagtgaa

SEQ ID NO: 26654 - RNA, 22 nt, synthetic construct
  source 1..22: mol_type = other RNA
caacagactaagtccattcctg

SEQ ID NO: 26655 - RNA, 22 nt, synthetic construct
  source 1..22: mol_type = other RNA
caacagcagcaaaaattacaaa

SEQ ID NO: 26656 - RNA, 22 nt, synthetic construct
  source 1..22: mol_type = other RNA
caacaggcttcagagactgagc

SEQ ID NO: 26657 - RNA, 22 nt, synthetic construct
  source 1..22: mol_type = other RNA
caacataagcctcataaacagg

SEQ ID NO: 26658 - RNA, 22 nt, synthetic construct
  source 1..22: mol_type = other RNA
caacatctccagttccaaaaac

SEQ ID NO: 26659 - RNA, 22 nt, synthetic construct
  source 1..22: mol_type = other RNA
caacatgcctggggggctccca

SEQ ID NO: 26660 - RNA, 22 nt, synthetic construct
  source 1..22: mol_type = other RNA
caacatggttggttctatcctg

SEQ ID NO: 26661 - RNA, 22 nt, synthetic construct
  source 1..22: mol_type = other RNA
caaccaaaagaacagctgcttc

SEQ ID NO: 26662 - RNA, 22 nt, synthetic construct
  source 1..22: mol_type = other RNA
caaccaaagtaacacaacactt

SEQ ID NO: 26663 - RNA, 22 nt, synthetic construct
  source 1..22: mol_type = other RNA
caaccaaatgtctccgatttga

SEQ ID NO: 26664 - RNA, 22 nt, synthetic construct
  source 1..22: mol_type = other RNA
caaccatcccagagttcacatc

SEQ ID NO: 26665 - RNA, 22 nt, synthetic construct
  source 1..22: mol_type = other RNA
caaccatgttgagggcaacaga

SEQ ID NO: 26666 - RNA, 22 nt, synthetic construct
  source 1..22: mol_type = other RNA
caacccaatctctccaatcaaa

SEQ ID NO: 26667 - RNA, 22 nt, synthetic construct
  source 1..22: mol_type = other RNA
caaccccaaactgagtcttgcc

SEQ ID NO: 26668 - RNA, 22 nt, synthetic construct
  source 1..22: mol_type = other RNA
caactacaacaacaaaaatcag

SEQ ID NO: 26669 - RNA, 22 nt, synthetic construct
  source 1..22: mol_type = other RNA
caactcattagtagcctgactg

SEQ ID NO: 26670 - RNA, 22 nt, synthetic construct
  source 1..22: mol_type = other RNA
caactgccagcagttgatgaga

SEQ ID NO: 26671 - RNA, 22 nt, synthetic construct
  source 1..22: mol_type = other RNA
caactgctggcagttgtcctgt

SEQ ID NO: 26672 - RNA, 22 nt, synthetic construct
  source 1..22: mol_type = other RNA
caacttcttcagaaaagacacc

SEQ ID NO: 26673 - RNA, 22 nt, synthetic construct
  source 1..22: mol_type = other RNA
caacttgctcagcaaaggtact

SEQ ID NO: 26674 - RNA, 22 nt, synthetic construct
  source 1..22: mol_type = other RNA
caacttggtacatttgtgactt

SEQ ID NO: 26675 - RNA, 22 nt, synthetic construct
  source 1..22: mol_type = other RNA
caacttttacttgcttctgtga

SEQ ID NO: 26676 - RNA, 22 nt, synthetic construct
  source 1..22: mol_type = other RNA
caagaaaatgcagttaaagatt

SEQ ID NO: 26677 - RNA, 22 nt, synthetic construct
  source 1..22: mol_type = other RNA
caagaaacctgtattttgcatg

SEQ ID NO: 26678 - RNA, 22 nt, synthetic construct
  source 1..22: mol_type = other RNA
caagaaagaaatccaggtgaaa

SEQ ID NO: 26679 - RNA, 22 nt, synthetic construct
  source 1..22: mol_type = other RNA
caagaaagtagagggtattcca

SEQ ID NO: 26680 - RNA, 22 nt, synthetic construct
  source 1..22: mol_type = other RNA
caagaaattgaaacaagaccaa

SEQ ID NO: 26681 - RNA, 22 nt, synthetic construct
  source 1..22: mol_type = other RNA
caagaacagcagcaaacacagc

SEQ ID NO: 26682 - RNA, 22 nt, synthetic construct
  source 1..22: mol_type = other RNA
caagaacaggagcagaagtcac

SEQ ID NO: 26683 - RNA, 22 nt, synthetic construct
  source 1..22: mol_type = other RNA
caagaccaaaaggctaatggag

SEQ ID NO: 26684 - RNA, 22 nt, synthetic construct
  source 1..22: mol_type = other RNA
caagaccaatgtcagaacacct

SEQ ID NO: 26685 - RNA, 22 nt, synthetic construct
  source 1..22: mol_type = other RNA
caagacccaaaacttgcatcac

SEQ ID NO: 26686 - RNA, 22 nt, synthetic construct
  source 1..22: mol_type = other RNA
caagactcaatatgatttccca

SEQ ID NO: 26687 - RNA, 22 nt, synthetic construct
  source 1..22: mol_type = other RNA
caagactcagtttggggttgct

SEQ ID NO: 26688 - RNA, 22 nt, synthetic construct
  source 1..22: mol_type = other RNA
caagagaatccacctgcaagct

SEQ ID NO: 26689 - RNA, 22 nt, synthetic construct
  source 1..22: mol_type = other RNA
caagagattctgaagggtcgag

SEQ ID NO: 26690 - RNA, 22 nt, synthetic construct
  source 1..22: mol_type = other RNA
caagatatgtctggtcaacaag

SEQ ID NO: 26691 - RNA, 22 nt, synthetic construct
  source 1..22: mol_type = other RNA
caagatctcgtgtttgctcctt

SEQ ID NO: 26692 - RNA, 22 nt, synthetic construct
  source 1..22: mol_type = other RNA
caagatcttcttcacaggtgct

SEQ ID NO: 26693 - RNA, 22 nt, synthetic construct
  source 1..22: mol_type = other RNA
caagatgggaaatcatattgag

SEQ ID NO: 26694 - RNA, 22 nt, synthetic construct
  source 1..22: mol_type = other RNA
caagcaaagctcagtgttcact

SEQ ID NO: 26695 - RNA, 22 nt, synthetic construct
  source 1..22: mol_type = other RNA
caagcataacccaccaattttt

SEQ ID NO: 26696 - RNA, 22 nt, synthetic construct
  source 1..22: mol_type = other RNA
caagccacatgcctgtatgcac

SEQ ID NO: 26697 - RNA, 22 nt, synthetic construct
  source 1..22: mol_type = other RNA
caagcctgatggaacaggatag

SEQ ID NO: 26698 - RNA, 22 nt, synthetic construct
  source 1..22: mol_type = other RNA
caagcgagttcgagactcataa

SEQ ID NO: 26699 - RNA, 22 nt, synthetic construct
  source 1..22: mol_type = other RNA
caagcggaatcccatctaaaac

SEQ ID NO: 26700 - RNA, 22 nt, synthetic construct
  source 1..22: mol_type = other RNA
caagctcctggtggcagctctg

SEQ ID NO: 26701 - RNA, 22 nt, synthetic construct
  source 1..22: mol_type = other RNA
caagctgcgcaacttgctcagc

SEQ ID NO: 26702 - RNA, 22 nt, synthetic construct
  source 1..22: mol_type = other RNA
caagctgtgataatgtgcagca

SEQ ID NO: 26703 - RNA, 22 nt, synthetic construct
  source 1..22: mol_type = other RNA
caagcttacacccagaaaacaa

SEQ ID NO: 26704 - RNA, 22 nt, synthetic construct
  source 1..22: mol_type = other RNA
caagcttcagttctacagggat

SEQ ID NO: 26705 - RNA, 22 nt, synthetic construct
  source 1..22: mol_type = other RNA
caaggagcaaacacgagatctt

SEQ ID NO: 26706 - RNA, 22 nt, synthetic construct
  source 1..22: mol_type = other RNA
caaggcaagcttacacccagaa

SEQ ID NO: 26707 - RNA, 22 nt, synthetic construct
  source 1..22: mol_type = other RNA
caaggcagtgctaatgcctaat

SEQ ID NO: 26708 - RNA, 22 nt, synthetic construct
  source 1..22: mol_type = other RNA
caagggcagtcccaaggtacag

SEQ ID NO: 26709 - RNA, 22 nt, synthetic construct
  source 1..22: mol_type = other RNA
caaggtacagtggaccaacatc

SEQ ID NO: 26710 - RNA, 22 nt, synthetic construct
  source 1..22: mol_type = other RNA
caagtaaaagttgaaatgtcag

SEQ ID NO: 26711 - RNA, 22 nt, synthetic construct
  source 1..22: mol_type = other RNA
caagtacctttgctgagcaagt

SEQ ID NO: 26712 - RNA, 22 nt, synthetic construct
  source 1..22: mol_type = other RNA
caagtcacaaatgtaccaagtt

SEQ ID NO: 26713 - RNA, 22 nt, synthetic construct
  source 1..22: mol_type = other RNA
caagtcgttatttgaccataag

SEQ ID NO: 26714 - RNA, 22 nt, synthetic construct
  source 1..22: mol_type = other RNA
caagtgcatgcaaaatacaggt

SEQ ID NO: 26715 - RNA, 22 nt, synthetic construct
  source 1..22: mol_type = other RNA
caagtgctgtttcaacactggg

SEQ ID NO: 26716 - RNA, 22 nt, synthetic construct
  source 1..22: mol_type = other RNA
caagtggcactctttcaaaagt

SEQ ID NO: 26717 - RNA, 22 nt, synthetic construct
  source 1..22: mol_type = other RNA
caagtgtttgcaaaatggagga

SEQ ID NO: 26718 - RNA, 22 nt, synthetic construct
  source 1..22: mol_type = other RNA
caagttctgcagcagtggtttg

SEQ ID NO: 26719 - RNA, 22 nt, synthetic construct
  source 1..22: mol_type = other RNA
caagttgaaatgaatcaagggc

SEQ ID NO: 26720 - RNA, 22 nt, synthetic construct
  source 1..22: mol_type = other RNA
caagttgcgcagcttgttgacc

SEQ ID NO: 26721 - RNA, 22 nt, synthetic construct
  source 1..22: mol_type = other RNA
caagttttgggtcttgtttcct

SEQ ID NO: 26722 - RNA, 22 nt, synthetic construct
  source 1..22: mol_type = other RNA
caataattttatagagtcacct

SEQ ID NO: 26723 - RNA, 22 nt, synthetic construct
  source 1..22: mol_type = other RNA
caatacacacctagtttcagag

SEQ ID NO: 26724 - RNA, 22 nt, synthetic construct
  source 1..22: mol_type = other RNA
caatacactggaaattccaaca

SEQ ID NO: 26725 - RNA, 22 nt, synthetic construct
  source 1..22: mol_type = other RNA
caatatgatttcccatcttgca

SEQ ID NO: 26726 - RNA, 22 nt, synthetic construct
  source 1..22: mol_type = other RNA
caatattatccagattgtgttt

SEQ ID NO: 26727 - RNA, 22 nt, synthetic construct
  source 1..22: mol_type = other RNA
caatcaaatgacctccaaacaa

SEQ ID NO: 26728 - RNA, 22 nt, synthetic construct
  source 1..22: mol_type = other RNA
caatccatcctggtttcagata

SEQ ID NO: 26729 - RNA, 22 nt, synthetic construct
  source 1..22: mol_type = other RNA
caatctctccaatcaaatgacc

SEQ ID NO: 26730 - RNA, 22 nt, synthetic construct
  source 1..22: mol_type = other RNA
caatctggataatattgagaca

SEQ ID NO: 26731 - RNA, 22 nt, synthetic construct
  source 1..22: mol_type = other RNA
caatgactgttccattgtgttc

SEQ ID NO: 26732 - RNA, 22 nt, synthetic construct
  source 1..22: mol_type = other RNA
caatgatcagcaaagagaagga

SEQ ID NO: 26733 - RNA, 22 nt, synthetic construct
  source 1..22: mol_type = other RNA
caatgatgctcttttgctgcac

SEQ ID NO: 26734 - RNA, 22 nt, synthetic construct
  source 1..22: mol_type = other RNA
caatgctaaatacctgttcctt

SEQ ID NO: 26735 - RNA, 22 nt, synthetic construct
  source 1..22: mol_type = other RNA
caatggaaacacaatctggata

SEQ ID NO: 26736 - RNA, 22 nt, synthetic construct
  source 1..22: mol_type = other RNA
caatggaacagtcattgtccct

SEQ ID NO: 26737 - RNA, 22 nt, synthetic construct
  source 1..22: mol_type = other RNA
caatgtcagaacacctcaagca

SEQ ID NO: 26738 - RNA, 22 nt, synthetic construct
  source 1..22: mol_type = other RNA
caatgttcttgtcatggtaatt

SEQ ID NO: 26739 - RNA, 22 nt, synthetic construct
  source 1..22: mol_type = other RNA
caattaaggtggaacctggatg

SEQ ID NO: 26740 - RNA, 22 nt, synthetic construct
  source 1..22: mol_type = other RNA
caattattctgaggcctttcag

SEQ ID NO: 26741 - RNA, 22 nt, synthetic construct
  source 1..22: mol_type = other RNA
caattcaatccatcctggtttc

SEQ ID NO: 26742 - RNA, 22 nt, synthetic construct
  source 1..22: mol_type = other RNA
caattccgcacagacctctaac

SEQ ID NO: 26743 - RNA, 22 nt, synthetic construct
  source 1..22: mol_type = other RNA
caattcttcagtatcaacccaa

SEQ ID NO: 26744 - RNA, 22 nt, synthetic construct
  source 1..22: mol_type = other RNA
caattgcttctttctccccctc

SEQ ID NO: 26745 - RNA, 22 nt, synthetic construct
  source 1..22: mol_type = other RNA
caattgtgatggtggtggtggt

SEQ ID NO: 26746 - RNA, 22 nt, synthetic construct
  source 1..22: mol_type = other RNA
caatttcttgatctgaaggagc

SEQ ID NO: 26747 - RNA, 22 nt, synthetic construct
  source 1..22: mol_type = other RNA
caatttgcaagctcctggtggc

SEQ ID NO: 26748 - RNA, 22 nt, synthetic construct
  source 1..22: mol_type = other RNA
caatttttggtagcagtggaga

SEQ ID NO: 26749 - RNA, 22 nt, synthetic construct
  source 1..22: mol_type = other RNA
cacaaacacaaccatcccagag

SEQ ID NO: 26750 - RNA, 22 nt, synthetic construct
  source 1..22: mol_type = other RNA
cacaaagctagcgtctggtgaa

SEQ ID NO: 26751 - RNA, 22 nt, synthetic construct
  source 1..22: mol_type = other RNA
cacaaatgtaccaagttgaaat

SEQ ID NO: 26752 - RNA, 22 nt, synthetic construct
  source 1..22: mol_type = other RNA
cacaacaagcttcagttctaca

SEQ ID NO: 26753 - RNA, 22 nt, synthetic construct
  source 1..22: mol_type = other RNA
cacaacacttttaagggaagtg

SEQ ID NO: 26754 - RNA, 22 nt, synthetic construct
  source 1..22: mol_type = other RNA
cacaaccatcccagagttcaca

SEQ ID NO: 26755 - RNA, 22 nt, synthetic construct
  source 1..22: mol_type = other RNA
cacaagaaagtagagggtattc

SEQ ID NO: 26756 - RNA, 22 nt, synthetic construct
  source 1..22: mol_type = other RNA
cacaagatctcgtgtttgctcc

SEQ ID NO: 26757 - RNA, 22 nt, synthetic construct
  source 1..22: mol_type = other RNA
cacaagtcacaaatgtaccaag

SEQ ID NO: 26758 - RNA, 22 nt, synthetic construct
  source 1..22: mol_type = other RNA
cacaatctggataatattgaga

SEQ ID NO: 26759 - RNA, 22 nt, synthetic construct
  source 1..22: mol_type = other RNA
cacaatggaacagtcattgtcc

SEQ ID NO: 26760 - RNA, 22 nt, synthetic construct
  source 1..22: mol_type = other RNA
cacaattattctgaggcctttc

SEQ ID NO: 26761 - RNA, 22 nt, synthetic construct
  source 1..22: mol_type = other RNA
cacaattgcttctttctccccc

SEQ ID NO: 26762 - RNA, 22 nt, synthetic construct
  source 1..22: mol_type = other RNA
cacacaattattctgaggcctt

SEQ ID NO: 26763 - RNA, 22 nt, synthetic construct
  source 1..22: mol_type = other RNA
cacacacatggtgaactcctgg

SEQ ID NO: 26764 - RNA, 22 nt, synthetic construct
  source 1..22: mol_type = other RNA
cacacagcaccaccagaaaaca

SEQ ID NO: 26765 - RNA, 22 nt, synthetic construct
  source 1..22: mol_type = other RNA
cacacagtgactgcacatgagc

SEQ ID NO: 26766 - RNA, 22 nt, synthetic construct
  source 1..22: mol_type = other RNA
cacacatggtgaactcctggaa

SEQ ID NO: 26767 - RNA, 22 nt, synthetic construct
  source 1..22: mol_type = other RNA
cacaccaccaccaccatcacaa

SEQ ID NO: 26768 - RNA, 22 nt, synthetic construct
  source 1..22: mol_type = other RNA
cacaccaggtgcacttctccaa

SEQ ID NO: 26769 - RNA, 22 nt, synthetic construct
  source 1..22: mol_type = other RNA
cacaccccagctttagagcagc

SEQ ID NO: 26770 - RNA, 22 nt, synthetic construct
  source 1..22: mol_type = other RNA
cacacctagtttcagagaataa

SEQ ID NO: 26771 - RNA, 22 nt, synthetic construct
  source 1..22: mol_type = other RNA
cacaccttttgcaacataagcc

SEQ ID NO: 26772 - RNA, 22 nt, synthetic construct
  source 1..22: mol_type = other RNA
cacacgactattctggcttccc

SEQ ID NO: 26773 - RNA, 22 nt, synthetic construct
  source 1..22: mol_type = other RNA
cacactcagacccctccccaga

SEQ ID NO: 26774 - RNA, 22 nt, synthetic construct
  source 1..22: mol_type = other RNA
cacagaagcaagtaaaagttga

SEQ ID NO: 26775 - RNA, 22 nt, synthetic construct
  source 1..22: mol_type = other RNA
cacagacctctaactctgagct

SEQ ID NO: 26776 - RNA, 22 nt, synthetic construct
  source 1..22: mol_type = other RNA
cacagattctttcttatcactc

SEQ ID NO: 26777 - RNA, 22 nt, synthetic construct
  source 1..22: mol_type = other RNA
cacagcaaccccaaactgagtc

SEQ ID NO: 26778 - RNA, 22 nt, synthetic construct
  source 1..22: mol_type = other RNA
cacagcaccaccagaaaacaaa

SEQ ID NO: 26779 - RNA, 22 nt, synthetic construct
  source 1..22: mol_type = other RNA
cacagcactatctgaaaccagg

SEQ ID NO: 26780 - RNA, 22 nt, synthetic construct
  source 1..22: mol_type = other RNA
cacagctggagcacaagtcaca

SEQ ID NO: 26781 - RNA, 22 nt, synthetic construct
  source 1..22: mol_type = other RNA
cacagcttgcaggtggattctc

SEQ ID NO: 26782 - RNA, 22 nt, synthetic construct
  source 1..22: mol_type = other RNA
cacaggaaaaacatttgcatgg

SEQ ID NO: 26783 - RNA, 22 nt, synthetic construct
  source 1..22: mol_type = other RNA
cacaggacaactcattagtagc

SEQ ID NO: 26784 - RNA, 22 nt, synthetic construct
  source 1..22: mol_type = other RNA
cacaggccaattaaggtggaac

SEQ ID NO: 26785 - RNA, 22 nt, synthetic construct
  source 1..22: mol_type = other RNA
cacaggcctcactcaccactgc

SEQ ID NO: 26786 - RNA, 22 nt, synthetic construct
  source 1..22: mol_type = other RNA
cacaggtgctttcaagaacagg

SEQ ID NO: 26787 - RNA, 22 nt, synthetic construct
  source 1..22: mol_type = other RNA
cacaggttcctcagcttccttc

SEQ ID NO: 26788 - RNA, 22 nt, synthetic construct
  source 1..22: mol_type = other RNA
cacagtgactgcacatgagctt

SEQ ID NO: 26789 - RNA, 22 nt, synthetic construct
  source 1..22: mol_type = other RNA
cacagttagtgaaccttctctc

SEQ ID NO: 26790 - RNA, 22 nt, synthetic construct
  source 1..22: mol_type = other RNA
cacagttttgactagacaaacc

SEQ ID NO: 26791 - RNA, 22 nt, synthetic construct
  source 1..22: mol_type = other RNA
cacataaatgccattaacagtc

SEQ ID NO: 26792 - RNA, 22 nt, synthetic construct
  source 1..22: mol_type = other RNA
cacataactgcagtgggcctga

SEQ ID NO: 26793 - RNA, 22 nt, synthetic construct
  source 1..22: mol_type = other RNA
cacatcctgaactttttgcagg

SEQ ID NO: 26794 - RNA, 22 nt, synthetic construct
  source 1..22: mol_type = other RNA
cacatctcacataaatgccatt

SEQ ID NO: 26795 - RNA, 22 nt, synthetic construct
  source 1..22: mol_type = other RNA
cacatctccctcaaaaccagca

SEQ ID NO: 26796 - RNA, 22 nt, synthetic construct
  source 1..22: mol_type = other RNA
cacatctgcaagatgggaaatc

SEQ ID NO: 26797 - RNA, 22 nt, synthetic construct
  source 1..22: mol_type = other RNA
cacatgagcttttggtaaatgg

SEQ ID NO: 26798 - RNA, 22 nt, synthetic construct
  source 1..22: mol_type = other RNA
cacatgcaatattttccaaata

SEQ ID NO: 26799 - RNA, 22 nt, synthetic construct
  source 1..22: mol_type = other RNA
cacatgcctgtatgcacacagc

SEQ ID NO: 26800 - RNA, 22 nt, synthetic construct
  source 1..22: mol_type = other RNA
cacatggtgaactcctggaaaa

SEQ ID NO: 26801 - RNA, 22 nt, synthetic construct
  source 1..22: mol_type = other RNA
cacatgtatgcagcccttctcc

SEQ ID NO: 26802 - RNA, 22 nt, synthetic construct
  source 1..22: mol_type = other RNA
cacattatcacagcttgcaggt

SEQ ID NO: 26803 - RNA, 22 nt, synthetic construct
  source 1..22: mol_type = other RNA
cacattatttggaaaatattgc

SEQ ID NO: 26804 - RNA, 22 nt, synthetic construct
  source 1..22: mol_type = other RNA
caccaaccaaaagaacagctgc

SEQ ID NO: 26805 - RNA, 22 nt, synthetic construct
  source 1..22: mol_type = other RNA
caccaagcggaatcccatctaa

SEQ ID NO: 26806 - RNA, 22 nt, synthetic construct
  source 1..22: mol_type = other RNA
caccaagtggcactctttcaaa

SEQ ID NO: 26807 - RNA, 22 nt, synthetic construct
  source 1..22: mol_type = other RNA
caccaatttttggtagcagtgg

SEQ ID NO: 26808 - RNA, 22 nt, synthetic construct
  source 1..22: mol_type = other RNA
caccaccaccaccatcacaatt

SEQ ID NO: 26809 - RNA, 22 nt, synthetic construct
  source 1..22: mol_type = other RNA
caccaccaccatcacaattgct

SEQ ID NO: 26810 - RNA, 22 nt, synthetic construct
  source 1..22: mol_type = other RNA
caccaccactaccccaaccaaa

SEQ ID NO: 26811 - RNA, 22 nt, synthetic construct
  source 1..22: mol_type = other RNA
caccaccagaaaacaaaacatg

SEQ ID NO: 26812 - RNA, 22 nt, synthetic construct
  source 1..22: mol_type = other RNA
caccaccatcacaattgcttct

SEQ ID NO: 26813 - RNA, 22 nt, synthetic construct
  source 1..22: mol_type = other RNA
caccaccttcccagagtcctaa

SEQ ID NO: 26814 - RNA, 22 nt, synthetic construct
  source 1..22: mol_type = other RNA
caccactaccccaaccaaagta

SEQ ID NO: 26815 - RNA, 22 nt, synthetic construct
  source 1..22: mol_type = other RNA
caccactgcagctggctttgga

SEQ ID NO: 26816 - RNA, 22 nt, synthetic construct
  source 1..22: mol_type = other RNA
caccagaaaacaaaacatggaa

SEQ ID NO: 26817 - RNA, 22 nt, synthetic construct
  source 1..22: mol_type = other RNA
caccagacgctagctttgtggt

SEQ ID NO: 26818 - RNA, 22 nt, synthetic construct
  source 1..22: mol_type = other RNA
caccaggagcttgcaaattgct

SEQ ID NO: 26819 - RNA, 22 nt, synthetic construct
  source 1..22: mol_type = other RNA
caccaggtgcacttctccaaaa

SEQ ID NO: 26820 - RNA, 22 nt, synthetic construct
  source 1..22: mol_type = other RNA
caccagtttttcaacacataac

SEQ ID NO: 26821 - RNA, 22 nt, synthetic construct
  source 1..22: mol_type = other RNA
caccatcacaattgcttctttc

SEQ ID NO: 26822 - RNA, 22 nt, synthetic construct
  source 1..22: mol_type = other RNA
caccatgaaaacattcttccac

SEQ ID NO: 26823 - RNA, 22 nt, synthetic construct
  source 1..22: mol_type = other RNA
caccatgtgtgtgttccacgga

SEQ ID NO: 26824 - RNA, 22 nt, synthetic construct
  source 1..22: mol_type = other RNA
caccattaggcattagcactgc

SEQ ID NO: 26825 - RNA, 22 nt, synthetic construct
  source 1..22: mol_type = other RNA
caccattcagagtgctttttcc

SEQ ID NO: 26826 - RNA, 22 nt, synthetic construct
  source 1..22: mol_type = other RNA
caccattcatttcattttgttt

SEQ ID NO: 26827 - RNA, 22 nt, synthetic construct
  source 1..22: mol_type = other RNA
cacccagaaaacaacacagctg

SEQ ID NO: 26828 - RNA, 22 nt, synthetic construct
  source 1..22: mol_type = other RNA
cacccatcgcatacctcagggc

SEQ ID NO: 26829 - RNA, 22 nt, synthetic construct
  source 1..22: mol_type = other RNA
caccccagctttagagcagcaa

SEQ ID NO: 26830 - RNA, 22 nt, synthetic construct
  source 1..22: mol_type = other RNA
cacccccaaagcaacaatgatc

SEQ ID NO: 26831 - RNA, 22 nt, synthetic construct
  source 1..22: mol_type = other RNA
caccgcaatggaaacacaatct

SEQ ID NO: 26832 - RNA, 22 nt, synthetic construct
  source 1..22: mol_type = other RNA
cacctagtttcagagaataaag

SEQ ID NO: 26833 - RNA, 22 nt, synthetic construct
  source 1..22: mol_type = other RNA
cacctcaagcataacccaccaa

SEQ ID NO: 26834 - RNA, 22 nt, synthetic construct
  source 1..22: mol_type = other RNA
cacctcccatttgccagacaga

SEQ ID NO: 26835 - RNA, 22 nt, synthetic construct
  source 1..22: mol_type = other RNA
cacctgcaagctgtgataatgt

SEQ ID NO: 26836 - RNA, 22 nt, synthetic construct
  source 1..22: mol_type = other RNA
cacctggatttctttcttggct

SEQ ID NO: 26837 - RNA, 22 nt, synthetic construct
  source 1..22: mol_type = other RNA
cacctggtgtgagggtttttgg

SEQ ID NO: 26838 - RNA, 22 nt, synthetic construct
  source 1..22: mol_type = other RNA
cacctgtcaagactcaatatga

SEQ ID NO: 26839 - RNA, 22 nt, synthetic construct
  source 1..22: mol_type = other RNA
cacctgtgaagaagatcttgct

SEQ ID NO: 26840 - RNA, 22 nt, synthetic construct
  source 1..22: mol_type = other RNA
caccttaattggcctgtgcatc

SEQ ID NO: 26841 - RNA, 22 nt, synthetic construct
  source 1..22: mol_type = other RNA
caccttagagcagcatgctttt

SEQ ID NO: 26842 - RNA, 22 nt, synthetic construct
  source 1..22: mol_type = other RNA
caccttccaaattactagatac

SEQ ID NO: 26843 - RNA, 22 nt, synthetic construct
  source 1..22: mol_type = other RNA
caccttcccagagtcctaatcc

SEQ ID NO: 26844 - RNA, 22 nt, synthetic construct
  source 1..22: mol_type = other RNA
caccttttgcaacataagcctc

SEQ ID NO: 26845 - RNA, 22 nt, synthetic construct
  source 1..22: mol_type = other RNA
cacgactattctggcttccctt

SEQ ID NO: 26846 - RNA, 22 nt, synthetic construct
  source 1..22: mol_type = other RNA
cacgagatcttgtgcccccaac

SEQ ID NO: 26847 - RNA, 22 nt, synthetic construct
  source 1..22: mol_type = other RNA
cacgccaagtcgttatttgacc

SEQ ID NO: 26848 - RNA, 22 nt, synthetic construct
  source 1..22: mol_type = other RNA
cacggaagaggcagaaactgta

SEQ ID NO: 26849 - RNA, 22 nt, synthetic construct
  source 1..22: mol_type = other RNA
cactaactgtgcgttttattcc

SEQ ID NO: 26850 - RNA, 22 nt, synthetic construct
  source 1..22: mol_type = other RNA
cactaaggattccttttctgcc

SEQ ID NO: 26851 - RNA, 22 nt, synthetic construct
  source 1..22: mol_type = other RNA
cactaccacaccaccaccacca

SEQ ID NO: 26852 - RNA, 22 nt, synthetic construct
  source 1..22: mol_type = other RNA
cactaccccaaccaaagtaaca

SEQ ID NO: 26853 - RNA, 22 nt, synthetic construct
  source 1..22: mol_type = other RNA
cactagatttcattttcaacaa

SEQ ID NO: 26854 - RNA, 22 nt, synthetic construct
  source 1..22: mol_type = other RNA
cactatctgaaaccaggatgga

SEQ ID NO: 26855 - RNA, 22 nt, synthetic construct
  source 1..22: mol_type = other RNA
cactcaaaagcatgctgctcta

SEQ ID NO: 26856 - RNA, 22 nt, synthetic construct
  source 1..22: mol_type = other RNA
cactcaaatcggagacatttgg

SEQ ID NO: 26857 - RNA, 22 nt, synthetic construct
  source 1..22: mol_type = other RNA
cactcaccactgcagctggctt

SEQ ID NO: 26858 - RNA, 22 nt, synthetic construct
  source 1..22: mol_type = other RNA
cactcacccatcgcatacctca

SEQ ID NO: 26859 - RNA, 22 nt, synthetic construct
  source 1..22: mol_type = other RNA
cactcagacccctccccagaag

SEQ ID NO: 26860 - RNA, 22 nt, synthetic construct
  source 1..22: mol_type = other RNA
cactctgaatggtggagtttta

SEQ ID NO: 26861 - RNA, 22 nt, synthetic construct
  source 1..22: mol_type = other RNA
cactctttcaaaagttattatg

SEQ ID NO: 26862 - RNA, 22 nt, synthetic construct
  source 1..22: mol_type = other RNA
cactgagctttgcttgaagtaa

SEQ ID NO: 26863 - RNA, 22 nt, synthetic construct
  source 1..22: mol_type = other RNA
cactgcagctggctttggaggc

SEQ ID NO: 26864 - RNA, 22 nt, synthetic construct
  source 1..22: mol_type = other RNA
cactgcagttatgtgttgaaaa

SEQ ID NO: 26865 - RNA, 22 nt, synthetic construct
  source 1..22: mol_type = other RNA
cactgccatcaattcttcagta

SEQ ID NO: 26866 - RNA, 22 nt, synthetic construct
  source 1..22: mol_type = other RNA
cactgcctgagagagctcatcc

SEQ ID NO: 26867 - RNA, 22 nt, synthetic construct
  source 1..22: mol_type = other RNA
cactgccttgtttttaagtaat

SEQ ID NO: 26868 - RNA, 22 nt, synthetic construct
  source 1..22: mol_type = other RNA
cactgctaccaaaaattggtgg

SEQ ID NO: 26869 - RNA, 22 nt, synthetic construct
  source 1..22: mol_type = other RNA
cactgctgcagaacttgatagc

SEQ ID NO: 26870 - RNA, 22 nt, synthetic construct
  source 1..22: mol_type = other RNA
cactggaaattccaacatgcct

SEQ ID NO: 26871 - RNA, 22 nt, synthetic construct
  source 1..22: mol_type = other RNA
cactggggacataagtttttca

SEQ ID NO: 26872 - RNA, 22 nt, synthetic construct
  source 1..22: mol_type = other RNA
cactgtaccttgggactgccct

SEQ ID NO: 26873 - RNA, 22 nt, synthetic construct
  source 1..22: mol_type = other RNA
cactgtctcaatattatccaga

SEQ ID NO: 26874 - RNA, 22 nt, synthetic construct
  source 1..22: mol_type = other RNA
cactgtgtggcactagatttca

SEQ ID NO: 26875 - RNA, 22 nt, synthetic construct
  source 1..22: mol_type = other RNA
cacttacctacacatctgcaag

SEQ ID NO: 26876 - RNA, 22 nt, synthetic construct
  source 1..22: mol_type = other RNA
cacttcccttaaaagtgttgtg

SEQ ID NO: 26877 - RNA, 22 nt, synthetic construct
  source 1..22: mol_type = other RNA
cacttctccaaaacagaccatt

SEQ ID NO: 26878 - RNA, 22 nt, synthetic construct
  source 1..22: mol_type = other RNA
cacttgaatcaacaggcttcag

SEQ ID NO: 26879 - RNA, 22 nt, synthetic construct
  source 1..22: mol_type = other RNA
cacttgatttcatggtctgact

SEQ ID NO: 26880 - RNA, 22 nt, synthetic construct
  source 1..22: mol_type = other RNA
cacttggaataccctctacttt

SEQ ID NO: 26881 - RNA, 22 nt, synthetic construct
  source 1..22: mol_type = other RNA
cacttggtgtctccatttactt

SEQ ID NO: 26882 - RNA, 22 nt, synthetic construct
  source 1..22: mol_type = other RNA
cactttagtctggccaaagaat

SEQ ID NO: 26883 - RNA, 22 nt, synthetic construct
  source 1..22: mol_type = other RNA
cacttttaagggaagtgaaaat

SEQ ID NO: 26884 - RNA, 22 nt, synthetic construct
  source 1..22: mol_type = other RNA
cacttttcccctcctgctcatt

SEQ ID NO: 26885 - RNA, 22 nt, synthetic construct
  source 1..22: mol_type = other RNA
cagaaaacaaaacatggaaaaa

SEQ ID NO: 26886 - RNA, 22 nt, synthetic construct
  source 1..22: mol_type = other RNA
cagaaaacaacacagctggagc

SEQ ID NO: 26887 - RNA, 22 nt, synthetic construct
  source 1..22: mol_type = other RNA
cagaaaaccacatctcacataa

SEQ ID NO: 26888 - RNA, 22 nt, synthetic construct
  source 1..22: mol_type = other RNA
cagaaaagacaccaaccaaaag

SEQ ID NO: 26889 - RNA, 22 nt, synthetic construct
  source 1..22: mol_type = other RNA
cagaaaaggaatccttagtgaa

SEQ ID NO: 26890 - RNA, 22 nt, synthetic construct
  source 1..22: mol_type = other RNA
cagaaaataacatccagggaac

SEQ ID NO: 26891 - RNA, 22 nt, synthetic construct
  source 1..22: mol_type = other RNA
cagaaaccagaacaactacaac

SEQ ID NO: 26892 - RNA, 22 nt, synthetic construct
  source 1..22: mol_type = other RNA
cagaaactgtagcaccattagg

SEQ ID NO: 26893 - RNA, 22 nt, synthetic construct
  source 1..22: mol_type = other RNA
cagaaagcatcggagaagggct

SEQ ID NO: 26894 - RNA, 22 nt, synthetic construct
  source 1..22: mol_type = other RNA
cagaaatgtactgagacacatg

SEQ ID NO: 26895 - RNA, 22 nt, synthetic construct
  source 1..22: mol_type = other RNA
cagaacaactacaacaacaaaa

SEQ ID NO: 26896 - RNA, 22 nt, synthetic construct
  source 1..22: mol_type = other RNA
cagaacacaatggaacagtcat

SEQ ID NO: 26897 - RNA, 22 nt, synthetic construct
  source 1..22: mol_type = other RNA
cagaacacctcaagcataaccc

SEQ ID NO: 26898 - RNA, 22 nt, synthetic construct
  source 1..22: mol_type = other RNA
cagaacctctggctacaaagct

SEQ ID NO: 26899 - RNA, 22 nt, synthetic construct
  source 1..22: mol_type = other RNA
cagaactcacagattctttctt

SEQ ID NO: 26900 - RNA, 22 nt, synthetic construct
  source 1..22: mol_type = other RNA
cagaacttgatagccacacccc

SEQ ID NO: 26901 - RNA, 22 nt, synthetic construct
  source 1..22: mol_type = other RNA
cagaagcaagaacagcagcaaa

SEQ ID NO: 26902 - RNA, 22 nt, synthetic construct
  source 1..22: mol_type = other RNA
cagaagcaagtaaaagttgaaa

SEQ ID NO: 26903 - RNA, 22 nt, synthetic construct
  source 1..22: mol_type = other RNA
cagaagcagctgttcttttggt

SEQ ID NO: 26904 - RNA, 22 nt, synthetic construct
  source 1..22: mol_type = other RNA
cagaaggaaaaagcactctgaa

SEQ ID NO: 26905 - RNA, 22 nt, synthetic construct
  source 1..22: mol_type = other RNA
cagaaggacactcaaaagcatg

SEQ ID NO: 26906 - RNA, 22 nt, synthetic construct
  source 1..22: mol_type = other RNA
cagaagtaaatggagacaccaa

SEQ ID NO: 26907 - RNA, 22 nt, synthetic construct
  source 1..22: mol_type = other RNA
cagaagtcacaacaagcttcag

SEQ ID NO: 26908 - RNA, 22 nt, synthetic construct
  source 1..22: mol_type = other RNA
cagaataattgtgtgaacagga

SEQ ID NO: 26909 - RNA, 22 nt, synthetic construct
  source 1..22: mol_type = other RNA
cagaatagtcgtgtgagtcctg

SEQ ID NO: 26910 - RNA, 22 nt, synthetic construct
  source 1..22: mol_type = other RNA
cagaatctcttgctctttgttt

SEQ ID NO: 26911 - RNA, 22 nt, synthetic construct
  source 1..22: mol_type = other RNA
cagaatctgaagctctggattt

SEQ ID NO: 26912 - RNA, 22 nt, synthetic construct
  source 1..22: mol_type = other RNA
cagaatggaagcccactgcctg

SEQ ID NO: 26913 - RNA, 22 nt, synthetic construct
  source 1..22: mol_type = other RNA
cagaattcttcaccagacgcta

SEQ ID NO: 26914 - RNA, 22 nt, synthetic construct
  source 1..22: mol_type = other RNA
cagacagaacctctggctacaa

SEQ ID NO: 26915 - RNA, 22 nt, synthetic construct
  source 1..22: mol_type = other RNA
cagacatatcttggtttctatt

SEQ ID NO: 26916 - RNA, 22 nt, synthetic construct
  source 1..22: mol_type = other RNA
cagaccatgaaatcaagtgcat

SEQ ID NO: 26917 - RNA, 22 nt, synthetic construct
  source 1..22: mol_type = other RNA
cagaccatttaccaaaagctca

SEQ ID NO: 26918 - RNA, 22 nt, synthetic construct
  source 1..22: mol_type = other RNA
cagacccctccccagaaggaca

SEQ ID NO: 26919 - RNA, 22 nt, synthetic construct
  source 1..22: mol_type = other RNA
cagacctctaactctgagctgc

SEQ ID NO: 26920 - RNA, 22 nt, synthetic construct
  source 1..22: mol_type = other RNA
cagacgctagctttgtggttcc

SEQ ID NO: 26921 - RNA, 22 nt, synthetic construct
  source 1..22: mol_type = other RNA
cagactaaagtggaagaatgtt

SEQ ID NO: 26922 - RNA, 22 nt, synthetic construct
  source 1..22: mol_type = other RNA
cagactaagtccattcctgata

SEQ ID NO: 26923 - RNA, 22 nt, synthetic construct
  source 1..22: mol_type = other RNA
cagactacacatcctgaacttt

SEQ ID NO: 26924 - RNA, 22 nt, synthetic construct
  source 1..22: mol_type = other RNA
cagactgcagggacaatgactg

SEQ ID NO: 26925 - RNA, 22 nt, synthetic construct
  source 1..22: mol_type = other RNA
cagacttttcctcacccccaaa

SEQ ID NO: 26926 - RNA, 22 nt, synthetic construct
  source 1..22: mol_type = other RNA
cagagaataaagaacagactac

SEQ ID NO: 26927 - RNA, 22 nt, synthetic construct
  source 1..22: mol_type = other RNA
cagagactgagccattttcaaa

SEQ ID NO: 26928 - RNA, 22 nt, synthetic construct
  source 1..22: mol_type = other RNA
cagagagagaaggttcactaac

SEQ ID NO: 26929 - RNA, 22 nt, synthetic construct
  source 1..22: mol_type = other RNA
cagagctgccaccaggagcttg

SEQ ID NO: 26930 - RNA, 22 nt, synthetic construct
  source 1..22: mol_type = other RNA
cagagcttcagattctgaatga

SEQ ID NO: 26931 - RNA, 22 nt, synthetic construct
  source 1..22: mol_type = other RNA
cagaggttctgtctggcaaatg

SEQ ID NO: 26932 - RNA, 22 nt, synthetic construct
  source 1..22: mol_type = other RNA
cagagtcctaatccatctacac

SEQ ID NO: 26933 - RNA, 22 nt, synthetic construct
  source 1..22: mol_type = other RNA
cagagtgctttttccttctgaa

SEQ ID NO: 26934 - RNA, 22 nt, synthetic construct
  source 1..22: mol_type = other RNA
cagagttagaggtctgtgcgga

SEQ ID NO: 26935 - RNA, 22 nt, synthetic construct
  source 1..22: mol_type = other RNA
cagagttcacatctccctcaaa

SEQ ID NO: 26936 - RNA, 22 nt, synthetic construct
  source 1..22: mol_type = other RNA
cagatagtgctgtgttgggggc

SEQ ID NO: 26937 - RNA, 22 nt, synthetic construct
  source 1..22: mol_type = other RNA
cagatcaagaaattgaaacaag

SEQ ID NO: 26938 - RNA, 22 nt, synthetic construct
  source 1..22: mol_type = other RNA
cagatcaattccgcacagacct

SEQ ID NO: 26939 - RNA, 22 nt, synthetic construct
  source 1..22: mol_type = other RNA
cagatgcacaggccaattaagg

SEQ ID NO: 26940 - RNA, 22 nt, synthetic construct
  source 1..22: mol_type = other RNA
cagatgctgctccatggtctca

SEQ ID NO: 26941 - RNA, 22 nt, synthetic construct
  source 1..22: mol_type = other RNA
cagatgtgtaggtaagtgccag

SEQ ID NO: 26942 - RNA, 22 nt, synthetic construct
  source 1..22: mol_type = other RNA
cagattcccaaactgaaaaact

SEQ ID NO: 26943 - RNA, 22 nt, synthetic construct
  source 1..22: mol_type = other RNA
cagattctgaatgagcaggagg

SEQ ID NO: 26944 - RNA, 22 nt, synthetic construct
  source 1..22: mol_type = other RNA
cagattctttcttatcactcaa

SEQ ID NO: 26945 - RNA, 22 nt, synthetic construct
  source 1..22: mol_type = other RNA
cagattgtgtttccattgcggt

SEQ ID NO: 26946 - RNA, 22 nt, synthetic construct
  source 1..22: mol_type = other RNA
cagcaaaagagcatcattgaga

SEQ ID NO: 26947 - RNA, 22 nt, synthetic construct
  source 1..22: mol_type = other RNA
cagcaaacaacttcttcagaaa

SEQ ID NO: 26948 - RNA, 22 nt, synthetic construct
  source 1..22: mol_type = other RNA
cagcaaacacagcaaccccaaa

SEQ ID NO: 26949 - RNA, 22 nt, synthetic construct
  source 1..22: mol_type = other RNA
cagcaaagagaaggatcattct

SEQ ID NO: 26950 - RNA, 22 nt, synthetic construct
  source 1..22: mol_type = other RNA
cagcaaaggtacttgatacata

SEQ ID NO: 26951 - RNA, 22 nt, synthetic construct
  source 1..22: mol_type = other RNA
cagcaacagcagcaaaaattac

SEQ ID NO: 26952 - RNA, 22 nt, synthetic construct
  source 1..22: mol_type = other RNA
cagcaaccccaaactgagtctt

SEQ ID NO: 26953 - RNA, 22 nt, synthetic construct
  source 1..22: mol_type = other RNA
cagcaatttgcaagctcctggt

SEQ ID NO: 26954 - RNA, 22 nt, synthetic construct
  source 1..22: mol_type = other RNA
cagcacaaacacaaccatccca

SEQ ID NO: 26955 - RNA, 22 nt, synthetic construct
  source 1..22: mol_type = other RNA
cagcaccaccagaaaacaaaac

SEQ ID NO: 26956 - RNA, 22 nt, synthetic construct
  source 1..22: mol_type = other RNA
cagcactatctgaaaccaggat

SEQ ID NO: 26957 - RNA, 22 nt, synthetic construct
  source 1..22: mol_type = other RNA
cagcacttgaatcaacaggctt

SEQ ID NO: 26958 - RNA, 22 nt, synthetic construct
  source 1..22: mol_type = other RNA
cagcagcaaaaattacaaataa

SEQ ID NO: 26959 - RNA, 22 nt, synthetic construct
  source 1..22: mol_type = other RNA
cagcagcaaacacagcaacccc

SEQ ID NO: 26960 - RNA, 22 nt, synthetic construct
  source 1..22: mol_type = other RNA
cagcagcaatttgcaagctcct

SEQ ID NO: 26961 - RNA, 22 nt, synthetic construct
  source 1..22: mol_type = other RNA
cagcagtggtttgtctagtcaa

SEQ ID NO: 26962 - RNA, 22 nt, synthetic construct
  source 1..22: mol_type = other RNA
cagcagttgatgagaaacaaag

SEQ ID NO: 26963 - RNA, 22 nt, synthetic construct
  source 1..22: mol_type = other RNA
cagcatcacaggcctcactcac

SEQ ID NO: 26964 - RNA, 22 nt, synthetic construct
  source 1..22: mol_type = other RNA
cagcatcatcagcatcacaggc

SEQ ID NO: 26965 - RNA, 22 nt, synthetic construct
  source 1..22: mol_type = other RNA
cagcatctgaagcagtttcacg

SEQ ID NO: 26966 - RNA, 22 nt, synthetic construct
  source 1..22: mol_type = other RNA
cagcatgcttttgagtgtcctt

SEQ ID NO: 26967 - RNA, 22 nt, synthetic construct
  source 1..22: mol_type = other RNA
cagcccttctccgatgctttct

SEQ ID NO: 26968 - RNA, 22 nt, synthetic construct
  source 1..22: mol_type = other RNA
cagccttgtggatggccccgaa

SEQ ID NO: 26969 - RNA, 22 nt, synthetic construct
  source 1..22: mol_type = other RNA
cagctagtttactggcattatc

SEQ ID NO: 26970 - RNA, 22 nt, synthetic construct
  source 1..22: mol_type = other RNA
cagctcagagttagaggtctgt

SEQ ID NO: 26971 - RNA, 22 nt, synthetic construct
  source 1..22: mol_type = other RNA
cagctctgaacggtatttaaaa

SEQ ID NO: 26972 - RNA, 22 nt, synthetic construct
  source 1..22: mol_type = other RNA
cagctgcagtggtgagtgaggc

SEQ ID NO: 26973 - RNA, 22 nt, synthetic construct
  source 1..22: mol_type = other RNA
cagctgcttctgttctcaataa

SEQ ID NO: 26974 - RNA, 22 nt, synthetic construct
  source 1..22: mol_type = other RNA
cagctggagcacaagtcacaaa

SEQ ID NO: 26975 - RNA, 22 nt, synthetic construct
  source 1..22: mol_type = other RNA
cagctggctttggaggcagctc

SEQ ID NO: 26976 - RNA, 22 nt, synthetic construct
  source 1..22: mol_type = other RNA
cagctgtgttgttttctgggtg

SEQ ID NO: 26977 - RNA, 22 nt, synthetic construct
  source 1..22: mol_type = other RNA
cagctgttcttttggttggtgt

SEQ ID NO: 26978 - RNA, 22 nt, synthetic construct
  source 1..22: mol_type = other RNA
cagcttccttcagaaggaaaaa

SEQ ID NO: 26979 - RNA, 22 nt, synthetic construct
  source 1..22: mol_type = other RNA
cagcttgcaggtggattctctt

SEQ ID NO: 26980 - RNA, 22 nt, synthetic construct
  source 1..22: mol_type = other RNA
cagcttgttgaccagacatatc

SEQ ID NO: 26981 - RNA, 22 nt, synthetic construct
  source 1..22: mol_type = other RNA
cagctttagagcagcaaacaac

SEQ ID NO: 26982 - RNA, 22 nt, synthetic construct
  source 1..22: mol_type = other RNA
caggaaaaacatttgcatggtt

SEQ ID NO: 26983 - RNA, 22 nt, synthetic construct
  source 1..22: mol_type = other RNA
caggaaacaagacccaaaactt

SEQ ID NO: 26984 - RNA, 22 nt, synthetic construct
  source 1..22: mol_type = other RNA
caggaatgacatacagactgca

SEQ ID NO: 26985 - RNA, 22 nt, synthetic construct
  source 1..22: mol_type = other RNA
caggaatggacttagtctgttg

SEQ ID NO: 26986 - RNA, 22 nt, synthetic construct
  source 1..22: mol_type = other RNA
caggacaactcattagtagcct

SEQ ID NO: 26987 - RNA, 22 nt, synthetic construct
  source 1..22: mol_type = other RNA
caggacaactgccagcagttga

SEQ ID NO: 26988 - RNA, 22 nt, synthetic construct
  source 1..22: mol_type = other RNA
caggactcacacgactattctg

SEQ ID NO: 26989 - RNA, 22 nt, synthetic construct
  source 1..22: mol_type = other RNA
caggagatgggcatatctcaaa

SEQ ID NO: 26990 - RNA, 22 nt, synthetic construct
  source 1..22: mol_type = other RNA
caggagcagaagtcacaacaag

SEQ ID NO: 26991 - RNA, 22 nt, synthetic construct
  source 1..22: mol_type = other RNA
caggagcttgcaaattgctgct

SEQ ID NO: 26992 - RNA, 22 nt, synthetic construct
  source 1..22: mol_type = other RNA
caggaggggaaaagtgctaatt

SEQ ID NO: 26993 - RNA, 22 nt, synthetic construct
  source 1..22: mol_type = other RNA
caggagttcaccatgtgtgtgt

SEQ ID NO: 26994 - RNA, 22 nt, synthetic construct
  source 1..22: mol_type = other RNA
caggatagaaccaaccatgttg

SEQ ID NO: 26995 - RNA, 22 nt, synthetic construct
  source 1..22: mol_type = other RNA
caggatggattgaattgaaggc

SEQ ID NO: 26996 - RNA, 22 nt, synthetic construct
  source 1..22: mol_type = other RNA
caggatgtgtagtctgttcttt

SEQ ID NO: 26997 - RNA, 22 nt, synthetic construct
  source 1..22: mol_type = other RNA
caggcacaggaaaaacatttgc

SEQ ID NO: 26998 - RNA, 22 nt, synthetic construct
  source 1..22: mol_type = other RNA
caggcagcacaaacacaaccat

SEQ ID NO: 26999 - RNA, 22 nt, synthetic construct
  source 1..22: mol_type = other RNA
caggcagtgggcttccattctg

SEQ ID NO: 27000 - RNA, 22 nt, synthetic construct
  source 1..22: mol_type = other RNA
caggcatgtggcttgcatccag

SEQ ID NO: 27001 - RNA, 22 nt, synthetic construct
  source 1..22: mol_type = other RNA
caggcatgttggaatttccagt

SEQ ID NO: 27002 - RNA, 22 nt, synthetic construct
  source 1..22: mol_type = other RNA
caggccaattaaggtggaacct

SEQ ID NO: 27003 - RNA, 22 nt, synthetic construct
  source 1..22: mol_type = other RNA
caggcccactgcagttatgtgt

SEQ ID NO: 27004 - RNA, 22 nt, synthetic construct
  source 1..22: mol_type = other RNA
caggcctcactcaccactgcag

SEQ ID NO: 27005 - RNA, 22 nt, synthetic construct
  source 1..22: mol_type = other RNA
caggctactaatgagttgtcct

SEQ ID NO: 27006 - RNA, 22 nt, synthetic construct
  source 1..22: mol_type = other RNA
caggcttcagagactgagccat

SEQ ID NO: 27007 - RNA, 22 nt, synthetic construct
  source 1..22: mol_type = other RNA
caggcttgcttcggggccatcc

SEQ ID NO: 27008 - RNA, 22 nt, synthetic construct
  source 1..22: mol_type = other RNA
cagggaaccacaaagctagcgt

SEQ ID NO: 27009 - RNA, 22 nt, synthetic construct
  source 1..22: mol_type = other RNA
cagggacaatgactgttccatt

SEQ ID NO: 27010 - RNA, 22 nt, synthetic construct
  source 1..22: mol_type = other RNA
cagggaggaagtcacactcaga

SEQ ID NO: 27011 - RNA, 22 nt, synthetic construct
  source 1..22: mol_type = other RNA
cagggatataaaaatagaaacc

SEQ ID NO: 27012 - RNA, 22 nt, synthetic construct
  source 1..22: mol_type = other RNA
cagggcagatcaattccgcaca

SEQ ID NO: 27013 - RNA, 22 nt, synthetic construct
  source 1..22: mol_type = other RNA
cagggccagtcacagttttgac

SEQ ID NO: 27014 - RNA, 22 nt, synthetic construct
  source 1..22: mol_type = other RNA
cagggtattccataataacttt

SEQ ID NO: 27015 - RNA, 22 nt, synthetic construct
  source 1..22: mol_type = other RNA
caggtatttagcattgcagcta

SEQ ID NO: 27016 - RNA, 22 nt, synthetic construct
  source 1..22: mol_type = other RNA
caggtgaaagcagtcaaccaaa

SEQ ID NO: 27017 - RNA, 22 nt, synthetic construct
  source 1..22: mol_type = other RNA
caggtgcacttctccaaaacag

SEQ ID NO: 27018 - RNA, 22 nt, synthetic construct
  source 1..22: mol_type = other RNA
caggtgctttcaagaacaggag

SEQ ID NO: 27019 - RNA, 22 nt, synthetic construct
  source 1..22: mol_type = other RNA
caggtggattctcttgcttagt

SEQ ID NO: 27020 - RNA, 22 nt, synthetic construct
  source 1..22: mol_type = other RNA
caggtgtatccaataaattttt

SEQ ID NO: 27021 - RNA, 22 nt, synthetic construct
  source 1..22: mol_type = other RNA
caggttccaccttaattggcct

SEQ ID NO: 27022 - RNA, 22 nt, synthetic construct
  source 1..22: mol_type = other RNA
caggttccagcagcaatttgca

SEQ ID NO: 27023 - RNA, 22 nt, synthetic construct
  source 1..22: mol_type = other RNA
caggttcctcagcttccttcag

SEQ ID NO: 27024 - RNA, 22 nt, synthetic construct
  source 1..22: mol_type = other RNA
caggtttaccctctattttcac

SEQ ID NO: 27025 - RNA, 22 nt, synthetic construct
  source 1..22: mol_type = other RNA
caggtttcttgttcaaacaata

SEQ ID NO: 27026 - RNA, 22 nt, synthetic construct
  source 1..22: mol_type = other RNA
cagtaaactagctgcaatgcta

SEQ ID NO: 27027 - RNA, 22 nt, synthetic construct
  source 1..22: mol_type = other RNA
cagtacatttctggcacttacc

SEQ ID NO: 27028 - RNA, 22 nt, synthetic construct
  source 1..22: mol_type = other RNA
cagtatcaacccaatctctcca

SEQ ID NO: 27029 - RNA, 22 nt, synthetic construct
  source 1..22: mol_type = other RNA
cagtattcaaaatcaagcgagt

SEQ ID NO: 27030 - RNA, 22 nt, synthetic construct
  source 1..22: mol_type = other RNA
cagtcaaccaaatgtctccgat

SEQ ID NO: 27031 - RNA, 22 nt, synthetic construct
  source 1..22: mol_type = other RNA
cagtcacagttttgactagaca

SEQ ID NO: 27032 - RNA, 22 nt, synthetic construct
  source 1..22: mol_type = other RNA
cagtcactgtgtggcactagat

SEQ ID NO: 27033 - RNA, 22 nt, synthetic construct
  source 1..22: mol_type = other RNA
cagtcaggctactaatgagttg

SEQ ID NO: 27034 - RNA, 22 nt, synthetic construct
  source 1..22: mol_type = other RNA
cagtcattgtccctgcagtctg

SEQ ID NO: 27035 - RNA, 22 nt, synthetic construct
  source 1..22: mol_type = other RNA
cagtcccaaggtacagtggacc

SEQ ID NO: 27036 - RNA, 22 nt, synthetic construct
  source 1..22: mol_type = other RNA
cagtcccatttggacattatga

SEQ ID NO: 27037 - RNA, 22 nt, synthetic construct
  source 1..22: mol_type = other RNA
cagtctctgaagcctgttgatt

SEQ ID NO: 27038 - RNA, 22 nt, synthetic construct
  source 1..22: mol_type = other RNA
cagtctgtatgtcattcctgtt

SEQ ID NO: 27039 - RNA, 22 nt, synthetic construct
  source 1..22: mol_type = other RNA
cagtgactgcacatgagctttt

SEQ ID NO: 27040 - RNA, 22 nt, synthetic construct
  source 1..22: mol_type = other RNA
cagtgatgcctcattacgtttt

SEQ ID NO: 27041 - RNA, 22 nt, synthetic construct
  source 1..22: mol_type = other RNA
cagtgctaatgcctaatggtgc

SEQ ID NO: 27042 - RNA, 22 nt, synthetic construct
  source 1..22: mol_type = other RNA
cagtggaccaacatctccagtt

SEQ ID NO: 27043 - RNA, 22 nt, synthetic construct
  source 1..22: mol_type = other RNA
cagtggagagctacaggacaac

SEQ ID NO: 27044 - RNA, 22 nt, synthetic construct
  source 1..22: mol_type = other RNA
cagtgggcctgaaaatccagag

SEQ ID NO: 27045 - RNA, 22 nt, synthetic construct
  source 1..22: mol_type = other RNA
cagtgggcttccattctggagc

SEQ ID NO: 27046 - RNA, 22 nt, synthetic construct
  source 1..22: mol_type = other RNA
cagtggtgagtgaggcctgtga

SEQ ID NO: 27047 - RNA, 22 nt, synthetic construct
  source 1..22: mol_type = other RNA
cagtggtttgtctagtcaaaac

SEQ ID NO: 27048 - RNA, 22 nt, synthetic construct
  source 1..22: mol_type = other RNA
cagtgtattgtttggaggtcat

SEQ ID NO: 27049 - RNA, 22 nt, synthetic construct
  source 1..22: mol_type = other RNA
cagtgttcactaaggattcctt

SEQ ID NO: 27050 - RNA, 22 nt, synthetic construct
  source 1..22: mol_type = other RNA
cagtgttgaaacagcacttgaa

SEQ ID NO: 27051 - RNA, 22 nt, synthetic construct
  source 1..22: mol_type = other RNA
cagtgttttttccaggagttca

SEQ ID NO: 27052 - RNA, 22 nt, synthetic construct
  source 1..22: mol_type = other RNA
cagttaaagatttcaccagttt

SEQ ID NO: 27053 - RNA, 22 nt, synthetic construct
  source 1..22: mol_type = other RNA
cagttagtgaaccttctctctc

SEQ ID NO: 27054 - RNA, 22 nt, synthetic construct
  source 1..22: mol_type = other RNA
cagttatgtgttgaaaaactgg

SEQ ID NO: 27055 - RNA, 22 nt, synthetic construct
  source 1..22: mol_type = other RNA
cagttccaaaaaccctcacacc

SEQ ID NO: 27056 - RNA, 22 nt, synthetic construct
  source 1..22: mol_type = other RNA
cagttctacagggatataaaaa

SEQ ID NO: 27057 - RNA, 22 nt, synthetic construct
  source 1..22: mol_type = other RNA
cagttgatgagaaacaaagagc

SEQ ID NO: 27058 - RNA, 22 nt, synthetic construct
  source 1..22: mol_type = other RNA
cagttgtcctgtagctctccac

SEQ ID NO: 27059 - RNA, 22 nt, synthetic construct
  source 1..22: mol_type = other RNA
cagtttcacgccaagtcgttat

SEQ ID NO: 27060 - RNA, 22 nt, synthetic construct
  source 1..22: mol_type = other RNA
cagtttctgcctcttccgtgga

SEQ ID NO: 27061 - RNA, 22 nt, synthetic construct
  source 1..22: mol_type = other RNA
cagtttgggaatctgctctttg

SEQ ID NO: 27062 - RNA, 22 nt, synthetic construct
  source 1..22: mol_type = other RNA
cagtttggggttgctgtgtttg

SEQ ID NO: 27063 - RNA, 22 nt, synthetic construct
  source 1..22: mol_type = other RNA
cagttttgactagacaaaccac

SEQ ID NO: 27064 - RNA, 22 nt, synthetic construct
  source 1..22: mol_type = other RNA
cagtttttcaacacataactgc

SEQ ID NO: 27065 - RNA, 22 nt, synthetic construct
  source 1..22: mol_type = other RNA
cagtttttgagatatgcccatc

SEQ ID NO: 27066 - RNA, 22 nt, synthetic construct
  source 1..22: mol_type = other RNA
cataaacaggcagcacaaacac

SEQ ID NO: 27067 - RNA, 22 nt, synthetic construct
  source 1..22: mol_type = other RNA
cataaatgccattaacagtcag

SEQ ID NO: 27068 - RNA, 22 nt, synthetic construct
  source 1..22: mol_type = other RNA
cataaccatgcaaatgtttttc

SEQ ID NO: 27069 - RNA, 22 nt, synthetic construct
  source 1..22: mol_type = other RNA
cataacccaccaatttttggta

SEQ ID NO: 27070 - RNA, 22 nt, synthetic construct
  source 1..22: mol_type = other RNA
cataactgcagtgggcctgaaa

SEQ ID NO: 27071 - RNA, 22 nt, synthetic construct
  source 1..22: mol_type = other RNA
cataagcctcataaacaggcag

SEQ ID NO: 27072 - RNA, 22 nt, synthetic construct
  source 1..22: mol_type = other RNA
cataaggctcttactctcaaat

SEQ ID NO: 27073 - RNA, 22 nt, synthetic construct
  source 1..22: mol_type = other RNA
cataagtttttcagtttgggaa

SEQ ID NO: 27074 - RNA, 22 nt, synthetic construct
  source 1..22: mol_type = other RNA
cataataacttttgaaagagtg

SEQ ID NO: 27075 - RNA, 22 nt, synthetic construct
  source 1..22: mol_type = other RNA
cataatgtccaaatgggactgg

SEQ ID NO: 27076 - RNA, 22 nt, synthetic construct
  source 1..22: mol_type = other RNA
catacagactgcagggacaatg

SEQ ID NO: 27077 - RNA, 22 nt, synthetic construct
  source 1..22: mol_type = other RNA
catacaggcatgtggcttgcat

SEQ ID NO: 27078 - RNA, 22 nt, synthetic construct
  source 1..22: mol_type = other RNA
catacagggtattccataataa

SEQ ID NO: 27079 - RNA, 22 nt, synthetic construct
  source 1..22: mol_type = other RNA
catacatgtgtagatggattag

SEQ ID NO: 27080 - RNA, 22 nt, synthetic construct
  source 1..22: mol_type = other RNA
catacctcagggcagatcaatt

SEQ ID NO: 27081 - RNA, 22 nt, synthetic construct
  source 1..22: mol_type = other RNA
catagtcagatgcacaggccaa

SEQ ID NO: 27082 - RNA, 22 nt, synthetic construct
  source 1..22: mol_type = other RNA
catattgagtcttgacaggtgt

SEQ ID NO: 27083 - RNA, 22 nt, synthetic construct
  source 1..22: mol_type = other RNA
catcaactgctggcagttgtcc

SEQ ID NO: 27084 - RNA, 22 nt, synthetic construct
  source 1..22: mol_type = other RNA
catcaattcttcagtatcaacc

SEQ ID NO: 27085 - RNA, 22 nt, synthetic construct
  source 1..22: mol_type = other RNA
catcacaattgcttctttctcc

SEQ ID NO: 27086 - RNA, 22 nt, synthetic construct
  source 1..22: mol_type = other RNA
catcacaggcctcactcaccac

SEQ ID NO: 27087 - RNA, 22 nt, synthetic construct
  source 1..22: mol_type = other RNA
catcacatgcaatattttccaa

SEQ ID NO: 27088 - RNA, 22 nt, synthetic construct
  source 1..22: mol_type = other RNA
catcacctcccatttgccagac

SEQ ID NO: 27089 - RNA, 22 nt, synthetic construct
  source 1..22: mol_type = other RNA
catcactgccatcaattcttca

SEQ ID NO: 27090 - RNA, 22 nt, synthetic construct
  source 1..22: mol_type = other RNA
catcagcatcacaggcctcact

SEQ ID NO: 27091 - RNA, 22 nt, synthetic construct
  source 1..22: mol_type = other RNA
catcaggcttgcttcggggcca

SEQ ID NO: 27092 - RNA, 22 nt, synthetic construct
  source 1..22: mol_type = other RNA
catcatcagcatcacaggcctc

SEQ ID NO: 27093 - RNA, 22 nt, synthetic construct
  source 1..22: mol_type = other RNA
catcattgagaccatggagcag

SEQ ID NO: 27094 - RNA, 22 nt, synthetic construct
  source 1..22: mol_type = other RNA
catccagaagtaaatggagaca

SEQ ID NO: 27095 - RNA, 22 nt, synthetic construct
  source 1..22: mol_type = other RNA
catccagggaaccacaaagcta

SEQ ID NO: 27096 - RNA, 22 nt, synthetic construct
  source 1..22: mol_type = other RNA
catccaggttccaccttaattg

SEQ ID NO: 27097 - RNA, 22 nt, synthetic construct
  source 1..22: mol_type = other RNA
catcccagagttcacatctccc

SEQ ID NO: 27098 - RNA, 22 nt, synthetic construct
  source 1..22: mol_type = other RNA
catcctgaactttttgcaggaa

SEQ ID NO: 27099 - RNA, 22 nt, synthetic construct
  source 1..22: mol_type = other RNA
catcctggtttcagatagtgct

SEQ ID NO: 27100 - RNA, 22 nt, synthetic construct
  source 1..22: mol_type = other RNA
catcgcatacctcagggcagat

SEQ ID NO: 27101 - RNA, 22 nt, synthetic construct
  source 1..22: mol_type = other RNA
catcggagaagggctgcataca

SEQ ID NO: 27102 - RNA, 22 nt, synthetic construct
  source 1..22: mol_type = other RNA
catctaaaacgtaatgaggcat

SEQ ID NO: 27103 - RNA, 22 nt, synthetic construct
  source 1..22: mol_type = other RNA
catctacacatgtatgcagccc

SEQ ID NO: 27104 - RNA, 22 nt, synthetic construct
  source 1..22: mol_type = other RNA
catctcacataaatgccattaa

SEQ ID NO: 27105 - RNA, 22 nt, synthetic construct
  source 1..22: mol_type = other RNA
catctccagttccaaaaaccct

SEQ ID NO: 27106 - RNA, 22 nt, synthetic construct
  source 1..22: mol_type = other RNA
catctccctcaaaaccagcaac

SEQ ID NO: 27107 - RNA, 22 nt, synthetic construct
  source 1..22: mol_type = other RNA
catctcctgcagaaaataacat

SEQ ID NO: 27108 - RNA, 22 nt, synthetic construct
  source 1..22: mol_type = other RNA
catctcttacagaagcaagaac

SEQ ID NO: 27109 - RNA, 22 nt, synthetic construct
  source 1..22: mol_type = other RNA
catctgaagcagtttcacgcca

SEQ ID NO: 27110 - RNA, 22 nt, synthetic construct
  source 1..22: mol_type = other RNA
catctgactatggcaagactca

SEQ ID NO: 27111 - RNA, 22 nt, synthetic construct
  source 1..22: mol_type = other RNA
catctgcaagatgggaaatcat

SEQ ID NO: 27112 - RNA, 22 nt, synthetic construct
  source 1..22: mol_type = other RNA
catcttgcagatgtgtaggtaa

SEQ ID NO: 27113 - RNA, 22 nt, synthetic construct
  source 1..22: mol_type = other RNA
catgaaaacattcttccacttt

SEQ ID NO: 27114 - RNA, 22 nt, synthetic construct
  source 1..22: mol_type = other RNA
catgaaatcaagtgcatgcaaa

SEQ ID NO: 27115 - RNA, 22 nt, synthetic construct
  source 1..22: mol_type = other RNA
catgacaagaacattgtattac

SEQ ID NO: 27116 - RNA, 22 nt, synthetic construct
  source 1..22: mol_type = other RNA
catgagcttttggtaaatggtc

SEQ ID NO: 27117 - RNA, 22 nt, synthetic construct
  source 1..22: mol_type = other RNA
catgcaaaatacaggtttcttg

SEQ ID NO: 27118 - RNA, 22 nt, synthetic construct
  source 1..22: mol_type = other RNA
catgcaaatgtttttcctgtgc

SEQ ID NO: 27119 - RNA, 22 nt, synthetic construct
  source 1..22: mol_type = other RNA
catgcacttgatttcatggtct

SEQ ID NO: 27120 - RNA, 22 nt, synthetic construct
  source 1..22: mol_type = other RNA
catgcctggggggctcccaagg

SEQ ID NO: 27121 - RNA, 22 nt, synthetic construct
  source 1..22: mol_type = other RNA
catgcctgtatgcacacagcac

SEQ ID NO: 27122 - RNA, 22 nt, synthetic construct
  source 1..22: mol_type = other RNA
catgctgctctaaggtggcatc

SEQ ID NO: 27123 - RNA, 22 nt, synthetic construct
  source 1..22: mol_type = other RNA
catgcttttgagtgtccttctg

SEQ ID NO: 27124 - RNA, 22 nt, synthetic construct
  source 1..22: mol_type = other RNA
catggaaaaaggtaactaagca

SEQ ID NO: 27125 - RNA, 22 nt, synthetic construct
  source 1..22: mol_type = other RNA
catggagcagcatctgaagcag

SEQ ID NO: 27126 - RNA, 22 nt, synthetic construct
  source 1..22: mol_type = other RNA
catggtaattagcacttttccc

SEQ ID NO: 27127 - RNA, 22 nt, synthetic construct
  source 1..22: mol_type = other RNA
catggtctcaatgatgctcttt

SEQ ID NO: 27128 - RNA, 22 nt, synthetic construct
  source 1..22: mol_type = other RNA
catggtctgactataaggggaa

SEQ ID NO: 27129 - RNA, 22 nt, synthetic construct
  source 1..22: mol_type = other RNA
catggtgaaaatcagtattcaa

SEQ ID NO: 27130 - RNA, 22 nt, synthetic construct
  source 1..22: mol_type = other RNA
catggtgaactcctggaaaaaa

SEQ ID NO: 27131 - RNA, 22 nt, synthetic construct
  source 1..22: mol_type = other RNA
catggttatgtatcaagtacct

SEQ ID NO: 27132 - RNA, 22 nt, synthetic construct
  source 1..22: mol_type = other RNA
catggttggttctatcctgttc

SEQ ID NO: 27133 - RNA, 22 nt, synthetic construct
  source 1..22: mol_type = other RNA
catgtatgcagcccttctccga

SEQ ID NO: 27134 - RNA, 22 nt, synthetic construct
  source 1..22: mol_type = other RNA
catgtgatgcaagttttgggtc

SEQ ID NO: 27135 - RNA, 22 nt, synthetic construct
  source 1..22: mol_type = other RNA
catgtgcagtcactgtgtggca

SEQ ID NO: 27136 - RNA, 22 nt, synthetic construct
  source 1..22: mol_type = other RNA
catgtggcttgcatccaggttc

SEQ ID NO: 27137 - RNA, 22 nt, synthetic construct
  source 1..22: mol_type = other RNA
catgtgtagatggattaggact

SEQ ID NO: 27138 - RNA, 22 nt, synthetic construct
  source 1..22: mol_type = other RNA
catgtgtctcagtacatttctg

SEQ ID NO: 27139 - RNA, 22 nt, synthetic construct
  source 1..22: mol_type = other RNA
catgtgtgtgttccacggaaga

SEQ ID NO: 27140 - RNA, 22 nt, synthetic construct
  source 1..22: mol_type = other RNA
catgttgagggcaacagactaa

SEQ ID NO: 27141 - RNA, 22 nt, synthetic construct
  source 1..22: mol_type = other RNA
catgttggaatttccagtgtat

SEQ ID NO: 27142 - RNA, 22 nt, synthetic construct
  source 1..22: mol_type = other RNA
catgttttgttttctggtggtg

SEQ ID NO: 27143 - RNA, 22 nt, synthetic construct
  source 1..22: mol_type = other RNA
cattaacagtcaggctactaat

SEQ ID NO: 27144 - RNA, 22 nt, synthetic construct
  source 1..22: mol_type = other RNA
cattacgttttagatgggattc

SEQ ID NO: 27145 - RNA, 22 nt, synthetic construct
  source 1..22: mol_type = other RNA
cattagcactgccttgttttta

SEQ ID NO: 27146 - RNA, 22 nt, synthetic construct
  source 1..22: mol_type = other RNA
cattagccttttggtcttgttt

SEQ ID NO: 27147 - RNA, 22 nt, synthetic construct
  source 1..22: mol_type = other RNA
cattaggcattagcactgcctt

SEQ ID NO: 27148 - RNA, 22 nt, synthetic construct
  source 1..22: mol_type = other RNA
cattagtagcctgactgttaat

SEQ ID NO: 27149 - RNA, 22 nt, synthetic construct
  source 1..22: mol_type = other RNA
cattatcacagcttgcaggtgg

SEQ ID NO: 27150 - RNA, 22 nt, synthetic construct
  source 1..22: mol_type = other RNA
cattatcagcatcatcagcatc

SEQ ID NO: 27151 - RNA, 22 nt, synthetic construct
  source 1..22: mol_type = other RNA
cattatgagtctcgaactcgct

SEQ ID NO: 27152 - RNA, 22 nt, synthetic construct
  source 1..22: mol_type = other RNA
cattcagaatctgaagctctgg

SEQ ID NO: 27153 - RNA, 22 nt, synthetic construct
  source 1..22: mol_type = other RNA
cattcagagtgctttttccttc

SEQ ID NO: 27154 - RNA, 22 nt, synthetic construct
  source 1..22: mol_type = other RNA
cattcctgataccatcacctcc

SEQ ID NO: 27155 - RNA, 22 nt, synthetic construct
  source 1..22: mol_type = other RNA
cattcctgttcacacaattatt

SEQ ID NO: 27156 - RNA, 22 nt, synthetic construct
  source 1..22: mol_type = other RNA
cattctggagctttgtagccag

SEQ ID NO: 27157 - RNA, 22 nt, synthetic construct
  source 1..22: mol_type = other RNA
cattcttccactttagtctggc

SEQ ID NO: 27158 - RNA, 22 nt, synthetic construct
  source 1..22: mol_type = other RNA
cattctttggccagactaaagt

SEQ ID NO: 27159 - RNA, 22 nt, synthetic construct
  source 1..22: mol_type = other RNA
cattgagaccatggagcagcat

SEQ ID NO: 27160 - RNA, 22 nt, synthetic construct
  source 1..22: mol_type = other RNA
cattgcagctagtttactggca

SEQ ID NO: 27161 - RNA, 22 nt, synthetic construct
  source 1..22: mol_type = other RNA
cattgcggtgcagaaaaccaca

SEQ ID NO: 27162 - RNA, 22 nt, synthetic construct
  source 1..22: mol_type = other RNA
cattggtcttgttttctcagaa

SEQ ID NO: 27163 - RNA, 22 nt, synthetic construct
  source 1..22: mol_type = other RNA
cattgtccctgcagtctgtatg

SEQ ID NO: 27164 - RNA, 22 nt, synthetic construct
  source 1..22: mol_type = other RNA
cattgtgttctgagaaaacaag

SEQ ID NO: 27165 - RNA, 22 nt, synthetic construct
  source 1..22: mol_type = other RNA
cattgttgctttgggggtgagg

SEQ ID NO: 27166 - RNA, 22 nt, synthetic construct
  source 1..22: mol_type = other RNA
catttaccaaaagctcatgtgc

SEQ ID NO: 27167 - RNA, 22 nt, synthetic construct
  source 1..22: mol_type = other RNA
catttacttctggatgagctct

SEQ ID NO: 27168 - RNA, 22 nt, synthetic construct
  source 1..22: mol_type = other RNA
catttatgtgagatgtggtttt

SEQ ID NO: 27169 - RNA, 22 nt, synthetic construct
  source 1..22: mol_type = other RNA
catttcaacttggtacatttgt

SEQ ID NO: 27170 - RNA, 22 nt, synthetic construct
  source 1..22: mol_type = other RNA
catttcaacttttacttgcttc

SEQ ID NO: 27171 - RNA, 22 nt, synthetic construct
  source 1..22: mol_type = other RNA
catttctggcacttacctacac

SEQ ID NO: 27172 - RNA, 22 nt, synthetic construct
  source 1..22: mol_type = other RNA
catttgattggagagattgggt

SEQ ID NO: 27173 - RNA, 22 nt, synthetic construct
  source 1..22: mol_type = other RNA
catttgcatggttatgtatcaa

SEQ ID NO: 27174 - RNA, 22 nt, synthetic construct
  source 1..22: mol_type = other RNA
catttgccagacagaacctctg

SEQ ID NO: 27175 - RNA, 22 nt, synthetic construct
  source 1..22: mol_type = other RNA
catttggacattatgagtctcg

SEQ ID NO: 27176 - RNA, 22 nt, synthetic construct
  source 1..22: mol_type = other RNA
catttggttgactgctttcacc

SEQ ID NO: 27177 - RNA, 22 nt, synthetic construct
  source 1..22: mol_type = other RNA
catttgtgacttgtgctccagc

SEQ ID NO: 27178 - RNA, 22 nt, synthetic construct
  source 1..22: mol_type = other RNA
cattttcaaactcacacctttt

SEQ ID NO: 27179 - RNA, 22 nt, synthetic construct
  source 1..22: mol_type = other RNA
cattttcaacaaagagcagatt

SEQ ID NO: 27180 - RNA, 22 nt, synthetic construct
  source 1..22: mol_type = other RNA
cattttcttgggctacagaact

SEQ ID NO: 27181 - RNA, 22 nt, synthetic construct
  source 1..22: mol_type = other RNA
cattttgcaaacacttggaata

SEQ ID NO: 27182 - RNA, 22 nt, synthetic construct
  source 1..22: mol_type = other RNA
cattttgttttaaataccgttc

SEQ ID NO: 27183 - RNA, 22 nt, synthetic construct
  source 1..22: mol_type = other RNA
ccaaaaaccctcacaccaggtg

SEQ ID NO: 27184 - RNA, 22 nt, synthetic construct
  source 1..22: mol_type = other RNA
ccaaaaattggtgggttatgct

SEQ ID NO: 27185 - RNA, 22 nt, synthetic construct
  source 1..22: mol_type = other RNA
ccaaaacagaccatttaccaaa

SEQ ID NO: 27186 - RNA, 22 nt, synthetic construct
  source 1..22: mol_type = other RNA
ccaaaacttgcatcacatgcaa

SEQ ID NO: 27187 - RNA, 22 nt, synthetic construct
  source 1..22: mol_type = other RNA
ccaaaagaacagctgcttctgt

SEQ ID NO: 27188 - RNA, 22 nt, synthetic construct
  source 1..22: mol_type = other RNA
ccaaaagctcatgtgcagtcac

SEQ ID NO: 27189 - RNA, 22 nt, synthetic construct
  source 1..22: mol_type = other RNA
ccaaaaggctaatggagaaaga

SEQ ID NO: 27190 - RNA, 22 nt, synthetic construct
  source 1..22: mol_type = other RNA
ccaaacaatacactggaaattc

SEQ ID NO: 27191 - RNA, 22 nt, synthetic construct
  source 1..22: mol_type = other RNA
ccaaactgaaaaacttatgtcc

SEQ ID NO: 27192 - RNA, 22 nt, synthetic construct
  source 1..22: mol_type = other RNA
ccaaactgagtcttgccatagt

SEQ ID NO: 27193 - RNA, 22 nt, synthetic construct
  source 1..22: mol_type = other RNA
ccaaagaatgatccttctcttt

SEQ ID NO: 27194 - RNA, 22 nt, synthetic construct
  source 1..22: mol_type = other RNA
ccaaagcaacaatgatcagcaa

SEQ ID NO: 27195 - RNA, 22 nt, synthetic construct
  source 1..22: mol_type = other RNA
ccaaagcaagatcttcttcaca

SEQ ID NO: 27196 - RNA, 22 nt, synthetic construct
  source 1..22: mol_type = other RNA
ccaaagccagctgcagtggtga

SEQ ID NO: 27197 - RNA, 22 nt, synthetic construct
  source 1..22: mol_type = other RNA
ccaaagtaacacaacactttta

SEQ ID NO: 27198 - RNA, 22 nt, synthetic construct
  source 1..22: mol_type = other RNA
ccaaataatgtgatcccaaagc

SEQ ID NO: 27199 - RNA, 22 nt, synthetic construct
  source 1..22: mol_type = other RNA
ccaaatgggactggaggaagta

SEQ ID NO: 27200 - RNA, 22 nt, synthetic construct
  source 1..22: mol_type = other RNA
ccaaatgtctccgatttgagtg

SEQ ID NO: 27201 - RNA, 22 nt, synthetic construct
  source 1..22: mol_type = other RNA
ccaaattactagatactcctat

SEQ ID NO: 27202 - RNA, 22 nt, synthetic construct
  source 1..22: mol_type = other RNA
ccaacacagcactatctgaaac

SEQ ID NO: 27203 - RNA, 22 nt, synthetic construct
  source 1..22: mol_type = other RNA
ccaacatctccagttccaaaaa

SEQ ID NO: 27204 - RNA, 22 nt, synthetic construct
  source 1..22: mol_type = other RNA
ccaacatgcctggggggctccc

SEQ ID NO: 27205 - RNA, 22 nt, synthetic construct
  source 1..22: mol_type = other RNA
ccaaccaaaagaacagctgctt

SEQ ID NO: 27206 - RNA, 22 nt, synthetic construct
  source 1..22: mol_type = other RNA
ccaaccaaagtaacacaacact

SEQ ID NO: 27207 - RNA, 22 nt, synthetic construct
  source 1..22: mol_type = other RNA
ccaaccatgttgagggcaacag

SEQ ID NO: 27208 - RNA, 22 nt, synthetic construct
  source 1..22: mol_type = other RNA
ccaagaaaatgcagttaaagat

SEQ ID NO: 27209 - RNA, 22 nt, synthetic construct
  source 1..22: mol_type = other RNA
ccaagaaagaaatccaggtgaa

SEQ ID NO: 27210 - RNA, 22 nt, synthetic construct
  source 1..22: mol_type = other RNA
ccaagatatgtctggtcaacaa

SEQ ID NO: 27211 - RNA, 22 nt, synthetic construct
  source 1..22: mol_type = other RNA
ccaagcggaatcccatctaaaa

SEQ ID NO: 27212 - RNA, 22 nt, synthetic construct
  source 1..22: mol_type = other RNA
ccaaggcaagcttacacccaga

SEQ ID NO: 27213 - RNA, 22 nt, synthetic construct
  source 1..22: mol_type = other RNA
ccaaggtacagtggaccaacat

SEQ ID NO: 27214 - RNA, 22 nt, synthetic construct
  source 1..22: mol_type = other RNA
ccaagtcgttatttgaccataa

SEQ ID NO: 27215 - RNA, 22 nt, synthetic construct
  source 1..22: mol_type = other RNA
ccaagtggcactctttcaaaag

SEQ ID NO: 27216 - RNA, 22 nt, synthetic construct
  source 1..22: mol_type = other RNA
ccaagtgtttgcaaaatggagg

SEQ ID NO: 27217 - RNA, 22 nt, synthetic construct
  source 1..22: mol_type = other RNA
ccaagttgaaatgaatcaaggg

SEQ ID NO: 27218 - RNA, 22 nt, synthetic construct
  source 1..22: mol_type = other RNA
ccaatcaaatgacctccaaaca

SEQ ID NO: 27219 - RNA, 22 nt, synthetic construct
  source 1..22: mol_type = other RNA
ccaatctctccaatcaaatgac

SEQ ID NO: 27220 - RNA, 22 nt, synthetic construct
  source 1..22: mol_type = other RNA
ccaatgtcagaacacctcaagc

SEQ ID NO: 27221 - RNA, 22 nt, synthetic construct
  source 1..22: mol_type = other RNA
ccaattaaggtggaacctggat

SEQ ID NO: 27222 - RNA, 22 nt, synthetic construct
  source 1..22: mol_type = other RNA
ccaatttttggtagcagtggag

SEQ ID NO: 27223 - RNA, 22 nt, synthetic construct
  source 1..22: mol_type = other RNA
ccacaaagctagcgtctggtga

SEQ ID NO: 27224 - RNA, 22 nt, synthetic construct
  source 1..22: mol_type = other RNA
ccacacagtgactgcacatgag

SEQ ID NO: 27225 - RNA, 22 nt, synthetic construct
  source 1..22: mol_type = other RNA
ccacaccaccaccaccatcaca

SEQ ID NO: 27226 - RNA, 22 nt, synthetic construct
  source 1..22: mol_type = other RNA
ccacaccccagctttagagcag

SEQ ID NO: 27227 - RNA, 22 nt, synthetic construct
  source 1..22: mol_type = other RNA
ccacaggttcctcagcttcctt

SEQ ID NO: 27228 - RNA, 22 nt, synthetic construct
  source 1..22: mol_type = other RNA
ccacatctcacataaatgccat

SEQ ID NO: 27229 - RNA, 22 nt, synthetic construct
  source 1..22: mol_type = other RNA
ccacatgcctgtatgcacacag

SEQ ID NO: 27230 - RNA, 22 nt, synthetic construct
  source 1..22: mol_type = other RNA
ccaccaatttttggtagcagtg

SEQ ID NO: 27231 - RNA, 22 nt, synthetic construct
  source 1..22: mol_type = other RNA
ccaccaccaccatcacaattgc

SEQ ID NO: 27232 - RNA, 22 nt, synthetic construct
  source 1..22: mol_type = other RNA
ccaccaccatcacaattgcttc

SEQ ID NO: 27233 - RNA, 22 nt, synthetic construct
  source 1..22: mol_type = other RNA
ccaccactaccccaaccaaagt

SEQ ID NO: 27234 - RNA, 22 nt, synthetic construct
  source 1..22: mol_type = other RNA
ccaccagaaaacaaaacatgga

SEQ ID NO: 27235 - RNA, 22 nt, synthetic construct
  source 1..22: mol_type = other RNA
ccaccaggagcttgcaaattgc

SEQ ID NO: 27236 - RNA, 22 nt, synthetic construct
  source 1..22: mol_type = other RNA
ccaccatcacaattgcttcttt

SEQ ID NO: 27237 - RNA, 22 nt, synthetic construct
  source 1..22: mol_type = other RNA
ccaccattcagagtgctttttc

SEQ ID NO: 27238 - RNA, 22 nt, synthetic construct
  source 1..22: mol_type = other RNA
ccacctgcaagctgtgataatg

SEQ ID NO: 27239 - RNA, 22 nt, synthetic construct
  source 1..22: mol_type = other RNA
ccaccttaattggcctgtgcat

SEQ ID NO: 27240 - RNA, 22 nt, synthetic construct
  source 1..22: mol_type = other RNA
ccaccttagagcagcatgcttt

SEQ ID NO: 27241 - RNA, 22 nt, synthetic construct
  source 1..22: mol_type = other RNA
ccaccttcccagagtcctaatc

SEQ ID NO: 27242 - RNA, 22 nt, synthetic construct
  source 1..22: mol_type = other RNA
ccacggaagaggcagaaactgt

SEQ ID NO: 27243 - RNA, 22 nt, synthetic construct
  source 1..22: mol_type = other RNA
ccactaccacaccaccaccacc

SEQ ID NO: 27244 - RNA, 22 nt, synthetic construct
  source 1..22: mol_type = other RNA
ccactaccccaaccaaagtaac

SEQ ID NO: 27245 - RNA, 22 nt, synthetic construct
  source 1..22: mol_type = other RNA
ccactgcagctggctttggagg

SEQ ID NO: 27246 - RNA, 22 nt, synthetic construct
  source 1..22: mol_type = other RNA
ccactgcagttatgtgttgaaa

SEQ ID NO: 27247 - RNA, 22 nt, synthetic construct
  source 1..22: mol_type = other RNA
ccactgcctgagagagctcatc

SEQ ID NO: 27248 - RNA, 22 nt, synthetic construct
  source 1..22: mol_type = other RNA
ccactgctaccaaaaattggtg

SEQ ID NO: 27249 - RNA, 22 nt, synthetic construct
  source 1..22: mol_type = other RNA
ccactgctgcagaacttgatag

SEQ ID NO: 27250 - RNA, 22 nt, synthetic construct
  source 1..22: mol_type = other RNA
ccactgtaccttgggactgccc

SEQ ID NO: 27251 - RNA, 22 nt, synthetic construct
  source 1..22: mol_type = other RNA
ccacttggtgtctccatttact

SEQ ID NO: 27252 - RNA, 22 nt, synthetic construct
  source 1..22: mol_type = other RNA
ccactttagtctggccaaagaa

SEQ ID NO: 27253 - RNA, 22 nt, synthetic construct
  source 1..22: mol_type = other RNA
ccagaaaacaaaacatggaaaa

SEQ ID NO: 27254 - RNA, 22 nt, synthetic construct
  source 1..22: mol_type = other RNA
ccagaaaacaacacagctggag

SEQ ID NO: 27255 - RNA, 22 nt, synthetic construct
  source 1..22: mol_type = other RNA
ccagaaatgtactgagacacat

SEQ ID NO: 27256 - RNA, 22 nt, synthetic construct
  source 1..22: mol_type = other RNA
ccagaacaactacaacaacaaa

SEQ ID NO: 27257 - RNA, 22 nt, synthetic construct
  source 1..22: mol_type = other RNA
ccagaaggacactcaaaagcat

SEQ ID NO: 27258 - RNA, 22 nt, synthetic construct
  source 1..22: mol_type = other RNA
ccagaagtaaatggagacacca

SEQ ID NO: 27259 - RNA, 22 nt, synthetic construct
  source 1..22: mol_type = other RNA
ccagaatagtcgtgtgagtcct

SEQ ID NO: 27260 - RNA, 22 nt, synthetic construct
  source 1..22: mol_type = other RNA
ccagaatggaagcccactgcct

SEQ ID NO: 27261 - RNA, 22 nt, synthetic construct
  source 1..22: mol_type = other RNA
ccagacagaacctctggctaca

SEQ ID NO: 27262 - RNA, 22 nt, synthetic construct
  source 1..22: mol_type = other RNA
ccagacatatcttggtttctat

SEQ ID NO: 27263 - RNA, 22 nt, synthetic construct
  source 1..22: mol_type = other RNA
ccagacgctagctttgtggttc

SEQ ID NO: 27264 - RNA, 22 nt, synthetic construct
  source 1..22: mol_type = other RNA
ccagactaaagtggaagaatgt

SEQ ID NO: 27265 - RNA, 22 nt, synthetic construct
  source 1..22: mol_type = other RNA
ccagacttttcctcacccccaa

SEQ ID NO: 27266 - RNA, 22 nt, synthetic construct
  source 1..22: mol_type = other RNA
ccagagagagaaggttcactaa

SEQ ID NO: 27267 - RNA, 22 nt, synthetic construct
  source 1..22: mol_type = other RNA
ccagagcttcagattctgaatg

SEQ ID NO: 27268 - RNA, 22 nt, synthetic construct
  source 1..22: mol_type = other RNA
ccagaggttctgtctggcaaat

SEQ ID NO: 27269 - RNA, 22 nt, synthetic construct
  source 1..22: mol_type = other RNA
ccagagtcctaatccatctaca

SEQ ID NO: 27270 - RNA, 22 nt, synthetic construct
  source 1..22: mol_type = other RNA
ccagagttcacatctccctcaa

SEQ ID NO: 27271 - RNA, 22 nt, synthetic construct
  source 1..22: mol_type = other RNA
ccagattgtgtttccattgcgg

SEQ ID NO: 27272 - RNA, 22 nt, synthetic construct
  source 1..22: mol_type = other RNA
ccagcaacagcagcaaaaatta

SEQ ID NO: 27273 - RNA, 22 nt, synthetic construct
  source 1..22: mol_type = other RNA
ccagcagcaatttgcaagctcc

SEQ ID NO: 27274 - RNA, 22 nt, synthetic construct
  source 1..22: mol_type = other RNA
ccagcagttgatgagaaacaaa

SEQ ID NO: 27275 - RNA, 22 nt, synthetic construct
  source 1..22: mol_type = other RNA
ccagctgcagtggtgagtgagg

SEQ ID NO: 27276 - RNA, 22 nt, synthetic construct
  source 1..22: mol_type = other RNA
ccagctgtgttgttttctgggt

SEQ ID NO: 27277 - RNA, 22 nt, synthetic construct
  source 1..22: mol_type = other RNA
ccagctttagagcagcaaacaa

SEQ ID NO: 27278 - RNA, 22 nt, synthetic construct
  source 1..22: mol_type = other RNA
ccaggagcttgcaaattgctgc

SEQ ID NO: 27279 - RNA, 22 nt, synthetic construct
  source 1..22: mol_type = other RNA
ccaggagttcaccatgtgtgtg

SEQ ID NO: 27280 - RNA, 22 nt, synthetic construct
  source 1..22: mol_type = other RNA
ccaggatggattgaattgaagg

SEQ ID NO: 27281 - RNA, 22 nt, synthetic construct
  source 1..22: mol_type = other RNA
ccaggcatgttggaatttccag

SEQ ID NO: 27282 - RNA, 22 nt, synthetic construct
  source 1..22: mol_type = other RNA
ccagggaaccacaaagctagcg

SEQ ID NO: 27283 - RNA, 22 nt, synthetic construct
  source 1..22: mol_type = other RNA
ccagggaggaagtcacactcag

SEQ ID NO: 27284 - RNA, 22 nt, synthetic construct
  source 1..22: mol_type = other RNA
ccaggtgaaagcagtcaaccaa

SEQ ID NO: 27285 - RNA, 22 nt, synthetic construct
  source 1..22: mol_type = other RNA
ccaggtgcacttctccaaaaca

SEQ ID NO: 27286 - RNA, 22 nt, synthetic construct
  source 1..22: mol_type = other RNA
ccaggttccaccttaattggcc

SEQ ID NO: 27287 - RNA, 22 nt, synthetic construct
  source 1..22: mol_type = other RNA
ccagtaaactagctgcaatgct

SEQ ID NO: 27288 - RNA, 22 nt, synthetic construct
  source 1..22: mol_type = other RNA
ccagtcacagttttgactagac

SEQ ID NO: 27289 - RNA, 22 nt, synthetic construct
  source 1..22: mol_type = other RNA
ccagtcccatttggacattatg

SEQ ID NO: 27290 - RNA, 22 nt, synthetic construct
  source 1..22: mol_type = other RNA
ccagtgtattgtttggaggtca

SEQ ID NO: 27291 - RNA, 22 nt, synthetic construct
  source 1..22: mol_type = other RNA
ccagtgttgaaacagcacttga

SEQ ID NO: 27292 - RNA, 22 nt, synthetic construct
  source 1..22: mol_type = other RNA
ccagttccaaaaaccctcacac

SEQ ID NO: 27293 - RNA, 22 nt, synthetic construct
  source 1..22: mol_type = other RNA
ccagtttttcaacacataactg

SEQ ID NO: 27294 - RNA, 22 nt, synthetic construct
  source 1..22: mol_type = other RNA
ccataaggctcttactctcaaa

SEQ ID NO: 27295 - RNA, 22 nt, synthetic construct
  source 1..22: mol_type = other RNA
ccataataacttttgaaagagt

SEQ ID NO: 27296 - RNA, 22 nt, synthetic construct
  source 1..22: mol_type = other RNA
ccatagtcagatgcacaggcca

SEQ ID NO: 27297 - RNA, 22 nt, synthetic construct
  source 1..22: mol_type = other RNA
ccatcaattcttcagtatcaac

SEQ ID NO: 27298 - RNA, 22 nt, synthetic construct
  source 1..22: mol_type = other RNA
ccatcacaattgcttctttctc

SEQ ID NO: 27299 - RNA, 22 nt, synthetic construct
  source 1..22: mol_type = other RNA
ccatcacctcccatttgccaga

SEQ ID NO: 27300 - RNA, 22 nt, synthetic construct
  source 1..22: mol_type = other RNA
ccatcaggcttgcttcggggcc

SEQ ID NO: 27301 - RNA, 22 nt, synthetic construct
  source 1..22: mol_type = other RNA
ccatcccagagttcacatctcc

SEQ ID NO: 27302 - RNA, 22 nt, synthetic construct
  source 1..22: mol_type = other RNA
ccatcctggtttcagatagtgc

SEQ ID NO: 27303 - RNA, 22 nt, synthetic construct
  source 1..22: mol_type = other RNA
ccatcgcatacctcagggcaga

SEQ ID NO: 27304 - RNA, 22 nt, synthetic construct
  source 1..22: mol_type = other RNA
ccatctaaaacgtaatgaggca

SEQ ID NO: 27305 - RNA, 22 nt, synthetic construct
  source 1..22: mol_type = other RNA
ccatctacacatgtatgcagcc

SEQ ID NO: 27306 - RNA, 22 nt, synthetic construct
  source 1..22: mol_type = other RNA
ccatctcctgcagaaaataaca

SEQ ID NO: 27307 - RNA, 22 nt, synthetic construct
  source 1..22: mol_type = other RNA
ccatcttgcagatgtgtaggta

SEQ ID NO: 27308 - RNA, 22 nt, synthetic construct
  source 1..22: mol_type = other RNA
ccatgaaaacattcttccactt

SEQ ID NO: 27309 - RNA, 22 nt, synthetic construct
  source 1..22: mol_type = other RNA
ccatgaaatcaagtgcatgcaa

SEQ ID NO: 27310 - RNA, 22 nt, synthetic construct
  source 1..22: mol_type = other RNA
ccatgacaagaacattgtatta

SEQ ID NO: 27311 - RNA, 22 nt, synthetic construct
  source 1..22: mol_type = other RNA
ccatgcaaatgtttttcctgtg

SEQ ID NO: 27312 - RNA, 22 nt, synthetic construct
  source 1..22: mol_type = other RNA
ccatggagcagcatctgaagca

SEQ ID NO: 27313 - RNA, 22 nt, synthetic construct
  source 1..22: mol_type = other RNA
ccatggtctcaatgatgctctt

SEQ ID NO: 27314 - RNA, 22 nt, synthetic construct
  source 1..22: mol_type = other RNA
ccatgtgtctcagtacatttct

SEQ ID NO: 27315 - RNA, 22 nt, synthetic construct
  source 1..22: mol_type = other RNA
ccatgtgtgtgttccacggaag

SEQ ID NO: 27316 - RNA, 22 nt, synthetic construct
  source 1..22: mol_type = other RNA
ccatgttgagggcaacagacta

SEQ ID NO: 27317 - RNA, 22 nt, synthetic construct
  source 1..22: mol_type = other RNA
ccatgttttgttttctggtggt

SEQ ID NO: 27318 - RNA, 22 nt, synthetic construct
  source 1..22: mol_type = other RNA
ccattaacagtcaggctactaa

SEQ ID NO: 27319 - RNA, 22 nt, synthetic construct
  source 1..22: mol_type = other RNA
ccattagccttttggtcttgtt

SEQ ID NO: 27320 - RNA, 22 nt, synthetic construct
  source 1..22: mol_type = other RNA
ccattaggcattagcactgcct

SEQ ID NO: 27321 - RNA, 22 nt, synthetic construct
  source 1..22: mol_type = other RNA
ccattcagagtgctttttcctt

SEQ ID NO: 27322 - RNA, 22 nt, synthetic construct
  source 1..22: mol_type = other RNA
ccattcctgataccatcacctc

SEQ ID NO: 27323 - RNA, 22 nt, synthetic construct
  source 1..22: mol_type = other RNA
ccattctggagctttgtagcca

SEQ ID NO: 27324 - RNA, 22 nt, synthetic construct
  source 1..22: mol_type = other RNA
ccattgcggtgcagaaaaccac

SEQ ID NO: 27325 - RNA, 22 nt, synthetic construct
  source 1..22: mol_type = other RNA
ccattgtgttctgagaaaacaa

SEQ ID NO: 27326 - RNA, 22 nt, synthetic construct
  source 1..22: mol_type = other RNA
ccatttaccaaaagctcatgtg

SEQ ID NO: 27327 - RNA, 22 nt, synthetic construct
  source 1..22: mol_type = other RNA
ccatttacttctggatgagctc

SEQ ID NO: 27328 - RNA, 22 nt, synthetic construct
  source 1..22: mol_type = other RNA
ccatttgccagacagaacctct

SEQ ID NO: 27329 - RNA, 22 nt, synthetic construct
  source 1..22: mol_type = other RNA
ccatttggacattatgagtctc

SEQ ID NO: 27330 - RNA, 22 nt, synthetic construct
  source 1..22: mol_type = other RNA
ccattttcaaactcacaccttt

SEQ ID NO: 27331 - RNA, 22 nt, synthetic construct
  source 1..22: mol_type = other RNA
ccattttgcaaacacttggaat

SEQ ID NO: 27332 - RNA, 22 nt, synthetic construct
  source 1..22: mol_type = other RNA
cccaaaacttgcatcacatgca

SEQ ID NO: 27333 - RNA, 22 nt, synthetic construct
  source 1..22: mol_type = other RNA
cccaaactgaaaaacttatgtc

SEQ ID NO: 27334 - RNA, 22 nt, synthetic construct
  source 1..22: mol_type = other RNA
cccaaactgagtcttgccatag

SEQ ID NO: 27335 - RNA, 22 nt, synthetic construct
  source 1..22: mol_type = other RNA
cccaaagcaacaatgatcagca

SEQ ID NO: 27336 - RNA, 22 nt, synthetic construct
  source 1..22: mol_type = other RNA
cccaaagcaagatcttcttcac

SEQ ID NO: 27337 - RNA, 22 nt, synthetic construct
  source 1..22: mol_type = other RNA
cccaacacagcactatctgaaa

SEQ ID NO: 27338 - RNA, 22 nt, synthetic construct
  source 1..22: mol_type = other RNA
cccaaccaaagtaacacaacac

SEQ ID NO: 27339 - RNA, 22 nt, synthetic construct
  source 1..22: mol_type = other RNA
cccaagaaaatgcagttaaaga

SEQ ID NO: 27340 - RNA, 22 nt, synthetic construct
  source 1..22: mol_type = other RNA
cccaaggcaagcttacacccag

SEQ ID NO: 27341 - RNA, 22 nt, synthetic construct
  source 1..22: mol_type = other RNA
cccaaggtacagtggaccaaca

SEQ ID NO: 27342 - RNA, 22 nt, synthetic construct
  source 1..22: mol_type = other RNA
cccaatctctccaatcaaatga

SEQ ID NO: 27343 - RNA, 22 nt, synthetic construct
  source 1..22: mol_type = other RNA
cccaccaatttttggtagcagt

SEQ ID NO: 27344 - RNA, 22 nt, synthetic construct
  source 1..22: mol_type = other RNA
cccactgcagttatgtgttgaa

SEQ ID NO: 27345 - RNA, 22 nt, synthetic construct
  source 1..22: mol_type = other RNA
cccactgcctgagagagctcat

SEQ ID NO: 27346 - RNA, 22 nt, synthetic construct
  source 1..22: mol_type = other RNA
cccagaaaacaacacagctgga

SEQ ID NO: 27347 - RNA, 22 nt, synthetic construct
  source 1..22: mol_type = other RNA
cccagaaggacactcaaaagca

SEQ ID NO: 27348 - RNA, 22 nt, synthetic construct
  source 1..22: mol_type = other RNA
cccagagagagaaggttcacta

SEQ ID NO: 27349 - RNA, 22 nt, synthetic construct
  source 1..22: mol_type = other RNA
cccagagtcctaatccatctac

SEQ ID NO: 27350 - RNA, 22 nt, synthetic construct
  source 1..22: mol_type = other RNA
cccagagttcacatctccctca

SEQ ID NO: 27351 - RNA, 22 nt, synthetic construct
  source 1..22: mol_type = other RNA
cccagctttagagcagcaaaca

SEQ ID NO: 27352 - RNA, 22 nt, synthetic construct
  source 1..22: mol_type = other RNA
cccaggcatgttggaatttcca

SEQ ID NO: 27353 - RNA, 22 nt, synthetic construct
  source 1..22: mol_type = other RNA
cccagtgttgaaacagcacttg

SEQ ID NO: 27354 - RNA, 22 nt, synthetic construct
  source 1..22: mol_type = other RNA
cccatcgcatacctcagggcag

SEQ ID NO: 27355 - RNA, 22 nt, synthetic construct
  source 1..22: mol_type = other RNA
cccatctaaaacgtaatgaggc

SEQ ID NO: 27356 - RNA, 22 nt, synthetic construct
  source 1..22: mol_type = other RNA
cccatctcctgcagaaaataac

SEQ ID NO: 27357 - RNA, 22 nt, synthetic construct
  source 1..22: mol_type = other RNA
cccatcttgcagatgtgtaggt

SEQ ID NO: 27358 - RNA, 22 nt, synthetic construct
  source 1..22: mol_type = other RNA
cccatttgccagacagaacctc

SEQ ID NO: 27359 - RNA, 22 nt, synthetic construct
  source 1..22: mol_type = other RNA
cccatttggacattatgagtct

SEQ ID NO: 27360 - RNA, 22 nt, synthetic construct
  source 1..22: mol_type = other RNA
ccccaaactgagtcttgccata

SEQ ID NO: 27361 - RNA, 22 nt, synthetic construct
  source 1..22: mol_type = other RNA
ccccaaagcaacaatgatcagc

SEQ ID NO: 27362 - RNA, 22 nt, synthetic construct
  source 1..22: mol_type = other RNA
ccccaacacagcactatctgaa

SEQ ID NO: 27363 - RNA, 22 nt, synthetic construct
  source 1..22: mol_type = other RNA
ccccaaccaaagtaacacaaca

SEQ ID NO: 27364 - RNA, 22 nt, synthetic construct
  source 1..22: mol_type = other RNA
ccccagaaggacactcaaaagc

SEQ ID NO: 27365 - RNA, 22 nt, synthetic construct
  source 1..22: mol_type = other RNA
ccccagctttagagcagcaaac

SEQ ID NO: 27366 - RNA, 22 nt, synthetic construct
  source 1..22: mol_type = other RNA
ccccaggcatgttggaatttcc

SEQ ID NO: 27367 - RNA, 22 nt, synthetic construct
  source 1..22: mol_type = other RNA
ccccagtgttgaaacagcactt

SEQ ID NO: 27368 - RNA, 22 nt, synthetic construct
  source 1..22: mol_type = other RNA
cccccaaagcaacaatgatcag

SEQ ID NO: 27369 - RNA, 22 nt, synthetic construct
  source 1..22: mol_type = other RNA
cccccaacacagcactatctga

SEQ ID NO: 27370 - RNA, 22 nt, synthetic construct
  source 1..22: mol_type = other RNA
cccccaggcatgttggaatttc

SEQ ID NO: 27371 - RNA, 22 nt, synthetic construct
  source 1..22: mol_type = other RNA
ccccccaggcatgttggaattt

SEQ ID NO: 27372 - RNA, 22 nt, synthetic construct
  source 1..22: mol_type = other RNA
ccccctcctcctcttccacagg

SEQ ID NO: 27373 - RNA, 22 nt, synthetic construct
  source 1..22: mol_type = other RNA
ccccgaagcaagcctgatggaa

SEQ ID NO: 27374 - RNA, 22 nt, synthetic construct
  source 1..22: mol_type = other RNA
ccccgaagttacgtctttctcc

SEQ ID NO: 27375 - RNA, 22 nt, synthetic construct
  source 1..22: mol_type = other RNA
cccctccccagaaggacactca

SEQ ID NO: 27376 - RNA, 22 nt, synthetic construct
  source 1..22: mol_type = other RNA
cccctcctcctcttccacaggt

SEQ ID NO: 27377 - RNA, 22 nt, synthetic construct
  source 1..22: mol_type = other RNA
cccctcctgctcattcagaatc

SEQ ID NO: 27378 - RNA, 22 nt, synthetic construct
  source 1..22: mol_type = other RNA
cccctcgttttcaccaagcgga

SEQ ID NO: 27379 - RNA, 22 nt, synthetic construct
  source 1..22: mol_type = other RNA
ccccttatagtcagaccatgaa

SEQ ID NO: 27380 - RNA, 22 nt, synthetic construct
  source 1..22: mol_type = other RNA
cccgaagcaagcctgatggaac

SEQ ID NO: 27381 - RNA, 22 nt, synthetic construct
  source 1..22: mol_type = other RNA
cccgaagttacgtctttctcca

SEQ ID NO: 27382 - RNA, 22 nt, synthetic construct
  source 1..22: mol_type = other RNA
ccctcaaaaccagcaacagcag

SEQ ID NO: 27383 - RNA, 22 nt, synthetic construct
  source 1..22: mol_type = other RNA
ccctcaacatggttggttctat

SEQ ID NO: 27384 - RNA, 22 nt, synthetic construct
  source 1..22: mol_type = other RNA
ccctcacaccaggtgcacttct

SEQ ID NO: 27385 - RNA, 22 nt, synthetic construct
  source 1..22: mol_type = other RNA
ccctccccagaaggacactcaa

SEQ ID NO: 27386 - RNA, 22 nt, synthetic construct
  source 1..22: mol_type = other RNA
ccctcctcctcttccacaggtt

SEQ ID NO: 27387 - RNA, 22 nt, synthetic construct
  source 1..22: mol_type = other RNA
ccctcctgctcattcagaatct

SEQ ID NO: 27388 - RNA, 22 nt, synthetic construct
  source 1..22: mol_type = other RNA
ccctcgttttcaccaagcggaa

SEQ ID NO: 27389 - RNA, 22 nt, synthetic construct
  source 1..22: mol_type = other RNA
ccctctactttcttgtgtaaag

SEQ ID NO: 27390 - RNA, 22 nt, synthetic construct
  source 1..22: mol_type = other RNA
ccctctattttcacttccctta

SEQ ID NO: 27391 - RNA, 22 nt, synthetic construct
  source 1..22: mol_type = other RNA
ccctgacatttcaacttttact

SEQ ID NO: 27392 - RNA, 22 nt, synthetic construct
  source 1..22: mol_type = other RNA
ccctgaggtatgcgatgggtga

SEQ ID NO: 27393 - RNA, 22 nt, synthetic construct
  source 1..22: mol_type = other RNA
ccctgcagtctgtatgtcattc

SEQ ID NO: 27394 - RNA, 22 nt, synthetic construct
  source 1..22: mol_type = other RNA
ccctggatgttattttctgcag

SEQ ID NO: 27395 - RNA, 22 nt, synthetic construct
  source 1..22: mol_type = other RNA
ccctggtcaggcacaggaaaaa

SEQ ID NO: 27396 - RNA, 22 nt, synthetic construct
  source 1..22: mol_type = other RNA
ccctgtagaactgaagcttgtt

SEQ ID NO: 27397 - RNA, 22 nt, synthetic construct
  source 1..22: mol_type = other RNA
ccctgtatgaagggaagccaga

SEQ ID NO: 27398 - RNA, 22 nt, synthetic construct
  source 1..22: mol_type = other RNA
cccttaaaagtgttgtgttact

SEQ ID NO: 27399 - RNA, 22 nt, synthetic construct
  source 1..22: mol_type = other RNA
cccttatagtcagaccatgaaa

SEQ ID NO: 27400 - RNA, 22 nt, synthetic construct
  source 1..22: mol_type = other RNA
cccttcagaatctcttgctctt

SEQ ID NO: 27401 - RNA, 22 nt, synthetic construct
  source 1..22: mol_type = other RNA
cccttcatacagggtattccat

SEQ ID NO: 27402 - RNA, 22 nt, synthetic construct
  source 1..22: mol_type = other RNA
cccttctccgatgctttctgaa

SEQ ID NO: 27403 - RNA, 22 nt, synthetic construct
  source 1..22: mol_type = other RNA
cccttgattcatttcaacttgg

SEQ ID NO: 27404 - RNA, 22 nt, synthetic construct
  source 1..22: mol_type = other RNA
ccgaagcaagcctgatggaaca

SEQ ID NO: 27405 - RNA, 22 nt, synthetic construct
  source 1..22: mol_type = other RNA
ccgaagttacgtctttctccat

SEQ ID NO: 27406 - RNA, 22 nt, synthetic construct
  source 1..22: mol_type = other RNA
ccgatgctttctgaaaggcctc

SEQ ID NO: 27407 - RNA, 22 nt, synthetic construct
  source 1..22: mol_type = other RNA
ccgatttgagtgataagaaaga

SEQ ID NO: 27408 - RNA, 22 nt, synthetic construct
  source 1..22: mol_type = other RNA
ccgcaatggaaacacaatctgg

SEQ ID NO: 27409 - RNA, 22 nt, synthetic construct
  source 1..22: mol_type = other RNA
ccgcacagacctctaactctga

SEQ ID NO: 27410 - RNA, 22 nt, synthetic construct
  source 1..22: mol_type = other RNA
ccgcttggtgaaaacgaggggc

SEQ ID NO: 27411 - RNA, 22 nt, synthetic construct
  source 1..22: mol_type = other RNA
ccgtggaacacacacatggtga

SEQ ID NO: 27412 - RNA, 22 nt, synthetic construct
  source 1..22: mol_type = other RNA
ccgttcagagctgccaccagga

SEQ ID NO: 27413 - RNA, 22 nt, synthetic construct
  source 1..22: mol_type = other RNA
cctaatccatctacacatgtat

SEQ ID NO: 27414 - RNA, 22 nt, synthetic construct
  source 1..22: mol_type = other RNA
cctaatggtgctacagtttctg

SEQ ID NO: 27415 - RNA, 22 nt, synthetic construct
  source 1..22: mol_type = other RNA
cctacacatctgcaagatggga

SEQ ID NO: 27416 - RNA, 22 nt, synthetic construct
  source 1..22: mol_type = other RNA
cctagtttcagagaataaagaa

SEQ ID NO: 27417 - RNA, 22 nt, synthetic construct
  source 1..22: mol_type = other RNA
cctcaaaaccagcaacagcagc

SEQ ID NO: 27418 - RNA, 22 nt, synthetic construct
  source 1..22: mol_type = other RNA
cctcaacatggttggttctatc

SEQ ID NO: 27419 - RNA, 22 nt, synthetic construct
  source 1..22: mol_type = other RNA
cctcaagcataacccaccaatt

SEQ ID NO: 27420 - RNA, 22 nt, synthetic construct
  source 1..22: mol_type = other RNA
cctcacaccaggtgcacttctc

SEQ ID NO: 27421 - RNA, 22 nt, synthetic construct
  source 1..22: mol_type = other RNA
cctcacccccaaagcaacaatg

SEQ ID NO: 27422 - RNA, 22 nt, synthetic construct
  source 1..22: mol_type = other RNA
cctcactcaccactgcagctgg

SEQ ID NO: 27423 - RNA, 22 nt, synthetic construct
  source 1..22: mol_type = other RNA
cctcagaataattgtgtgaaca

SEQ ID NO: 27424 - RNA, 22 nt, synthetic construct
  source 1..22: mol_type = other RNA
cctcagcttccttcagaaggaa

SEQ ID NO: 27425 - RNA, 22 nt, synthetic construct
  source 1..22: mol_type = other RNA
cctcagggcagatcaattccgc

SEQ ID NO: 27426 - RNA, 22 nt, synthetic construct
  source 1..22: mol_type = other RNA
cctcaggtttaccctctatttt

SEQ ID NO: 27427 - RNA, 22 nt, synthetic construct
  source 1..22: mol_type = other RNA
cctcataaacaggcagcacaaa

SEQ ID NO: 27428 - RNA, 22 nt, synthetic construct
  source 1..22: mol_type = other RNA
cctcattacgttttagatggga

SEQ ID NO: 27429 - RNA, 22 nt, synthetic construct
  source 1..22: mol_type = other RNA
cctccaaacaatacactggaaa

SEQ ID NO: 27430 - RNA, 22 nt, synthetic construct
  source 1..22: mol_type = other RNA
cctccaaagccagctgcagtgg

SEQ ID NO: 27431 - RNA, 22 nt, synthetic construct
  source 1..22: mol_type = other RNA
cctccagtcccatttggacatt

SEQ ID NO: 27432 - RNA, 22 nt, synthetic construct
  source 1..22: mol_type = other RNA
cctccattttgcaaacacttgg

SEQ ID NO: 27433 - RNA, 22 nt, synthetic construct
  source 1..22: mol_type = other RNA
cctcccatttgccagacagaac

SEQ ID NO: 27434 - RNA, 22 nt, synthetic construct
  source 1..22: mol_type = other RNA
cctccccagaaggacactcaaa

SEQ ID NO: 27435 - RNA, 22 nt, synthetic construct
  source 1..22: mol_type = other RNA
cctccctggtcaggcacaggaa

SEQ ID NO: 27436 - RNA, 22 nt, synthetic construct
  source 1..22: mol_type = other RNA
cctcctcctcttccacaggttc

SEQ ID NO: 27437 - RNA, 22 nt, synthetic construct
  source 1..22: mol_type = other RNA
cctcctcttccacaggttcctc

SEQ ID NO: 27438 - RNA, 22 nt, synthetic construct
  source 1..22: mol_type = other RNA
cctcctgctcattcagaatctg

SEQ ID NO: 27439 - RNA, 22 nt, synthetic construct
  source 1..22: mol_type = other RNA
cctcgttttcaccaagcggaat

SEQ ID NO: 27440 - RNA, 22 nt, synthetic construct
  source 1..22: mol_type = other RNA
cctctaactctgagctgcctcc

SEQ ID NO: 27441 - RNA, 22 nt, synthetic construct
  source 1..22: mol_type = other RNA
cctctactttcttgtgtaaagt

SEQ ID NO: 27442 - RNA, 22 nt, synthetic construct
  source 1..22: mol_type = other RNA
cctctattttcacttcccttaa

SEQ ID NO: 27443 - RNA, 22 nt, synthetic construct
  source 1..22: mol_type = other RNA
cctctggctacaaagctccaga

SEQ ID NO: 27444 - RNA, 22 nt, synthetic construct
  source 1..22: mol_type = other RNA
cctcttccacaggttcctcagc

SEQ ID NO: 27445 - RNA, 22 nt, synthetic construct
  source 1..22: mol_type = other RNA
cctcttccgtggaacacacaca

SEQ ID NO: 27446 - RNA, 22 nt, synthetic construct
  source 1..22: mol_type = other RNA
cctgaaaatccagagcttcaga

SEQ ID NO: 27447 - RNA, 22 nt, synthetic construct
  source 1..22: mol_type = other RNA
cctgaacagaattcttcaccag

SEQ ID NO: 27448 - RNA, 22 nt, synthetic construct
  source 1..22: mol_type = other RNA
cctgaactttttgcaggaaaca

SEQ ID NO: 27449 - RNA, 22 nt, synthetic construct
  source 1..22: mol_type = other RNA
cctgacatttcaacttttactt

SEQ ID NO: 27450 - RNA, 22 nt, synthetic construct
  source 1..22: mol_type = other RNA
cctgaccagggaggaagtcaca

SEQ ID NO: 27451 - RNA, 22 nt, synthetic construct
  source 1..22: mol_type = other RNA
cctgactgttaatggcatttat

SEQ ID NO: 27452 - RNA, 22 nt, synthetic construct
  source 1..22: mol_type = other RNA
cctgactttacacaagaaagta

SEQ ID NO: 27453 - RNA, 22 nt, synthetic construct
  source 1..22: mol_type = other RNA
cctgagagagctcatccagaag

SEQ ID NO: 27454 - RNA, 22 nt, synthetic construct
  source 1..22: mol_type = other RNA
cctgaggcaccaccttcccaga

SEQ ID NO: 27455 - RNA, 22 nt, synthetic construct
  source 1..22: mol_type = other RNA
cctgaggtatgcgatgggtgag

SEQ ID NO: 27456 - RNA, 22 nt, synthetic construct
  source 1..22: mol_type = other RNA
cctgataccatcacctcccatt

SEQ ID NO: 27457 - RNA, 22 nt, synthetic construct
  source 1..22: mol_type = other RNA
cctgatggaacaggatagaacc

SEQ ID NO: 27458 - RNA, 22 nt, synthetic construct
  source 1..22: mol_type = other RNA
cctgcaaaaagttcaggatgtg

SEQ ID NO: 27459 - RNA, 22 nt, synthetic construct
  source 1..22: mol_type = other RNA
cctgcaagctgtgataatgtgc

SEQ ID NO: 27460 - RNA, 22 nt, synthetic construct
  source 1..22: mol_type = other RNA
cctgcagaaaataacatccagg

SEQ ID NO: 27461 - RNA, 22 nt, synthetic construct
  source 1..22: mol_type = other RNA
cctgcagtctgtatgtcattcc

SEQ ID NO: 27462 - RNA, 22 nt, synthetic construct
  source 1..22: mol_type = other RNA
cctgctcattcagaatctgaag

SEQ ID NO: 27463 - RNA, 22 nt, synthetic construct
  source 1..22: mol_type = other RNA
cctggaaaaaacactgtctcaa

SEQ ID NO: 27464 - RNA, 22 nt, synthetic construct
  source 1..22: mol_type = other RNA
cctggatgcaagccacatgcct

SEQ ID NO: 27465 - RNA, 22 nt, synthetic construct
  source 1..22: mol_type = other RNA
cctggatgttattttctgcagg

SEQ ID NO: 27466 - RNA, 22 nt, synthetic construct
  source 1..22: mol_type = other RNA
cctggatttctttcttggctta

SEQ ID NO: 27467 - RNA, 22 nt, synthetic construct
  source 1..22: mol_type = other RNA
cctggggggctcccaaggcaag

SEQ ID NO: 27468 - RNA, 22 nt, synthetic construct
  source 1..22: mol_type = other RNA
cctggtcaggcacaggaaaaac

SEQ ID NO: 27469 - RNA, 22 nt, synthetic construct
  source 1..22: mol_type = other RNA
cctggtggcagctctgaacggt

SEQ ID NO: 27470 - RNA, 22 nt, synthetic construct
  source 1..22: mol_type = other RNA
cctggtgtgagggtttttggaa

SEQ ID NO: 27471 - RNA, 22 nt, synthetic construct
  source 1..22: mol_type = other RNA
cctggtttcagatagtgctgtg

SEQ ID NO: 27472 - RNA, 22 nt, synthetic construct
  source 1..22: mol_type = other RNA
cctgtagaactgaagcttgttg

SEQ ID NO: 27473 - RNA, 22 nt, synthetic construct
  source 1..22: mol_type = other RNA
cctgtagctctccactgctacc

SEQ ID NO: 27474 - RNA, 22 nt, synthetic construct
  source 1..22: mol_type = other RNA
cctgtatgaagggaagccagaa

SEQ ID NO: 27475 - RNA, 22 nt, synthetic construct
  source 1..22: mol_type = other RNA
cctgtatgcacacagcaccacc

SEQ ID NO: 27476 - RNA, 22 nt, synthetic construct
  source 1..22: mol_type = other RNA
cctgtattttgcatgcacttga

SEQ ID NO: 27477 - RNA, 22 nt, synthetic construct
  source 1..22: mol_type = other RNA
cctgtcaagactcaatatgatt

SEQ ID NO: 27478 - RNA, 22 nt, synthetic construct
  source 1..22: mol_type = other RNA
cctgtgaagaagatcttgcttt

SEQ ID NO: 27479 - RNA, 22 nt, synthetic construct
  source 1..22: mol_type = other RNA
cctgtgagatcactcacccatc

SEQ ID NO: 27480 - RNA, 22 nt, synthetic construct
  source 1..22: mol_type = other RNA
cctgtgatgctgatgatgctga

SEQ ID NO: 27481 - RNA, 22 nt, synthetic construct
  source 1..22: mol_type = other RNA
cctgtgcatctgactatggcaa

SEQ ID NO: 27482 - RNA, 22 nt, synthetic construct
  source 1..22: mol_type = other RNA
cctgtgcctgaccagggaggaa

SEQ ID NO: 27483 - RNA, 22 nt, synthetic construct
  source 1..22: mol_type = other RNA
cctgtggaagaggaggaggggg

SEQ ID NO: 27484 - RNA, 22 nt, synthetic construct
  source 1..22: mol_type = other RNA
cctgttcacacaattattctga

SEQ ID NO: 27485 - RNA, 22 nt, synthetic construct
  source 1..22: mol_type = other RNA
cctgttccatcaggcttgcttc

SEQ ID NO: 27486 - RNA, 22 nt, synthetic construct
  source 1..22: mol_type = other RNA
cctgttcctttcagaaaccaga

SEQ ID NO: 27487 - RNA, 22 nt, synthetic construct
  source 1..22: mol_type = other RNA
cctgttcttgaaagcacctgtg

SEQ ID NO: 27488 - RNA, 22 nt, synthetic construct
  source 1..22: mol_type = other RNA
cctgttgattcaagtgctgttt

SEQ ID NO: 27489 - RNA, 22 nt, synthetic construct
  source 1..22: mol_type = other RNA
cctgtttatgaggcttatgttg

SEQ ID NO: 27490 - RNA, 22 nt, synthetic construct
  source 1..22: mol_type = other RNA
ccttaaaagtgttgtgttactt

SEQ ID NO: 27491 - RNA, 22 nt, synthetic construct
  source 1..22: mol_type = other RNA
ccttaattggcctgtgcatctg

SEQ ID NO: 27492 - RNA, 22 nt, synthetic construct
  source 1..22: mol_type = other RNA
ccttagagcagcatgcttttga

SEQ ID NO: 27493 - RNA, 22 nt, synthetic construct
  source 1..22: mol_type = other RNA
ccttagtgaacactgagctttg

SEQ ID NO: 27494 - RNA, 22 nt, synthetic construct
  source 1..22: mol_type = other RNA
ccttatagtcagaccatgaaat

SEQ ID NO: 27495 - RNA, 22 nt, synthetic construct
  source 1..22: mol_type = other RNA
ccttatggtcaaataacgactt

SEQ ID NO: 27496 - RNA, 22 nt, synthetic construct
  source 1..22: mol_type = other RNA
ccttcaattcaatccatcctgg

SEQ ID NO: 27497 - RNA, 22 nt, synthetic construct
  source 1..22: mol_type = other RNA
ccttcagaaggaaaaagcactc

SEQ ID NO: 27498 - RNA, 22 nt, synthetic construct
  source 1..22: mol_type = other RNA
ccttcagaatctcttgctcttt

SEQ ID NO: 27499 - RNA, 22 nt, synthetic construct
  source 1..22: mol_type = other RNA
ccttcagatcaagaaattgaaa

SEQ ID NO: 27500 - RNA, 22 nt, synthetic construct
  source 1..22: mol_type = other RNA
ccttcatacagggtattccata

SEQ ID NO: 27501 - RNA, 22 nt, synthetic construct
  source 1..22: mol_type = other RNA
ccttccaaattactagatactc

SEQ ID NO: 27502 - RNA, 22 nt, synthetic construct
  source 1..22: mol_type = other RNA
ccttcccagagtcctaatccat

SEQ ID NO: 27503 - RNA, 22 nt, synthetic construct
  source 1..22: mol_type = other RNA
ccttctccgatgctttctgaaa

SEQ ID NO: 27504 - RNA, 22 nt, synthetic construct
  source 1..22: mol_type = other RNA
ccttctctctctgggctccttc

SEQ ID NO: 27505 - RNA, 22 nt, synthetic construct
  source 1..22: mol_type = other RNA
ccttctctttgctgatcattgt

SEQ ID NO: 27506 - RNA, 22 nt, synthetic construct
  source 1..22: mol_type = other RNA
ccttctgaaggaagctgaggaa

SEQ ID NO: 27507 - RNA, 22 nt, synthetic construct
  source 1..22: mol_type = other RNA
ccttctggggaggggtctgagt

SEQ ID NO: 27508 - RNA, 22 nt, synthetic construct
  source 1..22: mol_type = other RNA
ccttgattcatttcaacttggt

SEQ ID NO: 27509 - RNA, 22 nt, synthetic construct
  source 1..22: mol_type = other RNA
ccttgggactgcccttgattca

SEQ ID NO: 27510 - RNA, 22 nt, synthetic construct
  source 1..22: mol_type = other RNA
ccttgggagccccccaggcatg

SEQ ID NO: 27511 - RNA, 22 nt, synthetic construct
  source 1..22: mol_type = other RNA
ccttgtctcgacccttcagaat

SEQ ID NO: 27512 - RNA, 22 nt, synthetic construct
  source 1..22: mol_type = other RNA
ccttgtggatggccccgaagca

SEQ ID NO: 27513 - RNA, 22 nt, synthetic construct
  source 1..22: mol_type = other RNA
cctttcagaaaccagaacaact

SEQ ID NO: 27514 - RNA, 22 nt, synthetic construct
  source 1..22: mol_type = other RNA
cctttcagaaagcatcggagaa

SEQ ID NO: 27515 - RNA, 22 nt, synthetic construct
  source 1..22: mol_type = other RNA
cctttgctgagcaagttgcgca

SEQ ID NO: 27516 - RNA, 22 nt, synthetic construct
  source 1..22: mol_type = other RNA
ccttttctgccactaccacacc

SEQ ID NO: 27517 - RNA, 22 nt, synthetic construct
  source 1..22: mol_type = other RNA
ccttttgcaacataagcctcat

SEQ ID NO: 27518 - RNA, 22 nt, synthetic construct
  source 1..22: mol_type = other RNA
ccttttggtcttgtttcaattt

SEQ ID NO: 27519 - RNA, 22 nt, synthetic construct
  source 1..22: mol_type = other RNA
cctttttccatgttttgttttc

SEQ ID NO: 27520 - RNA, 22 nt, synthetic construct
  source 1..22: mol_type = other RNA
cgaactcgcttgattttgaata

SEQ ID NO: 27521 - RNA, 22 nt, synthetic construct
  source 1..22: mol_type = other RNA
cgaagcaagcctgatggaacag

SEQ ID NO: 27522 - RNA, 22 nt, synthetic construct
  source 1..22: mol_type = other RNA
cgaagttacgtctttctccatt

SEQ ID NO: 27523 - RNA, 22 nt, synthetic construct
  source 1..22: mol_type = other RNA
cgacccttcagaatctcttgct

SEQ ID NO: 27524 - RNA, 22 nt, synthetic construct
  source 1..22: mol_type = other RNA
cgactattctggcttcccttca

SEQ ID NO: 27525 - RNA, 22 nt, synthetic construct
  source 1..22: mol_type = other RNA
cgacttggcgtgaaactgcttc

SEQ ID NO: 27526 - RNA, 22 nt, synthetic construct
  source 1..22: mol_type = other RNA
cgagacaaggagcaaacacgag

SEQ ID NO: 27527 - RNA, 22 nt, synthetic construct
  source 1..22: mol_type = other RNA
cgagactcataatgtccaaatg

SEQ ID NO: 27528 - RNA, 22 nt, synthetic construct
  source 1..22: mol_type = other RNA
cgagatcttgtgcccccaacac

SEQ ID NO: 27529 - RNA, 22 nt, synthetic construct
  source 1..22: mol_type = other RNA
cgaggggccttcaattcaatcc

SEQ ID NO: 27530 - RNA, 22 nt, synthetic construct
  source 1..22: mol_type = other RNA
cgagttcgagactcataatgtc

SEQ ID NO: 27531 - RNA, 22 nt, synthetic construct
  source 1..22: mol_type = other RNA
cgatgctttctgaaaggcctca

SEQ ID NO: 27532 - RNA, 22 nt, synthetic construct
  source 1..22: mol_type = other RNA
cgatgggtgagtgatctcacag

SEQ ID NO: 27533 - RNA, 22 nt, synthetic construct
  source 1..22: mol_type = other RNA
cgatttatattctgtacttcct

SEQ ID NO: 27534 - RNA, 22 nt, synthetic construct
  source 1..22: mol_type = other RNA
cgatttgagtgataagaaagaa

SEQ ID NO: 27535 - RNA, 22 nt, synthetic construct
  source 1..22: mol_type = other RNA
cgcaacttgctcagcaaaggta

SEQ ID NO: 27536 - RNA, 22 nt, synthetic construct
  source 1..22: mol_type = other RNA
cgcaatggaaacacaatctgga

SEQ ID NO: 27537 - RNA, 22 nt, synthetic construct
  source 1..22: mol_type = other RNA
cgcacagacctctaactctgag

SEQ ID NO: 27538 - RNA, 22 nt, synthetic construct
  source 1..22: mol_type = other RNA
cgcacagttagtgaaccttctc

SEQ ID NO: 27539 - RNA, 22 nt, synthetic construct
  source 1..22: mol_type = other RNA
cgcagcttgttgaccagacata

SEQ ID NO: 27540 - RNA, 22 nt, synthetic construct
  source 1..22: mol_type = other RNA
cgcatacctcagggcagatcaa

SEQ ID NO: 27541 - RNA, 22 nt, synthetic construct
  source 1..22: mol_type = other RNA
cgccaagtcgttatttgaccat

SEQ ID NO: 27542 - RNA, 22 nt, synthetic construct
  source 1..22: mol_type = other RNA
cgccatgtgtctcagtacattt

SEQ ID NO: 27543 - RNA, 22 nt, synthetic construct
  source 1..22: mol_type = other RNA
cgctagctttgtggttccctgg

SEQ ID NO: 27544 - RNA, 22 nt, synthetic construct
  source 1..22: mol_type = other RNA
cgcttgattttgaatactgatt

SEQ ID NO: 27545 - RNA, 22 nt, synthetic construct
  source 1..22: mol_type = other RNA
cgcttggtgaaaacgaggggcc

SEQ ID NO: 27546 - RNA, 22 nt, synthetic construct
  source 1..22: mol_type = other RNA
cggaagaggcagaaactgtagc

SEQ ID NO: 27547 - RNA, 22 nt, synthetic construct
  source 1..22: mol_type = other RNA
cggaatcccatctaaaacgtaa

SEQ ID NO: 27548 - RNA, 22 nt, synthetic construct
  source 1..22: mol_type = other RNA
cggaattgatctgccctgaggt

SEQ ID NO: 27549 - RNA, 22 nt, synthetic construct
  source 1..22: mol_type = other RNA
cggagaagggctgcatacatgt

SEQ ID NO: 27550 - RNA, 22 nt, synthetic construct
  source 1..22: mol_type = other RNA
cggagacatttggttgactgct

SEQ ID NO: 27551 - RNA, 22 nt, synthetic construct
  source 1..22: mol_type = other RNA
cggggtaagccaagaaagaaat

SEQ ID NO: 27552 - RNA, 22 nt, synthetic construct
  source 1..22: mol_type = other RNA
cggtgcagaaaaccacatctca

SEQ ID NO: 27553 - RNA, 22 nt, synthetic construct
  source 1..22: mol_type = other RNA
cgtaacttcggggtaagccaag

SEQ ID NO: 27554 - RNA, 22 nt, synthetic construct
  source 1..22: mol_type = other RNA
cgtaatgaggcatcactgccat

SEQ ID NO: 27555 - RNA, 22 nt, synthetic construct
  source 1..22: mol_type = other RNA
cgtagaaattccccttatagtc

SEQ ID NO: 27556 - RNA, 22 nt, synthetic construct
  source 1..22: mol_type = other RNA
cgtctggtgaagaattctgttc

SEQ ID NO: 27557 - RNA, 22 nt, synthetic construct
  source 1..22: mol_type = other RNA
cgtctttctccattagcctttt

SEQ ID NO: 27558 - RNA, 22 nt, synthetic construct
  source 1..22: mol_type = other RNA
cgtgaaactgcttcagatgctg

SEQ ID NO: 27559 - RNA, 22 nt, synthetic construct
  source 1..22: mol_type = other RNA
cgtggaacacacacatggtgaa

SEQ ID NO: 27560 - RNA, 22 nt, synthetic construct
  source 1..22: mol_type = other RNA
cgtgtgagtcctgactttacac

SEQ ID NO: 27561 - RNA, 22 nt, synthetic construct
  source 1..22: mol_type = other RNA
cgtgtttgctccttgtctcgac

SEQ ID NO: 27562 - RNA, 22 nt, synthetic construct
  source 1..22: mol_type = other RNA
cgttatttgaccataaggctct

SEQ ID NO: 27563 - RNA, 22 nt, synthetic construct
  source 1..22: mol_type = other RNA
cgttcagagctgccaccaggag

SEQ ID NO: 27564 - RNA, 22 nt, synthetic construct
  source 1..22: mol_type = other RNA
cgttttagatgggattccgctt

SEQ ID NO: 27565 - RNA, 22 nt, synthetic construct
  source 1..22: mol_type = other RNA
cgttttattcctccattttgca

SEQ ID NO: 27566 - RNA, 22 nt, synthetic construct
  source 1..22: mol_type = other RNA
cgttttcaccaagcggaatccc

SEQ ID NO: 27567 - RNA, 22 nt, synthetic construct
  source 1..22: mol_type = other RNA
ctaaaacgtaatgaggcatcac

SEQ ID NO: 27568 - RNA, 22 nt, synthetic construct
  source 1..22: mol_type = other RNA
ctaaaactccaccattcagagt

SEQ ID NO: 27569 - RNA, 22 nt, synthetic construct
  source 1..22: mol_type = other RNA
ctaaagctggggtgtggctatc

SEQ ID NO: 27570 - RNA, 22 nt, synthetic construct
  source 1..22: mol_type = other RNA
ctaaagtggaagaatgttttca

SEQ ID NO: 27571 - RNA, 22 nt, synthetic construct
  source 1..22: mol_type = other RNA
ctaaatacctgttcctttcaga

SEQ ID NO: 27572 - RNA, 22 nt, synthetic construct
  source 1..22: mol_type = other RNA
ctaactctgagctgcctccaaa

SEQ ID NO: 27573 - RNA, 22 nt, synthetic construct
  source 1..22: mol_type = other RNA
ctaactgtgcgttttattcctc

SEQ ID NO: 27574 - RNA, 22 nt, synthetic construct
  source 1..22: mol_type = other RNA
ctaagcaagagaatccacctgc

SEQ ID NO: 27575 - RNA, 22 nt, synthetic construct
  source 1..22: mol_type = other RNA
ctaaggattccttttctgccac

SEQ ID NO: 27576 - RNA, 22 nt, synthetic construct
  source 1..22: mol_type = other RNA
ctaaggtggcatctcttacaga

SEQ ID NO: 27577 - RNA, 22 nt, synthetic construct
  source 1..22: mol_type = other RNA
ctaagtccattcctgataccat

SEQ ID NO: 27578 - RNA, 22 nt, synthetic construct
  source 1..22: mol_type = other RNA
ctaatccatctacacatgtatg

SEQ ID NO: 27579 - RNA, 22 nt, synthetic construct
  source 1..22: mol_type = other RNA
ctaatgagttgtcctgtgagat

SEQ ID NO: 27580 - RNA, 22 nt, synthetic construct
  source 1..22: mol_type = other RNA
ctaatgcctaatggtgctacag

SEQ ID NO: 27581 - RNA, 22 nt, synthetic construct
  source 1..22: mol_type = other RNA
ctaatggagaaagacgtaactt

SEQ ID NO: 27582 - RNA, 22 nt, synthetic construct
  source 1..22: mol_type = other RNA
ctaatggtgctacagtttctgc

SEQ ID NO: 27583 - RNA, 22 nt, synthetic construct
  source 1..22: mol_type = other RNA
ctaattaccatgacaagaacat

SEQ ID NO: 27584 - RNA, 22 nt, synthetic construct
  source 1..22: mol_type = other RNA
ctacaaagctccagaatggaag

SEQ ID NO: 27585 - RNA, 22 nt, synthetic construct
  source 1..22: mol_type = other RNA
ctacaacaacaaaaatcagttt

SEQ ID NO: 27586 - RNA, 22 nt, synthetic construct
  source 1..22: mol_type = other RNA
ctacacatcctgaactttttgc

SEQ ID NO: 27587 - RNA, 22 nt, synthetic construct
  source 1..22: mol_type = other RNA
ctacacatctgcaagatgggaa

SEQ ID NO: 27588 - RNA, 22 nt, synthetic construct
  source 1..22: mol_type = other RNA
ctacacatgtatgcagcccttc

SEQ ID NO: 27589 - RNA, 22 nt, synthetic construct
  source 1..22: mol_type = other RNA
ctacagaactcacagattcttt

SEQ ID NO: 27590 - RNA, 22 nt, synthetic construct
  source 1..22: mol_type = other RNA
ctacaggacaactgccagcagt

SEQ ID NO: 27591 - RNA, 22 nt, synthetic construct
  source 1..22: mol_type = other RNA
ctacagggatataaaaatagaa

SEQ ID NO: 27592 - RNA, 22 nt, synthetic construct
  source 1..22: mol_type = other RNA
ctacagtttctgcctcttccgt

SEQ ID NO: 27593 - RNA, 22 nt, synthetic construct
  source 1..22: mol_type = other RNA
ctaccaaaaattggtgggttat

SEQ ID NO: 27594 - RNA, 22 nt, synthetic construct
  source 1..22: mol_type = other RNA
ctaccacaccaccaccaccatc

SEQ ID NO: 27595 - RNA, 22 nt, synthetic construct
  source 1..22: mol_type = other RNA
ctaccccaaccaaagtaacaca

SEQ ID NO: 27596 - RNA, 22 nt, synthetic construct
  source 1..22: mol_type = other RNA
ctacgatttatattctgtactt

SEQ ID NO: 27597 - RNA, 22 nt, synthetic construct
  source 1..22: mol_type = other RNA
ctactaatgagttgtcctgtga

SEQ ID NO: 27598 - RNA, 22 nt, synthetic construct
  source 1..22: mol_type = other RNA
ctactttcttgtgtaaagtcag

SEQ ID NO: 27599 - RNA, 22 nt, synthetic construct
  source 1..22: mol_type = other RNA
ctagacaaaccactgctgcaga

SEQ ID NO: 27600 - RNA, 22 nt, synthetic construct
  source 1..22: mol_type = other RNA
ctagagggcagccttgtggatg

SEQ ID NO: 27601 - RNA, 22 nt, synthetic construct
  source 1..22: mol_type = other RNA
ctagatttcattttcaacaaag

SEQ ID NO: 27602 - RNA, 22 nt, synthetic construct
  source 1..22: mol_type = other RNA
ctagcgtctggtgaagaattct

SEQ ID NO: 27603 - RNA, 22 nt, synthetic construct
  source 1..22: mol_type = other RNA
ctagctgcaatgctaaatacct

SEQ ID NO: 27604 - RNA, 22 nt, synthetic construct
  source 1..22: mol_type = other RNA
ctagctttgtggttccctggat

SEQ ID NO: 27605 - RNA, 22 nt, synthetic construct
  source 1..22: mol_type = other RNA
ctaggtgtgtattgtttgaaca

SEQ ID NO: 27606 - RNA, 22 nt, synthetic construct
  source 1..22: mol_type = other RNA
ctagtaatttggaaggtgactc

SEQ ID NO: 27607 - RNA, 22 nt, synthetic construct
  source 1..22: mol_type = other RNA
ctagtcaaaactgtgactggcc

SEQ ID NO: 27608 - RNA, 22 nt, synthetic construct
  source 1..22: mol_type = other RNA
ctagtgccacacagtgactgca

SEQ ID NO: 27609 - RNA, 22 nt, synthetic construct
  source 1..22: mol_type = other RNA
ctagtttactggcattatcagc

SEQ ID NO: 27610 - RNA, 22 nt, synthetic construct
  source 1..22: mol_type = other RNA
ctagtttcagagaataaagaac

SEQ ID NO: 27611 - RNA, 22 nt, synthetic construct
  source 1..22: mol_type = other RNA
ctataaggggaatttctacgat

SEQ ID NO: 27612 - RNA, 22 nt, synthetic construct
  source 1..22: mol_type = other RNA
ctatcaagttctgcagcagtgg

SEQ ID NO: 27613 - RNA, 22 nt, synthetic construct
  source 1..22: mol_type = other RNA
ctatcctgttccatcaggcttg

SEQ ID NO: 27614 - RNA, 22 nt, synthetic construct
  source 1..22: mol_type = other RNA
ctatctgaaaccaggatggatt

SEQ ID NO: 27615 - RNA, 22 nt, synthetic construct
  source 1..22: mol_type = other RNA
ctatggcaagactcagtttggg

SEQ ID NO: 27616 - RNA, 22 nt, synthetic construct
  source 1..22: mol_type = other RNA
ctattctggcttcccttcatac

SEQ ID NO: 27617 - RNA, 22 nt, synthetic construct
  source 1..22: mol_type = other RNA
ctattttcacttcccttaaaag

SEQ ID NO: 27618 - RNA, 22 nt, synthetic construct
  source 1..22: mol_type = other RNA
ctatttttatatccctgtagaa

SEQ ID NO: 27619 - RNA, 22 nt, synthetic construct
  source 1..22: mol_type = other RNA
ctcaaaaactgatttttgttgt

SEQ ID NO: 27620 - RNA, 22 nt, synthetic construct
  source 1..22: mol_type = other RNA
ctcaaaaccagcaacagcagca

SEQ ID NO: 27621 - RNA, 22 nt, synthetic construct
  source 1..22: mol_type = other RNA
ctcaaaagcatgctgctctaag

SEQ ID NO: 27622 - RNA, 22 nt, synthetic construct
  source 1..22: mol_type = other RNA
ctcaaatcacagaagcaagtaa

SEQ ID NO: 27623 - RNA, 22 nt, synthetic construct
  source 1..22: mol_type = other RNA
ctcaaatcggagacatttggtt

SEQ ID NO: 27624 - RNA, 22 nt, synthetic construct
  source 1..22: mol_type = other RNA
ctcaacatggttggttctatcc

SEQ ID NO: 27625 - RNA, 22 nt, synthetic construct
  source 1..22: mol_type = other RNA
ctcaagcataacccaccaattt

SEQ ID NO: 27626 - RNA, 22 nt, synthetic construct
  source 1..22: mol_type = other RNA
ctcaataattttatagagtcac

SEQ ID NO: 27627 - RNA, 22 nt, synthetic construct
  source 1..22: mol_type = other RNA
ctcaatatgatttcccatcttg

SEQ ID NO: 27628 - RNA, 22 nt, synthetic construct
  source 1..22: mol_type = other RNA
ctcaatattatccagattgtgt

SEQ ID NO: 27629 - RNA, 22 nt, synthetic construct
  source 1..22: mol_type = other RNA
ctcaatgatgctcttttgctgc

SEQ ID NO: 27630 - RNA, 22 nt, synthetic construct
  source 1..22: mol_type = other RNA
ctcacaccaggtgcacttctcc

SEQ ID NO: 27631 - RNA, 22 nt, synthetic construct
  source 1..22: mol_type = other RNA
ctcacaccttttgcaacataag

SEQ ID NO: 27632 - RNA, 22 nt, synthetic construct
  source 1..22: mol_type = other RNA
ctcacacgactattctggcttc

SEQ ID NO: 27633 - RNA, 22 nt, synthetic construct
  source 1..22: mol_type = other RNA
ctcacagattctttcttatcac

SEQ ID NO: 27634 - RNA, 22 nt, synthetic construct
  source 1..22: mol_type = other RNA
ctcacaggacaactcattagta

SEQ ID NO: 27635 - RNA, 22 nt, synthetic construct
  source 1..22: mol_type = other RNA
ctcacataaatgccattaacag

SEQ ID NO: 27636 - RNA, 22 nt, synthetic construct
  source 1..22: mol_type = other RNA
ctcaccactgcagctggctttg

SEQ ID NO: 27637 - RNA, 22 nt, synthetic construct
  source 1..22: mol_type = other RNA
ctcacccatcgcatacctcagg

SEQ ID NO: 27638 - RNA, 22 nt, synthetic construct
  source 1..22: mol_type = other RNA
ctcacccccaaagcaacaatga

SEQ ID NO: 27639 - RNA, 22 nt, synthetic construct
  source 1..22: mol_type = other RNA
ctcactcaccactgcagctggc

SEQ ID NO: 27640 - RNA, 22 nt, synthetic construct
  source 1..22: mol_type = other RNA
ctcagaacacaatggaacagtc

SEQ ID NO: 27641 - RNA, 22 nt, synthetic construct
  source 1..22: mol_type = other RNA
ctcagaataattgtgtgaacag

SEQ ID NO: 27642 - RNA, 22 nt, synthetic construct
  source 1..22: mol_type = other RNA
ctcagacccctccccagaagga

SEQ ID NO: 27643 - RNA, 22 nt, synthetic construct
  source 1..22: mol_type = other RNA
ctcagagttagaggtctgtgcg

SEQ ID NO: 27644 - RNA, 22 nt, synthetic construct
  source 1..22: mol_type = other RNA
ctcagcaaaggtacttgataca

SEQ ID NO: 27645 - RNA, 22 nt, synthetic construct
  source 1..22: mol_type = other RNA
ctcagcttccttcagaaggaaa

SEQ ID NO: 27646 - RNA, 22 nt, synthetic construct
  source 1..22: mol_type = other RNA
ctcaggcagtgggcttccattc

SEQ ID NO: 27647 - RNA, 22 nt, synthetic construct
  source 1..22: mol_type = other RNA
ctcagggcagatcaattccgca

SEQ ID NO: 27648 - RNA, 22 nt, synthetic construct
  source 1..22: mol_type = other RNA
ctcaggtttaccctctattttc

SEQ ID NO: 27649 - RNA, 22 nt, synthetic construct
  source 1..22: mol_type = other RNA
ctcagtacatttctggcactta

SEQ ID NO: 27650 - RNA, 22 nt, synthetic construct
  source 1..22: mol_type = other RNA
ctcagtctctgaagcctgttga

SEQ ID NO: 27651 - RNA, 22 nt, synthetic construct
  source 1..22: mol_type = other RNA
ctcagtgttcactaaggattcc

SEQ ID NO: 27652 - RNA, 22 nt, synthetic construct
  source 1..22: mol_type = other RNA
ctcagtttggggttgctgtgtt

SEQ ID NO: 27653 - RNA, 22 nt, synthetic construct
  source 1..22: mol_type = other RNA
ctcataaacaggcagcacaaac

SEQ ID NO: 27654 - RNA, 22 nt, synthetic construct
  source 1..22: mol_type = other RNA
ctcataatgtccaaatgggact

SEQ ID NO: 27655 - RNA, 22 nt, synthetic construct
  source 1..22: mol_type = other RNA
ctcatcaactgctggcagttgt

SEQ ID NO: 27656 - RNA, 22 nt, synthetic construct
  source 1..22: mol_type = other RNA
ctcatccagaagtaaatggaga

SEQ ID NO: 27657 - RNA, 22 nt, synthetic construct
  source 1..22: mol_type = other RNA
ctcatgtgcagtcactgtgtgg

SEQ ID NO: 27658 - RNA, 22 nt, synthetic construct
  source 1..22: mol_type = other RNA
ctcattacgttttagatgggat

SEQ ID NO: 27659 - RNA, 22 nt, synthetic construct
  source 1..22: mol_type = other RNA
ctcattagtagcctgactgtta

SEQ ID NO: 27660 - RNA, 22 nt, synthetic construct
  source 1..22: mol_type = other RNA
ctcattcagaatctgaagctct

SEQ ID NO: 27661 - RNA, 22 nt, synthetic construct
  source 1..22: mol_type = other RNA
ctccaaaacagaccatttacca

SEQ ID NO: 27662 - RNA, 22 nt, synthetic construct
  source 1..22: mol_type = other RNA
ctccaaacaatacactggaaat

SEQ ID NO: 27663 - RNA, 22 nt, synthetic construct
  source 1..22: mol_type = other RNA
ctccaaagccagctgcagtggt

SEQ ID NO: 27664 - RNA, 22 nt, synthetic construct
  source 1..22: mol_type = other RNA
ctccaatcaaatgacctccaaa

SEQ ID NO: 27665 - RNA, 22 nt, synthetic construct
  source 1..22: mol_type = other RNA
ctccaccattcagagtgctttt

SEQ ID NO: 27666 - RNA, 22 nt, synthetic construct
  source 1..22: mol_type = other RNA
ctccactgctaccaaaaattgg

SEQ ID NO: 27667 - RNA, 22 nt, synthetic construct
  source 1..22: mol_type = other RNA
ctccagaatggaagcccactgc

SEQ ID NO: 27668 - RNA, 22 nt, synthetic construct
  source 1..22: mol_type = other RNA
ctccagacttttcctcaccccc

SEQ ID NO: 27669 - RNA, 22 nt, synthetic construct
  source 1..22: mol_type = other RNA
ctccagctgtgttgttttctgg

SEQ ID NO: 27670 - RNA, 22 nt, synthetic construct
  source 1..22: mol_type = other RNA
ctccagtcccatttggacatta

SEQ ID NO: 27671 - RNA, 22 nt, synthetic construct
  source 1..22: mol_type = other RNA
ctccagttccaaaaaccctcac

SEQ ID NO: 27672 - RNA, 22 nt, synthetic construct
  source 1..22: mol_type = other RNA
ctccatggtctcaatgatgctc

SEQ ID NO: 27673 - RNA, 22 nt, synthetic construct
  source 1..22: mol_type = other RNA
ctccattagccttttggtcttg

SEQ ID NO: 27674 - RNA, 22 nt, synthetic construct
  source 1..22: mol_type = other RNA
ctccatttacttctggatgagc

SEQ ID NO: 27675 - RNA, 22 nt, synthetic construct
  source 1..22: mol_type = other RNA
ctccattttgcaaacacttgga

SEQ ID NO: 27676 - RNA, 22 nt, synthetic construct
  source 1..22: mol_type = other RNA
ctcccaaggcaagcttacaccc

SEQ ID NO: 27677 - RNA, 22 nt, synthetic construct
  source 1..22: mol_type = other RNA
ctcccatttgccagacagaacc

SEQ ID NO: 27678 - RNA, 22 nt, synthetic construct
  source 1..22: mol_type = other RNA
ctccccagaaggacactcaaaa

SEQ ID NO: 27679 - RNA, 22 nt, synthetic construct
  source 1..22: mol_type = other RNA
ctccccctcctcctcttccaca

SEQ ID NO: 27680 - RNA, 22 nt, synthetic construct
  source 1..22: mol_type = other RNA
ctccctcaaaaccagcaacagc

SEQ ID NO: 27681 - RNA, 22 nt, synthetic construct
  source 1..22: mol_type = other RNA
ctccctggtcaggcacaggaaa

SEQ ID NO: 27682 - RNA, 22 nt, synthetic construct
  source 1..22: mol_type = other RNA
ctccgatgctttctgaaaggcc

SEQ ID NO: 27683 - RNA, 22 nt, synthetic construct
  source 1..22: mol_type = other RNA
ctccgatttgagtgataagaaa

SEQ ID NO: 27684 - RNA, 22 nt, synthetic construct
  source 1..22: mol_type = other RNA
ctcctcctcttccacaggttcc

SEQ ID NO: 27685 - RNA, 22 nt, synthetic construct
  source 1..22: mol_type = other RNA
ctcctcttccacaggttcctca

SEQ ID NO: 27686 - RNA, 22 nt, synthetic construct
  source 1..22: mol_type = other RNA
ctcctgcagaaaataacatcca

SEQ ID NO: 27687 - RNA, 22 nt, synthetic construct
  source 1..22: mol_type = other RNA
ctcctgctcattcagaatctga

SEQ ID NO: 27688 - RNA, 22 nt, synthetic construct
  source 1..22: mol_type = other RNA
ctcctggaaaaaacactgtctc

SEQ ID NO: 27689 - RNA, 22 nt, synthetic construct
  source 1..22: mol_type = other RNA
ctcctggtggcagctctgaacg

SEQ ID NO: 27690 - RNA, 22 nt, synthetic construct
  source 1..22: mol_type = other RNA
ctcctgttcttgaaagcacctg

SEQ ID NO: 27691 - RNA, 22 nt, synthetic construct
  source 1..22: mol_type = other RNA
ctccttcagatcaagaaattga

SEQ ID NO: 27692 - RNA, 22 nt, synthetic construct
  source 1..22: mol_type = other RNA
ctccttgtctcgacccttcaga

SEQ ID NO: 27693 - RNA, 22 nt, synthetic construct
  source 1..22: mol_type = other RNA
ctcgaactcgcttgattttgaa

SEQ ID NO: 27694 - RNA, 22 nt, synthetic construct
  source 1..22: mol_type = other RNA
ctcgacccttcagaatctcttg

SEQ ID NO: 27695 - RNA, 22 nt, synthetic construct
  source 1..22: mol_type = other RNA
ctcgcttgattttgaatactga

SEQ ID NO: 27696 - RNA, 22 nt, synthetic construct
  source 1..22: mol_type = other RNA
ctcgtgtttgctccttgtctcg

SEQ ID NO: 27697 - RNA, 22 nt, synthetic construct
  source 1..22: mol_type = other RNA
ctcgttttcaccaagcggaatc

SEQ ID NO: 27698 - RNA, 22 nt, synthetic construct
  source 1..22: mol_type = other RNA
ctctaaagctggggtgtggcta

SEQ ID NO: 27699 - RNA, 22 nt, synthetic construct
  source 1..22: mol_type = other RNA
ctctaactctgagctgcctcca

SEQ ID NO: 27700 - RNA, 22 nt, synthetic construct
  source 1..22: mol_type = other RNA
ctctaaggtggcatctcttaca

SEQ ID NO: 27701 - RNA, 22 nt, synthetic construct
  source 1..22: mol_type = other RNA
ctctactttcttgtgtaaagtc

SEQ ID NO: 27702 - RNA, 22 nt, synthetic construct
  source 1..22: mol_type = other RNA
ctctattttcacttcccttaaa

SEQ ID NO: 27703 - RNA, 22 nt, synthetic construct
  source 1..22: mol_type = other RNA
ctctcaaatcacagaagcaagt

SEQ ID NO: 27704 - RNA, 22 nt, synthetic construct
  source 1..22: mol_type = other RNA
ctctcaggcagtgggcttccat

SEQ ID NO: 27705 - RNA, 22 nt, synthetic construct
  source 1..22: mol_type = other RNA
ctctccaatcaaatgacctcca

SEQ ID NO: 27706 - RNA, 22 nt, synthetic construct
  source 1..22: mol_type = other RNA
ctctccactgctaccaaaaatt

SEQ ID NO: 27707 - RNA, 22 nt, synthetic construct
  source 1..22: mol_type = other RNA
ctctctcaggcagtgggcttcc

SEQ ID NO: 27708 - RNA, 22 nt, synthetic construct
  source 1..22: mol_type = other RNA
ctctctctgggctccttcagat

SEQ ID NO: 27709 - RNA, 22 nt, synthetic construct
  source 1..22: mol_type = other RNA
ctctctgggctccttcagatca

SEQ ID NO: 27710 - RNA, 22 nt, synthetic construct
  source 1..22: mol_type = other RNA
ctctgaaactaggtgtgtattg

SEQ ID NO: 27711 - RNA, 22 nt, synthetic construct
  source 1..22: mol_type = other RNA
ctctgaacggtatttaaaacaa

SEQ ID NO: 27712 - RNA, 22 nt, synthetic construct
  source 1..22: mol_type = other RNA
ctctgaagcctgttgattcaag

SEQ ID NO: 27713 - RNA, 22 nt, synthetic construct
  source 1..22: mol_type = other RNA
ctctgaatggtggagttttaga

SEQ ID NO: 27714 - RNA, 22 nt, synthetic construct
  source 1..22: mol_type = other RNA
ctctgagctgcctccaaagcca

SEQ ID NO: 27715 - RNA, 22 nt, synthetic construct
  source 1..22: mol_type = other RNA
ctctggattttcaggcccactg

SEQ ID NO: 27716 - RNA, 22 nt, synthetic construct
  source 1..22: mol_type = other RNA
ctctggctacaaagctccagaa

SEQ ID NO: 27717 - RNA, 22 nt, synthetic construct
  source 1..22: mol_type = other RNA
ctctgggaaggtggtgcctcag

SEQ ID NO: 27718 - RNA, 22 nt, synthetic construct
  source 1..22: mol_type = other RNA
ctctgggatggttgtgtttgtg

SEQ ID NO: 27719 - RNA, 22 nt, synthetic construct
  source 1..22: mol_type = other RNA
ctctgggctccttcagatcaag

SEQ ID NO: 27720 - RNA, 22 nt, synthetic construct
  source 1..22: mol_type = other RNA
ctcttacagaagcaagaacagc

SEQ ID NO: 27721 - RNA, 22 nt, synthetic construct
  source 1..22: mol_type = other RNA
ctcttactctcaaatcacagaa

SEQ ID NO: 27722 - RNA, 22 nt, synthetic construct
  source 1..22: mol_type = other RNA
ctcttccacaggttcctcagct

SEQ ID NO: 27723 - RNA, 22 nt, synthetic construct
  source 1..22: mol_type = other RNA
ctcttccgtggaacacacacat

SEQ ID NO: 27724 - RNA, 22 nt, synthetic construct
  source 1..22: mol_type = other RNA
ctcttgctctttgtttctcatc

SEQ ID NO: 27725 - RNA, 22 nt, synthetic construct
  source 1..22: mol_type = other RNA
ctcttgcttagttacctttttc

SEQ ID NO: 27726 - RNA, 22 nt, synthetic construct
  source 1..22: mol_type = other RNA
ctctttcaaaagttattatgga

SEQ ID NO: 27727 - RNA, 22 nt, synthetic construct
  source 1..22: mol_type = other RNA
ctctttgctgatcattgttgct

SEQ ID NO: 27728 - RNA, 22 nt, synthetic construct
  source 1..22: mol_type = other RNA
ctctttgttgaaaatgaaatct

SEQ ID NO: 27729 - RNA, 22 nt, synthetic construct
  source 1..22: mol_type = other RNA
ctctttgtttctcatcaactgc

SEQ ID NO: 27730 - RNA, 22 nt, synthetic construct
  source 1..22: mol_type = other RNA
ctcttttgctgcacattatcac

SEQ ID NO: 27731 - RNA, 22 nt, synthetic construct
  source 1..22: mol_type = other RNA
ctgaaaaacttatgtccccagt

SEQ ID NO: 27732 - RNA, 22 nt, synthetic construct
  source 1..22: mol_type = other RNA
ctgaaaatccagagcttcagat

SEQ ID NO: 27733 - RNA, 22 nt, synthetic construct
  source 1..22: mol_type = other RNA
ctgaaaccaggatggattgaat

SEQ ID NO: 27734 - RNA, 22 nt, synthetic construct
  source 1..22: mol_type = other RNA
ctgaaactaggtgtgtattgtt

SEQ ID NO: 27735 - RNA, 22 nt, synthetic construct
  source 1..22: mol_type = other RNA
ctgaaaggaacaggtatttagc

SEQ ID NO: 27736 - RNA, 22 nt, synthetic construct
  source 1..22: mol_type = other RNA
ctgaaaggcctcagaataattg

SEQ ID NO: 27737 - RNA, 22 nt, synthetic construct
  source 1..22: mol_type = other RNA
ctgaacagaattcttcaccaga

SEQ ID NO: 27738 - RNA, 22 nt, synthetic construct
  source 1..22: mol_type = other RNA
ctgaacggtatttaaaacaaaa

SEQ ID NO: 27739 - RNA, 22 nt, synthetic construct
  source 1..22: mol_type = other RNA
ctgaactttttgcaggaaacaa

SEQ ID NO: 27740 - RNA, 22 nt, synthetic construct
  source 1..22: mol_type = other RNA
ctgaagaagttgtttgctgctc

SEQ ID NO: 27741 - RNA, 22 nt, synthetic construct
  source 1..22: mol_type = other RNA
ctgaagaattgatggcagtgat

SEQ ID NO: 27742 - RNA, 22 nt, synthetic construct
  source 1..22: mol_type = other RNA
ctgaagcagtttcacgccaagt

SEQ ID NO: 27743 - RNA, 22 nt, synthetic construct
  source 1..22: mol_type = other RNA
ctgaagcctgttgattcaagtg

SEQ ID NO: 27744 - RNA, 22 nt, synthetic construct
  source 1..22: mol_type = other RNA
ctgaagctctggattttcaggc

SEQ ID NO: 27745 - RNA, 22 nt, synthetic construct
  source 1..22: mol_type = other RNA
ctgaagcttgttgtgacttctg

SEQ ID NO: 27746 - RNA, 22 nt, synthetic construct
  source 1..22: mol_type = other RNA
ctgaaggaagctgaggaacctg

SEQ ID NO: 27747 - RNA, 22 nt, synthetic construct
  source 1..22: mol_type = other RNA
ctgaaggagcccagagagagaa

SEQ ID NO: 27748 - RNA, 22 nt, synthetic construct
  source 1..22: mol_type = other RNA
ctgaagggtcgagacaaggagc

SEQ ID NO: 27749 - RNA, 22 nt, synthetic construct
  source 1..22: mol_type = other RNA
ctgaatgagcaggaggggaaaa

SEQ ID NO: 27750 - RNA, 22 nt, synthetic construct
  source 1..22: mol_type = other RNA
ctgaatggtggagttttagaag

SEQ ID NO: 27751 - RNA, 22 nt, synthetic construct
  source 1..22: mol_type = other RNA
ctgacattggtcttgttttctc

SEQ ID NO: 27752 - RNA, 22 nt, synthetic construct
  source 1..22: mol_type = other RNA
ctgacatttcaacttttacttg

SEQ ID NO: 27753 - RNA, 22 nt, synthetic construct
  source 1..22: mol_type = other RNA
ctgaccagggaggaagtcacac

SEQ ID NO: 27754 - RNA, 22 nt, synthetic construct
  source 1..22: mol_type = other RNA
ctgactataaggggaatttcta

SEQ ID NO: 27755 - RNA, 22 nt, synthetic construct
  source 1..22: mol_type = other RNA
ctgactatggcaagactcagtt

SEQ ID NO: 27756 - RNA, 22 nt, synthetic construct
  source 1..22: mol_type = other RNA
ctgactgttaatggcatttatg

SEQ ID NO: 27757 - RNA, 22 nt, synthetic construct
  source 1..22: mol_type = other RNA
ctgactttacacaagaaagtag

SEQ ID NO: 27758 - RNA, 22 nt, synthetic construct
  source 1..22: mol_type = other RNA
ctgagaaaacaagaccaatgtc

SEQ ID NO: 27759 - RNA, 22 nt, synthetic construct
  source 1..22: mol_type = other RNA
ctgagagagctcatccagaagt

SEQ ID NO: 27760 - RNA, 22 nt, synthetic construct
  source 1..22: mol_type = other RNA
ctgagcaagttgcgcagcttgt

SEQ ID NO: 27761 - RNA, 22 nt, synthetic construct
  source 1..22: mol_type = other RNA
ctgagccattttcaaactcaca

SEQ ID NO: 27762 - RNA, 22 nt, synthetic construct
  source 1..22: mol_type = other RNA
ctgagctgcctccaaagccagc

SEQ ID NO: 27763 - RNA, 22 nt, synthetic construct
  source 1..22: mol_type = other RNA
ctgagctttgcttgaagtaagc

SEQ ID NO: 27764 - RNA, 22 nt, synthetic construct
  source 1..22: mol_type = other RNA
ctgaggaacctgtggaagagga

SEQ ID NO: 27765 - RNA, 22 nt, synthetic construct
  source 1..22: mol_type = other RNA
ctgaggcaccaccttcccagag

SEQ ID NO: 27766 - RNA, 22 nt, synthetic construct
  source 1..22: mol_type = other RNA
ctgaggcctttcagaaagcatc

SEQ ID NO: 27767 - RNA, 22 nt, synthetic construct
  source 1..22: mol_type = other RNA
ctgaggtatgcgatgggtgagt

SEQ ID NO: 27768 - RNA, 22 nt, synthetic construct
  source 1..22: mol_type = other RNA
ctgagtcttgccatagtcagat

SEQ ID NO: 27769 - RNA, 22 nt, synthetic construct
  source 1..22: mol_type = other RNA
ctgagtgtgacttcctccctgg

SEQ ID NO: 27770 - RNA, 22 nt, synthetic construct
  source 1..22: mol_type = other RNA
ctgataatgccagtaaactagc

SEQ ID NO: 27771 - RNA, 22 nt, synthetic construct
  source 1..22: mol_type = other RNA
ctgataccatcacctcccattt

SEQ ID NO: 27772 - RNA, 22 nt, synthetic construct
  source 1..22: mol_type = other RNA
ctgatcattgttgctttggggg

SEQ ID NO: 27773 - RNA, 22 nt, synthetic construct
  source 1..22: mol_type = other RNA
ctgatgatgctgataatgccag

SEQ ID NO: 27774 - RNA, 22 nt, synthetic construct
  source 1..22: mol_type = other RNA
ctgatggaacaggatagaacca

SEQ ID NO: 27775 - RNA, 22 nt, synthetic construct
  source 1..22: mol_type = other RNA
ctgattttcaccatgaaaacat

SEQ ID NO: 27776 - RNA, 22 nt, synthetic construct
  source 1..22: mol_type = other RNA
ctgatttttgttgttgtagttg

SEQ ID NO: 27777 - RNA, 22 nt, synthetic construct
  source 1..22: mol_type = other RNA
ctgcaaaaagttcaggatgtgt

SEQ ID NO: 27778 - RNA, 22 nt, synthetic construct
  source 1..22: mol_type = other RNA
ctgcaagatgggaaatcatatt

SEQ ID NO: 27779 - RNA, 22 nt, synthetic construct
  source 1..22: mol_type = other RNA
ctgcaagctgtgataatgtgca

SEQ ID NO: 27780 - RNA, 22 nt, synthetic construct
  source 1..22: mol_type = other RNA
ctgcaatgctaaatacctgttc

SEQ ID NO: 27781 - RNA, 22 nt, synthetic construct
  source 1..22: mol_type = other RNA
ctgcacatgagcttttggtaaa

SEQ ID NO: 27782 - RNA, 22 nt, synthetic construct
  source 1..22: mol_type = other RNA
ctgcacattatcacagcttgca

SEQ ID NO: 27783 - RNA, 22 nt, synthetic construct
  source 1..22: mol_type = other RNA
ctgcaccgcaatggaaacacaa

SEQ ID NO: 27784 - RNA, 22 nt, synthetic construct
  source 1..22: mol_type = other RNA
ctgcagaaaataacatccaggg

SEQ ID NO: 27785 - RNA, 22 nt, synthetic construct
  source 1..22: mol_type = other RNA
ctgcagaacttgatagccacac

SEQ ID NO: 27786 - RNA, 22 nt, synthetic construct
  source 1..22: mol_type = other RNA
ctgcagcagtggtttgtctagt

SEQ ID NO: 27787 - RNA, 22 nt, synthetic construct
  source 1..22: mol_type = other RNA
ctgcagctggctttggaggcag

SEQ ID NO: 27788 - RNA, 22 nt, synthetic construct
  source 1..22: mol_type = other RNA
ctgcaggagatgggcatatctc

SEQ ID NO: 27789 - RNA, 22 nt, synthetic construct
  source 1..22: mol_type = other RNA
ctgcagggacaatgactgttcc

SEQ ID NO: 27790 - RNA, 22 nt, synthetic construct
  source 1..22: mol_type = other RNA
ctgcagtctgtatgtcattcct

SEQ ID NO: 27791 - RNA, 22 nt, synthetic construct
  source 1..22: mol_type = other RNA
ctgcagtgggcctgaaaatcca

SEQ ID NO: 27792 - RNA, 22 nt, synthetic construct
  source 1..22: mol_type = other RNA
ctgcagtggtgagtgaggcctg

SEQ ID NO: 27793 - RNA, 22 nt, synthetic construct
  source 1..22: mol_type = other RNA
ctgcagttatgtgttgaaaaac

SEQ ID NO: 27794 - RNA, 22 nt, synthetic construct
  source 1..22: mol_type = other RNA
ctgcatacatgtgtagatggat

SEQ ID NO: 27795 - RNA, 22 nt, synthetic construct
  source 1..22: mol_type = other RNA
ctgcattttcttgggctacaga

SEQ ID NO: 27796 - RNA, 22 nt, synthetic construct
  source 1..22: mol_type = other RNA
ctgccaccaggagcttgcaaat

SEQ ID NO: 27797 - RNA, 22 nt, synthetic construct
  source 1..22: mol_type = other RNA
ctgccactaccacaccaccacc

SEQ ID NO: 27798 - RNA, 22 nt, synthetic construct
  source 1..22: mol_type = other RNA
ctgccagcagttgatgagaaac

SEQ ID NO: 27799 - RNA, 22 nt, synthetic construct
  source 1..22: mol_type = other RNA
ctgccatcaattcttcagtatc

SEQ ID NO: 27800 - RNA, 22 nt, synthetic construct
  source 1..22: mol_type = other RNA
ctgccctgaggtatgcgatggg

SEQ ID NO: 27801 - RNA, 22 nt, synthetic construct
  source 1..22: mol_type = other RNA
ctgcccttgattcatttcaact

SEQ ID NO: 27802 - RNA, 22 nt, synthetic construct
  source 1..22: mol_type = other RNA
ctgcctccaaagccagctgcag

SEQ ID NO: 27803 - RNA, 22 nt, synthetic construct
  source 1..22: mol_type = other RNA
ctgcctcttccgtggaacacac

SEQ ID NO: 27804 - RNA, 22 nt, synthetic construct
  source 1..22: mol_type = other RNA
ctgcctgagagagctcatccag

SEQ ID NO: 27805 - RNA, 22 nt, synthetic construct
  source 1..22: mol_type = other RNA
ctgcctgtttatgaggcttatg

SEQ ID NO: 27806 - RNA, 22 nt, synthetic construct
  source 1..22: mol_type = other RNA
ctgccttgtttttaagtaatac

SEQ ID NO: 27807 - RNA, 22 nt, synthetic construct
  source 1..22: mol_type = other RNA
ctgcgcaacttgctcagcaaag

SEQ ID NO: 27808 - RNA, 22 nt, synthetic construct
  source 1..22: mol_type = other RNA
ctgctaccaaaaattggtgggt

SEQ ID NO: 27809 - RNA, 22 nt, synthetic construct
  source 1..22: mol_type = other RNA
ctgctcattcagaatctgaagc

SEQ ID NO: 27810 - RNA, 22 nt, synthetic construct
  source 1..22: mol_type = other RNA
ctgctccatggtctcaatgatg

SEQ ID NO: 27811 - RNA, 22 nt, synthetic construct
  source 1..22: mol_type = other RNA
ctgctcctgttcttgaaagcac

SEQ ID NO: 27812 - RNA, 22 nt, synthetic construct
  source 1..22: mol_type = other RNA
ctgctctaaagctggggtgtgg

SEQ ID NO: 27813 - RNA, 22 nt, synthetic construct
  source 1..22: mol_type = other RNA
ctgctctaaggtggcatctctt

SEQ ID NO: 27814 - RNA, 22 nt, synthetic construct
  source 1..22: mol_type = other RNA
ctgctctttgttgaaaatgaaa

SEQ ID NO: 27815 - RNA, 22 nt, synthetic construct
  source 1..22: mol_type = other RNA
ctgctgcagaacttgatagcca

SEQ ID NO: 27816 - RNA, 22 nt, synthetic construct
  source 1..22: mol_type = other RNA
ctgctggaacctgaacagaatt

SEQ ID NO: 27817 - RNA, 22 nt, synthetic construct
  source 1..22: mol_type = other RNA
ctgctggcagttgtcctgtagc

SEQ ID NO: 27818 - RNA, 22 nt, synthetic construct
  source 1..22: mol_type = other RNA
ctgctgttcttgcttctgtaag

SEQ ID NO: 27819 - RNA, 22 nt, synthetic construct
  source 1..22: mol_type = other RNA
ctgctgttgctggttttgaggg

SEQ ID NO: 27820 - RNA, 22 nt, synthetic construct
  source 1..22: mol_type = other RNA
ctgcttcagatgctgctccatg

SEQ ID NO: 27821 - RNA, 22 nt, synthetic construct
  source 1..22: mol_type = other RNA
ctgcttctgttctcaataattt

SEQ ID NO: 27822 - RNA, 22 nt, synthetic construct
  source 1..22: mol_type = other RNA
ctgctttcacctggatttcttt

SEQ ID NO: 27823 - RNA, 22 nt, synthetic construct
  source 1..22: mol_type = other RNA
ctggaaaaaacactgtctcaat

SEQ ID NO: 27824 - RNA, 22 nt, synthetic construct
  source 1..22: mol_type = other RNA
ctggaaattccaacatgcctgg

SEQ ID NO: 27825 - RNA, 22 nt, synthetic construct
  source 1..22: mol_type = other RNA
ctggaacctgaacagaattctt

SEQ ID NO: 27826 - RNA, 22 nt, synthetic construct
  source 1..22: mol_type = other RNA
ctggagatgttggtccactgta

SEQ ID NO: 27827 - RNA, 22 nt, synthetic construct
  source 1..22: mol_type = other RNA
ctggagcacaagtcacaaatgt

SEQ ID NO: 27828 - RNA, 22 nt, synthetic construct
  source 1..22: mol_type = other RNA
ctggagctttgtagccagaggt

SEQ ID NO: 27829 - RNA, 22 nt, synthetic construct
  source 1..22: mol_type = other RNA
ctggaggaagtacagaatataa

SEQ ID NO: 27830 - RNA, 22 nt, synthetic construct
  source 1..22: mol_type = other RNA
ctggagtatttcctctttattc

SEQ ID NO: 27831 - RNA, 22 nt, synthetic construct
  source 1..22: mol_type = other RNA
ctggataatattgagacagtgt

SEQ ID NO: 27832 - RNA, 22 nt, synthetic construct
  source 1..22: mol_type = other RNA
ctggatgagctctctcaggcag

SEQ ID NO: 27833 - RNA, 22 nt, synthetic construct
  source 1..22: mol_type = other RNA
ctggatgcaagccacatgcctg

SEQ ID NO: 27834 - RNA, 22 nt, synthetic construct
  source 1..22: mol_type = other RNA
ctggatgttattttctgcagga

SEQ ID NO: 27835 - RNA, 22 nt, synthetic construct
  source 1..22: mol_type = other RNA
ctggatttctttcttggcttac

SEQ ID NO: 27836 - RNA, 22 nt, synthetic construct
  source 1..22: mol_type = other RNA
ctggattttcaggcccactgca

SEQ ID NO: 27837 - RNA, 22 nt, synthetic construct
  source 1..22: mol_type = other RNA
ctggcaaatgggaggtgatggt

SEQ ID NO: 27838 - RNA, 22 nt, synthetic construct
  source 1..22: mol_type = other RNA
ctggcacttacctacacatctg

SEQ ID NO: 27839 - RNA, 22 nt, synthetic construct
  source 1..22: mol_type = other RNA
ctggcagttgtcctgtagctct

SEQ ID NO: 27840 - RNA, 22 nt, synthetic construct
  source 1..22: mol_type = other RNA
ctggcattatcagcatcatcag

SEQ ID NO: 27841 - RNA, 22 nt, synthetic construct
  source 1..22: mol_type = other RNA
ctggccaaagaatgatccttct

SEQ ID NO: 27842 - RNA, 22 nt, synthetic construct
  source 1..22: mol_type = other RNA
ctggccctgacatttcaacttt

SEQ ID NO: 27843 - RNA, 22 nt, synthetic construct
  source 1..22: mol_type = other RNA
ctggctacaaagctccagaatg

SEQ ID NO: 27844 - RNA, 22 nt, synthetic construct
  source 1..22: mol_type = other RNA
ctggcttcccttcatacagggt

SEQ ID NO: 27845 - RNA, 22 nt, synthetic construct
  source 1..22: mol_type = other RNA
ctggctttggaggcagctcaga

SEQ ID NO: 27846 - RNA, 22 nt, synthetic construct
  source 1..22: mol_type = other RNA
ctgggaaggtggtgcctcaggt

SEQ ID NO: 27847 - RNA, 22 nt, synthetic construct
  source 1..22: mol_type = other RNA
ctgggatggttgtgtttgtgct

SEQ ID NO: 27848 - RNA, 22 nt, synthetic construct
  source 1..22: mol_type = other RNA
ctgggctccttcagatcaagaa

SEQ ID NO: 27849 - RNA, 22 nt, synthetic construct
  source 1..22: mol_type = other RNA
ctggggacataagtttttcagt

SEQ ID NO: 27850 - RNA, 22 nt, synthetic construct
  source 1..22: mol_type = other RNA
ctggggaggggtctgagtgtga

SEQ ID NO: 27851 - RNA, 22 nt, synthetic construct
  source 1..22: mol_type = other RNA
ctggggggctcccaaggcaagc

SEQ ID NO: 27852 - RNA, 22 nt, synthetic construct
  source 1..22: mol_type = other RNA
ctggggtgtggctatcaagttc

SEQ ID NO: 27853 - RNA, 22 nt, synthetic construct
  source 1..22: mol_type = other RNA
ctgggtgtaagcttgccttggg

SEQ ID NO: 27854 - RNA, 22 nt, synthetic construct
  source 1..22: mol_type = other RNA
ctggtcaacaagctgcgcaact

SEQ ID NO: 27855 - RNA, 22 nt, synthetic construct
  source 1..22: mol_type = other RNA
ctggtcaggcacaggaaaaaca

SEQ ID NO: 27856 - RNA, 22 nt, synthetic construct
  source 1..22: mol_type = other RNA
ctggtgaaatctttaactgcat

SEQ ID NO: 27857 - RNA, 22 nt, synthetic construct
  source 1..22: mol_type = other RNA
ctggtgaagaattctgttcagg

SEQ ID NO: 27858 - RNA, 22 nt, synthetic construct
  source 1..22: mol_type = other RNA
ctggtggcagctctgaacggta

SEQ ID NO: 27859 - RNA, 22 nt, synthetic construct
  source 1..22: mol_type = other RNA
ctggtggtgctgtgtgcataca

SEQ ID NO: 27860 - RNA, 22 nt, synthetic construct
  source 1..22: mol_type = other RNA
ctggtgtgagggtttttggaac

SEQ ID NO: 27861 - RNA, 22 nt, synthetic construct
  source 1..22: mol_type = other RNA
ctggtttcagatagtgctgtgt

SEQ ID NO: 27862 - RNA, 22 nt, synthetic construct
  source 1..22: mol_type = other RNA
ctggtttctgaaaggaacaggt

SEQ ID NO: 27863 - RNA, 22 nt, synthetic construct
  source 1..22: mol_type = other RNA
ctggttttgagggagatgtgaa

SEQ ID NO: 27864 - RNA, 22 nt, synthetic construct
  source 1..22: mol_type = other RNA
ctgtaagagatgccaccttaga

SEQ ID NO: 27865 - RNA, 22 nt, synthetic construct
  source 1..22: mol_type = other RNA
ctgtaccttgggactgcccttg

SEQ ID NO: 27866 - RNA, 22 nt, synthetic construct
  source 1..22: mol_type = other RNA
ctgtacttcctccagtcccatt

SEQ ID NO: 27867 - RNA, 22 nt, synthetic construct
  source 1..22: mol_type = other RNA
ctgtagaactgaagcttgttgt

SEQ ID NO: 27868 - RNA, 22 nt, synthetic construct
  source 1..22: mol_type = other RNA
ctgtagcaccattaggcattag

SEQ ID NO: 27869 - RNA, 22 nt, synthetic construct
  source 1..22: mol_type = other RNA
ctgtagcccaagaaaatgcagt

SEQ ID NO: 27870 - RNA, 22 nt, synthetic construct
  source 1..22: mol_type = other RNA
ctgtagctctccactgctacca

SEQ ID NO: 27871 - RNA, 22 nt, synthetic construct
  source 1..22: mol_type = other RNA
ctgtatgaagggaagccagaat

SEQ ID NO: 27872 - RNA, 22 nt, synthetic construct
  source 1..22: mol_type = other RNA
ctgtatgcacacagcaccacca

SEQ ID NO: 27873 - RNA, 22 nt, synthetic construct
  source 1..22: mol_type = other RNA
ctgtatgtcattcctgttcaca

SEQ ID NO: 27874 - RNA, 22 nt, synthetic construct
  source 1..22: mol_type = other RNA
ctgtattttgcatgcacttgat

SEQ ID NO: 27875 - RNA, 22 nt, synthetic construct
  source 1..22: mol_type = other RNA
ctgtcaagactcaatatgattt

SEQ ID NO: 27876 - RNA, 22 nt, synthetic construct
  source 1..22: mol_type = other RNA
ctgtctcaatattatccagatt

SEQ ID NO: 27877 - RNA, 22 nt, synthetic construct
  source 1..22: mol_type = other RNA
ctgtctggcaaatgggaggtga

SEQ ID NO: 27878 - RNA, 22 nt, synthetic construct
  source 1..22: mol_type = other RNA
ctgtgaagaagatcttgctttg

SEQ ID NO: 27879 - RNA, 22 nt, synthetic construct
  source 1..22: mol_type = other RNA
ctgtgactggccctgacatttc

SEQ ID NO: 27880 - RNA, 22 nt, synthetic construct
  source 1..22: mol_type = other RNA
ctgtgagatcactcacccatcg

SEQ ID NO: 27881 - RNA, 22 nt, synthetic construct
  source 1..22: mol_type = other RNA
ctgtgagttctgtagcccaaga

SEQ ID NO: 27882 - RNA, 22 nt, synthetic construct
  source 1..22: mol_type = other RNA
ctgtgataatgtgcagcaaaag

SEQ ID NO: 27883 - RNA, 22 nt, synthetic construct
  source 1..22: mol_type = other RNA
ctgtgatgctgatgatgctgat

SEQ ID NO: 27884 - RNA, 22 nt, synthetic construct
  source 1..22: mol_type = other RNA
ctgtgatttgagagtaagagcc

SEQ ID NO: 27885 - RNA, 22 nt, synthetic construct
  source 1..22: mol_type = other RNA
ctgtgcatctgactatggcaag

SEQ ID NO: 27886 - RNA, 22 nt, synthetic construct
  source 1..22: mol_type = other RNA
ctgtgcctgaccagggaggaag

SEQ ID NO: 27887 - RNA, 22 nt, synthetic construct
  source 1..22: mol_type = other RNA
ctgtgcggaattgatctgccct

SEQ ID NO: 27888 - RNA, 22 nt, synthetic construct
  source 1..22: mol_type = other RNA
ctgtgcgttttattcctccatt

SEQ ID NO: 27889 - RNA, 22 nt, synthetic construct
  source 1..22: mol_type = other RNA
ctgtggaagaggaggaggggga

SEQ ID NO: 27890 - RNA, 22 nt, synthetic construct
  source 1..22: mol_type = other RNA
ctgtgtgcatacaggcatgtgg

SEQ ID NO: 27891 - RNA, 22 nt, synthetic construct
  source 1..22: mol_type = other RNA
ctgtgtggcactagatttcatt

SEQ ID NO: 27892 - RNA, 22 nt, synthetic construct
  source 1..22: mol_type = other RNA
ctgtgttgggggcacaagatct

SEQ ID NO: 27893 - RNA, 22 nt, synthetic construct
  source 1..22: mol_type = other RNA
ctgtgttgttttctgggtgtaa

SEQ ID NO: 27894 - RNA, 22 nt, synthetic construct
  source 1..22: mol_type = other RNA
ctgtgtttgctgctgttcttgc

SEQ ID NO: 27895 - RNA, 22 nt, synthetic construct
  source 1..22: mol_type = other RNA
ctgttaatggcatttatgtgag

SEQ ID NO: 27896 - RNA, 22 nt, synthetic construct
  source 1..22: mol_type = other RNA
ctgttcacacaattattctgag

SEQ ID NO: 27897 - RNA, 22 nt, synthetic construct
  source 1..22: mol_type = other RNA
ctgttcaggttccagcagcaat

SEQ ID NO: 27898 - RNA, 22 nt, synthetic construct
  source 1..22: mol_type = other RNA
ctgttccatcaggcttgcttcg

SEQ ID NO: 27899 - RNA, 22 nt, synthetic construct
  source 1..22: mol_type = other RNA
ctgttccattgtgttctgagaa

SEQ ID NO: 27900 - RNA, 22 nt, synthetic construct
  source 1..22: mol_type = other RNA
ctgttcctttcagaaaccagaa

SEQ ID NO: 27901 - RNA, 22 nt, synthetic construct
  source 1..22: mol_type = other RNA
ctgttcttgaaagcacctgtga

SEQ ID NO: 27902 - RNA, 22 nt, synthetic construct
  source 1..22: mol_type = other RNA
ctgttcttgcttctgtaagaga

SEQ ID NO: 27903 - RNA, 22 nt, synthetic construct
  source 1..22: mol_type = other RNA
ctgttctttattctctgaaact

SEQ ID NO: 27904 - RNA, 22 nt, synthetic construct
  source 1..22: mol_type = other RNA
ctgttcttttggttggtgtctt

SEQ ID NO: 27905 - RNA, 22 nt, synthetic construct
  source 1..22: mol_type = other RNA
ctgttgattcaagtgctgtttc

SEQ ID NO: 27906 - RNA, 22 nt, synthetic construct
  source 1..22: mol_type = other RNA
ctgttgccctcaacatggttgg

SEQ ID NO: 27907 - RNA, 22 nt, synthetic construct
  source 1..22: mol_type = other RNA
ctgttgctggttttgagggaga

SEQ ID NO: 27908 - RNA, 22 nt, synthetic construct
  source 1..22: mol_type = other RNA
ctgtttatgaggcttatgttgc

SEQ ID NO: 27909 - RNA, 22 nt, synthetic construct
  source 1..22: mol_type = other RNA
ctgtttcaacactggggacata

SEQ ID NO: 27910 - RNA, 22 nt, synthetic construct
  source 1..22: mol_type = other RNA
ctgttttggagaagtgcacctg

SEQ ID NO: 27911 - RNA, 22 nt, synthetic construct
  source 1..22: mol_type = other RNA
cttaaaaacaaggcagtgctaa

SEQ ID NO: 27912 - RNA, 22 nt, synthetic construct
  source 1..22: mol_type = other RNA
cttaaaagtgttgtgttacttt

SEQ ID NO: 27913 - RNA, 22 nt, synthetic construct
  source 1..22: mol_type = other RNA
cttaattggcctgtgcatctga

SEQ ID NO: 27914 - RNA, 22 nt, synthetic construct
  source 1..22: mol_type = other RNA
cttacacccagaaaacaacaca

SEQ ID NO: 27915 - RNA, 22 nt, synthetic construct
  source 1..22: mol_type = other RNA
cttacagaagcaagaacagcag

SEQ ID NO: 27916 - RNA, 22 nt, synthetic construct
  source 1..22: mol_type = other RNA
cttaccccgaagttacgtcttt

SEQ ID NO: 27917 - RNA, 22 nt, synthetic construct
  source 1..22: mol_type = other RNA
cttacctacacatctgcaagat

SEQ ID NO: 27918 - RNA, 22 nt, synthetic construct
  source 1..22: mol_type = other RNA
cttactctcaaatcacagaagc

SEQ ID NO: 27919 - RNA, 22 nt, synthetic construct
  source 1..22: mol_type = other RNA
cttacttcaagcaaagctcagt

SEQ ID NO: 27920 - RNA, 22 nt, synthetic construct
  source 1..22: mol_type = other RNA
cttagagcagcatgcttttgag

SEQ ID NO: 27921 - RNA, 22 nt, synthetic construct
  source 1..22: mol_type = other RNA
cttagtctgttgccctcaacat

SEQ ID NO: 27922 - RNA, 22 nt, synthetic construct
  source 1..22: mol_type = other RNA
cttagtgaacactgagctttgc

SEQ ID NO: 27923 - RNA, 22 nt, synthetic construct
  source 1..22: mol_type = other RNA
cttagttacctttttccatgtt

SEQ ID NO: 27924 - RNA, 22 nt, synthetic construct
  source 1..22: mol_type = other RNA
cttatagtcagaccatgaaatc

SEQ ID NO: 27925 - RNA, 22 nt, synthetic construct
  source 1..22: mol_type = other RNA
cttatcactcaaatcggagaca

SEQ ID NO: 27926 - RNA, 22 nt, synthetic construct
  source 1..22: mol_type = other RNA
cttatggtcaaataacgacttg

SEQ ID NO: 27927 - RNA, 22 nt, synthetic construct
  source 1..22: mol_type = other RNA
cttatgtccccagtgttgaaac

SEQ ID NO: 27928 - RNA, 22 nt, synthetic construct
  source 1..22: mol_type = other RNA
cttatgttgcaaaaggtgtgag

SEQ ID NO: 27929 - RNA, 22 nt, synthetic construct
  source 1..22: mol_type = other RNA
cttcaagcaaagctcagtgttc

SEQ ID NO: 27930 - RNA, 22 nt, synthetic construct
  source 1..22: mol_type = other RNA
cttcaattcaatccatcctggt

SEQ ID NO: 27931 - RNA, 22 nt, synthetic construct
  source 1..22: mol_type = other RNA
cttcacaggtgctttcaagaac

SEQ ID NO: 27932 - RNA, 22 nt, synthetic construct
  source 1..22: mol_type = other RNA
cttcaccagacgctagctttgt

SEQ ID NO: 27933 - RNA, 22 nt, synthetic construct
  source 1..22: mol_type = other RNA
cttcagaaaagacaccaaccaa

SEQ ID NO: 27934 - RNA, 22 nt, synthetic construct
  source 1..22: mol_type = other RNA
cttcagaaggaaaaagcactct

SEQ ID NO: 27935 - RNA, 22 nt, synthetic construct
  source 1..22: mol_type = other RNA
cttcagaatctcttgctctttg

SEQ ID NO: 27936 - RNA, 22 nt, synthetic construct
  source 1..22: mol_type = other RNA
cttcagagactgagccattttc

SEQ ID NO: 27937 - RNA, 22 nt, synthetic construct
  source 1..22: mol_type = other RNA
cttcagatcaagaaattgaaac

SEQ ID NO: 27938 - RNA, 22 nt, synthetic construct
  source 1..22: mol_type = other RNA
cttcagatgctgctccatggtc

SEQ ID NO: 27939 - RNA, 22 nt, synthetic construct
  source 1..22: mol_type = other RNA
cttcagattctgaatgagcagg

SEQ ID NO: 27940 - RNA, 22 nt, synthetic construct
  source 1..22: mol_type = other RNA
cttcagtatcaacccaatctct

SEQ ID NO: 27941 - RNA, 22 nt, synthetic construct
  source 1..22: mol_type = other RNA
cttcagttctacagggatataa

SEQ ID NO: 27942 - RNA, 22 nt, synthetic construct
  source 1..22: mol_type = other RNA
cttcatacagggtattccataa

SEQ ID NO: 27943 - RNA, 22 nt, synthetic construct
  source 1..22: mol_type = other RNA
cttccaaattactagatactcc

SEQ ID NO: 27944 - RNA, 22 nt, synthetic construct
  source 1..22: mol_type = other RNA
cttccacaggttcctcagcttc

SEQ ID NO: 27945 - RNA, 22 nt, synthetic construct
  source 1..22: mol_type = other RNA
cttccactttagtctggccaaa

SEQ ID NO: 27946 - RNA, 22 nt, synthetic construct
  source 1..22: mol_type = other RNA
cttccattctggagctttgtag

SEQ ID NO: 27947 - RNA, 22 nt, synthetic construct
  source 1..22: mol_type = other RNA
cttcccagagtcctaatccatc

SEQ ID NO: 27948 - RNA, 22 nt, synthetic construct
  source 1..22: mol_type = other RNA
cttcccttaaaagtgttgtgtt

SEQ ID NO: 27949 - RNA, 22 nt, synthetic construct
  source 1..22: mol_type = other RNA
cttcccttcatacagggtattc

SEQ ID NO: 27950 - RNA, 22 nt, synthetic construct
  source 1..22: mol_type = other RNA
cttccgtggaacacacacatgg

SEQ ID NO: 27951 - RNA, 22 nt, synthetic construct
  source 1..22: mol_type = other RNA
cttcctccagtcccatttggac

SEQ ID NO: 27952 - RNA, 22 nt, synthetic construct
  source 1..22: mol_type = other RNA
cttcctccctggtcaggcacag

SEQ ID NO: 27953 - RNA, 22 nt, synthetic construct
  source 1..22: mol_type = other RNA
cttccttcagaaggaaaaagca

SEQ ID NO: 27954 - RNA, 22 nt, synthetic construct
  source 1..22: mol_type = other RNA
cttcggggccatccacaaggct

SEQ ID NO: 27955 - RNA, 22 nt, synthetic construct
  source 1..22: mol_type = other RNA
cttcggggtaagccaagaaaga

SEQ ID NO: 27956 - RNA, 22 nt, synthetic construct
  source 1..22: mol_type = other RNA
cttctaaaactccaccattcag

SEQ ID NO: 27957 - RNA, 22 nt, synthetic construct
  source 1..22: mol_type = other RNA
cttctccaaaacagaccattta

SEQ ID NO: 27958 - RNA, 22 nt, synthetic construct
  source 1..22: mol_type = other RNA
cttctccgatgctttctgaaag

SEQ ID NO: 27959 - RNA, 22 nt, synthetic construct
  source 1..22: mol_type = other RNA
cttctctctctgggctccttca

SEQ ID NO: 27960 - RNA, 22 nt, synthetic construct
  source 1..22: mol_type = other RNA
cttctctttgctgatcattgtt

SEQ ID NO: 27961 - RNA, 22 nt, synthetic construct
  source 1..22: mol_type = other RNA
cttctgaaggaagctgaggaac

SEQ ID NO: 27962 - RNA, 22 nt, synthetic construct
  source 1..22: mol_type = other RNA
cttctgctcctgttcttgaaag

SEQ ID NO: 27963 - RNA, 22 nt, synthetic construct
  source 1..22: mol_type = other RNA
cttctggatgagctctctcagg

SEQ ID NO: 27964 - RNA, 22 nt, synthetic construct
  source 1..22: mol_type = other RNA
cttctggggaggggtctgagtg

SEQ ID NO: 27965 - RNA, 22 nt, synthetic construct
  source 1..22: mol_type = other RNA
cttctgtaagagatgccacctt

SEQ ID NO: 27966 - RNA, 22 nt, synthetic construct
  source 1..22: mol_type = other RNA
cttctgtgatttgagagtaaga

SEQ ID NO: 27967 - RNA, 22 nt, synthetic construct
  source 1..22: mol_type = other RNA
cttcttcacaggtgctttcaag

SEQ ID NO: 27968 - RNA, 22 nt, synthetic construct
  source 1..22: mol_type = other RNA
cttcttcagaaaagacaccaac

SEQ ID NO: 27969 - RNA, 22 nt, synthetic construct
  source 1..22: mol_type = other RNA
cttctttctccccctcctcctc

SEQ ID NO: 27970 - RNA, 22 nt, synthetic construct
  source 1..22: mol_type = other RNA
cttgaaagcacctgtgaagaag

SEQ ID NO: 27971 - RNA, 22 nt, synthetic construct
  source 1..22: mol_type = other RNA
cttgaagtaagcaccattcatt

SEQ ID NO: 27972 - RNA, 22 nt, synthetic construct
  source 1..22: mol_type = other RNA
cttgaatcaacaggcttcagag

SEQ ID NO: 27973 - RNA, 22 nt, synthetic construct
  source 1..22: mol_type = other RNA
cttgacaggtgtatccaataaa

SEQ ID NO: 27974 - RNA, 22 nt, synthetic construct
  source 1..22: mol_type = other RNA
cttgaggtgttctgacattggt

SEQ ID NO: 27975 - RNA, 22 nt, synthetic construct
  source 1..22: mol_type = other RNA
cttgatacataaccatgcaaat

SEQ ID NO: 27976 - RNA, 22 nt, synthetic construct
  source 1..22: mol_type = other RNA
cttgatagccacaccccagctt

SEQ ID NO: 27977 - RNA, 22 nt, synthetic construct
  source 1..22: mol_type = other RNA
cttgatctgaaggagcccagag

SEQ ID NO: 27978 - RNA, 22 nt, synthetic construct
  source 1..22: mol_type = other RNA
cttgattcatttcaacttggta

SEQ ID NO: 27979 - RNA, 22 nt, synthetic construct
  source 1..22: mol_type = other RNA
cttgatttcatggtctgactat

SEQ ID NO: 27980 - RNA, 22 nt, synthetic construct
  source 1..22: mol_type = other RNA
cttgcaaattgctgctggaacc

SEQ ID NO: 27981 - RNA, 22 nt, synthetic construct
  source 1..22: mol_type = other RNA
cttgcagatgtgtaggtaagtg

SEQ ID NO: 27982 - RNA, 22 nt, synthetic construct
  source 1..22: mol_type = other RNA
cttgcaggtggattctcttgct

SEQ ID NO: 27983 - RNA, 22 nt, synthetic construct
  source 1..22: mol_type = other RNA
cttgcatcacatgcaatatttt

SEQ ID NO: 27984 - RNA, 22 nt, synthetic construct
  source 1..22: mol_type = other RNA
cttgcatccaggttccacctta

SEQ ID NO: 27985 - RNA, 22 nt, synthetic construct
  source 1..22: mol_type = other RNA
cttgccatagtcagatgcacag

SEQ ID NO: 27986 - RNA, 22 nt, synthetic construct
  source 1..22: mol_type = other RNA
cttgccttgggagccccccagg

SEQ ID NO: 27987 - RNA, 22 nt, synthetic construct
  source 1..22: mol_type = other RNA
cttgctcagcaaaggtacttga

SEQ ID NO: 27988 - RNA, 22 nt, synthetic construct
  source 1..22: mol_type = other RNA
cttgctctttgtttctcatcaa

SEQ ID NO: 27989 - RNA, 22 nt, synthetic construct
  source 1..22: mol_type = other RNA
cttgcttagttacctttttcca

SEQ ID NO: 27990 - RNA, 22 nt, synthetic construct
  source 1..22: mol_type = other RNA
cttgcttcggggccatccacaa

SEQ ID NO: 27991 - RNA, 22 nt, synthetic construct
  source 1..22: mol_type = other RNA
cttgcttctgtaagagatgcca

SEQ ID NO: 27992 - RNA, 22 nt, synthetic construct
  source 1..22: mol_type = other RNA
cttgcttctgtgatttgagagt

SEQ ID NO: 27993 - RNA, 22 nt, synthetic construct
  source 1..22: mol_type = other RNA
cttgctttgggatcacattatt

SEQ ID NO: 27994 - RNA, 22 nt, synthetic construct
  source 1..22: mol_type = other RNA
cttggaataccctctactttct

SEQ ID NO: 27995 - RNA, 22 nt, synthetic construct
  source 1..22: mol_type = other RNA
cttggcgtgaaactgcttcaga

SEQ ID NO: 27996 - RNA, 22 nt, synthetic construct
  source 1..22: mol_type = other RNA
cttggcttaccccgaagttacg

SEQ ID NO: 27997 - RNA, 22 nt, synthetic construct
  source 1..22: mol_type = other RNA
cttgggactgcccttgattcat

SEQ ID NO: 27998 - RNA, 22 nt, synthetic construct
  source 1..22: mol_type = other RNA
cttgggagccccccaggcatgt

SEQ ID NO: 27999 - RNA, 22 nt, synthetic construct
  source 1..22: mol_type = other RNA
cttgggctacagaactcacaga

SEQ ID NO: 28000 - RNA, 22 nt, synthetic construct
  source 1..22: mol_type = other RNA
cttggtacatttgtgacttgtg

SEQ ID NO: 28001 - RNA, 22 nt, synthetic construct
  source 1..22: mol_type = other RNA
cttggtgaaaacgaggggcctt

SEQ ID NO: 28002 - RNA, 22 nt, synthetic construct
  source 1..22: mol_type = other RNA
cttggtgtctccatttacttct

SEQ ID NO: 28003 - RNA, 22 nt, synthetic construct
  source 1..22: mol_type = other RNA
cttggtttctatttttatatcc

SEQ ID NO: 28004 - RNA, 22 nt, synthetic construct
  source 1..22: mol_type = other RNA
cttgtcatggtaattagcactt

SEQ ID NO: 28005 - RNA, 22 nt, synthetic construct
  source 1..22: mol_type = other RNA
cttgtctcgacccttcagaatc

SEQ ID NO: 28006 - RNA, 22 nt, synthetic construct
  source 1..22: mol_type = other RNA
cttgtgcccccaacacagcact

SEQ ID NO: 28007 - RNA, 22 nt, synthetic construct
  source 1..22: mol_type = other RNA
cttgtgctccagctgtgttgtt

SEQ ID NO: 28008 - RNA, 22 nt, synthetic construct
  source 1..22: mol_type = other RNA
cttgtggatggccccgaagcaa

SEQ ID NO: 28009 - RNA, 22 nt, synthetic construct
  source 1..22: mol_type = other RNA
cttgtgtaaagtcaggactcac

SEQ ID NO: 28010 - RNA, 22 nt, synthetic construct
  source 1..22: mol_type = other RNA
cttgttcaaacaatacacacct

SEQ ID NO: 28011 - RNA, 22 nt, synthetic construct
  source 1..22: mol_type = other RNA
cttgttgaccagacatatcttg

SEQ ID NO: 28012 - RNA, 22 nt, synthetic construct
  source 1..22: mol_type = other RNA
cttgttgtgacttctgctcctg

SEQ ID NO: 28013 - RNA, 22 nt, synthetic construct
  source 1..22: mol_type = other RNA
cttgtttcaatttcttgatctg

SEQ ID NO: 28014 - RNA, 22 nt, synthetic construct
  source 1..22: mol_type = other RNA
cttgtttcctgcaaaaagttca

SEQ ID NO: 28015 - RNA, 22 nt, synthetic construct
  source 1..22: mol_type = other RNA
cttgttttctcagaacacaatg

SEQ ID NO: 28016 - RNA, 22 nt, synthetic construct
  source 1..22: mol_type = other RNA
ctttaactgcattttcttgggc

SEQ ID NO: 28017 - RNA, 22 nt, synthetic construct
  source 1..22: mol_type = other RNA
ctttacacaagaaagtagaggg

SEQ ID NO: 28018 - RNA, 22 nt, synthetic construct
  source 1..22: mol_type = other RNA
ctttagagcagcaaacaacttc

SEQ ID NO: 28019 - RNA, 22 nt, synthetic construct
  source 1..22: mol_type = other RNA
ctttagtctggccaaagaatga

SEQ ID NO: 28020 - RNA, 22 nt, synthetic construct
  source 1..22: mol_type = other RNA
ctttattctctgaaactaggtg

SEQ ID NO: 28021 - RNA, 22 nt, synthetic construct
  source 1..22: mol_type = other RNA
ctttatttgtaatttttgctgc

SEQ ID NO: 28022 - RNA, 22 nt, synthetic construct
  source 1..22: mol_type = other RNA
ctttcaagaacaggagcagaag

SEQ ID NO: 28023 - RNA, 22 nt, synthetic construct
  source 1..22: mol_type = other RNA
ctttcacctggatttctttctt

SEQ ID NO: 28024 - RNA, 22 nt, synthetic construct
  source 1..22: mol_type = other RNA
ctttcagaaaccagaacaacta

SEQ ID NO: 28025 - RNA, 22 nt, synthetic construct
  source 1..22: mol_type = other RNA
ctttcagaaagcatcggagaag

SEQ ID NO: 28026 - RNA, 22 nt, synthetic construct
  source 1..22: mol_type = other RNA
ctttctccattagccttttggt

SEQ ID NO: 28027 - RNA, 22 nt, synthetic construct
  source 1..22: mol_type = other RNA
ctttctccccctcctcctcttc

SEQ ID NO: 28028 - RNA, 22 nt, synthetic construct
  source 1..22: mol_type = other RNA
ctttctgaaaggcctcagaata

SEQ ID NO: 28029 - RNA, 22 nt, synthetic construct
  source 1..22: mol_type = other RNA
ctttcttatcactcaaatcgga

SEQ ID NO: 28030 - RNA, 22 nt, synthetic construct
  source 1..22: mol_type = other RNA
ctttcttggcttaccccgaagt

SEQ ID NO: 28031 - RNA, 22 nt, synthetic construct
  source 1..22: mol_type = other RNA
ctttcttgtgtaaagtcaggac

SEQ ID NO: 28032 - RNA, 22 nt, synthetic construct
  source 1..22: mol_type = other RNA
ctttgctgagcaagttgcgcag

SEQ ID NO: 28033 - RNA, 22 nt, synthetic construct
  source 1..22: mol_type = other RNA
ctttgctgatcattgttgcttt

SEQ ID NO: 28034 - RNA, 22 nt, synthetic construct
  source 1..22: mol_type = other RNA
ctttgcttgaagtaagcaccat

SEQ ID NO: 28035 - RNA, 22 nt, synthetic construct
  source 1..22: mol_type = other RNA
ctttggaggcagctcagagtta

SEQ ID NO: 28036 - RNA, 22 nt, synthetic construct
  source 1..22: mol_type = other RNA
ctttggccagactaaagtggaa

SEQ ID NO: 28037 - RNA, 22 nt, synthetic construct
  source 1..22: mol_type = other RNA
ctttgggatcacattatttgga

SEQ ID NO: 28038 - RNA, 22 nt, synthetic construct
  source 1..22: mol_type = other RNA
ctttgggggtgaggaaaagtct

SEQ ID NO: 28039 - RNA, 22 nt, synthetic construct
  source 1..22: mol_type = other RNA
ctttggttggggtagtggtggt

SEQ ID NO: 28040 - RNA, 22 nt, synthetic construct
  source 1..22: mol_type = other RNA
ctttgtagccagaggttctgtc

SEQ ID NO: 28041 - RNA, 22 nt, synthetic construct
  source 1..22: mol_type = other RNA
ctttgtggttccctggatgtta

SEQ ID NO: 28042 - RNA, 22 nt, synthetic construct
  source 1..22: mol_type = other RNA
ctttgttgaaaatgaaatctag

SEQ ID NO: 28043 - RNA, 22 nt, synthetic construct
  source 1..22: mol_type = other RNA
ctttgtttctcatcaactgctg

SEQ ID NO: 28044 - RNA, 22 nt, synthetic construct
  source 1..22: mol_type = other RNA
cttttaagggaagtgaaaatag

SEQ ID NO: 28045 - RNA, 22 nt, synthetic construct
  source 1..22: mol_type = other RNA
cttttacttgcttctgtgattt

SEQ ID NO: 28046 - RNA, 22 nt, synthetic construct
  source 1..22: mol_type = other RNA
cttttcccctcctgctcattca

SEQ ID NO: 28047 - RNA, 22 nt, synthetic construct
  source 1..22: mol_type = other RNA
cttttcctcacccccaaagcaa

SEQ ID NO: 28048 - RNA, 22 nt, synthetic construct
  source 1..22: mol_type = other RNA
cttttctgaagaagttgtttgc

SEQ ID NO: 28049 - RNA, 22 nt, synthetic construct
  source 1..22: mol_type = other RNA
cttttctgccactaccacacca

SEQ ID NO: 28050 - RNA, 22 nt, synthetic construct
  source 1..22: mol_type = other RNA
cttttgaaagagtgccacttgg

SEQ ID NO: 28051 - RNA, 22 nt, synthetic construct
  source 1..22: mol_type = other RNA
cttttgagtgtccttctgggga

SEQ ID NO: 28052 - RNA, 22 nt, synthetic construct
  source 1..22: mol_type = other RNA
cttttgcaacataagcctcata

SEQ ID NO: 28053 - RNA, 22 nt, synthetic construct
  source 1..22: mol_type = other RNA
cttttgctgcacattatcacag

SEQ ID NO: 28054 - RNA, 22 nt, synthetic construct
  source 1..22: mol_type = other RNA
cttttggtaaatggtctgtttt

SEQ ID NO: 28055 - RNA, 22 nt, synthetic construct
  source 1..22: mol_type = other RNA
cttttggtcttgtttcaatttc

SEQ ID NO: 28056 - RNA, 22 nt, synthetic construct
  source 1..22: mol_type = other RNA
cttttggttggtgtcttttctg

SEQ ID NO: 28057 - RNA, 22 nt, synthetic construct
  source 1..22: mol_type = other RNA
ctttttccatgttttgttttct

SEQ ID NO: 28058 - RNA, 22 nt, synthetic construct
  source 1..22: mol_type = other RNA
ctttttccttctgaaggaagct

SEQ ID NO: 28059 - RNA, 22 nt, synthetic construct
  source 1..22: mol_type = other RNA
ctttttgcaggaaacaagaccc

SEQ ID NO: 28060 - RNA, 22 nt, synthetic construct
  source 1..22: mol_type = other RNA
gaaaaaacactgtctcaatatt

SEQ ID NO: 28061 - RNA, 22 nt, synthetic construct
  source 1..22: mol_type = other RNA
gaaaaacatttgcatggttatg

SEQ ID NO: 28062 - RNA, 22 nt, synthetic construct
  source 1..22: mol_type = other RNA
gaaaaactggtgaaatctttaa

SEQ ID NO: 28063 - RNA, 22 nt, synthetic construct
  source 1..22: mol_type = other RNA
gaaaaacttatgtccccagtgt

SEQ ID NO: 28064 - RNA, 22 nt, synthetic construct
  source 1..22: mol_type = other RNA
gaaaaagcactctgaatggtgg

SEQ ID NO: 28065 - RNA, 22 nt, synthetic construct
  source 1..22: mol_type = other RNA
gaaaaaggtaactaagcaagag

SEQ ID NO: 28066 - RNA, 22 nt, synthetic construct
  source 1..22: mol_type = other RNA
gaaaacaaaacatggaaaaagg

SEQ ID NO: 28067 - RNA, 22 nt, synthetic construct
  source 1..22: mol_type = other RNA
gaaaacaacacagctggagcac

SEQ ID NO: 28068 - RNA, 22 nt, synthetic construct
  source 1..22: mol_type = other RNA
gaaaacaagaccaatgtcagaa

SEQ ID NO: 28069 - RNA, 22 nt, synthetic construct
  source 1..22: mol_type = other RNA
gaaaacattcttccactttagt

SEQ ID NO: 28070 - RNA, 22 nt, synthetic construct
  source 1..22: mol_type = other RNA
gaaaaccacatctcacataaat

SEQ ID NO: 28071 - RNA, 22 nt, synthetic construct
  source 1..22: mol_type = other RNA
gaaaacgaggggccttcaattc

SEQ ID NO: 28072 - RNA, 22 nt, synthetic construct
  source 1..22: mol_type = other RNA
gaaaagacaccaaccaaaagaa

SEQ ID NO: 28073 - RNA, 22 nt, synthetic construct
  source 1..22: mol_type = other RNA
gaaaaggaatccttagtgaaca

SEQ ID NO: 28074 - RNA, 22 nt, synthetic construct
  source 1..22: mol_type = other RNA
gaaaagtctggagtatttcctc

SEQ ID NO: 28075 - RNA, 22 nt, synthetic construct
  source 1..22: mol_type = other RNA
gaaaagtgctaattaccatgac

SEQ ID NO: 28076 - RNA, 22 nt, synthetic construct
  source 1..22: mol_type = other RNA
gaaaataacatccagggaacca

SEQ ID NO: 28077 - RNA, 22 nt, synthetic construct
  source 1..22: mol_type = other RNA
gaaaatagagggtaaacctgag

SEQ ID NO: 28078 - RNA, 22 nt, synthetic construct
  source 1..22: mol_type = other RNA
gaaaatattgcatgtgatgcaa

SEQ ID NO: 28079 - RNA, 22 nt, synthetic construct
  source 1..22: mol_type = other RNA
gaaaatccagagcttcagattc

SEQ ID NO: 28080 - RNA, 22 nt, synthetic construct
  source 1..22: mol_type = other RNA
gaaaatgaaatctagtgccaca

SEQ ID NO: 28081 - RNA, 22 nt, synthetic construct
  source 1..22: mol_type = other RNA
gaaaatgcagttaaagatttca

SEQ ID NO: 28082 - RNA, 22 nt, synthetic construct
  source 1..22: mol_type = other RNA
gaaaatggctcagtctctgaag

SEQ ID NO: 28083 - RNA, 22 nt, synthetic construct
  source 1..22: mol_type = other RNA
gaaacaaagagcaagagattct

SEQ ID NO: 28084 - RNA, 22 nt, synthetic construct
  source 1..22: mol_type = other RNA
gaaacaagaccaaaaggctaat

SEQ ID NO: 28085 - RNA, 22 nt, synthetic construct
  source 1..22: mol_type = other RNA
gaaacaagacccaaaacttgca

SEQ ID NO: 28086 - RNA, 22 nt, synthetic construct
  source 1..22: mol_type = other RNA
gaaacacaatctggataatatt

SEQ ID NO: 28087 - RNA, 22 nt, synthetic construct
  source 1..22: mol_type = other RNA
gaaacagcacttgaatcaacag

SEQ ID NO: 28088 - RNA, 22 nt, synthetic construct
  source 1..22: mol_type = other RNA
gaaaccaagatatgtctggtca

SEQ ID NO: 28089 - RNA, 22 nt, synthetic construct
  source 1..22: mol_type = other RNA
gaaaccagaacaactacaacaa

SEQ ID NO: 28090 - RNA, 22 nt, synthetic construct
  source 1..22: mol_type = other RNA
gaaaccaggatggattgaattg

SEQ ID NO: 28091 - RNA, 22 nt, synthetic construct
  source 1..22: mol_type = other RNA
gaaacctgtattttgcatgcac

SEQ ID NO: 28092 - RNA, 22 nt, synthetic construct
  source 1..22: mol_type = other RNA
gaaactaggtgtgtattgtttg

SEQ ID NO: 28093 - RNA, 22 nt, synthetic construct
  source 1..22: mol_type = other RNA
gaaactgcttcagatgctgctc

SEQ ID NO: 28094 - RNA, 22 nt, synthetic construct
  source 1..22: mol_type = other RNA
gaaactgtagcaccattaggca

SEQ ID NO: 28095 - RNA, 22 nt, synthetic construct
  source 1..22: mol_type = other RNA
gaaagaaatccaggtgaaagca

SEQ ID NO: 28096 - RNA, 22 nt, synthetic construct
  source 1..22: mol_type = other RNA
gaaagaagcaattgtgatggtg

SEQ ID NO: 28097 - RNA, 22 nt, synthetic construct
  source 1..22: mol_type = other RNA
gaaagaatctgtgagttctgta

SEQ ID NO: 28098 - RNA, 22 nt, synthetic construct
  source 1..22: mol_type = other RNA
gaaagacgtaacttcggggtaa

SEQ ID NO: 28099 - RNA, 22 nt, synthetic construct
  source 1..22: mol_type = other RNA
gaaagagtgccacttggtgtct

SEQ ID NO: 28100 - RNA, 22 nt, synthetic construct
  source 1..22: mol_type = other RNA
gaaagcacctgtgaagaagatc

SEQ ID NO: 28101 - RNA, 22 nt, synthetic construct
  source 1..22: mol_type = other RNA
gaaagcagtcaaccaaatgtct

SEQ ID NO: 28102 - RNA, 22 nt, synthetic construct
  source 1..22: mol_type = other RNA
gaaagcatcggagaagggctgc

SEQ ID NO: 28103 - RNA, 22 nt, synthetic construct
  source 1..22: mol_type = other RNA
gaaaggaacaggtatttagcat

SEQ ID NO: 28104 - RNA, 22 nt, synthetic construct
  source 1..22: mol_type = other RNA
gaaaggcctcagaataattgtg

SEQ ID NO: 28105 - RNA, 22 nt, synthetic construct
  source 1..22: mol_type = other RNA
gaaagtagagggtattccaagt

SEQ ID NO: 28106 - RNA, 22 nt, synthetic construct
  source 1..22: mol_type = other RNA
gaaatactccagacttttcctc

SEQ ID NO: 28107 - RNA, 22 nt, synthetic construct
  source 1..22: mol_type = other RNA
gaaatcaagtgcatgcaaaata

SEQ ID NO: 28108 - RNA, 22 nt, synthetic construct
  source 1..22: mol_type = other RNA
gaaatcatattgagtcttgaca

SEQ ID NO: 28109 - RNA, 22 nt, synthetic construct
  source 1..22: mol_type = other RNA
gaaatccaggtgaaagcagtca

SEQ ID NO: 28110 - RNA, 22 nt, synthetic construct
  source 1..22: mol_type = other RNA
gaaatctagtgccacacagtga

SEQ ID NO: 28111 - RNA, 22 nt, synthetic construct
  source 1..22: mol_type = other RNA
gaaatctttaactgcattttct

SEQ ID NO: 28112 - RNA, 22 nt, synthetic construct
  source 1..22: mol_type = other RNA
gaaatgaatcaagggcagtccc

SEQ ID NO: 28113 - RNA, 22 nt, synthetic construct
  source 1..22: mol_type = other RNA
gaaatgaatggtgcttacttca

SEQ ID NO: 28114 - RNA, 22 nt, synthetic construct
  source 1..22: mol_type = other RNA
gaaatgtcagggccagtcacag

SEQ ID NO: 28115 - RNA, 22 nt, synthetic construct
  source 1..22: mol_type = other RNA
gaaattccaacatgcctggggg

SEQ ID NO: 28116 - RNA, 22 nt, synthetic construct
  source 1..22: mol_type = other RNA
gaaattccccttatagtcagac

SEQ ID NO: 28117 - RNA, 22 nt, synthetic construct
  source 1..22: mol_type = other RNA
gaaattgaaacaagaccaaaag

SEQ ID NO: 28118 - RNA, 22 nt, synthetic construct
  source 1..22: mol_type = other RNA
gaacaactacaacaacaaaaat

SEQ ID NO: 28119 - RNA, 22 nt, synthetic construct
  source 1..22: mol_type = other RNA
gaacaagaaacctgtattttgc

SEQ ID NO: 28120 - RNA, 22 nt, synthetic construct
  source 1..22: mol_type = other RNA
gaacacaatggaacagtcattg

SEQ ID NO: 28121 - RNA, 22 nt, synthetic construct
  source 1..22: mol_type = other RNA
gaacacacacatggtgaactcc

SEQ ID NO: 28122 - RNA, 22 nt, synthetic construct
  source 1..22: mol_type = other RNA
gaacaccaccactaccccaacc

SEQ ID NO: 28123 - RNA, 22 nt, synthetic construct
  source 1..22: mol_type = other RNA
gaacacctcaagcataacccac

SEQ ID NO: 28124 - RNA, 22 nt, synthetic construct
  source 1..22: mol_type = other RNA
gaacactgagctttgcttgaag

SEQ ID NO: 28125 - RNA, 22 nt, synthetic construct
  source 1..22: mol_type = other RNA
gaacagaagcagctgttctttt

SEQ ID NO: 28126 - RNA, 22 nt, synthetic construct
  source 1..22: mol_type = other RNA
gaacagaattcttcaccagacg

SEQ ID NO: 28127 - RNA, 22 nt, synthetic construct
  source 1..22: mol_type = other RNA
gaacagactacacatcctgaac

SEQ ID NO: 28128 - RNA, 22 nt, synthetic construct
  source 1..22: mol_type = other RNA
gaacagcagcaaacacagcaac

SEQ ID NO: 28129 - RNA, 22 nt, synthetic construct
  source 1..22: mol_type = other RNA
gaacagctgcttctgttctcaa

SEQ ID NO: 28130 - RNA, 22 nt, synthetic construct
  source 1..22: mol_type = other RNA
gaacaggaatgacatacagact

SEQ ID NO: 28131 - RNA, 22 nt, synthetic construct
  source 1..22: mol_type = other RNA
gaacaggagcagaagtcacaac

SEQ ID NO: 28132 - RNA, 22 nt, synthetic construct
  source 1..22: mol_type = other RNA
gaacaggatagaaccaaccatg

SEQ ID NO: 28133 - RNA, 22 nt, synthetic construct
  source 1..22: mol_type = other RNA
gaacaggtatttagcattgcag

SEQ ID NO: 28134 - RNA, 22 nt, synthetic construct
  source 1..22: mol_type = other RNA
gaacagtcattgtccctgcagt

SEQ ID NO: 28135 - RNA, 22 nt, synthetic construct
  source 1..22: mol_type = other RNA
gaaccaaccatgttgagggcaa

SEQ ID NO: 28136 - RNA, 22 nt, synthetic construct
  source 1..22: mol_type = other RNA
gaaccacaaagctagcgtctgg

SEQ ID NO: 28137 - RNA, 22 nt, synthetic construct
  source 1..22: mol_type = other RNA
gaacctctggctacaaagctcc

SEQ ID NO: 28138 - RNA, 22 nt, synthetic construct
  source 1..22: mol_type = other RNA
gaacctgaacagaattcttcac

SEQ ID NO: 28139 - RNA, 22 nt, synthetic construct
  source 1..22: mol_type = other RNA
gaacctggatgcaagccacatg

SEQ ID NO: 28140 - RNA, 22 nt, synthetic construct
  source 1..22: mol_type = other RNA
gaacctgtggaagaggaggagg

SEQ ID NO: 28141 - RNA, 22 nt, synthetic construct
  source 1..22: mol_type = other RNA
gaaccttctctctctgggctcc

SEQ ID NO: 28142 - RNA, 22 nt, synthetic construct
  source 1..22: mol_type = other RNA
gaacggtatttaaaacaaaatg

SEQ ID NO: 28143 - RNA, 22 nt, synthetic construct
  source 1..22: mol_type = other RNA
gaactcacagattctttcttat

SEQ ID NO: 28144 - RNA, 22 nt, synthetic construct
  source 1..22: mol_type = other RNA
gaactcctggaaaaaacactgt

SEQ ID NO: 28145 - RNA, 22 nt, synthetic construct
  source 1..22: mol_type = other RNA
gaactcgcttgattttgaatac

SEQ ID NO: 28146 - RNA, 22 nt, synthetic construct
  source 1..22: mol_type = other RNA
gaactctgggatggttgtgttt

SEQ ID NO: 28147 - RNA, 22 nt, synthetic construct
  source 1..22: mol_type = other RNA
gaactgaagcttgttgtgactt

SEQ ID NO: 28148 - RNA, 22 nt, synthetic construct
  source 1..22: mol_type = other RNA
gaactggagatgttggtccact

SEQ ID NO: 28149 - RNA, 22 nt, synthetic construct
  source 1..22: mol_type = other RNA
gaacttgatagccacaccccag

SEQ ID NO: 28150 - RNA, 22 nt, synthetic construct
  source 1..22: mol_type = other RNA
gaactttttgcaggaaacaaga

SEQ ID NO: 28151 - RNA, 22 nt, synthetic construct
  source 1..22: mol_type = other RNA
gaagaacaccaccactacccca

SEQ ID NO: 28152 - RNA, 22 nt, synthetic construct
  source 1..22: mol_type = other RNA
gaagaagatcttgctttgggat

SEQ ID NO: 28153 - RNA, 22 nt, synthetic construct
  source 1..22: mol_type = other RNA
gaagaagttgtttgctgctcta

SEQ ID NO: 28154 - RNA, 22 nt, synthetic construct
  source 1..22: mol_type = other RNA
gaagaatgttttcatggtgaaa

SEQ ID NO: 28155 - RNA, 22 nt, synthetic construct
  source 1..22: mol_type = other RNA
gaagaattctgttcaggttcca

SEQ ID NO: 28156 - RNA, 22 nt, synthetic construct
  source 1..22: mol_type = other RNA
gaagaattgatggcagtgatgc

SEQ ID NO: 28157 - RNA, 22 nt, synthetic construct
  source 1..22: mol_type = other RNA
gaagaggaggagggggagaaag

SEQ ID NO: 28158 - RNA, 22 nt, synthetic construct
  source 1..22: mol_type = other RNA
gaagaggcagaaactgtagcac

SEQ ID NO: 28159 - RNA, 22 nt, synthetic construct
  source 1..22: mol_type = other RNA
gaagatcttgctttgggatcac

SEQ ID NO: 28160 - RNA, 22 nt, synthetic construct
  source 1..22: mol_type = other RNA
gaagcaagaacagcagcaaaca

SEQ ID NO: 28161 - RNA, 22 nt, synthetic construct
  source 1..22: mol_type = other RNA
gaagcaagcctgatggaacagg

SEQ ID NO: 28162 - RNA, 22 nt, synthetic construct
  source 1..22: mol_type = other RNA
gaagcaagtaaaagttgaaatg

SEQ ID NO: 28163 - RNA, 22 nt, synthetic construct
  source 1..22: mol_type = other RNA
gaagcaattgtgatggtggtgg

SEQ ID NO: 28164 - RNA, 22 nt, synthetic construct
  source 1..22: mol_type = other RNA
gaagcagctgttcttttggttg

SEQ ID NO: 28165 - RNA, 22 nt, synthetic construct
  source 1..22: mol_type = other RNA
gaagcagtttcacgccaagtcg

SEQ ID NO: 28166 - RNA, 22 nt, synthetic construct
  source 1..22: mol_type = other RNA
gaagccagaatagtcgtgtgag

SEQ ID NO: 28167 - RNA, 22 nt, synthetic construct
  source 1..22: mol_type = other RNA
gaagcccactgcctgagagagc

SEQ ID NO: 28168 - RNA, 22 nt, synthetic construct
  source 1..22: mol_type = other RNA
gaagcctgttgattcaagtgct

SEQ ID NO: 28169 - RNA, 22 nt, synthetic construct
  source 1..22: mol_type = other RNA
gaagctctggattttcaggccc

SEQ ID NO: 28170 - RNA, 22 nt, synthetic construct
  source 1..22: mol_type = other RNA
gaagctgaggaacctgtggaag

SEQ ID NO: 28171 - RNA, 22 nt, synthetic construct
  source 1..22: mol_type = other RNA
gaagcttgttgtgacttctgct

SEQ ID NO: 28172 - RNA, 22 nt, synthetic construct
  source 1..22: mol_type = other RNA
gaaggaaaaagcactctgaatg

SEQ ID NO: 28173 - RNA, 22 nt, synthetic construct
  source 1..22: mol_type = other RNA
gaaggaagctgaggaacctgtg

SEQ ID NO: 28174 - RNA, 22 nt, synthetic construct
  source 1..22: mol_type = other RNA
gaaggacactcaaaagcatgct

SEQ ID NO: 28175 - RNA, 22 nt, synthetic construct
  source 1..22: mol_type = other RNA
gaaggagcccagagagagaagg

SEQ ID NO: 28176 - RNA, 22 nt, synthetic construct
  source 1..22: mol_type = other RNA
gaaggatcattctttggccaga

SEQ ID NO: 28177 - RNA, 22 nt, synthetic construct
  source 1..22: mol_type = other RNA
gaaggcccctcgttttcaccaa

SEQ ID NO: 28178 - RNA, 22 nt, synthetic construct
  source 1..22: mol_type = other RNA
gaagggaagccagaatagtcgt

SEQ ID NO: 28179 - RNA, 22 nt, synthetic construct
  source 1..22: mol_type = other RNA
gaagggctgcatacatgtgtag

SEQ ID NO: 28180 - RNA, 22 nt, synthetic construct
  source 1..22: mol_type = other RNA
gaagggtcgagacaaggagcaa

SEQ ID NO: 28181 - RNA, 22 nt, synthetic construct
  source 1..22: mol_type = other RNA
gaaggtgactctataaaattat

SEQ ID NO: 28182 - RNA, 22 nt, synthetic construct
  source 1..22: mol_type = other RNA
gaaggtggtgcctcaggtttac

SEQ ID NO: 28183 - RNA, 22 nt, synthetic construct
  source 1..22: mol_type = other RNA
gaaggttcactaactgtgcgtt

SEQ ID NO: 28184 - RNA, 22 nt, synthetic construct
  source 1..22: mol_type = other RNA
gaagtaaatggagacaccaagt

SEQ ID NO: 28185 - RNA, 22 nt, synthetic construct
  source 1..22: mol_type = other RNA
gaagtaagcaccattcatttca

SEQ ID NO: 28186 - RNA, 22 nt, synthetic construct
  source 1..22: mol_type = other RNA
gaagtacagaatataaatcgta

SEQ ID NO: 28187 - RNA, 22 nt, synthetic construct
  source 1..22: mol_type = other RNA
gaagtcacaacaagcttcagtt

SEQ ID NO: 28188 - RNA, 22 nt, synthetic construct
  source 1..22: mol_type = other RNA
gaagtcacactcagacccctcc

SEQ ID NO: 28189 - RNA, 22 nt, synthetic construct
  source 1..22: mol_type = other RNA
gaagtgaaaatagagggtaaac

SEQ ID NO: 28190 - RNA, 22 nt, synthetic construct
  source 1..22: mol_type = other RNA
gaagtgcacctggtgtgagggt

SEQ ID NO: 28191 - RNA, 22 nt, synthetic construct
  source 1..22: mol_type = other RNA
gaagttacgtctttctccatta

SEQ ID NO: 28192 - RNA, 22 nt, synthetic construct
  source 1..22: mol_type = other RNA
gaagttgtttgctgctctaaag

SEQ ID NO: 28193 - RNA, 22 nt, synthetic construct
  source 1..22: mol_type = other RNA
gaataaaacgcacagttagtga

SEQ ID NO: 28194 - RNA, 22 nt, synthetic construct
  source 1..22: mol_type = other RNA
gaataaagaacagactacacat

SEQ ID NO: 28195 - RNA, 22 nt, synthetic construct
  source 1..22: mol_type = other RNA
gaataaagaggaaatactccag

SEQ ID NO: 28196 - RNA, 22 nt, synthetic construct
  source 1..22: mol_type = other RNA
gaataattgtgtgaacaggaat

SEQ ID NO: 28197 - RNA, 22 nt, synthetic construct
  source 1..22: mol_type = other RNA
gaataccctctactttcttgtg

SEQ ID NO: 28198 - RNA, 22 nt, synthetic construct
  source 1..22: mol_type = other RNA
gaataccctgtatgaagggaag

SEQ ID NO: 28199 - RNA, 22 nt, synthetic construct
  source 1..22: mol_type = other RNA
gaatactgattttcaccatgaa

SEQ ID NO: 28200 - RNA, 22 nt, synthetic construct
  source 1..22: mol_type = other RNA
gaatagtcgtgtgagtcctgac

SEQ ID NO: 28201 - RNA, 22 nt, synthetic construct
  source 1..22: mol_type = other RNA
gaatataaatcgtagaaattcc

SEQ ID NO: 28202 - RNA, 22 nt, synthetic construct
  source 1..22: mol_type = other RNA
gaatcaacaggcttcagagact

SEQ ID NO: 28203 - RNA, 22 nt, synthetic construct
  source 1..22: mol_type = other RNA
gaatcaagggcagtcccaaggt

SEQ ID NO: 28204 - RNA, 22 nt, synthetic construct
  source 1..22: mol_type = other RNA
gaatccacctgcaagctgtgat

SEQ ID NO: 28205 - RNA, 22 nt, synthetic construct
  source 1..22: mol_type = other RNA
gaatcccatctaaaacgtaatg

SEQ ID NO: 28206 - RNA, 22 nt, synthetic construct
  source 1..22: mol_type = other RNA
gaatccttagtgaacactgagc

SEQ ID NO: 28207 - RNA, 22 nt, synthetic construct
  source 1..22: mol_type = other RNA
gaatctcttgctctttgtttct

SEQ ID NO: 28208 - RNA, 22 nt, synthetic construct
  source 1..22: mol_type = other RNA
gaatctgaagctctggattttc

SEQ ID NO: 28209 - RNA, 22 nt, synthetic construct
  source 1..22: mol_type = other RNA
gaatctgctctttgttgaaaat

SEQ ID NO: 28210 - RNA, 22 nt, synthetic construct
  source 1..22: mol_type = other RNA
gaatctgtgagttctgtagccc

SEQ ID NO: 28211 - RNA, 22 nt, synthetic construct
  source 1..22: mol_type = other RNA
gaatgacatacagactgcaggg

SEQ ID NO: 28212 - RNA, 22 nt, synthetic construct
  source 1..22: mol_type = other RNA
gaatgagcaggaggggaaaagt

SEQ ID NO: 28213 - RNA, 22 nt, synthetic construct
  source 1..22: mol_type = other RNA
gaatgatccttctctttgctga

SEQ ID NO: 28214 - RNA, 22 nt, synthetic construct
  source 1..22: mol_type = other RNA
gaatggaagcccactgcctgag

SEQ ID NO: 28215 - RNA, 22 nt, synthetic construct
  source 1..22: mol_type = other RNA
gaatggacttagtctgttgccc

SEQ ID NO: 28216 - RNA, 22 nt, synthetic construct
  source 1..22: mol_type = other RNA
gaatggtgcttacttcaagcaa

SEQ ID NO: 28217 - RNA, 22 nt, synthetic construct
  source 1..22: mol_type = other RNA
gaatggtggagttttagaagaa

SEQ ID NO: 28218 - RNA, 22 nt, synthetic construct
  source 1..22: mol_type = other RNA
gaatgttttcatggtgaaaatc

SEQ ID NO: 28219 - RNA, 22 nt, synthetic construct
  source 1..22: mol_type = other RNA
gaattctgttcaggttccagca

SEQ ID NO: 28220 - RNA, 22 nt, synthetic construct
  source 1..22: mol_type = other RNA
gaattcttcaccagacgctagc

SEQ ID NO: 28221 - RNA, 22 nt, synthetic construct
  source 1..22: mol_type = other RNA
gaattgaaggcccctcgttttc

SEQ ID NO: 28222 - RNA, 22 nt, synthetic construct
  source 1..22: mol_type = other RNA
gaattgatctgccctgaggtat

SEQ ID NO: 28223 - RNA, 22 nt, synthetic construct
  source 1..22: mol_type = other RNA
gaattgatggcagtgatgcctc

SEQ ID NO: 28224 - RNA, 22 nt, synthetic construct
  source 1..22: mol_type = other RNA
gaatttccagtgtattgtttgg

SEQ ID NO: 28225 - RNA, 22 nt, synthetic construct
  source 1..22: mol_type = other RNA
gacaaaccactgctgcagaact

SEQ ID NO: 28226 - RNA, 22 nt, synthetic construct
  source 1..22: mol_type = other RNA
gacaactcattagtagcctgac

SEQ ID NO: 28227 - RNA, 22 nt, synthetic construct
  source 1..22: mol_type = other RNA
gacaactgccagcagttgatga

SEQ ID NO: 28228 - RNA, 22 nt, synthetic construct
  source 1..22: mol_type = other RNA
gacaagaacattgtattactta

SEQ ID NO: 28229 - RNA, 22 nt, synthetic construct
  source 1..22: mol_type = other RNA
gacaaggagcaaacacgagatc

SEQ ID NO: 28230 - RNA, 22 nt, synthetic construct
  source 1..22: mol_type = other RNA
gacaatgactgttccattgtgt

SEQ ID NO: 28231 - RNA, 22 nt, synthetic construct
  source 1..22: mol_type = other RNA
gacaccaaccaaaagaacagct

SEQ ID NO: 28232 - RNA, 22 nt, synthetic construct
  source 1..22: mol_type = other RNA
gacaccaagtggcactctttca

SEQ ID NO: 28233 - RNA, 22 nt, synthetic construct
  source 1..22: mol_type = other RNA
gacactcaaaagcatgctgctc

SEQ ID NO: 28234 - RNA, 22 nt, synthetic construct
  source 1..22: mol_type = other RNA
gacagaacctctggctacaaag

SEQ ID NO: 28235 - RNA, 22 nt, synthetic construct
  source 1..22: mol_type = other RNA
gacaggtgtatccaataaattt

SEQ ID NO: 28236 - RNA, 22 nt, synthetic construct
  source 1..22: mol_type = other RNA
gacagtgttttttccaggagtt

SEQ ID NO: 28237 - RNA, 22 nt, synthetic construct
  source 1..22: mol_type = other RNA
gacataagtttttcagtttggg

SEQ ID NO: 28238 - RNA, 22 nt, synthetic construct
  source 1..22: mol_type = other RNA
gacatacagactgcagggacaa

SEQ ID NO: 28239 - RNA, 22 nt, synthetic construct
  source 1..22: mol_type = other RNA
gacatatcttggtttctatttt

SEQ ID NO: 28240 - RNA, 22 nt, synthetic construct
  source 1..22: mol_type = other RNA
gacattatgagtctcgaactcg

SEQ ID NO: 28241 - RNA, 22 nt, synthetic construct
  source 1..22: mol_type = other RNA
gacattggtcttgttttctcag

SEQ ID NO: 28242 - RNA, 22 nt, synthetic construct
  source 1..22: mol_type = other RNA
gacatttcaacttttacttgct

SEQ ID NO: 28243 - RNA, 22 nt, synthetic construct
  source 1..22: mol_type = other RNA
gacatttggttgactgctttca

SEQ ID NO: 28244 - RNA, 22 nt, synthetic construct
  source 1..22: mol_type = other RNA
gaccaaaaggctaatggagaaa

SEQ ID NO: 28245 - RNA, 22 nt, synthetic construct
  source 1..22: mol_type = other RNA
gaccaacatctccagttccaaa

SEQ ID NO: 28246 - RNA, 22 nt, synthetic construct
  source 1..22: mol_type = other RNA
gaccaatgtcagaacacctcaa

SEQ ID NO: 28247 - RNA, 22 nt, synthetic construct
  source 1..22: mol_type = other RNA
gaccagacatatcttggtttct

SEQ ID NO: 28248 - RNA, 22 nt, synthetic construct
  source 1..22: mol_type = other RNA
gaccagggaggaagtcacactc

SEQ ID NO: 28249 - RNA, 22 nt, synthetic construct
  source 1..22: mol_type = other RNA
gaccataaggctcttactctca

SEQ ID NO: 28250 - RNA, 22 nt, synthetic construct
  source 1..22: mol_type = other RNA
gaccatgaaatcaagtgcatgc

SEQ ID NO: 28251 - RNA, 22 nt, synthetic construct
  source 1..22: mol_type = other RNA
gaccatggagcagcatctgaag

SEQ ID NO: 28252 - RNA, 22 nt, synthetic construct
  source 1..22: mol_type = other RNA
gaccatttaccaaaagctcatg

SEQ ID NO: 28253 - RNA, 22 nt, synthetic construct
  source 1..22: mol_type = other RNA
gacccaaaacttgcatcacatg

SEQ ID NO: 28254 - RNA, 22 nt, synthetic construct
  source 1..22: mol_type = other RNA
gacccctccccagaaggacact

SEQ ID NO: 28255 - RNA, 22 nt, synthetic construct
  source 1..22: mol_type = other RNA
gacccttcagaatctcttgctc

SEQ ID NO: 28256 - RNA, 22 nt, synthetic construct
  source 1..22: mol_type = other RNA
gacctccaaacaatacactgga

SEQ ID NO: 28257 - RNA, 22 nt, synthetic construct
  source 1..22: mol_type = other RNA
gacctctaactctgagctgcct

SEQ ID NO: 28258 - RNA, 22 nt, synthetic construct
  source 1..22: mol_type = other RNA
gacgctagctttgtggttccct

SEQ ID NO: 28259 - RNA, 22 nt, synthetic construct
  source 1..22: mol_type = other RNA
gacgtaacttcggggtaagcca

SEQ ID NO: 28260 - RNA, 22 nt, synthetic construct
  source 1..22: mol_type = other RNA
gactaaagtggaagaatgtttt

SEQ ID NO: 28261 - RNA, 22 nt, synthetic construct
  source 1..22: mol_type = other RNA
gactaagtccattcctgatacc

SEQ ID NO: 28262 - RNA, 22 nt, synthetic construct
  source 1..22: mol_type = other RNA
gactacacatcctgaacttttt

SEQ ID NO: 28263 - RNA, 22 nt, synthetic construct
  source 1..22: mol_type = other RNA
gactagacaaaccactgctgca

SEQ ID NO: 28264 - RNA, 22 nt, synthetic construct
  source 1..22: mol_type = other RNA
gactataaggggaatttctacg

SEQ ID NO: 28265 - RNA, 22 nt, synthetic construct
  source 1..22: mol_type = other RNA
gactatggcaagactcagtttg

SEQ ID NO: 28266 - RNA, 22 nt, synthetic construct
  source 1..22: mol_type = other RNA
gactattctggcttcccttcat

SEQ ID NO: 28267 - RNA, 22 nt, synthetic construct
  source 1..22: mol_type = other RNA
gactcaatatgatttcccatct

SEQ ID NO: 28268 - RNA, 22 nt, synthetic construct
  source 1..22: mol_type = other RNA
gactcacacgactattctggct

SEQ ID NO: 28269 - RNA, 22 nt, synthetic construct
  source 1..22: mol_type = other RNA
gactcagtttggggttgctgtg

SEQ ID NO: 28270 - RNA, 22 nt, synthetic construct
  source 1..22: mol_type = other RNA
gactcataatgtccaaatggga

SEQ ID NO: 28271 - RNA, 22 nt, synthetic construct
  source 1..22: mol_type = other RNA
gactctgggaaggtggtgcctc

SEQ ID NO: 28272 - RNA, 22 nt, synthetic construct
  source 1..22: mol_type = other RNA
gactgagccattttcaaactca

SEQ ID NO: 28273 - RNA, 22 nt, synthetic construct
  source 1..22: mol_type = other RNA
gactgcacatgagcttttggta

SEQ ID NO: 28274 - RNA, 22 nt, synthetic construct
  source 1..22: mol_type = other RNA
gactgcagggacaatgactgtt

SEQ ID NO: 28275 - RNA, 22 nt, synthetic construct
  source 1..22: mol_type = other RNA
gactgcccttgattcatttcaa

SEQ ID NO: 28276 - RNA, 22 nt, synthetic construct
  source 1..22: mol_type = other RNA
gactgctttcacctggatttct

SEQ ID NO: 28277 - RNA, 22 nt, synthetic construct
  source 1..22: mol_type = other RNA
gactggaggaagtacagaatat

SEQ ID NO: 28278 - RNA, 22 nt, synthetic construct
  source 1..22: mol_type = other RNA
gactggccctgacatttcaact

SEQ ID NO: 28279 - RNA, 22 nt, synthetic construct
  source 1..22: mol_type = other RNA
gactgttaatggcatttatgtg

SEQ ID NO: 28280 - RNA, 22 nt, synthetic construct
  source 1..22: mol_type = other RNA
gactgttccattgtgttctgag

SEQ ID NO: 28281 - RNA, 22 nt, synthetic construct
  source 1..22: mol_type = other RNA
gacttagtctgttgccctcaac

SEQ ID NO: 28282 - RNA, 22 nt, synthetic construct
  source 1..22: mol_type = other RNA
gacttcctccctggtcaggcac

SEQ ID NO: 28283 - RNA, 22 nt, synthetic construct
  source 1..22: mol_type = other RNA
gacttctgctcctgttcttgaa

SEQ ID NO: 28284 - RNA, 22 nt, synthetic construct
  source 1..22: mol_type = other RNA
gacttggcgtgaaactgcttca

SEQ ID NO: 28285 - RNA, 22 nt, synthetic construct
  source 1..22: mol_type = other RNA
gacttgtgctccagctgtgttg

SEQ ID NO: 28286 - RNA, 22 nt, synthetic construct
  source 1..22: mol_type = other RNA
gactttacacaagaaagtagag

SEQ ID NO: 28287 - RNA, 22 nt, synthetic construct
  source 1..22: mol_type = other RNA
gacttttcctcacccccaaagc

SEQ ID NO: 28288 - RNA, 22 nt, synthetic construct
  source 1..22: mol_type = other RNA
gagaaaacaagaccaatgtcag

SEQ ID NO: 28289 - RNA, 22 nt, synthetic construct
  source 1..22: mol_type = other RNA
gagaaacaaagagcaagagatt

SEQ ID NO: 28290 - RNA, 22 nt, synthetic construct
  source 1..22: mol_type = other RNA
gagaaagaagcaattgtgatgg

SEQ ID NO: 28291 - RNA, 22 nt, synthetic construct
  source 1..22: mol_type = other RNA
gagaaagacgtaacttcggggt

SEQ ID NO: 28292 - RNA, 22 nt, synthetic construct
  source 1..22: mol_type = other RNA
gagaacagaagcagctgttctt

SEQ ID NO: 28293 - RNA, 22 nt, synthetic construct
  source 1..22: mol_type = other RNA
gagaaggatcattctttggcca

SEQ ID NO: 28294 - RNA, 22 nt, synthetic construct
  source 1..22: mol_type = other RNA
gagaagggctgcatacatgtgt

SEQ ID NO: 28295 - RNA, 22 nt, synthetic construct
  source 1..22: mol_type = other RNA
gagaaggttcactaactgtgcg

SEQ ID NO: 28296 - RNA, 22 nt, synthetic construct
  source 1..22: mol_type = other RNA
gagaagtgcacctggtgtgagg

SEQ ID NO: 28297 - RNA, 22 nt, synthetic construct
  source 1..22: mol_type = other RNA
gagaataaagaacagactacac

SEQ ID NO: 28298 - RNA, 22 nt, synthetic construct
  source 1..22: mol_type = other RNA
gagaatccacctgcaagctgtg

SEQ ID NO: 28299 - RNA, 22 nt, synthetic construct
  source 1..22: mol_type = other RNA
gagacaaggagcaaacacgaga

SEQ ID NO: 28300 - RNA, 22 nt, synthetic construct
  source 1..22: mol_type = other RNA
gagacaccaagtggcactcttt

SEQ ID NO: 28301 - RNA, 22 nt, synthetic construct
  source 1..22: mol_type = other RNA
gagacagtgttttttccaggag

SEQ ID NO: 28302 - RNA, 22 nt, synthetic construct
  source 1..22: mol_type = other RNA
gagacatttggttgactgcttt

SEQ ID NO: 28303 - RNA, 22 nt, synthetic construct
  source 1..22: mol_type = other RNA
gagaccatggagcagcatctga

SEQ ID NO: 28304 - RNA, 22 nt, synthetic construct
  source 1..22: mol_type = other RNA
gagactcataatgtccaaatgg

SEQ ID NO: 28305 - RNA, 22 nt, synthetic construct
  source 1..22: mol_type = other RNA
gagactgagccattttcaaact

SEQ ID NO: 28306 - RNA, 22 nt, synthetic construct
  source 1..22: mol_type = other RNA
gagagaaggttcactaactgtg

SEQ ID NO: 28307 - RNA, 22 nt, synthetic construct
  source 1..22: mol_type = other RNA
gagagagaaggttcactaactg

SEQ ID NO: 28308 - RNA, 22 nt, synthetic construct
  source 1..22: mol_type = other RNA
gagagagctcatccagaagtaa

SEQ ID NO: 28309 - RNA, 22 nt, synthetic construct
  source 1..22: mol_type = other RNA
gagagattgggttgatactgaa

SEQ ID NO: 28310 - RNA, 22 nt, synthetic construct
  source 1..22: mol_type = other RNA
gagagctacaggacaactgcca

SEQ ID NO: 28311 - RNA, 22 nt, synthetic construct
  source 1..22: mol_type = other RNA
gagagctcatccagaagtaaat

SEQ ID NO: 28312 - RNA, 22 nt, synthetic construct
  source 1..22: mol_type = other RNA
gagagtaagagccttatggtca

SEQ ID NO: 28313 - RNA, 22 nt, synthetic construct
  source 1..22: mol_type = other RNA
gagatatgcccatctcctgcag

SEQ ID NO: 28314 - RNA, 22 nt, synthetic construct
  source 1..22: mol_type = other RNA
gagatcactcacccatcgcata

SEQ ID NO: 28315 - RNA, 22 nt, synthetic construct
  source 1..22: mol_type = other RNA
gagatcttgtgcccccaacaca

SEQ ID NO: 28316 - RNA, 22 nt, synthetic construct
  source 1..22: mol_type = other RNA
gagatgccaccttagagcagca

SEQ ID NO: 28317 - RNA, 22 nt, synthetic construct
  source 1..22: mol_type = other RNA
gagatgggcatatctcaaaaac

SEQ ID NO: 28318 - RNA, 22 nt, synthetic construct
  source 1..22: mol_type = other RNA
gagatgtgaactctgggatggt

SEQ ID NO: 28319 - RNA, 22 nt, synthetic construct
  source 1..22: mol_type = other RNA
gagatgtggttttctgcaccgc

SEQ ID NO: 28320 - RNA, 22 nt, synthetic construct
  source 1..22: mol_type = other RNA
gagatgttggtccactgtacct

SEQ ID NO: 28321 - RNA, 22 nt, synthetic construct
  source 1..22: mol_type = other RNA
gagattctgaagggtcgagaca

SEQ ID NO: 28322 - RNA, 22 nt, synthetic construct
  source 1..22: mol_type = other RNA
gagattgggttgatactgaaga

SEQ ID NO: 28323 - RNA, 22 nt, synthetic construct
  source 1..22: mol_type = other RNA
gagcaaacacgagatcttgtgc

SEQ ID NO: 28324 - RNA, 22 nt, synthetic construct
  source 1..22: mol_type = other RNA
gagcaagagattctgaagggtc

SEQ ID NO: 28325 - RNA, 22 nt, synthetic construct
  source 1..22: mol_type = other RNA
gagcaagttgcgcagcttgttg

SEQ ID NO: 28326 - RNA, 22 nt, synthetic construct
  source 1..22: mol_type = other RNA
gagcacaagtcacaaatgtacc

SEQ ID NO: 28327 - RNA, 22 nt, synthetic construct
  source 1..22: mol_type = other RNA
gagcagaagtcacaacaagctt

SEQ ID NO: 28328 - RNA, 22 nt, synthetic construct
  source 1..22: mol_type = other RNA
gagcagattcccaaactgaaaa

SEQ ID NO: 28329 - RNA, 22 nt, synthetic construct
  source 1..22: mol_type = other RNA
gagcagcaaacaacttcttcag

SEQ ID NO: 28330 - RNA, 22 nt, synthetic construct
  source 1..22: mol_type = other RNA
gagcagcatctgaagcagtttc

SEQ ID NO: 28331 - RNA, 22 nt, synthetic construct
  source 1..22: mol_type = other RNA
gagcagcatgcttttgagtgtc

SEQ ID NO: 28332 - RNA, 22 nt, synthetic construct
  source 1..22: mol_type = other RNA
gagcaggaggggaaaagtgcta

SEQ ID NO: 28333 - RNA, 22 nt, synthetic construct
  source 1..22: mol_type = other RNA
gagcatcattgagaccatggag

SEQ ID NO: 28334 - RNA, 22 nt, synthetic construct
  source 1..22: mol_type = other RNA
gagccattttcaaactcacacc

SEQ ID NO: 28335 - RNA, 22 nt, synthetic construct
  source 1..22: mol_type = other RNA
gagcccagagagagaaggttca

SEQ ID NO: 28336 - RNA, 22 nt, synthetic construct
  source 1..22: mol_type = other RNA
gagccccccaggcatgttggaa

SEQ ID NO: 28337 - RNA, 22 nt, synthetic construct
  source 1..22: mol_type = other RNA
gagccttatggtcaaataacga

SEQ ID NO: 28338 - RNA, 22 nt, synthetic construct
  source 1..22: mol_type = other RNA
gagctacaggacaactgccagc

SEQ ID NO: 28339 - RNA, 22 nt, synthetic construct
  source 1..22: mol_type = other RNA
gagctcatccagaagtaaatgg

SEQ ID NO: 28340 - RNA, 22 nt, synthetic construct
  source 1..22: mol_type = other RNA
gagctctctcaggcagtgggct

SEQ ID NO: 28341 - RNA, 22 nt, synthetic construct
  source 1..22: mol_type = other RNA
gagctgccaccaggagcttgca

SEQ ID NO: 28342 - RNA, 22 nt, synthetic construct
  source 1..22: mol_type = other RNA
gagctgcctccaaagccagctg

SEQ ID NO: 28343 - RNA, 22 nt, synthetic construct
  source 1..22: mol_type = other RNA
gagcttcagattctgaatgagc

SEQ ID NO: 28344 - RNA, 22 nt, synthetic construct
  source 1..22: mol_type = other RNA
gagcttgcaaattgctgctgga

SEQ ID NO: 28345 - RNA, 22 nt, synthetic construct
  source 1..22: mol_type = other RNA
gagctttgcttgaagtaagcac

SEQ ID NO: 28346 - RNA, 22 nt, synthetic construct
  source 1..22: mol_type = other RNA
gagctttgtagccagaggttct

SEQ ID NO: 28347 - RNA, 22 nt, synthetic construct
  source 1..22: mol_type = other RNA
gagcttttggtaaatggtctgt

SEQ ID NO: 28348 - RNA, 22 nt, synthetic construct
  source 1..22: mol_type = other RNA
gaggaaaagtctggagtatttc

SEQ ID NO: 28349 - RNA, 22 nt, synthetic construct
  source 1..22: mol_type = other RNA
gaggaaatactccagacttttc

SEQ ID NO: 28350 - RNA, 22 nt, synthetic construct
  source 1..22: mol_type = other RNA
gaggaacctgtggaagaggagg

SEQ ID NO: 28351 - RNA, 22 nt, synthetic construct
  source 1..22: mol_type = other RNA
gaggaagtacagaatataaatc

SEQ ID NO: 28352 - RNA, 22 nt, synthetic construct
  source 1..22: mol_type = other RNA
gaggaagtcacactcagacccc

SEQ ID NO: 28353 - RNA, 22 nt, synthetic construct
  source 1..22: mol_type = other RNA
gaggaataaaacgcacagttag

SEQ ID NO: 28354 - RNA, 22 nt, synthetic construct
  source 1..22: mol_type = other RNA
gaggaggagggggagaaagaag

SEQ ID NO: 28355 - RNA, 22 nt, synthetic construct
  source 1..22: mol_type = other RNA
gaggagggggagaaagaagcaa

SEQ ID NO: 28356 - RNA, 22 nt, synthetic construct
  source 1..22: mol_type = other RNA
gaggcaccaccttcccagagtc

SEQ ID NO: 28357 - RNA, 22 nt, synthetic construct
  source 1..22: mol_type = other RNA
gaggcagaaactgtagcaccat

SEQ ID NO: 28358 - RNA, 22 nt, synthetic construct
  source 1..22: mol_type = other RNA
gaggcagctcagagttagaggt

SEQ ID NO: 28359 - RNA, 22 nt, synthetic construct
  source 1..22: mol_type = other RNA
gaggcatcactgccatcaattc

SEQ ID NO: 28360 - RNA, 22 nt, synthetic construct
  source 1..22: mol_type = other RNA
gaggcctgtgatgctgatgatg

SEQ ID NO: 28361 - RNA, 22 nt, synthetic construct
  source 1..22: mol_type = other RNA
gaggcctttcagaaagcatcgg

SEQ ID NO: 28362 - RNA, 22 nt, synthetic construct
  source 1..22: mol_type = other RNA
gaggcttatgttgcaaaaggtg

SEQ ID NO: 28363 - RNA, 22 nt, synthetic construct
  source 1..22: mol_type = other RNA
gagggagatgtgaactctggga

SEQ ID NO: 28364 - RNA, 22 nt, synthetic construct
  source 1..22: mol_type = other RNA
gagggcaacagactaagtccat

SEQ ID NO: 28365 - RNA, 22 nt, synthetic construct
  source 1..22: mol_type = other RNA
gagggcagccttgtggatggcc

SEQ ID NO: 28366 - RNA, 22 nt, synthetic construct
  source 1..22: mol_type = other RNA
gaggggaaaagtgctaattacc

SEQ ID NO: 28367 - RNA, 22 nt, synthetic construct
  source 1..22: mol_type = other RNA
gaggggccttcaattcaatcca

SEQ ID NO: 28368 - RNA, 22 nt, synthetic construct
  source 1..22: mol_type = other RNA
gagggggagaaagaagcaattg

SEQ ID NO: 28369 - RNA, 22 nt, synthetic construct
  source 1..22: mol_type = other RNA
gaggggtctgagtgtgacttcc

SEQ ID NO: 28370 - RNA, 22 nt, synthetic construct
  source 1..22: mol_type = other RNA
gagggtaaacctgaggcaccac

SEQ ID NO: 28371 - RNA, 22 nt, synthetic construct
  source 1..22: mol_type = other RNA
gagggtattccaagtgtttgca

SEQ ID NO: 28372 - RNA, 22 nt, synthetic construct
  source 1..22: mol_type = other RNA
gagggtttttggaactggagat

SEQ ID NO: 28373 - RNA, 22 nt, synthetic construct
  source 1..22: mol_type = other RNA
gaggtatgcgatgggtgagtga

SEQ ID NO: 28374 - RNA, 22 nt, synthetic construct
  source 1..22: mol_type = other RNA
gaggtcatttgattggagagat

SEQ ID NO: 28375 - RNA, 22 nt, synthetic construct
  source 1..22: mol_type = other RNA
gaggtctgtgcggaattgatct

SEQ ID NO: 28376 - RNA, 22 nt, synthetic construct
  source 1..22: mol_type = other RNA
gaggtgatggtatcaggaatgg

SEQ ID NO: 28377 - RNA, 22 nt, synthetic construct
  source 1..22: mol_type = other RNA
gaggtgttctgacattggtctt

SEQ ID NO: 28378 - RNA, 22 nt, synthetic construct
  source 1..22: mol_type = other RNA
gaggttctgtctggcaaatggg

SEQ ID NO: 28379 - RNA, 22 nt, synthetic construct
  source 1..22: mol_type = other RNA
gagtaagagccttatggtcaaa

SEQ ID NO: 28380 - RNA, 22 nt, synthetic construct
  source 1..22: mol_type = other RNA
gagtatctagtaatttggaagg

SEQ ID NO: 28381 - RNA, 22 nt, synthetic construct
  source 1..22: mol_type = other RNA
gagtatttcctctttattcttt

SEQ ID NO: 28382 - RNA, 22 nt, synthetic construct
  source 1..22: mol_type = other RNA
gagtcaccttccaaattactag

SEQ ID NO: 28383 - RNA, 22 nt, synthetic construct
  source 1..22: mol_type = other RNA
gagtcctaatccatctacacat

SEQ ID NO: 28384 - RNA, 22 nt, synthetic construct
  source 1..22: mol_type = other RNA
gagtcctgactttacacaagaa

SEQ ID NO: 28385 - RNA, 22 nt, synthetic construct
  source 1..22: mol_type = other RNA
gagtctcgaactcgcttgattt

SEQ ID NO: 28386 - RNA, 22 nt, synthetic construct
  source 1..22: mol_type = other RNA
gagtcttgacaggtgtatccaa

SEQ ID NO: 28387 - RNA, 22 nt, synthetic construct
  source 1..22: mol_type = other RNA
gagtcttgccatagtcagatgc

SEQ ID NO: 28388 - RNA, 22 nt, synthetic construct
  source 1..22: mol_type = other RNA
gagtgaggcctgtgatgctgat

SEQ ID NO: 28389 - RNA, 22 nt, synthetic construct
  source 1..22: mol_type = other RNA
gagtgataagaaagaatctgtg

SEQ ID NO: 28390 - RNA, 22 nt, synthetic construct
  source 1..22: mol_type = other RNA
gagtgatctcacaggacaactc

SEQ ID NO: 28391 - RNA, 22 nt, synthetic construct
  source 1..22: mol_type = other RNA
gagtgccacttggtgtctccat

SEQ ID NO: 28392 - RNA, 22 nt, synthetic construct
  source 1..22: mol_type = other RNA
gagtgctttttccttctgaagg

SEQ ID NO: 28393 - RNA, 22 nt, synthetic construct
  source 1..22: mol_type = other RNA
gagtgtccttctggggaggggt

SEQ ID NO: 28394 - RNA, 22 nt, synthetic construct
  source 1..22: mol_type = other RNA
gagtgtgacttcctccctggtc

SEQ ID NO: 28395 - RNA, 22 nt, synthetic construct
  source 1..22: mol_type = other RNA
gagttagaggtctgtgcggaat

SEQ ID NO: 28396 - RNA, 22 nt, synthetic construct
  source 1..22: mol_type = other RNA
gagttcacatctccctcaaaac

SEQ ID NO: 28397 - RNA, 22 nt, synthetic construct
  source 1..22: mol_type = other RNA
gagttcaccatgtgtgtgttcc

SEQ ID NO: 28398 - RNA, 22 nt, synthetic construct
  source 1..22: mol_type = other RNA
gagttcgagactcataatgtcc

SEQ ID NO: 28399 - RNA, 22 nt, synthetic construct
  source 1..22: mol_type = other RNA
gagttctgtagcccaagaaaat

SEQ ID NO: 28400 - RNA, 22 nt, synthetic construct
  source 1..22: mol_type = other RNA
gagttgtcctgtgagatcactc

SEQ ID NO: 28401 - RNA, 22 nt, synthetic construct
  source 1..22: mol_type = other RNA
gagtttgaaaatggctcagtct

SEQ ID NO: 28402 - RNA, 22 nt, synthetic construct
  source 1..22: mol_type = other RNA
gagttttagaagaacaccacca

SEQ ID NO: 28403 - RNA, 22 nt, synthetic construct
  source 1..22: mol_type = other RNA
gataagaaagaatctgtgagtt

SEQ ID NO: 28404 - RNA, 22 nt, synthetic construct
  source 1..22: mol_type = other RNA
gataatattgagacagtgtttt

SEQ ID NO: 28405 - RNA, 22 nt, synthetic construct
  source 1..22: mol_type = other RNA
gataatgccagtaaactagctg

SEQ ID NO: 28406 - RNA, 22 nt, synthetic construct
  source 1..22: mol_type = other RNA
gataatgtgcagcaaaagagca

SEQ ID NO: 28407 - RNA, 22 nt, synthetic construct
  source 1..22: mol_type = other RNA
gatacacctgtcaagactcaat

SEQ ID NO: 28408 - RNA, 22 nt, synthetic construct
  source 1..22: mol_type = other RNA
gatacataaccatgcaaatgtt

SEQ ID NO: 28409 - RNA, 22 nt, synthetic construct
  source 1..22: mol_type = other RNA
gataccatcacctcccatttgc

SEQ ID NO: 28410 - RNA, 22 nt, synthetic construct
  source 1..22: mol_type = other RNA
gatactgaagaattgatggcag

SEQ ID NO: 28411 - RNA, 22 nt, synthetic construct
  source 1..22: mol_type = other RNA
gatagaaccaaccatgttgagg

SEQ ID NO: 28412 - RNA, 22 nt, synthetic construct
  source 1..22: mol_type = other RNA
gatagccacaccccagctttag

SEQ ID NO: 28413 - RNA, 22 nt, synthetic construct
  source 1..22: mol_type = other RNA
gatagtgctgtgttgggggcac

SEQ ID NO: 28414 - RNA, 22 nt, synthetic construct
  source 1..22: mol_type = other RNA
gatatgcccatctcctgcagaa

SEQ ID NO: 28415 - RNA, 22 nt, synthetic construct
  source 1..22: mol_type = other RNA
gatatgtctggtcaacaagctg

SEQ ID NO: 28416 - RNA, 22 nt, synthetic construct
  source 1..22: mol_type = other RNA
gatcaagaaattgaaacaagac

SEQ ID NO: 28417 - RNA, 22 nt, synthetic construct
  source 1..22: mol_type = other RNA
gatcaattccgcacagacctct

SEQ ID NO: 28418 - RNA, 22 nt, synthetic construct
  source 1..22: mol_type = other RNA
gatcactcacccatcgcatacc

SEQ ID NO: 28419 - RNA, 22 nt, synthetic construct
  source 1..22: mol_type = other RNA
gatcagcaaagagaaggatcat

SEQ ID NO: 28420 - RNA, 22 nt, synthetic construct
  source 1..22: mol_type = other RNA
gatcattctttggccagactaa

SEQ ID NO: 28421 - RNA, 22 nt, synthetic construct
  source 1..22: mol_type = other RNA
gatcattgttgctttgggggtg

SEQ ID NO: 28422 - RNA, 22 nt, synthetic construct
  source 1..22: mol_type = other RNA
gatcccaaagcaagatcttctt

SEQ ID NO: 28423 - RNA, 22 nt, synthetic construct
  source 1..22: mol_type = other RNA
gatccttctctttgctgatcat

SEQ ID NO: 28424 - RNA, 22 nt, synthetic construct
  source 1..22: mol_type = other RNA
gatctcacaggacaactcatta

SEQ ID NO: 28425 - RNA, 22 nt, synthetic construct
  source 1..22: mol_type = other RNA
gatctcgtgtttgctccttgtc

SEQ ID NO: 28426 - RNA, 22 nt, synthetic construct
  source 1..22: mol_type = other RNA
gatctgaaggagcccagagaga

SEQ ID NO: 28427 - RNA, 22 nt, synthetic construct
  source 1..22: mol_type = other RNA
gatctgccctgaggtatgcgat

SEQ ID NO: 28428 - RNA, 22 nt, synthetic construct
  source 1..22: mol_type = other RNA
gatcttcttcacaggtgctttc

SEQ ID NO: 28429 - RNA, 22 nt, synthetic construct
  source 1..22: mol_type = other RNA
gatcttgctttgggatcacatt

SEQ ID NO: 28430 - RNA, 22 nt, synthetic construct
  source 1..22: mol_type = other RNA
gatcttgtgcccccaacacagc

SEQ ID NO: 28431 - RNA, 22 nt, synthetic construct
  source 1..22: mol_type = other RNA
gatgagaaacaaagagcaagag

SEQ ID NO: 28432 - RNA, 22 nt, synthetic construct
  source 1..22: mol_type = other RNA
gatgagctctctcaggcagtgg

SEQ ID NO: 28433 - RNA, 22 nt, synthetic construct
  source 1..22: mol_type = other RNA
gatgatgctgataatgccagta

SEQ ID NO: 28434 - RNA, 22 nt, synthetic construct
  source 1..22: mol_type = other RNA
gatgcaagccacatgcctgtat

SEQ ID NO: 28435 - RNA, 22 nt, synthetic construct
  source 1..22: mol_type = other RNA
gatgcaagttttgggtcttgtt

SEQ ID NO: 28436 - RNA, 22 nt, synthetic construct
  source 1..22: mol_type = other RNA
gatgcacaggccaattaaggtg

SEQ ID NO: 28437 - RNA, 22 nt, synthetic construct
  source 1..22: mol_type = other RNA
gatgccaccttagagcagcatg

SEQ ID NO: 28438 - RNA, 22 nt, synthetic construct
  source 1..22: mol_type = other RNA
gatgcctcattacgttttagat

SEQ ID NO: 28439 - RNA, 22 nt, synthetic construct
  source 1..22: mol_type = other RNA
gatgctcttttgctgcacatta

SEQ ID NO: 28440 - RNA, 22 nt, synthetic construct
  source 1..22: mol_type = other RNA
gatgctgataatgccagtaaac

SEQ ID NO: 28441 - RNA, 22 nt, synthetic construct
  source 1..22: mol_type = other RNA
gatgctgatgatgctgataatg

SEQ ID NO: 28442 - RNA, 22 nt, synthetic construct
  source 1..22: mol_type = other RNA
gatgctgctccatggtctcaat

SEQ ID NO: 28443 - RNA, 22 nt, synthetic construct
  source 1..22: mol_type = other RNA
gatgctttctgaaaggcctcag

SEQ ID NO: 28444 - RNA, 22 nt, synthetic construct
  source 1..22: mol_type = other RNA
gatggaacaggatagaaccaac

SEQ ID NO: 28445 - RNA, 22 nt, synthetic construct
  source 1..22: mol_type = other RNA
gatggattaggactctgggaag

SEQ ID NO: 28446 - RNA, 22 nt, synthetic construct
  source 1..22: mol_type = other RNA
gatggattgaattgaaggcccc

SEQ ID NO: 28447 - RNA, 22 nt, synthetic construct
  source 1..22: mol_type = other RNA
gatggcagtgatgcctcattac

SEQ ID NO: 28448 - RNA, 22 nt, synthetic construct
  source 1..22: mol_type = other RNA
gatggccccgaagcaagcctga

SEQ ID NO: 28449 - RNA, 22 nt, synthetic construct
  source 1..22: mol_type = other RNA
gatgggaaatcatattgagtct

SEQ ID NO: 28450 - RNA, 22 nt, synthetic construct
  source 1..22: mol_type = other RNA
gatgggattccgcttggtgaaa

SEQ ID NO: 28451 - RNA, 22 nt, synthetic construct
  source 1..22: mol_type = other RNA
gatgggcatatctcaaaaactg

SEQ ID NO: 28452 - RNA, 22 nt, synthetic construct
  source 1..22: mol_type = other RNA
gatgggtgagtgatctcacagg

SEQ ID NO: 28453 - RNA, 22 nt, synthetic construct
  source 1..22: mol_type = other RNA
gatggtatcaggaatggactta

SEQ ID NO: 28454 - RNA, 22 nt, synthetic construct
  source 1..22: mol_type = other RNA
gatggtggtggtggtgtggtag

SEQ ID NO: 28455 - RNA, 22 nt, synthetic construct
  source 1..22: mol_type = other RNA
gatggttgtgtttgtgctgcct

SEQ ID NO: 28456 - RNA, 22 nt, synthetic construct
  source 1..22: mol_type = other RNA
gatgtgaactctgggatggttg

SEQ ID NO: 28457 - RNA, 22 nt, synthetic construct
  source 1..22: mol_type = other RNA
gatgtggttttctgcaccgcaa

SEQ ID NO: 28458 - RNA, 22 nt, synthetic construct
  source 1..22: mol_type = other RNA
gatgtgtaggtaagtgccagaa

SEQ ID NO: 28459 - RNA, 22 nt, synthetic construct
  source 1..22: mol_type = other RNA
gatgtgtagtctgttctttatt

SEQ ID NO: 28460 - RNA, 22 nt, synthetic construct
  source 1..22: mol_type = other RNA
gatgttattttctgcaggagat

SEQ ID NO: 28461 - RNA, 22 nt, synthetic construct
  source 1..22: mol_type = other RNA
gatgttggtccactgtaccttg

SEQ ID NO: 28462 - RNA, 22 nt, synthetic construct
  source 1..22: mol_type = other RNA
gattaggactctgggaaggtgg

SEQ ID NO: 28463 - RNA, 22 nt, synthetic construct
  source 1..22: mol_type = other RNA
gattcaagtgctgtttcaacac

SEQ ID NO: 28464 - RNA, 22 nt, synthetic construct
  source 1..22: mol_type = other RNA
gattcatttcaacttggtacat

SEQ ID NO: 28465 - RNA, 22 nt, synthetic construct
  source 1..22: mol_type = other RNA
gattcccaaactgaaaaactta

SEQ ID NO: 28466 - RNA, 22 nt, synthetic construct
  source 1..22: mol_type = other RNA
gattccgcttggtgaaaacgag

SEQ ID NO: 28467 - RNA, 22 nt, synthetic construct
  source 1..22: mol_type = other RNA
gattccttttctgccactacca

SEQ ID NO: 28468 - RNA, 22 nt, synthetic construct
  source 1..22: mol_type = other RNA
gattctcttgcttagttacctt

SEQ ID NO: 28469 - RNA, 22 nt, synthetic construct
  source 1..22: mol_type = other RNA
gattctgaagggtcgagacaag

SEQ ID NO: 28470 - RNA, 22 nt, synthetic construct
  source 1..22: mol_type = other RNA
gattctgaatgagcaggagggg

SEQ ID NO: 28471 - RNA, 22 nt, synthetic construct
  source 1..22: mol_type = other RNA
gattctttcttatcactcaaat

SEQ ID NO: 28472 - RNA, 22 nt, synthetic construct
  source 1..22: mol_type = other RNA
gattgaattgaaggcccctcgt

SEQ ID NO: 28473 - RNA, 22 nt, synthetic construct
  source 1..22: mol_type = other RNA
gattggagagattgggttgata

SEQ ID NO: 28474 - RNA, 22 nt, synthetic construct
  source 1..22: mol_type = other RNA
gattgggttgatactgaagaat

SEQ ID NO: 28475 - RNA, 22 nt, synthetic construct
  source 1..22: mol_type = other RNA
gattgtgtttccattgcggtgc

SEQ ID NO: 28476 - RNA, 22 nt, synthetic construct
  source 1..22: mol_type = other RNA
gatttatattctgtacttcctc

SEQ ID NO: 28477 - RNA, 22 nt, synthetic construct
  source 1..22: mol_type = other RNA
gatttcaccagtttttcaacac

SEQ ID NO: 28478 - RNA, 22 nt, synthetic construct
  source 1..22: mol_type = other RNA
gatttcatggtctgactataag

SEQ ID NO: 28479 - RNA, 22 nt, synthetic construct
  source 1..22: mol_type = other RNA
gatttcattttcaacaaagagc

SEQ ID NO: 28480 - RNA, 22 nt, synthetic construct
  source 1..22: mol_type = other RNA
gatttcccatcttgcagatgtg

SEQ ID NO: 28481 - RNA, 22 nt, synthetic construct
  source 1..22: mol_type = other RNA
gatttctttcttggcttacccc

SEQ ID NO: 28482 - RNA, 22 nt, synthetic construct
  source 1..22: mol_type = other RNA
gatttgagagtaagagccttat

SEQ ID NO: 28483 - RNA, 22 nt, synthetic construct
  source 1..22: mol_type = other RNA
gatttgagtgataagaaagaat

SEQ ID NO: 28484 - RNA, 22 nt, synthetic construct
  source 1..22: mol_type = other RNA
gattttcaccatgaaaacattc

SEQ ID NO: 28485 - RNA, 22 nt, synthetic construct
  source 1..22: mol_type = other RNA
gattttcaggcccactgcagtt

SEQ ID NO: 28486 - RNA, 22 nt, synthetic construct
  source 1..22: mol_type = other RNA
gattttgaatactgattttcac

SEQ ID NO: 28487 - RNA, 22 nt, synthetic construct
  source 1..22: mol_type = other RNA
gatttttgttgttgtagttgtt

SEQ ID NO: 28488 - RNA, 22 nt, synthetic construct
  source 1..22: mol_type = other RNA
gcaaaaagttcaggatgtgtag

SEQ ID NO: 28489 - RNA, 22 nt, synthetic construct
  source 1..22: mol_type = other RNA
gcaaaagagcatcattgagacc

SEQ ID NO: 28490 - RNA, 22 nt, synthetic construct
  source 1..22: mol_type = other RNA
gcaaaaggtgtgagtttgaaaa

SEQ ID NO: 28491 - RNA, 22 nt, synthetic construct
  source 1..22: mol_type = other RNA
gcaaaatacaggtttcttgttc

SEQ ID NO: 28492 - RNA, 22 nt, synthetic construct
  source 1..22: mol_type = other RNA
gcaaaatggaggaataaaacgc

SEQ ID NO: 28493 - RNA, 22 nt, synthetic construct
  source 1..22: mol_type = other RNA
gcaaacaacttcttcagaaaag

SEQ ID NO: 28494 - RNA, 22 nt, synthetic construct
  source 1..22: mol_type = other RNA
gcaaacacagcaaccccaaact

SEQ ID NO: 28495 - RNA, 22 nt, synthetic construct
  source 1..22: mol_type = other RNA
gcaaacacgagatcttgtgccc

SEQ ID NO: 28496 - RNA, 22 nt, synthetic construct
  source 1..22: mol_type = other RNA
gcaaacacttggaataccctct

SEQ ID NO: 28497 - RNA, 22 nt, synthetic construct
  source 1..22: mol_type = other RNA
gcaaagagaaggatcattcttt

SEQ ID NO: 28498 - RNA, 22 nt, synthetic construct
  source 1..22: mol_type = other RNA
gcaaagctcagtgttcactaag

SEQ ID NO: 28499 - RNA, 22 nt, synthetic construct
  source 1..22: mol_type = other RNA
gcaaaggtacttgatacataac

SEQ ID NO: 28500 - RNA, 22 nt, synthetic construct
  source 1..22: mol_type = other RNA
gcaaatgggaggtgatggtatc

SEQ ID NO: 28501 - RNA, 22 nt, synthetic construct
  source 1..22: mol_type = other RNA
gcaaatgtttttcctgtgcctg

SEQ ID NO: 28502 - RNA, 22 nt, synthetic construct
  source 1..22: mol_type = other RNA
gcaaattgctgctggaacctga

SEQ ID NO: 28503 - RNA, 22 nt, synthetic construct
  source 1..22: mol_type = other RNA
gcaacaatgatcagcaaagaga

SEQ ID NO: 28504 - RNA, 22 nt, synthetic construct
  source 1..22: mol_type = other RNA
gcaacagactaagtccattcct

SEQ ID NO: 28505 - RNA, 22 nt, synthetic construct
  source 1..22: mol_type = other RNA
gcaacagcagcaaaaattacaa

SEQ ID NO: 28506 - RNA, 22 nt, synthetic construct
  source 1..22: mol_type = other RNA
gcaacataagcctcataaacag

SEQ ID NO: 28507 - RNA, 22 nt, synthetic construct
  source 1..22: mol_type = other RNA
gcaaccccaaactgagtcttgc

SEQ ID NO: 28508 - RNA, 22 nt, synthetic construct
  source 1..22: mol_type = other RNA
gcaacttgctcagcaaaggtac

SEQ ID NO: 28509 - RNA, 22 nt, synthetic construct
  source 1..22: mol_type = other RNA
gcaagaacagcagcaaacacag

SEQ ID NO: 28510 - RNA, 22 nt, synthetic construct
  source 1..22: mol_type = other RNA
gcaagactcagtttggggttgc

SEQ ID NO: 28511 - RNA, 22 nt, synthetic construct
  source 1..22: mol_type = other RNA
gcaagagaatccacctgcaagc

SEQ ID NO: 28512 - RNA, 22 nt, synthetic construct
  source 1..22: mol_type = other RNA
gcaagagattctgaagggtcga

SEQ ID NO: 28513 - RNA, 22 nt, synthetic construct
  source 1..22: mol_type = other RNA
gcaagatcttcttcacaggtgc

SEQ ID NO: 28514 - RNA, 22 nt, synthetic construct
  source 1..22: mol_type = other RNA
gcaagatgggaaatcatattga

SEQ ID NO: 28515 - RNA, 22 nt, synthetic construct
  source 1..22: mol_type = other RNA
gcaagccacatgcctgtatgca

SEQ ID NO: 28516 - RNA, 22 nt, synthetic construct
  source 1..22: mol_type = other RNA
gcaagcctgatggaacaggata

SEQ ID NO: 28517 - RNA, 22 nt, synthetic construct
  source 1..22: mol_type = other RNA
gcaagctcctggtggcagctct

SEQ ID NO: 28518 - RNA, 22 nt, synthetic construct
  source 1..22: mol_type = other RNA
gcaagctgtgataatgtgcagc

SEQ ID NO: 28519 - RNA, 22 nt, synthetic construct
  source 1..22: mol_type = other RNA
gcaagcttacacccagaaaaca

SEQ ID NO: 28520 - RNA, 22 nt, synthetic construct
  source 1..22: mol_type = other RNA
gcaagtaaaagttgaaatgtca

SEQ ID NO: 28521 - RNA, 22 nt, synthetic construct
  source 1..22: mol_type = other RNA
gcaagttgcgcagcttgttgac

SEQ ID NO: 28522 - RNA, 22 nt, synthetic construct
  source 1..22: mol_type = other RNA
gcaagttttgggtcttgtttcc

SEQ ID NO: 28523 - RNA, 22 nt, synthetic construct
  source 1..22: mol_type = other RNA
gcaatattttccaaataatgtg

SEQ ID NO: 28524 - RNA, 22 nt, synthetic construct
  source 1..22: mol_type = other RNA
gcaatgctaaatacctgttcct

SEQ ID NO: 28525 - RNA, 22 nt, synthetic construct
  source 1..22: mol_type = other RNA
gcaatggaaacacaatctggat

SEQ ID NO: 28526 - RNA, 22 nt, synthetic construct
  source 1..22: mol_type = other RNA
gcaattgtgatggtggtggtgg

SEQ ID NO: 28527 - RNA, 22 nt, synthetic construct
  source 1..22: mol_type = other RNA
gcaatttgcaagctcctggtgg

SEQ ID NO: 28528 - RNA, 22 nt, synthetic construct
  source 1..22: mol_type = other RNA
gcacaaacacaaccatcccaga

SEQ ID NO: 28529 - RNA, 22 nt, synthetic construct
  source 1..22: mol_type = other RNA
gcacaagatctcgtgtttgctc

SEQ ID NO: 28530 - RNA, 22 nt, synthetic construct
  source 1..22: mol_type = other RNA
gcacaagtcacaaatgtaccaa

SEQ ID NO: 28531 - RNA, 22 nt, synthetic construct
  source 1..22: mol_type = other RNA
gcacacagcaccaccagaaaac

SEQ ID NO: 28532 - RNA, 22 nt, synthetic construct
  source 1..22: mol_type = other RNA
gcacagacctctaactctgagc

SEQ ID NO: 28533 - RNA, 22 nt, synthetic construct
  source 1..22: mol_type = other RNA
gcacaggaaaaacatttgcatg

SEQ ID NO: 28534 - RNA, 22 nt, synthetic construct
  source 1..22: mol_type = other RNA
gcacaggccaattaaggtggaa

SEQ ID NO: 28535 - RNA, 22 nt, synthetic construct
  source 1..22: mol_type = other RNA
gcacagttagtgaaccttctct

SEQ ID NO: 28536 - RNA, 22 nt, synthetic construct
  source 1..22: mol_type = other RNA
gcacatgagcttttggtaaatg

SEQ ID NO: 28537 - RNA, 22 nt, synthetic construct
  source 1..22: mol_type = other RNA
gcacattatcacagcttgcagg

SEQ ID NO: 28538 - RNA, 22 nt, synthetic construct
  source 1..22: mol_type = other RNA
gcaccaccagaaaacaaaacat

SEQ ID NO: 28539 - RNA, 22 nt, synthetic construct
  source 1..22: mol_type = other RNA
gcaccaccttcccagagtccta

SEQ ID NO: 28540 - RNA, 22 nt, synthetic construct
  source 1..22: mol_type = other RNA
gcaccattaggcattagcactg

SEQ ID NO: 28541 - RNA, 22 nt, synthetic construct
  source 1..22: mol_type = other RNA
gcaccattcatttcattttgtt

SEQ ID NO: 28542 - RNA, 22 nt, synthetic construct
  source 1..22: mol_type = other RNA
gcaccgcaatggaaacacaatc

SEQ ID NO: 28543 - RNA, 22 nt, synthetic construct
  source 1..22: mol_type = other RNA
gcacctggtgtgagggtttttg

SEQ ID NO: 28544 - RNA, 22 nt, synthetic construct
  source 1..22: mol_type = other RNA
gcacctgtgaagaagatcttgc

SEQ ID NO: 28545 - RNA, 22 nt, synthetic construct
  source 1..22: mol_type = other RNA
gcactagatttcattttcaaca

SEQ ID NO: 28546 - RNA, 22 nt, synthetic construct
  source 1..22: mol_type = other RNA
gcactatctgaaaccaggatgg

SEQ ID NO: 28547 - RNA, 22 nt, synthetic construct
  source 1..22: mol_type = other RNA
gcactctgaatggtggagtttt

SEQ ID NO: 28548 - RNA, 22 nt, synthetic construct
  source 1..22: mol_type = other RNA
gcactctttcaaaagttattat

SEQ ID NO: 28549 - RNA, 22 nt, synthetic construct
  source 1..22: mol_type = other RNA
gcactgccttgtttttaagtaa

SEQ ID NO: 28550 - RNA, 22 nt, synthetic construct
  source 1..22: mol_type = other RNA
gcacttacctacacatctgcaa

SEQ ID NO: 28551 - RNA, 22 nt, synthetic construct
  source 1..22: mol_type = other RNA
gcacttctccaaaacagaccat

SEQ ID NO: 28552 - RNA, 22 nt, synthetic construct
  source 1..22: mol_type = other RNA
gcacttgaatcaacaggcttca

SEQ ID NO: 28553 - RNA, 22 nt, synthetic construct
  source 1..22: mol_type = other RNA
gcacttgatttcatggtctgac

SEQ ID NO: 28554 - RNA, 22 nt, synthetic construct
  source 1..22: mol_type = other RNA
gcacttttcccctcctgctcat

SEQ ID NO: 28555 - RNA, 22 nt, synthetic construct
  source 1..22: mol_type = other RNA
gcagaaaaccacatctcacata

SEQ ID NO: 28556 - RNA, 22 nt, synthetic construct
  source 1..22: mol_type = other RNA
gcagaaaaggaatccttagtga

SEQ ID NO: 28557 - RNA, 22 nt, synthetic construct
  source 1..22: mol_type = other RNA
gcagaaaataacatccagggaa

SEQ ID NO: 28558 - RNA, 22 nt, synthetic construct
  source 1..22: mol_type = other RNA
gcagaaactgtagcaccattag

SEQ ID NO: 28559 - RNA, 22 nt, synthetic construct
  source 1..22: mol_type = other RNA
gcagaacttgatagccacaccc

SEQ ID NO: 28560 - RNA, 22 nt, synthetic construct
  source 1..22: mol_type = other RNA
gcagaagtcacaacaagcttca

SEQ ID NO: 28561 - RNA, 22 nt, synthetic construct
  source 1..22: mol_type = other RNA
gcagatcaattccgcacagacc

SEQ ID NO: 28562 - RNA, 22 nt, synthetic construct
  source 1..22: mol_type = other RNA
gcagatgtgtaggtaagtgcca

SEQ ID NO: 28563 - RNA, 22 nt, synthetic construct
  source 1..22: mol_type = other RNA
gcagattcccaaactgaaaaac

SEQ ID NO: 28564 - RNA, 22 nt, synthetic construct
  source 1..22: mol_type = other RNA
gcagcaaaaattacaaataaag

SEQ ID NO: 28565 - RNA, 22 nt, synthetic construct
  source 1..22: mol_type = other RNA
gcagcaaaagagcatcattgag

SEQ ID NO: 28566 - RNA, 22 nt, synthetic construct
  source 1..22: mol_type = other RNA
gcagcaaacaacttcttcagaa

SEQ ID NO: 28567 - RNA, 22 nt, synthetic construct
  source 1..22: mol_type = other RNA
gcagcaaacacagcaaccccaa

SEQ ID NO: 28568 - RNA, 22 nt, synthetic construct
  source 1..22: mol_type = other RNA
gcagcaatttgcaagctcctgg

SEQ ID NO: 28569 - RNA, 22 nt, synthetic construct
  source 1..22: mol_type = other RNA
gcagcacaaacacaaccatccc

SEQ ID NO: 28570 - RNA, 22 nt, synthetic construct
  source 1..22: mol_type = other RNA
gcagcagtggtttgtctagtca

SEQ ID NO: 28571 - RNA, 22 nt, synthetic construct
  source 1..22: mol_type = other RNA
gcagcatctgaagcagtttcac

SEQ ID NO: 28572 - RNA, 22 nt, synthetic construct
  source 1..22: mol_type = other RNA
gcagcatgcttttgagtgtcct

SEQ ID NO: 28573 - RNA, 22 nt, synthetic construct
  source 1..22: mol_type = other RNA
gcagcccttctccgatgctttc

SEQ ID NO: 28574 - RNA, 22 nt, synthetic construct
  source 1..22: mol_type = other RNA
gcagccttgtggatggccccga

SEQ ID NO: 28575 - RNA, 22 nt, synthetic construct
  source 1..22: mol_type = other RNA
gcagctagtttactggcattat

SEQ ID NO: 28576 - RNA, 22 nt, synthetic construct
  source 1..22: mol_type = other RNA
gcagctcagagttagaggtctg

SEQ ID NO: 28577 - RNA, 22 nt, synthetic construct
  source 1..22: mol_type = other RNA
gcagctctgaacggtatttaaa

SEQ ID NO: 28578 - RNA, 22 nt, synthetic construct
  source 1..22: mol_type = other RNA
gcagctggctttggaggcagct

SEQ ID NO: 28579 - RNA, 22 nt, synthetic construct
  source 1..22: mol_type = other RNA
gcagctgttcttttggttggtg

SEQ ID NO: 28580 - RNA, 22 nt, synthetic construct
  source 1..22: mol_type = other RNA
gcagcttgttgaccagacatat

SEQ ID NO: 28581 - RNA, 22 nt, synthetic construct
  source 1..22: mol_type = other RNA
gcaggaaacaagacccaaaact

SEQ ID NO: 28582 - RNA, 22 nt, synthetic construct
  source 1..22: mol_type = other RNA
gcaggagatgggcatatctcaa

SEQ ID NO: 28583 - RNA, 22 nt, synthetic construct
  source 1..22: mol_type = other RNA
gcaggaggggaaaagtgctaat

SEQ ID NO: 28584 - RNA, 22 nt, synthetic construct
  source 1..22: mol_type = other RNA
gcagggacaatgactgttccat

SEQ ID NO: 28585 - RNA, 22 nt, synthetic construct
  source 1..22: mol_type = other RNA
gcaggtggattctcttgcttag

SEQ ID NO: 28586 - RNA, 22 nt, synthetic construct
  source 1..22: mol_type = other RNA
gcagtcaaccaaatgtctccga

SEQ ID NO: 28587 - RNA, 22 nt, synthetic construct
  source 1..22: mol_type = other RNA
gcagtcactgtgtggcactaga

SEQ ID NO: 28588 - RNA, 22 nt, synthetic construct
  source 1..22: mol_type = other RNA
gcagtcccaaggtacagtggac

SEQ ID NO: 28589 - RNA, 22 nt, synthetic construct
  source 1..22: mol_type = other RNA
gcagtctgtatgtcattcctgt

SEQ ID NO: 28590 - RNA, 22 nt, synthetic construct
  source 1..22: mol_type = other RNA
gcagtgatgcctcattacgttt

SEQ ID NO: 28591 - RNA, 22 nt, synthetic construct
  source 1..22: mol_type = other RNA
gcagtgctaatgcctaatggtg

SEQ ID NO: 28592 - RNA, 22 nt, synthetic construct
  source 1..22: mol_type = other RNA
gcagtggagagctacaggacaa

SEQ ID NO: 28593 - RNA, 22 nt, synthetic construct
  source 1..22: mol_type = other RNA
gcagtgggcctgaaaatccaga

SEQ ID NO: 28594 - RNA, 22 nt, synthetic construct
  source 1..22: mol_type = other RNA
gcagtgggcttccattctggag

SEQ ID NO: 28595 - RNA, 22 nt, synthetic construct
  source 1..22: mol_type = other RNA
gcagtggtgagtgaggcctgtg

SEQ ID NO: 28596 - RNA, 22 nt, synthetic construct
  source 1..22: mol_type = other RNA
gcagtggtttgtctagtcaaaa

SEQ ID NO: 28597 - RNA, 22 nt, synthetic construct
  source 1..22: mol_type = other RNA
gcagttaaagatttcaccagtt

SEQ ID NO: 28598 - RNA, 22 nt, synthetic construct
  source 1..22: mol_type = other RNA
gcagttatgtgttgaaaaactg

SEQ ID NO: 28599 - RNA, 22 nt, synthetic construct
  source 1..22: mol_type = other RNA
gcagttgatgagaaacaaagag

SEQ ID NO: 28600 - RNA, 22 nt, synthetic construct
  source 1..22: mol_type = other RNA
gcagttgtcctgtagctctcca

SEQ ID NO: 28601 - RNA, 22 nt, synthetic construct
  source 1..22: mol_type = other RNA
gcagtttcacgccaagtcgtta

SEQ ID NO: 28602 - RNA, 22 nt, synthetic construct
  source 1..22: mol_type = other RNA
gcataacccaccaatttttggt

SEQ ID NO: 28603 - RNA, 22 nt, synthetic construct
  source 1..22: mol_type = other RNA
gcatacaggcatgtggcttgca

SEQ ID NO: 28604 - RNA, 22 nt, synthetic construct
  source 1..22: mol_type = other RNA
gcatacatgtgtagatggatta

SEQ ID NO: 28605 - RNA, 22 nt, synthetic construct
  source 1..22: mol_type = other RNA
gcatacctcagggcagatcaat

SEQ ID NO: 28606 - RNA, 22 nt, synthetic construct
  source 1..22: mol_type = other RNA
gcatatctcaaaaactgatttt

SEQ ID NO: 28607 - RNA, 22 nt, synthetic construct
  source 1..22: mol_type = other RNA
gcatcacaggcctcactcacca

SEQ ID NO: 28608 - RNA, 22 nt, synthetic construct
  source 1..22: mol_type = other RNA
gcatcacatgcaatattttcca

SEQ ID NO: 28609 - RNA, 22 nt, synthetic construct
  source 1..22: mol_type = other RNA
gcatcactgccatcaattcttc

SEQ ID NO: 28610 - RNA, 22 nt, synthetic construct
  source 1..22: mol_type = other RNA
gcatcatcagcatcacaggcct

SEQ ID NO: 28611 - RNA, 22 nt, synthetic construct
  source 1..22: mol_type = other RNA
gcatcattgagaccatggagca

SEQ ID NO: 28612 - RNA, 22 nt, synthetic construct
  source 1..22: mol_type = other RNA
gcatccaggttccaccttaatt

SEQ ID NO: 28613 - RNA, 22 nt, synthetic construct
  source 1..22: mol_type = other RNA
gcatcggagaagggctgcatac

SEQ ID NO: 28614 - RNA, 22 nt, synthetic construct
  source 1..22: mol_type = other RNA
gcatctcttacagaagcaagaa

SEQ ID NO: 28615 - RNA, 22 nt, synthetic construct
  source 1..22: mol_type = other RNA
gcatctgaagcagtttcacgcc

SEQ ID NO: 28616 - RNA, 22 nt, synthetic construct
  source 1..22: mol_type = other RNA
gcatctgactatggcaagactc

SEQ ID NO: 28617 - RNA, 22 nt, synthetic construct
  source 1..22: mol_type = other RNA
gcatgcaaaatacaggtttctt

SEQ ID NO: 28618 - RNA, 22 nt, synthetic construct
  source 1..22: mol_type = other RNA
gcatgcacttgatttcatggtc

SEQ ID NO: 28619 - RNA, 22 nt, synthetic construct
  source 1..22: mol_type = other RNA
gcatgctgctctaaggtggcat

SEQ ID NO: 28620 - RNA, 22 nt, synthetic construct
  source 1..22: mol_type = other RNA
gcatgcttttgagtgtccttct

SEQ ID NO: 28621 - RNA, 22 nt, synthetic construct
  source 1..22: mol_type = other RNA
gcatggttatgtatcaagtacc

SEQ ID NO: 28622 - RNA, 22 nt, synthetic construct
  source 1..22: mol_type = other RNA
gcatgtgatgcaagttttgggt

SEQ ID NO: 28623 - RNA, 22 nt, synthetic construct
  source 1..22: mol_type = other RNA
gcatgtggcttgcatccaggtt

SEQ ID NO: 28624 - RNA, 22 nt, synthetic construct
  source 1..22: mol_type = other RNA
gcatgttggaatttccagtgta

SEQ ID NO: 28625 - RNA, 22 nt, synthetic construct
  source 1..22: mol_type = other RNA
gcattagcactgccttgttttt

SEQ ID NO: 28626 - RNA, 22 nt, synthetic construct
  source 1..22: mol_type = other RNA
gcattatcagcatcatcagcat

SEQ ID NO: 28627 - RNA, 22 nt, synthetic construct
  source 1..22: mol_type = other RNA
gcattgcagctagtttactggc

SEQ ID NO: 28628 - RNA, 22 nt, synthetic construct
  source 1..22: mol_type = other RNA
gcatttatgtgagatgtggttt

SEQ ID NO: 28629 - RNA, 22 nt, synthetic construct
  source 1..22: mol_type = other RNA
gcattttcttgggctacagaac

SEQ ID NO: 28630 - RNA, 22 nt, synthetic construct
  source 1..22: mol_type = other RNA
gccaaagaatgatccttctctt

SEQ ID NO: 28631 - RNA, 22 nt, synthetic construct
  source 1..22: mol_type = other RNA
gccaagaaagaaatccaggtga

SEQ ID NO: 28632 - RNA, 22 nt, synthetic construct
  source 1..22: mol_type = other RNA
gccaagtcgttatttgaccata

SEQ ID NO: 28633 - RNA, 22 nt, synthetic construct
  source 1..22: mol_type = other RNA
gccaattaaggtggaacctgga

SEQ ID NO: 28634 - RNA, 22 nt, synthetic construct
  source 1..22: mol_type = other RNA
gccacacagtgactgcacatga

SEQ ID NO: 28635 - RNA, 22 nt, synthetic construct
  source 1..22: mol_type = other RNA
gccacaccccagctttagagca

SEQ ID NO: 28636 - RNA, 22 nt, synthetic construct
  source 1..22: mol_type = other RNA
gccacatgcctgtatgcacaca

SEQ ID NO: 28637 - RNA, 22 nt, synthetic construct
  source 1..22: mol_type = other RNA
gccaccaggagcttgcaaattg

SEQ ID NO: 28638 - RNA, 22 nt, synthetic construct
  source 1..22: mol_type = other RNA
gccaccttagagcagcatgctt

SEQ ID NO: 28639 - RNA, 22 nt, synthetic construct
  source 1..22: mol_type = other RNA
gccactaccacaccaccaccac

SEQ ID NO: 28640 - RNA, 22 nt, synthetic construct
  source 1..22: mol_type = other RNA
gccacttggtgtctccatttac

SEQ ID NO: 28641 - RNA, 22 nt, synthetic construct
  source 1..22: mol_type = other RNA
gccagaaatgtactgagacaca

SEQ ID NO: 28642 - RNA, 22 nt, synthetic construct
  source 1..22: mol_type = other RNA
gccagaatagtcgtgtgagtcc

SEQ ID NO: 28643 - RNA, 22 nt, synthetic construct
  source 1..22: mol_type = other RNA
gccagacagaacctctggctac

SEQ ID NO: 28644 - RNA, 22 nt, synthetic construct
  source 1..22: mol_type = other RNA
gccagactaaagtggaagaatg

SEQ ID NO: 28645 - RNA, 22 nt, synthetic construct
  source 1..22: mol_type = other RNA
gccagaggttctgtctggcaaa

SEQ ID NO: 28646 - RNA, 22 nt, synthetic construct
  source 1..22: mol_type = other RNA
gccagcagttgatgagaaacaa

SEQ ID NO: 28647 - RNA, 22 nt, synthetic construct
  source 1..22: mol_type = other RNA
gccagctgcagtggtgagtgag

SEQ ID NO: 28648 - RNA, 22 nt, synthetic construct
  source 1..22: mol_type = other RNA
gccagtaaactagctgcaatgc

SEQ ID NO: 28649 - RNA, 22 nt, synthetic construct
  source 1..22: mol_type = other RNA
gccagtcacagttttgactaga

SEQ ID NO: 28650 - RNA, 22 nt, synthetic construct
  source 1..22: mol_type = other RNA
gccatagtcagatgcacaggcc

SEQ ID NO: 28651 - RNA, 22 nt, synthetic construct
  source 1..22: mol_type = other RNA
gccatcaattcttcagtatcaa

SEQ ID NO: 28652 - RNA, 22 nt, synthetic construct
  source 1..22: mol_type = other RNA
gccatgtgtctcagtacatttc

SEQ ID NO: 28653 - RNA, 22 nt, synthetic construct
  source 1..22: mol_type = other RNA
gccattaacagtcaggctacta

SEQ ID NO: 28654 - RNA, 22 nt, synthetic construct
  source 1..22: mol_type = other RNA
gccattttcaaactcacacctt

SEQ ID NO: 28655 - RNA, 22 nt, synthetic construct
  source 1..22: mol_type = other RNA
gcccaagaaaatgcagttaaag

SEQ ID NO: 28656 - RNA, 22 nt, synthetic construct
  source 1..22: mol_type = other RNA
gcccactgcagttatgtgttga

SEQ ID NO: 28657 - RNA, 22 nt, synthetic construct
  source 1..22: mol_type = other RNA
gcccactgcctgagagagctca

SEQ ID NO: 28658 - RNA, 22 nt, synthetic construct
  source 1..22: mol_type = other RNA
gcccagagagagaaggttcact

SEQ ID NO: 28659 - RNA, 22 nt, synthetic construct
  source 1..22: mol_type = other RNA
gcccatctcctgcagaaaataa

SEQ ID NO: 28660 - RNA, 22 nt, synthetic construct
  source 1..22: mol_type = other RNA
gcccccaacacagcactatctg

SEQ ID NO: 28661 - RNA, 22 nt, synthetic construct
  source 1..22: mol_type = other RNA
gccccccaggcatgttggaatt

SEQ ID NO: 28662 - RNA, 22 nt, synthetic construct
  source 1..22: mol_type = other RNA
gccccgaagcaagcctgatgga

SEQ ID NO: 28663 - RNA, 22 nt, synthetic construct
  source 1..22: mol_type = other RNA
gcccctcgttttcaccaagcgg

SEQ ID NO: 28664 - RNA, 22 nt, synthetic construct
  source 1..22: mol_type = other RNA
gccctcaacatggttggttcta

SEQ ID NO: 28665 - RNA, 22 nt, synthetic construct
  source 1..22: mol_type = other RNA
gccctgacatttcaacttttac

SEQ ID NO: 28666 - RNA, 22 nt, synthetic construct
  source 1..22: mol_type = other RNA
gccctgaggtatgcgatgggtg

SEQ ID NO: 28667 - RNA, 22 nt, synthetic construct
  source 1..22: mol_type = other RNA
gcccttctccgatgctttctga

SEQ ID NO: 28668 - RNA, 22 nt, synthetic construct
  source 1..22: mol_type = other RNA
gcccttgattcatttcaacttg

SEQ ID NO: 28669 - RNA, 22 nt, synthetic construct
  source 1..22: mol_type = other RNA
gcctaatggtgctacagtttct

SEQ ID NO: 28670 - RNA, 22 nt, synthetic construct
  source 1..22: mol_type = other RNA
gcctcactcaccactgcagctg

SEQ ID NO: 28671 - RNA, 22 nt, synthetic construct
  source 1..22: mol_type = other RNA
gcctcagaataattgtgtgaac

SEQ ID NO: 28672 - RNA, 22 nt, synthetic construct
  source 1..22: mol_type = other RNA
gcctcaggtttaccctctattt

SEQ ID NO: 28673 - RNA, 22 nt, synthetic construct
  source 1..22: mol_type = other RNA
gcctcataaacaggcagcacaa

SEQ ID NO: 28674 - RNA, 22 nt, synthetic construct
  source 1..22: mol_type = other RNA
gcctcattacgttttagatggg

SEQ ID NO: 28675 - RNA, 22 nt, synthetic construct
  source 1..22: mol_type = other RNA
gcctccaaagccagctgcagtg

SEQ ID NO: 28676 - RNA, 22 nt, synthetic construct
  source 1..22: mol_type = other RNA
gcctcttccgtggaacacacac

SEQ ID NO: 28677 - RNA, 22 nt, synthetic construct
  source 1..22: mol_type = other RNA
gcctgaaaatccagagcttcag

SEQ ID NO: 28678 - RNA, 22 nt, synthetic construct
  source 1..22: mol_type = other RNA
gcctgaccagggaggaagtcac

SEQ ID NO: 28679 - RNA, 22 nt, synthetic construct
  source 1..22: mol_type = other RNA
gcctgactgttaatggcattta

SEQ ID NO: 28680 - RNA, 22 nt, synthetic construct
  source 1..22: mol_type = other RNA
gcctgagagagctcatccagaa

SEQ ID NO: 28681 - RNA, 22 nt, synthetic construct
  source 1..22: mol_type = other RNA
gcctgatggaacaggatagaac

SEQ ID NO: 28682 - RNA, 22 nt, synthetic construct
  source 1..22: mol_type = other RNA
gcctggggggctcccaaggcaa

SEQ ID NO: 28683 - RNA, 22 nt, synthetic construct
  source 1..22: mol_type = other RNA
gcctgtatgcacacagcaccac

SEQ ID NO: 28684 - RNA, 22 nt, synthetic construct
  source 1..22: mol_type = other RNA
gcctgtgatgctgatgatgctg

SEQ ID NO: 28685 - RNA, 22 nt, synthetic construct
  source 1..22: mol_type = other RNA
gcctgtgcatctgactatggca

SEQ ID NO: 28686 - RNA, 22 nt, synthetic construct
  source 1..22: mol_type = other RNA
gcctgttgattcaagtgctgtt

SEQ ID NO: 28687 - RNA, 22 nt, synthetic construct
  source 1..22: mol_type = other RNA
gcctgtttatgaggcttatgtt

SEQ ID NO: 28688 - RNA, 22 nt, synthetic construct
  source 1..22: mol_type = other RNA
gccttatggtcaaataacgact

SEQ ID NO: 28689 - RNA, 22 nt, synthetic construct
  source 1..22: mol_type = other RNA
gccttcaattcaatccatcctg

SEQ ID NO: 28690 - RNA, 22 nt, synthetic construct
  source 1..22: mol_type = other RNA
gccttgggagccccccaggcat

SEQ ID NO: 28691 - RNA, 22 nt, synthetic construct
  source 1..22: mol_type = other RNA
gccttgtggatggccccgaagc

SEQ ID NO: 28692 - RNA, 22 nt, synthetic construct
  source 1..22: mol_type = other RNA
gccttgtttttaagtaatacaa

SEQ ID NO: 28693 - RNA, 22 nt, synthetic construct
  source 1..22: mol_type = other RNA
gcctttcagaaagcatcggaga

SEQ ID NO: 28694 - RNA, 22 nt, synthetic construct
  source 1..22: mol_type = other RNA
gccttttggtcttgtttcaatt

SEQ ID NO: 28695 - RNA, 22 nt, synthetic construct
  source 1..22: mol_type = other RNA
gcgagttcgagactcataatgt

SEQ ID NO: 28696 - RNA, 22 nt, synthetic construct
  source 1..22: mol_type = other RNA
gcgatgggtgagtgatctcaca

SEQ ID NO: 28697 - RNA, 22 nt, synthetic construct
  source 1..22: mol_type = other RNA
gcgcaacttgctcagcaaaggt

SEQ ID NO: 28698 - RNA, 22 nt, synthetic construct
  source 1..22: mol_type = other RNA
gcgcagcttgttgaccagacat

SEQ ID NO: 28699 - RNA, 22 nt, synthetic construct
  source 1..22: mol_type = other RNA
gcggaatcccatctaaaacgta

SEQ ID NO: 28700 - RNA, 22 nt, synthetic construct
  source 1..22: mol_type = other RNA
gcggaattgatctgccctgagg

SEQ ID NO: 28701 - RNA, 22 nt, synthetic construct
  source 1..22: mol_type = other RNA
gcggtgcagaaaaccacatctc

SEQ ID NO: 28702 - RNA, 22 nt, synthetic construct
  source 1..22: mol_type = other RNA
gcgtctggtgaagaattctgtt

SEQ ID NO: 28703 - RNA, 22 nt, synthetic construct
  source 1..22: mol_type = other RNA
gcgtgaaactgcttcagatgct

SEQ ID NO: 28704 - RNA, 22 nt, synthetic construct
  source 1..22: mol_type = other RNA
gcgttttattcctccattttgc

SEQ ID NO: 28705 - RNA, 22 nt, synthetic construct
  source 1..22: mol_type = other RNA
gctaaatacctgttcctttcag

SEQ ID NO: 28706 - RNA, 22 nt, synthetic construct
  source 1..22: mol_type = other RNA
gctaatgcctaatggtgctaca

SEQ ID NO: 28707 - RNA, 22 nt, synthetic construct
  source 1..22: mol_type = other RNA
gctaatggagaaagacgtaact

SEQ ID NO: 28708 - RNA, 22 nt, synthetic construct
  source 1..22: mol_type = other RNA
gctaattaccatgacaagaaca

SEQ ID NO: 28709 - RNA, 22 nt, synthetic construct
  source 1..22: mol_type = other RNA
gctacaaagctccagaatggaa

SEQ ID NO: 28710 - RNA, 22 nt, synthetic construct
  source 1..22: mol_type = other RNA
gctacagaactcacagattctt

SEQ ID NO: 28711 - RNA, 22 nt, synthetic construct
  source 1..22: mol_type = other RNA
gctacaggacaactgccagcag

SEQ ID NO: 28712 - RNA, 22 nt, synthetic construct
  source 1..22: mol_type = other RNA
gctacagtttctgcctcttccg

SEQ ID NO: 28713 - RNA, 22 nt, synthetic construct
  source 1..22: mol_type = other RNA
gctaccaaaaattggtgggtta

SEQ ID NO: 28714 - RNA, 22 nt, synthetic construct
  source 1..22: mol_type = other RNA
gctactaatgagttgtcctgtg

SEQ ID NO: 28715 - RNA, 22 nt, synthetic construct
  source 1..22: mol_type = other RNA
gctagcgtctggtgaagaattc

SEQ ID NO: 28716 - RNA, 22 nt, synthetic construct
  source 1..22: mol_type = other RNA
gctagctttgtggttccctgga

SEQ ID NO: 28717 - RNA, 22 nt, synthetic construct
  source 1..22: mol_type = other RNA
gctagtttactggcattatcag

SEQ ID NO: 28718 - RNA, 22 nt, synthetic construct
  source 1..22: mol_type = other RNA
gctatcaagttctgcagcagtg

SEQ ID NO: 28719 - RNA, 22 nt, synthetic construct
  source 1..22: mol_type = other RNA
gctcagagttagaggtctgtgc

SEQ ID NO: 28720 - RNA, 22 nt, synthetic construct
  source 1..22: mol_type = other RNA
gctcagcaaaggtacttgatac

SEQ ID NO: 28721 - RNA, 22 nt, synthetic construct
  source 1..22: mol_type = other RNA
gctcagtctctgaagcctgttg

SEQ ID NO: 28722 - RNA, 22 nt, synthetic construct
  source 1..22: mol_type = other RNA
gctcagtgttcactaaggattc

SEQ ID NO: 28723 - RNA, 22 nt, synthetic construct
  source 1..22: mol_type = other RNA
gctcatccagaagtaaatggag

SEQ ID NO: 28724 - RNA, 22 nt, synthetic construct
  source 1..22: mol_type = other RNA
gctcatgtgcagtcactgtgtg

SEQ ID NO: 28725 - RNA, 22 nt, synthetic construct
  source 1..22: mol_type = other RNA
gctcattcagaatctgaagctc

SEQ ID NO: 28726 - RNA, 22 nt, synthetic construct
  source 1..22: mol_type = other RNA
gctccagaatggaagcccactg

SEQ ID NO: 28727 - RNA, 22 nt, synthetic construct
  source 1..22: mol_type = other RNA
gctccagctgtgttgttttctg

SEQ ID NO: 28728 - RNA, 22 nt, synthetic construct
  source 1..22: mol_type = other RNA
gctccatggtctcaatgatgct

SEQ ID NO: 28729 - RNA, 22 nt, synthetic construct
  source 1..22: mol_type = other RNA
gctcccaaggcaagcttacacc

SEQ ID NO: 28730 - RNA, 22 nt, synthetic construct
  source 1..22: mol_type = other RNA
gctcctggtggcagctctgaac

SEQ ID NO: 28731 - RNA, 22 nt, synthetic construct
  source 1..22: mol_type = other RNA
gctcctgttcttgaaagcacct

SEQ ID NO: 28732 - RNA, 22 nt, synthetic construct
  source 1..22: mol_type = other RNA
gctccttcagatcaagaaattg

SEQ ID NO: 28733 - RNA, 22 nt, synthetic construct
  source 1..22: mol_type = other RNA
gctccttgtctcgacccttcag

SEQ ID NO: 28734 - RNA, 22 nt, synthetic construct
  source 1..22: mol_type = other RNA
gctctaaagctggggtgtggct

SEQ ID NO: 28735 - RNA, 22 nt, synthetic construct
  source 1..22: mol_type = other RNA
gctctaaggtggcatctcttac

SEQ ID NO: 28736 - RNA, 22 nt, synthetic construct
  source 1..22: mol_type = other RNA
gctctccactgctaccaaaaat

SEQ ID NO: 28737 - RNA, 22 nt, synthetic construct
  source 1..22: mol_type = other RNA
gctctctcaggcagtgggcttc

SEQ ID NO: 28738 - RNA, 22 nt, synthetic construct
  source 1..22: mol_type = other RNA
gctctgaacggtatttaaaaca

SEQ ID NO: 28739 - RNA, 22 nt, synthetic construct
  source 1..22: mol_type = other RNA
gctctggattttcaggcccact

SEQ ID NO: 28740 - RNA, 22 nt, synthetic construct
  source 1..22: mol_type = other RNA
gctcttactctcaaatcacaga

SEQ ID NO: 28741 - RNA, 22 nt, synthetic construct
  source 1..22: mol_type = other RNA
gctctttgttgaaaatgaaatc

SEQ ID NO: 28742 - RNA, 22 nt, synthetic construct
  source 1..22: mol_type = other RNA
gctctttgtttctcatcaactg

SEQ ID NO: 28743 - RNA, 22 nt, synthetic construct
  source 1..22: mol_type = other RNA
gctcttttgctgcacattatca

SEQ ID NO: 28744 - RNA, 22 nt, synthetic construct
  source 1..22: mol_type = other RNA
gctgagcaagttgcgcagcttg

SEQ ID NO: 28745 - RNA, 22 nt, synthetic construct
  source 1..22: mol_type = other RNA
gctgaggaacctgtggaagagg

SEQ ID NO: 28746 - RNA, 22 nt, synthetic construct
  source 1..22: mol_type = other RNA
gctgataatgccagtaaactag

SEQ ID NO: 28747 - RNA, 22 nt, synthetic construct
  source 1..22: mol_type = other RNA
gctgatcattgttgctttgggg

SEQ ID NO: 28748 - RNA, 22 nt, synthetic construct
  source 1..22: mol_type = other RNA
gctgatgatgctgataatgcca

SEQ ID NO: 28749 - RNA, 22 nt, synthetic construct
  source 1..22: mol_type = other RNA
gctgcaatgctaaatacctgtt

SEQ ID NO: 28750 - RNA, 22 nt, synthetic construct
  source 1..22: mol_type = other RNA
gctgcacattatcacagcttgc

SEQ ID NO: 28751 - RNA, 22 nt, synthetic construct
  source 1..22: mol_type = other RNA
gctgcagaacttgatagccaca

SEQ ID NO: 28752 - RNA, 22 nt, synthetic construct
  source 1..22: mol_type = other RNA
gctgcagtggtgagtgaggcct

SEQ ID NO: 28753 - RNA, 22 nt, synthetic construct
  source 1..22: mol_type = other RNA
gctgcatacatgtgtagatgga

SEQ ID NO: 28754 - RNA, 22 nt, synthetic construct
  source 1..22: mol_type = other RNA
gctgccaccaggagcttgcaaa

SEQ ID NO: 28755 - RNA, 22 nt, synthetic construct
  source 1..22: mol_type = other RNA
gctgcctccaaagccagctgca

SEQ ID NO: 28756 - RNA, 22 nt, synthetic construct
  source 1..22: mol_type = other RNA
gctgcctgtttatgaggcttat

SEQ ID NO: 28757 - RNA, 22 nt, synthetic construct
  source 1..22: mol_type = other RNA
gctgcgcaacttgctcagcaaa

SEQ ID NO: 28758 - RNA, 22 nt, synthetic construct
  source 1..22: mol_type = other RNA
gctgctccatggtctcaatgat

SEQ ID NO: 28759 - RNA, 22 nt, synthetic construct
  source 1..22: mol_type = other RNA
gctgctctaaagctggggtgtg

SEQ ID NO: 28760 - RNA, 22 nt, synthetic construct
  source 1..22: mol_type = other RNA
gctgctctaaggtggcatctct

SEQ ID NO: 28761 - RNA, 22 nt, synthetic construct
  source 1..22: mol_type = other RNA
gctgctggaacctgaacagaat

SEQ ID NO: 28762 - RNA, 22 nt, synthetic construct
  source 1..22: mol_type = other RNA
gctgctgttcttgcttctgtaa

SEQ ID NO: 28763 - RNA, 22 nt, synthetic construct
  source 1..22: mol_type = other RNA
gctgctgttgctggttttgagg

SEQ ID NO: 28764 - RNA, 22 nt, synthetic construct
  source 1..22: mol_type = other RNA
gctgcttctgttctcaataatt

SEQ ID NO: 28765 - RNA, 22 nt, synthetic construct
  source 1..22: mol_type = other RNA
gctggaacctgaacagaattct

SEQ ID NO: 28766 - RNA, 22 nt, synthetic construct
  source 1..22: mol_type = other RNA
gctggagcacaagtcacaaatg

SEQ ID NO: 28767 - RNA, 22 nt, synthetic construct
  source 1..22: mol_type = other RNA
gctggcagttgtcctgtagctc

SEQ ID NO: 28768 - RNA, 22 nt, synthetic construct
  source 1..22: mol_type = other RNA
gctggctttggaggcagctcag

SEQ ID NO: 28769 - RNA, 22 nt, synthetic construct
  source 1..22: mol_type = other RNA
gctggggtgtggctatcaagtt

SEQ ID NO: 28770 - RNA, 22 nt, synthetic construct
  source 1..22: mol_type = other RNA
gctggttttgagggagatgtga

SEQ ID NO: 28771 - RNA, 22 nt, synthetic construct
  source 1..22: mol_type = other RNA
gctgtgataatgtgcagcaaaa

SEQ ID NO: 28772 - RNA, 22 nt, synthetic construct
  source 1..22: mol_type = other RNA
gctgtgtgcatacaggcatgtg

SEQ ID NO: 28773 - RNA, 22 nt, synthetic construct
  source 1..22: mol_type = other RNA
gctgtgttgggggcacaagatc

SEQ ID NO: 28774 - RNA, 22 nt, synthetic construct
  source 1..22: mol_type = other RNA
gctgtgttgttttctgggtgta

SEQ ID NO: 28775 - RNA, 22 nt, synthetic construct
  source 1..22: mol_type = other RNA
gctgtgtttgctgctgttcttg

SEQ ID NO: 28776 - RNA, 22 nt, synthetic construct
  source 1..22: mol_type = other RNA
gctgttcttgcttctgtaagag

SEQ ID NO: 28777 - RNA, 22 nt, synthetic construct
  source 1..22: mol_type = other RNA
gctgttcttttggttggtgtct

SEQ ID NO: 28778 - RNA, 22 nt, synthetic construct
  source 1..22: mol_type = other RNA
gctgttgctggttttgagggag

SEQ ID NO: 28779 - RNA, 22 nt, synthetic construct
  source 1..22: mol_type = other RNA
gctgtttcaacactggggacat

SEQ ID NO: 28780 - RNA, 22 nt, synthetic construct
  source 1..22: mol_type = other RNA
gcttacacccagaaaacaacac

SEQ ID NO: 28781 - RNA, 22 nt, synthetic construct
  source 1..22: mol_type = other RNA
gcttaccccgaagttacgtctt

SEQ ID NO: 28782 - RNA, 22 nt, synthetic construct
  source 1..22: mol_type = other RNA
gcttacttcaagcaaagctcag

SEQ ID NO: 28783 - RNA, 22 nt, synthetic construct
  source 1..22: mol_type = other RNA
gcttagttacctttttccatgt

SEQ ID NO: 28784 - RNA, 22 nt, synthetic construct
  source 1..22: mol_type = other RNA
gcttatgttgcaaaaggtgtga

SEQ ID NO: 28785 - RNA, 22 nt, synthetic construct
  source 1..22: mol_type = other RNA
gcttcagagactgagccatttt

SEQ ID NO: 28786 - RNA, 22 nt, synthetic construct
  source 1..22: mol_type = other RNA
gcttcagatgctgctccatggt

SEQ ID NO: 28787 - RNA, 22 nt, synthetic construct
  source 1..22: mol_type = other RNA
gcttcagattctgaatgagcag

SEQ ID NO: 28788 - RNA, 22 nt, synthetic construct
  source 1..22: mol_type = other RNA
gcttcagttctacagggatata

SEQ ID NO: 28789 - RNA, 22 nt, synthetic construct
  source 1..22: mol_type = other RNA
gcttccattctggagctttgta

SEQ ID NO: 28790 - RNA, 22 nt, synthetic construct
  source 1..22: mol_type = other RNA
gcttcccttcatacagggtatt

SEQ ID NO: 28791 - RNA, 22 nt, synthetic construct
  source 1..22: mol_type = other RNA
gcttccttcagaaggaaaaagc

SEQ ID NO: 28792 - RNA, 22 nt, synthetic construct
  source 1..22: mol_type = other RNA
gcttcggggccatccacaaggc

SEQ ID NO: 28793 - RNA, 22 nt, synthetic construct
  source 1..22: mol_type = other RNA
gcttctgtaagagatgccacct

SEQ ID NO: 28794 - RNA, 22 nt, synthetic construct
  source 1..22: mol_type = other RNA
gcttctgtgatttgagagtaag

SEQ ID NO: 28795 - RNA, 22 nt, synthetic construct
  source 1..22: mol_type = other RNA
gcttctgttctcaataatttta

SEQ ID NO: 28796 - RNA, 22 nt, synthetic construct
  source 1..22: mol_type = other RNA
gcttctttctccccctcctcct

SEQ ID NO: 28797 - RNA, 22 nt, synthetic construct
  source 1..22: mol_type = other RNA
gcttgaagtaagcaccattcat

SEQ ID NO: 28798 - RNA, 22 nt, synthetic construct
  source 1..22: mol_type = other RNA
gcttgaggtgttctgacattgg

SEQ ID NO: 28799 - RNA, 22 nt, synthetic construct
  source 1..22: mol_type = other RNA
gcttgattttgaatactgattt

SEQ ID NO: 28800 - RNA, 22 nt, synthetic construct
  source 1..22: mol_type = other RNA
gcttgcaaattgctgctggaac

SEQ ID NO: 28801 - RNA, 22 nt, synthetic construct
  source 1..22: mol_type = other RNA
gcttgcaggtggattctcttgc

SEQ ID NO: 28802 - RNA, 22 nt, synthetic construct
  source 1..22: mol_type = other RNA
gcttgcatccaggttccacctt

SEQ ID NO: 28803 - RNA, 22 nt, synthetic construct
  source 1..22: mol_type = other RNA
gcttgccttgggagccccccag

SEQ ID NO: 28804 - RNA, 22 nt, synthetic construct
  source 1..22: mol_type = other RNA
gcttgcttcggggccatccaca

SEQ ID NO: 28805 - RNA, 22 nt, synthetic construct
  source 1..22: mol_type = other RNA
gcttggtgaaaacgaggggcct

SEQ ID NO: 28806 - RNA, 22 nt, synthetic construct
  source 1..22: mol_type = other RNA
gcttgttgaccagacatatctt

SEQ ID NO: 28807 - RNA, 22 nt, synthetic construct
  source 1..22: mol_type = other RNA
gcttgttgtgacttctgctcct

SEQ ID NO: 28808 - RNA, 22 nt, synthetic construct
  source 1..22: mol_type = other RNA
gctttagagcagcaaacaactt

SEQ ID NO: 28809 - RNA, 22 nt, synthetic construct
  source 1..22: mol_type = other RNA
gctttcaagaacaggagcagaa

SEQ ID NO: 28810 - RNA, 22 nt, synthetic construct
  source 1..22: mol_type = other RNA
gctttcacctggatttctttct

SEQ ID NO: 28811 - RNA, 22 nt, synthetic construct
  source 1..22: mol_type = other RNA
gctttctgaaaggcctcagaat

SEQ ID NO: 28812 - RNA, 22 nt, synthetic construct
  source 1..22: mol_type = other RNA
gctttgcttgaagtaagcacca

SEQ ID NO: 28813 - RNA, 22 nt, synthetic construct
  source 1..22: mol_type = other RNA
gctttggaggcagctcagagtt

SEQ ID NO: 28814 - RNA, 22 nt, synthetic construct
  source 1..22: mol_type = other RNA
gctttgggatcacattatttgg

SEQ ID NO: 28815 - RNA, 22 nt, synthetic construct
  source 1..22: mol_type = other RNA
gctttgggggtgaggaaaagtc

SEQ ID NO: 28816 - RNA, 22 nt, synthetic construct
  source 1..22: mol_type = other RNA
gctttgtagccagaggttctgt

SEQ ID NO: 28817 - RNA, 22 nt, synthetic construct
  source 1..22: mol_type = other RNA
gctttgtggttccctggatgtt

SEQ ID NO: 28818 - RNA, 22 nt, synthetic construct
  source 1..22: mol_type = other RNA
gcttttgagtgtccttctgggg

SEQ ID NO: 28819 - RNA, 22 nt, synthetic construct
  source 1..22: mol_type = other RNA
gcttttggtaaatggtctgttt

SEQ ID NO: 28820 - RNA, 22 nt, synthetic construct
  source 1..22: mol_type = other RNA
gctttttccttctgaaggaagc

SEQ ID NO: 28821 - RNA, 22 nt, synthetic construct
  source 1..22: mol_type = other RNA
ggaaaaaacactgtctcaatat

SEQ ID NO: 28822 - RNA, 22 nt, synthetic construct
  source 1..22: mol_type = other RNA
ggaaaaacatttgcatggttat

SEQ ID NO: 28823 - RNA, 22 nt, synthetic construct
  source 1..22: mol_type = other RNA
ggaaaaagcactctgaatggtg

SEQ ID NO: 28824 - RNA, 22 nt, synthetic construct
  source 1..22: mol_type = other RNA
ggaaaaaggtaactaagcaaga

SEQ ID NO: 28825 - RNA, 22 nt, synthetic construct
  source 1..22: mol_type = other RNA
ggaaaagtctggagtatttcct

SEQ ID NO: 28826 - RNA, 22 nt, synthetic construct
  source 1..22: mol_type = other RNA
ggaaaagtgctaattaccatga

SEQ ID NO: 28827 - RNA, 22 nt, synthetic construct
  source 1..22: mol_type = other RNA
ggaaaatattgcatgtgatgca

SEQ ID NO: 28828 - RNA, 22 nt, synthetic construct
  source 1..22: mol_type = other RNA
ggaaacaagacccaaaacttgc

SEQ ID NO: 28829 - RNA, 22 nt, synthetic construct
  source 1..22: mol_type = other RNA
ggaaacacaatctggataatat

SEQ ID NO: 28830 - RNA, 22 nt, synthetic construct
  source 1..22: mol_type = other RNA
ggaaatactccagacttttcct

SEQ ID NO: 28831 - RNA, 22 nt, synthetic construct
  source 1..22: mol_type = other RNA
ggaaatcatattgagtcttgac

SEQ ID NO: 28832 - RNA, 22 nt, synthetic construct
  source 1..22: mol_type = other RNA
ggaaattccaacatgcctgggg

SEQ ID NO: 28833 - RNA, 22 nt, synthetic construct
  source 1..22: mol_type = other RNA
ggaacacacacatggtgaactc

SEQ ID NO: 28834 - RNA, 22 nt, synthetic construct
  source 1..22: mol_type = other RNA
ggaacaggatagaaccaaccat

SEQ ID NO: 28835 - RNA, 22 nt, synthetic construct
  source 1..22: mol_type = other RNA
ggaacaggtatttagcattgca

SEQ ID NO: 28836 - RNA, 22 nt, synthetic construct
  source 1..22: mol_type = other RNA
ggaacagtcattgtccctgcag

SEQ ID NO: 28837 - RNA, 22 nt, synthetic construct
  source 1..22: mol_type = other RNA
ggaaccacaaagctagcgtctg

SEQ ID NO: 28838 - RNA, 22 nt, synthetic construct
  source 1..22: mol_type = other RNA
ggaacctgaacagaattcttca

SEQ ID NO: 28839 - RNA, 22 nt, synthetic construct
  source 1..22: mol_type = other RNA
ggaacctggatgcaagccacat

SEQ ID NO: 28840 - RNA, 22 nt, synthetic construct
  source 1..22: mol_type = other RNA
ggaacctgtggaagaggaggag

SEQ ID NO: 28841 - RNA, 22 nt, synthetic construct
  source 1..22: mol_type = other RNA
ggaactggagatgttggtccac

SEQ ID NO: 28842 - RNA, 22 nt, synthetic construct
  source 1..22: mol_type = other RNA
ggaagaatgttttcatggtgaa

SEQ ID NO: 28843 - RNA, 22 nt, synthetic construct
  source 1..22: mol_type = other RNA
ggaagaggaggagggggagaaa

SEQ ID NO: 28844 - RNA, 22 nt, synthetic construct
  source 1..22: mol_type = other RNA
ggaagaggcagaaactgtagca

SEQ ID NO: 28845 - RNA, 22 nt, synthetic construct
  source 1..22: mol_type = other RNA
ggaagccagaatagtcgtgtga

SEQ ID NO: 28846 - RNA, 22 nt, synthetic construct
  source 1..22: mol_type = other RNA
ggaagcccactgcctgagagag

SEQ ID NO: 28847 - RNA, 22 nt, synthetic construct
  source 1..22: mol_type = other RNA
ggaagctgaggaacctgtggaa

SEQ ID NO: 28848 - RNA, 22 nt, synthetic construct
  source 1..22: mol_type = other RNA
ggaaggtgactctataaaatta

SEQ ID NO: 28849 - RNA, 22 nt, synthetic construct
  source 1..22: mol_type = other RNA
ggaaggtggtgcctcaggttta

SEQ ID NO: 28850 - RNA, 22 nt, synthetic construct
  source 1..22: mol_type = other RNA
ggaagtacagaatataaatcgt

SEQ ID NO: 28851 - RNA, 22 nt, synthetic construct
  source 1..22: mol_type = other RNA
ggaagtcacactcagacccctc

SEQ ID NO: 28852 - RNA, 22 nt, synthetic construct
  source 1..22: mol_type = other RNA
ggaagtgaaaatagagggtaaa

SEQ ID NO: 28853 - RNA, 22 nt, synthetic construct
  source 1..22: mol_type = other RNA
ggaataaaacgcacagttagtg

SEQ ID NO: 28854 - RNA, 22 nt, synthetic construct
  source 1..22: mol_type = other RNA
ggaataccctctactttcttgt

SEQ ID NO: 28855 - RNA, 22 nt, synthetic construct
  source 1..22: mol_type = other RNA
ggaataccctgtatgaagggaa

SEQ ID NO: 28856 - RNA, 22 nt, synthetic construct
  source 1..22: mol_type = other RNA
ggaatcccatctaaaacgtaat

SEQ ID NO: 28857 - RNA, 22 nt, synthetic construct
  source 1..22: mol_type = other RNA
ggaatccttagtgaacactgag

SEQ ID NO: 28858 - RNA, 22 nt, synthetic construct
  source 1..22: mol_type = other RNA
ggaatctgctctttgttgaaaa

SEQ ID NO: 28859 - RNA, 22 nt, synthetic construct
  source 1..22: mol_type = other RNA
ggaatgacatacagactgcagg

SEQ ID NO: 28860 - RNA, 22 nt, synthetic construct
  source 1..22: mol_type = other RNA
ggaatggacttagtctgttgcc

SEQ ID NO: 28861 - RNA, 22 nt, synthetic construct
  source 1..22: mol_type = other RNA
ggaattgatctgccctgaggta

SEQ ID NO: 28862 - RNA, 22 nt, synthetic construct
  source 1..22: mol_type = other RNA
ggaatttccagtgtattgtttg

SEQ ID NO: 28863 - RNA, 22 nt, synthetic construct
  source 1..22: mol_type = other RNA
ggaatttctacgatttatattc

SEQ ID NO: 28864 - RNA, 22 nt, synthetic construct
  source 1..22: mol_type = other RNA
ggacaactcattagtagcctga

SEQ ID NO: 28865 - RNA, 22 nt, synthetic construct
  source 1..22: mol_type = other RNA
ggacaactgccagcagttgatg

SEQ ID NO: 28866 - RNA, 22 nt, synthetic construct
  source 1..22: mol_type = other RNA
ggacaatgactgttccattgtg

SEQ ID NO: 28867 - RNA, 22 nt, synthetic construct
  source 1..22: mol_type = other RNA
ggacactcaaaagcatgctgct

SEQ ID NO: 28868 - RNA, 22 nt, synthetic construct
  source 1..22: mol_type = other RNA
ggacataagtttttcagtttgg

SEQ ID NO: 28869 - RNA, 22 nt, synthetic construct
  source 1..22: mol_type = other RNA
ggacattatgagtctcgaactc

SEQ ID NO: 28870 - RNA, 22 nt, synthetic construct
  source 1..22: mol_type = other RNA
ggaccaacatctccagttccaa

SEQ ID NO: 28871 - RNA, 22 nt, synthetic construct
  source 1..22: mol_type = other RNA
ggactcacacgactattctggc

SEQ ID NO: 28872 - RNA, 22 nt, synthetic construct
  source 1..22: mol_type = other RNA
ggactctgggaaggtggtgcct

SEQ ID NO: 28873 - RNA, 22 nt, synthetic construct
  source 1..22: mol_type = other RNA
ggactgcccttgattcatttca

SEQ ID NO: 28874 - RNA, 22 nt, synthetic construct
  source 1..22: mol_type = other RNA
ggactggaggaagtacagaata

SEQ ID NO: 28875 - RNA, 22 nt, synthetic construct
  source 1..22: mol_type = other RNA
ggacttagtctgttgccctcaa

SEQ ID NO: 28876 - RNA, 22 nt, synthetic construct
  source 1..22: mol_type = other RNA
ggagaaagaagcaattgtgatg

SEQ ID NO: 28877 - RNA, 22 nt, synthetic construct
  source 1..22: mol_type = other RNA
ggagaaagacgtaacttcgggg

SEQ ID NO: 28878 - RNA, 22 nt, synthetic construct
  source 1..22: mol_type = other RNA
ggagaagggctgcatacatgtg

SEQ ID NO: 28879 - RNA, 22 nt, synthetic construct
  source 1..22: mol_type = other RNA
ggagaagtgcacctggtgtgag

SEQ ID NO: 28880 - RNA, 22 nt, synthetic construct
  source 1..22: mol_type = other RNA
ggagacaccaagtggcactctt

SEQ ID NO: 28881 - RNA, 22 nt, synthetic construct
  source 1..22: mol_type = other RNA
ggagacatttggttgactgctt

SEQ ID NO: 28882 - RNA, 22 nt, synthetic construct
  source 1..22: mol_type = other RNA
ggagagattgggttgatactga

SEQ ID NO: 28883 - RNA, 22 nt, synthetic construct
  source 1..22: mol_type = other RNA
ggagagctacaggacaactgcc

SEQ ID NO: 28884 - RNA, 22 nt, synthetic construct
  source 1..22: mol_type = other RNA
ggagatgggcatatctcaaaaa

SEQ ID NO: 28885 - RNA, 22 nt, synthetic construct
  source 1..22: mol_type = other RNA
ggagatgtgaactctgggatgg

SEQ ID NO: 28886 - RNA, 22 nt, synthetic construct
  source 1..22: mol_type = other RNA
ggagatgttggtccactgtacc

SEQ ID NO: 28887 - RNA, 22 nt, synthetic construct
  source 1..22: mol_type = other RNA
ggagcaaacacgagatcttgtg

SEQ ID NO: 28888 - RNA, 22 nt, synthetic construct
  source 1..22: mol_type = other RNA
ggagcacaagtcacaaatgtac

SEQ ID NO: 28889 - RNA, 22 nt, synthetic construct
  source 1..22: mol_type = other RNA
ggagcagaagtcacaacaagct

SEQ ID NO: 28890 - RNA, 22 nt, synthetic construct
  source 1..22: mol_type = other RNA
ggagcagcatctgaagcagttt

SEQ ID NO: 28891 - RNA, 22 nt, synthetic construct
  source 1..22: mol_type = other RNA
ggagcccagagagagaaggttc

SEQ ID NO: 28892 - RNA, 22 nt, synthetic construct
  source 1..22: mol_type = other RNA
ggagccccccaggcatgttgga

SEQ ID NO: 28893 - RNA, 22 nt, synthetic construct
  source 1..22: mol_type = other RNA
ggagcttgcaaattgctgctgg

SEQ ID NO: 28894 - RNA, 22 nt, synthetic construct
  source 1..22: mol_type = other RNA
ggagctttgtagccagaggttc

SEQ ID NO: 28895 - RNA, 22 nt, synthetic construct
  source 1..22: mol_type = other RNA
ggaggaagtacagaatataaat

SEQ ID NO: 28896 - RNA, 22 nt, synthetic construct
  source 1..22: mol_type = other RNA
ggaggaagtcacactcagaccc

SEQ ID NO: 28897 - RNA, 22 nt, synthetic construct
  source 1..22: mol_type = other RNA
ggaggaataaaacgcacagtta

SEQ ID NO: 28898 - RNA, 22 nt, synthetic construct
  source 1..22: mol_type = other RNA
ggaggagggggagaaagaagca

SEQ ID NO: 28899 - RNA, 22 nt, synthetic construct
  source 1..22: mol_type = other RNA
ggaggcagctcagagttagagg

SEQ ID NO: 28900 - RNA, 22 nt, synthetic construct
  source 1..22: mol_type = other RNA
ggaggggaaaagtgctaattac

SEQ ID NO: 28901 - RNA, 22 nt, synthetic construct
  source 1..22: mol_type = other RNA
ggagggggagaaagaagcaatt

SEQ ID NO: 28902 - RNA, 22 nt, synthetic construct
  source 1..22: mol_type = other RNA
ggaggggtctgagtgtgacttc

SEQ ID NO: 28903 - RNA, 22 nt, synthetic construct
  source 1..22: mol_type = other RNA
ggaggtcatttgattggagaga

SEQ ID NO: 28904 - RNA, 22 nt, synthetic construct
  source 1..22: mol_type = other RNA
ggaggtgatggtatcaggaatg

SEQ ID NO: 28905 - RNA, 22 nt, synthetic construct
  source 1..22: mol_type = other RNA
ggagtatctagtaatttggaag

SEQ ID NO: 28906 - RNA, 22 nt, synthetic construct
  source 1..22: mol_type = other RNA
ggagtatttcctctttattctt

SEQ ID NO: 28907 - RNA, 22 nt, synthetic construct
  source 1..22: mol_type = other RNA
ggagttcaccatgtgtgtgttc

SEQ ID NO: 28908 - RNA, 22 nt, synthetic construct
  source 1..22: mol_type = other RNA
ggagttttagaagaacaccacc

SEQ ID NO: 28909 - RNA, 22 nt, synthetic construct
  source 1..22: mol_type = other RNA
ggataatattgagacagtgttt

SEQ ID NO: 28910 - RNA, 22 nt, synthetic construct
  source 1..22: mol_type = other RNA
ggatacacctgtcaagactcaa

SEQ ID NO: 28911 - RNA, 22 nt, synthetic construct
  source 1..22: mol_type = other RNA
ggatagaaccaaccatgttgag

SEQ ID NO: 28912 - RNA, 22 nt, synthetic construct
  source 1..22: mol_type = other RNA
ggatataaaaatagaaaccaag

SEQ ID NO: 28913 - RNA, 22 nt, synthetic construct
  source 1..22: mol_type = other RNA
ggatcacattatttggaaaata

SEQ ID NO: 28914 - RNA, 22 nt, synthetic construct
  source 1..22: mol_type = other RNA
ggatcattctttggccagacta

SEQ ID NO: 28915 - RNA, 22 nt, synthetic construct
  source 1..22: mol_type = other RNA
ggatgagctctctcaggcagtg

SEQ ID NO: 28916 - RNA, 22 nt, synthetic construct
  source 1..22: mol_type = other RNA
ggatgcaagccacatgcctgta

SEQ ID NO: 28917 - RNA, 22 nt, synthetic construct
  source 1..22: mol_type = other RNA
ggatggattgaattgaaggccc

SEQ ID NO: 28918 - RNA, 22 nt, synthetic construct
  source 1..22: mol_type = other RNA
ggatggccccgaagcaagcctg

SEQ ID NO: 28919 - RNA, 22 nt, synthetic construct
  source 1..22: mol_type = other RNA
ggatggttgtgtttgtgctgcc

SEQ ID NO: 28920 - RNA, 22 nt, synthetic construct
  source 1..22: mol_type = other RNA
ggatgtgtagtctgttctttat

SEQ ID NO: 28921 - RNA, 22 nt, synthetic construct
  source 1..22: mol_type = other RNA
ggatgttattttctgcaggaga

SEQ ID NO: 28922 - RNA, 22 nt, synthetic construct
  source 1..22: mol_type = other RNA
ggattaggactctgggaaggtg

SEQ ID NO: 28923 - RNA, 22 nt, synthetic construct
  source 1..22: mol_type = other RNA
ggattccgcttggtgaaaacga

SEQ ID NO: 28924 - RNA, 22 nt, synthetic construct
  source 1..22: mol_type = other RNA
ggattccttttctgccactacc

SEQ ID NO: 28925 - RNA, 22 nt, synthetic construct
  source 1..22: mol_type = other RNA
ggattctcttgcttagttacct

SEQ ID NO: 28926 - RNA, 22 nt, synthetic construct
  source 1..22: mol_type = other RNA
ggattgaattgaaggcccctcg

SEQ ID NO: 28927 - RNA, 22 nt, synthetic construct
  source 1..22: mol_type = other RNA
ggatttctttcttggcttaccc

SEQ ID NO: 28928 - RNA, 22 nt, synthetic construct
  source 1..22: mol_type = other RNA
ggattttcaggcccactgcagt

SEQ ID NO: 28929 - RNA, 22 nt, synthetic construct
  source 1..22: mol_type = other RNA
ggcaaatgggaggtgatggtat

SEQ ID NO: 28930 - RNA, 22 nt, synthetic construct
  source 1..22: mol_type = other RNA
ggcaacagactaagtccattcc

SEQ ID NO: 28931 - RNA, 22 nt, synthetic construct
  source 1..22: mol_type = other RNA
ggcaagactcagtttggggttg

SEQ ID NO: 28932 - RNA, 22 nt, synthetic construct
  source 1..22: mol_type = other RNA
ggcaagcttacacccagaaaac

SEQ ID NO: 28933 - RNA, 22 nt, synthetic construct
  source 1..22: mol_type = other RNA
ggcacaagatctcgtgtttgct

SEQ ID NO: 28934 - RNA, 22 nt, synthetic construct
  source 1..22: mol_type = other RNA
ggcacaggaaaaacatttgcat

SEQ ID NO: 28935 - RNA, 22 nt, synthetic construct
  source 1..22: mol_type = other RNA
ggcaccaccttcccagagtcct

SEQ ID NO: 28936 - RNA, 22 nt, synthetic construct
  source 1..22: mol_type = other RNA
ggcactagatttcattttcaac

SEQ ID NO: 28937 - RNA, 22 nt, synthetic construct
  source 1..22: mol_type = other RNA
ggcactctttcaaaagttatta

SEQ ID NO: 28938 - RNA, 22 nt, synthetic construct
  source 1..22: mol_type = other RNA
ggcacttacctacacatctgca

SEQ ID NO: 28939 - RNA, 22 nt, synthetic construct
  source 1..22: mol_type = other RNA
ggcagaaaaggaatccttagtg

SEQ ID NO: 28940 - RNA, 22 nt, synthetic construct
  source 1..22: mol_type = other RNA
ggcagaaactgtagcaccatta

SEQ ID NO: 28941 - RNA, 22 nt, synthetic construct
  source 1..22: mol_type = other RNA
ggcagatcaattccgcacagac

SEQ ID NO: 28942 - RNA, 22 nt, synthetic construct
  source 1..22: mol_type = other RNA
ggcagcacaaacacaaccatcc

SEQ ID NO: 28943 - RNA, 22 nt, synthetic construct
  source 1..22: mol_type = other RNA
ggcagccttgtggatggccccg

SEQ ID NO: 28944 - RNA, 22 nt, synthetic construct
  source 1..22: mol_type = other RNA
ggcagctcagagttagaggtct

SEQ ID NO: 28945 - RNA, 22 nt, synthetic construct
  source 1..22: mol_type = other RNA
ggcagctctgaacggtatttaa

SEQ ID NO: 28946 - RNA, 22 nt, synthetic construct
  source 1..22: mol_type = other RNA
ggcagtcccaaggtacagtgga

SEQ ID NO: 28947 - RNA, 22 nt, synthetic construct
  source 1..22: mol_type = other RNA
ggcagtgatgcctcattacgtt

SEQ ID NO: 28948 - RNA, 22 nt, synthetic construct
  source 1..22: mol_type = other RNA
ggcagtgctaatgcctaatggt

SEQ ID NO: 28949 - RNA, 22 nt, synthetic construct
  source 1..22: mol_type = other RNA
ggcagtgggcttccattctgga

SEQ ID NO: 28950 - RNA, 22 nt, synthetic construct
  source 1..22: mol_type = other RNA
ggcagttgtcctgtagctctcc

SEQ ID NO: 28951 - RNA, 22 nt, synthetic construct
  source 1..22: mol_type = other RNA
ggcatatctcaaaaactgattt

SEQ ID NO: 28952 - RNA, 22 nt, synthetic construct
  source 1..22: mol_type = other RNA
ggcatcactgccatcaattctt

SEQ ID NO: 28953 - RNA, 22 nt, synthetic construct
  source 1..22: mol_type = other RNA
ggcatctcttacagaagcaaga

SEQ ID NO: 28954 - RNA, 22 nt, synthetic construct
  source 1..22: mol_type = other RNA
ggcatgtggcttgcatccaggt

SEQ ID NO: 28955 - RNA, 22 nt, synthetic construct
  source 1..22: mol_type = other RNA
ggcatgttggaatttccagtgt

SEQ ID NO: 28956 - RNA, 22 nt, synthetic construct
  source 1..22: mol_type = other RNA
ggcattagcactgccttgtttt

SEQ ID NO: 28957 - RNA, 22 nt, synthetic construct
  source 1..22: mol_type = other RNA
ggcattatcagcatcatcagca

SEQ ID NO: 28958 - RNA, 22 nt, synthetic construct
  source 1..22: mol_type = other RNA
ggcatttatgtgagatgtggtt

SEQ ID NO: 28959 - RNA, 22 nt, synthetic construct
  source 1..22: mol_type = other RNA
ggccaaagaatgatccttctct

SEQ ID NO: 28960 - RNA, 22 nt, synthetic construct
  source 1..22: mol_type = other RNA
ggccaattaaggtggaacctgg

SEQ ID NO: 28961 - RNA, 22 nt, synthetic construct
  source 1..22: mol_type = other RNA
ggccagactaaagtggaagaat

SEQ ID NO: 28962 - RNA, 22 nt, synthetic construct
  source 1..22: mol_type = other RNA
ggccagtcacagttttgactag

SEQ ID NO: 28963 - RNA, 22 nt, synthetic construct
  source 1..22: mol_type = other RNA
ggcccactgcagttatgtgttg

SEQ ID NO: 28964 - RNA, 22 nt, synthetic construct
  source 1..22: mol_type = other RNA
ggccccgaagcaagcctgatgg

SEQ ID NO: 28965 - RNA, 22 nt, synthetic construct
  source 1..22: mol_type = other RNA
ggcccctcgttttcaccaagcg

SEQ ID NO: 28966 - RNA, 22 nt, synthetic construct
  source 1..22: mol_type = other RNA
ggccctgacatttcaactttta

SEQ ID NO: 28967 - RNA, 22 nt, synthetic construct
  source 1..22: mol_type = other RNA
ggcctcactcaccactgcagct

SEQ ID NO: 28968 - RNA, 22 nt, synthetic construct
  source 1..22: mol_type = other RNA
ggcctcagaataattgtgtgaa

SEQ ID NO: 28969 - RNA, 22 nt, synthetic construct
  source 1..22: mol_type = other RNA
ggcctgaaaatccagagcttca

SEQ ID NO: 28970 - RNA, 22 nt, synthetic construct
  source 1..22: mol_type = other RNA
ggcctgtgatgctgatgatgct

SEQ ID NO: 28971 - RNA, 22 nt, synthetic construct
  source 1..22: mol_type = other RNA
ggcctgtgcatctgactatggc

SEQ ID NO: 28972 - RNA, 22 nt, synthetic construct
  source 1..22: mol_type = other RNA
ggccttcaattcaatccatcct

SEQ ID NO: 28973 - RNA, 22 nt, synthetic construct
  source 1..22: mol_type = other RNA
ggcctttcagaaagcatcggag

SEQ ID NO: 28974 - RNA, 22 nt, synthetic construct
  source 1..22: mol_type = other RNA
ggcgtgaaactgcttcagatgc

SEQ ID NO: 28975 - RNA, 22 nt, synthetic construct
  source 1..22: mol_type = other RNA
ggctaatggagaaagacgtaac

SEQ ID NO: 28976 - RNA, 22 nt, synthetic construct
  source 1..22: mol_type = other RNA
ggctacaaagctccagaatgga

SEQ ID NO: 28977 - RNA, 22 nt, synthetic construct
  source 1..22: mol_type = other RNA
ggctacagaactcacagattct

SEQ ID NO: 28978 - RNA, 22 nt, synthetic construct
  source 1..22: mol_type = other RNA
ggctactaatgagttgtcctgt

SEQ ID NO: 28979 - RNA, 22 nt, synthetic construct
  source 1..22: mol_type = other RNA
ggctatcaagttctgcagcagt

SEQ ID NO: 28980 - RNA, 22 nt, synthetic construct
  source 1..22: mol_type = other RNA
ggctcagtctctgaagcctgtt

SEQ ID NO: 28981 - RNA, 22 nt, synthetic construct
  source 1..22: mol_type = other RNA
ggctcccaaggcaagcttacac

SEQ ID NO: 28982 - RNA, 22 nt, synthetic construct
  source 1..22: mol_type = other RNA
ggctccttcagatcaagaaatt

SEQ ID NO: 28983 - RNA, 22 nt, synthetic construct
  source 1..22: mol_type = other RNA
ggctcttactctcaaatcacag

SEQ ID NO: 28984 - RNA, 22 nt, synthetic construct
  source 1..22: mol_type = other RNA
ggctgcatacatgtgtagatgg

SEQ ID NO: 28985 - RNA, 22 nt, synthetic construct
  source 1..22: mol_type = other RNA
ggcttaccccgaagttacgtct

SEQ ID NO: 28986 - RNA, 22 nt, synthetic construct
  source 1..22: mol_type = other RNA
ggcttatgttgcaaaaggtgtg

SEQ ID NO: 28987 - RNA, 22 nt, synthetic construct
  source 1..22: mol_type = other RNA
ggcttcagagactgagccattt

SEQ ID NO: 28988 - RNA, 22 nt, synthetic construct
  source 1..22: mol_type = other RNA
ggcttccattctggagctttgt

SEQ ID NO: 28989 - RNA, 22 nt, synthetic construct
  source 1..22: mol_type = other RNA
ggcttcccttcatacagggtat

SEQ ID NO: 28990 - RNA, 22 nt, synthetic construct
  source 1..22: mol_type = other RNA
ggcttgcatccaggttccacct

SEQ ID NO: 28991 - RNA, 22 nt, synthetic construct
  source 1..22: mol_type = other RNA
ggcttgcttcggggccatccac

SEQ ID NO: 28992 - RNA, 22 nt, synthetic construct
  source 1..22: mol_type = other RNA
ggctttggaggcagctcagagt

SEQ ID NO: 28993 - RNA, 22 nt, synthetic construct
  source 1..22: mol_type = other RNA
gggaaaagtgctaattaccatg

SEQ ID NO: 28994 - RNA, 22 nt, synthetic construct
  source 1..22: mol_type = other RNA
gggaaatcatattgagtcttga

SEQ ID NO: 28995 - RNA, 22 nt, synthetic construct
  source 1..22: mol_type = other RNA
gggaaccacaaagctagcgtct

SEQ ID NO: 28996 - RNA, 22 nt, synthetic construct
  source 1..22: mol_type = other RNA
gggaagccagaatagtcgtgtg

SEQ ID NO: 28997 - RNA, 22 nt, synthetic construct
  source 1..22: mol_type = other RNA
gggaaggtggtgcctcaggttt

SEQ ID NO: 28998 - RNA, 22 nt, synthetic construct
  source 1..22: mol_type = other RNA
gggaagtgaaaatagagggtaa

SEQ ID NO: 28999 - RNA, 22 nt, synthetic construct
  source 1..22: mol_type = other RNA
gggaatctgctctttgttgaaa

SEQ ID NO: 29000 - RNA, 22 nt, synthetic construct
  source 1..22: mol_type = other RNA
gggaatttctacgatttatatt

SEQ ID NO: 29001 - RNA, 22 nt, synthetic construct
  source 1..22: mol_type = other RNA
gggacaatgactgttccattgt

SEQ ID NO: 29002 - RNA, 22 nt, synthetic construct
  source 1..22: mol_type = other RNA
gggacataagtttttcagtttg

SEQ ID NO: 29003 - RNA, 22 nt, synthetic construct
  source 1..22: mol_type = other RNA
gggactgcccttgattcatttc

SEQ ID NO: 29004 - RNA, 22 nt, synthetic construct
  source 1..22: mol_type = other RNA
gggactggaggaagtacagaat

SEQ ID NO: 29005 - RNA, 22 nt, synthetic construct
  source 1..22: mol_type = other RNA
gggagaaagaagcaattgtgat

SEQ ID NO: 29006 - RNA, 22 nt, synthetic construct
  source 1..22: mol_type = other RNA
gggagatgtgaactctgggatg

SEQ ID NO: 29007 - RNA, 22 nt, synthetic construct
  source 1..22: mol_type = other RNA
gggagccccccaggcatgttgg

SEQ ID NO: 29008 - RNA, 22 nt, synthetic construct
  source 1..22: mol_type = other RNA
gggaggaagtcacactcagacc

SEQ ID NO: 29009 - RNA, 22 nt, synthetic construct
  source 1..22: mol_type = other RNA
gggaggggtctgagtgtgactt

SEQ ID NO: 29010 - RNA, 22 nt, synthetic construct
  source 1..22: mol_type = other RNA
gggaggtgatggtatcaggaat

SEQ ID NO: 29011 - RNA, 22 nt, synthetic construct
  source 1..22: mol_type = other RNA
gggatataaaaatagaaaccaa

SEQ ID NO: 29012 - RNA, 22 nt, synthetic construct
  source 1..22: mol_type = other RNA
gggatcacattatttggaaaat

SEQ ID NO: 29013 - RNA, 22 nt, synthetic construct
  source 1..22: mol_type = other RNA
gggatggttgtgtttgtgctgc

SEQ ID NO: 29014 - RNA, 22 nt, synthetic construct
  source 1..22: mol_type = other RNA
gggattccgcttggtgaaaacg

SEQ ID NO: 29015 - RNA, 22 nt, synthetic construct
  source 1..22: mol_type = other RNA
gggcaacagactaagtccattc

SEQ ID NO: 29016 - RNA, 22 nt, synthetic construct
  source 1..22: mol_type = other RNA
gggcacaagatctcgtgtttgc

SEQ ID NO: 29017 - RNA, 22 nt, synthetic construct
  source 1..22: mol_type = other RNA
gggcagatcaattccgcacaga

SEQ ID NO: 29018 - RNA, 22 nt, synthetic construct
  source 1..22: mol_type = other RNA
gggcagccttgtggatggcccc

SEQ ID NO: 29019 - RNA, 22 nt, synthetic construct
  source 1..22: mol_type = other RNA
gggcagtcccaaggtacagtgg

SEQ ID NO: 29020 - RNA, 22 nt, synthetic construct
  source 1..22: mol_type = other RNA
gggcatatctcaaaaactgatt

SEQ ID NO: 29021 - RNA, 22 nt, synthetic construct
  source 1..22: mol_type = other RNA
gggccagtcacagttttgacta

SEQ ID NO: 29022 - RNA, 22 nt, synthetic construct
  source 1..22: mol_type = other RNA
gggcctgaaaatccagagcttc

SEQ ID NO: 29023 - RNA, 22 nt, synthetic construct
  source 1..22: mol_type = other RNA
gggccttcaattcaatccatcc

SEQ ID NO: 29024 - RNA, 22 nt, synthetic construct
  source 1..22: mol_type = other RNA
gggctacagaactcacagattc

SEQ ID NO: 29025 - RNA, 22 nt, synthetic construct
  source 1..22: mol_type = other RNA
gggctcccaaggcaagcttaca

SEQ ID NO: 29026 - RNA, 22 nt, synthetic construct
  source 1..22: mol_type = other RNA
gggctccttcagatcaagaaat

SEQ ID NO: 29027 - RNA, 22 nt, synthetic construct
  source 1..22: mol_type = other RNA
gggctgcatacatgtgtagatg

SEQ ID NO: 29028 - RNA, 22 nt, synthetic construct
  source 1..22: mol_type = other RNA
gggcttccattctggagctttg

SEQ ID NO: 29029 - RNA, 22 nt, synthetic construct
  source 1..22: mol_type = other RNA
ggggaaaagtgctaattaccat

SEQ ID NO: 29030 - RNA, 22 nt, synthetic construct
  source 1..22: mol_type = other RNA
ggggaatttctacgatttatat

SEQ ID NO: 29031 - RNA, 22 nt, synthetic construct
  source 1..22: mol_type = other RNA
ggggacataagtttttcagttt

SEQ ID NO: 29032 - RNA, 22 nt, synthetic construct
  source 1..22: mol_type = other RNA
ggggagaaagaagcaattgtga

SEQ ID NO: 29033 - RNA, 22 nt, synthetic construct
  source 1..22: mol_type = other RNA
ggggaggggtctgagtgtgact

SEQ ID NO: 29034 - RNA, 22 nt, synthetic construct
  source 1..22: mol_type = other RNA
ggggcacaagatctcgtgtttg

SEQ ID NO: 29035 - RNA, 22 nt, synthetic construct
  source 1..22: mol_type = other RNA
ggggccttcaattcaatccatc

SEQ ID NO: 29036 - RNA, 22 nt, synthetic construct
  source 1..22: mol_type = other RNA
ggggctcccaaggcaagcttac

SEQ ID NO: 29037 - RNA, 22 nt, synthetic construct
  source 1..22: mol_type = other RNA
gggggagaaagaagcaattgtg

SEQ ID NO: 29038 - RNA, 22 nt, synthetic construct
  source 1..22: mol_type = other RNA
gggggcacaagatctcgtgttt

SEQ ID NO: 29039 - RNA, 22 nt, synthetic construct
  source 1..22: mol_type = other RNA
gggggctcccaaggcaagctta

SEQ ID NO: 29040 - RNA, 22 nt, synthetic construct
  source 1..22: mol_type = other RNA
ggggggctcccaaggcaagctt

SEQ ID NO: 29041 - RNA, 22 nt, synthetic construct
  source 1..22: mol_type = other RNA
gggggtgaggaaaagtctggag

SEQ ID NO: 29042 - RNA, 22 nt, synthetic construct
  source 1..22: mol_type = other RNA
ggggtaagccaagaaagaaatc

SEQ ID NO: 29043 - RNA, 22 nt, synthetic construct
  source 1..22: mol_type = other RNA
ggggtagtggtggtgttcttct

SEQ ID NO: 29044 - RNA, 22 nt, synthetic construct
  source 1..22: mol_type = other RNA
ggggtctgagtgtgacttcctc

SEQ ID NO: 29045 - RNA, 22 nt, synthetic construct
  source 1..22: mol_type = other RNA
ggggtgaggaaaagtctggagt

SEQ ID NO: 29046 - RNA, 22 nt, synthetic construct
  source 1..22: mol_type = other RNA
ggggtgtggctatcaagttctg

SEQ ID NO: 29047 - RNA, 22 nt, synthetic construct
  source 1..22: mol_type = other RNA
ggggttgctgtgtttgctgctg

SEQ ID NO: 29048 - RNA, 22 nt, synthetic construct
  source 1..22: mol_type = other RNA
gggtaaacctgaggcaccacct

SEQ ID NO: 29049 - RNA, 22 nt, synthetic construct
  source 1..22: mol_type = other RNA
gggtaagccaagaaagaaatcc

SEQ ID NO: 29050 - RNA, 22 nt, synthetic construct
  source 1..22: mol_type = other RNA
gggtagtggtggtgttcttcta

SEQ ID NO: 29051 - RNA, 22 nt, synthetic construct
  source 1..22: mol_type = other RNA
gggtattccaagtgtttgcaaa

SEQ ID NO: 29052 - RNA, 22 nt, synthetic construct
  source 1..22: mol_type = other RNA
gggtattccataataacttttg

SEQ ID NO: 29053 - RNA, 22 nt, synthetic construct
  source 1..22: mol_type = other RNA
gggtcgagacaaggagcaaaca

SEQ ID NO: 29054 - RNA, 22 nt, synthetic construct
  source 1..22: mol_type = other RNA
gggtctgagtgtgacttcctcc

SEQ ID NO: 29055 - RNA, 22 nt, synthetic construct
  source 1..22: mol_type = other RNA
gggtcttgtttcctgcaaaaag

SEQ ID NO: 29056 - RNA, 22 nt, synthetic construct
  source 1..22: mol_type = other RNA
gggtgaggaaaagtctggagta

SEQ ID NO: 29057 - RNA, 22 nt, synthetic construct
  source 1..22: mol_type = other RNA
gggtgagtgatctcacaggaca

SEQ ID NO: 29058 - RNA, 22 nt, synthetic construct
  source 1..22: mol_type = other RNA
gggtgtaagcttgccttgggag

SEQ ID NO: 29059 - RNA, 22 nt, synthetic construct
  source 1..22: mol_type = other RNA
gggtgtggctatcaagttctgc

SEQ ID NO: 29060 - RNA, 22 nt, synthetic construct
  source 1..22: mol_type = other RNA
gggttatgcttgaggtgttctg

SEQ ID NO: 29061 - RNA, 22 nt, synthetic construct
  source 1..22: mol_type = other RNA
gggttgatactgaagaattgat

SEQ ID NO: 29062 - RNA, 22 nt, synthetic construct
  source 1..22: mol_type = other RNA
gggttgctgtgtttgctgctgt

SEQ ID NO: 29063 - RNA, 22 nt, synthetic construct
  source 1..22: mol_type = other RNA
gggtttttggaactggagatgt

SEQ ID NO: 29064 - RNA, 22 nt, synthetic construct
  source 1..22: mol_type = other RNA
ggtaaacctgaggcaccacctt

SEQ ID NO: 29065 - RNA, 22 nt, synthetic construct
  source 1..22: mol_type = other RNA
ggtaaatggtctgttttggaga

SEQ ID NO: 29066 - RNA, 22 nt, synthetic construct
  source 1..22: mol_type = other RNA
ggtaactaagcaagagaatcca

SEQ ID NO: 29067 - RNA, 22 nt, synthetic construct
  source 1..22: mol_type = other RNA
ggtaagccaagaaagaaatcca

SEQ ID NO: 29068 - RNA, 22 nt, synthetic construct
  source 1..22: mol_type = other RNA
ggtaagtgccagaaatgtactg

SEQ ID NO: 29069 - RNA, 22 nt, synthetic construct
  source 1..22: mol_type = other RNA
ggtaattagcacttttcccctc

SEQ ID NO: 29070 - RNA, 22 nt, synthetic construct
  source 1..22: mol_type = other RNA
ggtacagtggaccaacatctcc

SEQ ID NO: 29071 - RNA, 22 nt, synthetic construct
  source 1..22: mol_type = other RNA
ggtacatttgtgacttgtgctc

SEQ ID NO: 29072 - RNA, 22 nt, synthetic construct
  source 1..22: mol_type = other RNA
ggtacttgatacataaccatgc

SEQ ID NO: 29073 - RNA, 22 nt, synthetic construct
  source 1..22: mol_type = other RNA
ggtagcagtggagagctacagg

SEQ ID NO: 29074 - RNA, 22 nt, synthetic construct
  source 1..22: mol_type = other RNA
ggtagtggcagaaaaggaatcc

SEQ ID NO: 29075 - RNA, 22 nt, synthetic construct
  source 1..22: mol_type = other RNA
ggtagtggtggtgttcttctaa

SEQ ID NO: 29076 - RNA, 22 nt, synthetic construct
  source 1..22: mol_type = other RNA
ggtatcaggaatggacttagtc

SEQ ID NO: 29077 - RNA, 22 nt, synthetic construct
  source 1..22: mol_type = other RNA
ggtatgcgatgggtgagtgatc

SEQ ID NO: 29078 - RNA, 22 nt, synthetic construct
  source 1..22: mol_type = other RNA
ggtattccaagtgtttgcaaaa

SEQ ID NO: 29079 - RNA, 22 nt, synthetic construct
  source 1..22: mol_type = other RNA
ggtattccataataacttttga

SEQ ID NO: 29080 - RNA, 22 nt, synthetic construct
  source 1..22: mol_type = other RNA
ggtatttagcattgcagctagt

SEQ ID NO: 29081 - RNA, 22 nt, synthetic construct
  source 1..22: mol_type = other RNA
ggtcaaataacgacttggcgtg

SEQ ID NO: 29082 - RNA, 22 nt, synthetic construct
  source 1..22: mol_type = other RNA
ggtcaacaagctgcgcaacttg

SEQ ID NO: 29083 - RNA, 22 nt, synthetic construct
  source 1..22: mol_type = other RNA
ggtcaggcacaggaaaaacatt

SEQ ID NO: 29084 - RNA, 22 nt, synthetic construct
  source 1..22: mol_type = other RNA
ggtcatttgattggagagattg

SEQ ID NO: 29085 - RNA, 22 nt, synthetic construct
  source 1..22: mol_type = other RNA
ggtccactgtaccttgggactg

SEQ ID NO: 29086 - RNA, 22 nt, synthetic construct
  source 1..22: mol_type = other RNA
ggtcgagacaaggagcaaacac

SEQ ID NO: 29087 - RNA, 22 nt, synthetic construct
  source 1..22: mol_type = other RNA
ggtctcaatgatgctcttttgc

SEQ ID NO: 29088 - RNA, 22 nt, synthetic construct
  source 1..22: mol_type = other RNA
ggtctgactataaggggaattt

SEQ ID NO: 29089 - RNA, 22 nt, synthetic construct
  source 1..22: mol_type = other RNA
ggtctgagtgtgacttcctccc

SEQ ID NO: 29090 - RNA, 22 nt, synthetic construct
  source 1..22: mol_type = other RNA
ggtctgtgcggaattgatctgc

SEQ ID NO: 29091 - RNA, 22 nt, synthetic construct
  source 1..22: mol_type = other RNA
ggtctgttttggagaagtgcac

SEQ ID NO: 29092 - RNA, 22 nt, synthetic construct
  source 1..22: mol_type = other RNA
ggtcttgtttcaatttcttgat

SEQ ID NO: 29093 - RNA, 22 nt, synthetic construct
  source 1..22: mol_type = other RNA
ggtcttgtttcctgcaaaaagt

SEQ ID NO: 29094 - RNA, 22 nt, synthetic construct
  source 1..22: mol_type = other RNA
ggtcttgttttctcagaacaca

SEQ ID NO: 29095 - RNA, 22 nt, synthetic construct
  source 1..22: mol_type = other RNA
ggtgaaaacgaggggccttcaa

SEQ ID NO: 29096 - RNA, 22 nt, synthetic construct
  source 1..22: mol_type = other RNA
ggtgaaaatcagtattcaaaat

SEQ ID NO: 29097 - RNA, 22 nt, synthetic construct
  source 1..22: mol_type = other RNA
ggtgaaagcagtcaaccaaatg

SEQ ID NO: 29098 - RNA, 22 nt, synthetic construct
  source 1..22: mol_type = other RNA
ggtgaaatctttaactgcattt

SEQ ID NO: 29099 - RNA, 22 nt, synthetic construct
  source 1..22: mol_type = other RNA
ggtgaactcctggaaaaaacac

SEQ ID NO: 29100 - RNA, 22 nt, synthetic construct
  source 1..22: mol_type = other RNA
ggtgaagaattctgttcaggtt

SEQ ID NO: 29101 - RNA, 22 nt, synthetic construct
  source 1..22: mol_type = other RNA
ggtgactctataaaattattga

SEQ ID NO: 29102 - RNA, 22 nt, synthetic construct
  source 1..22: mol_type = other RNA
ggtgaggaaaagtctggagtat

SEQ ID NO: 29103 - RNA, 22 nt, synthetic construct
  source 1..22: mol_type = other RNA
ggtgagtgaggcctgtgatgct

SEQ ID NO: 29104 - RNA, 22 nt, synthetic construct
  source 1..22: mol_type = other RNA
ggtgagtgatctcacaggacaa

SEQ ID NO: 29105 - RNA, 22 nt, synthetic construct
  source 1..22: mol_type = other RNA
ggtgatggtatcaggaatggac

SEQ ID NO: 29106 - RNA, 22 nt, synthetic construct
  source 1..22: mol_type = other RNA
ggtgcacttctccaaaacagac

SEQ ID NO: 29107 - RNA, 22 nt, synthetic construct
  source 1..22: mol_type = other RNA
ggtgcagaaaaccacatctcac

SEQ ID NO: 29108 - RNA, 22 nt, synthetic construct
  source 1..22: mol_type = other RNA
ggtgcctcaggtttaccctcta

SEQ ID NO: 29109 - RNA, 22 nt, synthetic construct
  source 1..22: mol_type = other RNA
ggtgctacagtttctgcctctt

SEQ ID NO: 29110 - RNA, 22 nt, synthetic construct
  source 1..22: mol_type = other RNA
ggtgctgtgtgcatacaggcat

SEQ ID NO: 29111 - RNA, 22 nt, synthetic construct
  source 1..22: mol_type = other RNA
ggtgcttacttcaagcaaagct

SEQ ID NO: 29112 - RNA, 22 nt, synthetic construct
  source 1..22: mol_type = other RNA
ggtgctttcaagaacaggagca

SEQ ID NO: 29113 - RNA, 22 nt, synthetic construct
  source 1..22: mol_type = other RNA
ggtggaacctggatgcaagcca

SEQ ID NO: 29114 - RNA, 22 nt, synthetic construct
  source 1..22: mol_type = other RNA
ggtggagttttagaagaacacc

SEQ ID NO: 29115 - RNA, 22 nt, synthetic construct
  source 1..22: mol_type = other RNA
ggtggattctcttgcttagtta

SEQ ID NO: 29116 - RNA, 22 nt, synthetic construct
  source 1..22: mol_type = other RNA
ggtggcagctctgaacggtatt

SEQ ID NO: 29117 - RNA, 22 nt, synthetic construct
  source 1..22: mol_type = other RNA
ggtggcatctcttacagaagca

SEQ ID NO: 29118 - RNA, 22 nt, synthetic construct
  source 1..22: mol_type = other RNA
ggtgggttatgcttgaggtgtt

SEQ ID NO: 29119 - RNA, 22 nt, synthetic construct
  source 1..22: mol_type = other RNA
ggtggtgcctcaggtttaccct

SEQ ID NO: 29120 - RNA, 22 nt, synthetic construct
  source 1..22: mol_type = other RNA
ggtggtgctgtgtgcatacagg

SEQ ID NO: 29121 - RNA, 22 nt, synthetic construct
  source 1..22: mol_type = other RNA
ggtggtggtggtgtggtagtgg

SEQ ID NO: 29122 - RNA, 22 nt, synthetic construct
  source 1..22: mol_type = other RNA
ggtggtggtgtggtagtggcag

SEQ ID NO: 29123 - RNA, 22 nt, synthetic construct
  source 1..22: mol_type = other RNA
ggtggtgtggtagtggcagaaa

SEQ ID NO: 29124 - RNA, 22 nt, synthetic construct
  source 1..22: mol_type = other RNA
ggtggtgttcttctaaaactcc

SEQ ID NO: 29125 - RNA, 22 nt, synthetic construct
  source 1..22: mol_type = other RNA
ggtgtaagcttgccttgggagc

SEQ ID NO: 29126 - RNA, 22 nt, synthetic construct
  source 1..22: mol_type = other RNA
ggtgtctccatttacttctgga

SEQ ID NO: 29127 - RNA, 22 nt, synthetic construct
  source 1..22: mol_type = other RNA
ggtgtcttttctgaagaagttg

SEQ ID NO: 29128 - RNA, 22 nt, synthetic construct
  source 1..22: mol_type = other RNA
ggtgtgagggtttttggaactg

SEQ ID NO: 29129 - RNA, 22 nt, synthetic construct
  source 1..22: mol_type = other RNA
ggtgtgagtttgaaaatggctc

SEQ ID NO: 29130 - RNA, 22 nt, synthetic construct
  source 1..22: mol_type = other RNA
ggtgtggctatcaagttctgca

SEQ ID NO: 29131 - RNA, 22 nt, synthetic construct
  source 1..22: mol_type = other RNA
ggtgtggtagtggcagaaaagg

SEQ ID NO: 29132 - RNA, 22 nt, synthetic construct
  source 1..22: mol_type = other RNA
ggtgtgtattgtttgaacaaga

SEQ ID NO: 29133 - RNA, 22 nt, synthetic construct
  source 1..22: mol_type = other RNA
ggtgttctgacattggtcttgt

SEQ ID NO: 29134 - RNA, 22 nt, synthetic construct
  source 1..22: mol_type = other RNA
ggtgttcttctaaaactccacc

SEQ ID NO: 29135 - RNA, 22 nt, synthetic construct
  source 1..22: mol_type = other RNA
ggttatgcttgaggtgttctga

SEQ ID NO: 29136 - RNA, 22 nt, synthetic construct
  source 1..22: mol_type = other RNA
ggttatgtatcaagtacctttg

SEQ ID NO: 29137 - RNA, 22 nt, synthetic construct
  source 1..22: mol_type = other RNA
ggttcactaactgtgcgtttta

SEQ ID NO: 29138 - RNA, 22 nt, synthetic construct
  source 1..22: mol_type = other RNA
ggttccaccttaattggcctgt

SEQ ID NO: 29139 - RNA, 22 nt, synthetic construct
  source 1..22: mol_type = other RNA
ggttccagcagcaatttgcaag

SEQ ID NO: 29140 - RNA, 22 nt, synthetic construct
  source 1..22: mol_type = other RNA
ggttccctggatgttattttct

SEQ ID NO: 29141 - RNA, 22 nt, synthetic construct
  source 1..22: mol_type = other RNA
ggttcctcagcttccttcagaa

SEQ ID NO: 29142 - RNA, 22 nt, synthetic construct
  source 1..22: mol_type = other RNA
ggttctatcctgttccatcagg

SEQ ID NO: 29143 - RNA, 22 nt, synthetic construct
  source 1..22: mol_type = other RNA
ggttctgtctggcaaatgggag

SEQ ID NO: 29144 - RNA, 22 nt, synthetic construct
  source 1..22: mol_type = other RNA
ggttgactgctttcacctggat

SEQ ID NO: 29145 - RNA, 22 nt, synthetic construct
  source 1..22: mol_type = other RNA
ggttgatactgaagaattgatg

SEQ ID NO: 29146 - RNA, 22 nt, synthetic construct
  source 1..22: mol_type = other RNA
ggttgctgtgtttgctgctgtt

SEQ ID NO: 29147 - RNA, 22 nt, synthetic construct
  source 1..22: mol_type = other RNA
ggttggggtagtggtggtgttc

SEQ ID NO: 29148 - RNA, 22 nt, synthetic construct
  source 1..22: mol_type = other RNA
ggttggtgtcttttctgaagaa

SEQ ID NO: 29149 - RNA, 22 nt, synthetic construct
  source 1..22: mol_type = other RNA
ggttggttctatcctgttccat

SEQ ID NO: 29150 - RNA, 22 nt, synthetic construct
  source 1..22: mol_type = other RNA
ggttgtgtttgtgctgcctgtt

SEQ ID NO: 29151 - RNA, 22 nt, synthetic construct
  source 1..22: mol_type = other RNA
ggtttaccctctattttcactt

SEQ ID NO: 29152 - RNA, 22 nt, synthetic construct
  source 1..22: mol_type = other RNA
ggtttcagatagtgctgtgttg

SEQ ID NO: 29153 - RNA, 22 nt, synthetic construct
  source 1..22: mol_type = other RNA
ggtttctatttttatatccctg

SEQ ID NO: 29154 - RNA, 22 nt, synthetic construct
  source 1..22: mol_type = other RNA
ggtttctgaaaggaacaggtat

SEQ ID NO: 29155 - RNA, 22 nt, synthetic construct
  source 1..22: mol_type = other RNA
ggtttcttgttcaaacaataca

SEQ ID NO: 29156 - RNA, 22 nt, synthetic construct
  source 1..22: mol_type = other RNA
ggtttgtctagtcaaaactgtg

SEQ ID NO: 29157 - RNA, 22 nt, synthetic construct
  source 1..22: mol_type = other RNA
ggttttctgcaccgcaatggaa

SEQ ID NO: 29158 - RNA, 22 nt, synthetic construct
  source 1..22: mol_type = other RNA
ggttttgagggagatgtgaact

SEQ ID NO: 29159 - RNA, 22 nt, synthetic construct
  source 1..22: mol_type = other RNA
ggtttttggaactggagatgtt

SEQ ID NO: 29160 - RNA, 22 nt, synthetic construct
  source 1..22: mol_type = other RNA
gtaaaagttgaaatgtcagggc

SEQ ID NO: 29161 - RNA, 22 nt, synthetic construct
  source 1..22: mol_type = other RNA
gtaaacctgaggcaccaccttc

SEQ ID NO: 29162 - RNA, 22 nt, synthetic construct
  source 1..22: mol_type = other RNA
gtaaactagctgcaatgctaaa

SEQ ID NO: 29163 - RNA, 22 nt, synthetic construct
  source 1..22: mol_type = other RNA
gtaaagtcaggactcacacgac

SEQ ID NO: 29164 - RNA, 22 nt, synthetic construct
  source 1..22: mol_type = other RNA
gtaaatggagacaccaagtggc

SEQ ID NO: 29165 - RNA, 22 nt, synthetic construct
  source 1..22: mol_type = other RNA
gtaaatggtctgttttggagaa

SEQ ID NO: 29166 - RNA, 22 nt, synthetic construct
  source 1..22: mol_type = other RNA
gtaacacaacacttttaaggga

SEQ ID NO: 29167 - RNA, 22 nt, synthetic construct
  source 1..22: mol_type = other RNA
gtaactaagcaagagaatccac

SEQ ID NO: 29168 - RNA, 22 nt, synthetic construct
  source 1..22: mol_type = other RNA
gtaacttcggggtaagccaaga

SEQ ID NO: 29169 - RNA, 22 nt, synthetic construct
  source 1..22: mol_type = other RNA
gtaagagatgccaccttagagc

SEQ ID NO: 29170 - RNA, 22 nt, synthetic construct
  source 1..22: mol_type = other RNA
gtaagagccttatggtcaaata

SEQ ID NO: 29171 - RNA, 22 nt, synthetic construct
  source 1..22: mol_type = other RNA
gtaagcaccattcatttcattt

SEQ ID NO: 29172 - RNA, 22 nt, synthetic construct
  source 1..22: mol_type = other RNA
gtaagccaagaaagaaatccag

SEQ ID NO: 29173 - RNA, 22 nt, synthetic construct
  source 1..22: mol_type = other RNA
gtaagcttgccttgggagcccc

SEQ ID NO: 29174 - RNA, 22 nt, synthetic construct
  source 1..22: mol_type = other RNA
gtaagtgccagaaatgtactga

SEQ ID NO: 29175 - RNA, 22 nt, synthetic construct
  source 1..22: mol_type = other RNA
gtaatacaatgttcttgtcatg

SEQ ID NO: 29176 - RNA, 22 nt, synthetic construct
  source 1..22: mol_type = other RNA
gtaatgaggcatcactgccatc

SEQ ID NO: 29177 - RNA, 22 nt, synthetic construct
  source 1..22: mol_type = other RNA
gtaattagcacttttcccctcc

SEQ ID NO: 29178 - RNA, 22 nt, synthetic construct
  source 1..22: mol_type = other RNA
gtaatttggaaggtgactctat

SEQ ID NO: 29179 - RNA, 22 nt, synthetic construct
  source 1..22: mol_type = other RNA
gtaatttttgctgctgttgctg

SEQ ID NO: 29180 - RNA, 22 nt, synthetic construct
  source 1..22: mol_type = other RNA
gtacagaatataaatcgtagaa

SEQ ID NO: 29181 - RNA, 22 nt, synthetic construct
  source 1..22: mol_type = other RNA
gtacagtggaccaacatctcca

SEQ ID NO: 29182 - RNA, 22 nt, synthetic construct
  source 1..22: mol_type = other RNA
gtacatttctggcacttaccta

SEQ ID NO: 29183 - RNA, 22 nt, synthetic construct
  source 1..22: mol_type = other RNA
gtacatttgtgacttgtgctcc

SEQ ID NO: 29184 - RNA, 22 nt, synthetic construct
  source 1..22: mol_type = other RNA
gtaccaagttgaaatgaatcaa

SEQ ID NO: 29185 - RNA, 22 nt, synthetic construct
  source 1..22: mol_type = other RNA
gtaccttgggactgcccttgat

SEQ ID NO: 29186 - RNA, 22 nt, synthetic construct
  source 1..22: mol_type = other RNA
gtacctttgctgagcaagttgc

SEQ ID NO: 29187 - RNA, 22 nt, synthetic construct
  source 1..22: mol_type = other RNA
gtacttcctccagtcccatttg

SEQ ID NO: 29188 - RNA, 22 nt, synthetic construct
  source 1..22: mol_type = other RNA
gtacttgatacataaccatgca

SEQ ID NO: 29189 - RNA, 22 nt, synthetic construct
  source 1..22: mol_type = other RNA
gtagaaattccccttatagtca

SEQ ID NO: 29190 - RNA, 22 nt, synthetic construct
  source 1..22: mol_type = other RNA
gtagaactgaagcttgttgtga

SEQ ID NO: 29191 - RNA, 22 nt, synthetic construct
  source 1..22: mol_type = other RNA
gtagagggtattccaagtgttt

SEQ ID NO: 29192 - RNA, 22 nt, synthetic construct
  source 1..22: mol_type = other RNA
gtagatggattaggactctggg

SEQ ID NO: 29193 - RNA, 22 nt, synthetic construct
  source 1..22: mol_type = other RNA
gtagcaccattaggcattagca

SEQ ID NO: 29194 - RNA, 22 nt, synthetic construct
  source 1..22: mol_type = other RNA
gtagcagtggagagctacagga

SEQ ID NO: 29195 - RNA, 22 nt, synthetic construct
  source 1..22: mol_type = other RNA
gtagccagaggttctgtctggc

SEQ ID NO: 29196 - RNA, 22 nt, synthetic construct
  source 1..22: mol_type = other RNA
gtagcccaagaaaatgcagtta

SEQ ID NO: 29197 - RNA, 22 nt, synthetic construct
  source 1..22: mol_type = other RNA
gtagcctgactgttaatggcat

SEQ ID NO: 29198 - RNA, 22 nt, synthetic construct
  source 1..22: mol_type = other RNA
gtagctctccactgctaccaaa

SEQ ID NO: 29199 - RNA, 22 nt, synthetic construct
  source 1..22: mol_type = other RNA
gtaggtaagtgccagaaatgta

SEQ ID NO: 29200 - RNA, 22 nt, synthetic construct
  source 1..22: mol_type = other RNA
gtagtctgttctttattctctg

SEQ ID NO: 29201 - RNA, 22 nt, synthetic construct
  source 1..22: mol_type = other RNA
gtagtggcagaaaaggaatcct

SEQ ID NO: 29202 - RNA, 22 nt, synthetic construct
  source 1..22: mol_type = other RNA
gtagtggtggtgttcttctaaa

SEQ ID NO: 29203 - RNA, 22 nt, synthetic construct
  source 1..22: mol_type = other RNA
gtagttgttctggtttctgaaa

SEQ ID NO: 29204 - RNA, 22 nt, synthetic construct
  source 1..22: mol_type = other RNA
gtatcaacccaatctctccaat

SEQ ID NO: 29205 - RNA, 22 nt, synthetic construct
  source 1..22: mol_type = other RNA
gtatcaagtacctttgctgagc

SEQ ID NO: 29206 - RNA, 22 nt, synthetic construct
  source 1..22: mol_type = other RNA
gtatcaggaatggacttagtct

SEQ ID NO: 29207 - RNA, 22 nt, synthetic construct
  source 1..22: mol_type = other RNA
gtatctagtaatttggaaggtg

SEQ ID NO: 29208 - RNA, 22 nt, synthetic construct
  source 1..22: mol_type = other RNA
gtatgaagggaagccagaatag

SEQ ID NO: 29209 - RNA, 22 nt, synthetic construct
  source 1..22: mol_type = other RNA
gtatgcacacagcaccaccaga

SEQ ID NO: 29210 - RNA, 22 nt, synthetic construct
  source 1..22: mol_type = other RNA
gtatgcagcccttctccgatgc

SEQ ID NO: 29211 - RNA, 22 nt, synthetic construct
  source 1..22: mol_type = other RNA
gtatgcgatgggtgagtgatct

SEQ ID NO: 29212 - RNA, 22 nt, synthetic construct
  source 1..22: mol_type = other RNA
gtatgtcattcctgttcacaca

SEQ ID NO: 29213 - RNA, 22 nt, synthetic construct
  source 1..22: mol_type = other RNA
gtattacttaaaaacaaggcag

SEQ ID NO: 29214 - RNA, 22 nt, synthetic construct
  source 1..22: mol_type = other RNA
gtattcaaaatcaagcgagttc

SEQ ID NO: 29215 - RNA, 22 nt, synthetic construct
  source 1..22: mol_type = other RNA
gtattccaagtgtttgcaaaat

SEQ ID NO: 29216 - RNA, 22 nt, synthetic construct
  source 1..22: mol_type = other RNA
gtattgtttgaacaagaaacct

SEQ ID NO: 29217 - RNA, 22 nt, synthetic construct
  source 1..22: mol_type = other RNA
gtattgtttggaggtcatttga

SEQ ID NO: 29218 - RNA, 22 nt, synthetic construct
  source 1..22: mol_type = other RNA
gtatttagcattgcagctagtt

SEQ ID NO: 29219 - RNA, 22 nt, synthetic construct
  source 1..22: mol_type = other RNA
gtattttgcatgcacttgattt

SEQ ID NO: 29220 - RNA, 22 nt, synthetic construct
  source 1..22: mol_type = other RNA
gtcaaaactgtgactggccctg

SEQ ID NO: 29221 - RNA, 22 nt, synthetic construct
  source 1..22: mol_type = other RNA
gtcaaataacgacttggcgtga

SEQ ID NO: 29222 - RNA, 22 nt, synthetic construct
  source 1..22: mol_type = other RNA
gtcaacaagctgcgcaacttgc

SEQ ID NO: 29223 - RNA, 22 nt, synthetic construct
  source 1..22: mol_type = other RNA
gtcaaccaaatgtctccgattt

SEQ ID NO: 29224 - RNA, 22 nt, synthetic construct
  source 1..22: mol_type = other RNA
gtcaagactcaatatgatttcc

SEQ ID NO: 29225 - RNA, 22 nt, synthetic construct
  source 1..22: mol_type = other RNA
gtcacaaatgtaccaagttgaa

SEQ ID NO: 29226 - RNA, 22 nt, synthetic construct
  source 1..22: mol_type = other RNA
gtcacaacaagcttcagttcta

SEQ ID NO: 29227 - RNA, 22 nt, synthetic construct
  source 1..22: mol_type = other RNA
gtcacactcagacccctcccca

SEQ ID NO: 29228 - RNA, 22 nt, synthetic construct
  source 1..22: mol_type = other RNA
gtcacagttttgactagacaaa

SEQ ID NO: 29229 - RNA, 22 nt, synthetic construct
  source 1..22: mol_type = other RNA
gtcaccttccaaattactagat

SEQ ID NO: 29230 - RNA, 22 nt, synthetic construct
  source 1..22: mol_type = other RNA
gtcactgtgtggcactagattt

SEQ ID NO: 29231 - RNA, 22 nt, synthetic construct
  source 1..22: mol_type = other RNA
gtcagaacacctcaagcataac

SEQ ID NO: 29232 - RNA, 22 nt, synthetic construct
  source 1..22: mol_type = other RNA
gtcagaccatgaaatcaagtgc

SEQ ID NO: 29233 - RNA, 22 nt, synthetic construct
  source 1..22: mol_type = other RNA
gtcagatgcacaggccaattaa

SEQ ID NO: 29234 - RNA, 22 nt, synthetic construct
  source 1..22: mol_type = other RNA
gtcaggactcacacgactattc

SEQ ID NO: 29235 - RNA, 22 nt, synthetic construct
  source 1..22: mol_type = other RNA
gtcaggcacaggaaaaacattt

SEQ ID NO: 29236 - RNA, 22 nt, synthetic construct
  source 1..22: mol_type = other RNA
gtcaggctactaatgagttgtc

SEQ ID NO: 29237 - RNA, 22 nt, synthetic construct
  source 1..22: mol_type = other RNA
gtcagggccagtcacagttttg

SEQ ID NO: 29238 - RNA, 22 nt, synthetic construct
  source 1..22: mol_type = other RNA
gtcatggtaattagcacttttc

SEQ ID NO: 29239 - RNA, 22 nt, synthetic construct
  source 1..22: mol_type = other RNA
gtcattcctgttcacacaatta

SEQ ID NO: 29240 - RNA, 22 nt, synthetic construct
  source 1..22: mol_type = other RNA
gtcattgtccctgcagtctgta

SEQ ID NO: 29241 - RNA, 22 nt, synthetic construct
  source 1..22: mol_type = other RNA
gtcatttgattggagagattgg

SEQ ID NO: 29242 - RNA, 22 nt, synthetic construct
  source 1..22: mol_type = other RNA
gtccaaatgggactggaggaag

SEQ ID NO: 29243 - RNA, 22 nt, synthetic construct
  source 1..22: mol_type = other RNA
gtccactgtaccttgggactgc

SEQ ID NO: 29244 - RNA, 22 nt, synthetic construct
  source 1..22: mol_type = other RNA
gtccattcctgataccatcacc

SEQ ID NO: 29245 - RNA, 22 nt, synthetic construct
  source 1..22: mol_type = other RNA
gtcccaaggtacagtggaccaa

SEQ ID NO: 29246 - RNA, 22 nt, synthetic construct
  source 1..22: mol_type = other RNA
gtcccatttggacattatgagt

SEQ ID NO: 29247 - RNA, 22 nt, synthetic construct
  source 1..22: mol_type = other RNA
gtccccagtgttgaaacagcac

SEQ ID NO: 29248 - RNA, 22 nt, synthetic construct
  source 1..22: mol_type = other RNA
gtccctgcagtctgtatgtcat

SEQ ID NO: 29249 - RNA, 22 nt, synthetic construct
  source 1..22: mol_type = other RNA
gtcctaatccatctacacatgt

SEQ ID NO: 29250 - RNA, 22 nt, synthetic construct
  source 1..22: mol_type = other RNA
gtcctgactttacacaagaaag

SEQ ID NO: 29251 - RNA, 22 nt, synthetic construct
  source 1..22: mol_type = other RNA
gtcctgtagctctccactgcta

SEQ ID NO: 29252 - RNA, 22 nt, synthetic construct
  source 1..22: mol_type = other RNA
gtcctgtgagatcactcaccca

SEQ ID NO: 29253 - RNA, 22 nt, synthetic construct
  source 1..22: mol_type = other RNA
gtccttctggggaggggtctga

SEQ ID NO: 29254 - RNA, 22 nt, synthetic construct
  source 1..22: mol_type = other RNA
gtcgagacaaggagcaaacacg

SEQ ID NO: 29255 - RNA, 22 nt, synthetic construct
  source 1..22: mol_type = other RNA
gtcgtgtgagtcctgactttac

SEQ ID NO: 29256 - RNA, 22 nt, synthetic construct
  source 1..22: mol_type = other RNA
gtcgttatttgaccataaggct

SEQ ID NO: 29257 - RNA, 22 nt, synthetic construct
  source 1..22: mol_type = other RNA
gtctagtcaaaactgtgactgg

SEQ ID NO: 29258 - RNA, 22 nt, synthetic construct
  source 1..22: mol_type = other RNA
gtctcaatattatccagattgt

SEQ ID NO: 29259 - RNA, 22 nt, synthetic construct
  source 1..22: mol_type = other RNA
gtctcaatgatgctcttttgct

SEQ ID NO: 29260 - RNA, 22 nt, synthetic construct
  source 1..22: mol_type = other RNA
gtctcagtacatttctggcact

SEQ ID NO: 29261 - RNA, 22 nt, synthetic construct
  source 1..22: mol_type = other RNA
gtctccatttacttctggatga

SEQ ID NO: 29262 - RNA, 22 nt, synthetic construct
  source 1..22: mol_type = other RNA
gtctccgatttgagtgataaga

SEQ ID NO: 29263 - RNA, 22 nt, synthetic construct
  source 1..22: mol_type = other RNA
gtctcgaactcgcttgattttg

SEQ ID NO: 29264 - RNA, 22 nt, synthetic construct
  source 1..22: mol_type = other RNA
gtctcgacccttcagaatctct

SEQ ID NO: 29265 - RNA, 22 nt, synthetic construct
  source 1..22: mol_type = other RNA
gtctctgaagcctgttgattca

SEQ ID NO: 29266 - RNA, 22 nt, synthetic construct
  source 1..22: mol_type = other RNA
gtctgactataaggggaatttc

SEQ ID NO: 29267 - RNA, 22 nt, synthetic construct
  source 1..22: mol_type = other RNA
gtctgagtgtgacttcctccct

SEQ ID NO: 29268 - RNA, 22 nt, synthetic construct
  source 1..22: mol_type = other RNA
gtctggagtatttcctctttat

SEQ ID NO: 29269 - RNA, 22 nt, synthetic construct
  source 1..22: mol_type = other RNA
gtctggcaaatgggaggtgatg

SEQ ID NO: 29270 - RNA, 22 nt, synthetic construct
  source 1..22: mol_type = other RNA
gtctggccaaagaatgatcctt

SEQ ID NO: 29271 - RNA, 22 nt, synthetic construct
  source 1..22: mol_type = other RNA
gtctggtcaacaagctgcgcaa

SEQ ID NO: 29272 - RNA, 22 nt, synthetic construct
  source 1..22: mol_type = other RNA
gtctggtgaagaattctgttca

SEQ ID NO: 29273 - RNA, 22 nt, synthetic construct
  source 1..22: mol_type = other RNA
gtctgtatgtcattcctgttca

SEQ ID NO: 29274 - RNA, 22 nt, synthetic construct
  source 1..22: mol_type = other RNA
gtctgtgcggaattgatctgcc

SEQ ID NO: 29275 - RNA, 22 nt, synthetic construct
  source 1..22: mol_type = other RNA
gtctgttctttattctctgaaa

SEQ ID NO: 29276 - RNA, 22 nt, synthetic construct
  source 1..22: mol_type = other RNA
gtctgttgccctcaacatggtt

SEQ ID NO: 29277 - RNA, 22 nt, synthetic construct
  source 1..22: mol_type = other RNA
gtctgttttggagaagtgcacc

SEQ ID NO: 29278 - RNA, 22 nt, synthetic construct
  source 1..22: mol_type = other RNA
gtcttgacaggtgtatccaata

SEQ ID NO: 29279 - RNA, 22 nt, synthetic construct
  source 1..22: mol_type = other RNA
gtcttgccatagtcagatgcac

SEQ ID NO: 29280 - RNA, 22 nt, synthetic construct
  source 1..22: mol_type = other RNA
gtcttgtttcaatttcttgatc

SEQ ID NO: 29281 - RNA, 22 nt, synthetic construct
  source 1..22: mol_type = other RNA
gtcttgtttcctgcaaaaagtt

SEQ ID NO: 29282 - RNA, 22 nt, synthetic construct
  source 1..22: mol_type = other RNA
gtcttgttttctcagaacacaa

SEQ ID NO: 29283 - RNA, 22 nt, synthetic construct
  source 1..22: mol_type = other RNA
gtctttctccattagccttttg

SEQ ID NO: 29284 - RNA, 22 nt, synthetic construct
  source 1..22: mol_type = other RNA
gtcttttctgaagaagttgttt

SEQ ID NO: 29285 - RNA, 22 nt, synthetic construct
  source 1..22: mol_type = other RNA
gtgaaaacgaggggccttcaat

SEQ ID NO: 29286 - RNA, 22 nt, synthetic construct
  source 1..22: mol_type = other RNA
gtgaaaatagagggtaaacctg

SEQ ID NO: 29287 - RNA, 22 nt, synthetic construct
  source 1..22: mol_type = other RNA
gtgaaaatcagtattcaaaatc

SEQ ID NO: 29288 - RNA, 22 nt, synthetic construct
  source 1..22: mol_type = other RNA
gtgaaactgcttcagatgctgc

SEQ ID NO: 29289 - RNA, 22 nt, synthetic construct
  source 1..22: mol_type = other RNA
gtgaaagcagtcaaccaaatgt

SEQ ID NO: 29290 - RNA, 22 nt, synthetic construct
  source 1..22: mol_type = other RNA
gtgaaatctttaactgcatttt

SEQ ID NO: 29291 - RNA, 22 nt, synthetic construct
  source 1..22: mol_type = other RNA
gtgaacactgagctttgcttga

SEQ ID NO: 29292 - RNA, 22 nt, synthetic construct
  source 1..22: mol_type = other RNA
gtgaacaggaatgacatacaga

SEQ ID NO: 29293 - RNA, 22 nt, synthetic construct
  source 1..22: mol_type = other RNA
gtgaaccttctctctctgggct

SEQ ID NO: 29294 - RNA, 22 nt, synthetic construct
  source 1..22: mol_type = other RNA
gtgaactcctggaaaaaacact

SEQ ID NO: 29295 - RNA, 22 nt, synthetic construct
  source 1..22: mol_type = other RNA
gtgaactctgggatggttgtgt

SEQ ID NO: 29296 - RNA, 22 nt, synthetic construct
  source 1..22: mol_type = other RNA
gtgaagaagatcttgctttggg

SEQ ID NO: 29297 - RNA, 22 nt, synthetic construct
  source 1..22: mol_type = other RNA
gtgaagaattctgttcaggttc

SEQ ID NO: 29298 - RNA, 22 nt, synthetic construct
  source 1..22: mol_type = other RNA
gtgactctataaaattattgag

SEQ ID NO: 29299 - RNA, 22 nt, synthetic construct
  source 1..22: mol_type = other RNA
gtgactgcacatgagcttttgg

SEQ ID NO: 29300 - RNA, 22 nt, synthetic construct
  source 1..22: mol_type = other RNA
gtgactggccctgacatttcaa

SEQ ID NO: 29301 - RNA, 22 nt, synthetic construct
  source 1..22: mol_type = other RNA
gtgacttcctccctggtcaggc

SEQ ID NO: 29302 - RNA, 22 nt, synthetic construct
  source 1..22: mol_type = other RNA
gtgacttctgctcctgttcttg

SEQ ID NO: 29303 - RNA, 22 nt, synthetic construct
  source 1..22: mol_type = other RNA
gtgacttgtgctccagctgtgt

SEQ ID NO: 29304 - RNA, 22 nt, synthetic construct
  source 1..22: mol_type = other RNA
gtgagatcactcacccatcgca

SEQ ID NO: 29305 - RNA, 22 nt, synthetic construct
  source 1..22: mol_type = other RNA
gtgagatgtggttttctgcacc

SEQ ID NO: 29306 - RNA, 22 nt, synthetic construct
  source 1..22: mol_type = other RNA
gtgaggaaaagtctggagtatt

SEQ ID NO: 29307 - RNA, 22 nt, synthetic construct
  source 1..22: mol_type = other RNA
gtgaggcctgtgatgctgatga

SEQ ID NO: 29308 - RNA, 22 nt, synthetic construct
  source 1..22: mol_type = other RNA
gtgagggtttttggaactggag

SEQ ID NO: 29309 - RNA, 22 nt, synthetic construct
  source 1..22: mol_type = other RNA
gtgagtcctgactttacacaag

SEQ ID NO: 29310 - RNA, 22 nt, synthetic construct
  source 1..22: mol_type = other RNA
gtgagtgaggcctgtgatgctg

SEQ ID NO: 29311 - RNA, 22 nt, synthetic construct
  source 1..22: mol_type = other RNA
gtgagtgatctcacaggacaac

SEQ ID NO: 29312 - RNA, 22 nt, synthetic construct
  source 1..22: mol_type = other RNA
gtgagttctgtagcccaagaaa

SEQ ID NO: 29313 - RNA, 22 nt, synthetic construct
  source 1..22: mol_type = other RNA
gtgagtttgaaaatggctcagt

SEQ ID NO: 29314 - RNA, 22 nt, synthetic construct
  source 1..22: mol_type = other RNA
gtgataagaaagaatctgtgag

SEQ ID NO: 29315 - RNA, 22 nt, synthetic construct
  source 1..22: mol_type = other RNA
gtgataatgtgcagcaaaagag

SEQ ID NO: 29316 - RNA, 22 nt, synthetic construct
  source 1..22: mol_type = other RNA
gtgatcccaaagcaagatcttc

SEQ ID NO: 29317 - RNA, 22 nt, synthetic construct
  source 1..22: mol_type = other RNA
gtgatctcacaggacaactcat

SEQ ID NO: 29318 - RNA, 22 nt, synthetic construct
  source 1..22: mol_type = other RNA
gtgatgcaagttttgggtcttg

SEQ ID NO: 29319 - RNA, 22 nt, synthetic construct
  source 1..22: mol_type = other RNA
gtgatgcctcattacgttttag

SEQ ID NO: 29320 - RNA, 22 nt, synthetic construct
  source 1..22: mol_type = other RNA
gtgatgctgatgatgctgataa

SEQ ID NO: 29321 - RNA, 22 nt, synthetic construct
  source 1..22: mol_type = other RNA
gtgatggtatcaggaatggact

SEQ ID NO: 29322 - RNA, 22 nt, synthetic construct
  source 1..22: mol_type = other RNA
gtgatggtggtggtggtgtggt

SEQ ID NO: 29323 - RNA, 22 nt, synthetic construct
  source 1..22: mol_type = other RNA
gtgatttgagagtaagagcctt

SEQ ID NO: 29324 - RNA, 22 nt, synthetic construct
  source 1..22: mol_type = other RNA
gtgcacctggtgtgagggtttt

SEQ ID NO: 29325 - RNA, 22 nt, synthetic construct
  source 1..22: mol_type = other RNA
gtgcacttctccaaaacagacc

SEQ ID NO: 29326 - RNA, 22 nt, synthetic construct
  source 1..22: mol_type = other RNA
gtgcagaaaaccacatctcaca

SEQ ID NO: 29327 - RNA, 22 nt, synthetic construct
  source 1..22: mol_type = other RNA
gtgcagcaaaagagcatcattg

SEQ ID NO: 29328 - RNA, 22 nt, synthetic construct
  source 1..22: mol_type = other RNA
gtgcagtcactgtgtggcacta

SEQ ID NO: 29329 - RNA, 22 nt, synthetic construct
  source 1..22: mol_type = other RNA
gtgcatacaggcatgtggcttg

SEQ ID NO: 29330 - RNA, 22 nt, synthetic construct
  source 1..22: mol_type = other RNA
gtgcatctgactatggcaagac

SEQ ID NO: 29331 - RNA, 22 nt, synthetic construct
  source 1..22: mol_type = other RNA
gtgcatgcaaaatacaggtttc

SEQ ID NO: 29332 - RNA, 22 nt, synthetic construct
  source 1..22: mol_type = other RNA
gtgccacacagtgactgcacat

SEQ ID NO: 29333 - RNA, 22 nt, synthetic construct
  source 1..22: mol_type = other RNA
gtgccacttggtgtctccattt

SEQ ID NO: 29334 - RNA, 22 nt, synthetic construct
  source 1..22: mol_type = other RNA
gtgccagaaatgtactgagaca

SEQ ID NO: 29335 - RNA, 22 nt, synthetic construct
  source 1..22: mol_type = other RNA
gtgcccccaacacagcactatc

SEQ ID NO: 29336 - RNA, 22 nt, synthetic construct
  source 1..22: mol_type = other RNA
gtgcctcaggtttaccctctat

SEQ ID NO: 29337 - RNA, 22 nt, synthetic construct
  source 1..22: mol_type = other RNA
gtgcctgaccagggaggaagtc

SEQ ID NO: 29338 - RNA, 22 nt, synthetic construct
  source 1..22: mol_type = other RNA
gtgcggaattgatctgccctga

SEQ ID NO: 29339 - RNA, 22 nt, synthetic construct
  source 1..22: mol_type = other RNA
gtgcgttttattcctccatttt

SEQ ID NO: 29340 - RNA, 22 nt, synthetic construct
  source 1..22: mol_type = other RNA
gtgctaatgcctaatggtgcta

SEQ ID NO: 29341 - RNA, 22 nt, synthetic construct
  source 1..22: mol_type = other RNA
gtgctaattaccatgacaagaa

SEQ ID NO: 29342 - RNA, 22 nt, synthetic construct
  source 1..22: mol_type = other RNA
gtgctacagtttctgcctcttc

SEQ ID NO: 29343 - RNA, 22 nt, synthetic construct
  source 1..22: mol_type = other RNA
gtgctccagctgtgttgttttc

SEQ ID NO: 29344 - RNA, 22 nt, synthetic construct
  source 1..22: mol_type = other RNA
gtgctgcctgtttatgaggctt

SEQ ID NO: 29345 - RNA, 22 nt, synthetic construct
  source 1..22: mol_type = other RNA
gtgctgtgtgcatacaggcatg

SEQ ID NO: 29346 - RNA, 22 nt, synthetic construct
  source 1..22: mol_type = other RNA
gtgctgtgttgggggcacaaga

SEQ ID NO: 29347 - RNA, 22 nt, synthetic construct
  source 1..22: mol_type = other RNA
gtgctgtttcaacactggggac

SEQ ID NO: 29348 - RNA, 22 nt, synthetic construct
  source 1..22: mol_type = other RNA
gtgcttacttcaagcaaagctc

SEQ ID NO: 29349 - RNA, 22 nt, synthetic construct
  source 1..22: mol_type = other RNA
gtgctttcaagaacaggagcag

SEQ ID NO: 29350 - RNA, 22 nt, synthetic construct
  source 1..22: mol_type = other RNA
gtgctttttccttctgaaggaa

SEQ ID NO: 29351 - RNA, 22 nt, synthetic construct
  source 1..22: mol_type = other RNA
gtggaacacacacatggtgaac

SEQ ID NO: 29352 - RNA, 22 nt, synthetic construct
  source 1..22: mol_type = other RNA
gtggaacctggatgcaagccac

SEQ ID NO: 29353 - RNA, 22 nt, synthetic construct
  source 1..22: mol_type = other RNA
gtggaagaatgttttcatggtg

SEQ ID NO: 29354 - RNA, 22 nt, synthetic construct
  source 1..22: mol_type = other RNA
gtggaagaggaggagggggaga

SEQ ID NO: 29355 - RNA, 22 nt, synthetic construct
  source 1..22: mol_type = other RNA
gtggaccaacatctccagttcc

SEQ ID NO: 29356 - RNA, 22 nt, synthetic construct
  source 1..22: mol_type = other RNA
gtggagagctacaggacaactg

SEQ ID NO: 29357 - RNA, 22 nt, synthetic construct
  source 1..22: mol_type = other RNA
gtggagttttagaagaacacca

SEQ ID NO: 29358 - RNA, 22 nt, synthetic construct
  source 1..22: mol_type = other RNA
gtggatggccccgaagcaagcc

SEQ ID NO: 29359 - RNA, 22 nt, synthetic construct
  source 1..22: mol_type = other RNA
gtggattctcttgcttagttac

SEQ ID NO: 29360 - RNA, 22 nt, synthetic construct
  source 1..22: mol_type = other RNA
gtggcactagatttcattttca

SEQ ID NO: 29361 - RNA, 22 nt, synthetic construct
  source 1..22: mol_type = other RNA
gtggcactctttcaaaagttat

SEQ ID NO: 29362 - RNA, 22 nt, synthetic construct
  source 1..22: mol_type = other RNA
gtggcagaaaaggaatccttag

SEQ ID NO: 29363 - RNA, 22 nt, synthetic construct
  source 1..22: mol_type = other RNA
gtggcagctctgaacggtattt

SEQ ID NO: 29364 - RNA, 22 nt, synthetic construct
  source 1..22: mol_type = other RNA
gtggcatctcttacagaagcaa

SEQ ID NO: 29365 - RNA, 22 nt, synthetic construct
  source 1..22: mol_type = other RNA
gtggctatcaagttctgcagca

SEQ ID NO: 29366 - RNA, 22 nt, synthetic construct
  source 1..22: mol_type = other RNA
gtggcttgcatccaggttccac

SEQ ID NO: 29367 - RNA, 22 nt, synthetic construct
  source 1..22: mol_type = other RNA
gtgggcctgaaaatccagagct

SEQ ID NO: 29368 - RNA, 22 nt, synthetic construct
  source 1..22: mol_type = other RNA
gtgggcttccattctggagctt

SEQ ID NO: 29369 - RNA, 22 nt, synthetic construct
  source 1..22: mol_type = other RNA
gtgggttatgcttgaggtgttc

SEQ ID NO: 29370 - RNA, 22 nt, synthetic construct
  source 1..22: mol_type = other RNA
gtggtagtggcagaaaaggaat

SEQ ID NO: 29371 - RNA, 22 nt, synthetic construct
  source 1..22: mol_type = other RNA
gtggtgagtgaggcctgtgatg

SEQ ID NO: 29372 - RNA, 22 nt, synthetic construct
  source 1..22: mol_type = other RNA
gtggtgcctcaggtttaccctc

SEQ ID NO: 29373 - RNA, 22 nt, synthetic construct
  source 1..22: mol_type = other RNA
gtggtgctgtgtgcatacaggc

SEQ ID NO: 29374 - RNA, 22 nt, synthetic construct
  source 1..22: mol_type = other RNA
gtggtggtggtgtggtagtggc

SEQ ID NO: 29375 - RNA, 22 nt, synthetic construct
  source 1..22: mol_type = other RNA
gtggtggtgtggtagtggcaga

SEQ ID NO: 29376 - RNA, 22 nt, synthetic construct
  source 1..22: mol_type = other RNA
gtggtggtgttcttctaaaact

SEQ ID NO: 29377 - RNA, 22 nt, synthetic construct
  source 1..22: mol_type = other RNA
gtggtgtggtagtggcagaaaa

SEQ ID NO: 29378 - RNA, 22 nt, synthetic construct
  source 1..22: mol_type = other RNA
gtggtgttcttctaaaactcca

SEQ ID NO: 29379 - RNA, 22 nt, synthetic construct
  source 1..22: mol_type = other RNA
gtggttccctggatgttatttt

SEQ ID NO: 29380 - RNA, 22 nt, synthetic construct
  source 1..22: mol_type = other RNA
gtggtttgtctagtcaaaactg

SEQ ID NO: 29381 - RNA, 22 nt, synthetic construct
  source 1..22: mol_type = other RNA
gtggttttctgcaccgcaatgg

SEQ ID NO: 29382 - RNA, 22 nt, synthetic construct
  source 1..22: mol_type = other RNA
gtgtaaagtcaggactcacacg

SEQ ID NO: 29383 - RNA, 22 nt, synthetic construct
  source 1..22: mol_type = other RNA
gtgtaagcttgccttgggagcc

SEQ ID NO: 29384 - RNA, 22 nt, synthetic construct
  source 1..22: mol_type = other RNA
gtgtagatggattaggactctg

SEQ ID NO: 29385 - RNA, 22 nt, synthetic construct
  source 1..22: mol_type = other RNA
gtgtaggtaagtgccagaaatg

SEQ ID NO: 29386 - RNA, 22 nt, synthetic construct
  source 1..22: mol_type = other RNA
gtgtagtctgttctttattctc

SEQ ID NO: 29387 - RNA, 22 nt, synthetic construct
  source 1..22: mol_type = other RNA
gtgtattgtttgaacaagaaac

SEQ ID NO: 29388 - RNA, 22 nt, synthetic construct
  source 1..22: mol_type = other RNA
gtgtattgtttggaggtcattt

SEQ ID NO: 29389 - RNA, 22 nt, synthetic construct
  source 1..22: mol_type = other RNA
gtgtccttctggggaggggtct

SEQ ID NO: 29390 - RNA, 22 nt, synthetic construct
  source 1..22: mol_type = other RNA
gtgtctcagtacatttctggca

SEQ ID NO: 29391 - RNA, 22 nt, synthetic construct
  source 1..22: mol_type = other RNA
gtgtctccatttacttctggat

SEQ ID NO: 29392 - RNA, 22 nt, synthetic construct
  source 1..22: mol_type = other RNA
gtgtcttttctgaagaagttgt

SEQ ID NO: 29393 - RNA, 22 nt, synthetic construct
  source 1..22: mol_type = other RNA
gtgtgaacaggaatgacataca

SEQ ID NO: 29394 - RNA, 22 nt, synthetic construct
  source 1..22: mol_type = other RNA
gtgtgacttcctccctggtcag

SEQ ID NO: 29395 - RNA, 22 nt, synthetic construct
  source 1..22: mol_type = other RNA
gtgtgagggtttttggaactgg

SEQ ID NO: 29396 - RNA, 22 nt, synthetic construct
  source 1..22: mol_type = other RNA
gtgtgagtcctgactttacaca

SEQ ID NO: 29397 - RNA, 22 nt, synthetic construct
  source 1..22: mol_type = other RNA
gtgtgagtttgaaaatggctca

SEQ ID NO: 29398 - RNA, 22 nt, synthetic construct
  source 1..22: mol_type = other RNA
gtgtgcatacaggcatgtggct

SEQ ID NO: 29399 - RNA, 22 nt, synthetic construct
  source 1..22: mol_type = other RNA
gtgtggcactagatttcatttt

SEQ ID NO: 29400 - RNA, 22 nt, synthetic construct
  source 1..22: mol_type = other RNA
gtgtggctatcaagttctgcag

SEQ ID NO: 29401 - RNA, 22 nt, synthetic construct
  source 1..22: mol_type = other RNA
gtgtggtagtggcagaaaagga

SEQ ID NO: 29402 - RNA, 22 nt, synthetic construct
  source 1..22: mol_type = other RNA
gtgtgtattgtttgaacaagaa

SEQ ID NO: 29403 - RNA, 22 nt, synthetic construct
  source 1..22: mol_type = other RNA
gtgtgtgttccacggaagaggc

SEQ ID NO: 29404 - RNA, 22 nt, synthetic construct
  source 1..22: mol_type = other RNA
gtgtgttccacggaagaggcag

SEQ ID NO: 29405 - RNA, 22 nt, synthetic construct
  source 1..22: mol_type = other RNA
gtgttactttggttggggtagt

SEQ ID NO: 29406 - RNA, 22 nt, synthetic construct
  source 1..22: mol_type = other RNA
gtgttcactaaggattcctttt

SEQ ID NO: 29407 - RNA, 22 nt, synthetic construct
  source 1..22: mol_type = other RNA
gtgttccacggaagaggcagaa

SEQ ID NO: 29408 - RNA, 22 nt, synthetic construct
  source 1..22: mol_type = other RNA
gtgttctgacattggtcttgtt

SEQ ID NO: 29409 - RNA, 22 nt, synthetic construct
  source 1..22: mol_type = other RNA
gtgttctgagaaaacaagacca

SEQ ID NO: 29410 - RNA, 22 nt, synthetic construct
  source 1..22: mol_type = other RNA
gtgttcttctaaaactccacca

SEQ ID NO: 29411 - RNA, 22 nt, synthetic construct
  source 1..22: mol_type = other RNA
gtgttgaaaaactggtgaaatc

SEQ ID NO: 29412 - RNA, 22 nt, synthetic construct
  source 1..22: mol_type = other RNA
gtgttgaaacagcacttgaatc

SEQ ID NO: 29413 - RNA, 22 nt, synthetic construct
  source 1..22: mol_type = other RNA
gtgttgggggcacaagatctcg

SEQ ID NO: 29414 - RNA, 22 nt, synthetic construct
  source 1..22: mol_type = other RNA
gtgttgtgttactttggttggg

SEQ ID NO: 29415 - RNA, 22 nt, synthetic construct
  source 1..22: mol_type = other RNA
gtgttgttttctgggtgtaagc

SEQ ID NO: 29416 - RNA, 22 nt, synthetic construct
  source 1..22: mol_type = other RNA
gtgtttccattgcggtgcagaa

SEQ ID NO: 29417 - RNA, 22 nt, synthetic construct
  source 1..22: mol_type = other RNA
gtgtttgcaaaatggaggaata

SEQ ID NO: 29418 - RNA, 22 nt, synthetic construct
  source 1..22: mol_type = other RNA
gtgtttgctccttgtctcgacc

SEQ ID NO: 29419 - RNA, 22 nt, synthetic construct
  source 1..22: mol_type = other RNA
gtgtttgctgctgttcttgctt

SEQ ID NO: 29420 - RNA, 22 nt, synthetic construct
  source 1..22: mol_type = other RNA
gtgtttgtgctgcctgtttatg

SEQ ID NO: 29421 - RNA, 22 nt, synthetic construct
  source 1..22: mol_type = other RNA
gtgttttttccaggagttcacc

SEQ ID NO: 29422 - RNA, 22 nt, synthetic construct
  source 1..22: mol_type = other RNA
gttaaagatttcaccagttttt

SEQ ID NO: 29423 - RNA, 22 nt, synthetic construct
  source 1..22: mol_type = other RNA
gttaatggcatttatgtgagat

SEQ ID NO: 29424 - RNA, 22 nt, synthetic construct
  source 1..22: mol_type = other RNA
gttacctttttccatgttttgt

SEQ ID NO: 29425 - RNA, 22 nt, synthetic construct
  source 1..22: mol_type = other RNA
gttacgtctttctccattagcc

SEQ ID NO: 29426 - RNA, 22 nt, synthetic construct
  source 1..22: mol_type = other RNA
gttactttggttggggtagtgg

SEQ ID NO: 29427 - RNA, 22 nt, synthetic construct
  source 1..22: mol_type = other RNA
gttagaggtctgtgcggaattg

SEQ ID NO: 29428 - RNA, 22 nt, synthetic construct
  source 1..22: mol_type = other RNA
gttagtgaaccttctctctctg

SEQ ID NO: 29429 - RNA, 22 nt, synthetic construct
  source 1..22: mol_type = other RNA
gttatgcttgaggtgttctgac

SEQ ID NO: 29430 - RNA, 22 nt, synthetic construct
  source 1..22: mol_type = other RNA
gttatgtatcaagtacctttgc

SEQ ID NO: 29431 - RNA, 22 nt, synthetic construct
  source 1..22: mol_type = other RNA
gttatgtgttgaaaaactggtg

SEQ ID NO: 29432 - RNA, 22 nt, synthetic construct
  source 1..22: mol_type = other RNA
gttattatggaataccctgtat

SEQ ID NO: 29433 - RNA, 22 nt, synthetic construct
  source 1..22: mol_type = other RNA
gttatttgaccataaggctctt

SEQ ID NO: 29434 - RNA, 22 nt, synthetic construct
  source 1..22: mol_type = other RNA
gttattttctgcaggagatggg

SEQ ID NO: 29435 - RNA, 22 nt, synthetic construct
  source 1..22: mol_type = other RNA
gttcaaacaatacacacctagt

SEQ ID NO: 29436 - RNA, 22 nt, synthetic construct
  source 1..22: mol_type = other RNA
gttcacacaattattctgaggc

SEQ ID NO: 29437 - RNA, 22 nt, synthetic construct
  source 1..22: mol_type = other RNA
gttcacatctccctcaaaacca

SEQ ID NO: 29438 - RNA, 22 nt, synthetic construct
  source 1..22: mol_type = other RNA
gttcaccatgtgtgtgttccac

SEQ ID NO: 29439 - RNA, 22 nt, synthetic construct
  source 1..22: mol_type = other RNA
gttcactaactgtgcgttttat

SEQ ID NO: 29440 - RNA, 22 nt, synthetic construct
  source 1..22: mol_type = other RNA
gttcactaaggattccttttct

SEQ ID NO: 29441 - RNA, 22 nt, synthetic construct
  source 1..22: mol_type = other RNA
gttcagagctgccaccaggagc

SEQ ID NO: 29442 - RNA, 22 nt, synthetic construct
  source 1..22: mol_type = other RNA
gttcaggatgtgtagtctgttc

SEQ ID NO: 29443 - RNA, 22 nt, synthetic construct
  source 1..22: mol_type = other RNA
gttcaggttccagcagcaattt

SEQ ID NO: 29444 - RNA, 22 nt, synthetic construct
  source 1..22: mol_type = other RNA
gttccaaaaaccctcacaccag

SEQ ID NO: 29445 - RNA, 22 nt, synthetic construct
  source 1..22: mol_type = other RNA
gttccaccttaattggcctgtg

SEQ ID NO: 29446 - RNA, 22 nt, synthetic construct
  source 1..22: mol_type = other RNA
gttccacggaagaggcagaaac

SEQ ID NO: 29447 - RNA, 22 nt, synthetic construct
  source 1..22: mol_type = other RNA
gttccagcagcaatttgcaagc

SEQ ID NO: 29448 - RNA, 22 nt, synthetic construct
  source 1..22: mol_type = other RNA
gttccatcaggcttgcttcggg

SEQ ID NO: 29449 - RNA, 22 nt, synthetic construct
  source 1..22: mol_type = other RNA
gttccattgtgttctgagaaaa

SEQ ID NO: 29450 - RNA, 22 nt, synthetic construct
  source 1..22: mol_type = other RNA
gttccctggatgttattttctg

SEQ ID NO: 29451 - RNA, 22 nt, synthetic construct
  source 1..22: mol_type = other RNA
gttcctcagcttccttcagaag

SEQ ID NO: 29452 - RNA, 22 nt, synthetic construct
  source 1..22: mol_type = other RNA
gttcctttcagaaaccagaaca

SEQ ID NO: 29453 - RNA, 22 nt, synthetic construct
  source 1..22: mol_type = other RNA
gttcgagactcataatgtccaa

SEQ ID NO: 29454 - RNA, 22 nt, synthetic construct
  source 1..22: mol_type = other RNA
gttctacagggatataaaaata

SEQ ID NO: 29455 - RNA, 22 nt, synthetic construct
  source 1..22: mol_type = other RNA
gttctatcctgttccatcaggc

SEQ ID NO: 29456 - RNA, 22 nt, synthetic construct
  source 1..22: mol_type = other RNA
gttctgacattggtcttgtttt

SEQ ID NO: 29457 - RNA, 22 nt, synthetic construct
  source 1..22: mol_type = other RNA
gttctgagaaaacaagaccaat

SEQ ID NO: 29458 - RNA, 22 nt, synthetic construct
  source 1..22: mol_type = other RNA
gttctgcagcagtggtttgtct

SEQ ID NO: 29459 - RNA, 22 nt, synthetic construct
  source 1..22: mol_type = other RNA
gttctggtttctgaaaggaaca

SEQ ID NO: 29460 - RNA, 22 nt, synthetic construct
  source 1..22: mol_type = other RNA
gttctgtagcccaagaaaatgc

SEQ ID NO: 29461 - RNA, 22 nt, synthetic construct
  source 1..22: mol_type = other RNA
gttctgtctggcaaatgggagg

SEQ ID NO: 29462 - RNA, 22 nt, synthetic construct
  source 1..22: mol_type = other RNA
gttcttctaaaactccaccatt

SEQ ID NO: 29463 - RNA, 22 nt, synthetic construct
  source 1..22: mol_type = other RNA
gttcttgaaagcacctgtgaag

SEQ ID NO: 29464 - RNA, 22 nt, synthetic construct
  source 1..22: mol_type = other RNA
gttcttgcttctgtaagagatg

SEQ ID NO: 29465 - RNA, 22 nt, synthetic construct
  source 1..22: mol_type = other RNA
gttcttgtcatggtaattagca

SEQ ID NO: 29466 - RNA, 22 nt, synthetic construct
  source 1..22: mol_type = other RNA
gttctttattctctgaaactag

SEQ ID NO: 29467 - RNA, 22 nt, synthetic construct
  source 1..22: mol_type = other RNA
gttcttttggttggtgtctttt

SEQ ID NO: 29468 - RNA, 22 nt, synthetic construct
  source 1..22: mol_type = other RNA
gttgaaaaactggtgaaatctt

SEQ ID NO: 29469 - RNA, 22 nt, synthetic construct
  source 1..22: mol_type = other RNA
gttgaaaatgaaatctagtgcc

SEQ ID NO: 29470 - RNA, 22 nt, synthetic construct
  source 1..22: mol_type = other RNA
gttgaaacagcacttgaatcaa

SEQ ID NO: 29471 - RNA, 22 nt, synthetic construct
  source 1..22: mol_type = other RNA
gttgaaatgaatcaagggcagt

SEQ ID NO: 29472 - RNA, 22 nt, synthetic construct
  source 1..22: mol_type = other RNA
gttgaaatgtcagggccagtca

SEQ ID NO: 29473 - RNA, 22 nt, synthetic construct
  source 1..22: mol_type = other RNA
gttgaccagacatatcttggtt

SEQ ID NO: 29474 - RNA, 22 nt, synthetic construct
  source 1..22: mol_type = other RNA
gttgactgctttcacctggatt

SEQ ID NO: 29475 - RNA, 22 nt, synthetic construct
  source 1..22: mol_type = other RNA
gttgagggcaacagactaagtc

SEQ ID NO: 29476 - RNA, 22 nt, synthetic construct
  source 1..22: mol_type = other RNA
gttgatactgaagaattgatgg

SEQ ID NO: 29477 - RNA, 22 nt, synthetic construct
  source 1..22: mol_type = other RNA
gttgatgagaaacaaagagcaa

SEQ ID NO: 29478 - RNA, 22 nt, synthetic construct
  source 1..22: mol_type = other RNA
gttgattcaagtgctgtttcaa

SEQ ID NO: 29479 - RNA, 22 nt, synthetic construct
  source 1..22: mol_type = other RNA
gttgcaaaaggtgtgagtttga

SEQ ID NO: 29480 - RNA, 22 nt, synthetic construct
  source 1..22: mol_type = other RNA
gttgccctcaacatggttggtt

SEQ ID NO: 29481 - RNA, 22 nt, synthetic construct
  source 1..22: mol_type = other RNA
gttgcgcagcttgttgaccaga

SEQ ID NO: 29482 - RNA, 22 nt, synthetic construct
  source 1..22: mol_type = other RNA
gttgctggttttgagggagatg

SEQ ID NO: 29483 - RNA, 22 nt, synthetic construct
  source 1..22: mol_type = other RNA
gttgctgtgtttgctgctgttc

SEQ ID NO: 29484 - RNA, 22 nt, synthetic construct
  source 1..22: mol_type = other RNA
gttgctttgggggtgaggaaaa

SEQ ID NO: 29485 - RNA, 22 nt, synthetic construct
  source 1..22: mol_type = other RNA
gttggaatttccagtgtattgt

SEQ ID NO: 29486 - RNA, 22 nt, synthetic construct
  source 1..22: mol_type = other RNA
gttgggggcacaagatctcgtg

SEQ ID NO: 29487 - RNA, 22 nt, synthetic construct
  source 1..22: mol_type = other RNA
gttggggtagtggtggtgttct

SEQ ID NO: 29488 - RNA, 22 nt, synthetic construct
  source 1..22: mol_type = other RNA
gttggtccactgtaccttggga

SEQ ID NO: 29489 - RNA, 22 nt, synthetic construct
  source 1..22: mol_type = other RNA
gttggtgtcttttctgaagaag

SEQ ID NO: 29490 - RNA, 22 nt, synthetic construct
  source 1..22: mol_type = other RNA
gttggttctatcctgttccatc

SEQ ID NO: 29491 - RNA, 22 nt, synthetic construct
  source 1..22: mol_type = other RNA
gttgtagttgttctggtttctg

SEQ ID NO: 29492 - RNA, 22 nt, synthetic construct
  source 1..22: mol_type = other RNA
gttgtcctgtagctctccactg

SEQ ID NO: 29493 - RNA, 22 nt, synthetic construct
  source 1..22: mol_type = other RNA
gttgtcctgtgagatcactcac

SEQ ID NO: 29494 - RNA, 22 nt, synthetic construct
  source 1..22: mol_type = other RNA
gttgtgacttctgctcctgttc

SEQ ID NO: 29495 - RNA, 22 nt, synthetic construct
  source 1..22: mol_type = other RNA
gttgtgttactttggttggggt

SEQ ID NO: 29496 - RNA, 22 nt, synthetic construct
  source 1..22: mol_type = other RNA
gttgtgtttgtgctgcctgttt

SEQ ID NO: 29497 - RNA, 22 nt, synthetic construct
  source 1..22: mol_type = other RNA
gttgttctggtttctgaaagga

SEQ ID NO: 29498 - RNA, 22 nt, synthetic construct
  source 1..22: mol_type = other RNA
gttgttgtagttgttctggttt

SEQ ID NO: 29499 - RNA, 22 nt, synthetic construct
  source 1..22: mol_type = other RNA
gttgtttgctgctctaaagctg

SEQ ID NO: 29500 - RNA, 22 nt, synthetic construct
  source 1..22: mol_type = other RNA
gttgttttctgggtgtaagctt

SEQ ID NO: 29501 - RNA, 22 nt, synthetic construct
  source 1..22: mol_type = other RNA
gtttaccctctattttcacttc

SEQ ID NO: 29502 - RNA, 22 nt, synthetic construct
  source 1..22: mol_type = other RNA
gtttactggcattatcagcatc

SEQ ID NO: 29503 - RNA, 22 nt, synthetic construct
  source 1..22: mol_type = other RNA
gtttatgaggcttatgttgcaa

SEQ ID NO: 29504 - RNA, 22 nt, synthetic construct
  source 1..22: mol_type = other RNA
gtttcaacactggggacataag

SEQ ID NO: 29505 - RNA, 22 nt, synthetic construct
  source 1..22: mol_type = other RNA
gtttcaatttcttgatctgaag

SEQ ID NO: 29506 - RNA, 22 nt, synthetic construct
  source 1..22: mol_type = other RNA
gtttcacgccaagtcgttattt

SEQ ID NO: 29507 - RNA, 22 nt, synthetic construct
  source 1..22: mol_type = other RNA
gtttcagagaataaagaacaga

SEQ ID NO: 29508 - RNA, 22 nt, synthetic construct
  source 1..22: mol_type = other RNA
gtttcagatagtgctgtgttgg

SEQ ID NO: 29509 - RNA, 22 nt, synthetic construct
  source 1..22: mol_type = other RNA
gtttccattgcggtgcagaaaa

SEQ ID NO: 29510 - RNA, 22 nt, synthetic construct
  source 1..22: mol_type = other RNA
gtttcctgcaaaaagttcagga

SEQ ID NO: 29511 - RNA, 22 nt, synthetic construct
  source 1..22: mol_type = other RNA
gtttctatttttatatccctgt

SEQ ID NO: 29512 - RNA, 22 nt, synthetic construct
  source 1..22: mol_type = other RNA
gtttctcatcaactgctggcag

SEQ ID NO: 29513 - RNA, 22 nt, synthetic construct
  source 1..22: mol_type = other RNA
gtttctgaaaggaacaggtatt

SEQ ID NO: 29514 - RNA, 22 nt, synthetic construct
  source 1..22: mol_type = other RNA
gtttctgcctcttccgtggaac

SEQ ID NO: 29515 - RNA, 22 nt, synthetic construct
  source 1..22: mol_type = other RNA
gtttcttgttcaaacaatacac

SEQ ID NO: 29516 - RNA, 22 nt, synthetic construct
  source 1..22: mol_type = other RNA
gtttgaaaatggctcagtctct

SEQ ID NO: 29517 - RNA, 22 nt, synthetic construct
  source 1..22: mol_type = other RNA
gtttgaacaagaaacctgtatt

SEQ ID NO: 29518 - RNA, 22 nt, synthetic construct
  source 1..22: mol_type = other RNA
gtttgcaaaatggaggaataaa

SEQ ID NO: 29519 - RNA, 22 nt, synthetic construct
  source 1..22: mol_type = other RNA
gtttgctccttgtctcgaccct

SEQ ID NO: 29520 - RNA, 22 nt, synthetic construct
  source 1..22: mol_type = other RNA
gtttgctgctctaaagctgggg

SEQ ID NO: 29521 - RNA, 22 nt, synthetic construct
  source 1..22: mol_type = other RNA
gtttgctgctgttcttgcttct

SEQ ID NO: 29522 - RNA, 22 nt, synthetic construct
  source 1..22: mol_type = other RNA
gtttggaggtcatttgattgga

SEQ ID NO: 29523 - RNA, 22 nt, synthetic construct
  source 1..22: mol_type = other RNA
gtttgggaatctgctctttgtt

SEQ ID NO: 29524 - RNA, 22 nt, synthetic construct
  source 1..22: mol_type = other RNA
gtttggggttgctgtgtttgct

SEQ ID NO: 29525 - RNA, 22 nt, synthetic construct
  source 1..22: mol_type = other RNA
gtttgtctagtcaaaactgtga

SEQ ID NO: 29526 - RNA, 22 nt, synthetic construct
  source 1..22: mol_type = other RNA
gtttgtgctgcctgtttatgag

SEQ ID NO: 29527 - RNA, 22 nt, synthetic construct
  source 1..22: mol_type = other RNA
gttttaaataccgttcagagct

SEQ ID NO: 29528 - RNA, 22 nt, synthetic construct
  source 1..22: mol_type = other RNA
gttttagaagaacaccaccact

SEQ ID NO: 29529 - RNA, 22 nt, synthetic construct
  source 1..22: mol_type = other RNA
gttttagatgggattccgcttg

SEQ ID NO: 29530 - RNA, 22 nt, synthetic construct
  source 1..22: mol_type = other RNA
gttttattcctccattttgcaa

SEQ ID NO: 29531 - RNA, 22 nt, synthetic construct
  source 1..22: mol_type = other RNA
gttttcaccaagcggaatccca

SEQ ID NO: 29532 - RNA, 22 nt, synthetic construct
  source 1..22: mol_type = other RNA
gttttcatggtgaaaatcagta

SEQ ID NO: 29533 - RNA, 22 nt, synthetic construct
  source 1..22: mol_type = other RNA
gttttctcagaacacaatggaa

SEQ ID NO: 29534 - RNA, 22 nt, synthetic construct
  source 1..22: mol_type = other RNA
gttttctgcaccgcaatggaaa

SEQ ID NO: 29535 - RNA, 22 nt, synthetic construct
  source 1..22: mol_type = other RNA
gttttctgggtgtaagcttgcc

SEQ ID NO: 29536 - RNA, 22 nt, synthetic construct
  source 1..22: mol_type = other RNA
gttttctggtggtgctgtgtgc

SEQ ID NO: 29537 - RNA, 22 nt, synthetic construct
  source 1..22: mol_type = other RNA
gttttgactagacaaaccactg

SEQ ID NO: 29538 - RNA, 22 nt, synthetic construct
  source 1..22: mol_type = other RNA
gttttgagggagatgtgaactc

SEQ ID NO: 29539 - RNA, 22 nt, synthetic construct
  source 1..22: mol_type = other RNA
gttttggagaagtgcacctggt

SEQ ID NO: 29540 - RNA, 22 nt, synthetic construct
  source 1..22: mol_type = other RNA
gttttgggtcttgtttcctgca

SEQ ID NO: 29541 - RNA, 22 nt, synthetic construct
  source 1..22: mol_type = other RNA
gttttgttttctggtggtgctg

SEQ ID NO: 29542 - RNA, 22 nt, synthetic construct
  source 1..22: mol_type = other RNA
gtttttcaacacataactgcag

SEQ ID NO: 29543 - RNA, 22 nt, synthetic construct
  source 1..22: mol_type = other RNA
gtttttcagtttgggaatctgc

SEQ ID NO: 29544 - RNA, 22 nt, synthetic construct
  source 1..22: mol_type = other RNA
gtttttcctgtgcctgaccagg

SEQ ID NO: 29545 - RNA, 22 nt, synthetic construct
  source 1..22: mol_type = other RNA
gtttttgagatatgcccatctc

SEQ ID NO: 29546 - RNA, 22 nt, synthetic construct
  source 1..22: mol_type = other RNA
gtttttggaactggagatgttg

SEQ ID NO: 29547 - RNA, 22 nt, synthetic construct
  source 1..22: mol_type = other RNA
gttttttccaggagttcaccat

SEQ ID NO: 29548 - RNA, 22 nt, synthetic construct
  source 1..22: mol_type = other RNA
taaaaacaaggcagtgctaatg

SEQ ID NO: 29549 - RNA, 22 nt, synthetic construct
  source 1..22: mol_type = other RNA
taaaacgcacagttagtgaacc

SEQ ID NO: 29550 - RNA, 22 nt, synthetic construct
  source 1..22: mol_type = other RNA
taaaacgtaatgaggcatcact

SEQ ID NO: 29551 - RNA, 22 nt, synthetic construct
  source 1..22: mol_type = other RNA
taaaactccaccattcagagtg

SEQ ID NO: 29552 - RNA, 22 nt, synthetic construct
  source 1..22: mol_type = other RNA
taaaagtgttgtgttactttgg

SEQ ID NO: 29553 - RNA, 22 nt, synthetic construct
  source 1..22: mol_type = other RNA
taaaagttgaaatgtcagggcc

SEQ ID NO: 29554 - RNA, 22 nt, synthetic construct
  source 1..22: mol_type = other RNA
taaaattattgagaacagaagc

SEQ ID NO: 29555 - RNA, 22 nt, synthetic construct
  source 1..22: mol_type = other RNA
taaacaggcagcacaaacacaa

SEQ ID NO: 29556 - RNA, 22 nt, synthetic construct
  source 1..22: mol_type = other RNA
taaacctgaggcaccaccttcc

SEQ ID NO: 29557 - RNA, 22 nt, synthetic construct
  source 1..22: mol_type = other RNA
taaacgccatgtgtctcagtac

SEQ ID NO: 29558 - RNA, 22 nt, synthetic construct
  source 1..22: mol_type = other RNA
taaactagctgcaatgctaaat

SEQ ID NO: 29559 - RNA, 22 nt, synthetic construct
  source 1..22: mol_type = other RNA
taaagaacagactacacatcct

SEQ ID NO: 29560 - RNA, 22 nt, synthetic construct
  source 1..22: mol_type = other RNA
taaagaggaaatactccagact

SEQ ID NO: 29561 - RNA, 22 nt, synthetic construct
  source 1..22: mol_type = other RNA
taaagatttcaccagtttttca

SEQ ID NO: 29562 - RNA, 22 nt, synthetic construct
  source 1..22: mol_type = other RNA
taaagctggggtgtggctatca

SEQ ID NO: 29563 - RNA, 22 nt, synthetic construct
  source 1..22: mol_type = other RNA
taaagtcaggactcacacgact

SEQ ID NO: 29564 - RNA, 22 nt, synthetic construct
  source 1..22: mol_type = other RNA
taaagtggaagaatgttttcat

SEQ ID NO: 29565 - RNA, 22 nt, synthetic construct
  source 1..22: mol_type = other RNA
taaataccgttcagagctgcca

SEQ ID NO: 29566 - RNA, 22 nt, synthetic construct
  source 1..22: mol_type = other RNA
taaatacctgttcctttcagaa

SEQ ID NO: 29567 - RNA, 22 nt, synthetic construct
  source 1..22: mol_type = other RNA
taaatcgtagaaattcccctta

SEQ ID NO: 29568 - RNA, 22 nt, synthetic construct
  source 1..22: mol_type = other RNA
taaatgccattaacagtcaggc

SEQ ID NO: 29569 - RNA, 22 nt, synthetic construct
  source 1..22: mol_type = other RNA
taaatggagacaccaagtggca

SEQ ID NO: 29570 - RNA, 22 nt, synthetic construct
  source 1..22: mol_type = other RNA
taaatggtctgttttggagaag

SEQ ID NO: 29571 - RNA, 22 nt, synthetic construct
  source 1..22: mol_type = other RNA
taacacaacacttttaagggaa

SEQ ID NO: 29572 - RNA, 22 nt, synthetic construct
  source 1..22: mol_type = other RNA
taacagtcaggctactaatgag

SEQ ID NO: 29573 - RNA, 22 nt, synthetic construct
  source 1..22: mol_type = other RNA
taacatccagggaaccacaaag

SEQ ID NO: 29574 - RNA, 22 nt, synthetic construct
  source 1..22: mol_type = other RNA
taaccatgcaaatgtttttcct

SEQ ID NO: 29575 - RNA, 22 nt, synthetic construct
  source 1..22: mol_type = other RNA
taacccaccaatttttggtagc

SEQ ID NO: 29576 - RNA, 22 nt, synthetic construct
  source 1..22: mol_type = other RNA
taacgacttggcgtgaaactgc

SEQ ID NO: 29577 - RNA, 22 nt, synthetic construct
  source 1..22: mol_type = other RNA
taactaagcaagagaatccacc

SEQ ID NO: 29578 - RNA, 22 nt, synthetic construct
  source 1..22: mol_type = other RNA
taactctgagctgcctccaaag

SEQ ID NO: 29579 - RNA, 22 nt, synthetic construct
  source 1..22: mol_type = other RNA
taactgcagtgggcctgaaaat

SEQ ID NO: 29580 - RNA, 22 nt, synthetic construct
  source 1..22: mol_type = other RNA
taactgcattttcttgggctac

SEQ ID NO: 29581 - RNA, 22 nt, synthetic construct
  source 1..22: mol_type = other RNA
taactgtgcgttttattcctcc

SEQ ID NO: 29582 - RNA, 22 nt, synthetic construct
  source 1..22: mol_type = other RNA
taacttcggggtaagccaagaa

SEQ ID NO: 29583 - RNA, 22 nt, synthetic construct
  source 1..22: mol_type = other RNA
taacttttgaaagagtgccact

SEQ ID NO: 29584 - RNA, 22 nt, synthetic construct
  source 1..22: mol_type = other RNA
taagaaagaatctgtgagttct

SEQ ID NO: 29585 - RNA, 22 nt, synthetic construct
  source 1..22: mol_type = other RNA
taagagatgccaccttagagca

SEQ ID NO: 29586 - RNA, 22 nt, synthetic construct
  source 1..22: mol_type = other RNA
taagagccttatggtcaaataa

SEQ ID NO: 29587 - RNA, 22 nt, synthetic construct
  source 1..22: mol_type = other RNA
taagcaagagaatccacctgca

SEQ ID NO: 29588 - RNA, 22 nt, synthetic construct
  source 1..22: mol_type = other RNA
taagcaccattcatttcatttt

SEQ ID NO: 29589 - RNA, 22 nt, synthetic construct
  source 1..22: mol_type = other RNA
taagccaagaaagaaatccagg

SEQ ID NO: 29590 - RNA, 22 nt, synthetic construct
  source 1..22: mol_type = other RNA
taagcctcataaacaggcagca

SEQ ID NO: 29591 - RNA, 22 nt, synthetic construct
  source 1..22: mol_type = other RNA
taagcttgccttgggagccccc

SEQ ID NO: 29592 - RNA, 22 nt, synthetic construct
  source 1..22: mol_type = other RNA
taaggattccttttctgccact

SEQ ID NO: 29593 - RNA, 22 nt, synthetic construct
  source 1..22: mol_type = other RNA
taaggctcttactctcaaatca

SEQ ID NO: 29594 - RNA, 22 nt, synthetic construct
  source 1..22: mol_type = other RNA
taagggaagtgaaaatagaggg

SEQ ID NO: 29595 - RNA, 22 nt, synthetic construct
  source 1..22: mol_type = other RNA
taaggggaatttctacgattta

SEQ ID NO: 29596 - RNA, 22 nt, synthetic construct
  source 1..22: mol_type = other RNA
taaggtggaacctggatgcaag

SEQ ID NO: 29597 - RNA, 22 nt, synthetic construct
  source 1..22: mol_type = other RNA
taaggtggcatctcttacagaa

SEQ ID NO: 29598 - RNA, 22 nt, synthetic construct
  source 1..22: mol_type = other RNA
taagtaatacaatgttcttgtc

SEQ ID NO: 29599 - RNA, 22 nt, synthetic construct
  source 1..22: mol_type = other RNA
taagtccattcctgataccatc

SEQ ID NO: 29600 - RNA, 22 nt, synthetic construct
  source 1..22: mol_type = other RNA
taagtgccagaaatgtactgag

SEQ ID NO: 29601 - RNA, 22 nt, synthetic construct
  source 1..22: mol_type = other RNA
taagtttttcagtttgggaatc

SEQ ID NO: 29602 - RNA, 22 nt, synthetic construct
  source 1..22: mol_type = other RNA
taataacttttgaaagagtgcc

SEQ ID NO: 29603 - RNA, 22 nt, synthetic construct
  source 1..22: mol_type = other RNA
taatacaatgttcttgtcatgg

SEQ ID NO: 29604 - RNA, 22 nt, synthetic construct
  source 1..22: mol_type = other RNA
taatccatctacacatgtatgc

SEQ ID NO: 29605 - RNA, 22 nt, synthetic construct
  source 1..22: mol_type = other RNA
taatgaggcatcactgccatca

SEQ ID NO: 29606 - RNA, 22 nt, synthetic construct
  source 1..22: mol_type = other RNA
taatgagttgtcctgtgagatc

SEQ ID NO: 29607 - RNA, 22 nt, synthetic construct
  source 1..22: mol_type = other RNA
taatgccagtaaactagctgca

SEQ ID NO: 29608 - RNA, 22 nt, synthetic construct
  source 1..22: mol_type = other RNA
taatgcctaatggtgctacagt

SEQ ID NO: 29609 - RNA, 22 nt, synthetic construct
  source 1..22: mol_type = other RNA
taatggagaaagacgtaacttc

SEQ ID NO: 29610 - RNA, 22 nt, synthetic construct
  source 1..22: mol_type = other RNA
taatggcatttatgtgagatgt

SEQ ID NO: 29611 - RNA, 22 nt, synthetic construct
  source 1..22: mol_type = other RNA
taatggtgctacagtttctgcc

SEQ ID NO: 29612 - RNA, 22 nt, synthetic construct
  source 1..22: mol_type = other RNA
taatgtccaaatgggactggag

SEQ ID NO: 29613 - RNA, 22 nt, synthetic construct
  source 1..22: mol_type = other RNA
taatgtgatcccaaagcaagat

SEQ ID NO: 29614 - RNA, 22 nt, synthetic construct
  source 1..22: mol_type = other RNA
taatgtgcagcaaaagagcatc

SEQ ID NO: 29615 - RNA, 22 nt, synthetic construct
  source 1..22: mol_type = other RNA
taattaccatgacaagaacatt

SEQ ID NO: 29616 - RNA, 22 nt, synthetic construct
  source 1..22: mol_type = other RNA
taattagcacttttcccctcct

SEQ ID NO: 29617 - RNA, 22 nt, synthetic construct
  source 1..22: mol_type = other RNA
taattggcctgtgcatctgact

SEQ ID NO: 29618 - RNA, 22 nt, synthetic construct
  source 1..22: mol_type = other RNA
taattgtgtgaacaggaatgac

SEQ ID NO: 29619 - RNA, 22 nt, synthetic construct
  source 1..22: mol_type = other RNA
taatttggaaggtgactctata

SEQ ID NO: 29620 - RNA, 22 nt, synthetic construct
  source 1..22: mol_type = other RNA
taattttatagagtcaccttcc

SEQ ID NO: 29621 - RNA, 22 nt, synthetic construct
  source 1..22: mol_type = other RNA
taatttttgctgctgttgctgg

SEQ ID NO: 29622 - RNA, 22 nt, synthetic construct
  source 1..22: mol_type = other RNA
tacaaagctccagaatggaagc

SEQ ID NO: 29623 - RNA, 22 nt, synthetic construct
  source 1..22: mol_type = other RNA
tacaatgttcttgtcatggtaa

SEQ ID NO: 29624 - RNA, 22 nt, synthetic construct
  source 1..22: mol_type = other RNA
tacacaagaaagtagagggtat

SEQ ID NO: 29625 - RNA, 22 nt, synthetic construct
  source 1..22: mol_type = other RNA
tacacacctagtttcagagaat

SEQ ID NO: 29626 - RNA, 22 nt, synthetic construct
  source 1..22: mol_type = other RNA
tacacatcctgaactttttgca

SEQ ID NO: 29627 - RNA, 22 nt, synthetic construct
  source 1..22: mol_type = other RNA
tacacatctgcaagatgggaaa

SEQ ID NO: 29628 - RNA, 22 nt, synthetic construct
  source 1..22: mol_type = other RNA
tacacatgtatgcagcccttct

SEQ ID NO: 29629 - RNA, 22 nt, synthetic construct
  source 1..22: mol_type = other RNA
tacacccagaaaacaacacagc

SEQ ID NO: 29630 - RNA, 22 nt, synthetic construct
  source 1..22: mol_type = other RNA
tacacctgtcaagactcaatat

SEQ ID NO: 29631 - RNA, 22 nt, synthetic construct
  source 1..22: mol_type = other RNA
tacactggaaattccaacatgc

SEQ ID NO: 29632 - RNA, 22 nt, synthetic construct
  source 1..22: mol_type = other RNA
tacagaactcacagattctttc

SEQ ID NO: 29633 - RNA, 22 nt, synthetic construct
  source 1..22: mol_type = other RNA
tacagaagcaagaacagcagca

SEQ ID NO: 29634 - RNA, 22 nt, synthetic construct
  source 1..22: mol_type = other RNA
tacagactgcagggacaatgac

SEQ ID NO: 29635 - RNA, 22 nt, synthetic construct
  source 1..22: mol_type = other RNA
tacaggacaactgccagcagtt

SEQ ID NO: 29636 - RNA, 22 nt, synthetic construct
  source 1..22: mol_type = other RNA
tacaggcatgtggcttgcatcc

SEQ ID NO: 29637 - RNA, 22 nt, synthetic construct
  source 1..22: mol_type = other RNA
tacagggtattccataataact

SEQ ID NO: 29638 - RNA, 22 nt, synthetic construct
  source 1..22: mol_type = other RNA
tacaggtttcttgttcaaacaa

SEQ ID NO: 29639 - RNA, 22 nt, synthetic construct
  source 1..22: mol_type = other RNA
tacagtggaccaacatctccag

SEQ ID NO: 29640 - RNA, 22 nt, synthetic construct
  source 1..22: mol_type = other RNA
tacagtttctgcctcttccgtg

SEQ ID NO: 29641 - RNA, 22 nt, synthetic construct
  source 1..22: mol_type = other RNA
tacataaccatgcaaatgtttt

SEQ ID NO: 29642 - RNA, 22 nt, synthetic construct
  source 1..22: mol_type = other RNA
tacatgtgtagatggattagga

SEQ ID NO: 29643 - RNA, 22 nt, synthetic construct
  source 1..22: mol_type = other RNA
tacatttctggcacttacctac

SEQ ID NO: 29644 - RNA, 22 nt, synthetic construct
  source 1..22: mol_type = other RNA
tacatttgtgacttgtgctcca

SEQ ID NO: 29645 - RNA, 22 nt, synthetic construct
  source 1..22: mol_type = other RNA
taccaaaaattggtgggttatg

SEQ ID NO: 29646 - RNA, 22 nt, synthetic construct
  source 1..22: mol_type = other RNA
taccaaaagctcatgtgcagtc

SEQ ID NO: 29647 - RNA, 22 nt, synthetic construct
  source 1..22: mol_type = other RNA
taccaagttgaaatgaatcaag

SEQ ID NO: 29648 - RNA, 22 nt, synthetic construct
  source 1..22: mol_type = other RNA
taccacaccaccaccaccatca

SEQ ID NO: 29649 - RNA, 22 nt, synthetic construct
  source 1..22: mol_type = other RNA
taccatcacctcccatttgcca

SEQ ID NO: 29650 - RNA, 22 nt, synthetic construct
  source 1..22: mol_type = other RNA
taccatgacaagaacattgtat

SEQ ID NO: 29651 - RNA, 22 nt, synthetic construct
  source 1..22: mol_type = other RNA
taccccaaccaaagtaacacaa

SEQ ID NO: 29652 - RNA, 22 nt, synthetic construct
  source 1..22: mol_type = other RNA
taccccgaagttacgtctttct

SEQ ID NO: 29653 - RNA, 22 nt, synthetic construct
  source 1..22: mol_type = other RNA
taccctctactttcttgtgtaa

SEQ ID NO: 29654 - RNA, 22 nt, synthetic construct
  source 1..22: mol_type = other RNA
taccctctattttcacttccct

SEQ ID NO: 29655 - RNA, 22 nt, synthetic construct
  source 1..22: mol_type = other RNA
taccctgtatgaagggaagcca

SEQ ID NO: 29656 - RNA, 22 nt, synthetic construct
  source 1..22: mol_type = other RNA
taccgttcagagctgccaccag

SEQ ID NO: 29657 - RNA, 22 nt, synthetic construct
  source 1..22: mol_type = other RNA
tacctacacatctgcaagatgg

SEQ ID NO: 29658 - RNA, 22 nt, synthetic construct
  source 1..22: mol_type = other RNA
tacctcagggcagatcaattcc

SEQ ID NO: 29659 - RNA, 22 nt, synthetic construct
  source 1..22: mol_type = other RNA
tacctgttcctttcagaaacca

SEQ ID NO: 29660 - RNA, 22 nt, synthetic construct
  source 1..22: mol_type = other RNA
taccttgggactgcccttgatt

SEQ ID NO: 29661 - RNA, 22 nt, synthetic construct
  source 1..22: mol_type = other RNA
tacctttgctgagcaagttgcg

SEQ ID NO: 29662 - RNA, 22 nt, synthetic construct
  source 1..22: mol_type = other RNA
tacctttttccatgttttgttt

SEQ ID NO: 29663 - RNA, 22 nt, synthetic construct
  source 1..22: mol_type = other RNA
tacgatttatattctgtacttc

SEQ ID NO: 29664 - RNA, 22 nt, synthetic construct
  source 1..22: mol_type = other RNA
tacgtctttctccattagcctt

SEQ ID NO: 29665 - RNA, 22 nt, synthetic construct
  source 1..22: mol_type = other RNA
tacgttttagatgggattccgc

SEQ ID NO: 29666 - RNA, 22 nt, synthetic construct
  source 1..22: mol_type = other RNA
tactaatgagttgtcctgtgag

SEQ ID NO: 29667 - RNA, 22 nt, synthetic construct
  source 1..22: mol_type = other RNA
tactccagacttttcctcaccc

SEQ ID NO: 29668 - RNA, 22 nt, synthetic construct
  source 1..22: mol_type = other RNA
tactctcaaatcacagaagcaa

SEQ ID NO: 29669 - RNA, 22 nt, synthetic construct
  source 1..22: mol_type = other RNA
tactgaagaattgatggcagtg

SEQ ID NO: 29670 - RNA, 22 nt, synthetic construct
  source 1..22: mol_type = other RNA
tactgattttcaccatgaaaac

SEQ ID NO: 29671 - RNA, 22 nt, synthetic construct
  source 1..22: mol_type = other RNA
tactggcattatcagcatcatc

SEQ ID NO: 29672 - RNA, 22 nt, synthetic construct
  source 1..22: mol_type = other RNA
tacttaaaaacaaggcagtgct

SEQ ID NO: 29673 - RNA, 22 nt, synthetic construct
  source 1..22: mol_type = other RNA
tacttcaagcaaagctcagtgt

SEQ ID NO: 29674 - RNA, 22 nt, synthetic construct
  source 1..22: mol_type = other RNA
tacttcctccagtcccatttgg

SEQ ID NO: 29675 - RNA, 22 nt, synthetic construct
  source 1..22: mol_type = other RNA
tacttctggatgagctctctca

SEQ ID NO: 29676 - RNA, 22 nt, synthetic construct
  source 1..22: mol_type = other RNA
tacttgatacataaccatgcaa

SEQ ID NO: 29677 - RNA, 22 nt, synthetic construct
  source 1..22: mol_type = other RNA
tacttgcttctgtgatttgaga

SEQ ID NO: 29678 - RNA, 22 nt, synthetic construct
  source 1..22: mol_type = other RNA
tactttcttgtgtaaagtcagg

SEQ ID NO: 29679 - RNA, 22 nt, synthetic construct
  source 1..22: mol_type = other RNA
tactttggttggggtagtggtg

SEQ ID NO: 29680 - RNA, 22 nt, synthetic construct
  source 1..22: mol_type = other RNA
tagaaaccaagatatgtctggt

SEQ ID NO: 29681 - RNA, 22 nt, synthetic construct
  source 1..22: mol_type = other RNA
tagaaattccccttatagtcag

SEQ ID NO: 29682 - RNA, 22 nt, synthetic construct
  source 1..22: mol_type = other RNA
tagaaccaaccatgttgagggc

SEQ ID NO: 29683 - RNA, 22 nt, synthetic construct
  source 1..22: mol_type = other RNA
tagaactgaagcttgttgtgac

SEQ ID NO: 29684 - RNA, 22 nt, synthetic construct
  source 1..22: mol_type = other RNA
tagaagaacaccaccactaccc

SEQ ID NO: 29685 - RNA, 22 nt, synthetic construct
  source 1..22: mol_type = other RNA
tagacaaaccactgctgcagaa

SEQ ID NO: 29686 - RNA, 22 nt, synthetic construct
  source 1..22: mol_type = other RNA
tagagcagcaaacaacttcttc

SEQ ID NO: 29687 - RNA, 22 nt, synthetic construct
  source 1..22: mol_type = other RNA
tagagcagcatgcttttgagtg

SEQ ID NO: 29688 - RNA, 22 nt, synthetic construct
  source 1..22: mol_type = other RNA
tagagggcagccttgtggatgg

SEQ ID NO: 29689 - RNA, 22 nt, synthetic construct
  source 1..22: mol_type = other RNA
tagagggtaaacctgaggcacc

SEQ ID NO: 29690 - RNA, 22 nt, synthetic construct
  source 1..22: mol_type = other RNA
tagagggtattccaagtgtttg

SEQ ID NO: 29691 - RNA, 22 nt, synthetic construct
  source 1..22: mol_type = other RNA
tagaggtctgtgcggaattgat

SEQ ID NO: 29692 - RNA, 22 nt, synthetic construct
  source 1..22: mol_type = other RNA
tagagtcaccttccaaattact

SEQ ID NO: 29693 - RNA, 22 nt, synthetic construct
  source 1..22: mol_type = other RNA
tagatggattaggactctggga

SEQ ID NO: 29694 - RNA, 22 nt, synthetic construct
  source 1..22: mol_type = other RNA
tagatgggattccgcttggtga

SEQ ID NO: 29695 - RNA, 22 nt, synthetic construct
  source 1..22: mol_type = other RNA
tagcaccattaggcattagcac

SEQ ID NO: 29696 - RNA, 22 nt, synthetic construct
  source 1..22: mol_type = other RNA
tagcactgccttgtttttaagt

SEQ ID NO: 29697 - RNA, 22 nt, synthetic construct
  source 1..22: mol_type = other RNA
tagcacttttcccctcctgctc

SEQ ID NO: 29698 - RNA, 22 nt, synthetic construct
  source 1..22: mol_type = other RNA
tagcagtggagagctacaggac

SEQ ID NO: 29699 - RNA, 22 nt, synthetic construct
  source 1..22: mol_type = other RNA
tagcattgcagctagtttactg

SEQ ID NO: 29700 - RNA, 22 nt, synthetic construct
  source 1..22: mol_type = other RNA
tagccacaccccagctttagag

SEQ ID NO: 29701 - RNA, 22 nt, synthetic construct
  source 1..22: mol_type = other RNA
tagccagaggttctgtctggca

SEQ ID NO: 29702 - RNA, 22 nt, synthetic construct
  source 1..22: mol_type = other RNA
tagcccaagaaaatgcagttaa

SEQ ID NO: 29703 - RNA, 22 nt, synthetic construct
  source 1..22: mol_type = other RNA
tagcctgactgttaatggcatt

SEQ ID NO: 29704 - RNA, 22 nt, synthetic construct
  source 1..22: mol_type = other RNA
tagccttttggtcttgtttcaa

SEQ ID NO: 29705 - RNA, 22 nt, synthetic construct
  source 1..22: mol_type = other RNA
tagcgtctggtgaagaattctg

SEQ ID NO: 29706 - RNA, 22 nt, synthetic construct
  source 1..22: mol_type = other RNA
tagctctccactgctaccaaaa

SEQ ID NO: 29707 - RNA, 22 nt, synthetic construct
  source 1..22: mol_type = other RNA
tagctgcaatgctaaatacctg

SEQ ID NO: 29708 - RNA, 22 nt, synthetic construct
  source 1..22: mol_type = other RNA
tagctttgtggttccctggatg

SEQ ID NO: 29709 - RNA, 22 nt, synthetic construct
  source 1..22: mol_type = other RNA
taggactctgggaaggtggtgc

SEQ ID NO: 29710 - RNA, 22 nt, synthetic construct
  source 1..22: mol_type = other RNA
taggagtatctagtaatttgga

SEQ ID NO: 29711 - RNA, 22 nt, synthetic construct
  source 1..22: mol_type = other RNA
taggcattagcactgccttgtt

SEQ ID NO: 29712 - RNA, 22 nt, synthetic construct
  source 1..22: mol_type = other RNA
taggtaagtgccagaaatgtac

SEQ ID NO: 29713 - RNA, 22 nt, synthetic construct
  source 1..22: mol_type = other RNA
taggtgtgtattgtttgaacaa

SEQ ID NO: 29714 - RNA, 22 nt, synthetic construct
  source 1..22: mol_type = other RNA
tagtaatttggaaggtgactct

SEQ ID NO: 29715 - RNA, 22 nt, synthetic construct
  source 1..22: mol_type = other RNA
tagtagcctgactgttaatggc

SEQ ID NO: 29716 - RNA, 22 nt, synthetic construct
  source 1..22: mol_type = other RNA
tagtcaaaactgtgactggccc

SEQ ID NO: 29717 - RNA, 22 nt, synthetic construct
  source 1..22: mol_type = other RNA
tagtcagaccatgaaatcaagt

SEQ ID NO: 29718 - RNA, 22 nt, synthetic construct
  source 1..22: mol_type = other RNA
tagtcagatgcacaggccaatt

SEQ ID NO: 29719 - RNA, 22 nt, synthetic construct
  source 1..22: mol_type = other RNA
tagtcgtgtgagtcctgacttt

SEQ ID NO: 29720 - RNA, 22 nt, synthetic construct
  source 1..22: mol_type = other RNA
tagtctggccaaagaatgatcc

SEQ ID NO: 29721 - RNA, 22 nt, synthetic construct
  source 1..22: mol_type = other RNA
tagtctgttctttattctctga

SEQ ID NO: 29722 - RNA, 22 nt, synthetic construct
  source 1..22: mol_type = other RNA
tagtctgttgccctcaacatgg

SEQ ID NO: 29723 - RNA, 22 nt, synthetic construct
  source 1..22: mol_type = other RNA
tagtgaacactgagctttgctt

SEQ ID NO: 29724 - RNA, 22 nt, synthetic construct
  source 1..22: mol_type = other RNA
tagtgaaccttctctctctggg

SEQ ID NO: 29725 - RNA, 22 nt, synthetic construct
  source 1..22: mol_type = other RNA
tagtgccacacagtgactgcac

SEQ ID NO: 29726 - RNA, 22 nt, synthetic construct
  source 1..22: mol_type = other RNA
tagtgctgtgttgggggcacaa

SEQ ID NO: 29727 - RNA, 22 nt, synthetic construct
  source 1..22: mol_type = other RNA
tagtggcagaaaaggaatcctt

SEQ ID NO: 29728 - RNA, 22 nt, synthetic construct
  source 1..22: mol_type = other RNA
tagtggtggtgttcttctaaaa

SEQ ID NO: 29729 - RNA, 22 nt, synthetic construct
  source 1..22: mol_type = other RNA
tagttacctttttccatgtttt

SEQ ID NO: 29730 - RNA, 22 nt, synthetic construct
  source 1..22: mol_type = other RNA
tagttgttctggtttctgaaag

SEQ ID NO: 29731 - RNA, 22 nt, synthetic construct
  source 1..22: mol_type = other RNA
tagtttactggcattatcagca

SEQ ID NO: 29732 - RNA, 22 nt, synthetic construct
  source 1..22: mol_type = other RNA
tagtttcagagaataaagaaca

SEQ ID NO: 29733 - RNA, 22 nt, synthetic construct
  source 1..22: mol_type = other RNA
tataaatcgtagaaattcccct

SEQ ID NO: 29734 - RNA, 22 nt, synthetic construct
  source 1..22: mol_type = other RNA
tataaggggaatttctacgatt

SEQ ID NO: 29735 - RNA, 22 nt, synthetic construct
  source 1..22: mol_type = other RNA
tatagagtcaccttccaaatta

SEQ ID NO: 29736 - RNA, 22 nt, synthetic construct
  source 1..22: mol_type = other RNA
tataggagtatctagtaatttg

SEQ ID NO: 29737 - RNA, 22 nt, synthetic construct
  source 1..22: mol_type = other RNA
tatagtcagaccatgaaatcaa

SEQ ID NO: 29738 - RNA, 22 nt, synthetic construct
  source 1..22: mol_type = other RNA
tatatccctgtagaactgaagc

SEQ ID NO: 29739 - RNA, 22 nt, synthetic construct
  source 1..22: mol_type = other RNA
tatattctgtacttcctccagt

SEQ ID NO: 29740 - RNA, 22 nt, synthetic construct
  source 1..22: mol_type = other RNA
tatcaacccaatctctccaatc

SEQ ID NO: 29741 - RNA, 22 nt, synthetic construct
  source 1..22: mol_type = other RNA
tatcaagtacctttgctgagca

SEQ ID NO: 29742 - RNA, 22 nt, synthetic construct
  source 1..22: mol_type = other RNA
tatcaagttctgcagcagtggt

SEQ ID NO: 29743 - RNA, 22 nt, synthetic construct
  source 1..22: mol_type = other RNA
tatcacagcttgcaggtggatt

SEQ ID NO: 29744 - RNA, 22 nt, synthetic construct
  source 1..22: mol_type = other RNA
tatcactcaaatcggagacatt

SEQ ID NO: 29745 - RNA, 22 nt, synthetic construct
  source 1..22: mol_type = other RNA
tatcagcatcatcagcatcaca

SEQ ID NO: 29746 - RNA, 22 nt, synthetic construct
  source 1..22: mol_type = other RNA
tatcaggaatggacttagtctg

SEQ ID NO: 29747 - RNA, 22 nt, synthetic construct
  source 1..22: mol_type = other RNA
tatccagattgtgtttccattg

SEQ ID NO: 29748 - RNA, 22 nt, synthetic construct
  source 1..22: mol_type = other RNA
tatccctgtagaactgaagctt

SEQ ID NO: 29749 - RNA, 22 nt, synthetic construct
  source 1..22: mol_type = other RNA
tatcctgttccatcaggcttgc

SEQ ID NO: 29750 - RNA, 22 nt, synthetic construct
  source 1..22: mol_type = other RNA
tatctagtaatttggaaggtga

SEQ ID NO: 29751 - RNA, 22 nt, synthetic construct
  source 1..22: mol_type = other RNA
tatctgaaaccaggatggattg

SEQ ID NO: 29752 - RNA, 22 nt, synthetic construct
  source 1..22: mol_type = other RNA
tatgaagggaagccagaatagt

SEQ ID NO: 29753 - RNA, 22 nt, synthetic construct
  source 1..22: mol_type = other RNA
tatgaggcttatgttgcaaaag

SEQ ID NO: 29754 - RNA, 22 nt, synthetic construct
  source 1..22: mol_type = other RNA
tatgagtctcgaactcgcttga

SEQ ID NO: 29755 - RNA, 22 nt, synthetic construct
  source 1..22: mol_type = other RNA
tatgatttcccatcttgcagat

SEQ ID NO: 29756 - RNA, 22 nt, synthetic construct
  source 1..22: mol_type = other RNA
tatgcacacagcaccaccagaa

SEQ ID NO: 29757 - RNA, 22 nt, synthetic construct
  source 1..22: mol_type = other RNA
tatgcagcccttctccgatgct

SEQ ID NO: 29758 - RNA, 22 nt, synthetic construct
  source 1..22: mol_type = other RNA
tatgcccatctcctgcagaaaa

SEQ ID NO: 29759 - RNA, 22 nt, synthetic construct
  source 1..22: mol_type = other RNA
tatgcgatgggtgagtgatctc

SEQ ID NO: 29760 - RNA, 22 nt, synthetic construct
  source 1..22: mol_type = other RNA
tatgcttgaggtgttctgacat

SEQ ID NO: 29761 - RNA, 22 nt, synthetic construct
  source 1..22: mol_type = other RNA
tatggaataccctgtatgaagg

SEQ ID NO: 29762 - RNA, 22 nt, synthetic construct
  source 1..22: mol_type = other RNA
tatggcaagactcagtttgggg

SEQ ID NO: 29763 - RNA, 22 nt, synthetic construct
  source 1..22: mol_type = other RNA
tatggtcaaataacgacttggc

SEQ ID NO: 29764 - RNA, 22 nt, synthetic construct
  source 1..22: mol_type = other RNA
tatgtatcaagtacctttgctg

SEQ ID NO: 29765 - RNA, 22 nt, synthetic construct
  source 1..22: mol_type = other RNA
tatgtcattcctgttcacacaa

SEQ ID NO: 29766 - RNA, 22 nt, synthetic construct
  source 1..22: mol_type = other RNA
tatgtccccagtgttgaaacag

SEQ ID NO: 29767 - RNA, 22 nt, synthetic construct
  source 1..22: mol_type = other RNA
tatgtctggtcaacaagctgcg

SEQ ID NO: 29768 - RNA, 22 nt, synthetic construct
  source 1..22: mol_type = other RNA
tatgtgagatgtggttttctgc

SEQ ID NO: 29769 - RNA, 22 nt, synthetic construct
  source 1..22: mol_type = other RNA
tatgtgttgaaaaactggtgaa

SEQ ID NO: 29770 - RNA, 22 nt, synthetic construct
  source 1..22: mol_type = other RNA
tatgttgcaaaaggtgtgagtt

SEQ ID NO: 29771 - RNA, 22 nt, synthetic construct
  source 1..22: mol_type = other RNA
tattacttaaaaacaaggcagt

SEQ ID NO: 29772 - RNA, 22 nt, synthetic construct
  source 1..22: mol_type = other RNA
tattatccagattgtgtttcca

SEQ ID NO: 29773 - RNA, 22 nt, synthetic construct
  source 1..22: mol_type = other RNA
tattatggaataccctgtatga

SEQ ID NO: 29774 - RNA, 22 nt, synthetic construct
  source 1..22: mol_type = other RNA
tattcaaaatcaagcgagttcg

SEQ ID NO: 29775 - RNA, 22 nt, synthetic construct
  source 1..22: mol_type = other RNA
tattccaagtgtttgcaaaatg

SEQ ID NO: 29776 - RNA, 22 nt, synthetic construct
  source 1..22: mol_type = other RNA
tattcctccattttgcaaacac

SEQ ID NO: 29777 - RNA, 22 nt, synthetic construct
  source 1..22: mol_type = other RNA
tattctctgaaactaggtgtgt

SEQ ID NO: 29778 - RNA, 22 nt, synthetic construct
  source 1..22: mol_type = other RNA
tattctgaggcctttcagaaag

SEQ ID NO: 29779 - RNA, 22 nt, synthetic construct
  source 1..22: mol_type = other RNA
tattctggcttcccttcataca

SEQ ID NO: 29780 - RNA, 22 nt, synthetic construct
  source 1..22: mol_type = other RNA
tattctgtacttcctccagtcc

SEQ ID NO: 29781 - RNA, 22 nt, synthetic construct
  source 1..22: mol_type = other RNA
tattgagaacagaagcagctgt

SEQ ID NO: 29782 - RNA, 22 nt, synthetic construct
  source 1..22: mol_type = other RNA
tattgagacagtgttttttcca

SEQ ID NO: 29783 - RNA, 22 nt, synthetic construct
  source 1..22: mol_type = other RNA
tattgagtcttgacaggtgtat

SEQ ID NO: 29784 - RNA, 22 nt, synthetic construct
  source 1..22: mol_type = other RNA
tattgcatgtgatgcaagtttt

SEQ ID NO: 29785 - RNA, 22 nt, synthetic construct
  source 1..22: mol_type = other RNA
tattggatacacctgtcaagac

SEQ ID NO: 29786 - RNA, 22 nt, synthetic construct
  source 1..22: mol_type = other RNA
tattgtttgaacaagaaacctg

SEQ ID NO: 29787 - RNA, 22 nt, synthetic construct
  source 1..22: mol_type = other RNA
tattgtttggaggtcatttgat

SEQ ID NO: 29788 - RNA, 22 nt, synthetic construct
  source 1..22: mol_type = other RNA
tatttagcattgcagctagttt

SEQ ID NO: 29789 - RNA, 22 nt, synthetic construct
  source 1..22: mol_type = other RNA
tatttgaccataaggctcttac

SEQ ID NO: 29790 - RNA, 22 nt, synthetic construct
  source 1..22: mol_type = other RNA
tatttggaaaatattgcatgtg

SEQ ID NO: 29791 - RNA, 22 nt, synthetic construct
  source 1..22: mol_type = other RNA
tatttgtaatttttgctgctgt

SEQ ID NO: 29792 - RNA, 22 nt, synthetic construct
  source 1..22: mol_type = other RNA
tattttcacttcccttaaaagt

SEQ ID NO: 29793 - RNA, 22 nt, synthetic construct
  source 1..22: mol_type = other RNA
tattttccaaataatgtgatcc

SEQ ID NO: 29794 - RNA, 22 nt, synthetic construct
  source 1..22: mol_type = other RNA
tattttctgcaggagatgggca

SEQ ID NO: 29795 - RNA, 22 nt, synthetic construct
  source 1..22: mol_type = other RNA
tattttgcatgcacttgatttc

SEQ ID NO: 29796 - RNA, 22 nt, synthetic construct
  source 1..22: mol_type = other RNA
tatttttatatccctgtagaac

SEQ ID NO: 29797 - RNA, 22 nt, synthetic construct
  source 1..22: mol_type = other RNA
tcaaaaccagcaacagcagcaa

SEQ ID NO: 29798 - RNA, 22 nt, synthetic construct
  source 1..22: mol_type = other RNA
tcaaaactgtgactggccctga

SEQ ID NO: 29799 - RNA, 22 nt, synthetic construct
  source 1..22: mol_type = other RNA
tcaaaagcatgctgctctaagg

SEQ ID NO: 29800 - RNA, 22 nt, synthetic construct
  source 1..22: mol_type = other RNA
tcaaaagttattatggaatacc

SEQ ID NO: 29801 - RNA, 22 nt, synthetic construct
  source 1..22: mol_type = other RNA
tcaaaatcaagcgagttcgaga

SEQ ID NO: 29802 - RNA, 22 nt, synthetic construct
  source 1..22: mol_type = other RNA
tcaaacaatacacacctagttt

SEQ ID NO: 29803 - RNA, 22 nt, synthetic construct
  source 1..22: mol_type = other RNA
tcaaactcacaccttttgcaac

SEQ ID NO: 29804 - RNA, 22 nt, synthetic construct
  source 1..22: mol_type = other RNA
tcaaataacgacttggcgtgaa

SEQ ID NO: 29805 - RNA, 22 nt, synthetic construct
  source 1..22: mol_type = other RNA
tcaaatcacagaagcaagtaaa

SEQ ID NO: 29806 - RNA, 22 nt, synthetic construct
  source 1..22: mol_type = other RNA
tcaaatcggagacatttggttg

SEQ ID NO: 29807 - RNA, 22 nt, synthetic construct
  source 1..22: mol_type = other RNA
tcaaatgacctccaaacaatac

SEQ ID NO: 29808 - RNA, 22 nt, synthetic construct
  source 1..22: mol_type = other RNA
tcaacaaagagcagattcccaa

SEQ ID NO: 29809 - RNA, 22 nt, synthetic construct
  source 1..22: mol_type = other RNA
tcaacaagctgcgcaacttgct

SEQ ID NO: 29810 - RNA, 22 nt, synthetic construct
  source 1..22: mol_type = other RNA
tcaacacataactgcagtgggc

SEQ ID NO: 29811 - RNA, 22 nt, synthetic construct
  source 1..22: mol_type = other RNA
tcaacactggggacataagttt

SEQ ID NO: 29812 - RNA, 22 nt, synthetic construct
  source 1..22: mol_type = other RNA
tcaacaggcttcagagactgag

SEQ ID NO: 29813 - RNA, 22 nt, synthetic construct
  source 1..22: mol_type = other RNA
tcaacatggttggttctatcct

SEQ ID NO: 29814 - RNA, 22 nt, synthetic construct
  source 1..22: mol_type = other RNA
tcaaccaaatgtctccgatttg

SEQ ID NO: 29815 - RNA, 22 nt, synthetic construct
  source 1..22: mol_type = other RNA
tcaacccaatctctccaatcaa

SEQ ID NO: 29816 - RNA, 22 nt, synthetic construct
  source 1..22: mol_type = other RNA
tcaactgctggcagttgtcctg

SEQ ID NO: 29817 - RNA, 22 nt, synthetic construct
  source 1..22: mol_type = other RNA
tcaacttggtacatttgtgact

SEQ ID NO: 29818 - RNA, 22 nt, synthetic construct
  source 1..22: mol_type = other RNA
tcaacttttacttgcttctgtg

SEQ ID NO: 29819 - RNA, 22 nt, synthetic construct
  source 1..22: mol_type = other RNA
tcaagaaattgaaacaagacca

SEQ ID NO: 29820 - RNA, 22 nt, synthetic construct
  source 1..22: mol_type = other RNA
tcaagaacaggagcagaagtca

SEQ ID NO: 29821 - RNA, 22 nt, synthetic construct
  source 1..22: mol_type = other RNA
tcaagactcaatatgatttccc

SEQ ID NO: 29822 - RNA, 22 nt, synthetic construct
  source 1..22: mol_type = other RNA
tcaagcaaagctcagtgttcac

SEQ ID NO: 29823 - RNA, 22 nt, synthetic construct
  source 1..22: mol_type = other RNA
tcaagcataacccaccaatttt

SEQ ID NO: 29824 - RNA, 22 nt, synthetic construct
  source 1..22: mol_type = other RNA
tcaagcgagttcgagactcata

SEQ ID NO: 29825 - RNA, 22 nt, synthetic construct
  source 1..22: mol_type = other RNA
tcaagggcagtcccaaggtaca

SEQ ID NO: 29826 - RNA, 22 nt, synthetic construct
  source 1..22: mol_type = other RNA
tcaagtacctttgctgagcaag

SEQ ID NO: 29827 - RNA, 22 nt, synthetic construct
  source 1..22: mol_type = other RNA
tcaagtgcatgcaaaatacagg

SEQ ID NO: 29828 - RNA, 22 nt, synthetic construct
  source 1..22: mol_type = other RNA
tcaagtgctgtttcaacactgg

SEQ ID NO: 29829 - RNA, 22 nt, synthetic construct
  source 1..22: mol_type = other RNA
tcaagttctgcagcagtggttt

SEQ ID NO: 29830 - RNA, 22 nt, synthetic construct
  source 1..22: mol_type = other RNA
tcaataattttatagagtcacc

SEQ ID NO: 29831 - RNA, 22 nt, synthetic construct
  source 1..22: mol_type = other RNA
tcaatatgatttcccatcttgc

SEQ ID NO: 29832 - RNA, 22 nt, synthetic construct
  source 1..22: mol_type = other RNA
tcaatattatccagattgtgtt

SEQ ID NO: 29833 - RNA, 22 nt, synthetic construct
  source 1..22: mol_type = other RNA
tcaatccatcctggtttcagat

SEQ ID NO: 29834 - RNA, 22 nt, synthetic construct
  source 1..22: mol_type = other RNA
tcaatgatgctcttttgctgca

SEQ ID NO: 29835 - RNA, 22 nt, synthetic construct
  source 1..22: mol_type = other RNA
tcaattcaatccatcctggttt

SEQ ID NO: 29836 - RNA, 22 nt, synthetic construct
  source 1..22: mol_type = other RNA
tcaattccgcacagacctctaa

SEQ ID NO: 29837 - RNA, 22 nt, synthetic construct
  source 1..22: mol_type = other RNA
tcaattcttcagtatcaaccca

SEQ ID NO: 29838 - RNA, 22 nt, synthetic construct
  source 1..22: mol_type = other RNA
tcaatttcttgatctgaaggag

SEQ ID NO: 29839 - RNA, 22 nt, synthetic construct
  source 1..22: mol_type = other RNA
tcacaaatgtaccaagttgaaa

SEQ ID NO: 29840 - RNA, 22 nt, synthetic construct
  source 1..22: mol_type = other RNA
tcacaacaagcttcagttctac

SEQ ID NO: 29841 - RNA, 22 nt, synthetic construct
  source 1..22: mol_type = other RNA
tcacaattgcttctttctcccc

SEQ ID NO: 29842 - RNA, 22 nt, synthetic construct
  source 1..22: mol_type = other RNA
tcacacaattattctgaggcct

SEQ ID NO: 29843 - RNA, 22 nt, synthetic construct
  source 1..22: mol_type = other RNA
tcacaccaggtgcacttctcca

SEQ ID NO: 29844 - RNA, 22 nt, synthetic construct
  source 1..22: mol_type = other RNA
tcacaccttttgcaacataagc

SEQ ID NO: 29845 - RNA, 22 nt, synthetic construct
  source 1..22: mol_type = other RNA
tcacacgactattctggcttcc

SEQ ID NO: 29846 - RNA, 22 nt, synthetic construct
  source 1..22: mol_type = other RNA
tcacactcagacccctccccag

SEQ ID NO: 29847 - RNA, 22 nt, synthetic construct
  source 1..22: mol_type = other RNA
tcacagaagcaagtaaaagttg

SEQ ID NO: 29848 - RNA, 22 nt, synthetic construct
  source 1..22: mol_type = other RNA
tcacagattctttcttatcact

SEQ ID NO: 29849 - RNA, 22 nt, synthetic construct
  source 1..22: mol_type = other RNA
tcacagcttgcaggtggattct

SEQ ID NO: 29850 - RNA, 22 nt, synthetic construct
  source 1..22: mol_type = other RNA
tcacaggacaactcattagtag

SEQ ID NO: 29851 - RNA, 22 nt, synthetic construct
  source 1..22: mol_type = other RNA
tcacaggcctcactcaccactg

SEQ ID NO: 29852 - RNA, 22 nt, synthetic construct
  source 1..22: mol_type = other RNA
tcacaggtgctttcaagaacag

SEQ ID NO: 29853 - RNA, 22 nt, synthetic construct
  source 1..22: mol_type = other RNA
tcacagttttgactagacaaac

SEQ ID NO: 29854 - RNA, 22 nt, synthetic construct
  source 1..22: mol_type = other RNA
tcacataaatgccattaacagt

SEQ ID NO: 29855 - RNA, 22 nt, synthetic construct
  source 1..22: mol_type = other RNA
tcacatctccctcaaaaccagc

SEQ ID NO: 29856 - RNA, 22 nt, synthetic construct
  source 1..22: mol_type = other RNA
tcacatgcaatattttccaaat

SEQ ID NO: 29857 - RNA, 22 nt, synthetic construct
  source 1..22: mol_type = other RNA
tcaccaagcggaatcccatcta

SEQ ID NO: 29858 - RNA, 22 nt, synthetic construct
  source 1..22: mol_type = other RNA
tcaccactgcagctggctttgg

SEQ ID NO: 29859 - RNA, 22 nt, synthetic construct
  source 1..22: mol_type = other RNA
tcaccagacgctagctttgtgg

SEQ ID NO: 29860 - RNA, 22 nt, synthetic construct
  source 1..22: mol_type = other RNA
tcaccagtttttcaacacataa

SEQ ID NO: 29861 - RNA, 22 nt, synthetic construct
  source 1..22: mol_type = other RNA
tcaccatgaaaacattcttcca

SEQ ID NO: 29862 - RNA, 22 nt, synthetic construct
  source 1..22: mol_type = other RNA
tcaccatgtgtgtgttccacgg

SEQ ID NO: 29863 - RNA, 22 nt, synthetic construct
  source 1..22: mol_type = other RNA
tcacccatcgcatacctcaggg

SEQ ID NO: 29864 - RNA, 22 nt, synthetic construct
  source 1..22: mol_type = other RNA
tcacccccaaagcaacaatgat

SEQ ID NO: 29865 - RNA, 22 nt, synthetic construct
  source 1..22: mol_type = other RNA
tcacctcccatttgccagacag

SEQ ID NO: 29866 - RNA, 22 nt, synthetic construct
  source 1..22: mol_type = other RNA
tcacctggatttctttcttggc

SEQ ID NO: 29867 - RNA, 22 nt, synthetic construct
  source 1..22: mol_type = other RNA
tcaccttccaaattactagata

SEQ ID NO: 29868 - RNA, 22 nt, synthetic construct
  source 1..22: mol_type = other RNA
tcacgccaagtcgttatttgac

SEQ ID NO: 29869 - RNA, 22 nt, synthetic construct
  source 1..22: mol_type = other RNA
tcactaactgtgcgttttattc

SEQ ID NO: 29870 - RNA, 22 nt, synthetic construct
  source 1..22: mol_type = other RNA
tcactaaggattccttttctgc

SEQ ID NO: 29871 - RNA, 22 nt, synthetic construct
  source 1..22: mol_type = other RNA
tcactcaaatcggagacatttg

SEQ ID NO: 29872 - RNA, 22 nt, synthetic construct
  source 1..22: mol_type = other RNA
tcactcaccactgcagctggct

SEQ ID NO: 29873 - RNA, 22 nt, synthetic construct
  source 1..22: mol_type = other RNA
tcactcacccatcgcatacctc

SEQ ID NO: 29874 - RNA, 22 nt, synthetic construct
  source 1..22: mol_type = other RNA
tcactgccatcaattcttcagt

SEQ ID NO: 29875 - RNA, 22 nt, synthetic construct
  source 1..22: mol_type = other RNA
tcactgtgtggcactagatttc

SEQ ID NO: 29876 - RNA, 22 nt, synthetic construct
  source 1..22: mol_type = other RNA
tcacttcccttaaaagtgttgt

SEQ ID NO: 29877 - RNA, 22 nt, synthetic construct
  source 1..22: mol_type = other RNA
tcagaaaagacaccaaccaaaa

SEQ ID NO: 29878 - RNA, 22 nt, synthetic construct
  source 1..22: mol_type = other RNA
tcagaaaccagaacaactacaa

SEQ ID NO: 29879 - RNA, 22 nt, synthetic construct
  source 1..22: mol_type = other RNA
tcagaaagcatcggagaagggc

SEQ ID NO: 29880 - RNA, 22 nt, synthetic construct
  source 1..22: mol_type = other RNA
tcagaacacaatggaacagtca

SEQ ID NO: 29881 - RNA, 22 nt, synthetic construct
  source 1..22: mol_type = other RNA
tcagaacacctcaagcataacc

SEQ ID NO: 29882 - RNA, 22 nt, synthetic construct
  source 1..22: mol_type = other RNA
tcagaaggaaaaagcactctga

SEQ ID NO: 29883 - RNA, 22 nt, synthetic construct
  source 1..22: mol_type = other RNA
tcagaataattgtgtgaacagg

SEQ ID NO: 29884 - RNA, 22 nt, synthetic construct
  source 1..22: mol_type = other RNA
tcagaatctcttgctctttgtt

SEQ ID NO: 29885 - RNA, 22 nt, synthetic construct
  source 1..22: mol_type = other RNA
tcagaatctgaagctctggatt

SEQ ID NO: 29886 - RNA, 22 nt, synthetic construct
  source 1..22: mol_type = other RNA
tcagaccatgaaatcaagtgca

SEQ ID NO: 29887 - RNA, 22 nt, synthetic construct
  source 1..22: mol_type = other RNA
tcagacccctccccagaaggac

SEQ ID NO: 29888 - RNA, 22 nt, synthetic construct
  source 1..22: mol_type = other RNA
tcagagaataaagaacagacta

SEQ ID NO: 29889 - RNA, 22 nt, synthetic construct
  source 1..22: mol_type = other RNA
tcagagactgagccattttcaa

SEQ ID NO: 29890 - RNA, 22 nt, synthetic construct
  source 1..22: mol_type = other RNA
tcagagctgccaccaggagctt

SEQ ID NO: 29891 - RNA, 22 nt, synthetic construct
  source 1..22: mol_type = other RNA
tcagagtgctttttccttctga

SEQ ID NO: 29892 - RNA, 22 nt, synthetic construct
  source 1..22: mol_type = other RNA
tcagagttagaggtctgtgcgg

SEQ ID NO: 29893 - RNA, 22 nt, synthetic construct
  source 1..22: mol_type = other RNA
tcagatagtgctgtgttggggg

SEQ ID NO: 29894 - RNA, 22 nt, synthetic construct
  source 1..22: mol_type = other RNA
tcagatcaagaaattgaaacaa

SEQ ID NO: 29895 - RNA, 22 nt, synthetic construct
  source 1..22: mol_type = other RNA
tcagatgcacaggccaattaag

SEQ ID NO: 29896 - RNA, 22 nt, synthetic construct
  source 1..22: mol_type = other RNA
tcagatgctgctccatggtctc

SEQ ID NO: 29897 - RNA, 22 nt, synthetic construct
  source 1..22: mol_type = other RNA
tcagattctgaatgagcaggag

SEQ ID NO: 29898 - RNA, 22 nt, synthetic construct
  source 1..22: mol_type = other RNA
tcagcaaagagaaggatcattc

SEQ ID NO: 29899 - RNA, 22 nt, synthetic construct
  source 1..22: mol_type = other RNA
tcagcaaaggtacttgatacat

SEQ ID NO: 29900 - RNA, 22 nt, synthetic construct
  source 1..22: mol_type = other RNA
tcagcatcacaggcctcactca

SEQ ID NO: 29901 - RNA, 22 nt, synthetic construct
  source 1..22: mol_type = other RNA
tcagcatcatcagcatcacagg

SEQ ID NO: 29902 - RNA, 22 nt, synthetic construct
  source 1..22: mol_type = other RNA
tcagcttccttcagaaggaaaa

SEQ ID NO: 29903 - RNA, 22 nt, synthetic construct
  source 1..22: mol_type = other RNA
tcaggaatggacttagtctgtt

SEQ ID NO: 29904 - RNA, 22 nt, synthetic construct
  source 1..22: mol_type = other RNA
tcaggactcacacgactattct

SEQ ID NO: 29905 - RNA, 22 nt, synthetic construct
  source 1..22: mol_type = other RNA
tcaggatgtgtagtctgttctt

SEQ ID NO: 29906 - RNA, 22 nt, synthetic construct
  source 1..22: mol_type = other RNA
tcaggcacaggaaaaacatttg

SEQ ID NO: 29907 - RNA, 22 nt, synthetic construct
  source 1..22: mol_type = other RNA
tcaggcagtgggcttccattct

SEQ ID NO: 29908 - RNA, 22 nt, synthetic construct
  source 1..22: mol_type = other RNA
tcaggcccactgcagttatgtg

SEQ ID NO: 29909 - RNA, 22 nt, synthetic construct
  source 1..22: mol_type = other RNA
tcaggctactaatgagttgtcc

SEQ ID NO: 29910 - RNA, 22 nt, synthetic construct
  source 1..22: mol_type = other RNA
tcaggcttgcttcggggccatc

SEQ ID NO: 29911 - RNA, 22 nt, synthetic construct
  source 1..22: mol_type = other RNA
tcagggcagatcaattccgcac

SEQ ID NO: 29912 - RNA, 22 nt, synthetic construct
  source 1..22: mol_type = other RNA
tcagggccagtcacagttttga

SEQ ID NO: 29913 - RNA, 22 nt, synthetic construct
  source 1..22: mol_type = other RNA
tcaggttccagcagcaatttgc

SEQ ID NO: 29914 - RNA, 22 nt, synthetic construct
  source 1..22: mol_type = other RNA
tcaggtttaccctctattttca

SEQ ID NO: 29915 - RNA, 22 nt, synthetic construct
  source 1..22: mol_type = other RNA
tcagtacatttctggcacttac

SEQ ID NO: 29916 - RNA, 22 nt, synthetic construct
  source 1..22: mol_type = other RNA
tcagtatcaacccaatctctcc

SEQ ID NO: 29917 - RNA, 22 nt, synthetic construct
  source 1..22: mol_type = other RNA
tcagtattcaaaatcaagcgag

SEQ ID NO: 29918 - RNA, 22 nt, synthetic construct
  source 1..22: mol_type = other RNA
tcagtctctgaagcctgttgat

SEQ ID NO: 29919 - RNA, 22 nt, synthetic construct
  source 1..22: mol_type = other RNA
tcagtgttcactaaggattcct

SEQ ID NO: 29920 - RNA, 22 nt, synthetic construct
  source 1..22: mol_type = other RNA
tcagttctacagggatataaaa

SEQ ID NO: 29921 - RNA, 22 nt, synthetic construct
  source 1..22: mol_type = other RNA
tcagtttgggaatctgctcttt

SEQ ID NO: 29922 - RNA, 22 nt, synthetic construct
  source 1..22: mol_type = other RNA
tcagtttggggttgctgtgttt

SEQ ID NO: 29923 - RNA, 22 nt, synthetic construct
  source 1..22: mol_type = other RNA
tcagtttttgagatatgcccat

SEQ ID NO: 29924 - RNA, 22 nt, synthetic construct
  source 1..22: mol_type = other RNA
tcataaacaggcagcacaaaca

SEQ ID NO: 29925 - RNA, 22 nt, synthetic construct
  source 1..22: mol_type = other RNA
tcataatgtccaaatgggactg

SEQ ID NO: 29926 - RNA, 22 nt, synthetic construct
  source 1..22: mol_type = other RNA
tcatacagggtattccataata

SEQ ID NO: 29927 - RNA, 22 nt, synthetic construct
  source 1..22: mol_type = other RNA
tcatattgagtcttgacaggtg

SEQ ID NO: 29928 - RNA, 22 nt, synthetic construct
  source 1..22: mol_type = other RNA
tcatcaactgctggcagttgtc

SEQ ID NO: 29929 - RNA, 22 nt, synthetic construct
  source 1..22: mol_type = other RNA
tcatcagcatcacaggcctcac

SEQ ID NO: 29930 - RNA, 22 nt, synthetic construct
  source 1..22: mol_type = other RNA
tcatccagaagtaaatggagac

SEQ ID NO: 29931 - RNA, 22 nt, synthetic construct
  source 1..22: mol_type = other RNA
tcatggtaattagcacttttcc

SEQ ID NO: 29932 - RNA, 22 nt, synthetic construct
  source 1..22: mol_type = other RNA
tcatggtctgactataagggga

SEQ ID NO: 29933 - RNA, 22 nt, synthetic construct
  source 1..22: mol_type = other RNA
tcatggtgaaaatcagtattca

SEQ ID NO: 29934 - RNA, 22 nt, synthetic construct
  source 1..22: mol_type = other RNA
tcatgtgcagtcactgtgtggc

SEQ ID NO: 29935 - RNA, 22 nt, synthetic construct
  source 1..22: mol_type = other RNA
tcattacgttttagatgggatt

SEQ ID NO: 29936 - RNA, 22 nt, synthetic construct
  source 1..22: mol_type = other RNA
tcattagtagcctgactgttaa

SEQ ID NO: 29937 - RNA, 22 nt, synthetic construct
  source 1..22: mol_type = other RNA
tcattcagaatctgaagctctg

SEQ ID NO: 29938 - RNA, 22 nt, synthetic construct
  source 1..22: mol_type = other RNA
tcattcctgttcacacaattat

SEQ ID NO: 29939 - RNA, 22 nt, synthetic construct
  source 1..22: mol_type = other RNA
tcattctttggccagactaaag

SEQ ID NO: 29940 - RNA, 22 nt, synthetic construct
  source 1..22: mol_type = other RNA
tcattgagaccatggagcagca

SEQ ID NO: 29941 - RNA, 22 nt, synthetic construct
  source 1..22: mol_type = other RNA
tcattgtccctgcagtctgtat

SEQ ID NO: 29942 - RNA, 22 nt, synthetic construct
  source 1..22: mol_type = other RNA
tcattgttgctttgggggtgag

SEQ ID NO: 29943 - RNA, 22 nt, synthetic construct
  source 1..22: mol_type = other RNA
tcatttcaacttggtacatttg

SEQ ID NO: 29944 - RNA, 22 nt, synthetic construct
  source 1..22: mol_type = other RNA
tcatttgattggagagattggg

SEQ ID NO: 29945 - RNA, 22 nt, synthetic construct
  source 1..22: mol_type = other RNA
tcattttcaacaaagagcagat

SEQ ID NO: 29946 - RNA, 22 nt, synthetic construct
  source 1..22: mol_type = other RNA
tccaaaaaccctcacaccaggt

SEQ ID NO: 29947 - RNA, 22 nt, synthetic construct
  source 1..22: mol_type = other RNA
tccaaaacagaccatttaccaa

SEQ ID NO: 29948 - RNA, 22 nt, synthetic construct
  source 1..22: mol_type = other RNA
tccaaacaatacactggaaatt

SEQ ID NO: 29949 - RNA, 22 nt, synthetic construct
  source 1..22: mol_type = other RNA
tccaaagccagctgcagtggtg

SEQ ID NO: 29950 - RNA, 22 nt, synthetic construct
  source 1..22: mol_type = other RNA
tccaaataatgtgatcccaaag

SEQ ID NO: 29951 - RNA, 22 nt, synthetic construct
  source 1..22: mol_type = other RNA
tccaaatgggactggaggaagt

SEQ ID NO: 29952 - RNA, 22 nt, synthetic construct
  source 1..22: mol_type = other RNA
tccaaattactagatactccta

SEQ ID NO: 29953 - RNA, 22 nt, synthetic construct
  source 1..22: mol_type = other RNA
tccaacatgcctggggggctcc

SEQ ID NO: 29954 - RNA, 22 nt, synthetic construct
  source 1..22: mol_type = other RNA
tccaagtgtttgcaaaatggag

SEQ ID NO: 29955 - RNA, 22 nt, synthetic construct
  source 1..22: mol_type = other RNA
tccaatcaaatgacctccaaac

SEQ ID NO: 29956 - RNA, 22 nt, synthetic construct
  source 1..22: mol_type = other RNA
tccacaggttcctcagcttcct

SEQ ID NO: 29957 - RNA, 22 nt, synthetic construct
  source 1..22: mol_type = other RNA
tccaccattcagagtgcttttt

SEQ ID NO: 29958 - RNA, 22 nt, synthetic construct
  source 1..22: mol_type = other RNA
tccacctgcaagctgtgataat

SEQ ID NO: 29959 - RNA, 22 nt, synthetic construct
  source 1..22: mol_type = other RNA
tccaccttaattggcctgtgca

SEQ ID NO: 29960 - RNA, 22 nt, synthetic construct
  source 1..22: mol_type = other RNA
tccacggaagaggcagaaactg

SEQ ID NO: 29961 - RNA, 22 nt, synthetic construct
  source 1..22: mol_type = other RNA
tccactgctaccaaaaattggt

SEQ ID NO: 29962 - RNA, 22 nt, synthetic construct
  source 1..22: mol_type = other RNA
tccactgtaccttgggactgcc

SEQ ID NO: 29963 - RNA, 22 nt, synthetic construct
  source 1..22: mol_type = other RNA
tccactttagtctggccaaaga

SEQ ID NO: 29964 - RNA, 22 nt, synthetic construct
  source 1..22: mol_type = other RNA
tccagaagtaaatggagacacc

SEQ ID NO: 29965 - RNA, 22 nt, synthetic construct
  source 1..22: mol_type = other RNA
tccagaatggaagcccactgcc

SEQ ID NO: 29966 - RNA, 22 nt, synthetic construct
  source 1..22: mol_type = other RNA
tccagacttttcctcaccccca

SEQ ID NO: 29967 - RNA, 22 nt, synthetic construct
  source 1..22: mol_type = other RNA
tccagagcttcagattctgaat

SEQ ID NO: 29968 - RNA, 22 nt, synthetic construct
  source 1..22: mol_type = other RNA
tccagattgtgtttccattgcg

SEQ ID NO: 29969 - RNA, 22 nt, synthetic construct
  source 1..22: mol_type = other RNA
tccagcagcaatttgcaagctc

SEQ ID NO: 29970 - RNA, 22 nt, synthetic construct
  source 1..22: mol_type = other RNA
tccagctgtgttgttttctggg

SEQ ID NO: 29971 - RNA, 22 nt, synthetic construct
  source 1..22: mol_type = other RNA
tccaggagttcaccatgtgtgt

SEQ ID NO: 29972 - RNA, 22 nt, synthetic construct
  source 1..22: mol_type = other RNA
tccagggaaccacaaagctagc

SEQ ID NO: 29973 - RNA, 22 nt, synthetic construct
  source 1..22: mol_type = other RNA
tccaggtgaaagcagtcaacca

SEQ ID NO: 29974 - RNA, 22 nt, synthetic construct
  source 1..22: mol_type = other RNA
tccaggttccaccttaattggc

SEQ ID NO: 29975 - RNA, 22 nt, synthetic construct
  source 1..22: mol_type = other RNA
tccagtcccatttggacattat

SEQ ID NO: 29976 - RNA, 22 nt, synthetic construct
  source 1..22: mol_type = other RNA
tccagtgtattgtttggaggtc

SEQ ID NO: 29977 - RNA, 22 nt, synthetic construct
  source 1..22: mol_type = other RNA
tccagttccaaaaaccctcaca

SEQ ID NO: 29978 - RNA, 22 nt, synthetic construct
  source 1..22: mol_type = other RNA
tccataataacttttgaaagag

SEQ ID NO: 29979 - RNA, 22 nt, synthetic construct
  source 1..22: mol_type = other RNA
tccatcaggcttgcttcggggc

SEQ ID NO: 29980 - RNA, 22 nt, synthetic construct
  source 1..22: mol_type = other RNA
tccatcctggtttcagatagtg

SEQ ID NO: 29981 - RNA, 22 nt, synthetic construct
  source 1..22: mol_type = other RNA
tccatctacacatgtatgcagc

SEQ ID NO: 29982 - RNA, 22 nt, synthetic construct
  source 1..22: mol_type = other RNA
tccatggtctcaatgatgctct

SEQ ID NO: 29983 - RNA, 22 nt, synthetic construct
  source 1..22: mol_type = other RNA
tccatgttttgttttctggtgg

SEQ ID NO: 29984 - RNA, 22 nt, synthetic construct
  source 1..22: mol_type = other RNA
tccattagccttttggtcttgt

SEQ ID NO: 29985 - RNA, 22 nt, synthetic construct
  source 1..22: mol_type = other RNA
tccattcctgataccatcacct

SEQ ID NO: 29986 - RNA, 22 nt, synthetic construct
  source 1..22: mol_type = other RNA
tccattctggagctttgtagcc

SEQ ID NO: 29987 - RNA, 22 nt, synthetic construct
  source 1..22: mol_type = other RNA
tccattgcggtgcagaaaacca

SEQ ID NO: 29988 - RNA, 22 nt, synthetic construct
  source 1..22: mol_type = other RNA
tccattgtgttctgagaaaaca

SEQ ID NO: 29989 - RNA, 22 nt, synthetic construct
  source 1..22: mol_type = other RNA
tccatttacttctggatgagct

SEQ ID NO: 29990 - RNA, 22 nt, synthetic construct
  source 1..22: mol_type = other RNA
tccattttgcaaacacttggaa

SEQ ID NO: 29991 - RNA, 22 nt, synthetic construct
  source 1..22: mol_type = other RNA
tcccaaactgaaaaacttatgt

SEQ ID NO: 29992 - RNA, 22 nt, synthetic construct
  source 1..22: mol_type = other RNA
tcccaaagcaagatcttcttca

SEQ ID NO: 29993 - RNA, 22 nt, synthetic construct
  source 1..22: mol_type = other RNA
tcccaaggcaagcttacaccca

SEQ ID NO: 29994 - RNA, 22 nt, synthetic construct
  source 1..22: mol_type = other RNA
tcccaaggtacagtggaccaac

SEQ ID NO: 29995 - RNA, 22 nt, synthetic construct
  source 1..22: mol_type = other RNA
tcccagagtcctaatccatcta

SEQ ID NO: 29996 - RNA, 22 nt, synthetic construct
  source 1..22: mol_type = other RNA
tcccagagttcacatctccctc

SEQ ID NO: 29997 - RNA, 22 nt, synthetic construct
  source 1..22: mol_type = other RNA
tcccatctaaaacgtaatgagg

SEQ ID NO: 29998 - RNA, 22 nt, synthetic construct
  source 1..22: mol_type = other RNA
tcccatcttgcagatgtgtagg

SEQ ID NO: 29999 - RNA, 22 nt, synthetic construct
  source 1..22: mol_type = other RNA
tcccatttgccagacagaacct

SEQ ID NO: 30000 - RNA, 22 nt, synthetic construct
  source 1..22: mol_type = other RNA
tcccatttggacattatgagtc

SEQ ID NO: 30001 - RNA, 22 nt, synthetic construct
  source 1..22: mol_type = other RNA
tccccagaaggacactcaaaag

SEQ ID NO: 30002 - RNA, 22 nt, synthetic construct
  source 1..22: mol_type = other RNA
tccccagtgttgaaacagcact

SEQ ID NO: 30003 - RNA, 22 nt, synthetic construct
  source 1..22: mol_type = other RNA
tccccctcctcctcttccacag

SEQ ID NO: 30004 - RNA, 22 nt, synthetic construct
  source 1..22: mol_type = other RNA
tcccctcctgctcattcagaat

SEQ ID NO: 30005 - RNA, 22 nt, synthetic construct
  source 1..22: mol_type = other RNA
tccccttatagtcagaccatga

SEQ ID NO: 30006 - RNA, 22 nt, synthetic construct
  source 1..22: mol_type = other RNA
tccctcaaaaccagcaacagca

SEQ ID NO: 30007 - RNA, 22 nt, synthetic construct
  source 1..22: mol_type = other RNA
tccctgcagtctgtatgtcatt

SEQ ID NO: 30008 - RNA, 22 nt, synthetic construct
  source 1..22: mol_type = other RNA
tccctggatgttattttctgca

SEQ ID NO: 30009 - RNA, 22 nt, synthetic construct
  source 1..22: mol_type = other RNA
tccctggtcaggcacaggaaaa

SEQ ID NO: 30010 - RNA, 22 nt, synthetic construct
  source 1..22: mol_type = other RNA
tccctgtagaactgaagcttgt

SEQ ID NO: 30011 - RNA, 22 nt, synthetic construct
  source 1..22: mol_type = other RNA
tcccttaaaagtgttgtgttac

SEQ ID NO: 30012 - RNA, 22 nt, synthetic construct
  source 1..22: mol_type = other RNA
tcccttcatacagggtattcca

SEQ ID NO: 30013 - RNA, 22 nt, synthetic construct
  source 1..22: mol_type = other RNA
tccgatgctttctgaaaggcct

SEQ ID NO: 30014 - RNA, 22 nt, synthetic construct
  source 1..22: mol_type = other RNA
tccgatttgagtgataagaaag

SEQ ID NO: 30015 - RNA, 22 nt, synthetic construct
  source 1..22: mol_type = other RNA
tccgcacagacctctaactctg

SEQ ID NO: 30016 - RNA, 22 nt, synthetic construct
  source 1..22: mol_type = other RNA
tccgcttggtgaaaacgagggg

SEQ ID NO: 30017 - RNA, 22 nt, synthetic construct
  source 1..22: mol_type = other RNA
tccgtggaacacacacatggtg

SEQ ID NO: 30018 - RNA, 22 nt, synthetic construct
  source 1..22: mol_type = other RNA
tcctaatccatctacacatgta

SEQ ID NO: 30019 - RNA, 22 nt, synthetic construct
  source 1..22: mol_type = other RNA
tcctcacccccaaagcaacaat

SEQ ID NO: 30020 - RNA, 22 nt, synthetic construct
  source 1..22: mol_type = other RNA
tcctcagcttccttcagaagga

SEQ ID NO: 30021 - RNA, 22 nt, synthetic construct
  source 1..22: mol_type = other RNA
tcctccagtcccatttggacat

SEQ ID NO: 30022 - RNA, 22 nt, synthetic construct
  source 1..22: mol_type = other RNA
tcctccattttgcaaacacttg

SEQ ID NO: 30023 - RNA, 22 nt, synthetic construct
  source 1..22: mol_type = other RNA
tcctccctggtcaggcacagga

SEQ ID NO: 30024 - RNA, 22 nt, synthetic construct
  source 1..22: mol_type = other RNA
tcctcctcttccacaggttcct

SEQ ID NO: 30025 - RNA, 22 nt, synthetic construct
  source 1..22: mol_type = other RNA
tcctcttccacaggttcctcag

SEQ ID NO: 30026 - RNA, 22 nt, synthetic construct
  source 1..22: mol_type = other RNA
tcctgaactttttgcaggaaac

SEQ ID NO: 30027 - RNA, 22 nt, synthetic construct
  source 1..22: mol_type = other RNA
tcctgactttacacaagaaagt

SEQ ID NO: 30028 - RNA, 22 nt, synthetic construct
  source 1..22: mol_type = other RNA
tcctgataccatcacctcccat

SEQ ID NO: 30029 - RNA, 22 nt, synthetic construct
  source 1..22: mol_type = other RNA
tcctgcaaaaagttcaggatgt

SEQ ID NO: 30030 - RNA, 22 nt, synthetic construct
  source 1..22: mol_type = other RNA
tcctgcagaaaataacatccag

SEQ ID NO: 30031 - RNA, 22 nt, synthetic construct
  source 1..22: mol_type = other RNA
tcctgctcattcagaatctgaa

SEQ ID NO: 30032 - RNA, 22 nt, synthetic construct
  source 1..22: mol_type = other RNA
tcctggaaaaaacactgtctca

SEQ ID NO: 30033 - RNA, 22 nt, synthetic construct
  source 1..22: mol_type = other RNA
tcctggtggcagctctgaacgg

SEQ ID NO: 30034 - RNA, 22 nt, synthetic construct
  source 1..22: mol_type = other RNA
tcctggtttcagatagtgctgt

SEQ ID NO: 30035 - RNA, 22 nt, synthetic construct
  source 1..22: mol_type = other RNA
tcctgtagctctccactgctac

SEQ ID NO: 30036 - RNA, 22 nt, synthetic construct
  source 1..22: mol_type = other RNA
tcctgtgagatcactcacccat

SEQ ID NO: 30037 - RNA, 22 nt, synthetic construct
  source 1..22: mol_type = other RNA
tcctgtgcctgaccagggagga

SEQ ID NO: 30038 - RNA, 22 nt, synthetic construct
  source 1..22: mol_type = other RNA
tcctgttcacacaattattctg

SEQ ID NO: 30039 - RNA, 22 nt, synthetic construct
  source 1..22: mol_type = other RNA
tcctgttccatcaggcttgctt

SEQ ID NO: 30040 - RNA, 22 nt, synthetic construct
  source 1..22: mol_type = other RNA
tcctgttcttgaaagcacctgt

SEQ ID NO: 30041 - RNA, 22 nt, synthetic construct
  source 1..22: mol_type = other RNA
tccttagtgaacactgagcttt

SEQ ID NO: 30042 - RNA, 22 nt, synthetic construct
  source 1..22: mol_type = other RNA
tccttcagaaggaaaaagcact

SEQ ID NO: 30043 - RNA, 22 nt, synthetic construct
  source 1..22: mol_type = other RNA
tccttcagatcaagaaattgaa

SEQ ID NO: 30044 - RNA, 22 nt, synthetic construct
  source 1..22: mol_type = other RNA
tccttctctttgctgatcattg

SEQ ID NO: 30045 - RNA, 22 nt, synthetic construct
  source 1..22: mol_type = other RNA
tccttctgaaggaagctgagga

SEQ ID NO: 30046 - RNA, 22 nt, synthetic construct
  source 1..22: mol_type = other RNA
tccttctggggaggggtctgag

SEQ ID NO: 30047 - RNA, 22 nt, synthetic construct
  source 1..22: mol_type = other RNA
tccttgtctcgacccttcagaa

SEQ ID NO: 30048 - RNA, 22 nt, synthetic construct
  source 1..22: mol_type = other RNA
tcctttcagaaaccagaacaac

SEQ ID NO: 30049 - RNA, 22 nt, synthetic construct
  source 1..22: mol_type = other RNA
tccttttctgccactaccacac

SEQ ID NO: 30050 - RNA, 22 nt, synthetic construct
  source 1..22: mol_type = other RNA
tcgaactcgcttgattttgaat

SEQ ID NO: 30051 - RNA, 22 nt, synthetic construct
  source 1..22: mol_type = other RNA
tcgacccttcagaatctcttgc

SEQ ID NO: 30052 - RNA, 22 nt, synthetic construct
  source 1..22: mol_type = other RNA
tcgagacaaggagcaaacacga

SEQ ID NO: 30053 - RNA, 22 nt, synthetic construct
  source 1..22: mol_type = other RNA
tcgagactcataatgtccaaat

SEQ ID NO: 30054 - RNA, 22 nt, synthetic construct
  source 1..22: mol_type = other RNA
tcgcatacctcagggcagatca

SEQ ID NO: 30055 - RNA, 22 nt, synthetic construct
  source 1..22: mol_type = other RNA
tcgcttgattttgaatactgat

SEQ ID NO: 30056 - RNA, 22 nt, synthetic construct
  source 1..22: mol_type = other RNA
tcggagaagggctgcatacatg

SEQ ID NO: 30057 - RNA, 22 nt, synthetic construct
  source 1..22: mol_type = other RNA
tcggagacatttggttgactgc

SEQ ID NO: 30058 - RNA, 22 nt, synthetic construct
  source 1..22: mol_type = other RNA
tcggggtaagccaagaaagaaa

SEQ ID NO: 30059 - RNA, 22 nt, synthetic construct
  source 1..22: mol_type = other RNA
tcgtagaaattccccttatagt

SEQ ID NO: 30060 - RNA, 22 nt, synthetic construct
  source 1..22: mol_type = other RNA
tcgtgtgagtcctgactttaca

SEQ ID NO: 30061 - RNA, 22 nt, synthetic construct
  source 1..22: mol_type = other RNA
tcgtgtttgctccttgtctcga

SEQ ID NO: 30062 - RNA, 22 nt, synthetic construct
  source 1..22: mol_type = other RNA
tcgttatttgaccataaggctc

SEQ ID NO: 30063 - RNA, 22 nt, synthetic construct
  source 1..22: mol_type = other RNA
tcgttttcaccaagcggaatcc

SEQ ID NO: 30064 - RNA, 22 nt, synthetic construct
  source 1..22: mol_type = other RNA
tctaaaacgtaatgaggcatca

SEQ ID NO: 30065 - RNA, 22 nt, synthetic construct
  source 1..22: mol_type = other RNA
tctaaaactccaccattcagag

SEQ ID NO: 30066 - RNA, 22 nt, synthetic construct
  source 1..22: mol_type = other RNA
tctaaagctggggtgtggctat

SEQ ID NO: 30067 - RNA, 22 nt, synthetic construct
  source 1..22: mol_type = other RNA
tctaactctgagctgcctccaa

SEQ ID NO: 30068 - RNA, 22 nt, synthetic construct
  source 1..22: mol_type = other RNA
tctaaggtggcatctcttacag

SEQ ID NO: 30069 - RNA, 22 nt, synthetic construct
  source 1..22: mol_type = other RNA
tctacacatgtatgcagccctt

SEQ ID NO: 30070 - RNA, 22 nt, synthetic construct
  source 1..22: mol_type = other RNA
tctacagggatataaaaataga

SEQ ID NO: 30071 - RNA, 22 nt, synthetic construct
  source 1..22: mol_type = other RNA
tctacgatttatattctgtact

SEQ ID NO: 30072 - RNA, 22 nt, synthetic construct
  source 1..22: mol_type = other RNA
tctactttcttgtgtaaagtca

SEQ ID NO: 30073 - RNA, 22 nt, synthetic construct
  source 1..22: mol_type = other RNA
tctagtaatttggaaggtgact

SEQ ID NO: 30074 - RNA, 22 nt, synthetic construct
  source 1..22: mol_type = other RNA
tctagtcaaaactgtgactggc

SEQ ID NO: 30075 - RNA, 22 nt, synthetic construct
  source 1..22: mol_type = other RNA
tctagtgccacacagtgactgc

SEQ ID NO: 30076 - RNA, 22 nt, synthetic construct
  source 1..22: mol_type = other RNA
tctatcctgttccatcaggctt

SEQ ID NO: 30077 - RNA, 22 nt, synthetic construct
  source 1..22: mol_type = other RNA
tctattttcacttcccttaaaa

SEQ ID NO: 30078 - RNA, 22 nt, synthetic construct
  source 1..22: mol_type = other RNA
tctatttttatatccctgtaga

SEQ ID NO: 30079 - RNA, 22 nt, synthetic construct
  source 1..22: mol_type = other RNA
tctcaaaaactgatttttgttg

SEQ ID NO: 30080 - RNA, 22 nt, synthetic construct
  source 1..22: mol_type = other RNA
tctcaaatcacagaagcaagta

SEQ ID NO: 30081 - RNA, 22 nt, synthetic construct
  source 1..22: mol_type = other RNA
tctcaatattatccagattgtg

SEQ ID NO: 30082 - RNA, 22 nt, synthetic construct
  source 1..22: mol_type = other RNA
tctcaatgatgctcttttgctg

SEQ ID NO: 30083 - RNA, 22 nt, synthetic construct
  source 1..22: mol_type = other RNA
tctcacaggacaactcattagt

SEQ ID NO: 30084 - RNA, 22 nt, synthetic construct
  source 1..22: mol_type = other RNA
tctcacataaatgccattaaca

SEQ ID NO: 30085 - RNA, 22 nt, synthetic construct
  source 1..22: mol_type = other RNA
tctcagaacacaatggaacagt

SEQ ID NO: 30086 - RNA, 22 nt, synthetic construct
  source 1..22: mol_type = other RNA
tctcaggcagtgggcttccatt

SEQ ID NO: 30087 - RNA, 22 nt, synthetic construct
  source 1..22: mol_type = other RNA
tctcagtacatttctggcactt

SEQ ID NO: 30088 - RNA, 22 nt, synthetic construct
  source 1..22: mol_type = other RNA
tctcatcaactgctggcagttg

SEQ ID NO: 30089 - RNA, 22 nt, synthetic construct
  source 1..22: mol_type = other RNA
tctccaaaacagaccatttacc

SEQ ID NO: 30090 - RNA, 22 nt, synthetic construct
  source 1..22: mol_type = other RNA
tctccaatcaaatgacctccaa

SEQ ID NO: 30091 - RNA, 22 nt, synthetic construct
  source 1..22: mol_type = other RNA
tctccactgctaccaaaaattg

SEQ ID NO: 30092 - RNA, 22 nt, synthetic construct
  source 1..22: mol_type = other RNA
tctccagttccaaaaaccctca

SEQ ID NO: 30093 - RNA, 22 nt, synthetic construct
  source 1..22: mol_type = other RNA
tctccattagccttttggtctt

SEQ ID NO: 30094 - RNA, 22 nt, synthetic construct
  source 1..22: mol_type = other RNA
tctccatttacttctggatgag

SEQ ID NO: 30095 - RNA, 22 nt, synthetic construct
  source 1..22: mol_type = other RNA
tctccccctcctcctcttccac

SEQ ID NO: 30096 - RNA, 22 nt, synthetic construct
  source 1..22: mol_type = other RNA
tctccctcaaaaccagcaacag

SEQ ID NO: 30097 - RNA, 22 nt, synthetic construct
  source 1..22: mol_type = other RNA
tctccgatgctttctgaaaggc

SEQ ID NO: 30098 - RNA, 22 nt, synthetic construct
  source 1..22: mol_type = other RNA
tctccgatttgagtgataagaa

SEQ ID NO: 30099 - RNA, 22 nt, synthetic construct
  source 1..22: mol_type = other RNA
tctcctgcagaaaataacatcc

SEQ ID NO: 30100 - RNA, 22 nt, synthetic construct
  source 1..22: mol_type = other RNA
tctcgaactcgcttgattttga

SEQ ID NO: 30101 - RNA, 22 nt, synthetic construct
  source 1..22: mol_type = other RNA
tctcgacccttcagaatctctt

SEQ ID NO: 30102 - RNA, 22 nt, synthetic construct
  source 1..22: mol_type = other RNA
tctcgtgtttgctccttgtctc

SEQ ID NO: 30103 - RNA, 22 nt, synthetic construct
  source 1..22: mol_type = other RNA
tctctcaggcagtgggcttcca

SEQ ID NO: 30104 - RNA, 22 nt, synthetic construct
  source 1..22: mol_type = other RNA
tctctccaatcaaatgacctcc

SEQ ID NO: 30105 - RNA, 22 nt, synthetic construct
  source 1..22: mol_type = other RNA
tctctctctgggctccttcaga

SEQ ID NO: 30106 - RNA, 22 nt, synthetic construct
  source 1..22: mol_type = other RNA
tctctctgggctccttcagatc

SEQ ID NO: 30107 - RNA, 22 nt, synthetic construct
  source 1..22: mol_type = other RNA
tctctgaaactaggtgtgtatt

SEQ ID NO: 30108 - RNA, 22 nt, synthetic construct
  source 1..22: mol_type = other RNA
tctctgaagcctgttgattcaa

SEQ ID NO: 30109 - RNA, 22 nt, synthetic construct
  source 1..22: mol_type = other RNA
tctctgggctccttcagatcaa

SEQ ID NO: 30110 - RNA, 22 nt, synthetic construct
  source 1..22: mol_type = other RNA
tctcttacagaagcaagaacag

SEQ ID NO: 30111 - RNA, 22 nt, synthetic construct
  source 1..22: mol_type = other RNA
tctcttgctctttgtttctcat

SEQ ID NO: 30112 - RNA, 22 nt, synthetic construct
  source 1..22: mol_type = other RNA
tctcttgcttagttaccttttt

SEQ ID NO: 30113 - RNA, 22 nt, synthetic construct
  source 1..22: mol_type = other RNA
tctctttgctgatcattgttgc

SEQ ID NO: 30114 - RNA, 22 nt, synthetic construct
  source 1..22: mol_type = other RNA
tctgaaaccaggatggattgaa

SEQ ID NO: 30115 - RNA, 22 nt, synthetic construct
  source 1..22: mol_type = other RNA
tctgaaactaggtgtgtattgt

SEQ ID NO: 30116 - RNA, 22 nt, synthetic construct
  source 1..22: mol_type = other RNA
tctgaaaggaacaggtatttag

SEQ ID NO: 30117 - RNA, 22 nt, synthetic construct
  source 1..22: mol_type = other RNA
tctgaaaggcctcagaataatt

SEQ ID NO: 30118 - RNA, 22 nt, synthetic construct
  source 1..22: mol_type = other RNA
tctgaacggtatttaaaacaaa

SEQ ID NO: 30119 - RNA, 22 nt, synthetic construct
  source 1..22: mol_type = other RNA
tctgaagaagttgtttgctgct

SEQ ID NO: 30120 - RNA, 22 nt, synthetic construct
  source 1..22: mol_type = other RNA
tctgaagcagtttcacgccaag

SEQ ID NO: 30121 - RNA, 22 nt, synthetic construct
  source 1..22: mol_type = other RNA
tctgaagcctgttgattcaagt

SEQ ID NO: 30122 - RNA, 22 nt, synthetic construct
  source 1..22: mol_type = other RNA
tctgaagctctggattttcagg

SEQ ID NO: 30123 - RNA, 22 nt, synthetic construct
  source 1..22: mol_type = other RNA
tctgaaggaagctgaggaacct

SEQ ID NO: 30124 - RNA, 22 nt, synthetic construct
  source 1..22: mol_type = other RNA
tctgaaggagcccagagagaga

SEQ ID NO: 30125 - RNA, 22 nt, synthetic construct
  source 1..22: mol_type = other RNA
tctgaagggtcgagacaaggag

SEQ ID NO: 30126 - RNA, 22 nt, synthetic construct
  source 1..22: mol_type = other RNA
tctgaatgagcaggaggggaaa

SEQ ID NO: 30127 - RNA, 22 nt, synthetic construct
  source 1..22: mol_type = other RNA
tctgaatggtggagttttagaa

SEQ ID NO: 30128 - RNA, 22 nt, synthetic construct
  source 1..22: mol_type = other RNA
tctgacattggtcttgttttct

SEQ ID NO: 30129 - RNA, 22 nt, synthetic construct
  source 1..22: mol_type = other RNA
tctgactataaggggaatttct

SEQ ID NO: 30130 - RNA, 22 nt, synthetic construct
  source 1..22: mol_type = other RNA
tctgactatggcaagactcagt

SEQ ID NO: 30131 - RNA, 22 nt, synthetic construct
  source 1..22: mol_type = other RNA
tctgagaaaacaagaccaatgt

SEQ ID NO: 30132 - RNA, 22 nt, synthetic construct
  source 1..22: mol_type = other RNA
tctgagctgcctccaaagccag

SEQ ID NO: 30133 - RNA, 22 nt, synthetic construct
  source 1..22: mol_type = other RNA
tctgaggcctttcagaaagcat

SEQ ID NO: 30134 - RNA, 22 nt, synthetic construct
  source 1..22: mol_type = other RNA
tctgagtgtgacttcctccctg

SEQ ID NO: 30135 - RNA, 22 nt, synthetic construct
  source 1..22: mol_type = other RNA
tctgcaagatgggaaatcatat

SEQ ID NO: 30136 - RNA, 22 nt, synthetic construct
  source 1..22: mol_type = other RNA
tctgcaccgcaatggaaacaca

SEQ ID NO: 30137 - RNA, 22 nt, synthetic construct
  source 1..22: mol_type = other RNA
tctgcagcagtggtttgtctag

SEQ ID NO: 30138 - RNA, 22 nt, synthetic construct
  source 1..22: mol_type = other RNA
tctgcaggagatgggcatatct

SEQ ID NO: 30139 - RNA, 22 nt, synthetic construct
  source 1..22: mol_type = other RNA
tctgccactaccacaccaccac

SEQ ID NO: 30140 - RNA, 22 nt, synthetic construct
  source 1..22: mol_type = other RNA
tctgccctgaggtatgcgatgg

SEQ ID NO: 30141 - RNA, 22 nt, synthetic construct
  source 1..22: mol_type = other RNA
tctgcctcttccgtggaacaca

SEQ ID NO: 30142 - RNA, 22 nt, synthetic construct
  source 1..22: mol_type = other RNA
tctgctcctgttcttgaaagca

SEQ ID NO: 30143 - RNA, 22 nt, synthetic construct
  source 1..22: mol_type = other RNA
tctgctctttgttgaaaatgaa

SEQ ID NO: 30144 - RNA, 22 nt, synthetic construct
  source 1..22: mol_type = other RNA
tctggagctttgtagccagagg

SEQ ID NO: 30145 - RNA, 22 nt, synthetic construct
  source 1..22: mol_type = other RNA
tctggagtatttcctctttatt

SEQ ID NO: 30146 - RNA, 22 nt, synthetic construct
  source 1..22: mol_type = other RNA
tctggataatattgagacagtg

SEQ ID NO: 30147 - RNA, 22 nt, synthetic construct
  source 1..22: mol_type = other RNA
tctggatgagctctctcaggca

SEQ ID NO: 30148 - RNA, 22 nt, synthetic construct
  source 1..22: mol_type = other RNA
tctggattttcaggcccactgc

SEQ ID NO: 30149 - RNA, 22 nt, synthetic construct
  source 1..22: mol_type = other RNA
tctggcaaatgggaggtgatgg

SEQ ID NO: 30150 - RNA, 22 nt, synthetic construct
  source 1..22: mol_type = other RNA
tctggcacttacctacacatct

SEQ ID NO: 30151 - RNA, 22 nt, synthetic construct
  source 1..22: mol_type = other RNA
tctggccaaagaatgatccttc

SEQ ID NO: 30152 - RNA, 22 nt, synthetic construct
  source 1..22: mol_type = other RNA
tctggctacaaagctccagaat

SEQ ID NO: 30153 - RNA, 22 nt, synthetic construct
  source 1..22: mol_type = other RNA
tctggcttcccttcatacaggg

SEQ ID NO: 30154 - RNA, 22 nt, synthetic construct
  source 1..22: mol_type = other RNA
tctgggaaggtggtgcctcagg

SEQ ID NO: 30155 - RNA, 22 nt, synthetic construct
  source 1..22: mol_type = other RNA
tctgggatggttgtgtttgtgc

SEQ ID NO: 30156 - RNA, 22 nt, synthetic construct
  source 1..22: mol_type = other RNA
tctgggctccttcagatcaaga

SEQ ID NO: 30157 - RNA, 22 nt, synthetic construct
  source 1..22: mol_type = other RNA
tctggggaggggtctgagtgtg

SEQ ID NO: 30158 - RNA, 22 nt, synthetic construct
  source 1..22: mol_type = other RNA
tctgggtgtaagcttgccttgg

SEQ ID NO: 30159 - RNA, 22 nt, synthetic construct
  source 1..22: mol_type = other RNA
tctggtcaacaagctgcgcaac

SEQ ID NO: 30160 - RNA, 22 nt, synthetic construct
  source 1..22: mol_type = other RNA
tctggtgaagaattctgttcag

SEQ ID NO: 30161 - RNA, 22 nt, synthetic construct
  source 1..22: mol_type = other RNA
tctggtggtgctgtgtgcatac

SEQ ID NO: 30162 - RNA, 22 nt, synthetic construct
  source 1..22: mol_type = other RNA
tctggtttctgaaaggaacagg

SEQ ID NO: 30163 - RNA, 22 nt, synthetic construct
  source 1..22: mol_type = other RNA
tctgtaagagatgccaccttag

SEQ ID NO: 30164 - RNA, 22 nt, synthetic construct
  source 1..22: mol_type = other RNA
tctgtacttcctccagtcccat

SEQ ID NO: 30165 - RNA, 22 nt, synthetic construct
  source 1..22: mol_type = other RNA
tctgtagcccaagaaaatgcag

SEQ ID NO: 30166 - RNA, 22 nt, synthetic construct
  source 1..22: mol_type = other RNA
tctgtatgtcattcctgttcac

SEQ ID NO: 30167 - RNA, 22 nt, synthetic construct
  source 1..22: mol_type = other RNA
tctgtctggcaaatgggaggtg

SEQ ID NO: 30168 - RNA, 22 nt, synthetic construct
  source 1..22: mol_type = other RNA
tctgtgagttctgtagcccaag

SEQ ID NO: 30169 - RNA, 22 nt, synthetic construct
  source 1..22: mol_type = other RNA
tctgtgatttgagagtaagagc

SEQ ID NO: 30170 - RNA, 22 nt, synthetic construct
  source 1..22: mol_type = other RNA
tctgtgcggaattgatctgccc

SEQ ID NO: 30171 - RNA, 22 nt, synthetic construct
  source 1..22: mol_type = other RNA
tctgttcaggttccagcagcaa

SEQ ID NO: 30172 - RNA, 22 nt, synthetic construct
  source 1..22: mol_type = other RNA
tctgttctttattctctgaaac

SEQ ID NO: 30173 - RNA, 22 nt, synthetic construct
  source 1..22: mol_type = other RNA
tctgttgccctcaacatggttg

SEQ ID NO: 30174 - RNA, 22 nt, synthetic construct
  source 1..22: mol_type = other RNA
tctgttttggagaagtgcacct

SEQ ID NO: 30175 - RNA, 22 nt, synthetic construct
  source 1..22: mol_type = other RNA
tcttacagaagcaagaacagca

SEQ ID NO: 30176 - RNA, 22 nt, synthetic construct
  source 1..22: mol_type = other RNA
tcttactctcaaatcacagaag

SEQ ID NO: 30177 - RNA, 22 nt, synthetic construct
  source 1..22: mol_type = other RNA
tcttatcactcaaatcggagac

SEQ ID NO: 30178 - RNA, 22 nt, synthetic construct
  source 1..22: mol_type = other RNA
tcttcacaggtgctttcaagaa

SEQ ID NO: 30179 - RNA, 22 nt, synthetic construct
  source 1..22: mol_type = other RNA
tcttcaccagacgctagctttg

SEQ ID NO: 30180 - RNA, 22 nt, synthetic construct
  source 1..22: mol_type = other RNA
tcttcagaaaagacaccaacca

SEQ ID NO: 30181 - RNA, 22 nt, synthetic construct
  source 1..22: mol_type = other RNA
tcttcagtatcaacccaatctc

SEQ ID NO: 30182 - RNA, 22 nt, synthetic construct
  source 1..22: mol_type = other RNA
tcttccacaggttcctcagctt

SEQ ID NO: 30183 - RNA, 22 nt, synthetic construct
  source 1..22: mol_type = other RNA
tcttccactttagtctggccaa

SEQ ID NO: 30184 - RNA, 22 nt, synthetic construct
  source 1..22: mol_type = other RNA
tcttccgtggaacacacacatg

SEQ ID NO: 30185 - RNA, 22 nt, synthetic construct
  source 1..22: mol_type = other RNA
tcttctaaaactccaccattca

SEQ ID NO: 30186 - RNA, 22 nt, synthetic construct
  source 1..22: mol_type = other RNA
tcttcttcacaggtgctttcaa

SEQ ID NO: 30187 - RNA, 22 nt, synthetic construct
  source 1..22: mol_type = other RNA
tcttgaaagcacctgtgaagaa

SEQ ID NO: 30188 - RNA, 22 nt, synthetic construct
  source 1..22: mol_type = other RNA
tcttgacaggtgtatccaataa

SEQ ID NO: 30189 - RNA, 22 nt, synthetic construct
  source 1..22: mol_type = other RNA
tcttgatctgaaggagcccaga

SEQ ID NO: 30190 - RNA, 22 nt, synthetic construct
  source 1..22: mol_type = other RNA
tcttgcagatgtgtaggtaagt

SEQ ID NO: 30191 - RNA, 22 nt, synthetic construct
  source 1..22: mol_type = other RNA
tcttgccatagtcagatgcaca

SEQ ID NO: 30192 - RNA, 22 nt, synthetic construct
  source 1..22: mol_type = other RNA
tcttgctctttgtttctcatca

SEQ ID NO: 30193 - RNA, 22 nt, synthetic construct
  source 1..22: mol_type = other RNA
tcttgcttagttacctttttcc

SEQ ID NO: 30194 - RNA, 22 nt, synthetic construct
  source 1..22: mol_type = other RNA
tcttgcttctgtaagagatgcc

SEQ ID NO: 30195 - RNA, 22 nt, synthetic construct
  source 1..22: mol_type = other RNA
tcttgctttgggatcacattat

SEQ ID NO: 30196 - RNA, 22 nt, synthetic construct
  source 1..22: mol_type = other RNA
tcttggcttaccccgaagttac

SEQ ID NO: 30197 - RNA, 22 nt, synthetic construct
  source 1..22: mol_type = other RNA
tcttgggctacagaactcacag

SEQ ID NO: 30198 - RNA, 22 nt, synthetic construct
  source 1..22: mol_type = other RNA
tcttgtcatggtaattagcact

SEQ ID NO: 30199 - RNA, 22 nt, synthetic construct
  source 1..22: mol_type = other RNA
tcttgtgcccccaacacagcac

SEQ ID NO: 30200 - RNA, 22 nt, synthetic construct
  source 1..22: mol_type = other RNA
tcttgtgtaaagtcaggactca

SEQ ID NO: 30201 - RNA, 22 nt, synthetic construct
  source 1..22: mol_type = other RNA
tcttgttcaaacaatacacacc

SEQ ID NO: 30202 - RNA, 22 nt, synthetic construct
  source 1..22: mol_type = other RNA
tcttgtttcaatttcttgatct

SEQ ID NO: 30203 - RNA, 22 nt, synthetic construct
  source 1..22: mol_type = other RNA
tcttgtttcctgcaaaaagttc

SEQ ID NO: 30204 - RNA, 22 nt, synthetic construct
  source 1..22: mol_type = other RNA
tcttgttttctcagaacacaat

SEQ ID NO: 30205 - RNA, 22 nt, synthetic construct
  source 1..22: mol_type = other RNA
tctttaactgcattttcttggg

SEQ ID NO: 30206 - RNA, 22 nt, synthetic construct
  source 1..22: mol_type = other RNA
tctttattctctgaaactaggt

SEQ ID NO: 30207 - RNA, 22 nt, synthetic construct
  source 1..22: mol_type = other RNA
tctttctccattagccttttgg

SEQ ID NO: 30208 - RNA, 22 nt, synthetic construct
  source 1..22: mol_type = other RNA
tctttctccccctcctcctctt

SEQ ID NO: 30209 - RNA, 22 nt, synthetic construct
  source 1..22: mol_type = other RNA
tctttcttatcactcaaatcgg

SEQ ID NO: 30210 - RNA, 22 nt, synthetic construct
  source 1..22: mol_type = other RNA
tctttcttggcttaccccgaag

SEQ ID NO: 30211 - RNA, 22 nt, synthetic construct
  source 1..22: mol_type = other RNA
tctttgctgatcattgttgctt

SEQ ID NO: 30212 - RNA, 22 nt, synthetic construct
  source 1..22: mol_type = other RNA
tctttggccagactaaagtgga

SEQ ID NO: 30213 - RNA, 22 nt, synthetic construct
  source 1..22: mol_type = other RNA
tctttgtttctcatcaactgct

SEQ ID NO: 30214 - RNA, 22 nt, synthetic construct
  source 1..22: mol_type = other RNA
tcttttctgaagaagttgtttg

SEQ ID NO: 30215 - RNA, 22 nt, synthetic construct
  source 1..22: mol_type = other RNA
tcttttgctgcacattatcaca

SEQ ID NO: 30216 - RNA, 22 nt, synthetic construct
  source 1..22: mol_type = other RNA
tcttttggttggtgtcttttct

SEQ ID NO: 30217 - RNA, 22 nt, synthetic construct
  source 1..22: mol_type = other RNA
tgaaaaactggtgaaatcttta

SEQ ID NO: 30218 - RNA, 22 nt, synthetic construct
  source 1..22: mol_type = other RNA
tgaaaaacttatgtccccagtg

SEQ ID NO: 30219 - RNA, 22 nt, synthetic construct
  source 1..22: mol_type = other RNA
tgaaaacattcttccactttag

SEQ ID NO: 30220 - RNA, 22 nt, synthetic construct
  source 1..22: mol_type = other RNA
tgaaaacgaggggccttcaatt

SEQ ID NO: 30221 - RNA, 22 nt, synthetic construct
  source 1..22: mol_type = other RNA
tgaaaatagagggtaaacctga

SEQ ID NO: 30222 - RNA, 22 nt, synthetic construct
  source 1..22: mol_type = other RNA
tgaaaatccagagcttcagatt

SEQ ID NO: 30223 - RNA, 22 nt, synthetic construct
  source 1..22: mol_type = other RNA
tgaaaatgaaatctagtgccac

SEQ ID NO: 30224 - RNA, 22 nt, synthetic construct
  source 1..22: mol_type = other RNA
tgaaaatggctcagtctctgaa

SEQ ID NO: 30225 - RNA, 22 nt, synthetic construct
  source 1..22: mol_type = other RNA
tgaaacaagaccaaaaggctaa

SEQ ID NO: 30226 - RNA, 22 nt, synthetic construct
  source 1..22: mol_type = other RNA
tgaaacagcacttgaatcaaca

SEQ ID NO: 30227 - RNA, 22 nt, synthetic construct
  source 1..22: mol_type = other RNA
tgaaaccaggatggattgaatt

SEQ ID NO: 30228 - RNA, 22 nt, synthetic construct
  source 1..22: mol_type = other RNA
tgaaactaggtgtgtattgttt

SEQ ID NO: 30229 - RNA, 22 nt, synthetic construct
  source 1..22: mol_type = other RNA
tgaaactgcttcagatgctgct

SEQ ID NO: 30230 - RNA, 22 nt, synthetic construct
  source 1..22: mol_type = other RNA
tgaaagagtgccacttggtgtc

SEQ ID NO: 30231 - RNA, 22 nt, synthetic construct
  source 1..22: mol_type = other RNA
tgaaagcacctgtgaagaagat

SEQ ID NO: 30232 - RNA, 22 nt, synthetic construct
  source 1..22: mol_type = other RNA
tgaaagcagtcaaccaaatgtc

SEQ ID NO: 30233 - RNA, 22 nt, synthetic construct
  source 1..22: mol_type = other RNA
tgaaaggaacaggtatttagca

SEQ ID NO: 30234 - RNA, 22 nt, synthetic construct
  source 1..22: mol_type = other RNA
tgaaaggcctcagaataattgt

SEQ ID NO: 30235 - RNA, 22 nt, synthetic construct
  source 1..22: mol_type = other RNA
tgaaatcaagtgcatgcaaaat

SEQ ID NO: 30236 - RNA, 22 nt, synthetic construct
  source 1..22: mol_type = other RNA
tgaaatctagtgccacacagtg

SEQ ID NO: 30237 - RNA, 22 nt, synthetic construct
  source 1..22: mol_type = other RNA
tgaaatctttaactgcattttc

SEQ ID NO: 30238 - RNA, 22 nt, synthetic construct
  source 1..22: mol_type = other RNA
tgaaatgaatcaagggcagtcc

SEQ ID NO: 30239 - RNA, 22 nt, synthetic construct
  source 1..22: mol_type = other RNA
tgaaatgaatggtgcttacttc

SEQ ID NO: 30240 - RNA, 22 nt, synthetic construct
  source 1..22: mol_type = other RNA
tgaaatgtcagggccagtcaca

SEQ ID NO: 30241 - RNA, 22 nt, synthetic construct
  source 1..22: mol_type = other RNA
tgaacaagaaacctgtattttg

SEQ ID NO: 30242 - RNA, 22 nt, synthetic construct
  source 1..22: mol_type = other RNA
tgaacactgagctttgcttgaa

SEQ ID NO: 30243 - RNA, 22 nt, synthetic construct
  source 1..22: mol_type = other RNA
tgaacagaattcttcaccagac

SEQ ID NO: 30244 - RNA, 22 nt, synthetic construct
  source 1..22: mol_type = other RNA
tgaacaggaatgacatacagac

SEQ ID NO: 30245 - RNA, 22 nt, synthetic construct
  source 1..22: mol_type = other RNA
tgaaccttctctctctgggctc

SEQ ID NO: 30246 - RNA, 22 nt, synthetic construct
  source 1..22: mol_type = other RNA
tgaactcctggaaaaaacactg

SEQ ID NO: 30247 - RNA, 22 nt, synthetic construct
  source 1..22: mol_type = other RNA
tgaactctgggatggttgtgtt

SEQ ID NO: 30248 - RNA, 22 nt, synthetic construct
  source 1..22: mol_type = other RNA
tgaactttttgcaggaaacaag

SEQ ID NO: 30249 - RNA, 22 nt, synthetic construct
  source 1..22: mol_type = other RNA
tgaagaagatcttgctttggga

SEQ ID NO: 30250 - RNA, 22 nt, synthetic construct
  source 1..22: mol_type = other RNA
tgaagaagttgtttgctgctct

SEQ ID NO: 30251 - RNA, 22 nt, synthetic construct
  source 1..22: mol_type = other RNA
tgaagaattctgttcaggttcc

SEQ ID NO: 30252 - RNA, 22 nt, synthetic construct
  source 1..22: mol_type = other RNA
tgaagaattgatggcagtgatg

SEQ ID NO: 30253 - RNA, 22 nt, synthetic construct
  source 1..22: mol_type = other RNA
tgaagcagtttcacgccaagtc

SEQ ID NO: 30254 - RNA, 22 nt, synthetic construct
  source 1..22: mol_type = other RNA
tgaagcctgttgattcaagtgc

SEQ ID NO: 30255 - RNA, 22 nt, synthetic construct
  source 1..22: mol_type = other RNA
tgaagctctggattttcaggcc

SEQ ID NO: 30256 - RNA, 22 nt, synthetic construct
  source 1..22: mol_type = other RNA
tgaagcttgttgtgacttctgc

SEQ ID NO: 30257 - RNA, 22 nt, synthetic construct
  source 1..22: mol_type = other RNA
tgaaggaagctgaggaacctgt

SEQ ID NO: 30258 - RNA, 22 nt, synthetic construct
  source 1..22: mol_type = other RNA
tgaaggagcccagagagagaag

SEQ ID NO: 30259 - RNA, 22 nt, synthetic construct
  source 1..22: mol_type = other RNA
tgaaggcccctcgttttcacca

SEQ ID NO: 30260 - RNA, 22 nt, synthetic construct
  source 1..22: mol_type = other RNA
tgaagggaagccagaatagtcg

SEQ ID NO: 30261 - RNA, 22 nt, synthetic construct
  source 1..22: mol_type = other RNA
tgaagggtcgagacaaggagca

SEQ ID NO: 30262 - RNA, 22 nt, synthetic construct
  source 1..22: mol_type = other RNA
tgaagtaagcaccattcatttc

SEQ ID NO: 30263 - RNA, 22 nt, synthetic construct
  source 1..22: mol_type = other RNA
tgaatactgattttcaccatga

SEQ ID NO: 30264 - RNA, 22 nt, synthetic construct
  source 1..22: mol_type = other RNA
tgaatcaacaggcttcagagac

SEQ ID NO: 30265 - RNA, 22 nt, synthetic construct
  source 1..22: mol_type = other RNA
tgaatcaagggcagtcccaagg

SEQ ID NO: 30266 - RNA, 22 nt, synthetic construct
  source 1..22: mol_type = other RNA
tgaatgagcaggaggggaaaag

SEQ ID NO: 30267 - RNA, 22 nt, synthetic construct
  source 1..22: mol_type = other RNA
tgaatggtgcttacttcaagca

SEQ ID NO: 30268 - RNA, 22 nt, synthetic construct
  source 1..22: mol_type = other RNA
tgaatggtggagttttagaaga

SEQ ID NO: 30269 - RNA, 22 nt, synthetic construct
  source 1..22: mol_type = other RNA
tgaattgaaggcccctcgtttt

SEQ ID NO: 30270 - RNA, 22 nt, synthetic construct
  source 1..22: mol_type = other RNA
tgacaagaacattgtattactt

SEQ ID NO: 30271 - RNA, 22 nt, synthetic construct
  source 1..22: mol_type = other RNA
tgacaggtgtatccaataaatt

SEQ ID NO: 30272 - RNA, 22 nt, synthetic construct
  source 1..22: mol_type = other RNA
tgacatacagactgcagggaca

SEQ ID NO: 30273 - RNA, 22 nt, synthetic construct
  source 1..22: mol_type = other RNA
tgacattggtcttgttttctca

SEQ ID NO: 30274 - RNA, 22 nt, synthetic construct
  source 1..22: mol_type = other RNA
tgacatttcaacttttacttgc

SEQ ID NO: 30275 - RNA, 22 nt, synthetic construct
  source 1..22: mol_type = other RNA
tgaccagacatatcttggtttc

SEQ ID NO: 30276 - RNA, 22 nt, synthetic construct
  source 1..22: mol_type = other RNA
tgaccagggaggaagtcacact

SEQ ID NO: 30277 - RNA, 22 nt, synthetic construct
  source 1..22: mol_type = other RNA
tgaccataaggctcttactctc

SEQ ID NO: 30278 - RNA, 22 nt, synthetic construct
  source 1..22: mol_type = other RNA
tgacctccaaacaatacactgg

SEQ ID NO: 30279 - RNA, 22 nt, synthetic construct
  source 1..22: mol_type = other RNA
tgactagacaaaccactgctgc

SEQ ID NO: 30280 - RNA, 22 nt, synthetic construct
  source 1..22: mol_type = other RNA
tgactataaggggaatttctac

SEQ ID NO: 30281 - RNA, 22 nt, synthetic construct
  source 1..22: mol_type = other RNA
tgactatggcaagactcagttt

SEQ ID NO: 30282 - RNA, 22 nt, synthetic construct
  source 1..22: mol_type = other RNA
tgactgcacatgagcttttggt

SEQ ID NO: 30283 - RNA, 22 nt, synthetic construct
  source 1..22: mol_type = other RNA
tgactgctttcacctggatttc

SEQ ID NO: 30284 - RNA, 22 nt, synthetic construct
  source 1..22: mol_type = other RNA
tgactggccctgacatttcaac

SEQ ID NO: 30285 - RNA, 22 nt, synthetic construct
  source 1..22: mol_type = other RNA
tgactgttaatggcatttatgt

SEQ ID NO: 30286 - RNA, 22 nt, synthetic construct
  source 1..22: mol_type = other RNA
tgactgttccattgtgttctga

SEQ ID NO: 30287 - RNA, 22 nt, synthetic construct
  source 1..22: mol_type = other RNA
tgacttcctccctggtcaggca

SEQ ID NO: 30288 - RNA, 22 nt, synthetic construct
  source 1..22: mol_type = other RNA
tgacttctgctcctgttcttga

SEQ ID NO: 30289 - RNA, 22 nt, synthetic construct
  source 1..22: mol_type = other RNA
tgacttgtgctccagctgtgtt

SEQ ID NO: 30290 - RNA, 22 nt, synthetic construct
  source 1..22: mol_type = other RNA
tgactttacacaagaaagtaga

SEQ ID NO: 30291 - RNA, 22 nt, synthetic construct
  source 1..22: mol_type = other RNA
tgagaaaacaagaccaatgtca

SEQ ID NO: 30292 - RNA, 22 nt, synthetic construct
  source 1..22: mol_type = other RNA
tgagaaacaaagagcaagagat

SEQ ID NO: 30293 - RNA, 22 nt, synthetic construct
  source 1..22: mol_type = other RNA
tgagaacagaagcagctgttct

SEQ ID NO: 30294 - RNA, 22 nt, synthetic construct
  source 1..22: mol_type = other RNA
tgagacagtgttttttccagga

SEQ ID NO: 30295 - RNA, 22 nt, synthetic construct
  source 1..22: mol_type = other RNA
tgagaccatggagcagcatctg

SEQ ID NO: 30296 - RNA, 22 nt, synthetic construct
  source 1..22: mol_type = other RNA
tgagagagctcatccagaagta

SEQ ID NO: 30297 - RNA, 22 nt, synthetic construct
  source 1..22: mol_type = other RNA
tgagagtaagagccttatggtc

SEQ ID NO: 30298 - RNA, 22 nt, synthetic construct
  source 1..22: mol_type = other RNA
tgagatatgcccatctcctgca

SEQ ID NO: 30299 - RNA, 22 nt, synthetic construct
  source 1..22: mol_type = other RNA
tgagatcactcacccatcgcat

SEQ ID NO: 30300 - RNA, 22 nt, synthetic construct
  source 1..22: mol_type = other RNA
tgagatgtggttttctgcaccg

SEQ ID NO: 30301 - RNA, 22 nt, synthetic construct
  source 1..22: mol_type = other RNA
tgagcaagttgcgcagcttgtt

SEQ ID NO: 30302 - RNA, 22 nt, synthetic construct
  source 1..22: mol_type = other RNA
tgagcaggaggggaaaagtgct

SEQ ID NO: 30303 - RNA, 22 nt, synthetic construct
  source 1..22: mol_type = other RNA
tgagccattttcaaactcacac

SEQ ID NO: 30304 - RNA, 22 nt, synthetic construct
  source 1..22: mol_type = other RNA
tgagctctctcaggcagtgggc

SEQ ID NO: 30305 - RNA, 22 nt, synthetic construct
  source 1..22: mol_type = other RNA
tgagctgcctccaaagccagct

SEQ ID NO: 30306 - RNA, 22 nt, synthetic construct
  source 1..22: mol_type = other RNA
tgagctttgcttgaagtaagca

SEQ ID NO: 30307 - RNA, 22 nt, synthetic construct
  source 1..22: mol_type = other RNA
tgagcttttggtaaatggtctg

SEQ ID NO: 30308 - RNA, 22 nt, synthetic construct
  source 1..22: mol_type = other RNA
tgaggaaaagtctggagtattt

SEQ ID NO: 30309 - RNA, 22 nt, synthetic construct
  source 1..22: mol_type = other RNA
tgaggaacctgtggaagaggag

SEQ ID NO: 30310 - RNA, 22 nt, synthetic construct
  source 1..22: mol_type = other RNA
tgaggcaccaccttcccagagt

SEQ ID NO: 30311 - RNA, 22 nt, synthetic construct
  source 1..22: mol_type = other RNA
tgaggcatcactgccatcaatt

SEQ ID NO: 30312 - RNA, 22 nt, synthetic construct
  source 1..22: mol_type = other RNA
tgaggcctgtgatgctgatgat

SEQ ID NO: 30313 - RNA, 22 nt, synthetic construct
  source 1..22: mol_type = other RNA
tgaggcctttcagaaagcatcg

SEQ ID NO: 30314 - RNA, 22 nt, synthetic construct
  source 1..22: mol_type = other RNA
tgaggcttatgttgcaaaaggt

SEQ ID NO: 30315 - RNA, 22 nt, synthetic construct
  source 1..22: mol_type = other RNA
tgagggagatgtgaactctggg

SEQ ID NO: 30316 - RNA, 22 nt, synthetic construct
  source 1..22: mol_type = other RNA
tgagggcaacagactaagtcca

SEQ ID NO: 30317 - RNA, 22 nt, synthetic construct
  source 1..22: mol_type = other RNA
tgagggtttttggaactggaga

SEQ ID NO: 30318 - RNA, 22 nt, synthetic construct
  source 1..22: mol_type = other RNA
tgaggtatgcgatgggtgagtg

SEQ ID NO: 30319 - RNA, 22 nt, synthetic construct
  source 1..22: mol_type = other RNA
tgaggtgttctgacattggtct

SEQ ID NO: 30320 - RNA, 22 nt, synthetic construct
  source 1..22: mol_type = other RNA
tgagtcctgactttacacaaga

SEQ ID NO: 30321 - RNA, 22 nt, synthetic construct
  source 1..22: mol_type = other RNA
tgagtctcgaactcgcttgatt

SEQ ID NO: 30322 - RNA, 22 nt, synthetic construct
  source 1..22: mol_type = other RNA
tgagtcttgacaggtgtatcca

SEQ ID NO: 30323 - RNA, 22 nt, synthetic construct
  source 1..22: mol_type = other RNA
tgagtcttgccatagtcagatg

SEQ ID NO: 30324 - RNA, 22 nt, synthetic construct
  source 1..22: mol_type = other RNA
tgagtgaggcctgtgatgctga

SEQ ID NO: 30325 - RNA, 22 nt, synthetic construct
  source 1..22: mol_type = other RNA
tgagtgataagaaagaatctgt

SEQ ID NO: 30326 - RNA, 22 nt, synthetic construct
  source 1..22: mol_type = other RNA
tgagtgatctcacaggacaact

SEQ ID NO: 30327 - RNA, 22 nt, synthetic construct
  source 1..22: mol_type = other RNA
tgagtgtccttctggggagggg

SEQ ID NO: 30328 - RNA, 22 nt, synthetic construct
  source 1..22: mol_type = other RNA
tgagtgtgacttcctccctggt

SEQ ID NO: 30329 - RNA, 22 nt, synthetic construct
  source 1..22: mol_type = other RNA
tgagttctgtagcccaagaaaa

SEQ ID NO: 30330 - RNA, 22 nt, synthetic construct
  source 1..22: mol_type = other RNA
tgagttgtcctgtgagatcact

SEQ ID NO: 30331 - RNA, 22 nt, synthetic construct
  source 1..22: mol_type = other RNA
tgagtttgaaaatggctcagtc

SEQ ID NO: 30332 - RNA, 22 nt, synthetic construct
  source 1..22: mol_type = other RNA
tgataagaaagaatctgtgagt

SEQ ID NO: 30333 - RNA, 22 nt, synthetic construct
  source 1..22: mol_type = other RNA
tgataatgccagtaaactagct

SEQ ID NO: 30334 - RNA, 22 nt, synthetic construct
  source 1..22: mol_type = other RNA
tgataatgtgcagcaaaagagc

SEQ ID NO: 30335 - RNA, 22 nt, synthetic construct
  source 1..22: mol_type = other RNA
tgatacataaccatgcaaatgt

SEQ ID NO: 30336 - RNA, 22 nt, synthetic construct
  source 1..22: mol_type = other RNA
tgataccatcacctcccatttg

SEQ ID NO: 30337 - RNA, 22 nt, synthetic construct
  source 1..22: mol_type = other RNA
tgatactgaagaattgatggca

SEQ ID NO: 30338 - RNA, 22 nt, synthetic construct
  source 1..22: mol_type = other RNA
tgatagccacaccccagcttta

SEQ ID NO: 30339 - RNA, 22 nt, synthetic construct
  source 1..22: mol_type = other RNA
tgatcagcaaagagaaggatca

SEQ ID NO: 30340 - RNA, 22 nt, synthetic construct
  source 1..22: mol_type = other RNA
tgatcattgttgctttgggggt

SEQ ID NO: 30341 - RNA, 22 nt, synthetic construct
  source 1..22: mol_type = other RNA
tgatcccaaagcaagatcttct

SEQ ID NO: 30342 - RNA, 22 nt, synthetic construct
  source 1..22: mol_type = other RNA
tgatccttctctttgctgatca

SEQ ID NO: 30343 - RNA, 22 nt, synthetic construct
  source 1..22: mol_type = other RNA
tgatctcacaggacaactcatt

SEQ ID NO: 30344 - RNA, 22 nt, synthetic construct
  source 1..22: mol_type = other RNA
tgatctgaaggagcccagagag

SEQ ID NO: 30345 - RNA, 22 nt, synthetic construct
  source 1..22: mol_type = other RNA
tgatctgccctgaggtatgcga

SEQ ID NO: 30346 - RNA, 22 nt, synthetic construct
  source 1..22: mol_type = other RNA
tgatgagaaacaaagagcaaga

SEQ ID NO: 30347 - RNA, 22 nt, synthetic construct
  source 1..22: mol_type = other RNA
tgatgatgctgataatgccagt

SEQ ID NO: 30348 - RNA, 22 nt, synthetic construct
  source 1..22: mol_type = other RNA
tgatgcaagttttgggtcttgt

SEQ ID NO: 30349 - RNA, 22 nt, synthetic construct
  source 1..22: mol_type = other RNA
tgatgcctcattacgttttaga

SEQ ID NO: 30350 - RNA, 22 nt, synthetic construct
  source 1..22: mol_type = other RNA
tgatgctcttttgctgcacatt

SEQ ID NO: 30351 - RNA, 22 nt, synthetic construct
  source 1..22: mol_type = other RNA
tgatgctgataatgccagtaaa

SEQ ID NO: 30352 - RNA, 22 nt, synthetic construct
  source 1..22: mol_type = other RNA
tgatgctgatgatgctgataat

SEQ ID NO: 30353 - RNA, 22 nt, synthetic construct
  source 1..22: mol_type = other RNA
tgatggaacaggatagaaccaa

SEQ ID NO: 30354 - RNA, 22 nt, synthetic construct
  source 1..22: mol_type = other RNA
tgatggcagtgatgcctcatta

SEQ ID NO: 30355 - RNA, 22 nt, synthetic construct
  source 1..22: mol_type = other RNA
tgatggtatcaggaatggactt

SEQ ID NO: 30356 - RNA, 22 nt, synthetic construct
  source 1..22: mol_type = other RNA
tgatggtggtggtggtgtggta

SEQ ID NO: 30357 - RNA, 22 nt, synthetic construct
  source 1..22: mol_type = other RNA
tgattcaagtgctgtttcaaca

SEQ ID NO: 30358 - RNA, 22 nt, synthetic construct
  source 1..22: mol_type = other RNA
tgattcatttcaacttggtaca

SEQ ID NO: 30359 - RNA, 22 nt, synthetic construct
  source 1..22: mol_type = other RNA
tgattggagagattgggttgat

SEQ ID NO: 30360 - RNA, 22 nt, synthetic construct
  source 1..22: mol_type = other RNA
tgatttcatggtctgactataa

SEQ ID NO: 30361 - RNA, 22 nt, synthetic construct
  source 1..22: mol_type = other RNA
tgatttcccatcttgcagatgt

SEQ ID NO: 30362 - RNA, 22 nt, synthetic construct
  source 1..22: mol_type = other RNA
tgatttgagagtaagagcctta

SEQ ID NO: 30363 - RNA, 22 nt, synthetic construct
  source 1..22: mol_type = other RNA
tgattttcaccatgaaaacatt

SEQ ID NO: 30364 - RNA, 22 nt, synthetic construct
  source 1..22: mol_type = other RNA
tgatttttgttgttgtagttgt

SEQ ID NO: 30365 - RNA, 22 nt, synthetic construct
  source 1..22: mol_type = other RNA
tgcaaaaagttcaggatgtgta

SEQ ID NO: 30366 - RNA, 22 nt, synthetic construct
  source 1..22: mol_type = other RNA
tgcaaaaggtgtgagtttgaaa

SEQ ID NO: 30367 - RNA, 22 nt, synthetic construct
  source 1..22: mol_type = other RNA
tgcaaaatacaggtttcttgtt

SEQ ID NO: 30368 - RNA, 22 nt, synthetic construct
  source 1..22: mol_type = other RNA
tgcaaaatggaggaataaaacg

SEQ ID NO: 30369 - RNA, 22 nt, synthetic construct
  source 1..22: mol_type = other RNA
tgcaaacacttggaataccctc

SEQ ID NO: 30370 - RNA, 22 nt, synthetic construct
  source 1..22: mol_type = other RNA
tgcaaatgtttttcctgtgcct

SEQ ID NO: 30371 - RNA, 22 nt, synthetic construct
  source 1..22: mol_type = other RNA
tgcaaattgctgctggaacctg

SEQ ID NO: 30372 - RNA, 22 nt, synthetic construct
  source 1..22: mol_type = other RNA
tgcaacataagcctcataaaca

SEQ ID NO: 30373 - RNA, 22 nt, synthetic construct
  source 1..22: mol_type = other RNA
tgcaagatgggaaatcatattg

SEQ ID NO: 30374 - RNA, 22 nt, synthetic construct
  source 1..22: mol_type = other RNA
tgcaagccacatgcctgtatgc

SEQ ID NO: 30375 - RNA, 22 nt, synthetic construct
  source 1..22: mol_type = other RNA
tgcaagctcctggtggcagctc

SEQ ID NO: 30376 - RNA, 22 nt, synthetic construct
  source 1..22: mol_type = other RNA
tgcaagctgtgataatgtgcag

SEQ ID NO: 30377 - RNA, 22 nt, synthetic construct
  source 1..22: mol_type = other RNA
tgcaagttttgggtcttgtttc

SEQ ID NO: 30378 - RNA, 22 nt, synthetic construct
  source 1..22: mol_type = other RNA
tgcaatgctaaatacctgttcc

SEQ ID NO: 30379 - RNA, 22 nt, synthetic construct
  source 1..22: mol_type = other RNA
tgcacacagcaccaccagaaaa

SEQ ID NO: 30380 - RNA, 22 nt, synthetic construct
  source 1..22: mol_type = other RNA
tgcacaggccaattaaggtgga

SEQ ID NO: 30381 - RNA, 22 nt, synthetic construct
  source 1..22: mol_type = other RNA
tgcacatgagcttttggtaaat

SEQ ID NO: 30382 - RNA, 22 nt, synthetic construct
  source 1..22: mol_type = other RNA
tgcacattatcacagcttgcag

SEQ ID NO: 30383 - RNA, 22 nt, synthetic construct
  source 1..22: mol_type = other RNA
tgcaccgcaatggaaacacaat

SEQ ID NO: 30384 - RNA, 22 nt, synthetic construct
  source 1..22: mol_type = other RNA
tgcacctggtgtgagggttttt

SEQ ID NO: 30385 - RNA, 22 nt, synthetic construct
  source 1..22: mol_type = other RNA
tgcacttctccaaaacagacca

SEQ ID NO: 30386 - RNA, 22 nt, synthetic construct
  source 1..22: mol_type = other RNA
tgcacttgatttcatggtctga

SEQ ID NO: 30387 - RNA, 22 nt, synthetic construct
  source 1..22: mol_type = other RNA
tgcagaaaaccacatctcacat

SEQ ID NO: 30388 - RNA, 22 nt, synthetic construct
  source 1..22: mol_type = other RNA
tgcagaaaataacatccaggga

SEQ ID NO: 30389 - RNA, 22 nt, synthetic construct
  source 1..22: mol_type = other RNA
tgcagaacttgatagccacacc

SEQ ID NO: 30390 - RNA, 22 nt, synthetic construct
  source 1..22: mol_type = other RNA
tgcagatgtgtaggtaagtgcc

SEQ ID NO: 30391 - RNA, 22 nt, synthetic construct
  source 1..22: mol_type = other RNA
tgcagcaaaagagcatcattga

SEQ ID NO: 30392 - RNA, 22 nt, synthetic construct
  source 1..22: mol_type = other RNA
tgcagcagtggtttgtctagtc

SEQ ID NO: 30393 - RNA, 22 nt, synthetic construct
  source 1..22: mol_type = other RNA
tgcagcccttctccgatgcttt

SEQ ID NO: 30394 - RNA, 22 nt, synthetic construct
  source 1..22: mol_type = other RNA
tgcagctagtttactggcatta

SEQ ID NO: 30395 - RNA, 22 nt, synthetic construct
  source 1..22: mol_type = other RNA
tgcagctggctttggaggcagc

SEQ ID NO: 30396 - RNA, 22 nt, synthetic construct
  source 1..22: mol_type = other RNA
tgcaggaaacaagacccaaaac

SEQ ID NO: 30397 - RNA, 22 nt, synthetic construct
  source 1..22: mol_type = other RNA
tgcaggagatgggcatatctca

SEQ ID NO: 30398 - RNA, 22 nt, synthetic construct
  source 1..22: mol_type = other RNA
tgcagggacaatgactgttcca

SEQ ID NO: 30399 - RNA, 22 nt, synthetic construct
  source 1..22: mol_type = other RNA
tgcaggtggattctcttgctta

SEQ ID NO: 30400 - RNA, 22 nt, synthetic construct
  source 1..22: mol_type = other RNA
tgcagtcactgtgtggcactag

SEQ ID NO: 30401 - RNA, 22 nt, synthetic construct
  source 1..22: mol_type = other RNA
tgcagtctgtatgtcattcctg

SEQ ID NO: 30402 - RNA, 22 nt, synthetic construct
  source 1..22: mol_type = other RNA
tgcagtgggcctgaaaatccag

SEQ ID NO: 30403 - RNA, 22 nt, synthetic construct
  source 1..22: mol_type = other RNA
tgcagtggtgagtgaggcctgt

SEQ ID NO: 30404 - RNA, 22 nt, synthetic construct
  source 1..22: mol_type = other RNA
tgcagttaaagatttcaccagt

SEQ ID NO: 30405 - RNA, 22 nt, synthetic construct
  source 1..22: mol_type = other RNA
tgcagttatgtgttgaaaaact

SEQ ID NO: 30406 - RNA, 22 nt, synthetic construct
  source 1..22: mol_type = other RNA
tgcatacaggcatgtggcttgc

SEQ ID NO: 30407 - RNA, 22 nt, synthetic construct
  source 1..22: mol_type = other RNA
tgcatacatgtgtagatggatt

SEQ ID NO: 30408 - RNA, 22 nt, synthetic construct
  source 1..22: mol_type = other RNA
tgcatcacatgcaatattttcc

SEQ ID NO: 30409 - RNA, 22 nt, synthetic construct
  source 1..22: mol_type = other RNA
tgcatccaggttccaccttaat

SEQ ID NO: 30410 - RNA, 22 nt, synthetic construct
  source 1..22: mol_type = other RNA
tgcatctgactatggcaagact

SEQ ID NO: 30411 - RNA, 22 nt, synthetic construct
  source 1..22: mol_type = other RNA
tgcatgcaaaatacaggtttct

SEQ ID NO: 30412 - RNA, 22 nt, synthetic construct
  source 1..22: mol_type = other RNA
tgcatgcacttgatttcatggt

SEQ ID NO: 30413 - RNA, 22 nt, synthetic construct
  source 1..22: mol_type = other RNA
tgcatggttatgtatcaagtac

SEQ ID NO: 30414 - RNA, 22 nt, synthetic construct
  source 1..22: mol_type = other RNA
tgcatgtgatgcaagttttggg

SEQ ID NO: 30415 - RNA, 22 nt, synthetic construct
  source 1..22: mol_type = other RNA
tgcattttcttgggctacagaa

SEQ ID NO: 30416 - RNA, 22 nt, synthetic construct
  source 1..22: mol_type = other RNA
tgccacacagtgactgcacatg

SEQ ID NO: 30417 - RNA, 22 nt, synthetic construct
  source 1..22: mol_type = other RNA
tgccaccaggagcttgcaaatt

SEQ ID NO: 30418 - RNA, 22 nt, synthetic construct
  source 1..22: mol_type = other RNA
tgccaccttagagcagcatgct

SEQ ID NO: 30419 - RNA, 22 nt, synthetic construct
  source 1..22: mol_type = other RNA
tgccactaccacaccaccacca

SEQ ID NO: 30420 - RNA, 22 nt, synthetic construct
  source 1..22: mol_type = other RNA
tgccacttggtgtctccattta

SEQ ID NO: 30421 - RNA, 22 nt, synthetic construct
  source 1..22: mol_type = other RNA
tgccagaaatgtactgagacac

SEQ ID NO: 30422 - RNA, 22 nt, synthetic construct
  source 1..22: mol_type = other RNA
tgccagacagaacctctggcta

SEQ ID NO: 30423 - RNA, 22 nt, synthetic construct
  source 1..22: mol_type = other RNA
tgccagcagttgatgagaaaca

SEQ ID NO: 30424 - RNA, 22 nt, synthetic construct
  source 1..22: mol_type = other RNA
tgccagtaaactagctgcaatg

SEQ ID NO: 30425 - RNA, 22 nt, synthetic construct
  source 1..22: mol_type = other RNA
tgccatagtcagatgcacaggc

SEQ ID NO: 30426 - RNA, 22 nt, synthetic construct
  source 1..22: mol_type = other RNA
tgccatcaattcttcagtatca

SEQ ID NO: 30427 - RNA, 22 nt, synthetic construct
  source 1..22: mol_type = other RNA
tgccattaacagtcaggctact

SEQ ID NO: 30428 - RNA, 22 nt, synthetic construct
  source 1..22: mol_type = other RNA
tgcccatctcctgcagaaaata

SEQ ID NO: 30429 - RNA, 22 nt, synthetic construct
  source 1..22: mol_type = other RNA
tgcccccaacacagcactatct

SEQ ID NO: 30430 - RNA, 22 nt, synthetic construct
  source 1..22: mol_type = other RNA
tgccctcaacatggttggttct

SEQ ID NO: 30431 - RNA, 22 nt, synthetic construct
  source 1..22: mol_type = other RNA
tgccctgaggtatgcgatgggt

SEQ ID NO: 30432 - RNA, 22 nt, synthetic construct
  source 1..22: mol_type = other RNA
tgcccttgattcatttcaactt

SEQ ID NO: 30433 - RNA, 22 nt, synthetic construct
  source 1..22: mol_type = other RNA
tgcctaatggtgctacagtttc

SEQ ID NO: 30434 - RNA, 22 nt, synthetic construct
  source 1..22: mol_type = other RNA
tgcctcaggtttaccctctatt

SEQ ID NO: 30435 - RNA, 22 nt, synthetic construct
  source 1..22: mol_type = other RNA
tgcctcattacgttttagatgg

SEQ ID NO: 30436 - RNA, 22 nt, synthetic construct
  source 1..22: mol_type = other RNA
tgcctccaaagccagctgcagt

SEQ ID NO: 30437 - RNA, 22 nt, synthetic construct
  source 1..22: mol_type = other RNA
tgcctcttccgtggaacacaca

SEQ ID NO: 30438 - RNA, 22 nt, synthetic construct
  source 1..22: mol_type = other RNA
tgcctgaccagggaggaagtca

SEQ ID NO: 30439 - RNA, 22 nt, synthetic construct
  source 1..22: mol_type = other RNA
tgcctgagagagctcatccaga

SEQ ID NO: 30440 - RNA, 22 nt, synthetic construct
  source 1..22: mol_type = other RNA
tgcctggggggctcccaaggca

SEQ ID NO: 30441 - RNA, 22 nt, synthetic construct
  source 1..22: mol_type = other RNA
tgcctgtatgcacacagcacca

SEQ ID NO: 30442 - RNA, 22 nt, synthetic construct
  source 1..22: mol_type = other RNA
tgcctgtttatgaggcttatgt

SEQ ID NO: 30443 - RNA, 22 nt, synthetic construct
  source 1..22: mol_type = other RNA
tgccttgggagccccccaggca

SEQ ID NO: 30444 - RNA, 22 nt, synthetic construct
  source 1..22: mol_type = other RNA
tgccttgtttttaagtaataca

SEQ ID NO: 30445 - RNA, 22 nt, synthetic construct
  source 1..22: mol_type = other RNA
tgcgatgggtgagtgatctcac

SEQ ID NO: 30446 - RNA, 22 nt, synthetic construct
  source 1..22: mol_type = other RNA
tgcgcaacttgctcagcaaagg

SEQ ID NO: 30447 - RNA, 22 nt, synthetic construct
  source 1..22: mol_type = other RNA
tgcgcagcttgttgaccagaca

SEQ ID NO: 30448 - RNA, 22 nt, synthetic construct
  source 1..22: mol_type = other RNA
tgcggaattgatctgccctgag

SEQ ID NO: 30449 - RNA, 22 nt, synthetic construct
  source 1..22: mol_type = other RNA
tgcggtgcagaaaaccacatct

SEQ ID NO: 30450 - RNA, 22 nt, synthetic construct
  source 1..22: mol_type = other RNA
tgcgttttattcctccattttg

SEQ ID NO: 30451 - RNA, 22 nt, synthetic construct
  source 1..22: mol_type = other RNA
tgctaaatacctgttcctttca

SEQ ID NO: 30452 - RNA, 22 nt, synthetic construct
  source 1..22: mol_type = other RNA
tgctaatgcctaatggtgctac

SEQ ID NO: 30453 - RNA, 22 nt, synthetic construct
  source 1..22: mol_type = other RNA
tgctaattaccatgacaagaac

SEQ ID NO: 30454 - RNA, 22 nt, synthetic construct
  source 1..22: mol_type = other RNA
tgctacagtttctgcctcttcc

SEQ ID NO: 30455 - RNA, 22 nt, synthetic construct
  source 1..22: mol_type = other RNA
tgctaccaaaaattggtgggtt

SEQ ID NO: 30456 - RNA, 22 nt, synthetic construct
  source 1..22: mol_type = other RNA
tgctcagcaaaggtacttgata

SEQ ID NO: 30457 - RNA, 22 nt, synthetic construct
  source 1..22: mol_type = other RNA
tgctcattcagaatctgaagct

SEQ ID NO: 30458 - RNA, 22 nt, synthetic construct
  source 1..22: mol_type = other RNA
tgctccagctgtgttgttttct

SEQ ID NO: 30459 - RNA, 22 nt, synthetic construct
  source 1..22: mol_type = other RNA
tgctccatggtctcaatgatgc

SEQ ID NO: 30460 - RNA, 22 nt, synthetic construct
  source 1..22: mol_type = other RNA
tgctcctgttcttgaaagcacc

SEQ ID NO: 30461 - RNA, 22 nt, synthetic construct
  source 1..22: mol_type = other RNA
tgctccttgtctcgacccttca

SEQ ID NO: 30462 - RNA, 22 nt, synthetic construct
  source 1..22: mol_type = other RNA
tgctctaaagctggggtgtggc

SEQ ID NO: 30463 - RNA, 22 nt, synthetic construct
  source 1..22: mol_type = other RNA
tgctctaaggtggcatctctta

SEQ ID NO: 30464 - RNA, 22 nt, synthetic construct
  source 1..22: mol_type = other RNA
tgctctttgttgaaaatgaaat

SEQ ID NO: 30465 - RNA, 22 nt, synthetic construct
  source 1..22: mol_type = other RNA
tgctctttgtttctcatcaact

SEQ ID NO: 30466 - RNA, 22 nt, synthetic construct
  source 1..22: mol_type = other RNA
tgctcttttgctgcacattatc

SEQ ID NO: 30467 - RNA, 22 nt, synthetic construct
  source 1..22: mol_type = other RNA
tgctgagcaagttgcgcagctt

SEQ ID NO: 30468 - RNA, 22 nt, synthetic construct
  source 1..22: mol_type = other RNA
tgctgataatgccagtaaacta

SEQ ID NO: 30469 - RNA, 22 nt, synthetic construct
  source 1..22: mol_type = other RNA
tgctgatcattgttgctttggg

SEQ ID NO: 30470 - RNA, 22 nt, synthetic construct
  source 1..22: mol_type = other RNA
tgctgatgatgctgataatgcc

SEQ ID NO: 30471 - RNA, 22 nt, synthetic construct
  source 1..22: mol_type = other RNA
tgctgcacattatcacagcttg

SEQ ID NO: 30472 - RNA, 22 nt, synthetic construct
  source 1..22: mol_type = other RNA
tgctgcagaacttgatagccac

SEQ ID NO: 30473 - RNA, 22 nt, synthetic construct
  source 1..22: mol_type = other RNA
tgctgcctgtttatgaggctta

SEQ ID NO: 30474 - RNA, 22 nt, synthetic construct
  source 1..22: mol_type = other RNA
tgctgctccatggtctcaatga

SEQ ID NO: 30475 - RNA, 22 nt, synthetic construct
  source 1..22: mol_type = other RNA
tgctgctctaaagctggggtgt

SEQ ID NO: 30476 - RNA, 22 nt, synthetic construct
  source 1..22: mol_type = other RNA
tgctgctctaaggtggcatctc

SEQ ID NO: 30477 - RNA, 22 nt, synthetic construct
  source 1..22: mol_type = other RNA
tgctgctggaacctgaacagaa

SEQ ID NO: 30478 - RNA, 22 nt, synthetic construct
  source 1..22: mol_type = other RNA
tgctgctgttcttgcttctgta

SEQ ID NO: 30479 - RNA, 22 nt, synthetic construct
  source 1..22: mol_type = other RNA
tgctgctgttgctggttttgag

SEQ ID NO: 30480 - RNA, 22 nt, synthetic construct
  source 1..22: mol_type = other RNA
tgctggaacctgaacagaattc

SEQ ID NO: 30481 - RNA, 22 nt, synthetic construct
  source 1..22: mol_type = other RNA
tgctggcagttgtcctgtagct

SEQ ID NO: 30482 - RNA, 22 nt, synthetic construct
  source 1..22: mol_type = other RNA
tgctggttttgagggagatgtg

SEQ ID NO: 30483 - RNA, 22 nt, synthetic construct
  source 1..22: mol_type = other RNA
tgctgtgtgcatacaggcatgt

SEQ ID NO: 30484 - RNA, 22 nt, synthetic construct
  source 1..22: mol_type = other RNA
tgctgtgttgggggcacaagat

SEQ ID NO: 30485 - RNA, 22 nt, synthetic construct
  source 1..22: mol_type = other RNA
tgctgtgtttgctgctgttctt

SEQ ID NO: 30486 - RNA, 22 nt, synthetic construct
  source 1..22: mol_type = other RNA
tgctgttcttgcttctgtaaga

SEQ ID NO: 30487 - RNA, 22 nt, synthetic construct
  source 1..22: mol_type = other RNA
tgctgttgctggttttgaggga

SEQ ID NO: 30488 - RNA, 22 nt, synthetic construct
  source 1..22: mol_type = other RNA
tgctgtttcaacactggggaca

SEQ ID NO: 30489 - RNA, 22 nt, synthetic construct
  source 1..22: mol_type = other RNA
tgcttacttcaagcaaagctca

SEQ ID NO: 30490 - RNA, 22 nt, synthetic construct
  source 1..22: mol_type = other RNA
tgcttagttacctttttccatg

SEQ ID NO: 30491 - RNA, 22 nt, synthetic construct
  source 1..22: mol_type = other RNA
tgcttcagatgctgctccatgg

SEQ ID NO: 30492 - RNA, 22 nt, synthetic construct
  source 1..22: mol_type = other RNA
tgcttcggggccatccacaagg

SEQ ID NO: 30493 - RNA, 22 nt, synthetic construct
  source 1..22: mol_type = other RNA
tgcttctgtaagagatgccacc

SEQ ID NO: 30494 - RNA, 22 nt, synthetic construct
  source 1..22: mol_type = other RNA
tgcttctgtgatttgagagtaa

SEQ ID NO: 30495 - RNA, 22 nt, synthetic construct
  source 1..22: mol_type = other RNA
tgcttctgttctcaataatttt

SEQ ID NO: 30496 - RNA, 22 nt, synthetic construct
  source 1..22: mol_type = other RNA
tgcttctttctccccctcctcc

SEQ ID NO: 30497 - RNA, 22 nt, synthetic construct
  source 1..22: mol_type = other RNA
tgcttgaagtaagcaccattca

SEQ ID NO: 30498 - RNA, 22 nt, synthetic construct
  source 1..22: mol_type = other RNA
tgcttgaggtgttctgacattg

SEQ ID NO: 30499 - RNA, 22 nt, synthetic construct
  source 1..22: mol_type = other RNA
tgctttcaagaacaggagcaga

SEQ ID NO: 30500 - RNA, 22 nt, synthetic construct
  source 1..22: mol_type = other RNA
tgctttcacctggatttctttc

SEQ ID NO: 30501 - RNA, 22 nt, synthetic construct
  source 1..22: mol_type = other RNA
tgctttctgaaaggcctcagaa

SEQ ID NO: 30502 - RNA, 22 nt, synthetic construct
  source 1..22: mol_type = other RNA
tgctttgggatcacattatttg

SEQ ID NO: 30503 - RNA, 22 nt, synthetic construct
  source 1..22: mol_type = other RNA
tgctttgggggtgaggaaaagt

SEQ ID NO: 30504 - RNA, 22 nt, synthetic construct
  source 1..22: mol_type = other RNA
tgcttttgagtgtccttctggg

SEQ ID NO: 30505 - RNA, 22 nt, synthetic construct
  source 1..22: mol_type = other RNA
tgctttttccttctgaaggaag

SEQ ID NO: 30506 - RNA, 22 nt, synthetic construct
  source 1..22: mol_type = other RNA
tggaaaaaacactgtctcaata

SEQ ID NO: 30507 - RNA, 22 nt, synthetic construct
  source 1..22: mol_type = other RNA
tggaaaaaggtaactaagcaag

SEQ ID NO: 30508 - RNA, 22 nt, synthetic construct
  source 1..22: mol_type = other RNA
tggaaaatattgcatgtgatgc

SEQ ID NO: 30509 - RNA, 22 nt, synthetic construct
  source 1..22: mol_type = other RNA
tggaaacacaatctggataata

SEQ ID NO: 30510 - RNA, 22 nt, synthetic construct
  source 1..22: mol_type = other RNA
tggaaattccaacatgcctggg

SEQ ID NO: 30511 - RNA, 22 nt, synthetic construct
  source 1..22: mol_type = other RNA
tggaacacacacatggtgaact

SEQ ID NO: 30512 - RNA, 22 nt, synthetic construct
  source 1..22: mol_type = other RNA
tggaacaggatagaaccaacca

SEQ ID NO: 30513 - RNA, 22 nt, synthetic construct
  source 1..22: mol_type = other RNA
tggaacagtcattgtccctgca

SEQ ID NO: 30514 - RNA, 22 nt, synthetic construct
  source 1..22: mol_type = other RNA
tggaacctgaacagaattcttc

SEQ ID NO: 30515 - RNA, 22 nt, synthetic construct
  source 1..22: mol_type = other RNA
tggaacctggatgcaagccaca

SEQ ID NO: 30516 - RNA, 22 nt, synthetic construct
  source 1..22: mol_type = other RNA
tggaactggagatgttggtcca

SEQ ID NO: 30517 - RNA, 22 nt, synthetic construct
  source 1..22: mol_type = other RNA
tggaagaatgttttcatggtga

SEQ ID NO: 30518 - RNA, 22 nt, synthetic construct
  source 1..22: mol_type = other RNA
tggaagaggaggagggggagaa

SEQ ID NO: 30519 - RNA, 22 nt, synthetic construct
  source 1..22: mol_type = other RNA
tggaagcccactgcctgagaga

SEQ ID NO: 30520 - RNA, 22 nt, synthetic construct
  source 1..22: mol_type = other RNA
tggaaggtgactctataaaatt

SEQ ID NO: 30521 - RNA, 22 nt, synthetic construct
  source 1..22: mol_type = other RNA
tggaataccctctactttcttg

SEQ ID NO: 30522 - RNA, 22 nt, synthetic construct
  source 1..22: mol_type = other RNA
tggaataccctgtatgaaggga

SEQ ID NO: 30523 - RNA, 22 nt, synthetic construct
  source 1..22: mol_type = other RNA
tggaatttccagtgtattgttt

SEQ ID NO: 30524 - RNA, 22 nt, synthetic construct
  source 1..22: mol_type = other RNA
tggacattatgagtctcgaact

SEQ ID NO: 30525 - RNA, 22 nt, synthetic construct
  source 1..22: mol_type = other RNA
tggaccaacatctccagttcca

SEQ ID NO: 30526 - RNA, 22 nt, synthetic construct
  source 1..22: mol_type = other RNA
tggacttagtctgttgccctca

SEQ ID NO: 30527 - RNA, 22 nt, synthetic construct
  source 1..22: mol_type = other RNA
tggagaaagacgtaacttcggg

SEQ ID NO: 30528 - RNA, 22 nt, synthetic construct
  source 1..22: mol_type = other RNA
tggagaagtgcacctggtgtga

SEQ ID NO: 30529 - RNA, 22 nt, synthetic construct
  source 1..22: mol_type = other RNA
tggagacaccaagtggcactct

SEQ ID NO: 30530 - RNA, 22 nt, synthetic construct
  source 1..22: mol_type = other RNA
tggagagattgggttgatactg

SEQ ID NO: 30531 - RNA, 22 nt, synthetic construct
  source 1..22: mol_type = other RNA
tggagagctacaggacaactgc

SEQ ID NO: 30532 - RNA, 22 nt, synthetic construct
  source 1..22: mol_type = other RNA
tggagatgttggtccactgtac

SEQ ID NO: 30533 - RNA, 22 nt, synthetic construct
  source 1..22: mol_type = other RNA
tggagcacaagtcacaaatgta

SEQ ID NO: 30534 - RNA, 22 nt, synthetic construct
  source 1..22: mol_type = other RNA
tggagcagcatctgaagcagtt

SEQ ID NO: 30535 - RNA, 22 nt, synthetic construct
  source 1..22: mol_type = other RNA
tggagctttgtagccagaggtt

SEQ ID NO: 30536 - RNA, 22 nt, synthetic construct
  source 1..22: mol_type = other RNA
tggaggaagtacagaatataaa

SEQ ID NO: 30537 - RNA, 22 nt, synthetic construct
  source 1..22: mol_type = other RNA
tggaggaataaaacgcacagtt

SEQ ID NO: 30538 - RNA, 22 nt, synthetic construct
  source 1..22: mol_type = other RNA
tggaggcagctcagagttagag

SEQ ID NO: 30539 - RNA, 22 nt, synthetic construct
  source 1..22: mol_type = other RNA
tggaggtcatttgattggagag

SEQ ID NO: 30540 - RNA, 22 nt, synthetic construct
  source 1..22: mol_type = other RNA
tggagtatttcctctttattct

SEQ ID NO: 30541 - RNA, 22 nt, synthetic construct
  source 1..22: mol_type = other RNA
tggagttttagaagaacaccac

SEQ ID NO: 30542 - RNA, 22 nt, synthetic construct
  source 1..22: mol_type = other RNA
tggataatattgagacagtgtt

SEQ ID NO: 30543 - RNA, 22 nt, synthetic construct
  source 1..22: mol_type = other RNA
tggatacacctgtcaagactca

SEQ ID NO: 30544 - RNA, 22 nt, synthetic construct
  source 1..22: mol_type = other RNA
tggatgagctctctcaggcagt

SEQ ID NO: 30545 - RNA, 22 nt, synthetic construct
  source 1..22: mol_type = other RNA
tggatgcaagccacatgcctgt

SEQ ID NO: 30546 - RNA, 22 nt, synthetic construct
  source 1..22: mol_type = other RNA
tggatggccccgaagcaagcct

SEQ ID NO: 30547 - RNA, 22 nt, synthetic construct
  source 1..22: mol_type = other RNA
tggatgttattttctgcaggag

SEQ ID NO: 30548 - RNA, 22 nt, synthetic construct
  source 1..22: mol_type = other RNA
tggattaggactctgggaaggt

SEQ ID NO: 30549 - RNA, 22 nt, synthetic construct
  source 1..22: mol_type = other RNA
tggattctcttgcttagttacc

SEQ ID NO: 30550 - RNA, 22 nt, synthetic construct
  source 1..22: mol_type = other RNA
tggattgaattgaaggcccctc

SEQ ID NO: 30551 - RNA, 22 nt, synthetic construct
  source 1..22: mol_type = other RNA
tggatttctttcttggcttacc

SEQ ID NO: 30552 - RNA, 22 nt, synthetic construct
  source 1..22: mol_type = other RNA
tggattttcaggcccactgcag

SEQ ID NO: 30553 - RNA, 22 nt, synthetic construct
  source 1..22: mol_type = other RNA
tggcaaatgggaggtgatggta

SEQ ID NO: 30554 - RNA, 22 nt, synthetic construct
  source 1..22: mol_type = other RNA
tggcaagactcagtttggggtt

SEQ ID NO: 30555 - RNA, 22 nt, synthetic construct
  source 1..22: mol_type = other RNA
tggcactagatttcattttcaa

SEQ ID NO: 30556 - RNA, 22 nt, synthetic construct
  source 1..22: mol_type = other RNA
tggcactctttcaaaagttatt

SEQ ID NO: 30557 - RNA, 22 nt, synthetic construct
  source 1..22: mol_type = other RNA
tggcacttacctacacatctgc

SEQ ID NO: 30558 - RNA, 22 nt, synthetic construct
  source 1..22: mol_type = other RNA
tggcagaaaaggaatccttagt

SEQ ID NO: 30559 - RNA, 22 nt, synthetic construct
  source 1..22: mol_type = other RNA
tggcagctctgaacggtattta

SEQ ID NO: 30560 - RNA, 22 nt, synthetic construct
  source 1..22: mol_type = other RNA
tggcagtgatgcctcattacgt

SEQ ID NO: 30561 - RNA, 22 nt, synthetic construct
  source 1..22: mol_type = other RNA
tggcagttgtcctgtagctctc

SEQ ID NO: 30562 - RNA, 22 nt, synthetic construct
  source 1..22: mol_type = other RNA
tggcatctcttacagaagcaag

SEQ ID NO: 30563 - RNA, 22 nt, synthetic construct
  source 1..22: mol_type = other RNA
tggcattatcagcatcatcagc

SEQ ID NO: 30564 - RNA, 22 nt, synthetic construct
  source 1..22: mol_type = other RNA
tggcatttatgtgagatgtggt

SEQ ID NO: 30565 - RNA, 22 nt, synthetic construct
  source 1..22: mol_type = other RNA
tggccaaagaatgatccttctc

SEQ ID NO: 30566 - RNA, 22 nt, synthetic construct
  source 1..22: mol_type = other RNA
tggccagactaaagtggaagaa

SEQ ID NO: 30567 - RNA, 22 nt, synthetic construct
  source 1..22: mol_type = other RNA
tggccccgaagcaagcctgatg

SEQ ID NO: 30568 - RNA, 22 nt, synthetic construct
  source 1..22: mol_type = other RNA
tggccctgacatttcaactttt

SEQ ID NO: 30569 - RNA, 22 nt, synthetic construct
  source 1..22: mol_type = other RNA
tggcctgtgcatctgactatgg

SEQ ID NO: 30570 - RNA, 22 nt, synthetic construct
  source 1..22: mol_type = other RNA
tggcgtgaaactgcttcagatg

SEQ ID NO: 30571 - RNA, 22 nt, synthetic construct
  source 1..22: mol_type = other RNA
tggctacaaagctccagaatgg

SEQ ID NO: 30572 - RNA, 22 nt, synthetic construct
  source 1..22: mol_type = other RNA
tggctatcaagttctgcagcag

SEQ ID NO: 30573 - RNA, 22 nt, synthetic construct
  source 1..22: mol_type = other RNA
tggctcagtctctgaagcctgt

SEQ ID NO: 30574 - RNA, 22 nt, synthetic construct
  source 1..22: mol_type = other RNA
tggcttaccccgaagttacgtc

SEQ ID NO: 30575 - RNA, 22 nt, synthetic construct
  source 1..22: mol_type = other RNA
tggcttcccttcatacagggta

SEQ ID NO: 30576 - RNA, 22 nt, synthetic construct
  source 1..22: mol_type = other RNA
tggcttgcatccaggttccacc

SEQ ID NO: 30577 - RNA, 22 nt, synthetic construct
  source 1..22: mol_type = other RNA
tggctttggaggcagctcagag

SEQ ID NO: 30578 - RNA, 22 nt, synthetic construct
  source 1..22: mol_type = other RNA
tgggaaatcatattgagtcttg

SEQ ID NO: 30579 - RNA, 22 nt, synthetic construct
  source 1..22: mol_type = other RNA
tgggaaggtggtgcctcaggtt

SEQ ID NO: 30580 - RNA, 22 nt, synthetic construct
  source 1..22: mol_type = other RNA
tgggaatctgctctttgttgaa

SEQ ID NO: 30581 - RNA, 22 nt, synthetic construct
  source 1..22: mol_type = other RNA
tgggactgcccttgattcattt

SEQ ID NO: 30582 - RNA, 22 nt, synthetic construct
  source 1..22: mol_type = other RNA
tgggactggaggaagtacagaa

SEQ ID NO: 30583 - RNA, 22 nt, synthetic construct
  source 1..22: mol_type = other RNA
tgggagccccccaggcatgttg

SEQ ID NO: 30584 - RNA, 22 nt, synthetic construct
  source 1..22: mol_type = other RNA
tgggaggtgatggtatcaggaa

SEQ ID NO: 30585 - RNA, 22 nt, synthetic construct
  source 1..22: mol_type = other RNA
tgggatcacattatttggaaaa

SEQ ID NO: 30586 - RNA, 22 nt, synthetic construct
  source 1..22: mol_type = other RNA
tgggatggttgtgtttgtgctg

SEQ ID NO: 30587 - RNA, 22 nt, synthetic construct
  source 1..22: mol_type = other RNA
tgggattccgcttggtgaaaac

SEQ ID NO: 30588 - RNA, 22 nt, synthetic construct
  source 1..22: mol_type = other RNA
tgggcatatctcaaaaactgat

SEQ ID NO: 30589 - RNA, 22 nt, synthetic construct
  source 1..22: mol_type = other RNA
tgggcctgaaaatccagagctt

SEQ ID NO: 30590 - RNA, 22 nt, synthetic construct
  source 1..22: mol_type = other RNA
tgggctacagaactcacagatt

SEQ ID NO: 30591 - RNA, 22 nt, synthetic construct
  source 1..22: mol_type = other RNA
tgggctccttcagatcaagaaa

SEQ ID NO: 30592 - RNA, 22 nt, synthetic construct
  source 1..22: mol_type = other RNA
tgggcttccattctggagcttt

SEQ ID NO: 30593 - RNA, 22 nt, synthetic construct
  source 1..22: mol_type = other RNA
tggggacataagtttttcagtt

SEQ ID NO: 30594 - RNA, 22 nt, synthetic construct
  source 1..22: mol_type = other RNA
tggggaggggtctgagtgtgac

SEQ ID NO: 30595 - RNA, 22 nt, synthetic construct
  source 1..22: mol_type = other RNA
tgggggcacaagatctcgtgtt

SEQ ID NO: 30596 - RNA, 22 nt, synthetic construct
  source 1..22: mol_type = other RNA
tggggggctcccaaggcaagct

SEQ ID NO: 30597 - RNA, 22 nt, synthetic construct
  source 1..22: mol_type = other RNA
tgggggtgaggaaaagtctgga

SEQ ID NO: 30598 - RNA, 22 nt, synthetic construct
  source 1..22: mol_type = other RNA
tggggtagtggtggtgttcttc

SEQ ID NO: 30599 - RNA, 22 nt, synthetic construct
  source 1..22: mol_type = other RNA
tggggtgtggctatcaagttct

SEQ ID NO: 30600 - RNA, 22 nt, synthetic construct
  source 1..22: mol_type = other RNA
tggggttgctgtgtttgctgct

SEQ ID NO: 30601 - RNA, 22 nt, synthetic construct
  source 1..22: mol_type = other RNA
tgggtcttgtttcctgcaaaaa

SEQ ID NO: 30602 - RNA, 22 nt, synthetic construct
  source 1..22: mol_type = other RNA
tgggtgagtgatctcacaggac

SEQ ID NO: 30603 - RNA, 22 nt, synthetic construct
  source 1..22: mol_type = other RNA
tgggtgtaagcttgccttggga

SEQ ID NO: 30604 - RNA, 22 nt, synthetic construct
  source 1..22: mol_type = other RNA
tgggttatgcttgaggtgttct

SEQ ID NO: 30605 - RNA, 22 nt, synthetic construct
  source 1..22: mol_type = other RNA
tgggttgatactgaagaattga

SEQ ID NO: 30606 - RNA, 22 nt, synthetic construct
  source 1..22: mol_type = other RNA
tggtaaatggtctgttttggag

SEQ ID NO: 30607 - RNA, 22 nt, synthetic construct
  source 1..22: mol_type = other RNA
tggtaattagcacttttcccct

SEQ ID NO: 30608 - RNA, 22 nt, synthetic construct
  source 1..22: mol_type = other RNA
tggtacatttgtgacttgtgct

SEQ ID NO: 30609 - RNA, 22 nt, synthetic construct
  source 1..22: mol_type = other RNA
tggtagcagtggagagctacag

SEQ ID NO: 30610 - RNA, 22 nt, synthetic construct
  source 1..22: mol_type = other RNA
tggtagtggcagaaaaggaatc

SEQ ID NO: 30611 - RNA, 22 nt, synthetic construct
  source 1..22: mol_type = other RNA
tggtatcaggaatggacttagt

SEQ ID NO: 30612 - RNA, 22 nt, synthetic construct
  source 1..22: mol_type = other RNA
tggtcaaataacgacttggcgt

SEQ ID NO: 30613 - RNA, 22 nt, synthetic construct
  source 1..22: mol_type = other RNA
tggtcaacaagctgcgcaactt

SEQ ID NO: 30614 - RNA, 22 nt, synthetic construct
  source 1..22: mol_type = other RNA
tggtcaggcacaggaaaaacat

SEQ ID NO: 30615 - RNA, 22 nt, synthetic construct
  source 1..22: mol_type = other RNA
tggtccactgtaccttgggact

SEQ ID NO: 30616 - RNA, 22 nt, synthetic construct
  source 1..22: mol_type = other RNA
tggtctcaatgatgctcttttg

SEQ ID NO: 30617 - RNA, 22 nt, synthetic construct
  source 1..22: mol_type = other RNA
tggtctgactataaggggaatt

SEQ ID NO: 30618 - RNA, 22 nt, synthetic construct
  source 1..22: mol_type = other RNA
tggtctgttttggagaagtgca

SEQ ID NO: 30619 - RNA, 22 nt, synthetic construct
  source 1..22: mol_type = other RNA
tggtcttgtttcaatttcttga

SEQ ID NO: 30620 - RNA, 22 nt, synthetic construct
  source 1..22: mol_type = other RNA
tggtcttgttttctcagaacac

SEQ ID NO: 30621 - RNA, 22 nt, synthetic construct
  source 1..22: mol_type = other RNA
tggtgaaaacgaggggccttca

SEQ ID NO: 30622 - RNA, 22 nt, synthetic construct
  source 1..22: mol_type = other RNA
tggtgaaaatcagtattcaaaa

SEQ ID NO: 30623 - RNA, 22 nt, synthetic construct
  source 1..22: mol_type = other RNA
tggtgaaatctttaactgcatt

SEQ ID NO: 30624 - RNA, 22 nt, synthetic construct
  source 1..22: mol_type = other RNA
tggtgaactcctggaaaaaaca

SEQ ID NO: 30625 - RNA, 22 nt, synthetic construct
  source 1..22: mol_type = other RNA
tggtgaagaattctgttcaggt

SEQ ID NO: 30626 - RNA, 22 nt, synthetic construct
  source 1..22: mol_type = other RNA
tggtgagtgaggcctgtgatgc

SEQ ID NO: 30627 - RNA, 22 nt, synthetic construct
  source 1..22: mol_type = other RNA
tggtgcctcaggtttaccctct

SEQ ID NO: 30628 - RNA, 22 nt, synthetic construct
  source 1..22: mol_type = other RNA
tggtgctacagtttctgcctct

SEQ ID NO: 30629 - RNA, 22 nt, synthetic construct
  source 1..22: mol_type = other RNA
tggtgctgtgtgcatacaggca

SEQ ID NO: 30630 - RNA, 22 nt, synthetic construct
  source 1..22: mol_type = other RNA
tggtgcttacttcaagcaaagc

SEQ ID NO: 30631 - RNA, 22 nt, synthetic construct
  source 1..22: mol_type = other RNA
tggtggagttttagaagaacac

SEQ ID NO: 30632 - RNA, 22 nt, synthetic construct
  source 1..22: mol_type = other RNA
tggtggcagctctgaacggtat

SEQ ID NO: 30633 - RNA, 22 nt, synthetic construct
  source 1..22: mol_type = other RNA
tggtgggttatgcttgaggtgt

SEQ ID NO: 30634 - RNA, 22 nt, synthetic construct
  source 1..22: mol_type = other RNA
tggtggtgctgtgtgcatacag

SEQ ID NO: 30635 - RNA, 22 nt, synthetic construct
  source 1..22: mol_type = other RNA
tggtggtggtggtgtggtagtg

SEQ ID NO: 30636 - RNA, 22 nt, synthetic construct
  source 1..22: mol_type = other RNA
tggtggtggtgtggtagtggca

SEQ ID NO: 30637 - RNA, 22 nt, synthetic construct
  source 1..22: mol_type = other RNA
tggtggtgtggtagtggcagaa

SEQ ID NO: 30638 - RNA, 22 nt, synthetic construct
  source 1..22: mol_type = other RNA
tggtggtgttcttctaaaactc

SEQ ID NO: 30639 - RNA, 22 nt, synthetic construct
  source 1..22: mol_type = other RNA
tggtgtctccatttacttctgg

SEQ ID NO: 30640 - RNA, 22 nt, synthetic construct
  source 1..22: mol_type = other RNA
tggtgtcttttctgaagaagtt

SEQ ID NO: 30641 - RNA, 22 nt, synthetic construct
  source 1..22: mol_type = other RNA
tggtgtgagggtttttggaact

SEQ ID NO: 30642 - RNA, 22 nt, synthetic construct
  source 1..22: mol_type = other RNA
tggtgtggtagtggcagaaaag

SEQ ID NO: 30643 - RNA, 22 nt, synthetic construct
  source 1..22: mol_type = other RNA
tggtgttcttctaaaactccac

SEQ ID NO: 30644 - RNA, 22 nt, synthetic construct
  source 1..22: mol_type = other RNA
tggttatgtatcaagtaccttt

SEQ ID NO: 30645 - RNA, 22 nt, synthetic construct
  source 1..22: mol_type = other RNA
tggttccctggatgttattttc

SEQ ID NO: 30646 - RNA, 22 nt, synthetic construct
  source 1..22: mol_type = other RNA
tggttctatcctgttccatcag

SEQ ID NO: 30647 - RNA, 22 nt, synthetic construct
  source 1..22: mol_type = other RNA
tggttgactgctttcacctgga

SEQ ID NO: 30648 - RNA, 22 nt, synthetic construct
  source 1..22: mol_type = other RNA
tggttggggtagtggtggtgtt

SEQ ID NO: 30649 - RNA, 22 nt, synthetic construct
  source 1..22: mol_type = other RNA
tggttggtgtcttttctgaaga

SEQ ID NO: 30650 - RNA, 22 nt, synthetic construct
  source 1..22: mol_type = other RNA
tggttggttctatcctgttcca

SEQ ID NO: 30651 - RNA, 22 nt, synthetic construct
  source 1..22: mol_type = other RNA
tggttgtgtttgtgctgcctgt

SEQ ID NO: 30652 - RNA, 22 nt, synthetic construct
  source 1..22: mol_type = other RNA
tggtttcagatagtgctgtgtt

SEQ ID NO: 30653 - RNA, 22 nt, synthetic construct
  source 1..22: mol_type = other RNA
tggtttctatttttatatccct

SEQ ID NO: 30654 - RNA, 22 nt, synthetic construct
  source 1..22: mol_type = other RNA
tggtttctgaaaggaacaggta

SEQ ID NO: 30655 - RNA, 22 nt, synthetic construct
  source 1..22: mol_type = other RNA
tggtttgtctagtcaaaactgt

SEQ ID NO: 30656 - RNA, 22 nt, synthetic construct
  source 1..22: mol_type = other RNA
tggttttctgcaccgcaatgga

SEQ ID NO: 30657 - RNA, 22 nt, synthetic construct
  source 1..22: mol_type = other RNA
tggttttgagggagatgtgaac

SEQ ID NO: 30658 - RNA, 22 nt, synthetic construct
  source 1..22: mol_type = other RNA
tgtaaagtcaggactcacacga

SEQ ID NO: 30659 - RNA, 22 nt, synthetic construct
  source 1..22: mol_type = other RNA
tgtaagagatgccaccttagag

SEQ ID NO: 30660 - RNA, 22 nt, synthetic construct
  source 1..22: mol_type = other RNA
tgtaagcttgccttgggagccc

SEQ ID NO: 30661 - RNA, 22 nt, synthetic construct
  source 1..22: mol_type = other RNA
tgtaatttttgctgctgttgct

SEQ ID NO: 30662 - RNA, 22 nt, synthetic construct
  source 1..22: mol_type = other RNA
tgtaccaagttgaaatgaatca

SEQ ID NO: 30663 - RNA, 22 nt, synthetic construct
  source 1..22: mol_type = other RNA
tgtaccttgggactgcccttga

SEQ ID NO: 30664 - RNA, 22 nt, synthetic construct
  source 1..22: mol_type = other RNA
tgtacttcctccagtcccattt

SEQ ID NO: 30665 - RNA, 22 nt, synthetic construct
  source 1..22: mol_type = other RNA
tgtagaactgaagcttgttgtg

SEQ ID NO: 30666 - RNA, 22 nt, synthetic construct
  source 1..22: mol_type = other RNA
tgtagatggattaggactctgg

SEQ ID NO: 30667 - RNA, 22 nt, synthetic construct
  source 1..22: mol_type = other RNA
tgtagcaccattaggcattagc

SEQ ID NO: 30668 - RNA, 22 nt, synthetic construct
  source 1..22: mol_type = other RNA
tgtagccagaggttctgtctgg

SEQ ID NO: 30669 - RNA, 22 nt, synthetic construct
  source 1..22: mol_type = other RNA
tgtagcccaagaaaatgcagtt

SEQ ID NO: 30670 - RNA, 22 nt, synthetic construct
  source 1..22: mol_type = other RNA
tgtagctctccactgctaccaa

SEQ ID NO: 30671 - RNA, 22 nt, synthetic construct
  source 1..22: mol_type = other RNA
tgtaggtaagtgccagaaatgt

SEQ ID NO: 30672 - RNA, 22 nt, synthetic construct
  source 1..22: mol_type = other RNA
tgtagtctgttctttattctct

SEQ ID NO: 30673 - RNA, 22 nt, synthetic construct
  source 1..22: mol_type = other RNA
tgtagttgttctggtttctgaa

SEQ ID NO: 30674 - RNA, 22 nt, synthetic construct
  source 1..22: mol_type = other RNA
tgtatcaagtacctttgctgag

SEQ ID NO: 30675 - RNA, 22 nt, synthetic construct
  source 1..22: mol_type = other RNA
tgtatgaagggaagccagaata

SEQ ID NO: 30676 - RNA, 22 nt, synthetic construct
  source 1..22: mol_type = other RNA
tgtatgcacacagcaccaccag

SEQ ID NO: 30677 - RNA, 22 nt, synthetic construct
  source 1..22: mol_type = other RNA
tgtatgcagcccttctccgatg

SEQ ID NO: 30678 - RNA, 22 nt, synthetic construct
  source 1..22: mol_type = other RNA
tgtatgtcattcctgttcacac

SEQ ID NO: 30679 - RNA, 22 nt, synthetic construct
  source 1..22: mol_type = other RNA
tgtattacttaaaaacaaggca

SEQ ID NO: 30680 - RNA, 22 nt, synthetic construct
  source 1..22: mol_type = other RNA
tgtattgtttgaacaagaaacc

SEQ ID NO: 30681 - RNA, 22 nt, synthetic construct
  source 1..22: mol_type = other RNA
tgtattgtttggaggtcatttg

SEQ ID NO: 30682 - RNA, 22 nt, synthetic construct
  source 1..22: mol_type = other RNA
tgtattttgcatgcacttgatt

SEQ ID NO: 30683 - RNA, 22 nt, synthetic construct
  source 1..22: mol_type = other RNA
tgtcaagactcaatatgatttc

SEQ ID NO: 30684 - RNA, 22 nt, synthetic construct
  source 1..22: mol_type = other RNA
tgtcagaacacctcaagcataa

SEQ ID NO: 30685 - RNA, 22 nt, synthetic construct
  source 1..22: mol_type = other RNA
tgtcagggccagtcacagtttt

SEQ ID NO: 30686 - RNA, 22 nt, synthetic construct
  source 1..22: mol_type = other RNA
tgtcatggtaattagcactttt

SEQ ID NO: 30687 - RNA, 22 nt, synthetic construct
  source 1..22: mol_type = other RNA
tgtcattcctgttcacacaatt

SEQ ID NO: 30688 - RNA, 22 nt, synthetic construct
  source 1..22: mol_type = other RNA
tgtccaaatgggactggaggaa

SEQ ID NO: 30689 - RNA, 22 nt, synthetic construct
  source 1..22: mol_type = other RNA
tgtccccagtgttgaaacagca

SEQ ID NO: 30690 - RNA, 22 nt, synthetic construct
  source 1..22: mol_type = other RNA
tgtccctgcagtctgtatgtca

SEQ ID NO: 30691 - RNA, 22 nt, synthetic construct
  source 1..22: mol_type = other RNA
tgtcctgtagctctccactgct

SEQ ID NO: 30692 - RNA, 22 nt, synthetic construct
  source 1..22: mol_type = other RNA
tgtcctgtgagatcactcaccc

SEQ ID NO: 30693 - RNA, 22 nt, synthetic construct
  source 1..22: mol_type = other RNA
tgtccttctggggaggggtctg

SEQ ID NO: 30694 - RNA, 22 nt, synthetic construct
  source 1..22: mol_type = other RNA
tgtctagtcaaaactgtgactg

SEQ ID NO: 30695 - RNA, 22 nt, synthetic construct
  source 1..22: mol_type = other RNA
tgtctcaatattatccagattg

SEQ ID NO: 30696 - RNA, 22 nt, synthetic construct
  source 1..22: mol_type = other RNA
tgtctcagtacatttctggcac

SEQ ID NO: 30697 - RNA, 22 nt, synthetic construct
  source 1..22: mol_type = other RNA
tgtctccatttacttctggatg

SEQ ID NO: 30698 - RNA, 22 nt, synthetic construct
  source 1..22: mol_type = other RNA
tgtctccgatttgagtgataag

SEQ ID NO: 30699 - RNA, 22 nt, synthetic construct
  source 1..22: mol_type = other RNA
tgtctcgacccttcagaatctc

SEQ ID NO: 30700 - RNA, 22 nt, synthetic construct
  source 1..22: mol_type = other RNA
tgtctggcaaatgggaggtgat

SEQ ID NO: 30701 - RNA, 22 nt, synthetic construct
  source 1..22: mol_type = other RNA
tgtctggtcaacaagctgcgca

SEQ ID NO: 30702 - RNA, 22 nt, synthetic construct
  source 1..22: mol_type = other RNA
tgtcttttctgaagaagttgtt

SEQ ID NO: 30703 - RNA, 22 nt, synthetic construct
  source 1..22: mol_type = other RNA
tgtgaacaggaatgacatacag

SEQ ID NO: 30704 - RNA, 22 nt, synthetic construct
  source 1..22: mol_type = other RNA
tgtgaactctgggatggttgtg

SEQ ID NO: 30705 - RNA, 22 nt, synthetic construct
  source 1..22: mol_type = other RNA
tgtgaagaagatcttgctttgg

SEQ ID NO: 30706 - RNA, 22 nt, synthetic construct
  source 1..22: mol_type = other RNA
tgtgactggccctgacatttca

SEQ ID NO: 30707 - RNA, 22 nt, synthetic construct
  source 1..22: mol_type = other RNA
tgtgacttcctccctggtcagg

SEQ ID NO: 30708 - RNA, 22 nt, synthetic construct
  source 1..22: mol_type = other RNA
tgtgacttctgctcctgttctt

SEQ ID NO: 30709 - RNA, 22 nt, synthetic construct
  source 1..22: mol_type = other RNA
tgtgacttgtgctccagctgtg

SEQ ID NO: 30710 - RNA, 22 nt, synthetic construct
  source 1..22: mol_type = other RNA
tgtgagatcactcacccatcgc

SEQ ID NO: 30711 - RNA, 22 nt, synthetic construct
  source 1..22: mol_type = other RNA
tgtgagatgtggttttctgcac

SEQ ID NO: 30712 - RNA, 22 nt, synthetic construct
  source 1..22: mol_type = other RNA
tgtgagggtttttggaactgga

SEQ ID NO: 30713 - RNA, 22 nt, synthetic construct
  source 1..22: mol_type = other RNA
tgtgagtcctgactttacacaa

SEQ ID NO: 30714 - RNA, 22 nt, synthetic construct
  source 1..22: mol_type = other RNA
tgtgagttctgtagcccaagaa

SEQ ID NO: 30715 - RNA, 22 nt, synthetic construct
  source 1..22: mol_type = other RNA
tgtgagtttgaaaatggctcag

SEQ ID NO: 30716 - RNA, 22 nt, synthetic construct
  source 1..22: mol_type = other RNA
tgtgataatgtgcagcaaaaga

SEQ ID NO: 30717 - RNA, 22 nt, synthetic construct
  source 1..22: mol_type = other RNA
tgtgatcccaaagcaagatctt

SEQ ID NO: 30718 - RNA, 22 nt, synthetic construct
  source 1..22: mol_type = other RNA
tgtgatgcaagttttgggtctt

SEQ ID NO: 30719 - RNA, 22 nt, synthetic construct
  source 1..22: mol_type = other RNA
tgtgatgctgatgatgctgata

SEQ ID NO: 30720 - RNA, 22 nt, synthetic construct
  source 1..22: mol_type = other RNA
tgtgatggtggtggtggtgtgg

SEQ ID NO: 30721 - RNA, 22 nt, synthetic construct
  source 1..22: mol_type = other RNA
tgtgatttgagagtaagagcct

SEQ ID NO: 30722 - RNA, 22 nt, synthetic construct
  source 1..22: mol_type = other RNA
tgtgcagcaaaagagcatcatt

SEQ ID NO: 30723 - RNA, 22 nt, synthetic construct
  source 1..22: mol_type = other RNA
tgtgcagtcactgtgtggcact

SEQ ID NO: 30724 - RNA, 22 nt, synthetic construct
  source 1..22: mol_type = other RNA
tgtgcatacaggcatgtggctt

SEQ ID NO: 30725 - RNA, 22 nt, synthetic construct
  source 1..22: mol_type = other RNA
tgtgcatctgactatggcaaga

SEQ ID NO: 30726 - RNA, 22 nt, synthetic construct
  source 1..22: mol_type = other RNA
tgtgcccccaacacagcactat

SEQ ID NO: 30727 - RNA, 22 nt, synthetic construct
  source 1..22: mol_type = other RNA
tgtgcctgaccagggaggaagt

SEQ ID NO: 30728 - RNA, 22 nt, synthetic construct
  source 1..22: mol_type = other RNA
tgtgcggaattgatctgccctg

SEQ ID NO: 30729 - RNA, 22 nt, synthetic construct
  source 1..22: mol_type = other RNA
tgtgcgttttattcctccattt

SEQ ID NO: 30730 - RNA, 22 nt, synthetic construct
  source 1..22: mol_type = other RNA
tgtgctccagctgtgttgtttt

SEQ ID NO: 30731 - RNA, 22 nt, synthetic construct
  source 1..22: mol_type = other RNA
tgtgctgcctgtttatgaggct

SEQ ID NO: 30732 - RNA, 22 nt, synthetic construct
  source 1..22: mol_type = other RNA
tgtggaagaggaggagggggag

SEQ ID NO: 30733 - RNA, 22 nt, synthetic construct
  source 1..22: mol_type = other RNA
tgtggatggccccgaagcaagc

SEQ ID NO: 30734 - RNA, 22 nt, synthetic construct
  source 1..22: mol_type = other RNA
tgtggcactagatttcattttc

SEQ ID NO: 30735 - RNA, 22 nt, synthetic construct
  source 1..22: mol_type = other RNA
tgtggctatcaagttctgcagc

SEQ ID NO: 30736 - RNA, 22 nt, synthetic construct
  source 1..22: mol_type = other RNA
tgtggcttgcatccaggttcca

SEQ ID NO: 30737 - RNA, 22 nt, synthetic construct
  source 1..22: mol_type = other RNA
tgtggtagtggcagaaaaggaa

SEQ ID NO: 30738 - RNA, 22 nt, synthetic construct
  source 1..22: mol_type = other RNA
tgtggttccctggatgttattt

SEQ ID NO: 30739 - RNA, 22 nt, synthetic construct
  source 1..22: mol_type = other RNA
tgtggttttctgcaccgcaatg

SEQ ID NO: 30740 - RNA, 22 nt, synthetic construct
  source 1..22: mol_type = other RNA
tgtgtaaagtcaggactcacac

SEQ ID NO: 30741 - RNA, 22 nt, synthetic construct
  source 1..22: mol_type = other RNA
tgtgtagatggattaggactct

SEQ ID NO: 30742 - RNA, 22 nt, synthetic construct
  source 1..22: mol_type = other RNA
tgtgtaggtaagtgccagaaat

SEQ ID NO: 30743 - RNA, 22 nt, synthetic construct
  source 1..22: mol_type = other RNA
tgtgtagtctgttctttattct

SEQ ID NO: 30744 - RNA, 22 nt, synthetic construct
  source 1..22: mol_type = other RNA
tgtgtattgtttgaacaagaaa

SEQ ID NO: 30745 - RNA, 22 nt, synthetic construct
  source 1..22: mol_type = other RNA
tgtgtctcagtacatttctggc

SEQ ID NO: 30746 - RNA, 22 nt, synthetic construct
  source 1..22: mol_type = other RNA
tgtgtgaacaggaatgacatac

SEQ ID NO: 30747 - RNA, 22 nt, synthetic construct
  source 1..22: mol_type = other RNA
tgtgtgcatacaggcatgtggc

SEQ ID NO: 30748 - RNA, 22 nt, synthetic construct
  source 1..22: mol_type = other RNA
tgtgtggcactagatttcattt

SEQ ID NO: 30749 - RNA, 22 nt, synthetic construct
  source 1..22: mol_type = other RNA
tgtgtgtgttccacggaagagg

SEQ ID NO: 30750 - RNA, 22 nt, synthetic construct
  source 1..22: mol_type = other RNA
tgtgtgttccacggaagaggca

SEQ ID NO: 30751 - RNA, 22 nt, synthetic construct
  source 1..22: mol_type = other RNA
tgtgttactttggttggggtag

SEQ ID NO: 30752 - RNA, 22 nt, synthetic construct
  source 1..22: mol_type = other RNA
tgtgttccacggaagaggcaga

SEQ ID NO: 30753 - RNA, 22 nt, synthetic construct
  source 1..22: mol_type = other RNA
tgtgttctgagaaaacaagacc

SEQ ID NO: 30754 - RNA, 22 nt, synthetic construct
  source 1..22: mol_type = other RNA
tgtgttgaaaaactggtgaaat

SEQ ID NO: 30755 - RNA, 22 nt, synthetic construct
  source 1..22: mol_type = other RNA
tgtgttgggggcacaagatctc

SEQ ID NO: 30756 - RNA, 22 nt, synthetic construct
  source 1..22: mol_type = other RNA
tgtgttgttttctgggtgtaag

SEQ ID NO: 30757 - RNA, 22 nt, synthetic construct
  source 1..22: mol_type = other RNA
tgtgtttccattgcggtgcaga

SEQ ID NO: 30758 - RNA, 22 nt, synthetic construct
  source 1..22: mol_type = other RNA
tgtgtttgctgctgttcttgct

SEQ ID NO: 30759 - RNA, 22 nt, synthetic construct
  source 1..22: mol_type = other RNA
tgtgtttgtgctgcctgtttat

SEQ ID NO: 30760 - RNA, 22 nt, synthetic construct
  source 1..22: mol_type = other RNA
tgttaatggcatttatgtgaga

SEQ ID NO: 30761 - RNA, 22 nt, synthetic construct
  source 1..22: mol_type = other RNA
tgttactttggttggggtagtg

SEQ ID NO: 30762 - RNA, 22 nt, synthetic construct
  source 1..22: mol_type = other RNA
tgttattttctgcaggagatgg

SEQ ID NO: 30763 - RNA, 22 nt, synthetic construct
  source 1..22: mol_type = other RNA
tgttcaaacaatacacacctag

SEQ ID NO: 30764 - RNA, 22 nt, synthetic construct
  source 1..22: mol_type = other RNA
tgttcacacaattattctgagg

SEQ ID NO: 30765 - RNA, 22 nt, synthetic construct
  source 1..22: mol_type = other RNA
tgttcactaaggattccttttc

SEQ ID NO: 30766 - RNA, 22 nt, synthetic construct
  source 1..22: mol_type = other RNA
tgttcaggttccagcagcaatt

SEQ ID NO: 30767 - RNA, 22 nt, synthetic construct
  source 1..22: mol_type = other RNA
tgttccacggaagaggcagaaa

SEQ ID NO: 30768 - RNA, 22 nt, synthetic construct
  source 1..22: mol_type = other RNA
tgttccatcaggcttgcttcgg

SEQ ID NO: 30769 - RNA, 22 nt, synthetic construct
  source 1..22: mol_type = other RNA
tgttccattgtgttctgagaaa

SEQ ID NO: 30770 - RNA, 22 nt, synthetic construct
  source 1..22: mol_type = other RNA
tgttcctttcagaaaccagaac

SEQ ID NO: 30771 - RNA, 22 nt, synthetic construct
  source 1..22: mol_type = other RNA
tgttctgacattggtcttgttt

SEQ ID NO: 30772 - RNA, 22 nt, synthetic construct
  source 1..22: mol_type = other RNA
tgttctgagaaaacaagaccaa

SEQ ID NO: 30773 - RNA, 22 nt, synthetic construct
  source 1..22: mol_type = other RNA
tgttctggtttctgaaaggaac

SEQ ID NO: 30774 - RNA, 22 nt, synthetic construct
  source 1..22: mol_type = other RNA
tgttcttctaaaactccaccat

SEQ ID NO: 30775 - RNA, 22 nt, synthetic construct
  source 1..22: mol_type = other RNA
tgttcttgaaagcacctgtgaa

SEQ ID NO: 30776 - RNA, 22 nt, synthetic construct
  source 1..22: mol_type = other RNA
tgttcttgcttctgtaagagat

SEQ ID NO: 30777 - RNA, 22 nt, synthetic construct
  source 1..22: mol_type = other RNA
tgttcttgtcatggtaattagc

SEQ ID NO: 30778 - RNA, 22 nt, synthetic construct
  source 1..22: mol_type = other RNA
tgttctttattctctgaaacta

SEQ ID NO: 30779 - RNA, 22 nt, synthetic construct
  source 1..22: mol_type = other RNA
tgttcttttggttggtgtcttt

SEQ ID NO: 30780 - RNA, 22 nt, synthetic construct
  source 1..22: mol_type = other RNA
tgttgaaaaactggtgaaatct

SEQ ID NO: 30781 - RNA, 22 nt, synthetic construct
  source 1..22: mol_type = other RNA
tgttgaaaatgaaatctagtgc

SEQ ID NO: 30782 - RNA, 22 nt, synthetic construct
  source 1..22: mol_type = other RNA
tgttgaaacagcacttgaatca

SEQ ID NO: 30783 - RNA, 22 nt, synthetic construct
  source 1..22: mol_type = other RNA
tgttgaccagacatatcttggt

SEQ ID NO: 30784 - RNA, 22 nt, synthetic construct
  source 1..22: mol_type = other RNA
tgttgagggcaacagactaagt

SEQ ID NO: 30785 - RNA, 22 nt, synthetic construct
  source 1..22: mol_type = other RNA
tgttgattcaagtgctgtttca

SEQ ID NO: 30786 - RNA, 22 nt, synthetic construct
  source 1..22: mol_type = other RNA
tgttgcaaaaggtgtgagtttg

SEQ ID NO: 30787 - RNA, 22 nt, synthetic construct
  source 1..22: mol_type = other RNA
tgttgccctcaacatggttggt

SEQ ID NO: 30788 - RNA, 22 nt, synthetic construct
  source 1..22: mol_type = other RNA
tgttgctggttttgagggagat

SEQ ID NO: 30789 - RNA, 22 nt, synthetic construct
  source 1..22: mol_type = other RNA
tgttgctttgggggtgaggaaa

SEQ ID NO: 30790 - RNA, 22 nt, synthetic construct
  source 1..22: mol_type = other RNA
tgttggaatttccagtgtattg

SEQ ID NO: 30791 - RNA, 22 nt, synthetic construct
  source 1..22: mol_type = other RNA
tgttgggggcacaagatctcgt

SEQ ID NO: 30792 - RNA, 22 nt, synthetic construct
  source 1..22: mol_type = other RNA
tgttggtccactgtaccttggg

SEQ ID NO: 30793 - RNA, 22 nt, synthetic construct
  source 1..22: mol_type = other RNA
tgttgtagttgttctggtttct

SEQ ID NO: 30794 - RNA, 22 nt, synthetic construct
  source 1..22: mol_type = other RNA
tgttgtgacttctgctcctgtt

SEQ ID NO: 30795 - RNA, 22 nt, synthetic construct
  source 1..22: mol_type = other RNA
tgttgtgttactttggttgggg

SEQ ID NO: 30796 - RNA, 22 nt, synthetic construct
  source 1..22: mol_type = other RNA
tgttgttgtagttgttctggtt

SEQ ID NO: 30797 - RNA, 22 nt, synthetic construct
  source 1..22: mol_type = other RNA
tgttgttttctgggtgtaagct

SEQ ID NO: 30798 - RNA, 22 nt, synthetic construct
  source 1..22: mol_type = other RNA
tgtttatgaggcttatgttgca

SEQ ID NO: 30799 - RNA, 22 nt, synthetic construct
  source 1..22: mol_type = other RNA
tgtttcaacactggggacataa

SEQ ID NO: 30800 - RNA, 22 nt, synthetic construct
  source 1..22: mol_type = other RNA
tgtttcaatttcttgatctgaa

SEQ ID NO: 30801 - RNA, 22 nt, synthetic construct
  source 1..22: mol_type = other RNA
tgtttccattgcggtgcagaaa

SEQ ID NO: 30802 - RNA, 22 nt, synthetic construct
  source 1..22: mol_type = other RNA
tgtttcctgcaaaaagttcagg

SEQ ID NO: 30803 - RNA, 22 nt, synthetic construct
  source 1..22: mol_type = other RNA
tgtttctcatcaactgctggca

SEQ ID NO: 30804 - RNA, 22 nt, synthetic construct
  source 1..22: mol_type = other RNA
tgtttgaacaagaaacctgtat

SEQ ID NO: 30805 - RNA, 22 nt, synthetic construct
  source 1..22: mol_type = other RNA
tgtttgcaaaatggaggaataa

SEQ ID NO: 30806 - RNA, 22 nt, synthetic construct
  source 1..22: mol_type = other RNA
tgtttgctccttgtctcgaccc

SEQ ID NO: 30807 - RNA, 22 nt, synthetic construct
  source 1..22: mol_type = other RNA
tgtttgctgctctaaagctggg

SEQ ID NO: 30808 - RNA, 22 nt, synthetic construct
  source 1..22: mol_type = other RNA
tgtttgctgctgttcttgcttc

SEQ ID NO: 30809 - RNA, 22 nt, synthetic construct
  source 1..22: mol_type = other RNA
tgtttggaggtcatttgattgg

SEQ ID NO: 30810 - RNA, 22 nt, synthetic construct
  source 1..22: mol_type = other RNA
tgtttgtgctgcctgtttatga

SEQ ID NO: 30811 - RNA, 22 nt, synthetic construct
  source 1..22: mol_type = other RNA
tgttttaaataccgttcagagc

SEQ ID NO: 30812 - RNA, 22 nt, synthetic construct
  source 1..22: mol_type = other RNA
tgttttcatggtgaaaatcagt

SEQ ID NO: 30813 - RNA, 22 nt, synthetic construct
  source 1..22: mol_type = other RNA
tgttttctcagaacacaatgga

SEQ ID NO: 30814 - RNA, 22 nt, synthetic construct
  source 1..22: mol_type = other RNA
tgttttctgggtgtaagcttgc

SEQ ID NO: 30815 - RNA, 22 nt, synthetic construct
  source 1..22: mol_type = other RNA
tgttttctggtggtgctgtgtg

SEQ ID NO: 30816 - RNA, 22 nt, synthetic construct
  source 1..22: mol_type = other RNA
tgttttggagaagtgcacctgg

SEQ ID NO: 30817 - RNA, 22 nt, synthetic construct
  source 1..22: mol_type = other RNA
tgttttgttttctggtggtgct

SEQ ID NO: 30818 - RNA, 22 nt, synthetic construct
  source 1..22: mol_type = other RNA
tgtttttcctgtgcctgaccag

SEQ ID NO: 30819 - RNA, 22 nt, synthetic construct
  source 1..22: mol_type = other RNA
tgttttttccaggagttcacca

SEQ ID NO: 30820 - RNA, 22 nt, synthetic construct
  source 1..22: mol_type = other RNA
ttaaaaacaaggcagtgctaat

SEQ ID NO: 30821 - RNA, 22 nt, synthetic construct
  source 1..22: mol_type = other RNA
ttaaaagtgttgtgttactttg

SEQ ID NO: 30822 - RNA, 22 nt, synthetic construct
  source 1..22: mol_type = other RNA
ttaaagatttcaccagtttttc

SEQ ID NO: 30823 - RNA, 22 nt, synthetic construct
  source 1..22: mol_type = other RNA
ttaaataccgttcagagctgcc

SEQ ID NO: 30824 - RNA, 22 nt, synthetic construct
  source 1..22: mol_type = other RNA
ttaacagtcaggctactaatga

SEQ ID NO: 30825 - RNA, 22 nt, synthetic construct
  source 1..22: mol_type = other RNA
ttaactgcattttcttgggcta

SEQ ID NO: 30826 - RNA, 22 nt, synthetic construct
  source 1..22: mol_type = other RNA
ttaagggaagtgaaaatagagg

SEQ ID NO: 30827 - RNA, 22 nt, synthetic construct
  source 1..22: mol_type = other RNA
ttaaggtggaacctggatgcaa

SEQ ID NO: 30828 - RNA, 22 nt, synthetic construct
  source 1..22: mol_type = other RNA
ttaatggcatttatgtgagatg

SEQ ID NO: 30829 - RNA, 22 nt, synthetic construct
  source 1..22: mol_type = other RNA
ttaattggcctgtgcatctgac

SEQ ID NO: 30830 - RNA, 22 nt, synthetic construct
  source 1..22: mol_type = other RNA
ttacacaagaaagtagagggta

SEQ ID NO: 30831 - RNA, 22 nt, synthetic construct
  source 1..22: mol_type = other RNA
ttacacccagaaaacaacacag

SEQ ID NO: 30832 - RNA, 22 nt, synthetic construct
  source 1..22: mol_type = other RNA
ttacagaagcaagaacagcagc

(The sequence listing continues in the following parts.)